United States Patent Application Publication US 2005/0228172 A9 - sequence listing, part 179

SEQ ID NO: 802839 - DNA, 614 bp, Homo sapiens
ttgtatgcctgttggtccattctctgtactagttatttgcaattaaatgagtcaagaagagagaatggaagaaactgatgagaaaaagtacactttggtaccaaagtgtaccaaatatttatattaaataattttctgttggtaacattcaaatttctcactgtcagcaaaacttcagcagaaatttcagatcatgatggttgatgtgacttggtgcccaaaagtaactgtgcttaagttacataaataactaaagcctgtcacagatgtttttatctactagcccatgatctattttatctttgaacttaaggagtccaaaaagatttgtccagagacatgttgtgtttataggtgyagtctagtgggcatgctgagtatctatttttctaaacacactatgttgcatcctgattaagtcatttatatgcaaatgttacactgaatgagatacctggtttttaaggcttctccattgtgcataacgcctccatcataaacgttgctcacatgtttagatatttattcctcactgagatatttttatcatcgattgacagaaatataccagtgattgctcagtactatatactatgccaattttcaaatagtct

SEQ ID NO: 802840 - DNA, 505 bp, Homo sapiens
ccctccttgtcttttttaactggtgttgtttcaaagttttgttttgttttttctgatactggtgtccatttgcatggaatatcttttaccactcatttaccttaagtttatttgcgtccttatgtgtcaggtgagtctcttgaagacagcagatagttggttggtgaatttttatccattctgccatttcgtatcttttaagtggagtatttaggccatttacagtcaacattagtatgcagatgtaaggtactattctattcatcatgctagttgtttcctaaatrcctttttttttccactgtgttgttattttataggtcctgtgatatttatgctttacacttattctattttggtgtatttttagatttgtttcaaaatttagagctctttttagcagttcctgtagtactggctaagtggtaaattctcttagcatttgtttgcttgaaaaacactaccttttcttcattcatgaagccagtttccctgtatacaaaat

SEQ ID NO: 802841 - DNA, 619 bp, Homo sapiens
caaatttaccatgcagcaaagcggttgctctgttttcattaagattaatacaaactagaattaaatgcaaaatctcctattttgttatacaacttctttaaggaaatcacaggttccgtggtacagaaattgtttttaccatttaagctagagtactatggtgctgaaagaaagacatacgtctcaggcttatgtaatttcagcagaaattttctttaaacaaaatatttattttatcttctyatttctacacataaacagaatattcatgttgtagcttgcataactatgtattgttggaagtaaagcacaaaaacatttagggctcatggcttagctgacaagacaaagaaacaaaacattgaactcagtaagaaatttttccttgccaaaacttaaggaaggaaattcctatacctgggcatcaataatcttatagatttgtttcaaaatgacttttgtgacactcagattcatttatatgaatctgtaaaattagcagtgcattagtttctatttttgttggctgagaaagcttctgttcacacagtgcttttaaataatagtagaattgtaaatatgtaaataaaaataagttgataattttattagtccattt

SEQ ID NO: 802842 - DNA, 643 bp, Homo sapiens
accttcattgtcctgatgtgtttttttaatttcttatttaaaaaatacatttgcaattattaaaattgtattatgggtatatacgcttctatttgctctgctgttttcctccttagttgctggtcaattctcccaggtcttcactatttttttcattatattcctatgataatcatgtgagatcacaatagtttcaatactccatgctaatcttttgacacaatgatatatttaaaaatatatagctctccatataacattattccaaagaattgtatgagaccctctcttcacatttcacttacagaatgatttcaaaaacagccaatttcatcatagaaaataattgcttatttttctgataaataacatctctaagtttttctctgtaatgagggtgacaataggaaagggatatattattttctcttctttccaacactgcattgtttaatgagttaaggatgtgcatggcaacatttctcgatataaagtcaatgrtatttaatttaatgatagattttcaccaattctgccaacacattgcctgacagcgttagctttcttcttgttgagaattccaccatcttctgtactatgattactacttggtgacaaacttgtgcaaaaccatttttgagta

SEQ ID NO: 802843 - DNA, 590 bp, Homo sapiens
attgatggtcaaattacatcaagaaaaacttagagctccaatgatcaacctgcaactatagagctaatatgtagagtcagccaggttctctgtctagctatgttttcccacttcctttgatctattcacgtttctaatggtgttgagttaaaactcattgtttacagtatcactaattcaaggctccttggagattttttgtttttcatacaattcagccagttctagctacaatgtaaacattaaaaatttaaacataagctcatttaaaattgaataaaaaaagtaaaaggggttttaaaaatcaaatttttgtaggaacagttttagccaaaattttgrttcatggcattcaataaattttccatatgagcaagaagagtttagccacatgaacagttctcaattttatcagacataatttggatccaactgttatttataaacaaatgaatttatattactattttatgtctgaagctctaaagtgaaaactattagatctttgagtgtgagggcatatgtgtttacatgtttacatacatgtacatattttgtgttacatgctgtttttacatggtatcaaattg

SEQ ID NO: 802844 - DNA, 590 bp, Homo sapiens
attgatggtcaaattacatcaagaaaaacttagagctccaatgatcaacctgcaactatagagctaatatgtagagtcagccaggttctctgtctagctatgttttcccacttcctttgatctattcacgtttctaatggtgttgagttaaaactcattgtttacagtatcactaattcaaggctccttggagattttttgtttttcatacaattcagccagttctagctacaatgtaaacattaaaaatttaaacataagctcatttaaaattgaataaaaaaagtaaaaggggttttaaaaatcaaatttttgtaggaacagttttagccaaaattttgattcatggcattcaataaattttccatmtgagcaagaagagtttagccacatgaacagttctcaattttatcagacataatttggatccaactgttatttataaacaaatgaatttatattactattttatgtctgaagctctaaagtgaaaactattagatctttgagtgtgagggcatatgtgtttacatgtttacatacatgtacatattttgtgttacatgctgtttttacatggtatcaaattg

SEQ ID NO: 802845 - DNA, 607 bp, Homo sapiens
tgaagtgacattcaatgtttatggattggaaatctaatattgctaaaatggcaatactttccaaattgattcacagattcaatataattcctattaaaatcctggtttgcttatttgaagaaactgatgaattcattaaaaaatttatatggatatctaaagaccmagaagagccaagccaatcttcaaatgtgctaaaatataaaacttttagacgaaacataagcatatctatcaaagaagaaatatgaacagcaattaagagaaaaatttaaagaaagcactctaaactatcaagcacacttttttaaattttatttcagatatggaggaaaacattaaactacataaaatcctacaaaacacagcaaaaaaatgaaaattacacagttgaactcataggattaataaactagcactagtgttaaagtagcatattataacattgatacataagcaaaaactgtgggtctaacttgcaagtttatgtggaaaaaatagaacacacccaaattaactttattctttattccaacattttacataggaatttcaattaccagcaagataccccaactccaggcttttgaggaagcctaaaaggttg

SEQ ID NO: 802846 - DNA, 607 bp, Homo sapiens
tgaagtgacattcaatgtttatggattggaaatctaatattgctaaaatggcaatactttccaaattgattcacagattcaatataattcctattaaaatcctggtttgcttatttgaagaaactgatgaattcattaaaaaatttatatggatatctaaagaccaagaagagccaagccaatcttcaaatgtgctaaaatataaaacttttagacgaaacataagcatatctatcaaagaagaaatatgaacagcaattaagagaaaaatttaaagaaagcactctaaactatcaagcacacttttttaaattttatttcagatatggaggaaaacattaaactacataaaatcctacaaaacacagcaaaaaaatgaaaattacacagttgaactcataggattaataaactagcactagtgttaaagtagcatattataacattgatacataagcaaaaactgtrggtctaacttgcaagtttatgtggaaaaaatagaacacacccaaattaactttattctttattccaacattttacataggaatttcaattaccagcaagataccccaactccaggcttttgaggaagcctaaaaggttg

SEQ ID NO: 802847 - DNA, 500 bp, Homo sapiens
aatttcttctctcacctagtgactacacagggttttttcatgggacaggttctcatcctatctgcccacgttttcacttaaattttatttttatcagatgtctcttaaagctccatgtcatagtccattttttgctgctacaaaagaatatctgaaactggataatttatttaaaaagcagtgatttatttcttacagctckagaggctgagaagttcaaagtcaagggggcctacatctggttagagtcttctcactgagccatcccatggtgaaagacagaagagcaagaaaccacatatgcttgtgtatgagagagatcaaacttgcagcctcaagccttttaacaatcagtaataatgcattcatgtgggtggagcccttatgacataaacatcttttcttacgcccaactttccaacactgttgcactggggattaagtttccaacacatgcttcttaggggacacattcaagccatagctctccaccacagccc

SEQ ID NO: 802848 - DNA, 632 bp, Homo sapiens; identical to SEQ ID NO: 728500

SEQ ID NO: 802849 - DNA, 613 bp, Homo sapiens; identical to SEQ ID NO: 728502

SEQ ID NO: 802850 - DNA, 613 bp, Homo sapiens; identical to SEQ ID NO: 728503

SEQ ID NO: 802851 - DNA, 613 bp, Homo sapiens; identical to SEQ ID NO: 728504

SEQ ID NO: 802852 - DNA, 600 bp, Homo sapiens; identical to SEQ ID NO: 728505

SEQ ID NO: 802853 - DNA, 529 bp, Homo sapiens
ttatgctgtgtgaaataagccggataaaaagagtgtaataattgatatggttcggctgtgtccacacccaaatctcatcttgaatcgtagctcccgtaattcccacatgttgtgggagggacctggtttggtgggaggtaattgaatcatgggggcaggtctatcctgtgctgttctcgtgatagtgaataagtctcacaagatctgatggttttaataaagaggagtttccctgcacaagttctgttcttctctcttgtctgttgccatgtaaracatgcctttcaccttccgccatgattgtaaggcctcctcagccacgtgaggcctttttctttataattacccagtctccagtatgtctttatcagcagcgtgaaaatgggctaatacaatactttatgaatctttttctatacaattattttaaagattcaaaataaatgacaatgagtgagagaaggaggatcaatgactgcttgagaggtggtggatggtgctgctataggaaggatgacagatgggtacc

SEQ ID NO: 802854 - DNA, 547 bp, Homo sapiens; identical to SEQ ID NO: 728506

SEQ ID NO: 802855 - DNA, 604 bp, Homo sapiens; identical to SEQ ID NO: 728499

SEQ ID NO: 802856 - DNA, 437 bp, Homo sapiens
tatgaagcatctaccactgcctttgacttaaccctttttatgtctgagcttcaatcatgaggttttcaaaaattatttctagaaagcaagttgggtttcttcaatagacagtggagtgttttgctccagagtactgaaatattctgttgtgatgttggaaactttcaccaattaaggacaaaaaccttctcataggtgtgtatatatatatatatatacacacctatgagtgatayacacacacacacacacacacacacacacacacacagagagagagtttgtgtcttttacaggaatcattttaggagttcatgtagacttattttattgaggctgttgagcaaaaattttttttctacttctccttgtgaattttatttgggtattatttgaatagtctcagaagtagcagatctttattttttaggataatt

SEQ ID NO: 802857 - DNA, 603 bp, Homo sapiens
atgttggccaggctggtcttgaactcctgacctcaggtgatctgcctgcttcagcctcccaaagtgctaggattacaggtgtgagccactgcacccagccaagacttttttttgttgttgttacgctaaggaaatttctgttataacaacatactggtactttgtatcagctgggactttggcggcttgacttattcaaggattatgcacttgcaacacggtggtcctggctgggttaggttaacagggttccygggacccgaaagacaatactgggtacttagaagtgtctgtattgtttcccgtcattcttaagggactcagaagtcccttgggaaggaagttgattcctgttgatgatgggttatattctcatagcttatgacgccatgatatgtcataagtctcatctcatctgagacactgcatctcagtctttctcctgccacctgtgaagaattccagatgtttccataggccccacacaaaggcttaagttcacatcagaactgtctgattattcttagtttacacatcagaactgtctgattattcttagagtttacagaaattgtaaaaaatatttctgggatatttgaattc

SEQ ID NO: 802858 - DNA, 563 bp, Homo sapiens
gtgagcacgtgggtgggtgggaatatgcacgtatgtgagtgtgactacatagaatgtgagaatgcacatatgtgtctgtgtgtgtgtgtttgtgtgtgttgtatgtgagagtcagtgtataggtacattgctcctagaggtcactgtacttgtttcctattgccactgtgacaaaattaccgcacatwtagtggcttgaaacaacacacatttgttatcttacagttctggaggtcagaggctgaaatgggcctcactgggctaaaatcaaggtgtgagcagggctgtgttctttctggaggctctagaggagaaactgcatcttgctttgtggcactttctccatcttcaaagccagcctttctcctcttgaatcctctgacctgctcctctgcctctctcttctgcttttaaggatccttgtgattacattggccctgcctgaataatgcagtataatctctttctcttaaagtcgactaattagcaaacttaattccatctgcagccctcgtttccatgtaacccaacatatgcacagattctggtgattaggagggtga

SEQ ID NO: 802859 - DNA, 563 bp, Homo sapiens
gtgagcacgtgggtgggtgggaatatgcacgtatgtgagtgtgactacatagaatgtgagaatgcacatatgtgtctgtgtgtgtgtgtttgtgtgtgttgtatgtgagagtcagtgtataggtacattgctcctagaggtcactgtacttgtttcctattgccactgtgacaaaattaccgcacatatagtggcttgaaacaacacacatttgttatcttacagttctggaggtcagaggctgaaatgggcctcactgggctaaaatcaaggtgtgagcagggctgtgttctttctggaggctctagaggagaaactgcaycttgctttgtggcactttctccatcttcaaagccagcctttctcctcttgaatcctctgacctgctcctctgcctctctcttctgcttttaaggatccttgtgattacattggccctgcctgaataatgcagtataatctctttctcttaaagtcgactaattagcaaacttaattccatctgcagccctcgtttccatgtaacccaacatatgcacagattctggtgattaggagggtga

SEQ ID NO: 802860 - DNA, 591 bp, Homo sapiens
tatgcaatcagttttaatggctaggtaaggttttatccaatgaatgtaacattacatttctagtgagctgggtctggtctaagaatgacactgttgggaaatgaagtgattcttgccattccttgcctcttctgcaggcttttctttacttttttttttttttttttttacagtatctcactctgtcatacaggatggagtgcagtggcgtgatctcggctcactgcaacctccacctctggggttcaagtgattctcatgcctcagcctcccgagtagctgggattacaggcatgtgctactatggcctggctaatttttctgttttagtagaaatggagtttcaccatgttggccaggctggtctggaactcctggcctcaagtgatccacccgccttggcctcccaaagtgctgggatttcaggcatgagccaccrtccccagccatctgcaggcttttcaaacttgcctgaaagtgacagcattcactacttgcctcttatcattaatcttgattttcccccaaaccaaagtggtctgaggaagcaaagactaattatttgcaatggatcagggcttgaacacttaa

SEQ ID NO: 802861 - DNA, 609 bp, Homo sapiens
cactccccaccaactgggtaaggaaaccacaaatccagtccccaaacccacatctattttgccttttcaaaatgtgttgtaaaatattagaaggaaaatggtctggaacttctaaggattaagaagaaattcacatcagcagaaagcaagactgtaaaccccccgggagctgaagagctcagttccagagccagattgtataagacggggcttcaaaactaatctggagccatcttatgtaaaacaaattgtccgccaacaggaagcctcaaaacagggtgcagattatgaaggaatgaaatggattccaggctgctatgaggattttcttgattgaaacaagaccaayctatggaaccatgctctgtgtgagtccaccatttcccccttctctgcaaaaacatgaaagaaagcatgtagaatttttgttgtggctggatttcataaggggaagatgcttctctgtgtaaaaagatatacaagagaaagctgtggttggaaatctgcagtgtaagcgacaaaaatctcaactcaaagttgcctttgcaaaaggaaatgattctggttctcaaagttgaaaagtccagagatggattttgcctttagata

SEQ ID NO: 802862 - DNA, 488 bp, Homo sapiens
gccatcagaagggtcctgtctccaggcaagattagctgcataatttgacggtccagtgcaaaaataatatgcaggactcagtgttaaaaatgtattaagaattttgggctgggcgcagtggctcctgtctgtaatcccagcmctttggggggccaaggtgggtggattgcttgagcctaggagttcaagaccagcctaggcaacatggtgaaactgtatctctacaaaaaattagccagacgtggtggcatgcacctgtagtcccagttactcaggaggctgaggtgggaggaccacctgagcccaggaagtcaaggctatggtgagctgtgattgggttattgcattctagcctgggcgatggagtaaaaccctttctcaaaaaaaaaaaaaaaaaaaaaaagagacagagagagaatttcaagacaaaatagcagagtgctcaacggagtgcagggtccttttgagttcaggatcctgactgagtg

SEQ ID NO: 802863 - DNA, 639 bp, Homo sapiens
atagaagccttaagagtagagggactttaattttttcactgccatattccctgtgccaaaatgatgcctggcacatagttggcattcaataaaaatctggcccagtgaacttcatgctactctgaaaagtttattaaatgtatccaaggtgaccaagacattaacctgcatttataatgaactatataaataaatgtagtcaacaaatattttattaactcaaaagtaagaatgatctgtgttatcttcacatggtttgtttaccaaatacagaccatataccagtcgtttttaggcaccggtgataaaaacacccaggtccttatcttaaggggctcataaatgtgtgtgtgtgtgtgtatgtgtgtgtaggaagtgggtgggaaagggaatataagcaagtaaacagtgtcactacactgtgtggtcaatacaattatggaggtaaacacaggtgcyggtgacataggggaagggcaggtagatctgaagggggatgaggaagggtgttggcaaagctttcgagaggagctgagaatacagttgagttgggaagaacaaatagtgattatccaaagaaagaatagggaagcgtaaatagggctggagaagcaacttgttctgggtagggaagcacca

SEQ ID NO: 802864 - DNA, 503 bp, Homo sapiens
ggtttgtaaattgactccaaagctaaaagaggtggttgtttggtcacgtttaagattattgcgtactactctttgcaggccccgccctgtgtcattgaacttatgacttgaagccctgagtataggagataatttttcttgttccttgtttggttttwgtggcaggtggttttttattttattatttttttgatagagtgcccatatatcctgctgtttacatatagttccagaataagtttctggtttggaagataaattatatggtcacccagacagtactagagagatctggtcatgataactaattacattttggttaacatggttatatcacctgaaggagtgcttatttaaatttggtcttacctttttttctctttctatttggtcaaatgcagcaaatatttatatttacacttctctatttggattaattcttcagttgcaatttaatttatccagatgcgtggaatagaaccaaaactgcattctaattctgt

SEQ ID NO: 802865 - DNA, 365 bp, Homo sapiens
accatctttccaagggtgttgttttgtgacagccttgataatatgtccttccagatcaaagggcaggttgcttacaccctaatcctgaaggtaaagacgttttctccctccaaagcaaagagcaggcatgcttactgtccattataaaagattcatgttccctgagctcagggttcctctcctgcartgcagtccacggtgtgtgcagatgccactgggcccactctgtgtcactgtttgggaaacggggctcggaaactggtgtgaaaagtatgctgatactctgttagaaaaaaatgccaacattctggctactgatattgctgtgagtaataaagtacttcatccttgaaaaaccaaaaggc

SEQ ID NO: 802866 - DNA, 646 bp, Homo sapiens
agatgtggcaaaattcggaacttcctagagatttgttaaatttttgtgaccaaaatgctgatagtgatacagacagtgaagtccaggctgagaaggtctcagatggagatgaggaactcgctgggaactggagcaaaggccacttttgctatgctttaacaaagaaactggcagcattgtgcccctgccctagagatctgtggaattttgaacttgagggagatgattttgggtatctggtggaagaaayttctaagcagcaaagcattcaagatgtggcctgggtgcttctaactgtctatgctcagatgtgtgagcaaagaaatgacctaaaacttgaatttatatttaaaagggaagcagaacataaaagtttggaaaatttgcagcctggccctgtggtaggaaagaaaagcctattttcagggctggaatgcaagcaagctgcagaaatttgcataagtaaagagaagccaagtactaatatccaagacagtggggagaaggtctccaaggcatttcagagacctttgcagcagcccctcccatcacaggcctggaggcctaggtgggaagaatggtttcatgggccaagtccaaggccccaacaccatgggacactgctccctgcatccctgccatttca

SEQ ID NO: 802867 - DNA, 537 bp, Homo sapiens
aagttttgccaattataaatacaaatggtatgaacatttgtatgcaggtttttgtgttgacatgttttcaactccttttggtaggtaccagaagtgtgcttgctgaagtaagcaaatgttatttttggaagaaactgtcaaactgtcttccaatatgtctgcattattttgcattcccacaatcaattaataggagttccctttgctcctcatcctcacaagcatttggtgttgtcagtgttttcattttattcattctaaaaggtgtgtggttgtatctcacrtagttttttaattggcaactacctgatgacagatgacatcaagtgtctctttatatttttatttggcattgtatacctcctttggtgaggttgtccatccagatcttttgccatttttaaaaatttggattgtttgttttcttattgttgagttttaacagttctttgtatatttgtatgtcagtcgttgatctagtatatgttttgcaaatattttattccagtctgctgctggtcatttcattctcttgat

SEQ ID NO: 802868 - DNA, 622 bp, Homo sapiens
agttgactatatttatgtgagcctatttctgggatctctactgtgttccattgaacattttttcaatttttttaatatagcatttattctgtttgtctattctttcactgataccactgtcttgatactgtagctttatattaagtctggagatcaagttgcgttagttagttctccaactctgttattcttcaatattgaactggctactttgggtcttctacctttctataaaaagtttagaaccatttgttgacatccacaaaataatttgctgggattttgattcgaattgccttgaatatacagataaatttggaaaaaaccgaacatatctgatagttagtctttytacccatgaacctggaatatctctccacttatttaggtctgctttgatttctttcatcagtattttgcagtttttctcacatagattttatagatacttattttcagatagataccttaagtattttattttattggtgctaacataagtgatattttgttttttatttcaaatttccgtattttcatcttcagtatataagacagcaattgacctttaaatattaatcttgtatcttacaacattgccataattacttactagttccag

SEQ ID NO: 802869 - DNA, 448 bp, Homo sapiens
tcacatatacattatattatatgaaatgttaatatatataatatgcatcatatattgatttaatatataaacataatatattacatattacatcttataaatataactttatatttaataatattacctaaatatatcttctgattcagtgtcttccccctactacttccttcttcaaaatttgccttgtgcctttaaaccatgacatctaggatgtctccaatccaacatcacttgagtctttaataccctctcttctagtctagtgcttcactgttrtatgacccttgatgctggtcctgtttagattatttttaatgcaactgtactgtggccaatgcctccatttgcactgatcacatctggtgccactcactccactgacattaaattactatggatgttttaatacacagtgcagccaacagtatcacagtgcggtgataat

SEQ ID NO: 802870 - DNA, 629 bp, Homo sapiens
aggaaatcatcattctcagcaaattaacacaagaacagaaaaccaaacactgcatgttctcactcataagtgggagctgatcaatgagaacacctggacacagggaggggaacatcacacactggggcctgtcgggggatgggggactaggggagggatagcattaggagaaatacctaatgtagattacgtgttgataggtgcagcaaaccaccatggcacgtgtgtasctgtataaaaaacctgcatgttctgtacatatagcccagaacttaaagtataaaaaaattaaaaacatgaagtatattaagcatgtaaaaaatgctactataatcttaaatatgttacaataacgtgtctataaaatatgagccgagcacacttccacagtgtaactcttctagctcatatgaataaagtatgtgtatgtgtgcatgcattcacatgcaacttgcaaagccaacaaatgaattctgaaattaagactttggctgatggtgtcttgaatgttatttctcaaatgactatgcaatacttaccaatttaaactccatttataatttttcctaattctttgtcaacaaacaatattattgattctcttttatttgtgcatactgtaatgtccc

SEQ ID NO: 802871 - DNA, 616 bp, Homo sapiens
atctcaaaaaattagaaaagcaagaggaaatcaaactaaaattagtagaaagaaatgttataaatatcagagcagaaataaatgaaattgaaactacaaaaacaatacaaaagaaaaaatgaaaagttatttataaaagataaacaaaacttacaaatctttagctagactaagaataaaagagagtagtcccaaataaataaaatcagagatgaaaaacaagacattacaactgataccacagaaatacawaggatcattagagactggtatgaacaaatacatgtcaataaattgaaaaatctagaaatcaataaattactggatacataaaacctatcaaatctcagccatgaagaaatagaaaaccttgaacatatcaataacgagtaataagattgaagcagtactgaaaaattctcctatcaaagaaaggtccaggacctgatttcttcattgctgagttctacaaaacacttaaggaagaaatgatatcagctattcttaaactatttccaaaatctgaaaagaacagaatactttcaaattcattctatgaggccagcatacccaatccagacaaaggcatagctaaaaaagaaaaccacaggccaat

SEQ ID NO: 802872 - DNA, 616 bp, Homo sapiens
atctcaaaaaattagaaaagcaagaggaaatcaaactaaaattagtagaaagaaatgttataaatatcagagcagaaataaatgaaattgaaactacaaaaacaatacaaaagaaaaaatgaaaagttatttataaaagataaacaaaacttacaaatctttagctagactaagaataaaagagagtagtcccaaataaataaaatcagagatgaaaaacaagacattacaactgataccacagaaatacataggatcattagagactggtatgaacaaatacatgtcaataaattgaaaaatctagaaatcaataaattactggatacataaaacctatcaaatctcagccatgaagaaatagaaaaccttgaacatatcaataacgagtaatragattgaagcagtactgaaaaattctcctatcaaagaaaggtccaggacctgatttcttcattgctgagttctacaaaacacttaaggaagaaatgatatcagctattcttaaactatttccaaaatctgaaaagaacagaatactttcaaattcattctatgaggccagcatacccaatccagacaaaggcatagctaaaaaagaaaaccacaggccaat

SEQ ID NO: 802873 - DNA, 669 bp, Homo sapiens
tttttgcttatttgaaaatactttaagaaagcattttttaaaaagcagagacatatttaatttgtattactttaaacatttgtaaactctgtttaaaaattccccaaaaccaaacaggaaaaggatatttaataataaagaaaattttaaatctttcatgtatttcaggtgtcattagctaaatttttgtagaatagttggacaccttctaagataaaaaatttattgccttctcacttgtgtaagtaataaaacaacccaasaaagataaatcatagtatatcttaatcagataaacaatatctttatatatcacaagcaaactttctaacttttaatcttttatccataagttgttcacactttgtatttttaaatttgatattttgtatccaaagtacatctttataatatttatcatttacttatttgttgtctaaataaactaaaatgtaataatttcaaggaattacttataccaaagccttacaactgtttgaaagggaaatttttataatctttctggattctacccatggtcttcaaataatgaaatataacatgttttcatgtgtaaggatagagttggccttatgttatctgtggttgtgctatcttatctttagagaagtcgggaaccatggtactacacgtggccaagagaagtat

SEQ ID NO: 802874 - DNA, 669 bp, Homo sapiens
tttttgcttatttgaaaatactttaagaaagcattttttaaaaagcagagacatatttaatttgtattactttaaacatttgtaaactctgtttaaaaattccccaaaaccaaacaggaaaaggatatttaataataaagaaaattttaaatctttcatgtatttcaggtgtcattagctaaatttttgtagaatagttggacaccttctaagataaaaaatttattgccttctcacttgtgtaagtaataaaacaacccaacaaagataaatcatagtatatcttaatcagataaacaatatctttatatatcacaagcaaactttctaacttttaatcttttatccataagttgttcacactttgtatttttaaatttgatattttgtatccaaagtacatctttataatatttatcatttacttatttgttgtctaaataaamtaaaatgtaataatttcaaggaattacttataccaaagccttacaactgtttgaaagggaaatttttataatctttctggattctacccatggtcttcaaataatgaaatataacatgttttcatgtgtaaggatagagttggccttatgttatctgtggttgtgctatcttatctttagagaagtcgggaaccatggtactacacgtggccaagagaagtat

SEQ ID NO: 802875 - DNA, 614 bp, Homo sapiens
aagaccctcttctagaatcagcccctaatatatgccaagagctagtttaagcccgagggtcaataaggcggctgtgttccctctggtcagcatgaaattgggtggatagtgagagttaaagaccattacatataaaagtcttattgtttagtctaatcttttttaagttttagggactaaatctttaaacagtctcccgcaaacagaggatgttttatttcatttaaaccttaaatagatacaaattatattttaagaagggaatgactttttttttkgttttttttttttttgcaaaattctaaccaaacagtttgagctcccttttctcattttttttttccacaggactactctgggcaatagtgcaacaagtgttattttcatcttttccaagcaggcagaatagagtcagttgttgcttgctacttgaaaaaaacagacaagtcaatgtttaaacaaccttacgttttttcccttatttttgtactttttgaatagttgttttccttctctctatttccccagtgcttcttttatcgaatctctgtgcttggctctttggctactgttccactctctcctgggctctcagtgactaagctgctgtatta

SEQ ID NO: 802876 - DNA, 614 bp, Homo sapiens
aagaccctcttctagaatcagcccctaatatatgccaagagctagtttaagcccgagggtcaataaggcggctgtgttccctctggtcagcatgaaattgggtggatagtgagagttaaagaccattacatataaaagtcttattgtttagtctaatcttttttaagttttagggactaaatctttaaacagtctcccgcaaacagaggatgttttatttcatttaaaccttaaatagatacaaattatattttaagaagggaatgacttttttttttkttttttttttttttgcaaaattctaaccaaacagtttgagctcccttttctcattttttttttccacaggactactctgggcaatagtgcaacaagtgttattttcatcttttccaagcaggcagaatagagtcagttgttgcttgctacttgaaaaaaacagacaagtcaatgtttaaacaaccttacgttttttcccttatttttgtactttttgaatagttgttttccttctctctatttccccagtgcttcttttatcgaatctctgtgcttggctctttggctactgttccactctctcctgggctctcagtgactaagctgctgtatta

SEQ ID NO: 802877 - DNA, 480 bp, Homo sapiens
ttttttcccttatttttgtactttttgaatagttgttttccttctctctatttccccagtgcttcttttatcgaatctctgtgcttggctctttggctactgttccactctctcctgggctctcagtgactaagctgctgtattattgtcatataggataggayaggctctttgtaatgcatacattccttttcttcattttaaccagatgaccacactggacagctatatttaaagccaaaaaaaccctcgatttcagaataattgtcatgaatattttgcattgtcattgaaaaagatgtatttactcagaagctggtgtcagaaattcaaggagagttttgcacagttctgcattagaggaaagacctcttctttaacctggagttactaagctacccccaaatggtaacaaactcatctggaatattcctgcctcaactttaaaacatttttttaaatggaaagtctcaaatatat

SEQ ID NO: 802878 - DNA, 625 bp, Homo sapiens
cgatcatgtatataccacttcaatttgatgatgcaatgctgctgtgcacgatccactctatggctagatgggtcagaaagcccccagttcatgatagacaattcagctctcacggtgacttgatgacccatagtcaaacgttcagtttccaccaaagcccagtagcaggccaaaagctgtctctcaaaaggagagtagttatctgcagaagatggaagggcttgctccaaaatccttgaggcctccgctgtgattcacctttgggggcctgccaaaggctccaaacagcatccctatcttccactgacacctcaagctccattggatctgctggatctgggtcatatggcccaagcgggagcagcttgcacagcagcctgtacccgttgcagagccgtctcctgttttgggcccacgcaaaactggcgtcctttcaggtcactcgrtaaacgggatggagtaacacacccaaaagaggaatgaatgtgtttcctccaaaatccaaataggccaactaggcattgtgcctctttcttggttgtaggaggggccaaatgcagcaacttatccttcaccttagaaggaatatcttgacaggccccacaccactggatcccctggaaat

SEQ ID NO: 802879 - DNA, 549 bp, Homo sapiens
actaatccattccaccatcccaagctccctaagcctttggatcccttccttgacattaaacctagggagatcaggcatttccagctgactcacagtgggctatcttttaatccatatttcagctaaccaagcaaataaactgttagaaccttttwtaattccctgagtgcagcactaagacagagtccctacttactgggcccaaatcaataaattcagtctgattcaactctatgttcttccacaattatcccatacttttaatatccattcccatgcctgttcctcagatttctgtttatataaattagagaactcaaacagttctttttgagtgtagtgcacctcccatgggtcacactctcaacctcgcctctaggggcccatagggactttagtctagttataggtctagaagcaaacagaagggttggggtggctgctgaggagaaccaacattatcttgcctggcaactgcctcaggagaggccatcattgttgcctcaagcagcgcagggtttatctcctcagacaaaagtggaaaggctg

SEQ ID NO: 802880 - DNA, 587 bp, Homo sapiens
ggttgcaatgttttacatgaaaaacatctgagcgtgctatggttacaggcaacagttcattttgataatttttaaaaggaaaatataaataaagaaatgacagagaataggatgattttacaaaggtgaattaaccatggaatcacagaaaaaaagataactaaagtacctaaatatacaattattctgggtttcctgggaactttaacaattttgttttcaratctactttatttcatttttttcctcatctgttttccatgttattttatattttgtagatcctttctgaagcatctaaaaactctcaagattgggaaatctaaaaatatctctgcaaaatataaagtccttgttaaataaaaaacaaaaaacttcaaatatacatttgaaggtataatactacataatgcaaatttgaggcaacattatttatgaacaatgtgatacaaacaaacaaaacagacattttaattcataatggcaataagacagttatcaggaaaattaataaatgacctacaaatatcaagtagtattttccttagatttaagagatacattaaatattcaactaacatacacaa

SEQ ID NO: 802881 - DNA, 385 bp, Homo sapiens
atcatattttaactttctaaaatatttttctcaaataattttctcttattatttagttcttgcttaaaagtgagaacatgtggtattcggttttctgttcctgtgttagcttgctaagtataatgacttccagctccatgcatgttcctgcaaagaactattttttatggctgtatagttttccatggtgtgtatrtaccacattttctttatccagtctatcattgatgagcatgtaggttgattccatatctttgctattgtgaacagtgctgaaatgaatatatgtgtgcacgtgtctttataatagaatgatttatattcctttgggcatacacccagtaatgggattgctgagtcaagggctatttctgtcttttacaca

SEQ ID NO: 802882 - DNA, 627 bp, Homo sapiens
tttgctaaaattcagcagtgaagccatcaggtcctgggctttttttatcaaaaaactttttattatggcttcaatctctttagtttttttggtctgttcaggttttggatttcttcatgattcaatcttatccatgtctaggaatttatccatttcttctagattttccaatttattggcatatagtgcctcctagtactccaaagattctttgaatttctgtagtatcgactgtaatgtctcctttttcatgtatgattttatttatttggatcttctttctgatttttaatttggctaaaggtttgtcaacatagtttatmttttcaaaaagccaaattttcatttcatttatcttgtgtatattttatttcaatttctttattactgttctgttcttcattatttcttttcttttactaactctgtcttgaaatgtatttgtctgacataaatatacagctactcctgctcttgtttggtttctatttgcatggaatatccttttccttccctttattttcagtctgtgtgtgtctgtataggcaaaatgtgttttttgtaggcaacaaaaaatagcaagatttggatcttgctattttatccattaagctactctatatcttc

SEQ ID NO: 802883 - DNA, 626 bp, Homo sapiens
acacatagcatacatgaaacattttatttgccttgaaacaaatatatttgccttttaaattgtttcaccagttttcgtgtagacacatcagaaatgttataattatttaataatcataagttccctttttaattttaaaaccttttatatatttcagttataacaccattgcaattatttaatgttttaactttatccaaaatgccaataacttcactgtataaaactatgaaagagcatgatatccacattgtaaatggaacattggcattttgtattaaaatgtyaccacacaagttgtataaatactaaattgctcaggacaaagactaaatcctcactgtattttggcaagtggcaatgaactgatcattcatcgggacttgctttcttcaaatactaagattgactactacagaaaatatgatgggctaattttcaagccaactgcctaaaatgtacaatttattgaacagaaaacgtgacttttttgcatttcttctttagctatcttcattacctttattttaaagaaagcatattaaaagagcaggatgattacatggttctatgcattgtataacttgttggaaaccttaatttactgacatagaattaagtttgtg

SEQ ID NO: 802884 - DNA, 558 bp, Homo sapiens
cttggtttggccttgactaacggagacttaatagtgacttcaataaaattaaagcttatttctgtcataagcagcatccaggtgtggtgtgtcacttccatgaatatcagggtctctggctcccattttctttctgatgtgccatccacagaatgcagcttccacctcgtgatgcaatatgtttgttcttactgaagctgtaatttcagcattccaactaacaggagggaggaaaagcctataccctctctctttttcagacacttcatagaatttatattaagtgatttatgtgtctcccaaaccacaaataagtccaaggccacacagctarctttgagaaaggctgggtaacgtaatttattttggtacccaggtgtgaaacaaaaatcaaaagtttttacaatattggaaatattggaaacagaagtacttaaaaatcaagtaattttttagacaatttctaaagcctaaaataatgatactaatagaaatgtgtatatagatattaaactcatacattgaatcgaccaaatttggtttaatttacattcttaa

SEQ ID NO: 802885 - DNA, 558 bp, Homo sapiens
tgtgtgatgttccccttcctgtgtccatgtgttctcatttttcaattcccacctatgagtgagaacatgcagtgtttggttttttgtccttgcgatagtttgctgagaacggtggtttccagtttcatccatgtccctacaaaggacatgaactcattcattttttatggctgcatagtattccatggtgtatatgagaccctgtttctaaacaaacagacaaactcgaactctagttaatgtaattgaatttcttagaatatcactatrgcagacaaatcctaaggaagccccattatccagccttctgatactcaagttcttatgtaatctccttcccttgagtgtttgtggagcctgcgcgtggcttctaacgagtagaagacagcaaagttaatagtaggtataggattatgtgtatgttattatttgattacctcactaatttataggcaattgcaatccccttcttacaccgagactctctttcccttgttgactttgaggaagcaaaagggaatgttgggaaggcctacagggcaagaaaataaggatggc

SEQ ID NO: 802886 - DNA, 586 bp, Homo sapiens
gcatatatagaatgtttaatgatcaaattagggtaaatgggatatctttcacctgaaaaatttatcttttctttattttgggaccattacaattcttgtcttctagctttcttgaaatatactatatatcattagtaaatataattttcttactgtactatcaatattagaacttattgctkgtatttaactgtatttttgtacccattaaccaacttctcttaatttcaccctatcctcttccccttcaaccctctctggtgatcgccattccactctgcttccatgaggtccattttattagctcccaaataggagtgaggacatgcagtattgctgtgcttatttaacctaacataatgaccttcagttttatccacactgctgcaattgacaggattttattctttttacagctgaatagtattctattttgtatatttactacattttctttacacatttatttgctattggacacctcagttgataccaaaccttggctattgtgaatacagttgcatatatcttttctaaaagctgttttcctttattctggatacataccccaaagtgagattgttta

SEQ ID NO: 802887 - DNA, 612 bp, Homo sapiens
aatgttacgtattactctccctttgccttggatactcatctatttgggtcaagttgaggtaatcctgggtctttctatactgttttaatcaggttttgtcctgatgcagttgtgttccatgcctccttcactttctcctaattacaatttctgggcgctagcaaccaaatgtcgattaaggtatacttagggtccaccatcttgtaatctactccagttgaattctccacggttatgtgtcattgctggtggtcataaacaacttcttttgcttttcactgcagctgcttcaaatgtcaccatttgcacttcatcttgctctcgttccatgctctcyatttcccacatttctgggtctgctaatggccacattctggtaaggtctccaaatccaactttacctgtaagagtcttggtcccctgattctaacacaaattgtgatggagctctcctctgattatttcttctgcattggctgctttatattgttacagctttgattctgttgacagtacacaacttctgatagatcgtttgatgccaaatgtaattttagcttcctaggtcagttcagttcaccgaatatcattaagcatttacaatagtgctgg

SEQ ID NO: 802888 - DNA, 661 bp, Homo sapiens
cttttccccattaggttcagtgcattttggtagatgaagtttagaaagaggaagggagctcagacttaatagttggagccaactaatatactgccattctagtctttatgttaagatactagggacagagtgttcaatctgtgtgttattattagtagtattggcaatgagaatatgtaaagcaataattctcagctgtgggaaggcaggcacagcagccttcagagctacctcatatatggttctcacattcccctaaattaccttaacccataaatcacttttattcatcactgtttcctgtgattcactgggaaaagcctcgaagagcatcctgttactgaggtgaagacaaagcctgggctgtcccaggcagttcctctctaactcaagatgtcacatttcttaggaggcataggaataagaccttggtactttcaggcagttccaccccctctcagaatattgcactcccagcacattctacagttattcttagaagtataatcataaaatcataaataaytggatggattcaaggccacctaaagaattgtcctccagtagagagtagaataatagcttccagaaactgttagggaagagggtatgtaaggaaaggggagatactagtcagagggtacaaagtattagttagact

SEQ ID NO: 802889 - DNA, 635 bp, Homo sapiens
ctaaatcttctctctcttctgacttctaaatcttttgtgaatgcctcccataaactgactttatctagaactacataagaaaggactctgagaaatgaagttttcagctttacccatgaaagtcagatgatatctcaggggagaggtagaggcaatgatgaaytgacaacagacaatataagaaaacccacccatttatcagttgagggttcatacacatcccttttgccaatttaaaattctcgagtaacagcagtgataaaatcattcctgtctcttttacgggatgtgatcccttttctgtaataaaattatgatcattctctccttccaaaaaggaaatgtattgctctgtatatcgtaatacacatcttggagtgacattcactccttttctagtgacgtctcaaggcttttttgatacaatgtaacataaatactaaattatgtgatatcttattttggattctctctaaaagcagaggttaagacaaagatttgactgtaagtaatttgcttgggacatgctctaaggaaataagataaggcttctaggaaaatgagaccgaggagaagaaaaacaaaacgtgtgtcactgagctagaagctactgtggaaaatgggagtcactctca

SEQ ID NO: 802890 - DNA, 635 bp, Homo sapiens
ctaaatcttctctctcttctgacttctaaatcttttgtgaatgcctcccataaactgactttatctagaactacataagaaaggactctgagaaatgaagttttcagctttacccatgaaagtcagatgatatctcaggggagaggtagaggcaatgatgaattgacaacagacaatataagaaaacccacccatttatcagttgagggttcatacacatcccttttgccaatttaaaattctcgagtaacagcagtrataaaatcattcctgtctcttttacgggatgtgatcccttttctgtaataaaattatgatcattctctccttccaaaaaggaaatgtattgctctgtatatcgtaatacacatcttggagtgacattcactccttttctagtgacgtctcaaggcttttttgatacaatgtaacataaatactaaattatgtgatatcttattttggattctctctaaaagcagaggttaagacaaagatttgactgtaagtaatttgcttgggacatgctctaaggaaataagataaggcttctaggaaaatgagaccgaggagaagaaaaacaaaacgtgtgtcactgagctagaagctactgtggaaaatgggagtcactctca

SEQ ID NO: 802891 - DNA, 635 bp, Homo sapiens
ctaaatcttctctctcttctgacttctaaatcttttgtgaatgcctcccataaactgactttatctagaactacataagaaaggactctgagaaatgaagttttcagctttacccatgaaagtcagatgatatctcaggggagaggtagaggcaatgatgaattgacaacagacaatataagaaaacccacccatttatcagttgagggttcatacacatcccttttgccaatttaaaattctcgagtaacagcagtgataaaatcattcctgtctcttttacgggatgtgatcccttttctrtaataaaattatgatcattctctccttccaaaaaggaaatgtattgctctgtatatcgtaatacacatcttggagtgacattcactccttttctagtgacgtctcaaggcttttttgatacaatgtaacataaatactaaattatgtgatatcttattttggattctctctaaaagcagaggttaagacaaagatttgactgtaagtaatttgcttgggacatgctctaaggaaataagataaggcttctaggaaaatgagaccgaggagaagaaaaacaaaacgtgtgtcactgagctagaagctactgtggaaaatgggagtcactctca

SEQ ID NO: 802892 - DNA, 518 bp, Homo sapiens
gaaaatgcatatttaatcttataagaagctgcttaaaatgctttgcaatgtgattttaccattttacactcccaacaatgtatagcaatatatcatagatctagtggtttcatatctccacaaacacttgatattgtcactcagtttaattgtagctacttaaataggcttataatggtactcgttatgattttaatatgcatttccctaatgcctattagggactaattatgttaagcatcttttcatgtatttggaggccatttgtgtaccttcatttgtaaaatatctgtttaagtagcttgcccatttggattgctttacatttyattatagagtcataagcatcctttatatattctgaatataactcttttatcagacatacatatatatcaaatatttttttctaagtttgtggtttgtgtttttactttttatactgtttattgaatagtagattttatattcattttatccattctgttatgatcgatattttttgaactatgaaaata

SEQ ID NO: 802893 - DNA, 582 bp, Homo sapiens
atacctgtagtcccagctacttgggaagctgaggcaggagaatcccttgaaccccgaggcggaggttgcagtgagccaacatcgcgccactgcactccagcctagtgacagagtgagactccgtctcaaaaaaaaaaaaaaaaaaaaagaaagaaaataatgggttttcctatttgctagcagttagtaagattttgcattttactaaaattagttttcaagcctagtgtgccaataaaaataaacattttaataggcaaatgccaaaattatcctgacacctataaacgaagttatcagctgaaatagatgaaattattttagagattattctgaacatctgattgttagatttctaaaatatatttaaatattatactgtagttaagttactgtataggaatagaaraaataagctattatttttcttttcttggcatctgctccctctaatttggacatttcatctgttgtaattacttttcaaaagctaataaaactaatatttgcttaaaaaaggtttattaaaacaatttgtatatggaaaaagaccagacttttcttaggacaatttatattaat

SEQ ID NO: 802894 - DNA, 607 bp, Homo sapiens
tgcacattggcacctccattgtctcattcaattcctggatcacagtagattttgattattaaaaaaagcaaaagttcaaattaattgactagtcttaggcttaaaaccatggacttaatataatgttacattgcatgatactattgttagtgtcctgaggaaatggcagcccacaaaagaacaccatgaatgacaggtaaaggtcctcggtgctacagttaagatggaagttggtggaatttgacagaaagggagtgaagccctcttttccccatgtgagtttaagtcaagtgagagaaagtaaagagatgggcaaatgaagcacaaacattayttttattaaactagatagtttatatgaatagccacaatgggtttccaaatacagaagctcagaattatccagactttccatttgtactcagagtgagtaaacaaagattccgccctgtaaataaaagggaaaagaaatgtaagtttcctacaggcaataactccatgatcagttcttactaaaaattctccaactggaattcaattctcctactcctggaggatgccagtgaattagtaaagaaagatcatgagttttacactaatgaatatc

SEQ ID NO: 802895 - DNA, 620 bp, Homo sapiens
aataatattcttagtttgtatacctagagaacaaacagagcctcaactaaactttctactgcaaactgattagtatatgaaaatattttaatatcggtgagaaaaaaagaagtgagaaattatcaacggacttttttgatattaaataatctggatatattgtctttggaagaacttatgtgccagttatttattgtcacaacaatactgcagtgataacaccatagaacaaacaaccacaaaagtgtatgtataattaacaataattagtcattgtgcatgtgtctgtaatcaagtgggggtcagttaaggggatsccctgacattgtttatgcttgcttagatacctggagctcagagggctgttgagggaggtaggctggcttctgccagagtgaccagggcaactggacaactgtaatgtgacacaggcccagtgacccaggctaactgcggagacacaagaaagaatacattgaaatatgtcagaccccttaaggtctaggttcatactaggcaccttctcttaaaaatcaccctatagatcaaagcaatgtgtatgtccaagtttaggatgaagaggtgagtgaatatgccccatctcttttttggaaaggatt

SEQ ID NO: 802896 - DNA, 558 bp, Homo sapiens
atcagcactctgtaaaatggaccaatcagtgctctgtaaaatggaccaatgagcagaacatgggcggagccaaataagggaataaaagctggccacctgagctagcagcggcaagccagtggcgttcaatgttgtggaagctttgttgttttgctcttcacaataaatcttgctgctgctcactgtttgggtytgcactaccgttatgagctgtaacactcactgcaaaggtctgcagctttactcctgaagccaacgagaccacaaccccaccggaaggattaaacaactccagatgtgctacctttaagagctgtaacagtcactgcgaaggtccgcaaggtctgtggcttcacttcttaagtcagcgagctcacgagcccatgggaaagaagtaagaactccagatgggctacttttaagaagtgtaacactcactgtgaaggtcggaggcttcaatcctgaagtcaagcgagaccacgaacccacgggaaggaaaaaactgtggacacgtgaacattggaaggaacaaactccgggcccaccatctttaggaac

SEQ ID NO: 802897 - DNA, 558 bp, Homo sapiens
atcagcactctgtaaaatggaccaatcagtgctctgtaaaatggaccaatgagcagaacatgggcggagccaaataagggaataaaagctggccacctgagctagcagcggcaagccagtggcgttcaatgttgtggaagctttgttgttttgctcttcacaataaatcttgctgctgctcactgtttgggtttgcactaccgttatgagctgtaacactcactgcaaaggtctgcagctttactcctgaagccaacgagaccacaaccccaccggaaggattaaacaactccagatgtgctacctttaagagctgtaacagtcactgcgmaggtccgcaaggtctgtggcttcacttcttaagtcagcgagctcacgagcccatgggaaagaagtaagaactccagatgggctacttttaagaagtgtaacactcactgtgaaggtcggaggcttcaatcctgaagtcaagcgagaccacgaacccacgggaaggaaaaaactgtggacacgtgaacattggaaggaacaaactccgggcccaccatctttaggaac

SEQ ID NO: 802898 - DNA, 558 bp, Homo sapiens
atcagcactctgtaaaatggaccaatcagtgctctgtaaaatggaccaatgagcagaacatgggcggagccaaataagggaataaaagctggccacctgagctagcagcggcaagccagtggcgttcaatgttgtggaagctttgttgttttgctcttcacaataaatcttgctgctgctcactgtttgggtttgcactaccgttatgagctgtaacactcactgcaaaggtctgcagctttactcctgaagccaacgagaccacaaccccaccggaaggattaaacaactccagatgtgctacctttaagagctgtaacagtcactgcgaaggtccgcaaggtctgtggcttcacttcttaagtcagcgagctcaygagcccatgggaaagaagtaagaactccagatgggctacttttaagaagtgtaacactcactgtgaaggtcggaggcttcaatcctgaagtcaagcgagaccacgaacccacgggaaggaaaaaactgtggacacgtgaacattggaaggaacaaactccgggcccaccatctttaggaac

SEQ ID NO: 802899 - DNA, 643 bp, Homo sapiens
aagaagaattcctttcatcttttaactttttgtgttaccgcatttactacaggttttccatctccagacatgcttactttacaagttgcaatttttgaatgcaggcagaataagatatattgatgaggggaaaaaagagggagcgagatatcaagatggactacaaaaagtattatatcctccctacaaaataagtatctctgttgtggaagaataagtacacagttttaaggtagactttgrgtctttaagacaagtactaaaatttatgttttttttttattcagtcctgctgatggtcaggttttctcagaaaacataatgatgtaatgtatcaatccagatccattgatcaagctgaactctttcatgattattttttgttatgaaaaaaatgaattattctgcacagagagagaatattataacaatcttccaaatatacatcattcaaatgataaacagtcttctaaacttgtttgatatctttttaataccttctttgtttcctcacatgtttttttcttttggtgataaaatgtctcaaaaatatctcagactttatggccttccacttttcatatgtaaatgtaatgtcatcatcatgcatagctaaaaatgtataataattccttaatatcca

SEQ ID NO: 802900 - DNA, 619 bp, Homo sapiens
acagtaatctcctgatctgttggcctcaccatacctaaataaagtaaattctcatgtaccttttaaaataactctctcttcaaagccatcaactttttgcagaaggataagcaaaattattggatgatgagagaccatgtgcaatgagaaaggctccatgaacagaactgaagctatacagtcaatagcctgtactaaagccccatayatgtgagaaggatctcctgggacatttcagcccagctgaactcccagatgaaggcagtcccacagtcatcacagccaacactgtatctgccagccaatcctcagaagcatgaaaagtaataaacctgttttcaagaaactgtttgtgatgatttgtcatgtcacaataaattattactcaccataaacaaataatcagaaattagtgccacaggtagtgggctgttgtaacaaaacctgtaatatttggcactggcttttggaagtgctaataagtaagaacattaaaaaggataaggaagccgtaattgaaaactagagtaatagtaaactaatggttggtggagggtggagcaggcaaaaagaaattgctatttgacactgggataactgggagaaaagaagacacatg

SEQ ID NO: 802901 - DNA, 523 bp, Homo sapiens
gtatatacggatatgtgtatatttaatatatatacaattaaaggcagggtcttgctttgccatccaggctggaatgcagtggtgtcaacctatctccttttagccttgaactcctgtgttccagcaatactcccaactcagcctgctgaacatgtgcataccaccacatccagctactttctaaaagttttgattaataaaaatattttaacattaggacatccaactttygaagtagttcaataagcattttattttgatacccactccaaattaaattctatatgatggtttagattatgcattaatgagcagatcactctttatccataaaatcatcaatataattgaaatcagttttatcacatataacccatagaaaaattgaatgtcaatgttttaataaaagcagaatgtaaccaatgacttcagccactttctattttccggtaagtgctaaaaagaaaattgtatgaattttaagagccatataactttttaaaaaacatttgtaatgttattc

SEQ ID NO: 802902 - DNA, 629 bp, Homo sapiens
ttcattactgagccatataatattgctgccacagaactcctactagctagagataaattggagagccctgaaaaaaatgacatgagtaaaatgaaacggatgatgttggtgagatcactcctacaaatcaagacagagtgtgttctctcctctttttggctcaccccagtgagggctgtcatctgacttgagttggttcrctaggatcatgagtagaggtggttcctttctccgacatcagagactgaggccaaacatgagaaccacagcaggtatttcattaccagatagtcactctcaagtgggttgttatgcaattgatccaatgctaaccctctttaaaagggcacattttccctactttattgttagaaaaaagcacatcatgtattgacatgttgtactgatttttctttttttttttgtactgattcttcataaggcatttcatccatcccatagttaactatagatcatgagcccatttgacataaagtagggtcatgtatttcctccttcttctcccacattgttttaacggtcctgtcagcatagactaaaaagcaatggtactaaaaaatccttctcaatactctaaatcttgaaaagcaaacttcaatgtaacttct

SEQ ID NO: 802903 - DNA, 629 bp, Homo sapiens
ttcattactgagccatataatattgctgccacagaactcctactagctagagataaattggagagccctgaaaaaaatgacatgagtaaaatgaaacggatgatgttggtgagatcactcctacaaatcaagacagagtgtgttctctcctctttttggctcaccccagtgagggctgtcatctgacttgagttggttcactaggatcatgagtagagrtggttcctttctccgacatcagagactgaggccaaacatgagaaccacagcaggtatttcattaccagatagtcactctcaagtgggttgttatgcaattgatccaatgctaaccctctttaaaagggcacattttccctactttattgttagaaaaaagcacatcatgtattgacatgttgtactgatttttctttttttttttgtactgattcttcataaggcatttcatccatcccatagttaactatagatcatgagcccatttgacataaagtagggtcatgtatttcctccttcttctcccacattgttttaacggtcctgtcagcatagactaaaaagcaatggtactaaaaaatccttctcaatactctaaatcttgaaaagcaaacttcaatgtaacttct

SEQ ID NO: 802904 - DNA, 593 bp, Homo sapiens
tgtagatggagcatcttcctcttctttatggcacaattccctggtcctgttgatggccttctgcctcctcgagggctaccatagtagtagtcacttcatatatgcgacaccccacatacggggtgaggacagcagccagagaggcaaaagcacttaggtgcactkagcccagaacaagattcctcatataagagacaaaacattcatcatctggcccccaggtattcagatcaaacatggcctgccatatacccagcccctggagtacctgcaccaaatcggtatgccactgccatctactgacagtttctggtatttcactgtcatcagccactcaatcagtgtggtcaccttgcccctgtgttcaccagctgtagctgctgaggaagggaggggtaagttgtaatagaaaccagcttctccacctcagaggtggagcaggaaatgctgtcagctccttcatccgaaagacgagtaaccaggcaggaaggggctcccccaaaagctgcccacattgcttgcctaactcccgcagctcagtgagggtataagcactataggaagtgtgttccaccacagtaggggggccctga

SEQ ID NO: 802905 - DNA, 661 bp, Homo sapiens
actgccctttataaaaccattggatcccatgagacttatttactatcatgagaacagcaagagaaagttctgccctcatgattcatttacctcccactgggcccctcccatgacaggtggggattatggttgctacaattcaagatgagatttgggtgaggacacagacaaaccatattattttgcccttggcaccttcaaaatcttatgtcctcacatttcaaaaccaaccatgccttcccaacagtcctcccaaatcttaactcatttcagcatttcaaaagtccacagtctaaagtctcatctgagacaaggcaagtcccttccacctatgagcctgtaaaatcgaaagcaagttagttacttcctagttacaatgtgggtacaggcattgggtaaatgcagccattccaaatgggagaaattggccaaaacaaaggggctacaggccccatgaatgtctgaaatccagtgggccatcaaatcttaaagctccaaaatgatctcctttgactccatggctcataactaggtcacrctgatgtaagagatgggttcctatggtctttggcagctccacccctgttgctttacagagtacagcctccctcccagctgctttcttgagtgtttgaggcttttccaggtgcacaatgcaagc

SEQ ID NO: 802906 - DNA, 629 bp, Homo sapiens
actaggtatggaattactgagtcatagggtaactccatgtttaactttctgaggaactctgcaactattttccatagtagttgcaccattttacttttcattttatgagtatttttatttgttcacagtcatacagacactttttgttgtcctttttttttttttttttttttttgrtgtggagttgtctctgtcacccaggcaggagtgcactggcgtgatcttggctcactgcacgctctgcctcccaggttcacgccattctcctgcctcagcctcctgaggtgcccgccaccatgcccggctaatttttttgtatttttagtagagacggggtttcattgtgttagccaggatggtctcgatctcctgacctcatgatctgcccgcttcggcctcccaaagtgctgggattacaggcgtgagccaccatgccgggcccattttttcttaattacatctatcctaatgggtgtgaaagagtgtctgctagtagttttgatttgcatttccttaatgacaaataatcctgagaatcttttcatttgcttataggtcacatggatattttccttacagaaatttcttttcaagttcattccttatttctcagtgataggatttgaata

SEQ ID NO: 802907 - DNA, 618 bp, Homo sapiens
gaaaaaacaatgactcaattaaaataatagaataataaacattctctatttagattagcaaactcttcttgttcaaagtgtgtaaaatagagaacaacttctccaaacatagttttatttatttattcatttatttttgagacagagtctcactctgtcacccaggctggcatgcagtggcttgatcagggctcattgcagscttgacctcccaggctcaagtgagccttctgcctcagtcccccaagtagctggggcaacaggtatgcacaaccacgtcctgctaattgtttgtagttttagtagagaccaggttttgccatgttaccaaggctggtctttaactcctacactcaagggatccacccatcttagcatcccgaagtgctgagattgcaggcatgagccatcatgcccggatccctccagacatggttttaaccatgaatttttaagatattctctcataaaaagagatctatctttgtcatgcacataaacagaaaactgaaaaatcaaccctgtttcaaagggagaacagatttttaaaaagaaataaagtaagagtaaacagtatttatttattttaattagtttcagtggctgttgatggactgc

SEQ ID NO: 802908 - DNA, 618 bp, Homo sapiens
gaaaaaacaatgactcaattaaaataatagaataataaacattctctatttagattagcaaactcttcttgttcaaagtgtgtaaaatagagaacaacttctccaaacatagttttatttatttattcatttatttttgagacagagtctcactctgtcacccaggctggcatgcagtggcttgatcagggctcattgcagccttgacctcccaggctcaagtgagccttctgcctcagtcccccaagtagctggggcaacaggtatgcacaaccacgycctgctaattgtttgtagttttagtagagaccaggttttgccatgttaccaaggctggtctttaactcctacactcaagggatccacccatcttagcatcccgaagtgctgagattgcaggcatgagccatcatgcccggatccctccagacatggttttaaccatgaatttttaagatattctctcataaaaagagatctatctttgtcatgcacataaacagaaaactgaaaaatcaaccctgtttcaaagggagaacagatttttaaaaagaaataaagtaagagtaaacagtatttatttattttaattagtttcagtggctgttgatggactgc

SEQ ID NO: 802909 - DNA, 590 bp, Homo sapiens
aatattacactgaaaaccctttagtaatatttttcaaaaatattatactaggagtttatatattttcctaacacctaaggaaatgagtattaaataaaacatgaaaattcatcaatattatttctcacttcgtgggttatctgaatgatataaaccatgaagcaataagtaatattggttttgaatttttacctttcttgctaatgttctatatgaataccaaaattttctttaattgtaagattataataatgttcaatagctaatccaaactcatgtgtgtagttttagtttcctcttagatttargattatatttaatgtgattctgtttgtctggcagtgtttccattattttggcagctggcaaggaggattggttatacgaagcttttctattttccctgcaatttccaacttggctccaacttttagtaatcgtatttttgcttccgtttaaaggaactgtatgcagaatgtcatttattaggtaaccacttatctgtgaaaaaatcctacttattctatttttgacaaagtgataaagatagctttgcagtgaaatgctgagtaacaagcaaatcagactgc

SEQ ID NO: 802910 - DNA, 647 bp, Homo sapiens
tggaaatcttccaaaagcattgttttattaacctgacctttgtaaagttgagaatgaatgtgagtttaggttctacctttaggcagatttttgaaacctaactgaagctgccagttaaacgcaaagcaatattttttaaagttaactgatctgcagggtttgaattgagttgtttctgaaccataaggtaaacragtgatgtattttctttcattctctccttttgtaagtttaatttttgtcaaagtagtataaaaatgaattcaaatgtaattatagccttttggtagcctctaggactatagagtttttaaaaacaaaacagtccattgatttttttccacctgtcattcctgctttccagaggccacagagttcaagtcctctagctatattcttaaaaatctgcctttttatttctaaaaaaatcaagtttatgcttccatttctctcttgttgttttcaaattagccacttcttttgactccctacaatgaaagataagaattaagctttttaccaaaaacacacacacttacagggagtcacatccctccccacatatcacacacaaccttaaaatatcagtcacagctgatcccttattatataattattgcatataatttcctatgtacacttgcttg

SEQ ID NO: 802911 - DNA, 647 bp, Homo sapiens
tggaaatcttccaaaagcattgttttattaacctgacctttgtaaagttgagaatgaatgtgagtttaggttctacctttaggcagatttttgaaacctaactgaagctgccagttaaacgcaaagcaatattttttaaagttaactgatctgcagggtttgaattgagttgtttctgaaccataaggtaaacaagtgatgtattttctttcattctctccttytgtaagtttaatttttgtcaaagtagtataaaaatgaattcaaatgtaattatagccttttggtagcctctaggactatagagtttttaaaaacaaaacagtccattgatttttttccacctgtcattcctgctttccagaggccacagagttcaagtcctctagctatattcttaaaaatctgcctttttatttctaaaaaaatcaagtttatgcttccatttctctcttgttgttttcaaattagccacttcttttgactccctacaatgaaagataagaattaagctttttaccaaaaacacacacacttacagggagtcacatccctccccacatatcacacacaaccttaaaatatcagtcacagctgatcccttattatataattattgcatataatttcctatgtacacttgcttg

SEQ ID NO: 802912 - DNA, 454 bp, Homo sapiens
tggatgttattatttactatttaaatagttgaataatttaaactaagcctttcaacaaataattgccttataatcaattatccatgccttctctttttatgtttaaaggaaaataaaaatatcgttatttgcctttttacttttatcatttgcagcttctttgaagaaaaataatctgtcaaatttttggtcctagtattacagcaattccttccaaacatttttgggagtatatctctatcagtaaaaaaatgatgttaaggccaggcatggtggytcatgcgagtcatcccaacactttgggaggctgagatgggtggatcacccaaggtgaggagtttgaggccagcctggccaacatggtgaaaatacctctcttacaaaaataaaaaaagaaagtgaaagaaagaaagaaatatcctggtatcgtggtgcacacctgtagtccagctac

SEQ ID NO: 802913 - DNA, 454 bp, Homo sapiens
tggatgttattatttactatttaaatagttgaataatttaaactaagcctttcaacaaataattgccttataatcaattatccatgccttctctttttatgtttaaaggaaaataaaaatatcgttatttgcctttttacttttatcatttgcagcttctttgaagaaaaataatctgtcaaatttttggtcctagtattacagcaattccttccaaacatttttgggagtatatctctatcagtaaaaaaatgatgttaaggccaggcatggtggttcatgcgagtcatcccaacamtttgggaggctgagatgggtggatcacccaaggtgaggagtttgaggccagcctggccaacatggtgaaaatacctctcttacaaaaataaaaaaagaaagtgaaagaaagaaagaaatatcctggtatcgtggtgcacacctgtagtccagctac

SEQ ID NO: 802914 - DNA, 603 bp, Homo sapiens
ggaggagacactgaaagtcattgtaaggtcattggctgaattttagttggatttagttgggaccccttagagagtcttgggcagaggaatgacataatctgacttaggctttaaaaagatcgctctggctgctgggtcaagaacagattgtgagggatggaggttcaggagactggctggggggctacatcagccacctaggtgaaatacgaagtagggcttgaaccagggcagaagcaggggaatggtgccatattttgaacatgaggctgatgggtttggctcatgaagcagatgtacggagtgagggaaagaaagaggaggcaaggacgactccagtgcttttggtctgagtaatggaagactggagttattattcattgagttgaggaagggtggggctgggagcagatttggaatactatccactgtaggaagggagactgtcactgggcttgtccccarcctctcccaactccccattcctgcctttgggaaaccccagtcctgcccaggccccggtcttgctcccatagcaccagcttctaacctctgcctccttcagcatccttttatgtgctgctcgtaccctaggatgtcctc

SEQ ID NO: 802915 - DNA, 600 bp, Homo sapiens
tttagagctgaagagagtcctgttcataattacatggaaacaagagttgtacatggactgtcctgggataaaggtatggtcatcccagtgatagactcacagtaaagagataccaccattctaagcaatcgtattataccttgtaatgaaaattatcacaaaaacagtaacaattctattttctttcagaaagataaamagggagtgaggcatacatgtacaactattcaggagagtgagagggagaaaggaaatcaaagaggataaggatgagaacaaaagagaggaagagacttaggtgacacctctgaaggtactagagtgaatgttgaaagcttaagtccatttttatgtttatacaggagatactggtcctttgaaatgttaactgctctatttccttaattctaagagaaacaccttttcacattttaattattctgaaatcagaatgcatattacaagggatgtcagaaaataactctttagctcctagaaagaggaataatttgtgacagagttcttattgcctatacatgtatgaacttggcaatgcacagcaggtagatctgttcagactaacagctgagttgatatatt

SEQ ID NO: 802916 - DNA, 562 bp, Homo sapiens
gtcccccgcaggagcctctggcttcatcaagcccacagatccacagttgctttgttcgccgagtgacatttctatcaggcaccaccttgggctggtcacagaaacttcgtaggagccatcagtcctggagctcagtaccccagggttgatgccttgacaactgtgtcaccactctcttattacctatctggagggtcacctttctgacagacagctttgaaaattctttattaaacttttttttttttttagtagaaaagacagattatagttctgacatgctctacttattatgacatgaaacaatgttcttatttctttggcttggggatgttgaactgctggctttggcccatgtggggtgtcacaatgatgtattagttataaggtcagactttccgtaacctttacrtattcatttattcactcactcactcacttactcactcactcacctatacatttgaaagtctactgtgaaccgggtctaacagaggttagacatttagtggattacacaaaaaaaacaaaacatttaccctcagtctttgatctgaggatg

SEQ ID NO: 802917 - DNA, 636 bp, Homo sapiens
tcagcaagtaggcacttggtggatcctgctttctaaactttgatctccattctttgagttaatatttgtgatgtgcctactatgtgccaaccagtggactggaccttggggatatagacattatcaaacaggcaacattcatgcatttaggaagcttacttttaagtagggggcctgtagtctagtcttgagtgcctgaagccccagtcttctcttaaagctctttgaaaaatttctagactagtcctatctttacaattagatggctacatcagtttccacagtagcactagttgccctgcaaacaaacttagctatgatcctgcctccctgccttgctctttagggatgatctcctgaggaatctggacttgcctctctctgaacagagtcacctcgagtttggctatgagacaaatagttaaccacaatagtcactttgccaactactcatattccagtagcagtagtgtagtaataatagctgctmcttcttgatcatttactatgcgttagaaatgcgccaagctctttttttcatgttttatttactacccatgatatacataggttttggtttccagtacagccaaccaaactcctaccagatcttatccttccatagatagcaactgt

SEQ ID NO: 802918 - DNA, 524 bp, Homo sapiens
accaaaaattaggagattgtgacccagttgcaagagaaaagataatcaactgagaatgaccctgaaattattccagtgttggaatgagaaaataacgattttaaatcagttattttaactatgctcaatgaagtaaaggaaaatatgctgtgctgaataaagagacacaaaatctcaacaaagaaagaaaaactaccaaaaataaccagatggatatagtcttgtgcccaccagcactctgcacccaygctaacaccaccactggtgtgaatgtgtgcacaggtgctggcaggggcccactgaacccctaagctatgctgccacagccactgctgcaaatgccagcatggagaatggcactcaggcatctgctagcatcttgccacagcattcaggcatctggcactcaggcatctgctagcatcctgtcacagccaacaagcatgcatgccactgtgctgccactgctgctgatgctggcatgtgaggacaaggatggatcccactgccattgccctgtgaag

SEQ ID NO: 802919 - DNA, 592 bp, Homo sapiens
tttcagtaatgagctgtgtttaattttttgaacaaaatttgaccatagaatccctccctccttattgtttttctcgtctgcttttgttggttggtttttgttttattttgaattttagttgatacatattagcatcccaagcactctggatgaattgtcatctttcattgctatggaacattacatctggagacaaccttggggaacatctcctcctacttcctcattttacggatggggaactgaggtccagggtggtgaaacggtattacctgtgttgtatagcacaagtagtggcatatcctctggttgctttggtcaaaaagtagtctgttactatcacatgtctacaattctccccagatggttaaaagcttaaacagtggcagtttaaggagtttgagctgacttttagggtgrggcagaagacatcatctgcctgagggaggaagtgactctgataggcaggtgagagtcagctcctctcctcctaccgtggtggtctactgttctgggccaggtcattgttgtccattacaatctaatttcccgtatttacagagcacttttctatcaaggacttctgatggct

SEQ ID NO: 802920 - DNA, 649 bp, Homo sapiens
agaaacacaccaaggctcagagaaattaggtaactttctcggtgtcacagaataccaaaatgctcagccaagctttacgtttatatttgattccaaaacccattctctgtcctcatcctactacattttgctagtgaatgtcactattcctcttagcctagaacctaacagaggaagctagatttacccagttgcctctgcagagtgacatgatgtgtgttccaacaggtggtttagataaggctggcttttcctggtgctttgagaaaaataagagtattgagaattagtaactctgccctaaaaggagatcaaagggaactgatgcttaaatggtttgacagtgttatgccccaccctggaaggtggatttgggactttatcccttaaacaaaaagaatagttggagccttattagggaactgagcaaaactaaccaatataagggcttggacactgctcaggccaacaagttgccaagttgkatggaaaagcagctcatagctaggagaggccaaggccaagttgtatggaaaaagccaagtcaagaggtagaaaggctgaggtttctagcctgggctgtgcatccatagagtgtgggatcctggtaaatctcttaactcctcttggccttagtttctcatattta

SEQ ID NO: 802921 - DNA, 576 bp, Homo sapiens
ctctgattaggtttttgtgtttttttttcttttttaatcatagaaagtctgaaattttaatagagcaaagaatttggaggcatatcaacctagttacctatgctggatgtataaatactgctgcatcgtttcggcaaatcacccaacctctttgaggctcagttctatctccggtaaataacataaggacatttacctccgtgggtggtctggggagttatgagatgacgtatgtaaaatgttggcatattcagtttttcctcctttatgttaatcatttacagaagaatgagcagcagtagtagtttttattgcatatttcacatagcttagcragcagtctatacatgttctagtctgctctgtccaatgcaatagccattaacacatgtggctattgagcacttgaaaagcgaccgaataaagacaagctgtaagtataaaatacctactggattttgaagattcagtatgaaaaaaggaatgtaaaatatttcatcaataacttttacattgattacatgttgaaataatactgttttgaatatatatggagtaataaacttaccttttaaa

SEQ ID NO: 802922 - DNA, 521 bp, Homo sapiens
tatttgtgttatattcactgtatttctggggcatagcatggtacctaggatatagtaggtgctcaataaataaatataggatgactatggttaaatgaatgccctaagagaattattcaagtatgaggatggatgaagtttaaaaagatggtggtaggacaggcgcagtggctgacgcctgtaatcccagcactttaggaggccgaggggggcagatcacgaggtcaggagtttgagaccagcctggccaacatggtgaaaccctgtctctactaaaaatacaaaaattagccgggtgtggtggcaygtgcctgtaatcccaactactcaggaggctgaggcaggagaaacactgaacccaggaggcgaggttgcagtgagctgagattgcaccactgcactccagcctgggcaacacagtgagactctgtctcaaaaaaaaaaaaaaaaaaagaaagaaagaaagaaaagaaagcttatccaggttatccaggagagaaaccaggtccagttactgctgt

SEQ ID NO: 802923 - DNA, 632 bp, Homo sapiens
tgggtgtggtggctcacgcctgtaatcccagcactttgggaggctgaggcgtgtgggtcacgaggtcaagagattgagaccatcctgaccaacatggtgaaaccccatctctactaaaaatacaaaaattagctgggcatggtggcgtgcacctggagtcccagctactcgggaggctgaagcaggagaaccgcttgaacctgggaggcagaggttgcagtragccgagatcacgccatcgcactccagtctgggtgacagagcaagactctgtctcaaaaaaaaaggggagtagtgataataaatgctttctctgctcatctcatggagttttagtaaggatcacctattaacatgaatagcccaagttttcacatacatttaggattcaaagttatttcacatgcactgaactacatgaatttattacttctctatatgggaggaagtgacagagccaaatgcagtataggccaggcaggtaatgtgagtgaggcaggtgggtgacatacctaccccttatcccctgcaaagccacagcatgtccctacagagtgtcagcaagtaggaatgccagcccagtggcctgatcaattgtatgttaaaaagaaagctgagggccaggctcagtg

SEQ ID NO: 802924 - DNA, 550 bp, Homo sapiens
agatgctcagcatcttttatcattagagaactgcaaattaaaacaatgagatatcactacacatctattagaataactaaaatccaaaacactgacaacaccaaatggtgacagggatatgcagcaacgggaactctctcgttcattgctggtgagaatgcaaaatgatacaaccactttggaagacagtttaggaatttcttacaaagctaaatacagttatgtgtcacttaatgacaggcatacattctgagaaaagtgtcattaggtgatttcattgttatgygaacatcacagagtgtacacatacaaacctagatggtacagtctactacacacctagcctatatggtatagcctactgcttcaagactacaaacttgtatagcatgttactgtactgaatactaggcaactgtaacacaatagtatttgtgtatctaaacatatataaacatagaaaaagtacagtaaaaatacgccataaaagattaaaaaaaaaatcgagtacatatgtaaagggcatttaccatgaatggaacttgcagga

SEQ ID NO: 802925 - DNA, 606 bp, Homo sapiens
aacaatgacttcttctggaagacctccaaaaggacctgcctgaggctgttttacagttaacttttttttataagtaggagtacactctaaaataacaacaaaaagaataataaatatataaaccagtaacagagtcatttatcatcattatcaagcattatataacacatataattggccaggtgctgtggctgacgcctgtaatcccagcactttgggaggccaaggtgggcggatcacgaagtcaggagatcaagaccatcctggctaacacagtgaaaccccgtctctactaaaaatacaaaaaattagcagggcgtggtggcgggcgcctatagtcccagctattctggaggctgaggcaggagaatggtgtgaaaccaggaggcggagcttgcagtgagcagagattgtgccactgcactccagcctgggcaagagagcaagactctgtytccaaaaaaaaaaaaagtacatatgtgttctatacttttatatgactggcagcacagcaggtttgtttacaccagcatctccacaaacatgagtaatgtgttgcattaatatgtgatgatggctatatcatatatgtggctcatcactgac

SEQ ID NO: 802926 - DNA, 606 bp, Homo sapiens
aacaatgacttcttctggaagacctccaaaaggacctgcctgaggctgttttacagttaacttttttttataagtaggagtacactctaaaataacaacaaaaagaataataaatatataaaccagtaacagagtcatttatcatcattatcaagcattatataacacatataattggccaggtgctgtggctgacgcctgtaatcccagcactttgggaggccaaggtgggcggatcacgaagtcaggagatcaagaccatcctggctaacacagtgaaaccccgtctctactaaaaatacaaaaaattagcagggcgtggtggcgggcgcctatagtcccagctattctggaggctgaggcaggagaatggtgtgaaaccaggaggcggagcttgcagtgagcagagattgtgccactgcactccagcctgggcaagagagcaagactctgtttcmaaaaaaaaaaaaagtacatatgtgttctatacttttatatgactggcagcacagcaggtttgtttacaccagcatctccacaaacatgagtaatgtgttgcattaatatgtgatgatggctatatcatatatgtggctcatcactgac

SEQ ID NO: 802927 - DNA, 617 bp, Homo sapiens
gactggagtttcttcctgtaaatttaaggaagacagattgtgaattgaggaccttttacctccagaacttttgtgactttttttttttttttagttccggatatatgaaacctataaataggcaacatctgcataatgttcttcccttgcttacttgacaggtctgttagtgctaagggaagaatgaaatattaatwaagcacttatgctgatgtttccacattgcataatttttaaaatataactgtcacaccaatatgatgaattggtaatattgtaattttggcttgcttttatttctcctttaagacctgaagattattattcttttggacttggaattcatatgtctaattatatgtctattcaagttagaaataggtattaagcagtgggcctaagtagctttctacaactttgtaatcatggagacagtcccctgaggcttgggcatgtttgtcctttaagaatattacatctagtaggatcaggaagggatggggataggaagacagataccagctttataacagaagatagctaggggcaggataatcaggcagtgaagaaataactgcctgtacaagtcatccaatccttattttatagccagtatg

SEQ ID NO: 802928 - DNA, 605 bp, Homo sapiens
gtgtattactgcacttaccaagggagggtttaaggaagagcacaaaatttgaagttagacaaagagctacttggacacttatttaaatctctatttgttcatttgaaagaaataatacctaacttacagaattcttgtgaagattaataatatatgtaaaagtgaattgtaagatactgagctatatagatgttaggtagagtagtttgtaattttatgactatgattgtgtgtagcagtggttttaatttyggctatgcacttgaattacttgtgaagatgtaaagagttgccttggcatctctattttgaaaggtttataggtgattctgatatgcaaagttgagaagcactgccttatattaacaatgttttgcataaatgtcttatgtaagtattatatgaaaagtaatattttattgccatttaaagttcattcatttgctaaatacatattatgcatcaggcattgtcataggttctgaataaacagatgaatcatagcctctacccttgggtttatagtttccgggagaaacagacatgtgcatagacaattacactacattgagacaaaaaatgacaaaaatatggagataagtgca

SEQ ID NO: 802929 - DNA, 540 bp, Homo sapiens
acctacatgggggtgacttaaaaggatcacaaatactcgtcaaaatgagtgaggaaggtaaaatatagacatgaaagggaaaagcagtatagcaaaactttgaaaggaaaagaagacatgttaattaagccttgtatcttacgtctctcttctcgaagaaattattctttgttacttaattcaatattttgcagtctaagatatttgcttcatgctaattaactacctgttttacaggtgaaaagatgtgttgtctctagggaaagggagggagaagaatgtgctggaagtggtagggggagagcacagaccccaaagtcagcacggactctgcaggyggcagagtagagcgttcccatgttgagggactgcgggtgtacatctcaaagcatgtgaatgtgctctgttggtggaactagcacttctctaatcccataactgagcatttctctcaattattttgtagaccaaaattgtcactaatcggaggatcctagatccctgtgtaagtgtgggggtgatcttgcttttcccagccct

SEQ ID NO: 802930 - DNA, 580 bp, Homo sapiens
tgactcatgtaaccaaaacgtgggtccctggggaagctttggctttgggatcaaatgctgaaagcaaaacctaatgggtttaaagtttttaatccccagttgctgtccttggatctggctataattttgcctgtggaatcgctgctgtggtgtttgtggggagggagggaatctttgagacactgtcagttctcagtcctgcccagggaggcagctgcggctcagtccttctctgtcacccgctctccagagaatttacctgcagattaccctcaaaacatgagacaggttcagagcgaggtgggcggytggaatggagccttcacagacagcttgaccacacacagggagctcaggaagcagctttgttggaaaaatgcagggcacttaaactgccacaccaggagggggtttggagaggctggaaagagcatgccattggacacagacactctgggttcaaatcccagctctgccacttactggtggtgtgacccaacatctctgaatggaaaacacatgagaggctgcctgacaggatggccatgagcaagaaagcacccttgtgagcataaccagt

SEQ ID NO: 802931 - DNA, 651 bp, Homo sapiens
gttgaatagtgaaacctcatgttttcctttgtatttaaccacattcaaaggcttcttactcttgagagggaaaaagagcagcacccccaccgccccctgcccctactcttgaaataaaatgatggagaaagatttggagttaaaagaaaaccaagtcctcttgcgtgtggacaaagcagaccttcaccattcaatgctggctggcttggctttagagttaattattgcctgtggtggttgtggctaactggataaagatacatgatttcaaacccaaccccaagtgatatctggcctaggtcaaattgcctgggtggtggagtagtggttcttcaggtgtttcaagatggagtggggtaaggtaaggaaacaacagtaagaatttgaaaaaatccagaatggtcatggaattcaggaaacattctctaaattttatagtcacttgctttgagaaatattcttcctaaaatttaagaaaactaacgcagtcttgtatgaggacaccacattgtgtawttttgtacagataggagttttggaaattccctcaagacaacagagccaggaggaagtaagggaatagaaagaagtcagtgttgaagcttttgtcccaagaaagacccttgtgggcctttttaagtttgagaaagc

SEQ ID NO: 802932 - DNA, 645 bp, Homo sapiens
tgaaatcgggtaacatgatgcttccagctttgttctttttgcttaggattgcctggactatttgggctctttttgggttccatttgaaatttaaaatagttttttctagttctctgaagaatgtcgttggtagtttgataagaatagcattcagtctgtaaataaattctttgggcagtgtggtcattttaatgatattgaatctttctatccatgaacatgggctctttttccatttgtttgtgtcttctctgatttctttgagcagtgttttggaattttcactgtagggatctttcatctccctggtgagctgtattcctaggtatttwattctttttgtggcattgtgaatgggattgccttcctgatttgactcttggcttggctgttgttgatgtataggaaagctagtgatttttgtacattgattttgtatcctgaaactttgctgaagttgtttatcagctgaaggagctttggggctgagactgtagggttttctagacatagaatcatgtcctctgcaaacagggagggtttgacttcctcttttcctgtttggatgccctttatttctttctcttgcctgattactctgactaggacttccaataccatgttgaataggagtggtgagaggga

SEQ ID NO: 802933 - DNA, 631 bp, Homo sapiens
tgttttgtactttggaaggatgtcttcagggcaggttcccggaattgtgattggaggaagctgtcaaaggaatctgagcagttgcacaaggtttgtgtcccaatgcagctgcaagggagggcatattctccaatgctcaatttagatatggtgagaaagcataaggagaaggaagaatctcccagagcacagggccaagagcctaaaaacaatactcaggaagcacccccaccccacaggccaccacccagggagcagatctggacctaatcatgaaacagttcccatctctagggtgggaaagccttgcaatagctgcttatcaggatttccaaattgctagagtagtgcctgttctgtttttatttttcccttttggaattggcctcttggctcttttgagttcaactatatctttattgattttyctatctgctgtatctgtcaatgtgtaatagaggggtattgaagtctccaactataatagtggattcatctatttttccttgcagttctatcagtttctgccatgtgtattttgatgctctgttgttagttgtatacacgttaagaaatgttatggctgcttataggattgacccctttattattatgtaaccgtcctctttat

SEQ ID NO: 802934 - DNA, 599 bp, Homo sapiens
ccttctctcttgtggaatcctcccctatggttttacatctggccccttcttggagatgatacagttgctgtctccagcacacacatgttctagagaattccagttttaggtcagtagttgtgaaagtaagggcagatcactgcttgtcgtgttagttattatgtatgatgtacttgatgtttctagtagagggtcactgctttggcctgtgctttggattatttatttatttattttttgagacaagtctcgctctgtcaccccaggctggagtgcagtgccacaatctcggctcactgcracctccacctcctgagttcaagtgatcctcccacctcatcctcccgagtagctgggactacaggtgtgcacctggctaatttttgtattttttggtagagacagggttttgccatgttggccaggctggtctggaaatcctgacctcaagtgatccgcctgcctcagcctcccaaagtgctgggattacaggtgtgacccaccgcccctggccttcctaacatatttgagtgaattgaggtagttaaattatttccacaaattgagtgagttttttagagtaaattaatttgaatgaa

SEQ ID NO: 802935 - DNA, 627 bp, Homo sapiens
aaatctcccctccccacctcattctgttttgtttttagcccattctggatttctgcactcatgcatgcctcatgtgaccagggataggcagggagaaaaactcaaggggctggggttatgtgtacatcttcatggtattgactgttatgcatgcatggaaacagacctggacatgaaaggataagcttcaagccaggtgcatgagggctcccagctgacttttgggtgcamacaggatgcaacagcttgccacagagtgatagaggaggccatgctaggagagaagggagaacaagcagggcaggcaccctggcccgactcttacacacagtgtgagatgctctcttggtttgggtctcccagatggcgaggaattcagggaaatttctttatttgggagatgcaagaaataatggtagggggttgaagtgatatagtagggaggtgaaacaatggtagggaggtgaagttatataggcaggaggcagtgaatgaaaagtgagctgttaaaccaactactacagtgggcaatgggccttattcctgcagggcaacactaggaagagtaagggagctgggggttttatactcctttccccaagtgtcaagaattgaggtctcctgggg

SEQ ID NO: 802936 - DNA, 562 bp, Homo sapiens
gaggattccccaaggggatgtgaattctcaagcacttccatctctccatgttcatgcaaagaaggtgccaggagccccgtggccatcctcccacaaaagacacacaggtggtggcatctggggggtcaatgtgcatggttgtgcatggtagagacccctggatggagctccatgatgtgggatttacatcccgcccatactctgctgtgagagagatggtatgcagccagtccagccatctgaagcagaacgraaaaatggtatggaaagcaaggcacctgaaaaattttcaaagggagaaaaagaatgagcaaaactatcctgtagaggagagagacattgaaaatgacatatacagacacagaaaaggttgctcagtcaacaacttctgcaggctcaaagcatgggaagtaatcagtaaatggccaatttatctctccctcacagccaagccaactcctaacataattggaagtttaatatattccaacaagttcaggacaagcatactagatcttaaggcaatctcatggccctgcagctcatcctttttttcaaagaa

SEQ ID NO: 802937 - DNA, 488 bp, Homo sapiens
tccgtccccatgacccaagcacctcccatcagacccacctccaacactggagatcagatttcagagtgagacttggtggggccaaacaaatcatattcaaaccatagcaattagaatcttaaaatcaaaattgatggctttatttttctaaaaatgggaaaatatctccaaaacattgttcaaaaacaaaacaaaacaaaamaaaaatgtttgtccttatatcccatcagtttattcaactaacattcactgtggactttttataaggcagtaactgttttatgaataggagatataaaactgggtgaaacagtgaggttcctggccactgtattgtaataatagaggcacatataccaaagagctaaaatacaggcagcaaactctagggactgaagtaaatttccttaatttaatgaaatgtatcaagcagaaacccacaataagcatcatacttaaaggattcatttgaatttttttatttattt

SEQ ID NO: 802938 - DNA, 387 bp, Homo sapiens
ttaaaggattcatttgaatttttttatttatttttattaaatcagatatacttttctagtttttttaatttttattttttgcatttcttgatcatttcaaagtgaggtcagttacagagtgaatgggttcatcctgtcattgtaaataacagtttttygtttaataatggcattttgtattaccaagaccttgcttcacattaggtgttttgtatacattatctcatttaatcaaaaccagcactctatatcatgggtgccaccattcctctgatttttgctaaggaggaaactgaggttcaaaaagggtaaataagttgtccaagaccacacagccattgtttggcagagctggggcaaaggtctatactgctgcaaagcttgtga

SEQ ID NO: 802939 - DNA, 479 bp, Homo sapiens
accccaagcattcttttgcaaatatgagggctagactgaagcctcatttgccacaggtcctatgggactggtggagatatagtgccyggagcctggccttagggaacattcgagcagttagaaagcagaagtgacaggactttggaggctccttattgagcttgtagcatcagccagatgtcaggggacttataccatttactatggaattggagaccaaagatggatggtgggattcggatgctggtgttacagaggcttaggtttctaaaagaggggtctgctttggcagctcagaattgaaaagaggcaggcattgtcctgacagctggtaactgtccctgccatttgtctggctggggaaaatcaacttgctagcccagctctagagactggattaaaccccagaacaagatagaaccagtgttgattggaattcagagcacgtgatcacctgaaggaaatgaatctggagcttt

SEQ ID NO: 802940 - DNA, 604 bp, Homo sapiens
gaaagatgaggacagagagagaatgtcccttggatccaatatggtggccattagtgaccttgttaaaaccagtaggaatggggtggcaagaaggagagtagaacagactataagaaagaatgagttttgatgaaagtattggaattttgatgaccttttttattacaggtttgggagcaactactttcttcactctctaaactgcaaatcattcagggtaattgtsctggttcagttagcccccaagctgagaagacaggcccactgtggtttgagtaacttggaaatcttgtggggtcagtgttttgactctcttcattttggtcatggttcaggattttcacacaccactaaggtctaggggaagcttctcagctttctggataccctctcagggctcatgaagtggcaggcctgccctgggaaggtcaggattcttctgtaaaagcagagaacactgcatggagcccagagagcccactctctgcgctcttcccttcctatgggctcacacggggaaacagatgctttcctataactctgagcactgaagcagctttgctctgccttggccgaaacatctatccaggaccaaattcttaaa

SEQ ID NO: 802941 - DNA, 524 bp, Homo sapiens
cattcccaaatatccagctacatattgttttacctttgaagagaaaaaagcatcagtggggttatgtgattttcatagatgaacaatttttgcaaatatgttaattgaagagtaattggtgctttcttgaccctcctgagcactgatgcttgccaaagggttatacatttcagactaatgatgatatccattactatatgtgcaattgcttataaactaatatatagtcatattaaaatctctaatctgattgagaarttttcagaaacaaggtacactgattttctcaccacttatttcctgctctcatgacagaatttctggagttctttgaattcacctggtttttggagctctgtcaagtcaatatttataactgaactagttcaaacagttcaagcattgtctcttcctttctggttgaagttctgtcttagaagactgttgtagtcagctgtgcttgtcataaagttttgtttaaaattattttagaattttcttctttggctttaatttaaattttt

SEQ ID NO: 802942 - DNA, 524 bp, Homo sapiens
cattcccaaatatccagctacatattgttttacctttgaagagaaaaaagcatcagtggggttatgtgattttcatagatgaacaatttttgcaaatatgttaattgaagagtaattggtgctttcttgaccctcctgagcactgatgcttgccaaagggttatacatttcagactaatgatgatatccattactatatgtgcaattgcttataaactaatatatagtcatattaaaatctctaatctgattgagaaattttcagaaacaaggtacactgattttctcaccacttatttcctgctctcatgacagaatttctggagttctttgaattcacmtggtttttggagctctgtcaagtcaatatttataactgaactagttcaaacagttcaagcattgtctcttcctttctggttgaagttctgtcttagaagactgttgtagtcagctgtgcttgtcataaagttttgtttaaaattattttagaattttcttctttggctttaatttaaattttt

SEQ ID NO: 802943 - DNA, 639 bp, Homo sapiens
gagatgctgtcatgggtggggagaccctgaggtcacccagctgtgtgggatccaaagagccaggacctgagaaggcagactctgcctctgccacagactgggagggagagggcagtcacggccgccagggacacaccgtgtgcccagaccagggcttgccgtaactaacgggtggcaggaaagctttgaggaggctgttgaatgaggccacctgggtcacaacagctttgctagtcaacccagagcagtatctcatttcggctcacatttctcgaacgcttactttgccccagtccttgctttgcctggactaggcactgggatgcagcaataactgtgcccttccctgcacttgaccgcstcaccacctagcaatagacctgcaggcataatggagggtggtgagtgctgcgcagtaactgctctggaaactgagaagaaggtgccatgagtccccctcccttgcccccaaggaggagggaggattaaaaggtcacagagaacagtgtggtagatgagagcagctttcaggctgacagctgtgggcagcaatcctgactctcacacttgcctgacatgaggccttaagggggctgcttaccttctgtgaccctcagtttcttcctctgtaaaaaggag

SEQ ID NO: 802944 - DNA, 634 bp, Homo sapiens
ataagaactttttaaagtgttgaagctagggtttcaatgtaatacaacatgagcattaaagagaacatcaaggtccatctaattcacatgaacaacccacctgatgtggctgaactgtctgcagtccttggcctccacacaagaggtaccacctcctctctgcatcaccctgactcccctggcccagggctacacctaggttcttgatcttgagataaatgtgcccaaattaaatggtatggattccttattatcagtagacttctttcacatgtgcctgccagttactaagcatttttccagaagcattttgataacaatcttacacatwaacaaatattgtattctcttaggttttcactctccttcatctgtctattaatagttatgttcttgttcatattccacatgctgttcatttatgtgtttttttttccctagacaagactgttaccagataggggttccaatccagacaccaagagcaagttcttggatcttgggctatcaagaattcgaggctagtccctaaactgaaagcaagtttattaagaaagtaaaggaataaaagaatggctattccatagacagaacaggaccagggctgctggttgcccatttttattgttacttc

SEQ ID NO: 802945 - DNA, 612 bp, Homo sapiens
  misc_feature 25, 26, 34: n = A,T,C or G
ccgggaggttgtgagtttgtgtgcnnacgcccgnagagaagttgtgagcctgtgtgtgcacctaacccagaggttctaagtgtgtgcacttgtatgtgtgtgtgcacacgcggacagagtgattgtaaggatatgtgtgcgaacctcacagagaggttgtgagattgtaagggtttgcgcacctaacggagatgttgtgagtgctttttttcctgacaggctgtgagtttgctgttgtgtgtattagaggtttgtatgggcctgactgaggggttgtggaatgtgtgtgcgtgagcakgagcctggagaggttctatgcctgttcactcctgacagagtttgtgagtgtgtatgattgtgtgactacaccacccaactggcggattgaatgtgttgtatacatctactgggagggcgtgtgtgtgtgtaaattgtatacaatgaggctgtgtgcatcagtgcacctaaccacgaacctgtgtgtacagatgtgtgtgccttcctgtgtatcagacaatgaggccatgtgtctgggtgtgtttagttggttgtgcaagtgctggagtctgggggggagaagaggcagttcggagccatccccgctttctccct

SEQ ID NO: 802946 - DNA, 612 bp, Homo sapiens
catggcactggtggcagcctgacaccaggctgaaagccataaaactgaaaaacatatctagatctttttccatttcccaagtgtcattctccccgctctgaaatctgcttactgtctatctttttacagtgcttccaggtagttattttttatattttgttaatagtttatagttttctccaggagaatcagtctaggatggaaaacctagtctatggtagaggaaaaataatcaaaacagkagtttcctatagagaagtaagagtttttacccaggtatatatatttgtcaagactcagtgaatgtacacttaagatgtgggcacttcactgaatgtaaatttcacctcaaaaaaaactaatagtgaactgtagttaatgacaggcgtatgtttgaacatttacaaaataaaatattgagaagaaaaagtgaagtaaaattgtactttttgattccatgtacacagaattcctgaaatgcagttggttgaggcttcattgggatctgcttttataaacagacaagaaaaatgtgttatgaacacatttgttctcagtttcttgagcgctcctataaacaaagggctgtggaataatcaatcagtaagaatc

SEQ ID NO: 802947 - DNA, 612 bp, Homo sapiens
catggcactggtggcagcctgacaccaggctgaaagccataaaactgaaaaacatatctagatctttttccatttcccaagtgtcattctccccgctctgaaatctgcttactgtctatctttttacagtgcttccaggtagttattttttatattttgttaatagtttatagttttctccaggagaatcagtctaggatggaaaacctagtctatggtagaggaaaaataatcaaaacaggagtttcctatagagaagtaagagtttttacccaggtatatatatttgtcaagactcagtgaatgtacacttaagatktgggcacttcactgaatgtaaatttcacctcaaaaaaaactaatagtgaactgtagttaatgacaggcgtatgtttgaacatttacaaaataaaatattgagaagaaaaagtgaagtaaaattgtactttttgattccatgtacacagaattcctgaaatgcagttggttgaggcttcattgggatctgcttttataaacagacaagaaaaatgtgttatgaacacatttgttctcagtttcttgagcgctcctataaacaaagggctgtggaataatcaatcagtaagaatc

SEQ ID NO: 802948 - DNA, 528 bp, Homo sapiens
  misc_feature 123: n = A,T,C or G
gtcgagggactcgagacatttagagatatctgggcagaagattccaggcacaggaaatacaccctgaagcaggagggtgttggtatgttggaggatgagcaaggaggacaaggccaatgtggntggagctaagagagcaagagaacggggaagtggggcgggctgatcatgggaggagaaagagaggtaaccgggaccaagtcctgttgggccttgtaataattcaccttttatgactgggcacggtkgctcacgcctgtaatcccaacactttgggaggctgaggcggttggatcacctgaggtcaggagttcaagaccaggctggccaacatggcgaaaaccctgtctctactaaaaatacacacacacacacacacacacacacacacacacacacacacaaaattagctgggagtggtggtgggtgcctgtaatcccagctacttgggaggctgaggcaggagaattacttgaacccaggaggaggaggttgcagtgagctgagattgctccattgcactccag

SEQ ID NO: 802949 - DNA, 528 bp, Homo sapiens
  misc_feature 123: n = A,T,C or G
gtcgagggactcgagacatttagagatatctgggcagaagattccaggcacaggaaatacaccctgaagcaggagggtgttggtatgttggaggatgagcaaggaggacaaggccaatgtggntggagctaagagagcaagagaacggggaagtggggcgggctgatcatgggaggagaaagagaggtaaccgggaccaagtcctgttgggccttgtaataattcaccttttatgactgggcacggttgctcacgcctgtaatcccaacactttgggaggctgaggcsgttggatcacctgaggtcaggagttcaagaccaggctggccaacatggcgaaaaccctgtctctactaaaaatacacacacacacacacacacacacacacacacacacacacacaaaattagctgggagtggtggtgggtgcctgtaatcccagctacttgggaggctgaggcaggagaattacttgaacccaggaggaggaggttgcagtgagctgagattgctccattgcactccag

SEQ ID NO: 802950 - DNA, 528 bp, Homo sapiens
  misc_feature 123: n = A,T,C or G
gtcgagggactcgagacatttagagatatctgggcagaagattccaggcacaggaaatacaccctgaagcaggagggtgttggtatgttggaggatgagcaaggaggacaaggccaatgtggntggagctaagagagcaagagaacggggaagtggggcgggctgatcatgggaggagaaagagaggtaaccgggaccaagtcctgttgggccttgtaataattcaccttttatgactgggcacggttgctcacgcctgtaatcccaacactttgggaggctgaggcggktggatcacctgaggtcaggagttcaagaccaggctggccaacatggcgaaaaccctgtctctactaaaaatacacacacacacacacacacacacacacacacacacacacacaaaattagctgggagtggtggtgggtgcctgtaatcccagctacttgggaggctgaggcaggagaattacttgaacccaggaggaggaggttgcagtgagctgagattgctccattgcactccag

SEQ ID NO: 802951 - DNA, 596 bp, Homo sapiens
gcagagtgggctattcaagtcaagggcatagagcatagggtcccagggctcagggccacagagcctccgcggcagaattgggaggcggccagcccagcaggtgaaaacactgatggggcagggcagctgtggccggcagcccaaggggaagaaagtggcagattttgtagatgggcagggaagtccgtggcccacaaattcagtgtgcctgcccccaaccctggccccatcctcctttcccctcactctagagggcggcaccactccctgctccatggaaamtgagcaaggtaatctcgggctcccttcaaaggtacccacaaaagaaggaagggctcctgtagggagagaaagaggcactggaggagggagaaagcgaggagagaggaggcacccagggacacgaggggcagggggagagaagagggggtgtgtgaagcgggtagggagtgccccgggaaagagaggggagcctggggaagagaaggaaagacctggggaggagggtggggagggagagagggaggggtgtaggggaagacagggaaccaggaaaggaggaggtgcctggggaggaaaaatgggagaaaaaggga

SEQ ID NO: 802952 - DNA, 513 bp, Homo sapiens
  misc_feature 173: n = A,T,C or G
ctcttgcagtaaatgaccatgtcagagagctcctgtgctagcctgagcttgtcctcctggggaacacggggaggcccgggttagattcagtggttggggtagggtaggcactgagaaagccagaaacccaggcgcagagagacagagggagacagacagagagagcggggcanaagggtctgagtggcagccacagagaactgagacaaggcagacctcccacgggtgaggggatggggaaggcccgggctgccccaccccamagctccccctcaaacctttggcttgtgctgcacacggctcctcactgcctcatcctccatctcagcagcctcgtcttcgtctgacaccacagtggcctcaggccccttccccctccaggggcaggagccccaggctttcttcccctatcagcaggatcttccccttcagttgctaggtggggaggggcaactggtcaagacacacctagcgccccggctaggctccccaccctcccccaggatcccccat

SEQ ID NO: 802953 - DNA, 513 bp, Homo sapiens
  misc_feature 173: n = A,T,C or G
ctcttgcagtaaatgaccatgtcagagagctcctgtgctagcctgagcttgtcctcctggggaacacggggaggcccgggttagattcagtggttggggtagggtaggcactgagaaagccagaaacccaggcgcagagagacagagggagacagacagagagagcggggcanaagggtctgagtggcagccacagagaactgagacaaggcagacctcccacgggtgaggggatggggaaggcccgggctgccccaccccaaagctccccctcaaaccttkggcttgtgctgcacacggctcctcactgcctcatcctccatctcagcagcctcgtcttcgtctgacaccacagtggcctcaggccccttccccctccaggggcaggagccccaggctttcttcccctatcagcaggatcttccccttcagttgctaggtggggaggggcaactggtcaagacacacctagcgccccggctaggctccccaccctcccccaggatcccccat

SEQ ID NO: 802954 - DNA, 623 bp, Homo sapiens
tgacaaaaatgccatagaattgggctttttaaaaagctcacaatcaggcagatgtgccattgagaaataacacttaaaagtctttcaaatgctcaaaagccacacagaaaaggaaattaacagggctcaaaatgtgtcccctaaggatggacatacaccagcaatgaaaaawttgaaagtgaaattaagaaaacattccatttacagtagcagcaaagtgaataaaatgcttttaaagaaattgtttaagtgcaaaacctggaaaaccataaggcactgttgaaaaaaaatgaaagaagacataaataaatggaaagaattacatgttcatggatcagaagacttgacattattatactgggaatatgctccaaattgatctatacattcaatataatccctagcaaaatcttgctggcttctttgcagaaattgacaggctaatcctaaaattcgtatagaaattcaagggacccagaatagtaaagcaatattgaaaaaaaaaacagaaacaaatttagagaactcacatttccttatttcaaaacttactacaaagttacagaaagcaaaatattgtggtagtggtgcaaggacagacatatagacaaacagaataaaat

SEQ ID NO: 802955 - DNA, 623 bp, Homo sapiens
tgacaaaaatgccatagaattgggctttttaaaaagctcacaatcaggcagatgtgccattgagaaataacacttaaaagtctttcaaatgctcaaaagccacacagaaaaggaaattaacagggctcaaaatgtgtcccctaaggatggacatacaccagcaatgaaaaaattgaaagtgaaattaagaaaacattccatttacagtagcagcaaagtgaataaaatgcttttaaagaaattgtttaagtgcaaaacctggaaaaccataaggcactgttgaaaaaaaatgaaagaagacataaataaatggaaagaattacatgttcatggatcagaagacttgacattattatactgggaatatgctccaaattgatctatacattcaatataatccctakcaaaatcttgctggcttctttgcagaaattgacaggctaatcctaaaattcgtatagaaattcaagggacccagaatagtaaagcaatattgaaaaaaaaaacagaaacaaatttagagaactcacatttccttatttcaaaacttactacaaagttacagaaagcaaaatattgtggtagtggtgcaaggacagacatatagacaaacagaataaaat

SEQ ID NO: 802956 - DNA, 552 bp, Homo sapiens
ccaaaactttgtgcttcaaagatatcaagaggctgatctgagtgcaggggtgtttacaactaattgatcacaagcagttccagatttctttgttccttctccactctcactgtttcacttttctagcctaaaaaaacccatcaagaragagaaaagacaacccacagaatggagaaattatttgcaagcataaatctcataaaagacttgtatctataatatataaagagctcttacaactcaataataaagacaaatgaaccaaaaaatgggcaaaggacctgaatagatatttctccaaagaagatatataaacgtacatggaaaaatgctcaatatcactaatcattagggaaatgcaaatcaaaatcacaatgagataccacttcaataccacagggtgtctataatcaagacaaatgtagtgtcaaggacatggaaaactgaaaccctcgtatactgctggtgggaatgtaaattgatgcagcctgtttggaaaacagtttggcagtttctcaaaaggttaaacatagttaccatatgacccagcga

SEQ ID NO: 802957 - DNA, 552 bp, Homo sapiens
ccaaaactttgtgcttcaaagatatcaagaggctgatctgagtgcaggggtgtttacaactaattgatcacaagcagttccagatttctttgttccttctccactctcactgtttcacttttctagcctaaaaaaacccatcaagagagagaaaagacaacccacagaatggagaaattatttgcaagcataaatctcataaaagacttgtatctataatatataaagagctcttacaactcaataataaagacaaatgawccaaaaaatgggcaaaggacctgaatagatatttctccaaagaagatatataaacgtacatggaaaaatgctcaatatcactaatcattagggaaatgcaaatcaaaatcacaatgagataccacttcaataccacagggtgtctataatcaagacaaatgtagtgtcaaggacatggaaaactgaaaccctcgtatactgctggtgggaatgtaaattgatgcagcctgtttggaaaacagtttggcagtttctcaaaaggttaaacatagttaccatatgacccagcga

SEQ ID NO: 802958 - DNA, 419 bp, Homo sapiens
ctcctgtgggagggtcgtggcgaggagactttgagctgaccctgggttgaccttgcagcctgcccaggctagctgtgcacagtgaggtggccatgtggtggggcatacagggtgttgcaggtgccagtgggaagctgagggaggtgccaggagtcctgttcctataccaagggtgatgcataataaagacacactgggcctgggacccacagcgatacacagctacacagatatggccacacaaatacacagtcacacmctagaccaccactcacacaacctcaaagagacaatgagccacacacaatgacacactgccccccaaaattacacactgtcacagggagttgcacagtgtcacacttagtcatgcatagccacaccaacatatagtgccagagcatcatgatgatgatgat

SEQ ID NO: 802959 - DNA, 626 bp, Homo sapiens
ctcagccaaggtcagctttcttgaggaggtagtgctgcaagccattagtagccagtactcacagcagctggggcaggatgcacaatggtccagtgagggggatctgggtcggcatcagtggcatctactacaatatctctggtcaactaagacctcccccaagttctttccatgtgaactcctcttagtacaggtcctccatttgaaatgtatgcaatttatttgtgaacctaaatgggaaacttcaccattatscccatgaaacatgctcttgttagcttgggtttgtttgggcttgttaatgttagtctaatacccagctgtctccagccctaggtcagtgccatttgctaaacatacttcctaaatcttctgccttgtctttggtgaaatggctaaaaagtacagggacagcctggggagctgtggctctccactacggacctcccccagctcatcctgactctattatcaccagggtagcatgaccaagcatactcctcttaaggcagtcgaggtggaatggaagaggtcagaagacatatgagggagagagcctggaaagtgcatcccacaatgtctgtgttccctctgaggaatggctcaccacagtagaacctctgtgt

SEQ ID NO: 802960 - DNA, 533 bp, Homo sapiens
actttttgagtcaggattgagataaagttttttgattctgtaagtactttaaggcttggctgagtgcaaacagatccaacgtttgagcagaccaattattaggcagttctcctaactctgcttccacaagagtctccttatcaattactgaatacccattgtggtttttttctcaatcacctgggagaaaccatctattgtcctgtcctgaagggaattcctcctaggtcttgtcagatctttgtacggtaattaagatttaaatcccctgttaggaaatctgctgggttaagggaattatcagtggttggtgttaaattacctttttctaacagaatagccccatactttaagatttttgagttagtaagctayctttttgcttttttgacttagaataattctgaactggtgaggtgtgctcacaatgaggtttcctctaaaagttacttttctactttcttctgttagcaaagcagttgctgctacagattgaatgcatttgggccatccgtgggttactgggttaagga

SEQ ID NO: 802961 - DNA, 583 bp, Homo sapiens
gttttgaagggttctgtgggggaagtcacattgcttttctactttatccagagccaacttaggagtctgtgtgatcagttaccatgtgtgtaagtgctttccagccttgaaatgtcatttctgtagttctctcctgttctctttgttcttacaggtttatgcattaaactactttattgcagttttagtgggactacaagagggagcaaaaaggaaatgtttgtgtataatccttggcctttacctggaagctctccttccagtgttttccaggaatgatggggcctggaaaaaggcatgtatttcagagctgtgggaggatggtgccagggccttgtttacaaagtccaagtkggaagtgacttgaggtcacctggcttggttccttgtttctaggcgggacttctgaaggcagatggagctcctcctgtcaccttggaaggtgctcctgtatttacatttctggcatttgtagtgaacaaaacagtggaaaatcctcatgcaaaatacatagaaatgctggaaaaagtataataaacacccttttaaaatgcatatacattgctgcatgtataagaagtaa

SEQ ID NO: 802962 - DNA, 567 bp, Homo sapiens
tatttaaaaattattatccaagtataattgatgctgtgacctcttgtaactgtggtgaatgtggtgaatcgaggttggctatcattgataacctgtctgaattgctctgtcttgcccgccatctggtgcacagaggctgtaactcccatgtcccagctgtgtgtgtatggccagtcactgtaaatcctgccctcctctgtcctcacataggtaggcacgagacggtacatggctcctgaggtgctcgagggagccatcaacttccagagagatgccttcctgcgcattgacatgtatgccatggggttggtgctgwgggagcttgtgtctcgctgcaaggctgcagacggtaagtaggatggcagccctgggcatcctagattgagtgatagggagcagtgggaccttagagtgatcctgccaggctctctctttctcctaggacccgtggatgagtacatgctgccctttgaggaagagattggccagcacccttcgttggaggagctgcaggaggtggtggtgcacaagaagatgaggcccaccattaaagatcactggttgaaa

SEQ ID NO: 802963 - DNA, 591 bp, Homo sapiens
aaccacagtattattaatgcccttaaagaatttaacaataattctttattaccaattttatagtcagtgttcaaatattcctggttgtctttaattttttgttgttgttggttggtttgaaccaggattcaaataagatagacacaaaaatttggttgatatgtctctttagttcctataaatctgtagattttcctttcyttttttttttcctccattcagattatctgttgaagatctaggatgtttgtcctagagttcctttccatattctggatttgctgatcgcatacctgtggaagcatttaacatttcttttcccaagagataaatttctgggaggaaaactttaccttgtaattggacatatatatacaccctattaaaaataatttaaaaaaatttttaaggccagtcaagtgaagcagtgggagtagagaaggaacaaagaagtatgtaactggttgtgaacaattagttgtaaacaccactgcacttataccagcctataaaaataattggattttactttttagataagaaactgaggaatgaggacatgcattgttatctctcatttagaaatctctt

SEQ ID NO: 802964 - DNA, 640 bp, Homo sapiens
gaatgaagaccagtgttttttgtattctttggtgcatgtactcataaacctatgatttctaagattcttttttacttctcctttcttatctacagaagcccaaaagtcaggtgcctctttattaattttaaagcacaatttttgtagtcttctaagtcgatgcttttgagttcatgagttcatgttatgttaggagttgtgaaattagatacttayattaaacacggtttagtcttgatgcttttttttcgctcatggcattaaagtcataactggcaaactatctttccttgaaattaaacttgaaaaatttttaaattatgcaattatatgtgcataatgataaaaatgctaaatcttaaaacatgattgtggaaatatatgacattgtaatgaaattcaaacagtacaaagcagcatgaaaaggtaaagtctcacttatactccttatcccactgtccagtttttatttgttttggcacttatttctatatctcagaataatgagcactaaaatatatttttaacttgtgacctgtcgcttattaacagttactttatctctataaaattatgaaatttattgtttatttcttgcactgcactatactctgctagtcatatatacttaattttagtt

SEQ ID NO: 802965 - DNA, 621 bp, Homo sapiens
gattgtggaaatatatgacattgtaatgaaattcaaacagtacaaagcagcatgaaaaggtaaagtctcacttatactccttatcccactgtccagtttttatttgttttggcacttatttctatatctcagaataatgagcactaaaatatatttttaacttgtgacctgtcgcttattaacagttactttatctctataaaattatgaaatttattgtttatttcttgcactgcactatactctgctagtcatatatacttaattttagttcttccgttggtaaactttgcatcatatactttacataatatacttgarcctctaatcttgatctaccatttatacttgtcaaggtttgtagcatttacatttatgtttgctaacgataatgtagtctgagttttgcctgtagcagagtttgtaactgaggcctcttatggcaagtccagcccatagaggtattttatttggctcacatggtatatatatatatattttagtttttcatagagatagggtcttgctctgtctgctaggctggagtgcagtgacaagatcgtagctcactgtaacctttatcttctgggctttcgagatcttcccacttcagcctaccaa

SEQ ID NO: 802966 - DNA, 543 bp, Homo sapiens
ccttctcagtgcattgcatcaggaggtgcataatatcagtttgtctgattattgatgattttaactttacttggttaaggtggtgtctaccaggttttttcaccatttccccctttggaatttataagtaatctgtgggatatactttgaggcgatgtaagcatctttttcgtcttcgaactttcactcaatagttttagcatccattgatatttcctgcctgaattagttattactatgttagttgctaaatgatgactttctaattcttacyccctaatttattagttgacattccactgttagagcttttccttgttatcaatgtagactcacagatttatttttattcaaagagttttaatgtttactgtgattgttcattttgatgctcaaattgccccagatttagccagtgggagctccttccagtgtctcctgtgtccttttgatgcatcctcatcattttttagcatttcctactttctggtataaggctatgttccatgttcattcatgcatcggccatttctccaaggagca

SEQ ID NO: 802967 - DNA, 543 bp, Homo sapiens
ccttctcagtgcattgcatcaggaggtgcataatatcagtttgtctgattattgatgattttaactttacttggttaaggtggtgtctaccaggttttttcaccatttccccctttggaatttataagtaatctgtgggatatactttgaggcgatgtaagcatctttttcgtcttcgaactttcactcaatagttttagcatccattgatatttcctgcctgaattagttattactatgttagttgctaaatgatgactttctaattcttaccccytaatttattagttgacattccactgttagagcttttccttgttatcaatgtagactcacagatttatttttattcaaagagttttaatgtttactgtgattgttcattttgatgctcaaattgccccagatttagccagtgggagctccttccagtgtctcctgtgtccttttgatgcatcctcatcattttttagcatttcctactttctggtataaggctatgttccatgttcattcatgcatcggccatttctccaaggagca

SEQ ID NO: 802968 - DNA, 617 bp, Homo sapiens
ttcttgaaatttaaggccttaatagggctggaatttttgtttatgatatgatgaatctaattttaatttatttttccatttactgacctatcatgccactcccctctcagatatcaaaactttaaatttgcatggatatatttctgggctttctattagctawttctatgttggcatattctcattaattcatataactttataataaagtttgataatttgcagggcacatcattcttattattcttcagaattttcttaggtatttatgccctttgtccttcaatatacattttagaatcttcttgccaaaaataattttataaaaaataccttttggattttgactagagttgtgttgaatctacagatcaatatggagaactgacaacttttattcatgaccatgagatagctctacatttacttttctttcttcatatatttctgtatgttttatcattattttacacataggtcttgtgcatatttttaaaccattttttaaaatgtaatatatacacaacacaaaatttaacatcttaaccattgttaagtgcacagttcagtggcattaagtaattcacatcattgtgcaaccctcactaccatccatc

SEQ ID NO: 802969 - DNA, 636 bp, Homo sapiens
gacttttttggctggttgtgttgtttactgtcctctgattctatctataactttcttgtatgcccaatcttcactatttttatacatgtattgctattttatcattgtatgtctcttgtcaatgtcatgcctattgtaggaaaagaaaaggatgcaatcaaagacccayaaatcatcataaattgtaggatagatctgatccagttggcttttcagattgaaccctaggccttactccctctcaccacttaaacaattggctattaaatcaggtcagattgtgtccttcttctgtgatctgaactcactaatattgaaactatcatcaccaatgacagatgaccaaataaacaaccctgggaatgagatttcctagcattgtgggacttcctgctggttgttggccttcacatacattccataaaatgatctttggccaatagtggggactgaggcctcaactctgaccttttattctcttgccaaaaatcctgtctaaggggcctggagattcacactccacaagccataaaatctcgtgatttttttttcaattaacctggtataatgtggcttattttccaagctgaccctgtgatagcatcacataacacatggcagacccccttatcttaa

SEQ ID NO: 802970 - DNA, 550 bp, Homo sapiens
cacaatggtttaactcccttgaccaactgtcaactaaagaattcctaaaactcacctatgacttgtaagacccctcgttgagatgtcttrccttttcaggatgaaccaatgtataccttccacttattgatttacaatttaatttgcaacttgtgtctccatgaaatgtacaaaatcaaactgtaagctgaccacattgggctcactctctcagaagctcttaagactgtgtaaccctaggccatggtcactcatattggcttagaataaagctatctaaatactttggcagaatttggttttttcatcaccacaactgaaaaaacttgaccttcacaaaaccacttttctgtttagtagaaatttcccagggctacaaagccttcactgtatgagctgcaaatcaagccaaaatgttatcagagatgaagagatggggatagccatcaggcctggggatggacctccctggagctgggcattcaagaggatgagtgcagcagaacgcgtatccagggaggtctggtctgctgatttttctaggcataaa

SEQ ID NO: 802971 - DNA, 613 bp, Homo sapiens
cacatggcagacccccttatcttaactcaagtgttcctttctactgacttcatgtctttacacaatggtttaactcccttgaccaactgtcaactaaagaattcctaaaactcacctatgacttgtaagacccctcgttgagatgtcttaccttttcaggatgaaccaatgtataccttccacttattgatttacaatttaatttgcaacttgtgtctccatgaaatgtacaaaatcaaactgtaagctgaccacmttgggctcactctctcagaagctcttaagactgtgtaaccctaggccatggtcactcatattggcttagaataaagctatctaaatactttggcagaatttggttttttcatcaccacaactgaaaaaacttgaccttcacaaaaccacttttctgtttagtagaaatttcccagggctacaaagccttcactgtatgagctgcaaatcaagccaaaatgttatcagagatgaagagatggggatagccatcaggcctggggatggacctccctggagctgggcattcaagaggatgagtgcagcagaacgcgtatccagggaggtctggtctgctgatttttctaggcataaagca

SEQ ID NO: 802972 - DNA, 613 bp, Homo sapiens
cacatggcagacccccttatcttaactcaagtgttcctttctactgacttcatgtctttacacaatggtttaactcccttgaccaactgtcaactaaagaattcctaaaactcacctatgacttgtaagacccctcgttgagatgtcttaccttttcaggatgaaccaatgtataccttccacttattgatttacaatttaatttgcaacttgtgtctccatgaaatgtacaaaatcaaactgtaagctgaccacattgggctcwctctctcagaagctcttaagactgtgtaaccctaggccatggtcactcatattggcttagaataaagctatctaaatactttggcagaatttggttttttcatcaccacaactgaaaaaacttgaccttcacaaaaccacttttctgtttagtagaaatttcccagggctacaaagccttcactgtatgagctgcaaatcaagccaaaatgttatcagagatgaagagatggggatagccatcaggcctggggatggacctccctggagctgggcattcaagaggatgagtgcagcagaacgcgtatccagggaggtctggtctgctgatttttctaggcataaagca

SEQ ID NO: 802973 - DNA, 589 bp, Homo sapiens
attttatacatataaaaataatttacatgcaaatgaccaagaggaaaggttaagtgactctagtgtaaataattagttttctgatcctgccagagcatattaagaaaaattcactttggcagaattatatggatttgaagaagtaacaagtgggtttctctaaagcacagtttggctttttactagaatatcaagtcaccttttttgggtgaggagagtacaaagggagtgggcagctggtgaaaataaacattkaaaattacttaaaacttcaacaaatgggatctgcatttaaatctgttttggtctatcttccctttgttttttctaatcccaacaatgcaaacctcagccactgtcaagggcaatctcagactgggggttgctgcctagggtggggttctagcaagacttacaagcagagctcagggaaaagtctgcatgggaaaacagagccagacttagaaggcattgctgatgaatcccattttcttattacaggagagctagcaaaaactgcaatatgatgtgtaaagtcagtgtaatcttacggaagtcatataaaagtcacaacatgaggcatgagata

SEQ ID NO: 802974 - DNA, 594 bp, Homo sapiens
tttccccaggagacctaaactttggtgaggaccagtcctaagggaaggaggaatacagcttgccgaacacagcccttgagtcaaaggaaacatgatcatgacatcagctgctgaaaggggcacaccaaagcctgggaacagatttagagaggtggtcatctcttgccctctgtcaccttcctagtgyactgctgcagacccagcagtggtcatcctgttggggcccaaggaacgtgggctgaaagaggctgcttcttaggtttctccagcagctctgcccctgctgaagactagtacacatggggacagggtgcttttggcacttcgtcacttctgcacctgtcgaggacaagtacacagaggagaagaccctgcagccagctgttactcttaagcactgtctactggactgaagcctgaattacaccaccaaacaaagatacatcaccacaccaagccaccacaggagcctatctgcaaccaaggaacttgtacagagccttggtcctctgaaagtacccagaaatgaagcaaactgatcctatacaacatacaccacagtcatacccttaagagaaagacagaatgaaaaat

SEQ ID NO: 802975 - DNA, 588 bp, Homo sapiens
gagtcaccatggaagcatgtcacctgagagggctgaggccatctgggaggactcatgtcactgaacaggacagaggtcacctgggagagctccctctagccctaggggatttagggtgcagactctgcacccctctcctgaccctgggcgtgaggactaagcaagtcccccacaactcagttgaaaagggacctggagggacttctgcagtgagtgtccaaactcacgtagtccgaaggggcacaggcaaggatyattcatgtcccctatcctgggacaggctgaaaaggccactgtgccaggcctggggcagcacctgtgaactgcacccaccacgagggcaggcgatgggccactgatcaccacacaatgggtcctctgatggcccaggagctgcctgccaggcacaggagggcggctgggtccagaccccatgtgggcagcccatggagtgagctcagcggctctccctgcctggaagggtctgggaagtgggggccaagcaggaacagccagctgggtgacctcctccctgtctactgtgatcctacggggttaagacaaaggggaaattggatccctgccagg

SEQ ID NO: 802976 - DNA, 644 bp, Homo sapiens
agcctattgtggctacagcccagcaggtcccaggtggcaccagccaagatgaaggtggcattgagggctgaagtctccctcaccatgaagggatgatgtatagtgggtggggcctcaggaggaagagggccaccaaccctaccyggcccctaacctgctgcctggagtaggcaggtaccagaggcatggggtgaggcatgttgcaggtcgaggaccagggccatctcactgcctgagcccatggactggctcaggggtctgtcagatgattctagagctgagttggaggtaagggcagggggtttgttcctgggttcaagaccatggaaggaaggggtagagaaggaggccaacaagtgaggaggcaaattacagtggctggcagaaggagagagaagccaggacaggtggctgtggccctgtccctgcaggcagacccaggaaggagctcagagacaggattcatgccaagcctgcctacccagcacatctctcctcatggacatgagagaaaaccctccagcttggccctcacatctgtgaaacccacagtaatggggctgacatcctctgccctatgcaagagaggtttcccaagcacttgcagcaagtgagactgcacaggatggcgaatccacaaagaa

SEQ ID NO: 802977 - DNA, 644 bp, Homo sapiens
agcctattgtggctacagcccagcaggtcccaggtggcaccagccaagatgaaggtggcattgagggctgaagtctccctcaccatgaagggatgatgtatagtgggtggggcctcaggaggaagagggccaccaaccctacctggcccctaacctgctgcctggagtaggcaggtaccagaggcatggggtgaggcatgttgcaggtcgaggaccagggccatctcmctgcctgagcccatggactggctcaggggtctgtcagatgattctagagctgagttggaggtaagggcagggggtttgttcctgggttcaagaccatggaaggaaggggtagagaaggaggccaacaagtgaggaggcaaattacagtggctggcagaaggagagagaagccaggacaggtggctgtggccctgtccctgcaggcagacccaggaaggagctcagagacaggattcatgccaagcctgcctacccagcacatctctcctcatggacatgagagaaaaccctccagcttggccctcacatctgtgaaacccacagtaatggggctgacatcctctgccctatgcaagagaggtttcccaagcacttgcagcaagtgagactgcacaggatggcgaatccacaaagaa

SEQ ID NO: 802978 - DNA, 644 bp, Homo sapiens
agcctattgtggctacagcccagcaggtcccaggtggcaccagccaagatgaaggtggcattgagggctgaagtctccctcaccatgaagggatgatgtatagtgggtggggcctcaggaggaagagggccaccaaccctacctggcccctaacctgctgcctggagtaggcaggtaccagaggcatggggtgaggcatgttgcaggtcgaggaccagggccatctcactgcctgagcccatggactggctcaggggtctgtcagatgattctagagctgagttggaggtaagggcagggggtttgttcctgggttcaagaccatggaaggaaggggtagagaaggaggccaacaagtgaggaggcraattacagtggctggcagaaggagagagaagccaggacaggtggctgtggccctgtccctgcaggcagacccaggaaggagctcagagacaggattcatgccaagcctgcctacccagcacatctctcctcatggacatgagagaaaaccctccagcttggccctcacatctgtgaaacccacagtaatggggctgacatcctctgccctatgcaagagaggtttcccaagcacttgcagcaagtgagactgcacaggatggcgaatccacaaagaa

SEQ ID NO: 802979 - DNA, 595 bp, Homo sapiens
cattcactagattcaccatcaattcaaaattagataacccatgaaggagctcatgtatatgtatatatactgatgaagcactactatgttacttttggaataaaaattaatgcttatctatataacttgcccattaaaatccccaagcatggcaatgtgtatagtcaaaatagctactagagttcatttttaaattcttgtatatataattctaagatataacagtaaattagagtctggcacataaggtttttttaaataaaagagaagctataaaaatgcacatgaaattacactcattagaagagayttaatttttacataaacttggatttgccactagttagatttgagtcctcaaacataaactatatataaataagggttgatgtcaattaatattatgctagacttatgccacgacaaaagcatcataaaataataccagtctttatgatataaattatgtaattgctaataaatattattcttctgaataattttaccctagtaattttcttcaacctgacagggtttcatggacaattcgaaccatgagtatatgcaaatgataaggtcaggattcatattttac

SEQ ID NO: 802980 - DNA, 644 bp, Homo sapiens
gagtatcagtggccctagcaattatatgtaaaggcaatgctacttgcaagtttcccatcatataaaacctgtttatgatgttctgccaaatgaatatcactcttagatttaaacttgaaggtactctgaaaaaataaaactaagktaaaccctgtttttaaaagcaacaattaaaaagccaaagttttaaagcagagaaacatttgcaataagaaagtacttgtgtacctttcatgtgtcagggactattcagtggtgttacttacttcgttatagtcacttcaattcaatgagagttaagttttattatgccaataaagatgctcagatcttcattttctaatttaaagtttttgattactggcaaaatcatttcattagaaaaaaatatcaaacctgattttatatataataggattgtacttgactacatcatagcataagtttaacttttcttgttaatattttaaaaagtatttatgtaaataaacagtgcctgacacgtgaattacttacaaaaaagactatcatttgaggctataaaaagttaatatgcaaaaatattcatatctttactaaaaagcaaatcaacctatgaaataccaatgctactcaacaataatatcacaatatacatactaaac

SEQ ID NO: 802981 - DNA, 644 bp, Homo sapiens
gagtatcagtggccctagcaattatatgtaaaggcaatgctacttgcaagtttcccatcatataaaacctgtttatgatgttctgccaaatgaatatcactcttagatttaaacttgaaggtactctgaaaaaataaaactaaggtaaacmctgtttttaaaagcaacaattaaaaagccaaagttttaaagcagagaaacatttgcaataagaaagtacttgtgtacctttcatgtgtcagggactattcagtggtgttacttacttcgttatagtcacttcaattcaatgagagttaagttttattatgccaataaagatgctcagatcttcattttctaatttaaagtttttgattactggcaaaatcatttcattagaaaaaaatatcaaacctgattttatatataataggattgtacttgactacatcatagcataagtttaacttttcttgttaatattttaaaaagtatttatgtaaataaacagtgcctgacacgtgaattacttacaaaaaagactatcatttgaggctataaaaagttaatatgcaaaaatattcatatctttactaaaaagcaaatcaacctatgaaataccaatgctactcaacaataatatcacaatatacatactaaac

SEQ ID NO: 802982 - DNA, 644 bp, Homo sapiens
gagtatcagtggccctagcaattatatgtaaaggcaatgctacttgcaagtttcccatcatataaaacctgtttatgatgttctgccaaatgaatatcactcttagatttaaacttgaaggtactctgaaaaaataaaactaaggtaaaccctgtttttaaaagcaacaattaaaaagccaaagttttaaagcagagaaacatttgcaataagaaagtacttgtgtacctttcatgtgtcagggactattcagtggtgttacttacttcgttatagtcacttcaattcaatgagagttaagttttattatgccaataaagatgctcagatcttcattttctaatttaaagtttttgattactggcaaaatcatttcattagaaaaaaatatcaaacctgattttatatataataggattgtacttgactacatcatagcataagtttaayttttcttgttaatattttaaaaagtatttatgtaaataaacagtgcctgacacgtgaattacttacaaaaaagactatcatttgaggctataaaaagttaatatgcaaaaatattcatatctttactaaaaagcaaatcaacctatgaaataccaatgctactcaacaataatatcacaatatacatactaaac

SEQ ID NO: 802983 - DNA, 658 bp, Homo sapiens
ggattgtacttgactacatcatagcataagtttaacttttcttgttaatattttaaaaagtatttatgtaaataaacagtgcctgacacgtgaattacttacaaaaaagactatcatttgaggctataaaaagttaatatgcaaaaatattcatatctttactaaaaakcaaatcaacctatgaaataccaatgctactcaacaataatatcacaatatacatactaaactcagaagataagtttgttaaaacatgttattactttttatgaaagacaactaaacatatgccatctataacaagaaaggtattgttagacgtggttaaaattgctctgcagatatgagtctaataatgataaatgatatttaacctttgcagtcatcacatatcaatattactattactttcaacttacaactatgaaagcttaatgttaagaaattaagatttagaagggaaggggccagcatgtaattctaagtcttttgatttatagtccatattcaatgtatcactagtgaaatcatcttaaaatcctgactctgccactaatctttctcagcttaggaagtcatttagctgatgtggctccagttttctcactcaatgttataatagggttaaatcaaatgtcccaaactcaagttcttacag

SEQ ID NO: 802984 - DNA, 658 bp, Homo sapiens
ggattgtacttgactacatcatagcataagtttaacttttcttgttaatattttaaaaagtatttatgtaaataaacagtgcctgacacgtgaattacttacaaaaaagactatcatttgaggctataaaaagttaatatgcaaaaatattcatatctttactaaaaagmaaatcaacctatgaaataccaatgctactcaacaataatatcacaatatacatactaaactcagaagataagtttgttaaaacatgttattactttttatgaaagacaactaaacatatgccatctataacaagaaaggtattgttagacgtggttaaaattgctctgcagatatgagtctaataatgataaatgatatttaacctttgcagtcatcacatatcaatattactattactttcaacttacaactatgaaagcttaatgttaagaaattaagatttagaagggaaggggccagcatgtaattctaagtcttttgatttatagtccatattcaatgtatcactagtgaaatcatcttaaaatcctgactctgccactaatctttctcagcttaggaagtcatttagctgatgtggctccagttttctcactcaatgttataatagggttaaatcaaatgtcccaaactcaagttcttacag

SEQ ID NO: 802985 - DNA, 618 bp, Homo sapiens
aaaattagtcagacacagtagcttgtgcctatagtcccagatactcaggaggctgaggcaggaggatcacttgagcccaggagtctaaggctccagtgtgctaggactgcaccactgcactccagcttaggtgacagaaggagagaccctgtttccaaaaaataygtacacacaaaacattctcctggatggaccaaactcaggtcataaaataaacctcaataaatgtatgaagacagatataatacaaagtatatgatctgtccaaactggaatgttagaaaccaatagtatatgggaatttgaggaattcacaaatatgtggaaataaacacattcctaaataaccgatgtgtcaaagaagaaataatcaaaagggaagttacaaaatattttgagatgaacaaaggcacaaataccaaaatataagcagttaaggcacttagaaacttatacgtgtaaatgtttgtatttaaaaagaggacttcaaatcaagaactaaacctcccaccttatgaccctggaagcaaaaaagcaaactaaacgtaaaacaagcagaaagaaaaaaataaaaagaattatagaagaacttaatgaaatagacaataagaaaacaac

SEQ ID NO: 802986 - DNA, 460 bp, Homo sapiens
attgccatctgattttgttttatttcacggctggtacttcctatcttttaattcattataagtaaacttttctctacctcgctagttacaatagacctcatgtgatatttccaacatgtgggttatcttagagttggtatatgatgattttctcttcccttgagaataagtcacattttcctgaccatttttagaataagtacttttggattatatgctaaayagtgtgactataactctgtacaatattatggagaaactttctggccagaaaatttcctataaaagcaaaaaatggggatatcagtccatgtagactgactgttccatattttgattacgctccaaagcttgcctgcttttattcaatctccacaaccctcagatagatgttatctatattatgtgcagagtttacaaatggttatttgtgagaagatcagtttgttaggagctcacc

SEQ ID NO: 802987 - DNA, 460 bp, Homo sapiens
attgccatctgattttgttttatttcacggctggtacttcctatcttttaattcattataagtaaacttttctctacctcgctagttacaatagacctcatgtgatatttccaacatgtgggttatcttagagttggtatatgatgattttctcttcccttgagaataagtcacattttcctgaccatttttagaataagtacttttggattatatgctaaacagtgtgactataactctgtacaatattatggagaaactttctggccagaaaatttcctataaaagcaaaaaatggggatatcagtccatgtagactgactgttccatattttgattmcgctccaaagcttgcctgcttttattcaatctccacaaccctcagatagatgttatctatattatgtgcagagtttacaaatggttatttgtgagaagatcagtttgttaggagctcacc

SEQ ID NO: 802988 - DNA, 600 bp, Homo sapiens
gccaaaactaacagtacagcaacattcaactccttgaagccagcattattaaagcatcagaaattaacaaaacctccactcttaggaaacaagattcagaactactaggattaggtgaatctccccaagaaaactatctgtgcattgcttaatctgggggtttaacatttaacttttttaaaaaagaggcaaagatttataactccctagtgcctacaatggtgtccaatactcagtaaataataagtatctattgaaagaatgccatagaacagatgagactgagataatgagagaatgtaagagaaatacacgcaagagatcaaarcactgaccttacagaagacaaaaattagacataaaagtaaaaagaaaatgcaaacaaggataagagaaaaccattaaaagcataggaaatccagtgaaagagaatgctacagaggtcataaaaggatagttaagaattctgtcataacaagtgagttataaaaatatttacttttacctaccttacgtggttgaaaatcatatttcacacaatgctgaaaacattttcctttggacttcgatgatgtgactataaaacagttgccaacaaaa

SEQ ID NO: 802989 - DNA, 471 bp, Homo sapiens
ctaagtagcaatatggtttcctaaaatcctagaaagtacttgaagaaattaaaaatggattgactttttaaaaattaattttgggaattattctcctgactcttctcagtctgatgaaatttttctgtaagatgttgtatttttaagtactagaattttttttaaagtttttatctctgctgaggcttcacatctgtttkctcaattttatttttatttcaatccttgagcatgtttataatatagtagtatccccttattgtggctttactttcctcactttcagtcacccacagtcaaaaaatattaaatataaaactccagaagtaaacagtttataaattttaagtcacaccttgttctgaggaatgtgatgcaacctcccgccattctgctgtatccagttcaggatgtgacatacccctttgctcagcagatacacaattcctgcttcctgctcattagacattt

SEQ ID NO: 802990 - DNA, 638 bp, Homo sapiens
aaaggtgctataggtggtacaacaccatctggcttctctattttgaaactccacaccaggttaatcttgtccatggctgtggcttaaatctaaagtcaggttctggtgttttctggaatccatgcctagctctttgattctgaaaccaaatctggattctggactcttctgcattgattgctaaagcaagtttttgtttggtagcataacctgggtaaggtttttgagtgaaggtattgatgaggattttcaattgatcttctgtgaatttggtgcaattgcacctatgatttgttgctaccatcttgtgtgaagaggggtcttcaactatgcagaaagagagttctggaggctgagctactgtctgggagactgcttacagctcattttttaaaaagamaggtcacatataatacaatataaaattcacaaatctaaagcttatggttttctgggttttgacaaatgaaaactcctgtgcaacttcaagccttaccaggatatggatgagggtttctatccaaaagcaccagtattctaacaaacaactttacgttttttgaattgtccagtgcctgtgaggattccttactccaagtttatgacaaacatattcagaaggcatagtctacaattag

SEQ ID NO: 802991 - DNA, 602 bp, Homo sapiens
cttaattttgttttataagctttcttcaaaggcctggtcatcatttgctgtgtgtttatatatttttattttttcagtgggcaaaatacatgtaacataaaatgtatcacattaactattttaagtgtacagttcagttgctttaactatattcataatgttttgtaatgattcccaccattcctctctagaactttttcatgtgaagctctgtacctgtaaaacagtaattcctaactcctgtcatcttccagtccctattaaccaccattctactttctgcctctatgactttgcctatcttaggtacctcatataagtggaatcatacagtatttgtctttttgtgtttggcttatttccattagcataatgtattcaaggtttcattgttcatccmcattgtgaaatgtgtcagaatctccttcctttaaaaaggaataatattccaataatattccattgcgtgcatatatcacatttgtttatccattcatccaccagtgggcatgatgttgcttccaccttctggctactgtgagtactgctgctgtaaacattgctatgcaaatatctttttgggtccctgcatttaattattg

SEQ ID NO: 802992 - DNA, 595 bp, Homo sapiens
gctttaactatattcataatgttttgtaatgattcccaccattcctctctagaactttttcatgtgaagctctgtacctgtaaaacagtaattcctaactcctgtcatcttccagtccctattaaccaccattctactttctgcctctatgactttgcctatcttaggtacctcatataagtggaatcatacagtatttgtctttttgtgtttggcttatttccattagcataatgtattcaaggtttcattgttcatccacattgtgaaatgtgtcagaatctccttcctttaaaaaggaataatattccaataatattccattgcgtgcatatatcacatttgtttatccattcatccaccagtgggcatgatgttgcttccaccttctggctactgtgagtactgctgctgtaaacattgctatgsaaatatctttttgggtccctgcatttaattattggggctatatacctcaaagtggaattactgggtcatatagtaattctatgttcaactttttgaggaaccactgtgctgctctgtagagcagtccaccactttacactactattagtaatgcacaagggtttca

SEQ ID NO: 802993 - DNA, 550 bp, Homo sapiens
gggtccctgcatttaattattggggctatatacctcaaagtggaattactgggtcatatagtaattctatgttcaactttttgaggaaccactgtgctgctctgtagagcagtccaccactttacactactattagtaatgcacaagggtttcattttctccatgtccttgtcaacacttttaattttccatcttttgtttgtttgcattataatcgccattttaatgggtatgaagttgtacctctttgtgatcttgctttacatctcccgtatgacttgtgatattttctgcacatattttaaggtttatatactaacaaagccgattactaggkgggtgtgtgtagggggaactgtgtggctgctgagtggcttccctgtgggatgatcagccagaacccactattgtatcaggaaatccccaggtgtcaccatctatgggtcttttgtagtttttatgggtacacagtaggcatatatgtatttatggggtatatgagatattttgatacaaacatataatgcataataatcacatcagggtaaat

SEQ ID NO: 802994 - DNA, 550 bp, Homo sapiens
gggtccctgcatttaattattggggctatatacctcaaagtggaattactgggtcatatagtaattctatgttcaactttttgaggaaccactgtgctgctctgtagagcagtccaccactttacactactattagtaatgcacaagggtttcattttctccatgtccttgtcaacacttttaattttccatcttttgtttgtttgcattataatcgccattttaatgggtatgaagttgtacctctttgtgatcttgctttacatctcccgtatgacttgtgatattttctgcacatattttaaggtttatatactaacaaagccgattactaggggggkgtgtgtagggggaactgtgtggctgctgagtggcttccctgtgggatgatcagccagaacccactattgtatcaggaaatccccaggtgtcaccatctatgggtcttttgtagtttttatgggtacacagtaggcatatatgtatttatggggtatatgagatattttgatacaaacatataatgcataataatcacatcagggtaaat

SEQ ID NO: 802995 - DNA, 624 bp, Homo sapiens
atcaggctgtcttttgatcacagttttgtgaccactctgttattcctctctctctggcagtcatttcccagaattgacaaggaattcatcctgagatgatttctgctaagtaaatcctagcacttcttgacactttagaaaaggctttggaataattttatattagcatttttcacctgcatatttttacatgtaaatataagctgtgaatgcattactttgaaagagagccaggataaaatttaaagaaacatggttttagaagtccaatggtagtataagatttcacaaagaaacagactgctcttcattcagtacttcctatttactccccagacacagccaacttcaacattttttacttaaaaaatgtatttttatatttcaaaataacatgtttatgtgacctgtctctcacccatcctgmcctactctggctttacccccttcagaatatttaaaatttcttgagtatccttagcatataccattccaatcatgaatcttggggtaggcttattttttttttaatttgtgcatttaataaacccctagtggtacatgtctgtttttcttgttaattcttggaaatgtctttctattgtttctacaataattttcttc

SEQ ID NO: 802996 - DNA, 610 bp, Homo sapiens
cttaattttgttttataagctttcttcaaaggcctggtcatcatttgctgtgtgtttatatatttttattttttcagtgggcaaaatacatgtaacataaaatgtatcacattaactattttaagtgtacagttcagttgctttaactatattcataatgttttgtaatgattcccaccattcctctctagaactttttcatgtgaagctctgtacctgtaaaacagtaattcctaactcctgtcatcttccagtccctattaaccaccattctactttctgcctctatgactttgcctatcttaggtacctcatataagtggaatcatacagtatttgtctttttgtgtttggcttatttccattagcataatgtattcaaggtttcattgttcatccmcattgtgaaatgtgtcagaatctccttcctttaaaaaggaataatattccaataatattccattgcgtgcatatatcacatttgtttatccattcatccaccagtgggcatgatgttgcttccaccttctggctactgtgagtactgctgctgtaaacattgctatgcaaatatctttttgggtccctgcatttaattattggggctata

SEQ ID NO: 802997 - DNA, 567 bp, Homo sapiens
gctttaactatattcataatgttttgtaatgattcccaccattcctctctagaactttttcatgtgaagctctgtacctgtaaaacagtaattcctaactcctgtcatcttccagtccctattaaccaccattctactttctgcctctatgactttgcctatcttaggtacctcatataagtggaatcatacagtatttgtctttttgtgtttggcttatttccattagcataatgtattcaaggtttcattgttcatccacattgtgaaatgtgtcagaatctccttcctttaaaaaggaataatattccaataatattccattgcgtgcatatatcacatttgtttatccattcatccaccagtgggcatgatgttgcttccaccttctggctactgtgagtactgctgctgtaaacattgctatgsaaatatctttttgggtccctgcatttaattattggggctatatacctcaaagtggaattactgggtcatatagtaattctatgttcaactttttgaggaaccactgtgctgctctgtagagcagtccaccactttaca

SEQ ID NO: 802998 - DNA, 546 bp, Homo sapiens
gggtccctgcatttaattattggggctatatacctcaaagtggaattactgggtcatatagtaattctatgttcaactttttgaggaaccactgtgctgctctgtagagcagtccaccactttacactactattagtaatgcacaagggtttcattttctccatgtccttgtcaacacttttaattttccatcttttgtttgtttgcattataatcgccattttaatgggtatgaagttgtacctctttgtgatcttgctttacatctcccgtatgacttgtgatattttctgcacatattttaaggtttatatactaacaaagccgattactaggkgggtgtgtgtagggggaactgtgtggctgctgagtggcttccctgtgggatgatcagccagaacccactattgtatcaggaaatccccaggtgtcaccatctatgggtcttttgtagtttttatgggtacacagtaggcatatatgtatttatggggtatatgagatattttgatacaaacatataatgcataataatcacatcagggt

SEQ ID NO: 802999 - DNA, 546 bp, Homo sapiens
gggtccctgcatttaattattggggctatatacctcaaagtggaattactgggtcatatagtaattctatgttcaactttttgaggaaccactgtgctgctctgtagagcagtccaccactttacactactattagtaatgcacaagggtttcattttctccatgtccttgtcaacacttttaattttccatcttttgtttgtttgcattataatcgccattttaatgggtatgaagttgtacctctttgtgatcttgctttacatctcccgtatgacttgtgatattttctgcacatattttaaggtttatatactaacaaagccgattactaggggggkgtgtgtagggggaactgtgtggctgctgagtggcttccctgtgggatgatcagccagaacccactattgtatcaggaaatccccaggtgtcaccatctatgggtcttttgtagtttttatgggtacacagtaggcatatatgtatttatggggtatatgagatattttgatacaaacatataatgcataataatcacatcagggt

SEQ ID NO: 803000 - DNA, 574 bp, Homo sapiens
ttctttttttgtgtatatatctagcaatgagattgctggatcatatgatagctctaattttagttttttgaggaacctccaaattgttctccatagtggttgcactaatttacattcccaccaacagtatgcaagggttggctttttttccatatcctcaccagcatktgttatcacctgtcttttgaaaaaacagccattttaactgaggtgagatgatatctcttcatagttctgatttgcatttctctgataatcagtgatgttggccaccttttcctaagtctgttagtcttttgtatttctttttttgagaaatatctattaagatctcttgcccattttcaaatcagattattagatttttctctatacagttgtttgagctttttatatattctggttattaatcccttgtcaaatggatagtttgcaaatacgtttccccattttttggattttctctttgttgactgtctcttttgctatgcagaagctttttaacttagtgcaatcccaattgtccacttttgctttggttgtctgtgcttgtggggtattgcttaagaaatct

SEQ ID NO: 803001 - DNA, 574 bp, Homo sapiens
ttctttttttgtgtatatatctagcaatgagattgctggatcatatgatagctctaattttagttttttgaggaacctccaaattgttctccatagtggttgcactaatttacattcccaccaacagtatgcaagggttggctttttttccatatcctcaccagcatttgttatcacctgtcttttgaaaaaamagccattttaactgaggtgagatgatatctcttcatagttctgatttgcatttctctgataatcagtgatgttggccaccttttcctaagtctgttagtcttttgtatttctttttttgagaaatatctattaagatctcttgcccattttcaaatcagattattagatttttctctatacagttgtttgagctttttatatattctggttattaatcccttgtcaaatggatagtttgcaaatacgtttccccattttttggattttctctttgttgactgtctcttttgctatgcagaagctttttaacttagtgcaatcccaattgtccacttttgctttggttgtctgtgcttgtggggtattgcttaagaaatct

SEQ ID NO: 803002 - DNA, 565 bp, Homo sapiens
ataaaagatttttatattttttctttgttttaaataattgagcttcaagtaagggcagcaagtagtttttcttctttttctttctgtttttcttttttcttttctttttttaaagacgtgttttgccatgttgtccaggctggtcttgaactcctgaattcaagtaatcaacctgtcttggcctcccaaagtgatgggattacaggyatgagccaccgaacccagccagcatcaagagttttaaaattaaggacataacgccatttcacactttaaatagactatagtgtagtgtaaacatagcttctttttttaaatagagacaggatctccctatatgcccaggttgatctcacaattcctgggctcaagtgaccctcccgcctccgtctcctaaagtactgggattataggcatgagccatcacacccagccaatataacttcatattcacaaggaaacaaaacaatttgtgtgactcactttgtagcaatatctgctttattgtggtggtctcgaatcaaatctacaatatctttgaggtatggctgtactttctaagcat

SEQ ID NO: 803003 - DNA, 625 bp, Homo sapiens
ttaaattcattcctaagtatatgtttttctttgatgttattgtaaatgagattgttttcttgatttctttgtcagctaggttatttgtatatagaaatgcaactgatttttatatgttgagtttatactttgcagcttaactgaattgatttagtagttctcagagttttttgtggaatgtttggagtttyttacataaagggtcttgtcatctgcagatagagataattttacttctttaatttagttgcttttttttcctcatcagattgctcttgcaagtactatgttcaataaaagtgatgagactgggcatccctatcttgtactcaatcttagtagaaaagcttttagttattccccactgactatgatgtaggccatgggtttctcataaacggtctttattatgttgaggaactttccttctatacataaactattaaaaggttttatcaagaaaggttgctaaactttgttaaatgctttctctgcatcaattcaggtgaccatgtggttttatctttcattttgttaatgtgatatatcacattgatttacatatgttaaaccagccttgcatgccagagataattcccacttaatcatgatgtataatcttttt

SEQ ID NO: 803004 - DNA, 658 bp, Homo sapiens
aaaggtgctataggtggtacaacaccatctggcttctctattttgaaactccacaccaggttaatcttgtccatggctgtggcttaaatctaaagtcaggttctggtgttttctggaatccatgcctagctctttgattctgaaaccaaatctggattctggactcttctgcattgattgctaaagcaagtttttgtttggtagcataacctgggtaaggtttttgagtgaaggtattgatgaggattttcaattgatcttctgtgaatttggtgcaattgcacctatgatttgttgctaccatcttgtgtgaagaggggtcttcaactatgcagaaagagagttctggaggctgagctactgtctgggagactgcttacagctcattttttaaaaagamaggtcacatataatacaatataaaattcacaaatctaaagcttatggttttctgggttttgacaaatgaaaactcctgtgcaacttcaagccttaccaggatatggatgagggtttctatccaaaagcaccagtattctaacaaacaactttacgttttttgaattgtccagtgcctgtgaggattccttactccaagtttatgacaaacatattcagaaggcatagtctacaattagtgtttgggtaagtattttca

SEQ ID NO: 803005 - DNA, 527 bp, Homo sapiens
gggatagtggtccactcaatgaccctgaggctgcctgggaaacgccttgccagcctccgtcatgggctcagctgcagcagccacctgcacatggcgggggagcagccttgatggcaaccccagaccacgctttcacgccagccaggcagactccagggccaggcgccgcccagcggccaattcaggtggtcyggccccagcttcaggagggcgggaaccggcagctcagccatttcctggcggctgccctgtgcccagcccctgcacaccctgatctgggcacctacaagaaagagctgactctagggtgaaagggccgtccactcagcgacccccaggctgtctgggaccagccctgcctgcctctgctgtagattcagctgcagtggtaacctgcacaaggcgcgcagcagcagctgtggcaaattctgaccctgccagcgccaccagcagcgcggacccttgggccagaagcctccacgacgcctaagtcaggggtgttggtccccagccgcaggagggcagaa

SEQ ID NO: 803006 - DNA, 563 bp, Homo sapiens
aaataataaagaacttgcaaatcccagtgggaaaatgagcaaagaatataaagaggaattacacagaagaaaacgtatgctatgtattaacaaatgaaaagttgcttcatctgtgtaatggccaaaatgtatgttaaaatataagacagcatttctcccatctcattggtaaaataaaaaatacatatgcacttcataaattcatatgtcacttcagcatttttacagttaatatcacttttgttattcttaaaaagttgaaaaattaaatgagttaaaagcagtatgagagaaattattgcaaatatgtgtataatattgttaggagaaacccaagtaagaccccagaggtgtaagtttaaattgaagactaatcagtttatatayataataatttaaaaatattctgtgcattataaaactcacaaaagaattaaaaggcaaaaaaatcaagaaaaaataatttcaaaataaatgccacaacacagcttcctgtggtcaagatttctctccattctactttgacgtctaaatagatctttgggcatctagactaatattgg

SEQ ID NO: 803007 - DNA, 555 bp, Homo sapiens
tgtccccagattggaatgcagcagcatgatcatggctcactgcagcctcaacctccctgggctcagtgattctcccacctcagtctcctgagtaactgggaatgcaacacatgccaccatgcctaaatattttttggattttgttttcttttgtagagatggggctttgccatgtcacctaggctggtattgaccttctggactcaagtgatcctctctcctcagcctcccaaagtgctaggattacaggtgtgaaccagcatgccatgyctatagtgatatctttaagtaagcctctcctatcttcttttgagcagtttttcaaagcaacaggcaccttattaaattagaaagttgatgtgtttcccgaatgcctgctaataaagtagagaactaaagaacctctgtgatttcaatgaagtccattcagatgttatgggctacttgttactgacaagtatggtaggaaatgtaggtcaagctgtcataggcaaatagatcttgctgaagaggaagaattattggctaagataacaccctagaacacctggcata

SEQ ID NO: 803008 - DNA, 555 bp, Homo sapiens
tgtccccagattggaatgcagcagcatgatcatggctcactgcagcctcaacctccctgggctcagtgattctcccacctcagtctcctgagtaactgggaatgcaacacatgccaccatgcctaaatattttttggattttgttttcttttgtagagatggggctttgccatgtcacctaggctggtattgaccttctggactcaagtgatcctctctcctcagcctcccaaagtgctaggattacaggtgtgaaccagcatgccatgcctatagtgatatctttaagtaagcctctcctatcttcttttgagcagtttttcaaagcaacaggcaccttattaaattagaaagttgatgtgtttcccgratgcctgctaataaagtagagaactaaagaacctctgtgatttcaatgaagtccattcagatgttatgggctacttgttactgacaagtatggtaggaaatgtaggtcaagctgtcataggcaaatagatcttgctgaagaggaagaattattggctaagataacaccctagaacacctggcata

SEQ ID NO: 803009 - DNA, 613 bp, Homo sapiens
tgcatttgtgaaggtactatatataattgtgtttttaatttaaccatcatgtaagtctacttttctagttaagagtctatattttatagaggccctccatatatatagaagagcttttctgacagtatatcctttaaattgcaaagataaataaaggaacaattttgctttcattttttattattgttattatttttcaaggctagtcaagtgaagcagtgggagtggagaaggaactgctttcatttttatatgttggtgttacaggctstatgtgacaggctatatatttgtctgctgaattttagaaacaaagtgaaatatttatttcatatttcattagatagggatgacgattacattgagggattgggactagactgaaggcaccacatcatcaatcacttggaaacaaaattttgcctatgtgttatgttatattggcaaaaacttttattgtgtcaggcgatatagctccctattgaaatatgtgaaaaatgcagagaaaaaaaggcaggattggttatcaagggatatttaggcctgagatacatgatgcaaatattgaaaacgtacactttttaaaaattagatttaaaatgtaaattgaagc

SEQ ID NO: 803010 - DNA, 613 bp, Homo sapiens
tgcatttgtgaaggtactatatataattgtgtttttaatttaaccatcatgtaagtctacttttctagttaagagtctatattttatagaggccctccatatatatagaagagcttttctgacagtatatcctttaaattgcaaagataaataaaggaacaattttgctttcattttttattattgttattatttttcaaggctagtcaagtgaagcagtgggagtggagaaggaactgctttcatttttatatgttggtgttacaggctctatgtgacaggctatatatttgtctgctgaattttagaaacaaagtgaaatatttatttcatatttcattagatagggatgaygattacattgagggattgggactagactgaaggcaccacatcatcaatcacttggaaacaaaattttgcctatgtgttatgttatattggcaaaaacttttattgtgtcaggcgatatagctccctattgaaatatgtgaaaaatgcagagaaaaaaaggcaggattggttatcaagggatatttaggcctgagatacatgatgcaaatattgaaaacgtacactttttaaaaattagatttaaaatgtaaattgaagc

SEQ ID NO: 803011 - DNA, 489 bp, Homo sapiens
ggccccacacaaggcacatgatatagcagcctgctgctggagaaatctgagttacgtggttcactgaatgtttcagacaccgtggcaaaaaccaacctttgttcctgcccacactaatagcatgacacaaaccaaaatgaaacataaatataaaacaatctcaacataaacaattatctcatgatctactgattttctacatctgatgatttgcaytttttagaaactgggagacacataaaaccaagttagaaatttgggttatgagttataatattttcaaaagataaaaagtcaacagaatcaaattcagagataattcagatgttggaactaaatgcaactaatttaaaataataatgatcaaaatgttaaagaatctacttaaaaaaagacaacatgcatggaaaaatgaggaatttcagcagagatgggaacagtaaaaggcaaaagctagaaataagtgaaagcatgagaacagaaatgaag

SEQ ID NO: 803012 - DNA, 489 bp, Homo sapiens
ggccccacacaaggcacatgatatagcagcctgctgctggagaaatctgagttacgtggttcactgaatgtttcagacaccgtggcaaaaaccaacctttgttcctgcccacactaatagcatgacacaaaccaaaatgaaacataaatataaaacaatctcaacataaacaattatctcatgatctactgattttctacatctgatgatttgcattttttagaaaytgggagacacataaaaccaagttagaaatttgggttatgagttataatattttcaaaagataaaaagtcaacagaatcaaattcagagataattcagatgttggaactaaatgcaactaatttaaaataataatgatcaaaatgttaaagaatctacttaaaaaaagacaacatgcatggaaaaatgaggaatttcagcagagatgggaacagtaaaaggcaaaagctagaaataagtgaaagcatgagaacagaaatgaag

SEQ ID NO: 803013 - DNA, 489 bp, Homo sapiens
ggccccacacaaggcacatgatatagcagcctgctgctggagaaatctgagttacgtggttcactgaatgtttcagacaccgtggcaaaaaccaacctttgttcctgcccacactaatagcatgacacaaaccaaaatgaaacataaatataaaacaatctcaacataaacaattatctcatgatctactgattttctacatctgatgatttgcattttttagaaactgggagacacataaaaccaagttagaaatttgggttatgagttataatattttcaaaagataaaaagtcaacagaatcaaattcagagataattcagatgttggaactaaaygcaactaatttaaaataataatgatcaaaatgttaaagaatctacttaaaaaaagacaacatgcatggaaaaatgaggaatttcagcagagatgggaacagtaaaaggcaaaagctagaaataagtgaaagcatgagaacagaaatgaag

SEQ ID NO: 803014 - DNA, 463 bp, Homo sapiens
gtgttaatatgtttgttggccacgtatgtgttcttttgaaaactgtctgttcatgttctttgcccattttttaatggggttattttttgcttcttgatttgtctaagtctcttatagattctggataataggcctttgctgtatgcatagtgtgtgaatattttcttccactctgtaggctgtctgttcaatcccccttgagagtttctcatgctgtgcagaagcagctctttagtttaattaaatcacacttctcaattttcgtttttctggcaattgcttttgaggacttacccataaattcattgccaagtgcaawgtccagacgaatatttcctaggttttcttccaggatttttatagtcagaggatgtaatcttatgccaacgggtcttaataatcaaatgactccacagtgagaatcattactctgaaaaattgattttgttagaatgatggaaat

SEQ ID NO: 803015 - DNA, 611 bp, Homo sapiens
tatgtgttcttttgaaaactgtctgttcatgttctttgcccattttttaatggggttattttttgcttcttgatttgtctaagtctcttatagattctggataataggcctttgctgtatgcatagtgtgtgaatattttcttccactctgtaggctgtctgttcaatcccccttgagagtttctcatgctgtgcagaagcagctctttagtttaattaaatcacacttctcaattttcgtttttctggcaattgcttttgaggacttacccataaattcattgccaagtgcaatgtccagacgaatatttcctaggttttcttccaggrtttttatagtcagaggatgtaatcttatgccaacgggtcttaataatcaaatgactccacagtgagaatcattactctgaaaaattgattttgttagaatgatggaaatttaaatatttgaaagtaaaaacacatgccacctttttcctagaactctgcaaggcaaattgctgtaagacaggcagaggaagcacaatatatatacatatccaaaatataatttgcagtgaaataaatgaaagcaaattataaataaacttacctgattttacaaactaacc

SEQ ID NO: 803016 - DNA, 592 bp, Homo sapiens
tccaacatctttttatcctcaagttttttatattcctgttgtatttttttatagataataactcctgttgaataactttttagtcaaatagacatattttgaagatacagctttcagctttgctgtaagatcatcgaactacattaataaaataatatagcttgataatgaagtaggctgagaataatctcatacaaaaccaataacaaattttgaaatacatttacttgcaataaaatgttatctataatgyagattctttaaatgttaacccgtactcagaaattcaagaacaaagtaaaagccaccatgagtcacaaacatatattctttactctcatcatctttgccacagaacttttgcacttgatcttactgttgtttttctgataatttgtgttttttcctttcttaaatggctctaagttaactcttattagaaagtttcaaacccccttctctcatcatcatgccccaaaatttgtcaaaaaaaagtttcagagatattatattgagttatttaggccaaaggcaataaatggctcttacaataagactttgaaaataatgtaatactctacaataggcatgg

SEQ ID NO: 803017 - DNA, 616 bp, Homo sapiens
gtctccaccattgtgtagtttccatatgttttttaagatttaatattactttttccaacatctttttatcctcaagttttttatattcctgttgtatttttttatagataataactcctgttgaataactttttagtcaaatagacatattttgaagatacagctttcagctttgctgtaagatcatcgaactacattaataaaataatatagcttgataatgaagtaggctgagaataatctcatacaaaaccaataacaaattttgaaatacatttacttgcaataaaatgttatctataatgtagattctttaaatgttaacccgtactcagaaatkcaagaacaaagtaaaagccaccatgagtcacaaacatatattctttactctcatcatctttgccacagaacttttgcacttgatcttactgttgtttttctgataatttgtgttttttcctttcttaaatggctctaagttaactcttattagaaagtttcaaacccccttctctcatcatcatgccccaaaatttgtcaaaaaaaagtttcagagatattatattgagttatttaggccaaaggcaataaatggctcttacaataagactttgaa

SEQ ID NO: 803018 - DNA, 616 bp, Homo sapiens
gtctccaccattgtgtagtttccatatgttttttaagatttaatattactttttccaacatctttttatcctcaagttttttatattcctgttgtatttttttatagataataactcctgttgaataactttttagtcaaatagacatattttgaagatacagctttcagctttgctgtaagatcatcgaactacattaataaaataatatagcttgataatgaagtaggctgagaataatctcatacaaaaccaataacaaattttgaaatacatttacttgcaataaaatgttatctataatgtagattctttaaatgttaacccgtactcagaaattcaagaacaaagtaaaagccaccatgagtcacaaacatatattctttactctcatcatctttgccacagaacttttgcacttgatcttactkttgtttttctgataatttgtgttttttcctttcttaaatggctctaagttaactcttattagaaagtttcaaacccccttctctcatcatcatgccccaaaatttgtcaaaaaaaagtttcagagatattatattgagttatttaggccaaaggcaataaatggctcttacaataagactttgaa

SEQ ID NO: 803019 - DNA, 423 bp, Homo sapiens
acacgctgctccgagtgagcttgtcctgccttggcacaaattctatgtctggccagggccacagaaggccgagtcccctggatggtaatcctggctgctttctgtacttgaacgtaaagtcctcatcaagacggcctgtggtctkcctcttggcaaccaagaagcctgcagtgccatacgacccctgaggcatggactggagccccaaaggcagcgcacccctggttcctgagcctgctgcttgtttcctctctgtggctccatttgtagcacagttgttgcactgaagcttgtgcatgctggataaggccaagcgggctcaaagagcaaccagccacctctgcaagggtgtgccaggagcaggtgcaccagtcaccaactaatggccagacatggtacatcacttctaccctaaaggtgggc

SEQ ID NO: 803020 - DNA, 423 bp, Homo sapiens
acacgctgctccgagtgagcttgtcctgccttggcacaaattctatgtctggccagggccacagaaggccgagtcccctggatggtaatcctggctgctttctgtacttgaacgtaaagtcctcatcaagacggcctgtggtctgcctcttggcaaccaagaagcctgcagtgccatacgacccctgaggcatggactggagccccaaaggcagcgcacccctggttyctgagcctgctgcttgtttcctctctgtggctccatttgtagcacagttgttgcactgaagcttgtgcatgctggataaggccaagcgggctcaaagagcaaccagccacctctgcaagggtgtgccaggagcaggtgcaccagtcaccaactaatggccagacatggtacatcacttctaccctaaaggtgggc

SEQ ID NO: 803021 - DNA, 528 bp, Homo sapiens
cgctgctccgagtgagcttgtcctgccttggcacaaattctatgtctggccagggccacagaaggccgagtcccctggatggtaatcctggctgctttctgtacttgaacgtaaagtcctcatcaagacggcctgtggtctgcctcttggcaaccaagaagcctgcagtgccatacgacccctgaggcatggactggagccccaaaggcagcgcacccctggttcctgagcctgctgcttgtttcctctctgtggctccakttgtagcacagttgttgcactgaagcttgtgcatgctggataaggccaagcgggctcaaagagcaaccagccacctctgcaagggtgtgccaggagcaggtgcaccagtcaccaactaatggccagacatggtacatcacttctaccctaaaggtgggccacagtgccatctgcttttcctaaggcctctgctccatcaggaattaggtggcagccaaggcaggacaagcacactcggagcagtgtgttagcacctggggcctgtgc

SEQ ID NO: 803022 - DNA, 528 bp, Homo sapiens
cgctgctccgagtgagcttgtcctgccttggcacaaattctatgtctggccagggccacagaaggccgagtcccctggatggtaatcctggctgctttctgtacttgaacgtaaagtcctcatcaagacggcctgtggtctgcctcttggcaaccaagaagcctgcagtgccatacgacccctgaggcatggactggagccccaaaggcagcgcacccctggttcctgagcctgctgcttgtttcctctctgtggctccatttgtagcacagttgttgcactgaagcttgtgcatgctggayaaggccaagcgggctcaaagagcaaccagccacctctgcaagggtgtgccaggagcaggtgcaccagtcaccaactaatggccagacatggtacatcacttctaccctaaaggtgggccacagtgccatctgcttttcctaaggcctctgctccatcaggaattaggtggcagccaaggcaggacaagcacactcggagcagtgtgttagcacctggggcctgtgc

SEQ ID NO: 803023 - DNA, 399 bp, Homo sapiens
ctgcttttcctaaggcctctgctccatcaggaattaggtggcagccaaggcaggacaagcacactcggagcagtgtgttagcacctggggcctgtgcatgccagggaggccaagctggctcaaagagcaaccagacacctctgcaaggtytggccagggctatagaaggtccccctggatggtaatcctggctgctttctgcacttgaatataaagtcctccccaagatggcctgtggtctgcctcttggcaaccaagaagcccgcagtgccatgtgacacctgaggcatggactggagccccaaaggcagggtacacccttctcctgaacctgcttcttgtttcctctatatggctccatttgtggcaaagttgttgcactgaaacttgtgcatgccg

SEQ ID NO: 803024 - DNA, 406 bp, Homo sapiens
gtgccatctgcttttcctaaggccactgctccatcaggaattaggtggcagccaaggcaggacaagcacactcggagcagtgtgttagtacctggggcctgtgcatgccagggaggccaagctggctcaaagagcaaccagacacctctgcaaggtytggccagggctatagaaggtccccctggatggtaatcctggctgctttctgcacttgaatataaagtcctccccaagatggcctgtggtctgcctcttggcaaccaagaagcctgcagtgccatgtgacacctgaggcatggactggagccccaaaggcagggtacacccttctcctgaacctgctttttctttcctctatatggctccatttgtggcaaagttgttgcactgaaacttgtgcatgccg

SEQ ID NO: 803025 - DNA, 461 bp, Homo sapiens
gctgctccgagtgagcttgtcctgccttggcacaaattctcagtctggccagggccacagaaggccgagtcccccggacggtaatcttggctgctttctgcacttgaatgtaaagtcctcctcaagacggcctgtggtctgcctcttggcaaccaagaagcctgcagtgccatatgacccgagtcatggactggagcccgaaaggcagygtacaccctgtcctgatcttgctgcttgtttcctctctgtggctccattcatagcacagttgttgcactgaggcttgtgcaggccgagcaaggccaagctggctcaaagagcaaccagtcaactctgccacggtgtgccaggcaccggttctccagccaccaacctcactcactcccgcaaatggcacatcagttcttctaccctaaaggtaggaccaaagggccatctgcttttctgaagtcctctgctct

SEQ ID NO: 803026 - DNA, 546 bp, Homo sapiens
acccacaaatgggataatatttttaaaccatacatcaggtaaggggctcatataataatatataagcaactcaacctactcaaaaataagaaaaaaactatgcttattaaaaaataagcaaagaatcagaatagacatttcctacatcatacaaaaggccaaccaggtacatgaaaaaatcataaacattcctaattatcagagaagtgcaaatcaawgccacaatgagatatcacctcacacattttactagggctattataaaaaaagatggaagataagtgttggtgaggatgtggagaaaaagaaaccctgtacactgttggtaggaatggaaattagtacagccatcttggaaaacagtacgaagctttctcaagaaattataaatttatttaccctatgatccatcaatcccacttctggatatgtgtccaaaggaatttcaatcaatatgtcaaaaagagacatctgcaatttcatgttcattgcagcaatattcataatagccgtgaattacaaacaacctaagtgcttatcaactga

SEQ ID NO: 803027 - DNA, 606 bp, Homo sapiens
tttctattattattaatatataatgaaataattatataactcaccaaaatgtagaatcagtgggagccctgagcttgctttcctgcgactagatggtcccatctgggggtgatgggagatggtgacagatcataaaggcatttgattcacataaggagtgaacaacctatatcccctgcatgagcaacttacaacagggttcaggtcacactcttaggacgatctaatgccaccgctgatctgacaggaggagcagctcgggtggtaatgcgagcgacagagagtggctgcaaacagatgaagctttgcttgctcacctgcctctaacttcctgctgtgtggcccaggtcctaacaggccagggactggtactggtctatggcctataactcatactttttgtgtttaktttttggaaacattttccacttatattcttgattcctatgtattttataaacaacttagaaattccttttagaacaagacagggtctaatattatgtttttaacataggactttgaattaattttatctgtgtatgagagagagatgtgaaataaactcatcattaagcattttccattttacttttatttcatgca

SEQ ID NO: 803028 - DNA, 626 bp, Homo sapiens
atgtagaatcagtgggagccctgagcttgctttcctgcgactagatggtcccatctgggggtgatgggagatggtgacagatcataaaggcatttgattcacataaggagtgaacaacctatatcccctgcatgagcaacttacaacagggttcaggtcacactcttaggacgatctaatgccaccgctgatctgacaggaggagcagctcgggtggtaatgcgagcgacagagagtggctgcaaacagatgaagctttgcttgctcacctgcctctaacttcctgctgtgtggcccaggtcctaacaggccagggactggtactggtctatggcctataactcatactttttgtgtttattttttggaaacattttccacttatattcttgattcctatgyattttataaacaacttagaaattccttttagaacaagacagggtctaatattatgtttttaacataggactttgaattaattttatctgtgtatgagagagagatgtgaaataaactcatcattaagcattttccattttacttttatttcatgcatattaagaataaaactgggaagtcctaggcaaagcaattgggcaagagaaataaagggcatccaaatt

SEQ ID NO: 803029 - DNA, 581 bp, Homo sapiens
agtttaagcaggagagataacatgccagatggttgactgccttttagttattaggaggaactctgacacatacttagcgtgaaatgggaggcaatcagaagggctggggcaggggaatgacacaatttgacttatgttwtaaatacatccactgagttaagaattgatgaaaggggaagtttttaaaaaccaggactatcaattcccagtctatgacactcatctagatggcagatgatggtggctcacatgtgcaagatatgactggcttctggacatattcttcaggtagacctgacgagatttactgagagattagatgtgaagtgtcaagagagagagaaagatgagtctagaatgacaccgaggtttttggcagagcaactggaagagttgccattaaccaaagtaggaaagactacatgaggtgtagatttcaggaaggccatcagtagcccaattttggatctgacaagtgtgtgatactcaacagctaatcaaataactatttattaggtagctacgtctgataggctaggcctgtcaagtagccaggctgatacagagatctggaattaagg

SEQ ID NO: 803030 - DNA, 581 bp, Homo sapiens
agtttaagcaggagagataacatgccagatggttgactgccttttagttattaggaggaactctgacacatacttagcgtgaaatgggaggcaatcagaagggctggggcaggggaatgacacaatttgacttatgttttaaatacatccactgagttaagaattgatgaaaggggaagtttttaaaaaccaggactatcaattcccagtctatgacactcatctagayggcagatgatggtggctcacatgtgcaagatatgactggcttctggacatattcttcaggtagacctgacgagatttactgagagattagatgtgaagtgtcaagagagagagaaagatgagtctagaatgacaccgaggtttttggcagagcaactggaagagttgccattaaccaaagtaggaaagactacatgaggtgtagatttcaggaaggccatcagtagcccaattttggatctgacaagtgtgtgatactcaacagctaatcaaataactatttattaggtagctacgtctgataggctaggcctgtcaagtagccaggctgatacagagatctggaattaagg

SEQ ID NO: 803031 - DNA, 581 bp, Homo sapiens
agtttaagcaggagagataacatgccagatggttgactgccttttagttattaggaggaactctgacacatacttagcgtgaaatgggaggcaatcagaagggctggggcaggggaatgacacaatttgacttatgttttaaatacatccactgagttaagaattgatgaaaggggaagtttttaaaaaccaggactatcaattcccagtctatgacactcatctagatggcagatgatggtggctcacatgtrcaagatatgactggcttctggacatattcttcaggtagacctgacgagatttactgagagattagatgtgaagtgtcaagagagagagaaagatgagtctagaatgacaccgaggtttttggcagagcaactggaagagttgccattaaccaaagtaggaaagactacatgaggtgtagatttcaggaaggccatcagtagcccaattttggatctgacaagtgtgtgatactcaacagctaatcaaataactatttattaggtagctacgtctgataggctaggcctgtcaagtagccaggctgatacagagatctggaattaagg

SEQ ID NO: 803032 - DNA, 589 bp, Homo sapiens
ctggcacgctgctccgagtgagcttgtcctgccttggcacaaattctcagtctggccagggccacagaaggccgagtcccccggacggtaatcttggctgctttctgcacttgaatgtaaagtcctcctcaagacggcctgtggtctgcctcttggcaaccaagaagcctgcagtgccatatgacccgagtcatggactggagcccgaaaggcagygtacaccctgtcctgatcttgctgcttgtttcctctctgtggctccattcatagcacagttgttgcactgaggcttgtgcaggccgagcaaggccaagctggctcaaagagcaaccagtcaactctgccacggtgtgccaggcaccggttctccagccaccaacctcactcactcccgcaaatggcacatcagttcttctaccctaaaggtaggaccaaagggccatctgcttttctgaagtcctctgctctatcagccatcacgtggcagccactcgggctgtgggaaccaggccatgtatttccttggttaagtgaggtttgtggttggtctacctgctgcaggtccaccctcgaataggtggcttgttgc

SEQ ID NO: 803033 - DNA, 634 bp, Homo sapiens
aaacacgaaggtgctcactgaaacatgggaaccaaagtttcccacaacataaggagcagagtgaaactgctgaggtacaatcatggaattccagaaaatgagttgctccccaaatttcacattcgatagccataaaattttctagctggaaaatacacagaataaaaaattatctactttagccacattttctattgataatcagactaaaaccaagaaagataaaattattgatccaaagctcctaaagtggcattacttagcattttacggcaccattygggactattccataataatgaaagaatatctctagggtttgcatctctttaaaattcaatgtatagaattctgagttaagtattaaatttttcactgatgatttatgctacttacatgataggatcacgtatgcctacacttactacactttgttaaacaacataatgtaaaaatctaattcaacgcaaacatttgaatataaaagtatacctttctatcaccacccttatttatttctggttcttgagacatttcctgcagatgcaaaaacagaaggttaatttgcttgttgtatttctgtgatgtctcctcttttggagcacatgtttttaaaataattttattcttaagt

SEQ ID NO: 803034 - DNA, 398 bp, Homo sapiens
gagaccttattgggacaagcatatgtaacatgacctgtgcttcagtgttcttttgtgatcaaaaattccttacttttagttttttatctatggtagaaccacccagagcaggggtcctcaactcccaggccacagactcataccagtccacggactattatgaaccacaccacacaggaggaggtgagcactaggcaagccaaggaagcttcacctgtacttacagccacacsccatggctcatattacagcctgaactctgcctccactcagatcagtgataacattagaaactcattggagcacgaaccctgttgtgaactgcctatccgaaggatctaggttgtgtgcttcgtatgagaatctaatgccagatgatctatcattgtctcactttg

SEQ ID NO: 803035 - DNA, 615 bp, Homo sapiens
tgatatactttaccaatttaacatcttgcctgtccgtgcagaatcaaacatttacatgcactaaaagacataagcatcttcagtgctcaagtgttcatctttgtaaaataccaccaaggttgaaaggaagggacaaaaaaaaaaaaaccctcttatctcagtggggtattgcatagcagaagctactaatttaaagtcctttgatggacaagaaacaatattagggccacttatctgaaatgaacaaagatttaagtgaagatttcatcacagcttccctagactgatatgctgtaatagaaaatcagctagggggtaaaataamtaagagctctctgcatgctgaaagcaagtaagattaataataatggtaagaatagtagtcacaggagtttcagttaatgatgccaataagcatgtgctaggcactgaattaaatgccacatatatctttcttatgcacagcaaactttgaaggatatattctcctacttttcatatatgacaacatatttggtggtaaataacgttcccaaggtcacacacctagcaagtaagaaagttaggaattaaaaccagtattgtgtgaatctaaagcctaacttttttctcttt

SEQ ID NO: 803036 - DNA, 589 bp, Homo sapiens
gttgcctaggctggtctcaaattgtttggctcaagtgatctgcccaccttggcctcccaaagtgcttggattacaggcatgaaccatcacgcctggccataaaaaaacatgcatggctacatcaaagtgaaaactttttgcaaggaaaaggaaacaatgagcccaaagaggaaggctgggagaacaaatcacatatcggctaatgggggttgttatggaaaatatgcaacacattaatagtactaagtagcaacaacaaacaaatgatccatccaaaactgagcagggaacctgaatagrcatttctgcaaagaagacattaaaccacatggaagggcgcttcctccacagtcaggtggccgtgactagatggacagagttaggcagacgctgtggggggcggggggtgttgagaaaagtgacccctatgtcccgacggcagggaaacaaatgtaaaagttcagtagaccacctgcagtagttcatgcctgtaatcccggcactttgggaagctgaggcgagaggatttctttgagctcagaagtttgagaccagcctgggcaacatggcgaaaccctgcctctaccaa

SEQ ID NO: 803037 - DNA, 589 bp, Homo sapiens
gttgcctaggctggtctcaaattgtttggctcaagtgatctgcccaccttggcctcccaaagtgcttggattacaggcatgaaccatcacgcctggccataaaaaaacatgcatggctacatcaaagtgaaaactttttgcaaggaaaaggaaacaatgagcccaaagaggaaggctgggagaacaaatcacatatcggctaatgggggttgttatggaaaatatgcaacacattaatagtactaagtagcaacaacaaacaaatgatccatccaaaactgagcagggaacctgaataggcatttctgcaaagaagacattaaaccacatggaagggcgcttcctccacagtcaggtggccgtgactagatggacagagttaggcagacgctgtggggggcggggggtgttgagaaaagtgacccctatgtcccgacggcwgggaaacaaatgtaaaagttcagtagaccacctgcagtagttcatgcctgtaatcccggcactttgggaagctgaggcgagaggatttctttgagctcagaagtttgagaccagcctgggcaacatggcgaaaccctgcctctaccaa

SEQ ID NO: 803038 - DNA, 512 bp, Homo sapiens
atcatttcagcaaaaattcaggatacaaaattaatgtacccaaatcaatagatctgctatacaccaacgatgtgcaagctgagaatcagatcaagaattcaatcccttttacaatagctgcaaaaaaataaaataaaacacttaggaatatacctaacaaggaagtataaaagacctctacaaagaaaactacaaaacactgctgaaagaaatcacagatgacacaaacaaatggaaacacctctcatgctcatagatgggtaaaatcaatattgtaaaaaygaccataacgccaaaagcagtttacaatttgaaagcaatttccatcaaaatatcaccatcattcttcacagaactagaaaagataattcgaaaattcatatggaaccaaaaaagagcccgcatagccaaagcaagcctaagcagaaggaacagatctggaggcattacattacctggcttcaatctatactacaaggccatagttagcaaaacagcataatactggtata

SEQ ID NO: 803039 - DNA, 644 bp, Homo sapiens
ctgttttggggctgggagatctcgaaaagcctaccaaacccagcatcatcagtggctctcccacactcaatgccttggtctttctgcttttttggccgtcacattggcacatttcttggtgccaccaaaacaactcaaaataatctcttttcagtcatgcctgaataacataaccggcttcaggtttcctgaaaacagagaaagtgaaaatccagaaaaaatggctgttttcttcctctgacggtccagcctgtcttcaaccacaggactccacgctggcctggggtctgagtctcctgcattagtcactgtctagctttgaccaaaaccatgagcaactgaagcagaatatgaacgtggaaaatgttctgggttgtccccatgttgggaaattattgtccaacaaatgagtagctgtccaaagcactgcaaracaactagtgtgccttggagcttgtcagaggaagcgttcaagagtgctttctctgtctcattcagcaagtctcacttcctttttatgttctaaatcagaatgttctaaatcagaacatagaatcacgggccaggcttgcaagaagcaaacattaacttctatcgacatgtacttagccagggctcatttgaatggccatatgcagcagcaa

SEQ ID NO: 803040 - DNA, 644 bp, Homo sapiens
ctgttttggggctgggagatctcgaaaagcctaccaaacccagcatcatcagtggctctcccacactcaatgccttggtctttctgcttttttggccgtcacattggcacatttcttggtgccaccaaaacaactcaaaataatctcttttcagtcatgcctgaataacataaccggcttcaggtttcctgaaaacagagaaagtgaaaatccagaaaaaatggctgttttcttcctctgacggtccagcctgtcttcaaccacaggactccacgctggcctggggtctgagtctcctgcattagtcactgtctagctttgaccaaaaccatgagcaactgaagcagaatatgaacgtggaaaatgttctgggttgtccccatgttgggaaattattgtccaacaaatgagtagctgtccaaagcactgcaaaacaactagtgtgcctyggagcttgtcagaggaagcgttcaagagtgctttctctgtctcattcagcaagtctcacttcctttttatgttctaaatcagaatgttctaaatcagaacatagaatcacgggccaggcttgcaagaagcaaacattaacttctatcgacatgtacttagccagggctcatttgaatggccatatgcagcagcaa

SEQ ID NO: 803041 - DNA, 613 bp, Homo sapiens
attgctacttgatgttggtataaagagtgaaataacaatccaattttattcttctgtatgtgaatagtcagtttttctctacattatttattgaagagaattttctttccacattgtgtattctttgtccttttatcaaaaatcaacggaccacagacacatggatttatttacaggttctacattccttcacactggtctaggtgtctgtttttatgcyagtgctatgctgttttaagtactataactttttaatattgtttaaaatcaagtagcctgatgcctctggctttgttctttttgctcaagattgctttggtttttcagagtcttttgtggttccactcagattttaggactaatttttctatttctgtgaagaatggcatgggattttgacagtgattgcattaatctgtagattgctttcggtagcattgaaattttgacgatattaatttttcaaatccataaatatgggatgtttttctacttatgtcactttcaatttctttcaacaatgctataaattttcagtatacaaatatttcacatccttcattaaaattactccttagtcttttatttacttatatatgttatgatgctatta

SEQ ID NO: 803042 - DNA, 597 bp, Homo sapiens
aacaagaatactatttgtatgttaattttgtaactctcaactttcaatgcgtttatcagctttaacactttttttcttttttatggagtctttaagattatctctatattggctgggcacggtggctcatgcctgtaatcccggcactttgggaggccgaagtgtgtggatcacgagatcaggagtttgagactagcctgrccaatatggtgaaaccctgtctctactaaaaaaatacaaaaattagccgggcgtggtggcacgcacctgtagtcccagctacttgggagactgaggcaggagcagcacttgaacccggaggcggaggttgcagtgagctgagatggtgccactgcattccagcctctttcctatttggatgcctttctgttctttgccttgtatgattactctggctacatgattacatataacgttttcagcatttgtaatttgacatcacatccatctgttgtaatacactgattgttacttttcaacttgaaaacctggacatttatcactaatctccctttctcttcgcctagttcttatccaagaaaacaacctgtcaatataaaccaagttagataatta

SEQ ID NO: 803043 - DNA, 531 bp, Homo sapiens
acatgcatctatcaaaaggacacagacactcacatgtccacgggagtgttactgacaggaataaagatgtggaactgacctagatgcccaccaacagaaaattggattttttaaaatgtggtacctatacatcacagaatgctgaaaaaaccactaaggaaaatcaaacacagaaacaaaaycatgccctcagtaggaacatgggtggaactggaggccactctgctaagcaactgaggcaagaacagaagaccaaacactgcaggttctcatttataagtggaagctcaacacccaatgcacatcaacatcaatatgaaatcaacagacgttgggtactaccagacagaaaaagaagggagacagggagccttggaggaagaaagacccaactggtgctgtgttcactgcctggacgacaggtacgttaggacctcaagcatcaaaattctactgtatagccatgtagtgaagtgaacctgcaggcgtaccccttgatcacaataaaagtagctatcattttagaaaacc

SEQ ID NO: 803044 - DNA, 645 bp, Homo sapiens
gaaagcacaccatttcagtcaaacccttgataaaataaccaacttctccaactgtgtcctattgctaaataaaacagattcttattgcacttatgcaaataactatattgccataaattaagaatacccccagtttccaaattctggagaaattaggtagagaaaaacaaatatgctccaaattttgttcacaggaatatactttattgttaaaakctgcaactaacaaagttttcttaactctgaaaaactaaacaaagtatcagcaatgttttaagcaagaagtcaaaaagattacttcaattttctgttggttcagttatttctattaactcctgttccgtttcatagtcaggaacatttcagctctccatgagagagttccgaaattttttgctttattccaatgtaacaatttccaaaattatcagaaaacctgaatttaagtgcacctgttaagagtcctacagctgattataaacccaccttataaagagggtttaaaacaagacaaaacaagacaaaacaagataaccgtctgtggatgaaaaaaaagtaaaggcagccatagttaaaagatacaattgacaagtgaatgtgttacctccgtggcacacgataattttaacatagcaattatgatta

SEQ ID NO: 803045 - DNA, 488 bp, Homo sapiens
taaatatataaatccttattgtaacttacattgttcatgacatggtcagactttctgatttgttctgaacatcctttctttttaaacaaccagttattttattttaggactaaacttactacacaggattctttcttatataatagtatttctctttmaactcttttttacctcaaaaactacctctttacaactttctttacatttttttatttcctggttccttttactttgttttatatataactttaaataagctttgaattagacaaaacatgttctttttttttttttttttagaaaaaaagacacttttttggcaagaatgttttcctacaatatatgtgtattggaaaatacccaaataatgaaatatctattatttaacttaactttatattctaaattatgaccagtttgtctacaagtgtttatcccattacaattacctaattattttaattgtttatctagattatttatgaaat

SEQ ID NO: 803046 - DNA, 488 bp, Homo sapiens
taaatatataaatccttattgtaacttacattgttcatgacatggtcagactttctgatttgttctgaacatcctttctttttaaacaaccagttattttattttaggactaaacttactacacaggattctttcttatataatagtatttctctttaaactcttttttacctcaaaaactacctctttacaactttctttacatttttttatttcctggttccttttactttgttttatatataactttaaataagctttgaattagacaaaacatgttctttttttttttttttttagaaaaaaaracacttttttggcaagaatgttttcctacaatatatgtgtattggaaaatacccaaataatgaaatatctattatttaacttaactttatattctaaattatgaccagtttgtctacaagtgtttatcccattacaattacctaattattttaattgtttatctagattatttatgaaat

SEQ ID NO: 803047 - DNA, 623 bp, Homo sapiens
gcaagggtgggcataggaaacaggtacaaagtgacacgttgcatgagaggaatgaaacctgctgttctattcctcagcaggatgactagggaaaattttaccaaagggtggtcttcaagacagccagaaaggagggttctcgctctcctcactcaaagacatgaaaactctaccaggcataaaaggatgctaaataccctgatttcayccctatacgatgcatgcatggacccaaatgtcccactcgaccctctagttgtacatatttaggacagggccaattttgtttcctaaaaacaacataaacaaacaatgctaaaattcccatgggaccacaaaatgccctgaaactccaaagccatgctgaaacaccaaacgtcagatggacaaaaggctcactatgcagtgaagggcactgggctaggtggctagacacatgcagatggacaacactggagccttaactctcgtcagatacaaaaactaacccaaggtgaatgaaagatttcagcagaatacctcaaactataaaagtcctacaaggaaacctaggacatatctttctcagtacgggctttggaaaagcatttaaacaaaaagcaacagtaagaaaaaccaaaagg

SEQ ID NO: 803048 - DNA, 529 bp, Homo sapiens
aagacatgaagacgttcttgtaaaaataagatgtacaagtgaccaatagacaaaaaaaaccctcaacatcactcatcatcagagaaatgcaactcacacacacactgagataccatctcccgtcggtcagaatggccatttgtccaaagtccaacatttacatgctgacaaggcagyggaggaaagcaaacattgctacactcctggagggaataaaaactagtgctcacactatgagaagcggtttggaggttcctcaaaaaacttaacaactaccatccaaatgagcaatcgcataactgggtatctagacagaggaaactaaatcataaacccttctttcaaaatgacacagacatgggtatgttcttggtagtgctattcacaagaaaaaataaaataaaattgacctatgttccctttaacagttgattcgatgttttaaagtgttgtatatagatactgcaaaatcctacacagcttaaacaaattcatgctctcggcagcaagaaggatgaacctgcaggcc

SEQ ID NO: 803049 - DNA, 529 bp, Homo sapiens
aagacatgaagacgttcttgtaaaaataagatgtacaagtgaccaatagacaaaaaaaaccctcaacatcactcatcatcagagaaatgcaactcacacacacactgagataccatctcccgtcggtcagaatggccatttgtccaaagtccaacatttacatgctgacaaggcagcggaggaaagcaaacattgctacactcctggagggaataaaaactagtkctcacactatgagaagcggtttggaggttcctcaaaaaacttaacaactaccatccaaatgagcaatcgcataactgggtatctagacagaggaaactaaatcataaacccttctttcaaaatgacacagacatgggtatgttcttggtagtgctattcacaagaaaaaataaaataaaattgacctatgttccctttaacagttgattcgatgttttaaagtgttgtatatagatactgcaaaatcctacacagcttaaacaaattcatgctctcggcagcaagaaggatgaacctgcaggcc

SEQ ID NO: 803050 - DNA, 529 bp, Homo sapiens
aagacatgaagacgttcttgtaaaaataagatgtacaagtgaccaatagacaaaaaaaaccctcaacatcactcatcatcagagaaatgcaactcacacacacactgagataccatctcccgtcggtcagaatggccatttgtccaaagtccaacatttacatgctgacaaggcagcggaggaaagcaaacattgctacactcctggagggaataaaaactagtgctcacactatgagaagcggtttggaggttcctcaaaaaacttaacaactaccatccaaatgagcaatcgcataactgggtatcyagacagaggaaactaaatcataaacccttctttcaaaatgacacagacatgggtatgttcttggtagtgctattcacaagaaaaaataaaataaaattgacctatgttccctttaacagttgattcgatgttttaaagtgttgtatatagatactgcaaaatcctacacagcttaaacaaattcatgctctcggcagcaagaaggatgaacctgcaggcc

SEQ ID NO: 803051 - DNA, 595 bp, Homo sapiens
tggaaaatcataattttggaaggggttgttatctaacatattcaagcactaaagctactaagtggggaaaagattaaaaaaaaaatacacgagctaaaaatatgcaaaggatatacacaaccacctctgcaaaggacatgaaactgattcacaggtgaaacagaagtttctccacatcactaatcactccaaacatgtaagtcaraatcacactccgatatcagataccatcaaactccactgagaatgaatattacccaaacagcaataaaaattttggacggcagcaaccagtgtaggcttacagaaagggaaactcatatatgctattgatgtcgatgtaaattggtgaacatactgtgaaaaaaacttgggagcttctcatactgggtatgcatttaaagcaaaggcaactggtaccataaaaaattatctgccttcccatgttttatgaagcgctattcacaatatagaagatatggaatgaacctacctatccaaccacacatcaagagatgaagacactgcagtgtatctgcacaatgcaataatactcttcatccttaacaaaataatgtaattttcatttggagcc

SEQ ID NO: 803052 - DNA, 585 bp, Homo sapiens
tgcacaatgcaataatactcttcatccttaacaaaataatgtaattttcatttggagccatatggatgaacctggaaaatatattgttaaataaaataagcctggcatagaaaaacaagcaaattcatctcacttatatggaatccaaaaaactttgccttcaataagtacaaggtacagtagtggttttccgaagacaggggaaggaggagatggaaggattggttatggaaacaaagttgcagttagttgggacaaacacattcttgcattctataccacagctgggtgactctggttaacaaaatagtacatttttcaataaagcyagaagggagcaatttgagtgttatcacaacagagaaataatacctgtatgagaacagatacagcaagtaccctgatttgatcattactaaaaatatacatgtaccaaaatgtcccagaggaaaaacagtcccagcatactctctaattatatactttattacgcacagaaatttaagaaatgtgaatacgcaatgctaatgatcacatggaaatggccctgaatgtctaaggaatcctgagaaatagaaactaagt

SEQ ID NO: 803053 - DNA, 630 bp, Homo sapiens
aactaacccaaggtgaatgaaagatttcagcagaatacctcaaactataaaagtcctacaaggaaacctaggacatatctttctcagtacgggctttggaaaagcatttaaacaaaaagcaacagtaagaaaaaccaaaaggacaagctgggcctaagaaactataacactgccagatagcaaaataaatcactggcacagtaaacacacaggctacaggatgggagaaaatgttcccaaactatgcttctcaccaaggtctgatagccagactctaatatgaccttaaaaaaatcaagaggcagaaaaacaaaccattcaaacaatgggtagagaacatgaacaaacacctcaacatccctcatcatcagagaaatrcaactctcatgaacactgagataccatctcacatcggtcagaatggccatttgtcctaaggccaagcattaacatggtggcaaggcaatggaggaaagcaaacactgctacactcttggtgggaataaaaactagctctcacactatgagaagtggtttggaggttcctcaaagaacttaacaactaccatccaaatgagcaatcacataactgggtatctacacaaaggaaaataaatcataaatcttcct

SEQ ID NO: 803054 - DNA, 633 bp, Homo sapiens
acagggagcaattccaatgttttcacaaaagaataatacctgtatgagagaacagatatgccaagtaccctgatttgatcattactaaaaatatacatgaatcaaaatgtgccagaggaaaaacagtcccagcagactctctaattatatactttactatgcacagaaatttaagaaacgtgaatacacaatgctgatgatcacatggaaccacaaatggccctgaatgtctaaggaatcctgagaaatagaaactaagttggaggactcacaatccctgatatgccgytgtgctccagcctgggtgagagaatgaaactctgtctcaaaaaaattgttagaacatttgaaggaaacatagaagtgataactacaaggactctgtcactcaggctggaatgcagtggcatgatcatggctcactgcagccttgacctctctggcacaagtgatcctcccacttctgcctcctgaatagctggaactacaggcacacaccaccacgcctggctaatttctttgtattttttgtagagatgaacttttgccatgttgcctaggctggtctcaaattctttggctcaagtgatctgcccaccttggccttgcaaagtgcttggattacaggcacca

SEQ ID NO: 803055 - DNA, 646 bp, Homo sapiens
ttaaataaaaacatagaccatgtcctatttttgttttccaaataggatcacaacacactactaaaaatcccgtgggacaatgaaatgtcctgcattcccaaagcagtttctgcacatacaaagtcagtggagtgccatcacactcttccactttcaactacttcccaaagctttagttacccaagcgattcgtgataggcattaacagagaaacacaggccaacgaacacaatgagggtgtccagcagcaaactcaaatgaaggtctcagttaatttagaaagtttattttgccaaggttgagaacacactygtgacacagcctcagggtcatgatgacatgtgcccaaggtggtcagggcacagcttggttttatacatttcagagaaacatgagacatcaatcaatatatctaagaagtatattgctttggtctagaaaggtgtgacaagttgaagctaactcagaagactggaaggagggagggagcttccaggtcacagatcactgatacacaaatggttacattcttttgagtttctgattagtctccaaaggaggcaatcaggtatgcatctatctcagggagcagaggggtgactttgaatagaatgggaggcaggttggccctaagcagattccagcc

SEQ ID NO: 803056 - DNA, 646 bp, Homo sapiens
ttaaataaaaacatagaccatgtcctatttttgttttccaaataggatcacaacacactactaaaaatcccgtgggacaatgaaatgtcctgcattcccaaagcagtttctgcacatacaaagtcagtggagtgccatcacactcttccactttcaactacttcccaaagctttagttacccaagcgattcgtgataggcattaacagagaaacacaggccaacgaacacaatgagggtgtccagcagcaaactcaaatgaaggtctcagttaatttagaaagtttattttgccaaggttgagaacacactcgtgacacagcctcagggtcatgatgacatgtgcccaaggtggtcagggcacagcttggttttatacatttcagagaaacatgagacatcaatcaatatatctaagaagtatattgctttggtctagaaaggtgtgacaagttgaagctaactcagaagactggaagsagggagggagcttccaggtcacagatcactgatacacaaatggttacattcttttgagtttctgattagtctccaaaggaggcaatcaggtatgcatctatctcagggagcagaggggtgactttgaatagaatgggaggcaggttggccctaagcagattccagcc

SEQ ID NO: 803057 - DNA, 555 bp, Homo sapiens
aggtctctgccatccgagccggagggcaccgtgcccagaccccaccctgtgttcacaccccagcaggctgtctgctttgtcttcacatacacggagcccaggacagactggccatgcctctgcccccacgcaccctcayctccccaacacagatacggctctgcttgcctggggccctagggaggtgacaggcaggacctctgggcacccattgacgcagggcactctgggcttcaggtttggaaatctgagagtcagagagacatccaggctttgccgcaagcctcaccagaacctcccggggtgtgaagagtcctgttcgggagcagggctgtgaggcggggcaggccagggctcgtccgggtcacaggtacagccttgtgtgttgcaaacgacaaggacctcccaagtgtgccaccatgtgcccacccactaccctgcccagagtccactgtggatggactggcagtggctatacagtgggcagacccagaggagctgtctgggggcccagggcaggcaggggtcattctggaaaaccaagcttctagtgct

SEQ ID NO: 803058 - DNA, 555 bp, Homo sapiens
aggtctctgccatccgagccggagggcaccgtgcccagaccccaccctgtgttcacaccccagcaggctgtctgctttgtcttcacatacacggagcccaggacagactggccatgcctctgcccccacgcaccctcatctccccaacacagatacggctctgcttgcctggggccctagggaggtgacaggcaggacctctgggcacccattgacgcagggcactctgggcttcaggtttggaaatctgagagtcagagagacatccaggctttgccgcaagcctcaccagaacctcccggggtgtgaagagtcctgttcgggagcagggctgtgaggcggggcaggccagggctcrtccgggtcacaggtacagccttgtgtgttgcaaacgacaaggacctcccaagtgtgccaccatgtgcccacccactaccctgcccagagtccactgtggatggactggcagtggctatacagtgggcagacccagaggagctgtctgggggcccagggcaggcaggggtcattctggaaaaccaagcttctagtgct

SEQ ID NO: 803059 - DNA, 607 bp, Homo sapiens
agaggagctgtctgggggcccagggcaggcaggggtcattctggaaaaccaagcttctagtgctgcagggacagcctctgtgcccctccccggctcaggccccttcctcccctcttctggctcctcctgtgtggaatctctcaggttccagtggtaayctgagagataggagtctctgctcttctgtgtccctttgccccttcatcttgtgtccggtcagctttccagggtggctgtgttcagtggctgaggggtgagaaaccctacgcctcaaggacagaccccgcttttcccagaggccactagggagctcagtggagctgacaggtcctaccagtagcttgggcacacaagaccccatctgggtgatgtgtctccaaagagagtcatgttgacaggagtcagtctccctgagcccagagctggcacatagcagagccagggctgggtccccaaggttgtcagaggcaaagccttgagctccaaatcccgttcagattcagttcttcactgatgatgaggctccgggaggagagcctgatggccaggcaggcagcgtgcagggatcctcctggtgcttcagccagtcctggggctgccacttccc

SEQ ID NO: 803060 - DNA, 622 bp, Homo sapiens
ggctccgggaggagagcctgatggccaggcaggcagcgtgcagggatcctcctggtgcttcagccagtcctggggctgccacttcccagagcactgccgggtgtgcagggcgtgggtgcagcgccagctgcctcaggctcatgcccactgttcggttgcaggcaccaaccccttcctcaggtcgatgcaccaccgcgtgacctccaggcagctgcagctcccggacaagcactaggttaccaccttgctcagcacctgtgcccagagcatccacaaggcctgcctctcggctgcctagccaggactgcagggatggcccgcagcctcatcggggccaaggatgcatgcctcctgtcagacacttctagatgttggcgtccatggagagcctggagttaggttagctttcctccttttctctcctgccttggggatctgccaaatgaaatcccmcacttgtacagactgataggtgcgcagtggagtgtgctgcctgcagggagttggctgtcttcttggagaaggcactccatgtgacttcctccatgaagccagacacagtccccagccacgatcctcgggctgctctcaccacggcctgtccagggtccgggtgcatctc

SEQ ID NO: 803061 - DNA, 552 bp, Homo sapiens
acagaggacataggaaacccttcaaacacacatgggactctctgctcacagttttgggttcaggctgcactgctttgggcaagtggggcaccccctagggaagcctctgagtccagggcacaggatgcctctttcaatacttgttttttttctcatactcaggatctatactgtagactttataacactgtacccttaagctacaccaaatttattaaaaaatattttttctttgataattaacttttctgtagcttttaaaatttataaacttttaaattttttaactttttgacttgcaataacagcttaaaatacattgtrcagctagctgtataaaaatatttttctttatagcctgtaagtttttttatttgaaaaacgttctattttaattttcttgaaaactctgttaaaagctgtgacacaaacatatacattagcctaggcctacactgggtcaagatcatcagtgttactgtcttccacctccacatctgctcccattggaaggtttttagaggaaataacgtgtggatccagctgtcatct

SEQ ID NO: 803062 - DNA, 484 bp, Homo sapiens
ggtgaaacacctcaacttagagtgaggaaaaaatacagttgaaagagagcaaacagtaaaaccagcatttgttaaatcatttagtaaaacatttgcctaggggttaaggggcagttataaatataaaagcaaactatttgtaagttttgctatttctcttctgttgtgacattcttgaatataaatgtgtgcatttaaatagctattcttcccttctgaggactacagcccttcagtgttcttgggtataataacaaacgcatatttcacttaaacacagaagatggttcatttgtgttgtagatatgcatgtccgctttttaactttgaaagacagccygtttacttggacatttgtattatgggtccacagttggtacacagtctactatttctatgttatatatatgtttacataaaggcattcatgtcaaaatcagatagttttgtgttcttttaaagaagaaaaggaaggaaatatgtt

SEQ ID NO: 803063 - DNA, 625 bp, Homo sapiens
gaaagcacaccatttcagtcaaacccttgataaaataaccaacttctccaactgtgtcctattgctaaataaaacagattcttattgcacttatgcaaataactatattgccataaattaagaatacccccagtttccaaattctggagaaattaggtagagaaaaacaaatatgctccaaattttgttcacaggaatatactttattgttaaaakctgcaactaacaaagttttcttaactctgaaaaactaaacaaagtatcagcaatgttttaagcaagaagtcaaaaagattacttcaattttctgttggttcagttatttcaattaactcctgttccgtttcatagtcaggaacatttcagctctccatgagagagttccgaaattttttgctttattccaatgtaacaatttccaaaattatcagaaaacctgaatttaagtgcacctgttaagagtcctacagctgattataaacccaccttataaagagggtttaaaacaagacaaaacaagacaaaacaagataaccgtctgtggatgaaaaaaaagtaaaggcagccatagttaaaagatacaattgacaagtgaatgtgttacctccgtggcacacgataattt

SEQ ID NO: 803064 - DNA, 625 bp, Homo sapiens
gaaagcacaccatttcagtcaaacccttgataaaataaccaacttctccaactgtgtcctattgctaaataaaacagattcttattgcacttatgcaaataactatattgccataaattaagaatacccccagtttccaaattctggagaaattaggtagagaaaaacaaatatgctccaaattttgttcacaggaatatactttattgttaaaatctgcaactaacaaagttttcttaactctgaaaaactaaacaaagtatcagcaatgttttaagcaagaagtcaaaaagattacttcaattttctgttggttcagttatttcwattaactcctgttccgtttcatagtcaggaacatttcagctctccatgagagagttccgaaattttttgctttattccaatgtaacaatttccaaaattatcagaaaacctgaatttaagtgcacctgttaagagtcctacagctgattataaacccaccttataaagagggtttaaaacaagacaaaacaagacaaaacaagataaccgtctgtggatgaaaaaaaagtaaaggcagccatagttaaaagatacaattgacaagtgaatgtgttacctccgtggcacacgataattt

SEQ ID NO: 803065 - DNA, 591 bp, Homo sapiens
taacagaatgggagacaggttggccctaagcagtttccagcctgagttttccttagtgattttgggggaccaagatactttcctttaacaacatacgagtaagcacatgtttgaaaacaaccacaaaagtcaccctgggaagggagagtctgtccaatacagtgttcagggaactggatatccctaagcaaaataacatasggtccttattgtgcgaaattcacaattcattcaactgaaagaaagacctatccaaaactgataaagtcactctctaagaagaaagcatatagtgtgcagataccagggtcaacttggatctatgctcatggtttgcaaaaaggaaaacagaaaaaataaagaagacaaaaaagaatacaaacaagcaacaaccaaaactcactggcaacagattgataagctggtgaatttctttaacttcatcagtcaccaaagtaagggaaaaccagaacactgcacacacctgaaactgcatcagactacatggcttgtgggcaagaaagaatgaaaaacatgaatgaaaagaaagaaacatacaaaggatgataagaagcatttggagaaaaacac

SEQ ID NO: 803066 - DNA, 591 bp, Homo sapiens
taacagaatgggagacaggttggccctaagcagtttccagcctgagttttccttagtgattttgggggaccaagatactttcctttaacaacatacgagtaagcacatgtttgaaaacaaccacaaaagtcaccctgggaagggagagtctgtccaatacagtgttcagggaactggatatccctaagcaaaataacatagggkccttattgtgcgaaattcacaattcattcaactgaaagaaagacctatccaaaactgataaagtcactctctaagaagaaagcatatagtgtgcagataccagggtcaacttggatctatgctcatggtttgcaaaaaggaaaacagaaaaaataaagaagacaaaaaagaatacaaacaagcaacaaccaaaactcactggcaacagattgataagctggtgaatttctttaacttcatcagtcaccaaagtaagggaaaaccagaacactgcacacacctgaaactgcatcagactacatggcttgtgggcaagaaagaatgaaaaacatgaatgaaaagaaagaaacatacaaaggatgataagaagcatttggagaaaaacac

SEQ ID NO: 803067 - DNA, 591 bp, Homo sapiens
taacagaatgggagacaggttggccctaagcagtttccagcctgagttttccttagtgattttgggggaccaagatactttcctttaacaacatacgagtaagcacatgtttgaaaacaaccacaaaagtcaccctgggaagggagagtctgtccaatacagtgttcagggaactggatatccctaagcaaaataacatagggtccttattgtgcgaaattcacaattcattcaactgaaagaaagacctatccaaaactgataaagtcaytctctaagaagaaagcatatagtgtgcagataccagggtcaacttggatctatgctcatggtttgcaaaaaggaaaacagaaaaaataaagaagacaaaaaagaatacaaacaagcaacaaccaaaactcactggcaacagattgataagctggtgaatttctttaacttcatcagtcaccaaagtaagggaaaaccagaacactgcacacacctgaaactgcatcagactacatggcttgtgggcaagaaagaatgaaaaacatgaatgaaaagaaagaaacatacaaaggatgataagaagcatttggagaaaaacac

SEQ ID NO: 803068 - DNA, 591 bp, Homo sapiens
taacagaatgggagacaggttggccctaagcagtttccagcctgagttttccttagtgattttgggggaccaagatactttcctttaacaacatacgagtaagcacatgtttgaaaacaaccacaaaagtcaccctgggaagggagagtctgtccaatacagtgttcagggaactggatatccctaagcaaaataacatagggtccttattgtgcgaaattcacaattcattcaactgaaagaaagacctatccaaaactgataaagtcactctctaagaagaaagcatatagtgtgcrgataccagggtcaacttggatctatgctcatggtttgcaaaaaggaaaacagaaaaaataaagaagacaaaaaagaatacaaacaagcaacaaccaaaactcactggcaacagattgataagctggtgaatttctttaacttcatcagtcaccaaagtaagggaaaaccagaacactgcacacacctgaaactgcatcagactacatggcttgtgggcaagaaagaatgaaaaacatgaatgaaaagaaagaaacatacaaaggatgataagaagcatttggagaaaaacac

SEQ ID NO: 803069 - DNA, 629 bp, Homo sapiens
ggctgggcaagggtgggcataggaaacaggtacaaagtgacacgttgcatgagaggaatgaaacctgctgttctattcctcagcaggatgactagggaaaattttaccaaagggtggtcttcaagacagccagaaaggagggttctcgctctcctcactcaaagacatgaaaactctaccaggcataaaaggatgctaaataccctgatttcayccctatacgatgcatgcatggacccaaatgtcccactcgaccctctagttgtacatatttaggacagggccaattttgtttcctaaaaacaacataaacaaacaatgctaaaattcccatgggaccacaaaatgccctgaaactccaaagccatgctgaaacaccaaacgtcagatggacaaaaggctcactatgcagtgaagggcactgggctaggtggctagacacatgcagatggacaacactggagccttaactctcgtcagatacaaaaactaacccaaggtgaatgaaagatttcagcagaatacctcaaactataaaagtcctacaaggaaacctaggacatatctttctcagtacgggctttggaaaagcatttaaacaaaaagcaacagtaagaaaaaccaaaagg

SEQ ID NO: 803070 - DNA, 475 bp, Homo sapiens
agatattttggggtttgaaaaattcatataatgattaaaggagaaagctcttatgagttattgtatgctgagatatatgtggacacacacacacacacacgcagtttattgcattgttgggttttatacataaaattacccaagttgcaaatatatgtctaccacccttgactctcaggatagtgcagcaggatgcagcggaacccccctgacttgctgacaagcrcagaccagtctagaagtggccctgtacatgtttctgcggaaccctgacactgaagctgttctggttgccatgtcctgtttccgccacctctgtgaggaagcagatacccggtgtggggtggacgaagtgtcggtgcgtaacctcttgcccaactcttaacacattcatggagtttgcctgtcagcaatgtgatgtcaacaggtaaatatgaatagtggtttttttactcaacctccctaaagcacatgg

SEQ ID NO: 803071 - DNA, 631 bp, Homo sapiens
tcctataaataaatgtcttactgttttcaaacttacgtttagttcattttatttgatggttaaagtattttgaatgccttatcttgtgtctgtatctgataacttttttattgtctctatgtctgtataggtacgtttgtgtgcttgggaatatggtccatgcaattcaaataaaaacgaaactgtgtcagttggttgaagtaacgatggcaaggagagatgacctctcattttgccgagagrtgaaatttaggtgagttctcaaaagagcaatgtagggtcttgtaaatcttaatttgttgaatgaagtacagaaatagagtagatatctggttattggtaggaagaaagacataaaaagagagcagtttacatgtttgtttttctctgtgtctctcctcaaatttccctaagctttgtgcctgtggcaagcctccctttttctaaaactctgctgtacttgagctaagaatttgattctgtttccaatctgatagcataactaaaggccatgatggaggatcagtatccacgttgcttgttccttctggcttttacatctatgatagcagtatctcttttataaagtcgtcatgtcacctgggttatctgccaaattatttgcaccata

SEQ ID NO: 803072 - DNA, 551 bp, Homo sapiens
ctctgccatccgagccggagggcaccgtgcccagaccccaccctgtgttcacaccccagcaggctgtctgctttgtcttcacatacacggagcccaggacagactggccatgcctctgcccccacgcaccctcatctccccaacacagatacggctctgcttgcctggggccctagggaggtgacaggcaggacctctgggcacccattgacgcagggcactctgggcttcaggtttggaaatctgagagtcagagagacatccaggctttgccgcaagcctcaccagaacctcccggggtgtgaagagtcctgttcgggagcagggctgtgaggcggggcaggccagggctcrtccgggtcacaggtacagccttgtgtgttgcaaacgacaaggacctcccaagtgtgccaccatgtgcccacccactaccctgcccagagtccactgtggatggactggcagtggctatacagtgggcagacccagaggagctgtctgggggcccagggcaggcaggggtcattctggaaaaccaagcttctagtgct

SEQ ID NO: 803073 - DNA, 599 bp, Homo sapiens
ctccgggaggagagcctgatggccaggcaggcagcgtgcagggatcctcctggtgcttcagccagtcctggggctgccacttcccagagcactgccgggtgtgcagggcgtgggtgcagcgccagctgcctcaggctcatgcccactgttcggttgcaggcaccaaccccttcctcaggtcgatgcaccaccgcgtgacctccaggcagctgcagctcccggacaagcactaggttaccaccttgctcagcacctgtgcccagagcatccacaaggcytgcctctcggctgcctagccaggactgcagggatggcccgcagcctcatcggggccaaggatgcatgcctcctgtcagacacttctagatgttggcgtccatggagagcctggagttaggttagctttcctccttttctctcctgccttggggatctgccaaatgaaatcccacacttgtacagactgataggtgcgcagtggagtgtgctgcctgcagggagttggctgtcttcttggagaaggcactccatgtgacttcctccatgaagccagacacagtccccagccacgatcctcgggctgctctcaccacggcctg

SEQ ID NO: 803074 - DNA, 614 bp, Homo sapiens
ggctccgggaggagagcctgatggccaggcaggcagcgtgcagggatcctcctggtgcttcagccagtcctggggctgccacttcccagagcactgccgggtgtgcagggcgtgggtgcagcgccagctgcctcaggctcatgcccactgttcggttgcaggcaccaaccccttcctcaggtcgatgcaccaccgcgtgacctccaggcagctgcagctcccggacaagcactaggttaccaccttgctcagcacctgtgcccagagcatccacaaggcctgcctctcggctgcctagccaggactgcagggatggcccgcagcctcatcggggccaaggatgcatgcctcctgtcagacacttctagatgttggcgtccatggagagcctggagttaggttagctttcctccttttctctcctgccttggggatctgccaaatgaaatcccmcacttgtacagactgataggtgcgcagtggagtgtgctgcctgcagggagttggctgtcttcttggagaaggcactccatgtgacttcctccatgaagccagacacagtccccagccacgatcctcgggctgctctcaccacggcctgtccagggtccggg

SEQ ID NO: 803075 - DNA, 572 bp, Homo sapiens
gctgctttctataggagaacacagaggacataggaaacccttcaaacacacatgggactctctgctcacagttttgggttcaggctgcactgctttgggcaagtggggcaccccctagggaagcctctgagtccagggcacaggatgcctctttcaatacttgttttttttctcatactcaggatctatactgtagactttataacactgtacccttaagctacaccaaatttattaaaaaatattttttctttgataattaacttttctgtagcttttaaaatttataaacttttaaattttttaactttttgacttgcaataacagcttaaaatacattgtrcagctagctgtataaaaatatttttctttatagcctgtaagtttttttatttgaaaaacgttctattttaattttcttgaaaactctgttaaaagctgtgacacaaacatatacattagcctaggcctacactgggtcaagatcatcagtgttactgtcttccacctccacatctgctcccattggaaggtttttagaggaaataacgtgtggatccagctgtcatct

SEQ ID NO: 803076 - DNA, 480 bp, Homo sapiens
aaacacctcaacttagagtgaggaaaaaatacagttgaaagagagcaaacagtaaaaccagcatttgttaaatcatttagtaaaacatttgcctaggggttaaggggcagttataaatataaaagcaaactatttgtaagttttgctatttctcttctgttgtgacattcttgaatataaatgtgtgcatttaaatagctattcttcccttctgaggactacagcccttcagtgttcttgggtataataacaaacgcatatttcacttaaacacagaagatggttcatttgtgttgtagatatgcatgtccgctttttaactttgaaagacagccygtttacttggacatttgtattatgggtccacagttggtacacagtctactatttctatgttatatatatgtttacataaaggcattcatgtcaaaatcagatagttttgtgttcttttaaagaagaaaaggaaggaaatatgtt

SEQ ID NO: 803077 - DNA, 641 bp, Homo sapiens
ctaaagacaattcatagttcataatctttcaggcttgtgctttacttggtgactctcttttggggaggggcttgtttcttataaatgtttgtctaatacaaatcacttgccccactgtaccatggaagggaaatgagggctagtccccaaagagcaagcaagcagtcctcctgggaagaagccctaatggctcctagtggtgacacagtcattctgccagggtgaggggacacagtcattctgccagggtgargggacacagtcattctgcctccccaacctgtgagcaataataaaatataaccaagtgaacaggagaggtactaactagctggataatccatggtggactagaatctctaaacaggaatgtttatgtgttttgaataaatcagagctggaaagagacacttttggagaagtgatggagaatagaaaagtatgaaaaagataaaggtttctcaccaaggaacccacaaaaaaggtagtaccagtcaaaggtagtcttgggcttttcttttgagatgagtgtaccccacgtgggttgtgccattttcatataaaaattggaatgataatgaacaagtgaaagtgaaatcagtttccctcctttgttcaataaacatggatagagtacctgt

SEQ ID NO: 803078 - DNA, 599 bp, Homo sapiens
atgctttatcagataacaatgattataaagttgctgctattaatagagtgttgtgttagcccaaggataaacaggccaatggaaaagaatagagtgttaagaaacagatccatacatataagcaaagacagggcacatcaatgaagactgaaagtctcaagaaatagctctgggataactgggcatccagatggaaaaggtaaagttggaaaccttctcttacaaaaaaaagctctaggtagaatgaaaacttaaatgtcaaaaaaaaattctaaaactgttagaagatactgtaaaagaatataactttaatacaaataaatgaataaaattgactaaattcmtaaacttctgtttatcaaaaggcccaacagaataaaaagaccatgagaaaggatatttgcaaaacatctaaatgacaaggtactgaagatcagaaaaaacaaggagcgcctatgagaagttaagcaaaggacagacagcccattagaacattggtgagattgtggggaaatgggcattatcatatacttcggttagaagcataaattagtcccacagtgttgaaggcaatatggcaatacatattataattaaaa

SEQ ID NO: 803079 - DNA, 599 bp, Homo sapiens
atgctttatcagataacaatgattataaagttgctgctattaatagagtgttgtgttagcccaaggataaacaggccaatggaaaagaatagagtgttaagaaacagatccatacatataagcaaagacagggcacatcaatgaagactgaaagtctcaagaaatagctctgggataactgggcatccagatggaaaaggtaaagttggaaaccttctcttacaaaaaaaagctctaggtagaatgaaaacttaaatgtcaaaaaaaaattctaaaactgttagaagatactgtaaaagaatataactttaatacaaataaatgaataaaattgactaaattcctaaacttctgtttatcaaaaggcccaacagaataaaaagaccatgagaaaggatatttgcaaaacatctaaatgacaaggtactgaagatcagaaaaaacaaggagcgcctatgagaagktaagcaaaggacagacagcccattagaacattggtgagattgtggggaaatgggcattatcatatacttcggttagaagcataaattagtcccacagtgttgaaggcaatatggcaatacatattataattaaaa

SEQ ID NO: 803080 - DNA, 530 bp, Homo sapiens
gatactcaaatgacttttcatttaaattgaatggagaaagattgaggggttctagaattaaaaacaacttaaactacatagaaatatcaaggatattttaattatatggtcacctggaggctgggaaaaagtgtaggatgatgcagacacctctccatcttaacaataagcctaccttatttcatttgtgggtcaacagtggattgactgacctgagatcattttccctcaacygcaaaaatatacagtttatgaaaaccaggtcttgagaaaatagagcttaatatcaataaggctgtaaagaaaaaattcctagaaaacatcagatccgaacaatgtgctgggattgtatgtcacatggctagtaccagttgctgtcgttaatgttggagtacatggaaagcataatacttggggggatggggccttataaagtttagtagctttgcttgtcttggaaaatgttgtttttggttgttgttgttttggtttggtttggtttatttgtttgttttttttttttttttttt

SEQ ID NO: 803081 - DNA, 530 bp, Homo sapiens
gatactcaaatgacttttcatttaaattgaatggagaaagattgaggggttctagaattaaaaacaacttaaactacatagaaatatcaaggatattttaattatatggtcacctggaggctgggaaaaagtgtaggatgatgcagacacctctccatcttaacaataagcctaccttatttcatttgtgggtcaacagtggattgactgacctgagatcattttccctcaaccgcaaaaatatacagtttatraaaaccaggtcttgagaaaatagagcttaatatcaataaggctgtaaagaaaaaattcctagaaaacatcagatccgaacaatgtgctgggattgtatgtcacatggctagtaccagttgctgtcgttaatgttggagtacatggaaagcataatacttggggggatggggccttataaagtttagtagctttgcttgtcttggaaaatgttgtttttggttgttgttgttttggtttggtttggtttatttgtttgttttttttttttttttttt

SEQ ID NO: 803082 - DNA, 626 bp, Homo sapiens
ctaaaaacatgatctcattaaaaatacttaaacacaataaactttactttctcatttattaaaaaaaattaaatccctggcactagaaatgtaaaacatggcaagtatgcatgttctaatctggagttaatttggtatgtgtaatcccataagcaaagcagtagccatgtcctattgtttttttttctttcccaatacacatgctaatctactgcctcccccagcccctggccatattaatattactgaagcccactttcatcagtgtctttccacgatraaaacaaatgagcaagcaaccaaaaactacacaaaaccacatgcacacacatggccctccttcaatggatctccactgcctagagaattaaatccaattcctctgcatggtatgcaaaatctccacagtatggcccaacctgcctctccagcttgatctctaactgcttccctacacataacacatgtgctgccaagagggacttctggctgtgtcccaaacacgcctgggtttcccagctccagttgccctgcctggtgtctgtgcacatctcacctatccacactcctcccactcttccaagtcacctcatatgcctctctccactccaccagacttaatatgt

SEQ ID NO: 803083 - DNA, 626 bp, Homo sapiens
ctaaaaacatgatctcattaaaaatacttaaacacaataaactttactttctcatttattaaaaaaaattaaatccctggcactagaaatgtaaaacatggcaagtatgcatgttctaatctggagttaatttggtatgtgtaatcccataagcaaagcagtagccatgtcctattgtttttttttctttcccaatacacatgctaatctactgcctcccccagcccctggccatattaatattactgaagcccactttcatcagtgtctttccacgatgaaaacaaatgarcaagcaaccaaaaactacacaaaaccacatgcacacacatggccctccttcaatggatctccactgcctagagaattaaatccaattcctctgcatggtatgcaaaatctccacagtatggcccaacctgcctctccagcttgatctctaactgcttccctacacataacacatgtgctgccaagagggacttctggctgtgtcccaaacacgcctgggtttcccagctccagttgccctgcctggtgtctgtgcacatctcacctatccacactcctcccactcttccaagtcacctcatatgcctctctccactccaccagacttaatatgt

SEQ ID NO: 803084 - DNA, 626 bp, Homo sapiens
ctaaaaacatgatctcattaaaaatacttaaacacaataaactttactttctcatttattaaaaaaaattaaatccctggcactagaaatgtaaaacatggcaagtatgcatgttctaatctggagttaatttggtatgtgtaatcccataagcaaagcagtagccatgtcctattgtttttttttctttcccaatacacatgctaatctactgcctcccccagcccctggccatattaatattactgaagcccactttcatcagtgtctttccacgatgaaaacaaatgagcaagcaaccaaaaactacacaaaaccacatgcacacacatggccctccttcaatggatctccactgcctagagaattaaatccaattcctctgcatggtatgcaaaatctccacagtayggcccaacctgcctctccagcttgatctctaactgcttccctacacataacacatgtgctgccaagagggacttctggctgtgtcccaaacacgcctgggtttcccagctccagttgccctgcctggtgtctgtgcacatctcacctatccacactcctcccactcttccaagtcacctcatatgcctctctccactccaccagacttaatatgt

SEQ ID NO: 803085 - DNA, 619 bp, Homo sapiens
aatatgaagatagagatgagtcaggatgggaactggtggctgggatgagggccagaagaaaactacaggtataagagccaggaaaattagttgcttaacactgattaatggccatgcttgtcctactcattacaaacattaacttctcatttaagttattttaaaatatttttatgctgacatgctaaagtttttgtgctaacaaaatyaaatttcatctttctggaatatttcagagccaaggtaatctaaaatttttagataggggctaaagaaagggagctcaggcccgacagtctcaggatataggccgaatagaaaatggggggagctgaacgaagagagacgttaggcttgcaaaggtagggaccaggatgtaagcatgaggttcacgttcacagtcccattcactttattaacagcactgagcagtatcactgctgcccaagccatcagaaaggtcctggccaaaaatgcaaatccttctttatcttccagaactggaattcccattcaacagattttctggaaaaataaagtttccttttacagtgtcatggctatttttttgagatcacaatgcccagagtacagcttctagattatcttgatgtctaac

SEQ ID NO: 803086 - DNA, 619 bp, Homo sapiens
aatatgaagatagagatgagtcaggatgggaactggtggctgggatgagggccagaagaaaactacaggtataagagccaggaaaattagttgcttaacactgattaatggccatgcttgtcctactcattacaaacattaacttctcatttaagttattttaaaatatttttatgctgacatgctaaagtttttgtgctaacaaaatcaaatttcatctttctggaatatttcagagccaaggtaatctaaaatttttagataggggctaaagaaagggagctcaggcccgacagtctcaggatataggccgaatagaaaatggggggagctgaacraagagagacgttaggcttgcaaaggtagggaccaggatgtaagcatgaggttcacgttcacagtcccattcactttattaacagcactgagcagtatcactgctgcccaagccatcagaaaggtcctggccaaaaatgcaaatccttctttatcttccagaactggaattcccattcaacagattttctggaaaaataaagtttccttttacagtgtcatggctatttttttgagatcacaatgcccagagtacagcttctagattatcttgatgtctaac

SEQ ID NO: 803087 - DNA, 650 bp, Homo sapiens
gcaatgctagcttattttatcagtaaatatgtataagtttaagaaaaaaatatacaagcagaataaaaatgtatgcttgcattatacaataatatgggtgtacatttccagagttcttgtattcatacactgtataagaagatgacaaacaattttgcaatgaaaaatcttgttcatacatttttggcatgcatcagaatatatctgtattcctgagtcaaarggtttgtgcatttgtgattttgattgataatgccaaattgccttacagaagaagtgactttaatatatcctctcatcctcagtgtatagaaatgcttttttcctcacacagctctaacaagcatgtcataaaactctttttttttttttgagatggagtttcactcttgttgcccaggctggagtgcaatggcacaatctcagctcaccacaacctctgcctcccaggttcaagtgattctcctgtctcagcctcccgagtagctgggattagaggcatgcgccaccatgcccggctaattttgtatttttagtagaaatggggtttctccatgttggtcaggctggtctcaaactcccaaactcagatgatgcacctgccttggcctcccaaagtgctgggattacaggcatgaggtaccgcatcc

SEQ ID NO: 803088 - DNA, 650 bp, Homo sapiens
gcaatgctagcttattttatcagtaaatatgtataagtttaagaaaaaaatatacaagcagaataaaaatgtatgcttgcattatacaataatatgggtgtacatttccagagttcttgtattcatacactgtataagaagatgacaaacaattttgcaatgaaaaatcttgttcatacatttttggcatgcatcagaatatatctgtattcctgagtcaaagggtttgtgcatttgtgattttgattgataatgccaaattgccttacagaagaagtgactttaatatatcctctcatcctcagtgtatagaaatgcttttttcctcacacagctctaacaagcatgtcataaaactctttttttttttttgagatggagtttcactcttgttgcccaggctggagtgcaatggcacaatctcagctcaccacaacctctgcctcccaggttcaagygattctcctgtctcagcctcccgagtagctgggattagaggcatgcgccaccatgcccggctaattttgtatttttagtagaaatggggtttctccatgttggtcaggctggtctcaaactcccaaactcagatgatgcacctgccttggcctcccaaagtgctgggattacaggcatgaggtaccgcatcc

SEQ ID NO: 803089 - DNA, 509 bp, Homo sapiens
aagtggccttgttggcaagcctgccgtctgcattccatgctcaatttcctgccctggagaggggtaggaggcaggcacgtcaccttgcacccagatcccaggccagtgggaagacatgcccatcccagaacccggaggctgctgacagaattgggtggtgattaggacttgctgggggccacagcaatctgatttccartctccatctctctctagctgtgagctctctggttagtgctgcccctgatctgagtagcctctgcacaatggggatagtacccactccccatgcagttaccgaaaagatcaaatgagatgtgtgtaaatgcttagagcagtgctgggcacatattacatactcagtgctattttttattattggcttaattatttaaatcaaatattaacctcctatctaatgtaggaattctctctacagcgtatcagacaactggctattctcactctgcttgaatgcttccagtgacaggggactcactacttctccc

SEQ ID NO: 803090 - DNA, 619 bp, Homo sapiens
agcctcatctgtgttggtcccggccatgtgaggactgagaatccagggatcacagaccccttagtgaatccccgtctgaggccaatccactagtcattcctttggctggagttttcacttttaaacccttaggaggaaataagataatctacagtcctggcaatttggttggaagcatggtgaaggaactacctgagggctgtctgtgtctatttttgtgaattctctcccatgcccccgcagagtttgtgttgctgatatgagtggacagtgctccgggcactgttaactgtcatgctgaaggagtcaggctgatgactgtctctctgaaggcaacttgagggaacaagagcggaatgtaaaggctgcccaaccagttcttcatsatgcccaggctccacccccacactaatttcagtagtcttcagtctcagagagggtagtgagaaattccctaatttccctgcttagtgttaggaatccatgtgtctctctcctgtccttccactatctgtttagggttgattttgaagatcttggcagggattctctaccatgtagtatcttatttatgtatttatatagaatgaatgaatgaggtggtgtgttattgtctttt

SEQ ID NO: 803091 - DNA, 644 bp, Homo sapiens
catatacaccatggaatactatgcagccatgaaaaatgaatgagagcatgtcctttgcagggacatggatgaaactggaagccatcatcctcggcaaactaacacaagaacagaaaaccagacactgcatgttctcattcagtgggagttgaacattgagaacacatggacacagagaggggaacaacatacaccacggtctattggaggatagggatgaggggagggaacttagaggatgggtcaataggtgcagcaaaccactatggcacacrtatacctatgcaacaaacctgcacatcctgtacatgtatcctttttttagaagcagcaataaaaaaaatgatcacttcatttcaggaggtagacttttcctcttaaagcttttcagatttttatcccaagggtttggctttttatgcatctcaatacgtgtaatttgcagttaatacatcaatgccttctgctcttgttacttctctccttaaaacagtacatctttttgattaactaaagtggtgactctctctctcattttttttttttttttgtcagttcctattgcattttttcccacttcgcactctggtattataacctgacaccgagaacgtttgtctcaagaaaaaaactggaaaaacaat

SEQ ID NO: 803092 - DNA, 552 bp, Homo sapiens
caaaatcttctctagtgtccgtgtgctttctttcaaaacaatatatagcatttcccttgctagtaaacccccaatcttctctttgtccttcacacatatagaagaccaccgtggttttcagttttgttcagaactacaattctgtgattcccaaataaattgtataatttagagatccatctttattttgacttcaatagtggtgataaattctgatacaatattcaagaatatgttttataacaatactaagtcaatttagaaatgcattttagtgtgatataaaatccttaacttttctcctmcactgacattatgtatgattttgttattattttacaagcacttaaaaattctctattttacataaggtttatattagatataattttgtgaggaaaataaaagttcggttttctatttgcattgtgctaattcagactgcacttggttcttcatgcacactgtataagctaaagtttagacaaattattgtaaaaactgatacacatatagaccattatagtgttatttttaaaagcacaagaaact

SEQ ID NO: 803093 - DNA, 611 bp, Homo sapiens
ttaactacaattatatacaggtgccaatttcctctggagtaaactaccacactgggcctcatgtaccagttagataatccaagtcagcctttattgcataacctatctaaaagattggactctacattttggctctgcagaactgagagaagaaatgtataaataggatagtgatattgcctttgtctatgggaattcttgagtctaataaaaactctgggaaaaatctaacttcatgattacactcgggcacatagatgattaatacgaatgaagtaacaaccataaatacaatcataaccacaagaacaacagtaattcaaattttctcacttcatagatgttcttacaatgctttattggtatctygtaggtgctctccccaagcctcaggtgttattccacgatctcagttgatgcaaaggcaaacacaccacactctcctctgttcaatgtctgccatccttgtctttttggcctctgactcttccctatactactgtctatgcacttgagatcttcactgatatagcttggctctgtatttattgataagaatatctcttttctcttagactaggcatggccaaaaggttaatctggattcaaag

SEQ ID NO: 803094 - DNA, 611 bp, Homo sapiens
ttaactacaattatatacaggtgccaatttcctctggagtaaactaccacactgggcctcatgtaccagttagataatccaagtcagcctttattgcataacctatctaaaagattggactctacattttggctctgcagaactgagagaagaaatgtataaataggatagtgatattgcctttgtctatgggaattcttgagtctaataaaaactctgggaaaaatctaacttcatgattacactcgggcacatagatgattaatacgaatgaagtaacaaccataaatacaatcataaccacaagaacaacagtaattcaaattttctcacttcatagatgttcttacaatgctttattggtatcttgtaggtgctctccccaagcctcaggtgttattccacratctcagttgatgcaaaggcaaacacaccacactctcctctgttcaatgtctgccatccttgtctttttggcctctgactcttccctatactactgtctatgcacttgagatcttcactgatatagcttggctctgtatttattgataagaatatctcttttctcttagactaggcatggccaaaaggttaatctggattcaaag

SEQ ID NO: 803095 - DNA, 647 bp, Homo sapiens
aatattttccctgtaatcacaatgttttcttttcactttgcccaagaactgagttatgagttccaaatttggataaactctacattggctaagttttagtcatttgcattgctaagaaagatggcaattcaacatgctgaagatgacttcctcccttataaaggggctaacacagagggcaatactgttcatgcytctgagtcttgatcacaagaattgctttaggcaattacaatcatgtctcctctgacacatcatattattcaagtgagacagagaaagaatatgtcctatgtcacacagctgggtggtgacagctgctttagcatcagcacactgcgttccctctgatttcttcattcatctctaagtagcagtaaatccggtcctgaatactgactttgacactcagctttctccacatccttcctgtcactgcctttgagactacttcagattcttcccttagcttctatttctccatttgtaaaatgggttgatgagggtatcttcatcagtagctgtgacaataaaaatgggatcatcatgcatcctccttagccccatgagtaagctcccagtaagtgaggttgtcatcattactggatatttaagattatctacctatttgaaaaaccctagtgaca

SEQ ID NO: 803096 - DNA, 647 bp, Homo sapiens
aatattttccctgtaatcacaatgttttcttttcactttgcccaagaactgagttatgagttccaaatttggataaactctacattggctaagttttagtcatttgcattgctaagaaagatggcaattcaacatgctgaagatgacttcctcccttataaaggggctaacacagagggcaatactgttcatgcctctgagtcttgatcacaagaattgctttaggcaattacaatcatgtctcctctgacayatcatattattcaagtgagacagagaaagaatatgtcctatgtcacacagctgggtggtgacagctgctttagcatcagcacactgcgttccctctgatttcttcattcatctctaagtagcagtaaatccggtcctgaatactgactttgacactcagctttctccacatccttcctgtcactgcctttgagactacttcagattcttcccttagcttctatttctccatttgtaaaatgggttgatgagggtatcttcatcagtagctgtgacaataaaaatgggatcatcatgcatcctccttagccccatgagtaagctcccagtaagtgaggttgtcatcattactggatatttaagattatctacctatttgaaaaaccctagtgaca

SEQ ID NO: 803097 - DNA, 621 bp, Homo sapiens
atactgtcctaagtggtctctgccactacccctgtacccctagtcggacctccatgtagcagccagagtgattcttgtaaaatgtaactcagagtatattacaggaactttcccattcagaacccttcaatggaatctcttctcatttagaggcaaagccatggtctgcaaggccttgcactctctgcatcctcactctctctgcccaccactctgacttcatctcttaccgccctccctctcagtgcttctggtgcagccatactggcctccttgctgtccttgaatatgattaaagaacttcagcacttactgtttcttcaacttggaatatttcatccrcaagtctctctgatttgccctctcacttctttcaggtctctactaagatgacaccttatcagagagagtttctttggccatcacatatcaaatagcagccttcccacaatactatttacttctttaatctgttttatttttctgcaatcactcaaccatatctaatgcatatttctcctttctaagatttaagtaccataacaaaattttgtctgttttgtttgaacctatacagtaccttgaaaagtggctgacaggtaatcagtgcctaataaacat

SEQ ID NO: 803098 - DNA, 621 bp, Homo sapiens
atactgtcctaagtggtctctgccactacccctgtacccctagtcggacctccatgtagcagccagagtgattcttgtaaaatgtaactcagagtatattacaggaactttcccattcagaacccttcaatggaatctcttctcatttagaggcaaagccatggtctgcaaggccttgcactctctgcatcctcactctctctgcccaccactctgacttcatctcttaccgccctccctctcagtgcttctggtgcagccatactggcctccttgctgtccttgaatatgattaaagaacttcagcacttactgtttcttcaacttggaatatttcatccacaagtctctctgatttgccctctcacttctttcaggtctctactaagatgacaccttatcagagagastttctttggccatcacatatcaaatagcagccttcccacaatactatttacttctttaatctgttttatttttctgcaatcactcaaccatatctaatgcatatttctcctttctaagatttaagtaccataacaaaattttgtctgttttgtttgaacctatacagtaccttgaaaagtggctgacaggtaatcagtgcctaataaacat

SEQ ID NO: 803099 - DNA, 589 bp, Homo sapiens
tatattgtctttagagaactggcaatctggtgggagatgtggacaattcgtgattacaatattttgcctgagtattctgctagaggccagtacaatatgcactggaggaatacaaaagaagcatctagttctgtctgggtgccaggaaggggaggggtggggctgggttaggaaaggctttctgagaaagctgtccaaatggtaatagcaagcatttactaaagtgttcactgttctaaccactgtactaagcactttatctcactacattctcccaagagctccctagaatagaataattattattctcattgacagataaaaaaattgatytacagggagaaactgagagactttttcaaactgatacaactaataagtagtggagtctagtaaatggtgggacacataccagcatgtaacatctatgtgagcatggatttctgtttagtgatatatcctcagcaccaagaataatgcctatttaatgaatacaggagtgagtgaatgagctatgatgtgaatccaagtctattagatctcaaagcccaagacttttaacaatcaagctactgtctgtctgatgtga

SEQ ID NO: 803100 - DNA, 590 bp, Homo sapiens
aatggtgggacacataccagcatgtaacatctatgtgagcatggatttctgtttagtgatatatcctcagcaccaagaataatgcctatttaatgaatacaggagtgagtgaatgagctatgatgtgaatccaagtctattagatctcaaagcccaagacttttaacaatcaagctactgtctgtctgatgtgagggacaagtagaaactcatgcacatgtagaaaatgtaatttggcaattgaaaactgcactctacatcctcacaggtcaaagaacaaatttgaatgaaaaatgtttaaggattagagagtaatgataacataaacattatacaacaaaatgtgtgggatacagccaaagtggcatttgagggaaatatccagccataaatgatgtattagacaagccaaatattcgtgggctatatttctaagttaaagagaagaaaaayataatcaaaggaaacaggaggaaggggaaaaaagagataaggcaatacatctatgcaatagaaaacaaagcagcataataaagagtcaataggctgggcatggtggctcatgcctgtattcccagcacttttggagg

SEQ ID NO: 803101 - DNA, 556 bp, Homo sapiens
ttcagttcatgtgccacatatacaccatggaatactatgcagccataaaaaatgagttcatgtcctttgtagggacatggatgaagctggaaaccatcattctcagcaaactatcgcaaggacaaaaaaccaaacactgcatgttctcrctcataggtgggaattgaacaatgagaacacatggacacaggaaggggaacatcacacgccagggcctgttgtggggtgggggcaggggggagggatagcattaggagatatacctaatgctaaatgacaagttaatgggtgcagcaccccaacatggcagatgtatacatatgtaacacacccgcattttgtgcacacataccctaaatcaaagtataataaaaaaaaggtaggtatcaaaaacataacaattcaaactctcttttaattaaagttggttcttgtattggtagtaagtagggagcttggctggagagatgtgtacaagtgtagatggaagtccccgggtaaagctcttgtttgggaagattcatttgattgtatgacatgttcctccattctctct

SEQ ID NO: 803102 - DNA, 593 bp, Homo sapiens
catttcccccaaggaaaccattaaccagcacaattatttttaaatatcaacctgaaataacactgtatttttattgctattctttctctctccttctctctctttgggatacagtttggctttgaaaaaatatggtatatatgcagtgtttggtcaaataatttagcactatggaaaaggttgtgaaccagtcatagtatttgaggttgtaagaagaaacctttgcaaaggtagtggctgcacaaatgtattaacttagtaatacaaagtagggagttctgaaactgtggtggaaatattgcctgccttgactacctgttcttyttgagtccgtttgctgatcagaactcaggtaacttaaaagtcatacaccctggaaaggagtaaagaaagaggaaagatcctcagcggctatacaagtgagagatatggcagagttctaataagattgagtaaaagcttgatactgtcttacatgaaaggagcaaataattgttctacctggaatgtccgggccccaattcacaaatgcattcttaccttttgaactgaataatgatctctttcccgataaactgttctaagacaaaaaa

SEQ ID NO: 803103 - DNA, 620 bp, Homo sapiens
tagctaaggctagcaccgtttcaaagcattttgctgcaaaactgtttctcttcatcgtctcattaatagacagctacaaagaatcaaagagagcaacattctactcacaccttgatccctttatttgaccaattactcaagggaatcgacgattttttttttggctccacagggcacggataaacaacttcatcgatgtgcttcaggttaccatttgaaaagrcagtagagatatgtataaaggcttccagctttggcatctgactagccgtaagagcttctgggtggcagtgatgttaagttgcacagcatgtctacagaagattaagcagaaggaaatacagtgagataagtcagcatcatgccttgctataactgcacctactcccataactggcatacctatcagattttggtgactgcaccaaaacaccaggaagaaaaggatggggcacggctgcacagttatgtgatacttggaatgtcttatgtattgatgatgtgtttgtgtacataaaccctattcactgatgcactgtatggcatatttagaggtcacttggctctaatcaactggaaaaagaatcacaatcctctgaatttacaaaggtgcttctata

SEQ ID NO: 803104 - DNA, 611 bp, Homo sapiens
cttcatgttatgttcacattcttttagcagcaaatgacaatgaactgccattgattttattttattttttgaacttaagtagtgtatccacaagtacaccattgccctgtccaatctttaggggagatattctattatctaaaactcggtaaattgacctatcatgttgttggtgatatcttatttaggtaaaaatattaggtatttagaayaatgcatttctgaatattttgactgatattattatagatggatttagaatctgccctttaggggtccagaaggaggtaatgtttggatatcattaggctagaatattttattgtcctacaaaaatgttgataaattgcttataagggcttatgtattagtaatgaccatgtcaccaaaataataaacccaaatatgataagaatcacaatcagaaaatatattttttcttcttttatttacaaccaaccaaacaaaataacatagctataattttgtcaatctcagaacaataaatttaagtaaaatagaacataaagaatttttatcacagatgaatcagatggaaactatccagaaaacacccaaatatgtgtattcctcagttaatactcagtcta

SEQ ID NO: 803105 - DNA, 611 bp, Homo sapiens
cttcatgttatgttcacattcttttagcagcaaatgacaatgaactgccattgattttattttattttttgaacttaagtagtgtatccacaagtacaccattgccctgtccaatctttaggggagatattctattatctaaaactcggtaaattgacctatcatgttgttggtgatatcttatttaggtaaaaatattaggtatttagaacaatgcatttctgaatattttgactgatattattatagatggatttagaatctgccctttaggggtscagaaggaggtaatgtttggatatcattaggctagaatattttattgtcctacaaaaatgttgataaattgcttataagggcttatgtattagtaatgaccatgtcaccaaaataataaacccaaatatgataagaatcacaatcagaaaatatattttttcttcttttatttacaaccaaccaaacaaaataacatagctataattttgtcaatctcagaacaataaatttaagtaaaatagaacataaagaatttttatcacagatgaatcagatggaaactatccagaaaacacccaaatatgtgtattcctcagttaatactcagtcta

SEQ ID NO: 803106 - DNA, 624 bp, Homo sapiens
tattatctaaaactcggtaaattgacctatcatgttgttggtgatatcttatttaggtaaaaatattaggtatttagaacaatgcatttctgaatattttgactgatattattatagatggatttagaatctgccctttaggggtccagaaggaggtaatgtttggatatcattaggctagaatattttattgtcctacaaaaatgttgataaattgcttataagggcttatgtattagtaatgaccatgtcaccaaaataataaacccaaatatgataagaatcacaatcagaaaatataktttttcttcttttatttacaaccaaccaaacaaaataacatagctataattttgtcaatctcagaacaataaatttaagtaaaatagaacataaagaatttttatcacagatgaatcagatggaaactatccagaaaacacccaaatatgtgtattcctcagttaatactcagtctaggtgccaaagggaaaccacacgcttccatttatctatatgatttggcaactttaatttgtaaggggtccaacaggtgtttaatttcataggctgatatagtcaatatcactaggtccatattttttagatttaaataactatata

SEQ ID NO: 803107 - DNA, 630 bp, Homo sapiens
caaaagaaatgcacatattttaaaataaattggtagcaatcacgttaaagccattatctctgaatttctattgctgctgttgttagcttaagtgattatctaatgttactcaccaatattgatttttaatattaatattgtaaagctgcaatgttttctgtagaaagcaaaggctttaagcttctgattaatcttttaccttaatttcataaactgatatagtgattattatattgataaaatcaatataatattgatttagtcattatgtacaaaagtttgcaaagatctagacattaaastttacttttgaaggtatttcataaaattttgagattgattttccttatatgctttttttaaaattgaaaatttttaccagatgacagaaatcaaacacttattttgttataggtaaacttccttcttcctacattcttataaaaatatattagggatttgagttacctggaaaaaacttttcttttcctcagaaatatggagggatgtgagtcctagatgtcaagaggacattttgagcagaaacacaaattttcaaaagtttttcttccaacttgctctctacaccagtgctctgggaagtcttttggtatgactagttagaagtta

SEQ ID NO: 803108 - DNA, 630 bp, Homo sapiens
caaaagaaatgcacatattttaaaataaattggtagcaatcacgttaaagccattatctctgaatttctattgctgctgttgttagcttaagtgattatctaatgttactcaccaatattgatttttaatattaatattgtaaagctgcaatgttttctgtagaaagcaaaggctttaagcttctgattaatcttttaccttaatttcataaactgatatagtgattattatattgataaaatcaatataatattgatttagtcattatgtacaaaagtttgcaaagatctagacattaaactttacttttgaaggtatttcataaaattttgagattgatkttccttatatgctttttttaaaattgaaaatttttaccagatgacagaaatcaaacacttattttgttataggtaaacttccttcttcctacattcttataaaaatatattagggatttgagttacctggaaaaaacttttcttttcctcagaaatatggagggatgtgagtcctagatgtcaagaggacattttgagcagaaacacaaattttcaaaagtttttcttccaacttgctctctacaccagtgctctgggaagtcttttggtatgactagttagaagtta

SEQ ID NO: 803109 - DNA, 646 bp, Homo sapiens
ctttaagcttctgattaatcttttaccttaatttcataaactgatatagtgattattatattgataaaatcaatataatattgatttagtcattatgtacaaaagtttgcaaagatctagacattaaactttacttttgaaggtatttcataaaattttgagattgattttccttatatgctttttttaaaattgaaaatttttaccagatgacagaaatcaaacacttattttgttataggtaaacttccttcttcctacattcttataaaaatatattagggatttgagttacctggaaaaaacttttcttttcctcagaaatatggagggatgtgagtcctagatrtcaagaggacattttgagcagaaacacaaattttcaaaagtttttcttccaacttgctctctacaccagtgctctgggaagtcttttggtatgactagttagaagttatgtttgtgcttcttttagtaatatatgtctctttaataggcttccaaccagaatcattaataaaccaacattaagaaattatggaatgaaaagggattgacacaggagtgtcatgattctcagcagtgctcaaaaggtgaagccatcatcgttttgacaggaaccaaatctctaaatgatttattttat

SEQ ID NO: 803110 - DNA, 600 bp, Homo sapiens
cttttagtaatatatgtctctttaataggcttccaaccagaatcattaataaaccaacattaagaaattatggaatgaaaagggattgacacaggagtgtcatgattctcagcagtgctcaaaaggtgaagccatcatcgttttgacaggaaccaaatctctaaatgatttattttataaatcatattatgtcttcagctagacagagttttattgtggccggccccaaaattaaaaatgcactttatgaaactcacattctcctgggatgtagcctctatagcattaggaaagttatcttccaagatgaatctktaaaaagttaatgattacatattctctgaagaatcagtaaagagtaatgacaactattctaaggcatcattatttacaaagagcttgcccaccagatggattccagaaaatcttctggaagacacagtctgaggagaaataagatacaaaatgttaccaaaagttttgacataatgtttaggaacatttcaagtgttactgtgcatatattggaggatatacagcccagtgaggaaaatactgaggttccaacattgtcacacattgaacaaaaacttacagaat

SEQ ID NO: 803111 - DNA, 600 bp, Homo sapiens
cttttagtaatatatgtctctttaataggcttccaaccagaatcattaataaaccaacattaagaaattatggaatgaaaagggattgacacaggagtgtcatgattctcagcagtgctcaaaaggtgaagccatcatcgttttgacaggaaccaaatctctaaatgatttattttataaatcatattatgtcttcagctagacagagttttattgtggccggccccaaaattaaaaatgcactttatgaaactcacattctcctgggatgtagcctctatagcattaggaaagttatcttccaagatgaatctttaaaaagttaatgattacatattctctgaagaatcagtaaagagtaatgacaactattctaaggcatcattatttacaaagagcttgcccaccagayggattccagaaaatcttctggaagacacagtctgaggagaaataagatacaaaatgttaccaaaagttttgacataatgtttaggaacatttcaagtgttactgtgcatatattggaggatatacagcccagtgaggaaaatactgaggttccaacattgtcacacattgaacaaaaacttacagaat

SEQ ID NO: 803112 - DNA, 600 bp, Homo sapiens
cttttagtaatatatgtctctttaataggcttccaaccagaatcattaataaaccaacattaagaaattatggaatgaaaagggattgacacaggagtgtcatgattctcagcagtgctcaaaaggtgaagccatcatcgttttgacaggaaccaaatctctaaatgatttattttataaatcatattatgtcttcagctagacagagttttattgtggccggccccaaaattaaaaatgcactttatgaaactcacattctcctgggatgtagcctctatagcattaggaaagttatcttccaagatgaatctttaaaaagttaatgattacatattctctgaagaatcagtaaagagtaatgacaactattctaaggcatcattatttacaaagagcttgcccaccagatggattccagaaaatcttctggaagacamagtctgaggagaaataagatacaaaatgttaccaaaagttttgacataatgtttaggaacatttcaagtgttactgtgcatatattggaggatatacagcccagtgaggaaaatactgaggttccaacattgtcacacattgaacaaaaacttacagaat

SEQ ID NO: 803113 - DNA, 654 bp, Homo sapiens
cgcttggatccaggaggcagaggttgcagtgagccgagactgcaccattgcactccagcctgggcaacaagagcaaaactccgtctcaaaataaataaataaacaaataaataaaaataaaagaaaaaagaatatgtctttaaaattcaagaggttcaagaaaaacagaagtttgaatttgttgaactgcttttgtcatttcttcaggatttatttacttttttaccccgagggatatgaacttgcccaggaatttgcaccraataagcaacagctgcagttcgacttgcagaatacaaggaataattttgaaagtacttgacaagaggtagaggggttgatgcaaagggtgaaatctgcaaggctatctgcatgtccaggagaaatgaccacttggttttacatggattaaacagccttgttactagctcaccggaaatgttcaaaatcttgtatccgacgaaagacagattcaattgacaaacaattctgcttcgacatacaagtagttgaaagccatgggatcatcacattacaggccttctcagaagctaataggaaactctggcttgaagccacggatgggaaggaactgatttatactctgcctgacattataagcaagaaagaagaaatgtatttgaatgaagcagg

SEQ ID NO: 803114 - DNA, 654 bp, Homo sapiens
cgcttggatccaggaggcagaggttgcagtgagccgagactgcaccattgcactccagcctgggcaacaagagcaaaactccgtctcaaaataaataaataaacaaataaataaaaataaaagaaaaaagaatatgtctttaaaattcaagaggttcaagaaaaacagaagtttgaatttgttgaactgcttttgtcatttcttcaggatttatttacttttttaccccgagggatatgaacttgcccaggaatttgcaccaaataagcaacagctgcagttcgacttgcagaatacaaggaataattttgaaagtacttgacaagaggtagaggggttgatgcaaagggtgaaatctgcaaggctatctgcatgtccaggagaaatgaccacttggttttacatggattaaacagccttgttactagctcaccggaaatgttcaaaatcttgtatccracgaaagacagattcaattgacaaacaattctgcttcgacatacaagtagttgaaagccatgggatcatcacattacaggccttctcagaagctaataggaaactctggcttgaagccacggatgggaaggaactgatttatactctgcctgacattataagcaagaaagaagaaatgtatttgaatgaagcagg

SEQ ID NO: 803115 - DNA, 654 bp, Homo sapiens
cgcttggatccaggaggcagaggttgcagtgagccgagactgcaccattgcactccagcctgggcaacaagagcaaaactccgtctcaaaataaataaataaacaaataaataaaaataaaagaaaaaagaatatgtctttaaaattcaagaggttcaagaaaaacagaagtttgaatttgttgaactgcttttgtcatttcttcaggatttatttacttttttaccccgagggatatgaacttgcccaggaatttgcaccaaataagcaacagctgcagttcgacttgcagaatacaaggaataattttgaaagtacttgacaagaggtagaggggttgatgcaaagggtgaaatctgcaaggctatctgcatgtccaggagaaatgaccacttggttttacatggattaaacagccttgttactagctcaccggaaatgttcaaaatcttgtatccgacraaagacagattcaattgacaaacaattctgcttcgacatacaagtagttgaaagccatgggatcatcacattacaggccttctcagaagctaataggaaactctggcttgaagccacggatgggaaggaactgatttatactctgcctgacattataagcaagaaagaagaaatgtatttgaatgaagcagg

SEQ ID NO: 803116 - DNA, 589 bp, Homo sapiens
tgaaagccatgggatcatcacattacaggccttctcagaagctaataggaaactctggcttgaagccacggatgggaaggaactgatttatactctgcctgacattataagcaagaaagaagaaatgtatttgaaygaagcagggttcaattttgtgagaaactgcattcaagctgtggaaaccagtggtatcaccattttaggcctctactgaataggaggagtgaactccaaagttcaaaaactcatgaatatcatattttgtcctaaatcccctcctgatattgatattgaactgtgggacaataagacaataatgagtgggctgaaaaactacctcaggtgctttgcagcaccactgataacttacaagttacacaaagatttgtatcattgctgttaaatctgatgaccaaaactacagggtggaggctgtacatgcattggtgtgcacattgccagagaaaaacagagagatgctggacatcttaataaaacatctggtcaaagtatcactgcacagccaacaaaatctcatgactgtctaaaatcttggtgtcatatttggcccaactctaatgagagcaca

SEQ ID NO: 803117 - DNA, 600 bp, Homo sapiens
aagcaagaaagaagaaatgtatttgaatgaagcagggttcaattttgtgagaaactgcattcaagctgtggaaaccagtggtatcaccattttaggcctctactgaataggaggagtgaactccaaagttcaaaaactcatgaatatcatattttgtcctaaatcccctcctgatattgatattgaactgtgggacaataagacaataatgagtgggctgaaaaactacctcaggtgctttgcagcaccwctgataacttacaagttacacaaagatttgtatcattgctgttaaatctgatgaccaaaactacagggtggaggctgtacatgcattggtgtgcacattgccagagaaaaacagagagatgctggacatcttaataaaacatctggtcaaagtatcactgcacagccaacaaaatctcatgactgtctaaaatcttggtgtcatatttggcccaactctaatgagagcacaagaataaactgtggctgctatggtgaatattaaatttcagaatattgtgtagaaattctgatagagcacagtgaaacgatttttcatactgctccagacccaagcattcctcttcctca

SEQ ID NO: 803118 - DNA, 637 bp, Homo sapiens
caaaagaaatgcacatattttaaaataaattggtagcaatcacgttaaagccattatctctgaatttctattgctgctgttgttagcttaagtgattatctaatgttactcaccaatattgatttttaatattaatattgtaaagctgcaatgttttctgtagaaagcaaaggctttaagcttctgattaatcttttaccttaatttcataaactgatatagtgattattatattgataaaatcaatataatattgatttagtcattatgtacaaaagtttgcaaagatctagacattaaastttacttttgaaggtatttcataaaattttgagattgattttccttatatgctttttttaaaattgaaaatttttaccagatgacagaaatcaaacacttattttgttataggtaaacttccttcttcctacattcttataaaaatatattagggatttgagttacctggaaaaaacttttcttttcctcagaaatatggagggatgtgagtcctagatgtcaagaggacattttgagcagaaacacaaattttcaaaagtttttcttccaacttgctctctacaccagtgctctgggaagtcttttggtatgactagttagaagttatgtttgt

SEQ ID NO: 803119 - DNA, 637 bp, Homo sapiens
caaaagaaatgcacatattttaaaataaattggtagcaatcacgttaaagccattatctctgaatttctattgctgctgttgttagcttaagtgattatctaatgttactcaccaatattgatttttaatattaatattgtaaagctgcaatgttttctgtagaaagcaaaggctttaagcttctgattaatcttttaccttaatttcataaactgatatagtgattattatattgataaaatcaatataatattgatttagtcattatgtacaaaagtttgcaaagatctagacattaaactttacttttgaaggtatttcataaaattttgagattgatkttccttatatgctttttttaaaattgaaaatttttaccagatgacagaaatcaaacacttattttgttataggtaaacttccttcttcctacattcttataaaaatatattagggatttgagttacctggaaaaaacttttcttttcctcagaaatatggagggatgtgagtcctagatgtcaagaggacattttgagcagaaacacaaattttcaaaagtttttcttccaacttgctctctacaccagtgctctgggaagtcttttggtatgactagttagaagttatgtttgt

SEQ ID NO: 803120 - DNA, 639 bp, Homo sapiens
cttctgattaatcttttaccttaatttcataaactgatatagtgattattatattgataaaatcaatataatattgatttagtcattatgtacaaaagtttgcaaagatctagacattaaactttacttttgaaggtatttcataaaattttgagattgattttccttatatgctttttttaaaattgaaaatttttaccagatgacagaaatcaaacacttattttgttataggtaaacttccttcttcctacattcttataaaaatatattagggatttgagttacctggaaaaaacttttcttttcctcagaaatatggagggatgtgagtcctagatrtcaagaggacattttgagcagaaacacaaattttcaaaagtttttcttccaacttgctctctacaccagtgctctgggaagtcttttggtatgactagttagaagttatgtttgtgcttcttttagtaatatatgtctctttaataggcttccaaccagaatcattaataaaccaacattaagaaattatggaatgaaaagggattgacacaggagtgtcatgattctcagcagtgctcaaaaggtgaagccatcatcgttttgacaggaaccaaatctctaaatgatttattttat

SEQ ID NO: 803121 - DNA, 605 bp, Homo sapiens
tgcttcttttagtaatatatgtctctttaataggcttccaaccagaatcattaataaaccaacattaagaaattatggaatgaaaagggattgacacaggagtgtcatgattctcagcagtgctcaaaaggtgaagccatcatcgttttgacaggaaccaaatctctaaatgatttattttataaatcatattatgtcttcagctagacagagttttattgtggccggccccaaaattaaaaatgcactttatgaaactcacattctcctgggatgtagcctctatagcattaggaaagttatcttccaagatgaatctktaaaaagttaatgattacatattctctgaagaatcagtaaagagtaatgacaactattctaaggcatcattatttacaaagagcttgcccaccagatggattccagaaaatcttctggaagacacagtctgaggagaaataagatacaaaatgttaccaaaagttttgacataatgtttaggaacatttcaagtgttactgtgcatatattggaggatatacagcccagtgaggaaaatactgaggttccaacattgtcacacattgaacaaaaacttacagaat

SEQ ID NO: 803122 - DNA, 605 bp, Homo sapiens
tgcttcttttagtaatatatgtctctttaataggcttccaaccagaatcattaataaaccaacattaagaaattatggaatgaaaagggattgacacaggagtgtcatgattctcagcagtgctcaaaaggtgaagccatcatcgttttgacaggaaccaaatctctaaatgatttattttataaatcatattatgtcttcagctagacagagttttattgtggccggccccaaaattaaaaatgcactttatgaaactcacattctcctgggatgtagcctctatagcattaggaaagttatcttccaagatgaatctttaaaaagttaatgattacatattctctgaagaatcagtaaagagtaatgacaactattctaaggcatcattatttacaaagagcttgcccaccagayggattccagaaaatcttctggaagacacagtctgaggagaaataagatacaaaatgttaccaaaagttttgacataatgtttaggaacatttcaagtgttactgtgcatatattggaggatatacagcccagtgaggaaaatactgaggttccaacattgtcacacattgaacaaaaacttacagaat

SEQ ID NO: 803123 - DNA, 605 bp, Homo sapiens
tgcttcttttagtaatatatgtctctttaataggcttccaaccagaatcattaataaaccaacattaagaaattatggaatgaaaagggattgacacaggagtgtcatgattctcagcagtgctcaaaaggtgaagccatcatcgttttgacaggaaccaaatctctaaatgatttattttataaatcatattatgtcttcagctagacagagttttattgtggccggccccaaaattaaaaatgcactttatgaaactcacattctcctgggatgtagcctctatagcattaggaaagttatcttccaagatgaatctttaaaaagttaatgattacatattctctgaagaatcagtaaagagtaatgacaactattctaaggcatcattatttacaaagagcttgcccaccagatggattccagaaaatcttctggaagacamagtctgaggagaaataagatacaaaatgttaccaaaagttttgacataatgtttaggaacatttcaagtgttactgtgcatatattggaggatatacagcccagtgaggaaaatactgaggttccaacattgtcacacattgaacaaaaacttacagaat

SEQ ID NO: 803124 - DNA, 603 bp, Homo sapiens
ctgatggtagtttgtatttctgtgggatccatggtgatatcccctttatcattttttattgcgtctatttgattcttctctcttttcttctttattagtcttgctagcggtctatcaattttgttgatcctttcaaaaaaccaactcctggattcattgattttttgaagagtttttcgtgtctctatctccttcaattctgctctgatcttagttctttcttgccttctgctagcttttgaatgtcattgctcttgcttctctagttcttttaattgtgatgttagggtgtcaattttagatctttcctgctttctcttgtgggcacttagtgatataaatttccctccacatactgctttaaatgtgtcycagagattctggtatgttgtgtctttgttctcattggtttcaaagaacatctttatctctgccttcatttcgttatgtacccagtagtcattgaggagcaggttgttcagtttccatgtagttgagcagttttgagtgagtttcttaatcctgagttctaatttgattgcactgtggtctgagagacagtttgttataatttctgttcttttacatttgctgagaagtgct

SEQ ID NO: 803125 - DNA, 602 bp, Homo sapiens
aatgtagatttggtcttttcacatagtcccatatttcttggaggctttgttcatttctttttattcttttttctctaaacttctcttctctcttcatttcattcatttgatcttccatcacttataaactttcttccagttgatcgaatcagctactgaagcttgtgcattcatcatgtagttctcatgccatggttttcatctccatgaggtcatttaagggcttctctacactggtyattctagttagccatttgtctaatcttttttcaaggttttaacttctttgcattgggttcaaactttctcctttagcttggagaagattgattatctgaagccttcttctctcaactcgtcaaagtccatccagctttgttccattgctggtgaggggatgcattgctttggatgggagaggtcctctgatttttagaattttcagcttttctgctcttttttttccccatctttgtggttttatctacctttggtctttgatgatggtgaccgacagatggggtttcggtgtggatgtcctttctgttttttagttttccttctaatagtcaggatcctcagctgcaggtctgttggagttt

SEQ ID NO: 803126 - DNA, 602 bp, Homo sapiens
aatgtagatttggtcttttcacatagtcccatatttcttggaggctttgttcatttctttttattcttttttctctaaacttctcttctctcttcatttcattcatttgatcttccatcacttataaactttcttccagttgatcgaatcagctactgaagcttgtgcattcatcatgtagttctcatgccatggttttcatctccatgaggtcatttaagggcttctctacactggttattctagttagccatttgtctaatcttttttcaaggttttaacttctttgcattgggttcaaactttctcctttagcttggagaagattgattatctgaagccttcttctctcaactcgtcaaagtccatccagctttgttccattgctggtgaggggmtgcattgctttggatgggagaggtcctctgatttttagaattttcagcttttctgctcttttttttccccatctttgtggttttatctacctttggtctttgatgatggtgaccgacagatggggtttcggtgtggatgtcctttctgttttttagttttccttctaatagtcaggatcctcagctgcaggtctgttggagttt

SEQ ID NO: 803127 - DNA, 602 bp, Homo sapiens
aatgtagatttggtcttttcacatagtcccatatttcttggaggctttgttcatttctttttattcttttttctctaaacttctcttctctcttcatttcattcatttgatcttccatcacttataaactttcttccagttgatcgaatcagctactgaagcttgtgcattcatcatgtagttctcatgccatggttttcatctccatgaggtcatttaagggcttctctacactggttattctagttagccatttgtctaatcttttttcaaggttttaacttctttgcattgggttcaaactttctcctttagcttggagaagattgattatctgaagccttcttctctcaactcgtcaaagtccatccagctttgttccattgctggtgaggggatgcattgctttggatgggagaggtcctctgatttttagaattttcagcttttctgctctkttttttccccatctttgtggttttatctacctttggtctttgatgatggtgaccgacagatggggtttcggtgtggatgtcctttctgttttttagttttccttctaatagtcaggatcctcagctgcaggtctgttggagttt

SEQ ID NO: 803128 - DNA, 543 bp, Homo sapiens
ataatcctgagctcactcattgtcaggtaagacaaagtattttagcgcaatagcaaacaattaattaaacaaacaaaaacaggaagcctttcttgggccaggaagccattaattagctaagctcagagccactcattgaaactaggtsctgactgggtttctggatttgaccactgggcagaaactaggacccgaaaccaattagaatgaaatggtccccagatattgttttcatgtaaggataggtttggaagtatccagacttagtggtgggccaggcctcccctgtgagcagtacagttcaggacacctggactgccctttccctctgccttccctagggtaatgtgaatggcttagtctttcgtgttcccatctgtaacatggaggaggaagagaagagcctcattgcacatattgggtcattaagattgatcttagaaccataatttacaatattttgaagttaggtttgatttttaccattccactactcctctctcccaatatgttgtgccaaattgtaagtaatttgcaattaga

SEQ ID NO: 803129 - DNA, 497 bp, Homo sapiens
tgaatatttaagtttatctataaacttgtagaggaacatacacacatttttaaaaatcctttccatatagctattcttttccttcatatatttgccaaagttgaccaaactagcaaacaaacatctttaacaaattttacactaaaaaggttaacaggttctatattgtgataaaaatggatcaaactagaaattarcatctgcaaatataaaatacgtacatctgtaaatataaaaaaataaaaaaatgaaacccagactacctcccaaatttaaataagtcaggatattgaagttattaaaatgtattatagacaatcaagaaattaatataaatgccaatatgacatacatgatgtccatggaaggtgaaagaaatttaaaagaaagccacacattcttacatgcatttgtaattaaacaagtgtgaaagctaagtattccactaaatgaaagcaaagacagatataaagaaaagagttagaccaggtacagtg

SEQ ID NO: 803130 - DNA, 625 bp, Homo sapiens
gtgagggaaaaacattgcgaccctcctagcagtgttctggaatcctacgtgagggacaaaaactcaggacccagcagcagtgttccggactcctatgtgagggataaacactcagaaaccagcagcagtgctcaggaatcctttgtgaggaacaaacatacagaactgagcagcagtgttttggaatcctacgtgagggacaaacattcagtacatcttaagagtattctgaaatcgtatgtgagggacaaacactcgyaacccagcaacagttttctggaatcctatgtgagtgacatacactcagaccccagcagctctgttctagaatcctatgtgaggaacaaacactcagaacccagcagtagtgttctagaatactttgtgagggacaaatgctcagaacccagcagcagtgttctagaatcctttgtgagggacaaacgctcagaacccagcagcagtgttctagaatcctttgtgagagacaaacacacagaagccatcagcagtgttctagaatcctttgtgagggacaaacactctgaacccagcagcagtgttttggaatctcatgtgagggacaaacactcagaacccagcagcagagttctggaatcttatg

SEQ ID NO: 803131 - DNA, 625 bp, Homo sapiens
gtgagggaaaaacattgcgaccctcctagcagtgttctggaatcctacgtgagggacaaaaactcaggacccagcagcagtgttccggactcctatgtgagggataaacactcagaaaccagcagcagtgctcaggaatcctttgtgaggaacaaacatacagaactgagcagcagtgttttggaatcctacgtgagggacaaacattcagtacatcttaagagtattctgaaatcgtatgtgagggacaaacactcgcaacccagcaacagttttctggaatcctatgtgagtgacatacactcagaccccagcagctctgttctagaatcctatgtgaggaacaaacactcagaacccagcagtagtgttctagaatmctttgtgagggacaaatgctcagaacccagcagcagtgttctagaatcctttgtgagggacaaacgctcagaacccagcagcagtgttctagaatcctttgtgagagacaaacacacagaagccatcagcagtgttctagaatcctttgtgagggacaaacactctgaacccagcagcagtgttttggaatctcatgtgagggacaaacactcagaacccagcagcagagttctggaatcttatg

SEQ ID NO: 803132 - DNA, 624 bp, Homo sapiens
tatgtgagggacaaacactcagaaactagcagcagtgttctggaatcctatgtgaaggacaaacactcagaacccagcaacagtgttctggaatcccatgtgagggactagcattcagaccatcgtagcaatgttctggaatgctatgttgcggagaatccttaagaccgtcgtaccagtgttctggaatcctatgagagggacaaacaatcagaacccagtagcagtattccggaatactttttgagggacaaacactcggaacccagcagcagtgttctggaatcctatgtgtgggacaaactctcatatcccagcagcagtgttccagattgctatgtaagggacaaacactcaraacacggcagcagagttctggaatcctttgtgaggaacaaagtttcagaccctcatagcagtgttctggaataagatgtgaggctcactcagaacccagaaaaattgtcctagaatcctatgtgagtgacagaaactcagaacccagcagcagtgttctggaatcctttgtgagggacaaacattcagaaccacggagaagttttctggaatactatgtgagggtaaacaccaagaacccaggagcagtttctcgaaaatgatgtg

SEQ ID NO: 803133 - DNA, 656 bp, Homo sapiens
acctttatgagggataaacattcagaacctcgtagcagtgttttgcaatcttatgtgagagacaaacactagaacccagcagcagtgttctggaatcctatgagagggagaaacactcagaacccagcagcagtgttctggaatcctatgtgagtgacaaactttctgaatttcgtagcagtgctctggaattctctgtgagggacartcactgagaaatcagcagcagtgttctggaattctatgtgagggacaaaaattcagaccctcctaacagtgttctggaatcctatgtgaggtacaaatcctcagaacctagcagcaatgttctagaatcctttgtgagggacaaacagaaaccaaccgaagtgttctagaatcctttgtgaaggacaaacatgcagaacctcgtagcagtgttctggaattctatgtgagggacaaacactcagtatccagccacagtgtactggaatcctatctgagagcaaacattccgaacctcgtcacagtgttctggaatcctatgtgagggacaaacaccaagaagtctgcagcagtgccctggaattctttgtgtgggaccaaaaaacataacccagttgcagtgttctaaaatcctttgtgaggtaaaaacattcagatcctcgtagcag

SEQ ID NO: 803134 - DNA, 640 bp, Homo sapiens
atctgagggacaaacattcagactttcgtagaagtgttctggaatcctatgtgagggacaaacactaagaaacctgaagcagtgctctggaatcctttgtgaaggacaaacaaacacaacccaacagcggtgttttggaatcctatgtgagggaaaaatattcagacacttgtagcattgtcgaggaacctaatatgagggactaacactcagaacccagtagaagtgttctggaatccttagtgagggataaacattcagacactcgcagcagtgttctggaatcctacgtgagggacaaacactcagaaagcagcaacatttttctggaatcctatgtgagcaaaaaacattcagaacttcgtagcagttttttggaattctatgtaagggacaaacactcagatcccagcarcagtgtttcggaatcctaagtgaggtacaatccctcagaaccaagaagcagggttctggaatcctgtctgagggacaaactttcagacactcttagaagtgttctggaatcctatgtgagggacaaatactcagaaaccagcagcagtgctctgtaatcctttgtgaggtagaaacattcagaacctctcagcagtgttctggaatcttatgtgagggacaaata

SEQ ID NO: 803135 - DNA, 577 bp, Homo sapiens
tttgagggacaaacactcaaaccccagccactgtgttctggaatactatctgagggacaaacattcagacactcatagaaattttgtggaatcctatgtgagggcaaacactcagaaaccagtagcagtgctctggagttctttgtgagggacaaacataaagaacccagcgcagtgttctggaatcctttcagagagaaaacattaagactctcgaaakaatgttctggaatcctatatgagggagaaacactcagaatccagcagtagagttttggaatcctgtgtgagggacaagtattcagaatttcgtggaagtgttcacgaatcagatgtgagggacaaacactcagaacccagcagcagtgttctggaatcctaagtgagtgacactcagaacccagcagcagtgttctagaatcctttgtgaggaacaaacactcacacactcgaagcagtgctctgtaatcctatgtgagggacaaagaatcagaacccagcagcagtgttctggaatcctttgtgatgaacaaacatttagaccctcataacagttttctgggatcccatgagaggg

SEQ ID NO: 803136 - DNA, 577 bp, Homo sapiens
tttgagggacaaacactcaaaccccagccactgtgttctggaatactatctgagggacaaacattcagacactcatagaaattttgtggaatcctatgtgagggcaaacactcagaaaccagtagcagtgctctggagttctttgtgagggacaaacataaagaacccagcgcagtgttctggaatcctttcagagagaaaacattaagactctcgaaagaatgttctggaatcctatatgagggagaaacactcagaatccagcagtagagttttggaatcctgtgtragggacaagtattcagaatttcgtggaagtgttcacgaatcagatgtgagggacaaacactcagaacccagcagcagtgttctggaatcctaagtgagtgacactcagaacccagcagcagtgttctagaatcctttgtgaggaacaaacactcacacactcgaagcagtgctctgtaatcctatgtgagggacaaagaatcagaacccagcagcagtgttctggaatcctttgtgatgaacaaacatttagaccctcataacagttttctgggatcccatgagaggg

SEQ ID NO: 803137 - DNA, 551 bp, Homo sapiens
acccagctactgtgttctggaatcctatctgagggacaaacatttagaaactcgtaggagtgttctgaaattctatgtgagggagaaacactcagaaaccagcagcagagctctggagtcctcagtgagggacaaacaaacagaaaacagcagcagtgttctggaatcctttctgagaaaaaaactttaagtccctcataaaattgttctggaatcctatgtgagggacaaacactcagaacccagcagtagtgttttggaatcctgtgagaacaacaaatattcagaacttcgcagcagtgttcacgaatatcatgtgagrgacaaaccctcagaacccagcagcagtgttctggaatcctaagtgagtgacaaacactaagagcccagcagcagtgttctacaatactttgtgagggatattcagacactcgaaacagtgttctggaatcctatgtgagggacacacactcagttaccagcagcagtgttctggaatcctttgtgaaggaaaaagatttagaccctcgtagcagtgttctgggatccta

SEQ ID NO: 803138 - DNA, 625 bp, Homo sapiens
cgcataagattccagaacagtgctacaaaggtctgaatgtttatccctcacaaagcatttcagaacactgctactgggttcatagcatttgtccctcatattggattccagaacaataatatgagggtctgaatatctttctattacataggaatccagaacaccktttcgagggtgtgaatgttttcccctcccaaaggattgcagaagactgctgctgggttctgagtgtttgtcccacatataggattccagatcactgctacgaggttgtgaatgcttttccctcagataggatcccagaagactgttatgaggttctgaatgtttttccctcacaaaaggattgaagaacactgccactgggttctgattgtttttccctcaaaaaagattccagagcagtgctgcagatttcttactgtttgtccctcacataggattccagaacacttctgcgaggttctgaatgtttgccctcggataggattccagtacacagtggctggattctgagtgtttgtccctcacataggattccagaacactgctacaaggttatgaatgcttgtcacacaaaaaagattctagaacactgctgctgatttctgagtgtttgtgcctc

SEQ ID NO: 803139 - DNA, 625 bp, Homo sapiens
cgcataagattccagaacagtgctacaaaggtctgaatgtttatccctcacaaagcatttcagaacactgctactgggttcatagcatttgtccctcatattggattccagaacaataatatgagggtctgaatatctttctattacataggaatccagaacaccttttcgagggtgtgaatgttttcccctcccaaaggattgcagaagactgctgctgggttctgagtgtttgtcccacatataggattccagatcactgctacgaggttgtgaatgcttttccctcagataggatcccagaagactgttatgaggttctgaatgtttttccctcacaaaaggattgaagaacactgccactgggttctgaytgtttttccctcaaaaaagattccagagcagtgctgcagatttcttactgtttgtccctcacataggattccagaacacttctgcgaggttctgaatgtttgccctcggataggattccagtacacagtggctggattctgagtgtttgtccctcacataggattccagaacactgctacaaggttatgaatgcttgtcacacaaaaaagattctagaacactgctgctgatttctgagtgtttgtgcctc

SEQ ID NO: 803140 - DNA, 625 bp, Homo sapiens
cgcataagattccagaacagtgctacaaaggtctgaatgtttatccctcacaaagcatttcagaacactgctactgggttcatagcatttgtccctcatattggattccagaacaataatatgagggtctgaatatctttctattacataggaatccagaacaccttttcgagggtgtgaatgttttcccctcccaaaggattgcagaagactgctgctgggttctgagtgtttgtcccacatataggattccagatcactgctacgaggttgtgaatgcttttccctcagataggatcccagaagactgttatgaggttctgaatgtttttccctcacaaaaggattgaagaacactgccactgggttctgattgtttttccctcaaaaaagattccagagcagtgctgcagatttcttactgtttgtccctcacataggattccagaacacttctgygaggttctgaatgtttgccctcggataggattccagtacacagtggctggattctgagtgtttgtccctcacataggattccagaacactgctacaaggttatgaatgcttgtcacacaaaaaagattctagaacactgctgctgatttctgagtgtttgtgcctc

SEQ ID NO: 803141 - DNA, 614 bp, Homo sapiens
atgcttttccctcagataggatcccagaagactgttatgaggttctgaatgtttttccctcacaaaaggattgaagaacactgccactgggttctgattgtttttccctcaaaaaagattccagagcagtgctgcagatttcttactgtttgtccctcacataggattccagaacacttctgcgaggttctgaatgtttgccctcggataggattccagtacacagtggctggattctgagtgtttgtccctcacataggrttccagaacactgctacaaggttatgaatgcttgtcacacaaaaaagattctagaacactgctgctgatttctgagtgtttgtgcctcacaaataattctagaacactactgctgagttctaagtacttgtgcctcacataggattcgagaacactgctgctgggttctgagtgtttgtccctgacttaggattccagaacactgcttcttggttctgagtgtcagtccctcacatagaattccagaacagggctatgaagttctgaaagtttgtcgcttacataagattccaaaacactgctgctggattctgagggtttgtcccttgcataggattccacaacactgctgc

SEQ ID NO: 803142 - DNA, 614 bp, Homo sapiens
atgcttttccctcagataggatcccagaagactgttatgaggttctgaatgtttttccctcacaaaaggattgaagaacactgccactgggttctgattgtttttccctcaaaaaagattccagagcagtgctgcagatttcttactgtttgtccctcacataggattccagaacacttctgcgaggttctgaatgtttgccctcggataggattccagtacacagtggctggattctgagtgtttgtccctcacataggattccagaacactgctacaaggttatgaatgcttgtcacacaaaaaagattctagaacactgctgctgatttctgagtgtttgtgcctcacaaataattctagaacactactgctgagttctragtacttgtgcctcacataggattcgagaacactgctgctgggttctgagtgtttgtccctgacttaggattccagaacactgcttcttggttctgagtgtcagtccctcacatagaattccagaacagggctatgaagttctgaaagtttgtcgcttacataagattccaaaacactgctgctggattctgagggtttgtcccttgcataggattccacaacactgctgc

SEQ ID NO: 803143 - DNA, 556 bp, Homo sapiens
aggattccaaaacactgctgctgggttctgactgtttgtccctcacataggatttcagaacactgttaagattgtctgaatgtttgtccctcacaaagtattctggaacactgctgctgtgttctgagtgtttgtccctcacataggattccagaagattgctgctgcattctgagtgtttgtccctcacataggattccacaaaactgctacgaaggtctgaatgtttgtccctcagataggattccagaatactgcaatgagggtctgaatcattgtccctcacataggattctgtcactcctatgagtgtctgaaagctgagctctcccataggattccagaaaacttctactgggttctcagtgtttttyctcacataggatttcagaacactgctgctgcattctgagtgtttgtccctcagataggattccagaacactgctgctgggttctgagtgtttgtccctcatatagaattctagaacaatgctgctgggttctgagggtttgtccctcatatagaattccagaacacagctgatatgttcgga

SEQ ID NO: 803144 - DNA, 599 bp, Homo sapiens
ccctcacatagtattccagaacacttctttgagtgactgaatgtttgtccctcacatagtattcgagaacacaggggatgaaaacttagtgtttgtccctcaataggattccagaacgctgctgctgggttctgagtgtttgtccgtcatatacgattccagaacactgcttcaaggttctgaaggtttttccctcacaacggattctagaacactgctgctgggttctgagtgtttttcactcacataggattccaaaacactgccatgaggttctgaacatttgtccctcataaaggattccagaacactgctgctgggttctgagtgtttgtgcctcacaaaggattctagaacactcctgcttggttctgagtgtttgtccctcacataggattccagcacactgctgttgggttctgagtgtttgtccctcaaataggattccagcacactgytattgggttctgagtgtttgtcactcacctaggattccagaacactgctgctgggttctgagtgtttgtccctctcttaggaatccagaacaatactgctgttttctgagtgtttgaggctgacatagaattccaaaacac

SEQ ID NO: 803145 - DNA, 630 bp, Homo sapiens
gaattccagagcactgctgctggtttctgagtgtttgtccctcacatagcattacagaacacttctaagagtgtctgaatgtttatccgtcagataagattccagaacacagtgacacttttctgagtgtttctccctcagataggaatccagaacagtgctgctgggacctgagtatttgtccctcacataggattcaagaacactgcttccgaagtctgaatgtttgtctctcaaaagggattctggaacactgctgctgggttctgagtgtttgtcactcacataggattccmgaacaccgatgaggggttttgagagtttgtctgtcacaggggattgcagaacactgctgctgggttaagagtgtttgtccctcacataagactccagaacactgctacgaggttctgaatgtttgtccctcacaaagcattccagaacactgctgctggtttctgagtgttagtccctcacataggattgcagaacactgctgctgggtacagtttgtttgtccctcacgaaggattacagagaactgctgctggattctgagtctttgtccctcacataggtttccagaaccctgcttcgagtgtctgaaggtttgtccctgacaaaggattc

SEQ ID NO: 803146 - DNA, 562 bp, Homo sapiens
tcaatgtttgtgcctcacaaaggattctagaacactgctgctggtttctgtttgtcagtcacatgggattcagaacacttctgctgggttctgagagtttgtgcctcacttacgattccagaacactgctacgaggttctgaatgtttttccctcaccaaggattccagaacgctgctgctgggttctgagagtttttctctcacataggattcaaaaacactgctggtggtttctgagtgtttgtccctcacataggattccagaacactgatgctgggttctgattgtttgtccctcacatgggactccagaacactgctacgaagttctgcatctttgtygctcacacaggattctagaacactgctgctgagttctgagtgtttgtctctcacataggattccagaacactgctgctgggttcagagtgtttattccacacacaggattccagaacactgctacgagggtcagaatgtttttccgtcacaaaagattccagattactgctgctggattctgtttgtttgtccctcacaaaggattccagaacgccact

SEQ ID NO: 803147 - DNA, 562 bp, Homo sapiens
tcaatgtttgtgcctcacaaaggattctagaacactgctgctggtttctgtttgtcagtcacatgggattcagaacacttctgctgggttctgagagtttgtgcctcacttacgattccagaacactgctacgaggttctgaatgtttttccctcaccaaggattccagaacgctgctgctgggttctgagagtttttctctcacataggattcaaaaacactgctggtggtttctgagtgtttgtccctcacataggattccagaacactgatgctgggttctgattgtttgtccctcacatgggactccagaacactgctacgaagttctgcatctttgtcgctcacacaggattctagaacactgctgctgrgttctgagtgtttgtctctcacataggattccagaacactgctgctgggttcagagtgtttattccacacacaggattccagaacactgctacgagggtcagaatgtttttccgtcacaaaagattccagattactgctgctggattctgtttgtttgtccctcacaaaggattccagaacgccact

SEQ ID NO: 803148 - DNA, 599 bp, Homo sapiens; identical to SEQ ID NO: 803144

SEQ ID NO: 803149 - DNA, 556 bp, Homo sapiens; identical to SEQ ID NO: 803143

SEQ ID NO: 803150 - DNA, 635 bp, Homo sapiens
tggtaatcagttaaatctaaacatgtgtgctatctctttagatttggatcccctattagaaaaactgctgcgttaagagaattatcagtggttaatgttaaatcatctttttctaacagaatagtctcatactttaagattcttgagtcagtaagccacctccctgctttctgatttaagatatttctaacttgatggggctttctcactgtcaattttcctccaaaggttaacttcctgatttctttgaccattagtgctgtagtcacaatggattggatacattgaggccacccactagtaactgaatctaaggcttttgacaggaaggccacgatgggctgctgatggcctccgtgttcttaagtgagcactgctaatgctaccccattatccacgttgacaaaaaggtggaatggcttttctagggaaggtaaggctaagacaggggctgttataagcctttttatctgctcttyaacctgatcgacttcttcagaggtccacagcaggtcgtcagtcttcccctcggcaaattttggatatagaagtttactgtttagtgcatgtgagttaatccataagcagcagtatccaactaaccctaaaaatttcctgagttcttgtttaagttt

SEQ ID NO: 803151 - DNA, 746 bp, Homo sapiens
tagtgttgtttctaccctgaatggggatcctcccactcaaaagtaaatatatcttgcctatcttctgccaggagacatgcccaaaaagcatccttcaaatctattacagtaaaccattgattattatatggaatcttgctgagaattgtgtaaggatcgaggacaatggggtgggtagattggactatttggttaatagccctaaagtcctgtaccagccggtatgacccatctgatttcttgactggcaatgttgaggtgttttaaggggacatagagggctcaagaagcccatttttaataagactttcaattataggtttcaaacctatcctgccctctaggggaatgrggtattgtttcctccttactacttccttggggatttttagcttgatgtggttggagggactcagaggttccctcagtttccttctttggatcagacattaggattaatatatttgtcatctgcagtggtgagtagctttaatgaggtgaggaaacctcttgggccgagttgcaggcttatgcctaacttcaacattaaatccctccctagtaaattagtccctgctttagggattagcaaaaactgaatatgagctgattgagcctggtatctgacttctgtgttttctaaaatttttgctttaaatccttctccatttaccccacaaaccaaaagttcccctgaagagtaggcaatattagatggggggaaaacaaacagaggatcgagccac

SEQ ID NO: 803152 - DNA, 586 bp, Homo sapiens
cccagctgctccgtgccaggaggaggaagagacacctagagcctgcgacaccatgacttgcctcactgcgggtgggtggcagcgacggagactgcagtgcaccagagcagtaggagagcggccgcgctaggagggcaggyggctgcagccagggttgggggtcaggcttacagcgatggacgggctgcagcagtggccaggtggtaggagccttgtagggagggctggtgcattggcaatgggcctggctttgccttgccttgccctgtacctgccctactgttacctggactgtctcggccctgtcctgctctggtcccatcctgaccctgtcttggccatgtgctaccctgtccctgccctggtcttgccctggcactggccctgccctgaacctgcactggcctgaccttggctctggccctggctctggccctgccccttgtcctgaccctggtcatgtcatggcactggccctgccagtggtcatggtcctactcctgttctggccctgacctggccttggacatgtcctggtcctgctttggcccatccctgccctggccccaccatgggcctgcctgtt

SEQ ID NO: 803153 - DNA, 565 bp, Homo sapiens
acaggccagatagctagacaaagaggacagtaagagaaagatggtcagatagacaatgggacagagatgggcttacagatgggcggacagacagacaggtctgaacagcgggctgccagatggacagatgggtgaatggacagatggctggcagctgtggcgagctgctgccctcaccaagtgcacactacggagtggccaaactcatgcctcaacttctagttttcagctcctgcttgttcctggcaggaggccaggcagcaaagcgtctgaggggagttttctttgcctagagaagtcagctgctgtgttaactccctcactgctggtaggtccaaaggccccacctactgcccrccagagcccatggtcacactgtcgcaatgtgcaggagaacttggtgcgtgctgcactgcggttgccaggtaggggcagggctccctggaacctccacaccattccccaggttctcagcagctctgggaaagcagagctggggccgcttaactctgccctggatccggcaaggctgcccacctcccagagtggagccctgctccccagc

SEQ ID NO: 803154 - DNA, 549 bp, Homo sapiens
aatgaagctggctaaaggcacttgcactggccaggcacagtggctcatgcctgtaatcccagcacttccagatggatcacttgaggttaggggttcgagaccagcctggccaacatggtgaatccccagctctactaaaaatacaaaaattagccgggtgtgatggcacaagcctgtaatcccagcactttgggaggccaaggcagatggrtcacttgaggttaggggttcgagaccagcctggccaacatggtgaatccccagctctactaaaaatacaaaaattagccgggtgtgatggcacacgcctgtaatcccagctactcaggaggctgaggcaggagaattgcttgaacctgggagatggaggttgcagcaagccgagatcgcaccactgcactccagcccactcggtcaatgtcactgccatcaagggacagtctaaccaaggtccagatggcacaagtggagccataaaaccaggacagcttgaggttcagcttcctaagcccacaggtgcaaggaccttatctggatccatactttcat

SEQ ID NO: 803155 - DNA, 501 bp, Homo sapiens
ggaatataactttatagcttagatgatatataaaaaataaagatcagatgtaaccagaaactgagtttcttttttttttttttgagatggagtctcactctgttgcccaggctggagtgcaggggcatgatctcagttcaccacaacctctgcctcccaggttcaagtgattctcctgcctcagcctcccaagtagctgggactacaggtgcctgccascatgccgggctaatttttgtatttttagcaaagatagggtttcactatgtcagccaggctggtcttgaactcccgaccttgtgatctgcttgccttggcctcccaaagttctgggattacaggcatgagccactatgcctggcccagaaactgagtttctactctggcaagttaaacaaaaaattagtacatatcaggctgggtggctctaggccacatgcaagcaagctgcaaactgaattgcctctgcagctgcagaaggctaatttctacattgatatt

SEQ ID NO: 803156 - DNA, 688 bp, Homo sapiens
aatgtcacatagttcaacctaatagttgctcagtcaatatgtattgaatgttgaatgcatgttgtaatcagtgatcctatggtaggctgcatttcacacagttttctctagccaaagaaatgctagctatggttttgaaaaggaattctaaaacttcaaacagctaaaactggtgatatagactgtgggactggagatctgtgagactggagtgccttttgtccagtayattttctatgcagttcttggtacatttcccagcctcaggtgggagcatgtgtatttgggtctggagtgcttgtcagtagcccaaagaacctgggaagagtatgctggaaagctaagatggaaggcagggataggagctgtttggcctgaagaagaaagtggcaggaaagatattggcatagccaaagaagccttccctttaagtcctagtgtagggagacttacttttccagaccagagctcatgagatcatgcactcattccacagatttgtgtgagtctgtgatgcgctcagttatggctaggcatgggcgttccttattgtgagcttcctttttgtgcctggaacttctgtctgaagggttgtgggctggactgtagaccactggtcctcagaggcaagggttgaactgaggagaaagccccagctggatcctgctgggagaagcccagcactctg

SEQ ID NO: 803157 - DNA, 550 bp, Homo sapiens
atttgttgcccaacgtcattagttctctgtatatacttttaaatatcttaaacatgtaatattcataagtaatttcacaagtagtttaagatttgagtctttaacctaaatagatacaggattttgtgatatgctgtaatatacagatttttatttmtatatggataaaaatttatatgttttttctgacatcatttattgaatagtataatttttctactgacttttagtatcatatcttttattacaagtccaatgtattcagcatatctatggatctatttcttggtgcttccattttttcccattgtttaacggtgtatcactgagccaaagcaaaccattttaattattataattaaaacacatttaaatattgataggctattattgttcaaaataactttggttctttctttccattgattattttaatatgacttttccaatcaagttctaaaaaaatactggtggtatatttattgaaataactttaatgaaattaaatgaaagatcatgtatttgttttctgaattaattcttagataca

SEQ ID NO: 803158 - DNA, 637 bp, Homo sapiens
ttggtgcttccattttttcccattgtttaacggtgtatcactgagccaaagcaaaccattttaattattataattaaaacacatttaaatattgataggctattattgttcaaaataactttggttctttctttccattgattattttaatatgacttttccaatcaagttctaaaaaaatactggtggtatatttattgaaataactttaatgaaattaaatgaaagatcatgtatttgttttctgaattaattcttagatacattaatgttttatgttaccatgaatgtgatattataatataatatttttaattggttgctactgtttataagaatttcattttctstttactttgccttcatatctgaaaaccttgctgatttgattagtgcatccacaaattttcttggattttctatgggtaattacaaatctccacacaatgaggttgcagtgagccaagatcacaccactgtactccagcctgggcgacagagtgagacaccatctcacaaaaacacataaacaaacaaacagaaactccacacaatgacaacgtatgtgctttctttttttcttcctctttctataatatttctttgtcctatcttaactgaactggccagaaacccc

SEQ ID NO: 803159 - DNA, 652 bp, Homo sapiens
acgctgtatagaaccaatgcctttattctgtattgctgatggatttttgaaaaatatgtaggtggacttagttttctaaggggaatagaatttctaatatatttaaaatattttgcatgtatgttctgaaggacattggtgtgtcatttctataccatctggctactagaggagccgactgaaagtcacactgccggaggaggggagaggtgctcttccgtttctggtgtctgtagccatctccagtggtagctgcagtgataataatgctgcagtgccgacagttctggaaggagcaacaacagtgatttcagcagcagcagtattgcgggatccccacratggagcaagggaaataattctggaagcaatgacaatatcagctgtggctatagcagctgagatgtgagttctcacggtggcagcttcaaggacagtagtgatggtccaatggcgcccagacctagaaatgcacatttcctcagcaccggctccagatgctgagcttggacagctgacgccttggatcatctgccactgatctctggtcaacatttttatcacccaacacaaaagaagcagagatttatcaagttacttaaacaacctgaccctttcatcttttgctacacatactcttgtaattgatctc

SEQ ID NO: 803160 - DNA, 616 bp, Homo sapiens
aggaagcccagaagatgtttctgtaagaaattaaggattcgtttgttggggagggctgctggcatgcttgaaaagtactgtgacggctgaattttgtgggcttggggagattgcagattctctgatttcaaggggaatgatgtgatcctagagttgcaaagaacaagtgacagtggaggcgcttatgctttgtgaytgcactagagacaaggaagacacaactagaataatggggagcaggaatggagcggccaacagaatatctgactgttagggatctttgatgaaggctgattctcagggagtgaactacatcagtgaccaactatttgtctttatataactgggtaatgtggatggattctaataaagggactacttacagcacagcaggaaagtcacaaagaaaccagacagaagagtgtaagtagtaaggggccaagcagtcacctgactagagacagtgccagcttgccaagaaggcaccagacagaagctgtgatcttcagcaaagggacacagtctgcctgtgctgaccctgcaggggcagaggtgggggataaacacactcttctctcacctatcttctgccaccccctccattagctgaacccca

SEQ ID NO: 803161 - DNA, 565 bp, Homo sapiens
cgttggaggcttttcacacaataaaatgtacctctctttgtttttaacatgtttttcccttcctctcttctttttttgtgaaatgtgtatttactttaatatatttgtagtaagtcacttccatgcacatattaattttttaaagtaataagyatgtgtattgtctacgtgtgaaagaaaacacacatttatttttatgctttggaagttatccagaatcatggaattgtcaatcacagtcaatcacccaacctactcacctttccagtgtaatcttagtcaaattttttttttgttatccaatgagatgcagtatttcaactcagaaagataaatagagtgaatttatagagactattaactaagaacatacagttttatttatactcagaagcaagtagattatgtacatatatatgaagataaaaattaaaaggataattgtgtaaatttgcatgtagagggctttgaaaacctgtttacttgttaatgctgttttgatgtattgtgtctttgttctcccgacccatcgtccagagctctctgcaggagctaagtgctcatc

SEQ ID NO: 803162 - DNA, 646 bp, Homo sapiens
atggaaggaggctcactactccccaatgatttcacaaattacagcttcagccagctataaaataaccaaatcagttctgatatagccataaaattaagcctgaaaaaatagtgaagtaaatcatccctttaaaatcaagttgttgaacaatatgttctgcatgattccatttatgtcagaaaaaatatatttgtgtaagtatatacacagaaaagggtctgggagaatatataccaaactataaagaatctatatcaaagtcaataaggggcatagacaaggaggggaactttcacattttactttccacattcttttttttttttttttgacggagtctcactctsttgcccaggctggagtgcagtggcgcaatcttggctcactgcaagctccgcctcccgggttcacaccattctcctgcctcagcctcccgagtagctgggactacaggcacccgccaccacgcccagctaatttttttatatttggggtttcactgcgttagccaggatggtctcaatctcctgaccttgtgatctgcccacctcacccacctcagcctcccaaagtgctgggattacaggcgtgactttctacattcttgtaacagaattatagtcaccgttacctccatcaaaaaatt

SEQ ID NO: 803163 - DNA, 472 bp, Homo sapiens
ggcatggtggtgcagacctgtaatcccagcactttggaaggccaaagtgagccactgtgccctgttgtgttttgatttttgagacagaatctggctgtcacccaggctggaatgcagtagcacgatcatagcctcaacttcctgggctcaagtgatcctctcacctcagcctcctgagtaactgggactacaggtgcatgtcaccacacctagctaatttttcttttttttgaaacatagtcttgctctgtcamacaggctggagtgcagtagcacgatctaggctcactgcaacctctgtctcccaggctcaagcaattctcttgcttcagcctcccgagtagctgggattacaggcatgcgccaccacgcccagctaatttttgtatttttagtagagacgaggtttcaccatgttggccagggtggtctcaaactcctgacctcgggtaatctgcccactttggcctcc

SEQ ID NO: 803164 - DNA, 472 bp, Homo sapiens
taatcccagctacttgggaggccgaggcaggagaatcgcttgaacccgggagccggaggttgcaatgaacggagatcgcgcctctgcactccagcctgggtgacagcgcgagactccatctgcacaaaaaaaaaaaaaaaaaaattaccrggcatggtgtctcatgcttgtaatcccagcactttgggaggctgaggtgggagaattgcttgagtctgggagtttgagatcagcctgggaagcatagtgagaccctgtctctacagaaaataaaaaattagccgggtgtggtggtgcatgcctgtagtcccagctgggagaatcacttgagcctaggaagtggaggctgcagtgggccataatcacgccactgtgctccagcctgggcaacagagctagactctgtctcaaaaataaataataaaataaaaataaaatgtgcttcagcatctctagaattgttccgattaga

SEQ ID NO: 803165 - DNA, 501 bp, Homo sapiens
caaatatcaatgtagaaattagccttctgcagctgcagaggcaattcagtttgcagcttgcttgcatgtggcctagagccacccagcctgatatgtactaattttttgtttaacttgccagagtagaaactcagtttctgggcsaggcatagtggctcatgcctgtaatcccagaactttgggaggccaaggcaagcagatcacaaggtcgggagttcaagaccagcctggctgacatagtgaaaccctatctttgctaaaaatacaaaaattagcccggcatgctggcaggcacctgtagtcccagctacttgggaggctgaggcaggagaatcacttgaacctgggaggcagaggttgtggtgaactgagatcatgcccctgcactccagcctgggcaacagagtgagactccatctcaaaaaaaaaaaaaaaaagaaactcagtttctggttacatctgatctttattttttatatatcatctaagctataaagttat

SEQ ID NO: 803166 - DNA, 591 bp, Homo sapiens
ttgttgacaagatactgttttaaagttccattttgccatactgcgaacagcttgtcattagctcaatttagccacatgtaaaatcactaaggcggacttccagagttcccacatgaaaatcaaatgtaaaccagcagtgacctgcttcaacaccatcatcggaagtcagaagttgaactcttttttgatgtttaaagcctgcataatattcgctgtattattattcagcatattactatttccttcgtgatggaaatttggtttatcccaattttctattccatcaaaacaccgctacatagaaaatccccatgcacatatttctcctaattgtggaaatattttacataaaagactctagacatgggatgaaattcccaggttattggaattttaaaatagataggtactyccaaattgacctcttacaaattatatgaattcgtaagcttccaactgttatggagttacccattttgagaaatctgtgctaaaaggacccaaacaatgctgatgacaatgatcaggataataagtacgctgggaagacaacaaaatgatttagatcttagacaagtcattctaggtgtc

SEQ ID NO: 803167 - DNA, 640 bp, Homo sapiens
taaaatacaacattcatttatattaaaatctttataccaaactaggaaaagcagacaaatttcttaacctgataagcttatctataacaaaaccatcgacaccaccatatgtaatgttgaagcataatcgttattttttataaaagctaggaaagggaatgagatgtctgttgacactgctcgtatttatcattgtcctggggtttctggccagttcagttaagataggacaaagaaatattatagaaagaggaagaaaaaaagaaarcacatacgttgtcattgtgtggagtttctgtttgtttgtttatgtgtttttgtgagatggtgtctcactctgtcgcccaggctggagtacagtggtgtgatcttggctcactgcaacctcattgtgtggagatttgtaattacccatagaaaatccaagaaaatttgtggatgcactaatcaaatcagcaaggttttcagatatgaaggcaaagtaaagagaaaatgaaattcttataaacagtagcaaccaattaaaaatattatattataatatcacattcatggtaacataaaacattaatgtatctaagaattaattcagaaaacaaatacatgatctttcatttaattttattaaagttatttcaat

SEQ ID NO: 803168 - DNA, 318 bp, Homo sapiens
caagactaggttagacaacatagtgagaccttatctctacaaaaaatcagccaggcgtggtggcatgcgcctgtcgtcccagctactcaggaggctgaggtcggagggtcacttgagcccaggagttggaggctgcagtgcaccaggatcacacrccactgcactccagcctgggtacagagcaagaccttgtctcataaaaaaattaaaataaaaataaatgagaagtcagccatacactcctaaccctgaggtggccagtcctgtgtggtattttatctccagggtttcacctgatatcataagagtcgggatcca

SEQ ID NO: 803169 - DNA, 543 bp, Homo sapiens
aagcaaggtggagtcgattaagttagatctatctcactgtctcagtcataattttgtaaaggcgatttcatcaggaattcgagaccagcctgggcaacatggcaaaaaatatttatttaaaaaaaagtatttttttaatagatctattttttttwaaaaaagatatattttttaaaagtatctattaaaaaaatacaaaaaattagctgggtgtggtgatgtgtgcctgtactctcagctacctgggaggttgaggtgggaggatcacctaagcccagaaggtcgaggctgcagtgaaccatgatcgaaccactgcactccagcctgggtgacagataatttaagattaagtttgagactctgtctcataaaaagatgaagaaggaaatagagagagaaagagaaagaaagaaaacggcatatctctgttgttcagatgagaaaaatgaggccccaggaggaaggtgacccacccatacccatgtggttttttaggggcaagaacagacctagagacaactctgtcctctggtcttaaaagat

SEQ ID NO: 803170 - DNA, 587 bp, Homo sapiens
caggataaccttcctatctttaaagtcagctgatgggcctattcggggcataccacactgcccgtggattagccctgctctgtaaggagcagttaaaaaaaaaataaggtcagctgataaacaatcttgattgtatctgcaaccataattcctgtttgccaggtaacctaacatagttataggctctagaaattagaatacagccatgggggtgggtggggggtcattaktcggcctatcatggttttataacagcatgaagttttaaaaactagctgcctaatatatttaacaggtacacgttaaatgggaataaagaataatacaattattaaacgaagctaacctaaaaaaaaaaaaggataaaaaaatcaaatgtatcacttttttttttcatgggtactctaaaaaatctttgcttaacataaggtcatgaagattctctcctgttttcttcttgaaggttaataactttaggccttatatttaggtttatgctccattttgagttttgtaaattttgcatatgggtgtctaattgttccagcaccatttgctgaagagactgacacaaacaatgacatgga

SEQ ID NO: 803171 - DNA, 594 bp, Homo sapiens
accaggggcagcccagcaggagactgtggccacagagcctggtagttggatctgacagccaggaagagtaaggaccagcgaacaggtctagggagttcggtgggtgcaatgcctgcccctctaacacacacaggagattaaggacacccaggggccacctaggccagggggcgctggtggcagacacacaattcttggcctgcgggtgtggtagcaggaggcctgggcagggcccttcccaagctggccacatttacataacaaaaggtcaaaattggagccacttgtgcaagggctatttataagaaccagtctcaaccgcttttggctcccccgttccttcccttcctgatctgctctcaccgcctccctgcccagagggcccagccccctagcccgcytggcctgaccacatggccttccctctccagaggtttcactgcctaagggctcacccaagctgcaggcctgggctttcaataccggcccaccaaagccttgggcagctgccgccaggaaacgaggggttccctcccacccccagagctctgggtcctgcaggaggggggatcctgaggtggtgggtccttgcac

SEQ ID NO: 803172 - DNA, 472 bp, Homo sapiens; identical to SEQ ID NO: 803163

SEQ ID NO: 803173 - DNA, 472 bp, Homo sapiens; identical to SEQ ID NO: 803164

SEQ ID NO: 803174 - DNA, 662 bp, Homo sapiens
ctgtgtttggtgagcgagtagagggatccagagtgcagggtggtcttggcctggggcttttgactgccctctggagatgcactgagggccacccagctggggagcagccgggagggataggaacctgttcccactgtggcrtctttgcccttccaatctgcttcaccgtcgcccttgatctctgtgccagttggaaaattgaggcagaaccaatacccctgggtgatctggaaatcatcagtgggaagggttgcctttgcccaaggctaaagatgacatgtccctgcacactttcagccccaggttttcctaccttgtggggaggtgagaggtcagggtgagtgctgggtttgaggctcagctgtgctgtgtgaagattgagaggagcccacctgatcacatggacagaacgcacaggctcctgggtggccctgcggctccagtgacatagcacatggtcgggcatacaacagtgcccaggaaaggttagctggtggtgtttccagggtatcgtgctgagcttctgagatgagaatgtcctgtgaaagcctctgtctggaggtttcattggaagtaaagtttacatacaattaagggcctaaaattgtattttcatttaccttaacccagattcccagcaagctagagagctgccctcaccc

SEQ ID NO: 803175 - DNA, 611 bp, Homo sapiens
aaatgaacataatatacagatactatggtttttctgtaatcccgctccccagagataatcttacttagcagttgggtatgtgtgtccccaaggtttttcttgccacagaatggacttgctgggccgggtaggctctgactgggccttgcagagcagctgccttactgtaagttctttgagggcgaacagagcgggggtggggctgctgtggctggcccagttctacagagcttgggcatgtgccaccagtggcttgagaggctggagtatctgagtgctgttccagcccgctagcacctgcctgggccctgggcctgccctcagtgtctggggacmtggctttctggcttttttgtggcggggactgggaggggaaggaaaggagagcagttggcatgttggctgttccgtaaacagggccgtgtgtctgctctaacagatggcctgggaaggtaaccccgaggctttgtgttccttcctgcagaccttcaggattccgcagagagagctggccctccctccagctgctggggctcttgtccttcccagctggggccagtccacctacagggggaatcctggagctgagggatcctaacttgggagatagt

SEQ ID NO: 803176 - DNA, 663 bp, Homo sapiens
caaaaaaaaaaaaaaggtaatactttttaaaatgttgagtattacagaaatgaacataatatacagatactatggtttttctgtaatcccgctccccagagataatcttacttagcagttgggtatgtgtgtccccaaggtttttcttgccacagaatggacttgctgggccgggtaggctctgactgggccttgcagagcagctgccttactgtaagttctttgagggcgaacagagcgggggtggggctgctgtggctggcccagttctacagagcttgggcatgtgccaccagtggcttgagaggctggagtatctgagtgctgttccagcccgctagcacctgcctgggccctgggcctgccctcagtgtctggggacmtggctttctggcttttttgtggcggggactgggaggggaaggaaaggagagcagttggcatgttggctgttccgtaaacagggccgtgtgtctgctctaacagatggcctgggaaggtaaccccgaggctttgtgttccttcctgcagaccttcaggattccgcagagagagctggccctccctccagctgctggggctcttgtccttcccagctggggccagtccacctacagggggaatcctggagctgagggatcctaacttgggagatagtttctg

SEQ ID NO: 803177 - DNA, 594 bp, Homo sapiens; identical to SEQ ID NO: 803171

SEQ ID NO: 803178 - DNA, 652 bp, Homo sapiens
ccctcagtgcatctccagagggcagtcaaaagccccaggccaagaccaccctgcactctggatccctctactcgctcaccaaacacagaccagccaaataaccaacggggatggcagaggccagggcactgtgcacccctcgctgcctcctgacactcgaagcagccccccattgggggacccactagcccatgatcytacgcgagcgaggtcaggccacacctgcccgtgtgtggagcctctggtcagtccacgtggctgcaggggcctgtggggaggctggaacagggttacctcaaggcctttcttctaagcacccagcaaagggcaggagagtgtgctctagtcagcatctttcaaaggccaggagagaggaggttttcagatcaaagtgatccctgctgaggcagaaagcagaaaactccagccccaattctgagaggcactgccccaacccagcctggatacccaccttgcctagaaccttggcctccaagaagccaggcattcagaactgctccaggtgctgggcctccacatggctccttctggaggccatgactctgggagacaggaacacatctcacgcccacgtccaggcccacaggcgggggtcaaactcagggtcaaactcatctcagccacatgatac

SEQ ID NO: 803179 - DNA, 663 bp, Homo sapiens
ctgtgtttggtgagcgagtagagggatccagagtgcagggtggtcttggcctggggcttttgactgccctctggagatgcactgagggccacccagctggggagcagccgggagggataggaacctgttcccactgtggcrtctttgcccttccaatctgcttcaccgtcgcccttgatctctgtgccagttggaaaattgaggcagaaccaatacccctgggtgatctggaaatcatcagtgggaagggttgcctttgcccaaggctaaagatgacatgtccctgcacactttcagccccaggttttcctaccttgtggggaggtgagaggtcagggtgagtgctgggtttgaggctcagctgtgctgtgtgaagattgagaggagcccacctgatcacatggacagaacgcacaggctcctgggtggccctgcggctccagtgacatagcacatggtcgggcatacaacagtgcccaggaaaggttagctggtggtgtttccagggtatcgtgctgagcttctgagatgagaatgtcctgtgaaagcctctgtctggaggtttcattggaagtaaagtttacatacaattaagggcctaaaattgtattttcatttaccttaacccagattcccagcaagctagagagctgccctcacccc

SEQ ID NO: 803180 - DNA, 655 bp, Homo sapiens
ttagctgggcgtgattgcgcatgcctgtaatcccagctactcgggaggctgaggtaggagacttgcttgaacccgggaggcggagattgcggtgagctgagatcgcaccattgcactccagcctgggcaacaaaagtgaaactccgtctcaaaaaaaaaattagccaagcatggtgtcacatgcctgtagtcccagccactcagcaggctgaggcgcagcacgagagttgcttgaacctgggaggcagaggttgcagtgagccgaggtggtgccgctgcactccagcctgggcracagagtgggactccattttaaaaaaataaataggccaggcgcggtggctcacgcctgtaatcccagcactttgggaggcccaggcaggtggatcacgaggtgaggagttcaacaccagcctggccaagatggtgaaaccccgtctctactaaaaatacaaaaattagccaggcatggtgacgggcacctgtaatcccagctattcggggggctgaggcagagaatcgcttgaactcaggaggcggaggttgcagtgagcccagatcacaccactgcactccagtctgggcgacagagtgagactcggtctcagaaaataaataaataaattaattaattaaattaataggatgggcacgg

SEQ ID NO: 803181 - DNA, 602 bp, Homo sapiens
ctcatgcctgtaatcctagcactttgggatgccgaggtgggcggatcacttgaggtcaggagtttgagaccatcctggctaacatgatgaaaccccgtctctactaaaaaatacaaacaaaattagccaggcatggtggcacatgcctgtaatcgtagctacttgagagactgaggtgggaggattgcttgaayctgggaggcagaggttgcagtgagccgacagagggagactccatctcaagactgggtgacagagactggacgacagagtgagactccatctcaaacaaaaaataaatgagaaagcagaaacagtgaatataacatttagacaattctttggaggaatttgcagtaatgggggcagataaatgggtcagtacctacagctgggacaagagcccaagaatgttttcttttcaagatagatgatatcaagtcatgtttgtattttagatttgcatattatcatagtagagaggaagaaattgatggtgctggagagaatggaggaaatggaatgagctaagtcaatgaagaggtaaaggaagatgaggtctgaacacctgtggaggtattgatcttatacattaataggga

SEQ ID NO: 803182 - DNA, 597 bp, Homo sapiens
agtgcggcaggagagagaatgagtgcaagcagaggaaatgccagatgcttaaaaaaccatcagatctcatgagactcagtcattattatgaaaacagcatgggggaaactgcccccatgattcaatcatctccacctggtcccacccttgacatgtggggattatggggattacaattcaaggtgatatttgggtggggacacaaagccaaaccatattatttggcacttggtccctcccaaatcacatgccctcacatttcaaaatacaactgygtgccctttcaacagttccccaaagtcttaactcattccagtattaattcaacatccaagtctaaagtcttatctgaggcaaggtaatttctttcctcctatgagcctgtaaaatcaaaagcaagttattaatagttacttcctagatacaatgggggcatagacattaggcaaatacacctgttccaaatgagagaaattggccaaaacaaaggggctacagccccatagaggtctgaaatacaatagggcagtcattaaaccttaaagttccaacatgatctcctttgactccatgtctcacatccaggtcatgctgatg

SEQ ID NO: 803183 - DNA, 520 bp, Homo sapiens
aagctcaaacatatgttcaagaatttttaaaagatgcaaaggacaagcacatcccaatgtggaaacttacataatcataaaaacgagtatgaaaacattagaatagacaacaaagaggaattcaaaacagaccagaaaacagtctttggtttcaacaaagggttttcaccaatttaagaatgtgataaaaattataaaaattagtatcagaaactcactgaataatataacttgtctttttatataatcatgtgtttgattaagagtaagcaactatagcccatgatcaagtcaagctatctgcatgttgttgaagtaaagttttactgaaaatcaacatactcatttacctattgtccatggattctttaatgctaaaatgrcagacagagttgcatagatgcaagagagagtatggtcacaaagccaagtattaacttcctggccatttataaaataaaattgctaacttcgggtttagataattacatattcacatattgttattaaaaaataaatt

SEQ ID NO: 803184 - DNA, 641 bp, Homo sapiens
catttaaactaacggcctcagagagaggctgaagaacaagagtgacacctgatggaacctggggaggtgtggagaggaccagcctgtgggagtccccggcctgtctgcagcaggcacagggcagctatggggcggccatgctggggctgtcgggaggcctggcttcacagggggcaggggcctttctcctgagcagaagccaagctgggggcctcctcctaccctgggcagatgtgctttgggatttgactctccttgggtacctagggcacaggtgtctctctccagggcttttcaggtgggcaggaaggggagggacacctctgaagatccaggagatgtttcacctgcaccagaagaggggaaggaaacagaggctggacatcaggagggatrttctggagcagaaaaggatgccaaagtgtaggacagggtgtccattgtaggggactagcaggcatcaccagtgtacccaaataagtatttcctgcggctgccagagtgtgtttggagtccctatttgccagctgctcagctgcatctcagggtctggcctctccaccttgactggccctcagcctccttccccaggggaaggctgggctgtggggtctagatgccctctccacagcctgcctgtc

SEQ ID NO: 803185 - DNA, 507 bp, Homo sapiens
cacagagagagagaaagagaggaaaatgaatctcaagaccccaaaatcgttaagccaagggagaagtcaagctgggaactacatcaggtaaacctgcctcctattttattactaaataagacagctaaaaagattttaaaaagctacatacctccctcacaatttggaatttcctggtgggcctcaagatctttaccckaaaacagttctgaactgaaagctgatcttcacaggtgcaggaatgaaagtcatccctctgctcacctgagacgaaggcatatctgattgcttcctccaccacactgtttatgtaagaatgcagattcactgaaccagactgaattgtgtaaatttacacaaagaacagaaaactttaaagactgatcaaggactcaaaagaatgcaaccttttgtctcttatctacctatgacctggaagcccctcgcttagagttctcccaccttaccagaccaaaccaatgtacatcttacacatattgattgctg

SEQ ID NO: 803186 - DNA, 507 bp, Homo sapiens
cacagagagagagaaagagaggaaaatgaatctcaagaccccaaaatcgttaagccaagggagaagtcaagctgggaactacatcaggtaaacctgcctcctattttattactaaataagacagctaaaaagattttaaaaagctacatacctccctcacaatttggaatttcctggtgggcctcaagatctttacccgaaaacagttctgaactgaaagctgatcttcacaggtgcaggaatgaaagtcatccctctgctcacctgagaygaaggcatatctgattgcttcctccaccacactgtttatgtaagaatgcagattcactgaaccagactgaattgtgtaaatttacacaaagaacagaaaactttaaagactgatcaaggactcaaaagaatgcaaccttttgtctcttatctacctatgacctggaagcccctcgcttagagttctcccaccttaccagaccaaaccaatgtacatcttacacatattgattgctg

SEQ ID NO: 803187 - DNA, 576 bp, Homo sapiens
tgaaccacaaaagacagggactactttaagccttcgcttttgcagattgatacgtgtatctcgtccttttgcagttacttgtcattatctgcctaagaatagtatttctaagaagttgtttctgtgtatcttctggggaagaatttgtccttcagttacatgtgattgcaacatgttgataaaagcaaaagaaaagcaataaaatcatttggttgaatatctcatttctttgaagccaaacagtttttgagtgataagaaagcaattcagtggaacttactgttcagcatcttacagaacaggattcatatgtacttgtgtattcayatgcgaattcatgcacacattatcacctaagagagtctgagtgtcctggtcctcaaagtatgtggttttcagaatttacactgtatacaaatctagaacgacatttgctgcctaaaggacaatgacgttagatctacacagcaagagttgaatagagctttgttcatcttctcacaaatttgggtggatctaaattgcttattttaggacaatttaaacttcctagtttaaaactttatggttatctgg

SEQ ID NO: 803188 - DNA, 518 bp, Homo sapiens
ttcttttggatatatccctagaagtgggattgctggatcatataatagttctgtttttagttttttgaggaatttctccacagcggctgtactaatttacatttccaccaagtgtacaagagtttccttttctctgaaagagaccagtaccagtccatggcctcttaggaactgggctgcatagcaggagktaagcagcaggcaagcgagtgaagctttatctgtgtttacagccactccctattgctcacattagtgcctcagctctgcctcctgtcagatcagcattagattctcctaggagggcgaaccctactgtgaattgcacatgcgaggaacctaggtggtgcactccttatgagaatctaatgcctgaagctccgtcactgtctcccatcacccccagatgagaccatctagcaggaaaacaagctcagggctcccattgattctacgttatactgagttgtataattacttcattatatattacaatgcaataataatagaaataaagt

SEQ ID NO: 803189 - DNA, 518 bp, Homo sapiens
ttcttttggatatatccctagaagtgggattgctggatcatataatagttctgtttttagttttttgaggaatttctccacagcggctgtactaatttacatttccaccaagtgtacaagagtttccttttctctgaaagagaccagtaccagtccatggcctcttaggaactgggctgcatagcaggagttaagcagcaggcaagcsagtgaagctttatctgtgtttacagccactccctattgctcacattagtgcctcagctctgcctcctgtcagatcagcattagattctcctaggagggcgaaccctactgtgaattgcacatgcgaggaacctaggtggtgcactccttatgagaatctaatgcctgaagctccgtcactgtctcccatcacccccagatgagaccatctagcaggaaaacaagctcagggctcccattgattctacgttatactgagttgtataattacttcattatatattacaatgcaataataatagaaataaagt

SEQ ID NO: 803190 - DNA, 541 bp, Homo sapiens
caacaagaacattatcaaaaaatgtcagaatcaacgttttcagaactttggaaattaaccaaaggcttgcagcaatctgggaaacatttatttaagaaaacagcagaatcttggtaagaacagggagctttgtggcactttaacttgccgtattcccatccccaccctccccagcaccacattagctgtgaaatccaacagcctgcaaaacracctgtgaccacaggggaaagtccggcagtcactggaagggcttagagctcctcaaggcccattctcggagaattgtcattatttgacctctctggtcacactacttgcaaggctgtttttatttgagctgacttagagctcatccagcacaaataaaagcagccttgagagtagggtcaattattgaacctcacagctgactgaggtagtggataacaagtgggatagacaatgtgctaaccaaaaaacataaaagaaaaagcagaggaatgggatgtccttggagagagtgggcgctttaaaaagttctaacaatattcctgggaat

SEQ ID NO: 803191 - DNA, 598 bp, Homo sapiens
caaagaaaactatgactatcccagagatgcagaaaaagcttttgataaaatttgtcgttcataaaaaatattcttaatggaagagaacttccttaatcttataaaggttatctgggggaacctatggcaaacatatggtgaaatgttgacaggtttctctttgaaaatgagaataagatacagatgtccactctcattcctattaaacattgtgttgaatctcctagacaaacgaagaaaagcaataaaatgaaatgaaagatatatgaagtgggaaggaaaatataaaactcattattcatasatggtatcatagtatacgtaaaatatccaaaagaacatacaggtataaaaattcaaagggcccaaaatagcaaaacactttttagaagaataaaaagatggaaggatttgctctactggatatcaggttatcataaaaccacagccatttacatagtatatatatatatatatatatgcataagtagataaatggatcaatcaaagagaagggagaaatctagaaacagactcatgcgtattttgacactcgatatttcacaaagttttcttcaacaaatagtgctgggactac

SEQ ID NO: 803192 - DNA, 552 bp, Homo sapiens
aaaaattaaacttgatccttatctcacaccatatgtaaaattcaatttcaggtgaattgcagatctaaatgtgaaaggtaaaataaaacttctagttgatagcgtagtataatatcttcctactctagtgtacataaagacttcttaaacagggctcaaaatatattaactattaaaaaaattacatttcactaaaattaagaatttttgttcattaaaagatgacagtaagagggtgaaaaggtaagcaactattcagaatacacacacacacacacacacacacacacacacacacacacacamaaaactcttacaagccagtaagaataagataacccagtagaaaaagggacaagacactgggatgggtacttcataaaacaggctatccagattaataaacctataaatcagaaatcagagaacttatagtttcaatgagattcaactatgcatccatcataatggttacaactaaaaagactgataataataactgttggtgaggatgtaaagcaaagggaattctcatacatggctggtaagaga

SEQ ID NO: 803193 - DNA, 568 bp, Homo sapiens
gattccatttatatgaaattcaaaaagcaaaactaaactctaatatttaagaatacaagttgtgatggtaaaactgtcttttaaaaaatcagggaaatgacttccataaaaatcagggtagtggctactttaatcagagagggatggtatggtgattggaatacagaggaggtttctggaatgctggtaatattttatttcttgaatagggttatatggatgttcactttgggataaaccattgagcgatacatttttgttttttccctgttctatatttgttttaacacacacacacacacacacayacacacacacacacacagacatacacacacacacaaacatatgcgcacacacaattataaaaagaaaaaacagaatggttacatatactaagtacagtaaattacgaaatgctgagtatcagtctttaaacatgaagtagatttatacatagagatttggagagtttttgaagctgtaccattaccactgagaaaataaaacagtctgcagaatgatgcacacaatgcaatacatgtatatcaaaacaatgctatacatg

SEQ ID NO: 803194 - DNA, 606 bp, Homo sapiens
aaataaatatacaacagttcgaaatgcagtaagtagtgatagattgttataaaattattaaaaagatgaagtaatataattcttgtaatagaaaccaaatgaattacagatgtgtactgaaatctctaaaggacccatcataaaataacacaaataggcttagctaaaaaacttatcagaggagataaaatggaacaatgaacaatatttgattcaactttcaaaaggcagcacataaataataaaacaaagagcaaatgagaaacatagaaattaaatgtcaacaagtgaacttaaatcaaaatatgtcaataactgcttgaatgtaaatagcctacaaacctaactaaaaggcagayattgtaaggactggtaaaaatgtaagaccttatatgttattctcccctctcccctcaaaaatcacaattgatacctaaggacacaaacaaattgaaagtaataccaaaaaaaaatacatgcaaaaactataggtaagaaacctgttgcgactatactagaattagagaaaatagattgtcaagaccagaaaattactagagattttaaaagtacatttcataacataaaagatcaattgatcaagag

SEQ ID NO: 803195 - DNA, 611 bp, Homo sapiens
tcccacctcccaatctccctttttttattttgtgtataatctcatgtgctgttttcatttcattgtaattttcttcataattaagaatctatgacttatttcctttccctatcatttcctttctcgtaacatagcaaaacaatgtggcaaaatcagtgatttgttacttaagtaatgtaatcagtgctyatttaaaaaaacaaaaaaagaatattttaatcatattttttctttatgagtctctacttgtttgcacatatttgtagtagggaaaaaagttgatatagtaaacattattttccttccttttctttttctttattctagcagttgctcattgaatcaactggtataccgaaattctgtcttttgagcaaaggcataggtcccagacagtggagtgggaagaaatatgtagagacagtgtctgggggaaaagggaagaaaagaagaatatttgtgcactctaacagcagagacaactcatatgctatttctttgcatctgaatgaagtcaacaaaactcatggaaaacagacactgttctctgagttctacaaaaaaacagagcctgaggcaaagaacccgtatgttaacaattatttggcaag

SEQ ID NO: 803196 - DNA, 522 bp, Homo sapiens
taatgaagtaagaattagttattgttggagcccattgactcatatcatcagaatcacttgctgaacttcatattgtgaagaaacctgacccaaggccgccaaccggttgtccttgggaataggagaaaatccgtttcctcycagctgaaggcctgctttttcactctttgctgtctgaagtactggaggatgaaatgtctattttctcagaaaaaaatcaaaatccactctcccctgcctctgccacctcagactgtgtctcatatctgtgcctcagacatgaccattccctaaactgcaggatagctttaaaagctggtttattcatacttacacagcatttttgttgagggggtaaacagaaatctaattccatatgtttcttaggctcttttatggtgttcctttagtgtcatggggagaaaaactcaggctcgcgttcccttttaatatggtgtggatttctaacttcttgtgagcaaaggcttctacaacaacacaaacccttccctggaaagatga

SEQ ID NO: 803197 - DNA, 546 bp, Homo sapiens
tgcaaacaggtcaaaatgaagggtagaaggagaggtaaataaaggagcataagacgggaaaacaaaaattgtgagagaaaggttattgggttaagtttttcaaatttttaatttgttttggttaaaatgtcttttaagaaaacaaatgtaaaatatgcattttctttggaaccttcttcataccaagacaaatagaagacaatgggatgttttgcttccttttggtcgccaaatgcctttcaaatggcaaaagaaaagattatgtaaaaaaaaaaaaaaatcccraagatatcaccaggagcttaaattacctggaaaaactatgacatatagaaagaggcatagagaaatgtggcttataatgtgattatgcatcatgagcacaagtgtaacccacaggacatgcatacttagactgaatcaaacctctgaaagtttggtaatagttggctctaagttttgtttctgcttgttatgtttggagcttgtaaactaaggtctgcttgtcttaaatcctaaacacagcaacctgtgagtcccaggaga

SEQ ID NO: 803198 - DNA, 604 bp, Homo sapiens
gttaatggtatcttattgaatttcaaagagcccttatatttaaattatctttttatatatcctataccttaataaacatttaacaacttagtggactagcatggtatttcctgagaagaaaaaggtgtatgtgtgtgtktgtgtgtgtgtgtgtgtgtgtgtgtgtgtgtgtgtgtgatgaatttgatgaatttttgcatatgtgcttacactacctacaccaagcacactctaatctccaaaatgtttccattgttccattatggcaaatatcattccctagagataatcttctttccagtttttaacaacagcttcaaaagatcttgtcaatagtattctaaatttacagtctcatcagcaatgtagaaatgtatagtctcatgagcaatgtaagaaaattctagttgttccacatatttgataatgcttgtcatttttagactgtttaattctgactattcttgtgggcatttagtaatatccaagtattgatttaatttagtttttgcctgatgagtaatgatactgaccaccattttatatgtgtattggccatttagatattctctttttaaaagtacctgctcatgtatttcgtcca

SEQ ID NO: 803199 - DNA, 659 bp, Homo sapiens
cctgaagtttctttacttgaaattaatataggaacctcagctttttttttttgattaatgttttcatggaattttttttaattcttttaccgcaacctgaatcttggtagtcagagtgtgtttttcttttatagtcaccatgtagttgggtcctgagtgtataaagtttttttttttttttaacccatgctggcaagcttagttttataattgctttatttatatcatttacatttaaggtgattattaatatagttagattgatatctgttatgtttgtgactattttccactcatagcgttaggtctttatttctattttcctatgttttcttccttttctggtattaaatgtataatttatatgattgaattttatctgcyctcttgaaaggtatatcaattatacttatttctatttttatttttagtgtttcccctggagtttacaatatatgttcttaactaatataagttcaccttcaaataatagcatagcaattcacatttactacatgtacctactaatagaatatcccaaatttctttcacctctctttataacgtttcacttatctatattctcttttaactaataccttgtgactatttttgccttaactgaacagttatgttaaagcaattaaggatagaaaaat

SEQ ID NO: 803200 - DNA, 659 bp, Homo sapiens
cctgaagtttctttacttgaaattaatataggaacctcagctttttttttttgattaatgttttcatggaattttttttaattcttttaccgcaacctgaatcttggtagtcagagtgtgtttttcttttatagtcaccatgtagttgggtcctgagtgtataaagtttttttttttttttaacccatgctggcaagcttagttttataattgctttatttatatcatttacatttaaggtgattattaatatagttagattgatatctgttatgtttgtgactattttccactcatagcgttaggtctttatttctattttcctatgttttcttccttttctggtattaaatgtataatttatatgattgaattttatctgccctcttgaaaggtatatcaattatacttatttctatttttatttttagtgtttcccctggagtttacaatatatgttcttaactaatataagttcaccttcaaataatagcatagcaattcacatttactayatgtacctactaatagaatatcccaaatttctttcacctctctttataacgtttcacttatctatattctcttttaactaataccttgtgactatttttgccttaactgaacagttatgttaaagcaattaaggatagaaaaat

SEQ ID NO: 803201 - DNA, 580 bp, Homo sapiens
aaacaattgaacaagcaaaaagcaaatcaccccactaagagacacttcacacacacacacaatacaagcagccaacaaaaatatggaacacatttcaaataaaaatcatcagaaaattgcaaattaaaaccacaatgagatgcattcaaaccagtcagaatggctactattaaaaagtcaaaaagcatcacatgctggcgaggctgtctagaaaagaaaaaacgtatgcactgttgatgagaatgtaaattacttcagccactataaaaaaataacaacttaaarcatagctacaatttgacccagcaatcccattgcaggacatatattcaaaagaaagtaagtcatttgaccaaaaaacaaacaaataaacaaacaaaaccacacatacactcgtatgctcatcaaagcaccattcacattcgcaaagacatggaattaacctaggtgtcggaggcatttgaaccaaccctcatggctgctctgcctacggaatagccattcttttattcctttactttcctaataaatttgctttcactctactctaaagacttactcggaattctttcttgtgtga

SEQ ID NO: 803202 - DNA, 555 bp, Homo sapiens
acaatatgttttcaattttcttaggtaaatacctatgcatgggattactggtttatatggtaaccacatgtttaacattataaaaaactgacaaactatattccacagtggctataccattttgcattccaatagcaatgtatgaaaatctcacttgtttcacagtctcaaccrcactgtatgtattatccttattattttgtctattctagttggcatgtaatggtgtcccattgtggtttcaatttgcatttctctaatgaataataatattgaacatttcctcatgtgctttttgcctcccatacttctcctttagaggtgtctgttcaaatcttttgaacattttctatgtgtgttatctcattataattatattcttactgtttttttacacagaagactaagattcaaatcctctatcaaagtatatgtttttacaatattttcttccagtctgtgacttttaatttcattttcttattaaagtctttgaaaacagatgtttctagtttgatgaagactaatttagctaaaaatctcttggtatatcgt

SEQ ID NO: 803203 - DNA, 634 bp, Homo sapiens
accataaagcaatattattgctaacgtgcttctaactgtaattgcattttagtgaaagatgaatgtttttgtggttgtttttgtaattactatcattctttggtagtttctatttgtttttgctctttagttacattttcaagtttttttaakttttttttttaattagtgaggtaagcttagtacaatttaaacctctcatacagactttaataattaaaaaaaacaaaattatgaccaagcacggtggctcattcctgtaatcccagcaatttgagaggccagtgtgggaagattgcttgagtccatgcatttgagaccagcctggtcactacagtgcaaccctgtctctataaaaaattaaaatattaggcgggcatggtggtgcatggctgtagtcccagctatagtcccagctattcaggaggctgaggcaggatgattgcttaagccaaggacttcaagggtgtagtaatctatcatcacaccactgcactccaggctggcaagagagcaggactctgtcttggaaaacaaaaacaaaacaccaaaatcatctttctatttacatagaaatgcccttcataatttattgtcttttatcatttgccaaggaatagggtcataaggaggt

SEQ ID NO: 803204 - DNA, 620 bp, Homo sapiens
cgagttgtctggcattgtgatgcagagtgagatgattttttaaatataattctatcatatgttcattctttaatttcattttcttcccttcataagataaaatttaaatgatgcaaaatggtcagttttaaaatgtctttttccttccctcagtttgaattccaagatagctctgtttcagcaaaaataactcttaacatttttaactatcccttttactcgtttggcttgataattttcaagctagataagaaaatcaaatttgttttatttgaatarcaaaataatatttacaaaaatataatttgtcatatgcgtcatcatgaatgtgtacaggttatgtacagttttatatgtttcttcatccaatggtcagaaaattatgaaagtcatcttgggttttgttcagccatcttgaattttgtatgctttctcttttataactgcacacctggctttcttacgattaattttggaagcaggaacagacccagaaagcagaaaaataggctttgagagcctcggtgtactttcttggttgaactgacagtaaaattcaaaaggaattttctaatgaatcctaggaagcatttacatagataaaaataaattagcaaatg

SEQ ID NO: 803205 - DNA, 591 bp, Homo sapiens
tttctttttttttcctatgaaacggagtcttgctatgtcacccaggctggagtgcagtggtgcaatcttggctcactgccacctctaactccccagtacaagtgattctcctgcctcagcctcccgagtagctgggattacaggcacgcaccaccatggctggctaatttttgtatttttagtagagacggggtttcgccatgttggccaggctggtctcgaactcctgacctcaagtgatctacccacctctgcctcccaaagttctgggattacaggcgtgagccaccatgcccggccttcttttttctttctttttaaaactatgctagccacttaatgatcactctgtgtctgaagattcagaatacatctcagctcttmgaatgtcggtatagtatatatatatatgtgtatatgtctatatatatatatatatataatgcatatatatctattataacccctcctctctaaattttttctctctttgggaattctatttatatatcttatcctttggagtgctttcctatgtttcttttccatcatattgtctgttgtttttgtcccccttctgcatccagaaac

SEQ ID NO: 803206 - DNA, 612 bp, Homo sapiens
aatacttcctcattcctcatcactcatcatttgcctggtgaaatgctttgtcccgaacctgccctatattactttatacatgttgtaccttcttcctgctatgttattcttcctcttgcccctgtttccaccccatccacctagcaaatttctgcttttattatctcagtgaagctttcacccagctacagtcaggcattccctcagggtgctctatctctagtctgctatgaatctattaatagttgtaatataacttttctcacctgtgttttacacacatatacacaacacagatgtgcacmtatatgagtatctgtaggctgggagtttaactactacgacagttttttttggtttccccaggggtttggcacacatagccttattaaatgtgtaaatgaatgagtatagaaaaaatttgaacttgtaaacataaatagattttccccagtctcggcaacatagtgagacctcatctctacagaaaattaaaaaattagctgggtgaggtggcacatgcctatagacccagtgacttgggaggctgaggcaggaggattacttgagcctgggaggacaaggtgccgtgagccgtgatcacaccactgc

SEQ ID NO: 803207 - DNA, 586 bp, Homo sapiens
aatcaaatgatttctgtctctattttcttgagtaccaattgtaaaaactgaaattaggttgaggaaagtgctttagaaataataaagatgtacaaataccaggctttggattttttattagttctgcaataaataataggtttatagttcacctgttgttgatctcatcagtggtcgccaagtaagagggtgaatcactcatcccmagagactctgctacctcttagctctggagggtaaaaagcaagggccagagcaaatacattggggagagggggagaaaaaaaaaatcaggctattttaatagccctcacatgccaagtgcttttgattcatcatgtttagttttcataagcttgtgaggtagataatattatccccattttatagatgagggaatttaggctccaatgggttaaataacttgtacaagtacacatactgaatgactgccatgaggagggatgtgaattttggtcacgtgccaacacctacactcttcctaccataccacactggacaggtaattgtctagtccctcctgaaccactggtcacctccccaagctgttaagaggagcgagggg

SEQ ID NO: 803208 - DNA, 491 bp, Homo sapiens
gggactaagagtaggaaggagccaagacgcccagttaaaaagtgcccaggtaggtccagcataattatttgcctggctggcgagttttggggccctaactttaagcttttttatgttgtcatatagcaggctggattgatttagataaaaacaacattcttcatttaaaaatatgcagagttctcctttttcagcagtgagtaggtcaaggccttggtgattttggaggacaactgcgactaaggaaccgacctgggcccgaaggactgataaagtttgtgatatatctgtaatgctagcaggaaagtcattagaaakacaatggaaggttgtgacagaagttgaaatgccaggtaggtcagagagatacagtcatgggggtcaggtgtggtatcaggaataatgtgggaggccggattgaagtctgggccaggaacaatggtaattatgggagactcaacaaagagtgagtatagctgaaggagctggag

SEQ ID NO: 803209 - DNA, 641 bp, Homo sapiens
atccatctgatctctcgcaggtttgcatatgccccgcccccatgcctcgcagcaggccccctggagatgcatgctccccagcctggtttgcacatcctttccctggttttgctgggcaccctcccggggtgtgcacaccctttccttagaaggctctgccagctttttgcacacctgcctgttgccccagctccttcgcctcatttgcacaccctcctgggttggcatcgcccccaccccccaagcctgcaccaatctcccgctcacagcccaccctccacccactcgctgctcccacagcctacggcaaggtgttcctggtgcggaaggcgggcgggcacgacgcggggaagctgtacgccatgaaggtgctgcgcaaggcggcgctggtgcagcgcgccaagacgcargagcacacgcgcaccgagcgctcggtgctggagctggtgcgccaggcgcccttcctggtcacgctgcactacgctttccagacggatgccaagctgcacctcatcctgggtgagcgcacaccacatcccaacgggggtggggtggctgggggcaggcgaggccacctgacggggctgcttcctgacttccactgcacctcccagactatgtgagcggcggggagatgttca

SEQ ID NO: 803210 - DNA, 653 bp, Homo sapiens
cgccccaatcccatgccttcccttggatcccacaagtccctgctccctggttcctgaagctccaccgtcaccagcctgcccttctcaacttctgtctgtctgcggcagagccttctgctcataacacttctccatcccactactcctctaagactctttggttttttgtttttgttttgagacagagtctcactctgccacccagccaggagtgcagaggtgtgatctgggctcactgcaacctctgcctccygggttcaagcaattctcctgccttagcctcccgagtagctgggattacagatgtgggccaccacgcctggctaatttttaggggtttttttgtttttttgggtttttttgagacggagtcacactctgtcacccgggctgaagtgcagtggtgtgatctcggctcactgcaacctcctcctcccaggttcaagcaattcccctgcctcggcctcctgagtagctgggactacaggcgcccactaccatgcccagctaacagctaatttttgttgttgttgttgtatttttagtagagatggggtttcacggtgttcatcaggatgctctcgatctcctgacctcatgatccatctgcctcggcctcccaaagtgctgggattacaggcatgagccaccac

SEQ ID NO: 803211 - DNA, 653 bp, Homo sapiens
cgccccaatcccatgccttcccttggatcccacaagtccctgctccctggttcctgaagctccaccgtcaccagcctgcccttctcaacttctgtctgtctgcggcagagccttctgctcataacacttctccatcccactactcctctaagactctttggttttttgtttttgttttgagacagagtctcactctgccacccagccaggagtgcagaggtgtgatctgggctcactgcaacctctgcctcctgggttcaagcaattctcctgccttagcctcccgagtagctgggattacagatgtgggccaccacgcctggctaatttttagggktttttttgtttttttgggtttttttgagacggagtcacactctgtcacccgggctgaagtgcagtggtgtgatctcggctcactgcaacctcctcctcccaggttcaagcaattcccctgcctcggcctcctgagtagctgggactacaggcgcccactaccatgcccagctaacagctaatttttgttgttgttgttgtatttttagtagagatggggtttcacggtgttcatcaggatgctctcgatctcctgacctcatgatccatctgcctcggcctcccaaagtgctgggattacaggcatgagccaccac

SEQ ID NO: 803212 - DNA, 653 bp, Homo sapiens
cgccccaatcccatgccttcccttggatcccacaagtccctgctccctggttcctgaagctccaccgtcaccagcctgcccttctcaacttctgtctgtctgcggcagagccttctgctcataacacttctccatcccactactcctctaagactctttggttttttgtttttgttttgagacagagtctcactctgccacccagccaggagtgcagaggtgtgatctgggctcactgcaacctctgcctcctgggttcaagcaattctcctgccttagcctcccgagtagctgggattacagatgtgggccaccacgcctggctaatttttaggggtttttttgtttttttgggtttttttgagacggagtcacactctgtcacccgggctgragtgcagtggtgtgatctcggctcactgcaacctcctcctcccaggttcaagcaattcccctgcctcggcctcctgagtagctgggactacaggcgcccactaccatgcccagctaacagctaatttttgttgttgttgttgtatttttagtagagatggggtttcacggtgttcatcaggatgctctcgatctcctgacctcatgatccatctgcctcggcctcccaaagtgctgggattacaggcatgagccaccac

SEQ ID NO: 803213 - DNA, 646 bp, Homo sapiens
atccatctgatctctcgcaggtttgcatatgccccgcccccatgcctcgcagcaggccccctggagatgcatgctccccagcctggtttgcacatcctttccctggttttgctgggcaccctcccggggtgtgcacaccctttccttagaaggctctgccagctttttgcacacctgcctgttgccccagctccttcgcctcatttgcacaccctcctgggttggcatcgcccccaccccccaagcctgcaccaatctcccgctcacagcccaccctccacccactcgctgctcccacagcctacggcaaggtgttcctggtgcggaaggcgggcgggcacgacgcggggaagctgtacgccatgaaggtgctgcgcaaggcggcgctggtgcagcgcgccaagacgcargagcacacgcgcaccgagcgctcggtgctggagctggtgcgccaggcgcccttcctggtcacgctgcactacgctttccagacggatgccaagctgcacctcatcctgggtgagcgcacaccacatcccaacgggggtggggtggctgggggcaggcgaggccacctgacggggctgcttcctgacttccactgcacctcccagactatgtgagcggcggggagatgttcacccac

SEQ ID NO: 803214 - DNA, 650 bp, Homo sapiens
tagaggcaggaagggccctgcttagctttatctgtatccctaataacacacttagggaatttgtgcttcctgtctctccctctgccatccatgcccctgccagcccccaggtcagggctctgtaggatgaaaggtcctgattccctgtgggggcacacttctgccaggggacacggaaagagtcctgctgaactctaagctatagcttctgcctgtcactgcaaagactttgtatccagagaccagtatgcaagaagagtcaytgcctgggctcaggcaattaacccagttcttcaggaggaggaagtgcttatgtgacacagtaagggcagggagaaatgtgtttgccactcacatgatccatttggaccctacttgaccaaatttgatagtaaacagacaattacaccaccatagcttgaaaatagcatggcagccagggtctcagacccctcagaaatgaagatttgggtcctgccaccaggtaagacaccaatactaggagaagcattacctgaggctgaggctgatatagaatggacaccagagaagggagagagtaaaaatcagttacatcccctaaatcaattgctgtgagaaaaatgagaattctctccgaaattccaaataaaataaattctccctttatt

SEQ ID NO: 803215 - DNA, 635 bp, Homo sapiens
cacagccataaaaaagtacaagatcatgtgctttgcagcaacatggatggaactgaaggtcattatcctaagcgaactaatgcaggaacagaaagccaagtaccacatgttctctcataagtggaagctaaatattgagtacacatggacacaaagaagaaaacaacagatatggggcctacttgagggtggagggtgggaggagggtgaagactgaaaaactgcctatggggtactatgcttattacctgggtgatgaaataatctgaacacaaaaccctggtgacatgcagtttacctatataacaaaactgcacatggactcttaaacctaaataaaagtttaaaatatatataatgccaataatttagagtattggaggctgtttcctktaataaaatttcctacttagaaaacttttagagaattatgtggatgtgcaaaacatgtattagagctcaaatactgattttgtttatcttggctttttcaagcctcacttaaagtgcttagctcacttttacacttaaaaataatttgttatttgtttttctaaatgcctagggtggtacaccttcattactggcaaggtggtttttgttctctgcctaactagatagtggtaaatacactt

SEQ ID NO: 803216 - DNA, 635 bp, Homo sapiens
cacagccataaaaaagtacaagatcatgtgctttgcagcaacatggatggaactgaaggtcattatcctaagcgaactaatgcaggaacagaaagccaagtaccacatgttctctcataagtggaagctaaatattgagtacacatggacacaaagaagaaaacaacagatatggggcctacttgagggtggagggtgggaggagggtgaagactgaaaaactgcctatggggtactatgcttattacctgggtgatgaaataatctgaacacaaaaccctggtgacatgcagtttacctatataacaaaactgcacatggactcttaaacctaaataaaagtttaaaatatatataatgccaataatttagagtattggaggctgtttcctttaataaaatktcctacttagaaaacttttagagaattatgtggatgtgcaaaacatgtattagagctcaaatactgattttgtttatcttggctttttcaagcctcacttaaagtgcttagctcacttttacacttaaaaataatttgttatttgtttttctaaatgcctagggtggtacaccttcattactggcaaggtggtttttgttctctgcctaactagatagtggtaaatacactt

SEQ ID NO: 803217 - DNA, 552 bp, Homo sapiens
agacccctctcatttgtgtgtatatgtgtgtatgtgtgtgtgtgtattcacttcctcttgcaaatgaatcagactacatacaaaccttctcacatgtcataagatatttttattctgctgtaatactctgttgtgtttaacatggaagatacaagaagaccagataccaaactaggctggacataggcaggtaggcgtcagtttccttctgccttccattcgcctttcaaacagctcatctaacatttgctggtagccygcttatctagtttagatttttttcaccttggaatttctggcttagctggtcaggtgctatattttcgctggtacttccaatatccccttgaatcattactcttcactttttgattcatacttaccaagactataagaaagtttcctgagttttgatactttccatttttatgactagaaataaaagtagcccaataaatttttaaattactttttcttcagtttgccttctgtttcttttccagaaaattctacccccattttctcccttcccttctttcacactgagacact

SEQ ID NO: 803218 - DNA, 533 bp, Homo sapiens
aatggcctatgatataattagtcgaggtatccttgttttctttttgttcttctaattctgaaactcgacattttaatgagtggtattgtttaggttggattaggaacagtccccaaataagggagaggccgactaggcattttggaggccaagctgtgcaagaagaccagaaagaacaaagctcagaggttccttgagcctggtgcctttaggggcctgaagaagaacagatctcacactttttcttttgctttgtatttagaactctgttgggagaaagataaaggtagaaggatgcaaaattctaacaatgggagaaatgacagctgcaaggagagggagggggaagcaactcttctaaaacataaaaggrtcatatgatatttatgaaaaaattgattatttcaaaaagattcacaatcccattctctaacacataatctatttttactttcccgcatcctataacttggatcttgataagactcgattcgttgttttatgtggtttgcaatctcaacaaaacaaaattt

SEQ ID NO: 803219 - DNA, 629 bp, Homo sapiens
tggctaggagcacaggcagtttattcgcaaggactggaaagaaggcctacaacctgggcatatgtggtgggtaattagattttctcagtgaaataggaagcccagtgggttaccatcttctctccagatgtctaccggattccccaccttcacaatattgctcaaacgtcacctcaraaaggctgacacagacctgaccattctacttcaaatcacaccctccactcgaaattcctctatccatccctcaaccctgctttatattttttttttctttttgttttgtttttctgaaacggagtctcaccctgtcacacaggctggagtgcagtggctcgaccttggctcaccgcaacctctgcctcccaggttcaagcaattctcctgcctcggcctcttcaggtgcacttcaggtgcacgccaccacacctggctaatttttgtgtttttttggagagatggggttttgccatgttggccaggctggtctcaaactcctgacctcaggtgatccgcccacttcagcctccctaagtgctgggattacaggcatgagccaccgcggccagcccgctctacgttttttttgttgttgttgttgttgtttgtttgtttgctttgttagcatt

SEQ ID NO: 803220 - DNA, 589 bp, Homo sapiens
agcagcagggttctgctgcatctggatcccaaatttcttgctcatgcctaagccattatatgaagccacaaagtggggagaaatggagcccctcctctgggaggccaattaggagaaggccttaaaaacaatcaaagaagcgttaattcagaccccaaacttgggactgccagacctaactaagcctttctttttgtatgyccatgagtgaaaagaaatggccataggagtcctgactcaagtcataggaccttggcatcgcctggtggcatacttgtccaggcaactagaatctgtggtgcttggatggcctacttgtttcaatgtgctaactgccactgccctactggtgcaagaagataataaactgactttatggcagcaactgaaaatccgggtaccgcactcagttataactttgatggaccaaaggggacaccttaggttatcacatccaaaaatgactcgataccaagggcttctatgtgagaatcccagcatagctttagagactgtgaacaccctaaacctggctacctttctctccatcttgtcagtgccaggaagccccctttagtcctgtgtggat

SEQ ID NO: 803221 - DNA, 589 bp, Homo sapiens
agcagcagggttctgctgcatctggatcccaaatttcttgctcatgcctaagccattatatgaagccacaaagtggggagaaatggagcccctcctctgggaggccaattaggagaaggccttaaaaacaatcaaagaagcgttaattcagaccccaaacttgggactgccagacctaactaagcctttctttttgtatgcccatgagtgaaaagaaatggccataggagtcctgactcaagtcataggaycttggcatcgcctggtggcatacttgtccaggcaactagaatctgtggtgcttggatggcctacttgtttcaatgtgctaactgccactgccctactggtgcaagaagataataaactgactttatggcagcaactgaaaatccgggtaccgcactcagttataactttgatggaccaaaggggacaccttaggttatcacatccaaaaatgactcgataccaagggcttctatgtgagaatcccagcatagctttagagactgtgaacaccctaaacctggctacctttctctccatcttgtcagtgccaggaagccccctttagtcctgtgtggat

SEQ ID NO: 803222 - DNA, 577 bp, Homo sapiens
gaaatagttcattactgaacttggctattaaaaataaaatggaagttacacacagcctaccggccacagagctcaagaaaagtgaagcacatgaactggacactcaagcagctgctgaagaaattttgttaggaaactcatctgaggtgggatcaggtcttgcccatggtcctcctccaagtcaggtgtkcccacgccaaacaaactgggtattcaccctaggagaacttattcagccggccacctgaattatatgtcagattaaaggtgatctctgtgagctaggagaactaattttaaggaggcaaatgcaggctttaggtatggccatgccaaaagtacatggctgggtgcaggaaagaatgcctataagtctgacagacactgtataccgtttcaaacctggtgattctgtttgggttaagaaatgtaatccaaccacattaggacccatatgggatgggccccatcctgtaatcttgtccactccaactgctgttcaagttacaggaaccgtgcttggatccactacagttagctgaaactagcagcccaggacaagtggaccagccaggag

SEQ ID NO: 803223 - DNA, 652 bp, Homo sapiens
tttccttttctgcgtaacaatgatgaaaggtagcctaggaaagccatttgtctgagactttactttgataccttgctagtcactaaacaaagagactgattccattctttagtgtagccattgcctcaattcatatatatcagggttatttatttccaataaagtatccatatagattaggtatattctaatgacaattttattaaagtccttcatttatcttccakatagcagattctgtcaaccacatttcataaagagttctgattctaagaggtaagaactgagcctggctttctagttacatgtttactactaaacccgtccttccctactacacttatgcatatttaaagactagactctcccctgcctccagcctggattgtaagttccacaagagcatggctgtgtcttctaacatcaagtctctatgttagaaaagctcctggcatatcataaatgccgaataaacatttgtaagtgaagaaacctattctatggtttcttctacggatatattaagagatggcttgcacaagatagctaggtagcttcattgtctaaaatggaactagattctccgggtatcaggtccattggtggtacttacacgtggcctcaaaggaacagaactgccccacaaatctgt

SEQ ID NO: 803224 - DNA, 573 bp, Homo sapiens
tatggtttcaaaatctgactctggcatttatctctaagaacttgagaaatttacttagtccctctgagatttggtgtattcagaatgaatatgatactaacagtacctacatcacgagtgttacttgaatggagatgtataaagtgcattttaaattcatttgtttccttaacattttcccttcatttcttatcttttcagagtttcttcttcaaggtctcaaggtctgaagcatcccacagaatgatcctactgaataactcccataagctgctggccctatacaaatccttggccaggagcatccctgagtccytgaaggtcagggaacagtgggaggtcagggtatgggagtaggggtgttgaggatgagaaaatagcaggcttgtgattctagtccttcctgactgtttgcagagggttggagctgggaaacaggatgggactgggggcacaggctgcatatcaagagctgctgcttctctttgggaagaggcagctaggtccactctgcaggttttgccactcatttggagaggcagtggagcatggtggctacgaacatggtttgga

SEQ ID NO: 803225 - DNA, 600 bp, Homo sapiens
caacaaaattcaacagcctttcatgataaaaactctcaatatactaggtattgatcgaatgtatctctaaataataagagctatttatgacaaacccagagccaatatcatactgaacgggcaaaaattggaagcattccatttggaaaccaacacaagacaagggtgytctttctcaccactcctatttaacatagtgttggaagttctggccagggcaatcaggcaagagaaagaaatgaaaggtattcgattaggaaaaaaggaagtcgaattgtccctgtttgcagatgacatgattgtatatttagaaaaccccatcgtctcagcccaaaatctccttaagcagataagcaacttcagcaaagtctcagggtacaaaatcaatgtgcaaaactcacaagtattcctctacaccaataagaggcaaacagagagccaaatcatgggtgaactcccaatcacaattgctacaaagagaataaaataccttgaaatccaacttacaagggatgtgaaggacctcttcaagaactacaaatcactgctccatgaaataaaagataacacaaacaaatggaagaacattccatgaccatg

SEQ ID NO: 803226 - DNA, 595 bp, Homo sapiens
cagattatctcagataatctcatattatcttcttaagaagtcggctgggaaaatattagcacagtttttttggcgaacaaaacaggttcttagaggtttatcaggtattggtgaaagtgtggagaaataggtatccccacaaatatatgatatcctcaaacttaattttggctaatttgataagtaaaaaatggtattgttttttaaaaaatttggtgggtacatagtaagggtatacatttgtggagtacattagatattctgatacaggcaaacaatgcataaccatcacatcgggcaaatgaggtagcyatcactttaagcatttatcctttcttcgtgttgaaaacaatctaactatacccttttagctattttaaaatacacagtaaactattgttgactgtagtcaccctgttgtgccatcaaatacaagatcttattcattctatttaaatatttttgtactcattaaccatccccaattatcctccacctcccacctccctctccccatccactactgttcccagcctctggtaaccatccttctactctccatgagttcaattgttttaatttttagctcccataa

SEQ ID NO: 803227 - DNA, 595 bp, Homo sapiens
cagattatctcagataatctcatattatcttcttaagaagtcggctgggaaaatattagcacagtttttttggcgaacaaaacaggttcttagaggtttatcaggtattggtgaaagtgtggagaaataggtatccccacaaatatatgatatcctcaaacttaattttggctaatttgataagtaaaaaatggtattgttttttaaaaaatttggtgggtacatagtaagggtatacatttgtggagtacattagatattctgatacaggcaaacaatgcataaccatcacatcgggcaaatgaggtagccatcactttaagcatttatcctttcttcgtgttgaaaacaatctaactatacccttttagctattttaaaatacacagtaaactattgttgactgtagtcaccctgttgygccatcaaatacaagatcttattcattctatttaaatatttttgtactcattaaccatccccaattatcctccacctcccacctccctctccccatccactactgttcccagcctctggtaaccatccttctactctccatgagttcaattgttttaatttttagctcccataa

SEQ ID NO: 803228 - DNA, 585 bp, Homo sapiens
  misc_feature 1, 2, 3, 4, 5, 6, 7, 8, 9, 10, 11, 12, 13, 14, 15, 16, 17,18, 19, 20, 21, 22, 23, 24, 25, 26, 27, 28, 29, 30, 31,32, 33, 34, 35, 36, 37, 38, 39, 40: n = A,T,C or G
nnnnnnnnnnnnnnnnnnnnnnnnnnnnnnnnnnnnnnnnttattttctgttaggttagattttatgcacataagaactaggtattgagataatgatgcttctttgccaacaatgaagagtagtaaggatgttaatttttcaatacaatggaataattttgcttgcttgtttgttcgttcatttgtttgtttgtttgagacagggtcttgttatgtggcccagactggtcttgaaytcctgggttgatgcagtcctcctgtctgagtctctcgagtagctaggattacaggtgtgtgccacctcactcagcacaactcagttcttttggtggaactcttttaaaaatgtcattaaggtctcagctttcctgaacctttaaaaggaagtattactttatttatttatttttttatttattttgagacggagtttcgctcttgttgcccaggctggagtgcaatggtgccatcttggctcaccacaacctccaccttccaggttcaagcgattctccttcctcagcctcccaagtagctgagactacaggcgcccgccaccacgcctggctaatttcttatattttt

SEQ ID NO: 803229 - DNA, 566 bp, Homo sapiens
  misc_feature 1, 2, 3, 4, 5, 6, 7, 8, 9, 10, 11, 12, 13, 14, 15, 16, 17,18, 19: n = A,T,C or G
nnnnnnnnnnnnnnnnnnnttattttctgttaggttagattttatgcacataagaactaggtattgagataatgatgcttctttgccaacaatgaagagtagtaaggatgttaatttttcaatacaatggaataattttgcttgcttgtttgttcgttcatttgtttgtttgtttgagacagggtcttgttatgtggcccagactggtcttgaattcctgggttgatgcartcctcctgtctgagtctctcgagtagctaggattacaggtgtgtgccacctcactcagcacaactcagttcttttggtggaactcttttaaaaatgtcattaaggtctcagctttcctgaacctttaaaaggaagtattactttatttatttatttttttatttattttgagacggagtttcgctcttgttgcccaggctggagtgcaatggtgccatcttggctcaccacaacctccaccttccaggttcaagcgattctccttcctcagcctcccaagtagctgagactacaggcgcccgccaccacgcctggctaatttcttatatttttat

SEQ ID NO: 803230 - DNA, 539 bp, Homo sapiens
ctggagtgcaagggcgccattattgttcactgtagccttgatctcccaggctcaagcgttcctcccacctcaacctcctgagtagctgggaccacaggcaattgcctccatacctggctaattttttattttttatttttatttttattatttttttgagacagagtcttgctgtgtcgcccaggctggaatgcrgtggcgtgaccttggctcactgcaacctctgactcccgggttcaagcgattctcttgcctcagcctcctgagtagctgggattactggtgtgtgtgaccacgcccggctaatttcttttgtatttttagtaaagatggctttcaccatgttggcaaggcttgtctcaaactcctgacctcaggtgatctgcccatctcggcctctcaaagtgctgggattattggcgtgagccactgcacccggcctaattttttaatattttgtagagacagggtctcactctgttgcttaggttggttcaaactcctgggctcaagtgatcctttttccttggcctccccaa

SEQ ID NO: 803231 - DNA, 644 bp, Homo sapiens
actatttgcaaattttatcataattgctgactttaaaattttaatcccgtaataagattcaagtccaccatattagctgcaataatgagagttataggggtaggcagagaggctcacacctgtcatctcagtgctttgaggggctgaggcaggagggtcgcttgaggccaggagtttgagaccagcctgggcaacatagtgagacttcgtctcataaaaatcagccaggtgcggtggcttatgcctacaatcccagcactttgggaggcaaggtgggtgatctcttgaggccaggagttcaagaccatcctggccaasatagtgaaaccctgtctctactaaaattacaaaaattagccaggcgtagtggcacatgcctgtaatcccagctactcaggaggctgaggcacaagaattgcttaaacgcaggctaccttctttgggtcccctccctttgtatgggagctctgttttcactcttaaatcttgcaactgcactcttctggtccgtgttttgttatggctcgagctgagttttcgctcaccgtccaccactgctctttgccgccatcacagacccgctgctgacttccatccctccggatccggcagggtgtctgctgtgctcctgagcgcccattgcc

SEQ ID NO: 803232 - DNA, 644 bp, Homo sapiens
actatttgcaaattttatcataattgctgactttaaaattttaatcccgtaataagattcaagtccaccatattagctgcaataatgagagttataggggtaggcagagaggctcacacctgtcatctcagtgctttgaggggctgaggcaggagggtcgcttgaggccaggagtttgagaccagcctgggcaacatagtgagacttcgtctcataaaaatcagccaggtgcggtggcttatgcctacaatcccagcactttgggaggcaaggtgggtgatctcttgaggccaggagttcaagaccatcctggccaagatagtgaaaccctgtctctactaaaattacaraaattagccaggcgtagtggcacatgcctgtaatcccagctactcaggaggctgaggcacaagaattgcttaaacgcaggctaccttctttgggtcccctccctttgtatgggagctctgttttcactcttaaatcttgcaactgcactcttctggtccgtgttttgttatggctcgagctgagttttcgctcaccgtccaccactgctctttgccgccatcacagacccgctgctgacttccatccctccggatccggcagggtgtctgctgtgctcctgagcgcccattgcc

SEQ ID NO: 803233 - DNA, 587 bp, Homo sapiens
agtgccttacccatagaaaatgcttaataaatatctgtaaatgaatttatataaaagatgttcttaatagtgacagctattattagatattttctcaactctggcttgtcctgaatattttttaaaaatagattttaattagactctgcctcagaaagaactcaagtgaaatattttttaatatgccctatattttctatatatttgagatttataaaagtaccctatcagataggaattattgtaatggggaaaacaaactagtttaaaattttaaaatataaataggctgggcatggtggctcragcctttaatcccagcacttcaggaggccaaaatgggaggattgcttgagccctactgatgaaggtgccctatatatataaagccctagatgtaaggggcaccttcatcagtaaggaacaggactgtaagacatctataaaggaaagaatgaggtaggcctctatatggatgactatccataatacagtaatgtaagtgggggaaaaagttatagaatacatatagcactgacctatttatgtaaaatggttataagtatataaacgtatatctatatgtg

SEQ ID NO: 803234 - DNA, 626 bp, Homo sapiens
ggcaggttggagaccgagtcagtccctcatcacacattactaaatgccactgcatgcgaggagatacagatacagatgctggagatacagatgcaaaacatcagaaatctgtatggtcatggattttttttttttttttgagacggagttttgctcttttkgcccaagctgtagtgcaatggcacaatctcggctcactgcaaccttcgcctcccgggttcaagtgattcttctgcctcaacctcccgagtaactgggattataggcatgtgccaccacgcccagctaattttgtatttttaatagagatagggtttccccatgttggtggggttggtctcgaactctcaacctcaggtgatccgcccacctcggcctcccaaagtgctaggattcaggcgtgagccaccgcacctggccgtggtcatggatgctatggtgtggtaaggagacaggcagtgaacatcccaaaaacaagtgccaggtggtgatgtgtgctgtgttggaggtgatgcataaggggaatggggtgctctagtgaggggagatggtcttcagcaacaagccagaggaagggagggaatattgagaagagatgaggaagaactagcacacataactgagaa

SEQ ID NO: 803235 - DNA, 483 bp, Homo sapiens
gccctctcagaacaggtgggcccacgcttccctgtccagcctccaaccctggggggacatctcttcccacccccactacagggagcagggcagcctgctgggctgcgagcctcttgggataagcccgcaacgcctcccatgtcggtggctacacgcatccaccttcagtggagccaggacccgcaagaccctcttcacagggcggcacctctcacctgcttctcccctttccccgctcrgcaagaggaatctggagccagcctttgccccctttagacaggctgcccctcctactgctccccaagtctgtcctctgggggaaacacagaagaggaagagaaggaccaggggctgttccgtcctttcagcactggtcaaatttccatgtgagcctcagtttcccccagtgcaaattgggtgcccatcctcactccatccaaagagcatcaggcactcctcagcccatccagtagacagtgagcc

SEQ ID NO: 803236 - DNA, 540 bp, Homo sapiens
agaactcaggggctgtggagctgggatcctcatccccattcgcaggtggaggtgacagctgcttgctgccaccagggccagggcctcgctttctgaaccacgtgggagcaaggagtcaactagatcacagtgcagagcgcccagcacggtgctggaacgcaggaacagctccgtgccatgcaaggatgactccgggccagcagaggtggtgggggggatgayggaagcaaccgggtatgcggccttgcatcttagccctgcccctaactcccatgtgaccttgagcactcccctccccatctgcgggcaggcaaggggctcgggatgccgctatagggctcaaccccactgggctagaaacaaccaaggcccagcagtcccagagagcggaaggcaagggaaggagaaagtaggggctccaggccccttaagccccttcccccaggcagtcacacctgctgaggaccccgctgagccagctgccccctgtagatccccagggtaggggccccacatccctcccacttcctgctcccactc

SEQ ID NO: 803237 - DNA, 495 bp, Homo sapiens
aattattggtagcttgaaagcatccatgtgacagtattcatatcaggaaattggctaacactgtaaataggacaaataaggccctttttttttccagatagtgggaaaaagttattaaacatttatcatcataccatgggctcacatatatggtcaatttattttggacaaaaagatggaaatagcttaaatgtccatcaactaatgaatagacaaaatgagtggtatccatataatggaatactacttagcaacaaaaagaaatgaaccmatatggatgactcttaaaaagcatgctaaatgaaagaaggctaacagaatataccacatattgtatgattccaactatatgaaaattctagaaaaggcaaactgtagaaacagaaagatcagtggttgccgaggcttgtgagtgagagggaggatgctaaaactgtctttcagagacggctgcaccaatgtataattttactaaatctcatgaaaatatacact

SEQ ID NO: 803238 - DNA, 569 bp, Homo sapiens
tggtccagtcaagggcagccctcagaaactcccaatggtgcggctgggtgcagtggctcacacctgtaatcccagcaccttgggaggcagaagcgggcagatcacttggggtcaggagttcaagacgagcctggccaacatggtgaaaccccgtctctactaaaaatacaaaagttatctgggtgtggtgacgggagcctgtaatcccagctacttgggaggctgaggcaggagaattgcttgaactcgggaggtggaggttgcagtgagccaagatcgcaccactgcactttagcctgggtgacagagtgagactctgtctcaaaaaaaaaaaaaaaaaaaawaggaactcccagtggtgcagctagagctgaggagaaggtggagtgcctggtggcaggcggggtgggggtacatgggtcgggggtagggacatagatttaattaaaatcactcagcccatcaggcctgcaggggtcttctgtcaagtggccattccccgctccccactgaaggtgcccatccctctgggctctgtttcttcctctcatctttccattgttatgtta

SEQ ID NO: 803239 - DNA, 607 bp, Homo sapiens
agcatttatatgcctggcaccaggccgggggctatggaggcaaatcagctgggccctgccctcacagagttgacatcacttagtacgtaaccacattgggatacatgttttgaaggagaggacagtgtgtctggccagtgagcaacagtgggccatacgtctccagggaacccccgtggggtgtgggaggagggaagcaggtctgtcctgggggaatgtgtgggaccacctctgccctgcttggcagtaggtggatttcaggaccatgggcctgtgctgtttacagaaccttgtccaggtgcccagctgtgggagggcagcatggagaggaggaagagggggcccctagtagcaagcttcagaaacttgccacttcaggctagagagctcgcaccctcccacggcagcagggtagcsatttctccctgactggggtgtccaccatggtgctctgcagccacctctcacttcattaagagtccacagatctaggagcagaggactggtctggagctgggcaagggcaggcagcaaatggggagtttttgctgtgtgaactgaggttacttgcctgccttctctggacttgcctgtagggcctggagcc

SEQ ID NO: 803240 - DNA, 624 bp, Homo sapiens
  misc_feature 1, 2, 3, 4, 5, 6, 7, 8, 9, 10, 11, 12, 13, 14, 15, 16, 17,18: n = A,T,C or G
nnnnnnnnnnnnnnnnnncgacgccccacacggcctaggcaccttgtgccatattgggggagcggggagacggtctatgtggacaagggacaggagccaactcggactggagcgacactttcgggagtctgtgccgctgagtggatggatggtctagaggaagtgggtgggaatgcactcgggttgacccagttctcagccagaaaccgggaaatccttttyagtaccagtctccgaccctcagcttccaaactatcagtaagagctgcctggccttcctgctaaatagcaaatttgcccacttttcactatctctatggccaccccctcttacctcacccatctcacaatttgtaattcagtctatgcatcacagcatggcactcaggtgtaagaaatgccacgtctttattttggtaaatctaattaaatagactgggagcccccttctctcgttgccacggttgacaggaaatctgatattagtcattttcctggagcctcatcctgtctttggggcttatcacaattccaggaggttcaggccatcctgagaagaatcactatggcttccctgagcccaagccggggggctggcagcccctctccctctccctagggctt

SEQ ID NO: 803241 - DNA, 624 bp, Homo sapiens
  misc_feature 1, 2, 3, 4, 5, 6, 7, 8, 9, 10, 11, 12, 13, 14, 15, 16, 17,18: n = A,T,C or G
nnnnnnnnnnnnnnnnnncgacgccccacacggcctaggcaccttgtgccatattgggggagcggggagacggtctatgtggacaagggacaggagccaactcggactggagcgacactttcgggagtctgtgccgctgagtggatggatggtctagaggaagtgggtgggaatgcactcgggttgacccagttctcagccagaaaccgggaaatcctttttagtaccagtctccgaccctcagcttccaaactatcagtaagasctgcctggccttcctgctaaatagcaaatttgcccacttttcactatctctatggccaccccctcttacctcacccatctcacaatttgtaattcagtctatgcatcacagcatggcactcaggtgtaagaaatgccacgtctttattttggtaaatctaattaaatagactgggagcccccttctctcgttgccacggttgacaggaaatctgatattagtcattttcctggagcctcatcctgtctttggggcttatcacaattccaggaggttcaggccatcctgagaagaatcactatggcttccctgagcccaagccggggggctggcagcccctctccctctccctagggctt

SEQ ID NO: 803242 - DNA, 583 bp, Homo sapiens
actctacacgagacccacgttccccggagaggattggggctctctgagttccaggcttacctcaggccaggccagcgcagggcaggacactccaagggtagtcaccacagtggcaggaccactcataggggcgggacagagccaagggacacagccaagactgtgttttcaaggcagcaggaggaggggacggaggcccggagrtttgttttgagggactgtgagccccagggctgagacacgggtgtttcaacccaaggagggtgatagatgagagatgtgggcacccagggctggcatggaaatacgtggagaccactcaaccgagagtaagcagaggctgggtatcacgagcttgctgtggcaacagccaggccctgctacttacatgaggcagaggctcaaaggcaggcagtgagggaaacgctttgtagcagagaaaggcggggctcactagcactggggccttctaagtcattggttggggtagcagatttggctttctctggttgaccctgagttggaggtcgggtagaaattggggtgaaaatgacaatccttgatgaggaggtcctggccgctt

SEQ ID NO: 803243 - DNA, 594 bp, Homo sapiens
agaatggtgcatggcatgttgaaagtgctatgtaatgttaactaatgctgtcgtggtcatacattagattagaaacctctgcctcccaaggtggcctctcaaggtcatggagtctgtcagcagcagtgtgggcctccgacctcagatctgtgcctccacaatcagtgctgacagcaaccaatggccatagttggtgatccacttaccaggggccacacgtattctaggtgtgtgtgcttcacctgtctgagctcagtaacgttgctgtgtctggtttacgggtgaggagggggaggctcacagagtttgagtgagtcacccagccaggaagtggcagagcccattgtggtgcagcctccgggggyagtacccatatagggctcctgggaggtggcatctcatgagcgacccgtgtaaatccaggtggtcttcttaactctgccacatcctgtggaggtgccctcagcagcctcggtttctaacctggaaaaagcggggtgggctagacggcccttgggaccctgcccccagtgttacagtgcacacctcatggcatgtccaggcttggccccctgggacttgctgtgcactgcg

SEQ ID NO: 803244 - DNA, 614 bp, Homo sapiens
ccctccgtccacaccctggtagagatcgctgtgcgctggctccgaggcgctcgccagggagatgctaacaccgaggatccacgacagctgagcctgcagcgccacccaggggcgcccggagcatctgcgccagtgtggggcgggccgtgctccctactgtccctggtaacttgctttgcggacccctgggaggccccgccttcagcagccactcctagatttctccagaccacctgggacccatcactggcaggggaatctttgctcttgtcccactgtcccccatgctagatcccctgggaacaggtcaccctcagtcctgagctgagctcccccttctccatctgtaggtctcctagtctcagaacaaaggcttagggcacaggggccaggtttgtaaaaggaaagaggctttggtggaacctctgaacctctgagaaaccgtgttccttttttattgtytgtacaagaggcgtgggcccggaggaaaaacagctcccgagggaaaccataaccgcagtgttggtttgttcctttgatcatcaacatttgctacgggtctcccagcccaggcagatgttggaaatgatgatgcccaagagccagcccctgcc

SEQ ID NO: 803245 - DNA, 606 bp, Homo sapiens
gtgacagcacaggacaggacagaggactcttgcaattgcctatgccctgaccgaggagaaccaggctgccggccctcccatgggggccgagcttcatccaccagtgtggtctgggcctctggccacagtgaaagactaactctctctcctgctggtcccaagcacataggctggaggtgtggctggctgacctcaccattttcccaacaggctctcattttkgccttgtggggcagagtggggacagggcccaattttgtagccagaggaaacagtggtccaggaggcctgtgacagagtctgtgacatccttcccatcacccccagtagaagagcccaaggccaaatcccaatggcaagaagtgtgggaacatgggaacagtgggaccacccagtagccaccaactccccaacgccaaaggtggcaggagcaggagggaagaagggcctgacctgcccttggagggtagccagaatctgcagaccctcttcctcctcatttccaggctgcaaggccaactcctgagactcagaaatttcaaagaagggaccctgggctcctcgggtccagcccaagccagaatctccaatctcacacacacttta

SEQ ID NO: 803246 - DNA, 619 bp, Homo sapiens
gcccagcctgcctgagcccctgcctccctgactgctccctgttccctgcggtgtagcttcgggggaatccaggctctgagccccacgctcaccacagtccaggtctctctgtagctgcctgtgcagcttctccaggtcccatggcccctgcagctccttggcccttgtcttcctccattgtcgccttcggaggttgttgaagctggggctgctcccctggctctggccctgcacttctccctcatcggaggcttcctctccagaaatctgcccctttctctgacaaccagccctccttctgcagggagtcctgtgctctccctcctcagcctcctctgtggcctctgaaaattgctcctcctctgagatcgaccccctcctggggcgctggggcagcaccccagaactcagacccctctcggcctcctcagcacccaggctttgcagctggacctgcttgtcggacrccgatcctgatcctggcctcctcccaggcagctggagaccactggggggctctgatcctagctcccctttgccagtagggatggagacaccgccccaggctcccagctgctgtctcgccttcaggttttgcgcctctgtcttccagcagcag

SEQ ID NO: 803247 - DNA, 740 bp, Homo sapiens
tctaacatatgtcaaaagttgagctccttagcctcctcacacacatttaccttatattatctccccgtctcggttaatggaagttctctccacatggttcaggcccataagccttggagccatccttgactcccctttccattactccccacatctaatccatcaacaaattttactggctccttcaaaatatatacagaacctgattacttctcactacctttgctgcctgtatactggccaaccgaaatagtagcctgaattattgcatcaggttcccaaytactctccctatttcttacgcatgccactaccgcaccctcaactgcagtctattataaatacaacagcaaaatgatccttttatttttgttttgagacagggtcttgctctgttgcacaggctggagtgcagtggcgcaatcttggctcactgaaacctccacctcctgggttcaagcgattctggtgcctcagcctcccaagtagctgggattacaggtgtgtgccactacgcccagcaattttttgtatttttagtagagacgggtttcaccatgttggccaggctggtctcaaactcctggcctcaagcaatgcacccgcccttggcctcccaaactactgggactacaagcatgagccaccatgcccagctcaaaatgatccctttaaacatgggtcagatcatgtcactcctgtgatcaaaacactccaataaagctgggcatggtggcaca

SEQ ID NO: 803248 - DNA, 638 bp, Homo sapiens
tgctcaaggatagactatatgttaggccacaaaacaagactcacaaaattaaaagaaaatgagatcatatcaagtgttttctcagagaacaacagaataatattaaatagcaataacaagaggtactttggaaactataaaaacacgtggaaattaaacaaaatgttcctgaatgaccagtgggcccatgaataaattaaaacaaaagttttaaaaattcatgaagccaatgaaaatgaaaatgcaaaatcccaaaatctatgggatacagagaaagcaatgttaagaggaaagtttataccaataagtgcctacattaaaaaggcatataaattttarataaaaaacctaataacacatcttaaataactagaaaaataagggcaaggcacactcaaacttggtagaaaaaaagaaataatccacatcagagcagaagtaaatgaaattgaaacaggggaaaatacaaaacatcaatgaaatgaaaagatggttttctgaaaggataaaaaaatcaacaaacctttagccagactaaaaacaaaagagagaagatcaaaattttaaaatcagatgaaaaaggtgatattacaactgataccacagaaatccaaaggatcattgtagactactatgag

SEQ ID NO: 803249 - DNA, 446 bp, Homo sapiens
tcaataatgaaacaaaatcagcatgtataccttctgatatacacactgcaaagagctcagcatcacttctgtggtattcttgccagaaacatacaaatcttaaatataacaaacattacaaatggagtcacattctacacagtaactaggctaatttttaaaaatgttaggaccattaaagacaaagaaaaaataaggaactattccagattgaaargtattaaagagatatgacaatgaataaaaccactgattatggattggctagtgggcctaaaaagggtatatctgggataattaggaaaatgtaagtggggtctgtggaccagaaaataatattgcatcaatacttatttcctgattttgatggaaacattgtggctatgtggcaaaatgttcttgtgcataggaaatatatattgtagaattaagaggtatggtaggaa

SEQ ID NO: 803250 - DNA, 540 bp, Homo sapiens
tcaaccgtgatgttagggtgtcgattttagatttttcctgctttctcttgtgggcatttagtgctataaatttccctctaaagagtgctttagttgtgtcccagagattctggtacattgtgcctttgttctcattggtttcaaagaacttatttgtttctgccttaatttcattatttacccagtagtcattcaggagcagttttttttttttttcagttyccatgtagttgtgtggttttgagtgagtttcttaatcttgagttctaatttgattgtactgtggtctgagagactgtttgttatgatttctgtttttttgtattttctgaggagtattttacttccaattacgtagtcagttttagaataagtgcgatgtggtgtctgagaagaatgtatattctgttgattttggctgaagagttctgtagatgtctattaggtcttcttggtccagagctgagttcaatttctgaatattcttgttaatttcctgtctcattgatccatctaatattgacagtggggtgttcaaat

SEQ ID NO: 803251 - DNA, 616 bp, Homo sapiens
ggcaactgccctctccaaggatccccagggccctgctgagtggcaagagagatgcccacagcctggctggagaccccttcaaccccacagcttttcaagatggaggagggtggggggttgggagctctccccgccccctttccctcacagccctctcctagctcccactgcaccyttcccctccacatccctgcagctggacccaagcccaggcagcgacagcccctcccatatggcagcaggaacaaagagaactgttccccacaacaaaatccagaagctccggcgggcggccagatctcaagctcccagcccagtgtgacccacggcgttctccatgggccactgacgcccgcggggccagcactgctcctggcttcaaaaatataaatttaaaaatccccaccccaagataattgctctctcctctggcttattgtggtggctccgtggtaggcactgagaagcaattattcacggctaatgattataatcaagtcaaatagaatttaatggacacgtattctcttcctgcttgaaactttacatatgaattaagcacatatgggtttcacgaggcacagacgcagatttatgcagccccgaaaagccctgc

SEQ ID NO: 803252 - DNA, 617 bp, Homo sapiens
aatagcagtctctgctaaatttaacataaaacaagaactcattacttctgcctgagatctgatttcatgtctggatacagttaacgggtttttccttatattccaaggaagcaaagttaattctcagtggccggtggccctgagtggggtgacgtgggccccacaggtgctctctgccccaccctcctcctccatcctcacctcctgtcctgccagggcaggagcagcccaagagagaccactctaaggtgtggcacacagtgtgaccacccaggaaaggacccaggctgttcttccaacttctccctgagacccagcgcacagtgggtgcccaggaggggtgcccactccctcacctgagacccattctctggggctgycgagggctctttctggaacacagtcagccagccagccagccaggagatattgactgagggcctgctatgctctggggctggtgtattcctgcctcatggaggagtgaggaatctacgtggctgagtcagggcctagcctgggtggggctggggaggctctgtggggaaccagatttccacagaggacgcttccacggataaggaggactaggaggcaatggggaagggcctggcacg

SEQ ID NO: 803253 - DNA, 564 bp, Homo sapiens
cctcagggtcggccatggctcgtcgcttcacatcttcggggctgtcgtgccggttgtactgcgccatcatacagcgctggtagccgtctgccgcctcctgcagtccagaagagacaaaggtgaagcgtgttaggaccacccagctcactgcttcagcaggtccaagataacagaggtaactgacaaggggagagagaacaagtaagagagaaacagagagaaatggaggtgacagggaagaaatcagggactgaacatggaaaagccccaacagagaaagaggcagggggggcccctggaggccagaagcagccccaccttacagctggagtccaggtctagcgccttctggtacacatccatggctttggtgtagtccttcatcgcttccagygcagcggctttccgtgtataacccttgactacaaacaggaaaggtggcgcgttatccaaccgcagcgcccaaggctgctccttgcacctcttcacctgcacaccaacactgttcacacctgctgatgttggatcctaaatcctacaggtcccaaggacacacaggtagac

SEQ ID NO: 803254 - DNA, 611 bp, Homo sapiens
cgatcttggctcaccgcaacctctgcctcctgggttcaggcgattcttctgcctcagcctcccgcgtagctgtgattacaggcatgcaccaccacgccccactaattttgtatttttagtagagacgggatttctccatgttggtcaggctggtcactaactcctgacctcaggtgatctgccmgcctcggcctcccaaagtgctgggattacaggggtctcaagtctatctgaccataaacgatctacttccctgggcttttgtgaagataaaataaggttactttcaatgtttagcagagtcgtattcagaatgagggaactattaccattactagcaatgagccattcttccctgagccccagacatgaactgcaggaagggaggggagccttgagtcgtgtgagtggggcttttccaagccctagttcaggcagatgccccagggactgcaggcccaccagaggcatctccttagggcagggactagatgccatgaccctcaaggaccttctaaccccagctcccgccagggcagggtgccagccagccacacccatcaccctgaacagctttgctcctggatcccatccactggtatcatttagaa

SEQ ID NO: 803255 - DNA, 658 bp, Homo sapiens
actatctggaattttaggatccctcctcagacaagcaggcctaataaaggctattcctacagctaggatatggggagcctcagaaattgtatccttcctattcatataagtgaagataaaaggcatcagtcttccaattctggagatccctcccctccctcagggtatggccctccacttaatttttggggcataacatctttataggacatgggtaaaatcccartactaacagaagaatgcttaggactctaacaagttttcgacaatgcttcagtaaaggtgactacattggatttttctcggtcctctttgtggtctaggaggacaggcaagggtgcaggttttcgagaatgcatcagtaagggccactaaatccgaccttccttggtcctccttgtggtctaggaggaaaactagtgtttctgctgctgtggcggtgagcacaactattctgattagcagggtccagggaccgttgtgggttcttgggcatggggagaaacaaaccaaaaccatgggtggttttgtctttcagatgggaaacactcaggcatcaaaaggctcacccttgaaatgcatcctaagccattgggaccaatttgacccaaaaaccctgaaaaagaggtggctcatttttttctgcactatggtctgg

SEQ ID NO: 803256 - DNA, 661 bp, Homo sapiens; identical to SEQ ID NO: 738761

SEQ ID NO: 803257 - DNA, 651 bp, Homo sapiens
tcattcactatcacgagaacagaacaggaaagacacatcccataattcaatcacctcccactgggttcctcccacaacacgtgggaattgtgggagttacaattcaagatgagatttgggtggagacacagccaaactgtatcatctatggttatcataataaaaactgtgattcttcttgctttggtrgggaaaaggaattgagtaggaaaggacaggagggaatttttgtgggaatagtgatattccttatgttgattatggtgtagattacacaatgtatgcatttgtcagaactgatgaactgagtgcttaaaatatgtttattttacagtatgtgaattatacctcgttaaaaatattttcaaaattgataatggtttgacagtcattttcagaaagttgaatttgaaatagtatatacagttttcatgtacccataattacaaactgtatgaatgcatttctaaaccatatatatatatctaaaacctgctaatatagcacagtgattaagaagggctctaaagtcagacttcaaaattcagtcttgctaaattgtactaacttaccttaggcaaattaccatacctctctatgtgtcctcagtttcctcagtcataaaatgggaataatttaatacctacttaa

SEQ ID NO: 803258 - DNA, 682 bp, Homo sapiens
atgctctgtccagtgcaccatcattcattaactctgggatgatggtgcattgatagggatggtgcatcacagagaaatacaagacatgtgtccctgtgctcaagaagaacaaaagaaactaacagtcgtttgctactaataatcactaatcattgacattcattcagcacctactattcctggggcactctgckgagtgttctacatgttttgttctcatcctagacctgtgggctaaacatcattaccccatcccaggaatgagaaaactgaggcttgggcactcaggtataaaagataggaaagaccacgcgcagagctaagggaccacgtgactttgggtaagtcacttcagaactctccaggcctgtttcctccttcaaaaggtaagaacaaccgattgttgcagcaatcaaatgagcagacatatgtgacattatactgctgattatcaaagcctttccaaacgcaaggtactcgtcacagaaaactatggtggtaaagtgctctagagccaggctgcctgagtttcgatcctggctttgctatttaatagctgtgtgaccctgggtgaggcactctctgtgactggctttagcttagtttccttgtccctcaggagggtgataacagcacctacctcacagggtcattatgaggactgaatgactgctgcccatag

SEQ ID NO: 803259 - DNA, 650 bp, Homo sapiens
attgggttcctgatagatagcagatggagagacacgggagttatgaggtctgcgtctggccaaatgcttcatcttcctctcgccactgagcccattggaaaagaatgttgtgctgggcaggtggtcagggagagctacaaaagctgagctttcagcaaaggtgttagggaagggagagagatagcatgcactgattcaattcgactcaattcagggaatatttattaagcactgcctctattagtcacctatatgtatcatctcatttttttcctcgaagatatcctcccatgtaattgtcattatcctcactttacaggtaagatacttaaaagactcagagatattaagaaatgtgtctaggatcacacagccagcctaaggcttagccgggatttgactctaagtcttgttctttaaacctaatacaccaagctgcttctccaagcacytctgccacttgctgggtcacacattcctttttaaattgttttcagagttacatcttgaggtctcatttctgaagcatctcttcttgctgtagtgaggaaatggggttgggaaagagacggatcttcaaagactaggggaaatggatggaacgagcagtttacagttataaaatttgttttcagttctagcaagggcta

SEQ ID NO: 803260 - DNA, 565 bp, Homo sapiens
gacctcgtgatctgcccacctctgcctcccaaagtatgctgggattacaggcgtgagccaccgtgcctggccaatattcaccatctttacatgttcttatggcaattttttcttgtcttctttggagaaatatttattcaagtccttkgcctattttttaatttgggttttatgttgtttattgttgagttataagagttctttatatattctggatacaattgtctgatatatgatttgcaatttttttcccattctgtgagttatctttttactctcttgataatgttctttgaagaacaaaactttttcattttgaaagagtccaatgtatctacattttttcttttgtcacttgtgcttttggtgtcacatctaagaaaccatagcttaatctaaagtaatgaaaatttattcctgttttctcttaagagttttatatttttagatttacacatggatctatgatccactttgagttaatccttgtattttgtgtgaggtctggagcaaacttcattctttcgcatgtggatattcagttatcttggcatcatttcctgac

SEQ ID NO: 803261 - DNA, 531 bp, Homo sapiens
ggaggttgagagcctcctctagtagaggtttctggagtaaaaaggaatacacaggctatcagagcaggtcacacagaatctcacactggcccattattaaggccaccacattgctgctcagaaggggaaatttcaaactgaacttgagaccaaagagcatcctgactccacaaatgctatcattaaggatcatcatagataatgtggttttaactagaagggctgaggtactggcaaatgttcaaaagacttgtcacgtgagaatccaccagcaccatggtgaaaacagcctgcagaatgagagtctgctcaggtgcaagagtttragccttcttcctgcaaacacctgcgaggtgaggggttcactcaatccatggtacagacaggttgggtggaaaacttggtgttatcccccttacattaatggggagaggagaggggtttggtgtcttgtcatgtgctgagatggaaagggttttagagtcagacaaataggcctttggagtcagataaataggcctctctattagt

SEQ ID NO: 803262 - DNA, 615 bp, Homo sapiens
cagtgctaatatcactcatgttaatattgagatactttcttaggaatagcatgtgatgcatcagtgtctaagaaataataaaaggataaacatagcatcaagacttctgaatgcttgtgtatattactgaaaattagtatatatcagtctaacctcattaaattcttagacagtgaatgtgtgtctgtattcagaattttattttcatgttcttgggaaatgatgagtggaagaacatttatgtagtattgaattaatattaaaaagaaattgattatatctttcaagggtttattaagcaattgctctatttaagtcactatggtaaattatatgcacatagacattaaacaaaaacagaatctctggcttcaagagcctcrtgatttaactgtatgggagaccagaaaataaactggaggagtcatgcagagtgctccaggaggaagcctatgggagatacataactaaaaaatccttagggatgagaggagccaaggaaggtttcctagagaacgaataagacatatgctacatatgacatataggacagctttttccggacaaagaaagcagaaaactatgtactagacaaagagaggagcatgtgcaagg

SEQ ID NO: 803263 - DNA, 426 bp, Homo sapiens
tgcatattcagtgcttccctcaggaactctttccaggcagtcccggcggtgacagaatctctcagaatttgcttgtctggaaaggattttatttctcctttgattatgaagtttagtttggccagatatgaaattctgagttggaaattcttttctttaagaatgttgaatattggtcccccaatctcttctggcttatagggtttccattgagaggtccactgttaatcagatagactttgctgtgtaggtgacctgacctttctctctggctgccattaacatkttttccttcatttcaactttggaaaatctgatgattatgtgccttggggttgatcttctcatggagtatcttactggggttatctggatttccttaatttgaatgttgggctgtcttgctaagttggggaagttctcctg

SEQ ID NO: 803264 - DNA, 620 bp, Homo sapiens
agtacagtgagattattgaaagctctgaaaggtctgttagtctctagattgccatttgtggactgacaaaatgcctagaggagagaatcaacacagaatgtttggttcatctttccttgctgtgttgctctttagaatctggtacactcagtgtcggttacttagttagttttcttttgccctcaaagatatattttaaaatattttatccacatttattagttgtgactattttccttgaacagtatttaatggcatgaaaacacacaaaacaaaagataaaaatcagattacaagtattagtcttttgaaatcatgtatatttatgtatatgtgagcacatgcatagaackcattctggctgatggataccaagatattagtagtaactgtctcagactgatggaagtataagtcatttttagtctctctctctctctctctcacacacacacacacacacacacacacacgcaaacactcttacatacactcatcccatagattcctgtggtgcttctcggttccaaagagtacaggtccagagttcaggttctcagatttcatacagtcagatcatatgtatgtgtgtgaaacatgtggaggagagttaaatggtt

SEQ ID NO: 803265 - DNA, 554 bp, Homo sapiens
tagagaaaattttcaaatgccttcttacaggtattaaacattcagttacatgatacaattaactgctgccatcatatcacatggtaaactagtttgaatagggactttctgtgccacgttacaggccatacagtagcatttttaggtcatggagtatgaagacatatgttgaaatcccaactcagccacttaatggcttttttaccttgagaaagtgacttaaactccctaagctttaatttctccagctgtaattactgtatgacaaatgtcagtacatcaagcattttgtgaggtttaaatgagataatgtgtagaaaactcagcatgattgtagragaataagtactaaatatagaagtagtgatactagtaatagtaatctttggaggacactaacatattattacaaatgtgtttcataaattatctcattgtatcattgtattatcaccatcttacagatgagaaaacagaaacttacagaactttaatcacctgcccaagaccaggttaagtgccagagatgacactcacatgtcctcagattctaa

SEQ ID NO: 803266 - DNA, 554 bp, Homo sapiens
tagagaaaattttcaaatgccttcttacaggtattaaacattcagttacatgatacaattaactgctgccatcatatcacatggtaaactagtttgaatagggactttctgtgccacgttacaggccatacagtagcatttttaggtcatggagtatgaagacatatgttgaaatcccaactcagccacttaatggcttttttaccttgagaaagtgacttaaactccctaagctttaatttctccagctgtaattactgtatgacaaatgtcagtacatcaagcattttgtgaggtttaaatgagataatgtgtagaaaactcagcatgattgtagaagaataagtactaaatatagaagtagtgatactagtaatagtaatctttggaggacactaacayattattacaaatgtgtttcataaattatctcattgtatcattgtattatcaccatcttacagatgagaaaacagaaacttacagaactttaatcacctgcccaagaccaggttaagtgccagagatgacactcacatgtcctcagattctaa

SEQ ID NO: 803267 - DNA, 630 bp, Homo sapiens
tctaactgatgcaaggttgagaggggaggattcaggaagataaatccagcaggtgtatatagaaatggagagacgagacagaaatacaggagttgaagaaatagttaagaaattattgcagtgatttatcttgggttctaaagcctataggtatggcggcaatgaaaatagaagagttgggatataaggcatatttcagaggaagaaccacaaggacattgtaccataggaaatagaacagaatgggtgttaaaggcaggtaatgatgatatgattagctaagcagctggaatgcacctagccarttgtcttgaaattaacctcatagcttctattcaatgagacttcacatcaccatgagaaaactatgtgaagtgcagccccactgagaataagtagtgtcctagcagattcgtagctgagtgaaaccactccagactcatagtaggtagctaataactgttattcactcccagctacatgattttctttaaccctcagaactccctgaatgtaggtatgggtagtctaccttgcaaatgcaaaagcttattttcagggaagctaatttcacatgacccaagactggtacaatgaagatctgaatacaggtcagacagcatcagagaa

SEQ ID NO: 803268 - DNA, 667 bp, Homo sapiens
tctggagtcatgaagaaagctgagtgaacaaagaaacaatagtttttaaagttaaaaaattgttgggtgagcacaggactgatagttctcacagagttggaaattgctatgcaattataggttatgtatgtttatgtagtatgttcatgctattgaaataaaaaaacactcagtcattaattctgagatgtgaggatgaaggtgagttatgtgtctctgtgggcagaggaagagatgttaatgagagaggacctttgcctcattatatatatctgcactgtttgattattagtttgattttacaaaaacagatattttacatatatacatgtgtgtaatatatataatgtgtatatayattatacatataatatatatataacacagtgttttgaaaagctgataggagaaaaatgagtaaagaaaaatggttgtcctctagaacagtggtccccaacttttttggcaccagggactagtttcgtggaagacatttttccacggacctgtggggtgggatggatggtttggagactatttaagtacattaaatttattgtgcactttatttctattataattacattgttatatataatgaaataattatacaacttaccataatgtagacttgataggatccctgagcttgttttcctgcaactag

SEQ ID NO: 803269 - DNA, 529 bp, Homo sapiens
aagaaaataagagagggtgcaaacaaatggtaaaacattccatgctcatagataggaagaatcaatatcatgaaaatggccatactgcccaaggtaatttatagattcaatgctatcccttygaactaccattgacattcttcacagaaacagaaaaaactatttcaaattttacatggtgccaaaatgagccgtatagccaagacaatcctaagcaaaaagaacaaagctggaggcctcaccctacatgacttcaaactatactacaaggttacagtaacaaaaacagcatggtacttgtataagaactgacacataaatcaatggaacagaatagagaactcagaaatcagactgcacatctacaaccatgtgatcttcaacaaacctgacaaaagcaagcagtggggaaaggattccccatctaataaatgctgctgggagaactggttagccataagcagaaaattgaaactggatcccattcttacacctcatacaaaaactaactcaagatggattgaagagt

SEQ ID NO: 803270 - DNA, 529 bp, Homo sapiens
aagaaaataagagagggtgcaaacaaatggtaaaacattccatgctcatagataggaagaatcaatatcatgaaaatggccatactgcccaaggtaatttatagattcaatgctatccctttgaactaccattgacattcttcacagaaayagaaaaaactatttcaaattttacatggtgccaaaatgagccgtatagccaagacaatcctaagcaaaaagaacaaagctggaggcctcaccctacatgacttcaaactatactacaaggttacagtaacaaaaacagcatggtacttgtataagaactgacacataaatcaatggaacagaatagagaactcagaaatcagactgcacatctacaaccatgtgatcttcaacaaacctgacaaaagcaagcagtggggaaaggattccccatctaataaatgctgctgggagaactggttagccataagcagaaaattgaaactggatcccattcttacacctcatacaaaaactaactcaagatggattgaagagt

SEQ ID NO: 803271 - DNA, 529 bp, Homo sapiens
aagaaaataagagagggtgcaaacaaatggtaaaacattccatgctcatagataggaagaatcaatatcatgaaaatggccatactgcccaaggtaatttatagattcaatgctatccctttgaactaccattgacattcttcacagaaacagaaaaaactatttcaaattttacatggtgccaaaatgagccgtatagccaagacaatcctaagcaaaaagaacaaagctggaggcctcaccctacrtgacttcaaactatactacaaggttacagtaacaaaaacagcatggtacttgtataagaactgacacataaatcaatggaacagaatagagaactcagaaatcagactgcacatctacaaccatgtgatcttcaacaaacctgacaaaagcaagcagtggggaaaggattccccatctaataaatgctgctgggagaactggttagccataagcagaaaattgaaactggatcccattcttacacctcatacaaaaactaactcaagatggattgaagagt

SEQ ID NO: 803272 - DNA, 583 bp, Homo sapiens
agcatttatcgtttatacagttcatttgacgtttaacatattttgcttaatatgttaaccatcttttcatttatacattcttttaggaaaaacatagatagtagaagccttgcaccgtgatttacagcatgagcctaggagtcagaccaattttggtttccaatgctgccctgtcctgtctgagctttgtaaccctgaacaaacatcttttctgagtctcagttcattattattattattttgagacagggtctcactctgtcatgtaggctggagtgcagtggcacaagctcggctcactgcaacwccaccctcctgggttcaagtggttctcatgcctcagcctcctgagcatttgggattacagatacccgccacgatacccagctaatttttgtatgtttagtagagatggggtttcatcatgttggtcaggctggtctcgaactcctgaccttgtgatctgcccacctcggcctcccaaagtgctgagattacaggtgtgagccaacatactcagccatcagtttattatttttaatccctcagtaaaatgagactatttcatcatgttgtattaaat

SEQ ID NO: 803273 - DNA, 583 bp, Homo sapiens
agcatttatcgtttatacagttcatttgacgtttaacatattttgcttaatatgttaaccatcttttcatttatacattcttttaggaaaaacatagatagtagaagccttgcaccgtgatttacagcatgagcctaggagtcagaccaattttggtttccaatgctgccctgtcctgtctgagctttgtaaccctgaacaaacatcttttctgagtctcagttcattattattattattttgagacagggtctcactctgtcatgtaggctggagtgcagtggcacaagctcggctcactgcaactccaccctcctgggttcaagtggttctcatgcctcagcctcctgagcatttgggattacagataccygccacgatacccagctaatttttgtatgtttagtagagatggggtttcatcatgttggtcaggctggtctcgaactcctgaccttgtgatctgcccacctcggcctcccaaagtgctgagattacaggtgtgagccaacatactcagccatcagtttattatttttaatccctcagtaaaatgagactatttcatcatgttgtattaaat

SEQ ID NO: 803274 - DNA, 510 bp, Homo sapiens
tttctaatgagccccctgtggatggagggttgttggatcacattttgaaaaatactagtccttgagagatctcttagatgcctttcctcattgagggtcccagaatgacacactgtcccctgcacagggactggagaaatcctgctgttcaagatggcatagtgccctgtgaacctcagggtccttccatggaagaacatcagggaggaaatgaagtacataaaattcactatgctgagatcagctacaaacacatgagtcataaagttgtgctggctgstgtggggatttgagaaacgtttctgtgtaatccacttgggttatttcacaagaattggcaacgcagcaatggtatttagggtgcctagtggtgctattcagatttgaactacaccataagtttcatgtaggcttaatttattattattaatctgccataaattgctgatgtgacttttagcaggccactttgcttttctggcctcttctttctacgatgggtgggttaag

SEQ ID NO: 803275 - DNA, 559 bp, Homo sapiens
ggggctggaagctgtggagagaaaggatgagggagaagggtggcttctgtgtgtagattctacttttttgttttgagatggagtcttgctctgtcgcccaggctggagtgcagtggcgtgatcttggctcactgcaagctccgcctcccgggttcacgccattctcctgcctcagcctcccgagtagctgggactacaggtgaccgccaccacacctgtctaattttttgtatttttagcagagattgggtttcaccatgttagcmaggatggtctcgatctcctgacctcaaatgatccgcccgcctcggcctcccaaagtgctgggattacaggcgtgagccaacgtgcctggcctctactttttttttttttaaactactggttgaggaggtgcagactagttgagccctgggttcccacttgtctttcctctctcttacctccacctcttttctttttcatttcctactgtctccaaggtaattgatggtgggaccagaaagaggatggagtaaaaaccattggagggaagagtgaactgggctatcagattgta

SEQ ID NO: 803276 - DNA, 559 bp, Homo sapiens
ggggctggaagctgtggagagaaaggatgagggagaagggtggcttctgtgtgtagattctacttttttgttttgagatggagtcttgctctgtcgcccaggctggagtgcagtggcgtgatcttggctcactgcaagctccgcctcccgggttcacgccattctcctgcctcagcctcccgagtagctgggactacaggtgaccgccaccacacctgtctaattttttgtatttttagcagagattgggtttcaccatgttagccaggatggtctcgatctcctgacctcaaatgatccgcccgcctcggcctcccaaagtgctgggatwacaggcgtgagccaacgtgcctggcctctactttttttttttttaaactactggttgaggaggtgcagactagttgagccctgggttcccacttgtctttcctctctcttacctccacctcttttctttttcatttcctactgtctccaaggtaattgatggtgggaccagaaagaggatggagtaaaaaccattggagggaagagtgaactgggctatcagattgta

SEQ ID NO: 803277 - DNA, 567 bp, Homo sapiens
acctcttctggagtgcttagtccatagactggagtgaaaaatatcagagcagaggagaagaacagtaataggtggacattcctaaacacgacagttatttaaaacttttttttttttttgagacagagtttcactctgtcgccaggctggagtgcagtggcacgatctcggctcactgcaacctctgcctccctggttcaagygattctcctgcctcagcctcccgagtagctggggttccagtcacatgccaccatgcccagctaatttttgtatttttactagagatgttggccaagatggtctccatcttctgaccttgtgatccaccaccctcggcctcccaaagtgctggcattacaggcgtgagccaccgcacccggcctgtttaaaacttcttactcactttggataaatgatgctgggagttcaagcatttacttccaagacaacctgggataggatcagcagtgattccttaagtgaagctacgtttatacctcaattcttttgtttattcattcatctgtttaaaataaaatatttctagaatacctactaagtgtc

SEQ ID NO: 803278 - DNA, 627 bp, Homo sapiens
gctcaagtagtcatactagcagggaatgagatttatgagatgaggtaatagacatacaaatagaaaaatacattctaaaggaacttttccctcaaatgcctatttcctttgtgattgatttgtgtgggggaggctgaggaaatttaattcccttgccttccccaccacattcctcccgtttcagggtctaaatgttcctaattgcagtacagaggcatcttctcagagagcggtcctcagggacacttcccactctcctcagctctgcagtttctagtggcttccttcagtgacattcctacttttcattgactcttgagatattatattaaaatggaagatttattcccctggcagaaattgaggtcactgatattcagggaaaggtgcagtgcctctccagttatcctgcaactctttgtcaaaccctgcagagtgattaataggaaagtgttcgacaagggtcactygcagagggcggggactctggttcaaaccacactgtgtgctctcacccaagtgcgcacttataatcaataatagatactgcaagaggacatactgtgtagcaagcacagggctacatagattctattccttattttattgaatcctcaaaacgaatct

SEQ ID NO: 803279 - DNA, 659 bp, Homo sapiens
gaagggggtgcagtgggcagatgtgctgccttgtctaaaacagattttactgctgtttatagttctctctccagctctaacccgcagctttctggtatgactgtgatacagcagcaaggggttttactcggtactgaatgcttgaaataatgtgaagtgtttcagtgtaaaaccctggtttacattgaaaaagaaagtgtacatcttacaaaaagaaagatgccttttttaattgatttggattccttttaaaaataaactccttttaaaaattgagaggtctcaatccccttagaacacagacatttaaagagaattaataaggaatagatgatcaccagggccagccctccttactttacaaataagaaaccaaacctgaggaaagtaattactggcccaaagtcacatagaagtttactggcagratggagtgagtctaaaatcaaggtctcctgactttcagttcaaaagaataatagaagagggaaatcattcctctagatcaggggtcagcaaacttgttctattaagagccagagggtacatattttaggctttgtggaccatatgactattggcagctactcaactactcagctctgtccttggagcccaaaagcagccatagacaatacataaacaaaagagtgtgtcta

SEQ ID NO: 803280 - DNA, 634 bp, Homo sapiens
ggaggagaagcgctctgtgttttagagtttcccgtttttctgttctgctttttccccatctttgtggttttatctacctttggtctttgatgatggtgatgtacagatgggtttttggtgtggatgtcctttctgttagttagttttccttctaacagagaggatcctcagctgcaggtctgttggaataccctgccatgtgaggtgtcagtgtgcccctgctggcgggtgcctgccagttaggytgctcgggggtcagggacccacttgaggaggcagtctgcccgttttcagatctccagctgcgtgctgggagaaccactgctctcttcaaagctgtcagacagggacatttaagtatgcagaggttactgctgtctttttgtttgtctgtgccctgtccccagaggtggagcctacagaggcaggcaggcctccttgagctgtggtgggctccacccagttcgagcatcggggctgctttgtttacctaagcaagcctgggcaatggcgggcgcccctcccccagcctcgctgccgccttgcagtttgatctcagactgctgtgctagcaatcagcgagactccgtgggcataggaccctctgagccagttgcgggatataatctcgtgg

SEQ ID NO: 803281 - DNA, 560 bp, Homo sapiens
ttcagacatgatgtgtattccaagagaatttgcaatttaaataaatgaaagcatattcagtccgggcatggtggatcacacgtgtaatcccagcactttgggaggccgaggtgggaggaggtcaggagatcaagaccatcctggccaacatggtgaaaccctgtctctactaaaaaaatacaaaaaagttagccgcttgtggcggtgtatgactgtagtcccagctacttgggagactgaggcaggagaattgcttgaacctgggaggcagaggctgcagtgagctgagactgcaccactgcactccagcctggtgacagagcgagactctgtctcaaaaaagaaaaaaaaaaagcatattcagaaaaaaaamtgatgagagaccactacacacctattagagtggcccaaattctgaacaatgacaacaccaagtgctgatgaggatgtggagtaacaggagctcccattcatcgttggtggggacgcaaaaagttgtacagccactttggaggagagtttgatggtttcttacaaaattaaacatactctaatcataa

SEQ ID NO: 803282 - DNA, 591 bp, Homo sapiens
accaaacaaaaacataaatagaaatgaatgtgtaacataataacatccagtgaaattttttttagcataatgaaggaggttgggctttttgttaaggcacgtttggctctaccactagcagactgtgtgacttcctcttcagagccaagcattgctttgtatcaatataaaatatcaaccaatgctagaactgtcatggtaaactgtggaggaaaggggcaaaagataagtgagcgtgctagaatatatttactacctaagatgggaaaactttccatctagttatgttcctcrtttactaaagtgaaaatgaacactctggttatggggagacatgagcattgtcgagaagctcagtaacagctgttctctgaagacttccctgatggtattagatgctgttacagaactggactgcctagcaagaattgatataataaaatcactcaatagtagaggccacgcgaagcttttaacttccagaagcaagtgagtatattccccctcataaggggaagcaaaatcagaatggctgccaggggagcctcacctgtagagacctacagaggagacttatgggaaaccactagg

SEQ ID NO: 803283 - DNA, 631 bp, Homo sapiens
ctctcagcagcactgaatagtctttattaaaactcgtttttccccctcttgaattctttgtttttcatcccaccttagagacggctttttttcagtcttcctttgttggctcctccttccctgatggattctagatgttgggagtagtccagacctcagtccttgaatatcttctctctatgctttctccctaagtcagtggttcacaaccttggctggatattagaaacatccaagaagcttttaataacaccaatgttcaggccgcacctgagaccaattacataagaatctctgagggtaggactgaaacattattatagtttcaaagattcccaggtgtttcccatgtgtagccaggcttgagaaccatttcctgggtgatcccattcattccagggctttaaatgccacccgtctgttgttgatttacaaattgattattccagccctagaattcctaattctgaccccagccytaacttctctccctggctcgcttcatacactcctggcttgtttcaggttttccatgtgcacaagcttttcaactctggataagaactccctggaccacacagatcaccacctagggctgattcagtttctcattgccatccacttcccacaa

SEQ ID NO: 803284 - DNA, 498 bp, Homo sapiens
aagatgggaaaactatccaatttgtttcacaagacagatttgattcagatccccaaaggtgataaaatattacgcaaaaaagaaaacaaataacctaaactataaatttacagattcaaaaccttcaactaactacttcagattagagcttaacaagctaatattactgattcaataatccaacaggaacatacccagtttcaatataaggaaattgaataatgcaatagaagtttatcagcaggctagtaataaaaaagtagatgattatttcaataytccctaactgcgtttgataaaacttaataattttcatttttcaagttggaataaaataattctttcttaatttgatgaatattcctattctaaacctccaaccaaataactttttattaggggacatgagatgcagatctgtaaattagggataaaacaagtttgcctactctgccaacccttgtttaatattatttaagtaggtctagctggtgcaat

SEQ ID NO: 803285 - DNA, 561 bp, Homo sapiens
tttgttaccttgattacttattaccttgaaccacagatgtacccagaacattgcactttacaaagatataatttctatttaaatacagtgaataaatgactggtagaatggtagaaaagtgtcatggttgaatacggatgctatagttaggatttatatccttgttttgacaaccactttatctgtagcctaaagcatttctaagcttttyttatgagaaaagggagaataataataatacgtatcttgtagcattgctgtaaaaataaacagtgttttaaaaaataaaataattcatacaatgtgcttagcattcactaatcagcatcagataattattaataatattagtagtggtacattataataatacccataagcgtctcaattttgtggatttttctgcagcaaattttttgctccagatttgctttcttttactaatttagagttcatttctctgtgtcaccatttgtacatgattcagttttgtaatctaataaataccattctaataaaaatattagtaagatataaaagatacaatataaaattttcagg

SEQ ID NO: 803286 - DNA, 597 bp, Homo sapiens
aagcgtttcaaattgttatcacattgtttctctctctctctctctctcacacacacacacaaacacacacacacacacaccacaacctatataacaaggaaggggggatcaagtaatcgatagttctagtaaaaccccatagattagaagaggggtagatattcacagtggtatgttatcagacaaaagcaatatgtgttaactagagctactctgcaagatactgccttagatacttagcacgagttagaggggttaaaggggtgattagccaatagaaaaataggtatgacacattctttcttgaaggcatataaaagctgataatttagttagtaaaataagagatattcacaaataactataatacmaagtaaaatatagtaaggctattatagaatatttgtggcagcctttgaagagtagtgggtggctaatgttgttcctggttccttctgcttcaaggctatttctgtagtatcttctgtattgatttcctcttttatacattttatttccttttgtgtatctctcactgctagctagccctgtaattcttttattcttttattccttgaaagaccacaaacacaggga

SEQ ID NO: 803287 - DNA, 595 bp, Homo sapiens
tctctatcgtcattaaaagcatttacataatactgggtccgctaatttccattaggatttttcctaattatagtaaggtggtccttcagctataatttaaatatagtgacaatgcacaggccagcttagatcatttttcatttattttctaatatactattaatccttttaccatttaatactttctaccattaattctgaatcctgccagcaactccctatatacagtctgtggtacttaggccatttgcagatgatcacattcctttcatgtgaatgatcttatctctgatagtttcaagaacgaaatctccctttagtgtttctttttcatttactcacactatatggaaaatctgatactcggaaatgtccaggtactcacattaggactgatcagagaaacaacttgacacatggagaatgaagaaaagcaggacagggygacagctcgcccaagagtgacacagggccaagggaaaccccacccccagccaagggaagcggtaaatgaatgtgtggccctgggaaactacacatctccctggaatctttgcaatccttggaacaggagatccctttgtgagcccactcc

SEQ ID NO: 803288 - DNA, 585 bp, Homo sapiens
cagttgaaatattatcactgaaatattttaaaatattatacttaatatattttattatattaaaaatattgtgaatattcaactaatgattctgtgtgaagtttaatgcaacaaacagaatctgacattatagaacaagaatttgaaattaagccaattcaatacatagatcacatatatttaaaaatcagataacaaagttatttttcaaaaacaaattgcacatgttatcaaatttccagatcttactgtcacagaacagaatgactgtatgtgaatgttggctctgttttggagcttgctgtgtctctccctggattttttgttttctttctagtgttctagcccttacattttttttgtacttctgtttccttgctaatagaaagactttccactaaaacgaaatggtcccatatttgtcagctgccmgcaaagttagtctcctggaagaatatgccagaattctctgcctaaattctgctggtcctaatatcatgcttcacagagtcatcttcacactacattcagattgtcgctacttttcctactccttccctttctgtgccttgtgcagttgaaact

SEQ ID NO: 803289 - DNA, 636 bp, Homo sapiens
ttaaatcagtcacttctctaagaaagtcctaatttcttttagggataaatggaatttggagaacataatttgagtattatttgtgcatttagggtattcattgttctttcaggccttttcagtggacacagctagaaaaccrgtcatttttaagaaaaaattaattatgaattcatactgacatttctaaatcaaagcttctaggtttttatttaacttaaaaaattttacatacgcatctcttttactctgaaaatttactcttttaatactttaaagttttatatttatatattttattagtccaataataatagtaattgtcatgctactcacaagaagacccatgaatgtaatttagaattgtgtgtgtgtgtgcgcatgtgtgtgtgttgttcttgggggtatatgtcccataacagatgtaccacccaaagattgacgttaaatacttatctgtgtgcttgtaattcttctgtaaagaaaaattgtggggtttttttttgccaacttggcagattagcggttttagtaggcctcactcgcttggaaatagcaaggtggtccatgaagataaactctgtgagctacaattcaggaaggcaaatgggaatcccagatcccagggatgagaat

SEQ ID NO: 803290 - DNA, 620 bp, Homo sapiens
aggaagacatttttgtggggatgttgggtgaagttgtgggaatagatgagactgtcctggagaaatagtggccagagattaaaagtgaagactcaaaacaggacattggtgaatggcaaaattcaagaggaagggaaggaaggagacaccagcaaaggaggggaaataatcagaaaggtacagggagaaaaataaagtgcagaaactccaagctgagggtttccaagactgagcattgaatactaaaaaggactgatgaaaatgtgaactgaagaaaagccatttgacttttttaaaatggtggatgttaatagtaatgtttgaaaatgtactacaagggggtgaggtcaaggtcaagatccaagttaagtaataaggctgatgacaaaragaaaagtgatgctcaaggagttatgggttgcaacaattgttagggttgtgctccttcatgtatttcacagagcagccatgttcacaggatgagggaaagaatctgtgccaagggcaagaaacacccttgagagagaagggtataattcacgggagaagatgtcagtttaagcaaaaagggactgtgcagtcttattggtggtttcatcaataattttctattagaacta

SEQ ID NO: 803291 - DNA, 631 bp, Homo sapiens
cttttatgtaatatgaaccagaaaattccttatttttaaatcagttgagattttctgctacctatagccaaaaacaccctaacttgccaacttttctaccagcttcaatcagaattcagctccatcacttcaccaacgctgctgttgtaaagagcatcagtggccctcatgttggagaatccaacaaatagttttcctgctcctgtatctctgctcagccttygaagattagattttccatccaatatgcaagtgtgcttaaggatattcactgtagcgttggatatcacagcaaaatattaaaaaataggctactgatacactgaatactgaaaataatctactgatgcacacaattttatttcatttatgttttattatttttatcttaaatatattttaattttaaatattatataaatatattcaaatgttataaaattattttcttttaatatttacacttatttcaaactaattttattttttgttactttaacattttatttagttggtttttgcatttatttaatgtataaatgtatttattgaatcaccaataggggactgaataagctgcgtatttcttcctttgagcgcagctggtgcaataaacaggagctcgcagagt

SEQ ID NO: 803292 - DNA, 573 bp, Homo sapiens
gcatggcacatgtatacatatgtaactaacctgcacatgtgcacatgtaccctaaaacttaaagtataataataataataaataaataaataaataaataaataaataaaaagaaagcatatcccatgctcatggataggtagaatcaatattgtgaaaatgatcatactgccaaaaggcaatctacaaattcattgcamttcctatcaaaataccaccatcattcttcacagaactagaaaaaaaaatagtaaaatttacatggaaccaaaaaaaccataacgagattaagcaaaaagtacaaacctggaggcatcacactacccaacttcaaactagactattaatataaggctatagtcaccaaaactgcatggtaccggtatataaatagacagactaatggaacagaatagagaacccagaaataaagccaaatacttacagtcaagtgatcttcaaaaaattaaacaaaaacctatagtgaagaaaggacatgctgttcaacaaatggtgctgggataaatggcaagccacatgtagaagaatgaaactggatcctcatctctcacc

SEQ ID NO: 803293 - DNA, 573 bp, Homo sapiens
gcatggcacatgtatacatatgtaactaacctgcacatgtgcacatgtaccctaaaacttaaagtataataataataataaataaataaataaataaataaataaataaaaagaaagcatatcccatgctcatggataggtagaatcaatattgtgaaaatgatcatactgccaaaaggcaatctacaaattcattgcacttcctatcaaaataccaccatcattcttcacagaactagaaaaaaaaatmgtaaaatttacatggaaccaaaaaaaccataacgagattaagcaaaaagtacaaacctggaggcatcacactacccaacttcaaactagactattaatataaggctatagtcaccaaaactgcatggtaccggtatataaatagacagactaatggaacagaatagagaacccagaaataaagccaaatacttacagtcaagtgatcttcaaaaaattaaacaaaaacctatagtgaagaaaggacatgctgttcaacaaatggtgctgggataaatggcaagccacatgtagaagaatgaaactggatcctcatctctcacc

SEQ ID NO: 803294 - DNA, 573 bp, Homo sapiens
gcatggcacatgtatacatatgtaactaacctgcacatgtgcacatgtaccctaaaacttaaagtataataataataataaataaataaataaataaataaataaataaaaagaaagcatatcccatgctcatggataggtagaatcaatattgtgaaaatgatcatactgccaaaaggcaatctacaaattcattgcacttcctatcaaaataccaccatcattcttcacagaactagaaaaaaaaatagtaaaatttacatggaaccaaaaaaaccatarcgagattaagcaaaaagtacaaacctggaggcatcacactacccaacttcaaactagactattaatataaggctatagtcaccaaaactgcatggtaccggtatataaatagacagactaatggaacagaatagagaacccagaaataaagccaaatacttacagtcaagtgatcttcaaaaaattaaacaaaaacctatagtgaagaaaggacatgctgttcaacaaatggtgctgggataaatggcaagccacatgtagaagaatgaaactggatcctcatctctcacc

SEQ ID NO: 803295 - DNA, 695 bp, Homo sapiens
atatgttcatttgcagcactattcacaatagtaaagatatggaatcaacctgaatgcccatcaatgatagactggataaagaaaatgtggtacatctaaaccatggaaaactacgcagccataaacagcaataagatcatgtcctttgcacaaacatggtgggagttggaggycattgtccttagcaaactaatgcagaaatagaaaatcaaatattgcatgttctcacttataagtgggtgctaaatgataagaacacacgggcacattggggggaacaacacccactggggcctgttggagggaaggggtaggaggagagaggggatcaagaagaatagttattggatgatgggcttgatacctaggtgatggaatgatctgtgtagcaaatcaccatggcacacatttacctatgcaagaactctgcacattctgcacatgtacctctgaacttaaaataaaagtaggaaataaaaaataaaataagatactgagatgtaaaacataacacctcaaatatacatatgtcaattgaaaattactcatcacaccaaaaaccaggaagatcacaaagtgaattggaaaaaacgaccaaaagacaccaacaccatgatgatggtaatgttagaattatctggtaagcattttaaagcagacatcataaatatgctttaggagcagtcataagcatg

SEQ ID NO: 803296 - DNA, 528 bp, Homo sapiens
aatgtggtacatctaaaccatggaaaactacgcagccataaacagcaataagatcatgtcctttgcacaaacatggtgggagttggaggccattgtccttagcaaactaatgcagaaatagaaaatcaaatattgcatgttctcacttataagtgggtgctaaatgataagaacacacgggcacattggggggaacaacayccactggggcctgttggagggaaggggtaggaggagagaggggatcaagaagaatagttattggatgatgggcttgatacctaggtgatggaatgatctgtgtagcaaatcaccatggcacacatttacctatgcaagaactctgcacattctgcacatgtacctctgaacttaaaataaaagtaggaaataaaaaataaaataagatactgagatgtaaaacataacacctcaaatatacatatgtcaattgaaaattactcatcacaccaaaaaccaggaagatcacaaagtgaattggaaaaaacgaccaaaagacaccaacac

SEQ ID NO: 803297 - DNA, 583 bp, Homo sapiens
gcattttaaagcagacatcataaatatgctttaggagcagtcataagcatgcttgaaacaaaggaaaaaaatgagtttaaacatagaaagtgctggaaaagaaataaaatacattttaaaagaacaaaatggaaattgyaaaggtaacaaataccgtaatacagttaaaaaatcacacacacaatagatgagctcaacagcataatggagaggaaatgaaaatcagtgaaattaaagataaaacaacagaaattgtccaatgtaaaaaaaaaaaaaaacagaaagaaaatgagctgaaaaataaataataagaacctcagaaatgtgggggactataagaaaagatttaacatttatgtcatcaagtccaagaaaaagaagagaaagaaagtagtgctaataaagtattcaaagaaataatgacaaaaatttttccaaatttggcaagagacataaacctacagattcaagaggctgaacaaatctcatatagaatcaaacctaagtaaatccattccaaaatacatcaaagtcaatcttctgaaaactaaaatcaaataaataaataaatgaataaatacaa

SEQ ID NO: 803298 - DNA, 602 bp, Homo sapiens
cattcctggacccaaagtgctccatggcctccacaatattcacgccttctttcaccttgccaaagaccacatgcttgccatccaaccactcagtcttggcagtgcagatgaaaaactgggaaccatttgtgttgggtccagcatttgccatgggcaagacgccaggacctgtatgctttaggatgaagttctcatcttcaaatttctccccgtagatggacttgccaccagtgccawtatggcgtgtgaagtcactaccctgacacataaaccctggaatatttctgtgaaagcaggaagccttataaccaaatcttttctctccagtgctcggagcatgaaagttttcttctgtctttggaaacttgtctgcaaacagcttgaaggagatgcaccccaagggctagccgtcaaaggcgatgtcgaagaacacagtggggttgaccatgactgatagtacagggctcccagcagcggcatctgcaaagccaaagcagttattttaaaaacaaagacctgctagtttttgcaaagcaagtttatgctgattgctatcaactagagcttacaacttgtttctttattgttttgtttggtaagtg

SEQ ID NO: 803299 - DNA, 380 bp, Homo sapiens
tagaaccagattataatgggatccacatgtgaaaactatcagacaaggaatttaaaatactattattgatattgtaaaggctttagggaaaaaaaacagaaggtatgcatgaacaaatagggaatttcaactaattgtcggtaattatgtgaataaaaatgaactaaacactgcattcaaaaggcagagatcaggaaaatagatttaaaaartaaatataggccggacgtggtggttcatgcctgtaatcccagcaatttgggagggcaaggtgggcagatcacttgaggccaggagttcaagaccagcctgggaaacatggtgaaaccctgtctgtactaaaaaatacaaaaaaattagccgggcatgctggcacgtgc

SEQ ID NO: 803300 - DNA, 614 bp, Homo sapiens
gggccaactgcacatatttgttatacataggatgtcatatatgtacaatagggggttatacattctctctgcatttatttgctttctagtcattttacttttttttttttttgagatggagtttccctctgttgcccaggcaagagtgcagttgtgcaatcttggctcactgcaacctccacctcccaggttcaagcaattctcctgcctcagcctcctgagtagctgggattacaggcatgcaccaccacacccggctaatttttgtatttttagtagggatggggtttcaccatgttggtcaggctggtctcgaactcctgacctcaggtgatccaccctcctcggcctctgaaagtgctgggattacaggcatgagycaccacgactgatctggtcattttacctctgtggcttttctactgtaaactgcagatgttttcttttgccaaagaggtaagtagctcatagagctgtagttttaggataattagtatttcttatgtctcacgatgagtaacttttcactatgttgccctctggtcggttcagtttttctggtgctcccttcccactgctgccagaggtagagaattaggagctggctcccaagg

SEQ ID NO: 803301 - DNA, 560 bp, Homo sapiens
atctattttcactttgctgtcaagaaactgctggaattccaacttgacctggttcagtgtgtctgtagagctaagaatcaccaagggagcaatggttcctacctcactctgcaaagaatacaatgtacatttggaaatccacatccttttcccacttctatgtttcaggtgcttaaagaacttgttaaattcagaaagaatcacaaactttcctgtctaaaaattttcaaggaggtttgacaatgatgctttaaagactgatagagtgggatttatttatccctataactgtcaccttctcaaaactccttagtggtatatttcaaatgactttttattaccaccagtcaggagaaaagaagaaaaggaattatctstcctgtctttcctgtttcctagtcttccttgctcgtatctgtttcattgtactctatatggtaaatatcaactcacatagttccactataaaatgaatgaagttaggtctatcataagggaaaggtagtcactgctgtgggtgttgcaaagaaagcctccaatgtccaaggaccttgaaacac

SEQ ID NO: 803302 - DNA, 618 bp, Homo sapiens
atcctcttcaagttggaggataaattaagaccatcgcagcctccatctctccgtttcttctgtcgtatacccatattagagatgctacgtttaagtttctctttctctaccctcagttccttatcggtgccttctattctgagtgacaaaagaatgtgttcttcccrtcatacagtctaactactggatgctaccccatgctgcacaaaccccatgtctttacctatccaccctcccgtgaacagcaggttgcctctgaggccccatcatcacaagtaacattgcaatgaatatccttatagacctttgcaagaacatatttgggatatatatacatacacacacacatacacatacatatacacatacatatacacatgctggagtggaactgttgaatctttaaatgcgtctttacttcacctcccagcaatacatgaagtctatctgtctgtctgtctgtctagctagctagctagctagctgtcatctatctaacctacctacctacctatcatctatctatatagtatacttggcattatacttggcattttattatacctggcaaggtaatagctggcattttccagcatattcttcacatagtcatggcag

SEQ ID NO: 803303 - DNA, 506 bp, Homo sapiens
ttcccctagatccagaggtgtataccatagggaagggaaatacatgattcagaagagatgtgtaggacaactgaagtacgatgacatgaaggttgttttgacctaaaggcaggatttacacactcttacctagggagcaatagataaactggaaatcttaagaggccttcttagaaccagggttaatcaaaagtcaacatggcaaattagcattcaagatgtagttgctttatctccacaactgttatccaaaatatgcaaagtactcaaagttaacaataaagaatcaaacaatgcaattaaaaatgggccaaataccyggacacctcacctaataagatatgcagatgacaaataaacatatgagaggatgctgcatgtcacatgtcatcagggaaatgcaaattcaaagaatgagataccactacacacctattagaatggctaaaatccagaacacttgcaacaccagttagttgctggtgaggatgtagagcaacagaagt

SEQ ID NO: 803304 - DNA, 604 bp, Homo sapiens
actactacagcccccacactagatattcagggccagaaatattttattcaagttccattttattaacaactttctggagaaattaaaggcttcacaaattcttacacaagttcatttctccttttattgagctcattgctgctgaaatgagctacattaaaacatcacagtattattaaataataaaatagttataggcatatgtcattcaataaacaacaaaaccatcataacaagaacatttagacaaatctccattctctataaagcaggatgcctcagtctcaatttcctgcacatatttaacacytattaatttgtatttctccacattcctcactgaagctaccactggcagtctgacatccttgtgattttcacaatccattacccagtccaccatgtagccatcaaaggcagcactgtcaaataccactaactgagaaccaaaaaaaggaattagttgtgtctgatggccggttttctagtgtgtgtcctttttatcagccatcgctctgcatatcgtccttctctgagtctagatagcatcaggaaaagagaaccaggttagtttggactatctttcaaatttaattatgtaaag

SEQ ID NO: 803305 - DNA, 625 bp, Homo sapiens
gctttttccaattattttggagtataagtatggttgcctatagagaaaaggtggatttaaacctcctgaatcattgtgtgtgtgtgtgtgtgtgtgtgtgtgtgtgtgtgtgtgtagcgggacactctctctgtcaatacaaacaatgtgattttaattataatacacgatgtatgggcccagttaagatacagtgatttatcaatgaagatcaaatcatraacgtgtagagaaagggtactcatatattgttttattgtctaatcaatgcacttgaagattactcatagtgtccaggcaccttcttttcctcttcaggactagaagccatctctctgtgtattttactgttaaatgtgccatctcttgctgattttatattttctaccgtgaggaaaacgtaatgctattattactcacaatgtcatagctcttcaaaatctacttgcctaaaaaaacatagaacaacttgcctatctagttccctaattccacttatttaatgcagggtttattcataatgctgcatcatccaaccatcatccaacctatttatcattcacaatgccacctgtgaatactggcttccattgactctttcaagaattgctactgggcctcacca

SEQ ID NO: 803306 - DNA, 588 bp, Homo sapiens
tgtaccttttaaggggggcatttatcccatttacattcaaggttaatattgatatgtgaatgcttgattatggcattgtgttgttagctgattggtatgtagacctgattgtataattgctttatagtgacagtgggatatgttgttaagtgtgttttaatggtggcaggtagtagtcttttattttcaggtttagcattgtcttaagaaccttttgtttgggagatctggtagtaatgaatacccttagcatttgcttgtctgaaaaggattttatttctccttcacttatgtagcttaacatgactggatatgaagttcttggttggaawtttttttaaggatgctgaatataggcccccaatatcttctggcttgcaaggtttttgccaaaaggtctgttgttagcctaatgtgattccctttgtgcatgacctgacccttctctctagctgtctttaacatttttttcttgtgtgttaccttggagaatctaaggactacacatcttgggaatggtcctcttgtagagtatctcgcaagggttcttggaatttcctgaatttgcatttcaacctctctgtaaca

SEQ ID NO: 803307 - DNA, 626 bp, Homo sapiens
gtaatgataactgcaatttatgaaatgcctgctgtgtcctaagcactggacttggtgctttgcatgattccatcctcatgacaaacctataatttgagtagtagtatttctctttttttcaaatgagaaaattatggcccaataagttatcttatccaaagcctgtaagtgagaaaacatattttactcttagtattttctcccttactgatctacataggaagagatgatttcctgctggaggaaaacaaagaaaggaaggctgcatggaggaggtgggatttaaaattgccaggatgttagagtttggataggatgaaatggaaggggcaacaaccgaagaaaggcttggaggcaggaccattaaagttaaggtgatatatggaaaatggcaaaggctttcccagttgcgttttgcttcagtctacaatatgggtgtgcttctgtatctgtgagaagtttggagctgccgtgaaaacyatctctagatttccatcttcttaatggcatagccctcgtgcaggctgccagctaatacgtggtaagctggagcctacctgatccagatcaggagtggcaggagatggatggcagccggggggcccagctgcacctcacagcaggct

SEQ ID NO: 803308 - DNA, 639 bp, Homo sapiens
gccacattcaactgtgacttcctttaagaaaaaggttacgtcatttttctttgatctctagtgtttggcaagatgcttgtctcagagcaggcacttggtacactatcattcaaagaaaaaatgaatcaatagttaaaaaattcttaaatagttatttgcattaaatctgctttcctaatgttgtccagtattttggctttaagcatggtttgtgctccatgaaatttaattatattataaaacatttccctagtgatgctgataattttcctccagttgtaatgagcatacacttgaggtgatactcccatttagttttytaagcaagtgagacagaaaatttgatgaataattatggtgaaaatcctgataaaatgaaaaagtttatcagtggctaataattactggacggttttcagttacacacacacacacacacacacacacacacacacacacacccttaaacctaaccattaaaagacatgcactaaagagacattttagcaaaaagcacttgattttgtaagtggcacctaaagccaccaaccaaagataaacctggtgaacacataatatggagagagtccctggtcacatctgagtttttccagtcatttgcagacaaggagtgaccac

SEQ ID NO: 803309 - DNA, 635 bp, Homo sapiens
agctgctacattagggcttgtttatgaaagtatttatgtaaattaattatgatgatttttaatcaataaaatataattttcctaccaaggagatttttctggattatttgcatttagcaaaagtggaactatcgaaacaaaatatttattagaaaggcttcaaaattttctaaacattacaaatataattattacaattactattgaaagttgataaaataatgagatcagtgttaaccaatgttgtttcctatgtggatatttggttttctccaaaaaatcttaatggatgtagataatttatcccatggataaaattcttaaaagtgaaaatyaagatattattattcaattcagaaaaaaaattagtaaatctaatggctgaaaaaatttaaatttagccaaaattatttaaaaactaactgatttataagctcttcagtgagtgatgtgaaataggaaaattaatattttgtataaggaagaaaatacattttaattttctgtatgtatgtctgtatatatatataacacattttatataaatatgcatgtgtatgttattataatgcacatatatatgtatagtgcatctacagaattttacatagagaagaaaaaatatcaaacatctt

SEQ ID NO: 803310 - DNA, 622 bp, Homo sapiens
gtacatgtgcacaaggggcgggttggtccatatgtatacatgcgccaggtgggggggcggaccccataaacttctcatttacattaggtttaactcctaaggctatcccccccccctcccccaccccacggcaggcccaggtgtgtgatgttccccttcctgtgtccaagtgttctcattgttcaattaccacctatgagtcagaacatacagtgtttggttttttgtccttgtgatagtttgctgagaatgatggtttccagcttcatccatgtccgtgcaaaggacacaaactcatcattttttatggctgcatagtattccatggtgtatatgtgccacattttcttaatccaatctatcattgatggacatttgggttggttccaagtctttgctattgkgaatagtgctgcaataaacatacgtgtgcatgtgtctttatagcagcatgatttataatcctttgggtatataccccgtaatgggatggctgggtcgaatggtatttctagttctagatccttgaggaatcgccccactgtcttctacaatggttgaactagtttacagtcccaccaacagtgtaaaagtgttcctaattctccacatcctctccagc

SEQ ID NO: 803311 - DNA, 631 bp, Homo sapiens
ctataaatcttagtaaatagaaatcatttcatcattctaatcacttatcagagcagtaaataactatagggcactatttaccctgcctaaaaatgaaatgattagtaagaatattctaggtgccacctagaacttgtcagcccctaactgtggattcctggattatagcacmataagacacatagaaaagaattatatcttttgaaaaggtaaaactgatttaaactactttttctttccgtctatcagctctatgacctgtcaaatcccaggtctttgccactctggctgaatgtctcctttgctctgcaccactctgtgtgatacctgctcttttttctggttcacatatttcataaaaataaacgaactttttaaaacacaaaaagtgcatttgctttttggtgccatctcttctcagcttctttcttcctgttgaaaaagtggcaatatttttctttttttcctcctttggtcctcaagtactagcattgcatttttctcttgccctttgtgacttaggcaagattcattttatttctcgtttttattttcttgccttacgaaaaaaagatgatttgatgactttctctactcaaagatgtgttgggtcaggcagagaaggagcaca

SEQ ID NO: 803312 - DNA, 631 bp, Homo sapiens
ctataaatcttagtaaatagaaatcatttcatcattctaatcacttatcagagcagtaaataactatagggcactatttaccctgcctaaaaatgaaatgattagtaagaatattctaggtgccacctagaacttgtcagcccctaactgtggattcctggattatagcaccataagacacatagaaaagaattatatcttttgaaaaggtaaaactgatttaaactactttttctttccgtctatcagctctatgacctgtcaaatcccaggtctttgccactctggctgaatgtctcctttgctctgcaccactctgtgtgatacctgctcttttttctggttcacatatttcataaaaataaaygaactttttaaaacacaaaaagtgcatttgctttttggtgccatctcttctcagcttctttcttcctgttgaaaaagtggcaatatttttctttttttcctcctttggtcctcaagtactagcattgcatttttctcttgccctttgtgacttaggcaagattcattttatttctcgtttttattttcttgccttacgaaaaaaagatgatttgatgactttctctactcaaagatgtgttgggtcaggcagagaaggagcaca

SEQ ID NO: 803313 - DNA, 596 bp, Homo sapiens
tctcctttgctctgcaccactctgtgtgatacctgctcttttttctggttcacatatttcataaaaataaacgaactttttaaaacacaaaaagtgcatttgctttttggtgccatctcttctcagcttctttcttcctgttgaaaaagtggcaatatttttctttttttcctcctttggtcctcaagtactagcattgcatttttctcttgccctttgtgacttaggcaagattcattttatttctcgtttttattttcttgccttacgaaaaaaagatgatttgatgactttctctactcaaagatgtgttgggtcaggcagagaaggagcacattcagttttggtgtagtaccttgcttaaacaccttaatttttytcagctaccccatcccaatcaattgtgaagggcacatttatccagaagcttgttttatcatgtcctgggggaatatataggaaagctcttaatttacatggttcttttaaatccttctaatacaagagttatatcctatactattgaacagttctttgttagaattaatgctccttattttatccatgttttagtttttctcttccctgtaatggtg

SEQ ID NO: 803314 - DNA, 537 bp, Homo sapiens
ctcaaaaaaaaaaaaaaaaagaaaagaaaaaaaagaaaagaaacaaaaggatatatctgaaatatttttgaagaaatataaactaccattattataacagatccaagataatggaagagtgtagacaagaagaaatgagaaagccctaccaggcaataagaattcttagggcacctgcaaatatatgcctaggtgtcttcataaacgctgtcacctttgttatgatggtcattctgcatcagatcttaatgtgactttccaaatacagtttcctattgtgaaagaatgatctgatctgttaatatattctcctagcacataagtattatgtatatttatattgtgtgtgygtgcgtgtgtgtgtgtgtgtctcactgtaaataagcaagttagttgacattctggctaattagtgaggatcacttaacaaaagtctgtcttccacagacttattagttttattacacatgagtgaatgaacgaaataaatttcttttacatgcaaaactgatgaccagatgctagcatgtgctgtac

SEQ ID NO: 803315 - DNA, 537 bp, Homo sapiens
ctcaaaaaaaaaaaaaaaaagaaaagaaaaaaaagaaaagaaacaaaaggatatatctgaaatatttttgaagaaatataaactaccattattataacagatccaagataatggaagagtgtagacaagaagaaatgagaaagccctaccaggcaataagaattcttagggcacctgcaaatatatgcctaggtgtcttcataaacgctgtcacctttgttatgatggtcattctgcatcagatcttaatgtgactttccaaatacagtttcctattgtgaaagaatgatctgatctgttaatatattctcctagcacataagtattatgtatatttatattgtgtgtgtgtgygtgtgtgtgtgtgtgtctcactgtaaataagcaagttagttgacattctggctaattagtgaggatcacttaacaaaagtctgtcttccacagacttattagttttattacacatgagtgaatgaacgaaataaatttcttttacatgcaaaactgatgaccagatgctagcatgtgctgtac

SEQ ID NO: 803316 - DNA, 615 bp, Homo sapiens
ggaatctcactgtcattcaaattatttggcagattatataattctcctgagactcagttttctaaactgtacaatgaagaatgctgattccttacttatctcaaggaattgttggataaaatgtaatgaaacatgaaaattatctaaaaactgtaaagacttatataagtgtgagttatatacttctaagtcagcatttaccactagaamaatataaatattaccatgaaaagattcttattcagttaaaggttgtaggtagaaaattaattaaaattatttaaatataaagcaaattgaaatatttatctttcaattttttaaataaattagcagtctaatttgtcatgtatgaagaaagatgtttttactttttgaatgtaagtcagtaacaaaaatatttctcatttattattgtcattagtaccaagctatgaaattttaaattgattaatgaaacatttaagtttatctttaaatatatttcttgatacattcttgatgtgtaagaaaattggatttgatataactatattttgaaacaagaggaaaaagctccaaatataaaattaccgtaaaatgacagtaatgtcatcatatcaagaacactaaata

SEQ ID NO: 803317 - DNA, 618 bp, Homo sapiens
ctgtagattggccacaaagaaaatattctccaaatggagcttctttccccctaagcctcccccaaatcattacctctgcttctgattcaatccctcaaaacctcatccatcagcttgaatgagagacaactattcagccaccatgtccatccgctttcttatccccccttgctcacccccagcgtctcagcccaaatcttccctccttccagccaacaaagctcccatgcctgtcatctcctgatgtcaatgcagcgggcaggggagtgggggaccactgaccccacatgcctattctctgcttagattacccaaaataccaggtgtcgttatttttcagagktgcaaaaatataatacaaagtcattctaaactgtcactgaattcagagtactttttgccattgtctagtcactgaattcagagtactttttgccattgtcttattttctcaatcaacaaatgctaagagtacaattatatgaagttctacagatttatttgttacttgcattacttagtaatggttcttatgcataaaggttaggaataacttctttgaacaaatatcctatataaaaaaacaacaaagtggtttttaaaaatcacattgctgtt

SEQ ID NO: 803318 - DNA, 466 bp, Homo sapiens
aaactattttctgtcagataactcttatccatttgggaagcttttctaatgaaaagttcaatgtacatcctccaaagtacttggcacacttcctggaaaatggtatttagtgctacctgggcttttaaaacacacacagaataaagtgtttcactctgtgtagctttggattaaaaaaatgaactggccattgcctgatgaagtatgaggccctgagatatccacgagggcagactaatatccagaaaaaaakttttttttatgagtgactacctgtattacctaaggaatatgtctttaaaaacactgccaacagacacccattgatttcttctcagtcatgatcacttgagtggcaggaagaagcccaataaaacagccagccaacagataccctgcgagtgccaccaaggtgatagcatgtgttacttcacagtgaagggaagcaaaagtagtgaagtgtctg

SEQ ID NO: 803319 - DNA, 614 bp, Homo sapiens
tcttcatcaatacattgatgtcctcctatttagaaatgcattttttgagagcttgtcacaaagcctttattaacaggctgttaaggaaagttgcagtgtttcctttaaaaaggtgctttattgactttaaatttataaaaggttaacatgtcttgatctagttgaaattatgatttatatcaacatgataattatgtgtacagttyatattccactcatactgtacaccagtaaaagcaaatattcaaagggttctctaagtttcaagattaaaaaccataatgccttgactgaatatcatgattacaaaacaggtattaagaactgtgaaggtatatgctcacaacatatcccttctcccattctcactttattccaaaatctcatttatttcactgacaatttgtttatactttcaaaaatccttttataatttttatagatataactcaaaatgactgcttgggtctttaaaaaattaacagattaaaaagcaatacaagtgcacttaacactgatcaaagtctgaaatgccaaaaagcaaaataaaaatcctctgaaatatatatgtatttttaaatatagaaaaactccaccaatagtagaaacaaagt

SEQ ID NO: 803320 - DNA, 569 bp, Homo sapiens
ggagaaagacattctagaaactagtctgaggaggcaaagaagcaatttccagatggatgaacagatgtaattggtaatgtattaatactatgaaaagaattttatttttgttccattatttttagaataattttaaatacgggagctttatttttactttagccaaactgatgctggcatgttggtgttccaatagaataagtctaattagtataagcaacaaattagaccattactccttactcctacaggaataatttgcttgtatttctttttcatacatgaactttgaaaaaacagccraagttttagagttgaaaaggctagtttcatcccagctctgccatttcccagtaagctggtacttgggcaagttatttaatttcactgaggatatatgcatacttcccagaaaatgtggcttagcatctacctcatctataatatgagaatatacccacctcagaagccttttgtgaaaattaaatgagaagatatactcagagcacttggcactgtgtgtctatcatatggctaccaatcaacagtcaacaaacctgttctgctct

SEQ ID NO: 803321 - DNA, 623 bp, Homo sapiens
ctaaactgaatttaaaaaaaaaaacaaaaactcacaagctcatttgcccaaattcatcctgtaaagtctgtaagacttctgacaactcctcattaataccgttggaggagggaggtgttactgacaacttcttacttttaccacctcgtgaagatacttgctttgccaaaggaatactgttgatgactcgatcattgcacaaagctttactgtgttgcttcattagatgcaagacaagctgaacattggctaccacggcatggctagggcttgtggactaaaggaagaaaaatgatgaaagaagtaattgaagttatattctctacaccactttctattccctaagcctaggtaaaaagaactctccacccccyaaagtagagtatataaatcctaaaattattctcatcatgatgttcttctatttgaaatcctttgatataaatccactaactatgtttcagaatggaaaataaggccctacatacacatcattgagctgcaacctacatttcctagcctcatgtcctatcatcctccccttctctccattttgtgaacaaaccatatttgcagatgacatttttttggtgtattagcaacatttatatcattctttaaaa

SEQ ID NO: 803322 - DNA, 581 bp, Homo sapiens
gtactgtatagcttagtgtccttgaaaggtgttggcagtagccaagcaggatcagagtgagaaataaggctggagagagagtgtggggccagatagtcaaatgctttgactagtagtgggtatttgtgaatgtgggactgagaagattaaagatagaaggttgaaaatcatttgcacagagatggtaactgaagatgtgggaattcatgatatttcagagagaaattaagaagagagaacagaggcaaggtgagagctttcaaragaatctatatttaggggacaactggaagaaataacttagaaaaggagagagtcaaagcaaagctagtaaattttaatgacaagggaagcttagagagcaaagaattccaggagggaggtagtgatgatagcatcaaataatgcacagaggttaaggaaggtgagaactcagagaaacaaggcccctggttttgttcctgaggtcattaatgacatctagaaaacagcatcagtagagtagttgaaggtagagttcaatttgagtgttattaatgattctcatgtagattcaggtaatcaatattgagttcctacta

SEQ ID NO: 803323 - DNA, 649 bp, Homo sapiens
atagttggctactaatgcagtacttgcatgtgaaagggacagttttaaaaaatatttggtataattctaggtactgtatagcttagtgtccttgaaaggtgttggcagtagccaagcaggatcagagtgagaaataaggctggagagagagtgtggggccagatagtcaaatgctttgactagtagtgggtatttgtgaatgtgggactgagaagattaaagatagaaggttgaaaatcatttgcacagagatggtaactgaagatgtgggaattcatgatatttcagagagaaattaagaagagagaacagaggcaaggtgagagctttcaagagaatctatatttaggggacaactrgaagaaataacttagaaaaggagagagtcaaagcaaagctagtaaattttaatgacaagggaagcttagagagcaaagaattccaggagggaggtagtgatgatagcatcaaataatgcacagaggttaaggaaggtgagaactcagagaaacaaggcccctggttttgttcctgaggtcattaatgacatctagaaaacagcatcagtagagtagttgaaggtagagttcaatttgagtgttattaatgattctcatgtagattcaggtaatcaatattgagttcctac

SEQ ID NO: 803324 - DNA, 624 bp, Homo sapiens
ctgaggcaacttctggaatactttgaaaaggtgggcgtgatgagagttgtcaaagcagaactggaacactgcggcccgtggtctcaggaagagactggataaaaaaagtcacctctgataagtcaactcaagccaattttatgtgcttactgaggtgcataygtgaagacttgaatacataatgagagctatacattgttaatgaaaatgcttaatattataaattgcatttaaagtgtgctcatatataaataaatatgacatagtaaaggtcaatctcacatataaaagcatttttaaaatctatagaatttcaataaaatgtttataattactacatctagatggtaagattatgggtgtgatttttttccttttcaatcatgtgttttctaaattatcctctgcatttattcagtaattttttgaaaaagaaaacaataaaacgttacgcatttaaacagggatatgtaagccattcaagaatacataaaacaaaagtgcacaccccagcatatccttgtgatactacagttgctgacataaagaacaaaaatgaaatgttcagccagtttcaataataaatataagtgcagaaataaaatatcagcaacattgtgtact

SEQ ID NO: 803325 - DNA, 629 bp, Homo sapiens
aaaacaaagttaaaattatttaaggtaagatcaatggtagaaaaacctcaaatactttgaatggggtgtccaagttcagattttcaaaaatgtatttttctaaaacatattaaaagtcttccttataccagaatgcaaaatttttttcactagrtttggatgaaatacttcaccttggagttgtgatatattaagaaccatttagctttaaaatgaatcccatttattcattacaaacctgcctataacaagaataactaaattacttatacaatgtgaaaatcacctccccaaaaaagaaatgtcacttcatttaaatgaatgaaaagtggcattccagtgcaaacacaacatactatttccaacaacctatactattatacaaaaaagcagtcataagaaattatattacatagttttataatgtaaggaaagaaaaagtgataggctgtgatgttttccttttttttgtatctaaattctgattaaatgtcatttgccttaaaataacaggcaaaataaccaaattttaagcacagtactttgacagacattgttagctccctccttcaaatagattcccctttctccctaactttgatcagggtagtttgtgccctgccgaagac

SEQ ID NO: 803326 - DNA, 629 bp, Homo sapiens
aaaacaaagttaaaattatttaaggtaagatcaatggtagaaaaacctcaaatactttgaatggggtgtccaagttcagattttcaaaaatgtatttttctaaaacatattaaaagtcttccttataccagaatgcaaaatttttttcactagatttkgatgaaatacttcaccttggagttgtgatatattaagaaccatttagctttaaaatgaatcccatttattcattacaaacctgcctataacaagaataactaaattacttatacaatgtgaaaatcacctccccaaaaaagaaatgtcacttcatttaaatgaatgaaaagtggcattccagtgcaaacacaacatactatttccaacaacctatactattatacaaaaaagcagtcataagaaattatattacatagttttataatgtaaggaaagaaaaagtgataggctgtgatgttttccttttttttgtatctaaattctgattaaatgtcatttgccttaaaataacaggcaaaataaccaaattttaagcacagtactttgacagacattgttagctccctccttcaaatagattcccctttctccctaactttgatcagggtagtttgtgccctgccgaagac

SEQ ID NO: 803327 - DNA, 629 bp, Homo sapiens
aaaacaaagttaaaattatttaaggtaagatcaatggtagaaaaacctcaaatactttgaatggggtgtccaagttcagattttcaaaaatgtatttttctaaaacatattaaaagtcttccttataccagaatgcaaaatttttttcactagatttggatgaaatacttcaccttggagttgtgatatattaagaaccatttagctttaaaatgaatcccatttattcattacaaacctgcctataacaagaataactaaattacttatacaatgtgaaaatcacctccccaaaaaagaaatgtcacttcatttaaatgaatgaaaagtggcattccagtgcaaacacaacatastatttccaacaacctatactattatacaaaaaagcagtcataagaaattatattacatagttttataatgtaaggaaagaaaaagtgataggctgtgatgttttccttttttttgtatctaaattctgattaaatgtcatttgccttaaaataacaggcaaaataaccaaattttaagcacagtactttgacagacattgttagctccctccttcaaatagattcccctttctccctaactttgatcagggtagtttgtgccctgccgaagac

SEQ ID NO: 803328 - DNA, 640 bp, Homo sapiens
agtgcctgggtactgggcgaggacggctgagctccagctgccgtgtagggataaggagcctcagtggggccagtgcagtggcacttaaccacagggatgctgatgcaaataagcacgagcctcttacacagcacctgacatgcaacaggaggcctcctgtttttaatttttaaaaaatttttcgagatggggtcgtggtctgttgcccaggctggagtgcaatggtccaatctcggctcactgtagcctcgagctcttgggtccagccgatcctcccatctcagcttcctgagtagctgggactataggcagcacccccatgccgggctaatttttagtattttgttttttgtaragttggggtctcactatgttgcccaggctggtcttgactcctgggctcaagtgatctgcctgccttggcttcccaaagtgttgggattacaggcgtgagccactgtgtgtggctcaggaagcttcttgattcttccacattgatctccccctcctctgaatggttgtcatggtgttgtgcccctcatgtggtcctgatcacacatttctcaggtgatgggatgtatcagttagctactggacaatagtgtcatgtaacaaatggtccccaaactcagtggcttag

SEQ ID NO: 803329 - DNA, 600 bp, Homo sapiens
gacagcacatggatattccttgtattcattatctcctcctcctcctcctcctcctcttctccttctccttcttcttcagatgcagtctctctccgtcgcccaggctagagtacagtggcacaatatcggctcactgcaacctctgcctcccaggttcaagcaattctcctgtctcagcctcccgagtagctgggattacaggcatgcaccaccacgcctggctgatttttgttttttcttgttttttgktttttcgggggggttttttgagatggagtctcgctctgtcacccaggctggagtgcagtggcacaatctcagctcactgcaagctccgcctcctgggttcacgccattctcctgcctcagcctcctacgtagctgggactacaggcgcccatcaccacagctggctaattttttgtatttttagtagagacggggtttcactgtgttagccaggatggtctcgatctcctgacctcgtgatctgcccacctcagcctcccatggtggcgggattacaggcgtaagccaccacgcccagcccatgcttgtttcttcttatgcataaatttttttttgcttgaaatattccac

SEQ ID NO: 803330 - DNA, 627 bp, Homo sapiens
cataaatgctgtcattttgatctacttcatcattgccagactcaattctggatgtctctgtgttaaaaccattttctaaacagatgtggggttcccttctcaagcacatttctgctcagctacatggggtttctgaatattctgtttcaaccctgactggcggatggtaattcagttctgacaaccgcctagagttagcgtcagactccacgggcttaaggatgtggttcccaacaagacggcccccacttcagataccagctacaagttcaggggtccccaggccacctgcacttttgactggctaccaattcaggagttcccacaaacccctcaggttcaacaaattgctacaacaactcacagaactcagggaagcactgtacttatgataacagttttgttataaaatatacagatcagcaccggccagatgcagagatgtgcggggcaaggtcarggggagtcctgaacaccgagcctcatgtcctctctctggggaaccaggcagctcagctacctgtgacatccatgtgctcaccagcctggaagctctcccgagctttggtgtccagagttcttaaagggtttcactggggtgattccagttcgaggctgtcttaagta

SEQ ID NO: 803331 - DNA, 609 bp, Homo sapiens
attcacattaccaagtgaaaattcaccagctgtctttcttcgtagctctttgacatgtatcattaaaactaatttaatctgaagtacctttttgtagattaggggatcaactgggtacataacaagatgtgtccagttttactcacaacatttttaaaaccctgaaaattagggcatattaatgtaattaactcacaggcagaaattgatgttggcattttccctaagtttctgtagatctygtacctaatggaattcataacttctttttccatagacactaaatgaccctttctaataaggtatatgtgtaggtccataattacctagtcaccagacttttcagaacacgagttttcatattttgtaaaaattgttattgtggaatacctatcctggattcacatttttgagtatttcttaaatgattcactctttctcattgaatatgttaagaaatttgaagaatctttcaaatgtttgaatcagatatatattttccataatatagaatattgataaaatacagaatttggaatcattcgaggtgataattttcaatagaataatagtaatgctcctaagaacattttaataattgaaatattt

SEQ ID NO: 803332 - DNA, 673 bp, Homo sapiens
ggggaaaaggaagtggaatatacagcatcaataaatgacaggcatgcgaggaagaaggacactggggagtccaaggaggcgatggcaataatggtcaccacaatgagaaggttgcccaccatagtcacattgtatgtgagtaaaaacattacaaataatgctttttgcacatcaggatcctgagagaggcctgggaggacaaattctgtaacattattacttgttcccatttactcttctctaaggctygtaatagagttgagagctcaggagggcagaaactgtaatgaaatagtgaacaggaacatgaatgcatccataatgtcacaaaacacactttcatcattgtatcctcaatagttatttacacacatgatcaacattgtgtaagtctctattgagttcctcatctcctcaaagattttattttagcctgcaggtgacagcttcagactctaagttttagtgaatattctgtacagaagaagagttaaaagcccaatagccattcatatctttcatacctctttatttaaaatgtatttcttggcatgactgttagctatgttgaagaggcaacagagttttggtcttaagaaacttactttatggtggtggtaataaactctaaataagtaaattggcatagattcagtcctttgtgtttgtagtt

SEQ ID NO: 803333 - DNA, 673 bp, Homo sapiens
ggggaaaaggaagtggaatatacagcatcaataaatgacaggcatgcgaggaagaaggacactggggagtccaaggaggcgatggcaataatggtcaccacaatgagaaggttgcccaccatagtcacattgtatgtgagtaaaaacattacaaataatgctttttgcacatcaggatcctgagagaggcctgggaggacaaattctgtaacattattacttgttcccatttactcttctctaaggctcgtaatagagttgagagctcaggagggcagaaactgtaatgaaatagtgaacaggaacatgaatgcatccataatgtcacaraacacactttcatcattgtatcctcaatagttatttacacacatgatcaacattgtgtaagtctctattgagttcctcatctcctcaaagattttattttagcctgcaggtgacagcttcagactctaagttttagtgaatattctgtacagaagaagagttaaaagcccaatagccattcatatctttcatacctctttatttaaaatgtatttcttggcatgactgttagctatgttgaagaggcaacagagttttggtcttaagaaacttactttatggtggtggtaataaactctaaataagtaaattggcatagattcagtcctttgtgtttgtagtt

SEQ ID NO: 803334 - DNA, 491 bp, Homo sapiens
aaccttacccccaaccccgtgctctctgaaacatgtgctgtgtcaactcagggttaaatggattaagggcggtgcaagatgtgctttgttaaacagatgcttgaaagcagcattctccttaagaatcatcaccactccctaatctcaagtacccagggacacaaacactgtggaaggccgcagggacttctgcctaggaaagccaggaattgtccaaggtttctccccatgtgatagcctgaaatatgrcctcatgggaagggaaagacctgaccataccccagcccaacacccgtaaagggtctgtgctgaggattagtataagatgaaggaatgcttctttgcagttgagacaagaggaaggcatctgtctcctgcccgtccctgggcaatggaatgtctcggtataaaacccgattgtatgttccatctactgagatatgggaaaactgccttagggctggaggtgggacatgtgggcaacaatactg

SEQ ID NO: 803335 - DNA, 552 bp, Homo sapiens
aattcttctggaaggctccagccctggatcactaacccttggtgcctgctgtgggccaggactcgtggcccacctgcgtggagctgggctacagatgcaagtaaaactgtctagtgtaagagagaggcttggccagaactggggagggactgcacrtgaggactccaggggtcctggggagtccacacagcttctccaggcaccaaggctggaggaggggctttgccagaaagtgagtttgcccaaacacaagagggctagaaaaggttcccatggcaaaaagccagcatgagcaaaggcactgggacctggagagcaggacacgctaaaggggcagcaggagagccatgtggcgcccaggaatgctaggcaccaggcagtcggtgggaccccagcactgcgcaccccagccaattatgagaaaactgcctacagcccttggagcttggagagcaggagctgagcaggtctccccacactctgggtctcactctgtcatacacactcagtgagtacaggagtgaccacagggattgcagaccattggggagg

SEQ ID NO: 803336 - DNA, 552 bp, Homo sapiens
aattcttctggaaggctccagccctggatcactaacccttggtgcctgctgtgggccaggactcgtggcccacctgcgtggagctgggctacagatgcaagtaaaactgtctagtgtaagagagaggcttggccagaactggggagggactgcacatgaggactccaggggtcctggggagtccacacagcttctccaggcaccaaggctggaggaggggctttgccagaaagtgagtttgcccaaacacaagagggctagaaaaggttcccatggcaaaaagccagcatgagcaaaggcactgggacctggagagcaggacacgctaaaggggcagcaggagagccatgtggcgcccaggaatgctaggcaccaggcagtcggtgggaccccagyactgcgcaccccagccaattatgagaaaactgcctacagcccttggagcttggagagcaggagctgagcaggtctccccacactctgggtctcactctgtcatacacactcagtgagtacaggagtgaccacagggattgcagaccattggggagg

SEQ ID NO: 803337 - DNA, 552 bp, Homo sapiens
aattcttctggaaggctccagccctggatcactaacccttggtgcctgctgtgggccaggactcgtggcccacctgcgtggagctgggctacagatgcaagtaaaactgtctagtgtaagagagaggcttggccagaactggggagggactgcacatgaggactccaggggtcctggggagtccacacagcttctccaggcaccaaggctggaggaggggctttgccagaaagtgagtttgcccaaacacaagagggctagaaaaggttcccatggcaaaaagccagcatgagcaaaggcactgggacctggagagcaggacacgctaaaggggcagcaggagagccatgtggcgcccaggaatgctaggcaccaggcagtcggtgggaccccagcactgcgcaccccagccaattrtgagaaaactgcctacagcccttggagcttggagagcaggagctgagcaggtctccccacactctgggtctcactctgtcatacacactcagtgagtacaggagtgaccacagggattgcagaccattggggagg

SEQ ID NO: 803338 - DNA, 484 bp, Homo sapiens
tggtgatcagaagcattctatgttgagtgtgaatgtagaaggaaaaacagtccattgtttcctaactcatacaaaggctaaggtgctgtatgtgggcagtctttgctttgcccagtccccatatggacatatttggcttaccacattttagtttaataactccagtcctccccaccagcatggttcaaacttcatttgccatggaattttaacgaattgtataaggtgcaaaccttgctrctggctctttagtccaaaaaaatgacataaataacagatgggcatcatgattaggacatcactgctttcgaagactagtggtgattggctggtcagtgccggtgtgttattcagctcatgcagacgtcagacaagtgtataggtgggttgcctcctcatctctcagtgatcaaccgatataacattttatgaaattcaatgattgggctgggcgcagtggctcacacctgcaatcccagcactt

SEQ ID NO: 803339 - DNA, 618 bp, Homo sapiens
tggcagccgggcagaggctgcaatctcggcactttgggaggccaaggcaggcggctgggaggtggaggttgtagcgagccgagatcaggccactgcactccagcctgggcaccattgagcactgagtgaacgagactctgtctgcaatcccagcacttcgggaggccgaggctggcggatcactcgcggttaggagctggagaccagcccggccaacacagcaaaaccctgtctccaccaaaaaaatacgaaaaccagtcaggcgtggcagtgcgcgcctgcaatcgcaggcactcggcaggctgaggcaggagaatcaggcagggaggttgcagtgagccgagatggcagcagtacagtccagcttcagctcggcatcagagggagaccstggaaagagagggagagggagaccctggaaagagagggagagggagaccgtggaaacggggagagggagagcgattttctgacttttaaaccctttattctccacttagtggcataaaggaatctctattatgcaaaactaatctgaaagtgaatagttatatagtggctacagaaaattttaccttttttttttttagacggatcctccaggttggaatgcagtgg

SEQ ID NO: 803340 - DNA, 602 bp, Homo sapiens
gcttcctgtttgtaagttttccttctaacagtcaggtcgctcttctgcaggtctgctggagtttgctggaggtccactccagaccctgtttgcctggatatcaccagcagatgctgcagaacagtgaagattgctgcctgttccttcgtctggaagcttcrtcccagaggggcacctcccagatgccagctggggccctcctgtatgaggtgtctgttgacccctgctggaaggtgtctctccttcaggaggcacaggggtcagggacccacttgaggaggcagtctatcccttagcagagctcgattgctgtgctgggaggtctgctgttctcttcagagccggcaggcaggaacatttaaatctgctgaagctgcacccacagccaccctttcccccaggtgctctgtcccagggagatgggagttttatctataagcccctgactggggctgctgactttttctcagagatgccctgcccaaaggggagaaatctagagagtctggctacaacgagctgcagtgggctccgcacagtccaaacttcctggtggctttgtttacactgtgaggggaaaagagcctactcaagcctcagaa

SEQ ID NO: 803341 - DNA, 602 bp, Homo sapiens
gcttcctgtttgtaagttttccttctaacagtcaggtcgctcttctgcaggtctgctggagtttgctggaggtccactccagaccctgtttgcctggatatcaccagcagatgctgcagaacagtgaagattgctgcctgttccttcgtctggaagcttcatcccagaggggcacctcccagatgccagctggggcyctcctgtatgaggtgtctgttgacccctgctggaaggtgtctctccttcaggaggcacaggggtcagggacccacttgaggaggcagtctatcccttagcagagctcgattgctgtgctgggaggtctgctgttctcttcagagccggcaggcaggaacatttaaatctgctgaagctgcacccacagccaccctttcccccaggtgctctgtcccagggagatgggagttttatctataagcccctgactggggctgctgactttttctcagagatgccctgcccaaaggggagaaatctagagagtctggctacaacgagctgcagtgggctccgcacagtccaaacttcctggtggctttgtttacactgtgaggggaaaagagcctactcaagcctcagaa

SEQ ID NO: 803342 - DNA, 543 bp, Homo sapiens
aaagcccttcctcaccgttgtgtttcctgtccatatagccctgccccagggcctggggctcccatggaggaccagtgcccaggagagattcgtgtgactgcagagcacctgggttgccctgaaggaaaccactggccttcagtatcactcactgcacctgggcccacccaaggtctctggagtgcagttctgcccctgtggcctcctctgtcccctccttcacagcgcaggctgtcacacatgtggcaggttctccaacatatggccagagaatcagtgtatgcagtactggaggggcctgaggatgatgtccagggccattcctcattttgcagacatagagaytaatgtctgagggaggcagggtcttcagcaatacagtcaggactagaatcctgaggactaattcccaagtccatgttcttttcaggaaaccctgctaaagtaaaagaatacaacttcttggctgtagtgtgaggaacaggcagaagcaggcacagggaagcgagtccaagatacctggcttacagagcctgctctacc

SEQ ID NO: 803343 - DNA, 650 bp, Homo sapiens
ctggatggcagagaaacaaagtcaaaccacacatcaactcatgattgcttgcccagacttgttcctaacagagaaatatacttctatcttatttaagcctctgtatctggggttcacattgttgtcattgcctaacctgtagcaactaataaacattctctgagctgttctaaaaacaaagccccaataccaatacttagtaatcctgtgaagctaggacagtattcaacagagaaaagtttgatttcaacctgcctctgctagtttgttccaacatatctgaacagtatttgagcttcaatgcaactgagtctttgtacaagctcaaatctagagtaaattgccacttatggagctaatatttacacaataatccaytgtttctctcaactaggaggcacaattttacatcatatctgaagcagagatctcgagaagatatattatgtaatctgccttccagcatcaccaataaacttctaattatccatacaacacacttaacatctcctgattgatgagccaaatccatagtaacaacctcccctcatccaaagaagacaagatcaagttctaagctagcagagaacaaaatcatatactttattcaaaggcaaatcctagctgtgtggaagtctaataaatcatca

SEQ ID NO: 803344 - DNA, 650 bp, Homo sapiens
ctggatggcagagaaacaaagtcaaaccacacatcaactcatgattgcttgcccagacttgttcctaacagagaaatatacttctatcttatttaagcctctgtatctggggttcacattgttgtcattgcctaacctgtagcaactaataaacattctctgagctgttctaaaaacaaagccccaataccaatacttagtaatcctgtgaagctaggacagtattcaacagagaaaagtttgatttcaacctgcctctgctagtttgttccaacatatctgaacagtatttgagcttcaatgcaactgagtctttgtacaagctcaaatctagagtaaattgccacttatggagctaatatttacacaataatccattgtttctctcaactaggaggcacaattttacatcatayctgaagcagagatctcgagaagatatattatgtaatctgccttccagcatcaccaataaacttctaattatccatacaacacacttaacatctcctgattgatgagccaaatccatagtaacaacctcccctcatccaaagaagacaagatcaagttctaagctagcagagaacaaaatcatatactttattcaaaggcaaatcctagctgtgtggaagtctaataaatcatca

SEQ ID NO: 803345 - DNA, 646 bp, Homo sapiens
tccatccaaatccaggctcttagacggccgagatactctgccacatatctttaaaaacatttcatttaacaagatgtatgtgacagagatgaggagaggaatggagtgtcttcacaaatcagaagtattgaatttgagctttctaaaattcctcctaattacagggtacatgaaattacataattctaaagttggaagggatctaggttttataatatatcagtgatgctgccaagaatagaaactttgctccctgagaagttttccagaggcagcgtggctcagcaagccggcagtgstgagatacctaatgaaatggggggaaaccccttcctttcaggaagaaaaccattaaaaaaggatgattgtacttggcagccatatttttaccctcttatttttcagcttttatcaagcctcttgttaaaaaggacatgttctcctttataagaagaatgtgagagactggactgataaacagcccatattctgagcactagagctatcgtaaagagaaagttcatggcaattaatagattctaagaattttttatctaatcacaagaactgacaagctctagccaagccaagaagataaaaatcctagagaaaataagaaaggatttaaaataaatgagagttagta

SEQ ID NO: 803346 - DNA, 646 bp, Homo sapiens
tccatccaaatccaggctcttagacggccgagatactctgccacatatctttaaaaacatttcatttaacaagatgtatgtgacagagatgaggagaggaatggagtgtcttcacaaatcagaagtattgaatttgagctttctaaaattcctcctaattacagggtacatgaaattacataattctaaagttggaagggatctaggttttataatatatcagtgatgctgccaagaatagaaactttgctccctgagaagttttccagaggcagcgtggctcagcaagccggcagtgctgagatacctaatgaaatggggggaaaccccttcctttcaggaagaaaaccattaaaaaaggatgattgtacttggcagccatatttttaccctcttatttttcagcttttatcaagcctcttgttaaaaaggacatgttctcctttataagaagaatgtgagagactggaytgataaacagcccatattctgagcactagagctatcgtaaagagaaagttcatggcaattaatagattctaagaattttttatctaatcacaagaactgacaagctctagccaagccaagaagataaaaatcctagagaaaataagaaaggatttaaaataaatgagagttagta

SEQ ID NO: 803347 - DNA, 645 bp, Homo sapiens
cccctgggggttccttccatctctgaccacggggcttcttatttcctggctctgtggcaggacagctgcaaaaagaaaagacctcatacccttttaaagaggccatccccgaaccctgccaccccagggctcctgaagatacctgcccagaacacagggcctgtatttcaccctgtccccaaacccccacctccaccggggctcactggcttctctgttgactaaccaggaagctcgagggggcggagtcccctgggcckgctccttttagggagggatgggttatcctcagagtcaaggagaacgacgatttcggctggcattctggcagcgtctgggttggcgtctgggtctgggtgggcatcctggcccgagtctgcagggagcaagagcacaatgagcttctagtgccccaacaagtccgacttctcccttcgccagccccaggaccaactacctgagttgggtggggacggctgctcagctctcacgtcttgcaagagggccaccccttcactccaggcctccaggatattgctcttctcagaagggctcaggtccaaggtgtgagggtgctgctccaagatgtgcgagcgagctgtgtcggccgagggtgcccggatctcagcgccacacaccatgcac

SEQ ID NO: 803348 - DNA, 663 bp, Homo sapiens
cagtgctggaacagagactgcctattggaaggaactgagagctttcttctaatttgaggtcaaagctatgtggggcttttgttgccagtggtagataatgaggccctccctgattctctgtgacactcaggtgcaggggacacaggtgtagccctggcttcccatgtacttcttacactctgatatggtttggctgtgtccccacccaaatgtcaacttgaattgtatctcccagaattcccacatgttgtgggagggacccagggggaagtaaatgaatcctgggggctggtctttcccatgctattctcatgaataagtctcatgagatctgatgggtttatcagggatttccacttttgcttcttcctcattttctcttgccactgccatgttagaagtaccttccacctccggccatgattctgaggcctccccagctatgtggaacaattaaatctcttcttgtttccagtttcaggtgtctttatcagcagcgtgaaaatggactaatacaygctcctcaccatgtagctttaaccttctttgcctaaatccctgcaaacaccaattatgaatttcttagtcctgggcaggactaagaatgggacagtgacaaattcatgatataaacatttactgggggccttcgtggtgctcaga

SEQ ID NO: 803349 - DNA, 585 bp, Homo sapiens
attctcctttccaggatcctgggaggggctagaaaagtgcctctatcatkgtaaaagtaaaagtaaagtattttaactacaatttaaaaagtaaagtattttaactacaattggttaaggctgctgtctctttccatcccaagttcccctccataacatctcccctaaacgtcggacagcactggagtgatcacaagtgctttggagctccagctaagaggaatttgagatggggatacactaacttggggttgatgggatgtatttatgtgcctcaggatcacatccaggtctcgttaagtcacggctagatgtcttggtgtcagagtgactttcagaaattcctggaattcattccagccactctcctgactcactggatatctgaacataaaagtgcaaagatagcatttaatttttttaatgttgcttttctgttgtcatgctcattatatttttcagtttttagaaattataattagttgtgatttctatctctaaataaacatttattttatacctaattttgaatctgtagttttattttatttttctgaaagacagctccccaaattgcacaatctt

SEQ ID NO: 803350 - DNA, 605 bp, Homo sapiens
gatatgaggagaagatggagttgaaaccattggtggagaaatgggctttgatcaagaatgaaatctcttgctaaggtcgaagaaaggaggcaaggaagtcatctcttaaagctcaattcatgcatttactggacatgatatgtgttcargactttgttggatgctggggtgggatggagaagggaatagtaatttaagacaagtacaaaacactgttctcaataattatgcagtatgttataaggtagaattaagttccagcttcttagtgcctcaggagaaaaagaaagacaatcttgaaagtataaaaggctaacaaatataagcttaatagcactgagtttaaaaattgtaatcagagaatataaatggatatccactctgtatccttgttttgttagactctcacattgtgctaaagcacgttctgtttgttttgaacacatttgaagagggaccttcgctctctgctatggtacacacactccacttcagttttctgcctggcctcttaaagcattaaacaattggactagaaaatctgcatgatcttttttagctttagatatcatgattctcaggcagcttccctggagatcatattt

SEQ ID NO: 803351 - DNA, 551 bp, Homo sapiens
aaactttcaggggtcagggttttttgccttaaccttctcacgcaacctccagagtgttattacaaaatagtcattagttaactgttaatgagtagttactttggatacaatcatgatctaatataactaccactggagcccaggtcaggggcagttttaaatcactgcttaaacttkcctatatgaaccagggatttgacacaacgtaatctgtgtaacccatcagaaaagcaatttcttaacattttccagggagccaacaaacactcatattccaaattctcatttctcagaatctcttcaaaaataatttaaaagtcagagactactattttcatgaaaatgtttataggagtttcattttctctttaaaaatagatgaagcttaagtaaatgggaaataagttatctccacctgaaaaatttttcctcctatggcaggatactgatataacttctggcctttctctgcccgttaattcattttgcttttcatgagagctggaaataggaaagtaggatgaattatttgactgtcatttttggcaaaa

SEQ ID NO: 803352 - DNA, 603 bp, Homo sapiens
cattatagataggattcaggatcctcaagttggttcttggtaatttatttgaatattgcacacgtggtctagcctcctttggaatctcatttttatatcttggtgtcttaggacttccaatgtaacattttgtgcacatatttccacctataatgtattttacattagcacatggcaagatttgatcttctctttttttaaacatctcactctgaaattacatgtctttatgggaaattagaaaactaattcaatgaaaacctttattttgccagaataattttttaatacacacctgtatacacacacataaatcatatttgtaagtatatatgtatctatagacacattatgtggatgatgcataatgaacacatgatgtgtatgtagatacatacatacaaatatagatayatattatatctctatatttagaaatatatgaaattgatgatttggaggcactttctgagtcgtttttcctcaaactttttgaaaaaatttttaactcttgatgtgctagagagtatattggactagaagtcagaaagtgttctagtaattttaataacaagaattagctcataaaattaattttcaaat

SEQ ID NO: 803353 - DNA, 505 bp, Homo sapiens
ccacagtgtacacattaaatgttaaaaacaaaagatactgaagaaggagaatgaagacttcgaggaaaaagaattttaaatccctttccttctccacctgctgtggtaggttccytgatccatgttagatcttgccttctttagaagtagagcgaagtggtagacaaaacatgaggttaggattttcagtaaccacacttaagtggaaggctcttttgagaccatctagtctagtggttgtggatctttgctagcactgaaactcacagggaaataaccatttcctgttcatattcccaagaccctaaaagatgtctcatcagtatatcagaatgataaatgatctcaactgcagggtataccactttggtagataaaaccaaatattaaattcttggtagaactataaagtttgggaaagatctttgggtagatttggctcttcctctctccacattgaatgatggatccaagaaactttctcattttacagatgagaaaagtg

SEQ ID NO: 803354 - DNA, 505 bp, Homo sapiens
ccacagtgtacacattaaatgttaaaaacaaaagatactgaagaaggagaatgaagacttcgaggaaaaagaattttaaatccctttccttctccacctgctgtggtaggttccctgatccatgttagatcttgccttctttagaagtagagcgaagtggtagacaaaacatgaggttaggattttcagtaaccacacttaagtggaaggctctttygagaccatctagtctagtggttgtggatctttgctagcactgaaactcacagggaaataaccatttcctgttcatattcccaagaccctaaaagatgtctcatcagtatatcagaatgataaatgatctcaactgcagggtataccactttggtagataaaaccaaatattaaattcttggtagaactataaagtttgggaaagatctttgggtagatttggctcttcctctctccacattgaatgatggatccaagaaactttctcattttacagatgagaaaagtg

SEQ ID NO: 803355 - DNA, 628 bp, Homo sapiens
tgcctaacttgaattttatattcactgaaaatacaattcaaaaacgtaggcaaaataaaaacactttcatcaaacaaaaaacaatgaatacaccagcagatctatattttaaaaaatactaaagagagtacttcaggtagaaggaaaatgatwctggaaggaagcagaaacatacagaaaggattggagggccaaaaatagggtcaatatatgggtaagtctaagtgaatattggctatgcagtccttagaagaaatttgtagctattatatagcttgtaatacatatatttttaaaaggagaatatctagaaatcaaagtttccatctcaggaagcagtaaaagtaaataaaataaagcccggatatagttgaaggaagaagataattaagatgaaaatcagtaacaaataatatataaatgtaaaattggaattgcttagctattagaaaaggctttaaaatgataaccatctattataaatgatcaagaagagaaatgggacaagttactaatattaggagtaaaaaataaaacatcacttcagatcttaccaaagacaatataaacaactttatgccaattaaagctaaaaatttagttgaaatggagaaagcctagctgcaaa

SEQ ID NO: 803356 - DNA, 582 bp, Homo sapiens
aaacatcacttcagatcttaccaaagacaatataaacaactttatgccaattaaagctaaaaatttagttgaaatggagaaagcctagctgcaaaataacttaccaaaaccaatacaagagtaaattttctaatctctgataaataaattgaattactaatttaaaacctttacagaaggaaatatcaagcccaaagacttcagaggtgaattattccaaatattaaaataataatgttaatctaaaacaaactcttccagagaacagcaaaagataaatcatttcccaatttcttttaaggccagcgtatttttgattttaaaaaasacaaaaacagtataggaaaggaaaattacaggccaatctttctcattagcatgaaagcaaaaaaaagtaaaacagctacatatgaaaagaataacaccacataatttaaactttcaaaaatcagccaacacaattcaccacattaagagacaaaaaggaaaaaaaatatggtaattttaatagatacagaaaatatactttataaagttcaacacttatttttaaaaatcatagcaaactaagaacaaaaggga

SEQ ID NO: 803357 - DNA, 631 bp, Homo sapiens
gtgtcagggaaattgggaagtagaaaaaaaatgccatctttacaaaaagtcataatgaagcattatgttcattgagaaggtaagatgaacatttttagaacatttttaaaatgagggtgtgatttcatgaataactaatgtcttttctttttttttagtcttkggaggattgtcctctggatgaagatgaagatgcatttcagggactgggagaagaagatgaagagattgatcaattcaatgatgatacattggggtcaggtgcagttggtaagtgacatctttcgcttataatatcatcttagcctcctgctcttttcaagtgctgtcttttagaagtgctttatcttattaggggtaaccttattcactaacttggcaagatattcttctattcctcatcttagaatagttcattcttcactggaaacagcacctatcctgctcctctgggtctctttttgccttacctataaaatcaggtattctgtaagccttgccccttccagctatatgatcgatgactacaggttgcccctatgagggattcaaatgtttagagaagtaaacatttaagagagatttaaattaatcctagatgagaggaatttttatttgtataacatataac

SEQ ID NO: 803358 - DNA, 631 bp, Homo sapiens
gtgtcagggaaattgggaagtagaaaaaaaatgccatctttacaaaaagtcataatgaagcattatgttcattgagaaggtaagatgaacatttttagaacatttttaaaatgagggtgtgatttcatgaataactaatgtcttttctttttttttagtcttgggaggattgtcctctggatgaagatgaagatgcatttcagggactgggagaagaagatgaagagattgatcaattcaatgatgatacattkgggtcaggtgcagttggtaagtgacatctttcgcttataatatcatcttagcctcctgctcttttcaagtgctgtcttttagaagtgctttatcttattaggggtaaccttattcactaacttggcaagatattcttctattcctcatcttagaatagttcattcttcactggaaacagcacctatcctgctcctctgggtctctttttgccttacctataaaatcaggtattctgtaagccttgccccttccagctatatgatcgatgactacaggttgcccctatgagggattcaaatgtttagagaagtaaacatttaagagagatttaaattaatcctagatgagaggaatttttatttgtataacatataac

SEQ ID NO: 803359 - DNA, 628 bp, Homo sapiens
catatttttgccaaactatatattttctttcttagtttctcaacatatgtttgtgtaagttaaataagtttggatacttggtcaaactttctcagccttccacttcactcacccaaaataaacgcaaaatttattttaagcatttcaatatatggtttaagaatatcctcccatttaacattagttttaaataaaccaaatcatccaatttcctcctattttccagttgccaagtagttctggagaaaagcaaaaaacgggatcactttgttccattacactgactgagactctcatttcttctgaacaattcttctacctatccctagttaaaacctacttttccccaaagcccatattccaaagatttttccaattttcacaaatatcagctggactttctctacccttttaattctctayggattagcctatctttactaagaccatttaacataagcccttcagtgttctaaaaacatcaaaatgctctgaacattcgtccatccattccctcctatgttcttcctgccatcaagaaataattattcccttcatccaaggctgactctccaaatgagaccatattttctttcatagtcgaagatgtttttctttaattatgtgt

SEQ ID NO: 803360 - DNA, 605 bp, Homo sapiens
taacacaacaagcaaagtgaattaatttttttatgatgaacacacctaaaatctactctcagcatattttcaatatataatacaatattatcaactatagtcctcatgccatacgacttattcatcctacataactgcaagtttgtaccctttgacctgcttctccccgttttgtcctccttcctgtgcctggtaaccaccattcttggttctgtaaataaccatttcactatgtatcaaaaaatcatgttatatatcttaaacatacacaataaaagtraattaaacacacaaatgattggataaatattgacagacctcaaaatgtgaattgggagtggccacaatttagaaatgtatgactcttcaggcacagataaggctggtgaccaaagggaataattatgaggagttgatttctagaactttgccacttcccttcttggaacacactcctctcttggcttccccaacaagcatactttccagagttccctcttacctgacagcttatcccatgtttcctcctcttgcatttcccacttgacccattttaaaatattgaaatagcacttcttctacaatgtttctttagatcatctaat

SEQ ID NO: 803361 - DNA, 617 bp, Homo sapiens
caaaatgttataaagagatttcagaaatcaatgacggagatgagattgttgaatcatattgaggagtcatgtttcagtgcttggttggtttatacatggtgctaacttaagttgagtaagagatacaaaataaaaatatagcatgggtaaatattaggttcaaaggagtaagagagttaatactgtttgaggaaggaaaagaagggtctcaagaaatataattttctagaagaaatgggagtgagaggagaaagcactccaagtagagcaagtggcacaaaccaaagcaaggaggtgaaaaagttaatggagttttgcagaggataagaagtctggtttgattaaaacctttggcacgtgggatggtatggacgtggaagttggcgatgtgggtgtgatgacagtgtttcactaagatgtcattagygttctgtgttggttctgtaccactgtgtatttatttaagctatttttttaaagtctgtaatgtaaatagactcatctatttatggcagaatagaaaggatcgattgaactgatgacaatagccctaaagatttttattgtttttttccttcatatgataacatctactgtctggtaacaaatgcaaagat

SEQ ID NO: 803362 - DNA, 574 bp, Homo sapiens
agagggggacccaccagatgccagccagagctctcctgtatgaggtgtctgttgacccctgctgggaggtgtctccacatcaggttcagggacccacttgaggaagaagtctgtcccttagcagagctctagtgctgtgctgggagatctgctgctctcttcagagctggcaggtgggaacatttaagtttgctgaaggtgcacccacagctgcccctccccccaggtgccctgtscgaaggagatgagagttttatctataagctcctgactggggcttctgcctttctttcagagatgccttgcccagagaggaggaatctagagacgcactctggctactgtggctttgaggtgctgcggtgggctccactcagtttgtacttcccagagggtttgtttatactatgaggggaaaaccacctactcaagcctcagtaatagtggacgcccctctccccaccaagctcgagcatcccaagtctactttagactgctgtgctagcagtgagaatttcaagccagtggatcttagcttgctgggctctatggaggtaggatccgctgagcaaga

SEQ ID NO: 803363 - DNA, 601 bp, Homo sapiens
tttgtagatctatagttcatcatatcaaagaattaacatcttaagttgtttttgctgccttttttgccttttggtttttaccagttctatctgtgatgctataaaatttatgttctctgttccaaaaaagcatgcttttttatcttttggtcagattwtattttcagaatgagggtagattccattaaattattttatctacctgtgtgtcactaggaatgtctaacttgtacttttggttgtagacaatttagtcctaagtcctaattccctgtggcttaaggattccaccattaattattcaactttttgaatgtgattttcatgtcactgcctagtcttcatataaatatattttatcagaactataagatttttcaagggagagttgaatctccttatttcaggatccatttttgggttttcatccaaccagtcccggagatattgactagcagtggaaagccttttcttttcttttcaaccctcactatccccaacctcatcccttttggagtccccagtgtctgttgtttccatctttatgttcatgtgtactcattgtttagctcccacttataagtgagaacatgcagtgtta

SEQ ID NO: 803364 - DNA, 553 bp, Homo sapiens
tatatagtacatcccatgtgaaatacagctctaaaagctttacacatataaatgaatttaatctttatagcattctaatgaggtaggtggtattatttccatttttcaaacgagaaaaatgcgacccatagagattaaaaamctcatccaacttcacacagggagtggcagttccaggcttcaagtgcaggcagtttggattaaaaatctgtgcccttaaccacaacattatgctgccgatgaggacctctcgctttaatctgaatcagagtcagccaaagaaaatagtagagtaagcaggtcctagacagttaacacataacattatacagctatgggcagtcccaacagttcctgaaaggattaaaaaaaagagaaccagtcacagatccaaatatttcagctttagaaatttatttcagcatggacatctgagtcctgcagctgctgtgtatggtcttttgtgtgatcacaggtgttggctgtactatgagagcacataatggcagatgacaaggcaagcatagtagggactgccagccccaggaggtaa

SEQ ID NO: 803365 - DNA, 521 bp, Homo sapiens
tctcaagcagttcttccctttgccatgaaaattgcatgtcctagacagagacattcccttcatcctggatcctagaataagaatatatatgtacccagacacaagataaccaggataagctgcattaaaaccgctccacacacccaagagcaagaaaaaaatgctattgtttaagctattgagctttttttgtttgttttacyatagcaaagtctgaccaatataaattagtttggccatcttagcagatcccaggttttctgcctgacaaagctacacgtttgtaacttagaaacagaaagtatagcactcgactggcattaatacaattactgggaaaagagaacataaaacataataaaacatgatcgtttaccatggtttcttgaaaagatccaaattatattctaaaaagatatgggtaatacctgatttgataaacttcttgtgaaacttgtacatgcatacttttctgatggtattataattgggtcccaagcccttagaaaagtaattataag

SEQ ID NO: 803366 - DNA, 652 bp, Homo sapiens
aaatgaatggatgcctttaaaaacagtacttccaattaactctgctttttttctctctctctcttttttctttttttgacaaagccttgctctgtcgaccaggctggagtacagtggtgccatctcggctcactccaactctgcctcccgggctcaagctattctcctgcctcagcctccctagtacatggcctgtgccaccatgcctggctmattttctgtgttttcagtagagacggggtttcaccatgttggccaggctggtctcgaactcctgacctcatgtgatccacccatctcagcctcccaaattgctgggattacaggcgtgagccaccgtgccgggcctaactctgctttttgataagctgttctgatgcaacttatggcattaatagcattttccgagaagatagaaaaactttggaagtcatggtcccttcaatcccatagtctgcttgctttattaactttctcttcagtttactccctcctactcttctttatcatccaacaattttgggtgttcctaaatcttgcaacaagctttctttctattttttcctcctagctcattgggcttgggatattttattggcattggagctgaagaaatctgtgaaaaaaaagtctgtatatacatatatatgtc

SEQ ID NO: 803367 - DNA, 652 bp, Homo sapiens
aaatgaatggatgcctttaaaaacagtacttccaattaactctgctttttttctctctctctcttttttctttttttgacaaagccttgctctgtcgaccaggctggagtacagtggtgccatctcggctcactccaactctgcctcccgggctcaagctattctcctgcctcagcctccctagtacatggcctgtgccaccatgcctggctaattttctgtgttttcagtagagacggggtttcaccatgttggccaggctggtctcgaactcctgacctcatgtgatccacccatctcrgcctcccaaattgctgggattacaggcgtgagccaccgtgccgggcctaactctgctttttgataagctgttctgatgcaacttatggcattaatagcattttccgagaagatagaaaaactttggaagtcatggtcccttcaatcccatagtctgcttgctttattaactttctcttcagtttactccctcctactcttctttatcatccaacaattttgggtgttcctaaatcttgcaacaagctttctttctattttttcctcctagctcattgggcttgggatattttattggcattggagctgaagaaatctgtgaaaaaaaagtctgtatatacatatatatgtc

SEQ ID NO: 803368 - DNA, 652 bp, Homo sapiens
aaatgaatggatgcctttaaaaacagtacttccaattaactctgctttttttctctctctctcttttttctttttttgacaaagccttgctctgtcgaccaggctggagtacagtggtgccatctcggctcactccaactctgcctcccgggctcaagctattctcctgcctcagcctccctagtacatggcctgtgccaccatgcctggctaattttctgtgttttcagtagagacggggtttcaccatgttggccaggctggtctcgaactcctgacctcatgtgatccacccatctcagcctcccaaattgctgggattacaggcgtgagccaccgtgccgggcctaactctgctttttgataagctgttctgatgcaacttatggcattaatagcattttcygagaagatagaaaaactttggaagtcatggtcccttcaatcccatagtctgcttgctttattaactttctcttcagtttactccctcctactcttctttatcatccaacaattttgggtgttcctaaatcttgcaacaagctttctttctattttttcctcctagctcattgggcttgggatattttattggcattggagctgaagaaatctgtgaaaaaaaagtctgtatatacatatatatgtc

SEQ ID NO: 803369 - DNA, 597 bp, Homo sapiens
agattcagtatttgaagaggtgacatttaccaataactcttgggctttaacttgcaatataacttgtgttttgtttttttttttccacttcctctcaaactaatcagatgaagggtctcgaggagccagagatggaccccaaaagccgagaccttttagttcagcaagcctcccagtgccttagtaagctggtccarattgcttcccggacaaagaggaactttattcttgatcaggtattaatctgataaaattgcctagagtcaaggtgggatgtgtatataaagagagactgaattaaggagcagagtcagcttacctaattatgaccatctggttgtgtgttatggttgcaatgttttttgaactcagaggtacccctaattagtgtttttacttgaaaatatatggacccaggctataaaacatgtaataaagacaatggaaagagttggaactcatttgaattcctggctccaccacattctggtttgtgatcttggataagtcccttatcctttctgaacctcagtttccctgatgagcaaaacagggtaatacctgtcatgtagtttgaaaagttaaagaagatcatgt

SEQ ID NO: 803370 - DNA, 597 bp, Homo sapiens
agattcagtatttgaagaggtgacatttaccaataactcttgggctttaacttgcaatataacttgtgttttgtttttttttttccacttcctctcaaactaatcagatgaagggtctcgaggagccagagatggaccccaaaagccgagaccttttagttcagcaagcctcccagtgccttagtaagctggtccagattgcttcccggacaaagaggaactttattcttgatcaggtattaatctgataaaattgcctaragtcaaggtgggatgtgtatataaagagagactgaattaaggagcagagtcagcttacctaattatgaccatctggttgtgtgttatggttgcaatgttttttgaactcagaggtacccctaattagtgtttttacttgaaaatatatggacccaggctataaaacatgtaataaagacaatggaaagagttggaactcatttgaattcctggctccaccacattctggtttgtgatcttggataagtcccttatcctttctgaacctcagtttccctgatgagcaaaacagggtaatacctgtcatgtagtttgaaaagttaaagaagatcatgt

SEQ ID NO: 803371 - DNA, 690 bp, Homo sapiens
ttgtatttttagtagagacagggtttcaccatgttgagcaggctggtctcgaacccctgaactcaagtgatctgcacacctcagcctcccaaagtgctgggattacaggcatgaaccaccgtgccaggcctataattgcaagatactttcgtattaatttgctcaatcctcacaatagccctgtgaagtatgtagtagcaatgctgggactcaaacctagaatatctgacatcaaattgcatcatctctgcctaatgccagttcatggggttgattattgatattttatattttaatcactttattatgttttaagctaattcctcagactaagaccakttaacctagcaaattgaaagtaacagaaatcatttcatatcagtctggtaacatgatttttgtattgggttaagaaattacttgagttattctcatgttttcttatgaacctttttttaaaacagcatgaagaaagaatttgtatagtgagaaccttcctttggttctttttagactttctggttgtttcagaacttttgatctttcttttagtaataaaatttaaataatttccaaagggaaatgccgttattggattttagtactcatttttaatcctagatttgtactttgaattttctagtaagattttcgaagtagcagtcaaaacaataagtctcatttatttga

SEQ ID NO: 803372 - DNA, 582 bp, Homo sapiens
atttttcttaatatattgtatttgtttaaaatttcttattcttttcaatgtctgtattgtactttgttgtataataacaatttatctaatcctcctgttgatagatgtttattctgtttttttatcctaaacagtgctacactcaattctctctcctytctctgtctcttgtctgtctctccctctgtgtgtgtgtgtgtttctatttgtaaacctattttaataggtttaacacccagaaaaagaatgtggtggttcaaataatataaacatttaaatttttaataaatattgcttatattccaaaagggtgagccactaacttctcaacaggtgtctgtttttgctttttcatcttttttttgtttttttgagacagcatttttctctgtcaccctggctggagttctgtggcatgatcatagctcattgcagcctccaactcctgggctcaagcaatcctcccacctcagcctcctgagtagctgggactacaggggtacaccaccatgctcagctgccttttcttggttttagttttttgtagagacaaggtcttgctgtgttgcccaggctggtctc

SEQ ID NO: 803373 - DNA, 582 bp, Homo sapiens
atttttcttaatatattgtatttgtttaaaatttcttattcttttcaatgtctgtattgtactttgttgtataataacaatttatctaatcctcctgttgatagatgtttattctgtttttttatcctaaacagtgctacactcaattctctctcctttctctgtctcttgtctgtctctccctctgtgtgtgtgtgtgtttctatttgtaaacctatttyaataggtttaacacccagaaaaagaatgtggtggttcaaataatataaacatttaaatttttaataaatattgcttatattccaaaagggtgagccactaacttctcaacaggtgtctgtttttgctttttcatcttttttttgtttttttgagacagcatttttctctgtcaccctggctggagttctgtggcatgatcatagctcattgcagcctccaactcctgggctcaagcaatcctcccacctcagcctcctgagtagctgggactacaggggtacaccaccatgctcagctgccttttcttggttttagttttttgtagagacaaggtcttgctgtgttgcccaggctggtctc

SEQ ID NO: 803374 - DNA, 623 bp, Homo sapiens
tagttctaatagaaaattattgatgaaaccaccaataagactgcacagtccctttttgcttaaactgacatcttctcccgtgaattatacccttctctctcaagggtgtttcttgcccttggcacagattctttccctcatcctgtgaacatggctgctctgtgaaatacatgaaggagcacaaccctaacaattgttgcaacccataactccttgagcatcacttttctytttgtcatcagccttattacttaacttggatcttgaccttgacctcacccccttgtagtacattttcaaacattactattaacatccaccattttaaaaaagtcaaatggcttttcttcagttcacattttcatcagtcctttttagtattcaatgctcagtcttggaaaccctcagcttggagtttctgcactttatttttctccctgtacctttctgattatttcccctcctttgctggtgtctccttccttcccttcctcttgaattttgccattcaccaatgtcctgttttgagtcttcacttttaatctctggccactatttctccaggacagtctcatctattcccacaacttcacccaacatccccacaaaaatgtcttcctaaa

SEQ ID NO: 803375 - DNA, 451 bp, Homo sapiens
catcacctaactgatagttcatttacctgaacagtttttgtatttttctctttagaagatacaggaaaggccttggaaatctgcacatggagtaagagcagaaatggaagcgtcttcagggagaacatgatcttctcttcaaactctacccctcctggctttctttctgtccctctgggtagggcccttccctggcgagcaccctgasgttcacagcatcatgtgtcactcacagctctcttgcagtcctctttaaagccatgtcttaaacaattgctgcatcaggaatatgaagcaacataggttaattacactctgacagttttgcaattttataatgtgatttagtacccccaaatgggggagtctttcaacagtctttcaaaactccaactttctactctttgcttttggatgttttagttatttccttttacaaaattggttgagg

SEQ ID NO: 803376 - DNA, 641 bp, Homo sapiens
agtggtcacaatgttcctaagcacattattttgtcctctgttaacagatcttaatgccaggttgtgggtggcagttttagcttacttgataagggctatcacattctaagtgtcagttcaccaacaatggccatccaggcggtggctagcttcccgctctcacaaatagttctgtattggctgycctacaagtctcctggggatcacagtcagaatgaatacttacaagtgggactactggggttagaatacaggtattcttatgatacagccagattttgcttcacaatggttgcaccaattaacagttctgcccgctgtaaataagggttcatattccccatgtttttatcagcacttaatataaccagaacttctaatttctgccatttttggtaggtataagtaggtatcttttttacattggtattccgttgattactagtaagattggatatctctttatatgctgtcagctacccagatttccccttctaataatagccaacttatttccatgcctgcatttctactggatttcttacctttttcatgttgatttaaaagaatttcttctctgaaccacctattaatctttccttagtttcatatgttgcagacactttctctgtttctcattt

SEQ ID NO: 803377 - DNA, 587 bp, Homo sapiens
taagctaccgacagattcaatgcgatctcttatcaaaataccaatgaatattcttcacaaaattaaaaaaaaatccatagagattgtatggaaacaaaagtatcctgaatagccaaagcaatcctaagcaaaaagaacaaagctggatgtatcatgctaccagacctcagaatatactacaaagctgtagtaaccaaaacatcatggtactggcataaaaacagacacatagacctatggaatagaataaagaacmcagaaaatccacatatctcagccaattgattttttacaaagatgccaagaacactcattggggaaaggatagtctcttcaataaatggtgcttggaaaactggatatccaaatgcagaaggatgaaactagacccctgcctctcaccctatacaaaaatcaactcaaagtatctcaaataaccaaatataagacccaaaatggtaaagctactagaagaaaacataggggagatccttcaggacattgctctgggaaaagattttatgaataaggcatcaaaagcacaggcaacaaaagaaaagtaaacaaatgggatcacatcaagctaa

SEQ ID NO: 803378 - DNA, 655 bp, Homo sapiens
atcttgatacaagcatacaataagtaatgatcaaatcagagtagttaggatatctatcacctcaaacatttatcatttctttgagtttggaacatttcaaatccactctagttattttgaaatatacaataaattattgttaactatagttgccctattgtgctatgtaatactagatcttattccttctatctaactgtatttttgtacccattgaaccaacccctcagtattgtctrccctcctcactacccttctagtttctggtaaccatcattctattctctgtctccatgagatcaatttttttttagctcccacatatgagttagatcatgcaatatgtgtctttctgtgcctggcttatttcacttaatataatgacatttagttccattcattttgctacaaatgataggatttctttcttttttatgctgagtaataatccatcctgtatatacaccataatatttgttgatggaagttgatcatcaggttgatttggtatcttggctattgtgaatattgctgtggtaaatatcagagtgcacatatctctttggaatactgatttccttattttgaggtagaaatgcaaaatgatgcaaccacttttcacttatcttaggcattttcttaaaaagttaaactt

SEQ ID NO: 803379 - DNA, 544 bp, Homo sapiens
ccatttacatttttattggccagcttcttattggcctcaactcgtatagtctcctcaggcagctgccatgttaaacaatcacttttgattgttttcagcaaatgtcctagaaacaagatttttcccaatcaacaagctttcagtaagtcaaaacgatcacaagccttaaaaattgagcttttccaaggagctgtcagatgggtcaatgcttagacaatgccattctgcctcctcttgtagcttctagaattccactttacatacctattgttgagaggctgctggattttatacctaccatttaggtataaagaagagaatggaaatagggaaattaaaatgtcacacaayttgttgttcttaccaatatttagcacttttgttgaataagggctctttggattattgcatgccttcagttaattttgagatttctggaaaaatcacattaatggaaaactcctttcaattattcctctttgccctaaggataaaagccttttaatcatccttacagctgcctctcaggctgcctgtgttgttg

SEQ ID NO: 803380 - DNA, 579 bp, Homo sapiens
aagagcaaaatcagaaacaaactcctattcacaactgccacaaaaagattaaaatgcctgggaatacagctaactagggaagtgaaagatctctacaaggagaactacacaccactgctcaaagatatcagagatggtctgggcatggtggctcatgcctgtaatcccagcactttrggaggccaaggcaggcagattatctgaggtcaggagtttgagaccagcctggccaacatggcgaaaccccatctctgctaaaagttcaaaaatttgtcaggggtggtggtgcacgcctataatcccagctacttgggaggctgaggcaggagaattgcttggaaccaggaggcagaagttgcaatgagccaggagatggtgccactgctctccggcctaggcaacagagtgagactctgtctccaaatcaaagatgacacaaacaaatggacaaacattccatgctcatggataggaagaatcaatatcattaaaatggccatacactgaactagagaaaactagaagtctgtatgaaaccaaaaaagggcctgaatagacaaggcaattgtaaacaaaaag

SEQ ID NO: 803381 - DNA, 579 bp, Homo sapiens
aagagcaaaatcagaaacaaactcctattcacaactgccacaaaaagattaaaatgcctgggaatacagctaactagggaagtgaaagatctctacaaggagaactacacaccactgctcaaagatatcagagatggtctgggcatggtggctcatgcctgtaatcccagcactttgggaggccaaggcaggcagattatctgaggtcaggagtttgagaccagcctggccaacatggcgaaaccccatctctgctaaaagttcaaaaatttgtcaggggtggtggtgmacgcctataatcccagctacttgggaggctgaggcaggagaattgcttggaaccaggaggcagaagttgcaatgagccaggagatggtgccactgctctccggcctaggcaacagagtgagactctgtctccaaatcaaagatgacacaaacaaatggacaaacattccatgctcatggataggaagaatcaatatcattaaaatggccatacactgaactagagaaaactagaagtctgtatgaaaccaaaaaagggcctgaatagacaaggcaattgtaaacaaaaag

SEQ ID NO: 803382 - DNA, 578 bp, Homo sapiens
ccacagttttgaagaatagtgcctgacttctactgagatggctgatccatactaatctctttatcaaatggtggtttggccacacccttagtattctcattttttacaatatggataggccaaaaatctttccaatcttttactgcctttatttttccttaacaaaagcaagtaattaactaaaaatgaagtcattttttctcttcttgcattttactgtaagcagttaggagaagctaagctgtaccttaaacactgcttagaaattttctcagctaaatatccaattttattctttacwagttgtaccttccataaagcactggagtatgagcataattcaaccaacttcttcaccactttatgacaagaatcacctttcctccagtttccaataatatcttcttcatttccatctaaggccttatcagaatggcctttaccatctatatttttatcaatattctggtcatgattacttagatattctctaagaagtatgaggctttctctgcagccctactcttttatttctgagccctcaccagaatcatctttaatgatttatgtcaacagtg

SEQ ID NO: 803383 - DNA, 594 bp, Homo sapiens
cacccattatacaatatacgcatacctacacaataataaagatttgctttggcacctgagacatctttctgtcctacttgtagtcattgctagaatacttatttgtaaccagtttcaatagtcagggtcctggcagaaaaatagatgacacactcaaagggattattgctaagaattcatgaaaagtctattgaaagaggcaagaacatgattagggatccaacaaggggtgaagaaacacgcgggactgacagcaacaggaagccatcaycttgactagcctgaagggtaaggaaaaggtgttgtgcagtttccacaacccagtgagagctgtagctatggaaggagatggcctgagctgacacctggcctgaaaggaaataaacagcaaataaatactatgatttctgtttcaacactttgctctccagctaatgccctcatttcccaaatccaaacaaaaggaaaagagcagaggaagccaagtgatatattccgaaaaagtcaacctccctaccaggtagaaaagtgcaggaaaggacaaagaagagctctcaagagcctaatagatgagaagatagacaaagcatggct

SEQ ID NO: 803384 - DNA, 587 bp, Homo sapiens
cacccattatacaatatacgcatacctacacaataataaagatttgctttggcacctgagacatctttctgtcctacttgtagtcattgctagaatacttatttgtaaccagtttcaatagtcagggtcctggcagaaaaatagatgacacactcaaagggattattgctaagaattcatgaaaagtctattgaaagaggcaagaacatgattagggatccaacaaggggtgaagaaacacgcgggactgacagcaacaggaagccatcaccttgactagcctgaagggtaaggaaaaggtgttgtgcagtttccacaacccagtgagagctgtagctatggaaggagatggcctgagctgacacctggcctgaaaggaaataaacagcaaawaaatactatgatttctgtttcaacactttgctctccagctaatgccctcatttcccaaatccaaacaaaaggaaaagagcagaggaagccaagtgatatattccgaaaaagtcaacctccctaccaggtagaaaagtgcaggaaaggacaaagaagagctctcaagagcctaatagatgagaagatagacaaag

SEQ ID NO: 803385 - DNA, 594 bp, Homo sapiens
cacccattatacaatatacgcatacctacacaataataaagatttgctttggcacctgagacatctttctgtcctacttgtagtcattgctagaatacttatttgtaaccagtttcaatagtcagggtcctggcagaaaaatagatgacacactcaaagggattattgctaagaattcatgaaaagtctattgaaagaggcaagaacatgattagggatccaacaaggggtgaagaaacacgcgggactgacagcaacaggaagccatcaccttgactagcctgaagggtaaggaaaaggtgttgtgcagtttccacaacccagtgagagctgtagctatggaaggagatggcctgagctgacacctggcctgaaaggaaataaacagcaaataaatactatgatttctgtttcaacactttgctctccagctartgccctcatttcccaaatccaaacaaaaggaaaagagcagaggaagccaagtgatatattccgaaaaagtcaacctccctaccaggtagaaaagtgcaggaaaggacaaagaagagctctcaagagcctaatagatgagaagatagacaaagcatggct

SEQ ID NO: 803386 - DNA, 576 bp, Homo sapiens
cacccttttaagataactttttcgcttatcaggatccatctccgtctctcctcctggccattattccataattgggggcaatttcaaaaaattatttatttttgctgaggtaaaatatatatctataatttaccatctttataatttttaagcatacagttcagtggtaataaatacatgtacattctcttttgttcccttcatcaacctctcccctcttcctttcccagcctctggtatccaccattctactctctgtcctcataagatccacttttttagctttcacagatgagtaagtccgtgtgaaatttactttctgttcttggcttatttcaattaacawaatgtccttcagttccattcatgttgctgcaaaagacaggaatttattcttgttttatggctgaaaaatattccattgtgtgtatgtaccatatttctttatttgttaatccatggatggatgtttgtgctcattccttatttctcttgattccttattttgtgaatagtgctgcaataaacataggggtgcaggtatctccttgacatactgatttccattcttttgga

SEQ ID NO: 803387 - DNA, 645 bp, Homo sapiens
agaaaaggacatttcaaaataacaaaagaagaaaataattgtataatacataaagcacttctataaatttttaaatataaaaacgagccatcaaccataacagaaaatgtcacaaaaatgaaatacaaatcaccgataaacagatgaaaatatgctcacccttactatgtaactttaagtaagaggttttttaaaatcatccaactggtaaaaattaaggagagtgattacagccaaagtggataaaaatgtgggtaaatggaccctctgtttttgtttgtgtgtgcgtgtgtgtttttttgtttttgtttttgtttttttacacacaggctcccaatcatgggtcactgcagcctcgaactcctgggctcaagcattcttcctacctcagcctctcgagtagctgggactacacacatgtgccactggatccagctaattttctaatttttttttgyagagatgggcgtctgcctacattgtcaaggctgatctcaaaatcttggcttcaagaaatcctcctgcctgagcctcccaaagtgctgggattacaggtgtgaaccaccacacctggagcagacattctcttaaacatgattgatagagtagaaactaatatagccatattaatggataatttgacag

SEQ ID NO: 803388 - DNA, 560 bp, Homo sapiens
tttgtacttctaacacatacacagaaatatataagtattttcatcacagcattgtttataaccaaagaagtagaaatccattatttgtctatcaatagaagaataaatattgtaatacaatactgtgatgctcttcygtagcaactcaaaaaaaaatgaaatttatccatattcatcagcctggaaagatcaccaaatcatacttttagttggaaaatataaattgctaaacaacacctttccatttatatagaaaaccaaaactacattaagatggaacaaacagaaagaggtgacccttgagataagcattttaataatactggagtaagtaacagagtcctggggcaagtataaggattagaaatatctcagcgaggccagggacagtataaagctaaaattctggaagctatgaaaacaaaagcagtactgagggagtcaacagtataccatcatcaaaaatatgttgaaagtctacaagcccagataatgcaattaagtacctataattaattaaagtctagaattcagaaaacccaatgtatctgaaattgcat

SEQ ID NO: 803389 - DNA, 576 bp, Homo sapiens
cacccttttaagataactttttcgcttatcaggatccatctccgtctctcctcctggccattattccataattgggggcaatttcaaaaaattatttatttttgctgaggtaaaatatatatctataatttaccatctttataatttttaagcatacagttcagtggtaataaatacatgtacattctcttttgttcccttcatcaacctctcccctcttcctttcccagcctctggtatccaccattctactctctgtcctcataagatccacttttttagctttcacagatgagtaagtccgtgtgaaatttactttctgttcttggcttatttcaattaacataatgtccttcagttccattcatgttgctgcaaaagacaggaatttattcttgttttatggctgaaaaatattccattgtgtgtatgtaccatatttctttatttgttaatccatggatggatgtttgtgctcattccttatttctsttgattccttattttgtgaatagtgctgcaataaacataggggtgcaggtatctccttgacatactgatttccattcttttgga

SEQ ID NO: 803390 - DNA, 653 bp, Homo sapiens
agaagattgaaataaacacaattaaaacaaaaaaagggatgttaccactgaccccacagaaatacaaccatcagatactatgatgaacacctctatgtacagaaatcagaaaatctggaagaaatgaatacatgcttgcrcacatacaccctcccaagacagaaccagaaataaattggatccctgaacagaataatgagttctgaaattaaatcaacaataagcctatcagacaaaaagagcccagaacaaggtggaatcacagacaacttctaacagatatacaaagaagaattggtaccattcctactgaaactattccaaaaaattgaggagtagggactccttcccaacttgttctatgaggccagcatcatcctgatactaaatcctggcagaggtacaacaaaaaatggaaaacttcaggccagtatccttgatgaacacatcaatacaaaaattctcaacaaatacttgcaaacagaatccagcaacacatcaaaaagcttatccaccatgatcaagtaggctttatccctgggatgcaatgttggttcaacataggcaagtcaataaatgtgatttatcagataaacagaactaaagacaaaaaccacatgattatctcaatagatgcagaaagtctttcaatg

SEQ ID NO: 803391 - DNA, 577 bp, Homo sapiens
atattcttttcatggttgtcctataaagttatttgacattttgacaccaaactattatttttatcttttctggaccctcactgtttctcattcataaagtgtaatgtttttccaagtggacactcggagatatccaaacctttcaaagggcatgtgagatccaaagtattttagaatagtactaaaatattatttgttttttttattgtgttaacgtttgtactgatgatgcaaaaacaatggtgagtaaaaatatgggtaccttagtrcaagtcaaggaaacggcacccaaccatactaatagttattgttttcactaccatgtttttgatgaagtaataaaaattactcaacttttaaatctctactcttacttacataattttcgtttaatattctgtatgatgaaatggtaagtacacatgaaatacttctgttgtataccaaagtttgaggactatcttaaggagaagcaattggcaagtctattctgtgcaagctaaactagctgctttattcagggaacaaaatttttacttgaaagaacagacagaaaaactatagttatttaaactta

SEQ ID NO: 803392 - DNA, 574 bp, Homo sapiens
ttcgtttaatattctgtatgatgaaatggtaagtacacatgaaatacttctgttgtataccaaagtttgaggactatcttaaggagaagcaattggcaagtctattctgtgcaagctaaactagctgctttattcagggaacaaaatttttacttgaaagaacagacagaaaamctatagttatttaaacttaggattttgatagatattgtcttgaaaatgaacaaagtaagaccattacctcaagaaaagcagttaacaatatttgttactaaaaagttttgcattttgtactataaagttttaattttatgaaacaatatttgctacataaaattaatgttttcaagcaaaagtcagaatgttggaaaagctgtacttgctaccaggagcttgacaccttttgaatataaagacttttcttggcagataaacagtaatattaattataaaatattgtataataaactgtgttaatatttggaagctctgcatcactacaccaaacagtattatttacatgatctatgcatgttacagaatcaccttcatgtgagaaaaacaaatgtttttt

SEQ ID NO: 803393 - DNA, 574 bp, Homo sapiens
ttcgtttaatattctgtatgatgaaatggtaagtacacatgaaatacttctgttgtataccaaagtttgaggactatcttaaggagaagcaattggcaagtctattctgtgcaagctaaactagctgctttattcagggaacaaaatttttacttgaaagaacagacagaaaaactatagttatttaaacttaggattttgatagatattgtcttgaaaatgaacaaagtaagaccattacctcaagaaaagcagttaacaatatttgttactaraaagttttgcattttgtactataaagttttaattttatgaaacaatatttgctacataaaattaatgttttcaagcaaaagtcagaatgttggaaaagctgtacttgctaccaggagcttgacaccttttgaatataaagacttttcttggcagataaacagtaatattaattataaaatattgtataataaactgtgttaatatttggaagctctgcatcactacaccaaacagtattatttacatgatctatgcatgttacagaatcaccttcatgtgagaaaaacaaatgtttttt

SEQ ID NO: 803394 - DNA, 531 bp, Homo sapiens
tgaaataataaatagcattgcacattttcctgctagtaataaagttcaagacatattcatccagtaccacctgtatataaagcaaggagagagtatttatatttgacaggttacacagggtaaattagaagtattttccagtgggaaaaaaaaagaacttaaatgtagaacacagatagaatwatattagcgaaatatatgtggtgatgatgggtagggagtatattagtctgttttcacactgctgataaagacatagccaagactgggcaatttacaaaagaaagaagtttattggactcacagttccatgtggctggtgaggcctcacaatcatggtggaacacgaaatgcatgtcttacatggcagcagcaagagagaggagctggtacagggaaactcccatttttaaaaccatcagatcttgtgagacccaatcactatcatgagaacagcacaggaaagacctgcccccaaaattcaattatctcccactgggtccttcacacacatgtgggaattatgggagc

SEQ ID NO: 803395 - DNA, 531 bp, Homo sapiens
tgaaataataaatagcattgcacattttcctgctagtaataaagttcaagacatattcatccagtaccacctgtatataaagcaaggagagagtatttatatttgacaggttacacagggtaaattagaagtattttccagtgggaaaaaaaaagaacttaaatgtagaacacagatagaataatattagcgaaatatatgtggtgatgatgggtagrgagtatattagtctgttttcacactgctgataaagacatagccaagactgggcaatttacaaaagaaagaagtttattggactcacagttccatgtggctggtgaggcctcacaatcatggtggaacacgaaatgcatgtcttacatggcagcagcaagagagaggagctggtacagggaaactcccatttttaaaaccatcagatcttgtgagacccaatcactatcatgagaacagcacaggaaagacctgcccccaaaattcaattatctcccactgggtccttcacacacatgtgggaattatgggagc

SEQ ID NO: 803396 - DNA, 656 bp, Homo sapiens
taggaaaattcattatcttcttcctcacccatgcagatacatataggggcacacagacacaatttatagttgagaaaaattagggttagaatttaagccacttgactgtgttcatggaaacagtatgagttaacaccctgggctycctgataactagttcagggttcatttcattgcattagatgagaaagttatagctgttctctcttctggtttaagtggattatgtaactattacatcttctcatcccatccaccacatcagtgcaagaaaattagggccatgcacagaacagcccatgtgaatcacagctctgtaactgcagagaaaatattgtgctgatcagtgggaagcagcaatttttccacaatcgtctgtccatgcttagatagtatatcacattaaaagtgaaagccttgatctacagaaaagtagctgcccaatttctaatttgtgacagtcgaacaagaaaaagctgtgacatgctcattcattaaaagctctcattacatattaatcatgccaggaaactgcacaaaagttgtgaagatatcagtatagttatccatttgtaatttcagagagaattaaaggaaaacggagtagcaaaactacagtttagtctcttctatagaaggaaagtatctgaagttct

SEQ ID NO: 803397 - DNA, 592 bp, Homo sapiens
aatgacaccataggctacataaaaagaagtagatgaattgaggagacaacaggttcacagtttactttacaataacccaggtaattgccacggagccaggtttgaactaggattgccaccattctaaccatgcttttaaacattcygttatgctgccacaaatgtaatgccacctccaacatggctagagtcaatttagtgtcttttccttatcacaagattcttacatcaatcagagactttagagaaataagtttataggattcatttagaattaatattctcacacaagtaaccttaatctaccctagagtgtatactttctaaagtatactttgcgcttattgaaggtcttcccaccacagtagtgcaccaaagtttgaatactatccactgagaacccctgccccgtgtgagaaatttattatcggaggatttgtacttataaaaatggcttactactgttatatcaaaaatgcataattcagagcatctaggcaaattgtgcattttaaattttagtttgaaagaatacttaataataataataatatcgaagagcattaacagctctatttgaaaaaagcagcta

SEQ ID NO: 803398 - DNA, 662 bp, Homo sapiens
taaaacatgcatctaacatacagcccagtatttgtactactagacatttatcccagagaaattaatatttttgttcacataaaaacctatatattcatgttcactgctgctgtatttgaaatagtcaaaaatgagaaaaaaaaactaaatttcctttctcaagtgaatggttaaaaaaactgtagtgcatttgtgtcacagaatactacttacaataaaaaggaatgaattatkggtatacaaaacaacttgaatgaatatcttgagaattatgctgaatataaaagccaatcccaaaggttacctactgtatcattccatttatattacagtcttgaaatgacaaagttacagaaatggatacaagattactcttttccgaaggttagaaatgagaacaggtgagtatggaggaaataaggaagtgggtgtggctatcgcagggcaatatgtgtgaaggcagagtaatgcaccatgtctcccccaacccccgccaaaaaatatccatgaccccatcttctaaaattgtgaatatattatgttacttcataagaaataattaatattacaaataaaattaaagttgttaatcaactgaccttaaatgaaagagataatcttgtattgtctcactgggtccaacgtagtcatgaggggctttt

SEQ ID NO: 803399 - DNA, 662 bp, Homo sapiens
taaaacatgcatctaacatacagcccagtatttgtactactagacatttatcccagagaaattaatatttttgttcacataaaaacctatatattcatgttcactgctgctgtatttgaaatagtcaaaaatgagaaaaaaaaactaaatttcctttctcaagtgaatggttaaaaaaactgtagtgcatttgtgtcacagaatactacttacaataaaaaggaatgaattatgggtatacaaaacaacttgaatgaatatcttgagaattatgctgaatataaaagccaatcccaaaggttacctactgtatcattccatttatattacagtcttgaaatgacaaagttacagaaatggatacaagattactcttttccgaaggttagaaatgagaacargtgagtatggaggaaataaggaagtgggtgtggctatcgcagggcaatatgtgtgaaggcagagtaatgcaccatgtctcccccaacccccgccaaaaaatatccatgaccccatcttctaaaattgtgaatatattatgttacttcataagaaataattaatattacaaataaaattaaagttgttaatcaactgaccttaaatgaaagagataatcttgtattgtctcactgggtccaacgtagtcatgaggggctttt

SEQ ID NO: 803400 - DNA, 625 bp, Homo sapiens
tctcactgggtccaacgtagtcatgaggggcttttaaagagtgtggaagatgaatgcagaacaatcagcatcacagtgatagagtgtgagaaagactcaacagggcactgctagctttgaatgcggaaggtgctcaagagctagggaatgcaggcaacctggagaagctagaaatgttcagaacatgggtccttctctagagtctccagaaaaaaacatgaccttactaacacttttattttagcccaatgagacccatctcagatatctgactgctagaactatatgatagtagatttgcattktaatccattaagttgtggtaatatttttttaagcagctacaggatagaattacaaaaagatcctggtagggaagggaatgttccatgtcttgaatgttttggaagtgctggaagatgtactgttggggaaaactaggtaaagcgttcataagatttctctgtattatttcttacaactacatgtgaatgtataattgctttcaaataaatgttaaaaatatgtaatcattataaataaaatatacaattatttatataaaatatatactatataaaaacaggtttaaaaatatgtaattagggaatacataaatatatac

SEQ ID NO: 803401 - DNA, 643 bp, Homo sapiens
catcatgctcaaggatagactatatgttaggccacaaaacaagactcacaaaattaaaagaaaatgagatcatatcaagtgttttctcagagaacaacagaataatattaaatagcaataacaagaggtactttggaaactataaaaacacgtggaaattaaacaaaatgttcctgaatgaccaggtgggcccatgaataaattaaaacaaaagttttaaaaattcatgaagccaatgaaaatgaaaatgcaaaatcccaaaatctatgggatacagagaaagcaatgttaagaggaaagtttataccaataagtgcctacattaaaaaggcatataaattttarataaaaaacctaataacacatcttaaataactagaaaaataagggcaaggcacactcaaacttggtagaaaaaaagaaataatccacatcagagcagaagtaaatgaaattgaaacaggggaaaatacaaaacatcaatgaaatgaaaagatggttttctgaaaggataaaaaaatcaacaaacctttagccagactaaaaacaaaagagagaagatcaaaattttaaaatcagatgaaaaaggtgatattacaactgataccacagaaatccaaaggatcattgtagactactatga

SEQ ID NO: 803402 - DNA, 637 bp, Homo sapiens
accagtttcaagccacaaatgtgaaatcactgaacacagatttgggaagagatggacacaactcttgaaagtcagtgtgacaaactgaaacacagcactgcttacatatagatatataaagtggatgactattttaacagatacaaaagcaaagaatctatgtgaatttttaactaaaactgaaaatattatatacctaaaagcatgttggttaaaatgatcattttgaatatctaaatctacacagtcataattatactgatgctattaaaacatggtataatggccttctgtatggaactcatattaattgtaataaatattcaattatataaaattttagagatcatctactgtatattagacattgtgctatgaacaggagttacacagatggctaggacttagtttctatttttaaattataaaaagggccaccaaatggataattccagtagataaaataataaatactaagatagaggtaagcatctgtcccrcagtacagagaagagccatttagcccagtcttgtttgggatggttttctgggaaaatgatgttgtcaaaaccaccttatgaaatgcaggctctgtcactttacagttattcctagtattgccaactacaacttcgat

SEQ ID NO: 803403 - DNA, 578 bp, Homo sapiens
tcctgggctccatctcctggtgggacaattgcagttggtggtggtgagcactatgatgctatgatgcatgatgaggcagctaaaccatcacgtttgagaggcattgcagaagttaatccagctctgtaaccttggacacatcatttaactcctttgagcctctctcctcttcccatttccccaaacagtcaagccctttctcgttggtgccctgggaacaatgccatttctagtacttaccatggcagatttcagtgattgtttgcctctctcattaggytcggagcaacttgaaggcggggcccatgtctgtctcattcaaagctatatcctctgctcctaaaatagtgtctaacccttgataggtgcccagttgatgtttgataaaggaatgtagatgtggatgaaatgtgaaccagaaaatgacttctgtgaacttcatgtatcatggctgctgctttctagatacatcatggtatttagtctccctcatgttattatctgccatttattaaatactgactacattccaaacgatgttctgtcaaatctgttatgtttgtctacctacttttctt

SEQ ID NO: 803404 - DNA, 578 bp, Homo sapiens
tcctgggctccatctcctggtgggacaattgcagttggtggtggtgagcactatgatgctatgatgcatgatgaggcagctaaaccatcacgtttgagaggcattgcagaagttaatccagctctgtaaccttggacacatcatttaactcctttgagcctctctcctcttcccatttccccaaacagtcaagccctttctcgttggtgccctgggaacaatgccatttctagtacttaccatggcagatttcagtgattgtttgcctctctcattaggctcggagcaactygaaggcggggcccatgtctgtctcattcaaagctatatcctctgctcctaaaatagtgtctaacccttgataggtgcccagttgatgtttgataaaggaatgtagatgtggatgaaatgtgaaccagaaaatgacttctgtgaacttcatgtatcatggctgctgctttctagatacatcatggtatttagtctccctcatgttattatctgccatttattaaatactgactacattccaaacgatgttctgtcaaatctgttatgtttgtctacctacttttctt

SEQ ID NO: 803405 - DNA, 626 bp, Homo sapiens
gatgtgttgactatactgatacacatattaaactataccttatagtaaaccagtatcccaagctgcttttagttccaaaaatagtttcttttccaaaggttgttgctctactttgtaggaagtctttgcatatggccctcccaactttaaagtcataccagagtggccaagagtgtttatcccaacccttccatttaacaggatttcactcacatttctrgaactagctatttttcagaagacaataatcagggcttaattagaacaggctgtatttcctcccagcaaacagttgtggccacactaaaaacaatcatagcattttacccctggattatagcacatctcatgttttatcatttggatggagtaatttaaaatgaattaaattccagagaacaatggaagcattgcctggcagatgtcacaacagaataaccacttgtttggagcctggcacagtcctccagcctgatcaaaaattattctgcatagttttcagtgtgctttctgggagctatgtacttcttcaatttggaaacttttctctctcatttatagtgaaaatacttggaagttactttaagaaaaccagtgtggcctttttccctctagctttaaaaggg

SEQ ID NO: 803406 - DNA, 626 bp, Homo sapiens
gatgtgttgactatactgatacacatattaaactataccttatagtaaaccagtatcccaagctgcttttagttccaaaaatagtttcttttccaaaggttgttgctctactttgtaggaagtctttgcatatggccctcccaactttaaagtcataccagagtggccaagagtgtttatcccaacccttccatttaacaggatttcactcacatttctggaactagctatttttcagaagacaataatcagggcttaattagaacaggctgtatttcctcccagcaaacagttgtggccacactaaaaacaatcatagcattttacccctggattatarcacatctcatgttttatcatttggatggagtaatttaaaatgaattaaattccagagaacaatggaagcattgcctggcagatgtcacaacagaataaccacttgtttggagcctggcacagtcctccagcctgatcaaaaattattctgcatagttttcagtgtgctttctgggagctatgtacttcttcaatttggaaacttttctctctcatttatagtgaaaatacttggaagttactttaagaaaaccagtgtggcctttttccctctagctttaaaaggg

SEQ ID NO: 803407 - DNA, 624 bp, Homo sapiens
aaatgctgtcattttgatctacttcatcattgccagactcaattctggatgtctctgtgttaaaaccattttctaaacagatgtggggttcccttctcaagcacatttctgctcagctacatggggtttctgaatattctgtttcaaccctgactggcggatggtaattcagttctgacaaccgcctagagttagcgtcagactccacgggcttaaggatgtggttcccaacaagacggcccccacttcagataccagctacaagttcaggggtccccaggccacctgcacttttgactggctaccaattcaggagttcccacaaacccctcaggttcaacaaattgctacaacaactcacagaactcagggaagcactgtacttatgataacagttttgttataaaatatacagatcagcaccggccagatgcagagatgtgcggggcaaggtcarggggagtcctgaacaccgagcctcatgtcctctctctggggaaccaggcagctcagctacctgtgacatccatgtgctcaccagcctggaagctctcccgagctttggtgtccagagttcttaaagggtttcactggggtgattccagttcgaggctgtcttaagta

SEQ ID NO: 803408 - DNA, 596 bp, Homo sapiens
tggaatatttcaagcaaaaaaatttatgcataagaagaaacaagcatgggctgggcgtggtggcttacgcctgtaatcccgccaccatgggaggctgaggtgggcagatcacgaggtcaggagatcgagaccatcctggctaacacagtgaaaccccgtctctactaaaaatacaaaaaattagccagctgtggtgatgggcgcctgtagtcccagctacgtaggaggctgaggcaggagaatggcgtgaacccaggaggcggagcttgcagtgagctgagattgtgccactgcactccagcctgggtgacagagcgagactccatctcaaaaaacccccccgaaaaamcaaaaaacaagaaaaaacaaaaatcagccaggcgtggtggtgcatgcctgtaatcccagctactcgggaggctgagacaggagaattgcttgaacctgggaggcagaggttgcagtgagccgatattgtgccactgtactctagcctgggcgacggagagagactgcatctgaagaagaaggagaaggagaagaggaggaggaggaggaggaggagataatgaatacaaggaatatccatgtgctgt

SEQ ID NO: 803409 - DNA, 620 bp, Homo sapiens
tgtatcaatctctattttgaactgtaacagcaagaatatcatgcatatcaacacagagatccttcatgtgcctgagatattctaataagctcttataacatggtatgttatacactatatctcaaacaactcttactattgctataaaattttcaacatggaactttgattaagataaartgaagagataataatgtttctaaatcttaggaaattttttcctgttactgaggtgggggacttttcaaaaatgtatttctgtcttttgctggaaatatttatttcagtttcctacagcattgctatagcattgctgtaggaaattaacagtaattggtgactggcagttcaactgacagaaacacattattttgcggggaggcggaggaaaagcattcgcaaactcaatatgaatccatttcggaaagtagagttgtttagagaaatacaaatatcttcactcagtttttgcccacttactgaaaacacagtgtgaaactaaaattgaaaaagcaatgttcttctgaacatctttccattaaatattgcatcatataaaaataggattttatggttattattacacatattttcttccctttcatatgcagaatctaaaa

SEQ ID NO: 803410 - DNA, 470 bp, Homo sapiens
agataaagaaaaagatatctgagactatttctgaattaaaaaggacttcacttaggagaccttcttctcccttccacctccactgctccttctccacccacgcctgaacctttatatcttcttgtatctaaactttcctgtccttacttgccttcaaytctatctccctgaccacctgaggaaattttctacatctctgacatcctttctgaaactcctatttttgcagcccctttcaaggtaaaacctgcagaaagatgtgagcctcctattatgcacacccgttggacaaagactgaacttaagaatagtataaaagacttcccagagcttctccaagatcccatagtgtttgcaaaaaaaaaaaaaaaaaattcatttaattgtcaggacataagaacacagatagtctgacttttatcaattagttcacacgctggcatcaaaagacagggccactgaatggttga

SEQ ID NO: 803411 - DNA, 470 bp, Homo sapiens
agataaagaaaaagatatctgagactatttctgaattaaaaaggacttcacttaggagaccttcttctcccttccacctccactgctccttctccacccacgcctgaacctttatatcttcttgtatctaaactttcctgtccttacttgccttcaattctayctccctgaccacctgaggaaattttctacatctctgacatcctttctgaaactcctatttttgcagcccctttcaaggtaaaacctgcagaaagatgtgagcctcctattatgcacacccgttggacaaagactgaacttaagaatagtataaaagacttcccagagcttctccaagatcccatagtgtttgcaaaaaaaaaaaaaaaaaattcatttaattgtcaggacataagaacacagatagtctgacttttatcaattagttcacacgctggcatcaaaagacagggccactgaatggttga

SEQ ID NO: 803412 - DNA, 635 bp, Homo sapiens
gaattttctgaatgtttctcaatttaatttgtttaccaatgtcaaaaaagctgtccctctccggaatggagaagatgtttcctacctgacataacttttaatttttataattaggttactctctggcatcatctaaaccttatctctatagaagatctgtttctcagattcctctagatgagaggttagcagattttttttcttaaagggccagatggtaaaaatttcaggcttgctaaccagataaaaaaattgaagatattatgtaggtatttatataaccatttataatgtaatgatttcaaattattattatttaacttttactttaggttcagggttatatgtacaggcctgttatataggtatactgtgtgtcatgggggtttgtggtacagattatttcatcacccaggtaataagcatagtaactgatggacatttttttaatccttcccctcctcccacactccaccttcatgtaggcctcagtctccrttgtacccctctttgtgaccatgtattctcattgcttagctcccatttgtaagcaagaacattcagtatatggttatctgttcctgcattaatttgctaaggataataacctccagttccatctgtgttgctgcaaa

SEQ ID NO: 803413 - DNA, 634 bp, Homo sapiens
ctagtagtaacatcttgcataactatagtgcaccagcaaaaccaatacactgacatatgcataatccacagagtttattctaatttacctaatttactagttttataagcaatgtgtgtgtttgtgtacattcatgcaactttatcaygtgtgtaggattgtgtaaccaccatcgccatcaagataccaaattgttcatcaccacagagtttctttgtgctaccactttatagtcatatccatcatatccagctcctcctcttcaatccttaatctctgccagccactaatctgtctccatctctatgttatttcaagaacacgatacaaattgagtcatatgatatgaaacattttgtgatgctttttttggtgagcataattctcttgagaattccaagttgttatatgcattcatagattgctccttttttgttgatgagttttattccaaggcaaggaagtgccacagtgtgtgtcaccacttacccatgaaggacatttgggttgttccagtgtttggttgtttcaaatggaactgctatgaatatttgtataaatatttttgcatgaatggaaatgtaaatttttctgtgattaacgcctaaggagtggcaggctcccataattatag

SEQ ID NO: 803414 - DNA, 597 bp, Homo sapiens
acacatacacaattgaagaaatgtaatacagcacatcaacagaataaaggaaaaaaccatgtgagtatcttaataaatgcagaaagaaacatttgataaaattcaacattcctgcatgataaaagctctcaaagaattagatttagaagaaacatatctagacacaataaagaccatatataacaaacccacagccaacatcatactgaatagggaaaaattgaaaacttttctcaaataactggaacaagacaaaaatgctcactttcaccacttttattcaacacagtactggtagccctgaccagagcaattagccaagagaaagaaataaaagacatccaaaatggaaaggaagaaggccmattgtccctcttttcagatgacgtgatcttgtatatcgaacaacttaaaaacgttaccaaaaatcttttagaactgataaattcagtaaagttacaggatagaaaaatcaatgtacaaaaaaatcagtagcatttctatacaccaataacaaactagctgaaaaagaaatcaggaaagcaatctcattcacaatagcaaaaaaaaaaataataatagaaataaatataacca

SEQ ID NO: 803415 - DNA, 636 bp, Homo sapiens
ttactcatccttcataatgtgctgtacatgttggattgtgtgtggtggggggggagggtgatagagtgcatatcatcttctaacatattacatacaatatacatttatttattaagattattactgtctgtcatcttccttcttcccttcccccaaatatgtcacgaggacctagactagagcctggctacatagtatgcagttataaactaattttttgaatgaatgaataggaataatagacttgtatagtacattggcaaaatatataagtaacttcataattcttaacaccaaaagattccctgggggccaaaattattaatctttctattacagtgatcctttaaggaactaagtgtaagaatcttaaaaagaagaacacctacgaaacaatcaagtgtagtcaagtaatctgaagtttgctggaatycccccatacaaaattattggtagtatagaacttgctaaccataggtttgtttacccagtgttctatttgaaagtagtttactaaagcattccatataagcaaagaaaaaaagcagcaaagtttcttttttgtttatgtgtcactgtatagtctcaaatgctgtaaatttacagtgagtagaaaatattcagaccattgagtct

SEQ ID NO: 803416 - DNA, 590 bp, Homo sapiens
tgtgtttgaagctatcacctagcacaatttctgactaccaaatgtagtttgaggcttttgagtgtttttcacctaaccattcttcccaaatgaatatttttcagggaagctaaccccaggaaatgtgacacaatttactgtattgttccttacctctataatgtatgtttattstagctggttcatctcttccttatatacaagttccacagaatgatttttttctaataagaattaagaaacctttgttctgatgatgagcttatttaaatttgggtttaatttgatagaaaattaagctgtttccttaatggggaatctggccaatcaccatcctccaccctcccagggtagaattttttccaggaattaaatagctctatctagcagggtcttcctgcctttggcagtagagcagtacaaaggccacattgagcatagctgctggggaaaccctttttccttctctagcctataaatgctgttctgtctctgtgaaaagccctgacatcagctcttggaaaaatccaaatacttgtgttagaacaaggctgaaacacttgcctgggcagagactaatggctgaacta

SEQ ID NO: 803417 - DNA, 570 bp, Homo sapiens
aggaaattgttcatgatctgtgaaaagtatgggataaaacttcaaatataatgccagttacatttttaaaaaacattcatgtgatgcttttaaaaagacttctaggacatgtaccaatttttttttttttttttttkgagccaagtcccactttgtcgcctaggcttgagtgcagtgggcacaatcacagctcactgtagcctcagcctctcaagtagctgatactacaggcacacaccaccatgctcagctaattttttaattttgtgtagagacaagctctcactatgttgcccaggctggtctcgaacttctggactcaagtgattctcccacattggcctcccgaaatggtgggattataggcacgagccactgaacctggcatgtactactttttaagtgtttctgggttgtgagattatagatgaattttgttttattcttcacactcatatgttgttttctaggcttttaactatgtgtatatatatatattgcctttgtcatgagagacacttttgtttttaagtgaaacctctgtttagtttttatttatttatttgatct

SEQ ID NO: 803418 - DNA, 560 bp, Homo sapiens
aaatctgctataacccattcaatttttagctcccccagggattttcctcaccatctgggccatcatgcaagcgagtttgaaaagccctcataattttcctatatcacacctcctcctcagcaagaaaggctctgtgggtggaaagcagcgaagaacactgtatgttatgcagaaagcmatcgttcctcagaagacacagggctctgcagagcagatgagccacagaaacttgtttggatcagaaaaatgggatcatttcactgaagacctagagataggaactgaccactattttttttttaaggaggaaagggggattcacctcaaagtacttttctaatcagaaacagaatttgagaagaatttaacatcttaattaaagatataatgtcactctcccatgtcatgagatttaactttcatcaaaggagaggtctaacattaaagtcagaagtgacttaaaaaatagcacacattgacttaaaagtatattttgggtgacattattggaaaatctccactgagcaaagcagaaaatgatgaggttagaaaaataaagg

SEQ ID NO: 803419 - DNA, 631 bp, Homo sapiens
ggagaggtctaacattaaagtcagaagtgacttaaaaaatagcacacattgacttaaaagtatattttgggtgacattattggaaaatctccactgagcaaagcagaaaatgatgaggttagaaaaataaaggaagcaagccgggcgcggtggctcacgcctgtaatcccagcactttgggaggccaaggcaggcggatgacgaggtctggagttcgagaccagcctgaccaacatggtgaaaccccgtctctactaaaaattcaaaaattagccaggcgtggtggcgcacacctgtaatcccagctactcaggaggctgaggcagaagaattgcttgagaccaagaggtggaggttgcagtgacccragatcgcaccattgcactccagcctgggcgggcgacagagcgagattctgtccctaaataaataaacaaataaatagaaaaatacaggaggcaaagggcagaaatcttgaaagaaacataaaaatcaagtacagcacaacttgccttacaaatgcagtacagttaattacagatgacaaatactgtcttatcctcaataccaccatcagagagagggcgagacagtgagaaaaggatctaaatgggtccctcaaatccccttc

SEQ ID NO: 803420 - DNA, 631 bp, Homo sapiens
ggagaggtctaacattaaagtcagaagtgacttaaaaaatagcacacattgacttaaaagtatattttgggtgacattattggaaaatctccactgagcaaagcagaaaatgatgaggttagaaaaataaaggaagcaagccgggcgcggtggctcacgcctgtaatcccagcactttgggaggccaaggcaggcggatgacgaggtctggagttcgagaccagcctgaccaacatggtgaaaccccgtctctactaaaaattcaaaaattagccaggcgtggtggcgcacacctgtaatcccagctactcaggaggctgaggcagaagaattgcttgagaccaagaggtggaggttgcagtgacccgagatcgcaccattgcactccagcctgggcgggygacagagcgagattctgtccctaaataaataaacaaataaatagaaaaatacaggaggcaaagggcagaaatcttgaaagaaacataaaaatcaagtacagcacaacttgccttacaaatgcagtacagttaattacagatgacaaatactgtcttatcctcaataccaccatcagagagagggcgagacagtgagaaaaggatctaaatgggtccctcaaatccccttc

SEQ ID NO: 803421 - DNA, 522 bp, Homo sapiens
tccatctccccaattctctatgaaagggcagatgcaaagaacatgcaaagaagtgccccatttctgtcacctggaaagccaaatccagcgatttctgccatgatggtaaggtgatttccactggacactgaggttttaccccaagcatgtcacatccttactccactacagaggaggtatagaaaaggacccatcatggaggcttaaaatcagagcctctaaactccagctaattttcttcctcaaggtttcattagaagaggttttttggtgtttttttttaatgtgagctaaaagatgctgttcacacattagaataatgacaaccaaagtwttaacagattttacttactctgcatgtaggaaatgtacttgacaagaaacgcacacagagtaaaatctgtgagttcaggagagagcaaaacaaaaacactcctcctcaaaaagttacctgactccaaactcacttgaaggaatgttttttgcaatttgcaaacagcatgtgggatactagccccaggg

SEQ ID NO: 803422 - DNA, 646 bp, Homo sapiens
ttcttttacagaaataaaatggatatcaatccagtaccttttttgtctctggcctggccgaggagaccacgcagactcttatccggaaatagcattcggggcatttgatcaagacacactaataaacttgatagttttgtgcattttctttccctctgtttggaattctcattagatccacattttcctggacagttgtacagaggactaaaatagctttcctttagtgagcttgtactgtctactaggcactttggagccattatctcgtttactcctttcagcagctctgtgagataggtttcattaatccattttcagagtcaagtctagtctgctttccaaggctgcattctaagtagtgaagcctcaacttcatatttacctaaagcaggacaccacactcttcccctggcagccatccgcasgtaaccagaccaggacctttttcggttcttagattattttattgtttgaattgccactgtcatcccatgatgttttccagaatatacaaattaaaacacggagggactgtttaggagtgaaggtggacagattttggaaaacaaagcattcctgtgtttggtgctttatgctaatgggatgctcgtgatgggctgtgacaaaagatgagttttagcgt

SEQ ID NO: 803423 - DNA, 459 bp, Homo sapiens
cagtgatccttcctatctctaaataagcttagatcatagtctctagttcagtttagtacaacagccatttattgagtatctatgacgtgtcaggcactgttctgtgtgctagggttgcaaaatgggtaaaacatcgccagtccttaaagagccagggtaattgactccgatttacattgggctttagttgttaggtgtcagtgcattgtattttctcaatgataataaacattttgttggtaacagaggctgaatttaatttttttgtatctttccagaggtgattctagtaaatwttcagtttatctcactttgtcacttgaaagtgagttaacatttcttaaacactctctttgtgtcgaggcatttttaaaaaaatgtcttatttctagtggccctaggaacttctggaaaagtgtcagtttgtactacagtagttattctggaagaaagagaatg

SEQ ID NO: 803424 - DNA, 501 bp, Homo sapiens
cttatgatatcatttaagtgacacaagctgcaggtatactagtatatactgtatgattacgattacacaaaacatctatgcttaggggaaaaaacaggatgagaatgaaccagactgttgataggggctgtttatgagtggaagtgttacagcaaattgttttctgcttttctttgtttttgttttcctggttgattcttgtattyctttgtctgttttccaaatgttctttgatgaggatattttttgtgtaatgaaaaaagttgcatcttggtttggcttccagtagatacaatagtggaattttaaatttggcactagtaatgggaaaatataatttgtttgtttaatgtgatagcatgtggattgtgcctttttctagcttcttaatatcagccacattggatgaaggagtggctgactggaagttcagttgcttgataatgtattgtttgtgactcatttgagagattagttgccactgacttttgggtgggggag

SEQ ID NO: 803425 - DNA, 659 bp, Homo sapiens
atcttgaactcctgagtttaagggatcctactgccttagcctcccaaagtgctgagattatgggcatacaccaccatgccctccctgaatttcttttcagttattctacttgttatatgttgtggtttgtatacctgtgagtttctttctttcttgagaattctcagttcttatccattcaaatatcacctagyttgtacctgcttaactttttctttctgtgactgcaattaaacatgtttagtcattctgtccttcaatactgttaacctcctttgtcattttttcatgttcttgtctctctgtgctattctgggttctttattcatttttgttttacagctaactttttctgcttccagctgtatctaacttattattgataaccaatcaatacacagagttttttcaccaattatattattcatttctaaaattttcttggttctttttataatcaagttgttttttgcttgcttaatttttttactccttttcttttcttttctttctttctttttttttttttttttttgagatggagttttgctgttgttgcccaggctggagtacaatggtgcaatctcggctcaccgcaactgccacctcccggggtcaagcaattctcctgcctcagcctctggagtagctgggattac

SEQ ID NO: 803426 - DNA, 531 bp, Homo sapiens
tttgtgggtctatgcccttcatcaaatttggggagtttattcttcattatttctcaaaataatctttctgcccagtatttctcccccttctaaaactcccacaatgcatatgatggtccacttattagtcccatgagtcgcttagactctgttcacttttcttccttcctttttctttttgctcctcaaacttgataattaatygtcctaacttctactttgctagttctttcttctatctgcatcaatctgctgttgaaaccctctagtaaatttttcatttcagttattgtattttcagttccaaaatttgtttcatttctgtaatttctatgtctttattgatagtgtccttttcttcagggactgtttgcctgattgcctttagttctttgtccatgttctccccttaggtgtttgtgcatattttaaacaaatagtctttggctaataagtccaatatctgtgctgcctctgggacagtttctgtcaatccctttagttcctttaaatgagccatgttttcctgtt

SEQ ID NO: 803427 - DNA, 613 bp, Homo sapiens
acaatgagagagctgcagagtaatcctccaagtaagcactttgccaggacagtaagcagtcaaggaagcactgtccactatccaagctcatcgtacagaaggacactacctacccagtcctgtgggcaggaatctccttaggttaaaaaatatgtcaccaatcttcttgttctaatccttaaacctgtgattcacctgactagtcrcttttgccttgactccatgctcaccaagagttctgatgcctctaactaaactcaaagagctcacctgaaggtacctgaggacgtaggtgtctagttatgctagatagggatattttattttgaaaactaataaattagaatcaatctgatgaatccgaggaagatgagtttgcctctggctgatgtagtaacatgtggtatcctgccattcacatcactgtgcttgtgagtctgaggggcaaatttagatccccccaagatgattcctccctatgggtacttgtggtcttccctaagcatcacgtctttggctcctccatgagccacgtgccttttcttcaaacggctgcacagattatgtgcgtaacactatgctttaaaccactagagagtgatccaagagaaca

SEQ ID NO: 803428 - DNA, 613 bp, Homo sapiens
acaatgagagagctgcagagtaatcctccaagtaagcactttgccaggacagtaagcagtcaaggaagcactgtccactatccaagctcatcgtacagaaggacactacctacccagtcctgtgggcaggaatctccttaggttaaaaaatatgtcaccaatcttcttgttctaatccttaaacctgtgattcacctgactagtcacttttgccttgaytccatgctcaccaagagttctgatgcctctaactaaactcaaagagctcacctgaaggtacctgaggacgtaggtgtctagttatgctagatagggatattttattttgaaaactaataaattagaatcaatctgatgaatccgaggaagatgagtttgcctctggctgatgtagtaacatgtggtatcctgccattcacatcactgtgcttgtgagtctgaggggcaaatttagatccccccaagatgattcctccctatgggtacttgtggtcttccctaagcatcacgtctttggctcctccatgagccacgtgccttttcttcaaacggctgcacagattatgtgcgtaacactatgctttaaaccactagagagtgatccaagagaaca

SEQ ID NO: 803429 - DNA, 532 bp, Homo sapiens
gttaaaaaatatgtcaccaatcttcttgttctaatccttaaacctgtgattcacctgactagtcacttttgccttgactccatgctcaccaagagttctgatgcctctaactaaactcaaagagctcacctgaaggtacctgaggacgtaggtgtctagttatgctaratagggatattttattttgaaaactaataaattagaatcaatctgatgaatccgaggaagatgagtttgcctctggctgatgtagtaacatgtggtatcctgccattcacatcactgtgcttgtgagtctgaggggcaaatttagatccccccaagatgattcctccctatgggtacttgtggtcttccctaagcatcacgtctttggctcctccatgagccacgtgccttttcttcaaacggctgcacagattatgtgcgtaacactatgctttaaaccactagagagtgatccaagagaacatataattaagtgagaaattgtttggcataaactaaaagtgctacagaaattccgagagaa

SEQ ID NO: 803430 - DNA, 532 bp, Homo sapiens
gttaaaaaatatgtcaccaatcttcttgttctaatccttaaacctgtgattcacctgactagtcacttttgccttgactccatgctcaccaagagttctgatgcctctaactaaactcaaagagctcacctgaaggtacctgaggacgtaggtgtctagttatgctagatagggatattttattttgaaaactaataaattagaatcaatctgatgaatccgaggaagatgagtttgcctctggctgatgtagtaacatgtggtatcctgccattcacatcactgtgcttgtgagtctgaggggcaaatttaratccccccaagatgattcctccctatgggtacttgtggtcttccctaagcatcacgtctttggctcctccatgagccacgtgccttttcttcaaacggctgcacagattatgtgcgtaacactatgctttaaaccactagagagtgatccaagagaacatataattaagtgagaaattgtttggcataaactaaaagtgctacagaaattccgagagaa

SEQ ID NO: 803431 - DNA, 646 bp, Homo sapiens
ttgtttatgtattgtctatggctgcttttgggctccaaggacagagctgagtagttgagtagctgccaatagtcatatggtccacaaagcctaaaatatgtaccctctggctcttaatagaacaagtttgctgacccctgatctagaggaatgatttccctcttctattattcttttgaactgaaagtcaggagaccttgattttagactcactccatyctgccagtaaacttctatgtgactttgggccagtaattactttcctcaggtttggtttcttatttgtaaagtaaggagggctggccctggtgatcatctattccttattaattctctttaaatgtctgtgttctaaggggattgagacctctcaatttttaaaaggagtttatttttaaaaggaatccaaatcaattaaaaaaggcatctttctttttgtaagatgtacactttctttttcaatgtaaaccagggttttacactgaaacacttcacattatttcaagcattcagtaccgagtaaaaccccttgctgctgtatcacagtcataccagaaagctgcgggttagagctggagagagaactataaacagcagtaaaatctgttttagacaaggcagcacatctgcccactgcacccccttc

SEQ ID NO: 803432 - DNA, 484 bp, Homo sapiens
agtttctttagtatgtcttggatcctatgcccactttgtgaccagggcaagagggcaccttgattgacagccccacccagaccacatgcagaaggaggggtggctcccttgggaattagggtgatactgcacacagagaagaatggatgctgagtgagccagaacaacagatgaaagtacataacaggatttcttggtcttctctttataatttaaactttcttaygcctttataatcaatgaattttaatcaacaaaatttgtgtcttagaaagtcagtatggatagagatagaaacattcttctttatattactgccacagacaacactgattatgtgatggcatagcatgaaaacaaatatgtgtctttaacactaaattaagcagaaatattttaataatgaacagaaatacctgatagaaataatgataatgaatggaaagaactgatagggcttttgtaaggattgaatagggtggca

SEQ ID NO: 803433 - DNA, 618 bp, Homo sapiens
gtagatggcagaaatgttccgtcttgactgtggcgatgcttgcaggggtgcatgtgttggtcaaaactcatcaaaatgtgcactttaaatgggttcattttaatctatgtgatttttatgtaaattatacctcaataatattgactttcaataatcaaaaaaagattctataaaatggattaaaagtacggggctttgttcttgaccttgccctgttccacgttttcatatggcaagaaatcctacttattagatttactggtggcacttagttgtgagagtttcttttatttgtttatccaacaaatgttctttaagcatccatgttgtggtagatatttaagacaataatgatgaagaaaagaatgaggtttctattctcatggtattaccgtcttataggggaagcagacattaattgaacaagtagaatgtatgatttcaaggtgaaagaagctgaacaattctatgggrccacatacaaagggacctggcctagcccaggagagcaggggaagcctccttgagaaaatgaccatccagttagacgcttaaggatgagtaggtatgacttcatccaattgggggaggggatgcattttgcatttgcaaagtccc

SEQ ID NO: 803434 - DNA, 548 bp, Homo sapiens
gtttaaaggtggatgtggtcaccttcccaggtaggcttagggattcttagttggcttaggaaatccagctagtcctgtctctcagtcccccctctcaacaggaaaacccaagtgctgttggggaggttggccagcgaccactctaactgcttcctgctgaactggggtgtagtagcggttgtgcagttgagattttctcaggaggatgccttcgatgtcattaacatcagagcataggctagcaggccggtccaggggtccatggactgcatctggggctccatttgaagaaccatttgtagctttacagctttgattctggaagagacaaacttaacaaggagsttaagatacagggtccaaagaggagtaacaatattatagctgctagaggtcctaaggaggggagaatccagggcatccattggctgagggggccccagggtccggtgttttgaagctcccctgctctacgttgtatgcgatctcgaatttttttaactttcttctcagtgacgattctggattgattaacataataacagcat

SEQ ID NO: 803435 - DNA, 514 bp, Homo sapiens
accatttagcatgattgctgtgggtttctcataaaggctctttgtcaggttgaggaagttctcttctgttcctagtttgttgagtgtttttatcatgaaagagtgtttgattttgtcaaatgctttttttgcatctattgagatcatcatgtgatttaaaaaattctactggtacgatgtgttacaagaattgattttcagatgctgaactaatcttgctctcgagggagaaatccagcttggttatgatgtatacttatttttagatactgctggaattggtttgctagtattttgttgaggattctttattctttttccacatacaatcattccyaattgttgaggatttttgcgtccatattcataagagatattttttctctggttttattttcttgtgatgtccttgtctggttttgacatcagggtaatatttgccttataaaatgagttgggaagtgtttagcctcttctattttttggaagagtttgtgaataactgatattaatt

SEQ ID NO: 803436 - DNA, 611 bp, Homo sapiens
tataatacacaaaggagactgcttacaacatagcaaggtaaaggggcttaaggaagaggcatcattacatccattccgggagaatctatataattatcagatacaatgcttgtatgattgattcaagttgagctctgtctgaattcaaactttatttctaaagacagtatgcatttggaaattgccttgtgaaaccgtcagaatacagaaaacacaaagtttaaacgttttggatgccttctgtaaggtaaagcagtacctcagcagtgaatcaggaagatggacagcwtcggtaagattatactgagcggaaggcatggtttttgttttttattgaatccatcccatagttattttcctaataaaacaactcttgtaaaccagggtctttgtatgtttgttgttgttacaggagttttttttaataccagtacaatagttttactctacaatagcgaagatgggaagacagctgctagtaaacataaaactggtcatataatggcattacaatggattttttatttgagattccaggatggggtaaatttgttaccccagcaaatagctggttacatggaaattgactttatataatagggaacatttct

SEQ ID NO: 803437 - DNA, 611 bp, Homo sapiens
tataatacacaaaggagactgcttacaacatagcaaggtaaaggggcttaaggaagaggcatcattacatccattccgggagaatctatataattatcagatacaatgcttgtatgattgattcaagttgagctctgtctgaattcaaactttatttctaaagacagtatgcatttggaaattgccttgtgaaaccgtcagaatacagaaaacacaaagtttaaacgttttggatgccttctgtaaggtaaagcagtacctcagcagtgaatcaggaagatggacagcatcggtaagattatactgagcggaaggcatggtttttgttttttattgaatccatcccatagttattttcctaataaaacaactcttgtaaaccagggtctttgtatgtttgttgttgttacaggagttttttttaataccagtacaatagttttactctacratagcgaagatgggaagacagctgctagtaaacataaaactggtcatataatggcattacaatggattttttatttgagattccaggatggggtaaatttgttaccccagcaaatagctggttacatggaaattgactttatataatagggaacatttct

SEQ ID NO: 803438 - DNA, 650 bp, Homo sapiens
ctcagtcttcactattctaagttattgacttgctcatctaaatccaacctaaattcaaatgcatgttgctggtttgatcagaatcaagaaatttgcttactctgcaattagtcatcggatttgcctctgaacatgtatgtagagatggttcactcttttgtactggtaaaggctgaagacaaaaagaaaatctcaccttttgtcccttgaaagaaaaagcttttcccattccagaagaccatggtatagtttccttaaaaactagctgtgtttcaaactcaaatgactcttgctgtggttgatgaaaagcacaatattccttctctcttcctgtaggaatgcagaaataggaaaacagaaagaaaaaaaagaaaagaaaaaagaaakagaaagaaagaaagaaaagaaagaaagaaggaaagaaggagggagggagggaggaaggaaggaaggatctaatttatttttttctattcagaacagaaaaaatcaattagaacaataactttttttttctcccaaggggaaaaccaagttgtagcaactctttggagacttggaaggatgtcataccccattcatttatggcaatcagttgttgaacacttagcaacttcatttataaatgaaggagaacagtttggctggca

SEQ ID NO: 803439 - DNA, 557 bp, Homo sapiens
tgaaatttatgcatcagcaacaggtgattcttatgtaagaatggaatcgctggcgtgataaatttggtcttgagaaatctcagctcagtggctgcagatggcggtgtcatgatggcagagttagagagcggtgacctgctgggctgtgggctgtctgtaaaatggctactctgttcagaactgtctgagccaattctccgagcctcaaggtcatgaccaaggggcacagcccaactgtaaagttgacattcattctagcaacattcttccttctcccttgcacactgcatctggctcactcaagggtccctcaagaattgggttgtaacctgtgttctttgtgaatacctttatcattggrgatctctgtctatcatgactagtcctattaagggtcaattctatgcttgtaaagagttgcttacactagaggatttgcaccaactgggttgggttggccaaggagacatttctgtgcactcatcccggtcaggttctatctgtgatctaggtccctttttagtggcaacttttagttcgcagtttcttagccttgg

SEQ ID NO: 803440 - DNA, 633 bp, Homo sapiens
tgataactacaataaaaacagtaccacctgcctaatctattacatgtgacaatactataacaatgtagatttattgactgtctactgcatgtcaagcacagggataaaagacacagtctttacttcaggcagctcaatctctagtagggggctgataccaaaataactgcarcgtggtgtgtaagtggttcatgcataggttacactggtgtcaggaagaaggagggtgaccaattgctgggagacagcaggagaaatgaggaaggactcacaaggaagggaacacctgaactaggtcttagggaataaataagaccaccaccttttaaggggtgggcaaaaggaaaaagccagtaaagctggagacagcaacaggaggggaaccaagagagctgggtgccacgcaaggcaagggaagagggattctgaaagaaagtatccccatcatcaagggacacaccaaagtccaataaggcccagtagattctctttggtttggtccactgggaggggtcagacctttaagcatcggcctttcggtgcaggggtagggaggagccaggctgccctgggtttcggaccaaatcgggagtgaggtgatggagactgagattctctcagctggatcccctt

SEQ ID NO: 803441 - DNA, 587 bp, Homo sapiens
aatttttgcttctgatattactgagtggcaagaaacagttaacttacaactgcctgtgctttctcagcaatcattgcacatacatacaaaagaatgttgcaaagttaaaaatctaatcgaaaaattatttctacatgtaatgaagtttttacaaatattaaatttaaagattaatgaagttgaaacaatgttacattttggagatatttaattaaacatgtcttcatttaattttgcagtttcctttttgcattctgaagccagtactttttattcagacctcaaacataatttggacactcaaaaagcttttaagctccaagtaattctgtctatgagatctaaaggagaaaataattctgttttgaatacacttttgttcttgctattcaatcttcaccccatgcaattttgtcttgcaccactaaaaccaccctygctgtggtcaccaatgaacattttgtttcgagcctaatggaaattttctagtcctgatcttgcatgacctttgttagcacttgacactgtcagtcacactcccatcttggctttttataaagccattgctcattgtctcttccaatctc

SEQ ID NO: 803442 - DNA, 631 bp, Homo sapiens
tcatgccacccaccatggcatatactataaatttccttgtattagtacaggatgcctggactcacactccaactctgccacctatgagctgcgtgaccttaacttctctgtgcctcagttttttcatcagtaaagtagggataatgatagttcccacctccatggagcttctatgggaattaaatgagcaacccacacaaagcttaggcctgacacagataactcacaataaatgttagctcttactattactgctgtttacatttgtgtgcatatcttatctctacattagataaacttcttgaagcagggatcaaatctttgaaaaaatttaacataaacaacatttcaaaactgccattagccctgttttggagacmaagacgctgagacccagagaggttcatcatttgctcaaatacacgcagctaggacatgaagaaagctagcttcagacccccatgtacacattctcaggactgtgcgcttggctttcttattactgcactgttcgcagtgactttccccaagagggcacacagtcagtccctagtgaagagccagtgcagccaacagcgtgggtaaggaggggaccccccccccaaacgtggcctgccctcgagccccttct

SEQ ID NO: 803443 - DNA, 577 bp, Homo sapiens
atataggggaatctgggcgtggggtattgggaaaccctctgtgctatcttcacagtcattctgtaaacctataggtcttttgtttgtttgtttgtttgtttattttgagatggagtctcactctgttgcccaggcgggagttcagtgacacagtcttggctcactgacacaatcttggctcactgagacctctgtgtcccgagttcatgctaattctcctgtctctagtctctcgatatgctgagattacaggagccagtcaccacgcctgggtaatgtgtggatttttggtggagtcggggttcaccatattggccaggctgatctcgaaatcctgacttcaggygattcacccgcctcggcctcccaaagtgctgggattacagccatgagccactgcacccggcctaaatcagaagatcttatagcttggggctgctctggcaagaatcggaggagttgggcagcaggtgccccctgtagcgggggcaggggttctggacttgccatagtttcaaccctgcccactgttccttccccagcctactgcagcctcgatctcacaggcttaagggat

SEQ ID NO: 803444 - DNA, 661 bp, Homo sapiens
aatataataaagagtaatgctacaaactaatgattgataatattcatatataatcatgtctatattctatttctagtataactattcttattctaattattttctttattatgctggaagagctcatgccttcggtctcttgcctcggcacgtgggtggcttgccgcccacaccacaaggtcaggaagcttgtaagggaaccataaaaaccaggtaccagaccaatctytccaagggactttttactggctctataaaatcagcctcaactcctcaaaacagtctggctgtatctgaaaatatgccagtacagtcaaagccttggtaaaattacgagtgtcttcagtgtgcccagttacaaaagaaaacatagtcttactgaacttatgcaaataactgtattgcaataaaataagaatcgtcacaaatagtgtccaaattttggagaaatcaggtagagagaaaggtaaatatttcaattttgctcacaaaagtatactttgcccaatggctgtgagttataaatagctcaaaagaaaaagttttcttgtttctagaaaacaaaatataaaaagaatcagcaacgtttcaaacaaacaaaagtcataaaaatcattttagtcccctatcggttctgtccttcgtaattaattctcgttct

SEQ ID NO: 803445 - DNA, 608 bp, Homo sapiens
aaacaaagcaaaggctaccatcatttaattgtcacaaatcattttttatttttctttttatcttttactttaattctttactaattattttttcctcctttttcaaggtcttcaaatattgagttaggtaggactatttgatttcttttacctgaaataactgaattaggagaccagagagaggatagtacatcacttgggcrcatcgaggctctgggtacatgtgtagtatgtgtggtatcagtgtcataaagggctctctggaatatgtggcttgtggttacaatgttgcatgcttattaccttgtacctcccacctgagcccctcaggctagaatgtgagtcccaaatcacacattttagtgtgtgatgtagtgaagagggagaatgggtcctgtcaggccatcatttttctcagtggtaaaattgggagcaatatctattgtattagggtgtgtgtctgtgtgtttctctctctatgagagagatttttattaaggaattggctcatgcaattgtggaggcttagtaagtccaaaatcttcagcggtaggttggaggctggaaacccaggcaagagttgcagtttggatgcccaggcattctgc

SEQ ID NO: 803446 - DNA, 566 bp, Homo sapiens
cagattctgcagtggccctgactgtgggcattttaaacacgaaatgccccactaaattggcaaaagagttccaaggccatcaggctccccccagcatttaatagaagtcagtaaagcatattctattgctacccttttctccaaaacctattcaagaaattgatagaaggtaataaaactaattgttctcaaatgtttaggtcccrttccaccctggtgagataaaagacatcagcagccacaatcttcactggttacctctgatgaattaataaactacatgtttaaaaaagaaaaagtacatacaaacatagtattacaacataatgctaaaatacaactcttcttcttccatggagaatcttctgtgaatgataccatgagaaccactgaaacagaaaacctacaacctcttttcagagactgctttaaaataaatttttttatcacattgaaaaatacatgatgttaaagcactctggaaaattaaactttacaaaatccccacatgaatagcatccaccaaaggaagcagctgaggaaagtaatgtctaagttttttcctc

SEQ ID NO: 803447 - DNA, 527 bp, Homo sapiens
taaaaacataatgttaaaattgaattgtaaatacaatgtgaacccttttttaatttttaatgcatttttaattggcaaataaaattttacgtatggtgtatataacatgatgttctgaaatacgtatatgctgtagaatggctaaattgagctaattaacataagcattacctcatatatttatcattttttgtgataagaccacttaaaatctactcccttagcaatttttaagtatataatayatcccattatttttcaaaatacagttttccattactatctgaattttcattgtacaaactttcaatattaaaaattcatgaactaaatagactactgaaaaggtccataaaccttgtcaccccagcacaccatagatattctaagttacaagaatttcatgtctatatcattcccaccaaaagaaattagggcttattagtgaagtggctgattgacatttgggacaaggaagctgcaagataagcttatgcattttgctgtgcaaggaagcaagaaagtgc

SEQ ID NO: 803448 - DNA, 563 bp, Homo sapiens
atgcttgccttgtcttagttctcaaggggaatgcttacagcttttgcccattcagtacgatgttggctatgggtttgtcatagatggcttttattatgttgcggtatgttccttcaatacctacttttttgagaatttttaccatgaagggatgttgaattttgtcgaatacrttttctgcatctattgagatgatcatgtggttttattttttagttctgtttatgtggtgaattctgtttattgatttgtgtatgttgaaccatccttgcatccaggaataaagcctatatgattctggtaaattaacttcttgatgctgctggattttggtttgctagctttgttaagggtttttgcatctattttcgtcagggatattggcccgaagttttcttgtttcattgtgtccctgccaggtgttgtatcataatgatgctagcttcatagaatgagttagggaagaggccctcgtccttatttaaaaataatttcagtaggatttgtactggctctttgtacatgaagaccattttagacataatgttgatgctagggctaga

SEQ ID NO: 803449 - DNA, 590 bp, Homo sapiens
agcagcaggtctcttgccccatttttgccagtctgcatccccgtcaaattgactcacttgtgttgtttattgattagtctggaaaagatgagatacctgcccatatatatgtgagtttaaaatcaaatcataaacaactaaagtatttggttgtttaggttttcattggttccttgaattgagcttttggrtactgagattagaactatcggttcactgacattcacagtgaccgtataactgcattgacagacatgcacacagtctttagttagagctccaatttatcagtgcttagttctaactgaacacacatttgttgagcatttattatcatgccaagctctgttctaagactctgatgaactgaagagacaacatccctgccctcatggggtttgtgatctggtaaagaagttatatattaaataaatagctacacaaataattgtgtataaaaaatgaagctgtatccaaattgcaataagtaaaatgaaagaataaaggagggtgccatgataaaaagtcatttccagattgtggagtaagggaaagttttcctaaagaactaatgtttaagccaagaccta

SEQ ID NO: 803450 - DNA, 607 bp, Homo sapiens
agttatatattaaataaatagctacacaaataattgtgtataaaaaatgaagctgtatccaaattgcaataagtaaaatgaaagaataaaggagggtgccatgataaaaagtcatttccagattgtggagtaagggaaagttttcctaaagaactaatgtttaagccaagacctaaaatttgagtagaagttatataggcaaaaccaggagaaaggcagctcaggtagcaaaaacagcatgtgcaaaggtaggaatgaacagaagkgccatgtgtctggagctcagagagcaagagagagaggctgaccagagagattagggatatgggtaggcccaatagcacagagctcttttgtttctctggagttctgacatctgggctgagctacatttctgagaagaaatgtagctacagtgtttaaaacaaacaattcagtccttgactgtagtagtcatgtcctataggtccagatttaaaggccagggaaaagtgctatgtccataagtggttcactactacaattcagtttcaatcttttaaaatgtcgattttaaaatgctgagattttgttctctcttctgtacctggattgcaagctctataca

SEQ ID NO: 803451 - DNA, 607 bp, Homo sapiens
agttatatattaaataaatagctacacaaataattgtgtataaaaaatgaagctgtatccaaattgcaataagtaaaatgaaagaataaaggagggtgccatgataaaaagtcatttccagattgtggagtaagggaaagttttcctaaagaactaatgtttaagccaagacctaaaatttgagtagaagttatataggcaaaaccaggagaaaggcagctcaggtagcaaaaacagcatgtgcaaaggtaggaatgaacagaagtgccatgtgtctggagctcagagagcaagagagagaggctgaccrgagagattagggatatgggtaggcccaatagcacagagctcttttgtttctctggagttctgacatctgggctgagctacatttctgagaagaaatgtagctacagtgtttaaaacaaacaattcagtccttgactgtagtagtcatgtcctataggtccagatttaaaggccagggaaaagtgctatgtccataagtggttcactactacaattcagtttcaatcttttaaaatgtcgattttaaaatgctgagattttgttctctcttctgtacctggattgcaagctctataca

SEQ ID NO: 803452 - DNA, 564 bp, Homo sapiens
aaagtcctacctgcttgtagtaatccacataggtgatctcggtgccatcccgcttctgaaaggtgtgtgtgggcttcactgaccagtcaagtcatcaaggagtaggttctgttatgtatctgccaaatataaaaagtctttaaattgttttttaatcatctaacataagcagctacttcaccacacttttaattcaacacataagatagactccagaatgtcagaaattatgaaaacaataaaacaagaatattcactttttaaaaaatactcagctcttatctgaaaagggcattccttaataatttcctatacaggaagacttctgtccacattccaacaaaacctgtgggraagtccttagaccacagtctagttttctcactgatagatactctaacttcaggtaaatcattcttaaatgttcagaggctgaagcattgctcaaaactttcccattatcttctggtgtcactcaagagtttctgacctcccaggtagtttttctgatttaaaaaagcaccaaaagaaggccaatcaacccacaatgctggcatcttgctt

SEQ ID NO: 803453 - DNA, 564 bp, Homo sapiens
aaagtcctacctgcttgtagtaatccacataggtgatctcggtgccatcccgcttctgaaaggtgtgtgtgggcttcactgaccagtcaagtcatcaaggagtaggttctgttatgtatctgccaaatataaaaagtctttaaattgttttttaatcatctaacataagcagctacttcaccacacttttaattcaacacataagatagactccagaatgtcagaaattatgaaaacaataaaacaagaatattcactttttaaaaaatactcagctcttatctgaaaagggcattccttaataatttcctatacaggaagacttctgtccacattccaacaaaacctgtgggaaagtccttagaccacagtctagttttctcactgatagatactctaacttcaggtaaatcattcttraatgttcagaggctgaagcattgctcaaaactttcccattatcttctggtgtcactcaagagtttctgacctcccaggtagtttttctgatttaaaaaagcaccaaaagaaggccaatcaacccacaatgctggcatcttgctt

SEQ ID NO: 803454 - DNA, 600 bp, Homo sapiens
atcaacccacaatgctggcatcttgcttaacctacccgctagggctggcccttggcaaaactacaaaacaggttagctaagattactctaagctccttctccccttcagcactgtgtagcctggactgtcctctcaggatgacctagcctaggggcagaaataccacagcaggtttctctagagcttacgattctttccaagatgactttgaaatgtgatagctaatccatcaagatcatgacaggaggatagagggtagccttctcataccgagtagtgtggaatccagccagtcccacccctctgctatatatcccagaaaaacaagtttaagtggaaattctaagccagaatagaaagctaacaagtcccctaaaagaagtatttttgcagccataaaaaggaacaggatcatgtcctttgcagggacatggatggagctggaagccattatcctcagcaaaccarggcaggaacagaaaaccaaacaccgcatgttctcacttataagtgggagctgaacaatgagaacacatggacacgaggaggggaaaaacacacgctggggcctctcaggtgatagggtcggggggagggag

SEQ ID NO: 803455 - DNA, 646 bp, Homo sapiens
tatggaagttcatcaaactgtatgcttacatatgtacttttatgggtggacattatactttagaaaaaagtttctaagaaaaaatcattctgtcattagtaaagagtgagttgggtaaaaatagggtaagagtaggggtgtggtggtgtkcagttggaaagttattgctgtaattcagatgtgaaataaagagggcctgaactgagacagtagctgtgaggatgaggaagaaaattaaaggaggatagattcagagagatttaggaggctggtttctttctctgggaagcctttctggatacccacaaacatatatccagggtagtttacatggccctcctgtgcactctcacacatgctgcacctttcagaacatcatgggacatccagagatcatgactgtttcattcataattccatcctgaacacccaccacggaaccaggtttctagtagtgaatatttgttgaatgaatgtatgcccttaatgtatcaccgaaattatctgttggtatctctttccccactacaaaatgagaagacatccggagatcttggctatgtgaatgacttgctatgaccttgaaatgtcccttaagctttcagtggaaaatattgtacatgtattaagcatagtcctggcaaca

SEQ ID NO: 803456 - DNA, 660 bp, Homo sapiens
taaaagacccaaatcaaacttctagagatgaaaactacaatgtctgtgataaaaagtatactgaaaggtaatatcagcagattagacaatgcagaagagaccagtgaatttgaagaaagagcaatagaaactaaccagaacaaaccacagagagaaaagaaaaagggactactgggaaaaatgaatgatcagagagctatggagcaacctctagcacccttacatacatgtaactggagtccccgaaagagaggaaagrgaaaagggaataaaaaaaatatttgcagagttactgactgaaaaatttccaaatctgatgaaagctataaacccacaaatccaaaaaactcaatgaacccaagcacaaaacacacaaagaaaattacactacacaaaagcacatcatcattacattgtttaaactcagttagaaaagcagttagggccaggcacagtggctcacacctgcaatctcagcactttggaaggccgaggtgggaggatcgcttgagcccaggagttttcgaccaccctgggcaacatagtgagaccctgtctctacaaaaaataaaaaatttgcctggcatggtggcacacacctgtggtcccaactacttgggaggctgaagtgggaggatccctcgagcccagaagtttgaa

SEQ ID NO: 803457 - DNA, 493 bp, Homo sapiens
  misc_feature 450, 451, 452, 453, 454, 455, 456, 457, 458, 459, 460, 461,462, 463, 464, 465, 466, 467, 468, 469, 470, 471, 472, 473,474, 475, 476, 477, 478, 479, 480, 481, 482, 483, 484, 485,486, 487, 488, 489, 490, 491, 492, 493: n = A,T,C or G
aaggcagcagcgtgggctctaggctggacagaccctgggccctacatccctgaaccctggcagccttgtctggagggctcagggagggcaggaagctgtggtatccctctttccaatctggagcacaaagaagaggcaatgggcctrccccagagtgcaggacctcggcccctgtagctgggacagcagaaggggtagcctttccccgaggccgcctcttccagaatgcccacgggcttcctatgtctcgtggggcatgagccagtctggcttggtctgtcacatgctgaccatggtggagaagctgcacagagaagctgcacagtgagggcctgacttagagtcagtcttgctgagctgttccctgcgccctgtggcgggtgccgaggcctctcttctggtgccccatgctgctgacagtgtactgtcactgctggctcagcatgcagnnnnnnnnnnnnnnnnnnnnnnnnnnnnnnnnnnnnnnnnnnnn

SEQ ID NO: 803458 - DNA, 493 bp, Homo sapiens
  misc_feature 450, 451, 452, 453, 454, 455, 456, 457, 458, 459, 460, 461,462, 463, 464, 465, 466, 467, 468, 469, 470, 471, 472, 473,474, 475, 476, 477, 478, 479, 480, 481, 482, 483, 484, 485,486, 487, 488, 489, 490, 491, 492, 493: n = A,T,C or G
aaggcagcagcgtgggctctaggctggacagaccctgggccctacatccctgaaccctggcagccttgtctggagggctcagggagggcaggaagctgtggtatccctctttccaatctggagcacaaagaagaggcaatgggcctgccccagagtgcaggacctcggcccctgtagctgggacagcagarggggtagcctttccccgaggccgcctcttccagaatgcccacgggcttcctatgtctcgtggggcatgagccagtctggcttggtctgtcacatgctgaccatggtggagaagctgcacagagaagctgcacagtgagggcctgacttagagtcagtcttgctgagctgttccctgcgccctgtggcgggtgccgaggcctctcttctggtgccccatgctgctgacagtgtactgtcactgctggctcagcatgcagnnnnnnnnnnnnnnnnnnnnnnnnnnnnnnnnnnnnnnnnnnnn

SEQ ID NO: 803459 - DNA, 610 bp, Homo sapiens
atcacctgcgaatcctcctagccaaattgctaatgaatcacaaattttagtgagataatcatttaataaaaatccatggctttaaatgataaaaagaaaaagaaagaaaacacacacacacacaaaatccatggctttgcagatcttaggtgtacatggctgtatttcaataccatttgattatgcctactgttgcattcacagcttaatttgttatttgttataatataggctaagaaagaaaaccatggtatggtattgtttaaatataaatcatatcacatctagctgtcttttcacagatttcgacctttgtataatttataatatcatataaatgtattagtaaagactatgccattcaatggttgtaccactcaygtataagtcaaattttgtgcaactgatcatagaatattttaactgatgaagaaaatctctacttacaagttggcaatataattaattttttctttctactgtttcaatttttaaataattaagtataaaatttaatagtaacattaaataaaatattgaaataaattattgaataagtaacaagaaacacagaataaagaataacatatttcagctctttgggaatttc

SEQ ID NO: 803460 - DNA, 640 bp, Homo sapiens
aatctccttagaagagcctgctgtgaggtgcagctgggccccccggctgccatccatctcctgccactcctgatctggatcaggtaggctccagcttaccacgtattagctggcagcctgcacgagggctatgccattaagaagatggaaatctagagatrgttttcacggcagctccaaacttctcacagatacagaagcacacccatattgtagactgaagcaaaacgcaactgggaaagcctttgccattttccatatatcaccttaactttaatggtcctgcctccaagcctttcttcggttgttgccccttccatttcatcctatccaaactctaacatcctggcaattttaaatcccacctcctccatgcagccttcctttctttgttttcctccagcaggaaatcatctcttcctatgtagatcagtaagggagaaaatactaagagtaaaatatgttttctcacttacaggctttggataagataacttattgggccataattttctcatttgaaaaaaagagaaatactactactcaaattataggtttgtcatgaggatggaatcatgcaaagcaccaagtccagtgcttaggacacagcaggcatttcataaattgcagttatcattac

SEQ ID NO: 803461 - DNA, 609 bp, Homo sapiens
ctctacgtccatagtggtcaaactgaacattccctgtcagcccttgaattcgaacctaagtgaaaaagaaaaccacacgtgttcacttgcaatttcacttataggaattttaacttcatctgctgggcttataactacttaaaaaagtagaactataaactataaccaactaactgaaatgccattaggtatttgagctattgggatagmatctgaaataggaatatcaaagggatgtataagcaattttgctatacccctggaagaggaatatgttttatttgtttttactattataaagtttccatttttagtcgaagaatcctccctcaattgtaaagtatttttataggaatggcaattttttatggttacttttcagttttatctatatatccacaaaatggattaaataaccctgatacttatgccagatcatattctcaccttgctaatattaaaattaagatataagaagcaaaaagtataaggacatttttgaaaatattgaaatatattttattccaaatttccttttaatttgcttttacctatgttttgaacctgtgacatttcagaacatttaaaatgtaacattaaatatgtata

SEQ ID NO: 803462 - DNA, 597 bp, Homo sapiens
accaccattacagggaagagaaaaactaaaacatggataaaataaggagcattaattctaacaaagaactgttcaatagtataggatataactcttgtattagaaggatttaaaagaaccatgtaaattaagagctttcctatatattcccccaggacatgataaaacaagcttctggataaatgtgcccttcacaattgattgggatggggtagctgaraaaaattaaggtgtttaagcaaggtactacaccaaaactgaatgtgctccttctctgcctgacccacacatctttgagtagagaaagtcatcaaatcatctttttttcgtaaggcaagaaaataaaacgagaaataaaatgaatcttgcctaagtcacaaagggcaagagaaaaatgcaatgctagtacttgaggaccaaaggaggaaaaaaagaaaaatattgccactttttcaacaggaagaaagaagctgagaagagatggcaccaaaaagcaaatgcactttttgtgttttaaaaagttcgtttatttttatgaaatatgtgaaccagaaaaaagagcaggtatcacacagagtggtgcagagcaaaggagac

SEQ ID NO: 803463 - DNA, 616 bp, Homo sapiens
gagaggatgtggagaattaggaacacttttacactgttggtgggactgtaaactagttcaaccattgtagaagacagtggggcgattcctcaaggatctagaactagaaataccattcgacccagccatcccattacggggtatatacccaaaggattataaatcatgctgctataaagacacatgcacacgtatgtttattgcagcactattcmcaatagcaaagacttggaaccaacccaaatgtccatcaatgatagattggattaagaaaatgtggcacatatacaccatggaatactatgcagccataaaaaatgatgagtttgtgtcctttgcacggacatggatgaagctggaaaccatcattctcagcaaactatcacaaggacaaaaaccaacactgtatgttctgactcataggtggtaattgaacaatgagaacacttggacacaggaaggggaacatcacacacctgggcctgccgtggggtgggggaggggggagggatagcattaggagttatacctaatgtaaatgacgagttaatgggtgcagcacaccaacatggcgcatgtatacttatgtaacaaacctgcacgctgtgcacatgta

SEQ ID NO: 803464 - DNA, 641 bp, Homo sapiens
tagccacattcaactgtgacttcctttaagaaaaaggttacgtcatttttctttgatctctagtgtttggcaagatgcttgtctcagagcaggcacttggtacactatcattcaaagaaaaaatgaatcaatagttaaaaaattcttaaatagttatttgcattaaatctgctttcctaatgttgtccagtattttggctttaagcatggtttgtgctccatgaaatttaattatattataaaacatttccctagtgatgctgataattttcctccagttgtaatgagcatacacttgaggtgatactcccatttagttttytaagcaagtgagacagaaaatttgatgaataattatggtgaaaatcctgataaaatgaaaaagtttatcagtggctaataattactggacggttttcagttacacacacacacacacacacacacacacacacacacacacccttaacccaacccattaaaagacatgcactagagagacatttgagcaaaaagcacttgattgtgtaagtggcacctaagccaccaaccaaagataaacctggtgaacacataatatggagagagtccctggtcacatctgagtttttccagtcatttgcagacaaggagtgaccacc

SEQ ID NO: 803465 - DNA, 611 bp, Homo sapiens; identical to SEQ ID NO: 803436

SEQ ID NO: 803466 - DNA, 611 bp, Homo sapiens; identical to SEQ ID NO: 803437

SEQ ID NO: 803467 - DNA, 557 bp, Homo sapiens
ctttattgttaaactctcacaactgataaaattatcccgaaatgacataaccaaaatgcttctcctctcattagtctaccatgactatgatatcttatgtaaatatgtgactaacaaaaaaaaaatgaatgggccataaatactgaggaccatatttgcgtgtttccaaagtgaggggttctgcgtcctatcaaggagatgtaaactactgactacactaccgatgatgctggcttttggctccatkgccttttcaagtcttcaacgtaaaagagcaatcgcagttcggtttcacatgtatggttctataatccaggcaataaatgctaattagtaatgctcaaggatccgaccattcagagtaattatcataatttacttcttcctggttaaagacattcctggctgattagaaaaaaaaaaaaaaattaaatcgtcgttttaccattgcactgcagtggaaatgcactagagagatgttcaaggtatagtaacactgttgcggttgcattccaagtcaccgacctgtgcctcttagcttattacgaatggaattg

SEQ ID NO: 803468 - DNA, 557 bp, Homo sapiens
ctttattgttaaactctcacaactgataaaattatcccgaaatgacataaccaaaatgcttctcctctcattagtctaccatgactatgatatcttatgtaaatatgtgactaacaaaaaaaaaatgaatgggccataaatactgaggaccatatttgcgtgtttccaaagtgaggggttctgcgtcctatcaaggagatgtaaactactgactacactaccgatgatgctggcttttggctccatggccttttcaagtcttcaacgtaaaagagcaatcgcagttcggtttcacatgtatggttctataatccaggcaataaatgctaattagtaatgctcaaggatccgaccattcagagtaattatcataatttacttcttcctkgttaaagacattcctggctgattagaaaaaaaaaaaaaaattaaatcgtcgttttaccattgcactgcagtggaaatgcactagagagatgttcaaggtatagtaacactgttgcggttgcattccaagtcaccgacctgtgcctcttagcttattacgaatggaattg

SEQ ID NO: 803469 - DNA, 557 bp, Homo sapiens
ctttattgttaaactctcacaactgataaaattatcccgaaatgacataaccaaaatgcttctcctctcattagtctaccatgactatgatatcttatgtaaatatgtgactaacaaaaaaaaaatgaatgggccataaatactgaggaccatatttgcgtgtttccaaagtgaggggttctgcgtcctatcaaggagatgtaaactactgactacactaccgatgatgctggcttttggctccatggccttttcaagtcttcaacgtaaaagagcaatcgcagttcggtttcacatgtatggttctataatccaggcaataaatgctaattagtaatgctcaaggatccgaccattcagagtaattatcataatttacttcttcctggttaaagacattcctkgctgattagaaaaaaaaaaaaaaattaaatcgtcgttttaccattgcactgcagtggaaatgcactagagagatgttcaaggtatagtaacactgttgcggttgcattccaagtcaccgacctgtgcctcttagcttattacgaatggaattg

SEQ ID NO: 803470 - DNA, 644 bp, Homo sapiens
atttagccacattcaactgtgacttcctttaagaaaaaggttacgtcatttttctttgatctctagtgtttggcaagatgcttgtctcagagcaggcacttggtacactatcattcaaagaaaaaatgaatcaatagttaaaaaattcttaaatagttatttgcattaaatctgctttcctaatgttgtccagtattttggctttaagcatggtttgtgctccatgaaatttaattatattataaaacatttccctagtgatgctgataattttcctccagttgtaatgagcatacacttgaggtgatactcccatttagttttytaagcaagtgagacagaaaatttgatgaataattatggtgaaaatcctgataaaatgaaaaagtttatcagtggctaataattactggacggttttcagttacacacacacacacacacacacacacacacacacacacacacacccttaaaccaaaccattaaaagacatgcactaaagagacattttagcaaaaagcacttgattttgtaagtggcacctaaagccaccaaccaaagataaacctggtgaacacataatatggagagagtccctggtcacatctgagtttttccagtcatttgcagacaaggagtga

SEQ ID NO: 803471 - DNA, 644 bp, Homo sapiens
tctgtttaaagctgctacattagggcttgtttatgaaagtatttatgtaaattaattatgatgatttttaatcaataaaatataattttcctaccaaggagatttttctggattatttgcatttagcaaaagtggaactatcgaaacaaaatatttattagaaaggcttcaaaattttctaaacattacaaatataattattacaattactattgaaagttgataaaataatgagatcagtgttaaccaatgttgtttcctatgtggatatttggttttctccaaaaaatcttaatggatgtagataatttatcccatggataaaattcttaaaagtgaaaatyaagatattattattcaattcagaaaaaaaattagtaaatctaatggctgaaaaaatttaaatttagccaaaattatttaaaaactaactgatttataagctcttcagtgagtgatgtgaaataggaaaattaatattttgtataaggaagaaaatacattttaattttctgtatgtatgtctgtatatatatataatacattttatataaatatgcatgtgtatgttattataatgcacatatatatgtatagtgcatctacagaattttacatagagaagaaaaaatatcaaacatctt

SEQ ID NO: 803472 - DNA, 644 bp, Homo sapiens
agtcaatctccttagaagagcctgctgtgaggtgcagctgggccccccggctgccatccatctcctgccactcctgatctggatcaggtaggctccagcttaccacgtattagctggcagcctgcacgagggctatgccattaagaagatggaaatctagagatrgttttcacggcagctccaaacttctcacagatacagaagcacacccatattgtagactgaagcaaaacgcaactgggaaagcctttgccattttccatatatcaccttaactttaatggtcctgcctccaagcctttcttcggttgttgccccttccatttcatcctatccaaactctaacatcctggcaattttaaatcccacctcctccatgcagccttcctttctttgttttcctccagcaggaaatcatctcttcctatgtagatcagtaagggagaaaatactaagagtaaaatatgttttctcacttacaggctttggataagataacttattgggccataattttctcatttgaaaaaaagagaaatactactactcaaattataggtttgtcatgaggatggaatcatgcaaagcaccaagtccagtgcttaggacacagcaggcatttcataaattgcagttatcattac

SEQ ID NO: 803473 - DNA, 601 bp, Homo sapiens
catagtggtcaaactgaacattccctgtcagcccttgaattcgaacctaagtgaaaaagaaaaccacacgtgttcacttgcaatttcacttataggaattttaacttcatctgctgggcttataactacttaaaaaagtagaactataaactataaccaactaactgaaatgccattaggtatttgagctattgggatagmatctgaaataggaatatcaaagggatgtataagcaattttgctatacccctggaagaggaatatgttttatttgtttttactattataaagtttccatttttagtcgaagaatcctccctcaattgtaaagtatttttataggaatggcaattttttatggttacttttcagttttatctatatatccacaaaatggattaaataaccctgatacttatgccagatcatattctcaccttgctaatattaaaattaagatataagaagcaaaaagtataaggacatttttgaaaatattgaaatatattttattccaaatttccttttaatttgcttttacctatgttttgaacctgtgacatttcagaacatttaaaatgtaacattaaatatgtatat

SEQ ID NO: 803474 - DNA, 579 bp, Homo sapiens
caccattacagggaagagaaaaactaaaacatggataaaataaggagcattaattctaacaaagaactgttcaatagtataggatataactcttgtattagaaggatttaaaagaaccatgtaaattaagagctttcctatatattcccccaggacatgataaaacaagcttctggataaatgtgcccttcacaattgattgggatggggtagctgaraaaaattaaggtgtttaagcaaggtactacaccaaaactgaatgtgctccttctctgcctgacccaacacatctttgagtagagaaagtcatcaaatcatctttttttcgtaaggcaagaaaataaaaacgagaaataaaatgaatcttgcctaagtcacaaagggcaagagaaaaatgcaatgctagtacttgaggaccaaaggaggaaaaaaagaaaaatattgccactttttcaacaggaagaaagaagctgagaagagatggcaccaaaaagcaaatgcactttttgtgttttaaaaagttcgtttatttttatgaaatatgtgaaccagaaaaaagagcaggtatcacacagagtg

SEQ ID NO: 803475 - DNA, 574 bp, Homo sapiens
gtaatttatcgtgttttttgctttctctcttttttaccctaatccttcctgctagatgtttgtcagactcattgatctctttaaagaaccagcttttggttttgatgattttctctattgctttgttttctatttaattgatatccactttgatattcattatttccttttttctacttactttgggkttaattttctttctttctttttttttttttttagttccttcaggtagaagttttttcttttatactaaacatattcagcactatagtatttttctttatctgctactttaggcacatctctttattttattttattttattttactttaagtccggggatacatgtaggcacatctcttaaatgttgatatgcacgtgttttcattttcgtccagttcacaatgttttgacatcccactttagctttcttcttttccttatagtttctttacaagtgtgatatttagttcccaaatatttggggattttccagctatctttctattactgaatttattaaaacttcctttttggccagaatacagtctaacttggtaaatgtttca

SEQ ID NO: 803476 - DNA, 574 bp, Homo sapiens
gtaatttatcgtgttttttgctttctctcttttttaccctaatccttcctgctagatgtttgtcagactcattgatctctttaaagaaccagcttttggttttgatgattttctctattgctttgttttctatttaattgatatccactttgatattcattatttccttttttctacttactttggggttaattttctttctttctttttttttttttttagttccttcaggtagaagttttttcttttatactaracatattcagcactatagtatttttctttatctgctactttaggcacatctctttattttattttattttattttactttaagtccggggatacatgtaggcacatctcttaaatgttgatatgcacgtgttttcattttcgtccagttcacaatgttttgacatcccactttagctttcttcttttccttatagtttctttacaagtgtgatatttagttcccaaatatttggggattttccagctatctttctattactgaatttattaaaacttcctttttggccagaatacagtctaacttggtaaatgtttca

SEQ ID NO: 803477 - DNA, 551 bp, Homo sapiens
gagctcgagcgctgttctgggggatccattgctgtcttcagagctggcaggcaggaatgtttaagtcggctgaagctgtgcccacagccaccccttcccccaggtgctctgtctcagggagataggatttttatccataagcccctgrccgaggctgctgtctttctttaagagatgctctgcctagaggggaggaaggtagagaggcagtctggctacagcggctttgccaagctgtggtaggccccaccaagttcgaacttcccagtggctttgtttatactgtgaggggaaaaccacctactcaagcttcagtaatggtgcatggccctccccccaccaagctcgagcatcccaggtcagcttcagactgctgttctggcagtgagaatttcaagccggtggatcttagctggctgggttccatgcgaatgggatctgctgagctagaccacttggctccctggcttcagcccactttccaggggagtgaatggttctggcttgctggcattcaaggtgccactgggatatgaaaagaaaatatcctg

SEQ ID NO: 803478 - DNA, 491 bp, Homo sapiens
ctgggaaaggggcacagccttacttaccgacttccaaggcatgtatgtgcattttgagttcaaatacagattccattacttgccaaattggggaagcaagttaacctcccagactttccttctctcatcagtcacataaggaaaatagtgtccttcttacaggtgtgttaggggatttgcagaaatactttagcaaagaacttaraacaatgccaagtgtcttatttaaaatgttgtgtgtgtgtgtgtgtgtctgtatttacttcagctttttgttgtttctctgagatgaaagagggcttagaaatgtgtttttttttttttcaattttctctttgatcttcagtcactctctgaccttggagaggtggacataatgaggaaagccatcaactagtatttttgaaatgttaactattctctctgggtcgatgattcctcaactacaaaactgtgatgcaaatgctaccttcacagtgttcccataagaa

SEQ ID NO: 803479 - DNA, 491 bp, Homo sapiens
ctgggaaaggggcacagccttacttaccgacttccaaggcatgtatgtgcattttgagttcaaatacagattccattacttgccaaattggggaagcaagttaacctcccagactttccttctctcatcagtcacataaggaaaatagtgtccttcttacaggtgtgttaggggatttgcagaaatactttagcaaagaacttagaacaatgccaagtgtcttatttaaaatgttgtgtgtgtgtgtgtgtgtctgtatttacttcagctttttgttgtttctctgagatgaaagarggcttagaaatgtgtttttttttttttcaattttctctttgatcttcagtcactctctgaccttggagaggtggacataatgaggaaagccatcaactagtatttttgaaatgttaactattctctctgggtcgatgattcctcaactacaaaactgtgatgcaaatgctaccttcacagtgttcccataagaa

SEQ ID NO: 803480 - DNA, 634 bp, Homo sapiens
gtcctagcattaactagatcaaggtatctggcccatcattgtcctctgttctctgtgggtgtcttcagcactagtcttagggcatttgcctgcatacactgacacctgctgaggtatcttgttttcaccatgatcactggtcaacagcccacattctgcctcttcagcctttgtgcttctccctgggacataggacaggaagattttatacaaccctgtgaggacttaaattttgctgatggtcttaggcccatctgcctaggtattccactcagatttttttttttaatcttattgtgcataacctcaccagacagttagcttctctacagggttttcagtctcggaagtaaggcaagaaatacctttcttatggtgccctccaaaacttatctgggaattccatcatctccttctgctrggatatctgctgtatacttcaaagttgaaggccatgaattatttctatataatccataagtcacttactatattgctccattttctgtttacatgataaaaatactcctctaatgatgaaatgattttatttcttcattccatgtaaacaaaactgttacaattgtcatgatttttctcagtgttatcatttttagcttaaactttccgcctt

SEQ ID NO: 803481 - DNA, 634 bp, Homo sapiens
gtcctagcattaactagatcaaggtatctggcccatcattgtcctctgttctctgtgggtgtcttcagcactagtcttagggcatttgcctgcatacactgacacctgctgaggtatcttgttttcaccatgatcactggtcaacagcccacattctgcctcttcagcctttgtgcttctccctgggacataggacaggaagattttatacaaccctgtgaggacttaaattttgctgatggtcttaggcccatctgcctaggtattccactcagatttttttttttaatcttattgtgcataacctcaccagacagttagcttctctacagggttttcagtctcggaagtaaggcaagaaatacctttcttatggtgccctccaaaacttatctgggaattccatcatctccttctgctgggatatctgctstatacttcaaagttgaaggccatgaattatttctatataatccataagtcacttactatattgctccattttctgtttacatgataaaaatactcctctaatgatgaaatgattttatttcttcattccatgtaaacaaaactgttacaattgtcatgatttttctcagtgttatcatttttagcttaaactttccgcctt

SEQ ID NO: 803482 - DNA, 593 bp, Homo sapiens
ttcatactctcctctcctaccaccctgaccatcatagggcccactagacagtttgcaaagcgctttcatatgcattaaatttaattctcccaacccctttgggagatgttggccccattctgtggtcaaggaaattgaagccaagaggggaaaggagttttctcagtgtcatgcgatgaggtgggcagagctaggacttgcatcccagtcccttcctcgggcaatgaggtccctgagcccactgaggaaaacagggagcttttcataactcacaaagcatgttcacttacgtgatctcactgggccgccccactctgcygggacttgctgtagcctcggagcctggctcctgcaccccgccacctctccagccccgtgcctggccctggccttgattgggggccagggtgtctggcagggagccccttgggacacagctctcgtgccgtgccgggactgactcagcctccagcagtctcaccgaatcggaatttagagcaggggagcggagatgccaccgggctgactgggtggaagtggctgagtcatgagatgctggctcagtgctctctccagcttcctccccaccctga

SEQ ID NO: 803483 - DNA, 628 bp, Homo sapiens
caatggccaaaggctactgccccgtgagggggactaggaggcacctggggcattacagggtgagagggtgtcagatggcagtctctggtctcaaccagctcttgcctttctttctcagttcatctcaaagaaggacccagaggatgtcaaagaggtgaggctcctgggaggaagagggactgttctgcagttccagatctggaaactgtcaaggggcagctggtaactctgcttggacatcggccctccttcctccctgtccctgggygaggggctgctgcagctgcttcctgatcctcacgccccctgggggcaggctaggcatgggggcggctgcctcccaccattgctggttctgggcaagtctcatgtccctcataggtggtggtctggaagcggtacagcgacttccgcaagctgcatggagacctggcctacacccaccgcaacctcttccgccgcctcgaggagttccccgctttcccccgggcccaggtgtttggtgagtgttagattggggcactcgggccaaagatggagggagcattgggcaaaaggggacctccgccagtgggggctggatagagagggcctgaaaccctgggcagagtcatgtttggaagggccc

SEQ ID NO: 803484 - DNA, 628 bp, Homo sapiens
caatggccaaaggctactgccccgtgagggggactaggaggcacctggggcattacagggtgagagggtgtcagatggcagtctctggtctcaaccagctcttgcctttctttctcagttcatctcaaagaaggacccagaggatgtcaaagaggtgaggctcctgggaggaagagggactgttctgcagttccagatctggaaactgtcaaggggcagctggtaactctgcttggacatcggccctccttcctccctgtccctgggtgaggggctgctgcagctgcttcctgatcctcacgccccctgggggcaggctaggcatgggggcggctgcctcccaccattgctggttctgggcaagtctcatgtccctcataggtggtggtctggaagcggtacagcgacttccgcaagctgcatggagacctggcctacacccaccgcaacctcttccgccgcctcgaggagttcccygctttcccccgggcccaggtgtttggtgagtgttagattggggcactcgggccaaagatggagggagcattgggcaaaaggggacctccgccagtgggggctggatagagagggcctgaaaccctgggcagagtcatgtttggaagggccc

SEQ ID NO: 803485 - DNA, 602 bp, Homo sapiens
tgtcgtgagttgctcccccaacccccaccacccacccaccatctcccacttcttgacttcacctctgccctccctccaccactggacattcaaaccaggctaagcctcagtgtctgagacactccatcttctctcctgccccaggctatgtgcccagaccctgtcctctgcctaggacacttctcctgcttgccaccctcggcgattcatgggtggggtcttcaagtgtcagcttacatggcacctcccaacgtctgcatgtgccttcagctycatccccacatcgtcctgcaacccctaccctctgggtcgcaattacatgttcaattgtctgtctcccgcagtgagctcacgtgaactgggaatgtgcctgtctggcccctgcatcacacctggtgcctggcacagagcctggttcctggaaggtgctcattgtatggttgatggatagaatgcatgaaccaacgaacgaatgaatacaaacacatcctaaaacttggggacaagacagttgatagttgccaagttgaataggctaacacatgcctatgtgcagacatgttctatagtccagaggagaagaaggcagtgggaaaggggtg

SEQ ID NO: 803486 - DNA, 538 bp, Homo sapiens
agccacctgtggctagtaatgccgtactggacagtgcaaattcagaacacttccatcatcacaataaattctattggacagggctgtcctagggaacctagaatatgcactgtttgccccagtgagttgaagttataagacttttattcctggcaccacctcctggaatggcaggccatttttttttttacttttatcaagrttcctcctacacaggggtaaagtgacagaaaggtcaagaaggaactttgagctccccctagaggtttgagtgtgtggccaggagaatccttttacaaagatgaatttaatactgtgaataacaactttttacctgaaactgttcaatatggtagccactactcacatatgcctatttataacttaaaactgaattaattaaatataatttaaaatttctgtttctcaggcacaatgccacacattttaagggctgaacagacacatgtgaccagtggctatcatactgaactgaggtagatagagaatatttccatcatcacaaaattttatggaa

SEQ ID NO: 803487 - DNA, 564 bp, Homo sapiens
aagcttgtggtcctggggcagaatctggctaggacagtgatcactgaagccttcctcatatcctgtccacttctatgaaccggatggatgatggcagggagagctaatgtgcagaactgaattaccattattatgtgaaaccttggtcatctcgtgtcctagaagaaaaagatagtcmaagcagtggaagacttcatgaaaagaaaaaaaaaaagaaggaggcaaattcctagaagccagtgagccagatcaaaggagaaatgtccttctaacttcatagtaaccatccccatcctgacccacactaatactgcaagtaatgttaatgcaacaaaagggctcagaggctgaattcctctccgttccatagcctttcctctgcaatctataccatcaatcccctcacgccttctactttcagccagggcaggctgtcagagaagcagaaacctagtttggggcatagaggtgggcctgattattattaggttgaaccatatgaaattgttattatatgaccacttttggcctacaaaaatgactatttcacattaacttaatgtt

SEQ ID NO: 803488 - DNA, 537 bp, Homo sapiens
ttgctatcttctccatgctgctcatagtgggtctagcaatgtcccattctcggtaatgtttggtaggtctaaaacatcctcacgaaatgttccccaaatgttctgctccagctgagcaactaataacaatgggaagatgcagaaaaaaaatgcatggagcataatgttagttttgggactcgtcagtggcaacgttttagagatgccatgaagaattcctggtaataatccttcttcctacagcatttagcaatgaatactatgggattatggctaaaagatggycaagactgcctcagccattaggatcagaattctaagttccaaagaagagcaaactcaagaggatttcctcaggcctctgactatagatgctgcctggggagaacaggtgctacactcaaaacattctcattttatttatatcctccctgaactagtacccaactccataaccccagactcaaattaacagaaataaaagccatctcactgattataagctctctagttattacaaaaataaataagcatcaa

SEQ ID NO: 803489 - DNA, 560 bp, Homo sapiens
ttttttgtttgtttgtttttaatctggagtctcactctgtcactcagtttggagtgcagtggtgagatctcagctcagtgcaacctctgcctcccagcttcaaagcgattctcctgcctcagcctcctgagtagctgtcacctgccaccactcctggctcatttttgtatttttagtagagatggggtttcaccatgttggccaggctggtcttgaactcctgacctcaagtgatccacttgcctcggcctcttaaagtgctgggattacaggtgtgagccactgtgtccagcctgaagaagagaaaacactttctgttccactggaacaggatggtggagctatgctactttactatttgcygaacacatgtcagatcatgacagcaagaaggtcctgcacttgggataataagtggggctgtgtagactgtaacgaaaccatcatggcagacaccgttgcttacctagtcaatatccatgcagtccctcttcttgcttgataatgcaactgcagttttgttggggtggttgtggatccagacatgacaacgggtcata

SEQ ID NO: 803490 - DNA, 695 bp, Homo sapiens
  misc_feature 662, 663, 664, 665, 666, 667, 668, 669, 670, 671, 672, 673,674, 675, 676, 677, 678, 679, 680, 681, 682, 683, 684, 685,686, 687, 688, 689, 690, 691, 692, 693, 694, 695: n = A,T,C or G
aacctctgccacctccctttgtggctgttctctgctccctctaacactctgggctggactgggtaactagattggcttctaggacccattgcttctccccttagctcccactccgacaagtctccctggtctgtgcccagaggatcaccctaagactagagcaagcttgtgcaacccacggcccatgggccgcatgcagaccagaacacctttgaatgcggcccaacacaaattcatatatgttcttaaaacatgatgaggttttttgcaaaaaaaaaaattttttagctagtgtattttatgtgtggcccaagacaattcttcttccaatgtggcagggaagccgaaagatkggacacccctggactagagattcacagcttgcatgaaaatcacctggaggccttattaaccctgccctacagtttctgattcctttgatctggggtacgggcagagatattgcatttctgaaagtttcccaggtggtgacagtggtgatactgggggccacactttgagagtactggcctacaaggaaaggaaaataggggcaggtgaaaaaaggaaggagctgaagtcttcagtgctggaggaggttactggaagctgaagctctccagggtacttgggtatcttcaccctctgtgagggagccatannnnnnnnnnnnnnnnnnnnnnnnnnnnnnnnnn

SEQ ID NO: 803491 - DNA, 583 bp, Homo sapiens
atatactttcaggaatgaaaacagtaagtagagtaaaaatgaaaacgtgtctctatatattgctttatgcttccatgtcagactgcacctcctgccagaggaaggatggttttcttcaagcattttccagcattaagcatttgggtaaacttcagcacacacggcagggtgcggtggctcacgctgtaatctcagcactttgggaggctgaggcgggcagatcacatgaggtcaggagttcgagaccagcctgactgaccaacatggtgaaactctgtctctactaaaaatacaaaaagtacccgggcgtcgtggcgggtgcctgtaatcccagctactcaggaggctgrggcaggagaatcacttgaacccgggaggtggaggttgtagtgagctgagattgcgccactgcactccagcctggtgacagagctagactccgtctccaaaaaaaaaaatccagcacacacaataataccttgttcttctgaatacaaactgactccaagctaccctccccctccacccttctgagggagtacactgcttttaaaatgctaattaattaggccccctgttgagg

SEQ ID NO: 803492 - DNA, 541 bp, Homo sapiens
ctgcccacactgagcttgtttgctaggaggatagaaaggcatttaacaggattatagtgcaaatattttgtatcagttgtgatagctactatcaaggataatttcaagatgctacgatatataactatggggcctagcttagtttggggatgttaggtggtgcctattagagaawattttcttgaggaattgacacttgagccaagctctgaaggatgagtggaagtgaaccaaaatgatgtgaagggtgcaaccctagaggtagaggcaatatataccaaagtcctgacggaaaaagaaagcatggtctgttggaagaattgaaaatttacatgagtgtggatcatgcctaaaaagcaaagtcagagtggcataaaatgaggtaaagtagaccaaggccaactcataaaggccctagagatcaggttaaagattttgatttgtcttcttaagtgcagtaggaattcagcatagacaagtaagaatatagtgttcagattttcattatctgaactagtactctatggagaatgagttgaag

SEQ ID NO: 803493 - DNA, 637 bp, Homo sapiens
gtctctgcccccacgaaggtccccagcacacatcatccttggggtaaggtaactgtcatagaccaagtagtcattgcatttcttgaagtcgatgagattgacctgcacctcccggaggaagggggatgtcttgtcttcagtgaagtggggtggaggagacagaggatgggaagccagtgagattctagatagcttcctggccgtccagctgccaccccaagacccagaatcacagcctcctgggaatggagggtgccatgcccgtgcctggctcccacccaagggaggccctctgtggttggacacccaggacatatgggcacacacgccctcacacaagacacagctcacygcacgtgagacagagacatccgtgcacacagacacactcacaagcctatcaggctacccgacatgttgcacagcacttgcctacgttcaaagcaccctcagatacatggctttgtttgtttttggaagctatgtgccctaaagagagcaggtggcattaatccatttaccggtggggaggcctggtgctggagaagtgacctgcccacagtcacacagctagtcaggtatggagacaagaggagaagtaggctgcacccacatcagtcattgctctgcctcacgg

SEQ ID NO: 803494 - DNA, 637 bp, Homo sapiens
gtctctgcccccacgaaggtccccagcacacatcatccttggggtaaggtaactgtcatagaccaagtagtcattgcatttcttgaagtcgatgagattgacctgcacctcccggaggaagggggatgtcttgtcttcagtgaagtggggtggaggagacagaggatgggaagccagtgagattctagatagcttcctggccgtccagctgccaccccaagacccagaatcacagcctcctgggaatggagggtgccatgcccgtgcctggctcccacccaagggaggccctctgtggttggacacccaggacatatgggcacacacgccctcacacaagacacagctcaccgcacgtgagacagagacatccrtgcacacagacacactcacaagcctatcaggctacccgacatgttgcacagcacttgcctacgttcaaagcaccctcagatacatggctttgtttgtttttggaagctatgtgccctaaagagagcaggtggcattaatccatttaccggtggggaggcctggtgctggagaagtgacctgcccacagtcacacagctagtcaggtatggagacaagaggagaagtaggctgcacccacatcagtcattgctctgcctcacgg

SEQ ID NO: 803495 - DNA, 603 bp, Homo sapiens
aaagtgctgggattacaggcatgacccaccgtgcctggccaggatgctcaacctcaccacagtcactcttatgttcctcctcagcctctgtccatctcacagctgctgggcacaagattcatgcatgtgttggaatttccttcctttttaaggttgaataatattcctttatgtgtatataccacattttgcttatccattaatccactgatgaacacctgggttgcttctgtgttttagctattgtgaataatgctgctatgaacatgggtttacaaatatctcctcaaggttctatttccaattcttttgggtatatatccagaggtggaattgctggatcatatgggaattctatttttaatattttaaggaaccactgtactgttttccatggcagctgtgcattttacattcctagcaacagtgcacagtggttccaatttytccacatcctcaccaacacttgttattttctttcttttttttatagcagctatcctaaaggatatgaggtggtacgcattgtagttttgatttgcattttcctaattattattgaggttgagcatctttccatgtgcttattggccatttgtatat

SEQ ID NO: 803496 - DNA, 568 bp, Homo sapiens
atcatcagatccttccctaagcagttgaattaatcagccacatttttggccaagccagttggcttagactttataacaataagaaagacagagtagtggccaggacaggggacgtcaactccttccatccgtcacctagctggatagcatgtaggactccacatggctgaggccatgtggtcacctgagtgtccctggggtgcccagcacacttccttcccctggccatcagtggaaatgaagagggctgaagttggctccagacttrgatttgaggtgaggcaaaggttggtctcatatctgccaaaggaaggctggggttggttgttaaatctctaccacggttggccagagtaagaactattctggagttcatgccataaagcctgcgtaagcactcctcacaaagcgagggagccctcataactgttgctggatgtatttctgtgtctctccctgctgagatgaacctctatttttcaggcagttttgcatatagagaacactcttggcagcctgtgaccttgggactgctcttccttccatgacctagtctgtcacagggaag

SEQ ID NO: 803497 - DNA, 682 bp, Homo sapiens
tgaatgaccatatattttccttactggaagcaatgctggtcacataagtcagtggtcatattcatagactatttgaaggctagccatgcaagtgtgtctacttaggacaatcccagataatcctgttgtcctagcatggctattaatagcaccaattttactctcaaaagcatccttatttagataataaatcacatggtcaccctactaataagcagcctctgtgactgattttggctcaatataaactgatatcagcttcacaccagtcatgatcaacgcacttgtgtattgatcatgtcatttgattcgagtgctgcattgatgaggtcaaaaccctgagtcatacctatattactggcagaggggagtatatctattccaaaatcaaataattttttaattagtctaactttcaaatatattcagggatatttaaagagaatatatgtttgtgaatatacatgcctcatttgaaggaccgccagccrtataaatttggctggcagtactatacctctaaaaggtatagacatatagagtactatacctctaaaagcctctgtttttttcatctatagaactgagataataaataattgtattataatttaaataagaatttaaggcttactaaaaagtatcaggtagacaaagatcactcactgaatttggaatcaga

SEQ ID NO: 803498 - DNA, 604 bp, Homo sapiens
ctaaactttgagtatacatggacacaaagtggggaacaataaacactggggcctactgagggaggaggataggagacaggcgaggatttaaaaactacgtatctggtactatggtcactaccagggtgagaccaaatcatttgttcacaaatcccaagccatacagtattgatccatgtgacatacctgcacatatactgcctgaacctaatacaaaagctggaaaaaaatcaaactttagttcctctgtcattttagtagtaacgtgttttttaagtgcatttatttgctgctgtattggaaagtggagaatataaaacattttcatcactaaagaaagttacattgggtagcactatttcacttaaagaagaaagaagtcaggattactgaaattccctttccaaagaaacaataaaagaaagaaaaaaaaaaaacttactgaatcttkggccagaaaaaacataagcaacttttttttttgccaaagaaattgacataaaacagcagatttgtaaaggagtagaagatttagaaggctcaattctccctactcaactacacagaagcattataaaagaaagaatacatgtatacccaaccc

SEQ ID NO: 803499 - DNA, 528 bp, Homo sapiens
tgtgatgggcagagttttctgatgtcctactatgggcacatattatgtatgggcaacataattttattttgttattccactagaattatgaggttgcttcttttttgcagcataatctagtctcttctgaatggtatctccaattccattggcccaccggttgagaatccctggttttacctcagtaaatgatwtcttaatagatttttagagagaaagaaatggatctatatacttaaaattctttagaggactaatctaaacttttccatgcaagtgaaatcaatgtgaactagtttgcagagggatttttaaatgatactgagatatcatgtatcagtcatttcttccctcatttattcaagaaatatttattgagtatacattatgccaggcactgctctaggcactaagtatacactagtgcacaaaaaaatgtttactaccaatattcagagagtgaaaggtgttaagaagcacaatgcatcatgcacttcagcaaactggaacttcatggaaaggggataa

SEQ ID NO: 803500 - DNA, 608 bp, Homo sapiens
acatgcaattaaaaactaattatttataaattgttttattccatgtgacgttacccacattgtttgtgggaatatagaaattgttttttctttagaagcaatttaatataccatatgctctttgatattgaattttctttattcagaattgtaaaaaaaaacatgtcaaatcatgttagaggagaaaactaggaggatgaaatggagaaaaattcttgtccattcartttttctcaacttgtatttgtaaagaaagctctgggtttaagctgtttccaatagcacataagactcaggattcgcaatttaactcttttaaggatatttccatataaaagtagaaatgaagataccttcctatacagtaggctgatttcagtctacacttcagacataagttaattctccaagtcagtttaataatctatgaccatgaaacaataaaaaattgtaaataattttctcaagcaaaaacataacattaaaatggtaagagcatgtaagcttctaaacagcataaacagcacacattttgacatctttttatcactgaacttaactgaaatgacatgacattattttctttctattttctgactaagtagaaa

SEQ ID NO: 803501 - DNA, 436 bp, Homo sapiens
ataaagcaaagacctaagaagaaccaaaatagtaaaaggacmaaacaaatgactcttctttctcctgaacttcaaccaggcattaggtagagagaagaaaaaaaaaagtttaaaatcttggcttaaactaaaatagactttataatacccaatgtaggtattgttatttcaaatgaaagaaaccagcgttgaacatagaaagaattaacctctttcctgctttaatgctactgaatatagcccattaagaatcaatacataggtgcatacaaacattaattatttgattgtctctttaaataagattaggttgttgaaattatagtagagcaataaacacactaccaacccccttactagcagaaagaaaaattggagctgattatgacaggtcagtaaaatgagtttattcaatcttatgtaaataataaaaaat

SEQ ID NO: 803502 - DNA, 594 bp, Homo sapiens
atgacaccataggctacataaaaagaagtagatgaattgaggagacaacaggttcacagtttactttacaataacccaggtaatttgccacggagccaggtttgaactaggattgccaccattctaaccatgcttttaaacattcygttatgctgccacaaatgtaatgccacctccaacatggctagagtcaatttagtgtcttttccttatcacaagattcttacatcaatcagagactttagagaaataagtttataggattcatttagaattaatattctcacacaagtaaccttaatctaccctagagtgtatactttctaaagtatactttgcgcttattgaaggtcttcccaccacagaagtgcaccaaagtttgaatactatccactgagaacccctgccccgtgtgagaaatttattatcggaggatttgtacttataaaaatggcttactactgttatatcaaaaatgcataattcagagcatctaggcaaattgtgcattttaaattttagtttgaaagaatacttaataataataataatatcgaagagcattaacagctctatttgaaaaaagcagctatc

SEQ ID NO: 803503 - DNA, 594 bp, Homo sapiens
atgacaccataggctacataaaaagaagtagatgaattgaggagacaacaggttcacagtttactttacaataacccaggtaatttgccacggagccaggtttgaactaggattgccaccattctaaccatgcttttaaacattctgttatgctgccacaaatgtaatgccacctccaacatggctagagtcaatttagtgtcttttccttatcacaagattcttacatcaatcagagactttagagaaataagtttataggattcatttagaattaatattctcacacaagtaaccttaatctaccctagagtgtatactttctaaagtatactttgcgcttattgaaggtcttcccaccacagwagtgcaccaaagtttgaatactatccactgagaacccctgccccgtgtgagaaatttattatcggaggatttgtacttataaaaatggcttactactgttatatcaaaaatgcataattcagagcatctaggcaaattgtgcattttaaattttagtttgaaagaatacttaataataataataatatcgaagagcattaacagctctatttgaaaaaagcagctatc

SEQ ID NO: 803504 - DNA, 618 bp, Homo sapiens
acagcactcaagtcaccttttgaatgctttgctgcttagaaatttcttccaccagataccctaaatcatctctctcaagttcaaagttccacaaatctctagggcaggggcaaaatgctgccagtctctttgctaaaacataacgagagtcacctttgctccagttcccagcaagttcttcatctccatctgagaccacctcagcctggaccttattgttcatatcactatcagcatttttgacaaaggcattcaacaagtctctaggaggttccaaactttcccacattttcctgtcttcttctgagccctccaaactattccaaactctgcctattacccagttccaaagtcatttccacatttttgggtatcttttcagcaatgccccatgctactggtaccaatttactgttattagtttgtttccacacttctgataaaaacataycaaaaactgggaataaaaataagttgtattggacttacagttccacatgactggggaggcctcagaatcatggcaggaggcaaaaggcacttcttacacggtggcagcaaaagaaatgagaaagacgcaaaaggagaaacccctgaaaaatccatcagatattgtga

SEQ ID NO: 803505 - DNA, 593 bp, Homo sapiens
ctagctttctcttcttgtgccttaggtggtatctaaaattgctgatttaatatcctgtttttctaatgtgagcatgtattgctatacatttccatctctgtaacattttagctgcatctcataagttttgatatattctacttctactttcaaaatattttctagtttcctttgagacatattctttgacatatggattatttagttctgtgttaatttccaaatagatgtggactttccagacatcctgttattgatttttagtttaatttccatatgaccaaagagtacatttggaataaatccaattrtcttatatttattagtgtgtattttatgatctagaatgtggtctatcctgctgaatgttttatgtgcactttgtgttaatgtgtattctgttttgctgagtggagtatttcagaaatgtcagttaattcatccttgctattttttttattttcattctatagattacagataggtgagtgttgaagttttcaaatataattgtaaatttatctactgatctttccagtctatcagcttttgctttatgtattttggatctggatttaggtgtatataaattt

SEQ ID NO: 803506 - DNA, 589 bp, Homo sapiens
agaatttaaaggaatggtggacaaaggttcagggctgaagtttcaagcagcagaatttcccgacttaaatttgaggtgaccaagagtattcccgccagcagagtgcttctttcttctcttttctgtttcctacaggtacagtccctggaacccaccttgccagccttttccttctccatcaaggcagaggcatttggtgggtggggagggtcctgaggtgctctggccacaggtgccatctgtgtctcctacttgtgaccaaagtgaaccacggaggtgtggtccaggggaatctctatcttctgcccatgggcctcctcacttcagcagggagatgtcatcagcaaagtcatcatgctgctggcgcaggcagcggaggcagcrccactgacacaccatgaggcagagtggcagcatgaagagggcgcagatggcagccatgacataggctatggtcatgagggttgactcatctgtctgtggaatgttgtagccacagtcttccatgtccaaggtgacaaaagggccttccaccgctgccgtcctgaactcatcgtgcactggggagagggcaaatgtgaatggacag

SEQ ID NO: 803507 - DNA, 691 bp, Homo sapiens
gcaggggatactgaaaaatacggcaggtggcctaaggctgctgtaaagttgaggggagaggaaatcttaagattacaagataaaaaacgaatcccctaaacaaaaagaacaatagaactggtcttccattttgccacctttcctgttcatgacagctactaacctggagacagtaacatttcattaaccaaagaaagtgggtcacctgacctctgaagagctgagtactcaggccactccaatcaccctacaagatgccaaggaggtcccaggaagtccagctccttaaactgacgctagtcaataaacctgggcaagtgaggcaagagaaatgaggaagaatccatctgtgaggtgayaggcaaggatgaaagacaaagaaggaaaagagtatcaaaggcagaaaggagatcatttagttgggtctgaaaggaaaagtctttgctatccgacatgtactgctagtacctgtaagcattttaggtcccagaatggaaaaaaaaatcagctattggtaatataataatgtcctttccctggagtcagtttttttaaaaagttaactcttagtttttacttgtttaattctaaaagagaagggagctgaggccattccctgtaggagtaaagataaaaggataggaaaagattcaaagctctaatagagtcacagctttcccaggtataaaac

SEQ ID NO: 803508 - DNA, 591 bp, Homo sapiens
tatatatagatatttatatttttatagcttagtagtattccattatatatattatatattatatatatcattatatataatatatatgaaatatatattccattatatataatatataatatatattccatcatatataatatatataatatatattccatyatatattatatataatatattccattgtgtattatatataatagatataccattatataatatataatatattttccattatctattatatataatatatattccattatatatattatatatataatggaatactactcagtataaaaattttatttatatatataaaattccattttatataacacttgttgattgatgggcatttggcttacttccatacttttgcaattatgaattgtgctgctataaatgtgtgtgcaagtatcttttttgtataatgacttcttttcctgtgggtaggtacccaggaggaggattgctgaatcaaatggtagttctacttttagttctttaagaaatctacacagtttttcatagcgtttgtactactttacattcccaccagcagtgtaaaactgctccctt

SEQ ID NO: 803509 - DNA, 476 bp, Homo sapiens
atatttggacccagtagtctcttgaaaaaggcagggtagaggtcagaacacttatttcaattgaacaaagtctacattttcggaatgctgctataaaccagatgtcatatcagtaactgtcttgaaagaagtgtggaaatgtataayagctatgaaaagagatattcgtattaaaggaaatatttagaaacatacgcctgagatactattgtctttagtcttaaaaaattgcttaagtaaaattaaagtaactaactacctaagtgagcacaattttgaaagagagggatctctattgttatgtaataaattaagggaaagcaccaaatgggaactagaaggtagaaaatgttatcaatatatttgaatattgtaagtagaaataaaaatcaattagtcatattttaacaaaccaattaaagtaagccttaaagaaaaaaaagcatgtgtttaaatttttaaaggcaagtttctga

SEQ ID NO: 803510 - DNA, 599 bp, Homo sapiens
attaccgctagaaggtacaaacacctttgacatcagggctaaaatagctgaagcttacctttgaaaaatcaataaatgcaataaaaagatatttatcattgtgatacttagaagtattcatccaatgtgctaaacatataaaaagtcaaaagtgttcctccgtgtaaggaaaagggtaaagaattaaacattgaaaacaggttttttggcccttgtttaaaatagtttttatattttacttttattatttataaaaatataggaaaaatccagatattaaaaggtacataaaagtctgtccaggtcactgtgtagataaaagaaatgagaaatgtaaagttgatactactgagaatgagatagaaataggagaatttttaaaaacycatacatactgattgtacattttgctgaagtatacgtgatattttgatacatgtatacaatgggtaatgatcaaatcagagtaattgggatattcattaactcaaacatttatctttttattctattaggaatattccaaatctcctctggcaaaaagagtagaaatattaatttttgtttattacatatattttttataccttcaaaaatat

SEQ ID NO: 803511 - DNA, 536 bp, Homo sapiens
tcgaaattatactcccaactcaataaaatattttaaagattatctgacaattaaaatgctgtaacaatagtattattttttatgaactacaactacaatatgtgaatgccatttttgtttttctcctaaatgtcactgaaaaaaaggagaacatttttgcctcaaaatgtatatttatgtgttccttcccataataaaataacacttcagaatagccaactttaccttaaaggttttgttctaactctgtatgtgtgcartaaatacattattaagaatttattatatactagatagagaaagaaactgaaagccagacagacagacagaggttacaaccttcctttgtacttgtggagcagtcggggaaatggtacaaagaaagtaagaaggaattcaataaaaagaagtcaatagactaaatttttcgacaggagtgaagacataatttgtgtttaaaggtattccaaaaatactgtgatgaacaaccattgaccactttaagggagaagcattttctaacacagtggtgacag

SEQ ID NO: 803512 - DNA, 646 bp, Homo sapiens
ccattttacagagaactgattggtccattttacagagagctgattggcccgttctgacaggtaactgattggtgcatttacaatccctgagctagacacagagtgctgattgctgcatttacaatcctccagctagaccgtaaaagttctccaagtccccaccagattagctagacacagagcactgattggtgtgtttacaaacctttagctagatacagagtgctgattggtgcatttacaaaccttgagctagacactgagtgctgattcgtgcatttacaaaccttgagctagacacagggtgctgattggtgcgtttacaaactttgagctagacacagagtgctgattggtgtgtttacaaaccttgagctagacacagaatgctgattggtgtatttacaatcctttagctagacataaaagttctccaagtccccaccagattagctagatacagagtgctgactggtgcatccacgaacccrgagctagacacagagtgctgattggtgcatatacaatcctccagctagacaaaaaagttctccatgtccccacccaactcaggaacctagctggcttcgcctagtggatccggtgccagggccacgggtggagctgcctgccagtcccatgttgt

SEQ ID NO: 803513 - DNA, 601 bp, Homo sapiens
tgcctgccagtcccatgttgtgcacctgcacttctcagcccttgggtgatcaatgggaccgggagcctagaaggagtgggcggcacccgtcagggaggctcaggccgcactggagcgcaccacggggggacttgggcatggcaggctgcaggtcctgagccctgccccatggagaggcagctgaggcctggcaagaatttgagcacgacatgggtgggccagcagtgctggggggactcggcaccccctctgcagctgctggccygggtgctaagcccctcattgcccagggccggcggcgccagccgttgcctctaagcagggcctgccgagcccacgcccacctggaactcgccctggcccacgagtgccatgctgcagcccaggttcccgcccacgcctctccttctacacctccccgcaagcagagggagcaggctccagccttggccagcccagagaggggctcccacagtgcactggcgggctgaagggctcctcaagcgtggccagagcggatgcccaggccgaggaggcgctgagagcgagtgtgggccgccagcatgttgtcacctctcacaaggattaaagtgaagagtgc

SEQ ID NO: 803514 - DNA, 625 bp, Homo sapiens
tttgcaagctcttcttgtgtaaggagatgtttttcctctgcctgtctgtacttttacttccctgctttcccctggggcccctttcctatcctcagcagggcagaaccattctttccatcattgcccattctgccctgtgactgggatggcaggagccaggccatgggccagcagaccagcacttgagtgacacagctttgtgtaaactgtgggctcagactcctctctttaccactgcgtcctgtgccaatgaactttgtttttgtcctatacggtgtgtgggttgttttgaacaccatggtccctaagagtcaaatttattgcttatgtattttagttattttctggctgacgatgaggtttctttcattttgtaaaactagtgtggtttttcttttcacttgaaatatgattttgcaacattacatattcagaggatatgcactgaccggaaattgggttyggtgtgtttttcccttttttgaccactgccaaaaaactgtctttcaagaagtagaaactactctgactaatccatcacagtgaatgaaaggatgagtagagcgacagcatcgcatttccaattctggtacagtggtctggaacagaccagagcagtgtgtcc

SEQ ID NO: 803515 - DNA, 565 bp, Homo sapiens
ccagtgggacactatgtagagatgaaaggcaatgatagtgatgaccctgacactatgtagacccaggctaatgtgtgtgttcatgtcttagttttttaataccaaagaaacaatttaaaacaaaaataagtatacaaagcttataaagattgaaataaaatatttttgtgcagtatacaatgtgtatgtgttttaagctacatgttattactgaagagtcaaaaagtttaaaaagttaaataatctatagagtgctgggcacggtggctcacacctgtattcccagcactttgggaggctgacatgggcggatcacctgaggtcaggagttccagaccagcctgaccratatgatgaaaccccgtctctattaaaaatacaaaaattagctgggcgtggtggcaggtgcctgtaatcccagctactcaggaggctaagacaggagaatcgcttgaacctgggaggcagaggttgcagtgagccgagattgcgccattgcactccagcctgggcaacgagagcgaaactccgtctcaaaaaataaaaataaaaaagtcacagtagg

SEQ ID NO: 803516 - DNA, 638 bp, Homo sapiens
ttattgtaaaggaaaaaatacagatttttaaatagatttagtgtagccttagtgtacagtgttcaagaagtccagatattgtacagtaatgtcctcggccttcacatttactcactccctccctccctcacccagagcaacttccagacctgcaagctccatttgtggtaagtgtcctgtatataaaaattatacmatttgttatcttttataccatgtttagcatatgttttctatgtttagatattgtatacaaaagattacatacatgattttataattgtctacagtatgcagtacagagggtcctcaaataatgttttttgttataatgtcaatgagaaaaaaaaaatcactttctctccaggtactctggtttcctccaacatcccaaagatgtacatgtcacgtgaattggtgtgtctatatggtcacagtcttagtgtgtgtggaggtgtttgtgagtgtaccctcccacgagatagagccctgtccagggctggtttctgccttacgcatgcgctacagggacagcttctaccacctgggaccctaaactaaaataaaggggttgaaaaatgaatgaatggatacaaattattgtaaaatagaaattcataaaatataatcatataaat

SEQ ID NO: 803517 - DNA, 638 bp, Homo sapiens
ttattgtaaaggaaaaaatacagatttttaaatagatttagtgtagccttagtgtacagtgttcaagaagtccagatattgtacagtaatgtcctcggccttcacatttactcactccctccctccctcacccagagcaacttccagacctgcaagctccatttgtggtaagtgtcctgtatataaaaattataccatttgttatcttttataccatgtttagcatatgttttctatgtttagatattgtatacaaaagattacatacatgattttataattgtctacagtatgcagtacagagggtcctcaaataatgttttttgttataatgtcaatgagaaaaaaaaaatcactttctctccaggtactctggtttcctccaacatcccaaagatgtacatgtcacgtgaattggtgtgtctatatggtcacagtcttagtgtgtgtggaggtgtttgtgagtstaccctcccacgagatagagccctgtccagggctggtttctgccttacgcatgcgctacagggacagcttctaccacctgggaccctaaactaaaataaaggggttgaaaaatgaatgaatggatacaaattattgtaaaatagaaattcataaaatataatcatataaat

SEQ ID NO: 803518 - DNA, 621 bp, Homo sapiens
ctgactgatgacattaaatagaaacttactgtatttattttgtgtgtttttgaacttcatatgaaggtcatcaaacagtaagtattttttgttcttcatttctttccctcaccactatatctgtaaaatctatctgtgtagttccttgcagtttgtagctgtatcattgctgtgtatattttattcayttgtatgaatacatttcagaagtgtttttgtaatcataagtgtaaattatgttgcataatttccaaattaagttgcatagacactacaccccagaatattgtatttaatgtgcatgaagattctaaataaattgttaattttctgggatcaatgattacctacaaaatgtcattattcattgtctttcagtggagaacaaactgggtactttcttttgaaagacttacacaagttctagccactgtgttgatctttattctttgtaatcaagatcattttcttaataaggcaagaagagaggataagagggaggctggtattcttcagtgtagctagtcagcaagaaccctattcttttgtttgccttttattttggcgactaaaaattttgatttgtatgcttatgtgtatttgttttataaaaataatcta

SEQ ID NO: 803519 - DNA, 647 bp, Homo sapiens
aatttagtatctttagtgtcctcctgaatgttcatgttagcaagattttgccctatgttagttatcatgggaaccctttctccatcattatggtcatgtgaatttgaaaacatctactatctatgatgttcagttatatcatgtgaaatatgaggaactgattatacaagcttgatatgtcaataccagtgatacaaatatcaccaaatattgaatccaacsatcaaatatattctgtttggcctgtactgtattaatttatttttgaatgaaaacttgtgattatctggctcagttgaatacagaaatgcaaaacataaatctggagccaagtagtggtcacctcctttaaaaagacatgctctctatcttctatttctgtccctatttaactggaatcactgtgaggtggtaccatttgaccttgtcaggtatttgatattgtgaaccctggttaattggaacgatgaatgcgaaaattcttagccttccttctgttgaaagaggtttctaaatttgaattctgaaaattatttttattgccctcactcatctataaaattgttaagttccttgaacacagagattatgtctatgtaatttgtgaattcttcacatcacttaatacattgcccatgagaaaaaaa

SEQ ID NO: 803520 - DNA, 536 bp, Homo sapiens
tcaagttttatttaatgatttatcaggcctcatggcctacgtgatatgatcaggtaaaggaatgggaaatataaaagagcagctgatgctcttttgttcttgtgtttccagttggagtggcgagccactctcaccacctctagtttctttttcttaacctactttgcaagccactctcatgtcctgtgtcagctggggtgtgagttttcatcccaattggtgagccacgctcgctgccccagcccctctgggtcggattaatagtcacgcccctggacatgatcaggctcctcttctgtccttatgggacaggtcctgccttgggactcaatacttgaccrtggttcctgaagcacactgtttctggaattgtcctgtagcctctcaagttttgttgtgctgctggttaggggtgccgggtcacaggagagctgatttcctttctgggctgaagttctcccggcggcgcctggggtcacaggtttcctttgacctggggctccagccccacaggcaaaggagacagtaaatctgcc

SEQ ID NO: 803521 - DNA, 612 bp, Homo sapiens
atctctaaaaaataaataaataaataaaaatagtaacaaaatagttttctttctcacctgtctttgtggagaggttttctgaacaggaaggaaatctcatttctaatcatatttccctaacagtggccttggacaagtcatgtaacctctgaaagactcrgttagcttgatccaaatggggttggtgtgaagatgaaatgagattaggcataggaagtcttagaataaggccaggcgcagtggctcacacttgtaatcccagcactttgggaggctgaggcaggcagatcacttgaggccaggagtttgagaccagccttgccaacatggcgaaacctcgtctctacaaaaatacacaaattagcagggcgtggtggcacgtgcctgtagtcccaactactcaggaggctgaggcttgagaatcacttcaacctgggaggtggaggttgcagtgagctaagaccatgccgctacactccagcctgggtgacagacagagagagactctgtctcaaaaaaaaaagaaagaaagtcttagaataaggtctggcacatagaaagcacttcagaaatatgagctgttactattaccttttttattcattgatttta

SEQ ID NO: 803522 - DNA, 510 bp, Homo sapiens
ttttttttctttcctgtagacctcctctgtgctcagcagagtctttttattgtaggcagtccagtatggttttggttctcagtgatcaggctgagggaaagaggagaggattgctgttctcagcattcacttcataggaataatgcaaataacatatttaaaatggtgcctgaaatatataaattactgagtaaatgtaaatagttattactatccatatctaacattgaaagggaaatttcttttgatgtgctttttgatatgtagaggcatagctgaaaactaaaatgagcctatgttcaaacctttactraaataaatgtttaccctctcaatttaaccgagaaggtttgcagtgcactggaaaaagtcaaggtctagaagtgcttcttcttttaccagaaacagaaagataatagtgttaaaagatgttaaacaaaaattataggaggctatcattttggactaaattcctccgctaggccccagtagaccaaactaaaaattaaa

SEQ ID NO: 803523 - DNA, 613 bp, Homo sapiens
acagagaaagagagatctgggcagtttttctggctgaatctcattaagatcagaatcattatctagtttataaccgtttcagtttcagaggcctacaatctaaatgatcaggaattccctccttgacatctaatgtaggtaagggaataatgccaatacagtgagtgcttacttactacccaaaatgttctatcgaacccacgggttgcaagatcctgccctctaacaatgtagaatctaaatcctgcattgtgtcattccaacatcacggacactctcaggtaaatactgtatataaaagaaaccaataaatacacctctgtctacacaatttgtttttagtggggaaagatggagctacatttattacatttctttttaaaattctgatatgtacattataagaaaggatttctacaattcttattccttaayttatttcagaaagatttcttacaaaaaaagaggagggaggttggggaaaatttcaaagtcacaaacacacatcaggaagatacataaattattcaacaccaagagattaatgtaaatcagtaaacaaagcccttaagataatgaccgccatggaagccaatggcacctgaattaatat

SEQ ID NO: 803524 - DNA, 561 bp, Homo sapiens
tcctgagcttggtctagtctgttattaaggctttcaattgtattttaaaatttctgtagtgaatttttcaactccagaagtccactttggttttttcttaaaatggctacgtcatcttttaaactcttggattgttttacttgtttccttggattagatttcatttttttcttgaattttgttaagyttctttgccgtccagattttgaattctatgtctatgcttcagacatttgaatctggctagggaattaccgcaatcctttagaggtgaaaaaacactctgaatttttaaattgctagagttcttgcactgattccttctcatctgaggaggctggtgtttattttcctttttgaaattgctgctgttttcatggggctttttgtttttatattctttttttcctttgaagccttgactgtggtgtgttgtgtatagttgattggctttttttctggctgctttcagagtgctgaggctgtgtttgggtttctttgttgtagattgcttcctgcattgggttttacaggcttttgggtgctgaaggaatttttgtt

SEQ ID NO: 803525 - DNA, 593 bp, Homo sapiens
aattcattttttgtttattcaataaatattgagtatttattatgtgtcagacattacattagtttcttaggatgtttcattgagaaaaacaaagacccctgcccctgagaagtatactttatagtcagggcagacagatactaaatgataaatgtaataaataattaagttccagcatttgttaggtgacaggtgccatgggaaacaacaatgggaagaggtgttgggagtagtgggagtcctagtttaataagatggagagggccagcctcattaacaaagtgacagttcagctaagatttaaaggaggctgaaggaatttgtcttgggtgtatctggaggaagagctctccagwccttggaaacagctaatgcaagggctctgaggcaggagtgtgcctggtggatgggaaacaccaatgagccagtgtggctggaccagagaagcgagggtgaaggcggtaggagagaaagtaacgagggccagatgatgtcagaccttagaggtcatttaacagactacgaccttaactctgaaagaggggcagacaacagagattttagcagaagaaggacattagccaaattgtatt

SEQ ID NO: 803526 - DNA, 630 bp, Homo sapiens
taacccccgcctcaccagccagggcaaggtccctggcttcaaggagcacagcaggatggtcgggggaccagttgtgatccgcacatatgcagaagggaaattactaaaacctctgcctctgaacacagctcagttgcatgttctttgtaggaatggggtagggatgaaagaaatgaagggctgaggggtgtgggaatgggactcacccctggacaagtcctttatatgacctggacctcagagactccccctgaaccccagctgtagatatccacgattgtarcctgattttgactaaagcagcgtttcccacccagcgttatgacttcactacatcaccacctcctcctttgcatgccatcaagggtgatgtcctcttttccctcatttcttctcctttctcataaactctgccctttttttgccttctccctcttcaactttgatcgatctcctttgccctttctcttttccttcccatctcttctgttttgatccctctgatctccctttttcctttctctttcttcatttcctttttcttctctcccctcctcaacgaatattattctgagcctcgtcccctccttcccctgacccctgctgcaccctgggaaatggagaattcac

SEQ ID NO: 803527 - DNA, 582 bp, Homo sapiens
gggaaggctgcccctgcccacacacttgtgcacaccctctttcctggcttaccatggctccaatggcctcgccctttcccagactgggcagagctgctgaacaggagctggtatgagtgccatcggcgacagctcactttccagcagctcggggytggttttcaagtcagaggcagctcacagccaaggaagctcttcccagtatttaaaacaaaagctaccaactggagaaaaaaatgtcccaacaacaaaacagcccaccacatgtttccaagtctggggtcacttacagaaaccgtgcacatgggcgtgaatactcaggaaatatttggatttggagcattttcatttggaacgctggtgagacgacttgcctcgcaccattcgcacttgacagtattttcaaagatgcggaagtcctgcttcccccgggaggggagcggcgggtcgaaacgtgtcttggctcgctcaatgtcagcccttttgacccggtcaagactttccagacacgggcttcccgggcttcttcggccccagactgggtttggggtgggcggacctgacgatctgagcctggtccct

SEQ ID NO: 803528 - DNA, 582 bp, Homo sapiens
gggaaggctgcccctgcccacacacttgtgcacaccctctttcctggcttaccatggctccaatggcctcgccctttcccagactgggcagagctgctgaacaggagctggtatgagtgccatcggcgacagctcactttccagcagctcggggctggttttcaagtcagaggcagctcacagccaaggaagctcttcccagtatttaaaacaaaagctaccaactggagaaaaaaatgtcccaacaacaaaacagcccaccacatrtttccaagtctggggtcacttacagaaaccgtgcacatgggcgtgaatactcaggaaatatttggatttggagcattttcatttggaacgctggtgagacgacttgcctcgcaccattcgcacttgacagtattttcaaagatgcggaagtcctgcttcccccgggaggggagcggcgggtcgaaacgtgtcttggctcgctcaatgtcagcccttttgacccggtcaagactttccagacacgggcttcccgggcttcttcggccccagactgggtttggggtgggcggacctgacgatctgagcctggtccct

SEQ ID NO: 803529 - DNA, 582 bp, Homo sapiens
gggaaggctgcccctgcccacacacttgtgcacaccctctttcctggcttaccatggctccaatggcctcgccctttcccagactgggcagagctgctgaacaggagctggtatgagtgccatcggcgacagctcactttccagcagctcggggctggttttcaagtcagaggcagctcacagccaaggaagctcttcccagtatttaaaacaaaagctaccaactggagaaaaaaatgtcccaacaacaaaacagcccaccacatgtttccaagtctggggtcacttacagaaaccgtgcacatgggcgtgaatactcaggaaatatttggatttggagcattttcatttggaacgctggtgrgacgacttgcctcgcaccattcgcacttgacagtattttcaaagatgcggaagtcctgcttcccccgggaggggagcggcgggtcgaaacgtgtcttggctcgctcaatgtcagcccttttgacccggtcaagactttccagacacgggcttcccgggcttcttcggccccagactgggtttggggtgggcggacctgacgatctgagcctggtccct

SEQ ID NO: 803530 - DNA, 599 bp, Homo sapiens
ttatgtgaacactagagacttatcacagcttagaggatttacaagggatttgattgctgctttggagtgggcaggctcgctgtgctcagatgggcccctgcaggttgtggcatcttgttttctcaaactgggagagggggatttgatttgtcaggagggccctcagcttcagagagtgaggaggggtagagaatgtgtgtgcatgtgttgcgtagggtgcgggagagtcggggccgaggagcagggcaaaggaataagacacaaagtggaagaaagaatctattttggaaatttctctgcacaataacatacgcacacctcttcggcttgtaggaaagaaagctaatttttttttccccctctaacatgggtagttttgaataagcttataaagcaactccgaaaactaaagagaaccctaataattcacatcttacttctgttttctgtggcccttgygttcagtgttgagcaaccagaaacgccaagacttggctgtaaatcaggacccaaccccttttgtcacatcctatgaaggggaaacctttttaaaaatgtggaaatctcaaaaacaaaaataatattttgtgaatggatcc

SEQ ID NO: 803531 - DNA, 655 bp, Homo sapiens
agtattcacaacttgcaagggagctggatccagccagggagcgcacaaggtgtactgaatgagggaagagcatgtcagtgggtcgtcagggagggaagagtctcagagagaaatgcccagactggacagaagtgtgaggcattcccggtgaaccgggacgctctcctcctacaatgttgccacttgattggagtttccttgattgtgaactacattcttaaggaracttctattccaaaatgagttcaaactggttttgtgccctttctacacctacactctatctcatcacttgtttttttctagctgtgtaccactcacttccttaagaagtctctcctgggtctgcctccagaaccgctggctttgtgttctctgtgtattctctttgctgtgagtcttgattttgccgtctgcatgtccccttggtcaggacaatcctgtgttccctgttgcctggtccaccctccttaggataatgatgggaggaactttttgcccatctatggagcatcactgtgcccagccctgcctcccgggcttctttgcctctgatattctgtcatcttctcccccaacctagaagagggaagggaaagaaattattttactggaaactccaaggttcatgaatgataaactaagaacgtaagcc

SEQ ID NO: 803532 - DNA, 655 bp, Homo sapiens
agtattcacaacttgcaagggagctggatccagccagggagcgcacaaggtgtactgaatgagggaagagcatgtcagtgggtcgtcagggagggaagagtctcagagagaaatgcccagactggacagaagtgtgaggcattcccggtgaaccgggacgctctcctcctacaatgttgccacttgattggagtttccttgattgtgaactacattcttaaggaaacttctattccaaaatgagttcaaactggttttgtgccctttctacacctacactctatctcatcacttgtttttttctagctgtgtaccactcacttccttaagaagtctctcctgggtctgcctccagaaccgctggctttgtgttctctgtgtattctctttgctgtgagtcttgattttgccgtctgcatgtccccytggtcaggacaatcctgtgttccctgttgcctggtccaccctccttaggataatgatgggaggaactttttgcccatctatggagcatcactgtgcccagccctgcctcccgggcttctttgcctctgatattctgtcatcttctcccccaacctagaagagggaagggaaagaaattattttactggaaactccaaggttcatgaatgataaactaagaacgtaagcc

SEQ ID NO: 803533 - DNA, 587 bp, Homo sapiens
tgatttgttgtcatggagaaaaagcagtagggctgatcttagctagattgtggtccctaggaactacagactagtgtttgagcagttcaatgttcggcctcatgaactttgaaatcccaattctgttggccaaggataacaccctaatacctagttcaatgcgttcaataaaaagattgcaaaagaagttcatcattttaatactaaatgtctgaatgagcacttaaatggaaatggtcaactccattttcctttcttcatctcttcatttttgagctacttcagtgtgggtagaatatgggcaaatgttctccttcccttcacttctggtcacataatcatacttggttgtgcagtgtacygtgaaagacagcaatatgacctttcctaaaatattgatgatgcatgatgagaataaagaccaacccagctttcctggcctcgttaagtgaaagaagggcctccatcacttgtgacttcaacactaaaagaggatcatcttcaaggcaaattacttcttttgttctgttgtcccttcactcacaccaaagtcagttaaacctattagtagcatttacacttaatac

SEQ ID NO: 803534 - DNA, 645 bp, Homo sapiens
aaggagtcaaaaacttgattggctaatagtgctgtaaagaatgattcagtaattagcattgaactaacattactaactgttttgtgaggcaatatggtgtggtggtgaagattccagctttgggccaaacagacctaggcttctgtaagggttctgctccttatgagctctgtgaccctggacagttacttaacatttgcaagctgtatttttctcactattgaaataagaataggtaatagcaaccatcttgaargtttctaataaaggttaaattatgttctgtattaaagcacttagcacgtatctggaaattaatccttaatattagctctattaataagtatatttttgccttaaatgtcctcttttacttaattgatgaaatatgattatactaaattctacagcttttagtagctatagttgccaaagtctacttattctgaaaagtagtaacatcaccaggaaaatgtctaataaaaaaattgctaaactatttgcattgaaatcagtctccatatagggaagtattcataaattaccatttatcagaaaaacagaaagtataagtgactgattgctgactcacttttaaaccaagctaggctacatggtaacccaatagtattcttgaactattta

SEQ ID NO: 803535 - DNA, 582 bp, Homo sapiens
tactaaacggcctcatgaagctaaaggtagaaaattcactagattaatggttcatgggcaaaatctgtccaaatccttgttaagaaacaccataatgaaatatctgtacacctctaattctagacagcctcatagttkgcaaagtttttttactttcagtatttatttagttttttagtcctcataatagcccagaaatggggtagggcaggggattatttctgtctggttgagactggggtctggaggccagctagcctgtccctgagtcacatggctcgcagccagtgaaaataggtgtctggcacccttgcttcattctcagcctgagctggaccattttgccttgggtggctctgcgtgttattttccagccgacttgggatattctcagggatctgacttctttcttagttcatttcttgatctctcatatttgattctgctcttctcacctgacctctgattcctacctacctcaattaaaacttttgtctactcttttgattagtttacttgcagttgctcctgggaaatacctttcacacccaaacaacacttctgcaattactggtactgcca

SEQ ID NO: 803536 - DNA, 582 bp, Homo sapiens
tactaaacggcctcatgaagctaaaggtagaaaattcactagattaatggttcatgggcaaaatctgtccaaatccttgttaagaaacaccataatgaaatatctgtacacctctaattctagacagcctcatagttggcaaagtttttttactttcagtatttatttagttttttagtcctcataatagcccagaaatggggtagggcaggggattatttctgtctggttgagactggggtctggaggccagctagcctgtccctgagtcacatggctcgcagccagtgaaaataggtgtctggcacccttgcttcattctcagcctgagctggaccattttgccttgggtggctctgcgtgttattttccagccgacttkggatattctcagggatctgacttctttcttagttcatttcttgatctctcatatttgattctgctcttctcacctgacctctgattcctacctacctcaattaaaacttttgtctactcttttgattagtttacttgcagttgctcctgggaaatacctttcacacccaaacaacacttctgcaattactggtactgcca

SEQ ID NO: 803537 - DNA, 582 bp, Homo sapiens
tactaaacggcctcatgaagctaaaggtagaaaattcactagattaatggttcatgggcaaaatctgtccaaatccttgttaagaaacaccataatgaaatatctgtacacctctaattctagacagcctcatagttggcaaagtttttttactttcagtatttatttagttttttagtcctcataatagcccagaaatggggtagggcaggggattatttctgtctggttgagactggggtctggaggccagctagcctgtccctgagtcacatggctcgcagccagtgaaaataggtgtctggcacccttgcttcattctcagcctgagctggaccattttgccttgggtggctctgcgtgttattttccagccgacttgggatattctcagggatctgacttctttcttagttcatttcttgatctctcatayttgattctgctcttctcacctgacctctgattcctacctacctcaattaaaacttttgtctactcttttgattagtttacttgcagttgctcctgggaaatacctttcacacccaaacaacacttctgcaattactggtactgcca

SEQ ID NO: 803538 - DNA, 548 bp, Homo sapiens
ccttgctccttatgtgtggtcatcagcatcagctcacctaggagctgagcataaacgcagaatgacaggcctcctccaaacctactgaatcagtatctgcacttaagcaaaatccccaggcgatttctgtgcacactaaggtttatgagccctgctccagacagtggttctagtacctcagagaacaggtccacctggaaaggattactgaagctggttgtaggaactaggagttcakaagtgctgggccccatgtggaacctcctctgagccaggctgggaaactggcataggtcatggtgagtcttcaagtgggcacccaggggattgtagctggcatggtctgaggggaggagtgttttcttcagtggacttgaaggctggattgttggatctatcacactaggaggtattggcactaaggggaaccctttgccacctgtgtctctaggaggtccagccatgttttgtgtgggctggaagtgccgacaggtgcaccctactgctgatttttccaccccacctaaaaattcactgccttagacttc

SEQ ID NO: 803539 - DNA, 534 bp, Homo sapiens
tgatgatcctgggagacttcagcccacacgtggtggggtgggaatctggctttgaatttctctcagtgtgggtgtcactgaccacttatccaaagagagaagagcactgatgtatccaagagcttagcaagaacatctctttggtggtttgtcacccatccgaaagaagttcrgatgactagaaccgccaacccatcacctgctgtagtgatccttgtttcttgtggcctaacatgtaccaatgatgcagccgttcgagttgccctgaggctcctggagagtaagaatggaaagcctcttgccatgttctccataactttggatagggggcccctgaagattcttaagattatcccaagagaaacttttggaaacctctgttggtagaggcaagtcaaggaaagaagttttatgttggtgatcagagaaaggccaaagagagctaagaccgtgcagaccaacctcatgccaaaagctcagtctgtagcataaatagctatagtacctttattatctccggcttttcacacagag

SEQ ID NO: 803540 - DNA, 614 bp, Homo sapiens
cgtgtgcacaagtagagagcatgcatgatcagctggacagtcgcggctcagtccagctggagatagaagctgcaggggtgggtggcaggaaagaaggccagaggtaggcaggatccaaacctcggagcccgctgaatgctgtgccgaaaatcttggcttaaaataattgtcaatgaacattggctgtttcccttgcagactccacatcaagatctctttctttggctctctcaactcgatcttggcctagattctaccttaacacagtggaaccctccagaattcacactcagatcctctaagctttcagtttattctctattaatctcctcccctacccaaagggaaagagaatcacaaagcataaataataacaataacgactagatggatatggcgctgaaaagccctgttatcaaattaggycacaatcgacagcaaaataaactcaatgctttaacaaaaataagcttaaagtagcaaccgggttaaaataattaaagctctaaacatagcagttgcactagagctaaattcaattttatttacgaggcaaaatataattacatttaaatttgagggaacagaatttaattcttattaatgacagaaag

SEQ ID NO: 803541 - DNA, 625 bp, Homo sapiens
cttatgttcatggatgggagagaaaattagattcagcattgagcattctcccctgttacaagtctcatttgtgtagctagaattgttccttctctgagaagcattagcttctcagtccagaaagcacagcaccaacatccaattaaacatcaaaaggaaacaatcaagttaggctatttctgtataggcatgttataggaggggaaactcaaggttagaatctctccagaggaataatatccattgagacttgacatttcctgtaccccttcccaacagcaagtgatagcctgaaatcaaagttcagaataataaatatccaggagattgacagtggcatagagaggaagggaagtgtcagagggcggcacggaagagcctcccagttgcctgggaggtagtgtggcggtttagacacaatgagatggtcagttcctaacatttaatcaaagactggaaaattgggcccagacaagyatgctgctaaatactgccagagttaaaggttgataaaccaagagctggcagatttgtaatttagtagaatttcccctgacagccctggaacgttttctatcagaattggatctcttcagtatgcaaatataagcccttctgaaattgg

SEQ ID NO: 803542 - DNA, 569 bp, Homo sapiens
taattagtggagtacttgtaaaaatctcaggaaaggatttcctaaaacctaacaaagtacaaactttaaggtagaaaaatgattgattagagtacgtaaaaattaaagctatccattgaacaaaggacagctttgacaaagctaacaggtaacagtttgggagaagatcctgatgatctgtaagagcacagctcacttgggcttcagtatggaagaggtgaggcagcgggcagaggatccagtttggaggctgtgaagtgtgcatgaggaaaaaggaagatccakactaaaaagaaacaggatggatatgggaagaagcttttgcgtcattgaggtcaatcccctcattttgttggtggggaaacaggcccaagggcagttaaagcagtaaagagatctatacaggagctgggatcagcccattaataacaaagccaggtaaaagcctgtcgcttcttgactctcctttgatgagaagagactgtgagtttcactcattcatttctataaacattcactggtatctactctgtgtcaagctctgcgctagcacggggatacagaaagga

SEQ ID NO: 803543 - DNA, 580 bp, Homo sapiens
ctgagctggggaaggatcacacaagtaggtcgtggcagttgtagaaatgaacttggacagaggccccaaagtgggagacagttctgtataagttgtggaataaggcagatagttcttagaagggattagtagaaggttaattaatagttgtggtcatatgcagggttacagggctacayctagaagttttgtgtttgttataggcaatgggagaattcccagaagtttttggagagaagaatgagagaattaaagtacgattcaggtgatattactttggtagccatgtgagaaagagatgaggtggggaagaaatgttctggctggtggtgggatgaccacattcatttaggaaacattagcctacatgggtctagtcccagtgccagagagacagccatgcagtgtgacctgtactactagaaatgtgtatacttttatgggagactgacgttttctggtggggcaaagaaaggttttctgtgaaggtgactttgatctgagttttgaagcctaaatagtatgctgttttacgtgctttatatgtgatccttactctacctatgtgaactgtatcaaa

SEQ ID NO: 803544 - DNA, 612 bp, Homo sapiens
aaagaagtagaaaagtacaccaactccatcttagccaggctacccattacccaattataatctcggctccacattagagtctatcaataaaacagaaagtgctacacagggggcaatattaatgccacatgtaaaccactgctcttttgtaaacccaacctttttcagctcaaacccatctctatcataaagactttactgactccccctagctgactcaagtgcttgatctcttgtgccccactgcatttgttacatgcctccattacagcaattatctagtattataatacgctatttgcatgtctcttcactcgactgtaaattggtaaagatcctgtcttactcatctttgaattatcagtgcataacacacagtagaccccataattacatattaaagacggatttcacctgctstttcacaagctaaggctgcaaagaaacagctggggagacattagtagaaacctgaataccaactaaggtctgccagaccagacctctgttatttttggagcttgaagggatgactgttctgcttctcagagcttactttctcaaacatacaacaacaaaaaagatagaaccagtccacacggaatttccaga

SEQ ID NO: 803545 - DNA, 612 bp, Homo sapiens
aaagaagtagaaaagtacaccaactccatcttagccaggctacccattacccaattataatctcggctccacattagagtctatcaataaaacagaaagtgctacacagggggcaatattaatgccacatgtaaaccactgctcttttgtaaacccaacctttttcagctcaaacccatctctatcataaagactttactgactccccctagctgactcaagtgcttgatctcttgtgccccactgcatttgttacatgcctccattacagcaattatctagtattataatacgctatttgcatgtctcttcactcgactgtaaattggtaaagatcctgtcttactcatctttgaattatcagtgcataacacacagtagaccccataattacatattaaagacggatttcacctgctgtttcacaagctaaggctgcaaagaaacagctggggagacattagtagaaacytgaataccaactaaggtctgccagaccagacctctgttatttttggagcttgaagggatgactgttctgcttctcagagcttactttctcaaacatacaacaacaaaaaagatagaaccagtccacacggaatttccaga

SEQ ID NO: 803546 - DNA, 630 bp, Homo sapiens
attctctatttttgtgagatatcattctcatgtttctctttagttccttagatgtcatttcctttagctctttgaacatatctaaaatagttgatttaaagtctgtttctattaaggccaatgtctggatctcctcaggggtagtttttattaactgcattttttcttttccatgtgccatactttcttcagttttttctttttgtatgtctcatactttttttgaataccagacattttaaacatgataatgtggccactctagaaacaagattctccctcctccccacgttgtactcctcgttgtagtwatttgtttgtttagtatcttttctgaataaactttgtggtctctattttttgtcacctatgtcgattaaaatattttttccattagcttagaagtcagctaataatttgacaaagatttccatatgtgtttggaacttgcagaggggctttgtgtatgtgttgggccctgctttcaacactcagccagacagtttacaactctgccttggcctacactttctgcttgtgcagggaaggtagaaatttcccaggtttttactgaacatgcacacagccttgacatacacagtttgcaaattctcagaaatatgttgaagc

SEQ ID NO: 803547 - DNA, 606 bp, Homo sapiens
taaagttgtctatcaggtccaggaggctttgaaagaatctttagggtttcttaagtgtagaataatatcgtctataaaaagaggtaatttgatttcttcttttcctatttggatgccttttacttcaaaaggctgattgctctggctcatatttccagtactatgttgagtaggatggtgagagagggcactcttgttttgttccagttctgagattcttttaagtgaaatcaaagctactcaattgtttgatctttacctaatctgtggacatgttgagattcacctcacatatgattgtctccttctgaaggagcttatgcaattctcatttggttctcagctttagtcagaagatacaattaaggtcagatacacttgtagtgacatctgatgtgaaattatrtgatggtaataatttcaaattaaaataaaatttagtggcagttgtttttattttagataataaaacccatgtacagataaagaatgtgattttactcagatcacataggtagtagcaacattgcagctaaaagcaaatctctttaatctgggtcaatgttgtttttaatcaatccataggtgtagatatgcatacaaaaa

SEQ ID NO: 803548 - DNA, 573 bp, Homo sapiens
acttatatgaggtacctaaaatagtcaaactcatggaaacaagtagcagaatagtggtttccagggactggggagggaggaggaaatagggagttgctatttaatgagtaaaagttttcagttttattagatgaataagctctaaatatcaactgtacaatactrtatgtatagcacttaaaaatttcttaagaaggtagatctcactttaagtgttattaccacaataaaataaacgatgaagaacaagaggttatttgaggttgaaagctgagttaatctccccacagatacgagaagaatccttcaggggcctgcctttcaagccgtgacatcttcctggaggaatagaaatatcagcccttctttgttccttccaaatcagttataccaggaagaagcattaaatgaaggtcctataattctgcacaggagggaatcacttttgaatagccaggtttcttgtgatcagaggatattaaaaccatacgtaaaggtcaaaatgccttacttgtgcatattgagatgttcttggacacattatgaagtgggactcagaacactcaggtcgaa

SEQ ID NO: 803549 - DNA, 573 bp, Homo sapiens
acttatatgaggtacctaaaatagtcaaactcatggaaacaagtagcagaatagtggtttccagggactggggagggaggaggaaatagggagttgctatttaatgagtaaaagttttcagttttattagatgaataagctctaaatatcaactgtacaatactgtatgtatarcacttaaaaatttcttaagaaggtagatctcactttaagtgttattaccacaataaaataaacgatgaagaacaagaggttatttgaggttgaaagctgagttaatctccccacagatacgagaagaatccttcaggggcctgcctttcaagccgtgacatcttcctggaggaatagaaatatcagcccttctttgttccttccaaatcagttataccaggaagaagcattaaatgaaggtcctataattctgcacaggagggaatcacttttgaatagccaggtttcttgtgatcagaggatattaaaaccatacgtaaaggtcaaaatgccttacttgtgcatattgagatgttcttggacacattatgaagtgggactcagaacactcaggtcgaa

SEQ ID NO: 803550 - DNA, 573 bp, Homo sapiens
acttatatgaggtacctaaaatagtcaaactcatggaaacaagtagcagaatagtggtttccagggactggggagggaggaggaaatagggagttgctatttaatgagtaaaagttttcagttttattagatgaataagctctaaatatcaactgtacaatactgtatgtatagcacttaaaaakttcttaagaaggtagatctcactttaagtgttattaccacaataaaataaacgatgaagaacaagaggttatttgaggttgaaagctgagttaatctccccacagatacgagaagaatccttcaggggcctgcctttcaagccgtgacatcttcctggaggaatagaaatatcagcccttctttgttccttccaaatcagttataccaggaagaagcattaaatgaaggtcctataattctgcacaggagggaatcacttttgaatagccaggtttcttgtgatcagaggatattaaaaccatacgtaaaggtcaaaatgccttacttgtgcatattgagatgttcttggacacattatgaagtgggactcagaacactcaggtcgaa

SEQ ID NO: 803551 - DNA, 573 bp, Homo sapiens
acttatatgaggtacctaaaatagtcaaactcatggaaacaagtagcagaatagtggtttccagggactggggagggaggaggaaatagggagttgctatttaatgagtaaaagttttcagttttattagatgaataagctctaaatatcaactgtacaatactgtatgtatagcacttaaaaatttcttaagaaggtagatctcactttaagtgttattaccacaataaaataaacgatgaagaacaagaggttatttgaggttgaaagctgagttaatctccccacagatacgagaagaatccttcagrggcctgcctttcaagccgtgacatcttcctggaggaatagaaatatcagcccttctttgttccttccaaatcagttataccaggaagaagcattaaatgaaggtcctataattctgcacaggagggaatcacttttgaatagccaggtttcttgtgatcagaggatattaaaaccatacgtaaaggtcaaaatgccttacttgtgcatattgagatgttcttggacacattatgaagtgggactcagaacactcaggtcgaa

SEQ ID NO: 803552 - DNA, 635 bp, Homo sapiens
gaagcattaaatgaaggtcctataattctgcacaggagggaatcacttttgaatagccaggtttcttgtgatcagaggatattaaaaccatacgtaaaggtcaaaatgccttacttgtgcatattgagatgttcttggacacattatgaagtgggactcagaacactcaggtcgaaaaataggattttcattatcagttttgtatggtctcttagtactaaatagttaattgctgagctgtctatacaatttaataatactgcactccaaaaattctgatcttaatctctgctgtgactgccgggcatgtagaatttatcaggtgtctagaagcattckgataatcttagaaattttataactcctatgtaacttttatctcataaaatttcttttaagaaaaattgagtggctagatcatgaagagttttgttaaagacatttttacacccaaaaaatccaattaagtaaaaaaaattattgttttcatgaaaaaatgtctccaaagtaattacgtagtctgaaatattagtttatcagcttaatgtctgatgaatatttagttatagttacttgaatatatgtttttatatatccttatatttattcaaaaaagaatccatggtatcctataa

SEQ ID NO: 803553 - DNA, 635 bp, Homo sapiens
gaagcattaaatgaaggtcctataattctgcacaggagggaatcacttttgaatagccaggtttcttgtgatcagaggatattaaaaccatacgtaaaggtcaaaatgccttacttgtgcatattgagatgttcttggacacattatgaagtgggactcagaacactcaggtcgaaaaataggattttcattatcagttttgtatggtctcttagtactaaatagttaattgctgagctgtctatacaatttaataatactgcactccaaaaattctgatcttaatctctgctgtgactgccgggcatgtagaatttatcaggtgtctagaagcattcggataatcttagaaattttataactcctatgtaacttttatctcataaaatttcttttaagaaaaattgagtggctagatcatgaagagttttgttaaagacatttttacmcccaaaaaatccaattaagtaaaaaaaattattgttttcatgaaaaaatgtctccaaagtaattacgtagtctgaaatattagtttatcagcttaatgtctgatgaatatttagttatagttacttgaatatatgtttttatatatccttatatttattcaaaaaagaatccatggtatcctataa

SEQ ID NO: 803554 - DNA, 557 bp, Homo sapiens
gatttatttctacagaatagagaaacaataatgatagcctagtttaaatacaaaacaataacaaaaaacaacaaaaagattgagagctgaaaaggccaccaaacagttactcatctacagaagcaaagaagccagaggtagtatattagaggacagtaaaaacaaaataagatccaggtgtgttaacaggatggttcaggaactaatgtctgttaatgaacatcagcaaaagtgtttttcttatgtaacatctgcagtgatatacagtaggaaaaataaactatggttgtgctgagaaggcaagagaaaggatagtaagcatagagaaaactactgaattagascacacccttagccatatgcttctcaacaaccagatgaattaagagaacatgtggatacacttaagggaaaataccttttagctctgtgagtaattctctccaggtgtctgtctatctatctatctatctatctatctatctatctatctatctatccattcctccatctatctatgaggtattgagcaacataggaaaggtatttcttgcata

SEQ ID NO: 803555 - DNA, 588 bp, Homo sapiens
tggctaaatgagggccctttacaatgctgatggaaatataaaatagtatcaccgctttggaaaatagtttggccttttcttaaaactgataaatatgaatatatcatgcaatttaatgatactattcttaggtttctatcccatatattagtatatggataaacaaaatgtactatatctatayggagaaatactatttcataataaaaaagaacaaatactaatagatgatacatcatggatgaacttccacaacattatgctgcaagaaaaaagccagtgaatgagtttatatataacccccacactcccagtcttcagattaaaatgtagccccagctgacagcttttgtctgcaacctcaacacagacctttagccaaaagcacccagttaagcctcatcccacagaaacttgtgataatcagtttgttgttttaagccactacattttggaaaaccttgttatgcaacaataactaatacactacccctgtgaaatttctatattgtgcttattctctttcataaaatgtgttgagtaatcacctagctcactctgtaatctcaattattcttaagaaatagg

SEQ ID NO: 803556 - DNA, 622 bp, Homo sapiens
aggaggctgaacagacctgccgccaccttactgcccaggtgcgcagcctggaggcacaggtaagaatttggctggcagactcacctcactcctattccactggacccctgtgccctctcctcctaggccactgctgccttaggcttttcttcactctccccctggccctctccttctcaggttgcccatgcagaccagcagcttcgagacctgggcaaattccaggtggcaactgatgctttaaagagccgtgagccccaggctaagccccagctggacttgagtattgacagcctggatctgagctgcgaggaggggaccccactcagtatcaccaggtcaggaggcagccttcctccctatgtctgtttatggagtgcctgctgtttatcaggctgtatcctagtgagataaataagatgtgatctaaatttattcttagagaagaataamgaaaaacgggtattataccagatatctatttagggcacagttggaataaaaagcaagtggtcaagaaaggcttcgtggaagctatcgctcctgctgagtcttgaaagcatccataggtgtgtgtgccaggttgacgagaagagcagtgtgaacagaggctgtgaaagag

SEQ ID NO: 803557 - DNA, 584 bp, Homo sapiens
tcccacttccctgccttccacaggaaggaacagcttctacatgggcacttgccaggatgagcctgagcagctggatgactggaaccgcattgcagagctgcagcagcgcaatcgagtgtgccccccacatctgaagacctgctatcccctggagtccagggtgaggcctggggtcactgtgcagggcctcccatccctgccctcccttggaatcccacctgctgatctagcctgagcactagggccctggatcactgactggccgaggagggggagggtgaccttctcatgtttccaggtggaacagacagctgggagggcactcaggggtgaagtccctkggggtaggcaggagctcagagaggaatctggtcaggactgcactgcttgtggccatttgcccagggcttaggtagaaagcagaacaggaaaggaggccttgtgtctttctacctcgtgaggcaggaagggtcccgaccataagtgtcgggcgagtgtagagttctgggacagccccaggtcctcctccatctccatacagctatggtccactgaccacctcttccacccatgcagccttccct

SEQ ID NO: 803558 - DNA, 688 bp, Homo sapiens
ggagcatagtgtggtaatgaattaaagagtcagagagacctcgactgagatatgagtcagttaaccactcaatcatggagcctctgctctatataatggatatcacataattccacctttgtcagcgtgttggaagtattttaaataacactcaggtgatactgaataataagatgctacaataattatcattctccaacaatttgaataactattcttcaaaaatttgttattctyaaaagtttgtaggttttgcattattccagagcgggcatggcaaaggaatacagtgctttattggggtttagaggtcccaatcagttgatataaatgttacagggtagtattaatgttttagaagattccgttttattgttttatctattcattctacattcattcaataaatacttatttagcatgtgtgggccactcactggacacttcagcttctgcattcttcctaaacaggcatgttaatgtacatgcaaatggggattccacctatacttataagtcaagaggtagttcaagcatcaccttgtcagtgcagctttctccacttccccaaggtccttactccagtcttttgagtctccaagaatttgggggctaaccttttatgtcaagcttaagacattgtattagaattgtattattatgaattatattataattgtccagttta

SEQ ID NO: 803559 - DNA, 688 bp, Homo sapiens
ggagcatagtgtggtaatgaattaaagagtcagagagacctcgactgagatatgagtcagttaaccactcaatcatggagcctctgctctatataatggatatcacataattccacctttgtcagcgtgttggaagtattttaaataacactcaggtgatactgaataataagatgctacaataattatcattctccaacaatttgaataactattcttcaaaaatttgttattctcaaaagtttrtaggttttgcattattccagagcgggcatggcaaaggaatacagtgctttattggggtttagaggtcccaatcagttgatataaatgttacagggtagtattaatgttttagaagattccgttttattgttttatctattcattctacattcattcaataaatacttatttagcatgtgtgggccactcactggacacttcagcttctgcattcttcctaaacaggcatgttaatgtacatgcaaatggggattccacctatacttataagtcaagaggtagttcaagcatcaccttgtcagtgcagctttctccacttccccaaggtccttactccagtcttttgagtctccaagaatttgggggctaaccttttatgtcaagcttaagacattgtattagaattgtattattatgaattatattataattgtccagttta

SEQ ID NO: 803560 - DNA, 561 bp, Homo sapiens
tcatttatattaccttaacactttttgtatgtgtttatcacaacatggagagagatcaatgaggatagggactatgcttctacatcactggagcttgacatgtcatgattcttaacatgatagaatatttattgaataaataaatggacaactcagtgaagggagtaaggtaagttttgttatcaccacttcacaggtaagaggggtgaggctttgaaggcccatcagtaattcctactgaaagccaagttaatagcagacctcccatttacacccagcattgtctggaggtctgttaggagacattttctagattcatcttgactactgtggccagtgtggcctggctcattttatttgagtgcaatttctgcctaatgcagtgtmtctcaatcctggatgcacattgaattattcatagcagggtgcctgatacttaatgatattaaatgttttttggaaaaggagagaaaaaaacaccgaaactgcctttctttcttaaacttttaattatttaggcctttttggttcttatactaagtttctccaagtttcatcatt

SEQ ID NO: 803561 - DNA, 598 bp, Homo sapiens
gtcagacctctggtaggtctagcaggttgatggttgctgactgatcagggtgatggctgctgaagtttggagtggatgcaacaatttcttaaaacaagaaaaaaatagagtttgctacattgattgactcttcctttcaaaaaatatattcatgtagcatgtgatgctgtttgatagcattttgcctacmgtagaacttcttgcaaatatggagtcaatcctctcaaaccctactggtactttattagataagtttatagaatattctaagtactttgttgtcagttcaacagtgttgacagcatcttcaccagaaataagtttcatctcaagaaactattttctttgctcatccataagatgcaacccctcattcgttcaaattttattatgggattgaataatttgtttccatcttcagggtctacttgtactccagttctggtgcaatttcccccacatctgcagtaactttctccactgaagtcttgaaccccctcaaagtcatccatgtggtttggattcaccttcttccacactctatgaatgttgatattttggccacctcccatgaaaattaatgttcttaattgtatct

SEQ ID NO: 803562 - DNA, 559 bp, Homo sapiens
gaacttttcttttgcaattgcaacttgactaacttttgcacaagaggcctagctttcagcctacgtgagctttcaacatgccttcctcactaagctcaatcatccctagttttttatttaaagtgagagacatgcaactctttctttcatttgaacacttagaggccattttagggttattaattggcccaatctcaatatttttgtgtcttggggaatagggaggcccaaggagagggagagattcaggggagtggctggtcagtggggcagttagaacacatgcatttattaattaaagtcacctttttaacattggcactgtttgtggtgtcccaaaacaattaccatggtcacgtcaaagatttctggtcacagatcagcataacayatacaataataatttaaaactttgtaatattgcaagaattaccaaaatgtgacagacataaagtgaacacatgttggaaaaatgggagtaacacacttgccaaacaccaggagtagattccatctcaaggttgccagaaaccttcaatttgtaaaaaaaaaaaaaatg

SEQ ID NO: 803563 - DNA, 592 bp, Homo sapiens
ggcctcagcctcctgagtagctgggactacaggcacacgacaccacacccatctgatttttgtatttttagtagagacggggtttcaccatgttggccaggctagtcttgaactcctgacctcaagtcaaagtactcagattacaggtaggagccaccatacccagctggggctattttagtagaaaacaaagcaggagtttgcacgaggaaagagtgagcaccagctctgaacagccaggccagcctgggctccccctgactcccagatccccatcccaggaggcgtggctgctgtggcctcctacataggcggctcctcagctgcccctcacccctcatgccttcctctcccagcaactgatgagccttttccatgcatttcctgcatggatgaatcaacctcacaaaacagcrgaagccccctccctgcagaggtgtccactattctggatttggcatgttattttctttagagttttactatgcgtgcccctcaacaaggtaagataggttctgtgtctttgagttttgtataaacgggagctcccggtttgctgttattattcattgcaatgcttgtaagatttatc

SEQ ID NO: 803564 - DNA, 483 bp, Homo sapiens; identical to SEQ ID NO: 803235

SEQ ID NO: 803565 - DNA, 589 bp, Homo sapiens
ctgactatggaaagaaggggcctcaaacccttgactttttcttttacacaacaatgttcattcttggatgcacaatagaatcaccttagatgctttttaaaagcccaggactcaccctaaactatagaacttccaggatgggacccagacatcagatttcaatgtataaccttggagaaccagtgtctgaccagggcacatgcagccgccaccaggttttggtcacttggatggctggtctggcagctgttctggtaattgtggagatagaagctaagactagagggaggaggccaccttacaggtttcccctggctcaatggtgtttactctgggcaaactcaaggtatacagttatggttgagatattctggtccaactctggacccacagtctttatgcttcccccgrgggttaaaaatctcagaattccacttctaattcctacacggtctttgggaagcagtacacagttgtagctaagagtgtgtggttaagaccacaggctttggagttggaaaatactgaagtcaaatcctgatcaaatgtgtggccttaagcaagtaacataacagtatcatgactcagc

SEQ ID NO: 803566 - DNA, 633 bp, Homo sapiens
attaattttcccctccaaatctatgacaattttctaagcctgcatttgcaaacatattgtttctgtgttgcacggtttccaagtgagcgtagttatcatttagaattctcccacctgcttccagatgtcaaaggagtgggggattgctcctgagagctcatcaattctgcttcagtggactctgtgaggatgcagaatggataagtttgcctgtaaattctcttttgaaatcttaaattgtccacaatctgtggcaactcttgttttatttgaatattttgggaaagtgggatggcagtaatttgaaagagaaattctgtccagcattagctggacataataaaccagcattggcctgtctggtggtaagctctttttggaagaataagcttgtttctgtgagcacaacaaggaaatgcgggtggtgaggacatccaggataagacaagtggtgattgacagcccagctgstggagatgggtaattggaaattcatggcacataaatctcccagtacttatcttgaagcacaggaagagaggagatctgagcaggggaacatttagctctttcaaagggatctaataaggtagcaaatctttaagttcttcattttaactttaattaaattat

SEQ ID NO: 803567 - DNA, 587 bp, Homo sapiens
tggtttacacatgccaaatgatacatggattttcttttggtttcacactttggttttctaattccctatctcttttttatttatctccttatttgttcataatattaataactcgaattttatcttatgacccacagtgttttatcaactctataaatgagtcacattttttcatatatttttcatatatatatatataaacaattgtgatcactggaaattcctaaactttaaattccaaatatttaaagcattccctctgttgctgagggaaatcaggagcatttaataatgtgtgtagattaaatagtgtatactcgtttaagggcgatcttctctggacacccatttgcctcctggaactccatgtcctattccataaaggacctatttactgtgccaaaagatagatcctaaatcaaaragaaacaataaaaggagagctgaaaaaaacagccaaagatattcagtgttatttagactcagcaacaagttttctctattatcagacttcaatatcttgaaaagaatgatagatttttgtgctttttaggacagtttttcacaaaaagctaaggatatttaca

SEQ ID NO: 803568 - DNA, 615 bp, Homo sapiens
gcatatgtgaaacctgttcagagtttctctcttctatgggtgaagagctgactcagataagaattggccccaattaaattacgcttacgtgagggaatgtcaggctggagggactgccctgcagtgttcaccattgattatacctgtggaaattcttatccagaagggactggtgtcaccaggatcttgatgagctctgcatatattacaaaggagaaatgcttactacattaaaagtctgatgatrtcgccacaatgtttgatgatgccgcagcaggaacattagacatgaaaccatctctgtcctctgctgactttgagtatctttgggagttacctgtagtccatttgtccccatcttatgtgttagatctatcttctgttggtctacatgagaaacctaaacacttgtttttttttaaaaaaaaaaaaaaggaaaaataatccccacctatctttccctcctgacttagacaccgaatgtattcaaaattcctaaatgatttcaaattgaaggtttcactctttgacttgttatttaggttaagtggctttcttgacaggcaagagttttgcaatcgattagatgatggacagaaggtgatgtattgtaat

SEQ ID NO: 803569 - DNA, 615 bp, Homo sapiens
gcatatgtgaaacctgttcagagtttctctcttctatgggtgaagagctgactcagataagaattggccccaattaaattacgcttacgtgagggaatgtcaggctggagggactgccctgcagtgttcaccattgattatacctgtggaaattcttatccagaagggactggtgtcaccaggatcttgatgagctctgcatatattacaaaggagaaatgcttactacattaaaagtctgatgatgtcgccacaatgtttgatgatgccgcagcaggaacattagacatgaaaccatctctgtcctctgctgactttgagtatctttgggagttacctgtagtccatttgtccccatcttatgtgttagatctatcttctgttggtctacatgagaaacctaaacacttgtttttttttaaaaaaaaaaaaaaggaaaaataatccccacctatctttccctcctgacttagacacygaatgtattcaaaattcctaaatgatttcaaattgaaggtttcactctttgacttgttatttaggttaagtggctttcttgacaggcaagagttttgcaatcgattagatgatggacagaaggtgatgtattgtaat

SEQ ID NO: 803570 - DNA, 732 bp, Homo sapiens
aaatgactgaaatgttacggacaggggatcctcaggccatccttacttctgttatgcaagactttgaataggcctgttaagggaagtattgccaaggaagcttgctagaccttttgcaaaattaagaactgttgagcaaaataaagtattcatctgcaaacctgctgtccagctgacagatggagctctggccaggagccttgcccggtgttgtgtctgtcaacagggaaactgggagaagcttactccaaggggcctggaggactatgttttttcataaacagatttttcctaatagcwctttcaactaggttggccttgctgggcatcccccataccactacttacctcacatttttctataaatcaatcctctattttacttaaatgaatctcggcctattctaacaatagtatctgtgaaattatgagtctgatccaccagtttttatgttttcccaaattttacaccccctgccattatctcatgtattttataaaagtgatgccaaatctgtttctggggaacttgtatctctgcctttaaaatagcttcaacttttggggaaaagtaaaattacttctttaacatccttgtagcagtcctattaagtccttctgcctcatctccctcctccctcctatccctgcccctttctagattctgtaacattctgagcctgcagggattgtagaggacataataaaaaagatcttgggtattttaggatt

SEQ ID NO: 803571 - DNA, 585 bp, Homo sapiens
gcttactatgcatagcacctgagtgacggggtcacttgtactccaaactcagaatcacaccatatacatttgtaacaaacctgtacatgtaacccctgattctaaaaagtcaatctttttttttttaaaaaaaaaaggtaaactkgggcaacatggcaaaaccccacctttactaaaaacaacaaaaaaattagcggggcctggtggcacaagcctgtattcccagctcctcaggaggctgactgatgggagaatcagctgagcctgggaagtcaaggtgagctgtaattgcaccactgcactccagcctggcttatagagtcagaccctgtgtcaaaaaatagaacactaaaattctaacccacagaaattcctgaggggaggaggagtggctgggtaagagggcttgacctttctgaagcgattggtgaatgagcttatagttatgtattttatgttaaagttacatgtttaaggtatgcattaatcctttaataaacttttatgagtaattaatcaactattagggagtggctttgttagggatatctcattagggtttgctccctatagaatggtgttgag

SEQ ID NO: 803572 - DNA, 585 bp, Homo sapiens
gcttactatgcatagcacctgagtgacggggtcacttgtactccaaactcagaatcacaccatatacatttgtaacaaacctgtacatgtaacccctgattctaaaaagtcaatctttttttttttaaaaaaaaaaggtaaactggggcaacatggcaaaaccccacctttactaaaaacaacaaaaaaattagcggggcctggtggcacaagcctgtattcccagctcctcaggaggctgactgatgggagaatcasctgagcctgggaagtcaaggtgagctgtaattgcaccactgcactccagcctggcttatagagtcagaccctgtgtcaaaaaatagaacactaaaattctaacccacagaaattcctgaggggaggaggagtggctgggtaagagggcttgacctttctgaagcgattggtgaatgagcttatagttatgtattttatgttaaagttacatgtttaaggtatgcattaatcctttaataaacttttatgagtaattaatcaactattagggagtggctttgttagggatatctcattagggtttgctccctatagaatggtgttgag

SEQ ID NO: 803573 - DNA, 612 bp, Homo sapiens
ctcagtgacaagctgtggtggaatgggccaatcacactttaaaaacccaattgtccaaacagtctgaacaacaaaaacataatttaactaacccccactcccaattacatttagcattgtttactttaaattttttaaatgttcctaaagataataatctaactgcagccaaacgccattatacaggcaaaaaattctccctaaacaaaggcaacccagtgttayggaaaaactcccaaactaatacttgggaacctggcacaattataacgtggggaagaggctatacttttgtttcaccaggagatcatcaatcccctttctgggtacccaccaggagcctcaagcttcgggtgtatactgacaatgaaaaccacagggaaaagacgtccatgtcagagactgccctcagacatggtgagatctgtgacgactcctcagaagcaggcacaccaaatcactgattcaatcctccctgatgtcaatgtagacccatctaactaatcccacttctcctgattaccttttcttttcttcttacaaacctaaaaatctcaccatttctattggcctgaaaataacatccctctgttcttctcttcctcctttagc

SEQ ID NO: 803574 - DNA, 509 bp, Homo sapiens
agaaagcttccttctagtttttatccatgcatattcacttttacaccttaggcctcaatgagctcccaaatatcacttcaagtattctacgcaaacaaaatttccaaactactgaatccaaagaaatttaacactggaagatgaaygcacacatcacaaagcaatttctcagaaaatttctttctttttttcatctgaagatatttcccttttcaccataagcccaaatgcactcccaaatatcccttcacatatactaccaaaacactgtatcctaacacctgaatgaaaagaaaaaattatctgtgagaggtgaatgcacacatcacaaagtggtttctcagatagatagcttccttctagtttttatcctgggaatttagtttcttcacctgcggactcaacggtctctcaaatgtccattcacagaattggcaaaaaaaaatttccaaactgctgaatccaaagaaatgtttaattctttgagatgaatgcacacatcacaaagc

SEQ ID NO: 803575 - DNA, 523 bp, Homo sapiens
cacctttcttttcattcagcagtttggaaccactgtttttcaagaaactgtaaagggtgaccattgaggcctatggtgaaaaaggaaatatctttggataaaaactagaaagaggcttgctgagagactactttgtgatgtgtgcattcatctcactcagttaaagttttctttggattcagcactttggaaacactgttgttgtacaatcttcawagggttacttgggagcttcatgagtccaaaggcgagaaagcgcacatcccaggataaaaactagaaggaagttatctgagaaaccactttgttatgtatgcactcatctctccaagataaacctttcttttctttccacaatttggaaacatggttttcgtagattaggcgaagttatatttgtgagtacattaaggtctatggtggaaaaggaaatatcttcttataaaaactagaaagaagctttttgagaaactgctttgtgatgtgtgcattcatctcacagaactaaaaccttctttcaatt

SEQ ID NO: 803576 - DNA, 630 bp, Homo sapiens
aagtttctttgataatattctatccgaaagaccttggatacaaaaaaaattgataaattgaacttcatcaaaataaaaactttggctcataaaaactgttaataatatgaaaaagtgagccatgcattgtgggtatgcttacaatacatatgtctgaataagaacttgtatctagaatgtattaagaagttttacaagtcaagacaagccacatgatttttttaatgttcaacagactagccaagaattatatgctcaatatctttagtcatccaggaaatgcaaattaaaaccaatccaattgttactgakgatgcggaataactggaactctcatatgtcccttgtggaagtatataattttacaactgtgttgaaaagctttttgactgttataaaatttagtctttacccttcctcctaactagcatatatctacaatactacaacccatgtgtcttggataaagacatgttaatggcccaaaataaatccctgtatgggcagatataaacacacgtgtggtccagtgcagctcagtgtatggcaagatatagccccatgtgtagacagacacagaactgggtgatatcatatgcaaaacttatataaatgcaatcataaaagtaa

SEQ ID NO: 803577 - DNA, 638 bp, Homo sapiens
taaattcacagatgtataatactcgagaaaccacttaaggtaactaacttacattttcaaactgggaagagctaattatgaatggatctttgtatgtgactaccaactgacatgttcaattgatatcaatttttaattttccagattaacccatttcttccttattttcatttcattaaatgttactacctaccacactgtttaaactaaaaattttacaatctatttcacttctctatttctttaatattatttatcaatatatttttctcaaaccctgttaactcttccttcaaaatatcccaattggatccttctcactaccatcttgttaccccctggcctactctaatagccccctgcaaaatctctccactcatcttctggcctctaataatgttcyttcatgaagtagcccaaatgatcttttgaaaatcttattaatatcataccactcctctactcaaaaaccccatggtggatttatattctgcactcaatgaaatggaatctttctaccttggcctacaagaccctagatgacctggatccaggctacctccccaaatccatcccttacaattgtccacatttatactgctccagacagtttcgatattcaccaaatatacaatgtg

SEQ ID NO: 803578 - DNA, 638 bp, Homo sapiens
taaattcacagatgtataatactcgagaaaccacttaaggtaactaacttacattttcaaactgggaagagctaattatgaatggatctttgtatgtgactaccaactgacatgttcaattgatatcaatttttaattttccagattaacccatttcttccttattttcatttcattaaatgttactacctaccacactgtttaaactaaaaattttacaatctatttcacttctctatttctttaatattatttatcaatatatttttctcaaaccctgttaactcttccttcaaaatatcccaattggatccttctcactaccatcttgttaccccctggcctactctaatagccccctgcaaaatctctccactcatcttctggcctctaataatgttctttcatgaagtagcccaaatgatcttttgaaaatcttattmatatcataccactcctctactcaaaaaccccatggtggatttatattctgcactcaatgaaatggaatctttctaccttggcctacaagaccctagatgacctggatccaggctacctccccaaatccatcccttacaattgtccacatttatactgctccagacagtttcgatattcaccaaatatacaatgtg

SEQ ID NO: 803579 - DNA, 569 bp, Homo sapiens
attcttctgcctcagcctcccgcgtagctgtgattacaggcatgcaccaccacgccccactaattttgtatttttagtagagacgggatttctccatgttggtcaggctggtcactaactcctgacctcaggtgatctgccmgcctcggcctcccaaagtgctgggattacaggggtctcaagtctatctgaccataaacgatctacttccctgggcttttgtgaagataaaataaggttaccttcaatgtttagcagagtcgtattcagaatgagggaactattaccattactagcaatgagccattcttccctgagccccagacatgaactgcaggaagggaggggagccttgagtcgtgtgagtggggcttttccaagccctagttcaggcagatgccccagggactgcaggcccaccagaggcatctccttagggcagggactagatgccatgaccctcaaggaccttgtaaccccagctcccgccagggcagggtgccagccagccacacccatcaccctgaacagctttgctcctggatcccatccactggtatcatttagaa

SEQ ID NO: 803580 - DNA, 569 bp, Homo sapiens
attcttctgcctcagcctcccgcgtagctgtgattacaggcatgcaccaccacgccccactaattttgtatttttagtagagacgggatttctccatgttggtcaggctggtcactaactcctgacctcaggtgatctgcccgcctcggcctcccaaagtgctgggattacaggggtctcaagtctatctgaccataaacgatctacttccctgggcttttgtgaagataaaataaggttacyttcaatgtttagcagagtcgtattcagaatgagggaactattaccattactagcaatgagccattcttccctgagccccagacatgaactgcaggaagggaggggagccttgagtcgtgtgagtggggcttttccaagccctagttcaggcagatgccccagggactgcaggcccaccagaggcatctccttagggcagggactagatgccatgaccctcaaggaccttgtaaccccagctcccgccagggcagggtgccagccagccacacccatcaccctgaacagctttgctcctggatcccatccactggtatcatttagaa

SEQ ID NO: 803581 - DNA, 479 bp, Homo sapiens
gccctctcagaacaggtgggcccacgcttccctgtccagcctccaaccctggggggacatctcttcccacccccactacagggagcagggcagcctgctgggctgcgagcctcttgggataagcccgcaacgcctcccatgtcggtggctacacgcatccaccttcagtggagccaggacccgcaagaccctcttcacagggcggcacctctcacctgcttctcccctttccccgctcrgcaagaggaatctggagccagcctttgccccctttagacaggctgcccctcctactgctccccaagtctgtcctctgggggaaacacagaagaggaagagaaggaccaggggctgttccgtcctttcagcactggtcaaatttccatgtgagcctcagtttcccccagtgcaaattgggtgcccatcctcactccatccaaagagcatcaggcactcctcagcccatccagtagacagtg

SEQ ID NO: 803582 - DNA, 615 bp, Homo sapiens
aaaactaaatgtattacaaacacatgaaaaaaaaaattcactaaagtgtgtagagaaataaggagccataaacttgggaagtgtgtggagtctgtaagactgcaggcaaaaggaactgtatgtaagcactgtcttctaattcataaatttgtttcccaaggggtataggctgagatttttttttttttttttttttttaagaaggagtttcaatcttgttgtccaggctggagtgcaatggcgtgatctcaactcactgccacctccacctcccaagttcaagcyattctcctgtctcaacctcctgagtagctgggattacaggcatgtgccaccacacctggctaattttgtatttttagtagagacaggctttcaccatgttggtcaggctggtcttcaactctgacctcaggtgatctgcctgcctcagcctttcaaaatgctgggattacaggcgtaagccaccacacccagccaggctaatgattcttaaaccactatttatccatactggagtatagtataaactatttatctatactggagttaaactattaagtgaattgatgttagattgtggaagacaggttttttaccattgaaatgggaggt

SEQ ID NO: 803583 - DNA, 615 bp, Homo sapiens
aaaactaaatgtattacaaacacatgaaaaaaaaaattcactaaagtgtgtagagaaataaggagccataaacttgggaagtgtgtggagtctgtaagactgcaggcaaaaggaactgtatgtaagcactgtcttctaattcataaatttgtttcccaaggggtataggctgagatttttttttttttttttttttttaagaaggagtttcaatcttgttgtccaggctggagtgcaatggcgtgatctcaactcactgccacctccacctcccaagttcaagccattctcctgtctcaacctcctgagtagctgggattayaggcatgtgccaccacacctggctaattttgtatttttagtagagacaggctttcaccatgttggtcaggctggtcttcaactctgacctcaggtgatctgcctgcctcagcctttcaaaatgctgggattacaggcgtaagccaccacacccagccaggctaatgattcttaaaccactatttatccatactggagtatagtataaactatttatctatactggagttaaactattaagtgaattgatgttagattgtggaagacaggttttttaccattgaaatgggaggt

SEQ ID NO: 803584 - DNA, 615 bp, Homo sapiens
aaaactaaatgtattacaaacacatgaaaaaaaaaattcactaaagtgtgtagagaaataaggagccataaacttgggaagtgtgtggagtctgtaagactgcaggcaaaaggaactgtatgtaagcactgtcttctaattcataaatttgtttcccaaggggtataggctgagatttttttttttttttttttttttaagaaggagtttcaatcttgttgtccaggctggagtgcaatggcgtgatctcaactcactgccacctccacctcccaagttcaagccattctcctgtctcaacctcctgagtagctgggattacaggcatgtgccaccacacctggctaattttgtatttttagtagagacaggctttcaccatgttggtcaggctggtcttsaactctgacctcaggtgatctgcctgcctcagcctttcaaaatgctgggattacaggcgtaagccaccacacccagccaggctaatgattcttaaaccactatttatccatactggagtatagtataaactatttatctatactggagttaaactattaagtgaattgatgttagattgtggaagacaggttttttaccattgaaatgggaggt

SEQ ID NO: 803585 - DNA, 601 bp, Homo sapiens
actctctttttaagaatttgattgctattaataaaactgctgtgagccttctagtacatgtgtttttgtaggcagaaaacctcatttatattaattaaaattcctgggccctggcatagtcttttgggaagatttttagcttcagcttcaatttttttaaaaaatatataaagtatgttttatttatatgtcttaactcaattttggcaagttaaatttttatagagatgtatagatttagtcagtattaagcttcacaaaaaccttgactttcttatccagggtattgtaaggggaaaataaaataaatatctttctacttttgyttggggtgcataatgttctgttagcatctgtctcactagggtcttttatccagattctattttaaattagataccaagtttatatttatttaaataaaataatcaaatgaatcaaccaatctataataacaaaaaattatcatgtgtttttcctggtgcttacaacttcaaagaagtaattacagatatttaaaactataaatctcattataagataaaagttttgatttctaaaaaatatttttattcttacctcagtcagttctcaatttctt

SEQ ID NO: 803586 - DNA, 601 bp, Homo sapiens
actctctttttaagaatttgattgctattaataaaactgctgtgagccttctagtacatgtgtttttgtaggcagaaaacctcatttatattaattaaaattcctgggccctggcatagtcttttgggaagatttttagcttcagcttcaatttttttaaaaaatatataaagtatgttttatttatatgtcttaactcaattttggcaagttaaatttttatagagatgtatagatttagtcagtattaagcttcacaaaaaccttgactttcttatccagggtattgtaaggggaaaataaaataaatatctttctacttttgcttggggtgcataatgttctgttagcatctgtytcactagggtcttttatccagattctattttaaattagataccaagtttatatttatttaaataaaataatcaaatgaatcaaccaatctataataacaaaaaattatcatgtgtttttcctggtgcttacaacttcaaagaagtaattacagatatttaaaactataaatctcattataagataaaagttttgatttctaaaaaatatttttattcttacctcagtcagttctcaatttctt

SEQ ID NO: 803587 - DNA, 637 bp, Homo sapiens
tctaatccctaaaaaaagtatctttcaggaataaagtagaaataaggactttttcagaggtgccaaagctgagataatttattaactgcagaccttcctgacaagaaatattaacagaagtccttcaagcagaggaaaaatgacatcaggtgaaaatctgactcaatacaagggaakaaagaatcctagaaattgtaattacatttgtacagataaaatattttttattatttaggtctctttaaatgataaatgactatttaaataaaaattcatgtatatagtgaagtacactataagtacaacgtacacagaagtaccttgcatgataaaaataggataaagtccaggaggaagaaatgaaaatgtactatttcaaggctcttatactacatctgaagtgctattatattattttaaggtagacactgatgggttaaagatgaaaagtacaactcctagagcaatcactaaaaaaaaaagcaaagaattatagttgataatacaacaaaggagacagcattgactcaaaaaacatattaaataaaaaaaaagaaacaaaagaaagggatgaaagataggagagaagtaacagatgtcacaaaaagaaaataaaaagcaagttggtacttaaacc

SEQ ID NO: 803588 - DNA, 619 bp, Homo sapiens
ctacatctgaagtgctattatattattttaaggtagacactgatgggttaaagatgaaaagtacaactcctagagcaatcactaaaaaaaaaagcaaagaattatagttgataatacaacaaaggagacagcattgactcaaaaaacatattaaataaaaaaaaagaaacaaaagaaagggatgaaagataggagagaagtaacagatgtcacaaaaagaaaataaaaagcaagwtggtacttaaaccatacatatttatcagcacattaagtgtaaatgatttaaatgtaccaattatatggtgtagattgccaactagatacaaagaaaaaaaaagactcattatatgtttcctatgagaaacacacattaaatctaaacataagttgtttaaaagtaaaaagatatagaggaaggaatgaatagatacagcacaggagatttttagggcagtgaaactattttgcacggtagtgtaagggtggctataacacattatcatttgtcaaaatctacagaactgcacagcaaaaacagtaaacttaatgcaaattgtggacttcagttaataatcaggtattgatattgattcaccaattgtaataaataatgcaagat

SEQ ID NO: 803589 - DNA, 642 bp, Homo sapiens
catacatatttatcagcacattaagtgtaaatgatttaaatgtaccaattatatggtgtagattgccaactagatacaaagaaaaaaaaagactcattatatgtttcctatgagaaacacacattaaatctaaacataagttgtttaaaagtaaaaagatatagaggaaggaatgaatagatacagcacaggagatttttagggcagtgaaactattttgcacggtagtgtaagggtggctataacacattatcatttgtcaaaatctacagaactgcacagcaaaaacagtaaacttaatgcaaattgtggacttcagttaataatcaggtattgatattgattcaccaattgtaataaataatgcaagataattatgatacaagaaactgtgtgaaagagaggaggaartggaagaaagttctctgtaatttctactggatcttaaacctaaaattacactaaaagaaacttgttaattttctttaaaaaattaatagaaaaaaagcatactaattgtaataaaaaggaagttgtattgtctatattaatatcacataaatatatgttataataaaaagattatttcttaataaatggataaataaatgaattcatccaaaggatgtataattcaaaatg

SEQ ID NO: 803590 - DNA, 604 bp, Homo sapiens
gaccactctggtgggggatattgataatgggaaaggctaagcatgcataggtaccaaggttgtatggaaaatcctgtgccttctgcttgattttattgtaaacctaaaactgctctggaaaaataattaattaaaagcaaaacaaaacgtaacaccttaaggtgtgctttaatttttttccattgtttatttccttagaggtctcattccattgtgttatatataatatacgttcaatacatgcttgatgaatagcctatccaattttggttaataatgaatccaaagaaacatttctttttgaataaccagaatataatcttatatctttagtgaaaatttatgttttggttaggtttttttttattaagtaattaacgatatttggctcatcatgtragttgattaaaatgtgtaagtgaaatgtatgtttacttatatcatcagatgacaataaataatttgtattattaataaaaaatgtaaagcacacaaataagccataacctcaattaaaaagtcaaacaacgctcttaaagctccacattatcaggtggcattactcagtcagaggtatctttataaactcaaaacctgtaatttg

SEQ ID NO: 803591 - DNA, 605 bp, Homo sapiens
  misc_feature 564: n = A,T,C or G
tattaaaataagtcctccatctcttcatccttctcctctctccaacctctaatggcaaccactaatctttttactttaaggtaaaattttattttactataaataataaatatttattgcaaataggcagagcatagaaactggagaaagagcaaatttaattcacactaagcagaagaaaagacataataaaaattagagcagaaatcaatgaacytgaaaataggaaatcaatagggaaagtcaacaaaaccaggagatggttctttgaagaaattgataaaattgataagcctccagccaggctaactaaagaaaaaaagagaaaatacaaattactaggatcagaaatgaatgacagagcatcactacagatcccctgaacattaaaagagtaattaaagaatactatgagcaattctatgcccacaaatttgataacctagatgaaatggaccaattccttgaaagacgaaattgtcaaaactcatgtaagaagaaacaaacaattgaaataggcctatatctgttaaagaaattaaatctatgataactaatcttacnaaacagaaagcactaggttcaaatgggttcattggtgagtt

SEQ ID NO: 803592 - DNA, 635 bp, Homo sapiens
actcctgggctcaaaagatcctactgccttggccccccaaagtactgggattacaggcatgagccactgcaccagctaggaaaaaattcttaagcacgatgcctagtagaatattctatagaggctaagggaaaaagaatggaagaatatcaatgtttgattgggatcccttcctggcttcaccctgtttctgggccttgcttctctgccttgagtccccaccatccattctcccgagaggaccccctccttcagttcttcacagtgcgcctcaccacacaattaaaaaacctctcatgccctggcccctgcagccattcttcaattgaggtacaacttgcatatactaaaccaatcttaagggtccagacgggtgartttttacagtgtagcccatttccccaggacattttggaggtcccactaattcatagcctcacatttcccaaagcatggtgtatgtggtccagctaataagcagagcttgggcacagtagactctggtgggttctggcttctgagtcaagcgaaatagtgcagggtgtactgtgcaccccatgggcgagttccttcccgggtccctatcagtgtgggggtgaagatgtgcttcctccatcttcctggggcctgctggt

SEQ ID NO: 803593 - DNA, 613 bp, Homo sapiens
ttgaatattttatgttttgctcttgcaggaacctattcacaacagatacaaagaacttcttgctaaacgagcagagcttcagaaaaaagtagaggaactacagagagagatttctaaccgatcaacctcatcctcagagagagccagctctcctgcacagtgtgtcactcctgtccaaactgttgtataaaggactgtaagatcaggggcatcattgctatacactcttgattacactggcagctctatgagtagaaagtcttcggaatttagamcccatctatgagagaaagttcagtcactttatttattttaaatctctctaggatgagtttagaactgtagcagtgcaggtggcttaagtgaagtaactccatatgtaattacatgattatgatactaatcttttaagtatccaaagaatattaaaatacttcaatcctggattcacagtgggaacaagtttctattaaaaggcaaatgctgttacaaatttttggcatctggtaatattaaaaccattttagaaatacactctgtgctcactgtgcagaggaacatcagttttcaaaccaacactgaaattctgtggcatcacatatattgggccttg

SEQ ID NO: 803594 - DNA, 631 bp, Homo sapiens
tcttcatcaatacattgatgtcctcctatttagaaatgcattttttgagagcttgtcacaaagcctttattaacaggctgttaaggaaagttgcagtgtttcctttaaaaaggtgctttattgactttaaatttataaaaggttaacatgtcttgatctagttgaaattatgatttatatcaacatgataattatgtgtacagttyatattccactcatactgtacaccagtaaaagcaaatattcaaagggttctctaagtttcaagattaaaaaccataatgccttgactgaatatcatgattacaaaacaggtattaagaactgtgaaggtatatgctcacaacatatcccttctcccattctcactttattccaaaatctcatttatttcactgacaatttgtttatactttcaaaaatccttttataatttttatagatataactcaaaatgactgcttgggtctttaaaaaattaacagattaaaaagcaatacaagtgcacttaacactgatcaaagtctgaaatgccaaaaagcaaaataaaaatcctctgaaatatatatgtatttttaaatatagaaaaactccaccaatagtagaaacaaagtatgtttaatggttgctt

SEQ ID NO: 803595 - DNA, 670 bp, Homo sapiens
tactgtgttgcttcattagatgcaagacaagctgaacattggctaccacggcatggctagggcttgtggactaaaggaagaaaaatgatgaaagaagtaattgaagttatattctctacaccactttctattccctaagcctaggtaaaaagaactctccaccccctaaagtagagtatataaatcctaaaattattctcatcatgatgttcttctatttgaaatcctttgatataaatccactaactatgtataaggccctacatacacatcattgagctgcaacctacatttcctagcctcatgtcctaccatcctccccttctctccattttgtgaacaaaccatatttgcagatgacatttttttggtgtattagcaacatttatatcattctttaaaacccagttcaaatatattatttttaaaggcttccttaaaactgccaggtaatcaatcagtccattmtcagatcacctataacactttttacatctctctcatagcatttatcatattttaattgcttttacatatctatttcacctattaaacagtgtacatccaggtggtagacactattgttcatttctgtatcctggaataataggaagcactaaattacatgtctatcacgtgtgtaagaaaaacctgatagacttctcaaaga

SEQ ID NO: 803596 - DNA, 670 bp, Homo sapiens
tactgtgttgcttcattagatgcaagacaagctgaacattggctaccacggcatggctagggcttgtggactaaaggaagaaaaatgatgaaagaagtaattgaagttatattctctacaccactttctattccctaagcctaggtaaaaagaactctccaccccctaaagtagagtatataaatcctaaaattattctcatcatgatgttcttctatttgaaatcctttgatataaatccactaactatgtataaggccctacatacacatcattgagctgcaacctacatttcctagcctcatgtcctaccatcctccccttctctccattttgtgaacaaaccatatttgcagatgacatttttttggtgtattagcaacatttatatcattctttaaaacccagttcaaatatattatttttaaaggcttccttaaaactgccaggtaatcaatcagtccattatcagatcacctataacactttttacatctctctcatagcatttatcatattttaattgcttttacrtatctatttcacctattaaacagtgtacatccaggtggtagacactattgttcatttctgtatcctggaataataggaagcactaaattacatgtctatcacgtgtgtaagaaaaacctgatagacttctcaaaga

SEQ ID NO: 803597 - DNA, 625 bp, Homo sapiens
gtcttcggcagggcacaaactaccctgatcaaagttagggagaaaggggaatctatttgaaggagggagctaacaatgtctgtcaaagtactgtgcttaaaatttggttattttgcctgttattttaaggcaaatgacatttaatcagaatttagatacaaaaaaaaggaaaacatcacagcctatcactttttctttccttacattataaaactatgtaatataatttcttatgactgcttttttgtataatagtataggttgttggaaatactatgttgtgtttgcactggaatgccacttttcattcatttaaatgaagtgacaatttcttttttggggaggtgattttcacattgtataagtaatttagttattcttgttataggcaggtttgtaatgaataaatgggattcattttaaagctaaatggttcttaatattatcacaactcaaaggtgaagtatttcatcaaaayctagtgaaaaaaattttgcattctggtataaggaagacttttaatatgttttagaaaaatacatttttgaaaatctgaactttaacacccaattcaaagtatttgaggtttttctaccattgatcttaccttaaataattttaactt

SEQ ID NO: 803598 - DNA, 556 bp, Homo sapiens
actagttggtgagacaaaataaacaataaaagcgtgatcaggtatcgaaagtttggccaggcgcagtggctcacacctgtaatcccagcactttgggaggccgaagcgggcacatcagttgaggtcaggagttcaagaccagcctggccaacatggtgaaacctcgtctctacaaaaatacaaaaattagccaggtatgggggcaggtgcctgtaatcccagctactcaggmgtctgagacaggagaatcgcttgaacctgggaggcggaggttgcagtgaccggagatcgcaccattgcactccagcctgggtgacaagagtgaaactctgtctcagaaaaaaaaaaaaaaagttctataggaatttaagaaagtaaaagtaactgtagagtgattacttataatggaagaagtagatacttcaggcagggttgtttgatgtggtgggaaggtacaaggtacaaagaacttctctttccatcctcatctgctcttttatccattcacccttattcaactatttgtagtatctgagatgttctgtagactttgata

SEQ ID NO: 803599 - DNA, 552 bp, Homo sapiens
cccacgcccagcacatatctcaccctcagtcacagcgaggccacagccctcgattctagaatctgatgtccttgaatctccctatcacgggctcccagtttcaagggcctctggacacatgaatttctactttgagaatcagtttggctgtgtttcggtatctgcattcagcttcacaaggctggtgagcgagggctcgtggttgggacacctgacaggtggcggggaagacctccactggggacactgattttattgctagaagttgctaaaggatgagcaacttagcagctaggacttttaccacttcagtgatagaatgtaaagtcaaccccgagaagatggatctaggatacctaaactgaaagtttttttttttttttttycacagcatattgcaatgcaacagtgaaaggaattttaaatgggcagcttctccttttctcctacctccaggcatctgcctctgaaatgttgaaggtggagggagataggattggcctttctgggaagacctctaagaaaggggtttccattgagaagaaactacgg

SEQ ID NO: 803600 - DNA, 614 bp, Homo sapiens
gctgtgtggctttgggcaagttatttgtctttcctaagtttcattttctttatgtggaaaatgtgagtgataatagatacctctcaagattctggtgatgattaaatgaagtgatgtgtgtaaagtaatgactgtggtgtttggcacacaggatatatgataaataaggggctgtggcagtgattggcacatagtagatgttcaataaatgttgartgtatccatgaataataacacttcccacttgtgtgcattacaaaaccctcctccaaacagctgagcttggatttagacctcacaattgttcagggttgatcttctcattttacagtgggaaatggaggcccagtgaggttatggtaacttgcccaaggcttcccagctggtagatggaatggggtcttagttctcctacctcccagggcaaggttgctgccaccagtccaccctggacagctcccaatctgtgctgggagactgacctcatccttcctgatgagctgcccctgctccttggagaccaggcacagagcctgtgctgacctccccagcacaacctgggggcagaagcaagcgggccgctttctgtccatttcatcttaatacaacattca

SEQ ID NO: 803601 - DNA, 609 bp, Homo sapiens
taaatattgctacaatttcttcatcacctgccatgtcctagatactaagttaggctctttacagctcataccgtgttgtcatacgtatgaccatgctctgttttaccagtaaggaaactgaagttcagaaagtttaagtaacttacacttggccactaagyaggaagtcctggcagggggaaaggcaggcctgagtcagcctgcctttgggccctctcaccacccctggagcccaagcaacataggcctctcatagggccaacagctcccacccctatcacatccttcagggtgcagtgccacggctgggggtcgcttgcctttggactctccagagaggagtccctgggacagctgaggccttgctcacagccctaggtgggccaggaaataacattccagggccttttgtcgagcccctgggatggggacttgcatgtgctgggtgcctatgatgcctcaggccttgttctaggtactttccgaacagttattgtcgtaatccttataacaacaccataacttaatccttataacaacacaatactataaaggtatcattgttccctttatatggatgagaaatactatgtcttaatccctataata

SEQ ID NO: 803602 - DNA, 609 bp, Homo sapiens
taaatattgctacaatttcttcatcacctgccatgtcctagatactaagttaggctctttacagctcataccgtgttgtcatacgtatgaccatgctctgttttaccagtaaggaaactgaagttcagaaagtttaagtaacttacacttggccactaagcaggaagtcctggcagggggaaaggcaggcctgagtcagcctgcctttgggccctctcaccacccctggagcccaagcaacataggcctctcatagggccaacagctcccacccctatcacatccttcagggtgcagtgccacggctgggggtcgcttgcctttggactctccagagaggagtccctgggacagctgaggccttgctcacagccctaggtgggccaggaaataacattccagggccttttgtcgagcccctrggatggggacttgcatgtgctgggtgcctatgatgcctcaggccttgttctaggtactttccgaacagttattgtcgtaatccttataacaacaccataacttaatccttataacaacacaatactataaaggtatcattgttccctttatatggatgagaaatactatgtcttaatccctataata

SEQ ID NO: 803603 - DNA, 564 bp, Homo sapiens
ggctccacccagttggagcttcctggctgctttgtttacctaagcaagcctgggcaatggtgggcgcccctcccccagcctcgctgctgccttgcagtttgatctcagactgctgtgctagcaatcagcgagattccgtgggcgtaggaccctccgagccaggtgtggtatatagtcttgtggtgcgccgttttttaagccagtccgaaaagcgcaatattcgggtgggagtgacacgattttccaggtgkgtccgtcacccctttctttgactcggaaagggaactccctgaccccttgcgcttcccaggtgaggcaatgcctcgccctgcttcggctcacgcatggtgcgcgcacccactggcctgcgcccactgtctggcactccctagtgagatgaacccggtacctcagatggaaatgcagaaatcacccgtcttctgcgtcgctcacgctgggagctgtagaccgaagctgttcctattcggccatcttggctcctcccccccaaaaaccaatatcttaacccaaagcccccatgatcataggggatgaagaatgggc

SEQ ID NO: 803604 - DNA, 582 bp, Homo sapiens
tcaaagtttttatttattcatttatttatttatttgattttagttttcagaagattgactttgatgtatttgggaatggatttacttaggttgattctatatgagaattgttcagcctcttgaatctgtaggtttatgtctcttgccaaatttggaaaaattttgtcattatttcttgaatacttttttagcactactttctttctcttctttttcttgaacttgatgacataaatgttaaatcttttcttatagtcccacacatttctgaggttcttattatttatttttcagctcattttctttctgtttttttttttttacattggacaatttctgttgttttatctttaatttcactgattttcatttcctctccattatgctgttgagctcatctattgtgtgtgtgattttttaactgtattacggtatttgttacctttrcaatttccattttgttcttttaaaatgtattttatttcttttccagcactttctatgtttaaactcatttttttcctttgtttcaagcatgcttatgactgctcctaaagcatatttatgatgtctgctttaaaa

SEQ ID NO: 803605 - DNA, 529 bp, Homo sapiens
atggtgttggtgtcttttggtcgttttttccaattcactttgtgatcttcctggtttttggtgtgatgagtaattttcaattgacatatgtatatttgaggtgttatgttttacatctcagtatcttattttattttttatttcctacttttattttaagttcagaggtacatgtgcagaatgtgcagagttcttgcataggtaaatgtgtgccatggtgatttgctacacagatcattccatcacctaggtatcaagcccatcatccaataactattcttcttgatcccctctctcctcctaccccttccctccaacaggccccagtggrtgttgttccccccaatgtgcccgtgtgttcttatcatttagcacccacttataagtgagaacatgcaatatttgattttctatttctgcattagtttgctaaggacatggcctccaactcccaccatgtttgtgcaaaggacatgatcttattgctgtttatggctgcgtagtttccatggtttagatgtaccacatt

SEQ ID NO: 803606 - DNA, 550 bp, Homo sapiens
tgaattgcatagcggtaaagtctgggcttttagtgtatccattgcacaaatagtgtaaattgtacccaataggtaattttccatccctcactcttctttataccttcccccatctgagttgataatgtacattataccactctgcatgcatctgtgtacccacagctcacctctcacctataagcaataacatgcggtatttgattttccattccttagttacttcacttgggataatggcttcaagttccatctcagttgctgcaaaatacaatatattgttcctttttatggctgagtagtattccatgaaatatayatatatacacacacacaccatacgacatatatatcacatatatatctatgtaaatatatcatgtatatattatctataaataaatgtgatatatatatgacgtcatatcacttttttaggtcaatcattggttgatgggtacttaggttgattctatatctttgcaattgtgaattgtgctgcaataaacatatgggtgcaaatgtctttttgatatagtgacttctttac

SEQ ID NO: 803607 - DNA, 520 bp, Homo sapiens
tagccttgcccagctaattctgtattcattctcagatgttcagtagtttgcaactgcataccgacttttaaaatatagacaggtgcagctgaaaatacaatttgatgcataattgccactactatactttgcatttgtaaatttaattataattacagaattagctattgcattgtatcgaaaaggagtgttttaatttaacattctaataggaagcgtatgcatatttactaagttcattataaaactatcatcaagtaatttttgmatatctgtgccacaaacactattagctcttttgatggaagatgttgtagtgttattttaatagaggcttgttttactcacagtaacacattgtacttagcccagtcctcagatgccctctagtgttgatgcatagtaagtaagcaataaagtaagtgaaaataaaatagatgtatccggcagcggcccttttgtaatcgatgatcacatctcttctgacttagcagacacatcaaatataaggaaaatagtt

SEQ ID NO: 803608 - DNA, 610 bp, Homo sapiens
tctattacaatattaagtattaaatggaaatttaaaaggagaaaaaatagacaaaacagactagagttcactttccagtgttttaagttcacaagcaatgataaaggaatcacattcaggctaattacctgttttgttttgatttctaatgcttaagacctacccatttctgcgttaggatcctggagtggaaaattattcccctcccacaaaaggctagctaattcagaaataatatatatcctatttcttagtaagccacctagaacagcaagagtggctaaaaggagagggtgtgccttctggatactgcacctgatttttggttccggtcaatgagagggagagtactatcatcatatgaatgactgctctggcttcgggaagcattgtttagattcacctagaggcaaacacaaatgcgacaatgtgacagaawactgaattcaccctatcttatgctctaatgggcataaacctctaggttcctattcccaaatagaatcatgaaaaagcaacttataagagttgaataaataccctagacagtgagacaaactaggatattatggcttctatttgtgttccagaacaggagattacaaaggat

SEQ ID NO: 803609 - DNA, 627 bp, Homo sapiens
tcttactggaggtgaatgatgttgtatctctgcttcttcttgtatgcctttccccatctcttcactgcagtgtggccccctctgcttagccatggtttctgctccccactaatgcagcttacacatggttctggttgccatggtgccagcccctagcctgattgaaatgggcttctgagtttagccaccacaagcacatttgttccccagattcctgggaragaccagtttggagatgtccattcctggtccaataagccatgcccagagagggagccatgacatggtactctagactatacctaagtggcagcctagactatatctcaaactgaaatgaaagagcagttcccagagaaaggggctatggacaggcaggcatcccaacacacattcactacaagcttttatttgcaaaagatatcaagtcttcttggaaatggtcactatataaatcttaaagaatagtaattaatattaacaaggaactcatcagatatttattgagaacctgttatgggcagctgtgtggatgctacagtctggttaggagggaaaaggatatacacacacataaatgaaaagtatgtaattattgacgtaagtgtggccccaccaaaaagcaag

SEQ ID NO: 803610 - DNA, 478 bp, Homo sapiens
cacttccaccagctctcctaggctccccagcttctgtgtcaggtacaggtgggacagacatgtcttcagctaacgcccactccgctctatgagggtcttggtgtggctgccaccccctcgggggcccacaggggtggcggtgctgttggcatatgtgtcataactgttgtctgaacatacggagagcacatcggagacctctacaccatcgctgatctctgctgggccagagggagacagaatgtgagtcggggaggaggcastcgtgaggatgggtgacagatggggcaggaaggctgcaccacccagcggggcacttggaggctgatgaaaccactgggctcaggtcgacattgagcctggcactcaaggcccctttggtgtctgctgagcactctagcttcgccttcatctgctgtcccctgggactctgcagccacagaaaaccacctgtgcccctgagcttggcacccatgtg

SEQ ID NO: 803611 - DNA, 633 bp, Homo sapiens
atgatcccaaagaagcatcttttcatgcttttttttttttttttttcttaagatactggatctcactgtgttggccagactggagtgcagtggtgtgatcatagctcactgcagtctctgaactcctgggctaaagtgatcctcctacctcagcttccggagtagctgggactacaggcacgtgacactatgcctgactaatttttcaaatttcttgtagagatagagtcttgttttgttgcccaggctggtctcgaactcctgccctgaagtgatcctcctgcctcagcctyccaaagtgttaggattaaaagtgtgagccaccaagccctgcccatgatcaattttaacttgcaattgcatcatttaagaaaaaagttttattcagagctagtagctacagctagcagtacattcagttgctggtaacaaaatccagacagactgaacaaagtagggatcatattctctcatgtaaggacaaactaaaataaagctgtcctgggctggtatgaaagctcaaaggttaatagagaaccagactcccatctttctttagggcatggctttgcatcttcaagcacacatatgatgtttcctagaactccagacattgtgaacatgttttaggaa

SEQ ID NO: 803612 - DNA, 607 bp, Homo sapiens
tactgaattaatgtttgctcaagttatgtgagaatattcttgcctgtagttgtcccatgctgactgttcataggagctaattcttcagtcatttcacactcaacattgactcctcaacaacaatagcaatattggttccattttttgacttaccaagagtcaaggaaaaccactgaaatcatttgccttgttttttaagtgactattgatttgcttccaatgtcctcaacattttaaaaatattattatgtgtaatttattttagatttttttattattatacttttaagttccggagtacatgtgcagaacatgcaggtttattacataggtatacatgtgccatggtggtttgctgcacccatccacctgtcaccttcattaggtatttctcctaatgctatccttcccctagcccccaccccctgacaggccccggtgtgtgatgttccmctcactgtgtccatgtgttctcattgttcaactcacacttgtgagtgagaacatgcagtgtttggttttctgttcctgtgttagtttgctgagaatgatggtttctagcatcatccatgtccctgcaaaggacaagaactcatctttttttatg

SEQ ID NO: 803613 - DNA, 654 bp, Homo sapiens
atctgttcatcgttttttccactgaggatccaccagtccccagcgttctatttggcctgtcaatcacaacatcagaccacagagacaggcatgtgacccaggcctggacagtcctcccctcccttgggacagtgattggtccaagaaccgagcacatgatccaaataaggccaactagagttttccctgaaatatatattaatgctaagagaacacaaatctatgaattgagttgaaagccatgttccctgtcacaagggaggagaaaaacagcccttctgcaggtgaagcagagaaacaaacagaaatgagatgagaaatcaatttctgatggtctcaagtcctagttatagctcctggttattgaatacctgaaggtctttcttgactctccaaacacttagtttttttccgcactrtgtaagccaacattttcttaattggtttgagctggtttttagtcctatgcaactgaaaagttattccaggtcattcacgtatgtgttcatttattaatttagtcattaatatatctagccaagatttattaaacgtgggacgcctttgttgtataataaagaatttaactgactcttggtccccgggaataagcttcgaaacccttgcgatttcctgagtgatagaagtgtcttt

SEQ ID NO: 803614 - DNA, 514 bp, Homo sapiens
ctgttgacctgcatccttactgaaaacataaacagtcaactaacacatattttgtatgttatatgtattatatactgtattcttataataaagcaagctagagaaaagagaatgttatttgaaaatcataaggaggaaaaaatatgtttactattcattatgtggaagtggatcctcataaaggtctttatccttgtcttcttcrtgttgagtaggctggtgggcaagaggaggggttggctgctgcctcatgggtggcagaggctaaagaaaattcacatacaagtggactcgcacagttcaaatctgtgttgttcaagggtcaactgtactcgaaaacagcatcctctacaaactcacaggagatatctgatctgccaccactgacaatttaagagttctgggtttcaggacctcttagcctatttgggccttacttcctcatctgcaagcactggttgctatgaactcttgttacacctcagctggatactaaagaaacatgtcccagacc

SEQ ID NO: 803615 - DNA, 639 bp, Homo sapiens
catccttggcaagtcactcaacatctctgtgccttaacttcctcatctgtacagttggaaatataacatgcctgccctgcttatctcatggagctcctgggaggatcaaaattaccagtgtatatgaccatgccagaaatcagttaagtgtgaggcacgttaaagcattttaaagcattatgtttggaaataatttcaagtttacaaaaagttacraaatgagaaatggtacaaagaatattcatattcattttatccagatttacttattgttgtagtttaacccatgtattatttattcttattctctgtctcatgtatatatactatatggacatgtggttatatatgtatgtttatacataattttttcctgaaccatttttatattatgtatattatggctctttacccctgaatacttaacagtgtgtttttcctaagaataagattattatatgccacagtatagttaacggttgtatacatttacattgttacaaatactcttatctaatccatcacccgtattacaaattttttgcttggtctaatagtactctttatagcattctcccttccagtgcaggatccagtctaaggggtcagatattgcatttggtcttcatgtctttttag

SEQ ID NO: 803616 - DNA, 642 bp, Homo sapiens
ctattttaaagatgaggaaataagaatcagagaaataatttacctaaagtcacaaagcttttattttgcagaactgatatttgaattcagatctttttaacattggaagaccattctagtcccgctcatctactattcattcttttctcacttcttcctattcattcatccacccatcaacattaaacattttctatacaccaggctatgttcaagacactagagaagtatattaaataacattcagcctgtgtcctagagaagctcagtgattagtgcagatggactgcatataaatgaattactaaattagagtgastgctatttaaaaatatgtgctttacaggtaatggtttattcattaatcaagttaaaggctttatttatttattttaatgtaaactttatttatcaacattagttccttcaagttcaagacacttttgtaagtgataataccggccatttagtctatcttttttaaaaaaattgtaaacatttacttagtatattgggtcaaggtttatatgtgatatactgaatccttgcacatttatttaaagatcagcattattaatcttattttttagtttttatttaacttttgtttaagttcaggggtacaagtgcaggtttgttaca

SEQ ID NO: 803617 - DNA, 642 bp, Homo sapiens
ctattttaaagatgaggaaataagaatcagagaaataatttacctaaagtcacaaagcttttattttgcagaactgatatttgaattcagatctttttaacattggaagaccattctagtcccgctcatctactattcattcttttctcacttcttcctattcattcatccacccatcaacattaaacattttctatacaccaggctatgttcaagacactagagaagtatattaaataacattcagcctgtgtcctagagaagctcagtgattagtgcagatggactgcatataaatgaattactaaattagagtgactgctatttaaaaatatgtgctttacaggtaatggtttattcattaatcaagwtaaaggctttatttatttattttaatgtaaactttatttatcaacattagttccttcaagttcaagacacttttgtaagtgataataccggccatttagtctatcttttttaaaaaaattgtaaacatttacttagtatattgggtcaaggtttatatgtgatatactgaatccttgcacatttatttaaagatcagcattattaatcttattttttagtttttatttaacttttgtttaagttcaggggtacaagtgcaggtttgttaca

SEQ ID NO: 803618 - DNA, 642 bp, Homo sapiens
ctattttaaagatgaggaaataagaatcagagaaataatttacctaaagtcacaaagcttttattttgcagaactgatatttgaattcagatctttttaacattggaagaccattctagtcccgctcatctactattcattcttttctcacttcttcctattcattcatccacccatcaacattaaacattttctatacaccaggctatgttcaagacactagagaagtatattaaataacattcagcctgtgtcctagagaagctcagtgattagtgcagatggactgcatataaatgaattactaaattagagtgactgctatttaaaaatatgtgctttacaggtaatggtttattcattaatcaagttaaaggctttatttatttattttaatgtaaactttatttatcaacattagttccttcaagttcaagacacttttgtaagtgataataccrgccatttagtctatcttttttaaaaaaattgtaaacatttacttagtatattgggtcaaggtttatatgtgatatactgaatccttgcacatttatttaaagatcagcattattaatcttattttttagtttttatttaacttttgtttaagttcaggggtacaagtgcaggtttgttaca

SEQ ID NO: 803619 - DNA, 546 bp, Homo sapiens
ttagatatttattgagggatttccatagattattttgcttcctatccgtattttctatacttgttgactattactagaaatagtatttttattttaaacctaatgttgaaagtgtaacattgagacaatgccatgtgttcaccaaaccgcttcattttctttcttggcatacaaaatgactatgttttgtagccctcttacaactcagtgagactgcaaatggaatatgggtggaaataatgtatatcccttcgagtcctggccacarcatgctccagatatctttcctgctcttctatcccaattttaaagccttgaaaacaaaaagttcaagatggtagagccacagtatggtaacagcctagatctccaagttacagcttatagaagagccactcaaaggacagtaatatgaaaaagaaatcacattgtgctatgttactgaaattgtggggtttgtttttttgccacattcagcctagaatacactgactaatacactgtttccagttgaggcagtttatattcagttttggggagaagagt

SEQ ID NO: 803620 - DNA, 575 bp, Homo sapiens
ttatttacacagactcctgatgatcatttcatatattcatctaataaatatttactatgtgaccacctatgtgttagacattctaggactggaggtataataatatacaagctagataaagtcattgtccttgtggagcttacattctctgggaagaacaatarcaagcaaagaaagagttcgtgtgtgtgtaaagggggttgtaggcatgcacacatgtatatcaagtagtgatgaatgtataaggaataggtgctagagagtgatgggagatacttcaattctttccagctttttagtcataaaacaagtgcctggatagcaactcttagcaatagtacagtagtccccccttactggcagtttcactttctaaggttttagctacttatatttaactgtggtctgaaaataggtgagtacaccacaaaaatataactgtgctataataaaatttatgtgaatgtgggctctctttgtctgtcctttaaaatataattgtttacattattattatttattgttaatctgttattgtgtctaatttataaattgaattttatcaaaggtatgta

SEQ ID NO: 803621 - DNA, 537 bp, Homo sapiens
attataaaggaaatatatttcctctctagtctcaagtgagaatatttatcaaaatttcagttcccattacaaaataaaataagtcaacaatggacactggaggctgctggaagcgggaggggtaagcattgaaaaactgttaggtaccatgctcactactrgggtgacatgatcatccgtattccaaacctagtatcgtgtaatatacccacataacgaacctgcacatgtacttcctgaatctaaaataaaagttaaaattatttaaagtatcagtagacaatatgacttatcctatagactcttttgtttaacgaagcctaaagctattgtataaagcccgtagctaactataagccaaacttaaatgaataaaataagcacaacatttagctcttatatctatcaatcatctacctatcaatcaatctttctatcatctgtcaatcatccattgagctaggcattcatgaggcttcagatgacccctgtcatccgaaagtgaatattttctataaaatattggttttctaggtc

SEQ ID NO: 803622 - DNA, 585 bp, Homo sapiens
tagctcttatgccctcacattcagcttcctggtgctgttatgatgcctctaactgctcaggactgtgcccacccagcttttccaaaaggaacatgccccttcttgtctgaaaatggtagattctaactgactccttccatcaagtgagcatcttctctctctaaaacaggattctgtaaatagaactactcagtgctggccgkggccccaaaaggattcattcaagaggtggcaatgtgttcccacattgcaaagtgaaatgatggtacgttaaggatttgcaaaagtggtgatcccaaacccgttttgtgagccttacttcaaccccactcctggctatgaaagagtggaggttgaagaggcaaaaagagagggtttgtttagaaagtgctatgcttcgagttccggctcccttcaaggagttcattctgaggcatttgtacaaatcttgtggagtttaaggaacaatatagactggcattcaattccaatctaaaagaaagcattcaggcagcttgctgcccatataggcatgcaacccaagagagaggacagccacaagaaaaattgcccctccagtatttg

SEQ ID NO: 803623 - DNA, 664 bp, Homo sapiens
atcatacccttggaaaactattccattcttccccagagtctgtcaacagagggatacacaaagtgatggagctttcatatttcagctttaacatctgctgcatggcagcccatttatatttttatctaaggaaacatctataaatattgataaagatttcctctttgcttttgtttccaggctgtttatctcggtatttatccttttggctatacagtatctctggatgatctggaactcagcattttcctaatacggcttgttacaatgccaaaagcaatgcctgcggttctgctactaggtcactgtggtgtgttcctcaaagccagagtctgttgacactgctgagattggctgttttcttctctcttactttccctcttttccatgcgctactagtttttaaaagcagtgaataccaggattttaaatgagagaktattttacacatttattttagtcatgtctttttttttttttttttatgaaacctgggagagagtgaagagaaaattcacaaaaagtttgagttgtggcttagtgttgatttaaaaaacccatagagaagtcaataaacataagttggcaacagaggtatcaacataactggattgagatttcagtaaagcgcattattaaattataaaattttacctacttgcat

SEQ ID NO: 803624 - DNA, 628 bp, Homo sapiens
aaaattgtgaatgactggaataaacggcaaattaaaacaatgagatgtctgcacttatggatgagcaaaaattagaaagacctaaaaatgccaagtgttggcaaggatgtgcggatatgggtcagtgaggaatgggggggcggggtgggggtggcgttctgaataatatcttgtctttgttgttaaattaggtggcccatgtgtctcatgccacccaacagcaggactctgaggtaggcattccaaagaagagctcataagccgcatgtgggaggacgttcattgcagagtgattccaggtggcagggagctggtggccacctgggtgtccacccyccgaggagtaggcagtaagctgtgggggagacgccatggcaaaatactgcactgtcattagagccaacaatacattatgcatagcagcaaggagggatcttaaaaacagtgctcagtgcaaaaagtaagaaacagaaggagataaaattatatttttgtaaataaacaagacacattacccaagcacacctgcaaaaagatacacattaaccaccttagatcagttggctctggcaggggtggaatgggaatggggatagagggaataaagtgatcaaaccatgatggtgat

SEQ ID NO: 803625 - DNA, 605 bp, Homo sapiens
cactgcatcgtcatgtgtcctgcccttgtccttgaacaggcaggctgcagtcttagagtactcagtttgcagaagagaagaacaagcccagcaataattgcagctggcatttatgaggggttcactgtgcctggcactgtgctaggtgygtcataagccttggctcattcatcttcacagcaatcttgtaaggattcctttaaaatgaacaccaaaaaattaccttaattgttttcatcccattacaaaagtcatacatggccccttaagtattcacacattacagaaatataccagagacaaagtccctactcattccatcccccagtgacaccccaggatgcttttcctgtttccgctttgtccgttgccatgggtagaagttgcacctgctgccgtgactatgggctgggatcagagaggcgaactcacctgcctgggccaccagctggttaggaacgaggcagaggcggggactgtgcttctcattagcatggtcacctgtggctgtggctgcggctgctgagcccagagcaggatacgcaccaccctggatggtggggccctggctgtgggaactggattggagttggggaggtgcttta

SEQ ID NO: 803626 - DNA, 495 bp, Homo sapiens
ctggaaaaactttgggagtgacctccagcatactggattcacaggcagctgcttctctttccaggggtgccctaattgacatctgaggggtcgggatggggaccaggagcgaccacagcaaggaatgcagcaaaggaggygctggcggcagcagccctgactcttgggaggcgctgtgggactccggtgaagtgactccaccagcggctagggctggacagttagatcctttcccctgtctccactcactgacacagagagcccaatgtcggatcacccctttctgactgttactcgggaggaatgctgctgtcctagagcgtgatagctcatgtctctcagtagtgagatggaggtagagctacactgtcctggctgcctcactctggctggacaccaggacttcgtcatttatagccgatacagtcctgaccactactaagaccccaggtcacagggacagcatgcctggctcaaggggcaacacacccccaa

SEQ ID NO: 803627 - DNA, 640 bp, Homo sapiens
aaccctaagaagcaataaacacacaaatctgattacctacggcttgactcctatagctagcaaacaggtgcataagagtttcattaaaatgagtattacacaagagatggtttgtggggatgaaggaggatctaaccaattagtagtgacagacaaaggatkcctgtgttttggtttgggggaacaggttaggcctgtttatatctatcccaaaataagtaaaaattttgaagaataacataactaaaattctgagtatgatttctaaagacacatatagaacttggtttaaaatgtaaaatggaaattataatcaaagcttgggcactggcccagagttttcttctacagttcctgtgtactgtatatacaggttctttaatcttgtcaagaataaatattagcttgtgttaagattcatatatagttaatgtattcaatatcattttcaataattgctttaaacacaatagccaaaagcaaatgagaaagctatcactactttgagataattcatcagaagattatagtcccacttacctgtaaacgcttatccaaaaatgccattcctccttggagtccatagctatattcataagggaaactccaatctctaaccaaaaacatcagtgtctattta

SEQ ID NO: 803628 - DNA, 655 bp, Homo sapiens
gtgtcttatcaaagtcatatgaggaatggtgtttctttgcagtaagccaaatggaacataaatgattaaagagatttaatcgtagctgtttacggaatcatagagccctggtgaaattcaacattgtcaatgttttgatagctgtatggattacatacatgtatgctattttcgaagttcatccatctgttcacttaagaagtgtattttattgtgtgcaaattttacrtcattaaaaaacacttattttcacacagacacaacaaagcaaaacatcaattttagtaaatacatctgtccagaagaaatactccttctaaaataaaatctgaaattttaaaatgtataatcttcatgaatattttgcaaatttttataataacattaggattacttctggttctgggtttagttttcttctttaaggcagcacaacagagtaagagtattgtatgtatgaatttctgtacatacatgtgtgtgtatatttgtgtgtgtgagtataggattgtgaaaaagaaatagaatatttcccattccaatgatttaaaagaaaaataaaatgatcaatctttacctaagacaagttaagttttttgacagtcaatttttctggaaacttccaagctgtctctgtgtaagaaaatcttcatga

SEQ ID NO: 803629 - DNA, 615 bp, Homo sapiens
cctacacatcctacagaatcgtgagccaattaactttcttttctttataaattacccaacataaggtatttatttatagcaatgcaagaacagcctaaaacaaggtatcataacatttgtgcatcctggaaatttgagccaacatagctgacctggaatgtcagggagatgtacaatatacttggcatgaaattattttattggatcaagccattgagatatttgggatgtctattaatgcagcaaaacccatcctatwctacctatttcttctacacctgtgaaatatttatggtggtttttagaatatatttggatatacttgaatgttccctatcaaataatacatatttaagtattccaatgggtgaaatttggaaatctctgagtattatggatttccaaaccaatatagttatttgaagtatgtagaataatatatgagcatggcagtaatatgctaaataatttaggaagtctctcatagtgtttaaaatgcacatacaaagtatttttatcttcaaatgtttagtttcatgaatatactagtagcattacacgaaagaaaatatagtgattagataagacgtagttattcattttttttcttattta

SEQ ID NO: 803630 - DNA, 635 bp, Homo sapiens
atacatacatgtaaccactcattgcaggttggagattatttaaatgctggcttgaaatgttgctgagcattaggaggaggataaagtggggcaatattttacagcatcctgcaccactttccttatcccatacaattactaactattttcctgagacaaatttccaagtcaaattgtaaatcagccatgagtcttacacaacaaaatgaactgatcaagctctccatagtgtcaagtcctcaggtagagattttagaaagtagtttaggaggcaggctaaagaatatarccagccagcttgtcttaccattaactttatttccctttctatcagggacaggtaatcttgtttagctggccacttagtcttaataagccaacatgaaagctctaatgggaatgctaaaaatctcatttataagagtcagatgatttctggttactagcggcacaattttctatctccagttgaccaggtatttgacgtctactggtgtgagaaaaatgactttataatggggaactgaacaaatgtttgagttttattttgtcttgagggtaattattactagagttctcttgcccttgttttgcctctcacactaaaaacaatatttcaaaactgaaatatgtgc

SEQ ID NO: 803631 - DNA, 598 bp, Homo sapiens
gccaggatttgaagtggattctagtcataatacaactaggttgcagttacacttctctgtgattctatgctctctcctccttcttgatttgtctttattttcagactgtttataagatggattgagcattttccagcatcacatccagacatgacaaatccagaagacaaagaatctgtattcctatgactctttcatrgaattgagaaaatgtctctttaaagttcctcagatttttttcttatattattcaccagaattggttgaatatccatttctatactaatcatgagcaagcaaaataaggttttcatgattagcttacatcagtccttggaaagtcaagcatcaagaatatttatagttatccattaaatacacacaaaggcttccaataatctgtttactttgatatcttcctgccatctagtggattatgcatctggcttatactggggaaatgtaggaaattttaggttttccagccatatttacatgccaaagtggtctagatgcttactcttaacttctttaaatagttcaaaaaattacactcaaggttatcttcgcatagaaacaccaattctagcatttgttg

SEQ ID NO: 803632 - DNA, 577 bp, Homo sapiens
agttcttctgtgtccctgttcatatactaaatcctctcgcacacacctgccaaagacgtgctacagttctcagtgcacagcatgtgctcaagtatggcaatgaccttctttaatattttaacatttgtcctttgaaggcttatcataagraatctttatatatgtgtgactatttgtaatgtcatatttgtgtctgtgatgaaaacaatggacttattcccgggtgcagcatttgattttccctatgttctggctagcagtgttctattaaacaatacactgcctcccgtctaaagctataaaagaggcatacacaataatcttaaaagcaggcagggctggttccatgtcatttgtgtagccaaaaagttcccctcagctgccacaaattcagtagaaccatcaaaggtaagttctgatcattgaatagtatgtccaacccaatccagtaatttacagccttctagggtaacacaatccctctttatcagattcctcattattcccagtgtcacctgcacccttctgcactatgcagagaaggtagtgtgattcgagtggagtgtccatgtgatgt

SEQ ID NO: 803633 - DNA, 586 bp, Homo sapiens
ctttatcagattcctcattattcccagtgtcacctgcacccttctgcactatgcagagaaggtagtgtgattcgagtggagtgtccatgtgatgtgtttcattgtattcttttcttctcttctgttctgtttctttcccttctctttcctttcccacctcattctgtttttcacttttttcttcttcatttctttctttctccctccctcctttccttccttcctaccttcttttctctccctccttctctccctttcttcctttcttccttctctttttcccacctgcctgccataacgatcatgtcttgcctgaaaggacaatgattaatagcatttccttacatttgtatagtttttttaagtactgtcctctatccatttcaacgatttcctttgtcgtctcacttgatccttcawaccagcccccatgaaatgaagcagagcagccatttctaaaattattgaaaaggaggtcacgcaatgagttagtaacaaagccaggacaatgagccatgccactcatttgtttattcattcattcatttattcatattgagttctgcactgtaaaattcattacagg

SEQ ID NO: 803634 - DNA, 541 bp, Homo sapiens
ggaaaccatagctttattgaatagcatggaagcaaaaatagagaagcatccatgaagttagaactgagctcccaaggcagatctgtgaagggaataaggggcatcaagctgctgcctagttagaatgagatcattagaggaacgtgattataatcaagccacttttgtgcatgacaccaggatcccacatctgcctgagactgcaagctctgaagagatgmtgattgaagttggaaaaaatgataagagtaaattggagccagataaacaattttgctttgaattaagtgatgagtgtacctcagaatagagagcagcctactgtagaaacagggtcaagagggactatcaaaagctcctttgttctagccccttactttccggaagaatgacacctaatccaacacaggtgaaagttaagctatgcctaacttacagcaaaggagttccactaagccttctaggcaatggtttatacaaatatttacctgataggcaaataagagtgagtgccacgcttttccctccatttactggggga

SEQ ID NO: 803635 - DNA, 595 bp, Homo sapiens
tagaacttcataaagccttggaagaagtcagacacattcaaaatttatttttgctttaaaatgacatttgttcaaactgaattgatagaaatgaaaattagttatttcagagaagccacaagctccaggcacatgcaaggtgtttggacagataagtgtgatgagtactgtatgttggtgttgaaagggttgggaagggagcccacacacctatgtagagggaatcacactatgtgtctggcttcatgtggctgataaaataatggagccaggggaaggagatagttccttttgaaagggcttcaccaaatttccttccttcccccactagccaatcaagctgcttctctttgtcctctgctgagaggtgacttttcattcttctccaggtgcaaggygtcaaagaaatggaatcataggggaagaagcttgcccctgtagagggaaaatgagctgcactgggtttggcaggatttggtggctgtttcatgttggctattgtaataagttaagggaatgggaattatgctaatgaacaatactagtcagttgcctcattcctttcccctcatctgaataaattcttgggctcagt

SEQ ID NO: 803636 - DNA, 617 bp, Homo sapiens
aaggtgaagactccttccaccctcattcccgccccagtggattttagtgaaaactgatctttgctgattcattggaataagtgattagggctaagacccaaaactaaatagttgtgtaagagaggcccaaaccataaatgagtaaattatctctagcttctttccytgggcaccaaaataaattctggcatttgctgctcttctgagatttgcttggtcaaatctctttataggtctgcagatctcctggaaatgaccaaatatttaacatttttttctctttctctcataactctataattgttatctattgtacttatttaacatacactaagagctgaaatcttgtctcaaactaataagggatatataatgtattatcaaaatactatgagaatagcctctgtccaaaaactgttggctttctgtttgaatagaagaaacttgcgcatagaatctgcctcaaatcagccaagacatttgccatcttattttaccacagtccaccacttgtgcctaggtgatataataaaagacggggactaagcttgcctgaaggcacatttgtgcaggttactaactctggatggaagcagcctagtgacctgatgagtaga

SEQ ID NO: 803637 - DNA, 534 bp, Homo sapiens
aaccagtaaatattagaatgaaaataagacattaggtttttagctctctttccctgtgttacatggctagtgaaacaggtagtagtaaaatattaaggatatggggaaagtaccatacatcttaaatactaatttatttatttatttttaaattacctgacaattttgtcagcattcctgtacctattaatatctgtggttgcaacattagaactctccttgtttcaactattctatgaatattttcctaattctaccaaactcactcttgcattaagaattttttttttttaacttttattttaggtttaggggttcatgtaagggattgttatataggtaaactgcatgtcatgggaactkggtatacagattatttagtcatccaggtaataagcatagtactcaataggtatttttaaaaaattttctcccccccccccaccctccaccctcaagtaggccccagtgtctggtgttcccctctatgtgtccatgtgttctcattgtttagctcccattcataagtgagaa

SEQ ID NO: 803638 - DNA, 576 bp, Homo sapiens
aaaatcatgacaattgtaacagtttgtttacatggaatgaagaaataaaatcatttcatcattagaggagtatttttatcatgtaaacagaaaatggagcaatatagtaagtgacttatggattatatagaaataattcatggccttcaactttgaagtatasagcagatatcccagcagaaggagatgatggaattcccagataagttttggagggcaccataagaaaggtatttcttgccttacttccgagactgaaaaccctgtagagaagctaactgtctggtgaggttatgcacaataagattaaaaaaaaaaatctgagtggaatacctaggcagatgggcctaagaccatcagcaaaatttaagtcctcacagggttgtataaaatcttcctgtcctatgtcccagggagaagcacaaaggctgaagaggcagaatgtgggctgttgaccagtgatcatggtgaaaacaagatacctcagcaggtgtcagtgtatgcaggcaaatgccctaagactagtgctgaagacacccacagagaacagaggacaatgatgggccagataccttg

SEQ ID NO: 803639 - DNA, 576 bp, Homo sapiens
aaaatcatgacaattgtaacagtttgtttacatggaatgaagaaataaaatcatttcatcattagaggagtatttttatcatgtaaacagaaaatggagcaatatagtaagtgacttatggattatatagaaataattcatggccttcaactttgaagtatacagcagatatccyagcagaaggagatgatggaattcccagataagttttggagggcaccataagaaaggtatttcttgccttacttccgagactgaaaaccctgtagagaagctaactgtctggtgaggttatgcacaataagattaaaaaaaaaaatctgagtggaatacctaggcagatgggcctaagaccatcagcaaaatttaagtcctcacagggttgtataaaatcttcctgtcctatgtcccagggagaagcacaaaggctgaagaggcagaatgtgggctgttgaccagtgatcatggtgaaaacaagatacctcagcaggtgtcagtgtatgcaggcaaatgccctaagactagtgctgaagacacccacagagaacagaggacaatgatgggccagataccttg

SEQ ID NO: 803640 - DNA, 540 bp, Homo sapiens
cttttcatatcccagtggcaccttgaatgccagcaagccagaaccattcactcccctggaaagtgggctgaagccagggagccaagtggtctagctcagcagatcccattcgcatggaacccagccagctaagatccaccggcttgaaattctcactgccagaacagcagtctgaagctgacctgggatgctcgagcttggtggggggagggccatgcaccattactgaagcttgagtaggtggttttcccctcacagtataaacaaagccactgggaagttcgaacttggtggggcctaccacagcttggcaaagccgctgtagccagactgcctctctaccttcctcccctctaggcagagcatctcttaaagaaagacagcagcctcggycaggggcttatggataaaaatcctatctccctgagacagagcacctgggggaaggggtggctgtgggcacagcttcagccgacttaaacattcctgcctgccagctctgaagacagcaatggatcccccagaacagcgctcgagctc

SEQ ID NO: 803641 - DNA, 641 bp, Homo sapiens
aagagaactccctgccacctttttttttttttttagcattcctttggagaacttggaattataaatgctttctgtgactgtttgagctgcatgtaaatctttttaaaagctaaataagcatcttaacagttttgcttcccaggaatgcctttcttgtgggcattaaaatgtgaccatcagggagggtgctgccctgtctccctgcctctgagggagtttatcttaggtgccagctccaagctggaactaactgctcaccataaaattaaagtcttatttttccatggttagaaacaattaacatgtatgtaatrgattgtatctgtctagaaacataattggtgagatttctttgtgttttgcaatctcttcagtggactgtctgtgacccacatcgcagtctggtttaatgcttgattattaataagacttcattcatttttccattttgtgatgatgatcattttgagttagcaggatgttttacttttaattatttccccagcagcaataatgggggtaagaattggacagtctgttattgactctgtgtaggtaaaatgattctcatttcaactgttgaaggacagcagagtcaaagaggatggtggtttgatttgcatctgagagttcatgatata

SEQ ID NO: 803642 - DNA, 544 bp, Homo sapiens
agaatacatgaagtattctatgtaatgaatgacaaatacttccaagttgccagagcatacattgcaagggagaaagtggcaggagatacaactgggaaattaagcagacagtgtgcttcagtctaatggtaaatggagtcaagtgccctcctccattgatctctgtttccctttgacagtttctgggaggattgtccattaaaattgacatctgcttaatgtgtacatagtacagatgagtstcccatgtgacccacagggttgcagtatttccagaagtggaattagaaaacaaatacgctggtcttaagtgcagcccattgtgaaccgctgggcgaccttccccagaaagagagtattcatctcagaggggatcctcatgcaaattagattcaggaatttggcacaacatgcaaccacaaatatataattagcacctaatatgttgcagaatgtctgacaagaccctgcttggctaataggagttttcatcacaagtgtgtttatggacaaggtccatggtgatggaagatacacagacatt

SEQ ID NO: 803643 - DNA, 544 bp, Homo sapiens
agaatacatgaagtattctatgtaatgaatgacaaatacttccaagttgccagagcatacattgcaagggagaaagtggcaggagatacaactgggaaattaagcagacagtgtgcttcagtctaatggtaaatggagtcaagtgccctcctccattgatctctgtttccctttgacagtttctgggaggattgtccattaaaattgacatctgcttaatgtgtacatagtacagatgagtgtcccatgtgacccacagggttgcartatttccagaagtggaattagaaaacaaatacgctggtcttaagtgcagcccattgtgaaccgctgggcgaccttccccagaaagagagtattcatctcagaggggatcctcatgcaaattagattcaggaatttggcacaacatgcaaccacaaatatataattagcacctaatatgttgcagaatgtctgacaagaccctgcttggctaataggagttttcatcacaagtgtgtttatggacaaggtccatggtgatggaagatacacagacatt

SEQ ID NO: 803644 - DNA, 544 bp, Homo sapiens
agaatacatgaagtattctatgtaatgaatgacaaatacttccaagttgccagagcatacattgcaagggagaaagtggcaggagatacaactgggaaattaagcagacagtgtgcttcagtctaatggtaaatggagtcaagtgccctcctccattgatctctgtttccctttgacagtttctgggaggattgtccattaaaattgacatctgcttaatgtgtacatagtacagatgagtgtcccatgtgacccacagggttgcagtatttccagaagtggaattagaaaacaaatacgctggtcttaagtgcagcccattgtgaaccgctgggcraccttccccagaaagagagtattcatctcagaggggatcctcatgcaaattagattcaggaatttggcacaacatgcaaccacaaatatataattagcacctaatatgttgcagaatgtctgacaagaccctgcttggctaataggagttttcatcacaagtgtgtttatggacaaggtccatggtgatggaagatacacagacatt

SEQ ID NO: 803645 - DNA, 628 bp, Homo sapiens
agaagactcagacagcttccttggaataaaaggttgctgggctgagcccctaccagagtcaggagaaggggaaatgttaccctgggtgtaccggtgccttacagggactccagccctgaagcaggcctgctggctaagacactgttcctgacttgaacccctgtgccaaacacctcccttggaggagtgctgcccctctgccctttactcccacacgacactggccacaatccaagaagaagaacatcttacgggaacactggagrgagatataccgctgggaagggcattcagacctgcagggggagacacagaaagtgggaaaagggcacattagctacctcctccaggaagccttcctgattgactcctgctcagttcctatcctgtttccaaggaagctaccctttgtacaggaagcaggagattctgagcttcccctttccccatgtgacattgtcccttccagtgctttgtccagaatcggagtggctcagtgcaaaccatctccactctcatcccctcaactagtttccttgtggcacattgcagacattggcccagatccatgttcttcgaacttaggacttcattgtcgcagcatcttttcacaactaaacaggtggtc

SEQ ID NO: 803646 - DNA, 628 bp, Homo sapiens
agaagactcagacagcttccttggaataaaaggttgctgggctgagcccctaccagagtcaggagaaggggaaatgttaccctgggtgtaccggtgccttacagggactccagccctgaagcaggcctgctggctaagacactgttcctgacttgaacccctgtgccaaacacctcccttggaggagtgctgcccctctgccctttactcccacacgacactggccacaatccaagaagaagaacatcttacgggaacactggagagagatataccgctgggaagggcattcagacctgcagggggagacacagaaagtgggaaaagggcacattagctacctcctccaggaagccttcctgattgactcctgctcagttcctatcctgtttccaaggaagctaccctttgtacaggaagcaggagattctgagcttcccctttccccrtgtgacattgtcccttccagtgctttgtccagaatcggagtggctcagtgcaaaccatctccactctcatcccctcaactagtttccttgtggcacattgcagacattggcccagatccatgttcttcgaacttaggacttcattgtcgcagcatcttttcacaactaaacaggtggtc

SEQ ID NO: 803647 - DNA, 601 bp, Homo sapiens
agtggcaaggatgtgtcttctctaagacacagagaaggtcaggaaggcttgaggtctgcatccctctgtcataggctaacagtccatggggtgctctggacagaccttgaccctgtgtctgggggctcctagccagcctgtttggggcctgcttccctaccaagctctccctgggcccaagccctgtctgcttgctcacatcctctctgatcctcatccttaggaaacttagcctctctgtccagtcccccgggatctgttccacgtaagcgccgcctttgggtctactgcttacttgttttttgtttctaattagctccccccttctactgcagaaatatattaaaggcagctggctttgatgcccagaaaaacgaagcgtcggaaaggcttgtcgggcatcatggccctgccmatctccctcatgttattctagccaccggggtctctctgccactcagcccctccccagtattcactggcccttcgcctgcctcccctaagttgcgtttgccatttcaagattttaaaaacacatttccccattgccccccccccctttttttaattagacactgaacagaatgttggagattttctt

SEQ ID NO: 803648 - DNA, 601 bp, Homo sapiens
agtggcaaggatgtgtcttctctaagacacagagaaggtcaggaaggcttgaggtctgcatccctctgtcataggctaacagtccatggggtgctctggacagaccttgaccctgtgtctgggggctcctagccagcctgtttggggcctgcttccctaccaagctctccctgggcccaagccctgtctgcttgctcacatcctctctgatcctcatccttaggaaacttagcctctctgtccagtcccccgggatctgttccacgtaagcgccgcctttgggtctactgcttacttgttttttgtttctaattagctccccccttctactgcagaaatatattaaaggcagctggctttgatgcccagaaaaacgaagcgtcggaaaggcttgtcgggcatcatggccctgcccatctccctcatgttattctagcmaccggggtctctctgccactcagcccctccccagtattcactggcccttcgcctgcctcccctaagttgcgtttgccatttcaagattttaaaaacacatttccccattgccccccccccctttttttaattagacactgaacagaatgttggagattttctt

SEQ ID NO: 803649 - DNA, 578 bp, Homo sapiens
atatacaaatggccaataagcacatggaaagatgctcaacctcaataataattaggaaaatgcaaatcaaaactacaatgcgtaccacctcatatcctttaggatagctgctataaaaaaaagaaagaaaataacaagtgttggtgaggatgtggaraaattggaaccactgtgcactgttgctaggaatgtaaaatgcacagctgccatggaaaacagtacagtggttccttaaaatattaaaaatagaattcccatatgatccagcaattccacctctggatatatacccaaaagaattggaaatagaaccttgaggagatatttgtaaacccatgttcatagcagcattattcacaatagctaaaacacagaagcaacccaggtgttcatcagtggattaatggataagcaaaatgtggtatatacacataaaggaatattattcaaccttaaaaaggaaggaaattccaacacatgcatgaatcttgtgcccagcagctgtgagatggacagaggctgaggaggaacataagagtgactgtggtgaggttgagcatcctggccaggcacggtgg

SEQ ID NO: 803650 - DNA, 617 bp, Homo sapiens
gctgaggcaggagaattgcttgaacccgggtggtggaggttgcagtgagatcgtgccattgcactccagcctgggcgacagaacaagattccatctcaaaaaaaacaaaaaagagtgcctgtggtgaggctgagcatctttccatgtccttacttgttccagctacaacatggatgaaccttgaggacgtgaggcyaagtgaaataagccagtcacagaaggacaagtactgtatgattccactcatatgaggcacgtagagtagtcaaaatcagagacaaaaaggagaatggtggttgccaggggcaccgggaaggggggaaatggggagtgagtgtttaatgggtatggagtttcagtttcacaagacgatgggagttcttgagatggatggtggtgatcgttccacaacaatatggatatacttacctcgctgctgaaatgtacacttaaaaatcatagtacattttatggtatgtgtatttaccatactaaaaaaaaactgggggggaaatgggtataggtgacgggaaaaaacatgttgaccctaactcctgaccaagctgggctcacctgatgagggtgttcttacccaggccaaggaagaataacccaaa

SEQ ID NO: 803651 - DNA, 617 bp, Homo sapiens
gctgaggcaggagaattgcttgaacccgggtggtggaggttgcagtgagatcgtgccattgcactccagcctgggcgacagaacaagattccatctcaaaaaaaacaaaaaagagtgcctgtggtgaggctgagcatctttccatgtccttacttgttccagctacaacatggatgaaccttgaggacgtgaggccaagtgaaataagccagtcacagaaggacaagtactgtatgattccactcatatgrggcacgtagagtagtcaaaatcagagacaaaaaggagaatggtggttgccaggggcaccgggaaggggggaaatggggagtgagtgtttaatgggtatggagtttcagtttcacaagacgatgggagttcttgagatggatggtggtgatcgttccacaacaatatggatatacttacctcgctgctgaaatgtacacttaaaaatcatagtacattttatggtatgtgtatttaccatactaaaaaaaaactgggggggaaatgggtataggtgacgggaaaaaacatgttgaccctaactcctgaccaagctgggctcacctgatgagggtgttcttacccaggccaaggaagaataacccaaa

SEQ ID NO: 803652 - DNA, 622 bp, Homo sapiens
gcgtgcctttgtatattctgttccttctacttacaatgcccttcccttctttgtttattccagttctcaaccctggttgtaccttaggatcacatgaagagcttcagaaaaaaaaaagaaagaaagaaagaaaagaaaaaagatgcctggaaatcaactcagccacattcagctctaaacccgggcagtgtagccaagggcagtgtagccaaggtatcggtaatttggagaatctcccccactcattctgatgtgcagccaaggttaataaatgctatcttkgtccagctgccactccacgtagacccctttctccagactccaagagcgcctgtcgcctgtcgttggcactaattgggcgcatagcacattctgtttcatgctcgcttcattaagattctcctatcggaaaagtctctgtgctaccccatgatctgtcctcacctgggatggtgaggacggccgaaagtgctggctgatggtttggtatgtttgtctcgaggagcggagagaacacagctccaatcaccaggccttgaaactgtgctgcgtggggggcatgaaagggatggaaaacccagtcccatcaacgtcaacagcaatgaatcatcctgattgtatc

SEQ ID NO: 803653 - DNA, 527 bp, Homo sapiens
aataaataaaacagaaccttaaagtttatcagacagaaggaggaagccgagcccaatgtgtagacttgttcaaagtcctaatgaaagctgagacagacctcctttcctgcgttaccatcctcaggggaagcagatctagttaagaaacattaatatatagtgctggtcaggcaccgggcaaaaactaacaaaccctaactcatctaaccattatggcaaccttatgaggcgtcaatgtcattctggtgtaatccacragagggtggaagtgcagagaagaaattcccccacagttatacagcaagtcaggggtagagctggtgtttgaacccaggaagcagggggctgagaatggaggtgcataagccctttgatctgccacctctcaatggcgggagggaaggagcccgttagaggtaaggtcctgcccctgcctctggtggcctcccccggatttggagccgctcagcaggcaggtctcacagtggtgccctgcaactgagtacacttgccccggacagccagac

SEQ ID NO: 803654 - DNA, 595 bp, Homo sapiens
atcagacagaaggaggaagccgagcccaatgtgtagacttgttcaaagtcctaatgaaagctgagacagacctcctttcctgcgttaccatcctcaggggaagcagatctagttaagaaacattaatatatagtgctggtcaggcaccgggcaaaaactaacaaaccctaactcatctaaccattatggcaaccttatgaggcgtcaatgtcattctggtgtaatccacaagagggtggaagtgcagagaagaaattcccccacagttatacagcaagtcaggggtagagctggtgtttgaacccaggaagcagggggctgagaatggaggtgcataagccctttgatctgccacctctcaatggcgggagggaaggagcccgttagaggyaaggtcctgcccctgcctctggtggcctcccccggatttggagccgctcagcaggcaggtctcacagtggtgccctgcaactgagtacacttgccccggacagccagacggtggcctggccaggacgcttctgccacagctaagggccgctactctttcctgccctgccggagccccttctcgcacgagggaagtggagcccga

SEQ ID NO: 803655 - DNA, 611 bp, Homo sapiens
ggcaactgtgtttgttctcactctggcatgaatatatttgtgtgtgggtgtgaagttttccatataattttgggaactgtcccttctatcaaaatatagcccctctaaaatgtcagctggggaggggactgtcagggtttaaggtgggcgtggggtagaacacgccgcctgactctcttccccggcgtttcatttttcccttgggatttcctggcatgctggcttgcccaccccaatacaactcctgtcgaagaggagacttctaaatacatctgagccaacctgtcattttcaaagacatttccctagatactaaggaagaacaaaatcaatgggaaacacaaaaagcatgaggcctgacctgcctgtttttcaggtccttcttttgttagccatctctccaggctcttcygcctcagtgtgcaccttccgtgtttctgcagcccctttcctggattcccagctccttggctctggctttgtcacagcatggaaggcacaatatcgtcccagcattcccccagtggagctgttccctcctcccagttcccacaggtcaaggtccttgtgagcaaagctgttcccattcatggtagttacctgtgctcact

SEQ ID NO: 803656 - DNA, 611 bp, Homo sapiens
ggcaactgtgtttgttctcactctggcatgaatatatttgtgtgtgggtgtgaagttttccatataattttgggaactgtcccttctatcaaaatatagcccctctaaaatgtcagctggggaggggactgtcagggtttaaggtgggcgtggggtagaacacgccgcctgactctcttccccggcgtttcatttttcccttgggatttcctggcatgctggcttgcccaccccaatacaactcctgtcgaagaggagacttctaaatacatctgagccaacctgtcattttcaaagacatttccctagatactaaggaagaacaaaatcaatgggaaacacaaaaagcatgaggcctgacctgcctgtttttcaggtccttcttttgttagccatctctccaggctcttccgcctcartgtgcaccttccgtgtttctgcagcccctttcctggattcccagctccttggctctggctttgtcacagcatggaaggcacaatatcgtcccagcattcccccagtggagctgttccctcctcccagttcccacaggtcaaggtccttgtgagcaaagctgttcccattcatggtagttacctgtgctcact

SEQ ID NO: 803657 - DNA, 639 bp, Homo sapiens
cagtgggctgatagtccccaggggcacaccagccacaagcacagaattcttcaggtttccccacaagcatccagcctctggataccctgaacttgattgctttagtctttcatatcaatgccagggaaagtccttcttttgattcctttcttgctctatctgcacaagaaggtacaggggaggtggcaggtgccaygcttactatattcctaggaggggtgacactgactgtaatagatcctacagtttctgacaatttcaatggtttaacctaattgaagtttattttgcatccatgcaacaatcctgtaagggtgttctgatcagagggagactttcttccacaagctttttccatcttgggagtttgtcatccacattgttgtctacttctagccagaaagaaaatataaaaaagactcattcactccttaagtgctctagcccggaagtcatttccactgacattttatgggtacagacatgtcatatgtgacatgtggcaccacctagacaaaattgggctgggaaaggcagtccttggcagatccccctgcaggagccagcactcatttcagaggacaaccagccatctccactcaccataggaaggtggctgcatcctcagaagcccagcct

SEQ ID NO: 803658 - DNA, 611 bp, Homo sapiens
gggtagtattaattttaaaacaaatgaaataagtttgtatagtcaacagatctatcatacatagaagtatgatgctttttataaaaatccaagtgaaaaaaatcagaatatgaccaatatatgttgttttttaatcctaccgtaaattctataatagcctwttccttaccttgatgattcgatcacctgtctgtactccagcccgcatggctgctccatctgtatgagaaattaattgcttaaaatgtgattcatttgcatttactgatcatcttcctgacagagagacagtataacaaactggttaaaaacatgggctgtcctttgggaggccgaggcgggcggatcacgaggtcaagagatcgagaccatcctggccaacatggtaaaaccccgtctctactaaaaatacaaaaattcactgggtgtggtggcacgtgcctgtagtcccagctgctcggcaggctgaggcaggagagtcgctttaacccaggaggcagaggttgcagtgagcctagattgtgccactgcactccagtctggtgacagagggagactccatctccaaaaaaaaaaaaacaaaaaaaaaaacaaggctgtaaagtcagact

SEQ ID NO: 803659 - DNA, 544 bp, Homo sapiens
aaacatcagggaaaaggaaggtcctgactccctgatggagctctgaaagattcctggacgtggcattgtcacatgtgcagcagtaaagggtgttcactgtgcaagggcagtgggctaaggggcaagcgtgcatggaatccagcctacaggccactccccaaactctggcatggagctacatccacttggagaaaggggaccgttttcctyttcacgcaaaggtggcttaagggctagtggtggcccgggaagtgtgctgagaatgggtggatttcactaagcaaagacatggcaagcaatgtcttggacagccgatgctgcccagacaaaggcctggttgtcgggcatgagctgaggtgtgacaaggagatagaagcaagaagccatggaaggctttgctgcagcttccatgccaaaccctagaatttgtccttaaactggagcaaactgggcaatctggaaccatggaagggggttgggcagggacgtgatacagtcaaggctgcattttaggatatttagcaaaagtccagcgacctgctgg

SEQ ID NO: 803660 - DNA, 544 bp, Homo sapiens
aaacatcagggaaaaggaaggtcctgactccctgatggagctctgaaagattcctggacgtggcattgtcacatgtgcagcagtaaagggtgttcactgtgcaagggcagtgggctaaggggcaagcgtgcatggaatccagcctacaggccactccccaaactctggcatggagctacatccacttggagaaaggggaccgttttccttttcacgcaaaggtggcttaagggctagtggtggcccgggaagtgtgctgagaatgggtggatttcactaagcaaagacatggcaagcaatgtcttggacagccgatgctgcccagacaaaggcctggttgtcgggcatgasctgaggtgtgacaaggagatagaagcaagaagccatggaaggctttgctgcagcttccatgccaaaccctagaatttgtccttaaactggagcaaactgggcaatctggaaccatggaagggggttgggcagggacgtgatacagtcaaggctgcattttaggatatttagcaaaagtccagcgacctgctgg

SEQ ID NO: 803661 - DNA, 483 bp, Homo sapiens
cctggaggatttgctcatggattagatggtgggtacaagagaaacaggaatcgaggaggattccccagttttcggcctcggaactgaagaaccgagtttgcatttactaggagggaagtctccccaggggagcacatttcacaccatggggccgagtgagctccctttagggctgagtgtggggagagaggaggctatattagaggctggagccccgagtcctccagggttttgaggctgggaagctgaggacaccatagcaagggaggccaaaaaggagaggccagggaggtgagaggagagcacagagctgtccacaggccaggtggaaagactcaagcrggtgattatttgcatccaatgctactgataggactgggcaacccaggtcactggcaactgtggaaaggaaacttttggtgggattgtgaggaaaaaactggaagggagtgggcagaagtggagacggggaacacacacagc

SEQ ID NO: 803662 - DNA, 601 bp, Homo sapiens
caaaccagaaggaccgtagagccccatccttcactcaactcctagagtctgacgggtctcaggaagggatccctctccgagagggtctgcaggtttgccagctgaagtcagtaggcagttagtgatctcttggcttttctgcagagcaactggacgtggcagggcgggtgatgcagtacgtcaacggggcagccacgacacaccagcttcccgtggccgaagccatgctgacttgccggcataagttgtaagtttgactttgaggggtttcttaaaaataggttgggtgggttagaggaatcttgagtcttccttgctttctcacattttccttctccacatgctatattccttcataggaacccaaaaggatatgagtggtttttaccaccacctccccagcactccttccttgcccaaggcctcccacccataggagcytgagttcatcagtttcctttcctgcccttcagtataaagcagcccatcctcatagctggaactcagacgtgggaagcagggagcgtagcttgcatgatcaggtcatttgccctcattttgtgagctccacatgcacagcaagtcccagaccttccccatg

SEQ ID NO: 803663 - DNA, 665 bp, Homo sapiens
caggtcccaccgtgaggctcatccctagatggcattctgtaaagttctctgctccttccccacaagggtcctgcctctggtcccacgggatgaactttgacgtaacctgcaaagcccagctcagatgtcgcttctccagtttgcatcccctgtacctccctgggccggaggtacaggggatgcaaactgtggctcactcatgtttgcatcttcagtgcccagcacaagcaggggcacagtaaatgtttgtgcaattcgacctgtaaaaaaactgggcatcccaaccaactcaattccacttcactggggcttargcctgcactcctgggcagctccagcacctcttagaacacggaccagtaccagtcagagactgaatgttgtgggttgcctggccacggaaacagcaacatccaatgaggaagggatgattttccagggagaacgctggtgacagatggtgagaagtttccccagctagcatttggtcagctcttattaaagggcagaatgaggacatttctggtatactaagtttgagagcaacctggtgtctacaccaggtagtaggttgcattccacgggtaaggatttcaggagaaagagagtgcaggacattcataagcctgcagatttaggtgaaatttctatggtggtcctgaggg

SEQ ID NO: 803664 - DNA, 376 bp, Homo sapiens
tatgttgccattgtgtgctcaagccttgggaaaattcaacaactggaataattcgtatcaggagaaattctttctggttctagcgataaactgaatcctctaaaatgtggggaacaaaaagcaagattaagaaaaataaataaataacrgtgctaggaaaccagggaagagaggacacaagttgaggtggtgcgtgcacacctgcctacaggtgcacaatctcgtggtttttcctaatccattcagaagttctccatttaagagcgcagtctggttctgctgttcccaaagcgcctttcataccaaaggattccaaagtttcacacccacatccagacatatggggctcttcaaaatagaaatatcagcacagaac

SEQ ID NO: 803665 - DNA, 637 bp, Homo sapiens
tgggtgttaaatttattttgccctgtaaaaggagttaatctgattcctccccttttgtttataaagtttgtgtgtctcatgagatcttaaagatagaaacaactttaatcgagcccaatttttttaagaaattcataggagaagtaaaaaaaaaaaatgctctgttacagaaacaagttaaaaacagactaccttgtatcccttaatgagagctaggaggcctacattgtctctccaactgttctccaagctgaggtccttcatggggtctacagacttgaagrcagttctcgggctcatcgtttttatcccgttgttgcctccagttacttatttgctttattctgtcctgttacttcaaatgttttgaaacagcttcttctcttagaatgtatgaatgagcaatgtttcagttccgttagaaacatgactcttttctggctacccataataaatccgctctccagtttgttcttttctactacattaaagccattataacaaaatattaaaaaaaaattttctttcaaaaaaccagtaacccaagtatctatttcttagtgatttggctgcatttataggatattttatttggatctattttataatcacttgaaagcgtcactttggtttggtt

SEQ ID NO: 803666 - DNA, 641 bp, Homo sapiens
cagggagagctgcttagagatgtagtaggggaaaaaaacccagccagtgtagcacccagaggatttggcacaggagtgtctgcagtgaagctcagccagggatgtccatcctccaagccttgctgggtttccctaggagacttgagccctaggagagctagtggacctgaaaagagcagattgatcctgccccgagataggaccagttctaccagagcagcccccctgtctgctggcctctcctggagtttcagtctggctgtgcctgcttactgtgcagcctcagatgcccagccagagtgccttctgggggcccgtatcatagctcatatgctggcagactgcacctgaccatcggagagctccagcagagcagccatttgtgaagtgcaccaggtcactcgcacttaccccccacyatatccttccctgtgcaactttgccagcatacacttgcctatggctacccccctatcactttgccagcacacatgcatacaggtggacatcacctcccctccccaatggatgtacatgtgtgtatgcactccaccacgctatgagtgccggctggagcacaccctgccactccctgactgtgccaccattgctggtgcaaatgtgcccagagattccagcag

SEQ ID NO: 803667 - DNA, 627 bp, Homo sapiens
cctttagagtcctctgatgaagcctcccgagtctgccttcgagccagtggggagggggagaggaggatgattacagggcggcccccccaggggcatctcaagacactcccaggacagcatggacaggcatggaccctcctgccctgtggctcctgccaggacccctcccctgagctgcccagtgggtgaaagtgggcagtggagaaagaaagtccagggtcaaacgggaaggtsgcaccccctaccagcagaagcccagaaacacgagcagagccaggggcccctgcagggctgctgtgccccttctctcttcccaaataggagtgagcacacctggacctctgagagggcaggagggtggctcctctccactccacggacaaacaggagtggcctggctacataaatttgtgccatcctcactgctacctttggaatagcaactttgaaagggaaccaccctttgggaaagaccaagggtcccaggcctgccccgcctatcactccaaagctcctccttggcagtacccgccccccacccctctgctacagtgggggtgacctcccactgtcagacagtggaaggggctgcttgtcagaaggacaggcctttcgtctccactcttt

SEQ ID NO: 803668 - DNA, 601 bp, Homo sapiens
catgtattcctagagatgcaagaattgtgaaccctgctctcaagtccatgaaccacctgaattataagcaaactttgtatgcctagatcataactcgtcagaatttcaaagaaactttcactccaaataattgcatagtgcttcaaagtgcaggccctatggccaggcacaagtggctcatgcctgtaatcccaatcctctgggaggccaagacggggagatcacttgtcagtttgagaccagcctcgccaacatggcaaaaccccgtctctgttaaaaatacaaaaaaattacccargcacagtggcacgcatctgtagtcccagctactagggaggctaaggcaggagattcacttgaacctgggaggcggaggttgcagtgagcagagatcccgccactgccctccagcctgggcgacagagtgaaactccatctcaaaaaaaacaaactaacaaaaaaaaacaaagaacaaagtacaggccctagagtttgaatacctggaggtggattctagcaacaccacttagaatagaactgtatatccacaggaagttaatctttctgtgccttgatttcctcatctgtaaaatggggataa

SEQ ID NO: 803669 - DNA, 627 bp, Homo sapiens
cctttagagtcctctgatgaagcctcccgagtctgccttcgagccagtggggagggggagaggaggatgattacagggcggcccccccaggggcatctcaagacactcccaggacagcatggacaggcatggaccctcctgccctgtggctcctgccaggacccctcccctgagctgcccagtgggtgaaagtgggcagtggagaaagaaagtccagggtcaaacgggaaggtcgcaccccctaccagcagaagcccagaaacacgagcagagccaggggcccctgcagggctgctgtgccccttctctcttcccaaataggagtgagcacacctggacctctgagagggcaggagggtggctcctctccactccacggacaaacaggagtggcctggctacataaatktgtgccatcctcactgctacctttggaatagcaactttgaaagggaaccaccctttgggaaagaccaagggtcccaggcctgccccgcctatcactccaaagctcctccttggcagtacccgccccccacccctctgctacagtgggggtgacctcccactgtcagacagtggaaggggctgcttgtcagaaggacaggcctttcgtctccactcttt

SEQ ID NO: 803670 - DNA, 627 bp, Homo sapiens
cctttagagtcctctgatgaagcctcccgagtctgccttcgagccagtggggagggggagaggaggatgattacagggcggcccccccaggggcatctcaagacactcccaggacagcatggacaggcatggaccctcctgccctgtggctcctgccaggacccctcccctgagctgcccagtgggtgaaagtgggcagtggagaaagaaagtccagggtcaaacgggaaggtcgcaccccctaccagcagaagcccagaaacacgagcagagccaggggcccctgcagggctgctgtgccccttctctcttcccaaataggagtgagcacacctggacctctgagagggcaggagggtggctcctctccactccacggacaaacaggagtggcctggctacataaatttgtgccatcctcactgctacctttggaatagcaacttygaaagggaaccaccctttgggaaagaccaagggtcccaggcctgccccgcctatcactccaaagctcctccttggcagtacccgccccccacccctctgctacagtgggggtgacctcccactgtcagacagtggaaggggctgcttgtcagaaggacaggcctttcgtctccactcttt

SEQ ID NO: 803671 - DNA, 592 bp, Homo sapiens
gcctcgaatatttgtagaatgaataagtcgattgagagatatttcacagaaaacaacaaaaagattaaattgcaagggaaagggctggggaagacctgggaagaggcgagggatattagagggatgaaacactcgcgcgtttcaagtttgggggcctagggaacggtgacggcactgacacgaatgggaaaatcttagaaagcaagccagcttttgagaggtgatagtgaaatctaaaatttkgtacatgttaagtgtactgtattggtggaatatcaacagcacacagtgatttaggaacagaaagatgatggaaaatatttatggcatagttagaggacagcattgatgtggcagagaaggggcttacaggagagaaatgacgttatggaacagaatagaatcccaaaaggaaaagaatcccaaaaggagtgcttgtctgcgttcgcagtgtacgcagtggcatgctacatccatttacttcttggtgtggatagcggacttgggtggcagtgcaaatgagtacactagaactctctctaccagaactaaatgagttaatgcattaaatgagctaaacgctgcgaacagt

SEQ ID NO: 803672 - DNA, 597 bp, Homo sapiens
gccttccacctgtttctgctgtgttctttcctcagggatcccaacggcttcaatgactggaccttctccactgtgcgatgctggggggagagagcccgagggacctacaggcttgtcatcagggatgtcggtgagtctcgtgccctcacaccaggccctacctttcctgcttgttatctggtccctctgcatctcagagtccccacagaaagtgtcccgtgtgcaatatatagggttgccattggaccaagagagttgatgccaagagtgtgcccatccgtgaaatgggcattgctctctgcaactgttcatttatactacctctcatattccctggaggagtgacccatccatctttcctcaggatagcaacaaaaagtccttgtcgaaaccacatttcaagtccttttacgtataaccatccttcggcmagccccggtaggcaggtaagggcaggactcatttcaccattttttttaaactggcccagaggtttgaggtgacttgtggaaggtcaccatatcagtgaaggccacaatatccatgaattgtgaatatctttagtatcagcctatagactggaaattgagctccacc

SEQ ID NO: 803673 - DNA, 645 bp, Homo sapiens
agtagcaatttttgcaaatatcatccattctaaatgcaactattaaaactgtcagcaatttcatatttcaaacatctctccatgctgctcaaaggactaccaataatgtcattacttaaaagtccccaaggagagcagttcttttaatcttactgtccacagctccttgaaagctgaatcaatcccctaggtaccatgaacatcagaagctctgaatgattgtgatcctaccacacatatgctgatgttccagctgatacaatgcacctgtgtatgtgtctatgtgtgtgtgtgtgtgttgtgtgtgtgtgtgtgtgwgagagagagagagagagagagagagagagaaagagagaaagagagagaaacttctttggaaccatataagatttctgctaacctattacagaggacactaataaagggaaatcaggtttccaagtggacaataaagtagcacaaagatatcaatggtcattgaggaagttaaccagacaagagaagagagatctttcaaagatgaaccacaggaaaatgcatttgcacagggatcaggctataataaagaaagaggtgctggaaaccagcttctactttttacttagtaaatgagacatattttgacagatgtaatgagattaaagg

SEQ ID NO: 803674 - DNA, 564 bp, Homo sapiens
gtcagatttcattgtttttggttttgttttattttcccctttcaccaagcacaaatccggaaaaaaagcagtatgtgcattaaaggtttgcggtattttccttatagggcgattcacaaaattgcataagtcaagtccaatttttagctatttgtgtaaaacaaacagaggctgtctttccctatttccttagcatctcctgtctcaygcacacacacatagcaagaggtctgctgtagcacttaacggtgcattcaggggtttaatttgaagcagtgcaggaagtgagatgcctgaactccacagcgctctcatatctgggcatacacagccttgcgtcaacctggaaccctttatcccactgggtgtggttagcagcaccttcttgacttgctggtgggcacctccttgactttttttctggtccacttgaggttaaaagttgaggcggggtgaatctagaatgagcccctaacacatgtaagcctatacccttctctgaaaatagcaaaaagtgaaatatccaaactaacaggttaaccaggttcaatatttacctaaaat

SEQ ID NO: 803675 - DNA, 641 bp, Homo sapiens
gacaggcaggctgtggagagggcatctagaccccacagcccagccttcccctggggaaggaggctgagggccagtcaaggtggagaggccagaccctgagatgcagctgagcagctggcaaatagggactccaaacacactctggcagccgcaggaaatacttatttgggtacactggtgatgcctgctagtcccctacaatggacaccctgtcctacactttggcatccttttctgctccagaayatccctcctgatgtccagcctctgtttccttcccctcttctggtgcaggtgaaacatctcctggatcttcagaggtgtccctccccttcctgcccacctgaaaagccctggagagagacacctgtgccctaggtacccaaggagagtcaaatcccaaagcacatctgcccagggtaggaggaggcccccagcttggcttctgctcaggagaaaggcccctgccccctgtgaagccaggcctcccgacagccccagcatggccgccccatagctgccctgtgcctgctgcagacaggccggggactcccacaggctggtcctctccacacctccccaggttccatcaggtgtcactcttgttcttcagcctctctctgaggccgttagtttaaatg

SEQ ID NO: 803676 - DNA, 612 bp, Homo sapiens
atgccatctttgcctgcctgaagtagctcccatttgggagcctggcatataaactcactgcagtactaatgtgctaagtattgtaaaaaggaatacatggaaggaggagggaacaacggtctgcctgggggtgaaagtgtaggggaagcttcagagagtggatgaacaacagagatttgtagaagtagaaagctgttctttaagcacacaaaggaatagtgggcattccaggcagagtagagcatgggcagaggcttagagatgtgagaacatgacactgtgaggaacgtagaagtaggggagtggctaaactgtgagcagctagatgartctgaactatagatatacaagggctgacttggagaggccttgaatgtcttgataatacccgcccattttcttgtttagcacttatcattatagaattagaaagcttcaaaagaccttagagatcgtccagttcaaccttttctcttgaaaaaggagaatcaaaaagcagtgttttgtcccaagttacccagtgagtcagcagccacatatggactagaatctttggcagatctcctgactctcgtcctatgcttttctctgccaatctagtatttattctac

SEQ ID NO: 803677 - DNA, 629 bp, Homo sapiens
actagtcactgatagtaatatttttatatgcagcaggcccctagtgcacatgacaagttgtagtctgccatggagggcttgcagttgacttttggaggcatttgcatgatcagaaccttcaaagaaatgtgacaaggacagtaatygaggtttgaccagagagtgaaataaagtggggtggaggggtggctatatcagacagaaagcagggattgtaagaaagaattcacagaggaaatgtggggctgaggttatgaggtttagggagcataaactggaaagaaaaaagccttaaataaaagctttagaaacgttaaaaggaaaatatgatatggatagatgatatggatagattagacatggtatttgataacatatagtcaaagaaaatgtcttttctcctcccaggcaagaatatagattgtcatttgattgtctgatggaaataatttagaagaacatactaggatatgctatttatcagagcagacagctttttgagatctgatgcatgcattctgactttttttttctctttcttttgtctgaaacattactgacagttactgctatagtccagcactctcgaagttgacatatgctgagtgacagatctaagataagagtaa

SEQ ID NO: 803678 - DNA, 489 bp, Homo sapiens
cctcaggtcatccacctgcctcggcctcccaaagtgctgggattacaggcgtgagccaccgcacctggctgaaaacgtgtttctaattgaaggctatgtgtatcttttgtttaccaacccccgtagggtattgtgccaaaaaaaaaaattgttaaatgaatcyatagcgactttgaatcgacaaaggtatttttatacattttaaatattttatcagattgtatttattaatattccaattcacttcaaaaggatttgcagtagagcaccacaaaggcaaacacacattacagtttctggaaagaaatagactcaagttgtaaaaagaagaaacatcaggatatgttagccataagagttaatattgggatgaacattaaacttggttctgagtctcttgatagccaaggagatacatgatatgtttcattatctgttttgatctgataaaatgtagtagactgattctttatcatttttcttatataa

SEQ ID NO: 803679 - DNA, 502 bp, Homo sapiens
ccttatgcaccagctagacctacttaaataatattaaacaagggttggcagagtaggcaaacttgtgttatccctaatttacagatctgcatctcatgtcccctaataaaaagttatatggttggaggtttagaataggaatattcatcaaattaagaaagaattattttattccaacttgaaaaatgaaaattattaagttttatcaaacgcagttagggartattgaaataatcatctacttttttattactagcctgctgataaacttctattgcattattcaatttccttatattgaaactgggtatgttcctgttggattattgaatcagtaatattagcttgttaagctctaatctgaagtagttagttgaaggttttgaatctgtaaatttatagtttaggttatttgttttcttttttgcgtaatattttatcacctttggggatctgaatcaaatctgtcttgtgaaacaaattggatagttttcccatcttc

SEQ ID NO: 803680 - DNA, 605 bp, Homo sapiens
ttagggcaaaggcactaatttctatgagtgtcattgcatttttcagcaccacttttttaaaacccaattttatttaagaatatcattgataaagttgtagaaattatcaattttattaaatctttaaatagaagacacatttttattattctgtatgatgaaatggatattcacatgaagcaattctgctgcatattgaaatatgatggttgactcagtaacaaaagcacttgtgtgattgagttatgagctgaactagccactttttcaaggggagtcatttttacttgaaagaataattgacaaacaaaattatggttatttggacttggttgtatagtagaggttctcttgaaaataamggaagtgagcctgttatttcaagggaaacaatgacaatatttgctgccagtgataaaattcaagctaccaagtaaaaattagaattttgggaaacttgtattcactactctaagtttgacagcttcccaatactaaaagacttttctgttgagatcagtggtgatactagcaaatgtaattttgtgatgttctatttaaaaaaatggtgaacatttgcaagatctggataactcaatgaatca

SEQ ID NO: 803681 - DNA, 676 bp, Homo sapiens
gagtcaaagagacagaaatagaggcaggaaaagtaaataggtgctacatcaaaatggagttgcaaggggacatttctgcctgccagaacccaacccatctttcaagatccaaataaagggaagaagcacggctctaccaattaccagtcttgtcagcttttcttggaccctctgcctctggggcragtttcttttctgctgttgccaatgggaattcaggccatgctgatttcaaactttttttttttcctctgctgctttctgaaacactttcttcttcaggtattcgtgacatcctcagttcccagaccacaacagtgaatggttttggaatcagtgactcccattatctctatcccaaagcagagaaatgaaaccctggatcctcatgccaaggcagttttatatatcggagccactgtgacttctcagtgttcatggccctctatattgccaatattcaaaggaaaccagaaaagagggaagccagagccccgagtctatgcttgggccttgctctggatgttgaggaaaggagttaggcacagacgaccagtccaggatggacccttgggaacacacgtttttgtgatgaaatgaaacttgtatggtatgacttcaatttagggatcaaaatataggagagagagagcaacagggacaaactgcttctgat

SEQ ID NO: 803682 - DNA, 621 bp, Homo sapiens
cagaccacaacagtgaatggttttggaatcagtgactcccattatctctatcccaaagcagagaaatgaaaccctggatcctcatgccaaggcagttttatatatcggagccactgtgacttctcagtgttcatggccctctatattgccaatattcaaaggaaaccagaaaagagggaagccagagccccgagtctatgcttgggccttgctctggatgttgaggaaaggagttaggcacagacgaccagtccaggatggacccttgggaacacacgtttttgtgatgaaatgaaacttgtatggtatgacttcaatttagggatcaaaatataggagagagagagcaacagggacaaactgcttctgatgctagaggagggacagagatcttcctgctgtgattagggacctyttggaagagaggagtcattgaagctgatccttgatctcatttagacttaagtgagggctggtgaagaatgatttatcagttgggatgaaaatcttggacaccaacagtaggtcatacctatactggaattaaaggaactagaggccatattactaaactttttttttaaaccatcatcagtcattttaagcatttactgtgtattt

SEQ ID NO: 803683 - DNA, 621 bp, Homo sapiens
cagaccacaacagtgaatggttttggaatcagtgactcccattatctctatcccaaagcagagaaatgaaaccctggatcctcatgccaaggcagttttatatatcggagccactgtgacttctcagtgttcatggccctctatattgccaatattcaaaggaaaccagaaaagagggaagccagagccccgagtctatgcttgggccttgctctggatgttgaggaaaggagttaggcacagacgaccagtccaggatggacccttgggaacacacgtttttgtgatgaaatgaaacttgtatggtatgacttcaatttagggatcaaaatataggagagagagagcaacagggacaaactgcttctgatgctagaggagggacagagatcttcctgctgtgattagggacctcttggaaragaggagtcattgaagctgatccttgatctcatttagacttaagtgagggctggtgaagaatgatttatcagttgggatgaaaatcttggacaccaacagtaggtcatacctatactggaattaaaggaactagaggccatattactaaactttttttttaaaccatcatcagtcattttaagcatttactgtgtattt

SEQ ID NO: 803684 - DNA, 621 bp, Homo sapiens
cagaccacaacagtgaatggttttggaatcagtgactcccattatctctatcccaaagcagagaaatgaaaccctggatcctcatgccaaggcagttttatatatcggagccactgtgacttctcagtgttcatggccctctatattgccaatattcaaaggaaaccagaaaagagggaagccagagccccgagtctatgcttgggccttgctctggatgttgaggaaaggagttaggcacagacgaccagtccaggatggacccttgggaacacacgtttttgtgatgaaatgaaacttgtatggtatgacttcaatttagggatcaaaatataggagagagagagcaacagggacaaactgcttctgatgctagaggagggacagagatcttcctgctgtgattagggacctcttggaagagaggagtcattgaagctgatccttgatytcatttagacttaagtgagggctggtgaagaatgatttatcagttgggatgaaaatcttggacaccaacagtaggtcatacctatactggaattaaaggaactagaggccatattactaaactttttttttaaaccatcatcagtcattttaagcatttactgtgtattt

SEQ ID NO: 803685 - DNA, 625 bp, Homo sapiens
atggtattgtgcaaatcttccctccagcagctcttggaggtgtgatggcccagagcatgacagaaggcgtctcggtgatactacttccttagaaagctgggagaactagccatctgggggctttcctttcttctggccatgaaaagggtgtgctagttctacaggagatatggtaggaccttggggtggggtgaaggtagtgtactaaacggggtattgacatagcatgttctttcctgaaggaagtggcagtatgagaggagaaggcatgcccatttttgtcaggctatgaattcagttgcgtactgagtatttggtaactttaatattttgttctgtgtgcatggtatagatcctgaatacagactggcaaacatacttccagttatatttagtcttaatctttctataggcatgtgatgcggtatactgtagtagaatgatcataggctttagagtcgggtgastctgggtttgaattcctcttttgatctttattaattatgtggctatagcagatatggttgatccctgctttccttatatctattagtccctacctcttcagtgagtaacaaataactccacttacctgtatctgcatttctttgaatgagcactttct

SEQ ID NO: 803686 - DNA, 643 bp, Homo sapiens
atctatgaacatggactatcttctcatttatttgtgtcttcaatttttttgtcaatattttatactttttcgcttataactattttagatattttagatccttgcttaaacttattcctaactatttttatactattgtaaatgggattggtttttaaatttctttttctctcagtttattgttaacttatttaaaaaacacatttgatttttctatattgattctgcacctttactgaatttgtttcttaaatcttaacagttttttgatggtgcctttatagggttttttacctaaaagattatgtcaaccataaatatatctctgttatttttccccttttcaatttagatgacttttatttctttttcttgcctaaatgatctagctaggacttccagtattgtgtttaatagtagtgstaaaagtggatatccttggctttttccagaacttagaggaaaatatttcagtttttcatcattgatcataattataggctgtaagccttctctatatgatttttattgtgttgaggtaagtttcttctacatgaaagttgttgagggttcttattaataaggagtgttgaattttggtgaatgttttttgcacatcttttaagatgatcctgtgattttt

SEQ ID NO: 803687 - DNA, 658 bp, Homo sapiens
tggaggggcaaggctggcacatagaggccagtttggagaccatcgtgttttccaaggggaggcatagtgggtacaaaatttagagatgctcattctcagggttgtgcaagtgcctgcttaaatttgtgtcctttcagggggtggggggctaggggagggatagcattaggagaaatacctgatgtagatgacgagttgatgggtgcagcaaaccaccatggtacgtgtatacctatgtaccaaacctgcacattctgcacatgtatcccagaacttaaagtataataaaaaataaataaataaaataaaataaaataaaaatttgcatccttgcacctaacttgcctcaccccagttccagctcgctgagaatatgaactgctgaatttataactgatcgtttacctstcagctgaggtattcatgcttatgaaaaccctctagctggaggggtaattactaaaaatgagaccctgtaaaatgctgctatacccaacatacaacagcatacataaacacacctatgagtatgataaaaagagctcattcctgtgggtgagcaagatggggttgactgctcaggatgagacgcttgggaaagtgtaatgacaatggaggaaacagagatgctttttcttctgatgtgggaacaagttta

SEQ ID NO: 803688 - DNA, 658 bp, Homo sapiens
tggaggggcaaggctggcacatagaggccagtttggagaccatcgtgttttccaaggggaggcatagtgggtacaaaatttagagatgctcattctcagggttgtgcaagtgcctgcttaaatttgtgtcctttcagggggtggggggctaggggagggatagcattaggagaaatacctgatgtagatgacgagttgatgggtgcagcaaaccaccatggtacgtgtatacctatgtaccaaacctgcacattctgcacatgtatcccagaacttaaagtataataaaaaataaataaataaaataaaataaaataaaaatttgcatccttgcacctaacttgcctcaccccagttccagctcgctgagaatatgaactgctgaatttataactgatcgtttacctgtcagctgaggtattcrtgcttatgaaaaccctctagctggaggggtaattactaaaaatgagaccctgtaaaatgctgctatacccaacatacaacagcatacataaacacacctatgagtatgataaaaagagctcattcctgtgggtgagcaagatggggttgactgctcaggatgagacgcttgggaaagtgtaatgacaatggaggaaacagagatgctttttcttctgatgtgggaacaagttta

SEQ ID NO: 803689 - DNA, 488 bp, Homo sapiens
ctgcccgccagaaaacaacccccctttttcctttacctacccaaatcctataaaacggccccacccctatctcccttcgctgactctcttttcagattcagcctgcctgcacccaggtgattaaaagccttattgctcacacaaagcctgtttggtggtctcttcacacagacacgcatgaaaaatactattcaataaaaagaaaaaaaaggaatgagacgtcaacccacgatgacagatgaatctcaaatgcatattgttaagtgaaggaagccagtttaacaaagctatatactgtattattgyaactacataacattctggaaaagacaaaactatagtgatagtaaatagatcagcggttgctaggggttcagagtggaggagtaaggtgagtgttgaatagataagcacaggaatatcttttagggtagtgaaactatttttgtgatactataattgtgaacataagacactatgcatttgtc

SEQ ID NO: 803690 - DNA, 582 bp, Homo sapiens
tttctttccccatgcagatggcgtatcatgggatttcattttgtaactgtgtgagccaattctccctaataaattcccttttatatatgcatatatcctataggttctgtccttctgaagaactctaacacatggtggaaaaacctgagaaacagtaacttggccagattttaacatcagtagtgacaattcatgttttgatataatgtgataaaaatagcactttacttctgtggtctttatcccccaaaaatccaaaaccccacctaatcatgagaaaaaaatcacacaaatctcagttgaaggacggtcttcaaaatgtctgaccagtacaccttcagactgttgaggtcatcaaaagcaaggagaggcggagaaactatcacagstgagaggagcttaaggatacatgaagattgaaatataatgaaatgaaatgaaataaaataagataaaatgaaatgtgatggactggagggaatcctgaaacaggaaaagtaccttaggtaaaacctaaggaaatctgaataaagcatggactttagttaatagtaatgtgtcagtattggttcaatattttga

SEQ ID NO: 803691 - DNA, 591 bp, Homo sapiens
aaatttaaaattacatatgtggttcacctttgtggctcacattatatttgtactggataatactagtctagagcactaggctaaaggtacaaatagagatgcagaattatacattcaggctgatactactacaaaaatatcaggagatttcacattaactgacccccttattgtggcctgacaatcttcgtgacttcacttagaataatggtctccaactccatccaggttgctgtgaattccattatttcattactttttacaactgagtagtattccatggtatgtatgtatgggtatatacgtaccacattttccttatccacttgttaattgattggcatttaggttggttccatatttttgcagttgtgaattgcagttatgaattttgcagttgtgaaacatgcmtgggcaagggtcttcttcatataatgacttcttttcctcggggtagatacccagtagtgggattgctggatcaaattgtagttctacttttagtcctttaaagaatctccatactgttttccatagtggttgtactagtttacactcccaccagcagtgtaagtgttccctttttcacca

SEQ ID NO: 803692 - DNA, 613 bp, Homo sapiens
ccaccccaactatggtcatgaagaaacgggggtttagaatacctctatttttttgcttaactttgctatgcaccattctctaaagaatgttccctgaagttccagtctcaaaaataacagattctttccacgatgaaaatgtttgggaaacattcgtgttatcactacctcctgaggactcaaagtgtacatgcacaatgtgttacagattccmataagtactgcagtaaagacttttttttttttaattttttttttaagacagagtcttgctctgtctgccaggctggagtacagcggcatgatctcggctcaatgcaatctccgcctcccgggttcaagtgcttctcctgcctcagtctcccgagtgagtagctgggactacaggcacatgccaccacgcctggctaatttttgtatttttagtagagacagggtttcactatgttggccaggctggtctggaactcctgacctcaggtgatccacccgcctcggcctcccaaagttctggtattacagacgtgagtcaccgcatccagccaagacctttcttaaactccatttaacccagcatttcaaacatatttggctacagcagcacttttgtgtg

SEQ ID NO: 803693 - DNA, 561 bp, Homo sapiens
ctaacttcgtaattttagatttgcagttgcatcctcctaactgcgtctaatggcagaagcaccaccttgtggcaaaagtaggagcttttaaattacagaagttagggcytgttacccagaaaggagaaaacaatataatgggcatccaggacactgcgctatttcttgacctgtagagggattccatcagtgctcaatttataattatttattcaaccatatgacttttctgtatttattgtatttcctacttttaaaagtttgggaaaaaagtcttttacatacctgaattaaaggtcacattcctaaatgcttgaattttctaagcaccacttatattttcaagaatttcctagaacttcgaggaatctttaaccttgtaaatgcactgttgtatttttatgataggaaataaaacaccagaaagacacttattctttggtaagtaacagaagaattccctacagatgtcttcctctgaatgttttcattcctgctctcccaaagcctccaagagcaaatgcagctgctttcaaatcatctgaaagacttctacattcc

SEQ ID NO: 803694 - DNA, 582 bp, Homo sapiens
aacattttttccttcgtttcaacttcagtgaatctgacaattatgtgtcttggagttgctcttcttgagcagtacttttgtggcattctctgtatttcctgaatttgaatgttggcctgccttgctagattggggaakttctcctggataatatcctgcagagtgttttccaacttggttccattctccccgtcactttcagatacaccaatcagacatagatttggtcttttcgcatagtcccatatttcttggaggctttgttcatttctttttattcatttttctctaaacttctcttctcgcttcatttcattcatttgatcttccatcactgataccctttcttccagttgatcacattggttactgaggcttgtgcattcatcacgtagttcttgtgccatggttttcagctccatcaggtcctttaaggacttctcagcattggttattctagttagccattagtctaatcttttttcaaggtttttaacttctttgccgtgggttcgaacttcctcctttagcttggagaagtttgatcgtctgaagccttcttctctcagctcatcaaagtca

SEQ ID NO: 803695 - DNA, 582 bp, Homo sapiens
aacattttttccttcgtttcaacttcagtgaatctgacaattatgtgtcttggagttgctcttcttgagcagtacttttgtggcattctctgtatttcctgaatttgaatgttggcctgccttgctagattggggaatttctcctggataatatcctgcagagtgttttccaacttggttccattctccccgtcactttcagatacaccaatcagacatagatttggtcttttcgcatagtcccatatttcttggaggctttgttcatttctttttattcatttttctctaaacttctcttctcgmttcatttcattcatttgatcttccatcactgataccctttcttccagttgatcacattggttactgaggcttgtgcattcatcacgtagttcttgtgccatggttttcagctccatcaggtcctttaaggacttctcagcattggttattctagttagccattagtctaatcttttttcaaggtttttaacttctttgccgtgggttcgaacttcctcctttagcttggagaagtttgatcgtctgaagccttcttctctcagctcatcaaagtca

SEQ ID NO: 803696 - DNA, 628 bp, Homo sapiens
ctcctaaattactaaagggtaaaatcacaagggaaatttaaaaatattttgagatgaatgaatgaagaataatataccaaaacttatgagatacagatacagcagtgcttagagggaaatttatagttataaatacctatattaaaaaagaagaaaggctgcaaatcaataacctaaccttccaccttaagacaatggaagaggagcaaactaaacttaaagcaagcaggggaagaaataatagaaatgaaagtggagataaataatatagagaattgaaaagcaatagagaaaaacaaaatcagccaggcgcagtggttcacgcctgtaatcccagcactttgagaggccgaggcaggcagatcatgagatcaggagatcgagaccatcctggctaacgcagtgaaaccccatctctactaaaaatacaaaaaaattagccgggtgtggtggcgggcgcctgtcgtcccagctactcrggaggccgaggcaggtgaatggtgtgaacctgggaggcggagcttgcagtgagcagagatggcgccactgcactgcagcctgggcgacagagtaagactccgtctctaaataaataaataaatagaaaagaaaaaatcaaaaattgctt

SEQ ID NO: 803697 - DNA, 394 bp, Homo sapiens
caggaatgaaagaagatgaaagaagatatgtgagataaatgtgaattgtggggagctagggggcagactgtagtggttgaacagtaccccgaatacccccaaaagaaatctgtgccctaatcctcaaaactgtggatggcaccttatttggaagacagatctttgcagatgtaattcagtgaagaatcctgaaatgagataaatctggaatattcaggtattccttaaatccagtgacaagtktccttagaaaaggggcagacacagacagagagaataaggctatgtgaagatggaggcagagattagattatgttatcacaagccaaggaagccaaggaattctgatagcaaccacaggatggaagaggcaaggaagaattcttccctagac

SEQ ID NO: 803698 - DNA, 597 bp, Homo sapiens
atacaaccttgggagttctagggcctcacccaccaccagtctctctccaccctactacagctgatgctctctggaaagtgccacctcctggcaggaggccaaccagcacaaaaatggagaattaaaccaccaaagctaagaaccctcacggagttcactgcaccctctgtcacatccaccagaacaagcagctggtatccayagctgagagacccatagacagttcacatcacaggactctgtgaaaaccccccgtaccagcccatagccaggtaaacttgctgggtggctagacccagaagacagacaacaaacactgcagtcgggttcacaggaagccacatccataggaaaaggcggagattattacatcaagggaataccccatgggacaaaagaatctaaacaatagccttcaaatagccttcagccctagaccttccctttgacacagcctacccaaatgagaaggaaccagaaaaccaaccctggtaatatgacaaaacaaggctcttcaacgcctcccaaaaatcacactagttcgccagcaatggatccaaaccaagaagaaatccctgatttctaacctgaaaaaga

SEQ ID NO: 803699 - DNA, 557 bp, Homo sapiens
attcttgagaccctctgatgatgaagaactgtcatttcacagcaagggcagaaaatttgaaccacttagttcatcttcagcattggtagctcagggctctttgtgtagtggttttagaaaacccaccaagaacagtgaagaaagattaacatcatggagtcgctctgatgggagaggagacaagaaacattcaaatcaaaagccatcggaaaccagtactgatgaayaccaacatgttccagaagacccaagagaaaaatcacaagatgaagtcttgagagatgaccctccaaaaaaagaacatctacgggatacaaagtctacatttgctgggtattttatcattttttaacctaataagttaagatccagagagttcaaagaacagaactgtatttttagaacatcagttattagctgtgactatgatctcacatttcttaaaattgatagaaggggtaagatatgcagatttaacaggcagtattgtggtatggattgcattttatttcataggtttttttttttttaagagctgaaagcagtagctatatttg

SEQ ID NO: 803700 - DNA, 643 bp, Homo sapiens
cagtattaaccaatttagacttttatattgcattggaatgacttttctcctacttcttgctgatagtattattgaactttttaaatctttgccatatgtgtagttgagaaacagactctttgatttttatttttttaaatatgagtgaagtttgccatatttttatgtgttgtttatttgtatttttttgttaactagtcatatgttttgccctttttktgagctattgtttgtttgtgagagctctttatatttgtcatgtaatacaaatagatttttcatcatttgtaaatttcctttcatttttcattctttctttaatgtgttcaaatttatcactctttttctttattcattttaggccctgcgattatgttaactagcagaaaaacgtccactgccatgcaattgagaaccttgagctttttattattagaaatgaaatgtgcttttgcatatatttttcttgtgttagaaaatatattggctaagtatttccaggaatttaaaacttagaggagtatgtaatgtgaacaaaaattaatgagaagtccttaattttggttttacaaatttaatatcagaaactaacccattttatataatattttaacctttggatgtcattcttggcagagtttgt

SEQ ID NO: 803701 - DNA, 517 bp, Homo sapiens
gttcaagagtttgaacttcattctgtacacagtatagaactctcataactacctaaggaggtacataaaataagaaaataaaatttgtgtttttgtattttgaaagcatcaatctgtccatagttcatgttgggagagatatggagaaggtacctggagatgtggttaaaaaaaaaaaaaaagttccacattctatatagtgtwtatgtgaatttttaaagttacaatttaaacctctctgtgattcagtttcctcatctattagttgaaaatgaaaatgctaatggtccccaccacataggagtataaaacatgaacaagtcatatagaattgtatatagtaaatattcagtaaactttagctgtggtgatgatgatgatagattgactctagaagatcaaacaaatattaatcatgttttttcttttcttttaaatgtattagttttatcatagaacttacagatacagatttaggataccacagtgcagtaaaatcttaatcactaccttctac

SEQ ID NO: 803702 - DNA, 646 bp, Homo sapiens
aaatattaagttggctatttatttaaaaaatatccctgtacattttcaagatctaaaagccattatcaaaagaaaatatattttcagatcaatcctttcaccactttagcttgtatatcttaaaattctagagctagagaagcactaaagaaataaatccaaaacagtcataaaaatcagaaagtaatttgacttgagactattttataaaaaatccttagccatataggatatcaggatgtgaaaaactagagtctgtgaaaacttgaggttaaaaattctcatgaattataatgacctaattttttaaaatcttaaattacaaaagcataactcacattaaaatcaagaagtgcatccatytgattctgaataattggtacagtttttaggagtttttctgtgttcattgttctcataactccatcagccctgttatgaaaaaaccagagaaataaacaaatgaatctgcaattaaatctacatttcaaactccccccctggttttctactaaaacagagaaccaagttgctatgaaatgtcacatatttttaagtcattatggaacatgaaaactgaagcagagatcatacagaaaaaacaaaaacaggcaacacaatatgtcaaatatcaaggtactcattt

SEQ ID NO: 803703 - DNA, 616 bp, Homo sapiens
tttatatatctgaaaatgatatattgtcacttgtgcatttttaaagctggatttctaccaaacaaggctttgttagtcttggatgggtgctttggctcatccctgtaattccagaactttgggaggccgaggtgggcagattgcttgagtccaggagtttgagaccagcctgggtgacatagtgaaatcccatctctactgaaaatataaaaattatttgggcatggtggcacacacctgtagtcccagctacttgtaatgctgaagcgggaggatcacttgagcccaggaggcagrggttatagtgagccgagatcatgccactgtactccagccttggtgacagtgagaccctgtctcaaaaaaagactttattcgtcttaaggaaattaatatgctcattagcattacatattgagtcttgttaaaataaaactttagacaaattaaatttggcagttaatttgagcaaagaaacaattcatgaattgagcagcaccctgaaggagtaaaggttcagagagttccacccagcaatgtggatagtcaggatttatagacagaaaaagaagtgacatccagacatagtctgattggttacaggtccacgtttgtg

SEQ ID NO: 803704 - DNA, 629 bp, Homo sapiens
acagcttcttagccctaatttgtcattaccctctttttttctttgaaagtttactcacaacacacataccaattgtcaatatcaattattcaagtaaacacagctataccaccacgaccagcacactcacctaggacagggaagattggtgcargatgggtggctctttatagaaacatcttggttattattccattttttaactacctgactgttggctttgtggtgttaacaaataaaaggattttttctaaggattcacttaaaaatatattaaatgcaattcttctatcttgatgattaggtattttttgtttttgataatttagatatttaagattaataaacaataatatagttactacttttcactttgcatcttttgactaattacaatactaatttatttacttcctttcttcatttggctataatacatttggactgcacagatcctttctctgctactgtagatgctgttgatgatgccattccaagcttaaatcctttcctcacaaaaagtagtggtgatgttcacctttccatttctttcagatgtatctacttttactactaggacaactactcatgaaatgtgtgtcggtaaagtaccatttacactttttttc

SEQ ID NO: 803705 - DNA, 629 bp, Homo sapiens
acagcttcttagccctaatttgtcattaccctctttttttctttgaaagtttactcacaacacacataccaattgtcaatatcaattattcaagtaaacacagctataccaccacgaccagcacactcacctaggacagggaagattggtgcaagatgggtggctctttatagaaacatcttggttattattccattttttaactacctgactgttggctttgtggtgttaacaaataaaaggattttttctaaggattcacttaaaaatatrttaaatgcaattcttctatcttgatgattaggtattttttgtttttgataatttagatatttaagattaataaacaataatatagttactacttttcactttgcatcttttgactaattacaatactaatttatttacttcctttcttcatttggctataatacatttggactgcacagatcctttctctgctactgtagatgctgttgatgatgccattccaagcttaaatcctttcctcacaaaaagtagtggtgatgttcacctttccatttctttcagatgtatctacttttactactaggacaactactcatgaaatgtgtgtcggtaaagtaccatttacactttttttc

SEQ ID NO: 803706 - DNA, 658 bp, Homo sapiens
aggaagggaaaaagggaggaagggaggggacccctaagtagggccaaaggtatatgtgaaaaaacctacagtaatagaatatttaatattttaaaatttccaaaacactcataagtacataccatttgatcttcagaacagacatgtaaagcgagtaatgtaggtatcattaacctcaatttacagatgaggaagctgacaccaggcaaggtcacgtgacatgcacaatgycacaggtgttagagcctgaactagaactctaacatttctgaccttcaacccagtgctctttgtattacaccacaccacagactaaagagacatgacaaataggtctgtcaacgtatcttagagacatgagtcggtagtaggtagaagattcacacacattctggcacccggggatatgatttggcaatgtgtaagttatcctatgctgtcattgctcacagtctgaatcatgtacattattcccactgggggaatatctgagcatcatctcctaagtgctattttagcaatagcactttgctaattatgaagacaaaattactttattagatcataaggaaacctgtcttttggttttatcaggcatttgtttctgctggttaaaaatcttttggtttcccttataagaatttacttagccaaaatg

SEQ ID NO: 803707 - DNA, 658 bp, Homo sapiens
aggaagggaaaaagggaggaagggaggggacccctaagtagggccaaaggtatatgtgaaaaaacctacagtaatagaatatttaatattttaaaatttccaaaacactcataagtacataccatttgatcttcagaacagacatgtaaagcgagtaatgtaggtatcattaacctcaatttacagatgaggaagctgacaccaggcaaggtcacgtgacatgcacaatgtcacaggtgttagagcctgaactagaactctaacatttctgaccttcaacccagtgctctttgtattacaccacaccacagactaaagagacatgacaaayaggtctgtcaacgtatcttagagacatgagtcggtagtaggtagaagattcacacacattctggcacccggggatatgatttggcaatgtgtaagttatcctatgctgtcattgctcacagtctgaatcatgtacattattcccactgggggaatatctgagcatcatctcctaagtgctattttagcaatagcactttgctaattatgaagacaaaattactttattagatcataaggaaacctgtcttttggttttatcaggcatttgtttctgctggttaaaaatcttttggtttcccttataagaatttacttagccaaaatg

SEQ ID NO: 803708 - DNA, 633 bp, Homo sapiens
gttcaaagccaggttttttgttcccctgcctttaggggcattagggcaggcaaccacaggttactgttggtccccatacctggtcagaggaggtcatccttctttccataggtcttgccacatggcctggccccaaatgggccagtgaccaactagccaatcgtgtaacttccaggtagttaaccacaaggtcaggcctcagtaaactgcccagctactggggcagattaccataggtgtctccttcttggtgatcaccatccatactgccccgagttcagctcactgactttgtccaccyccagtatcaaaccatatggtatcaatactaggctggaccgcaacagcagtccaggcagcagtaacaccctggctggacccatctttataccatgctccactgggaatggaagaggtgcctgcccctctttaaatggtaatggctcagggtttaagggtgcctcaggttgacccatggccttatcttgcatcaggactacaggtcccaagacttcttgtaattctgctgataaggggcttttactcagggtactctgctgttttgactaggctccccactttgctaaggtagatgtctgtgccatcccagtccggagggtcattacccgtgaa

SEQ ID NO: 803709 - DNA, 635 bp, Homo sapiens
tgtaattttcattttattcctctgatatagtaagatccttatgcacggttaatgtgacatacagattattaaatgaattaaatattacatcaattgatgtaatttatttgccacagaatgtacacatttgccaaaaccgaagatacatactgaataagacacaggttgaaagcaggtaaattaagaaataaagcctgatatatggaagatagaaaagcagaaataaagaaatgaagaakaatactgtgctaaataaaactgagtttttagaagagatgtcacttttcagaaaaaaaatggtttggagaaacactgaaaactgtttgagttgaaataagatagagagaaagagaaataaaattgcaatatgataataaactagagagaatataaatgtatttctgctattggtgacagtactacaatagcatcagaccaatgttgagcaatttaaatggatatggaaaaagacggggagtctcagttacaagatagatcattgtcattaacattagaaaattgactggaaagctgaagtttagaatgagctactctcctggaaagccacaacatgagaaattaatctgcccagagtttgagataaatgctgtaacaaaaggaaatgacagagaaaa

SEQ ID NO: 803710 - DNA, 635 bp, Homo sapiens
tgtaattttcattttattcctctgatatagtaagatccttatgcacggttaatgtgacatacagattattaaatgaattaaatattacatcaattgatgtaatttatttgccacagaatgtacacatttgccaaaaccgaagatacatactgaataagacacaggttgaaagcaggtaaattaagaaataaagcctgatatatggaagatagaaaagcagaaataaagaaatgaagaataatactgtgctaaataaaactgagtttttagaagagatgtcacttttcagaaaaaaaatggtttggagaaacactgaaaactgtttgagttgaaataagatagagagaaagagaaataaaattrcaatatgataataaactagagagaatataaatgtatttctgctattggtgacagtactacaatagcatcagaccaatgttgagcaatttaaatggatatggaaaaagacggggagtctcagttacaagatagatcattgtcattaacattagaaaattgactggaaagctgaagtttagaatgagctactctcctggaaagccacaacatgagaaattaatctgcccagagtttgagataaatgctgtaacaaaaggaaatgacagagaaaa

SEQ ID NO: 803711 - DNA, 681 bp, Homo sapiens
tacaccataacacatcagtcaggggtcctgaactttgctttagttgctatgactagatggaacttttgggttgctttcctaggggagagggtgagtgcgtgttgcttggtgaggtgagtgagccaaatatttggtggccagaggatgaaatggtcattcattcattcattcattctctctctctcatatcaatcatctatctawatctaattcttctctctctgggtacatggtggagttactcttctctgattccttgaagttacgtaagtctgtacaactgactatggccagggaaatgtgagcagaaatgatgtgtgccacttcctgtcagaattttttaaaatgggtacataatgtacttattttgggggtacatgtgatattttgatacatgaatacaatgtataatgatcaaatcagggtaattgggatattcatcacctcaaatatttatcttttatttgggaacattcaaattcttcagttattttgaactatacattattgttaatgatagtcactttattgtactattgaatactagatcttattccttcaatctagctgtatattttttaagccaataatcaacctctcttcaattctccctctctcctccccttcccagccgctggtaaccaccatcaactctctacctgcatggatccacttttgctt

SEQ ID NO: 803712 - DNA, 593 bp, Homo sapiens
atagtattgtccctacacacacacacacacgtatccagtacagatacaaccccataggtatagacagcatgtactgaggcagatacatatatgggaataaatgccatctggccacttgcctggggccaaagccattgcttccagttcactttcctcctcatgctccattcaatcaagaagtactacagattgggcccttgctgcatcctggcatagatctagatccacacagtacaggcccaaggcaggacagcaagacccaaagcaggaagaaaattgtggggagaggaagcaggagaacagtctgggtaccctggygacatttgcctgagaagggaggaggctggtaaggggagagaaggtgataggggattctgggagctatagcagagccaggaggccccctccccccgactgccctgctgctcaaaggcccagggtatgcagggcagcctgtgcccagcctttgagccaggtgagtcagcctgacttctgaatattcaccactgcagcagttccaccattccccacagcccactctgcacacagcagccagaatggtctttcaaaatctgatcttatcactccctgct

SEQ ID NO: 803713 - DNA, 550 bp, Homo sapiens; identical to SEQ ID NO: 728848

SEQ ID NO: 803714 - DNA, 606 bp, Homo sapiens
taaaaaatatttggtataattctaggtactgtatagcttagtgtccttgaaaggtgttggcagtagccaagcaggatcagagtgagaaataaggctggagagagagtgtggggccagatagtcaaatgctttgactagtagtgggtatttgtgaatgtgggactgagaagattaaagatagaaggttgaaaatcatttgcacagagatggtaactgaagatgtgggaattcatgatatttcagagagaaattaagaagagagaacagaggcaaggtgagagctttcaaragaatctatatttaggggacaactagaagaaataacttagaaaaggagagagtcaaagcaaagctagtaaattttaatgacaagggaagcttagagagcaaagaattccaggagggaggtagtgatgatagcatcaaataatgcacagaggttaaggaaggtgagaactcagagaaacaaggcccctggttttgttcctgaggtcattaatgacatctagaaaacagcatcagtagagtagttgaaggtagagttcaatttgagtgttattaatgattctcatgtagattcaggtaatcaatattgagttcctacta

SEQ ID NO: 803715 - DNA, 606 bp, Homo sapiens
taaaaaatatttggtataattctaggtactgtatagcttagtgtccttgaaaggtgttggcagtagccaagcaggatcagagtgagaaataaggctggagagagagtgtggggccagatagtcaaatgctttgactagtagtgggtatttgtgaatgtgggactgagaagattaaagatagaaggttgaaaatcatttgcacagagatggtaactgaagatgtgggaattcatgatatttcagagagaaattaagaagagagaacagaggcaaggtgagagctttcaagagaatctatatttaggggacaactrgaagaaataacttagaaaaggagagagtcaaagcaaagctagtaaattttaatgacaagggaagcttagagagcaaagaattccaggagggaggtagtgatgatagcatcaaataatgcacagaggttaaggaaggtgagaactcagagaaacaaggcccctggttttgttcctgaggtcattaatgacatctagaaaacagcatcagtagagtagttgaaggtagagttcaatttgagtgttattaatgattctcatgtagattcaggtaatcaatattgagttcctacta

SEQ ID NO: 803716 - DNA, 554 bp, Homo sapiens
cactgctgtctttctagaatgttgcaacaaatttgaattgaaagttcctgtcttattcccactcttcagaagtaatctttaacaggtatcccttgaaatactgtaaattctataattgtgccaaacgatttcccagactctcagtgtcagaaaggaagctgaacttctgttctttcagtagtttgttgctggttatgagttggtggttttgttgtttcaaaggtgtgggtcatatratcacttaattttgtataatttactgctccagtattttcctaatttgtttctattagggctctaagaagtataattttacacgagttaggtaggagatagaatattttattcatgaaatataaaaagattaagtccagaaaaataaggttcttctttctagccatagcttattttgaacaccaaatattttctcattctattttgtagatgtagatttaagtctttgagaacattgatgatgatagcattctgtgcttttatccttgttctgtctttttatttaaagagaattatgtggttaaaaaagaagcaggtca

SEQ ID NO: 803717 - DNA, 632 bp, Homo sapiens
ccaggattttgactccatctacataacccaaatcttgtacactttttactattatcatccatcttgttcaagtgaatacaaatgccagaaccccaaattaaatgcacctagtcaggaacaactggctttacatactcaaaaatgtggaggagaaaatgggttatcatatatagaggtggagaaagaactagctgggggtaatgtttcatgaagctcctctaaaacgtttgcttaggagttgggtttcagtggtttgcttcttgttacagaagaaaatccccccaaaacataaaacaacttgtaatttaaaaagcatttaccaaacatctatttcatgcaaagcaagacagaagaaaatgctgcaattttaatattgttttatacctcggcatgatcatgcttaattttcctgtcaatgtcctgttctggaarcaaattctttcaggttctgacttgttcaaaactatgaaagtcctgtctatacagaaggtagaatgatagaccctgaggtttgggaatagagatgagtgaggcatcccaagtctccaagtagcttacagtttgatagagggaagaccagcatgcacctgactaacacaatagatgaagggaagaagagcaagatgtcaaga

SEQ ID NO: 803718 - DNA, 658 bp, Homo sapiens
acatgtgttcaacaaaaatatatacagggatgtgcatggcagcattgtttgtaatagcctaaacctgggaataaccaaatgtccatcaacaatagaataggtaaataaattatggcatatttgaacaaaaggataatatacaacaatgaaaatcaataatagcagataggaatcttgcaaatattatattaagtacaataagccagacacacacacacacatacacactactatatgcatattagttttctaggctgctgtagaaacaaatcaccacaaatttaatggcttaaaaaaacrtaattatcatcttacaattttgtatatcagatgtccactatgggtctcaccagattaaagtcaaggtatcagcaggctgtgtttctttctggaagtttatttgaattgttggctgaattcaattccacgcagttgtaagaccaaagtccctgttatcttgctcctgtcagcctagggccatcctcttctagaggctgctgcattccatggctcgtggcccccttcttccatcttcagaatcaacaattgcaagttgagtgcttctcatggcgtatctctctgacccacttgcaaaagatactctgcttttaaggattgatgtgattagattggatccacgaaggataatccaggataa

SEQ ID NO: 803719 - DNA, 612 bp, Homo sapiens
tttcatacttgaaattaatgtgtagaataaatgcaacattttatttgcctagatatttactctctcaaagtccaaatatcttacattaagaattttgcttaccacaacacattgcttcagttgactgattgtgaagaaagtgtttattcctggagttttgtggaagaggttagtggaagcctcttccctaccagggagctgttattgttgaggcaaggaaagaagcccagagccacatatatcagagaaaaatccaaacacatgtaaagcaacaaggaggaaaacacagtggggaagcaaatattctatactaggcaggycttgaatgctcaattctatcactcactgtctgtgtggtctgagaacattctttgtatgacttgaatccttaagacttgttttatgacccagaaatataataatctttgttggtaaatgtttcatacgcacttgaaaagaatatattgttgatgggtagtctataaatgctaattaagtcaagttgctaatgttcacatttttgtttcatgtattttgaagctgttattacatgaataaagatttaggctttttatatcctctggataaatttggggcttcatcattgctcat

SEQ ID NO: 803720 - DNA, 561 bp, Homo sapiens
tagtaatttaactagaataaattgaatgctctggatgttttcttcctcctcctccaactcctcttctttcttcttcttcaacattgtcaacatcatcagacactgataatacagcaaatctgtgaaagagttatgctaaacactaagttgtcctaaattaactcagaaggtcttgccaaaccctgaatacaaaaaagggcaggaataagtttgttgcaaactaattttcaatttattgtgaagagaatgggcatttattatgagaagaatggacagtttcacyctgtcacccaagctagacccctactttgtacagcttctttacctgtgtcatcttatttatcttcacaatggtcttgtaattgtagttggcattatttccaactcagaaatgttaagtaatttgcccctggtcaccccagcaataggtatgtacttactctctgacattccatctgagatttttttttaacctaaactcagttttcttattcaattcaattgatatttattgagtacctattatgtactaggtacttacttgtactaagagctgagtat

SEQ ID NO: 803721 - DNA, 561 bp, Homo sapiens
tagtaatttaactagaataaattgaatgctctggatgttttcttcctcctcctccaactcctcttctttcttcttcttcaacattgtcaacatcatcagacactgataatacagcaaatctgtgaaagagttatgctaaacactaagttgtcctaaattaactcagaaggtcttgccaaaccctgaatacaaaaaagggcaggaataagtttgttgcaaactaattttcaatttattgtgaagagaatgggcatttattatgagaagaatggacagtttcaccctgtcacccaagctagacccctactttgtacagyttctttacctgtgtcatcttatttatcttcacaatggtcttgtaattgtagttggcattatttccaactcagaaatgttaagtaatttgcccctggtcaccccagcaataggtatgtacttactctctgacattccatctgagatttttttttaacctaaactcagttttcttattcaattcaattgatatttattgagtacctattatgtactaggtacttacttgtactaagagctgagtat

SEQ ID NO: 803722 - DNA, 608 bp, Homo sapiens
ttttcctgtctgtaaatcttatgccaccatgtggctgcgctagagtctctgagcccgctgtgtctcaggaggctgcccgatttgcgaatcgttcattgctcaattaaactcctttaaatttaattcagctgaatttttttttctttttctttttctttttttgagacggagtctctctctgtcgcccaggctggagtgcagtggcgcgatctctgctcactgcaagctccgcctcccgggttcatgccattctcctgcctcagcctcctgagcagctgggaccacaggcgcccgccaccatgcccggttaattttttgtgtttttagtagagacggggtttcaatgtrttagccaggatggtcttgatctcctgacctcgtgatccgcccgcctcagcctcccaaagtgctgggattacaggcgtgagctaccgcgcccggccttttttttttttaacaaacactaacgtatgttttcaagtagcagtagctctattcctttaaacagaggtcaactccgtgaagaccctgacaactgtatgggctgacgttcctaaagggaagcaaaatggttttttctgattccaaagatgatgagaaatactagg

SEQ ID NO: 803723 - DNA, 587 bp, Homo sapiens
accacgtagggaacaaaagtctggaaatcttactggataaaatgagttaaagcagtggtccccaactttttggcaccaggaactggttttgtggaagacaatgtttccacggatggggtgggtaaggggaatggttttgggattaaactattccatctcagatcatcagtcatcgggcattagattctcacaagaagcagcaacctagatccctcacatgtgtagttcacaataggctttgcactcctctgagaatctaatgaaaccacrgatctgacaggaggtggagctcaggcagcaatgctcactcacccaccactcacctcctgctgtgcggcccagttcctgcaggccatggacacctaccagtctgcggactgggggttggggacctctgagttaaagaaaccacggctgcctagcttcaagggataagaacaacaaatacaataacattcaaatacaagacagcctttaaagagataagagattataaatttattttataactgcaaagggcagaagtagatctcatgtggtggaatgaaaatagttctgtataaaaaactattgaataatgagatata

SEQ ID NO: 803724 - DNA, 506 bp, Homo sapiens
ccaattcccatgcacccttgtatatatcacttcttcgtgtttttgactcctaactgctacagctgatagagaattccaatctcatgctcctattgtaacgcattccccgttctctaaaaaaaaaaatctcaagaatctccaaagtggtagtagaaattattcatttttccttagacgagttgcctagtggttgacaaggggcacgtctgatctgcctttsttttctctagaacatacggaatggtttgaatatttattattgtagttaaagtaacatttaaaaagataaaagaaaatggtaagctctatagtcttgaaattctctccgatctctcttcctttgagcttgcttaacccttgaatcacaacatctgttgaatccctcaggtcatccctgcagagggagagtacataagagataatctaatatttagaaagtataacccccatttgtactctatattgctctatgctgtgacactatgttgtagttgactgtttgctgg

SEQ ID NO: 803725 - DNA, 506 bp, Homo sapiens
ccaattcccatgcacccttgtatatatcacttcttcgtgtttttgactcctaactgctacagctgatagagaattccaatctcatgctcctattgtaacgcattccccgttctctaaaaaaaaaaatctcaagaatctccaaagtggtagtagaaattattcatttttccttagacgagttgcctagtggttgacaaggggcacgtctgatctgcctttgttttctctagaacatacggaatggtttgaatatttattattgtagttaaagtaacatttaaaaagataaaagaaaatggtaagctctatagtcttgaaattctctccgatctctcttcctttgagcttgcttaacccttgaatcacaayatctgttgaatccctcaggtcatccctgcagagggagagtacataagagataatctaatatttagaaagtataacccccatttgtactctatattgctctatgctgtgacactatgttgtagttgactgtttgctgg

SEQ ID NO: 803726 - DNA, 631 bp, Homo sapiens
agcagcctggcgcccgtatatccatttagccacaggtgacaggggtgggtggctccactgctcctcttttcattttattaaaaccctattttaaggccattgtcaagaagagtgacttaattcctttggaacatagagctaagagactggcaaactgtaaatctggctctttcttgactgctcctcagaaagtacaagaaatgggaatttagactcaatttcaaataccaygtgtaaactgagacacagggcagctcattaggagtgtgttcacagccaacaggaacccaaggccaccctcaaacattccttttccagaaagtcctctctaattacatacacacagacagacatgtgcatacatacatatatgtatatatatgcctgtacatatgtgtatatatgcacacatctcgtatatggatacacacacgcacagcaggactattcaccccaagtgcaatgtgtttgagttcgacaatgaggtttagattctaatctggcacaggacattgtcttggcagggtattcagccttttcatctgcactggtctccttctgggggagccaatgagatccattctattcccaaggcccaagagtggatcccagcagccatgttatcctacat

SEQ ID NO: 803727 - DNA, 579 bp, Homo sapiens
agagtggatcccagcagccatgttatcctacatgactactatggactgaattgtgcccctctacaattaatatgttgaagcgctgatctcgaatgtgactgttatttggagacagaacccgtaaggaagtaattaaggttaaatgcggtcctaagggtgggtctctgatctgacagaatagtgtccttgtaagaagagacaccagctcactgtctctttctccaccctgggaggactcggcgagaaggaggccatcaacaagctagaaaaagagccctccccagacaccaaatctgctaccactttaatcttggattttccagcctccagaactgtgagaaataaatttctgttgtttgagccacccagtctgtagtatcttgttatgayagcctgagcagacttagataaataacactcaccacaaagccttcggtgagtgattggccaagagtggataactatccaagctgcatcagacagactgtgtctctttctagaatttgggatacacacagggaaagctgaatcaagcctggtcacatgtaagcctgggagtcctggggtggtcatttttcg

SEQ ID NO: 803728 - DNA, 484 bp, Homo sapiens
atactcaggatctgaatgtgagggccgaggagggcgaagagcgtgggtggggaggggatgttgctttggggtctcatggtccccagagggcactagggagtcacttttggctccgctggtgcatgaagtcacctgtggccaccatccgttccgcctaaaacactctggagagaatcccacctttcttacaatttgytgggccattgaggtttgagggcctgtgtttggatccttgcaactgtgtggtctcacctctgtgcgtgcattctcattgccagaattggtctattttcacggctggtctttggggaggggggcgggatccagcctttgttttgttgtgttggggtgggggtgttgtttttctaaaagctacctcttatgtttgtccagttgttcttttgttcctttcccgcctcccattctgctgctcttcctccctcttttccccaacctcccccgacccttcttgaattttgggaaa

SEQ ID NO: 803729 - DNA, 633 bp, Homo sapiens
tcataggtattcagtacatatttgctgattatgtaaatgtaattggcatgccagtcataataagtttgaagtggtttgaacagtcttatttttcttttatacttaaaatatttcctccatccctttgtgttttcacaatcaatatgagaagagatttttctaagggcaggtggccattcagcctagtttccgcctggtgcattttcaattctgaatggagagatgagctctaactgtgcttctaggttttgccattctactttgcatcgttgtccttttcctcacaatgactctttacttacaaaagtgtcagactttttctgaacactacatttacaaccatggtttcaccgagtatccccactcaaaattaggcatgctgcttgtaacaccttagccatcacagcagtggaaaatgtaaaacacattttttaaatctgaatgctgagcttcatgcaacacatcaaacrcacccaatcttcccagccccatatggaacttgtgaacatacatttaaacagaacaagaaaaggttttaccctttatatcccttttatgggtgtctagaatcagtgataaattttctttttcgtatagccactgctacacatagctgcgaataaggaaagtaat

SEQ ID NO: 803730 - DNA, 558 bp, Homo sapiens
atcatagagaaaattttcaaatgccttcttacaggtattaaacattcagttacatgatacaattaactgctgccatcatatcacatggtaaactagtttgaatagggactttctgtgccacgttacaggccatacagtagcatttttaggtcatggagtatgaagacatatgttgaaatcccaactcagccacttaatggcttttttaccttgagaaagtgacttaaactccctaagctttaatttctccagctgtaattactgtatgacaaatgtcagtacatcaagcattttgtgaggtttaaatgagataatgtgtagaaaactcagcatgattgtagragaataagtactaaatatagaagtagtgatactagtaatagtaatctttggaggacactaacatattattacaaatgtgtttcataaattatctcattgtatcattgtattatcaccatcttacagatgagaaaacagaaacttacagaactttaatcacctgcccaagaccaggttaagtgccagagatgacactcacatgtcctcagattctaa

SEQ ID NO: 803731 - DNA, 558 bp, Homo sapiens
atcatagagaaaattttcaaatgccttcttacaggtattaaacattcagttacatgatacaattaactgctgccatcatatcacatggtaaactagtttgaatagggactttctgtgccacgttacaggccatacagtagcatttttaggtcatggagtatgaagacatatgttgaaatcccaactcagccacttaatggcttttttaccttgagaaagtgacttaaactccctaagctttaatttctccagctgtaattactgtatgacaaatgtcagtacatcaagcattttgtgaggtttaaatgagataatgtgtagaaaactcagcatgattgtagaagaataagtactaaatatagaagtagtgatactagtaatagtaatctttggaggacactaacayattattacaaatgtgtttcataaattatctcattgtatcattgtattatcaccatcttacagatgagaaaacagaaacttacagaactttaatcacctgcccaagaccaggttaagtgccagagatgacactcacatgtcctcagattctaa

SEQ ID NO: 803732 - DNA, 645 bp, Homo sapiens
cagtgctaatatcactcatgttaatattgagatactttcttaggaatagcatgtgatgcatcagtgtctaagaaataataaaaggataaacatagcatcaagacttctgaatgcttgtgtatattactgaaaattagtatatatcagtctaacctcattaaattcttagacagtgaatgtgtgtctgtattcagaattttattttcatgttcttgggaaatgatgagtggaagaacatttatgtagtattgaattaatattaaaaagaaattgattatatctttcaagggtttattaagcaattgctctatttaagtcactatggtaaattatatgcacatagacattaaacaaaaacagaatctctggcttcaagagcctcrtgatttaactgtatgggagaccagaaaataaactggaggagtcatgcagagtgctccaggaggaagcctatgggagatacataactaaaaaatccttagggatgagaggagccaaggaaggtttcctagagaacgaataagacatatgctacatatgacatataggacagctttttccggacaaagaaagcagaaaactatgtactagacaaagagaggagcatgtgcaaggacatacaaatagggaggcagtagtttggac

SEQ ID NO: 803733 - DNA, 562 bp, Homo sapiens
atgcaatttcagatacattgggttttctgaattctagactttaattaattataggtacttaattgcattatctgggcttgtagactttcaacatatttttgatgatggtatactgttgactccctcagtactgcttttgttttcatagcttccagaattttagctttatactgtccctggcctcgctgagatatttctaatccttatacttgccccaggactctgttacttactccagtattattaaaatgcttatctcaagggtcacctctttctgtttgttccatcttaatgtagttttggttttctatataaatggaaaggtgttgtttagcaatttatattttccaactaaaagtatgatttggtgatctttccaggctgatgaatatggataaatttcatttttttttgagttgctacrgaagagcatcacagtattgtattacaatatttattcttctattgatagacaaataatggatttctacttcttttgttataaacaatgctgtgatgaaaatacttatatatttctgtgtatgtgttagaagtacaaaac

SEQ ID NO: 803734 - DNA, 643 bp, Homo sapiens
tgtcaaattatccattaatatggctatattagtttctactctatcaatcatgtttaagagaatgtctgctccaggtgtggtggttcacacctgtaatcccagcactttgggaggctcaggcaggaggatttcttgaagccaagattttgagatcagccttgacaatgtaggcagacgcccatctctrcaaaaaaaaattagaaaattagctggatccagtggcacatgtgtgtagtcccagctactcgagaggctgaggtaggaagaatgcttgagcccaggagttcgaggctgcagtgacccatgattgggagcctgtgtgtaaaaaaacaaaaacaaaaacaaaaaaacacacacgcacacacaaacaaaaacagagggtccatttacccacatttttatccactttggctgtaatcactctccttaatttttaccagttggatgattttaaaaaacctcttacttaaagttacatagtaagggtgagcatattttcatctgtttatcggtgatttgtatttcatttttgtgacattttctgttatggttgatggctcgtttttatatttaaaaatttatagaagtgctttatgtattatacaattattttcttcttttgttattttgaaatgtccttttc

SEQ ID NO: 803735 - DNA, 565 bp, Homo sapiens
catttacaggggtagttgttcaatttctcttcctaaagactttctactcacagctttgagtggcaatcccttgatagatttctggattctgaccatgtatggaacagtctttccagtctgctcattaggattacgccccctttctctgattttacagctacactccatctgatctagttaaaaattcaaatatttatctagtttataataccattttaaagagcaggtaggcagagtaaatctttttccttttttaatttattgtcgtcttcaagtttttatttccttgtcatatctgtcaagtctgtcctctaaggtctaacctttattctaaggaaatactgcakgtctccaatattatccaagctatctttcttaggttccctcagaagcagaccttgaggcaaggcaagtgcagtttatttggcaggtgttgccccaggaagcaccagtaggggagtggggaatgagacagggaagaggagggagccactacctggttcaattatgagcagataggctctgtgggcatctggggctcaatctaatgggtgctttgggtgga

SEQ ID NO: 803736 - DNA, 565 bp, Homo sapiens
catttacaggggtagttgttcaatttctcttcctaaagactttctactcacagctttgagtggcaatcccttgatagatttctggattctgaccatgtatggaacagtctttccagtctgctcattaggattacgccccctttctctgattttacagctacactccatctgatctagttaaaaattcaaatatttatctagtttataataccattttaaagagcaggtaggcagagtaaatctttttccttttttaatttattgtcgtcttcaagtttttatttccttgtcatatctgtcaagtctgtcctctaaggtctaacctttattctaaggaaatactgcagktctccaatattatccaagctatctttcttaggttccctcagaagcagaccttgaggcaaggcaagtgcagtttatttggcaggtgttgccccaggaagcaccagtaggggagtggggaatgagacagggaagaggagggagccactacctggttcaattatgagcagataggctctgtgggcatctggggctcaatctaatgggtgctttgggtgga

SEQ ID NO: 803737 - DNA, 612 bp, Homo sapiens
catttaaccatttaactctcctccacatgtttcacacacatacatatgatctgactgtatgaaatctgagaactgaactctggacctgtactctttggaaccgagaagcaccacaggaatctatgggatgagtgtatgtaagagtgtttgcgtgtgtgtgtgtgtgtgtgtgtgtgtgtgagagagagagagagagagactaaaaatgacttatacttccatcagtctgagacagttactactaatatcttggtatccatcagccagaatgmgttctatgcatgtgctcacatatacataaatatacatgatttcaaaagactaatacttgtaatctgatttttatcttttgttttgtgtgttttcatgccattaaatactgttcaaggaaaatagtcacaactaataaatgtggataaaatattttaaaatatatctttgagggcaaaagaaaactaacaaagtaaccaacactgagtgaacaagattcaaaagagcaacacagcaaggaaagatgaaccaaacattctgtgttgattctctcctctaggcattttgtcagtccacaaatggcaatctagagactaacagacctttcagagctttcaataa

SEQ ID NO: 803738 - DNA, 421 bp, Homo sapiens
gaacttccccaacttagcaagacagcccaacattcaaattaaggaaatccagataaccccagtaagatactccatgagaagatcaaccccaaggcacataatcatcagattttccaaagttgaaatgaaggaaaamatgttaatggcagccagagagaaaggtcaggtcacctacacagcaaagtctatctgattaacagtggacctctcaatggaaaccctataagccagaagagattgggggaccaatattcaacattcttaaagaaaagaatttccaactcagaatttcatatctggccaaactaaacttcataatcaaaggagaaataaaatcctttccagacaagcaaattctgagagattctgtcaccgccgggactgcctggaaagagttcctgagggaagcactgaatatgca

SEQ ID NO: 803739 - DNA, 603 bp, Homo sapiens
gtgtatataaatcaaagcacccattatacaatatacgcatacctacacaataataaagatttgctttggcacctgagacatctttctgtcctacttgtagtcattgctagaatacttatttgtaaccagtttcaatagtcagggtcctggcagaaaaatagatgacacactcaaagggattattgctaagaattcatgaaaagtctattgaaagaggcaagaacatgattagggatccaacaaggggtgaagaaacacgcgggactgacagcaacaggaagccatcaccttgactagcctgaagggtaaggaaaaggtgttgtgcagtttccacaacccagtgagagctgtagctatggaaggagatggcctgagctgacacctggcctgaaaggaaataaacagcaaawaaatactatgatttctgtttcaacactttgctctccagctaatgccctcatttcccaaatccaaacaaaaggaaaagagcagaggaagccaagtgatatattccgaaaaagtcaacctccctaccaggtagaaaagtgcaggaaaggacaaagaagagctctcaagagcctaatagatgagaagatagacaaa

SEQ ID NO: 803740 - DNA, 574 bp, Homo sapiens
ccctgttactaaccatcacagcgtcttaggaaatcggccaaactcgctccctcctcattagctgacatccaaaggaggaaggttctgaatgaccttgcataggtcccatggcttccttttgcccctcgccttcctaaattaactgtctacttatgccaagcaaatctgtctccagaccttgcagccagttacagctcctgtcaataggatctaaatgaaaaaggtgaagaacatgctttccccagtctggcatattgctagaggtttgtaagttgtcaggagccgagaagtgtggtggttttcattatctatcgctgcctaacaaaccacaccagagcttagtgatttaaatgacctttttatctcctctcccagttctgagtgactgggctcagtcgggccgttctgcttctcgtgatggcrctggggttgcagtcatttgggacctggaaagggctagaacttctgagtctgctcacttacatggctggcagtcaatgtgggctgttggctgtgagctcagatgggactgtgtggaccagagcaccttggttcccattcgtgtggtcttacc

SEQ ID NO: 803741 - DNA, 567 bp, Homo sapiens
aggcccgtctgtctagattcttcctggcctctctgtgctgcattccttccttctgggtgtaggacaggactctcgctggaatgggagtcttatgacctacatacagtcaaacaaggcctgtctggctagattcttctaggtatcctgggttctagattcttcttggtatcccaggttctagattctttttggcctctctgtgctgcattccttccttctgggggtaggacggggctctctctggaatgggagtcttacaacctacayagagtcaaacaaagccgaaaccaagaaaatttctttatggccagtttttatacagaaaggtggagggaaacttagagtagagtaatataattaggttttatggctgactttgggggaaaagggttctgtttctacctgccttggagaagagggattccagtttctatggctaatcttgggggagcatgggactgagagacttgagggcagaaggttagagaaaaatggttgcttctgaggctactgtggaggactttatttggggtatcattttctaagcctcaacagggaatttaggaa

SEQ ID NO: 803742 - DNA, 524 bp, Homo sapiens
tccttaaaggtagaagagggagacagggttattggaggatgttgtgatgctggctttgaaggtggaagaaggagccacaagccaaggaatgcaggcagcctctagaagctggaaaaggcaaggaaagagattctttttgatgcccccggaagggatgcagtcctggcgacacaccttgatttgagcccttgagactcatttcaaaccgctgacctccagagctgtaggataatacaggtgycattttaagccaccaaatttgtgataatttactacaacatcaatagaaaatgaatacagccacctgcagcactagcacagtgcctggaacacagcaaaggtcaataaataggaacaattattgctcatagctgcagctaggtatggggcctcagttttccccatccttaaaagtggggttggcctcagtgactcaagacccccatctggctttctgatgtcttaatgagaagacttcctgtcaggcagctaggaattaacaaagacaccttctctgcttgatg

SEQ ID NO: 803743 - DNA, 503 bp, Homo sapiens
ggccctcacaccttccatttcgccctgtcagcagcctggcactgcgcctttgcccttcccttccctgactgcctctcccccaagctcctgctcagtgatgcttctcctgcccaccccgagtcagcctggacccctccccttggccctgcagcccctgggcccagcgttggcagctctgcctcctggagattcttccgtttctctggtccgtgccctctcacctccccattcctgctcctggctcccagtctgcaaagggaaattctaaacacctatttcatggggtagggctgggggagaaaggagagagccccaccccctggcacacgataggtgctccgtgaaggcctaaggggaargcaggagcttgggctgagctcgcctagggtctgcgggcctctgctccagcagggagcccagcaggcccctgaccccttttcctgacaaacagggagtttgctcacctggccaagacccccggtgaggcagaaattcctgttttc

SEQ ID NO: 803744 - DNA, 551 bp, Homo sapiens
agcggctaaagtcttactggtgatttttttctttacttgatctatcaaatcctaatagaggagcttccactatttgcctgatatatataaatatcagacaaataaatgttatgtgtgtatatatatatgcacactcatatacacatatctgaagctgtgctatatcatgtgtgtaccctctaaacggtttcatttcttcctggttaattgactcatcattttgcaatggcacactttatataaacatttatagtaatgtttttgtcttcaagtttgttttgtctgacattaatatgaatagagcagattcctttgagttaatatttgtctggkgtgttttatttcatccactgacttctaacttttctgtgttcttagagctgaatttttttggtgtgcctactttgaccatcttcatcttgttattgtgattactgatgtattcaaattatttctaccatgtagcacatagtaggtgctcaggaaacgagccattgtcaaccctgaggcctctagaaggcctgctgggagtgggggctgggaagggaagt

SEQ ID NO: 803745 - DNA, 565 bp, Homo sapiens
ccctcaggaaggaatgctggagctgtgatcagaaggaaccagaggaattaggatataactaggcaaagaggagggagataagctgtgacgagataggacagcaggtgcagaagccctgtagtgcgagaggcatggtgggagggaaacttcgagtaggccgctgtggctgcagcatgagcagcaagggcagcatggtgagagcagacggtgataaactatatgaatcttgcagttgtgttaaaggtgtgtttgtctttatgaacaatgggaagtcatcaagaagtttaagtyacgagctggcaaaatgaattaatacacttacaaaatatttggagtcttgcttgattagaacagaaaaatatatttgacatttcttttttgataacaatgttatctccttatgtccttttctcaaacatcttcaatggttccctaatacaatggtatgaatctagcatttaaggctcttaaagcatcattttctagattcatattcccattttactaccctgacctactgcctacctcccccaccacatacacactatgctctgcatttgaaagt

SEQ ID NO: 803746 - DNA, 565 bp, Homo sapiens
ccctcaggaaggaatgctggagctgtgatcagaaggaaccagaggaattaggatataactaggcaaagaggagggagataagctgtgacgagataggacagcaggtgcagaagccctgtagtgcgagaggcatggtgggagggaaacttcgagtaggccgctgtggctgcagcatgagcagcaagggcagcatggtgagagcagacggtgataaactatatgaatcttgcagttgtgttaaaggtgtgtttgtctttatgaacaatgggaagtcatcaagaagtttaagttacgagctggcaaaatgaattaatacacttacaaaatatttggagtcttgcttgattagaacagaaaaatatatttgacatttcttttttgataayaatgttatctccttatgtccttttctcaaacatcttcaatggttccctaatacaatggtatgaatctagcatttaaggctcttaaagcatcattttctagattcatattcccattttactaccctgacctactgcctacctcccccaccacatacacactatgctctgcatttgaaagt

SEQ ID NO: 803747 - DNA, 574 bp, Homo sapiens
aagactgaaatgaggacactctccaaaaaataagagtgggagaaggatttcaggtgatttctcttttctttggtttatcagtatagtggacccatacccagcaagcatttaattcaccaccacccacctccaaaccctgccctcccattccactttgaactagactttgatgctcatggtcaaaaggtaaagaagatgaaataatgtaatctttgtcttctgaatttctagtatcccaggtcattcttcttaagggattattcagggtcattttttactgtaattttcaccttatacctgtaagatttcaatgacacygtattttcagatttttttgtactattaacttatattactcatgattgataattaaaaaaattgatattaaaaaaggtgaaatatcacctccttccatgaattgacattttgaattgtgaaccagaaacccgagcagcctggggtggggatcgcgcgtctttgctctctcaccagaactgtcagccttcagagaggggactgggggtggggtgatttatatgtcactacagacatcatggaaattctcagcgtggca

SEQ ID NO: 803748 - DNA, 574 bp, Homo sapiens
aagactgaaatgaggacactctccaaaaaataagagtgggagaaggatttcaggtgatttctcttttctttggtttatcagtatagtggacccatacccagcaagcatttaattcaccaccacccacctccaaaccctgccctcccattccactttgaactagactttgatgctcatggtcaaaaggtaaagaagatgaaataatgtaatctttgtcttctgaatttctagtatcccaggtcattcttcttaagggattattcagggtcattttttactgtaattttcaccttatacctgtaagatttcaatgacaccgtattttcagatttttttgtactattaacttatattactcatgattgataattwaaaaaattgatattaaaaaaggtgaaatatcacctccttccatgaattgacattttgaattgtgaaccagaaacccgagcagcctggggtggggatcgcgcgtctttgctctctcaccagaactgtcagccttcagagaggggactgggggtggggtgatttatatgtcactacagacatcatggaaattctcagcgtggca

SEQ ID NO: 803749 - DNA, 460 bp, Homo sapiens
aggtcacattctgaggtactgagggttaggacttcaacatatgagtttttgggggggacaaaagttaacccataacagatggggacagcccagaacccaaacggcagggatgagtgtggaagaataaaatggggtgttgggttcaagctacattttcctctgtgagaaaggcagctgtgtcagaagagggatctaggggagacagaaacagttcataaggatttaaaaacacacgtcactgctatgtggtakgccatgcctgctctttattctgtgtttccacaaaatcgatttctattctggataggagagtcagggaggggattgctgatgtgctagccccaaagctgggcagggcaaaaccagcactgcccacaggaggccagggctgctaggcaacacaagataaagcagtgcagcaaggcaaagaggagacgagagagtagagtgaggcaaagcc

SEQ ID NO: 803750 - DNA, 460 bp, Homo sapiens
aggtcacattctgaggtactgagggttaggacttcaacatatgagtttttgggggggacaaaagttaacccataacagatggggacagcccagaacccaaacggcagggatgagtgtggaagaataaaatggggtgttgggttcaagctacattttcctctgtgagaaaggcagctgtgtcagaagagggatctaggggagacagaaacagttcataaggatttaaaaacacacgtcactgctatgtggtaggccatgccwgctctttattctgtgtttccacaaaatcgatttctattctggataggagagtcagggaggggattgctgatgtgctagccccaaagctgggcagggcaaaaccagcactgcccacaggaggccagggctgctaggcaacacaagataaagcagtgcagcaaggcaaagaggagacgagagagtagagtgaggcaaagcc

SEQ ID NO: 803751 - DNA, 539 bp, Homo sapiens
ccaaggtagttagaatgtccagggcaaagtagtaaaggagagaacttcacagagaactcctgagatttgcagtgatccatgcatgcttgtgaagaaatatacaaggctaagggaagcaccaccggaactagaggaaatcatagctagtgctcacacagggccagaatagtgcctcttccgaccagtcagtctggaaaacctcatgcttcacaagacattgagtacgtactcygaagggttttgcctcagtagtggggaatagtaagccctagactaactgctgctctagtccttcctaacaaatcttaaaagaaataccaaaatgatcaaactgtttccaagtgacttaactgcatctcagaacaaagtgcaagaatatttatagtaatacaaaaatgtccaacactcagcaaggtaatattcataattactatcatcaaataaaaaattaacaggcttgcaaatcaattaaaactggcccaggattgacacagatgtaaaaactggcaggcaagaacattagcacatttattatagct

SEQ ID NO: 803752 - DNA, 481 bp, Homo sapiens
tagctaattttttgtattttttgtagaatctgggttttgccgtcttgcccaggctggtctcgaactcctggactcaagcgatctgcctgtcttggccttccaaagtgctgagattgtaggtacgagccattgtgtccagcctgcttacacttttatagtcttatttttctcatctataaaatgaagtttcttttatccatctctcaacgttgttgtaaggatttaatagcaataatagctggtrttattggtcagtttctatgtgtcagaaactgctttaagcagtctacgtgtatttatttaatctttatattaccgcagccctataaggataatgattatgtgtattttacagatgagataactgaggtacattagttaggtgacttgcccaaggtcacactactagtaagtaggggagctgggattcatgagatgatatttagaaagtgtcttctattaagtagtcacccaataaatg

SEQ ID NO: 803753 - DNA, 626 bp, Homo sapiens
gctcaagtagtcatactagcagggaatgagatttatgagatgaggtaatagacatacaaatagaaaaatacattctaaaggaacttttccctcaaatgcctatttcctttgtgattgatttgtgtgggggaggctgaggaaatttaattcccttgccttccccaccacattcctcccgtttcagggtctaaatgttcctaattgcagtacagaggcatcttctcagagagcggtcctcagggacacttcccactctcctcagctctgcagtttctagtggcttccttcagtgacattcctacttttcattgactcttgagatattatattaaaatggaagatttattcccctggcagaaattgaggtcactgatattcagggaaaggtgcagtgcctctccagttatcctgcaactctttgtcaaaccctgcagagtgattaataggaaagtgttcgacaagggtcactygcagagggcggggactctggttcaaaccacactgtgtgctctcacccaagtgcgcacttataatcaataatagatactgcaagaggacatactgtgtagcaagcacagggctacatagattctattccttattttattgaatcctcaaaacgaatc

SEQ ID NO: 803754 - DNA, 513 bp, Homo sapiens
tttctaatgagccccctgtggatggagggttgttggatcacattttgaaaaatactagtccttgagagatctcttagatgcctttcctcattgagggtcccagaatgacacactgtcccctgcacagggactggagaaatcctgctgttcaagatggcatagtgccctgtgaacctcagggtccttccatggaagaacatcagggaggaaatgaagtacataaaattcactatgctgagatcagctacaaacacatgagtcataaagttgtgctggctgstgtggggatttgagaaacgtttctgtgtaatccacttgggttatttcacaagaattggcaacgcagcaatggtatttagggtgcctagtggtgctattcagatttgaactacaccataagtttcatgtaggcttaatttattattattaatctgccataaattgctgatgtgacttttagcaggccactttgcttttctggcctcttctttctacgatgggtgggttaagttt

SEQ ID NO: 803755 - DNA, 561 bp, Homo sapiens
ggggctggaagctgtggagagaaaggatgagggagaagggtggcttctgtgtgtagattctacttttttgttttgagatggagtcttgctctgtcgcccaggctggagtgcagtggcgtgatcttggctcactgcaagctccgcctcccgggttcacgccattctcctgcctcagcctcccgagtagctgggactacaggtgaccgccaccacacctgtctaattttttgtatttttagcagagattgggtttcaccatgttagcmaggatggtctcgatctcctgacctcaaatgatccgcccgcctcggcctcccaaagtgctgggattacaggcgtgagccaacgtgcctggcctctactttttttttttttaaactactggttgaggaggtgcagactagttgagccctgggttcccacttgtctttcctctctcttacctccacctcttttctttttcatttcctactgtctccaaggtaattgatggtgggaccagaaagaggatggagtaaaaaccattggagggaagagtgaactgggctatcagattgtatg

SEQ ID NO: 803756 - DNA, 561 bp, Homo sapiens
ggggctggaagctgtggagagaaaggatgagggagaagggtggcttctgtgtgtagattctacttttttgttttgagatggagtcttgctctgtcgcccaggctggagtgcagtggcgtgatcttggctcactgcaagctccgcctcccgggttcacgccattctcctgcctcagcctcccgagtagctgggactacaggtgaccgccaccacacctgtctaattttttgtatttttagcagagattgggtttcaccatgttagccaggatggtctcgatctcctgacctcaaatgatccgcccgcctcggcctcccaaagtgctgggatwacaggcgtgagccaacgtgcctggcctctactttttttttttttaaactactggttgaggaggtgcagactagttgagccctgggttcccacttgtctttcctctctcttacctccacctcttttctttttcatttcctactgtctccaaggtaattgatggtgggaccagaaagaggatggagtaaaaaccattggagggaagagtgaactgggctatcagattgtatg

SEQ ID NO: 803757 - DNA, 613 bp, Homo sapiens
tgtgtttaaataagatcctctacctgggatacaatttaaatcctgatgagatctacaattttgtactctttaaattaaaaaaaaaaaaaatttcacaattcatataagggtttctttctgggaaatatttctttctttatattctatattttttttgctgacacagccaggctgagacatcaacacctacataaactgtgggaaaacacattaaagtgattagaaaaacaataaaagacatccgtgggtttgtgcaactctctcagacagttttatgrggaggatcaaagatgtgggcctcgactctgtgataaaccgaggtcggctgccataatgaggacatggtttcacatgagtgccttgtttttaatgcccgtggagagagagcaggcgcacagcatctgactgagtgaagggccacctctctgaaatcacccctgactttgatcaggaggcagagccaggggtggaacaaatatatttgatctgaagagttaaattctccctcagccagctttttaggaatgaccttactgtgcactaggtcaccagccacagagaaacatcagttcctccctggcatatgtcaggaaatggctgcaggagtgattgc

SEQ ID NO: 803758 - DNA, 613 bp, Homo sapiens
tgtgtttaaataagatcctctacctgggatacaatttaaatcctgatgagatctacaattttgtactctttaaattaaaaaaaaaaaaaatttcacaattcatataagggtttctttctgggaaatatttctttctttatattctatattttttttgctgacacagccaggctgagacatcaacacctacataaactgtgggaaaacacattaaagtgattagaaaaacaataaaagacatccgtgggtttgtgcaactctctcagacagttttatggggaggatcaaagatgtgggcctcgactctgtgataaaccgaggtcggctgccatratgaggacatggtttcacatgagtgccttgtttttaatgcccgtggagagagagcaggcgcacagcatctgactgagtgaagggccacctctctgaaatcacccctgactttgatcaggaggcagagccaggggtggaacaaatatatttgatctgaagagttaaattctccctcagccagctttttaggaatgaccttactgtgcactaggtcaccagccacagagaaacatcagttcctccctggcatatgtcaggaaatggctgcaggagtgattgc

SEQ ID NO: 803759 - DNA, 484 bp, Homo sapiens
tcagcatatctatgaaaatcagactctggggctgagagggtctctccaaagctggtaaacttttttttccccaccctgacaagtctgaggccaggaagctaggtatctactgggattctaatgtagcaacacagacagcagaggggcattaagctcctgtaaataacatatgttttcttagttggaggcagggcagtgctttttggtttctctttataccgctatargtgtgaataatgcaattctgcttgaaattctacatgctttttattcctcatcagactctaactgtacactaacatttgcatatgtcccttctcactgggtgggttcttaaatggactcaatgtactctatgcttctctctctggggatgactgacaagagacgacaaagacaacactcagatattccaacccaacctgcagaagggccatattataacactgaagatttggattctcttggctccctgtattgcagt

SEQ ID NO: 803760 - DNA, 578 bp, Homo sapiens
aacactgaagatttggattctcttggctccctgtattgcagtgggacgcaaacagagtcagcctgtagcacgatgtaccttttctgtgttctactctggtctgacaacatggcaagtaggaggtcctggcttgtgtgtgtaatttagagacaggttttgtactcaactgctaagctttctggtgttcagccactgggacatatggagctgaactctcagaatctctgcaggattgggaggaagaaggtgggaaaacaaatcaggtttccaaagtgcttctactaaacaagtggattcctttagcttgaatgtgttcccctcagtggaatatggtgmtgattcatatgtatggcgaagagagtgaggatttcaacttttagtttatcaagagaatcactcaataatggatatattgagtatctactaagtgcaaagtactatagtagcctgtaagagaaacacacagaaataaaatacgtagcacatgaggaggacaacaaaagctaagtagcgttttataaagaacaaaggcaaagacatcagcaagaagttaatgattactaataacaaatgatgaa

SEQ ID NO: 803761 - DNA, 712 bp, Homo sapiens
aataagaattcatcattctgttgaattcacccaacatctgtgaaacctgtaattgtaagacactgggcttgggtcatggcagatgcaaagttgacttatatttgatttcagtgttcaggaagcacatcatctggtagaggaagcaaacatatacaccaataactataaatcaaggcagtgagtgataggggctctaggagagcatgctaaactacaagctacttgcacgaaaagactgtctttttcatctgcaaatcccaactgcaatgtccagctatacggtttggctctgtgtccccaaccaaatctcatctcaaattgtaatcattgtaatcccsatggtgattggatcatgggggcattttccccatggtttttcttgatagtgagtgagttctcaggtttaaaagtgaaactcctccctttgcggtctttcttctactgccatgaaagacgtgccttgcttccattcatgccttctgccatgattgtaagtttcctggggcctcctaagccatgtggaactctcagtcaattaaacctctttcctttataaattacccagtctcaggtatgtgtttatagcagtgtgaaaatggactaacacactcatcatatagtaatttctcaataaatgtttgttgaactaagaaagacatgaaaagggctaacagaaaacaatatggagagatggatccacaataatgaaggt

SEQ ID NO: 803762 - DNA, 588 bp, Homo sapiens
atttaatacaacatgatgaaatagtctcattttactgagggattaaaaataataaactgatggctgagtatgttggctcacacctgtaatctcagcactttgggaggccgaggtgggcagatcacaaggtcaggagttcgagaccagcctgaccaacatgatgaaaccccatctctactaaacatacaaaaattagctgggtatcgtggcrggtatctgtaatcccaaatgctcaggaggctgaggcatgagaaccacttgaacccaggagggtggagttgcagtgagccgagcttgtgccactgcactccagcctacatgacagagtgagaccctgtctcaaaataataataataatgaactgagactcagaaaagatgtttgttcagggttacaaagctcagacaggacagggcagcattggaaaccaaaattggtctgactcctaggctcatgctgtaaatcacggtgcaaggcttctactatctatgtttttcctaaaagaatgtataaatgaaaagatggttaacatattaagcaaaatatgttaaacgtcaaatgaactgtataaacgataaatgctggaga

SEQ ID NO: 803763 - DNA, 617 bp, Homo sapiens
acaatgagagagctgcagagtaatcctccaagtaagcactttgccaggacagtaagcagtcaaggaagcactgtccactatccaagctcatcgtacagaaggacactacctacccagtcctgtgggcaggaatctccttaggttaaaaaatatgtcaccaatcttcttgttctaatccttaaacctgtgattcacctgactagtcrcttttgccttgactccatgctcaccaagagttctgatgcctctaactaaactcaaagagctcacctgaaggtacctgaggacgtaggtgtctagttatgctagatagggatattttattttgaaaactaataaattagaatcaatctgatgaatccgaggaagatgagtttgcctctggctgatgtagtaacatgtggtatcctgccattcacatcactgtgcttgtgagtctgaggggcaaatttagatccccccaagatgattcctccctatgggtacttgtggtcttccctaagcatcacgtctttggctcctccatgagccacgtgccttttcttcaaacggctgcacagattatgtgcgtaacactatgctttaaaccactagagagtgatccaagagaacatata

SEQ ID NO: 803764 - DNA, 617 bp, Homo sapiens
acaatgagagagctgcagagtaatcctccaagtaagcactttgccaggacagtaagcagtcaaggaagcactgtccactatccaagctcatcgtacagaaggacactacctacccagtcctgtgggcaggaatctccttaggttaaaaaatatgtcaccaatcttcttgttctaatccttaaacctgtgattcacctgactagtcacttttgccttgaytccatgctcaccaagagttctgatgcctctaactaaactcaaagagctcacctgaaggtacctgaggacgtaggtgtctagttatgctagatagggatattttattttgaaaactaataaattagaatcaatctgatgaatccgaggaagatgagtttgcctctggctgatgtagtaacatgtggtatcctgccattcacatcactgtgcttgtgagtctgaggggcaaatttagatccccccaagatgattcctccctatgggtacttgtggtcttccctaagcatcacgtctttggctcctccatgagccacgtgccttttcttcaaacggctgcacagattatgtgcgtaacactatgctttaaaccactagagagtgatccaagagaacatata

SEQ ID NO: 803765 - DNA, 592 bp, Homo sapiens
gaaggcttgatttcttcctttagctgtgcaaggctggccttccccaagacttcccacaaggccttcccacaaggctggccttgcctttgtgcagcctctgggctaattgcgttggtcttctaccctggagggcctggcccagcatcctcccattgtcagtgctgatatatatctcattaatgtagactcactgtaaatatttttagaaacaccatgttgctctcctgaaggctggcagggctgggtgtgagccggcctggtcctgtcagcctcttcctgacctccttcctgcctctgctgtacttcctgtcttcacggcctcctgcccaagtccctcctctcagccaaacaaagacttcctctgcacctaacctttgggggtgggaggagaagacagggtggcatagggacacctggacaaaaccctttggctctccctccctygctttccccatgggtaaggtcaagtgtgtggagcagatcgcagccacaacctttcggcatcaaagactgtctcgcttgctttcctgttctccccacagtgaatcctttttaaggaaggagtctgttgatctaacccaccttgtttatg

SEQ ID NO: 803766 - DNA, 554 bp, Homo sapiens
atttgagaacttgtgagcaaactgtaacctaacttaggaatatgcacatgtaacaatagctgaatcttggccaatcccagcaacccaaaatcaggccaggagataaggtacttgttaacacatggaaggagagatcacctgctctggataatagtggccatttttatattgcccccttccaaacagatggaattacttcctctgtagtaattaagcagaatgtttcaattcatctctataataaacattcttgacagcatcggtatccacccccgatattcccattcratcttttaaccaaattcacatcctcttgcctagagaccatcaagcttcagatgatcatgtgacaaggtttccagcaagttccaagtgaaggcactacatcctgccatcaagaatctaccctgtctccactagacagagtagggcaagagttctatgattcccaataggtagggactacaccccaagccaacacgaagcagttacagaagaaagaccatcagtccctctgcctcccataaagatttatggggatcacatctttcagg

SEQ ID NO: 803767 - DNA, 528 bp, Homo sapiens
ctcccatcacacgacaaatgaatggcaggaggattgcttcaacagggcatgccagaatcatcccactcagcctggtagcttcattggcacggttgagctggcaacaggacactcatgcagggcaactgaataatcagaagcagtgaagcctgaactctaaccactatcattttaaagattattatgtgcagttatttcagctaattaaaccttgaatgcctgccagctcagcttccagctcagagaggaaatgcaggcatgcatggcctcagcttcccttccagcctctgtctgccttkcagggggagcagagctcagggcctgggaatggagggagcaaggagagcagcagagcaagggaggggccctcaaccactgtggccacttccccatgggaacgcagaagttctgatccttgccacgggaaaaatcccctgacttttgtagcctctcaggtatgggaagttacagcctgttctttactggttcatcaaggaagagtcgggtctggcttgaagcctggaatca

SEQ ID NO: 803768 - DNA, 617 bp, Homo sapiens
tttccatcccaggcccagcttccagataaatgcaactgagtgagtgactagagcagaagaaccacccagctgaaccctgcccaaattcctgacccaaagaataatgagaaaccataagtcattgttgttttaagccattaagtctagggatagcttattttgcatcaagagttagttgaaatactattcggagggagaggagctatggaggtatgttagaaaaaacatacgtcatcaacaggcagggagtagggagggcaggtcaagacaagaaccagcaagagaatatcatgagccttagctgggcaracaaggtattctacagtctggccccatgacgatccctggcacttcaagcacacatagctatggggtgatctctaagcctcacacagctttgcctttgcacatgccatttcttccttctggtgtgccatttgctcacttatccttccagatccagtatcaaagacagaccaaaaacccataagaaggcaatgggttttaaggcccttagagtctgactcttgtctatttctccagcttcatctcttaccctctcctctctctgtgctccaaacacatgggtcttattataatagttatttgcacctttt

SEQ ID NO: 803769 - DNA, 587 bp, Homo sapiens
ttcctctgctaaggatgcttccacacatccacactcattccacttggcctagttaattcctgcttctccttcaactatcagctgaagaatttcatcttcagggaagcctcccatagatcccaaagtcaagtctggttcccttgttatttattctcatagcaccatattcctgccctgcccccagggttattctgagaaatctgatgctcctgttctcatagactgtcagttcctttaggtcagggaccayatctgtctgtgatcactactatatcaccagtgcctagaacagtttgtggcacatagtagatgctcagtaaatacctattgaatgaatgaataaatattatctcctctaaatagctttaattgacactcctctccctctgagattcaggctttctttctcttcttagttcccaggacacttagtttttatctcttatcatcttatgctgaactgttctggttatgtttgtcaccccttctaaactgtgactgtgataaggcccaggtcctgtttgtttttctatcccaggagcacagctccgaaactggtgcagactaatttgtccattgtaaaatgt

SEQ ID NO: 803770 - DNA, 531 bp, Homo sapiens
gtctctcctgcctgaaccttctgggtcctccagagccctgtgtcttggctcactgagcaacccttacttacggtttgctgagacaactgccacgctcctccctgtgtggttagctgacccctcacacaagcatcatcttgggggcttgttataaaagcagattcctgagctccaccctgaacccacagaatcagcatctctgtgggtgcagcccaagaacttgccttttatttatttttatatttttgagacagagtctcattctgtcrcccacattgcagtgcagtggtgcgatcttggctcactgaaacctctgccttctgggttcaagtgattctcctgcctcagcttcccgagtagctgggattacaggcacgcgccaccatccctggctaatttttgtatttttagtagagacagggtttcaccatgttggccagtctggtctcgaactcctgacctcaagtgatccacccgcctcggcctccaaaagtgctgggattataggggtgagccaccgcgtccggccag

SEQ ID NO: 803771 - DNA, 613 bp, Homo sapiens
atttgttaatttggtggaaaaagagtaaatcaagctatgtctgagtcaatggactattcaacagaactggctagttccatcaaaagggttcatttggcaccaccatatgcagggtagaagtgctagaaagaaggcaggcattttatgtagcaagttgcttaaaataaaaacagtgaaatgtatagttttatgtccttaatcatagctaatatttgtcaagcacttatatgaagacactgttctaggggctttcttctctttatgtcgtgaacrtaggctttttgctctggctgtgaggacaacaggtcattttggggtggctggtaagcaggagcagtggctgcacctccctgggaggcaatggagtcccaaagtactaggcatggccccaccggcttcttcttttttttttttttttttcatatcatgaatgtgacttaggtctctcattcttgaatgatttgagatagttttgaaattgtctcaccgagtggcgcctttgtgtaaatgcacttggcaatcattttggtccactcagcagattcccagtgggtttggctctgtagtccttccgggttgctcttctgaggccaggtcacaggatgagtgacct

SEQ ID NO: 803772 - DNA, 539 bp, Homo sapiens
aatgtttttgtttttataaacatttcaaagaatttctttcagtggtgaacatccttgggtgtgtttatagtaatattgaaattaaaaagttctaatttaccctagcagttttaggcacataactgtagtgttatcacccataattcaaatgttcaaaggcagccaragttaatatttggggtcttttcttcccctatttttacgtaaagatttttgtgaagatgtatgtatcatttatgtgtgatacataactgtagtgttatgtaagagattttgaacatttatttgactgttgcatgtgcttggaggggagatatttagcctaattccaatatttgagatagggccttaaatactgcagttagagatccgagatgagtaatttggattatatggcaagtttgagaggagagatggactttaacgtgttgttatttaaaactttttaatattggggtgttgctctggctggggttcctttggctctcactcttttgcgttgttattgtatttttaaaggcagattgctgcaccattgc

SEQ ID NO: 803773 - DNA, 505 bp, Homo sapiens
gctctttcatatgtaaacaccacacacacaacatatagaaatatacagacagaagaagatctagtagttgtaatatttttcatttgccagtttcttttctttttttctttcttttttttttttcctttgagactaagtcttgctctgttgcccaggctggagtgcagtggcgtgatctcagctcactgcaagctccgcctcccgggttcatgccattcttctgcctcagactcccaagtagctaggattacaggtgcctgcygccatgcctggctaattttttgtgtttttagtagagatggggtttcaccatgttaaccaggatggtctccatctcctgaccttgtgatccacccaccttggcctcccaaagtgctgggattacaagcgtgagccactgcacccggcctatttgcctgtttcttaattgaattactggcttcagggtggaccccagggccaggaaagcatgtagtttttatggcctaataagcaaacacagttg

SEQ ID NO: 803774 - DNA, 614 bp, Homo sapiens
aaggctattatcaaagcagggaactgtgcaacacctctcacctactctccttaacaattcaaagctatgaacacaaacaaggcctgtgtgtcagtgtggatgacctgcaggctgtcaggtctgatataggactgaaagtgttggacgtctgmgcatgtgcccaggaactgaggacgtgggaatggaagcatgaggaaacagaatgctttctaagtgtggaggcacacccatcactccatgctgcacataggaatgcacaaggacaaccactcttgccaatgtcctggcagagagaggagggacttgagtccagcacctgcaggtgaggagaacacggggaataggcatggccttccctcactggatctgacctaacacttgggtggcagcagtgatccttcaggcaggtctcaggagatggaaggaccccagagacactggccacagtggagatgtcaggacctggccaagtgaccagtctcacctggcctgcatggctcagggtctccaagcaccagaaccatgaccctctagaatggggaaagcacctgatctagggcggtcctctccctggttggtaggaagaataaaagcaataccagcttccggtcacc

SEQ ID NO: 803775 - DNA, 603 bp, Homo sapiens
cagggtcacagcatgaggggttaagcacctggctctagccacacaccaacaagtcaccttcagtgttccgggctgtttcacctggtgcttccacccctcgtgggctgggctggcaaatgaaagcttggcttttctgcacagaatagactgtctgaggtggtgctgatgttctcttttggtttgagtacctagtcaacctgcaagatgatttagagagggacactgytagcaaatggtagagtaaaaacaaggcttgcaaaaatgtgtagcttacccaattattgtgaatttgggcaacatattaactataaacctagatcgaggccagcagattttgccctgttttgttttgtttttctggagaactaaacactgtaatttactagtctacttgcctagttctatatgtaccccagtgaccacgcctaattatgaaatctctcctggcaccagtactcacagccaggcagaggagtctgacagacccaaggattagaagccgtgtggttgccccttcccaagaataacccttgcttgggtgtctgagactgcaagtataatcctgcatcagaggagagagagcagggagctggggccagggct

SEQ ID NO: 803776 - DNA, 623 bp, Homo sapiens
atggactccttctttgtgttaggtgctgaggccccaaagtgcacaccacggatgctcaacaccacacattttaaggtctctgtgtaggacagaagaaagggatggtcccaaaccagttctattactggcaaccacctttagcccaagcatgaaaggaggcagagactggaaggagaggtctggtgtgcaaggactgtccccttcctggcaagtcctggatttgaggggcagagggacagatgtctgatttgcacttgaaacaccatctggaggctggaagctggagggagagaagagggggctgcaggtgcaaaccctctctgccagagtttggcaggcaaaagccaagtttcctgtcggtcaaagtagacactctggaatggagtggggctcaaaycatgcagcaaggaccagtccgaggagtctgctgcttgccaggatcagggaatcccaacagaaagcctctgtgtggggctgaagggaagactgaagacatcaggtgggcttgagggtggggttggttaagtcatcagcaggaagaggaggcgtgcccaggccgatgaattgtgggttggaggttcttagcaaaaaggggtcactgaagagcccacaggacacaggac

SEQ ID NO: 803777 - DNA, 513 bp, Homo sapiens
caaagttcctgaggtgaggactgtcaccaagcacttcacaggaggaaacagaggctcagagaggggagatgatttgctcaaggttacacagcccctgagtggccaaactagggttccagcccacctctgtcagagcccacactccacctgcaacatgctgggatgtttctagaagaccagaatggtatatattgtgatctccaagcttkgtgaatggtgagggcctgtggccacatgggtttcagacactcaggctgcctctgcagctgacttactccctgatcttgacaaggcagcagatttcacatctacaaaatggggatcatcatcacaagttcaggtgaggtaatgctaactgtcatcatcacattctcagccatgcccagaacacattctgggagccagactcactgccagaggctttttgtcggggagctttaaaaagcgtggatgccaaagctctgctacctactagctgtgtgaccctggccaagttactgtgcctctctgtgc

SEQ ID NO: 803778 - DNA, 626 bp, Homo sapiens
tgttccacattaacaatgtgtatgtgaataaaaatgcaatggctgggcacggcggctcacacctgtaatcccagctctctgagaggccgaggcaggtggatcacaaggtcaggagttcaagaccagcctgcccaacatggtgaaacgcagtctctactaaaaatacaaaaaattggccaggcgtggtggcaggcgcctgtagtctcagctgctcgggaggctgaggcaggagaatcgcttgaacctgggaggcrgaggttgcagtgagccaagatcacgccactgcagtccagctggggctacagtgcaagactccgtctcaaaaaaaaaaaaaatgcaattataccttcctcatgctaattattccataaataatatggttagttctaaatggacttaatactaaaaaaaaattggtaaaataatagataccaatttatagagctttaccaaaacgaaccaaaaaaatattttcaaagaaagcctaggtgcttcttcctagtttgcaagtcaagcttaatctaaatggtgatttagattatccttttaatttattctacaacataccttaagatataattttagacctataaatagatatgaggacatcctgaaatcactgcaag

SEQ ID NO: 803779 - DNA, 652 bp, Homo sapiens
tcactggaagcagactgtgagtggtgctataagaggtatgtacaaagttggatgaggacacaaaggaagaagcatgttctctgtgggcaggtcaagaaaggcttctttgaagacagaggctttaggtgggtgctgaagaaggtatagagaaaggaggagagaagtatgtcccacrcaacaggatcaacatggacaaaggttccagtgaaataaactccactgcacccaggggacggcagcttttttggtttagaccacatcatgtagacccctgaatgctaacctaaaaaagtttagactttttcctgttagtgctggggaataattaagttatttttagcagaaaagacatgcaaaactgtgttttacaaagatcattttggcattagtgtggagagagaaggaaactggaggcagagtcctggtaggaggctgcagcaataggccaggaagtattaataagggcttcactatgccagcgacagtgggataaagaaacgggaacagattacctactgtgcaacagacactatttaatccatttagatctcataaatctacgaagcatttggttggtgcacaagtaactgcagtttttgccattactttctacgacaaaacccgcaaatacttttgcaccaacctaatacaa

SEQ ID NO: 803780 - DNA, 595 bp, Homo sapiens
agcagcaggtctcttgccccatttttgccagtctgcatccccgtcaaattgactcacttgtgttgtttattgattagtctggaaaagatgagatacctgcccatatatatgtgagtttaaaatcaaatcataaacaactaaagtatttggttgtttaggttttcattggttccttgaattgagcttttggrtactgagattagaactatcggttcactgacattcacagtgaccgtataactgcattgacagacatgcacacagtctttagttagagctccaatttatcagtgcttagttctaactgaacacacatttgttgagcatttattatcatgccaagctctgttctaagactctgatgaactgaagagacaacatccctgccctcatggggtttgtgatctggtaaagaagttatatattaaataaatagctacacaaataattgtgtataaaaaatgaagctgtatccaaattgcaataagtaaaatgaaagaataaaggagggtgccatgataaaaagtcatttccagattgtggagtaagggaaagttttcctaaagaactaatgtttaagccaagacctaaaatt

SEQ ID NO: 803781 - DNA, 600 bp, Homo sapiens
agttatatattaaataaatagctacacaaataattgtgtataaaaaatgaagctgtatccaaattgcaataagtaaaatgaaagaataaaggagggtgccatgataaaaagtcatttccagattgtggagtaagggaaagttttcctaaagaactaatgtttaagccaagacctaaaatttgagtagaagttatataggcaaaaccaggagaaaggcagctcaggtagcaaaaacagcatgtgcaaaggtaggaatgaacagaagkgccatgtgtctggagctcagagagcaagagagagaggctgaccagagagattagggatatgggtaggcccaatagcacagagctcttttgtttctctggagttctgacatctgggctgagctacatttctgagaagaaatgtagctacagtgtttaaaacaaacaattcagtccttgactgtagtagtcatgtcctataggtccagatttaaaggccagggaaaagtgctatgtccataagtggttcactactacaattcagtttcaatcttttaaaatgtcgattttaaaatgctgagattttgttctctcttctgtacctggattgcaagct

SEQ ID NO: 803782 - DNA, 600 bp, Homo sapiens
agttatatattaaataaatagctacacaaataattgtgtataaaaaatgaagctgtatccaaattgcaataagtaaaatgaaagaataaaggagggtgccatgataaaaagtcatttccagattgtggagtaagggaaagttttcctaaagaactaatgtttaagccaagacctaaaatttgagtagaagttatataggcaaaaccaggagaaaggcagctcaggtagcaaaaacagcatgtgcaaaggtaggaatgaacagaagtgccatgtgtctggagctcagagagcaagagagagaggctgaccrgagagattagggatatgggtaggcccaatagcacagagctcttttgtttctctggagttctgacatctgggctgagctacatttctgagaagaaatgtagctacagtgtttaaaacaaacaattcagtccttgactgtagtagtcatgtcctataggtccagatttaaaggccagggaaaagtgctatgtccataagtggttcactactacaattcagtttcaatcttttaaaatgtcgattttaaaatgctgagattttgttctctcttctgtacctggattgcaagct

SEQ ID NO: 803783 - DNA, 563 bp, Homo sapiens
tactacaattcagtttcaatcttttaaaatgtcgattttaaaatgctgagattttgttctctcttctgtacctggattgcaagctctatacacacatctgtcttactcactgctctgtcttcagcccctagccaaatgcctrtcacagagtaggtctttaataagagttcattcaataaacgagtgcaagttttcttgaagctaatgaggaaactttatctatttcttcataacacctaaaagaggtacctgaaacttaccctgcaagttcaggaattacatgaaaacgtgaagtcccaaaagaacctaaagtttccatggaagagatctttccaagatagagccttcagggcaaattgtctgatatttgtatggaataacatgtcttcttttaaaaaaattgttatcatgtaggtataatggctagaagattgggcagaatttatactaagtaattgattttgttaatgcctttatagggaagaaatttttatattgtgagccacataagagaattaaggaagtactggaagaagaacgtcatattaagagagatgaatgcc

SEQ ID NO: 803784 - DNA, 563 bp, Homo sapiens
tactacaattcagtttcaatcttttaaaatgtcgattttaaaatgctgagattttgttctctcttctgtacctggattgcaagctctatacacacatctgtcttactcactgctctgtcttcagcccctagccaaatgcctgtcacagagtaggtctttaataagagttcattcaayaaacgagtgcaagttttcttgaagctaatgaggaaactttatctatttcttcataacacctaaaagaggtacctgaaacttaccctgcaagttcaggaattacatgaaaacgtgaagtcccaaaagaacctaaagtttccatggaagagatctttccaagatagagccttcagggcaaattgtctgatatttgtatggaataacatgtcttcttttaaaaaaattgttatcatgtaggtataatggctagaagattgggcagaatttatactaagtaattgattttgttaatgcctttatagggaagaaatttttatattgtgagccacataagagaattaaggaagtactggaagaagaacgtcatattaagagagatgaatgcc

SEQ ID NO: 803785 - DNA, 563 bp, Homo sapiens
tactacaattcagtttcaatcttttaaaatgtcgattttaaaatgctgagattttgttctctcttctgtacctggattgcaagctctatacacacatctgtcttactcactgctctgtcttcagcccctagccaaatgcctgtcacagagtaggtctttaataagagttcattcaataaacgagtgcaagttttcttgaagctaakgaggaaactttatctatttcttcataacacctaaaagaggtacctgaaacttaccctgcaagttcaggaattacatgaaaacgtgaagtcccaaaagaacctaaagtttccatggaagagatctttccaagatagagccttcagggcaaattgtctgatatttgtatggaataacatgtcttcttttaaaaaaattgttatcatgtaggtataatggctagaagattgggcagaatttatactaagtaattgattttgttaatgcctttatagggaagaaatttttatattgtgagccacataagagaattaaggaagtactggaagaagaacgtcatattaagagagatgaatgcc

SEQ ID NO: 803786 - DNA, 645 bp, Homo sapiens
tatggaagttcatcaaactgtatgcttacatatgtacttttatgggtggacattatactttagaaaaaagtttctaagaaaaaatcattctgtcattagtaaagagtgagttgggtaaaaatagggtaagagtaggggtgtggtggtgtkcagttggaaagttattgctgtaattcagatgtgaaataaagagggcctgaactgagacagtagctgtgaggatgaggaagaaaattaaaggaggatagattcagagagatttaggaggctggtttctttctctgggaagcctttctggatacccacaaacatatatccagggtagtttacatggccctcctgtgcactctcacacatgctgcacctttcagaacatcatgggacatccagagatcatgactgtttcattcataattccatcctgaacacccaccacggaaccaggtttctagtagtgaatatttgttgaatgaatgtatgcccttaatgtatcaccgaaattatctgttggtatctctttccccactacaaaatgagaagacatccggagatcttggctatgtgaatgacttgctatgaccttgaaatgtcccttaagctttcagtggaaaatattgtacatgtattaagcatagtcctggcaac

SEQ ID NO: 803787 - DNA, 633 bp, Homo sapiens
acaaggttataaatttttgaagcagttatagaaccttgtaaagatttatgtacatttgttctgtattgaactagtggttaggaaaactgtaatgttaatgataacgttgaatacttcagattttcagatgaactctaaggctaaaaaaaatgattttactctataactgttattatttattttataagtttgtctcaatttgtttgaatatcctttaatgaattattaatatattgaaatgtttcttctttcttaatatagtgatgatgaaaacacatttaaaatattagttgcaacagatattcatcttggatttatggagaaagatgcagtcagaggaaatgatacgtttgtaacactcgatgaaattttaagacttgcccaggaaaatgaagtgagtgtggtttgtatttgtgcactatctaccatattcccttggttaacaagttatttttccttctaaagttagagatttgttttataagctcaggtgcttaccttgcctgcttgaatatcaatatactgaaagctcaaagcygattttgtatgctttgtgtcttaaattcaagtaggagctacttttgtaaatagtctgttaaaatttacaaatgtttttggggtgtttactgaatg

SEQ ID NO: 803788 - DNA, 596 bp, Homo sapiens
tcttcatttcaaatgcccatctaacctcttctacttgcaaaatcctactgttttgaaggtctagctcaatgatcaatttctttgtaaagtttctccccatgctgtgatacagaattaattgcactatcttcattattctctgagcactctgtccatccctctagcatagcaattaccacattatatgattgttgtttacattctctctcattcactgcactctattcttacttatcttttcactttttaaatttcaaatacccaatgcagaattaatacttgttggcttatattgaattgcagatttttctcttattattattaaatggttgtctctgactgtacataagcaaagcaaggccataaactgaatggcttgtctttaaccttacctctatgaagccttctaggggagagcagtcaytccaaccaccattcctggtgttttctaaaattgtgcaggagaaggttcctgcttttgtgtttctgcggagattattatttctccttacaaggacttgctataaaaagagtaaagactccattttgaaagatctttaagaataaatgagagagaaaatgtaaataatcttcaa

SEQ ID NO: 803789 - DNA, 658 bp, Homo sapiens
gaagttaagcattaatacgccagattcatgatttatgatcagtatccaaaactccaactacaaacaatgcaaagtagtgctcctcagtattatttttgcaattgttagtaatgttaagcatcaaggaaaataaaacacatcattgcacattacagccgcaaaaaacaaamaaaaaaaaacaaagggttaaacttggacactagagaactggaataatttttgatgctatatcacaaatagcttcaatgtttatcttatgtgaaaggtctttacacatgtatgacattttccttgggtgatacttcaggtcaaatgccgagttatggcacgaagagcataaagaagttcagcttgcattcgtgcttccattaaaagtagattgacatgaacctagaagtgaaaatgttatcagtttagtaaccattataaacacctggaaaatcttattagacattcacaaaggtttttttatgtgtatataagcaatatacacacacacacacacctaggcatatttatccatgttcatgatgcaacactcaaacctgtgtctaatggctctgcaagcagtaaaaataacccataaaatctaaaaaattctgataactttattaaagttgttatttttgtaaagtcaatctgttgggttataaaataa

SEQ ID NO: 803790 - DNA, 575 bp, Homo sapiens
aggggcaatttttcttgtggctgtcctctctcttgggtttgcatgcctatatgggcagcaagctgcctgaatgctttcttttagattggaattgaatgccagtctatattgttccttaaactccacaagatttgtacaaatgcctcagaatgaactccttgaagggagccggaactcgaagcatagcactttctaaacaaaccctctctttttgcctcttcaacctccactctttcatagccaggagtggggttgaagtaaggctcacaaaacgggtttgggatcaccacttttgcaaatccttaacgtaccatcatttcactttgcaatgtgggaacacattgccacctcttgaatgaatccttttggggccmcggccagcactgagtagttctatttacagaatcctgttttagagagagaagatgctcacttgatggaaggagtcagttagaatctaccattttcagacaagaaggggcatgttccttttggaaaagctgggtgggcacagtcctgagcagttagaggcatcataacagcaccaggaagctgaatgtgagggcataagagct

SEQ ID NO: 803791 - DNA, 590 bp, Homo sapiens
aggggacattactatctaccttacagaagtaaaaagaattatagggaatactatgaacaaccatacagacacaagctaccaaaactgaaccaaggagaaacaaaaactctgaatagacctataactaacaaagagattgaactggtaatttaaaaactacccatgtagaaaagcttagacccaaatggcttcgtcagtattctaccaaatattaaagaagaattaatatcaattcctcacaaattctttcaaagaaaaatcaaagaagagcaagaaacacttccccacacattctrtaaggccgggattagcctgataccaaaaccaaagacgacattagaagaaaaaaaaaaaaaagtacacactaatatcttatgaatatagatgtaaaatcttcaacaaaacgctagcaaataaaatccagccaatattataaaaaggatcattcaccatgatcaatctgatttatccccaagaatgcaaatttccattaacatctgaaaatccattaatgtaataatgtcctaaacagaatacaggacaaaaaacacataatcatctcaacagacacagaaagagcatttgataaa

SEQ ID NO: 803792 - DNA, 590 bp, Homo sapiens
ctgcagtgaatccacttgtaatactatataacccagaactgtattcccccaaaagtctatctttgacaaatggattataaagagacrcgtaggctaagaaaatacttactcaaggagttgggcataagcatacataactccctagaagttccttgatttcattatgagaaatacacagttccatatatccatgcgtgtttattttgctctacataggaagcaagaagttttctaagatttggctgcagatggaaaattatttattgtcttaggttctttattttccctaacaaaataatttaaaataaaaattatatccaagttctcagtcaaatgatgaagtcctacaactaaagaacctatcagcatcttggactattctatgaccacttgtctagagtaatcagaccatggtctgaggctctggcaaattcttctgacctagtcagggaactcatgtacttctggacactagtgcttgaacaggaggcttcagggttcagaaaggaccaataataccatacagactccccacagattctttacctcctctttgacagtgccaaactcaggatccagtgctttgaagt

SEQ ID NO: 803793 - DNA, 615 bp, Homo sapiens
tcccaattctctaggatggtagaatcaaatcaagtatcatgatctttatccctctatctttaggaagctggcttctaacccagactaaataagcagactaagtaagaaaaatcctataacctctctcaatagttggttgcagagtttaaatatttctatttcaaaaccatttcccttaaaaggaagcacattaactttctggaaggtttttgacataatttctcaatagggattagctgcagtcattgaatagtaacaaagatcaattagtcatagtcctggagtgagtgccaggctgcaatccattgtatcagcaggagctattttgaacacttaaaaraaaaaaaaaagattttcccaaatgcagagccatatttgcatagttatcaggattggaagtactattattgtacctgtatctagtagtagatcatgacttgtcctttataataccactgaatagtggcaaagctgaaactagaatctgtctctctggcttatctcactatagtgagatctcactatactgcttctcaaacacctttcagctgctcatgtgggcagtaactaatgaggttctgccttcctttccttctttacagtgaaatacaatga

SEQ ID NO: 803794 - DNA, 576 bp, Homo sapiens
caggtggggtgacagcaccaagggaagcaccagccaactgcacttgggactgaaagcaggagagcctaaggtgctgctgttttaaagtaagaactttcccacagttgtctgaagtcccatccttcctactaagagagaagcaggcctaaggttggggtgggggatttccttagtaaaagaaactaatttccctaattaggctccatacaaagtcatttctcttgcatctcacctccagtatttgtcctctacaaagaaatatgttttgttcttttccttatcagaaatggctgcatcgattttcctcacggttggagggaaacctagggtgtggatgcctcttgggtatccagctcgtacctcatttcctctgatrgcccagaattgatttcctgttaaatataaataattcagagtcatattgaattataacagttaagccctttcgctttagaaatacactttagcatctttgattttcatggtaaagtagtagcccaaattttagatttagtcaccagcttacagtgggcttttcacaaaaatttgcagactgaatgaatgaactaaggtcaa

SEQ ID NO: 803795 - DNA, 634 bp, Homo sapiens
tcatatctgaatgtatgacaatatgttttgtttgtgaatcactgtaaatagtttcaccacactgcaatttaaatgattgacaattggtaaactctgttacactttcttcaaccactgagggaaaaaaactgggtcaagtcaaaccttataatgttaccacacaattcccatggtgttagcttaaccctccaggacctcaaaaagcattttgtttgactctgttttgttgccttaattgccatttagggatataagctagaaatcccaatattttgaccacttatgtacataaactggacaaagcaattttctctgtaaagggagatttctgtaactttgaccactcttcaagttcaatgaccacattaaatcctgaagaatattcatctttgcctttggaatcatttgtccagacttcatcatcatctaagtaaacatcaccttcagacccttaccaggagaaaaggcatgagctggctstctaaaagggcccatcaaatggggagaaatcaccatgttctaaaagggaaggaactcagaaaataactgggaaaatcatcaagacaataacaaagcctatcacttcacagagagggtattcaaaaatgggaaatcttcaataaagaaaatcgtt

SEQ ID NO: 803796 - DNA, 611 bp, Homo sapiens
aggttcaaacattatcgctgtcacctaaagacctttctacagcttaaagataaatacaaataaacataaacctacacacacttctaataaagtgtttaccgataaacaaccaaaatctctgttagtctcctttagaccacgtaccaaaattttaatctacaaaatgtaatcaatctatkgatcaaatgatgcactaattaaatgcctgccaaaggctagaacatttgctagatgatagaactataatggtaaaaatgacatattttctaccctcaattttagttatttagccggggagacatatacattctgtatggcaaggggaggtgtgggaggagactttgggctacctcaggggccagatcacaaaaggcctaacgaggcaaactaaacatggcttattttcatatcctgagagacttcagtgccctatgatatttatgtgatctttaagtttaataaacctttcaaaaaaatgaagtgtactgaatttggcataacttttgtttgtgaaccatttttatcttccagtacacccttatttcttcccaagtgcttaaaagccatagatttagtaacctgttaaataattttgcaggaatgtgacacag

SEQ ID NO: 803797 - DNA, 667 bp, Homo sapiens
acttgattaatggatggattaaacagaaaatcacctagacccaaatccagtttaaacagtaagaagcctcatccaattaaaatattagtaagctaaatattattataccattaacattaatacatacaatttcaaggagctgtttacaatcttttttacattgataagattttaaggtacaaaagagtcactgaataatgtgagtcatgttctctggcttcaacyctagacaatatttgtggcctacattaaattaaaatataaacgataaggagagtttgtgagtcatgcccttgaggcagggcggagggtgctgcatacctttaataaaagctttgaaatttattttgtacgtacgaatcaccactggattttccacaaccacaaaataaaaaagaaaaaaaaactatagataaaaaataaataagtgacttgtttccttaaaagtcatttaaggaagaaaattcttaattcagatatgcaaaatattttcaaaataatgtagactcttgtgaaaactcatgttttaggctataggcatactagtccttgagatattgagtgtcctcagtagaagagaatatctaaaaatgtaaccagtggtcataatggaaagaaacactgagtttaatcttgatggcatgacttaaaacctgtgtgactttgg

SEQ ID NO: 803798 - DNA, 588 bp, Homo sapiens
agcgactctaagctttggtggcaaggttatcaatgcttagctttcagccaaaacccatcacgagtaggtttacatgcatgaaacatgtacttggagtttttggtctgcacagttctcttattacccattgtaactaatcagaatgctgaagggatttattcccagcatctgctgaaatgaccataacttttgttctgatagaatcttctggccaagcaatgaaarggtagactagaacctacaagaagacgagtaatcttccttcagagtcaaaatcgtaaaactggttttcaaatagttattgcagaaagcttgggtcctgagtaaggaagatagaagacagctagaggatgtattcattgcatgtaaatctagaattagaaactgtaaatgttggaagtttcataaaagtaaatttgcctcctgtactgggtgcatttttttgctgctctgtaagccttttccccccctggggtctctatccatggaaaatgcagttgtggggagtcaggaatcctgacttctagtcccagctctgcccctatcacttgtgtggcctcaggcaaatcactgaatttctttgagctt

SEQ ID NO: 803799 - DNA, 658 bp, Homo sapiens
accaattttgttgttactgaggcggaaagatctatttcctcataagttagcaagcagatttggagggaagcatgaaccacagggtgtcttgctgactgattctgaaaggaagctgtgccgcatttggcattgttagcatttatggctggtgggtcagaaggtccaagaaggccacatgagtgtggccacctcctaggctgctgcaatgcagctatgtaacattcagcatagtcacggacttctaaagcgatcatatctgctttctcagtgtcgccctgagtggcacagggaaccttggagagctcccttccttgactttccagaggtgacagtgattgttagagtcctgtaaactgcctccttatgcaaccgagaattctcctgaagaagacttgctgcttgtcrgagacagtgagccagccggcagcctccctgggactcttactcaggtgcagctgaaggagtactgggttccaatccagcttcctgccacacactgcctaaccgctctcagctgttggcaataggagcaatgtgctgagtacctggccccagttcttggcacagatatgtaatcattcttggtttttcttcttctcctttattttctgtctgttctttgcctccgtgtggatcccctgtacctcttcccctcctc

SEQ ID NO: 803800 - DNA, 627 bp, Homo sapiens
gagtgaaactccatctcaaaaaaaaaatttaggagcagagtttccactacatttaaatttcaatgataagaaatattttatttgtggcaatgccagcaaaacacttctcttttacccaccattttccttaattatttacttgctcattatttttacccatcctccaacatttgatgtggctgaggtgttactatattgagacattaaggaaatattgcagttttatttttattttttattttattttttaatttttcttctggttcacaacattcctttggaaccaataggaaatattgcagttttagatgcctaatttccaacttgatctcaaatcacttatacaggtctagcaattctcaggatcagaaatgcgacctggggaaatgcttctctgataaaagaaaattgaasaaccttggagcgtccatgagaaatgaaccataaccaaagatagttcctttgagaaaagtttcgttgttaagtgaatgctccttgtcattaatacacatcttgtgcatataaacagaaaaatcattgtggcagtgttatagattcaaaagaataaaaggaaaaggaaacacgggagaaacaaggaagataacggttaaaacaagggatgagggc

SEQ ID NO: 803801 - DNA, 574 bp, Homo sapiens
gctgtaacttactcattaaattatagttacaagtcaatgtaaacacatggacacagggaggggaacaacacacacaggggcctggtggtggagggatgggggaggaagaacatcaggtaaaatagctagtgcatgctggrcttaatacctaggtgatcgattgataggtgaagcaaaccaccatggcacatatttacctatataacaaacttgcacatcctgcatatataccccggaacttgaaatttaaaaaaaattatagttacaactatcaacatggataaatctaaaaatataatgttgagccaaaacaaaaatcaaattgcagaatatctgcagcattatattatttgtataaagttttaaaatatgtaaagcaataccatgaattgtttatgaattcatacatacgtggtataaaaatatgcaaataaatgaaaaacaccaaacttaggagagtgatgccttcaaaagggaggacgggaatggcattgggaaagggtgccaggaggcttccactgtataaacaaatgttacatttactttttgaaaacatctgaaacaaagcaaaaat

SEQ ID NO: 803802 - DNA, 622 bp, Homo sapiens
ctgaaatttgcctccagtgatttcttcttggactacaccgaataagtttcggtgttcccatataaagatgggaacaacagacactgggggctactagagcagggagggagggaggtgtgggctggaaaagctacctgtttggtactatgctcaccacctgggtgacagagtcattcttaccctaaaccccagcatcatgcaatgtatctgtgcagacctgcatatgtaccscttggatctaagataaaagttgaaattttttaagaaagagcacagtcttaaagtcagtgtgttgctttccccagagtgtctgctttttaagcagatctgctttacagttttctcagatagcagaataaaagtttctttaccttattaaaggactcttgggcaacaggtactatagatgagggttgtgggtattttggggatggagactgaattgatgtggaccacttccctgcctggattaaggagttaggaaggttgaggctttggagggctttcttcctggaacaagctatgggctatctgcacagcatactgtgcaagtaaccttttttgatggttccaaccagtccaatgaacttgacaccttctccccacctcccactccctggcc

SEQ ID NO: 803803 - DNA, 677 bp, Homo sapiens
aactcctgggctccagggatcctcctgccgcagcttcccaaagtgctaggattacaggcgtgagccactatacttggcctaagaagaatacttaaactggctgggcatggtggctcacacctgtaatcccagcactttgggaggccaagacgagtggatcatctgaggtcsggagttctagaccagcctgaccaacatagtgaaaccctgtctatactaaaaatagaaaattagctgggtgtggtggcacatgcctgtaatcccagctacttgggaggctgagtgaggcaggagaatcacttgaacccagcaggcggaggttgcagtgagccaagattgcaccactgcactccagcctgggcaacaagagtgaaactcagtcttcaaaaacaaaataaaaacaaaaacaaaaacaaaaaaaacaaacaaaaaaataaatacttaaactgttaactatcacataatgattgaggtagggaaattgaggaacaagaggcaacacttttccttttatttcataatgttcagtattgtttaaaaaaatgcatgtattacttctgtaatttaaatattttttaacacccaggataggggtgagagcaggggtgaagacaaaccaagaggtgctaggcttaatttctaaggaaatggatgtaaaaaatcatggaaaaattaac

SEQ ID NO: 803804 - DNA, 646 bp, Homo sapiens
tatttaataattttttaaaaagaacttttgaaggaatctgttgggtcttcattaccaagggaactaaaagaaagaaaaagggaaaaaacttatttagcatctattgtattaccaggcaaattgttccatcttatattcggttactgctataaccactagttaaaagcacagttttattttcctcatatttacgatttaacagtatatacaacaatgctatctgactccaatcattataactagaaataattttttcaactgaaaatagtaaaagtgccaaaattcaagtattttccaaaaacatgtatgcaacacaaatatcaagcctaaaaaacttatcaggaagatgtttattttgcttgctaaatgataaatgaatgtgtaacttctaattaatttgctggtaagattagtattgaaaatatatgctgtgaggttctatagtctacactagagaatggtcccaaatatggctctgtatttcttagwgagctacagaggaaaacatcatagccataaaagcaaatcaactgctcccaaattattcttggcactatctgggaaaaatgtctcccacccatcttcacacagagatcccttcagttaaaaacaaaaacaaaaaaacaacacaagtatttcttcaaac

SEQ ID NO: 803805 - DNA, 630 bp, Homo sapiens
aagatttacttctaaccacatcaagaagggaagtttctggaagaaatatcatcacccaacactgagaactgtctctctttcgggagagagaatctgatttgctatgttcagccactgctttgcccaccccatgcccccaattcctggtgcaatctatagtgacagcagaactggcctcaccacagtggaaacatggccacacagcagggagaaaggggagacatgactgatgctggtttatccttaagtaatgtctcccacattctttatattttaggagttcttgtaagctgtcttcagtgttttttggaaaaagatgggagagagggagatggcaggagargctagggatctcagggagcaaggatgcaattatcaaacaaacatttctcgagtacctacaacacaaaactatgtaagacacgattataatacagtaagcccaaagaaactttagcctcagtgtcaactttggctccagttgccaacacctgctcttcagcttttagattctcaggcctgtgtgatgaaagccagtgttcagagcaatgacccagacactccaagagcttccatcaccactgaaagatgaactaacatgttcctggaactgtctgaggacaagaaaat

SEQ ID NO: 803806 - DNA, 536 bp, Homo sapiens
tttaaatctttttcctttggttcatgtaaaggagctacttgatgttactttttatttatcattcctctggctcctaagcacaacgtgattgtgaaattattgtttttgtgattaacgtagtaggaagtttctgcagttggcaatattgtaagagcatattgcagtttctgctcataatttctttcctatggagtgttagactttgttatttatgtgtataaatactagctggacacagtggtgcctgtggtccccagctactctggaggctaaggcaggagaaacacttgagcccagcggtttgaggctacagtgagatgtgatcctgccacatctcactgtagcmtcgaacccctgggctcaagtgattcagcaagaatcacacgatttttaaaagacatggcagatcctgtgtctttaaaaaaaaatcaaaaccttgtaaatagtggttgaggtctatcccgatggggcttttcctgtagcctgcacatcgttggaaacgcctcatagagtaactctgtggttttactttactc

SEQ ID NO: 803807 - DNA, 536 bp, Homo sapiens
tttaaatctttttcctttggttcatgtaaaggagctacttgatgttactttttatttatcattcctctggctcctaagcacaacgtgattgtgaaattattgtttttgtgattaacgtagtaggaagtttctgcagttggcaatattgtaagagcatattgcagtttctgctcataatttctttcctatggagtgttagactttgttatttatgtgtataaatactagctggacacagtggtgcctgtggtccccagctactctggaggctaaggcaggagaaacacttgagcccagcggtttgaggctacagtgagatgtgatcctgccacatctcactgtagcctcgaacccctgggctcaagtgattcagcaaraatcacacgatttttaaaagacatggcagatcctgtgtctttaaaaaaaaatcaaaaccttgtaaatagtggttgaggtctatcccgatggggcttttcctgtagcctgcacatcgttggaaacgcctcatagagtaactctgtggttttactttactc

SEQ ID NO: 803808 - DNA, 651 bp, Homo sapiens
atagccgtatgaagaagaatgaaactggatccctatctctcaccatatcaattcagatggattaatcaattcagatggattaatgacttaaatctaagacctgaaatcataaaaattctagaagaaaacctaggaaaaactctactggatgttgacstaggcaaagaatttatgactaagacctgaaaaggaaacacaacaaaaactaaaataaatgtgacctaattaaactacaaagcttccacacaggaaaagacgtaataatcagcaaaagacataaacagacagaatgggagaaacagcagaaacctacagaatgggagaaaatatttgcaaactatgcatcagacaaaggaataatatccagaatcttcaaggaaccaaagaaatcagcaagaaaaaataatctcatcaaaataggtaaatgtcatgaatagacacttcttgaaggaagatacacaaatatatgtaaatatatatggccaacaaatgcatgaaaaaatgttcaacattgctaatcactaggaaatgcaaattaaaactacagtgagataccactttaccccagccagaatggccattattaaaaaataaaaaaataacagatgttggtgtagatgtggtgaaaagggaattcttatacactgccgg

SEQ ID NO: 803809 - DNA, 557 bp, Homo sapiens
ggtgccaacgctttttaattttttgctgtcaataatgacacttcggacttgagtcataacaagaactatatagagatacatttcccttcctcagaatggccacaaatctctttcaaattgaaatggtgataatatgctttttttccccattcatttatacattcatccatttagcaaatgtacatttaaaattctacaatactctaagtatccgaaaccttcaaatttggggatactttccccatgaaaaattatttaacatatataaagagatttatgcacaataatattgactgtattgttgactataataaagaaaaatgggaaagtagtaaaatatctaataatataaaatggtgaaataaatgaatgcattcccatgtctaaatattatgtaggcagttgaaacaaataayatttaattactcagtaaatgctcaggatatagagttatatgaccaaagcaacatataaaattacaaaaacagtgtgacttaattatgtgtaaacaatgcatagataggtggcttggggaagcctgtaatccaccagattag

SEQ ID NO: 803810 - DNA, 562 bp, Homo sapiens
tgttgcttcttaagattcatccctacccctgtgctatttattcattcacttattcagtcacaagcactcattgactcgtactacatatcaggcacaacgaataaaacccaagtcccaatctatccctcaaggtaactgttatcttaaatgccacagtgtttttacccagttaattttgtcctcctttgtagaccatctcctttcttatctactcctgatcttccatctttgtsctccactcactcttcttccctgcttccctctttccctcctttccttctggaacatttattaagtaacttctgtatttagggcactgggacaggcactgggaagacaatgcagattaagagtttctgcttttaagggactcagtctgaatggagacaggtatgtcaagccaaatttacaataccgtatgatagaggacctgtttctgctttatatttaattttacagttctcttccatctagcccaagatgacatctcaaaaatttctcgaggataaatatttaaaattagaatctgattccaagtcatttttatgtttttcaaagtccc

SEQ ID NO: 803811 - DNA, 562 bp, Homo sapiens
tgttgcttcttaagattcatccctacccctgtgctatttattcattcacttattcagtcacaagcactcattgactcgtactacatatcaggcacaacgaataaaacccaagtcccaatctatccctcaaggtaactgttatcttaaatgccacagtgtttttacccagttaattttgtcctcctttgtagaccatctcctttcttatctactcctgatcttccatctttgtcctccactcactcttcttccctgcttccctctttccctcctttccttctggaacatttattaagtaacttctgtatttagggcactgggacaggcactgggaagacaatgcrgattaagagtttctgcttttaagggactcagtctgaatggagacaggtatgtcaagccaaatttacaataccgtatgatagaggacctgtttctgctttatatttaattttacagttctcttccatctagcccaagatgacatctcaaaaatttctcgaggataaatatttaaaattagaatctgattccaagtcatttttatgtttttcaaagtccc

SEQ ID NO: 803812 - DNA, 598 bp, Homo sapiens
aatagaaacttcctaaccttagacacacctggaactgtaagttgtcaagtctgaataaccttctcctgctagttattagattgttctctcttctgctggctgtggaaatgtgtaacaatccaactctccctgcatagtcaatggactaatttgcaaaaatttggaggaagagcataaatattaaatgcagcagaagcagtaggctaagtgaatcttctcacatttcttagragtttggtttagataacgaacctactggtggtaggaaaaacaaagttttgacttgaaacctttttatggggaggtggtgtagggagcaaattataccattcttcataccttgcgttgcaattttaaggtgttgcaacttcctgaactacaaccttggcagcctaagaacagtattttcacttgaacccctcaaagcaactcatttaatacgcagtcatttatgccttcttttctcccaccccacattctttctttcattctgcaagcctttactaatggtgtgctatgttttaatcactatgataaacctggatacattgtataaccaatgcaatgtgagaccatgttatttatattggttgtttgg

SEQ ID NO: 803813 - DNA, 596 bp, Homo sapiens
ttcttatctagaagttcaggagtgtggctaaaggcagtttctgatgaggttatgagcttccaaggtgtttctaaattcttagtgcagacaccctcccttttggggcaaagcaccctctctcccacatctactaaagaaaacccaaaaaaccaraaaattaaaaaattaaaccaagtaccaaaattgaaaatattactgaagtaaaacctctaatgaggagtggcatctgaactatctgggataccactactggacacggtcttgtagaggcagcagtctagttttggtgcttgactctttaataggaattgttaaatggaaagatgctctaaggactaggtgaaagcctggactcttatttttttttcttttttggtccctcataataaggagcattgttactattacccctttcccaatgcctcctcattgacctagtacactgggttaaaagggaactaaaacatttaaaaaaaaaaaaaaaaagtttactggttttcattcatctcactccttttgcctggagatcagggccaaacatcaagcatgttgggaggggcacaatttaaagcaacactgttgattgtaaagcattt

SEQ ID NO: 803814 - DNA, 655 bp, Homo sapiens
  misc_feature 625, 626, 627, 628, 629, 630, 631, 632, 633, 634, 635, 636,637, 638, 639, 640, 641, 642, 643, 644, 645, 646, 647, 648,649, 650, 651, 652, 653, 654, 655: n = A,T,C or G
tccaaaatggttgaactaatttacactcccaccaacagtgtaaaagtgctcctatttctccacagccttgccagcatgttgtttcctgactttttaaataatcgtcattctaactggcatgagatggtatctcattgtggttttgatttgcatttaaaaatatataatttaaatgtcaaatttttcagcttaaataattcatcagttttttccacatagatgaattctgctggcttccatggcaagagaactgtaacataacattcctagttattgaagcagaaaytcttacatctagagagtctctgatgaaatgttcaattaagggcttgagtgttaataaatgtgtgtatttagtgggtcagggtcagagactataaaatcaaaatgtctaacaacatgataaaggggtctaatctgtggatgagactttagactctagatgaatttggaaaaggcctatcaaaaagccctgctagggatataagaatgtcaaacaggaaagcaatgcaggattaccctgaatgggatcttagagactttgatgggaggaccttgcttttcttctgaaattgatactatgagagtgtagacacatttaaaacaagatccagagttgtaatgnnnnnnnnnnnnnnnnnnnnnnnnnnnnnnn

SEQ ID NO: 803815 - DNA, 617 bp, Homo sapiens; identical to SEQ ID NO: 741948

SEQ ID NO: 803816 - DNA, 611 bp, Homo sapiens
acgtttttacatatcaacaatgaataatctgaaaaagaaatcaagaaagcaatcccatttacagtagctacaaaaaaataagatacctaggaataaatttaaccagatatgaaagacctctacaaggaaaaccagaaaacattgatgcaagaaattgaaaatgacaccaaaaatagaaagatatttatgttcatgggttggaagaatcaatattgttaaaatgtctatactaccctaacaatctatagattcaatgcaattcctatcaaaacaccagtgacgttattcatagaaatagaaaaaaaaatcctaaaatttatatggaactacaaaaaacctagagtagcraaagacatccaaagcaaaaagaacaaaactggaagaatcatattacctgactttaaattacactacagagctatagtaaccaaatcagcatgttactggcataaaaatagacacagagaccaatggaacagaataaagaactgagaaatccatgtatcagtgagctaatttttggcaaagattttaaggatatacgttgaggaaaggacagtctcttcaatacattttactgggaaaactggacatccatatgcagaagaatg

SEQ ID NO: 803817 - DNA, 654 bp, Homo sapiens
aaatgtattttcagcctctgcattaaactcaccttgccacctctttgtctttgtgctcctcacatcaagtgcctcagcagcctgtgattctgtgtttttataatctctctggtttcaaccaaaatggaaaaagtagtcttaggtatatatgaaggaagaagaacagcatgatctcacctaagaaggactgaggctatccagtaacgaaaatcaagaaaaacctgcaacagaggcctcaaccctgtattgcgggtggggtgggagtctcacagtgagatggcatcaccacttcatgttgcccaatacccttgctaagagtgtctcataggaagagtctctgatatgaacctaatattttattttctttgaattccctcagatatamatttgagataaggataggtatctgactggagttgtaggaagattaaatgtgatgattatgtaagcattaatcaagttcctgagttgaaggaggcactaataagaggagactttttgaagtgatggtgagtcatttcctccttacaaaatctttctgaattctcttttctcactggtaaaataaggatactagtactgtactgttactgtgacaattaaaagagatgcaaatgcaaagtgtttggcttataggaggtacacaagaagcag

SEQ ID NO: 803818 - DNA, 520 bp, Homo sapiens
ttatttcatttaaacgactaatttgtatctctggttcatttttctattgggtttttttcttttctttttttttcgagagggagtctccctctgtcccccaggctggagtgcagtgccgcgatctcggctcactgcaagctccgcctcccgggttcacaccattctcctgcctcagcctcccgagtggctgggactacaggcgcccgccaccacgcctggctaattttttgtatttttagtagagacggggtttcaccgtgttagccaggatggtctcgatctcctgacctcgtgatccgtccgcctccgcctcccaaagtgctaggattacaggcgtgagccaccgcgcccggccgggttttttytttattagtaaagaatacgtacttgttcaaaaggaagtctgaaatgcaatcactaaagacccacgttaaatttaattttttttttttccctgggagaagcaaatcatttaccgctagggagagtagaaaaaccctgactaggagcagaaagagtg

SEQ ID NO: 803819 - DNA, 618 bp, Homo sapiens
aaactgttcctgtttcttaatccatatacgaaaatcaacttacgatggattaaagacttaaatgtaaaacccaaaattataaaaccctggaatagaatataggcaatatcattctggacataggaatgggcaaagattttatgagaaagacaccaaaagcaattacaacaaaagcaaaaattggcaaatgagatctaattaaactaaagagctctgcacagcaaaagaaactactgtcagagtgaacaggcaaccaacagaatgggagaaaattttttcaatctatccatatgacaaaggtctaacatccagaatctacaaggaacttaacaaatttacaagaaaaaaggagccccattaaaaagttggcaaagaacatgaacagacacttcccagaagatattcatgtggccaataaacatgaagaaaagctcaacatcactgaccattagagacgtgcatatcaaaatcacaatgagataccatctcatgtcacaatggtgattattaaaaagtcaaacaacatrctagtgaggttgtagagaaataagaacgcttttacactgttggtgggaatgtcaactaattcaaccactgtggaagacagtgtggtgattc

SEQ ID NO: 803820 - DNA, 619 bp, Homo sapiens
cagcctttcctttctgctggggctaacccattggacagctttttctgggtgttactccctttcctgtccagtggaaaaggcccagtccatcaccctcgccaggtcccaatagcaccttcactcatttgtccccagtcctgcccacccacctgatcacctcctactcttagttgtgacatctgcctgccttgcttctggctgtgccctgaggctgctttcagaaacacaccaacatctcttcatttcaactgggtccaaacagaaatgcatgtacatatcagagcagctattccaagccctcccctgaagccaccttccttatctttgtcagtcttgctagtgraagatgaagatgagacctttcctcttttccgagaaaatagatgccatccagctcagcctctctcaacaccccccacctacagcaaatatttatttacagctgtatctgtcagcatcggttagacctgcattacgcagtgctatagccattagtattgagcccctggaacgtggctcatctgggtggagatgtgctttaaatataaaatgcacactggattttgaagttctggtatgaaaacaagaatacgaaatacacaaatgatttttatattga

SEQ ID NO: 803821 - DNA, 597 bp, Homo sapiens
ggattgcttgaggccaggagttcaaaaccagcgtaggcaacatagtaggactctttttttttttaacaacaacaaaaaaaatacgaaaattagccagtcatggtggtgctcacatgtggtcccagctattcacggctgagacaggaagatcgcttgagcccgggaagccaaggctgcggtgagccaagatcgcaccactgcactccagcctggacagcagagtgagaccctgtctcaaaaaaacaaaawcagaaacaaaacatagtgtttgtgaaatttggttaaggaaaatattgaaattaattttttaatttcacctatttcttttgatgttattttattttattttattttattttatttattttattttattttattttattttttgagacagagtctggctgtgtcacccaggctggagtgcagtggcacgatctcggctcgctgcaacctctgcctcctgggttcaagtgattctcctgcctcagcctcccaggtagctgggattacaagcactccaccacgcccagctaatttttgtatttttagtggagatggggtttcactatgttggccaggctggtttggaactcc

SEQ ID NO: 803822 - DNA, 553 bp, Homo sapiens
ccaggacctccctcggatactaaaatcggggacactcgagtcccttgtgtaaaatgcgtagtatttgcatataacttatgcacatcctcccatatgctttaaatcatctctagattacttctttacctaatacagtataagtgttatgcaaatagttgctatactgtatttttgttggtgttatttttattattgtattgttattttttgttttttttttcctgaattttttttttttttccaagacggggtctcgctctgttgccaaggccggagtgcagtggcgcaatctcagctcactgcargctctgcctcccaggttcacgccattctcctgcttcagcctcccgagtagctgggactacatgtgcccgccacaacgcctggcatattttttgtatttttagtagggacggggtttcaccatgttagccaagatggtctcgctctcctgacctcgtgatccgcccgcctcagcctcccaaagtgctgggattacaggcgtgagccatcgtgcctggccttttcctgaatattttcaatccacggttgc

SEQ ID NO: 803823 - DNA, 604 bp, Homo sapiens
atccctggctttttttgagtaagcactcagtaattggtagctctgtgaggtatggcatccctgaaataacaggtgcgtgctgtcgccaaactctcacaattcaggcccacaaactcaagcctttctcagtatcagcagacctactgccttgatgttctaacaacccctaatgagtatagtatgatcatcagttaaataaacaaacaattagtgagtgagcagaaggctcttcctcagcacatcctattaatccgctggtctttagttcacatttgttggaagctgattaactgcacgtcccaacaggcastgggcaacttcagttctgagccagacctgcgcatccccagcctgtcttgacttgccccagtctcctcccccgctagggtgtgtgacaaaccgagtcagtgttagcagtgatgaaaatgtctggaaggaagccagaagtgatggaaaaagtccaaaaccccataaacggattaccctagatgtaaagtcaggagtgttaaggtagtttgaggctgatgaaaagcttagacagatagctaggactttagaaattactttggaggtcttcagaacaatacgaggtgaaggagggaga

SEQ ID NO: 803824 - DNA, 623 bp, Homo sapiens
tccctatcctttctctagctgaaggctctgccactcatgcgggggtgagggaaggaggggctgggagctactgccaccgcaaaaggctggctgtgattgtctagcttctgctggttttcacatcaacagcaggtgcatggccggcatatgactttcccagcagcctaactacaaccccatgctatgctcaggtataacagttgtcgattgtagagtacagccaggctcaggcattttattaaaattcttgaagtggagagtaggctcagaagggaaggagagtcaatctacacctatgtgatgccaaacatctgattaaatctgcaaaagttcagccaattgtccatgtagtccacatcccaagctgttccgtgtaatgcaaaccagccatctgtgtttcccaaacacagcctttggccaccagatgggctgccctggtggaygaggttggggcatgtgaggtcagctggctggagtgcagtcctagggcaagggtaatgggtttggtctgtgtgtgatcttgttagtggactctgtttggagccacaaaagtcacctctggtttaggcccgccctctggatattagacagatgtgtgattgtaccagatcagcgtaaattat

SEQ ID NO: 803825 - DNA, 628 bp, Homo sapiens
actctgggcagagtcatgaggtccccattcccggccctggctcccagatatttctagacacaccgtggcccagaagggaacctgctaccttgaagggaaggacccagtcctggcaggactcatcacctgctgactaaagagcccttgggccctgaataaccaacagtgatacccagggaatacagaccatgggccttgggtgagactctaagatgtactggcttcagttactagctcggccacaggaggatagagcaccaaacaggctcttgggatccctgagtccaggcctaggctctyggacagaatttctggacctgccctgggacagaagggagctaactggccctaggattgtgtcccagacctggcagtattcaccacaagctgactgagatgtccttgcgccttaagggaacattagcagtggtctggcagaactccccatgggccagtggtggtggaggccatgaggaaaggctcctctgcctgtggaaaggagagggaagagtgggaaggactttgtgccagcttagccacagaagaatagaacaccaggtagatttctaaggctttttttttcactccaatccctggctcccagacagtatctatagacccactttgg

SEQ ID NO: 803826 - DNA, 628 bp, Homo sapiens
actctgggcagagtcatgaggtccccattcccggccctggctcccagatatttctagacacaccgtggcccagaagggaacctgctaccttgaagggaaggacccagtcctggcaggactcatcacctgctgactaaagagcccttgggccctgaataaccaacagtgatacccagggaatacagaccatgggccttgggtgagactctaagatgtactggcttcagttactagctcggccacaggaggatagagcaccaaacaggctcttgggatccctgagtccaggcctaggctcttggacagaatttctggacctgccctgggacagaagggagctaactggccctaggattgtgtcccagacctggcagtattcaccacaagctgactgagatgtccttgsgccttaagggaacattagcagtggtctggcagaactccccatgggccagtggtggtggaggccatgaggaaaggctcctctgcctgtggaaaggagagggaagagtgggaaggactttgtgccagcttagccacagaagaatagaacaccaggtagatttctaaggctttttttttcactccaatccctggctcccagacagtatctatagacccactttgg

SEQ ID NO: 803827 - DNA, 386 bp, Homo sapiens
gattgtatggtttttttttttttttgaaaagtgtctcaatgttctttatccatttttttaaatgagattatttgtgttttgttgttgttgagatgtttgagtttcttgtattttctggatattagtgcctcgtagaatgaatagtttgcaaatattttctctcattcaacaaaattgtttcttcacttcgttgattgcrtcctttgctgtgtagaagatttttagtttaatattgttgcatttctctatttttatttttgttgcctatgctctcaaggtcttagctataaaatctttggctagaccaatgcacaaagtgtttcttccttggtttttatgtagtactttatagttttggatttcatgttgaaatctttaatttatct

SEQ ID NO: 803828 - DNA, 656 bp, Homo sapiens
caataaatgatgaactggattcatcccaacaccctcgagctctggcaggcaacatgacttccctccaccatttcagtctctgcattagttaacaattactgcatagcaagctatcctaaaactcaacagcttaaagcaatggacacgtattattgttcacaagcctktaagccttttgggtggttccactgacttgggccaggcatagctgatcttgactgggctcaagggtatgattgttgtctgctggtggattggctgggggctggctgctctaaaatgcatcattcctgtacctgatcattagctactggctgtggcaacagagtgactgggccattcatctcttatcacccagtaggctagctcaggctttcacatggcaatgccttctccaagacacagaagtacacaggagctcttggattcttggtttcttggttcttagctgacacactatcacttctgctgcattttattagccaaagcaagttaaaaacacatcattccagatttaagggatagaaaagcaaactcttcctcatgctaggagggtcagcaaagtcacagtgcaaggtatatggatacaggaaggcaaaaaataattgcagcacatatttgcagttgatctgccgtacctccataaccctcactgt

SEQ ID NO: 803829 - DNA, 656 bp, Homo sapiens
caataaatgatgaactggattcatcccaacaccctcgagctctggcaggcaacatgacttccctccaccatttcagtctctgcattagttaacaattactgcatagcaagctatcctaaaactcaacagcttaaagcaatggacacgtattattgttcacaagcctgtaagccttttgggtggttccactgacttgggycaggcatagctgatcttgactgggctcaagggtatgattgttgtctgctggtggattggctgggggctggctgctctaaaatgcatcattcctgtacctgatcattagctactggctgtggcaacagagtgactgggccattcatctcttatcacccagtaggctagctcaggctttcacatggcaatgccttctccaagacacagaagtacacaggagctcttggattcttggtttcttggttcttagctgacacactatcacttctgctgcattttattagccaaagcaagttaaaaacacatcattccagatttaagggatagaaaagcaaactcttcctcatgctaggagggtcagcaaagtcacagtgcaaggtatatggatacaggaaggcaaaaaataattgcagcacatatttgcagttgatctgccgtacctccataaccctcactgt

SEQ ID NO: 803830 - DNA, 656 bp, Homo sapiens
caataaatgatgaactggattcatcccaacaccctcgagctctggcaggcaacatgacttccctccaccatttcagtctctgcattagttaacaattactgcatagcaagctatcctaaaactcaacagcttaaagcaatggacacgtattattgttcacaagcctgtaagccttttgggtggttccactgacttgggccaggcatagctgatcttgactgggctcaagggtatgattgttgtctgctggtggattggctgggrgctggctgctctaaaatgcatcattcctgtacctgatcattagctactggctgtggcaacagagtgactgggccattcatctcttatcacccagtaggctagctcaggctttcacatggcaatgccttctccaagacacagaagtacacaggagctcttggattcttggtttcttggttcttagctgacacactatcacttctgctgcattttattagccaaagcaagttaaaaacacatcattccagatttaagggatagaaaagcaaactcttcctcatgctaggagggtcagcaaagtcacagtgcaaggtatatggatacaggaaggcaaaaaataattgcagcacatatttgcagttgatctgccgtacctccataaccctcactgt

SEQ ID NO: 803831 - DNA, 635 bp, Homo sapiens
tgactgagtttgagtctaaagtgactgagcaaaccctgaggtgagtgagttttttaggaactgacacaattatgttttctgtctccagacagaatggtgaactgaaatacagattaatttgagttatggaaaaagagggtcatattttttgcataatcctgtacatgactgcgaaattcatgccccataattaaaaataataagctgtgattcattgactcaatggaatactayacagtagttaaaagagtgaaatatatctatgggcactgttatacaaaattgttgacattacttttttattgatacaaatatttgtacatagttatcaggtgcatgctgtattttgttacatgcacacaaaatgtaaagatcaattcaggatatttaagttgtccatcatcttgagtatttaccattactatgtgttgggaacacttaaagtcctctcttctagctattttgaaatacacaatacattttgttaacgatagtcactctactctgccatcaaacattagaacttattccttctatctaactgtatttttgtaccaattaaaccaacctctatgtcctaccatggcgcatccaacacacacccttcacagactctggtatctctcattctattc

SEQ ID NO: 803832 - DNA, 635 bp, Homo sapiens
tgactgagtttgagtctaaagtgactgagcaaaccctgaggtgagtgagttttttaggaactgacacaattatgttttctgtctccagacagaatggtgaactgaaatacagattaatttgagttatggaaaaagagggtcatattttttgcataatcctgtacatgactgcgaaattcatgccccataattaaaaataataagctgtgattcattgactcaatggaatactatacagtagttaaaagagtgaaatatatctatgggcactgttatacaaaattgttgacattacttttttattgatacaaatatttgtacatagttatcaggtgcatgctgtattttgttacatgcacacaaaatgtaawgatcaattcaggatatttaagttgtccatcatcttgagtatttaccattactatgtgttgggaacacttaaagtcctctcttctagctattttgaaatacacaatacattttgttaacgatagtcactctactctgccatcaaacattagaacttattccttctatctaactgtatttttgtaccaattaaaccaacctctatgtcctaccatggcgcatccaacacacacccttcacagactctggtatctctcattctattc

SEQ ID NO: 803833 - DNA, 635 bp, Homo sapiens
tgactgagtttgagtctaaagtgactgagcaaaccctgaggtgagtgagttttttaggaactgacacaattatgttttctgtctccagacagaatggtgaactgaaatacagattaatttgagttatggaaaaagagggtcatattttttgcataatcctgtacatgactgcgaaattcatgccccataattaaaaataataagctgtgattcattgactcaatggaatactatacagtagttaaaagagtgaaatatatctatgggcactgttatacaaaattgttgacattacttttttattgatacaaatatttgtacatagttatcaggtgcatgctgtattttgttacatgcacacaaaatgtaaagatcaattcaggatatttaagttgtccrtcatcttgagtatttaccattactatgtgttgggaacacttaaagtcctctcttctagctattttgaaatacacaatacattttgttaacgatagtcactctactctgccatcaaacattagaacttattccttctatctaactgtatttttgtaccaattaaaccaacctctatgtcctaccatggcgcatccaacacacacccttcacagactctggtatctctcattctattc

SEQ ID NO: 803834 - DNA, 635 bp, Homo sapiens
tgactgagtttgagtctaaagtgactgagcaaaccctgaggtgagtgagttttttaggaactgacacaattatgttttctgtctccagacagaatggtgaactgaaatacagattaatttgagttatggaaaaagagggtcatattttttgcataatcctgtacatgactgcgaaattcatgccccataattaaaaataataagctgtgattcattgactcaatggaatactatacagtagttaaaagagtgaaatatatctatgggcactgttatacaaaattgttgacattacttttttattgatacaaatatttgtacatagttatcaggtgcatgctgtattttgttacatgcacacaaaatgtaaagatcaattcaggatatttaagttgtccatcatcttgagtatttaycattactatgtgttgggaacacttaaagtcctctcttctagctattttgaaatacacaatacattttgttaacgatagtcactctactctgccatcaaacattagaacttattccttctatctaactgtatttttgtaccaattaaaccaacctctatgtcctaccatggcgcatccaacacacacccttcacagactctggtatctctcattctattc

SEQ ID NO: 803835 - DNA, 610 bp, Homo sapiens
ggtggggggttggcaattatatcctctttcctgcctcttcccttctttcaggcataaacgtacacacacatgcactcaatgcacaaagctcctaacttacataaaggtcaggatctaactgcttctatttccacactttgaatgcgagaccaatttggtgwcagcctctcgtgccattaacgaaatagaaacatatgcacatgcagcgataaaacagatctgaaacaacatccctgccacctgttgggtggcagctgaaatcagacatcttaatgtatgatattatgggaattacccacattaagataaaatatctggatttaagtaactgtcttttgctctgaattaacttgaaggttgaactcagaaaacaaaggcaaacgacttggggctaagcaacttactccacagccatcgtgcccggctgccgctctggtgggggcactatgtagaaatgttggtggcagttttcacttctcctaattgacagcagaagatctagctgtgctccagcattctggacatgaagggaaatgagaaggctagcctgtacccaagatgtgagcttctaaaagaaacaggaactagggtctgcttcattcctgagtct

SEQ ID NO: 803836 - DNA, 506 bp, Homo sapiens
cacatactgacaaagatgtagagaaactggatcatgtatacattgctgatgggaatgtaaaaggtagagtcactctggaaaataactgcatttcctttaaaatgaaaaatgaacttaatgtgtgacccaactattgcacacttaggcatttatcacaaaatatgattttcacacagaagcttgtatgagaawatttatagcagcattatttgcaatagctcttaactagaaactacaaaaatgactttcaatggtggaatattaaataagtggtggtacactcatatcatggtttactactcagcgataaaaaaatgaactattgataatgcaacaacttgagtaaatctcaaggaaattatgttgagattaaaaagtcatcgtcggaaggatacatgctgcatgattccatttatatagcatttataaaatatcataactatagagatgtagaacagattagtggttgcccagggataaggatagaggggagagagagtagctaa

SEQ ID NO: 803837 - DNA, 513 bp, Homo sapiens
ggttgaagctgtttttttatgccaagaggatagagcaagaagaaaagtgggtcctggagaactctagggaatatcaatgtttaggtgctagaatgaggattgttggagagatggaactaccaggagaaagggagagctcagaggccagggaaggcaagcrttttttgatgatgaaagtagaggaaagtatcaaattccaccaaaggatccaagaagatgagaactgagatatgcctggcatttgggcaatgataagatcactttggcaacttcagttttagaccaagtggttaaaaaagaggcttttttttttctatgacccaatataagaaaaatattttaggccagacatgatggctcacacctgtaatcccaacactttgggaggcctaggcaggtggatcacctgaggtcaggagtttgataccagcctggccaatgtggtgaaaccccgtttctactaataatacaaaatttagccaggcatggtggcatgtgcctgtagtcccagct

SEQ ID NO: 803838 - DNA, 513 bp, Homo sapiens
ggttgaagctgtttttttatgccaagaggatagagcaagaagaaaagtgggtcctggagaactctagggaatatcaatgtttaggtgctagaatgaggattgttggagagatggaactaccaggagaaagggagagctcagaggccagggaaggcaagcattttttgatgatgaaagtagaggaaagtatcaaattccaccaaaggatcmaagaagatgagaactgagatatgcctggcatttgggcaatgataagatcactttggcaacttcagttttagaccaagtggttaaaaaagaggcttttttttttctatgacccaatataagaaaaatattttaggccagacatgatggctcacacctgtaatcccaacactttgggaggcctaggcaggtggatcacctgaggtcaggagtttgataccagcctggccaatgtggtgaaaccccgtttctactaataatacaaaatttagccaggcatggtggcatgtgcctgtagtcccagct

SEQ ID NO: 803839 - DNA, 513 bp, Homo sapiens
ggttgaagctgtttttttatgccaagaggatagagcaagaagaaaagtgggtcctggagaactctagggaatatcaatgtttaggtgctagaatgaggattgttggagagatggaactaccaggagaaagggagagctcagaggccagggaaggcaagcattttttgatgatgaaagtagaggaaagtatcaaattccaccaaaggatccaagaagatgagaactgagatatgcctggcatttgggcaatgataagatcactttggcaacttcagttttagacmaagtggttaaaaaagaggcttttttttttctatgacccaatataagaaaaatattttaggccagacatgatggctcacacctgtaatcccaacactttgggaggcctaggcaggtggatcacctgaggtcaggagtttgataccagcctggccaatgtggtgaaaccccgtttctactaataatacaaaatttagccaggcatggtggcatgtgcctgtagtcccagct

SEQ ID NO: 803840 - DNA, 593 bp, Homo sapiens
tccacgaaaaaattgctgagagtttgataggaatttcattaaatctatagatcaatttagggaaaggtgccatctttactatgttgagtcatgtaactcatgagcacaatatgtccctccaagtactcacgtctttaattttttcatcaacattttgtaatttttatcacacatagtctgtacatgttttgttagacctacaactaagtattttgttttatttggagcaattatasatagtactgcatttttaattttggtttctacttgttcattgtcagtatgaagaaatgcaatgatttttgcatgttaatcttataacccgtgaccttactaaatgcacttattagttctacgatttttgtgggttttcttttgtgtgtgtgtgggtgtgtgtatgcatggttttgtttttttgtagatgccttgtacttttccatatagactattatgtcatttgcaaatagagacagttttctttactttttccaatctgtatcccttttatctcttttccttttcttattgccatggctagatcttccagtgctttgttgaataagagtgatgaaagtggaaataagaaaggaaaa

SEQ ID NO: 803841 - DNA, 593 bp, Homo sapiens
tccacgaaaaaattgctgagagtttgataggaatttcattaaatctatagatcaatttagggaaaggtgccatctttactatgttgagtcatgtaactcatgagcacaatatgtccctccaagtactcacgtctttaattttttcatcaacattttgtaatttttatcacacatagtctgtacatgttttgttagacctacaactaagtattttgttttatttggagcaattatacatagtactgcatttttaattttggtttctacttgttcattgtcagtatgaagaaatgcaatgatttttgcatgttaatcttataacccgtgaccttactaaatgcacttattagttctacgatttttgtgrgttttcttttgtgtgtgtgtgggtgtgtgtatgcatggttttgtttttttgtagatgccttgtacttttccatatagactattatgtcatttgcaaatagagacagttttctttactttttccaatctgtatcccttttatctcttttccttttcttattgccatggctagatcttccagtgctttgttgaataagagtgatgaaagtggaaataagaaaggaaaa

SEQ ID NO: 803842 - DNA, 610 bp, Homo sapiens
tttgccccacattgctgtttccaaccacatttagtctcataccaaaattctgactggaataactcattagtctgtctcatttttatattttaggcattgagatttaaatatttttagaggaaaaaactacatttaagtatcaatgaataccttttgctcatctgctgtaactataggaaaggaaataagaagttgttatcctaaatatatagaggtaagaattaaatatggtctctatcaattttcactacaaaataaaccttgcaaaaamctagtggcttcaaataaccatttatttagttcatgattctgtgggttggcaatgtgggttgggctcagccagagtacatctatgggtctcaccaagactcacgcatctgcaatcagctgcctatcaacttcaaggcattcatttcgggcatcatctggcccattggctggggctgctggaggaagtgagccacatgtgtctcatcatccaccaggctagcccagggcttgttcacattaaagatctcagggttctaagaccaagagcagtagtgctaagactccttaggcctagactcagaacttgctcaaagaaacttacatcacattttactggtta

SEQ ID NO: 803843 - DNA, 608 bp, Homo sapiens
ttttagaggaaaaaactacatttaagtatcaatgaataccttttgctcatctgctgtaactataggaaaggaaataagaagttgttatcctaaatatatagaggtaagaattaaatatggtctctatcaattttcactacaaaataaaccttgcaaaaaactagtggcttcaaataaccatttatttagttcatgattctgtgggttggcaatgtgggttgggctcagccagagtacatctatgggtctcaccaagactcacgcatctgcaatcagctgcctatcaacttcaaggcattcatttcgggcatcatctggcccattggctggggctgctggaggaagtgagccacatgtgtctcatcatccaccaggctagcccagggcttgttcacattaaagatctcagggttctaaraccaagagcagtagtgctaagactccttaggcctagactcagaacttgctcaaagaaacttacatcacattttactggttaaaacaagccataaggccataccagatttaaagggtaaggaaataggctccacctctggttgggaagaactgcaaaattttgtggccatttttgcaacctaccaccatct

SEQ ID NO: 803844 - DNA, 608 bp, Homo sapiens
ttttagaggaaaaaactacatttaagtatcaatgaataccttttgctcatctgctgtaactataggaaaggaaataagaagttgttatcctaaatatatagaggtaagaattaaatatggtctctatcaattttcactacaaaataaaccttgcaaaaaactagtggcttcaaataaccatttatttagttcatgattctgtgggttggcaatgtgggttgggctcagccagagtacatctatgggtctcaccaagactcacgcatctgcaatcagctgcctatcaacttcaaggcattcatttcgggcatcatctggcccattggctggggctgctggaggaagtgagccacatgtgtctcatcatccaccaggctagcccagggcttgttcacattaaagatctcagggttctaagaccaagagcagtagtgctaagactccttaggcctagactcaraacttgctcaaagaaacttacatcacattttactggttaaaacaagccataaggccataccagatttaaagggtaaggaaataggctccacctctggttgggaagaactgcaaaattttgtggccatttttgcaacctaccaccatct

SEQ ID NO: 803845 - DNA, 643 bp, Homo sapiens
atttcaccactaaacaggaagtgtatcaaagggcggaagatctaacaaaggctcacagtctcttagactcattatgtttgctagtagcattcacactttcatgtaaatggtcccatggactccgagcgctaccctttccctatctcactaagggcctatcctttctcatcagttcagatcctacctcttggttctttggcctgctctgaacgctggcaacctagtaatccacccattttctattccaacctcctgaccgccacatatttgctatattactgttccctcccaatctttcacctaacttaaaaaattgtgtaattttaataggacagaaacatacagtaaccatcaaccaaaacttggggaccctcacgaagaaagattaccttyaaaggttttagaatattcagactatcccagaaaagtgcaccatattcattctccctgacttgtatgtgctaaaaaatgtgtctccactcactgtcttctcaaagtagaaatcattccgaaagcaaataagaatgtccatcttttttttggtattatatatgtttgtttcatatagtttatgaatatgatcaatatatgccatttaattatgttattctataatatttcatgtattgatgataaactgcag

SEQ ID NO: 803846 - DNA, 656 bp, Homo sapiens
agcaggcagccttattgggtgtgatcctaacaaccctattcaaacctatcttcatgaccacttggttcacagtaaccatttcacattcctgggctgccaaaatctagaattataggatattctcaggaactattatttattgttcttcatttgaagtttcctcaagtagctcagtatgaaattgaggtattctagaaaactccgaaactcagtacaaggtgtgataggtaagcatctgaacttctctatagtggttgtcttgctcctgtccttatttaccttgatgaagaaataatatccccacttctctattgacagctggggttggagggagatgccatagcaaatccatcttctaaactgacaaccttgttttaagacagcattacttgtgcatgtatgtatatgagttggaggcaggcaatgagaaagagtcataaaattggtttccctaattcgtagcgagactagttttcttcagccactctcaattcagcatctgagattacatgtgactsattccaagttcagaaaacagtcgtttaatgtcctcttacaatttcttaagttgtacattaccttctgacacctacaaaggatcctgctctgttgacatttgtattttcacagttcttgtccatgatggtgacttagaa

SEQ ID NO: 803847 - DNA, 625 bp, Homo sapiens
actttacctccattctagttaatggccattcttgctagggcccatttcccagactagtaaactgagatacaaacagaaataataataagcaactataatatttaaagtggctcacgtctgtaatcctactactttgggaggcagaggcgrgtggaatcctactactttgggaggcagaactctgcctgagctcagagttcgagaccagccggggcaacatggtgaaacccccatctcgtctctaataaaaacacaaaaaattagctggacgtggtagcatgcatctgtagtcccagctactccagagggaggctgaggcaggataattgcttgaacctgggaggcagaggctgcagtgagccaagatcacgccactgcactccagcctgggtgacagagcgagactctgtctccaaaaaaaaaagtaatatctgctttgggaatgacttccaggtggttatcttagttgacgctcacaaattctcgatgaggtgaatatggtagatttcatggtgatttactggtgcggaaactgcgccgcagagagagaaagtaagtcacttggttacatctgcaatatgagcatggagttgactcgcacattcctgctgctgtcttattccca

SEQ ID NO: 803848 - DNA, 608 bp, Homo sapiens
ggaggatagggtatgtttgttttgtgtttttaaaattgtttgctctctgcatttccccaaagacatccaggctgtgcctttactgtcagcttgtttctttggtcagtgtctgccactgtgttcctgacctacagacttgaaaggcttgtgcagttgtcctggccttcagtatctgaggggcactggttccaggatttccctccaatattaaaatctgcagatgctcaaaccccttacctaaaatcggaaattatttgtagaaaatctatgcatatccttctgtatacttttagtcaactatagattacttataatggctaatacaatgcaaatgctatataaatttttactgtattgttttggatttttttgttggttttgtttttgaatagtttcgatccccagttkgttgaatctatgcatttggaacccgtggataaggagggccagtcatatagggcaaatgtgggactggcttctctctaaagagagggataaagtacacctcagatgcgcagatacagtctggctgcagttacactgggataggtatattccggactttccctgaagttgtcaacttctgactcagtcacattcttgacctc

SEQ ID NO: 803849 - DNA, 588 bp, Homo sapiens
tcttaagtgatcctgggatgaatgagcaccattcccttattgccacttatccaaactaccctgtagaatgttcaccttcaaaaataaagggccactgaataaaagccttcaattcctggctaggttttgcattaagatcagactctgtaacagtcaggataagtaggttatgccgaaatcgtcaacaacatgaaagtctcagtgactatttctcattcacagtagacatccatcacaggtgtgacagggaggagcttttttcatccattcactcaggaacccccagtggggcagtcacagtcttgaaagtcactggatgtcatgacagaggaaagagagtgcccaggagggtctcgcactggaartaaaatgtttagcccacccacagggtgacacacgtcatttgtagctgcctctcattggccagcactagtcaatgttcttctccacaaaggaggaagtacaatcctaccacaggaagtgctcaggaagtggcacccatgatcaccataggcccacagtggtgccccaggctattctataaccacagaggacaaggggcttgagatcctgatactgtggaggaca

SEQ ID NO: 803850 - DNA, 645 bp, Homo sapiens
ggaccagaagttttcagggttcctcaactgcatggactccttccaaggctctgggggactgggacttggcaatgtgttctcatggtcatgtattcaactaaccttcgcaaaagcaagaagagttttgtattttccttaaagaaggccctcaaaattatatacccttcaggcccaacaagacctagatccacccttgtgctgatggttttcaaccttataatcaggccatttttttctctgaagtattcacaaccaacatggaattgcaggcatatttagtgaccaattttttaagcctagttctaatctctgaaggagtcctgtgtatcataataccctttttaaaatccttctaaaaagagggcactatgtctaaataattattttttccagatccatatatatccttcttgctcactaatgaacactgcytacatgcactgaagtcctaagatctctaaaatatttataactctaacaagtaggcattactaattttccgatctcacggaagaggaaactgaaacttgaaggagttaaatcatttgtctgagatcagacagctagtaagggatatgtctggggtttcaacccagggttatctacctctcttaatctctagtctctactactcccaaggttccc

SEQ ID NO: 803851 - DNA, 740 bp, Homo sapiens
gagtttgcacattctttcttctgcatgattgagtctgttgttgaagcactcttgaatttttcaggtctgttgtattcttcagctccaggatatctgcttggttcttttttattttatgtttctgtttatttattacatttcttattttgttcatgcattgtcttcctaaactcatttagttgtctaattgtattgttttgcatctcattgaacttcattaatatgattattttgaattctctttcaagcagttattagatctccatttcttwggagttgattgttggagctttattagtttcctttggtggcgtcataattgcctgattcttttttatccctgtcgtcttgtgttggtgtctgcatttgaaggagcaaacatatcttctagtctttttttggaaagagttttttaaattgtatgttatatattagacaaaattatttaaagccagtaaatttttattcaaggaatttcacatgtgattccttctactgttcatcaaggttaccttaattcctctaaagatgcagtcaagatttatcttcaatgtaacccttttaaaaagaactgagacttaatccacaattgtcctgtcagccctgtcacaattattttattttgccttcttttcttctagttttaatggggttggagctgggtcatgtggctgctactccttttgcagtggggcctgtgggtggccagcctgttaccaggtggtttagtgggcatggat

SEQ ID NO: 803852 - DNA, 609 bp, Homo sapiens
ttttaatggggttggagctgggtcatgtggctgctactccttttgcagtggggcctgtgggtggccagcctgttaccaggtggtttagtgggcatggatcctgctgtttggtctctggatggactggactgtctccaggactttggtctacaaggctagttctgggatgaaggtcagctttacagtctgtagagagcaggcttgattactaggttcatagacagttgtgtttttctctgggtccctgggacatcttcccactgsgtcactggttgggtccttgggcaaacattactgccctggtctatggttgaagaaggctgaaactgagttgcagggttgctttagggcccacagctgggactaagctcagcagtgctacctggaagactcaggaaggcacgtctccatcttgtctcagtgctgctggcatgacttacctctgaccaccgttgagagggactgtagccagtctcagagccatttcagggttttttgtgggactgaggtcagcaaccctgctccggggacttagagagatatatttctctctgggaccctagtagatcagctggactgatctcagaccactgctgagagggactgaag

SEQ ID NO: 803853 - DNA, 572 bp, Homo sapiens
aacacatttttagaattgtgtagacttcataagtatgcaaaacaaaaacagctggtatcaagcaccacttgatcacctttaaattcagaaacacacttgacaaaatgcgacaccccttcaggatgaaaacactcattaaataaggaatagaaagtacttccttgacctgataaagggcatctatgaaaaatccasagctaacatacacaaatgggccataaggacaaatggccaaaagatgtcaacatcattagccatcaggggaaatgtaaatcaaagccacagtgagataccacttcacacccgctaggatggctagaatcaaaaagacaggtaacagcaagtattaataatgttgtggaaaaattggaaccctcaaacactgctgatgggaatggaaatggtgcagcctctttggaaaacaagtctggcagttcttaaacagagttaccatgtgaaccagcagctctgcccttccaagagaagtaaaaacatatgtcagtataaaaacatgtacactaatgttcatggaacattattaataacagtcaaaaaatggaaaaaacctaaat

SEQ ID NO: 803854 - DNA, 587 bp, Homo sapiens
  misc_feature 582, 583, 584, 585, 586, 587: n = A,T,C or G
tcaacatgagagatttaaaatgatgagttccactgtgagtttaatcttcactttcatctttttatttatttatagactggaacaaataaatcaattttttaattataaatttttagtaattgaaaattattaaatrtacaaaggaggagaacttttagaatttagaagtacaaaggaggaaaacaatttaaacctacagattgatttggtgggattggttgtatgtctgcggctgtctggagaatccaggtgcttaagtgccttggactagctggacactgaaacttcacagggaaacaaaaatgtctggaatgacttgttgatgttcttgaaatgatgctaatatctattctataaaacctgaaggtatgtagatattattgtctgtttcgagtcatgtatcttgggatttgggactgttggagagaagatcggtttgatttagaccatgataggtattgatctatatatatttttgaaatattttggctaaaatgcaatttgatgtggtaagtcttatccatatctaacattttatcttaaaactatatctgtagaagtcgttttttacaaagaacagannnnnn

SEQ ID NO: 803855 - DNA, 587 bp, Homo sapiens
  misc_feature 582, 583, 584, 585, 586, 587: n = A,T,C or G
tcaacatgagagatttaaaatgatgagttccactgtgagtttaatcttcactttcatctttttatttatttatagactggaacaaataaatcaattttttaattataaatttttagtaattgaaaattattaaatgtayaaaggaggagaacttttagaatttagaagtacaaaggaggaaaacaatttaaacctacagattgatttggtgggattggttgtatgtctgcggctgtctggagaatccaggtgcttaagtgccttggactagctggacactgaaacttcacagggaaacaaaaatgtctggaatgacttgttgatgttcttgaaatgatgctaatatctattctataaaacctgaaggtatgtagatattattgtctgtttcgagtcatgtatcttgggatttgggactgttggagagaagatcggtttgatttagaccatgataggtattgatctatatatatttttgaaatattttggctaaaatgcaatttgatgtggtaagtcttatccatatctaacattttatcttaaaactatatctgtagaagtcgttttttacaaagaacagannnnnn

SEQ ID NO: 803856 - DNA, 587 bp, Homo sapiens
  misc_feature 582, 583, 584, 585, 586, 587: n = A,T,C or G
tcaacatgagagatttaaaatgatgagttccactgtgagtttaatcttcactttcatctttttatttatttatagactggaacaaataaatcaattttttaattataaatttttagtaattgaaaattattaaatgtacaaaggaggagaacttttagaatttagaagtacaaaggaggaaaacaatttaaacctacagattratttggtgggattggttgtatgtctgcggctgtctggagaatccaggtgcttaagtgccttggactagctggacactgaaacttcacagggaaacaaaaatgtctggaatgacttgttgatgttcttgaaatgatgctaatatctattctataaaacctgaaggtatgtagatattattgtctgtttcgagtcatgtatcttgggatttgggactgttggagagaagatcggtttgatttagaccatgataggtattgatctatatatatttttgaaatattttggctaaaatgcaatttgatgtggtaagtcttatccatatctaacattttatcttaaaactatatctgtagaagtcgttttttacaaagaacagannnnnn

SEQ ID NO: 803857 - DNA, 587 bp, Homo sapiens
  misc_feature 582, 583, 584, 585, 586, 587: n = A,T,C or G
tcaacatgagagatttaaaatgatgagttccactgtgagtttaatcttcactttcatctttttatttatttatagactggaacaaataaatcaattttttaattataaatttttagtaattgaaaattattaaatgtacaaaggaggagaacttttagaatttagaagtacaaaggaggaaaacaatttaaacctacagattgatttggtgggattggttgtatgtctgcggctgtctggagaatccaggtgcttaagtgccttggactagctggacactgaaacttcacagggaaacaaaaatgtctggaatgacttgttgatgttcttgaaatgatgctaatatctattctataaaacctgaakgtatgtagatattattgtctgtttcgagtcatgtatcttgggatttgggactgttggagagaagatcggtttgatttagaccatgataggtattgatctatatatatttttgaaatattttggctaaaatgcaatttgatgtggtaagtcttatccatatctaacattttatcttaaaactatatctgtagaagtcgttttttacaaagaacagannnnnn

SEQ ID NO: 803858 - DNA, 618 bp, Homo sapiens
catttcctgaaataaataaaacagagctgtacaaaatatacagtgcagccctttggaaaaagagatatcctagctcagggcaagccgtttgatggaaatagcattttctccaagcagatggggctggctccacttagtcctgcrgagggccagggggacttgtttgtgtgcagagccttggtctaatgccaggagagccagcttgtaaagttattcccatagggctcattcccgtctgcccagcatcacccctgacacaaacaaaacagccacgggcctccttcatttctttaagatgaatgaatgctgccgtaaagaaggacttttattgaactgtgtgacatgatgcagaaagaatgctgtagtgaaacacaaaactatatgttataaacgtcaacataagagaagtagtttggggtgcattttctgatgtctaccttactataagatgttttgacggataagttatagtagtaaaaggctgtctccatagtattggaaatacctgctggatttttctgaggtcgtcttggttgtaaggacagaaatacattcaggctagcacacagctgagacgttaagtgaaacataagctcacgcaaatctgagagtgggaac

SEQ ID NO: 803859 - DNA, 612 bp, Homo sapiens
gtatgcaaaacaaaaacagctggtatcaagcaccacttgatcacctttaaattcagaaacacacttgacaaaatgcgacaccccttcaggatgaaaacactcattaaataaggaatagaaagtacttccttgacctgataaagggcatctatgaaaaatccagagctaacatacacaaatgggccataaggacaaatggccaaaagatgtcaacatcattagccatcaggggaaatgtaaatcaaagccacagtgagataccacttcacacccgctaggatggctagaatcaaaaagacaggtaacagcaagtattaataatgttgtggaaaaattggaaccctcaaacactgctgatgggaatggaaatggtgcagcctctttggaaaacaagtctggcagttcttaaacagagttaccatgtgaaccagcagctctgcccttccaagagaagtaaaaasatatgtcagtataaaaacatgtacactaatgttcatggaacattattaataacagtcaaaaaatggaaaaaacctaaatttccatcaattgatgaatggaccaaaaaatgtggtatatttatacaataaaatattgttgggaaataaaaag

SEQ ID NO: 803860 - DNA, 616 bp, Homo sapiens
tgatacatactacaacatggctgagccttgattcagcattttagtaatgtgagctccttaattgtgttagctgtttgtttgtttttttgtaaccatgaaagtttatttatttatttttcaatagttttgagggtacagktggttttttgttacatggataagttctttagtggtgatttctgagattttggtgcacctgtcactggagcagtgtacattatacccaatatgtagtcttttatccctatgaaggtttattttaatcctagcacttgttaatatttatccttaattcttactaacttttagattgtgggtattatatcttcatgagaatagctaaaataattttatttggatattcctcaaagaactattgaatgtgagcatgctaagattacccctggcaaaatggaaaatgcctagcacctggaagcatctgtttctgccggtcttctaggagagaggaaatatttatgtcttccatttatgtattttgactggggaaaattttcccttttattctggggagctgttactcagcataagagaatgtagaggagaatcacccctttcacatatctaatagctttaccacattactacagtagtatct

SEQ ID NO: 803861 - DNA, 564 bp, Homo sapiens
agctaacccaaattgaggggtgtaaaatacactccagattccaaagagtcagtaaaacaacagcaaaaaggtaagatatcgcatcaattaattttatttatttattttaaaattattatttttttagagatggagtctcacctgtagcccaggctggagtgcagtgacgcgatctcggctcactgcaacctccacctcctgggttyaaccaattctccctgcctcagcctcccgagtagctgggactacaggcgcatgccaccacgcccggataagttttgtatttttagtagagatggggtttcgccatgttggccaggctggtctcgaactcctgacctcagatgatctgcctgccttggcctcccaaagtgctgggattccaggtgtgagccaccgtgcctggccaattatttttaaaatagtgcgtacatgttgaaatgataatacttttgatatattgagttgaacagaatatattattaaaattagtttcagctatttctatttttaacacagctaccagaaaatttttaaatacatatgaagctctaattttatttc

SEQ ID NO: 803862 - DNA, 532 bp, Homo sapiens
caaaatatattgcaagaattcaagtactactttgtataccaaaggataaagggatttcctgataccttaacaagatctggaaagcaagtaatatgtctaatgtacaactgatgttaatgttttccttaccagacatctgcagacccttcttgttttccagtgagattgataatctcaccaaaaaactaaacaggagaataaaatgcatcatatttacatgtcaattgctccatcttaaccatcaatgagagataacatcttaattctggaagaaaccatgtttgagatggtatctgtagatgatgttgtctcatcttttttcttagactgctagatcctcttatcacagagttgagagaacttccaatwtatactcctaaagtacaccccaatacaagtctggaattactgttttcatcttttagagaagagaggaactaagtcaaatacctagccaggaggatggctgaaaccatacactttagtaacaataacaagcacttgtttagtgtttataatccaggcattgggt

SEQ ID NO: 803863 - DNA, 499 bp, Homo sapiens
taaagactagcgggcactcatcagtcaatccagctcaatggtgctggggactcccaaacgcgggagaaatgagacagaggttgacatagaaccagtgctcctttgtgtgggttgtgcactgcacagcttcaaggggtgttttgcaaatcccacccatcatatatttatgcagttgttatgatgatttttttctggcatcagtggaagtaaagcatcaaggaagaggtgctgttttcatttccctttttttttttwattgtgcagaaagtttattaggaattactttcaggatcaacatctgtgtgggaagggaaataaacaggttactaataaagaagaggaaattgggcctcagggcaggcaccacaaaacctcagccccaccttgagaggtctgaaaatagttgtaatatcctcatattgactgatcacccgattcaagccaccccaagaatgcaacctggccttgtgagaggtcattcttttcagctgaaggaggg

SEQ ID NO: 803864 - DNA, 565 bp, Homo sapiens
ccatccttaaatgctgctgcatcttggccatcttcttttcttttacactgttcttgggccatctctgccacttctgtggtgtcagataccactaataacatatgtatgtgtgtatacttggaacagataacatcacctgagttctaggtcccacgtattccattgcttcttagatatattacaatttctagtcaccatagacacataagatttcatatgtccaatatagaactcattaactttcccttcgcttccctccctgaaccaaatataccacatgagttctcttgtctgtgttcctgatctctgtgaaagcagaagtctagacgccacctttggctctttcattgccgtttttctgcatctgtgtggtagtctttgttaatgatgtkcctgttatttctgaaattgtataataacatagcatggcatctgttgcttcacatttcacttcccattctgtgattataaagaggtcatttttgcaaggatgttcaaggccgtcatcagcttctcaaggatcctccaagtcctttgggagacagccatgcagtcctcatcccag

SEQ ID NO: 803865 - DNA, 546 bp, Homo sapiens
aaggaaaatcatctggttgcactgactgactcatttcaggatatactaacatctctaaaaagccaatgagagacttggggaagaaagacatctctataagcctgccagtaccctctaatccagaagcacatagcaagacatcctttaagccagcccacctatccacccattcctctcactcacccttcatctgttcctctggcagagtgttgggaatgccctctttggccaaaagtatcttcacagttacctgggaaaaacaggtgattgataggggtacagaaatgtgagagatgaaagcaaaggaaaattatctgccctcagttttgctggtacaatgcaaaaccttctttcagagaagaccagcaggcttggcatgagagggagacatccaagcccttarcaacaggtgcagatatacaggcagcggaaggaggggatgggcacgttcaagatggcttcaagattattaaaaaaatatcgtgtcccctgtcttgctggccctctccagcccacacgtaggcatctcctttctcagtgaaagaa

SEQ ID NO: 803866 - DNA, 629 bp, Homo sapiens
ggctcacctgaggtcaggagttcaagaccagcctggccaacatggtgaaaccccgtctctactaaaaatacaaaaattagccaggcgaggccaggcgcagtggctcactgcctgtaatcccagcactttgggaggccgaggygggcggatcacgaggtcaggagatcgagaccatcctggctaacacaatgaaaccccgtctctactaaaaatacaaaaaaaattagccgggcgtggtggcaggcgactgtagtcccagctactccagaggctgaggcagaagaatggcgtgaacctgggaggcggagcttgcagtgagccaagatcgcaccactgcactccagcctgggcaacagagcgagactctgtctcaaaaaaaaaaaaaaaaattagcctggcgtggtggcacatgcctgtaatcccagctactcaggaggctgagggagaattgcttgaacctgggaggcggaggttgcagtgagccaagattgcgccattgcactccagcctgggggacaagagtgagacttcgtctcaaaaataaataaataaataaaataataaaataaaatagtgggaactttaagcttagctaacagggatccaaattcttcaagagaaagtatttg

SEQ ID NO: 803867 - DNA, 553 bp, Homo sapiens
ctgtagttttgactttcccagaatgtcatatagttagaatcattcaggatgtagccttttcagacagattgctttcacttagcaatatgtcttgatagctcattcctatttatccctgaatactgttctactgtatggatgggctccggatttttaatccatgcacccactgaaggacattgtggttgctttccatttggggcaattatgaaaatatatgctataaacattcatgtgcaagtttttgagtgaatataagttttcaaatcaatagactaaatgcctaagaatgtgattgctggatcttatggtaagactatgcgtagttataaaaaactgtcaactgtcttccaaagtggttgtaacattttgcattctcaccagcaacaaatgacagttctgttgctccacattyttgccagaaattggtattttcagcttcttgttagtttgccattctgtttgtagcgttattgcattgttgcttaatttgcaattacccagtcacaaatgatgttgaacatccatatatatatacatgtatttttccata

SEQ ID NO: 803868 - DNA, 619 bp, Homo sapiens
aggacgcggagaacgtagaggctatcatttctgggccaagacactgatttgtgggggatgagggggcgagtgggcacttatgaacagtgtctgaaatccccagaaatgtagacgttttcacagaagacaggggaggtcatcagaacgctgacagctgctgacaggatcctattcaaagaagtatgaggagctgccagacaggtgctgggttagagaagccaggcccacaccgcatgaccaacatgaaggccaacagcctgcagcccctattgctgtgtcctccagtgggrgcatatatagaactcggcccagacgtgccccctgtgtcgggacactggggaggctggaaccttggctgcatttgtggagagctctggaaaatgggagagccttagacccatggcccacacaggactcttccgacctctaggtgctgaaccgagaaaacctgacctcagaagtactctgctttgctttctgttttgagaagagttttagctcattctttctctatccccagtgccttcacatagtcacagtcctgaagatgcagcttagcatggagggtcatggcttcactgtcaggaagctttgggttcaaaccccgcagcagccatat

SEQ ID NO: 803869 - DNA, 569 bp, Homo sapiens
tgttctactgcaggcctgcagcagtgaggcctggctccggagaggcagcagctccaggccttctttggagatctagaagtcgacacggccctgtgtggacacctgccaggccccagtaattaacccctccaccccaccgcaggccgggacccctcccctcacacattgtgggattgcgcctctggagaccgttttgttagactgctccccaggctgcctgtctccagcggcagtggagatgagctggctctcgcagagcagagaggagactgtagtatgtgtgcaggaagggcgtgggccagggaagaactggagggaaggatctcaaygagctttccagaggaagccggcaggaagtcagcagtgtgccatgagcaacccacagcttggctcatggggtcccagggcccttccccaggaggctgcgtttctgattctgcagccttccacgtctgccctccctggcttcccagtgcttatgggatccatatctgaaaggccttcaggggccagtgcctccgtttttatcccacaccctccatgccctacacacatgtgcacacacactt

SEQ ID NO: 803870 - DNA, 560 bp, Homo sapiens
tgtctaataatcctgaatgccctggacaggcaactcccaggagtgataggagtcaggagagtgggataggcatgtggagctgggtgagctcaatcccacccctgcaggaaggttccagcccaccaggacccccagccatgcacgcctgagttctgccctccctccccagcctgctgcacctctggcccccaagagaggaggctgcaaagagagcccyggcatctcctgtcctgctctgcagcgcagaccactcaggggacagcagcagcccccacggtaggcaccttgggttctgggccagtcgggagctgggactacagggaccaagggcctggaaggaggtggctcctgggactggaattcctccctatagatgcaggctcagcccaggcctcttctcctgggctccaggtacagatggggaggggcagtgctgggagattggggcagggagaagttttatgaagaggctgctgcttgtgagagaatcagagaggtgacagggagaggtgagaatgagctctgacaagaggcagaatggctttgccctgaggcagcct

SEQ ID NO: 803871 - DNA, 586 bp, Homo sapiens
ggatcacacatttccatacatggccagtacacagttgcagggatgtgattgctcacagtttgctacattctaaggaacagtgctccagcgctttctgaggaggggtgacaatctgagggggtctgctctctggtgccacagccttttcttatcatttacaggaaggaacagaagctgtagctgcatgctacatgactcaggtctcacaattcacattcccttagaggctcaaaatactttaaagttcaaacagctttaatttgaattatttatcttcacaataagcattctgctttccgaactccatctcagagtaagcttccaagggaatgcaatctctgcatctaactttgcagrattgttgccagaattaggagaactaaatatacattacaattgttggacaatatagcccctcactccccctttcttacaatatcataggctaagtctctaaccccaatgtaccctatgcttccacctgaaatatagcttccacaactaacccgaatcaaaacatactttcttacaccagtctaagcccactatgttgcatttcagggtagagtttgacattcggcctcag

SEQ ID NO: 803872 - DNA, 598 bp, Homo sapiens
tgttgaaacacacattgctgagtcccatgcccaggcttctgacttagtgactttggggcgaggcctgagaatctgcatttctatcagtgttcccaggtgttgctgacactcatttgagaactccttgagaacctctaagttgcagagaactttctgtttccatgtgtcaaggtctgagggtccatcagcatggcaaggggaggggtaaaaggagagggaggaaaggcaagaagggtaggttcactgcacctcaagtcccagcccttcccccagttccacacatccacctggttctttcccttccagagcctctccttcctccttctgtgagacaggagtaatagcacstgtcttaccagctcactgagctttgtgagttactgtgagacagcatcacgggatgctttcctgagctgtaagtgtccatgcaaaagcaaacagccaccgtgaagtcactgcagttttctgtgcttgctctctgtccctgaccctgttcccttgctagggacaggtggagagcacgtgtctctgttgtgcccagtgggcctggcggcatcctgaatccacggcacaggcacaagccgtctgctctccaggt

SEQ ID NO: 803873 - DNA, 475 bp, Homo sapiens
gcaaatcacatgatcacctcaatagaaaatcccaaggaatttaaaaccccgaaacaaaacaaacccccaagaacgagtaagtaatttcagcatggttacaaggttagccatacaaaaatcaattgcatttctatatactagcaatgcacacatggaaagaaaaatttaaaatacaaaaccacttataatcaccaaagacatgaaacacctagatgtaaatctaataaatcatacatgcaaatcatatgacgataactacagcatactgatgaaraatttaaaacacgtttaaacacatggagacatgctgtgttcctggattggaatactcagcataataaagatgtcaattctcctcaaattggtatacaagtttaatgtcattgccaacaaattctaattctcagcaagctattttgtggatatagaaaagattgttataaaatgtatatgaaaatgaaaaaatactagaata

SEQ ID NO: 803874 - DNA, 475 bp, Homo sapiens
gcaaatcacatgatcacctcaatagaaaatcccaaggaatttaaaaccccgaaacaaaacaaacccccaagaacgagtaagtaatttcagcatggttacaaggttagccatacaaaaatcaattgcatttctatatactagcaatgcacacatggaaagaaaaatttaaaatacaaaaccacttataatcaccaaagacatgaaacacctagatgtaaatctaataaatcatacatgcaaatcatatgacgataactacagcatactgatgaagaatttaaaacaygtttaaacacatggagacatgctgtgttcctggattggaatactcagcataataaagatgtcaattctcctcaaattggtatacaagtttaatgtcattgccaacaaattctaattctcagcaagctattttgtggatatagaaaagattgttataaaatgtatatgaaaatgaaaaaatactagaata

SEQ ID NO: 803875 - DNA, 365 bp, Homo sapiens
gacatcttcctgaggaacacgattcctgctaaaccaccaataagtgtaggtgccctagagccttccagcagcaattcccaagccatatcagaaaagagagaggttggtgaccctgcagcacaaccatcgtccagcagttaattttagttcagggctttgaaygttcttcaggcccagcacgcttccagctgtgtatgttgatggtgagaacccatgcaaccatcttgcttttcctttcagtacggttttcaataaattgcataacatattcaatactttattatgaaataggctttgtgttagataatattgcccaaacataagtcttcagagtatgtttaaggtaggcgaggctaagctctgat

SEQ ID NO: 803876 - DNA, 604 bp, Homo sapiens
caacctcagctcgaagtatgaaaacgagcatccacttccgggtgtgcaggctgggcatctccacacagaggcgttccataggcttcctgggattttgtggaaagtctgaaaggcatcaccacatgcctgggctcgttacccctgacaaaattgrcaaaatgtatagaattctgaaaaaacaggagagagcttaagaatctttcctcaaaatgctccagcaaacacagggggacacgtgtcccaagagggcatctcatgtttaaaacaacaaagcaggcagggtcatcagcaaaggctctgaggaaggagaacctgctttcagatggttgggcatttttttttgtggggtgggtggcggggcagtattttagttttattggtgaggtggcaaattattgtcttttaaacagacatatttagaccattgcatacttgcgtggcctgtgataatttgaaaaaagatggtttattactggtttgtacgtcttggaggatttctagtgacacagggagaaggcctcctggtcttgcttggggccctcccctgtgggtgtcaggagccctgacccatgcttgactcctcctttctgctctgagggggcgc

SEQ ID NO: 803877 - DNA, 628 bp, Homo sapiens
ctttgcactggaattgtgttttatgagcacattaccagaagttgaaatcttgtaaaacagaaatttttgaaataaaaataaaaggagacttaagtccattactattggcaaaatgggaaatggaggcaacttggtagcaatgtgcatgctataatgtgattgtgctggctgctggttttcatccaggccttcatctgcagctccagtctgagccccatggaaggggtcacctgggtttgcccccagccacatgraactgtggagtgattttggaagcctaccttgacagacatagcccacctgagcttgtgtggccttcttgaagtgtgctgagcctccaaaccatcaaatgaagcttctagcccctagggctctggtcttcagccccctgctcacttcccactcctcgttaccacaaaaccacaaaaacaaaccgacaaacctaaatactggccaccttgtgtgagccaacaaggccttcacctctctgagcattcttgatgtatgtgaggagatcagtgcgtgggacttgagcagtcaggagatgccacggacaaaggggacctcggatggaactgtgggtggccatgcggccagagggcaggtcaggggtccaggtctgtgccgg

SEQ ID NO: 803878 - DNA, 526 bp, Homo sapiens
aaataatgtttttaccagctatctgggcaccctttagcccactcaagttgatgcataaaattaaccatcatatagtgctatagtacatatgaattgaaaaaaattttttgaacagctttgaatttggggccaaatttagaaagagctggagaatgtggcttctgcctgttatttctttgttacgttgtacccatggattctcctcttccaagtccagtatcatcttttgagtaattgctcagaaaatattttctaattggcttctgggtagctacttcattatctgaayataaaaataattctctgtgcataatatggactatatatataagcaacagcaaatatgtgagtaagagggagggactgtaagtaatgctagtgattgactaacacagtggccttccaactttttgatcatgtactcttataagtaaaacattttgagcaggcattcccccaatattttgtgattgactgaaacatagatttatattagtcaacttcagacactaccaggttattcaaa

SEQ ID NO: 803879 - DNA, 589 bp, Homo sapiens
cttcacataataaacacaatcttacttcagaggattgtagtgagaatgaaggagaaataagagaaagtacttggtaaggtaaatacagtaaagacaagtaaaaatgagcaggaaatcaggagcattaatctgttcaatgaaactatatagaatcctttatatctgatatgatcaggaccttgagttgtttgttaaccaaataattcagtgaaagtgtgggattattagcaattacatacacatatatacacatattaagatgtaaatagtttatgagttctccagccttttaatgtaagactaagagttttgtggttttgttaagagtcctgtgattgatatcagacatcatgtttcttgcataaagcccatatcatctactgaccatttcctytggagtttctttataatggagtgaaaatttcaaaacacaaaataacctgaggatagaattcggactagagattcctttaccagtagaggaaatagttaatgatattcctgtaaaattttaagattcttttgtccacatctaatttgatgggtgatttttaaaaaattgattctcatttaattttctttctgtgca

SEQ ID NO: 803880 - DNA, 615 bp, Homo sapiens
tggggttgctctatgtgctgctaggttgtaaccgtgactgcggtgagcctctgttttattctcacttgtaattctgtctctagggcagtggtggggacactgtggacacttactaattccttgttgggttgaaggaaggaaggaatgatgcctgcagccccacggtgttagatttgcaaatcactttaggaaaggaggaaaggggttatgttttataatatgagagttgagttttaagagactctctggtttkattggagagtgccagaagaggcactgaaggcaacaccccagacctgggaaaggttaaagattctggttttcattcactgcaatgatcctaaacatgactcccgtgctatttccactttacaagcttcacaatgatgacttcaacactcagtgcaccccaggctggcccttgttggcctcctcacttggatcaagtgtatttcgaatggaacctgacttaggtgatgcgattcagtagcatttgtctggagtttgtctggaattctatagcctagattaggtttctctagtactagtttccatagacgcctgggcttccccttccatacctaatttagtgcccagctagtgtcacatttctgt

SEQ ID NO: 803881 - DNA, 626 bp, Homo sapiens
attcattcattcattctgtattaccttagagcatctgttgagtataaagtacacacatgcttccatccttggaatggataataattttcttatccttcattgcaccctggtacacaccacagtgcctagcacacagtaggtgttcaataaataacactgaatgttgagcgaataaatgaatgagtgagtaagtaaatgagtaagaagtactcttttctctatttgggtaaatcttattttcttgtaacataattgccaatatatttcttatgctatggatggcctaaaataacaacagaacagttggctttgcttcccctttttatttccttttcctgtagcttgaatattasaaactagaaaaatgcaccagaagaaaactagaaatcattgcacagagaatccacccactttcctttagctggtagtggtctctggagattgtgaaaaacatagttctgtaattatatggaaagcttagcaactgggatctgtgtcaaaaaaaacaaaacaaaacaaaacaaaacaaaacaaaacaaaaacatgccatagttcactttaggactcaaggcacaagggcaccaagcatgaacactactttgaaggtatatgaacaacttgcatga

SEQ ID NO: 803882 - DNA, 549 bp, Homo sapiens
atgtttagggataaatttgacaaaagatatgtaagctttgtataccgaaactataaagcattccttagagaaatgaaagaagacaaatacataaagataaataccatttttatggatcagtagactcaaagctgtcaagatgccagttcttaccaaattgatttataggttaaatctaatyccaatcaaaatcctagtgggtttcctaagtgtcttatggattttaaagatgattctataatttatatagaaatgcaaatcacctgggttagcctaaacaattgtgaaaagagcaaagttggaagacttacacttcctgatttcaagatttataaagctacattaatcaagacaatgtgatattggcataaaggtagtcaaacagattaatgggacagaatggagagtccagaaatagacccatacatgtagcaattgatttttgacacaggtgcaaaggcagttcagtggaaaaagaagagtcttttcaacacatggggctggaacaatgaacatctacatacaaaaaataaacttagatctatatct

SEQ ID NO: 803883 - DNA, 620 bp, Homo sapiens
atacaacacctaagactattagaccagaagaaaacacaggacaaaatttttatgactttggattaggcaaggatttctaagatacaataccaaaacatgacctataaaagaaaaattgataaattgtatatgaaaatataagatttttaccttcaaacattactattataagagtgaaaagccacagactgggggggaagttagcaaatcacttatctgataaagactcttatccagaatatataaagaactcttgatattcacgaaaacaacccaaatttaaaaataggcmaaacatttgaacacttaacctacgataacttctttatcttagagaagatattcaggtgaaaaataagcacttttaaagatgcttaacatcataaagatgcaaatgaaaacttcaatgagataccattgtatacccattagaatatctacatttgagacactgaccatgccaagtcagccacaagtggggatgtggagcaactggaaccctccacattcactgccagtgggaatgtgaaatggtgcaaatatatgtctatcctatgatatagtcattcttacccctaagttattattcaagagtaatggaagtattcttccatataaaa

SEQ ID NO: 803884 - DNA, 605 bp, Homo sapiens
agctcaggggcagctggctctggatcctctccagaggctggtgtcacccctgctgctgggctcctggtggcccccaggcctcggcacccccggggcatccacacgccgagggatgggggataacgagccagttcccatcctttttccctgtcatggcccagagstctggctgagttgagtgggcagcccaggacctcatccccatggacaggctgggccctgggctgcatcttctgggtcagtccccaccaacaagcagagcaaattgctggaaagtcacgaggacttctaggggtccagcccatttccagaaaaagaagtaaagaaaccagtttctcagaggcaatgaggaaaaatgctggtctctttcggtccccatgggggcaccacaaagggagcaaggccccagctggcccagttggtctgggctctggttgggactacggtggggtcctgagaccctcagagagtcatacagtcatgcactcagcctctaagctgcagaccgagccggccttactctggagttcggatcacataactgctcagctgccctcttcctgctggtgcccaagaggaccctgcctccctgcctagtgccaggc

SEQ ID NO: 803885 - DNA, 605 bp, Homo sapiens
agctcaggggcagctggctctggatcctctccagaggctggtgtcacccctgctgctgggctcctggtggcccccaggcctcggcacccccggggcatccacacgccgagggatgggggataacgagccagttcccatcctttttccctgtcatggcccagagctctggctgagttgagtgggcagcccaggacctcatccccatggacaggctgggccctgggctgcatcttctgggtcagtccccaccaacaagcagrgcaaattgctggaaagtcacgaggacttctaggggtccagcccatttccagaaaaagaagtaaagaaaccagtttctcagaggcaatgaggaaaaatgctggtctctttcggtccccatgggggcaccacaaagggagcaaggccccagctggcccagttggtctgggctctggttgggactacggtggggtcctgagaccctcagagagtcatacagtcatgcactcagcctctaagctgcagaccgagccggccttactctggagttcggatcacataactgctcagctgccctcttcctgctggtgcccaagaggaccctgcctccctgcctagtgccaggc

SEQ ID NO: 803886 - DNA, 605 bp, Homo sapiens
agctcaggggcagctggctctggatcctctccagaggctggtgtcacccctgctgctgggctcctggtggcccccaggcctcggcacccccggggcatccacacgccgagggatgggggataacgagccagttcccatcctttttccctgtcatggcccagagctctggctgagttgagtgggcagcccaggacctcatccccatggacaggctgggccctgggctgcatcttctgggtcagtccccaccaacaagcagagcaaattgctggaaagtcacgaggacttctaggggtccagcccatttccagaaaaagaagtaaagaaaccagtttctcagaggcaatgaggaaaaatgctggtctctttcggtccccatgggggcaccacaaagggagcaaggccccagctggcccagttggtctgggctctggttgggactayggtggggtcctgagaccctcagagagtcatacagtcatgcactcagcctctaagctgcagaccgagccggccttactctggagttcggatcacataactgctcagctgccctcttcctgctggtgcccaagaggaccctgcctccctgcctagtgccaggc

SEQ ID NO: 803887 - DNA, 649 bp, Homo sapiens
cacacacccatgcatgcacacgctcacacatgcacacacgcccacacacatgcacacatgcacgtggacacacacgcacatgcacacacgcacatgcacacatgcacacatgcacacacacgtgcacatgctcacacatctatacacgcatacacacatatgcccacactttcacatgcagacacacacatgcacagatgcacaccctcacacatgcacacagtcatacatgcccacactcacacatgcccacattcacacatgcacaaactcgcacatgcacgcaccacacacgcaccatgcacatggacacacacacactcatgcacacacacgtgcacatgctcccacatgcacatgctcrcacacgccgatggacacacacatgcacacatgcacatgcacacatgcacacgcacatgcacacatgcacattgacacacatgcacacatacgcagatgcacacacacacatgcacacatgcacacactcacacccacacacatgcacacattcacacactcacagatgcgcacatacacatggacacatacatgcccactcacacatgcacacactcacacatacccacactcacacatgcacactcacacatgcacacatgcacatggacacacatgcccacgc

SEQ ID NO: 803888 - DNA, 568 bp, Homo sapiens
aatgctcacaattctacgaagtatcaccattttacagatgtgggttgaggcttaaagaagccagaaaacttgcccagcgtcaagcgctaacgagtgacaaacatgagctttatacacacattcatcctagaatgtcgctggaagtggctgatggtaaaggccatctgctagcatgcgctctggggcaggccgggygaggacaagcacagctccattaggaaggcaagactgtgctagcatgcgctctggggcaggccgggcgaggacaagcacagctccattaggaaggcaagactggcgtcctccaccctaagtccccaaatgacccggaaagaccacaaagccctgggaaacaaagctcttctgtgtatcaaatcacccccacctctaccaaggacggcagccagtcttccgatagctttaaacttcattactggctcagagtcactggacggaggcccagtctctaattctcaggttcaagatcagtcggccaaggccagggttatttccaccacctcttccactttcagggaataggaagtactttcacgtgaagagcaaaaat

SEQ ID NO: 803889 - DNA, 564 bp, Homo sapiens
atgaaaacccctcagggaattcctagctcctgggaagcacaaggaaaaggtttgtgtgtgtgtgtgtgtgtgtgtgtgtgtgtgtgtgtgtgttttgtgtgtctgtgtgcatgttgggttttttgttttttttttgttttttttttttgagctggagtctcgctctgtcgcccaggctggagtgcagtggcgcaatctcggctcactgcaacctycacctcccaggttcaagcaattctcctgcctcagcctcccaagtagggaggctaaataataaatactaaaaatttttgtatttttagtacagacggggtttcaccatattggccaggctggtcttgaactcctgaccttgtgatccaccctcctcagcctcccaaagtgctaggtttctaggtgtgagccaccgcacctgaccagaaaaggttttatattatcatcacgttttagtccagcaataaaacaaagcaccatccggttcctaaaacatcaatctcctcatctctttgggtcctagacctgttggagctgaaggatttttaggaaggagggcagcgctcagcc

SEQ ID NO: 803890 - DNA, 564 bp, Homo sapiens
atgaaaacccctcagggaattcctagctcctgggaagcacaaggaaaaggtttgtgtgtgtgtgtgtgtgtgtgtgtgtgtgtgtgtgtgtgttttgtgtgtctgtgtgcatgttgggttttttgttttttttttgttttttttttttgagctggagtctcgctctgtcgcccaggctggagtgcagtggcgcaatctcggctcactgcaacctccacctcccaggttcaagcaattctyctgcctcagcctcccaagtagggaggctaaataataaatactaaaaatttttgtatttttagtacagacggggtttcaccatattggccaggctggtcttgaactcctgaccttgtgatccaccctcctcagcctcccaaagtgctaggtttctaggtgtgagccaccgcacctgaccagaaaaggttttatattatcatcacgttttagtccagcaataaaacaaagcaccatccggttcctaaaacatcaatctcctcatctctttgggtcctagacctgttggagctgaaggatttttaggaaggagggcagcgctcagcc

SEQ ID NO: 803891 - DNA, 584 bp, Homo sapiens
agccactgtgtccagccacatcctgtttttcaactaaattaatgtgagtcgcttgtagccaggctcaccagacaccaagcaggctttgagtctggactctccaggctgccctacatagtggtggctccaaggtctctcagctgagatgcaccaagccactagccacagtggctatttaaatttaaattaattcaagttaaataagactaaaaatacagctcctcagtcagtcacgctagcctcacatcaggtggctttggggaggctgagattcctgcaactactggccaaattccacctaatcrtactccgacaacccaacagcatctaataataaagacaggttcaaggatctggacctggggaactagaggtcggcttcccagaagcatttacattgaaatcatagtgcagtcagtgggtagaagcttcccattaatacattcactcgtttatccttcacatctttattaaatgcttacgatgtgcaaaagcattgtatcagacccaatgggaagatgcagaaatagcaaaatgccctctgtgccctcaaggagtttactgccaaaggagggagaagacat

SEQ ID NO: 803892 - DNA, 632 bp, Homo sapiens
ctggcctgaactagcttcccacagagatactggtgggatgatgaaggcagccaggcggcaagtgaaaaacgcacttcctgcatgtgctggctcctgggattgaagtgtttgaggaagcaaagtgaagtgagctttcctcttgcggctgtgtgtccttgggccgggagcctaccctctctgagcgttggggtccttgtcagtagaatggggcatcctcatagctcaaggggtggtgtgtgaaaattgtgctattgtgttactttaatgatttttttttttttcgagacaaagtctcaccccaacgcgcaggctggagtgcagtggcgcgatctcagctcattgcaacctctgcctcctgggttcaagtgattctcctgcctcagcctcccaagtagctggaattacaggagtgcgccaccaggccyggcatatttttctatttttagtagagagggggttttaccatgttggctaggctggtcttgaactcctgacctcaggtgatccacctgcctcggcctcccaaagtgctgggattacaagcatgagccaccgcgcccggcctactttagtgatttcttaggaggacagagggaacgggctggcaagacaggcttggaatgtgttttggg

SEQ ID NO: 803893 - DNA, 604 bp, Homo sapiens
ctgggagggggaggaaggatagatgcatgtcatgcaggttcgaggtggtggaggaatatgcatgatgtttgctcatcacaaatgtgggtgatttcatttcctgttgaaattgtgcttttgaggattttctttctctgtaaattatacacagtaaaatacctcctgtcacccctgctaaaactccatcccccaaagtagaaatcacaaataaggaaaggttacatctttttttttttttttttttttttttwaaaaaatcttgctctgtcgcccaggctggagtgcagtggtgcaactctcggctcactgcaacctccgcctcctgggttcaagcaattctcctgcctcagcctcccgagtagctgggattacaggcacacaccatgcccagctaattttttgtatttttagtagagacagcgtttcactgtgttggccaggctggtctcgatttcctgagctcgtgatctgcctgcctcgggctcccaaagtgctgggattacaggcatgagccaccgcgcctgaccagttccatctttttgagatattaaagtaagttgaggttttgattatgggttgaaaaaattttttttaatctcttgaa

SEQ ID NO: 803894 - DNA, 604 bp, Homo sapiens
ctgggagggggaggaaggatagatgcatgtcatgcaggttcgaggtggtggaggaatatgcatgatgtttgctcatcacaaatgtgggtgatttcatttcctgttgaaattgtgcttttgaggattttctttctctgtaaattatacacagtaaaatacctcctgtcacccctgctaaaactccatcccccaaagtagaaatcacaaataaggaaaggttacatctttttttttttttttttttttttttaaaaraatcttgctctgtcgcccaggctggagtgcagtggtgcaactctcggctcactgcaacctccgcctcctgggttcaagcaattctcctgcctcagcctcccgagtagctgggattacaggcacacaccatgcccagctaattttttgtatttttagtagagacagcgtttcactgtgttggccaggctggtctcgatttcctgagctcgtgatctgcctgcctcgggctcccaaagtgctgggattacaggcatgagccaccgcgcctgaccagttccatctttttgagatattaaagtaagttgaggttttgattatgggttgaaaaaattttttttaatctcttgaa

SEQ ID NO: 803895 - DNA, 665 bp, Homo sapiens
tattccatcttgggcagaggtggaggacgcacattctctcttgtagccaggagagagcactcccgttacagagctgtgtaccttgtgactgttgtgggaatcttgtcaaccactcttttggggtttaggaatgtgtttgtgagacctctggtttgttcctgtgtgataatagtaccacaaaggtagcagctgaaaacaacccacgtttattattctacagtttatctgggcggagagcccaggcccggctgaacaaggtgctgtgctcaggatctcacaaggctgcgatcgaggtgtcagtgggggctgcagtctcatctgaaacttgcctggaaaggatctttcttcaggctcacgtggttgttggcagcattcagttccctgtgggttcttgctgggtgttggctggaggccgctcttagctgtttgcccttaggccttgccaacatggctgcttgcttcctaaaagccagcaagagacayagtctcctagcacaatgggttatcgtcttatgtaatgttatcaagggtgtcacatctcatcacctttcccctgttctgtggattagaagcaagtctcaggccccacccacatttgaggggaagggattatgcaagatgtgaataccagtggccaggatcctggggcataccttaaagcaagt

SEQ ID NO: 803896 - DNA, 520 bp, Homo sapiens
gagtaaatctcagactcgtgatttttgtggactctgaggttgttgaagacaagacaatcagatgaaattattgattgctcctaagttgtatcggctttgagacacagactgaattaaagttagctttcagatctgagttaacttttgattagaaagactttaggaggttctggaaattgttgagttaattaagaatacccttgtaggctccactatttcttgagattttcaggaattgtctaggcttctagagtattttcagaataagataaaatagcttttctggaaaaagtagtttgactttagtttccaggaccttcgtattcaaaawacagtatgttctttactagatctacatgtggcatgctagagaaaatgctatcttttattaagaaaaaggaatcttaagtcctttacctggacccagatggcttcattgatcacatcagtatgaggttacgcagacaaagggctatttttgttgttgttattgtcatttcattggttgttgaagaaggcc

SEQ ID NO: 803897 - DNA, 656 bp, Homo sapiens
gccaagagaggacaccctggcctatgacttttccctcacagggaaggaaagagtagagcattcagccacaccttggcctttggacacactgtgtgaggaactggtctctgtctcccctcactcagagcactgatggaactggcatatttggatgcctaaggtcactgaggacaaagtgagtacaaaaagaaagctgtgactcacacagctcagtgcaatgaaaagaatatgcacaacttgagatttctccctcaggagggaaaggagctcagtatgtgtctgatatactgattttccagggagctgcccaagaaattagtttttttctagcccaaccattatgccagtaggaccccacacgcactctagatgcctcagaactactgagaacaaagacagctgggtgttaagctgctrcatcagaggactcatggtatggcagacagataccacagaaagcaagagattgccagttcctgaaaaacagaaaccaggaaatccctctaattaggaatctacatgcacaaatacagagaagatactttcacagagtagaattgaaggtccccagaatctctatctgggctgattgtaaaagccagtctgggaagacaggaagaggtggctatttcttcaaatgtatagataccaatgca

SEQ ID NO: 803898 - DNA, 616 bp, Homo sapiens
tcagtatgtgtctgatatactgattttccagggagctgcccaagaaattagtttttttctagcccaaccattatgccagtaggaccccacacgcactctagatgcctcagaactactgagaacaaagacagctgggtgttaagctgctacatcagaggactcatggtatggcagacagataccacagaaagcaagagattgccagttcctgaaaaacagaaaccaggaaatccctctaattaggaatctacatgcacaaatacagagaagatactttcacagagtagaattgaaggtccccagaatctctatctgggctgattgtaaaagccagtctgggaagacaggaagaggtggctatttcttcaaatgtatagataccaatgcaaagcyacaaagaacacgaagaaacagagaaatatgacacaaaagggaacaaaataaatcttaagaaactgatcataaagaaatggagagatatagaccaggcacagtggctcatgcctgtaattccagcattttgagagcctgaggcaggcggatcacctgaggtcaggagttcaagaccagcctggccaaacatggtgaaacccatctctactaaaattacaaaaat

SEQ ID NO: 803899 - DNA, 656 bp, Homo sapiens
gctagagaaaagaaaatgttattaagaaaagcgtaaggaagagaaaatgtatttactattcattaagtggaaatggattatcatacaggtcttaatccttaacatcttcatgttaagtaggctgaggagaggaaagaagaggaggagttggtcttgccatctcaggggtggcaaagatagaagaggtagatgaggtgaaaggggaagtccctaagctctcacctctggatgatcttggggctctgcatatgcagttggtggaggctaaggcagagatgtaaactgcctgactgagtgtcacatactcagagcctctcaataaagactggkagaagtattggttgcagacaactaacttaatagctgagcactaagctaaccaagtagagattcagtggccacacatgacgaatactgattttacagaattcgttaacaaaaagccactaaccaaacaaacaatcactacaacagggagcaacaacaacaaacattgagaaagagggaagaatatgatttccagaattgttacattatatgtttaaaaggcctagttttcaacaaaggagccatggaagaaaacatgaaagcatgacttctacacaggaagaaaaggcaatcagtacaaactatacctgacaagccagatgttggct

SEQ ID NO: 803900 - DNA, 656 bp, Homo sapiens
gctagagaaaagaaaatgttattaagaaaagcgtaaggaagagaaaatgtatttactattcattaagtggaaatggattatcatacaggtcttaatccttaacatcttcatgttaagtaggctgaggagaggaaagaagaggaggagttggtcttgccatctcaggggtggcaaagatagaagaggtagatgaggtgaaaggggaagtccctaagctctcacctctggatgatcttggggctctgcatatgcagttggtggaggctaaggcagagatgtaaactgcctgactgagtgtcacatactcagagcctctcaataaagactgggagaagtattggttgcagacaaytaacttaatagctgagcactaagctaaccaagtagagattcagtggccacacatgacgaatactgattttacagaattcgttaacaaaaagccactaaccaaacaaacaatcactacaacagggagcaacaacaacaaacattgagaaagagggaagaatatgatttccagaattgttacattatatgtttaaaaggcctagttttcaacaaaggagccatggaagaaaacatgaaagcatgacttctacacaggaagaaaaggcaatcagtacaaactatacctgacaagccagatgttggct

SEQ ID NO: 803901 - DNA, 656 bp, Homo sapiens
gctagagaaaagaaaatgttattaagaaaagcgtaaggaagagaaaatgtatttactattcattaagtggaaatggattatcatacaggtcttaatccttaacatcttcatgttaagtaggctgaggagaggaaagaagaggaggagttggtcttgccatctcaggggtggcaaagatagaagaggtagatgaggtgaaaggggaagtccctaagctctcacctctggatgatcttggggctctgcatatgcagttggtggaggctaaggcagagatgtaaactgcctgactgagtgtcacatactcagagcctctcaataaagactgggagaagtattggttgcagacaactaacttaatagctgagcactaagctaaccaagtagagattcagtggccacacatgacgaatactgattttacagaattcgttaacaaaaagccactaaccaaacaaacaaycactacaacagggagcaacaacaacaaacattgagaaagagggaagaatatgatttccagaattgttacattatatgtttaaaaggcctagttttcaacaaaggagccatggaagaaaacatgaaagcatgacttctacacaggaagaaaaggcaatcagtacaaactatacctgacaagccagatgttggct

SEQ ID NO: 803902 - DNA, 683 bp, Homo sapiens
tgtcacatactcagagcctctcaataaagactgggagaagtattggttgcagacaactaacttaatagctgagcactaagctaaccaagtagagattcagtggccacacatgacgaatactgattttacagaattcgttaacaaaaagccactaaccaaacaaacaatcactacaacagggagcaacaacaacaaacattgagaaagagggaagaatatgatttccagaattgttacattatatgtttaaaaggcctagttttcaacaaaggagccatgraagaaaacatgaaagcatgacttctacacaggaagaaaaggcaatcagtacaaactatacctgacaagccagatgttggcttatgagacataggatttgaatcaactaagttaaatatgctcaagaattaaagaaaaccatgtctaaataagtaacaaaaaaatacaaaaaaaagatgtctccaaatagaaaacatcattgaagatggaaatgtttaaaaggagccaaatagaaattctagagttgaaatgttcagaagtgaaaatttattggatggtcaaaacagaagagttgggcaggcagaaaaaaagcagtaaatttgaagacagtgttgagattatccagtttagtgaataaaataagtaaggaggagcagagttttgaggacatgtgagactctatc

SEQ ID NO: 803903 - DNA, 683 bp, Homo sapiens
tgtcacatactcagagcctctcaataaagactgggagaagtattggttgcagacaactaacttaatagctgagcactaagctaaccaagtagagattcagtggccacacatgacgaatactgattttacagaattcgttaacaaaaagccactaaccaaacaaacaatcactacaacagggagcaacaacaacaaacattgagaaagagggaagaatatgatttccagaattgttacattatatgtttaaaaggcctagttttcaacaaaggagccatggaagaaaacatgaaagcatgacttctacacaggaagaaaaggcaatcagtacaaactatacctgacaagccagatgttggcttatgagacataggatttgaatcaactaagttaaatatgctcaagaattaaagaaaaccatgtctaaataagtaacaaaaaaatacaaaaaaaagatgtctccaaatagaaaacatcattgaagatggaaatgtttaaaaggagccaaatagaaattctagagttgaaatgttcagaagtgaaaatttattggatggtcaaaacagaagagttgggcaggcagaaaawaagcagtaaatttgaagacagtgttgagattatccagtttagtgaataaaataagtaaggaggagcagagttttgaggacatgtgagactctatc

SEQ ID NO: 803904 - DNA, 340 bp, Homo sapiens
atacctgacaagccagatgttggcttatgagacataggatttgaatcaactaagttaaatatgctcaagaattaaagaaaaccatgtctaaataagtaacaaaaaaatacaaaaaaaagatgtctccaaatagaaaacatcattgaagatggaaatgtttaaaaggagccaaatagaaattctagagttgaaatgttcagaagtgaaaatttattggatggtcaaaacagaagagttgggcaggcagaaaaaaagcagtaaatttgaagacagtrttgagattatccagtttagtgaataaaataagtaaggaggagcagagttttgaggacatgtgaga

SEQ ID NO: 803905 - DNA, 624 bp, Homo sapiens
gaactaggcgaccacttgggctggcttctggatccattgctgaagagggggccactgaaccatgggcaggtagccacaagggcaatcccagatgagctcccaaatttgcaaccacccaagggtgagacaccttgtccactgcctagacagagcmtattcatcaagacaggggaattgcaatcaagaaagaataattcatgcagagccagctgtgcaggagaccggagttttattattactcaaatcagcctcaaaacagttgttgagatgtttgaagaagtgggagtcagttggcaagaggtcaggtgaatatggtggataaggcacaacttcgtagccgaatttgttcaacttttgaagcattggttgtatgatgtgctgttggatgttgtcatggagaagaattgggccctttttattgaccagtgccagttgcaggtgttgcagttttcagtgcatctcatcgaagtgctgagcatacttctcagatgtaatggtttcactgggattcagaaagctgtagtggatcagaccagcgacagacaaccaaacagtgaccatgacctttttttcgtgcaagtttcaccttggaaagtgctttggagctgcttctcaatccagtca

SEQ ID NO: 803906 - DNA, 597 bp, Homo sapiens
caattagaaaacctagaagaaatggataaattcctgaaaacatacaaccactctaaattgaacccggaagaaaagaaaaccttgagcagaccaataacaagttctgaaatagaatcaataacaaaagaaacctaccaagaagacaaaagygctggaccagacgaattcacagccgaattctaccagatgtataaagaagagccggtaccattcctactgaaactattcctaaaaatcaaggagaagggacttgtctttaactcattctatgaggccagcatcattctgataccaaaatctggcagagacacaatggaaaaaaaacttcaggccaatatctctgatggacatagatgcaaaaattatcagcaaaacactaacaaaccaaatccagcaacacatcaaaaagctaatccaccatgattaagtagactttattcctggaatgcaaggttgcttcaacatatgcaaatcaataaatgtgactcatcatataaacagaactaaaaacaaaaaccacgtgattatctcaatagatgcagaagaggcctttgatataattcaacatcactttatattaaaaatcctcaacaaact

SEQ ID NO: 803907 - DNA, 614 bp, Homo sapiens
gagcatcttctcctggtgcaaatataatgaaaccaacaaacaaaaaagctcaaaaatgaaagacatggactaaacatataagtcctgcattctttaggacatactgattctttgcccactagctttaataaaaaacatgcctctgcccgcaagtgtttgtgtaaaccttgtgaagtaaaaaaccaagctcccagcctaggatctgggaaggcagcttgaatagcttcaactctcacacttggacaccatggcattgrccaaagggattttggaaaaggcaagagaagcacagaaaagttttagaaccttttctcattcttcattacttaaaaaattcctttacttatcacttcttttccccttttccaacgctttttttcccccgtgaaaattagatagactgaatctcacatgtgatacaaaaggacttctcatctgtgggaggggctcttattttctatacagtctctcacaaattcttcagtgtcctgggagtcaggcctgtaagcactggcaatcccagacagctaacaggtacactcactgggctgagggctccccagggatgagaagatggtgtttggatccctgcatgtttgtagaataccttcaag

SEQ ID NO: 803908 - DNA, 578 bp, Homo sapiens
aatcatttaatttatgagatgaaaataagtcatttactgatgagttaatgggtgcagcgcaccagcatggcacatgtatacatatgtaactaacctgcacgttgtgcacatgtaccctaaaacttaaagtataataataataaaataaaagaaaagaaaaagaaaataagtcatttattaaagtgagtaagagattttyctttagactaccatggtccatattttggctctaccacttacactctgtatatcctttggcaagttatttaatgtgtctagtcctttgttttctcaggggtaaaatgtagataacaagggtgagaactaaaataaggaaaacattaaaagtgcttacaacagaatcgacttatagcgaatactcagtgaattcacagctgtaatcattctttacatcattttattcttgtggttctgaatggtttgccttgctggaacgttcacttcttactatttttacactgtgtcagtaactttagtaaaatataattgtgattgtctaaccccattatggggtgaattgtgtctcccactcccaaaattcctatgtcaaagtccca

SEQ ID NO: 803909 - DNA, 578 bp, Homo sapiens
aatcatttaatttatgagatgaaaataagtcatttactgatgagttaatgggtgcagcgcaccagcatggcacatgtatacatatgtaactaacctgcacgttgtgcacatgtaccctaaaacttaaagtataataataataaaataaaagaaaagaaaaagaaaataagtcatttattaaagtgagtaagagattttcctttagactaccatggtccatattttggctctaccacttacactctgtatatcctttggcaagttatttaatgtgtctagtcctttgttttctcaggggtaaaatgtagataacaagggtgagaactaaaataaggaaaacattaaaagtgcttacaacagaatcgacttatagcgaatrctcagtgaattcacagctgtaatcattctttacatcattttattcttgtggttctgaatggtttgccttgctggaacgttcacttcttactatttttacactgtgtcagtaactttagtaaaatataattgtgattgtctaaccccattatggggtgaattgtgtctcccactcccaaaattcctatgtcaaagtccca

SEQ ID NO: 803910 - DNA, 573 bp, Homo sapiens
catacatctgacagaggcctaacatccagaatctataaggaacttaagcaaatcaacaagcaaaaaacaaacaaccccccatttataaatgggcaaaggacatgaatagatacttctcaaaagaagacatatagatggccaacaagcatatgaaaaaatgctcaatatcactaatcatcagggagatgtaaatcaaaaccatgatgggatgccatttcacaccagtcagaatggttattattaaaaaataataacagatgttattattaacamctgttaacagaaaataacagatgttggcgaggttgtagagaaaagggaaaacgtatacgtggtggaaatataaattagttcagccactgtagaaagcagtctggagatttctcaaagaacttaaaagatgctaccatttgaccctgcaatcccattactggatatatacccaaaggaatataaatctttctatcataaagacacatgcaagtgcatgtttatcacagcactgttcacagtagcaaagacatggaatcaacctagatgcccatcagtggtggactggataaagaaaatgtg

SEQ ID NO: 803911 - DNA, 573 bp, Homo sapiens
catacatctgacagaggcctaacatccagaatctataaggaacttaagcaaatcaacaagcaaaaaacaaacaaccccccatttataaatgggcaaaggacatgaatagatacttctcaaaagaagacatatagatggccaacaagcatatgaaaaaatgctcaatatcactaatcatcagggagatgtaaatcaaaaccatgatgggatgccatttcacaccagtcagaatggttattattaaaaaataataacagatgttattattaacacstgttaacagaaaataacagatgttggcgaggttgtagagaaaagggaaaacgtatacgtggtggaaatataaattagttcagccactgtagaaagcagtctggagatttctcaaagaacttaaaagatgctaccatttgaccctgcaatcccattactggatatatacccaaaggaatataaatctttctatcataaagacacatgcaagtgcatgtttatcacagcactgttcacagtagcaaagacatggaatcaacctagatgcccatcagtggtggactggataaagaaaatgtg

SEQ ID NO: 803912 - DNA, 617 bp, Homo sapiens
aactaatgattaataatattcatatataatcatatctatcatctatatctagtataactcttcttattttatatattttctttattatactggaacagctcctgctctcagtctcttgcgtcggtgcctgggtggcttgccgcccacactaattaaactaaagagcttctgcacagcaaaagtaactatcatcagagtgaacaggcaacctacagaatgggagaaaatttttgtagtctatccatctgacaaacagctaatatccagaatctaaaaagaacttaaacaaatttacaaaaaaaaatcaaaaagtgggcaaaggatatgaacaacatttctcaaaagaagacatttatgcagaaaacagacatatgaaaaaatgttcatcatcactagtcatcagagaaatgcaaatcaaaaccacaatgagataycatctcacaccagctagaatggcagtgattaaaaagtcaggaaacaacaggtgctggagaggatgtggagaaataggaacacttttacactgttggtgggagtgtaagttaattcaaccattgtggaagatagtgtggcgattcctcaaggttctagaactagaagtaccatttgacccagca

SEQ ID NO: 803913 - DNA, 617 bp, Homo sapiens
aactaatgattaataatattcatatataatcatatctatcatctatatctagtataactcttcttattttatatattttctttattatactggaacagctcctgctctcagtctcttgcgtcggtgcctgggtggcttgccgcccacactaattaaactaaagagcttctgcacagcaaaagtaactatcatcagagtgaacaggcaacctacagaatgggagaaaatttttgtagtctatccatctgacaaacagctaatatccagaatctaaaaagaacttaaacaaatttacaaaaaaaaatcaaaaagtgggcaaaggatatgaacaacatttctcaaaagaagacatttatgcagaaaacagacatatgaaaaaatgttcatcatcactagtcatcagagaaatgcaaatcaaaaccacaatgagataccatctcacaccagytagaatggcagtgattaaaaagtcaggaaacaacaggtgctggagaggatgtggagaaataggaacacttttacactgttggtgggagtgtaagttaattcaaccattgtggaagatagtgtggcgattcctcaaggttctagaactagaagtaccatttgacccagca

SEQ ID NO: 803914 - DNA, 533 bp, Homo sapiens
agatttcctctttaccacccaggcctggatcccttcctctgcactaaagcaagggtccctggggcaaagatatccagccaggccaacaaactgggagttgtactgtgcactaacagccctgagtcaacaataccctctagaccttttgttcatatcaagggctgggagggggagaaaggatgaaatgcaagcccagactcactcaagacccaaactaccaaccaattttcaaaggaaaaacaaaggcttagacaacactttatattggaagcaatctaagtatccaatactagcagaatgattaaataaacaawaataaatccattcaattgttcctcagctatcaaaatttttcaaatataataacattaaaatacctattaaataataatcaagagaaaaagacataaaaccattaaaaatatattaatactgtctaaaagacaaaaatagaataaaaaacagtaaaggcaaaccaaaaatgttggtaaaaggctgttttggtaaataatgataaattaaaagtgatttta

SEQ ID NO: 803915 - DNA, 534 bp, Homo sapiens
gttaatgcatgagtaaagggtggtacagaatatcagagcccaagctctggagtcagctagacctgggttcaaactccagctctaccgcttactagctttatgatcttggaaaaatgtcttgagctctccttgcttccatttctcaagctaacaaagtccttctggcttaaaaagtgtcattacatcagcttccctatttaattatgagtactattccactctgttttactactgaggagaatgattttcaaagaagttatataatctgctcagggcctcacagctgtaaatttacagcttggatttgttacatatyttttaacccaagagatcattgttctttcctcaacaacatagcagctttacaagcattttaaagtctcagtataatgtaaacttttcaggaataccaataatcactcacatgtgcatggaattttatagttagaagcaggcagcagtttggagtgggttgggtacatgagagtcacctgaggaagctttatgaaaatgtatatgcctatttgcacctcc

SEQ ID NO: 803916 - DNA, 628 bp, Homo sapiens
acttttaatactaagttgaataggagtggtgggagagggcatctttgtcttttgccagttttcaaggggaatgctttcacctttttcccattcagtataatattggctgtgggtttgtcatagatgctcttattactttaggtatgttccttcaatacctagtttattgagagtttttaacataaagtggtgataaattttatcaaaagacttttctgcatctattgaaattatcatgtggtttttgtctttacttctgtttatgtgttgaatcacatttattgatttgcatacgttaaccaaccttgcatcccaaagcctacttgaacatggtaaataagctttttaatatgctgctgggtttggtctgctagtattttgttgagaatttttgcatctatgttcattgaggatgttggcatgaagttytttgttgttgttgtatctctgccaggttttggtatctgatgattctggcctcacagaatgagttaggggtgacacccttctcaattttttggaacagtttcagcaggagtggtactagctcttccttttatatctggtagaattcagctgtgaatccatctggtcctgggcttgttttggttggtaggttattcattac

SEQ ID NO: 803917 - DNA, 628 bp, Homo sapiens
gctgggcagagattatgatgctggttgacaaagaagctgagtccagagagaggaaaaggaattgccaaaactcacacatctggccaggacagtactggaaatgcggataactgctgtccctgaaagaggctggtaagtgatggagtttaataggaattgggtttgaaggacctctgttgccagaaagcatgagtatctctaaaggcgaagctgagtcagaggttactagaacagaggcatcagcaaaggatgggagaggtgacgagggcgatctctaagtgtacttggcccaggcctgaggagggcagctgattcccccagcaacagaatgctgtgcctgaggctaactagtcattcaagtctgtacataatctccaatgtcaaaactcaacaagcaaccttaagagagaccactaagtctactgcatgtctgcagggtttggcttccctggactgtgaggtcttccagggaagcgaccatattcmtagatttatccccagtttctagcaaggcctggaatatagtaatattgtaactctaatatttttgttcagagcaaaaataaaaaagaatgaatatgctcaaacgggaaactgtagctgagagagcacagataggaggggccta

SEQ ID NO: 803918 - DNA, 646 bp, Homo sapiens
aatttgagaggaattgcataaaacactggagaaatccaagaggggaagtccacaagggcggtggctccctccatgatctcagagcaagctggtgtcagaacctggacctagagcactgttgggtgggaagtaggaggagagtcctgcctccaggccagccggggaagggctccctctcacctctacacgcagcgcatttcttggctcagctgccctgtaggggatgcagggtggggacagcagagatctgggcctgggagggagacagtacacaatcacatggctgttgcccctccctcaggccttgtctacctctgactgtggctctctggcaggaatagatggacatggcctggcagatgatgcagctgctccttctggctttggtractgctgcggggagtgcccagcccaggagtgcgcgggccaggacagacctgctcaatgtctgcatgaacgccaagtaccacaagacacagcccagccccgaggacgagctgtatggccaggtgaggataaagtcgggtctggggcaggggagagagctgcctttgacagagaaaagttagcagggtgaagtcagctgtggaaggtgatgaaggcagaggatgactgctgtgatcctggagggcctcccctgggagga

SEQ ID NO: 803919 - DNA, 574 bp, Homo sapiens
cgtctctactaaaaatacaaaaattagctggggatggtggtgggtgcctgcaatcccagctactgagagtctgaggcaggagaatcgcttgaacctgggaggtggagttttcagtgagctgaaattgtgccactgtactacagcctgggtgacagagtgagactctgtctcaaaaaawaaaaaagaaaagaaaaggaaattttggttagttctgtgacaacaattttacataacaattatgactattaataacatacactaagttatcaaggaattatgggtgttttccataattttggaacatgtccaataacatatttatgcaaatataggccaaagaaagccaaatactatttcacatttgacgatgcttcctttatggattttatactgaataagccaaatttcacctttacgttagtgtactattaatgttaaacccaattctttaataaaaccttttagacaaatttatttaatcttaatcagtttgaccataaagtaagattcttataaacttttgtttcctcacctccccagaaaagtggatcctaaaccttttataaccctttac

SEQ ID NO: 803920 - DNA, 708 bp, Homo sapiens
cacaccttgcatgtaaaactgatgttatttcccaaagattactaaaggcatataaactaaaaggcatcacagtttttatttttctaataaaatatttgatttaagctcttattattttttaacctattaatcaaagctcttttatatctcacacacacaacatatataaatacacagaccagaagatccagtagttgtaagaattttcatttgccagtttctttttctttctttttttttgaatcggagtcttgctctgtcgcccaggctggagtgaggtggcttgatctcggctcactgcaagctccgcctcccaggttcacgycattctcctggctcagcctcctgagcagctgggactacaggcttctgccaccacgcctggctaagtttttgtacttttagtggagacggggtttcactgtgttagccaggatggtctcgatctcctgacttcgttatccacctgcctcggcctcccaaaatgctgggattacaggtgtgagccaccgcgcccggccatcatttgccagtttcttaattggattactgactttagggtggagcccttgggggaacaaggtcaggaaagcatgcagtttctacagcctaataagcaggcaagctggaaggcaagacagatcccccaaaataagggtcccattttataccagatcctggatcccccccaccaaaaaaggggaaatc

SEQ ID NO: 803921 - DNA, 554 bp, Homo sapiens
gctgggttccacagttctcttctgtgacccacggcttctaatagagctataacagtcactgcatggcccaagattccattccttggaatctgtgaggccaagaaccccaggtcagagaacaagaggcttgccgccatcttggaagcrgcctgccactatcttgggaactctgggagcaaggaccccctggtaacagtaggcttgcattctatcctaaggtacccttctttatggcagaacaatatagacacacaaagcacaccagattcgttacagcttaaggctagcctcacaagtcttttttctcattaaccaaaacttgcctgtggtaaggtggggaaagtgaagagctcaggaagaccagagaaagactcacctatcccagtgacactgaatcaaaagttcaggcagccgctcattggttaagaagggatcttttccaggagttgcatcagctcttaagtgtccccgtttggggagcaaaaagctctcatgtcccaggatcctgtacatacacaattctgtcacccacagccatcagcaaagatttcaag

SEQ ID NO: 803922 - DNA, 569 bp, Homo sapiens
tccccatttcagacagtccccctttcctaatcaatgcattcactttagggtgtgcacggaatctgcctgcagccagtctgcaaagccacatgattattttcctgcagccaccttggattgccagccccaggcagaggaggcctcaccagagttacaaattgtcatactgcccgtcatgtgcttgtccctccctggaagtatcttcctggggttgccaagtgtagacaatgtgctccaatatttgccatgttcctactgaatcctctgaagctgcaaccaccgggcagacataggggaggttgttctaaaagacaccatacagtcatttccctggctgcttcagtcgtcacctaacgaacagctcactcccagactcaggatggagggagtcttactatatyccaccctcaacatcaacagggccagttccatgttttaggttctgccatgtgcatcactctacaccttgtaccgatttttaaattgggattcttttgcttggaagtgacagaaatccaacttgagccagattaaacataaagaagaatgtgttgggtaataaaatccaa

SEQ ID NO: 803923 - DNA, 599 bp, Homo sapiens
tttagtctttgtaattgaagggaatttctgcttcacttctttcattttctgcctaatttgtccattttatattactttgctgcttctctgctcatttttctacttcttcatgctttgtcacctctatcctgtatataaaagcagatcataatgcttccagaatattttattttgaatarataccttttcctacctctctgtccttaacattttcgttttgaatccaaaatgatttttactgtgctctacatttgtgttaacattacactttcccaaaagtaaatttaatttataaaatatttaatttttaatttatcagggctttctagtcactatcatcagaactgaagttataatttctaaagctctcagagaactaccagcctgtttcctgtttccacctgtaacttctttttgacatgtgtagatcctttttatacatgcccggcagcattttgcatggggccttaattaaaatccagatgaggattgtctgccaaatgtatcattttgaaaatttctcccaatgcatattgaaagggatctagcttatgtatgactgggacacagctggagaagaacatatctctttttaaaaa

SEQ ID NO: 803924 - DNA, 657 bp, Homo sapiens
aggaaaaaaagttgtagtaaacaaaaaacactaaaggaatctagcccttggagaatgactctcccagtaatgaattccttgttctgatagtccaccagttgaacattaattatggttaatactaaatatcttatattcaaagtgttaatctaatcctctaaaaccgggttacaggtgtgaaatagcagaaaggataaagaggccagagggaaaaagaaggccataggagaaaagactgctttaagaggggagagagaagcctaatgcagtcttcatcttattcacaattttgccttcaattgtcccttcttgaagaaacttaaaggaaactctcgaactttcctccrgttttcagcactgagtcctcctcctcccagcccaccccattcaagaactgaaatataggataatatagtttagcacccatgtgttacaaaggctttggggagcttgcctggggacctaaaaacccttagagtatcagttcaagaaaaaagcttgctctggattcaaaaatcttgctctgtcatttttcaaattgagctactttatagagcacctactctgagtcagctactctggaaaataccattttacagagataaatgagatgtgacttctgctctcaaaggatttgcaggtcactagcaaacccac

SEQ ID NO: 803925 - DNA, 680 bp, Homo sapiens
gtaagctagtcactgaatttggacgcaactgaatccagtcctgctgctctgaaagtgaaatcagggctactatgagagcatgtaacatttatactaatacttgaaagaagttgaaagatgagtcattgtgagttcagtacgggaaaggaaaagaggctctgacaaggagctttgcatgtatgaacagccaaacgcagccactttggctgggccataatgagggtatttaagagagattccagatcaggctggtagatcctacaaggtattkatcaagttaaatattttggtttcttactgtattttgtttctgtcactggcagttcctggttgctagtgagagaagccaacacacacagccaaaaaaccccccaaaacagtattataggttactagagtgattcagtaactgtccccagtattagctagaattaggggatgaaatatttagagctctttttgtctcctagttttgcctttctctacattttggcttcagttttctcccacccatgtttctcattctgtacaccagctttctcagcctctctggtctgcatgacagaaaacatggctcttgcatgtaacatactgttgcatgtaacagtttataaacaatttacagtttaaaaacctaaacaaactggtaaactcactttctgttccaagcccaaaaatcc

SEQ ID NO: 803926 - DNA, 615 bp, Homo sapiens
tattttttggctgtacataatgagttatgtgattgctttctagtgattgtgccagattgattgccttttatgttaatcagttttttaatagcatgcttatttaaatttttttccttgattgccccatcttatttagttaaaaatcagaaggcttcttggaggttataaaaataaaatttgaagaaagcagcaagcagaatgacwctatagatgacaaaatgcgtatctttttaaatgcagattttttggacattaatctgttaaaactacagtttcactcaaaatatataatgcaggcttccaaaccaaaaatagtttattcctcccattattgttacatatgctgtttgtgccaaaatccattcaacaagaaacagtttttgatttttgtagatatagtgttcccaatgtttaaaatttccagatttacttttgttacttcagaagctttctgtctttactttctttgaagtgttctttaagatgttacttatcaagccagtatgtactattgatgcattgaacaaaaaagtttttattgaggggcttctattaatgttagtctcaggaaggtgttgaggagtaaacaccagacaacaaagggatccatggccc

SEQ ID NO: 803927 - DNA, 619 bp, Homo sapiens
ggggtaatcacttttattttatattttttgaaacagagtctcactctgtcacctaggttggagtacagtggcatgatcttggctcactgcaacctctgtctcctgggttgaagtgatcgtcccacctcagcctcttgaatagctgggactaccaacatgtaccaccatgcctggctaatttttgtatttgttgtagagacagggttttgccatgttgcccagtctgtgctcgaactcctggtctcaagcaatctacttgtctcagcctcccaaagtgctgagattacagtcatgagccaccacgccccagtgatcgctttctaaaaaaataaaaaaaawtttttttgtagacacggggtttcctttgtggcccagactggtctcaaactcatggcctcaagtaattcttttgcttgggcttcccacagtgctgggattacaggcaattataggcataaaacaccatgccctacctaaagaaaaccttatatgtttaaaaagatgtttcctttatacaaagtaggcatgtaatttgcatatgttaaatcaattaagttgaatttataaaacaggagaaagcgtcattagtcgtgtaaccaaatgcaagtccagttgcttt

SEQ ID NO: 803928 - DNA, 655 bp, Homo sapiens
taccatgctactgattcctgaagcatcaatggacacagcatgatttcttaatgaagatgggaagtagacactgatttgcttcattggagattctttgaattgctctacttattgtagtaagtgaggagattgagcaagggatttttcctaagagtcttgctaaatgatgctaggcaaaacttaggagagcagcaaggaaagtactctgttttgtactaggcatygttactagattgccaactctaaagacagagttggcttttgggggttatcattagtgcattgaaagagtcaattccattactctgtcttgtcctataggtaagaatccactaggaactcagagagtctttttctttcatggtgcattaaccatttctgctgagtgcagctcatttccctccctctacctgttctcccaactgttgctgtggacgtgcaggagagaacatacctagtatatagcctaccatatgccaggacggtacattcttactcttaggaagaatggtgttttcctggtcttcatcttaatttattaccctcttttggaaaattttggttggttttccctttgttttctaattttttctaccattaaaagtgtttgaagtgataagcataaagggtaacttttgaattgtttagttttgtg

SEQ ID NO: 803929 - DNA, 628 bp, Homo sapiens
cacattgtattctaatgacagcgaaagaaaacaatggaaaatttctcattgataatttttatattattgcatattgaaataatatattgactatacagcatatggagtgaaataaaagctgttaatattaatcaccttttcatttcatttttacttcactgggatcactaggaaattttaaattacrtgtgtagattacattgtatttctattgaacagtgccactctagcctagactgttgctactcaagatgcggtccgaggacgtcatttgtcaaaaatgtagaatcccaggccccaccgcagacctgaatcagagtctgcattttaatggggttcccaggtgattcatatacatgctatagtttgagagacacagctctagcaacatctaaaaaatgtttttcaattgtataatttttcttcatttcttattatttttcactgtggattccaacttcggctcttcatttgtcatttagaatcattcatatgcacgtcatttctctgttttcagtaaattctcttaaatttttttatcgcttaacattttcaacagacatagctttttaatgtatgtgatggaattagtatgtattcatgtaatacatataatttgtccataaat

SEQ ID NO: 803930 - DNA, 628 bp, Homo sapiens
cacattgtattctaatgacagcgaaagaaaacaatggaaaatttctcattgataatttttatattattgcatattgaaataatatattgactatacagcatatggagtgaaataaaagctgttaatattaatcaccttttcatttcatttttacttcactgggatcactaggaaattttaaattacgtgtgtmgattacattgtatttctattgaacagtgccactctagcctagactgttgctactcaagatgcggtccgaggacgtcatttgtcaaaaatgtagaatcccaggccccaccgcagacctgaatcagagtctgcattttaatggggttcccaggtgattcatatacatgctatagtttgagagacacagctctagcaacatctaaaaaatgtttttcaattgtataatttttcttcatttcttattatttttcactgtggattccaacttcggctcttcatttgtcatttagaatcattcatatgcacgtcatttctctgttttcagtaaattctcttaaatttttttatcgcttaacattttcaacagacatagctttttaatgtatgtgatggaattagtatgtattcatgtaatacatataatttgtccataaat

SEQ ID NO: 803931 - DNA, 511 bp, Homo sapiens
ttgaatcctcaatttaacccttaatttttttttaccaccatctaattagatctcatccttattgcctttagagtaaatcttacaagctagatttcattcaacaaacatttactgatacatacttcctgctaaacacctgttcctgtaggggctcttgctttgaaattgggagcaatggcttagtactgcagcacagtttactggggccatggaggctacaacggtcttgaactagctgtttgcctaatttgactatatgtcttcatctattctttttatttcttctctcagttaatcaaagttgttctttgaacttcmctggggcccttactgtcttatactctgccattcttatttctaccagtgtcttccctcctctcttataacctaagttttcttccatgtaactcttttctgcccccatatccttcaggtcccctcttcatcacaggaagctgtgtggtacagtggttaagtagtgggcctcttaatacatatgccctaaatctaa

SEQ ID NO: 803932 - DNA, 417 bp, Homo sapiens
acacagcttgatttccctgtgatgttttcatgctaataaaatactcttatgtaggcatttcaatttatrgacctgcactcttcttgatgctattttttattcaatttacatataatttttgcacatatttctttgttcagcttactgctagttttttataggtctgcttttagtttttaaaattactgttagaacaatgtatttttaaagttttctacctggtttaaataacaaaaatatcagatcctttattacatatagtactttattaaatgagtacataattcacattaaaatatgtacatatgtaatagacatttgacaatttacactctcctataatgctgctaattcacaatatgatcaaactcactcaatggaatactgaaaatgtaaaataaaaatgtcagaaaagtg

SEQ ID NO: 803933 - DNA, 591 bp, Homo sapiens
aaaataatccattatattgcccaaatttcattatgtaacttaaattaaatagcagaaaataaattacatttcaatttaattactttttaataaatgatctaagcctattaaagtaatgcttgatggtggtctgttaactttattgacatttagtatacaaggccccatsattgctaatgtaggtggtgctacacattatattatcatcatgtatttggctaccttgtatactgtcaaccattatgacaaggtaattatttgatatgctctctacaatgtaagtttgttcatggcagagtctcttaatacacctgtcattccactggtataaacaaaaaaccagagcttgtcagtagttaaagcattaaaaacagattttttttcaggactattacaatagaggaagcaataggcgaaaagacacttcagtacagagcagggctcaattttgaatatagcataggcaagtggaaatttatagccaaggagcaaagtgaggtcagtggatggaaaattactaagaggaaatatcaggggtacagggatttctggctaaaccaacctaatgggattcttgctgaagacaggcca

SEQ ID NO: 803934 - DNA, 591 bp, Homo sapiens
aaaataatccattatattgcccaaatttcattatgtaacttaaattaaatagcagaaaataaattacatttcaatttaattactttttaataaatgatctaagcctattaaagtaatgcttgatggtggtctgttaactttattgacatttagtatacaaggccccatgattgctaatgtaggtggtgctacacattatattatcatcatgtatttggctaccttgtatactgtcaaccattatgacaaggtaattatttgatatgctctctacaatgtaagtttgttcatggcagagtctcttaatacacctgtcattccactggtatraacaaaaaaccagagcttgtcagtagttaaagcattaaaaacagattttttttcaggactattacaatagaggaagcaataggcgaaaagacacttcagtacagagcagggctcaattttgaatatagcataggcaagtggaaatttatagccaaggagcaaagtgaggtcagtggatggaaaattactaagaggaaatatcaggggtacagggatttctggctaaaccaacctaatgggattcttgctgaagacaggcca

SEQ ID NO: 803935 - DNA, 591 bp, Homo sapiens
aaaataatccattatattgcccaaatttcattatgtaacttaaattaaatagcagaaaataaattacatttcaatttaattactttttaataaatgatctaagcctattaaagtaatgcttgatggtggtctgttaactttattgacatttagtatacaaggccccatgattgctaatgtaggtggtgctacacattatattatcatcatgtatttggctaccttgtatactgtcaaccattatgacaaggtaattatttgatatgctctctacaatgtaagtttgttcatggcagagtctcttaatacacctgtcattccactggtataaacaaaaaaccagagcttgtcagtagttaaagcattaaaaacagattttttttcaggactattacaatagaggaagcaataggcgaaaagasacttcagtacagagcagggctcaattttgaatatagcataggcaagtggaaatttatagccaaggagcaaagtgaggtcagtggatggaaaattactaagaggaaatatcaggggtacagggatttctggctaaaccaacctaatgggattcttgctgaagacaggcca

SEQ ID NO: 803936 - DNA, 594 bp, Homo sapiens
agatttcaagggtaatcagatatggaagattaagaaattctcactaaacccactttgcagggttcctgttaaaagtagcttttacaaggaagtgcacaggtgggcctagaagaaggttcaagagcctgactaaagtttggtcaagtaaagactgtcactagcattatgccmactggtagtaagcaccaaataaatgattaatgaaaaaaaaatggaggatatatagcagaattcccccccctttttttcatttcttttactcaaccaatgtttatgaaatgaaggcagtaaagagtagtggtgaaaagcccagactatgcaacaagaaacatagttttaaatcctggctctacttcctaagtgaccataaacaagttactatatctctatgtgccttaatttcctcatctgtgacacaaggaaaattacaatagctacctcatgatgttattgaaaatatttagtgagataatacattttaaaattctgtataatgccttgaacatagtaagccatcagtaaatgctagctattcttactgtttttatcaggtgctgttataatgatacaacagttgtgaagaaaagcagggga

SEQ ID NO: 803937 - DNA, 590 bp, Homo sapiens
aaaatgcagaattgtgaaatgtgtgctattgaatgctagcataaaattagatcaaaaacctaggtgcagcaccatggtaacacttcacaggctatttactaaccacatcattgtgcttcgagtagtacatttacgtgatggagcagtaagtgaaatctctagaaatagatgctgggtgatgctcatacagtgtaacgtggcaggaggtatgatgggagtagtctactgtgggtgcaagtgaaaacaaggtaccttgtctgtggaccattttaaaataataataataaagctgttttaaagtcgttcttctctttaatatcaccrtgtgctagcaattgtaaacagcattggtgatataaaactattcgtccacagggcagataattcccactatctccctccctcttggtgtgccactgagataacctgtatgttcttattagatatacagtgttccccccttttctcctgggcatgtgttccaagaccctcagtggatgcctgaaagttcaggtagtactgaaccccatatttatatatggggttatacatttttatataacacatacatactattttatatacacata

SEQ ID NO: 803938 - DNA, 625 bp, Homo sapiens
gagcccactgcagcctcaaactcctaggcttaagcaatcttcccacctcagcatcctgcaccctcaaagttcaataaacttttaaaaagtaataactaacataccggaacgcaaaaagccaaaagctaaaatgcctatacaaagaggagccaaaaaaagcagaatcctaaaatgttcagaaaatgtacagatacttatgaaggtaacaataaagctaaatacagaagattatttaataattgatattacaaagagttggacctcagaatccatcctctattgagagctgactaccgctaatawaacccagaatgctgcaagtctagcttatgcccttactcatctccatcaacctctatgcacacatcctaggtgaaagataaaaagattcttttacagtaaaatgactgacaccttatcctctcaaaatacccacaaatattaaggggttgccataaaatggccagtccatatttgatcgccttacagtgatgctcagcagccaaggagcccaggccacacactcagggcttccagtcagacttctaaaactcacgattaataactaacaaccaaggatcagacaggtcaagaaagcttcctaactccctaaaaatatggggta

SEQ ID NO: 803939 - DNA, 633 bp, Homo sapiens
ttaataaggaatcaactaggaaaagggatcaatctattataaaatattcttgacagttacctgattgggtataatttcataattggcctcttcaaagacctgctttaatgcagcacttagttcatcatattccacttctttcaattcaattcccggaaagacatcttttatcagtgcatcaaaccgggtgcaatcagtaaacgtaaactttgacatkgtattaagcctcagtgcttgtaccacaatatgactttcattagctagaaaaaagtttcattttaaaattatttattattactttaatgatgaaaaaagtttttaaatattctatagccttgatatgcattattaatcattaaatgcactagaatttagtaacatttaaagacattacatcacatgaattggcaagcttactttaatatcttttgactgctaaaaagtaaatatcactaagtacagttataaactctttcccatagaattcagatcacagggtaccaagactttaattaataataaaaatcattatcactaatatttgcatagtacttcaccttttatattatatgatgtaatccttttaacaaccctataaagtaggttaaaaagtattactattgttattccaat

SEQ ID NO: 803940 - DNA, 613 bp, Homo sapiens
ttttccatgtggaggtaatggttgtcctggggctgcccttgctcctgaattatgccgagctccccatgtaacgtagaaactatctgtggaaataaatgatatttttgttttatatgcattactcgtaatgagagttcaacaaatacattgcctactaaaacatttttaagttaataatccaaataagatcatctccagaagggcaaaggcaaaatactttaaagtgtacattgtaaggtcaataaaatcaggtgaaatacaatgactgagccaggcaaggtggcccacgcctataataccygcacttttggaggccaaggcaggaggattacttcagctcaggaggtcaaggccagcttaggcaacatagcaagactccatctctataaaaaatttaaaaattagccaggtgtggtggcacgcacctgtggtcctagctacttgggaagctaaggcaagaggatcacttgagcccaggagtttaaggctgccgtgagccatgattgcaccaccgcactccagcctgggcaagagagtgagatctatctcaaaaaaataaataaatagaaaagaaatacaaagaccttcaattgcaatatcaactctacctgaa

SEQ ID NO: 803941 - DNA, 567 bp, Homo sapiens
ctccttcaagaatatctctaattacatcaggtggcatgcgtagtgagcgaatttctgaaagtgattcgggcttaatgtttccaactgctagtttagcttcattgactaaaggctaaaagagaaaaaggccatttttatcttcaaattatatatttctttaaatcattaactcttgaaaaattatgttttattgtcatttatgcaaaatgactatagttactaatgtyctctctcttaaaatatcaaaatgctttcaatcatacaaggtgtaaaaaatgttcaacttgagacagtaagacgtcttgccaccacaactgcaataacctaatttggaaaatctaacttgttttgagacaatttgtcattttcaagaggctctttatatcctaggactagctgactaatttaatcaactggagaaaaagagcttaacagtatatcttaatttatctaacacattttttccctctgcaatcaaaaccatatggctcttggaaaacaaagattatttttaattatcatccattaatttatacttttcctggaaggctttccttcttgttctct

SEQ ID NO: 803942 - DNA, 561 bp, Homo sapiens
tataaaataaaaataatgtatactatataataatacaatactatatatataagtattctatgttattgatttttttaattagagaaaaaataaataagaactaatgacatttttttcattttcttcttatttctatgccttagcctctcctggattttttctctaaaaccaactgctattcccaaattttcgaattctagaagccaataaagctaaatttgaatgtcatgtcttccctcaggcctaccccgatatacccagatcaaactaacctttctcatttgaacccacttcaaattttaactgtatttttcttatgactgacaatatataatttgttgcattgctaattttataaaggcctctaattcatattttccayagctcctagctaagcgtctttgtagatcctcaatgaatgtttgctaaattaatatatcggctaattaaaataagaggaaacctacttatccctcagatatcttgatgagaggcagaactcccaatttagtatattcgtttctgtgcactcatctagatatgtagaattttttcctcatt

SEQ ID NO: 803943 - DNA, 587 bp, Homo sapiens
atagtagttacaaaagtagttacaaagtttacaaaactattaccattgtaataccaaagctgttgctgaagcatttttaaaagaagagaaaagcaggttgtggagcgtgtacagatactgctcagatagggtctcagagggtggacacagtttgttgggatgtcttagtaagtacatcacatttttaataatagctaacattttctktggatttgctatatactggaattgtgatgagggctctgtatttaatatctttcaatatttaccaaaaatgtatttctatctatttttttatagtagaaagcttaatctcaaagagtttaatcaacataactaaggtaacagagttggttaatgatggggttgtatctcaaatccagaataatatgacttctccctttgtgttatgaagacaaataagtttatcactaattttgattttcaaatactcgttaataactaataccacctaacatttgtagttgttctagttttccaatacacttttctgtagttttaattaattcttaagagctgtgtcaggtgggttttcttaactccactttacaaataaggacgttaaa

SEQ ID NO: 803944 - DNA, 614 bp, Homo sapiens
gcacttctttttctggatggtatcttcaaaaggcaaagatagcaggatccacagatgacttcaggaaagtaatagcagctttcacaaccgaaggcatggtggagcctgtggtgaggaaaaacaagaagcagggatgaaggattgcaattagaggctcctccaaacctcccagatcatctaccctgagttgtgcttttatctgtcctcaatatccctgctttttcttttcttgctacccagattctccttgaatcttctctggcyccagatacactcagctgcagtgagataacaaacagccaggagaacacgcaccaagtctagtcttctactcagcttggtactgagacagtaaggagaatcaatgccacttgtccttctcacagttcacactccccatttgtgtccctctccctccctactcacccacctaccttgtccccaatttaatatttcacccttgtcctcccaagaaaagaactagcagaaagattagtaaagatctgaagcaggatggtggaggcaggtgacaatgggactctcttgtggtcaccttccgccaggccagggaaggggaaggagacaggccttaggattgtgctcctacctgcatg

SEQ ID NO: 803945 - DNA, 706 bp, Homo sapiens
tttaacattcgacatgtttaatattacaatccaactattacttatctggaaggaacttcagtgttacaaagacttcttgaaattgaacaaataagtctattttatttctagatagagtaactagattataaataaaataagtctattttatttctagatagagtagctgactacctgattgcttgtgaggtacacttacggttatctcatcttagaggttcttgtatagcacatcacaaatcacctgtcaccaatgtgccttcactggggctcatttaacatattttaatagctcatgcaggctcagtgtgatggcttatagtttccacttggagaactgatgttcaatcacctgtgttgataggaattgaaggtaagagaaggaaggtaataatcattccattatgaagtactattttagctctaaatatagctttctttctatttacttttctttctttctttctttctgtctctctctctccctctcttcyttccttccttcctccttccatctttctttttgtctgtcctttgcttctttacaaaaaggacttcatgtagcttaaaagaaaaggcagacaacttggaagtaaaatataagaagaaacagaaaacaaaatcaggaaaagagaaacaagaatacattcattataaaatgtaacattatttccataagccagatttacctactttttccccagca

SEQ ID NO: 803946 - DNA, 575 bp, Homo sapiens
aacccacgtccggatgactccaaagccatgttgtttctgctcagttgtgccccaagaaaagcaggctcagcctagctttgctggaagatgcagagtgggagggagctgagaacgcaggttcatttgagagcatcatattttcaccttcactgcacatgagtgagtataacgcacatgctttccatcttcaaaagctttctgtgattatatacaaaagaraacgcacatggcttcaatatagggttcttttctctcctagtctggaactggcctgaaatcccagtaattctttatactgggattttatctgataaagtcataagcattcaaaacataaagctgcccttttatcggacttagtggagcattttcataaagtgtcagtgggattgaggagacggttgtacatcagaccattcatcctggtggattaaatcatgacatatatttcaagtcggggaaaatgtagtgtcagaggaaacataagcaataacaactgggactggcagaactgctgatgaatgggcctattctcagctgctcgtcatagacagtggaaggaaagagacaggaac

SEQ ID NO: 803947 - DNA, 648 bp, Homo sapiens
ataaagtcataagcattcaaaacataaagctgcccttttatcggacttagtggagcattttcataaagtgtcagtgggattgaggagacggttgtacatcagaccattcatcctggtggattaaatcatgacatatatttcaagtcggggaaaatgtagtgtcagaggaaacataagcaataacaactgggactggcagaactgctgatgaatgggcctattctcagctgctsgtcatagacagtggaaggaaagagacaggaaccccagaagactggctcttgttccctgggaaagaggagaaaagaagagaaagattaggggacagtgacttcctgtggatcaaattaggcctatcggaatagaggtgaggttctacagcccacaaaatattctctctcttccaacctcactctcttccttccaggagacagaagacaaaggtcaaacctatcaccttgattattggtaagggttactttgaggatatgacttcaataaatatgcgataacaatgggcctccagatattgcttgaatcagagaggtttgatcgtaggtgtcaggcatcaactcttccctgtcagctcccaaggcagagactttccccactatgcttttatgagggttgaaagcagaacagagaatg

SEQ ID NO: 803948 - DNA, 603 bp, Homo sapiens
aagactcaggaatgaagcagaccctagttcctgtttcttttagaagctcacatcttgggtacaggctagccttctcatttcccttcatgtccagaatgctggagcacagctagatcttctgctgtcaattaggagaagtgaaaactgccaccaacatttctacatagtgcccccaccagagcggcagccgggcacgatggctgtggagtaagttgcttagccccaagtcgtttgcctttgttttctgagttcaaccttcaagttaattcagagcaaaagacagttacttaaatccagatattttatcttaatgtgggtaattcccataatatcatacattaagatgtctgatttcagctgccacccaacaggtggcagggatgttgtttcagatctgttttatcgctgcatgtgcatatgtttctatttcgttaatggcacgagaggctgwcaccaaattggtctcgcattcaaagtgtggaaatagaagcagttagatcctgacctttatgtaagttaggagctttgtgcattgagtgcatgtgtgtgtacgtttatgcctgaaagaagggaagaggcaggaaagaggatataattgccaac

SEQ ID NO: 803949 - DNA, 568 bp, Homo sapiens
tgaataaacgaatgaacttttgttgcatagctaatatgatttcagttcaactagtacagaaggtcccttacttgttaacagggacttgaaaccaatgtattcagtcaacaagtttgcctactggatcattcactgaagaaatgtttattgggcacctacyatatgccaaacactgttctaggaactgagagtttatcagtgaatacaaaagacaagatctgctcttatggggctaactttctaaaagagggaaaacaaatgggccaatctgattgatgggcttttaacagaataagatgactgactatttcactactgatttagctattctagcaacacttaagtacaacttttaaaaaatgaatttgttgacatctactatttccagatgctcttctaggcattttggggagaacaagatagattatatacacaaagacatcaaaatttacctgatgggactgagtagcacagttgtcacaaactttagtacatttgttttaaaacactacttacagattttttttttaccacacctatgacctgggttattaaatttttatgttac

SEQ ID NO: 803950 - DNA, 568 bp, Homo sapiens
tgaataaacgaatgaacttttgttgcatagctaatatgatttcagttcaactagtacagaaggtcccttacttgttaacagggacttgaaaccaatgtattcagtcaacaagtttgcctactggatcattcactgaagaaatgtttattgggcacctaccatatgccaaacactgttctaggaactgagagtttatcagtgaatacaaaagacaagatctgctcttatggggctaactttctaaaagagggaaaacaaatgggccaatctgattgatgggcttttaacagaataagatgactgactatttcactactgatttagctattctagcaacacttaagtacaacttttaaaaaatgaatttgttgacatctactatttccagatgctcttytaggcattttggggagaacaagatagattatatacacaaagacatcaaaatttacctgatgggactgagtagcacagttgtcacaaactttagtacatttgttttaaaacactacttacagattttttttttaccacacctatgacctgggttattaaatttttatgttac

SEQ ID NO: 803951 - DNA, 568 bp, Homo sapiens
tgaataaacgaatgaacttttgttgcatagctaatatgatttcagttcaactagtacagaaggtcccttacttgttaacagggacttgaaaccaatgtattcagtcaacaagtttgcctactggatcattcactgaagaaatgtttattgggcacctaccatatgccaaacactgttctaggaactgagagtttatcagtgaatacaaaagacaagatctgctcttatggggctaactttctaaaagagggaaaacaaatgggccaatctgattgatgggcttttaacagaataagatgactgactatttcactactgatttagctattctagcaacacttaagtacaacttttaaaaaatgaatttgttgacatctactatttccagatgctcttctaggcattttggggagaacaagatagattatatamacaaagacatcaaaatttacctgatgggactgagtagcacagttgtcacaaactttagtacatttgttttaaaacactacttacagattttttttttaccacacctatgacctgggttattaaatttttatgttac

SEQ ID NO: 803952 - DNA, 609 bp, Homo sapiens
acgtagaaaaaagattggacaaaattcaacatcatttcatcataaaaactcttaacggattaggtatataaggaatgtacctcaacacaataaaggccatgtatgacaagcccaagctaaaatcatactcaaatggtgaaaagttgaaagcttttcctctaagatcaggaataagaaaaggatgccttcccttgtcatttctattaaacattttcaaattccaatgacattttttatagaaaatgaaatcctgaatttttttttcatagaaaataaaatcctggccgggtacggtggctcacacttgtaatcccagcaccacgggaggctgaggagggcrgatcacaaggtcaggagttcaagaccagcctggccaacatggtgaaaccccatctctactaaaaatacaaaaattagctgagcatggtggtgcgtgcttttaatcccagctactcacaaggctgaggcaggagaattgcttgaacgaggacccaggaggtggaggttgcagtgagccaagattatgccactgcactccagcctaggatacagagcaagaatctgtctcaaaaaaaaaaatcctaaaattcataaaattcatctggaatc

SEQ ID NO: 803953 - DNA, 579 bp, Homo sapiens
taatccctttctcatcacttttctttccaaaggaactaattacatatgggttgcaataatagttgttcatattaatgagcatttacttagtgtctgacatcttgttaggtactttagactcattatttaacccccacaactaacctcacctatgagctatgtatcatcatcactgttattattagtatgataattctccttttacagaggtggtattcaaggctcaaattatttagataattggccaaaagttgcacaagaagtaaactacagaactggaattcaaacctctctcagactgcctcagaagtctatgctatattgtcyctcctcactccaagagagtgttcttgattttggttggcacatattttctcaataaattgatacaaaatggagaagtaaggaaatcctcacccctttttgtcatagtcagaagaacataggcaagcaagaagggtaatttcaaaattatttaaaattgtgattagaatttcttgaataccatgaataaaatgtatagtctgaagctatacttctttaacatgtttttgtcctcgcatccactattcttatccc

SEQ ID NO: 803954 - DNA, 579 bp, Homo sapiens
taatccctttctcatcacttttctttccaaaggaactaattacatatgggttgcaataatagttgttcatattaatgagcatttacttagtgtctgacatcttgttaggtactttagactcattatttaacccccacaactaacctcacctatgagctatgtatcatcatcactgttattattagtatgataattctccttttacagaggtggtattcaaggctcaaattatttagataattggccaaaagttgcacaagaagtaaactacagaactggaattcaaacctctctcagactgcctcagaagtctatgctatattgtctctcctcactccaagagagtgttcttgattttggttggcacatattttctcaataaattgatacaaaatggagaagtaaggaaatcctcacccctttttgtcatagtcaraagaacataggcaagcaagaagggtaatttcaaaattatttaaaattgtgattagaatttcttgaataccatgaataaaatgtatagtctgaagctatacttctttaacatgtttttgtcctcgcatccactattcttatccc

SEQ ID NO: 803955 - DNA, 608 bp, Homo sapiens
gcctcgggagtcagaagaacctgtgtttaagctgctgtgtttcctgctgactgctgtagaacccgatgcaagttatgtaattcttctaaatcctcagtctctgcatctataaagtagacataacacccactacttcataacttcatataggtattgcaaggagttaatgattatatgtgtgtatatatgacacttagtattatgtcttctcatcaccctcattctcattctcaccattgtccccaattagactatgagctccttagggtcagggcaggccttcattcagtcatcattcaacaactgtctattgagagctggctgtgtatcagttctgtcctgggtgctggacatatggaagggacaagactagcaaagtctctaagytgtcagagtttatattttactggaaaatcatacattaactagtttgcaaataaatacataatttcagcaataataagtggtaagaaggaagacagagcagcataagggagcaggggaggatgtggaggaggatgagggatagcttcatcagcagcaagcatgccagggtggctcctctgcacagggatttgaatgaagtgaggaagaaaatatggagaagg

SEQ ID NO: 803956 - DNA, 572 bp, Homo sapiens
tctcttttgaataaagtaaaagaaagaaacaagtggtacattgaagcaacagtgggatgccaagaacttgaaaaaaaaaaattaacaaaattactcctatagtttgaatgtgtcccccaaaagcgtgtgttggaaacttaatccccaattcaacagtgctgggagatggggcctaacgggagttggttaggccatgagggcacagtgaatggattaatactgttattgcaggagtgggttcattataaaagggagagtttgagtccttttkgctttctctctctctctctctctttctctctcagcccttctgccttttaccatgggatgatacagcaagaaggtcctcacaagatgctggccacttgatcttggactttccagcctccagaattgtaagcaatacaattctgcttattataaatcacccagtcccaggtattctgttataacagcaaacatgaactaaggcaattaccttctgagagaaaaataaaatgaacacactgtctcaaagctggtttatataagtttgctttaaaaactaagacacaggctggcaagcactagtt

SEQ ID NO: 803957 - DNA, 534 bp, Homo sapiens
atttgaacacagcatcatctgattacagagtccttgcttctgcccatgcctctcatgcagcttcatgaaatcccataatcacaggaccatctgtcttattcaccactatatttccagctctaaatcaatgtgtggcatatgataggtgcttaataaatattttgtggatgaattaaatatgaattaacgtgactgttttaaagaacctgcctcattactttataatcacatggtaaacagggttactattaccttgaccaggacaccaggaatatagtrgggttttatgactgttgacaaaatacacaagactatgattctaactgtcccaacactgtcaagctgcgttatcaggagacacattagaaactcttataattgtccaggcaagagatgatgagaatccgaactaggactgtagcacaggggatgacaaggaggagctacggattcaagaaagtgttaggagtaaaacaggctgggctaggggatttattgagtgtggtgtgtgggggaaaaaagtagccttcaagc

SEQ ID NO: 803958 - DNA, 555 bp, Homo sapiens
ctgattgtgggtcatgagaacctcattccagagtgggttctaccccatactccgcaggaaggaatgctgcacagagagatccagaaaaccctgagcaggcaggccttgctgggtttattcaggtcatatcctttctgtacagtcacattgtgacacagttgtccatgcttccagaccttccctatgtatctcttcatttggctgtttatttgtattctttaaaatatccttcataacataccagtaaatatgtttctgtaagttctatgagctgctctaataaataaatcaaacccaaagatagggtcatgggaaccccaacttgaagctgatckgtcaggagttctggaggcctggacttgaggctggtgggagaagggggcagacttgtaggactgagccctccatatgtgatatctgttgctgtttctgggtacataatgttagaactgattggaggatacccggggaaaaacccccacactttggtcacagaagtcttcttctgtgttgatgattgttgttgtggtatgagggcagaggaaaacatggttt

SEQ ID NO: 803959 - DNA, 536 bp, Homo sapiens
cgtactgccttatttctgtttaacctcgcaataagctaaatgcttttaatacctttgaagtaaattaaaaatggccattattagtatgtttgcaaaatgaacctagaaaaatgtgaccaagtagataaagaaaccttaatgaatgagaaggttacrttaatttttctctttgacaagtctttgcttctgttttttagtacattccatcaagtaacaataacactcccattcaaggattttatatctattaccgaccaacagatagtgacaatgacagtgattacaagagggatgttgtagaaggtaagtcccctggcacactggagtccctgtaaaggcgctttggagaaagaaggtttatgaatataaaatgcatcatcccaaattaagacagtacaaaatggaatggtgtatgtgttattgctgttgaatttgtcccaaagaaagccaccttttcccgcttaatatatgcagcaccttatattctggttgcagaaacttgtacaaacatttgggggaaatatgattaatcagta

SEQ ID NO: 803960 - DNA, 601 bp, Homo sapiens
taatacaaacagagaatttggacgctgacatagagcttgcttttcagctattcttgttgtagaccagctcacttcttgttatttatgtgagcctgggcaatgatcttgacttaagccttgggggtctttgtctgtaaaatgggtataataacagaaattatgtcttaccattgttgtgggattaaatgagataatgaaagtcaagcacttggcatatagtaaaacctctgtaaatgttagctgctgttatktttattaactcctcctgtatatgtaagtgtacatgtatttctcagaagctagtaatagtgcgggcacgtgaaacaatacagctttcttaaatttgcagctgaaacttagaaggcacttggacattgtgtgtaatttttttccagttgaggtgtaacatagtaatatcacaagtgtacagctaatgtatactaagtgaacagctagatgaattgttacatatgcacatgtctgtggtaaccagtacccagatggagatatagaacatttccttggccttagaaagctccctggtgcccatcccaggcagccctccctcttgctagcaggcagcagctattctgaagagttg

SEQ ID NO: 803961 - DNA, 601 bp, Homo sapiens
taatacaaacagagaatttggacgctgacatagagcttgcttttcagctattcttgttgtagaccagctcacttcttgttatttatgtgagcctgggcaatgatcttgacttaagccttgggggtctttgtctgtaaaatgggtataataacagaaattatgtcttaccattgttgtgggattaaatgagataatgaaagtcaagcacttggcatatagtaaaacctctgtaaatgttagctgctgttatttttattaactcctcctgtatatgtaagtgtacatgtatttctcagaagctagtaatagtgcgggcacgtgaaacaatacagctttcttaaatttgcagctgaaacttagaaggcacttggacatygtgtgtaatttttttccagttgaggtgtaacatagtaatatcacaagtgtacagctaatgtatactaagtgaacagctagatgaattgttacatatgcacatgtctgtggtaaccagtacccagatggagatatagaacatttccttggccttagaaagctccctggtgcccatcccaggcagccctccctcttgctagcaggcagcagctattctgaagagttg

SEQ ID NO: 803962 - DNA, 557 bp, Homo sapiens
agtacacaggatatatttgagacatctcttttcctatctcccaccaaaggataattcaggcggatctcagtgcacaggcacaggcatttgcctcattcttgttttgtctgttttgaatttagttatgggaatattttaatatctctcaaaaatagggtatctggtgtgagtcagaatgattatagaacatgcttgcctggagaacaggaaatgcgggatccactcctggtgtgctgttagctgaargacgtcagaactgtcctttaacctccctgcaggtctctaaatggtaggattgtttggggattacactagatcatctctaggcaccgttcagctcagtagagacattgctgcatggtggaaggagtgacctcagtgtgaatcctggttctgtccctttctgcccaggagaccttgagcagcttatctaaatgctgtgtgcctttgttagctcatctgaaaatgtggctgtaagaatgacctcatgagaatggactgagatcatattcttaaaactcttggcactaataggtatttaatctactataactgtg

SEQ ID NO: 803963 - DNA, 609 bp, Homo sapiens
ccaggagtaaggtggcattgcattgtggttttgatttgcatttccctgataattagtgatgttgaacattttttcacatgcttgttgtccacttgtatatcgtcttttaagaattgtctattcatgtccttagcccattttttgatacgattgtttgtttttttctcactgattgaaattcttaactttatctttgaacttgtgttaaatgaagtctgatgtaacaatggagtatgggcttaagcaaggagatgcacgcaatatgyttgtccacagttccttgaggcccatttgggtaatgtgtccacaatgtcccatgaacacagaaagtgtgagagttcaccgagactcagagtacacagtaagcactttatgtctaccactgagtgagtgagggtacactgacagcctagagggtcctccagaacttgcttcaaatgtagaaagaagacaatggtgttctaagaaacacaagcaatcaagtgttaaattaaatttagcctaaagttagttgcctccttataagttcagcctaaaggttcttcatacatagtgaactgtaatctaactggatgtctaaacagactgctacctactattttaccaatc

SEQ ID NO: 803964 - DNA, 625 bp, Homo sapiens
taaaatagccttgagctatttcgattctcttccaataggtaagctcttccctgaaaaaataagagtagggaatggggtgctcctgaaggatgaggtcatgcactaggaagccaacttcagatctgagaaatggtggtgggcttatggtggggactctaaggaatccactcatctaagactgtgctactgggagtagttaytacaaagccacctgcgaagtggaggagaccaggggctaggaaaagtgattagcagaagacaagaaacagatgtggagactgcactctgagtcagactgttatccatcacagcctgctctctctgctgaactctcttcactgtgaactgaagctttacacaagtttatttgaacacttctgcctggtctcgaaccctctgcaggacagaaagggaaggcgattcatctgccctcgagccagagcattcaaggagaagcagcttctcaccaaggtcatcatgggattgtctctttccatcaggagagggtctttattctggactttatgtttttcattaagtgcatgaatccacctagaattttgtcttcattatgaatttggttggaatacttttaatagaaatgtctatataagtgattcatatg

SEQ ID NO: 803965 - DNA, 645 bp, Homo sapiens
tgattcatatggacagtgatattattcaatttcatcccaggctatgttcaaatgatcacaaaatctagatttttaaaatacttcagaactctagtaacactgataatgctctcctatgcttaaaaagccaagcactyaaacatgtggcaatactatatatgacctgtgcttagaaactagggatcagcaaacacgcttttacatttaacttaatttaattattattattattattattttttagaaaggtcacactctattgcccaggctaagtacagtggtacaaccatagctcactgtagccttgacttcctgggcacaagtgatcctcctgcctcagcctcccaagtaactggtactacaggtgcacatcaccatgcccagctatttattaaaaaattttttgtggagatggggtcttgctatgttgctcaggctggtcttgaactcctgggctcaagtgatcctcctgcctcagcttcccagagtgctgggattacaggtgtgagccactgtgcctgggcacaaactttgtaaaaaccagttgacaaatattttaggctttatgagctgtacggtctctcttctaagtacttaactttgcctttaaactaggatagcagccatagcagccgtaaacaccat

SEQ ID NO: 803966 - DNA, 557 bp, Homo sapiens
ctgagtacacatggacacgaagaagggaacaagagacactggggcctgcttaagggtcaaagtggcggggtggkgtacagataaaaaaaaactacctatcaggtactatgctgactacctgggtgatgaaataatctgtacacggaatccctgtgacatacaatttacctatataacaaacctgcacatgtacgcttgaacctaaaataaaagttaaaaaaaaaatttaatctggcctttttttagaccagcaagcatatatagatttcaggcaggcttttgaaatttacatgagtatgcagtgaagaatgtaatattgtctctgatactaagtagtgacattcaatttaccaaaaaaaacagtatttttattaaaagttccttaaagtgctatgttattaattccttagaggaagaaaaagatcttaaaatgaaacattacattacagagtttatgttataaattcacaataaaagaatggaaattaaaaaaaattcttactgagttaaatcacattgccatactagtcatacttaatgagtttgctcaatttgta

SEQ ID NO: 803967 - DNA, 557 bp, Homo sapiens
ctgagtacacatggacacgaagaagggaacaagagacactggggcctgcttaagggtcaaagtggcggggtggtgtacagataaaaaaaaactacctatcaggtactatgctgactacctgggtgatgaaataatctgtacacggaatccctgtgacatacaatttacctatataacaaacctgcacatgtacgcttgaacctaaaataaaagttaaaaaaaaaatttaatctggcctttttttagaccagcaagcatatatagatttcaggcaggctttkgaaatttacatgagtatgcagtgaagaatgtaatattgtctctgatactaagtagtgacattcaatttaccaaaaaaaacagtatttttattaaaagttccttaaagtgctatgttattaattccttagaggaagaaaaagatcttaaaatgaaacattacattacagagtttatgttataaattcacaataaaagaatggaaattaaaaaaaattcttactgagttaaatcacattgccatactagtcatacttaatgagtttgctcaatttgta

SEQ ID NO: 803968 - DNA, 557 bp, Homo sapiens
ctgagtacacatggacacgaagaagggaacaagagacactggggcctgcttaagggtcaaagtggcggggtggtgtacagataaaaaaaaactacctatcaggtactatgctgactacctgggtgatgaaataatctgtacacggaatccctgtgacatacaatttacctatataacaaacctgcacatgtacgcttgaacctaaaataaaagttaaaaaaaaaatttaatctggcctttttttagaccagcaagcatatatagatttcaggcaggcttttraaatttacatgagtatgcagtgaagaatgtaatattgtctctgatactaagtagtgacattcaatttaccaaaaaaaacagtatttttattaaaagttccttaaagtgctatgttattaattccttagaggaagaaaaagatcttaaaatgaaacattacattacagagtttatgttataaattcacaataaaagaatggaaattaaaaaaaattcttactgagttaaatcacattgccatactagtcatacttaatgagtttgctcaatttgta

SEQ ID NO: 803969 - DNA, 631 bp, Homo sapiens
gcagataatgaaaagactttgttaataaggtctaataaaataaaaatgtttaacagcacataatcaaaatactttataaaacaggttaaggttgggaagagaagaacaagggctgtagtaggatatggaagatctagctttaagtttctattagctacttactagcttatatcaatggagacatatcataacctctcagaactttagttttctcacctatctcataaggacttctagggaattaaatataataatgaatataagtatgcttaggaaactgagaracttgcacagtattattattaatatataactacaacctcttctagttcaaacaacaaaataaatagaaatgcaaactataggctatggaccaaaatagaaagttagcagttcatatcatatgtacctctaatatggatgtaacacatgactgaacaattacagccttaggcaattattagcaaatattaatataatacattaacatgtcagtacatttacattctaataataatagtagttttaggtcacctgagtggcataggatactgtctcaatgccttcatgtctcagcaaagtatgcttggctttaatctgtttccttaagaacttcttctcagttttactg

SEQ ID NO: 803970 - DNA, 641 bp, Homo sapiens
cagttatttacactgcctctctagtcaatgtgcatgtatatgaagtcctcagtaagagactataattcttcaagggccacgaacatatcttttatcttttttagtcctattatgtccttatgccccccccccaactatatgtatatacctagtgcatgataggtacaaaataaatattaaagtttacttaattaaagattatgtttatttaagaggcaaaatttgtgaataagtctggatcttgatactgttactttcattttgttgattcctttctcccaaccttccacatcccagagacagggtgctggtgacttttatggaaaggcttgaagggtgaagatatgtggagaaaccaccgtaaacctctttgagattaaccacttattccagtggagggcactggctagtctgtaccagacctgccccagacagctttgtacatcttgcgtgtgggtgggaacccaaaaagtttccttttcagtggatctgtttrggtgaggtaaagaaatccattactcaaatgtttcatcagaggctaccccctgttcaggtgtgcaccctgcacccatgtgggtttgcggatggcatataacacttgcagcagcagagctcgttgccacacatccaagggaagtaag

SEQ ID NO: 803971 - DNA, 616 bp, Homo sapiens
gacagggtgtcagaacagtcttgatggtcttgccagcaacagctttttcttattttccataatttggtcttagtcgttctccagttgtcttcatgtaaataaagtggcccatggcaatcatgattctgtaattgttatagtgcctttgtaagttgacagtttccaaatccccttactcatacgacccctgtgaaggggggtgtgaaggggttggtgggcttgtgcatatgagggaatgtgaacgatttcattatgaccgaattatgctttactcaataagcactcaaacactaccatctcacttgtagtagaagtgctagggatgcaaccaagagactggttgaataaygggaaggttaaatgcatgagtattttaatagaaaaaaatattaaaaacaaaaccaaaactcgtatggaaagaggcttctgactaggccctcctttctagcagtgtttggcacctgataacaatttgacgctgggggagggagcagcttgacaaggtccacatgaagcagccttgagatttttcgcccacttccatttctcctcagcatcaaaggaaagtgcatggtaagaagtgaatcagacagcgagggatctatgcagttatcct

SEQ ID NO: 803972 - DNA, 686 bp, Homo sapiens
tttaggctttcatttttgggggcatttgttccctcattaacatttctgtggatccttagaaaattgcgtaaaattgcacatttaaagattcaagaattagtcaggaaaatgtggcataataggaaaaagtgtagcaggttttagaatcaatgatatgctatatttttagtttaatcacttstagctttatgatcttttaataggatgcttaagcatcctgagttttatcttcctcatctctaaaatggcaaaagtagtaataccagattcaaggtcctaagacagtgcctaccacagtgatttatacctagtaggtgctcactaaatgtttcttaagaacatagggttgggaaagggtgaacagaaatgaaataagatgtgatgcaggttggggattagatgtaacttaagttctttactatcagtaaaatgtaaaaatgtttgttactgaagtatattaaaagatttaattacatacttaggataaagatataacatttgacaccctccctcataaaatatttgacagaatggtaattacattttaatttataaaattacccataaacaaatttaagtgacacttagattgtttgacataaatacagataattacatgacaaagtatacttacattacactgcttgtagaacgattggtaatttcttcattcaaatatgttaaga

SEQ ID NO: 803973 - DNA, 686 bp, Homo sapiens
tttaggctttcatttttgggggcatttgttccctcattaacatttctgtggatccttagaaaattgcgtaaaattgcacatttaaagattcaagaattagtcaggaaaatgtggcataataggaaaaagtgtagcaggttttagaatcaatgatatgctatatttttagtttaatcacttgtagctttatgatcttttaataggatgcttaagcrtcctgagttttatcttcctcatctctaaaatggcaaaagtagtaataccagattcaaggtcctaagacagtgcctaccacagtgatttatacctagtaggtgctcactaaatgtttcttaagaacatagggttgggaaagggtgaacagaaatgaaataagatgtgatgcaggttggggattagatgtaacttaagttctttactatcagtaaaatgtaaaaatgtttgttactgaagtatattaaaagatttaattacatacttaggataaagatataacatttgacaccctccctcataaaatatttgacagaatggtaattacattttaatttataaaattacccataaacaaatttaagtgacacttagattgtttgacataaatacagataattacatgacaaagtatacttacattacactgcttgtagaacgattggtaatttcttcattcaaatatgttaaga

SEQ ID NO: 803974 - DNA, 681 bp, Homo sapiens
aatacagataattacatgacaaagtatacttacattacactgcttgtagaacgattggtaatttcttcattcaaatatgttaagaaatttgaacttcaagtatttttttcctactccatatcattcattattctttaaatgctttcactgctccagttttgaattctctataaacctacctctgttttagctgagactcctccttataccacwcttaatcccctttgcagaaccataccgaatggttattcaattttggctggaatactccatctgtcttcccttgattgagaagctatctttttataacctctaattacttttctcagttctttttcttagtcccattgaagaagtctaagtcttgatttatactaagtccaagtgttataccattatttaatcatttcatcctgcatatctagtgtatctcaaacttcgaatagtcctctgagtttcaaggactacatttttgccaaaagaattttgatttggtaatgaatcaagacattagacacgactgaattaagcataggtccttgacttctattttagatcactggtaaaatgatcgaaagcttctgaactctcaattattttttcagcagtaggaatgtaatttcctgtctatccagtcgatttctatttcttcagtggatccatccagaaaattgaagtttt

SEQ ID NO: 803975 - DNA, 612 bp, Homo sapiens
tgcgatttttacaacgaagggaaacagtattgtatagtaattaagagcatgggttttgaagtcagatagttcttggtttgactccacttaacacctgagtgactttgggacagttaacgtctcaactcctcagttgtttcatccatcaaatggggataatatgaacgccatagaattatcctaaaagtgaaataagatgaagcatgtgaggcctttggcaggtttcctgacacatggtaagtgctaagtatctgagttaccgatgactggggctraataaaggtcatccactttctaagcattagtgcttgaaagacagacaatgtttaatgtattctcataaataggaatgctttgcttctgaaacacttgtctaggatagactgctgatgggtttgtaattggagttatagtaggcctttatctctatagatttatggagaaataaatttctgtctagaattaaagttcttaatttgtgtttatagatctctcatacatattaaaggagtctgtgaacttgtacttgcatgaaaaaatttgaatttatgaatatttgtggtttttttctagaggataatttctctcaatggggcttatgtaattttgttt

SEQ ID NO: 803976 - DNA, 681 bp, Homo sapiens
aatacagataattacatgacaaagtatacttacattacactgcttgtagaacgattggtaatttcttcattcaaatatgttaagaaatttgaacttcaagtatttttttcctactccatatcattcattattctttaaatgctttcactgctccagttttgaattctctataaacctacctctgttttagctgagactcctccttataccacacttaatcccctttgcagaaccataccgaatggttattcaattttggctggaatactccatctgtcttcccttgattgagaagctatctttttataacctctaattacttttctcagttctttttcttagtcccattgaagaagtctaagtcttgatttatactaagtccaagtgttataccattatttaatcatttcatcctgcatatctagtgtatctcaaacttcgaatagtcctctgagtttcaaggactacatttttgccaaaagaatttygatttggtaatgaatcaagacattagacacgactgaattaagcataggtccttgacttctattttagatcactggtaaaatgatcgaaagcttctgaactctcaattattttttcagcagtaggaatgtaatttcctgtctatccagtcgatttctatttcttcagtggatccatccagaaaattgaagtttt

SEQ ID NO: 803977 - DNA, 616 bp, Homo sapiens
aagggatgggatccccgcctgttgaaccagaggaatctgaggagtaccaggtttccactgaagactaaatcatgatccagagaaggaatctcagaagtcattcttgtcgtgggcatggcttaacgtctgtctccccactgtgggccctgccctcgagagcaagggtctccttattcatttttatattcccagtgcctaccactttgtggagcccttagtagaaaaggtattcaataaacgcacattgagtttaagctttctatttctcctcccccaactagtatatattacagaagcactgaaaattcagaaatcagccagtgtcagggctcctgggtaataaaccattcacagggatagctgtaggaatttggcatwagcatttattccaatctcttgggggtaatcaagtggcataatcatgccctgctttactgtgtagcataaggccagtagagaaaaacatcaagaggggaggaggacaagggatggagttcaatacacaaatatctactgagcgtcaattacgtgtcccacactattcaaggtgctgggcaaagaaagataaaaaaagcagaagctctgaccttgaggaacttaacaggtagttaagaaa

SEQ ID NO: 803978 - DNA, 378 bp, Homo sapiens
tacgtttctgaggcatgaacagtaaaggcagcattaccactgctttatggaaggggaaactgagaaccagggaggaaaagtgaattgccccaaggtcacacagatccttaaagacagagtaaaggctagaatccaggggctctagttccttctctaatrtactcttaatattctgctctgtttcataaacacaaagactgaaacatgacatatatgaatcaaatagaataacatgcttagacaaagcatgcggattattaacacaaggatgggcccatgaggtgcttgaacttagtaactaatccttctttcattaatctcgttagcattctattgtgaactttgtgcgtccaagtgccatgtgtgatactctgtgat

SEQ ID NO: 803979 - DNA, 624 bp, Homo sapiens
ggtgccagctggcttttcttcctaagttaccttgcattctatatccctggctacctgatgtcactcaggaggcaatgccttgaggaggcaatataattggatgaagctaaaaggcttgcaaattctgccattgccaaggagagccctgagacaggaacaccctckactcagacaggctcggcttctctgtgtctcagaaaccccacgcatgctgcctccaccctggcaccactgccctgcctctctctctgtgagtgagaaatggaggaaaagagggagctcagaggcaggaggtcagaggaaaagagagaggctagaatggcaacaggcttgatggatggaggaggaagtcgcagaagacgatgagaaggtatgggaggagtgggggaaagtgtatttcaaatatttaagtattggaaataagaccacatattagagtttttggagagagttttcctttaaacaacagaccttgacctagttctccagcaaggtcttctgcagcaaagtctccttgcatccctcactttactacccaccttgagtctgcaccaatatttccttttcctagacaccctcacctcattcctggcctggcaagtgtaatcctccaggcctcagctc

SEQ ID NO: 803980 - DNA, 514 bp, Homo sapiens
tcctcctcctggctggacgtaccaggaacccctccaaaggagcaaggagccttaccttgacttccgaagccccgatgcctcctatcttgacctcctggtcggccaccaggatccgaagtccccgcagccaagcaggtcctgcatcgggcttcttcttgttgatgtcgatttccaagtactctgggcgctcagggcaggtcttcaggagggtgtaggagaactcggaggggaaggcgtaggaggcgccgtcaaaggtgtgcagcacctggttctggctgagcargcacacggtctcccgcttggggaagcagccctggtagccgtcctccacggcgcacacctccccgctgccgcaggtcttgttgaagcagtagacgtccccgccctcctcgcacaggcattgcacagtgcagttggccgtggcccagaagaactcccccatggtgtagtagtggccgtcgaagtcgcagccgcacttgtgcagagggacgcactggctggtgctgaggacgaa

SEQ ID NO: 803981 - DNA, 580 bp, Homo sapiens
tccggacatatatcaatctaatgagactgggatttggcctggggtatagcaggggaagtgttctgtagagctggtttattatatcatcattccacaaacaaaattatctcaaagagtctaccttttggtccaaacctcctctattcaaaggcattttcctctcacttattgaaagcctgaaaaagcagggcctggaaatgatgctgagtggaggctgtcacaatacatacagccctgaactagtgccaaggagtgctgaggattaggacctgttttcagggctgatgcacatgacttattgggaatgtgactaaatctattctctcatttttcaaccctattctcaacaggtataaaatggaattgcctgttgaaacatsattgttcctgttgggcagatagagtcaagactgttactgatacacccgcaccctcaacttgggttaaccttgcagccttgtgctattcactcgatagtcagttttataaaaacttgagatgttatttacatttcttaatgctgtgtctttgatacttgccttttcagacattctcattttacaagtgcttctacttctat

SEQ ID NO: 803982 - DNA, 643 bp, Homo sapiens
tgaaagcagctcagggggctgaaccctgcaaagccacagggcagagctgtccaagaccttcggagcccacccttgtaccagtgtgccctggatgtaggacacagaagtcaaaggagattaagattttatggctgcccttctgggtttcagacttgcatggggcctattgcccctttcttttggccaatttttcccttttgggatgcaaatgtttgcctgatgtcagtacttccgttgtatcttagaagtaaataacttgttttgattttacaggctcgtaggtggaaggaattcatctccagattagactttggacttgggacttgcaacttttgatkgcgctgatgctggaattagttaagactttagggggtattgagaggggatgattgtattttgaaatatgagaaggaggtgagatttgaagagtcaagggagggataatatagtttgaacattgtcccctctaaatctcatgttgaaatatgattcccaatattggaggtggcatctggcatgaggcatttgagtcacgggagcagacgcctcatggcttggtgctgtcctcctgatagtgagtgagttctcacaagatctgactgtttaaaagtatgtggcacctcctctgtccccactctctttc

SEQ ID NO: 803983 - DNA, 619 bp, Homo sapiens
taaggctgtgctgtccaatacagtacctgctagccacatggggcaatttacatttaaatgaaatgaaattaaataaaattaaaaattcaattccgcagccccctgagccacatttcaagtgctgagcagccacatgtagccaccacattaaacagtacagatggaatatttccatcgtcacagagagttctattgaacaatgttggttgaaagcatttaggctcaagaaacgtgaattatgtttttcctagggcatcaaagacaaacgctagcaattttgattatgctaaccttaactgtcaaggaatagaaaaagcaatgtgcacagcccaggagacaccttaccttagcataggcttcacaacagaatccaaggagatcttgatatccagctcataagcacatgaaaattccacattgatcgtgcggtccctggtgatgatgttgccagtgttgttggcrctttcgatccagagtgtgtttttatacatgatatgcgtgccattggactgcagaacaaggggaagtcagaaatcgttacatctgggagtgagtatgtagcttgcatatcaaatccatatccctgaaagtggagaaatggcttccttccatacataat

SEQ ID NO: 803984 - DNA, 537 bp, Homo sapiens
gggatatgcagctattatagaaaggccagactggggaggacattgaacactggatttagggaggtcgatgttactttatatcaataagtaggtctttggagktttcgaacagtggagcaatattatttagaaaaggaattccatgtggaggacaatttggaaggagaaagactccaggaagacttatataagaacattgcaatggaaagggaaaggagaaatgtgagttagatgtttaaagaagaatcaatagaatttggctactgcaaatgataccattattggaaataggggatgctggaggttggcaaaaaagagatggggccagagaggaggtacaatagtttctaggcaaggaggatctgtttccttgccttttgcagcgtctagaggctgcctgcattctttgactcacgggccccttcctccatcttcaaagtcagctgcatggcatcttcacagctccttctgcctaggtgtcctttgtttctgttatcacattgcctctggctcaaccctcctgcttccctcttataa

SEQ ID NO: 803985 - DNA, 637 bp, Homo sapiens
cagttcccacagagcatgccactcccattaccttacacttgagctcgcataggtactttgacaagccagccttctgaaggcgattcaagggatatgcagctattatagaaaggccagactggggaggacattgaacactggatttagggaggtcgatgttactttatatcaataagtaggtctttggaggtttcgaacagtggagcaatattatttagaaaaggaattccatgtggaggacaatttggaaggagaaagactccaggaagacttatataagaacatygcaatggaaagggaaaggagaaatgtgagttagatgtttaaagaagaatcaatagaatttggctactgcaaatgataccattattggaaataggggatgctggaggttggcaaaaaagagatggggccagagaggaggtacaatagtttctaggcaaggaggatctgtttccttgccttttgcagcgtctagaggctgcctgcattctttgactcacgggccccttcctccatcttcaaagtcagctgcatggcatcttcacagctccttctgcctaggtgtcctttgtttctgttatcacattgcctctggctcaaccctcctgcttccctcttataagaatccttgaga

SEQ ID NO: 803986 - DNA, 652 bp, Homo sapiens
tcaattctatgttttttcccttttttctgagttagaatacatcttgtatttatttatttttattatttataatcaccacaatatatttggaagtctgacattttttatttctgaaccatttgagactatgttctgatcttaaacacaaagtatggaatccattattttttcttttttttaactttsatttgtgaaagttacttttttcttaattactctttttatttgttacattactaagtttgttttattttaattttcataggacattgatgaaatgacttttttatgatttttgagatgaaaaatttaataactttaaattttacattcttttaagtttttcacagtttattttaatgctttttttttgtaaattttaattatagttatttatatcttcatttattatggaacaacttcccaaaagtctttttcacataataaatttaatataatatataagctattatttattttctcttctgtctcaaatatggactttaattatattccaatatttcagaacattttaatctatgttttgagacatttgtgacttacgtgatattatgactattattctttacacttctagtgaatttttaatgtcattcaaaggctacatccttctatactctactgagaatta

SEQ ID NO: 803987 - DNA, 652 bp, Homo sapiens
tcaattctatgttttttcccttttttctgagttagaatacatcttgtatttatttatttttattatttataatcaccacaatatatttggaagtctgacattttttatttctgaaccatttgagactatgttctgatcttaaacacaaagtatggaatccattattttttcttttttttaactttgatttgtgaaagttacttttttcttaattactctttttatttgttacattactaagtttgttttattttaattttcawaggacattgatgaaatgacttttttatgatttttgagatgaaaaatttaataactttaaattttacattcttttaagtttttcacagtttattttaatgctttttttttgtaaattttaattatagttatttatatcttcatttattatggaacaacttcccaaaagtctttttcacataataaatttaatataatatataagctattatttattttctcttctgtctcaaatatggactttaattatattccaatatttcagaacattttaatctatgttttgagacatttgtgacttacgtgatattatgactattattctttacacttctagtgaatttttaatgtcattcaaaggctacatccttctatactctactgagaatta

SEQ ID NO: 803988 - DNA, 592 bp, Homo sapiens
actcaaaagcaacctacagattcaatgcaatctctatcaaaataccaatgaatattcttcacaaaattaaaaaaaaatccaaagagattgtatggaaacaaaagtatcctgaatagccaaagcaatcctaagcaaaaagaacaaagctggatgtatcatgctaccagacctcagaatatactacaaagctgtagtaaccaaaacatcatggtactggcataaaaacagacacatagacctatggaatagaataaagaacmcagaaaatccacatatctcagccaattgattttttacaaagatgccaagaacactcattggggaaaggatagtctcttcaataaatggtgcttggaaaactggatatccaaatgcagaaggatgaaactagacccctgcctctcaccctatacaaaaatcaactcaaagtatctcaaataaccaaatataagacccaaaatggtaaagctactagaagaaaacataggggagatccttcaggacattgctctgggaaaagattttatgaataaggcatcaaaagcacaggcaacaaaagaaaagtaaacaaatgggatcacatcaagctaaa

SEQ ID NO: 803989 - DNA, 537 bp, Homo sapiens
tttactatttgtttatattactacttaaaactctagtattaaccacatattttctcgataaagatattaatggaatttggctaaaacagttcagaagaaaggttttgcagactattctgtgtagaaatatttcctgtatttgttgtaacaaatttgaagtaagtgtactcacttactcactccttttgaactacaaactcctattgaatctagctcaggatcacctgagcccaggagtgtaagccatagagagaccctgactctcaaaaaaaaaaaaagaaaaagaaaaagaaaaaaactgatctggatkgtctacgccaacaggacttgatttctgattagcactactatggagacagtatgattcagaaaatgaagagattcgtgtctctaggctttcattgcattgtgattatttctaaataaatgttagaacctaataattactgacatggctttgtctaatatcttgatatatactattgcatagaatgaaacaagtaaaaaattaatgctacagacttaccacttcctttg

SEQ ID NO: 803990 - DNA, 681 bp, Homo sapiens
aatcaccaacagttatgtcagctgttttgatgttagccattctaaccgagtttagctcgttatagtttgtagttccttaaagagtaacaatattgagtatttttaatgtactttcttttgcccttagtgtatcttcattgctgaagtttctatccaactatgttgcccatttaaacaaattgggatgtttgtcatcttattactgaattataagaattcactgtaaattctggatacaagtccttcgtcagttatatatattgaaatttttttatcagtccrtagcttttcatcttgcaactcttttgaacagcaaaatttttcaattttgatgaagttcaattatcaatgttttcttttattgattttgcttttggtggtataactaagaaatatttgcttaaccccagttcagaaatatttttctcctaagttttcttatacaaattctatagtttctgttcttacatttaagtctatgattcacttaaagttaatttttgtgcacagcatgatttaagagtcaaatcttaatttttgtatatgaatatccaatttgttgaagactgtccattctccattaaagtaccttggcatctttgtcaaatgaattgatcataaatgtgtgtttatttctagacactctaatctgttccattgatctacatgtttattcctgtg

SEQ ID NO: 803991 - DNA, 652 bp, Homo sapiens
caaaattctcaaccaagaatactctacctggcaaagctgtctgtcaaaaatggagagacaaagactctgctaaacaaacaaagttaagggagttcatcatcattagaccagccttgcaataaatgctaaagtgagttcttcaagttaaaatgaaaggatgcaatacaacaacacaatggcataagaaaatataaaacacatttgtcaaggtaaatatacagacaaatacagaatgctgtattattgtaataatggtaaatcacttttaattctactataaaagttaaaacacagaagtattaaaagtaactatagcctaaaaatattaaaagagacaatataaagagatacaaattgtggcaccagtragataaaatgtgagggataagtgtaggtatagttttaataagcaattgaacgtaagttgttcacagtttaaattagacagttataagaaattttatgtaagccccatgtcaaccataaagaaaatacctatggaagtaacacaaaagaaaaagagaaagaaagcaaagcttatcagttttaaaaataaatgaaacacaaagacagtaagagagaaaaagatagacaaaataactacaaggcagacagcaatgaacaaaaaggccatagtaaatctttcctgatc

SEQ ID NO: 803992 - DNA, 628 bp, Homo sapiens
cctctcattttgaggacaattttagccttagatggaatcttctaaagtgttgtttaagtaagatgcattgtttctagtctttttttgttgttgttctcttttgagatggagtctcgctctgtcacccaggctggagtgcagaggcgtgatctaggctcactacaagctccgccgcccaggttcacaccattctcctgcctcagcctcccgagtagctgagactataggagcgcaccaccaccacacctggctaattttttgtattttcagcagagacagggtttcaccattttagccaggatggtttcaatctcctgacctcgtgatccacccgccttggcctcccaaagtgctgggattacaggtgtgcaccaccgcacccagctgtttctagtcttaatgatagytatgacagaatcagggttatttttaatggtaaatatttgctttttagagatatttctatatttatttctgtgctcctaagttttattctaaaactcatttacataaaatatgcttatcttaaaaaatgtatttatctattttttaccctctttccccactcaaaagacaaatttatatctacaatctcagacttacataaaaacaagacatcactgaaatt

SEQ ID NO: 803993 - DNA, 642 bp, Homo sapiens
tggttttgaaggttccttttggatttgatttccagttttattccactgtgggctgagagagtgcttgatataatttcacttttcttaaattctttgaggcttgttttgtggcctatcatatggtctaacttagagaaagttccatgagctgatgaatagaatgtatattctgtggttgttgggtagaatgttctgtaaatatctgttaagtccatttgttccagggtatagtttaaatccattgtttctttgttgactttctgttttgatgacctgtctagtactgtcagtggagtactgaagtcccccactactattgtgttgccatctatstcatttcttaggtctattagtaattgttttataaatttgggagctccagtgttaggtgcatacatatttaagactgtgatattttcctgttggacaaggccttttatcattatgtaatgtccttctttgtctttttaatggctgttgctttaaagtttgttttgtctgatataaagatagctactcctgcttgcttttggtgtccattgcatggaatgtcttttccacgcctttaccttaagtttatgtgagtctttatgggttagttgagtctcttgaaggtagcaaatagttagttggtgaattctt

SEQ ID NO: 803994 - DNA, 517 bp, Homo sapiens
tgagaggtgggagtatagtttcattcttctgcatatggatatttacatttcctagaaccatttattgaagagacattcctttccccaatgagtgttcttggcgcttttccccaaaatcagtgccttagtggataagcaaattatttctgagatctctattctgttccattggtctatgtctctgtttttgtgccagtatcatgcttttttggttactatagatttgtagtatattttgagtttggtagggcctccagatttgttctttttgctcagcattgttttggttatttggcatcttttgcagttccawatgaatttcaggatttttcctatttctgtgaaaaatgtcattggtattttgacagggattatactaaacctgtagaatgctttgggtagtatggtcgtttaaatattacttcttctgatccataagcatagtatatctttccatttatttatatgctcttcaatgttttataattttccttctagtggtcctttacctccttag

SEQ ID NO: 803995 - DNA, 566 bp, Homo sapiens
ataattttccttctagtggtcctttacctccttagttaaatttgttcctaggtattttatatttattgttaatagcattgccttttaaatttctttttcagctagttcattgttcatgtgtagaaatgctactgattttgtatgttgattttgtatcctacaactttatggaattcacttattcattctaagagtatgttggtagggtgtttaggtttatatatttataagatcctgtcatctgcatataggaacaatttgactttcttttttacaatttggatgccatttatttccttctcttgcctaattgctctggctaggacttcccatactatattaaataagagtggtgagagtgggcatttttgtcttgttctggctcttagaggaaaawcttccagttttttttttattcagtatgattttagctgtgggtttgtcatatatggtctttattgttttgagttactttccttttatgcctaatttattgagatattttttatcataaagcgatgttgaatttgatcaaatcccttttctgcatctattgagataatcat

SEQ ID NO: 803996 - DNA, 546 bp, Homo sapiens
tatatgaatatacaaatggtaagtaaataagcaaaaagatgcttaacatcattagtcattagggaaatacaaattaaaaccacaatgtgctacggctattaaggaaaaaaatagacaataccaagtcccgagaatgggaatgaaaaatacagctattttggaaaacagtttcgtagtttttttaaatgttaaatactgacggtattgatcagggttcccagagaagcagaagcaatatgatgtgtgtgtgtgtgtgtgtgtgtgtgtgtgtgtgtgtatatgtgtgtgtgtgtgtktgtttatgtgtgtgtatgtgtggagagagagagagagagacatttattataaggaatttgctcatgcaattacagagactgacaggtcccaagatctacaagctgaatcagcaagctcaggacccatgaaaaactacgagttagttctagctggtgtctgaggatctagaatgaggagagccaatagtatacttcctgtccaaaagctggtagaattgagacccaggaagcaccgaagtttcagtccaaa

SEQ ID NO: 803997 - DNA, 524 bp, Homo sapiens
ggccttcttcaacaaccaatgaaatgacaataacaacaacaaaaatagccctttgtctgcgtaacctcatactgatgtgatcaatgaagccatctgggtccaggtaaaggacttaagattcctttttcttaataaaagatagcattttctctagcatgccacatgtagatctagtaaagaacatactgtwttttgaatacgaaggtcctggaaactaaagtcaaactactttttccagaaaagctattttatcttattctgaaaatactctagaagcctagacaattcctgaaaatctcaagaaatagtggagcctacaagggtattcttaattaactcaacaatttccagaacctcctaaagtctttctaatcaaaagttaactcagatctgaaagctaactttaattcagtctgtgtctcaaagccgatacaacttaggagcaatcaataatttcatctgattgtcttgtcttcaacaacctcagagtccacaaaaatcacgagtctgagatttactccacg

SEQ ID NO: 803998 - DNA, 567 bp, Homo sapiens
ggatccacagaggtggcggctgcccagatggctctccaggagccttctcatcacagccccatgtcagtggccagatgcacttccctccccacattggtgactcctcttttgattctctgactaacctcttggtctttcctttccccagcttcttctacaattgtgtaaagcatagttcccataataaattccttatctcatcattcatgaaggttctacctccctgactgatacacttactggtactggccgtggtttcaggggacagatcattaaggataggaattggmaactggttctctgacctgattaaacttaagtgcattcatgattgttgccagcagtaaacttaaattcttaaactctacctgtaatcacttgtgatacatgcttatagacggcaaagctttgggtagccaaagtatttgctgctgtagaacattttagtagaaataggaatgtaatgaggaatgttggttgcttctacatatggggaaagtttggagaaagaaaatgatgagctaaaggctttaaatttccatctcaagttctggaaaatggaccaaa

SEQ ID NO: 803999 - DNA, 574 bp, Homo sapiens
aactgtacatgctgctacacagttgagggagagtgaaatggatattgtggagacaacacccactatgaccatccactatggtcctaagggcaaagagaaaacaggtggctcacggctgggcgcagtggctcatacctgtaatcccagcactttggraggtcgaggcaggcagatcacttgagtccaggagtttgagactagcctgggaaacatggcctgtctctataaagaatacaaaaaatttagctgggtgtggtggcacacgtctatagcactagcctgggcgacagagtgacaccctgtctctacattttttaaataaataaataaattgaaaaaatatatagtaaaaaagaagaaaacagaagggcaggcctggcatggtggctcattcctgtaatcccggcatttttggaggctaagatgggaggatcacttgagactttgagaacagcctgggcaacatatgaagaccccatcgctataaaaaaattttttttaatactttgggaggccaaggcaggcagatcacttaagcccaggagtttgagaccagctgggcaacatggtgaaa

SEQ ID NO: 804000 - DNA, 643 bp, Homo sapiens
aattttttttttaagatgtttcttgctttgtcccctaggctggagtgcactggcatgatctctgctcactgaactgctgcctcccagtctcaagtgactcctgcctcagcctcccaagtatctgaggttgcaagtgcacacccggctaatgtttgtatttttagcagagacaatgttttgccatgttggccagactagtcttgaactgctgatctcaaagtgttgggattacaggcgtaagccatggtgcccaacccaacagagtgaatgtttacgtctcctcgcaattcctgtgttgaaatgctgaccctcaaggggatggtgtgagatggggctttgggaggtgattagggtacgaggatgcggtcctcatgagtgggatcaggttcttataaaagaggccctagaggaatcctttgtgccttctgacatrtgaggccacatgaagaagatgctggttatgagccatgaagcaagccttcaccagacgccaaatccgctggctcctcgatcccctcgatctgaggcttcccagcctccagaacggtgggaaataaatttctgtgatttatgctacacccagtctatagtattctgttacagtaacccagatggattaagatggagaatggattgagatggg

SEQ ID NO: 804001 - DNA, 428 bp, Homo sapiens
aagggctgattttctccatcaacatagaattttttaaataggtaacgtgtttcatgaaccaaataagcaaaggaagatacagggtaaatgattttaacaaatttctagctaattgtagacaaattcctagttagtatggtcttagcgatggggaaggggagaggaagaatagaccctcctatctgctatatcttgaagttatacaaatgctttcagatgaatctgtttctgagtcatgtttctgtgygaactataaggaagaaaagcaagatctaaaagagaggatatggggcacacctgcattgttaaatgataccataaaaccctattcaggaaagtggatagatactcaagaccaaaagacatgctttctgatgacaatctctacatgttcatgtattatagacatgttttatgaagctgtacaa

SEQ ID NO: 804002 - DNA, 549 bp, Homo sapiens
catcaacacttggacttatgtctccatccgtctccccttcctaccccaccatctgctccttgcctctctggccttgtgccccccgactcatcattgtctgtactggacactctccaagtatagcacacagttagaggcactgattagaaaacagccagcaggtctgcctttccatgtgttgccttaacctttgggcccacgggcctcaatgactagcctgagcttcacytatttactttttaagcatagtctttcagagcaggctgcattggtcaaggcatcccaacagcttgcccctttgagttcctaaatactcccaatgggctttttcctttgtttagacttggaatggtcagcggaagggtggaaggtgggaagcatgtatgtgtatttgcttgtcagggaagaactatggtgtccttgggtgtatgctaatgggtctgtctctctctcccctacacagggcctggagcagtcattgatggtgtaaactcggcctccagagcactggcttgtctctggctatcagggaccctcttagcccacttc

SEQ ID NO: 804003 - DNA, 569 bp, Homo sapiens
tgggcttctttttgtttttttctgttattctagatttgttttctttttgtttttgtttatttgtttgtttgcttttatttccagcttgaatgagtggggttgggggcggggtgggcagggttctaccacgtgtaggataatcattcattggtgtgtccaaaaatggggtctgctcctgctaccttgacccttccctttcctctgcttctctcctcatcatcattcccaacaacatcctctgccayacacaacaaaacgtaagtttcatttgggcaaaaattgagcctcacaataaacaccctgaagacacaacttgacttataacatagtgcacagcaagagctacatccaagtgtcctattatctgtgattattttcttaatgacaatgtacatatgcccccatccatgttaattattatctaattccattagggttcacgtcttttctttctgggacactatcctactatatccatatctatagatttcaatatagatgattgtgccatcttctgtagcccctccgctctactcattccttccaccatctgcagagatttgaagttt

SEQ ID NO: 804004 - DNA, 636 bp, Homo sapiens
gaatataaaacacccctaaaaagggaaagggagaatctaagtagaattcagagctacgtgctttggccagtctcagggaagaggaaactagcacttacatttcattatgtaccacgcatacttatctcatttaaattttctcagccctgggggtggcarggccattgcattttacaaatgtaaaagagcacctcatggagacgatacttgtttagggtcatggttgggcaggaagcccaacctgagtgtttgtcttatatccatcatcaggagtcttctggccagaggatgctgtggagctgggttggagacaacacccaactgtatggccacagttccttacttgcatgtcagttgcctccagtgtggagaaaagggagtggtagagattccctcttcaaggtggtttatgcccttgcgagtgttctggccttcggtcttagcaatatcactttacgtttaaatgatcctgttccaactgcccactgggcttcttgggggcaggaactgtgtcttccttagtacgatcacctggtgtccagcacagcactgctggctacaggtccatggcagggagactgcaggctgtcttcagtgtccagtgagggaatctttcccagcaccatttggatccag

SEQ ID NO: 804005 - DNA, 636 bp, Homo sapiens
gaatataaaacacccctaaaaagggaaagggagaatctaagtagaattcagagctacgtgctttggccagtctcagggaagaggaaactagcacttacatttcattatgtaccacgcatacttatctcatttaaattttctcagccctgggggtggcagggccattgcattttacaaatgtaaaagagcacctcatggagacgatacttgtttagggtcatggttgggcaggaagcccaacctgagtgtttgtcttatatccatcatcaggagtcttctggccagaggatgctgtggagctgggttggagacaacacccaastgtatggccacagttccttacttgcatgtcagttgcctccagtgtggagaaaagggagtggtagagattccctcttcaaggtggtttatgcccttgcgagtgttctggccttcggtcttagcaatatcactttacgtttaaatgatcctgttccaactgcccactgggcttcttgggggcaggaactgtgtcttccttagtacgatcacctggtgtccagcacagcactgctggctacaggtccatggcagggagactgcaggctgtcttcagtgtccagtgagggaatctttcccagcaccatttggatccag

SEQ ID NO: 804006 - DNA, 566 bp, Homo sapiens
tacaaataaaacaataagacaacagttgatttgatgaggattgtgaaggtgggaagaggaagctttgaatgttatagtgttgtctatgcaaatacacacgtggaccatagtaggtatttatagacataagtttaatagacacagggmaccataaaacgtggacagcagggagtcactttcataatggcatctaaaaagtcttggtacagatggcatttcaatgtcaacattaaaagaggaagtttgcatacccaatgaagcaggctatggattaaaagaaacaacaaatggattcattcattcatttgttcactcactcattcattgttgggaatacaaagggaattgatgcacagttcatgccctgcagaaaaatacagggaacacaaactcaaaagagtcgagaaacgtacattatcaggtgaacacacaaacccgagaagtctttcccaattagccattaatgattgcttcctaccttggcagctcattgtttataagcaatctgtcagttataagtactgctattattaacagtattatttactctgcagctatagagctca

SEQ ID NO: 804007 - DNA, 583 bp, Homo sapiens
acttagtgaaaactagaaaacactcctaacaaatgaatggatcccgaactgtacacctgatgtacacctgctgtggtatacagcctgcctcacctcttcattcccagggcagttaacagagaatggtgtgcactgtttgtatttccctttcttcctcccagaagcacaaactgcatgtctcccrgtgacttggactgcactgacaccagttggattttacccagcagaccagatgcaggtgggagattccccatccgcacccctccctgtgtgcttgtggttcataagccaagccgacactgcagggaggtactcttgtggtaggtggtcacatggagagctggggctgtgggcagtgccttctccttgccatctgaacattgggtcatcctgaggagagatagaccccaaaccctcggatgcatgacagacccttgactccaaggagcagaccccactggataagggagagacgcccaaccctgcccagtaggacactacttccacttggctctgttctgcttccctggcagatttgcagggctgggcattggctacaagagctctcgcattcccagtctgc

SEQ ID NO: 804008 - DNA, 583 bp, Homo sapiens
acttagtgaaaactagaaaacactcctaacaaatgaatggatcccgaactgtacacctgatgtacacctgctgtggtatacagcctgcctcacctcttcattcccagggcagttaacagagaatggtgtgcactgtttgtatttccctttcttcctcccagaagcacaaactgcatgtctcccggtgacttggactgcactgacaccagttggattttacccagcagaccagatgcaggtgggagattccccatccgcacccctccctgtgtgcttgtggttcataagccaagccgacactgcagggaggtactcttgtggtaggtggtcacatggagagctggggctgtgggcagtgccttctccttgccatctgaacattgggtcatcctgaggagagatagaccccaaaccctcggatgcatgacagacccttgactccaaggagcagaccccactggataagggagagaygcccaaccctgcccagtaggacactacttccacttggctctgttctgcttccctggcagatttgcagggctgggcattggctacaagagctctcgcattcccagtctgc

SEQ ID NO: 804009 - DNA, 608 bp, Homo sapiens
tagtctgatacgtttatactgctttccagattttctgaatacctctgtgatgttactagattgcaccatctcttttacccttgatgttttgagcataaggtgtcctcttttttcactttatttttattgttgaaagtcttaaatgtgtcaccacaccttgacttcatgtgctataagtggtgaagaacctactgtcaaatccacagatgtcccacacatttaattctttttaacaraatttctgggccgggccccgtggctcacgcttgtaatcccagcactttgggaggccgaggtgggcggctcacttgaggtcaggagctccagaccagctctgccaacatggtgaaatgctgcctctactaaaaaatacaaaaattagctgggtgtggtggcagacgcctgtaatcccagctacttgggagactgggacaggagaatcccttgaacctggggcagaggttgcagtgagccaagatcgcaccactgcactctagcctgagcgacagagtgagactccgtctcaaaaaaaaaaaaaagtctgtttaattcttttaaatgacacacatttagttctaagtcaccatctcatacctgctttatctttg

SEQ ID NO: 804010 - DNA, 599 bp, Homo sapiens
atctgcgtggtggcagacacaaacttctaattttatttctcctctcatacagccgaaaacctggtttaacatacactgtttcatttatgccccaaaacagtcctgtgaggtcaaaacgtcattcacttacgcacggcgggtgacagttcaccaaggcacatgacatccctcatctgatctcccggtatccgcgcattttaggaagaaacatgctcaaagggatgaagggtccgctctyaagcattttagctagcgaagttacagtcacatccggcaaactcgcacactgcagatctaggactaccccgcgcggccccgcccactttcccagcagcgggacgctgtcaccccgactcaggagctcctgggcccgcgggctcccggaagctgccgaccacgtgattcgctggctcagctcacgtgacaaagctcccggaggtgggagccctgggccaaaatggcggcctacctgcagtggcggcgcttcgttttcttcgacaaggagctggtgaaggagccgctgagcaatgatggggccgctcccggggccacacctgcttctggatccgctgcttccaagttcctttgcctccctcctg

SEQ ID NO: 804011 - DNA, 599 bp, Homo sapiens
atctgcgtggtggcagacacaaacttctaattttatttctcctctcatacagccgaaaacctggtttaacatacactgtttcatttatgccccaaaacagtcctgtgaggtcaaaacgtcattcacttacgcacggcgggtgacagttcaccaaggcacatgacatccctcatctgatctcccggtatccgcgcattttaggaagaaacatgctcaaagggatgaagggtccgctctcaagcattttagctagcgaagttacagtcacatccggcaaactcgcacactgcagawctaggactaccccgcgcggccccgcccactttcccagcagcgggacgctgtcaccccgactcaggagctcctgggcccgcgggctcccggaagctgccgaccacgtgattcgctggctcagctcacgtgacaaagctcccggaggtgggagccctgggccaaaatggcggcctacctgcagtggcggcgcttcgttttcttcgacaaggagctggtgaaggagccgctgagcaatgatggggccgctcccggggccacacctgcttctggatccgctgcttccaagttcctttgcctccctcctg

SEQ ID NO: 804012 - DNA, 599 bp, Homo sapiens
atctgcgtggtggcagacacaaacttctaattttatttctcctctcatacagccgaaaacctggtttaacatacactgtttcatttatgccccaaaacagtcctgtgaggtcaaaacgtcattcacttacgcacggcgggtgacagttcaccaaggcacatgacatccctcatctgatctcccggtatccgcgcattttaggaagaaacatgctcaaagggatgaagggtccgctctcaagcattttagctagcgaagttacagtcacatccggcaaactcgcacactgcagatctaggactaccccgcgmggccccgcccactttcccagcagcgggacgctgtcaccccgactcaggagctcctgggcccgcgggctcccggaagctgccgaccacgtgattcgctggctcagctcacgtgacaaagctcccggaggtgggagccctgggccaaaatggcggcctacctgcagtggcggcgcttcgttttcttcgacaaggagctggtgaaggagccgctgagcaatgatggggccgctcccggggccacacctgcttctggatccgctgcttccaagttcctttgcctccctcctg

SEQ ID NO: 804013 - DNA, 599 bp, Homo sapiens
atctgcgtggtggcagacacaaacttctaattttatttctcctctcatacagccgaaaacctggtttaacatacactgtttcatttatgccccaaaacagtcctgtgaggtcaaaacgtcattcacttacgcacggcgggtgacagttcaccaaggcacatgacatccctcatctgatctcccggtatccgcgcattttaggaagaaacatgctcaaagggatgaagggtccgctctcaagcattttagctagcgaagttacagtcacatccggcaaactcgcacactgcagatctaggactaccccgcgcggccccgcccactttcccagcagcgggacgctgtcaccccgactcargagctcctgggcccgcgggctcccggaagctgccgaccacgtgattcgctggctcagctcacgtgacaaagctcccggaggtgggagccctgggccaaaatggcggcctacctgcagtggcggcgcttcgttttcttcgacaaggagctggtgaaggagccgctgagcaatgatggggccgctcccggggccacacctgcttctggatccgctgcttccaagttcctttgcctccctcctg

SEQ ID NO: 804014 - DNA, 463 bp, Homo sapiens
catctccactaaaaatacaaaaattggtggtggcatgtgcctgtagtcccagctactcaggaggctgagccagaagaattgcttgaacccaggaggtggaggttgcagtgagccgagatcgcgccactgcactccagtctgggcgactgagccagactccatctcaaaaaaaaaaaaaaaaaaaaaaattgggcccggcgtrgtggcacgcacctgtaatcctaggtactggggagtctgaggcaggagaattgcttgaacctgagaggtggaggttgtagtgcgccaagattgtgccactgcactccagcctgggtgacacagtgagactctgtcacaacaacaacaaaaaaaagtaaacatatgttcacccagaggctgttggtaatagctttatttataacagccccgggctgaaaactatccaaatgctcatcaacaattggatagataaatgaatcag

SEQ ID NO: 804015 - DNA, 701 bp, Homo sapiens
tgcaggtatttgctacatagccctagcatactagaatgctccagggaatttggacctgctttttttgttctgttttgtttgagatggagtctcgctctattgcccaggctggagtgcagtggcgcgatctcggctcactgcaagctccgcctcccgggttcacgccattctcctgcctcagcctcccgagcaactgggactacaggtgcccgcccccatgcccggctaattttttgtatttttattagagacggggtttcaccgtgttagccaggatggtctcgatctcctgacctcgtgatctgcctgcctcgtcctcccaaagtgctgggattacaggcgtgagccactgcgcccggccttgttttgttttttaactcttttgtcaaaataarttgggcagaggaacagggattcagcagtggagaaattagaaagtgctgggaaacgtaggatgcaagttttctgttttgttttggttttatttttttaaggggtaagtggggtcttctgcatgatgaaagtactccctgttagatgctggtttgttttgctttcattcagttccaggcacagtgttttacatataccatgtattggattattattttctaaatgaatggatatgttagtgtacttaattttctaatctgttacttgggttaattgtaggatcctaaagggtaagatcaggtttatgt

SEQ ID NO: 804016 - DNA, 548 bp, Homo sapiens
gagcttgaccggaccatcatgcccgatggcacattgtcaccacagtcaccactgtccagtcccggccccgtatagacggcaattaggtaaagagaaggaagctgggagcccagctctagccaggtgccgggactggagaaccaagggcaggacagtgaaagaggggagaggcttaattccaaytccccctgttttcagacattccattccagtcctaccaaatctttctcccaatctttgtctcttccaaaatttcccttacctcctgccatttccccagcatcctctcactctgccacccttctggatcctcctgcccctcctcatacaggactgttgcactcctaccttccagcttcccctctggcttttcacaggtgtccttagccccagctgactataattgtccatcctgctaccctcagccctccagcaccccctggggtcctcccaacaaacccagaggcctctgtggcatttctaccccactcagtgggcccccatggcacttctgccattataggggccccactgaattgccccaactt

SEQ ID NO: 804017 - DNA, 569 bp, Homo sapiens
atcagacagaaggaggaagccgagcccaatgtgtagacttgttcaaagtcctaatgaaagctgagacagacctcctttcctgcgttaccatcctcaggggaagcagatctagttaagaaacattaatatatagtgctggtcaggcaccgggcaaaaactaacaaaccctaactcatctaaccattatggcaaccttatgaggcgtcaatgtcattctggtgtaatccacragagggtggaagtgcagagaagaaattcccccacagttatacagcaagtcaggggtagagctggtgtttgaacccaggaagcagggggctgagaatggaggtgcataagccctttgatctgccacctctcaatggcgggagggaaggagcccgttagaggtaaggtcctgcccctgcctctggtggcctcccccggatttggagccgctcagcaggcaggtctcacagtggtgccctgcaactgagtacacttgccccggacagccagacggtggcctggccaggacgcttctgccacagctaagggccgctactctttcctgccctgccggagcccct

SEQ ID NO: 804018 - DNA, 569 bp, Homo sapiens
atcagacagaaggaggaagccgagcccaatgtgtagacttgttcaaagtcctaatgaaagctgagacagacctcctttcctgcgttaccatcctcaggggaagcagatctagttaagaaacattaatatatagtgctggtcaggcaccgggcaaaaactaacaaaccctaactcatctaaccattatggcaaccttatgaggcgtcaatgtcattctggtgtaatccacaagagggtggaagtgcagagaagaaattcccccacagttatacagcaagtcaggggtagagctggtgtttgaacccaggaagcagggggctgagaatggaggtgcataagccctttgatctgccacctctcaatggcgggagggaaggagcccgttagaggyaaggtcctgcccctgcctctggtggcctcccccggatttggagccgctcagcaggcaggtctcacagtggtgccctgcaactgagtacacttgccccggacagccagacggtggcctggccaggacgcttctgccacagctaagggccgctactctttcctgccctgccggagcccct

SEQ ID NO: 804019 - DNA, 659 bp, Homo sapiens
ccatacattatggtgccattgtacaaagtttgaaaacatgcaaaacagtcctctgtatgtttctggatgcatacatatgtagcaaaagtataaaaacatgcatggaaatgataaacaccatattcagggtagcgcttacctctgaggaggaggcgatgggctggtggagggaaatacaactgttttcagaatgtcttctttcttaaaatgttccttctaaaaacgatctgaagaaaatatgccaaaagaaacatgggtctctttccattatttttatgcttttctgtatgcatgatatgttatcattagaaaacaaaccatttcaacaccatgtgcaaagttctaggatggtggaggtggacttcgcatcccactatgataatctagggctgggggaatgggagtgcggagataggaggttgttggtgaaagcgaggtctgggggctgattctggagggctattgttgatggagatgggaggggtcaggtgctcagcartgccctctttgccctatttatttcctgccccctcttccagggccaccttgagcagggcttggtgctctcaactgttgtaaaataacaattaaaagtggtataaatacaggaggggaagaaatgtgtctgcctcgggatcctgttgtaatctgtttcccag

SEQ ID NO: 804020 - DNA, 659 bp, Homo sapiens
ccatacattatggtgccattgtacaaagtttgaaaacatgcaaaacagtcctctgtatgtttctggatgcatacatatgtagcaaaagtataaaaacatgcatggaaatgataaacaccatattcagggtagcgcttacctctgaggaggaggcgatgggctggtggagggaaatacaactgttttcagaatgtcttctttcttaaaatgttccttctaaaaacgatctgaagaaaatatgccaaaagaaacatgggtctctttccattatttttatgcttttctgtatgcatgatatgttatcattagaaaacaaaccatttcaacaccatgtgcaaagttctaggatggtggaggtggacttcgcatcccactatgataatctagggctgggggaatgggagtgcggagataggaggttgttggtgaaagcgaggtctgggggctgattctggagggctattgttgatggagatgggaggggtcaggtgctcagcagtgccctctktgccctatttatttcctgccccctcttccagggccaccttgagcagggcttggtgctctcaactgttgtaaaataacaattaaaagtggtataaatacaggaggggaagaaatgtgtctgcctcgggatcctgttgtaatctgtttcccag

SEQ ID NO: 804021 - DNA, 613 bp, Homo sapiens
atcacagtacagaaagactctacattgtgcctgtaaatggacttaggaagccaagagaatccccgacaaggaggaattcaggaattgattcatgggagaaggtaagtaagttctcaaggctaagtatgatgtagccctctgtaatgataatagtaatagcaatagccagmactccagcaatagtaatagccaccactgacttcattgttaactacaggccaggctctgtgccagatccattctagataccgtatttatattatacagatattatatttaatcttcataactccctcgggggtgttattattattatttccattttactgataaggaaattatgactctgagaagttcactaacttccccaaagtgatacaatgtgcaaatgccagagctggggctagaacccagctttgcctcgcctcagagctgggggatgcacctcctactctactgcagaaaccccatggaagacaaataaaaccacagaatatggtttttcaggctgggtacttttcccaacccttcctccaccccaaccgcattccaaacacacattcccactctccttctctcctggatggaaatccattccactctccctgcctcc

SEQ ID NO: 804022 - DNA, 611 bp, Homo sapiens
atatacaaatggccaataagcacatggaaagatgctcaacctcaataataattaggaaaatgcaaatcaaaactacaatgcgtaccacctcatatcctttaggatagctgctataaaaaaaagaaagaaaataacaagtgttggtgaggatgtggaraaattggaaccactgtgcactgttgctaggaatgtaaaatgcacagctgccatggaaaacagtacagtggttccttaaaatattaaaaatagaattcccatatgatccagcaattccacctctggatatatacccaaaagaattggaaatagaaccttgaggagatatttgtaaacccatgttcatagcagcattattcacaatagctaaaacacagaagcaacccaggtgttcatcagtggattaatggataagcaaaatgtggtatatacacataaaggaatattattcaaccttaaaaaggaaggaaattccaacacatgcatgaatcttgtgcccagcagctgtgagatggacagaggctgaggaggaacataagagtgactgtggtgaggttgagcatcctggccaggcacggtgggtcatgcctgtaatcccagcactttgggagacc

SEQ ID NO: 804023 - DNA, 555 bp, Homo sapiens
cgtactgccttatttctgtttaacctcgcaataagctaaatgcttttaatacctttgaagtaaattaaaaatggccattattagtatgtttgcaaaatgaacctagaaaaatgtgaccaagtagataaagaaaccttaatgaatgagaaggttacrttaatttttctctttgacaagtctttgcttctgttttttagtacattccatcaagtaacaataacactcccattcaaggattttatatctattaccgaccaacagatagtgacaatgacagtgattacaagagggatgttgtagaaggtaagtcccctggcacactggagtccctgtaaaggcgctttggagaaagaaggtttatgaatataaaatgcatcatcccaaattaagacagtacaaaatggaatggtgtatgtgttattgctgttgaatttgtcccaaagaaagccaccttttcccgcttaatatatgcagcaccttatattctggttgcagaaacttgtacaaacatttgggggaaatatgattaatcagtagtagttcatctgaaagaaa

SEQ ID NO: 804024 - DNA, 517 bp, Homo sapiens
ttaaaatccccaagtcactcagtgagccatgggacctgaatccgaacctagtttatctggagccataatctgggctcctcccatttttccatactgctttccaaaagcattgtggttcactctttggatggaaccagtcccgttccgtatgctgtgatctatccctgccgtggaattcctccgaggctccaactccgcagccrgagaagctgctctctggcctccgcgggcagagctctgcttatgacttcgtcttccagaggtccacatttctccccttgacgccccctgtctaccacctccacctggaaatttgatctttactgtgctcagtgatcacgaaattggtcaagcctattcatgttccttctcatctagaattctgtgtgattgttttagcataaactgccccgctcccactgtatcatttcacgatctccttttaatgtttttctttcagttttgcactgacagtctggtgacaggtgctgccagggtgcaagttacattgcaatgt

SEQ ID NO: 804025 - DNA, 637 bp, Homo sapiens
agctttaaaggatcctctggcagtggcaagagcttgtgctgatgcagagttagtctatgctgcttgcgttatcagccccccagccttttctcagctggggcatcaggaacacggaagtcaggtggggctcctcaacctgctctttccccttaggaaggggaccctcgaagggagagtcagggagagagggtatattagtcaggggtctccagagaaagagaacgaagaggctgtatgtatatacagaaagggatttatcataaggaatcgggtcatgtgattatggaggctgacaaatctcaagatctgctgtccacaggcttgagatccagggagagctgaggtttcagtttgagtctgaaggcaggaaaagaccgcagttccagttcaggcagtcaggcaggcggagttccatcttactcagcctttttgttctgttcgggccrtcacctgattggatgaggcccacccatgttggggagggcaatgttctttactgattctatcaattcaaatgttcatctcaccccagaacaccctcccgaaacacccagagtgatgtttgaaatatctgggtaccccatgacctagccaagttgacacataaaacagaccatcacagaggtgaagcctaccc

SEQ ID NO: 804026 - DNA, 623 bp, Homo sapiens
aagctgcccattcagcatcttcacttggatcacttccaaattcaaatacttcatctctggcaaactttagtcacctcttctattcttcaatgcagtaaagagcttcaccatctacccagctgccccaaacagaaaactgggaggcactggctactccttttctccaacatttttttttttkggagacagggtgacagggtctctgtcacctggactggagtgcaggggtgtgatcacagctcactgcaattttggcccctgggctcaagcaatcctctcacctcagcctcttgagtagctgggattacaggcatgtgccaccattacctggctgactttttattttttgtagagatgtggtctcactatgtttcccaggctggtcttaaactcctgggctcaagcaatcctcctgccttggtatccttaagtgctgggattacaggcatgcgctaccacacccgccccccaaccttatttttaatcagcaatcaaatcctatgaattctgcctccttcatatttctcatctctacccacgattctcccttcctactgctgttcatctcagttcagaccatctcatgcctccagtttgcattctcaaaaatagaacccacagtg

SEQ ID NO: 804027 - DNA, 544 bp, Homo sapiens
tttaactttgaaagcatattttaagttttaatctttataaacctcgaaattatgtttaggtatattcttccatacatatcttaattataatttttaaatgatagtctgtatttgactctatgtaaatataaaaacatatttaagtatgttaagatgtraagttatactactaaagagaaatttaagcatttccttccagttgagtatgctataacaatcttgaagtctgtgttaccatgagagagtctattagaatttaaaggattaggctgggtgcagtggctcacgcctgtaatcccagtgctttggaaggctaaggcgggcagatcatctgaggtcaggagttcgagaccagcctggccaacatggcaaaaccccatctctactaaaaatacaaaattagctgggcgtggtggcacattcctgtaaatgccaccttttcaggaggctgagacattagaatcacttgaaccggggaggcggaggtagcagtgagccttgatagcgccactgcactctagccttggtgacagagcgagactct

SEQ ID NO: 804028 - DNA, 544 bp, Homo sapiens
tttaactttgaaagcatattttaagttttaatctttataaacctcgaaattatgtttaggtatattcttccatacatatcttaattataatttttaaatgatagtctgtatttgactctatgtaaatataaaaacatatttaagtatgttaagatgtaaagttatactactaaagagaaatttaagcatttccttccagttgagtatgctataacaatcttgaagtctgtgttaccatgagagagtctattagaatttaaaggattaggctgggtgcagtggctcacgcctgtaatcccagygctttggaaggctaaggcgggcagatcatctgaggtcaggagttcgagaccagcctggccaacatggcaaaaccccatctctactaaaaatacaaaattagctgggcgtggtggcacattcctgtaaatgccaccttttcaggaggctgagacattagaatcacttgaaccggggaggcggaggtagcagtgagccttgatagcgccactgcactctagccttggtgacagagcgagactct

SEQ ID NO: 804029 - DNA, 516 bp, Homo sapiens
cctaattttaatgaaaagaaatgaaaaatatgctgggagtgggggaagaatggctcaggagagttattggacttcaaaaaccctcaaaaatcttttaatgatgtaagtgtaaaggaatcagaaacatactgatgaaattccccttgatatccacatggtgcttacagattctgragggaagattccagcaatgaaatctgctgttttttatcaaacccaaagtatttgagatgcctggtgaactccaatatggtgtaatcatgtcttttttcataacagtctcttctcccaaagccagaaggggaaggaaaggcctaattaaagagcgttggtttttaaggtcagagtcttaggggggtgtccacttgacatcatctgccaagttgtttgtggtgtttacactgacccacagatgtgctgtgaatgtacaacattaaaatgttaattgtctaatcttgtgctacttttcaacgtacatttggcaagacttgttgcatgttaagttcgaaaacagta

SEQ ID NO: 804030 - DNA, 543 bp, Homo sapiens
ggaagagtatagtgtcctgttttgcacagaaaggcattctgtaaataataagttgccttaattttcctgtaatgttcattatattgttgtgggaaggtatttactcctattattaaaaataaaaatgtgtaaaatttactacctgaagataacagttcaaattttgatgggraaatcaacctatgcttgtgtgtgtgtgtgtgtgtgtgtgtgtgtaatgtgtacagtgtgtgtggttgttgagataagcataattatataaaaatatgtgtgtgtgtgtgtttaatgtgtacagtgtgtgtggttattgagataagcataattatataaaaatacataaaatatgtacacttcaatgtgcagttgtaaagttaacattcacttaaccacaactcaattgtagaaagatcatttacagacccttaagaacttcctatatgcagtctcccaatcacaacccacttctttcccccagaaataatcacaaaatagactttggtgataatcttttccttcgtgtgttttagagtgttctcagctatt

SEQ ID NO: 804031 - DNA, 543 bp, Homo sapiens
ggaagagtatagtgtcctgttttgcacagaaaggcattctgtaaataataagttgccttaattttcctgtaatgttcattatattgttgtgggaaggtatttactcctattattaaaaataaaaatgtgtaaaatttactacctgaagataacagttcaaattttgatggggaaatcaacctatgcttgtgtgtgtgtgtgtgtgtgtgtgtgtgtaatgtgtacagtgtgtgtggttgttgagataagcataattatataaaaatatgtgtgtgtgtgtgtttaatgtgtacagtgtgtgtggttrttgagataagcataattatataaaaatacataaaatatgtacacttcaatgtgcagttgtaaagttaacattcacttaaccacaactcaattgtagaaagatcatttacagacccttaagaacttcctatatgcagtctcccaatcacaacccacttctttcccccagaaataatcacaaaatagactttggtgataatcttttccttcgtgtgttttagagtgttctcagctatt

SEQ ID NO: 804032 - DNA, 535 bp, Homo sapiens
agtagtacaatattaactttaaactgtgataagatatgataatccttggaaaaaagaatttaaaaaatacagaaaggtacagttaaaaagctaataaataaaatgaaggctggggacggtggcttatacctgtaatctcagaactttaggaggctgacatgggaggattgcttaagccctgaagttcaagaccagcctgggcaacacagcaagaccccctctctaaaaactattttttaaaaaagtatctggtcatggtgacatgcgcctatagtcccagttacccagagactraggcaggagaattccttgagcccagggatttgaggctgcagtgagctatgattgtgctactgcactataccctggacaacagacaaggtctgtttttgagacaacagatcttgtctcaaaaataaataaataattaattaaaaatgagaaattaaaatgaaattttaaaaaacccccaacaattaggtgggtcaaataaaaatgttaaacaaaaaaaatggcaaaaatccaaatatcaaca

SEQ ID NO: 804033 - DNA, 658 bp, Homo sapiens
actgaaaaataatacagtacccacaaaaggtaagatataaaatgaactactgaatgacaattaggaaataacttatgctttataaactaaatacatgtgatcttttccagtgagccacgtattgttagtagaattttccagtgttgtgcttggaatggtggagtgttctgggtaagttctttaaattccaggtgccttataagcatcttcagattgttgctgggttgatagctatgaactgttttcttgaaacactgagacaaatagttttcatctgctgatgtacacttagaaatataactcaggagtctgtacatctgcagagattttattcccactcaggaaagcacacttatatgtaagcaaacgtcacagccctgaatatacacttgaattttgtttctaaaatgactcattcacaagtattagaggtagcagtttctcttgacactgtctagacattttaaaatgckaacagcaactatggggactcgggaagggcagatacggctagacaagaacaaggttctccctgcttctgcttatagtgatcaacaagagttaatttgcattgaaacctatagcagaaaagattgcctaccatttactgagaatcccagtgcaggcttaactgaaatttgggtactttgaagaatgg

SEQ ID NO: 804034 - DNA, 609 bp, Homo sapiens
cacttagaaatataactcaggagtctgtacatctgcagagattttattcccactcaggaaagcacacttatatgtaagcaaacgtcacagccctgaatatacacttgaattttgtttctaaaatgactcattcacaagtattagaggtagcagtttctcttgacactgtctagacattttaaaatgcgaacagcaactatggggactcgggaagggcagatacggctagacaagaacaaggttctccctgcttctgcttatagtgatcaacaagagttaatttgcattgaaacctatagcagaaaagattgcctaccrtttactgagaatcccagtgcaggcttaactgaaatttgggtactttgaagaatggataaatatttcctttgacttagaatttagagtaattcatcacttcttaatctaaacaattcacagatgttttcagatgttagttttaaatttaattaatatgtattcctgtgtacttagtacatgcctgtattttggcctgaatactacttgaaatgttcctgtatgcccccaaaagtttcattgttttataggcaatatcaagtttgtatctctcaattggagtgttgggaaata

SEQ ID NO: 804035 - DNA, 516 bp, Homo sapiens
ttaaaatccccaagtcactcagtgagccatgggacctgaatccgaacctagtttatctggagccataatctgggctcctcccatttttccatactgctttccaaaagcattgtggttcactctttggatggaaccagtcccgttccgtatgctgtgatctatccctgccgtggaattcctccgaggctccaactccgcagccrgagaagctgctctctggcctccgcgggcagagctctgcttatgacttcgtcttccagaggtccacatttctccccttgacgccccctgtctaccacctccacctggaaatttgatctttactgtgctcagtgatcacgaaattggtcaagcctattcatgttccttctcatctagaattctgtgtgattgttttagcataaactgccccgctcccactgtatcatttcacgatctccttttaatgtttttctttcagttttgcactgacagtctggtgacaggtgctgccagggtgcaagttacattgcaatg

SEQ ID NO: 804036 - DNA, 606 bp, Homo sapiens
tttcataacagtagccagaatctaagcaaaccaaaagtcctgaaaatttccttcagtgtttctgatccaaccagcaacaggaattattaagaacatatcgagagaaagaactctcctatactatattccatctgagggaaaacctgaaaggctcagaaaatgaagttcacaacctgcagggtaacgttgtgacttacggattctctgaatccctcaacacgytgaagttagtgcaatgatttttagggtcactaacactgttaaaatttctctatttcccccacccagaaaagtaagaaaacgaataatttagaatcacagataacttctgacattgtacaccaaatggggcacctattatttaaatagaaattcattgttcaaaaaacccaaggttccgtgttcaaacactaaagcgaacatgggccttatgttttcttcttatggaaacagtgtgtgctattcaaatgttaatgctctctccttcagttttcttggacaatggtagtagtttggactaggaatggtgaccaaaaaagcttagaaagtctgaatacatgctgtatctttccacacaaaatagtgaaatcatgattctcttttagt

SEQ ID NO: 804037 - DNA, 606 bp, Homo sapiens
tttcataacagtagccagaatctaagcaaaccaaaagtcctgaaaatttccttcagtgtttctgatccaaccagcaacaggaattattaagaacatatcgagagaaagaactctcctatactatattccatctgagggaaaacctgaaaggctcagaaaatgaagttcacaacctgcagggtaacgttgtgacttacggattctctgaatccctcaacacgttgaagttagtgcaatgatttttagggtcactaacactgttaaaatttctctatttcccccacccagaaaagtaagaaaacgaatartttagaatcacagataacttctgacattgtacaccaaatggggcacctattatttaaatagaaattcattgttcaaaaaacccaaggttccgtgttcaaacactaaagcgaacatgggccttatgttttcttcttatggaaacagtgtgtgctattcaaatgttaatgctctctccttcagttttcttggacaatggtagtagtttggactaggaatggtgaccaaaaaagcttagaaagtctgaatacatgctgtatctttccacacaaaatagtgaaatcatgattctcttttagt

SEQ ID NO: 804038 - DNA, 555 bp, Homo sapiens
acgtactgccttatttctgtttaacctcgcaataagctaaatgcttttaatacctttgaagtaaattaaaaatggccattattagtatgtttgcaaaatgaacctagaaaaatgtgaccaagtagataaagaaaccttaatgaatgagaaggttacrttaatttttctctttgacaagtctttgcttctgttttttagtacattccatcaagtaacaataacactcccattcaaggattttatatctataccgaccaacagatagtgacaatgacagtgattacaagagggatgttgtagaaggtaagtcccctggcacactggagtccctgtaaaggcgctttggagaaagaaggtttatgaatataaaatgcatcatcccaaattaagacagtacaaaatggaatggtgtatgtgttattgctgttgaatttgtcccaaagaaagccaccttttcccgcttaatatatgcagcaccttatattctggttgcagaaacttgtacaaacatttgggggaaatatgattaatcagtagtagttcatctgaaagaaa

SEQ ID NO: 804039 - DNA, 585 bp, Homo sapiens
gcagactgggaatgcgagagctcttgtagccaatgcccagccctgcaaatctgccagggaagcagaacagagccaagtggaagtagtgtcctactgggcagggttgggcgtctctcccttatccagtggggtctgctccttggagtcaagggtctgtcatgcatccgagggtttggggtctatctctcctcaggatgacccaatgttcagatggcaaggagaaggcactgcccacagccccagctctccatgtgaccacctaccacaagagtacctccctgcagtgtcggcttggcttatgaaccacaagcacacagggaggggtgcggatggggaatctcccacctgcatctggtctgctgggtaaaatccaactggtgtcagtgcagtccaagtcacygggagacatgcagtttgtgcttctgggaggaagaaagggaaatacaaacagtgcacaccattctctgttaactgccctgggaatgaagaggtgaggcaggctgtataccacagcaggtgtacatcaggtgtacagttcgggatccattcatttgttaggagtgttttctagttttcactaagtac

SEQ ID NO: 804040 - DNA, 568 bp, Homo sapiens
tgagctctatagctgcagagtaaataatactgttaataatagcagtacttataactgacagattgcttataaacaatgagctgccaaggtaggaagcaatcattaatggctaattgggaaagacttctcgggtttgtgtgttcacctgataatgtacgtttctcgactcttttgagtttgtgttccctgtatttttctgcagggcatgaactgtgcatcaattccctttgtattcccaacaatgaatgagtgagtgaacaaatgaatgaatgaatccatttgttgtttcttttaatccatagcctgcttcattgggtatgcaaacttcctcttttaatgttgacattgaaatgccatctgtaccaagactttttagatgccattatgaaagtgactccctgctgtccacgttttatggtkccctgtgtctattaaacttatgtctataaatacctactatggtccacgtgtgtatttgcatagacaacactataacattcaaagcttcctcttcccaccttcacaatcctcatcaaatcaactgttgtcttattgttttatttgtaat

SEQ ID NO: 804041 - DNA, 425 bp, Homo sapiens
gtacagcttcataaaacatgtctataatacatgaacatgtagagattgtcatcagaaagcatgtcttttggtcttgagtatctatccactttcctgaatagggttttatggtatcatttaacaatgcaggtgtgccccatatcctctcttttagatcttgcttttcttccttatagttcrcacagaaacatgactcagaaacagattcatctgaaagcatttgtataacttcaagatatagcagataggagggtctattcttcctctccccttccccatcgctaagaccatactaactaggaatttgtctacaattagctagaaatttgttaaaatcatttaccctgtatcttcctttgcttatttggttcatgaaacacgttacctatttaaaaaattctatgttgatggagaaaatcagccct

SEQ ID NO: 804042 - DNA, 679 bp, Homo sapiens
acacacagagacatactgacacacactgaatattttctccagcatcattgttaggcttttaaattaagcagtgcatataaggtacctgctcatcgttattattgaggagaagatagctgatcatcattatggaaggctctgtagggcatcgtcaaacctatcctgatcttctctttgcttcttcctatagagaaaactttaattttctatatctatctgagagcaacctggtagcattttgtaatattgggttgagactctcttagtcttagatttgtagaactttataatcttggttctacttkgttctatatgcaaggtacattttgagtgtaacaaagcccacaaatcttttcctgatttgttacatgaccttgaatttattgagtgatgagagctctgtcagaatcagatttcagagctccttggcccaagccaggaagtgggcatgcatgactgaccaagcccagagtggcaggaggccaacctgctgtgtcttatcttgctttcccatagctcaagaggacaagagcagtgttctaggagaagccaaattattttcctaacaagaaccataaagcattagaagtaatttcagaaaaatgtaagatatgtattcctataattctgacacttttaagagatatgactgtaaataaaacacattttacaaagggtg

SEQ ID NO: 804043 - DNA, 583 bp, Homo sapiens
caggaggccaacctgctgtgtcttatcttgctttcccatagctcaagaggacaagagcagtgttctaggagaagccaaattattttcctaacaagaaccataaagcattagaagtaatttcagaaaaatgtaagatatgtattcctataattctgacacttttaagagatatgactgtaaataaaacacattttacaaagggtgcatattaccagcatgctataaaatgcttctagaacttattttaataacatctcccccttcagacatatagcacttttactcttgagaccactttcacatccatccgtttatgctatctcacaacatagagagggaggacagcctggtcacgctcttgcacttgactgaggctytgaagagtatgatacgcacagcctctgtgccaggactgcagtggggggaattcagatttgtctttattccaggtcatgttgatgattaagaagacctgcccaacactgtccatgcctcagggacatgggctgatttttattcttctgatttttatgatgctacttctagcacctgtcgtagcacaaaatccatgatcagtaaaatt

SEQ ID NO: 804044 - DNA, 554 bp, Homo sapiens
catcaacacttggacttatgtctccatccgtctccccttcctaccccaccatctgctccttgcctctctggccttgtgccccccgactcatcattgtctgtactggacactctccaagtatagcacacagttagaggcactgattagaaaacagccagcaggtctgcctttccatgtgttgccttaacctttgggcccacgggcctcaatgactagcctgagcttcacytatttactttttaagcatagtctttcagagcaggctgcattggtcaaggcatcccaacagcttgcccctttgagttcctaaatactcccaatgggctttttcctttgtttagacttggaatggtcagcggaagggtggaaggtgggaagcatgtatgtgtatttgcttgtcagggaagaactatggtgtccttgggtgtatgctaatgggtctgtctctctctcccctacacagggcctggagcagtcattgatggtgtaactcggcctccagagcactggcttgtctctggctatcagggaccctcttagcccacttcttcatc

SEQ ID NO: 804045 - DNA, 573 bp, Homo sapiens
tggtgtgtagtcagatttcattgtttttggttttgttttattttcccctttcaccaagcacaaatccggaaaaaaagcagtatgtgcattaaaggtttgcggtattttccttatagggcgattcacaaaattgcataagtcaagtccaatttttagctatttgtgtaaaacaaacagaggctgtctttccctatttccttagcatctcctgtctcaygcacacacacatagcaagaggtctgctgtagcacttaacggtgcattcaggggtttaatttgaagcagtgcaggaagtgagatgcctgaactccacagcgctctcatatctgggcatacacagccttgcgtcaacctggaaccctttatcccactgggtgtggttagcagcaccttcttgacttgctggtgggcacctccttgactttttttctggtccacttgaggttaaaagttgaggcggggtgaatctagaatgagcccctaacacatgtaagcctatacccttctctgaaaatagcaaaaagtgaaatatccaaactaacaggttaaccaggttcaatatttacctaaaat

SEQ ID NO: 804046 - DNA, 631 bp, Homo sapiens
cttcccactttacctccattctagttaatggccattcttgctagggcccatttcccagactagtaaactgagatacaaacagaaataataataagcaactataatatttaaagtggctcacgtctgtaatcctactactttgggaggcagaggcgggtggaatcctactactttgggaggcagaactctgcctgagctcagagttcgagaccagccggggcaacatggtgaaacccccatctcgtctctaataaaaacacaaaaaattagctggacgtggtagcatgcatctgtagtcccagctactccagagggaggctgaggcaggataattgcttgaacctgggaggcagaggctgcagtgagccaagatcacgccactgcactccagcctgggtgacagagcgagactctgtctccaaaaaaaaaagtaatatctgctttgggaatgacttycaggtggttatcttagttgacgctcacaaattctcgatgaggtgaatatggtagatttcatggtgatttactggtgcggaaactgcgccgcagagagagaaagtaagtcacttggttacatctgcaatatgagcatggagttgactcgcacattcctgctgctgtcttattccca

SEQ ID NO: 804047 - DNA, 617 bp, Homo sapiens
tcagaacactgtttctggagccacaaacctcagctctgccctattctagctatgagacctgggaatattaaaaccttctaactttttagtgttgctgtttcttttttctttctttttttttctttttgagatggagttttgctcttgttgctcaggctggagtgcaatagcgcgatctctgctcactgcaacttctgcctcccgggttcaaatgattctcctgcctcagcctcccgagtagctgggattacaggcatgcaccaccatgtccggctaatttkgtatttttagtagagatagggtttctccatgttggtcaggatggtctcaaactcccgacctcaggtgatctgcccgcctcagcctcccaaagtgctgggattacaggcatgagtcaccatgcccagccaactttttagttgttttatccataacatggggactctactagcatctagtctgtagggttgctgtaacagattacaatgagtttatccctgtgaagggcttagaatagctcctgtcacctattaaggatcactaactattaaatattattatttgtagctatcatatggccacttcctcccccagtgcacacaaacatgcatcccttt

SEQ ID NO: 804048 - DNA, 617 bp, Homo sapiens
tcagaacactgtttctggagccacaaacctcagctctgccctattctagctatgagacctgggaatattaaaaccttctaactttttagtgttgctgtttcttttttctttctttttttttctttttgagatggagttttgctcttgttgctcaggctggagtgcaatagcgcgatctctgctcactgcaacttctgcctcccgggttcaaatgattctcctgcctcagcctcccgagtagctgggattacaggcatgcaccaccatgtccggctaatttggtatttttagtagagatagggtttctccatgttggtcaggatggtctcaaactcccgacctcaggtgatctgcccgcctcagcctcccaaagtgctgggattacaggcatgagtcaccatgcccagccaactttttagtkgttttatccataacatggggactctactagcatctagtctgtagggttgctgtaacagattacaatgagtttatccctgtgaagggcttagaatagctcctgtcacctattaaggatcactaactattaaatattattatttgtagctatcatatggccacttcctcccccagtgcacacaaacatgcatcccttt

SEQ ID NO: 804049 - DNA, 617 bp, Homo sapiens
tcagaacactgtttctggagccacaaacctcagctctgccctattctagctatgagacctgggaatattaaaaccttctaactttttagtgttgctgtttcttttttctttctttttttttctttttgagatggagttttgctcttgttgctcaggctggagtgcaatagcgcgatctctgctcactgcaacttctgcctcccgggttcaaatgattctcctgcctcagcctcccgagtagctgggattacaggcatgcaccaccatgtccggctaatttggtatttttagtagagatagggtttctccatgttggtcaggatggtctcaaactcccgacctcaggtgatctgcccgcctcagcctcccaaagtgctgggattacaggcatgagtcaccatgcccagccaactttttagttkttttatccataacatggggactctactagcatctagtctgtagggttgctgtaacagattacaatgagtttatccctgtgaagggcttagaatagctcctgtcacctattaaggatcactaactattaaatattattatttgtagctatcatatggccacttcctcccccagtgcacacaaacatgcatcccttt

SEQ ID NO: 804050 - DNA, 565 bp, Homo sapiens
ctatgaaagtcctaaacagcatcttccaatatcagaatgtttcatctgcattgaaaaatctgttgagtgtagccaccttcatcaatattcttagctagatcttctgataacttactgcaacttctccattggtagttgctgcttcaccttgcactattatgttacggagagggcttttttctttaaacctcgtaaaycaacttctgctagcttcgtacttgtcttctgtggtgtcctcacctgtctcagccttcacagaattaataagagagttaaagcctttctctggctggtttgcttgtctatccagaccactcagactttctctgtatcagcagtaaggctgttttgctttcttatcattcatgtattcactggagtggcacttttaacttccctcaagaactttatctttgcattcacaacttggctaactgttaagcgcaagagaactttcagcctgtcgtggcttttgacatgccttaattactaagcttaatcatgtataggtttttatttaaagtgagaaatgtgagactcatccttttacttgacacttagaatc

SEQ ID NO: 804051 - DNA, 700 bp, Homo sapiens
accctaaataaccacttagcccctgccctaagaacagcagggcaaaaaaactgcggtgggggatgggagaagtggtccaagcttctgaaaactgcctaatagcttgacttgtgattgtgagagggaaaacagcctggtttggaaagatagtctaatttttctaaaggcctacctccgtatcaatccccaactccccaggataagacgttaaggcagctatttgtagtgttgctgtctgcccttgggtaacagcaatgcacagcaaccaacctacttgtggatcttctaggacaagggaattgggggtaagggggttgtaataagacagatgtgcatagcaaaagaaaatcatttgtgaggttttgcttgagattcctctagagcctacaagacagaagccatgttacctactctcatatagatccatgtttagtactagctgtagttaacacttgtctaacttggaaaaaaaaaggcttcacaagcagatagtcattgcttccagttagactttaatcttcttgaggatgacttyttccatttttctcctgtctccttccaataagccctgtcagatgtgaagtttaataaaaagctattctatatcaaccctggaaatctcagaccctagccagtgtgaacaactttaaaactgttcacaatttaaaaattaattggagggcaaagtttcccatcagag

SEQ ID NO: 804052 - DNA, 645 bp, Homo sapiens
ccccatctcaatccattctccatcttaatccatctgggttactgtaacagaatactatagactgggtgtagcataaatcacagaaatttatttcccaccgttctggaggctgggaagcctcagatcgaggggatcgaggagccagcggatttggcgtctggtgaaggcttgcttcatggctcataaccagcatcttcttcatgtggcctcayatgtcagaaggcacaaaggattcctctagggcctcttttataagaacctgatcccactcatgaggaccgcatcctcgtaccctaatcacctcccaaaggccccatctcacaccatccccttgagggtcagcatttcaacacaggaattgcgaggagacgtaaacattcactctgttgggttgggcaccatggcttacgcctgtaatcccaacactttgagatcagcagttcaagactagtctggccaacatggcaaaacattgtctctgctaaaaatacaaacattagccgggtgtgcacttgcaacctcagatacttgggaggctgaggcaggagtcacttgagactgggaggcagcagttgcagtgagcagagatcatgccagtgcactccagcctaggggacaaagcaagaaacatcttaaaaaaaaaat

SEQ ID NO: 804053 - DNA, 527 bp, Homo sapiens
tgggtctatgcccttcatcaaatttggggagtttattcttcattatttctcaaaataatctttctgcccagtatttctcccccttctaaaactcccacaatgcatatgatggtccacttattagtcccatgagtcgcttagactctgttcacttttcttccttcctttttctttttgctcctcaaacttgataattaatygtcctaacttctactttgctagttctttcttctatctgcatcaatctgctgttgaaaccctctagtaaatttttcatttcagttattgtattttcagttccaaaatttgtttcatttctgtaatttctatgtctttattgatagtgtccttttcttcagggactgtttgcctgattgcctttagttctttgtccatgttctccccttaggtgtttgtgcatattttaaacaaatagtctttggctaataagtccaatatctgtgctgcctctgggacagtttctgtcaatccctttagttcctttaaatgagccatgttttcctgtt

SEQ ID NO: 804054 - DNA, 646 bp, Homo sapiens
ttttgttttccttttttaaatacaaaattatgggccgagcacagtggctcacgcctgtaatcccagcactttgggaggccaaggcaggtggatcacctgaggtcgggagttcgagaccagcctgaccaacatggagaaaccctgtctctactaaaaataaaaaaattagcctggtatggtgacatgcgcctgtaatcccagctgctygggaggctgaggcaggagaattgcttgaacctgggaggtggaggttgtggtgagccaagatcacgccattgtactccagcctgggcagtaagagcgaaactctgttacaaaacaaaacagaattatgaacttaaatatttgctttttttttcatcgcatacacccccaggaagttctgatattcttgagggttggggttgtatgcctctccctaagaatcactgctttaaggatggcgctctgttatttaaaaaatataccaaaccctacaactataatctctgtccttgaattagtttgtctgaaaagcaaacatctatcattaacttaaactttggagaattatagctattccacactagacagccacctgaaacagcacctacttagtctactagtaacagctatagatgaagacattcagggacaaaatacaaag

SEQ ID NO: 804055 - DNA, 646 bp, Homo sapiens
ttttgttttccttttttaaatacaaaattatgggccgagcacagtggctcacgcctgtaatcccagcactttgggaggccaaggcaggtggatcacctgaggtcgggagttcgagaccagcctgaccaacatggagaaaccctgtctctactaaaaataaaaaaattagcctggtatggtgacatgcgcctgtaatcccagctgcttgggaggctgaggcaggagaattgcttgaacctgggaggtggaggttgtggtgagccaagatcacgccattgtactccagcctgggcagtaagagcgaaactctgttacaaaacaaaacagaattatgaacttaaatatttgctttttttttcatygcatacacccccaggaagttctgatattcttgagggttggggttgtatgcctctccctaagaatcactgctttaaggatggcgctctgttatttaaaaaatataccaaaccctacaactataatctctgtccttgaattagtttgtctgaaaagcaaacatctatcattaacttaaactttggagaattatagctattccacactagacagccacctgaaacagcacctacttagtctactagtaacagctatagatgaagacattcagggacaaaatacaaag

SEQ ID NO: 804056 - DNA, 486 bp, Homo sapiens
atgttccccagtctgatcttgaactcctgagtttaagggatcctactgccttagcctcccaaagtgctgagattatgggcatacaccaccatgccctccctgaatttcttttcagttattctacttgttatatgttgtggtttgtatacctgtgagtttctttctttcttgagaattctcagttcttatccattcaaatatcacctagyttgtacctgcttaactttttctttctgtgactgcaattaaacatgtttagtcattctgtccttcaatactgttaacctcctttgtcattttttcatgttcttgtctctctgtgctattctgggttctttattcatttttgttttacagctaactttttctgcttccagctgtatctaacttattattgataaccaatcaatacacagtttttccaccaattatattattcatttctaaaattttcttggttctttttataatcaagttgttttttgc

SEQ ID NO: 804057 - DNA, 610 bp, Homo sapiens
acgtggaatttagaaagcaccatgaatgcgtactcactttaaaatgttagattttaaaacagaaaggagagtctatcaaatgaagccgcttgagagtttttataaaacccaaagagaatatatattaacatataacattgttatatgtcatcaatctggagggttgataataacattgatatctggatgttatcaaccctacagataacattcagagcttggttactgtcttcttagtaaatatctatggtatactgagctctctgcctttaccacatattatatagtttggctggcagctttgttttcaataagtgcttttctttgcaagaaaaagatgctagtgagtgccatctatcatttctgctagatcatcttccaaaatcccaaagaacagcactgtctgcttttctctttctgacagagaaacctctgaactggatgctaatattttgcagaccaagcatgmgccaaaatggattaaaaaatctaagctggcatatctgcatcagtctaagcagtttcaaaggaagaactgcaatgttaagctgattattgtagctatggttctcccttgtccggtcccctccccgagttctgtattttatag

SEQ ID NO: 804058 - DNA, 522 bp, Homo sapiens
taaaatatagagggacttttccattcattattttgttcatcatttatagaaaatgcggaaacttttgggtaggtttggctttctgccaattaatgttgtcactgttttcctctgatgcatattcacatgagtcaacagaaaccttttcgactaagcagagttagatttagcgagactgcgtacatcacggtatttattggatgtggaaacctaaaataggaggggcgtggtaaaacctcagacagaagtactgacaaagagtttccccaaacmatagaaccgccatagcccgcacacattcccaggacacattctacagaatgggccaagaaatactcatctgtgtcatcacttgccccaaaaaaaaaaaaaaattatctgaaacatggaaggtatatcaatcagatttgcatttggctgtgagtgatagaaaatgcaaaataatagtaggttaaaatacataaattttttttctgtctcttgtaaaagaagtcccagagtaggtaaaccaggagggagaca

SEQ ID NO: 804059 - DNA, 522 bp, Homo sapiens
taaaatatagagggacttttccattcattattttgttcatcatttatagaaaatgcggaaacttttgggtaggtttggctttctgccaattaatgttgtcactgttttcctctgatgcatattcacatgagtcaacagaaaccttttcgactaagcagagttagatttagcgagactgcgtacatcacggtatttattggatgtggaaacctaaaataggaggggcgtggtaaaacctcagacagaagtactgacaaagagtttccccaaaccatagaaccgccatagcccgcacacattcccaggacacattctacagaatgggcmaagaaatactcatctgtgtcatcacttgccccaaaaaaaaaaaaaaattatctgaaacatggaaggtatatcaatcagatttgcatttggctgtgagtgatagaaaatgcaaaataatagtaggttaaaatacataaattttttttctgtctcttgtaaaagaagtcccagagtaggtaaaccaggagggagaca

SEQ ID NO: 804060 - DNA, 561 bp, Homo sapiens
tgtaagccctttcttcctagtccttaggtgggcaatactgtggtgtcagtaatttataacatgctttctcatatataataagaagcactggactaaagagtctgctggtttgactcttcacgcaagtcaattcaaattaagtcactgtgcctctctgagcctcagtctccccaggtgtaaaaagggaaaatatggtcaactcttctgcgtccagtgttgtaaaaataaaatgagaaatttctttataagctataatctgctatgtgaatgcatgggactcttctaaggcatattttacaatatcatttatgcaaatgtaggtgaatatgttaaccatataccagaaaagtggcaataaatagcccaagaaatgtgttcaatggctaacatctaaggagtcccarctatgtctaggcaccaagctaagtactttacatgtatcatctcatttaactctcacaatagctctttattagttatcaccccatttcatacataaggacattgtaactcagagaggtgagggaatttgttcaaatgttcacaagaaaagacagggct

SEQ ID NO: 804061 - DNA, 549 bp, Homo sapiens
cactaataatgtgtgtagaaaacattaattaacaatagtcacttttacttacatttactctctaacaatgtaattgttagtttacttttttaaatgttcagtttcttcatctttgttgcagatatgtatctatgcaaggaaatgatacattttaaaatgtatagataatcagagaggtttaattctcttgacatatacaataacagtgtttcaattctataaacacaasccactggtactattaacctacttgctttagggattaagggagagagagaacattaactcttttgtgacttactgtaaatcagcacgagaggaaaaaatggtggaacatgtcgtttttgctacatggatagtagtttggtagtcacagtataattttctcataaactgctaatagcccatttgcaagtaaacagatctggcccttgccttttgaccaagtctaaaagactttacaattatatgcacacaggtcgtccattctatggaggtataagtcctagttggttacctggtgcaagtttcaccttgcttcttttggat

SEQ ID NO: 804062 - DNA, 549 bp, Homo sapiens
cactaataatgtgtgtagaaaacattaattaacaatagtcacttttacttacatttactctctaacaatgtaattgttagtttacttttttaaatgttcagtttcttcatctttgttgcagatatgtatctatgcaaggaaatgatacattttaaaatgtatagataatcagagaggtttaattctcttgacatatacaataacagtgtttcaattctataaacacaagccactggtactattaacctacttgctttagggattaagggagagagagaacattaactcttttgtgacttactgtaaatcagcacgagaggaaaaaatggtggaacatgtcgtttttgctacatggatagtagtttggtagtcacagtataattttctsataaactgctaatagcccatttgcaagtaaacagatctggcccttgccttttgaccaagtctaaaagactttacaattatatgcacacaggtcgtccattctatggaggtataagtcctagttggttacctggtgcaagtttcaccttgcttcttttggat

SEQ ID NO: 804063 - DNA, 601 bp, Homo sapiens
taacccccgcctcaccagccagggcaaggtccctggcttcaaggagcacagcaggatggtcgggggaccagttgtgatccgcacatatgcagaagggaaattactaaaacctctgcctctgaacacagctcagttgcatgttctttgtaggaatggggtagggatgaaagaaatgaagggctgaggggtgtgggaatgggactcacccctggacaagtcctttatatgacctggacctcagagactccccctgaaccccagctgtagatatccacgattgtarcctgattttgactaaagcagcgtttcccacccagcgttatgacttcactacatcaccacctcctcctttgcatgccatcaagggtgatgtcctcttttccctcatttcttctcctttctcataaactctgccctttttttgccttctccctcttcaactttgatcgatctcctttgccctttctcttttccttcccatctcttctgttttgatccctctgatctccctttttcctttctctttcttcatttcctttttcttctctcccctcctcaacgaatattattctgagcctcgtcccctccttcccctgacccc

SEQ ID NO: 804064 - DNA, 673 bp, Homo sapiens
accaagacacagagctacgtttaaatgctgactgtgcccttgacattgcttgattgattgacatatttcaaaggctgtggtatcatctatctacatgcttatgactaggggagtggttggtttctgcttttcttccttttattattactacaaagaccctgacctgttttgccatccccttttctctgtgatctcgagcaggactctactttttttaaagctaagtatttattgagtagctattacaaattaggccaatgactttacstacattatctcatttaatccccacaaccctttgaaatggatacaattattattaactgaagcacagagaagttacataatccatccaaggtcacacagctagaaggtggtagagcctggaccattagtcgacttcctatgctcttccaaagctctgtgctggactgactctcctagaatgacagcaccacagccagcctctgcctggtcgcttctgtcaatgaggtcctcactgcctcctggaggagcattcatccatccagctcagtttggctgaatctatcacgtctttctggagtgtctccaggtcttggtctgggcaccatgggagaagtcctggacttggtctctgccctctgggatcccacagttaggagacaatatccttccaccatggaaggtgtgg

SEQ ID NO: 804065 - DNA, 574 bp, Homo sapiens
aggtacaaaggatccagagtgagacagctgttttcttctcaccctgctgtgaagccacccaggtgcactctgttcccctctgaggcccctccttgccattcctgccacctgaccatgggacttaccacagtctccccagatgcggggtgcccatggcgccccacagtgcctcacagtggcggggcggccgcacagcagccagttgrcacctgagaggagggctctgggaagggctttttttgtttttttttgagacagagtctcactctgttgcccaggctggagtgcaatggcacgatcttggttcactgcaacctccgcctcatgggttcaaacaattctcctgcctcagccttctgagtagctgggattactggggtgtgccaccacgcctggctaatttttgtatttttagtagagatggggttcgccatgttgaccagactggtctcgaactcctgacctcaggtgatccactcgcgtcagcctgccaaagtgttgggattacaggtatgagccactgcgcccagctgggaagggctcttagaggaaatataggtccaagcttttccag

SEQ ID NO: 804066 - DNA, 595 bp, Homo sapiens
ctttctaccctgcccccaacacgcgtccctcagaagactctaagcagggtgcaggcagggagagtcaggcacggtgggggagagggctgagctctggacctgagttctcctcctaggtctgtgacatagacaacctaatgacttatacaacctttctgagcctcagttttctcatctgtacattggggatgaccatatacatctggcaggattgtgggaaaagcccagagttcaggacctgacacacagcaggtgcctggctggagtttagtgggattggagaatgcagctyttggaattttacccagaaatgctttctcaaccctgaggtatatccccaaactttttgtttgcaccaattctctctgacctttgtccttccagatatctttttctttacacgtttttagggactaacgcagaggaaactttatggcccttcaacccaaaacgttaattagaggataacgcaacgtctagggtgaatcctgagaagagggggcaggaaaagaagagaattgcctgacccctgcccccagcccatggctgaggacagagaaaaggggcatcctgagaaaggccatgtcccgcataa

SEQ ID NO: 804067 - DNA, 595 bp, Homo sapiens
ctttctaccctgcccccaacacgcgtccctcagaagactctaagcagggtgcaggcagggagagtcaggcacggtgggggagagggctgagctctggacctgagttctcctcctaggtctgtgacatagacaacctaatgacttatacaacctttctgagcctcagttttctcatctgtacattggggatgaccatatacatctggcaggattgtgggaaaagcccagagttcaggacctgacacacagcaggtgcctggctggagtttagtgggattggagaatgcagctcttggaattttacccagaaatgctttctcaaccctgaggtatatccccaaactttttgtttgcaccaattctctctgacctttgtccttccagatatctttttctttacacgtttttagggactaaygcagaggaaactttatggcccttcaacccaaaacgttaattagaggataacgcaacgtctagggtgaatcctgagaagagggggcaggaaaagaagagaattgcctgacccctgcccccagcccatggctgaggacagagaaaaggggcatcctgagaaaggccatgtcccgcataa

SEQ ID NO: 804068 - DNA, 595 bp, Homo sapiens
ctttctaccctgcccccaacacgcgtccctcagaagactctaagcagggtgcaggcagggagagtcaggcacggtgggggagagggctgagctctggacctgagttctcctcctaggtctgtgacatagacaacctaatgacttatacaacctttctgagcctcagttttctcatctgtacattggggatgaccatatacatctggcaggattgtgggaaaagcccagagttcaggacctgacacacagcaggtgcctggctggagtttagtgggattggagaatgcagctcttggaattttacccagaaatgctttctcaaccctgaggtatatccccaaactttttgtttgcaccaattctctctgacctttgtccttccagatatctttttctttacacgtttttagggactaacgcagaggaaactttatggcccttcaacccaaaaygttaattagaggataacgcaacgtctagggtgaatcctgagaagagggggcaggaaaagaagagaattgcctgacccctgcccccagcccatggctgaggacagagaaaaggggcatcctgagaaaggccatgtcccgcataa

SEQ ID NO: 804069 - DNA, 434 bp, Homo sapiens
tggaagatgacattggaagggtcacctgagggccctactgacggtcacagaggccacatccctcctaaatatcacttcctctggacctagagctcctgatcaagaactctcccaggatccaaagggctgcctgggtttttctgtgtccacacctggctgctccctgcaggcagctcccttttgagccctgaaagtgcaggggtgccctgagggyggagggccatgcatctgatgccatccgtctttgcccccagagcccatcccccactgtggccactctggatgggcccaggtagagagtagcaggcttccagggaggggtgcggctggtgcctgggagaaggctagaggactgtgcatggccttgtaatttaattattcgactgcagaaaggagatctcatctattgggtgctcatccttgttaagctaatt

SEQ ID NO: 804070 - DNA, 627 bp, Homo sapiens
gtggggagggcctgcccaaccccattctcctagaaagacctgcagaccacgtggctgtgccagcagattcattgaggtatcattcatatgtgatatcattcacataccatacaatccacctgtttaaggagtacaattcattatttgyattcacagtgtgatggtgaccatcaccaccatctattccagaacattttcatcatcccaaaagaaaccccataccaatgagcagtctctccactttccccatcagcccctggaagccactaatctacttcccatctctatgggtttgcctattctggacatttcataggaatggaatcgtaagtgtgtccctttggtctggcttccttcacttagcacctggccctccaagttcatgccttgagggggtgtaagacgtttcagcacttcattccttttgtctgtgaacaccgtttcatcctaggccatagcactgtatacatatagcattgtatatgctgtctacagtagacagtggatacgttgtatttatccattaatcacttggtgggcatttgggttgttgccacgcattggctatgatgaataatgctgctagaaacattagtatacgggtttttgtgtggacgtgagtttgca

SEQ ID NO: 804071 - DNA, 627 bp, Homo sapiens
gtggggagggcctgcccaaccccattctcctagaaagacctgcagaccacgtggctgtgccagcagattcattgaggtatcattcatatgtgatatcattcacataccatacaatccacctgtttaaggagtacaattcattatttgcattcacagtgtgatggtgaccatcaccaccatctattccagaacattttcatcatcccaaaagaaaccccataccaatgagcagtctctccactttccccatcagcccctggaagccactaatctacttcccatctctatgggtttgcctattctggacatttcataggaatggaatcgtaagtgtgtccctttggtctggcttccttcacttagcacctggccctccaagttcatgccttgagggggtgtaagacgtttcagcacttcattccttttgtctgtgaacaccgtttcatcctaggccatagcactgtatacatatagcatygtatatgctgtctacagtagacagtggatacgttgtatttatccattaatcacttggtgggcatttgggttgttgccacgcattggctatgatgaataatgctgctagaaacattagtatacgggtttttgtgtggacgtgagtttgca

SEQ ID NO: 804072 - DNA, 627 bp, Homo sapiens
gtggggagggcctgcccaaccccattctcctagaaagacctgcagaccacgtggctgtgccagcagattcattgaggtatcattcatatgtgatatcattcacataccatacaatccacctgtttaaggagtacaattcattatttgcattcacagtgtgatggtgaccatcaccaccatctattccagaacattttcatcatcccaaaagaaaccccataccaatgagcagtctctccactttccccatcagcccctggaagccactaatctacttcccatctctatgggtttgcctattctggacatttcataggaatggaatcgtaagtgtgtccctttggtctggcttccttcacttagcacctggccctccaagttcatgccttgagggggtgtaagacgtttcagcacttcattccttttgtctgtgaacaccgtttcatcctaggccatagcactgtatacatatagcattgtatatgctrtctacagtagacagtggatacgttgtatttatccattaatcacttggtgggcatttgggttgttgccacgcattggctatgatgaataatgctgctagaaacattagtatacgggtttttgtgtggacgtgagtttgca

SEQ ID NO: 804073 - DNA, 606 bp, Homo sapiens
agtttaagagttctatggaagaatttggtaaagaattagcatataaaaatcaattcaactatcaactgcggagaaaaaaggctatacaagaaaggagatgtaaggccaggcatggtggctcacacctgtaatcccagcactttgggaggctgaggggggtggatcacctgaggtcaggagttcaagaccagcctggtcaacatggtgaaaccccatctctactaaaaatacaaaaattagccaggcatggtggtgcatgcctgtagtctcagctacatgggaggctgaggcaggagaattgcttgaacccgggaggcaaatgtcgcagtgagccgagattgtgccaatgcactccagcctgggtgacagagcgagagtccgtctcaaaaaaaaagggaaaaaaargaaaaggatatgtaatcatagtatactacgtgattctcttgtgaataatattttcatggtcataattgtatgaacgctgattacgggcttaaacattcctataaccaaattaggaaagcagaaggagtgttaagtccttcttttccataggaagatgttaataataacatttaactttgaaaactcgagaaatagtagcat

SEQ ID NO: 804074 - DNA, 558 bp, Homo sapiens
ttagacctatagattgtagtaataagtgaagtaaaactcacaaaaacaatgatagcaagtaacttccttatacatctgtgaatggatttaaaatataaacaaaaaaatctataagcctcttggaaaagaacagctgcaggatgtattggaatgaaaataaacagattatatcactagtctataatttgatctttgataaggaaggcaaaacaatggagtttattgatattttagatctgctgattagatatttagctgcactgtttatcttcatgtacccactatcttatgctatgctggcacatagtcagggttcaatacacatttgttggctaaatgaacgggtgccagagagatgattggaacttacytgatcaacaagtttcatattctttaaaattttcattcacttttaccaaagaacagtaactaactcatcaaatttgagatttggtctctgataactttcacctggcctcttgcagctctttgctagttccttgaattcctcctccagcatcatgtattattcatctttttatccttgggcttagcatg

SEQ ID NO: 804075 - DNA, 658 bp, Homo sapiens
caatctagaaaccataaccccaactatgccttcttgtgaagagctgatttgctagttataaatatgtgtgtgatgtgtgattaaattttgcatctttcctttacagcatattagtcctggatagccttagaaaatatagtcatttgtcggtttatgtttttcctttgagtgcaggttagaatttacacattgggagaggatggatatagtttatagttcatatatgtggtgcttacccatttgcagataagtgaccttatctccctaaaaatagcaatcatgattaaaataactctgcacccagtcatgtagccaatctgcagtttacaaaacaggttcatgtgtgtagtcttacaccagcctcacaaccaacctgtggggtgtgaagtgttttcctcatttgatagctgagaaagctgaggtttgaagacagtaagtatcctaagatatcctaagataagttacctcaagtattaatattcttccaaaaggtaataagggattattagaarctctgtatccaattttcccttaagggaaaaacaaaccaattaatccatcagaaggaatcttgaaacatccttagaccttgacaatttttctttaatggataaaaggcaaaaagatctaggaaattgcttttcctttgagccctgga

SEQ ID NO: 804076 - DNA, 630 bp, Homo sapiens
ccaccaacttaggaaaaggagggcctgactccgggtggcggcagtgagaatggggaagaggaatacagaggccgacttgaggtgagattatcaggagatgatgattatatatggggcccaaggggagtactgatctgaagtccagggattggggtgcctctctcagggacagtttatagaaagagagactgcatttrcttccatccgaagcacctatgagacctgaaggtgtagataaaagactacaggaaagagatgatgggttttgggaacagctttctctccagaaggactctattaaaaggcatgttattgataaggaaagaaaggggtcactcttgacttttacccatcatctcaggttagtttattgtcactgaaggccccaagaacgtaggagatgagatgtgatttccagaggtgacgggtgggaagccacctgaagcttcagccctgcattagcaggacattgaccatctctggttcacttgcatcttgatttgctttcttgagaagagggagggtgtctttccagctactggacgagcaacttttgagagtcctgggtattcatttaaatttcattcagccaatgtttactgagcacttactacataggaagcattattc

SEQ ID NO: 804077 - DNA, 652 bp, Homo sapiens
caatgtttactgagcacttactacataggaagcattattcttgaggttgagtgtgctgtatgaaactaaaacagcccccactctcctgagactaacattatggaggcagggagctagtatgtaaacacataaaggagtgggctgcacaaatgtctggagggagagggtctgggaatatggggcagtgagagcaaagactctgcggcaggaaccaactaggtcagatgaatgagttactttgtggaacaagtcttgagttgctcttctagacaatcactccttctcccactcccttgaatttcgggaagtggtacctgtatttcttagttactaagtgaacaattatctttgagagaccaggtatgttctggactgctttgtaactttaaaagttagccttggtgtggcctcygggattttatggtctttgagctcaaataccctgggaggcaattgccatctagtggcaaggagagaaaacacacctggtagcttgggaaagaaaagaagtttctttaggatatcaagcctgtagctcgtctttcaatctttggctatgaaatgactttgaaaatttgctaattttctactttctcaaaaattcaagaaagttgaacaattggccccaaattagttacatttccaacagaaa

SEQ ID NO: 804078 - DNA, 633 bp, Homo sapiens
ttaaccagcataatcagtaaagaaaaagaagcaaaggaagatgtaaaactcatttttgtttacagatgacatgtcatatctgatagaatctatttaaaaagctaccagactaataggtgagtttagcaatgttgcagaataaaaggacaatatacaaactttgtatttgtatttctacgtactaacaacagttagaaattaaaatcaataaaggaattccatttagaataccataaaatatgaaatacttaggaataaatctgatgaaatatgtgaaaaaaatcagkacattggaaattatagaatattgctgagtaaaattaagtaaaattaaagaccttaaaagtagacagatactttgctaataggttggaagaatcagtatcattaagatgttcattctctctaaccttatctaaagattcaacacaattccacacaatcaaaattccagttgaaatttttgtaggtgtagaattaacaggttaattctaaaaattgtatgaaaatttaaagtacctaggagagtcaaaacagctctgaaaaaaaaagtgaacaaagttggagatcaaagaagaacaaagttgtttcaataattattataaagctgcagtaaccaaaatatagtattgg

SEQ ID NO: 804079 - DNA, 586 bp, Homo sapiens
ggagactgagttctacattgatatgacagaagtcccttcacagggttcctctggggcccttcacaataactgtgtgtcccttcagagtaacgttgacattttctggagtgccgacagtctgattgctgagaatagtcttcattcttgccatagatgtggcaaagagtgaagcaaaaattttagaattgaaatagttcataggcttattatcttcaggaaattaatagaatggggatgatgaggaaattctattgtcagtctggagggatgaggaagcctactcagacaggtgtgctgagcagcctgagagtgggaggyacactgagcataggaaggaattggatatatcaagaagagagggaactgagaaagcagatatgaccctgggagggagcattggcattgagcaacccagggcccatgtgtgattgtctttgctcatttgggaagagccactaataatgtttgaaattaggactccagaggtagtaccaagtagcaggcagatgtaagttgagaagttgaggagcattgggttttagtcttagtaattagccttatgacctcaccaatgccctggaagtaa

SEQ ID NO: 804080 - DNA, 616 bp, Homo sapiens
gtatgtgtatatacatagtagttgcttaacaaatattattacttctttttaatttaaaaaagttaaaaataatataaccatattataaaatatttatgaactaagaaaagaaaaaacattacctttagtcttaccacacaaattaaactaccactctagctttaatgtattttcttattttcattttcatatggctatgtttaaatcttacatttatataatacttagtgttaaccataagcactttccacattgctagccatcatgaacgttatctactaaacaacttagtcattccactcctaggtatttactgaagagaaatgaatgcgtatgtctacataagtcaatgacgacttctccctaaatgttcatagtattttatttgtaatagaaaaatggtggaaatacccaaatatatatcaacaggttctactgaaaaaaaaaattgtgacacttccatacaytgaaatactattcagcaacagaaagaaataaactattgacacatgcaacatagaaatcaatctcaaaataggtatatcaaatgaaaaaagccaggctaaaaaagagtacataccctatacttccctctatatgaaattctagaaaactc

SEQ ID NO: 804081 - DNA, 465 bp, Homo sapiens
cagtacgagagctaaattgtaagctccaataatacagaaagtgtggctgtaatagtcatctgtatatactctctgatattaaatactgttacatgaataaattgtcccaaacccaatatttattctttttcataagagtctggggtctggatccagactgcctgaattccaatcctggttctacaacttactatatttataactgcatctcagtttcttaatcyataaaataaggctcacaatcgcactagttcatagacgaagtgtgaagactaaatgactttaatatatacgaagcgtttagaacagactttgacatatagtaaactctcaataaatggtaactattataggcaacttattttttctttcttctttatctcctaatcctgtatccctgatcataactcttgagattcttcctgaagtaaccctccttcacatgaaaatccatattctttcttg

SEQ ID NO: 804082 - DNA, 632 bp, Homo sapiens
tctgccatttattagtggggtgaccttggtcaagttactcagctttttgaagccttgttttctccacctgtaaaaaataacagtgcatacttcataaagcagtgaagattaaatgggataatagagtgtagctgctttccactgggcctggggcgcagcaagtgcataggagtccatagctgttatctrtatacctctaaggagccttcagtgaggggtggagtgcagtttgtcttaacattctgctctggtttattttttgactgtcacatcatttctgggaagcagggagggcaggtctggaaataagatgatgggtccagaatgaaccctttacgtggggactgccatccagtactgattcccatttcagtattccccaccacaccataggcttaaaatctgtgagacctgcatttgaaacctgggtccctcaggttactatgactttgaaaagccctcaggtcattaaactttgaaaagcctcattccccttgtttgcaaataagggtagtgataccttccctgcatgagagtaccttgcacagaatttggcctgtagtcggcactcatcagatggtgcaagttaatcacatcagtcctgcttagagttaggaggaaaagcttcactg

SEQ ID NO: 804083 - DNA, 614 bp, Homo sapiens
acaacaaaagcagcagagagcctactcacccctacttccagccaatactccatcccctaccccaggataaatgcaatcccagcttctaatattgtgcactggttttgtctgttctttgaactttctgtagcagagttatagaatatgtacacttctgtgattggctcatttcagccaacataatgtctgtgagattcatccttcttggatatagttcaagttaattcattatcattattgtattgtattgtattcaataaatattactacaattcattcatccattctactctccagcatttgggtagtttccagtttgagggcataagtagtagaagtattgtgaatattctaggacatgttttcatkaaacatacatgcagctctgttgggtacagtctaggccttggagtggaattacagttctcagaaacaaaagaaaataaataaattcaagtttgatatagacttgactgctgcaagacacagattccctgactgcagtgaacccgaggtggccgtgagcagtggaaggagtgtgcttgttaaaagggcagatgtgatgctgggagacatgtacaaatctcaagagattattcagggaagcaccagat

SEQ ID NO: 804084 - DNA, 614 bp, Homo sapiens
acaacaaaagcagcagagagcctactcacccctacttccagccaatactccatcccctaccccaggataaatgcaatcccagcttctaatattgtgcactggttttgtctgttctttgaactttctgtagcagagttatagaatatgtacacttctgtgattggctcatttcagccaacataatgtctgtgagattcatccttcttggatatagttcaagttaattcattatcattattgtattgtattgtattcaataaatattactacaattcattcatccattctactctccagcatttgggtagtttccagtttgagggcataagtagtagaagtattgtgaatattctaggacatgttttcattaaacatacatgcagctctgttgggtacagtctaggccttggagtggaattacagttctcaraaacaaaagaaaataaataaattcaagtttgatatagacttgactgctgcaagacacagattccctgactgcagtgaacccgaggtggccgtgagcagtggaaggagtgtgcttgttaaaagggcagatgtgatgctgggagacatgtacaaatctcaagagattattcagggaagcaccagat

SEQ ID NO: 804085 - DNA, 613 bp, Homo sapiens
gtgggtggatcttgttggaatggggcagagtgaaggaaaattcctcttcaacagccctctgctgctttttctctcccactggctaatttacgaatctacataaactctctataagcgcttgagacttgaggatgaagataagccagtgggttgggtgttaactactgtaaggatctggagggagagacaattgaggaaaaaaggtgatttttctactttgtcacaactaaggtacgtgagcctaatctattttgtttttttctctttttatttgtgtcatatctttttcatacagtgggtgttttgctcctacaactttccatacctgtgtccttgttkatttgagtttttcacagtgtcccatgatgtgagagctgtcaaccgttagtattataaagctctgtacacaatggatgttacgataaaatagtctagtggccatcaggaaattgttgccctattatctctgccagtgggaacatctatttcacagggctcagaaaatgaattaaaggttctgggtatgatgaggagattccctagaccaaatgacccctgctcttaccagtgacggaaaacaaagtcctaattgcggcttcgacgatctcgagac

SEQ ID NO: 804086 - DNA, 598 bp, Homo sapiens
tgcgccggtgctgggcaggcggcggccgcgcgcccgggagccacgcttctccggcggaacgcggcgccccctggcggcagaacgcttgtggccgccgttacgctcgtgtggaaacagcgccatctgccgaacgttctgtcacattgctgattggcccacacagattttgtaaggatttttccttctgcttgcttaaatcaggccgtcctgagcctattcaaagtgtacttttgaaatgaaaaaagaaactgactgtacaagatgttttgctcgctggaaaaacgaggatgaaaggaaaatgggtagcgattatctgaataacatgtgcttcctgtctgtagtgaggtgtgaacatggtggggccgcacgttgcagaggaaaacgcatgcattttggagtcaggcaactgcaatcaaattctcactagctcygtgagctaggaaagttacttagcatttctgagcctcatttgtccttatctgtaaagtagaagtacatttaccttgcagcattgtagcaaaagttaaataaaataatgtgcataaaatgaaaattaaatgtgtatgaagtaaatcagataatatgtataacaggtagg

SEQ ID NO: 804087 - DNA, 553 bp, Homo sapiens
tttatttatgcatttaactgttagaggtcatcttggtttcttctaatatttcccagttaggaataaagttaggttctataagtatccatgtgtaggtaattgtgtggacataagttttcaagtcctttgggtaaataccaaggagtgtgctggttggattgtatggtaagggtatgtttagttttgtaagaagcctccaaagtatcttccaaagtagctgtaccattttgcatttccaccagcaatgagagttcttgttgctacagatcctcaccagtgtttggtggtgtcagtaytctgaattttgggcattttaattggtgttagtagtatctcatcatcattttaatttgtatttccatggtaacacaggatgtagaatatcttttcatatgtttgtttgctatttgtttatcttctttggtgaggttctgttaagcttgctggcccatttaaaaaattgggtttctcgttatcttatttttgagttttaaagaattctttgtatattggggataacagtcctttatcaattatgtcttttgcaaatatt

SEQ ID NO: 804088 - DNA, 553 bp, Homo sapiens
tttatttatgcatttaactgttagaggtcatcttggtttcttctaatatttcccagttaggaataaagttaggttctataagtatccatgtgtaggtaattgtgtggacataagttttcaagtcctttgggtaaataccaaggagtgtgctggttggattgtatggtaagggtatgtttagttttgtaagaagcctccaaagtatcttccaaagtagctgtaccattttgcatttccaccagcaatgagagttcttgttgctacagatcctcaccagtgtttggtggtgtcagtattctgaattttgggcattttaattggtgttagtagtatctcatcatcattttaatttgtatttccatggtaacacaggatgtagaatatcttttcatatgtttgtttgcyatttgtttatcttctttggtgaggttctgttaagcttgctggcccatttaaaaaattgggtttctcgttatcttatttttgagttttaaagaattctttgtatattggggataacagtcctttatcaattatgtcttttgcaaatatt

SEQ ID NO: 804089 - DNA, 590 bp, Homo sapiens
ctaacttcctgagttctttttcaggtaaatcagggatttcttcttggtttggatccattactggtgaactactgtgatatttggggggtgtcaaagcaccttgttttgtcatattaccagggttggttttctggttccttctcatttgggtaggctctgtcagagggaaggtctagggctgaaggctgttgttcagatttttttgtcccatggggtgttctcttgatgtagtgctcacccccttttcctgtggatgtgrcttcctgtgagccaaactgcagtaattgttgtttctcttctgagtctagccacccagcgagtctgcccagttccaagctggtactgggtgttgtctgcacacagtcctgtgatgtgaactgtctataggtctctcagctgcagataccagcgcctgttgcagtggaggtggtggaggatgcaatggactccgttagggtccttagttttgatggtttaatgctctatttttgtgctggttggcctcctgccaggaggtggcattttccagaaagcatcagctgtagtagtgtggagagggactggtggtgggtgggaccctagaagtccca

SEQ ID NO: 804090 - DNA, 548 bp, Homo sapiens
cctggctcccacaggagcagtctgcttccttcagagggtctttgggtcttctaaggattgctgtttttttcttgcagtcaatctgggctaaaattcacaatgcaagcctctgcatgctgccttgtttggagctgcaatctagtcctgccccccatctgccatgatcccaaaatccccctgtattatctttttgataatgctgttggattcggttagctactattttgttgaggatttttgcatctatgttcatcagrgatattggtctatagttttcttttctttcttttttgtttgtttgttatatccttaactggttttggaattagggtgatactgacttcatagaatgatttagggagtattccctctttctctatcttttggaatattttcagtaagattgataccaattctgctttgaatgtctgatagaattcaactgtgaatccatctgatcctggacttttttcattggcaattttttttttttttcccgagatggagtcttgctctgtcacccaggctggagtgctgttgagaggtga

SEQ ID NO: 804091 - DNA, 577 bp, Homo sapiens
gtcctactatcgcctccctctagtctctgcttctctggatccctgaggagggcagaaggtactgaggaaggttaaagggaccagccttggagtatttccccactctgagactcagctggccacaggccaggttctgaagttcctttcttccaagccagtgattctggttcttggacaaggtgttgaggaacactagaaacagaggggactgtgacctggggactttttctgcaggaagaaaacagcccaaagatgagagtgattcgcgtgggtacccgcaagagccaggtgggtgcaggagccggggtggaggaggtttgtcagaacagttatgatgctcacagcatcacaaattgggggactcagagggttagttcctagtatgaaggagatggggtggctgggcgttaagttccccgggaaatggcagattacattctatggcaagatcatccctaggctgggaaaattgttggagtgcagagggctcccaagccccttctcatgcccagatggaaattccagtcccttcaggatctgcctaacctgygacagtctaaagagtctgagccgtggc

SEQ ID NO: 804092 - DNA, 603 bp, Homo sapiens
acaatttttcatattttagaaatgtattgcagcctgactaccctcctggggcaaatttgatattacatgtataaaccttacagctgaaaatttaataataataaaaaaaaacctgagtggcttattcatctgaaggccaaatggaactgcttgatcaagagatccaggtcctgatgtttttctttctttcttttctttttttttttcttttctttcttttttttatttttttgagaccgagtctcgctctgtcgtccaggcaggggtgtaatcgcatgatcttggctcactgcaacctttgcctcccrgattcaagtgattctccaaccttagcctcctgagtagctgggactacaggcactcgccatcatgcccagctaatttttgtatttttgtagagatggggtttcaccatgttttgaactaattcaattttaggctccaaatttgtatgtatcaaattagaagcagtaaagtacatggcagataactctgtcaggtaattggttatggacacatgtatctataagggaggcttagaattatagttctagccgtaagtcccaaaagtgcaaataggttttggtgaacacatagcagcct

SEQ ID NO: 804093 - DNA, 645 bp, Homo sapiens
ctaaatgttggaacattagaataattcttaaaacaggaacaaaatcaatgcttctatgcaacaatatagtggtggtcttattcaaaagagacaaaggtgtaagaatacaaaagaaaacagcaaacttttcattattatgaataatataattctctccttagatgattccatttmatctacaaataaaatgttagaataaataagtttattaagttatttcaatgtaaaattaatatgaaaaatttaattacatttttgtatgccagaagcaattagaaaacaagtattttatataggactatttataacatggaccaagactatagaatacccagcaatacaagtaactaatatgtgtaagactactggagagaaaataattttaaaattatttatagatatttaaagatgatcataattgagattaatatgttcgaaaggagaagaaaattcattttttaaattaatttataaaatttatgagattttagttaaagctcagcaggatgaagcttcccaattaattaaaaaatgtgttttgaaaagcaaaaggaaaacaatagaaaaaatattttaagctacaaaagttgagtgagataatctagttgtggatatacaataaatttatagtaattaaaaagtata

SEQ ID NO: 804094 - DNA, 640 bp, Homo sapiens
cctttgcttcacatcagctccatcaaatgtaatacctagttctcatcattcttcatctccgttgctattttgtgaaactaaatattcactacccacttacacttaatcttgtcaccatatttattcccttcacagcatttatcacaccctgaagggggtttgttaatatatttttrttaatgacatcatttacctattgaacactgattgtcttcctgttcacagagcttttccgaattcattataagaactcagcaaatcttgggtaaaccagtaaaaaacatccatcagtattagatggctacattacgcattaccagaagtcaggatttctggtaacatagcccgctttcgtttctcaacaatgtacattataaaaaagatgtaggcaaatgtttaattttactttcaaacttttatttaatttatactgggtttcatatataaaagaaaaataaaaaccatttttcattgctatttcatataaattgaaactatggaaaatgtaattccttgataatgtggtttattccctgaaatataatatttaattatgtaagtttgcatcagatacaacctgtctacactctgacttttctgaaatattaaaatatgccaacccaaatatgatattctcctg

SEQ ID NO: 804095 - DNA, 622 bp, Homo sapiens
gtagtgattaatctttccaatgaatttttctgtttttagcccattaattttcaataaacattaatgaagtacttatcatgtattagccactatgttacctccaaaaataaagatgatagataaacgatatttggtttcggcactcatttaatatcattttgtgtgtatatgtatgggtagacaaactaataacattatgacatggataatcacatgatcactagaagctatgtagtgtgtgagcccaaaggactgcaagtaaaaggtggtaatgaatatgcactttctcatccccccaataacatcactaacacccaaatccaacctctggggagttagatccatgaaggcaaggatgctttgattttacaatggttctactcccgggtccctaaaattaccaagcactgaacaaatatgtgttgaattaatgaaakaattagatttgaacaaaatttatattctcagtaaactcaaactccttattaaaagactcttaacaaaaacaaacaaaactatgagcacttgcataattctcagaaatactatttgtttccaaaagcttaaacttctaaataaaaaatgtatagaaagaaaacactgcgtaaaaaataattttttg

SEQ ID NO: 804096 - DNA, 624 bp, Homo sapiens
ttacattattactatattttttaacaagtatcttatagattatttaaattaaaaaatgtattttcactaatttcttatccagcatttttctttccatagtgcagatctaagtttctgactttaatcattttcaatctcaaagatgatttccttttaaaatttcctgctgagcaggtctgctggccataaattccctcagtttttgtttgtttaaaagtatctttggccgggcgccgtggctcacgcctgtaatcccagcactttgggaggccgaggcgggtggatcatgaggtcaggagatcgagaccatcctggctaacaaggtgaaaccccgtctcyactaaaaatacaaaaaattagccgggcgtggtggcgggcgcctgtagtcccagctactcgggaggctgaggcaggagaatggcgtgaacccaggaggtggagcttgcagtgagccgagattgcgccactgcagtccgcagtccggcctgggcgacagagtaagactccgtctcaaaaaaaaaaaaaaaaaagtatctttatttcaagtatactttagaaaaattattttactggcttgaaatccaaaattattatattttcttatttcaacactttatttaactc

SEQ ID NO: 804097 - DNA, 617 bp, Homo sapiens
ttgtcctctgcatcaaatcagggtgcacataatgtatgtttatccctttattggtgatattagctttgattatttgattagatagtgtctaccatgtttctctcctgctatcagttttccttgtgtaataagtaatatgtagagagatgcgtatttttaaactttttcattcccaacacattagttgccattgccatttactacaaggaagagctttcctttctccatcatttatgaatatgtattatcagtatgaactaatgaattctcttttttctttttcttttycttttcttttctttttttttttttttttttttgagatggagtctcgctctgtcactcaggctggagtgcagtggcgcgatctcggctcactgcaagctccgcctcccgggttcatgccattctcctgcctcagcctccccagcagctgggactacagcgcccaccaccacgctcgctaattttttttgtatttttagtagagacggggtttcaccgtgttacccaggatggtcttgatctcctgacctcatgatctgcctgcctcagcctcccaaagtgctgggattaccggcgtgagccaccatgcccggccgaattctcttttttct

SEQ ID NO: 804098 - DNA, 637 bp, Homo sapiens
cacagatatgtaaatgtgttaagtatatgtagtttgttgcaaagaactataatggggataaaaatatagtacgttgtaatgagtttgtgtgaggtggtattatggaaatagaagtttaaagagaaaaagtaatgatgcaatgtctaactgttaaagtaattttaagygaataatagtacagggaaagttgttataatgtttcagttctactgggtataagtaacactatttacttaaaatgtaaaaattgacaagatagtacaatagacatcttttacaaccgcttaaaacttatgatgaaaaatctaattgtgcaaagggtacacacaaatattgtgaagaccactacatccttttagtagctaatttagtgtcacgtatatagaagatatttaatgaatatttgaagaatttttaatataaaggaattatacaccattagctgccttcaggaaggagctatatcaaataatattttgatgaatcttcttgctccaaggtatcttaagtctctttactacccaaattggatatttgttcacatttttaaataataaactacaaaagggaatgcaattaaaaatggggcaaattataaagtaggggcaaaatggtttcaaatagacttattgtctgc

SEQ ID NO: 804099 - DNA, 565 bp, Homo sapiens
caggcatggcatataagcaagctttttttaaggctgagtgacttatgtggctgatagaggaaggataagaggaaaggaaatatagtgaaaaggaacagagaggaataataaagctggcaagtcacagacaacataattagactatcaaaagaaaatytggaagaaaggcatggacaggaataaagacctccttctaaagcaaggtagggagagcaacttgatgtagattgaagagaaaaaggaaagaaaaatgaatgttcatatttgatggcctatgattttctgggtcatgtagaaggcaaagtaacatgttcaagtgatgaatttggtaactttaggataatgatgacagttcagacaacaaatacagagaataaaagagaacactgactatatgaatagaaggattttagagacattacgactcagccgagtttaaatcaaagattgtaaggcattcagtcatcaaggttatacatttttctccagcagctctagccttctatgaaatagaagcagaaaaaaaacccaaaacagatgggttaactacctgtaaatctggatt

SEQ ID NO: 804100 - DNA, 565 bp, Homo sapiens
caggcatggcatataagcaagctttttttaaggctgagtgacttatgtggctgatagaggaaggataagaggaaaggaaatatagtgaaaaggaacagagaggaataataaagctggcaagtcacagacaacataattagactatcaaaagaaaatctggaagaaaggcatggacaggaataaagacctccttctaaagcaaggtagggagagcaactygatgtagattgaagagaaaaaggaaagaaaaatgaatgttcatatttgatggcctatgattttctgggtcatgtagaaggcaaagtaacatgttcaagtgatgaatttggtaactttaggataatgatgacagttcagacaacaaatacagagaataaaagagaacactgactatatgaatagaaggattttagagacattacgactcagccgagtttaaatcaaagattgtaaggcattcagtcatcaaggttatacatttttctccagcagctctagccttctatgaaatagaagcagaaaaaaaacccaaaacagatgggttaactacctgtaaatctggatt

SEQ ID NO: 804101 - DNA, 605 bp, Homo sapiens
tggctccatcattatagccctctcaggaaaaccataattgagacttagacatattaaggacattatcacaccattgatctagttaataacaattacaaaggaaacatcttaaaatacaatgcttgttcctgattaacgggtacattatgctttgattttaaaaaattgttttgaactttaaatatagctcttgtttgggggcataactataactcataatgtataatctttaaaagtactcacttcactagattatattgtaataaatatagataaattttactagtgtagactctcaacttactgtcgtataaacatgaaatcgtttttatcataagygtcctattatatcaacctcattttcccacttggtgacaggattctttgagcacaactcagcccttttacattttcttttcatttatttttagcaattaaaactatctttcagttatttaagacttggtccatttatttaaaaatttcagtctcatattcaatttatatctccatttacctttctacctcagttcccattccaagttaggttggtagcggagaagaggtgtggtctagctctcacaaactcccctccaccccttctt

SEQ ID NO: 804102 - DNA, 557 bp, Homo sapiens
aaaaaaaaaaaagaagaagaaagaaagaaaaagaaaaagaaagaaaaggaggacaacagaatctcaccaatgactctctctctctctctctccatatatgtatatatccttcctcttctttgaatgtaatccttcactcttttacctttgtctcatcccattatccacctcccaataatcyttatttgctgaaactggccttggatgatgatctacaaatataactaatacagaggatactaacaccttctaggaattatctgcagctctaaagattagtctaccaagtcaaaataatatctgttgggtggaaggtacagtggagacttttgagcaaaggattttattctgtcacagatattctaccaattcatttagtcttcctcagaaacaaaaataatttgtcccttttttcctttgtaagttgctctgccccacaagggttaattttaaaacagctatcattcctgtgggctaatacagggatataaatatcagtatcagttaaagtgaagacaattttaaaatgttggtagtcatgtatgaaggaatgagga

SEQ ID NO: 804103 - DNA, 622 bp, Homo sapiens
tgagaaaatacattcaaacttgttgatgtagtctagggtccatactaagagtttgacaaatggtagctattattgttattgttcaatgtgctgttttatcctttacttattaactccttgtttaattttttaagttttgagttaatgggctttgttagaaattgtaaatctaacacgttaagtaggcttagatattataaacccaatataccaaattggtgtccaaatggctcacaaccatttggagaccatactaaaggagtccagtaaggaactaatacgttataggtatcctaaaagagakagttattcaactggaaccctaagaggtaccatctctgacttgttatgagccataggtgttactcgaacggtccatacattgtgattcataattccaagtcctgcctacaacaaattatgtgtttattaaaagcatcaatatgtgggacacatcataggatctagcaaagagtaggtgtcagcagcataaggagacagagtttctggaagtttccctttcaattagtccactgatcattttttgaattcctaaatataaataaactgtaaggaaaaaatcaagaaaatagtttatagttcctgtcttcaaaattcttaa

SEQ ID NO: 804104 - DNA, 603 bp, Homo sapiens
agggtgtcgactttagatctttcctgctttcctctgtgggcatgtagtgctacaaatttccctctaaatatatttctattttcatacaataagtatagaatcttagcaaataatctttaaaccctagaattttaattaaaaagcccatctccataatattttaagtttctttctactttttgagaacttgatttattttcaataattaaagaatttatagttcataaatcattttaggcaatcatatgatgattttattcttatgaaactccgygaattagaagtcatggttgcaaatatagtttttagggccagattttcctaagtacaaattcctcatgtgctatttatacttgagtgactttgagctaagtacataactctcaaagaaccttacccatatgaagataatattggtacctttgtcaggcaattgtgaagattaccaagataatctatgtgaaaatgacctagataaaagagaaaaagtatgatatacattaatatcttttctgtgtgtgacttgatcaaaagttttatggatcagaagtaagagatatggccgggcgcagtggctcacgcctgtaatcccagccactttgg

SEQ ID NO: 804105 - DNA, 614 bp, Homo sapiens
tgaaagcagggattcttcaatttgctaatctcaagtgctctgttttccaatgaaaatacgaaattttgtcatctaaatgcccagtttatgcaaatgcatggattttccctgaagaacagcacattttatcatacagtaatatagaytcaagggcttcaatgtcagaaacaccttgttttaaatccgtaaggttcaagatactggaaacaatttcttttttggccaccaatataaacctaacctggatcttgacaggtacaaaatacatatttgttccctgcatgtctgattgatttgtgatccaccacatataagtaccatgaccttggtaagttacatcatttctctgagcctcaatgtttccatgtgtaaaataagaaaaataaagccatcttataggattgctgcacaatttaaatgagacagagtatgagaaattcctagcagatccctgccatgcagtacatatttgacagttactgcgttcattatttctgttgttattgaaaagatcagtttaggagggtcctactgaaaaacatttcagtaaatacttttcggaggacccgccccgaaaatcacgtaggttcttttctattttcctaagcgtcggc

SEQ ID NO: 804106 - DNA, 614 bp, Homo sapiens
tgaaagcagggattcttcaatttgctaatctcaagtgctctgttttccaatgaaaatacgaaattttgtcatctaaatgcccagtttatgcaaatgcatggattttccctgaagaacagcacattttatcatacagtaatatagattcaagggcttcaatgtcagaaacaccttgttttaaatccgtaaggttcaagatactggaaacaatttcttttttggccaccaatataaacctaacctggatcttgacaggtacaaaatacatatttgttccctgcatgtctgattgatttgtgatccaccacatataagtaccatgaccttggtaagttacatcatttctctgagcctcaatgtttccatgtgtaaaataagaaaaataaagccatcttataggattgctgyacaatttaaatgagacagagtatgagaaattcctagcagatccctgccatgcagtacatatttgacagttactgcgttcattatttctgttgttattgaaaagatcagtttaggagggtcctactgaaaaacatttcagtaaatacttttcggaggacccgccccgaaaatcacgtaggttcttttctattttcctaagcgtcggc

SEQ ID NO: 804107 - DNA, 614 bp, Homo sapiens
tgaaagcagggattcttcaatttgctaatctcaagtgctctgttttccaatgaaaatacgaaattttgtcatctaaatgcccagtttatgcaaatgcatggattttccctgaagaacagcacattttatcatacagtaatatagattcaagggcttcaatgtcagaaacaccttgttttaaatccgtaaggttcaagatactggaaacaatttcttttttggccaccaatataaacctaacctggatcttgacaggtacaaaatacatatttgttccctgcatgtctgattgatttgtgatccaccacatataagtaccatgaccttggtaagttacatcatttctctgagcctcaatgtttccatgtgtaaaataagaaaaataaagccatcttataggattgctgcacaatttaaatgagacagagtatgagaaattcctagcagatccctgccatgyagtacatatttgacagttactgcgttcattatttctgttgttattgaaaagatcagtttaggagggtcctactgaaaaacatttcagtaaatacttttcggaggacccgccccgaaaatcacgtaggttcttttctattttcctaagcgtcggc

SEQ ID NO: 804108 - DNA, 623 bp, Homo sapiens
tcttagcatattttccttacctttagtagctggagagactacctctagtaattgaaatgcatctcctcacaaggctgtctgtggaatggaatgcagtttttctgactcctcactttccgtaggcccatttccttttaaggttttgttgctgattactgagaagaaatagaagttaacacatgaacaaaatggagaaattaaaaatagttaattttataaattcttttagtcttgatgacccctcatccatagcacttgaatgcctctgaattggatcatttaagtcccgcacagtttctatcttcagatattagtctcttgtgtttggtgtcaccaaggctgtatttcttcacttcagtaaggatattgtgtccttacttctgtgatggcacctcttcccaagtggagggtgcaatctaaagagaacatttgatatcataatttttttctaaagtttaaaaccgygcacacacacacacacacaaaaacccagccactgggagatcaagaagtctgaccttaggtctcactgaacacatttactgctgtgttggataaaatttggcttaatattttcccaagatgctgtgatacagaacatactgggaaaacttgcagtttgt

SEQ ID NO: 804109 - DNA, 543 bp, Homo sapiens
actgaatctgaggttatgttatcccctgaaatcttctgtctccatttcaaccccatctcattactgattgtcatgtaccaataaaacatagttttggaaaattggccacatcattttattatggagtctggcaactttagatagctctaaaagatgtaacagggcagggaagtaggagaaggtggtacttctcagtcctttaaccacagatcaccccagaggaacccagttcacattttaggggactttatatgacaatkatcctctggtcctggtcctgttccacatggagaagcagaatgagacatgcttgcggtgatttgtagtatttgccaaacagggtgctgcaccagtatagcctggaatatagtgcagagctcatattaaacctcccaaggaagaagggtttcctcttcatttacagtctgcgaagcgatccccttgtaaagtatttaataggataacaccggggctctccagaaatataagtaactcattggtgtaaatttcaatttttcacctttccccccctccttcctgagt

SEQ ID NO: 804110 - DNA, 543 bp, Homo sapiens
actgaatctgaggttatgttatcccctgaaatcttctgtctccatttcaaccccatctcattactgattgtcatgtaccaataaaacatagttttggaaaattggccacatcattttattatggagtctggcaactttagatagctctaaaagatgtaacagggcagggaagtaggagaaggtggtacttctcagtcctttaaccacagatcaccccagaggaacccagttcacattttaggggactttatatgacaatgatcctctggtcctggtcctgttccacatggagaagcagaatgagacatgcttgcggtgatttgtagtatttgccaaacagggtgctgcaccagtatagcctggaatatagtgcagagctcatattaaacctccmaaggaagaagggtttcctcttcatttacagtctgcgaagcgatccccttgtaaagtatttaataggataacaccggggctctccagaaatataagtaactcattggtgtaaatttcaatttttcacctttccccccctccttcctgagt

SEQ ID NO: 804111 - DNA, 530 bp, Homo sapiens
ctgttacaggggtgagactgttatacctgggaaattcacagctcacttcattattcacttattcagaaatactcattgcaaacctattacgtgctgcactcttccaggcacctgggatgtggcagtgaaggagacagaccagctgtctttgggcttcctcctgatgctcacgttccagtgcagtcaaratctttaccaccatcgacattctaataataaacacaactcctacgttcacagagcttcagagtttacagagtgtgttgatgctcattagcctacttgatcctctccaaaaccgtgggcagtaagaattattattatcatctttcataaatgctcacaatgacattttttttctcattttaacatctctgtcatcaggtgggtcttgcaggggatggcatgctgtaatgaaattggtggcccttattttctttcttagtgttaaataaaagaatggtaggtcttacaatccatgccttagatttaataaaatacaaaactatccctgttttgcagatgatgaa

SEQ ID NO: 804112 - DNA, 530 bp, Homo sapiens
ctgttacaggggtgagactgttatacctgggaaattcacagctcacttcattattcacttattcagaaatactcattgcaaacctattacgtgctgcactcttccaggcacctgggatgtggcagtgaaggagacagaccagctgtctttgggcttcctcctgatgctcacgttccagtgcagtcaagatctttaccaccatcgacattctaataataaacacaactcctacgttcacagagcttcaragtttacagagtgtgttgatgctcattagcctacttgatcctctccaaaaccgtgggcagtaagaattattattatcatctttcataaatgctcacaatgacattttttttctcattttaacatctctgtcatcaggtgggtcttgcaggggatggcatgctgtaatgaaattggtggcccttattttctttcttagtgttaaataaaagaatggtaggtcttacaatccatgccttagatttaataaaatacaaaactatccctgttttgcagatgatgaa

SEQ ID NO: 804113 - DNA, 530 bp, Homo sapiens
ctgttacaggggtgagactgttatacctgggaaattcacagctcacttcattattcacttattcagaaatactcattgcaaacctattacgtgctgcactcttccaggcacctgggatgtggcagtgaaggagacagaccagctgtctttgggcttcctcctgatgctcacgttccagtgcagtcaagatctttaccaccatcgacattctaataataaacacaactcctacgttcacagagcttcagagtttacagagtgtgttgatgctcattagcctacttgatcctctccaaaaccgtgggcagtaaraattattattatcatctttcataaatgctcacaatgacattttttttctcattttaacatctctgtcatcaggtgggtcttgcaggggatggcatgctgtaatgaaattggtggcccttattttctttcttagtgttaaataaaagaatggtaggtcttacaatccatgccttagatttaataaaatacaaaactatccctgttttgcagatgatgaa

SEQ ID NO: 804114 - DNA, 612 bp, Homo sapiens
tgaaaataaatacaataaatttattcttattctacgtgtaaaaaaaaaaaaggtatgggagtcatttccaatataggcaaatccataaagataataaaaagattgctgttgccaggcggtgggagaaggggaaaatggagaagtaattgcccaatgtttataggataatgaaaatgtgctggaactggagatagaggctgcatagcattgtgaaggcatgaaagactacttaatcgttcactttaacagaactaattttatgttatgtaattttacctcaaaaaatctttttaaaacttagaggatgcaaccaaatccaygcgtaaatgatgattaataacctaaattcatataattaaaaagaacaaagactgaaagtccattatctaagtatctatgtcaagacattataaaaataaagcaaattaatcctaaactaagaaattgaataaacaaaataataaagataatgacagaatcagaaaataaatacttaacacagtaagagtcatagccaaacactgtactttgaacaattaataaaattgatagtgttctggtgagaattatcaagaaaaaagagtgcatcgatatcctgtaacaaatgacaag

SEQ ID NO: 804115 - DNA, 668 bp, Homo sapiens
tccaccaggatcctcaggtatcggcagtcctgctgggacaggccaggtcatggagaccacgcagccatggagggcgtctacccgacaacccgttttttcactgagtcccacatggagagacacatgggagaacaggaggctccagggcccagcagtcttcccttcacctaaggactgccttgtgttcctatagtcaatcttccctttcccctctgctgatcctactaggaaaggcagagagactcagctgtacctttaaccaactccaaaaggcacagaaacccaaccaggggctgaggacaggctcaggacttggtgaggaaatcccctcccctccagcacacatgcggtagctcctgaggggccagggcctgggaggcactttggcttccagccctgcacacttcctgccgccgccccaggtgagcagcagcaccagcagcaggggtggagaagggaggcygactgtctcaggaccaggctccgtctgcatttgaggggggtcgagggcatcacctggactctcaaattacataccctgagttcaggaatgtgcaggtccttattattctcattcagaatccctatcattgtctcatccaaaaacacctgcaaaagaagagccggcgtcagactgctaggcccacccgaagaaagggagaagagag

SEQ ID NO: 804116 - DNA, 619 bp, Homo sapiens
tatagtacacattaaaaaaattagttgttgcctttattgttagaaagataggcagaggctagaatggtgaatagccttgtgtgccctaccaatgagttcttagtattgtggtatttattaatgaggtatgattttgttttatgatctcatgcatatttgcatgtttacagtctaggaactttaaacagttctttaaatgccaaagtcctaaacagatgttagctgttagcttcctcattaataaaataagaagaaaaattatgctctgagaggttaaatgacttgtttaargttacacagtcagtggaaaagtctgggttacagcccccaaattctaatttgtcatccccatttatatcctttttttaaattgtaaaatatgtcatatgtataaaagtatatttaacataaacccacaacttaaagaataacaaattgaaggcttttctacttgctacccagcttaacaaaaaggagatttctagtacctttaaagcctcttgtgaggtcctacttgattgaatctcccatcttctctctccctcagagataaacagtttcctaaattttatgtgaatcatttctttgcttttctttatacttttaccaaatatgtgca

SEQ ID NO: 804117 - DNA, 642 bp, Homo sapiens
ttcttttacagaaataaaatggatatcaatccagtaccttttttgtctctggcctggccgaggagaccacgcagactcttatccggaaatagcattcggggcatttgatcaagacacactaataaacttgatagttttgtgcattttctttccctctgtttggaattctcattagatccacattttcctggacagttgtacagaggactaaaatagctttcctttagtgagcttgtactgtctactaggcactttggagccattatctcgtttactcctttcagcagctctgtgagataggtttcattaatccattttcagagtcaagtctagtctgctttccaaggctgcattctaagtagtgaagcctcaacttcatatttacctaaagcaggacaccacactcttcccctggcagccatccgcasgtaaccagaccaggacctttttcggttcttagattattttattgtttgaattgccactgtcatcccatgatgttttccagaatatacaaattaaaacacggagggactgtttaggagtgaaggtggacagattttggaaaacaaagcattcctgtgtttggtgctttatgctaatgggatgctcgtgatgggctgtgacaaaagatgagtttta

SEQ ID NO: 804118 - DNA, 521 bp, Homo sapiens
tccatctccccaattctctatgaaagggcagatgcaaagaacatgcaaagaagtgccccatttctgtcacctggaaagccaaatccagcgatttctgccatgatggtaaggtgatttccactggacactgaggttttaccccaagcatgtcacatccttactccactacagaggaggtatagaaaaggacccatcatggaggcttaaaatcagagcctctaaactccagctaattttcttcctcaaggtttcattagaagaggttttttggtgtttttttttaatgtgagctaaaagatgctgttcacacattagaataatgacaaccaaagtwttaacagattttacttactctgcatgtaggaaatgtacttgacaagaaacgcacacagagtaaaatctgtgagttcaggagagagcaaaacaaaaacactcctcctcaaaaagttacctgactccaaactcacttgaaggaatgttttttgcaatttgcaaacagcatgtgggatactagccccagg

SEQ ID NO: 804119 - DNA, 541 bp, Homo sapiens
atgctgctatcagtatttgtttacaggtttttgtgtgaacctaagttttcatttctctgggataaatgaccaagagtacaactgctgagtcttacagtagttgcatgtttagttgtttaaaaaaccgacagagtgtttttcaaagctgctttacgattttacactcctaccwgcagtgtattttcccacatccttaccaacacttgttattgtctgacttgttaagttctagccatcttagtgggttggaagcggcgtcttgtggatttgatttgcatttcctggtgactaatgatgttgagggtcttatttgtgtattttctttggagaaatgtctgttcaaattttatgtccatttaaaaatatttttttttctagaaacaggatctcactgtgttgcacaggctggacatgaattcccaggctcaaataatcctcccacctcagccttctgagtagctgagactatatgtgtgcaccactgcacccacccttatgtccagtttttaaattaggttgtctatttcttactgaagtgtga

SEQ ID NO: 804120 - DNA, 625 bp, Homo sapiens
gaaggggatttgagggacccatttagatccttttctcactgtctcgccctctctctgatggtggtattgaggataagacagtatttgtcatctgtaattaactgtactgcatttgtaaggcaagttgtgctgtacttgatttttatgtttctttcaagatttctgccctttgcctcctgtatttttctatttatttgtttatttatttagggacagaatctcgctctgtcrcccgcccaggctggagtgcaatggtgcgatctcgggtcactgcaacctccacctcttggtctcaagcaattcttctgcctcagcctcctgagtagctgggattacaggtgtgcgccaccacgcctggctaatttttgaatttttagtagagacggggtttcaccatgttggtcaggctggtctcgaactccagacctcgtcatccgcctgccttggcctcccaaagtgctgggattacaggcgtgagccaccgcgcccggcttgcttcctttatttttctaacctcatcattttctgctttgctcagtggagattttccaataatgtcacccaaaatatacttttaagtcaatgtgtgctattttttaagtcacttctgactttaatgttagac

SEQ ID NO: 804121 - DNA, 625 bp, Homo sapiens
gaaggggatttgagggacccatttagatccttttctcactgtctcgccctctctctgatggtggtattgaggataagacagtatttgtcatctgtaattaactgtactgcatttgtaaggcaagttgtgctgtacttgatttttatgtttctttcaagatttctgccctttgcctcctgtatttttctatttatttgtttatttatttagggacagaatctcgctctgtcgcccgcccaggctggagtgcaatggtgcgatctygggtcactgcaacctccacctcttggtctcaagcaattcttctgcctcagcctcctgagtagctgggattacaggtgtgcgccaccacgcctggctaatttttgaatttttagtagagacggggtttcaccatgttggtcaggctggtctcgaactccagacctcgtcatccgcctgccttggcctcccaaagtgctgggattacaggcgtgagccaccgcgcccggcttgcttcctttatttttctaacctcatcattttctgctttgctcagtggagattttccaataatgtcacccaaaatatacttttaagtcaatgtgtgctattttttaagtcacttctgactttaatgttagac

SEQ ID NO: 804122 - DNA, 533 bp, Homo sapiens
gatttgtgggtctatgcccttcatcaaatttggggagtttattcttcattatttctcaaaataatctttctgcccagtatttctcccccttctaaaactcccacaatgcatatgatggtccacttattagtcccatgagtcgcttagactctgttcacttttcttccttcctttttctttttgctcctcaaacttgataattaatygtcctaacttctactttgctagttctttcttctatctgcatcaatctgctgttgaaaccctctagtaaatttttcatttcagttattgtattttcagttccaaaatttgtttcatttctgtaatttctatgtctttattgatagtgtccttttcttcagggactgtttgcctgattgcctttagttctttgtccatgttctccccttaggtgtttgtgcatattttaaacaaatagtctttggctaataagtccaatatctgtgctgcctctgggacagtttctgtcaatccctttagttcctttaaatgagccatgttttcctgtt

SEQ ID NO: 804123 - DNA, 458 bp, Homo sapiens
cagtgatccttcctatctctaaataagcttagatcatagtctctagttcagtttagtacaacagccatttattgagtatctatgacgtgtcaggcactgttctgtgtgctagggttgcaaaatgggtaaaacatcgccagtccttaaagagccagggtaattgactccgatttacattgggctttagttgttaggtgtcagtgcattgtattttctcaatgataataaacattttgttggtaacagaggctgaatttaatttttttgtatctttccagaggtgattctagtaaatwttcagtttatctcactttgtcacttgaaagtgagttaacatttcttaaacactctctttgtgtcgaggcatttttaaaaaaatgtcttatttctagtggccctaggaacttctggaaaagtgtcagtttgtactacagtagttattctggaagaaagagaat

SEQ ID NO: 804124 - DNA, 490 bp, Homo sapiens
atttaagtgacacaagctgcaggtatactagtatatactgtatgattacgattacacaaaacatctatgcttaggggaaaaaacaggatgagaatgaaccagactgttgataggggctgtttatgagtggaagtgttacagcaaattgttttctgcttttctttgtttttgttttcctggttgattcttgtattyctttgtctgttttccaaatgttctttgatgaggatattttttgtgtaatgaaaaaagttgcatcttggtttggcttccagtagatacaatagtggaattttaaatttggcactagtaatgggaaaatataatttgtttgtttaatgtgatagcatgtggattgtgcctttttctagcttcttaatatcagccacattggatgaaggagtggctgactggaagttcagttgcttgataatgtattgtttgtgactcatttgagagattagttgccactgacttttgggtgggggag

SEQ ID NO: 804125 - DNA, 571 bp, Homo sapiens
accttcattgttacatccagaaaagttcttttctaaaaaccattatcccctacagagaatgggccactcaagacagaccctgaaaatataatctattaatatcatgggaattagagtcatttacacacagaagtcctctgccctctggccaagagtctgcccggtgatcctgtccaggagggctctgggctgtggtctccacaaatgccactgagagcttcccaagaatgaatgtggatccgggaaagaataaatgaggcacatatttaacaagctgtaaacacagttatcagcccaaaggcttaggaaaccagggcaagtctgatgaaaatcaggtggccattagggaagagacttatttgtgaggtccccaggcttagttacgcactttggaaggcctgtggcaaactgcmggccatggttaactctgggaggtaggatggggcaaggagagtcctttcatcaagcacccatctgcacatgtgaatttttacctcacgcaggggctacttaaagagtgacagaacaactgccaccacaagtacacggcaaagataaaacgcttcagatc

SEQ ID NO: 804126 - DNA, 387 bp, Homo sapiens
aaactctgtctcaaaaaaaaaaaaaaaaaaattgtgtgatgtagctgaagtcgtgcacagaggaaatttataacattaagtgcttatattagaaaagaaaaaagtcttggataacttatctaaattttcactttaagaaactaggaaaagaagcggtaatkaaacccaatgcaagcagaagaaaagaaataataaagatgaagcataactcaatgaaattaagaacataataatagagaaaaaccaaaactatccaaagaactcagcagcaacaaaaaccccaattaacaaatgtgcaaggacttgatagacatttctccgaagaaaatatgcaaatagccaacagcacatggaaagatgctcaatgtcactcatcattaggaaaat

SEQ ID NO: 804127 - DNA, 451 bp, Homo sapiens
cttatggaaaaataagggttggcacaaaatggggtgatgatgatgcttcgttcaaccttacctgcacacaatggtctactggaaagggcacagatatggcaactcatcccccaatccagcatgtaggttctctccactctgcctacactatcccatcaagagaaygagctactcacttgaccaggactcatctggagcctgtttcaataggctaccaaggagaacagatgttaaagaagaaaccttcaccaacttcccagtagtcaaatgcataaaatgttcttcttcttggctcctaagtgctcctacagaatttctataccaatgatgaaaatattaaaagtataagatgtcctaatgtgtcttaagaaagatcaatcttaacactgaaaatgttgtgaactcgtaaccaagtttcatttcttttttcctccatggaaatctctcctgg

SEQ ID NO: 804128 - DNA, 608 bp, Homo sapiens
caacattattatctaacctgacattttatacagagaaacatattttaagccataaagttgcttttataatttactttaacgtactttaaacttccttggtttttgctaaggattgaatcatggagaaacgatgctattcacatttaaatgtcagatatgttacactyttagaaacttaggcaactgatttgactggaaggtcccggcatcaccttcaggatttttattgtcttttgttttgctagttgcttataatgtaagaatttgctacacttgtgaactttatctttgagcgtcagtgggactttctaccccttaatcccagcccttcccttgaagctgagcccagagacctcatgctcgcacgctggtctgtgaggccccacacagaggaaataggtgtgtgtttcttctcagtttgcacagcagatcactgggatgcggttctgtgaagcaagtgccaaggataacttcaatgtggacgagatatttttgaaacttgtcgatgacattctgaaaaaggtaaaaaaaagaatctacattataaaagtatatcatctgaaacctgttgtttccttatgcttttttattgagaattttgtatttag

SEQ ID NO: 804129 - DNA, 505 bp, Homo sapiens
acgtattttataccatgttcttaaagtaagctagagaaaagaaaatgttattaagaaaatcataaggaagagaaaatatatttactattcattagtggaagtggatcatcataaaggtcttcatctgtgtcatcttcacattgagtaggctgaggaggaggaggaggaggagggattggtcttgctgtctcttccgggtggcagaggcggaggagaaggtgagtggggaggcaggagaggcaggtgaaacttgtattgaaaagcagctgtgtataagtggacctgtgcagttgaaactcatgttcaagggtcagctgtatgtgtaccttgtaaagttwaaacggattttttttgtttgtttatacgttagatgcctctggatattttaaggaatgagttgtccaatagtatcctgtcgttacaaccagagcctgagataccgccagaactgcctccaccaagaccacatgtccgatgctgttgatttcctactttggagacaaat

SEQ ID NO: 804130 - DNA, 517 bp, Homo sapiens
tgtattattaacccaactttgcagatgagaaacctgagctcagagagatcacatagctgtaagtggccgaggaggatttgaagccaggtctgtctgaccccacaactctagttctcaatcagtacactttactgcctgtcacgtgagacaggaagcattgagaagaaagatttttgtactttaaacctgggccaacccatcagttcatgcagcactcttcccagggttgagcaccckcaggtcaggaaggtggaaagaagtgtgttggagagaaggacaggggagtgaggacagggtggggagatcctcttcactagttagtaaaaaataattacagccatctctgaggtacatcctttgagaagcttaaggaaaccatcctctaatatatttacacccctatgaccagtcagttctttcaactttaaatccatcatgaatttcggagacttcaccgcctgtgttctataagccactaagaatgtggacttggagacaagtacttgagggtcattga

SEQ ID NO: 804131 - DNA, 624 bp, Homo sapiens
tcagtttactgtttctgccccttaagcctggggaacaacactggtttcttttgcctgattcaaatgcccatgttggttgttctagacattcctgggctgggcagggctggttagcagaggtgccatgcattccaagtgtccagcagttgttaaatcaagtttgggttttttttcttcctgcagtacactaaatgtatggaattatcctctctyacagtcagcacacctttgttgctgtcacgtaagtaggcacagtaaatataaatggaaaagaataaactccctctgttgggtcaacaggtttgttgagtagaaattaagagaaagttttaccgcgtcagccagcatctgctgctggagaagaagttgctgtttctgctccatgatctgcctctgtagagtctgcttctttcccatcaattgctgattcaacagtgattgctgggagttcatgtaaccacttccagtgtttggatttgagcaggggttaggacttggactggggcctgtgttctggcctaccacagagtgttgatcctaaagaagagaaagggggaaggaaaagctactgtgaattaaaaaaagaaaaatgtagcacaaagatcatacactcagattccaaac

SEQ ID NO: 804132 - DNA, 624 bp, Homo sapiens
tcagtttactgtttctgccccttaagcctggggaacaacactggtttcttttgcctgattcaaatgcccatgttggttgttctagacattcctgggctgggcagggctggttagcagaggtgccatgcattccaagtgtccagcagttgttaaatcaagtttgggttttttttcttcctgcagtacactaaatgtatggaattatcctctctcacagtcagcacacctttgttgctgtcacgtaagtaggcacagtaaatataaatggaaaagaataaactccctctgttgggtcaacaggtttgttsagtagaaattaagagaaagttttaccgcgtcagccagcatctgctgctggagaagaagttgctgtttctgctccatgatctgcctctgtagagtctgcttctttcccatcaattgctgattcaacagtgattgctgggagttcatgtaaccacttccagtgtttggatttgagcaggggttaggacttggactggggcctgtgttctggcctaccacagagtgttgatcctaaagaagagaaagggggaaggaaaagctactgtgaattaaaaaaagaaaaatgtagcacaaagatcatacactcagattccaaac

SEQ ID NO: 804133 - DNA, 616 bp, Homo sapiens
ttgcccacattcagtctctagctgcaaatatggatctgtctgggttcagagttccgacaggtaaagggaaggtcaccttgcatatctatgaggtgaactgcaagcaactgatcaacaaatttagtctaccaatttgtagcagagaaccaagattttcatcaggctaaagagcttcaagtaacaaatcccacagtaaatcgtcctgtttgacacaaagtgagtatgacaagcagaaaaaaaaaatacatgactagtgttttcctttaagatgtttcagttgataaatttaagagttgcttaactccaaatcccccaccctacccatgactttggtcatcggtaacagagatttagctgttctggaatgagaacagacattkgtactgtctattatagatggaagagttaaaactactctgagttgagaatacatgccaacacactggatgagacaacgagaatcagaagaaccttagaagtatgtatatcaaatacaagttgcttcccaaaattaacatcttgagaaggagctcactttctttaactgccttcagagaaagctcacacaccacacttgcaatgcagccttgtcacatcatagttaccccttggtttt

SEQ ID NO: 804134 - DNA, 610 bp, Homo sapiens
cttggtgggaagggtagagaaggacactggggagctgatttgaaaagggtcactggggcccataagcatatgtgacagtggttggatttagttagccctcactgtccctgtctatctgtcccccgaatatctgtagaggaaatagcactaggctaagagkcaaaaaacatgggtttgagtgctggctctgccacttactttctgtgtgaccttgacagatcagttaacctctctgagcctatggaaaatgaagctaattatatgtgtctaatgtggcccataatgaggctgactgggatctcactcacaaggatcagatgaaaggatgtttgaggaagcacttggcccattataaagtgttttttacaggtaaggcagtattatgacaatgaggatgtttggaacagatgggcagatggactaggccagtagacatgacgcttaacctcaaaaccagtgatgatggtatctttgtgtttaaatagaaccaggcaattgtcacattataaaaaaatgactgctaaagatactgtatctgaagaaggtaaggcatgcaggggatccccaagactggggctgggtagagctgagcaagattcagtgaggaaaa

SEQ ID NO: 804135 - DNA, 610 bp, Homo sapiens
cctgctttgacattttttattaaattgttttacgtttttgaggagactgaaatggaaccaaggattctaggacaaaaacaaagataatattatttttgtaaaggcatgtgggattgctgcaaaattagtgcaaatctgttcaaatcggatagcagtcgtccttcctggggggggcgaaaagaaaaccatgggcccctactcccacctcccacttccagtcgcggtctgcttctgacttttctggagttctttctacctgaagacccacctcgacaaactcactttcctagacaggagatggctttggggtatcagggaaagagagaggccggggcattcctaacctgasgtaaggccctgctgattgaagagtcagtgccagagttctggctcagccgtcaggttctgggatgagacaactttcatggggcgactgcttctgaccccaaaggggtcgagatcagaggggtgggtgctatacagtcgcagactctggagtaagcagaatcaagaattgaaatatttcaggcagagcttgttcaagggaacccgagacattgtcaaggggtggggggcttgttccaagcctccttcctcagtccaggcgcct

SEQ ID NO: 804136 - DNA, 562 bp, Homo sapiens
gtttttttgtttgtttgtttttaatctggagtctcactctgtcactcagtttggagtgcagtggtgagatctcagctcagtgcaacctctgcctcccagcttcaaagcgattctcctgcctcagcctcctgagtagctgtcacctgccaccactcctggctcatttttgtatttttagtagagatggggtttcaccatgttggccaggctggtcttgaactcctgacctcaagtgatccacttgcctcggcctcttaaagtgctgggattacaggtgtgagccactgtgtccagcctgaagaagagaaaacactttctgttccactggaacaggatggtggagctatgctactttactatttgcygaacacatgtcagatcatgacagcaagaaggtcctgcacttgggataataagtggggctgtgtagactgtaacgaaaccatcatggcagacaccgttgcttacctagtcaatatccatgcagtccctcttcttgcttgataatgcaactgcagttttgttggggtggttgtggatccagacatgacaacgggtcata

SEQ ID NO: 804137 - DNA, 632 bp, Homo sapiens
tctaagagccaggaaggaagttaagtggagatgtggttagaatcccacctctgcctctgtcaagcctttaatgggtggcactaaccctgcagttcctctggggtggtgggtttactttgggttactagtttggcatgggggagtgrgttgggtagggcaattctagggtcttctacttgctactggctcctcccttatggccataggatacctcactctgtgagctaggaaatagatatgaggatctcggcagttttttggttgttttttttttttttttcctggagacagagtctcactctgtcacccaggctggagtgcactggcgcgatcttggctcactgcagctcagatgtgagggtcttttaattactaaatatatctattttaaatatacctcctgaggctgggagccacaaaatgaatccatgatcccactggacttagaccaaaactcccgcttttacctgacttccataagcacattctgattagtgaaccaaggtaggatttcagggtttaggattagtcagtttaattcctttcttactgccttaaagaagggagtatcctctgggccttcctggggggatatggctaggaggggttaatcaagctgcatataatagatc

SEQ ID NO: 804138 - DNA, 632 bp, Homo sapiens
tctaagagccaggaaggaagttaagtggagatgtggttagaatcccacctctgcctctgtcaagcctttaatgggtggcactaaccctgcagttcctctggggtggtgggtttactttgggttactagtttggcatgggggagtgagttgggtagggcaattctagggtcttctacttgctactggctcctcccttatggccataggatacctcactctgtgagctaggaaatagatatgaggatctcggcagttttttggttgttttttttttttttttcctggagacmgagtctcactctgtcacccaggctggagtgcactggcgcgatcttggctcactgcagctcagatgtgagggtcttttaattactaaatatatctattttaaatatacctcctgaggctgggagccacaaaatgaatccatgatcccactggacttagaccaaaactcccgcttttacctgacttccataagcacattctgattagtgaaccaaggtaggatttcagggtttaggattagtcagtttaattcctttcttactgccttaaagaagggagtatcctctgggccttcctggggggatatggctaggaggggttaatcaagctgcatataatagatc

SEQ ID NO: 804139 - DNA, 523 bp, Homo sapiens
ccttagcaataaaaatacgcagcaaactaggcatagtagggaaattcctaaacctgataaaggacatctactaacaaaatccacagctgacatcattcttaatggcaaaatactgaatgctttctctctaagatcagaaataagacaaggatatctgctcttgccactgctattcaacattgtattctaggatctagtccgggaatttaagcagtgcagtgaagtaaagaataaccagattggaaagaaataataaaactctctctatttcttagatggcatgatcttgtatatagaaaatcataaggaaktcactgaaaatattagcattaataaacaagttcaactaggtcacaggctacaagatcaattacacacatcaatagtatttccatacactagcaatgaacaatctgaaagtgaaattaagacaataattccatttagagtaacatcaaaaagaatcaaatacttaagaatatatttgacaaatgaagttcaagattgccacatacattattaa

SEQ ID NO: 804140 - DNA, 512 bp, Homo sapiens
catatttttaaaccaccagatcttgctcgaacttattcatcaccaaggagatggtgctaaaccattcatgaaaaatctacacccatgatccaaacacctcccagcaggccccaccaacataagatttggaggaagcatgcaaactatattwctggggatcacttttttttttttagatgaagtcttcctctgtcacctgggctggattgcagtgacgtgaccacagcttactgcaccttcaaacttctgggcttaaggaatcttcccgccttggcctcctaggtagctgggaatataggcatgtatcaccatacccagctaacttttaaactttttgtagagatggggccttgccatgttgctctggctggtctcaaactcctggcctccagtgatcctcctaccttggcctcccaaagtgctgggattgcaggtgtgagccactgcacccagacaatatcctttcctttcctatccaaataagaataatctatcctcatcttgttgtttgt

SEQ ID NO: 804141 - DNA, 594 bp, Homo sapiens
ttctgtatcttcgattctagccatccttatggctatgaagtggtatcacattgtggttttgatttctgtttccctgatgatgaatttcattgagcatcttttcatgcgcttattggccacttgtttgtcttccttggagatgtgccatattttcatattcaaaaatgaaagcacaggtccacacaaaaatttgtacatgaatatgaataattacaatagcatcactcctaataacccacagagggaattaaaccaaatgcccatcaccagatgaagagatacaccggttgttgtctacccacatggtggaatattatttgatcacaaaagagaggagagtacatactctacagcstggatgaaccttcaaaacagatgaaagatcacattctacatgatttcattcagatggaaatctatagaaataggaagttgattagtggttgcttagggctggtaggggcatgggaggatagggggtgttagccaaagggtatgaggtttctttttgaggtcatgaaatgttctaaaattgactggtaatgtttgcatatatctctgaatatattaaaaaccattgaaatgtaaaaaatg

SEQ ID NO: 804142 - DNA, 551 bp, Homo sapiens
gggctatggaaaccccctgcggtcctgggagtaatatcatcctctctccctctgaaaataggaagattttcacaggggtgtgtacaccccctgcgatattgggagtaagatcatcctctccacccaggaaatgactaacaaggtcacgagggggtgtactccccctgcgatattgggagtaatgtcgtcctccccaaacctggatgttagcaacgagctcacaaagggggtgtacacaccctgcgacattggaagtaatatgatcctctscccacctggacactgggaaagataccacagcgcgggtatacgtttcctacgctgttgggagtaatatcattcttttcctttctggatattagggagaatatcacaggggtgctgtacaattacttcgacattgggagtaacatcatcctctagtttcctggatattgggcacaaaaacacaaaagggtgtacaacccctgcgatattggaaggaatagaatactctccttccctggatgttagaaaacaatatcaccatggctgaacaccccccaccataa

SEQ ID NO: 804143 - DNA, 551 bp, Homo sapiens
gggctatggaaaccccctgcggtcctgggagtaatatcatcctctctccctctgaaaataggaagattttcacaggggtgtgtacaccccctgcgatattgggagtaagatcatcctctccacccaggaaatgactaacaaggtcacgagggggtgtactccccctgcgatattgggagtaatgtcgtcctccccaaacctggatgttagcaacgagctcacaaagggggtgtacacaccctgcgacattggaagtaatatgatcctctccccacctggacactgggaaagataccacagcgcgggtatacgtttcctacgctgttgggagtaatatcattcttttcctttctggatattagggagaatatcacaggggtgctgtacaattacttcgacattgggagtaayatcatcctctagtttcctggatattgggcacaaaaacacaaaagggtgtacaacccctgcgatattggaaggaatagaatactctccttccctggatgttagaaaacaatatcaccatggctgaacaccccccaccataa

SEQ ID NO: 804144 - DNA, 523 bp, Homo sapiens
gctagtactggccaagaggctgggggcagaggtgcagtgtgagacttctagcctggagcatttaattcttagtacaaggctccctagcattcttctcccgctgttccctgcttggtgatactcgaggtaatgcagcccccattagccttagtcttagagcaagtttgatggaaaacagagcaccccacacctccctgcagatgtagcatgagtgagaaaaacaactactgatgtttgaagttaccaagatttaggagttgtttgttattgcagcaaaacctcacctattctgaccaatcatggtggaatttctgtgtgtrtgtgtgtgtgtgtgtgtgtgtgtgtgtgtgtgtgtgtgagagtggtagtaaaaaagagttccttcttcaccaaaaagaaaaaagagtcagcacctttatgtgggttctcatattaataaaatatttttactggtttataaaatagaacatctctgagaatctgtagcttacagaactacagtgtgggatgtctataaagacca

SEQ ID NO: 804145 - DNA, 584 bp, Homo sapiens
gccctcctgtgcatatagctcacaatcttcccatgcccaggtatcaccagaccctcagctgatagaaaaatgcaagttagctcactgcaaccttggcattgtaggtattgtatgcagccctcttcagcacatggcccaggaaccatcctgtaaaatcccctgcaagcctttgtctccttgcagtcagctcctcttctcctggcctgcccattgccttcttgcaatgtacttycttcctttctttaataaatctgcctttttttaaaacctacaagtttcttggtaaactcttttacccctgtgacaccagcctcagatagtcgccatcacccaccatagaagctactcctggagagctgattatttttaatttgcagataatttattcgtgtatttttcaaatacgtattgcgactcctcttctggttctgatggaacagctcatatttgagctacagaatcactgagaacaagtaggaaagccagaaaaaattaacacaaaacagcagttgaaagcactagagagaaacccaggtgtccaggacaggaggtgcctggatcctggtgagaagggaaatgaatgc

SEQ ID NO: 804146 - DNA, 662 bp, Homo sapiens
tggcgcctggccttggggtgcttggacgggagctggggagcccctacgatagggtggaggggtaactgaggtcctccacagccaggtggcgagaaggccgagcggggcagatgtgagagggtctgagacgcagcatgacagggaagagaccagccaactctaaaaatagctttgggagtagaatttcaagcatggtgactgcttggatggacgaagggctgggagaggcatagagagaaaggaggagggaaggggggctcccttgttcctgagccagtgcagagtcctccaggacccacttctttctgtgtcctgcccaccctgtgacctggccagctgcasgttttcccagcaggcttgaagccacgctgtgctgtgaacattcccaggccctgaacactgagaaaggtgttcacgttgatgcccaaaacagtgaaatctcaaacacgtggctaaacatgcagaagctatctcagaccctgaggctaacccctcacagccccatgtgagctccacggcctgggccctcgctgcagacatgcctgcgtgtcccccttctctcagttgtgactgtggctcagatgtgcctacatctgccccctctggcgttgtggccttggctggcatcctctgaaaaagatgaagggaggggaagggacaca

SEQ ID NO: 804147 - DNA, 662 bp, Homo sapiens
tggcgcctggccttggggtgcttggacgggagctggggagcccctacgatagggtggaggggtaactgaggtcctccacagccaggtggcgagaaggccgagcggggcagatgtgagagggtctgagacgcagcatgacagggaagagaccagccaactctaaaaatagctttgggagtagaatttcaagcatggtgactgcttggatggacgaagggctgggagaggcatagagagaaaggaggagggaaggggggctcccttgttcctgagccagtgcagagtcctccaggacccacttctttctgtgtcctgcccaccctgtgacctggccagctgcacgttttcccagcaggcttgaagccacgctgtgctgtgaacattcccaggccckgaacactgagaaaggtgttcacgttgatgcccaaaacagtgaaatctcaaacacgtggctaaacatgcagaagctatctcagaccctgaggctaacccctcacagccccatgtgagctccacggcctgggccctcgctgcagacatgcctgcgtgtcccccttctctcagttgtgactgtggctcagatgtgcctacatctgccccctctggcgttgtggccttggctggcatcctctgaaaaagatgaagggaggggaagggacaca

SEQ ID NO: 804148 - DNA, 500 bp, Homo sapiens
catgtaagactagctccacatttggaagtaaatcaatgtgatccactgtgctaacaggctgtagaagaaaactcacacaattgcatcaattgggacacaaagaaagcatttggaaatttttaccacctgttcataatttttaaaaaactcagcaaactaggattagagtgtcacttcatcatctacaaaaaacctatagccaattttaggcttaatggtgataactgaatgttttcccctaacatttggagcarttacaagtgtccactctcaccactcttcaacataatgaagttctagccagggcaataaggcaagagaactagaagatatacagatgagaaatgaagaaatatttgcacacaccatagtagtctatgtataaaatctcaggaatctacaacaaaaacccaagaactaataacagtgagttcagcaaggtctgaggatttagatcgacacacaaacatcaatcatttctcaaccttacatctgattag

SEQ ID NO: 804149 - DNA, 627 bp, Homo sapiens
ctgtccagggccaggcgcagcgaacatgcccattaaacacagatgcccctcacccgccgccggggcctggggcacgggcacatgcgcgtggacttttcaggaacaggattcacggcttctatcaccaggttctggaacgggtckcccacgcacgttgacctgggcctcacgtactacagcctccacgcgggaaagaaaagtcccggttctgcagggtgaccaagtcacatgaggaggacaggccagggatggaggagcggggcaaactaggggtatcgttcacccaaatttgtccgcagccccatccagagggatttcctgctctgaccccaccctgcccctcatgcagacggaggggcgcaggcggccggcagggcggggagagtgcatcagcctcagagaagccatggggggctgggggccgggaccgcggcgctgactgtcccgagaaataggaaaagagaaaggcacagagcggacacgattctcaactcagaacacaagtggagaagaggagcctctcgggtctaggggctcacgggacatccctgcccctcctgccaattttgctgtgaacctaaaactgctctgaaaaataaagtccattaaaaacgcgcatgggctgat

SEQ ID NO: 804150 - DNA, 632 bp, Homo sapiens
ccctaggatattaccaataacatcacagggtgtccacccatggtgtacacgcactgtgatgttagggataatatctccctgggatatgatgaataataccacagggtgtacagaaactgtgatattagaggtaatatctctaatatcacagggtgtacacccactgtgatactgggagcaatatctctctaggatagtacaaataatatcacagagtgtacacacactgtgatattaggagaaatatctctctgggatatcacgaattatatcacagagtgtacmcacatgatgtacatccactttgatattaggagtaatatcgtcctaggacattacaaataacctcacagagtgtacacccactgtaatactaggaatagtatcaccctacgggatcaccaataatatcacagggtgtacacccactgtggtatgaggagtaatatcttcctagggtattacgaataatttcacagtctgtacacacatggtgtacactcactgtgatattaggagtaacatctacctagtggatgacaaataacatcgcagggtgtacatccactttgaaattagctgtaatatttttctaagttgttacaaataagatcacagggtgtacaaacatg

SEQ ID NO: 804151 - DNA, 551 bp, Homo sapiens
gatatcaaaaatcctatcacagggtgtccaatctctgccttccaggttctaagggattctcctgcttcagcctcccgagtagctagggttacccgccaccatgcccgtctaatttttattttcactggagacggggttcaccacgttggccaggctggtctggaactcctgacctcaggtgatccatcagcctcggccgcccaaagtgctgggattacaggtgtgagccatggckctcggccaagagttatatattcaattcatttggaaacacagctcccatatttgagtgtgcatgtacttttttgaagaaatgatgtcagaaaacctaaggatgataataaatattaaaagtaacaggcatgtgaaaagatcttccgattaagaactctaagttgcgatttcgtttttagataatgcggtcctagctcttgtatcgtccttttacatattctacatcaaaggaatttgtagcacggtgtcagaataaaatagagtgtatttcacggcttcttaatttctttcaattagactgagatctttttcttcaa

SEQ ID NO: 804152 - DNA, 602 bp, Homo sapiens
ttatacttattaatattaataattaataaaactgttcccgatatccgtgggggagaagatatgtctcccaatatcgcagaaaggtacacccctctatgatgttactcctaatagccagggggtagaggatgacattatggaaatagcgcagtgggtgtacatcccttcggtcatgttgttccgaatatcctgtgttgggagcggatgttacgactcccaaaatcgcagtggrcggagacctcccccgtgatactgttccgaacatccaaaggtggagaggatgatatttcttccaatttcgccgggggtgcacaccacccctgtgatattgatcctaatatccagggggcgagaggatgatattagtctgaatattgcaggaggtgtacactccctagggatattgttcctaatatccagggacagagaggatgatatcactcccaatatagcagggggtgtacaccccttgtgtgacattgttcctaataggcagcgggggagaggaagatatcacccccaatatcgcagagggtgtgcacacccttgtgacattgttccttctatcctgggagggagaggaagatactagcggcaatgtc

SEQ ID NO: 804153 - DNA, 623 bp, Homo sapiens
caggataactgcatagatccctcgctgtctgattcacttcttaccatgcactttcctttgatgctgaggagaaatggaagtgggcgaaaaatctcaaggctgcttcatgtggaccttgtcaagctgctccctcccccagcgtcaaattgttatcaggtgccaaacactgctagaaaggagggcctagtcagaagcctctttccatacgagttttggttttgtttttaatatttttttctattaaaatactcatgcatttaaccttcccrttattcaaccagtctcttggttgcatccctagcacttctactacaagtgagatggtagtgtttgagtgcttattgagtaaagcataattcggtcataatgaaatcgttcacattccctcatatgcacaagcccaccaaccccttcacaccccccttcacaggggtcgtatgagtaaggggatttggaaactgtcaacttacaaaggcactataacaattacagaatcatgattgccatgggccactttatttacatgaagacaactggagaacgactaagaccaaattatggaaaataagaaaaagctgttgctggcaagaccatcaagactgttctgacaccctgtccccatc

SEQ ID NO: 804154 - DNA, 611 bp, Homo sapiens
cagtagaattctagcatccttgaataccatactaagtttctgagggagaaaacggtgggattttaaagatattatttggaggaagttaatacgctacttaattaacagaagtggcaggtggttggaaatgtgctaaagaggtatgacacattaaaaatgataatataaggatgtttgaccagataatttaggaataaccaaggaatatttaacctcttcaccacaaagtccgaggagaaataaatgcccaagagatcaagccaaaatacatttttattatctgggacttaggcctcatattccggagcagaatccggtaaactcagatgaactccatggagaatttcataaatcagattaacatcaaggtactaaaatcaaaacccactaagaaacctgttgcccccttcaaagcacaactgaagtaatggatmtaatagaagatacattgtttgcactgagcagtagagtagtagaggagaaaagcccagagatggcacagacaagttgttccagtccccttcagtcaaggcctctggaccaccaccctgccacaggcgaaaaatgggatatttaataaataaaaaattttgattcaccagactggctga

SEQ ID NO: 804155 - DNA, 610 bp, Homo sapiens
acaaaattacataagccccattgagagaaattatcctctagaaaaaaaccacaaatattcataaattcaaattttttcatgcaagtacaagttcacagactcctttaatatgtatgagagatctataaacacaaattaagaactttaattctagacagaaatttatttctccataaatctatagagataaaggcctactataactccaattacaaacccatcagcagtctatcctagacaagtgtttcagaagcaaagcattcctatttatgagaatacattaaacattgtctgtctttcaagcactaatgcttagaaagtggatgacctttattyagccccagtcatcggtaactcagatacttagcacttaccatgtgtcaggaaacctgccaaaggcctcacatgcttcatcttatttcacttttaggataattctatggcgttcatattatccccatttgatggatgaaacaactgaggagttgagacgttaactgtcccaaagtcactcaggtgttaagtggagtcaaaccaagaactatctgacttcaaaacccatgctcttaattactatacaatactgtttcccttcgttgtaaaaatcgca

SEQ ID NO: 804156 - DNA, 560 bp, Homo sapiens
aatttttaaattgtgaacagttttaaagttgttcacactggctagggtctgagatttccagggttgatatagaatagctttttattaaacttcacatctgacagggcttattggaaggagacaggagaaaaatggaaraagtcatcctcaagaagattaaagtctaactggaagcaatgactatctgcttgtgaagcctttttttttccaagttagacaagtgttaactacagctagtactaaacatggatctatatgagagtaggtaacatggcttctgtcttgtaggctctagaggaatctcaagcaaaacctcacaaatgattttcttttgctatgcacatctgtcttattacaacccccttacccccaattcccttgtcctagaagatccacaagtaggttggttgctgtgcattgctgttacccaagggcagacagcaacactacaaatagctgccttaacgtcttatcctggggagttggggattgatacggaggtaggcctttagaaaaattagactatctttccaaaccaggctgttttccctctcacaatc

SEQ ID NO: 804157 - DNA, 641 bp, Homo sapiens
ccccatctcaatccattctccatcttaatccatctgggttactgtaacagaatactatagactgggtgtagcataaatcacagaaatttatttcccaccgttctggaggctgggaagcctcagatcgaggggatcgaggagccagcggatttggcgtctggtgaaggcttgcttcatggctcataaccagcatcttcttcatgtggcctcayatgtcagaaggcacaaaggattcctctagggcctcttttataagaacctgatcccactcatgaggaccgcatcctcgtaccctaatcacctcccaaaggccccatctcacaccatccccttgagggtcagcatttcaacacaggaattgcgaggagacgtaaacattcactctgttgggttgggcaccatggcttacgcctgtaatcccaacactttgagatcagcagttcaagactagtctggccaacatggcaaaacattgtctctgctaaaaatacaaacattagccgggtgtgcacttgcaacctcagatacttgggaggctgaggcaggagtcacttgagactgggaggcagcagttgcagtgagcagagatcatgccagtgcactccagcctaggggacaaagcaagaaacatcttaaaaaaa

SEQ ID NO: 804158 - DNA, 559 bp, Homo sapiens
ccggatggtggttcctgccattactccactcaacgcacatattttgtttgttcagaagataaaggatcatcaagaacgacagtggattattgtaaacttaatcatgtggtgacttcagtgcaatctgctgtcccagatactgtgttctgtttgtctttttacggaagcaaatcaacatcccctgccacctggtatgtagctattgatgtagtgaacgtgcttttttttttttttttttttccccccagacctgatagtaaacactaccaaaagccattttctttcagctagcaggaccagcaatacaacttcgtttgttgtatgtcagggctctattatccctctacgtagtgtgcagagaccttcatcacctctaaattctatggggtatcatgctgatccayggtatcatggacgtggtgagcaggatgtagcatctgccctggatactttagtaaaactcaagcctgccagaggatagaaaataaatccaacaaaaaatcatgaacctgcctcctcagtgaaattcctggggatccagtgggctgggccatgttgc

SEQ ID NO: 804159 - DNA, 663 bp, Homo sapiens
tggaattggaacttacgtttaaaagggaagcagagcataaaagtttaaaatatttgcagcctgacgatgtgatagaaaagaaaaagccattttctgaggagaagttcaagctggcaacagaaatttgcataagtaatgaggatccaaatgttaatcgccaagacaatagtgaaaatgtctccaggacatgtcagatgtcttcaagggaccccttttatcacaggcccagaggcctaggaggaaaaaatgatttcgtaggctaggcccagggccttgcttctttgtgcagtctcatgacttggtgcccagcgtcctagctgtgaataaaaggggtcaatgtacagctcaggccattgcttcagaggrtgcaagctccaagccttggtggcttccatgtgatgttgggcctgtggatgcacagaagtcaataatcgaggtttaggaacctctgcctagatttcagatgtatggtaatgtctggatgtccatgcagaagtttgctgcagagatggagccttcatggagaacctctgctagggtagtgtggaagggaaatgtgggctcacagcccccacacacagtccccactggggtattgcctactggagctatgaaaagagggccactgtcctccagaccccagaatggtagatccactgacag

SEQ ID NO: 804160 - DNA, 610 bp, Homo sapiens
gacttggtgcccagcgtcctagctgtgaataaaaggggtcaatgtacagctcaggccattgcttcagagggtgcaagctccaagccttggtggcttccatgtgatgttgggcctgtggatgcacagaagtcaataatcgaggtttaggaacctctgcctagatttcagatgtatggtaatgtctggatgtccatgcagaagtttgctgcagagatggagccttcatggagaacctctgctagggtagtgtggaagggaaatgtgggctcacagcccccacacacagtccccactggggtattgcctactggagctatgaaaagagggccactgtcctccagaccccagaatggtagatccactgacagcttrcaccattaacctggaaaagcaacagacactcaacaccagtccatgaaagcagctgggagggggcttgcatcctgcaaagccacaggggcagagctgctcaagaccatgagagcccactccttgcatcagcatgacctggatgtgacatgtggtttcaaaggaaattatttaggagctttaagatttaatgactgccatgttggattttggacctgcatggggcctgtagccattctgt

SEQ ID NO: 804161 - DNA, 648 bp, Homo sapiens
tctccctgactcctaactactatattctagatttagctacagaatagtaagcatctcactgttgtaaggaaagcagcaaatcttttccctttctttcatttcttatgaggactgaagacagctgcaatattccaaagagtctgacacaacttaggaaaattaatggaataatgtctacctgagagaataaaggagatggcttgagaaataaaaatggagtaaaagtttagggtatcctagtgaagggtttcaagatgccttcagcaagacagtccatatcgtatgggtccatttatatgaaattctgcaacagactaaactatagtacaaaaacttcaaaacagttgttgctatgrggatgagaatgagagtgtggactgaaaaggggcatgatgaaagtatctggggtgacaagttctatatcttgacagggatttgggttgtacaggtgtatgcatttttctaaactcatagaatgtacacttaagatttctgtatttcaatagatataaattttatatcaaaagaaaaattacatatatttatttgcatgctgacatatttagttggaaaactactaatgtctgcaatttactttgaaatgcatcaaaaagtaagccagataaatagatggatagagggacacac

SEQ ID NO: 804162 - DNA, 625 bp, Homo sapiens
tcagcctgatgattattttaactactggcaaaaacttttagtttgccatcatatttacaagaatactaaaaaagaaaaaaaaaaaagaatacacctaaaatacatgcatagttgaaagggaaattctgattagagccattttttttctagacttacagattatgctgctcctccattaagtcaagtttagcccatcacatggattggctttagatgtgaatgaatttaaagagtgcattgaggctgggcsaggtggctcactcctgtaatcccagcactttgggaggctgaggcatgcagatcgcttgagctcaggagttcgagaccagcctgggcaacatggtgaaaccccatctctactaaaaatagaaaaaaattagctgggtgtggtggtatgcgtctgtggtctcagctacttgggaagctgaggtgggaggatcgcttgagcccaggaggtgaaggttgcagtgagacgaggttgtgccactgcactccagcctggtgacagaatgagacccccatatccaaaaaaaagtacattgatttaaggatgagcttgatgttaagaaaataaataaagaccacattaatgttttattttatttcagcaaacttcagaagacaa

SEQ ID NO: 804163 - DNA, 609 bp, Homo sapiens
gatgagaaggttagctgggcaggcatatagaaggacgccatggcatgtgcagaagcacagaggcgtaggagaccgtggtgttcgggaaaataagtactgtaatttaatgatactgagcggaaaagcctggttgattgtagcctctggtcttcaagcgccttgaatgccaagcaaatgactttataactagataaaagagagccactggagaaatttgagctgaggcaagaatctgcctctcccttaactacctcagtggcttgtkttctacatttgattcagaacaccactcctgaagttgtctttgggcattgctttgataacgtgtctaccagttagaccctaaatactcagacaactggtttcatatgcatgatatgcatttaggtaaaataattccgactctattgacagaaacgcatgtgtgtatatcagggtttcacaaactttttctttaaagggccagatagtaaataatttaggctttgtaggtgatatcatctctcacatttattcagctgtgctttgtagccatggacatataacaaacccgtttatgttacaataaaactttttatggccactgaaatttcaatttcatatagtttt

SEQ ID NO: 804164 - DNA, 625 bp, Homo sapiens
ttgaaaatgcaggcatacataactgacatgtggagcaagtaggaatcatggaatataaacaagaaaacatcttagatttagtctcttactatccattatataacttttatatatctcttcgaccgtcttgtacctgtacacccaggctggagtgtagtgtttcgatctcatctctctgctacctctgcctcctggttcaagcgattctcctgcctcagcctcctgaataactggggttacagatgcccaccaccatgcccagctaatttatttttttttgtatttttagtagagacagggtttcaccatgttggccaggctgacctcgaactcctgacctcaagtgatccgtccgcctcagcctyccaaagttctaggattacaggcatgagccaccgtgtgcagccgtctcctactatccctttaaatgccactggatacaaacaaaggcagtcccttgacttttctggtcactttaagacacaaacacagtctcaattcagagataattagaacatacggtcctagattaatcccagctttattcagaggagcagcccctcacacagccaccgcttgctgcagagcgacgcctaggacagtgaagaggatttgatccttttcc

SEQ ID NO: 804165 - DNA, 627 bp, Homo sapiens
tcctaaagtgctgggatgacaggcatgagccactgcacccaggcccatgtctagtaatactgttagtcatttacctctgcaattaagtaatttttgaagtaaattaattttgatacaagttaaaaaacgggctgctcgtgtctgtaatcctagcagtctgggaggacgaggcaggaggattgcttgagcccaggagtttgagaccagtctgaataatatagagagaacttgtctcaaaaaaatgttgaaaaaaataagagagagagagagagagaaaggaaggaaggagagaaagaaagaaaaagaaaagaaggaaggaaagaaggaaagaaagaaagaaagaaagaaagaaagaaagaaagaaagaaagaaagaaagaaagaaaaagaaagaaagaaagaaagaaagggaaagcaarccagcaaggaagcaagcaagcaagcgagggagaaagaaaaggagtctaccaccctaccagggtactgatttgaccagcaaaacaaccagatctaaatgacaatcagtccacttgatggagacctcatgatgaatggtctacccttggttgggtttgccacctgacgtagaacatgggaagaggaaaaaaactgaaacacaattaatgaa

SEQ ID NO: 804166 - DNA, 578 bp, Homo sapiens
ggatccattacatgattaaaatgaaatgaacagaaaaggacacatgattccagattccaactgacaataactttatagaaaatgaaggcaatatttggtatcatttctagtaccttcatgctgctgctgaaggtgatgggaacctgcacactgtaaacatatattgtttctggaggcggaaagtttacactggtaaacacacttcatgtgacagctatgatgctgggcgcttccacctagattatttcatttaatcactacaggaatccagtgaagtaggtattgtactcattttacagtaaaaggagctgaagtcacgaaaggtgaaaacacttgccagaggttgtaaagtggtgagtgaaagaattaagcttgtacctagctcagacccccctcaccccaccagcatgatgataatcgttgagtaagaayagttatttccagattatttccaggagcctgatttattcaacccatgcctagaataaacctcctctcttgagtctctgtactttttttgcatgctggttgtctcatcactggattgtcagctccccaagtcaagtgtcgatttcctg

SEQ ID NO: 804167 - DNA, 528 bp, Homo sapiens
aaaataattgaactcagtctgtaaacaatcagcctatttcccaaaaatgaaaagacatgtcaatgcaaagaagcagtagtgccaggtgtgctttatagaaggaaagaactgtttatttggtatatgtttatggttgtagcctattattyattaataatgatcttagattttaaaagacatcaactatttagctttgattccctttgacattattggcatagaaaaagaaatctggatatctgattccctccatcttgttttgttttgttttgttttgttttaaatcattctggcatctctattctctttgccaacacccaaaaatagcactcgatcaagccacagaagtaatgaattaagcatggtggtagatctgtctgaaagatgtggaccacttttctagcaaacaggtatcccatgaagtgttgggagtctgtcctactcatagtaaagtggtcatgggtagttcctgtgctttgcctcgtgggatccaacattttttgcattcctaccctaatcacccaaaag

SEQ ID NO: 804168 - DNA, 504 bp, Homo sapiens
aaaaaccctccataaaatactggcaaaccgcatccagcagcacatcaaaaagcttatccacagggtggagccaagatggccgaataggaacagctccagtctacagctcccagcatgagcgacgcagaagacaggtgatttctgaatttccatctgaggtaccaggttcatctcactasggagtgccaggcagtgggtgtaggacactgggtacagcgcaccgtgcacgagctgaagcagggcaaggcattgcctcactccggcagcgcaaggggtcagggagttccctttcctagtcaaagaaaggggtgacagatggcacctggaaaatccagtcacttcccatcctaatactgcacttttgcaacgggcttaaaaaacggcacaccaggagattatatcccacacatggctcggagggtcctacgcccacggagtcttgctgattgctagcacagcagtctgagatcaaactgcaaggcagcagcaaggctggaggagggg

SEQ ID NO: 804169 - DNA, 533 bp, Homo sapiens
taaaagtgtcaggcctgtgagttaaatctgtagtctttgcaattccctgcctggaggaaacttagagataaacatcttaaaggataccttcaaaatgactacagattgctttaagtctaatgcatagatgtgcaaaggagttcatggcatgaaaacgaaagcatatayaaatcgaatcaaataaataatgagaaacttgaagataaaagagagccaagaatggaaagtggccagtcaatgctggcctggaaaagactacttttaaaatgggaggacagaagcacaaatgaatgaatggacaattacgtgcactgattaataaaacaaagccgtggccatgcatcgcctcagcactgaaaagcgtcattggaattcctgaaaagatggatttgtaagcattcaagaggatggaattcagatgaagaggcctgaggtacactttcctggtaaaggaacagaggcattgacaatagccagcttatctttacagctcaattgtaatagagaaagtactgtcaccagcaagctgataa

SEQ ID NO: 804170 - DNA, 533 bp, Homo sapiens
taaaagtgtcaggcctgtgagttaaatctgtagtctttgcaattccctgcctggaggaaacttagagataaacatcttaaaggataccttcaaaatgactacagattgctttaagtctaatgcatagatgtgcaaaggagttcatggcatgaaaacgaaagcatatataaatcgaatcaaataaataatgagaaacttgaagataaaagagagccaagaatggaaagtggccagtcaatgctggcctggaaaagactacttttaaaatgggaggacagaagcacaaatgaatgaatggacaattacgtgcactgattaataaaacaaagccgtggccatscatcgcctcagcactgaaaagcgtcattggaattcctgaaaagatggatttgtaagcattcaagaggatggaattcagatgaagaggcctgaggtacactttcctggtaaaggaacagaggcattgacaatagccagcttatctttacagctcaattgtaatagagaaagtactgtcaccagcaagctgataa

SEQ ID NO: 804171 - DNA, 495 bp, Homo sapiens
aaggctggactaattatctctagtgtaactcccagcttcagcgtgctcagattgtgacctaattaattcaaaagttcaatcatttgccatattcatactttaactcacaagaagattatatgccacagacaataaagctctctgcagcatttcctcaaacaaagtacattgtattctatactgttcactagccatgtgagaccttcagtgaccaatttacttttcgggtaaatgagcatctattggkttcttctgagaaagcttgttagccagcattttggttaacagtatgcagtgcagaaggggacaaggcatgcaggggcaaatgtagcctccctcagaggccactcaggggaaagatacagaatccttgagcctgttccagccactgacagtcccttcctgggctgctagccaaccaacagcatagacaaataactctgctgccggaaatgtgagatgacacctctgtaatctactgaaggatccctacat

SEQ ID NO: 804172 - DNA, 495 bp, Homo sapiens
aaggctggactaattatctctagtgtaactcccagcttcagcgtgctcagattgtgacctaattaattcaaaagttcaatcatttgccatattcatactttaactcacaagaagattatatgccacagacaataaagctctctgcagcatttcctcaaacaaagtacattgtattctatactgttcactagccatgtgagaccttcagtgaccaatttacttttcgggtaaatgagcatctattgggttcttctgagaaagcttgttagccagcattttggtyaacagtatgcagtgcagaaggggacaaggcatgcaggggcaaatgtagcctccctcagaggccactcaggggaaagatacagaatccttgagcctgttccagccactgacagtcccttcctgggctgctagccaaccaacagcatagacaaataactctgctgccggaaatgtgagatgacacctctgtaatctactgaaggatccctacat

SEQ ID NO: 804173 - DNA, 332 bp, Homo sapiens
atactgcatttgttcagttaaccaatatgactgcctgctatatgccaaacagcatgctagtccctgtgtgcacagagatgaacatggtttcattctcattgaattgacaatcttaaggagagagacataaacaagtaaattattggtttgttaagatttaaaatattctaaaatattaagagggaatgcrtctttcctccatgtgaaggaagctccagtagcataacactgtcgtcactcttcatccccttatccactctgccctaggtaaagtgacttgcccaattgtaaatctggaaggagaaacaaggtgcaattagcccacttcctcc

SEQ ID NO: 804174 - DNA, 670 bp, Homo sapiens
ccaaagtcacacaggttttaagtcatgccatcaagattaaactcagtgtttctttccattataccactggttaacatttttagatattctcttctactgaggacactcaatatctcaaggactagtattgcctatagcctaaaacatgagttttcacaagagtctacattattttgaaaatattttgcatatctgaattaagaattttcttccttaaatgacttttaaggaaacaagtcacttatttattttttatctatagtttttttttcttttttattttgtggttgtggaaaatccagtggtgattcgtacgtacaaaataaatttcaaagcttttattaaaggtatgcagcaccctccgccctgcctcaagggcatgactcacaaactctccttatcgtttatattttaatttaatgtaggccacaaatattgtctagrgttgaagccagagaacatgactcacattattcagtgactcttttgtaccttaaaatcttatcaatgtaaaaaagattgtaaacagctccttgaaattgtatgtattaatgttaatggtataataatatttagcttactaatattttaattggatgaggcttcttactgtttaaactggatttgggtctaggtgattttctgtttaatccatccattaatcaagtaa

SEQ ID NO: 804175 - DNA, 622 bp, Homo sapiens
acatgtggctaggttcaaacattatcgctgtcacctaaagacctttctacagcttaaagataaatacaaataaacataaacctacacacacttctaataaagttgtttaccgataaacaaccaaaatctctgttagtctcctttagaccacgtaccaaaattttaatctacaaaatgtaatcaatctatkgatcaaatgatgcactaattaaatgcctgccaaaggctagaacatttgctagatgatagaactataatggtaaaaatgacatattttctaccctcaattttagttatttagccggggagacatatacattctgtatggcaaggggaggtgtgggaggagactttgggctacctcaggggccagatcacaaaaggcctaacgaggcaaactaaacatggcttattttcatatcctgagagacttcagtgccctatgatatttatgtgatctttaagtttaataaacctttcaaaaaaatgaagtgtactgaatttggcataacttttgtttgtgaaccatttttatcttccagtacacccttatttcttcccaagtgcttaaaagccatagatttagtaacctgttaaataattttgcaggaatgtgacacag

SEQ ID NO: 804176 - DNA, 689 bp, Homo sapiens
gaggtcaggagattgagaccatcctggccaacatggtgaaaccctgtctctactaaaaatacaaaaattagctggatgtggtggtgcacgcccatagtcccagctactagggaggctaaggcaggagaatcgcttgaaccggggaggtggaggttgtgacctgagattgcaccactgcactccagcctggggacagagcgagactcaatctcaaaacaaacaaacaaacmaacactcagcagatgagatagaaagaagatatgtagttgacttgtaaggatcagtgatctacgatatctaaggagattagtgcagagaggcagaaggggaatgtgaaagagatgctaacgaacatggaagataaatttttttactgttgaattttcagagtttgctgatactagtcttttgttgaatgtgtgttttgcaaacattttcttacattctataacttctttcattcctgtaacaaggtcttttgcagagcaaaagtttttgatgatgtccagtttattagtttttccttttatggagtgtacttttttttgagaatctcactctgttgcactccagtgagttgtctcactcacagtttgcactgcaacctgtgctgcgatcttggctgacttcaaccttcacctcctgggttcaagcgatcctcccacatcagccccccgagtagccacaca

SEQ ID NO: 804177 - DNA, 632 bp, Homo sapiens
acgattttctttattgaagatttcccatttttgaataccctctctgtgaagtgataggctttgttattgtcttgatgattttcccagttattttctgagttccttcccttttagaacatggtgatttctccccatttgatgggcccttttagasagccagctcatgccttttctcctggtaagggtctgaaggtgatgtttacttagatgatgatgaagtctggacaaatgattccaaaggcaaagatgaatattcttcaggatttaatgtggtcattgaacttgaagagtggtcaaagttacagaaatctccctttacagagaaaattgctttgtccagtttatgtacataagtggtcaaaatattgggatttctagcttatatccctaaatggcaattaaggcaacaaaacagagtcaaacaaaatgctttttgaggtcctggagggttaagctaacaccatgggaattgtgtggtaacattataaggtttgacttgacccagtttttttccctcagtggttgaagaaagtgtaacagagtttaccaattgtcaatcatttaaattgcagtgtggtgaaactatttacagtgattcacaaacaaaacatattgtcatacattcagatatg

SEQ ID NO: 804178 - DNA, 665 bp, Homo sapiens
ttcaggtaatttgttttattttatttttttgtgagacagagtcttgctctgttactacaggttggagtgcagtggcacgatcttggctcactgcaacctctgcctcccaggttcaagctattcttctgcctcagactcccgagtactggaattacaggtgtgcgccactgtgcccggctaatttttgaatttttagtagagacggggtttcaccatatgggccaggctggtctcaaactcctgacctcatgatctgcccgcctcagcctcccaaagtgctgggattacaggcgagagccactgtgcctrgcagtaattttttaaagtataaaaataattgtttaaagtataaagtataaaaaggtcaccaaaaagtttgggaaatggcatataggacaaaattaggaaaccctgtctcagaaagttttgggccttccccttcagctcacgttacctgtttttatgccacctgccagacaactgctaagacaatgctccacattaaaaaaaaaaatcattactacactatggatatcaattactcttttggttagagtagcctaaattgccataaaaatagcccacacagtttaatgtacaatgcctcaaacacaacaaagcttatttcttgcttatttaacaactgcagacattattccactctg

SEQ ID NO: 804179 - DNA, 631 bp, Homo sapiens
tggggataaaccagagaagaaaagctgaaaattctaaaaatcagagtgcctcttctcctacaaaggattgcagctcctcaccagcaaaggaacaaagctggacggagaatgactttgaagagttgacagaagtaggcttcagaaggtcggtaataacaaacttctctgagctaaaggaacatgtttgaaccctttgcaaggaagctaaaaaccttgagaaaaggttagatgaatggctaactagaataaacagtgtacagtagaccttaaatgagctgatggagctgaaaaccatggcatgagaacttcgtgatgcatgcataagcttcaacggccaattcaatcaagtggaagaaaagatatcagtgattgaaggtcaaattaatgaaataaagtgagaagacaaggttagattraaaaaagagtaaaaagaaatgaacaatgcctccaagaagtaggggactatgtgaaacgaccaaatctaccttttattggtgcacctgaaagtgatggggagaatgaaaccaagttggaaaacattctccaggatattatccagaagaatttccccaacctagcaaggcaggccaacattcaaattcaggaaatgcagagaacaccacaaatatac

SEQ ID NO: 804180 - DNA, 556 bp, Homo sapiens
atttccttctccctgtgtttaaggttggcatgtgtgtgacttatcccaggctgagagttttgtagatgagatgggtcccggtccactaactgaaccctgagaattgaccgtgaccatgaatcacacagcatttctccccgccatgcaaaacccatgagccgtgcccagaagccctcaactgctggggactccctccatcatcatttgttcctccccttttagtgacggctgtgtgtgttcctttcccacattcgttctataggtgaacaaaggaaggctcggaggttttaaataactggtccaagttcattgaactggaatgctgactctctcacatctcaaaactcttcctaccaaaggagaaaaatgaagtctgagaaatattttactctaataagtgaaattttgaataytctgaagataaaagaacctggcactcctaagaagccatgttcaacagctgattcaagagtgctgctaagagttcaaaacatgcaggaggggagtcttcttgagacagagccaggccttcctcaattttgcattctgtgcatca

SEQ ID NO: 804181 - DNA, 501 bp, Homo sapiens
gatgctcaggccttgtctacaatgaggctttacaaccttcctttgttttggctcgggattacttcctggctgtctaataattgaaccataaccatgtaatattatgtaaaggcctggaaattactgttgctaaaaaaagtcatgtagtttcatgtagtgtagcatccttggcatcgttttccaaaatttgttccttctcccttttttttttctttcgtgtgtggcatgagtgtgtatctgtgtaaatatgattgtatatgtgttactccgatatgtaatccatttcactggctgagttkggcccctagccatgtgttaatataaagtaggcatggcttcccagtggaaatctctgagaatgacagtggagttgtgcaagcattttacattgccacataattgacttgccattttatggttaaaaacggcacattaggcagttgaatatgacgtaccttgcagactaaaaggttgaaggcccgaaactaacttttagctaac

SEQ ID NO: 804182 - DNA, 655 bp, Homo sapiens
taaagttatgtattttttaaaaaagctagaaggctggaatcaaagacactattataaaggctctcttttctttatttcaatcttaagaataagcatgtcttttaaaattttacaaagtcattaaaagacacttatttcaagccctaagaagcaaatgattttatgctatgcttaaagttgttagtagtaaaatattttctaataaataaaaatttggaactaggatgagaggaaggagataaaaatgagtgaaaattagaagcaagcatagaaaggcagagaaccagttatagaaaagaaagcattttaatataactaacaggtctgcatttttttttwaaaaaaaaagcatacatatgacaaagtatgatcttctgaactgcttgtttcattatatggtcaaactaatcattccatttacaacatacaacccttgctgcttcttcaaccccaagagcttccattatctttttgaaaagcatctgattaaaaactccaccataaaactagtatgagagtaaagacgaaaactccaatgtgtccatttcactacatgaatccacaaaatggctggctggagatacgttttgaactgataaaactagaagtcttaaaggcaaattccatttcttaacattctcaaacccataattac

SEQ ID NO: 804183 - DNA, 594 bp, Homo sapiens
tcatggggagatatactctgctacaagggtttgtgataaaggattaattgtcttaattactatattttgtgagaatcaatattattatctctaaagcgaaattaggaatgcttttgttctcaacatctcgggatatcaggacattcctgagtctgggtctgcttagtaaacattatcaatctgtcccttaatgtaaacatctagaggctgggaatgcctcactttctgggaatacagcccggcaagccccggcctcattyttcctagtcctcactcaagatggagtctctctggttggaatgcctctgatagaagcacagagagggtaagcgacttgcccaaaatcacacagctaacaggtccctaacagacgtctcagatgcgcaccccggcccatctgcctccaaggtttcagcacgtgccctggtcccacctctctgtccaaacgttccctcatgcagggccctcttggggtagcaggaatgtaccgtaagccagtagcaggggacatgtaggcgtagtgctactgagcgcgccgtcccccatgggctgtggccgttcatttggtggccctgtttcgagaagccagcttgc

SEQ ID NO: 804184 - DNA, 594 bp, Homo sapiens
tcatggggagatatactctgctacaagggtttgtgataaaggattaattgtcttaattactatattttgtgagaatcaatattattatctctaaagcgaaattaggaatgcttttgttctcaacatctcgggatatcaggacattcctgagtctgggtctgcttagtaaacattatcaatctgtcccttaatgtaaacatctagaggctgggaatgcctcactttctgggaatacagcccggcaagccccggcctcatttttcctagtcctcactcaagatggagtctctctggttggaatgcctctgatagaagcacagagagggtaagcgacttgcccaaaatcacacagctaacaggtccctaacagacgtctcagatgcgcacmccggcccatctgcctccaaggtttcagcacgtgccctggtcccacctctctgtccaaacgttccctcatgcagggccctcttggggtagcaggaatgtaccgtaagccagtagcaggggacatgtaggcgtagtgctactgagcgcgccgtcccccatgggctgtggccgttcatttggtggccctgtttcgagaagccagcttgc

SEQ ID NO: 804185 - DNA, 692 bp, Homo sapiens
ctggcctcacctgctgccccacactgtccagacatacctgtggcctggtgttgcccaaacctcccgactagcctgtgcttatctgctgtctctactggccctgcttaaccactgccccaggctgggacagaactgaggcctgctaaattgctgcactctccccatgcccctcagcaccagagacagagccctgcactggggtcagccagcaggagtctggtactcagggccactgagctgggcagctcacccgtgggagcctcagtttcctccaggtcaaatrgacctaactatagtaaccccctcatagggtcagcttgtggggactcagcgagatgacatacctgggccgagaaacagcgtcacccttagtcgcggctcctactaaggggggccgcaccttgggcgtgcagatgggacttgaggctgagctcagcctcccgcctgcgctgtaacccgggctctcctgccctgctgggcctcagtttcctccttggcgaattgagaagaatagctctttcgtgcttctcctgcagaaggaatgcaggccccccgtgctggctacagacttgcgatactggggtcttccgtgaaccccgtccttcatggggctgggcatgggaacccactgccctcaaaagccagccctcccccacccttccccctgagccctcccaagccacccacccaca

SEQ ID NO: 804186 - DNA, 692 bp, Homo sapiens
ctggcctcacctgctgccccacactgtccagacatacctgtggcctggtgttgcccaaacctcccgactagcctgtgcttatctgctgtctctactggccctgcttaaccactgccccaggctgggacagaactgaggcctgctaaattgctgcactctccccatgcccctcagcaccagagacagagccctgcactggggtcagccagcaggagtctggtactcagggccactgagctgggcagctcacccgtgggagcctcagtttcctccaggtcaaatggacctaactatagtaaccccctcatagggtcagcttgtggggactcagcgagatgacatacctgggccgagaaacagcgtcacccttagtcgcggctcctactaaggggggccgcaccttgggcgtgcagatgggacttgaggctgagctcagcctcccgcctgcgctgtaaccygggctctcctgccctgctgggcctcagtttcctccttggcgaattgagaagaatagctctttcgtgcttctcctgcagaaggaatgcaggccccccgtgctggctacagacttgcgatactggggtcttccgtgaaccccgtccttcatggggctgggcatgggaacccactgccctcaaaagccagccctcccccacccttccccctgagccctcccaagccacccacccaca

SEQ ID NO: 804187 - DNA, 575 bp, Homo sapiens
cgcgacggtcccagggacctgggcaaagcttccaggtccagcagagagagttaaaggtggggccccagcacctcaggtgaccaccgaggaagggagaccctccttgacaccccagcttcatcccatgcttcttcctgatccgatagaaaagcaaatggcaatggggtgaatcctgtctcatcgctccttctgaagcccaccgtggtcgcttatgctgatggtgaggccyccggctgcgtccacgaggcctgccctacgccatcctctccccagcaccaccgctcaggcctcctctgtgctgccctgctgcccacggaaggctcagagcagccgctttgcacatatttatggaatgaacgaacgaagggcaataatacagtaatagtaatagtaatgttgacagaggctgacatccactcaatgtcagttccgtgccggtccctgctgcgtgcattccatgcatatcaactcattttatcctcactgcaagcctgtgaggcaggtcctgtcatcatcctcatttcacagctggggaaactgaggccctgaggcgtgtgccatgctggccattgcgg

SEQ ID NO: 804188 - DNA, 557 bp, Homo sapiens
ctagatccctcgcatgcactgttcataacagggtttgggctcccagtgagaatgtcatgtcactgctgatctgacaggaggcagagctcaggtaggaatgctcgctggcccaccactcacctcctgctggggggcctggttcctaaaaggccacggaccgatacgggtgccccagcagaggaggaggagagaaagagaaggaaaaggaggactggaacccaccctgagaagctctggcccctacagccatggcgcctgtgaagacctgggcacctcagactgtggctttggttcaaggtggctctcrtctataacgctgcaaacctttctggacaaggtcacctttatcagaggctttgggaaaccccacagattataaaaggtcaatgactagcagacaagcgaagcagacccgcccccaccagggcaagagacagccccgggaggagaaccagctgaagtgaccgagatagaaatcggcccactcagcttgggattagcaaaggatgagctgggtaataaatcagctatgcttaactcgtttaaagacataaacc

SEQ ID NO: 804189 - DNA, 557 bp, Homo sapiens
ctagatccctcgcatgcactgttcataacagggtttgggctcccagtgagaatgtcatgtcactgctgatctgacaggaggcagagctcaggtaggaatgctcgctggcccaccactcacctcctgctggggggcctggttcctaaaaggccacggaccgatacgggtgccccagcagaggaggaggagagaaagagaaggaaaaggaggactggaacccaccctgagaagctctggcccctacagccatggcgcctgtgaagacctgggcacctcagactgtggctttggttcaaggtggctctcatctataacgctgcaaacctttctggacaaggtcacctttatcagaggctttgggaaaccccacagattataaaaggtcaatgactagcagacaagcgaarcagacccgcccccaccagggcaagagacagccccgggaggagaaccagctgaagtgaccgagatagaaatcggcccactcagcttgggattagcaaaggatgagctgggtaataaatcagctatgcttaactcgtttaaagacataaacc

SEQ ID NO: 804190 - DNA, 557 bp, Homo sapiens
ctagatccctcgcatgcactgttcataacagggtttgggctcccagtgagaatgtcatgtcactgctgatctgacaggaggcagagctcaggtaggaatgctcgctggcccaccactcacctcctgctggggggcctggttcctaaaaggccacggaccgatacgggtgccccagcagaggaggaggagagaaagagaaggaaaaggaggactggaacccaccctgagaagctctggcccctacagccatggcgcctgtgaagacctgggcacctcagactgtggctttggttcaaggtggctctcatctataacgctgcaaacctttctggacaaggtcacctttatcagaggctttgggaaaccccacagattataaaaggtcaatgactagcagacaagcgaagcagacccrcccccaccagggcaagagacagccccgggaggagaaccagctgaagtgaccgagatagaaatcggcccactcagcttgggattagcaaaggatgagctgggtaataaatcagctatgcttaactcgtttaaagacataaacc

SEQ ID NO: 804191 - DNA, 697 bp, Homo sapiens
aaaaaaaaaaaaaaaaaaaagagagagagagagagaaggatccagatcaggaagagaccagagatgggaaggctgggaggaaggagtttgttccagaagtgagccggccagggccagggcaggggagcaggaggctgagtgaggtgggaaggggccactttcctctgagaagaaagcagcgaccaggccctcccagcaaaactcatcagggtcttggaagtgggagccaaggccacaggcgggggttgcaggtctgtccaggggttaagaagcgtgcggaagctttgaagcaggtggggctgtragacggcaggaatgttaaaggccagggtcctctgccacacacagaggtgaggctgcatgagcgagtgcagataacgaactaatgaggctggtcatctgcatggggcccaggacgtgcctggcacagacaagatctcccctgcctccttaccccctcacagcacaataagcccactcccatctcctagagggaaagtgctgccgagctctctaggcctgtccacagcacagcagattcaagccgagtctggcggcccctgctccatctgccctgatgccacggacagcgcttggcacacagagggaggcgcacgtgcctgcgggtggacgaaagaatgaatggaagggtcagctctcgcttctgcacctgagcatcgtccagcgaaatctcaca

SEQ ID NO: 804192 - DNA, 607 bp, Homo sapiens
ccagaaagttgactacaacctttaggaatctagttgttttcttttctcattttccagtgaacaaccacgtgctttggatctctaataaagtgggacactctttcatcatgtcattgtcctgcgtaaaggattttgctggctcctttatttttatttttatttttaaggaactgagtttctcattcagctcctaagtttgtaccttcaaagcctggaactcagtattgcctaaacccccttggargatttataaaaggcagaaatagcactctattaactctttttcctatcaaaagcagctcttgattggacttaggacctgtgttggcagatcaaaagagaaagcgaggtcaaatttgaggttctctgtggcatcggtatactgtaatggaataaatgtcctgaagaagcaaaaagaaagaaaaaaaagaaactgggtctctctctgtcaccaggctggagtgcagtgatgcgatcacggcttgacctcctgggtcaagtgatcctcctgcctcagcctcctgagtagctgggactacagatgcacatcaccacgcccagctaattttaaaatttttagtagagatagggcatcaccatgttgccc

SEQ ID NO: 804193 - DNA, 641 bp, Homo sapiens
ctagcagctcctggcttcaatcctttctgctctgcagcccctgtgggaagaccttctgtttcccaatagtcagtgaaaatccagggactgagtcttactgccccatcttgggtcagatgtccattcttgaaccaaccactattgccatgaggaggggggctctccttggcttggcctgggtcatgtgccagggtgtgaggtcacagagaatgrgggggtcctagggaaaactggggtgctatgacttgaagaagaggagacagatgctagcaggcaaagccttgagcacagaataaagaggaacgagctggtgcgtgtggcttctgacactgggaggacagggctgcttgttcccatgggaaagcaggttgtgcaacttctgcctggcccagcagctggcaccagagccgtggcccagcctgatcctatctcaggagttggcagctcagtgctgaataggccctcggagactcccatccagctccctccagaaatcaagctccgtaggcaagggccctatctgttgtgcaccgccccccaccccggaattctccatccctggggtggggtctggcacatagtagttggtcaataaatgcttgtgacataagtaagtgagggaatgcccagactgaggccca

SEQ ID NO: 804194 - DNA, 676 bp, Homo sapiens
attagacaaacttgaggtgcagggatcccgcagggcagttcaggggtgtattctccagacggttgaccccaagggaaggagtctaggcagatctgctgcccgtcacctcgtcgcctccctgtcagggcctcctcctcactgtaggtccggggattggggtggttgagcagccccgcttcctcccttcgtgcattcacacatgctgttccttctgctacggtactcttccccgccccaccccaccccaggcggacagaagcacccacaccacgcctgcctgttgccttcctccccaggactagtggcttcttcctcccttctctgggcctcagatggtccctgtcctgcaaagacaccaccgtctgaccacctttagttatgtgtgtcatctcaaggaagcccaagcactcagcacttaataagtgctcaataaacgtggtgttgattsagattggattgagtcggtttgcctcggccagcgacctgctgtatggggaggtttcaagggcagagttcaggcccctagaccagggcagtggctccgggttcctgccctgaagccctgagtctggaggagcccactcctccattctgtcaggctttcctccagaggacccagccggtctggttgttctgtcccaccctgtgtaggctccggctgggtgccaggaagaca

SEQ ID NO: 804195 - DNA, 676 bp, Homo sapiens
attagacaaacttgaggtgcagggatcccgcagggcagttcaggggtgtattctccagacggttgaccccaagggaaggagtctaggcagatctgctgcccgtcacctcgtcgcctccctgtcagggcctcctcctcactgtaggtccggggattggggtggttgagcagccccgcttcctcccttcgtgcattcacacatgctgttccttctgctacggtactcttccccgccccaccccaccccaggcggacagaagcacccacaccacgcctgcctgttgccttcctccccaggactagtggcttcttcctcccttctctgggcctcagatggtccctgtcctgcaaagacaccaccgtctgaccacctttagttatgtgtgtcatctcaaggaagcccaagcactcagcacttaataagtgctcaataaacgtggtgttgattgagattggattgagtcggtttgcctcggccagcgacctgctgtmtggggaggtttcaagggcagagttcaggcccctagaccagggcagtggctccgggttcctgccctgaagccctgagtctggaggagcccactcctccattctgtcaggctttcctccagaggacccagccggtctggttgttctgtcccaccctgtgtaggctccggctgggtgccaggaagaca

SEQ ID NO: 804196 - DNA, 543 bp, Homo sapiens
tatcatcctacccctccctctagaggtcccaaagacggagaaaagctttgaggagaggctgatcttcaaggctttcctgctgaagtttgtgaattcctacacccccatcttttacgtggcgttcttcaaaggccggtagggacatcttcagcctttccccmacctcgcttctcccaggtccaggagagggctctccctccccacaggttgggggcacctggagcccagggcagggcagacaccgtggcacccgcagccaaagagggtcagggagaaggcctgggccctgctgaggctccagagcagcgggaccctgggcagcagggagtccaggtggcagggaacccaggcagtggggaccccaggcagtgaggaccggggagtgaggacccgggagtgagggccctgggcagtgaggaccctgggccgtggggaccccaggcagtgaggaccggggagtgaggacccggcagtgagggccccgggcagtgaggacccgggagtgagggccccgggcagtgaggactctgggcagagaggacc

SEQ ID NO: 804197 - DNA, 571 bp, Homo sapiens
ttataaaagaagatatttctccagagaaaatatataaatggccaacaagtacatgaaaagatcctcaacatcattagtcaccaaaaaaatgcagatcaaataccacaatgacatatcacttcacacccactagaatagctataataaaaaaataagtaacaagtatkgaagaggatgtggaaaaactggaaccctcatacactactggtaggaatgtaaaattctgcagccattttcaaaaacagtttggtagttcctcaaaaggttaaacatagagttaccatacggccctgctattccacttctagatatatacccaagaggactgtaaacataaaaaagaaaaccctgcacatgaatgttcatagcagtgttattcatagcaggcaaaaagtggaaacaacccaaatgtccattaactgatgaataaataaataaaatatggtatcaaacaatggaatattattcagcaataaaaaggaatgaagaactgatacacactacaacaaaaatgtaccaggcaaacattatactaagtgaacaacctcagttacaaaagaccacagatcgt

SEQ ID NO: 804198 - DNA, 614 bp, Homo sapiens
cagatcccctgaaatcaggaggttgagaccagcctggccaacatggtgaaacaccatatttcataaaaatatgaaaatttgggatacggacgcatgcctgtaatcccagctatgggaagctgagacatgagaatcacttgaacctgggaggcagaggttgcagtgagctgagatcacaccactgcactccagcctggccgataaagtgaggctctgtttcaaaacaaacaaacaaacaaacaaacaatgcacaggcaggctttattctttctctctgcgtgtctgcaggatgccagtctatgaggaccaaaagctcattccctgggaaagggagtcagctctaaatgggttttcttcacctctgattattctctcctktaacggaacccttggagagcctctattttcaagttatttagaaaatgagacctcttacttaaaaaaagtcatgtggtattaaatgtcttcttgtcctcagaatattaggttagtgcaaaagaaattgcagtttttgtcattacttttaatggcaaaaactgcaattagttttgcaccaacctaatacttcttagtcatacttcccctcagttctccaagccaagaagctcttattt

SEQ ID NO: 804199 - DNA, 424 bp, Homo sapiens
tagtgacatgagatcaacctgccacaaaattggtatgagatttcagagggaagttaggaaggcaaagtgattgctttcttctggctccaatcctgattacccagcagctcctctcggccccctggctcccccgagaagctgaagaagtgatggaaactktctggcagaactaattctgagtgaaactgcactggactatgtctctgaatggctgtgatactgatatcccagcctacttccaattccactcgaattaccacatacgagaccaggattaaaaatttgtacagaaacaaaacatacttcactgagttattccaattaaacccaaaaaggggagtccaacataagcacacattatcctcagatgatctgggctcagaatcttcacactgcagtaatccaagggtcagtcttttaatct

SEQ ID NO: 804200 - DNA, 602 bp, Homo sapiens
catacattctcatatactttaaatcatctctagattgcttataatacctaacacaatgtaaattctatgtaaatagtggatatactgtatttcttaaaatttgtattattttttattgttggagtgttatttttattgttttttccccaaatatttttgatctgcagttggttgaatctgcaaatttggaacccgagggtacagagggctgactgtatctgctttgttggagtccatctgattcattgtctaaatacaattaattgctccaaaatggctagtccatgcccccttattttataaataaggaayctgagactcagaaaggccaagtgaagtatcttcaatgttcttacctttgttcaagaaccctctgaactaatggtccagagtggggtagggactccaacaagacccggagaggcaggaagctcagtggtgggagtgcaggctcaaagtcctcctccaccttgctttaaatttcataacctcgctttaagttttaagtttcataaccttagtgagtggcttagcccctcgattgccttgtctgtaaaaggcaataggggagatatgatacccacttcttaggtttgttgtgg

SEQ ID NO: 804201 - DNA, 602 bp, Homo sapiens
catacattctcatatactttaaatcatctctagattgcttataatacctaacacaatgtaaattctatgtaaatagtggatatactgtatttcttaaaatttgtattattttttattgttggagtgttatttttattgttttttccccaaatatttttgatctgcagttggttgaatctgcaaatttggaacccgagggtacagagggctgactgtatctgctttgttggagtccatctgattcattgtctaaatacaattaattgctccaaaatggctagtccatgcccccttattttataaataaggaatctgagactcagaaaggccaagtgaagtatcttcaatgttcttacctttgttcaagaaccctctgaactaatggtccagagtggggtagggactccaacaagacccggagaggcaggaagctcagtggtgggagtgcaggctcaaagycctcctccaccttgctttaaatttcataacctcgctttaagttttaagtttcataaccttagtgagtggcttagcccctcgattgccttgtctgtaaaaggcaataggggagatatgatacccacttcttaggtttgttgtgg

SEQ ID NO: 804202 - DNA, 563 bp, Homo sapiens
ttgagctcgcataggtactttgacaagccagccttctgaaggcgattcaagggatatgcagctattatagaaaggccagactggggaggacattgaacactggatttagggaggtcgatgttactttatatcaataagtaggtctttggagktttcgaacagtggagcaatattatttagaaaaggaattccatgtggaggacaatttggaaggagaaagactccaggaagacttatataagaacattgcaatggaaagggaaaggagaaatgtgagttagatgtttaaagaagaatcaatagaatttggctactgcaaatgataccattattggaaataggggatgctggaggttggcaaaaaagagatggggccagagaggaggtacaatagtttctaggcaaggaggatctgtttccttgccttttgcagcgtctagaggctgcctgcattctttgactcacgggccccttcctccatcttcaaagtcagctgcatggcatcttcacagctccttctgcctaggtgtcctttgtttctgttatcacattgcctctggctc

SEQ ID NO: 804203 - DNA, 549 bp, Homo sapiens
aggccagactggggaggacattgaacactggatttagggaggtcgatgttactttatatcaataagtaggtctttggaggtttcgaacagtggagcaatattatttagaaaaggaattccatgtggaggacaatttggaaggagaaagactccaggaagacttatataagaacatygcaatggaaagggaaaggagaaatgtgagttagatgtttaaagaagaatcaatagaatttggctactgcaaatgataccattattggaaataggggatgctggaggttggcaaaaaagagatggggccagagaggaggtacaatagtttctaggcaaggaggatctgtttccttgccttttgcagcgtctagaggctgcctgcattctttgactcacgggccccttcctccatcttcaaagtcagctgcatggcatcttcacagctccttctgcctaggtgtcctttgtttctgttatcacattgcctctggctcaaccctcctgcttccctcttataagaatccttgagattatattgggactatcaaggta

SEQ ID NO: 804204 - DNA, 500 bp, Homo sapiens
tcctcctcctggctggacgtaccaggaacccctccaaaggagcaaggagccttaccttgacttccgaagccccgatgcctcctatcttgacctcctggtcggccaccaggatccgaagtccccgcagccaagcaggtcctgcatcgggcttcttcttgttgatgtcgatttccaagtactctgggcgctcagggcaggtcttcaggagggtgtaggagaactcggaggggaaggcgtaggaggcgccgtcaaaggtgtgcagcacctggttctggctgagcargcacacggtctcccgcttggggaagcagccctggtagccgtcctccacggcgcacacctccccgctgccgcaggtcttgttgaagcagtagacgtccccgccctcctcgcacaggcattgcacagtgcagttggccgtggcccagaagaactcccccatggtgtagtagtggccgtcgaagtcgcagccgcacttgtgcagagggacgcactggctg

SEQ ID NO: 804205 - DNA, 639 bp, Homo sapiens
tatagtaatttaacatccatattccaattttgtcagttgactgagcaatgttctttacggttcttttggggtgccaggatggggaactcagtacagacctaatttagaatcacacgttgcatttcattgtcgtgtctctttagtctcctttaatctggaacaatgacttagttttctttgtcttttctgatatgggcatttttgaagaacacagcctccctgccttttgaaacagaatgatcctccataaacagaatgaccctccattggggttgatgttccatcctgaggatcttcagctgtgcatctccactcagcctcccgggcaggtgccatgtggtttttstcatggaatcacagcacacacggaagcacgatcttgtccagcctcccctcattggtgatgtgcatgttgattccctggtcaaggtgttagcaaatgtctctgctgcagagtcactgtgagctttcccttgcaactaataagcaacccatggggaaatactttaagagtgtgcaaatatcctgtctgtcagtctatctgtctgtctatcggtcatcttatcaatctggacatggatgcctgttttttccagtggtctatatttcatctatatttcatcttccatgtattaatta

SEQ ID NO: 804206 - DNA, 639 bp, Homo sapiens
tatagtaatttaacatccatattccaattttgtcagttgactgagcaatgttctttacggttcttttggggtgccaggatggggaactcagtacagacctaatttagaatcacacgttgcatttcattgtcgtgtctctttagtctcctttaatctggaacaatgacttagttttctttgtcttttctgatatgggcatttttgaagaacacagcctccctgccttttgaaacagaatgatcctccataaacagaatgaccctccattggggttgatgttccatcctgaggatcttcagctgtgcatctccactcagcctcccgggcaggtgccatgtggtttttctcatggaatcacagcacacacggaagcacgatcttgtccagcctcccctcattggtgatgtgyatgttgattccctggtcaaggtgttagcaaatgtctctgctgcagagtcactgtgagctttcccttgcaactaataagcaacccatggggaaatactttaagagtgtgcaaatatcctgtctgtcagtctatctgtctgtctatcggtcatcttatcaatctggacatggatgcctgttttttccagtggtctatatttcatctatatttcatcttccatgtattaatta

SEQ ID NO: 804207 - DNA, 375 bp, Homo sapiens
aaatcacagagtatcacacatggcacttggacgcacaaagttcacaatagaatgctaacgagattaatgaaagaaggattagttactaagttcaagcacctcatgggcccatccttgtgttaataatccgcatgctttgtctaagcatgttattctatttgattcatatatgtcatgtttcagtctttgtgtttatgaaacagagcagaatattaagagtayattagagaaggaactagagcccctggattctagcctttactctgtctttaaggatctgtgtgaccttggggcaattcacttttcctccctggttctcagtttccccttccataaagcagtggtaatgctgcctttactgttcatgcctcagaa

SEQ ID NO: 804208 - DNA, 526 bp, Homo sapiens
agcaaaataagttgactactcagaaaacacagacacattggtagaacacataatcgaaggatttaagcttttttttttcttttacattattctgacttaattttaactgtaatattcttaaatgtgaaggaaaccctttatcaggattgtggaattaaagagcatttcttcattaagcatgcctttacttgtagttcacrcatttcatttacataaacaagtgttaagtactactcagcactatatgttcttcataatagaaaatacaaagattcctttcatgaaagatccgagttaaaagatgcaaattataaacaatgtcacacatgaaacaaaatgaagtctggctttcctgatgccaaagagacgttgagagttccacaaaacaaacagaaatgtaaaatcacagccgggcatggtggctcacacctgtaatctcagcactttgggaggccaacgcgggcggatcacgaggtcaggagatggagaccgtcctggctaaatggtgaaaccccatctctactaa

SEQ ID NO: 804209 - DNA, 603 bp, Homo sapiens
tgcaaatgttcgttgcagcactattcataatagccaagatgtggaatcaacctaaatgcctatcaatgacagattggacaaaggaaatgtggcacatatacaccatggaatactacgtggtcataaaaaataataagatcatgtcctttgcaggaacatgtatggaactggaggccactatccttagcaaactaatgcaggaacaggaaactaaatactgcatgttcccacttataagtgggagctaaataatgagaacacatggacagaaagargggaacaacagacactgggatctacctgagggtagagggttggagaaaggagaggattaggaaaaaaaaaaatagaacaactttcgggcactatggttagtacgagggtgatgaaataatctatacaccaaactcgcaagtcacaagtttacctacacaacaaacctgaattatgtacccccgaacctaaaatcaaagttaaaatattcttcaggatcactgaataaaaagctcataaagattcaaaaaagtcatacactcaaagttataaaaaccttgtagttaccaaccctcaccaatctcaaagagaatgattagaaatacaagc

SEQ ID NO: 804210 - DNA, 613 bp, Homo sapiens
aaaaaaacacaattacttttgtaccaacctaataattagaaaaccatgagtgatagcacgcttttaaaaatmtcacaagcaagtagaagtagaatataaaatggttgacaacttctgaactagtttgatgaataaaggtagagactttttcaaaagatataacaaaaaaatgaagatcaaacttaccagttatcagcagtaaattcaattttagtttaatatttcttggtgcaaaaagcaggagtcagaattgcaagaaaacattcttggaaacacaattgtgaaaattttgacgcatcactattaaactattggaccaaatagctaatactcatttaagagcagaaaggattgaacataaatatatgaattttgtatgttaatggaagagactaagtctttataaatgccaatttttattattatatatcagagaaaaaacctctataaaatattaaaatgtaaaaatttttagattatattttcttacttcaatgggaacaaaatatttgatgatgaggattttaaaaaataacattttcccaataaaactacttatttaaataacaatgggaattagaaaaaaaatttaaatgtatactgtgaatgacat

SEQ ID NO: 804211 - DNA, 614 bp, Homo sapiens
tcattgcaatacctgtttactgtcttcctgatttcattgcttcccttcatgcaatgctcaagaaagcagccagagaagatctgaaaaaatgtgagttgtgtcatgtcatgtcttggctgaaactctccatttgtttcccaacttagattaaaagccaatgtttttaataaggcctgacaggacctgcctacctcccccattacctctctgatctcatctttgataactctccccatctttcactctgctccagccacattcatctccktgctattcctcaagcatgccacatctgctcttgccacagtacctttgcaaatgcttctcattctttttggaatgttctttcccaagatatccacactgttattcccttgcctctgccaggtctttatataaatgtaatattttcactgaagtcttcaactttgtagctcacattccaacttctctgctttaacactttaaaaagtctgtagaacttaatatccagcatcccatattttgtttttttttttattatctgtctcctcatatagagtgaatgtatgctctatgagagcacagattttttttttcttccttttttaaagatggaatctcactccgtcacc

SEQ ID NO: 804212 - DNA, 704 bp, Homo sapiens
tgagatatttctggttactccttattatatagtttcttaaagcacagtgtagaagctggttagggattaattcctttccttcccatcctaacagtcatggctgacacctatataacaatgacaggttaacaagagaagagcataacaaatatgtttgatcacagttttacataacatgggacccttcagaataaagaccccagatacagggaaagcaatccttttttctgagacagagtctcgctctgtcacccaggccggagtgcagaggtgcaatctcagctcactgcaacctctgccccccagatycaagtgattctcctgcctcagcccctcgagtagctgggattacagatgtccgccaccacgcccggctaatttttatgtttttagtagagactgggtttctcgatgtcggccaggctggtctcaaactcctgacctcaggtgatccacccatctcggcctcccaaagtgctgggattacaggtgtgagccaccacactcagccaaagcaatccatttttatgcttaggttcaatgaagtatgaacagctgtgtagaaatatgattagacacaaagggtatgatctaatgctaacaggctgagtggggaaactagcccatcctgcttgttcagatttttctcagcccctctgtgcagcactcactcctcccaggcaagaggtaggatccctctggaa

SEQ ID NO: 804213 - DNA, 636 bp, Homo sapiens
gccctggaccaggcccacagaaccgatttattcctcgtaggccttcaggcctctgatgggagaggctgccataaaggtcactgacatatcctggagacattttccacattgtcttggcaattaacatttggctcctcattacttgtgcacgtttctgcagctggcttgaatttctccccagaaaatgggtttttcttttctaccatattgtcaggctgcacattttccaaacttttatgctcggtcacctcttaaatgctttgctgcttagaaatttcttctgcctgacaatcctaagccaaaagaacaaagctggaggcatcacactacctgacttcaaactatactacaaggctacagtaaccaaaacagcatggtactggtaccaaaacagagatayagatcaatggaatagaacagagccctcagaaataacgccgcatatctacaactatctgatctttgacaaacctgagaaaaacaagcaatggggaaaggattccctatttaataaatggtgctgggaaaactggctagccatatgtagaaagctgaaactggatcccttccttacactttatacaaaaatcaattcaagatggattaaagacttaaacgttagacctaaaaccataa

SEQ ID NO: 804214 - DNA, 634 bp, Homo sapiens
tttctttgattttctgtctcaaaggtctgtccagggctgaaagtagggtgttgaagtcttcagatattactgtattggagtctctctttagctctaataatatttgctttatatatctgagtactcccatgttgagtgcatatatactaaaatttgttatatcctcttgctgaattgacccctttatcattatatagtgaccttctttgtatcttcttatagtttttgtcttaaaatctattttatctgataaaagtatagctgctccaactcttttttggcttccattggcatggaatatcttcttccatccatttactttcagtttatgtatgttttttatagatgaggtgtgtttcttgtagagaacagatcaatgatcttgtttttttaatgaagtcaaccrttctatatcttttgattggaaagtttagtccatttacattcaatattattattgataagaacttactattgccacttgttattggttttctgattgttttgtggtcccccctcccttcttgctttccttctcgtattcccattagtaaaggtgattttctccagtaatataatttagtttcctgctttttattttctgtgtattcactgtatgttctttggtttgagg

SEQ ID NO: 804215 - DNA, 623 bp, Homo sapiens
gtcagacccatatcagccattgccgacctacagcttgcatgtaatacaagtgagaaatgttattgttcatttcagctccctgctgaaatgttgagttgttcaaaactgatcaaggcataatttttcttattaaatattcacacacttgttactagttgctattactctttccattttacaaatcatgaaacttgctytaaaattaatatattaattctttcaagaatataagatgcatactccatactgtaagagacactaccttaactgctccaatttaataacaaaatttctaactttcacataaaccattggttcccagatacagacaagaagctttgtccaactcactcaatgaagaaatataaatttactcatgggagtacacataaggtgaaaggtagaacgagggaagaacccaacataaagaggagaaacacaacctaaatattaaatagcaacacaaaagtgttcacaaaatcttgtatatgaagataatcaagaaacatagtaattcaaaaggagagatgaatacaattgtatttttctgaatatgggcttttaaaaatgcaggatttctggatgctatgttatgttttataatgaaattttctgtaaggatt

SEQ ID NO: 804216 - DNA, 622 bp, Homo sapiens
tggtgaataaagaaattgggtttttggcatattatataaagttagtgatacagccagtagaactgaaaccaaacaacaaactatcatattgcacatatacgtacaaatacagagaaaacaaagcaaaagcttcatttattgaaaaaagaatttgaaacagaaaacaggatgcaaaaaaggaacctgaaggaaacatttcagtatttgcaaatgggttatatgcatatatttattaaaataaacagattgggccgggcgctgtggctcacacctgtaatcccagcactttgggaggccaaggtgggcgratcacctgagatcaggagttggagaccagcctgtccaacatggcgaaaccctgtctctactaaaaatacaaaaattagccaggcttcatggcgggcacctgtaatcccagctacttgggaggctgaggcaggagaatcgcttgaacccaggagctggaggttgcagtgagccaagatcacaccactgcactggggtgcacagaatgagattctgtctccaaaaaataaaaataaaaataaacagattgggttaaaaaccaaagcccaagttataggctgtatataataaatgtagctaaaataaaatatttcag

SEQ ID NO: 804217 - DNA, 584 bp, Homo sapiens
ttctctggtggaagatatcctgagcccacctgcacacagcaattaaataatttttatcattcctaagtatacttgaaatatacttgaaatgcaaagtattctaagcatgggaaggacaaatcctcatcacagtagttggttggcattgaagctgaccatagggctggtggaacgtacagtttctaataatgtattatttttccttatagtaacagatctgggcagaggttgagaaatggtgatgtgttaggaatgtagaatcctgacaagataagcagaaaagcaaaatgccattggattgactattcatttcctaaaatgtatcaggtgatgatcttacagttttcmtcaagcaagaagatgtggtatatttgttgtatctgttatttttacatataattctggttaccaacttcaacataatgtttgcataaatttttcagcaccagtggatgcttcttaagtgaatgacctgtaagcttcccgggtactatctagctggtggaattccaagtggtgaataagtgactgttagaactcaggatagagcagcaagagttatcatcatttcaaaaattttttcc

SEQ ID NO: 804218 - DNA, 690 bp, Homo sapiens
cagctcaaattgttattaaaaaagggaagtgctaaataataccagcccttagcacatacatacctcccgaaagttaccatactcctaatttgtggtattgtggattagttaatggattagttttgttgtgggaaatatatgtagatatgtgtgaaatcatggacatagagtatgtctaaatttatttcccaacattgttttaaaattcacctgcaatattaaaagaggtttatagcccatttaatcttgttgtgtcatatttcatttggtatatattccacagtgcatttatgctaatgaacatctgggtggtttcagattcaggactattataaatagtgctgctatgaacattttagtacatgtcttttagaaaacataggtttttttggggggtacagtggaatttctgggccatagattatgcttatgttaaatgctagtagaagctgccaataagcagggcttcagaatttaacttattctatatcttgtcaatacttattactttctattactataattttagccattccagcctgtaygttcatgttattttggattcccactttcatttttctgatggctgataaagctgagccacttttaaaatatttattaaatatttgaatatactcttttaaaaatttatctgctcaggccttttgttcatttttctgttttgtttct

SEQ ID NO: 804219 - DNA, 613 bp, Homo sapiens
cacataaatcagctgtactttttcatataatcattagagaaatgtaaaaaactgcgtagaaaaaaagcacctaaagcttaagagaattactgatcacgaaaggtttcaccttatttaatattttaggtgtggcccccttgataaattgaaatagctttgggtttcttgttgttgttgttttgcttagtgtgtgtgatccgtgtctaaggcaataaaatgccaaaccttcactcacctgagtggcaaagcctgcaaaattcaatcaggcggtgatctctagagtatagcattttcaaagaatattcaaaagctaccagctgtaaacataacacacacamaaaaaaacagaaaaaccaaaccatgcatctcttagctggctgtaaatgtactaatcagtgatttggggggaaaaaacggtgtaaacatggtggatatattttcgacagtaatcataattcttgtccagatgatgtgaagggttataaaataagcctgttaggtttcccaagcacttgtgtgtcgagtatatgtaaaatgcttcattaaaacatcttagactttacagtggatattttgctggtattaagcttgtgtttgtaaatagaagtgctaa

SEQ ID NO: 804220 - DNA, 585 bp, Homo sapiens
actgtcctgcctcagcctcccgagtagctgggattacaggtgcacaccaccacagctggttaatttttgtatttttagtagaggcgtggtttcaccatgttggccaggctggtctcgaacccctgacctaaagtgatctgcccacctcagcctcccaaagtgttgggattacaggtgtgagtcaccatgcccaaccgctcttttcaccacctctgtgtgatctattttcagttgctctgcttaaaaatgaactccttmctgcatagaaattgcctagtatcttagccaattcaagctgctttaacaaaataccacagaccaagtggcttgaacaatggaaatttatttctcattcttctgaagtcccagatcagggtgccagtgtcactgggttccggtgaggacccacttctcagtttatagaaagctgtctttatgagatgacttcacatagcagggagaaagtgtgagctccagtctcattctcttcttataaagacactaataccgtcatgaagatttcactttcatgacctcctctacaactctcaaagtttcactctcaaagacctcacttccaaatcc

SEQ ID NO: 804221 - DNA, 634 bp, Homo sapiens
tctgatttgagtttagaagaaaacatagcctgcaattgatttcactaactggagtgtgacctatattgcaaaccctatatccttcctttaatttttaaataattaattgctaagacatacaaatactaaaaaaatttgattgtttcttcagagaatagtaatgtcttttgtctttttctttggatgaaaaaataagataatagcagaggaaatacaaagctaaaacacctgtgatccagcacaactgtcagttagaaaagtacaagtcaatgtccatagtcagctgattaaagttaagcaggtgcatcaaaaatgatgacaggtacttgtgcataagaaagtacgagcttccataattgaacttgatygctcgatatcttcatgtgggcctatttcatagaatcattttaatgtgaatgtttctgttataaaagggatatgttatgttttgctaaataattgtatctacatgttgtaatagaactggtcaatatagatataattaagaaggccaaccataatttattcaatattgtattagttcacaggaataattttaaaaacttgacactttattgactgttctgcaatgaggcattaagtaataatatggtgtttattattaacttcatat

SEQ ID NO: 804222 - DNA, 599 bp, Homo sapiens
tgtgttgtttaattttcacatatttgtgaatttttcaattttcctcttgttactgatttctagtttggtggtttaatatcattatggttggatgtttaatatgattttaatttccctaagacttttttgggggctaacccataatctatcctggataatatttagtgtgtgctagaaaagaatgtgtattcttcwcctgttggatgaaatgttttgtataaatctgttaggtaagtctgctgtttcctttttgatcttctgtctgggtgatgtatccactgttgaaaccggggtatcaaagtctcctgtgattatcatactactgtcaatttctcccctcagttctgttaatatttgtttttatatttaggtattccaatgttgggtgcatatgtatttgtgattgttatatcctctttatgaatggactcctttttcatgatataatgaccttctttgtccttatgatagtttttggtgtaaagactattttgcacagtagaagatctagccaccactgctctcatttggttaccattttcatggaataactttcactttcagcctatgtgagttctaaactctcaattgagtctctt

SEQ ID NO: 804223 - DNA, 613 bp, Homo sapiens
gattatcatactactgtcaatttctcccctcagttctgttaatatttgtttttatatttaggtattccaatgttgggtgcatatgtatttgtgattgttatatcctctttatgaatggactcctttttcatgatataatgaccttctttgtccttatgatagtttttggtgtaaagactattttgcacagtagaagatctagccaccactgctctcatttggttaccattttcatggaataactttcactttcagcctatgtgagttctaaactctcaaktgagtctcttgtagacagcattttagttggatcttttaaaaaaatatattcagccaccctgtattttttaagtggatatttaaatccatttacatttaaagtaattcttgattactttactgctgccaagaacttactactgccattttaattgttttctgtctgttttgtgattccttgttctttttgatttgacgattttttcttagtggtatgctttgattcttttaattttaatgtgtttacaacagcttattcttggtgatcaccataaggcttacataaaacatcttctaactgtttattttaagctgacaataatttcactttgat

SEQ ID NO: 804224 - DNA, 607 bp, Homo sapiens
cagcgtattagtcagggttctctagagggacagaactaataggatagatgtatatatgaaagggagtttagtaaggagaattgactcacaggattgcaaggtgaagtcccacgataggccgtctgcaagctgaggagcaaagaagccaaatagtggctcagtccgagtcccaaaacctcaaaagtagggaagccgacagtacagccttcagtctgtagccaaagrcccgcgagctcctggcacaccactggtgtaagtccaagagtctaaaagctgaagaacttggagtctgatgttcgagagcaggaagcatccagcgtgtgaggaagttgaaggccgggagactcagcaagtctgctcattccaccttcttctgcctgctatttctagcagtgctggcagcaaattggatggtgcccatccagattgagggtgggtctgcccctcctcgtccattgactcaaatgtgaatctcctctggcaacacccagaaacacccagatacacccagaggcaataactttcatccttcaatccaatcaagttgacatttactattagccatcacacacagcaatcatggccaacatagaattgactgagctgg

SEQ ID NO: 804225 - DNA, 628 bp, Homo sapiens
cttgtttgtcatccccaacagaaccatagtagatgttcactatttgggtaatggatacactaaaagctcagacttcaccactatgcaaaatatgcatgtaagaaatttgcatgtgtaccatctaaaaatataaaaattaaaaaaaaaacaatggtgatgtagtcatgattatctgttgccatcaagaatagaatgtgttagttatgctggtagtctaatgggtgcctagyggcattctgttttaatgttggtttttttctaactttttagtagctctcattatatactgcagtaattaataggggtttgcccagaatagtatttcaacaggtaaaagattactttaaaaaaggtttatgcatttgtttatttttctacctgttttactcagactgaacataacaatcagttaaaatttagaaaagcaaatatgtttatttagttacaagtaaactttattacacaaaatttatttttagccatagttgaaaaaacaacaatttatttgcttatactcgaaatagcaatgccctatgggaatctcagtaatgccgatcaaagtcctttctatgcttttcctgcttgctaaaaggagactaatatgtgaacactgacaaacgtatgagaa

SEQ ID NO: 804226 - DNA, 496 bp, Homo sapiens
ataaaatgggctgaaatcttctgaaatcaacccatcagctgaattaaacctgtgtagattatcttcccacatgtagctagtttgtcctggtacataaactatctgaggactaccttcacttctccctttcatagacaattttgggtctcctgtatgtgscagaactgtggtctgccctgggaagaagacaatgaataagttggcaggaaaacaaaagggagaagacagctgaagagctctttcaaaggagggatccacaaggcttggtgattaagacgacgcagagggtgggtcaaggacagcatgtttgtgttgtgagtggaagaaatgtgattctcttgacagaaacagcagagtctgagttgaagcggggtgatgtggcttctaggtgatgcattcgttttaagtatgctcaagttaaatagaaaccattatactaaaaaatataatcattgtgaggttaatttcttcttggcctcgtatttatcagctcaaa

SEQ ID NO: 804227 - DNA, 514 bp, Homo sapiens
ttagtgaggaagacgttgaaagctgagataggccaaaaactaggcctcttgctccaataagttatccaagttgtgaatgcaaagtgaaagctcttgaaggaaattaaaagtgctactccagtgaacacgtgaatgttaagaaagtgaaacagccttatcrctgatatggaaaaactctggtctggatagatcaaaccagccacaacactcccttaagccaaaacctaatccagagcaaggccctaactctcttcaattctgtgaaggctgagagaggtgagaaagttgcatgagaaaagtttgaagttagcagaggttggttcatgagatttaaggaaagaagccgtctacatcgtatgaaagttcaaggtgaagcagcaagttatccagaagatctagcttaaatgtttgatgtatctggctacattaaacaatagattgtcagtgcagatgaaacagccttctgttgtaaaaagatgccatctaggactttcatagttggataaaaaaaaat

SEQ ID NO: 804228 - DNA, 514 bp, Homo sapiens
ttagtgaggaagacgttgaaagctgagataggccaaaaactaggcctcttgctccaataagttatccaagttgtgaatgcaaagtgaaagctcttgaaggaaattaaaagtgctactccagtgaacacgtgaatgttaagaaagtgaaacagccttatcgctgatatggaaaaactctggtctggatagatcaaaccagccacaacactcccttaagccaaaacctaatccagagcaaggccctaactctcttcaattctgtgaaggcygagagaggtgagaaagttgcatgagaaaagtttgaagttagcagaggttggttcatgagatttaaggaaagaagccgtctacatcgtatgaaagttcaaggtgaagcagcaagttatccagaagatctagcttaaatgtttgatgtatctggctacattaaacaatagattgtcagtgcagatgaaacagccttctgttgtaaaaagatgccatctaggactttcatagttggataaaaaaaaat

SEQ ID NO: 804229 - DNA, 561 bp, Homo sapiens
cctgtgttagtttgctgagaatgatggctttccagtttcatccatgtccctgcaaaggacacaaactcatccttttttatggctgcatagtattccatggtgtatatgtgccacattttctttaaccagtctatcattgatgggcatttgggatggttctttgctattgtaaatactgctgcaataaacrtacgtgtgcatgtgtctttatagtagaatgatttataatcctttgggcatatacccagtaatgggattaccaggtcaaatggtatttctggttctagatgattgaggaatcgccacactgtcttccacaatggctgaactaatttacactcccaccaacagtgtaagagcattcctttttctccacagctttgccagcatctgttgtttcctgactttttaataatcgccattctgactggtgtaagatggtatctcattgtggttttgatttgcatttctctaatgaccagtgatgatgagcttttgtttatacgtttgttggtcacataaatgtcttcttttgagaagtgtctcttcatatcctttgtc

SEQ ID NO: 804230 - DNA, 561 bp, Homo sapiens
cctgtgttagtttgctgagaatgatggctttccagtttcatccatgtccctgcaaaggacacaaactcatccttttttatggctgcatagtattccatggtgtatatgtgccacattttctttaaccagtctatcattgatgggcatttgggatggttctttgctattgtaaatactgctgcaataaacgtacgtgtgcatgtgtctttatagtagaatgatttataatcctttgggcatatacccagtaatgggattaccaggtcaaatggtatttctggttctagatgattgaggaatcgccacactgtcttccacaatggctgaactaatttacactcccaccaacagtgtaagagcattcctttttctccacagctttgccagcatctgttgttycctgactttttaataatcgccattctgactggtgtaagatggtatctcattgtggttttgatttgcatttctctaatgaccagtgatgatgagcttttgtttatacgtttgttggtcacataaatgtcttcttttgagaagtgtctcttcatatcctttgtc

SEQ ID NO: 804231 - DNA, 577 bp, Homo sapiens
ttctccacagctttgccagcatctgttgtttcctgactttttaataatcgccattctgactggtgtaagatggtatctcattgtggttttgatttgcatttctctaatgaccagtgatgatgagcttttgtttatacgtttgttggtcacataaatgtcttcttttgagaagtgtctcttcatatcctttgtcctcttttgatggggttgaactaaagagcttctgcacagcacaagaaactataatcagagtgaacaggcaacctacagaatgggagataatttttgcaatctacccacctgacaaaagtctaatatccagaatctacaaggaacttcaacaaatttacaagaaaaaaaacagactccaaggttttaaaactaggaagatgatggtgttactgaccgaaagagggagttctgytttagggctgtgatgaggcaacggtgtccaatgagttgttttagaaaaagtgagtgcgagatcgcaaatattgtaaaatctgatgttgaaaaagaagatttaagtgggatattaatttccttttcaagtcctttatcaccaagtgtcctagtc

SEQ ID NO: 804232 - DNA, 577 bp, Homo sapiens
ttctccacagctttgccagcatctgttgtttcctgactttttaataatcgccattctgactggtgtaagatggtatctcattgtggttttgatttgcatttctctaatgaccagtgatgatgagcttttgtttatacgtttgttggtcacataaatgtcttcttttgagaagtgtctcttcatatcctttgtcctcttttgatggggttgaactaaagagcttctgcacagcacaagaaactataatcagagtgaacaggcaacctacagaatgggagataatttttgcaatctacccacctgacaaaagtctaatatccagaatctacaaggaacttcaacaaatttacaagaaaaaaaacagactccaaggttttaaaactaggaagatgatggtgttactgaccgaaagagggagttctgttttagggctgtgatgaggcaacggtgtccawtgagttgttttagaaaaagtgagtgcgagatcgcaaatattgtaaaatctgatgttgaaaaagaagatttaagtgggatattaatttccttttcaagtcctttatcaccaagtgtcctagtc

SEQ ID NO: 804233 - DNA, 464 bp, Homo sapiens
ttaatacttatttggctgttaaggtcatgagtgatttgatctccatgaagttgtgtcttcctctttccaacctcacaccttagcagtaaactcgagctcactggaagtgatcattacttgaagtcacacttggatgactgttattaaaccagagaggagaaatcatgctacgtatagaaatggtagtattagtaacacaccaatgttgttattttttaaactgagttggccagaactgctttgaactgatattctgcttatgtgagctgtgtctmaacattttaaaagcaaactgatacatttaacagatacagacatatgggcacacccatacacataccccaatgtagatttgctagattgaaaatgtgggccatttaaaaaatatagtattgatttgaaataagtagtcagactagctcatgctgctttcagagtaggacacacctgttcctcagtgggtg

SEQ ID NO: 804234 - DNA, 555 bp, Homo sapiens
gccgccacatggactgcagggatccaccagtttattcactcatcagttgaggaacatttgggtggcttcctgtttggggctatttcaaatagagctgccaggagcatttgtgtacaagtttttgcatgcacatgggttttctctgcattggttagaaattctggagaagaatggctggatctcctgttagatacatgttcacctttttaagaaattgccaaactatttttccatagtgagtgtacgtgtgcataccattttccaaagcgcaggtttacaccagcagccagacgcttcaggtgaacccgtcgtacagttttctartcttctctgtgcagctctctctgctcagttctgttaactccagctgccccgtcttccccctacacacagacctgtcgcttcaattctgcaagtctgctgagctccccctagggcctccctccctgaaccagggcctggccactctctgaaggcagcaggctggagtgattgcaggactcagcatgcttgcttcctgtctctcacggacctttgtcccacattgtctcatgt

SEQ ID NO: 804235 - DNA, 517 bp, Homo sapiens
ccagtttattcactcatcagttgaggaacatttgggtggcttcctgtttggggctatttcaaatagagctgccaggagcatttgtgtacaagtttttgcatgcacatgggttttctctgcattggttagaaattctggagaagaatggctggatctcctgttagatacatgttcacctttttaagaaattgccaaactatttttccatagtgagtgtacgtgtgcataccattttccaaagcgcaggtttacaccagcagccagacgcttcaggtgaacccgtcgtacagttttctaatcttctctgtgcagctctctctgctcagttctgttaactccagctgccccgtcttccccctacacacagacctgtsgcttcaattctgcaagtctgctgagctccccctagggcctccctccctgaaccagggcctggccactctctgaaggcagcaggctggagtgattgcaggactcagcatgcttgcttcctgtctctcacggacctttgtcccac

SEQ ID NO: 804236 - DNA, 517 bp, Homo sapiens
ccagtttattcactcatcagttgaggaacatttgggtggcttcctgtttggggctatttcaaatagagctgccaggagcatttgtgtacaagtttttgcatgcacatgggttttctctgcattggttagaaattctggagaagaatggctggatctcctgttagatacatgttcacctttttaagaaattgccaaactatttttccatagtgagtgtacgtgtgcataccattttccaaagcgcaggtttacaccagcagccagacgcttcaggtgaacccgtcgtacagttttctaatcttctctgtgcagctctctctgctcagttctgttaactccagctgccccgtcttccccctacacacagacctgtcgsttcaattctgcaagtctgctgagctccccctagggcctccctccctgaaccagggcctggccactctctgaaggcagcaggctggagtgattgcaggactcagcatgcttgcttcctgtctctcacggacctttgtcccac

SEQ ID NO: 804237 - DNA, 633 bp, Homo sapiens
atatgtatatgtttttgcaactcctagtccatatggagagagattttaattcaggaaattaaagaataaatttcagaacatttattgttgtatcccttactaaattatagatggatggaactatccttttatcttgaaaatttggcttaattgagagagtttatttttccataaatacagtggaatgctttcctgagagagcactgtactctctcacttgcttcttgtccatttgtgctattttatgccatactgattttgcactgagactggcagaaggcacagacttttctctcctcccccagtttctcaccatatctgattttcttgttttccagtcttcatttccatttgtttctgarcatagattgatttgcccttgaatggctcagtggtgctcaaggacacccgctgagttagcctttggtgaacattttccatggaacaggctggaatcaagagcacaggccctggagaaagaatgttgtgttcaaaacccagttctacctctagttgtcttgtttcctgggcaagttccccagtctctcaacttcttcaaaaggttgtgaaaattacaagagataaaacttgaacagtgctgatcacatatggacagtaaatattagccaagat

SEQ ID NO: 804238 - DNA, 640 bp, Homo sapiens
tattttccactgttatggtttaaaaccctaaatagattacactgacaatactgacaaatttaatcttcctcatatataacttgaggataaaaggtcaaaaaggaaacatgtttctctcctctcctacagataaaaatgcaaatagctagtttcctttgaagtttgtaaatacagcatgtattctgtgttcttgtatagcattaartaggccactgtgatacagtaaaagttaactcttcaaagtctctgcctggctgagaaaaagggctgttttcttctaacatagatttcatgactatgataaaatcaattctgtgacagtgtgttctttgctttataaggagtacaattcctaaagcaactattttggacagattctttcaccttttatttagataataaaataaaagtctcagggatcgccttcttagcagacactgtgcttggcccccagaaagtgatccagacagtctgcaggctcagagactcatcatctaggggaaaggacaataccaggttctgggacttagcacagaagtgggtgggaaggacagagaagggatttggagcccaatgctgaggaaccttcaatggccccaagaaggaggcagaacagaaaaaaaaatggtgatggggcaac

SEQ ID NO: 804239 - DNA, 500 bp, Homo sapiens
tgttattacaagtgtcagagttttaaaaattaagaagtgtataaagtcagaaagttacagtaagccaaggtcagtttattattgaggaactttgttgtatacatttagtgtaacctagatgtacagtgttcataacgtctacagtggtatacaataatgtcctaggccttcacattcactcactcactgamtcaggagagcaacttggagtactgtaagctccattcacagtaagtgtcctattcaggggtacgtttctttttttttttttttagacagtctcactctgttgccaggctggagtgcagtggcgctatcttggctcactgcaacctccgcctcctgggttcaagcgattctcctgcctcagcctccggagtagctgggattacaggcacacaccaccacacccagctaatttttgtatttttagtagagacgagacggggtttcaccatgttggccaggatggtctcaatctcttgacttcgtgatccact

SEQ ID NO: 804240 - DNA, 628 bp, Homo sapiens
ctttcacagaggcccaccccctgcggtcttacctcacagggaatgtgtttttaaaaacaaatttgaggtcgggtgcagtggcttacgcctgtaatctcagtactttgggaggccgaggcaggcagatcatgaggtcaggagatcgagaccgtcctggctgacacagtgaaaccccgtctctactaaaaatacaaaaaattagctgggcgtggtggcaggcgcctgtggtcccagctactcgggaggctgaggcaggagaatggcatgaacccaggaggtggaggttgcagtgagctgagatcgtgccactgcactccagcctgggcaacagagccagactctgtctcaaaaaaaaaaaaaaaaaaaaamaaccccacaaattcgaaaacaagccaacacaccttgccccctcaaaaaaggtctggctatttttttccccccaaactgtgggcgtgctggctcagcatcctcaggacccagctgttgcttaattttaacttattattttttaattaatccaaataaaaagttgttgggctccaagacaacctgggcacaaaggttctgaagggcagtttcctagcagccccaggctcactgtgggaagggaccatgttgtcatttcctc

SEQ ID NO: 804241 - DNA, 634 bp, Homo sapiens
gcgtttacattcacgggcgttcatattcacaggggtgttacactcaaaggggcatttacagtcataggggcgtttacattcacaggggatttactgtcacaggggcattatacttcacctccttgagcacatccttcctttagctgagcaactttgagtctgataacgcaccttcatcattcaggggttagccagagacgtggatagatagaaatttgggtttctctttctgactcattttcttctgtgtctcctcggaggcaggtgtcccagtcttggtgttttgcttcttcagccagaaaaactgtggctttgcaaccaaagtgccygctggcccacatgccatgtgcacggactgcacctggcttcaagcctaaagctgtgagaatgggcactccctttacgtaactgtacttctcctgatgtggaccccctaactagaaatcttcattttttttgttcactcttctatggcttttcaagaatctgctttctttagtgaagtcccaattttatagtagtttttttgcaggagggttgatccgatagcatttaataattcattataaaaggcaaaaatcctggcctctatgtataagtggggagatgaaatgaggcttcctgtcacaaagat

SEQ ID NO: 804242 - DNA, 600 bp, Homo sapiens
cataaaattagcaagcgttacaaccagcattcaaatttctctttatgtagctctaaagacgttctgccttctgtgactttaaagaggtagtaggtggggagaactgggtacttccttccactcctgttttggaaatcatggctggagttcaggggctggtacagatgggacatgacatgtttcccacatatgtcagaaaaaggttgagacccactcaaatcacattactgccattcagcactagccatttttcacataatggcacttgattatgaactcagtgagtttcttaagatgttttttcttattcatgcgaatgttttagttggtcaaatattatgtatttggtttatctttccattttaaatttatattgtatgttagatttaytgttaaaaatattcatatccgtagtatttatgatttatctaaatactgtaactttaaatctgtaacttttctattatagaaaaaacttgtatatacttaggatttcagtagttggacagaggtatctttaatattttttgcagtttccctttacaaaaaaactctcatccttgcagtaggagttccatgatttgaacccctggagcaaaa

SEQ ID NO: 804243 - DNA, 461 bp, Homo sapiens
agacataggttagagtctcaattctgcctgttaatagccctgtgactcttgggcaagtaacatctctgggctttggttaacccatacagtagttacctcacagggctattttaggattaaataaaataatgtagagagaatgcacctgatgtcagttgttttcattgctgcaatatttaatacctatctagacatcaaaggaaaagagatgaaatactaagtaatatccctaaaagaagcacttgaactgaaaatatttaggatcattggactacttytttgcacctgtaatccctgtcatctgaattctcttaccttccgcaacctgggaacttgggtatctgtaatatcacttctgcagtcaatatttgacttgaccttcaccttaacaaactcaccaaacacaacagccttgcgttttagtcaacccaagggcacaggaatcattagtcaaatcaatg

SEQ ID NO: 804244 - DNA, 461 bp, Homo sapiens
agacataggttagagtctcaattctgcctgttaatagccctgtgactcttgggcaagtaacatctctgggctttggttaacccatacagtagttacctcacagggctattttaggattaaataaaataatgtagagagaatgcacctgatgtcagttgttttcattgctgcaatatttaatacctatctagacatcaaaggaaaagagatgaaatactaagtaatatccctaaaagaagcacttgaactgaaaatatttaggatcattggactacttctttgcacctgtaatccctgtcatctgaattytcttaccttccgcaacctgggaacttgggtatctgtaatatcacttctgcagtcaatatttgacttgaccttcaccttaacaaactcaccaaacacaacagccttgcgttttagtcaacccaagggcacaggaatcattagtcaaatcaatg

SEQ ID NO: 804245 - DNA, 525 bp, Homo sapiens
tacacacacatacaaaatctcacatatgttaatatcaaaactattaataatacattatcacttcatctaagcatcacctaagaatagggcctgtttctcaaagtgtttgtggctggggcacctcctgaccacacaaagcccaaaataaagctatccaagagccctcataggctaatactagtaactggcccagagccctgaatgctcaattgatttgacacactagcgctcaagctacctttggaacatggaaggcagcacagagccttaattcgctggcatctgtactccgacarcatgcctactcttgtactagtttaagttattccgtattttaaatgagtcacttcgtaaatactgaccctcccttattgccagtaggtttttgtttgtttgttttttgagacggagtttcgctcttgttgcccaggctggagtgcaatggtgcgatctcggttcactgcaacttccgcctcccgggttcaagcgattctcctgcctcagcctcccaagtagctgggacta

SEQ ID NO: 804246 - DNA, 632 bp, Homo sapiens
gctgaccctttcacccgggatcatgattccatttttatcccacctcttcctaaactttaatcaccagttactgcccctgtgtttatgttttgtctcagaacatcttagaaggtaagtccatatttgctgttgccaattccatatcgcacatttaatctttcaaataatgaaatagactttctccaagatctcttataaaataagcatttcagggggctggagggaggactgtaataatcaaattctcttcctagtatcacatgtctcttctcagtctttagcttgctagacatttctctaccacatgatcctttccattgtaaaactctcttgacttcagtagaaattcttttgcttccttttttcttcctacctctaaaggcattccttttttttttttttttttttttgcttcytctttattttcccaagggttctgttgtcagtgatattttcatcttgccttaccaccatttgctgtctctattatcaaataccaactattgaatgaggacatacattttcttctcagattcagatttcattccatatagctgcacattttggaatcttctttggctgccccttttcttcactcccagcaccaaatggaggatcaagtcctagaaaac

SEQ ID NO: 804247 - DNA, 532 bp, Homo sapiens
ttcatagagattaactgaatttttgtgcattggagtaaatttgaactttgtttaaggtttataccagtacatagattattaggttgttctttaagacactgccttatttagagtaggtgacatttacaatttaggaaaaaggaagaggaaggaaggaaggaaggaagggtgagctccttctccctggaccsctgctcctttctccctgtgccaaattgttaactcctactcatctttaaagtttcaggagtggtggcttatcctggatctccacagacagacccagaccccaggcttcaggaacacctttacccccttcttagtatcacctatcagagttctaatttcagtttgcatgattattaaatatttgtctttcctgctagagtgtaaactccatgagggcaggaccctttcattgcttgactatggattcctaatgcccaagagcctggcaggggctagtgtcaatcaccagcactatttgtcccttgctatgcgtcggggccttttccaacaccatgtgggcctg

SEQ ID NO: 804248 - DNA, 632 bp, Homo sapiens
gtttaaggtttataccagtacatagattattaggttgttctttaagacactgccttatttagagtaggtgacatttacaatttaggaaaaaggaagaggaaggaaggaaggaaggaagggtgagctccttctccctggacccctgctcctttctccctgtgccaaattgttaactcctactcatctttaaagtttcaggagtggtggcttatcctggatctccacagacagacccagaccccaggcttcaggaacacctttacccccttcttagtatcacctrtcagagttctaatttcagtttgcatgattattaaatatttgtctttcctgctagagtgtaaactccatgagggcaggaccctttcattgcttgactatggattcctaatgcccaagagcctggcaggggctagtgtcaatcaccagcactatttgtcccttgctatgcgtcggggccttttccaacaccatgtgggcctgctcgtgctgttctcacacaagcagccctatgcagtgagcagtattgttctcatttacagaggaggaagtgatactcagagaggacggtcacccatccagagtgacagaggtagtcagtggctgtctgaccccaccacctgtgttcttca

SEQ ID NO: 804249 - DNA, 629 bp, Homo sapiens
tatatttatgggattaccgaacagtttagaaatgatatcctctgttctgtgcttgcaagccaaattgccatatgctctttccagcactggacagacactgagtaaatgtcaatcaaatgaattcatttttctctcagtccagttattatatgcaaatattaatgaacaaagatctttctgggtgccactcaggatacaataaaagatttcagttttctcattcacttcaacatttgtagcatgtctcttctgtgycaggcattctaattagtgagacgagggatgccacccaagtgagggagaatgttctatttattgattcggttgttatatatggagcaatttccatgttccacgtattttattagtccctgtgaatatacagaggcaaagtccctgtcctgtcggggcttacatttaacaaagagtaagttaacaaagtggtgataagaaccacggtagcagtaaacaaggtgatgagagagtagttagggaggctgcttaattagggtggtcacaggaagacctgtgcagctggcatttgagatactctctagaggctgtgaatgagtcatggaaagataggaggcaagagtgctccaggcaaagggaacaacaagtaccaaggt

SEQ ID NO: 804250 - DNA, 459 bp, Homo sapiens
agacataggttagagtctcaattctgcctgttaatagccctgtgactcttgggcaagtaacatctctgggctttggttaacccatacagtagttacctcacagggctattttaggattaaataaaataatgtagagagaatgcacctgatgtcagttgttttcattgctgcaatatttaatacctatctagacatcaaaggaaaagagatgaaatactaagtaatatccctaaaagaagcacttgaactgaaaatatttaggatcattggactacttytttgcacctgtaatccctgtcatctgaattctcttaccttccgcaacctgggaacttgggtatctgtaatatcacttctgcagtcaatatttgacttgaccttcaccttaacaaactcaccaaacacaacagccttgcgttttagtcaacccaagggcacaggaatcattagtcaaatcaa

SEQ ID NO: 804251 - DNA, 459 bp, Homo sapiens
agacataggttagagtctcaattctgcctgttaatagccctgtgactcttgggcaagtaacatctctgggctttggttaacccatacagtagttacctcacagggctattttaggattaaataaaataatgtagagagaatgcacctgatgtcagttgttttcattgctgcaatatttaatacctatctagacatcaaaggaaaagagatgaaatactaagtaatatccctaaaagaagcacttgaactgaaaatatttaggatcattggactacttctttgcacctgtaatccctgtcatctgaattytcttaccttccgcaacctgggaacttgggtatctgtaatatcacttctgcagtcaatatttgacttgaccttcaccttaacaaactcaccaaacacaacagccttgcgttttagtcaacccaagggcacaggaatcattagtcaaatcaa

SEQ ID NO: 804252 - DNA, 532 bp, Homo sapiens
tacacacacatacaaaatctcacatatgttaatatcaaaactattaataatacattatcacttcatctaagcatcacctaagaatagggcctgtttctcaaagtgtttgtggctggggcacctcctgaccacacaaagcccaaaataaagctatccaagagccctcataggctaatactagtaactggcccagagccctgaatgctcaattgatttgacacactagcgctcaagctacctttggaacatggaaggcagcacagagccttaattcgctggcatctgtactccgacarcatgcctactcttgtactagtttaagttattccgtattttaaatgagtcacttcgtaaatactgaccctcccttattgccagtaggtttttgtttgtttgttttttgagacggagtttcgctcttgttgcccaggctggagtgcaatggtgcgatctcggttcactgcaacttccgcctcccgggttcaagcgattctcctgcctcagcctcccaagtagctgggactacaggcat

SEQ ID NO: 804253 - DNA, 612 bp, Homo sapiens
gctgaccctttcacccgggatcatgattccatttttatcccacctcttcctaaactttaatcaccagttactgcccctgtgtttatgttttgtctcagaacatcttagaaggtaagtccatatttgctgttgccaattccatatcgcacatttaatctttcaaataatgaaatagactttctccaagatctcttataaaataagcatttcagggggctggagggaggactgtaataatcaaattctcttcctagtatcacatgtctcttctcagtctttagcttgctagacatttctctaccacatgatcctttccattgtaaaactctcttgacttcagtagaaattcttttgcttccttttttcttcctacctctaaaggcattccttttttttttttttttttttttgcttcytctttattttcccaagggttctgttgtcagtgatattttcatcttgccttaccaccatttgctgtctctattatcaaataccaactattgaatgaggacatacattttcttctcagattcagatttcattccatatagctgcacattttggaatcttctttggctgccccttttcttcactcccagcaccaaatgg

SEQ ID NO: 804254 - DNA, 601 bp, Homo sapiens
ggacaccagtcatggggtgcactgggcctctgcattcagcaagtgggacaaaactcaggcaatctgcaacctccaggtttgtgtgaattcacatgatttctcaactagaaaatcagccaaatgtgtgaagttctggaaatccggttttatacataattgaatttctctagaaactggagttttaggagttataagtcctcccttcccagtgactaaatggatccttttttttttttttttttttttttttgagacagtcttgctctgtcacctaggctggaatgcagtggtgtgatctcagctcactgcaacctccgcctcctggattcaactgattctcctgcctcagcctcccaaataactgggcttacagkcacctaccaccatgcctggctaattttttgtatttttagtagagatggggtttcaccacgtcggccaggctggtctcgaactccttacctcaagttatccacccacctcggcctcccaaagtgctgggattaaggcatgagccaccgcacccggcctacatttttttttttaaaggtttagcctggtgattttatagctcatctaggttgtaaggaatagcaatgaa

SEQ ID NO: 804255 - DNA, 596 bp, Homo sapiens
tttatcttcttcactgctcatatttcttgagtctgtcttcttagttataagctgattattcttctctttgaaatatgtagtttcttagacccaagagataaatctttttatatctaaaatatgaaccttttctctgagtaccttatagtcacctgataactctatttgtggaattaagtactgctgatggcattgctgagtgtccttggctcattgctgcctgattttcattcttgtaaccaaccgcatctgaaaagttctttcaagtccataatatccctctttgcctctacaaacccagcaaagtttccttttactgtctccaacctttggccttcaggaaggataaagggagaagtcacctttggtccttcctcttcgcarttctcccttttccattttaaattgcctctctcttcctctacataaagggatggtggttctgagaagcagctgcagcaggttggcgatagaaatgtccattgatttttatcctgctggccgaacaagggaagtaagagataggctggtataaaacaaaaaactctggaagaagagattacatgtcttctgcatgagcaccatcctcctccctt

SEQ ID NO: 804256 - DNA, 628 bp, Homo sapiens
aaggtttataccagtacatagattattaggttgttctttaagacactgccttatttagagtaggtgacatttacaatttaggaaaaaggaagaggaaggaaggaaggaaggaagggtgagctccttctccctggacccctgctcctttctccctgtgccaaattgttaactcctactcatctttaaagtttcaggagtggtggcttatcctggatctccacagacagacccagaccccaggcttcaggaacacctttacccccttcttagtatcacctrtcagagttctaatttcagtttgcatgattattaaatatttgtctttcctgctagagtgtaaactccatgagggcaggaccctttcattgcttgactatggattcctaatgcccaagagcctggcaggggctagtgtcaatcaccagcactatttgtcccttgctatgcgtcggggccttttccaacaccatgtgggcctgctcgtgctgttctcacacaagcagccctatgcagtgagcagtattgttctcatttacagaggaggaagtgatactcagagaggacggtcacccatccagagtgacagaggtagtcagtggctgtctgaccccaccacctgtgttcttca

SEQ ID NO: 804257 - DNA, 539 bp, Homo sapiens
accccatctttattaaaaattaaaaagaatatctatatgcaaatgtgttgggtgttaacccaaaaaaaatgagtaaaaggatgatatacaggagaagtgatagctgaatataaattaaagggaaaactgaaactaaatggagaactaaaagggaataaaaagataatacatgaaggcctgaaactttcaaaactctttcttatgcagcagcacattagtgttggatgaaaatcccttccctaaggatctaattacactactwcattttgcaatgaatagtattcagtagtcataatgctagaaatgttgcttatgttgagttttaatttttagaatcaaattttacacaaagcattggagactaaattattctcttgatgttagaaaaaaaataatgtaattaacaataaccagaaggtggcagaacacggaaaaagtggaatcaagtgtctacgcagcagttcctcattttcactgaaaaagatgttgacttaaggttgataagtcaacaagacagcttaaatatatattacttgaag

SEQ ID NO: 804258 - DNA, 585 bp, Homo sapiens
cttaaaaatatttttatgttttaaaaattcatgtacatatttgacatttatatatttgaggtgtaatgcaaatttaaaggcacacattaaatatattcagggttctagagcttttgaaatttkatgcacaaatatattgaagtgtatgtataagttaacatatataaattattttacaagggcaatgaaaatattttttagagagacactaaaatggcatgtaaagcagacaatgtggccctttgcctgattttgcacttacaggtttatggcacaaaacttccccctcatgacttacccttctcatttatgccattgccaccgccatctcctgagtccctagaggcactcaggtaactcacctagtaactaactgggtgatttaattaattaaaaagttcagatatctcttacatgtttaggaggtgttagtttatgattaaaatattactataggagaagacaaaagtaatattgtcagaatcatttgactcctacaaatacagtatttataaatgcaagaaataatttacagaatacataatcagaattcttaaataattgtcatttattccactagtcctg

SEQ ID NO: 804259 - DNA, 595 bp, Homo sapiens
tcacaaatctggaaaatagataagttgtttttgtagattcaaaacttcataggcaaagctcagatacgtgttgtggcctagtagagtctagtgcctaaccttcctttcccttcgtgaacatttatttgatttagaccacagggcatccttaaaaatatttttatgttttaaaaattcatgtacatatttgacatttatatatttgaggtgtaatgcaaatttaaaggcacacattaaatatattcagggttctagagcttttgaaatttgatgcacaaatatattgaagtgtatgtataagttaacatatataaattattttacaagggcaatgaaaatattttttagagagacactaaaatggcatgtaaagcagacaatgtkgccctttgcctgattttgcacttacaggtttatggcacaaaacttccccctcatgacttacccttctcatttatgccattgccaccgccatctcctgagtccctagaggcactcaggtaactcacctagtaactaactgggtgatttaattaattaaaaagttcagatatctcttacatgtttaggaggtgttagtttatgattaaaatat

SEQ ID NO: 804260 - DNA, 595 bp, Homo sapiens
tcacaaatctggaaaatagataagttgtttttgtagattcaaaacttcataggcaaagctcagatacgtgttgtggcctagtagagtctagtgcctaaccttcctttcccttcgtgaacatttatttgatttagaccacagggcatccttaaaaatatttttatgttttaaaaattcatgtacatatttgacatttatatatttgaggtgtaatgcaaatttaaaggcacacattaaatatattcagggttctagagcttttgaaatttgatgcacaaatatattgaagtgtatgtataagttaacatatataaattattttacaagggcaatgaaaatattttttagagagacactaaaatggcatgtaaagcagacaatgtgrccctttgcctgattttgcacttacaggtttatggcacaaaacttccccctcatgacttacccttctcatttatgccattgccaccgccatctcctgagtccctagaggcactcaggtaactcacctagtaactaactgggtgatttaattaattaaaaagttcagatatctcttacatgtttaggaggtgttagtttatgattaaaatat

SEQ ID NO: 804261 - DNA, 585 bp, Homo sapiens
cttaaaaatatttttatgttttaaaaattcatgtacatatttgacatttatatatttgaggtgtaatgcaaatttaaaggcacacattaaatatattcagggttctagagcttttgaaatttgatgcacaaatatattgaagtgtatgtataagttaacatatataaattattttacaagggcaatgaaaatattttttagagagacactaaaatggcatgtaaagcagacaatgtggccctttgcctgrttttgcacttacaggtttatggcacaaaacttccccctcatgacttacccttctcatttatgccattgccaccgccatctcctgagtccctagaggcactcaggtaactcacctagtaactaactgggtgatttaattaattaaaaagttcagatatctcttacatgtttaggaggtgttagtttatgattaaaatattactataggagaagacaaaagtaatattgtcagaatcatttgactcctacaaatacagtatttataaatgcaagaaataatttacagaatacataatcagaattcttaaataattgtcatttattccactagtcctg

SEQ ID NO: 804262 - DNA, 585 bp, Homo sapiens
cttaaaaatatttttatgttttaaaaattcatgtacatatttgacatttatatatttgaggtgtaatgcaaatttaaaggcacacattaaatatattcagggttctagagcttttgaaatttgatgcacaaatatattgaagtgtatgtataagttaacatatataaattattttacaagggcaatgaaaatattttttagagagacactaaaatggcatgtaaagcagacaatgtggccctttgcctgattttgcacttacaggtttatggcacaaaacttccycctcatgacttacccttctcatttatgccattgccaccgccatctcctgagtccctagaggcactcaggtaactcacctagtaactaactgggtgatttaattaattaaaaagttcagatatctcttacatgtttaggaggtgttagtttatgattaaaatattactataggagaagacaaaagtaatattgtcagaatcatttgactcctacaaatacagtatttataaatgcaagaaataatttacagaatacataatcagaattcttaaataattgtcatttattccactagtcctg

SEQ ID NO: 804263 - DNA, 585 bp, Homo sapiens
cttaaaaatatttttatgttttaaaaattcatgtacatatttgacatttatatatttgaggtgtaatgcaaatttaaaggcacacattaaatatattcagggttctagagcttttgaaatttgatgcacaaatatattgaagtgtatgtataagttaacatatataaattattttacaagggcaatgaaaatattttttagagagacactaaaatggcatgtaaagcagacaatgtggccctttgcctgattttgcacttacaggtttatggcacaaaacttccccctcatgacttacccttctcatttatgccattgccaccgccatctcctgagtccctagaggcactcaggtaactcacctagtaactaactrggtgatttaattaattaaaaagttcagatatctcttacatgtttaggaggtgttagtttatgattaaaatattactataggagaagacaaaagtaatattgtcagaatcatttgactcctacaaatacagtatttataaatgcaagaaataatttacagaatacataatcagaattcttaaataattgtcatttattccactagtcctg

SEQ ID NO: 804264 - DNA, 618 bp, Homo sapiens
aaaacttttttttttcctctttctcttgggtttcaagatgtaaccttgaagcaaactacagaagcctgtttcctttagccttaaaatagactccacgtccctccgtttttctccagatatactcccttcttatttatctaactgtacgctagcatctaattatgtgccttctttgaagatttgggggctaatcttgagacagacagaccaagcctggagacccagctgcagagttccagagatggcctcagagggctaatcagcagccccgccactgttgagatgaygccagaccatgtaccaggtggactgggacccaagatagccactggaacaagatgcacaggcatcgtcctcagcacagttctggcatgcctttcgtatcaagttctccctttttaaactctttccttccccaccaaaatttgaagtagttgctttggatgggaatccaaccacttccccacgactagttttggttaataaagtcactttctttctaacaggcctcacgcttgttaattctactctgcaagcagcgagctttgtgttacataaatgatcacaattcagaatatataaatcataattcagaataagttatacattccctttaaa

SEQ ID NO: 804265 - DNA, 665 bp, Homo sapiens
tggactgggacccaagatagccactggaacaagatgcacaggcatcgtcctcagcacagttctggcatgcctttcgtatcaagttctccctttttaaactctttccttccccaccaaaatttgaagtagttgctttggatgggaatccaaccacttccccacgactagttttggttaataaagtcactttctttctaacaggcctcacgcttgttaattctactctgcaagcagcgagctttgtgttacataaatgatcacaattcagaatatataaatcataattcagaataagttatacattccctttaaatgaacttatgtaaatgtatttcacgtttgtayaaataagagaaaagtacggaaagatgctagccaaatttttaactaggaaggggtgggtgatggaagtggcattggtagaccagaggatgtgactcattattaaaatgtagaaacctcaatatcacttggattactagcaaaagcatatatgacccatttaattcacatcactaaaataaaatgagtaaataattttataacaaaagagacagtaaacagaacagacttagtagaagcaagctgggtctagctggaacgttgtcacaacgaggaggtttcaaaggatggaagaactcgaaggtgttatgatcctcaggaag

SEQ ID NO: 804266 - DNA, 665 bp, Homo sapiens
tggactgggacccaagatagccactggaacaagatgcacaggcatcgtcctcagcacagttctggcatgcctttcgtatcaagttctccctttttaaactctttccttccccaccaaaatttgaagtagttgctttggatgggaatccaaccacttccccacgactagttttggttaataaagtcactttctttctaacaggcctcacgcttgttaattctactctgcaagcagcgagctttgtgttacataaatgatcacaattcagaatatataaatcataattcagaataagttatacattccctttaaatgaacttatgtaaatgtatttcacgtttgtacaaataagagaaaagtacggaaagatgctagccaaatttttaactaggaaggggtgggtgatggaagtggcattggtagaccagaggatgtgactcattattaaaatgtagaaacctcaatatcacttggrttactagcaaaagcatatatgacccatttaattcacatcactaaaataaaatgagtaaataattttataacaaaagagacagtaaacagaacagacttagtagaagcaagctgggtctagctggaacgttgtcacaacgaggaggtttcaaaggatggaagaactcgaaggtgttatgatcctcaggaag

SEQ ID NO: 804267 - DNA, 596 bp, Homo sapiens
ggcattgcattgtggttttgatttgcatttccctgataattagtgatgttgaacattttttcacatgcttgttgtccacttgtatatcgtcttttaagaattgtctattcatgtccttagcccattttttgatacgattgtttgtttttttctcactgattgaaattcttaactttatctttgaacttgtgttaaatgaagtctgatgtaacaatggagtatgggcttaagcaaggagatgcacgcaatatgyttgtccacagttccttgaggcccatttgggtaatgtgtccacaatgtcccatgaacacagaaagtgtgagagttcaccgagactcagagtacacagtaagcactttatgtctaccactgagtgagtgagggtacactgacagcctagagggtcctccagaacttgcttcaaatgtagaaagaagacaatggtgttctaagaaacacaagcaatcaagtgttaaattaaatttagcctaaagttagttgcctccttataagttcagcctaaaggttcttcatacatagtgaactgtaatctaactggatgtctaaacagactgctacctactattttaccaatc

SEQ ID NO: 804268 - DNA, 646 bp, Homo sapiens
aaaataaaatagccttgagctatttcgattctcttccaataggtaagctcttccctgaaaaaataagagtagggaatggggtgctcctgaaggatgaggtcatgcactaggaagccaacttcagatctgagaaatggtggtgggcttatggtggggactctaaggaatccactcatctaagactgtgctactgggagtagttaytacaaagccacctgcgaagtggaggagaccaggggctaggaaaagtgattagcagaagacaagaaacagatgtggagactgcactctgagtcagactgttatccatcacagcctgctctctctgctgaactctcttcactgtgaactgaagctttacacaagtttatttgaacacttctgcctggtctcgaaccctctgcaggacagaaagggaaggcgattcatctgccctcgagccagagcattcaaggagaagcagcttctcaccaaggtcatcatgggattgtctctttccatcaggagagggtctttattctggactttatgtttttcattaagtgcatgaatccacctagaattttgtcttcattatgaatttggttggaatacttttaatagaaatgtctatataagtgattcatatggacagtgatattattca

SEQ ID NO: 804269 - DNA, 530 bp, Homo sapiens
ttttaaaaatgtttcccttaaatgtagaagaaaaaagtatattttaaaaatgtataaacatttcatttaaaaatgtcttgccacattgatggcttcattctatcattaatttctcaaagacacaaagatatttgcccagagagggcaagcttcattattaactatattgtgatcgcttctagtttggggagtagacttcttgtcagatctgattagatagtctcagctgttaggttgggactgagagctcatactaggagcattaattttgctattttctgttggttatttgtgcttgaattattgtctayattcatcttcactgtagggaattcagagttttctaacccacttgtccattttgcaaaaaatagtttttggattacataatccaaaaatccatttatcaggcaccacaaaaaaataatgtctcgcttaaatcaaaagagggaggatgccagaggcagctgtcctgcctgtgagctctcactcctctcctcttctagagcacctctcataaagtctgtgac

SEQ ID NO: 804270 - DNA, 569 bp, Homo sapiens
tgtacacacatgtttatagcagcacaattcataattgcaaaatcatggaaccaacccaaatgcccataaatcaacaagtaaagaaactgtggtatatacataaatacaatgtaacactactcagccacaaaaaggaatgaattaatgacatttgcagttacctgggtgagastggagactattattctaagtgaaataattcaggaatggaaaaccaaacatcgtatgttctcactgatatgtgggagctaagctacaaggacacaaagacataagaatgacacaatggactttggggacttggggggaagtgtgggaaaaagatgaggaataaaagactacaaatagggtgcagtgtttactgctcagatgatgggtgcaccacaatctcacaaatcaccattaaagaacttactcatataaccaaacaccacctgtaccccaataacctgtggaaaatataaataaaataaataaaataaaaaataaaaatatataaaagtaacatcaaagatgattaaataataataactacaacaacttttcaagacatagtacaataaagtata

SEQ ID NO: 804271 - DNA, 569 bp, Homo sapiens
tgtacacacatgtttatagcagcacaattcataattgcaaaatcatggaaccaacccaaatgcccataaatcaacaagtaaagaaactgtggtatatacataaatacaatgtaacactactcagccacaaaaaggaatgaattaatgacatttgcagttacctgggtgagagtggagactattattctaagtgaaataattcaggaatggaaaaccaaacatcgtatgttctcactgatatgtgggagmtaagctacaaggacacaaagacataagaatgacacaatggactttggggacttggggggaagtgtgggaaaaagatgaggaataaaagactacaaatagggtgcagtgtttactgctcagatgatgggtgcaccacaatctcacaaatcaccattaaagaacttactcatataaccaaacaccacctgtaccccaataacctgtggaaaatataaataaaataaataaaataaaaaataaaaatatataaaagtaacatcaaagatgattaaataataataactacaacaacttttcaagacatagtacaataaagtata

SEQ ID NO: 804272 - DNA, 569 bp, Homo sapiens
tgtacacacatgtttatagcagcacaattcataattgcaaaatcatggaaccaacccaaatgcccataaatcaacaagtaaagaaactgtggtatatacataaatacaatgtaacactactcagccacaaaaaggaatgaattaatgacatttgcagttacctgggtgagagtggagactattattctaagtgaaataattcaggaatggaaaaccaaacatcgtatgttctcactgatatgtgggagctaagctacaaggacacaaagacataagaatgacacaatggactttggggacttggggggaagtgtgggaaaaagrtgaggaataaaagactacaaatagggtgcagtgtttactgctcagatgatgggtgcaccacaatctcacaaatcaccattaaagaacttactcatataaccaaacaccacctgtaccccaataacctgtggaaaatataaataaaataaataaaataaaaaataaaaatatataaaagtaacatcaaagatgattaaataataataactacaacaacttttcaagacatagtacaataaagtata

SEQ ID NO: 804273 - DNA, 587 bp, Homo sapiens
gtccattcacatttgccctctccccagtgcacgatgagttcaggacggcagcggtggaaggcccttttgtcaccttggacatggaagactgtggctacaacattccacagacagatgagtcaaccctcatgaccatagcctatgtcatggctgccatctgcgccctcttcatgctgccactctgcctcatggtgtgtcagtggygctgcctccgctgcctgcgccagcagcatgatgactttgctgatgacatctccctgctgaagtgaggaggcccatgggcagaagatagagattcccctggaccacacctccgtggttcactttggtcacaagtaggagacacagatggcacctgtggccagagcacctcaggaccctccccacccaccaaatgcctctgccttgatggagaaggaaaaggctggcaaggtgggttccagggactgtacctgtaggaaacagaaaagagaagaaagaagcactctgctggcgggaatactcttggtcacctcaaatttaagtcgggaaattctgctgcttgaaacttcagccctgaacctttgtcccccattcctttaaattct

SEQ ID NO: 804274 - DNA, 691 bp, Homo sapiens; identical to SEQ ID NO: 803507

SEQ ID NO: 804275 - DNA, 510 bp, Homo sapiens
gacattatctaatctggacctcccaacaacctcaagagaaagctctaatcattcattctgcaagtgaggaaactgagggtttaggtaatgaagtgacttacttactctgacacactggtgagtcacaaggtggcctctgtatcctggctacctagaatttctcctctgccagaacacactatgtgtccccaggttcctggccatttggaccatgatttgaacacactgtgtgctaggaacggtgctaaatgttttccacatgtaatcttatttaatcttttcagtaggccatcaaatgggtattaatattcccattatacagataagaaaactgaggttcagagagattamttagttcaaaaatcaaacagctaatgagtaaaagtgcctggattcaaaacccaggtctttgtggaaaaaaattaagttggaggtctgtctcactccttatactaaaataaattctggatggattcaaagtttggatctaaaaaactgaaggcataaaag

SEQ ID NO: 804276 - DNA, 609 bp, Homo sapiens
acctaaacaaagcaaaggctaccatcatttaattgtcacaaatcattttttatttttctttttatcttttactttaattctttactaattattttttcctcctttttcaaggtcttcaaatattgagttaggtaggactatttgatttcttttacctgaaataactgaattaggagaccagagagaggatagtacatcacttgggcrcatcgaggctctgggtacatgtgtagtatgtgtggtatcagtgtcataaagggctctctggaatatgtggcttgtggttacaatgttgcatgcttattaccttgtacctcccacctgagcccctcaggctagaatgtgagtccaatcacacattttagtgtgtgatgtagtgaagaggagaatgggtcctgtcaggccatcattttctcagtggtaaaattgggagcaatatctattgtattagggtgtgtgtctgtgtgtttctctctctatgagagagatttttattacaggaattggctcatgcaattgtggaggcttagtaagtccaaaatcttcagggtaggttggaggctggaaacccagggaagagttgcagtttggatgcccaggcattctgct

SEQ ID NO: 804277 - DNA, 589 bp, Homo sapiens
ccagcatttaggaaacactggtctattgtcaggcatacgtacagccgtgattttcacttgtgatcaaaccaagaagtacttaattaagtgcctatgatgcattgagctatgttctaggaatgtggatgatctaatgaaatacataaaatatatgatctgtcttcaagaacatcttgttggagagataaaactgacattcacaaagtcattaggaggaagggaattaatatttatagagcacttccwataggccaggtactgtgacagatgctttacaaaaatatctcatttaaatctcacaacagcccttgaggtagtgacatgggatctttggggcgttgcttttctggctggaaacctgtggccggtggcgcctttgccctagttttgctcaggccttctgggcttgttccgcccactcggcctggcaggctgtgctcagctcatgctaccgggctggatcccatgcctccaagggagactggagtcaggcgtggagcagagagaggtgtgtgagtgagcatggagtctggcctctgcacagccagacatcccagctgctgctgccgggcgggcagctcaaggtgct

SEQ ID NO: 804278 - DNA, 488 bp, Homo sapiens
agcaagtttcaactgctttagttaatagattctgagttgtatcattgtccagtgtttctggaattttattaggatcctgaatgtaccttgattggaaaaaaagtaaaaaatgtgaagcaatgaactttgaaattttacttgccataaagtcagagacacaattaatttgaaaatgcagcatgaaccttttatagaggaaaaaaagtgactttaagagccaggcagtttgttctctctagtttctcatagcacagaaaaatcaacaaaaccaattgatcaagtgkgagtaaagtagttacctgcctaaccatcaggcccggcaatgattataaggaaaaataaaagtggcagtgggaatagtggtggcatctctagctcttcacttgaaagcaggaaaaagtcatcccttttctctgataagcctggttgtggtccctttattgtctcaagcacaaaaatgtggacatagatttcttgcatgtgattag

SEQ ID NO: 804279 - DNA, 527 bp, Homo sapiens; identical to SEQ ID NO: 803447

SEQ ID NO: 804280 - DNA, 575 bp, Homo sapiens
cagactttttttaaatcttcaataaaaggattgaatgataaaatcgaaatcttctaaagaataaaatcaaaagacaaagatatggaaacagcagagagaagttaagaatattctaaaggtccagtacaggaggggtcctatatccaaataagagaaattcccaggaaagagcagaaaaaagaaaaatcataacaatatattcaataaaatttcagagaactgaaggatgcaggttgccaggttgaaagggcccagcacacgaagcacactgtgaaacttcagaaaactgcagacaaagagaagattttastaactgtcagagaggagggaaagacaaataggttatatataaagaatcagaaatcagaacccttccaacttctctacagcaacaataaaaagacaataaagcaatgcctttaaaatctgaaggaaaatgattttcaacttagagtgcaatacccaaataaactaccaataaagcacgagaatagaagaaagatactttaaagtatacaagacccagaaattcatattccatgcaccgttttataagaagctcctactttgggagg

SEQ ID NO: 804281 - DNA, 575 bp, Homo sapiens
cagactttttttaaatcttcaataaaaggattgaatgataaaatcgaaatcttctaaagaataaaatcaaaagacaaagatatggaaacagcagagagaagttaagaatattctaaaggtccagtacaggaggggtcctatatccaaataagagaaattcccaggaaagagcagaaaaaagaaaaatcataacaatatattcaataaaatttcagagaactgaaggatgcaggttgccaggttgaaagggcccagcacacgaagcacactgtgaaacttcagaaaactgcagacaaagagaagattttagwaactgtcagagaggagggaaagacaaataggttatatataaagaatcagaaatcagaacccttccaacttctctacagcaacaataaaaagacaataaagcaatgcctttaaaatctgaaggaaaatgattttcaacttagagtgcaatacccaaataaactaccaataaagcacgagaatagaagaaagatactttaaagtatacaagacccagaaattcatattccatgcaccgttttataagaagctcctactttgggagg

SEQ ID NO: 804282 - DNA, 624 bp, Homo sapiens
ctctacgaccttaagaaaactacttcacttttcattgtactgtgtgcaaaatgaagacgtttgttttgaagagmgattgaatgaatgcattataataaatagtgtctggtacttagtgagtgttcacaaaacagttacttttttcctattatctaaggctttcatcacatatatgaggaaaaagaggccagcacaaattatattgggatattatggttgattagtgatactattcctgaaggaaagtggtttcatttatacattcttcttgatttcctgtgcccctcctttctttccttaaatattctttagtagtgtaaagtatgatagcataggtctctctgctcatgtgctttaatgttacattgctacattatcattttgcacttcctgctatcttactcttaatggtaatgtaaaagagaaaatgtgtcacctaggtcccatgtcccctgtcccctgccttaaagattcagttcatgacctgtcattccaaaactaaaatactaaagtatgactgatatataacagtatatatatatgtgtgtgtgtgtgtgtgtgtatatatgtgtgtgtgggggtatatgtgtgtgtgtgtgtgtgtgtgtgtgtgtattgcactgc

SEQ ID NO: 804283 - DNA, 624 bp, Homo sapiens
ctctacgaccttaagaaaactacttcacttttcattgtactgtgtgcaaaatgaagacgtttgttttgaagagagattgaatgaatgcattataataaatagtgtctggtacttagtgagtgttcacaaaacagttacttttttcctattatctaaggctttcatcacatatatgaggaaaaagaggccagcacaarttatattgggatattatggttgattagtgatactattcctgaaggaaagtggtttcatttatacattcttcttgatttcctgtgcccctcctttctttccttaaatattctttagtagtgtaaagtatgatagcataggtctctctgctcatgtgctttaatgttacattgctacattatcattttgcacttcctgctatcttactcttaatggtaatgtaaaagagaaaatgtgtcacctaggtcccatgtcccctgtcccctgccttaaagattcagttcatgacctgtcattccaaaactaaaatactaaagtatgactgatatataacagtatatatatatgtgtgtgtgtgtgtgtgtgtatatatgtgtgtgtgggggtatatgtgtgtgtgtgtgtgtgtgtgtgtgtgtattgcactgc

SEQ ID NO: 804284 - DNA, 546 bp, Homo sapiens
tcccattgtattttaatattttatttctttagaaaatattcttctcttgtgagttttgtttataagattctgaaacccccaaaacatttttagctctcttttaaaactggtatttgttttagtttattactcattgtttagtggcagtgacaaagcaggaaaaaatgtttctccagatgattataattaatgtgagagatttgggtcagatgtttggatcaagatgttggatttaactttcagccgtttttcctgacaattgggatggtcatcctggtcctttgaaaggacaatggtggaggcactcatattttgatatcattaatgttcaaattataaaattagctgacctcatgrtgatttgaagtttgctaagggacattttgatgttaagctgactttccacactgactagaaatttgtgaattcacaaaactacacataactttttgtaagcataacatctgtcatcaccctgagagaggaattctcagggtgattctcagatcagaattttgtaccaccctgataaaatcatagctcaag

SEQ ID NO: 804285 - DNA, 587 bp, Homo sapiens
tttgccacattgcatattaccattctgcattatgtagaatgtccattaaaacaagaatattttcttttgcagtatgaaactttactatgtacttgagatttctcataatttatctgacttaattattatgaaaatactttaaggtctgtctgtatatatgaaaaaactggagctcagtaaggttaaatatgtcactgtcacatcatgagtgttcagaagtcacttttgagwccaaggaccaagctatatccaaaatccctaggaaatattttgagtaaaggaggtcccggggggtaataagttcattagctccccagggaacaactatggaatgcaacattcagggacacttaaagtatttgagagcatcctgttgaagttcttgcttttgactcctacgtatgaacatatgaagaaaatgaaaatcatatatataggtctttcagttcttgtcaccacttccaattataatgaaatttttcctttcattcttcactatgtttattttactgaaagattattttggctaacagattctgaagcaattttattccagctaaaagagttgaacaaatttcaaacatatg

SEQ ID NO: 804286 - DNA, 645 bp, Homo sapiens
attattaatctaataacctggtttgaacacagagtaagtggggaaaatgaagagaaagagtgggttaagttgcaataagcaatcaaggaaaagtgaaatagggtgggagatttatttcagagaaatagtgatgttgactttaacatatgggctgttcttccacctataaatttccatttaatttactaaattatttaagtggaattcttttttttccaacactccctttttaatatcagtcacatcttttccatatagcagatgcaccttagtggtaaaaaataaaatgataataataaatataaataatttttccttagaaattttaaatcctctaaatcatttttatatctagtagtttaaggatattaacattcataagcaacccaaaggccaactgccatgctagtggaagaaaaagagagaagggaaagtgatttcacacatttagatgctttggcttgattcyattcctgaatcagaaattcagttgtagactgctgatccacagaatttgtcatagttcatcagacacctcaaaagagttcttcttcttcttgatgtattgaatagtctttcatgcctacataacaatcatttaaacatcagaaataaatataacatcactaaagattaatgcaagga

SEQ ID NO: 804287 - DNA, 628 bp, Homo sapiens
agccatgtccctctgcatgcaccttcagggacccgatgtccagcagagggacacccagacatccccacctcgcctggggtagcactcagggtttccagcctcctcggccctgcccccaggcctgtcacctacgtgatgcaaccccaagatgtccagcaaaccctcgccgaaaggagggactcacgaagggagcctgcagctrtcggaggggtgggtcccagccctggcctcgcatgaaaaacttcccacgtctgtctggccccatagttcggggaaggcctgtggctgcccctgctgcctgtcaaagtcctcccagcaccatttccaacatgaacgcacactgtcccagcacgcgtaggactttggtggcatttttggctaggtgtagctcctctacttattatattctataatttctcagcagtctccacgcagttctgagaactcttgctgcattgagaaaaatctaacctacagcctgtttttaaatgaatgttgcatttaacagtgaatgaaggtaggatatagtaattaaatatttactaatctgaacattcttgctgcctttttttattctggggctgtgaaatgttgtttctagatctggatcctggaatgctcaagagct

SEQ ID NO: 804288 - DNA, 628 bp, Homo sapiens
agccatgtccctctgcatgcaccttcagggacccgatgtccagcagagggacacccagacatccccacctcgcctggggtagcactcagggtttccagcctcctcggccctgcccccaggcctgtcacctacgtgatgcaaccccaagatgtccagcaaaccctcgccgaaaggagggactcacgaagggagcctgcagctatcggaggggtgggtcccagccctggcctcgcatgaaaaactycccacgtctgtctggccccatagttcggggaaggcctgtggctgcccctgctgcctgtcaaagtcctcccagcaccatttccaacatgaacgcacactgtcccagcacgcgtaggactttggtggcatttttggctaggtgtagctcctctacttattatattctataatttctcagcagtctccacgcagttctgagaactcttgctgcattgagaaaaatctaacctacagcctgtttttaaatgaatgttgcatttaacagtgaatgaaggtaggatatagtaattaaatatttactaatctgaacattcttgctgcctttttttattctggggctgtgaaatgttgtttctagatctggatcctggaatgctcaagagct

SEQ ID NO: 804289 - DNA, 504 bp, Homo sapiens
atcaaacccattagcactcactctccatctccctcccagccccaggcaaatactcatcccctctgggtcttgggtctgcctgttccgggcattttccacccacagaatcatgctctaggcaaccttttgtctggcttctttcagcatcgtgtgctttaggttcatccgtatggtagcatgtgtccgtactaccttctgtttgtgggtgaataacgttccaccatgtggttagaccacaattagtttatccattcactagttcagggacacttgggctgtttctarcttatggttgtgaataatgtcgacataaacgtttttgtaccagttttcgttttcagttccttagggtacatacctaggagtggaattgctgggtcaggtggtcattctgtgtttcttgaaactgctgatgcacaccccagagtccccatccggggtgggatgggcggctgttcagtgagtgctgagttcaccaccttcgtcacatgcctgggcagaagg

SEQ ID NO: 804290 - DNA, 629 bp, Homo sapiens
gaggagtgaaaagcacacatttatcaattaagttgacagtcttatatgggcacggttcatggcatcccaaaacaattacaatagtaacatcgatgatcactaatcacagatcaccgtaacagatacaatactaatgaaaaagtttaaaatactgtgagaattatcaaaatctgaaaaagaaatacaaagtgggcctattttccaaatatgctgttggaaaaaaagcaccaatagatttgctagatgaaagattgccacaaaccttcaatttgtaaaaaagtatatctatgaaacgcaataaagcaaagcacaataaaacgaggtaagcctgtataccaacagttctccaagggtggtccaaagaccagcagcatgtkcatcacctgagaatacattaaaaatgcaaattattaggcccgaccccaactttggagctggggcccagcaatctgtgttttcacaagtcctcctggcaggtgattctgatgcactgtaatggctgtgaatcactgatctacatgaccaagtcaacaacccctgaagtcaagggagcaagtgttgttaatcaccacgtgccagattccaatctgttcagagacaggctcaaagagagctggctatgggcatga

SEQ ID NO: 804291 - DNA, 487 bp, Homo sapiens
tctataaacctaagaatgttgtcaggaaagaaagagaagaaccctgagttacacaggcaccattcaaaattgttctccttagaggtttaaaaatctcctcagagttttaaaaaacagatcccactctgagacgctcctaaaaacagctgaaaggctgatgaaccaggctacggtcagagagaagatagaagagcttactgacagaattyctacatcaaatgacaccactggccaccagtctaatgccaaaatacaatggcaacagaaaatcagaggcactcgatggagaacaacgacgatccacaatacctgccagcagccaaacgcctgagtgaagcccgtgaatcagctcttagtacatctggtgatcacaaggaaaaagtgctctacaactttgatcttttgacgagagaagagcatcttttaaatatatgtgagcttcgcttttgtaagccaggatgtagactgggaacagtcctctgaggtt

SEQ ID NO: 804292 - DNA, 620 bp, Homo sapiens
gcactgttctgctgccctgaatccaagtgggaagtcttcctcaggcgttggactttctggtctttagagaaaatgttttcaaaaatcagctccatctctacccactaacccctctgactctgggactaagggaatgtccatgagtgtcacctcaaaactcattgtccctttcttgactcatattgccaaggtgggtttctctgtcccagtaaattggccctgcccagcatgagtccctcacactatggagcccgacaggtggaacacacaggctgtgagagctgagtgaatcctcggtggatattttcaggaaaggtagcataaccatccccttgctgatcacccttagtcctcacctctcccacctctcacccactccactaccagatgctaactaaaagatgtacaacatctgtcatgatcagcctgtttattccattacttggctccacataactcttatgatgtcawcttgtacaattttatgggaaatttaagcaggaaataaaactattaaaacacattatttataaacacaggctaatttgtatactttttagcaaatatttaaaacacagctagccactattcttactttttgtaagcttccaatctgccaa

SEQ ID NO: 804293 - DNA, 508 bp, Homo sapiens
atgggtcagctgggcacagctccacattcttttataaaatattgggttgatattgagaaactgcttttagaacacttccagtctatagcacacttaattatatatcattttagattgttcactaattgtatttttgtaacttttttyccccaagtagataagttcctaaagagaaaaagtcatttcttataatccttcctctcctacaataattaccatcatgtttagcatacattggggctcaaaaacaatttctaatgactaaagtttgtttaatgagtagtaaaaaaaaaaagaaagaaaaagaaaaactgtattttcagttctatattatggcaaaaatatttaatctgatggagcaacaatagttttcagaaatctgagctgcacccatgcacataagcacagccagagaggtgggggaactgccagtccttccctttcctcactcaaatgctgacacctaaaccactctcaggtccaaacaatgagttgcaatctgtttggg

SEQ ID NO: 804294 - DNA, 622 bp, Homo sapiens
tcaacattaccttgcctggcaacagcctcaggggaggccatcactgttgcctcaggcagcgcagggtttatctccccagacaaaggtggaaagactgatggcagcatgggtctgggagggcatgttgccactactggggatggggaagctgttccttctcacaaaaaagtttcatcagagtttacaaactcagtgtccccaccttcatcagggtcctcccacacatccccattccaagttgcagggtcccattcttttccaatcaatgacctcactttaacagtagacacctggcgaggctgtgcatgcacctttcattgcaggtcagccacttgcatgatacgagcttgtgtctgtttttccacaatttcagctctttctytacaggagataagactctcactcagggcaatcttagaatatttgagggtcagtatctgcttctgaagctgggagacagaatccctgagttcatcattttctttcatcactttgtccactgaacttaggagcaaacaaccagcttcattatgttccttggttctccacacatgatcaaaggtattatatatagagtcactaaactccttgcctctcaggagtgatgaatcaggagtgtcaa

SEQ ID NO: 804295 - DNA, 614 bp, Homo sapiens
tgagttttccacaggatatttcaccattctgtcaagccagctgcttcaggacagtgggtaatagggtaagaccagtgaatttaatgagcatgagcccactgccacacatctttggtgagttctttggtcagaagcaatgctgtgtggcatgccttgatggaagataaggcattctgtaagtcctcagatggtagttttggcaggagcattgcatgttggggaggcaaatccatattcggagtaagtgtctatcctagtaagaagaaaacattcctcttttcatgatgaagcggtccaatgtaatcaatctgccaccaagtagctggctgaccatcttggagaagagtgccgtatcaggggttcagtgttgacttctggcaggttgggcagtagcagtggctatagccaggatggccttggtgagtggaagtccatgttgctaatgtataacctgyctttatggcattatggcattattccattatatgccattatacattatgccatgtataacctgccattatgggctgggtgtggtggctcacacctataatcccaccactttgggaggctgaggcaggaggatcacttgaacccaagaattcaagaccagc

SEQ ID NO: 804296 - DNA, 602 bp, Homo sapiens; identical to SEQ ID NO: 735486

SEQ ID NO: 804297 - DNA, 614 bp, Homo sapiens
tgaggtcaggaattcgagaccagcctgggcaatatagtgagacccagtccctgcaaaaaacacaaaaattagccagatgtggtggtgcatgcctgtaattccagctactcgggaggctgagctgggaagattgctagagcctgagaggttgaggctacagtcagccttgattgcataactgcactccagcctaggcaacaaagtgagattctgtctcaaaaaaaaaagaaaagaaaagaaaagaaaaaccaacagatatatcacattaatagaatgaatraaaaaaaatcacatgatcatcttaatgtagtaaaggaatttaacaaaacccaacattctttcatgataaaaacactcagaaaactagacatggaagggaatgttctcaacataatgaaagggcctttatgaaaaacccacagctaacattatattcaatgatgaaagactgaaattcttcccctaagatcaggaacaagacaagaatgctgccttcacaactggtattcaacatggtactggaagcactagccagagcaattagacaagtaaaagaaaaaaaaggcactcaaattaaaaaggaataagcaaaaccatctattctaagttatgat

SEQ ID NO: 804298 - DNA, 621 bp, Homo sapiens
gcaaacacagtacctaataggtagtttttcaactctgcccacctccctctttcccctcttttgcaatccccagcgtttactgttcccatctttgtgtccgtgtgtacccaatgtttagctcccacttgcaagggagaacatgcagtatttggtttttagtttcttaattaatttacttaggataatggcctctagccacatccatgttgctgcaaaggacataatttcgttctcttgttatggctgtgtgaaatattactaatatttttcatgcatggttgatataagcaactttacaacactacacactaaaatgctgagtctttgatataaagagaaatggaaatgtgactcctgtaamaggtcaaattattgaacaaatttaaacatattatatactaattttcctgaaaatagaattatttatatttcacatccaataattacttcacttttaaacaaaatatttcattcataaactaaatgagagaatgtgaagctatatcatgtaatgcagaaccagagggaaaaaaaagaaatgtaaagctaactgtggtatataaaaaaagtaagcaaacctgttcactgttgagaatatttgttttatccatcataaaacca

SEQ ID NO: 804299 - DNA, 580 bp, Homo sapiens
ctgcttcaactggatcccataagttttggtatatgtacctgacttttactcgtctcaaagtactttctgaatttcttttgattccttctgtagcccatggttatctaggagtgtatagttcgatttccacatatttgtgagtttcccaaattttctcattactttcacattttattgtattgtaagcagagaacatattttgtttgtattatttccrtccttgtaaatgtgttgaagtgttatggccttacataccctgaaaaatattccatgtgtgtttaagaatgtatattattgttgttagatggagtgttctacacatgtctgttaaatctagttggtttatagtgctgcttgagtcttctattatgttttcatcttatgcctagttgttctcttcattattgaaaaggaggtattgacgtctccacctattattgttgaattgtctatttctctcttcgtttctgtcagtttttccttttgtattttgattttccatttttaggtgcatatgtttctaattgttatatcttcctgaagccaaaaagtttcctctttaataacacttgttttaaag

SEQ ID NO: 804300 - DNA, 612 bp, Homo sapiens
aaggcctagactctatacctaagcattttatggcagtagttcccaaaaccagaaagaattacctgtggaacttaaaaaatacacagatgtcatatttaatagttgcttagctttctgacaaatatattcaaagatacactcccacatacagactaatgattcattgataagaactcaaaggagaccrtttaaggttactaatatatataaagtacttttgattgtaagcaatagcagccatgcatgactactttaagccaaacaggaatctattggaaggaaactggaagaaatcacagatttaaaggagatggaaacagccaagacaaagtcaaagataactctgggacagtcagcagccttgggctccatataccttcaccctaaagttttaatataacttaactcccaccagtcctaggagagagaaatgcccaccaccttccaggtcagccagacttagtaaggatcaaataaagcaaacagttttggagaccctcccctgggtatcatggaatcattctcagagcaaaagcaattttgaggaaggccatcaccataaaaattgtcaactgctagcacagttataagcaaagtatttgttttctaaat

SEQ ID NO: 804301 - DNA, 655 bp, Homo sapiens
aggaccacaagcaatcagaatagcttgcctcctgggtcagtccgctggtctctcttcctgccactgagactctaagacccgcccactgtagtataaaaaggacacagagctgcagagttggaaatggctaatcaactgggtgcggtggctcacacctgtaatcccagcaccttgggagactgagaccggaggatggcttgagtccaggagtttgagaccagcctgggtctcaaatagtgagaccctatcgctacaaaaatattaaaaattagccgagcatggtagctcacatctgtagtcccagctactcaggagcttgaggtgggaggatcactggaacccaggaagtctaggctgcagtgagccrtgattgtaccactgattccagcctgggcgacagagcaagactgtctcaaaaataaataaataaataaataaataaataaatagaaatggctgatcagaagcagtggctctatatgcttgagtgagccagatgggacagggagtgggtgagacgaggcagtgagcagcccaggagccccgagggtgacccaggaagaaggaagagcagggaaggtggccctagagagcttttgcagttcctgccagagacacagctgcaaggctggatttcgagaagcacatttacttc

SEQ ID NO: 804302 - DNA, 462 bp, Homo sapiens
tcccagctacttgggagggtgaggtgggaggatcatttgcgcctgggaggttgagactgcagtgagcctgagtgacaaaggaagacccttgtcacaaaaaaaaaaaaaggaaaataaaacacatgcaaaactttaaagatctgcactgatatatggaggatgtgtatacctgctaattgtaatacagattgatccatttttattaatactatacaaagtatagttytgaaggaaaaatgaagcaggaaaaaaaagacagagtaattgctgagcactgatgggagattaagatattaagagtataaagtcagcagtaagaacctactgtatttggctgctgattcacttttttatcttctagatccttgaatttggatcgaaaagacaccattttctcttgaagttctggtgtacacagttcatacatatccaacataagaggaaatttaacatcctatatac

SEQ ID NO: 804303 - DNA, 517 bp, Homo sapiens
ttcttttggaacttggcaaaaaatattaaaatttgtctggaaaataaaaatatgcccgaatagccaagaaaattctaacacagaagaatattagggagagctttgccagttatttaaactgcagtatttattgctgatatactgctgcaggaatggacagatgatcaataaaaccaaatagtgagaacagaagcagatccaaatacaaatgagattggattatataataaagtggggaaaagaaacacattattcagacaacaggctagtcatttggaaaatgaataaagttggtccctaccttgaacttccagatggaataaagatttaaatttgtaagaaattatraagtactacaaagttaggccaggtgtggtagctcatgcctgtaatcctagcactttggaaggctgaggagggcaggtcacttgaggccaggagttcgagaccagcctgacaaacatggtgaaaccctgtctctactaaaaatacaaaaaattagccaggcgaggtggtt

SEQ ID NO: 804304 - DNA, 576 bp, Homo sapiens
gactaggtctcctgtttactttggaggctcttatatttttgtgcagtctaattgtgggtggagaagagatggcagcaatgcctaatattagacgttttgttgatgctaataaacaggggattaggctagttttttttaacctagttatatcttgacatttgaaatgggtttcttgtagacagtatattcttgagcttttttaaaaaattcaatcttgagttttayccaaatgataatttctgtcttttaattggtacatttagactattttgtaattattgatatggttgaattaaaatcttccatctcgtagtcattttccatttattccatctgttctttgattcttttacttgtttttgtttttggtagagatgggattttcctatgttgctgaagttggtctcaaaccctggcatcagtgatcctcccacctcagcctcccaaattgttgggattacaggcatgagccactgtgctcagccttaattttttgtagttttttttttctttttggttctgtgattcctctttcctctatttctatattgttttggattatttgggtatttttaa

SEQ ID NO: 804305 - DNA, 574 bp, Homo sapiens
tttttgtagttttttttttctttttggttctgtgattcctctttcctctatttctatattgttttggattatttgggtatttttaatgagtccatttcatctttattattggctcactatttgtacttcattcacatacatttttagtgcttaacctagggtttaaaatatacatctttaatccatcacagtctatcttcaaataatattataccacttcatgtgttgcatgagaaccttgtaacagtataggcctttcagcctctgtgttatgttatcatatattttacttctgtcagaggcattggaatcacagtgactccatagtgaacaggggctgggtaaaataaggctgaaaccyactaggctgcattcccaagaggttagtcattcttcgtcacaggataagacaggaggtcagcacaagatataggtcacaaagaccttgctgataaaacagcatgtgataaagaagctggccaaatcccactaaaaccaagatggtgccgaaagtgacctctggtcattctgactgttcattatactctaattataaggcattagcatgctaaga

SEQ ID NO: 804306 - DNA, 458 bp, Homo sapiens
aaattttcatcaatttttaaatcaagaagttaaattatatcaagaagacaatacataagggtggaggggctgagcctaacattgactccagaggaaaagcaagggacgaggtagaaagcgaacagggctgggcgcggtggctcacgcctrtaaactcctttgggaggccaaggcgggcagatcagctgaggtaaggagctcgagaccagcctggccaacatggtgaaaccctgtctctactaaaaatacatcagccaggcgtggaggcgagtgcctgtaatcccagctacttgggaggctgaggcatgagaattgcttgaacctgggaggtaaaggttgcagtgagccaagatcgcgtcactgtgctccagcatgggcaacagagaagactctgtctcaaataaaaaaaaagaaaaaagaacagcacacaataccatgctgccatcatgtaaaattgt

SEQ ID NO: 804307 - DNA, 647 bp, Homo sapiens
aaaaataataataataaataaaataaaatgtacctatttaaaatgtacaattctttagtttttagaatattcagttatgtgaccatcacatctaatttgagaacattttcataaccccagaaagaaacacgtatcattaacagtcactcctgattgccactacaacaaccccgrttctgcgtaaccagtaatgtattttctgtccctatggatttctctattctggacatttcacataaatggatttgtataatacgtggtcttttgtgactggcttctttcacttagctgaatgtgtttaatattcatctatgttttagcatgtatcagtatttcattctttttttaaaaaattctttttattaatgtctattgtccgttgtatggatatatcacattttatttatcccttcaccagctgatggacatttggattatttccttgttttagttattatgaataaggctgctataaacattcatctacaagtttttgtgtggatatatgctttcaattctcttggttatatcccgagaagtggaattgctgggttgtgtgtttttttcatttgtttgttgtgttttatttgaaacagggtctcactctgttgcctaagttgaagtgcagtggcacaatcaagggtcac

SEQ ID NO: 804308 - DNA, 619 bp, Homo sapiens
aggccagacagtcgttcaggctttgcaagttctccttctcgttctggatgcctcccattcctgccaggcccccggccattcccacagccaggcccccggaccccatgccgccccagaagctggaggagtgggacatagagatccgggaaccagagcccccggcacctgcatagacgctggtcgtgcctggacggagcccagaraccagtagttggtggagcgagtggtgaagctcatgctgttccgggaggagggcgagaggacaggactcgggctttgccgaggactccttcttagttttaatgctgctattgtcaaacattttgtttttatgtatgttatattttctacaatgcattttaaatagtcatttatctttaaaatatatttaaataataacatattataaatttactcatttaatgaaccatacatggtgctctttattcctttgtgtagatctgaatttctgcctgttatcaggtttttttttttttttttaagtcaaaagaactttttattatggaaaatttcagagtagataaaagtagagagaacagtatagtgaaccatgcatctattacctacttccagtgattaccgacacttcgtacttttt

SEQ ID NO: 804309 - DNA, 644 bp, Homo sapiens
aggttcattcagcgttgggatccaggcttcatcttaaacatggtgacgtgctgggctgtgctgatggggaaaagaggccagagcttggcccaaagtctccactgcctgggcaggaacatttgaaaagcccacacacatggaggagattgtggacagcttcagaaatcatttygaagcagtggtttctcagctgtctacttacagctgcagaatatggtgagaacattgcctccatttaatatataatgaaggataggcattgcaaatgaatgatacgagagagacatcgtcaacaaatggcatttactcatttgcttcaaatccttcactaaaaatgaatttcattagaattagaagccaagaataaaatggcaaccatagaaaagccagaagaatctgtgaaaaagaaaaaaaaaaaagaaaaagacaaaaacgaaaagctagaagagaatacaactgagtattagtgaaaccactggtgtgtgtgttgggggtggctcttttaagtttagaagaaatcacatagaaataatacagatgtgtttgcatgatattttgaaattcaatatttgcaaaaaaaatggctgggaagtaatgaaaagtcaatgagaaatgatcaattgtcttagatcaggttccctgga

SEQ ID NO: 804310 - DNA, 644 bp, Homo sapiens
aggttcattcagcgttgggatccaggcttcatcttaaacatggtgacgtgctgggctgtgctgatggggaaaagaggccagagcttggcccaaagtctccactgcctgggcaggaacatttgaaaagcccacacacatggaggagattgtggacagcttcagaaatcattttgaagcagtggtttctcagctgtctacttacagctgcagaatatggtgagaacattgcctccatttaatatataatgaaggataggcattgcaaatgaatgatacgagagagacatcgtcaacaaatggcatttactcatttgcttcaaatccttcactaaaaatgaatttcattagaattagaagccaagaatawaatggcaaccatagaaaagccagaagaatctgtgaaaaagaaaaaaaaaaaagaaaaagacaaaaacgaaaagctagaagagaatacaactgagtattagtgaaaccactggtgtgtgtgttgggggtggctcttttaagtttagaagaaatcacatagaaataatacagatgtgtttgcatgatattttgaaattcaatatttgcaaaaaaaatggctgggaagtaatgaaaagtcaatgagaaatgatcaattgtcttagatcaggttccctgga

SEQ ID NO: 804311 - DNA, 644 bp, Homo sapiens
aggttcattcagcgttgggatccaggcttcatcttaaacatggtgacgtgctgggctgtgctgatggggaaaagaggccagagcttggcccaaagtctccactgcctgggcaggaacatttgaaaagcccacacacatggaggagattgtggacagcttcagaaatcattttgaagcagtggtttctcagctgtctacttacagctgcagaatatggtgagaacattgcctccatttaatatataatgaaggataggcattgcaaatgaatgatacgagagagacatcgtcaacaaatggcatttactcatttgcttcaaatccttcactaaaaatgaatttcattagaattagaagccaagaataaaatggcaaccrtagaaaagccagaagaatctgtgaaaaagaaaaaaaaaaaagaaaaagacaaaaacgaaaagctagaagagaatacaactgagtattagtgaaaccactggtgtgtgtgttgggggtggctcttttaagtttagaagaaatcacatagaaataatacagatgtgtttgcatgatattttgaaattcaatatttgcaaaaaaaatggctgggaagtaatgaaaagtcaatgagaaatgatcaattgtcttagatcaggttccctgga

SEQ ID NO: 804312 - DNA, 633 bp, Homo sapiens
cttaactcttctcacacagaagatccagctgtgctactaagagaagtttgaaagtgaaagacctgctccaatatttttcttctttgtaaaccatctggatgcttttttgtgtgtgtgtgtgtgtgtgtgtgtgtgtgtgtgtgtttgaagtcttttttttttttctttaggatgttaagggtaatatgctcaaagagagcagactcttcaaccaagatctgtcacctgcgtcttcaagccctaatgggcacctgtgtgctagtggatttactgtgtgggtttctcttccagatcagaccttaagatcactgttgtgtgatgtatctcagccttgatcctttcttctttggggtaaattggaaccagacagtgtcactgacttgactgagatgctgaaggtgaccatgkgtgggctgagtccagaactcagatccgtttactctctgtcatgtgtttgattctccgtggcacgtgcagggctcagatgggaaggagagatgctacacatttagttatttattacttagtagccagcatttactgccaattacttgaatggcccccacacctctaagaattacctatcaggcatatactcagggtgaatactcttcagtctgaaagctattcaca

SEQ ID NO: 804313 - DNA, 508 bp, Homo sapiens
ccctgggcacatcccatcagctcagtaatccttcattctcaacagcagacatccaatttggatccaaagcctgaccattcacaggaggatcgtctggggagataaaagtagagcctgctttgggagcagggaggtggttatgccagagttgagtcactatcactcttcaagaggccggagcacttgtactcagcactggggaggggaagcgtctggtgcttgtgttctcccagaactccgtccctgcctacagagggctccagccagcatccctkgattaacactgcccacctccactcactcctttctctctgggccaggcccaggccacagcagttttcttttgttatctcatttaaaccttaaatagtggtcttgggaaacatgttttctgtgtctttattctccacaaatgaggaatcacagcctccagatatatcaggtgcccatttagggcatgctagtaataatcacaaagtctaatgtgtatcgagcccttactccatgt

SEQ ID NO: 804314 - DNA, 508 bp, Homo sapiens
ccctgggcacatcccatcagctcagtaatccttcattctcaacagcagacatccaatttggatccaaagcctgaccattcacaggaggatcgtctggggagataaaagtagagcctgctttgggagcagggaggtggttatgccagagttgagtcactatcactcttcaagaggccggagcacttgtactcagcactggggaggggaagcgtctggtgcttgtgttctcccagaactccgtccctgcctacagagggctccagccagcatcccttgattaacactgcccacctccactcactcctttctctctgggccaggcccaggccacagcagttttcttttgttatytcatttaaaccttaaatagtggtcttgggaaacatgttttctgtgtctttattctccacaaatgaggaatcacagcctccagatatatcaggtgcccatttagggcatgctagtaataatcacaaagtctaatgtgtatcgagcccttactccatgt

SEQ ID NO: 804315 - DNA, 571 bp, Homo sapiens
ctctcatttcaacaaaaacaagcaacacatcatctaatcctcggataattctggtctgcattattcttcatcaaaatcatggctgtgactttctcacccatgtcccagggccctcagtttctccctgcatgtctgtgactgtgttctaagagttccacatgtgcgtccctgatgggttgggcccagcactgtgctggctattcttgtcttgcttcttatcatcccctcaagatgcccacgagagttgcactaagggacgaggtcaggcaaatgcatgctcttaattaccatgagcctttggccgacaccccagtstagttggcctcctgtgaactaaccccaacatagaaagcagaggtctctcgcaattctagctattcattagaatcacctgggagatttgaaaaaacaaaaacaaacaaacaaaaccagtggtgttcaggggcttttccctcggcacccccaagggattctgatttaattgatccaaggtagaccctgggtgtccatatgtttttaaagttcccagatgattttaatacaaagcccagtttgagaaccacagatgcaa

SEQ ID NO: 804316 - DNA, 571 bp, Homo sapiens
ctctcatttcaacaaaaacaagcaacacatcatctaatcctcggataattctggtctgcattattcttcatcaaaatcatggctgtgactttctcacccatgtcccagggccctcagtttctccctgcatgtctgtgactgtgttctaagagttccacatgtgcgtccctgatgggttgggcccagcactgtgctggctattcttgtcttgcttcttatcatcccctcaagatgcccacgagagttgcactaagggacgaggtcaggcaaatgcatgctcttaattaccatgagcctttggccgacaccccagtcyagttggcctcctgtgaactaaccccaacatagaaagcagaggtctctcgcaattctagctattcattagaatcacctgggagatttgaaaaaacaaaaacaaacaaacaaaaccagtggtgttcaggggcttttccctcggcacccccaagggattctgatttaattgatccaaggtagaccctgggtgtccatatgtttttaaagttcccagatgattttaatacaaagcccagtttgagaaccacagatgcaa

SEQ ID NO: 804317 - DNA, 571 bp, Homo sapiens
ctctcatttcaacaaaaacaagcaacacatcatctaatcctcggataattctggtctgcattattcttcatcaaaatcatggctgtgactttctcacccatgtcccagggccctcagtttctccctgcatgtctgtgactgtgttctaagagttccacatgtgcgtccctgatgggttgggcccagcactgtgctggctattcttgtcttgcttcttatcatcccctcaagatgcccacgagagttgcactaagggacgaggtcaggcaaatgcatgctcttaattaccatgagcctttggccgacaccccagtctagttggcctcctgtgaactaaccccaacatagaaagcagaggtctctckcaattctagctattcattagaatcacctgggagatttgaaaaaacaaaaacaaacaaacaaaaccagtggtgttcaggggcttttccctcggcacccccaagggattctgatttaattgatccaaggtagaccctgggtgtccatatgtttttaaagttcccagatgattttaatacaaagcccagtttgagaaccacagatgcaa

SEQ ID NO: 804318 - DNA, 631 bp, Homo sapiens
gaggggttatgagggaagaaaatgtcctaggagcaaggtgggaagtgtaccaggcctctggactgcaaaagcgacccctgtgagccagcagggtgcacacccaagagccagtgaggtgctgggggccgggaatcagctcccatggcacccaccaaaccacacttccaagtcctgcggcatcctgaggagctgaggaactgaccccacagccctcaacaagttcccaccatctcattaagcctctccatgaaaggtcaagattgtaatagtctgggcccattatgttctttctctcgcagaaccaaagttcaggagacagaagctttttttttcttttggcaaaaactatgttttaaaattaatcagtaaaaattcttcctggattttcagtastccctcaagggatctgctaagccagaagctgaagagagatggcctcttccttccgcaggaagaaggagccctcttggagccctctttcctaaaatgggggccacttcctatccagagggccctcagtcttggcaatggttgactgctttaagagggaattgtcgcattgcaagccaatgtccgtcattatcaatggaatctttcaatcaggaaaaatctcacgagtgtgaggaattgg

SEQ ID NO: 804319 - DNA, 623 bp, Homo sapiens
ccatatttatttctaatttccacaagctgttggtaagagctgctgtaaatcaggttgccattgatcttggctcccacttgtgtaattctaagatgaactgcctatgatcaacagaaaaagacttctgctctgagggaacgcctgcggaaggaggtcccaggatgcyctgggaacatgcatagttattaattattcagggaagaagagagcagatgctggtctacataaatggggtggaggggaaccctaatgtaaatctatacatcaggaaatatgagagaaaagggtggcaaaatttggccttagaaaacagattagggagaatgataagcatggctgtaataggcaatcacttaaagctattgatttaattaaacgtaactacatatccatgtgcaaggcacttaaataattctcacagtcagacttcctgtattttatgatatgtttatttgagttctctgtgttcttagctgaagggaaggctctttaacctcccacagggcttggtctatttccacatgcaatgaaaatacttgtgagtcagtcatccttttccagtgttgacatcctcatgttgctgtggtcgtccttggagaggggtacaggggggaagcccatga

SEQ ID NO: 804320 - DNA, 622 bp, Homo sapiens
caatttcctattataggagtttagtttttatccatttgtcctttttataaaacaaagttatgacaaagattatttacacaaatatcaaattctacattcgtactttttatgtaaaattcctctaagttgaatttgtgggtgttatgtatgcatatttttaaggttttttgatacctgttattaaattgctctgtagaaagtttgttgttgttgttaaarcagtttcccacctgtgttgttagagggtgcctattgttgccaaccttgaaaacactggatattcacacttttaaatatcaattgtgtaggtaaaaatggtgcttcattagaattttttaaatcagcatcacattctttgagataattaaaaaacaaatttaaccacataggctttctctattagtcataggtttatcaaccccattgtaatgacgaatctttgttaaatataatttagacacggtaaccactgagccacactttccctttatgctaacttctatcttacctccttgattaactctggactttctgacttagaacttgtagagtgtctgtgtgtgtgtgtgtgtgtgtgtgtgtgtgtatgtgtgtgtgtgtctttgcagcggtggggtgtcac

SEQ ID NO: 804321 - DNA, 547 bp, Homo sapiens; identical to SEQ ID NO: 760855

SEQ ID NO: 804322 - DNA, 626 bp, Homo sapiens
agtcccatgttctatatattaactttctacatatgtatccatgaacaatataattttattttacatgttttaattttcataaatggtattttactgtatgactgttatcactaactttggtttcttttaaacacaatttaatacttttaagatctatccatgttggagcatctttctttggaaattccaaagaaagaatgggtttggtaatttggtcgaaggtgcattttgagctgtaactaaaagctgagatagtaatcagtttattcctatgtgtttttattaacaaaagtcccttactgatgactgtctaaatcatagacagctctagctcatcattttaatcgctgtatgayatttcagtgtatgactccaccatattttaatatttcatacatatattcctctgttgatcaacacttcggtatattttctattttttaattatcacaaagtttgttcctgtgaacattatttacatgacattacaaaaaagaaatttttattgagttttaagttttccaaattagacattttcatttttcttcaataaatgtgtttacacacatttttgttcccatcatcccaatgatgggataagttttttatgggatatggattttaaa

SEQ ID NO: 804323 - DNA, 542 bp, Homo sapiens
cagcaaactgctttctgcatatccctgccatgctgcctgatttctgaacttatacctggcttcctcagtcctgcattattttgacaataatggcagacatttcccccacaaactaaaagctacccaaatatctatatataacagtaataatagcaaaattgagcttttactgtgtgccaaaccctgtactcagcacttagtattagctcatttgactgtcacaattaccataaacagtaggatttttacatrtaaagaaagagaggtttggagaagtaatttgtcacagacccaatagctactaaatggtgaagccaaagtccaggttcttaaccattatgcaatactgtcatatgaagaatgcaacattacattacataagaatgcaagattacattacaaaaatgtaaatctatttttacttgaaggaatgaatgagccagtgggagaaacattaatcacgtctgttaataaatagagtaagatgttagcctaagtaagactttgagccttaaaataaaaccatcatttggtgaaaatat

SEQ ID NO: 804324 - DNA, 634 bp, Homo sapiens
gttaattaaatattttttttttttagacaaagtctgactttgtcgtccaggctgaaatgcagtgacatgatcacaactcactgcagccttgaccttccaggcttaagtgcttctcccacctcagccttctgagtagctgagactrcagatgcataccaccacacccagctaatttttatattttttgtacagatggggtttcaccatgttgcccagactggtcttgaattcctgagctcaagcaatatccctgccttggcccttcaaagtgctgagattataggtatgagccaccacacttggcctgctgaccgaatttttaaaacagcttctttgagacatcattcatgtaatatataattcacccaaactacaatttgatggctttagaatattacaaagttgtacatccatcacaatcaattttggaacatttcgttagcccaagaagattccttacactcctttgccattaccctcccatgcttgcccctctgccctaggcaaccacttatctattttccttctttattgatttgcccattttggacatttcctataaatagaatcatacaatatctggccctttgtgactagcttcttttgcttagcagaatcaagagtcatccatgtc

SEQ ID NO: 804325 - DNA, 586 bp, Homo sapiens
agatggggtttcaccatgttgcccagactggtcttgaattcctgagctcaagcaatatccctgccttggcccttcaaagtgctgagattataggtatgagccaccacacttggcctgctgaccgaatttttaaaacagcttctttgagacaycattcatgtaatatataattcacccaaactacaatttgatggctttagaatattacaaagttgtacatccatcacaatcaattttggaacatttcgttagcccaagaagattccttacactcctttgccattaccctcccatgcttgcccctctgccctaggcaaccacttatctattttccttctttattgatttgcccattttggacatttcctataaatagaatcatacaatatctggccctttgtgactagcttcttttgcttagcagaatcaagagtcatccatgtcattgcatgtatcagtacttcattctttttgttgccaaataatatttcattgcagaagcataccacattttatttattcattcatcagttgatggatatttgagtttccacattttggctattatgaatattgctgctatgaa

SEQ ID NO: 804326 - DNA, 483 bp, Homo sapiens
aaaattaagcaagcaaaaaacaacttgattataaaaagaaccaagaaaattttagaaatgaataatataattggtggaaaaactgtgtattgattggttatcaataataagttagatacagctggaagcagaaaaagttagctgtaaaacaaaaatgaataaagaacccagaatagcacagagagacaagaacatgaaaaaatgacaaaggaggttaacagtattgaaggacagaatgactaaacatgtttaattgcagtcacagaaagaaaaagttaagcaggtacaarctaggtgatatttgaatggataagaactgagaattctcaagaaagaaagaaactcacaggtatacaaaccacaacatataacaagtagaataactgaaaagaaattcagggagggcatggtggtgtatgcccataatctcagcactttgggaggctaaggcagtaggatcccttaaactcaggagttcaagat

SEQ ID NO: 804327 - DNA, 521 bp, Homo sapiens
tccatctccccaattctctatgaaagggcagatgcaaagaacatgcaaagaagtgccccatttctgtcacctggaaagccaaatccagcgatttctgccatgatggtaaggtgatttccactggacactgaggttttaccccaagcatgtcacatccttactccactacagaggaggtatagaaaaggacccatcatggaggcttaaaatcagagcctctaaactccagctaattttcttcctcaaggtttcattagaagaggttttttggtgtttttttttaatgtgagctaaaagatgctgttcacacattagaataatgacaaccaaagtwttaacagattttacttactctgcattgtggacatgtacttgacaagaaacgcacacagagtaaaatctgtgagttcaggagagagcaaaactaaaacactcctcctcaaaaagttacctgactccaaactcacttgaaggaatgttttttgcaatttgcaaacagcatgtgggatactagccccagg

SEQ ID NO: 804328 - DNA, 567 bp, Homo sapiens
tcagatgccagagcagaaaagcctgcaccagacgccaccagcctggagtccctggggggcgtcccctcctgtcccgagaagatacactggtgactccctgcttactaggctggggttgcacattgtcttaatttactgtacaagcagcacccacgttggttcttatttgcatggtgaacactgagctggggcagtaaagaaagggtcacattttacaacagagctgggagcattctccttgcagtgagaaacggctgaaaataggcttagccaggaagatgggactcaagtaccagggaattaagggagatgtagatggggctgttgttgggggacagagcagagttgagcatatagtctgcctgaaccaactggttggcctcagtcagcctcttgrgctgaaatccacccttattacttttatgttcactgggacgtctctctccactcacctttgggataccgctcctagcatggcaaacaccatcagctctgcaccaaaggctgctcggaaatactgtttccttctctcctgagcaattgccacatactggaaatgcaaaagcc

SEQ ID NO: 804329 - DNA, 640 bp, Homo sapiens
gaaagacgggaggggactggggcagaggaaagggctgggcccccaggatgaaggggaaaggcaggcaggtgatctgcaggtgggaaggagagagaagatgggagcagagaagaaaccatgaggccagataacagggcagagaaaggagacggagaagccacaggggctcggggagtgacgtgacatgtgggtcacctgtgagggcaagcaccccagtcctctcttcctaaaggctggtggaaacaggkggtagaaggtgccggatgcctgccactcatgccctctcctgccttcccccgtctccctcatctctgtaccctcccctgggggctgagcccaggttctgctctgcttctgagtcctcttgtccctcagttgccactttctgcgtttttccagactctttctgtccattcacctgccacagacaagggctaaaaattcagaagccaagtttctgatgccagctctgttcctcaaatgctgggccgcactggtggagtgccctctagtctgaactccacagctgcttcattgatacccctcccacggagttgtaaggggataatagagcggatgaaaacggactgtaaaagcaccaaaggatgaagacactttggatcctacgtttatttccagg

SEQ ID NO: 804330 - DNA, 641 bp, Homo sapiens
tgtattttgtccctgaatgtcttcatctatagctgttactagtagactaagtaggtgctgtttcaggtggctgtctagtgtggaatagctataattctccaaagtttaagttaatgatagatgtttgcttttcagacaaactaattcaaggacagagattatagttgtagggtttggtatattttttaaataacagagcgccatccttaaagcagtgattcttagggagaggcatacaaccccaaccctcaagaatatcagaacttcctgggggtgtatgcratgaaaaaaaaagcaaatatttaagttcataattctgttttgttttgtaacagagtttcgctcttactgcccaggctggagtacaatggcgtgatcttggctcaccacaaacctccacctcccaggttcaagcaattctcctgcctcagcctcccaagcagctgggattacaggcgcatgtcaccataccaggctaatttttttatttttagtagagacagggtttctccatgttggtcaggctggtctcgaactcccgacctcaggtgatccacctgccttggcctcccaaagtgctgggattacaggcgtgagccactgtgctcggcccataattttgtatttaaaaaaggaaaaca

SEQ ID NO: 804331 - DNA, 641 bp, Homo sapiens
tgtattttgtccctgaatgtcttcatctatagctgttactagtagactaagtaggtgctgtttcaggtggctgtctagtgtggaatagctataattctccaaagtttaagttaatgatagatgtttgcttttcagacaaactaattcaaggacagagattatagttgtagggtttggtatattttttaaataacagagcgccatccttaaagcagtgattcttagggagaggcatacaaccccaaccctcaagaatatcagaacttcctgggggtgtatgcgatgaaaaaaaaagcaaatatttaagttcataattctgttttgttttgtaacagagtttcgctcttactgcccaggctggagtacaatggcgtgatcttggctcaccacaaacctccacctcccaggttcaagcaattctcctgcctcagcctcccragcagctgggattacaggcgcatgtcaccataccaggctaatttttttatttttagtagagacagggtttctccatgttggtcaggctggtctcgaactcccgacctcaggtgatccacctgccttggcctcccaaagtgctgggattacaggcgtgagccactgtgctcggcccataattttgtatttaaaaaaggaaaaca

SEQ ID NO: 804332 - DNA, 491 bp, Homo sapiens
catttaagtgacacaagctgcaggtatactagtatatactgtatgattacgattacacaaaacatctatgcttaggggaaaaaacaggatgagaatgaaccagactgttgataggggctgtttatgagtggaagtgttacagcaaattgttttctgcttttctttgtttttgttttcctggttgattcttgtattyctttgtctgttttccaaatgttctttgatgaggatattttttgtgtaatgaaaaaagttgcatcttggtttggcttccagtagatacaatagtggaattttaaatttggcactagtaatgggaaaatataatttgtttgtttaatgtgatagcatgtggattgtgcctttttctagcttcttaatatcagccacattggatgaaggagtggctgactggaagttcagttgcttgataatgtattgtttgtgactcatttgagagattagttgccactgacttttgggtgggggag

SEQ ID NO: 804333 - DNA, 571 bp, Homo sapiens
acaaggcttttgcatttccagtatgtggcaattgctcaggagagaaggaaacagtatttccgagcagcctttggtgcagagctgatggtgtttgccatgctaggagcggtatcccaaaggtgagtggagagagacgtcccagtgaacataaaagtaataagggtggatttcagcycaagaggctgactgaggccaaccagttggttcaggcagactatatgctcaactctgctctgtcccccaacaacagccccatctacatctcccttaattccctggtacttgagtcccatcttcctggctaagcctattttcagccgtttctcactgcaaggagaatgctcccagctctgttgtaaaatgtgaccctttctttactgccccagctcagtgttcaccatgcaaataagaaccaacgtgggtgctgcttgtacagtaaattaagacaatgtgcaaccccagcctagtaagcagggagtcaccagtgtatcttctcgggacaggaggggacgccccccagggactccaggctggtggcgtctggtgcaggcttttctgctctggcatctga

SEQ ID NO: 804334 - DNA, 642 bp, Homo sapiens
gagaaagacgggaggggactggggcagaggaaagggctgggcccccaggatgaaggggaaaggcaggcaggtgatctgcaggtgggaaggagagagaagatgggagcagagaagaaaccatgaggccagataacagggcagagaaaggagacggagaagccacaggggctcggggagtgacgtgacatgtgggtcacctgtgagggcaagcaccccagtcctctcttcctaaaggctggtggaaacaggkggtagaaggtgccggatgcctgccactcatgccctctcctgccttcccccgtctccctcatctctgtaccctcccctgggggctgagcccaggttctgctctgcttctgagtcctcttgtccctcagttgccactttctgcgtttttccagactctttctgtccattcacctgccacagacaagggctaaaaattcagaagccaagtttctgatgccagctctgttcctcaaatgctgggccgcactggtggagtgccctctagtctgaactccacagctgcttcattgatacccctcccacggagttgtaaggggataatagagcggatgaaaacggactgtaaaagcaccaaaggatgaagacactttggatcctacgtttatttccagg

SEQ ID NO: 804335 - DNA, 646 bp, Homo sapiens; identical to SEQ ID NO: 804054

SEQ ID NO: 804336 - DNA, 646 bp, Homo sapiens; identical to SEQ ID NO: 804055

SEQ ID NO: 804337 - DNA, 503 bp, Homo sapiens
catgctgtttgcaaattgcaaaaaacattccttcaagtgagtttggagtcaggtaactttttgaggaggagtgtttttgttttgctctctcctgaactcacagattttactctgtgtgcgtttcttgtcaagtacatttcctacatgcagagtaagtaaaatctgttaawactttggttgtcattattctaatgtgtgaacagcatcttttagctcacattaaaaaaaaacaccaaaaaacctcttctaatgaaaccttgaggaagaaaattagctggagtttagaggctctgattttaagcctccatgatgggtccttttctatacctcctctgtagtggagtaaggatgtgacatgcttggggtaaaacctcagtgtccagtggaaatcaccttaccatcatggcagaaatcgctggatttggctttccaggtgacagaaatggggcacttctttgcatgttctttgcatctgccctttcatagagaattggggagatgga

SEQ ID NO: 804338 - DNA, 505 bp, Homo sapiens
ctttttggtaaatatgtcaaaccgattataaaattatatgaaaatacaaaggacatagattggccactattttgaaaaaaacaagtttggcaatctacattgtctgatttcaaaacattaacagtgattgtaatcaaaacagtatggttcaggcataagaatagacatatagatgaatagaaaataagagagattcccagaaagaaaycagtcaattgattttcaacaaagaaactaaggtaattcattagaaaaaggattatgttttccacagatgcttttggattaactgtagagctgtatggaaaaaaaatgaatctcaaatgttagctcataccatgcacataaactaactcacatggatcttacagctaaacaaaaaagttacagttctaaaacatctagaaaaaaaacatagaatataacgtttttaacctccattaagtgtgaaatattgataaattggacttcatccaaatgtaaaactgaattcctttacaagatt

SEQ ID NO: 804339 - DNA, 505 bp, Homo sapiens
ctttttggtaaatatgtcaaaccgattataaaattatatgaaaatacaaaggacatagattggccactattttgaaaaaaacaagtttggcaatctacattgtctgatttcaaaacattaacagtgattgtaatcaaaacagtatggttcaggcataagaatagacatatagatgaatagaaaataagagagattcccagaaagaaatcagtcaattgattttcaacaaaraaactaaggtaattcattagaaaaaggattatgttttccacagatgcttttggattaactgtagagctgtatggaaaaaaaatgaatctcaaatgttagctcataccatgcacataaactaactcacatggatcttacagctaaacaaaaaagttacagttctaaaacatctagaaaaaaaacatagaatataacgtttttaacctccattaagtgtgaaatattgataaattggacttcatccaaatgtaaaactgaattcctttacaagatt

SEQ ID NO: 804340 - DNA, 636 bp, Homo sapiens; identical to SEQ ID NO: 804004

SEQ ID NO: 804341 - DNA, 636 bp, Homo sapiens; identical to SEQ ID NO: 804005

SEQ ID NO: 804342 - DNA, 565 bp, Homo sapiens
acaaataaaacaataagacaacagttgatttgatgaggattgtgaaggtgggaagaggaagctttgaatgttatagtgttgtctatgcaaatacacacgtggaccatagtaggtatttatagacataagtttaatagacacagggmaccataaaacgtggacagcagggagtcactttcataatggcatctaaaaagtcttggtacagatggcatttcaatgtcaacattaaaagaggaagtttgcatacccaatgaagcaggctatggattaaaagaaacaacaaatggattcattcattcatttgttcactcactcattcattgttgggaatacaaagggaattgatgcacagttcatgccctgcagaaaaatacagggaacacaaactcaaaagagtcgagaaacgtacattatcaggtgaacacacaaacccgagaagtctttcccaattagccattaatgattgcttcctaccttggcagctcattgtttataagcaatctgtcagttataagtactgctattattaacagtattatttactctgcagctatagagctca

SEQ ID NO: 804343 - DNA, 615 bp, Homo sapiens
tacttagtgaaaactagaaaacactcctaacaaatgaatggatcccgaactgtacacctgatgtacacctgctgtggtatacagcctgcctcacctcttcattcccagggcagttaacagagaatggtgtgcactgtttgtatttccctttcttcctcccagaagcacaaactgcatgtctcccrgtgacttggactgcactgacaccagttggattttacccagcagaccagatgcaggtgggagattccccatccgcacccctccctgtgtgcttgtggttcataagccaagccgacactgcagggaggtactcttgtggtaggtggtcacatggagagctggggctgtgggcagtgccttctccttgccatctgaacattgggtcatcctgaggagagatagaccccaaaccctcggatgcatgacagacccttgactccaaggagcagaccccactggataagggagagacgcccaaccctgcccagtaggacactacttccacttggctctgttctgcttccctggcagatttgcagggctgggcattggctacaagagctctcgcattcccagtctgcttcattcttggcttcctattgggtgatccat

SEQ ID NO: 804344 - DNA, 615 bp, Homo sapiens
tacttagtgaaaactagaaaacactcctaacaaatgaatggatcccgaactgtacacctgatgtacacctgctgtggtatacagcctgcctcacctcttcattcccagggcagttaacagagaatggtgtgcactgtttgtatttccctttcttcctcccagaagcacaaactgcatgtctcccggtgacttggactgcactgacaccagttggattttacccagcagaccagatgcaggtgggagattccccatccgcacccctccctgtgtgcttgtggttcataagccaagccgacactgcagggaggtactcttgtggtaggtggtcacatggagagctggggctgtgggcagtgccttctccttgccatctgaacattgggtcatcctgaggagagatagaccccaaaccctcggatgcatgacagacccttgactccaaggagcagaccccactggataagggagagaygcccaaccctgcccagtaggacactacttccacttggctctgttctgcttccctggcagatttgcagggctgggcattggctacaagagctctcgcattcccagtctgcttcattcttggcttcctattgggtgatccat

SEQ ID NO: 804345 - DNA, 428 bp, Homo sapiens
caagggctgattttctccatcaacatagaattttttaaataggtaacgtgtttcatgaaccaaataagcaaaggaagatacagggtaaatgattttaacaaatttctagctaatgtagacaaattcctagttagtatggtcttagcgatggggaaggggagaggaagaatagaccctcctatctgctatatcttgaagttatacaaatgctttcagatgaatctgtttctgagtcatgtttctgtgygaactataaggaagaaaagcaagatctaaaagagaggatatggggcacacctgcattgttaaatgataccataaaaccctattcaggaaagtggatagatactcaagaccaaaagacatgctttctgatgacaatctctacatgttcatgtattatagacatgttttatgaagctgtacaa

SEQ ID NO: 804346 - DNA, 568 bp, Homo sapiens
caaacttcaaatctctgcagatggtggaaggaatgagtagagcggaggggctacagaagatggcacaatcatctatattgaaatctatagatatggatatagtaggatagtgtcccagaaagaaaagacgtgaaccctaatggaattagataataattaacatggatgggggcatatgtacattgtcattaagaaaataatcacagataataggacacttggatgtagctcttgctgtgcactatgttataagtcaagttgtgtcttcagggtgtttattgtgaggctcaatttttgcccaaatgaaacttacgttttgttgtgtrtggcagaggatgttgttgggaatgatgatgaggagagaagcagaggaaagggaagggtcaaggtagcaggagcagaccccatttttggacacaccaatgaatgattatcctacacgtggtagaaccctgcccaccccgcccccaaccccactcattcaagctggaaataaaagcaaacaaacaaataaacaaaaacaaaaagaaaacaaatctagaataacagaaaaaaacaaaaagaagcc

SEQ ID NO: 804347 - DNA, 619 bp, Homo sapiens
gcatggtgaccatgtaaggaaaaaacaattgaagatacatactaaagattttatagaagaaatgacatgatatgagggatttgctttaaaatactccagaaaaatacagtgcagggataagtaaaataagcattgcaaattgttcataatgactccaggggaatttgtataacttcccctggagtctctacttcagtgattgtttgaaaattcccctaataaaaaatattctttaaaatatgcattctttccagaaaattaataccttcaaatagaaatcatattttgtttacaatttgagggggggttacatagtgctaaacctatttcagattttaaaaycttgatatagtgggagaaggaaaatatttgagtataatctcaagggagaatactattaataagaaagaaattgccatggagattagacaggtgttagctctttgtaaccaccaaaagcagagcctaggtacccacaaaaatagagaaaggaagagcgacaagaacaactctgagacctgtgtggactttacttctagatttgcaaaggatttaaaggaatgaatgacacaggacacagggaaggcagaggagcttaaaagtaaaaatgaaaaagaaa

SEQ ID NO: 804348 - DNA, 638 bp, Homo sapiens
tcatttcaaatatagtgttataagtaggtcgcaaacactaatctaaaggaagctagagtgaatatactaatatcaatgtagacttcagagcaaaaaaattatcagagtttaagaaggatattgcctattgataaaagggtaaattcgtaagaaggaatagcaatcttaactgtgtagccattttacaccagagtttcaaaataaatgaagcaaaaccagacagaactgaaagaagacacacataaatgcaggactatagttagagaatttgactttcatctctcaatatcactacaactggtagacagaaactcagcatggatacagaagaactgaacaatgccatcaaccaactgaatgtgatagattaayacaatattctacacagcaacaacacaatcttttcaagtatacatagaacttttacaaagatagactatgttctgggtcgaaatacaaatcttaggtcatttcaaaaaccaaaataatagaaaaaatattttcagaccataatagaattatactggaaatcaataacagaaagataacaggaaaatatagagacacttcaaagttaaacagtacttctaaatgatccatttgctaaaatagaattctcaaaggaaattaaaaactac

SEQ ID NO: 804349 - DNA, 463 bp, Homo sapiens
ccgagagagttttaaaaaagaaagtccttgtgttttcatcagtaactttgttgtgtatcagtgttttcccttcatgtaacttaaatgtccactaatgcaagtgaaggcaatctatgcctaatttcttcactaaatattctactaataaatgatttactgacaaaatgaaattatataactgaaaaggtttaaaaatgataagaaatatcccaatggaagctgttttttaaataatgttattactgtcagtaacaaaattatgatgacacagrtccaacaccttttaaaagagaggaggtaaaaaggagagttggatatgaagaatctcagactgcagtgcagctctgagaaagtctcagccaggtacatgggtgcccgggagcagagattgcctgtcagaagggccccatgagggcagaagtgacctggctctcgtgtccctgccatgatcagtcattggctg

SEQ ID NO: 804350 - DNA, 608 bp, Homo sapiens
atcttactccttttataattttttataggttaaactcaaaatatattcaggagttcagagctgaattataattgactataaacacgtaacctatgtatgtagcctataaatttctaaaaagtctatttctttggaactatgtgtgctatgagatgacagatcaaagctttaaatcctgttttcccragtctagtttattagtttgtcagagaaatattaggaatttttttacacaatttgtagctcagtttgttaaatgaactgatagatgcgacaaagcttcgaagaaaagtggcacctgggagaggctcacttaacgcaacctattgtcattagtattccttctccaaagacttttcatttaactcaaatattgtcatgtgaagtatcaccatccgggttgactcaagccacttatccaaatcagaataaaactttttagccctggagtcatttcctgtcctttctaatcgtacttaggaatatcgtaaagagacataactcaaccagccatcagctgagcagatgactgcaagttcgtcattctgtgtgtctgcacataccccaccagctcagccaacaccgacattagagctatgatagaaagg

SEQ ID NO: 804351 - DNA, 590 bp, Homo sapiens
atgagaaatggagcaggaaaaagtggtttaggctaaaatcagaggggtgcattgggaataatgttttcattaaaagctatttgaaggagtctgtaaggaaaaaaagagccactgtatgttcagctggggagagtgagcttcaaatatgtgcttttgggaagatgattttgatggcactatgaccagggaagtgattggagagaggagatatctcaggcaggaatttgagtttgacagtgcattgcatcactccaggcaggagttactggcaacctgagctgatgaggacagtgacaaagaactgtcagaaggaagagtggccaagagaggttttgcagaggaagaatgggccagatgtgactgcttatgcaatatagtaatggaaacatggactccragccagatctagttcatatggaagcaaaacattagccccagtgatagagttgtcatgaaaatactgtgtgctgcatttatctttctggattgttatcagtcattattactttgtatttttgaaaaatacctgcaattttaaacattgtgtatcttcttttgtttcttgcattttcaaatgatgctttgaacca

SEQ ID NO: 804352 - DNA, 645 bp, Homo sapiens
taactggctaagaaatacataaatacaaaataaatatggcactttaccttgaaaggtttgcttggggaggtgagcgccggaagggttgcagcttgtgagattttgtgaaggggtgcaaggaaggttgtccaaaatcagatagacagtatatcagatgtggatgggtgtggctcgcagcacatggtgaactgagggagctggtagattattgaggtgtgtgcatgtgtattttgtggattagtccagctggaagaagttttctgcattcacttagtgtttttcacaaaagaaatcacgtataagcaaaaatgcaaaattcatgatacacccaaatttttccctaatgtatcaattaggttggaatgaatttggatacagcagaactgattgcagtcttacccccttagtttttrtataaagaaattgagacccagtcagactaaatgaagttttgtagccaggttagtggctgagctgaggatggattcctagacatcggttccttttctagcgggagtgtccaccatgctctgtttcctctttcgctgtattttataaattcctgctatttgctgatgataatattgttttagtacttaaatattttaatgtaggtctcagagctagatccttaatgtagatacc

SEQ ID NO: 804353 - DNA, 567 bp, Homo sapiens
tgaatatatatttattatgtcatttatttatttaattttttattagacggagtttcactcttgttgcccaggttggagtacaatggaatgatcttagctgactgcaacctccgcctcccaggttcaagtgattctcctgcttcagcctcccgagtagctgggattacaggagcctgytaccacgcccggctaatttttgtatttttattatactttaagttttagggtacatgtgcacaacgtgcaggtttgttacatacgtatacatgtgccatgttcgtgtgctgcacccattaactcgtcaatttttgtatttttagtagagatggggtttctctatgttggccaggctggtctcgaactcctgacctcagatgatctgcccaccttggcctcccaaagtgctaggattacaggaatgagggatttatttaaataagtagcaatctgccggctgagctacagggcaagcaaacacgtgtttcccaaccaacccagggaagcctgagcattggcagtgagtatgacatttcgctgagtaattattatttttaaaattactacata

SEQ ID NO: 804354 - DNA, 599 bp, Homo sapiens
gcattatttatttaaaatttataatttataccctgcctactaaaaaagaattgtcgtaggcaaaagccagatgtaacggtcccactcagagtatgcagtgtctgccagaatatatagtgtctcaaaagaacgccattattttctctttgtggtttttataaraaatcctttattagatgaactgtccacaaatgctttcaattccaaggagaggaatccttgctcactggggagctcaaccatcacatctcttacagttgtctctcctagctggccccttcctcttggctctattcctatacattttattctatgggcacagagtgaactgtcaacatttcagcagcctgactacttcattatctggcactaccatacaatgtccttctgggattaagtgctgaatcttttcattaaaaggactcatgaaaatgcagctctagcttgggtcatcaatctgctgtagaattgagccagacactgactctgacaggtaattgaggaaggccatgagacatttcttgagtgggtgagagtttgctattgctgtgaatgtgaagaggaattgctgaggatgaaggctattactgaggacctga

SEQ ID NO: 804355 - DNA, 628 bp, Homo sapiens
tatgtcagaatgtatctaggggagatgtgatttaatctacaaaataaaatctttgggagagtaaagtgctacctaatggcatttaccagatgtcctttaaggttgatctgatttcagattaagtcagtcagagtgagctggggatacagtaggggtggataaatccactgtgggaaaagttaggattatcagggtaccttttgtgggtgggggagaaggctaggcttcagtttgacccttgagggatggtgccttcaggaaattacagaattattgagcttcctgagctacaaacttcccttagattatgtccctttgaactacttattctttactacctaaatccaatgtattgaacattgttgagcaccaactgtacaagtcatgttgtaaccatacatgggcakgcaggggtgactggaagactaaaacgtggtcactgccatcttggaaccctagaatgataatgctacaagaccttgctactcaaagtactgtctgtggactagtggcatcagcattatctggaatattctcagatgtacaacctcaagcctgtccccagacctactgaatcagaatctgcattttaacaagatccccaggtgattcctatgtccattaacat

SEQ ID NO: 804356 - DNA, 546 bp, Homo sapiens
ccttctgcaaaataaaagggttagggtagatgatttcaaaggtttctttaggctatacagtgttatgggtttgcatctatgtaatgtgattcaaggttcaagaatctattctgctactgcatttgatttttttttttttttttggaaacggagtctcactctgtcgcccaggctggagtgcaatggtgcgatctcggctcactgcaasctccgcctaccgggtttaagcgattctcctgcctcagcctcccgagcagctgggactacaggcacatgacaccacaaccagataattttggtatttttagtgggagatgggtgttccaccatatgggccaggtctggtctcgaactcctgacctcgtgatccacctgtctcggcctcccaaatggctggaattacgggtgtgaggcactgcgcccggcctgatttttaaaatatattattttttactcttccttattccaacaattcaaaataaatattttgtatctttattatggatctatcttcccaggtatctgatgtaaaatttagttggcaaa

SEQ ID NO: 804357 - DNA, 637 bp, Homo sapiens
atttccaattgttccagcatcattttttgaaaaaacgaagatttctacattgaattaccctgggtcctttgttaaaagccaattaaccatattcctgaattttttattttttctaatgatctaatatgtattcttattgcaatatcacactatcttgactattttagcagtagagtatgacttgaaatcaaatattgtaagttctccagctttgttttctgtttaaaattttgtttaattactctgttttttgcagtctcatgtacttttcagaattaagtggtcaatctactataatgttttataggattctatattatttaattcactrggattacattgaaactatcgatcactttgaaaataatatctcaacacggttgagtcatctaatctgtgaaaacggaatatctctccgtcattgagttctttttaaatttcttggttatgttttcagtctatagattttgaaaacatgggttgcatttatttctgtttttaatgctttcatgctattataaattacattgttaaaatttcaatttttagttattggtgttagtatagagaaatgcaattaatgttcatgagagatattggtcttcagttttcttttgttataatgtctttggttttg

SEQ ID NO: 804358 - DNA, 637 bp, Homo sapiens
atttccaattgttccagcatcattttttgaaaaaacgaagatttctacattgaattaccctgggtcctttgttaaaagccaattaaccatattcctgaattttttattttttctaatgatctaatatgtattcttattgcaatatcacactatcttgactattttagcagtagagtatgacttgaaatcaaatattgtaagttctccagctttgttttctgtttaaaattttgtttaattactctgttttttgcagtctcatgtacttttcagaattaagtggtcaatctactataatgttttataggattctatattatttaattcactgggattacattgaaactatcgatcactttgaaaataatatctcaacacggttgagtcatctaatctgtgaaaasggaatatctctccgtcattgagttctttttaaatttcttggttatgttttcagtctatagattttgaaaacatgggttgcatttatttctgtttttaatgctttcatgctattataaattacattgttaaaatttcaatttttagttattggtgttagtatagagaaatgcaattaatgttcatgagagatattggtcttcagttttcttttgttataatgtctttggttttg

SEQ ID NO: 804359 - DNA, 526 bp, Homo sapiens
agaaggaaatggtgagcctaaagatacttggtccttgctctcaaggagcttacaattcaatggggaagacaggcatcactccaggaaagtgcaaatatgcactaaaagaagtcacataaagaaagtgagcccagctctrtggaaaccaataataaaatggaaatcaactgaggctgtaaataaggctttcttgaggatggattctttgaccatgattggaatggggagtaggagttaaccagcatactgtgaatccagtggtgaggaaaatcatattaatcgaaactttagttcatatacatgtacggttaacaagatacagtatgacaattttgatcagacaaatcatgattagtaattagttacaacatgctcaatgtggctcaatcttgtcatattatctgaaagtaaaattatgggtttattatttcagtaaagaggaataatattttgcgtattagtaggtagaaaagatttttttaaaagagtaataacaaggtttttttttaaaaagtaaactgattcc

SEQ ID NO: 804360 - DNA, 541 bp, Homo sapiens
acaggccaagagctgtctctcaaaaagagagtagttatctgcagaagatggcagggccttgctccaaaatcctagaggcctccactgtgattcacctatgggggcctaccaaaggctccaaacagcatccctatctgccactgacacctcaagcaccattggatstgctgggtcctatggcccaagtggcagagcagcttgtacagcagcctggacctgttgcagagccttctcctgttctggacaccactcaaaactagcagcctttcaggttactcaataaatgggttggagtaacacacccaagtaaaaaatgtgttatctccaaaacccaaataggcccactagacattgtgcctctttcttggttgtaggagggactaaatgcagcaacttatccctcatcttagaaggaatagcttgacaggccccacaccactggaaccctagaaattttactgaggtagaaggtccctgaattttagttggatttatttcccatcctctggcacgcaaatgtctcacgaataagtccagtgtg

SEQ ID NO: 804361 - DNA, 664 bp, Homo sapiens
gttgatagtgaatccatcctgagagttttagaagggtagtttaacattttggttgtcagactttctggttcctagttactaatttaatctccatgtcagctggcaaactgacaacaatgatttgctgatttgggaaagagttggtacctagttataggagtaagtgtggcagcaatttcccagaaactgtataccatattggacctgtgagtctttaccatgtatatatatttcctttttcattcatatractttaaaaaaatcaaatttattaataactaagatagtatccttcttgacagcaagcatcaaaaacttaggctgaaattatttttaattttgccttactttcctttggaaatggtatattatggtataaggtacgtaagaaggaatggagttctgtaactttacagactgtcctctgcgaaagcatgtaatggggagattgtcttacctcctcattgccctagaggcaggcatcaaacaagtgtatagcaccttatgcttgaatacagatttctgtattctctcccaacagggtgaagaatggttggcaaaaacacatcttcttaagtattattagaaaacacttcagttttatgagtttattttttggataggctctatatataaaagagaaaattaaaaagaaaagtacatt

SEQ ID NO: 804362 - DNA, 593 bp, Homo sapiens
ccacagaacagggtttagaaaacatgcttccattcctgtgccctccactctatttcttcccgttctataaagggtaagcatctttattatgttgtatcctgtggcggtttctttgtgaaagatgtaagcaatgcatatgtgacatgttagtatttacatgctgctccattcttacrcaaaaggtaacactctagaaacaccattctgcagggttttcttcacctaatagaatgttctgcagatcactgtgtagggataagtgctgataataccaacatctatgggacaccctccctcaccttcgtgggtgctcttgcagtagttgctgggatcttgctccagaggcccctgctgtgcagttttgagcctgagagatggtggccttttctgttttgccttcctgaaagcttccctctctttgcagggtgactctagggctgattctgcctaccctgctggggaataagctgggctctcaaccgggctcccagtgggagagagtctgcccaggaccaacagctctttgaggatcaaacctccctggaattttggctgggtagaaaatcagaagtatcctcaagagagacatccca

SEQ ID NO: 804363 - DNA, 636 bp, Homo sapiens
tccttttatacctggacctcatctcaagccaccacaggcttagtaagatctcaccaccctgcacaccaccagccaaagggtgtccagcaagcgatcccagctcagaatttcattttaggggctactccgcagggctgcttctggtatcgactttcttagtttaggtttccccgaggtcagagactgagacaaggccctgagtgcacatcatttatttggaaggtgaacctagaatgcacaagggaggaagtgcagagagagacccacagggaagggagaaaagccagtgcaggttgtggcatccaatgtgggcgattgaggtcatgcccactggggatcctcggaagtgtcatgtagamtatggctcagctgcagcccacccagggaagctgggggatttacacaccaatgcttttcccccattggttaagggttgccctggggctttcaactcccagaatttcaggatgaggcagctctgcacacaggccaggcaagctcttactgcactgaaaaacacaaaacaaaaccaagctatcaatgccggggcttgtggtaggaacgtgtcagcaggaatgactgtccactgcagctgggggacacccagcgggggcccggggcttgctggttggcatc

SEQ ID NO: 804364 - DNA, 658 bp, Homo sapiens
aatggcttacgttcttagtttatcattcatgaaccttggagtttccagtaaaataatttctttcccttccctcttctaggttgggggagaagatgacagaatatcagaggcaaagaagcccgggaggcagggctgggcacagtgatgctccatagatgggcaaaaagttcctcccatcattatcctaaggagggtggaccaggcaacagggaacacaggattgtcctgaccarggggacatgcagacggcaaaatcaagactcacagcaaagagaatacacagagaacacaaagccagcggttctggaggcagacccaggagagacttcttaaggaagtgagtggtacacagctagaaaaaaacaagtgatgagatagagtgtaggtgtagaaagggcacaaaaccagtttgaactcattttggaatagaagtttccttaagaatgtagttcacaatcaaggaaactccaatcaagtggcaacattgtaggaggagagcgtcccggttcaccgggaatgcctcacacttctgtccagtctgggcatttctctctgagactcttccctccctgacgacccactgacatgctcttccctcattcagtacaccttgtgcgctccctggctggatccagctcccttgcaagttgtgaatact

SEQ ID NO: 804365 - DNA, 658 bp, Homo sapiens
aatggcttacgttcttagtttatcattcatgaaccttggagtttccagtaaaataatttctttcccttccctcttctaggttgggggagaagatgacagaatatcagaggcaaagaagcccgggaggcagggctgggcacagtgatgctccatagatgggcaaaaagttcctcccatcattatcctaaggagggtggaccaggcaacagggaacacaggattgtcctgaccaaggggacatgcagacggcaaaatcaagactcacagcaaagagaatacacagagaacacaaagccagcggttctggaggcagacccaggagagacttcttaaggaagtgagtggtacacagctagaaaaaaacaagtgatgagatagagtgtaggtgtagaaagggcacaaaaccagtttgaactcattttggaatagaagtytccttaagaatgtagttcacaatcaaggaaactccaatcaagtggcaacattgtaggaggagagcgtcccggttcaccgggaatgcctcacacttctgtccagtctgggcatttctctctgagactcttccctccctgacgacccactgacatgctcttccctcattcagtacaccttgtgcgctccctggctggatccagctcccttgcaagttgtgaatact

SEQ ID NO: 804366 - DNA, 626 bp, Homo sapiens
tctcgccccctgaatatgttccacagtgatttgtcctatgcctcagaagctggcccactggctgacaggactggggcaccattttctcctcataagcatttgtacagagggggcactggcatttattcccctgcaatgcccagattgaacgtttgctagctggctccagggcatgaagcggactagtcccagaggacaaacagaatctttgccctcctgtctgctagtccagtcttttccctgctggatcattstgtgcctgtgccatgaggtttctgccatctaacaaacagtgccagccaagcaaagcgggcatgcaggcctgcaagtggttctcatggaagctgttcctccccacagtttgggacactgaccaacagtcctttagcaggaggtcgtcttagtccatttggtctgctataacaaactaccatagactgggtggctcataaaaacaggactttatttctcacagttctggaggctgggaagtccaagatcaaggtgccagcagattcagtgtctggtgagggcccttgccttggtttatagagggaaccttctcactgtgtgctgatatggtgtaaggagcaagggaatgctctggggtctctttcataagggaa

SEQ ID NO: 804367 - DNA, 623 bp, Homo sapiens
tggacaaaacgtgtccaaacccaatacagctgcccagaaattctgagggaagcatgagctgtccgttctgctcagttactgttaattccggaaatacacagagaaaataaaaatcacggaagatgcagttaaagtatggagctagaccactgttaaaacttgccagcaatttttaccaatccaatctttggtgttaattggtttccccagaagatgcaatatctctttccccactgatgattatattgcccagagccgctggctttcagaaatgtttaatcaagcattgcatatattcaagcaatactttccagacacctcagcttttcttgacagcgttaccttccttcgctctttctttgtctcttttaggaacatcaaatcatccagtgattttctgcataactcaaagttttgtcatttagaaaaaaaatcataacagaacagataaccattaggaaaycaatttgcatcagacatccatttgagaagtttaaaatgtggggaatgcaaactctacccatagggacttagtctgtagggaagaaatatgaacttgccactaatttctgaaaagcaaaattaattcagttatagctagatctgccttcataaggatattt

SEQ ID NO: 804368 - DNA, 565 bp, Homo sapiens
tgtttatctaacaggtgatttgggggctgggcgtggtggctcacgcctgtaatcctagcactttgggaggccaaggtgggtggatcacctgaggtcaggagctcaagaccagcctggccaacatgaggaaaccctacctctactaaaaatacaaaaaattagctgggcatggtggcgggcacctataatcccagctactcgggaggctgaggcaggagaatcgcttgaacttaggaggcaggggttgcagtgagccaagattgtgccattgcactccagcctgggcaacagagcaagactctgtctcaaaaaaaawaaataaataaataaaagaggtgatttggaatgtggcatccagtgggtgcacacacacgagtcctcagtcaacctacacgtcacctcgtcctcgctcactgctgcagcctcacccagcacagccgaggatctctccacttacacttttgcttacttggtagaaaaatgaagctcaaagtatatgttaatgtgcccaattctcagtaatttctcctctgggatgtaggatttttgcctccaccaagtgagc

SEQ ID NO: 804369 - DNA, 536 bp, Homo sapiens
aggcaaacagttgcattcctttgagtcttttgatcagtgaagccacttttttcacgtgaaaggagggaggagaggaatagtcaattatgcatttatcttgtgctcagttaatctccatttttacataaggtaaaataaacataggaagtagaggaagcagttagatatgcattcctctcagttgaacagagggatgatggcttttagttcttggtttttgttctctttctgtagaagattagcttctaatttattaatacattgtagggtgaaattcaacagaactgtcttagggtaaagatattggggctcacaagagatttccttgtgaggaaattgtgagggaagaatgtagccttytatcttgtagctatctatttaggaacaaagtggaaggcaggtttgcctgaccgagttcccagcttaatgtttccctttggcttagcgagtttggggtccagagattttattttcctttcagatgccataggaaatgtaacaactgtagaaacgagatttcagagctgggcctctca

SEQ ID NO: 804370 - DNA, 538 bp, Homo sapiens
tgagaggcccagctctgaaatctcgtttctacagttgttacatttcctatggcatctgaaaggaaaataaaatctctggaccccaaactcgctaagccaaagggaaacattaagctgggaactcggtcaggcaaacctgccttccactttgttcctaaatagatagctacaagataraaggctacattcttccctcacaatttcctcacaaggaaatctcttgtgagccccaatatctttaccctaagacagttctgttgaatttcaccctacaatgtattaataaattagaagctaatcttctacagaaagagaacaaaaaccaagaactaaaagccatcatccctctgttcaactgagaggaatgcatatctaactgcttcctctacttcctatgtttattttaccttatgtaaaaatggagattaactgagcacaagataaatgcataattgactattcctctcctccctcctttcacgtgaaaaaagtggcttcactgatcaaaagactcaaaggaatgcaactgtttgcctct

SEQ ID NO: 804371 - DNA, 554 bp, Homo sapiens
gagtcaatattttggtgggtgacagttaacaaaaatgtaaagtagatgaactacatctattacaaccaacagcaacgagcttttcatgagttaaaagaaaaactcatgttggccccagccctggggatacccgacctgacaaaaccccttacaccctgtgtgtcagaaagagaaaaaatggcagttggagttttaacccagactgtaggtccctggccaaggccagtggtctatctctgaaaacaactagacagkgtttcccaaggctggcccccatgtctaagggccctggcaacaatggccctgttagcacaagaagcagataaactaacccttgggcaaaacctgaatataaaggccccccatgctgtggtaactttaatgactaccaaagggcatcattggttaacaaatgctagattaaccaagtaccaaagcttgctatgtgaaaatccccgcataaccactgaagtttgcaacaccctaaaccctaccaccttgctcccggtatcagagagcccagttgaacataactgtgtagaagtgttggactc

SEQ ID NO: 804372 - DNA, 554 bp, Homo sapiens
gagtcaatattttggtgggtgacagttaacaaaaatgtaaagtagatgaactacatctattacaaccaacagcaacgagcttttcatgagttaaaagaaaaactcatgttggccccagccctggggatacccgacctgacaaaaccccttacaccctgtgtgtcagaaagagaaaaaatggcagttggagttttaacccagactgtaggtccctggccaaggccagtggtctatctctgaaaacaactagacagtgtttcccaaggctggcccccatgtctaagggccctggcarcaatggccctgttagcacaagaagcagataaactaacccttgggcaaaacctgaatataaaggccccccatgctgtggtaactttaatgactaccaaagggcatcattggttaacaaatgctagattaaccaagtaccaaagcttgctatgtgaaaatccccgcataaccactgaagtttgcaacaccctaaaccctaccaccttgctcccggtatcagagagcccagttgaacataactgtgtagaagtgttggactc

SEQ ID NO: 804373 - DNA, 565 bp, Homo sapiens
tggctcccacctgtaatcctagaactctaggaggctgagcccggtggatcccttgaccccaggattttgagaccagcctgggcaacatggtaagaccccatctctacaaaaaatacaaaaattagctgggcgtggtggcacacacctttagtaccagctacttaggaggctgaggtgagaggatcacttgagcctagggggtggaggcttcagtgaactgagatcctcccactgccctccagtatgggcaacagagtagggctctgtctcaaaaagaaaaaaaaaaattaaagatagagttagcatatgatccagcaagtccactcctagatagatacccaagacaaatgaaaacatasgtctacacaagcactggtacataaatgtttttaaaaacactattcagccaaaagattgaaacccaaatgtccaacgacagacaaatgaataaacaaaatgtagtatagccataactgtctgccataaaaaaggatgaaatgttgatacactatgacatggaccaaccttgaaaacattatgctaagtgaagaaagccagacacaaa

SEQ ID NO: 804374 - DNA, 626 bp, Homo sapiens
cttcctatgtagtaagtgctcagtaaacattggctgaatgaaatttaaatgaatacccaggactctcaaaagttgctcgtccagtagctggaaagacaccctccctcttctcaagaaagcaaatcaagatgcaagtgaaccagagatggtcaatgtcctgctaatgcagggctgaagcttcaggtggcttcccacccgtcacctctggaaatcacatctcatctcctacgttcttggggccttcagtgacaataaactaacctgagatgatgggtaaaagtcaagagtgacccctttctttccttatcaataacatgccttttaatagagtccttctggagagaaagctgttcccaaaacccatcatctctttcctgtagtcttttatctacaccttcaggtctcataggtgcttcggatggaagyaaatgcagtctctctttctataaactgtccctgagagaggcaccccaatccctggacttcagatcagtactccccttgggccccatatataatcatcatctcctgataatctcacctcaagtcggcctctgtattcctcttccccattctcactgccgccacccggagtcaggccctccttttcctaagttggtggatgg

SEQ ID NO: 804375 - DNA, 641 bp, Homo sapiens; identical to SEQ ID NO: 803376

SEQ ID NO: 804376 - DNA, 536 bp, Homo sapiens
ctgctgctcgccatcctaagagatgaagacagaggctgaggccaagtccagacgcctctgagaggaggacggaggcctctggggctcctccacggcggaaggtggcaggaaacgggacatggaacacggaggcctccctcatattcgcggcccggaatcagctgacggggaacctgatcaccgctgctcagtcaggtttcttgttgccaggctgcggtttgtgaaagggttcttgcagttacaaggctgggccacttgtttctgggcggcgccactgccttgctgtctcagctatgtgcaggctggaaaaaggggtgcggtgagctagagcagggataccattgccaccactgccagcagctccagcccggaaggacccctgtccctctgccgacgctgccgtcttgttactccagctmcagcccaatagtttcactctgaattttcttagcgcattacactttcttaaagcccttttcatattttccttatcttcacctcattctcttaatggaaggtgatttgttgaaaaaagg

SEQ ID NO: 804377 - DNA, 600 bp, Homo sapiens
aagcaaccatgttactggtttatgtatttaatgtactatacctcttatggttattttagaatgtactcctacttgtacaaaaaaaaagaaagaaagaaagaataggtaactgtaaaacagcctcaggcaggcccttcaggagggattccagaagaaggcatcgttatcctaggagatgacagctccatgcctgttattgcccctgaagactttccagtgggacaagatgtggaggtggaagacagtaatacggatgaccctgatcaaaggaaggaaatatttttgtacagctgtacracaagtttgtgttttaagctaagtcacaataaagtccaaaattttaaaaatttaaaagtttaggccaggtgtggtggctcacacctgtaatcccagcacttcgaaagaccaagccggaggattgctttagcccggagttcaagatcagcctgggcaacatagtgagacccccatctctacaaaaataaataagaaaattagctggacatggtggcatgctcctgtagtcccagctgcacaggaggctgagggaggaggattgtccaagcctaggagtttgaagctgcagtgagctgtaatcac

SEQ ID NO: 804378 - DNA, 600 bp, Homo sapiens
aagcaaccatgttactggtttatgtatttaatgtactatacctcttatggttattttagaatgtactcctacttgtacaaaaaaaaagaaagaaagaaagaataggtaactgtaaaacagcctcaggcaggcccttcaggagggattccagaagaaggcatcgttatcctaggagatgacagctccatgcctgttattgcccctgaagactttccagtgggacaagatgtggaggtggaagacagtaatacggatgaccctgatcaaaggaaggaaatatttttgtacagctgtacgacaagtttgtgttttaagctaagtcacaataaagtccaaaattttaaaaatttaaaagtttaggccaggtrtggtggctcacacctgtaatcccagcacttcgaaagaccaagccggaggattgctttagcccggagttcaagatcagcctgggcaacatagtgagacccccatctctacaaaaataaataagaaaattagctggacatggtggcatgctcctgtagtcccagctgcacaggaggctgagggaggaggattgtccaagcctaggagtttgaagctgcagtgagctgtaatcac

SEQ ID NO: 804379 - DNA, 575 bp, Homo sapiens
gggaaagggagaagggaaaagatatttacactcaccagactatggaggattcaccaccagactgggaagcaacagtctcggctccagagttggccactcatgtctgtgcacaggcgaggagaggtctcatgaagtttcggcgcagtctgggaccctaactctttttgtaatgagttgtttsgcataaggtccagtcaagagggctctttgtgactgggctcaaggaacacaaaaaggtcaacttgtttttgtgattgtctattgttttccgataactaacatataggaatagattgaaatagagatttctctgaaacagtgctggatgaatgcctcaaggagctcacacaacctgtttcgggacttggtgactgttgtttgtgtccatgttcaattgagttcaaatttaatatttaactttcccttcacagtcggcctccatctgatactcaattgtaggaaaatacccttacagatacatagggaaggcatagtcgatatagattacagatacggggtaagcacaggagaattagaagcacaattaataaaataccacacccaccatggctttg

SEQ ID NO: 804380 - DNA, 565 bp, Homo sapiens
taaacataggttgctttaattttctgggaggaaatttggcactgtggatcaagtacctaagcatcatcatgataagctcatgctagaattaactatgtatttctactactagaaattgattgtaataatttgatgagttataggtaaattatgtgtcaagatgccagtaaaattttattaaaatgaaaattatagcaaccatcaaacaamacaaaataaattatgtatgaaaacgctatattgtggaacaatgcacagccaacataataataattaggatcagatttctaatgacatgtgaatgattatgcaatgtactaggtaacaaataaaatattcaactgtaactatgtgaagctgtgtgtccagcaaaaggaagtaaatgcagaaactctaaaagataataatctcctatcagtagtataatgaatgacttttgtcatctcttttttatgtcttctaaaatttctatgatgaacatttattccacttccacgtagaacactataatataagccttgcaatgttctgcgaatttctaagcttaaaaacctcttgtatgtca

SEQ ID NO: 804381 - DNA, 565 bp, Homo sapiens
taaacataggttgctttaattttctgggaggaaatttggcactgtggatcaagtacctaagcatcatcatgataagctcatgctagaattaactatgtatttctactactagaaattgattgtaataatttgatgagttataggtaaattatgtgtcaagatgccagtaaaattttattaaaatgaaaattatagcaaccatcaaacaaaacaamataaattatgtatgaaaacgctatattgtggaacaatgcacagccaacataataataattaggatcagatttctaatgacatgtgaatgattatgcaatgtactaggtaacaaataaaatattcaactgtaactatgtgaagctgtgtgtccagcaaaaggaagtaaatgcagaaactctaaaagataataatctcctatcagtagtataatgaatgacttttgtcatctcttttttatgtcttctaaaatttctatgatgaacatttattccacttccacgtagaacactataatataagccttgcaatgttctgcgaatttctaagcttaaaaacctcttgtatgtca

SEQ ID NO: 804382 - DNA, 565 bp, Homo sapiens
taaacataggttgctttaattttctgggaggaaatttggcactgtggatcaagtacctaagcatcatcatgataagctcatgctagaattaactatgtatttctactactagaaattgattgtaataatttgatgagttataggtaaattatgtgtcaagatgccagtaaaattttattaaaatgaaaattatagcaaccatcaaacaaaacaaaataaattatgtatgaaaacgctatattgtggaayaatgcacagccaacataataataattaggatcagatttctaatgacatgtgaatgattatgcaatgtactaggtaacaaataaaatattcaactgtaactatgtgaagctgtgtgtccagcaaaaggaagtaaatgcagaaactctaaaagataataatctcctatcagtagtataatgaatgacttttgtcatctcttttttatgtcttctaaaatttctatgatgaacatttattccacttccacgtagaacactataatataagccttgcaatgttctgcgaatttctaagcttaaaaacctcttgtatgtca

SEQ ID NO: 804383 - DNA, 621 bp, Homo sapiens
cctatttcctctactcctgccatcttacccactcattgctcatgcacaaagcctcacctcacatgaaccaacatccattcttttaccaatcaaacatattttcatgtctgaaatatgcttttatgtacacacatctccttctcctgaagctgcagcttatcagctatcaaataagagayaggaagaggaaatggccatatataatatagctgcaattgtcgcagactacacagatggacggaagaaggcataaaaggacatgggttgttttaatggatgggtgatatctgtgtttcatcccactgttgatgaattttggcagacaccaagatcatgtaacatattaaatttaatatttgttcagcattatatcatgactgaattagactcccatatggaaaacataatttatgtttaattttaatgagatacattactaagatgctgaaaaaatattcaaattttttatcacatattgaacaagcaatatatctacttatgaagaacacagctgacttacattcttgctgatgtttgtcaagaataaaaatgattatgctatataaccattgtatagaagccttctgttgccataaattcacttgacatttcactttactg

SEQ ID NO: 804384 - DNA, 621 bp, Homo sapiens
cctatttcctctactcctgccatcttacccactcattgctcatgcacaaagcctcacctcacatgaaccaacatccattcttttaccaatcaaacatattttcatgtctgaaatatgcttttatgtacacacatctccttctcctgaagctgcagcttatcagctatcaaataagagataggaagaggaaatggccrtatataatatagctgcaattgtcgcagactacacagatggacggaagaaggcataaaaggacatgggttgttttaatggatgggtgatatctgtgtttcatcccactgttgatgaattttggcagacaccaagatcatgtaacatattaaatttaatatttgttcagcattatatcatgactgaattagactcccatatggaaaacataatttatgtttaattttaatgagatacattactaagatgctgaaaaaatattcaaattttttatcacatattgaacaagcaatatatctacttatgaagaacacagctgacttacattcttgctgatgtttgtcaagaataaaaatgattatgctatataaccattgtatagaagccttctgttgccataaattcacttgacatttcactttactg

SEQ ID NO: 804385 - DNA, 621 bp, Homo sapiens
cctatttcctctactcctgccatcttacccactcattgctcatgcacaaagcctcacctcacatgaaccaacatccattcttttaccaatcaaacatattttcatgtctgaaatatgcttttatgtacacacatctccttctcctgaagctgcagcttatcagctatcaaataagagataggaagaggaaatggccatatataatatagctgcaattgtcgcagactacacagatggacggaagaaggcataaaaggacatgggttgttttaatggatgggtgatatctgtgtttcatcccactgttgatgaattttggcagacaccaagatcatgtaacatattaaatttaatatttgttcagcattatatcatgactgaattagactcccatatggaaaacataatttatgttyaattttaatgagatacattactaagatgctgaaaaaatattcaaattttttatcacatattgaacaagcaatatatctacttatgaagaacacagctgacttacattcttgctgatgtttgtcaagaataaaaatgattatgctatataaccattgtatagaagccttctgttgccataaattcacttgacatttcactttactg

SEQ ID NO: 804386 - DNA, 613 bp, Homo sapiens
cctttaaaagcatgctatatgaacattaagtaatggtttgcattgtaagtattgtaagcaatgttggccttgggatgctaatagctgtgaggacaccacataccaccagcaaaggtggtacttctactattactgaatcacactatttcaaacatcatctgtaatttaggatttgagattatttttcagcagcacatgttcacacgggaaaatatcccctttggtttttcattcactcgtcagcagataattactctagaagcttttataaaagataagttggtgtttctcattactgaagaagttacattattgggaagaagttctgatcaccataaatgttawtatctctatgttccacatcttattttaaaaatgtttaaaagtattttagaaatggaaattaggaataacagaatgatatgatgtgaaacagagtacccagaagaactgtgatagaaatagatccatcattatagcatgaccaatatataaaactttgtttttattttttcttaagccactgagattatagtttgtcattgcaacataatttagcccattctggcaaatgtggatgttttcattgttttattcattaggaaacagttct

SEQ ID NO: 804387 - DNA, 613 bp, Homo sapiens
cctttaaaagcatgctatatgaacattaagtaatggtttgcattgtaagtattgtaagcaatgttggccttgggatgctaatagctgtgaggacaccacataccaccagcaaaggtggtacttctactattactgaatcacactatttcaaacatcatctgtaatttaggatttgagattatttttcagcagcacatgttcacacgggaaaatatcccctttggtttttcattcactcgtcagcagataattactctagaagcttttataaaagataagttggtgtttctcattactgaagaagttacattattgggaagaagttctgatcaccataaatgttaatatctctatgttccacatcttattttaaaaatgtttaaaagtattttagaaatggaaattaggaataacagaatgatatgatgtgaaacagagtacccagmagaactgtgatagaaatagatccatcattatagcatgaccaatatataaaactttgtttttattttttcttaagccactgagattatagtttgtcattgcaacataatttagcccattctggcaaatgtggatgttttcattgttttattcattaggaaacagttct

SEQ ID NO: 804388 - DNA, 543 bp, Homo sapiens
ccctccccttgtccccccatcccctgacaggccatggtatatgatgttccccttcctgtgtccatgtgttctcactgttcagctcccactgatgagtgaaaacacgcggtgtttggttttctgttcatgtgttagtttgcygagggtgatggtttccagcttcttccatgtctctgtgaaggaaatgaactcattttttatggctgcatagtattccatggtatatatgtgccacattttctttatccagtctatcttccaagtctttgctattgtaaatagtgctgcagtaaacatatgtgtgcatgtgtctttatagtagaattatttataatcctttgggtatatactcagtaatgggattgctgggtcaaatggtatttctggttctagatccttgaggaatcaccacactgtcttccacaatggttgaacttatttacactcccaccaacagtgtaaaagcgttcccagtttctccacaacctcatcaacatctgtttgtttccagattttttaatgattgccattctaactggcatg

SEQ ID NO: 804389 - DNA, 552 bp, Homo sapiens
aagggatggagaaaaatctgtcaagcaaatggaaaacagaaaaaagcagaagttgctattccaatttcagacaaaacaggcttgaaatcaacaatggtcaaaaaagacaaagaagggtgttatataatggtaatggaatattataaatttaaatggagacaacaaagatatgatgagacacaggtctaaatgaagctataaatgaatcttattgaaaatgtctcatgaatattttttaaaagttcttaagttgctatactataaacagaaaattggtgaatcatattgttcaaatattatagaaagtgtaaaatgaaaagttgatgtgggygcaagtttattatcataatgactgtagatttttaccattaaatagaaaaaggaaatacatttaattacaagaggtagtgttagaatcaactgaacattaaagttgagctgtcattatttctccaatatcaatattcctactacttttgcattactttgtattattattataccttaagttctgggatacaagtacagaacatgcaggtttgttacactagg

SEQ ID NO: 804390 - DNA, 552 bp, Homo sapiens
aagggatggagaaaaatctgtcaagcaaatggaaaacagaaaaaagcagaagttgctattccaatttcagacaaaacaggcttgaaatcaacaatggtcaaaaaagacaaagaagggtgttatataatggtaatggaatattataaatttaaatggagacaacaaagatatgatgagacacaggtctaaatgaagctataaatgaatcttattgaaaatgtctcatgaatattttttaaaagttcttaagttgctatactataaacagaaaattggtgaatcatattgttcaaatattatagaaagtgtaaaatgaaaagttgatgtgggcgcaagyttattatcataatgactgtagatttttaccattaaatagaaaaaggaaatacatttaattacaagaggtagtgttagaatcaactgaacattaaagttgagctgtcattatttctccaatatcaatattcctactacttttgcattactttgtattattattataccttaagttctgggatacaagtacagaacatgcaggtttgttacactagg

SEQ ID NO: 804391 - DNA, 612 bp, Homo sapiens
tattaactgtttcaccagaccactactttttggtcaaagagctgacaagcaaggaaacaatcagaaggcacaatggtggagaactgaggttattagcaaggccaagaaaatgattaatcaattcctagataattaaaaccacacagactataaaagaaagctacactttttaaagcctttaaaagaagaaatctggaataaatacatagacttaagtcatcaattataagagcatattttttytcaaatttttaccatctctggaaatcaagaagcatcttaaaatcaatggaatcttacaatcactgctacactgtcaggtaatggtcatgtcacagctacagatttggtgacaatattcatacaggggtctcttcaacttagttatgcaaagtatgtaagtacacatgtcgaatttacctacttttcaaaatagtctaaaaagattacaaaatgaaaatgaagaagaatacagaaagaaagcagggtgtaaatttggaattaataaatatttgtcattttaagaatgactaatttccttttttttttgcagaattactactaattttatttggtgtttattttccttcttttttttttttttttttttaa

SEQ ID NO: 804392 - DNA, 638 bp, Homo sapiens
tccacttcctgaactcaagggatcctgccacctcagcatccccagtagctgggaccacagccatgtggcaccaggcccagctaatttttgtactttttttggtaaaggcagagtcttgctgtgtttcccaggctgatctcaaactcctaggctcaagcaatccacccactttggtctccgaaagtgctgggattacaggcatgagccaccatacctggccccaacaaccttttctgcagaaatagaaaactccatcctaaaatttatagggaacctcataggaccctgaatagccaaaacaatcttgaaaaagaagaacaaaattgaatgactcacttaatgatttcaaattttattacaaagctacaaaaatcaaaacagcatggcactggcataaagagacatatagaccaaaggaattgaatagaggcccagaaataaaccttcatatatatggtcamgtgattttcaataagaaaagtgccaaaaccattcaacgggaacaagacagtctttgcaacaaattatactaagaaaaagaaaaccaggtatcctatacaaaaggataaagttggacccttacttaacaccatatataaaaattaactcaaaatgaaccaaagacctaaaagtaagac

SEQ ID NO: 804393 - DNA, 624 bp, Homo sapiens
ctatacaaaaggataaagttggacccttacttaacaccatatataaaaattaactcaaaatgaaccaaagacctaaaagtaagacctaagttgtaaaactctgggaggaaaacaaaagaaatctttatgacattgcatttggcaattatttcttggatatgataccaaagacacaatcaacaaaagaaaaaatacacaaattggacttcatcaaaatttaaaacatttgtgcatcaaagtacactatcacagagcaaaaaggcaacccagagaatgtgaggaaaatgtttgcacattacacatctaaaaagagattaacatccagaatatataaagaactcctacaactcaacagcaacaacagaaactatttaaaaatggaaaagggacttgaatagacatttctccaaaaaagatatacaaatggccaaaaagcayacgaaaagatgctcaatatcattaatcattagagaaatgtaaatcaaaaccacaatgaaatactacttggcacccattaggatggctatcaaaaagtcagaaaatagctaatatcggtgaggacgtgcagaaactggatccctggtgcgtctttggtaggaatgtaaaatggtacagcagctatgg

SEQ ID NO: 804394 - DNA, 603 bp, Homo sapiens
ccctctatactctaatcaaggagacccagagggcaaatactcatctagtagaatgggaaccaggggcaggaacagccttcaaaaccttaaagcaggcactagtacaagctccagctttaagccttccacaggacaaaacttctctttatacgtaacagaggagctgggatagctcttgcagtctttactcagactcatgggacatccccacaaccagtggcatacctaagtaaggaaattgatgtagtagcaaaaggctggcctcactgtttatgtgtagttgtggcagtggccatctcagtgtcagaggctataaaaataatacaaggaaaggatctcactgtctggaccattcatgatgtaaatggcatactaggtgccaaaggaagtttatggctatcagacaactgcctacttagataccaagtgctactccttgagggaccggtgcttcaaatacgtacrtgtgtggccctcaaccctgccacttttctcccagaggatagggaaccaattgagcatgaccaccaacaaattatagtccagacttatgccacccgagatgatctcttagaagtccccttagttagttctgaccttaac

SEQ ID NO: 804395 - DNA, 534 bp, Homo sapiens
taagtggtgtctgagagttcaaccagccctaaaggttactctgaaagcctgtgagtaaaccacagttatatcactttgggctcctggccacctggctgtgttgctagaagtgcttcaggcttgctctgttcagacttggtttgaccacaagcatattaaatattaaatcatgcagaggcaatggcaaggaaaatagctatgtcaggtgttagttactctgcctttcgttgctattcataacagtttcctackcatttagaatgctccaacttcaagcctcaggcttaaaagaaatgatatcaagcctaaaggaactttgtcctaatttcactggaaattgaaagtaggcccccagacattgacgctgtgtttcttcatgctcttgacaagggaagggctccaggacagatgcaggccctctgctcctgggagagaggccgctgccgggattcagcccctaagacttccttccccattcacaacaatgatccctggttcttcctccactcttcaggccctcacctctacagcgct

SEQ ID NO: 804396 - DNA, 633 bp, Homo sapiens
tctgtctccaatcatcctatatacattactttgactaaaacactgctttcataatgtcattcctctgctcaagaacactcctctctgaccttagcagttcccagtgtgccctgcaagatgttaaaagatgtatgtgaaaagagacatttggtgactaagaaagtttggaaaatataggattaaagaaatttgagttatttattacagactgatatggtttggctgtgtccccacccaaatctcatcttgaattgtggctcccataatcccaacatgtcatgggagggacctggtgggaggtaaactgaatcatgtgggcagggttttcccatgatgttctcatgatagtaagtttcacgagatccgatggttttataaagggcagttcctctgcacatgcactcttgcctgctgccatgtaagakgtgcctttgctcctccttcgccttctgccatgattgtaaggcctccctggccatgtggaactgtgagtccattaaacctctttttctttataaattacccagtctcaggtatttcctaatagcagtatgagaatcaactaatacacagtctcagtcttttaatttactaacatgcagtgtaaatacccagaagaagaatttaatattt

SEQ ID NO: 804397 - DNA, 609 bp, Homo sapiens
atgtgatcttcctaaggaatattgaggatattcaattatacacttatccttttatctggcagctgttacccaaagttacccaaaataatggataataatggattgtatcatactcttcattgaggggggtttctttaaatgtatttaggtttgaggtggtccaataatatttctaatagcgagtatataatattaatcgttctacttgcctagcagtcaaagttttactttctagaatattttcattacggtaataattaaaacaccaccaaacataatgaaaagagctatcacagaacctatgtactttactccctagaaaagaagcttttattcttaggcgataaatttaattttatacattatgtttagtaatcggatttcccctgggaagcttgcagagttctacaattaattcaaatcaggaaacaacctgtggacagcaagttagaaatagagaaaggtgagaagtaaaacttacagtagagctttaggacataacagcaaaggatagagcagccataaagaaagaagaaaaacmttacatttgacccttgaacaaggcagaggttaggggaactgacccccctcgggggtcagttgaaagta

SEQ ID NO: 804398 - DNA, 557 bp, Homo sapiens
aactagaccgaggataaaactaacataatttgcatattaattctatctatttgaggtaaataattggttacagttgatttactgatttgtttaggcccaaactgtaggtagcttttagttttctgacctcgtggagaatagtcttaaacctacatcttagaacaaaattaattttcttcctttcagtagatagcagttaagagtattacagakaaacactctaaaaattgttcatcttgaatctaaacactcattttctttttattctatttgtatttatttttatatatttattttttttgagacatagttttcatctgtcgcccagatacaagcagctctcccacctcagcctcccaagtagctgggatcacaggtgcacaccaccacacctggctaatttttgtattttttggtagagacggggttttgccatgttggccaggctggtgtcgaactcctgacctcaagtgatctgcccaccttgacctcccaaagagctgggattacaggtgtgagccaccacacccagcctcattttctttttaaatagactt

SEQ ID NO: 804399 - DNA, 510 bp, Homo sapiens
aaaatataccatttatctactaaaatcaagaagatttaattcccttttttaaaacatactctgtagatgccaatgcaaaattttattataatcctgtaaattttgtaaaactgccaaagaaatacaaagtcaaaactctcctgcccttatttttgttttgaacaaagtcagttacagaagtagacaggaaagtcaatggagcatactaaccaaccattcatctcaacctctggatgattcccaaatttctagcctcagcctctctccttggatcaagatccacatcttcctcctgagcaactgagttaatgccmcccctatcttctcaggctctggctcaagaacagagtcatctctaagtcatattgtcccttcctccccagcaattatttattactttatataacaagtacttacatagcacttactatgtgccaggcatatagtatttcacaaatattaactatttcacagatattaactaatttaattgtcatagcattctattat

SEQ ID NO: 804400 - DNA, 614 bp, Homo sapiens
gtcactcagaggacttgcaaaagctggggctgttcctagggctcgcggatcagctggagcattgctttagaattgcagcatttctccactcactccctcaccccttcgataccgatgtgttagcatccacactatgccaggtgcttttttaggtgtgaggacacaaagtgagtagaacttggaagttgacatttaaaaaaacctgggaggagtatgtcatgaacaccaagtatggacccagaatcatattatattattacktggtttttattgggtcatattattgacctttttatatcattcttattatactgctaagggatagtcactgaaaaaaaaatcaccatcccttagcatgaataggaagacaaggaaactataacttagagaggcctaaatatcttgccccagatcacaatagaattaaaatgcttctattccaactattaatattctaatatttaaaaatattattttttatattgagaagtgtttaaaaggtctctttgactccgaagtaactttattttccatttcatactaattgtctaataggggaaatagatacattcacaactataatttgtaaatgaatatgttgaaaaaaccgtctt

SEQ ID NO: 804401 - DNA, 645 bp, Homo sapiens
actctgggaggccaaggtaggaggatcctttgaggccaggagtctgagaccagtctgggcaacacagcaagacctggcttctacaaaatattttaaaaattagctagccctggtggtatgcgcctgtagtcccagctactcaggaggctgaagccaaaagatcacttgggcccaggagttggagactgcagtgagctatgtcataccactgtactccagcctggacmaccgagccagaccagtctcaaaaaaaaaaaaagaaaaagaaaatgtgagtcaataaaatggatttcattttgtttcaactatccttcaaatgttaagctacaactgtgaacaatgcaagatctcacagaatattgctcccctgagccattcttaaggcaactacttgaagatgactttcagccaagtaagtgatcatgagataaaccacagcaaaaggactagagatgaacattaatgatatctaactatagagctacgactaaaacaaatgcaaatatcagggtaacaaattaaaatctaaattacataccctgaggttatacaggcatacgtcagagacattgtgagttagacttcagaccaccacaataaaatgagtcacacattttcttttttgtttcccagtgcatataaaag

SEQ ID NO: 804402 - DNA, 576 bp, Homo sapiens
ttctggataatttgctgtagcttctccactagcacttgccactttaacctgcacttttatgttatcaaaaggtcttcttaccttaaatgtcataaaccaacctctgctagcttcaaacttttcttctgaagcctccttacctctcttagcctttatagaactgaaaagagcccgcttgctctgaattagattttggcttaagggaatgttgtggctggtttgatcttctatccagaccactacaattttctccatatcagcaataaggctggttcactttcttatcattcatgtgctcactcactggagtatcacttttaatttctttcaggaatttttcctggccaggaacagtggctcatgcctgtaattccagcactttgggaggccaaggtgggtggatcacttgggcccagaagttcaagaccagsctgggtaacatagtgaaaccccatctctagaaaaaaatgtttaaaaaattagccaggaatggtgatgcacactagtagtctgagctacttagggggctgaggtgggaggatcccttgagcccaggaatcaaggctgcagtgaacc

SEQ ID NO: 804403 - DNA, 625 bp, Homo sapiens
ttggcatgctaaaaggtgaagacaaatacagatggctttcaattaactagtctctggagagacagaggccactcacaacctctaatgatagttaaaataaaacttattcaggccaggcacagtggctcaggcctataatcccagcactttgggaggctgaggtgggcggatcacttgaggtcaggagttctagactaccccggccaacatggcgaaaccccatctctactaaaaatacagaaattarccaggcatggtggtgcgcgcctgtaatcccagctacttgggaggctgaggcatgagagtcgcttgaatccgggaggcagaggttgcagtgaactaagatggtgccactgcactccagcctgggccacagagtgagactccacctcaaaaacaaacaaacaaacaaacactatttaaaacaagacacaaagtgagtttaatgcaaacttatttagttagcattgcatttaatgttcaggaacacatgttccattttgtagacttcattaattacaactagcagttatttaagtgcttactagagacattgaatattctaagcaccctgtgagtattatgtatttaatttgcacaatacagtgaagcagttactttatcg

SEQ ID NO: 804404 - DNA, 717 bp, Homo sapiens
ggcagctggccagggcaaggggtgctctgcaaggcagtggagcaagaccagctgacctgcagggcgagcaaaacgtgggcctcactctcgccagtgccagtagcaatgcatgaaggccagtcctggccttcctgctggggacaggaggcgctggagagatgattacagaatagaaggatgggaagcagaattggctctgggaaatcacatacataaaaatgcctcataaatgagcccagaaagtgagttaatatctataggacccagaaaccagttgctctgcagagcccagggtatatggcagaaaacaagaaaggggaagcagcaaagatgcctccgattccatctcaccaagracgcacaggtttcatctcgcacaagtggcagtcccagttatgcaataagtttttgcaagacactcttaagacaccctgactgcaccttgccttggtctgctccagctgattttattcttagagcagccacatagggggagaaggccggcaagtcaagttcacgactcaatgagtctcttcaagactcagctgggagaggctgtatcagccagagaaaagcctcctttgttgcaccctcctcgccgggctcactccccacactacacatcctggcacagctctgggcctcagcgtgggctgatagggccctttcggcagggccatcagtgatcagggatcctctggagatgaggtggcagca

SEQ ID NO: 804405 - DNA, 610 bp, Homo sapiens
gtgagaatattctggcccctcccaacacccccaaggcaatggccaaggctgaaagttaactggcagtgaaagaagttggttagaaatctcatctgattttgaaaccatctcaaaaccatgagcaggaagactgcagcaatgagctgaccagagctcctggcttgctcaagttcagtgatgctcaaaaatatttttagtccctgcactgtgtacctgtgagaaaaactctatgccctgggcttttggccaaagcaggtactgaaaaggcaggttaacgggccacctcactgtcccctaagggtgggtaaatcaggttaagatctacatgcttaccaaytggaaaccagttgtccattttcctgtaactttttattctcccaacatttttaagttttattccaattttctaactgttgactgaccatacatatttctaattaaaccttaatccccaaagtggtcagggtacagtcgtcatactatgattttattgaactgacacaatatgttgccaccagtaaaacgtattgagaaaaaggtaaaagcgttactgtcagctggttaaaactgtttcccaacctgtcctcagggttaggggggatgcccaggt

SEQ ID NO: 804406 - DNA, 579 bp, Homo sapiens
gttttcaactcatttaggtaaatatgaggaggtttcctttaaatactgaggcttcctgttaatactgagcatctctacctcaggaagatgtatatgtttttatgcaacatattttatcttgtgtattcttaattacagcttctcattcggctctattatctactcagttctctttattttcaatgattttatccctacaaactctttttcctcaacttgtaaccaagttcrtgcctttcctcctttgagttggcatgttccattagctactattttaaattttatctttttgttcccatttcccagtaactctacaaagcactgtattcaggctcttgcttgtgtcagtccagtgaaattgttcttactgaagttattgataccctcctaattgccaaaatacctttagttcttatattaaccaggtattgtcatgtactttactaccattgaccactctcactttcagaatgctcttctactttctgtggtaccctacttttcttgcatttccgtttgtaatattcctttcctctattactatttaccatgtaaattttgatgtttccaggggttcca

SEQ ID NO: 804407 - DNA, 575 bp, Homo sapiens
tttctatatttctagtacccattagagttcgtgacaccttataggaactcattgttaagttcctatagatgattaagataagcatattggctaaagactcctgaatgttacagttcaagactcagagaaatattggacatcagattttttcaaacattagagaaaaaaattcacatattctagagtgataatttatgattgagttgatatttttaatatttagcaattttataccatatctaaatataataaataaaatttaatatagacagttttcaatttgccagggaattatgttctaaaaattgcatttgaaaatcaaagtacattttctcattaaaacagtaacctatgtgatgaataatgaacacyactctacgacttgggttaagttgtaattaggctagtattcccagattcattctcctgccaacgaatcatattcaacatatgagaatttgggagaaaatctcctaactctaaattcagtatttcagttgacaatcggaatcagtagtccatgtacttgcctttttgaagtgagcaattcttacctataggaagacattttgtaa

SEQ ID NO: 804408 - DNA, 620 bp, Homo sapiens
ctggttgtcaagagtacagcctctagtctaggttctaattcctgagctgattgaccaagagtacgacctcggataacctgttgaagatttctgctgcaacttctttatctataaatataacggtaggacgcagctcaaaaaacttgttgtgagaataagtgtatctggctcccagtcagctcttcataaatgttagcaataatcattaatactatgwagtgagcttgctgggaaatgtctcaggatgtgctaggcaggctgaatgttgcctccttggttcccttttcccacctcttgggaaacaggggatatagggagaaacttcacagctagaccacctgggtcccatattttggggtttttaccaaagtgtttttgtctgtggatagttgctagttgacctttctgtggggggagtgaggcctgggaccccctagttcaccatttattgatgccactcataatgtctgttttgaagacttacttgttgttagtatcattagcatataatgtcacttcattagctccaggcggttaaactactgtaatgtttcaattcatttgtaactccacaccaggaagtccctcacaggggttaggaaatcaaagcccatagggtt

SEQ ID NO: 804409 - DNA, 620 bp, Homo sapiens
ctggttgtcaagagtacagcctctagtctaggttctaattcctgagctgattgaccaagagtacgacctcggataacctgttgaagatttctgctgcaacttctttatctataaatataacggtaggacgcagctcaaaaaacttgttgtgagaataagtgtatctggctcccagtcagctcttcataaatgttagcaataatcattaatactatgtagtgagcttgctgggaaatgtctcaggatgtgctaggsaggctgaatgttgcctccttggttcccttttcccacctcttgggaaacaggggatatagggagaaacttcacagctagaccacctgggtcccatattttggggtttttaccaaagtgtttttgtctgtggatagttgctagttgacctttctgtggggggagtgaggcctgggaccccctagttcaccatttattgatgccactcataatgtctgttttgaagacttacttgttgttagtatcattagcatataatgtcacttcattagctccaggcggttaaactactgtaatgtttcaattcatttgtaactccacaccaggaagtccctcacaggggttaggaaatcaaagcccatagggtt

SEQ ID NO: 804410 - DNA, 634 bp, Homo sapiens
agccagtgttggaggagaaatgttggtggagtagccaatttccaacatagtcaatgccaaaaaaataaaaataaatacattggaatatggaggaagggatcttgccagactgtgggcccaaaggtgaagtgtccaacaaggcttcttggtgcaacatcaaggccacaattataaaggaagccaccaccaggtctgttgaaaagaagtggaagtggaagtgtaccactcccctctggttttcctcttccattagacctggtacaaggaaagaaatcataagcaaagttactcttctgtgtcattgagcctgaggaggttcagctatgttaaaaacacactatgcaatcaccgcgtatgtatcctcattgcttcctttggagtttagtcaatgttagctgccactcctactgcttaatctactggcagtgtgactttggagaagttatgaamgtcagcattctctgtttaaacatgggaagagtgtaacacccatctcagagtcctggggaaaattaaatgagatcttatgtgtcaaagtgctaagcccaatgccagatgtggagtaggttctcagtaagtgtcttcctgtttttattctttccttggtcttcattccttttttttcataacaaac

SEQ ID NO: 804411 - DNA, 620 bp, Homo sapiens
tgaggatccttctaagatgtgtgctttctattgaccatgacagttaatccctaggccagtcttctggggatattccccatcttacagctgagaaaactaatgcataaagacaccaagcaacctgaccaagatcctgcagacagtgggcacctgagctaggaggggtgcctgggcagctggctgccgggactttgtcctcagccatctggagtgttgcctcttaacggctgctccaccaccaccctagctgtagcatgtagcactggccacaggaaatgtgcttccagagcactagaaaacagatgccggagccctgccgccaaggtcacaaaaaacaagagactaagcaattgtcagacaggccagaggaagctaaggagatgtgacaaccgaatgcaatgtggtgtcctggatcgcatcctagaacagaaagmggacattagtggaacaactagtgaaatccaaataaagtatggagttgggtgaatagtaatgtaccaatataagtctcttagttttgctaagtgtacactgtagtataaaatgagaccaagtgagggaaccaggagaggactagacaggaactctctgtactatctttgcaacttttccataaatct

SEQ ID NO: 804412 - DNA, 607 bp, Homo sapiens
ggaggatagggtatgtttgttttgtgtttttaaaattgtttgctctctgcatttccccaaagacatccaggctgtgcctttaccgtcagcttgtttctttggtcagtgtctgccactgtgttcctgacctacagacttgaaaggcttgtgcagttgtcctggccttcagtatctgaggggcactggttccaggatttccctccaatattaaaatctgcagatgctcaaaccccttacctaaaatcggaaattatttgtagaaaatctatgcatatccttctgtatacttttagtcaactatagattacttataatggctaatacaatgcaaatgctatataaatttttactgtattgttttggatttttttgttggttttgtttttgaatagtttcgatccccagttkgttgaatctatgcatttggaacccgtggataaggagggccagtcatatagggcaaatgtgggactggcttctctctaaagagagggataaagtacacctcagatgcgcagatacagtctggctgcagttacactgggataggtatattccggactttccctgaagttgtcaacttctgactcagtcacattcttgacct

SEQ ID NO: 804413 - DNA, 638 bp, Homo sapiens
tgacatccatgtttgcttatttataaagcataaccattgtaataggtatctttgtgttggagtaataaatttcttcttttttagagaaaattaattgagttgaatgctttagatttctgccagtctttaagttgaaaaaaatgcagtcacactgtctagatctctcaaagtaacaccttaacaatcaggttatgcgtatccacagttgatagaaacattttcacaagcacagagacctatttgactacatgcagaaaaaatctgaggccactaagggatagctgagagagagagtgtgtaaataaaaaattaaaatgcccataagtatgtatgcattgatgcaaaaaatgtttactgagtatatgtgtatgtatataaatatatacatacgtgcatgtacatatatgtgtgcacacacaaacacaatacaaataagtttaaacttgtaggaagtatttagatkactatagagttcctgccctgaaggaacatagatcctggtagtaagggtcatatgcatacatctataattcaagtttgaaaatagtaatacagttagaaattatgttcagattaagggtgaagggtgctcagaggaggaggaggtacttgagtcagagaatgagattgagaatcgg

SEQ ID NO: 804414 - DNA, 641 bp, Homo sapiens
tgcctttaatctcattacatctgtcaaaatatgtctcatttactaagtaaaaagtagaagctggtttccagcacctctttctttattatagcctgatccctgtgcaaatgcattttcctgtggttcatctttgtaagatctctcttctcttgtctggttaacttcctcaatgaccattgatatctttgtgctactttattgtccacttggggacctgatttccctttattagtgtcctctgtaataggttagcagaaatcttatatggttccacagaagtttctctctctttctctctttctctctctctctctctctctctctctcwcacacacacacacacacaacacacacacacacacatagacacatacacaggtgcattgtatcagctggaacatcagcatatgtgtggtaggatcacaatcattcagagcttctgatgttcatggtacctaggggattgattcagctttcaaggagctgtggacagtaagattaaaagaactgctctccttggggacttttaagtaatgacattattggtagtcctttgagcagcatggagagatgtttgaaatatgaaattgctgacagttttaatagttgcatttagaatggatgatatttgcaaaattgct

SEQ ID NO: 804415 - DNA, 592 bp, Homo sapiens
tgtcctccacagtatcaggatctcaagccccttgtcctctgtggttatagaatagcctggggcaccactgtgggcctatggtgatcatgggtgccacttcctgagcacttcctgtggtaggattgtacttcctcctttgtggagaagaacattgactagtgctggccaatgagaggcagctacaaatgacgtgtgtcaccctgtgggtgggctaaacattttayttccagtgcgagaccctcctgggcactctctttcctctgtcatgacatccagtgactttcaagactgtgactgccccactgggggttcctgagtgaatggatgaaaaaagctcctccctgtcacacctgtgatggatgtctactgtgaatgagaaatagtcactgagactttcatgttgttgacgatttcggcataacctacttatcctgactgttacagagtctgatcttaatgcaaaacctagccaggaattgaaggcttttattcagtggccctttatttttgaaggtgaacattctacagggtagtttggataagtggcaataagggaatggtgctcattcatcccaggatcacttaagagcac

SEQ ID NO: 804416 - DNA, 625 bp, Homo sapiens; identical to SEQ ID NO: 744271

SEQ ID NO: 804417 - DNA, 536 bp, Homo sapiens
atttaacatcaagcagagaaggtgtctttgttaattcctagctgcctgacaggaagtcttctcattaagacatcagaaagccagatgggggtcttgagtcactgaggccaaccccacttttaaggatggggaaaactgaggccccatacctagctgcagctatgagcaataattgttcctatttattgacctttgctgtgttccaggcactgtgctagtgctgcaggtggctgtattcattttctattgatgttgtagtaaattatcacaaatttggtggcttaaaatgrcacctgtattatcctacagctctggaggtcagcggtttgaaatgagtctcaagggctcaaatcaaggtgtgtcgccaggactgcatcccttccgggggcatcaaaaagaatctctttccttgccttttccagcttctagaggctgcctgcattccttggcttgtggctccttcttccaccttcaaagccagcatcacaacatcctccaataaccctgtctccctcttctacctttaaggaccctta

SEQ ID NO: 804418 - DNA, 536 bp, Homo sapiens
atttaacatcaagcagagaaggtgtctttgttaattcctagctgcctgacaggaagtcttctcattaagacatcagaaagccagatgggggtcttgagtcactgaggccaaccccacttttaaggatggggaaaactgaggccccatacctagctgcagctatgagcaataattgttcctatttattgacctttgctgtgttccaggcactgtgctagtgctgcaggtggctgtattcattttctattgatgttgtagtaaattatcacaaatttggtggcttaaaatggcacctgtattaycctacagctctggaggtcagcggtttgaaatgagtctcaagggctcaaatcaaggtgtgtcgccaggactgcatcccttccgggggcatcaaaaagaatctctttccttgccttttccagcttctagaggctgcctgcattccttggcttgtggctccttcttccaccttcaaagccagcatcacaacatcctccaataaccctgtctccctcttctacctttaaggaccctta

SEQ ID NO: 804419 - DNA, 563 bp, Homo sapiens
taaccatcacagcgtcttaggaaatcggccaaactcgctccctcctcattagctgacatccaaaggaggaaggttctgaatgacttgcataggtcccatggcttcctttgcccctcgccttcctaaattaactgtctacttatgccaagcaaatctgtctccagaccttgcagccagttacagctcctgtcaataggatctaaatgaaaaaggtgaagaacatgctttccccagtctggcatattgctagaggtttgtaagttgtcaggagccgagaagtgtggtggttttcattatctatcgctgcctaacaaaccacaccagagcttagtgatttaaatgacctttttatctcctctcccagttctgagtgactgggctcagtcgggccgttctgcttctcgtgatggcrctggggttgcagtcatttgggacctggaaagggctagaacttctgagtctgctcacttacatggctggcagtcaatgtgggctgttggctgtgagctcagatgggactgtgtggaccagagcaccttggttcccattcgtgtggtcttacc

SEQ ID NO: 804420 - DNA, 564 bp, Homo sapiens
tacatttcctaaaaaaacaaatcacccctacagtcaaatgatcaaaatcaggaaaccaacaatggtataaacacaacgatctaatctgcagacattattgtaagaaataaagaggaaagcaacatgaaagggcggttcaacaggcaacagggacaggtttatgttgagtaaacctgagaggggcggctggccgagttaggtcagagccccactctcttacagattaagagttaaggattcagggcgggggagtttatcagaggcttggactgctcctgtgtctctttgctgtgcgtatctgggagggagagttgtgtgtctgttcccatatatctttctgcagckacaggcatatccccagagtctgcttttagcttccctatcttagtgcccctgaaggaaaaggaatgtgcttattaaggcccactgttttactggggctcattgtgtgagggtgaagtttggcagttaccaaagagaccttccctccaccccgctctgtgccggagctgtcttatctgtattttactgtctgctctttctggctgttgtagttagaagaga

SEQ ID NO: 804421 - DNA, 644 bp, Homo sapiens
accttaaaaaaaaaacacttcgcaccttgttgaacatccagtcaaaactagaatttaaaagcatcatggaaaacacgacaaggatacagaaggcaaacatcgattttaaagagccaaaaaaagactggtgatggagggttaaagtatgtttcttaaagtctagataagatgactaaggaactaatgaaatatgattcttaagtccatagctgactcataagagataatgggcagctttgtttgtagtctcatttaaggctgaatagaatagaaccaaattagattgatttaaatatcaaagatggaagttgtgctaagaattctcacacacatttacaggaagccgtttgtgtccttacctgcaaccacagattcaaccaactgctgactgaaaacattcaaaacaagtaaataaataaaagtaayatacaacaataaaaataacacaagtaaaaaactatacagtacaatatttgcattatgttaggtattattagtaatctagagatgattacaggtatacgggagggtgtgcataggttgtgtgcagatacacaccattttatataagggactcaagcatcctgtcaatggtatccaaaggggtcctggaaccaatttccccatgaataccaaggggcagt

SEQ ID NO: 804422 - DNA, 626 bp, Homo sapiens
tttttaaaaataaccttttgggtcttaggcaacttaagaaacatggcacgcccacacccactctgcaatttctaaacagaggagcaggaactcctctgggaagtggctcaaagccagcaaggagaaagcacttctcaccaatgctgggagcataagctctcaggcaagtcgtcctcagtaggtatccctagatatccgtaatagaagttgtgacttctcacctttacaattgttacctcagcactacctctggccagtgaaaaataaatggagctacaacatagaggctgtttcttgattgaattggcgggctcagtgttatcaccatttcaaatgatttataaataatatttttgtagcaaactcagagggaagaactatagagactgtcccctgggttaattcccttcccactctgactcaygtttttctctctaaacctctgcctccatttctccatgtgtatgatggaaacaatcaataaaacctcattgacaggtttgtcttgagaataaaattaggtttgggaaggtctcagcagttgatgaatgctgagaattattcttacatatgatcgacctaacagactgacaagctgatgttgacgttgacaaaaagcgggtaga

SEQ ID NO: 804423 - DNA, 586 bp, Homo sapiens
cactccctcttaccctacgtggacagacttgaggacaaagcaagccttgatcatcgctacctgcagagtagactgtatgtgtgaacgtggccaactatgcccaagccatgctgagctcmggcagagccaggcgaaccccacaggtagcagctacccagactgaggctatctgaccttgatgctgagttcctctactgtgctcggaggggtccagaacccaaaactcagcacttccttaactcatgcatgctctgaacctgggagagggagaggtatgtgctgcctttcagtttctatgaggatggttttcttggaaagttctagagcagcgatggaggctctgagctctcagatggatatgagctggaatccgacttttcttgcccttttcttgctctgcctcaccttcctgggcctgagcttcttcatcggtaagctgccattgtagtgttgtcacaaggatcaaaggataatggttgtaaaatgcttagcaccatgcctggcacatggcaagcccctgatacacaagcactgggattagtatgtgcatcattctgtagctggtccagtctcttccggggcccct

SEQ ID NO: 804424 - DNA, 586 bp, Homo sapiens
cactccctcttaccctacgtggacagacttgaggacaaagcaagccttgatcatcgctacctgcagagtagactgtatgtgtgaacgtggccaactatgcccaagccatgctgagctcaggcagagccaggcgaaccccacaggtagcagctacccagactgaggctatctgaccttgatgctgagttcctctactgtgctcggaggggtccagaacccaaaactcagcacttccttaactcatgcatgctctgaacctgrgagagggagaggtatgtgctgcctttcagtttctatgaggatggttttcttggaaagttctagagcagcgatggaggctctgagctctcagatggatatgagctggaatccgacttttcttgcccttttcttgctctgcctcaccttcctgggcctgagcttcttcatcggtaagctgccattgtagtgttgtcacaaggatcaaaggataatggttgtaaaatgcttagcaccatgcctggcacatggcaagcccctgatacacaagcactgggattagtatgtgcatcattctgtagctggtccagtctcttccggggcccct

SEQ ID NO: 804425 - DNA, 702 bp, Homo sapiens
aacaacagtttctctaaggcctgactagtaaaaacagtatctttatccaaaggaattacaggtaagtggtacattccttaaataatacattttaaatatgaagcatttctacagcattattgtaaagcaatggggcttaactgttccttattaataaccaatattgaagctaggcaaggtggctcctgcaagtaatcccagtgctttgggaggctgaggtgggagaaccgcttgaggccaggagttcgagactagcatgggcaacataatgagaccccrtatccacaaaacaaaaaaaattagctaggtgtggtggcacatgcctatagtcctagctactcaggaggttgaagtgggaggatcgctagagtccaggagttcaaggctgcagtgagctatgatcatgccactaccctctagcctgggtaacagagcaagaccttgtctctaaataaaataaaataaaataaaataaaataaaataaaatgtaaaataaccaatattgtaaggcatgtttataatgaaatctgatccaacttgccccctctgtgcagcttctcatacaatgtagtgaccaaatatactttataaatgaagcgaaggtgggcctgctcatcttgtagctttagatgagcaaacctgcagcaggggcctgctctgccatgagtgtgcctggatcccataagaccacagggcaactg

SEQ ID NO: 804426 - DNA, 573 bp, Homo sapiens
tgatggtgattagatttctgtgattcccaaatgaaagctgaagtcattaaaaatgtaaaagaaaaaaagacacacaaaaaccggaaagctgtgtgctccccagcaggaaaatttcccacaccataattctggaagcaaattatctgctttgggtgctggggcagactcttggaaagacacctaatgygtggctgaacagtccaggggctcctcagtccactgcttgccactctcagggctggttctgggctctggaagatgacagatggggaattcagttagtccaagtagcaagatggcctttaggtcacaacgaaagagatggagttctagctttatgctgtgcatttgaactcaggttagctttatattatctatggcttttgaatacagttacctgtgtccctattaaatcaaactatttgaagggaagcctgaataaaactgaatttgggagtgcaggaaagctgtggggaataggctgtatatgccaaagggagtcctgcatgggcactggggaaagacctacaggcacttgctgagctgtggatcccctacctggggttcagagtt

SEQ ID NO: 804427 - DNA, 577 bp, Homo sapiens
attaaaggctttttactgtttaaaagttatattgtaattctgacttttgttcacgtatttgatgattcaattatttattcattacatagtcaaaggtagaaaattacatgtaattacttgtgcttatctgataagcatagtgactgatgtaygtaaatgctcaacatgtgatggatgaatgaatgaatgattaaattacttaataaatagtgctttgcctagttttccctagattatttttataaactagtttttcttctcacctatccccaagctcctaattaaataattacttggagtagaatcaaccaagaatacttacatgcacatcctaagctcagtgacaaccaaggcaggactttctcctttgctaatgctctcatccaagtgaggtgtctgcttggtttggattaggccatgcagattctggtgacatccatgttatcacaggtcacattggcctgggtgccttgccatgacataagtcactcaaaaaagatagaaccataaataatttggctgacacgggttagctttatttaaagcaagttattttattaacagttccaagattgaa

SEQ ID NO: 804428 - DNA, 577 bp, Homo sapiens
attaaaggctttttactgtttaaaagttatattgtaattctgacttttgttcacgtatttgatgattcaattatttattcattacatagtcaaaggtagaaaattacatgtaattacttgtgcttatctgataagcatagtgactgatgtatgtaaatgctcaayatgtgatggatgaatgaatgaatgattaaattacttaataaatagtgctttgcctagttttccctagattatttttataaactagtttttcttctcacctatccccaagctcctaattaaataattacttggagtagaatcaaccaagaatacttacatgcacatcctaagctcagtgacaaccaaggcaggactttctcctttgctaatgctctcatccaagtgaggtgtctgcttggtttggattaggccatgcagattctggtgacatccatgttatcacaggtcacattggcctgggtgccttgccatgacataagtcactcaaaaaagatagaaccataaataatttggctgacacgggttagctttatttaaagcaagttattttattaacagttccaagattgaa

SEQ ID NO: 804429 - DNA, 561 bp, Homo sapiens
catgtttacataataaatattaaaatgcaagtgaatgaaacaaatttccaaattataactccaataccattatttttacttactttttaattttcactttctaaactttctgggggacaggtgataaagaaaactatgcttctaaaaaagtttagtacttataaaaacccatctcagtgatcatagcagacttatacttttcttattctatacacagcaaggtatagtatctctaaactataattcctgcttagacaagattaagagtcccagtgactaaattttaattatgattcatttagacaagccaagacatacaactagacaaaaagtaaactgctgacttaagagatttaatratacaaaaacacaataaagcctgccaggaaacagtatttccctcctcggctttaaatagcaccaagcctggtcactttaacagacctcttcaccccacattttgtatcaccaagaaaaaaaaaaaaagttaaaaacttgagggcccagtccaggttttctacctaaaaaaggcaatcatcagcctttggggcaacataggga

SEQ ID NO: 804430 - DNA, 586 bp, Homo sapiens
gcttcaactggatcccataagttttggtatattgtaccttgacttttactcgtctcaaagtactttctgaatttcttttgattccttctgtagcccattggttatctaggagtgtatagttcgatttccacatatttgtgagtttcccaaattttctcattactttcacattttattgtattgtaagcagagaacatattttgtttgtattatttccrtccttgtaaatgtgttgaagtgttatggccttacataccctgaaaaatattccatgtgtgtttaagaatgtatattattgttgttagatggagtgttctacacatgtctgttaaatctagttggtttatagtgctgcttgagtcttctattatgttttcatcttatgcctagttgttctcttcattattgaaaaggaggtattgacgtctccacctattattgttgaattgtctatttctctcttcgtttctgtcagtttttccttttgtattttgattttccatttttaggtgcatatgtttctaattgttatatcttcctgaagccaaaaagtttcctctttaataacacttgttttaaagtctat

SEQ ID NO: 804431 - DNA, 622 bp, Homo sapiens
aacacagtacctaataggtagtttttcaactcttgcccacctccctctttcccctcttttgcaatccccagcgtttactgttcccatctttgtgtccgtgtgtacccaatgtttagctcccacttgcaagggagaacatgcagtatttggtttttagtttcttaattaatttacttaggataatggcctctagccacatccatgttgctgcaaaggacataatttcgttctcttgttatggctgtgtgaaatattactaatatttttcatgcatggttgatataagcaactttacaacactacacactaaaatgctgagtctttgatataaagagaaatggaaatgtgactcctgtaamaggtcaaattattgaacaaatttaaacatattatatactaattttcctgaaaattgaattatttatatttcacatccaataattacttcacttttaaacaaaatatttcattcataaactaaatgagaaaatgtgaagctatttcatgtaatgcagaaccaagagggaaaaaaaaagaaaatgtaaagctaactgtggtatataaaaaaagtaagcaaacctgttcactgttgagaatatttgttttatccatcataaaacca

SEQ ID NO: 804432 - DNA, 625 bp, Homo sapiens
ttgacactcctgattcatcactcctgagaggcaaggagtttagtgactctatatataatacctttgatcatgtgtggagaaccaaggaacataatgaagctggttgtttgctcctaagttcagtggacaaagtgatgaaagaaaatgatgaactcagggattctgtctcccagcttcagaagcagatactgaccctcaaatattctaagattgccctgagtgagagtcttatctcctgtaragaaagagctgaaattgtggaaaaacagacacaagctcgtatcatgcaagtggctgacctgcaatgaaaggtgcatgcacagcctcgccaggtgtctactgttaaagtgaggtcattgattggaaaagaatgggaccctgcaacttggaatggggatgtgtgggaggaccctgatgaaggtggggacactgagtttgtaaactctgatgaaacttttttgtgagaaggaacagcttccccatccccagtagtggcaacatgccctcccagacccatgctgccatcagtctttccacctttgtctggggagataaaccctgcgctgcctgaggcaacagtgatggcctcccctgaggctgttgccaggcaaggtaatgttgattc

SEQ ID NO: 804433 - DNA, 617 bp, Homo sapiens
aaattatttagaaaacaaatactttgcttataactgtgctagcagttgacaatttttatggtgatggccttcctcaaaattgcttttgctctgagaatgattccatgatacccaggggagggtctccaaaactgtttgctttatttgatccttactaagtctggctgacctggaaggtggtgggcatttctctctcctaggactggtgggagttaagttatattaaaactttagggtgaaggtatatggagcccaaggctgctgactgtcccagagttatctttgactttgtcttggctgtttccatctcctttaaatctgtgatttcttccagtttccttccaatagattcctgtttggcttaaagtagtcatgcatggctgctattgcttacaatcaaaagtactttatatatattagtaaccttaaayggtctcctttgagttcttatcaatgaatcattagtctgtatgtgggagtgtatctttgaatatatttgtcaagaaagctaagcaactattaaatatgacatctgtgtattttttaagttccacaggtaattctttctggttttgggaactactgccataaaatgcttaggtatagagtctaggcct

SEQ ID NO: 804434 - DNA, 612 bp, Homo sapiens
tttctatacacacatagctttttatttgtgtttttacacaaagggattttttttatttctatttatattttttgagatggaatcttgctctgttgcccaggctggagtacagtggcacgatctcagctcactgcaagctctgcctcctgggttcacgccattcccctgcctcagcctccccagtagctgggactacaggcacccgccaccacgcctgactgattttttgtatttttagtagagatggggtttcaccgtgttagccaggatggtctcgacctcctgagctcgtgatccacccrcctcggcctcccaaagtgctgggattacaggcgtgagccaccgtgcctggcccacaaagggatttctatatcatgtgccagtaggatgctttttattggtgattcatcgtggctgatagcaaagccaacatggaggcaagagctgtaaacaatctaaggttgtggagtgggataacaaatacttaagtaaaacttcaaaggttgctgagtagggtaacagatacttaagtaaaatacttaaatgtgatttcttagtaattgatatggtgatagataatctaattggttgattaactcatactttcctact

SEQ ID NO: 804435 - DNA, 605 bp, Homo sapiens
attcacagtgcaggcagaaggccttttgaacttcagctcttacagcagagaatcagaaaatgtgaccaggagcacaccagctctggaaacaagtgaataatggagatcagagatgcagaaaatacatatataatttcatatgatatgaaatttttatggtataatcacttcattgtatttcatgcccaaagaaaygaattttatttccccgatggccaaacagctcctaattacagttgtaaactggttaaacgggcttaaagaagaagcggctttgggtgaggacttaacaacactgtccaatccgcactttgctgaaggtgttccccacttccccggtgaatatggaatttggaattagtaccagaatcacccactagggattcactcatacattttgtttttaatttgcagcatatatttgtttacataaactcccagtacactgcatgcggtttagaacacactgtgagttcattgcttattattctttaaaacagcctgtggtaagagagacccttccattaagaagagatacttgtcttgagaggtccaccacacaacgggatcccagggatggtctcagcttgatggatctaggaggc

SEQ ID NO: 804436 - DNA, 605 bp, Homo sapiens
attcacagtgcaggcagaaggccttttgaacttcagctcttacagcagagaatcagaaaatgtgaccaggagcacaccagctctggaaacaagtgaataatggagatcagagatgcagaaaatacatatataatttcatatgatatgaaatttttatggtataatcacttcattgtatttcatgcccaaagaaatgaattttatttccccgatggccaaacagctcctaattacagttgtaaactggttaaacgggcttaaagaagaagcggctttgggtgaggacttaacaacactgtccaatccgcactttgctgaaggtgttccccacttccccggtgaatatggaatttggaattagtaccagaatcacccactagggattcactcatacattttrtttttaatttgcagcatatatttgtttacataaactcccagtacactgcatgcggtttagaacacactgtgagttcattgcttattattctttaaaacagcctgtggtaagagagacccttccattaagaagagatacttgtcttgagaggtccaccacacaacgggatcccagggatggtctcagcttgatggatctaggaggc

SEQ ID NO: 804437 - DNA, 495 bp, Homo sapiens
ggcttttaggttttctctgaatgcccacagttatggcatgatgtaatgaagagtagatttatctttctttatcctgcttggcagttgtgacacacttttaagctgaggatttgagatttccttcaattctttgcaatccagtttctctaccattccctccattttcttctttggaaatcctactagacagatgttggaaattcccmatctattcaccactggcttttaactgctcttccacttaaaaaaaaaaaatctgtctgtgctgcttgctggatgaagttctcatcaccttcttcagttcactagttctttgttcatctatgtccagtgtatagtttaattctgtgtgctgagttttggtttcaattattgtatttttcattcccaagactcccgattagttgtatcgactgtcctacttcatttcagcctgcttttgtttcatgatttcttgttccttttcaatggatgttatctcatcgattatctttt

SEQ ID NO: 804438 - DNA, 628 bp, Homo sapiens
accttgtacatttcaatatcttgcctctaacaagtccaagagccaggaagagaaagtgaaagacttttgatatacatttacaagaacctacaattacaaataactggttatgattgtctgggtgagttgtagaaggttgattgctttagaaagaaatagtaacttaatcttactgaaaatgactcctacatttcactcccttttttgggagagagattcttaaaaacaagttttctttaggatgagttcacatggggcttcttaacttggatgctgytgctcagaacagcaccttgccatggataacagttcttgattacgtttccacgaataaatcaggtgtgcttccagactcaccccttgaaggttcaatcttgtctaagaagcagattcatgcacagaagcttgtggctgctgcctgagaggacaagcctgcctcatgtggagggtctggaagaacatctgcagcggagggtgcttcctataaacaatgactcattaccgcactggccacagggtgtcctcgggtcacccgaggagacagcctgtatggccctgtatctttggacaataacacccgcaaaaccagaggcagcgggaaaggacagttgaagtttagtcaaagggt

SEQ ID NO: 804439 - DNA, 610 bp, Homo sapiens
ggacttcattaaaattaaaaatttctacttagcgaaagacaacatgaagagatgaaaaagacaagtcatagactaggagaaagtatttgcaaaagacatatctgattaaagacttttatccaaaatatgcaaaatcttaaaaccacaacaagaaaacaacgtgatttaaaaatggttgaaagaccttaatggacacatcaccataaaagatatacagatggaaaataagcatatgaaaagatgcagcacgacatatatcatcagacaaatgcaaattaaaacaacaataagacaccaccacacatctgttagaatggccaaaatccagaacactgataccacaaaagacagatgaggatatggarcaagaggaactctccttcatttctggtgggaatgaaaaatggtacaaccccttgggaaaaacattttggcagtttcttacaaaactaaaactattcttaccatacagtacagcaattgcactctttagtccttacccaaaggaattgaacacatatccacaaaaaaacttgcacatggatgtttacatcagctttattcataattgccaaaacttggaagcaattaagatgtccttcagtaggtg

SEQ ID NO: 804440 - DNA, 536 bp, Homo sapiens; identical to SEQ ID NO: 776856

SEQ ID NO: 804441 - DNA, 646 bp, Homo sapiens
aattttggcattattctgttagcaaattgtaatttttcttaagtatgatttaaaaacatttgccgcatgctttttagtatatttttaatctgactgcaaagcgatatgtgcctattatagaaaaataactataaagaagaaagtaaacaccacctaacttctaccatttacattttggcatattttcttctattttttatttttattttttctgatcataaaaataataggccgggcacagtggctcacgcctgtaatcccagcactttgggagactgaggcgggcagatcacaaggtcaggagttcaagaccagcctgcccaacaaagtgaaaccccatctctactaaaaatacaaaaattagccgggcgtggtggtgggcatttgtggtcctagctactcrggaggctgaggcagaagaattgcttgaacccaggagacagaggttgcagtgagctgagatggtgccactgcacttcagcctgggcaacacagcgagactctgtctaaaaaaaaaaagtaataatatacatttggtataaaatcaattatgtatataatgcacagaaagtaaaaatttcctgtgattctctgtgataaccacattagtattcctaggctggtattaacaattttggaataaacc

SEQ ID NO: 804442 - DNA, 617 bp, Homo sapiens
gggtactgaggactaacctctggttttttattttgcctaaattcctatcaaaggggtctggggagtcatgccctacaaaccacaaattatcatcagataaggtttaatttaaccctatctattgtgacttactttccaacctaactctggcgtaacattccgagacaaggaagaaaatcaaaatattttaccccaaaacatgtttctttgccatattttgaaatggccctgcaaagctgttctttgtggggggacaatttgcatctgtaaagcatctctgttaacataaccagatctttttcttccagaccctcccaatcttaaagaaatgaactaagatctgaatagaaaacayttgtcctctattgtctctaagggcagccactataagacttcaaaagactttggtctccacaatctttatcttaacctgaacattccctttctatcaatcccaggtctttagacaaactcaaccaattgccaaccagaaaatgtttaaattcacctatagcctggaagcccctgctttgagttgtcccaactttctgcaccaaaccaatgtatttattaaatgtatttgattgatgtctcatgcccctctaaaatgtataaaa

SEQ ID NO: 804443 - DNA, 617 bp, Homo sapiens
gggtactgaggactaacctctggttttttattttgcctaaattcctatcaaaggggtctggggagtcatgccctacaaaccacaaattatcatcagataaggtttaatttaaccctatctattgtgacttactttccaacctaactctggcgtaacattccgagacaaggaagaaaatcaaaatattttaccccaaaacatgtttctttgccatattttgaaatggccctgcaaagctgttctttgtggggggacaatttgcatctgtaaagcatctctgttaacataaccagatctttttcttccagaccctcccaatcttaaagaaatgaactaagatctgaatagaaaacatttgtcmtctattgtctctaagggcagccactataagacttcaaaagactttggtctccacaatctttatcttaacctgaacattccctttctatcaatcccaggtctttagacaaactcaaccaattgccaaccagaaaatgtttaaattcacctatagcctggaagcccctgctttgagttgtcccaactttctgcaccaaaccaatgtatttattaaatgtatttgattgatgtctcatgcccctctaaaatgtataaaa

SEQ ID NO: 804444 - DNA, 599 bp, Homo sapiens
aagtaacttgccaaaagcctttaaaaagtatttgatgaatgcaagtaggtatctcaggttgaaagactctcacccaactattaatgctaaaacaaatattatttgtacatgaaaaaaaagaagaccgggttgagaatttggagccctgacattatatgttctatgattttgaaaaggctcttacatattctcacttgtaaaatgagacagtggcataagacatcataaaattctagggtcatgttgtcaaactgtcagaggcatttaaaccagagcaactccatcttgaataaggacagggtaaagtgaggctaagacctactgggctgcattcacaggaggttaggcacactaagtcaccggatgagatagaatgtcagcacaagatacargtcacaaagaccttgctcacaaaacagcttgtggtaaagaacccaccaaaaccaagatggcaatgaaaatgacctttggttttcctcacagctcattatatgctaattatagtgcattagcatgctaagacactcccaccaatgccaggacagtttacgaatgccgcggcaatgtcaggaagttaccttatatggcctaaaaagggg

SEQ ID NO: 804445 - DNA, 598 bp, Homo sapiens
tgatggaatgttctgtataaaggttgagtatccccaatccaaaaatccaaaatccaaaatgttccaaaatttaaaactttttgagtaccaacatgatgctgaaaggaaatgctctttggaacatttttggttttgcatttttggattagggatgctcagctggtaaacataaggcaggtattcccaaatctaaaaaatgtaaaattcaaaacacttctagtcccaagcatttcagataaggaatattcaacctgtatgttagrtccattagatccagtgtatagttgaagtccaatatttccttactgattttctgtctggatgacccatccattattgaaagtaggatttttgaagtcttctagtattattgtgttactatctattaatgtcttcagatctgttaatattttctctgtttatttaggtggtctgatgttgggtacatatatatatttacagatactgtatcctcttgtggaattggcccctttctcattatataattactttctctgactctttttacagtttttgatgtaaagtctgccctatctgataaaactttagcttcctctgctctcttttggtttccatt

SEQ ID NO: 804446 - DNA, 517 bp, Homo sapiens
caagtcggagcttttgaagcttctccgaagtttgctcgaattgcagcccgaactacatctttttccacaagggctggacatatttcaggaatctagtatttccttggggaatgttttcctccccctgcgctggaagctgctctccatgttttcccccyctttcattcccatgggttgaaactgacccgccctgtgtggaggaagtcctctgtaggactctggagatccgaccaggacatccacctgggcattttggaccccaacgccttgcttctgtatctgatctgcatttgcctttctggacaccctcttctgtgctccaagacaccctatacttttctaccttgacagggaacttgacatttttaaacttacctatttatttgtccgtctcccctattagattatgaattccttaggtcagagacattctttccttatgtcagtacctgacacattgaaccgtggttgtggagagaataagttccctcagccgttatgaagggaaacctcccca

SEQ ID NO: 804447 - DNA, 572 bp, Homo sapiens
tctgtcttctgggttgtttttttttttcttcatatcttccccaaaatttctaactttatataaatttagacttggtttctgttgagtcttttactagtttgagacattttattgcagtatagtgcaaagtattaatgggctaagtatgttaaatgctgctgtatttgtaagatctcttgctttgtctgtgaccatgaaagtctcagtgaaatgggatcttattccctaaatcatagctctggttttaatgtttcttgatattattgcagagactctccaacatgtgccttctgaccatacaaatgaaacttccaacagtactrtgaaaccaccaacttcagttgcctcagactccagtaatacaacggtcaccaccatgaaacctacagcggcatctaatacaacaacaccagggatggtctcaacaaatatgacttctaccaccttaaagtctacacccaaaacaacaagtgtttcacagaacacatctcagatatcaacatccacaatgaccgtaacccacaatagttcagtgacatctgctgcttcatcagtaacaagtatgtattaaa

SEQ ID NO: 804448 - DNA, 652 bp, Homo sapiens
catatttttattaacttcttttgagctttcaatgttgatgtaatttttgttctctgtgtaatttaggtaaactgcagtgtttaacataataatgttttaaagacttagttgtcagtattaaataatcctggcattatagggaaaaaacctcctagaagttagattatttgctactgtgagaatatggtcaccactggaagttactttagttcatttaattttaattttatatttgtgaatattttagaactgtagagctgctttcaatatctagaaatttttaattgagtgtaaacacacctaactttaagaaaaagaaccscttgtatgattttcaaaagaacatttagaattctatagagtcaaaactatagcgtaatgctgtgtttattaagccagggattgtgggacttcccccaggcaactaaacctgcaggatgaaaatgctatattttctttcatgcactgtcgatattactcagatttggggaaatgacatttttatactaaaacaaacaccaaaatattttagaataaattcttagaaagttttgagaggaatttttagagaggacatttcctccttcctgatttggatattccctcaaatccctcctcttactccatgctgaaggagaagtactctcagatg

SEQ ID NO: 804449 - DNA, 626 bp, Homo sapiens
gcttgcagtgatttcaggatgtcctcatatctatttataggtctaaaattatatcttaaggtatgttgtagaataaattaaaaggataatctaaatcaccatttagattaagcttgacttgcaaactaggaagaagcacctaggctttctttgaaaatatttttttggttcgttttggtaaagctctataaawtggtatctattattttaccaatttttttttagtattaagtccatttagaactaaccatattatttatggaataattagcatgaggaaggtataattgcatttttttttttttgagacggagtcttgcactgtagccccagctggactgcagtggcgtgatcttggctcactgcaacctccgcctcccaggttcaagcgattctcctgcctcagcctcccgagcagctgagactacaggcgcctgccaccacgcctggccaattttttgtatttttagtagagactgcgtttcaccatgttgggcaggctggtcttgaactcctgaccttgtgatccacctgcctcggcctctcagagagctgggattacaggtgtgagccgccgtgcccagccattgcatttttattcacatacacattgttaatgtggaaca

SEQ ID NO: 804450 - DNA, 633 bp, Homo sapiens
gcagatagatgcatcaggaagattaatccacagtcactataagggaaacgaaccaggaattccttctcaattcggcataagtctgagggacgtccagggtaaatgacgtaaagtatatccatgaaattaaaaaactatgaaaacactagcatgataatagagatcatgtttatcatatgggaatgtttgagraaaaccctgaagtggaaagaggccagctaccaaacctgacggaccgtattataccctttctcttttaaaaaataggattatatgcgtttgcacgagtctggaagaatattactaatattaattgaattaacttattaattccattgtgattcactcatttgttaatatttactgagtaaacacacatacacactcttttctctctcctttctttgtgctacgtaagtttccaaatcctccatgagctagtactactttaaaaaagatttaagaaaaaaaaaaaaagactgttgatcaacaatatagcccaataggaatataaagcaagctacatacataattataaattttccagtaaaaatggaaaatttttacttccaccttaagaaagtaaaaaaatgacaagtgtgaaattacgttttaaatatatgttatttaacc

SEQ ID NO: 804451 - DNA, 633 bp, Homo sapiens
gcagatagatgcatcaggaagattaatccacagtcactataagggaaacgaaccaggaattccttctcaattcggcataagtctgagggacgtccagggtaaatgacgtaaagtatatccatgaaattaaaaaactatgaaaacactagcatgataatagagatcatgtttatcatatgggaatgtttgaggaaaaccctgaagtggaaagaggccagctaccaaacctgacggaccgtattataccctttctcttttaaaaaataggattatatgcgtttgcacgagtctggaagaatattactaatattaattgaattaacttattaattcmattgtgattcactcatttgttaatatttactgagtaaacacacatacacactcttttctctctcctttctttgtgctacgtaagtttccaaatcctccatgagctagtactactttaaaaaagatttaagaaaaaaaaaaaaagactgttgatcaacaatatagcccaataggaatataaagcaagctacatacataattataaattttccagtaaaaatggaaaatttttacttccaccttaagaaagtaaaaaaatgacaagtgtgaaattacgttttaaatatatgttatttaacc

SEQ ID NO: 804452 - DNA, 573 bp, Homo sapiens
agtcctacctgcttgtagtaatccacataggtgatctcggtgccatcccgcttctgaaaggtgtgtgtgggcttcactgaccagtcaatgtcatcaatggagtaggttctgttattgtatctgccaaatataaaaagtctttaaattgttttttaatcatctaacataagcagctacttcaccacacttttaattcaacacataagatagactccagaatgtcagaaattatgaaaacaataaaacaagaatattcactttttaaaaaatactcagctcttatctgaaaagggcattccttaataatttcctatacaggaagacttctgtccacattccaacaaaacctgtgggraagtccttagaccacagtctagttttctcactgatagatactctaacttcaggtaaatcattcttaaatgttcagaggctgaagcattgctcaaaactttcccattatcttctggtgtcactcaagagtttctgacctcccaggtagtttttctgatttaaaaaagcaccaaaagaaggccaatcaacccacaatgctggcatcttgcttaacctacc

SEQ ID NO: 804453 - DNA, 603 bp, Homo sapiens
atcaacccacaatgctggcatcttgcttaacctacccgctagggctggcccttggcaaaactacaaaacaggttagctaagattactctaagctccttctccccttcagcactgtgtagcctggactgtcctctcaggatgacctagcctaggggcagaaactaccacagcaggtttctctagagcttttgattctttccaagatgactttgaaatgtgataagctaatccatcaagatcatgacaggaggataagagggtagccttctcataccgagtagtgtggaatccagccagtcccacccctctgctatatatcccagaaaaacaagtttaagtggaaattctaagccagaatagaaagctaacaagtcccctaaaagaagtatttttgcagccataaaaaggaacaggatcatgtcctttgcagggacatggatggagctggaagccattatcctcagcaaaccarggcaggaacagaaaaccaaacaccgcatgttctcacttataagtgggagctgaacaatgagaacacatggacacgaggaggggaaaaacacacgctggggcctctcaggtgatagggtcggggggagggag

SEQ ID NO: 804454 - DNA, 432 bp, Homo sapiens
attcttaatatatacaataataggctgggcacagtggctcacacctgtaatcccagtactttaggaggccaaggtaggcagaaactcaggcacagagaggtgaaataatttaccccggttcgctcagctaacaagtagaagagtagaaatgctgggatttgaaccamagcagcctgtctccaaagtccatgctttcaaccactagacactactgcatctctgagccaagtgcccacgagctaggatgtctattggacctgaagtgagatgagagttcaataaaagtgtcacataggagtagggtccccagggggccaggaatgcagcctctgggatatggactcagtaagggaaaaaatacagccactaagaaactgaaacaagaggttaaaaaaacaaacacaaaacttgttactaaaggggattcatgta

SEQ ID NO: 804455 - DNA, 526 bp, Homo sapiens
gcttcttttaatgggtatgttgggcttggtgcaagggtgggaaaattgagtggtgtctagctgtccagtcagggtttttgcattttgactggatgacgaggtaaaggttcggtaactcttctaagggactcacagcttctcatctgtctttgtcgtggcctgagccccactcttcctaagagcctttttaaagagtaagttgcttctccctcctgcctgaagccttttctttgagaatgctttcccacttccattaagctaagtgcctttcctcctcttgtggtttggtttttttttttgtaagttgctttctgctctatcctgctgtctctttcagccacccctcctcccaacrctattgtctttctctctgatctgcccactccagtttccccagctctttcttcaggctgacatttttctcaatttagaaatgacactgttgatctaccatttatccagttatccttcctgactcagatgttctttctttgtttccctgcgtctttgttgacttccctcatcc

SEQ ID NO: 804456 - DNA, 673 bp, Homo sapiens
ctactcaggagcatgaggcaggaggatcccttgaacacaggagtttcaggttacagtgagctacgattatgccactaccccacccccccagcctgggcaacagaatgaaactttctttaaaaattaaaaattaaaaaactaaaaagggagaactattttgggacatgagtcctacctacctcactctttttattgttttggtgtttattttctttaaaaaagaaaaaaacaacaacaaaaacagggtctcgctgtctctcccaggctggaatgcagtgacaccatcctggctcactgaagcctcaacctcctgagctcaagcaatccttctgcctcagcctcccaagtaactgagaccacaggcacgaaccaccatgcctggctaatttttaaatattttgtgtagagatggggtcttgctatgtgactcaggggacctcactctttttgttttttgkttttttggtttttgttttttgaaacagtcttgctttgtcaccatgctggagtgcagtgatgcaatctcggctcactgcaacctccgcctcctgggttcaagcaattcccctgcctcagcctcctaagtagctgggactacaggtgtgcaccaccacacccggctaattttttgtattttagaagagatgggatttcaccatgttggccaggatgg

SEQ ID NO: 804457 - DNA, 631 bp, Homo sapiens
cagggttgttaaagcagacaccctgggcactgcaggtgataagttgtgttgtttgtaccttggggaccacgccacacttggtatgactcactcaccttgctatggatggaactaagggtccagttctcttgttctaacaaagtttcacctactgctcctctgttgtactgggacagcagagtttccttccatactacctggctgatttatagtcttcaaatagagagtaacttataaaatcaatatttcacatttcatctaccagtgctcttcctacctcggtctcacatatgaagattttatcacacaggatataactgtctcccactgcctcttttcaactacgtttacgattttaagagtggacacttatctttcttttttaaacgtgttctcagactcactaaaataatgactgggctaggtgccatgttgcrtacctctagtcccagctacttgggaggctggggcatggggattgcttgagcccaggagtttgaatccagtgagaccttgtctctaaaaaaatatttttttaagttggattgtttttttctcgagtcagtttaactgagccctgtctgtttcaccgtaagtacagattttggccatattctgcaattaagctata

SEQ ID NO: 804458 - DNA, 565 bp, Homo sapiens
aaattcatatctcttagaaatcagaagtaaatgggccatatttcttgaaaacttgatcatctttcttgagaatctccattaacacacccttacctaatagctctgcattctttgatgcttacatttatatttttcttttcatttcctcttttgacaaagaaaatggcttttattaagataaaagttctctgcatcaaagtttagaagcaaaaaagaagcaatctagaggaycacttaacaagaacatgtcaattttttttgaaataatctatataaaattgtcataaatgtcaagaaagttgaactttgatcctttcaaagaagactttcagcatttaaatgaaatcttaacttaataaatacaatttaattttctctattaatataattgttcaatgtccataacataattttgtgtgttatattaaaaattataaatattatgaatgttctgagtatagaaagagcacagactctaaaaaataaaaaaggaaataaggttcaagggattggactggtaatggaagattttttgaaagatctcttagtttaccctatcattttt

SEQ ID NO: 804459 - DNA, 619 bp, Homo sapiens
cttggttttatacattttagaggggcatgagacatcaatcaaatacatttaataaatacattggtttggtgcagaaagttgggacaactcaaagcaggggcttccaggctataggtgaatttaaacattttctggttggcaattggttgagtttgtctaaagacctgggattgatagaaagggaatgttcaggttaagataaagattgtggagaccaaagtcttttgaagtcttatagtggctgcccttagagacaatagakgacaaatgttttctattcagatcttagttcatttctttaagattgggagggtctggaagaaaaagatctggttatgttaacagagatgctttacagatgcaaattgtccccccacaaagaacagctttgcagggccatttcaaaatatggcaaagaaacatgttttggggtaaaatattttgattttcttccttgtctcggaatgttacgccagagttaggttggaaagtaagtcacaatagatagggttaaattaaaccttatctgatgataatttgtggtttgtagggcatgactccccagacccctttgataggaatttaggcaaaataaaaaaccagaggttagtcctcagta

SEQ ID NO: 804460 - DNA, 619 bp, Homo sapiens
cttggttttatacattttagaggggcatgagacatcaatcaaatacatttaataaatacattggtttggtgcagaaagttgggacaactcaaagcaggggcttccaggctataggtgaatttaaacattttctggttggcaattggttgagtttgtctaaagacctgggattgatagaaagggaatgttcaggttaagataaagattgtggagaccaaagtcttttgaagtcttatagtggctgcccttagagacaatagaggacaartgttttctattcagatcttagttcatttctttaagattgggagggtctggaagaaaaagatctggttatgttaacagagatgctttacagatgcaaattgtccccccacaaagaacagctttgcagggccatttcaaaatatggcaaagaaacatgttttggggtaaaatattttgattttcttccttgtctcggaatgttacgccagagttaggttggaaagtaagtcacaatagatagggttaaattaaaccttatctgatgataatttgtggtttgtagggcatgactccccagacccctttgataggaatttaggcaaaataaaaaaccagaggttagtcctcagta

SEQ ID NO: 804461 - DNA, 630 bp, Homo sapiens
gaaagtctggttattacttggccattgcattaagcaattttctgctttttcagtaccaataataatcagcttttagactttatctttcatcattaagtagcctcgtatacttacttatcacagccttttggtgagggaacaatttcactgttctctcctattgtgtggtaaggaayacagtaagaagaaatgatagttaatttcctccaatgccaaatatgtattaatcagggtgtaccagagacacagaacgaataggatatgtatatagatatatgaaagaagactccacaagttggacacccttggatgctggtagtgtggctctgcataaaatccttgagacccgaggggccactggcataagtcctagagtccaaagaccagtgagcctggagttctgatgtgcaggcagaaaaaggaaagtctgtcccagctctcagacagagacgtgttcaccttctatatttgttctcccggggccccccgctgactggattttccccacccagttcactcagactcacccactaatctcctctggaaacatcctagcagacactcaaaataatactttatcaggtttcctgataaaagcctcaagccagtcacgttgactcctaaaatcaa

SEQ ID NO: 804462 - DNA, 575 bp, Homo sapiens
acctaatgtatccatgaactttaggtggttataatgcgttactgtaggttcatcagttgtaacacatgtaccactctgatagaggatgttcgtaatgggggaagctgtccatgagtgagggcgggagtatatggaaatctttgttcctttctctgaattttgctgtgaacctaaaactgctctaaaaaaaaataaactcttaaaaacattagcccatactcaatatatatattttgtatatatatttactgtatcatatattatatgcrtttgtatttttaaggatacatttatgcaacatccatcacaaagtgatagattcatcaaaaaatcttcatttctctatttgaagcctggtttaatcatgaatattatcaatgagtacttgtcacttaaaaacaattttttaagatcaatatgtgttcctcaattagtcttggcattcagatcattcttcacttgaaggattaaaaaactggataaattttaattgtggctttgaaaaaactttacttataaatttactgcagcttgatgaattttattgtcatttgttgcatcatttcttcgtgaat

SEQ ID NO: 804463 - DNA, 596 bp, Homo sapiens
gttttaatcttctctggttaataaatttcaaagaccattgtattcctcctcagcaggactggtcccttcataaatcttcattctgtgctttgggaaagacagataatttagttaggaggagagaaaggtcagagagaccttgactttgcttctttagttcagttctattttggagttaaatagtctggtttagtccataggcaaacatttaatacctgttcatactctctgtctttggtaggtcaagaggctgtcttagcttgtttgacctgctttgacaaaaataccatatactaagtagctgataaaaaactgaaatttacttctgagttgtagatactgggaagtctaagatcaaggaagattaggtttctggtgagggtytgccgtctggctcatagagggcgccttttctgtctcctcacatggtgaaaggattaaatgagctccctcaagtttcttttataaaggctcaaacatattcatgatggccctgcccatatgatctgcttacctgctgaagatcccacctcctaatactatcatctagcgggtgaggatttcatcatactagtttttggggaggatgtaaacat

SEQ ID NO: 804464 - DNA, 628 bp, Homo sapiens
aatcttgtctttctcttgagttgctgtatttagttgagaagtttcactggtcatttgtcactcaaagtatttattaaatcctatttcttattctttgggatcaaaaagaaggccgtgttttcactcatataagaacaaagaaataaatatcccaatctcactcttctcctaacttctgatctcttgctgctgctctccaatggccaaacacatcagggagcaaatgagacttttggtgcaggtcagtgtcccagggcacaargcagagacgaatggagagtgcatttggagagacaaaaagcggatagcacagcacttacttcttacgatttttcttcatgtggatatggaaactcttttggttccagtttatattcttaagccctccatcgttaaaggaacacagaaatctttagtaacaattctaagacatattactacatatttaaaacctagacatatgcaattgaatttttctttaaatcattcataaattcactatcaatctcataattgtgaaatcacaagatatatctacttgaaattctgaaggtgataccaaatgttatgtccaaaagtgatatggtttgggaaaaaaaattagaaagagaatatactagtatttctg

SEQ ID NO: 804465 - DNA, 607 bp, Homo sapiens
gggaatattcagtgctcatttataaattttcacttagaaagtatcattcatattacattagataaatttctaaatattgagaaaacttggctgttgagatgtaattcttatctatttgtaaaattggattctttcccagtatttatttccttatctacaggcatggtcaacaacaacaaaacacaatcagattttttaaaatgagcaaaggacttaaatagacatttatccaaagaagatacacaaatgatcaatagacacaygaaaagatgttcaatgttgctacttattaaggtaatgcaaatcaaaatcacagtgaaagcaatctggtgattcctcaaaatattcatatgattcagcaattccccttatggttacatactcaaaagaagtgaaagctgggactcaaacaaacatttctatgcacatgtttatagccagattattctcaatgagcaaaaggtcaaaacaattcaatggacaaaaggtagaaacaacccaagtgtccactgaggaatgaatgggtgaacaaaatgtgctacatataatacataaaggtgaaccaaatgtattattacacataaatgctatatattatatatatatg

SEQ ID NO: 804466 - DNA, 622 bp, Homo sapiens
ttccttttaggccatacgtcacacaagtttatgatggcacatctgtcccataatcccactggacatcatgaacagctctcaccataagtggcacaacagaggctattggtggaaccagattattcaagtcataataatcaagttagcatccaggatccatctgcttttctcgtaagcgaagcatggttgctggcaattaattttcctcattgaatcattagttttattaataatgtttgatatttgtwatggaagagattttggggtattctatagctttctattacacatgatcaattaaaattggcaaaagacataagtattcactgtctaaccataggtcagctatagcaaaatcctctattctgatatctatttcaattatgaatctatgtacagatatttttctgattttctaaattttcctttcatcgtagctattactttctaccacacaattaccacaccttgcattttgactttcagccctctattagtacttcatgtccttctacagacattgcaggtcatcatgccccagtttctgattctcccatcaggctgtattaccttccttataccattcagttgcattcgttttagaagctttggctcctctgct

SEQ ID NO: 804467 - DNA, 622 bp, Homo sapiens
ttccttttaggccatacgtcacacaagtttatgatggcacatctgtcccataatcccactggacatcatgaacagctctcaccataagtggcacaacagaggctattggtggaaccagattattcaagtcataataatcaagttagcatccaggatccatctgcttttctcgtaagcgaagcatggttgctggcaattaattttcctcattgaatcattagttttattaataatgtttgatatttgtaatggaagagatttkggggtattctatagctttctattacacatgatcaattaaaattggcaaaagacataagtattcactgtctaaccataggtcagctatagcaaaatcctctattctgatatctatttcaattatgaatctatgtacagatatttttctgattttctaaattttcctttcatcgtagctattactttctaccacacaattaccacaccttgcattttgactttcagccctctattagtacttcatgtccttctacagacattgcaggtcatcatgccccagtttctgattctcccatcaggctgtattaccttccttataccattcagttgcattcgttttagaagctttggctcctctgct

SEQ ID NO: 804468 - DNA, 622 bp, Homo sapiens
attctgtttcatatgtccctaaattatttttcaaatccaaaacatgtttgttactgagattacatgcttgaatagaattttttagaaagaaaaccttcatatgtcttcattatactatgaccaatagtatagtcaagaaaggtcataaaagtctccgagcctgaaattatttttccaattaactgtataaaatgttaaagttctgggtatagataactttttctcaataatggtagcaaagattataataacacagagtcgttgaatttagaactatggttcaagttctaccygtccaacttagtggcagtatgactttaggagtaaacaaaatcttatctaaaaacaagcaattaataaatatcactttaaatcaatattattatgattgttcaaataacagaatttaaacatactaattatatacttatatgtttaaattatttcagtttacaaggatacacatttaatacttctccaaattattatctagcataatccaaaagagcatgctttaaacggtactcgcccaactcacaaaaatacaattattagtgatgctcacctagagtgaaactatttactcatttgcccacagctagcaaggcttgatagaatgaaa

SEQ ID NO: 804469 - DNA, 633 bp, Homo sapiens
gtgaatttaatgatacatgtattctattgtcactagtggttagaatggacaatttgcatatagaaatagtgtcatacagtacaaaaatttaaaaacaaaacaaatattcaaaacataactaagaatataaaatcaccttatcactccctggtcctgcatagctatttgttgacatttatattaaagccttgagctattttaatgtattctcaagtttaggaaattttatgtgaatttgtatcaaattgacaattttactaatctctgtgtatttactttttgtaaattaaatgaattttacagcacccttsattcatcagctgcacagatttagcaggtttatggtgaataattgcatatattttttaacactgagtttctatcaaaaagaaaacaatagaatttgcaaacaaatgcatgaacaatttgttagtctatataactctcccacatttggaatagtccttcctgtataagtggaagtaaaaagctagctttccattcataattacgattagaattaggcatgctttaattgtgttgatgctctcttataccagttaataaatctctctctcatatcaaattgatttaataaaaatatcctgtgctatgttttttctcctgaatgga

SEQ ID NO: 804470 - DNA, 629 bp, Homo sapiens
atatatcttaattgtctaatccttggattggtttcactctcatccacgtagcaagattgctgcaacaattctggttatcttgtcctaacatgacagattcagacaaagagacagaacagtccttcctgctggctatttcactggagaaataatacattttttttcagaagctgcctcctgtttcactaggcaggatgttttracatttgcttttctaaaacagcccgaagcaagaataatttaattattacagttttcctaatatttatgtgtgactctgtagacatgacagcaatagtcacaacgcccaacaccatgcatttctcactttttaaatgtattattattgttgttgtttgtccacctgctgaacttcctctctagatgttaagaattgtttgccctgaaaataggaatccccattaaagtagagaaactcttaaaactattacctttacattttagactgaatctttaatgtactccaagtaaccattcattcaaataaccatttgaaaacctacaatgtgccaagcactgtttattctttcaatcagtatgaaattataaatgatagttacgtcttcaagaagattctaatgctttttaattaaatgttcaattgaatg

SEQ ID NO: 804471 - DNA, 507 bp, Homo sapiens
taacatcagcttgtagtgctttgttgatcctttctcatatcatcatgatcgtcttatccatgaacttatttctttctgtcaaaaaattaattcagctttctcaatctcttgggaattttctttctttgcttcaagaacatctcatttgggttaatgttcctaaataaattaatttccaaacttataaaatatataatctactttcacagcgtctaatttctcatgacatggtcatttctctttcagttgcagtttagcttttatcccaaatcagtgccgacattgttttcccaggtatagaatgtgatctatgcgacaaaagaaagaccatttttggtrtttatttgcatttattctctctacagaactgccattgttagtgttttcctgtttttcacatttcattttatttttaacttttatagccacctagtaggcttatatgtttatggggttcatgagatattttgacacaaacataaaattttgtttgtttttaaatctgtt

SEQ ID NO: 804472 - DNA, 595 bp, Homo sapiens
ggttgatctatatttttctactgggatgctgagaaacatagtactgaccctgcgagatagagatgaagtgtattagcttgtgatttatgatgtcatgttcagagtccaaaattcaccttttgtaccagcttgcttacattgtttattaaatgtgaatagatggtggtgtgcatctggtttcagctgagtgaccagtgagatataaatgagtcaggcaaacttccaccttagctcacctgggactaaagcatctcacatctattttggtaattcacagtcaggagatggagyacctgctgtgtggctgggaaagggctctgagagctatgcatggacttctctgatattttcttatgctttcttctcctgctgtactatctatcttcattaaagcctcgtatgactgacccctgtggagtctcctgaggcttctcaattatctgacctctagtaattgccataacaatatataatatcagcccttttacttgtgaaatgtaaatgcttgtgtgtctataagaattaaatacaaataaaattgatacagtttttattagtttagtgatataataattaaagtaagagttaatatact

SEQ ID NO: 804473 - DNA, 583 bp, Homo sapiens
ggctttagtcaacattaacaaatactaaaagcaataatgtttttagctgtagtgaaccaaacccttaagatgcaattactagacaaccccactgtgaagtcaaaaaaaataagataaaatttcatcttttcttccttgtcctaagtatttcattatgagcttattgtcagttgagccttattcacaaacatttcttcttgacctttagataattgaaaacacatattccaggcctcgtatcttgagaaatcattatggatrtgttaaacagcaactgtttcagtacctcttttgtcatgcataagcttttaattataaattaaatataaaatataatatgaaatatacatcaaaatcttcgacattcataggcataacttattaccagttttgaagtacttaggaagtgagaaatcaaaaaaaaggaagtcagtttctgattttcattgatttcttctgataatatgttcatgaacatcataataattgtcaccatgaaaaatcagaaaaaagaaaagaacatgcagcttatgtggaaacttggttcatttcccattttgggtagaagactgtattagtttgt

SEQ ID NO: 804474 - DNA, 576 bp, Homo sapiens
ctggtggttccatgagcatttccttaacgatcattcattaggctgtacgatcttgttttgtgcacatttctatatatttgcaagttatgtttcacaataaaaatgtttaaagaagaaataacaaagatatgtagttacttcatatgatatggaagctaaagggtaggtagttgagcattcaacatgatcacactactgcctcttggaacactaacagtatstcttgcattagttcagatcctccaaaagcagacgtgaagatcggattaaatatgcaagaaatttatttgaaacacctcttagagaaggaatgaggggagctagaagaggcaaggccggccttcagacaatgatacaagttctgacagtttgaaggtgagaggagagaaagggttggataagtagagtctcagaatgcagggacattttaagaagcttcagccaggcaaatgagacatattcaagccaaagtcaccctgtggaagatacctgctctttgcagggtttgacctgctttaatgtccctgccattctcaggtattggctgagagcagcttgtgggaaatgtagcctttg

SEQ ID NO: 804475 - DNA, 576 bp, Homo sapiens
ctggtggttccatgagcatttccttaacgatcattcattaggctgtacgatcttgttttgtgcacatttctatatatttgcaagttatgtttcacaataaaaatgtttaaagaagaaataacaaagatatgtagttacttcatatgatatggaagctaaagggtaggtagttgagcattcaacatgatcacactactgcctcttggaacactaacagtatgtcttgcattagttcagatcctccaaaagcagacgtgaagatsggattaaatatgcaagaaatttatttgaaacacctcttagagaaggaatgaggggagctagaagaggcaaggccggccttcagacaatgatacaagttctgacagtttgaaggtgagaggagagaaagggttggataagtagagtctcagaatgcagggacattttaagaagcttcagccaggcaaatgagacatattcaagccaaagtcaccctgtggaagatacctgctctttgcagggtttgacctgctttaatgtccctgccattctcaggtattggctgagagcagcttgtgggaaatgtagcctttg

SEQ ID NO: 804476 - DNA, 576 bp, Homo sapiens
ctggtggttccatgagcatttccttaacgatcattcattaggctgtacgatcttgttttgtgcacatttctatatatttgcaagttatgtttcacaataaaaatgtttaaagaagaaataacaaagatatgtagttacttcatatgatatggaagctaaagggtaggtagttgagcattcaacatgatcacactactgcctcttggaacactaacagtatgtcttgcattagttcagatcctccaaaagcagacgtgaagatcggattaaatatgcaagaratttatttgaaacacctcttagagaaggaatgaggggagctagaagaggcaaggccggccttcagacaatgatacaagttctgacagtttgaaggtgagaggagagaaagggttggataagtagagtctcagaatgcagggacattttaagaagcttcagccaggcaaatgagacatattcaagccaaagtcaccctgtggaagatacctgctctttgcagggtttgacctgctttaatgtccctgccattctcaggtattggctgagagcagcttgtgggaaatgtagcctttg

SEQ ID NO: 804477 - DNA, 517 bp, Homo sapiens
gagaagtatctgtgcagctgctggcacttgtggcctatagagaaatacatcaaatgaagattatagaaattcagtggtagaggagtgatgaagaaattgcttagtcaagtgagtacattctttatctagctcattatttgatccatttgattttaggaggtttgttttatggggatcytgaggaaggagcatattccaaactcttgatattattctcccaatagtcataataatagtctccagggtgcactgtattctctcaaaggtttcaaatgcttgcatgcagccatctctagaatgtgatatggtctctcctcaactggaataacaggagctgaaagaaatgtgcaaccatgaggacaccataacctataaataatgtgctgataccagaaacccaaaatgatggtaactgagagtggttctaaggccctaagttttggtacactctcatctaagtgagaacctgaccaaaaagggggaatttttttttttttttattttctgaggtggagtc

SEQ ID NO: 804478 - DNA, 572 bp, Homo sapiens
ataataatagctatatggcacctagagtagaaaggatgatttacagtaagggcattctctcaaaacttaatagtttccactataaaaactaaagacagttcttcctagtttcactgtttcagagcactgttattagttgrctcaaaagtttaaatagcttttgttgtaaaataaacaattggtatatgacattctatgagagggatggtctgagaatggtttattgtgacaatgcaatcactttcaggtattaaatttcaggatgaaaactataaatcattcgctttcccagagtgaagtttgacttattcctgtggccaacatggcttatggacaccaaggacaaataagtcagaataacttgatggaaaagaccttcagcgataactacatagttttcatctcttgtatgaacaaagtgttaaattttctctactatcaattctttagtgatatattggctatgatttttttctgttccatgatatatattattttatcatataatatacattgatatatgaattgattaaggtcagggatttataccaagataataatttgttctaaaa

SEQ ID NO: 804479 - DNA, 572 bp, Homo sapiens
ataataatagctatatggcacctagagtagaaaggatgatttacagtaagggcattctctcaaaacttaatagtttccactataaaaactaaagacagttcttcctagtttcactgtttcagagcactgttattagttgactcaaaagtttaaatagcttttgttgtaaaataaacaattggtatatgacattctatgagagggatggtctgagaatggtttattgtgacaatgcaatcactttcaggtattaaatttcaggatgaaaactataaatcattcgctttcccagagtgaagtttgacttattcctgtggccaacatggcktatggacaccaaggacaaataagtcagaataacttgatggaaaagaccttcagcgataactacatagttttcatctcttgtatgaacaaagtgttaaattttctctactatcaattctttagtgatatattggctatgatttttttctgttccatgatatatattattttatcatataatatacattgatatatgaattgattaaggtcagggatttataccaagataataatttgttctaaaa

SEQ ID NO: 804480 - DNA, 646 bp, Homo sapiens
tctttctgtgcctggcttatttcactgaacatagtatcctccagttccatccatgttgttataattatcatgatttcattcttttgtgtgactgaataataatccattgtgtatatataccacattttctgtattcattcatttgttgwttgacacagtttgatttcatatcttggctatggcaaatagtgctgcaataaacatgggtgtgccaacatctctctccaatagatgtatttcctttattttgaataaatacccagtagtgagattgctggattatattgtagttctatttttagttttttaaggaacctccttactgctttccatagtgactatactaatttacatcccaccgatagtgtatgagtgttcctccttctccacctccttaccaccatttattttctgtctttttgtatttttgttatcccatttgtccattttggttttcattgcctgtgcttttgaggtcttattcaacaaattttgcccagactaatgtactcaaatattttccctatgttttcttctagtagtttcaggtcttacatttaagtctttaatacatttagatttgtttttgcatatggtaagagagagggtactaatttcattcttctgcatatggttatctagtttt

SEQ ID NO: 804481 - DNA, 640 bp, Homo sapiens
gatttaaggatgcatgtgtatgacagtatcaaatataactttatttacttctagtttattttagggtaaatttctctgccaaagactcctgagtatatcatacaaataggctgaagtgataaactgaaccctaaagcgtaaaaatcaccctagctattgcaaactcttgcttaataacttcaaataaattattcttgcttttctgattgatgataaaamtagagagttaaaatttagctaaattaaagctaaaatttaacttattatgtttgacatagtaattatttctgtcaatttgtctttggtaattactacattataattaaatgtaaaaattaattcattatttctgttctgaatgcatgaacatttaccaatctcaaaggcaaaggagggcgttaaaaactttctaagttgaaaattttaagctgaatagaattaaggaacaatggcatatatgtatgccattctaaaacaaaatttaatataaaacaaaattttcttcttttggtgaatattaacttgaccctaaaggtcatattttattaaagtactaagctttattttttattttgtttcaattttgaaaattcagatatacaggggttagtttataacaaaaacaatatttaattttcat

SEQ ID NO: 804482 - DNA, 616 bp, Homo sapiens
tttattaaattcatttaacaaatctaagagctctttctggtgaaatctttaggtttgtctaaatataaggttatatcatcagcaaggtaggataatttgacttcctcttttctaatttggatgcctttaatcctgcctgatggctctggctaggacttccagtaytatgttaaataacagtggtgaaactgggcatcattgtcttgttctagttcttagagaaaattaaattttccatccaatataatgctggttgtgggttccccagtgggaacaagaaccaaagaacaacactcatcctctcccatactaggggatcattcctggttcccagctggcctcaggcatgcaggctacctgttttccttacccttcctagattttggtgtatcctttcatttttctgttggtctttcatgtcacctcttgtaaaatgtattcaaaacatgattgcctgcacattatttttggttcttctaagtagatcaggtgtacttgaaatgcttctagtcagccattaaagaaaaaaactgcaactttttaaagttaccaatttacatattatactgtttttaagattacttattcactcaaatgcagctaagtgtattgctat

SEQ ID NO: 804483 - DNA, 608 bp, Homo sapiens
atttctctattttttatggtttgatgtgttgaataatatctactgtataagttctcacttagcatttaaggtttctctatgtctttttgcttcttttatcattgaataatatttcatcgtatgaatgtacactttaaaaaatctattcacctgctaaaggacatattggtcatttccaagttttaacaattataaataaagctgcaataaacatccatgtgcatatttttgtgagaatatgttttctactcattgggtataaatatcaaggagtgtgactgctgaattttacggtaactgtatacttagtgttgtaagaaactgccaaactatcttccaaagtggctgtgccatttttcattactaccaacaataaatgagagctcctgttgtttgacattctcaccagcayttggtgttgttagtattctggatttttgccattctcataggtatgtagtgaatgttttttattgttttaatttgcaactctaaatgacatgtaacattatgcatcttttcacataaaatttttgtcatctctgcgtcttctttggtgaagtgtcggttcagaactcttgtccattttttcttaattcttgactaca

SEQ ID NO: 804484 - DNA, 606 bp, Homo sapiens
caagaaccaccatgcctggcagtcttttccatttcttaatctagtttcctattttcttattattgaattttaagagttctttgaaaattttagataataaccttttatcagatatgtggtttatcaataatttctcccagtctgaggaaaggaggatagttttatagttattttttaataatatcctgtagtagagatattacaatattayggacaatttggtgaaagtaattttttttttttgagacagagtctcactctctcacccaggctggagtgcagtggcatgatcatggctcactgcagccttgacatcccaggctcaagtgagcctcctatctcagcctctccattagctagaaatgccacatgtgcgccaccacacccggctactttttaaattttttggagagacagcatctcagtatgctgtccaggctggtcttgaactcctggactcaagtggtcctcccaccttggtctcccaaagtgctgggattataagcgtgagccaccatactggcttggtgaaatatttgtattgaatagttaatattagagaagatttgggttagctttacatatatactaaaaaaaatgaaatct

SEQ ID NO: 804485 - DNA, 606 bp, Homo sapiens
caagaaccaccatgcctggcagtcttttccatttcttaatctagtttcctattttcttattattgaattttaagagttctttgaaaattttagataataaccttttatcagatatgtggtttatcaataatttctcccagtctgaggaaaggaggatagttttatagttattttttaataatatcctgtagtagagatattacaatattacggacaatttggtgaaagtaattttttttttttgagacagagtctcactctctcacccaggctggagtgcagtggcatgatcatggctcactgcagccttgacatcccaggctcaagtgakcctcctatctcagcctctccattagctagaaatgccacatgtgcgccaccacacccggctactttttaaattttttggagagacagcatctcagtatgctgtccaggctggtcttgaactcctggactcaagtggtcctcccaccttggtctcccaaagtgctgggattataagcgtgagccaccatactggcttggtgaaatatttgtattgaatagttaatattagagaagatttgggttagctttacatatatactaaaaaaaatgaaatct

SEQ ID NO: 804486 - DNA, 606 bp, Homo sapiens
caagaaccaccatgcctggcagtcttttccatttcttaatctagtttcctattttcttattattgaattttaagagttctttgaaaattttagataataaccttttatcagatatgtggtttatcaataatttctcccagtctgaggaaaggaggatagttttatagttattttttaataatatcctgtagtagagatattacaatattacggacaatttggtgaaagtaattttttttttttgagacagagtctcactctctcacccaggctggagtgcagtggcatgatcatggctcactgcagccttgacatcccaggctcaagtgagcctcctatctcagcctctccattagctagaaatgccacatgtgcgccaccacacccggctactttttaaattttttggagagacagcatctcagtatgctgtccaggctggtcttgaactcctggaytcaagtggtcctcccaccttggtctcccaaagtgctgggattataagcgtgagccaccatactggcttggtgaaatatttgtattgaatagttaatattagagaagatttgggttagctttacatatatactaaaaaaaatgaaatct

SEQ ID NO: 804487 - DNA, 626 bp, Homo sapiens
atattgttttatgtggctttataacatagttaaaattaaaatgtgtgaatataatggcacaaaattgggataaatggattggaaatagaaatctgtgaagttttacaataaaggtaagatgacataatattatttgaagaaagcctgtaatattaaagatgatattgtaaatccaaaggtaaccattaatattgtttttacaaagataatgtgtgggtccaaataataatgaaatattgtaaataatatttaataaaaaataaacaaacacaygactaatccacaagtgagaaaaaatttttaaatggaggtcaggggatggaaaaaaacagattgaatagaaagaagttactaagatggtggatttaaattcaactatgtcaaaaattatattaaatgtaaatggtctaaatacaacaatttaaaaatatagatggtcaaatcagataaagccatattaaatacaaagacatatacaagataaaagtacaaggataaaaaaataaataccatgcaaacaataaacaaaagaatgccatagaggcaaatttttaactgacaagcttgacattagaacaaggaatgttattagcaatgaattgtgacattacataacaataaaaagg

SEQ ID NO: 804488 - DNA, 582 bp, Homo sapiens
acaattatactgccataagttaggaatacttacaactagtttccaaattctgtagatgccaggcagacagagagagacaaacatgctccaaattttgttcataggagtataccttgctcaattattaaatgctgtaaatagctcaaaataaatttccatgactctgaaaaagaaaacaaggatcagcaatgttccaagcaagtgtcagaaagattactkcagttttatattagtttagtctgtttagttaactcttactttgcttgatattcatgaacattccagctcttcctttattccaatgtcacaatctccaaagttatcagaaacttgcatttgagagcacgtgttaaaattctatagctgattataaaccatcttttaaagaggatgaaaataagacaacaattttctgtgaataacaaaatgtctaaaatagttacagtcagaaacatgattgacaaagaaatttgattatctccgtggtttgcaataacttaacgtaacaaccttaattgtgattgacagcatacactcacaccttagaattttagatatcccatacaattttggaacacatat

SEQ ID NO: 804489 - DNA, 605 bp, Homo sapiens
aaactactaaaaccaaaaattacaaatttgaacatgattatattttctatcatattgtaaaaggagaataaacatgaatatataaggggtgttaaggatgttaaaaattggtccttcatatttagcatgttgaaaccaattacaactatcactgtaatctcagcacttgggaggccaagscaggaaaatagctcgaggccaagagtttgagaccaacctgggcaacacagtgagaccctgtctttacaaaaaatttaataattaccctagtgtggtggcacacacctgtagtcctagctactcaggagtctgaggtaggaggaccacttgagcccaggagtctgaagctgtagtgtgctatgatcacaccactgcactccagcctgagtgacagacaggttgtctcaaaaatctaggaaaaattttttttaaatttgttaaaaaggtagcactacctcaactagtttctggaacatgtttcagtaacacatatattaaaatattaaaatatgcttttgacttattaatacggtggtcaaaatactactctacatgctttgtaaatattaacctgtataatcttacaagtctataaactagttatt

SEQ ID NO: 804490 - DNA, 618 bp, Homo sapiens
aaatgttttctatatttgcagacttttcctatgatggcaaaaggatgtcagaagtacagcaagcagcaaatttatttgaacatgtcttattcagtatataaataatactataacaatatgtgaacaagaaatatctctgaaagagacatgctgtggtgagagtattttgaaaccagaatttagaatttctttactatgtgaattttattgtttaaaattttatgtgtataaggatatcacattaaaattctcatttgtgaagagtaagtacttaaaaatcatattttacagcctgttgagcattttaatatttgaagggcttcagtgtgtttttcatttattcatgaaacaaagaatgatacatatgaagtgttaaaatagccgatacaataagctattaagaataacttgtgaatatttaaaaagatagaaatttcatagttatattgcaastaaagcctttgttacatttttactattttagaaatctaactgaatcaaaattggttttcaagaatttgacattttctttcacgtatccatctttgataatgatggcctaattaaccaggccccactgtccttagaaaataacagaaatagattgtctgaattaca

SEQ ID NO: 804491 - DNA, 398 bp, Homo sapiens
aacaatttatacgaaaataatgtcttgactcaggggctctgggaggaaagtaacacagaatatttaaaaagtaggacacaccagataacttaacttttttttcttttttccttaaatcttaaccgagaggagtcaatcactttaactcccagggttttaattttcttatttaggtactcaccaagtacattcactactttatcactttttaatatctgaataataaaattgcgatgttctttttacttgaaagamctactctcttattacccatgattgcatctaggtctttgcaaagtagcacgtatataactataactcattgtttcctatgtaccaggaaatagtgtttctacttgtcaaaagtaccaagaagttttgctttaattaacctaatt

SEQ ID NO: 804492 - DNA, 496 bp, Homo sapiens; identical to SEQ ID NO: 782314

SEQ ID NO: 804493 - DNA, 639 bp, Homo sapiens
ggttacattctctattctgcattctttctttctttctctcttttatttttttgagatgaagtctcactcttgtcccccgggctggaatgcaatggcatgatctcagctcactgcaacctctgtctcctgggttcaagcgattctcctgcctcagsctcctgagtagctgggattacaggcacctgacaccacgcccagcttacttttgtattttttgtcgagatgggggcttcactgtgttgtccaggctggtctcgaactcctgacctcaggtgatctgcccgcctcagcctcccaaagtgctgggattacaggcatgagccaccatgcccggcctatttatttcattcattgctgttctttattatttatttttcctttacgtagttttgattctttagatgaaaaattaaattgttgatttttaccctttgttctttctcatatatgcaaactggctatcatttttttctttaaacaatgctctagctgcatctcacaattttttatcttaaaatttagtggaataattttataattttatactgatttattcttttatccttgaattgtttacaagtatattctttaatttccaggaagtagaactgtttttagttataattttgttgggattat

SEQ ID NO: 804494 - DNA, 639 bp, Homo sapiens
ggttacattctctattctgcattctttctttctttctctcttttatttttttgagatgaagtctcactcttgtcccccgggctggaatgcaatggcatgatctcagctcactgcaacctctgtctcctgggttcaagcgattctcctgcctcaggctcctgagtagctgggattacaggcacctgacaccacgcccagcttacttttgtattttttgtcgagatgggggcttcactgtgttgtccaggctggtctcgaactcctgacctcaggtgatctgcccgcctcagcctcccaaagtgctgggattacaggcatgagccaccatgcccggcctatttatttcattcattgctgwtctttattatttatttttcctttacgtagttttgattctttagatgaaaaattaaattgttgatttttaccctttgttctttctcatatatgcaaactggctatcatttttttctttaaacaatgctctagctgcatctcacaattttttatcttaaaatttagtggaataattttataattttatactgatttattcttttatccttgaattgtttacaagtatattctttaatttccaggaagtagaactgtttttagttataattttgttgggattat

SEQ ID NO: 804495 - DNA, 616 bp, Homo sapiens
gtttctcccacctcccaatctccctttttttattttgtgtataatctcatgtgctgttttcatttcattgtaattttcttcataattaagaatctatgacttatttcctttccctatcatttcctttctcgtaacatagcaaaacaatgtggcaaaatcagtgatttgttacttaagtaatgtaatcagtgctyatttaaaaaaacaaaaaaagaatattttaatcatattttttctttatgagtctctacttgtttgcacatatttgtagtagggaaaaaagttgatatagtaaacattattttccttccttttctttttctttattctagcagttgctcattgaatcaactggtataccgaaattctgtcttttgagcaaaggcataggtcccagacagtggagtgggaagaaatatgtagagacagtgtctgggggaaaagggaagaaaagaagaatatttgtgcactctaacagcagagacaactcatatgctatttctttgcatctgaatgaagtcaacaaaactcatggaaaacagacactgttctctgagttctacaaaaaaacagagcctgaggcaaagaacccgtatgttaacaattatttggcaag

SEQ ID NO: 804496 - DNA, 604 bp, Homo sapiens
cactgcaactgcgaggtggcaacgtgctagcagcctttgctcactctcggcacctcctccgcctcagcatccactctggctgcgtttaaaaagcacttcagtccgccgctgcatgatgggagcccctcgctcgctgtggctggagcctgctccctctgcttgcaaggaggtgtggagggagaggcgcaggcaggaactggtgctgcgcacggtgctcctgggccagtgtgagttccaagtgggcacgggctcagcgggccctgcactccgagtggccggccagggctgctagccccgggaagggaggggcttagcacccgggccagcagctgcagagggtgccgggtcccccagcactgccggcccrcctgcctgcgtttgaattctcctcaggcctcagccgcctccccaagggcagggctcgggacctgcagcccaccatgcccgagcccaccccaccatgggctcccacgtggcccgagcctccctggatgggcactgccccctgctctgttgcacccggtcacactgactgcccaaggggtgaggagtgcaggcatgcagcgtgggtctgacgggcagctccgcctgcggccccagcgca

SEQ ID NO: 804497 - DNA, 583 bp, Homo sapiens
attgaggtacctatttaagataataatactggacactttctacagttgtttaatattattttctctaagttcaattatttttatttagggcaaactggaactgcagtactattctagattaccgggatttgttgtttcaataaaagcaaaagagctgcgtttgatctaacaatgtttagtgagtgccttctatatatcagacttcgytctaggcactaaagacatagcagttattgaaactgagtcagtctctgcttcagtataacttgtatgtaatggggagacataatgataattacatgatgtatcagctggtgcataagcactgtgaaaaaaaatcaaacaggataaagggaacatttggagtgccactttttggtttataagggactccttagagaaagtggcatctgagcagaaaaatacattattccctttatattttatcatcacttgagttgtattatttgttagtgggaataattgtgccagagactgtttcaatatgacatgaccaatcagaatatccaaccttcctagagtgttttcccaaactgtgacatggagtgaacaagagttgcca

SEQ ID NO: 804498 - DNA, 585 bp, Homo sapiens; identical to SEQ ID NO: 774047

SEQ ID NO: 804499 - DNA, 615 bp, Homo sapiens
atacaaaaatatactatatatgaaaaaagataaaaattggaactattacctgctaataaaattatttggttcaagcgattctcctgcctcagcctcctgagtacctgggattataggcatgcaccaccatgcccagctaatttatttttgtatttttagtagagatggggtttcaccatattggtcaggctggtcacaaactcctcacctcgtgatccgcccgcctcggcctcccaaagcgctgggattacaggtgtaagttatccttttctttcccttgttggaggaggactcaattccacagcttcatcttagatttggcgtatgataaggagtccatgcaacccccctcacgacacrtttttgttccaaactcaactccaagctttaggtcaaagccctaagaaagaaaactgggtcaaagaaatccagaggcagatgatgactgaagttaaaaggcacagttaaaaggtgagcatggctaattcccactgattaagccaagcctcccatttcatgaataaatgtcatgctaatatccatggcataaatgaggtctagggaactccaaggctactggcagtaagggagagagagatataggtgagagcagat

SEQ ID NO: 804500 - DNA, 585 bp, Homo sapiens
ataatattttagaaagaagtactcatttctaatgttagaaacctagaagaaatgtacagatatctagacacttggctcaaataattctccaaatccaaataattcttaggagatattctattcatattctttaaaaaatatgttaccattttattataatttttttttgtttgttttgttttgagactgagtcttgctctgtcaccaggctggagtgcagtggcatcatctcggctcactgcaacctccgcctcccgggttcaagtgattctcctacctcagcctctgagtagctggaattacaggcacacgccaccatgcccagctaatttttgtatttttagtagagacaagttttcaccatgttggccaggatggtctcgatctcttgacctcatgattcacccacctcagcttcccaaagtgctgggattacaggygtgagccaccacgcccggccaaaagtgttttttctatgattttctctattatgtctaatttaaataactgtttagagaaccatgaatcaatctatcttccctcttgtgttctccttttctctcgctctttccaccttttcatctg

SEQ ID NO: 804501 - DNA, 595 bp, Homo sapiens
aagttcaagatcaagatgccaaaacgtttgatttctggtgaaggctcacttcctgatttgtagacaactgtcttctcactgtattctcacatggcatagaaagctgagagctctggtctcttcctsttttcagaaggactctaatttcatcacagcagctttatcctcatggctttatctatgcctaataacctccaaaaacccctcctgcaaataccaacacatcaagggttaggacttcaacatacacatgttgaccagagaaacaaacatttagcctataacaatgatttggatttatttatggagaaggaagctatagaagaataactaaaatgcataaaggcaaattgaatgttcaaagggtaagcatgggtctgattgttaatatcactattagctcagctacaaatgagcatctggagcaatagcatctctctaggtttgaagaggtgagcggcggtgcctcagcgatctcctctgcagcataggaaatgatggctgtttctttccgctggaagcatggccacgaaagccctcctctgaaagtgctcttgctgtactgactttgcttgtcaacaatgtggcactcctc

SEQ ID NO: 804502 - DNA, 638 bp, Homo sapiens
ttctaaatataaattactgtcttagcttgggatgctataacgaaatactatagactgtgtggcttaaacaacacaaatttatttctcagttctggaagccaggaagttcaagatcaagatgccaaaacgtttgatttctggtgaaggctcacttcctgatttgtagacaactgtcttctcactgtattctcacatggcatagaaagctgagagctctggtctcttcctgttttcagaaggactctaatttcatcacagcagctttatcctcatggctttatctatgcctaataacctccaaaaacccctcctgcaaataccaacacatcaagggttaggacttcaacatacacatgttgaccagagaaacaaacatttagcctataacaatgatttggatttatttayggagaaggaagctatagaagaataactaaaatgcataaaggcaaattgaatgttcaaagggtaagcatgggtctgattgttaatatcactattagctcagctacaaatgagcatctggagcaatagcatctctctaggtttgaagaggtgagcggcggtgcctcagcgatctcctctgcagcataggaaatgatggctgtttctttccgctggaagcatggccacgaaag

SEQ ID NO: 804503 - DNA, 683 bp, Homo sapiens
gcttcagctattctggtttctttttgtgaatctatatgaatttgaatgttgttttctatctttgtaaaatgtgccagtgggattttgacagagagagcattaaatctaatatggaaatagctttcggtattatagatattttcacagtattaagtattttaatccatgaacatgagatatttctttcatatattgtgtctatttgatatctttcattgtgtttgtagttttcagtgtacaattattttacttccttggttaagtctatttctatatcgtctattcttttttgatgttattataactaaaacctttaatttccattttagatgtgttttgttagtacatggaaacacaactgacttttttatgttgatattgtatcctgcaactttaccaattcctctggctaggttttccagtgctatgttgaatagaagtggtgagagtggacattcttctctttttcctgatcttacagaaaaagctttcactttttcaccatgaagtataatgctccctgtgagcctayatatatgacctttattatgttgatgtacatttaattattactcccattaattctccaaagatggaggtctggaattgaagaaatatgcaaaggcgcgtaaaatgcaatttacatacaattatatggtagtaagtaaatgctataagaataa

SEQ ID NO: 804504 - DNA, 641 bp, Homo sapiens
caccttcacttatttatcacactagttgttatagattttgcttctccaaaggagcaaagctccaatttgctaccaaattggcaaagctgtctggtggaacaatctgttcacaagaagagtgagacctgataccacagcaacgctgccagaagttcatgattttaactttgacggttttctgtcttctgtctgtctttctgagaaaagtatattgttttggccgggcgtggtggctcacgcctataatcccagcactttgggaggccgaggcaggcagatcaggaggtcaggagatcgagaccatcctggctaacacggtgaaaccccgtctctactaaaaatacaaaaaattacccgagcgtggtggcgggtcctgtagtcccagctactcgggaggctgaagcaggagaatgctgtgaacccaggaggcggagcttgcagtgagcagagattgcgctactgcactccagcctgggtgacagagcgagattctgcctcaaamaaacaaacaaacaaacaaaaaacaaaaacaaaaacaaaaaaaaagtgtattgttttactgttttctgaagcttaaaaaatgacaagttatatatttattattatacctgactgttctgatctgaaaactgaaatccccc

SEQ ID NO: 804505 - DNA, 479 bp, Homo sapiens
ctgcactccagcctgggtgacagagcgagattctgcctcaaacaaacaaacaaacaaacaaaaaacaaaaacaaaaacaaaaaaaaagtgtattgttttactgttttctgaagcttaaaaaatgacaagttatatatttattattatacctgactgttctgatctgaaaactgaaatcccccaccttggctgaagaataaaaaggaaatgcaaagtactaaacccactggtttyagacccatatgtttatatgggttcccaatcaaccatatattcattaaaactgcctttcttaaaataaatattcttccccctttttctataaaacgtggctctgccttcatcgttgttaaaatgtattccatggtagtaggtaagtgaaagtgtctgtcttcgtatatagtaaatgtctacactatttccattgtttattctgagaggttttgttctaaacttatgtttttattcttcatcaatat

SEQ ID NO: 804506 - DNA, 657 bp, Homo sapiens
agtatttctgtctctttttgtcaatgtatatttaaatccctgtaccagatctggcacactgcggtaccctgtaaatattactgcaagaataaaacaacatctttaataaagctttagattgactctcaaagtttggagaacttctagagaaacagggtagtttctgaactccttttggaaaagcagagaagccctgaagatttaacgactaagaatttaaaaatatcaggttggtgcaaaacctaatgaaactactttactttcaatggcaaaaaccacaattacttttgcaccaatctaataaataaatctaaatattggttatggtaattaaaattaaaattgtctctacagagtgaccagtgaggtagtattctgtctctatgacctattctggtcttgctaaaacttccacatcatttctggattccaaaatctctctcrattattttcttatttacatgatttgaactttttcttcatactatagccaactattaaaataatatgcaagttcctcagtattctaaaacatacttcagcctgaaagtacatttaatgattttttaatttgattagtgagaggataatgaatagtcacgtaatctgttcctgatttttgtaagcccagcactgactgtgtattatcccatccta

SEQ ID NO: 804507 - DNA, 662 bp, Homo sapiens
ttctgggctctaaagttacagaaattgtaatatctattctgttaataaatgtttcataggtgctttctatgtataagtaattgtgtcattaatttgggataaacagtttcttggtcttcaggagacggagttaatagtctttatcagtatgtatccagggraagttaactatactggacaggtagaggaagaagagttcagtacagttcaaatgcctgtgaaatacccgagttaagatgggagttagtggcaatttggaaataagtttgcaggtgaagttaaataaccaaagatcactatagtgctgaagggcttaaacactgaactagtataatattattttaaaaaattattctgtttatagctgtaatatttttctttcatttatgtacaaagttattttaatagaaccatgttatttgacaatggaaaatcgattcataatatcagtaaacatacttttaagatttgctctcagtttcccatcagttagtgggttatgattttaatgctgtgcagtgggggaacaaagcaaatctattaacgaagacaatttgtgaattacaagaagtataaaaacctgacaaatttctccgtttcagtctacttccatcaatcaccattaagtcaggaaaatatactcaaagacttttacatcctgg

SEQ ID NO: 804508 - DNA, 578 bp, Homo sapiens
acttttctctggctttgtgctttcttagatactaaattctgccttgtggtgacgaaaattaatggcataaatgcattcataaaggaagttattaaagagttatgtgactgaattacaagtaaggattattatacttgcaagttcataatgtaaatttttwaaaaaaaaacataatacagaaagggcgtgacttctaaaaacacagtcccgagaagagttgtacaattcataaggatatctaagctgtgtataagtagtttgtgtaagtgcttgactttccataattttgatcctgtagtaatttttttaaaaaattaaaggccgtagggacatggatgaagctggaaacccatcattttgagcaaactatcgcaaggacagaaaaccaaacaccgcatgttctcactcataggtgggaattgaacaatgaggacacttggacacatggtgaggactatcacacactggggcctgtcgtggggtggggggaatggggagggatagcattaggagatatacctaatgtaaatggtgagttaatgggtgcagcacaccaacatggcacatgtatacatatg

SEQ ID NO: 804509 - DNA, 602 bp, Homo sapiens
atatatatataatttatacatttttctatgtataaatatgtataaaatttataaatgtattttaatattaagctcaaaaatggaaacctgtgttattgctcctaatcatgattccccttttccagtagaaggttttatatttatcattgtcctttgtcatgtgacttgcactaccgtaatatagggaggatgttattctccacctccttgtcaggttgatcatgtgatttgctttgtcaacagaatgtgtgtgaaagtgatgtacacgaggctgggcgcagtggttcacgcctgtaatcccagtactttgggaggccgaggmgggtggatcacgaggtcaggagatcgagaccatcctggctaacacggtgaaaccccgtctctactaaaaatacaaaaaaatagccaggcatggtggcgggcgcctgtagtgccaaatactctggaggctgaggcaggagaatggcgtgaacccgggaggcggaggttgcagtgagccgagagatcgcgccactgcactccagcctgggcaacacagtgagactctgcctcaaaaaaaaaaaaaaaagtggtaagaaagtgatgtacacgagttgtcactg

SEQ ID NO: 804510 - DNA, 602 bp, Homo sapiens
atatatatataatttatacatttttctatgtataaatatgtataaaatttataaatgtattttaatattaagctcaaaaatggaaacctgtgttattgctcctaatcatgattccccttttccagtagaaggttttatatttatcattgtcctttgtcatgtgacttgcactaccgtaatatagggaggatgttattctccacctccttgtcaggttgatcatgtgatttgctttgtcaacagaatgtgtgtgaaagtgatgtacacgaggctgggcgcagtggttcacgcctgtaatcccagtactttgggaggccgaggcgggtggatcacgaggtcaggagatcgagaccatcctggctaacacggtgaaaccccgtctctactaaaaatacaaaaaaatagccaggcatggtggcgggcrcctgtagtgccaaatactctggaggctgaggcaggagaatggcgtgaacccgggaggcggaggttgcagtgagccgagagatcgcgccactgcactccagcctgggcaacacagtgagactctgcctcaaaaaaaaaaaaaaaagtggtaagaaagtgatgtacacgagttgtcactg

SEQ ID NO: 804511 - DNA, 602 bp, Homo sapiens
atatatatataatttatacatttttctatgtataaatatgtataaaatttataaatgtattttaatattaagctcaaaaatggaaacctgtgttattgctcctaatcatgattccccttttccagtagaaggttttatatttatcattgtcctttgtcatgtgacttgcactaccgtaatatagggaggatgttattctccacctccttgtcaggttgatcatgtgatttgctttgtcaacagaatgtgtgtgaaagtgatgtacacgaggctgggcgcagtggttcacgcctgtaatcccagtactttgggaggccgaggcgggtggatcacgaggtcaggagatcgagaccatcctggctaacacggtgaaaccccgtctctactaaaaatacaaaaaaatagccaggcatggtggcgggcgcctgtagtgccaaatactckggaggctgaggcaggagaatggcgtgaacccgggaggcggaggttgcagtgagccgagagatcgcgccactgcactccagcctgggcaacacagtgagactctgcctcaaaaaaaaaaaaaaaagtggtaagaaagtgatgtacacgagttgtcactg

SEQ ID NO: 804512 - DNA, 564 bp, Homo sapiens
taaccagaaaaaaagagcctattctgggaattactaaaaaaaagagaaggaaaacattaacttgaaatcttccatttatctctctatttttcactttgattctaataaatgatattctttagagctagtcattctgccatagggtgtagctgctcataaatgagactttgaaatgccagttgtttgttatgaaatgttagttatttaacttgttccttcacaaaatgcagatcaccaatgacgaggacttttattccgcaattcaactccagttcaaggagaatatctaacacataaaaacrtgtacctattcaagtgtatttaaatttaaataaaatttaaaataatgcttatgctatccatgcatgtcagaatatctcatttaattcaactactgctagcagtggtgacagcaacgtttgaaccctgacaatctatctccattttcttagatattattacaactacaaaaataaggcaataaataagtcattgatacaggcaacttttctggaatttagatctccagacatacattgttattctttcctcccaaatgagtag

SEQ ID NO: 804513 - DNA, 622 bp, Homo sapiens
gatatctaaatagcagatagtaattaccaggatgtgtttccaattgtactgtccttccattgcacaggatttagggctaaattgggctttggagataacctagtcctctctcctcattttaaaaataagagaacttaggttccaagagttaaatgacttatccaagatgatagacattattaattacagaattggcactagaaccagtttttctcactcttagatcagttatttttctactttctcacttcgtttcatggtgttgtacatrgcctaccatatggaaaatagtacttttctatagttacgttacttaaaacataaatttttattgatcctgtaccataatattcacagtctaaatacaacagtgattctgaagtcatttgaaggcttctcacttatattcattcttaaaaagccaggattaattattttctctctcacctgttaggaagcacatcaacccagcagaaacattacttattagtatgtacaatatggagaactattgaaaaatactcttccagatttgtgtgtgtatatatatatatatttttttattttatttatttatttttttgagacagaatctcgctctgttacccagggtggcgtgatc

SEQ ID NO: 804514 - DNA, 623 bp, Homo sapiens
caaatcaatgaacattttccccatccatcagctgctcgcttgcaagcagacaaaacacttacaatgccagaaacccacagagagctccttagtgaacgaaacctcactgtcacaagattcaaaatagccttctccctcccaccctcaacctccacagctctcgacctcaaatgtcttttttttgttaatccaacgtggatcgcaagtacttaaaaaatgatgccaggaaagaaactggaaaaacaggagcaatgatagatcagagttttgagggtcctcacatcacacttgtcacaaaacaaaggsttctttgagatttaacccttttagaaaataaaacccatcataaagatgaatctgcttatgttgactgtactgctttacaattgtagggtttgagcgttgaagcatttaagtatgcaaagcattatgccaagctgtgtcagacatttgtaatttatctatagttactagatggctttgggtattgaaggaattatgattgatgatatgagaagaataaatcatagatatatttaacagtagaaatcatatttctctctttgagcaattttttgcagagaactcagatgtatttatattgtgacaattcatgtagaaac

SEQ ID NO: 804515 - DNA, 621 bp, Homo sapiens
tacagcttccccttcaccaggaaggaaaatatgttctgctgcacagacacacacacacacacacacacacacacacacacacacacacacgcattttgccagtggattctcccacaaggacaagtgtagctgactacatttcagggaattacatggggagagtaagtgaggaagtgaaagaagggaagaggggacacgtagctgtgtgttcatctagacccacctaaagttccattttatcattygaaaaaaaagggtgtggctaagagatgggcataattaataaactgttttagtcttttggccattttaaatgaaacaattcatgtaatatttaatattcttgttattgaaattatattactgtatgtttttatatagttcttacaattgtaatatgtttctaaatagcttgtgtaatattgactaaattcaattattttaagtccaccttttaaaaacatgctatttgttttgttttatcttggtgtaccactgatgttgtttggctctgtgttcccatccaaatctcatcttgtaactcccctaattcccacatgttgtgggaagaactcagtaggagatgactgaatcataggagtgggtctttcccgtgctttt

SEQ ID NO: 804516 - DNA, 604 bp, Homo sapiens
atgtgtttccctttatttgtgttgtctgtgaattcatccagcagtgttttgtagttttccttgtagaggtctttcacctctttggttaggtatactactaagtattttattttattttattttattttattttattttattttattttattttattttattttatttcatttcatttcattttatttgcagctatggtaaaaggtgttatttcttatttatttatttatttatttatttttttgagacagagtctcgctctgtcacccaggctggagtgcagtggtgcgatctcggctcactgcaagctccgcctccygggttcacgccattctcttgcctcagcgtcccgagtagctgcgactacaggtgcccaccaccatgcctggctaattttttgtatttttagtagagatggggtttcaccatgttagccaggatggtcttatctcctgacctcatgatccacccaccttggcctcccaaggtgctgggattacaggcgtgagccactgcgcctggccaggggttgagttattgatttgattctcagcttggtcgattttggtgtatagaagagctactgatttgtgtacattaatttt

SEQ ID NO: 804517 - DNA, 542 bp, Homo sapiens
cagattgggccactggttaacactgagtgagagaaggagagaggcctggattgttccatatgaaaaaaaaaatcaagagtggaaaataattcctgccacctccatcttcaactatatattttatttttaaattggataaatggccagtgtargatgaaaaccaagaaaaatgccagaaactgagacttagactgtatgtccattgtggtagatagaaacttgtgaacttactaagaatcaatgtatctctgttgcagtgtgatggtctttcctcatggtctcccaaatttctaagggtagttggttcccagtatgtctgccacattgtgatcacaaatatcatgatcatgaagaaatgctttgtttggaaatgcctacaaataatgatggaagggcccaattgaaagtaaatattttgctgaaattatccatttaccaattcattatcattaacaatgaactcaacataacattagtctaatgagatagctcatttttttttttaaaagttatgtgtcgaatatatcctttaaacatgtcag

SEQ ID NO: 804518 - DNA, 542 bp, Homo sapiens
cagattgggccactggttaacactgagtgagagaaggagagaggcctggattgttccatatgaaaaaaaaaatcaagagtggaaaataattcctgccacctccatcttcaactatatattttatttttaaattggataaatggccagtgtaagatgaaaaccaagaaaaatgccagaaactgagacttagactgtatgtccattgtggtagatagaaacttgtgaacttactaagaatcaatgtatctctgttgcagtgtgatggtctttcctcatggtctcccaaatttctaagggtagttggttcccagtatrtctgccacattgtgatcacaaatatcatgatcatgaagaaatgctttgtttggaaatgcctacaaataatgatggaagggcccaattgaaagtaaatattttgctgaaattatccatttaccaattcattatcattaacaatgaactcaacataacattagtctaatgagatagctcatttttttttttaaaagttatgtgtcgaatatatcctttaaacatgtcag

SEQ ID NO: 804519 - DNA, 661 bp, Homo sapiens
gaggcattaatttgaggggcaaattttaaagggatgcaaagaaacctcagtaataaaagaaaatacagtattttcttttttataataaaaatattttaattctttatttcaataaaatatattattccctcctatttgtcagaacatgaacatagaaaatatttccaataatacttttaagaatcaaaattaatgcccaaaaaatccacaaggaaaaaaacaccattatttgtttatttatttcatttatttatttttttttagacagagtcttgcctctctgtcacccaggctggagtgcagtggcgcaatctcggctcactgtaacctctgcctcctgggttccagtaattctcctgcctcagaatccagagtagctggattacaggcatgcaccaccatgcctggctaatttttttgtatttttagtagagatggggttttgccctgttgaccaggctggtctcgaactcctgagctcaggtgatctgmctgcctcggcctcccaaagtgctgagattacaggcatgaaccaccacgcctggcccaaaagtactaattaaaaaatatatattattattattaagttccggggtacatgtgcaggtttgttacataggtaaatgtgttccacggtggtttgctgcacctaacaacccac

SEQ ID NO: 804520 - DNA, 661 bp, Homo sapiens
gaggcattaatttgaggggcaaattttaaagggatgcaaagaaacctcagtaataaaagaaaatacagtattttcttttttataataaaaatattttaattctttatttcaataaaatatattattccctcctatttgtcagaacatgaacatagaaaatatttccaataatacttttaagaatcaaaattaatgcccaaaaaatccacaaggaaaaaaacaccattatttgtttatttatttcatttatttatttttttttagacagagtcttgcctctctgtcacccaggctggagtgcagtggcgcaatctcggctcactgtaacctctgcctcctgggttccagtaattctcctgcctcagaatccagagtagctggattacaggcatgcaccaccatgcctggctaatttttttgtatttttagtagagatggggttttgccctgttgaccaggctggtctcgaactcctgagctcaggtgatctgactgcctcggcctcccaaagtgctgagattacaggcrtgaaccaccacgcctggcccaaaagtactaattaaaaaatatatattattattattaagttccggggtacatgtgcaggtttgttacataggtaaatgtgttccacggtggtttgctgcacctaacaacccac

SEQ ID NO: 804521 - DNA, 572 bp, Homo sapiens
tataaatatacgtacacataaaaagaaggatacagtaaaaagtcatggcaaacacttcagtccttctccacagatacaatcattattgataaatttctgtgtacattttggaaacctgctatgcatataaactcaacactcacttttgtaagtgatcatgaaactacatcagggtgaaacattcttattcttaagatgaaggcagaaataaactagcagcatgcctttgactccaggatacactcaccaacctgacatctgtaacagtagccatttcctctcaattataattagcaatattcattgcttcactgaacagagttcccaactaatcatgactgactacatttaaaataccagtttctagaatggaaacttagattgatatttgaaatgtcagcttcyatttgaagaaatgatagctgacaaatacaagtaatgcatggagagtagatgatgaaaattatttaaatatatacagtagaaaagagataatgactccttttgctatatgcactagatagcattaggaggtgaactaatagaaaagtttttaatttttttcttatctt

SEQ ID NO: 804522 - DNA, 668 bp, Homo sapiens
gccaagtgcagtggctcatgcctgtaattactttgggaggcttaggcgggtggattatcagaggtggggagattgagatcagtctggccaacatgatgaaacctgtctctactaaatacacaaaaattatctgggtgtggtggtggatgcctataatcccagctacttgggaggctgaggcacgagaacttgaacccaggaggcagaggttgcagtgagccgagatcgcaccactgtactctaacctgggcaacacagcaagaccctgcctcaaaacaaacaaacaaacacacaaaacatatatatatatatatatatatatatatatatwatatatataattgcatttataatttaaataattaaaatgcctctaatatataaggtaaagcattcactttcttatgacattatttaatgtcataagaaaaagtctttatatatctatgaagataattttgactgaattaatgacatgttttataaaaacaaaatttcaaacgtagtaaaaaaattgaagtctaattaaccttaaaacaagaaaaaaatatgaatgaaactctagtcaagtaaaacaaaatagaagaaaaagcaaccgacccatcaactctttacctccaagccttcaattacagatacttttatagccaggttaatttaaatattta

SEQ ID NO: 804523 - DNA, 668 bp, Homo sapiens
gccaagtgcagtggctcatgcctgtaattactttgggaggcttaggcgggtggattatcagaggtggggagattgagatcagtctggccaacatgatgaaacctgtctctactaaatacacaaaaattatctgggtgtggtggtggatgcctataatcccagctacttgggaggctgaggcacgagaacttgaacccaggaggcagaggttgcagtgagccgagatcgcaccactgtactctaacctgggcaacacagcaagaccctgcctcaaaacaaacaaacaaacacacaaaacatatatatatatatatatatatatatatatattwtatatataattgcatttataatttaaataattaaaatgcctctaatatataaggtaaagcattcactttcttatgacattatttaatgtcataagaaaaagtctttatatatctatgaagataattttgactgaattaatgacatgttttataaaaacaaaatttcaaacgtagtaaaaaaattgaagtctaattaaccttaaaacaagaaaaaaatatgaatgaaactctagtcaagtaaaacaaaatagaagaaaaagcaaccgacccatcaactctttacctccaagccttcaattacagatacttttatagccaggttaatttaaatattta

SEQ ID NO: 804524 - DNA, 634 bp, Homo sapiens
tatgcaatagttttaattttatatttcacagcttttactcagtatccttgcaaaaatcaatccacgttgctggatgtgcactgctactacactgttagtagcaattctgggattatgccataatgtgcatcaaccatattgtatatattcagttcacagtaatggaagcatagatcgcatttagtacttaataatttcatatgctttcactctgaatgtatgtaaagttttctctgaacacataaaaagatgtttaacctccctaatcatctgggaaatgcaaatcaaaaacaccatgagatttacctcatatccactagaatgctactattaaaaacaaacaaacaaacaaacaaacaaacaaaaaacctctaaccaaaaccccgaaataagtattggtaaggatgtggaaaatttagaacccttgctcattgttggtagrtataaaaaatagggcagccactatgaaaaacaatatggtggctcctcaaaaacctaaatgtagaattatcttatggttcaccaattccacttctgaaataaaacccaaagaattgaaagcagggactcaaatgggtatttgtacatccacattaatgtagcattattaataatagccaaaatgtagaagcaa

SEQ ID NO: 804525 - DNA, 634 bp, Homo sapiens
cataaaagcagtgaagatgaaaatgaatattttcttgtgaagaatatggtgactaatttaaagatctttcaatttatgaatacttcatttagactacctactatttgagtaaagtaataaatttaatatgttttccatgatgtaacccacatgatgraaactcaaaattaactacattaatcataatggataatcaaattgaatattaaaaatgcaattaatcttttaaaagaaagtattttttgagatcattaagctgaagaggagaacaaaaagaaacaaatagaaaaatattttcaaggaatctctttatatctatgttatgttatctgataaattattgatctttttcacttctcttctatgggtggttctgtgtgtgtgtatgtgtgtgtgtgtgtttgtgtgtgcatgttcattgtgtttgtattatataataatggacataattttgtgattgtagaatatcttcaagatgtttgagccatacatgtagagtgactatcctttctagtatcaaatgaatgacctaatcatttaaataaataattagtttaaataattagattatattttatcaattaggaatgatctgcattcagtttataatcattaaacatgaatcctttaatag

SEQ ID NO: 804526 - DNA, 638 bp, Homo sapiens
tttgggaagccaaggcgggtggatcccctgaggtcagaagttcgagaccagcctggccaacgtggtgaaatcccttgtctactaaaaatacaaaaattagctggctgtggtggcacgtgcctgaagtctcagctactggggaggcagaggcgaragaattgcttgaacccgggaggtggagggagccgagatctcaccattgcactccagcctgggccacagacacagactccacctcaaaaagaaaagaaaaggaaaagaaaagacaacgaacaagcaaatctgtgttcttgcccaatcttactaaattgctctctaggacagtatagggctttactattttatcatgttgcgtcttggtttccccattaaaaatagaagtctgggactatacccaaggatcacattgattcctttccattttctcgttctgtggtttgggtagttttatgtttccccataatactgtgttcttctttttcttttctgggagggggcgttctgtagcagcaggtgtatccagggctcctttaagagacagttttttttgtgtgtgtttgtttttcctcctgtctaattttggctttcttttagattattttatattctggagacaaaatttatgatgactactatcc

SEQ ID NO: 804527 - DNA, 516 bp, Homo sapiens
ctttgaacgcactcctcagagtccgactctcccacctgctaaggtagctgcccctaatctaagtcgaatgggtgcgattcctgtgatgattccagcacagagcaaggatgggtctatagtatagagcctccatatgtctcatctgtgctctccgtgttcctttcctttttttgatatatgaaaacctattctggtctaaattgtgttactagcctcaaaatacatcaaaaaataagttaatcaggaactgtacggaatatatttttaaaaatttttgtttggttatatcgaaatagttacaggcactaaagttagtaaagaaaagtttaccatctgaaaaagctggattttctttaagaggttgattataaagktttctaaatttatcagtacctaagtaagatgtagcgctttgaatatgaaatcataggtgaagacatgggtgaacttacttgcataccaagttgatacttgaataaccatctgaaagtggtacttgatcatttttaccattat

SEQ ID NO: 804528 - DNA, 647 bp, Homo sapiens
agtatccaatagttgtttttttctgatcctcttcctcctcccacccttttgtcttgtcttcaaatttattagtattttatatctactgggatggagaaaaagcctagaaaaataagtatagttttactgaatcaccatttcttytgatgcctctgtttagactgcctgccctccaggcctgctgcatggctgtatttctggggtttccctttgtagctcttctagagacaaattggccccacagtctccaggatgccaagattttttctgcttaccttttcttcctcatttagatgcagcccaacctcaaataacctcccttgcaagggagcagaagatattttatgactttttttacattatttattagaaatccaatgtcattctgtactatcttctaacattcaacattgctgatggaaaatgtgatatgagacttgccatttttctgcaggtcacattgtttcctcaagaaaaattttagaaacttctctatatccttagcaatctgaattttcacaatggtatgtgtattagtcagggttctctagagggacagaacgaatagaatagatatatacgtaaaggggagtttattaagtagtattaactctcacaatcaaaaggtcccacaataggccatctgc

SEQ ID NO: 804529 - DNA, 589 bp, Homo sapiens
tcaggggctgggtgggaggaagccattggaggcagcaggtgcctcccaaaagatgcaggtcttcattcctctcaaaactcggagccaatacaagattcagcttgtccatttagtagaaaccaagcccaagggcacaaggaggaatgctctgccacctgtgtccctcactcttggatatgaggtcatctggtttgtatctccctgcttccactgtgcctaattatgtctgggcaatttccttgtaacttgttaattctaagaagcatcttctatcccacccagatatgtaataaactcctttccattatctgcttcaatgctgttaataagcattaatgtttttaaagagctttggctattcccccacaaatatcacaccttcctgcaactctgayaaaggaggctttataggccttattttttgcagaaaagacacagagaggctagtgctttcccaaatctgccattcagcaaataagctctactccctcggtgtgaaaggcaccctctgaatccaagggaaaacgattaaggaaaggctttgtaaataaccctctatcagccaaaagggggagtctataggattgca

SEQ ID NO: 804530 - DNA, 579 bp, Homo sapiens
tttgtaaataaccctctatcagccaaaagggggagtctataggattgcagggcccagatgtgtttaatgagctggatatttcacaagttgctttctgggtgaagtggcaggggagccgggcacaggccccacggatgactggctaaatgagtatctagagcttcccattaatctgttcttacagtacaaatgggtaaatgagcccctgggttgccaaaggtaaaatatataaaagagaagcctctgacttggttcctgcttctggtctctctccatcaaacgcaytctgcccactacttatccttccaaagatgaactttcatcacatgacatcagtggttcccaactgcttctccgataaagtccacaaagcccttgctgtcctgggcgctgcccactcatctaacttcaccttggcccctgtgcccatgcccattctccataactcaaaccagtttcctggccatgccagcttccccacatgctgctcccttgcctgtgaattgattccctccacctctgcttggttcaccccagacactctccagagctctttgctagggcctgcccaagtttgct

SEQ ID NO: 804531 - DNA, 456 bp, Homo sapiens
aagggcctctttgacccttaccaggacttagaacccaaaccagtattcttatgagtatctggtaggtttgatttttaccttggactttttccaataacacgaaaaggttaggaaacagagagctatccctccctcccctggcggggagcaggaaacaaaggaaggaggatgacaggcaaaaaagaaaaagggaagtaccttstttgacacaggtattgttcttgagctgatagccctgagggcagtcacacatcaggtcccctgatggaagcacactgctggacacatcctctggacacctgcagcttctactgttgttggccttgggcaggcacagcaggctgcatggcctgggcacacaggcattgcttcctggagggaagacaaacagcagcaggtaggttaatacacaccatgagggaggtactgaatacaagaaggagacccactgcaacc

SEQ ID NO: 804532 - DNA, 537 bp, Homo sapiens
agagtttctgtagataaccgggcgtttatgggaatgccgctttccctgcttttaactccggtattctgctagctttccagctcctatacttttgcagtcagctctttcctgcttatctttagctgcaggatgatgcagagctatgataagtagtctttctaaactgattttatgaggttcttatgaaatatatttttagtatttttagcagaaagagatagattttgtgaacaacatgtttgctgagaccattaagtgtrcacattcatgactctcacactgataattttgtcagtaccctttttgtatatgtgtgtatttatgaacacacccccccatacacctgccctttagaagaaccttgatatttgtggatcaatagaaattttctgatctcaggactgtcataatgccctttacccaagctccttcccttggcttttttgccctcttatttcagatgctggggcctctgaatattctggatcactctgtataaaatttttccagcctcactgccaaaatctcaccccttta

SEQ ID NO: 804533 - DNA, 645 bp, Homo sapiens
ttcttggccttgactgcaaggatttatccttaatttccatggcctaattatctttccagtgtttcctctttctacctttattaattggttctcgtccttttattcttcattcacttttttgtttcattgaatctataaattaaatatggtctcgtttgtttttagaagtaggtggagtacaactaaatattagctaatggtagcacaagtagaacctgtttaaaatttttaaaaaacaamctgttcactgtaagaatgagatacccaaggaaagaacaggaaagaggtgtatttttaatcctgccttttgtatttagtgtgccccatgactagctgttcatctaacatgcttcttggttctcggcaggtgaatggctatgtggtgaaccttttctgggcatttgacacccacaagcaagagaggagaactttgaacttccgaggaagcatattgtcacacaaaggtaacactttggtgctggtcagtgtgtgtgcaggaaggggtaaggctggaccaatgctttcccgctgtagagcttgactgggggtgccagggaaggggaggtattctctggaagctgttctgtgttgacaggttcttgtgcattgaggatcctataagtgtgctgctgattctaggcagag

SEQ ID NO: 804534 - DNA, 544 bp, Homo sapiens
ggagatgttcaggttaagataaaagattgtggagaccaaggttcttttgacgtcttttagtggctgcctttaggggaaatagatgacagatgtttcctatccagatctttaaaaggtgcaagacttttagctaatgtctttaggattgggagggcctggaagaaaaagatctagctatgttaatagagattctttacagatgcgaaggttcccccacaaaggacagcttttcagggccatttcaagatatgacaaagaaacatgttttrgggtaaaatattttgattttcttccttgtctcataatgttatgccagagtcaacttggaaagtaagtcacgatatataggattaaataaaacccatctgatgagaatttatggtttgtaggacatgactccccagaccccttagatagggatttgggcaagatttaaaaaatcagagcttagtcctcacagctgctgagcagtgctggagaaagtcaccctgttgcctgggacttggaaatccctttgtggatccccgctcagttcctgctcatc

SEQ ID NO: 804535 - DNA, 629 bp, Homo sapiens
gcctagtaatctgcattctctaccaaagataaaagagctcagagaccacctgttagataccgtcacagaagagttcttcatagttccttcttggccttgacaaagactttaaagccagaggagtgacagaaatcctttctcttgaaggcctgkatgtcagagagtgagggatatgaagcaaaacctggattcgaggcctggttgtacctctgctggtcgagggctgtgagcaagtttcccagtctttctgagcctcagtttcctcatccatacaatggggaaacagtagctgctaggtcacagggtcctcatgagaagtaaatgaaatcatttacatagctggcatatagaaggcattcagcatgtgctaatggttaggatttgaacaactgctttctgagaacagaaccagttcccttaaaatcagctactctattaatgactttctcccaaaccctggatttaaattgtgtgttgagttttactggaaaacaaaagagaggagggtggaagactggatctggtgcagatagccaaaaatcagtcagcatctcccctacccagatgggcaaggaacagagagggtcgccggaagtctgggtcgctggtttcagagttgctagttaaag

SEQ ID NO: 804536 - DNA, 642 bp, Homo sapiens
taaatttagtgcctcctcttgtcatttgggcctctctcctgattgaaaagaattaattgccgctcaagtccacctacatgtctgcctgccttggctttgatttctgtcacagaagtggctcttcctcactccccttctgtccttctcttccacccccagcagggttggaggtggaaagcttttcaacagccaaaactggtgtctgtagactgaccgtgttaaagcctccaacaggagagggaatcagaggctcaagttcaggagcaagggaagccacagattgccrtggcctcatctcccagaaccgtgtggcaacgtgaagcttggagggtgtttcggagctgcaggatctgcctccagtgctgatactgtaagtacccaggacaccttccaggggcagaacttcacacgaggactcctttgcaggtgtctaagcttagcgtttctgtgcggaaatctgggggctggctctgtggactcactgaaagctctctgctgacagaatcagataatcagctaatacctgaccccgccgcgtcctgagccttggactgatacataacaatgtcatcaggcctgccttctaagagccttagccagcttacctcctctttcagagagtctgccctgggtaattattcc

SEQ ID NO: 804537 - DNA, 642 bp, Homo sapiens
taaatttagtgcctcctcttgtcatttgggcctctctcctgattgaaaagaattaattgccgctcaagtccacctacatgtctgcctgccttggctttgatttctgtcacagaagtggctcttcctcactccccttctgtccttctcttccacccccagcagggttggaggtggaaagcttttcaacagccaaaactggtgtctgtagactgaccgtgttaaagcctccaacaggagagggaatcagaggctcaagttcaggagcaagggaagccacagattgccatggcctcatctcccagaaccrtgtggcaacgtgaagcttggagggtgtttcggagctgcaggatctgcctccagtgctgatactgtaagtacccaggacaccttccaggggcagaacttcacacgaggactcctttgcaggtgtctaagcttagcgtttctgtgcggaaatctgggggctggctctgtggactcactgaaagctctctgctgacagaatcagataatcagctaatacctgaccccgccgcgtcctgagccttggactgatacataacaatgtcatcaggcctgccttctaagagccttagccagcttacctcctctttcagagagtctgccctgggtaattattcc

SEQ ID NO: 804538 - DNA, 634 bp, Homo sapiens
gtcttaacatgatgtcttcactttattctgtccagaaaactagacttgcagaggacaatgaacaaccctatgccatagagttctgaagccccatcttcccctaaggtgcctgcatcatcggtctcagaaagaaggcagtgtagggaaggaggtgacgtactaagagtttttccgcaaagtagatttgtctattaagccccatgtcaccggctttccatctctctacactcacctggacaggcatttcttccatgccacatttttgtagcrctccaatctgtccacattttaacaaccttgtacctcagtcgagatagagcctgaaaagtttaatatcatgtcaaataagagagccaataaaacttgacattattaatatgatgtcaaggtttttttttcccaactgcttagggaaaaaacattgtgtcccattaagttgagctccttgcactgagaaatattaagtgacttttcaatgactaccagctggaactattagttttcttcataagcattgctgccgtcgattctgagaggccagttgagaaccttttatgaagatgctggatgagctggtgcaatcagaaaagcttttaggtttccctgggatccctctttaagtggggctgtgtat

SEQ ID NO: 804539 - DNA, 634 bp, Homo sapiens
gtcttaacatgatgtcttcactttattctgtccagaaaactagacttgcagaggacaatgaacaaccctatgccatagagttctgaagccccatcttcccctaaggtgcctgcatcatcggtctcagaaagaaggcagtgtagggaaggaggtgacgtactaagagtttttccgcaaagtagatttgtctattaagccccatgtcaccggctttccatctctctacactcacctggacaggcatttcttccatgccacatttttgtagcgctccaatctgtccacattttaacaaccttgtacctcagtcgagatagagcctgaaaagtttaatatcatgtcaaatragagagccaataaaacttgacattattaatatgatgtcaaggtttttttttcccaactgcttagggaaaaaacattgtgtcccattaagttgagctccttgcactgagaaatattaagtgacttttcaatgactaccagctggaactattagttttcttcataagcattgctgccgtcgattctgagaggccagttgagaaccttttatgaagatgctggatgagctggtgcaatcagaaaagcttttaggtttccctgggatccctctttaagtggggctgtgtat

SEQ ID NO: 804540 - DNA, 634 bp, Homo sapiens
gtcttaacatgatgtcttcactttattctgtccagaaaactagacttgcagaggacaatgaacaaccctatgccatagagttctgaagccccatcttcccctaaggtgcctgcatcatcggtctcagaaagaaggcagtgtagggaaggaggtgacgtactaagagtttttccgcaaagtagatttgtctattaagccccatgtcaccggctttccatctctctacactcacctggacaggcatttcttccatgccacatttttgtagcgctccaatctgtccacattttaacaaccttgtacctcagtcgagatagagcctgaaaagtttaatatcatgtcaaataagagagccaataaaacttgacattattaatatgatgtcaaggtttttttttcccaactkcttagggaaaaaacattgtgtcccattaagttgagctccttgcactgagaaatattaagtgacttttcaatgactaccagctggaactattagttttcttcataagcattgctgccgtcgattctgagaggccagttgagaaccttttatgaagatgctggatgagctggtgcaatcagaaaagcttttaggtttccctgggatccctctttaagtggggctgtgtat

SEQ ID NO: 804541 - DNA, 583 bp, Homo sapiens
aaggctggagtgtttattatagggttgtattcctttagtgagatcaaaaaattaagagatggatggcaaacagaacagtccttatttagacttctgtgatgttccagttgacatacttcccccttgccctttgcccccactcatcctgcaccatctgggggcacatgaccccggggatagcagatgkaaggcagcttgctcttcttaaatttcacccaactcttaagagacctctagggaaaatacccttgggatggttccttaggggcaccttgagcactcaaaccccaatactgtggtcaggagcagctgatgaggaaaatccctgtccatggacttctctcttctccatggaagttcaggattggatgattcagccaagggcaaggaggttgggtgagaaatttgtcttgtacaggtatagcgtaattgacagcagctattcctctctgcttccattgatctcaagataaaacagaagacaattattattattgtagaaggaatttagttcaaatgccagaagaatctcccaactcccaagatggtggccttcatgaagctgtgaaatctctagtgcagg

SEQ ID NO: 804542 - DNA, 614 bp, Homo sapiens
aagacaattattattattgtagaaggaatttagttcaaatgccagaagaatctcccaactcccaagatggtggccttcatgaagctgtgaaatctctagtgcagggggtccccctgttctgagctcttagcttcaccccagctcaaatccracaattcctaagcagcacctttctttttctgggacatgatctagaaggctcatatagcttacttgggattttgaagtgataactccaagaaaattgggagagtcaagtgaaccttggataaagaatgaaatagaggctgggtgcagtggctcatgcctgtaatcccagaacattgggaggctgaggcaggtggatcacttgaggtcaggagttcaagaccagcctggccaacctggtgaaaccccatctctactaaaaatacaaaatttagccaggcctggtggcacgcgcctgtagtcccagctactcaggaggctgaggcaggagaatcgcttgaatctgggaagcagaggttgcagtgagctgagatcgtgctactgcactccagcctgggcgactaagtgagactctgtcaaaaaaaaaaaaaaaaaaaagaaagaaagaatgaaatagaaacaggtct

SEQ ID NO: 804543 - DNA, 614 bp, Homo sapiens
aagacaattattattattgtagaaggaatttagttcaaatgccagaagaatctcccaactcccaagatggtggccttcatgaagctgtgaaatctctagtgcagggggtccccctgttctgagctcttagcttcaccccagctcaaatccgacaattcctaagcagcacctttctttttctgggacatgatctagaaggctcatatagcttacttgggattttgaagtgataactccaagaaaattgggagagtcaagtgaaccttggataaagaatgaaatagargctgggtgcagtggctcatgcctgtaatcccagaacattgggaggctgaggcaggtggatcacttgaggtcaggagttcaagaccagcctggccaacctggtgaaaccccatctctactaaaaatacaaaatttagccaggcctggtggcacgcgcctgtagtcccagctactcaggaggctgaggcaggagaatcgcttgaatctgggaagcagaggttgcagtgagctgagatcgtgctactgcactccagcctgggcgactaagtgagactctgtcaaaaaaaaaaaaaaaaaaaagaaagaaagaatgaaatagaaacaggtct

SEQ ID NO: 804544 - DNA, 563 bp, Homo sapiens
caaacctgggctactgtgggaaaggatggaagactaaaaaacaagagactccgtcacaattgttcagaagcaaattcaactctacctctgggctttggtttccaggaaaataagacctgcctggacctatattagaattgttgttaggatccagtgaaatcatggatagaaacatctcaggaaaaaatataaattactttaaaaatatagaggattaccactcttaccagtccaccttcccgctcagagctgacagtgaggaygtcccccaatggtgggaggtagaatcagatgacatttaagatccccttcacctctaagagtctatggatatattctcattcttccccctataggtttcacttagcccactcttcattttgaggcagggcaagggagcagagtatatgagctggcaactctcagtctacttagagcaaagactgacatccgggacacacgctgcaacacagacaaaccctggggacattatgctaagtgaaataagcgaggcacaaaaaagacaaatgctacatgattccctttctgtgacatacctagaa

SEQ ID NO: 804545 - DNA, 552 bp, Homo sapiens
tttctcttagaaaatgtaaaaagtcacacagatttgggtaacttggcaaagagaataaatgccatggttgccctctgcctcttcttcacctccttctcatggacacacactccaaggtgctttcttcacttctggcccaaggcaggtcagagtcaggaggaccctgggagccgccacgcagccggcccgaaccttctgcgcagggccaggctttctcacttctttgccaacagctgcagcagaggtgaactgggacatgggaaacaccarctccctttggagagaggaaaaaaattaaaaagcccgtttttctgtcctgtcaggtctatttaagtatttaatgaggtgagatagtaccaataaatttaacatggcacaataactctgatgatgtgggccacagactaataagcttccatcccggggacagaagattgatcttgccttcgctagatcttatcgggtttgattgctttgttcagatattaaaaaggttgagcaaggactttcaggcactgccacaaatctgtgcgtatcctcccagccaagata

SEQ ID NO: 804546 - DNA, 554 bp, Homo sapiens
agtacatgtgttggggaacatgtgtcatttctagtattaaaaacacatcactggcaatatcagtatcaatgaattgattctgtttgaatgatttttttctatgcactgaagtaccattgtaatgtgattatttatgtagacagcctgtgttacagggatacctgtttcttttaattttttaatgtgcccactagactatgtaaaatgtaaatgagcctgcattgtagtgctagtggatcactctattggcttgggtgatgggacactgggacttattagcaagggaggcaggaaacagctccctagagctgctcatggcaatgtccagattgagatggtcctgccaggggcatctagaaaccaacagtttgaggcaccctgtgctcaggtgcttaaggcactcttaagcacattgcagaaggctgcagwccatggtgggcaggaggcttggcttgggaatccagctaaggctgaactggcatccacctctgtcaacctgatgagtgattctgggcctcagttttcctgcctgctaaactgaaaacaagctcaga

SEQ ID NO: 804547 - DNA, 554 bp, Homo sapiens
caatagttgttgagtacctacaatgagttagtgatgtgatcacagtctagaagtgggagaccaactcaagaacagatcaattctactagagtttgatctacaaaagtatctatctacatgcctagaggttcctataattcctggtcaagctaaaggaatgtgagttattccatctggggaaatgagccgaaccacagaaatgyaaaacgctcaagtgttaggagaattgtcaaaaatgggtggtcatctccagctcaaccgaatacagacatcagagaaacaaattttctataactatgaggttttaggccaagaggcttagcctaaacatcaataaaaatgcaggaacaggctctgcagcctcttacctggagacgagagtcagcaactgaaggcgcttggttgactttggcagaatccagtccagtgcagagggaggaccagcactacaattccgtgtccacctggtatggccaggaaaaagggaaccagcacttacaggcaaaaggcctcgaaatcctgcctgtgacagcctgacccacggctcagtggta

SEQ ID NO: 804548 - DNA, 554 bp, Homo sapiens
caatagttgttgagtacctacaatgagttagtgatgtgatcacagtctagaagtgggagaccaactcaagaacagatcaattctactagagtttgatctacaaaagtatctatctacatgcctagaggttcctataattcctggtcaagctaaaggaatgtgagttattccatctggggaaatgagccgaaccacagaaatgtaaaacgctcaagtgttaggagaattgtcaaaaatgggtggtcatctccagctcaaccgaatacagacatsagagaaacaaattttctataactatgaggttttaggccaagaggcttagcctaaacatcaataaaaatgcaggaacaggctctgcagcctcttacctggagacgagagtcagcaactgaaggcgcttggttgactttggcagaatccagtccagtgcagagggaggaccagcactacaattccgtgtccacctggtatggccaggaaaaagggaaccagcacttacaggcaaaaggcctcgaaatcctgcctgtgacagcctgacccacggctcagtggta

SEQ ID NO: 804549 - DNA, 554 bp, Homo sapiens
caatagttgttgagtacctacaatgagttagtgatgtgatcacagtctagaagtgggagaccaactcaagaacagatcaattctactagagtttgatctacaaaagtatctatctacatgcctagaggttcctataattcctggtcaagctaaaggaatgtgagttattccatctggggaaatgagccgaaccacagaaatgtaaaacgctcaagtgttaggagaattgtcaaaaatgggtggtcatctccagctcaaccgaatacagacatcagagaaacaaattttctataactatgaggttttaggccaagaggcttagcctaaacatcaataaaaatgcaggaacaggctctgcagcctcttacctggagacgagagtcagcaactgaaggcgcttggttgactttggcagaatccagtccagtgcagagggaggaccagcactacaattccgtgtccacctggtatggccagraaaaagggaaccagcacttacaggcaaaaggcctcgaaatcctgcctgtgacagcctgacccacggctcagtggta

SEQ ID NO: 804550 - DNA, 526 bp, Homo sapiens
catacaatgtaatattattcagccttaaagaggaaggatattctgacacatgctacaacatggatgaaactggaggaacttgtgctaaagaaataagccagtcaccgatagacaaacattccacttatatgaggtacctacagtaatcaaattcagagatagaaagtagaatggcatttgccaggagctggaggaagggaataatggggagttggtatttcatgggtacagaattttagttttgcaagatgaagagttctggaaacggatggtgktgatggttgcacaacaatatgaatgtacttaacgctacggcactatacacctaaaaacaccttttttttttttttttttttgatggtggggagggagtctcactctgttacccaggctggagtacagtggcgcaatcatagttcgctgcatccttgaactcctggactcaagagagcctctcatcctagcctcccaagtagctgggattacaggcttgtaccaccatacctggcttttttttttttttttc

SEQ ID NO: 804551 - DNA, 526 bp, Homo sapiens
catacaatgtaatattattcagccttaaagaggaaggatattctgacacatgctacaacatggatgaaactggaggaacttgtgctaaagaaataagccagtcaccgatagacaaacattccacttatatgaggtacctacagtaatcaaattcagagatagaaagtagaatggcatttgccaggagctggaggaagggaataatggggagttggtatttcatgggtacagaattttagttttgcaagatgaagagttctggaaacggatggtgttgatggttgcacaacaatatgaatgtacttaacgctacggcactatacacctaaaaacacyttttttttttttttttttttgatggtggggagggagtctcactctgttacccaggctggagtacagtggcgcaatcatagttcgctgcatccttgaactcctggactcaagagagcctctcatcctagcctcccaagtagctgggattacaggcttgtaccaccatacctggcttttttttttttttttc

SEQ ID NO: 804552 - DNA, 614 bp, Homo sapiens
tgcaaggggagggggacggtggatggtaggggcagggaggagtgtagcagtctgcccctccccaacaactacagaccatgaggtctcaagtcgtcccatagcacttagcactccagagtggagttaaactccattccagctctccccttccccatataaccagggagaaattgcatctggcctctgcttcacagaacagcatttgggaggtatatacatacatacagttttgtttctggacttgcacaaatgcacagctgtttgtcagcttgcagactgcatttctgagctgttttgctttgaacgcctcacgcctttggcccctgagaatgctgggaaaccaaaatggcagcagcttccttggcccgaaccttgaatttttaccaggactgtctcacgggcatcctctgcaacctgcagtggacagccaaggtgctggtggsaaccaggaagccccctatgcagaagcaccaaggagagagggttggcaggaagtcagcctcccttctccagcacaagccatgagagggaaggacatttgaggatggagcctcaaatgcaggctgattgtaaagaatgtttcacacatagagctcctgccaggaaagcctgac

SEQ ID NO: 804553 - DNA, 553 bp, Homo sapiens
acccaatgcctggattataaacactaaacaagtgcttgttattgttactaaagtgtatggtttcagccatcctcctggctaggtatttgacttagttcctctcttctctaaaagatgaaaacagtaattccagacttgtattggggtgtactttaggagtatawattggaagttctctcaactctgtgataagaggatctagcagtctaagaaaaaagatgagacaacatcatctacagataccatctcaaacatggtttcttccagaattaagatgttatctctcattgatggttaagatggagcaattgacatgtaaatatgatgcattttattctcctgtttagttttttggtgagattatcaatctcactggaaaacaagaagggtctgcagatgtctggtaaggaaaacattaacatcagttgtacattagacatattacttgctttccagatcttgttaaggtatcaggaaatccctttatcctttggtatacaaagtagtacttgaattcttgcaatatattttgtacttcctgttgcaaaaggga

SEQ ID NO: 804554 - DNA, 609 bp, Homo sapiens
gaattatggaagcggtataccaaataaaaacgaagctcttaaatagttaagaggagtttctttgtggtttattgccacttgcaatgggaatgacagtcacagaagagggaaaggaatactggaacagaagccatctccttctgctttgaaatctcccatgtcctgttccccattgggccagcttggttggctcgcacatgggacaaatacgtggaactcacatcctgtcccccgtatgtgtaaaacaaatgaaatgcaacaaagatcatttattcactttctgcttctaatcgtgcagcttctcctgagcttgaattggcccatgacaattagtattgatcatgacagtaacagaaaagaaatgattggtgtgctgtagtctgatttgaccataatattaggagactggarcctggggttccatatttgactgtgtgtatttacaaccccctgattttccttggattaattaactttacaaaagtagatagtccatctcgatggttcattttctgaggacctagtctgttgctgtcacatccagaaaatgtgcaacctggcatgagtcttaggagaagtaccctaccttgcagctgtcatctgcctgga

SEQ ID NO: 804555 - DNA, 576 bp, Homo sapiens
acacatttttagaattgtgtagacttcataagtatgcaaaacaaaaacagctggtatcaagcaccacttgatcacctttaaattcagaaaacacacttgacaaaatgcgacaccccttcaggatgaaaacactcattaaataaggaatagaaagtacttccttgacctgataaagggcatctatgaaaaatccasagctaacatacacaaatgggccataaggacaaatggccaaaagatgtcaacatcattagccatcaggggaaatgtaaatcaaagccacagtgagataccacttcacacccgctaggatggctagaatcaaaaagacaggtaacagcaagtattaataatgttgtggaaaaattggaaccctcaaacactgctgatgggaatggaaatggtgcagcctctttggaaaacaagtctggcagttcttaaacagagttaccatgtgaaccagcagctctgcccttccaagagaagtaaaaacatatgtcagtataaaaacatgtacactaatgttcatggaacattattaataacagtcaaaaaatggaaaaaacctaaatttcc

SEQ ID NO: 804556 - DNA, 585 bp, Homo sapiens
ttcaattcagtttagtgaatatttaatgatgaagatgaggattaagaataggattacatcttgaaaagagactggatggcttcaaccatttaagctcagaccagtagaagacagaaatacttgggagagtgtggttatatggtgtagttgagaaagtttgggttttaaagttagaaatactggggttcttgttcctgctctacctcttcctagctgtgtgcttgtaggcaagacacttaacatctctgtatagtctctgaaggttctcaaggggttgaaatactaattttattaggtgatgagaawttaatgaaataatatgtgcaaagcgccaggcttttcgagtaagtattccataaatgcttttgagatttaacatgaagaaagaaaagactactactggaaatgttatgcccctcgtattatcccttttcatgctggtgataaagacatacctgagactgggtactttataaagaaaaagatttaacggagtcacagttctaagtgtctggggagacctcacaatcatggtggaaggggaaaggcatttcttatgtgctgacaggcaagagagagaatgag

SEQ ID NO: 804557 - DNA, 585 bp, Homo sapiens
ttcaattcagtttagtgaatatttaatgatgaagatgaggattaagaataggattacatcttgaaaagagactggatggcttcaaccatttaagctcagaccagtagaagacagaaatacttgggagagtgtggttatatggtgtagttgagaaagtttgggttttaaagttagaaatactggggttcttgttcctgctctacctcttcctagctgtgtgcttgtaggcaagacacttaacatctctgtatagtctctgaaggttctcaaggggttgaaatactaattttattaggtgatgagaaatwaatgaaataatatgtgcaaagcgccaggcttttcgagtaagtattccataaatgcttttgagatttaacatgaagaaagaaaagactactactggaaatgttatgcccctcgtattatcccttttcatgctggtgataaagacatacctgagactgggtactttataaagaaaaagatttaacggagtcacagttctaagtgtctggggagacctcacaatcatggtggaaggggaaaggcatttcttatgtgctgacaggcaagagagagaatgag

SEQ ID NO: 804558 - DNA, 600 bp, Homo sapiens
ctctcagcagtggtctgagatcagtccagctgatctactagggtcccagagagaaatatatctctctaagtccccggagcagggttgctgacctcagtcccacaaaaaaccctgaaatggctctgagactggctacagtccctctcaacggtggtcagaggtaagtcatgccagcagcactgagacaagatggagacgtgccttcctgagtcttccaggtagcactgctgagcttagtcccagctgtgggccctaaagcaaccctgcaactcagtttcagccttcttcaaccatagaccagggcagtaatgtttgcccaaggacccaaccagtgacscagtgggaagatgtcccagggacccagagaaaaacacaactgtctatgaacctagtaatcaagcctgctctctacagactgtaaagctgaccttcatcccagaactagccttgtagaccaaagtcctggagacagtccagtccatccagagaccaaacagcaggatccatgcccactaaaccacctggtaacaggctggccacccacaggccccactgcaaaaggagtagcagccacatgacccagctccaaccccattaaaa

SEQ ID NO: 804559 - DNA, 612 bp, Homo sapiens
catttcctgaaataaataaaacagagctgtacaaaatatacagtgcagccctttggaaaaagagatatcctagctcagggcaagccgtttgatggaaatagcattttctccaagcagatggggctggctccacttagtcctgcrgagggccagggggacttgtttgtgtgcagagccttggtctaatgccaggagagccagcttgtaaagttattcccatagggctcattcccgtctgcccagcatcacccctgacacaaacaaaacagccacgggcctccttcatttctttaagatgaatgaatgctgccgtaaagaaggacttttattgaactgtgtgacatgatgcagaaagaatgctgtagtgaaacacaaaactatatgttataaacgtcaacataagagaagtagtttggggtgcattttctgatgtctaccttactataagatgttttgacggataagttatagtagtaaaaggctgtctccatagtattggaaatacctgctggatttttctgaggtcgtcttggttgtaaggacagaaatacattcaggctagcacacagctgagacgttaagtgaaacataagctcacgcaaatctgagagt

SEQ ID NO: 804560 - DNA, 567 bp, Homo sapiens
tcaagaacacctgcattcggggactgggaacaagtgaagaagcccaagaagaacaaaagtaaggtgaagtcagaaagggagaaggcaaaccagaggagaacagggaaggaggccaaagggcagagggaggaagatgctgcagaggcctgaggccgaggttgagaaggcgccactgaattcggtgtctgggaggacatggctagtggaaaggctgcggcaggggcagggagtcaggagtggaaggaaaaggaggtgataacatctcttcagacaagtggtgaggaaargaaggacaaaggagcaaggggaggggatattctctgtccctctcaggcacaaggaagccctgtgatgtctgcaggctggactctgggctcagggatctgctggagaagaaaaaacatcaaatgccacagggcgagacttaactgatgaaataggtaccagaggaagtcagaggagggaggcgggagtgacaagggcaaagttcagcttctgaaagatggattatttttttccatgaaattagaaagaaagagaaagcgaattaagagaaagaaggtcttt

SEQ ID NO: 804561 - DNA, 567 bp, Homo sapiens
tcaagaacacctgcattcggggactgggaacaagtgaagaagcccaagaagaacaaaagtaaggtgaagtcagaaagggagaaggcaaaccagaggagaacagggaaggaggccaaagggcagagggaggaagatgctgcagaggcctgaggccgaggttgagaaggcgccactgaattcggtgtctgggaggacatggctagtggaaaggctgcggcaggggcagggagtcaggagtggaaggaaaaggaggtgataacatctcttcagacaagtggtgaggaaaggaaggacaaaggagcaaggggaggggatattctctgtccctctcaggcacaaggaagccctgtgatgtctgcaggctggactctgggctcagggatctgctggagaagaaaaaacatcaaatgccacagggcgagrcttaactgatgaaataggtaccagaggaagtcagaggagggaggcgggagtgacaagggcaaagttcagcttctgaaagatggattatttttttccatgaaattagaaagaaagagaaagcgaattaagagaaagaaggtcttt

SEQ ID NO: 804562 - DNA, 564 bp, Homo sapiens; identical to SEQ ID NO: 803861

SEQ ID NO: 804563 - DNA, 648 bp, Homo sapiens
tttgtaattttagtagagatgggatttcaccatgttggccagggtgctctcaaactcctggcctcaagtgacccaccctcctcagcctcccaaagtgctgagattacagggtgtgagccaccgcacccggccgttaacaacctccttttcacctgattactttctataaaagccctatcactaaagaaaggcacatttggaggtactgggagttagggcttaaacatatctttggggagtgtggagaaacaatcccactcaagacagtctcagcagagtgtgcagcatgcacaccatcatttatccctagagaagaaattttaactgattagattttctctcaaaaaaaaattttccccagcgactttaatgttaataatgtgcgtatatggttttatttctttgcaccatgtgaacaacttyccaaatacattattagtccaggaaaatgggatactccttttggaatgaggagtcaacaagagaaagaaaggttggctgatgaagggaagtcccatgcacatgcagagaggacagctggtgagcacggcctcttcagtgagagatgctgaaaagggtaagagggtgggcagagatttcaaggcttgtttcttcaacgctaaatgaacctggcagcccaacccacaa

SEQ ID NO: 804564 - DNA, 618 bp, Homo sapiens
ggggccatggatccctttgttgtctggtgtttactcctcaacaccttcctgagactaacattaatagaagcccctcaataaaaacttttttgttcaatgcatcaatagtacatactggcttgataagtaacatcttaaagaacacttcaaagaaagtaaagacagaaagcttctgaagtaacaaaagtaaatctggaaattttaaacattgggaacactatatctacaaaaatcaaaaactgtttcttgttgaatggattttggcacaaacagcatatgtaacaataatgggaggaataaactatttttggtttggaagcctgcattatatattttgagtgaaactgtagttttaacagattaatgtccaaaaaatctgcatttaaaaagatacgcattttgtcatctatagwgtcattctgcttgctgctttcttcaaattttatttttataacctccaagaagccttctgatttttaactaaataagatggggcaatcaaggaaaaaaatttaaataagcatgctattaaaaaactgattaacataaaaggcaatcaatctggcacaatcactagaaagcaatcacataactcattatgtacagccaaaaaatatc

SEQ ID NO: 804565 - DNA, 646 bp, Homo sapiens
agagcagtggttaaatatatgaagttttactttttagctaagtcaacttggacaaatgtcttaaccttttatataaaataacagtagtacttacgcactagtcttacaaagatgaaataatacctattaggcatctaatatagtgtcacacacttgtaggaattgctcaataaatactagttacacaatcaaatcctactgacaaaggaaaaagaccgacctgtaactgggaaggaggaaaactccttgagggtggagacttggttttccagtaaggaattcagagtacaaagtgatgtgtgagtttctaaaactacttacaggttttaaatcccaagtgcatttaaaaaaaaaagtccagcaaagtttattttaaaaatgtaaagacgaacatgtaaaaccatagggggaaaattctggtcctttcccaaatttcaatcataatttttatgtatttkgtctattttattttgccttactttgtaaatatggtcacaaaactaaacaattcaaaagttaccctttatgcttatcacttcaaacacttttaatggtagaaaaaattagaaaacaaagggaaaaccaaccaaaattttccaaaagagggtaataaattaagatgaagaccaggaaaacaccattcttc

SEQ ID NO: 804566 - DNA, 647 bp, Homo sapiens
taaacaattcaaaagttaccctttatgcttatcacttcaaacacttttaatggtagaaaaaattagaaaacaaagggaaaaccaaccaaaattttccaaaagagggtaataaattaagatgaagaccaggaaaacaccattcttcctaagagtaagaatgtaccgtcctggcatatggtaggctatatactaggtatgttctctcctgcacgtccacagcaacagttgggagaacaggtagagggagggaaatgagctgcactcagcagaaatggttaatgcaccatgaaagaaaaagactctctgagttcctagtggattcttacctataggacaagacagagtaatggaattgactctttcaatgcactaatgataacccccaaaagccaactctgtctttagagttggcaatctagtaacratgcctagtacaaaacagagtactttccttgctgctctcctaagttttgcctagcatcatttagcaagactcttaggaaaaatcccttgctcaatctcctcacttactacaataagtagagcaattcaaagaatctccaatgaagcaaatcagtgtctacttcccatcttcattaagaaatcatgctgtgtccattgatgcttcaggaatcagtagcatggta

SEQ ID NO: 804567 - DNA, 533 bp, Homo sapiens
gactaggctcatgcactagtgcccaacaaagcaaaccaaaccaaaatggagttgctcatgctaagacgttaggggagcacatagcttctagaacacactgggttttgtttttttctcctgtaaatctttaacatttctgatagcataggtattagtatgtgsatctatttccatgggagacaccattcagccggcctacagtctcactctcatatgggaccatgcagaccttgctaactattttctgagctccaacaaagatcagactgctcctcagtacaacattctgggcagccactgtcaattggctttgaaggtgaaatcagttccctatccataggatgatgtaggttaaagcaaactaaatgtggccagagaaggactcttctatatttgagtccttgtggatgaactgtaacctagcttaatagacaaaattgaaaacctaacttaatagtatgtacccataataatagctgagtgttggccaatcccagcagccatatttcaaccactcatagactgctgagtat

SEQ ID NO: 804568 - DNA, 552 bp, Homo sapiens
cggttggtttggtgtggttgaaggaatatgtgtagtgctgtttttttttatttttcacttggcttcttccaaaataactctgtaaatatatattattgtgatcattttaaagataaagaaaaccattttaaagataaagaaaaaaatgagacttggacattaaatgctttgctcaaggttggaaagcagcttaagkggtggagctaaggtttgaatccaggtctgttgccttcaaagcccatggtctttttaaacatcgatctgcacttcttcacgggcacagccagtttttgtctcccatttgtggagcacagcaatgtgctcatgttagcagttggtacctcatacatgtccccatagatttcaaatagtccttgtgcagagacttaataaaatggagatggcagctctgctctttctgagcttccttccttccaacacataaacacaacacaacaaatgaatattaaaatgggaatataaataacatgatacaatgtgaaacttaggggtgaggtaatgtaaagcaatgaatgaatcagaaacaaagct

SEQ ID NO: 804569 - DNA, 612 bp, Homo sapiens
gcaacactgaccccgcctggatccgaggctgccagcgagcagctgagctaatgctggctgtttatttggggcgatgaagcgacccaggtgctgttttgctattgccaagcctgggctagagcactagcgagaaaacaggattccattgttgaggtatcagtgtttccatcatgacagaggtccttgctctaacagcaacagaaacaagtaaataactttgctcagttattttctcagactttgcgaagggtcatattgatgtatgtctgtttccttagttgttccgtgtaggctgttgttgactctcgtatgaaagcccacgcgatccaagtgccctgcaggttttggtccagggaaaagttggtctctgcagatgactgtaaatgactacctggaggtcgattaaagtgcggtactgcgggattcarccgatttccttcttcctctgactgcccggaaatatcagccaaaggccagcggtagtaattaacacaattacctgcctatgatttctgtcctatttaagatgggttctattatgtttttatctatacttgtcttcattaacttttcgtgatatcataagccccccgaatccctcgaaagtagatg

SEQ ID NO: 804570 - DNA, 616 bp, Homo sapiens
taacgtccatccctgccaccaaggccactttgttcatgggcctattgggtgttgacaggggtggatggggaaagaggctgagtagtgtccatagaatgagtcatcctatccactttattaaaatccccctttgctgaggtcaccctttggtgagcacccacaggagacacaaatatcttcacagtttttgaccacttagagaggcccatccacatacctcttccccaaatttctttgtcaccaattttccaatcatgcttcttccaagtccctgaccatccagccaaaccattggctacagtccttgaatcagcatatcatcacacatctggycgtttctccttccatgcaaagtgcacaatgaggttcgctgctcgaagttctgcccaatgggaagatttcccttcactgctgtccttcagggatgtcctagaaaggggctgtagtgctgcagctgtccacttcaggtggtgcccgcatatcatgcagaaccatctgcgaaccaggccctagtcttctcttcatctgtcacctcagcattgggaactccccatgaggccactggtgtaggctagtggggagaaggcagggtggcaggattggggaccatgggcat

SEQ ID NO: 804571 - DNA, 631 bp, Homo sapiens
aaactacaagacagatgagccagtgtttttcaacacagaaattgtaaaaataaaaagcatgagagaagaggaactctatggattaaaaaagaaacataccagcagggcatgrgacgggctccggtagtaccagctactcagcctgggcaacatattatagcaagaccctatctaaaaagcaaaaacatatatgccaattgaagtttgtgggtcttattacaatgctgattcaattacagagagagtaaaatatatatatttttaaattaaaaaaatatttggagacaggttctcattctttcatccagcctcccaagtagctgggactacaggtgtgtgtaactgcatccagcttagttttaaaaattttttgtggagcgagggtctcaccttgtccaggcctgtctcaaactcctggctttaagcaatcctcccaccttggcttcccaaagtgctggaattacaattacaggcataagccactgtgcccagccagtaaaaatatttttgaagcaattaaagagatgtgagcactcactgggtatttaatgatattaatgaattctgtaagtatttagcagggctaatcgaattatgattatattttacaaagatacatgttgaaatatgt

SEQ ID NO: 804572 - DNA, 631 bp, Homo sapiens
aaactacaagacagatgagccagtgtttttcaacacagaaattgtaaaaataaaaagcatgagagaagaggaactctatggattaaaaaagaaacataccagcagggcatgggacgggctccggtagtaccagctactcagcctgggcaacatattatagcaagaccctatctaaaaagcaaaaacatatatgccaattgaagtttgtgggtcttattacaatgctgattcaattacagagagagtaaaatatatatatttttaaattaaaaaaatatttggagacaggttctcattctttcatccagcctcccaagtagctgggactacaggtgtgtgtaactgcatccagcttagttttaaaaattttttgtggagcgagggtctcaccttgtccaggcckgtctcaaactcctggctttaagcaatcctcccaccttggcttcccaaagtgctggaattacaattacaggcataagccactgtgcccagccagtaaaaatatttttgaagcaattaaagagatgtgagcactcactgggtatttaatgatattaatgaattctgtaagtatttagcagggctaatcgaattatgattatattttacaaagatacatgttgaaatatgt

SEQ ID NO: 804573 - DNA, 607 bp, Homo sapiens
ctcagtttccttatttgtaaaaaagtaggattataaaaatgggacttaactcatagaattattatattgcttaaatgaaataacatataagtgataattagcaccgtacctactacattcagttaatattagctgctatgattattatttctaaacctagcaaaaatataaataatctggtgtgaacacacagcttgatttccctgtgatgttttcatgctaataaaatactcttatgtaggcatttcaatttatrgacctgcactcttcttgatgctattttttattcaatttacatataatttttgcacatatttctttgttcagcttactgctagttttttataggtctgcttttagtttttaaaattactgttagaacaatgtatttttaaagttttctacctggtttaaataacaaaaatatcagatcctttattacatatagtactttattaaatgagtacataattcacattaaaatatgtacatatgtaatagacatttgacaatttacactctcctataatgctgctaattcacaatatgatcaaactcactcaatggaatactgaaaatgtaaaataaaaatgtcagaaaagtgcac

SEQ ID NO: 804574 - DNA, 676 bp, Homo sapiens
gtaagctagtcactgaatttggacgcaactgaatccagtcctgctgctctgaaagtgaaatcagggctactatgagagcatgtaacatttatactaatacttgaaagaagttgaaagatgagtcattgtgagttcagtacgggaaaggaaaagaggctctgacaaggagctttgcatgtatgaacagccaaacgcagccactttggctgggccataatgagggtatttaagagagattccagatcaggctggtagatcctacaaggtattkatcaagttaaatattttggtttcttactgtattttgtttctgtcactggcagttcctggttgctagtgagagaagccaacacacacagccaaaaaaccccccaaaacagtattataggttactagagtgattcagtaactgtccccagtattagctagaattaggggatgaaatatttagagctctttttgtctcctagttttgcctttctctacattttggcttcagttttctcccacccatgtttctcattctgtacaccagctttctcagcctctctggtctgcatgacagaaaacatggctcttgcatgtaacatactgttgcatgtaacagtttataaacaatttacagtttaaaaacctaaacaaactggtaaactcactttctgttccaagcccaaaa

SEQ ID NO: 804575 - DNA, 607 bp, Homo sapiens
gaatactatgcagccataaaaaaggatgagttcacgtcctttgtagggacatgaatgaagctggaaaccatcattctcagcaaactatctcaaggatggaaaaccaaacacggcatgttctcactcataggtgggaattwaacaatgagaactcttggacagaggaagggaacatcacacaccggggcctgtcgtgcggttgagggaagggggagggataacattaggagatgtatctaatgtaaatgacatgttaatgggtgcagcacaccaacatggcacaggtatacatatgtaacaagcctgcacgttgtgcacatgtaccctagaacttaaagtataataacaaaaaataaaaaaaagataatgtatttaaacccaaaaaactataggtagttttcagcctggtgcctatgatattctcagagtttattaaatcgttgtctttctcctatatactcacatcacccatgtacagatatttctatagagagtacagtatcttaatatttagttctaattattcagttgtgagtagggcaaggccccctgagatcttctaaagaaggtaattgacactttcataaaatgtcaaaccaagaaacag

SEQ ID NO: 804576 - DNA, 607 bp, Homo sapiens
gaatactatgcagccataaaaaaggatgagttcacgtcctttgtagggacatgaatgaagctggaaaccatcattctcagcaaactatctcaaggatggaaaaccaaacacggcatgttctcactcataggtgggaatttaacaatgagractcttggacagaggaagggaacatcacacaccggggcctgtcgtgcggttgagggaagggggagggataacattaggagatgtatctaatgtaaatgacatgttaatgggtgcagcacaccaacatggcacaggtatacatatgtaacaagcctgcacgttgtgcacatgtaccctagaacttaaagtataataacaaaaaataaaaaaaagataatgtatttaaacccaaaaaactataggtagttttcagcctggtgcctatgatattctcagagtttattaaatcgttgtctttctcctatatactcacatcacccatgtacagatatttctatagagagtacagtatcttaatatttagttctaattattcagttgtgagtagggcaaggccccctgagatcttctaaagaaggtaattgacactttcataaaatgtcaaaccaagaaacag

SEQ ID NO: 804577 - DNA, 627 bp, Homo sapiens
cacaatggaaaactattcagtcttacacaagaaagcaatttgtcatttgcaacaacattctagaacattatgctaagtgaaataacctagtcacagaacgataaatactgaatgttatcatttgtacgtggactctaaaacaattgaaatcatagcagcagagaatacaatggtggttcccagaggcttgtgggtggagagagttggaagatgatgaccaaagaatacaaagtcttatacaagaatactaaattagtagggtttttttttaagatgtattacacagcatagtgaatacagtcamtaatagtgtactgcacatttcaaaattgctggtagtaaatttcaaaagttcccaccacaaaaatataaatatttgagctaatgcctacgttcattatttttttatttaagttatctacattgtattcttaaaacatagtatcagtttataccccataaacatggagaaggataatttttcagtttaccataaaaaagaagaaaaatcatgagatcttatcaatatttgcaaaaaaaaattttttaataaaaaactaatgattaaacttcttatcaaactggaaacagacattttctcaatttgttaaattgctagtatggaaa

SEQ ID NO: 804578 - DNA, 603 bp, Homo sapiens
aaacatagtatcagtttataccccataaacatggagaaggataatttttcagtttaccataaaaaagaagaaaaatcatgagatcttatcaatattwgcaaaaaaaaattttttaataaaaaactaatgattaaacttcttatcaaactggaaacagacattttctcaatttgttaaattgctagtatggaaaacctctggctaacctcataattaatgtggaaatagtaattatatttttctaagattgagaacaaggtaaggatgtccactctgatcaatattatactagagctttttgacaatgaagaatgcaatagaagaaaacaaaaggcatgtaaaggattgttatcaggcatgtaaaatgaactcctacaactcagcaataataattaggatacctaatccaataaaaatatacaaatattttgagcagaaacctcacaaaagatgatatacaaatagtgaacaaataaaatgctatttcacagcattagtcatgaacaaaatcaaatttttcactaaaaaatggcaacaatacacacccaattaaaatgtctaaaattaaaagactgacagcatcaaatattagagatgacatgg

SEQ ID NO: 804579 - DNA, 533 bp, Homo sapiens
ctattcttctggtctaattgaggctttatctcctttaaccatcatcttcccatttcccccacccgtcagcctcttgtaagcactattctactctctgctgttatgagttaaattattgtagatttcattaagtgagaacatgtaakattagtctttctgtgcctggattactccacttagaataacggttaccaatcccatccatgttatcacaagtgacagaaatatattcttttttaaggccaaataaaatttcatcattgtacatataccacattttctgtattcattcttctgttgatggacacttaggttgactccataacgtgtctattgcaaatagtgctgcaatgaacatgggagtgcagacatatctttcacacagtgatttcaaatcttttgagtaattgtccagaagtaggagtgctggatcatatcataattcattttcagttttttgacgaacttccatacagctttttataatagctgcactaattacatttccaccaataatgtacaacagtttcctt

SEQ ID NO: 804580 - DNA, 647 bp, Homo sapiens
tgctcatgtctttttaagcttctcttggctatgagactttcttatatgggccttatttttgatactttgtaagtttagtggagtactaatcagatattgtatcaaatgcccatcaattaaaatttttcttaatttttttaatttttacaatggggtagtgtatgtggggaaggaaatacatgtaagttatgaagattgtgggcctagactctttatattattatcaccttatgtctgcaggatcagaagtgatgaccactctcttattttggttattggtaatttgtttcttctctttttcttgtattgcctagctatagatttagtaccttcactgatatattcaaagaaccatttttgtttcatttatctattaatttcttgttttcgattccattgatttctgatcattttttaytgtaaattgaaaatatatagttgaatatactaatgggttaaaaagtgatgtcattattaatgaatacaatgtagaattcttaagtcaagctaattaacaaatccatcacttcaaatatttattattttttgtggtaagtacatttgaaattaactcagtcatttagaaatatgcaaaacacttgttccttggtatctgaaagggattggctccaggatccctggcagat

SEQ ID NO: 804581 - DNA, 647 bp, Homo sapiens
tgctcatgtctttttaagcttctcttggctatgagactttcttatatgggccttatttttgatactttgtaagtttagtggagtactaatcagatattgtatcaaatgcccatcaattaaaatttttcttaatttttttaatttttacaatggggtagtgtatgtggggaaggaaatacatgtaagttatgaagattgtgggcctagactctttatattattatcaccttatgtctgcaggatcagaagtgatgaccactctcttattttggttattggtaatttgtttcttctctttttcttgtattgcctagctatagatttagtaccttcactgatatattcaaagaaccatttttgtttcatttatctattaatttcttgttttcgattccattgatttctgatcattttttattgtaaattgaaaatatatagttgaatatactaatgggttaaaaagygatgtcattattaatgaatacaatgtagaattcttaagtcaagctaattaacaaatccatcacttcaaatatttattattttttgtggtaagtacatttgaaattaactcagtcatttagaaatatgcaaaacacttgttccttggtatctgaaagggattggctccaggatccctggcagat

SEQ ID NO: 804582 - DNA, 587 bp, Homo sapiens
taaagagactggagattaaggcaagaatcctgactggtggagaagaagtggatgggcccaggcagtttctatagggtgctccttgatttggggttgtgagtgggtgggcatctatacacttccaagacaaggcaaagaaatgggcctccaggtagtattgggatccttaaattctcttttccaagcacctctgcccrggtactctcctggtgccccctcccaaggggagagccccggtctccttccttctcctctagggcgtcatctttcctctgttctcagcctccggaggagcctttggtcttgcccctgacacccaccgggcccaatggggtggcctctcacatgctctcccagattcactgatgtctttcctctaggtagagtcccagagaagctcagataccaaaggggcagctactgacctgtgtccaggggcactggatgggagctgggggcttctccttccccagcagggcagggaatgcagtggaaagcccagaagctggagcctgactctgggctgggtaatccggagctcaggttactgactccgatatatatagtatcttatctgacctcgcaga

SEQ ID NO: 804583 - DNA, 571 bp, Homo sapiens
taacccctagtaaccttaatttctagtgacaattcctttctagtggaaaggaagcacgtgattttgtaattttgatttttacaattttattcctttttatattttattttttgcctttattattagttttaattgacaaataataatcatatatatttatgggatacagtgtactattttgatacatgtttacaatgtaatcagggtaattagcatatccattacctcaagcatttatcatttctttgtgttgagaacattcaaaatctgctcctctagctattttaataatamaatcaattgttgttggttatagtcattctattgtgcaataaagcactaaaacttatttctcctgtctaactgtacttctgaatccattaacaaacctttggctattgccctatttccgctaccctccccagcctctagtaacaagtattctaatctctacttctacaggatcaatgtttttagcttccacatatgaatgataacagtgttacttatctttctgtgcctggcttattttacctaacataatgtcctccaagctcatctatgttgccac

SEQ ID NO: 804584 - DNA, 610 bp, Homo sapiens
catgaggtcaggagatcaagaccatcctggctaacatggtgaaaccccgtctctactaaaaatacaaaaaattagccgggcgcggtggcgggcgcctgtagtcccagctactccggaggctgaggcaggagaatggcgtgaacccgggaggcggaagttgcagtgagccgagatcgcgccactgcactctatcctgggtgacagagcaagagtctgtctcaaaaaacaatagcaacaacaacaacaacaaaaacctatatagatcacatagcaatawggaaaaacgatacgtcaagtgagtatactgtgtttatggctttgttaaaacgtggaaaatacaaaaaaaagggaacatgaaaaaatcaaagcagggaaaaggctaatacgttttctttcaatatatatttttaaagttttatcaaacaaaaatatagagaatttgtcacttgaaaaagctactgccagtaaattgtaccaagttttggtacaatagtagcaaatttgatttttaatttgtgttgtttttttttgataggagagctttaaattaatagttttttgagattctcacaattaattgcaattttcattaaatatctcaaagtaatta

SEQ ID NO: 804585 - DNA, 557 bp, Homo sapiens
atttaattgctatattctaataatggataaattttttttataaaaaattgttaaattacacggagatggttttcttctacttgtagtgcactgtaggaaaagactttttaaagaaatcctcttggattggggaattccacatcactgccccccatttcctgtcaaaatcaccagaacacttctcagtggaaagctgagaaaagttgtaagggaattttctctcacaaaattaagccagggtttccacaatgagtatctttagtcaccaaggatacaccattattatgcggtgaagacaaactgggtcttatggtggaagagaagcagcaagtgacttttgagtacaargagtgggggtacaggagtaacatgagatcagtgacagagacagcatcatcagaagtgctcaggttgaagacagagcaatgaagactcgaaagtccttgtcctcttgatgacattttaggaagaaaaggcagataccaaacaatattattaaataaaggcataaatggacacagagcatcagaaggtggttaagttttacggagaagaat

SEQ ID NO: 804586 - DNA, 535 bp, Homo sapiens
gagttgaccagattctggtgatagcctcaacaattttgctccacctacataattacttggcatgctaagatgacagatttaaagatctcccaggccagaagttctaatcctaatagcaagtaagcattgataagattcatccctcagatattatggtgttattatacacttgaggggcaacctaaggtaaacataactatcctgatttgcaaaaaaagaaagtgaatctcagagggattcttgtcttttcctacataacaaaggragtacatgacacagccaatctttttttttttttcttttactttaagctccagaatacatgtgcagaatgtgcaggtttgttacataggtatgcatgtgccatgctggtttgctgcacctatcaacacatcatctaggttttaagccctgcatgcattaggtatttgtcctaatgctctccctccccttgaccccaaccctgacaggccccaatgtgtgttgttcccttccctgtgtctatgtgttctcattgttcaagtcccacttatgc

SEQ ID NO: 804587 - DNA, 815 bp, Homo sapiens
cattgcataggatccttttcatcacagcgtatctctgaattagattttacctgattttattgaacacttactatatgtcagccactatttaggatacttatctgtattaactagcttaattatgacacaattatgacasgattctatgaggcacgcaaattaatatccttattttgcagattaggaaagtaaggccccaaaatttacatatagtaagcaacagagcgtaaaatcaagcagcctgtgctttccttcattttgttactttgcctttgagttctctagagtctattttaacacaaattctatgggtagtactaaaagcatgccacaaacatttgacagtgagaagtattctctgctctttgggatttgttttattttgttttttagtttcttcacagctttattctcagcacctagccccgtgcctaacagatggtggacactcagtaaatattgattgaatgaataaatgctgccatccccacagccagtatcactatactttaaaaaacaggctgtgaaattatctcttttttatattgcatcagtctgctattctgcagactccacattgatcattttccaggcagcatcttatttggtttcctctggcaggagctacaaaaagattaagagagggaggaacccaaggggaactcccagctgtcctatctaatgttctatctcagttcttcactggttgagagtttattatcattttaacaattatctgggacccacaagtaagaggtcggccacaggcaattcttaattgtgggagcagtgatgatgctttgcataagctgact

SEQ ID NO: 804588 - DNA, 500 bp, Homo sapiens
aaaaatgttttcatttctcttgagtatatatctaggagtgaaattgatgggtcatatggtaactctatgttgaactcattgggaaatcactaaactgttccacagaatctgtgccatattacattctcatcagcaaggtataaaggttccacattttccatatctttgctaaaacttgtttttatttgactttttaaaagtttacccattgtaggtgtgaaatggtacccatttcagtttaratttgcatttatttttcagataatgatttttaccatcttttcatatgtttcttggccagttttgtatcttttttggagaagtatctattcagatcattttcccatttttgattattattctgataataggtttttatatcttctgggtacaagtcacttatcagatatataatttgtaaatatttcccttcattctgttttgtcttttcactttcttaatggtattctttaaatcacaaaagatcttaattttgagga

SEQ ID NO: 804589 - DNA, 624 bp, Homo sapiens
acccgctgctggcttccatcccttcggatccggcagggtgtctgctgcattcctgatccagcgaggtgcccattgccactcccgatcgggctaaagacttgccactgttcctgcatggctaagtgcctgggttcgttctaatcaagctgaacaccagtcattgggttccacagttttcttcggtgacccacggcttctaatagagctataacactcaccgcatggcccaagattccattccttggaatccgtaaggccaagaaccccaggtcagagaaaacgaggcttgccaccatcttggaagcggcctgctgccattttggaagtggcccwccaccatcttgggagctctgggagcaaggacccccggtaacagtacaaactcacattctaaggtcacacctcaaggaactagggaaaccaaaccaaaacccagcagaagaaaggaaataaccaagatcagagcagaactaaatgaacttcaaacaaagaaaaaaatcacaaaagacaaatgaaacaaaaagctggttattttaaaagagaaataaaattgatagaccattagcaagtttaataatgaaaagaaaagagaaaatccaaataacctcactaagaaacaaaaca

SEQ ID NO: 804590 - DNA, 523 bp, Homo sapiens
ttgatcaactgaaagaaagggtatcagtgattgaagatcaaatgaatgaaatgaagtgagaagagaagtttagaggaaaaagagtaaaaagaaatgaacaaagcctccaagaaatatgggactatgtgaaaagactaaatctacgtctgattggtgtacctgaaagtgacagggagaatggaaccaagttggaaaacactcttcaggatattatccaggagaacctccccaaccaagcaaggcaggccaacattcaaattcaggaaatacagagaacrccacaaagatactccacgagaagagcaactccaagagacataattgtcagattcaccaaagttgaaatgaaggaaaaaatgttaagggcagacagagagaaaggtcagattacctacaaagggaagcccctcagactacagcagaaattctacaagccagaagagagcaggggccaatattcaacattcttaaataaaagaattttcaacccagaatttcatatccagccaaacgaagcttcaaa

SEQ ID NO: 804591 - DNA, 531 bp, Homo sapiens
aaaatagtgacacaacctatcaatcaaaatggctgggatccagcgaagacggtgctaagaggaaagttcatagccttaaacgcctacatcaaagagtccgaaagagcaccaacagacaatctaacgtcattcctcaaggaactagagaaacaagaataaaccaaacccaaatgcagcagaacaaaagaaccaagatcagagcagaactaaatgaaattgaaacaaaaaatctacaaaagctaaataaaacaaaaagctgrttttttgaaaagataaataaacattgataggccattggcaagattaatcaagaaaagcagatagaaaacctaaataagcacaattagaagcaaaagatcattcaaggctactatgaacacctttaagtgcataaactacaaaacctaaaggaaatggataaattcctggaaacatacaatccccctagcctaaagcaggaagaattagaaaccctgaaccgaccaataagaagcagtgagattgaagtggtaataaaaatattaccaacaa

SEQ ID NO: 804592 - DNA, 664 bp, Homo sapiens
acaacctatcaatcaaaatggctgggatccagcgaagacggtgctaagaggaaagttcatagccttaaacgcctacatcaaagagtccgaaagagcaccaacagacaatctaacgtcattcctcaaggaactagagaaacaagaataaaccaaacccaaatgcagcagaacaaaagaaccaagatcagagcagaactaaatgaaattgaaacaaaaaatctacaaaagctaaataaaacaaaaagctgattttttgaaaagataaataaacattgataggccattggcaagattaatcaagaaaagcagatagaaaacctaaataagcacaattagaagcaaaagatcattcaaggctactatgaacacctttaagtgcataaactacaaaacctaaaggaaatggataaattcctggaaacatacaatccccctagcctaaagcaggaagaattagaaaccctgaaccgaccaataagaagcagtgagaytgaagtggtaataaaaatattaccaacaaaaaacttccaggaccagatggattcacagctgaattccgtgaaacattcaaaaaagaattgataagaatcctattgatgttattccacaagacagagagagaatcctccctaagtcattctatgaagtcagtatcaccctaata

SEQ ID NO: 804593 - DNA, 600 bp, Homo sapiens
gagaatcaaatcatcacatcaagaacccaaccccttttacagtagctggaaagataaaaaataaaatacttaggaatatgcctaatcaaggacatgaaagacctctacaaggaaaactacaaaacgctgcttaaagaaatcatagatgacacacacaaatggaaacacatcccatgctcatggatgggtagaatcaatattgtgaaaataaccatattgccaaaagcaatctagaaattcaatgcacttcaaataaaaatactgccatcattcttcatataacttgaaaaaaaatcctaaaatttatatgaaaccaaaaaagagcccacatagccaaagcaagactaagcaaaaagaacaaatctggaggcatcacatcacctgacttcaaactatactataaggccacagtcaccaaaaaagcatggtactgatataaaaataggcatgtagaccaatggaacagaatagggaacccagaaataaamccaaatacttaaagacaactcatctttgacaaagcaaacaaaaacataaagtggggaaaggacaccctattcaacaaatggtgctgagataattggtgaactacatgtagga

SEQ ID NO: 804594 - DNA, 567 bp, Homo sapiens
aaatggtgctgagataattggtgaactacatgtaggagaatgaaactggatcctcatctctgtttttttttttttttttttttttgagatggagtctcactctgtcacccaggctagagtgcagtggcactatctyggctcactgcaacctccgcctcctgggttcaagcgattcttctgcctcagcctcccaagtagctgggactacaggcacgtgccaccaggcccgactaattttttgtatttttagtagagacagggttttaccatattggccaggctggtctcgaactcctgacctcgtgatctgcctgccttggcctcccaaagtgctgggattacaggcatgagccaccatgcccagcctcctcatctcttaccttatacaaaaatcaactgaagatggattaaggacttaaatctaagacctgaaactacaaaaattctagaagataacatcggaaaaaccctctagacaatacttaggcaaagacttcatgaccaagaacccaaaagtaaatgcagcaaaaacaaagataaataggtgggacttaattaaaccaaaga

SEQ ID NO: 804595 - DNA, 630 bp, Homo sapiens
tggatttctttaaatgtttggcttgtatagttcttttttttttcttttttttttttcttgagacaggatctcactctgttgtccaacctggaatgcggtggtgtgatcttgactcactgcatccttgatcttactatagcctcgacctcccaggcacaagcaatcctcctgcctcagctgctggagtaacagggactacaggcctgtgccaccatgcccagctaatttttgtattttttgtagagatagagttttgctatgttgcccaggctgttctcaaactcctgagctcaagcaatccacrccacctcagcctcccaaagtgctgggattacaggtgtgagccaccacacccagccagatagttcttaatatactctaggtattggtcctttttataatatatagtttgcaaatattttccccattctatagctgggttttttaccctcttaagatctttcacagagcaaaagatgaaattttgatcaggtttaatttattgatttttaatggatcataattttggtatcaagtataataactgcccacttagtattgactcctgaagatttactccaattaatttttaaataagtttaatgttttgcatttaagttcatgatatat

SEQ ID NO: 804596 - DNA, 716 bp, Homo sapiens
ctagagccaaactgcctgactttggatcctgactcctgtttacgcctaccagcccgtgcctgttccccatctgtgaagtggggatattaagagtacctacttcatagggccgatatgaagaagacataatacttacaacacacttagaaaaatgcctagcacatgtttgctaaatgtaacaaaaattgttattttgacatgtggaaccctagacttatttccaagtattgggatggaactagagattaaaggttgaactttatgaactataaaatctcttccaatcctgagttcttatgcttctatgaggataatcaacacttttctagattcrtttccatacagttctgattctcacatctggaaattcatttctatgtaacagccagatacttaaaggtttaagcaaaggaattatgattgaatgtttgttattcatactaaaatgatcattagaatcctttaatgaaacttttacctttttggatatgtgttaagaaaatgtcaggtacaaacagctaagaaacagtattaaccaatgtaaaaataaggagttacttgaaagtcaaaagtgatctttcaactatttgagaaatgagatgtcaggaatcctgatgtcaagttggagccccacttctaattaactgtgaaactttttaaatcccttgtcctctctgcctgtttctcatctgtaaaataatcacagcaggtttctt

SEQ ID NO: 804597 - DNA, 628 bp, Homo sapiens
cagtgcaacacactcccgtgaaagcattcagacaaatacagaaagcctaaactcattacaggttattttttgatgatcagtgtgttaggaggattactcagtacaggtcattaattttcagaaatgtccagtcccagagtcccttaatggaaactggaaatttagaacccaaagcytttctctttggtggggactgagagggtgttttccgctctgcgctcagaagttttttctgagtgtttcctttcaaatttggtacctgagttctactttgacctcttcccccagcccacgggagaaagctgaaccctctctgaatataaaaccctacctaagaactggtagaagacaccagggcatgggaactccagggccaaagcagaagttgaagctctcaggttaaatccatggtgtgagctgtgactcaccaggcaatggatcacaagacagaaagttcccactctgttgtcgagttcttattcaagaggatgaaaactcccagtccttaaagaagaggaacagccatcactatttttgaacattcactgtgtgctaagtgccgtacaaacatatctcattgaatcccggagcgaagcttctgagaaaggtatactatagccatgttaca

SEQ ID NO: 804598 - DNA, 628 bp, Homo sapiens
cagtgcaacacactcccgtgaaagcattcagacaaatacagaaagcctaaactcattacaggttattttttgatgatcagtgtgttaggaggattactcagtacaggtcattaattttcagaaatgtccagtcccagagtcccttaatggaaactggaaatttagaacccaaagcctttctctttggtggggactgagagggtgttttccgctctgcgctcagaagttttttctgagtgtttcctttcaaatttggtacctgagttctactttgacctcttcccccagcccacgggagaaagctgaaccctctctgratataaaaccctacctaagaactggtagaagacaccagggcatgggaactccagggccaaagcagaagttgaagctctcaggttaaatccatggtgtgagctgtgactcaccaggcaatggatcacaagacagaaagttcccactctgttgtcgagttcttattcaagaggatgaaaactcccagtccttaaagaagaggaacagccatcactatttttgaacattcactgtgtgctaagtgccgtacaaacatatctcattgaatcccggagcgaagcttctgagaaaggtatactatagccatgttaca

SEQ ID NO: 804599 - DNA, 628 bp, Homo sapiens
cagtgcaacacactcccgtgaaagcattcagacaaatacagaaagcctaaactcattacaggttattttttgatgatcagtgtgttaggaggattactcagtacaggtcattaattttcagaaatgtccagtcccagagtcccttaatggaaactggaaatttagaacccaaagcctttctctttggtggggactgagagggtgttttccgctctgcgctcagaagttttttctgagtgtttcctttcaaatttggtacctgagttctactttgacctcttcccccagcccacgggagaaagctgaaccctctctgaatayaaaaccctacctaagaactggtagaagacaccagggcatgggaactccagggccaaagcagaagttgaagctctcaggttaaatccatggtgtgagctgtgactcaccaggcaatggatcacaagacagaaagttcccactctgttgtcgagttcttattcaagaggatgaaaactcccagtccttaaagaagaggaacagccatcactatttttgaacattcactgtgtgctaagtgccgtacaaacatatctcattgaatcccggagcgaagcttctgagaaaggtatactatagccatgttaca

SEQ ID NO: 804600 - DNA, 628 bp, Homo sapiens
cagtgcaacacactcccgtgaaagcattcagacaaatacagaaagcctaaactcattacaggttattttttgatgatcagtgtgttaggaggattactcagtacaggtcattaattttcagaaatgtccagtcccagagtcccttaatggaaactggaaatttagaacccaaagcctttctctttggtggggactgagagggtgttttccgctctgcgctcagaagttttttctgagtgtttcctttcaaatttggtacctgagttctactttgacctcttcccccagcccacgggagaaagctgaaccctctctgaatataaaaccctacctaagaactggtagaagacaccagggcatgggaactccagggccaaagcagaagttgaagctctcaggttaaatccatggtgtgagctgtgactcaccaggcaatggatcacaagacagaaagttcccactctgttgtcgagttcttattcaagaggaygaaaactcccagtccttaaagaagaggaacagccatcactatttttgaacattcactgtgtgctaagtgccgtacaaacatatctcattgaatcccggagcgaagcttctgagaaaggtatactatagccatgttaca

SEQ ID NO: 804601 - DNA, 623 bp, Homo sapiens
ttccccttcagcaggcttggaatgtggggatgactatccccattttcacatatggcaaaggcccaagccacacagctggtaagttgagatttggaatctggacccatctgcatccaaactttttccattagaaaccctgtctcccatgagccaggctttgaaggttgggtgggattgaatagatagagagaggggagccataaacaagagtgtgtgtaaggaagataatgagcaaagaccctactgtgtggtggggcattgagcccaccagtgtggaaagaagaaagcagcatgctctaggggagcatagcctgcagtgctgggctccttgctgggtagaggctggagcctctggaacctgcctgtgctgactgccattccctgccctctcctcagaacctcttctcacacccaggagcctctgattgctttcctggccttgtgtcggaggctggctaggctggcatctgtctcccaagaagacytagtaaatccttagtggtaataggaatgacagcaacaccatcccgcatctgtagaatacttttccacctacacggtctttatgcttgaaaccagaaacaaaccacgaagaaagacatcatgatgggtaggcaacgtcc

SEQ ID NO: 804602 - DNA, 537 bp, Homo sapiens
ttaattacataactattgtgtcatttagagcctgctggtcaggggccacagtgcctgactgacaacctcatggaacaagtgtaagcaactgcaaaacattgtcaggtgatgagggtgcacgggtggaacagagcagggactcagtgagatatggtgggagctgcagatacgctgttggagggacgagtggtccatcaggtgtttgctcctggaatggcccatctcaatcagatttttccaccaaagttttgtttctcttctggaaggttggcttataggcctacagagggctttgcagaggacaggrgcatccagagagactcttagtgttcaagaaggagttgtcacaatttggtcctcatccccaaagtctggcttgggcaagaataggaaaacttgtcatgggcagtaggatgaatgtagaagtcctcagtcttctggatttgcctctctttttcctattcagttgcagccattttttaattaagttattaatatgtcctaggcattgcacaaatgagatggtacatgcaccat

SEQ ID NO: 804603 - DNA, 606 bp, Homo sapiens
gccttaacattatgaagtgccgaattacatgttttagggtgctcagcggccagaggattgggttcatttggcttattgtgtagctgagaaggtgtctcactgtgggaaagagttctaaggtctatttctttttttcttttatttatttatttatttatttatttatttatttatttattttgagatggagtcttgctctgtgacccaggctggagtgcagtggcatgatctcagctcactgcaacctgtgcctcctgggtttaagacattctcctgcctcagcctcccaagtagctgggattacaggcacgcaccaccatgcctggctaatttttgtatttttagtagagacggggttttaccatgttggccaggctgttctcgaactcctgacctcaggtgttccacccacctcggcctcccaaagtgctgggattacaggcgcragccaatgcacccggccctaaggtctgtttcttaagctaaagagtaggaaaagactgatggacagagagggagctgaactttaagcttggcatcatttgaaaagctggagttctggtaaatgggagagtagctactttatgtgaattttaggttcaattt

SEQ ID NO: 804604 - DNA, 573 bp, Homo sapiens
  misc_feature 1, 2, 3, 4, 5, 6, 7, 8, 9, 10, 11, 12, 13, 14, 15, 16, 17,18, 19, 20, 21: n = A,T,C or G
nnnnnnnnnnnnnnnnnnnnnaagattagtcattaatgtgaagatttaacagaatgtgccgccatctctgaagaaaattccagcagaggaattctgcaaatgtttccagcaggtgtatcatctttgcaataagagtataactcctcaagtactttaaaagataaagtattgaatagtaaacataatgaagatcctcattattcagagttcacatttataatttacattcttttttttagatggatttttgctcttgtcaccaaggctagagtgcaacggtgcgatctctgctcattgcaacctccacctcccgagttcaagcaattcttgtgcctcagcctcccgagtagctgagattataggcatgtgccaccacatccagctaattattttgtactttkggtagagatgaggtttcaccatgtcgatcaggctggtctcaaactcctgacctgaggctagggacaaagccagcaaaagatgcatggcaaacaatccccataggtgacatagggcaggaataattcctgtagccaccagttggaggggcaagcctcataattcatggcgcac

SEQ ID NO: 804605 - DNA, 602 bp, Homo sapiens
atattggcataacattcttatgcagtatgtaagtggtattctatcacctaaagatagattgaggtaaattgttgtatgtactacaaactctaaagcaaccaccaaaacaacacaaaaagctattagtaatagctaataaaccaacagaagagatcaaaaggaatcataaaatatagtcaatcaaaaagaaggcagaaaaggagggaaagggaacaaagaacagatgggacaaatggaaaataaaagcaagatcatacagatttaaacacaaatgtatcaataatcatataaaatgtacatattctaaatatcacaattaaaaagcagagattctcatattggataaaaaagcaagtccaagtctttgctkcctaatgatacccactttacaaacatatttaaataggttaaaaattagaagggtggaaaaaatataccatgttaacattagtcaaaagaagaccaatgtggctattttaatatcagataaagtaaatttcagggcaaagaatattaccaaggataaaagcagtcaaatttgtcaagggaatatgacaatcctaaatgtttatataactaatagtagaccttgaagatacatg

SEQ ID NO: 804606 - DNA, 455 bp, Homo sapiens
acatctatataagacattaacagaggaaaaaaaaagctattctttcctgtgctctcttgtaagatggagaaaatatttctcagaagttttgcaaaatttatcttgtacctcacatgctcactcctgaaccaagctcatacttagggatatgccaggcccaraaaccgatattattcctccaatcagatgacttctacacaaagtgggggcatgaagtgggagtcaaggagacaacaaccattcccaaacacaccatcactgtaccaggattgtacagtacacttttaaaaacaactctgatacttttagctagagatgaaacttctttcttttgaaacctgcccaaaataacaaaaaggttataatgaagaagggagtaagaatcctaaatcacaatatagaaaatatctgtcaaacattatgaaatttgggtcaacataaaaaagggcattgaa

SEQ ID NO: 804607 - DNA, 623 bp, Homo sapiens
acttgagcaagccctaaagtcccctgctccctggacttctcctgggttgtgcttttttgggggcaacataccttggacaaagctgagctgacagctaatgtttattagcctcctacctaagtcagtcactttgctaaattcttcacctgtggtaactcattttgattgttataacatctcagcaccattattcccattttaatgatgaggaaactgagtcatagaggatacagacttgcccaaaggagagccaggattttcacaccccctcctcaagctgggcctgccctccaagtgcttgttatatacctccacgggtgtcagcccagatgactcctcacccatccaccacctgcagcttgagatgttaactattagagctccattcttktggttcaaaacgttgatacttacttagatgttccctgagaggagtgtttatttctgagtaaggggctttgttgaaagagggggttagagagagcaagacagcacttgagtgcactggcaggaagcagagataagacttgaatttcagtttggtagacctccttctttagcagcccaacctgtagcaaatctagtttagcctgcatggcagggagagggattctcttcccacc

SEQ ID NO: 804608 - DNA, 585 bp, Homo sapiens
ctcacccatccaccacctgcagcttgagatgttaactattagagctccattcttgtggttcaaaacgttgatacttacttagatgttccctgagaggagtgtttatttctgagtaaggggctttgttgaaagagggggttagagagagcaagacagcacttgagtgcactggcaggaagcagagataagacttgaatttcagtttggtagaccwccttctttagcagcccaacctgtagcaaatctagtttagcctgcatggcagggagagggattctcttcccaccctcaccatttgcaagtggcaggagctgagaatgccagtacgagagtgtagccaaagtgagaggctgagagcaaaggagacatttttttcagttttgagtcgagtatccagacagaggcaaatcattttgtttaactttttattaaagtgtaactatagaaacacatcaatgatttttcacaagtggagcacgtgcatacaatcgcaccccagaagccccccgtcagattcccttccagttaactacctctccaagggaaaccactatcctgagttctaagcgcatagattagttctgt

SEQ ID NO: 804609 - DNA, 587 bp, Homo sapiens
tgagtggagccaggatcttcccagttgccagggcagaatacagagtatcattccttcactgagcccacacccaactggtcactgtaggagacccctgtgccgcctttaatggctactgcacccatcccccagggagctgccttcggggaccacgcctaggagactgcattttccctcaccctgcagtggtctgcagccataactgacccatgtggaaggcactgcagcccaggctgctcgcctcgcacagcacaacctctgtggtgcagcagacctgctccaggtcttccctgaagyggatggaggctagacttctcccaaaccacaggggtgctgagctgccttgcatgctcgcctgctcctctcactcccacagggagttctgatgagaacctccctcttcaggcactcacctgagcaaccccatcccaggctctgcgtctagggagccccgacctaaggccgtcatggtctcacaacgctgcttcactgttttgcatctgccccacttggcatcccctccaccattgtctcatccaggccgcactcattcaccgagcccagaggtgcaaatagaaatagaacgc

SEQ ID NO: 804610 - DNA, 546 bp, Homo sapiens
gggcggtggtagggggaatggatccctgaacacaacctagaagctggaaggaaaacacagggaacccataaaaccccccataagagcagaccgagactttgctgtggaagattcctatcccaaagctaatagcatcagtgcacttgatttccatctcgttctcacagccttttatgaacatcactgaaaaggctgggcaagacgaaacctgtgaagaaggaagatctccatggctgcccttagcgtggaatgtgttcttcacacccttacaaacagctttcaagtrttcagcctgtggagttgaagcaggtactgttagatctgagctgatctgttttgggggcgtgtgtacttatgttgttctgccgaccctgaatgcaagaacacctgctctgatgtgtgcatcgtttgtagcaggcattgtcctttaatatctgagacatgtagcaaagcatcatctcatatcaggatgtgtccctgggtctttgtgaatgtctacacttggttcagccaagaggtttatttggaaagtgtcaacatgagctt

SEQ ID NO: 804611 - DNA, 490 bp, Homo sapiens
tccctatttaataaatgatgttgggaaaactggctatccataagcagaaaaccgaaactggaccccttccttacacctgatagaaaaatcaactcaagatggatcaaagacttaaacataagacccaggaccataaaaatcctrgaagaaaacctggccaataccattcaggacacaggcatgggcaaagacttaatgtctaaaacaccaaaagcaatggcaacaaaagccaaaattgacaaatcggatctaattaaactaaagagcgtctgcacagcaaaagaaactaccatcagagtgaacaggcaacctacagaatgggagaaaagttttgcaatctatccacttgacaaaaggctaatatccagaatcgacaaagaacttaaacaaatttacaagaaaaaaacagacaaacccatcaaaaagtgggcaaagtatatgaacagacatttctcttaaataaatttatgcagccaacagacatatgaaa

SEQ ID NO: 804612 - DNA, 571 bp, Homo sapiens
gggggcaattgtcagtaaatagttaaataaattattatgtagtcataatttttgttatattattatacctcaataaagctggaaaaaactggtggtgatagaggaaagtgcttatgttatactctgtgaagaagagaatacacaactctggccacattatggttacaactgtataaatttaatatatgcaaatgaacaagcattagaaaagcacttaaagaaagaaaytggcaaggtgcggtggctcacgcctgtaatcccagcactttgggaggccgaggcgggtgaatcacaaggtcaggagatcgagaggatcctggctaatatggtgaaaccgcgtctctactaacagtacaaaaaaaacaaaattagctgggtgtggtggcgggcgcctgtagtcccatctactcggtaggctgaggcgggagaatggcgtgaacccgggaggcggagcttgcagtgagccgagatcccgcccctgcactccagcctgggcaacagagcgagattccatctcaaaaaaaaaaaaaaaaaatgaaatccgttcaagtattaggatgatgggactgta

SEQ ID NO: 804613 - DNA, 571 bp, Homo sapiens
gggggcaattgtcagtaaatagttaaataaattattatgtagtcataatttttgttatattattatacctcaataaagctggaaaaaactggtggtgatagaggaaagtgcttatgttatactctgtgaagaagagaatacacaactctggccacattatggttacaactgtataaatttaatatatgcaaatgaacaagcattagaaaagcacttaaagaaagaaactggcaaggtgcggtggctcacgcctgtaatcccagcactttgggaggccgaggcgggtgaatcacaaggtcaggagatcgagaggatcctggctaatatggtgaaaccgcgtctctactaacagtacaaaaaaaacaaaattagctgggygtggtggcgggcgcctgtagtcccatctactcggtaggctgaggcgggagaatggcgtgaacccgggaggcggagcttgcagtgagccgagatcccgcccctgcactccagcctgggcaacagagcgagattccatctcaaaaaaaaaaaaaaaaaatgaaatccgttcaagtattaggatgatgggactgta

SEQ ID NO: 804614 - DNA, 609 bp, Homo sapiens
tttggtagactgatttattttcctttgggcatatatccagtagtgggattgctgggtggaatggtagttctattttcagttctttgagaaatctccaaactgcattctatagtggctgaactaacttgcatttccaccaagagtgtgtaagtgttcccttttcttttcctttttttttctttttttttttttcagacagagtctcactctgtcgcccaggctggagtgccgtggcgcaatcttggctcactgcaagctccgcctcccgggttcatgccattctcctgcctcagcctcccgagtagctgggactacaggcgcccgccaccatgcccggaagtgttcccttttctctgcagcctygtcaatatctgttattttttgtctttttaataatagctgttttgactgctgtgaggtggtcactgtggttttgatttgcatttctcttatggttagtgatgttgagcattttttcctatgtttgttggtcacttgtaagtcttcttttgagaagtgtttgttcatgtcctttgcccagtttttagtggggttatttgttttattctcattgatttgtttacattcctcatagattttggataaatg

SEQ ID NO: 804615 - DNA, 619 bp, Homo sapiens
gcaaattatttagaaaacaaatactttgcttataactgtgctagcagttgacaatttttatggtgatggccttcctcaaaattgcttttgctctgagaatgattccatgatacccaggggagggtctccaaaactgtttgctttatttgatccttactaagtctggctgacctggaaggtggtgggcatttctctctcctaggactggtgggagttaagttatattaaaactttagggtgaaggtatatggagcccaaggctgctgactgtcccagagttatctttgactttgtcttggctgtttccatctcctttaaatctgtgatttcttccagtttccttccaatagattcctgtttggcttaaagtagtcatgcatggctgctattgcttacaatcaaaagtactttatatatattagtaaccttaaayggtctcctttgagttcttatcaatgaatcattagtctgtatgtgggagtgtatctttgaatatatttgtcaagaaagctaagcaactattaaatatgacatctgtgtattttttaagttccacaggtaattctttctggttttgggaactactgccataaaatgcttaggtatagagtctaggcct

SEQ ID NO: 804616 - DNA, 587 bp, Homo sapiens
taaccaaaaagaaatctttgaaatatcaaataaaaaattcaaaatactgattattttattttcttgagatgtggtcttgctctgttgccctgggtgaatttcagcggcacaatcatagctcactgcagtctcatgggctcaagtgatcctcccacctcagcctcctaagttgctgggactacaggtatatattaccatgcccacttsttaaattaaaaaaaaatttttttagagagtgtctcactgtgttgtccaggatggtcttgaactcctggcatcaagctatcttcccacttcagcctcctgggattataggcatcagccaccaagcccagctaaaatactgatttttaaagaagctctatgagatacaggagatagctgaaaactaatataaagtagtgagaaaatgaaattcaggatatgaatgagaaatttaccaaaggcatagttttttgtttttttaaaaaagaacttctgtaataaaaaaattcatggaaggaattacaagatatggttgaaagcaaacaatggactagaccaagcaggagaatctcaaaatgtgaagataaatctgttgaattaat

SEQ ID NO: 804617 - DNA, 594 bp, Homo sapiens
gggaaatacaagacgacatgcagacgttgtatgtaaacacagcagctgatagttttgaattcaaagctcatgttgaaggagatggtgtagtggaagggattatccgttatcatccattcttatatgatagagaaacttaccctgatgatccatgctttccatcaagtatgttaatctgttatcttagttataaaatatgaagttgtaatttaggacagtgatttgtttttctaaatgattatcggttgggytattcaggttagataaatattaaattttttcttatgcaagtcttagattgttaggtatttgtaatttttgtaattcctgatttttgtgtacattcatttctagatgaataaatctttaatgaactcttcttttagttctgttacgaaaccaaacttttagatatgtatgcgtattaatcctttatatgttcccttgtcttctctttatccttgttgcagttttacactttatgcagtcatatttactaactttttctttatgctttctgattttgtcttactgtagaaaggctttttacatctcaaaattatataaatctgtagcttttttgtttttgttgtc

SEQ ID NO: 804618 - DNA, 594 bp, Homo sapiens
gggaaatacaagacgacatgcagacgttgtatgtaaacacagcagctgatagttttgaattcaaagctcatgttgaaggagatggtgtagtggaagggattatccgttatcatccattcttatatgatagagaaacttaccctgatgatccatgctttccatcaagtatgttaatctgttatcttagttataaaatatgaagttgtaatttaggacagtgatttgtttttctaaatgattatcggttgggttattcaggttagataaatattaaattttttcttatgcaagtcttagrttgttaggtatttgtaatttttgtaattcctgatttttgtgtacattcatttctagatgaataaatctttaatgaactcttcttttagttctgttacgaaaccaaacttttagatatgtatgcgtattaatcctttatatgttcccttgtcttctctttatccttgttgcagttttacactttatgcagtcatatttactaactttttctttatgctttctgattttgtcttactgtagaaaggctttttacatctcaaaattatataaatctgtagcttttttgtttttgttgtc

SEQ ID NO: 804619 - DNA, 482 bp, Homo sapiens
ctttctgattttgtcttactgtagaaaggctttttacatctcaaaattatataaatctgtagcttttttgtttttgttgtcattttatggtcaatgcatctgtgtttttcttttttgtatgtagagcaaggtggggttttatttatttatttaaatttttgagtgatgggrtcttgccgtgttgcccaggctggtcttaagatcctggcctgaaacaatcctcctgccttggcctcccaaagtactaggattacaggtgtgagccaccacacctggcccccacctttttttccccccccagtagagagatagggatttaacaattattttctatgtggtattcatattcagtttcttagcaccagttattgaatgttataatttacccaagagttagaacttgtataatacaaagttcccataagtacataggtctagattctttactataaagtactattttatttttttttaatatgagt

SEQ ID NO: 804620 - DNA, 668 bp, Homo sapiens
tatgcaaaatgtacttttctttttaattttctcttttatatatagagcctatccaaaaaataaactcataaaactgaagtgttttctaataatacttaagaagatgtgtttttgccaaccattcttcaccctgttgggagagaatacagaaatctgtattcaagcataaggtgctatacacttgtttgatgcctgcctctagggcaatgaggaggtaagacaatctccccattacatgctttcgcagaggacagtctgtaaagttacagaactccattccttcttacgtaccttataccataatataccatttccaaaggaaagtaaggcaaaattaaaaataatttcagcctaagtttttgatgcttgctgtcaagaaggatactatcttagttattaataaatttgatttttttaaagtyatatgaatgaaaaaggaaatatatatacatggtaaagactcacaggtccaatatggtatacagtttctgggaaattgctgccacacttactcctataactaggtaccaactctttcccaaatcagcaaatcattgttgtcagtttgccagctgacatggagattaaattagtaactaggaaccagaaagtctgacaaccaaaatgttaaactacccttctaaaactctcaggatggattcactatc

SEQ ID NO: 804621 - DNA, 577 bp, Homo sapiens
taaaacaagtgttattaaagaggaaactttttggcttcaggaagatataacaattagaaacatatgcacctaaaaatggaaaatcaaaatacaaaaggaaaaactgacagaaacgaagagagaaatagacaattcaacaataataggtggagacgtcaatacctccttttcaataatgaagagaacaactaggcataagatgaaaacataatagaagactcaagcagcactataaaccaactagatttaacagacatgtgtagaacactccatctaacaacaataatatacattcttaaacacacatggaatatttttcagggtatgtaaggccataacacttcaacacatttacaaggayggaaataatacaaacaaaatatgttctctgcttacaatacaataaaatgtgaaagtaatgagaaaatttgggaaactcacaaatatgtggaaatcgaactatacactcctagataaccaatgggctacagaaggaatcaaaagaaattcagaaagtactttgagacgagtaaaagtcaaggtacaatataccaaaacttatgggatccagttgaag

SEQ ID NO: 804622 - DNA, 594 bp, Homo sapiens
tacaacaaaaacaaggagaaaggccaggcacggtggctcacgcctgtaatcccagcactttgggaagccaaggcaggcggatcacaaggttaggagagtgagaccatcctagctaacacggtgaaaccctgtctctactaaaaatattttttaaaaaaactagccgggcgtgttggcaggtgcctgtagtcccagctacttgagaggttgaggcaggagaatgtygtgaacccgggaggcagagcttgcagtgagccgagatcgcgccactgcactccagtctgggcaacagagcaagactccatctcaaaaaaaaaaaaaaacagggagaaaaacagtaactccaacaaaatctgaatcatcttttgactttttaaaattgagagccattattactaggggggaagaaaaagaaaaaaatttaaaatttaaaaaaataaaaccgagagccttcatttaccattgtattccacccccaactaatattaacaagaatgacccatccagaattatacagttgtaagttcattgaaatctaggtcagtcataagtattttggggctgcaaagtacaatatcagaacctattcccaaa

SEQ ID NO: 804623 - DNA, 594 bp, Homo sapiens
tacaacaaaaacaaggagaaaggccaggcacggtggctcacgcctgtaatcccagcactttgggaagccaaggcaggcggatcacaaggttaggagagtgagaccatcctagctaacacggtgaaaccctgtctctactaaaaatattttttaaaaaaactagccgggcgtgttggcaggtgcctgtagtcccagctacttgagaggttgaggcaggagaatgtcgtgaacccgggaggcagagcttgcagtgagccgagatcgcgccactgcactccagtctgggcaacagagcaagactccatctcaaaaaaaaaaaaaaacarggagaaaaacagtaactccaacaaaatctgaatcatcttttgactttttaaaattgagagccattattactaggggggaagaaaaagaaaaaaatttaaaatttaaaaaaataaaaccgagagccttcatttaccattgtattccacccccaactaatattaacaagaatgacccatccagaattatacagttgtaagttcattgaaatctaggtcagtcataagtattttggggctgcaaagtacaatatcagaacctattcccaaa

SEQ ID NO: 804624 - DNA, 583 bp, Homo sapiens
tgcacacccagcaaagaccctcacctgcttctcagttgtaaactggtctgccctagccgaaaggtaacagtttgcccagcccctgtttgcacagcagtagaatggaaattgcgctgagtcctgtgaagctggctgactcacgctgaaactcgagatttatttccaattagtgcgatgtgtagtaraaggtgctcctcaagcagccttgcaacactcccattgtgtccacagagttctcaaagattgtgtttggcagcaccacgacacagtgggccaaaaagggagaagggattaatatcaagcaatagaaattcatttaaaagccaatattagtcactcaagtgtacatccgaagactacaaaagccaagtatgcatactgcttcactaatgtgaaacttggaacaaagatgagaaaaaccaggcatgcacagggtcagactaggaataaagagccacctgtgaaatgtaataagtggtggtctccttctgaaaaagaggcacgatgcttccattaaaggaagtcgaggactaaagagatgctctgagcacagcttgtcatcaccacttgtaaagaccactgg

SEQ ID NO: 804625 - DNA, 640 bp, Homo sapiens
ccccaaagaagaaggttatgccaggattaaaaattgggtgttgaactccgagagctctgtcccttccagcataacccactagtacagaacgctgactttcaaaagctggtgaggctcagccactccagggaatcagagctctaacatcagagtggctgagctgggagatacccaaaaaggaccatctcagtcaaatccttgttttatagatagtattattaataatgttttcaagtgcagattggagctggatatttttatatacattagcaggggtgcttccaggttataggtagatttaaaattgttctgattggcaactggctgaaagagttattatcaatagaaaggaatgtctgagctgccataagaggtttcagaaaccaaagttttatcatgcagatgaagcctccaggtagcaggcttcagagagaatagactgtaaatgcttcttatcagagttaagatctrtgttgatcttaacgctggtcagcttgtcttgaaatcaaaaagggaggaggtcataatgaggcttgtctaacaccttcttcctgtcatgacctgagccagtatctcaggttaatgttggaatgccctggccaagaggagggatccattcagaggatttggcggaggaact

SEQ ID NO: 804626 - DNA, 609 bp, Homo sapiens
atcttaaggccagagcccccaaactctaccaaaaagcatgtaagcttttcttttcattattttccgcttttctctagtttctctattttgcaaattatcggttaagtctcctttcaacatctgtttataaggtgcttagaaattctgaaatgaaagtcattgtgaaaatgctggaagctgttgtcttctcctctttgtttaatgtcttctgattctttatccaaccctgacccaatcttctctaatgtggatcactgtcatttaaaagaaccatctattgcttaaaaatagaamgaggtaaactatgctgttttggtgccaattctcctaaacacaagtcactgctgagcaataaaggaaaggagcttttccgaacatcttttgtatgtctcccttagagaaaccccacttttccttgcttccctatgagatcaaatgtacagacagagaaatatgcagatagacattgcggggagaaaatcaggagaagaaacccactaaaaataaacacagctctttctaccatatatttttaaagattcatccatgtaattcaagctcagtcatttagaagcagccctgcttgataccacatggcattaaaatcca

SEQ ID NO: 804627 - DNA, 644 bp, Homo sapiens
gaatgttctcttaaaggaagagaaaagatccttcaaaaatgcacttgaggattcaaagacaaggacacggggacagggagactataaaattgcctcttctgggataacaaggggctgagtagccttctcctttacttggtgacttaacgttgaaaagaaaaagaaaaagaaagctttatttcagcattaggcacatggttggcattcaccatgtgtttattaataataatgacttatctgtgccaaaatccctttagagcaaattgtctcacatccaaatcccasagtgagccaaaggatttcaatgccctagcaggaagctggaaggctctggaacaattcactcatagcaaactccagcccacaccatagagcattttctctcagacactcagccccacctccacccataccccacagctagtggggcgacccctgtatcttatttagtttgtaaagggaagtcactttttctcacctataccaggctttctgcatttccttcacaagacaaacaaggttctccctttgttcttccttctgagagtatgaacaaagatagccttcataaaagaggaaattgtagcagtgtccccatgacccaatggtgatgagaatgctgggtgacttccctgtgcctgttc

SEQ ID NO: 804628 - DNA, 637 bp, Homo sapiens
ctcacctgccaggggccgtgtttctttatctgtaacccaaggaagctggactcttgatccgtcatcctgtgctattaggggggattctgtaaagtgctgagtagatagtacagaatgtgcaggtgacttggctcatgtatcmaatgatgaacactcatggagtccctcctgggtggtagtaggaatggtgctgggcactgggaatacaaggacagctaagagacagtctttgcccttgaaaaactcacagtctagtaaacaacacacgaataaacaaataattgtgattcaacatgtaagtggtatactctatgtaggtgagtacagcgtgcttgtaggagcctagagaggggctgctgctgctgcctggaggcctgaagtggccttctagagatatttgatctttaccaggcagagaagaggctgcgggaggcccatgaagagtgtgttccagttagaggaacagcctgagcacagtgcgttgttcttggaaagtggccgtcatctccctactcatccgtagttgctgctccccaaagccggccacatgagcccatctctggttcatgcctaaggggaccgggggcagacatgtggtttcaaagaagccagcttatagcttgtttagggctccatg

SEQ ID NO: 804629 - DNA, 555 bp, Homo sapiens
acaacctatctgagaatggaactcccaaagcagtatgacttagatcaaatgatttttaaggggtttcagcccttaaatcaaatgatttatacaagggagggggttccatcatccaggggactccctcctgccttataaatcatgtgatctaagggctgagaccccattgtgaacagagaaggctgccttcgaatctgccaccactggggatgggaagcaaccttggacaagatagttattctctttgtgaatccaaagctggtttttggaaacctgagcctcagaaattggcgcttagaatgtgtagtcctacattgggcaacgagactatttctgtgctgggagtatagccccctcttcccatatcacccatttacctgcctckcatcccatcagctgggcgggagggcaaggccaaagggcttccatccttcactgtgaggaatgcaagttccctacacgagagggagagagagctcattatcaagaggtctttcctccccaggcagcttcagagaaccatctgttgatgtggccaggaaatgctggctgaga

SEQ ID NO: 804630 - DNA, 622 bp, Homo sapiens
tctgtaatctacctgggctttacttccttggtcctctcccatttagtttcctctttacttagccttttcgtaacccttttgctcttttttttaactggtcctatgcagccactactccttttttcgttgcagtctccggctgggaccycatcataaacagaaagacctcccacaaacacttcagcacctgttcagccacctgggtacttcttacctctccatggcctttggcctcaattttgaggttctaatactttcctaaaccatggcaggatcccagatgctttgcttggactcacctggttattctggccaggctggcctcagcaccagatacattgctgtccagtcgcttctcttgaagagcagaaatctgcccagcaccagacactcactccctgttgtgtattcctgcagccctagaatgccttactttcagatgcactcctcttaaaacggttcaattgactacaatctcttaagcaccttataatttcatctaggaaattctcacctttatgtatttttttacgttcatgcctattatgaatggtaattttagctgcacataaatctctttatcttattcatattttcctttctgtgtgtttatcatccccta

SEQ ID NO: 804631 - DNA, 622 bp, Homo sapiens
tctgtaatctacctgggctttacttccttggtcctctcccatttagtttcctctttacttagccttttcgtaacccttttgctcttttttttaactggtcctatgcagccactactccttttttcgttgcagtctccggctgggacctcatcataaacagaaagacctcccacaaacacttcagcacctgttcagccacctgggtacttcttacctctccatggcctttggcctcaattttgaggttctaatactttcctaaaccatggcaggatcccagatgctttgcttggactcacctggttattctggccaggctggcctcagcaccagatacattgctgtccagtcgcttctcttgaagagcagaaatctgcccagcaccagacactcamtccctgttgtgtattcctgcagccctagaatgccttactttcagatgcactcctcttaaaacggttcaattgactacaatctcttaagcaccttataatttcatctaggaaattctcacctttatgtatttttttacgttcatgcctattatgaatggtaattttagctgcacataaatctctttatcttattcatattttcctttctgtgtgtttatcatccccta

SEQ ID NO: 804632 - DNA, 637 bp, Homo sapiens
gaacaggcacagggaagtcacccagcattctcatcaccattgggtcatggggacactgctacaatttcctcttttatgaaggctatctttgttcatactctcagaaggaagaacaaagggagaaccttgtttgtcttgtgaaggaaatgcagaaagcctggtataggtgagaaaaagtgacttccctttacaaactaaagaaatacaggggtcgccccactagctgtggggtatgggtggaggtggggctgagtgtctgagagaaaatgctctatggtgtgggctggagtttgctatgagtgaattgttccagagccttccagcttcctgctagggcattgaaatcctttggctcactstgggatttggatgtgagacaatttgctctaaagggattttggcacagataagtcattattattaataaacacatggtgaatgccaaccatgtgcctaatgctgaaataaagctttctttttctttttcttttcaacgttaagtcaccaagtaaaggagaaggctactcagccccttgttatcccagaagaggcaattttatagtctccctgtccccgtgtccttgtctttgaatcctcaagtgcatttttgaaggatcttttctcttcctttaagaga

SEQ ID NO: 804633 - DNA, 605 bp, Homo sapiens
ctggattttaatgccatgtggtatcaagcagggctgcttctaaatgactgagcttgaattacatggatgaatctttaaaaatatatggtagaaagagctgtgtttatttttagtgggtttcttctcctgattttctccccgcaatgtctatctgcatatttctctgtctgtacatttgatctcatagggaagcaaggaaaagtggggtttctctaagggagacatacaaaagatgttcggaaaagctcctttcctttattgctcagcagtgacttgtgtttaggagaattggcaccaaaacagcatagtttacctckttctatttttaagcaatagatggttcttttaaatgacagtgatccacattagagaagattgggtcagggttggataaagaatcagaagacattaaacaaagaggagaagacaacagcttccagcattttcacaatgactttcatttcagaatttctaagcaccttataaacagatgttgaaaggagacttaaccgataatttgcaaaatagagaaactagagaaaagcggaaaataatgaaaagaaaagcttacatgctttttggtagagtttgggggctctggcctt

SEQ ID NO: 804634 - DNA, 556 bp, Homo sapiens
tgcacacccagcaaagaccctcacctgcttctcagttgtaaactggtctgccctagccgaaaggtaacagtttgcccagcccctgtttgcacagcagtagaatggaaattgcgctgagtcctgtgaagctggctgactcacgctgaaactcgagatttatttccaattagtgcgatgtgtagtaraaggtgctcctcaagcagccttgcaacactcccattgtgtccacagagttctcaaagattgtgtttggcagcaccacgacacagtgggccaaaaagggagaagggattaatatcaagcaatagaaattcatttaaaagccaatattagtcactcaagtgtacatccgaagactacaaaagccaagtatgcatactgcttcactaatgtgaaacttggaacaaagatgagaaaaaccaggcatgcacagggtcagactaggaataaagagccacctgtgaaatgtaataagtggtggtctccttctgaaaaagaggcacgatgcttccattaaaggaagtcgaggactaaagagatgctctgagcacagctt

SEQ ID NO: 804635 - DNA, 622 bp, Homo sapiens
ctggaagggctagatgggtccggaaaggacacctggaagcagttagggtaagacttcccaatattcagtaggaagcaaatcctatgccagggccttggcttgccgaaggactcagaaaacaggttcaaaactaggtaaatggtttgtaaggttataacttggaagattcacttttaaagttgtcttaaagccattarcaacaaagtttgggtttttgactggaattcattcaatcgagtagcttagctgtcccatttttgctgaatggacacaaaataagcccacgtgcaatcatgcaattaactacaatatagttaatccaggaaatgttgtatctttatgatggaacagctgagcattttaatttattcattaatttatttgttcattactgaaataatgattgggtccattagatgctctacaaattaaatctttttgcacttgttcagtaactattgtgaattcctaacagatagcatattttattatattgcctttttaacttaagtttgtgcccaagagttgaacagaccaaatattttaggattatatattcatggagccataaagtgaaaggcgtagatagatgttggagtggtgattaacgagaaactagatg

SEQ ID NO: 804636 - DNA, 622 bp, Homo sapiens
ctggaagggctagatgggtccggaaaggacacctggaagcagttagggtaagacttcccaatattcagtaggaagcaaatcctatgccagggccttggcttgccgaaggactcagaaaacaggttcaaaactaggtaaatggtttgtaaggttataacttggaagattcacttttaaagttgtcttaaagccattaacaacaaagtttgggtttttgactggaattcattcaatcgagtagcttagctgtcccatttttgctgaatggacacaaaataagcccacgtgcaatcatgcaattaactacaatatagttaatccaggaaatgttgtatctttatgatggaacagctgagcattttaatttattcattaatttatttgttcawtactgaaataatgattgggtccattagatgctctacaaattaaatctttttgcacttgttcagtaactattgtgaattcctaacagatagcatattttattatattgcctttttaacttaagtttgtgcccaagagttgaacagaccaaatattttaggattatatattcatggagccataaagtgaaaggcgtagatagatgttggagtggtgattaacgagaaactagatg

SEQ ID NO: 804637 - DNA, 622 bp, Homo sapiens
ctggaagggctagatgggtccggaaaggacacctggaagcagttagggtaagacttcccaatattcagtaggaagcaaatcctatgccagggccttggcttgccgaaggactcagaaaacaggttcaaaactaggtaaatggtttgtaaggttataacttggaagattcacttttaaagttgtcttaaagccattaacaacaaagtttgggtttttgactggaattcattcaatcgagtagcttagctgtcccatttttgctgaatggacacaaaataagcccacgtgcaatcatgcaattaactacaatatagttaatccaggaaatgttgtatctttatgatggaacagctgagcattttaatttattcattaatttatttgttcattactgaaataatgattgggtccattagatgctctacaaattaaatctttttgcacttgttcagtaactattgtgaattcctaacagawagcatattttattatattgcctttttaacttaagtttgtgcccaagagttgaacagaccaaatattttaggattatatattcatggagccataaagtgaaaggcgtagatagatgttggagtggtgattaacgagaaactagatg

SEQ ID NO: 804638 - DNA, 602 bp, Homo sapiens
gcatcaactgctcatctattggaaaggacctcaggagtggggccacaggccagcagggacgagcactagaaatcacagatccccagcttgctagtgatggagaaatcaccactaggaaatggaagagagtgatcaagacaaagtgtgagataaaaagttggtagtctttggttactgccctgcatgtgaagtctttctcagtaataccttatatcccctctctcccaggggagagtgaggagaagggagggaaaggaaggggaaagaaagggagagtgagggagggaactgtatgtgagaagcagacaatcctaaaaatccaactaacaggtgtggtggcgatctgtagacaagtcccactcttcctttttgctttcacgtgggaaagagaaaggttttgcaacctgattaatggctcagataattgagatcctggatctayattacataaagtggaaaacagaatagaactagataacatttacaagttagaacagaaccaaaagacaacactcagtgacgttaccaaattccccacccccggctaaaatcaataaataaaacgaccacagctataatgtaaatgaaagagaaatctggct

SEQ ID NO: 804639 - DNA, 626 bp, Homo sapiens
gttatgccaggattaaaaattgggtgttgaactccgagagctctgtcccttccagcataacccactagtacagaacgctgactttcaaaagctggtgaggctcagccactccagggaatcagagctctaacatcagagtggctgagctgggagatacccaaaaaggaccatctcagtcaaatccttgttttatagatagtattattaataatgttttcaagtgcagattggagctggatatttttatatacattagcaggggtgcttccaggttataggtagatttaaaattgttctgattggcaactggctgaaagagttattatcaatagaaaggaatgtctgagctgccataagaggtttcagaaaccaaagttttatcatgcagatgaagcctccaggtagcaggcttcagagagaatagactgtaaatgcttcttatcagagttaagatctrtgttgatcttaacgctggtcagcttgtcttgaaatcaaaaagggaggaggtcataatgaggcttgtctaacaccttcttcctgtcatgacctgagccagtatctcaggttaatgttggaatgccctggccaagaggagggatccattcagaggatttggcggaggaact

SEQ ID NO: 804640 - DNA, 617 bp, Homo sapiens
gtgaaccgagattatgccgttgcacctcagtctgtgtgacagtggagactctgtttaaaaaaaaaaaaatgacagcagatggcaatttagatgtatacaaagaaaaaagtgtgctagaacaaataaaaatacagttaaataaagtagaaacttttcttatctttaaaagagaaccgaacaacaaaacacactaacagtgtgttggggggcttataacatacatagaaaagaaatgacagtaatagcatgaagtaatacaatattatttgcatgtatatatgtgtgtgtgtgggkgtgtgtgtgtgtgtgtgtgtgtattagccaggatacaaatgaaaatcactcatcatatcatgaaccaggaaaatatcaacttgaatgaaaaaagacaattaaaatataccgacactgagatgacagagatgttgaaattatctaacaaggattttatagaagccattataaaaacactttgacagaaaattatgaacatgttttaaacaaataaaaaatacaaagtctctacaaagaaatagaaaaaaatacgaagaaatgaagaagaaacacgcacaaattttagtactgaaatatatgataactgagttcagcagaagaat

SEQ ID NO: 804641 - DNA, 615 bp, Homo sapiens
gctactcgggaggctgaggcaggagaatggaatgaaccctggaggcggagcttgcagtgagcggcgattgaaccactgcactgcagcctgggcgacagagcgaaactccttctcaaaaaaaaaaaaaaaaaaaaaaaatctgacttttgggtatattttgcagttggtttaraaattagtgtttatccacagcctcttatttttcaggaatgctgtctaaaatatagcagtctttcagtaaatggatgtgtcattactgctgtggttagtgttattattaaagatgactggcatgtggaattaaaacccctggccatagagcgaggccaactggatgaggaaagagaggcggggaaggggaaacttgcccaggatcacacatgagttaggttctcaggataatgacaaaaatgggactagaatggtcgcttcgaggatgaaatgaaaacaagctcaggaagacacctttcaagaactttaacttcatacaaatgtaataaataaaagtaagaagttgtttcaaataaaagcctgataaatgaaaaacagatatacaattgcagaaataagtacaaatatatccagtagtcaaattaactataaaataatttagct

SEQ ID NO: 804642 - DNA, 566 bp, Homo sapiens
acaaccagaacaacctatctgagaatggaactcccaaagcagtatgacttagatcaaatgatttttaaggggtttcagcccttaaatcaaatgatttatacaagggagggggttccatcatccaggggactccctcctgccttataaatcatgtgatctaagggctgagaccccattgtgaacagagaaggcctgccttcgaatctgccaccaactggggatgggaagcaacctttgacaagatagttattctctttgtgaatccaaagctggtttttggaaacctgagcctcagaaattggcgcttagaatgtgtagtcctacattgggcaacgagactatttctgtgctgggagtatagccccctcttcccatatcacccatttacctgcctckcatcccatcagctgggcgggagggcaaggccaaagggcttccatccttcactgtgaggaatgcaagttccctacacgagagggagagagagctcattatcaagaggtctttcctccccaggcagcttcagagaaccatctgttgatgtggccaggaaatgctggctgaga

SEQ ID NO: 804643 - DNA, 640 bp, Homo sapiens
ctcacctgccaggggccgtgtttctttatctgtaacccaaggaagctggactcttgatccgtcatcctgtgctattaggggggattctgtaaagtgctgagtagatagtacagaatgtgcaggtgacttggctcatgtatcmaatgatgaacactcatggagtccctcctgggtggtagtaggaatggtgctgggcactgggaatacaaggacagctaagagacagtctttgcccttgaaaaactcacagtctagtaaacaacacacgaataaacaaataattgtgattcaacatgtaagtggtatactctatgtaggtgagtacagcgtgcttgtaggagcctagagaggggctgctgctgctgcctggaggcctgaagtggccttctagagatatttgatctttaccaggcagagaagaggctgcgggaggcccatgaagagtgtgttccagttagaggaacagcctgagcacagtgcgttgttcttggaaagtggccgtcatctccctactcatccgtagttgctgctccccaaagccggccacatgagcccatctctggttcatgcctaaggggaccgggggcagacatgtggtttcaaagaagccagcttatagcttgtttagggctccatgact

SEQ ID NO: 804644 - DNA, 627 bp, Homo sapiens
gcatccaacagtatgaaagctgccagtctcttacggtttgaccctgaaattagaacacatcacttcctctgcattctattaaccaaagcagtcacggaccagcccagattgaaggagaggggacataggccccagcyttcaatgaaaggaatgtcaagccaggcacgatggctcacacctgtaatcccagcactttgggaggtcaaggcgggcggatcatctgaggtcaggagtttgagaccagcctgactaacgtggtgaaaccccgtctctactaaaaatacaaaaattagccggatgtggtggcgcacgcctgtaatcccagctattcaggaggctgaggcaggagaatcgcttgaacccaggaggtggagtttgcagtgagccgagattgtgccattgcattccagcctgggtgacagaatgagactgtctcaaaaaaaaattaaaaaaggaatgtcaaaaaagtctggccatctttaatccaccacatgtggatactaaataaaactccaaatctcagtcgcttaaaacaacaaaggcttatttcttactcatcccacattagacaatgatggtgtgctgttctcccccagcagggacttaaatccttctgacatcaccata

SEQ ID NO: 804645 - DNA, 536 bp, Homo sapiens
cctggaaccccagtgagacagaactgttcactcacctggaaaggggctgagaccagaaagccaagtggtcttgctcagcaggtcccagccccacggagcccagcaagctaagatccactggctggaaatttctcgttgccagcacagcagtctgaagtcgacctggggcactggagcttggtggagggaggggcatccaccattactgaggcttgagtaggcggttttccctttcacagtgtaaacaaagccacctgaaagtttgagctttggcagaacccaccgcagcgcagcaaagccactgtagccagactgcctctctagattcctcctctctgggcagggaatctctgaaagaaaggcagcakccccagtcagatcgggttctctgggacagagcacctggggcaaggggcagctgtgggtgcagcttcagcagacttaaaccttcctgcctgctggatctgaagagagcagcgaatctcccagcacagcgcttgagctctgctaagggacagacttcctcctcaagcggg

SEQ ID NO: 804646 - DNA, 578 bp, Homo sapiens
acgccctctttatttaacatagagatttagcaacgagggcagggttttcaagagcagaccttttgtttttgtttgatggggttgggtggagagacgtggtcttgaccacaatttatgttatgacaacatgtgtgaagaagagaggatatttaaagtaggtgtttcctttgcaggcttgaatgggcattcgacttatacacaaaagtgcacccattttcagtgtttccatatcagcaccaatgtcatttaactgtaagattctttttaccataaacacttgggatgctcaatggtttaaaggacattctacacaaaagtttgaaagctcttaattacagcaactaaaacctcacaatggtttyctagatatgtcttttgtgtagtattttgaaaaatggatttttcttccaaagaggttaggacaatagcatttatgccataagaactctgtttttttggaccacattttgtgataaaaagcaaatgagctttgcatttaggagctccaggaaatccttgttgcccttagaaatctgccccctcaccccgacaaagggccagacagcttggaggtaggg

SEQ ID NO: 804647 - DNA, 593 bp, Homo sapiens
cagtgtttccatatcagcaccaatgtcatttaactgtaagattctttttaccataaacacttgggatgctcaatggtttaaaggacattctacacaaaagtttgaaagctcttaattacagcaactaaaacctcacaatggttttctagatatgtcttttgtgtagtattttgaaaaatggatttttcttccaaagaggttaggacaatagcatttatgccataagaactctgtttttttggaccacattttgtgataaaaagcaaatgagctttgcatttaggagctccaggaaatccttgttgcccttagaaatctgccccctcaccccgacaaagggccagacagcttggaggtagggaatatccccctccataggctcaccaagacgtgcagctggctgtatgttctttactgatgtcctgtgagcccttaaggtatttcaacaaggagcaycttgattttctgtggatttatggaagaaaatgtatctctccaaatgtgtatagtagttcctccttatctgcagggaatagttccaagacccccagtgaatgcctaatactgcagatagtacacaacactatatatgc

SEQ ID NO: 804648 - DNA, 606 bp, Homo sapiens
tgagcaattttacatacaatcctcaagatcagggcacaatacatttatattttaaataactaaagatatcaattgaaaaactagagtcataaatcaataaagtataatattgctacttttctagcaagtcctaaatcaacctagctataaaattagtaaataaaattctctttgattttcttttttcaattattwtaaagcaaacctctgagatttcagggtctaagttttccatttatgtttgttgctgtgtttatttctgccactttttatgggtttggtccttttaactgaagagaagataatgagatgatcatgagtacttagatcttgaacaagtcacacacacacacacacacacacacacacacacacacagtctaaatttgttttaaaagtgaaagtaatttgtcctagaagttaaaacattgataattgtctagctgaaagtagacaattatctgtcagagaatgtatctacttctgcaggtgatagtaaaagtctaaataaaatactagaattttacaaataaatcgatgctgttttaatccacaaattggtttccaactacctatttagccaagtgattcttttttttttttttt

SEQ ID NO: 804649 - DNA, 573 bp, Homo sapiens
agtccctgatgactccggtggtgcctcacaatggacaatgccaagtagcgcccgcatcattccaatgacccctcccccatctcagtctcccacactcctcccgaagacaggtcctctccggaaccttcacaaacctgatttctggtcctccccaaccagctccctgtccctgcttctgggcgctccttccttcctgagctcccagggttcctcaaagtcaatttggtgacaaaacataaaaaacaaatgatggcaggatggcaggaagaacctcatacccaagcagagtgccaggttttacagcctccgctcagccattcatatcctaagcaacaaaacatcagcaggrtgcggaaggtcccgatagtaaaccatctccatcacatccatgtagccatccgtccatcaacctgtatctcaggaacaaatgtagatacattcattttaagcatgcatggtacatttacaaaaattaacctgacttattttgttccagcaaatctcaatatatttgagagcaatcaaatcacacagcatgtttctgatcatataactgtgctagaagtcaatgat

SEQ ID NO: 804650 - DNA, 582 bp, Homo sapiens
tctactaaaaatgcaaaaattaggctgggcacagtggctcacacctgtaatcccagcactttgggaggccggcgcggagatcacgagatcaggagattgagaccatcctggctaacacagtgaaaccctgtctctactaaaaatacaaaaaattagctggacgtggtggcaggcacctgtagtcccagmtacttgggaggctgaggcaggagaatggcgtgaacccgggaggtggagtttgcagtgagccgagatcccaccactgcactccagcttaggcgacagagccagactgtgtctcaaaaataggaaagaaaacaaaagaaaatttggactattgccaattacaaatatttttagagaagaattcaaaacagtaactgtggatgatggaaacaatagttatgataaaagtctgatgaaacttcccagttcacaaggaaatttaattacttatgtgcagcattttaagacagtaatcagaatcatgactgacagcatcatatcagggccaccagacttttataaatttcatacaatcttcagaaataattaataactttttttttttttagatagatt

SEQ ID NO: 804651 - DNA, 582 bp, Homo sapiens
tctactaaaaatgcaaaaattaggctgggcacagtggctcacacctgtaatcccagcactttgggaggccggcgcggagatcacgagatcaggagattgagaccatcctggctaacacagtgaaaccctgtctctactaaaaatacaaaaaattagctggacgtggtggcaggcacctgtagtcccagctacttgggaggctgaggcagragaatggcgtgaacccgggaggtggagtttgcagtgagccgagatcccaccactgcactccagcttaggcgacagagccagactgtgtctcaaaaataggaaagaaaacaaaagaaaatttggactattgccaattacaaatatttttagagaagaattcaaaacagtaactgtggatgatggaaacaatagttatgataaaagtctgatgaaacttcccagttcacaaggaaatttaattacttatgtgcagcattttaagacagtaatcagaatcatgactgacagcatcatatcagggccaccagacttttataaatttcatacaatcttcagaaataattaataactttttttttttttagatagatt

SEQ ID NO: 804652 - DNA, 582 bp, Homo sapiens
tctactaaaaatgcaaaaattaggctgggcacagtggctcacacctgtaatcccagcactttgggaggccggcgcggagatcacgagatcaggagattgagaccatcctggctaacacagtgaaaccctgtctctactaaaaatacaaaaaattagctggacgtggtggcaggcacctgtagtcccagctacttgggaggctgaggcaggagaatggcgtgaacccgggaggtrgagtttgcagtgagccgagatcccaccactgcactccagcttaggcgacagagccagactgtgtctcaaaaataggaaagaaaacaaaagaaaatttggactattgccaattacaaatatttttagagaagaattcaaaacagtaactgtggatgatggaaacaatagttatgataaaagtctgatgaaacttcccagttcacaaggaaatttaattacttatgtgcagcattttaagacagtaatcagaatcatgactgacagcatcatatcagggccaccagacttttataaatttcatacaatcttcagaaataattaataactttttttttttttagatagatt

SEQ ID NO: 804653 - DNA, 573 bp, Homo sapiens
ttaatttaaccagagacttccaaagcaatacaaaaacttacatggatataaaaacctcaacccttttaaaggtcacatttgctaagtgatcaaaaggggtacttgaattgaatcgacacaggaagagtgtgtacagggttatgagtgtagacagatggttacttyggtcatatctccatttgccacctgattacacaggagaatggcatctttactcaccagaaagccagtattataggaggtgtaggaggcattcttggacttgagacaagaacattgttgtgtagaaatttcattgactgtgttaaaattattctccatgggctggagaacacataacatggcctttagaatgagacgggcattgattggatgcaaggtctccacacttactagctgtgtgacattggacagagtgcttcatcattccgagactcagtttttaaaggaaaaacaactaactaccttgcaagcttgctagcaggtttaagtgtaataatgtgtgggaatgactgcaccgtgactaacacgtagtgacagcttaattaatgttaacccttatcattatcatat

SEQ ID NO: 804654 - DNA, 532 bp, Homo sapiens
gtagaaaatgaagcattcacccttcgctattaagcacagcagaaagatgctgccaggctctgaaaattcacatgaaagcctttaaaaaaactgagctccttttatgagaatgaaactcacctcttttaggcattgatggtttgatccataattaattaggggacttgtatcttgctccagaaaaaacataagtggccagatgtcagtgtgctgttcctgaaaagttagcatatatgcaggtgctccttttaatacagaagaattgggagttgtagtgtcagtgctaggcagagagtagaacagcatgcagagaaacttctgcctggcctctgtgtcccttcactgaggtggtcaagctctttagttctggttctcccatgggctggacaarcccagtgttccaggccaagtccaagcagataccgaagatcagctcgtggcctctgaaagtttcttagtgtcagtcgctgagatgctttccctgggagccagaggctccctcctctccaaactttgaatttaaaattattgg

SEQ ID NO: 804655 - DNA, 646 bp, Homo sapiens
aagtcagaaatgcataaaatgggaaagaaaaggtacaactgctagatcatctcctgcctagaagtattgagtgatgtttgcataaagaggctctaattaattggcttcaaaaaaaaatgaaggctcttaaatattttgtcagaaaatagaaactctaatgccttttagttcatgtgactgcagtaatctttgggaaatacagttttaaaattatkggtaaaacgaaaatatcttcaaaatttagacatttggtctaaattaagtcagaggttaaatttgctaagtgctttaatgtcatacaccgcttctttgactttggaaaattgtccagtttacctggtttgaagccattagatttctaggtaaggcctggggtcaggcggagttagccatgcctcctagctgtgctggaaagagtcagactttatctgcagttctgtcttgcttcctagactatgcacctggtacgtaactaaaactgcttacacacacacacacacgcacacacacgcacgcacacacacataaaaacaaaaaaaagtgtttttcatttttaaaagacatggtaatatggttttaaaaaaaaaccaagtgttgcctaatttagaaagttaaagaattacttttagttggaagaaaataaagt

SEQ ID NO: 804656 - DNA, 619 bp, Homo sapiens
ctgtgtcacattcctgcaaaattatttaacaggttactaaatctatggcttttaagcacttgggaagaaataagggtgtactggaagataaaaatggttcacaaacaaaagttatgccaaattcagtacacttcatttttttgaaaggtttattaaacttaaagatcacataaatatcatagggcactgaagtctctcaggatatgaaaataagccatgtttagtttgcctcgttaggccttttgtgatctggcccctgaggtagcccaaagtctcctcccacacctccccttgccatacagaatgtatatgtctccccggctaaataactaaaattgagggtagaaaatatgtcatttttaccattatagttctatcatctagcaaatgttctagcctttggcaggcatttaattagtgcatcatttgatcmatagattgattacattttgtagattaaaattttggtacgtggtctaaaggagactaacagagattttggttgtttatcggtaaacaactttattagaagtgtgtgtaggtttatgtttatttgtatttatctttaagctgtagaaaggtctttaggtgacagcgataatgtttgaacctagccaca

SEQ ID NO: 804657 - DNA, 580 bp, Homo sapiens
ttgaccttagttcattcattcagtctgcaaatttttgtgaaaagcccactgtaagctggtgactaaatctaaaatttgggctactactttaccatgaaaatcaaagatgctaaagtgtatttctaaagcgaaagggcttaactgttataattcaatatgactctgaattatttatatttaacaggaaatcaattctgggcyatcagaggaaatgaggtacgagctggatacccaagaggcatccacaccctaggtttccctccaaccgtgaggaaaatcgatgcagccatttctgataaggaaaagaacaaaacatatttcttatgtagaggacaaatactggaggtgagatgcaagagaaatgactttgtatggagcctaattagggaaattagtttcttttactaaggaaatcccccaccccaaccttaggcctgcttctctcttagtaggaaggatgggacttcagacaactgtgggaaagttcttactttaaaacagcagcaccttaggctctcctgctttcagtcccaagtgcagttggctggtgcttcccttggtgctgtcaccccacctgcct

SEQ ID NO: 804658 - DNA, 587 bp, Homo sapiens
ataagtctgctccgattttatattccttctggagtcagttttgataatttgtatgtttctaggaatttattcatttcatccaggttatctaatttgttgatgtataattattcataatattcttttctaatcatttttatttttgtaaggttggtagtaatgtctccattttcatttctgactttagttatttgcatcttcttcttgatttctttctcagtgtagctaatgtttgtcaatcttgttgatttttttctgggaaaaaacatttggtttcatttattctctgttgtttttatattatctctttaatttatctctgctgtaatctttatatttctctctgctatttttggttttaatttggtctccttayaaaaaatgtttgagtatgtattctgaactaaattatgctcccccattcatatgttgaagtgctaatccccagtgtgactgtatttgaggataaattcattagagaagacagtcaaggttaaatgaagtaataagggtggggccctcgtatgataggattggtgtccttataagaaggagagacatcagagcactctcttgctctctgtgca

SEQ ID NO: 804659 - DNA, 587 bp, Homo sapiens
ataagtctgctccgattttatattccttctggagtcagttttgataatttgtatgtttctaggaatttattcatttcatccaggttatctaatttgttgatgtataattattcataatattcttttctaatcatttttatttttgtaaggttggtagtaatgtctccattttcatttctgactttagttatttgcatcttcttcttgatttctttctcagtgtagctaatgtttgtcaatcttgttgatttttttctgggaaaaaacatttggtttcatttattctctgttgtttttatattatctctttaatttatctctgctgtaatctttatatttctctctgctatttttggttttaatttggtctccttataaaaaatgtttgrgtatgtattctgaactaaattatgctcccccattcatatgttgaagtgctaatccccagtgtgactgtatttgaggataaattcattagagaagacagtcaaggttaaatgaagtaataagggtggggccctcgtatgataggattggtgtccttataagaaggagagacatcagagcactctcttgctctctgtgca

SEQ ID NO: 804660 - DNA, 644 bp, Homo sapiens
atatgacatatttctaactttttgatgtgggcatttagtgctataaatttccctcttaacactgccttagctgtgttgcagagattctggtatgctgtatcttgttctcattagtttcaaagaacttctcaatttctgccttaatattgttatttacccaaaagtcattcaggagcaggtttttcaatttccatgtagttgtgtgattttgagtgaatttcttaatattgaattctattttgattgtgctgtggtctgagagcttttcatgatttcagatccttttcatttgctcagggtgttctaccacygattatgtgattaattttagactatgtgccatatgatgagaagaacgtatattctgttgttttggggtagagagttctgtagatatctatcaggtccctttgatccagttctgagttcaggtcctgaatatctttgttaattttctgtctcgatgatctgtctaatagtgtcagtggggtgttaaagtctcccactattattgtgtggaagtctaagtctctttcaaggtctctaagaacttgctttatgaatctgggtgctcctgtattggggtggatgtatatttaggatagttagattttctttttgaattgaacactttaccattatgt

SEQ ID NO: 804661 - DNA, 589 bp, Homo sapiens
gacacctcaagtgtccatggtggcagaaggggtccccttctgccaggatcccacaggcatgtggcaagagcaggttgctccttgccagttcctctcaccggttccccctgagctgttgtgtttcaaaaatgagtcccagtgtgcagtagcctgtgctgggttcccagatttctctcccctcaccccagcttctctgtctttcctccttccaccctcagcgacttccctctgaagatctgttaaaagcattccagttgtctcagcccctccatggaagctgttccacttgtctgtgtctagtcagccatcttgtcctctgtattctgggaaggtctttatttctccttcatgtttaaaggatrttttcactagctatactattttagggtaatttgttgtaccctagaatagtatatatttaaactatggcatatttaaagtcgtgtcactcccacctggcctataaggtttcaactgaaaatcttctgccagacatattggagctccattgtatgttatttatttctttactcttgctactcttaacatcctttctttatctttcaccttcgggagtttgattattaaa

SEQ ID NO: 804662 - DNA, 609 bp, Homo sapiens
gaatagtatgtgcaaaagccctggggtttaagaatatgatgtttttagagaactgcaaataattcagtatggttggagcagagggatgtggaatgattattgattctgttggagagtagacagaggccagattgctatgcttagatacaatttcaaccacctacaaatccatctaattacctacatgaccatcatcatctggtcatgtttctccattttatcattatgtataccttaaagacttgctcacattacttaaaattgagataggttaggcatctatccaatctcccatgccagtaattctacagaaacagattaggttagctagataagcatgtttacaattaaatttatgctgtatccttctaatcaccactttctcatcaaaatgctyacaaatcatctgcatcattgtccattctttaaaaatgtataaacccatctctactaaaaatacaaaattagctgggcatgatggcgcacgcctgtaatcccagctgttcaggaggctgaagcagaagaattgcttgaaccccggagacggaggttgcagtcagccgagattgcaccattgctctctagcctgggcaacaagagcaaaactcc

SEQ ID NO: 804663 - DNA, 609 bp, Homo sapiens
gaatagtatgtgcaaaagccctggggtttaagaatatgatgtttttagagaactgcaaataattcagtatggttggagcagagggatgtggaatgattattgattctgttggagagtagacagaggccagattgctatgcttagatacaatttcaaccacctacaaatccatctaattacctacatgaccatcatcatctggtcatgtttctccattttatcattatgtataccttaaagacttgctcacattacttaaaattgagataggttaggcatctatccaatctcccatgccagtaattctacagaaacagattaggttagctagataagcatgtttacaattaaatttatgctgtatccttctaatcaccactttctcatcaaaatgctcacaaatcatctgcatcattgtccattctttaaaaatgtataaacccatctctactaaaaatacaaaattagctggkcatgatggcgcacgcctgtaatcccagctgttcaggaggctgaagcagaagaattgcttgaaccccggagacggaggttgcagtcagccgagattgcaccattgctctctagcctgggcaacaagagcaaaactcc

SEQ ID NO: 804664 - DNA, 597 bp, Homo sapiens
accaataatgagttttgaaattgaggcagtaataaatagcctaccaaccaaaaaaagcccaggacccaatggatttacccctgaattctaacacagaagatctggtaccattcctactggaactattctgaaaaattgaaaaggagggactcctccctaactcattttaygaggccagcattatcctgataccaaaacctggcagaaatacaacaaaaaaggagaaaactttaggccaatatcctttatgaacatcaatgtaaaaatcctcaataaaatactggtaaaccgaatccagcggctcatcaaaatgcttatccaccatgaccaacttgacagcatccctgggatgtaagcttggtttaacatatgcaaatcaataaatgtgattcatcacataaacagaactaaagacaaaaactatatgattacctcatagatgcagaaaagatctcaggtaaaatttaacattccttcatgttaaaaactctcaataaaccaggtgttgaaggaatatacctcaaaatggtaagagccatatatgacaaacccaaaaccaacatcattctggatggacaaaagctggatgcattcccc

SEQ ID NO: 804665 - DNA, 597 bp, Homo sapiens
accaataatgagttttgaaattgaggcagtaataaatagcctaccaaccaaaaaaagcccaggacccaatggatttacccctgaattctaacacagaagatctggtaccattcctactggaactattctgaaaaattgaaaaggagggactcctccctaactcattttacgaggccagcattatcctgataccaaaacctggcagaaatacaacaaaaaaggagaaaactttaggccaatatcctttatgaacatcaatgtaaaaatcctcaataaaatactggtaaaccgaatccagcggctcatcaaaatgcttatccaccatgaccaacttgacagcatccctgggatgtaagcttggtttaacatatgcaaatcaataaatgtgattcatcacataaacagaactaaagacaaaaactatatgattacctcatagatgcagaaaagrtctcaggtaaaatttaacattccttcatgttaaaaactctcaataaaccaggtgttgaaggaatatacctcaaaatggtaagagccatatatgacaaacccaaaaccaacatcattctggatggacaaaagctggatgcattcccc

SEQ ID NO: 804666 - DNA, 657 bp, Homo sapiens
tggtcatggcaacagaggaatctacattaacaagctttactaaccagcctttatctgccagttatttgccttccccctacattgctacctctaaagacacaaagttccttccttttgacctgttacttcgctaaaaatgtatggctctttgttgaagatgctatataagttggaattcacagccacctctttgaaagctactcattttctgggtgtctcccacgtgtatatgaaatatgtatgttaacaaacttatgattgtttttctcttgttaatttgtcttttgatacaggggtcttttccaactaagaacctatgaagtttgaagaaaaattgttcttcccccacaatacatttatttaaaaaaatgtagttcttttaacattttacattataggaggtattaaaaacatcagtttttaatgataaaactgaagagtctagtaagagtttaatccttttctttaaagatagaaatcttcctacaaaggacatgaactcatccaaaagaaaaaarttaaatggcaaaaaaaagaaagattaaaaaaaaaaagaaatcttccattttcaccctatcactttatctgtccctaactgactctaaaactttgtgaaagttaggtaaacatggtggaatagacctttcagtggtttcc

SEQ ID NO: 804667 - DNA, 632 bp, Homo sapiens
tttttaaaaataaccttttgggtcttaggcaacttaagaaacatggcacgcccacacccactctgcaatttctaaacagaggagcaggaactcctctgggaagtggctcaaagccagcaaggagaaagcacttctcaccaatgctgggagcataagctctcaggcaagtcgtcctcagtaggtatccctagatatccgtaatagaagttgtgacttctcacctttacaattgttacctcagcactacctctggccagtgaaaaataaatggagctacaacatagaggctgtttcttgattgaattggcgggctcagtgttatcaccatttcaaatgatttataaataatatttttgtagcaaactcagagggaagaactatagagactgtcccctgggttaattcccttcccactctgactcaygtttttctctctaaacctctgcctccatttctccatgtgtatgatggaaacaatcaataaaacctcattgacaggtttgtcttgagaataaaattaggtttgggaaggtctcagcagttgatgaatgctgagaattattcttacatatgatcgacctaacagactgacaagctgatgttgacgttgacaaaaagcgggtagagaacct

SEQ ID NO: 804668 - DNA, 570 bp, Homo sapiens
tggtgattagatttctgtgattcccaaatgaaagctgaagtcattaaaaatgtaaaagaaaaaaagacacacaaaaaccggaaagctgtgtgctccccagcaggaaaatttcccacaccataattctggaagcaaattatctgctttgggtgctggggcagactcttggaaagacacctaatgygtggctgaacagtccaggggctcctcagtccactgcttgccactctcagggctggttctgggctctggaagatgacagatggggaattcagttagtccaagtagcaagatggcctttaggtcacaacgaaagagatggagttctagctttatgctgtgcatttgaactcaggttagctttatattatctatggcttttgaatacagttacctgtgtccctattaaatcaaactatttgaagggaagcctgaataaaactgaatttgggagtgcaggaaagctgtggggaataggctgtatatgccaaagggagtcctgcatgggcactggggaaagacctacaggcacttgctgagctgtggatcccctacctggggttcagagtt

SEQ ID NO: 804669 - DNA, 593 bp, Homo sapiens
attattcccattttatgaatgaatgagcccagacttaaagtgctggagggatttaatattctcctggatctatctgccttgctggctactccttcaggcttccttttgagttcattcttctcttaccacgtctgtaaatgttagaattttttaaggaatgttacacagttgagtcgtcttctcttctcaccccctacttactcagcacagtataaaccactctctgggaactccagaattttgtctctatctggaatctcccctaggaatggcaaaattaacctaaagaatgtacaaggaaggaaaaaatasacataaacctaggtatttttattttgttaattagaaaagtagaaagaacagataatgattccaagagttgcttttcatttaaccaataaaataacaaacccttaactgacccaataaagaaaatgggagcagtcacaaaattaggaatgagaaaatatttcaagagaccactctgctcaatgctatgttgaaacttttgaaaacctaaataccaattaaatttttccagtaaaatatttatgaccaaggtttactctacaagagagtctactactagagtt

SEQ ID NO: 804670 - DNA, 575 bp, Homo sapiens
taaaggctttttactgtttaaaagttatattgtaattctgacttttgttcacgtatttgatgattcaattatttattcattacatagtcaaaggtagaaaattacatgtaattacttgtgcttatctgataagcatagtgactgatgtaygtaaatgctcaatatgtgatggatgaatgaatgaatgattaaattacttaataaatagtgctttgcctagttttccctagattatttttataaactagtttttcttctcacctatccccaagctcctaattaaataattacttggagtagaatcaaccaagaatacttacatgcacatcctaagctcagtgacaaccaaggcaggactttctcctttgctaatgctctcatccaagtgaggtgtctgcttggtttggattaggccatgcagattctggtgacatccatgttatcacaggtcacattggcctgggtgccttgccatgacataagtcactcaaaaaagatagaaccataaataatttggctgacacgggttagctttatttaaagcaagttattttattaacagttccaagattgaa

SEQ ID NO: 804671 - DNA, 478 bp, Homo sapiens
aagggtggatccctcatgatgggattagtgccctataagaaaagacaccagagagcacctactctctctctttctttctctctcccccaacctcccttcctccctcttccccaaccctctctcccccagccccatgcatacacatacaaagaagaggtcacaggagcacacagacagatggtagtagtctacaagccaagagaagaggccccagaatcaaacctaccctccccaaactgtgatcttgaccttctagcctccacaactgtgaaaagtaaatttctgttgataaagccacccagactgyggtattctgtcttggcagcctgagctgactaatacagttgctatctaggattgcctgtgattaaaacactgaaggaaaaataagaaaattttctctgcttttaaaaagaaaatacgctgctccacccacattttaatgctagagtcggctctttatcttcccacatattct

SEQ ID NO: 804672 - DNA, 572 bp, Homo sapiens
gtcaatgaatatatatttattatgtcatttatttatttaattttttattagacggagtttcactcttgttgcccaggttggagtacaatggaatgatcttagctgactgcaacctccgcctcccaggttcaagtgattctcctgcttcagcctcccgagtagctgggattacaggagcctgytaccacgcccggctaatttttgtatttttattatactttaagttttagggtacatgtgcacaacgtgcaggtttgttacatacgtatacatgtgccatgttcgtgtgctgcacccattaactcgtcaatttttgtatttttagtagagatggggtttctctatgttggccaggctggtctcgaactcctgacctcagatgatctgcccaccttggcctcccaaagtgctaggattacaggaatgagggatttatttaaataagtagcaatctgccggctgagctacagggcaagcaaacacgtgtttcccaaccaacccagggaagcctgagcattggcagtgagtatgacatttcgctgagtaattattatttttaaaattactacata

SEQ ID NO: 804673 - DNA, 566 bp, Homo sapiens
ctatgaaagtcctaaacagcatcttccaatatcagaatgtttcatctgcattgaaaaatctgttgagtgtagccaccttcatcaatattcttagctagatcttctgataacttactgcaacttctccattggtagttgctgcttcaccttgcactattatgttacggagagggcttttttctttaaacctcgtaaaycaacttctgctagcttcgtacttgtcttctgtggtgtcctcacctgtctcagccttcacagaattaataagagagttaaagcctttctctggctggtttgcttgtctatccagaccactcagactttctctgtatcagcagtaaggctgttttgctttcttatcattcatgtattcactggagtggcacttttaacttccctcaagaactttatctttgcattcacaacttggctaactgttaagcgcaagagaactttcagcctgtcgtggcttttgacatgccttaattactaagcttaatcatgtataggtttttatttaaagtgagaaatgtgagactcatccttttacttgacacttagaatcc

SEQ ID NO: 804674 - DNA, 582 bp, Homo sapiens
tatgttcttctccagctgtgtcccagtcatacataagctagatccctttcaatatgcattgggagaaattttcaaaatgatacatttggcagacaatcctcatctggattttaattaaggccccatgcaaaatgctgccgggcatgtataaaaaggatctacacatgtcaaaaagaagttacaggtggaaacaggaaacaggctggtagttctctgagagctttagaaattataacttcagttctgatgatagtgactagaaagccctgataaattaaaaattaaatattttataaattaaatttacttttgggaaagtgtaatgttaacacaaatgtagagcacagtaaaaatcattttggattcaaaacgaaaatgttaaggacagagaggtaggaaaaggtatytattcaaaataaaatattctggaagcattatgatctgcttttatatacaggatagaggtgacaaagcatgaagaagtagaaaaatgagcagagaagcagcaaagtaatataaaatggacaaattaggcagaaaatgaaagaagtgaagcagaaattcccttcaattacaaagact

SEQ ID NO: 804675 - DNA, 633 bp, Homo sapiens
catagtaaatgctcagtaaattttagctgtcatgatcaccatcattcttaatgcatttcctagttgtatagataggtttctggaatgaattcccaataaatgcatgtcttgtaactccagatgcactcagcatttcctagaagaactgaggcgcattaggggatacaaccaggcaaaatgtccagaagaatatgaaaagtctgtcttgggatgaaatgaaaaacctataagccaacaaaatggtaacaacaaaagatcctgaaactttctgctttccattcatcatcttagccttcatatkgtaatatgggagtgaaaacggaaagaattattaaattccttggaatattgacgccaggtaatgactgatgtcctcctccctgaaactcctaatataatatttagtgttgaaggaatcaaagatagtagaggagacaaatagagtctctaataaatataaatagagtcttcttataagaggagtttgtctattcagaaaaatcttggttacctctaacctgtctgtctttttttgttgctaagaatttgtggaatatattatagtcacttcaccttgtacttaaagtacattaatatgctttaagattcaagatagatgaaaagataaataga

SEQ ID NO: 804676 - DNA, 619 bp, Homo sapiens
aatttactaatatgaagtgtgtccatccttctagaactttatcatcattgtattaatttcaccatcttctgagaaaagtccaccttttcaaaggcatttttctaatcaagattatttagcatttaactttttaccttttaaaaatgctttggttkgttttttgaaattgttttcttttgctatcttaatttatgaaaaaagatgttgaaacacaggggtcttaagatacacgtacaaaccccctgacaaagtatggattagctcttgtggaagagccaagagtaaaaccaagaaaacattgaaagttgtttcatttagagctacaaggaattaaaatacagatagtaaacaacaacaacagcatgttcagaataaaaacacagcttttcttggaggaaaattttataggacaattaagagtacattattttctcacaatgcagtagactttattgcaatttatgagatttatacctgagaggcattttaaatggacaaagttctcttactattattattattattaccatgcaaccatgatagaaaagaaaccttttagaatttggcaagaagaatagaaaaggtagacactcaagttttctaatttctttaatatgac

SEQ ID NO: 804677 - DNA, 619 bp, Homo sapiens
aatttactaatatgaagtgtgtccatccttctagaactttatcatcattgtattaatttcaccatcttctgagaaaagtccaccttttcaaaggcatttttctaatcaagattatttagcatttaactttttaccttttaaaaatgctttggtttgttttttgaaattgttttcttttgctatcttaatttatgaaaaargatgttgaaacacaggggtcttaagatacacgtacaaaccccctgacaaagtatggattagctcttgtggaagagccaagagtaaaaccaagaaaacattgaaagttgtttcatttagagctacaaggaattaaaatacagatagtaaacaacaacaacagcatgttcagaataaaaacacagcttttcttggaggaaaattttataggacaattaagagtacattattttctcacaatgcagtagactttattgcaatttatgagatttatacctgagaggcattttaaatggacaaagttctcttactattattattattattaccatgcaaccatgatagaaaagaaaccttttagaatttggcaagaagaatagaaaaggtagacactcaagttttctaatttctttaatatgac

SEQ ID NO: 804678 - DNA, 606 bp, Homo sapiens
ctataaatcttagtaaatagaaatcatttcatcattctaatcacttatcagagcagtaaataactatagggcactatttaccctgcctaaaaatgaaatgattagtaagaatattctaggtgccatctagaacttgtcagcccctaactgtggattcctggattatagcacaataagacacatagaaaagaattatatcttttgaaaaggtaaaactgatttaaactactttttctttccgtctatcagctctatgacctgtcaaatcccaggtctttgccactctggctgaatgtctcctttgctctgcaccactctgtgtgatasctgctcttttttctggttcacatatttcataaaaataaatgaactttttaaaacacaaaaagtgcatttgctttttggtgccatctcttctcagcttctttcttcctgttgaaaaagtggcaatatttttctttttttcctcctttggtcctcaagtactagcattgcatttttctcttgccctttgtgacttaggcaagattcattttatttctcgtttttattttcttgccttacggaaaaaagatgatttgatgactttctctactcaaagatgtg

SEQ ID NO: 804679 - DNA, 646 bp, Homo sapiens
  misc_feature 39: n = A,T,C or G
tagccaaaggtggtcactccttgtctgcaaatgactggnaaaactcagatgtgaccagggactctctccatattatgtgtgcaccagggttatatttgtttgttggctttagaggccacacacacaatcaagcgcgctttgctaaaatatctctctagagcacgtctctttatggtttgttttaagggtgtgtgtgtgtgtgtgtgtgtgtgtgtgtgtgtgtgtgtgtgtgtaactgaaaaccgtccagtaattattagccactgataaactttttcattttatcaggattttcaccataattattcatcaaattttctgtctcacttgcttaraaaactaaatgggagtatcacctcaagtgtatgctcattacaactggaggaaaattatcagcatcactagggaaatgttttataatataattaaatttcatggagcacaaaccatgcttaaagccaaaatactggacaacattaggaaagcagatttaatgcaaataactatttaagaattttttaactattgattcattttttctttgaatgatagtgtaccaagtgcctgctctgagacaagcatcttgccaaacactagagatcaaagaaaaatgacgtaacctttttcttaaaggaagtcacagttg

SEQ ID NO: 804680 - DNA, 627 bp, Homo sapiens
atttatggacaaattatatgtattacatgaatacatactaattccatcacatacattaaaaagctatgtctgttgaaaatgttaagcgataaaaaaatttaagagaatttactgaaaacagagaaatgacgtgcatatgaatgattctaaatgacaaatgaagagccgaagttggaatccacagtgaaaaataataagaaatgaagaaaaattatacaattgaaaaacattttttagatgttgctagagctgtgtctctcaaactatagcatgtatatgaatcacctgggaaccccattaaaatgcagactctgattcaggtctgcggtggggcctgggattctacatttttgacaaatgacgtcctcggaccgcatcttgagtagcaacagtctaggctagagtggcactgttcaatagaaatacaatgtaatckacacacgtaatttaaaatttcctagtgatcccagtgaagtaaaaatgaaatgaaaaggtgattaatattaacagcttttatttcactccatatgctgtatagtcaatatattatttcaatatgcaataatataaaaattatcaatgagaaattttccattgttttctttcgctgtcattagaatacaatgt

SEQ ID NO: 804681 - DNA, 627 bp, Homo sapiens
atttatggacaaattatatgtattacatgaatacatactaattccatcacatacattaaaaagctatgtctgttgaaaatgttaagcgataaaaaaatttaagagaatttactgaaaacagagaaatgacgtgcatatgaatgattctaaatgacaaatgaagagccgaagttggaatccacagtgaaaaataataagaaatgaagaaaaattatacaattgaaaaacattttttagatgttgctagagctgtgtctctcaaactatagcatgtatatgaatcacctgggaaccccattaaaatgcagactctgattcaggtctgcggtggggcctgggattctacatttttgacaaatgacgtcctcggaccgcatcttgagtagcaacagtctaggctagagtggcactgttcaatagaaatacaatgtaatctacacaygtaatttaaaatttcctagtgatcccagtgaagtaaaaatgaaatgaaaaggtgattaatattaacagcttttatttcactccatatgctgtatagtcaatatattatttcaatatgcaataatataaaaattatcaatgagaaattttccattgttttctttcgctgtcattagaatacaatgt

SEQ ID NO: 804682 - DNA, 636 bp, Homo sapiens
tccttagaagagcctgctgtgaggtgcagctgggccccccggctgccatccatctcctgccactcctgatctggatcaggtaggctccagcttaccacgtattagctggcagcctgcacgagggctatgccattaagaagatggaaatctagagatrgttttcacggcagctccaaacttctcacagatacagaagcacacccatattgtagactgaagcaaaacgcaactgggaaagcctttgccattttccatatatcaccttaactttaatggtcctgcctccaagcctttcttcggttgttgccccttccatttcatcctatccaaactctaacatcctggcaattttaaatcccacctcctccatgcagccttcctttctttgttttcctccagcaggaaatcatctcttcctatgtagatcagtaagggagaaaatactaagagtaaaatatgttttctcacttacaggctttggataagataacttattgggccataattttctcatttgaaaaaaagagaaatactactactcaaattataggtttgtcatgaggatggaatcatgcaaagcaccaagtccagtgcttaggacacagcaggcatttcataaattgcagttatcattac

SEQ ID NO: 804683 - DNA, 591 bp, Homo sapiens
aagtgctaattatattttgcagaacttatgtgagtctactcccccaaagtttagaaagatcataattgtcttggtgttttcccctaatcttaggagtatgctgactataatgcttaaaagtgctttcatttttattaatactagagaaattcaggcctttagtgcttttcactaaagactatgggaagatggtatagcaagtaattacattttacttctagcccttgttccygactggtccattacttcttgataacttaataaagctaagaataaagttctttcagattattgaataactattttttcttttaagagtcaaagtctcgctccatcactcaggctggagggcagtggcgcattcacagctcactgcaactttgaactcctgggctcaagtcatcctcctgcctcggccccgcaaaatactgggattaaaggcatgaaccaccattctcagcctaaaaaactattttttctgtcctacagagattattattgttagttgaggttttgttctgggaaataccagactatggtagagctcccaaaaagtttctcagtttcataaacctaagaatctgttccatt

SEQ ID NO: 804684 - DNA, 612 bp, Homo sapiens
gaactcccgatttatagctcgtcattcaaaagaagggaggccctcagcttgcaattgacatctgaagtgatggcagccttgtgggactgaacccttaatttgttgcatctgatgccaactcaaagtacataacatcagatagaaccgcacgaagtccagctggtatctgaagagctggagaactggttgatgtcagggaaaaaaaaaaccccacacatttggtgccaggagtgttctatgggtagaaacagatcacagtagtkggtatcagaagtattatggataaaacacagttccaaattaataatatccaaatgatcaataaacataagatattcactatcattagtcatcaaagaaatgcaatgacattccactacatgcccaaaggaactgctaactttttaaatgataataccaaaattgataaggatgtgtaactactggaattctaatatactgctggcaggaatagaacgaagtataaccagtttagaaaactttttggcagtatagctgctagagctgaacatatgcatatgccatggacctgcaaacccactcctaggtgtatgcgcaagagaaaatgaatacatattcgcgaacagaaga

SEQ ID NO: 804685 - DNA, 671 bp, Homo sapiens
ccaaaccccaacccagcagaaaaaaagaaataaagatcagagaagaactaaatgaaattgaaacaaacaaaaaaaatacaaaagacaaatgaaacaaaaagctggttctttgaaaagataaataaaattgatagatcattagcaagattaaccaagaaaagagagaaaatccaaataatctcattaagaaacaaaacaggagatgttrcaactgacaccactgaaatacaaaagatcattcaaggctactatgaacacctttatgcacataaactagaaaaccaagaagagttggataaattcctggaaaaataccaccttcctagtttaaatcaggaagaattagataccctgaacggaccaataacaagcagcgagattgaaatggtaatttaaaaattactaacaaaaaaaaaagcccaggaccagagggattcacagcagaattctaccagacattcaaagaagaatgggtaccaatctttttgacaccattccacaagaaacagaaagaaggaaccctccctaattcatcctatgaagccagcatcaccctaataccaaaaccaggaaaggacatacacaaaagagaaaagtacagaccaatatccttgatgaacatagatgctaaaatctttaacaaaatactggctaaccgaatccaacaacat

SEQ ID NO: 804686 - DNA, 671 bp, Homo sapiens
ccaaaccccaacccagcagaaaaaaagaaataaagatcagagaagaactaaatgaaattgaaacaaacaaaaaaaatacaaaagacaaatgaaacaaaaagctggttctttgaaaagataaataaaattgatagatcattagcaagattaaccaagaaaagagagaaaatccaaataatctcattaagaaacaaaacaggagatgttacaactgacaccactgaaatacaaaagatcattcaaggctactatgaacacctttatgcacataaactagaaaaccaagaagagttggataaattcctggaaaaataccaccttcctagtttaaatcaggaagaattagataccctgaacggaccaataacaagcagcgagattgaaatggtaatttaaaaattactaacaaaaaaaaaagcccaggaccagagggattcacagcagaattctaccagacattcaaagaagaatkggtaccaatctttttgacaccattccacaagaaacagaaagaaggaaccctccctaattcatcctatgaagccagcatcaccctaataccaaaaccaggaaaggacatacacaaaagagaaaagtacagaccaatatccttgatgaacatagatgctaaaatctttaacaaaatactggctaaccgaatccaacaacat

SEQ ID NO: 804687 - DNA, 630 bp, Homo sapiens
acagaaattaacaaagaaattttggattttaactgtgtactttagaacaaatggacctaactaacatttacagaacattgtacccaacagccacagaatatacattcttctcatgagcacatggaacattctccaggatagaccatatgttaggacacaaaacaaatctcaaaaattgtttttaaattgaagtcatataaattatattctcagatcacaatggaataaaacagaaattgataataaaagaaactttggaaactgtacaaatayatggatattaaacaacacgttctggaatgaccacagggacaaggaagaaattaacaaggaaataaatgagttagtgtttgtaaagtgctttaagcagcaactgccacagaaagcctatgtgtgtatgcttatttgtgttttttgttaagtttatctttctcttgtctcctgacttccctgtcatgtttcctcgtgaagcaagggatcaatctcaatcaactttccttttcccatgaaaattccacccatccctcaaggttctgttcaaacacttcgtttcctcgtgactcttccttaaaacagcgtctcgctttgttgctcaggctgcagtgcagggtgcaatcatggctcactgca

SEQ ID NO: 804688 - DNA, 616 bp, Homo sapiens
ctgaaaataccttcaagtcctcaatcatattttcatggtactatgcttctaggacctctgctatggagtttgagaagtcagtgtagcacaagataaaaacaaactaaatcataaaataaatgtaaaaaaaactcatgttctgattctccccatgatgactgwttttaataacagaaatgatcaaattctggcggggcgtggtggctcacgcctgtaatcctagcactttgagaaaccgaggtgggtggatcacctgaggtcaggagttcgagaccagcctagccaacattgtgaaaccctatctctactaaaaaacaaaaattaactgggcatggtggcaggagcctgtaattccagctacttgggaggctgaggcaggagaatggcttgaacccgggaggcagaggttgcagtcagctgagatcataccactgtactccatcctgggtgacagggtgagactctgtcgagagagagaaagaaatcaaattctttcaaaatgtttttctcatattttatgagtggtattggaaggaccctaagtacctgtataatctatgtatttgataccctagaatggggccaagtatcattgttactcatatttaacaaaaca

SEQ ID NO: 804689 - DNA, 616 bp, Homo sapiens
ctgaaaataccttcaagtcctcaatcatattttcatggtactatgcttctaggacctctgctatggagtttgagaagtcagtgtagcacaagataaaaacaaactaaatcataaaataaatgtaaaaaaaactcatgttctgattctccccatgatgactgtttttaataacagaaatgatcaaattctggcggggcgtggtggctcacgcctgtaatcctagcactttgagaaaccgaggtgggtggatcacctgaggtcaggagttcgagaccagcctagccaacattgtgaaaccctatctctactaaaaaacaaaaattarctgggcatggtggcaggagcctgtaattccagctacttgggaggctgaggcaggagaatggcttgaacccgggaggcagaggttgcagtcagctgagatcataccactgtactccatcctgggtgacagggtgagactctgtcgagagagagaaagaaatcaaattctttcaaaatgtttttctcatattttatgagtggtattggaaggaccctaagtacctgtataatctatgtatttgataccctagaatggggccaagtatcattgttactcatatttaacaaaaca

SEQ ID NO: 804690 - DNA, 561 bp, Homo sapiens
gtctcaaaatcctggcctcaggcaattctcccacattggcctcccaaaatgctgggattacaggtgtgagccaccatgcccagccctgtttgggagcttttaagatcttttaagttcttcattcttcacaatgatgtaccctaaagtcttactgtaactatgcttggcactttgtgtgctcttaccgtctgaaagctcttttttgtttttgtttttgcttttaaaattgagacaggctcttgctctgttacccagactggagtgcagtggtataatcatggctcactgtggcagcaaactcctgggctcaagtgatcgtccgacctcagcctcccaagtagcygggactacaggtgtgtgccaccacactgagctaatttttaaatttttttgcagagatgaggtctccctatgttgctcaggctggtctcaaactcctaagctgatgtgatcctctggcctcccaaattgttgggattacaggtgtgagccacagtgctgggcctgaaaactctcataggtcagtttcaggaaatgttctcaaattatttctttgttgtt

SEQ ID NO: 804691 - DNA, 599 bp, Homo sapiens
atcaccatgaaagtactctgaaaagtcaagcatgctctgtgagtataaggaataagggagacagtgattggctctgcagcacctattcagctcctctggctgctcatggctctcccgtgcccttggaaatgctcagttaggaaaaggcctgttgwtgtgtctggatgtgatgactaggatctcaatggccatctagggagaggattcaacctgcaccatataagggaaacagcagaggtagagaaggaagctgaagtgcctaccacatcatgactggggctaccctatctctggacttcctatggaaaagaatacatttcttgatggtttatatggatccaaattgtgtttttctattatttgcagacaaaataatctcacagacataagaagttattaaaatccataaaacagtgctttctgaccatttaaactagtaagtggcagagctgggtttgattccacttaatagccacatgtctttgggcaagttgtttgacctctaagtgaaacagcctcattgtctggagtcacacccgaggttcattttctcatggccacggagaacaataatgaggacacataaagattgaggttga

SEQ ID NO: 804692 - DNA, 599 bp, Homo sapiens
atcaccatgaaagtactctgaaaagtcaagcatgctctgtgagtataaggaataagggagacagtgattggctctgcagcacctattcagctcctctggctgctcatggctctcccgtgcccttggaaatgctcagttaggaaaaggcctgttgatgtgtctggatgtgatgactaggatctcaatggccatctagggagaggattcaacctgcaccatataagggaaacagcagaggtagagaaggaagctgaagtgcctaccacatcatgactggggctaccctatctcyggacttcctatggaaaagaatacatttcttgatggtttatatggatccaaattgtgtttttctattatttgcagacaaaataatctcacagacataagaagttattaaaatccataaaacagtgctttctgaccatttaaactagtaagtggcagagctgggtttgattccacttaatagccacatgtctttgggcaagttgtttgacctctaagtgaaacagcctcattgtctggagtcacacccgaggttcattttctcatggccacggagaacaataatgaggacacataaagattgaggttga

SEQ ID NO: 804693 - DNA, 482 bp, Homo sapiens; identical to SEQ ID NO: 747549

SEQ ID NO: 804694 - DNA, 589 bp, Homo sapiens
gctgggctgaactgggcttatattctgttctggtccccaaacagagaaagtgaatctgaggatgttggcagctgacttcccagcctcatgaggagactctatctgcaaaaagaagctcaagatgggaggcattaaaaaacacagacacacatacacaaayaaaaacacacaaacaagaaaaaaatatcctgatgacactgccaggctctcaaagtccagatttgcctgaagttggatccacttttggatgtttgagttccagaaattttatttttttgataaaatttgtgtgactttaaaccatggttttaaagcatgttcggagtcattcctgctgcctgctgtccaggggtcagtcactggacttcccgaatcctgttggtgtctgctcgaagcaaggacccctcgagctgtccttgtccaggttccttctttattcttccaagccctccccgaggacacaggtattacactcctttctcaagagtattcctgtggctgtagctgccccaacagctcagctgggcagtgaggaagggacaggtgactcattcttgccttctccagccagggaatgcaggctgggtgg

SEQ ID NO: 804695 - DNA, 589 bp, Homo sapiens
gctgggctgaactgggcttatattctgttctggtccccaaacagagaaagtgaatctgaggatgttggcagctgacttcccagcctcatgaggagactctatctgcaaaaagaagctcaagatgggaggcattaaaaaacacagacacacatacacaaacaaaaacacacaaacaagaaaaaaatatcctgatgacactgccaggctcycaaagtccagatttgcctgaagttggatccacttttggatgtttgagttccagaaattttatttttttgataaaatttgtgtgactttaaaccatggttttaaagcatgttcggagtcattcctgctgcctgctgtccaggggtcagtcactggacttcccgaatcctgttggtgtctgctcgaagcaaggacccctcgagctgtccttgtccaggttccttctttattcttccaagccctccccgaggacacaggtattacactcctttctcaagagtattcctgtggctgtagctgccccaacagctcagctgggcagtgaggaagggacaggtgactcattcttgccttctccagccagggaatgcaggctgggtgg

SEQ ID NO: 804696 - DNA, 589 bp, Homo sapiens
gctgggctgaactgggcttatattctgttctggtccccaaacagagaaagtgaatctgaggatgttggcagctgacttcccagcctcatgaggagactctatctgcaaaaagaagctcaagatgggaggcattaaaaaacacagacacacatacacaaacaaaaacacacaaacaagaaaaaaatatcctgatgacactgccaggctctcaaagtccagatttgcctgaagttggatccacttttggatgtttgagttccagaaattttatttttttgataaaatttgtgtgactttaaaccatggttttaaagcatgttcggagtcattcctgctgcctgctgtccaggggtcagtcactggacttcccgaatcctgttggtgtstgctcgaagcaaggacccctcgagctgtccttgtccaggttccttctttattcttccaagccctccccgaggacacaggtattacactcctttctcaagagtattcctgtggctgtagctgccccaacagctcagctgggcagtgaggaagggacaggtgactcattcttgccttctccagccagggaatgcaggctgggtgg

SEQ ID NO: 804697 - DNA, 547 bp, Homo sapiens
ttctgctctcaccgttaatctttgtttttctttatgtttccataaaaatacccctcatgcccaagactaggagattggttcgacaaaatacggtgtagtgtgcctacgttaggtctttggtgctgattgatatttgttctgatgtatgttccttccctttgcagatccttacctcacaaggcctgaccagtgtcttcaataaacccasttccttgtttgtgaaacatctggggaagtattaaatgggggaaaggaaggaattaacagcccaccaaaatggtgtgaaaattactttaaactcaaaacatcttcacaatcagcagccacagaaagaaacattatctaaacttaggcagagcctcctgaattacagcttctatgaccccctctgagggagtttcccgattgtgagaagactcatcctaggatcagcgagtgaggatttagctgtcccttatcatcacaaggcccaatagaaacttccctactttcccatggagtccaaaccccactccccctctctgttaagttggtatataaaccttta

SEQ ID NO: 804698 - DNA, 660 bp, Homo sapiens
gcgaacctagacagctataaagtgaccaatgggcccatggctcctatggtgtggatccgctggacacgggcagacatggctcccatggcgtggatccgctggacacaggcagacatggctcccatggcgtggatccgctggacacaggcagacatggctcctatggygtggatccactggacacaggcagacatggctcccatggcgtggatccgccggacacaggcagacatggctcccatggcgtggatccactggacacaggcagacatggctcctatggcgtggatccgccggacacaggcagacatggctaccatggtgtggatccactgacacaggcagacatggctcccatggcgtgatctgctggacacaggcagacatggctcccatggcgtggatccactggacacaggcagacatggctcctatggcgtggatccactggacacgggcagacatggctcccatggtgtggatccactggacataggcagacatggctcccatggcgtgaatccactggacacagacaggattcactttctgggcaggaccgagtgggatggcatgagatctcatcacgctactcagagtgatgcccaatttaaaacttatgtattatttatttccagaacttcccatttagtattttca

SEQ ID NO: 804699 - DNA, 660 bp, Homo sapiens
gcgaacctagacagctataaagtgaccaatgggcccatggctcctatggtgtggatccgctggacacgggcagacatggctcccatggcgtggatccgctggacacaggcagacatggctcccatggcgtggatccgctggacacaggcagacatggctcctatggtgtggatccactggacacaggcagacatggctcccatggcgtggatccgccggacacaggcagacatggctcccatggcgtggatccactggacacaggcagacatggctcctatggcgtggatccgccggacacaggcagacatggctmccatggtgtggatccactgacacaggcagacatggctcccatggcgtgatctgctggacacaggcagacatggctcccatggcgtggatccactggacacaggcagacatggctcctatggcgtggatccactggacacgggcagacatggctcccatggtgtggatccactggacataggcagacatggctcccatggcgtgaatccactggacacagacaggattcactttctgggcaggaccgagtgggatggcatgagatctcatcacgctactcagagtgatgcccaatttaaaacttatgtattatttatttccagaacttcccatttagtattttca

SEQ ID NO: 804700 - DNA, 618 bp, Homo sapiens
gaagccagcagaacatctctcgttcactctgtgcttcctttctcctgttcctggggctcaggctccagccctgctgggcagccccctccatggcctcagctccccttgcaccccccagctctgggcataccatcttctccccttttcccttcagccctggggcatggtaacaactgcctgctgttgtcaatagccccacccagtgtggctcctcggcttttttatcacctgaattaaaaaagcattccattcaatccccacctttaacaaacttagtatggactctgatacactcagtaaatgatgattcccacaagtacacagatactaggaaaataaagtggactattctcggatgatgataaagggattscagggatcaaatcccaacagcccacgggaaagactgccgcagggaggacgtgtccacagggtgaggcagggccacgtgcttctgtggccacagatgaaggaggtgcctggctctgctctgacctggctgactgcatgcgtcttctttaaaagctccacgtcatctcccagatgtggaagccgaggctcagagggcaggagtgacctgctggtggggatgcagctggatccaaaggaggagctaga

SEQ ID NO: 804701 - DNA, 645 bp, Homo sapiens
ggaggagctagagccaggtcccccaacccctagccaggaggccaaatgctcaacctgggcctggcagcgctcaccctgacttgggtcctccttgtgtgttacagtcaaagagggctacaaagtccagtcagatgtgaacatcacactggagtttcgaacctcctcgcagaatggcgtcctcctggggatcagcactgccaaagtggatgccattggactagagcttgtggacggcaaggtgggtgcttcctctccakgagggtcttcctccccccagtgtcagagacagagcaattgagaaacagcagattcaaattcacaactatctattttcatggagtcaaacaatggtcccattactattttaaaaacagatattgctacaaaaaaacctttttggtttattttttaaaagcttttcaaaaataactttttatatgtttgaaagtaagctttcagcaaaattacaactataatacaaagaactttttttcctgaaccatctgagaataagctgctgacctgatgccctatcccttctaataattttttttaactttttatttggaaattattacagattcataggaagttgcaatgaaatgtacagggagggccccatgcaccattcacccagacccaggt

SEQ ID NO: 804702 - DNA, 619 bp, Homo sapiens
ttcgtagtgatgtataaagaatgctgtcacctactcatctcatactttagcccataaagaaagccattaggtcttggccaaatcagcacttcaagaggtcttttaggtgtacttgtgtcacattatttttaaattctaaaatgtctaaagtgtgtcatgacagttagtaatgtgctttaacacacttcacttacaatcacaagcaggaactactccaaacagggaagaaagctctggtttcatatatatgcaagtgttaggtcatgtgctatgtttctagaaagtttttcaaatgttagcgtttcctctcttaacatgatggctgcacagaatctcagacatttcartggaggttggcagaaaggctgaaaagctgcacccagaagaagaggttgcatctcttttagagaattgtgtctgtcctcctggcactgtgggattctcatgtcaggtacggagactctagtcgaaatctatttcctgggtttgagttgaaatgtgcttgttacagcaactcccagagatgaacagaacttatgtgtatctactatatcatttttttctctttttgaattaaaaagaaattaattttggtaaaatgtacataacaaaatcttcc

SEQ ID NO: 804703 - DNA, 582 bp, Homo sapiens
agatatttttcattaaattatgaaatataatattaatatgtacttatttagattacgttttaactgagctttaaaatattgaatatgtacctgattggaatcagggcaaatggctaagttgattttgaaatctccattgcatgtttttcatgggaatttgtagctcatttaaaatatgtcgaggaagtcatgaaattggtgaagcgaattcgctaattattgtcttaatagcttcaatrtgtttttcctgtgatggatccttccactaaccctgtttcagtttactcttcagaaaaatgctaaacttctaaagttattgccaataatattatttttagttttgtgatttgaaacattgaaagtttacatttttttttttcctttggggatgacggatcttatgataaccatcctcagaagtgagggttaatatgtctttgtgtgcatgtgtttagcctgtgaatgccatgtgaaaggctcccattctgccgtgtgccatcttgagaccgggctctgcgactgcaaaccaaacgtgactggacagcagtgtgaccagtgcttggtaagatgcatgtgactaat

SEQ ID NO: 804704 - DNA, 587 bp, Homo sapiens
ctgtccccatttccccgcttccctcagcatctcctgagatggagggccggctacctccatgagacatggaggggtcttgggaattgtgaggcgtcttttaggagtgagaagagtggcttggactcttaataaaagggaaataacagcatcagctcttagccctttaatgacatcacccagatctgtaacccagcattcatctttatttcagcctgtgactgcccacacactcagaatacctgcgacccagaaactggagagtgtgtctgcccccctcacacacagggtgtgaagtgtgaagaatgtgaggatgggcactggggctacgatgcggaggtggggtgccaggtgagcrctgtcatccacgctcttgcttaactgagagttgctttgctgtagcaagtttcaggcttgttcttctatatattttctggactttaatctgttgaatagctttgtgaatttaaaaaaaaaaaaaaaactcaatgtgggccaggcacagtggctcacacctgtaatcactgcactttgggagactgaggcaggaggatcgtttgaagccaggaattcaagaccagcctgggcaa

SEQ ID NO: 804705 - DNA, 587 bp, Homo sapiens
ctgtccccatttccccgcttccctcagcatctcctgagatggagggccggctacctccatgagacatggaggggtcttgggaattgtgaggcgtcttttaggagtgagaagagtggcttggactcttaataaaagggaaataacagcatcagctcttagccctttaatgacatcacccagatctgtaacccagcattcatctttatttcagcctgtgactgcccacacactcagaatacctgcgacccagaaactggagagtgtgtctgcccccctcacacacagggtgtgaagtgtgaagaatgtgaggatgggcactggggctacgatgcggaggtggggtgccaggtgagcgctgtcatccacgctcttgcttaactgagagttgctttgctgtagcaagtttcaggcytgttcttctatatattttctggactttaatctgttgaatagctttgtgaatttaaaaaaaaaaaaaaaactcaatgtgggccaggcacagtggctcacacctgtaatcactgcactttgggagactgaggcaggaggatcgtttgaagccaggaattcaagaccagcctgggcaa

SEQ ID NO: 804706 - DNA, 630 bp, Homo sapiens
tatgtgtctgtgtgtgtttgtgaggttcaaataaggttaatatagttttcttggcccaagtaagtagacatatgttaaggtttcttaacaaactcttcttccctcttctccctctctcctttcttttttttttctttctttaagactgtgaagtatgggtatatcaaacaaatctcatgtgaaattttggaagaaagcagacataccatcacaggcaaattgttcccttgcttcatggcatcaattagaaaattatggcaagggctgggcgcagtggctcacacctgtaattccagcactttgggaggctgaggcaggtggatcacttgaggttaggagtttgagacyagcctggacaacatggtgaaaccccatgtctactaaaaatacaaaaattagccaggtgtggtggtaggcgcctgtaattccagctactggggaggctgaggcaggagaatcacttgaacctgggaggctgaggttgcagtgagccaagatcgcaccattgcactccagcctgggtgacagagtgagatcccgtctcaaagaaaagaaaagaaaagaaaaatatggcaagaacttgtttcaggtatattagcatataaactcatcatttatatgctaatacat

SEQ ID NO: 804707 - DNA, 649 bp, Homo sapiens
ttatttaagataaaaataaaaggcagacacagtggctcatgcctgcaatccaaccctttgtgggaggccaaggcaggaagattgcttgagcccaggagtttgagagtagcctgggcaacttagtgagaccccatctccataaaaataaataaataaataaatgggcagggtgcagttgggattacacctgtaatcccaacactggraggccaagtgctaggatcgcttgagtctgaacattcaagaccagcctaggcaacatagacccccaattctacaaaaaattaaaaactagctggggatggtggttcacacctgtagtcccagctactcaggaggctgaggtggagggatcgcttgagcctgggaggtcaagacggcagtgagctgtgatcacgccactgcactccaacctgggtcatagaacaagcccgtgtcgcaaaaaaagaaaattatttcagaaacaagattgagtacagggtagacgttttaaatttttcagaggagatcattttatgtgttagaagttttttgttgggccgggcgcccagactcacacctgaaatcccagcactttaggaggccgaggtggacggatcacctgaggtcaggagttcaagaccagcctggccaacatggtgaaacccca

SEQ ID NO: 804708 - DNA, 620 bp, Homo sapiens
gctgaacatgtgggggctcctggcgggtggtgagcctgtactgggcacaggagctccacactccttcccatgtgcctttcccatgcttctcttcatctcgtcaccagtaccctttgtagtattctttataataaaccagtaaacctgtttccctgagttctgagagccactctagcaaatcagtcaaatcagtgtatcgagtagggggaaccccaatttagaacagatgggtcagaagcataggtgagaacctattacttgcgattggtgctcaaagtgggggtcagtcgtgtgaggctgagcmctctcaccctgtgctctctccagcaagagagcatcagaacggaactgaattagaggacacgcagctggtgtccactaaagaatccaccagagaactggctgctggtagggagaaatccccacacacttcttggtgagcagaagtcacagaagtattctgtattgagagagtcaaggagataaaaactgtttttttccagaggaaagttctgtatttttcatcaaattttcagtgagatctatgatctgcaaatagaaaaggcccactgccctaatatatcctaatatatatctgagttgacatgatggcctccgga

SEQ ID NO: 804709 - DNA, 631 bp, Homo sapiens
acttgataaattttgacatatattttgtacatatatatattcagccatgaaaccatcaccacaatcaaaataatgaacctatttatcacacccaaagtttcctcatacctttttatgatcctacctcctgcctccctcctccccagtttctaggcaattagtcatctgctttctgtgactatagactagtttgcactttctagaattttatataaatgtaatcatatggtatatactgtttttttagttttttttttttttttagatggagtcttgctctgtcgcccaggctrgagtacagtggcgtgatctcggctcactgcaacctccgcctcctgggttcaagcaattctcctgcctcagcctcctgagtagctgggattacaggtgcgcaccaccacacccagctaatttttgtatttttagtagagacagggtttcaccatgttggtcaggctgatctcgtactcctgacctacctggtgatccgcccgccttggcctcccaaagtgctgggattacaggtatgagcctccgcacccagctggtatgtactgtttttggtttggcttctttcactcttcataattgttttgagatttcatccatgttgctgtctgtatctgtagag

SEQ ID NO: 804710 - DNA, 631 bp, Homo sapiens
acttgataaattttgacatatattttgtacatatatatattcagccatgaaaccatcaccacaatcaaaataatgaacctatttatcacacccaaagtttcctcatacctttttatgatcctacctcctgcctccctcctccccagtttctaggcaattagtcatctgctttctgtgactatagactagtttgcactttctagaattttatataaatgtaatcatatggtatatactgtttttttagttttttttttttttttagatggagtcttgctctgtcgcccaggctggagtacagtggcgtgatctcggctcactgcaacctccgcctcctgggttcaagcaattctcctgcctcagcctcctgagtagctgggattacaggtgcgcaccaccacacccagctaatttytgtatttttagtagagacagggtttcaccatgttggtcaggctgatctcgtactcctgacctacctggtgatccgcccgccttggcctcccaaagtgctgggattacaggtatgagcctccgcacccagctggtatgtactgtttttggtttggcttctttcactcttcataattgttttgagatttcatccatgttgctgtctgtatctgtagag

SEQ ID NO: 804711 - DNA, 631 bp, Homo sapiens
acttgataaattttgacatatattttgtacatatatatattcagccatgaaaccatcaccacaatcaaaataatgaacctatttatcacacccaaagtttcctcatacctttttatgatcctacctcctgcctccctcctccccagtttctaggcaattagtcatctgctttctgtgactatagactagtttgcactttctagaattttatataaatgtaatcatatggtatatactgtttttttagttttttttttttttttagatggagtcttgctctgtcgcccaggctggagtacagtggcgtgatctcggctcactgcaacctccgcctcctgggttcaagcaattctcctgcctcagcctcctgagtagctgggattacaggtgcgcaccaccacacccagctaatttttgtatttttagtagagacagggtttcaccatgttggtcaggctratctcgtactcctgacctacctggtgatccgcccgccttggcctcccaaagtgctgggattacaggtatgagcctccgcacccagctggtatgtactgtttttggtttggcttctttcactcttcataattgttttgagatttcatccatgttgctgtctgtatctgtagag

SEQ ID NO: 804712 - DNA, 631 bp, Homo sapiens
acttgataaattttgacatatattttgtacatatatatattcagccatgaaaccatcaccacaatcaaaataatgaacctatttatcacacccaaagtttcctcatacctttttatgatcctacctcctgcctccctcctccccagtttctaggcaattagtcatctgctttctgtgactatagactagtttgcactttctagaattttatataaatgtaatcatatggtatatactgtttttttagttttttttttttttttagatggagtcttgctctgtcgcccaggctggagtacagtggcgtgatctcggctcactgcaacctccgcctcctgggttcaagcaattctcctgcctcagcctcctgagtagctgggattacaggtgcgcaccaccacacccagctaatttttgtatttttagtagagacagggtttcaccatgttggtcaggctgrtctcgtactcctgacctacctggtgatccgcccgccttggcctcccaaagtgctgggattacaggtatgagcctccgcacccagctggtatgtactgtttttggtttggcttctttcactcttcataattgttttgagatttcatccatgttgctgtctgtatctgtagag

SEQ ID NO: 804713 - DNA, 621 bp, Homo sapiens
gcaatgcagatgaaacagaagatgccatataggactttcatagctagagaacagtcaatgcctggcttccaggcttcgaaggctgacgctcttgttagggactaatgtagctggtgaccttacattgaagccagtgctcatttaccattcrgaaaatcctaaggcccttgaatctgaagctaaatctacctataccctgccaatgactaacaaagcctcggcagatgacagcagatttgtttacagcaaggtttactgaacgttttaagcctactgttgagacctactgctcggaaaaaaagatttctttcaaaatattactgctcattgacaatgcacctggtcacccaagaggtctgatggagttgtacaaggagactgttgttgttttcatgcctgctaacacaacatccattctgtagcccatggatcaaggagtaagttttacttttacttaagaaatacacttcataaggctttagctgtcacaggcagtggttcctctgatggatctgggcaaagcacattgaaaaccctcaggaaaggattcaccattctagatgccattaaaaacattggtgattcatggaaggaggtcaaaatgcaacatgaacaggagtt

SEQ ID NO: 804714 - DNA, 529 bp, Homo sapiens
taaaactatgaaatacttgaataaaatatatagatatatgtgatctaatactgactcagcaaagaccttctgatcatctctatgaggaataagatacaaatgaaaaatttatttgactttaaaaccattgtccaaaaaaataagaagaaaacataaagaacaagcaaagaaaatgtaaaacagaatgttgagaacaaatttttcatttgatacataaaatttttattcaaatctgaacacactaaatattggaaaaaatcacaaataatagacaggaaacataaacacgaatgaataacaaacatacgaaacattaaacatgaaaaaaaatccygttatttttcacctatcaaaaattaacaaaataaaaaagctgatctttgttagattgcagtattcctacgtattgatagaactaatttcagaaaagcaattaagcagtgtgcatcaagtctccttgaagaatctatactttttgacccaaaaccttgacctcttagccccaatttatgaatctagaaatatagtg

SEQ ID NO: 804715 - DNA, 593 bp, Homo sapiens
taagaaagacgatatgcaatgtaaaaggtgaaaattacaatgagataagcaggtagctgatacaataatccagacccataactatggtgataaaagtaacttaaaggggtagacatagttttttaaaatgctttttgaaggaaaaaaagtcaagacatttttcatggtaataatgtgagtaacagattgacaaggtcaatawgtgaaaatggagtacaagtaataggcaagcacactaacctgtcctactttggtgagatgattccaaaacctgtctacacactggaatcatgctctggagatccttaatgagtaggatctatgcatttgatatagagagatgtataaataggaatctcgggaaattcctaccttgtacaagctcttgaaacaaccaagtgtgagcacagtagtttatgctcaagattctgcaaccgtaccatctgtggaccacccctagccatgtaacaggattaggaagataaaaatgaattccaatgggttgccattagcagtaatggtagctgctttaccaactctagccagcttggcaagtggcttcaaataaaatagtgtgagagcagtcaccatgt

SEQ ID NO: 804716 - DNA, 593 bp, Homo sapiens
taagaaagacgatatgcaatgtaaaaggtgaaaattacaatgagataagcaggtagctgatacaataatccagacccataactatggtgataaaagtaacttaaaggggtagacatagttttttaaaatgctttttgaaggaaaaaaagtcaagacatttttcatggtaataatgtgagtaacagattgacaaggtcaataagtgaaaatggagtacaagtaataggcaagcacactaacctgtcctacyttggtgagatgattccaaaacctgtctacacactggaatcatgctctggagatccttaatgagtaggatctatgcatttgatatagagagatgtataaataggaatctcgggaaattcctaccttgtacaagctcttgaaacaaccaagtgtgagcacagtagtttatgctcaagattctgcaaccgtaccatctgtggaccacccctagccatgtaacaggattaggaagataaaaatgaattccaatgggttgccattagcagtaatggtagctgctttaccaactctagccagcttggcaagtggcttcaaataaaatagtgtgagagcagtcaccatgt

SEQ ID NO: 804717 - DNA, 593 bp, Homo sapiens
taagaaagacgatatgcaatgtaaaaggtgaaaattacaatgagataagcaggtagctgatacaataatccagacccataactatggtgataaaagtaacttaaaggggtagacatagttttttaaaatgctttttgaaggaaaaaaagtcaagacatttttcatggtaataatgtgagtaacagattgacaaggtcaataagtgaaaatggagtacaagtaataggcaagcacactaacctgtcctactttggtgagatgattccaaaacctgtctacacactggaatcatgctctggagatccttaatgagtaggatctatgcatttgatatagagagatgtataaataggaatctcgggaaattcctaycttgtacaagctcttgaaacaaccaagtgtgagcacagtagtttatgctcaagattctgcaaccgtaccatctgtggaccacccctagccatgtaacaggattaggaagataaaaatgaattccaatgggttgccattagcagtaatggtagctgctttaccaactctagccagcttggcaagtggcttcaaataaaatagtgtgagagcagtcaccatgt

SEQ ID NO: 804718 - DNA, 603 bp, Homo sapiens
gaaggcctatattcagaaagtaggtctctgccttttatcactctagtcttttcaccctaaggctaaaaaagccagagactgaagaaaagaagcattcctatgctcttagaaacaaaatctacaacattcataaactactctttgatcattgcttgtcttctgctttgaaaaatattcagaaagagagtgccaatacctcccaaaatatgagataaacatgcattccttatgcggraaatgtaaaaaagttaatgtaagaccatggactaaagaaggagaatagcttagcgacattgctcaacctacgtctaaagagcacacagaactgagaccaagtttctccccacgggatttcagtggaaaaacaaaaggcttctaaacatttggaggtcattgaccttggcttccccacatctttgatgctccttctcatatcatgtgcaaactgatactttagtaggtcattggtgaaaaacaaatttctgaattcaatgtgtatctttgtgaacagacgaaagtcaatgaaaagtggtaaaaaaaaactacaccataaatctccaacaagcaaccccatacggacaaattcatcttgtctctacaaca

SEQ ID NO: 804719 - DNA, 602 bp, Homo sapiens
ctcagagataacaatgttagccaatttaaaaaaagacaatcaaaaaacatttaactaattagctgtcacatactagagaacacatttactctttattttaagaggacacagtacttgtatatcctcttgtattctatctggagcaattactgaccattaacataaaataacaggtgccatagcttaatagagaggttgcaacacrgtggtaatggcatttctctaggtaacctggtattttaattcagttatagttaaatttaacctaggcaacaaagtcaataacggctaatgaattcaatggaaaaaaattgtattaaatgtgttttttaaaaaacatcacatgactaaacggtaagatgacactgtctattgaaatcagtacacttggtataccttgtgaagggtatacaacgaaacacttggggatcttcccataggagtcactacactatgcaccaccaggggttgactttcacattgttttctgcgtgaatggtgttccccacattgtgctgtaaaaaactggagtggaggtatatggcagtcctgctacaaggttcacacatagcttgtgttagatatgatacactgagtaccta

SEQ ID NO: 804720 - DNA, 716 bp, Homo sapiens
agaatgaaactggatccctatttctcaccacatataaaagtcaactcaaaatgaattaaagacttaaatgtgagactcaaaattataaaactagtaaaaaaaaaaaagcacatggaaaactctttaggacattggtctaggcaaagattttagagctaagacctcaaatgcacaggaaacaaaaaagtagacaaatggggctatcaaactataaaactcctccatagcaaaaagaatcaagagggtaaagagacaaccctcgaatgagagaaaatatttgcaaattactcatctgacaagggactaatatccagaatatacaagaaattcaagtacctcaacagtgaagaaaactccaaataatcccattaaaaaatgggcaaaggacttggaagacatttctcaaaaaagatacaaatggctaatatatgaaaaaattctcracatcactaatcatcagggaaaggtatcaaaatcacaatgagatagcatctcaccccggttagaatggctattatcacaaagacaaaaaataacagttactggcgagggtgtggagaaaagggaacctcttttacactgttagtgggaatgtaaattagtacaactgctatggaaaagtttggagatttctcagaaaattaaaaatagaataccatccagcaatcccactaccaagtatccatccaaaagaaaggaaatcagtacatcaaagg

SEQ ID NO: 804721 - DNA, 601 bp, Homo sapiens
ttatcctcatagtacatcagttcaacattacaaatgttcaaactaaaccaatttaacaaaaagaaacctaaattctctctacaagggaactaatatctttttataaacttttatagcattgcatctttgtctttcttaaagtacttatcttccaccttattgtattcatttctgtacatcttctgcaagtttaaggagaaaagcagctctcgttatctaaaatgtcaatgtgccctgtacttcgcagaacatgaaagtggaattttaataactcagtatgttggaatggaaagcaaagccacaacaatgtttaaccttttcaggttcaccaactgctgtgagaacttcctgacagctgtggaccttttycccagaaaactgtgcacaggcaattttgaatataaccttggggatctcctgaatataatccgggggataccccttaagaggtccagggccccagttaacaatcactggcacatgaaataccaagagccaaaccattcttcaactaaagagaacagggataaaaagaggatgttcaagttcaggtttctatcagatcagttaggctactcccacaatagaccaaaaagacaag

SEQ ID NO: 804722 - DNA, 553 bp, Homo sapiens
aaactagtagaagaaaacattggggggaaaacactacaggaccttggtctgggcaaagttttttgggtaagacttcaaaagcacagacaaccaaagcaaaaatagacaaataagattacatcaaactaaaaagcttctgcacaacacaggaaacaatcaacaatctgcacactaggagaaaatattcacagtctcttcwtccacacaggggattaataaccagaatatataaggaacttgagcaactcaatagcagaaagcccaactaatctaatttaaaaatggttaaaagacctaaatagacattcctcaagagaagacatacaaatactcaacaggcatatttttaaaatgctcaacattactaataatcagggaaataaaagtcaaaatcacaatgagctatcatctcaccctagttagaatggctattatcaaaaagacaaaaaataacaaatgttggtgggaatgcagagaaaggggaatgcctgtacatcattggaaagaatgtgaaataatacaaccattatggaagacattaaggaggttcctc

SEQ ID NO: 804723 - DNA, 588 bp, Homo sapiens
tctgaaattgtttgcctcggtataataaattgaaattcattcatgctcctctgtgtcagtaggttgttcttttatattgctgagaagtattctattatttgaataattagccattttgttgttgatagaaatttgagttccttatcagtttaactataatgaataggactgctataaacatttttgtctatatcatgagacataaagtaggtgtatgattaactttttaaaaaamcacccaatagttttccaaggtggttgaaccattttccgtttcccatttccatcaaaagggtatgagagttccagttgcttcacattccttccaacacccggtattggtggtccttttaattaaaatgattctggtgtgtgtggagtagtgtcttattgtgattttaatttgcatttatctgatgattaataatgttgagcacgttctcatatgctcactagccatttatctatctttctttgtgaactgcttgctcaagtcttaatctttttttggcctttttattattgattttcaggagtgcttaatatattctggatgtgggtcttttgtgagagagagatatatataga

SEQ ID NO: 804724 - DNA, 588 bp, Homo sapiens
tctgaaattgtttgcctcggtataataaattgaaattcattcatgctcctctgtgtcagtaggttgttcttttatattgctgagaagtattctattatttgaataattagccattttgttgttgatagaaatttgagttccttatcagtttaactataatgaataggactgctataaacatttttgtctatatcatgagacataaagtaggtgtatgattaactttttaaaaaaccacccaatagttttccaaggtggttgaaccattttccrtttcccatttccatcaaaagggtatgagagttccagttgcttcacattccttccaacacccggtattggtggtccttttaattaaaatgattctggtgtgtgtggagtagtgtcttattgtgattttaatttgcatttatctgatgattaataatgttgagcacgttctcatatgctcactagccatttatctatctttctttgtgaactgcttgctcaagtcttaatctttttttggcctttttattattgattttcaggagtgcttaatatattctggatgtgggtcttttgtgagagagagatatatataga

SEQ ID NO: 804725 - DNA, 536 bp, Homo sapiens
taagggaataaaagctggccactccggccagcagtggcaacccgcttgggtccccctccatgctgtggaagctttgttctttcgctcttcacaataaatcttgctgctgctcactctttgggtccgcactacctttatgagctgtaacactcaccgtgagggtctgtggcttcattcctaaagtcagcgagaccatgaacccatggggaggaataaaaaactctggacatgccacctttaagagctgtaacactcactgtgaaggtctccagcttcactcctgaagtcagtgagaccacaaatccactggaaggaagaaactatggacacctctgaacatctgaaggaacaaactctggayacaccatcttgaagagctgtaacgctcaccgtgagggtccgtggcttcattcttgaagtcagtgagaccaagaacccaccagaaggaataaattccagacacatggagacacaattatgtatcagtgaagagagaaagggaaagaaaaaggaaaaaataaggtatttttttcaga

SEQ ID NO: 804726 - DNA, 615 bp, Homo sapiens
aggtggtaggatctcatattattttcttactctgtggagtaaggacctttatggtggggaataccaagtggaagttctagtactgcctctgcctaggaaaatagtaaagcaaaagcatcaccacattcctgatggtactgcagaaattaataaatccatcagtaacttaaaagatgcagggttggtgactcccaacacattcctggaggggctacagagattaatgacaccatcagtaacttgaaarttgcaggggtggtgattcccaccacattcctattcaacttgtatgtttggcatgtgcagaagacagatggatcttggaagatgacagtggattaccaattggaggtgactctaattgcaactgccttaccaaatgtggtttcattacttgagcaaattaacacatcctctagtacccagtataatgttattgatctgataaatgctttttctggacagctattagtaaagaccaccaggaacagtttgctttcagatgacaaggccagcaatacacattcactgtcatacctcgggggtatatcaactttatagctctatgtcataatttagttcacagggatcttaattgccctttccttccacaag

SEQ ID NO: 804727 - DNA, 623 bp, Homo sapiens
tctgagggctggagaatttagaaaaattaacagctctgaatgagggctggagaatttagaaaaattaacagctctgaatgagcatgaaaaaatcgggaactctttcgccattttacctaggagcttattccattctttaaaatttaatcatgtaatcagcaagccaaagttttgatatcctactacatttgagatggaaatgtatgtattgggtggagagagaaagaaaagaaaaggtgattggaaacatgattaaaaatatgcaagtaagccaggcatagtggtgtgtgattgtagtcccagctacttgggaggctgaggccagggaattgcttgagttcaagagatggaggccagcctgggcaatatagtgagactcaatctctaaaaaaattttttaattaaaaaaatgcaattgattatgagaagggatggagcagtaagcctcagaacaaggaatgcttaaacaytgtgagttcttcataggccagaaattaaggaaaagaaaataaaaaagaagtcaaggacatatgactgagagttactccagaaaattcagaagtgcgagagaaaattttgagaaggaaactagatgaacataaatagaccaacctttcatataa

SEQ ID NO: 804728 - DNA, 650 bp, Homo sapiens
acacagtttgccactaagaaatggcagagctccatatcctgactcttgaattcacaaaggtgagaagtagtaaaaatcagggttgtttaagctttaacctaaaagctccctggttcagtctggtcacactctattatgggaagtccaaaggagaatccaggagccaggaaatacatactagacacatcagttaccaagtctctactgttcatttgccacttctcagctctgtcttgtatttttatttttttatttgtgctatttcctactcttacacaggttgtgtgttttacaattctttaaattgccattaaatgagtctagcttgttctgtaagaagagtttataaaaatgatgagtaagacwggactttgagctctgtcggtcacagcaccccacctattccaatttcgtggtctactattgaaccaggaaaaagaaagtgatttatcaagaactagagtcaactagagcagaggtggtgtcaagattatatgtaatccagtacaagaaagaagaacggggaaagaggaacacagaatcatgtagctcatgctcttgcagacaaagaagaataaaataattaaatcaaattaaaataaaataagcctaattctgattaaccactcctgttgcagtccaaaaacaaa

SEQ ID NO: 804729 - DNA, 650 bp, Homo sapiens
acacagtttgccactaagaaatggcagagctccatatcctgactcttgaattcacaaaggtgagaagtagtaaaaatcagggttgtttaagctttaacctaaaagctccctggttcagtctggtcacactctattatgggaagtccaaaggagaatccaggagccaggaaatacatactagacacatcagttaccaagtctctactgttcatttgccacttctcagctctgtcttgtatttttatttttttatttgtgctatttcctactcttacacaggttgtgtgttttacaattctttaaattgccattaaatgagtctagcttgttctgtaagaagagtttataaaaatgatgagtaagacaggactttgagctctgtcggtcacagcaccccacctattccaatttcgtggtctactattgaaccaggaaaaagaaagtgatttatcaagaactagagtcaactagagcagaggtggtgtcaagattataygtaatccagtacaagaaagaagaacggggaaagaggaacacagaatcatgtagctcatgctcttgcagacaaagaagaataaaataattaaatcaaattaaaataaaataagcctaattctgattaaccactcctgttgcagtccaaaaacaaa

SEQ ID NO: 804730 - DNA, 590 bp, Homo sapiens
gcaacattgcagagtatggtaaggactatctgtagaagcaggaggggtcgattccaggcctctctctgtctctaactctgccaccttgtgcaagtcacatcaagaaggctctctaggtcgggcacggtggctcatgcctgtaatccaagcactttgggaggccaagatgggcagatcacctgaggtcaggagtttgagaccgggctggctaacrtggcaaaaccccatctctactacaaatacaaaaattagccaggcatgttggtgtgcacctgtaatcccagctactcgggaggctaaggcaggagaattgcttgaacccaggaggcagaggttgcagtgagctgagatcatgccactgcattccagcctgggtaacagagtgagactcggtctcaaagaaaaagaaaaggctctctaaggctttctaatgcagtatataagactgtggcctcctgagtcagattgcctaggtttcaatagtgattcctccatttgttctgagatgttgggcaagttctttaaattctctgggcctcaggttcaactgtaaaattgaaataataataattcttatctcgtgggctgct

SEQ ID NO: 804731 - DNA, 563 bp, Homo sapiens
tgtgtgtgtgtgtgtgatatttctctgttaaaatggtatctcatggtggcaactatacttctacaaaccttaaacaaatatttgtataaaatagtagtttataaaagaaacacatgagtgctttctctgtttttttatttcttatggaaactatctttcatatrtatatctgattatatatatatctgtctcatatatgagaggtaaatatattaatcgatttatggcattgtgggctgactgtaatgaaaagctttcgttccatgagaattcataaatacataaaactcgcctacggagattggagattctcgcaattttgccttatcattaaaataaattgttcacaatgacttagtgcccaatgcacagttatgctcaaagactagttggtagattagtaggggttatggaccacattagccgcaatatgataacaataagattttacatttgctggtgtccaaatcagcatgaatgttaaaatagagactcaggtgatcactcagtaccgcatttaattactcacactaactcctgcaaatatttttttatttttaaag

SEQ ID NO: 804732 - DNA, 621 bp, Homo sapiens
gacatgtccatgtataagctatgctgtttttacaaaaaacagatgggtgttggctatttagagcttccctcatggggtgtggtaactctaagaatgtgccacaatgtcagccctgtagaaagataaatggaatgggttctgtattgtccctagttgttatttttttttatcatccttaaaacaatgatgcaaaagggactccaccaaaaacgtagatgtggaataaaaaaaagatagtttaggaatgtcatgaagcagtcatatatcttttccatcaggtgcagtctccctggttgytgatggagaaaatgacaaaaaaaaatactatactaaaaagcctatccaaggaacaggttagtaggaaatcacattctgaagcactcattctgcctttcttcagtgtaagaaagttgctcaaaagaagaagcgtgacaacacaagctgctacaatggctacattctctacattcaatgtaagagagaaggagctatggtcactccatgcaaaggccagatagagatgtggtgcgtatgtgcagagtacctcaagaaatgaaagtcagcatgtctcttggaagctatgaacactaatgtttaaaaaaggaaacagaaaacagaaga

SEQ ID NO: 804733 - DNA, 608 bp, Homo sapiens
atcttaaaattagttattcaaaaatggtaagagaaattactgaactacctagaaagaaggaaaaacagagatgttaaggagtgtggaggctagcatgagatgtccaagtgaacagtgaaaatgagggataaaaattattcagaagatatatttggagataaataataaccagattttagagaaagaaatgagacttcagatttttttttaaaaaargagtcctgagcaaaataaacataattaaatccacatctagtcatatcatgataaaacatcaaagacaaagacaaagtattaaaagtgaccagagaatagaataaagattatctacaaaggaaacaacctgatggatacaagatttctcatcagcaacaacagacgccagaagggaataaaataatgccttcaaagtgctgctggaaaataactggcaacctaaaattctacgtcaggcaaaactaacattcaagagtgagtataaattgaagaaatgttgagggaaagaccaaaagattttactacttacagacacttaattaaagagctattagagtatatcttcaataagaagaaaattaaacccagaaaggaaaaaaatgaaattcaaa

SEQ ID NO: 804734 - DNA, 608 bp, Homo sapiens
atcttaaaattagttattcaaaaatggtaagagaaattactgaactacctagaaagaaggaaaaacagagatgttaaggagtgtggaggctagcatgagatgtccaagtgaacagtgaaaatgagggataaaaattattcagaagatatatttggagataaataataaccagattttagagaaagaaatgagacttcagatttttttttaaaaaaggagtcctgagcaaaataaacataattaaatccacatctagtcatatcatgataaaacatcaaagacaaagacaaagtattaaaastgaccagagaatagaataaagattatctacaaaggaaacaacctgatggatacaagatttctcatcagcaacaacagacgccagaagggaataaaataatgccttcaaagtgctgctggaaaataactggcaacctaaaattctacgtcaggcaaaactaacattcaagagtgagtataaattgaagaaatgttgagggaaagaccaaaagattttactacttacagacacttaattaaagagctattagagtatatcttcaataagaagaaaattaaacccagaaaggaaaaaaatgaaattcaaa

SEQ ID NO: 804735 - DNA, 566 bp, Homo sapiens
ggagtggaagatgatatctttaacacatctaatctactattcatatccagaatatgtaaagaacccccatcaatcaataagaatacacacaagtcagaatacacacaaggaaaaacagggaagaaactgcacaggcagtcataaaagaggatatccaactgctcattaaaaggtcttctacttcattagtaaagcaggaagtacaaattaaaacctgaatgaaataacaccacagatacatcagaatgtctaaaacaaagactaacaatgttggtgaagatgtggagcaataagaactctcacacacagctggagtttaraaaacatccttatttatccatcagggctgtaataagaggcatatagcatattcaaataggtaagtgaacaaaatttaatgaaagaatttacaacggtaaaggtagaatttagtaaaaaccaaagggtgaggaagtcccccaggctagcaagaacaggaagccattactaccctcaggcctacaagggcaagggaggtagcagtcacgcagcaccggtagctgtgaacacaggagaggataaacaat

SEQ ID NO: 804736 - DNA, 604 bp, Homo sapiens
catacattccacacacccacaccacacatactacatgatcatatataccacacacaccatacatacaccacatgctcagccataccacaccacacacacacacacacacacacatcagcacacacacacgtcacacacaytttacatacacaccacacacacacaaagcatgcacacaccacacacaccacatacacacaagaccacacacacacatcatacataaaccccacatacacaccacacacattatatatgcaccatacactcacacgcacatcatgcacacacaccacacacatcacatatacatgccacacacacacacattacatacacactaaatacacaccacatgctcataaataacacacatcacacacacacagacaccatgcatacacaccacagagcacacacataacccacacacatcacatactcaacactccacccacacaccacacaccacatacgcaccacacacacacacacacacacactgcacacacaatacacatacacataaaatttgcatgaaataaacataaaggaaatgaacaccaagattcatctctcttgccctgcatattggattgaaaca

SEQ ID NO: 804737 - DNA, 604 bp, Homo sapiens
catacattccacacacccacaccacacatactacatgatcatatataccacacacaccatacatacaccacatgctcagccataccacaccacacacacacacacacacacacatcagcacacacacacgtcacacacatwttacatacacaccacacacacacaaagcatgcacacaccacacacaccacatacacacaagaccacacacacacatcatacataaaccccacatacacaccacacacattatatatgcaccatacactcacacgcacatcatgcacacacaccacacacatcacatatacatgccacacacacacacattacatacacactaaatacacaccacatgctcataaataacacacatcacacacacacagacaccatgcatacacaccacagagcacacacataacccacacacatcacatactcaacactccacccacacaccacacaccacatacgcaccacacacacacacacacacacactgcacacacaatacacatacacataaaatttgcatgaaataaacataaaggaaatgaacaccaagattcatctctcttgccctgcatattggattgaaaca

SEQ ID NO: 804738 - DNA, 611 bp, Homo sapiens
atcttaaaattagttattcaaaaatggtaagagaaattactgaactacctagaaagaaggaaaaacagagatgttaaggagtgtggaggctagcatgagatgtccaagtgaacagtgaaaatgagggataaaaattattcagaagatatatttggagataaataataaccagattttagagaaagaaatgagacttcagatttttttttaaaaaargagtcctgagcaaaataaacataattaaatccacatctagtcatatcatgataaaacatcaaagacaaagacaaagtattaaaagtgaccagagaatagaataaagattatctacaaaggaaacaacctgatggatacaagatttctcatcagcaacaacagacgccagaagggaataaaataatgccttcaaagtgctgctggaaaataactggcaacctaaaattctacgtcaggcaaaactaacattcaagagtgagtataaattgaagaaatgttgagggaaagaccaaaagattttactacttacagacacttaattaaagagctattagagtatatcttcaataagaagaaaattaaacccagaaaggaaaaaaatgaaattcaaaata

SEQ ID NO: 804739 - DNA, 611 bp, Homo sapiens
atcttaaaattagttattcaaaaatggtaagagaaattactgaactacctagaaagaaggaaaaacagagatgttaaggagtgtggaggctagcatgagatgtccaagtgaacagtgaaaatgagggataaaaattattcagaagatatatttggagataaataataaccagattttagagaaagaaatgagacttcagatttttttttaaaaaaggagtcctgagcaaaataaacataattaaatccacatctagtcatatcatgataaaacatcaaagacaaagacaaagtattaaaastgaccagagaatagaataaagattatctacaaaggaaacaacctgatggatacaagatttctcatcagcaacaacagacgccagaagggaataaaataatgccttcaaagtgctgctggaaaataactggcaacctaaaattctacgtcaggcaaaactaacattcaagagtgagtataaattgaagaaatgttgagggaaagaccaaaagattttactacttacagacacttaattaaagagctattagagtatatcttcaataagaagaaaattaaacccagaaaggaaaaaaatgaaattcaaaata

SEQ ID NO: 804740 - DNA, 638 bp, Homo sapiens
taataaaccttatttttccttctgcagtctgtttctggatgctggcagtcattcagaaacatttgctgagcacctcgtacctgctgaatgaacccacgtgaaggggagccaggagtgcggatcattaaaaagcctgtactttctcagtccccatttgacaccacagagagaaaatgcatgctcctgatttgggtagatctagaatgttcttatgaatatggtaggtggagcaagggatccaggttcttatgatacatgataagaaaggccctagcttggtcagacacaaataaaagccaagcttttcatctaaactcccttgcaccatcacccccttaccaaccagtacagagagcttaacatctctataccagatagtgaatgtttctaataasaatggcaaattcttattgtgagagagataagggcattcaagtgttaattcaagagaaatatgtatatggttctttaaatgatttatttactaacagcattaagtatggtgtaaaggaatttacataccctaattctcgtctatatatttttttggattttaaaatgacaacttgtctaagttcgcattagtattaagccctaacatgagacagtatttatagcataagatttttgccacctat

SEQ ID NO: 804741 - DNA, 606 bp, Homo sapiens
taatctctgaggcctgtgaatatgctgtgttacatggtcagagagactttgcagatgtaattaaatttagggactttataatagtgagattgtcctggattctctgggtgggccaaattaatttcatgaggccttcacagtagggsactctcaggctgggagcagaagaggggtgcagcaggaagagaagtcagtggagtctgatcctgagatggatggcatgcacgctcactggccctgagatgcaggggccacatgtgaggaccagagggagatctctaggggctctgacggctcctcccagctgacagccagcaaggaaacagggacctcagccccacaaccatggaaactactagcagtatagatgaacctggctgctgatttttcccaggcctcttagtaagaacccagctggttgacatcttggtttcaggcttacagaacccaaagcagagaaagcagttgagctgtcccagacttccgacctacagaactgtcaggcaataaaccgttattggtttcagcccctagctttgtgactgtttgtcatggcagcaacagaaaactaaacgaagccatttcagtgagagcaggaaaagtgct

SEQ ID NO: 804742 - DNA, 610 bp, Homo sapiens
gaagcagaggttggaacaattcactgtgaagacagaggaaggggccaaagccgaggaatgtggtggcctctggaagctggaaagggcaaggaagattctcctcagagcttccagaaagacaacagccctgccgacgcctttgattatagcacagtgaagactcatttcagacttctgaactccagaactgcaaggtcacagttgtgttgtcttaagccactgaatgtccggtaatgagttacagaagcaacaggaagccaatacagctctttaatactcccccaaattaccaccctgttgccccaacaaacattcgcttctctttcttcatcttcccaatgttgtttatctgggtcttcagraagtcaatactatgattatgtaaatattttccactgagccacatcaagaaataagattgcatttctgtctcgtacatgtgtatgttttcaagcttataattactttggattttccccgatgcacctctggctaattttcaacagccacaatttacttgtaaaacgctttctcaattctattttccgcacagcttatatatcaaaaaaaaaattcagttcatgtttttcctggaggaatgcctccggga

SEQ ID NO: 804743 - DNA, 480 bp, Homo sapiens
catgggcccatactgtggtttccctttcatatagagatggggctggaagggccattattgaatatctggtcaagttccctcacttgatggatgaacgctgagatctggaaggagtcaaccaactcatcacccaagrttcccccaacaagctagcagcaaagcttggatgagaacccagatttctaagttcaaagtcttcctcacatcttcctttatttaaataattttgactgtactacatcaacccataacacaagctatataaaaacagcaatttgtttttctaagactatacctagtgtctgtaatagcatcaagcaattgagatgttccatttgttgaataaatggatcgtaagacaataagtagtaggtggtttgattacatcctgcaaagaagttttgatgctcttcctacttttcactccctcttaagtcttcattcaagacaaagaagctcattggatgcccaatatcagcc

SEQ ID NO: 804744 - DNA, 671 bp, Homo sapiens
taatcataaggatccatatgaaagggagggattattcagcctggtccaatatcatcataagcgtccatatgaaagggagggatgagagtggagtcagaaaaaagagaggtcgccgtggaagcagaggttggaacaattcactgtgaagacagaggaaggggccaaagccgaggaatgtggyggcctctggaagctggaaagggcaaggaagattctcctcagagcttccagaaagacaacagccctgccgacgcctttgattatagcacagtgaagactcatttcagacttctgaactccagaactgcaaggtcacagttgtgttgtcttaagccactgaatgtccggtaatgagttacagaagcaacaggaagccaatacagctctttaatactcccccaaattaccaccctgttgccccaacaaacattcgcttctctttcttcatcttcccaatgttgtttatctgggtcttcaggaagtcaatactatgattatgtaaatattttccactgagccacatcaagaaataagattgcatttctgtctcgtacatgtgtatgttttcaagcttataattactttggattttccccgatgcacctctggctaattttcaacagccacaatttacttgtaaaacgctttctcaattctattttccgcacagc

SEQ ID NO: 804745 - DNA, 671 bp, Homo sapiens
taatcataaggatccatatgaaagggagggattattcagcctggtccaatatcatcataagcgtccatatgaaagggagggatgagagtggagtcagaaaaaagagaggtcgccgtggaagcagaggttggaacaattcactgtgaagacagaggaaggggccaaagccgaggaatgtggcggcctctggaagctggaaagggcaaggaagattctcctcagagcttccagaaagacaacagccctgccgacgcctttgattatagcacagtgaagactcatttcagacttctgaactccagaactgcaaggtcacagttgtgttgtcttaagccactgaatgtccggtaatgagttacagaagcaacaggaagccaatacagctctttaatactcccccaaattaccaccctgttgccccaacaaacattcgcttctctttcttcatcttcccaatgttgtttatctgggtcttcagraagtcaatactatgattatgtaaatattttccactgagccacatcaagaaataagattgcatttctgtctcgtacatgtgtatgttttcaagcttataattactttggattttccccgatgcacctctggctaattttcaacagccacaatttacttgtaaaacgctttctcaattctattttccgcacagc

SEQ ID NO: 804746 - DNA, 483 bp, Homo sapiens
catgggcccatactgtggtttccctttcatatagagatggggctggaagggccattattgaatatctggtcaagttccctcacttgatggatgaacgctgagatctggaaggagtcaaccaactcatcacccaagrttcccccaacaagctagcagcaaagcttggatgagaacccagatttctaagttcaaagtcttcctcacatcttcctttatttaaataattttgactgtactacatcaaccataacacaagctatataaaaacagcaatttgtttttctaagactatacctagtgtctgtaatagcatcaagcaattgagatgttccatttgttgaataaatggatcgtaagacaataagtagtaggtggtttgattacatcctgcaaagaagttttgatgctcttcctacttttcactccctcttaagtcttcattcaagacaaagaagctcattggatgcccaatatcagccaaga

SEQ ID NO: 804747 - DNA, 577 bp, Homo sapiens
gacaggaccctcagcaagtctctgtgtccaggggtttccagccagcgtggcttgccatgctccaagctgggctcagaggctctggcttcccgaccctctgagagcatctctctgtacacacagagggggtgggggccagtcacatctgctccgggcgatgtgactcagctgtggacgatgacgacatgatcctgagcatgacagggtgggaagcttttcctccttctccagggcctgcgaaccctggaaatgcatccacgatgcaaatagygacagacatcattagcggacgcatccattctgtttgagctggaaacgctcagggctgcaaggcccttttctgagaagagcggttcctgtcgtcatcctcctctgcaccgcagcgtctgattcccaggagggacagcccggcagttataaaaggctctttcatgacaggcctagaggaattagaaatataattttttcaggcgcttccaaaaaatcaagtaattagagctcatgcacgtaaaagggcccgccatgagatttgtggcttgttttttaaaggaatcaatttatatattaaaacaataaa

SEQ ID NO: 804748 - DNA, 583 bp, Homo sapiens
gcgttcctgagcaggccaccatgctactctttgggagtcctttttcttctttttaaatgaggcttgattggcttagggagaaacaggagacaccgcataccatgcagttaaaaatgaaactcggattaaatgaatattgaattcagtactgtactggcttcctagagctgctgaaatgcaaactgggggcttaaaaccayggagacgtattcccccacagttctgggaagtagaagctcgaatgcctgttggcagggctgagctcctctgcaggctgtggggaaggacctgtcccatgcctctcctggctcctggtggccgctggtaagccttggtgtcctgtggcttgtagacacatctctccaagtgctgcctctgcctccatctccgcgtcttcctgccgcctccttataacgacggcagccattggaatgggggcccaccaaaatccagtctgactttgtcttcatttaactgatgatatctttaaagatcctgtttccaaataaggtcacattctgagcatccaggggatgcgagttttggggagactcgattccaccaacaccagcatcgaagaggg

SEQ ID NO: 804749 - DNA, 588 bp, Homo sapiens
gcgtcctcactgcctttctctcgggatcctggggctcaagtgaactgatgccatccttggttcatcgtttgttcatgtaaggctcccttgtattttcatccgttcattttaataacgtgatgagcacttgtgaacctaccccactccaagaagtggacagcagagaaagcaatcaacatgcttctttctctcccattcccaccctgcctggcaacctccatctggagttttctccttctcctttttcttaaaagttttaacacatatacacacacttgctgaaaaacacacggcttgttgtgcttgtttccaagctgtatgggacggagtcacacagagtcttcgggacttgtcattttcactcagtcttaacgctatgcagcactggtgctgtcgcygtggccttcgctcaccgtggccagagctgtgtggggtttccgcgtgcagcgcgccatgaagtgctccttaactctgggatggcactgggctgtgtctggcttggggctgctcccaacagaactgccctgagatgtgagcacatgctcgagcttctcctgggggtgcctgcagggaacctgctgtagaaag

SEQ ID NO: 804750 - DNA, 605 bp, Homo sapiens
agaggatataacaattctgaacatatatgcacccaacactacagcacccagatatataaagcaaatgttattagatctaaagggagagatagactccaatatgataatagttaaaaatttaaacaccccactctcaacatggaacagatcacctagacataaaattaacaaggaaactttggctttaaccacacattagaccaaatggacctaacagatgtttacagaacatttcatccaacagctacagaatacactttcttcttatcagcacacaaaaccttttccagggtggaccatgttagggacacaaaacaagtctcaacaaatctaaaataattaaaattatagcaagtatcttttttgaccacagtggaataaaactagaaatcaacaataaggractttcaaaattgggcaagtatgtgtgaattaaacaacctgctcctgaacaatcaatgagtcaacaacaaaatcaagaggaaaattttaaaattaattgaaacaaatgaaaatcaaaacacaatatatcaaaaccaataggatatagcaaaagcagtgctaagagggaaatttagagcaataaatgtctacatcagaaaagt

SEQ ID NO: 804751 - DNA, 653 bp, Homo sapiens
ttagctcatcagctgttgttagtgtttgtgtattttaggtgtgccccaagacagttattcttccattatggcttggggaagtcacaagattggacacccgtgttgtatatgttgggcatataggatagtgcaggtcaggctgggtggctttctccagccactgcactaagataccaagtagctggagggcggcctcagtcttcagcctggctccaggcttctgtggcattccacaggggcgctttggggctgtgtgagacaggcattgcttggtctaactccacctttgtaaaagatgggaatggtccctttttcaaggacatgtcaagaagggaaaggctctttctcaatttttccctttttctaaattacagcttttagcagatcagaatctcaagtttatcgatccattctgcaaaattgctgcraagacgaaggagtaagtgattcccctgttcgttcctcctgctccgtggcatttgctcatgggagttacttgccgtcgtgcagcctggcacagggtacccaggacactgcttcacagcagagagcggctggagaagacagccgaagctttgagcagtgatttggctcttctagcttcagtatttgcctcactcattccaggaatgccctcccacacccaaagatct

SEQ ID NO: 804752 - DNA, 553 bp, Homo sapiens
accggttggggtcagatttggggtgaagaatgagtaagtttctgcatgctttgtctctacctgagacacttctacaacaagccaagtataatctctccagccctgcagattttcacctgacttgttcagccccatgcgtagactcccgctgcaggcctctggcctgtggctcactgcatgcagcccctggcgtgcaatactagtgctccacggcgcgatgtgcttctagcccttgcactgcacctaggctcagggttcaaacggccagcccgaaaagcctgcctgccttctttytggaaacagcacgtccccggccgtgtgcctgcccctttctctactgagctagtccccaaaccaaaggcaagccccctcgggcctcgggggatggggccggccacacccctgactccgccctggctctgccccatacccctgccgtggggccgacctgggggatgcagacatccggctccgtattcctgcctatcggggccaggatgcaaaaacaatttttgcgtaaaagatgtcacactgatctgctggagtggggtgg

SEQ ID NO: 804753 - DNA, 606 bp, Homo sapiens
gcctcggcctcccaaggtgctgggattacaggtgtgagccactgcgcccggcttccggaagggcagttttctaacttcacaccccagaacctcctgcagtaaaggaaggttctgtccagggcgggtgccctggcgtaggccacaggacaggaagcccctcgcatccatcagagcccccagtccccgtgcaccccactgctgctcagcagagaccagagcggtctcagcaggagagaggcccsgtgctctacagatgggccccagaaaagctggcctctcatggggagctctctgggagctcagtccctgaggccaccactggcatcggcccctgtgatatacccaccagcatgcggaccacaggtgctggtcactgggggacctctggcctcactctccatgccccagaaagccccaaggacgcaaacgtggcagggtgggccttaaagctccccaagcagggctacgggggctggtggagcacagtccccgctgtgtggctgccccttcctggcactcatggatgcatctggagtcttccttctgcatgagctcccatgtcctctccagcctggaagccacccgtgtgctggcttgatggggtga

SEQ ID NO: 804754 - DNA, 606 bp, Homo sapiens; identical to SEQ ID NO: 804753

SEQ ID NO: 804755 - DNA, 570 bp, Homo sapiens
acaggtgtgagccactgcgcttggccctgtctacgagtctttttttagatttccattcttcctaacatatttaaaaagttcctcttcaccccaagatggtataagcatgcacctttattttctttggatattttatttcattttttccatttcatcatttcatgtcttcatttaagtcattttatgtattaattctaattggaataattttagtgtttgccatggcttttgcgaattactatccagttctctcaagatcacttttgaatacgccctccattccctgatgcattcaaaaccgtgtgtcaatcacctgcctctctgagtgcctgggtctcaggctttgcatttctctccaggggtgtgtcagtttctgccttggagctcctgccaygctggctgtagctttataccatgtttaaacaccccgcgccgtgtgacagtcttcagaagtgtcttgtctcgtgttcactcaccttccacaagaacattaaatcaagttctttgaaaaatcccattggtaatttgattggaatgaatggtattagatttacacactaattaaggaag

SEQ ID NO: 804756 - DNA, 647 bp, Homo sapiens
aatgggagacaggcaggggcacgttccacagcacagacgtgggccagcccgctgggggcagtgtggagcaggcagtgccctcatccaggacctcagcattgaaggaagcgagggttctgtgaaccgtggtctcttagaggtcactgccctctgagggaagagctcacagtgagcaagatctgggtgggggctggcgggagggtgagcggaagctggctgaatgcagacacgatggccagagctccagcagccttctggggccatgaggatgaggcacccgcygggtgtggtggagtgggaggtgacaggctctttagggccccgccctccagagtcctttcttatgtgagaagggaatactgtgtgttaaagccactgttattttgggtgccaaccaattttaacctaaaattggttaaatatgcagccaaccaattttcatggaatcactagacaacccagaaccatcaaatgtttgaggaaaaccaatcactaccaaaaaggggcccccaaagtcagcaggtatcaaggaagcagagcaaacaacaccctcgagaaaagggcagtacgtcttcacaggtttatttatccatagagaagatacagccttaaaaacggaactgaaaatataaatatgaaaaatgtga

SEQ ID NO: 804757 - DNA, 583 bp, Homo sapiens
gattctcagtggactcttccttcccaaggaaccacgatgaaagacgccacagcccactgacgcacagaggaacccaggctgctctcatggctttgcaccgacctctttcctgggctgaacagtgtccccttaaaaaaagacatgttggtccagacgtggcgcatgcctgtaatctcagcaccgtgggaggccgaggagggaggaccactcgagcccrggagttcgagagcagcccaggcaacacagtgagaccccatctccacagaaaatacaatacaatttagctgaacatggtggtgtgcacctctagtcccagctactttggtgggaagacggcttgagcctgggaggtcaaggctgcagtgagccgtgatcgcgccactgcactccagcctgggtgaccaggcaagaccctctccaaaaaaaaaaaagaaagaaaaggtatatgttggatgctgatccctcatactgtaaacatgaccttacgtggaaacaggacctttgcagatgtagtcaagttgaagtgaagtcattagtgggggaccctgagccaacaccacttctgtttttataaaaaggcaaa

SEQ ID NO: 804758 - DNA, 596 bp, Homo sapiens
gtacactgccgtaaagtcctgccacttacagatgaagtggcgtcatattacccggaggtatcctttgttacagtaaaggtatgtattgtaactcttaggccaaataagtttgaaaggacgtattaggctattatcrccttgctataaggaaatacctgagactgggtaatttataaagaaaggaggtttaattggctcacagttctgcaagctgtacaggaagcataatactggcatctgctcagcttctggggaggcagaattgtgaggaaacttacaagcactgtggaaggtgaagggggagcaggcacatcacgtggccagagcaggagcaggagagaaagacggggctgggggaggggccacacgcctttaaacaaccaggtctcccaagaactcactcactgtcgcaaggacagcaccaaggggatgacgcttaaccattcatgagaaatccacccccgtgatccaatcacctcccaccaggccccacctccaacactggagattacaattcaacatgagatttgggcggggacacaaatccaaactatatcaagatgtatacaaaaagtagatataaaagggaataacta

SEQ ID NO: 804759 - DNA, 579 bp, Homo sapiens
aatatgcacttaatataagagaaagtagtgaagaaagaatataaggacagtggtgacaaaaaaaacccataaacccacagaaccatataaaacatatgggaaataaaaagtaaactagtagacataaattcaagtacagttgattttcattgttagtagtaattacataaagtcattgcaaatactgaattaggaaataatataccattgttcctaggggaaatacagagtttggttcttgtaatcctctggtcgcagtttcaactatcaacatatagtcgagtgttatatatgtttaataattattgtttattcattaacattgaactcagccaacagtactacaacttakgccttaacaaagcttctctaacatacatattttctctgtaaggcacatcacagcctttttgcacttaggaacactgaacagccccttcaccaccatgcctgagggccattttaaacagtaaagtcacccaaaaaatcacaaaaatgtgaaaatgtggcattaagtagattacaaaaaaaaatgcttatttacaatatgagagctgaagcaagaatgcagagtgtgcc

SEQ ID NO: 804760 - DNA, 611 bp, Homo sapiens
taaaatcagttgtccgagcttccagcttaagaagctaaagaagcatatgttgaacccaaaaataactagaaataataaaataatcaagaatttaaaaactccactgtgtttgtccattttgcactgctgtaaaggaatacccgagactgggcaatttatgaggaaaggcccacggttatctggctcctggttctacaggctgtacaagmatggcacctgctgagcttctgctgaggtctcaggaagctttactcatggtggaaggtggacggggagcaggcatcacatggtatgaggggagcaagagagacagagaggagggagtgccaggctcttgtaaacaaccagctgtccatgaagtaacagagcaagacttcactcattattgtgggggtggcaccaagccactcatgagggaaccgtccccatgacccaatcacctcccaccaggccctgcctccaacacgggatcatggttcaccatgagatttggaggggacacatatccaccatatcacctaccaaatagaaagtggacaaacagggaaataaataaaaccaaacctagtttttttaaagacaaatgaaattggcaaatttctaactttact

SEQ ID NO: 804761 - DNA, 600 bp, Homo sapiens
ggaggtacactgccgtaaagtcctgccacttacagatgaagtggcgtcatattacccggaggtatcctttgttacagtaaaggtatgtattgtaactcttaggccaaataagtttgaaaggacgtattaggctattatcrccttgctataaggaaatacctgagactgggtaatttataaagaaaggaggtttaattggctcacagttctgcaagctgtacaggaagcataatactggcatctgctcagcttctggggaggcagaattgtgaggaaacttacaagcactgtggaaggtgaagggggagcaggcacatcacgtggccagagcaggagcaggagagaaagacggggctgggggaggggccacatgcctttaaacaaccaggtctcccaagaactcactcactgtcgcaaggacagcaccaaggggatgacgcttaaccattcatgagaaatccacccccgtgatccaatcacctcccaccaggccccacctccaacactggagattacaattcaacatgagatttgggcggggacacaaatccaaactatatcaagatgtatacaaaaagtagatataaaagggaataacta

SEQ ID NO: 804762 - DNA, 600 bp, Homo sapiens
ggaggtacactgccgtaaagtcctgccacttacagatgaagtggcgtcatattacccggaggtatcctttgttacagtaaaggtatgtattgtaactcttaggccaaataagtttgaaaggacgtattaggctattatcgccttgctataaggaaatacctgagactgggtaatttataaagaaaggaggtttaattggctcacagttctgcaagctgtacaggaagcataatactggcatctgctcagcttctggggaggcagaattgtgaggaaacttacaagcactgtggaaggtgaagggggagcaggcacatcacgtggccagagcaggagcaggagagaaagacggggctgggggaggggccacaygcctttaaacaaccaggtctcccaagaactcactcactgtcgcaaggacagcaccaaggggatgacgcttaaccattcatgagaaatccacccccgtgatccaatcacctcccaccaggccccacctccaacactggagattacaattcaacatgagatttgggcggggacacaaatccaaactatatcaagatgtatacaaaaagtagatataaaagggaataacta

SEQ ID NO: 804763 - DNA, 596 bp, Homo sapiens
caagacaatgtcagcatggggttctgtccttggtcactgctcagaggtggagcttgaccctgggatgtcgggaagacgctctgggaaaagctgtggctgaagctgctgagtccaaagggggtgtctccttcccagtagtttcagacgaggatctctcagccaggactcttctggagcctggaaaccaagccacaggacgaagggctgcgggaagaaggaggctgagcctggggaacctggtggctgccttcgggtgtcagaagggctttcccccagcacgcgtttccccagaggctggattggggccactgaggcggtgtgacagggaggtagatttcagctcagcaggaggaagggtcccctgaaagccagggctcccagtgacacactgggcgcctggtgattactcagcttctgggtgctgagggctctgaamggcaggcacacttgtcccactgtatcataacagaaaaaaccggaacggcccatgtgcccattagctggtggatggataaacacagcgtgacagagcggtacagcggaatccacaccagcactgagggcggcattgcttacgcacacggcaacaggaacgc

SEQ ID NO: 804764 - DNA, 642 bp, Homo sapiens
agtttacataacttcctgtgttctgattctttgccaggtacacagctttctgattactatgacattcaccactccttacaggaaaagggtaagttaattatattaagtttaagccctttggccactctgacagtgatttctcagggtaaattaataaattggcctctgattatgatttcatttctcatataaaataaagatgacatgctgataaaataggctttgagtatttccatttccccgtgatagtaatttgtctctgtaaattaataaaatgatctgattataatttggatttccatgtaggttaactatagggataattcaaaaatcaagctaacgcaaatgttatagttcctgtaacaatgatttcatgttgtatattaatgaataggcattctgttttatagatragccactttaacttgttaatggcagtcaggccctgagagatggagttgttctcagtgtactgactgagccatctaaccaaccctacaagctaaagagctagactttggatagggatacatttttaagcgtaactaatgttttcctaggaggctcctcctagagatttgactttttcttctctggagattctggaaacgtctctctgttccccatgagataagaattaat

SEQ ID NO: 804765 - DNA, 580 bp, Homo sapiens
aagtttaattttagacatattcagcttaagatgactctaagacatgtcggatttgtagcgatagatagatacatgtctcattctcaggtgggagtcctgggctggaaaggagaaacacaattcataggcacagagatatagttttttttcattaagatgaaagagatyactgagatatgggggctttgttttatcagttagatttctcagactaataaactccccaaaggaagaaagtaaatgttccgtttgataagattaaggaacagttgttctgattgattcctgccaacaatgaaagtcctggttattggttttcctcgtggacttgcttttattcaggcagttggcgtgcttacctagtatcggcatctggcctggtagaccacggccttttctttctactgtatcccttcgactttaaagtaagaagagcctgataggtgcccaggatttaatgaagtttttagggtctactcacattgaatgtctttaagttacaagaactcattatgttttctgtttacttcctgtcacttcctcctgagaagcctgtcactttttctctttctttttacac

SEQ ID NO: 804766 - DNA, 532 bp, Homo sapiens
caagtccaaagtcatctatcccttggcatggaagcgatgatagcaaacttggcatgtgaggtacaatgaatctccctattccactggctttgaatttattaaaaatttgtattaatgtccagaactattggggaactaacacttgttgagtacagttttatttcttatatcattaaaacatcacacaatccaaagagakaaatatatcctcacttttacaaattaaaaaactgaggcaaaaagaagtcgagtaattggctaaaagtcatatgaaaagtaaggagaacagtgatggtccaaactcagacctacccagctatgtgacggtagcatcgctttataaaaattcattttttatctgttccttttaacttaaaaaatgcctactaccatacatatcacttgtcctttccttggaaaaatcaagggttaaaatatttgatgttttctcagcacacctctttagagcagacatgaacacaatgtgccttgaaatttactccactcaccatttagaaagatggaaattgga

SEQ ID NO: 804767 - DNA, 585 bp, Homo sapiens
tccagttctgtgtggcagtggctaaagtccaagtgaatctgaccaagaggtatgtgtctccattcctctacctttttcccacttgtagtgccagggatctaccaaaggcatgacaggccagttatcttaagcttctatcactctctcaaccaccctgatcattcataagagagatttttcgtgacagatattgcaagcttaaaaaactagaagctactgcccaaacccagagagtgctagtaatgatgttatgtctctatgagaaaataagcaagtagttgttcctattcccagttctggagtagttgcttcaatattttgcacagacaaaaggcaagccataagaacataragatctgaatcttttctcaagtgaactagttgatttagaagagtgtgtagaagatttaacttaagtttagactttgaaacaatggcgattttggtgataagtaattaagagaaaactggtttcaccatgtgatatggtttggctgtgttcccacccaaatattaccttgaattgtagctctcataatttccatgtgttttgggagggacccatagggagataattgaatcatg

SEQ ID NO: 804768 - DNA, 585 bp, Homo sapiens
agtgttccttttctccacaaccttgccagcatctgctattttttgactttagtaatagccattctgactggtgtgatatggtttctcatggttttgatttgcatttctcaaataattagtgatgtagagcatttttcatatgctttctggtcacatgtatgtcttcttttgaaaagtgtttatgtcctttgcccacttgttaaagttttttttcttgtaaatttatttttttaaattatactttaagttctagggtacaggtgcacaacgtgcaggtttgttacatatgtatacatgcaccatgttggtgtgctgcacccgttaactcatcatttacattagttatatctcctaatgctatccctcctcactccccccaccccatgacaggcccyggtgtgtgatgttccccttcctgtgtccaagtgttctcattgttcaattcccacctatgagtgagaatatgtggtgtttggttttttgtccttgcgatagtttgctcagaatgatggtttgcagattcatccacgtccctacaaaggacatgagcttatccttttttatggcttcatagtattccatggt

SEQ ID NO: 804769 - DNA, 625 bp, Homo sapiens
tcatctgtgccacaggtccctgttgacagtgctgtactgtccaccacactagctgggatttattcctttgggctccaggtttggtgtttctggcactgaattacggaatacttgggacacatgtgacttttttcgtcctttctcctctactgtccttttaaaaacttgtgggatccaattgtgagtgaattatttatgtgtcatatcatttcttgaagttttatatcataatgcttgacctcattgtctagagaagcaatgtgtgttggttaatcctgtatttatacctaattgtatgaagcagttttagttgtcatttctggctattagwcttcatgtggcataatggaaagattgtggcttttgtggcatacatatccaattttaaatcccaggcagccaccttttagctctggaagatagtttctgagccttggtttcctcatctctaatggggtgtggcggtgggggtgagttatccaaccccccacgccccagagcttttgagaaatttcagtgagatcctgttatatagcagctgcgacactccccctgggactcgcagagggtttgggaatagatgacacgtgcgcatggacagaggcagaggcaacaaggctgtatg

SEQ ID NO: 804770 - DNA, 590 bp, Homo sapiens
ccatgaacagagtatttctctccatttatgtaggtcatctttgatttcatcaatattctatagttttggggcattaagccttgcacacattttgttaggtttgtatcttagtattttcttttctctatgctataaaaaataatacttcgaaaaaatttcaaattccaattgctcattcctagtacatagaaatgcaattaacttttgagtgctgacttcatacttgcaatcttgctaaatgtatttgttagttctaggagtatgcgtttttttttttctttaatgttctttaggatattctacaaagacaatcctgtcatctgtraacagatgcagtctcacatcgccccctcccctctgaatgtagcaacacagactccatcgctacaaaacataaaaaaaatttggctggacatgatggcttgtgcctgtagtcctagctacttcaggaggctaaagtgggaagatcacttaggcccaggagatcaagtcaatagtaagctatgattgtgccactgcactccagtctgaatggcaggccttatctcaaaaaatataaataaaatgaaagagggctttatcagttttca

SEQ ID NO: 804771 - DNA, 646 bp, Homo sapiens
gcactacctctgtagtgttatttgaaagtggacatggattaactgcaaatatatgttgcaaactccagtgtaaccctttaaaagctaaaaaaagtttaacaaatatgctaagaaagaagataaaaatggaaatcatataaaatgatcaattaaaaccaaaaaaggcagaaaaagtgtatgtgacaaaagcacaaacaaaaaaatatttgggaggccgaggcgggcggatcatgaggtcaggagatcgagaccatcctggctaacatggtgaaaccccgtctctactaaaaatacaaaaaaattagccgggcgtggtggcagacacctgtagtcccagctgctctggagtctgaggcaggagaatggcatgaacccaggaggcagagcttgtagtgagccgagatcacaccattgcattccagcctgtgcaacagaggcagactctgcctcaaaaaaaaaaaarggcaaaacctggaaaaacagcaataaatatcacagatattaatacaactatatcaataatcacattaaaggtcaatggtctaaatacacctattaaaagagcaattttcagaatgtatcaaaaaataagacccaactatatgttgtctacaaggaacctagctgttgccacctttcaagatca

SEQ ID NO: 804772 - DNA, 641 bp, Homo sapiens
atacagtgagtaatgcaaatacattggttgctgataaaagccatgaacattccttcctctgatgccaataataacaaccataatatatgagtgcacttcagctcttgccaacaattacagcaaatgtacaagaagagaggccaagcagccagggcacgttcatgtgcagattgccctggtctaaataaayatggtctcatgagccatcatggactgcctgtgaggcaggaagaacatagctcggatgcagggctcttactcctggctgggtacagaaatcacctatgggacaaacaacagcgacaacaaaaacaatagcaaacaaaacagatgactgggcgccactctccagagactgtcatttaataattaacaataagcagttgtgatgtaatgtttagattgtgatttactagttacttgctctggggtaggtccccaaaatggaaaattatcaaagttttctagagtggttctaataggcagccaggatacacaacccctgttcttcattctcctagttctttgttagacaaaacgaggtacaagcctgaagtgctgaaaagttaattggctaacccaggcctgaagggtaggtttggggcaaatgaggaatcggaacttaaggtctgacttgccat

SEQ ID NO: 804773 - DNA, 641 bp, Homo sapiens
atacagtgagtaatgcaaatacattggttgctgataaaagccatgaacattccttcctctgatgccaataataacaaccataatatatgagtgcacttcagctcttgccaacaattacagcaaatgtacaagaagagaggccaagcagccagggcacgttcatgtgcagattgccctggtctaaataaatatggtctcatgagccatcatggactgcctgtgaggcaggaagaacatagctcggatgcagggctcttactcctggctgggtacagaaatcacctatgggacaaacaacagcgacaacaaaaacaatagcaaacaaaacagatgactgggcgccactctccagagactgtcatttaataattaacaataagcagttgtgatgtaatgtttagattgtgatttactagttacttgctctggggtaggtccccaaaatggaaaattatcaaagttttctagartggttctaataggcagccaggatacacaacccctgttcttcattctcctagttctttgttagacaaaacgaggtacaagcctgaagtgctgaaaagttaattggctaacccaggcctgaagggtaggtttggggcaaatgaggaatcggaacttaaggtctgacttgccat

SEQ ID NO: 804774 - DNA, 614 bp, Homo sapiens
agtttctttgatatcttcaaaagcccaatcatcctgttccatctaggacattaagaaaaatacacccaaagaatagtctttcaagtacattgccaccgtagctagatgattattatcctgactattaattactattatgattactrttgccatggtttttatgtttttctgtgtgcccatccaatcccacatccagccaccacagccactgctgggtttttcctgggaaacagatgcccatgtgctggtctgggcaggcccatacactaaaggcagcctatccatgcagagctgagtgtattggaagacaacagaacggatgagccacaggtgagccgcaggtgagcaggtttacagcccccaagaggatttggatgcccaggcctgggagcttgatgaagaagtgtggtttcatgaaagcattcaccccagttatgcctaagaaagctcagccttggaataaagagaagcatgaagagtgcaatgaggaagaaaaaccagcccctaatgaaggacagagacaccaagccatcatcataatcaggagacagtaataagatagccctcaaagaaatccagccagaagccggcaagtgcacctagaccccttcggg

SEQ ID NO: 804775 - DNA, 657 bp, Homo sapiens
gttgcagccgtgatgctgtttgcctcaacttatgggtcttctctgggcccagattgaaccttcctatctgtttccactagctttgtatgccatatggcattttacagccccatactatgtaggtaacagaaacaacagcacttgcaaactacatatatttcaaaaaacaactaggtcttttgattaaattataagctttaattatattctaactaattagaacatgtttaacatagacctctcccatacctgaaaaactgaatgaaaagaaacttacaaatgaaccctctgtaggattacyattaggttaaaaagataactaaaaaatatactattttaggccaagtgtgatggctcacacctgtaatcccagtgctttggaaggctgaggcaggaagactgcttgaggccaggaatttgagaccggcctggacaagacagtgagactctgtttctaaaaaataaaaataaaaaaattagttgagcatggggaagggtacctgttgttctagatactctggagactgagtccggaggatcacttgagcccagtagtgcaaggttgcagtaagctatcatggttaacactgcactccagcctgagtgaaagagtgagacgctgtctctaaaataaacactattttaaaattgcaacat

SEQ ID NO: 804776 - DNA, 662 bp, Homo sapiens
ctgaacgtatttgtctgtagaacttttcgtatttttaaaatatttttttaagtaaaacatactgatatcccatggaactctgtctccagagccagactgctgaggaaagattcctatgaccacagcaggcagcaggaagtgcttttcagaatggaagcgtcactggatgtcatttggaaagtcctgtcttacccagaagatgctcaaggaagttcactcattagggggtggctcattcttattttccacacytctgagtagtttgtagatgtaaagatgtggtcccaaatttcaaccaagtagcctcaaagatgagagtacgcagttagacatgaacatacatattccatgaacatggttgattttgcggattgctaccaataaaaagttctatcacatttacttttaaaattagatttgaagttaatttcattttgacatgatttgagatgattttatgtaacatcatctaaaaagttaagattagagtggattaaaataaacagaactgggaatactttattcactcagtcactcactcaagtttgtctaaatggatgtccagatgatcaaaaagacggcatctgtccgtgtagtctaaagtcacacagacattcgtattttctgaagatcaagaattacaaatccatacgctgtacaaa

SEQ ID NO: 804777 - DNA, 662 bp, Homo sapiens
ctgaacgtatttgtctgtagaacttttcgtatttttaaaatatttttttaagtaaaacatactgatatcccatggaactctgtctccagagccagactgctgaggaaagattcctatgaccacagcaggcagcaggaagtgcttttcagaatggaagcgtcactggatgtcatttggaaagtcctgtcttacccagaagatgctcaaggaagttcactcattagggggtggctcattcttattttccacacttctgagtagtttgtagaygtaaagatgtggtcccaaatttcaaccaagtagcctcaaagatgagagtacgcagttagacatgaacatacatattccatgaacatggttgattttgcggattgctaccaataaaaagttctatcacatttacttttaaaattagatttgaagttaatttcattttgacatgatttgagatgattttatgtaacatcatctaaaaagttaagattagagtggattaaaataaacagaactgggaatactttattcactcagtcactcactcaagtttgtctaaatggatgtccagatgatcaaaaagacggcatctgtccgtgtagtctaaagtcacacagacattcgtattttctgaagatcaagaattacaaatccatacgctgtacaaa

SEQ ID NO: 804778 - DNA, 612 bp, Homo sapiens
gtggttctagtttgtatttccctgataattagtgatgttgaaagtatttatatatctgctgactatttgtatgtcctctttagaaaaatgtctgtttgggtcctttgcccacttttaatcattgttatttgctttcttagtactgagttaagttctttatatatcttagacattacactcctctcagatatgcaaatgtattccctcaaggcatgggttgtctcttcacactgttaattgtttycttttctgttcagaaacattttagttgaatgtaatcccattgatctatttttgcttttcttgtctaggctttgggggttatatccaagaaattattgctcagaccaatgtcacggagcttttcctctatgttttcttctagtaattttaccattttaggtattacatttaagtctttaatccattttgagttgattcttttttttgtatatggtgtaagataggggtccaactccagtcttctgcatgtggaaatccagttttcccagcatcatttgttgataagactgtcctttccccattgtttgtttttggcatctttgctctaaaatcaattgacgataaatgtgtgggtttatttctggtctt

SEQ ID NO: 804779 - DNA, 646 bp, Homo sapiens
atgggggtggtttctaacgggttaaaactgcccccctagtgctgtctcgtgatagatttctcatgagatctgacagtttaaaagtgcatggcacttcctcctttgttgtctctctctcctgtcaccatgtgaatatgtgcttgcttccgctttgccttctgccatgattgtaagtttcccaggcctccccagccatgcctcctgtacagcctatggaactgtgaatcaattaaacctcttttctttataaactacccagtagcaggtagytttttataccaatgtgagaatggactaatacagtctgttttcgtaccagtgccatgctgttttggttactgtagccttatagtacagcctgaagtcaggtaatgtgacacttccagcttttttttctttttgcttaggattgctctggctatttgggctaatttttggtttcatattaattttagaatagtttttctagttctgtgaaaaatgacattggtagtttggtagaaatagtgttgaatctatacattgctttgggcagtatggccattttaatgatactgagtcttctaatccatgagcatgaaatattttttcatttgtttatgtcatctgttattttttttagcagttttatacttctccttgtaga

SEQ ID NO: 804780 - DNA, 630 bp, Homo sapiens
attttcttgatagtatcctttggtgcacaaaagtttaaaatctacaatggacctttttattattattattattattttcagacagtcttgctctgttgcccaggctgtagtgcagtggcacaatcttggctcactgcagcctccgcctcccaggttcaagcaattctcctgcctcagcctcccgcgtagctgggattataggcgtctaccatcacaccagctaatttttgtatttttagtagagacgggtttcaccatgttggccaggctggtcttgaactcctgacctcaaatgatctgcctgcctcggcctcccaaagggttgggatttcaggcgtgagccaccgtgcccagctacaatagatctttgagttgagtaatacaagccctgcttcctttcccctaaagaascttgagtcaaacctacattactcattaatgcattaatgtgagcacattcttttgatattgagtccataagagaatatgtgcctaggaattcacagaaatctagcagcttggacttccccacactgtagaaatggggtttgaggaacttcatttcagcacaggtcaaggggctccaaatgagtttgggttatgccactattaaggagatattattcacta

SEQ ID NO: 804781 - DNA, 591 bp, Homo sapiens
gagtccataagagaatatgtgcctaggaattcacagaaatctagcagcttggacttccccacactgtagaaatggggtttgaggaacttcatttcagcacaggtcaaggggctccaaatgagtttgggttatgccactattaaggagatattattcactattattcattgcraatattgtttactacttttattgtaataacacactagtttagctaaattttggataagatagacttttgagaagcacaacttaagaagcacatttaaagcattatgcctatggcatgatgtttcaagttctaaataaccacataatagaaacacgcaatccacagagaaattgggaacttcctacatatgatttcattagttatctcagtaattagtttggcagattttgagtaaccaaattttcatctttgcaatatatgtttcttttcttttcttttcttttctttttttttgagacacagtttcactctgttgcccaagttggagtgcagtggcgtgatctcgggtcactgcaacctccgtcccctgtgtttaagtgattctcgtcactcagcctcccaagtaagtagctgggatt

SEQ ID NO: 804782 - DNA, 585 bp, Homo sapiens
gtctctgtgtcacatcttggtaattctcaagatatttcaaactttcccattattattatatgttatggtaatctgtgatcagtgatctttgatgttacttgttgtaattggtttggagcaccgcaaattgcacccatgtaagataaagaacttaactgataaatgtgtgtgttctgactgygccaccaaccagccatttgttctcccttttctttccctctccttgggcctccctatttcctgagatacaacaatattgaaatgaggcctattaataaccctacagtggcctctaagtgttcaagtgaaaggaagagtcacaagtctctcactttgaatcaaaagctaaaaatgattaagcttattgaggaaggcattcaaaagctcagataggcccaaaactaagcctcttctatcaaacagctagccaagttgtgaaggcaaagaaaaagtttttgaaggaaattaaaagtgctactccaggccgggcacggtggctcatgcctgtaatcccagcactttgggaggccgaggcgggaggatcatctgaggtcaggatttcaagaacagcctggctaaaatggc

SEQ ID NO: 804783 - DNA, 658 bp, Homo sapiens
ttccccatcctctggcatgcaaatgtctcaccaataagcccagtgtgtttgctacttcttgctcactggatccaatcagcataatgtcatcaatgtaatggaccagtgtgatatcctgcagaagcgaaaagcgatcaagttctctccaaataagattatgacacaaagccacagagttgatatacccctgaggtaggacagtaaaggtatattgatggccttgccagctgaaagaaaattgcttctggtgggccttatggacaggwatggagacaaaggcatttgccaagtgaagggctgtataccaggtaccaggaggtgtgttaatttgctcaatcagttaaaccacatctggtacagcagctgcaagtggagtcaccacttggttaagcttaagataatccactgtcattctccaagatccatctgtcttctgcataggtcaaatgggagagttgaatggggatgtgggaatcaccacccgtgtccttcaagtccttgatggtggcaccaatctccgcaatccctccagggatgtgatattgtttttgatttactatttttctaggtagaggcagctctaatggcttccatttggcctttcccaccatagtagccctcaccctaccagtcagggagccaatgtgggattctgcca

SEQ ID NO: 804784 - DNA, 568 bp, Homo sapiens
atctctaccataaattagccaggagtggtggtgggcacctgtaattccaagtatttgggaagctgaggcataagaatcacttgaacccgggaggcggaggttgcactgagccaaaatcatgccactgcactccagtctaggggtcagagtgaaactgtctcaaaaaaaaaaaaaaaaaaaraaaaagaaagttctcaaataaacaacctgatgtacctcaaggaactagaaaataataaacttaaccccaaattagcaggaccaagaaaataataaagaccagaagaatggaaataaagtgacccaaaaaaagaaacgaaagatcaacaaaaccaaggatcatttttttgaaaaggcaaacaaaatcaacaaacctatagcagactaagaaaaaaaaaagactcaaatcagagatgaaaaaggagatattacaactaataccataaacaaagtattgtaagagactattataaacaactgtatgccaacaaattgaaaagcctagaggaaatggctaaattcttagacacacacgaactatcaaaacggaaccatgaagacatagaaa

SEQ ID NO: 804785 - DNA, 568 bp, Homo sapiens
atctctaccataaattagccaggagtggtggtgggcacctgtaattccaagtatttgggaagctgaggcataagaatcacttgaacccgggaggcggaggttgcactgagccaaaatcatgccactgcactccagtctaggggtcagagtgaaactgtctcaaaaaaaaaaaaaaaaaaaaaaaaagaaagttctcaaataaacaacctgatgtacctcaaggaactagaaaataataaactwaaccccaaattagcaggaccaagaaaataataaagaccagaagaatggaaataaagtgacccaaaaaaagaaacgaaagatcaacaaaaccaaggatcatttttttgaaaaggcaaacaaaatcaacaaacctatagcagactaagaaaaaaaaaagactcaaatcagagatgaaaaaggagatattacaactaataccataaacaaagtattgtaagagactattataaacaactgtatgccaacaaattgaaaagcctagaggaaatggctaaattcttagacacacacgaactatcaaaacggaaccatgaagacatagaaa

SEQ ID NO: 804786 - DNA, 568 bp, Homo sapiens
atctctaccataaattagccaggagtggtggtgggcacctgtaattccaagtatttgggaagctgaggcataagaatcacttgaacccgggaggcggaggttgcactgagccaaaatcatgccactgcactccagtctaggggtcagagtgaaactgtctcaaaaaaaaaaaaaaaaaaaaaaaaagaaagttctcaaataaacaacctgatgtacctcaaggaactagaaaataataaacttaacccmaaattagcaggaccaagaaaataataaagaccagaagaatggaaataaagtgacccaaaaaaagaaacgaaagatcaacaaaaccaaggatcatttttttgaaaaggcaaacaaaatcaacaaacctatagcagactaagaaaaaaaaaagactcaaatcagagatgaaaaaggagatattacaactaataccataaacaaagtattgtaagagactattataaacaactgtatgccaacaaattgaaaagcctagaggaaatggctaaattcttagacacacacgaactatcaaaacggaaccatgaagacatagaaa

SEQ ID NO: 804787 - DNA, 568 bp, Homo sapiens
atctctaccataaattagccaggagtggtggtgggcacctgtaattccaagtatttgggaagctgaggcataagaatcacttgaacccgggaggcggaggttgcactgagccaaaatcatgccactgcactccagtctaggggtcagagtgaaactgtctcaaaaaaaaaaaaaaaaaaaaaaaaagaaagttctcaaataaacaacctgatgtacctcaaggaactagaaaataataaacttaaccccaaattagcaggacmaagaaaataataaagaccagaagaatggaaataaagtgacccaaaaaaagaaacgaaagatcaacaaaaccaaggatcatttttttgaaaaggcaaacaaaatcaacaaacctatagcagactaagaaaaaaaaaagactcaaatcagagatgaaaaaggagatattacaactaataccataaacaaagtattgtaagagactattataaacaactgtatgccaacaaattgaaaagcctagaggaaatggctaaattcttagacacacacgaactatcaaaacggaaccatgaagacatagaaa

SEQ ID NO: 804788 - DNA, 626 bp, Homo sapiens
atcggttttgggctcagaaaatggagtgaccagtctgactgtggaacttatgggtgtaggtatggtgattaatatatcattgttaacctttttatagccacagttcatttgtaaatatattttatatctttaaaatgcttttataatccaagagggaaacctgtaaaatagaatttcgttagagttacaattggacctcagcatcctaatcttgagaaatgtcttgaagaataatatcagtatagcacttcatggtcaatctgaccttgtcttargagaaatgtttttttctggaaaatgaatacaggaattttgagggttttaatttcaagttcatttgattaaatataaggctataaagaaaattaatattcttgacacacatacaaacttatgtgtgtccagtcatcacaccctggaatacatcccctttggtaccagtgattcttgcaaaatacagagtagatgttctcccaaccttttacagtgtgggtgagtgagactcggaagaggaaataatttgctcagtgttagtatcaactagtccttgagggcagagctggtgcctatcttatttatcatagtctccttggaatcttgcacactgcccgctatgtaacacatac

SEQ ID NO: 804789 - DNA, 655 bp, Homo sapiens; identical to SEQ ID NO: 804301

SEQ ID NO: 804790 - DNA, 500 bp, Homo sapiens
agacattgtgaattttactttcttgggtgctggatatttttgtattcctgtaaatgttcttgagttttgttctgaggtgcaattaagttacttggaaacagttggatgcctcagttattgctttgttaggcaggcccacagctgtgcttagaccagagatagttttgccccactacagagtcaaaaacatgagtgctctattcaatggaaacaggaactattctggcctgtgtgaactctgagtattgttccttctaatcttttcaggttttttttttyctttgtaatgtccttacaaggttgttgtgatcagtacttagctaaagacttgagggggacattctgagatcttcagaactctttctctacgtagctctatgtctcatactctgccctgcagatctttgccactttggcctttttgactttcagccttatctcctcaaataagagaaaccatgtggctccacctggatcccccctccctgcacccatgttct

SEQ ID NO: 804791 - DNA, 524 bp, Homo sapiens
aacttcattagcttcgcagtaaatctgcctctgagtcaataagtaagtgagtagatgaataaagtcgaagtacaaaggtgtataattttagagcttataggacctaaaaaatgatcaagtcctatgtccttttttaatagttgcagaaaccaggactggagagagtagctttctcatgaacacacagctaaaagtcttaccaaggttgagtggctgtcctaggatatcatgactgcagcctggtggtgctgaacccaaggccatgtctttactctgccactaactccatccctaccttaggaacagttgctgctcatctgccatatataactcacctctccacgtcarggctgcccaatgtcaagggccaggcacaatgaggtctttgtcaaaggactccctggaattacggggcacttacactgggtagccatacacagtgtgaacctgttaatggtcttgacctcctcttttggtgctgatttctggagggaagagaaaggaaaagtgcttcttcctctccc

SEQ ID NO: 804792 - DNA, 620 bp, Homo sapiens
ctcttaagtacaggcctgtggctgccatgctcagctaattttttttttgttgttgttgagacagagtcttgctctgtcacccaggctggagtgcagtggtgggatctcggctcactgcaacctctgcctcccagattcaagtgattcccctgcctcagctctccacaagtagctgggactacaggtgtgcaactagcatgcctggctaattttatttttaatttttagtagagacagggtttcaccatgttgatcagactggtctcggactcctggcctgaagtgatctgcccacctcagtgtcccaaagtgctgggattacaggcatgagccaccacatccggcctaatttgttttgttttgagackcagtcttgttaggttgcccagactggtatctaattcttcaagccattctcccacctcagcctcccaaagtgctgggattacaggcttgagccactgcaccaagctgtggtgtttgatcaagcaactaggcaccagagcctagctaggctgacacataaaattaactatcgctctccacacgcttggccactgatccttagcaactgggcctcagtccaaagttagagagcttaactgaagaggacattgtga

SEQ ID NO: 804793 - DNA, 571 bp, Homo sapiens
tttttttgagacggggtctcaggctggagtgcagtggtgtaatcatagctcattgtggccttgacttcccaggctcaagcagtccatccacctcagcctcctgagcagttgggactacaggcatgtgccactatacctggctgatttttatttttatttttttagagacaggctctcaccatcttgcccaagctgttctcgaacttctgtctaggscttccaaagtgttgggatcacaggcatgagacattctgtctggcctgtttccatatcttggctattgtcagtcatgctgtaataaacatggggaaaaatgtgaaagtggtcatcctttccttgttccagttcttagaggaaaggtgttcgacttttccccattcaagacacagataatcttgggaaaagatatttataaaaaaagtatcatacacatgacatgcattcagaatattaaaagctcctaccaattgaaaaaaaagaccaagttacagaaaaatatgccaaaggagccatgggtagtggtgtatcctacagttccaattactttggagactaaggtggaaggatggct

SEQ ID NO: 804794 - DNA, 590 bp, Homo sapiens
tgggtttttaattaaggttattgtattttctatttctagaattattttagattcatttgtaaatttactacagcacttttcatagtttcctattctctacagagatcttcaaacttgtctttcactttttaaacctatagccagcctcgttgtttaaaatctaaaatctttatgagtctgtttcccttgtctaatgtttttgctagctcctgctctgcagtctggtttctttgcgagccgtgtgtgtgtgtgtgtgtgtgtgtgtgtgtgtgtgtgtgtgtgtgatggacattgtatttgaaaaaatatttgtgggaataaatttagacttgcaatgaaagttctgtagagaggatttgcrtttgcttctctttatagagaaagttcttttctctagagaggaattgccaagtacctggtagttcaactattttaaggcttgaaattatctggtgctcgggtgaccctatgttggctgtaattctatgtaaaatatttctcttctagtttatagtttacttggattgcatagctctttggggttccaatattgtgagaagtttctcctgttagaccctcaagcttacgca

SEQ ID NO: 804795 - DNA, 501 bp, Homo sapiens
tttcatatgtctgttggctgcataaatttatttaagagaaatgtctgttcatatactttgcccactttttgatgggtttgtctgtttttttcttgtaaatttgtttaagttctttgtcgattctggatattagccttttgtcaagtggatagattgcaaaacttttctcccattctgtaggttgcctgttcactctgatggtagtttcttttgctgtgcagacgctctttagtttaattagatccgatttgtcaattttggcttttgttgccattgcttttggtgttttagacattaagtctttgcccatgcctgtgtcctgaatggtattggccaggttttcttcyaggatttttatggtcctgggtcttatgtttaagtctttgatccatcttgagttgatttttctatcaggtgtaaggaaggggtccagtttcggttttctgcttatggatagccagttttcccaacatcatttattaaatagggaatcttttcccc

SEQ ID NO: 804796 - DNA, 642 bp, Homo sapiens
ccagtcctctattggtctcttctgctcctacatgtcttacaaggccaagaatgcccgggcttgctcacatttcacccaggccatatgtcagggctgggattgcagtcagaagccttgagaaataatatcatgtctccctttcagacaaagagcagacttgcttacttctaacgaaaaaagagatttattcctcaggctcagagtttcccagctgtagcacattagcacacacaattgtgcgatcccacracacaagacagaaaaaatagggtggaagaaatattaggaaaaaatattggctgagcattttctgaagttaatcagagacattaaacgacagtcacaggaatctcagaaaatagcaaacaacataaataccaggaaaatacagcccagtgatggacagcaggcatattcaaactgctgatagcaaaagtgagaaaacattttggaggcaaccaaagaaagaaacacactacatgcagaagaacaaaaataagaatgtaagcagatttctcttcagaaaccatccaagtttaaaggcaatggaataacatcttttaagcactgaaaaggaaaaaaaaaacctgtcaacccagaattctatgaccagcaaaaatacctttcaaatattaagaaaaa

SEQ ID NO: 804797 - DNA, 628 bp, Homo sapiens
aagttaatcagagacattaaacgacagtcacaggaatctcagaaaatagcaaacaacataaataccaggaaaatacagcccagtgatggacagcaggcatattcaaactgctgatagcaaaagtgagaaaacattttggaggcaaccaaagaaagaaacacactacatgcagaagaacaaaaataagaatgtaagcagatttctcttcagaaaccatccaagtttaaaggcaatggaataacatcttttaagcactgaaaaggaaaaaaaaaacctgtcaacccagaattctatgaccagcaaaaatacctttcaaatattaagaaaaataaggactttctcaaacaaacaataatctkgggaatttatcacgagcatatatacttcataagaaatgttaaagataagatatttcaatattaatgcatctcagagaatacggaggcccaaggagagagagatgagataatggccagccagtggagtaatcagcacacataatatttgttagttaagttcaccatcttagatgggagtgggtcgtggtacccccaatagtaatatcaaaggtcactaatcacagatcaccatagctgatacaatagtcaagaaaagatttgaaatattg

SEQ ID NO: 804798 - DNA, 628 bp, Homo sapiens
aagttaatcagagacattaaacgacagtcacaggaatctcagaaaatagcaaacaacataaataccaggaaaatacagcccagtgatggacagcaggcatattcaaactgctgatagcaaaagtgagaaaacattttggaggcaaccaaagaaagaaacacactacatgcagaagaacaaaaataagaatgtaagcagatttctcttcagaaaccatccaagtttaaaggcaatggaataacatcttttaagcactgaaaaggaaaaaaaaaacctgtcaacccagaattctatgaccagcaaaaatacctttcaaatattaagaaaaataaggactttctcaaacaaacaataatctggggaatttatcacgagcatatatacttcataagaaatgttaaagataagatatttcaatattaatgcatctcagagaatamggaggcccaaggagagagagatgagataatggccagccagtggagtaatcagcacacataatatttgttagttaagttcaccatcttagatgggagtgggtcgtggtacccccaatagtaatatcaaaggtcactaatcacagatcaccatagctgatacaatagtcaagaaaagatttgaaatattg

SEQ ID NO: 804799 - DNA, 554 bp, Homo sapiens
ggggaactcaactagcctggcatggtggcatcctcagagggacaatggcttagcatgcagctgtgaatgaaaataagtaaagccttagggaagcaagtgtggggcaccacagaagccagtgcagggtctcatctcagaagaccatcggtgctgatggcagctcccagtgagtgtgcaggacctaccttcaacagcaaccccatatggcaasgagagcacagccatggcacaagaacccatctgtatttccagtcctctctgcacctgccatttggagtgagtaagcactggggatcttagacaattggaaaccagaatgaacatagctaagaagagcagatagaagataaatctgtgtttctaccccaagtgcactggttaatttcactttcagagttttagaaggctcagccaggactcaaatccaaatccacctgtctgtgtagatatattcacagaatttccaaataagaaatctaggattgtcctgaaccaccagtcccaacctacaaagaccaggaaaagaggcggaaaaaccagaacaggtaaaagat

SEQ ID NO: 804800 - DNA, 621 bp, Homo sapiens
ctgtccctgcttctgccagaagacttcagagtgtcccatggagtgtactgactatggcacttatttgactgcctccctgtttagatgtactattcatttaatttattgttgcctctttttctgttttcttacatgtgttaatttgatcaaattacttgtccttttctttctttttttttttgagatggagtcttcctctgtcacccagactggagtgcagtggtgcaacatcggctcactgcaacctctgcctcctgggttcaagtgattctcctgcctcagccacctgagtagctgggactacaagtgcctaccaccatgtctggctaatttttgtatttttagtagagacgagttttcaccatgttggccaggatggtctcaatctcctgacctygtgatctaccttccatggcctcccaaagtgctgggattacaggtgtgagccactgcacctggccatccttctcatttttaaccttatcttaatttggaaattcttctgtaattcttaattctactcatggttccttctctttctcaacatttattcttctactataaagatctcaatagctcctctttgaagatcctctgttgcccatggttttccctttcctc

SEQ ID NO: 804801 - DNA, 545 bp, Homo sapiens
acgaatggagtgcattcctgccagtgcccctactactctcgcacatggcaatgctgctcccaggactcaggtggctttggactagtaggcattggcatgttgggcagggttgggggcaggtatatgctgcttcctggaaaaggagtgtcacttacgtcatagcccccagcttcaccttatcttgactcagatgccctctcagactcctattctgctacttttgtgcctcctcttctctcttcatctctctctctctctcctcctaccccgtaataactggccactctccatattttccagtctacagcccaaaagrgagatggacacattgatttagctagttactctctacccacttggacagtgtcttttgctccaggtcccctcattggttgctcactggcctatggatactattaattgaattagcatccacctctgtcaactgcttatgcacacagggactgttcccatggtcatcttaatctgaagttgggaaagcagcgttatagatgatatgcccggtatttaaagaaaatcagaga

SEQ ID NO: 804802 - DNA, 595 bp, Homo sapiens
tcaatggaaatgtgatgccacttgctagatgtctataaaacattctgtaacagaaaataataatattattatcattagggaattagtagttctaattcaagaactacttgtatgtcatttttaattagaaagaggaaaaatacttttacattttattgatgtattattattcttatctcctaaaatgtatagtrtttagcagaaggtatatataagaagatgcagagaattttgaatattagagtgccctttgaaaaaatcacttgctgaattaatagaacttgggattaggctaggactacagtaaacgtctccctcctgtgcattctcatgtggcctctcagggcatcccagcctctaggccttcatggggcgtggtgaagcagatgttttgcccagggctaaccctcccaagatgctctgatacttgaaaaaggattggccaaaggcgtttaattatagctcaactacctgagaaccttaggccaaggctaattcaatttagtcctacatttaggctcataccttctcaatctcaatcatgatcattatacagtaatcgtatgcatgatcctagctaacatttattcaatac

SEQ ID NO: 804803 - DNA, 595 bp, Homo sapiens
tcaatggaaatgtgatgccacttgctagatgtctataaaacattctgtaacagaaaataataatattattatcattagggaattagtagttctaattcaagaactacttgtatgtcatttttaattagaaagaggaaaaatacttttacattttattgatgtattattattcttatctcctaaaatgtatagtatttagcagaaggtatatataagaagatgcagagaattttgaatattagagtgccctttgaaaaratcacttgctgaattaatagaacttgggattaggctaggactacagtaaacgtctccctcctgtgcattctcatgtggcctctcagggcatcccagcctctaggccttcatggggcgtggtgaagcagatgttttgcccagggctaaccctcccaagatgctctgatacttgaaaaaggattggccaaaggcgtttaattatagctcaactacctgagaaccttaggccaaggctaattcaatttagtcctacatttaggctcataccttctcaatctcaatcatgatcattatacagtaatcgtatgcatgatcctagctaacatttattcaatac

SEQ ID NO: 804804 - DNA, 604 bp, Homo sapiens
aattcttgttgtctagtataaacttaagcctggctcatctcaagcacccctcagaagaggcagatctgaggtttaagatttggaaatggtccttcaccaagggttcccatgcccagattttcagtctccagaagaaaggatagggaatctgatttttaaagaattccccaggttattattctggtgctgctaaaaagccaygttcgggagcccctgcttgataccttacactttaaagcagcaatttatcgatatagagttgttctggataaagctgaactgcctagagggaagtggactccagaggtatgggaaaattattccgttgtctttttttttttttaagtctttccaaactaaagacctcatagtctaggtttgatccatcaaagaagccaaaacattagaattcttagatcaaagtttcttggactccaaaattctaaggtgggggcattctggaagtgcagtaaacactgccagtgccctaccctctcctacccctcagcagtcaactgctcccacattttctgctggcttctgaccacaagtctctgagaatcagtcaactcaaccagctcaaagggtggcagctgatgttggg

SEQ ID NO: 804805 - DNA, 604 bp, Homo sapiens
aattcttgttgtctagtataaacttaagcctggctcatctcaagcacccctcagaagaggcagatctgaggtttaagatttggaaatggtccttcaccaagggttcccatgcccagattttcagtctccagaagaaaggatagggaatctgatttttaaagaattccccaggttattattctggtgctgctaaaaagccatgttcgggagcccctgcttgataccttacactttamagcagcaatttatcgatatagagttgttctggataaagctgaactgcctagagggaagtggactccagaggtatgggaaaattattccgttgtctttttttttttttaagtctttccaaactaaagacctcatagtctaggtttgatccatcaaagaagccaaaacattagaattcttagatcaaagtttcttggactccaaaattctaaggtgggggcattctggaagtgcagtaaacactgccagtgccctaccctctcctacccctcagcagtcaactgctcccacattttctgctggcttctgaccacaagtctctgagaatcagtcaactcaaccagctcaaagggtggcagctgatgttggg

SEQ ID NO: 804806 - DNA, 604 bp, Homo sapiens
aattcttgttgtctagtataaacttaagcctggctcatctcaagcacccctcagaagaggcagatctgaggtttaagatttggaaatggtccttcaccaagggttcccatgcccagattttcagtctccagaagaaaggatagggaatctgatttttaaagaattccccaggttattattctggtgctgctaaaaagccatgttcgggagcccctgcttgataccttacactttaaagcagcaatttatcgatatagagttgttctggataaagctgaactgcctagagggaagtggactcmagaggtatgggaaaattattccgttgtctttttttttttttaagtctttccaaactaaagacctcatagtctaggtttgatccatcaaagaagccaaaacattagaattcttagatcaaagtttcttggactccaaaattctaaggtgggggcattctggaagtgcagtaaacactgccagtgccctaccctctcctacccctcagcagtcaactgctcccacattttctgctggcttctgaccacaagtctctgagaatcagtcaactcaaccagctcaaagggtggcagctgatgttggg

SEQ ID NO: 804807 - DNA, 593 bp, Homo sapiens
catagcagcatccctggcctgtccccactagatgctgggggtgctctcccccgcaccctcccattgtcccaactagaaatgcctccaaacattggcaagtgtcccctggggcaagatagaccctggttgagaaaaactgacttagactttactgttctcaggaaagcttctccctcacattctcagccaggctcaccttccctcgctctgggcccccagagtgctgtatttcctcttgctggtgctgtatcagcctacaacatggctccccgggggcggggctgcatctgtcttgctcactgccagggcccagcctcaatgcctgctacatagtggatgctcaataaatatatgtggaatcgatttaaacttgctcagtgacaaaaatgacagtcctcacatgtccatgatgattaaaactgggactgaatygattttgatgtcactgcaaatcctaaggccccgggatgacactggctgcttgtcctaacgcaagtcgtgacagctgccttggggagggcgatgcccccccttattggccccattctgagcctgtctgtggttccatcatcactttctgcttggcttagtgt

SEQ ID NO: 804808 - DNA, 626 bp, Homo sapiens
caacacggcaattctgtccagctagagcggtaaaactgttcatgccctttgaccaaaggatttcattccagggaatttctgcttgaagatggattcaactgtagcaaaagttgtatacacaaagatgctcattaactacagctagcactgaaaaagaaaaaggaagaggagaagtgaggagggaaagggacggaagagggagaaggggaagcagaaacggacagcaggaaggaggaaaggaaggaagatgggagggaaggaaaaatgtcaaacaaaatgaacacatgtaggccagctgcagtggctcatgcctgcaatcccagcactttgggaggccacggcgggaggattgcttgaacccaggaatttgaggctgcagtgagctatgattgtgacactgcactccagcctgggtgatgaaatgagatcctgtctttaaaaataaataaataacacaygtaaaacacccaacagagtgctgagcatttggtgagtgctctacagacagtactattgccattaattcttcctctctactagcagtaagaccagagcaattgagcatctgtcctactggggggcttcagaaggagggtgagtgtcaggggtcttaatgaggagggtct

SEQ ID NO: 804809 - DNA, 605 bp, Homo sapiens
aggacagattcctcaaagcaggattgatggtgtgggcaaagatctgtggatatcgagttgtcctggatgtcaccaaatcgtttcccacaattggagcaatccacgctcaccaacaatgtgtaatatgtccatttctccacctcctcgccagcactgtatgttttcaatttttttttaatgctgccaaactgaaaagaaaataaaactaccatcagaatatacacaaatgtagctgggcatggtggtgtgcacctgtaatcccagctacttggaggctgaagtaggagaatcgcttgaaaccgggaggccgaggttgcagtgggctgagattgcaccactgcactccagtctaggtgacagagcaagactctgtcttaaaaaataataataatatacacaaatgacaaaaaaaggaaaaaaaaaacasgaaaagataaaaagaggctccattttgcaggtgatccctgaaacctctcttttctatgggctagtatctctagaagccccacaaggtcaatcagctcactgccttctcccacaactgtgatggaattgctagcaagaaaggctctcaggagacccctgcacctttcttccctctccat

SEQ ID NO: 804810 - DNA, 636 bp, Homo sapiens
ctagctgtgacaactaaaatttctcccgacattgccaaatgtcctctggaggaccaaattaccgtcagttgagaaccagtggcctatggaaaatttcagaaagcaagatgtgtctgaagaagggttagggaataaatactgcctggtttatttacccaacgtgagggcttttgcccagccctttagtctctctgagcctcaattcttttatctataaggtgagaaggataatttctcccctgcaaggtttttgctctaggatcaaacaggacaatggatgtgactgtgcacttgacatgaaaaggtgcttaaaagtcacatgattaactgtgatgctgttcaatgctgtgctggtataatggcatggttgggggrtattatgggatgtaattgtctccatgtccagaactcctgaaggcagtggttcttaaatgttaataggcttgtgactcacctggagtccttggtaagtgtgcgaacaccttgctcccacctacatcagtgggtcagaatgaggcctagaaatctgccttttaaaaatcatccctggagattctgctgcaagtggtcttttacgcgtgtaggagaaggcttcctcagagcttgaactagcagtacccactgctctctggcagg

SEQ ID NO: 804811 - DNA, 634 bp, Homo sapiens
gttgtagtgagccaatatcactcagttgcactctagcctgggggacaagagcgagactttgtctcaaaaaaaacaaaacaaaacaaaacaaaacaaaacaaaaacctcctctttcaggacaacgtttcttcaactgtggctacaaaccctgaccacccarggatgctgggggacctctgtcgtggacatcagaatcaccacagctgggccccaggaagcagcctttgaaaggaggcctccagatgctccccgtggacagcaggttttgagaagcacagattaaaacctagctcaccatcaacactggtgcagtttcccaggccctccccagagccacctaacgtcactgaggcaggatgtcactgtgatctacctgcacaactgccactcttcatggccctccttcaactttccatgtgtttctccttcatagctaagagggcacaaggggagtgaccctcccttgctaagatctctagagcttgtcacatcccacacctgagtacacaacacttctcttctcatcctgtttttgtctttttctctcacatactcccagacccttaattatgccctggccttgccagcctcctcaccaatgatgggggcactacagactaggaagcttggtgac

SEQ ID NO: 804812 - DNA, 599 bp, Homo sapiens
ctccttggattctaactcagtggcccatgaaggctgtgctccaggatggctctgcctcttgtgcgggctttggccttgggtaacttacactttccaatgtcagattctttatatgtaaaatgagtataaatgactttgcagcatttgttttgaggattatgtttaaaaaaaaaatgtgtgacagcatctaacagggtgcccagcacaaagtaagatgctagaaatactctattgtgaatccataatccaataagcacagtttacctcattattccctacatttgtctgcttatgcttaccaacactgaagytctttcaatggctcatttctgctttaaaagatctgcttgtagcttccacttggctcagcatgttggtgcgcagaggagcctgatgtcaggtgtgcgctggatgtcttagcatgttctctcccttttcaaacctttgtaaaatgtaaaataagatcagtgtcagttctgagtcatgcaggactaaacctgcttatttattccaaaactgttttagatgctaataagatttttttaatatgaccaggtatcacagcccacctccccaacctgagatagctcatttgcctt

SEQ ID NO: 804813 - DNA, 632 bp, Homo sapiens
attatgtatgatttcagaaaatatgtatgggttcaagttgacaagggttggacttgtgatggttaatagtaagtgtcaacttgactggattgaagaatgcaaagtattgttcctgggtgtgtctgccaggctgttgccaaaggagattaacatttgagctagtggactaggaaaggcagatccacccataatctaggcgggcaccatctaatcagctgccagcatggctaggataaaagcaggcagaggaatgtggaaggactagattagctaagtcttctggcctccatctttctcctgtgttggatgcatcataccytcgaacattgtaccctcgagcaaaagctgaagactccaagttcttcagcttttggactctgagacttacaccagtgatttaccagggcctctcaggcctttggccacagactgaaggctgcactatgagcttccctacttttgaggttttgggacttgaactggcttcctggctccttgtcttgcagagggcctactgtgggagttcatctcatgatcatgtgagtcaattctcctaataaacttcccttcatatatacatctgtcctgttagttctgtccctttaaagaaccgtgactaatacaccaaccat

SEQ ID NO: 804814 - DNA, 628 bp, Homo sapiens
agaggagtgaaaagcacacatttatcaattaagttgacagtcttatatgggcacggttcatggcatcccaaaacaattacaatagtaacatcgatgatcactaatcacagatcaccgtaacagatacaatactaatgaaaaagtttaaaatactgtgagaattatcaaaatctgaaaaagaaatacaagtgggcctattttccaaatatgctgttggaaaaaaagcaccaatagatttgctagatgaaagattgccacaaaccttcaatttgtaaaaaagtatatctatgaaacgcaataaagcaaagcacaataaaacgaggtaagcctgtataccaacagttctccaagggtggtccaaagaccagcagcatgtkcatcacctgagaatacattaaaaatgcaaattattaggcccgaccccaactttggagctggggcccagcaatctgtgttttcacaagtcctcctggcaggtgattctgatgcactgtaatggctgtgaatcactgatctacatgaccaagtcaacaacccctgaagtcaagggagcaagtgttgttaatcaccacgtgccagattccaatctgttcagagacaggctcaaagagagctggctatgggcatg

SEQ ID NO: 804815 - DNA, 527 bp, Homo sapiens
aaaagtgatcattttgagttccttgaaaatagtagctaatggaggaacagcagagggaatgtgcctggttactcagcagcagcagctgatacacacattaggctcgccacacacacaccaggctcactacacctacaccaggcttgctacacgcccagcactgttctaggagctctgcacagtgcattcatgcagccttcgcaacaatctcatgcagtagatactactgctgtctctatttaataaaagcagaatctgatggcgagtgcggtagctcacgcctgtaatcccakcactttggtaggccaaggtgggctgattgcttgagctcaggaattcaagatcagcctgagcaacgtagcaaaaccccatctctacccagaaatacaaaaattagctgaatgtggcagcacgcacctacagtcccagctacttgggagaaggatcacttgaacccaggaagtcaaggctgcagtaagccatgatgacgccactgcactccagcctggacaacagagtgataccct

SEQ ID NO: 804816 - DNA, 527 bp, Homo sapiens
aaaagtgatcattttgagttccttgaaaatagtagctaatggaggaacagcagagggaatgtgcctggttactcagcagcagcagctgatacacacattaggctcgccacacacacaccaggctcactacacctacaccaggcttgctacacgcccagcactgttctaggagctctgcacagtgcattcatgcagccttcgcaacaatctcatgcagtagatactactgctgtctctatttaataaaagcagaatctgatggcgagtgcggtagctcacgcctgtaatcccagcactttggtaggccaaggtgggctgattgcttgagctcaggaattcaagatcagcctgagcaacrtagcaaaaccccatctctacccagaaatacaaaaattagctgaatgtggcagcacgcacctacagtcccagctacttgggagaaggatcacttgaacccaggaagtcaaggctgcagtaagccatgatgacgccactgcactccagcctggacaacagagtgataccct

SEQ ID NO: 804817 - DNA, 675 bp, Homo sapiens
ctgaacttttgattgtattatattaaaaaaaagttctccaacttagtccttttccaaaattgtgttggataatttaggccctttgcattttcatataaatgttagggtgagcttgtcaatttatctaaagcaaatctgctggcattttgactgggattgcattgaatctaaacactacgttgtggagaattgacatcttgataatatccagtctttcaatccatgaacaagatgtgtctatgtatttagccctttaattcctctcagttctgtaatttccagttcatgggtcttgtctttcttttattgaatttttccctgggtgtcacattttttccatgctgttattaaacggtatcgtgttaaaatgttcaatttctggtagtcacttgtatacagaaatacaataggtgtttgtatattgaccttrctaaactcatttattagttccagtagtatttttgttgattccttaggattttctacatagacaattatgtcatctgcaaataaagagagtttcgtgtcttcctttccaatgtgtatgccttttacttattttgctcaccttatctcactgactaggagcaatgttgaatacaaactgtgagagtggatgtcctagcctcattcctgatcggaaggggaaagcagcctttaccataagcatgatgg

SEQ ID NO: 804818 - DNA, 563 bp, Homo sapiens
aggctggccccagggcaaagaggccagggcaacgggcctgtttcccccacggtggtgcccacagtggcttctccagcccagcggctaggcttcacagactcggggccggaggctcaggctctctggtcatctgcctgctggtgtcacttggggtggctccaactgggccctgaggccgcgtgaggtgattccgagacctccagcatctccccagagaggcagctgctccagacctcccgggaaagctgaatttggaaagtagggaatgtggagactgaagactttaattttagactggaattaaagtgtgaccggtgacacttatggaatcgagtttagcaatcatttccttggtcaaagtttaacccgcgttgaggcaggcrcagacgcgagggaggtgcagcctcctctgcttgggggccagggccggcctgctctgtgccaggtcttggggaggcctaagtttttctcctggcggctgtgggatgccagggctgcctgctcccttcggtgcccctgtgtgcccacctcccagagtggctgagcacaagagaaggtgggcc

SEQ ID NO: 804819 - DNA, 465 bp, Homo sapiens
gtctatgaacaaggaaaagggcccttgccagacaccagttctgctggtaccttgatcttgaacctcccggcctttagaaactgtgagaaataaatttctgttgtttataagccattcagtttatggtattttgttatagcakcccaaacagactaagataccatgaattacatgagcaatcagaacaggacaaagtcagcactgactcttgcaaaggaaaccaagacaattcaacagcctgggataacagaatttgaagatgagtaacaataagaatcgtgttatttatggagcgttcactatgtgccatctaccgtacaagaagttttacagaacagaacactaaaagggcctccgtctctgggtgagcctgcacctataccttcccaactctcctctggcaaggctgcacctattatctttctagctctcctctgatgggaagcattataaccttcttggtaa

SEQ ID NO: 804820 - DNA, 465 bp, Homo sapiens
gtctatgaacaaggaaaagggcccttgccagacaccagttctgctggtaccttgatcttgaacctcccggcctttagaaactgtgagaaataaatttctgttgtttataagccattcagtttatggtattttgttatagcagcccaaacagactaagataccatgaattacatgagcaatcagaacaggacaaagtcagcactgactcttgcaaaggaaaccaagacaattcaacagcctgggataacagaatttgaagatgagtaacaataagaatcgtgttatttatggagcgttcactatgtgccmtctaccgtacaagaagttttacagaacagaacactaaaagggcctccgtctctgggtgagcctgcacctataccttcccaactctcctctggcaaggctgcacctattatctttctagctctcctctgatgggaagcattataaccttcttggtaa

SEQ ID NO: 804821 - DNA, 550 bp, Homo sapiens
agagaatagcctcagatagcactggttttattttccactactattccaggtctgatatttgatttagagatatctctttctattatcctgccttcatcccaaagaagagaagaaaaaagaacccaaaccaggtctcttgtgtcaagccatctctgaatgattcagagccttaatagggggcctagaaatagccagtaaaatggccaaaaaaccccactccacaaccacattttgaccccaagacattcaagagcttcccttatgccagacaggggagaagaaaggatgtggagatcagggcttgtcagtagctgggactgcacatccactccatgttcaagggaacctggtctgaaatagccrcagataggggaatgaagcaatgactaaaaaggagacagtttaatactagggcttaagatggcacttcaaggttagtagaaggtcatttcccatcaaaacagcagaatcaaatctcatgagtaaggagaaggctttagagaccatgtctaatccaattagccaaatccccttcatttcttttctaaga

SEQ ID NO: 804822 - DNA, 565 bp, Homo sapiens
ttccagcctatttatctattggctgtacctctatagacaatccaagggcaattatgctccaaccttaagataccaaatacagttcaaaggaaaagagaaagaaaaggaagatcaagttaaagcttctatcatcctaagtacaccttcagtaaattagaagtattgacttattttattaccctgagagcagggttttcaacgttggtactactgatattttggactgcgaaatctttgtcataggggctttcctgtgcattataaaacattccacaacatccttgcccctcctcccctcaaactagatgctagttttgccaaccaaacatgtctccaaacattgcggcatgtcccctgaggacaaaattgctccagttgagaattactgccttagacycagggacttttggatataattgtatcaggctactttcacagtcattttaaacctcatggttgtagcgcaatgtttttcgacctgtgggctgggacatcattagaggtcatatcatctgttttgttgtttgtgataacataaaaaggcatctcatgtttggagacactt

SEQ ID NO: 804823 - DNA, 493 bp, Homo sapiens
ctgttattgcccagcctactgcctggagagagtttcagggcatggcacaaggagggggaaccccagcagagcccagaacactctctgaataaaggagatgggagtccaaggagattaaggcagttagaattcagtagaacagaataccagaagagagagttgcacaggaaacaaaaaacccagatatctkcagaagatttctctaaattattcaactgagtatggtcaacacatgtatgtgaggaaggcatgtaagaccaaaaacaaaacaacagaatagatcagtaagaaaagaacatgtggttcacataagactgggactaatgcctgtttctacccagaatagtgaaacatttcataattcacagtgcactgagtagagtactcagaaaggttttacctaagtggtggttaaaaaaaaaaaaagtctcagattaaacgtttctttggtcctgcttaacagagcttaaaagtaagacctgaggagatcaaa

SEQ ID NO: 804824 - DNA, 643 bp, Homo sapiens
cacacttacttcccttggatgtgtggcaacgagctctgctgctgcaagtgttatatgccatccgcaaacccacatgggtgcagggtgcacacctgaacagggggtagcctctgatgaaacatttgagtaatggatttctttacctcaccyaaacagatccactgaaaaggaaactttttgggttcccacccacacgcaagatgtacaaagctgtctggggcaggtctggtacagactagccagtgccctccactggaataagtggttaatctcaaagaggtttacggtggtttctccacatatcttcacccttcaagcctttccataaaagtcaccagcaccctgtctctgggatgtggaaggttgggagaaaggaatcaacaaaatgaaagtaacagtatcaagatccagacttattcacaaattttgcctcttaaataaacataatctttaattaagtaaactttaatatttattttgtacctatcatgcactaggtatatacatatagttggggggggggcataaggacataataggactaaaaaagataaaagatatgttcgttgcccttgaagaattatagtctcttactgaggacttcatatacatgcacattgactagagaggcagtgtaaataac

SEQ ID NO: 804825 - DNA, 566 bp, Homo sapiens
gcctttgcaaataatttatgactacgttttcaaaagcaattgcaacaaaaacaaaaattaataaatgggacctaattaagtgaaagactttttgcacagtaaaagaaactatcaacacagtaaactgacaacctaagagggagaaaatatttgcaaactatgtatctgacaaaggtctaatatccagactctataaggaactagaataaatcaacaagcctaaaataaatagycccattaaaaagtggacaaaggacatgaacagacacttctcaaaagaagacacacaagcagccaacaaacatatgaaaaaatgtttattatcactaaccatcagagaaatgcaaatcaaaaccacaatgagatatcatctcataccagtcagaatggctattattaaaaagacaaaaaaataaaatgctggaaaattcgcagagaaaatggaaccctcatacactattatggaaatataaattatttctgccactttggaaaacagtttggagatttctcaaagaacttaaaacagaactaccatttgactcagcaatcccattactagatat

SEQ ID NO: 804826 - DNA, 566 bp, Homo sapiens
gcctttgcaaataatttatgactacgttttcaaaagcaattgcaacaaaaacaaaaattaataaatgggacctaattaagtgaaagactttttgcacagtaaaagaaactatcaacacagtaaactgacaacctaagagggagaaaatatttgcaaactatgtatctgacaaaggtctaatatccagactctataaggaactagaataaatcaacaagcctaaaataaatagtyccattaaaaagtggacaaaggacatgaacagacacttctcaaaagaagacacacaagcagccaacaaacatatgaaaaaatgtttattatcactaaccatcagagaaatgcaaatcaaaaccacaatgagatatcatctcataccagtcagaatggctattattaaaaagacaaaaaaataaaatgctggaaaattcgcagagaaaatggaaccctcatacactattatggaaatataaattatttctgccactttggaaaacagtttggagatttctcaaagaacttaaaacagaactaccatttgactcagcaatcccattactagatat

SEQ ID NO: 804827 - DNA, 473 bp, Homo sapiens
actttattttaatctgtttctcatactatttagccttttttttcttagcctgtcttttttaataagccggcagaaagcttggagacttccaagaatgaggagttctggttgactcagttcttcaagttctgaacctcacactttgatgtccattttttccttcttaggcagaattggaaaaaaaaaaaaacacatggaggatttttgtatggctgttggcaagagcactcatgaataaccrcattaaaacagcgataaaagaccctcaatatttttttctttaaaaaaaaatccaaaagccatcatttaaacatggagtttttttgaacaatagtcagctctctaataagctgaaaatgcacctctgtagctaaaggaagggtttgtttgtttctttcctctttttttttaacctcttattgtactcccctgaattcccagctgcacagaaatgtgtctgaaatatccagtca

SEQ ID NO: 804828 - DNA, 585 bp, Homo sapiens
tcaagagtttttaagagactcttctttgttttgaaagagatatccaaaccgagtatccatacttctattaatagttgtgtttgggcccgctgagaagagggtggatggatattggatagtgagagcaaaaacactgccatgaagcacagctaccacatagagcccagccaagagcagctgccagctttgtttccaagataacagatttattgtatccccaaaccttttggtttagaggtctcacaggaataaaatattactcatttaaatatcctgagaacacagattgctctggtctcagtgtgatggagtaagatgcacatggattttttttccatctaccttgtgatgttgcagcagtgacttacaccccctgagcctcagtcttytcatgcggcaggtgacttccatgacttccaccccgagcctgttttctcatgcataatatgagatcctattattaacttcttagggagggtgtgaagattagatgagattttttaaagtatatataaagttgctgattaagtacctggcttatcatagctttcctagattcttcctttcatactggctttatttgga

SEQ ID NO: 804829 - DNA, 574 bp, Homo sapiens
ctggtgggaggtgattggatcatgggggtggatccttcatgaatggtttagcgctgtgcccttggtgctgtctcgtgacagttcgtgagttctcatgagacctggttgtttaacagtgtagcacctcccccaacctctcttcctcctgctccggccctgtgagatgcctcctcccctctttgccttccgccatgattggaagcttcctgaggcctccccagaagcagaagccgctatgtttcctgtacagcctgcaggtatatttgggggcaagaaaagaatttcaggayaggtaatattaagtattaaaaatggagtgatttaaagaaagagtgagtttaatagaatatgcctcatccttattattttcaatagtggaaaagtgctgctgtctatgggtgtcctgtgtctttggtaaacacatgtctatttagcagataccttgatggaccagcatgagcaggaaagagtgacctgaaattggtgagtcagttaaaatcatggcagcataaaaaggaatggtgtcatgacgaggaacgtgtggatggcagatgggaagtaacccacctgttgg

SEQ ID NO: 804830 - DNA, 725 bp, Homo sapiens
gaaagtgctgggttaagtttgcaatctaggttcttattgattgggaaaatttgttttgttaaatccataattttttatttattagttgtaagtaagtatatatatttaggacggtgttgattatttaatatctcaaagaatgctaattatctaataaattccaaagattaatarttggcacattgcctaaattacagttactagtgtgcattccttttcctgcacaaattccccttagacactaagaaatccatcacttttccaaagtggaaaaccagcactttccaatacatagtaaactaaattcagaagtgttatgaaaataaatactcatctttacaccatctacaatcatcttttgtaccatacttggggaaataccccatgggtagaagtttccagaacctggactataaggaactttgacctacacctttaagtttctaggctagaagtacctctctctggaacctccagaactggatgccagaattagagcctaagtcagaggtacagaattaccccccaaatctcacagcttaaaataacaaatattagtgaccttacacagttttggagagccgggagtcagtatggtttgggtgggaggctctggtgcagtgtctctcatgggcttgcagtcaaggtgtaggctgtggggctcaggtcattggattgcctggggctggaggatccatttcccactcagtctatgactgctgggt

SEQ ID NO: 804831 - DNA, 725 bp, Homo sapiens
gaaagtgctgggttaagtttgcaatctaggttcttattgattgggaaaatttgttttgttaaatccataattttttatttattagttgtaagtaagtatatatatttaggacggtgttgattatttaatatctcaaagaatgctaattatctaataaattccaaagattaatagttggyacattgcctaaattacagttactagtgtgcattccttttcctgcacaaattccccttagacactaagaaatccatcacttttccaaagtggaaaaccagcactttccaatacatagtaaactaaattcagaagtgttatgaaaataaatactcatctttacaccatctacaatcatcttttgtaccatacttggggaaataccccatgggtagaagtttccagaacctggactataaggaactttgacctacacctttaagtttctaggctagaagtacctctctctggaacctccagaactggatgccagaattagagcctaagtcagaggtacagaattaccccccaaatctcacagcttaaaataacaaatattagtgaccttacacagttttggagagccgggagtcagtatggtttgggtgggaggctctggtgcagtgtctctcatgggcttgcagtcaaggtgtaggctgtggggctcaggtcattggattgcctggggctggaggatccatttcccactcagtctatgactgctgggt

SEQ ID NO: 804832 - DNA, 472 bp, Homo sapiens
aatccatcacttttccaaagtggaaaaccagcactttccaatacatagtaaactaaattcagaagtgttatgaaaataaatrctcatctttacaccatctacaatcatcttttgtaccatacttggggaaataccccatgggtagaagtttccagaacctggactataaggaactttgacctacacctttaagtttctaggctagaagtacctctctctggaacctccagaactggatgccagaattagagcctaagtcagaggtacagaattaccccccaaatctcacagcttaaaataacaaatattagtgaccttacacagttttggagagccgggagtcagtatggtttgggtgggaggctctggtgcagtgtctctcatgggcttgcagtcaaggtgtaggctgtggggctcaggtcattggattgcctggggctggaggatccatttcccactcagtctatgactg

SEQ ID NO: 804833 - DNA, 588 bp, Homo sapiens
gacaggaatctgacgagggggtacaacagatcttcgagacaggcctgcttagattgcaaggttctaattcggtcggttgcctgccttttgaaaacctgcccagggaaagcctgagtatccaggaaggtgaacctgacctcccttcagaggagctgacgaaagcccagtgtgtgtggagtagccgtgattcagttctagggtgcatctttcattcttgaagttcaaatggcattgccrgtgcttgtggcacccttctgtgcagtagttgcatgtaggcactggctctcctaagatacacaaaagccataacaatctacacatgtccagtgcaccagctcacctcccccaaacccccaacggtggaaaacatatacagggagccactggttttaagcagcaaaatgtgtcctaggaaattggttcttaaagcagatcaccatgaggaaacattctgactgccagtgagtctgttcctggggttgctgttatctgcttggacatcatctgtaaaaacagcaggaagaaaaatgtggctgtccattacatagcccatgacaataataactgacatctatccatcgcttccta

SEQ ID NO: 804834 - DNA, 588 bp, Homo sapiens
gacaggaatctgacgagggggtacaacagatcttcgagacaggcctgcttagattgcaaggttctaattcggtcggttgcctgccttttgaaaacctgcccagggaaagcctgagtatccaggaaggtgaacctgacctcccttcagaggagctgacgaaagcccagtgtgtgtggagtagccgtgattcagttctagggtgcatctttcattcttgaagttcaaatggcattgccagtgcttgtggcacccttctgtgcagtagttgcatgtaggcactggctctcctaagatacacaaaagccataacaatctacacatgtccagtgcaccagctcacctcccccaaacccccaacrgtggaaaacatatacagggagccactggttttaagcagcaaaatgtgtcctaggaaattggttcttaaagcagatcaccatgaggaaacattctgactgccagtgagtctgttcctggggttgctgttatctgcttggacatcatctgtaaaaacagcaggaagaaaaatgtggctgtccattacatagcccatgacaataataactgacatctatccatcgcttccta

SEQ ID NO: 804835 - DNA, 650 bp, Homo sapiens
tgttatgtagcagaatagaagctacatgtttgaataaatcccctgattatataaaggtcttgttctagatggaatcaactagcgatttttaatgatagtatttgtattgagttaatttattaataacctgaaagtgtttttatttgtatttgccctgtatcatacagggttttactttttatattagtccattctcatgctgctgtgaagaaatacccaaggctaggcacagtggctcactcctgtaatcccagcaggtgaatcccaaggcaggtgaatcacttgagrtaaggagttcgagaccagcctggccaacagggtgaaaccccatctgtactaaaaatacaaaaagtcagctgggcgtggtggtgcatgcctgtaattccagctactcgggaggctgaggtacaagaatcatttgaacccaggaagcagaggttgcagtgagctgagatcgtgccactgcactctagcctgggtcacagggtgagactctgtctcaaattaaaaaagaaaaaagaaatacccaaaaccaggtagtttataaaggaaagaggtttaattgatgcacagctccacagggctggggaagcctcaggaaactaacagtcacggcagaaggggaagcaaacacgtccttcttcacctcg

SEQ ID NO: 804836 - DNA, 631 bp, Homo sapiens
aaaagacatggacttgacaaactatgtaactaattactggattccaaacataaatgatgaacacatagctcccactctcagggagtccacagcctggtggcagagacagacacagaaacaacagaggatgccaggcactgtccacttagtggtcagaatactatgcagcacacaggcaggcagagtggggcacagacatctcgtggcgtctgcgagcagtgtctcctactgcagcagtgctaagcaacagtttacctcatgggggagagttggacccayaaaaaggaataaatacattctacctagcgacagactaatctgaaaatattgtaaatggtggaaatggccaagacggctgaacaccacaggtgagatggagaccggggaggaaggaagagcttctgtttgggagagaacttgaaagccaccctggagcacatctgaggacacgagtccctaatgccatgttctctggccccaaagcgttcccaaatggtgctctcattcatctgctcacccttcatctcttcctctttccctctctcttccttcccagtgggtgccaggaagtatgtgagtaccgtggcaaaaacaagaaatagctttactgaatcctgttcacttccatcct

SEQ ID NO: 804837 - DNA, 556 bp, Homo sapiens
tcctaatggttcccagctgctacgtgagaatgaatggaaataatgatgcacagcttgccttaatgcaaagagctcagagttctcagcaaacattaactcattaatcctgtggacactgggttaggtaggtcagtaatagccccattttaaggacaggaaactgaaactcagaagttaaatgatactccccatatcacaacactcattagcaaaagaactaggattatagcttagacattcccagtgcctgtgaaactgaatgttaccaacccgtaatgccttggatggtttctaagtcgagcccagcctcattaatgttgcgtagcaacgctgagacacgcgctagattgatgaaaccccttctcccagkgcccgcactatccatcccccacactaaactgctctccgtcatccatgactgcatcaaggcactgacaggcccgctgtagtcgcctaacataattaatactatttataaagatacataaattttaaaaagcaacacaacaatgcagattaggccaagagaacatctcgctcctcgtgtctcatttct

SEQ ID NO: 804838 - DNA, 588 bp, Homo sapiens
gacttctggttcaaaactcagccctatagctcactagctgtgtgaccttagacagcttgtttgacttcccagtgcctcagtctccatcagtaaaatgggggtgagcaataggacctatttcataggatggtgttttctaaatttaatgcaatagtacatgtaaactacttcaaacaggacctgggaaacagtaagtgtktaagggacattaggtattattctgtttatgatggaatgccaatttgtacttatattatctttctttacttcaaaaaactcgaaaatgccactgtgagcttaagggaccttgacttctcagcagctctagttaatgtagaaaacatagtgtatagaaattcaaatgtgaaaagcaggggtacaagtcatcaaggtttgaaaatgatcatttttatagatgtaggggtacaagtgcagttgtgttacgtggatatattgcttagtggtgaagtgtgggcttctagggcacccatcacctgaatattatacattgttgaaacgatgatttttgatatctctcacttcccatgaactagagaactcatcttatacaataaagcccatccttga

SEQ ID NO: 804839 - DNA, 625 bp, Homo sapiens
cttgcaagtgagcttgcaagtggatcctccagcccgatgtcaagaattcagagagtatggcctcagccaacagcctgagaaaccctggcccagaccatccagccgggtcatcgcagattcccaaccctcagacagcatataagaaaataaatatttgctcctttaagcagctaattttgcagtaatttgttatacagcaatagataaccaacacagacctcagccagtctagtattgtctactggggcactatctttcttccttggtctgatatccctagtctgtttctaatttttttggtttttttttttttttggktttttggagggcctcacggcagccttaaaccccgggggggacccaagcaactcctcctgcgcttagcctcccacacagcttgaacgacagatgctgtgccacaatagcgggcaaatttaaaaaattttgctattgaaatggggtctcaacatcttgaccaggctggtctcaaactgctggtctgaagccatcctcctgccttggcctcccaaagctctgggattacaggcacaagccaccatgcccagtttgtttctggtcttttttgaggtgtgattttctttctcttttaagaccctgcctcacc

SEQ ID NO: 804840 - DNA, 620 bp, Homo sapiens
attccactatataaatatgctgcagttttcttatgcagtcacctgttgatagacacgtgggttgtgtcctttttgggcttttgcaaataaagtggttatgaacatttgtgtacaggtctttgcatggatctctgctttcttttctcttgggtgaacacctaggaatggaatgattggatcgaatggtaggtatacgtacatctcttttttttttttttttttgagaaagagtcttgctctgttgcccaggctggagtgcagtggagctattgcagctcactgcaagctccgcctcctggattcacaccattctcctgcctcagcctcccgagtagctgggactacaggcgcccaccaccacgcccagctaattttttgtattttttagtagagacagggtttcaccatgttagccaggatagtctcgatctcctgacctcgtratccgtccgcctcggcctcccaaagtgctgggattacaggcgtgagccactgcacctggccgtatgtacacctttttaagaaactgcaaactgttttctgaagcagctatatcattttgtattcctaccacaagtgcaagagatttctagttctttcacatcctcatccatatgttc

SEQ ID NO: 804841 - DNA, 597 bp, Homo sapiens
atctatcaatatttctccctacccctcaaagaacagaaccaagccctaacctgaaaatcatttcaagaaataaaagtttcccagctaagaaggattcctcatttttttcctcttccttttaagatgatcatgtacaggcattgaaaagttttagtagtagtttgrtgacttcacttcccataacttcttgttccactagcttttcattcagaaggcctgggtgagaaagaaatacttttctaatttaaaaatctgcataaagaattatcaatgggttcctcaagagcctgacacatggtgtacttggaaatacaaaccatatcttccctgttcagcttttctaatcgttatagacatcaagctagggtgaagaatggaacttcatttttttttttaacgtggttccctaggtttccttggttgatacaacaacctttattccagtccattttctctgaattccacccttaatgccattttgttccttctgcaatgtatcatcaaaatgatgatgttttaatgatgtaccttctttagggcccctaagattacagatcagtgggatatacttaaaagagcattcttttttttttcttt

SEQ ID NO: 804842 - DNA, 546 bp, Homo sapiens
tccaaagaagggatcagactgtcctaaagccctcaggaatctgggctgggaccagcctacttaaagataggatgggcagctgggtgtggtggctcacgcctgtaatcccagcacttcgggaggccgaagtgggcggatcacctgaggtcaggagttcgaggccagcctgaccaacatggagaaacactgtctctactaaaaatacaaaattagctgggtgtagtggcgcatgcctgtaatcccagctactcgggaggctgaggcaggggaatcgcttgaacctgggaggtrgagggtgccgtgagccacgatcgcgccattgcactccagcctgggcaacaagagcgaaactctcaaaaaacaaaaaaaaggatggttccatatgggtggtgtcaagtgcccacctcctagcaagtcagcaggggccagaggcccttgtaagtggtgtctcggggggatcaactgagatggcttaggatttacctggatgcctgctctgctctccccatctcttccagggatccacaaatgctaaagagctgtctt

SEQ ID NO: 804843 - DNA, 606 bp, Homo sapiens; identical to SEQ ID NO: 790783

SEQ ID NO: 804844 - DNA, 410 bp, Homo sapiens
tgataatcatgacaattttaccttcagtgaagtgcaccgtgagcccatccgtggtttatacttgattttagtccccaagtttctctgcagcagttgtgaggggcaccctgatgaatatgttgctagtaacggtttaagcaccaaaatttttgtagatgatttactgtttgggcaggggggtgggttttgagacggagtcttrctctgttgcccaagctggagtgcagtgggggtatcacagctcactgtagcctcaacccactaggcttaagtaagcctcccacctcagcctcccaaggactacaggcactcgccaccacatctggctaaattttttttaattttttgtaaagacagggtttcactatgttgccgaatctggtctcaaactccggaactcaagcaatcct

SEQ ID NO: 804845 - DNA, 410 bp, Homo sapiens
tgataatcatgacaattttaccttcagtgaagtgcaccgtgagcccatccgtggtttatacttgattttagtccccaagtttctctgcagcagttgtgaggggcaccctgatgaatatgttgctagtaacggtttaagcaccaaaatttttgtagatgatttactgtttgggcaggggggtgggttttgagacggagtcttactctgttgcccaagctggagtgcagtggggrtatcacagctcactgtagcctcaacccactaggcttaagtaagcctcccacctcagcctcccaaggactacaggcactcgccaccacatctggctaaattttttttaattttttgtaaagacagggtttcactatgttgccgaatctggtctcaaactccggaactcaagcaatcct

SEQ ID NO: 804846 - DNA, 537 bp, Homo sapiens
cccaccgtcctgtgtcacagacatggatcctctgtcacactctgtaacagcagcatcaatgacttaattttaaaagtgaccttcaaattccatcttcatttccctgaaattagatttgattccagtccaggcagccatctctaagcaccgacagatcctgctggtttgaatagaaccggaagggcatattgtgtccatcagacaatgaaacttctaactacattagaaaatctcacataccacttagaaaacaaataacatcacagttagtgacctatgttttaacaggaagaagaaagttaaaaaaaaaatccgccatagagtttccgcgggtcacttttcaggtgcagacgcagcctgtgattctatcctttcctttctctctccgwgattcacttttcctcctcttcacaatgcagtgataaggagcgaagctgggagacctgttcttcagagatgagcccaaccaggaagtgagaaacaaggttgtggatgatgacacaagtctccctagcaacaactctgcagaggcgcgca

SEQ ID NO: 804847 - DNA, 529 bp, Homo sapiens
agagcttccctcccaacagagaaaaaacagtgggcaggaatcctgctgtgaggagctacaagcatcccaccgcctgctgccatcacggcccacggccaaaccctggggtcccctgaagtccaccagaagcatccttggcatttcccttcacacaaagtcaagagcagccactgtcccaggcccactgaaaaagcctctcgtctcctctctaccagtaaataaaaattccataattatgccgtaaaaagccccaactttgactcagaatataactgttgcagttctatgctcactaccaccttttccstgaatggaaatgcagggattagccatggcaaaaagagacagaggggaaaaaaagactctttttttcctctcaggttctaaaaaggccagatgtctcctcccttagtctctaagccacccaagaaaaattaaagtgatatcacaaacagagaaaagaaaaaaaaagtatgttgtcttgaaaaacaaaggtgcctggtgacagcagcacagacatcagaggtgg

SEQ ID NO: 804848 - DNA, 646 bp, Homo sapiens
aacattagtcattatcatcatgatcattatgtttaatttatagaggaaaaagaaaggcatatattagatgacttacccaaaaccactttgaagaccaaaaactcacagccattttcttaatatttgtttaatcctttcagataactcttttttgcagattcactcgcaacaaaatcttagtgawtgggaactccattccctagtccccttaattaacatctagaatcttcaactaatcaaaatgttgacattatttgtgtgtgtactctcacatatagtatatggtttctaactcttgttttatctgtaaaataagaggaaaaaactccgtagtctacacagtgttgttacgtgttcattccaatacctttctatccacagccccattctacaggcacggtagtgccttaaggcacttctaagaacctgaatcgtcaaagaaagatcataaggtcaaactgcacttggcatacaatggcagaagtttcaacaactgaatattgtgattaaccaacacttccaattacacaagtaatccaattaagtggggggggcttaaaaacttagcattatatataataagcacatttattattataaataataggtgtactcacacgggaatggttattattagtgcggtcct

SEQ ID NO: 804849 - DNA, 669 bp, Homo sapiens
  misc_feature 1, 2, 3, 4, 5, 6, 7, 8, 9, 10, 11, 12, 13, 14, 15, 16, 17,18, 19, 20, 21, 22, 23, 24, 25, 26, 27, 28, 29, 30: n = A,T,C or G
nnnnnnnnnnnnnnnnnnnnnnnnnnnnnnaagagaaaatgactgaatcaagcatgcttgcttccacttccataactcatgtgacttcaccagggagggcagaatgagggagggggagggaatgcccaggagtaccactctagtggagatgccttgcctcaatggaacttgaggcctcaggaaaggaagccctggcttaataaccatgaccatgaataataacaacactaggcagagttttcatgtttagagtttgccccattctagctcaggcaagaatcaggggacttggctaaacagggctgagtgaggttgcctttaatttgaacatggcactctcctcttttgtctagaatctcttttcacaattttcatttagttgagtaatacccttaggtatatttgtctcactgrcattcattgcatgtaaaatctgtaagaacgatcagaagctgtctttccatctcaaagccagaattctacttagagggaaaatctgggagttcagatacggaaaattctgtcttctcaacaccaagactttccatcaaaaactagtttagtcttttgaatgttttgtccacatgatggtaaatatctgaatatttaacagatatctgaagttaccatcctgcaggtctcagtttatccaggtagattttcgtcatg

SEQ ID NO: 804850 - DNA, 591 bp, Homo sapiens
tgatctccaaggacctcagttttctcaccagggaattgatctacaatgacacttgccactttggaatgtgcatcatacacgagagcacgcactgtgatgacaccttgtagaataaacaatcatttcccaccttcagccactgtctgctgcagaggtggttgtttggcctgattcatgtctgctgctacttcttcttttggctaactttccacytttatttttcagggctgggagagggttctgccctccttcatccagacagcaggtctcatcctaggtccttagagaaaagtgcctggagggcttttaaggagtcacagtgccatcacatgctcaaacatctccacaatggtgcaaggatcacagtgcagatgccacctacaatcgagggccactgggtctccacagggtaagaggacaggtggggtctgggagaggccagagagcacaccactatggaagacccttcttatgggttctcagatgcagagactttatatcatttacaatgatttaggtgttgtccaagttctaatgaagaaccaaaccactctttgaaattatggttggttaagaaaaagagctaagtac

SEQ ID NO: 804851 - DNA, 556 bp, Homo sapiens
atgtactcactttcgtctgtcaaattcacagaaacctcagcaagtttggcatagtaaagcatatgaaagtgcactcaatcacacatgatcagaagaatgcatattcaaaccagagtttctcacttctacacccaccaaaatagacacgttatcagagagaaaaatgcagagggttggtgagrttgtggaggaactggagctatcacatgtgactctgggaacatacttaatttcatccactttgataaatgactttctagggtgtactagagtaatcggtacctgtgaccctacagtcccactcctgctacctatgtccaaaatacatgtatgaggcaaggatgctggtgtccccctggggggctttatagcagcgtcacttcatgtaactgtagcaggacaagccgcagacaaaacccctcagacaccgaattaaagcaggaacggctttattcagctgggagcttcggcaagactcacgtctccaacaactgagctccccgagtgagcaattcctgtcccttttaagggctcacaactctaaaagtgtctgcgt

SEQ ID NO: 804852 - DNA, 546 bp, Homo sapiens
tttatgtcgtagcttatttaaaaatttcaattagaatcttttatcatgttattccaggattgttccataattataaaatgaaatgattatgtaataagtgtctggtggtagatttacaaatgtatcatacaggaaaggtgagtagttgaatgactcttaccatagattatttattttactggtttaagttaaaattgctcagaaacaatcttatttttctcttgattttaatctactttgtcacagctaaattatattacattgagctttacctactttttttttcccaagtctaaattttggcagtagcaaaaaaaaaaaaaaaaagggaaaaatgatgaatggtgcatactgtgattagttkgaaaatatctcttccatttggctttcatgcttttatcatttttgcctgttgtctttgagggaaacctgatgcagtgagtggctctgaagcatgaattttcttaaacttgaagtgttagctttttgtgtgtgtgtgtgtggtgtgtgtgtgtgtaggtttattgaagggtactttggattgaa

SEQ ID NO: 804853 - DNA, 544 bp, Homo sapiens
gtcagatttcctctttaccacccaggcctggatcccttcctctgcactaaagcaagggtccctggggcaaagatatccagccaggccaacaaactgtgagttgtactgtgcactaacagccctgagtcaacaatacctctagactttgttcatatcaagggctgggagggggagaaaggatgaaatgcaagcccagactcactcaagacccaaactaccaaccaattttcaaaggaaaaacaaaggcttagacaacactttatattggaagcaatctaagtatccaatactagcagaatgattaaataaacaawaataaatccattcaattgttcctcagctatcaaaatttttcaaatataataacattaaaatacctattaaataataatcaagagaaaaagacataaaaccattaaaaatatattaatactgtctaaaagacaaaaatagaataaaaaacagtaaaggcaaaccaaaaatgttggtaaaaggctgttttggtaaataatgataaattaaaagtgattttaaaattttaact

SEQ ID NO: 804854 - DNA, 588 bp, Homo sapiens
cctgggacaaggacagtggtggtacaaggaacgaatagattaaagatacatttttttcgagagcacagttgacaagccttgctgaaagacctgttgagggggataaaggagcacagggcatccaaagacttcccaatgttttctacatttccagactgggtgggaagtgatagagctaactgaaataggaattacaggagatatgataagtctcttttctgtttggtgtttttttttttttagagataatgagatttgaatttkggcattatgtttgatttgtagatacctattggaccatggaaataagaacaatgcttaggagacaagcaatggaaattatcactgggtaagtgctaattaaaaccttagaggataatgaactcattgagcatttatttctgcaatgagacaagaagaagactgaaggttgacttggagagggaatactagtataattaagaggcaagtcaagatgagcctgtgaaagaaggacaagatcaacttgtcaaattctccatggaagccggaagccaggcttcaactcaagcctgaagccacgtgtcaaacaatggtgactttaggggg

SEQ ID NO: 804855 - DNA, 531 bp, Homo sapiens
gattaggagaaaagtgatcattggagccaaaggaatgaatgaaattaccccaggagagcaaagagcccagctagatcctaagagaaagcctaaatatggggaccaacagagacaaaaaagccatataaggagagcgcacaggaagacaaatagaagagagcttyatcttgggggcaagaaagattttccagaagtagatatccttcaatatcaaatactgcagttctaatgcctacagaatttcatgtaccaggtgcttagcaataagaagggaagctagttgacagattagccttttcactgtatttttagaagaataccatttttatctagattgcattgtgttgagtataacttgagccgggtggggagtggtagcagaaatcatggtgataaagactaaaagcctccaagccatatttgatgccaaagctattcaatggcaagctgggttgtatgaaaataaggacggaccacagttgattttaacaaaatggctgtaagtgacctttccaatgagaggggagtttg

SEQ ID NO: 804856 - DNA, 591 bp, Homo sapiens
atcttagctgacttaagtcaattttttttcttcataatagacacggaatctgattagctgccagtcaggcaatggcttgtctgttcttagaacagatatgcaaccttagtccacataattattttgggaggaggaggcaaagaaccatgtgatattttagggtctcaaatatgaagggtctttaaaattttcatgaaaaatatgtattatgaaaaaattgcgcatggatctcaaatttttttgtaccaaaataaactcatactaacttgttataacatatctgaacagaatctagtttgaggcactaagaagggtaagacatcagtttgaaaggagcccctatcagaacaacatgatgtctgctaaaattgaaacaagaataaatggcaaatttaaggtgaagcttgggtgaaaggatggtgaaatcactgatgctttacaaaaagttctagragacaatgccccaaagaaatcagcattatgcaaataataactagttttaagaagggacaagacaatgttgaagatgaagcttgaagtgcatgccattcacatcaattttcaaggaaaaaattaatcttgttcatgccc

SEQ ID NO: 804857 - DNA, 562 bp, Homo sapiens
taaaactatgaaatacttgaataaaatatatagatatatgtgatctaatactgactcagcaaagaccttctgatcatctctatgaggaataagatacaaatgaaaaatttatttgactttaaaaccattgtccaaaaaaataagaagaaaacataaagaacaagcaaagaaaatgtaaaacagaatgttgagaacaaatttttcatttgatacataaaatttttattcaaatctgaacacactaaatattggaaaaaatcacaaataatagacaggaaacataaacacgaatgaataacaaacatacgaaacattaaacatgaaaaaaaatccygttatttttcacctatcaaaaattaacaaaataaaaaagctgatctttgttagattgcagtattcctacgtattgatagaactaatttcagaaaagcaattaagcagtgtgcatcaagtctccttgaagaatctatactttttgacccaaaaccttgacctcttagccccaatttatgaatctagaaatatagtgatatatacaggtaaagaattaatatcaattgta

SEQ ID NO: 804858 - DNA, 616 bp, Homo sapiens
tttttataagtagaaagactaccctctaaaatgataaaaagtatagtgcagtaattatagtagcatagtcatttttattatcaagtattatgtatatataactattaatatatatgatatactttcacatgactggcagcacagtaggtatatttataccagcatcatcacaaacacgtgaggaatgtgttgcgctaccatgtcatgacagctatgatgtcactaggcaatgggaatttttcagctccattataatcttacgagaccactgtcatatatgcagcccattgttgacccaaacatcgttatgcagcgcatgagtaatcttatgaagttagcacaattttgacacagcaacttgataaagacattaccagaaaagaatgtaactgacctgtagacctcataaacacaggcaacaaatgcytagtgtaatattaacaaatctaatccagcaatatataaaaaaggataatacatcataaccaagtggagtttatcccaagaacacaaggttggcctaacattttaaaatcagtgtaattcaccacattaataaaaacaccatctgagcatccaatcaattcaaaaaagcatctgtccaaaatcaataccc

SEQ ID NO: 804859 - DNA, 552 bp, Homo sapiens
  misc_feature 544, 545, 546, 547, 548, 549, 550, 551, 552: n = A,T,C or G
caaaatgatgttaaccataaaaccataatatccttataaaatattaacaagaaaccacagatcttatatattaaatgtattagcatttaacagcactacataaaccaaatgaatgaaaatgtggaaatactcacatatggtttctaatttttgctcaagtaaacattataccatatttagaaacaattatatgagaacactcaaatattttcatgtctaagtatctttgactttttatttttttccatactaattgctattttcaaaggcattgagaaaayagaaatagtttcacagtgttaacaaaagtttcttttccacagccacagagcagtatttattaatgaatgagatttcaattaatgaaggcattaggagggaggaaggtagggagaaactgccacaacagtaagtgtttcacagtgtttttacatatatattccaatggagaatggtcaccacataacgaatttgctcataaatctgaaaaaaaatctgcttaggtaacattttgccacaatagttcctttctaaatttcatacnnnnnnnnn

SEQ ID NO: 804860 - DNA, 487 bp, Homo sapiens
ttttttactccattccatctcctatctgcctttggaatcactgccagcagatattagtttttacattaggtattgctgtattaagcagcaacattgcttaatgtattattcatcctaggtactttgtaaatattgggtaagttatttaatgactgtgtaataatgtacaggcagtcccggcttacaatggttcaatttacagttcttgactttacagtgagtttcattggaatgtattcccaccrgaagttgaggaccatctgtcatgagtttctgtcttcttgacctttagaggaaggaacttagaagttttctaatgtctcacgtactggaacgtaaattgtaaagtagaagtctgtcccctttccctgcccaactaaaaagtacgtaaggtctttgtgacagctgtagtcttctctgataaagtggacataaagatgttagcatttaaatcccacacagtttaaaaaataactcatatttgtgt

SEQ ID NO: 804861 - DNA, 634 bp, Homo sapiens
tttttgacacactgttaactcagtgtgttaacagtgaggtcagttaaattgttctaatttatactcttatttttacttcacaagtttctcaattctgaaatatggcagaatttgacaagatttttttttaatgattaggctgaaccccataatttttagccaagaattctcgaaaccagatggagaaarctgttcaacaaagatgaataaaaagatttaaatagttaaaaaaaaaaaaaggcctcctttagttaggagttaaattatattatgataattataaacatgtaaaatataaaactagttaagcctttactataatatatggctcataagttttaaaagcaaaataattttaaacacacccaaaaaaactaaagacccgtccgggcgtggtggctcatgcctgtaatcctagcactttgggaggctgatgcgggtggatcacttgaggtcaggagttgaaaaccagcctgaccaacatggtgaaacccatctctactaaaaatacaaaacaaaaactaaagacccattaaaactggaattagagagttaatttaatgtcgtggatagtaatgttttattaaaaataacattgcacagttatgctggtggcttcagcattctcatgtat

SEQ ID NO: 804862 - DNA, 489 bp, Homo sapiens
ggaacgtaaattgtaaagtagaagtctgtcccctttccctgcccaactaaaaagtacgtaaggtctttgtgacagctgtagtcttctctgataaagtggacataaagatgttagcatttaaatcccacacagtttaaaaaataactcatatttgtgtctaatgctgttttcaaataattatcgtaaaatgtgagaaccaacccagtgaacaggcagcatgtactccatatcttgaaactgagaggcatagcaacttgctgaagataccacactgtacagctatttagtggcsaaacccatatttggattgcattcaagcttgaattcagttcctgggctagagttttctccctcttgactggaaacaattactttatttgttttaagttgaaaagagttaagaaatagaaaaattaatgcagtggttgaatacaaaatcattgttttcttctcttttaaataccaagatatcgaagtagtagatcagag

SEQ ID NO: 804863 - DNA, 486 bp, Homo sapiens
tattgccttttaaaggcccttggaattattgtccaatacacaaatccatacgtcagccaatgccacacatttgtcactgtgagacaaattaatttagatgttattgagattactgtaatagacatgtatttaaaagcgtagtgaattcaaagtagtttataggcattgtcttagtcaacagatgcaaaaaagarcaattactaatatgtggggtccacatagctctgtgtttgtgtataattctgttttgtttataaattaaaaattgatacttatattcagaaaggaaaggaaccaccagactaattgatctccaagttctttgacatctgtggcatccaataattttttgtagttatgctaactacactttagtttctcatcagtgaaacctcatagatttactaaggatgtaataaaacagtttataagagcataattcacgtggatatggaagattctgtcaggtgaatatggatctgaagt

SEQ ID NO: 804864 - DNA, 620 bp, Homo sapiens
aaatgtatgtattttttagtgcaaagacaatttatcctaccttcaatcattttatgtttttcagaaagtagctatttattacacagtatgggtcaaatatactagagtttcaatcatttgagtggttttatccataagaactatttacaagaaatttcacatctgtaagtgtgactctttgaataaatcagataatataatgtaatatatatataatataaataaatctattttcttcaacatgttctaggaaatatttatttcataaaataataaagtagtgattttctttatgaaaaatgatattaatatccacaacacataaaatccacaaacaattatgccattaggcccatacacaccaaatatatttttctaaaatttcacaagagtaatttagataaaaatagaatttcacrcattgaactcccctatttagctaaaattttgaatctttgttctaatattggttttatttgcaattcaaagaatggatgtaaaatcaaaagtatatatacattacacacacataatatatatatatgtatatagctataacaaaggatttaatatatgatatgtctgggcaaacaattatcattcccattttacagatagag

SEQ ID NO: 804865 - DNA, 594 bp, Homo sapiens
gtaagttaaacgcatcatgaatatatgttatcaagaggattgaatacaggattcagctataggacctggagataggacctatcttcaatccttattacagttacacttaaaatagaagtcaaataatactcactaaatttaatggagatatttacaattattttaagactttgtttatagactataatgaaaaattaaagctatcaaaaatgtttagctatccaagtgtttcttaagaggaaatttcctatttgttaccctaataatcacctcaattctgtattttaatccataaatatagacactgcttaagttttctaagattctagaatacactctgtttagttctttgggcccactctrgttgcttttcatactttcctaattctctagcatggcatgcattttactaagtgggttaattaaagataaagaatagaaggataaatgcttgaggggatggatgccccattctccaggatgtgattatttcacattgcatgcctgtatcaaagcagctaatgtaccccataaatatgtacacctattatgtacccacaaaaattaaaaattaaaaacagatacaaaagaaga

SEQ ID NO: 804866 - DNA, 540 bp, Homo sapiens
aaacatcagggaaaaggaaggtcctgactccctgatggagctctgaaagattcctggacgtggcattgtcacatgtgcagcagtaaagggtgttcactgtgcaagggcagtgggctaaggggcaagcgtgcatggaatccagcctacaggccactccccaaactctggcatggagctacatccacttggagaaaggggaccgttttcctyttcacgcaaaggtggcttaagggctagtggtggcccgggaagtgtgctgagaatgggtggatttcactaagcaaagacatggcaagcaatgtcttggacagccgatgctgcccagacaaaggcctggttgtcgggcatgagctgaggtgtgacaaggagatagaagcaagaagccatggaaggctttgctgcagcttccatgccaaaccctagaatttgtccttaaactggagcaaactgggcaatctggaaccatggaagggggttgggcagggacgtgatacagtcaaggctgcattttaggatatttagcaaaagtccagcgacctg

SEQ ID NO: 804867 - DNA, 540 bp, Homo sapiens
aaacatcagggaaaaggaaggtcctgactccctgatggagctctgaaagattcctggacgtggcattgtcacatgtgcagcagtaaagggtgttcactgtgcaagggcagtgggctaaggggcaagcgtgcatggaatccagcctacaggccactccccaaactctggcatggagctacatccacttggagaaaggggaccgttttccttttcacgcaaaggtggcttaagggctagtggtggcccgggaagtgtgctgagaatgggtggatttcactaagcaaagacatggcaagcaatgtcttggacagccgatgctgcccagacaaaggcctggttgtcgggcatgasctgaggtgtgacaaggagatagaagcaagaagccatggaaggctttgctgcagcttccatgccaaaccctagaatttgtccttaaactggagcaaactgggcaatctggaaccatggaagggggttgggcagggacgtgatacagtcaaggctgcattttaggatatttagcaaaagtccagcgacctg

SEQ ID NO: 804868 - DNA, 648 bp, Homo sapiens
gtaaaatgaaagttttatttctgcttttccaacttacatatatatattttttaaaaaaagaaaattggccttattttaccagctataatctcaaagaaacagaagtagtaagtgtgggcaacttgtgttgttcagaacctcaggtagaaagtttttaatatttcatccttaagtrtcatgctttcttttttagacatactttcttatttgtatttattacttattactataatttataatttattatgttgatatactttattattcattattatatatttatttagttatttttgatatactttattcgttatatatttattatttattatttttatatactttattaaattaagcagcttcctgatggtgtcaggaagttttaaattataaatagatatttaattgttacaaaatttttattctatgtctatggatatattcatattaattttttaatttattctatatatgtgataaattacattaatttttcaattatgaaaaccattcaatttttaacataattttaattcagcttaatatataaactttttgaattttattttctaaaaattcaattactagtttacttagaattatcctctatgttcatcagaataattggcctaaaattttcgtttgaaa

SEQ ID NO: 804869 - DNA, 648 bp, Homo sapiens
gtaaaatgaaagttttatttctgcttttccaacttacatatatatattttttaaaaaaagaaaattggccttattttaccagctataatctcaaagaaacagaagtagtaagtgtgggcaacttgtgttgttcagaacctcaggtagaaagtttttaatatttcatccttaagtgtcatgctttcttttttagacatactttcttatttgtatttattacttattactataatttataatttattatgttgatatactttattattcattattatatatttatttagttatttttgatatactttattcgttatatatttattatttattatttttatatactttattaaattaagcagcttcctgatggtgtcaggaagttttaaattataaatagatatttaattgttacaaaatttttattctatgtctatggatatattcatattaattttttaatttattctatatatgtgatawattacattaatttttcaattatgaaaaccattcaatttttaacataattttaattcagcttaatatataaactttttgaattttattttctaaaaattcaattactagtttacttagaattatcctctatgttcatcagaataattggcctaaaattttcgtttgaaa

SEQ ID NO: 804870 - DNA, 622 bp, Homo sapiens
ataatgatgaataaaaggaagaccagagtaataaaaggagaatggctgagagagtcttgaggtcttctcacatttagaggcaagaagagagaggcaatgctgactaagagacaaagagtaaggaaaggtaagacagaaaccaagagaatcttatgaacttgtctttccatgtcacataaccatctgatataatttatgatcatgattgtcctaattaatacaaaaccaattaagatagaaatagcargcttagcctagaaagtttctatataaagaaacaacttattggttgcattagctttgcatgtactaccttttagaaaacttaactaaatgtaatgaagtctatgtgattcttcttacaaaactggaaatgtcgaaactgaagtcaaggtgtcattagcaaaactatttagtttagtaaattgattggttattgttatctatatgctttcttgaagtatcataaaatgtatttcttatgatgtttccattatttatctatccattagcatattatatatagttacagacctatgtaaaatgttttaacttgcatttcatgaataatttaaatctataatcttgagggaattaattgtactaagaaatgtatgttcta

SEQ ID NO: 804871 - DNA, 712 bp, Homo sapiens
aaactaaatttctttaatttttagccaacttgttcataaacagaattcatttatagattaatttttacaaactttttacaacttgtttaaaactttagtttaaaccttttttttcacttaaagcaatccttaaatccttgaaaccagccaatttttaaaatcacgttttcatgctttgatcaatagcacataactttatttttagtataagcaattttaattatgtaccaagtgtagagcctaggacactggacagaactgcaggtaatgtctgactctttccagcatggctagggggcatggataaccccacacgtccccaggccttacctacaatctcaaggctctaaaggaggcaagtgaggagcaactatcaaaagtcacagaagcagtttataaactgaaagcayccaagctgcctaattcaatatctgacctgcctagtagagtccaaatgtctaaattttaaagacttttgtcaataattgtaaaactatttttatttactaaagattattaaagtcacttgagctaaaaggcattttagtttctatttttctgacaaaatattttatgtaagtgcttatttttttaaagccaattaattagagcacctttatatatttcagtagggaaacatcacacacacaacctacacagacagacaaaagatttttcaattgctagttttaagcttctcttccccatttta

SEQ ID NO: 804872 - DNA, 635 bp, Homo sapiens
ttctttaaaccagttcctgtaagatcccatttagatttccacgtgagacataaacagctatggaaatcgttttcaaaaatcattaggtctacgaaatttatctacagcttgcaaaatttgcattaaccaagttcacatgtaacaattcatatttattctttcatcctgcctaaccaattctaacttctatagtttccctcagagtgaaagaacattcaaatatagtttacattcctgtgcacaagaaattgagaatgtcttgctaggttaggktacacaaaatattaaaagcacattatgtacttttaatatgtaagtacatacatgtatatataagtacatacatgtatatacaaatgtgtccatgtacctacagactaatgtatcagaatttgtacttaaatgcagtgtgaaatattgcatacatatacaaaatgtgtataactatgtctatatatggttatatatgaatatgtatttaatttgtgtgtgtgtgctcggtatgagtatgtgtgtatacagttatgtatctatttatatctatctatctatctatcatctatctatctatcatctatggagagagaggagtccatgcccactgaataagacaaatatgtttgcttctttaggta

SEQ ID NO: 804873 - DNA, 635 bp, Homo sapiens
ttctttaaaccagttcctgtaagatcccatttagatttccacgtgagacataaacagctatggaaatcgttttcaaaaatcattaggtctacgaaatttatctacagcttgcaaaatttgcattaaccaagttcacatgtaacaattcatatttattctttcatcctgcctaaccaattctaacttctatagtttccctcagagtgaaagaacattcaaatatagtttacattcctgtgcacaagaaattgagaatgtcttgctaggttaggttacacaaaatattaaaagcacattatgtacttttaatatgtaagtacatacatgtatatataagtacatacatgtatatacaaatgtgtccatgtacctacagactaatgtatcagaatttgtacttaaatgcagtgtgaaatattgcatacatatacaaaatgtgtataactatgtctatatatggttatatatgaatatgtatttaatttgtgtgtgtgygctcggtatgagtatgtgtgtatacagttatgtatctatttatatctatctatctatctatcatctatctatctatcatctatggagagagaggagtccatgcccactgaataagacaaatatgtttgcttctttaggta

SEQ ID NO: 804874 - DNA, 569 bp, Homo sapiens
atcccagatgactctgttgcctatgaactctcaatcacattttgagaaacactattttagggaaagtaataaatgacgatagtttgcctgccttagtttgtggcttatgcaagaagacagatcacacatattcttgaggttaacatatggaccaattcagttcaccagtgtgaggccccaccacatctaatatgcaagccaaatccttagttaaaatctgtacttgtcttgaasgtcatccttggtcagctctggggtggacagctcacaggagccaccttttccacttactcattgtaaagtattaagaactagaaggtcaatatcagggtgcagtatttggaaaggaacaatgaggcacactttgggtgtaaagaagatgataaactcttagcaataattgagtagttaacattttttctggattgtcccctgggtctttagtttcttttagtctttagttataataacaataatgaacaactatgtacaaaactatgggatctgtatgctcttaaagttttattcttcttctctacatttcttaagctcatttcgatcatagcatc

SEQ ID NO: 804875 - DNA, 659 bp, Homo sapiens
cccatttttacatcaaatcctggatccccaaaatgagaggaacactaggggaccagactatgtaatgctttcaccatgcatctcattgcaaggatattcccctgaggctagtgtccaacccaaggccaatcagctcattctgtaatcagctcatttcccataggagtcttatctctcagtaagggtgtaaggacatttctgtaccttctaggttaccaaaagcatgctttactgatttaaatgtgccaagagctgagtatccccsccataactggcattagcaaccccaaaaagttatatctcctgtctaactattacaaatcatgtctaaaagtccttttataatgtaaataagtttctggtccacttaaaagtcaaaaagattagacgtaagaggaaggagggacagatagaggtaaatggagaattgggcagaattctactgactgagaagtttttacagagggaaggaaggggctttaaaacaatatctttacccatatatcccaattatcagccttaattaaatggttttaactgcagagcttttaaaaattcttttaaatttttaattaccagattttagccaggacagctgatattttcggcttttgaactttaccaaaggtaacctcctatgtgaaattataaaaacctta

SEQ ID NO: 804876 - DNA, 559 bp, Homo sapiens
ctgcaggtttggctcaaacagcaggcttacaggggtcctagctatcctatcctgtggtacccctctttataacagaatgacacagaaagacaaatttatagcacaaaggacaccagatttgctacagcctaagacgasgctcacaaatccattttcctattaatcaaaaccttgcagaggagacaaacagtgatttttaccattcactcaacctgtttgcacagaaagagagaggccagaagtctggttgataagacattcttacccttttgccagcatgccaggtttctaggttccctttctctacagcttctggaagaatacagtggcttttgatgactctgcttcctgcaccatagctgtggggaccaagttgtgttacaaaagaaaatcacctttttccattctattgaacaataggcaaaagtccctcaattttataaaatgctgcccaacaggctgcacagtggaactgaattaacagttcccattccagccagagcaaaacacgcgggatggaacacagacattagtcacctggctcagtgcccaaatatca

SEQ ID NO: 804877 - DNA, 468 bp, Homo sapiens
tcaatgatagttgtatttgtaaaagtttaacttattaagtaaaagactcaagtagccaaccagtttgaatatttgaacagtatgttaagggcccaagttggaagcagcaatagaaaataatggggaattactgaggagaaagattgatacagcatataagtaataattcttggacactaatgtagtrttaagaggaaaagaggaacaggtacatacaggcccatggcagcagagtggcaaaattgtgcagaattctgtcagtcaggccacatcattttttacactaggagccctgattttcctttctgtgaaaacctggtctctgtccatgagtttgcttgaactgtgagaaattaattcccattgcttgctgattcgagaccaagtacaagtttaggaaaggttttctgcttgtcgatttcccctgctatgctctgtgaagggcctgtgtcttgggcatcataacct

SEQ ID NO: 804878 - DNA, 595 bp, Homo sapiens
ttcagtgtttccatatcagcaccaatgtcatttaactgtaagattctttttaccataaacacttgggatgctcaatggtttaaaggacattctacacaaaagtttgaaagctcttaattacagcaactaaaacctcacaatggtttyctagatatgtcttttgtgtagtattttgaaaaatggatttttcttccaaagaggttaggacaatagcatttatgccataagaactctgtttttttggaccacattttgtgataaaaagcaaatgagctttgcatttaggagctccaggaaatccttgttgcccttagaaatctgccccctcaccccgacaaagggccagacagcttggaggtagggaatatccccctccataggctcaccaagacgtgcagctggctgtatgttctttactgatgtcctgtgagcccttaaggtatttcaacaaggagcatcttgattttctgtggatttatggaagaaaatgtatctctccaaatgtgtatagtagttcctccttatctgcagggaatagttccaagacccccagtgaatgcctaatactgcagatagtacacaacactatatatgc

SEQ ID NO: 804879 - DNA, 595 bp, Homo sapiens
ttcagtgtttccatatcagcaccaatgtcatttaactgtaagattctttttaccataaacacttgggatgctcaatggtttaaaggacattctacacaaaagtttgaaagctcttaattacagcaactaaaacctcacaatggttttctagatatgtcttttgtgtagtattttgaaaaatggatttttcttccaaagaggttaggacaatagcatttatgccataagaactctgtttttttggaccacattttgtgataaaaagcaaatgagctttgcatttaggagctccaggaaatccttgttgcccttagaaatctgccccctcaccccgacaaagggccagacagcttggaggtagggaatatccccctccataggctcaccaagacgtgcagctggctgtatgttctttactgatgtcctgtgagcccttaaggtatttcaacaaggagcaycttgattttctgtggatttatggaagaaaatgtatctctccaaatgtgtatagtagttcctccttatctgcagggaatagttccaagacccccagtgaatgcctaatactgcagatagtacacaacactatatatgc

SEQ ID NO: 804880 - DNA, 639 bp, Homo sapiens
aagtcagaaatgcataaaatgggaaagaaaaggtacaactgctagatcatctcctgcctagaagtattgagtgatgtttgcataaagaggctctaattaattggcttcaaaaaaaaatgaaggctcttaaatattttgtcagaaaatagaaactctaatgccttttagttcatgtgactgcagtaatctttgggaaatacagttttaaaattattggtaaaacgaaaatatcttcaaaatttagacattgggtctaaattaagtcagaggttaaatttgctaagtgctttaatgtcatacaccgcttctttgactttggaaaattgtccagtttacctggtttgaagccattagatttctaggtaaggcctggggtcaggcggagttagccatgcctcctagctgtgctggaaagagtcagactttatctgcagttctgtcttgcttcctagactatgcacctggtacgtaactaaaactgcttacacacacacacacacrcacacacacgcacgcacacacacataaaaacaaaaaaaagtgtttttcatttttaaaagacatggtaatatggttttaaaaaaaaaccaagtgttgcctaatttagaaagttaaagaattacttttagttggaagaaa

SEQ ID NO: 804881 - DNA, 626 bp, Homo sapiens
gattagtgaggggatactcgtgtgttcagagacttccttctcttccgaaacatgttgctatgaattgcaattgtaattactatgcagctctatgggtaaagttcaaagagcaggctatctccaattagtcagtctacagaatgtgttcttyatggtcacttctaggtaatgtcatcagaattaggacatcaacaaatatgctgaggttagaaaacaattccaaaatgtatcgtcaatgaaatttaaagtgccatctccagtgtgtgtgaagttgcaaaatgacaaataatgttctacatttgtcagatgtctaaaagatattcaactttaataagaaacaggagacagagaagtgaggactaaactaaaaattacctacaacatatcacaatttaattttaaatgaatttatttgattattgcctttcatcttaccttcagtttgcctaaatcctgagttaagtatatcacaaactttaatcctggaaagagtaaaaaatcaagaggtaaagcattgcattcatgaaagagtttgagatgtctaaggcgtttctcaactcaactacccagaaagaaagtcagtaagtctatgagctaatcttgttgtgattaacttctgaacctgt

SEQ ID NO: 804882 - DNA, 538 bp, Homo sapiens
agccaataattttaaattcaaagtttggagaggagggagcctctggctcccagggaaagcatctcagcgactgacactaagaaactttcagaggccacgagctgatcttcggtatctgcttggacttggcctggaacactgggyttgtccagcccatgggagaaccagaactaaagagcttgaccacctcagtgaagggacacagaggccaggcagaagtttctctgcatgctgttctactctctgcctagcactgacactacaactcccaattcttctgtattaaaaggagcacctgcatatatgctaacttttcaggaacagcacactgacatctggccacttatgttttttctggagcaagatacaagtcccctaattaattatggatcaaaccatcaatgcctaaaagaggtgagtttcattctcataaaaggagctcagtttttttaaaggctttcatgtgaattttcagagcctggcagcatctttctgctgtgcttaatagcgaagggtgaatgcttcattttctaccaaa

SEQ ID NO: 804883 - DNA, 696 bp, Homo sapiens
ctcagctacttgggaagctgaggtggggggatcccttgaactcaagaatttgaggctgcagtgagctatgatcacaccactatactccagcctgggcaacaaagtgagaattcatctctaaaaaaaattaaaatgtctatgtacttttgtgatgtttcatcaatttttaaactwataaatgggaataaatgcagggttcaggagaaaacagcattttcaagaggcttctttaaaggctacagtcttattgaaaactttaaaaagaagccacagttgtctatggaaggtgtgggactgaacagagccatccatcactactctctgcactctgagttagagaaatgtcactttctctgaattcaagttctgagcccaatcactaaattatgtatcctatcaatagtcctcattttacagtttttctaaatcttctgatatggggcctatactcaaatctctgtcactgtttttaatatttgctctatttgggacttcctacaaatatcatctctggcaagggagcaaataaacatgttgttccaacataagacctttatcttctgcccctggttatacttgctacagacatttggctgagccacctagttgatcagaagcctctcattctttcaatccttgctgctagaagtctttctagaattaccctgctttcctaagtccggaattagtgcacaa

SEQ ID NO: 804884 - DNA, 696 bp, Homo sapiens
ctcagctacttgggaagctgaggtggggggatcccttgaactcaagaatttgaggctgcagtgagctatgatcacaccactatactccagcctgggcaacaaagtgagaattcatctctaaaaaaaattaaaatgtctatgtacttttgtgatgtttcatcaatttttaaactaataaatgggaataaatgcagggttcaggagaaaacagcattttcaagaggcttctttaaaggctacagtcttattgaaaactttaaaaagaagccacagttgtctatggaaggtgtgggactgaacagagccatccatcactactctctgcactctgagttagagaaatgtcactttctctgaattcaagttctgagcccaatcactaaattatgtatcctatcaatagtcctcattttacagtttttctawatcttctgatatggggcctatactcaaatctctgtcactgtttttaatatttgctctatttgggacttcctacaaatatcatctctggcaagggagcaaataaacatgttgttccaacataagacctttatcttctgcccctggttatacttgctacagacatttggctgagccacctagttgatcagaagcctctcattctttcaatccttgctgctagaagtctttctagaattaccctgctttcctaagtccggaattagtgcacaa

SEQ ID NO: 804885 - DNA, 486 bp, Homo sapiens
gtattgcagcattgtgctggtaaagttttaactatcagatctctgaggaaaaaaaaaaagtacttgtgtgtgtgtttgtctgtgtatgtgtgtatatatttaattactataacatttactgacataaaggatctctagcacrgtattttcaaataaggaatccacaatattctttactggaaattcggtaaagcttaattgattctcatagaatattttccctgatttttgcaaaattcttgtatccatagccaatttatgatgaacaagtgtagttccgacatgggtgttggttgatatttttatttacattgaatatgctaaagtaaaacaacaaaaacacatgttagaacttcttttgttgtcaatgactgagtaacttctttgctgaattagataataggttttgaatagtcaaacaatatttcctgaattttttgtgctattcacaatgtaatggttacagacatgatagaatgttaagtt

SEQ ID NO: 804886 - DNA, 486 bp, Homo sapiens
gtattgcagcattgtgctggtaaagttttaactatcagatctctgaggaaaaaaaaaaagtacttgtgtgtgtgtttgtctgtgtatgtgtgtatatatttaattactataacatttactgacataaaggatctctagcacggtattttcaaataaggaatccacaatattctttactgraaattcggtaaagcttaattgattctcatagaatattttccctgatttttgcaaaattcttgtatccatagccaatttatgatgaacaagtgtagttccgacatgggtgttggttgatatttttatttacattgaatatgctaaagtaaaacaacaaaaacacatgttagaacttcttttgttgtcaatgactgagtaacttctttgctgaattagataataggttttgaatagtcaaacaatatttcctgaattttttgtgctattcacaatgtaatggttacagacatgatagaatgttaagtt

SEQ ID NO: 804887 - DNA, 606 bp, Homo sapiens
gaaaatgaattataggtgaaaaatattaaaaatagttaaatcaaggagatgaatgtattcgtgtttactattctctattttgttatgtacagaaaattttataataagcactttaagaaagggaaaaaatcacccagtttggcacctactgtcttgaggtgctgtagacccctactccatgtgataatataggggtggcactgaagatgcaggactagacctcccctgaccaaattgggaggtgtctagttgggtgttgtaaggatagaagttgktggagctattacatgctaaggcagagttcacaaagccactttctaaagatgtaacatttggcaatttgaataacagtgctcaactaacagggctgttgtagggatggaatgctataatgaagacaaagccctgggtcacagaagagctcaacaaaagctgccatgtttcacaattgcggaagggcagtgaacctgcaacaccccaaggagaccacaaaatagcttgtgggtcaagcaaagccaagtgtattgcttcctgtaataaggaagaccactgcctttttagcactgtctttgaaaaggaaggataaagatgagatatttatgtgat

SEQ ID NO: 804888 - DNA, 666 bp, Homo sapiens
tatatataatttctgattgaaacacacatatttcaatgtgtattttaaatacgtgtatttataatttgtgtgttggaatacacatattattgaatgtgtgtttgaaacatgcatactgattgaaatatatgcatttatgtgtttgaaatatacatgtttcactgattgaaacatacacgtttataataatccatgtttcttgaggatttcaaattatttamcaatattcagatcctaaaatattctatctcttataaattgagaaacatttattattttcaattgcacattaataggtgagtgaataaacaaattatgttcaaagagcatacattgtaggacttgaatacatttcaatagtcagaatacaatctatcttggcaaatgttccatagaaactagcaaagaatgtgttttttggtgccgttagattgagtgttctatgaatgttaattatgtcactgtggttaataatgctatttatgtgttcaatatccttactaatttcctgtctcatggttctatctactattcagagtggtgtcaatatctgcaactataataaagaacttttctagttctccttgcaattctattgctttttccttattttacttgaagttcattatcagatatagaaatgtttcagattgttatggcctcttg

SEQ ID NO: 804889 - DNA, 522 bp, Homo sapiens
gagcaaccaccatcccaccatgggtagaggtaccaagcaggcagccatgtgtaagccaaggagacaggccagggacagattcatcccttgtaaggctctaagaggaaaccaactgtgctggcaccttgaccttgtgcttcttgtcagcagaagtgtaagaaaataagtttctggtgtttaagtcccaaatatatacacaacatacacacacgcacayatatatatatatgcacacacaatgtataaaatacagtaagataaagctaaagcagatgttaaattcaaaacaaaagtgcatttactaaataaatttaaatgtcaatactctaagactcttatctcaaaacctagagcaagtccagcaaatcatacgtaagaagagtaggaaataagaaactacaaataagagagcagaacaaataagataggattatgtatagtgaaaagtttgactcaaatggaaaaattgataatcccttatcaagattaatttttaaaagtaaacagaaaacaaaatcagca

SEQ ID NO: 804890 - DNA, 536 bp, Homo sapiens
actgcaagtaaattaaacctctttcctttgcaaattaccctacatagcagtatgagaatgaattaatacactaaattggtacaggaaacagtgggttgttgctataaggctacccaaaaatgtggaaacaactttggaactgggtaataagcagatgttggaacagtttgtagagctcagaagaagacaggaaaatgtggaaaagtttggaacttcctagagactttttaaatggctttgaacgaaatgctgatagtgatagggacmatgaagtccaggctgaggttgtctcagataaaaatgagaaacttgctgggaactgtaaaggtcactcttgtaatgctttagcaaagagactggaagatttctgctcctgccctagagatctgtggaactttgaacttgagagagatagttcagggaatctggcagaagaaacttctaagcagcaaagcattcaagacgtgacagagtataaaagtttagaaaatttgcagccagtctatgcagtgggaaagaaagctcattttctctgg

SEQ ID NO: 804891 - DNA, 644 bp, Homo sapiens
aacaacatcaaatcaatatcaataattaaataattatttaatgaacaaatggcccattggtggttctgttattaatggcacaaaataactcttacatgtcagaagggatgttcttaaactgtcagtacttctaagcacttaaatgaacacctttaaaaataatcatagctaagtgtattgcatggaaattatttttaagagattgaaaatgataactggaatatttaatgcagaggagggtaaataagaaactttttttctcattttgtgggttgctccagtcgtaagaaaactgtttttttgagcaggtgcctccagttgttagtctgcaggaggttattcaaaactggggcacactgggttagtttccatggaagcagaaattaacccccaggaacctcatacgtttttarcaccatccggaggacatctggtatagcacccatcagaaacaacaactgaggcaaattcccactataaaatacaagtagaaggaagagcagtcaccttcataatcatttcttacactactataaatcttcctttgaaatgatgtatgttttatcagaatattcagagtaaattgctataatttaattttttgaagtattcttttcccaaatcataaattatcttaatgtaaa

SEQ ID NO: 804892 - DNA, 626 bp, Homo sapiens
agtggtagaaaggtgaaatgcaccctgactgcacccctcacagggagatcatgctaaaataaatacttcacaaatagttagatgtcctaaggcatgttctctggtttttaaaaaagtcctaggaaagacctttttttaaaatgcacaataatctttcttgttctaatttgcacacctggttgctggaagcagtgaacrcctgtgtcttaggctcagggctgccgtattgattctatagggcctaacagaagtcccactttgcagaggaaaacagtgatgtgtgttgaaaatagatggtgcgtgaggcctcagggaccatttggcctgacagccccagctgaggacagggaggcacaggaggtggagagggagaggcaacatggaagttgatttcatttgccagctgtccatggagcttcccagtagttggcgaagatggaacgtggcttcctgagctgcctgtctttcccgtgaaaggttgacatcacagagtagtccataagcaacagttttcagtggggccacatggaggtcccgaagctcttctgccagcactgtggaggggaagcgggtgacatggaagaggtcacgtggactgcccttgcttcagtaattattcagtacac

SEQ ID NO: 804893 - DNA, 626 bp, Homo sapiens
agtggtagaaaggtgaaatgcaccctgactgcacccctcacagggagatcatgctaaaataaatacttcacaaatagttagatgtcctaaggcatgttctctggtttttaaaaaagtcctaggaaagacctttttttaaaatgcacaataatctttcttgttctaatttgcacacctggttgctggaagcagtgaacgcctgtgtcttaggctcagggctgccrtattgattctatagggcctaacagaagtcccactttgcagaggaaaacagtgatgtgtgttgaaaatagatggtgcgtgaggcctcagggaccatttggcctgacagccccagctgaggacagggaggcacaggaggtggagagggagaggcaacatggaagttgatttcatttgccagctgtccatggagcttcccagtagttggcgaagatggaacgtggcttcctgagctgcctgtctttcccgtgaaaggttgacatcacagagtagtccataagcaacagttttcagtggggccacatggaggtcccgaagctcttctgccagcactgtggaggggaagcgggtgacatggaagaggtcacgtggactgcccttgcttcagtaattattcagtacac

SEQ ID NO: 804894 - DNA, 565 bp, Homo sapiens
taatgataagggttaacattaattaagctgtcactacgtgttagtcacggtgcagtcattcccacacattattacacttaaacctgctagcaagcttgcaaggtagttagttgtttttcctttaaaaactgagtctcggaatgatgaagcactctgtccaatgtcacacagctagtaagtgtggagaccttgcatccaatcaatgcccgtctcattctaaaggccatgttatgtgttctccagcccatggagaataattttaacacagtcaatgaaatttctacacaacaatgttcttgtctcaagtccaagaatgcctcctacacctcctataatactggctttctggtgagtaaagatgccattctcctgtgtaatcaggtggcaaatggagatatgaccraagtaaccatctgtctacactcataaccctgtacacactcttcctgtgtcgattcaattcaagtaccccttttgatcacttagcaaatgtgacctttaaaagggttgaggtttttatatccatgtaagtttttgtattgctttggaagtctctggttaaatt

SEQ ID NO: 804895 - DNA, 563 bp, Homo sapiens
acagaatctattgcattagactgatgatctctgttgtaatgtaaattccagtcatttgtgcctaaactccaaaaagaatggggtatgaggtgtgtctgacttcccttaccatcatggccaggaattcagttttgttgttgttgttgtttttgagacggagtctcactctgttgcccaagctggagtgcagtgctgtgatctcagctcactgaaacctccgcctcctgggttcaagcgattatcgtgtytcagcctccggagtagctgggattacaggcccacgccactatgcccagctaatttttgtatttttagtagagacggggtttctccatgttggccaggctggttctccaactcctgacctcaggtgatccacccgccttggcctcccaaagtgctgggattacaggcgtgagccaccgtgcccgactgggaattcagtttttaaggtttttctgaggttacccttggccaagaagcttcattcagtcagtggggggccttaggattttatttttagtttacgataggtcgaatatagtccttgacaaaacagaaga

SEQ ID NO: 804896 - DNA, 563 bp, Homo sapiens
acagaatctattgcattagactgatgatctctgttgtaatgtaaattccagtcatttgtgcctaaactccaaaaagaatggggtatgaggtgtgtctgacttcccttaccatcatggccaggaattcagttttgttgttgttgttgtttttgagacggagtctcactctgttgcccaagctggagtgcagtgctgtgatctcagctcactgaaacctccgcctcctgggttcaagcgattatcgtgtctcagcctccggagtagctgggattacaggcccacgccactatgcccagctaatttttgtatttttagtagagacggggtttytccatgttggccaggctggttctccaactcctgacctcaggtgatccacccgccttggcctcccaaagtgctgggattacaggcgtgagccaccgtgcccgactgggaattcagtttttaaggtttttctgaggttacccttggccaagaagcttcattcagtcagtggggggccttaggattttatttttagtttacgataggtcgaatatagtccttgacaaaacagaaga

SEQ ID NO: 804897 - DNA, 555 bp, Homo sapiens
caaagtgctgggattacaggcatgagccaccacgcccagccattgttttgttttgtttttagagatagggttttgctctgctgtccaggctggaatgtagtggctcaatcgtagctcactgcagccttgaactcctggcctcaagctatccttccccctcggcctcccaaagcactgggattacaggcataagccatcatgcccagctctccaaaaggaactttaaaacagaacattttgaaaagaaacatattgatgtgtagaaagtcactgaaaaactgcattctaaagtataagcagagttgtgtcttagcagtgggattataggtaattcttgcatacagagatatctcgttcaagccacagacagtstaggcattggcttattccatgtctccatcagtgcagaggaaggcactgaggtgaacccaagacccaggagggatatatttacttcttcccatggttcaggtagctgagggattctgaggcgtgagtaaatactctcagggagtgtgcaccgtggtttcctgagatttcagacaaaaaaacaag

SEQ ID NO: 804898 - DNA, 563 bp, Homo sapiens
gccagggtatgttacaacatcacacttccaagcaaggcccaggctggcccagatgggacacgaagcccccagtaaagatcaggagcacttctgggggtcccacctgagggatctggtgcataaagtcaggcttggttgtaggcccccaacaagacataaaacctgtacaggtcaagaagtgacgcatctctggcctgtgagcccctcacgtgytgggtggcactgaggtgatgatgacactatttctaaaagacagacataatgccagtgacttcagtcattttcctcattttatgtggctatttttaaaagctgtcctccagaaacaaaagaatccctgagataaaatttcccaaagcaaaatgctccacctgactggggtccgacctaggggtgggagagctggatagtcctgggacacagagttaggtctgtgctgttaaaggcagaattaatattccttgtactgaactgaaaaggacagatttaaaaatcgtatcttttgtacttccatctaagctactttagggagttttctggctatgaagcacctgaatcttgag

SEQ ID NO: 804899 - DNA, 622 bp, Homo sapiens
tgcatgcctgtggttccagctacacaggaggctgaggcaggaggattgcttgagcctgggaggtcaaggctgcagtgagccatgttcacactacacactccagtctgggcaacagagtcagaccctgtttcaaaataaataagtaaaacaaagcatatatagaaaaaatgaaaatagggatgagtgaaatagatatgtgaggcacatgaaaatatctaacatacatattactaggttccaaaagagaaaagacaaaaaaacaaatcagatgagtgaaatagaaaacaaattgttagatggtatgtataaacccaattatatattaaattaaattaaatgtaaatggactaaacactactactagaagaytaagatggtaagactgaaaagcaaaaatctaaatatatgcttactgcgaaggctataccttagctatcaggacacaaatttgtttaaagtgaaagaaaggaaacacacacgcgcacacacaacacaaacaaaaaaatagtatagtatactaatattagaaaaatcatatttaaggcaactattattaccagagagtaagacagaatattccagtcttaaatctgcatgtgcccaataatatagtttaaaaata

SEQ ID NO: 804900 - DNA, 622 bp, Homo sapiens
tgcatgcctgtggttccagctacacaggaggctgaggcaggaggattgcttgagcctgggaggtcaaggctgcagtgagccatgttcacactacacactccagtctgggcaacagagtcagaccctgtttcaaaataaataagtaaaacaaagcatatatagaaaaaatgaaaatagggatgagtgaaatagatatgtgaggcacatgaaaatatctaacatacatattactaggttccaaaagagaaaagacaaaaaaacaaatcagatgagtgaaatagaaaacaaattgttagatggtatgtataaacccaattatatattaaattaaattaaatgtaaatggactaaacactactactagaagactaagatggtaagactgaaaagcaaaaatctaaatatatgcttactgcraaggctataccttagctatcaggacacaaatttgtttaaagtgaaagaaaggaaacacacacgcgcacacacaacacaaacaaaaaaatagtatagtatactaatattagaaaaatcatatttaaggcaactattattaccagagagtaagacagaatattccagtcttaaatctgcatgtgcccaataatatagtttaaaaata

SEQ ID NO: 804901 - DNA, 548 bp, Homo sapiens
tgtgtaatattgcccacagtttctatttggagaatcacttttccttacatgtactgaacaacaaacatgaaaccacctaattatattttcataatcatgattaaaaaccatctaaattatcctgcttgatgtactcgaagagtttgttgattgctttttgatgtgtattagagctttatgcagagccacatcaaatgagttgcttcataatgaaataaagggaaaaatcctttaatatgcatgcacacttacttaaaatatacatatataattcatatttggctaattaaccmgcatcaacacaaaatccatgaccatgaaataattgtggaaaggctgattaccttcaaatagtacattaatttccatttcatatatatttatatatatatctgtatttgcacaatattgagtctaccttttacagaagccactcagtcttttgaaccatcaatgcctcaacgtatttgtccacattctgggaaagagttgtgaaattaggatgcgaatttcagatttaatttaacacaggaatttcatgtaaatac

SEQ ID NO: 804902 - DNA, 551 bp, Homo sapiens
aaattttacacatgagtgttctggaattatgcccagaaggggtcattctttgaggcagtcaatccagatggctgccttgcagcatctacaattgccatcagtggcttggacctggggtgggtgtccatgtcgcttcttgttttctgggtagcaagatgaactgagtgtgtgttgagctgtatgtatcaaaggcagggatttttaatctggagwtcatacactggcctctgatgtgtcagtgaatccctgtggccaaaatacgtttccctgtgtatatgggtgtgtgctttttcctggggagacgacccattggttaagaaagagtgtactaggtttttaggagaaaatcaagtggcaagagggttgggttgtccctaccaagatggaaggaatggcagagaaagtgttttggtacagtttgtaccatagggaggaggtgctgaagccggctgttcagccactggagtcaggtggggagtcacttaccatcagagagctctgtccattggcagcatcatgccagccagcagggactgcagcaggcccatccc

SEQ ID NO: 804903 - DNA, 637 bp, Homo sapiens
tggttccttttgctgcaagtaacctttctttactctttcaccctgatgcacaattatctttgccattgtgtaaggtaagtgagatcttcctgagagcttcctgtttccatgaaacctttctgatgatgacctatgactcctttgagctgttaacagctcgtgagaatactgctttgggtatgcatatgtgcacacacacacacacacacacacacacacacacacacacacatcccccttctatttgcaatcatggctagacaaaaagctttttttccattacaatgtagagaaaagaagagatagatcatgggggctgtgaagagagagaagaygaaggagaagagttccctgtctggctcactgggctgaatttgaaaagccaatatgggcaagggaagggaggtgagggcccctaagtggaataaaagatttggggagataaggccccagacaagctgatttgagacccaagtgaaagagcagagttggggaggagagcattcttgtggcttctgcaaataaacggcacccctttttgcagttcaacagctttaggagcaccccaagaccatgcccttggcaagtacactgtcatttttatgatgccactggtagtagggagccctctccaaat

SEQ ID NO: 804904 - DNA, 611 bp, Homo sapiens
ggatccattcacaaaatattatttttgtttttgagatttccacatttttaaaaaggtttccccttcataggatgtgacaaaaggggttgggtcctgatttacagccaagtcttggcgtttctggttgctcaacactgaacrcaagggccacagaaaacagaagtaagatgtgaattattagggttctctttagttttcggagttgctttataagcttattcaaaactacccatgttagagggggaaaaaaaaattagctttctttcctacaagccgaagaggtgtgcgtatgttattgtgcagagaaatttccaaaatagattctttcttccactttgtgtcttattcctttgccctgctcctcggccccgactctcccgcaccctacgcaacacatgcacacacattctctacccctcctcactctctgaagctgagggccctcctgacaaatcaaatccccctctcccagtttgagaaaacaagatgccacaacctgcaggggcccatctgagcacagcgagcctgcccactccaaagcagcaatcaaatcccttgtaaatcctctaagctgtgataagtctctagtgttcacataataggtcagatcc

SEQ ID NO: 804905 - DNA, 650 bp, Homo sapiens
taaatagttcaagaatactattgggttaccatgtagcctagcttggtttaaaagtgagtcagcaatcagtcacttatactttctgtttttctgataaatggtaatttatgaatacttccctatatggagactgatttcaatgcaaatagtttagcaatttttttattagacattttcctggtgatgttactacttttcagaataagtagactttggcaactatagctactaaaagctgtagaatttagtataatcatatttcatcaattaagtaaaagaggacatttaaggcaaaaatatacttattaatagagctaatattaaggattaatttccagatacgtgctaagtgctttaatacagaacataatttaacctttattagaaacyttcaagatggttgctattacctattcttatttcaatagtgagaaaaatacagcttgcaaatgttaagtaactgtccagggtcacagagctcataaggagcagaacccttacagaagcctaggtctgtttggcccaaagctggaatcttcaccaccacaccatattgcctcacaaaacagttagtaatgttagttcaatgctaattactgaatcattctttacagcactattagccaatcaagtttttgactccttaatat

SEQ ID NO: 804906 - DNA, 628 bp, Homo sapiens
ctagctgaggggtatggatattaaaacattaaaaggcatctcatggctttagggaaataggttatgatatgaactaatgtaatcattattgaagttcacctgttacactttttcttcaattctagccactatattcttttttttttttctcttccttcccagcaagtttctagctcagtactctttttgtaattgactyccccaggctctgtccatttttattaagagccaaaatgtcagctagttagccaaaagatgttcctgaactctgcatggcacactgcacatacatatttaaagttatacatgcacagaaggggtcttgtgcagagccaggagtaagtcacaaggagcaggaaagcctctcttcccttcattccctgtagatgccagaatttcctcttagaacaaaatcccttcagtttaaggctgaaaacttcagggaaatccaaatacctacaaagtggaaatagaacatttgtaccttatgtgaaggaagaaaccaggatctgcttagttaggtatctggaagcagaggctgctggaaggcagtgatttcaaggtgattcagaaacagaggctgtcctgtggaggaggagagctggagaattcaagggctggagacacc

SEQ ID NO: 804907 - DNA, 617 bp, Homo sapiens
aaagtggatcttaagatttgtatgaagatataagggatccaaaagagtgcaatcaattttgaaaaagatgaaaaaacttggaggactcaacacttcccagtttcaaaacttactacaaagctacagtaaacaagactataaggatagaaatagagatcaacaaaatagaattgagagttcagaaataaaccctacttatcaaaatatttatrtagaccttttctcaaaggagatacatgaatggccattaagcttatgaaaagatgctcaacatcactattcattaggaaaatgcaaataaaaatcatgagatgttgcctcacatccactagaatagctaaagcaaaaaaaaagcaacaacataaaccatataggcaataagaagtgttggtgagaatgtgagaatttgaagccctcatataatactgatgtagtgcagccattttggaaaagagtttggaattttctcaaaagtttaaacctcatgaactgcctttttactctaaggaataaaccccaaagaaatggaaatttatctccacataaaaacctggatataaatgttcataaaagcttatttctgatagccaaaaaattaaagcaatccaaatgtcctt

SEQ ID NO: 804908 - DNA, 670 bp, Homo sapiens
tttttaaaaaaggttctttctttttttaacattgcgatgagatcctgatatatacaaccctaaaattattcacgtgctgctattgggaagtcccccgaaacctagggcagtgtgaaaatgagaagaaggtaatatattttttaaaagcaggtggttgagtgttttaaccacctytgttctatgatcatggagaaaacaccccttccccctaccccatatccgcaaaggattctaaggaaacagttttgagtctgttctcctaggaccgcagctattcaggccctcttcattcttttaaggtggatattgacaacctagcaggtcacagaagtgtgtttagtttcactctgggacaaagaaacagggaaagtcagtcacattttgtgtacgtgtgtttgtgcatgtgcacacagtgtcatgcaaccttatgtgtgtgtgtgtttgtatgtgtgtgtacgtatgtatagagattggatacgaatttgccatggcttttgttaaacagcaaataagctttgcccatttggacatgctatcagaattctgaatttctggttaaaaatctctccgcttgaacatgtctgctggaaatcactgccgttgctgttgccaggggtcattaaatgtacaggagaggaggcgaggcagagatgctcttccttgtcttaaa

SEQ ID NO: 804909 - DNA, 558 bp, Homo sapiens
ggtagtttaatttcctggaccattttttacctttcagaacattatgaatgggttttcttcttcgcagttatttttgtgcttatgtcaatcttctgtaatagttgtgcatatatgtatatttcacagtctatattttttccacgggtaaatttttaaaaaatttcccatctccaccaattttcagggctgttatatgggattacacgcctatattttctcatcatttaagcttttgatctctgtgctatctcagatattttagattctttcttctggctgatttgaggcttgayttctttgttttcccttttctgtattaaaataatttaaaaacctagaaggctcttcttggcatggcagctgcaactttgactaaaaagtcctgtggggtaccacaagtctacctctggctaagatggactcctcttcatactatcttttctaacaatgtttccagatccaacacaggttttgataccatttctccgactgctctctattaaacagtagtttccagaaattcctatctctaaaagcaactttatttcaaagcagatt

SEQ ID NO: 804910 - DNA, 558 bp, Homo sapiens
ggtagtttaatttcctggaccattttttacctttcagaacattatgaatgggttttcttcttcgcagttatttttgtgcttatgtcaatcttctgtaatagttgtgcatatatgtatatttcacagtctatattttttccacgggtaaatttttaaaaaatttcccatctccaccaattttcagggctgttatatgggattacacgcctatattttctcatcatttaagcttttgatctctgtgctatctcagatattttagattctttcttctggctgatttgaggcttgacttctttgytttcccttttctgtattaaaataatttaaaaacctagaaggctcttcttggcatggcagctgcaactttgactaaaaagtcctgtggggtaccacaagtctacctctggctaagatggactcctcttcatactatcttttctaacaatgtttccagatccaacacaggttttgataccatttctccgactgctctctattaaacagtagtttccagaaattcctatctctaaaagcaactttatttcaaagcagatt

SEQ ID NO: 804911 - DNA, 563 bp, Homo sapiens
ttataggtgtgagccaccatgcccagccccttctgtcccttctaacgtgaggacccagcaacaaggtaccatcttgaaagcagcaactggggactcagcagacaccaaaccaactggtgcttaaccgtgacttcccagcctccagagctgtaagaaaataaatttctattatttatagattacccagttgaagatactttgttaaggcagtacaaatggactaagacaagggggaagaaatttgcattcctgatcttcccaacttcttcaaattcacaacacttgaatgacagtcttatttcagcacttactgctatcacctattacttttatgtgtgtcttacctatttgagatgccagattccttggaagtagagaccgtgtctgaatcatcattgtattaaaccrctcatccttaacaaatgcccaagccatggttaaagttcaataaatactttgttgaatttattaataaaatggcagaaatgtcattctcttccatatatgtttaataaatccctgataggtgctaagcactgcactaggtaaaaattctcttctga

SEQ ID NO: 804912 - DNA, 656 bp, Homo sapiens
atttaccttgtaagacatttgtatgactctgaaattatttcaaaataaaatgtttaacaaatgtgtttttttaccatgataaaaaagggtaaaatatactgtttaaaaaatggccttgggggtggagcctgtgtgctccagttcccacagagcatgccactcccattaccttacacttgagctcgcataggtactttgacaagccagccttctgaaggcgattcaagggatatgcagctattatagaaaggccagactggggaggacattgaacactggatttagggaggtcgatgttactttatatcaataagtaggtctttggagktttcgaacagtggagcaatattatttagaaaaggaattccatgtggaggacaatttggaaggagaaagactccaggaagacttatataagaacatcgcaatggaaagggaaaggagaaatgtgagttagatgtttaaagaagaatcaatagaatttggctactgcaaatgataccattattggaaataggggatgctggaggttggcaaaaaagagatggggccagagaggaggtacaatagtttctaggcaaggaggatctgtttccttgccttttgcagcgtctagaggctgcctgcattctttgactcacgggccccttcctcca

SEQ ID NO: 804913 - DNA, 656 bp, Homo sapiens
atttaccttgtaagacatttgtatgactctgaaattatttcaaaataaaatgtttaacaaatgtgtttttttaccatgataaaaaagggtaaaatatactgtttaaaaaatggccttgggggtggagcctgtgtgctccagttcccacagagcatgccactcccattaccttacacttgagctcgcataggtactttgacaagccagccttctgaaggcgattcaagggatatgcagctattatagaaaggccagactggggaggacattgaacactggatttagggaggtcgatgttactttatatcaataagtaggtctttggagttttcgaacagtggagcaatattatttagaaaaggaattccatgtggaggacaatttggaaggagaaagactccaggaagacttatataagaacatygcaatggaaagggaaaggagaaatgtgagttagatgtttaaagaagaatcaatagaatttggctactgcaaatgataccattattggaaataggggatgctggaggttggcaaaaaagagatggggccagagaggaggtacaatagtttctaggcaaggaggatctgtttccttgccttttgcagcgtctagaggctgcctgcattctttgactcacgggccccttcctcca

SEQ ID NO: 804914 - DNA, 621 bp, Homo sapiens
tccatggcagttctacttgtaagaaaaaaaaagagatataactcaaatgtccatctataatagaaaggtaaacaagttgtgggttattcctataatggactaccatacagaaataaaaacgaatgaactagagctatacctattagatagatgagtttcaagatgatggtgttgaatgaaaaaagcaagtcagtaagtatgtgcagtatgatcccctttatatggagtttgaacagaggaaaaagaaataatacattgtttgggatacatacgtaggcattaaaattacaaggaaaaacagatgaatgattaatatgatgatggttrccttgaggaggggtatgtgcatagatttacttggagaggaccatacaaatgaggtttgaaagccctagtaatatcctattttgtaacctatgtggttggtacatgagtgttcaatttattgtaattatttaaactgcgtatcttaatatactcttttacacttatgaaatagttcacaacaaacatttaactaaacatttacaattctacaaagtaaatacttagatattttctttgattagttacaaacatacttctcaaaactttttaacaagttaaaaattacactcataa

SEQ ID NO: 804915 - DNA, 616 bp, Homo sapiens
ggtctcggctggaggcacacttcccagcctgtgggttggtcaccttgcaggctgcaacactttataagaaataaattcttctctcctttcttaaatttataaattgtataatttttaagttaacagtacttaacattttagtgatcatagatccctccaaaaattaaatgacatctatggactctgtccccagaaaatacatatgtgcatacagtagtttttctaaccatctacttaatattcttgattccctttctgaaatatgccaactgattctcataaaatactgaagactcatagctagtagccttcactttagtttactcctccacatctgcttccactagctgagtggaatactccccaagagtcagttatgtttgttcccaaacttcatttccattgtatgcctcatacgtatataatttaattgaattgcatgaactgataaaatytgagtctgcaaagaaataattttctatgaaaatcaagaaaatgagtgctaataaaaatagccattgtcagacacttaggtggtttccatatcttggttactatgaatatgctgcaataaacatggaagcacagagtatcttttcagcatactgatttcatt

SEQ ID NO: 804916 - DNA, 634 bp, Homo sapiens
ctcataatgtcctgcgtctaaggtttcagggtggtagtggggcgggggaccggaatcataattcgattggtgtggttcaatacacatttgagcttcatgcaaaaataaacagcagacactagagggcgctgtttcatttcctttttcactggactgtgctgcagatgtcagcgtatggggcactgcaaaatatcatcatggtcttctaaacaggcccaaattgcaatgaagtacaagctgtagagatcccctgagttttaggagaaaggctgggaagttcaaaacagggtggatggtaaattaattcagaattagtaaagaagtaattttttattaccctagcccttcatgattgtcttttgataattacttaattcctctggttgaaagaaattttattagatttcaagctcccactaaatgtcaaatgrttctaaaaatagctagaatattagacaatgttaaacaattagcgctctcaagttttgtcgttagaattttgagtagaatacatacctactactggttgagaaactaattacagaattcccagtggtcacaaatgtcagaccccaagatgtttcttttgatatcaaacaaataccaagtcaataagattcccaattaacttcgt

SEQ ID NO: 804917 - DNA, 484 bp, Homo sapiens
aacatctggagacattttgggtgttgaaactgggggaagatgtgactggtatccatgggtagaggtgagggatgttgctaacatcctacagtgcacagaacagtcctccacaacaaagaattattcagtccaaaaygtcaacagcgccgagctttgagaaaccctagtctagcgttaagccaatgactggttgacaattcagagatagaagagtaaatagatatatttccctgcgttttctctcactgtcccatcaaagatgactgtccaccccaagcatctatggatgattccagtccggtcacctggcattcacgatcctcatgttgggaaaccaagacagtgagaaataaggctaagcactttgttttcacactctcacttacgattttacaggagtacttttctgagtcgcagagtgacactgcacagtgaaggtgaacttcgtcgtaatcccctatgaatttaaagacggtgacgtgaa

SEQ ID NO: 804918 - DNA, 484 bp, Homo sapiens
aacatctggagacattttgggtgttgaaactgggggaagatgtgactggtatccatgggtagaggtgagggatgttgctaacatcctacagtgcacagaacagtcctccacaacaaagaattattcagtccaaaatgtcaacagygccgagctttgagaaaccctagtctagcgttaagccaatgactggttgacaattcagagatagaagagtaaatagatatatttccctgcgttttctctcactgtcccatcaaagatgactgtccaccccaagcatctatggatgattccagtccggtcacctggcattcacgatcctcatgttgggaaaccaagacagtgagaaataaggctaagcactttgttttcacactctcacttacgattttacaggagtacttttctgagtcgcagagtgacactgcacagtgaaggtgaacttcgtcgtaatcccctatgaatttaaagacggtgacgtgaa

SEQ ID NO: 804919 - DNA, 623 bp, Homo sapiens
tcccttctgggtggcatacacagtttgtcagtttgtcaacattctgcatttatgaaaaacagtttgctgctcactcatttagcctccagtggtatactgagttgatcacaaccctcattctttcggcctgctatatctcctgctttttgtttttaaattaattgagcaacgcaattgcaggctgtgcagccctcaattgcaggttggtgatctggcttcatttttcttascccttattcataatggagttgctctggtttgaatgttccttacatatttccctcttcctttttacaagaggaccttaatcctaagggttgcagaaggatgaaggtccatcttctgcaacttcttcatgcttaataggggtgtgcctaactattcctgcctaactattagggtctcttgtattcagggtagagagctcagtcagaaagcattcgtccattaagcatcaattgtacctctgagttccagtaaaaggtgaaatcctggccctccagcagtttctcagcttcttgtgtggttttctagatcggtccctatattatgggggttaatgtaagcgtgactctggtcggtcctcgttccatctttgcattcagattcaactggctcatggc

SEQ ID NO: 804920 - DNA, 615 bp, Homo sapiens
catatatgaaggaggaaggaggaaatggtgttaactggggataaagagttgatgtatctgtgactccttcctggttagtggggctcctggacagcagcttttctgtgccacgtgaccactcctagagtgtgcttttctgtttaggatcctgcccagtttaatctgagggagtggattaaaattgactgccacagaacagcacatgatctcctcagaagttttctaaatgaagaccacacaacacccagcaatgctagagaatcaggctgtctgcccaaaccctcaagttctcagtgtgtttgtgcttctgcagccttgatcacaggggcagagaccatgaatcaggggctggaggcctgtgtgtgtagcagggatattctcactcagttattgtggaagaaatgaaagtattttctaggcggtcamaactgttatcatttattagggaagaggaggaatgatgcttgcttgggttatgtgtaccttcttacaggcatcagtattctattagggaaagttggggaaatggagtaaagagtcagaagtctgtttaggaaaactaatttggggctaaccttcttatgcatggaggacaatggtctgtgcaatggacaa

SEQ ID NO: 804921 - DNA, 665 bp, Homo sapiens
tccataacaaaggtctactctccaaggaagactatatcttatagcagagcgttatctcagctggggtaagcacactgctcttacttcagctctcttgagccttggcatcttacctaagggtgaaaaaatgttatgatattagagatgcacttatggtcacagcacagaracatatacctaaaactttaataactaaaataaaatggaccaattcattgaagatacaaactataaaaactcatgcaaagaaaattagataatctaaataggcctatatttcctgaagaaattaaatcaataattagtaacttttcagaaaaagaaagcaccaggctcagatggtgttatgggtgagttttactgaacatttaaagaggaaataataccaattctttacagtatctttcagaaaatagaactagagggaacacttcctaatttattctgtgaagctagcattacaacaataataaaactagttgaaatttatgtccatgtaaaaacctgcatttgaatgcttaaagaaacataattactccaaattgtaaaaagccaagatgtcattcaataagccaatggataaacgatgtacatccatacaatgtaatattatttagtaataaaaagaaatgagctatgaagccatgaaaagacatgaataaatc

SEQ ID NO: 804922 - DNA, 537 bp, Homo sapiens
tcacatataataaactatgtatgtttaaggtgcacaatttaataagttttgacatatacaccctgtataagtatgtcatcacaatcaagattacgaacacatccataacctctgaacgtttccctatagacctttataattccccctcctgcccatctctaacctgctcctgtcccgaggcgaccaccgatctgctttttgtcaataaaattaggttgcattttctagaatttcataaaattaaaatcaaactttctgtactcttttttcatctgacttctttcacttggcataattttttgagatccatccatactattgtgtgtatcaataatgagtttmttattattgcggagcagcattctatttcagggttataccacattttctttctccattcagctgttgatagacatttggattgtttacaatttttggctattacaaataaagctaatacaaacatttatgtactagtcattgtatgaacctatgcctttattattttgggtgaatacctacgggtggaatgactag

SEQ ID NO: 804923 - DNA, 582 bp, Homo sapiens
ataaaattatgactggaaaatgaacacttattttgcagcatggggcaggacaataaagatggttagaacagcaagaggggaggaagctgggaccctgaagaatatggagctgccacaccagaactggactatcttctcagagtttcttcttatctaagagagaaataractactaccttatttaactaatttattttattgttgttcctgtatgcaggtgaacttaatgtttattgatattatactccttctgctccagatttctattgtggtgaggaaagactggtgtctttcggtgtatatataactataaagcttcatgaaagacataaaggattttcataaaataaggcatatatggatttctctatatcccagtgttttaataggtatttttagacctgacggctttattctttgagctattttttaactgtggtgcttttcataaacccagttgaatctttcatattcacgttcaactagcctgtgttaaatgcccatttagtgttagtcattttctgatttgccaaacatttatattcttcacaatgcccctgcaggatatgtaatattatttca

SEQ ID NO: 804924 - DNA, 582 bp, Homo sapiens
ataaaattatgactggaaaatgaacacttattttgcagcatggggcaggacaataaagatggttagaacagcaagaggggaggaagctgggaccctgaagaatatggagctgccacaccagaactggactatcttctcagagtttcttcttatctaagagagaaatagactactaccttatttaactaatttattttattgttgttcctgtatgcaggtgaacttaatgtttattgatattatactccttctgctccagatttctattgtggtgaggaaagactggtgtctttcggtgtatatataactataaagcttcatgaaagacataaaggattttcataaaataaggcatatatggatttctctatatcccagtgttttaataggtatttttaracctgacggctttattctttgagctattttttaactgtggtgcttttcataaacccagttgaatctttcatattcacgttcaactagcctgtgttaaatgcccatttagtgttagtcattttctgatttgccaaacatttatattcttcacaatgcccctgcaggatatgtaatattatttca

SEQ ID NO: 804925 - DNA, 633 bp, Homo sapiens
agtgggtcacatggcgaaagagggagcaagaaacagaggaggaagtgtcaagcctttaaacaaccagttcttatgtgaaatttagagtaagaactcattcattaccacgtaggggcatcaagccagtcatgagggaactgcctcctaacccaacacctcccactaaaccccacctctaacactggggcatcacatttcaacaggtgatttgaagggaacaaacatccaaactacatcaaccaatataaggtataaactctgaatgagatatgaataggaatttatgagtatagggaagcagaggaggtgagatacaagagaagacctggtagagaagagaaaattgttaggagtggctgagaaacgtttaatatgatttttaaaaactctattcaattttagtttattggtttctcatgcttgctttycaggtggaaaccaccaaccaattggaaggtgactagggtgaatatagcccaaggaacttgcaaaactctttggagggccaaggagtaaaggacttcattcagggtgtgacatggtgggccacacccatcaacagaatctcagccagggcttcagaactaatgtaaaaagttaccaggtttataatacttaaagagttttggtttc

SEQ ID NO: 804926 - DNA, 618 bp, Homo sapiens
ttatggaagcaaaacctgtatgtgttgtttggcaagtagtcaactaggagagatcaggaagggatgaaaggatgaggaggaaagaagcatgaggagattagcatgggtgagtgcaaccttcttttacagcagtggatttggttaaatatgtttcactcttccaaggttattaaatataagtattttagaaaagaaaatgtacagatgattctgcttttcctaccaaatataatgcaactaggccttaacgagtgaagattcccccttttttttgcactttaagagtagctttcatcccaaatctgtacaatgcctacycattcagccaattattcaaaaaggttacatttgctacttcatctttaatgaaaagaataataaaccaaatcaggaacaaggattttagtattcttttctactttaaacttgggcaacagtcagctcctctttgactcattttcttacctggataatacaaattaataaaaacttgcttatctgtctcataaaaatctcgatgagcaatgatctctcagtgtgtttgaatgtataataaaaactattactccagacattttacacagcaagaagaactgtttaaatctctgtcatggaaat

SEQ ID NO: 804927 - DNA, 563 bp, Homo sapiens; identical to SEQ ID NO: 757198

SEQ ID NO: 804928 - DNA, 618 bp, Homo sapiens
ctgggattacagctgttacatattatggcccatttctgtgtacattttaaactgataggcaaattatagcaagaaaaatcagagatcaaattgttaacctgcaactacagagttaagtagtgtcttctaaaactctttattagtccattttgcactgctataaagaaatgccyaagtctgggtaatttataaagaaaagaggtttatttggctaatggttttgcatggtgctggcttctggaaagcttctggtgaggtctcagaaagctttcattcatcgaggaagaagaggaagcaggtgtgtcacatggtgagagagacaggaggaggtacaaggctcttaaacaaccagctcttgggtgaactaatagactgagaatcactcattactgtgaggacagcactaagcaattcatgaggggtccgcccccatgacccaaacacctcccactaggccccagctccaacactggggatgacaattcaacatgagatatggagtggacaaatatccaaaccatatcactttctattgctctctttcctttctgcctgctttgaatttcccattattaagctactggcgttgagataaaactcactttttatatagcacca

SEQ ID NO: 804929 - DNA, 566 bp, Homo sapiens
tctctttgttgaactcctaattttgttcatgtattatttttctgattctatttagtatctatttttgtcctgttgtcactcattgagtttctttaagataattagtttgaattctttggcagttcgtagatccctttttctttaggctcagttactgatattttattttattgttttgttttggtagtgtcatgtttccttgattattcataatccatttggccatatgttgaaatctgaacgtttgaagaagtargcacctattctagtttttacagactgattttgacagggaaagccctttatcagttagcctttccagagattctaggcaggctttctagcaggatttgtgggggcaggcttgctattgaagtccttgaaaaggctctcctggacctaaatgttttttcccattctgtgacttgttttctattttctcgatagtgccttttgaagtataatactaaagttttttattttgatgaagtgtattttatctattttttgttattactgttgctatgctttcagggtcataactaaggccattatctaatccagtg

SEQ ID NO: 804930 - DNA, 535 bp, Homo sapiens; identical to SEQ ID NO: 804032

SEQ ID NO: 804931 - DNA, 610 bp, Homo sapiens
tgcacttcccatcccatgctcttacttctgtagcatcttagctgggcggggttctcaacctgggggcataccgtgcaggattggaatgcttgttagtttgtcttactgcatcgttacagtttacttctttctttttgagacaagagtctcgctctcgcccaggcgggagtgcagtggcgcgatctcggctcactgcaagctctgcctcctgggttcacgccattctcctgcctcagcctcccgagtagctgggactacacgcgcccgccaccccgcccggctaattttcttttgtattttttagtagagacggggtttcaccgtgttagccaggatggtctcgatctcctgactttgtgatccaccggcctcggcctcccaaagtgctgggattacaggtgtgagccaccgcgcccggccatcgttacagttttctaatgaacaggactattaggtaaaggagccagtgrattctctgattttcaaatattgtctttcttgcccccattgtgtaatagaaatttcaattcttgtaatcagaataaattcctcagtcagtacagtgacttttctctccacctatcagacacaaccagttgagaaattctga

SEQ ID NO: 804932 - DNA, 616 bp, Homo sapiens
tctatttatatgactttggcaagtaatttaatcttctataatcagtttctctgacaatgggtcatcaagtaatcatgatacctgagcttcccatcatgaactgtgttttctgggtcatgaagccatagattgggcatgtaagatagcaatctgccactaaggagaagaagccaacaagagaacaggttcaagctagccaggactgcacaagttagttgcatgagcaggtagttctgctccattgcctcctctcttctatggcacacctatggcctcttagttttctgtttaataatgaactgatctgagataggagaaactggcatttacaaatggatattctggcaacaactgggaggtggactccccaagcattaaaccacaatcaggggtgtctcatccattgagtctggacagatytacattaattcatggctagttgctaacagcttgacttccatcatggttagaatttatcctcactggaataaacagatatttttggatatggatgttcctgttaataatgcttctgccgccaccattaattgtggacttagggaatgctttattctccatcagcgtgttttaaacacagaattatttccatccaaga

SEQ ID NO: 804933 - DNA, 635 bp, Homo sapiens
agatctctcctttcccctgtggctgatacgtccctgtatacgtcctctgcccgttcttcttttccccaacccacaacttacttttgaacatccttccaaccatgcaggcctcttctgttgttgctgtgcatattcctcttcctctggagcacttttctcctgggaactggaggtggcacatcctacacygaacaatttctatcacttggccagagagaggggaaagagaagtgagaaaagatggcactaccaggaaagaacccctctccccttttgggttagaagtctgcctagagccacagggctttgccagagcccatcaagcgtgaacctcttcctctgtggaaatacactaagccaagagagtgattgaggtttatggtctcaggaattttagcctgaaaaatgggaggggaaagaaaggtggaggaataaggaaaagtgaaacattatcaagactgaggtgatcagacaggtcctcttcatacttaccaggaaaattgtttttcacagcaactatttcattgactgtactggcaagagaaagaaaacacatctgaaatgtgcctgagatttactcttgtattgggttcttatagtctgcccttcagggtccatcctgcactcttaaactg

SEQ ID NO: 804934 - DNA, 281 bp, Homo sapiens
caagagggcacttaaaatattcagtaaactacaatgtaaaaagatgtgctatcattcaggctttgttgtaacctttctagagcacaggcagagtagattccacatacatcttaaggrgtctaagatttctggaatggtaaattagcattggcttcaacttaaagtcaccagctgcattagcccctaacaagagactcaacctgtcctttgacgctttgaagccaaacattgacttctcttctctagctatgaaagtcctggatggcatcttcttctaagag

SEQ ID NO: 804935 - DNA, 561 bp, Homo sapiens
gaaaaccgcatctgagtaaaagaagtcaatcaccaaaggggccacgtattacacaatttcatttgtatgaaaggcccagagtaggcaaattaatagagacagaaaataattagtggtgtttcagtattaatggttgtggggtatactgggaatgatacctaaaggatgtgatgtttatttttaaggtgatgaaaatgctttaaatttttttgtggtgatcgttgcacagatctgtgaatatactaaagttccattgaattgtatagtttaaatgagttgtctgtatggtatgtgaattgtatctttatgacttttttttttcttttttgagacaaggtctcaccctttcacccaggctggagkatagtggcatgattagagttcactgcagttttgacttcccaggctcaagtgatcctcccacctcagcccccaagtagctaagactacaggcgcatgacaccatgcccaactaatttttgtagaggtggggttttgccatgttgcaaagactggttttgaactcctgggctcaaacaatcctcccgcctcggcctctca

SEQ ID NO: 804936 - DNA, 537 bp, Homo sapiens
actgtaaaagtgtcaggcctgtgagttaaatctgtagtctttgcaattccctgcctggaggaaacttagagataaacatcttaaaggataccttcaaaatgactacagattgctttaagtctaatgcatagatgtgcaaaggagttcatggcatgaaaacgaaagcatatayaaatcgaatcaaataaataatgagaaacttgaagataaaaagagagccaagaatggaaagtggccagtcaatgctggcctggaaaagactacttttaaaatgggaggacagaagcacaaatgaatgaatggacaattacgtgcactgattaataaaacaaagccgtggccatgcatcgcctcagcactgaaaagcgtcattggaattcctgaaaagatggatttgtaagcattcaagaggatggaattcagatgaagaggcctgaggtacactttcctggtaaaggaacagaggcattgacaatagccagcttatctttacagctcaattgtaatagagaaagtactgtcaccagcaagctgata

SEQ ID NO: 804937 - DNA, 537 bp, Homo sapiens
actgtaaaagtgtcaggcctgtgagttaaatctgtagtctttgcaattccctgcctggaggaaacttagagataaacatcttaaaggataccttcaaaatgactacagattgctttaagtctaatgcatagatgtgcaaaggagttcatggcatgaaaacgaaagcatatataaatcgaatcaaataaataatgagaaacttgaagataaaaagagagccaagaatggaaagtggccagtcaatgctggcctggaaaagactacttttaaaatgggaggacagaagcacaaatgaatgaatggacaattacgtgcactgattaataaaacaaagccgtggccatscatcgcctcagcactgaaaagcgtcattggaattcctgaaaagatggatttgtaagcattcaagaggatggaattcagatgaagaggcctgaggtacactttcctggtaaaggaacagaggcattgacaatagccagcttatctttacagctcaattgtaatagagaaagtactgtcaccagcaagctgata

SEQ ID NO: 804938 - DNA, 577 bp, Homo sapiens
cccaggggacatgcggagattagaaaatgagcaaagggaagaggaggagaaatgagtaagtcagtggcaagagcatcctctccccgccaaattatattatgttttcattttatcttgcacatgttctgcttgaaatcctatctgcacccattacaacactgcttcctggcatctaatgaaagatgcctccatggacttgcttaaaacacaaggaaacaagcttattctttggggagttacatatatatatatgtatatagtatataaaaattctagaagataacatcagaaaaactcttctagagattagcttaggcaaggaaaggagacatgaacaattttttttttttcaaggaaagaagacatgaacaaatatttagtgtggtttagttkgaggtagataatattttaataaaaaaattaataatgcctcaaaaaaatatggtctggggccagcagcatcaactaggatcttattagaaatgcagaatctttggtcccacttcaagcttgtcaaatcagtatctgcattttaacaagactcctagttgattcaaatgcataatacaagttttag

SEQ ID NO: 804939 - DNA, 551 bp, Homo sapiens
cttcttaacttgatggcttcggcccatcttgacttggtgaagccttagtctcttcatgggtaaatgggggaagacaccagtttctcacagggattctgtgccaggtaatggtgacacctacatgtgacctaatgccactgtgcctccacagctcmcatatattctccaagtctaccttctcatgtgactgatgagcaaatacaaaatgtaggatacgtcagcttttttaaaagggaggcggccaggcacattggctcatgcctgtaatcccagcactttgggaggctgaagagggtagatcgcctgaggtcaggagttcgagaccagcctggccaacatagtgaaaccttgtctctactaaaaatacaacaacaacaacaaaaaatagccgctgtggtggcaggcacctgtaattccagctactcgggaggctgaggcaggagaattgcttgaacctgggagacggaggttgcagtgagctgagttcgtgccattgcactccaggctgggcaataagagcaaaactccatctcaaataaatacataaatta

SEQ ID NO: 804940 - DNA, 601 bp, Homo sapiens
gatgtgtttcttgaaggcagcagctgaggctacaggatgacagatatggctcgaggcatgggattggaactcactctacagcccaggctctgctcagcaagaccctggaaatagcagcactggtggggacagcacaattgtattgtccttccctgtctatctttcacttcctctctcgggcagtaaatgtctctcagctattcctgcttaccatcttcctgggggtttagagcttgacacttgaagttttaatgaggaataatagccacatttggcctttttctccatgtacaaagctttacatttgtttgctttctggaacaaaaacaaaagtgtgtcatrttgtcagtcttgggctggacatgaaataaaagagtcaaattgagatggaatgtcagcaagaaggtttagttttggctgtggggtttccaagcgtgagcttcctggcccctgtgacactggaaagagtggctcctcccagaaggagctaacagcacaggctatttctctctggaagtttctcaaatagtctgttgcatctaaaagctatttggccacgttcctaatttgaattctgtctacaattgtttctccctgtggt

SEQ ID NO: 804941 - DNA, 571 bp, Homo sapiens
cttcattatgctaattatttcactatgtataagtatatcaagacatgttgtacagtttaaacatacacaataaaatcagtggtagattatgcttatagtatctacttttaacataatgtgatgagaattgcactttaccttgtggtcttccttttaaaaaccaataacctatgtcttatgatgagaaaagcattagagaaaacctgattgattctgcaaagtacatgatgagtaccccctcaaaattctcaggtcgttgcattagtctgtttactcactgctgataaagacatacaccaaggaagaaaaagaggtttaattgaacttacaactccacatggctagggaggcctcagaatcatggcaggaggcaaaaggcacttcttacatggcagcagcaagrgaaaatgaggagcaagcaaaggggaaacccctgataaaaccattggatagtgtgagacttattcactatcatgagaatagcatggaaacgactgttctcccatgattcaattacctccccctgagtccccctccacaacatgtgggaattctgagagatacaattcaa

SEQ ID NO: 804942 - DNA, 612 bp, Homo sapiens
tttgcagtactgtaacttacagaattgaaatatttgcactccaattgtcttgctatgatggaattttctgtatttttatttgacattgaaaaatatcttgaaaatagagtattacaatttcatggatgattacaaatacttttttggaaaaactatagaagtttgaccttttgaaacaaaatgttagatttgcaaagaagttgaaaagccactaattttaaatgtaaggaatgactgaattacctttgcaagatatttgcaaagaagaattgatattgcctgacctttctagtgagtaacataaccccgagagactaactggactacctttggtcagatgacagaagttagcagttatcaaatgagtcaaaatctgtgttttcacaacttttttgtttctctacaaggttctaattttagaaacatcataaaaccaaaygaggcaattacaaattaacttttcttcagattttttaaacctattatgaattttagttaagtttaagttaatttattgcaacttccatgcttgttatttattttttaattgattttcttattgaagaaatgttaattgagtgattactctatgcctggtgttaggggtcaaat

SEQ ID NO: 804943 - DNA, 608 bp, Homo sapiens
ttcatatatattgctaatttggtgttctaacaaattcttgcctagtatcaatctagtttttacaaaatattaactctagagtttttctatgaaaatgtaaatggatacttgacacatttattacaatgtaacatagattattgaaacatgaacaaaataagagtcaaaatattttgagggagaaattaataacattttaagacagtttttaagtcagaatattttaaaagtgttttttttgaattttgttttccatcaggaatgtttgaagttatttcctaaataaaaatattatatatttcattttccatgttaaatacaatcaggaaattaaagcaaagttttgtttaaatcagcatttatctgtactagagaattgctgtactagttrcttatggctcaggattatagaactgtttgttgatggaatagttaaaaaaaaaaggcaaaaagaaaacaacaaaggctggaagttgaaatctcctaacagacatacctattataaccaaaaattacacctaaatataaatgtctagcctgtattcaatatcaatgcctatttacttagaacatttatagttactttattggatcaactatacttaatt

SEQ ID NO: 804944 - DNA, 608 bp, Homo sapiens
ttcatatatattgctaatttggtgttctaacaaattcttgcctagtatcaatctagtttttacaaaatattaactctagagtttttctatgaaaatgtaaatggatacttgacacatttattacaatgtaacatagattattgaaacatgaacaaaataagagtcaaaatattttgagggagaaattaataacattttaagacagtttttaagtcagaatattttaaaagtgttttttttgaattttgttttccatcaggaatgtttgaagttatttcctaaataaaaatattatatatttcattttccatgttaaatacaatcaggaaattaaagcaaagttttgtttaaatcagcatttatctgtactagagaattgctgtactagttacttatggctcaggattatagaactgtttgttgatggaatagttaaaaaaaaaaggcaaaaagaaaacaacaaagrctggaagttgaaatctcctaacagacatacctattataaccaaaaattacacctaaatataaatgtctagcctgtattcaatatcaatgcctatttacttagaacatttatagttactttattggatcaactatacttaatt

SEQ ID NO: 804945 - DNA, 638 bp, Homo sapiens
cttattaatgaacaaatcactttgataatgtggcagaatacttaccgtagttaacactggaagttactcattcaacaagtgtctattgagtatcaacaagtgtcttctaacatacctgtttacctttacctccagttactgcacatgatccatcttcaattttgacataggtgtatttgctgagtcagagctcacatataagtgattctacctttatctcccttggttcttacaattttagcatcttgctctttgatgtctactgctgctgccatcttggcatagcaattatttatagacagccatgccatgtaataaaaatataaatattattatttatgatgccctagttattgctggatttatttatgtggtcatattttatttttgagattttcrgtagctttcttatacagggtacttgatacagaacacactatttaaccttgtgttgcataatgtttttaaatcaatttgacaaagggatttctttggaagaaagatatttgttttgttcgctgttttgtaaataacattttcaaacttgttatgctttttaaggctgaaaagaaagccatattggaaattagagttggattctagccaatattctgacaaggtgtcatctaaccttgaca

SEQ ID NO: 804946 - DNA, 670 bp, Homo sapiens
atgacacatcattattagattaatttttctttccactgttcatcaaaatatatatccatataaatgttttattaaccaataatctatccataaaagttatttataccaaaatatgtatgcatacaggtaaaagtatgattcataaaatatttaaagtactgttaaaaaaactaagattatattattaatattatgcaagtaatgagaacttcaaacacaatataatttgtgcaaaaatgtaaatttcagaagtaagtgaaaatataattgaactgagatgattacatacctaagcttctaaggaaacttaaaggcaatttcattaataatggaattccctctgaagtcattcgtacgtgtggagctggcrtcaaagtattaaaatgttctgcgtgtgtatagaaacagtaaaaaattatttttattttgcctgttgctaactcctgcagaagtcagtcagataattctctcaaaaatagacctgcttttgtttcttttaattgtttacagatcaaaagcttttttaagtgagaaacttgagggacttcactgtgttttcagatctatctgaggggattaacaccaagtgttattttggatgatcagttttacccttgctaagctttgtaatttctcatagctctctgagttgttgcacagtacttgacaa

SEQ ID NO: 804947 - DNA, 638 bp, Homo sapiens
gtttcttatactatcagcccaaatacttaaaatgatggagggccctttaatttatcatattaagggcttcaacaaataagagctaaatgattgttaatttacaagagactgccttgtgtttgtacagaagtttcaccttaaatgtctaatttccaaaaatggtatttttgaaggattacctgaaggacatgacatctatctatccctctaaagaatactttttttttttctggggtaattaagrtctcattttttggcttattttctggctctttcacccacatcttcactcagatacataacaaaactgaattccaagtatttccacaaaaatatttactcacatcaaccacttcatcgttacatagaaagtactgaatagctgaggtaatgccagggccacagggacatgcagctgtctgctgcctcatggatcccttgtcttcataccacccttcagtgtccttgccatacaccccttccttcccatatatgtgtgtgtatacacaatttataacttataaaaatacatgctacatgtatatatgtgcatattcatactgaatatgctatacatagcatttacaattatatgttgtgtgtgtttgtgtgtgtatatatatacatacatttaacat

SEQ ID NO: 804948 - DNA, 605 bp, Homo sapiens
gaatgattaagctttttctccttcccccaattatcaaccttttaagtggataatttgtcagaaaatcaaatgaaggaaattcaatcgggattgctactttcagctaccagttcactgcataacatactttattctaaattttccattaattcctaaagttgaccttgttaaatagcatgtcacttgtacttgaaacttaagcctttgctacatctaatctttcattattattttgcaaataattaaatatccatggccatactttttaaaaatcataattttattatgtagaattgtggatcactactattgytttttttactgttacttttaagtataagtttccaactttatgaacatttctaatatttcaatgtgtttaccatttatataaaacataagcattatattttattagatgtgtatcccaattgtgctgcttattttccctttgttgaaccaaaatgtcttaaggaataaatgtgaaacagtttcctattttaaatttgaacaccgattaatttttttcattaagtgaaaatatctctgcaattttcccagaatgaatgttaaattaaatttgtatatgtctaaaaagttacacc

SEQ ID NO: 804949 - DNA, 592 bp, Homo sapiens
agaagccataaaacaagaagagagtgaagtatttttagtgttgagagagaaaaccccgctagtatagaattctgtctctgtgaaatgtgaaattatccttcacatgtgcagcagaaagaatatcctttctcagacaaacaaaaatagagggtattttttgccaatagatctgacttgcaagaaatgcttgaacaagttctttttttctttttctttttcttttttttttttttttgagacagagttttactctgttgcccggtctggagtgcagtggtgtgatctcggcccactttgacctttcccttctgagattcaagcaattctcctgcctcagactcctgagtaactgggattacaggcgtgtgccaccacgcctggctaatttttgtatttttagtagaggcggggtttcgccatgctggccaggcgtgtctgaaactcytgacctccaaccacctcggcctcccaaagtgctgggatttcaggcgtgagccactgtgcctggccctgaacaagttcttcagagcagaaaaatgctttaaactagaaactcaggtctccaaatcatttgatcatttttaaattggac

SEQ ID NO: 804950 - DNA, 616 bp, Homo sapiens
gataggggtctggttttatgcttctgcatatggatatctatctagtttgcccagcatggtttattgaagaggctgtcctttccctaatatatgtttaaagaaaggaaatgcatcagagaaagactaagtgaaggtaaattaaaaacttttacttttcttattcttattcataagattattgaaaataatggaaacaatgtattgtattatattatgtgtatatactrcgtataagataaatgaatggtaacaatgatataagggatgaaagacttagaaataacttatcataaagaactcttgctacccattaagaagtacagtgttatttgaaaattgacttcattcagttcattgtaaatgtatattgaaaattcttgaacaacaaataaacaagttaaagaaagataactgatatactaaggaaagaaaattaaatcatataaaatgctcaattgaaatcgccaaagacagaaaaatagtgaaagacaaaaactgaaataaagaataagggcaacaaataaaatagttacaaatatagtatatatattaatccattgtatcagtaattacctgaaaattataattatctaaatagctcaattgaaaggtagag

SEQ ID NO: 804951 - DNA, 616 bp, Homo sapiens
gataggggtctggttttatgcttctgcatatggatatctatctagtttgcccagcatggtttattgaagaggctgtcctttccctaatatatgtttaaagaaaggaaatgcatcagagaaagactaagtgaaggtaaattaaaaacttttacttttcttattcttattcataagattattgaaaataatggaaacaatgtattgtattatattatgtgtatatactaygtataagataaatgaatggtaacaatgatataagggatgaaagacttagaaataacttatcataaagaactcttgctacccattaagaagtacagtgttatttgaaaattgacttcattcagttcattgtaaatgtatattgaaaattcttgaacaacaaataaacaagttaaagaaagataactgatatactaaggaaagaaaattaaatcatataaaatgctcaattgaaatcgccaaagacagaaaaatagtgaaagacaaaaactgaaataaagaataagggcaacaaataaaatagttacaaatatagtatatatattaatccattgtatcagtaattacctgaaaattataattatctaaatagctcaattgaaaggtagag

SEQ ID NO: 804952 - DNA, 616 bp, Homo sapiens
gataggggtctggttttatgcttctgcatatggatatctatctagtttgcccagcatggtttattgaagaggctgtcctttccctaatatatgtttaaagaaaggaaatgcatcagagaaagactaagtgaaggtaaattaaaaacttttacttttcttattcttattcataagattattgaaaataatggaaacaatgtattgtattatattatgtgtatatactacgtataagataaatgaatggtaacaatgatataagggatgaaagacttagaaataacttatcataaagaactcttgctacccattaagaagtacagtgttatttgaaaattgacttcattcagttcattgtaaatgtatattgaaaattcttgaacaacaaataaacaagttaaagaaagataactgatatactaaggaaagaaaattaaatcatataaaatgctcaattgaaatmgccaaagacagaaaaatagtgaaagacaaaaactgaaataaagaataagggcaacaaataaaatagttacaaatatagtatatatattaatccattgtatcagtaattacctgaaaattataattatctaaatagctcaattgaaaggtagag

SEQ ID NO: 804953 - DNA, 566 bp, Homo sapiens
ttggattctgtaatctccaaatttcaactgtggacctctctactgaactccagtcttctatgtccaatgacttaccagacagcttcacttggatattaaataaatctttcaaagttaaaatattcagttcaatactgtacttctttttccccttgatttgcttctccctcaatcatcccattctcattaagtggtgtctttttctgtttaggaaaatgcttgaaaacatctttggcttttatttatttttattctggctagaaatacattttttaactgttacttttggttcagacatacacgtacaggtttgttatataggtaaattgtacattgtggggtattgaagcacagattatagaaattcatatttttagcaaattttattagccctactttaaatatatccataattcaattacttttcaayaaccagctgttactgccttggccgaaaccattgttacttgcctgcgttatttcagtaacttttttttttttggatgggttacagaccagcgtttgctttatttgaacagagtttgaacacaacagtgagttcttaa

SEQ ID NO: 804954 - DNA, 588 bp, Homo sapiens
tacctgtccatcatcaggagaaccacatgaccccactgtcttctgtgcgtattcttgcttctctcatatctttcttatgtcctcttagggcatctgcctggaattcttccctcaacaccacccttctttcactatttacagatcacaatccacactttggtttgtcaggaaacatacctaccccattcctccacttactcctagaaagatatagtttgcctacctggtgcttttcacatttatttgaattgtactgtaaaattagtatctatcttgtttgtttaactttaatgccaccaagggtagaaactattacagtttgctcagcactgcatcgcagtgcctggttgcttattgtaaaataaatgcrcgtgcacacacacacacacacacacacacacgctctgacacaaaataattgttgaatggttaagtgagatgatccatcaatctcccaaaaggccaaaggatttaatgactctaaaagtgttccatgacacagtagaaagaatagaaagttttggaatactggccacctcaaatgtgctgtgaactctaattggattctaaatttgacaataaacgtct

SEQ ID NO: 804955 - DNA, 687 bp, Homo sapiens
aataaatgagacttattgttttgactgctacttcgaaaatcttactagaaaattcaaagtacaaatctaggattaaaaatgagtactaaaatccaataacggcatttccctttggaaattatttaaattttattactaaaagaaagatcaaaagttctgaaacaaccagaaagtctaaaaagaaccaaaggaaggttctcactatacaaattctttcttcatgctgttttaaaaaaaggttcataagaaaacatgagaataactcaagtaatttcttaacccaatacaaaaatcatgttaccagactgatatgaaatgatttctgttactttcaatttgctaggttaamtggtcttagtctgaggaattagcttaaaacataataaagtgattaaaatataaaatatcaataatcaaccccatgaactggcattaggcagagatgatgcaatttgatgtcagatattctaggtttgagtcccagcattgctactacatacttcacagggctattgtgaggattgagcaaattaatacgaaagtatcttgcaattataggcctggcacggtggttcatgcctgtaatcccagcactttgggaggctgaggtgtgcagatcacttgagttcaggggttcgagaccagcctgctcaacatggtgaaaccctgtctctactaaaaatacaa

SEQ ID NO: 804956 - DNA, 662 bp, Homo sapiens
gtttaaaatttcttattcttttcaatgtctgtattgtactttgttgtataataacaatttatctaatcctcctgttgatagatgtttattctgtttttttatcctaaacagtgctacactcaattctctctcctttctctgtctcttgtctgtctctccctctgtgtgtgtgtgtgtttctatttgtaaacctatttyaataggtttaacacccagaaaaagaatgtggtggttcaaataatataaacatttaaatttttaataaatattgcttatattccaaaagggtgagccactaacttctcaacaggtgtctgtttttgctttttcatcttttttttgtttttttgagacagcatttttctctgtcaccctggctggagttctgtggcatgatcatagctcattgcagcctccaactcctgggctcaagcaatcctcccacctcagcctcctgagtagctgggactacaggggtacaccaccatgctcagctgccttttcttggttttagttttttgtagagacaaggtcttgctgtgttgcccaggctggtctcatttgaaactgccaggctcaagcaatcctcctgcctcggcctcacaaagtgctgggaccacaggcatgagctaccgtgttcttttcttttttcattcttatgg

SEQ ID NO: 804957 - DNA, 575 bp, Homo sapiens
aaaacaatcaatatgtattaattttaaatcattcactttgataaaaagttgttttcacatcttccttccttttattgaaaaaaaatttcagaaaataacagttcataaaagacacaaacaaatcaacaggtatataccagtggaaaacacaatatgaaactaaaaatgccattgggcttttttttttttttttgagacggagtctcgtactgtcgcccgagctggaggacagtggtgtgatctcggctcactgcaacctctgcctcccgggttcaagcgtttctcctgcctcagyctcccaagtagctgggattacaggcacccaccaccacacccagctaattttttgtatttttagtagagacagggtttcactatgttggccaggctggtctcaaactcctgaccttgtgatctgcccaccctggcctcccaaagtgttggtattacagacgtgagccacagcacccggctgccactggcttctttaattggttaagagcacaaaatgtaacaggcagaaggtctgtttcaaacaaattaaaaagctatgtgttttttaaattctccccaag

SEQ ID NO: 804958 - DNA, 561 bp, Homo sapiens
aacaatcaatatgtattaattttaaatcattcactttgataaaaagttgttttcacatcttccttccttttattgaaaaaaaatttcagaaaataacagttcataaaagacacaaacaaatcaacaggtatataccagtggaaaacacaatatgaaactaaaaatgccattgggcttttttttttttttttgagacggagtctcgtactgtcgcccgagctggaggacagtggtgtgatctcggctcactgcaacctctgcctcccgggttcaagcgtttctcctgcctcagcctcccaagtagctgggattacaggcrcccaccaccacacccagctaattttttgtatttttagtagagacagggtttcactatgttggccaggctggtctcaaactcctgaccttgtgatctgcccaccctggcctcccaaagtgttggtattacagacgtgagccacagcacccggctgccactggcttctttaattggttaagagcacaaaatgtaacaggcagaaggtctgtttcaaacaaattaaaaagctatgtgttttttaa

SEQ ID NO: 804959 - DNA, 540 bp, Homo sapiens
aaggcagtgaatttttaggtggggtggaaaaatcagcagtagggtgcacctgtcggcacttccagcccacacaaaacatggctggacctcctagagacacaggtggcaaagggttccccttagtgccaatacctcctagtgtgatagatccaacaatccagccttcaagtccactgaagaaaacactcctcccctcagaccatgccagctacaatcccctgggtgcccacttgaagactcaccatgacctatgccagtttcccagcctggctcagaggaggttccacatggggcccagcacttmtgaactcctagttcctacaaccagcttcagtaatcctttccaggtggacctgttctctgaggtactagaaccactgtctggagcagggcttcataaaccttagtgtgcacagaaatcgcctggggattttgcttaagtgcagatactgattcagtaggtttggaggaggcctgtcattctgcgtttatgctcagctcctaggtgagctgatgctgatgaccacacataaggagcaa

SEQ ID NO: 804960 - DNA, 592 bp, Homo sapiens
tttaaccattttgcatgggacttttcttatgaagtgtattgcatacctcccttctcaaacacactacacagacataatgaaacctttctttttctgattcagggtcattaataaggaacaacaattgcatattacgctgtaatatgaagagagctttcaggaagtagggaaatgaggatatagagccctttgcccctgcctgaagtgattttaaaccattactttattaggccctgtatctaaagggtaggtttctctgcctcctccctcagggttgtgctgtggtgtcactatttatttcagtcctagtgcccayctcaagtagctcatttctttattcttcatccagtggaggacttcttaagaggtgtgatcagagaaccagaagttcagcttattataatcctagcaacaattaaatatatatatctggggtgttcctctaagagatatttaatgaatggactaacatcgctctttctacttagatttttttaagctgctttttgaggtcttagccatggttcacacgactgagattgctgaatatgtcaccattagataagcatgtgagaggtggggaaggaactag

SEQ ID NO: 804961 - DNA, 627 bp, Homo sapiens
cacttctgtttatgtagtgttttcaaaaatttgaattagttgccagaactttttaaaaatgaggtcaaagaaaaatcttcatgttggctttcatatatctatttcgatacttagaacttgttaaatacaaaaaaaaagtttttaaattggaagatccaacatgggaataatctcttctcatttagggcaggcccagaccctgtgatcagccacaggccatctctgtagcttcctgcactaatgtcacctgcctggtttctaggcatccgaatataccacccaggcctggagcagtgttttctaaaagtcacttatttgggtactgcttttatgctgttgccatattcacataccatctgtcctattactcacttagcatttttcaattcatttattttcttaactttatttaacatagaaattcaatatcactatgaaataatgatttgctatatctaactatatttytccagtttactaaaataaatacataatttttgaaatagagtctgtctatgtataatctaaaataatcttgggaactatactttagaaaacactggagaggagaaagcccaaatttctgaaccaggagtttaaggatccaattgcccttttcaagtaagg

SEQ ID NO: 804962 - DNA, 601 bp, Homo sapiens
atataaatgagacagggagaccaattggaagactgtttctttagccagtgggattagatgaaagaagagaacctacactaaagcaaatgccaccgcttttgtataaaggagggaagacattccaggacattataggctggttctattgaccacttgtattttaccttgtaagggagaggcattgagtttcgaccttggagaatagatggatggtgatatcactaattacattrggaaataaggaggggaagttagttgttgagctgctaatggaacttcccagtggaagttagttgttggcagttactaataggcagatgggtaagtaggtcttgacttggagatagctctgaatttgagacagttacctggtggacagcatgagtgtgggtgtaacagagtagcaggtggagcttagagtacctgaggagatgtatcaaccaagaagcaaggagttaaggatggagccccaacgttcagaagacagacgggaaaaagtagagaaaacttaggaagatgattacaaagaagctgctggcattggtcattaggaggtcactggcgccctcattgggagcagtttccacccattggtgcaggc

SEQ ID NO: 804963 - DNA, 508 bp, Homo sapiens
ccacacgtggtggggtgggaatctggctttgaatttctctcagtgtgggtgtcactgaccacttatccaaagagagaagagcactgatgtatccaagagcttagcaagaacatctctttggtggtttgtcacccatccgaaagaagttcrgatgactagaaccgccaacccatcacctgtagtgatccttgtttcttgtggcctaacatgtaccaatgatgcagccgttcgagttgccctgaggctcctggagagtaagaatggaaagcctcttgccatgttctccataactttggatagggggcccctgaagattcttaagattatcccaagagaaacttttggaaacctctgttggtagaggcaagtcaaggaaagaagttttatgttggtgatcagagaaaggccaaagagagctaagaccgtgcagaccaacctcatgccaaaagctcagtctgtagcataaatagctatagtacctttattatctccggcttttcacacagag

SEQ ID NO: 804964 - DNA, 592 bp, Homo sapiens
tactaagagagaatcatgatttcactattttgtgtggaaagatacagcatgtattcagactttctaagctttttggtcaccattcctagtccaaactactaccattgtccaagaaaactgaaggagagagcattaacatttgaatagcacacactgtttccataagaagaaaacataaggcccatgttcgctttagtgtttgaacacggaaccttgggttttttgaacaatgaatttctatttaaataataggtgccccatttggtgtacaatgtcagaagttatctgtgattctaaaytattcgttttcttacttttctgggtgggggaaatagagaaattttaacagtgttagtgaccctaaaaatcattgcactaacttcaacgtgttgagggattcagagaatccgtaagtcacaacgttaccctgcaggttgtgaacttcattttctgagcctttcaggttttccctcagatggaatatagtataggagagttctttctctcgatatgttcttaataattcctgttgctggttggatcagaaacactgaaggaaattttcaggacttttggtttgcttagattctgg

SEQ ID NO: 804965 - DNA, 592 bp, Homo sapiens
tactaagagagaatcatgatttcactattttgtgtggaaagatacagcatgtattcagactttctaagctttttggtcaccattcctagtccaaactactaccattgtccaagaaaactgaaggagagagcattaacatttgaatagcacacactgtttccataagaagaaaacataaggcccatgttcgctttagtgtttgaacacggaaccttgggttttttgaacaatgaatttctatttaaataataggtgccccatttggtgtacaatgtcagaagttatctgtgattctaaattattcgttttcttacttttctgggtgggggaaatagagaaattttaacagtgttagtgaccctaaaaatcattgcactaacttcarcgtgttgagggattcagagaatccgtaagtcacaacgttaccctgcaggttgtgaacttcattttctgagcctttcaggttttccctcagatggaatatagtataggagagttctttctctcgatatgttcttaataattcctgttgctggttggatcagaaacactgaaggaaattttcaggacttttggtttgcttagattctgg

SEQ ID NO: 804966 - DNA, 552 bp, Homo sapiens
cgtactgccttatttctgtgtaacctcgcaataagctaaatgcttttaatacctttgaagtaaattaaaaatggccattattagtatgtttgcaaaatgaacctagaaaaatgtgaccaagtagataaagaaaccttaatgaatgagaaggttacrttaatttttctctttgacaagtctttgcttctgttttttagtacattccatcaagtaacaataacactcccattcaaggattttatatctattaccgaccaacagatagtgacaatgacagtgattacaagagggatgttgtagaaggtaagtcccctggcacactggagtccctgtaaaggcgctttggagaaagaaggtttatgaatataaaatgcatcatcccaaattaagacagtacaaaatggaatggtgtatgtgttattgctgttgaatttgtcccaaagaaagccaccttttcccgcttaatatatgcagcaccttatattctggttgcagaaacttgtacaaacatttgggggaaatatgattaatcagtagtagttcatctgaaag

SEQ ID NO: 804967 - DNA, 605 bp, Homo sapiens
aattgtgtgagtgcgtgttgaatcatgaaaagagaagtattaatctgaaagggatggtgatcatttgattttctaaatggttttaatgccattgcctttaattgtgtgagtgcgtgttgaatcattaaaagagaacattaatctggtcgtcccagccatattaatcagattaaagtcatcctactttgtgacctgataatgtttaaaaatggaaaattctcatggtggtgttcattcagtcatttattcaaaagataatcatcgtcttctgtataccaggcactgttctggacagtggagatgtaatggtaaataaaataaacaccacctctgccctctcaaagtgtgtagcttagtgagaccacaagcaggtgtactgagactacacacctgggcgagagcacacagtaatgygggcagctaaggaaaggagggacacctaatccagccttggcaagctctcctaccttcgaagaatttatccagactccaacaacaaatcctgtacagtttggacactctagtttctaagagatactttactttttctaaatatatctggtagatgtgcctctggaaatcagttttgaggcagtcatttgtat

SEQ ID NO: 804968 - DNA, 635 bp, Homo sapiens
aacaaatatactgccagcacaataaaacctaaggagtgacggcttggtttctctaaagtgctattaatactggcaacagaaaattctatttttcactccttttgtggaggaagagtgcagagcaaacaacgtactacttttatktccaaaatgaagtcagattcctggtaaaagatgggtgtgtttttgggagaagggctgcactgcagtagagaaccaacagaaaacaggactgacagtgtaaggttagttctctgttagtttaaaagagagaaagggtgtcccagaagcatcctccatcagagaaaacaagaagctagtgaggaaataatgtagaagaaaactaattaagttcactgagacaacttcaaaatattgctcctggaacagcagtgtttatctagtgagtcagactgcggactgatgttcagggtgtgatctggtgcctgctaatgcagacagaaggactcggcaagtggagataattaactgtggcttgaggtagtggagaaggacctttttatcattagaagtttagtggatcctccgggcagttttccactgggaagtgggatctggctgtaaaagagtttaaatgccacatgcctcatacagaagcatgagaaaaacgttaa

SEQ ID NO: 804969 - DNA, 573 bp, Homo sapiens
tatatcatttcaacatgtaataataaaaattattaatgagatattttacattctttttatatcttgtctccaaaatctggtatatatacaattactgcacatctcaatctggactggccacatttcaagttcccatattgacgtggctggtcactacaatattggatagcactgatctagatgaagtggaaatgccaactgcataatcttcacttacatggatttgcataagagaggtgcctgattatattaatatttcagaagtcagttctctacctctcttactctgtttggttttggtctggttcttccttatcttcatctggctctgccagtctatttactgcaaccaggaaaaaagaattaaatatcaaagtaaaaaataatgtgagaaaagcaaacagagaagctgtcacayacaacagttctcacagaatgctttacctcttggtctccaaaggcttggtaactagcatgttctcagggctctaaggaggtctcaaccccaaatatttccttccctattacttggtctcaggaccggaaattccatcgtaggagattcattgacac

SEQ ID NO: 804970 - DNA, 493 bp, Homo sapiens
atgtgtctctgtgtattacttttatttcatttttcaaccatttaaaaatggaacctgggtcagtgacatgtgctgtcatcccagtactcaagaaactgaggcatgaagatcacttgagccccatagtttgagaccmgcttaggccatatggtgagaccttgtcttaaaaaaaaaaaaaccaacaacaataaaataaaataaaagtggaaggaagggccatttttagcttgcaggctggatttggtctgtggcccataacttgtcaagccatgtccttctatggggtttacagttcatataattctttactaagtcatttgcagtctaaattgttattttttatatctaggtcttgtgtctttaattgggttgtgagttttctgagggaaggcacctcatacttgtttgtaaatgctctaaagaccaagttcattggtgaaaagcaagtgtgataaatgttgattagaagaatcagttttgcccacgatgatct

SEQ ID NO: 804971 - DNA, 620 bp, Homo sapiens
ccttatgcttgcctgtgagcctatgtttcaagggcagaaatcagtcccaaactctagccaagagcagtcttcacctgtctgttcccaccttcatagggtaggaagagcagttatgtcatatgctcagactgaggggcgagagaccagaaacctttttaagtgccacacctgtttctgtagtaataataaagaaatgggctggagatgctgaggttagggactcaaactccrtatatcactgctcctacatctgtgtctcatttgtcactgtcccctgaaagtcagagggaagcccaagaccataagacatcaggaccagacaagatcagatgttctgctgaaccaaggctggaaccttgtcacccaaccacacatatgctatcacatttggagcaagtagctttttgtttaatatgtagttttaaacaataaatatcctcttatttaagtgacaggtggatggaattgttactttacatttaagaaacctcacaaagaacaactgggcgctggtggctcacacctgaaatcccagcactttgagagactgaggcagggggattgcttgagcctgggagaccaatctgggcaacatagaaagatcttatctctacgaaata

SEQ ID NO: 804972 - DNA, 630 bp, Homo sapiens
ctctgcgagctcctgtttattgcaccagctgcgctcaaaggaagaaatacgcagcttattcagtcccctattggtgattcaataaatacatttatacattaaataaatgcaaaaaccaaataaataaaatgttaaagtaacaaaaaataaaattagtttgaaataagtgtaaatattaaaagaaaataattttataacatttgaatatatttatataatatttaaaattaaaatatatttaagataaaaataataaaacataaatgaaataaaattgtgtgcatcagtagattattttcagtattcagtgtatcagtagcctattttttaatattttgctgtgatatccaacgctacagtgaatatccttaagcacacttgcatattggatggaaaatctaatcttcraaggctgagcagagatacaggagcaggaaaactatttgttggattctccaacatgagggccactgatgctctttacaacagcagcgttggtgaagtgatggagctgaattctgattgaagctggtagaaaagttggcaagttagggtgtttttggctataggtagcagaaaatctcaactgatttaaaaataaggaattttctggttcatattacataaaag

SEQ ID NO: 804973 - DNA, 615 bp, Homo sapiens
tagttctaatagaaaattattgatgaaaccaccaataagactgcacagtccctttttgcttaaactgacatcttctcccgtgaattatacccttctctctcaagggtgtttcttgcccttggcacagattctttccctcatcctgtgaacatggctgctctgtgaaatacatgaaggagcacaaccctaacaattgttgcaacccataactccttgagcatcacttttctytttgtcatcagccttattacttaacttggatcttgaccttgacctcacccccttgtagtacattttcaaacattactattaacatccaccattttaaaaaagtcaaatggcttttcttcagttcacattttcatcagtcctttttagtattcaatgctcagtcttggaaaccctcagcttggagtttctgcactttatttttctccctgtacctttctgattatttcccctcctttgctggtgtctccttccttcccttcctcttgaattttgccattcaccaatgtcctgttttgagtcttcacttttaatctctggccactatttctccaggacagtctcatctattcccacaacttcacccaacatccccacaaaaatgtc

SEQ ID NO: 804974 - DNA, 610 bp, Homo sapiens
acacctgctaccctgggtatgtgaacagtgccaggaatacagaggtaaacaggacagagcccgattcctgtcctgatagagctctccacacttcagatccatattcacctgacagaatcttccatatccacgtgaattatgctcttataaactgttttattacatccttagtaaatctatgaggtttcactgatgagaaactaaagtgtagttagcataactacaaaaaattattggatgccacagatgtcaaagaacttggagatcaattagtctggtggttcctttcctttctgaatataagtatcaatttttaatttataaacaaaacagaattatacacaaacacagagctatgtggaccccacatattagtaattgytcttttttgcatctgttgactaagacaatgcctataaactactttgaattcactacgcttttaaatacatgtctattacagtaatctcaataacatctaaattaatttgtctcacagtgacaaatgtgtggcattggctgacgtatggatttgtgtattggacaataattccaagggcctttaaaaggcaataaaggcaaaaatctcacccatctccttcatgtcctc

SEQ ID NO: 804975 - DNA, 627 bp, Homo sapiens
catacatgagaatgctgaagccaccagcataactgtgcaatgttatttttaataaaacattactatccacgacattaaattaactctctaattccagttttaatgggtctttagtttttgttttgtatttttagtagagatgggtttcaccatgttggtcaggctggttttcaactcctgacctcaagtgatccacccgcatcagcctcccaaagtgctaggattacaggcatgagccaccacgcccggacgggtctttagtttttttgggtgtgtttaaaattattttgcttttaaaacttatgagccatatattatagtaaaggcttaactagttttatattttacatgtttataattatcataatataatttaactcctaactaaaggaggcctttttttttttttaactatttaaatctttttattcatctttgttgaacagytttctccatctggtttcgagaattcttggctaaaaattatggggttcagcctaatcattaaaaaaaaatcttgtcaaattctgccatatttcagaattgagaaacttgtgaagtaaaaataagagtataaattagaacaatttaactgacctcactgttaacacactgagttaacagtgt

SEQ ID NO: 804976 - DNA, 486 bp, Homo sapiens
ctctgatctactacttcgatatcttggtatttaaaagagaagaaaacaatgattttgtattcaaccactgcattaatttttctatttcttaactcttttcaacttaaaacaaataaagtaattgtttccagtcaagagggagaaaactctagcccaggaactgaattcaagcttgaatgcaatccaaatatgggtttsgccactaaatagctgtacagtgtggtatcttcagcaagttgctatgcctctcagtttcaagatatggagtacatgctgcctgttcactgggttggttctcacattttacgataattatttgaaaacagcattagacacaaatatgagttattttttaaactgtgtgggatttaaatgctaacatctttatgtccactttatcagagaagactacagctgtcacaaagaccttacgtactttttagttgggcagggaaaggggacagacttctactttacaatttacgt

SEQ ID NO: 804977 - DNA, 478 bp, Homo sapiens
tgagttattttttaaactgtgtgggatttaaatgctaacatctttatgtccactttatcagagaagactacagctgtcacaaagaccttacgtactttttagttgggcagggaaaggggacagacttctactttacaatttacgttccagtacgtgagacattagaaaacttctaagttccttcctctaaaggtcaagaagacagaaactcatgacagatggtcctcaacttcyggtgggaatacattccaatgaaactcactgtaaagtcaagaactgtaaattgaaccattgtaagccgggactgcctgtacattattacacagtcattaaataacttacccaatatttacaaagtacctaggatgaataatacattaagcaatgttgctgcttaatacagcaatacctaatgtaaaaactaatatctgctggcagtgattccaaaggcagataggagatggaatggagtaaaaaa

SEQ ID NO: 804978 - DNA, 553 bp, Homo sapiens
atcattcctgtatgaaatttagaaaggaactattgtggcaaaatgttacctaagcagattttttttcagatttatgagcaaattcgttatgtggtgaccattctccattggaatatatatgtaaaaacactgtgaaacacttactgttgtggcagtttctccctaccttcctccctcctaatgccttcattaattgaaatctcattcattaataaatactgctctgtggctgtggaaaagaaacttttgttaacactgtgaaactatttctrttttctcaatgcctttgaaaatagcaattagtatggaaaaaaataaaaagtcaaagatacttagacatgaaaatatttgagtgttctcatataattgtttctaaatatggtataatgtttacttgagcaaaaattagaaaccatatgtgagtatttccacattttcattcatttggtttatgtagtgctgttaaatgctaatacatttaatatataagatctgtggtttcttgttaatattttataaggatattatggttttatggttaacatcattttga

SEQ ID NO: 804979 - DNA, 573 bp, Homo sapiens
tgtcgaacagcatcaaatattcattgctaaccatctttgagactttgcattggaaggtgttacggatcgcggatgattaaaaaataaagtcacaaaggggccagcagcctgcaaaaaagcagtgctcccacttacttgaacatctcgctcctctctatggtggcgagccaaaagctgtaagcgtttgcgtagtaattgcaggtcccacggccgtgacactcgatgaatggcgcacttctaaactcctccaggcaggagccgggrgacgccagggcttggccagagccttctgcaccagcgctggtgtgctgcagaacagatgcgagccgtgagtcagaggttccctccccaaacaccaggaaagagatcgatccttcccaggaaggcgccagggtgttccctctggaaagccacacactgcagcctcatgtggtcaccacaggacacactctgtgcccaaattatcgggctggcccgcaagccagtgcctgcatggctggggccccatggtgctcaacatggccccagggatcgtctaatggctgcttcccaaataggtgaccagcccagctt

SEQ ID NO: 804980 - DNA, 518 bp, Homo sapiens
atgctggtctcagacacacagcttctctgagacctgtttttggactaccaccagggcatgccagagctcctgtcaaggagctctgaatcaaggtcaaatgtcaacattgccaagaaagtaaacaggaaacctatcaatgaatagtctttttctacctgttgtgtaaamgaagctaaaaaaagaaacccacaaaagttgttacttttccttctagttatcaggcatggttctgagcaagaaaagtctcaaaacagtcaatatctggcagccactcacacaggtgaagtattgcctgcattctgaaaagtgccattctggaagtgtaatgaatgatattctccattttaagacctataagttttcttatagctcaaaaaaaatcaaagaaaactgtcagtagatattttaatgtaaggggatcaaagatctaagattttcctacatagaaggcaccttccagccctctggtccatggtcccacgtggcatagctctctcactaaattgtcatctgccagg

SEQ ID NO: 804981 - DNA, 585 bp, Homo sapiens
caataaaggaaaggtctctttgtttggcacatcatctcagtgggtgggagaagaatctgggactacatttaagcaaacaatcaaacctattttcacaaactcgagttttatttttttctctttttatctcatacattgtgctaagcttcactttatagggaccccggcctcatcccccatgcttcagaaaagcatgcttttgggaacagataattctagaagcatgtcactcacctgacaaccccggtggtccctgtcctccagggggacccctagctccaggggggcctattcctggaactcctggagaccccacggagcctggcaatccaggaggtcccggttcacctggagaagaaaaattgagagtaagctgtacaggagcagtggcacgtctcccggcctaggagacccaygcacacgaatggccccagcaacggaaagccacgagctctaggcctctaagatttgcatcgttcgttcaacaaatacatatcagatatactcggtaggggctctgggaatgcaaaaataagcacatcctgtcctcgaaaccctccagactgatctgcatgaagttacctc

SEQ ID NO: 804982 - DNA, 574 bp, Homo sapiens
gctctagctcccatccccaagggcaaggacgtccttgcaagtctcctcatttcccttccctcctcatgctaatacacttgacacaagtctcacagatgaatgccaccaaaatccagcgaatgggataggtctccctcatctctaaacttttagaccctacccaaggcctgctagaaaatgaggtggaaaacacttggccttttgtgggcacaggcagctgccccaccagtgtccttgcagcactctggccttcaggcagccctgtgcagggctgaagccgacacctgggctgttctgctggcacacagacctcctccgmgggaagtgtgctcctgctggcttgtccagccaccttccttgtaatgggcttagcgtggtaggggccacagcttctctcctcttaaccagcaagctccttgagaacacagctcatgtctaagtcatccttcaccctccagattgcaagtacagtggcaagcacatagtaagtgctcattaaattgctaccaagtgagtaagagtagcaggcctgttcagttgcatattccccagttctgtggaaaaggagggctta

SEQ ID NO: 804983 - DNA, 610 bp, Homo sapiens
tttcactcagcataatgtcctcagggttcatctatattatagcatgtgataggatttctttcctacttagggccaaataatatttcattgtgcataggtgccacgttttgtttctccattcctctgtcactggacacttaggttttgtccacacctcagctattgtgaacaatgctgctatgaacatgggtgtgaaaatatttctttgagagcctgcttttaattgttctggaggtacacccagaartagaattgtgggatcatgtggtaattctatttttagttatttgagaaacctccatgctgttttccacagtggccacaccctttacattcctgccacagcgcacagggtcccagttgctccacgtcctcaccagcatgcgttgttttctgcgtttttgatagtagccatcccaatgggtgtgagggggcccctatgaaatcgtaataccgcagacatactgtgtatctcctctgtttgtgtattgtatgtatatctgtgctttatacataaaattatacagatttatacataaaaagttatacaataatacacacactcccagttccaccagtttttgctcccttgggtgatattgtacccgtc

SEQ ID NO: 804984 - DNA, 527 bp, Homo sapiens
cactgatgatgcaaacaccactggaagaattggtgagcattccatgtgcagatttttgacttggcttgaaggagggaagagcattctttggtaacagaagtctcttctcaaacactgaatggaaagattgcggtaacaaatcagtctgagttttatctgctgaccacgcccactgtagcaagactgacttcacggtcctcggaaagggagaaggggcaaaactctgactttcagggctgtctccacctttcccacccagatcatcaactaagttccggaagatgcttattctaggaakagattgtgaagagggttccaaataaaaggaacctacgccctaactctgcccacccccacttggctccaaagccggtaagtatgtgggaaaaaatcatacgcaaagacacaaccaccattttaaaaaaatcaaaatttcttacctttctctccaatttcgcctataaatcctggctgccctggaattccaggaggaccctggtcacctggaggtccgggctgacattcca

SEQ ID NO: 804985 - DNA, 565 bp, Homo sapiens
tattaataggactggatcctttgtgggcacgaagtaggggagtatttagatttgcagctgtgtgcagccatttagactagatatctgagtggctggcctcgggctttagggtggggacggcaggctgtctggcttgcccctgagatgtcatgcggcctaaaggaattctgttactattgttgaatggctgaataagagcaaatgagggcgttccttccctctgacacatagtggggaaaagtgcgtctctgcatgtccagtgccctgyggcttggccttgcagccctcatgtctacacctggggtgcccggggcctctcctgcctcttcctaggtgggtggcctctgtgtgaagaaagacaagacaaacagcatctctgtgggccattctccaccctcagcctcaggttttccaaatgccactcctgaattttctggagttttgtgtcgtttccaaacttgtttcgaagaagagctttgaactaatgtagcagaatgcaaagtggaattcttcccagaaacgaattctgtttaactctttgggtttagtggaggtgtcaagtagc

SEQ ID NO: 804986 - DNA, 627 bp, Homo sapiens
ggaaatattagtccctaatgggaataggaattcataaaacaggctcaatatggttattgacataatcagcacacttgcgagccagaacggcatgctgtaattgctccaacgtggttattgttgggtatttcaaatatccagctactttatttatttatttatttatttatttttgagayggagtctcactctgtcacccaggctggagtgcagtggtgagatcttggctctctacaacctctgcctcccgggttcaagcgattctcctgcctcagcctccagagtagctgggactataggtgcctgccaccatgcccagctaacttttgtatttttagtagagatggggttcaccatattggccaggctggtctccaatgtctgaccttgtgatctgccagcctctgcctcccaaagtgctgggattacaggcgtgagccaccgcacctggccccagctactttataaataactatgttttttaaggtttactagttagatatttttaatcaccttaagtcctttcactcacttttacaacttttgaatgtttcctagcaacgcgcatttacttccctcatctacacacaaggcattcctagcctctcctcttctcattccgggatt

SEQ ID NO: 804987 - DNA, 627 bp, Homo sapiens
ggaaatattagtccctaatgggaataggaattcataaaacaggctcaatatggttattgacataatcagcacacttgcgagccagaacggcatgctgtaattgctccaacgtggttattgttgggtatttcaaatatccagctactttatttatttatttatttatttatttttgagacggagtctcactctgtcacccaggctggagtgcagtggygagatcttggctctctacaacctctgcctcccgggttcaagcgattctcctgcctcagcctccagagtagctgggactataggtgcctgccaccatgcccagctaacttttgtatttttagtagagatggggttcaccatattggccaggctggtctccaatgtctgaccttgtgatctgccagcctctgcctcccaaagtgctgggattacaggcgtgagccaccgcacctggccccagctactttataaataactatgttttttaaggtttactagttagatatttttaatcaccttaagtcctttcactcacttttacaacttttgaatgtttcctagcaacgcgcatttacttccctcatctacacacaaggcattcctagcctctcctcttctcattccgggatt

SEQ ID NO: 804988 - DNA, 627 bp, Homo sapiens
ggaaatattagtccctaatgggaataggaattcataaaacaggctcaatatggttattgacataatcagcacacttgcgagccagaacggcatgctgtaattgctccaacgtggttattgttgggtatttcaaatatccagctactttatttatttatttatttatttatttttgagacggagtctcactctgtcacccaggctggagtgcagtggtgagatcttggctctctacaacctctgcctccygggttcaagcgattctcctgcctcagcctccagagtagctgggactataggtgcctgccaccatgcccagctaacttttgtatttttagtagagatggggttcaccatattggccaggctggtctccaatgtctgaccttgtgatctgccagcctctgcctcccaaagtgctgggattacaggcgtgagccaccgcacctggccccagctactttataaataactatgttttttaaggtttactagttagatatttttaatcaccttaagtcctttcactcacttttacaacttttgaatgtttcctagcaacgcgcatttacttccctcatctacacacaaggcattcctagcctctcctcttctcattccgggatt

SEQ ID NO: 804989 - DNA, 632 bp, Homo sapiens
cagatgttcatgagcctcctgttaggcccctggggaatgcgtcctggccttcaagactgactctcgttgtaccgccaaatccatctcctctgctgaggctcctctacacccggagcgtttttatacaggttgcatgggagggttccaaatttttgtaggatatttactacaaactaaatccaaatattacaggcaataattaatttctcagtatcaatttctatgcactccattaagtatgtaaatgttctgactgtaggcaaaataacattcaaaaacccctactttcagtgtggtactccacaccagccactcagaacaaatgctggccttgaacctgctctcctgctgttgtgaccagttttaattccacgactgctacgtaatccatacaacacagttcaaaactctgcagtataaagataccgggtgcyttaactttggaacagagattgcaaactggtgacccgcaggccagattcgggccacagatgtaccctgtttggcctgcaccatattctagaagtttttgaatgaatattttaaaattgaggccccaggcttctgattccttcccagacctttaaaagcagggacccactgggatccttttgcagggatgtgcgttttct

SEQ ID NO: 804990 - DNA, 681 bp, Homo sapiens
ccacaccttccatggtggaaggatattgtctcctaactgtgggatcccagagggcagagaccaagtccaggacttctcccatggtgcccagaccaagacctggagacactccagaaagacgtgatagattcagccaaactgagctggatggatgaatgctcctccaggaggcagtgaggacctcattgacagaagcgaccaggcagaggctggctgtggtgctgtcattctaggagagtcagtccagcacagagctttggaagagcataggaagtcgactaatggtccaggctctaccaccttctagctgtgtgaccttggatggattatgtaacttctctgtgcttcagttaataataattgtatccatttcaaagggttgtggggattaaatgagataatgtasgtaaagtcattggcctaatttgtaatagctactcaataaatacttagctttaaaaaaagtagagtcctgctcgagatcacagagaaaaggggatggcaaaacaggtcagggtctttgtagtaataataaaaggaagaaaagcagaaaccaaccactcccctagtcataagcatgtagatagatgataccacagcctttgaaatatgtcaatcaatcaagcaatgtcaagggcacagtcagcatttaaacgtagctctgtgtcttggtcttacagc

SEQ ID NO: 804991 - DNA, 556 bp, Homo sapiens
ggatcctgtccccctcctctaagccacccctccctgccttcctgcccttttctcttcctcttcttcccctttccctttccctctgacaagaaggagcatcagtctgattcagcgcctgagaccaggggaccctgctgccatytgcagaggggaaaatgagcctcatcgacccaaataaaataaggacacacagggggagaggctgctacaaagaaaaacaaggcgtgggtttcggaggctgttgcagggaagcattggggtcaggaggcacagaggcccctatgttagcttactccaagcctcagatgggactggtggcctcttcctccaccatggtcaaatgcaagcctaagagggggcctgtaaatagagagaagcagatgacagacatcaccacatattaaaatgcaagcgaccggagcgggctcctgccgactctgcagtgcgccttggagatggctgctagacccggttggattcgatgcacgggcagcccgtcctcctgtcgcccagctatttatttattcaaaacaaacacatgctcaaactctctttt

SEQ ID NO: 804992 - DNA, 635 bp, Homo sapiens
taacccccgcctcaccagccagggcaaggtccctggcttcaaggagcacagcaggatggtcgggggaccagttgtgatccgcacatatgcagaagggaaattactaaaacctctgcctctgaacacagctcagttgcatgttctttgtaggaatggggtagggatgaaagaaatgaagggctgaggggtgtgggaatgggactcacccctggacaagtcctttatatgacctggacctcagagactccccctgaaccccagctgtagatatccacgattgtarcctgattttgactaaagcagcgtttcccacccagcgttatgacttcactacatcaccacctcctcctttgcatgccatcaagggtgatgtcctcttttccctcatttcttctcctttctcataaactctgccctttttttgccttctccctcttcaactttgatcgatctcctttgccctttctcttttccttcccatctcttctgttttgatccctctgatctccctttttcctttctctttcttcatttcctttttcttctctcccctcctcaacgaatattattctgagcctcgtcccctccttcccctgacccctgctgcaccctgggaaatggagaattcaccagtg

SEQ ID NO: 804993 - DNA, 640 bp, Homo sapiens
cattgtatgaccctcttctgaaatccccaaatcccctttgtccttaattttctccaaagtccacttattatgtggcactccctattttctctgcctccctccaagtaactccatacttcttactctccgcccataaaactctctttcatttcagttctacggagtcagaatttrtatttaaaaagatctccagatgatttgtatgccattccagtttgagatgcactgaactagatggcctctctaggtgaggtactagtttcctgccattggctagcgggagttttctgctcatcggagtctgtttcaggacagccttttgcctccctgaaaggaggggttgcgcaaagcatttgccaccagatggcgccaaaggtattccatcagagatgatcccgcagacactacactctggatgggtctttttctttttgggtgtcaaccgtcttctggggttatttgcaggttgaataactgggcttcctcacagaaattcggtgctggatggggattggagatcatggcatttaacagttgtacagatgaggaaattgacagagaaaggtggcttggccctgtcagtcacccaaagcaaggaaacctgggggtttccttcccaggtttgcttccatcccttcat

SEQ ID NO: 804994 - DNA, 640 bp, Homo sapiens
cattgtatgaccctcttctgaaatccccaaatcccctttgtccttaattttctccaaagtccacttattatgtggcactccctattttctctgcctccctccaagtaactccatacttcttactctccgcccataaaactctctttcatttcagttctacggagtcagaatttgtatttaaaaagatctccagatgatttgtatgccattccagtttgagatgcactgaactagatggcstctctaggtgaggtactagtttcctgccattggctagcgggagttttctgctcatcggagtctgtttcaggacagccttttgcctccctgaaaggaggggttgcgcaaagcatttgccaccagatggcgccaaaggtattccatcagagatgatcccgcagacactacactctggatgggtctttttctttttgggtgtcaaccgtcttctggggttatttgcaggttgaataactgggcttcctcacagaaattcggtgctggatggggattggagatcatggcatttaacagttgtacagatgaggaaattgacagagaaaggtggcttggccctgtcagtcacccaaagcaaggaaacctgggggtttccttcccaggtttgcttccatcccttcat

SEQ ID NO: 804995 - DNA, 601 bp, Homo sapiens
catgttaagaaatttggggccaggtatggtggctcacgcctgtaatttcagcacttcgggaggttgaggtggatggatcacttgagccaaggagttccagaccaacctgcgtaacacagtgagaatctgcctctacaaaaaataaaaaacttagccaggcatggtggtacgtgcctatagtcccactacttgggaggctgaagtggaaggatcacttgagcctaggaggatgaagctgcagtgagccaagatcgcaccactcttctccagcctggatgacagagtgagaccctgtctcaaaaaaaaaggaaaaaaaaaagagaaaaattttggcagtgcttatgattctgtactgaatgatgtgatgtgaacagatttcttaacttcacacagaacagtttttgtyggagaggtcaagagagctctgttgggagaactacatgtacttgtagggtgtcttaaagccagttactgtgagttttgttttgcttgagggatgattctttgtgactcctgggttctgtaaaggagttatgtgataaatacattttaccccgttgctggaacaatctgtgggtgatggttaagaactcaggtagga

SEQ ID NO: 804996 - DNA, 612 bp, Homo sapiens
gtattatatctaaaaagtcattgacaaacccaagggcatctagattttctcctatgttatcttctagttttacagtttgatattttggtctgtggggtattttgaattaatttttgtgatgggtggaaagtctgtgtcgagattcacttctctgcatgtgaatgttcagttgttccagcaccacttattgtaaagcctatcttgtctccattgtattgcctttgcccccttttcaaagattagttgattgtgtttatgtaggtctatttctgggctttctattctatcctattgatcctctgycagttttttcaccaataccacaccgtctttatcactgtggctttagggtagttatagtaatatcataagtcttgatgtcagtcctccaattttgttcttttctttcaatcttgtggtggttattgactgtcttttgactcttcatataaacattggaatcagattattgatagccacaaaatatcttactaggattttgattttgattgcattgaatctatagatcaagttgtgaagaactaatatcttgactaatactgagtttttctatctatgaacatggaatatttctctatttatttagttttt

SEQ ID NO: 804997 - DNA, 667 bp, Homo sapiens
tcaccaagcctggctaatttccgtatttttagtagagacgggatttcaccatgttggccagactggtctcgaagtcctaacctccagtgatccactcgcctcggcctcccaaagtgttgcgattacaggcataagccacagcacccagcccttagctaatttttttgtagagatggggtttcgccatgtttcccaggctagtcttgaattcctgggctcgagtgatctgccagtctcagcytcccaaagtgttgggattacaggcatgagccactgtgcctggccacaatatttaatatgtacaaaacagtgtaagtaaaatgcaaccaatacctgtatacttaccattcaagtaaaatattgctccacatgttaaacacccttggtttaactcagcttgataatctgcccacatcacttattcctgccaaacataatcgttgtgctgaatttggtgttttgcattcccatgctttattttaaaaaaaaaaaaaacagctttaactacgtgtctatccctgatgtatccctaagtgtaatatctaattgttttacatgttttaaaacaacataatatattatattgcacatattcttttgtgacttgcttattgtccccactgaattttgtcagcacatgtttagaaataaaataaatttgaatccc

SEQ ID NO: 804998 - DNA, 627 bp, Homo sapiens
gatttaaattcaaccctgtaatattagtaattacattaaatgtaaatggactaaacaatccagttagaggcagaaattgtcagtctggattaaaaagagaaaacataatctgaaaacagaagggtagaaaaagatatgtagatatatcatgtatattagttatatgtaactgcaggataaattatccccaaaatttagcagctaaaaatgacaaacacttatttctctgttttttctggttcaactgggggaaatttggttccaagctcactccccaggacaagagagtgagatagagacagaatacccaataaaaagctgtcattttttaaaaattgattttgttttttacagcaatattaggttcaccgcaaaatcaagcagaaggcctacaytggcataccattatcacccaaagtctgtaatctacgttaagattcactcttggtattgtacattccatggatttggacaaatatataatgacatgtgtccaccattatagtactgtacagagtagtctcactgctctaaaaaatcctctatactccacctatttatctctccctccccgacccctagcaaccacttatcttctttacttcttccctagttttgcattttcca

SEQ ID NO: 804999 - DNA, 528 bp, Homo sapiens
agccatatttatagcaaacagtttttcttattttcttacaactctttctgccttggttttgtgaattttcattatttcaccatcttactttatttttatttttttattttttattttttggtgcagtggcaagatttattaaagcgaaagtgaaagtaaagcttccacgcggtggaaggggacccagaagggatgctgtttgtggcttggctgtcttatgcttatatccccttatgacccctcccctttcctctttttgtcctatagaattagcttattttctatccacytgtgggttggcaggcctgattggtttaaaacatcaggctgcagttagagcttaaactccctatataattggttgaaatttcaatcccttatcttgcagctttgactcattttggcttaggggaaagtcccctttgattggttgaagttttaattcctttgcttgcagctatgatttattttggctcttgcagctatgatttattttggcttaggtaacgtccccttagggaagtccct

SEQ ID NO: 805000 - DNA, 528 bp, Homo sapiens
agccatatttatagcaaacagtttttcttattttcttacaactctttctgccttggttttgtgaattttcattatttcaccatcttactttatttttatttttttattttttattttttggtgcagtggcaagatttattaaagcgaaagtgaaagtaaagcttccacgcggtggaaggggacccagaagggatgctgtttgtggcttggctgtcttatgcttatatccccttatgacccctcccctttcctctttttgtcctatagaattagcttattttctatccacctgtgggttggcaggcctgattggtttaaaacatcaggctgcagttagagcttaaactccctatataattggttgaaatttcaatcccttakcttgcagctttgactcattttggcttaggggaaagtcccctttgattggttgaagttttaattcctttgcttgcagctatgatttattttggctcttgcagctatgatttattttggcttaggtaacgtccccttagggaagtccct

SEQ ID NO: 805001 - DNA, 634 bp, Homo sapiens
ctaagcctgcttcacttccaggccagtatatggggaggaaggaaaagtccactgacatttatttcagcactgactgcaccaggcacagggccaggtgctttcaaatgttccctcaatgaaccttttcaacttttattttgaaaaatttcagacatacagaaaaaggaaaagaaacttcaatgaacagccacatatccatcatctggattcaataatgaacatttcgccatatttgcttcatctatttttccgaagtattttatttatacatttattttcaatatctttttattctggacatttttaaacaaacacaaaatgagagactaatacaatgagcccccawgcactcatcaccccttctcagcaaccatcaaattcttgccattctcattactggaatattttcttttaaattacaggcattataacatttcagtcctaaataagggaatatgcatctctaaaacatgaagacattttccttcttaagcacaatatcattatcacacaaaacaaaacgaatccctcatttaattctcacagcaattttgatggtaaagtatcttaaaatatgcacacgcatttttaattgctttatgtatcagctatgattatttctattcttggttcc

SEQ ID NO: 805002 - DNA, 514 bp, Homo sapiens
acctgaggtcaggagttccagaccagcctggccaacgtggtaaaaccccatctctactaaaattgcaaaaaaaaaaattagccgggcgcagtggcttatgcctgtagacccagctactcaggagggtgaggcacaagaatcacttgaatccgggaggcggaggttgcagtgagctgagatcacaccactgcactccagcatgggcagcagcgagactccgttacaaaaaagaaaaaacagatatacaaataaaaatcagtaatattgtctaatttgaataaaaaggaaaaagcaaagtaattwataaaacaatgtgtatttcagcaggtatatccttagacatattcccctaaaaggtttaatgagacagtaggtccctcatgcctctatgagtgtgacagacacaagtacaggctgatattggtatgctatcctggctgctcaaaagccacaatctttcaaagtgttaaacaactctttgtaaagctccagccaaatctaatacttcctcaat

SEQ ID NO: 805003 - DNA, 639 bp, Homo sapiens
gggctccgcagcagtgctttggttaaaatgattcaagtcctgggcaccatgaagcattagtgagggtgggtctgccatgagggcacagcgccctcccaacatttttagaactgaattcaggggatttatattccagagggagaagaaaacttttatgggcttaaaatgaaggggtttttcatgcatgtgtcagcactagcaatgctatgtcctaagaactgaagccaaagcattaaataacatgactgataagattgttgcatttccagagtaggcacaagcaggaaaaataaggatggctttttggaaagcgtcttttcagcagtagcaaccccacatggtcccagcctcctaggagccatatgtctcctctcttccatccctccttttgtagaagtttgatgctctcagggtgataatccyagtttgtgtggccaaaggcacacctaggctgctatatagtaggtttgattagagtccaggggctggatgaggtcatctccccaagcacttcctagaggcatctgaggaggcaggagccttggactcctaaggaacagctaagagccatggagatgggagaatcccccaagcaaaaatgcagccggtatctcttggggtactttcagccctgttcac

SEQ ID NO: 805004 - DNA, 642 bp, Homo sapiens
tcaggagaccactctcttgtcagagttctgccggggtattgctatatgagtttataaccatctctgaagctctctgagcctctgtgagatggaagggtgaacacttgtcctcacacctcctggctatgagggtaaagccaaggagggatgcagaaagggcttccacctccttggaasgggctctctccttccagaatgaggctactgctttctgaagtaagtgatgtcagagagttcactgggatcagaaaagataatcatccctgatacatttttaccttcctggtcactgcccaagactcagtgtaatacctttgcacagcacagtgggtggagaagatcctaaaccaacaaagcttgtccaatagctggacaggctgctcagtggctgtggcagggcagagcaccctgtggtgacccacgtctccagggatgcgtccgtcccaagtaaagtctggagaaacactccacctgcatgagaagaactgccaaagagaccctggagatgatcttcttgattccaggcaggctgtgggtttggttgggttttcacaagcacgggggagattgggttttcgtccaatttgcctccggttctcacattagaagtcaatgggatccaacagaagtctctctatctca

SEQ ID NO: 805005 - DNA, 417 bp, Homo sapiens
cagctacttgggaggctgaggcacaagaattgcttgaacctgggaggcagaggttgcagtaagccaagataatgccactgcactccagcctgggtgacaagagtgagactcggtctcaaaaagaaaaacaaaaaagaaaacccaacagaccaatatcccttatgaattgaggcaaaaatatttaacaaaatataagcaaatacaattcagcaatacataaaaagaatcawacaccatgaccaagtgtggcttcttccaggaagtaagattggttcaatattcagaatcaatcaatgtaatccacagtattaaccagttaaagaataaaaatctcatgattacatagattggtacagaaaaagcattgaaaacaattctacactcatttatgataaaaacttccagaaaaatagaaat

SEQ ID NO: 805006 - DNA, 403 bp, Homo sapiens
aatagattcctttcattcgttctttcaattgtttagtgaatacccaattgtcagttaatttctctcttctcttttccatagtgttttcagatcatcctggaagattttaatttacatatttgtgtacacatattatattttaaacwttctcttgtgatgttaaattattgaaaaccaaatactaccttacatttctttatttttgagacaaggtctggctctattgcccaggctggagtgcagtggtaccttcttggctcactggctccccagactcaagccatcctcttacctcagcctcccaagtagctgggactacaggtgcatgccaccacacccagctaattgttgtatttttttgtagagatgaggttttgccatgttgctcaggatagtctcaaac

SEQ ID NO: 805007 - DNA, 657 bp, Homo sapiens
aatcttggcttctgggacaccatatgctcctggctgtccttctacctcactgctatcctatccagtcttctcttctagacccctaaatgctggggtactccagggctcagtcctcagagctcttctccttttaatcttgtctctaggttaatgcctctcaaccttggcactactgacattttgggttggacaatcctttgttatgggagcctgtcctgtgcatcacagaatgtttagcagcaacccccccyacccactaaatgacagtaacatcctccaccccacagtcatgacaatcaaaactgtgtacagacactgccagtgtcccctgagggacaaagtcactcctggttgagaatcactggtacaggtaaactcaactagacccatggcttcaaacgtcttccagaagatgatgagccccaactagatactctgagcctagactattctctaagctcccaacctgtagatccaactgattcttgatatctctacttggaggtagtactgatacttgtttatgtatttcttgtctacctcccctactatactgtaatctccatgcagtgagggacttgcatatttactatttacccccagtgcctgcagtagtgctgggcatatagtaagtgctcaaaatatatttgctggtta

SEQ ID NO: 805008 - DNA, 614 bp, Homo sapiens
tatgaaggtctgcgtatccatgtagggagggctgaagtgatccttgtcaaattgtcttctagagtttgacattcagctgttaggagttggcattcagaggaaacctggctatgagaaatacttacaaaatgagagctacagaggctgacaggctcacaaacatttcagcaaacatacttaaaaggaaaatataaggctaggtgacctcctgcggagaatgggggtagctctgagagctttcgctatggatggctacaagttatggaaggttgcatatgtcactgttactgattagaagcagctggctcttcagaggactgactcagccctttgatatggaatgtggatgatttgggatttcatgctaatgcttagtatctaasctgcagttcccagattgcgacccagtggttgagatcaacagaaaaatgagtttcccaagtctttgcagaagagacacagctgtggttggagaactacacatcaagactttgtttgcttttgtgaatggcaaataaatcttgggaccccaaaatcactaagccaaagggaaaagtcgagctggaaactgtatcaggcaaacccgcctcctattttattcttaaataagatag

SEQ ID NO: 805009 - DNA, 546 bp, Homo sapiens
ctctaccaaaaaaaaaaacaacaacaacacctttcagaactgataaatgaactgagaaaaattgtgggatacgaaatcaacatacaaaaatagtatttctatatactaataacaaattggctaaaaaagatttcaaaaaggcaatctcatttataataattatcaaaaaaagacttaggaataaatttaaccaaggaggtgaaagatctctataatgaaaattacaaatcactgatgaatgaaattaaaaagratgcaacaaactaatacatgaacagaaaaccaaataccacgttctcattcataactgggagttgaacaatgagaacacatggacacagcgaggggaataacacacaccagggcctgttggggggtcggagggtgagggggtggaacctagatgatgggttaataggtgtagcagaccaccatgacacatatacacctatgtaataaacctgcacgatctgcacatgtatcctggagtttaaagtaaataaaaataaataattttaaaaaattaaagaggatatcaagaaataa

SEQ ID NO: 805010 - DNA, 479 bp, Homo sapiens
ttgtatataggaaccccagcctagaaggcaggtagaacaacctagtggttacaaaggcctggtgtaaagaacaaacttttttctcctactatattctcactcacagcactcaatacttcatttctgacctaatagaagtatgagttttttccccccatacatcaattttctgcccaataccagctgggtgtccwacaatttaatttaattctgacactacctggagttagcatcagatcccacagcttaagggctcagtcccccaagactgaattgcccccactttacatgccgatcacaagtccagacctccagtacttgtgaccaagcagttgtaaattggaggttcccacaaccccttccccaggttcaatcatttgctaaaatggctcacagaactcaggaaactgtttgacctacatctactggttcattataaaggacattgcaaaggaccagatgaagagccagatggaaga

SEQ ID NO: 805011 - DNA, 479 bp, Homo sapiens
ttgtatataggaaccccagcctagaaggcaggtagaacaacctagtggttacaaaggcctggtgtaaagaacaaacttttttctcctactatattctcactcacagcactcaatacttcatttctgacctaatagaagtatgagttttttccccccatacatcaattttctgcccaataccagctgggtgtcctacaatttaatttaattctgacackacctggagttagcatcagatcccacagcttaagggctcagtcccccaagactgaattgcccccactttacatgccgatcacaagtccagacctccagtacttgtgaccaagcagttgtaaattggaggttcccacaaccccttccccaggttcaatcatttgctaaaatggctcacagaactcaggaaactgtttgacctacatctactggttcattataaaggacattgcaaaggaccagatgaagagccagatggaaga

SEQ ID NO: 805012 - DNA, 598 bp, Homo sapiens
gttgctgtgaaggacatgatttcattctttttatggctgtatagtattccatggtgtatatgtactacattttttaatccaatccaccattgatgggcacttaggttgagtccaggcctttgctactgtgaatagtgtggtgaagagcatatgagtgcmtatatctttttggtagaatgatctatttccctttgggtatatatccagtaatgggattgctgggttgaatggtagctctattttaagttatttgagaaatctccaagtggcttttcacagtgactgcgctaatttacattcccaccaacagtgtgtaagcattactttttctctgcatcttcaccagtatgtgttttgactttttaatgacagccattctgactggtgtgagatggtatctcattggggtgttgatttgcatttctctgatgattagcaatgatgaacacttttccatgttttgttagcggcttgaacgtggtcttttgagaactgtctattcatgtcctttgcccattttctaatgggatgatttggtttttgcttgttcaattgtttaagttccttaaaggttctggatattaggcctttgttatat

SEQ ID NO: 805013 - DNA, 638 bp, Homo sapiens
atccattctaattatttcttccccatgtcaccacacttcatgctgcctttatttgtctaactgattgtataacagtttctcaaccttgttttcaaaattaaatattattttcttgacttaatagtttctaaaagatactccacaaatctagaaaactcatttctatcttgaaacaaagattacattaacttctctaacaagtgatcacattgtcagatggtgttgaacctgtgatgaagtaaaagtytcaagaattttctcatataaactctgtgaaaacatttcctcataggtctgtgcagtcaatgttaagtgctataaatccatctagtgtgctctttgatgttagcatttatcatactattttatattcattctagttcatataattaataatctcctccttccatacatgtacatagtaggaagagatcctgaagaacaggacaagggttcattaacaaaatattcctagtgcttactaccatttccattaataaataaatacaaacataagcatatctctcagaaatttttagtagctttaattaagactgcctcccattaaattttattctatggttcaaatcttttgaaacaaatttatattctaacgatttgatcttacacatttgatt

SEQ ID NO: 805014 - DNA, 638 bp, Homo sapiens
atccattctaattatttcttccccatgtcaccacacttcatgctgcctttatttgtctaactgattgtataacagtttctcaaccttgttttcaaaattaaatattattttcttgacttaatagtttctaaaagatactccacaaatctagaaaactcatttctatcttgaaacaaagattacattaacttctctaacaagtgatcacattgtcagatggtgttgaacctgtgatgaagtaaaagtttcaagaattttctcatataaactctgtgaaaacatttcctcataggtctgtgcagtcaatrttaagtgctataaatccatctagtgtgctctttgatgttagcatttatcatactattttatattcattctagttcatataattaataatctcctccttccatacatgtacatagtaggaagagatcctgaagaacaggacaagggttcattaacaaaatattcctagtgcttactaccatttccattaataaataaatacaaacataagcatatctctcagaaatttttagtagctttaattaagactgcctcccattaaattttattctatggttcaaatcttttgaaacaaatttatattctaacgatttgatcttacacatttgatt

SEQ ID NO: 805015 - DNA, 656 bp, Homo sapiens
ctaccttgccttttgtggggtgggatccagtttccaactggctaaaaggctgagtcctcaggttcagactgttcatagaaataattaatagtagatgctttgtagtaagagatactcaaatctaaacctagattctgtcagtaaagtatatgtcttcctgcatgtatcttaaacgctgtagctgactaatcatcagtcttaccacatataaagcagggacaattccagtcctttttcataagactatgtaaagctagaggcaatataatgccaggcatcacataccaacaacttccaagatattaggcctcatccagaactctctccttggagctccagattcatttagctgtagcagcatattcaacaattccactagagtgtttcactggcatcacaaaatgaatacagctgaaattaaccattttgttttccagaacaaacctgttccacttttaacccttttccatttaagtaaaaagagctaaaatrtactaagtttctgccaccagaatgtaactagtttcttcaataattaataggagtaagtactagagatcctggcacatagcagatacgtaattaatatgtgatgaataaacagatgaagtgtatgcatgcaataaagagtagttttcctaattattattaggatg

SEQ ID NO: 805016 - DNA, 610 bp, Homo sapiens
tctattttccatacacttcactgtattttttagtgaatacatttgaagttcagtgagtatatttttactgatactctaaatggtgctgtatatggtgcaggtactaacgttgcatagtcccagagttacagtcgtaaatttagtagagagttaggaaaaggcagaatgtggtaaagggaaggaattgggatttgaaaaagaaatatctaaatgtgcatccccaaagtgctgttactgactgtgatttaagttaattgtccatgctgatatgcaatagactcagctrtacagggaatggtaacaatttcatacacaggagatatctgagtctacactagtgtctgagctaacaaagggtatgtaatactcagtctatacagggtaattatgttaataaattctcaatgtatgtacttcacataaaattttaatgaaaatttaataacattgactgtaagatatttccacacgaagagttaaccataaaaatcataaaacagaacaaaagtagaaatctaggaaaagtcaataaaaggatgttgacatcataatggacaataagaagttcttatggaagagaaaaatattaaagaaaacaatatttattaca

SEQ ID NO: 805017 - DNA, 610 bp, Homo sapiens
tctattttccatacacttcactgtattttttagtgaatacatttgaagttcagtgagtatatttttactgatactctaaatggtgctgtatatggtgcaggtactaacgttgcatagtcccagagttacagtcgtaaatttagtagagagttaggaaaaggcagaatgtggtaaagggaaggaattgggatttgaaaaagaaatatctaaatgtgcatccccaaagtgctgttactgactgtgatttaagttaattgtccatgctgatatgcaatagactcagctatacagggaatggtaacaatttcatacacaggagatatytgagtctacactagtgtctgagctaacaaagggtatgtaatactcagtctatacagggtaattatgttaataaattctcaatgtatgtacttcacataaaattttaatgaaaatttaataacattgactgtaagatatttccacacgaagagttaaccataaaaatcataaaacagaacaaaagtagaaatctaggaaaagtcaataaaaggatgttgacatcataatggacaataagaagttcttatggaagagaaaaatattaaagaaaacaatatttattaca

SEQ ID NO: 805018 - DNA, 568 bp, Homo sapiens
agtgtttaccatttctgttcaaggctcagggcttagtagctttatagataagagcagtcctgatgataaacctgactgcattcccatgaaacagtaaaattagcttatccttttctattttaaatccttgtgcttgcttctatttcttactaacaaatggcctttttggcatctttttttctagactagaacattgtcacctgtattcaaaacctgttccagtagtatagtttctcttcaatgattttcttaatagtttctgggaacyaatctgctgcctcttgataaccaaaagctgcatcccctgatgtcttgacatttttaatgcaaaagcactttaaattatcaaaccatccttggctatcattaaagtatccacctttagatccttcccctttcttttcctttaagttgtataaaataacttcattttttctggaatcatattagagtctataaatatacctttcatatgaaaattctgccaccacttacacccttcaatttcaatacaagattaaaaattgtttcacaatagtgcaaggttttggcactggcaggcacagtg

SEQ ID NO: 805019 - DNA, 614 bp, Homo sapiens
taattacaatacatcaccttctgtccatcatctaatcgattgcaaaactcttgcctgtcaagaaagccacttaacctaaataacaagtcaaagagtgaaaccttcaatttgaaatcatttaggaattttgaatacattcrgtgtctaagtcaggagggaaagataggtggggattatttttcccttttttttttttttaacaaaaacaagtgtttaggtttctcatgtagaccaacagaagatagatctaacacataagatggggacaaatggactacaggtaactcccaaagatactcaaagtcagcagaggacagagatggtttcatgtctaatgttcctgctgcggcatcatcaaacattgtggcgacatcatcagacttttaatgtagtaagcatttctcctttgtaatatatgcagagctcatcaagatcctggtgacaccagtcccttctggataagaatttccacaggtataatcaatggtgaacacgcagggcagtccctccagcctgacattccctcacgtaagcgtaatttaattggggccaattcttatctgagtcagctcttcacccatagaagagagaaactctgaacaggtttcacatat

SEQ ID NO: 805020 - DNA, 614 bp, Homo sapiens
taattacaatacatcaccttctgtccatcatctaatcgattgcaaaactcttgcctgtcaagaaagccacttaacctaaataacaagtcaaagagtgaaaccttcaatttgaaatcatttaggaattttgaatacattcggtgtctaagtcaggagggaaagataggtggggattatttttcccttttttttttttttaacaaaaacaagtgtttaggtttctcatgtagaccaacagaagatagatctaacacataagatggggacaaatggactacaggtaactcccaaagatactcaaagtcagcagaggacagagatggtttcatgtctaatgttcctgctgcggcatcatcaaacattgtggcgayatcatcagacttttaatgtagtaagcatttctcctttgtaatatatgcagagctcatcaagatcctggtgacaccagtcccttctggataagaatttccacaggtataatcaatggtgaacacgcagggcagtccctccagcctgacattccctcacgtaagcgtaatttaattggggccaattcttatctgagtcagctcttcacccatagaagagagaaactctgaacaggtttcacatat

SEQ ID NO: 805021 - DNA, 616 bp, Homo sapiens
attttatatgctactgacttgttatgttgtaatatctcaagaattgctcttgattgctttctaattgttacagatgtacgtgttctattatctatccctctttttcctaaagaagagagatgcttgtcaagggtggggactgcatctcctattcctttccactcctagaaacccaccacagcactggacatgtaggaggtgctcagtaattcactcaaggaaagaataacattggcaagtaagacttatttaggaggcactatagtgtggttaagtcactgatagattataaaaattaaaactttttaggtctggcagcggctcacacctgtaatctcagtactttgggaggccaatgcaggcagatcgcttgagcccagcagttagagaccagcctgggcaacatggcaaaaccctgtctctatraaaagtacaaaaacaattagctgagggtggtggcatgcacctgtaggtggaaggattgctcaagcctgggaattggaggctgcagagagccgagattgtgccactgtgctccagcctatgctggaaagaaagaaagaaaagaaaaaaaattaaaagtgggaatataaactcaccctttccaccaccagtt

SEQ ID NO: 805022 - DNA, 563 bp, Homo sapiens
gtataaggtgagagataaggatccattttcatgtttttacatgtggctggccagttatcccagcaccatttgttgaatagggtgtcctttccccactttgtttttgtttgctttgtcgaagatcagttggctgtaagtatttggctttatttctgggttctttattctgttccattggtctgtgtgcctgctttaataccagtgccatgctgttttggtaacagtagccttgtattatagtttgaagttgggtaatgtgatgccttcagatttttctttttgcttagtcttgctttggctaagtgggctgtttttttgtttccatacgrattttaggatcattttttcctagttctgtgaataatgatgacggcattttgatgggaattgcactgaatttgtatatttcttttaacagcatggtcattttcacaatattgattctagccatccatgagcattagtccatttgtattgttgtgttagcctgttttcacactgctataaagaaatacctgagactgggtaatttataaaggaaagaggttcaattgactcacagt

SEQ ID NO: 805023 - DNA, 536 bp, Homo sapiens
cctgcacccccaccacagtgtccccactcccaacgtggatcctcacctttgactgcaaagacaaagcagaccactcagatgcagccctggcccctgcctgcctcaacctccacctgcacccacgtgccctgctgtgccctctttgctgatggggggaggggggacaggygcgccccttcttctggcaatgccagcccttttccactgtgtcttcaccctctccttccctctgagatcctcccattagcatttaggtgggctaaagcctcttttgtccagaaagtccctcttccctggccctgggcccagctgtccttcttccacccttcaaccctcaagcctcccagacctgtctaagccccactgtcttaccttccccctgccctgtaccctcccagttcctgtcactactgcaataaaactactcttgctaaggtacttgtctttaaatctagtagacacttttccattcttgacttatagaatctcacagcagcaattgctgtttctgatggtcccctttgaggaatgcttgc

SEQ ID NO: 805024 - DNA, 604 bp, Homo sapiens
cactgatgggcacatattgcttccatctcttagctactgtgaataatggtgccgtgagtatgggcatacaaaaactaccactaatattttacagtgcttgcttcatatctgtccatgtgtccgtcactccacccatcatattttttatgtatttcataagttacagaccacagtaacttccctyaaacatgtcagtatacatatcaatgaccagcgttcattgtttttttccaagtcattttgaactgccgtagcaatgagtaatatagcctcaaacgcacacatacacacacaacacgtgcgtcactacagaaaacttttcctggcagacaggaaagggcccattgttggtgatgtcattttaattaagataaaaccaccaccaccatttagtaatagcctggggtaacaagggctgcgtcacggactgccacttttgccatcctgctcagagcagggccatgcctaacccgtatctggggattgcttcagatattatgaatcgcttcaatattatgaattactacaattcataataattgcttcagatattatgaattacaatatggttcaaaggtgctttagcagatgaagacacaaatgt

SEQ ID NO: 805025 - DNA, 624 bp, Homo sapiens
tcctttcaacacatttattatatacagctgtcactgcattgtcaatctgccaaatggctctatgttccaacagggctggagtagtcgcctgctcacaccagccttcacaatacttcccatgtcttccctgttaacctctctccacccagcacccaggctcccaactctcctggctgcctccagccctcagctggcaccactgacatgctgtttccagtacccttttcttctttctgcatcctccctgggggacatayatccctcatctcgtgacttcagctgtcacataaattcaaatgtttcagaactctattttttacctcctacatctgtcagtttaaatgtcaggatattttactttcagtaaagccctaaaaagacaaatctatgtacttttaaagaataaaagaaatgactggctgcagctcaaacctacaactgcttgcgaaactctacaatgtctggcagatgctagaaagaaggggatcaagacagagcacacttggcgtggtatgctatctatagaaaatgttaaaataaaattaagtaatctaggtttcctctctttattttctacatctactctctgaagagggcaataaataaggaaatgtcccaaagagg

SEQ ID NO: 805026 - DNA, 534 bp, Homo sapiens
agtcatttatttctggaacttgatcagtctttttccaggtatataagcaaatctttccacactccaatcctactgcaaccacgtatctgtttttaagggagggggacaacagtgattaacttagcatgaaattgttatcttcgtcattgctctaaagtagttcttcacagtgtcccaactgtccctgccttacaaaagactctgcaggcatcagcccaggacatgctgcactgctctcctgtgtcctcaaggagcctcctctttacaggggctgcacacagatttatctgtgtcctctgctggcaaggcccaygagccagtgtttccccagctggctgtagggacccttgttccactgaagatgcttgttacagagaaagtattatagtcctagatttggtgaagtaagaatctttgagccccattcctaacctgtattttacattctgaatcattaggttctatcaatttaaaaattattatgagaaacataagcattttgcaaaagacagtaactcaggccaggcacggtgg

SEQ ID NO: 805027 - DNA, 599 bp, Homo sapiens
gtgctgggcactggggagagggcagtggccaggacaaagttcctgaccgcatggacctggtatctggtgggagacaagtgtttggcaggtggtaaagataaaaagaataggtgaaggagacagagagtgacagggatcctttttcatgtggggtakcccaggaaggactctgaagacagggcaatggagcagagtccaacagggtgggagagaggagaacacatggctctgggtgaggagctttctgggtggggggaacagcaagtgcaagggtcctgagatgggagtgtgcctagcatgtttgagacacagctgggaatccagagtggctggagtgcagcaaggagaaagaggagctgtgcaagctgagaccgggaaggggaagtccgtagggtctttgtgtcattgtagggcttactgggggcagtcacaggggagttttgagcagcagagtgtcctgatctgactcataccacaagagatccctctggctgttgggtggagagagcctgtagggtgattaggggtggcttccgggagcctcactaggtggatgatgttgggagaagcccagagattcctgaatatgtcatgaagac

SEQ ID NO: 805028 - DNA, 630 bp, Homo sapiens
caggggaaatgacacaagcaaaaagagagagatgggacccacgaaaggggcacgtatatggacaactacagaatttccctatcagaaagtgtcagagcagccatccggctagaagatggagttggtggtgacttgtcttgagattatattcacatagcaatcccactttttttttttttttgagacagggtcttgctcatttgcccaggcttaagtgcagtggctcgacctcggctcactataacccctgcctcctgggttcaagcgattcttctgcctcagcctcccragtagctgggattacaggcgcaccaccacgcttggttaatttttgtatttttagtagagatagggtttcaccatgttggccaggctggccttgaacttctggcctcaagtgatccgcccgcctcagcctcccaaactgctgggattacaggcgtgagccaccttgcccggcctagtccactactttcatttccagtatccgtttacttggagcgcattgaggatagctttatttatgtatttatttttacacggcgcctatcagggcctgggtttcactgccacacacggggcagtgcatggtgagctgaggcccctggaagctctgggcactcgcggcca

SEQ ID NO: 805029 - DNA, 654 bp, Homo sapiens
aatatccacttaagatttgtgcaacgcatgctgaagttctgaggcagaagtgtattggtatctacaatttactttgaaaacatcaaaagacagacatatagtctgataaaacaagtataataaaatgctaaaagtagaatccaggtgatcagtatatgggtgttcactgtaaaattctttcacctttactatctttgtaacttttcacaataaaatgagatggcgggaggacagtccatattcagaaagaaacacctagatttttcgctggagcacagtggcatgatgacaacccactgcagccttgatctcccgggctcaagtgatcctcccaactcagcctcctcagtaggtgggactagacatgtgccacaataccaggctaattaaaaaaawtttttttttttgtagagacagagtctcactatgttgcccaggctggtcttaaactcttgggttcaagtgatcctcccgccccagcctcccaaaatgctaggattacaggcctgagtcaccccacccatccctagtttgttcttaatgtggtatttggccacacggtgtcagtgaaggtgtagggaaatgaatgggtactttgttacagagctgtagaaataaggaattgatacgtttctgttgtgtaattcaacaaaa

SEQ ID NO: 805030 - DNA, 548 bp, Homo sapiens
attagccccgaatcacttcagctcccttccctgcctggaccattcccagctccctgctcactcttctctcagccaaagcctccaaagggactagagagaagcctcctgctcccctcgcctgcacaccccctttcagagggccactgggttaggacctgaggacctcacttggccctgcaaggcccgcttttcagggaccagtccaccaccatctccacgttgagtgaagctcatcccaagcaaggagccccagtctcccgagcgggtaggagagtttcttgyagaacgtgttttttctttacacacattatggctgtaaatacctggctcctgccagcagctgagctgggtagcctctctgagctggtttcctgccccaaaggctggcttccaccatccaggtgcaccactgaagtgaggacacaccggagccaggcgcctgctcatgttgaagtgcgctgttcacacccgctccggagagcaccccagcagcatccagaagcagctgcagtgttgctgccaccaccctcctgtctgcctcttcaaag

SEQ ID NO: 805031 - DNA, 622 bp, Homo sapiens
atatacaaaaattagccagacgtggtggtggcacatgcttgtaatcctagctactcaggaggctgaggcaggagaatcgcttgaacctgggagacagaggttgcagagagccgagactgcaccactgcactccaacctgggcgacagagtgagactctgtctcaaaaaagaaaaaaaaaaggatggaatcgatacatttttaaaaatcacatggaaatactagaacttaaaaatacaacacagacatccccaacttacaatttttcaactttacaakggtgcaaaagtaataaacatcaaatacacttctctacttacaatggagtaatatttggaaaaacccagtcgaaaatactgtaagtcaaaatgcactttcaatttacaatgggtttactgggacataaccccatcttaagttgagaagcaactgtatcgaaaaataaaaagggcaacacagcaaaaccccggtatctacacaaaatacaaaaattagctaggtgtggtggcacacatctatagtctcagttactagggaggctgaataaatttaaaaatcaaagaaaataggccgggcgcagtggctcacgcctgaaatcccagcactttgggaggccaaggcggg

SEQ ID NO: 805032 - DNA, 622 bp, Homo sapiens
atatacaaaaattagccagacgtggtggtggcacatgcttgtaatcctagctactcaggaggctgaggcaggagaatcgcttgaacctgggagacagaggttgcagagagccgagactgcaccactgcactccaacctgggcgacagagtgagactctgtctcaaaaaagaaaaaaaaaaggatggaatcgatacatttttaaaaatcacatggaaatactagaacttaaaaatacaacacagacatccccaacttacaatttttcaactttacaagggtgcaaaagtaataaacatcaaatacacttctctacttacaatggagtaatatttggaaaaacccagtcgaaaatactgtaagtcaaaatgcactttcaatttacaatgggtttactgggacataaccccatcttaagttgagragcaactgtatcgaaaaataaaaagggcaacacagcaaaaccccggtatctacacaaaatacaaaaattagctaggtgtggtggcacacatctatagtctcagttactagggaggctgaataaatttaaaaatcaaagaaaataggccgggcgcagtggctcacgcctgaaatcccagcactttgggaggccaaggcggg

SEQ ID NO: 805033 - DNA, 588 bp, Homo sapiens
taaagagactggagattaaggcaagaatcctgactggtggagaagaagtggatgggcccagggcagtttctatagggtgctccttgatttggggttgtgagtgggtgggcatctatacacttccaagacaaggcaaagaaatgggcctccaggtagtattgggatccttaaattctcttttccaagcacctctgcccrggtactctcctggtgccccctcccaaggggagagccccggtctccttccttctcctctagggcgtcatctttcctctgttctcagcctccggaggagcctttggtcttgcccctgacacccaccgggcccaatggggtggcctctcacatgctctcccagattcactgatgtctttcctctaggtagagtcccagagaagctcagataccaaaggggcagctactgacctgtgtccaggggcactggatgggagctgggggcttctccttccccagcagggcagggaatgcagtggaaagcccagaagctggagcctgactctgggctgggtaatccggagctcaggttactgactccgatatatatagtatcttatctgacctcgcaga

SEQ ID NO: 805034 - DNA, 600 bp, Homo sapiens
gggtaatctcacctactacactcgggctggttttatgatgcaatgagataatgttgactaggtctggcacaaagtaggtggtcagttcacattggtgaccttgtcccctattctgaggggctgggttggtatgctttggaagtcctgcctatctatgacctgcaggacatggggctgagtgtgggcagtatctgatttccttcagcctgtcgctgctccgtagcacctcttcttgtgacatggcatctggcaatattgaagggaaagaggagattgtctggccagggctgggaggaaatcagactctgtgcactgcttgcccaagtgcccctcacctgtgtcccactctacctctgagggctccagagatgaggggaagatgcgaggagggagagragagtcatgtttgaggagctccctgatttctctatgagaaagaaaaatcagagaaataagttatgccatgcaaagtggagtgaatctggtagtcaagggttgaatttgaagaactttgatttttaggaaaatggtcatcttgtaaaggcccaaaccagagctttctcaactagaatccgattttaggcccaggggatatagggt

SEQ ID NO: 805035 - DNA, 486 bp, Homo sapiens
ctggaggtctcaccaggaaactgtgcccacgacctctgcattttttctcatcccctagatgtagcggctttcacaggctcttggcagttttgtttcccagaagttacactaggactttgcgggcagggtggtgaygtccgtcatcatgctccccatcttcagagtccagcagaagtgtcctaactgacccctgttcccaggggaggacctcccatcccagtggtacgagctcccccatccccaccccaaccaatgctcagtgggtccaggtgcccttggctcagggcaccttcccgctctgcgatgtccatgcacagcaccatccctggaaccttctctggtcaagggccaggtcagattccagggggcctcggctggtgccagccccagtcccagtcccaggcaggcggcagacaccctccagcccacccttcctttcaaaagcctgaaccctggatcacagtcaggagcagcctctggaaacca

SEQ ID NO: 805036 - DNA, 486 bp, Homo sapiens
ctggaggtctcaccaggaaactgtgcccacgacctctgcattttttctcatcccctagatgtagcggctttcacaggctcttggcagttttgtttcccagaagttacactaggactttgcgggcagggtggtgacgtccgtcatcatgctccccatcttcagagtccagcagaagtgtcctaactgacccctgttcccaggggaggacctcccatcccrgtggtacgagctcccccatccccaccccaaccaatgctcagtgggtccaggtgcccttggctcagggcaccttcccgctctgcgatgtccatgcacagcaccatccctggaaccttctctggtcaagggccaggtcagattccagggggcctcggctggtgccagccccagtcccagtcccaggcaggcggcagacaccctccagcccacccttcctttcaaaagcctgaaccctggatcacagtcaggagcagcctctggaaacca

SEQ ID NO: 805037 - DNA, 486 bp, Homo sapiens
ctggaggtctcaccaggaaactgtgcccacgacctctgcattttttctcatcccctagatgtagcggctttcacaggctcttggcagttttgtttcccagaagttacactaggactttgcgggcagggtggtgacgtccgtcatcatgctccccatcttcagagtccagcagaagtgtcctaactgacccctgttcccaggggaggacctcccatcccagtggyacgagctcccccatccccaccccaaccaatgctcagtgggtccaggtgcccttggctcagggcaccttcccgctctgcgatgtccatgcacagcaccatccctggaaccttctctggtcaagggccaggtcagattccagggggcctcggctggtgccagccccagtcccagtcccaggcaggcggcagacaccctccagcccacccttcctttcaaaagcctgaaccctggatcacagtcaggagcagcctctggaaacca

SEQ ID NO: 805038 - DNA, 508 bp, Homo sapiens
cacaggttgattggacatggtgctggaggtctcaccaggaaactgtgcccacgacctctgcattttttctcatcccctagatgtagcggctttcacaggctcttggcagttttgtttcccagaagttacactaggactttgcgggcagggtggtgacgtccgtcatcatgctccccatcttcagagtccagcagaagtgtcctaactgacccctgttcccaggggaggacctcccatcccagtggtacgagctcccccatccccaccccaaccaatgctcagtgggtccaggtgcccttggctcagggcaccttcccgctctgcgatgtccatgsacagcaccatccctggaaccttctctggtcaagggccaggtcagattccagggggcctcggctggtgccagccccagtcccagtcccaggcaggcggcagacaccctccagcccacccttcctttcaaaagcctgaaccctggatcacagtcaggagcagcctctggaaacca

SEQ ID NO: 805039 - DNA, 519 bp, Homo sapiens
tcagattccagggggcctcggctggtgccagccccagtcccagtcccaggcaggcggcagacaccctccagcccacccttcctttcaaaagcctgaaccctggatcacagtcaggagcagcctctggaaaccagcccaagaccaggccrtggggagaggacatcagtgggggaaagaggcgcagcgggcctcattgcaggctggttacctccacagccacggccatgacctctgcctgcctcctggccccaagcctggcagtgacctccctggaccacacagcccactgcttctctggcggggctggaagcacttcctatctgtcctgctcgctgggcatttatcaccggcagcctgcccacacctcttgtgctttgtctcatctttgttatttaactttgtttcacgtaggattattcctgtctctcccattagttctcagcttctggaatgcaggggcaaagtctttttcatccctatggttcccccaatcccctacacagcaccaggcccttgaga

SEQ ID NO: 805040 - DNA, 462 bp, Homo sapiens
agacaccctccagcccacccttcctttcaaaagcctgaaccctggatcacagtcaggagcagcctctggaaaccagcccaagaccaggccatggggagaggacatcagtgggggaaagaggcgcagcgggcctcattgcaggctggttacctccacagccacggccatgacctctgcctgcctcctggccccaagcctggcagtracctccctggaccacacagcccactgcttctctggcggggctggaagcacttcctatctgtcctgctcgctgggcatttatcaccggcagcctgcccacacctcttgtgctttgtctcatctttgttatttaactttgtttcacgtaggattattcctgtctctcccattagttctcagcttctggaatgcaggggcaaagtctttttcatccctatggttcccccaatcccctacacagcaccaggcccttgagag

SEQ ID NO: 805041 - DNA, 462 bp, Homo sapiens
agacaccctccagcccacccttcctttcaaaagcctgaaccctggatcacagtcaggagcagcctctggaaaccagcccaagaccaggccatggggagaggacatcagtgggggaaagaggcgcagcgggcctcattgcaggctggttacctccacagccacggccatgacctctgcctgcctcctggccccaagcctggcagtgacctccctggaccacacagcccactgcttctctggyggggctggaagcacttcctatctgtcctgctcgctgggcatttatcaccggcagcctgcccacacctcttgtgctttgtctcatctttgttatttaactttgtttcacgtaggattattcctgtctctcccattagttctcagcttctggaatgcaggggcaaagtctttttcatccctatggttcccccaatcccctacacagcaccaggcccttgagag

SEQ ID NO: 805042 - DNA, 462 bp, Homo sapiens
agacaccctccagcccacccttcctttcaaaagcctgaaccctggatcacagtcaggagcagcctctggaaaccagcccaagaccaggccatggggagaggacatcagtgggggaaagaggcgcagcgggcctcattgcaggctggttacctccacagccacggccatgacctctgcctgcctcctggccccaagcctggcagtgacctccctggaccacacagcccactgcttctctggcggggctggaagcacttcctatctgtcctgctcgctgggcatttatcaccrgcagcctgcccacacctcttgtgctttgtctcatctttgttatttaactttgtttcacgtaggattattcctgtctctcccattagttctcagcttctggaatgcaggggcaaagtctttttcatccctatggttcccccaatcccctacacagcaccaggcccttgagag

SEQ ID NO: 805043 - DNA, 549 bp, Homo sapiens
tggtttatgtcgtagcttatttaaaaatttcaattagaatcttttatcatgttattccaggattgttccataattataaaatgaaatgattatgtaataagtgtctggtggtagatttacaaatgtatcatacaggaaaggtgagtagttgaatgactcttaccatagattatttattttactggtttaagttaaaattgctcagaaacaatcttatttttctcttgattttaatctactttgtcacagctaaattatattacattgagctttacctactttttttttcccaagtctaaattttggcagtagcaaaaaaaaaaaaaaaaarggaaaattgatgaatggtgcatactgtgattagttggaaaatatctcttccatttggctttcatgcttttatcatttttgcctgttgtctttgagggaaacctgatgcagtgagtggctctgaagcatgaattttcttaaacttgaagtgttagctttttgtgtgtgtgtgtgtggtgtgtgtgtgtgtaggtttattgaagggtactttggattgaa

SEQ ID NO: 805044 - DNA, 549 bp, Homo sapiens
tggtttatgtcgtagcttatttaaaaatttcaattagaatcttttatcatgttattccaggattgttccataattataaaatgaaatgattatgtaataagtgtctggtggtagatttacaaatgtatcatacaggaaaggtgagtagttgaatgactcttaccatagattatttattttactggtttaagttaaaattgctcagaaacaatcttatttttctcttgattttaatctactttgtcacagctaaattatattacattgagctttacctactttttttttcccaagtctaaattttggcagtagcaaaaaaaaaaaaaaaaagggaaaattgatgaatggtgcatactgtgattagttkgaaaatatctcttccatttggctttcatgcttttatcatttttgcctgttgtctttgagggaaacctgatgcagtgagtggctctgaagcatgaattttcttaaacttgaagtgttagctttttgtgtgtgtgtgtgtggtgtgtgtgtgtgtaggtttattgaagggtactttggattgaa

SEQ ID NO: 805045 - DNA, 628 bp, Homo sapiens
gtctctaccctaccacctctttttcacatagctctggccccaccttcgggatccagcagcttggtaagtcccagttccttttcagccagattgaatcttctgcagattatagtgtgcataaccctttcttcgagactcacatccagcaggtctgctctggttggggagccaagacagaagggatcagaaacatgtgagatctygaagaggaagaggaaacccacacctatctttatccctaagtcaccgacccaattttgtccagaagtaggcatccaaacccacactgctgctcacagcccctccccacaccacctcccctgcttcccatcacaagtgctctgcgcagccctgcacccccatgttctggttctgctccgagtgctattccttccgtctgactgctgtgcagctcatctcatctctgtctccacatgtgcaccccaggtcattagccgacccagcagctctgctgcgtttgctaaccccatcttctcaccggtgtttatgcacgatggcgttgaaagctagtccatctctccagctggtggtgaagttgtgtacattgacgttgggataactataaacagagattcagaaaatggtgagtagggctgagctctgttct

SEQ ID NO: 805046 - DNA, 529 bp, Homo sapiens
atgtggagtctcaagaaaggcaggactgatttagaggaatggatgacttaagccatggttaaaagtttatagattgaagaaggcaaatctgtttgatgtaaacctgatctttttactagcatcgaaaacactgaaatctgyttttacttatttattaatttttctgtaggataaattccagtttactaactgtattttcttctctaaagaaaagggttgttgttaccaacttgaatggtcacaccgcccgagtcaattgcatacagtggatttgtaaacaggatggctgtaagtaataaccagattttaaagttgatctcaattgttttctgataaaataaggttagccatttttttctcatcacttctcttaatttagcattaccttatatgatgttatgcaattggagaaacaagaaaaatggtattcccagtgaaatatctgaactgtatttttacttcgtagcagttgaagcttggattatacagcagtgcttaggatgagggtagtgcagccctagactttggc

SEQ ID NO: 805047 - DNA, 529 bp, Homo sapiens
atgtggagtctcaagaaaggcaggactgatttagaggaatggatgacttaagccatggttaaaagtttatagattgaagaaggcaaatctgtttgatgtaaacctgatctttttactagcatcgaaaacactgaaatctgcttttacttatttattaatttttctgtaggataaattccagtttactaactgtattttcttctctaaagaaaagggttgttgttaccaacttgaatggtcacaccgcccgagtcaattgcatacagtggatttgtaaacaggatggctgtaagtawtaaccagattttaaagttgatctcaattgttttctgataaaataaggttagccatttttttctcatcacttctcttaatttagcattaccttatatgatgttatgcaattggagaaacaagaaaaatggtattcccagtgaaatatctgaactgtatttttacttcgtagcagttgaagcttggattatacagcagtgcttaggatgagggtagtgcagccctagactttggc

SEQ ID NO: 805048 - DNA, 556 bp, Homo sapiens
tctgcaaagagtcctgtgatgtgattcatcttcacgtcttccagctatggataccagcacctgctctagtgaaggtggcggggagtaaagtggactctgttgggagtccttggttgtagttttgttttagtgtgctggttttagtccttggttgtagttttgtttagtgcggtggttttctcaaatgctggttatgctagcagtgaagttgtcacatggacagactcaggacctctggttaaccagggtgttgcaggtggtgaaattagctgttgttttctccttctttggagcagagttgttctcttatgagttgctgtaatggcttgagttgattggcctccagccagaaggtgctgctttcaagagagcaccagctgcagcagtagaaggggratataattttgccctgccttggctaggataggtacttggcttcctcaggtaatgaacagggccatagagctcccaagagaccatgtcatttgtctttggctatcagggcaagtagagagaaaccatcaggtgggggcaggttaggtgggtctgagatcat

SEQ ID NO: 805049 - DNA, 606 bp, Homo sapiens
ttaataaagctgactaagccacctcgtccgcctctgcagggatgggctatttgtagtcactcttgtttctatccattgttgaaaatatacaacatcattctcatactgtggcccagctcgctatctttgagagcaaaagtgtgatgcagtcacatgttctctgggtattcactgagttcttctggcactgagggacccttctcctcaggcatccagagtcctggaaaaagtgggtctgcagttttttggggttcttcgtgtggaaagataggaggtggggagaggcttgctgtcaccccagttcctaccaggaggggccrcgttccccaccatctggtttatagcagggtggacccgctgggcagctgatccaagagcagagctagggtcccctgctaggtatttctctgtgctttatttgcaaatttgagggactctatcatgcacatgttaaccatgatagcttttggacataaaacatgcccttttacgaagcccaaagtgagggtttataacccagagagttgatccagaatcaaaggatttgaggactggaaaagtgctaatcctcttgttgcagatgaggaaattgtggtcctcataggt

SEQ ID NO: 805050 - DNA, 558 bp, Homo sapiens
ttattgataagtgaagctaggataggctctgctatagcgtagggtctcattgctcaaaagtaatgaggaaggaatcactgctttgttttctgaggacattattgaattcctggtttcttcctcttcttttctttcttttccttttttcttaaaaaaaaaaaattcttttatcatttagctcttatgggagtctgaaagctcagttcctaagtgagctacagttcatccttggtaaccatttttttttcctctttcaccccgacctgaagratttcccattagagctatgctccttacctggagagttcttaagtaccagtcaggttgttcatttgagccaacaacagatttcttggttattgtgctattgccacagtaggtcctatttgcattgaatttgtgtgtttttagcttctctccttttacgtgttgctttatgctactctccaaaagtctttcttgtagagtttattagttgtataatttttctttgctctgttttgttttgtttgacagcctgggttggtggttttatagccatttccatcatcagtttcc

SEQ ID NO: 805051 - DNA, 579 bp, Homo sapiens
ttgattgtataatatgtcagatttttaaaaggggacggctatttgtcttagagttttctcactgaaacagtgaaagaataaatgtaaacatctagttacatagtaaattcctctgaggcaagtgaaacatgtttatacccttgacaggagagttttttcctaaaccttttaaacagtttattttatattcttgaatatgccttttatatggtagcagttactcctcagatttgtataactttatccgctcattctaaggcctagaaaaccttcccttctctttcatgcccgatgtgctcctttgggaaatttagacctcatggaatgtactctaagatttcttacaaagaagatacagagttggtttgggaaacttctrttcattcacagccaaaataccattttcttgttacctcattttgcatactgataagattaaaaaacacaaattaatgtagccaaactttttctgattgatttttacacaggtgctgcttttactgaaggcttatcaagtggtttaagtacttctgttgctgtgttctgtcatgagttgcctcatgaattaggtaagagaac

SEQ ID NO: 805052 - DNA, 587 bp, Homo sapiens
actgaaagtaaacagatggaaaaagatattccatgcaaatggtaaccaaaagagagtaggagtggctataattatgtccattaaaatggactttaagtcaaaaactgtcacaagagataaagaaggacattttatgatgataaaatgatcaatccaccaggagtatataacaattataaatatatatgcacccaacatcagagcacctaaatacataaagcaaacattgacagaaccgaaaggagaaatagacagcaaaasaaaaataaattcaataatggacagaacatgcaaactgaagatcaagggaggacttgaatcatactgtagaccaaatggacctaacaaacatacataaaacgtttcacccaacagcagaagaatacacattcttctaaggcacacacggatctttctccaggatagatcacgttaggtcttaaaacaagacttaaaaaaaaaaaaaaagacaatgaatttaaaaagattgaaatcatatcaagtttctgaccacaatgaaatgaaactagaaatagtagcagcaagaaaatggaaaaattcacaaatatgtggaaatgaaacaacac

SEQ ID NO: 805053 - DNA, 544 bp, Homo sapiens
acagaacggcaagcattcctcaaaggggaccatcagaaacagcaattgctgctgtgagattctataagtcaagaatggaaaagtgtctactagatttaaagacaagtaccttagcaagagtagttttattgcagtagtgacaggaactgggagggtacagggcagggggaaggtaagacagtggggcttagacaggtctgggaggcttgagggttgaagggtggaagaaggacagctgggcccagggccagggaagagggactttctggacaaaagaggctttagcccacctaaatgctaatgggaggatctcagagggaaggagagggtgaagacacagtggaaaagggctggcattgccagaagaaggggcgcrcctgtcccccctccccccatcagcaaagagggcacagcagggcacgtgggtgcaggtggaggttgaggcaggcaggggccagggctgcatctgagtggtctgctttgtctttgcagtcaaaggtgaggatccacgttgggagtggggacactgtggtgggggtgcagg

SEQ ID NO: 805054 - DNA, 604 bp, Homo sapiens
aataaagctgactaagccacctcgtccgcctctgcagggatgggctatttgtagtcactcttgtttctatccattgttgaaaatatacaacatcattctcatactgtggcccagctcgctatctttgagagcaaaagtgtgatgcagtcacatgttctctgggtattcactgagttcttctggcactgagggacccttctcctcaggcatccagagtcctggaaaaagtgggtctgcagttttttggggttcttcgtgtggaaagataggaggtggggagaggcttgctgtcaccccagttcctaccaggaggggccrcgttccccaccatctggtttatagcagggtggacccgctgggcagctgatccaagagcagagctagggtcccctgctaggtatttctctgtgctttatttgcaaatttgagggactctatcatgcacatgttaaccatgatagcttttggacataaaacatgcccttttacgaagcccaaagtgagggtttataacccagagagttgatccagaatcaaaggatttgaggactggaaaagtgctaatcctcttgttgcagatgaggaaattgtggtcctcataggt

SEQ ID NO: 805055 - DNA, 523 bp, Homo sapiens
gccttaaagccaaataataaaccggtgataattaaaatatcattgcttctaatgtatctataccagctttcttttggttagtatttgcctggaacatcttttcccattcttttactttcatcttttttgtttccttggtttgtctcctttctgcagtatatggatttttttatattcaatttaaccattctgctttactcccctcaaaacataccattagttgcttacatttattgatattactaatatacttggatttatatcttccatatttttcatttattgtgctttttctatgatttttttctcttcctgtcttcttttgacatgatcaagtatttttaattccatttttgctcaattkatttagaagctgtcaactctgtttctgttcttttaattcttctcctaaaatgctgacacacttcttaacaaagtatcaatgtaacatcgccatggttaggaagacctgctcagaacccgactgtgccagattgaatcacaactcagccacaccccactg

SEQ ID NO: 805056 - DNA, 555 bp, Homo sapiens
tctgcaaagagtcctgtgatgtgattcatcttcacgtcttccagctatggataccagcacctgctctagtgaaggtggcggggagtaaagtggactctgttgggagtccttggttgtagttttgttttagtgtgctggttttagtccttggttgtagttttgtttagtgcggtggttttctcaaatgctggttatgctagcagtgaagttgtcacatggacagactcaggacctctggttaaccagggtgttgcaggtggtgaaattagctgttgttttctccttctttggagcagagttgttctcttatgagttgctgtaatggcttgagttgattggcctccagccagaaggtgctgctttcaagagagcaccagctgcagcagtagaaggggratataattttgccctgccttggctaggataggtacttggcttcctcaggtaatgaacagggccatagagctcccaagagaccatgtcatttgtctttggctatcagggcaagtagagagaaaccatcaggtgggggcaggttaggtgggtctgagatca

SEQ ID NO: 805057 - DNA, 585 bp, Homo sapiens
ttctctggagttaaacagagccacagccacctgtctggaacatgtagaacagactcttgcactggcctgcttctgagctgacttccagctctaaaatactcttcccgatcacatttggttttactagtgaggagagattttttttttttaactatwtcataaaatttaccagctgggtacagtgtctcaggcctataatcccagtgctttggtaggtcaaggtaggaggattgcttgagcccaggagttcaagacaaccctgggcaacatagcaagagcctatctttacaaaaaacaaaaattttaaaaaatcagccaggtgtggtggcacatgcctgttgtgctagctattcaggaggctgaggcaggaggagcccttgagcccaggaattcaaggttatagtgagctatgatcagccactgtactccagcctgggtgatagagtaagattgtgtctctcttaaaaaaaatctatttcaggtgtccaatgatgattttttagtgattgacctagtgatgcaatcatcactataaatcagttagatgttttcattcccctgaaaagatccttcatgcccattaca

SEQ ID NO: 805058 - DNA, 549 bp, Homo sapiens
tggtggcctcagtgaatcatgccttctggtattttgcccctgagtaatccccttccatgttgacactgggtttggccaacgattaacttgcaccactgggacattacaaatatagtgtaagcaaagtctgatgaacttgtgttggtagaagagctgaggcaggactggcttgtctgtcataatataaaagagtcttggaagatgtccggggtccagggtctaaaacccctcgtggcctttggaacaccaagctctgtgccaaagtgtggaaagctgccctgccacaccacaaatctaagcccagggcataaaacycctcgtggcttggatggaatccagggctcagggcataaaaccccccatggcctctggaatgtgcacagacttggtcgctctcccaggctcataaacatgttctccattatctcaagcagcagagcatattctatatgcgtcaaagaaaatgctaaaccgtcagagctacgcttgatgcaccactacctttctaaccccacattctcatgccctcacctgtttatccccacatcc

SEQ ID NO: 805059 - DNA, 584 bp, Homo sapiens
agaatgtatgagtctgtcaaatgtcctggtccacagaagggactcaatgtctgtgttccctttgttcttgctaggatgtgcattagtttacagtgtagccacttgatagcatctgaagggatcagtaccttgctatttccaacaaatgtgttttgaggtgctgatatcgtctaatgagggtgtgagccatcatttaaaccattagattaggaacattgcagatggtcccagcacaatgtgtatatgtcacagatggctcataatagctagtctgtattaataagcaagactagacatatcagttttaggtctgggtttttgtttccttcttaagtatactattgtataaagtcaatgtatgcacatgtttgcttctctctctmtatatatatacacacacacacatatatatacacacacacacatatatatagcctccccatatatatatatatatgtttgtttatatatatatatatttgttttccttatatagacggagactcattatgttgcccaggctggtctcaaactcctgggctcagatgatcctcccgccttggcctccttcctaaagtgcttac

SEQ ID NO: 805060 - DNA, 645 bp, Homo sapiens
gtgcagtgcaacctccaaatgagaaccagtgctagaagtgaactggacacataggaaattgtggttagagatgcagatgctccctttttaattattattattatttgtagagatggggtcctgctgtgttgccaaggctggtctctaactcctaggctcaagagatcctcccgcctcagactcccaaagtgttaggattacaggcatgagccaccatrcccggcctcatttttattgacctgatttccgtcatagcctgcaagatgctttgttttgattgtttattttcacttctgcctccttcggtaaacctgtgagtgtcctgagtgggggtcaagatttgtttgagtgtatgatctaatctgaatacacacgtgtgtgtgcatgtgtgtatttttctccctgttggattgctcagcctccacagcctgttcttctccactgtgatacaccaggtgtccttcagcaggtgtagtgaaacaaagcagaggctttgacgtcacccacgctggccctcgtgtgactcacggcccagccctgagccagaatctgctcctgttattacgggtatgattgtctccattttacaaatgaagatatggaggctcatattcttcatctgcaactcattgatggataaccagg

SEQ ID NO: 805061 - DNA, 481 bp, Homo sapiens
tcccattgtggaaatacatcactgttcttagtcaatgataagaatatttcaagcacacgcaagttttcataccaatataaccaccatcgctgcaatggccgggaggtgacattgtctttgaagacatgtttttttcaacgagcaacataaactttcttcagctatgaaaaactctttaaactatattattgtattaacaaggcaaataaactccaaaatttcacataaacctagcctgatttggtttatgacaaaaaaaaaaaaaagatggtaatcacatttgagctgaacaagagctaggtagagctggaaaaraaacaaagtatatacgaacttttcatgtttgttattcaagcatctggacaaagagcatacttacacatattagaggaagctgaatctgaggcatgatttaactaagtttaagactaagtcttctgtaaatagaactggtgaatattttttaatatgttatttttat

SEQ ID NO: 805062 - DNA, 569 bp, Homo sapiens
ggctttgggagacatttgcagtgtagaatatctagctggattttcttccttggagattatcctgtactagtaacaagcagagaaaatatttcccacgcctgtgagtatttaggagttcctttgtgtgcctagatctttttttccccatacaggggaagtggtgtgcactgggggtaggcagaagaaaaatgacaagaagcaaaagctttgctgctgtgggatcaaattccaagcagaattccttcatacacttccatttctgtgaaagtgcggtgtggtgtttgttttcactgtatctgctcgcttaattgtttctgcctgttcatttcgttcctcagtgaaaacgttagcctaagggacatttgaaaatcaaaaggtaggcttggagtttaacaggaaatgaacagtggtgttgctgcaayattaaagtaaaagtttagaaccaataagaaataaccacaattctaaactcaacacgtcttttctcctttttgttgtttcctttgctctcccaaatgtcaagattaaagaaaaacattccatggtttctacatgtttacattgcaagg

SEQ ID NO: 805063 - DNA, 523 bp, Homo sapiens
ggaaatattgattctaaaaagaaggactgagatcaggtagtgttggactcaaatgccaaatagaagagaagcacattaacgccaggatgatgagtgtcctcacataaggccatcctttcttatagtttccaaggtaagtcatgtttgcaggggtctttggagagaagaatgaggaataagaataagaatggagaagagaaagacaagtaaggtaggaaaaatgtctgtagctaaaatacacattacatatcattartaaattttaaaagttattaaaacatgtcatttcaaagaaaagtaacacttgttaatagggtgctgggagtctaacacgaattattatttgcccataggaagtaggcttaaagatgagaatatggcatctcagaatatgagataacatattctcaaagtggtgattaaatcatatattactgctcagtcttaaaaaaaaaaatgaaatcatgtcttttgcagcaacatggatggaaccgaatgccattgtcctaagggaaataacctc

SEQ ID NO: 805064 - DNA, 485 bp, Homo sapiens
agaaattcaaaattataactaccaattcacatttgaaaattgagattcctatataacccattggtcagcctcccaaacattgtttgcattgtggaaattcagggataagtaaacagctgtatagtacatacatctcctatagctacacccataaccaattttgccaatcacaggccttgctttattgacagctctcaacaccaaacaagttctttttccccaaaagaaaaaaaaaaacaaaacacgaaaatgtgatacctgacttcccatgcttaagcactcagyaggaataataaacaccatcacacccttacttagacagcgtttgccacatgctaggtactgtattcacacattcattccccccagcaatgtagtaagtcacatgggaggagtcaaggaaaataggatcagctgtaaggacaacacaagtgggcagagaaggttcgaggcacagtactatagacacgcagtggggagaagcg

SEQ ID NO: 805065 - DNA, 625 bp, Homo sapiens
gttcctacgattaaaggcaatgttaattctcacaatgaaagtaatagacagaaaatataattaacttcactaatatttatattatacatttagaatttggacaaatatataagaaatacaggcatgcctcattttattgcacttcacagayaccactttttttctttaacaaattgaaggtgtgtggcaaccctgccatgaataagtccattggcatcatttttccaacagtatgagctcacttcgtgtctctgtgtcacattttggtaattctcccaatacttcaaatttttcatgactgctatatttgttatggtgatctatgatcagtgatctttgatgttactattttaattgttttggagcaccacaaaccatgcccacataagacaacaaacttagttgataaatgttgtgtgtgatctggctgctccactaaccagccattcccccttctttctccctctccttgggccccccattccctaagacgcattaattgaggttgattaataaccctacaatggcctctgagtgttcaagtgaaaggaagaactgtaagtctctcactttaaatcaaaagctaaaaatgattaagcttaatgaggaaggcatgttgaaagct

SEQ ID NO: 805066 - DNA, 569 bp, Homo sapiens
ttcatttcttcctgagaatatggaatctggtttctctggaaccacccagaagcacatagccagtcctacactgggggagtgagccttcctaaagctgtacccttgcctgccttcccctatgtctatggtctggaaaagcaacggttttgaaaaacaatgtgcttagtggttacgatgccatcatacaccactgcccccatctctgggaatcctgcctttgccccactgtgctttcccctgacattgtgtcctgttttctggycagccccacacttgtgtgatgggtagatttgcacccatgtgcagggatgatgtacatggcgtctgggaggaagtgccagcactttgttcatgatgctgttggtacagctgtgtgtacagagctgagatggcacagatgcctggtggtctgcctttcccagagccctcctggagctagaaggccaggttgcagcacatgctgttcagctaaacatagatggacatgctttgctttgacatttgaggtaggagtatttgctggggagatctcttcccctgagtgattacttaacactcttattttgtga

SEQ ID NO: 805067 - DNA, 601 bp, Homo sapiens
gtctaacatgcacagaaacaattatataaagaaaagcatactttagaccagctgaagtttgagcaatacaatatggaagacaccacactcacgttcaagagttaggatgctgaataaaacaatataactcaccgtggagggctcagagcccggctggagagacagatgtgtagccacccagcaagaacacacgcgggactgtggtgcgccctcccaccgaagcagaaactgaggataggaagcttggagagggaagccattatctcggggctgcaggcmgtgagagaggcttcagggaggagtgactttctcataatttagaggagcatgtggcgggacagacagctgggagttcccagcccaccattcttgttaaactcccatgaatgttagtttcattcttctcccttggatgagaggagagcactggcttaggaaggccagtaactgtttcttgtcctgcgctggcccaagaagaagttctctcctgctcccctgagcatgtatggccacactgttggtgaggcactgactctgagctgagaggaccagcctcacatgtgccagacagaaggcaaagcagtgtgcagaggaagtgcca

SEQ ID NO: 805068 - DNA, 602 bp, Homo sapiens
ttttttaatgttcggtagaattcctgggcgtttccaagatggccgaataggaacagctccagtctatggctcccagcatgagcgacgcagaagatgggtgatttctgcatttccaactgaggtactgagttcatctcactggggcttgttggacagtgggtgcagaacaatgggtgcagcacactgagcgtgagccgaagcagggcaatgcatcacctcacctgggaagcataaggggtcaggaattcctagccaagcaaagctgtaacagatggcacctggaaaatcaggtcactcccaccctaatactgtgcttttccagtggtcttagcaaacggcacaccaggagattatatcccatgcctggctcggagggtcccacacccacggagcctcrctcattggtagcacagcagtctgagaccgaactgcaaggcagcagcaaggctgggggaggggcacccccattgctgaggcttgcgtaggtaaacaaagtggccagaagctcgaactgagtggagcccaccacggctcaaggaggcctgcctgcctctatagactccacctctgggggcagggcatagccaaacaaaagacagcag

SEQ ID NO: 805069 - DNA, 602 bp, Homo sapiens
ttttttaatgttcggtagaattcctgggcgtttccaagatggccgaataggaacagctccagtctatggctcccagcatgagcgacgcagaagatgggtgatttctgcatttccaactgaggtactgagttcatctcactggggcttgttggacagtgggtgcagaacaatgggtgcagcacactgagcgtgagccgaagcagggcaatgcatcacctcacctgggaagcataaggggtcaggaattcctagccaagcaaagctgtaacagatggcacctggaaaatcaggtcactcccaccctaatactgtgcttttccagtggtcttagcaaacggcacaccaggagattatatcccatgcctggctcggagggtcccacacccacggagcctcactcattggtagcacagcagtctgagaccgaactgcaaggcagcagcarggctgggggaggggcacccccattgctgaggcttgcgtaggtaaacaaagtggccagaagctcgaactgagtggagcccaccacggctcaaggaggcctgcctgcctctatagactccacctctgggggcagggcatagccaaacaaaagacagcag

SEQ ID NO: 805070 - DNA, 526 bp, Homo sapiens
acattgtcttttttcccttttctgtgcctttcttcgttggattcctatcttccagtgacttgcccacccaagttagtgcatggcttctggtctcccagaatccttcatacagacctctcttacagcacttagcacaaggaattatacatgttgytcgtgtttctgtctccctattaatgcaatatcagatttttaagaataagaactttctattaccagccaatgacagggtccctggtttagagcggcattcagcgtatgtgaagaaatcccccaatatactaactgaggagtcagaactcagccaaaacagcattgtttttgtaacaatgggtgctttaaaaaataccacttctgaggactggggacaagatggccaactagatgcagccaggaagtgctgctcccactgagagagaccaaattattgagtaaaccaccataatttgagcagatctttggagaaagatgttgagagtggatgagacggcaacactgaaggtgaggctaaaaaggaaggaagctg

SEQ ID NO: 805071 - DNA, 526 bp, Homo sapiens
acattgtcttttttcccttttctgtgcctttcttcgttggattcctatcttccagtgacttgcccacccaagttagtgcatggcttctggtctcccagaatccttcatacagacctctcttacagcacttagcacaaggaattatacatgttgttcgtgtttctgtctccctattaatgcaatatcagatttttaagaataagaactttctattaccagccaatgacagrgtccctggtttagagcggcattcagcgtatgtgaagaaatcccccaatatactaactgaggagtcagaactcagccaaaacagcattgtttttgtaacaatgggtgctttaaaaaataccacttctgaggactggggacaagatggccaactagatgcagccaggaagtgctgctcccactgagagagaccaaattattgagtaaaccaccataatttgagcagatctttggagaaagatgttgagagtggatgagacggcaacactgaaggtgaggctaaaaaggaaggaagctg

SEQ ID NO: 805072 - DNA, 580 bp, Homo sapiens
ttaggacagcacagaaagtctccttggagtagtgtttatttatattggacctttgagaaatgagtagactgttaaccagcagagaacggcagagaaggatgaggtggggagaaaggatagtcaaggaaaaggaaagactgagagacagaattcaagaaaatctgaggatattgaacggatatcccaaagtggcttacagatagggagatgagactgaaaataggtaggttgagaagwgactgttcagggccagtaccaccctgctgtggaattgggctttgtcctgtaggctcttagagaccatcagagatttttccacaagggaagcccatgatcagtttgttgttccattcaattgactgactgattgatcaattgattgaccttcattgactgatcatctgctcttgccagccactatgccaacatgaccctatttttcccattcagaaaaaacataggcagctttttacagagcactgtgggcatggttcccccatgctactaattttgatgaaatacagctaaagttgctcttagtttatgcaattactttttaggatgggtttttattttagac

SEQ ID NO: 805073 - DNA, 658 bp, Homo sapiens
tttgcttattcatttttttttaaagattcaaccttcagaccaaatctggaagttctaattacaaaacacaattgcagcattacaaacttaaacttccacagccagatgtgacaaaataaaaaggataaaacttaacttcccaccacaaaaaactagacaaaaaggtatgaaaaaattgtttcagacactgaccagcaggcagcccaggactatgatctctaaaaaagggraaaaaaaaaggaagccctatgatagtcccatatttctgcaagcaatttcccaaataaggcgtaggtaggggaattccaaacagggcccagtggcctcagtgggttgaggagacagagatcagggttaggagaggttgaggtagtcagagtttgaagggcagagacacagaaaagaacagagtgataccgaagtgaaattacagaaatctgtgcagttatgctgcagagtctttgctgactactgggccatgcctgcatagaggacctctctacaaagtagtgcaaaaaatgactaggtgagctgaacatttccaagatctcacagcagagagaagttctagatcagaaagaccagaatggagagtactcagtgatcccttaggacacttagtaaagacctcagatgggtcacttgttggcagtaacag

SEQ ID NO: 805074 - DNA, 622 bp, Homo sapiens
gtatctactgagagatttattataaggtatttgctcacacaattattgaggctgagaagtcccacgattggcaagctggagacccagaaaagctggtggggtaggcctgaggaggttgaaggcctgagagccagagagccaatggtgtagattctagtctggcctaaaggactgagaaccaggagtaccgagggtargagatcagtgtcccagctcgagcagtcaggcagcatgaactcacctgctccacctttttgctctgttctggccctcagtggattagatcatgcccacacacactggcaaagacaattcatttccttgatctacccattcagatgctaatttcttctggaaacagccccacagacacaaccagaaataatgtttaaccaaatatctggccatctcatgatccactcaacttgacacataaaattagccatcttactaggaaagctcaagtttttaccttaacattgccactgtgtgatattaaaataacatacagtggcgaacaggcttgaagaaatcccctcgcacatgaagccagttagacctggaaagtgaccttaaccttgcttgatttgcaaacacaattacaacttaacatgggctattt

SEQ ID NO: 805075 - DNA, 588 bp, Homo sapiens
aatggaaaccaaaagagagcagaggaagctaaagttttatcagatagggcagactttacatcaaaaactgtaaaaagagtcagagaaagtaattatataatgagaaaggggccaattccacaagaggatacagtatctgtaaatatatatatgtacccaacatcagaccacctaaataaacagagaaaatattaacagatctgaagacattaatagatagtaacacaataatactagaagacttcaaaaatcctactttcaataatggatgggtcatccagacagaaaatcagtaaggaaatattggacttcaactatacactggatctaatggayctaacatacaggttgaatattccttatctgaaatgcttgggactagaagtgttttgaattttacattttttagatttgggaatacctgccttatgtttaccagctgagcatccctaatccaaaaatgcaaaaccaaaaatgttccaaagagcatttcctttcagcatcatgttggtactcaaaaagttttaaattttggaacattttggattttggatttttggattggggatactcaacctttatacagaa

SEQ ID NO: 805076 - DNA, 573 bp, Homo sapiens
tgacaacccagggacagggccctcagaaataatttacctgattcttgttttatgttagggatcagacattcaaatgcaagtattagaaattaagaagccagctgggaataaaacaatacggagagtacagagagttcaaatactgcataaagggagcagccatttcataactcctgttgaraggatcggtctggtattaccagattgttcaatgtttccagagaaaccaggaatcagaatttttatatcgatactctcgggttttaaattttagcaaccaagtttttaaaatcctaaatgctgtgttgataaacactgtgaaagccacacaaaacttaactcccggctggatgtggcctgcagcctcctgtttgctattttgggttttcccatctttgaagcattctagtggacaaattctaacacaaaagtccccaacctttttggcaccagggaccagttttgtggaagacaatttttccatggagaggtgggggatggtttcaggatgaaactgttccacctcaaatcaggcattagatgctcataaggagtgcacaacctagatccctc

SEQ ID NO: 805077 - DNA, 655 bp, Homo sapiens
catctgagagtacttctccttcagcatggagtaagaggagggatttgagggaatatccaaatcaggaaggaggaaatgtcctctctaaaaattcctctcaaaactttctaagaatttattctaaaatattttggtgtttgttttagtataaaaatgtcatttccccaaatctgagtaatatcgacagtgcatgaaagaaaatatagcattttcatcctgcaggtttagttgcctgggggaagtcccacaatccctggcttaataaacacagcattacgctatagttttgactctatagaattctaaatgttcttttgaaaatcatacaagsggttctttttcttaaagttaggtgtgtttacactcaattaaaaatttctagatattgaaagcagctctacagttcttaaaatattcacaaaatataaaattaaaattaaatgaactaaagtaacttccagtggtgacaatattctcacagtagcaaataatctaacttctaggaggttttttccctataatgccaggattatttaatactgacaactaagtctttaaaacattattatgttaaacactgcagtttacctaaattacacagagaacaaaaattacatcaacattgaaagctcaaaagaagttaataaaaatatgt

SEQ ID NO: 805078 - DNA, 572 bp, Homo sapiens
tttaatacatacttgttactgatgaagcagcagatgtcactgaactattgtgggttacggtcattgtggatgttgatatctgagatgtgttctgtgaaacacttgttgttttgggtgtagactttaaggtggtagaagtcatatttgttgagaccatccctggtgttgttgtattagatgccgctgtaggtttcatggtggtgaccgttgtattactggagtctgaggcaactgaagttggtggtttcayagtactgttggaagtttcatttgtatggtcagaaggcacatgttggagagtctctgcaataatatcaagaaacattaaaaccagagctatgatttagggaataagatcccatttcactgagactttcatggtcacagacaaagcaagagatcttacaaatacagcagcatttaacatacttagcccattaatactttgcactatactgcaataaaatgtctcaaactagtaaaagactcaacagaaaccaagtctaaatttatataaagttagaaattttggggaagatatgaagaaaaaaaaaaacaacccagaagacaga

SEQ ID NO: 805079 - DNA, 630 bp, Homo sapiens
tttatggacaagggcagtcctaatcataagccagactgcatttgcacaaaacagtagagttagcctatgccttcctgccttaaattgtggtgcttgcttgcttctcttccttactgaaaaaaaaatgtccattgtgactttttgggcacttttgtctgcattaaaaaccagttcaggcagaaaacctttctcctcaatgattttcttaatggtgtctgggagctcatttgctacttcttggtcagcagaagctgcttcttcttctgttattttattttatttttttattttttgagacgragtctgtcgcctgggctggggtgcagtggcatgatcttggctcactgcaacctctgcctcccaggttcaagcgattctcctgcctcagcctcctgagtagctgggactacaggcatataccaccacgcctggctctatttttagtagagatggggtttcaccatgttggccaggctggtcttgacctcctgacctcaggtgatctgcccgcctcggcgtcccaaagtgctgggattacaggcatgagccacggcacccagccttcttctgttatcttgacaatttcaagcaacacctcattctgaaattatcaagccatcctttgctggc

SEQ ID NO: 805080 - DNA, 658 bp, Homo sapiens
acagttttatatattcctttccaatatttatgtttcatttccttgtcttgtattatttcatcagctaggactgctggtatgatgctgaataggagcagtgacagggaacatccttgtcttttctctgtcttgggggagagtatctagtttctcactgttaggtatgatgctagtagctattttgtagatgttcttcatcaatctgaagatgttctcctctatttttagtttgctaacagtttttatcctgcttgagtgttggattttgtgaaatgttgtgtcttgtgtcaattgatatgatcatattttgtgttgactttcaaaaattgaaccaacctcgcatatatgaaataaagaccacttggtcttcgggtataattatttcaatacattgctaaattatactggctaatgttttattamggatttttatgtctacctccatgaaggataagggtgtacaaatttcctttcttgtaatatatttatctaattttggcattaggagtaatgctggcctcattcaatgcgttagaaagcgttcctctgcttttatgttttggaggggattatgggaaactgatgtgagttcttccttaaatatttggtagaactcacctgtgaaaccatttggatccagtggtttctttggggaaag

SEQ ID NO: 805081 - DNA, 632 bp, Homo sapiens
ttttctgaagtttagctttagaagtcactggccttgagttgtttttactttgtcaattggtaggtagcctgcaaaatgagtcctttccagctttgggagaggccagaacaacatcttaaatcttgatttgacttcgtaatacatcctgacactgcaagctctgaaacttgtggcagagagttaatgcatgagacaaaactgacctgggatcacaagtggacatcctcacgctcatgatcacagaccacagtgttacattagaaaaactaygggagaagcaagtgcagagaaaagtttgagtgagaagaaagagtgagagaaactaggaacttttattataatgtttttacaattattggcagttcactatctctagaagcattataacaggataatgacaagctctcacaagacatttctctgtaacttaatataataggttttattgtttgacaaatgcattgtctgaaagtatgacatctttaggttcaggggataaaaactcgatatacataattctgctgctcaaatacatgtttccacagatacttaaaattcagaaaatccagatacacaggctttttaattttgcatatgtgtttagctgttcaaattacttcaaacttttatgg

SEQ ID NO: 805082 - DNA, 622 bp, Homo sapiens
catgttttatgctattaagaagaaatatacttcataaatccagaagggctgtcattttcccattatgggaacatctttagaattgccccatcaaaattgaagtcatatattcactttttcattgtaaggctgaaagttattgagagactaaattagcccagtgatggtgaactggagagagcaaatggattcaaatctatttacaggatagaatacacatgactcagacaataattgaattgggaagacaagggagaggcaggagttaaaataattctgaggcacccagtctggrttattggatgaatggggatgtcccctccatggagataggagaaggacacgtatttggaggaaaagagaatggagtttgtggtgtattgagtgacaggagtctgcaggacacccaggtgcagaaatttggtgggagactgtcaggagtctctgcgtgggcttcagcagatagggtgggactggggctattaatgtggaaaacatcagcgaatacactttcatttccccctgttttgcgtaagcccccagtttggatggaataggacattagtctctgcccagtagcagagagaatacagcacagcttagtggttaagtactggactct

SEQ ID NO: 805083 - DNA, 573 bp, Homo sapiens
gggagaggcaggagttaaaataattctgaggcacccagtctggattattggatgaatggggatgtcccctccatggagataggagaaggacacgtatttggaggaaaagagaatggagtttgtggtgtattgagtgacaggagtctgcaggacacccaggtgcagaaatttggtgggagactgtcaggagtctctgcgtgggcttcagcagatagggtgggactggggctattaatgtggaaaacrtcagcgaatacactttcatttccccctgttttgcgtaagcccccagtttggatggaataggacattagtctctgcccagtagcagagagaatacagcacagcttagtggttaagtactggactctggagtcagacttcctgggtttgcatccggctttaccatttattaggtatgtgatcttgggcaattattaaacctctctctgggtctatttgctccaatgtaaatgaagataaataatggtaatacctcatgatgttgatgtgaggattaaatgaagtaataaacacaaaatacttagaaaagtgcctggcacatagtaagta

SEQ ID NO: 805084 - DNA, 622 bp, Homo sapiens
ttagccccccgggcaattctgcctctgtgggaaagccgtgaagaaaaggtcagtacctttttatctatggctccttcaaatcacctgaaaatgacaaatcttgtttttctaatttttttctgacataattaatatttctgctcattcccgcctccccaaaagaggtgcaacttgttagcgcaaaaaggccaaatgtattctctaaaaatgatctatctggcactgcgtctaccaaaaaagaatgattttactttcactacagaatacaagaaaagaaaggtgatttatcatggaaataaacagcagctttagaaaaaaaakgtcatccttatttttagaacaccatcaattctaaaccagacctgagctgattgtttcagcctctgagaagtacactgtcgtcacgtttgcctccagctgttgggaaagcacatggcaggcaatcacgctccctgtcctgtgcaggccagcacctctttgcacaaaaatggtagtgccaccttcattagagagagctgcatggtgtcatggcagtcagacttccctgaggtggaatcgcagagtcaggttctgagctggtgctggggcaggaaagctaaataatacctgggtttcagcagct

SEQ ID NO: 805085 - DNA, 596 bp, Homo sapiens
aatcaatgtttggccaaattccctggacagaatgtttcagggccattccatcagaaagtctgcgtgaagatgacaaactcagaagaaatgttatttagaccatctttgtccatcaacactgtgctttgctcagggcccaatggacttatttaccttgacacccaaagtaattgctcttttccaaagcaaaatatccatcttcacaggtgtcgcaggaatcgccacccacatgggacttgcagtgacagtcaccatctccctgcagaacagtgagccagatgacaacatttgatataattacagaattcactaatcttcaagattgaaaactgsctcactgtataataggaagcagtgtagccaggatctggaaaggattaccatgcactgtagaatgacagaagtactaacacacgcccccagaaaccccacaagcagttgctgtagcattctgctgttgtcacatgaaaactcagcccactttacctgcctacactctccagttccactcactgttcccgccttatggcacttgcattctgtggagataagagagcatccttgaactaagggagacacaaaagacagttcctggc

SEQ ID NO: 805086 - DNA, 620 bp, Homo sapiens
ggcccagctccagttctgcagggctcagcatcaggctgccccctctccaaaggtgttttgcaggatcgcccctcagagctaaacacccaccagctgaccacctgttccaggtgatgggattttggctcagatcagcctggatcagggtggacctctacaagctggcttgcatraatgtaaatgtctgctgcccatcttgaagaccatcggcaagctttggtgggttcatattcagtggcattagggattaaggcaaacttaaaatgattctgagtgtaaacagatacagatataaacttttgggggaacaatttggtaatagctaataacaatcgttaaaatgtttatatcctttgacctgatagtgttagttctaagaatttaccttaagaaaataaataaatttatatcccatgatatcttcattttagtgttgcttgtaattgccaaaagaaaaaaaaagaaaagagaaaaaaccccatttactgaataattggagggtggttaaatacattacggtaaattcatctgatagaataaaatgctctacagttaaagacctaggaaacacaatagactttgcaaaaccatataaaaacaatatatatggtatcatcatg

SEQ ID NO: 805087 - DNA, 510 bp, Homo sapiens
gtcctgtcatattatcaggatcctcttcagaaacatgagaaactcttcctgtaaggtaagatactgatttggtgattacatcatcatgtataatctgatttattttaaagtcctaagcaagcataacttcttctttttcatccaggtattcttgttcaggaactacaggaggactaacaaattaaagaacgagtcactgcaactacttaagtaattttgttttttcccatttacaccgcttttctcctgaatggttttcactgtgatagtttttttcctttgttccaatctacttgacatcctatgcagmtttgaatttcaactccctgagaaaggtaagcatttgctataaattccagtcaagactttatatgtctttgttagtgcgttgtttttaaaatattcactgggcttaaagtgaaagtcaaatgtataacttcaggggcttgccaggaactgagaattttagttcaacatctttcaaatgttttagaacaaattcatcaatgc

SEQ ID NO: 805088 - DNA, 583 bp, Homo sapiens; identical to SEQ ID NO: 768637

SEQ ID NO: 805089 - DNA, 577 bp, Homo sapiens
ttcttccaataggcatgcattttataatttaaaaacaaacaaaaaactctcaccatgtcccttccattaccatctcctctctccttgtctgctgaacgtctagaaaacaataatttattctaacagacataccgactagaacttgtttttaaagaacaaatcaaaaggcctttcttctttgaacagtcttgcttgttactagatcaccctacagaaattcaagaaattcaagaaaacattttttcttgaaatgttttctcccttggtcttcataacacattatcctgaytggttttctggttttaggagacttcttccttccccttagatgcagacattgcaaaagtctgtccctgtcctcttccctcttagtactttcttggtgatccttgccacacctctatatctgcaagtacgatttctaaacagatttttctagttcacagtgcttgccaaaactgctgacctgatcaagtatctgatgaaaagctgtaaagcgatgtctattcctgcctcccaaaccaactcttgctaaagcaatccagtatctttatcttgaaactacttcctccttctg

SEQ ID NO: 805090 - DNA, 564 bp, Homo sapiens
ccttgataatttaccaggagttccaattccaattggcccttctcttctgcccatgcaatagatggacgtaaacctcacctgaccaatgtgcattacaaaaataacccattctctggcatttacagaataatgttttatgttttgactactaaataaagcaaccagcaagaggattccttgtctccttggaacaagcagtaccaaaaatctctctgtagggcttttgttattacactcgataacaacaaycaagctgataaagtaacatgtagaatcaaagaaatttctataaaaattctaaataaagcatgctacaagaccttttgttttcggatacacaatatgaccatgagtatatacccaccatattccatcacaggggcctcaaaaatggcccttggacatagatagaaggcagctttgggtaaataaacagcaattctgaaatctctccttttttttttgccattgggtcctattaataaaaccatcatccactaaaagtaaataagaatataatagaaagcagggcaaaaataaattaatagcattttaaagagattt

SEQ ID NO: 805091 - DNA, 515 bp, Homo sapiens
gtgcctgtagtcccagctacttgggaggctgaggcaggagaatggtgtgaacctggtaggcggagcttgcagtgagccgagatcatgccactgtactcactctgcctgggcgacagagtgagactccatctcaaaaamataataataataaaataaaaaataaatgaaatgctatctgaaatgctatttgaagggacatttgaaatgctgtgtgggaggtaagtaggtgaagagagaggaggaaaaggctctgggacctgaagaagcatgaaaaaacccagagagaacaagagcaacagtgaaaaaccgaggcagagattaacttgcccagcatcaagaactattaagggagaacgcctggattcaagtccagatgtccaacacatccaagttcatgctattaaccgtcacactacggtgcctccaatgcccaagggtgtctctcttatataacctttgagagcctaatggcagtcagctcaaaacagagtttttgaatagcactggatgtgtac

SEQ ID NO: 805092 - DNA, 631 bp, Homo sapiens
gttcctacgattaaaggcaatgttaattctcacaatgaaagtaatagacagaaaatataattaacttcactaatatttatattatacatttagaatttggacaaatatataagaaatacaggcatgcctcattttattgcacttcacagayaccactttttttctttaacaaattgaaggtgtgtggcaaccctgccatgaataagtccattggcatcatttttccaacagtatgagctcacttcgtgtctctgtgtcacattttggtaattctcccaatacttcaaatttttcatgactgctatatttgttatggtgatctatgatcagtgatctttgatgttactattttaattgttttggagcaccacaaaccatgcccacataagacaacaaacttagttgataaatgttgtgtgtgatctggctgctccactaaccagccattcccccttctttctccctctccttgggccccccattccctaagacgcattaattgaggttgattaataaccctacaatggcctctgagtgttcaagtgaaaggaagaactgtaagtctctcactttaaatcaaaagctaaaaatgattaagcttaatgaggaaggcatgttgaaagctgagaaa

SEQ ID NO: 805093 - DNA, 426 bp, Homo sapiens
caggcagtttgaaagaggtgggagacctcaagccagtggaccttctctggtgttctttttattcaccaggaatgttagagggttggaataagtcagggttttctgaagcaccagcccagtctcactgatttgatggcctgttagtacatgtcccatgaaaagaggttctgtgttgggttaattgggatatcctgggacttctcccaggctttagttttgcactgtgattctccaaggggaagataagaatatgcaggyatgctatgtttaaccagcttatttgaccaggaaaattcctatttatactgtagcctgtgagactggaagcgttcggtagaacatactttgggaagcagtaggctagataatttgtgagatctcttccaactttcaaatgttatgattctgtgaatatactaaaaacca

SEQ ID NO: 805094 - DNA, 400 bp, Homo sapiens
gggctgcagacacggggggccaagatgacaaatgcatggagaagaacctcttcctttccttcctaagacagagtgagacctagaccatatctggcagataagaatatgtactgtgaatttagaaaagccacatattttgaataataatagcattacaccataaaatgatatcatcatagcayacaaatctggggcattaattgttacggaaaaaatgggatgaggactctggttgagtgtggaattgtggggctgtcacccgcaggatgcttacaccccgcactctgtcctggcacgctcctcacaacaacagagagcaggaagagctaaggctcagtatcaaatttcctcttccactcttaggacttattaacaaattaagaagctgggtaaatggagg

SEQ ID NO: 805095 - DNA, 400 bp, Homo sapiens
gggctgcagacacggggggccaagatgacaaatgcatggagaagaacctcttcctttccttcctaagacagagtgagacctagaccatatctggcagataagaatatgtactgtgaatttagaaaagccacatattttgaataataatagcattacaccataaaatgatatcatcatagcatacaaatctggggcattaattgttayggaaaaaatgggatgaggactctggttgagtgtggaattgtggggctgtcacccgcaggatgcttacaccccgcactctgtcctggcacgctcctcacaacaacagagagcaggaagagctaaggctcagtatcaaatttcctcttccactcttaggacttattaacaaattaagaagctgggtaaatggagg

SEQ ID NO: 805096 - DNA, 486 bp, Homo sapiens
ccgcttctccccactgcgtgtctatagtactgtgcctcgaaccttctctgcccacttgtgttgtccttacagctgatcctattttccttgactcctcccatgtgacttactacattgctggggggaatgaatgtgtgaatacagtacctagcatgtggcaaacgctgtctaagtaagggtgtgatggtgtttattattcctrctgagtgcttaagcatgggaagtcaggtatcacattttcgtgttttgtttttttttttcttttggggaaaaagaacttgtttggtgttgagagctgtcaataaagcaaggcctgtgattggcaaaattggttatgggtgtagctataggagatgtatgtactatacagctgtttacttatccctgaatttccacaatgcaaacaatgtttgggaggctgaccaatgggttatataggaatctcaattttcaaatgtgaattggtagttataattttgaatttct

SEQ ID NO: 805097 - DNA, 616 bp, Homo sapiens
tagatcacaatttgaggcaaaaagatcaagctgcattttctaaatattacaaaacaatagggtaccctcatttgtcgtgtcaccactgatgctagtattatattttaagatatgctactttttaagatgtgttacgtaaatttaaatacaaatattgaacccatggtaaagcaattaaatatttaatgagaatgtggagaaatgtattggtgcgcatgtgaaggaggtaaatacagctttgtctcccagtgtcctcaagtcacaaaatrtaacattctcttagtctgttgtatttaaagacatccttctagatgaaaaaggagactacttgccatggtaatttttttaagacagaatcctgctctatttctcaggctggagtgctggagtgcaactcgaacagcctcaatctcctgggctcaagcagtcctctcacttcagcctccagaattgctaggattacaggcatgagccacgacacctggccaaggtaatttcttatgaatgacaaaataaatcagttatttctacatactctctaacataagccaaggtctacttgacattatgtacatataaaaattgttcctcttaatcagaggaaactgcatatttt

SEQ ID NO: 805098 - DNA, 591 bp, Homo sapiens
cttgtattacacttggcatacacatcccttcctcccaaccctaaaccctgtaaaccattaatataaccttggggtggcacgaactaatataatttagttttgattatgtgtttgctagaatttttttattgttgatatacagtcaatttaatttttatttagtcatatgcattgatttttttttcctttgagaggtcttctgctgctttgaccattagaaagcctttgtctctccagaggtttgatgaatatattcttttattttcttaatgccattttatggttatttatttcatgtatctctttaaacagtttggaacctagttgttgtgtgattttttttccaccaagcaaaccaattgtcttgataatttatgttaaaaacaacctctgtcactcatttgtttttcatgcctcttaaaatattgaaagtgytcactaaatgccttttccatcatttgggttcagttctggaaacaggaaattgaccatgtggagatggaaattaaggatccttaaaaggaactgtactatgttcttcatgccataacaagcgccaccactaggtgtacctctttttgtaatctggct

SEQ ID NO: 805099 - DNA, 556 bp, Homo sapiens
atgttctttagattccatgttaggtcaggggggaattttgcctcttattttctgtgagaagaaagcatgcatgcatagacatgaaaactgaagttaagagatgtgcttatgcctgtaatcccagagtgttgagagaccaaggtgggaggatctattgaggccaggtgttggagattaccctggacaacacaggaagaccctgtctctacaaaacacacacacaaacacacacaaaattagctgggcatgatgtcacacacctatagtcccagctatgtgggagctcgaggtaggaggatcacttgagcccagtttgaggctgtagtgaactatgatcgtaacactgcactccagcttgggtgacataatgagacactgactctttaaaaaaaaattaaamgaaggtataccagcaaaggccctaacaggaaacagattacttactcacataggttagttttaggagagttcagtaactataaaactgtacaaagattatgtacaaagttatggccaggattaaccaagaaacgcaaaagcatcatcaaattcacag

SEQ ID NO: 805100 - DNA, 650 bp, Homo sapiens
ttttgtgatattttcttatgtggcattattgtggcaatagataattgatatattacccaaaatggtactcactggcctgaaaatgaaggtaaacccattcgagtccctgggtctgtgggataataagaacattaactatgagtaaatccttgtgctatatttcttctgaacaatctaaggaaaagctctaccctttctgagtaatattgtaaaacaattaccctcctccaattcctactcccaaacacatatgagtatctgttttaatctgttttctagtctttctaaaacttggttaaagatacaattcatttaatcataggaataacacagagactgtagcagctgatacacacacacacacacacatacacasacacaaggttatgtatggtttggaaattgtattccttggaacttcagggctctgtagagatgtctgagggtcactagtcacagcagagaagggaagtatagtatgagaagggaagagatgatggtgataagcaggtaaggtgatcagatccttctttctgaagttcagtcagagcaaaaccattttatctattgtgtacactggtgctctagatatgagaaaagggttttctggcaaatacattacagacatatagatagattataaatagaca

SEQ ID NO: 805101 - DNA, 594 bp, Homo sapiens
acctgccccattcccagggccatcatgttttcattaactcagtgctccataaccaaaagcttctgtccaggctgcatttgtcattaaagatcaacaccagcagaaagctctaggccctggaatcacgaagtccagtgtgctgattagcaagcacactagcagagttcctacttctcaagattatctggcaaagactcaaacacaaggaacaagaatcagatactagtactaatctacaaatcaagaactagaacttcaactgaaaggaaaaaagtgcctgattgttagaactagtgctcagtattgaggcagactaagaccaaagccatttgatattcattccaagaatatttccttggaactatttaaatatcyatcattagaaatgactgtaggtttttagttgtctaagccaacagatggtttcaaatacttcttgtatgaggaaggacctaggaccagcagagcctgacagtatattgctattttgcctctatttgttcatctgtaaaataaaaataatatgtcccctgcctacctgaagatatgtggaagtatcgaatgatatgatgtatatgaaagggctatataaaa

SEQ ID NO: 805102 - DNA, 515 bp, Homo sapiens
accacttaaatgatgtgtgaccttgggaacctcttttaaattaagtttagcctacagctgctttcttacatattttacattcagcctaaaggtttctctgcacctactgagctataacttaactggatatgtaaacaagactgtaacctgctgttatagcagtaagccaagtctcagytaatcacagccaccatacttcaactacatatcactcacaggcagccaattgttattcaaaccatgttcaaataaggcaaacatggagtagtaaccaatctgactgtttctggacctttcattttttttgtacatcacttgcctttttctgttcataaatactctccaaccaggccaatgtgcctaagtcactgaacctattcttgttcgggggttgtccaattcttgaattgttctgtgttcaattcaattgtttaatttgtctaaaatttttattttaaccccctccatgtgaggtttcttacctagcaagtgggaataatgaaaatacttaacac

SEQ ID NO: 805103 - DNA, 560 bp, Homo sapiens
aagtgtgtaaatatagagggcgttcctgtagtcaggtgtttctatttcttatgatctgtgatatttatacatagcacagtgctcagcagcacagatttgggagtcaggatgcttggatccagtccttactctgatactgaatagaattgtgatcttgagcaaatcccttgaatctatgtaaaagtattataattctaccttatttttgagattcctgagacaattaaggtttttttttttttaatgaagccctggagcactagatgtacccttatcattattattattattttcaggtgttggtcaggttcagcgacattaatatctctttgtctttatcttcatctctcaaaatcmtctgcttgcctttatgcaatactgtttttcttaaatgtaattccttacacaggaagactgaggattaccaccaaattttgaaagtaaataaaagctcttaattatcaaaaattttaatggaactgtgaaaaccacctaatatcaactttctaaactgtataacaaaagtcagttctgtttattctacaaagtgaatatttttg

SEQ ID NO: 805104 - DNA, 560 bp, Homo sapiens
aagtgtgtaaatatagagggcgttcctgtagtcaggtgtttctatttcttatgatctgtgatatttatacatagcacagtgctcagcagcacagatttgggagtcaggatgcttggatccagtccttactctgatactgaatagaattgtgatcttgagcaaatcccttgaatctatgtaaaagtattataattctaccttatttttgagattcctgagacaattaaggtttttttttttttaatgaagccctggagcactagatgtacccttatcattattattattattttcaggtgttggtcaggttcagcgacattaatatctctttgtctttatcttcatctctcaaaatcctctgcttgcctttatgcaatactgtttttcttaaatgtaattccttrcacaggaagactgaggattaccaccaaattttgaaagtaaataaaagctcttaattatcaaaaattttaatggaactgtgaaaaccacctaatatcaactttctaaactgtataacaaaagtcagttctgtttattctacaaagtgaatatttttg

SEQ ID NO: 805105 - DNA, 560 bp, Homo sapiens
aagtgtgtaaatatagagggcgttcctgtagtcaggtgtttctatttcttatgatctgtgatatttatacatagcacagtgctcagcagcacagatttgggagtcaggatgcttggatccagtccttactctgatactgaatagaattgtgatcttgagcaaatcccttgaatctatgtaaaagtattataattctaccttatttttgagattcctgagacaattaaggtttttttttttttaatgaagccctggagcactagatgtacccttatcattattattattattttcaggtgttggtcaggttcagcgacattaatatctctttgtctttatcttcatctctcaaaatcctctgcttgcctttatgcaatactgtttttcttaaatgtaattccttacacaggaagactgrggattaccaccaaattttgaaagtaaataaaagctcttaattatcaaaaattttaatggaactgtgaaaaccacctaatatcaactttctaaactgtataacaaaagtcagttctgtttattctacaaagtgaatatttttg

SEQ ID NO: 805106 - DNA, 630 bp, Homo sapiens
taaggttggtctcggaggtcgggcccactggaataaactgagtccagtacctctacatagttacgttcaactgggctgtctgataccaggagcaaggtggtggggtttagggtgttgcaaacttcactggttatgcggggattttcacagagcaagctttggcatctagttagtctagcattcattagctaataatgtcctttgctgtttattaaagtcaccacagcatgggggacttaatgtttaggttttgcctaagagtgagcttatctgcttcttgtgctaacagggccattgctgccagagtccttagacatgggggccagcctttggaaaccccgtctagttgttttgagagataggccagtggccttggccagggccctacagtctgggttaaaactccaactgccattttttctctttstgatacacagggtgtaaagggttttgtcaggtcaggtagccccagggctggggccgacatgagttttttttgttttgttttgttttttttaaattcatgaaaagcttgttgctgttggttgtaatagatgtagtttatctaatctagatttttattaactgtcacatactaaaatattgacttaaatcctgtagctatttgat

SEQ ID NO: 805107 - DNA, 630 bp, Homo sapiens
taaggttggtctcggaggtcgggcccactggaataaactgagtccagtacctctacatagttacgttcaactgggctgtctgataccaggagcaaggtggtggggtttagggtgttgcaaacttcactggttatgcggggattttcacagagcaagctttggcatctagttagtctagcattcattagctaataatgtcctttgctgtttattaaagtcaccacagcatgggggacttaatgtttaggttttgcctaagagtgagcttatctgcttcttgtgctaacagggccattgctgccagagtccttagacatgggggccagcctttggaaaccccgtctagttgttttgagagataggccagtggccttggccagggccctacagtctgggttaaaactccaactgccattttttctctttgtgayacacagggtgtaaagggttttgtcaggtcaggtagccccagggctggggccgacatgagttttttttgttttgttttgttttttttaaattcatgaaaagcttgttgctgttggttgtaatagatgtagtttatctaatctagatttttattaactgtcacatactaaaatattgacttaaatcctgtagctatttgat

SEQ ID NO: 805108 - DNA, 590 bp, Homo sapiens
tgtacaagacacaaaatcatttgaagtctgctacttttttaaagctccatattcactgtaatagtttcctttttggaaattatttgttagttgttttctgcttatatgaggaaaacaaaacaaaacagaaccagcaagaagtggattcttatttcagttgattaaaaaaaaaaactgtacactgtatcaaaacaatccaytttctatttcatgcaaaaaagcaaaataaggaatattcttaaaatgactttgcaggatgtgctttattttaagtcagccctgaacccaaactacacaggatcaatttttgacatattctagtccattcaatgattcttctcagaaactgtatcttaatatggaatgaaaactacatttcaatcataaatttttcatgctacattgttatttaatgaagaggttgtattaccaataataataatttaagaaaaggccatttttatttccccaagctcaatatacatatttctttcataattatgaacttaaaaaacccgtctcagatgtaaaaatgtgaattggaatatgtaaactctttgatatacctgaaaaacaggaaggaaaatgtc

SEQ ID NO: 805109 - DNA, 590 bp, Homo sapiens
tgtacaagacacaaaatcatttgaagtctgctacttttttaaagctccatattcactgtaatagtttcctttttggaaattatttgttagttgttttctgcttatatgaggaaaacaaaacaaaacagaaccagcaagaagtggattcttatttcagttgattaaaaaaaaaaactgtacactgtatcaaaacaatccattttctrtttcatgcaaaaaagcaaaataaggaatattcttaaaatgactttgcaggatgtgctttattttaagtcagccctgaacccaaactacacaggatcaatttttgacatattctagtccattcaatgattcttctcagaaactgtatcttaatatggaatgaaaactacatttcaatcataaatttttcatgctacattgttatttaatgaagaggttgtattaccaataataataatttaagaaaaggccatttttatttccccaagctcaatatacatatttctttcataattatgaacttaaaaaacccgtctcagatgtaaaaatgtgaattggaatatgtaaactctttgatatacctgaaaaacaggaaggaaaatgtc

SEQ ID NO: 805110 - DNA, 559 bp, Homo sapiens
accatgtactcactttcgtctgtcaaattcacagaaacctcagcaagtttggcatagtaaagcatatgaaagtgcactcaatcacacatgatcagaagaatgcatattcaaaccagagtttctcacttctacacccaccaaaatagacacgttatcagagagaaaaatgcagagggttggtgagrttgtggaggaactggagctatcacatgtgactctgggaacatacttaatttcatccactttgataaatgactttctagggtgtactagagtaatcggtacctgtgaccctacagtcccactcctgctacctatgtccaaaatacatgtatgaggcaaggatgctggtgtccccctggggggctttatagcagcgtcacttcatgtaactgtagcaggacaagccgcagacaaaacccctcagacaccgaattaaagcaggaacggctttattcagctgggagcttcggcaagactcacgtctccaacaactgagctccccgagtgagcaattcctgtcccttttaagggctcacaactctaaaagtgtctgcgt

SEQ ID NO: 805111 - DNA, 587 bp, Homo sapiens
tgtacccatgtttcttgtcacagataccagtatagacatatggatgaatgaatgaatgaatgaaccttggcagagcggctcacggcatcctgtgactgaagaaccagattggcctgagcttttgatgcccgctcaggtgttcagaatccccagggctgtgtccttgagtgcgcacatcatgtacgggctggtgaaatgccarcccaaaacagatttttgctaagacttacctcaattagatatacttcctaggagggccatgccattgacccattgcccagggaacttgcagactactggagccaaccccgcaccaggtctcatggccagtaagactgtcatcagtcctaatcatgctccctttggtttggatctcttgtagcaccaaggggtggagggtaccttcagaggtcaagaaaatggactggcatggcaggcacatgcccgccagaggactttgtcaaatggccaaggcattcccatcaatgccaggtgtcagcatactgcagggatgcaccgagatacacggctgccagtgaaaagaagatgccctctgacttgccaccatgagcagtcaaaacgaaact

SEQ ID NO: 805112 - DNA, 562 bp, Homo sapiens
tgaattcattctaacttgttataacaggtctgaacagcatgtagtttgaggcactaagaaagataagacatcagtttgaatgcagcctctatcagagcaatgtaaaccctgctaaaattaaagcaagagccccttgcttgggtggaagaatggtgaaattgttgatgatttacaagaacgttatgtggataatgtccaaagaaatcagagatttacaaatgaataactcattttaagaaaggacaagatgaygttgaagatgaagcccggcagcagcagaccatccatatcaatttgaaaggaaaaacttcaccttgtttgtgccctatttgaagagggccaatgactaacagcacaaataatagtcaacaccatagacaccttaattggttcagcttaaataattctgcctggaaaattaaaactgagcaaagtttctacttaatggatgctcttgtcaactatggacaagagcaaagatttcaatggaaatttgaaacaagtgggatcaacatcctgaaacatttttttcctgatttagcaccttctgactttttttttt

SEQ ID NO: 805113 - DNA, 680 bp, Homo sapiens
gaattcattctaacttgttataacaggtctgaacagcatgtagtttgaggcactaagaaagataagacatcagtttgaatgcagcctctatcagagcaatgtaaaccctgctaaaattaaagcaagagccccttgcttgggtggaagaatggtgaaattgttgatgatttacaagaacgttatgtggataatgtccaaagaaatcagagatttacaaatgaataactcattttaagaaaggacaagatgacgttgaagatgaagcccggcagcagcagaccatccatatcaatttgaaaggaaaaacttcaccttgtttgtgccctatttgaagagggccaatgactaacagcacaaataatagtcaacaccatagacaccttaattggttcagcttaaataattctgcctggaaaattaaaactgagcaaagtttctactyaatggatgctcttgtcaactatggacaagagcaaagatttcaatggaaatttgaaacaagtgggatcaacatcctgaaacatttttttcctgatttagcaccttctgacttttttttttttgtttcctaatcttaaaaaatctgtaaacactcatttttctttcagttaatagtgtaaaacagattgcagtgacatagttaaatttccaggaccttcagtttcttaaggatgggctaa

SEQ ID NO: 805114 - DNA, 514 bp, Homo sapiens
cagcccggcgccacaccctaggcctggtagttaaaactgacccttgacctaatcagttatctatagattacagacattgtataaaaaagcactgtgcaaatccctatcctgttttgttctgatctaattaccagtgcatgcagcccccagtcacataccccatgcttgctcaatcaatcacaaccctctcactgcgcacccccttagagttgtgagcccttaaaaggcgcaggaattgctcactcagggagctcggctcttgagacgggagtcttgccaaagcccctggctgaataaaccccttccttytttaactgggtgtctgaggacttttgtctgaggcttgtcctgctacatttcttggttccctgaccaggaagcgaggtgattggtggatggtccaggcagctcaagcttgccctgtggaacatccctgtgggggactccaaccagcccgagctacgtggatcctgagagtacccttgggtaggcatctgccccggtgggacgcctc

SEQ ID NO: 805115 - DNA, 594 bp, Homo sapiens
agtctttcattattgactataatgttagctgtgggtttttcataaatgctctccatcacattgaggaaatttccaaccattcttaatttgttggctttctataacaaaaagtattagattttttaatgctttttctgcatcaaataaaatgataattttgttctttcattctattaatgtggcatatttcattgagttattctcttatgttttgtcacccttgcattcctgagataaattcctcttggtaataagatttaaatattaataggcttctgaatttagattaatattttgttgagaatttttgcatctatattcataagggatatggtctccaatttcatgtgcttgtggagtcattarcctggctttggcatcagagtaatgatggccttatagatttagttaggaagtgttctctcctcttcaacttttggaagagtttgagaaggattggtatttaatattttctgaatgtttggtagaagtcatcagtgaagccatctggtcctggacttttctttgtagggaggtttttggttattgattcagccaataggcgtattatagatctgttcatatgttctcttt

SEQ ID NO: 805116 - DNA, 542 bp, Homo sapiens
ggggcaattcagtggggcccctataatggcagaagtgccatgggggcccactgagtggggtagaaatgccacagaggcctctgggtttgttggaggaccccagggggtgctggagggctgagggtagcaggatggacaattatagtcagctggggctaaggacacctgtgaaaagccagaggggaagctggaaggtaggagtgcaacagtcctgtatgaggaggggcaggaggatccagaagggtggcagagtgagaggaattgctggggaaatggcaggaggtaagggaaagtttggaagagacaaagattgggaggaagatgtggtaggactggaatggaatgtctgaaaacagggggarttggaattaaggctctctcctctttcactgtcctgccttgggtctgcagtcccgggcccctggctagagctgggctcccaggctccttctctttacctaatttgccgtctatacggggccgggactggacagtggtgactgtggtgacaatggtgccatcgggcatgatggtccggtcaa

SEQ ID NO: 805117 - DNA, 589 bp, Homo sapiens
tagtctgatacgtttatactgctttccagattttctgaatacctctgtgatgttactagattgcaccatctcttttacccttgatgttttgagcataaggtgtcctcttttttcactttatttttattgttgaaagtcttaaatgtgtcaccacaccttgacttcatgtgctataagtggtgaagaacctactgtcaaatccacagatgtcccacacatttaattctttttaacaraatttctgggccgggccccgtggctcacgcttgtaatcccagcactttgggaggccgaggtgggcggctcacttgaggtcaggagctccagaccagctctgccaacatggtgaaatgctgcctctactaaaaaatacaaaaattagctgggtgtggtggcagacgcctgtaatcccagctacttgggagactgggacaggagaatcccttgaacctggggcagaggttgcagtgagccaagatcgcaccactgcactctagcctgagcgacagagtgagactccgtctcaaaaaaaaaaaaaagtctgtttaattcttttaaatgacacacatttagttctaagtcaccatct

SEQ ID NO: 805118 - DNA, 509 bp, Homo sapiens
ctcactgttgcccaggctggagtgcgatggcactgtcatagtttactgtagccttaaactcctgggtttaagtgatcctcccacctcggcctcctgagtagctgggactacaggcatgtatcacctgcctggctaatttttgtagtgttttgtagaratgaggtctcactatgttacacaggctggtcttgaattcctggcctcaagtgatcctcctgccttggtctcccaaagtgctgagattacaggtgtgagtcacgacatctggctgcctctttggggttgataaaggatctcctcttccttttcttctgtcttcctcatttgccatccacctctgtctcacacacacacatacgcacacacacacacacacacacacatgcacacatatgcaaacacatgcacacacatccacacacatctgcacagggagacacacacacgtgcacatacatgctcacacacacacacgttcacacgccccatagctcctacctcaatgttcc

SEQ ID NO: 805119 - DNA, 605 bp, Homo sapiens
cctgtttgtgcatgcgcgtaatgaagatagcaacaccttaagcccagtggtgcttaaggcacgtgagggggtgggtatgaagggaagcaggccgttagttggcaaatgctagattgaaagaatccactgtacagcatatgctgaacatttgtcgtctttggagaggaaagaaaacgaacaggacttacagctccaatgccctcacagaaccccgcgggcatttgcggcgccttccctccgcctctctgcttcttgttccctcacccctgcttgccacggcgtctgttccctctcaactcgcctggcagatctcagcatgcccctgcttcctctaggtggctgctattgccagagcccactgagtagacgcggattacccgttkgtcagccccgggcatctgggctgttccagagttttctagtccaatgacccgtggggagcgtctcgaatgacgctgccctcgaagcagcccggctctcagccccgtcctgccctctccccaggcactggcgcgctgatcctgcaaaagggtgagatccgcgtcatcaaccagaccacctgcgagaacctcctgccgcagcagatcacgccgcgcatgatgtgc

SEQ ID NO: 805120 - DNA, 627 bp, Homo sapiens
tgcttgttcacatatatggtacgaagtctgatatacttagaagtatgggatgagaagaaggtgatgatgaggaaatgcattctctaccatatatttatcacatgcatttcccaatatgtctgcagaaactcaggcccaagatatgctccataatacaaacttatatggacaaatatattttggatacagagacatacctcatcttcttgcactttgctttattaaactttgcaaatattgtgttttttacaaattggaaatttgtggcaaccctgctgtcagcaagtctactggtgccactttccaccagyttgtgctcacttcacatttgtgtcacattttggtaattcttgcaatatttcaaaatttttcattattattatatctgttatggtgatctgtgatcagtaatctttgatgttactactgtaattgttttggggtaccacaaactgcacccatataagacagtgaacttaatgttgtgtgtgttatgactgatttacccactagtcattcccccatctctctcctcctcctcaggtctccatattccatgaaaaacaaggatattgaaattagaccaattaataaccctacgatggcctctaaatgaccaagtgaaag

SEQ ID NO: 805121 - DNA, 611 bp, Homo sapiens
agacctgagcctttgccccaggccggtccccgcacctgtatctcttgtcgtccagggggatgaagtccatgagcagggcgtagtcggccagggagtccatgcccaggatcttcacctggaagggggggaacatcctcctgcgggagggaggtgctcagcagccggatgcggctccaaccctggcccctgcctcaccccgcccccgctgctcacacctgcctgccttggtgacgatcatctcagtgcccagctggttgaattcctcccacagaggcttcatctccagctgaactgtcactctggacacacgtgggttcttggggccctgcccagtgggctcgkccacagcttgggccccagtagagctggtgcaagggcctgatgggaatggtgaccccagccggggctcccagccagagctggttgtaggtagggggtaggtctctgagggtgcaagtatgccgaggccagcagataggaaggctgtggagagaggacggaagtgtgggccccacgcatcacccagccagctcttatccttcaggctgcacctatatgcctcttcctccaggaagccctccctgactgccagggctgtgttctcacaggat

SEQ ID NO: 805122 - DNA, 576 bp, Homo sapiens
gatggcattgctatggagccactcttggtgaaggtcgaatgggtgacattggaagtctagcttttcctgaggctggggtctggaccttggtctagatcaggggtcagcaaatttttcttgaaaatgtagacagaaaatatcttaagctggccgggcacggtggctcacacctgtaatcccagcactttgggaggctgaggcaggcggatcacaaggtcaggagatcgagaccatcctggctaacacagtgaaaccccgtctctactaaaaatrcaaaaaattagccaggcttggtggcgggcgcctgtagtcccagctactcaggaggctgaggcaggagaatggcgtgaacccgggaggtggagcttgcagtgagccaagatcgtgccactgcactccagcctgggcgacagaaggagactccatctcaaaaaaaaaaaaagaaaaaagaaaatatcttaagctttgaggaccacatagtctctgttgcaatcactcatttgggccactgtagcacaaaaacaaacatagataacacacacatgagtgagcatggctggggcccaataaaacttt

SEQ ID NO: 805123 - DNA, 516 bp, Homo sapiens
tgcttcatgttctgtcctctctgaaccaccaaggtttgtttgtctgagggccatgactaaggctgcggcctttctctgatctcgcttttccttttggacctgttcctcttggtccctattatagaacaccgaggttgccaggtttaataatgtctctagattttgttcagggcccagggcttgcttttggagctttctcctgatatctgcagctgattgggtaataaacttatcttttagaatcaattgaccctcaartgatttgggtgacaggggagtatattttcttaaggcctctcatagccgctcgaggaaggcagaaggattttcttcctttccctgagttatggtggacatcactgaataattcatgggcttttttctaattctccttagtccttctagaacacaggtcaacagatgtttacaactccagtccccatgatctgagtcaaggtcccagttgggatccatactggggatggcttgctgaccggtagggaatttgtccctttc

SEQ ID NO: 805124 - DNA, 607 bp, Homo sapiens
gtcaaggtcccagttgggatccatactggggatggcttgctgaccggtagggaatttgtccctttctacggctgtcattctatcatttacttgactaagataccaggtatctccaaactctcgggctgcagctaaagccgcattcttttcattaaaggccagggtttgatctaacagtagcatgacatctctccaagtgaggtcaaaggtttgccctagaccctgtaggacatctatgtacctatcaggatcatctgaaaacttccccaggtctgccttgatctgctttaaatcagaragggagaaggggacatgtacccgggttgggccaaattcccctccccctacaacttgaaggggacacaactgacagcccgggggggtttgtggtcctttggagacctctttgcttatttccttctgggcaggggagattagaggaggattatcattaataggaaggggagctatagggaggctgggatatgggggtaagccgagaggtcctcctttggaatgtaaatggcaagctttgcatagttgtgtattctccctcaatgaaaagaaagcttgggcataaggtatttcactccatttgccttccctc

SEQ ID NO: 805125 - DNA, 633 bp, Homo sapiens
agttgtgtattctccctcaatgaaaagaaagcttgggcataaggtatttcactccatttgccttccctcttacagaaaagatcaagctgcaggatggtattgtaatttgtacttcccgcaggtggccatttttccccatcagaaagagaatattggggccaagccgcagtgcagaaaaaaatgagccgcctctttttcagggtttgtgggtcaaattggtcccaatggcttaggatgcatttcaagggtgagcctgttgatgcctgagtgtttcccatctgaaagacaaaaccacccacggttttggtttgttttgtttctccccctgcccaagaacccgcaacagtccctggaccctgttgatcggaatagttgcgctcrctgacgcagcagcagaaacaacccctgcccaagaacccgcaacggtccctggaccctgctgatcggaatagttgcgcttaccgacgcggcagcagaaacactagttttcctcccagaccacatggaggaccgaggaaggtcggatttagtggtccttgccgacgcattctcgaaaacctgcacccttgcctgtcctcctagaccacaaggaggaccgaccgagaaaaatcggatttagtggcccttaccgac

SEQ ID NO: 805126 - DNA, 631 bp, Homo sapiens
aggaggcctgaaaaagcaccaaaactggatccatttctatttcccaacactccaattgagagatacaaacttgatattgcctataaaacaatgaaacttttgggggcatacaggaacatttcaagtagtattcaggccaaaatacaggcatgtactaagtacacaggaatacatattaattaaatttaaaactaacatctgaaaacatctgtgaattgtttagattaagaagtgatgaattactctaaattctaagtcaaaggaaatatttatccattcttcaaagtacccaaatttcagttaagcctgcactgggattctcagtaaayggtaggcaatcttttctgctataggtttcaatgcaaattaactcttgttgatcactataagcagaagcagggagaaccttgttcttgtctagccgtatctgcccttcccgagtccccatagttgctgttagcattttaaaatgtctagacagtgtcaagagaaactgctacctctaatacttgtgaatgagtcattttagaaacaaaattcaagtgtatattcagggctgtgacgtttgcttacatataagtgtgctttcctgagtgggaataaaatctctgcagatgcacagactcctgag

SEQ ID NO: 805127 - DNA, 618 bp, Homo sapiens
tttctatttatatgactttggcaagtaatttaatcttctataatcagtttctctgacaatgggtcatcaagtaatcatgatacctgagcttcccatcatgaactgtgttttctgggtcatgaagccatagattgggcatgtaagatagcaatctgccactaaggagaagaagccaacaagagaacaggttcaagctagccaggactgcacaagttagttgcatgagcaggtagttctgctccattgcctcctctcttctatggcacacctatggcctcttagttttctgtttaataatgaactgatctgagataggagaaactggcatttacaaatggatattctggcaacaactgggaggtggactccccaagcattaaaccacaatcaggggtgtctcatccattgagtctggacagatytacattaattcatggctagttgctaacagcttgacttccatcatggttagaatttatcctcactggaataaacagatatttttggatatggatgttcctgttaataatgcttctgccgccaccattaattgtggacttagggaatgctttattctccatcagcgtgttttaaacacagaattatttccatccaaga

SEQ ID NO: 805128 - DNA, 536 bp, Homo sapiens; identical to SEQ ID NO: 738960

SEQ ID NO: 805129 - DNA, 632 bp, Homo sapiens
agatctctcctttcccctgtggctgatacgtccctgtatacgtcctctgcccgttcttcttttccccaacccacaacttacttttgaacatccttccaaccatgcaggcctcttctgttgttgctgtgcatattcctcttcctctggagcacttttctcctgggaactggaggtggcacatcctacacygaacaatttctatcacttggccagagagaggggaaagagaagtgagaaaagatggcactactcaggaaagaacccctctccccttttgggttagaagtctgcctagagccacagggctttgccagagcccatcaagcgtgaacctcttcctctgtggaaatacactaagccaagagagtgattgaggtttatggtctcaggaattttagcctgaaaaatgggaggggaaagaaaggtggaggaataaggaaaagtgaaacattatcaagactgaggtgatcagacaggtcctcttcatacttaccaggaaaattgtttttcacagcaactatttcattgactgtactggcaagagaaagaaaacacatctgaaatgtgcctgagatttactcttgtattgggttcttatagtctgcccttcagggtccatcctgcactcttaa

SEQ ID NO: 805130 - DNA, 630 bp, Homo sapiens
agatgttttcttaatatactatggccctatgacttttggggaaatccctgaaactttgctatatcttcaggatcaatggatgaatgctgttaaccttttagtagtttatgaatgacaacttttaaaacagccaggattctcagtttatacttgtaagagattgtctcgggaattttatttagcttatcagagctgacgttttctgtttagaatacattttcctatggtaggactttttttttttttttgggaaaaacccccctaaatggaggtttgttaatccttaaaaaaaaarggcaagtagaaggcagagaggtagcagtgttagtaagtctactactgctaaagtagaaggaaaaaaaatgaattcagacaaaaagagacttactggtttgtttatttttaaatgtaatctgatgtgcaaattgtgtcttctttaaaactttcagctcatctttggataccacttcaagcactatccataacaatcttacagaattccaaaatgaccctcccgctaccaattcttattctccccggaacttaaccaacgctagcttatttggattgactcggattccatattttcaaaactcctcggtgaggatccttagaagagacaaaacatgg

SEQ ID NO: 805131 - DNA, 724 bp, Homo sapiens
tgctgccacctcatctccagaggatccctgatcactgatggccctgccgaaagggccctatcagcccacgctgaggcccagagctgtgccaggatgtgtagtgtggggagtgagcccggcgaggagggtgcaacaaaggaggcttttctctggctgatacagcctctcccagctgagtcttgaagagactcattgagtcgtgaacttgacttgccggccttctccccctatgtggctgctctaagaataaaatcagctggagcagaccaaggcaaggtgcagtcagggtgtcttaagagtgtcttgcaaaaacttattgcataactgggactgccacttgtgcgagatgaaacctgtgcgtycttggtgagatggaatcggaggcatctttgctgcttcccctttcttgttttctgccatataccctgggctctgcagagcaactggtttctgggtcctatagatattaactcactttctgggctcatttatgaggcatttttatgtatgtgatttcccagagccaattctgcttcccatccttctattctgtaatcatctctccagcgcctcctgtccccagcaggaaggccaggactggccttcatgcattgctactggcactggcgagagtgaggcccacgttttgctcgccctgcaggtcagctggtcttgctccactgccttgcagagcaccccttgccctggccagctgccctctgcc

SEQ ID NO: 805132 - DNA, 624 bp, Homo sapiens
tatttaagattcaccagtgtctatagatgtctgaagacttcataccttttgtttctgaatagcattttagcatatagatatattacaattttattgtccatttacctatgtatgacatttgggttgatttccttgaggctattacagaaaaagctactatgaaatttcatgttcagttctttctataaacataggctttcatttctgtttagtaaatacttgggagtcggatagctgagttatgccctaagtgtatgtttacctttttacaaaactgcagaactgtttttcaaagtatttacaacagtttacataacycccagaagtttatgaagtttccacttgatttaaatccttgcagtacttgatgtcatcagtagtgtcaatttaagaccttttaatgtgtgaggcagtgtttaattgtggtttcatttacatttccctaatgaataatgatattgaacatgtgttatgtgcttatctgtcatctctgtatttatttgataagtttctgttaaaatctgttgctaaatttttttattattattgaatttagaaaattatatattcaggatacaagttgtttatcaaaaatgtgatgtgcaaatattccctaatgtcttg

SEQ ID NO: 805133 - DNA, 624 bp, Homo sapiens
tatttaagattcaccagtgtctatagatgtctgaagacttcataccttttgtttctgaatagcattttagcatatagatatattacaattttattgtccatttacctatgtatgacatttgggttgatttccttgaggctattacagaaaaagctactatgaaatttcatgttcagttctttctataaacataggctttcatttctgtttagtaaatacttgggagtcggatagctgagttatgccctaagtgtatgtttacctttttacaaaactgcagaactgtttttcaaagtatttacaacagtttacataacccccagaagtttatgaagtttccacttgatttaaatccttgcagtacttgatgtcatcagtagtgtcaatttaagaccttttaatgtgtgaggcagtgtytaattgtggtttcatttacatttccctaatgaataatgatattgaacatgtgttatgtgcttatctgtcatctctgtatttatttgataagtttctgttaaaatctgttgctaaatttttttattattattgaatttagaaaattatatattcaggatacaagttgtttatcaaaaatgtgatgtgcaaatattccctaatgtcttg

SEQ ID NO: 805134 - DNA, 624 bp, Homo sapiens
tatttaagattcaccagtgtctatagatgtctgaagacttcataccttttgtttctgaatagcattttagcatatagatatattacaattttattgtccatttacctatgtatgacatttgggttgatttccttgaggctattacagaaaaagctactatgaaatttcatgttcagttctttctataaacataggctttcatttctgtttagtaaatacttgggagtcggatagctgagttatgccctaagtgtatgtttacctttttacaaaactgcagaactgtttttcaaagtatttacaacagtttacataacccccagaagtttatgaagtttccacttgatttaaatccttgcagtacttgatgtcatcagtagtgtcaatttaagaccttttaatgtgtgaggcagtgtttaattgtggtttcatttacatttccctaatgaataatgatattgaacatgtgttatgtgcttatcwgtcatctctgtatttatttgataagtttctgttaaaatctgttgctaaatttttttattattattgaatttagaaaattatatattcaggatacaagttgtttatcaaaaatgtgatgtgcaaatattccctaatgtcttg

SEQ ID NO: 805135 - DNA, 593 bp, Homo sapiens
tgaacaaacacaattttattttttcttcccaatctgtatttccttccttccttccttccttccttccttccttccttccttcctttctttctttctttcttttctttctttctttctttctttctttctttctttctttctttctttctttctttctttctttcctctctttcttttctctctctctttttcttttctttctttctttctttctttctttctttctttctttctttctttctttcttactgcattagctagtacttttgatatcaagtcgaaaagcactggtgagaggtagtatacttgctgttttcccratggtagtgaagaagtttcaagtttctcattattaactatgatttcttaaaatgttctttaccaagttgaggatatttccctgtattgctagttttctgagagacattttgttttaagaatgggtggtgttagattttgtcaaatgctttttcctgcatctattgataagatcatgtaattttccttctttaaccaggtgattacattaattaattgtcaaacattgaaccagacttaaacacttgagataaatcccacttggtcatagtgtg

SEQ ID NO: 805136 - DNA, 604 bp, Homo sapiens
ggtccgtgctctatgttggcccctttcagccacaatgggagcggctgggatacaagacaccaagtctctaggctacacacagcatgaggaccctgggcatggcatatgaaaccactttttcctcttaggcctcctggcctctgatgggaggagtgctgacatgccctggagatatttttcctattgttttggtaatcaacatttggctctttgttacttaagcaaatttctgcagctggcttgaatttctcctcagaaaaggggattttcttttctactgcactgccacactgcaaactttacaaacttttatgctttgcttcccttataaaacggaacgcctttaacagcacccaagtcacctcttgaatgctttgctgcttagaaatttcttccaccaggctgggagctgtgactcacacctgtaatcccagcactttgggaggctgargtgggaagatcacgaggtcaggagatagagaccatcctggctaacacggtgaagccctgtctctactaaaaatacaaaaaattagctgggcatggtggtgggtgcctgtagtcccagctactctggaggctgaggcaggagaatggcgtgaac

SEQ ID NO: 805137 - DNA, 682 bp, Homo sapiens
tgctgcctgtgcctggtgtgccgggatcccagctaagcatcagatcaaccaagctcagatgcagagaacagcagaggagaaaccaaaaggcgacctcaggagctggcattgcgggaggggagattatttattcgatgcctttgggctagttagttccttaatttgttcattcatcaattcagctttctcgtacatgcctcttcctgggcattggactaaaggaaggaactagataaggtccctcctgtcaagtgaggatcaggcatggcagctactaattccataccgaggaggactgggaaagkgtttcaggagaaggtggcattttaggtggactttgaaggatgtagaggcattcaccaggtgttgaaaaagggacaagtcatctaggtagagaaaataacaagagcaaagatgccgcatcatgaggggtttgcagaagtgtaaggagtgtgtcatagccaaacagttggttgtgtagggggcagatgaggtggggccagcatgtgtagggccttgaatgccaggctaaagtatttgggcttttctaaggagtccatctcaaagtgtgcccacctgcagaaccagggaccaagcaattccagatcacccagccctgcaaggaccttctggaagcccatagctccatctgccatagtgagaacccaacctctagaaatgc

SEQ ID NO: 805138 - DNA, 682 bp, Homo sapiens
tgctgcctgtgcctggtgtgccgggatcccagctaagcatcagatcaaccaagctcagatgcagagaacagcagaggagaaaccaaaaggcgacctcaggagctggcattgcgggaggggagattatttattcgatgcctttgggctagttagttccttaatttgttcattcatcaattcagctttctcgtacatgcctcttcctgggcattggactaaaggaaggaactagataaggtccctcctgtcaagtgaggatcaggcatggcagctactaattccataccgaggaggactgggaaagggtttcaggagaaggtggcattttaggtggactttgaaggatgtagaggcattcaccaggtgttgaaaaagggacaagtcatctaggtagaraaaataacaagagcaaagatgccgcatcatgaggggtttgcagaagtgtaaggagtgtgtcatagccaaacagttggttgtgtagggggcagatgaggtggggccagcatgtgtagggccttgaatgccaggctaaagtatttgggcttttctaaggagtccatctcaaagtgtgcccacctgcagaaccagggaccaagcaattccagatcacccagccctgcaaggaccttctggaagcccatagctccatctgccatagtgagaacccaacctctagaaatgc

SEQ ID NO: 805139 - DNA, 635 bp, Homo sapiens
ccagaatgtccccttgctgggaatgtactccaagggacaggtgaatggtcacaggctgctggggggaaggcagggggccttcattggcaccagctggcattgactcatcatgaaagccatgacttggggctccatctctggggtcccatctgagcatgtgcatggaagcccatgcgaatgccgtgctggctcctcctgagggcttcctcagactcacctggaaggtgctgtcctcacccctgttctgcagaagaggaagttgtgtgctcactgaggctgcctcccctgggaaccctccagggaccattgctgtttttctgggcttttgtagccctgcatcaccacctcagatcaggagacagatgggctgacacatacaaggcacttcaycctccaagcctccagttcctcatctgtaaagtgagcaaataactctcattttagagagtgggcatggttgagacaatatgcatgaagctcctggcacacacctggcccacagcaggtagcaggtaagtggggaaataaatgagacataaagcctcccaggaggaaacggccagccccggactggggcatgatgcaggatccaggtgggcatgggccttcttcctttgtccctagctgatggagga

SEQ ID NO: 805140 - DNA, 508 bp, Homo sapiens
cctctggccctcacaccttccatttcgccctgtcagcagcctggcactgcgcctttgcccttcccttccctgactgcctctcccccaagctcctgctcagtgatgcttctcctgcccaccccgagtcagcctggacccctccccttggccctgcagcccctgggcccagcgttggcagctctgcctcctggagattcttccgtttctctggtccgtgccctctcacctccccattcctgctcctggctcccagtctgcaaagggaaattctaaacacctatttcatggggtagggctgggggagaaaggagagagccccaccccctggcacacgataggtgctccgtgaaggcctaaggggaargcaggagcttgggctgagctcgcctagggtctgcgggcctctgctccagcagggagcccagcaggcccctgaccccttttcctgacaaacagggagtttgctcacctggccaagacccccggtgaggcagaaattcctgttttc

SEQ ID NO: 805141 - DNA, 628 bp, Homo sapiens
tgaatttctagtatcccaggtcattcttcttaagggattattcagggtcattttttactgtaattttcaccttatacctgtaagatttcaatgacaccgtattttcagatttttttgtactattaacttatattactcatgattgataattwaaaaaattgatattaaaaaaggtgaaatatcacctccttccatgaattgacattttgaattgtgaaccagaaacccgagcagcctggggtggggatcgcgcgtctttgctctctcaccagaactgtcagccttcagagaggggactgggggtggggtgatttatatgtcactacagacatcatggaaattctcagcgtggcatctgcaggagaaggcggagcttggaggcagcacctcagaggggaaaacacctctatggcagtcagcaggttggtgtttcttcctcttaaatgtctctgatcttgtctccatcctcgtgtccatgagggttcaagccttcatcatttctcgcttggactgtggtcccagcccagacctccctggtctccctgtgtttggtccattctgtagctgaataattatcccagagccctgctatttttctatctcctttccatggcacccagcgctccat

SEQ ID NO: 805142 - DNA, 465 bp, Homo sapiens
gaacaaggtcacattctgaggtactgagggttaggacttcaacatatgagtttttgggggggacaaaagttaacccataacagatggggacagcccagaacccaaacggcagggatgagtgtggaagaataaaatggggtgttgggttcaagctacattttcctctgtgagaaaggcagctgtgtcagaagagggatctaggggagacagaaacagttcataaggatttaaaaacacacgtcactgctatgtggtakgccatgcctgctctttattctgtgtttccacaaaatcgatttctattctggataggagagtcagggaggggattgctgatgtgctagccccaaagctgggcagggcaaaaccagcactgcccacaggaggccagggctgctaggcaacacaagataaagcagtgcagcaaggcaaagaggagacgagagagtagagtgaggcaaagcc

SEQ ID NO: 805143 - DNA, 465 bp, Homo sapiens
gaacaaggtcacattctgaggtactgagggttaggacttcaacatatgagtttttgggggggacaaaagttaacccataacagatggggacagcccagaacccaaacggcagggatgagtgtggaagaataaaatggggtgttgggttcaagctacattttcctctgtgagaaaggcagctgtgtcagaagagggatctaggggagacagaaacagttcataaggatttaaaaacacacgtcactgctatgtggtaggccatgccwgctctttattctgtgtttccacaaaatcgatttctattctggataggagagtcagggaggggattgctgatgtgctagccccaaagctgggcagggcaaaaccagcactgcccacaggaggccagggctgctaggcaacacaagataaagcagtgcagcaaggcaaagaggagacgagagagtagagtgaggcaaagcc

SEQ ID NO: 805144 - DNA, 575 bp, Homo sapiens
acttcccttcccagcccccactcccagcaggccttctagaggcctcagggttgacaatggctcgtttcctgagcacctactatgtgctacatggtagaaataatttgaatacatcagtaatcacaataacaagatgaagatggtcaaagtaggcacaccaaaaaaattcagctctaagaacacagaaaagttagaagtcagtggatgaaataaaacacmccagacaaatattaactcaaaggaatctgctctattcatattaatgtcagacaaaacaaacttgaagacaaaaacattactataaatgtttatataaagtgtgccattgcaaaatgatgagtcaattaaccaggaagaaatgaaaccgtttagagggtacacacatgatatagcacagcttcagatatgtgtatatgagtgtgcatatatatatacacacataacatttatttgtctgatatttatatatatcaggcaaatagtggaagctcctctattaggatttgatagatcaagtaaagaaaaaaatcaccagtaagactttagccgctccactgagaagttgcctaatgcat

SEQ ID NO: 805145 - DNA, 636 bp, Homo sapiens
gtgagcacctgctcctctggggagcactcacctggctgtagatctggtccatgctaggtctgtcctctggagcctcgtcccagcacttcttcatcagccaacgcactcaggcggcccgtgatcaggggtcaccagcggccggcacagaggagggggagatgccaccctcctgatgatttcggcaaccaacaccatggggcgggcctggggtcctgggaarggtcatgaaaggagcctggcctcggatcctgagagcgtgggcagagtaggcttatggcggtgccaggttctgggcctgaggatattcctcagctcctgtttccagggtatggctggccagtggatgtggcattattgttctcctgggtctaccctgggtgtggccaaggaaagggtctcaaactgggggccaggagagccgcgagctggttttgaattctggatctgccaccacaatactatgggatggtggagaagacaatgacctctctgagccttagtctcccgatctgtgaaatgagcatataaactgccttcttttttcttttttttttctgttcttttttttttttaaatgtcgcgatcccagctcaccacaacctctgcctcccaggttcaagcgattctcctgcctca

SEQ ID NO: 805146 - DNA, 549 bp, Homo sapiens
cagctataataaatgtgctaatgttcttgcctgccagtttttacatctgtgtcaatcctgggccagttttaattgatttgcaagcctgttaattttttatttgatgatagtaattatgaatattaccttgctgagtgttggacatttttgtattactataaatattcttgcactttgttctgagatgcagttaagtcacttggaaacagtttgatcattttggtatttcttttaagatttgttaggaaggactagagcagcagttagtctagggcttactattccccactactgaggcaaaacccttcrgagtacgtactcaatgtcttgtgaagcatgaggttttccagactgactggtcggaagaggcactattctggccctgtgtgagcactagctatgatttcctctagttccggtggtgcttcccttagccttgtatatttcttcacaagcatgcatggatcactgcaaatctcaggagttctctgtgaagttctctcctttactactttgccctggacattctaactaccttggtctctctgg

SEQ ID NO: 805147 - DNA, 669 bp, Homo sapiens
tggattaaaaaaccatgatccaatatgctgcccacaaaagacattaataaaaacagaaaagggtccaggcgcggtggctcatgcctgtaatcccagcactttgggaggccaaggcggccgaatcatgaggtcaagagtttgagaccagcctggccaacatagtgaaaccccatctctaccmaaaatacaaaaaaattagccaggtgtggtagtgggcgcctctaatctcagctacttgggagactgaggcaggagaatcacttaaacccgggaggcagaggttgcaatgagctaagatcgcgccactgcactccagcctgggtaacagtgcgagactctgtctcaaataaataaacaaataaaaataaaacaaagaaaaaaatccacagtttcaactgacgcaaaaaaaaaaagcatttgacaaaattcagcacccttttatgatgactctcagaaaactagaaatgcttcgttttcaccttctgttctactactcccttcctccccattcactctaatcctgtctcattcttccgtctttgaacacgcgaggcacatttcttggggcctttgcacttattctgtcacctgaaacactttccacagacatcagcccggctagctctctcaattccatttttttgttgttgttgttgccttttcagtaag

SEQ ID NO: 805148 - DNA, 605 bp, Homo sapiens
tccagaccaactggaagctctgctttgaggagttactgggttccatccagccaggagtaaagctgatactctttgctcttcatctatctccctgtgctgttctcagttttctgtgagcctgaaggagcaggatgggcacttgactggcatttgtacgctgcccacaaatgcaccaaccatatactacattacagtctcaggctttatttgtgaatatgctatgactgctgtcttcacctggaatgtaagctctgaaagtaggagccacatagtctacttacacgtgtgtagcaggaaaccaattaactctggatatgactttatgatcgtttctatagcgctayataagtagattccacagccagttgtttcaaaccatcccaaagtcacctgatactagtaaaattccaagaaagtcacttttcaataaactgatagtcacagcttagtaagctacctcccaaatgggtcaccaaaaataaatcctctaaaggaagagccactgaaggataaacgatgtcagccattctccttggcaatgctggctttcctccagcaaggtccaagtgacctcaattacttactgcaagtcatcttggttaaat

SEQ ID NO: 805149 - DNA, 618 bp, Homo sapiens
gcgccccctgccgtgaaggcggacttgccggaagcagagccttcccagccaccgcctgcttcggtgttcactgttcccttgatgcagtttgtgtcaaacacaggctgcttgatctcataggccttcaagagataaaatgacattacgaaggactgcgtggcatccttcgccctggacagaaagatgaaaggggtaaggtagatggtgcctttcttggtccctttggaggcctctggcacattattcatgtcactgaacgtaagtttcacatgatcgtaggrcattgggatgctctcagtgttgttggcgatcactctgctgccctctgagtgactctcgttgagcaccatatctttccgaaagcagccccgagatgccccatcctgcagttgaccagcccacggtggtagctacatcttcacaaatgtgacttttaggtagagaagcaactcaggggaatccacaccctcccaaagaaatcttgaagttagcctaggtcttccatatttagaaggtcagtggaggcaggccaaggactaagcttacaaacaaatttttgtgttcctttaatgggccagtgaaatggctcagtcatttaggtgaccctcatagagagat

SEQ ID NO: 805150 - DNA, 631 bp, Homo sapiens
ttaattatattaatatcaacatgttgatattgatataattagcacagtggatgacactgatataattagcacaaatatttactcttcaaaaataagtggcagtgcatatgcatataataacgttaataataatactgagctgttatagcatcactttctctgaggagtttacaaaatacataaatagtaaataattaaaactcaaactccgttgagagctttgatagcatcattgagcaaagttgaaggggtttatgcagtcagagtaacctcataaatacattctgacaggggcattttttgcccgaacagaagtgactctctaagcagctatcagtaggcctaaaactaagagatataccaaattctgtaactgaattgaaactgaatagggccctgtctctttctttactctgattcatgttcaactaatctaaaaccacaattattttattctaamatgaaacagaattgggtaaaagcaaggatgttgggatacaagacagaaaatatattcaggtgtccttgtccgcagcgtcttttacgtagaaagaccatggtcttgctaaatctatccagaggccatctctcttttgtttgaaaatgtagactccacacctcatcacataat

SEQ ID NO: 805151 - DNA, 622 bp, Homo sapiens
tgttcctagacacacgatatacaattcatttcacaatgggaagcatctcaggacataaagtataggactgaggaaaagaatagagaacatcagtgggttattttcttcaagcatccaagaagaaaaggaaaggtttctcagaaaggagatttcttaaggtcctagttgggggattacttaatccctagaggacccattttggagttacacatcctgagaaagttgcakgtatgtgaatgtttaggaaaatccaggcctaactactaaaataaaaggtgagagagtttgtgtgtttgtgtgtgtgtattgtttgcccaagagtacctaagaaaacatattctgaaggctcacttgctgcctgctccatgattgtggcctttcaagtgtggtttgctaaagaaatcaggcacagtacagcaaattggaaaaatgaactggaacatcataatctacctcagctagagcaaagaaaaaggcatctggtagaccacttggaagccagccaatgacgaagacttcaattaaaataaagaacgtgtcctcaggagagcatctccgagctcaagaagttataagtccagtgagctacttgaaagccaactactagaaaaagccattttca

SEQ ID NO: 805152 - DNA, 597 bp, Homo sapiens
aagctcagggtggggaggaagctggagagagcactgagccagcatctcatgactcagccacttccacccagtcagcccggtggcatctccgctcccctgctctaaattccgattcggtgagactgctggaggctgagtcagtcccggcacggcacgagagctgtgtcccaaggggctccctgccagacaccctggcccccaatcaaggccagggccaggcacggggctggagaggtggcggggtgcaggagccaggctccgaggctacagcaagtcccrgcagagtggggcggcccagtgagatcacgtaagtgaacatgctttgtgagttatgaaaagctccctgttttcctcagtgggctcagggacctcattgcccgaggaagggactgggatgcaagtcctagctctgcccacctcatcgcatgacactgagaaaactcctttcccctcttggcttcaatttccttgaccacagaatggggccaacatctcccaaaggggttgggagaattaaatttaatgcatatgaaagcgctttgcaaactgtctagtgggccctatgatggtcagggtggtaggagaggagagtatgaa

SEQ ID NO: 805153 - DNA, 615 bp, Homo sapiens
aagaccagggtcggcccaggccccagccagcccacccagccgagggaagcagagggcggggccgccccagacgcaccatgagctcctcctgctcctcgcgattgccagccagcccgtaggtggggatctcccccaaggtgcggcagaactcggacgtggcgttgaacacgatggcccccttccgctcgggatcctcatcctcctcccagccccgctggcgagactccagcttcttcacaatctccaccacctgggggagggagcggctgtgggcaaacccagcagtttctggggtgatgccattgagacccaggaacctaagggtcctccctggcarcagccagacaggccacgcccacagcccatgcaggcccagctgctatctgccgcctaactccactctgcacctctttcactggggtcactcttctgctccaaacccatcaatgggtttggatgccctttgaatgaatacccaacatcctacagggccttcctgaccaggcctgtgccaatccccctccaaagcccctcacacactacctcagcctcaaactccttcctccaggctccctcctgccacctgcccctcccccgacaaactccggtttcagg

SEQ ID NO: 805154 - DNA, 287 bp, Homo sapiens
tggaagtcccttgggggagggcaggggtggtatctgggtacacagtccccagccacggtcggacaagcccgattcctggtgatggggtaatgcacacgcagctcttgggtggcctagctcagaaatacattgaagagccagttttcaaagaygcagaggccgattgggccctgtgccacagagttgtcagagaactgcccgctctcaggctgcaggagacaaggcctagatttaaggggaaggagattgtttccttggggattcgtgtagggttctttgaagcagtc

SEQ ID NO: 805155 - DNA, 525 bp, Homo sapiens
tcttgagagcaggaccctgtcttgtctacctttaaatcctagtacttaacacacagcaaacagtaactatttgatgaccaaatgtgagccagaaaggacaggaaattgtaactgaggctgccccatgcgtgctgcgcctggtggatttcaggcagagggctagactgggtgaccttggggcattcctcctttctrtgaaatttgttatttcaaggagactagaaaagagacttctcagccacttcgccagctattggtccttctattcattagtgtttgctgagacatgctatgtgacaggactgagccaggtcctttcaatggataggagatgttttgagcataaaatccacgttctctcttgggctgggctcttctaccttcttccccctggtgcttgggctctgaagaaaaaaagataggtaggagatgagtgatggggcttctgagggcagggctgagtgactttctgtgtatttgctctttctttatcagaagtcaaatgcccacaggcacctgtcatcc

SEQ ID NO: 805156 - DNA, 525 bp, Homo sapiens
tcttgagagcaggaccctgtcttgtctacctttaaatcctagtacttaacacacagcaaacagtaactatttgatgaccaaatgtgagccagaaaggacaggaaattgtaactgaggctgccccatgcgtgctgcgcctggtggatttcaggcagagggctagactgggtgaccttggggcattcctcctttctatgaaatttgttatttcaaggagactagaaaagagacttmtcagccacttcgccagctattggtccttctattcattagtgtttgctgagacatgctatgtgacaggactgagccaggtcctttcaatggataggagatgttttgagcataaaatccacgttctctcttgggctgggctcttctaccttcttccccctggtgcttgggctctgaagaaaaaaagataggtaggagatgagtgatggggcttctgagggcagggctgagtgactttctgtgtatttgctctttctttatcagaagtcaaatgcccacaggcacctgtcatcc

SEQ ID NO: 805157 - DNA, 525 bp, Homo sapiens
tcttgagagcaggaccctgtcttgtctacctttaaatcctagtacttaacacacagcaaacagtaactatttgatgaccaaatgtgagccagaaaggacaggaaattgtaactgaggctgccccatgcgtgctgcgcctggtggatttcaggcagagggctagactgggtgaccttggggcattcctcctttctatgaaatttgttatttcaaggagactagaaaagagacttctcagccacttcgccagctattggtccttctattcattagtgtttgctgagacatgctatgtgacaggactgagccaggtcctttcaatggataggagatgttttgagcataaaatccacrttctctcttgggctgggctcttctaccttcttccccctggtgcttgggctctgaagaaaaaaagataggtaggagatgagtgatggggcttctgagggcagggctgagtgactttctgtgtatttgctctttctttatcagaagtcaaatgcccacaggcacctgtcatcc

SEQ ID NO: 805158 - DNA, 587 bp, Homo sapiens
aatttttatggagccaggtcttagatttaagtctttgatctatctgaagttgatttttgtataggagagagatgaggatccagcttcattcttctacatgtggcttgccatttatcccggcaccatttgttgaatagggtgtcctttccccacttcatatttttgtttgctttatcacacatcagttgacttgtaagtatttggctatatttctgggttctctattctgttccattggtctatatgcctatttttataccagtaccatgctgttttgatgactggctttatagtatagtttgaagttggggaatgtaatgcctccagatttgctctttttgcttaatcttgctttggctatgcaagctgytttttggttccatttgaattttgggatagttttttctatttctgtgaagaatggtggaggtattttgatgggagttgcattgaatttgtagattgcttttggcagtggtattgtttgactctgtgtcccatccaaatctcatcttgaattgtactcccataattcccacatgttgtatgagggacccagtgaaagacgatttgaatcgtgggggcag

SEQ ID NO: 805159 - DNA, 565 bp, Homo sapiens
ttgtattgttctctgtggatttataacaaaggctgacatcctgaaacagatgggagtttctcacactcaggcacacagcttgctcacccacccctgggtctcccacaagccagctcactgcctggcacacaggagccattcgtggatgctgaagtgagccatgaggacaaggccatgcctgattcggcactatcctagcacagtctaacacagctggatgctcrgttttctttatttgattaaaggcaacttaaattagcggccacttctctcctccccatgccctggatgagaccctcatattgaacacccagcagatcttgcaaatcagggctgagtctcagcgatccattgcactggtgatagcctgaaattgaggttaaacccaggcgagagctctcccaacagcccaagaagggggtaacggtgagaactctcactacagtgcagacagtgtaacaagggctgccagctccaccccacctgtgcacacccttaccatcaaaacacaccacaggaaggggagaataacaaagccagccatgtcatctgtggtttcacctct

SEQ ID NO: 805160 - DNA, 611 bp, Homo sapiens
ttctgaggccgaaggtcccatgaatgacttcaggtgttgttccagcccctgagataggtgtcaggttacaagacacataatcattccagtttggcaacttcacttgtagggctgttttaatcaagctgcccaaagtcccccaatcactcctggaatacacagagagaggcagcagcttgctcagcggacaaggatgctgggcgtgagggaccaaggcctgccctgcactcgggcctcctccagccagtgctgaccagggacttctgacctgctggccagccaggacctgtgtggggaggccctcctgctgccttggggtgacaatctcagctccaggctacagggagaccgggaggatcacagagccagcatggtgagtgtggggccctctgctcccaagacacaggaagggtgggtctccccatgtaaggcycttcaagcagcctgagcatccatcagctgagaattctgtgacaccttctaggttaaaaaaagaggccacacccaaatcccctcacaccccagcccggtacacgtctcatacccacctgccttcctctcttcctccattgccatggtccttggaccagctcacctaagaagctgagcac

SEQ ID NO: 805161 - DNA, 573 bp, Homo sapiens
aaaacaatcaatatgtattaattttaaatcattcactttgataaaaagttgttttcacatcttccttccttttattgaaaaaaaatttcagaaaataacagttcataaaagacacaaacaaatcaacaggtatataccagtggaaaacacaatatgaaactaaaaatgccattggcttttttttttttttttttgaaacggagtctcgtactgtcgcccgagctggaggacagtggtgtgatctcggctcactgcaacctctgcctcccgggttcaagcgtttctcctgcctcagyctcccaagtagctgggattacaggcacccaccaccacacccagctaattttttgtatttttagtagagacagggtttcactatgttggccaggctggtctcaaactcctgaccttgtgatctgcccaccctggcctcccaaagtgttggtattacagacgtgagccacagcacccggctgccactggcttctttaattggttaagagcacaaaatgtaacaggcagaaggtctgtttcaaacaaattaaaaagctatgtgttttttaaattctcccc

SEQ ID NO: 805162 - DNA, 559 bp, Homo sapiens
acaatcaatatgtattaattttaaatcattcactttgataaaaagttgttttcacatcttccttccttttattgaaaaaaaatttcagaaaataacagttcataaaagacacaaacaaatcaacaggtatataccagtggaaaacacaatatgaaactaaaaatgccattggcttttttttttttttttttgaaacggagtctcgtactgtcgcccgagctggaggacagtggtgtgatctcggctcactgcaacctctgcctcccgggttcaagcgtttctcctgcctcagcctcccaagtagctgggattacaggcrcccaccaccacacccagctaattttttgtatttttagtagagacagggtttcactatgttggccaggctggtctcaaactcctgaccttgtgatctgcccaccctggcctcccaaagtgttggtattacagacgtgagccacagcacccggctgccactggcttctttaattggttaagagcacaaaatgtaacaggcagaaggtctgtttcaaacaaattaaaaagctatgtgtttttt

SEQ ID NO: 805163 - DNA, 550 bp, Homo sapiens
taggtattacagatggttgtaaattacaaaaagtagggcagtagaattcttattggacttgacatgaataagaaataaatacccttttataaatgactgggatttcagatttttttaaacctataaactcacagatcaaagaagctcaccaaactctcaagctcatgaaacatgaagaaaactatgccaaagaacaccataatcaaattattcaaaaccactgatagaaaaaaatcttaaaagcaataagggggttgggggagggcattacatacaaaggaacaaagaggacagtgacagaatatttattgatagaaacaatgcaagcaagaagacaatagaacaatatctttaagtattaagaggaaaaaaaacacctgtaaacccaaawttctatacctagtgaaaataccttcaaaaacaaaggcaaaaagtcttttatgagacatgtgaggaagagagctcaaaactaaaaacaattatttactagcagacctatgatctaagaaatactaaaaggcccaggtgtggtggctcatgcctgtaatcc

SEQ ID NO: 805164 - DNA, 641 bp, Homo sapiens
agatagttgtttttgtattttttcaaatgattttactgaagtttgcagttgttttctgtaagaagtttagtccaatataagctacttcacaatcactagaaactgaacctacatttttaaatagtgtggtcagaattgtcctcactgatgttaatcaagtttagcctaaagctgcctccttacatatttaagattagcctaaaggtttttctgtatattgtgaactataacaagtagaggtgtaaaccaatcgtggcccacacctgtgccaatcactgagttttggccaatcaagtgtagccagctgctcgaaccatgttcaaataaggcaaacactgagctgtaaccaatccagttgtttctgtacctcacttctgatttctgtgtgttgtgtccttttttttgtctacaaatcttcttctaccacrtggctgttctggagtctctctgaatctgctgtgattctggggggctgcccaattcgttaattgttcattgctcaattaaacatctttaaatttaatttggctgaagtttttcttttaacagtgagaatgtggtatttaagaaaacatttgaaagaaggtagggatttagcctaggtgacagttcttttttaggaaagccttccaggcagatag

SEQ ID NO: 805165 - DNA, 552 bp, Homo sapiens
gatgacacattttgtgatgacacgatggcttaccccttaggatccccacagaaatgaccttgcatctacacctctctggtggtcatctagatcccactcagtagatgaacccgtcaccccctctgtctcacaaaggatgaacttgccagtgaggcaaatccaggatgtgcccacactcttctgagagcagaattcagagaagggacrgttacctggctggcagtcacagaggtagcatagctccttgcatgttgcaggggtttggcatgcttggctgaatgaacagaccaatcagtgagggtctgacttgaggtaggcctttcacagaaatcatggctataaacttttgcatttgctgtgcacatactgtatgccaagcacactcttagcaagtgggaaagatcctgaccaattctggtgataagtttgggactcccagcaggtgtggcttaccctcttggagatccaaggcacatcttatgaaaccatatgagcgtaggatcagttcaaaattacaaaatatcagcctgcatataaaatagatttagtgaa

SEQ ID NO: 805166 - DNA, 573 bp, Homo sapiens
ggatccattgctggggatctagtgtcatcttttgggggtgttatagaaccttgttttgtcgttctaccagaattatttttctgattcctcctattttgggtagactatttcagtggaaaaatctggaactcaaggctgctgttcagattctttagtcccgcagggtggtcccttgatgtggtgttctccccttcctctagggatggggcttcctgtgagccagacttcaggaagtaattgttattgcttttcttggtttagacacccagaggtgctaccaggctctggctctggtctgttgctggagaatacctgtgaagagtcctgtgatgccatctgtcttcaggtctcccagctgtagatacctgcacctgctctggtggaggtgataggggagwgaagtagactctgtgagagtccttgcttgtagatgtgtttagtatgttggctttctcaaaagctggttatgctagcagtgaagttgtcacatggacagactcaagatcaccagttgccaggatgttggaggcagtggaattagctgttgttttctccttccttggagcaggttca

SEQ ID NO: 805167 - DNA, 638 bp, Homo sapiens
tcaacttgaccgttgagtcgtcttttattcctagtagctaatgcggtgtctgtgaatggtagataccaagtaattatttgttgactgtatgagtggcatgagatcttaatcatttataattatcctttagttaaatgcatttatagttccacctaactcaaactttaggaagataattaaattacacttaaaatttgaggatttaatatgtgtatactatataagcaggatatatagaatctttttctagtctatagtcattcattttaccaggaaaataaatgaggatgtctagtaattgttaataaatctttaatagatttttgtttcaaaatgacttttctcctgattttcttgtacaagacctgtagtaatgctcattcctcccattgatatgtatgtgtatgtatatgtacatgtgcatatatttctgtttgtgtgtgtgtatatgtgcatgtgtgcatgcgtgtgtgtgtgtttccttattcaakttcctgctgctgctttccatgtagaaggtttccctcggaatgatggttcttatgtttatagataacaggattttagctgtttattgtatttatcagcattgccatctactgtagttttaaattcagtcttcataaaccatggatgat

SEQ ID NO: 805168 - DNA, 657 bp, Homo sapiens
aagaagctgtagcccacttgcagtgcacacaaggcaagtcacacctcctagttcactagtgttgaagtattatagcagtgtaaagaaggcttctgcccttggaaagacaagacagacttaacatggattacaaccaaacagcgcagagatagtttcagctaggagcctagagtaaggatgctaagaacaggggaagagttttaggcaaagtgaaaatttgcctggattatgacagatgggcaaaattttggaagactggaggggcttggatatgatcagtggaattgagccttggtatgaagctggaactgcagaaactgacatgagggttgctcatgactgaggtgataacaagctttagggtggtagtggtgatacttgtggcaagtaaagggtaaattaaggacagaaaggtgggccttgttgaatgaggaaaacggaggagaagaagtwaagtggcttcggtcaacagagtaagaagaatgaggtaaagcattggttcccaaatgcacccatgccatggtgccacctgagaacatttattttaatagttacatttttttttttagtttttgagacagtttcattcttgttgcccatgcttgagtgcaacggtgcaatctcagctcactgtaacctctgtcccaggttcaagtt

SEQ ID NO: 805169 - DNA, 611 bp, Homo sapiens
ttgcattatgggctatgaaattccttctgttagttgttcacattttagcctgtgcccactgtgttttgtatgatggacaaaccaaataatcattatgtaagtaaggtagagctttatattttttccaatgtgtaaacactctgtaaataggcagtccttggtgggtgtggcagctcccctagctcatcaggaacctggactcctctctttcttctctgctatcctcagtgtgtagttctcatctttcaggctgcctggtggttgcaagatgactgctgaagttctagtcatgacactcatgttctaggcaggaagtaggaagaaagggagaaggtagctgaatacaatttaacaacttccatttaaattttgtggtaraatgtctgcaaagatggctgccaataatttttgtaggcttaagtcattttttcctgtcaagaggtatagtctgtttctcttctcctttagtcagggctggccctatgacttgctttgaccaatagaatgtattggaaggccttgctaggctttgctgcttctgtttaccctcttgggatccagctgccatgtaaagaagcttagactagaatatatatatatatatatctgga

SEQ ID NO: 805170 - DNA, 434 bp, Homo sapiens
aataagtaagtaagtaaataaataaaatgttagtaaatctagatgaagtgctcagattacttttacttggggatctccaaagaaatagaaccaataggacagagagagagggagagagagaaatattgactgataataaggaattggccatgggaaatctggaggctgacaagtcccacgatctgcagttcagactgcaggagagcctagagacccaggggagccaatggagtagttccagtccaagtccmaaggccttagaaccaggactaccaatggtgtagttcaagtctgaaggctggcaaactggagacctggaagagcagccaatacttcagtttgagtccaaaggcaggagaaaaaaagaaagaaaaaaaaaaagtcccagctcaaaggcagtcagcagaagttctctcttattcactgaagaatca

SEQ ID NO: 805171 - DNA, 450 bp, Homo sapiens
cttcagaggtttgagttccagacccactgggctcttgtccaagctcagagacatcagcaccaactggccagtaccctctcctcaaaggtctgggcccctgtccctctgagcagctcagaaacaccagtgccagtggaagcagcttgccctcttgtgactgaggtaactagccttcccttcctggaaaattttctcatgaaatgtttcataaaatgaaattctctaatagcactttattttctgaaaaatgtcttggtccataagttgaatctcggaggtaagagtgatggayacaaaaaggataacactaaccttggactcttcccttgctcaagaggagccccacatatgcagcagttgagtcatttgctgtcctcaggcaaacccctaggtctgtaataaccattagatacatttgcataaatataatgcaatcatgaaagtctcttt

SEQ ID NO: 805172 - DNA, 568 bp, Homo sapiens
tttggggttaataataatttagtgttgatagtaatccatgactaattaccccaattctctctctattttccttttgataccttaaggcttttgcctattttgttatttaactttgggggaataaaatcagatcacaacaagcatggagaggggctctgagtaggctagcgatactgaagctgtgtagaattatggacagtgatattaaggtaggacagtgatattgaagctgtgtagaattatggtctgccaacatactcattagatttgyaggccctgcgtatacatatttctggcattaatctggtggactggagctatggtcttgacgtagaaaatatcactgtgtctcgataccggagagagggccccaggctgatggaaacgtctttcaaactattaactatgtaatagattattgtgccacataggtcagagaaaaattttgaccctctgagtccatgtcttcattctcattgaattatttgctcttcagtattgccctccttgttatttttcttgtgtagttatttaactgcagcatctattcatttctcttctcaagcct

SEQ ID NO: 805173 - DNA, 609 bp, Homo sapiens
attatttgtgacacaaaatataaattctttaggggatggagaccctagtttacatgatgtgattattgctcattgcatgcctgtacaaaaaaaaatgtgccccataaatatatatatctactatgtaaacacaagaattaaaatttaaaaatttwaaaaattgaaagatattttaaaaaagaaaaaaaatcaggatataggcctgagcaaagatttcctaagacatgccataaaaattataatccataaaagggaaaattgataacttggccttattaaaaatttggccctaggaaagggaaaataagagctatagaaagagcaatactatttgtaaaccacatatgcaacaaaacactataatttataaagagctctcaaaactcaacagtaaaaaatcaaataatccaaataaaaatgtgcaaaacacataaagagtacgtacaaataacaaataagcacaggaaaatatgttcaatatcattagttattagggatgtgcaaattaaaatcacaaggagatatcacgatatacgtaactgaatggctaaaataaaacacagctagaaccaaatgctgacaaggatgcagagaaagtggatcccactc

SEQ ID NO: 805174 - DNA, 568 bp, Homo sapiens
tttggggttaataataatttagtgttgatagtaatccatgactaattaccccaattctctctctattttccttttgataccttaaggcttttgcctattttgttatttaactttgggggaataaaatcagatcacaacaagcatggagaggggctctgagtaggctagcgatactgaagctgtgtagaattatggacagtgatattaaggtaggacagtgatattgaagctgtgtagaattatggtctgccaacatactcattagatttgtaggccctgcgtatacatatttctggcattaatctggtggactggagctatggtcttgacgtaraaaatatcactgtgtctcgataccggagagagggccccaggctgatggaaacgtctttcaaactattaactatgtaatagattattgtgccacataggtcagagaaaaattttgaccctctgagtccatgtcttcattctcattgaattatttgctcttcagtattgccctccttgttatttttcttgtgtagttatttaactgcagcatctattcatttctcttctcaagcct

SEQ ID NO: 805175 - DNA, 389 bp, Homo sapiens
tttgttttttgttgcatttgcttttaaggtcttagtcataaattctatgcctaagccaaggtctagaagagttttttgtaggttttctttttaggaattttatagcttcaggtattacattgaagcctttaatccatcttgagttaatttttgtatatggcaagaagcagyggtccagtttcattcttctccctatgaatagccagttttcccagcatcatttatggaataaagtattcttttcccattgtttacttttgtcaactttgtttaagttaacttcattgtagacgtgtggctttatttctgggttctccattctgttccattgatctgtctatttttgtatcagtactatgttgttttggttaccaaagccttgtagtatt

SEQ ID NO: 805176 - DNA, 591 bp, Homo sapiens
aaaagaaaaaaaaaagaatgctcttttaagtatatcccactgatctgtaatcttaggggccctaaagaaggtacatcattaaaacatcatcattttgatgatacattgcagaaggaacaaaatggcattaagggtggaattcagagaaaatggactggaataaaggttgttgtatcaaccaaggaaacctagggaaccacgttaaaaaaaaaaatgaagttccattcttcaccctagcttgatgtctataacgattagaaaagctgaacagggaagatatggtttgtatttccaagtacaccatgtgtcaggctcttgaggaacccattgataattctttatgcagatttttaaattagaaaagtatttctttctcacccaggccttctgaatgaaaagctagtggaacaagaagttatgggaagtgaagtcaycaaactactactaaaacttttcaatgcctgtacatgatcatcttaaaaggaagaggataaaaatgaggaatccttcttagctgggaaacttttatttcttgaaatgattttcaggttagggcttggttctgttctttgaggggtagggagaaatatt

SEQ ID NO: 805177 - DNA, 640 bp, Homo sapiens
cctgttttattaaattttaccaggtatctacttctaaaaagtccttatcagtgccatttctttaaacccaacatttagtaacttaacagatgtatttttaaaattagaaattttactttcaatgtactgactttatacttaattagtagctttaaaattttttagaatatgtgaagacctgcatgaaaccattctcgacatttttcaaggattgtttgctaactggcttgtttttrcatacagttttaaacatgtctaccattggtggtaaacaagaatgatcacttgaaactatgaaacctaccaaagtgccagtgtattaacactgctttttctttcttttataagaatcattactattaactcgtacttgttggtgcgcagaggatgccattttcatgctctctttctttataaaggccttctctatagctccaggtttccgaagtataactgtgcatcttctcctccagtcaacaaagaatcatcctgcacattccaacagaaagaacgaactgtacagcatgccctccctgaaggctagtcacatgggccaatcctaatgttcattaactgaatccttcctttgttatccaaaggaaggataacaagcaatgtttccatcttttcatgatatagg

SEQ ID NO: 805178 - DNA, 586 bp, Homo sapiens
atccaacgagaggactgttgctatatggtggggcaatgccagcttctgaaccactgcaaactctggttccctacaatcttcaccacagttgcaccatgttactaagtgttagtgttccatctccatagcacagttcagcttatctcgtatttggatccttcctatgaggaagaggtggggctgtagtgggacagatgggtcttcagtttcaactccaagtccaaggtttttttcctttgctctggtcccttagcacactcctgacaagtccatttkaagtctttttgtcatttttaaccaactcatccttgccttccctttgagcagatgatctagacccccacttaatgaaaagttcacagactattcaacatcacccctacaccaaggcataaatatcctttcatcacttcatatttcagaagcaaaatacattccatcactaaaaaactagaaaataaaaacagggaaaagctaccacgtgaaatttaccaccaaaactagccacttattattttggtgtgtatatgcctgtaattttacttatgtaaatatatatgtaataatttttagcaaaatgagatct

SEQ ID NO: 805179 - DNA, 583 bp, Homo sapiens
gactctgttgcctaggctggtgtgcagtggcgtaatcatagctcactgcagcctcgacctcctgggctcaagcgatcctcccacctcagcctcccaagtagtttttaattttttcacagtaggtccagaaactcttttttgtacacattttggtagtattatggctcaaaactgttactatcacacaaaatacatggcagagagaccacagtgttctaaacaccaccaatgacacacccactgaattcaggtggtaccctggtggagactactgccatagatagtaggctagactcactggcaaagagcgctcagctccgtttcctgcaccgctggctgggaacataygacagcactcagaacatgaggggaaaagccatgcatgtgcacatacaatgctcagaaatacaatttttacatatttctcaaaataaagttatttcagataaaatcagggctaggagacagcattaaatggagcaaacatgtatttccacacatattctctaatttgattctcaaaaccaccttgtgaaaaagactaggcatatatcatcctcatctaaagagaaaaccaactaaa

SEQ ID NO: 805180 - DNA, 601 bp, Homo sapiens
aacaattctggtaatatgacaaaacaaggttctttaacaccctcaaaagatcacactagctcatcagcaatggatccaaaccaagaagaaatccctgaattgccagaaaaagaattcagaagatccattattaagctatccaggaggcaccagagaaaggtgaagtccaatttaatgaaataaagaaaagatacaagatatgaaggaaaaaatcttcagtgaaatagaaagcataaataaaaatcaatcacaacttctggaaataaaggacgcacttagagaaatrcaaaatgcactggaaagtctcagcaatagaatcgaacaagcagaagaaagaacttctgagctcaaagacaaggtttttgaattaacccaatccaacaaagacaaaggaaaaagaattataaaaaatgaacaaagcctcaaggaagttttggcttatgttaaacaacaattatacctaagaataattggtgttcccaagaaagaagagaaatctaaaagtttggaaaacatatttgagggaataaacaagaaaaactttcccagctttgctagagatctagacatccaaatacaagaagcccagataacacctggg

SEQ ID NO: 805181 - DNA, 630 bp, Homo sapiens
gaaaatatcacaatcctaaatatatatgcacctaacactggagttcccaaatttataaaacaattactactagacctaagaaatgagattgacagcaacacaataatagtgggggacttcaacatccactgacagcactagacagatcatcaagacagaaagtcatttatatcctaaaacaaatggacttaacagatatttacagaacattctacccaacaactgcagaatatacattctattcatgagcacatggaaaattctccaagatagaccatgataagccacaaaacaagtctcaataaatttaagaaaattgaaatcatatcaagtactctcttagaccacagtggaataaaattggaagtcaattccaaaatgaatcctcagaaccatgcaaatacatggaaattaaataacctgctcccgaatgatcactgggtcaacaatraaatcaagatggaaattaaaaaattatttgaactgaacgataatagtgacaccacctatcaaaacctctgggactcacgcctgtaatcccagcacttagggaggccgaggcaggtggatcacgaggtcagtagtttaagaccagcctggccaaaatggtgaaaccctgtctctactaaa

SEQ ID NO: 805182 - DNA, 651 bp, Homo sapiens
tttaagaccagcctggccaaaatggtgaaaccctgtctctactaaaaatacaaaaaaattagctgggcatggtggtgggcacctgtaatcccagttactggggaggctgaggcagataattgcttgaacctgggaggcagaggttgcagtgagtcgagatctcaccactgatctccagcctgggcgacagagcagactctgtctcaaacaaacaaacaaacaaacaaacaaamacaccaaccaaacaaaaaaacctctgggatatggcaaaggcagaataagaggaaagttcatagccttaaaaaatgccaacatcagaaagtctgaaagagcacagacaatcgaaggtcacacctcaaggaagtagagaaacaagaacaaaccaaacccaaacccagcacaagaaaaggaataacacagatcagagcagaactacatgaaattgaaacacaaaaacaacacaaaagataaatgaaacaaaaagctgaaaagttctttggaaaataaaattgatagactaaattagtgagattaaccaagaaaagaaaagatccaaataagctcaattagaaactaaatgggagatattacaaccaataccacagaaatgcaaaagattattcaaggctactatgaacacctttatgtgca

SEQ ID NO: 805183 - DNA, 658 bp, Homo sapiens
aaaccgaaaaaaccctagctttcttatggtgtaattgacatataataaactgcaccaattttttttttttttgagatggagtctagctccgtcacccaggctggagtgcagtggcatgatctcagttcactgccacctctttctcctgggttcaagtgattctcctgcctcagcctcccaagtagctgggattacagacacctgccaccacgcccagctaatttttatatttttagtacagatggggtttcactgtgttggccaggctggtctcgaactcctgacctcatgatccacccgcctcagcctcccaaagtgctgggattacaagcgtgagccaccgcgcccrgccaaactgccccaatttaaagagtacaactgcctaagcttgggcacaggtgtaaccctgtgaaaccatcaccataatcaagacaatcaacatgttgcaaaagggcccccaattcactctgccaaaaggaaaaataccaagctgaaagctgagtcattgaagaagctgcctttccttttattcctaagcagatagctacagataacaggttaaacgtctctgcagggagctactctatgttcaccttcttttatgtaaagtgctggtttacttagcaggagaccagtacatacttgactattgccctac

SEQ ID NO: 805184 - DNA, 538 bp, Homo sapiens
gttttctattgttgcataacaaatgattacccaaacaccaggggtttggtctaggtcctgctgctcacagcacagaaagccagtcatcaagacaaccagtattggcagggaagaaagctttaatcgggtgctgcagctgaagagatgggaattcagtctcaagtccgtctctctgactatctaaaaytgggagtttatatagaagggaagaaatgtaactacatgcaggaaaacagtaattagggaagaatgaggaagaggagttggtcaacaggcagcaggtggtgctcaggcaatcatgagggttgagggcctggccactcatcctccagaggctgtgagcttgtaagtttcagctccttgatactacctgggagtcctgatggtcggtttcctgagaaaggaactcagataagacaaatgtaactttctcaagttttaagactgagagggtcaatttctatgtttattcaaaagaaatgataaacatcagttttatgggacaattggtcaggtttcaaaactaccacaaactcag

SEQ ID NO: 805185 - DNA, 617 bp, Homo sapiens
cgaaaagtgagggaagaaaccatctcacaaatagatcctggcaccctcaccctcgctggtgccatgtgcatcgagaccaactgccccgctcagacttcccaaattcttgacccacaaaaatgtgcacaaataaagtggtttttaaaaaaataataaaatctcattttattaataaaattaataagttgattaacctagttatagggcaattttttatgcagcaaagcacataacaaccgcctggtttctataaggaaaaaagtctcctctacatttctttacataatttgttttttatattacatgttaacatattttgtcttttttttttttttttgagacggactcctttttcttggcacccaggctggagtgcagtggtgcgatctgaactcactgcaacctctgcctccccagttcaagtgattctcctgcctcarcctcctgagttgctgagattacaggtgctcaccaccatgcctggcagcggtgcgatctcagcttgctgcaatgtctgcctccccggttcaagagattctcttgcctcagcctcctgagtagctgagattacaggtgcccgccaccatgccaagctaatttttagtagagatgggatt

SEQ ID NO: 805186 - DNA, 605 bp, Homo sapiens
tacatgctctggatgtctcatgcaaatggcattatacaacatgtgaccttttgtgacaggcttttttcacgtactataatgtttccaaggttcaaccacattgtggatttaaattagtgctgagagttacttgattttagcctgcaaaacttcctttattatttcttgtaaagtgggttggctagcaatgattatttcagattttatttctctgacaatgtctttagtttaccttcaggttttcaacatttttatttttatttatttatttatttaccttcagttttgaaagatagttttgctggatatgggattttaggctgacagtccccccccccgcccccacttgcaycctgagcactttgaatatgttttccattgtcttctggcttccatcgtttctgtgataagtcatccattaatcttatgggggctcccttgtaagtgttgagttgctttcctcatgctgcgttcaagattttcttcttgtctttgattttcagcatttctactacaaaatgtctgtttgtggatctctttgagcttgtctaacttggagtttgctgatcttcctcaatgtctgggttagtgtttttcagctaatt

SEQ ID NO: 805187 - DNA, 541 bp, Homo sapiens
agttttaccagatgaaaatttctaaaactctgatgcacacaaggtacttacagtgagcactactgaactgtgtgcytagaaatggttaagacggtaaaatttatatgtttttgtccacaatttttaaaaaagaagttttatgatgacatagaccattactatatctccagggtctaacacaagtctggcacataataggtgtgaactaaatacttgctaaatgaaggaattcataactataaagcctatggtcttaattattgtggagtatactctttctaaaatagtaataatcatcccatattatatatatatctatatataaattgttatttctaggatgagggagggaacagggtattggaaacaacagatggaagttagactaatcggaatgtaccttcctttgttgttgatttagattcctttgttttagatttgattttagaaccatgtaaacattttccataataattataaatcaatattatataaaaaatttaaaaacaatccacaaaaataaagacaaaagaaatgaaac

SEQ ID NO: 805188 - DNA, 646 bp, Homo sapiens
tctccaaaatggcgctattaaatctaatcatcttggatttggttgatatttggatggtcatattgccgagctaaactcctttacctagaatattataattagaaaaaagtctgaggaatcatctaattcaggctctcagttgacaaagaatttaccttactttggtaaaaatttgtttggctttatgtggagrtttctcaaaaaactttgaataattattttctgaaataatattctaaattggaaattggaataaaagatcattcacgttcatcttgagtattcactttaagactaaagagggaagtgactttgtgatccaggtttgtgacattgtattttaaaggaggaatttatatttgatcttgggaacaatttttcacattcaaagtctgagaacatctccgtatcaaacccaaagagattttctcaagtgaaataaagtgaaacaaagaaagtagcattagcagttccgagttgcagacagttctttttaaaatttgttttttggttcttccaggcctcatttgcaagttgctacttaattaactagggtggttaatgttaggtaaagtccaaaatgtaaaggaactacatagcaataacaatatttcagtatttcttcaataaaagttactgacactct

SEQ ID NO: 805189 - DNA, 646 bp, Homo sapiens
tctccaaaatggcgctattaaatctaatcatcttggatttggttgatatttggatggtcatattgccgagctaaactcctttacctagaatattataattagaaaaaagtctgaggaatcatctaattcaggctctcagttgacaaagaatttaccttactttggtaaaaatttgtttggctttatgtggaggtttctcaaaaaactttgaataattattttctgaaataatattctaaattggaaattggaataaaagatcattcacgttcatcttgagtattcactttaagactaaagagggaagtgactttgtgatccaggtttgtgacattgtattttaaaggaggaatttatatttgatcttgggaacaatttttcacattcaaagtctgaraacatctccgtatcaaacccaaagagattttctcaagtgaaataaagtgaaacaaagaaagtagcattagcagttccgagttgcagacagttctttttaaaatttgttttttggttcttccaggcctcatttgcaagttgctacttaattaactagggtggttaatgttaggtaaagtccaaaatgtaaaggaactacatagcaataacaatatttcagtatttcttcaataaaagttactgacactct

SEQ ID NO: 805190 - DNA, 646 bp, Homo sapiens
tctccaaaatggcgctattaaatctaatcatcttggatttggttgatatttggatggtcatattgccgagctaaactcctttacctagaatattataattagaaaaaagtctgaggaatcatctaattcaggctctcagttgacaaagaatttaccttactttggtaaaaatttgtttggctttatgtggaggtttctcaaaaaactttgaataattattttctgaaataatattctaaattggaaattggaataaaagatcattcacgttcatcttgagtattcactttaagactaaagagggaagtgactttgtgatccaggtttgtgacattgtattttaaaggaggaatttatatttgatcttgggaacaatttttcacattcaaagtctgagaacatctcygtatcaaacccaaagagattttctcaagtgaaataaagtgaaacaaagaaagtagcattagcagttccgagttgcagacagttctttttaaaatttgttttttggttcttccaggcctcatttgcaagttgctacttaattaactagggtggttaatgttaggtaaagtccaaaatgtaaaggaactacatagcaataacaatatttcagtatttcttcaataaaagttactgacactct

SEQ ID NO: 805191 - DNA, 567 bp, Homo sapiens
tgagaacatctccgtatcaaacccaaagagattttctcaagtgaaataaagtgaaacaaagaaagtagcattagcagttccgagttgcagacagttctttttaaaatttgttttttggttcttccaggcctcatttgcaagttgctacttaattaactagggtggttaatgttaggtaaagtccaaaatgtaaaggaactacatagcaataacaatatttcagtatttcttcaataaaagttactgacactctctatatgtcaagcactggagggtgccagtgaaaagagatggtctgttgctatgttctgcattttcgttggtgaaaacagagaagttggctgggtcatcagtgtrgtacctctggtaaagctcaagtatagggaaatttaattcaatctcatgtttgaattattccctcttaagggggtaataatcctattcccatggagttttttgagggcactaagtgatagaacacatgtgactatgactagtataataaatgatgtattaaaatcattctataatacatataccggaaaattaattaagcatatgatacga

SEQ ID NO: 805192 - DNA, 567 bp, Homo sapiens
tgagaacatctccgtatcaaacccaaagagattttctcaagtgaaataaagtgaaacaaagaaagtagcattagcagttccgagttgcagacagttctttttaaaatttgttttttggttcttccaggcctcatttgcaagttgctacttaattaactagggtggttaatgttaggtaaagtccaaaatgtaaaggaactacatagcaataacaatatttcagtatttcttcaataaaagttactgacactctctatatgtcaagcactggagggtgccagtgaaaagagatggtctgttgctatgttctgcattttcgttggtgaaaacagagaagttggctgggtcatcagtgtggtacytctggtaaagctcaagtatagggaaatttaattcaatctcatgtttgaattattccctcttaagggggtaataatcctattcccatggagttttttgagggcactaagtgatagaacacatgtgactatgactagtataataaatgatgtattaaaatcattctataatacatataccggaaaattaattaagcatatgatacga

SEQ ID NO: 805193 - DNA, 527 bp, Homo sapiens
ttgcaagttgctacttaattaactagggtggttaatgttaggtaaagtccaaaatgtaaaggaactacatagcaataacaatatttcagtatttcttcaataaaagttactgacactctctatatgtcaagcactggagggtgccagtgaaaagagatggtctgttgctatgttctgcattttcgttggtgaaaacagagaagttggctgggtcatcagtgtggtacctctggtaaagctcaagtatagggaaatttaattcaatctcatgtttgaattattccctcttaagggggtaataatcctattcccatggagttttttgagggcactaagtgayagaacacatgtgactatgactagtataataaatgatgtattaaaatcattctataatacatataccggaaaattaattaagcatatgatacgaataaatgtatgataagtcaggtaaaatgcattaatcctaggaataaaacaaagcactggtaatctctctgaaggtcttagagcaggaagactct

SEQ ID NO: 805194 - DNA, 624 bp, Homo sapiens
gccacagtgggtccctgcaggttgttggggagtgtgccaagaatgccaggctctgcctgctccttacctaggacattcctcagggttgtgtttgcagtgagcaaccttgagacatgaggtagggtctctgggacaaagagcagggttgcttatgttgcttggtataaaaggawgcattccctaagctcagtgttcctcagctgtgacatcaatccactatatgtgtacacactcattcaggctcatataatgcccccatgagacctgggtaaagggggaaccaacagaaacatgttgaaactcatgctactttccacacataagtaacaaaagtcctttatctctgacccaagcacctcatatcttctgccagcatccatgaaacagtatcagatcaacctattagcatataagtacagtaaaatcaaagtccaaactcatgaagactgtctatgaggcaagttacaaagttcttgagtattctatttttagtataatgaaacttccagtggtatatctagctagatctgggctcctaatggcttctaatggctcatctctgtcagcgtcagcaggaaaaatgacaattaagaaaaaggttcaggtagcttgtaattctactag

SEQ ID NO: 805195 - DNA, 624 bp, Homo sapiens
gccacagtgggtccctgcaggttgttggggagtgtgccaagaatgccaggctctgcctgctccttacctaggacattcctcagggttgtgtttgcagtgagcaaccttgagacatgaggtagggtctctgggacaaagagcagggttgcttatgttgcttggtataaaaggatgcattccctaagctcagtgttcctcagctgtgacatcaatccactatatgtgtacacactcattcaggctcatataatgcccccatgagacctgggtaaagggggaaccaacagaaacatgttgaaactcatgctactttccacrcataagtaacaaaagtcctttatctctgacccaagcacctcatatcttctgccagcatccatgaaacagtatcagatcaacctattagcatataagtacagtaaaatcaaagtccaaactcatgaagactgtctatgaggcaagttacaaagttcttgagtattctatttttagtataatgaaacttccagtggtatatctagctagatctgggctcctaatggcttctaatggctcatctctgtcagcgtcagcaggaaaaatgacaattaagaaaaaggttcaggtagcttgtaattctactag

SEQ ID NO: 805196 - DNA, 624 bp, Homo sapiens
gccacagtgggtccctgcaggttgttggggagtgtgccaagaatgccaggctctgcctgctccttacctaggacattcctcagggttgtgtttgcagtgagcaaccttgagacatgaggtagggtctctgggacaaagagcagggttgcttatgttgcttggtataaaaggatgcattccctaagctcagtgttcctcagctgtgacatcaatccactatatgtgtacacactcattcaggctcatataatgcccccatgagacctgggtaaagggggaaccaacagaaacatgttgaaactcatgctactttccacacataagtaacaaaagtcctttatctctgacccaagcacctcatatcttctgccagcatccatgaaacagtatcagrtcaacctattagcatataagtacagtaaaatcaaagtccaaactcatgaagactgtctatgaggcaagttacaaagttcttgagtattctatttttagtataatgaaacttccagtggtatatctagctagatctgggctcctaatggcttctaatggctcatctctgtcagcgtcagcaggaaaaatgacaattaagaaaaaggttcaggtagcttgtaattctactag

SEQ ID NO: 805197 - DNA, 642 bp, Homo sapiens
gaagagatggagcctgggttgaatcaaaatatcagtaaaaaagagtttgggtggaattccaggcagcaaaaattgttatgcatagaaatttaaaccagtttagaattgtgatgcaagcagaatgtacacaagaggcaagggtgagaggtgagcttagaaaaattggtcagattatggaaagcattggcctttaccttaaggagwttggcttatatcctattgaggttgaggagtaagtaaagggttataagcagggaacgagatacgcaaattgcaatgtaaatagatgtctccacggtacatggaggataagttggaagggtgaatagagaggagtaggggtgaagaaagtttcatacccagaaaaccatttggattctggtccagtatcctgtctggagggaaagattagttaggaactagagttgtaacagattcaagacatatttggcagataaaatcagcaggatttggtgattgattggatatcaaatgtaagagaaaggaaggatcccaggactaccaggtggatgttagcagtgaattgaaaaccacaggaggaggagctgactcggcaggtaatgattttgagatgcctgtgaattgtttaaatacagatatcctatagattttaaaaatggg

SEQ ID NO: 805198 - DNA, 640 bp, Homo sapiens
aaaggcaaatttttcaacctttcatttttaaattatttcagttctaaagaattgttccaagaataataatgaggacaccctatcactttagccagattcaccaacttttgccattttagcacatttgttttacccatttccccggactccactcacatatacagatacacgtatgcgtaatataacgtatctttttctgaatcatgtgagggtgaattgaatccattatgtcccttaccccttaatacatcagtgtatatttcctgagaatargggttttctcttatgtaaacacagtatattcaggaatattagcagtgataacgatacttttatttatagtcctgattccaatttggtcagatgtcccaaaagtgtactttattgcatttacttttcacttctctttatttcatgttaatctggaacaattacttatttcattttaatctggaacaatcattcagcctttctttgtcatttctggcatggaagttttgttaagaatacacaccaggtattttatagaatatttctgtttgggtttgtctgatatttcctcatgatgggattttcataatagttttggctagaatggtacataagcgaggtcatgaacttctcaggaagtcacattcag

SEQ ID NO: 805199 - DNA, 550 bp, Homo sapiens
ttttattcaatagattataattcatcgtggtctttattgtgatgctcaaattgtcccagattttagcagtaggagctcatttaggctggttcttgtgtctttttggcatgttcccatcatcttatgagcaccttactttctggcatgacaaaatgttccaagcacaccttgtaccatttcagccctacccttggaattcatcatttctccagggagccctggttcctctcagtggggaatgatttgggcagtgtctggttgcttggaaaggaaaaaaactaagatatacgtgtgtgtgtgtgtctgtgtgtgtgtrtgtgtctgtgtgtctatgtgtgtctgtgtgtataactgctgaaaagtgtgagttagtacagatacctctaatttcaatccaaaccccaaggagctctgtcttgcctttcctggtcttcttcattccgtatttctgtctctccttccaaaatgcaatctctgtaactcgcaagacatcaatatatttagccattcattcaatcttacaatacaaataaatttgactcagagtttc

SEQ ID NO: 805200 - DNA, 417 bp, Homo sapiens
cagctacttgggaggctgaggcacaagaattgcttgaacctgggaggcagaggttgcagtaagccaagataatgccactgcactccagcctgggtgacaagagtgagactcggtctcaaaaagaaaaacaaaaaagaaaacccaacagaccaatatcccttatgaattgaggcaaaaatatttaacaaaatataagcaaatacaattcagcaatacataaaaagaatcawacaccatgaccaagtgtggcttcttccaggaagtaagattggttcaatattcagaatcaatcagtgtaatccacagtattaaccagttaaagaataaaaatctcatgattacatagattggtacagaaaaagcattgaaaacaattctacactcatttatgataaaaacttccagaaaaatagaaat

SEQ ID NO: 805201 - DNA, 619 bp, Homo sapiens
ggaaaaaaactaacagctaaatatggccaaatgctacaactgttaacatttatgcacatagtatatcagattaatagattcctttcattcgttctttcaattgtttagtgaatacccaattgtcagttaatttctctcttctcttttccatagtgttttcagatcatcctggaagattttaatttacatatttgtgtacacatattatattttaaacwttctcttgtgatgttaaattattgaaaaccaaatactaccttacatttctttatttttgagacaaggtctggctctattgcccaggctggagtgcagtggtaccttcttggctcactggctccccagactcaagccatcctcttacctcagcctcccaagtagctgggactacaggtgcatgccaccacacccagctaattgttgtatttttttgtagagatgaggttttgccatgttgctcaggatagtctcaaacttgtgagcctaagcaatctgcccacctcagcctcccaaagtgtgctgggattacaggtgtgagccaccgtatgcagccctactttgcatttcttgcgccccacaaatgtctttaaaatagaaatagctaaaacctataaaatat

SEQ ID NO: 805202 - DNA, 614 bp, Homo sapiens
agaccagggtcggcccaggccccagccagcccacccagccgagggaagcagagggcggggccgccccagacgcaccatgagctcctcctgctcctcgcgattgccagccagcccgtaggtggggatctcccccaaggtgcggcagaactcggacgtggcgttgaacacgatggcccccttccgctcgggatcctcatcctcctcccagccccgctggcgagactccagcttcttcacaatctccaccacctgggggagggagcggctgtgggcaaacccagcagtttctggggtgatgccattgagacccaggaacctaagggtcctccctggcarcagccagacaggccacgcccacagcccatgcaggcccagctgctatctgccgcctaactccactctgcacctctttcactggggtcactcttctgctccaaacccatcaatgggtttggatgccctttgaatgaatacccaacatcctacagggccttcctgaccaggcctgtgccaatccccctccaaagcccctcacacactacctcagcctcaaactccttcctccaggctccctcctgccacctgcccctcccccgacaaactccggtttcagg

SEQ ID NO: 805203 - DNA, 596 bp, Homo sapiens
ttcatactctcctctcctaccaccctgaccatcatagggcccactagacagtttgcaaagcgctttcatatgcattaaatttaattctcccaacccctttgggagatgttggccccattctgtggtcaaggaaattgaagccaagaggggaaaggagttttctcagtgtcatgcgatgaggtgggcagagctaggacttgcatcccagtcccttcctcgggcaatgaggtccctgagcccactgaggaaaacagggagcttttcataactcacaaagcatgttcacttacgtgatctcactgggccgccccactctgcygggacttgctgtagcctcggagcctggctcctgcaccccgccacctctccagccccgtgcctggccctggccttgattgggggccagggtgtctggcagggagccccttgggacacagctctcgtgccgtgccgggactgactcagcctccagcagtctcaccgaatcggaatttagagcaggggagcggagatgccaccgggctgactgggtggaagtggctgagtcatgagatgctggctcagtgctctctccagcttcctccccaccctgagct

SEQ ID NO: 805204 - DNA, 435 bp, Homo sapiens
tcccctactggaccaggcacttcaaggacagaaatggtaccttatttacctttccatctgaaaggcagtatagcatagtcaaggtaggactctgcagccaagatgcctgggtaaaaatccagattttgtcacttagtagtgctaactgtgcctctgtttcctcctctgtaaacaggagataattaatagtacctacctaataggatgtaatgattattaaaagtattaatatattgaaagtacttagactggtacccaccacatagtatcatgtgttmgttattattgttgttattagttgaattctcagtacctacctagcagagattcagtaaatggacacgttgtgtatcagtcacagatgggcaaagtataaaggtacaaatcctcctttccctgaaattctgcctatttcatggacactgctggccctgg

SEQ ID NO: 805205 - DNA, 601 bp, Homo sapiens
ggaataccaactgtaagtgtaaaaagcaagggcttcaagcctcactaacctgtgtgacacactgacagtacagaccccagctctaccacttaccagctgtgtgaccttaggcaaggccttaacctcttaatgcctcattgctacatctatagtatgggcatagtagctgcctatctcttagggtggttggaagattcagagtgtgtaaaggaattagcagaggtcagcacatggtcagtgctcaataaatgttagataagaaaacctgcccttcctgcacatgtatcctagaacttaaaataaaataaaataatataaaagagaaaatacctccctcaaaagcttattgtaagttggattcatagagcttcgtgcaaaataggtgktctgtatctgttaactgcctttctctcctactattttccttttctgcaaccttctttctttgaccaataatctatggagagagggacatctggaatgtcgttgtccaagagatatgttgaaacccaaagaagaattgacctaaaaccatgtataaataggcaagctccaggaatggaaatgaaccctcctcctcttctgaggcaaaaggccatct

SEQ ID NO: 805206 - DNA, 600 bp, Homo sapiens
aagcaaaaagagcttcaagttcccctgcaggtacagcctggagatgcagagtttgtctctgggcgcaactcccagttcatgagagacaacagactgtagaaaaatgcttcactctcctgctgtcctcctgtggaacagttctgtggctcattctacacattttctccaataaatgagcgacagttgtccaaagggcttctctcttccctgtctcaccctatttaacccctggctttggctttaaaatgacctgtcctacagttcttgttccaggccctgtttcgggaggaaagagctgaggaggttcctaagacagacaccaaacstaaagagcttgggcttcatgctctacatgggagcagcccagtaaatgtaccataggccccaggttagtggcctccaggtccaagtttccccctcagtttactcatgcatatgtattacctttttcaatataagccatgatggtggaaagttgtgaagcaccactctaggtagtgggaaacgtatcaaatttttgaagccaaggaaaaaacctaaaaggtatgtgcttaaaaagatgactttggtagctgtgtaacagaagagagaaggaaaaat

SEQ ID NO: 805207 - DNA, 600 bp, Homo sapiens
tatctatcagaaggcaaaatctaatcaatacacaacatgaatccacgtagtcttcacaaatgaagaaattgtgtaaaaagtctacatggagcactgagtccattaaaatatagtaccagggttaatgaactataggaattatggttaaacaaacagaacatgaatgttatcaacttcgatattcaaaaagtattgtaacgaaaacatgcaggtaggaaggtctgtagtgtaattatgtccctatctttttataatacattgtccaaagttgaaatgagtagttaaaaaggtaatcactcttatttcagtttcttatatttgtaataactctggagaaaacttttagatataaatatatcttgtggcaatatttaacaattttgttttttagttttacttttttatttaatctaaaattaattaaattttgtacttttaattaaaatggtataatacaggttttytaatatctctggctatagatacacagtaagaaatgtcaaataatgtttataatgcactggagataattattttgtatgaaaagatgtggggttattattcaaactttatttttatatttatgctttgatttattta

SEQ ID NO: 805208 - DNA, 606 bp, Homo sapiens
attcacaacaggtgactggtggctaccgctttaggtgacacagctgtaagcatttgtcaagttcagatttggtggcggtagggctgaggaatttaattcccgttgtaattgatatcacagacactgttgtggaatgaatcaagataatattgtatgatgtgagcagtggctagtcttgtaaaacaaatgaaaaataaaaatacatctcagctctaccaaacttagactggagctgtcggtctgtgatatgtctagtaatgtctccagaatatatactgaaataaattcctccttaagaaaatcagattgtcctcttttccccctttgggctaccaggaaagcttaatttgaaataaagtgctgggatgggacttgccctaaaggagrctttagtaatctcatcaaccctgaactggcggctcacctgccttaactgtgtttcctggatctttcagctaaggcgggtctttggaaattgcctgccacccttcccaccaaagtactatctggcaatgaccacagctatggctgatgagaggagggaccaactggaacaatatttgcaaaatggtatgtatttgcagggttttttaaaaaacagattta

SEQ ID NO: 805209 - DNA, 657 bp, Homo sapiens
attttacacctacaacacatctcaatccaaactagcgacgttcaagtgctcattcacaacaggtgactggtggctaccgctttaggtgacacagctgtaagcatttgtcaagttcagatttggtggcggtagggctgaggaatttaattcccgttgtaattgatatcacagacactgttgtggaatgaatcaagataatattgtatgatgtgagcagtggctagtcttgtaaaacaaatgaaaaataaaaatacatctcagctctaccaaacttagactggagctgtcggtctgtgatatgtctagtaatgtctccagaatatatactgaaataaattcctccttaagaaaatcagattgtcctcttttccccctttgggctaccaggaaagcttaatttgaaataaagtgctgggatgggacttgccctaaaggagactttagtaatctcatcaaccctgaactggcggctcayctgccttaactgtgtttcctggatctttcagctaaggcgggtctttggaaattgcctgccacccttcccaccaaagtactatctggcaatgaccacagctatggctgatgagaggagggaccaactggaacaatatttgcaaaatggtatgtatttgcagggttttttaaaaaacagattta

SEQ ID NO: 805210 - DNA, 532 bp, Homo sapiens
ccccagcctaaacagcaatatttaaggcgtatttagcttttcattcttctctgggagataaagcatagcctgccaatatcactgagggatgtagcagataggcttatgttcagactaaggtgaaaataagcacctgatgattggcaaagaattgctgggcattgccatatgtaagacactgggcaaggcacactgagacgacgggcgcrgggtcttcccttagggattgacagcctaactgagggacaatggccaattctgccccgtcatgacaagttagagcagcacaggccgagtgtgtgtggctgaggaggtggacagctgattccacggcctccccagggccagactggctaaaggggaagggagctgggtgccaagaggagagagaaagagcacaggaaaaggtgcctgctcagggagggtaggctgagacaacaggctttgttacttccacgtttcatgttgcttcaccatagtcctgacgtgcttccacagggggccattgccttcaaggcgatttctgcctttg

SEQ ID NO: 805211 - DNA, 514 bp, Homo sapiens
aataacggagattaaattgagcttgaaatttatgggggaaatgcagctaactttgtgcttttattttgaagctaaacagttaacagaaacacaattttgtaaacagataatatctgtggtctgttgagttgctaggatttgtctttagatcaattggctttgagaagtcagcttaattccattttacggcccaattttgcctttttccccccctacaggctggccacttgaatacatgtcaaataatcgaamtatgaagaattcatttttattagaaaaggccttaagggtggaatttaagctcctattaacattcattcagtagaacttaggttactgatcagctcttcactgtgtaaagttgatactgattttggaagcagaatattgagtgacacagagccagaagttgtaaaactgcactgcaggtttcctgcccttttgctctgtaagcagtaactccaaatgtcacttcataacagttcttgtcaaccttaggcaggatgtatcaatg

SEQ ID NO: 805212 - DNA, 603 bp, Homo sapiens
tgctgttttgagtaaaagtgatataactcttttggaaatttgtaactgtcctaagaagaaatacacaaagtgtctttcataaagtttcagctttactgcagtgtgcctttattcccagccactgggaagctgaggcaggatgcttgagccaaggctgtagtgtgttgtgattgtgcctgtgaacagctattacactccagccagggcaraatagcaagaccttgtctcttaaaaaagttgcagcattatttacaaagcagaaagtgatggtcacaatgaaatacgctccctttgagaacatttatgaaactaatagcatagcgaagaccaaccatattttgtggagagataaggaaattatttttattttactttttattctaaagctgggttagagataaggaaatttagatgactagggtgagattatgtaagatggtttttccttctgctttgctgtgtattataatatgctatgacacatgtgctacctttttttcttcagtgatcgttgttctttttatatttttgagacatggtcttgctctcttgcccaggctggagtgcagtggtgcaatctactcactgccacctctgcctccc

SEQ ID NO: 805213 - DNA, 565 bp, Homo sapiens
catatattttatatatatataaaacaattaatgctgacatcattctaaatgtaatatgatttcccattgtcatgtcagtgtgacttttttggatgcctctgatgttcagtatataatctgttagatggcaataagtgctctatagaagaatagtagggtaagcggggcaggattgaaggggtgagaggagggcatggaggggtttgcataggatgttcagaaaaggcatctcagaggaggtgacattttaacagaggcctgaagaaagtgagggatgagccatgtggccaccaggggaaagaacattaggcagagagagcagccagtgcagaggccctagagtggggatgtgcttgcttcaggcaagtccagagtgactgcccccaaggaatggggagcgggaagagatgaggtcaraaaaggatgggagcagggtgagttactaccccatatgaactgctggaagatgggtaggagtgacatggcctggcttataggaggggaaaaggatagaagcagagggaccagttggagtctatgttattaatccaggtgagagagaatg

SEQ ID NO: 805214 - DNA, 586 bp, Homo sapiens
agcttgataggcccaagaagaagagggcagcaatgcatggggtggagtgaatggggaatgagcccatggtgtcatccagcacttctgcttatggatcatgatctcacactagctatgagtctcaagtctttgtatcactcggtcctgtaccaggccatggaatatgctgtataaatgtttattgaataaagaaaaaataatgattaacccgtacagcccctccatcagcaaattagaatatcaayattctaggctcagttgttcactccctagctccaggcacaacccaactgaaagaagtgatatttatggagctctcctaaggctttgtttctataaaaaaatatagagttcagcccacaaggaggatgtccagatgggcaaccagttgatgagaacaatgcaaatcctttgcttggttcttccaagtgagtggatacaattccctggagtgccattattatgtacaactgcttatatgcagtcagggattaccaaaattagtgctccactagcggagtcctggggactgattcaacattcagccgaggagcttggctgccaagcccagctctctggcgtggcc

SEQ ID NO: 805215 - DNA, 456 bp, Homo sapiens
ctatcttaccattctgggcgtcagaagtctaaacagacgcactgagctgaaatcaatatgtaggcagggctggttccctctggggactctaggggagcatcctttccttgcttttccaattctagaggagtgatgagtttttaaatatattaccttggcttttagatataatttatttaaccataagcttatataatttcattctaaatattgactgtattttacraccagcttacaaaatttctaaaaatttaacattcagctttcaggggtcggtacaggcaattacagctcaccactgcctccatatttctaaacagtctgcatatactgctgtttctcgatttttcaattttgacacaatctccttatagtgtaagatgatgatttagctcctctcattcccccattccgcagctctccctcaattctccagtgcacaccttctcttactcc

SEQ ID NO: 805216 - DNA, 617 bp, Homo sapiens; identical to SEQ ID NO: 746064

SEQ ID NO: 805217 - DNA, 610 bp, Homo sapiens
tagaaaccactcatttttattctgtttttttcattcattggctggccagttaggctctgtgcagtttatccaatatgttgtgatgctttatagtgtcttttgtccaaacctagagcttgtctccttctgggtttagrttgtctgttggcttaacagctgtgttcattgtactgtgtttgccctctgagtttcccaaaacctgctgtgccagctgctgtttgtataggctcagtgggagaaaaaaagccatcacactgaagattagacagatgtgggagctctatccagattcaaatatctagtgctgtttggtatatttctgctttacctgttggtgtcatcagttgatggggacatgttgaggctatctaaaatggactcctcttttgcttccatacacatttcctctgacggatgatgaattactgattgttatatatgtccacataagggtgtcgctaaattttcttggtttgctttagtgtttatctcccttagtcagtaagttcttatcaatatctaacccagtttcttcctattgccacctaagggaatcaattttccttgaatttttgctctaataattacctttctaaaagtatttgagatt

SEQ ID NO: 805218 - DNA, 627 bp, Homo sapiens
aaaggcaaagaactaaatgtaatctgtggacctggtttggatcttgatttagacaattaacaaccacctggtgcttggctcactggttgctcgtcccagcactaagggccaagaataaaaggacatcaatttacctttctcaatcttactccccaataytccccttcactgattctgtgcaccagttgaactgctctgctctgcacattaaatattgcatttttcagctgtttttgtttgtttgtttgtttgttttgagacagagtctttctttgtcacccaggctggagtgcagtggaaccatctcagctccctgtaacctccacctttcaggttcaagaagttcttgtgcctcagcctcctgagtagctgagattacaaacgtgcaccaccacacccagtatttttagtagagatgggtttcaccatgttggccaagctggtctcaaactcctggcctcatgtaatttgcccacctcggcctccaaaagtgccgggattacaggcgtgagcctccacgccccaccaaaagtaacaattttaagagttctgtatgtatttgtaactaagtaagcattttatttctttttaactgtatttatttatttatttattttgaaacagagt

SEQ ID NO: 805219 - DNA, 627 bp, Homo sapiens
aaaggcaaagaactaaatgtaatctgtggacctggtttggatcttgatttagacaattaacaaccacctggtgcttggctcactggttgctcgtcccagcactaagggccaagaataaaaggacatcaatttacctttctcaatcttactccccaatattccccttcactgattctgtgcaccagttgaactgctctgctctgcacattaaatattgcatttttcagctgtttttgtttgtttgtttgtttgttttgagacagagtctttctttgtcaccyaggctggagtgcagtggaaccatctcagctccctgtaacctccacctttcaggttcaagaagttcttgtgcctcagcctcctgagtagctgagattacaaacgtgcaccaccacacccagtatttttagtagagatgggtttcaccatgttggccaagctggtctcaaactcctggcctcatgtaatttgcccacctcggcctccaaaagtgccgggattacaggcgtgagcctccacgccccaccaaaagtaacaattttaagagttctgtatgtatttgtaactaagtaagcattttatttctttttaactgtatttatttatttatttattttgaaacagagt

SEQ ID NO: 805220 - DNA, 627 bp, Homo sapiens
aaaggcaaagaactaaatgtaatctgtggacctggtttggatcttgatttagacaattaacaaccacctggtgcttggctcactggttgctcgtcccagcactaagggccaagaataaaaggacatcaatttacctttctcaatcttactccccaatattccccttcactgattctgtgcaccagttgaactgctctgctctgcacattaaatattgcatttttcagctgtttttgtttgtttgtttgtttgttttgagacagagtctttctttgtcacccaggctggagtgcagtggaaccatctcagctcmctgtaacctccacctttcaggttcaagaagttcttgtgcctcagcctcctgagtagctgagattacaaacgtgcaccaccacacccagtatttttagtagagatgggtttcaccatgttggccaagctggtctcaaactcctggcctcatgtaatttgcccacctcggcctccaaaagtgccgggattacaggcgtgagcctccacgccccaccaaaagtaacaattttaagagttctgtatgtatttgtaactaagtaagcattttatttctttttaactgtatttatttatttatttattttgaaacagagt

SEQ ID NO: 805221 - DNA, 615 bp, Homo sapiens
aaggcaattttcactaaccagaccactccatggatcgctaggacaacaaagaaatattaagatcacttatgtagatgatttttgtttctttatgtgcatgtatttttaaatttctgatatttgtttcatctcatctttctttcagaaattttgtattgattgttttaagtccctgtgtcagaaattgatataaccgtatgaaatagttaatctggataggaaccctttgttaatgacctgaatacctgtttagctaaaatttaacatgattttaaaattgtttacctttctgtggtaatacaaagcaattgaaaatatgccaaacatttcccctctcatctctttaactattaaaaaaacctctggatttgtggggattttcttgyttgttttcgtaacattctctgaaattattttcatacctcagggacaatttttttttctttgggataactttctgccactttgctgggttttagtccagagaaacttaaggttggaatccaaacaaaaccttgtttactttttccacacttcaggaactagagtaaattcagtccacagaaccctaggggatggaaaagaaaaaagggcttttcattgtgcacagctgaa

SEQ ID NO: 805222 - DNA, 602 bp, Homo sapiens
attgccttcataaattactaattatggactggacttggtgactcacgcctaatcccagcactttggaaggtcaaggccggtggatcactcgaagccaggagttcaagagcagcctggccaacatgtgcaaaatcccgtctctactaaaaatacatatacaaaaattagccggttgcggtgatgcatgtcttaatcccagctacctgggwggctgaggcaggaaaattgtttgaactcgggagacagaggttacagtgagctgagatcatgccactgcactccagcctgggcaacagagcgagactctgtctaaaaaaaaaaaaaaaattactaattatgtttgtttcaggatatgcttctctttctcactaacacaaaaaaagaattgtcatcaaatacagatatatgaaattatatccatttcacaataacagaataaaatctatattttaaagaataggaacaacatatttctcctaaatataatcaatatatttcttcaaagccttatgaaaactattaactgacatattaatttaacattataaaagtttcaaacaggctgggcacggtggcttacgcctataatcccagcactttgg

SEQ ID NO: 805223 - DNA, 505 bp, Homo sapiens
atactaaccacccaccattttttccaggttgatgataatgatgttaagagggtgtatatgagttatactaacacttggaatttataaggcttaaaaaaaaaaaagctaatttattcagtgtcttcttaccagatgctcatatacaagagggggaggatgtaatttataggaaatatatccagagagaaatacatccaggctaacatttccctgccttcagccctccatgctgctcaacacagcacaacctcacagtaaagagagttgggttcaggagtccgacgccctggggtagatcctggttccctcaccttttagctatgtaaccttggccggttactagtttctgaaactttatcaccaagtttccttatctgtaatatcataaaaacagcagtgcctttttcataggrttgttgtcagtttcagtgagttactagacagatggcacctaatacaatacctggcgcttgaagataataaatataaattgttattttatgac

SEQ ID NO: 805224 - DNA, 633 bp, Homo sapiens
aaataagggaactattatatttaagagcaaacaaaaatatgatttttaaaggaaagaattatgttataaccaaattagctttgagaattaaagagagagtcagtttttctgaggaaattacagcagttgaatctctagcagtaagagagaaagcacaaaagcactttacaagcctgcaggaccgatttccatttaaacaccatttcatgggtttacctctaatgtttacagccaatatggaaaagaaatgttaatgcaattctaggggatagaaagcagaagagactggaataaaggaraagccagagttgagaaggctgcaccccacctttggtgcaggaggggttaatgtgtgcttgaggactgtttttctctctgagcttggaaaactcaagtcttcagtgcctatggctaagccagttcctgtacagtgtgcccaatggaactaactacaacattagttggcttcttaaatacagaggagtccgcctttggggttcctagggccagagagagaaataacatggtaaaacacctagagtaacttcaaactgccacaaaggcaacagacaaaaaacatgagcttaaagcaacaggaaagtcctttcgtgtgtctaacccccagcttaccct

SEQ ID NO: 805225 - DNA, 633 bp, Homo sapiens
aaataagggaactattatatttaagagcaaacaaaaatatgatttttaaaggaaagaattatgttataaccaaattagctttgagaattaaagagagagtcagtttttctgaggaaattacagcagttgaatctctagcagtaagagagaaagcacaaaagcactttacaagcctgcaggaccgatttccatttaaacaccatttcatgggtttacctctaatgtttacagccaatatggaaaagaaatgttaatgcaattctaggggatagaaagcagaagagactggaataaaggaaaagccagagttgagaaggctgcaccccacctttggtgcaggargggttaatgtgtgcttgaggactgtttttctctctgagcttggaaaactcaagtcttcagtgcctatggctaagccagttcctgtacagtgtgcccaatggaactaactacaacattagttggcttcttaaatacagaggagtccgcctttggggttcctagggccagagagagaaataacatggtaaaacacctagagtaacttcaaactgccacaaaggcaacagacaaaaaacatgagcttaaagcaacaggaaagtcctttcgtgtgtctaacccccagcttaccct

SEQ ID NO: 805226 - DNA, 610 bp, Homo sapiens
cagtgagcagaaatcgcaccactgcactccagcctgggtgacagagcgagattccatctaaaaaaaaaaagaaacaaagaataatagatttctactttgtggtcccaatcagtatatgaacagaaggcctatttagaaattaaagttaaaaaaaaaagcaagttatatttcatgcaacttcaattccaaaacaactcagatatagatgtttatatatatatatgtatatgtgtgtrtatatatatatatgtatatgtatatgtataaacatacttgtatttgtaaggcttggcaatggcctgaggtactcatttttgtgtttatgaatagacctgtagcacacaagtgctgcaaagaaatcttcatgatcatccactccaaacttctcattttacaaataggaaaactgaagtccagagaggttataccatttccctgggattacacagttattttgttaacactgaaataattcaaggacaaattgctggaggacacatatccacaggggattggttccaggcccacagatgctcaagtgtcgtatataaaatggcctggtattttaggtatataacccatgcacatcctactatatactttagatcac

SEQ ID NO: 805227 - DNA, 583 bp, Homo sapiens
actatcaaattgcaatttttttttttttgccttgcaaataaacaaattacaattgtcatttactggtgagacaatgagaaaaagacaccctcaaacactgttggtagaacacaaattgttaaaatctttctaggagtcattttcaaattatgtatcaatgacctaaaaatatttatgtctcctgttcttatacttccagaaatctattctacagtaataaccggagataaaaacctttacatataaacatgatttattatactgaaaagtcaaaacaacataaatattaaaaataggaggtggtagatttcacctttaaatgctatgtasgagaatacttaagggattggtaaagtaccaatagtatagtattaagtggaaaatgcagaatggcatgaatgatgtaaaaaagagaatcataatttgcacactctttgtaaaaccacattgatatactatgcatgcacatattagaaactgtaagaaaagacaaagtattaacagggtgctggaattatgagtgatttttcttctagatacttgtttctattttccaatttttccccataagcatatattattt

SEQ ID NO: 805228 - DNA, 418 bp, Homo sapiens
ctctatggatccgcttctcaagtgtcatcctgggacactctttttttttttttttttttttttttgacagagtctctctctgttgcccaggctagtgtgcaacggtgtgatctcagctcactacaacctctgcctcccgggttcaagtgattctcctgcctcagcctcccaagtagctgggattacaggcatgcaccaccaagtccagctaattttgtatttttagtagagacsgggtttctccatgttggtcaggctggtctagaactcccaacctcaggtgatccacctgcctcagcctcccaaagtgctgggattacaggtgtgagccaccgtgcccggcctgggacactccttaatctgtagtgtgagaacccccatttctgtgttttgtgccttctttcttggtttactgctt

SEQ ID NO: 805229 - DNA, 632 bp, Homo sapiens
agataaaaatttattaaaacttaaaatatatatgagtcgactaactaaaagaaaaattatttatgtcctttcaaggtatggactctgtctattgcattgttttcactgttttatatatatcaaataaaattgcagtgtttttatgtgtgtgtctgggtgtgtgtttatgtgttaatgaacaaacaaaggaaaaattatctaaattataagccattttaactatatgattctgaacttattaaatagtgtatttttgaattcttattgattttgtctctgaagaggccactgaacctgtcatgcatgaagaaattgcttcggagggcaacagatttatctgggcaattactatattgactaaggaaccaaggagcccragttccttcttaacacaattgttatttcattgactagtgttacatgagagacaaggagagtcagagttcaaggacagcggaacgatgatggtctcctgggaacgaagcgcgatgctccatagagacttgaattctagaataaatcgctggaattgtgttggcagcagtatggatccattgtttgaaactaaattcatcacggtggttgccacgctgactgaaataaatgcccaacaatatacaaacgcaaccatt

SEQ ID NO: 805230 - DNA, 632 bp, Homo sapiens
agataaaaatttattaaaacttaaaatatatatgagtcgactaactaaaagaaaaattatttatgtcctttcaaggtatggactctgtctattgcattgttttcactgttttatatatatcaaataaaattgcagtgtttttatgtgtgtgtctgggtgtgtgtttatgtgttaatgaacaaacaaaggaaaaattatctaaattataagccattttaactatatgattctgaacttattaaatagtgtatttttgaattcttattgattttgtctctgaagaggccactgaacctgtcatgcatgaagaaattgcttcggagggcaacagatttatctgggcaattactatattgactaaggaaccaaggagcccaagttccttcttaacacaattgttatttcattgactagtgttacatgagagacaaggagagtcagagttcaaggacagcggaacgatgatggtctcctgggaacgaagcgcgatgytccatagagacttgaattctagaataaatcgctggaattgtgttggcagcagtatggatccattgtttgaaactaaattcatcacggtggttgccacgctgactgaaataaatgcccaacaatatacaaacgcaaccatt

SEQ ID NO: 805231 - DNA, 574 bp, Homo sapiens
tattattattattatatgtaatttttgaagttactattgtaatcgttttggagcacaacaaactacacccatataagatggcaaacttaatcaataaatatgtatgttctcactgctccagctgctgttcatcttccagtctgtctctctctctgtgggcttctctattccccaaaacataaaaatattgaatttagacaaattaayaatcctacaatagcttctaaattttcaagtgaaaggaagagttgtgcctatctcacattaagtcaaacactagaaataattaagcttagtgagaaaggtgtgtcaaaagcagagacaaactgaaagctaggcctcctgtgttaaagagttggtcaagttgtgaatgtaaataaaaaattattgaagaaaattaaaagcgctattccagcgatcacatgaatgataagaaggtgaaatggccttattattgatatggagaaagtttgagtggtctagatggaagatcaaactagccacaacattcccttaagccaaagcctatccagatcaaggccttacctcttttcaattctatgacggtaggctg

SEQ ID NO: 805232 - DNA, 620 bp, Homo sapiens
tatgtataaatgaatatttatttatttttaaagtgattatagtctagtgactaatttacaacatacgtttacaatgaaaatataaacccattcgatgccaaaataatacatgactgcattatcattttaatggctatataatattctatttcatggatattaaaaagaattactactatggactacaacggatcttccattatgagcattcagattccatggacgtttttgctattaggaacattgcttcctgacatcactaatgcagaaatttcccagctgtgcttagttattacctggagayaaattcttgatgaaatttagcccgatgaaagtacccatatttcgaagactctaatgcctgttatcacattgcacttagaaatattacaacgattcatacttctaccaacagcatatgaggaaaccaacttctcctcaccacatagtggtattagcattccattaacagagaggtattcacttaatgaggttttagaatacagaaaactaatttgtaaatagcagtcccaatgttatttcagcacagggatgtgtccattaaagtccgtggtgtccaatcattcattttgcatgagtgctatggcagagtgatcaag

SEQ ID NO: 805233 - DNA, 620 bp, Homo sapiens
tatgtataaatgaatatttatttatttttaaagtgattatagtctagtgactaatttacaacatacgtttacaatgaaaatataaacccattcgatgccaaaataatacatgactgcattatcattttaatggctatataatattctatttcatggatattaaaaagaattactactatggactacaacggatcttccattatgagcattcagattccatggacgtttttgctattaggaacattgcttcctgacatcactaatgcagaaatttcccagctgtgcttagttattacctggagacaaattcttgatgaaatttagcccgatgaaagtacccatatttcgaagactctaatgcctgttatcacattgcacttagaaatattacaacgattcayacttctaccaacagcatatgaggaaaccaacttctcctcaccacatagtggtattagcattccattaacagagaggtattcacttaatgaggttttagaatacagaaaactaatttgtaaatagcagtcccaatgttatttcagcacagggatgtgtccattaaagtccgtggtgtccaatcattcattttgcatgagtgctatggcagagtgatcaag

SEQ ID NO: 805234 - DNA, 614 bp, Homo sapiens
ccagcaaacagataatagtcaatgagatctatggatgtgttaattaaggaaattttagatattgcctgtacaaagagtttcaaaattggactatatgtaaaagcattctttgaatgataaggagagaaaaggttttagcatggcagcaagattgagatgcttataaaatcagggcagacacaaaaaataatgccaggctgagatgctgcttaggtgtcacagattactgtagcagattactttacacaatcagtgaatgcaggctgtataccagcttatttttttatatatgcatgtgcacacacacacacacacacaaatggaatcttgaaataaaataacaaaatctaatctatttattcctaatacagattatcttattrgccaaaaaaatcccttgaataaatttgagatataatcttttttatatcctttatatgacttgaatattattatatcatttagttgcctccacagagacgcaaaattttttgtttaattattgtatgaagaaggatgttcaataaattttctagcccttttccacccatgttgccgcatatttgcagtcaaaagtttgcacatctgtgatacctaatctctctgcattgttc

SEQ ID NO: 805235 - DNA, 666 bp, Homo sapiens; identical to SEQ ID NO: 748077

SEQ ID NO: 805236 - DNA, 585 bp, Homo sapiens
aaaatcaatatgatgtaatataaaggctcacattggggtataaagaaagccagttctttcggggagagcttttgagccttcccttatggtctgtctctcacatgacaccaaatatccaagccagttcttcatagctgtcagtggagacagttggctgcttttctgagtggcatcttactttataagcaggatacagtccagttatgrtgacccctggtcttttcatcttgatcctcctagcatgaaacatgactttatcaatgagctagagcaagggcaattgaagttctattatttcctgcccatagaaactttttcctttgacagggactgcatagtgaaatggaaaccctggcctcttgatcacactttcctggagtttagtcccctctgcaatatgtacctgggagtcataagaaatgccagttacaaaaacttcctgtacagatatcctagcactcaactggaaaccggggagagtcacaattctgtctttccagccatatgtaactgaaatggagatcttttcaccctgagccaggggtgatgggaaagggagctggtcatggctcaatgtttagcctt

SEQ ID NO: 805237 - DNA, 585 bp, Homo sapiens
aaaatcaatatgatgtaatataaaggctcacattggggtataaagaaagccagttctttcggggagagcttttgagccttcccttatggtctgtctctcacatgacaccaaatatccaagccagttcttcatagctgtcagtggagacagttggctgcttttctgagtggcatcttactttataagcaggatacagtccagttatggtgacccctggtcttttcatcttgatcctcctagcatgaaacatgactttatcaatgagctagagcaagggcaattgaagttctaktatttcctgcccatagaaactttttcctttgacagggactgcatagtgaaatggaaaccctggcctcttgatcacactttcctggagtttagtcccctctgcaatatgtacctgggagtcataagaaatgccagttacaaaaacttcctgtacagatatcctagcactcaactggaaaccggggagagtcacaattctgtctttccagccatatgtaactgaaatggagatcttttcaccctgagccaggggtgatgggaaagggagctggtcatggctcaatgtttagcctt

SEQ ID NO: 805238 - DNA, 626 bp, Homo sapiens
agtaaatgagttggataaacagtggcctattcacaccatggaaccttattcagcaataaaaataaatgagctatcaagtcattaaaaggcatagcttaccatggctcatgcctgtaaactcagcactgtgggaggccaaggcgggtggatcacctgaactctggagtttgagacaagcctggccaacatgatgaaaccctgtctccactaaaaatacaaaaattagctgggmgtggtggtggatgcctataatcccagctactcaggaggctggggccagagaatcacttgaacccaggaggtagaggttgcagtgagccgagatggcaccattgcactccagcctgggtgacaagagcgaaactctgtctcaaaaaaaaaaaaaaaaaaaggcataggagaggcttaaatatatattgctaagtgaaagaagccaatccgaaaatgctacactggatgataccagctatatgacattcactataggacattctagaaaaggttaaactatgaagataataaaaatatcaatggttgccaggtgttcagagtgaggaagggagggatgaataagaggaaaaaaggagatttttaggggagtaagactattcttgatgacaatgtaa

SEQ ID NO: 805239 - DNA, 583 bp, Homo sapiens
gtacaccaaaccctgacactcaatttacccatataacaaacctgcacatgtaacccctgaatctaaaataaaagttgcaaaagaaaaatataaataaataaagtgggtttcttgtaggtggtacatagttgggtatcttcttttattcactgtgacagtattgatctttagttggtgtatttagaccattgacatttaaagtgatgattgttattattacattgatatctaccatatttgctacagatttstatttgttgcccatgctctttgtttctgttttcgtcttctacattatttatgtcttttgggttttaattcagcattatttaagattctattttttctcatttctttaacacatcaattatacacaaactcacgtacatacacaaatatatatataccttacttagtgattgccctaaaatttacactgcatatatttacaactaattcatattaacttctaagtaacagtatactgctttgcagataatgcaagcacctcatggtaacaatatatttctaattccttcaccttttgtatcatcattggtcatttaatttatacataggtata

SEQ ID NO: 805240 - DNA, 607 bp, Homo sapiens
atatccatgagcagaaaaataattatcagacctttatttcacaacatatacaaaagtcaattcaaaatgttttcacagactatgtgtatgataaggagttaatatccaaagtgtataaaaaacccatgtaacacaatarcaaataaataaataaataactcaaacaaaaagggggcaagaaaccttaagaacctcctttactatatcttgcaaggcagagcttacttgcaacaaatttccttaatttttgcttgtctgagaatatctttatttttccttcacttttgaaagatgcttttacaggatacaagattggtgataattttttctctgaatgctttaaagatttcatgccattctctgcttctgtggtttctgaggagaaaatgaatgtaatttttatttttcctccactatagatgaagtgctgtttccctttgtctgctttcaaaattttcttcatcttctaaagtttgaatacgatatgcctaagtgtcgatttcttagaacttattctgcttggtgttctcagaatttcctggaactgtgctttggtggctgatgctaatttgaaaacattcacagtcattactgcttcaaatattgg

SEQ ID NO: 805241 - DNA, 655 bp, Homo sapiens
aaggaagtttctagttgtatgttcaggaaagtagacttaatttgatgcaaataaaatgtgggacatagggaagaaagtaatttccttataaatattttaaatagttttgcatatatagaaatgacacggctcatcaaagcatttaaaaatacttattagatactttgaagggcaatttcttcacgtgtttggcaaggcaagatattttccattgtcattaactttcatgtgatagaaaaactaatctggccccaatttagaggtttttttttgtttgttagcaattataaagtcattaagaaagtgttcagaatgtattgaataagtgaattttaagaaagtatttgaaaccaaaaagagtaggcctgcaggggraaaaaaaaaaggagattgctacttgccacagataaaatggagaatacatcaataagtatgttgtagaatgccataaaaattatgacatcttcagggcaaggcaatagaagaacataacattttttttataaagaacatcaagaaggaattttacccttaaattaatagacaagtgattacctggtgaaaatgatatttaaagtgaagagaaagtgactttttcagaaatgtcaaaagctctggaaaaattaataaattgactcttatttgagaagtcagc

SEQ ID NO: 805242 - DNA, 564 bp, Homo sapiens
gtatattgtgtttttagtattttatcgacacatcatcttttaatgaagacacaagtgtaactagatctcattttttaccacttggtgataagaacaaggcatatttccactgcattatttggtcattttcatagtcatctagaaacgggcagctatgcctcttagattttctatacattatttggaaatacattagaaaatgttcaatgatactggtgcaggatttttctcgacctctttgccgtaytcccaacaggggctctccgtctacttgacccactgcgctcagccccttgtgggaaggagcaggtgaacgagtgagtgggggatctggccagctgctctaggcactgacacaggagcatgctccatgaggggcccatggccagaccaggtgtgtcatctgaaggggaatgtgacggaatccaggtgagggtgcccacgaccccaaaaccccacagtgggtgttacagtactcttttagttctgccaccgcagtctgatggacggtggtgtgttagcagctcagctggccctttgcctcgttgcatggggcagctgcct

SEQ ID NO: 805243 - DNA, 659 bp, Homo sapiens
ttttctccatgaagaatattcagaaatctctttccattttaatactatggtatcggaggaaacttaggagtaaatgatatagtaaactatttccccatttgtagagtctccacctctgtctttttacagatactattccctcacttctgaaacaggaaggaaaacaaatataaaagttatggtgaaacatggctgttgtagactgaatgttttagacatctcaaaattcatacattgaaacctaattcccaatgtgacagtatcaggagatgtggcccttgggagatgattaggtcatgaatgggattggtacccttataaaaggggacccaccctaytataagcttcctcacccagtctgccatgtaaggacgcagcaaaatctggccatctacgaaccaagaagtaggccctccgcagacacaaaatttgccaggatcttgagcttcccaggctccagaatcgaaagaaataggtttatgttgtttataaaccactcagtgcatggcaattcgctatagaagcccattggactaggacaactgaccaacatttctggagcaaatgaagatggtttcatttagtttacttatacattacagcataaatttctcgtattttagaaaaccttaacctttaaaaagatttttgcacagtat

SEQ ID NO: 805244 - DNA, 555 bp, Homo sapiens
aaccttatgccaggaaataaaagctggactattgacttaattaggaaatttcacctttacaagggtgaaaaatggacatggaagagaatatgcaccttcctttttggaaatataaaattatgttctttttaatgattttttctaagagaggttcaaggagtcacatcattaaaggagtcagtgaatttaatattacttatgacatattgtaactataataaaatacatacttgttctgtgtcwggtcctaattccaaaaactggatgccaataagtgtttatattactgagattatttagactgcattacaggtatactctctcatctcctcatgaccagtcttctcaaatcatatgccccaaattgactcagtttttatgtcttaaaccaacatcagaatgtctgttcaaaactctacagatgtaaattctgaagaaatcctaagactatatttatatatataagcaatatgtgttttaaatccacatattcaatactttaagctgtaacaagccttgaaatcctgcgtgtgtatgtgcgtgtgcatacatgaa

SEQ ID NO: 805245 - DNA, 644 bp, Homo sapiens
tgagatgtgatttgacaaacgagtagaaagatggagggaagagcattacaatcttacagaacagaatgtacaaagaactggccacagtggcacacattatctgtaaaatagttaaaggatgccgggtgtggtggctcactcctgcaatccccgcactttgggaggctgaggagggcggattgcctgaggtcaggagtttgagaccagtctggccaacatggtgaaaccccgtctctactaaaaacacaaaaaaattagccagacgtggtgtcatgtgcctataatcccagctactcgggaggctgaggcagggaggtggaggttgcagtgagtcgagattgcaccactgcactccagcgtgggagacagagtgagactccatcttaaaaraaaataataaaataaatgaaaaataaaggaaatcagaatggctgagatacatggtgaaaagcagggagtgtcaacatataatggttgaaagattagtgagtaatacttgaaaatcatctgaaattccaaagagttcagactttggtccaaatatcttgggcaaagttaaaagattttagcagaaagtcaatattcattttagaaagaagtactacctaacctattgtttcttcttgtaatttttgtgtactctc

SEQ ID NO: 805246 - DNA, 592 bp, Homo sapiens
atctcattacctgacttcaaactatactacaaggctacaataaccaaaacaacatggtactggcacaaaaacagacacgtagaacaaaggaacggaatagacatctcagaaataagactgcacatctacaaacatctggtatttggtaaaactgacaaaaagaagtaatgggaaaggattccctatttactaagtggtgctgagaaaactcactagtcatatrcagaaaattgtaactggacccctttccaacaccttatacaaaagttaactcaagatgaattaaagacttaaatgtaaaaatcctaaaatataaaaaccctagaagaaaatctaggcaacacccataggcatgggcaaacatttcatgacaaaaatgtcaaaagcaattgcaaccaaagccaaaattgacaaatggaatctaattaaattaaaaaactgctgaacagaaacacacacacacacacacacacacacacaaacctaccaccaaaatgaacagacaacctacagaatgggagaatatttttgcaatctatccatgtggcaaaggtctaatatccataatctacaaggaacttaaacaaattta

SEQ ID NO: 805247 - DNA, 571 bp, Homo sapiens
agcttccacgctctttctgggtgcacacttccattatttccatatattcaccaacccagaaactctaaaccctgtcatttaggttttcttcagccattggtgaatagcccaatctacagatcctttcccattcctggaggttggggaaagtagggcttatagttaaccaattcttggtctttttggtaatcagcttccgccctgaaggtatgtgcccactaagagtttcctcatcagggcataaaagactccatcatccttttcactgagaaaattccaagggttttacaaattctgtgccaggtagcagggacaaagactacrtgttttttttctttcttttttttgagatggagtcttgccctgtcacccaggctggagtgcagtggcatgatattggctcactgcaacctccgcctcctgggttcaagtgattctcctgctccaggcccccgagtagctgggattacaggcgcgtgccaccacgcccagctaattttttgtatctttggtagagacggggtttctccatgttggccaggctggtctcaaactcctgaacttgtgatcc

SEQ ID NO: 805248 - DNA, 598 bp, Homo sapiens
ggcttcaatttgtacatgcataaaggtattatgaaataggaaagcaaaaatatttgcccagatataacaagaagatatatggggacacagtgcccacagttctcgctcactgacaatcgccatagctgttttgattctagatgctgatgtaaatttacatctgtcatstggcctaattaaggtctgattggaggactcacacaggatgtgcctattgtgaagtccaaagggaatccacaaaccctactttggctcaaattttttttctagatagacctgccttattaatagaagatggactaactaccattacttttgcaaactcaatcagaaaatttgaaatattttccttaagaagaaaatgttactaagataagaaaagaggatattttaggaaaatattcagcttgggaagaattaagtggttttaatacctttaacatgaatacaaaactatttctattaaataaaaatgaaaaaaagatcataagacactcaacagaaattataagattagaaataaatgaggaacaatacattataatgttaataatgctatggaaaaatgaatgctatggaaaaatgaatccattgtcta

SEQ ID NO: 805249 - DNA, 606 bp, Homo sapiens
agactggcagatcatttcaatccatcgattgtgctaagagcattaaataacacatattataattaagctatttaatctattgacccaatgctatgattagaatctggaagaaattagacaaataattacatgacagatttagaaaggagaaataaaccagatagcggattaatccgttatttctttgaagatatttagggcaagtgtagctgttgttccattttttttaaaaaaaatgaggagaccctyattctaatattaagctatcaatctctaagaaacaaatatcttttgggagttaaccgttacttacaataacagtaagcaactcaacaaatataattattcctggactaattatagtattctatcatgaaacaagtgcttactaatcagatttccaatgagaccattactcttcagaaagagactgcctgaggggtagcataaaaaaccccttgtccctgttaccacaccaaattaaaaactccctagttctttcaaatacatgtaagacatatgtcttgcccatgtttttaagatctctaaaactttcaggaccaccatagactactcttgttctctgagaacagatactgtcacaca

SEQ ID NO: 805250 - DNA, 577 bp, Homo sapiens
cactaattatccaccaattctcatagttttgtttatcagtgacaaacttaatttatgctctattaaaacttctactatacaatctctctagggagagaaggatactgacatttaaatggcaggattacacaactgtaaaacatacataaggttaccaaactctccctaaaaattacacataaggagctttactaaatagtagggaaagattatgagtcacagcattttctctgaatgcaktgtaacgtgaaccccaaatatctgagctaggtctcagtcagtttaggaagtttattttgccaaagttaaggatgtgcacccatgacacagcctcaggaggtcctatgacatgtgcccaagatagtccgagcacagtttggttttatacattttagggagacatgagatgtcaatcaacatatgtaagatgaacattggtttggtccaaaaaggcaggacaactcaagtcaaaggcaggacaacttgaagtggggagggggcttctgggtaataggtaggtaagagacaattggttgcattctttgagtttctgattagcctttccaaagaagcctat

SEQ ID NO: 805251 - DNA, 544 bp, Homo sapiens
aagtcaacaagtaataaccaaaatcgatgtagttggaaatgagagcaaagctctgtatcttttgctatttaattccctgagttctccatctgctttttaatacagtggctcttgatgtattatgtttcttggacacttagtcataaaaaaatgagaaaaattaaatattgatgttcacagtaggatagttgcaatatttcataggcttttaccaaataagcaatatttctgcttgccaggacattctctgttgatgaaagattatttttcttctcacttgaaaggaaatctgaaaagtcattttaaactatatttagctattatggaactatttacttctttttttttcagaagcaaacagatgtgaaatgcaatagaattgttgacagaatyggcttttcctggtgacaaatctgatgatttcagtgttaaaacagccttgttttatgtagaaacatggctatattctaattgaaatgtttggaatattttatgactgaaaaactgttgactccttgtttagtaatagatttatccttccact

SEQ ID NO: 805252 - DNA, 535 bp, Homo sapiens
cttacaggttaccttgtgccataccttcgagacaagggacctacccaggcttccttctgatggccaactcacttctaagcctggccagtctatttcacacagttttaagtaagtttccctggtgtcatagtaactccataatccccattaaatccctttttgaaattctttggcatagttcctaatggggtgggcttactttgcacctgacccatgtttttctcacactctcaccacacacacacacctcacacaacgaagaacgagtaaaagggcacacacacaactaataattaaaaccaaaatctgagtatcgagaaaccygagccaagtcaaaaccaaaaccagaaccaaataccaagcaatttaagttaagaccaaaaccgaagtaccgacatgggcacgtcgtgggtgatcaggccacgtttccactcaaatggagtgggcaaattccaaagactagtattaccaagttttggacgtctggaccccttgtgccagttccttcccagtgttcagctgctgcgtggatccc

SEQ ID NO: 805253 - DNA, 611 bp, Homo sapiens
gatttcatttcctttagttatatactcagtgctgagattactagatcacatagcagttctatttttaattttgtgaagaacctctgtactattgtccagaatggtttaatactgaataaataagatgccaagtcaataaatttcaaaatttagattttaacatttactcttcttattctcccacattatttaaatygttaaccacagttaattttacttctacaacatcacttcttccttattttagctttcatttccatggacattttttaaacaagtcatcatttatatcaaaacaaaaacaagcaggcaccctgatatctgattaatatttctcacttagatttctagattggattttcacctccttaaatactcccttgagtcccctgacgatcatagctaattgacaacgcaaacttaatctcacacaaaaatctttaactgaaaataggccatgaattatatttgaggtgattatgtaccttaataaatattcatttgggagcaaccattgcagcatcaataggtctatgacagagctattggttaaagatatgtgattataatctcctgggattatgtggaaaagttttaaattttatgataaa

SEQ ID NO: 805254 - DNA, 611 bp, Homo sapiens
gatttcatttcctttagttatatactcagtgctgagattactagatcacatagcagttctatttttaattttgtgaagaacctctgtactattgtccagaatggtttaatactgaataaataagatgccaagtcaataaatttcaaaatttagattttaacatttactcttcttattctcccacattatttaaattgttaaccacagttaattttacttctacaacatcacttcttccttattttagctttcatttccatggacattttttaarcaagtcatcatttatatcaaaacaaaaacaagcaggcaccctgatatctgattaatatttctcacttagatttctagattggattttcacctccttaaatactcccttgagtcccctgacgatcatagctaattgacaacgcaaacttaatctcacacaaaaatctttaactgaaaataggccatgaattatatttgaggtgattatgtaccttaataaatattcatttgggagcaaccattgcagcatcaataggtctatgacagagctattggttaaagatatgtgattataatctcctgggattatgtggaaaagttttaaattttatgataaa

SEQ ID NO: 805255 - DNA, 670 bp, Homo sapiens
gcattcatattttattcaatggtacattaaatttttcttagtatggttagtgaaagatcttccagctgccttttggatcattttgaggattccccataattgtttgagctttttccatatttttgatccaaacaagatgtaaaaatatcatctcgtgytttacatgctccaatctagggatcgacagtttgtcaaaaaatcttggtattttttttagtagagaatggcctctcttgtttctgatgatgtcagcttttatttctatcattttcttgtatttaatacgaaaatttcccatgacttctttcaatgttttctattcattttgggatgtcaccattttctgtcttatgtaccttggtgtggctgtatttctcctgcttgtagttcactgttcttgaatatttaagtttaggtttttcatcacatttaaaaaaatggttagtcattatttcttcaacataacttttcccaattctctttcttctcacccatgggaatgtaaatacacatataacatttaatattctcccaaaaaatactgactttaaaaatttttctctctcctatttgttacttaaattctatttatttatcttgacattgtcctacaaaccattgagtttctattatttttatttttttatattatttttatatattattttat

SEQ ID NO: 805256 - DNA, 650 bp, Homo sapiens
cccacatttttcatgaccttaagaaagatgtaaattcgtscttttaatttttttaatattcatttagaatcagaagagaatcatctctttcctaagctccagtattatcattttggccaatctaccaacttcccttatctggatcccttatctgcaatcacctcttcattttttttctacttgtacaccaggtccactattttctatttgcaaaaagagcagccagaatgatctctgtgaaacaaatttcgttattccacttttctgcttcaaacacccatagtaaatctcaaggccgtaccataccaaggggctggcccccattacctccttgacagtccccttaactaccttccttatctgtttattcccattaaggcacatcatgccagaatatgttcacctcagaatgtttgcaaggctttatttaaaccttttcattatgggtggtgggatgacaatatttagttaagcaaatcaagtgcttatgtttttatctcagaactataacagcggtgctggtttaaaaaatttgtaaacaaaaagtaagatagggcagggggagatcatttagggtattattgcaaatataggagtaaatttatatgaactaaagcgaaaataattgtaacagaggatcatagactttg

SEQ ID NO: 805257 - DNA, 582 bp, Homo sapiens
ttaatgtaattaatcacatcaacagattaagtgtaaaataatttgattcttaaaataggtgcagagagaggctgggcgcggtggcacatgcctgtaatcccagcactttggaaggttgaggtgggtggatcacatgaggtcaggactttgagaccagactggctaacttggtgaaatcccatctctactaaaaatataaaaattatccgaggatggtggcacatacctgtaatcccagctacttgggaggctgaggagggagaattgcctgaacactggaggcagaggctgcagcagagattgtgccactgtactccagcctgggcratagagcaagactccatctcaaaaaataataataatagatgcagagaaatcatttgagaaatacagtgaccatcttatttttaaaatctcaaaatactggaaaatggggggaggtgagagaaacaaaaaattcttaatttttaatgggtatttacaaaaaagctatgaagcatcattttttttttcatggatcaatataagggacaagacaaatatgacctttctcactagtttctcatacaccattgtactgga

SEQ ID NO: 805258 - DNA, 446 bp, Homo sapiens
ttttatatatcaacttcactgggccaggggatgctcagatgttttgttaaacattatttctgggtggtctgtgagggggtttgcagaagaaatcaggatttaaattggtgcgctcaataaagtaaatggtccttccccatgtaggtagacatcatttaatctattgatagtctgaaatagaagaagaagatggagaaaggttgaattctctctctctctgcatgacagtatgagctggaaaactgatytttccctgcccttggagctcctggttctcagaccttcagactggaactgtcacaggatgcttggggtgttgcttcgccagctggaaacctctgtagccagtggtgcctttgcccaatttttgcttggcccactgagcttgttccacccactcagcctggcaggctgtgcttggctggcactaccaggttggataacat

SEQ ID NO: 805259 - DNA, 617 bp, Homo sapiens
atgccatctggtgaaagctcccaggagagggtttgtaccctgccaagccacaggtgcagaactgtccaaggtcgtggaagcccagctcttgcgatcagcatgatctggatgtgagacatagcatcaaaggagatcattttggaactttaaggttcaattactgccctatgagatttcagacgtgcataggccctctagactctttgttttggccaatttctcccaaaaataaacagtcatatttacccaatacctgtatggccgttgtatcttggaaggaactcacttgtgtttgattttacaggctcataggcaggagggactagccttgtctcagatgagattttaaacttggacatttgggttaatgccagaatgaattaagattttgggtactgttagaaagrcatgatttgctttgaaatgtgaaagggacatgagatttgggaaggtccagaggcagaatgatatggttaggctttgtgtccccacccaaatctcaccttgaattgtaaccccatgtgtcataggagggacctggtgggaggtaattgaatcatgggggcacatggatccataatgtctagcatttcaatttttttggtaccctctgcttt

SEQ ID NO: 805260 - DNA, 525 bp, Homo sapiens
aaggacaaaggtagcaagtgtgatttcctgtggtcaagttagatacctccagtgaattccagataccttgttttgcctttttctatttctcttgggagaaaagttgttcctcgttatcaccataaggtgtcagtagagtcaactgtgcagaaattgggraaggccaataattctacaatctttctcctgcaaagggaagagaaaacatgtttcctacacagtttgagtcatcctatttagagcatctacaactttctttctctcttttttttcctctctttcctttttttttgttttttcaaggtcttgctctgtccaccaagctagagtgcagtggcaagatcatggctcaatgagcctcaacctctcagtttcaggtgattttcctgcctcagcctcttgagtagctgggactacaggcatgtgtcaccacacctggctaattttttttttttttttttatagagatagggtttggtcatggtctccaggcttgtctcaaactcctgaactcaagcaatctgc

SEQ ID NO: 805261 - DNA, 582 bp, Homo sapiens
atgcaagtgaaaagagaacatatgaacagatctataatacgcctattggctgaatcaataaccaaaaacctccctacaaagaaaagtccaggaccagatggcttcactgatgacttctaccaaacattcagaaaatattaaataccaatccttctcaaactcttccaaaagttgaagaggagagaacacttcctaactaaatctataaggccatcattactctgatgccaaagccaggytaatgactccacaagcacatgaaattggagaccatatcccttatgaatatagatgcaaaaattctcaacaaaatattaatctaaattcagaagcctattaatatttaaatcttattaccaagaggaatttatctcaggaatgcaagggtgacaaaacataagagaataactcaatgaaatatgccacattaatagaatgaaagaacaaaattatcattttatttgatgcagaaaaagcattaaaaaatctaatactttttgttatagaaagccaacaaattaagaatggttggaaatttcctcaatgtgatggagagcatttatgaaaaacccacagctaaca

SEQ ID NO: 805262 - DNA, 690 bp, Homo sapiens
atacagactatttagcccatccttaagaaactgaaggtcctggaaatttaactatgtcactgcaatctgttttacactattaactgaaagaaaaatgagtgtttacagattttttaagattaggaaacaaaaaaaaaaaaagtcagaaggtgctaaatcaggaaaaaaatgtttcaggatgttgatcccacttgtttcaaatttccattgaaatctttgctcttgtccatagttgacaagagcatccattragtagaaactttgctcagttttaattttccaggcagaattatttaagctgaaccaattaaggtgtctatggtgttgactattatttgtgctgttagtcattggccctcttcaaatagggcacaaacaaggtgaagtttttcctttcaaattgatatggatggtctgctgctgccgggcttcatcttcaacgtcatcttgtcctttcttaaaatgagttattcatttgtaaatctctgatttctttggacattatccacataacgttcttgtaaatcatcaacaatttcaccattcttccacccaagcaaggggctcttgctttaattttagcagggtttacattgctctgatagaggctgcattcaaactgatgtcttatctttcttagtgcctcaaactacatgctgttcagacctgttataacaagttagaatgaat

SEQ ID NO: 805263 - DNA, 584 bp, Homo sapiens
attttttaagattaggaaacaaaaaaaaaaaaagtcagaaggtgctaaatcaggaaaaaaatgtttcaggatgttgatcccacttgtttcaaatttccattgaaatctttgctcttgtccatagttgacaagagcatccattaagtagaaactttgctcagttttaattttccaggcagaattatttaagctgaaccaattaaggtgtctatggtgttgactattatttgtgctgttagtcattggccctcttcaaatagggcacaaacaaggtgaagtttttcctttcaaattgatatggatggtctgctgctgccgggcttcatcttcaacrtcatcttgtcctttcttaaaatgagttattcatttgtaaatctctgatttctttggacattatccacataacgttcttgtaaatcatcaacaatttcaccattcttccacccaagcaaggggctcttgctttaattttagcagggtttacattgctctgatagaggctgcattcaaactgatgtcttatctttcttagtgcctcaaactacatgctgttcagacctgttataacaagttagaatgaattc

SEQ ID NO: 805264 - DNA, 611 bp, Homo sapiens
aaagatctgtccatatgatgcagacataaaggaaaaagctttagttacaactttcataccttaaaagaagccacacaaggaagaaagcaaagctatactcccgggtacggactacctactcctgagctgttgcagaacaggaaaatcaaatgacaatttctttaaatcactttgtatatagtcctagttcacagcatgttaaatgtactgtatcacagtagtataatttatctctttctttttgtcacccaaggtgaagtgcactgttcaatcaacacttactgtaatctcagtctcctgggctcaaacagttctaccacctcagtctcccaagtagctagtactacaggcatgtgccacacatccggccaatgttttattttctgtagagatggggtctcactctgttgcccagctttgtcttgaactcctggactcaagyaatcctctcacctcagcttcccaaagtactaagattacaggcatgaaccactacgccagggccaatttatttcttcattgggcaattgactttatatactttgagtgttttgttttgttttgttttttgagacacaatttccttctgtcacccaggttggagtgcagtg

SEQ ID NO: 805265 - DNA, 611 bp, Homo sapiens
agaatttcaagaaatacttggacacaaagagtataaaaatataaaaaatcaaatagaacttctagagataaaagctacagtatatgaaatgaataaatcactgcctatgagtaacaacacattaagttttccagaagaaaatgttagtgaactggaaggtggaaatagaatctctataatctgaagcaaagagtaggaaaaaagtctggaaacattaataaagcatcagtgggacagtatgaagtagtctaacatgtaatctgagtccaagaagagagcatgaatttaaaacatatttgtataaatcattggaatttccaaatttgataaaagtataaacccacagatccaaacagcctaactagccacaagctggatgaagaaaaatcaaactacaccaaagcataacttaattaggttgctaaaaatgagtaagaaagagaaygttttaacagcagagggggaaaaggactcattatcacaaagataaggatacttgcagacttctcataagacattatgtaagccagaagacagtcataagacatcattagagtacttgaaggcaaaagctgtcaacatgggatccacatcctttgaaaatattaatc

SEQ ID NO: 805266 - DNA, 653 bp, Homo sapiens
taagtgtatttaccactatctagttaggcagagaacaaaaaccaccttgccagtaatgaaggtgtaccaccctaggcatttagaaaaacaaataacaaattatttttaaagtgtaaaagttgagcttaagcactttaagtgaggcttgaaaaagccaagataaacaaaatcagtatttgagctctaatacatgttttgcagcatccacataattctctaaaagttttctaagtaggamattttattaaaggaaacagcctccaatactctaaattattgggcattatatatattttaaacttttatttaggtttaagagtccatgtgcagttttgttatataggtaaactgcatgtcaccagggttttgtgttcagattatttcatcacccaggtaataagcatagtaccccataggcagtttttcagtcttcaccctcctcccaccctccaccctcaagtaggccccatatctgttgttttcttctttgtgtccatgtgtactcaatatttagcttccacttatgagagaacatgtggtacttggctttctgttcctgcattagttcgcttaggataatgaccttcagttccatccatgttgctgcaaagcacatgatcttgtacttttttatggctgtgtagtatgctatg

SEQ ID NO: 805267 - DNA, 653 bp, Homo sapiens
taagtgtatttaccactatctagttaggcagagaacaaaaaccaccttgccagtaatgaaggtgtaccaccctaggcatttagaaaaacaaataacaaattatttttaaagtgtaaaagttgagcttaagcactttaagtgaggcttgaaaaagccaagataaacaaaatcagtatttgagctctaatacatgttttgcagcatccacataattctctaaaagttttctaagtaggaaattttattamaggaaacagcctccaatactctaaattattgggcattatatatattttaaacttttatttaggtttaagagtccatgtgcagttttgttatataggtaaactgcatgtcaccagggttttgtgttcagattatttcatcacccaggtaataagcatagtaccccataggcagtttttcagtcttcaccctcctcccaccctccaccctcaagtaggccccatatctgttgttttcttctttgtgtccatgtgtactcaatatttagcttccacttatgagagaacatgtggtacttggctttctgttcctgcattagttcgcttaggataatgaccttcagttccatccatgttgctgcaaagcacatgatcttgtacttttttatggctgtgtagtatgctatg

SEQ ID NO: 805268 - DNA, 588 bp, Homo sapiens
tgaagtgtcaaccgtgtgccagacacagttctaggtatttgaggtatgacagtgagtgaaaccaaaaacatccctgtccttaagaatctcattctagggacaggcagtaagcatgaaatgtaacaaataagtcagttgcagagggtgttagatgcatagactacaggaaagatagataaggggaagggaagcgggttactgggagagtgtgggtgttgggttgttcaggtrggcctcattgggaaggtggttgcagattagtgatctgaaggaggtgaggaagggacagaggaagctgtgggaacatctgagggaagagttccccagtcggagggaacattccaggcccaaaggtggaaagatgcctggagtgttggagaaaacatcatggaggttcccgtggttcagcagcagaaccagaggatggcagcagagccaggggcggggggcaccagagggccagcatcttcaggctgctggaaggacattggctttttttctgagtaagatgccagcagagaagtgatgggatcttgtgtttccaaaggatccctctggtggccatgctataaacagctgcagtgagcc

SEQ ID NO: 805269 - DNA, 588 bp, Homo sapiens
tgaagtgtcaaccgtgtgccagacacagttctaggtatttgaggtatgacagtgagtgaaaccaaaaacatccctgtccttaagaatctcattctagggacaggcagtaagcatgaaatgtaacaaataagtcagttgcagagggtgttagatgcatagactacaggaaagatagataaggggaagggaagcgggttactgggagagtgtgggtgttgggttgttcaggtaggcctcattgggaaggtggttgcagattagtgatctgaaggaggtgaggaagggacagaggaagctgtgggaacatctgagggaagagttccccagtcggagggaacattccaggcccaaaggtggaaagatgcctggagtgttggagaaaacatcatggaggttcccgtggttcagcagcagaaccagaggatggcagcagagccaggggcggggggcaycagagggccagcatcttcaggctgctggaaggacattggctttttttctgagtaagatgccagcagagaagtgatgggatcttgtgtttccaaaggatccctctggtggccatgctataaacagctgcagtgagcc

SEQ ID NO: 805270 - DNA, 581 bp, Homo sapiens
tacaacaaaaaatgcactaacacttttccagaagaggatgcaaaattcttgagtgacgtttactcttctgttgaaataccacaacttaaaagccataacataaagtcaacacatcttatgttacataataaggggataagagagggaagaaaacaaaggtatgtaatacacacaaacacacaaacatgttcataacaaaataaggaaaaatactcatgacaattacagtccttatttctgtaactggccacatggttatagctggtatttatrattattttctcccactacccattccatatttcctttgctttcagcaagcacctcagcaggctgtgattattgacttggtgggttgacccaaaccatcactcctgaagagtctgggccatcagtagtcctgttctaattgggttgttgtagttttccattgaccttaatcacaggacatggtaatactgaggataccctagggggcttcctgtattactaatatacacttccttaactgtgaagtaataggccaaatttccttatggtagtcagtatcgataaccccttccagcacaataactcccttc

SEQ ID NO: 805271 - DNA, 581 bp, Homo sapiens
tacaacaaaaaatgcactaacacttttccagaagaggatgcaaaattcttgagtgacgtttactcttctgttgaaataccacaacttaaaagccataacataaagtcaacacatcttatgttacataataaggggataagagagggaagaaaacaaaggtatgtaatacacacaaacacacaaacatgttcataacaaaataaggaaaaatactcatgacaattacagtccttatttctgtaactggccacatggttatagctggtatttatgattattttctcccactacccattccatatttcctttgctttcagcaagcacctcagcaggctgtgattattgacttggtgggttgacccaaaccatcactcctgaagagtctgggccawcagtagtcctgttctaattgggttgttgtagttttccattgaccttaatcacaggacatggtaatactgaggataccctagggggcttcctgtattactaatatacacttccttaactgtgaagtaataggccaaatttccttatggtagtcagtatcgataaccccttccagcacaataactcccttc

SEQ ID NO: 805272 - DNA, 604 bp, Homo sapiens
atcctttgtaatctcctgttctggaacacaaatagaagccataatatcctagtttgtctcactgtctagggtatttattcaactcttataagttgctttttcatgattctatttgggaataggaacctagaggtttatgcccattagagcataagatagggtgaattcagtwttctgtcacattgtcgcatttgtgtttgcctctaggtgaatctaaacaatgcttcccgaagccagagcagtcattcatatgatgatagtactctccctctcattgaccggaaccaaaaatcaggtgcagtatccagaaggcacaccctctccttttagccactcttgctgttctaggtggcttactaagaaataggatatatattatttctgaattagctagccttttgtgggaggggaataattttccactccaggatcctaacgcagaaatgggtaggtcttaagcattagaaatcaaaacaaaacaggtaattagcctgaatgtgatccctttatcattgcttgtgaacttaaaacactggaaagtgaactctagtctgttttgtctattttttctccttttaaatttccatttaatacttaatattgt

SEQ ID NO: 805273 - DNA, 628 bp, Homo sapiens
tcttatatctaaacatatgaactaaaagcataaaactgtaaaatattatattatagtaaatgtttgccacctggagttagacaaatcctttttaagaatgataataaaagcacaaaagcaaaaaaaaaaaaaagaaacattggataatatcatcaaaattaatgttttacctgcaaatgacattatgaagaaagtggaaattaaaacctagggtaaaatattttcaagtgatakatctcattggggacttaaatctaaaatatatgaagaattcttgataagaaaaagaaaatttatctaattaaatacagcaattaagtatctgaatagacatgtatctagaaggcaaacaaattgccaataagaatatgaaaagatgctcaacatcattagttcttagagtaaagcaagttgaaatgacaatgagatgccaccacatgtccactaggatggctataataaaaagatgaataataatgttttgcaaaggttatggagaaattgaaacactcaagcgctgctgtcaagaataaaaaatgatacaaccattaaattttgaaaatcttctggcaagtccttaaaagtttaaaacacagatttttcatatgacccatcagctgtactccta

SEQ ID NO: 805274 - DNA, 628 bp, Homo sapiens
tcttatatctaaacatatgaactaaaagcataaaactgtaaaatattatattatagtaaatgtttgccacctggagttagacaaatcctttttaagaatgataataaaagcacaaaagcaaaaaaaaaaaaaagaaacattggataatatcatcaaaattaatgttttacctgcaaatgacattatgaagaaagtggaaattaaaacctagggtaaaatattttcaagtgatatatctcattggggacttaaatctaaaatatatraagaattcttgataagaaaaagaaaatttatctaattaaatacagcaattaagtatctgaatagacatgtatctagaaggcaaacaaattgccaataagaatatgaaaagatgctcaacatcattagttcttagagtaaagcaagttgaaatgacaatgagatgccaccacatgtccactaggatggctataataaaaagatgaataataatgttttgcaaaggttatggagaaattgaaacactcaagcgctgctgtcaagaataaaaaatgatacaaccattaaattttgaaaatcttctggcaagtccttaaaagtttaaaacacagatttttcatatgacccatcagctgtactccta

SEQ ID NO: 805275 - DNA, 503 bp, Homo sapiens
cacaaggtgggcaggactggactggacaggcccacctacaggtgccctgaggtcatgcactagcatcagcactgagagagaatccagtgggtgaccaccaagcacccaaggtgtgcctagatgtggagctgggaaaactccttggccccaagtccactgcaccggcaggtgggggacagcctaaactcctaatctaggagattgggtgttctcggtgtctggagatacgcctgggcatgaagcacaaagggctccactgcaccacartctctgtagagcatgggcggggcagctcatgctggtaatccagaggaaagggtgttctggctgcctcgagatgtacttgggcgtggattggaaagggtatggctgtaccgttatctctgtgcagtaagtgttgggcagctcaggctaccaatctgggcaaacaggtgctctgaacacatggagatctgcctgggtgcggagtgaagagggcctcacttcaccacaatgtctgagat

SEQ ID NO: 805276 - DNA, 633 bp, Homo sapiens
cagtttagtaagaatacattccaagaaacaataacagtgatgctttttccagcatcttgcaatattcttgaaaataaattgatagaatagtcataataggtgaaaggtgaaatgatagttcattttagtctctttattactaaatttggaaagtcaacttgctcacaaaagcccttatagtgatacaggtttttctactctccaatagcctccaatacagaatatatattcatcaaaattgacaacacagtattatgttttggtcagtgatactgaggtgtatgatttgctttcttaatgtcgattacaagaaattgtgaaactgaaggctatatctttctttaatcaggattttgaatttaccgggacattagatatattcctttcatggktaattaggaaaaatcagcattttctgtccctcttccactcagttttattctttaagattttaggacattgcttttgatatggtttgggtgtgtccccacccaaatctcatcttgaattgtagctcccataattcccacgttatgggagggacagagtgggatttaattgaatcaaggtggctgtttcctccatactgttctcatagtagtaaataagtttcatgagatctgatagctttat

SEQ ID NO: 805277 - DNA, 522 bp, Homo sapiens
attcgaccaaagcagcctttagtcaagggctaaatactaacagggagacaatacccactggggtcctctatccaaagtcccatggacacgatatattcctgtgagttctgtgctcctttggggtgattatttgcctggcaacaggttgtctgtctcacatgtattcttatcagtcctcagctaaagatacatgggaccctcagttatgatattggggcaatcgtaggactttcctcacgtcttcctctctcttaaggatcattgtcctgtgtggcctgatgttccgtatctgaacgttattgtttcatakattttgtcctttaattttagttgcttcagatattagaataaatccagatcctatcatttcatcttggaaaatccccgagaacagtttaacatattattattttagctgtaaaagcatttaaatcttgtatttttccaaattttaacaatctacattataaatatatccaagagcttgtcattataatttgtttgagaaagaaaatgtaaatg

SEQ ID NO: 805278 - DNA, 583 bp, Homo sapiens
cattagcgcagtggatccattgtgagatcaaagaatctccacagtgtatcagaagagtaatcagtaatgagttcaaaaataagctgtgtgaccctaaaacacctcagttaacctcccttagccagtttcctcctttctacaatgaagataatatctacctcacagtattttttaagattgaacaaatatacactattgttactgaatatataaattatatattatataattaatatgtataatatattaattatataatttatatattcagttccttccatgtttataaaatgatagagctttatatgttggcttctggcataaatcagcaatgcactttagaaaggtatcattggyatcttatctaaaaattcttccattaagtggaaaggagtcaacaaactaaaaggtttgaggcttcctgcactaaaccagaatccagttctcaggtttctggagtcttgactagaactcctccaaaccatctcctgtaggcagagcagagatcaaaatcatttgggatagtttcaaaggccaaagctaagactgatggagtggctgcagagcagggttccagctctgc

SEQ ID NO: 805279 - DNA, 652 bp, Homo sapiens
acaagtgttaatgaggatgtggagcaagtagaattctcatcaattgatgataatagtatatattggtagaactactttggaaaatagttgaaaattatctaacaaaattgaatatgtacttgatctataacccagmaaatgcacttttgggattgatacctgaaatatatatacacgtgtacatcaggttttatgtataaaaatattcattgcttccttattcagaataactaaaataggaaacaacccagatgtccatcaatagaacagtaaaaactgaattatgatttattaattagtaaaacactacacagcatcaaaaataaactcagccacatgcaacaatacagagaatcttaaagacatagtattgagcaaaataatcagtacacacaaaattccacttatacaaagctcaaaaacaaaattaagcaatatttttagaaatgcacttataaatgatgactgacccactatcaaggaaagtatttaacattgctctgaaagttctggaaattcttgattttcctttctcaatttctacacccatcaccacgcccagtcttccccaactcactaaacagcaccgtcatccatttagcatttcaagccagtgagaagtcatccttaattctgctttttcattaatttc

SEQ ID NO: 805280 - DNA, 585 bp, Homo sapiens
agctcttatgccctcacattcagcttcctggtgctgttatgatgcctctaactgctcaggactgtgcccacccagcttttccaaaaggaacatgccccttcttgtctgaaaatggtagattctaactgactccttccatcaagtgagcatcttctctctctaaaacaggattctgtaaatagaactactcagtgctggccgkggccccaaaaggattcattcaagaggtggcaatgtgttcccacattgcaaagtgaaatgatggtacgttaaggatttgcaaaagtggtgatcccaaacccgttttgtgagccttacttcaaccccactcctggctatgaaagagtggaggttgaagaggcaaaaagagagggtttgtttagaaagtgctatgcttcgagttccggctcccttcaaggagttcattctgaggcatttgtacaaatcttgtggagtttaaggaacaatatagactggcattcaattccaatctaaaagaaagcattcaggcagcttgctgcccatataggcatgcaaacccaagagagaggacagccacaagaaaaattgcccctccagtatttg

SEQ ID NO: 805281 - DNA, 614 bp, Homo sapiens
gcttaattgttagttttgaaattgcatagccagcctcatcaacatagtgaaactcagtttctgcagaagaaagttaaaaaaaaaattacctgggtgtggtggcacacgcctgtattcccagctactcaggaggctgagagaggaggatcacttgagcctgggaggtcaaagttgcagtcagccatgattgcagcactgcaatctagcctgggtgacagagccagactctgtctttaaaaccagcaacaaaaaggaagtgcacaaaagtggacggaacatattttggaaattgaaaatgrtagttttcatacagaaagaaacattctgagaagaaagccaccttgctcgttaagtactatccgtaataggacccttcttttcttcccctatcagcatttcagtaggaaattttaaagttagagtaatcagaaattggtgcttctctaaagttttcaataaacagcagaaaaacccataccttcctgcctcttccattcattcaggcaactttgtctttcctaatgtaacaagagaaggaagtttattctttggaaaattcaacctgagagatgaactcagagactccaggcacagaggaggatggagtgagatgc

SEQ ID NO: 805282 - DNA, 562 bp, Homo sapiens
gcaatgcataataatcatattcaggtaaatagggtattcatcactgcaagcattgaacctttatgtttcaaacaatccaattatactctattaattgtttttaaatgtacaattaaattattttttgctatagttaccttgttgtgctagcaaatagtaggtcttatttattctttctaactatttttttgtacccatcaaccatctccccttccatcaccagcccccaccgccaactacccttcctggtctctggcaaccatccttctcctatctccatgagttcaattgtkttcatttttagcccccacagataagtgagaacaggtaatgtttgtctttctgtgcctggcttatttcacttaacataatgttccccagttccatccattttattgcaaatgacaggatctcgttcttttctatagctgtatggtactccattgtgtatatgtaccacattttcttaatccatttatctgttaatggacatttaggttgctccggagtcttagctattgtgaatactgctgtaataaacatggaagtgcagacatctctt

SEQ ID NO: 805283 - DNA, 617 bp, Homo sapiens
tctaagggatggagtcgcatgaatgagattgctgggctgaaaatgtaagaacgttctattttactagatatcagctaagttttaaaaaattaacatctcttatccacaaaaaagtatgaaaatttccatctccccatatccccatcattaatagatgttaaagctcatatatatatgtatattatacatacaacttatatatataagtatatatatagtattagtcgatttccatgctgctataaagaacagcctgagactgggtaatttataaaggaaagaggtttaattgactcacagttcaggatggctggggaggcctcaggaaacttacaatcaaggcagagggtgaaggggaagcaaggcaccttcttcaagaggtagcaggaaggagaagcgcsgagcgaaggggaaagagcctcttataaaaccatcagctctcatgagaaatcactcactatcatgaggacagcatgggggaagctgccccaatgattcaattacctccacctggtgattacaattcaagatgagatttgggtgggaatacaaagcctaaccatatattatatataggatatatagatagatatagtatatatatatatcatacatat

SEQ ID NO: 805284 - DNA, 519 bp, Homo sapiens
agtaaatctcagactcgtgatttttgtggactctgaggttgttgaagacaagacaatcagatgaaattattgattgctcctaagttgtatcggctttgagacacagactgaattaaagttagctttcagatctgagttaacttttgattagaaagactttaggaggttctggaaattgttgagttaattaagaatacccttgtaggctccactatttcttgagattttcaggaattgtctaggcttctagagtattttcagaataagataaaatagcttttctggaaaaagtagtttgactttagtttccaggaccttcgtattcaaaawacagtatgttctttactagatctacatgtggcatgctagagaaaatgctatcttttattaagaaaaaggaatcttaagtcctttacctggacccagatggcttcattgatcacatcagtatgaggttacgcagacaaagggctatttttgttgttgttattgtcatttcattggttgttgaagaaggcc

SEQ ID NO: 805285 - DNA, 545 bp, Homo sapiens
atgccagcatacatgatagtacatcatcatatctcagactggctctgtctgctccgtgacagtccatgacaatttctgatcagattcctctcacattctgctcagaaactattccatacctttccaaatctcttcaagcctcatatataagctgaccatatatatggcatctaggtcagatcatgactctcctctttttaaaactttcccatttttctttgagtaacagccgaagtccttaaactgtaagaccaggtcctaagtaatctgtaccccctccacacacccctacccatgacggcatctctctcagtgttcttgctcactctgctccagccacactgggcttgcagctctgcccataggctgaaaaggtgcctgctttaagactttttgcagttccctstccttggaacaagtcattctccagatacctacatggccaactgcttcgcctcctggaagcctttgttcaattgccacctgctctgtaaagcctaccttgaccatcttatttaaaactatagcaccactcatttctggcc

SEQ ID NO: 805286 - DNA, 589 bp, Homo sapiens
aaagcatcaaaagggagagaatctgggagtttgaaaatggcctatgccggagcctgtcgactcacgcctataataccaacaatttgggaggccaggagttcaagactagcctgggcaacaaagtgagacccccatctttacaaaaaaaccacaattatccaggtgtggtggtgcatacctgtggtcccagctctttgggaggctgggttgggaggaccacttgagctcaggaggttgaggctgcagtgagctataattayaccatcacactccagtttaggtgagagagagagagagagactctcttaaaaaatgtaaataatagcaaaataaaaataattttttaaaaagaaaatggcccagctctaacctagctgtgggggtttaaaccatagctcaagaatcactgaggggcctttagaggccatctgtttaaagatccttgagaacaggggtcggtcttgtggcttctacatctcccgtggggccaggcatttgccaggcacttaagtgtttattgatgtatgagaaggacggagcctcccgtttatcagcactcctagctgccatcctccagtcctgctgacgc

SEQ ID NO: 805287 - DNA, 620 bp, Homo sapiens
tccaccttctcagtggcccaagctccaacctccttccaaggggcatccacaggcatggctggatggattttcatctgaagtgtctggaatcctaccatccatccacaattaaactgggtctaactgtcagcctaaaaaacgctctatggattctgggttaaagattaattgggggttgtgaacatgctcatgttctctacaggcatmattagttatccctaaaacaaagatgcctgtcatctccaaagataaaaataagttttactaaaaaatatagagtgacaagaaatagtaaagcttcaggtgtatctttggtaaaccatcaggtctgtccctaaatcatcagaaatgggaaatgaggggttaagtttctttcctcttctaacaaagaactctatttgttacactagaccaggcgacaaccgtctctatatagagggtggcagttggttcaagctctaccttcctttctcagttggatctatttaaagcctgcagcagaggaaacttggcagctgaatgtttccaaaagttagtataccacttccctacttcagatcacacaggagggcacagcccgggaagcagagattccttgggtgggaggggtaggcgccagc

SEQ ID NO: 805288 - DNA, 567 bp, Homo sapiens
tgaacggatttcattttttttttttttttttttttgagatggaatctcgctctgttgcccaggctggagtgcaggggcgggatctcggctcactgcaagctccgcctcccgggttcacgccattctcccgcctcagcctaccgagtagatgggactacaggcrcccgccaccacgcccagctaattttgttttttttgtactgttagtagagacgcggtttcaccatattagccaggatcctctcgatctcctgaccttgtgattcacccgccttggcctcccaaagtgctgggattacaggcgtgagccaccgcaccttgccaatttctttctttaagtgcttttctaatgcttgttcatttgcatatattaaatttatacagttgtaaccataatgtggccagagttgtgtattctcttcttcacagagtataacataagcactttcctctatcaccaccagttttttccagctttattgaggtataataatataacaaaaattatgactacataataatttatttaactatttactgacaattgccccctgccccaatttattt

SEQ ID NO: 805289 - DNA, 578 bp, Homo sapiens
tacagtcccatcatcctaatacttgaacggatttcattttttttttttttttttttttgagatggaatctcgctctgttgcccaggctggagtgcaggggcgggatctcggctcactgcaagctccgcctcccgggttcacgccattctcccgcctcagcctaccgagtagatgggactacaggcgcccgccaccacgcccagctaattttgttttttttgtactgttagtagagacgcggtttcaccatattagccaggatcctctcgatctcctgaccttgtgattcacccgcctyggcctcccaaagtgctgggattacaggcgtgagccaccgcaccttgccaatttctttctttaagtgcttttctaatgcttgttcatttgcatatattaaatttatacagttgtaaccataatgtggccagagttgtgtattctcttcttcacagagtataacataagcactttcctctatcaccaccagttttttccagctttattgaggtataataatataacaaaaattatgactacataataatttatttaactatttactgacaattgccccctgc

SEQ ID NO: 805290 - DNA, 607 bp, Homo sapiens
atttatccaaaatctatgaggaatgtaaacaaatcaatgagaataaaacaaataaccccactaaaaactgggcaaaggacatgaacaaacacttctcaaaagaagacttacaagtgaccaacaaacataggaaaaaatgctcaacatcactaaccataagagaaatgcaaatcaaaaccacagtgaccacctcacagcagtcaaaacagctattattaaaaagacaaaaaataacagatattgacraggctgcagagaaaagggaacacttccgggcatggtggcgggcgcctgtagtcccagctactcgggaggctgaggcaggagaatggcatgaacccgggaggcggagcttgcagtgagccaagattgcgccacggcactccagcctgggcgacagagtgagactctgtctgaaaaaaaaaaaaagaaaaaaaaaggaaaagaaaggggaacacttacacactcttggtggaaatgcaagttagttcagccactatagaatgcagtttggagatttctcaaagaactgaaaatagaactaccattccacccagcaatcccactactggatatatgcccaaaggaaaataaatcagtctaccaa

SEQ ID NO: 805291 - DNA, 607 bp, Homo sapiens
atttatccaaaatctatgaggaatgtaaacaaatcaatgagaataaaacaaataaccccactaaaaactgggcaaaggacatgaacaaacacttctcaaaagaagacttacaagtgaccaacaaacataggaaaaaatgctcaacatcactaaccataagagaaatgcaaatcaaaaccacagtgaccacctcacagcagtcaaaacagctattattaaaaagacaaaaaataacagatattgacgaggctgcagagaaaagggaacacttccgggcatggtggcgggcgcctgtagtcccagctactcgggaggctgaggcaggagaatggcatgaacccgggaggcggagcttgcagtgagccaagattgcgccacggcactccagcctgggcgacagagtgagactctgtctgaaaaaaaaaaaaagaaaaaaaaaggaaaagaaargggaacacttacacactcttggtggaaatgcaagttagttcagccactatagaatgcagtttggagatttctcaaagaactgaaaatagaactaccattccacccagcaatcccactactggatatatgcccaaaggaaaataaatcagtctaccaa

SEQ ID NO: 805292 - DNA, 549 bp, Homo sapiens
ttgggccccctcctatgagtacagatgctgtcaccgtgggcagagatggctggccacaccaccctccagtcatgccccctctgtgctcattctcatcacccagcccaggggcttgacctctgcctctgggggatagcagagcactgggcccttcttatcttccgtgtgcctccccagcaattttctatgcatctctaaattacacccctacggccagtgccacttcctaactcgcctcaggacccactgtttgacttcacctccaacggccacgagcaaaatagtgtcatcgggygccaacagcaaccctctttcttcccaccctcagcaatgtgggggcctttccgacagagcagcagcgagggtcccccacaaccctgggacagctgtgctgaccttcctatcagggccaccttgtagagacatcttgattaagtgctcctgttgtgtgtcctaccgaggatctgttttgtttttagtctgtgcacaggctcatttggcccatgcttgtgggccagaactgcttgttgacacagagcaaagagtgaa

SEQ ID NO: 805293 - DNA, 640 bp, Homo sapiens
gtagatgggtcacctaaggtcaggagctcaaaacccaacatggcaaaacaccatcactgcttaaaaaaagtaataaaaaattagcccagtgtaatgacacacacctgtagtctcagctctcctggaagctgaggcaggagaatcgcttgaacccaggaggtggaggttacagtgagccgagatagcgccactgcactccagcctgagcaacagaggaagactctgtcgtaagaaaacaaaaaacaggtggggcctggctccycacccacccgtcagctccaggactgccccttcctgggccaactggccaaacaactgggaagagcccccaactccaacaggattattttcccagcaggagttacagatgcagccacagattgatgatctgccttaacatgatcggagatgctttgtaatctactgtccagctgaaagcgctcatgttatgaggaagaaactacaaatgatgttcaaatctattttaaactattttgggccatttttatgtacctttgggttcaggcattatttgggggtttttgtttccaaagtaactaaataaagtcatattgcttattaaaaagaaaacaaaaaacaacaagaaaactatattcattatcttgcagctcccactggt

SEQ ID NO: 805294 - DNA, 596 bp, Homo sapiens
aacaaaagatataaacagtgacttcataaaattgaaatagaaaaatcaaaaactaaagaaaataaaatgtgaatatgctaatcttaagggacaaggatgttactctgcatgttctggcaatgaagcaaaaaaaaaaaaaaaggaaaattatcggtggttttatcagtacagaaataccacttctcagggggaacaaatttctgttggcataaaatatgaaagaaagtcttcactgggagctttataggagtactggaygatagaaaaggaaaaaaagcagtcatagatttcatgtggctgtttcttatactgacctcagtcaaaattaaaagcagaaccttatcaatcccagccctatagaggcggttctgcaaggaaataaacaaatgctgtccaaatatagacttctcatggtaaaacatgatctaaggagagaatttagaggttttagactggcatctgcttctaaattctgtttttatttatgagtgtttctcccctttggggacattgtctttgtaaaaccaaacttagaacacccccacacaacaaattgtgctggatttaataacctctacttgctttatcataagtct

SEQ ID NO: 805295 - DNA, 519 bp, Homo sapiens
accagcctgctggagtatgtttctgctgggttttcctactgactgctacacatgagtcatcacaggaatggaagtttctatccgtctcccttaacaacagtgcagaaaccaggcattgaagtaagcttcgatttttccaatcagaccctagccagggaagggaaaaatgttgtggtaggtgtcaccaccagctaggctgctagatgacagttccccgccccagggtgttagtcatcggcactccagtttcagcgtcttttctctcacccacccaagtagttaaagtggcatcttgtcttgcaatgcctgctgctgctggccgctgaactcttcctttgctrtagagtttccccaacttggctgcacaatgaagttaccaggagttgtttttgcttttaaatactgtgcctatttctcactctcaaacaacctgatttaaatagtttgggatgtgatcaggacatcaggagttctcaaagctccccagatgattccactatgcagcaaaatttgagaacc

SEQ ID NO: 805296 - DNA, 427 bp, Homo sapiens
tatccttgtttatatattagctaaaacgaaaacttgcataaagggatgccttgctaaatattagccttcaggtagattcaggactccgggtcccaccaatcagttctgtgctacgtgtcatgtcaaattaccacaggatggtgataaaagaatttgtcttattccaaggacatggatgtctctgctgatttggaaaacaatgcytcattttacttaagagtgaaaaagagaaaatgcgatgtgattgaatcacaaaatggaaatcatttctttaacaatgataacagtgggaacaatcgtctttcagcaattctattacacatttttctgatgaccatcctgctaaagcctgctttcacatcttggaatacacaaaacttagtttcagatatgttaaattcaggaattaagatagccctgtgtactt

SEQ ID NO: 805297 - DNA, 614 bp, Homo sapiens
gttgctgtgaaaaggccccggcctcacccctgcccatggaactgagctccacagggggcctctggcaccttcatcccagcagctcctgaatgggagcgcagcccagaggcagctgtctctaggtggcagcagggagggggaagccccagaaggtgaagtttacagctgcttcacacgccaccttcgaacaaagaaaagcaccctgatcgtaaacaacagccaagacgtcatgcccctcaccagccacactgtgctgtacrcatatcctcctgctatagattcttcaaaaactaaacatctggtatacccacaaacagaaaacttaaagcctgtgtgctgcttggtggattttcacaaatccaacatccctgtaagagctggatagaagcaggtactgcctggctcaccatactgttgacaggcccagtgcctggctccccatactgttgacaggcccaggatgtgccagttttggtcacctacgagacggctgcagaggtcctccaggcagggctgcgaggagcccagggaggactcagtggggccagggcagtccccgtgccagctgctctgcagtctctgctgtgggaccggctcattcccatgtactcaga

SEQ ID NO: 805298 - DNA, 645 bp, Homo sapiens
agctacggggaacatagctgttgtgaagataaaatgagcccccaaaggtggagccccacgcgtaggaccttccagaccagctgttagcaattgtcattgtttagcctggggtttggaggggggcaaggctactgcccctgtctgtccctgtgagacccggagcagctgcccgtgggagagtgactgacggatctcactgtgggccgtgcagtgtgtatggttcaccaggrcccaaatccctgcccagggagaggcactcagcaggttcaggaggggccaccccgccctcaggtcacagtagacaccatcccatcccaacaccccctccctggcctggaccagcagatggacttgggaccaggagcggggtggccacctctgcagggacacaggtctttcatccggtaggcgacaaaaggggaggcccctgctgctgctgtgacctgaaaccgcagtctcactgcgacgacagaggcgagacctcagcccaccctcaggcttctgatgccacaaaggagcaaatgtcaccggggctgtcctgggcaaggcacgcggtgtccccacccacaggtccttcagggattgcatctctgagcccacgtgagcaccaaggacaccgtcgcgggaccacgtggggctgcggcc

SEQ ID NO: 805299 - DNA, 500 bp, Homo sapiens
atcaaacccattagcactcactctccatctccctcccagccccaggcaaatactcatcccctctgggtcttgggtctgcctgttccgggcattttccacccacagaatcatgctctaggcaaccttttgtctggcttctttcagcatcgtgtgctttaggttcatccgtatggtagcatgtgtccgtactaccttctgtttgtgggtgaataacgttccaccatgtggttagaccacaattagtttatccattcactagttcagggacacttgggctgtttctarcttatggttgtgaataatgtcgacataaacgtttttgtaccagttttcgttttcagttccttagggtacatacctaggagtggaattgctgggtcaggtggtcattctgtgtttcttgaaactgctgatgcacaccccagagtccccatccggggtgggatgggcgggtgttcagtgagtgctgagttcaccaccttcgtcacatgcctgggcag

SEQ ID NO: 805300 - DNA, 601 bp, Homo sapiens
cattctcttgttgtaaatatagcagctgaacctcggcagcacccgtgtggggtcagcagtgattggttgtaattcctgtattgggcccagcctcatcttttccgggaagacattttttgttgtcagttaatttttccagagtgtttttcgatgagccttctgattacagtggactgatttgttgttcagttttttgtttttagtttttgttgttgttgttgttcctggagaacaggctgtgtgcccagcagccccatgtccagccctatccccagcctatagcccccctagacagcccctgcctcmgaccagcaacaccgggattctggcattgagcaggatgaagcttgtgtgtaccttgtgtgcttcttcaaagcattcttgatgtgttttttattttggtttttgttttggttttgagacagaatctcactgttgctcaggctggagtgcagtggcgtgatctcggcccactgcaatctccgcctcccaggttcaagcgattctcctgcctcagcctcctaagatagctgggattataggtgcccagctaatttttgtagttttagtaaagactgggtttcaccatgttggccaggct

SEQ ID NO: 805301 - DNA, 662 bp, Homo sapiens
gctactaaaagtgaatttctagttgttaaaaataaagtttgtctttcccactcagctcaatgcatttggtggaaaattcaagtgaatagattggttatatgatatggcaaggacaaaaactttagtttaaaaatttgtcatctttgagtattggcatttcttccgcctgatgacattgcaggaacttttaataaattaaagccacatttggctgaagaagccagagaagttactgactggctaggaaataattatatgcacagtaagataagaagacacttaggcaacggtgttgctgttggatcacggtattgtttccaacacatttgtctgtatatgagtgcatgtaaaatggatttctgcatacccaaaacaacrgagaggcagagcacagaagatgggaaaatttaataggaatgctgatgtcaatgtatataaaattatagaagaattccagaaagggcagagccacggagaaaatgaatgtgaatgtattcactgaagacagccatgtcctaaaagaaaaacaaacaaacaaacaaaaaaaactccccaaaaaacccatcagacctaaatgcaagacttcaaaatatagtcaatgattgtgaaagtcggccggcttttgtagactaactctgtgcaattgcccataatttatccct

SEQ ID NO: 805302 - DNA, 616 bp, Homo sapiens
ggcccacagtctgctgcctgagaagctctgccctgaagaacactagaacttccataactgtaagctgggcctagatctgattttctcacttattgtaaatacatcaagaaaaataaagcagcagatataagtaacatgcactaaatgggaaataggaatttgaagtcctatttgtttgaagtccagaaaaatatttgtttctggagagaaataataaaacaggtgggmggttgagaatgaacatacatttcatgtaaccaataccttgttaaggtcgtcaactgaaaattataagagctgcctctgaaaacatccataaagtattgcactaatttcttagtggctaagttagatatgagcaataaaataaaggaaattatatggatttctatttggtctccaatttttataaagcattagaacgttaataaatgttgtccaacttgtgttagccacatcagcgttctgcttctattttttattttaaatgtctgtggttttcctttaaattaatcaaaaatgctcttcttatgaaactataagaagaactatttgcttccctggctacaaatatttagattacataatcactttttctttccttcttaaggttgtg

SEQ ID NO: 805303 - DNA, 649 bp, Homo sapiens
aggactggacactttccctcttctttagtctgcattttcaattaagggctatctatcaattttacctccaaaacatatattgtgctgtctgtgtctttctctctcagccaccatctctcactgactatggaaacaggagacagccattttattaaatagttgtaattgaaagggatacttaagcagaaaatgtcataaagaggtagcattgtcaactattcatattttagtgaatccacacttcagtgggtttctccaccatggagackttgataccagagtggggattgcgcctgttgaatgtggaattttaggagcttgaagtaagctccacggaatgcccacacacgcatatacacgcacacccacatgcacgtacacatgctcacatacacacaagggggactggaatacggaaagcataatatgtgctctctcctgctttcatgctgtgtttgatattgccatgacaggatcaccatctctgcccattcaccagtgtctagtttacctgcaccaaggctgttcaaatgacccggctttgctggctttgactcaatctatctcagggagattggacttttctctgcagtttttatgtgacaggttgaaccgaaataacgtctaaaaattgcagcaatcccagaaa

SEQ ID NO: 805304 - DNA, 649 bp, Homo sapiens
aggactggacactttccctcttctttagtctgcattttcaattaagggctatctatcaattttacctccaaaacatatattgtgctgtctgtgtctttctctctcagccaccatctctcactgactatggaaacaggagacagccattttattaaatagttgtaattgaaagggatacttaagcagaaaatgtcataaagaggtagcattgtcaactattcatattttagtgaatccacacttcagtgggtttctccaccatggagacgttgataccagagtggggattgcgcctgttgaatgtggaattttaggagcttgaagtaagctccacggaatgcccacacacgcatatacacgcacacmcacatgcacgtacacatgctcacatacacacaagggggactggaatacggaaagcataatatgtgctctctcctgctttcatgctgtgtttgatattgccatgacaggatcaccatctctgcccattcaccagtgtctagtttacctgcaccaaggctgttcaaatgacccggctttgctggctttgactcaatctatctcagggagattggacttttctctgcagtttttatgtgacaggttgaaccgaaataacgtctaaaaattgcagcaatcccagaaa

SEQ ID NO: 805305 - DNA, 626 bp, Homo sapiens
tttacttctaaccacatcaagaagggaagtttctggaagaaatatcatcacccaacactgagaactgtctctctttcgggagagagaatctgatttgctatgttcagccactgctttgcccaccccatgcccccaattcctggtgcaatctatagtgacagcagaactggcctcaccacagtggaaacatggccacacagcagggagaaaggggagacatgactgatgctggtttatccttaagtaatgtctcccacattctttatattttaggagttcttgtaagctgtcttcagtgttttttggaaaaagatgggagagagggagatggcaggagargctagggatctcagggagcaaggatgcaattatcaaacaaacatttctcgagtacctacaacacaaaactatgtaagacacgattataatacagtaagcccaaagaaactttagcctcagtgtcaactttggctccagttgccaacacctgctcttcagcttttagattctcaggcctgtgtgatgaaagccagtgttcagagcaatgacccagacactccaagagcttccatcaccactgaaagatgaactaacatgttcctggaactgtctgaggacaagaaaat

SEQ ID NO: 805306 - DNA, 653 bp, Homo sapiens
acttgctttgatttaaggcagtttcccaagataaattaggagggaagatagtcaaaaaaaggaaaacaaaaacgagtacaaaaatgaagccaggaatagttgttatccaaaactgtaaagtctgtcagaatactaacctttatttaacaacctctaggttctgttctaatggtaactatagaaccttcgcttgtttctcaaaatgtgatgttctggtagttcatttgtcatcctgataagattgaagttaagaaatagactcatttttgctttgttgtaactttcctcttataatcttttttttttcccctaattgaatggtagctaataaacaatctgtattgtttggcctgtatttcttttccatcagtctgtcttccctaatatgacagggcagttaggaatttttctttttcttttttcttttkgtagacataggatcttgctctgttgcccaggatgctcttgaactcctggcctcactcgatgctcctgcctcggccacccaaagtgttgggattacaggcatgagccaccatgcttggccagattttttctttgattgcttttctagaatctgttttcacttttgtgtttgtttctattttccttctatatgtgcaggatatattcagaaaaagtagaaattttat

SEQ ID NO: 805307 - DNA, 642 bp, Homo sapiens
gtttgaagaaatacttgtgttgtttttttgtttttgtttttaactgaagggatctctgtgtgaagatgggtgggagacatttttcccagatagtgccaagaataatttgggagcagttgatttgcttttatggctatgatgttttcctctgtagctcwctaagaaatacagagccatatttgggaccattctctagtgtagactatagaacctcacagcatatattttcaatactaatcttaccagcaaattaattagaagttacacattcatttatcatttagcaagcaaaataaacatcttcctgataagttttttaggcttgatatttgtgttgcatacatgtttttggaaaatacttgaattttggcacttttactattttcagttgaaaaaattatttctagttataatgattggagtcagatagcattgttgtatatactgttaaatcgtaaatatgaggaaaataaaactgtgcttttaactagtggttatagcagtaaccgaatataagatggaacaatttgcctggtaatacaatagatgctaaataagttttttccctttttctttcttttagttcccttggtaatgaagacccaacagattccttcaaaagttctttttaaaaaattatta

SEQ ID NO: 805308 - DNA, 536 bp, Homo sapiens; identical to SEQ ID NO: 803806

SEQ ID NO: 805309 - DNA, 536 bp, Homo sapiens; identical to SEQ ID NO: 803807

SEQ ID NO: 805310 - DNA, 467 bp, Homo sapiens
cgtcctttccattatcttaatatttttaaaattaaggaaatggttaaaatttgatcagcagaaagggaaatttatagtactaaatgcacacatgagaaaacattgaaaccaataacccaagcacctacctctagatactagaaaaagaaaataattaaaagcaaacrgaaaaaaagagtgaataaacaaaaacattaaaaaatagagaaagttaatgacacaaaaattgactctttaaaaggtgaatacaattggtatgattgtagattaccaagagacagatgtagatagaaagagggagatagagagctcaaatgatcaatatcacgaataaaacagaggatattactacagatgctgcgaacattagcataataaaaaagaaacactgcaaacaattccacccaaacaattttgacaattaggtgaaacagaacaatttcttgaaaaacacaaatgcaacccac

SEQ ID NO: 805311 - DNA, 467 bp, Homo sapiens
cgtcctttccattatcttaatatttttaaaattaaggaaatggttaaaatttgatcagcagaaagggaaatttatagtactaaatgcacacatgagaaaacattgaaaccaataacccaagcacctacctctagatactagaaaaagaaaataattaaaagcaaacagaaaaaaagagtgaataaacaaaaacattaaaaaatagagaaagttaatgacacaaaaattgactctttaaaagrtgaatacaattggtatgattgtagattaccaagagacagatgtagatagaaagagggagatagagagctcaaatgatcaatatcacgaataaaacagaggatattactacagatgctgcgaacattagcataataaaaaagaaacactgcaaacaattccacccaaacaattttgacaattaggtgaaacagaacaatttcttgaaaaacacaaatgcaacccac

SEQ ID NO: 805312 - DNA, 611 bp, Homo sapiens
aaagaattaatattgttaaaatgaccacactaccaaaagcaatctagagattcaatgcaatccctatcaaaatacaaacgccatttttcagtagaagaagaaaatgtacaagaacaatcctaaaatttacatggcaccagaaaagaccacatatagccaaggcaatcctgattaaaaagaacaaagctggaagcatcacactacctgatgtcaaaatatgctccaaacattgtaaacaaaacagcacagtactgmcgtaaaaccagacaaatagcccaatgaaattaaatagaaatccaagtatacagccacacatttacagccaactcatttttaacaaagatcttaaagacatatattgggaaaaggagaatctgtgtaataaatggtgctaagaacactgggtatccgtatgaagaagaataaaactagacccctatctcacactatatataaaaaatcaactcaaaatggattaaatactctaatgtaagatctgaaactgaaattactagaagaaaacactgaggaagtgcttcaggacattggtttgggtaaagattttggggctaagatttcaaaaacacaggcaacaaaaacaaaaacagaca

SEQ ID NO: 805313 - DNA, 593 bp, Homo sapiens
tccttttataattgaagatttttgtacaaacaatatttttgtaattataaatgtaggtttgctattataacccactaattaaaagcttattttttcccaattggcttgaagaatccaactacagagatgttttaatttaaatttgctgtttgatattaacctccaattttatcaaattagaggtattagaaaaaatacaaaatagaaaaaaatgggagagaaaagtcttactgcttgagacacatttaaggtaccacaattatttctaaatcttactctataaatttatcaccaagtcactaaagcaaattcaatcagtactttggctataagtgcattttagaacgtcattaagctggttacatcaacatcarttaaattcaggatttgatgtgtagtctagatgaaagatttttttatatttggatttgacttagcaggtgtaaacttttctctattatttaattcattaagctttcttattgaaagttagcttgattttatccataaaatgtttaatgtaacataatgttttgaattagctgaacaacatagttacatagttatatcatttatatatcatgttagatgat

SEQ ID NO: 805314 - DNA, 502 bp, Homo sapiens
cacaacccaaattatcagtaaaaaagaaaatacaaataaaaggtaaaaaatgttaagcaactacaacaaaataaatcccacacctgtaatcttttgtttgagaaactattaatatgaactcatttatttttcatagtaaaataatgcatgttgggaggctctgaacacaaaaatggatgagaaacgatgacaacctcrtatcagtggagaccctagtgtttagattatggtcattaataccatttttccactgacaagaatttgaactctttagcaatgtaactaatttcaggatgatgcacagagagtaccaaaccatccctgattatattgttgggccaaaaggcaaaggaagcaaagattgctggagttttgtgaaaaggacacacaaaaaaaggtaaatgaattacatcaatgtcaatttttattgtgatatagaattatataggtgtgtcatatgttaccattgggggaaacaggctaaaagtatataggatctctt

SEQ ID NO: 805315 - DNA, 624 bp, Homo sapiens
aaaaaaaaaaaaaaaaagaattcccaaggtaatagaaagaaggaaataagaaagattagaacagagataaatgaaattgaggatagagaaacaatagagaaaatcaatgaaaccaaaaggtagttctttaaaaggttcaataaaattgctaaacctttagctagataagaaaaaaagaatgactattcgagtgactaaaatcagaaatcaaagtgggtacattactacctattctacagaaatattaaggattataagagagtactgtgaacaaattgtacactaagaaattggataacctagataaaatagacaaacttctagaaacacaaaagctacaaagactaattcagaaaaaatgaaatatctgaataaagctaaaactagtaaggagattgaatcagtaatcaaaactctcccaacaaagggccaggacctgttggctttacwagtgaattctaccaaatatttaaagataattgaacaccaatttttcttgaacatttacaaaaaaaaaaaaaaaaaaaagggcaaaaaaaaaaagcggtagcaaagagcaaggaaacacttccttatcctatgaagtctgcattacctcaataccaaaaccagacctagacacta

SEQ ID NO: 805316 - DNA, 644 bp, Homo sapiens
agaaggagattgtatctggggaggcaaaagaaagatattaaacctgcatagctacatggaaacttaagttactgtgacacatatttctatgtgttaatgctatagtctaaatattgctctaaaacttctgttgacatttaaktgcctttgtaaaagtattaggtagtaagacttttaagaggtgataagaccgtgagagccccactctcatgggtgcaactgatgcattataaaagggtgagatcagcctccttactctctctagtctacttgccttctgccatgtgatgtcacagcaagatgtcaacatcttaatattaaactccccaacttccaaaacagtgagttactaaatttctgttcatcatatattaccaactgtcagatattctgttatagctataaaaaaatacactaaaccaactaactaaaatctagtttgtttttcttaaaaatacaggtaaacgccatgtttcaggcttattacagtagtctgaatcatcatatattgacagattgaaaagataaaaatggaggagagtaaattaaatttaaatttgaaataaacaacacttcttttagtaaaagtatacttcctcaaatatttgctatataatcatataaaaattacaatcattgtttat

SEQ ID NO: 805317 - DNA, 627 bp, Homo sapiens
ctttgaattgtaccctcttggactgggtgggaaagagagattataaaatttaaataagtagataaataagtcaataaataaataaaaggcctttggattccctacattctttggacagagagtagactaaaatggctattcagttgcaaacatgggggccatttcttgtgggaaaggaaatataacttaggagaaggaaggaaaatcttctacagccaagtcaatacctacaaacaatcatagatagygggactgggccctactgaaaaaatggacaacatgcaaccagatgaatttaggaatttgtatggacccatgagtactatatgtctttgtcttccctccctacccctttttggaatggtagtaaacatcatgattaacttacttccccaggatttcaacactttgtgttgtgtgtggggatggcagacaacagtttactttaattcacctgtttttatattaatatgaactgcacccaagaaggttcatccatatctgaatttgatttagacaacaatatcctagatttaatgagatggaatgtgggtgggccttggctagggtcagtgtaaaataaacaaacaaaaaggtagatagtttgtgactagtgtggactaaaat

SEQ ID NO: 805318 - DNA, 627 bp, Homo sapiens
ctttgaattgtaccctcttggactgggtgggaaagagagattataaaatttaaataagtagataaataagtcaataaataaataaaaggcctttggattccctacattctttggacagagagtagactaaaatggctattcagttgcaaacatgggggccatttcttgtgggaaaggaaatataacttaggagaaggaaggaaaatcttctacagccaagtcaatacctacaaacaatcatagatagtgggactgggccctactgaaaaaatggacaacatgcaaccagatgaatttaggaatttgtatggacccrtgagtactatatgtctttgtcttccctccctacccctttttggaatggtagtaaacatcatgattaacttacttccccaggatttcaacactttgtgttgtgtgtggggatggcagacaacagtttactttaattcacctgtttttatattaatatgaactgcacccaagaaggttcatccatatctgaatttgatttagacaacaatatcctagatttaatgagatggaatgtgggtgggccttggctagggtcagtgtaaaataaacaaacaaaaaggtagatagtttgtgactagtgtggactaaaat

SEQ ID NO: 805319 - DNA, 670 bp, Homo sapiens
gctactaaaagtgaatttctagttgttaaaaataaagtttgtctttcccactcagctcaatgcatttggtggaaaattcaagtgaatagattggttatatgatatggcaaggacaaaaactttagtttaaaaatttgtcatctttgagtattggcatttcttccgcctgatgacattgcaggaacttttaataaattaaagccacatttggctgaagaagccagagaagttactgactggctaggaaataattatatgcacagtaagataagaagacacttaggcaacggtgttgctgttggatcacggtattgtttccaacacatttgtctgtatatgagtgcatgtaaaatggatttctgcatacccaaaacaacrgagaggcagagcacagaagatgggaaaatttaataggaatgctgatgtcaatgtatataaaattatagaagaattccagaaagggcagagccacggagaaaatgaatgtgaatgtattcactgaagacagccatgtcctaaaagaaaaacaaacaaacaaacaaaaaaaactccccaaaaaacccatcagacctaaatgcaagacttcaaaatatagtcaatgattgtgaaagtcggccggcttttgtagactaactctgtgcaattgcccataatttatccctgtaataca

SEQ ID NO: 805320 - DNA, 582 bp, Homo sapiens
aattaatttccatgatcataatgattgagatgaggactgacgttatcccccacccctactccccacctccctcttctcattgttacacattgatgtagaaaaatgctttcttcagctctttctagtctaactagaagttattatcacccagaaacagtaacgcatacttgtgtgcsaaaaaggacaaaggactgctttcattggaataatccataaattccaacttcattacttccacatttcttttctgaaaacaaaaagaatgatttaatcagataaacacacctaactttatgcctcttccatccctctcactgctgctgaatctagtctttgtcttcagggctttcaattccttgatctttacattatcgctgaatcctctactacttttgtccattttctcagtcatactttcaataagatcgtggttttccaggacccgtttacccaccttcatactttcccttctaatttttaatctcacattcttcgagtcagccattttgcttttgagccccattttgaatacagagcattactgagggggaagttcacataactgagtagatgggatctgca

SEQ ID NO: 805321 - DNA, 567 bp, Homo sapiens
aggaaaaaatggaaatttactcttttccccctactttctagagttttgatttagtgatggaagaaattgaaactaagaaaggctattaacgtttttagttaacatcatgtttttatatttctgtattgaaatccttagctgtttcctgatgtttcaggattaaattttagtctgtgctcacaaatacaaatatattaactgaaagtgcagccctggaaattaaagctagtaaaatgcctttaagartttttttttgagagacaaggtcttgctgtgttgcccaagttgaccttgaactcctgggctcaagtgatccttctacctcagcctccgagtagctgggactacaagcatgcaccattgtgcccagcttgagttcagtttttgtttgtttgtttgtttttttgagatagagtcttgctctgttgcccgggctggagtgcagtggcacgatctcagttcaatgcaaccttgcctcccaagttcagtgattctcctgcctcagcctcctacgtagctgggattactggcacatgccaccatgcctgtctaatttttgtattttta

SEQ ID NO: 805322 - DNA, 567 bp, Homo sapiens
aggaaaaaatggaaatttactcttttccccctactttctagagttttgatttagtgatggaagaaattgaaactaagaaaggctattaacgtttttagttaacatcatgtttttatatttctgtattgaaatccttagctgtttcctgatgtttcaggattaaattttagtctgtgctcacaaatacaaatatattaactgaaagtgcagccctggaaattaaagctagtaaaatgcctttaagaatttttttttgagagacaaggtctygctgtgttgcccaagttgaccttgaactcctgggctcaagtgatccttctacctcagcctccgagtagctgggactacaagcatgcaccattgtgcccagcttgagttcagtttttgtttgtttgtttgtttttttgagatagagtcttgctctgttgcccgggctggagtgcagtggcacgatctcagttcaatgcaaccttgcctcccaagttcagtgattctcctgcctcagcctcctacgtagctgggattactggcacatgccaccatgcctgtctaatttttgtattttta

SEQ ID NO: 805323 - DNA, 602 bp, Homo sapiens
agaaaataataactattgtgtattttttccattgtaatagtaatagacatggaatatttggaaactgcagaaaagataaaaaagaattgaagggaaaaatctggcattttctgccatcaaatgtaactgacaatattttgttttttgtttcatttttttctctgcaaagtttaatttttcccaatgctttatttacccttgtatcctgtttttttcttaattaaacaaaagcactttttcatattgttataactgcttgataaatactgtttaatggctgtaaaatatttgagatgccatastacaattaaccatttccttttagtttttcatgtttttcaccattataaagagtggtccagggaacatctttgtatactttttaggttatttcctcaggataggttctggttgcttgagattcttttttgaaatgaaatgggaatataataaaaggaagaaagaattcttagaagtagaattatcaaaaagtgtgaacaattttgaaactcttgatatatagccaaatttcttgcaaaggttttgttttattttggtttggtttttgagacagggtctcaaaaaccctgttgcccaggctg

SEQ ID NO: 805324 - DNA, 597 bp, Homo sapiens
aggaaaaaatggaaatttactcttttccccctactttctagagttttgatttagtgatggaagaaattgaaactaagaaaggctattaacgtttttagttaacatcatgtttttatatttctgtattgaaatccttagctgtttcctgatgtttcaggattaaattttagtctgtgctcacaaatacaaatatattaactgaaagtgcagccctggaaattaaagctagtaaaatgcctttaagartttttttttgagagacaaggtcttgctgtgttgcccaagttgaccttgaactcctgggctcaagtgatccttctacctcagcctccgagtagctgggactacaagcatgcaccattgtgcccagcttgagttcagtttttgtttgtttgtttgtttttttgagatagagtcttgctctgttgcccgggctggagtgcagtggcacgatctcagttcaatgcaaccttgcctcccaagttcagtgattctcctgcctcagcctcctacgtagctgggattactggcacatgccaccatgcctgtctaatttttgtatttttagtagagattgggtttcgccatgttggccag

SEQ ID NO: 805325 - DNA, 597 bp, Homo sapiens
aggaaaaaatggaaatttactcttttccccctactttctagagttttgatttagtgatggaagaaattgaaactaagaaaggctattaacgtttttagttaacatcatgtttttatatttctgtattgaaatccttagctgtttcctgatgtttcaggattaaattttagtctgtgctcacaaatacaaatatattaactgaaagtgcagccctggaaattaaagctagtaaaatgcctttaagaatttttttttgagagacaaggtctygctgtgttgcccaagttgaccttgaactcctgggctcaagtgatccttctacctcagcctccgagtagctgggactacaagcatgcaccattgtgcccagcttgagttcagtttttgtttgtttgtttgtttttttgagatagagtcttgctctgttgcccgggctggagtgcagtggcacgatctcagttcaatgcaaccttgcctcccaagttcagtgattctcctgcctcagcctcctacgtagctgggattactggcacatgccaccatgcctgtctaatttttgtatttttagtagagattgggtttcgccatgttggccag

SEQ ID NO: 805326 - DNA, 552 bp, Homo sapiens
aatcccagctactcaggaggctgaggtaggagaatcacttgaacctgggaagcrgaggttgcagtaaaccaagatcgtgccactgcactctagcctgggcgacacagcaactctgcacctcaaaaaaaaaaattactccagggtatactataaccaaattgctcaaaaccagtgataagaagaaaatcttaaaagcagccatatttaaacacatacacacagaaaaataaggaggaataaaaatgacagccaacttcttaaaaacaatacaagccaggcaacagtgcagcaacatctttaaagcactgaatgaataaaactatcaactcagaattttataaccagtaaaaatatcttttgaaaaggaaagagaaataaagacttttcagacatacgtgagctgaaaaaattctttcctagcatacctgaactaatgttaaaggaagtcttttaggaaatctggatacacgtgaaagaatgaaaacaccagaaatggtaactacatgagtagatttaaaagacttctgttgcatttgtaaaatttctttaaaa

SEQ ID NO: 805327 - DNA, 552 bp, Homo sapiens
aatcccagctactcaggaggctgaggtaggagaatcacttgaacctgggaagcagaggttgcagtaaaccaagatcgtgccactgcactctagcctgggcgacacagcaactctgcacctcaaaaaaaaaaattactccagggtatactataaccaaattgctcaaaaccagtgataagaagaaaatcttaaaagcagccatatttaaacacatacacacagaaaaataaggaggaataaaaatgacagccaacttcttaaaaacaatacaagccaggcaacagtgcagcaacatctttaaagcactgaatgaataaaactatcaactcagaattttataaccagyaaaaatatcttttgaaaaggaaagagaaataaagacttttcagacatacgtgagctgaaaaaattctttcctagcatacctgaactaatgttaaaggaagtcttttaggaaatctggatacacgtgaaagaatgaaaacaccagaaatggtaactacatgagtagatttaaaagacttctgttgcatttgtaaaatttctttaaaa

SEQ ID NO: 805328 - DNA, 575 bp, Homo sapiens
aaggaccatgactctcctttttcccagatgaatcccaagtgcctggcgcacagttacctccataacgggtgcgcggtgcacatttgggatggttgtatcatttcttagaggataccgtgaggaatcaccacaagcttggtggtttataacaacagaaatttattttatcatatttctggaggctagcagttcaacattagttttattgagcyaaaatcaaggtgtcgagcggctgtgctattcctggaggctccagggcagcagctattccttgccttttacagctcttggtggctgccagtgtttcatggtttgtggccatgtcactccaatttcgtctgtcttcacgttgcctttagtgtgtatcaaatctcactctgcctttctcttataagggacactcatgactgggtttagagaatacccggatgatccaggataatccccatatatcaggatccttaatttaatcacatttgcaaagacccttccttagaaggtaacatttctaggttccagggattaggacctgctactgttagatggctgtcattcaacctgttacagtggtattt

SEQ ID NO: 805329 - DNA, 575 bp, Homo sapiens
aaggaccatgactctcctttttcccagatgaatcccaagtgcctggcgcacagttacctccataacgggtgcgcggtgcacatttgggatggttgtatcatttcttagaggataccgtgaggaatcaccacaagcttggtggtttataacaacagaaatttattttatcatatttctggaggctagcagttcaacattagttttattgagccaaaatcaaggtgtcgagcggctgtgctattcctggaggctccagggcagcasctattccttgccttttacagctcttggtggctgccagtgtttcatggtttgtggccatgtcactccaatttcgtctgtcttcacgttgcctttagtgtgtatcaaatctcactctgcctttctcttataagggacactcatgactgggtttagagaatacccggatgatccaggataatccccatatatcaggatccttaatttaatcacatttgcaaagacccttccttagaaggtaacatttctaggttccagggattaggacctgctactgttagatggctgtcattcaacctgttacagtggtattt

SEQ ID NO: 805330 - DNA, 596 bp, Homo sapiens
agcttcataacagccatcttaagaattaaatctaagttccttggccattctatgttgcactccacaagctgaatattccttccacaacccaggatttttttttttttatttccaggatacatgaggggtgtgcaggtctgttacataggtaaatgtgtgccagggtggtttgctgcacctatcaacccgtcacctaagtattaagcccaacatgccttagctatttatcctgatgctctccctccccaatccccccactgrcaggccccagtgtgtgttgttctcacacagaacagtgagaacacatggacacaggtcccctccctatgtccatgtgttctcactgttcagctcccacttatgagtaagaacatgtggtgtttggttttctgttcctgcattagtttgctgagaatgatggcttccagtgccatccatgtccttgcgaaggatgtgatctcattcctttttatggctacatagtattccatggtgtatatgtaccatattttctttatccagtctatcaattgatgggcatttgggttgattccatgtctttactattgtgaatagtgctgtaatgaacatacgta

SEQ ID NO: 805331 - DNA, 596 bp, Homo sapiens
agcttcataacagccatcttaagaattaaatctaagttccttggccattctatgttgcactccacaagctgaatattccttccacaacccaggatttttttttttttatttccaggatacatgaggggtgtgcaggtctgttacataggtaaatgtgtgccagggtggtttgctgcacctatcaacccgtcacctaagtattaagcccaacatgccttagctatttatcctgatgctctccctccccaatccccccactgacaggccccagtgtgtgttgttctcacacagaacagtgagaacacatggacacaggtcccctccctatgtccatgtgttctcactgttcagctcccacttatgagtaagaacatgtggtgtttggttttctgttcctgcattagtttgctgagaatgatggcttccagtgccatycatgtccttgcgaaggatgtgatctcattcctttttatggctacatagtattccatggtgtatatgtaccatattttctttatccagtctatcaattgatgggcatttgggttgattccatgtctttactattgtgaatagtgctgtaatgaacatacgta

SEQ ID NO: 805332 - DNA, 563 bp, Homo sapiens
aagtctgggattatgtttctttttattattattattattatactttaagttctgggatgcatatgcacaatatgcaggtttattacataggtatacaggtgccatggtgttttgctgtacccaacaacctgtcatctacattaggtgtttctcctaatggtatccctcccctatcaccctcacccgctgacaggcarggtgtgtgatgctcccctccctgtgtccatgtgttcttattgttcaactcccacttatgagtgagaacatgcggtgtttggttttctgttcctgtgttagtttcctgagagcgatggtttccagcttcatccatgtccctgcaaaggacatgaactcatccttttttatggcagcatagtattccatggtgtatatgtgccacatttcaaaagctagcagaagacaaaaaataactaagatcagagcagaactgaaggagatagagacacaaaaaacccttcaaaaaatcaatgaatccaggatctggttttttgaaaagattaacagactgctagtcagactaataaagaagaaaagagagaaga

SEQ ID NO: 805333 - DNA, 548 bp, Homo sapiens
aaaagtgcttagcctagtactggctgctcactaatcaaggtagcgtgtgctgaaggttgcatggctgtgacaatttcttaaggaagaccatagtattggtaggttttagatattaagtaaatatttttaaaacaaataaatggttattataaatgcagacattaggatgatatttttttaaaaaataaatagccctatgggggaaagttggttttatttcaaagcaccttatttttttggaataattgtgtgttaagaatcaaaacamacatacacatcgaatgattaaacaaataagcaaggaaaacaaataagcaaggaaaacaaacttcttctacattatttttatttatttatgttttaactgaaagtttgtgttctttgatcaacatctcctcaatccttccatatcccagcctctggtaaccaccattttaatctctatgtctatgagtttgaattttatacttcaaatataggtgaggccatgcagtatttgggtacttgtctttctgtacttatttcactttacataatgttcttcatgt

SEQ ID NO: 805334 - DNA, 620 bp, Homo sapiens
acttttagcctcttatcgttgggagtaaattttctgaaggtacatttatcttaagaatagcaaagaaaaaagagagctattgagtggctgactaggccgggaattgagctacctcttttgaaaagactgaatttttacttagaaacccaagcaatattgttcaaattttaaactctcatttgggccagaatgaaactttgaccactaatgaagggttaaaacaaggtactctgatatgaagtgtctttttttgtttttaaatgggttaaaaattataaaaactagaagtatagcttcttgctaacattcattacctccagggacatttttcagtccatcaaacttctccattcagtaataccattattgaagactctctacttcttgaaataccttctttctttggtttctgtaactttactctttccttttctctttctaaccccttttcctgtkttttcttagtttactttgcaggcttgtgttcatccacccagccttccacgtggcttgttcccagcccttcctttcctctgtacacctctcaaacttcctagcattcttcccatgctctctctcactctcagagacattgtacgtgctattttcgctgtctgaag

SEQ ID NO: 805335 - DNA, 561 bp, Homo sapiens
ttattttaatatttggagggatttgggttttggaaatattgcaatatttaattaaccctatcagatttcagcctgagactgtatttagaaaaaagaaaaactaattacagttggcactccatatccatgagttctgcatcctccgattcagccaactgtgggtcaaaaatgtaggtaggccaatgatagttgcttcagtattgaacatgtatagacatttttttcttgtcattctctaaataatacagsctaacaactatttactcattatttacaacacgttacatattataagtaatctacaggggatttaaagatttaaagaatgtggtaggatgtccataggttgtatgcatgtacaacactacttaatataagggctgcaagtctcttatattacttataatacctaacaaaaagtaaatgctatataaatcattgtaatactatatcattttgtttgtagtttttaattgttgaattgttatttttgtttgttatattttttttattttttaatgccatattttcaatccacggttggttgaacatgcagatgtg

SEQ ID NO: 805336 - DNA, 561 bp, Homo sapiens
acaccatgtactcactttcgtctgtcaaattcacagaaacctcagcaagtttggcatagtaaagcatatgaaagtgcactcaatcacacatgatcagaagaatgcatattcaaaccagagtttctcacttctacacccaccaaaatagacacgttatcagagagaaaaatgcagagggttggtgagrttgtggaggaactggagctatcacatgtgactctgggaacatacttaatttcatccactttgataaatgactttctagggtgtactagagtaatcggtacctgtgaccctacagtcccactcctgctacctatgtccaaaatacatgtatgaggcaaggatgctggtgtccccctggggggctttatagcagcgtcacttcatgtaactgtagcaggacaagccgcagacaaaacccctcagacaccgaattaaagcaggaacggctttattcagctgggagcttcggcaagactcacgtctccaacaactgagctccccgagtgagcaattcctgtcccttttaagggctcacaactctaaaagtgtctgcgt

SEQ ID NO: 805337 - DNA, 568 bp, Homo sapiens
acatattcctaccatgaatctgactccacagggctacaaaatatttaaccttcatttcaggagtgctagtgtgcttcaggtaggtttcatacagtttatttgtcctgacaaaaaatcaccctatcagccttctcatgagcatccagtgacagagatgtggaaaagaaccttctgtggggagagtaaagtttgaaacagtgaggaacagaggatgatgttcgagaagccacaggaggagacaccagtggacaccagcgaggagaggagccagggagaaggaaatggggaagacattcctcaaggagcagctctgagctccgcggctttgggggccatggagtcacaacagcttaagatgtcccttcagcaccagctgggcatgggcaayagtgagaggagagggtggcagctatgacatcagtgtttgtgtctttacctgcacatggggagaaaattccatctgtttcccataagtagggtcatctttgaacagaagaggcagttgtgtgtttccacaaatgtggcgacatacattgtaggacacaccaagactttgctgtagccgagc

SEQ ID NO: 805338 - DNA, 603 bp, Homo sapiens
ataacaaaaagaacagcaagcatacagaagcttgggaattaaaacttactatgaaggggcatacaacttagcttgtggcagtaggagtacctgggcgtgctagagtcaagtcctgcctctccatctttcttttgcacaggaatcccctagagagcttaatgaaatgcagattctggttcagcaggtctggaatgaacctgaatttgtgcaattttaacwaactcccagttgctgcaatgctgctggtccagggtctgcagtgtggggaacaagtcgctgtatcaggccatgcacagcagccagcatacttttctgcagcaatgggagtgccattaacccagaaagttggtcaatgcaagtccagcttctcctctactgggttaagaatcccagtatataagtgaggaagctaagcacagagaagctgaatgacttacaaaatgggcaagtgcacagtatatgagcaggaattcaaacacgggcctgtttggctccaaagcccatactctttccacttcacatctaagaaagccaaaagcagagcaccgaagagcccaggcatccacagagggacctggaggaagtggatggcagccctgccca

SEQ ID NO: 805339 - DNA, 578 bp, Homo sapiens
accaaacaaaaacataaatagaaatgaatgtgtaacataataacatccagtgaaattttttttagcataatgaaggaggttgggctttttgttaaggcacgtttggctctaccactagcagactgtgtgacttcctcttcagagccaagcattgctttgtatcaatataaaatatcaaccaatgctagaactgtcatggtaaactgtggaggaaaggggcaaaagataagtgagcgtgctagaatatatttactacctaagatgggaaaactttccatctagttatgttcctcrtttactaaagtgaaaatgaacactctggttatggggagacatgagcattgtcgagaagctcagtaacagctgttctctgaagacttccctgatggtattagatgctgttacagaactggactgcctagcaagaattgatataataaaatcactcaatagtagaggccacgcgaagcttttaacttccagaagcaagtgagtatattccccctcataaggggaagcaaaatcagaatggctgccaggggagcctcacctgtagagacctacagaggagacttatg

SEQ ID NO: 805340 - DNA, 592 bp, Homo sapiens
tattatagtttcaaagattcccaggtgtttcccatgtgtagccaggcttgagaaccatttcctgggtgatcccattcattccatggctttaaatgccacccgtctgttgttgatttacaaattgattattccagccctagaattcctaattctgaccccagccytaacttctctccctggctcgcttcatacactcctggcttgtttcaggttttccatgtgcacaagcttttcaactctggataagaactccctggaccacacagatcaccacctagggctgattcagtttctcattgccatccacttcccacaagcacatcccaacccccaccaggagagacgttcagataggttattaatattataatagaggcttccttgtattacacatccaccatgtgactagtattgtgtatgtggttttatatattttgtttcatttaatcctcatgacaacattttgaaggaagtattatacacaaactcacaggtgagaaaacgaggtcttaaaagggtgaacaaatttatcccaaatcacatgaccaataaagtggaagaaccaggactcaagcccaggtcagttttactc

SEQ ID NO: 805341 - DNA, 503 bp, Homo sapiens
agtagaagatgggaaaactatccaatttgtttcacaagacagatttgattcagatccccaaaggtgataaaatattacgcaaaaaagaaaacaaataacctaaactataaatttacagattcaaaaccttcaactaactacttcagattagagcttaacaagctaatattactgattcaataatccaacaggaacatacccagtttcaatataaggaaattgaataatgcaatagaagtttatcagcaggctagtaataaaaaagtagatgattatttcaataytccctaactgcgtttgataaaacttaataattttcatttttcaagttggaataaaataattctttcttaatttgatgaatattcctattctaaacctccaaccaaataactttttattaggggacatgagatgcagatctgtaaattagggataaaacaagtttgcctactctgccaacccttgtttaatattatttaagtaggtctagctggtgcaat

SEQ ID NO: 805342 - DNA, 624 bp, Homo sapiens
catttattcagtcaaatatatcaatcagtaaattagtgagtattttaattaaaagtttttttaaggggactaattatgaaagaatagacagaatataggggaactatcaaagacagtcttacaaacctgagggttagcagaagagagctgttatcaccctagttctgaaagcttgagggratggatgggaggttactagagcctggaatgagagaaaggcatgtagagcccatcttggaaggaacagtaacacttgatcaagggacatggccagccctggtggttttttctggggaaatattctgaccttactcttttttcttccactgttcccttcttcaggctcccctttggctgagctcagtggaaccagagggcataggagccctaataatatagccctgaggggccttctccttagggcagaaagcagagtgggaaaggatggatggcagacatgaagaggcaaatggaaggtatctagtatatagaccaatatttattaagaacacaccatatatcaagcacagggctaggccttggtgagacagtaagcctttccagcccctgtcctcaacaaacttttttacagaatgataaatcatatgacagaggtaacagagg

SEQ ID NO: 805343 - DNA, 598 bp, Homo sapiens
gaagctcagggtggggaggaagctggagagagcactgagccagcatctcatgactcagccacttccacccagtcagcccggtggcatctccgctcccctgctctaaattccgattcggtgagactgctggaggctgagtcagtcccggcacggcacgagagctgtgtcccaaggggctccctgccagacaccctggcccccaatcaaggccagggccaggcacggggctggagaggtggcggggtgcaggagccaggctccgaggctacagcaagtcccrgcagagtggggcggcccagtgagatcacgtaagtgaacatgctttgtgagttatgaaaagctccctgttttcctcagtgggctcagggacctcattgcccgaggaagggactgggatgcaagtcctagctctgcccacctcatcgcatgacactgagaaaactcctttcccctcttggcttcaatttccttgaccacagaatggggccaacatctcccaaaggggttgggagaattaaatttaatgcatatgaaagcgctttgcaaactgtctagtgggccctatgatggtcagggtggtaggagaggagagtatgaa

SEQ ID NO: 805344 - DNA, 623 bp, Homo sapiens
ctgctgctggaagacagaggcgcaaaacctgaaggcgagacagcagctgggagcctggggcggtgtctccatccctactggcaaaggggagctaggatcagagccccccagtggtctccagctgcctgggaggaggccaggatcaggatcggygtccgacaagcaggtccagctgcaaagcctgggtgctgaggaggccgagaggggtctgagttctggggtgctgccccagcgccccaggagggggtcgatctcagaggaggagcaattttcagaggccacagaggaggctgaggagggagagcacaggactccctgcagaaggagggctggttgtcagagaaaggggcagatttctggagaggaagcctccgatgagggagaagtgcagggccagagccaggggagcagccccagcttcaacaacctccgaaggcgacaatggaggaagacaagggccaaggagctgcaggggccatgggacctggagaagctgcacaggcagctacagagagacctggactgtggtgagcgtggggctcagagcctggattcccccgaagctacaccgcagggaacagggagcagtcagggaggcaggggctcaggcaggctgggctgtg

SEQ ID NO: 805345 - DNA, 703 bp, Homo sapiens
acataaacctgatcttaccctttaggatcctacaattaacccaagtaacagattagaaaattaagtacactaacatatccattcatttagaaaataataatccaatacatggtatatgtaaaacactgtgcctggaactgaatgaaagcaaaacaaaccagcatctaacagggagtactttcatcatgcagaagaccccacttaccccttaaaaaaataaaaccaaaacaaaacagaaaacttgcatcctacgtttcccagcactttctaatttctccactgctgaatcccttgttcctctgcccaayttattttgacaaaagagttaaaaaacaaaacaaggccgggcgcagtggctcacgcctgtaatcccagcactttgggaggacgaggcaggcagatcacgaggtcaggagatcgagaccatcctggctaacacggtgaaaccccgtctctaataaaaatacaaaaaattagccgggcatgggggcgggcacctgtagtcccagttgctcgggaggctgaggcaggagaatggcgtgaacccgggaggcggagcttgcagtgagccgagatcgcgccactgcactccagcctgggcaatagagcgagactccatctcaaacaaaacagaacaaaaaaagcaggtccaaattccctggagcattctagtatgctagggctatgtagcaaatacctgcag

SEQ ID NO: 805346 - DNA, 586 bp, Homo sapiens
cccttcccagccacggctcagactctttagactgtcacaggttaggcagatcctgaagggactggaatttccatctgggcatgagaaggggcttgggagccctctgcactccaacaattttcccagcctagggatgatcttgccatagaatgtaatctgccatttcccggggaacttaacgcccagccaccccatctccttcatactaggaactaaccctctgagtcccccaatttgtgatgctgtgagcatcataactgttctgacaaacctcctccaccccggctcctgcacccacctggctcttgcgggtacccacgcgaatcactctcatctttgggctgttttcttcctgcagaaaaagtccccaggtcacagtcccctctgtttctagtgttcctcaacaccttgtccaaraaccagaatcactggcttggaagaaaggaacttcagaacctggcctgtggccagctgagtctcagagtggggaaatactccaaggctggtccctttaaccttcctcagtaccttctgccctcctcaggggatccagagaagcagagactagagggaggcgatagtagga

SEQ ID NO: 805347 - DNA, 557 bp, Homo sapiens
aaattaaattgtttttgcataaagtatgaacggggtctaattttgtgttcttttacatttattgccgattattaaccaagtttattaaattactttttaataaatacatttagtttatgtaattaaattttaataccacatttaattaaattttatttaataaataatacatttaatttaattttaataaactttagttaatttaataattggcaataaacatgaacacaaaattagaccccatyatgcaaaaatagaatttaaaaaatctttactattaaaataacagaattagaagaagtattaagagttcatttgtataaaggagagagtcttaagcaagaaactaaaaattaaaaaagacaatgacataaaaattgtaaagttaatataaaaaattatgtcataaaggagagatatgttttagaatggaaaaaaagtatttgttaacacttataagagaccgagatgatatccttaatatacaaaacactcttttaaattaacaggaaaaataacataatgaaaataaagccaagagacaccgaggatccatt

SEQ ID NO: 805348 - DNA, 644 bp, Homo sapiens
tgaaagttatatttcaatagatgatcacatatttagtgttcttgatatgatgacattactgtcattttacggtaattttatatttggagctttttcctcttgtttcaaaatatagttatatcaaatccaattttcttacacatcaagaatgtatcaagaaatatatttaaagataaacttaaatgtttcattaatcaatttaaaatttcatagcttggtactaatgacaataataaatgagaaatatttttgttactgacttacattcaaaaagtaaaaacatctttcttcatacatgacaaattagactgctaatttatttaaaaaattgaaagataaatatttcaatttgctttatatttaaataattttaattaattttctacctacaacctttaactgaataagaatcttttcatggtaatatttatattkttctagtggtaaatgctgacttagaagtatataactcacacttatataagtctttacagtttttagataattttcatgtttcattacattttatccaacaattccttgagataagtaaggaatcagcattcttcattgtacagtttagaaaactgagtctcaggagaattatataatctgccaaataatttgaatgacagtgagattcc

SEQ ID NO: 805349 - DNA, 639 bp, Homo sapiens
atttatatgattatattttatgaatttctattttacaataatttgtatccattcattcatttttcaacccctttattttagtttagggtcccaggtggtagaagctgtccctgtagcgcatgcgtaaggcagaaaccagccctggacagggctctatctcgtgggagggtasactcacaaacacctccacacacactaagactgtgaccatatagacacaccaattcacgtgacatgtacatctttgggatgttggaggaaaccagagtacctggagagaaagtgatttttttttttctcattgacattataacaaaaaacattatttgaggaccctctgtactgcatactgtagacaattataaaatcatgtatgtaatcttttgtatacaatatctaaacatagaaaacatatgctaaacatggtataaaagataacaaatggtataatttttatatacaggacacttaccacaaatggagcttgcaggtctggaagttgctctgggtgagggagggagggagtgagtaaatgtgaaggccgaggacattactgtacaatatctggacttcttgaacactgtacactaaggctacactaaatctatttaaaaatctgtattttttcctttacaataa

SEQ ID NO: 805350 - DNA, 564 bp, Homo sapiens
ctactgtgacttttttatttttattttttgagacggagtttcgctctcgttgcccaggctggagtgcaatggcgcaatctcggctcactgcaacctctgcctcccaggttcaagcgattctcctgtcttagcctcctgagtagctgggattacaggcacctgccaccacgcccagctaatttttgtatttttaatagagacggggtttcatcatatyggtcaggctggtctggaactcctgacctcaggtgatccgcccatgtcagcctcccaaagtgctgggaatacaggtgtgagccaccgtgcccagcactctatagattatttaactttttaaactttttgactcttcagtaataacatgtagcttaaaacacatacacattgtatactgcacaaaaatattttatttcaatctttataagctttgtatacttatttttgttttaaattgtttctttggtattaaaaaactaagacatgaacacacacattagcctgggtctacatagtgtcagggtcatcactatcattgcctttcatctctacatagtgtcccactgg

SEQ ID NO: 805351 - DNA, 564 bp, Homo sapiens
acaatcttaataagatatgtagcagctagatattgaaatggatccatgtatctgcctgtattctgggttacaaacaacagaatacatgttgctatctgattattagaggaaaattaaatgttcacagaatcaaggagcaattgaagaatcagactttgaaaatagtccaaaaacaaggctgttattttttgttaaaatgaaggaacaataaccttttactttttagcagaaaagttctcttcagtatgctgtttttactattccaggaaaagtagaaaacactactacttctacatagtgctagcactgtcccagagcacccaaatcaatcatttatctccctgtcacttgtttcaaatgtaatctcaggtgtgacagttcattaaatagaatctacttctcatgaatgagccctagtaaccaggtmtggcagaaagaaaatagctccaatttgactattgtagttggaggtagggcattatagcttatcaacatttcaaacaaatgtgaattaatcacaaaatttgggggttagagagtcaaatgtgtggcaaaactgattaa

SEQ ID NO: 805352 - DNA, 568 bp, Homo sapiens
caaactgcaaaaaactgaaaagtattgtgatggagattaaaatataaaaatagcaaggacagaaacttagccaaatctaaatataatacaactaaaaatgtaagtgcctaaacaagtttaataaatattttgtaaattgaaggtgactatgcaaatcttgttggcatagaacctgatttttggactgagcttttagaagggaagggtcatatttaaattaaagtaggaagacatagttaaaagaatactaatatggcagagcagcagaatacgatgctgctgtatgaaaatttactcagtaataatggagtaagattcaaaggcaattggtgtgcatgagtataatttacaaactcttcaattcaggaagaaataaaattaatgatctcaaaatctagagcatcagaaatgytaaaatccaatgaaataatggagcctttgcaaaaggtacacttcaaaatttgcatggtgatgctatttactgaggagagcttaccaaaaagtattttctaccatgacaaaatatacaaagggcactgtcccataatcaactttattcaactgaaac

SEQ ID NO: 805353 - DNA, 552 bp, Homo sapiens
gggctgatggaaactaaaatggacacatggaatataaatattattataacatgttgtgcatttatttttcattccaagatagttaggaacaaaagagacacctatcctgggtataaacacaaatgatatagaagaatctaaggagtgttgatagaaataacctgacctgagtttgaaaaatgacttaaaatgggtacatgtgacttagaaaagatacaaaggatggtaagaccactggcttcaggaatwcacatagctctcatggagaaataaaatcaaatagttcttcctatattaggacaaattaatgggtttaagaaattcatgacctggcttaatagcagagctgtccagaaatgtaacattctgctttgagaaagtaatagattctgtaacctaaatagattcaaacgaaaaatgaatgactacagaaggataggcacaatgtcacagggtgattcgggcagaaataacagtgtggtcctgatgactcctaaagtctatccacatgtttggtactataatatctcagtagtacagcagataaacaaa

SEQ ID NO: 805354 - DNA, 674 bp, Homo sapiens
attcattgcacacaaagacacaaaggttctttctcctgtatgtgttctctgatgttctgtgagatatgattatgagtgatggctttcctacaaaaaacatagtgtgaattctttgatgtttgatgagggttgacttatgtgaaaaggttttcccacagttagtacacccatatggttactccctagtgtgatttctctgatgcctaatgaattcagacttgtggcagaaggctttttcatattcctcacagatgtgtaatttctcttcaggtggatctttattcayttgtacataagataattggttactactagtttatacgtaagtgctgtgttatggctgaaagctttctcacagtggctgcattcccaggatttttcctgttatgtcttttatcacagtttgtacacttatctaacaacttcctaagcaacttatttttttgagtagtttaccttaaaacctaccaggtctaaattatatttcaagctctttccagaagtatttcaattattaaaactttgaattgaacagaaattatcagcgttcaaaagtaatattttcctgaacattattcatagcttcttatctttggcaatttttttttaattgaagcgtgcactttatcttaaaagcatgctttgctgtcctttcatcgggaagtttacttgtc

SEQ ID NO: 805355 - DNA, 550 bp, Homo sapiens
taccaagcaggatagggactcactacacaatcagaaggatgatatttacaatgtatacattactataatttacagcttcttgccataaacaaacaaacataaacaaagactttggtacagcatgcaattcccttcacaatccttcctgggttcctaagctttgtcacttcctaatgtttacattcaagcaccaagtcatagctcttgggtcttccctaacyttaaaattcaatttatccctaccttctctacccatctgagcactactcatacacggtggaacaggatagctatcattgccttcataaaatattaactgaaacacacacatgcacatatttttgtgtctgtgttaattacctaattatacatttcctgatctcagcaaaatgtgttattgtactttgcacaaaataggcatttatgaaacagtgaatattgttttgtcatagtttatatttgaaaattcactttgcgcttttacaacaagaggaccaggattttacattatccagagcctcacatatttcttagtgtatataagccttga

SEQ ID NO: 805356 - DNA, 550 bp, Homo sapiens
taccaagcaggatagggactcactacacaatcagaaggatgatatttacaatgtatacattactataatttacagcttcttgccataaacaaacaaacataaacaaagactttggtacagcatgcaattcccttcacaatccttcctgggttcctaagctttgtcacttcctaatgtttacattcaagcaccaagtcatagctcttgggtcttccctaaccttaaaattcaatttatccctaccttctctacccatctgagcactactcatacacggtggaacaggatagctatcattgccttcataaaatattaactgaaacacacacatrcacatatttttgtgtctgtgttaattacctaattatacatttcctgatctcagcaaaatgtgttattgtactttgcacaaaataggcatttatgaaacagtgaatattgttttgtcatagtttatatttgaaaattcactttgcgcttttacaacaagaggaccaggattttacattatccagagcctcacatatttcttagtgtatataagccttga

SEQ ID NO: 805357 - DNA, 437 bp, Homo sapiens
tttcctgattgctttgttgaagatcagacggttgtagctgtagcattacttctgggctctctattctgttccatttgtctatgtgcctgcttttgtaccagtaccatgctgctttggttactgtagccttgcagtataaattgaagtcaggtaatgtgatgcctccagctttgtgctttttgcttaagattgccttggctattcaggctcttttttggttccatgtgaatttttaaaaagttttttttctaattctgcgaagaatttctttggtmgtttgacaggaatagcattgaatctgttcattgctttgggcagtatgggatggccattttaacaacactgattcttcctatccatgagcatggaatgtttttccatttgtttgtgttatctctgatttcttttggcagtgttttgtaattcttgttgtaggg

SEQ ID NO: 805358 - DNA, 447 bp, Homo sapiens
atgtctggtaaaatttggctgtgaatctatctgcccctgggctttttttggttggtaggctttttattactggttcaattttggaactcattactggcctgttctgggattcagtttcttcctggttcagtcttggaggcaacctcacttttttctacttatagcctayccattttataatgaattttatatgttaaagctcttctaaaatgcctatagttgtgggggatggtggttcacatctacaatctcaacattttgggaggccaaggttggcagactgcttgatttcaggagttcaagaccagcctgggcaacatgatgaaaccccatctctaaaaaaaatacaaaaattagccagggatggtggaatgcacctgtagtgtcagctacttgcagggctgaggtgggaggatcacttgagcctgagaggtcaaggctgcagtg

SEQ ID NO: 805359 - DNA, 447 bp, Homo sapiens
atgtctggtaaaatttggctgtgaatctatctgcccctgggctttttttggttggtaggctttttattactggttcaattttggaactcattactggcctgttctgggattcagtttcttcctggttcagtcttggaggcaacctcacttttttctacttatagcctatccattttataaygaattttatatgttaaagctcttctaaaatgcctatagttgtgggggatggtggttcacatctacaatctcaacattttgggaggccaaggttggcagactgcttgatttcaggagttcaagaccagcctgggcaacatgatgaaaccccatctctaaaaaaaatacaaaaattagccagggatggtggaatgcacctgtagtgtcagctacttgcagggctgaggtgggaggatcacttgagcctgagaggtcaaggctgcagtg

SEQ ID NO: 805360 - DNA, 614 bp, Homo sapiens
tttagtgtcctcctgaatgttcatgttagcaagattttgccctatattagttatcatgggaaccctttctccatcataatggtcatgtgaatttgaaaacatctactatctatgatgttcagttatatcatgtgaaatatgaggaactgattatacaagcttgatatgtcaataccagtgatacaagtatcaccaaatattgaatccaacsatcaaatatattctgtttggcctgtactgtattaatttatttttgaatgaaaacttgtgattatctggctcagttgaatacagaaatgcaaaacataaatctggagccaagtagtggtcacctcctttaaaaagacatgctctctatcttctatttctgtccctatttaactggaatcactgtgaggtggtaccatttgaccttgtcaggtatttgatattgtgaaacctggttaattggaacgatgaatgcgaaaattcttagccttccttctgttgaaagaggtttctaaatttgaattctgaaaattatttttattgccctcactcatctataaaattgttaagttccttgaacacagagattatgtctatgtaatttgtgagttcttcacatcacttaa

SEQ ID NO: 805361 - DNA, 519 bp, Homo sapiens
caaaaaaaaaaagatgccttctctgagaaaagaaatgtgaaatgtgagtgccattggctagacttccccagagggaagacttcagggaaggaaatcccaagtattgggaattcaaaggccctgggagcttctgtcttgctctccagagtctcatcgtggttctgcccttgagcccactgatgatgcctctgcccacaggtgaatgaggcctctggggatggggatggagaggatgccgttgtgatcctggagaagacgccatttcaggtggaacaggtggctcagctcctgacgggcagccctgagctccarttgcagttctccaatgatatctacagcacctatcacttgttccctccaagacaactgaatggtgagcaagaggtggccagggtggctgtatggagggagaatgggatggtgggaaattaggtggtatggtgaccagactctctatacccgatttgcatattctagtacaatagggagattacttccctaggggacatttggccatcg

SEQ ID NO: 805362 - DNA, 543 bp, Homo sapiens
ttcaatccaaagtacccttcaataaacctacacacacacacaccacacacacacacacaaaaagctaacacttcaagtttaagaaaattcatgcttcagagccactcactgcatcaggtttccctcaaagacaacaggcaaaaatgataaaagcatgaaagccaaatggaagagatattttcaaactaatcacagtatgcaccattcatcatttttccttttttttttttttttgtggctactgccaaaatttagacttgggaaaaaaaaagtaggtaaagctcaakgtaatataatttagctgtgacaaagtagattaaaatcaagagaaaaataagattgtttctgagcaattttaacttaaaccagtaaaataaataatctatggtaagagtcattcaactactcacctttcctgtatgatacatttgtaaatctaccaccagacacttattacataatcatttcattttataattatggaacaatcctggaataacatgataaaagattctaattgaaatttttaaataagctacgaca

SEQ ID NO: 805363 - DNA, 626 bp, Homo sapiens
ctgactcaggtgacagaaggcgggcaaggccagagcagggcatctggatcctaggcaggtccaacactactgggactggtggtggctgcggctttgagaggggtgtggccacgggctgctgttcttcctacctgtgtccaggggagtccctctggtacaggccaccagggcccccatgctgggctgtgaagtcatcccagacatggaatcagctgccacatccaccacatcagctccagcctgggcacaggccagcatggctgccacgcctgcccctgacgtgtcgtgggtgtggatgtgcagtgggaggtcggggaagcgctcccggagggagctgaccagcatgtgcagaccgtgggcttcagctagcccggccatgtcctgggggaaktgggagagagagagagagagatggtagagagggcaggatgtgtgcctgtgggtggcggggacatggccggggcagagagggagggacggacaagtggcccaggcaccttgatgcacaggatgtgggtgccagctcgcaccagctcttcggccaagcccatgtagtactgcagtgagtacttggtgcggctggggtcggccacgtcgcccgtgtatgagatggcagcctccaccac

SEQ ID NO: 805364 - DNA, 611 bp, Homo sapiens
cttttattctttataaagttgttattccagtcctcaccatcccctttgctcctcttcccaattcattattttcctttctgttactagtaagtccttctcgtctctcctcttcttcccatcacccccaggatacacagtaaagagagaataccagaaatgggcagcactggtgagcaaagraatattatagaggtttttttttcattccaagttttaagttgtccttgtgcatgaaatatgcacatgataaaaagggggttgccatcaatgcatattgtcttgaaaagccaagggctctttttcggtttttctctataatgaagactgttagactgtggactctataattatgctcactgaacaaataccttgaaagggaagtaattccaagtcatgtatcaaagattcaatttgacatgtatttactaaatgcctaacatgcctatgcattttgtttattcatttatagtaacaagatatagtgagttcatattctgtgccagcactgtgctcagtattgaaaaattggagtcacaagattcccactttcaagaacttacagtccaatggaggagaaagaagtatgaaaggatcaattgcagggtgacaag

SEQ ID NO: 805365 - DNA, 554 bp, Homo sapiens
acgtagagcctatgagtgacacatgttttgactggcattccagggtagctttcagtagccacctggagggctgtgtggaggattctaaggccatacctacgcatgatgggaaagacagctgtggtggttcattgtcgacatctgccctgcaggcacagagaaggcagcatggctgaccggtttctgagatagattcttcagggttgaggaatccaaatctggagcataatccatagagattccggatgaattgttaattcccatgaaggaatgcatcaggaccagattatactgtgagtgggcctcaaatctatttatagaataagtttgggkttaaataagttaattcattgtaagtgccttgaagacaggtaagttccttgaagacacaaaaacctcttatctctgagcatgcagatgggtttttttttttttttcagcattttgtaaagggcaatacaaactcagcttcactccctcgccaacctgcaaccagatcgttcttcctaagcacctcttacatggaaattctaaagataccattactgtggtga

SEQ ID NO: 805366 - DNA, 554 bp, Homo sapiens
acgtagagcctatgagtgacacatgttttgactggcattccagggtagctttcagtagccacctggagggctgtgtggaggattctaaggccatacctacgcatgatgggaaagacagctgtggtggttcattgtcgacatctgccctgcaggcacagagaaggcagcatggctgaccggtttctgagatagattcttcagggttgaggaatccaaatctggagcataatccatagagattccggatgaattgttaattcccatgaaggaatgcatcaggaccagattatactgtgagtgggcctcaaatctatttatagaataagtttggggttaaataagttaattcattgtaagtgccttgaagacagrtaagttccttgaagacacaaaaacctcttatctctgagcatgcagatgggtttttttttttttttcagcattttgtaaagggcaatacaaactcagcttcactccctcgccaacctgcaaccagatcgttcttcctaagcacctcttacatggaaattctaaagataccattactgtggtga

SEQ ID NO: 805367 - DNA, 518 bp, Homo sapiens
agtggggtgtggctgagttgtgattcaatctggcacagtcgggttctgagcaggtcttcctaaccatggcgatgttacattgatactttgttaagaagtgtgtcagcattttaggagaagaattaaaagaacagaaacagagttgacagcttctaaatmaattgagcaaaaatggaattaaaaatacttgatcatgtcaaaagaagacaggaagagaaaaaaatcatagaaaaagcacaataaatgaaaaatatggaagatataaatccaagtatattagtaatatcaataaatgtaagcaactaatggtatgttttgaggggagtaaagcagaatggttaaattgaatataaaaaaatccatatactgcagaaaggagacaaaccaaggaaacaaaaaagatgaaagtaaaagaatgggaaaagatgttccaggcaaatactaaccaaaagaaagctggtatagatacattagaagcaatgatattttaattatcaccggtttattatttggcttta

SEQ ID NO: 805368 - DNA, 557 bp, Homo sapiens
tctgcaaagagtcctgtgatgtgattcatcttcacgtcttccagctatggataccagcacctgctctagtgaaggtggcggggagtaaagtggactctgttgggagtccttggttgtagttttgttttagtgtgctggttttagtccttggttgtagttttgtttagtgcggtggttttctcaaatgctggttatgctagcagtgaagttgtcacatggacagactcaggacctctggttaaccagggtgttgcaggtggtgaaattagctgttgttttctccttctttggagcagagttgttctcttatgagttgctgtaatggcttgagttgattggcctccagccagaaggtgctgctttcaagagagcaccagctgcagcagtagaaggggratataattttgccctgccttggctaggataggtacttggcttcctcaggtaatgaacagggccatagagctcccaagagaccatgtcatttgtctttggctatcagggcaagtagagagaaaccatcaggtgggggcaggttaggtgggtctgagatcata

SEQ ID NO: 805369 - DNA, 561 bp, Homo sapiens
atgctcccaagtactcctccacttaaattagaagaaataaactatagtttcagtcaaggatagaaacagatgtttcaccatctggcaaaagtagggacaagggccccctcaacagttgccccaggagtaaaaagctcttagtaagcttctggagctgtggggctcaactggcactccatctcagggataaagagatggaggaggatttgaaccagtcatcagctagtaaaaggacagtgctagctaagattaacttgcccagaagctcaaagtttaagcaagagaggcagttgccactacattaatctcygggtgtgttctcttctcccctggcagactgtagaggtagaaaaacatcgactctgaagccagctgtgtgatcttggacaagttacttaacctctctgagccttggctttattgtctgtaaaataagataatgtctaccttctcctgagggtgtgagaattcaatcaatcaatgcaagtaacatgctgtggacatggctggcatgtgataaatgctgaataatgttaggtaatacccttgttgatattactg

SEQ ID NO: 805370 - DNA, 538 bp, Homo sapiens
cctgcacccccaccacagtgtccccactcccaacgtggatcctcacctttgactgcaaagacaaagcagaccactcagatgcagccctggcccctgcctgcctcaacctccacctgcacccacgtgccctgctgtgccctctttgctgatggggggaggggggacaggygcgccccttcttctggcaatgccagcccttttccactgtgtcttcaccctctccttccctctgagatcctcccattagcatttaggtgggctaaagcctcttttgtccagaaagtccctcttccctggccctgggcccagctgtccttcttccacccttcaaccctcaagcctcccagacctgtctaagccccactgtcttaccttccccctgccctgtaccctcccagttcctgtcactactgcaataaaactactcttgctaaggtacttgtctttaaatctagtagacacttttccattcttgacttatagaatctcacagcagcaattgctgtttctgatggtcccctttgaggaatgcttgccg

SEQ ID NO: 805371 - DNA, 608 bp, Homo sapiens
agactaaatgtacaaataaacaaccaaccaaataaatctctttaaactgtttttagatggggcatgcattctccatttcaccacagaccttgcccttctctattgcctttttctaagctgcttcacattctatctaccaggaagacagatgagttttgactccatctttagaggtcttcagattgacggagccctgtaataaatcactgccactgcctagtgaagacacaaccattttagtgttctctaacactttctctctgcttgtatttctgttgaatttattgcttaaatatatatgagttatttatttttaaaacaattcagactaagctcatgaactaatagagctcatagtgttctatgtaacagatggctacatctatgtaaaatattcagacagctttcattcttgtaacattacgtttatcagatatatagcaaaacaattaatttttgctatgaaagcactttcrgagaagctatgacatttccagatttttatgtatatctaatataaaaataaagttcactaatttcaaaataacagttttacaaatatttgccctttgtagaaatatgccatcatcattgtttccttgcaaagg

SEQ ID NO: 805372 - DNA, 556 bp, Homo sapiens
aatatgattgagtctaggatcacatcactgcactccagcctgagtgacagagcaagaacctatctctagaaaccaaaaataccaacaaaaaacaaaaaccaaaaagaatctcaataattgatatgcaaattttatattaatgtgctttccaatcacataaatgtcatggattctaattaacttaagaaaattgggcatcttaaaaaaattgaaaatttggccgggcrtggtggctcatgcctgtagtcccagcactttgggaggccgaggcgggcggatcacgatgtcaggagttggagaccattctggctaacacggtgaaaccctgtctctaataaaaatacaaaaaaattagccgggcgtggtggcaggcgcctgtagtcccagctactcgggaggctgaggcaggagaatggcgtgaacccaggaggcagagcttgcagtgagccaagatcgtgccactgcactccagcctgggtgacagagtgagactccgtctcaaaaaaaaaaaaagaaaaaagaaaattcatatcaaaaattagcaatcaatgagtca

SEQ ID NO: 805373 - DNA, 556 bp, Homo sapiens
aatatgattgagtctaggatcacatcactgcactccagcctgagtgacagagcaagaacctatctctagaaaccaaaaataccaacaaaaaacaaaaaccaaaaagaatctcaataattgatatgcaaattttatattaatgtgctttccaatcacataaatgtcatggattctaattaacttaagaaaattgggcatcttaaaaaaattgaaaatttggccgggcatggtggctcaygcctgtagtcccagcactttgggaggccgaggcgggcggatcacgatgtcaggagttggagaccattctggctaacacggtgaaaccctgtctctaataaaaatacaaaaaaattagccgggcgtggtggcaggcgcctgtagtcccagctactcgggaggctgaggcaggagaatggcgtgaacccaggaggcagagcttgcagtgagccaagatcgtgccactgcactccagcctgggtgacagagtgagactccgtctcaaaaaaaaaaaaagaaaaaagaaaattcatatcaaaaattagcaatcaatgagtca

SEQ ID NO: 805374 - DNA, 556 bp, Homo sapiens
aatatgattgagtctaggatcacatcactgcactccagcctgagtgacagagcaagaacctatctctagaaaccaaaaataccaacaaaaaacaaaaaccaaaaagaatctcaataattgatatgcaaattttatattaatgtgctttccaatcacataaatgtcatggattctaattaacttaagaaaattgggcatcttaaaaaaattgaaaatttggccgggcatggtggctcatgcctgtagtcccagcactttgggaggccgaggcgggcggatcacgatgtcaggagttggagaccattctggctaacacggtgaaaccctgtctctaataaaaatacaaaaaaattagccgggygtggtggcaggcgcctgtagtcccagctactcgggaggctgaggcaggagaatggcgtgaacccaggaggcagagcttgcagtgagccaagatcgtgccactgcactccagcctgggtgacagagtgagactccgtctcaaaaaaaaaaaaagaaaaaagaaaattcatatcaaaaattagcaatcaatgagtca

SEQ ID NO: 805375 - DNA, 562 bp, Homo sapiens
atcccagatgactctgttgcctatgaactctcaatcacattttgagaaacactattttagggaaagtaataaatgacgatagtttgcctgccttagtttgtggcttatgcaagaagacagatcacacatattcttgaggttaacatatggaccaattcagttcaccagtgtgaggccccaccacatctaatatgcaagccaaatccttagttaaaatctgtacttgtcttgaasgtcatccttggtcagctctggggtggacagctcacaggagccaccttttccacttactcattgtaaagtattaagaactagaaggtcaatatcagggtgcagtatttggaaaggaacaatgaggcacactttgggtgtaaagaagatgataaactcttagcaataattgagtagttaacattttttctggattgtcccctgggtctttagtttcttttagtctttagttataataacaataatgaacaactatgtacaaaactatgggatctgtatgctcttaaagttttattcttcttctctacatttcttaagctcatttcgatca

SEQ ID NO: 805376 - DNA, 688 bp, Homo sapiens
aatgcataagaaaattcattaatattatagaaaatgtttcttgatgtgtgattgaaatttatttctaatttgtacatcaattaaataatactttttaacagcttaattccttctggttgaatgtgtgtatagatacgaaactaaataaataggtaagtaaatacatctgattttcactttagataaattcacacattttaggtaaatttaatttttaaattagatttgttttctttaatatgatagaaactgtcattaagacacgtaattcrttatcataagaagtataattataggtttctcagtttgtttgggctgccgtaagaaaattctgggttacttataaaaaacagaaatttatttctcacagttctggaggttgatgggtgtctggtgagggcctgcttcttcatacaccacacattctccatgaacctccatatactagaaagggctagcttgctctctgggcccctttttataagagcactaatcacattcatgagggcagagaccttgtgacataatcatctttgaggggacccaccttctaatactatcacattggggattaggtttcaatggaaaaatattgaggggatacatttagaccacgccattcataaacacatagaagaaaagtaccatctgcttatttttatgtatttatactatctctaccgtgtga

SEQ ID NO: 805377 - DNA, 688 bp, Homo sapiens
aatgcataagaaaattcattaatattatagaaaatgtttcttgatgtgtgattgaaatttatttctaatttgtacatcaattaaataatactttttaacagcttaattccttctggttgaatgtgtgtatagatacgaaactaaataaataggtaagtaaatacatctgattttcactttagataaattcacacattttaggtaaatttaatttttaaattagatttgttttctttaatatgatagaaactgtcattaagacacgtaattcattatcatamgaagtataattataggtttctcagtttgtttgggctgccgtaagaaaattctgggttacttataaaaaacagaaatttatttctcacagttctggaggttgatgggtgtctggtgagggcctgcttcttcatacaccacacattctccatgaacctccatatactagaaagggctagcttgctctctgggcccctttttataagagcactaatcacattcatgagggcagagaccttgtgacataatcatctttgaggggacccaccttctaatactatcacattggggattaggtttcaatggaaaaatattgaggggatacatttagaccacgccattcataaacacatagaagaaaagtaccatctgcttatttttatgtatttatactatctctaccgtgtga

SEQ ID NO: 805378 - DNA, 553 bp, Homo sapiens
ctttgctgcgttgtggtgggttccacacccagttcaaacttcccactggctttgtttacactctgaggagaaaattgcctactcaagcctcagtaatggtggatgccccttccctcaccaagctggagagtcccaggttgacttcagagtgctgtgctggcagcgagaatttcaagccggtggatcttagcttgttgggctctgtatgtgtgggatctgctgagcaaggtgactcagctcccaggcttcagctccctttccaggggagtgaatggttctgtcttgctggtgttccaggcaccactggggtatgaaaaaactcctgtagctagcttggtgtctgctcagatggccacccagttttgtgctttatacccagggccctggtggtgtaggcaccygagggaatctcctgatctgtgggttgtgaagaccgttggataagcatagtacctgggtcagacagcaccatccctcatggcacagtccctcagggcttccctttgctagtggagggagttccccaatgccttgcgcttccggggtaaggtaa

SEQ ID NO: 805379 - DNA, 615 bp, Homo sapiens
gggtattgattttggacagatgcttttttgaattgattggatgctcagatggtgtttttattaatgtggtgaattacactgattttaaaatgttaggccaaccttgtgttcttgggataaactccacttggttatgatgtattatccttttttatatattgctggattagatttgttaatattacactargcatttgttgcctgtgtttatgaggtctacaggtcagttacattcttttctggtaatgtctttatcaagttgctgtgtcaaaattgtgctaacttcataagattactcatgcgctgcataacgatgtttgggtcaacaatgggctgcatatatgacagtggtctcgtaagattataatggagctgaaaaattcccattgcctagtgacatcatagctgtcatgacatggtagcgcaacacattcctcacgtgtttgtgatgatgctggtataaatatacctactgtgctgccagtcatgtgaaagtatatcatatatattaatagttatatatacataatacttgataataaaaatgactatgctactataattactgcactatactttttatcattttagagggtagtctttctacttataaaa

SEQ ID NO: 805380 - DNA, 594 bp, Homo sapiens
gttgagtttattggcataaacccgttcattatataactttattcttcgagtttgtagaacctgtactcgatacagatttctttactgtttcattcctgattgataatttatatttttctgttttcaaaatgggttttataaaaggcttattaataaaattaatctcccaaaaataacaactttggctttgttaattttctcttattttttatctcactgatttctgctcttatctttattgtttccttttactttgggtttaattgttctttttctagttcaaggtagaaaggaaagttggtatttaaagttatataggacataaggtacttgatggcaaagattatgtcttgtatatatttgtttctctaacattcagtaggcctttgataaattacttgttggttkcatgaggagtgtgatggagtatccattcatccagaggagctaaataatgtcatgatggagtctaggattttttttattattattatgtcattagaatcaccttaaaaggatatctctgcctttgctcatattgttctttctctttaaaatatgtttcccctttctacatgatgaacttctacttag

SEQ ID NO: 805381 - DNA, 552 bp, Homo sapiens
tttctcgagctcaggagtttgagaccaacctgggcaacctgatgaaatcctgtctctacaaaaaataacaaaaattagctgggcatggtggcacacacctgtggtcccagctactcaggtggctgaggtgggaggattgtctgagcctgggaagtcaaggctgcagtgagctgagatcgcaccactgcactccagcctgggtgccagagcgagaccctgtctcaaacaaacaaacaaacaaamaaaaaaaaccattctcactgccgcgtggaggatggatttagggggggaaacaggaagacctgttaggaggcttgtgtggcagcccaggaaagagatgacagatgatggtggcttggattagggggagcagtgatggtggagagaagtggagggattgagggtatattttgcagataccagcaaaagtcctctgggttgaggaaactgtatgtgaactctgtgaaaggagaaatgaattaactccaatggctcaaaaaacttggactttgtcaactggaccacatgatatgtctggaattttctgttatg

SEQ ID NO: 805382 - DNA, 465 bp, Homo sapiens
cagaagtatagttttataagcatctgtgctgtgctgtcagtggtgtagcatgtttgccattttattgtgtagctaagcagaacatgtgctttatctttgggatgctgaaggagatgaatggacttcaaaaataccttcaatttttggacctgcatatttagctgtttttgttgtttccttctggagtttcatatatattaggttggyacaaaagtaatggcagtttttgccaaagtattgcaaaaaccacagtaacttttgcaccaacctaatacttaacatcataatattcagtggtgaggatcttattttactgccattcccattccttttcatttagaaacagaataaagttgtatttcaaatacctaagagagatacacacacacatagtgtggtccataacataagtagaaataaaatacttgacaaaactagcacaaaggatgaggagggagtatggaa

SEQ ID NO: 805383 - DNA, 622 bp, Homo sapiens
ccagtcctgcatggttggtaagctgcatctctctttagaatatggggccacttgtttcacatctcagctttggtcatgaggagaaattctcaaacagaaaaatttcagcttaactttctgctattcactcattcattcatattattcagcaaacatttatccaatgtgtactatatgcccaggactatgccaaggtgcacccagtaagaagcaaaactgacacagactctgccctttcctagatatgctgggtgaatcyaccaactgctggctgcttgaaacctttcaagaacatctaaatttgatgaactcaacctcctatcaactggaactgttactctgtcactggtgcatgactacaaagatagttctgacttcatgtttataataatgatccccaatgctgcaagatcctgaagtgcctttgcgtcatcaccaataacttactcatcagaattgctttcgtgttgagtagattttgctgatatctgattgttcagcaagtacaaacttaattaagcttctattttagtactagatacatgctctaagatcaagacagaattccctataaacagaatatttgctagatcatatcccattatttgagcaaactggatcc

SEQ ID NO: 805384 - DNA, 622 bp, Homo sapiens
ccagtcctgcatggttggtaagctgcatctctctttagaatatggggccacttgtttcacatctcagctttggtcatgaggagaaattctcaaacagaaaaatttcagcttaactttctgctattcactcattcattcatattattcagcaaacatttatccaatgtgtactatatgcccaggactatgccaaggtgcacccagtaagaagcaaaactgacacagactctgccctttcctagatatgctgggtgaatccaccaactgctggctgcttgaaacctttcaagaacatctaaatttgatgaactcaacctcctatcaactggaactgttactctgtcactggtgcatgactacaaagatagttctgacttcatgtttataataatgatccccaatgctgcaagatcctgaagtgcctttgmgtcatcaccaataacttactcatcagaattgctttcgtgttgagtagattttgctgatatctgattgttcagcaagtacaaacttaattaagcttctattttagtactagatacatgctctaagatcaagacagaattccctataaacagaatatttgctagatcatatcccattatttgagcaaactggatcc

SEQ ID NO: 805385 - DNA, 627 bp, Homo sapiens
tgtacaataatgtaaaatctgcacaatgttatgatcatatattaatattcactaaatcaatcatggaaatatttaataatacatgtgaactgacttagaagaattagaagtggggctttggggggaggatttttaaattgatatttgttaaactacaaattattatagatggtttttgccaacttgaaaaattaatcactcaggacctgaaagcttatctacttaaagtayacctgaaccataacacaatagtcctacagaaattctaactttacaaaattttccttccaagtagagcaaatccactcagctagaagtactgattaactgtttcctatgtgcaaagccctctgcttagatctctgggaaacacagaagaggaaacacaaagaggaataaaagaccgtcttcactctcaagcaagaagaaccactaatgtgagataaacatttactttaacaccaagcactgtgctaagtactcttgactgcattatctcaattaaccccacaacaattttgcaaggtggatagaatcttttaaaaaataataataataactagagatgaggtctcactatgttgtccaggctggtctcaaactcctgggctcaagctatcctccttg

SEQ ID NO: 805386 - DNA, 706 bp, Homo sapiens
ttagaatccagttttgctcaaagtaagtaataaggtgggcgaaaaacagaacagagctgagtttaaaccacacatctgcttgccagctacacagcctccatgctctcatttataggataggcgaagaaattcctaccttctagtgttgttgcaaacatgagaggctgcagaagagttcataatgcaagtgggtaaagcataagaggcactctataaatggcagcaattattattaatttggtttattaagagaaaccatagaatgtacacaccattaaccatctgtggtaggtgctctctgcctctcagtactgctcaggatttctgaggcctaattttctcctggcagcactaagggaaaccaaggagttaacaaggaggcctggaggctggcatggctgggactgttagttcctaatgaggggccggcccgaggaggaggcctagcagctgtgaggaggggcgctgagggtgtctcccrtggaggagacttgggctggaaactttgtttttcttatttctgaactcggttttacactcctgaggggagttcctagtgtctggacttggtctttgagccctggcgctggtggttccctgaggaaatgcctcgcggcttcttatggggcaatgttgttattgatgttgggccaaggtggttagaaaatgggatcctccaaatgggggccttgtggtttggccacac

SEQ ID NO: 805387 - DNA, 557 bp, Homo sapiens
gtatatataatttactaatatacgttaaagatactcagatcttcctggttatggttcacatatatgaaggggggagagagaggcctcctaaaccaggtgtccgaatattacaacatctagaaagactcttgaacttacacttcataaaagataaaaggagtgtttttttaaagagcaactgagctactaatgagaatttggcactatttatgtttttatgtayaaagaaccctaaaggacattcgatggattctggtatcggttgccagttcttcttcacttaggaactgatgctactaacccttagttggtggggctaagagaacagttctggcctagctcctgtctcctacaggtccttcaggagcaaaatgggcaaacaaaatgtggattatacatagagtgcaacactgggttattctccctcacccagcctactagtctgcccagaaaatccccatcctgcttctgttggattctttcctgtgtttcctttgccacttgctgaaagtacagtaccattctagcatcccaagttttacttgctgatttctgtt

SEQ ID NO: 805388 - DNA, 599 bp, Homo sapiens
gtagtctgtatgccaatatgtaaaagactgtctcctttcttagacacaggcagtataagccaaagcaaagtagatgagcaaagccacgtacccaccatccagatattagcaactggctgtttcacccacgcatttgctaaaacccaggattcacttgaaaacagtggccagtgacattgtctgtaactgtgtatattttagttttacagttacaaggaagcttatttcattaaacagctctttgctagggatggtgtgwacacatgcctggaaacataaaaattccagtcctaaaacaaagagttcttactttaaaagtaaggtcaggccattttaggtacattgttgttttcatccagacttgttcctagaagccattaatttaaaaaaaccacaagtctatatttcatttgagcctgttgatgccatatgtttcaagctgaagcttcaaaaccagtgctatctaatagaaacacgatgcgagccaattatgcacatcagaaacaaaaaagaaacagctgaaattaatgttatttaatctaatatatccaaatagtattatttaacatgttatcaatattttaaagttaatgcatttt

SEQ ID NO: 805389 - DNA, 438 bp, Homo sapiens
atattttctcccataaaacattaaaaaattaatatactaaaaagtttacaattataattaaattagatatcagtaacagaaaacagaaaattttgaattatttagaagttaagcaaaacatctaaatcactcatgattcagagaagcccacaaaaggaaatttaaagtattttgawatgaatacaaataaaatatagcatgtcaatatttatggaataaaactaatatagtgcttagagttaaattaaatgcttatattagaaaagaggaaagctctcaaataatcagactaactactgactctatgcaataagaaaaagagcaaattaaaccaaaagcaaaaggaaggaagatataataatgaaagtaaaagaagccaatttaattaaaaatagaaaagacagtaatgaaaattaatgaaagtaaaagcttctgttt

SEQ ID NO: 805390 - DNA, 614 bp, Homo sapiens
ttcatcatgaagggggtggtgaaatgtccatcactggatactttatagataatcaaataccctggctcatttataaataattgccttagggatgtgactggaattgattaaccctgatgaattcttgccactctgggctcatctatcttatcttcaggaatttgtagggtattaaggtatttaagggcagagtttgtttcttttcattaactgtcacatcagttaggaattgtgtttgattgcagggtggagagctgacttcagtggctcaaaagcacaagggtktgttttatttgctcttagaaaaaatactggcaggtagtaagaccaaggaatgtatggctatgttttggtcactggggacccaggaaacttgtggttttctgttccatttttactgcatatttttgttcttaagacagctttatagtccaagatggcttttggagctcaagccaatgtcccaggtagaaagatggagaaaagaagaaagaggcaaagggccatccctcctagctgagtcaatcctcttgaggatctttacccaaaacctaccttctgtttttgctttatttgttttttaatcttaccaaccttacttacctttaaggaaa

SEQ ID NO: 805391 - DNA, 618 bp, Homo sapiens
ggttcctggcagaactaacaagttgtattaggaacttccagtgctggacaaggtatttaatttctaggtaggtctccccttcccctcaattctcaatttcaatctctctctctctctggacaaggtattgaatttctaggtaggtctgccctcctcctcaattctcaatctctctctctctctctctctctctctctctctcacacacacacacacacacacacacacacacacacactcttcttccatcctttcagtcatgtatttgtgaataagagctattaggaaaaagtataggtatctagctcayttatacccttataatttagattttgagattctaattttctgatgactgtaaattgctatatgtttatccatgataaaacaatgaaagaatacccttttataagaaagatcacagaatatctaccacacataaaaatatttgatgtctttagattgaatgccttgtattgttaatctttaaatccagccacataggcaaaaagtactgtagttacaggcctactttagttgaatttctgagtataaggaccactttttaaggagtaaaataacaacccactgtggtcaactatattatggttcacccat

SEQ ID NO: 805392 - DNA, 544 bp, Homo sapiens
attctctcggggtcgggcctagtattaagaaaaaagaaaaaaccaaaaaccaaaaaatccaactttccaatgcaaatttttgcttgcattggattagcagattagtccagcatttctcctcctgtgtgtccaggargggaaatgctgggctaacctgctaacccaatgcaagcaaaggttttagtatttgatgatggtttaacagcctcctagataatttttgttttacaattgaaggcaaccggtagagctaggaaagggtgcttttgattagatgaaacttttacttggtgtttaaatcagagttggcagctgtctggacctcaatgtaactgtcctttctataaccagtcatgttaaaagattttgcaaacattacaacgaggaaggccaggtcacggtgcctttgcagccttgttatttttaagcagcaactttttaaattgatgaatttgagttgctcttgagaccttctgcgggttctggaaatgtcaccagggttgacaagcacaaggagttagttacagtggctttttgagaggcc

SEQ ID NO: 805393 - DNA, 533 bp, Homo sapiens
aatgtttttgtttttataaacatttcaaagaatttctttcagtggtgaacatccttgggtgtgtttatagtaatattgaaattaaaaagttctaatttaccctagcagttttaggcacataactgtagtgttatcacccataattcaaatgttcaaaggcagccaragttaatatttggggtcttttcttcccctatttttacgtaaagatttttgtgaagatgtatgtatcatttatgtgtgatacataactgtagtgttatgtaagagattttgaacatttatttgactgttgcatgtgcttggaggggagatatttagcctaattccaatatttgagatagggccttaaatactgcagttagagatccgagatgagtaatttggattatatggcaagtttgagaggagagatggactttaacgtgttgttatttaaaactttttaatattggggtgttgctctggctggggttcctttggctctcactcttttgcgttgttattgtatttttaaaggcagattgctgcac

SEQ ID NO: 805394 - DNA, 633 bp, Homo sapiens
aaatgttgaggtttacttgttacagcatccgatggtacctaaccaagcacactgctttttatctgctttacaaattggacttctatgtaagattccttttaaagaaagtgtatccctcaaaaagaatgaaataaacataacctttggaaacttttgacscagttaatctcttccctttacagataggaaccagttacaaagaagtgaggtgacttgtctaagaccacacagatagggagctgcagaggcaggtccagaactgaggacttcaggtgcttcaccctgtgccctaccctgaagccacttacctttaactttctctaagcaggaacagatggaagtgataaaaccagccacacttgatacagtttaagttggcctacatgtaggataggttgataaagtgtcttaagttcctcccctgaccccatcatctttcttcctcctgtttattgtgttgtatcttctgagtcactatttagggggaaggcattgcctcactcgtcaaagaccctgttaaaaaccaggttatttcctggggaaaatcatacttctacatgtgctacctggcagtacagatccctttaccacattggtcaggtacccctgaagaacagggagagcccaaaaatc

SEQ ID NO: 805395 - DNA, 633 bp, Homo sapiens
aaatgttgaggtttacttgttacagcatccgatggtacctaaccaagcacactgctttttatctgctttacaaattggacttctatgtaagattccttttaaagaaagtgtatccctcaaaaagaatgaaataaacataacctttggaaacttttgacccagttaatctcttccctttacagataggaaccagttacaaagaagtgaggtgacttgtcyaagaccacacagatagggagctgcagaggcaggtccagaactgaggacttcaggtgcttcaccctgtgccctaccctgaagccacttacctttaactttctctaagcaggaacagatggaagtgataaaaccagccacacttgatacagtttaagttggcctacatgtaggataggttgataaagtgtcttaagttcctcccctgaccccatcatctttcttcctcctgtttattgtgttgtatcttctgagtcactatttagggggaaggcattgcctcactcgtcaaagaccctgttaaaaaccaggttatttcctggggaaaatcatacttctacatgtgctacctggcagtacagatccctttaccacattggtcaggtacccctgaagaacagggagagcccaaaaatc

SEQ ID NO: 805396 - DNA, 633 bp, Homo sapiens
aaatgttgaggtttacttgttacagcatccgatggtacctaaccaagcacactgctttttatctgctttacaaattggacttctatgtaagattccttttaaagaaagtgtatccctcaaaaagaatgaaataaacataacctttggaaacttttgacccagttaatctcttccctttacagataggaaccagttacaaagaagtgaggtgacttgtctaagaccacacagatagggagctgcagaggcaggtccagaactgaggacttcaggtgcttcaccctgtgccctamcctgaagccacttacctttaactttctctaagcaggaacagatggaagtgataaaaccagccacacttgatacagtttaagttggcctacatgtaggataggttgataaagtgtcttaagttcctcccctgaccccatcatctttcttcctcctgtttattgtgttgtatcttctgagtcactatttagggggaaggcattgcctcactcgtcaaagaccctgttaaaaaccaggttatttcctggggaaaatcatacttctacatgtgctacctggcagtacagatccctttaccacattggtcaggtacccctgaagaacagggagagcccaaaaatc

SEQ ID NO: 805397 - DNA, 633 bp, Homo sapiens
aaatgttgaggtttacttgttacagcatccgatggtacctaaccaagcacactgctttttatctgctttacaaattggacttctatgtaagattccttttaaagaaagtgtatccctcaaaaagaatgaaataaacataacctttggaaacttttgacccagttaatctcttccctttacagataggaaccagttacaaagaagtgaggtgacttgtctaagaccacacagatagggagctgcagaggcaggtccagaactgaggacttcaggtgcttcaccctgtgccctaccctgaagccacttacctttaactttctctaagcaggaacagatggaagtgataaaaccagccacacttgatacagtttaasttggcctacatgtaggataggttgataaagtgtcttaagttcctcccctgaccccatcatctttcttcctcctgtttattgtgttgtatcttctgagtcactatttagggggaaggcattgcctcactcgtcaaagaccctgttaaaaaccaggttatttcctggggaaaatcatacttctacatgtgctacctggcagtacagatccctttaccacattggtcaggtacccctgaagaacagggagagcccaaaaatc

SEQ ID NO: 805398 - DNA, 566 bp, Homo sapiens
ttctggcggttgatatttgaggcttgttctcatcccaggaatgatgtttttagctatctcctttcctagttctctttgataaactagctggtctgcaggttagcttttgctcttctatagttatccacctcctctcaattgtttaccatcaaaatctccattgtttttgagagcacccttaaacttgaacttttacacactctattacaaataaagtcagctccyttgggggagagcttcagagctctctgttcttatggacggcctctccatctgggaaaaatttctgaataactgctttaggcatgaggcagtgatagtagactctagtcttctcaaattgccttccctggcatagaacctctactctaaaagcaagctgcattgagggcaatacgagccctggtatttttgatctgctgtgcttagagtagagtctctgccttatgaatggaggatagatagaacaagggagtctccaacctcttgggtgcactcactaaccttagagctgaagaaaggctggtgtcctacctttccaaggagataattatattccttgactg

SEQ ID NO: 805399 - DNA, 574 bp, Homo sapiens
ggaggagcttttatcaaactgagctgagggttaaggaggaactggatcttaattcaagtgctccagatcctcagtgttctttcagagttttagtatattttcttgaatgaatgtttctgcattgtctatatgcccttagaaggattattagggactttatatatatgattttaaaaagtattttcacaagttatacttaagtcattggggaacaggtccatggagcttttcaaagtgccacttcaaaagtagaacctcagttttaacataaacatatatatgccgagtcattaagtagtgttgcatgtaagttttgatatatttttgtcattcagttcaaaatgtttataggttgcagtgtacaggcatttctcagagrtattgcaggtttgattccagcccactgcaataaagtgaaagtgaacattgcaataaagtgagtcacacaaatgttttggtttctcggtacatataaaagttatgtttatactatacagtaatctattaagtgtgaaatggcattatgtttttaaaagcattatattttattataattatttatatataattaggt

SEQ ID NO: 805400 - DNA, 602 bp, Homo sapiens
tatctccatagacaatggagccactagcggtacatttatactcatcaatgaggccacttctgatctgattttctgacatttgtcttgatttaaaaaaaaaaaaggtgggggaagggagatggacaaaaacttaatctctggcaggtcccgtctgatgacagctcagcacacagtgtgtgtttaggaattgttctgcttcttattctccccacatcagtcatgattccagaacttgaagtggttcaaagtgagctcatagtagcatttaacctgttgagaatctcttgtcaccactatatgttttcactggtaaaagagtcatctgatttactgtgtgtccccacattcmcaatgcatacatattcacacaggacatggaagccaaaagtaaatggttagtcacaaaaggtttgttttctcctattttgctgtttacaaaggagtgttatcttatgttggaaaggatttcagccaagaacagcagtgaggctgtaggagcaatgttacaatgtatttccctggctttttaaaacctattccctggtttctgcctgcaagccttaggatgtgagatgcgggctggaaaagctgctggagggtaa

SEQ ID NO: 805401 - DNA, 668 bp, Homo sapiens
ctctgcagtttatataatactgcttccttagtcatgtgctcttaaatgtaactcttaattataagattgggtctttaacagaataggagcttcttgataatatcaattggctagcatgagcactaggatgtcttatggaaaaagtaggtgacaaccaataacaacccattaacagactagcatctctaatgaccctagtaacaaaagaatggtatttaaactgtttaaaattttattgtggaaatatacatataacacgaagtttaccattttaagaaagtgtacagttcagtggcattaagtacattcacaatgttgygcaactgtcaccactatctagttccaaaactccttcatcatctcaaacagaaactctataaccattaagcaataattctcccgttccacactctcccagacctggtaacttctattctactttctgtctctatgaatttgtcttttctagctatctcatataagtggagtcatactatattgtcttttggagtctggcttctttcatttagcatagtgtttttaaggttcatcgatgttgtagcattcatcaaaatttcattcgtctttatggctgaataatattctattatgtgtgtataccacggtttgtttattcattcatccactgatggacatttagattattt

SEQ ID NO: 805402 - DNA, 623 bp, Homo sapiens
tcctttaagagcccacttcccctatagaagcagagctctttctgtcgatttgggagagatcatgttaaacattgcaaagaggacccaatgttcctagttataaccctgagttctggttattcaaatgaaagggtatctcaaaatcagacccagattcagcatgtcacctacacamacctgtataactcatatacaatgtgagcctcctctcgctgaaccaactgtagatccatatgcacatgcagtgtgcagcatttgtctgaacacggggtaaccttggataccaagaaaaccaacttccttggtctagttgctaagacaacaggacagaggtgggtacgggggagcccagcatagctatctacaggctgtgctgttggcagggggacatggggaggggagaatgggagggctttgggccgcccacctctccaagcctggactccaaaggctgcagggacagtgcaatattcttgtgtcaccaaataccaaggaacctctaagtgggaccctatgatgcagtcctagagggatgcaggaccaacagaactgcctggaggtggggattggggaccagatgcaggcagacataaagtgaaggagagggatgctccagagttgag

SEQ ID NO: 805403 - DNA, 499 bp, Homo sapiens
actataattatgagaagtctttacaaggaaaattgttttgttacattgcaaaactggaagcattgaatacaaattatatagtagtcattcaactatataaaaacctatgtaaaaaaaataacaaaaaataaaaaaagttttaaaacacgaacctatgtagaaatagcacataaactttctcraccttttaaaaatcagattttcagattagataaaaataaaagactaattcttcaggtatgaggtgcaaataaaaaataacatactagtttaaagttaacagatggtttgaaacatattaggcaaacaaaataaatgtcaagacattaataaaaaagagaattcaaggaagaaagcactaaatggggaaaagagatacacacacacacgtatgtgtgagtagggggcataatacattataaaaagcagtaacaattataaaggtctgtgtatcaaattacacagcaccaaaatatagaaagcaaagattattaaaata

SEQ ID NO: 805404 - DNA, 499 bp, Homo sapiens
actataattatgagaagtctttacaaggaaaattgttttgttacattgcaaaactggaagcattgaatacaaattatatagtagtcattcaactatataaaaacctatgtaaaaaaaataacaaaaaataaaaaaagttttaaaacacgaacctatgtagaaatagcacataaactttctcaaccttttaaaaatcagattttcmgattagataaaaataaaagactaattcttcaggtatgaggtgcaaataaaaaataacatactagtttaaagttaacagatggtttgaaacatattaggcaaacaaaataaatgtcaagacattaataaaaaagagaattcaaggaagaaagcactaaatggggaaaagagatacacacacacacgtatgtgtgagtagggggcataatacattataaaaagcagtaacaattataaaggtctgtgtatcaaattacacagcaccaaaatatagaaagcaaagattattaaaata

SEQ ID NO: 805405 - DNA, 521 bp, Homo sapiens
tttttttctttctaattgatactagtaatccatagtggcatcatctttcaagttcaaaagatgacaatatgtgaaaagaaaaaaagtggtagaagtgagcattaattattcatatagcagatagtcttgaaggagcagagyataaatagaaaaaagaaaaatcaaagagatgttcttcagagttttctatgttccaacaggttttgtgtgtaaggggccacttgtatccaatgattatacccgtagaaaaatagagtaccctttgctcttattggaagataatggtgctgagaaacctagtttggtgatcaagacctgttcgcacaacctactaaatatgtatcccttaactctttgcaatttctaattataaggcaacaatgaatgatgtaaggaaggttagtgtgacataacttaagagtcttttccttactttaacttgtattaggtattaccttaagccagcagtccccaatcgttttggcaccaggcaccggtttcgtggaagacaagttttccac

SEQ ID NO: 805406 - DNA, 607 bp, Homo sapiens
cccacagtatacaagtcagctcagtgtggtttgggagtcattgagctttataagtgaatctatatgttaacagagatgtatggcaaagctatggtgtctagtagaaagagcatttgttttccagtcagtatctaggtttaagacccattttacctttacttgcgtgtacaaccctaattaagcaagtcactccttgctcaaccatagttttcttgtccacaaaatgaaaatgagaattcctacttcagattgctgttaaaaggataagagaaataatatcaaaacagcacttagaatactgtcttgcacatagtaggtatttaataatatgtcattagtttaatcatcaaatatcaaagtggctatagatttctgctatggggtatcamaagaactgtgttgctatgggaaatactaagagtagtacagatcatgcttaagttactgtgatgcttgtcaatgagataaaaaacagaaacacacaaatgataacaatattgtataaaagttatttaagtaatataaatatatatcatgagacagtatgtgaccaactgctagagtaaggatataactaaaaaatgcagtagacaaatgagaaggaata

SEQ ID NO: 805407 - DNA, 472 bp, Homo sapiens
gctcattattatgtaaaatgctaataaggatttgggtcacatgaagtgtgggaatcaatacattttatatctggcttgagattattacagtgaccttcggcacattaaaggctttaagtagtcctgcaagaaagatagttgtatactctagcttttttcacacatacatgcactacatggaagcttttgggaaaaatttcacatgaatattaaacaagtttaattttgaraaaactctactgtatttaattttctttgtgcagtctcttgagaagattcagttatttatattccagaaataattcaaattagtgtatatatttgaatatgagtaaaagtaaaaagttgaccttttcattgttttccacttcttttctttgtgaatagataccgttctcatggcctaaattaaattgttggacctaagataattattctctcaggttttgttagttaataggcacatggttaa

SEQ ID NO: 805408 - DNA, 544 bp, Homo sapiens
ccccaaagcttttcttcataagttctacccattttggtaattgatgctataattctctccagtttttcaagccaaaaatgtaccacacactatcagttctattccaaaaatatattccaaatctgctgcttctcttcaactccactgccattcccctagtccaagtcatgtcatctctggcctgtattaccaaagaacttcagaaggaaattgtccataaaaatatttacctgtaaattatagagaatcacttcttaggcttttggstaagatcaaatctagtaaattacagagagttcaacctgaaacattcctgttatttttatgttagatacattctgatcttgcagaagaaagaggactcaaaattacttacaaatacactggaaaagggattacagagccaccttttggtatatttgtctttaacaaagatactggagaactgaatgttaccagcattcttgatcgagaagaaacaccattttttctggtaagaagaataattttagatttattagtttgtagtttttctgtcataata

SEQ ID NO: 805409 - DNA, 632 bp, Homo sapiens
agccacagtggtatctcaggaaggcaggccaaggccccacttctcttctcttcgctcatcttccaacatgaagcccaaggtgcgggagcctgaggatgtatccaaggggagctctaagtgaggaaggaaaggtcaagagtggatatggaggggaaatgggaggtatgcagcacaatacttttcaaaacatggggatatagacacacttaggttcccaagaaactgccacgaagagatgcctttgagtaagaaccatgagaattagggcctttgcagtatgggatggaaggaaatcacactttctctgcattctcttttttactgttgcaagtttttaaatcttttgcatgcattattcttttgataaaaaaaatagctggtggcagaatttcttttagaagggaaactctttggtttaacaaagcatcttgatagtcatcttagctgaagaaagggargtctgaaaagcaaaggagcaaggaaaagagggggaaaaaacaattctttcttcataagaatgggcagaaagtggggaaaagtgaaaaatttgaggagagatacaagggctcagaaaatgtggggtagctggggtctgaggagaaaaaaaaatacaagaatgacacagatttcta

SEQ ID NO: 805410 - DNA, 595 bp, Homo sapiens
catgtgaatccacaatcatctcaattaaaaatttattttaaaaagaggttaatggtcctgtatgaaagatgaccaactccacttacagtaagagagatgcagatttgaattacttgcaagtatcaattctgacctgtcagattggcaaaaatccaaatgtttcatgaacactgttgatgaggctgtggagagtctggtattgtcatacattgctggtcatacattgcctggtatcgwcaccacctctgtggagggaaagttggcaacatccaacaaaattactaaagcatttaccttttgtcccagaaatcttctttcaggcatgtaccctaaagaaacatctctatagatatgaaacaacaaatgttcaagttgatggacgcattgtttagcaaaagattggaagcacctgaatgtttatccagcgaggactggttgaataaactctgtttacccacacagtggagcactttgaagccatgtagggggctgaggggcattaaagttttcaacacacacacgcattgacctttctgtccgcagcctgaagggcttcattgcttctaagtgaaaagaatatggcattaattttata

SEQ ID NO: 805411 - DNA, 516 bp, Homo sapiens
tttccaaggacccaggaggatggtttcgggaggaaaccattccacctcagatcatcaggcattagattctcataaggagcatacaacctagatccctcacatgtgcagtttacaatagggtttgtgttcctctgaaaatctaatgccattcgctgatccgacaggaggtggagctcaagcagtaatgatcgctcacctcctgctgtgcggcccagtttttaacaggccatggacctatactggtttgtgrcccaggggttggggaaccctggattagagcattcttttgtgttttaaaattgaactcacataacccattttcatattttatttctctatattttcatttccatatatggcattgtagagttcactatgctggatataatgtaaccagaccagagggagacttaggaaaatacaagtcaattcctcatcaccatagaggtgaagtccagtttttaggacggtaagttgaatgtcatcttcagataccaaggtttccaaagctgttga

SEQ ID NO: 805412 - DNA, 654 bp, Homo sapiens
tatggcaatattgataacacaaatgaccacaaactaaatcataaaataattgaatccttacactttgagaaaatggatagcttctgtgttatgataccaaacaaaatattttcatatttatttcttagaactatttccaaaatatttatatttcagtttttttatggtactcgaaaaatcaaaccttctgaaaattatgatatttgtacttcatttgtgtattagttcattttctgtttctattacatagtttttaaagtcaatgaaagagattgagaatgttaacatttgttgatcaatgtggagctgtccacattcggtatcttttcatttttatatatattttacagtttcaagaaaacttagtactactagtatctgccttattttcttaagtytgatgttaatttttgtttcaggagtgagatataaacattttgctttttttcagttttgaaatatagtttgtcatcctgtgaaaaccacctcgtttgctttttgtttgtttgttttgcttttttagtgtagacctaaaattatttttgcctataaacagtgaacttaatatgtttctgtgagagtgacagagctgtgcccgtttatcttcattgtattaattattacataaagattaacaaatacattgcaaatgca

SEQ ID NO: 805413 - DNA, 667 bp, Homo sapiens
catttccaaacataaaagcttccagtggcttcctctcacactcaggataaaacccaaagtcctctccctgactgggtactggcctatccctgtgacatcatcgtcactgattcaccaccgcatggcctgggcgttccttttgcagggctctgcctgactggcttcctcataccattcacgtctctgtgcagatgcagccccttctgagagttttcccacacttccaagtcactctctactatcctgaccctgctttaattttttttattgctcttatcaaaacctggtctgtctttgtctccccagtatgtaagcatccaacagggtaagaatattgtgttacttaacatatcctacaagctcaggaaattgagggtatgaattaattcaaacttgcagaaattttaagataaggaccatgcaaaacttagaattgaggaaatgtctcataaattctgtttattgaatgccagtcactgcaatagttacatttcatatatttctttaatttgcacatcagccctgcaaaatggatgtatcctagttaggtggctttcagatgcaagtaacaaaaccyaactaaaactaggttaaagaaaagaatgttgaatatcaatcgtaagaaaaagtttagagagagagttggtccaaatttgaacgattctgt

SEQ ID NO: 805414 - DNA, 635 bp, Homo sapiens
tgtttgcagacagcactagcttaggaaggctggtgcaaaagcaatgatcaacacaggtttccacaggcagatgagttacccagatagtgacttggtgttgccgtgtcatagtcacttataaattcagtagaggagcttgttcattgtgctctcaattcaaagaatttaaactataaggtcactctgaaaatgagtgctgattcttccagagaagtaaaccatgtcattagctgcttgtgtagtcaatacaattcctttggaacacaattcagcttctgttcttttaatgcatattcatgccaacactataattcttcagttgggataaatgttcacacaagaaaacaaaattaatttatccatagctttatctgagtcatgtataacctcatttggccttctctccactgcttagttctgagaactgctccaaagtcatcctgaagatcaagtgtgattgctgctkattggggttagcagttttcctaatagcacagttgcagtcagcccactgcatttgcaatctcttacctccatccctgtggtgccatggggctgaagccagttcctgagatgggtaagctgcccaccatgcattatgcccatcccctagagtccttccttcactgctcacc

SEQ ID NO: 805415 - DNA, 498 bp, Homo sapiens
ctgtggcctcctctagcgatattgccagtacatggtcagaactaaagagaataataggtttctagagttgagaggaaaagtgaggcaggaatagcagtcatgaaaatgaagcctccctggtggtcactgacaacatcttcagagtggcaggcagcagtctgctagctgctccggtagaactgtgtgcagcggtggaaatgttttctgtctgccctgtccaaatgggtagcccttagcacatgtggctgtkgagcaactggattattcatttcaaataattgcggttaaaatccaaatagccacaagtagctaccatattagaaagtgctggttcagattgagccaagagaagaaggaagccagcagggagattaatgaactataaggaaatcctgccatttgcagcaaaacaacatggctggaagtggaggtcattatgttaactgaataagccaggcacagaaatacaaatacaacatcttctcacttatatgtggg

SEQ ID NO: 805416 - DNA, 669 bp, Homo sapiens
agtttacaataacctattatacatatcaaagcagctagaagagaattatttaaatgtttctagcataatgaaaagacaagtatttaaggtaattgacatcccaagtatactaattatctttacaaattatatgaatgtattaaattatcacatgtattccaaaactatgcacatctttaatgcatcaatttttaaaattattattttacagtgcaaaatattcagaaagcaagatgggagttttktgggcaaatttaagagtaagcataactgtatttagaacagtactaggtcatgatgaagtcccaagtgtgacagtgcctatgaagaaccaaagaaaagagttggtgggactgagaatgctgaggaaccgagaagtcagaacatgggctgtccgtgtgtgtgtggtgtgtgtttttttgtgtgtgtataatgcacacacatccatagggatggtgggagttagctgggtgtggggtacattacatactggtggcctcgaggaaaagtaagcaggtcctggagaacacaagataaaaaccataggatgcggagtaaaggatgagagaatgtctaagatttcacaaggcagattattttgtttgttttttaagatactgttttctggaggagtcagtatggatccaggagaatatagatttctcctcg

SEQ ID NO: 805417 - DNA, 669 bp, Homo sapiens
agtttacaataacctattatacatatcaaagcagctagaagagaattatttaaatgtttctagcataatgaaaagacaagtatttaaggtaattgacatcccaagtatactaattatctttacaaattatatgaatgtattaaattatcacatgtattccaaaactatgcacatctttaatgcatcaatttttaaaattattattttacagtgcaaaatattcagaaagcaagatgggagttttgtgggcaaatttaagagtaagcataactgtatttagaacagtactaggtcatgatgaagtcccaagtgtgacagtgcctatgaagaaccaaagaaaagagttggtgggactgagratgctgaggaaccgagaagtcagaacatgggctgtccgtgtgtgtgtggtgtgtgtttttttgtgtgtgtataatgcacacacatccatagggatggtgggagttagctgggtgtggggtacattacatactggtggcctcgaggaaaagtaagcaggtcctggagaacacaagataaaaaccataggatgcggagtaaaggatgagagaatgtctaagatttcacaaggcagattattttgtttgttttttaagatactgttttctggaggagtcagtatggatccaggagaatatagatttctcctcg

SEQ ID NO: 805418 - DNA, 466 bp, Homo sapiens
aattctttggggcatatacctaggagtagaattgctagatcatacggcttatgccttcttattgtttgtcaatgtccaaactgacttgtctgtctcaaggtccccaccttgattcagatgaactcaatactcattgagtgtctgctgtgtcatgcaatgcctgctctctctaatcctaggggcaaccctatctgatcagttttattctcattaccgatgacaaagctgaggttcagayagatcaagtcttgggtcaaccaaatgaaagatgccagaaactcagatgccaattcctggattttttcaccacacacacatggctttcccacatgggtagggcacccagtgcctggatgtcctagcttcgtggtgcttttctgcagaactcaaaatacctacatattataaatttagatcaattccatgtgaaaatggtattctctagagtctactatagataagtggt

SEQ ID NO: 805419 - DNA, 323 bp, Homo sapiens
atttagctccagagagtgtatcattttaaaatatactcaccaccacatgcacaatcttctatttcaactatacctgaataggaaatgcctaaagccccttgatttggggtttagctgtgtgaaagaggaaggacggggatatgaatatgttttgstgatttgtgaccatcttcataaaattatgtcttgtatttgtgtttaagatataataattctcagaacactgaatttccaccgcttgactttacccaagatggttcgttgttttgtggggttttgggtgtttttttcctgctgtagacaggtgatttaaactgtgaggc

SEQ ID NO: 805420 - DNA, 466 bp, Homo sapiens; identical to SEQ ID NO: 805418

SEQ ID NO: 805421 - DNA, 555 bp, Homo sapiens
ggcactttcctcccagtctgcccctctgggatcccagggctgctgattacacagaccagagcccaacctgctgtcccctccaaggccccctgggaggacacacagccacacccatggagcctggttattcaaaccatgatgaatccatttcctgcacatggtagccaaatcctgccctgaaacctcacttcctatctaagtgccctactgaatcctcactggggagtctgagtggttggtgcccttccctgctcaccaaggtggttctyttcaccatccctactttaagcaattattctaaagaagagaagttaggcatttcctgtatgaatggctggggactgaacagtggaagctacaagtggctcagacgttagcttgatatcactgaaacaatgtcgaatagatgaaaacagctgactcatgcgtggagtgagcctccagtcagcagaggcattcaaaccagggttgcctgtgagatgctgccagtagcttgtgcctggtaggattagagcccttgcatcttctctgtgtctgtgattcactgtcattgtc

SEQ ID NO: 805422 - DNA, 654 bp, Homo sapiens
actctcagacttaggagctgtggctgggactcaacaaagggcagctgtgaaattctgagaagagccaaggggaaaggagccgagaactgggtcttcccaactctgcctccaattctaggaaacgggaagaatcataaagtgaagtgtgatgaggccttcagatttgccaracttgtatggaatctccaggcttcctcctctcacatcctcctgcaccgcgcccccccccggcaccaaccaaagggggaaaaaaaaaaaaaaccttcttgatttttccatgtgtgtagtcagggtagctgagaaacagcagattcttacgttcctggaaagttgggtgcttggtcccttgcagtcctttgaaagatatggttcagggtcttcctaagagaaagacagtagcctcaactcaaagaaggaggcttcctgaaggatgggtaccttgctcataattcctatcatggatatagaattttaataaataatcctgcttactaataagaacaaaggagccacttgtcttccccagcccatcagtctaagagcaggagaccctggcatgggagagaggagggcggtgaggtgggaaagaggaaaggtagacagagctagcatccagtgattcagagctattccaaattccactttctgccttcc

SEQ ID NO: 805423 - DNA, 654 bp, Homo sapiens
actctcagacttaggagctgtggctgggactcaacaaagggcagctgtgaaattctgagaagagccaaggggaaaggagccgagaactgggtcttcccaactctgcctccaattctaggaaacgggaagaatcataaagtgaagtgtgatgaggccttcagatttgccagacttgtatggaatctccaggcttcctcctctcacatcctcctgcaccscgcccccccccggcaccaaccaaagggggaaaaaaaaaaaaaaccttcttgatttttccatgtgtgtagtcagggtagctgagaaacagcagattcttacgttcctggaaagttgggtgcttggtcccttgcagtcctttgaaagatatggttcagggtcttcctaagagaaagacagtagcctcaactcaaagaaggaggcttcctgaaggatgggtaccttgctcataattcctatcatggatatagaattttaataaataatcctgcttactaataagaacaaaggagccacttgtcttccccagcccatcagtctaagagcaggagaccctggcatgggagagaggagggcggtgaggtgggaaagaggaaaggtagacagagctagcatccagtgattcagagctattccaaattccactttctgccttcc

SEQ ID NO: 805424 - DNA, 654 bp, Homo sapiens
actctcagacttaggagctgtggctgggactcaacaaagggcagctgtgaaattctgagaagagccaaggggaaaggagccgagaactgggtcttcccaactctgcctccaattctaggaaacgggaagaatcataaagtgaagtgtgatgaggccttcagatttgccagacttgtatggaatctccaggcttcctcctctcacatcctcctgcaccgcgcccccccccggcaccaaccaaagggggaaaaaaaaaaaaaaccttcttgatttttccatgtgtgtagtcagggtagctgaraaacagcagattcttacgttcctggaaagttgggtgcttggtcccttgcagtcctttgaaagatatggttcagggtcttcctaagagaaagacagtagcctcaactcaaagaaggaggcttcctgaaggatgggtaccttgctcataattcctatcatggatatagaattttaataaataatcctgcttactaataagaacaaaggagccacttgtcttccccagcccatcagtctaagagcaggagaccctggcatgggagagaggagggcggtgaggtgggaaagaggaaaggtagacagagctagcatccagtgattcagagctattccaaattccactttctgccttcc

SEQ ID NO: 805425 - DNA, 540 bp, Homo sapiens
atggacatgttaccatcaaggcctgcctgattaggggacctttggtccccaagagagttggttctctgttaggtgctgggggtagcacctccattccccagagaggacatcagccagggagggagaggcttctctgccaagtctgccagggacagtgcctggaggggaaacaggctcattggtggtgagggacagtggccactgggatcagaccaggayatagccccagccccagcccttgccctggaatcaatgtagtcccaactctggctatgggcctttccccccagtagcactggacaggttccacaggttccagctggacctgcccccaagcacaggtcctggccatggggaggatgatacgggggaagggtaaagtggacaaagaactgggcagggggaagaatatcgggacactggtcttctgtctgccacggacactctaggtgactgagggtaagtcatgtctcctctatcagcctcagtttccccttatgtaaaaagagagcattgacctgggtgcctgccttgccagac

SEQ ID NO: 805426 - DNA, 558 bp, Homo sapiens
tgaggatgggacaaatcagtcacaccatcttcagggctgcacaaaacttaaggatacaaacatgacctgtaccataaagtaagtcagatggtggttcttctaaattagaatcttcttggataagtcagcaatagtttgcctgtattcaaaatggaaaatctgagggtttctgatttaatcctgaaactgagtgtaattacttaaaatttggaaataaaatgtagatattcccctatattaaagcattaaggcttttatatctgtttcatgacattttcaagatcagaaacactgagtggaacttttgacatgatctgtttctgcaatttcagggaaattaccaaagtatcacaagggacatgaatgggtagtggtttcaagtctacttgagtcagatrtgaagtgctaggcattataccttaacgataaaactagggctaggtgcagtggctgattgatgcctataatcccagcacttcggaaggccgaggctggaggatcacttcagcccaggagttcaagagcagcctgggtaacagggagaccctgtctctagaa

SEQ ID NO: 805427 - DNA, 631 bp, Homo sapiens
ttctggtttcttcattgtaagatataaataggaagatatttaatcaaagttttggttttgtataaacctagattatatgtatatatttttctccaagcttctagtaatttctgcctccaagattataaattttatgctaacctgggtgaactgctgtagaggtttatgcaggaatttggtgattttgctcagtagaaacaatcaatatcaagacttacgtcaactctcactcttcacatgagttttggttattaaattttaattattttcctggtcattatagcaaaatcatcaactgaatacaatggaagcgtgagagtgtttctctgaacttactgtatrtagggaaacttcaattaggctcaacaaattagattacttctgaagttcatagagtgaaaactataaagttgaaaattacatagtgaaattgaactacataaaaaatttttcacaaattgaagccttgtcattcttcctacttaccttaaaggaagaatatttctatttgtaaaataaaaatagaaatttttatttgacagtgaattcagtgaagccagtgagcgaggccattggaagcatatgtgtaatgtcaaacatcagaagagatcttccaggggaaggggtgcag

SEQ ID NO: 805428 - DNA, 605 bp, Homo sapiens
ccctatgcagaaaactgaaactggaccccttccttacaccttgtacaaaaattaactcaagatggattaaggacttaaacataagacctaaaaccataaaaaccttagaagaaaacctaggcaataccattcaggacataggcatgggtaaagacttcatgactaaaacaccaaatgtaatagcaataaaagcctaaattgacaattgggatctcattaaactaaagagcttctgcacagcaaaagaaactatcttcagagtgaacaggcaacgtacaaaatgggagaaaatttttgcaatctatccatctgacagagggctaatatccagaatctacaaagaatttaaacaaatttrcaagaaaaaaaaacaaccccattaaaaagtgggtgaagaatatgaacagacacttctcaaaagaagacatttatgcagccaacaaacatatggaaaaaacctcatcatcactggtcattagagaaatgcaaattaaaaccacaatgagataccatctcatgccagttagaatggtgatcattgaaatgtcaggaaacagcagatgctggaaaggatgtggagaaataggaatgcttttacactgttg

SEQ ID NO: 805429 - DNA, 605 bp, Homo sapiens
ccctatgcagaaaactgaaactggaccccttccttacaccttgtacaaaaattaactcaagatggattaaggacttaaacataagacctaaaaccataaaaaccttagaagaaaacctaggcaataccattcaggacataggcatgggtaaagacttcatgactaaaacaccaaatgtaatagcaataaaagcctaaattgacaattgggatctcattaaactaaagagcttctgcacagcaaaagaaactatcttcagagtgaacaggcaacgtacaaaatgggagaaaatttttgcaatctatccatctgacagagggctaatatccagaatctacaaagaatttaaacaaatttgcaagaaaaaaaamcaaccccattaaaaagtgggtgaagaatatgaacagacacttctcaaaagaagacatttatgcagccaacaaacatatggaaaaaacctcatcatcactggtcattagagaaatgcaaattaaaaccacaatgagataccatctcatgccagttagaatggtgatcattgaaatgtcaggaaacagcagatgctggaaaggatgtggagaaataggaatgcttttacactgttg

SEQ ID NO: 805430 - DNA, 582 bp, Homo sapiens
tccaaataaattgcaagcattctatccaaatggtaagcagaacatcttattatgtaatcatatttgtttatccataattaatataactttctgagtattgaaatgagaaacttgatttactcttcttcactcatgttttaatttttttataagaaaaactagaatcactaaagaatttctttttattttatttaaaaattataatcctgagatgcaaatatatgccatgtaagcctgggaactatttaatcactttactctaaaatctggtaaaaggtaaaatttctgaaaataggtgactggcaaacattttgtaaacaatatataagaagaattgtatatcaaaatatacacataaaactatcttttcagataattatgtatcatttattttcttwtagcgaaattataaaaatacaacctatagccttccatagatacataattaactatgttttgaaatgatatccaattcagtaccctcatacatttgaaactttgataagctggtctatcttcactttggggatcttcttcattaagagtttgttttctcaagttttgaggtaggatacatgaagt

SEQ ID NO: 805431 - DNA, 582 bp, Homo sapiens
tccaaataaattgcaagcattctatccaaatggtaagcagaacatcttattatgtaatcatatttgtttatccataattaatataactttctgagtattgaaatgagaaacttgatttactcttcttcactcatgttttaatttttttataagaaaaactagaatcactaaagaatttctttttattttatttaaaaattataatcctgagatgcaaatatatgccatgtaagcctgggaactatttaatcactttactctaaaatctggtaaaaggtaaaatttctgaaaataggtgactggcaaacattttgtaaacaatatataagaagaattgtatatcaaaatatacacataaaactatcttttcagataattatgtatcatttattttcttatrgcgaaattataaaaatacaacctatagccttccatagatacataattaactatgttttgaaatgatatccaattcagtaccctcatacatttgaaactttgataagctggtctatcttcactttggggatcttcttcattaagagtttgttttctcaagttttgaggtaggatacatgaagt

SEQ ID NO: 805432 - DNA, 590 bp, Homo sapiens
tacaacttggctcaaatagagattgtagtctttctcctagtctttatcatatgaaaagcagccaggatagattttccttgttatatttttgtatagttgaaagttttgaatcaaattttaagtctttacaattgcctttttaaaattttaactgtttgttcttcgttacttctttctaaatgtcaaggtatatttatttactcttaataatgtgatatgtagtattccacaaacattgtcagtgacaaatcttttgaactaaagaatagattgtttgaccattccagtaattaaggaaactagattaaatatacaatggttgcactggtttttcaaacattgatgaagtaaacattattctcaattgacttagtagccagacattcttctcccaagtcttgaaaaataaaatattcaactttctgttcarttgagtggggagagctataaattttgtttcatagctttgtttatattgtctgcatttctctagattttatagttttagaacattataagccttagaaattcaaatgccgttttgcatttaaacttatgaaaaataatttaggcccacactgaagatctgt

SEQ ID NO: 805433 - DNA, 601 bp, Homo sapiens
tgctggaaatttgtaattttcttaacatattctttctgttctgagtaaaagtaaataaaggtaattaaaatacagtatttttttaaaaacttttgaaaaggttcatcttttaaattcttcaatgatatgtaaaagtttctacctatgaatttattttttgttactgataaatttgtattaaataattgatgcctaaaatatatatttagtagaataaagaaattagctataaaacaaaattagaagagccacaaactagacagggcactgtggctcatgtgtgtaattccagcactttgagaagccgaggcaggtggatcacctgaggtcaggagttcgaggccagcctggccaacatggcgaaaccctttytctactgaaaatacaaaaattacccaggcatggtggcaggcatctgtaattccagctacttgggaggctgaggcaggagaatcactagaacccgagaggtggaggttgcagtgagctgagattgtgccactgcactccaacctggtgacagagggagactctgcctaaaataaaataaaaataattaaaaaaaaaaaaagagccacaaactaaagtctggttgggttgg

SEQ ID NO: 805434 - DNA, 484 bp, Homo sapiens
ctcacagttctggaatcagggaagtgcaagatcagggtaccagcatggttggattctggtgagggtcctcttccaggttgcagactgccatctgctcattgtattctcacatggcagaaagaggactggagggctctctggggtatctttcataagagcactaatcccactgacgagagctccactttcatgatctaattaccccccaaaggccccamctcctcatatcagcacattggaggttaggatttcaacatatacatttctgggcaatgtatacaattccattggacagtcttacaatcttttcagtgtttacatgcataatttactgcaagacttggaatgaaacttcttagctttgcttggtctatataatatgcttcatcttaagcaagctctacattactagtgatgttaaatttcagtaaatggaaaaattccttgagaatactatattctctttcattatccaaatacctct

SEQ ID NO: 805435 - DNA, 484 bp, Homo sapiens
ctcacagttctggaatcagggaagtgcaagatcagggtaccagcatggttggattctggtgagggtcctcttccaggttgcagactgccatctgctcattgtattctcacatggcagaaagaggactggagggctctctggggtatctttcataagagcactaatcccactgacgagagctccactttcatgatctaattaccccccaaaggccccaactcctcatatcakcacattggaggttaggatttcaacatatacatttctgggcaatgtatacaattccattggacagtcttacaatcttttcagtgtttacatgcataatttactgcaagacttggaatgaaacttcttagctttgcttggtctatataatatgcttcatcttaagcaagctctacattactagtgatgttaaatttcagtaaatggaaaaattccttgagaatactatattctctttcattatccaaatacctct

SEQ ID NO: 805436 - DNA, 544 bp, Homo sapiens
gtgcttatatttgaataaaaaggatttctttaaaaaaattgcttttaggatgccatttaaaagaaataggcaaacttcagaagccttaatggatttcttacagaaaacaaaccctccataaaattccaccttagcttcttgcagccctgaattcatgagatgttaactaaattaaccttgactgtcttttattggtctgtttaaaaaattagaaataattaatttaaattgtcattgcttggttctaaatatctttgctggccatgtctatagagagtaggggagcatttttgaagataatcattagcaaatttcctagattcttccttactactgattgctttattataaakctaatattcatagtttgattatattaatgcgatcttgttttcttaatctaactgcatgaaaacatacatggaatgacagatctacctgtcatttacaacatacttaggagattgaccaatttctaaatagtggcctaattaagaaataatggacattaaatcaaactgtgtgtatatgtatcttcacatgt

SEQ ID NO: 805437 - DNA, 596 bp, Homo sapiens
aaaatctttaactctaggaaaatataattctcaaacacatgagggtaaattcttctgttctataagatgatggacatagaaattatgggaagccaaggccaggtatggtggctcatgcctgtaatcccagcactttgggaggccgagataggcagatcacttgaggtcagagctcgagatcagcctgggcaacatggtgaaaccccgtctctactaaaaatacaaaaatcagccacgcaagttggcgaatgcctgtaatcccagctcttgggaggctgaggcaggagaataacttgaacccaggaggcggaggttgcagtgagccgagatcgcgccactgcactccagcctgggcgacagactaagactctgtctcaaaaaatgaaataaaataaaataaaataaattctgggaacccaaaagagatgggtagaataggaagattcrccttttaaaagtgcattctgagggaaaggaacgtgataacttgacagagatgtttgactgctcctccttctgaatcccctgctaaaaacttcagctgacagtttcagtctcacccagttcaagggcaaaggctactgggccagtggctc

SEQ ID NO: 805438 - DNA, 642 bp, Homo sapiens
aattaaaaataagaaaacaggctaagaggagttaagaggtttacccaagtttacaaagctgtcaatgtccttcactatctgcctaggaagttcataatctttcctaggcagtcttctatatcactgtctccattattagtaggagtagcagtgccatgtgatttgagcatggcagcccacaagttccactattaactttctgcagggtaggaatcacttcagccaagatctggagctcaagcaatttccctctgggtgagcagcatttattattcaaatacacttatttaataaacttaattattacatattcaactatttaataatctgtgctagcattttatcatggtttcacatttgttttttctctracctttttgaagcttttttcctagcagctaaggtgtgtcacaccaaccatcttaaagacaaggccaggcacatggtgaatatttgttgattgtacagttgctaaaaggagacaagttcaaatgagtcacttatagaagcatttggacttcaacagatcgtcaagtgtttgaaaactcttatcactaccatgtcttgtttctgggacattttggttttctgcattaggaaaacatcagatacctcagtttgaacactgtggagcttgcaatt

SEQ ID NO: 805439 - DNA, 630 bp, Homo sapiens
gatccactcagggcctgggggacctcaccaccctaaaaggaaaaacacaggtctgaacggcttggccacctgctgattgtagaacaccagggccttgagtgaacataggcagtttccagggaggagttacagtaggtcttgggcaagacccagtgctgtactggcttcaggtctgacccaacacagtcatagtgttggtggccacaggtgtgcttgtgtcactccacccccagatttaggtggctcagagcagagacagagagactctatatgtatgggaaaatataaggaaagagaacaagagtctctgctggtaatccagataattctcctggatcttgtccaagaccatcaaggtggtacctctatgagtctccaagaaccacagcattactgggcctggggtgctccctaaagcaggaacagcttagatcacaacactcaagttgtgacccaagtgytttaaaaggtctggagtgctgtcctaagaaggatgaccagaaataagcccagaaagtgaggactacaataaacacctaactcttcaatactcagacaccgaagaacatctactagcatcaacaccatgcaggaaaacatgacatcaacaaaggaactaaataaggcacc

SEQ ID NO: 805440 - DNA, 630 bp, Homo sapiens
gatccactcagggcctgggggacctcaccaccctaaaaggaaaaacacaggtctgaacggcttggccacctgctgattgtagaacaccagggccttgagtgaacataggcagtttccagggaggagttacagtaggtcttgggcaagacccagtgctgtactggcttcaggtctgacccaacacagtcatagtgttggtggccacaggtgtgcttgtgtcactccacccccagatttaggtggctcagagcagagacagagagactctatatgtatgggaaaatataaggaaagagaacaagagtctctgctggtaatccagataattctcctggatcttgtccaagaccatcaaggtggtacctctatgagtctccaagaaccacagcattactgggcctggggtgctccctaaagcaggaacagcttagatcacaacactcaagttgtgacccaagtgttttaaaaggtctggagtgctstcctaagaaggatgaccagaaataagcccagaaagtgaggactacaataaacacctaactcttcaatactcagacaccgaagaacatctactagcatcaacaccatgcaggaaaacatgacatcaacaaaggaactaaataaggcacc

SEQ ID NO: 805441 - DNA, 620 bp, Homo sapiens
attcttggcaagttaggaatagaggggaactaactcaattttatagtgtatctacaaaaaaaactataagtcacatcacactttaatggcaaaagattggattttttttttctctaaggcaaaggtatctgtgcttaccactattattcaaaatagcactggaagttctagccatggcagcaagtagatttaaaaaaattaaatgcacacagattgtaatagaagaaataaaagcattcttatttgcagaaaacataattgcttacatagaaaattccaatgaatctattgttttaacctagaaacaataaatgaattcagcaagttcccaggaaacaaattcaacacaaaagatgcgatctcattactatataccaacattgaatgtggagataccaaaatttagaaatacattttacaattactccccaaaatgaatatgtggtatayacacaacaaaagatgcacaggatctgtatgttgaaaattgtaaaatgctgactgaagaaatcaaagaatcaaagtatatggaaagacataccatattcatgaattagaatattcagcatggtaaagacatcagctctccccgaattgaaagatgtggttaatgtaatttc

SEQ ID NO: 805442 - DNA, 633 bp, Homo sapiens
gtaactataataatctctcttacccagccgaggacatgatttttccttaaaacagtcacagtccacacataagctagtcttgtaatctttgtatgaacgacaaggaaatgaaataaaattgcagtttgtttctaaagatgccatgaacaagtgaactgctctctggtggttgcatttaatgaattgaattccttaagggttaaaaaaaaaacaaagaactgtagatgtattaagccatgttcaagtacatttaaaaacaaagtaaagatgaagttttgctaaatactatgtaccttatgaatattactgactataatacacagttttatgtcaaaccactaaacaaatagtaccaatgaaaacttaaatttagtatgtcttttgcatgagatttataatgaatttttaaagtaataattaacayagcaaaaatgtttcatttcagtgtttcacaagctctacacagtgctactatacttaataactagtgtacacatcttttccttctaatactgcactcctaacatttccacctaatgacaaagatgaccatgaaaccagctgaccttaaaactttattaccttccttttcttttccaaccttgcacatcctcctccttttcaccaaacttc

SEQ ID NO: 805443 - DNA, 613 bp, Homo sapiens
cacagactggaaaaacatttgcaaaatgtatatccaaacaaggatctatatctagtatatatgaagaacttttacagctcataagaacacaataagccaatttaaaatgggcagaagatttgcttagacacttcaccaaaaaagatctatagatggcaaataagcacatgtaaatttgcttggcatttttattaattagagaaatgcaaattaaaagaagctaccagtatactcctactwaaaaaatggctaaaattagaaaccctgaccagctagagcaactacaactctcatatactgctggtgggtttctgaaatggtacaaacacttggaaaattgtgggaattcttaaaagtgaatcatataacctagccattgtatttctaagtagttatccaaaatacctggaagcatatttctgtacaaaaaatgagttcataaatgttaattgttttatttgtaatagctaaaaacttaaaataacacaaatattcatcaagtaaataaataaattgaagcatacccatacagtgaaatattgcttattaataaaaataaatgaactccatatgctacaacatggataaatctaaaaattattatgctgactga

SEQ ID NO: 805444 - DNA, 629 bp, Homo sapiens
agtctctgcttgactgtctgtggggacagggagctctccacttgatgaaagatctttagacctctgagacaccttagtatgtttgtgttctcacccccttatttcatggtatatcctttggtttaacataacaagtcgattccctctcccacattaggtccttttacatactttaagatacttatttttaattttcatgacatttctcttayagcttaaaaatcccaggctatttattattattatattatttttctcatatataacatggcttccaagtcttaacttacctggtcatttttcactagatgctaagttgtctcttttcatcttaaagagagattcttaacacagcatcattctcaggcatggccagacctgtagggaagaaggtagaacttactctttatcccactttaaatattctgcttttataaatagagcccccatttttattaattattgaatctggttggattgccacataatgtcttttcatactgctttgcaatacttcagacatacttgtatggaatctgaacattaatgtttcccatcaggatgaaagaataaagggactaagatagtacactcttgaattacaagctaagtctttgtattagtctttt

SEQ ID NO: 805445 - DNA, 589 bp, Homo sapiens
cagcgaaatcccgtctctaagaaaaatgcaaaaattagccggggtggtggtgggttcctttaatcccaactcctggggcgcgagaatcacttgaactcgggaggtggaggttgcagtgagctgagatctaaccaccacactccagcctgggcaacagaggaagactccgtctcaaaaaaaaaaaaaaaaaaaaaagagtcaatcgcttccatctttagacgaatacactcttacgcttagacagatagcttggaaggtacataagctttataaacatttgtaattttgagtcagtctggcgatatttccaggccttctccctgtaagtggtcacagaaataaaaactccctcctttttcagytcatctgcatctcgttatcaggccgcgagaataagcagcctgaccctcagtttggtccgggaacaattaaactccagcccgggtgacagagggatattttgcctcagaaaagaaacaagaaaacaataaaaaaaaaatgaagatattagccgggcgttgtgctgtgttgtggctcgcgcccgcgcctgtaggcccagctactcgggaggctgaggcagaggaagatc

SEQ ID NO: 805446 - DNA, 686 bp, Homo sapiens
ggcagctggtttctcccgtatatggatccccaactactcactcctagcaaaacctttatatgaggcgatgaaagggcagggaaaggagcccctcctttggggaaaagaacaggatatggctttcaaggaaatcaagaaagctttaattcaggcaccagcactagggctgccagacatgacaaaggccttttacctgtatgttcatgaaagaaaagaaatggctacagtagtcttagtgcaaatgctagggtcatggtattggcctgtagcatatttgtccaagcaactagactttgtggctaagggatggccaccctgtttcaaggaactggccgccactgccttgttagcygaggatgctaacaagctcacatttggacagaagctgataattcaggtgccccacacagttgtcaccctgacggaacagagaggacatcattggctctctaaccctaagatgctaagatatcaagggctcctatgtgagaatacatacatcaccttagagactgtgaataccctaaatccagccacactgttaccaatagaatatgtggaacatgggaagcccccgttatgtgccccagggtaccactgctgtgtagaaacagtggatgaagtcttttcaagccagaaagacttaaaggatcaacccttaaaagacccagatgttgaatatttta

SEQ ID NO: 805447 - DNA, 686 bp, Homo sapiens
ggcagctggtttctcccgtatatggatccccaactactcactcctagcaaaacctttatatgaggcgatgaaagggcagggaaaggagcccctcctttggggaaaagaacaggatatggctttcaaggaaatcaagaaagctttaattcaggcaccagcactagggctgccagacatgacaaaggccttttacctgtatgttcatgaaagaaaagaaatggctacagtagtcttagtgcaaatgctagggtcatggtattggcctgtagcatatttgtccaagcaactagactttgtggctaagggatggccaccctgtttcaaggaactggccgccactgccttgttagccgaggatgctaacaagctcacatttggacagaagctgataattcaggtgccccacacagttgtcaccctgayggaacagagaggacatcattggctctctaaccctaagatgctaagatatcaagggctcctatgtgagaatacatacatcaccttagagactgtgaataccctaaatccagccacactgttaccaatagaatatgtggaacatgggaagcccccgttatgtgccccagggtaccactgctgtgtagaaacagtggatgaagtcttttcaagccagaaagacttaaaggatcaacccttaaaagacccagatgttgaatatttta

SEQ ID NO: 805448 - DNA, 686 bp, Homo sapiens
ggcagctggtttctcccgtatatggatccccaactactcactcctagcaaaacctttatatgaggcgatgaaagggcagggaaaggagcccctcctttggggaaaagaacaggatatggctttcaaggaaatcaagaaagctttaattcaggcaccagcactagggctgccagacatgacaaaggccttttacctgtatgttcatgaaagaaaagaaatggctacagtagtcttagtgcaaatgctagggtcatggtattggcctgtagcatatttgtccaagcaactagactttgtggctaagggatggccaccctgtttcaaggaactggccgccactgccttgttagccgaggatgctaacaagctcacatttggacagaagctgataattcaggtgccccacacagttgtcaccctgacggaacagagaggacatcattggctctctaaccctaagatgctaagatatcaagggctcctatgtgagaatmcatacatcaccttagagactgtgaataccctaaatccagccacactgttaccaatagaatatgtggaacatgggaagcccccgttatgtgccccagggtaccactgctgtgtagaaacagtggatgaagtcttttcaagccagaaagacttaaaggatcaacccttaaaagacccagatgttgaatatttta

SEQ ID NO: 805449 - DNA, 573 bp, Homo sapiens
gttatcaaaaaggaggctggtggaagttttcagatggggaggcgtgccattccagaagccattgccccccaatttataatgcagtttcaccaaggaacacacatggggaagacagctttagaaattctcgtagggcaatatttctatgtgccatgcctaactgccatcactcgagccatctgtgagcagtgtgttacttgcatccagaataacctaaggaaagggcctactcagaccccaggaattcaggaaacaggagcagtgccatgtgaaaacctgcttgtaaactttaccaaactgcctcaggctggaggctrtcagtacatattagtgtttgcaccttttcagggtggatcaaggcattccccaccaggacagaaaaggcatgagaaataaccaggatattattaaaagatattattcttagatttagaatgcctctacctttaggctcggacaacagaccagcttttgtagcagaagtagtacagcaactgactcagatcttatagattaaatgaaaactgcatacagcctatcaaccacaaagttctggaaaggttgagagaatga

SEQ ID NO: 805450 - DNA, 620 bp, Homo sapiens
tttatttgattatcttttggacctactctgaatagctgctaaggtaattttcattcttttttttttttttttttttttttgagacagagtctcgctctgtcgcccaggctggagtgcagtcactgcaacataagcctcccggattcacaccattctcctgcctcagtctcctgagtagctgggactacaggcacccgccaccatgcccggctgattctttgtattttttagtagagacggggtttcaccgtgttagccaggatggtctcgatcttctgacctcgtgatccccccgccttggcctcccaaagggctgggattacaggcgtgagccatcgcgcccggctggtaattttcattcttataattgctgactagttgagaagaagaggtcccaaactacagagaagaaaggaagaaagatgtgtccagtgaaatccagggtccccccgctcccattcaaggccatmtgaaagtatctccccctgcttttcaagttcatcgaatatgtttaagaaacctggaatttccaagtccatcagcctattgaaacaaaacagctataactataaaatttagatccttttaagattttcaatccttagaattaaagatattta

SEQ ID NO: 805451 - DNA, 610 bp, Homo sapiens
ggctggcatggagtgtctgcagcttttccaggtgcacagcgcaagctgttagtggatctaccattctgggatctggagaaggatggtggtcctcttctcacaggtctactaggcagtactccagtagagactctgtgtggggcctccaaccccacatttacattctgcactgccccagtagaggttctccatgagggctctgcccctgtagcacacctctgcctggacatccaggcattttcatacatcctctgaaatctagggagaggttcccaaacctcagtttttaacttctgtgcacccacagggccaacaccatatgtaagctrccaaggcttggggcttgcaccctctgaagcaatggccagagctgtacattggtttttttagccacagatgggacacagagcaccaagtcctgagactgtacaaagcagaaaggcccagggcttagcacacaagaccattttttcctcctagctctccaggcctgtgatgggaggggctgccatgaagacttctgacataccctggaggcattttccccattgtcttggcaattaacatttggatccttgatacttatgcaaatttgcaaatttctgcagcc

SEQ ID NO: 805452 - DNA, 587 bp, Homo sapiens
agctctgataaataacagccctgagtgaaatttgttccaacttgtacatctgttgattttgagctggtccttctcttcttgcctttcaaacacaactttcactcgtgtattacaggtgttgatgggtttgatggaagcccaaacctcagcaatacacaatatatctatgtaacaaagctgcacatgtaccccckgttataaaaaagaagtcaggagaggtggcatttgcctgtagtcctagctacatgggaggtaggcaggaggatcacttgagcccagaagctgcagtgagctgtgatctttccactgcactccagctgggtgacagagtgagaccctgtgtctaaaaacacagaatagatagatagatagatgatagatgatagatagatagatagatagatagatagataagataggtaaatagaagatagagatatagatgatagataggtagatagataggagatagatgatagatagatagagataggtaaatagaagatatagatagatagataatagatagatgatagatagcatagatagcatagcatagcatagcatatgatagcatagattagatt

SEQ ID NO: 805453 - DNA, 602 bp, Homo sapiens
agcaggaagacaggggactcttctgatggggcaattttcacccaagaaccccgtgggcctaatacctcctctttttttctctccacgagggagacttaaagtagacttagattgcagactgacagctgtcccagcctcccccasctccctttctttttgcttcacagtctcctaataaatctcctgcacatctaatccagtccaggagtttcagaagacctggactaagggagagaaagtagttcaagaatgacaacaaggtctaggaaattggaatgatggagatgacatttcctgaatgtatgcctgcgtgaataacacttccatagcctcataggtatcctggcactggtttgctggatgatttgaatttgtattacctatatggctttggagaaagcccttgacaacgttcaggacaaagtgtgcctggagatcccagggcagtcccttgctctggactttgcggactccgctccgccagcagagggcagcagaggtagccaaggctgcagaaccaggatccctccctgagaacgctgaaagatgatgagtgcctctgagtttaagttgttgagatttcaggtgattttagcctcatg

SEQ ID NO: 805454 - DNA, 654 bp, Homo sapiens
cagtggaaaacatatatggaacatacatcccatattcacattttggtaggatttaacattaaatgaagtggaatcggccctttacatcaaaaggtaaactacaggacatacagacaatttttgaacaatgtccacaagctgactgaaactggcttaaggtctgcagctattgatcaataaggaatgtttataagacccgtcctctgtccaatctgasttatggcaggacagcatggtagaggacggagccaggcaaggtagggaagagtgttgtagtgttgtaggactttctccttagttcgactaaaagccaggttcttctcgcacaaccatgaaaagttaggcttgcggacactctgcagggtgagaaggacagggtttattgggtgaaaaggaaaaatggggaaacagggactctcagcaaagcgagagtcctgccagtgggcttcccacctcatagactggaatcaccgggttaccacccggaacaggagaagccgggctcctcctcactgcaaaccaacaggaaattcctcaaggcttcacccgagtgcgcactcctcccagtgcgcaggccagtcggaagtcctgccggggaaccctttttacttggctgtctcagtaggctggcaaccggcactctgtcagggtcag

SEQ ID NO: 805455 - DNA, 654 bp, Homo sapiens
cagtggaaaacatatatggaacatacatcccatattcacattttggtaggatttaacattaaatgaagtggaatcggccctttacatcaaaaggtaaactacaggacatacagacaatttttgaacaatgtccacaagctgactgaaactggcttaaggtctgcagctattgatcaataaggaatgtttataagacccgtcctctgtccaatctgagttatggcaggacagcatggtagaggacggagccaggcaaggtagggaagagtgttgtagtgttgtaggactttctccttagttcgrctaaaagccaggttcttctcgcacaaccatgaaaagttaggcttgcggacactctgcagggtgagaaggacagggtttattgggtgaaaaggaaaaatggggaaacagggactctcagcaaagcgagagtcctgccagtgggcttcccacctcatagactggaatcaccgggttaccacccggaacaggagaagccgggctcctcctcactgcaaaccaacaggaaattcctcaaggcttcacccgagtgcgcactcctcccagtgcgcaggccagtcggaagtcctgccggggaaccctttttacttggctgtctcagtaggctggcaaccggcactctgtcagggtcag

SEQ ID NO: 805456 - DNA, 628 bp, Homo sapiens
gtccctacccaaaatctcatcttgaattgtttgtaactaacctgcacgttgtgcacatgtaccctaaaacttaaagtataaacacaaaaaaaagaattgtaatacccataatctccacatttcaagggagaggccagttggaggtaattgaatcatacccacycatgatgttctcgtgatagtgagttctcacgagatctgatggttttataagtgtttggcagttcctcctgcgttcattctccttcctgctaccttgtaaagaaggtgcctgcttctctttcaccttccaccatgattgtaagtttcctgagacctccccagccatacggaactgtgagtcaattaaacttctttataaattacccagtctctggtatgtctttttagcagtgtgagaacagactagtacaacaaataacttgaaaagacactgaaaaaacaaaaaaggccaatattcccaacctggttctaatctctaaagctcagtcttttgaaagtttcctgccctactccaaccaaattcagcaatacatattgacatctgctttaggccagtactaagagtacagaaattaataataataggagcaaatatttatatggtgtttactatgttccagtaatt

SEQ ID NO: 805457 - DNA, 627 bp, Homo sapiens
ctagaatattttgaggcagtgaaaactaagttttattcatctttgtatttatgatagcacttacaatggacaaaaatggggctcaaaacgggtttatgaatgaaataataatacacttaagaatccaagaggggcaggtcatttaaaagaatccaatagctggttcctatcacctgaggcttcataagacctctttctggttttctctcattcattcagctaacttttagagcacatacctctaaamtttacagcacctatctcagagttctgtctgatgctctgaggctgagccctggcagtaactacaataaggacaacaccaaccctccccacactaaaagagctcttagtcaaattggaaaaagaactcatgccaagtgacatgctcatataaacatactgctaaggttgggtggtcgtcaagaggagtaagagatgctttcttcctgggagattgaaggagtatgtgtgtgtgagaaggaggggcaggtaaagacatattctcaagggagctgacatctgaacccagtcttgattaatgagttagacttcatcaggcaaaggcacagccaggaatcaccatgacacatcaggggatcagtgtgtggaacatattgggagtgt

SEQ ID NO: 805458 - DNA, 615 bp, Homo sapiens
aattactggaacatagtaaacaccatataaatatttgctcctattattattaatttctgtactcttagtactggcctaaagcagatgtcaatatgtattgctgaatttggttggagtagggcaggaaactttcaaaagactgagctttagagattagaaccaggttgggaatattggccttttttgttttttcagtgtcttttcaagttatttgttgtactagtctgttctcacactgctaaaaagacataccagagactgggtaatttataaagaagtttaattgactcacagttccgtatggctggggaggtctcaggaaacttacaatcatggtggaaggtgaaagagaagcaggcaccttctttacaaggtagcaggaaggagaatgaacgcaggaggaactgccaaacacttataaaaccatcagatctcgtgagaactcactatcacgagaacatcatgrgtgggtatgattcaattacctccaactggcctctcccttgaaatgtggagattatgggtattacaattcttttttttttgtttatactttaagttttagggtacatgtgcacaacgtgcaggttagttacaaacaattcaagatgagat

SEQ ID NO: 805459 - DNA, 624 bp, Homo sapiens
acactcccaatatgttccacacactgatcccctgatgtgtcatggtgattcctggctgtgcctttgcctgatgaagtctaactcattaatcaagactgggttcagatgtcagctcccttgagaatatgtctttacctgcccctccttctcacacacacatactccttcaatctcccaggaagaaagcatctcttactcctcttgacgaccacccaaccttagcagtatgtttatatgagcatgtcacttggcatgagttctttttccaatttgactaagagctcttttagtgtggggagggttggtgttgtccttattgtagttactgccagggctcagcctcagagcatcagacagaactctgagataggtgctgtaaaktttagaggtatgtgctctaaaagttagctgaatgaatgagagaaaaccagaaagaggtcttatgaagcctcaggtgataggaaccagctattggattcttttaaatgacctgcccctcttggattcttaagtgtattattatttcattcataaacccgttttgagccccatttttgtccattgtaagtgctatcataaatacaaagatgaataaaacttagttttcactgcctcaaaatattc

SEQ ID NO: 805460 - DNA, 537 bp, Homo sapiens
atgatacacgtgtcccacgttcaccttggggtggagacttaacatttaaatctattacaattagagatgcctgtggaacaaggaagtcacctttaaggaatggacttggtttttgttgcagtgcccactttgagaactcttccttgaacaggttggacctcccacttgtcattctctcattcacaagtgttctggccacagwgtcctgaggtcacagtttcccagtagttgagttttaataaaaagcaacacttattagctaagttaaaatataccccaacagaagacgagatggactccctgtagctaaaatgagataaacccaaaaaatttcatagctaggaggatgagggatctgtaacacatcccggtgttattaattgccataggttttttttcccggtaattacgcagaaactatcacctgaaaagcattgccaaaaaacactacagttggaagatttcccagctgaccctgacagagtgccggttgccagcctactgagacagccaagtaaaaagggttccccggcagga

SEQ ID NO: 805461 - DNA, 620 bp, Homo sapiens
agtctctataaaacagacttcaaccaacaaaaattaaaaaggacaaagaaggacattacataatggtaaagggatcaatgcaacaagaagagttaattgtcctaaatatatgtgcccccaatgcaggagcacccasatacaaaaagcaagttcttggagacctgcaaagaggcttacactcccacacaataatattgcgagactttaacaccccgctgtatatgttagacagatcaacgtgacagaaaattaacaaggatattcaggacttgaactcagctctggaccaagcagacctaatggacatctacagaactttccaccccaaatcaacagaatatacactcttctcagcaccacatcacacttattctaaaattgaccacataattggaagtaaaacacttcttagcaaatgaaaaaggatggaaatcataacaaacagtctctcagaccacagtgcaatcaaattagaactcaggattaagaaactcactcaaaaccacacaactacatggaaactgaacaaccggcccctgaatgactactgggtaaataatgaaattaaggcaaaaataaataagttctttgaaaccaatgagaataaagacacacggtac

SEQ ID NO: 805462 - DNA, 620 bp, Homo sapiens
agtctctataaaacagacttcaaccaacaaaaattaaaaaggacaaagaaggacattacataatggtaaagggatcaatgcaacaagaagagttaattgtcctaaatatatgtgcccccaatgcaggagcacccacatacaaaaagcaagttcttggagacctgcaaagaggcttacactcccacacaataatattgcgagactttaacaccccrctgtatatgttagacagatcaacgtgacagaaaattaacaaggatattcaggacttgaactcagctctggaccaagcagacctaatggacatctacagaactttccaccccaaatcaacagaatatacactcttctcagcaccacatcacacttattctaaaattgaccacataattggaagtaaaacacttcttagcaaatgaaaaaggatggaaatcataacaaacagtctctcagaccacagtgcaatcaaattagaactcaggattaagaaactcactcaaaaccacacaactacatggaaactgaacaaccggcccctgaatgactactgggtaaataatgaaattaaggcaaaaataaataagttctttgaaaccaatgagaataaagacacacggtac

SEQ ID NO: 805463 - DNA, 635 bp, Homo sapiens
gttataccagtgtcagcagatgcccagagtttaatatgtactcagttaaaaatgaacagctgatctaagtgatagatgtgacattttagagtgattgaaaatactcttagataagttaaactcgcaagcaccagaatcagcatataattttacttttaaaaatgaatagcctgtcattttattttctaaggattatttatatagtcttaatattatagcaaagagagtcttagttgctaggatgtttgagaaggattattaaacaacttrtatacctatagaatgaccaatataactgtttattataaaacacaagtagagtaataagctttgagtatttttatagaagaacctctacttttgaggtatatattttgagttcttggtatttaggacctatacaggtaaacttaccaaatagaacatgaatcattgccattctgttttgtggatgatcagaagggctatgcttatgtgagttaagctttgaactaatttctttgaaagtgtagaattttaaaattatgtgccttttataatttccagtaaacatgcagtaacacatatgatgccatgtgtaagtcattctcattctttataatctgataaaatgaaaatcatctttgtattaacta

SEQ ID NO: 805464 - DNA, 624 bp, Homo sapiens
tgtaaaacataatttgtttccattggaaactcaataataattttttaaaaagtagggcagtggttagaatcataagctgcttgtagtttagataatttacagcatccaggaattggttgctggattggatagatctcagagaagaaataaagaacagtagtagtgggaatgagggcttgagaagaactgaaagaatagattttgttcagctagataattattagaaattaaggtttttgaagtgcagctgttttggaactgttgggatctagagtatgtccttgtaagtgggaggcasgattggaggatgagggaagaattgggggggtgttaatctgtaaggagaggtgatttatacctgctgacgttttttgtctgaaatgggagacaagttcatctgttgagagtggtgggtagagaaagagtaattgagaagagtgataaggacttggggacctgcagaagggtgttccaatcatgttagaagcccgtttcaggttgaacactacagatttttagtgcccgcccgatacaggagtagaaggtagatggtagatggttggattgaacttgggttaggaattcttttttttttttttttttttttaggggggggggtttgcc

SEQ ID NO: 805465 - DNA, 640 bp, Homo sapiens
atggtcaagtgggattcatcccagggatgcaaagatggttcaacatatgtgtcatgccagacccctactgactccaaaagagatggcattgtgtctgagaggcccagaagagacctggagccagtaaacgagacagggtttacagaggacttacatacaaggcagtccagaggtgacagggtggacaggagcactgctactgtttgtaaaaagcatgcagtttatatggcattttcacgtagcaacaccaacctagcaaacttcatttaaccaagaaaagtggcctcgtttccttgcacatcctatgtttcaaggaatgggcagaggggttcaaygtccttcataagaagtgaatctccagattagccactactggattccttagcatggaactctgagcacacattcttcttagaccatagggtcattctcagggtatgcttaagttactgctgtcaggtgcatctgccatacaatacacaagtcaataaacatgatacatctcattaacagaatcaaggataaaaaccatgtgattattttaatagatgctgaaaaagcatttgataaaatttaacatccctttatgatgggtattaaaggagcatacctcaaaataataaaaggccatctatgacaa

SEQ ID NO: 805466 - DNA, 584 bp, Homo sapiens
caattcaattcaattctggcattatcttcctagagttagtgtcagattctattgaggcaggccgatcatgaggtcaggagttcgagaccagcctggccaacatggtgaaaccccgtctctaccaagaatacaaaaattagcaggacatggtrgtaggagcctgtaatcccagctccttgggaggctgaggcaggagaattgcttgaacctggaagatggaggttgcagtgagctgagatcacgccattgtactctggcctgggcaacagagcgagactccgactcaaaaaaaaaaaaaagagctacatgccacaagacttcctccacttcagatactaactataagtcttggcctcccatattgctgaccaacgggcagcagttagtgaactgcaagttccaaatcttctccttgggtttaataacttgttagaatggcttacagaactcagggaaacactttacttacattttactggtttattataaaggatatagagaaacagccggataaagaggcacataaggcaaggccaggaagggtcctgagtggagtttctgtccatgtggaattgaggtgtgcc

SEQ ID NO: 805467 - DNA, 627 bp, Homo sapiens
ttcatctagagtttagccatatttatcatctcttagtatataggtaaaattttggatttaaagtaagagtagaaattatttctgctgataaaagtgaaaactgaatttctttggagtagcataatcagcatgttacttaggtactttctgtaaagatgctgcatttttagctgtttttagagctcccttacaggcatgaaaataaattartcagcagtattctctgcagagctggcaaaaacaatcgataggtattttggaagtacaggtaacaataatataattataaagtttatatagtatttacgaatttttcttgaatagaaattgaatgtgaaaagtaaacgtaaaatatgagtgaatcacctgatgtgatatatgttgtttttaggttggtactaagataatttcacaggcgtttcttatttgcttactaattcccacaaagacacatattacaaatcttactgaatatgtgagcaactcatagttttccttctcgaatgttgtgatgctttttttactttttaaattctgaaatatggtctgtaaacaagactatgttggctatttgaagatttgataagctgtactgtattttggtgtttaatgctttccttacaactg

SEQ ID NO: 805468 - DNA, 573 bp, Homo sapiens
atttgctaggcattttcatatgttattttacttaatcttcacattagccctgtgaaataggttttaactgtcaccattttggagctgaggaagtagatgatggagttttgacctaggtcccctgactcccaagtgcacttattttgctcctcagtctctttcttcattagggttcagctgttctcatacggttcttcagctgccctaggttcttgggtaggattttctgcttactttaatgcataattttatgtacgaattaagcattaccttctcacctaaagcaaastttcttttcacagagtgaggaagagctcaaatatgcagcaaggggaagtgaacttattaggtcattaaagtaaatctaaatccagtatgaagactcattattataacttttcaggaaatatttagagttctaaggagttgattatctccattgctttatagtggagattgaaagagatctgtctttgaactctactgtgctttgtcctttttaactgttcttgggtggaattaccataataaaaatgatttttaaaacttgctgttttacttcagaaagtttgt

SEQ ID NO: 805469 - DNA, 698 bp, Homo sapiens
cttctcttctattgcttatttttggatccttactttgtctttgacctttgagagtttgattagtatatgtcttggggtagtctatttgtttttctgttttttttttgagacagagtctctctctgtcacccaggctggagtgcagtggcacgatcycggctcactgcaagctccgcctcctgggttcacaccattctcctgcctcagcctcccgagtagctgggactacaggcgcctgccacgacacctggctaatttttttgtatttttagtagagacgaggtttcaccatgttagcgaagatggtctcaatctcctgaccttgtgatccgcccgcctcggcctcccaaagtgctgggattacaggcgtgagccgctgcgcccagctctatttggttattatttggatttaatttgtttggtgatttctgaccttgctgtacattgatatttatttttttatagtttttgcttttatttttctctagatttggaaagttttctgttgtaatttgaataagcttcttaccccttgctctttctcaactctttcttgaatgccattgactcagttttgcttttttgaagttagtctctatatcttgtaggccttctccattccttttcattcttttttctcttctgtgtattttcaaatagcttatatccagtcccactgtttttatttttttccactg

SEQ ID NO: 805470 - DNA, 698 bp, Homo sapiens
cttctcttctattgcttatttttggatccttactttgtctttgacctttgagagtttgattagtatatgtcttggggtagtctatttgtttttctgttttttttttgagacagagtctctctctgtcacccaggctggagtgcagtggcacgatcccggctcactgcaagctccgcctcctgggttcacaccattctcctgcctcagcctcccgagtagctgggactacaggcgcctgccacgacacctggctaatttttttgtatttttagtagagacgaggtttcaccatgttagcgaagatggtctcaatctcctgaccttgtgatccgcccgcctcggcctcccaaagtgctgggattacaggcgtgagccgctgcgcccagctctatttggttattatttggatttaatttgtttggtgatttctgaccttgctgtacattgatatttatttttttatagtttttgcttttatytttctctagatttggaaagttttctgttgtaatttgaataagcttcttaccccttgctctttctcaactctttcttgaatgccattgactcagttttgcttttttgaagttagtctctatatcttgtaggccttctccattccttttcattcttttttctcttctgtgtattttcaaatagcttatatccagtcccactgtttttatttttttccactg

SEQ ID NO: 805471 - DNA, 698 bp, Homo sapiens
cttctcttctattgcttatttttggatccttactttgtctttgacctttgagagtttgattagtatatgtcttggggtagtctatttgtttttctgttttttttttgagacagagtctctctctgtcacccaggctggagtgcagtggcacgatcccggctcactgcaagctccgcctcctgggttcacaccattctcctgcctcagcctcccgagtagctgggactacaggcgcctgccacgacacctggctaatttttttgtatttttagtagagacgaggtttcaccatgttagcgaagatggtctcaatctcctgaccttgtgatccgcccgcctcggcctcccaaagtgctgggattacaggcgtgagccgctgcgcccagctctatttggttattatttggatttaatttgtttggtgatttctgaccttgctgtacattgatatttatttttttatagtttttgcttttatttttctctagatttggaaagttttctgttgtaatttgaataagcttcttaccccttgctctttctcaactctytcttgaatgccattgactcagttttgcttttttgaagttagtctctatatcttgtaggccttctccattccttttcattcttttttctcttctgtgtattttcaaatagcttatatccagtcccactgtttttatttttttccactg

SEQ ID NO: 805472 - DNA, 610 bp, Homo sapiens
attttcaaatagcttatatccagtcccactgtttttatttttttccactgcttaattttgctgttgagagcctctgatgcatttttcatttcaacagatacatttctcagttctaggatttttgtttgattttgaaaacatcatttccatctctgttaaatttctctgataaattcctgaattggttttctgtgttatcttagagttcaactgagtttctttagaactgctattttgaattctttaactgagagcttacatattgctgccttattagggttggtcattggcactttgctttgtccattggcttcctgtttattttcttatctgccttatatggcttcgtattgaaagatcatttttttttttttcccagttttkgctgtctgcttattttggtctttctagggcatacttgcttagaagttctttgcaattgcctgttgaatcccctaaattatagattgctgcctgcctccttttcagagctaaatggtgccttaagcccaagtttgccttgggtgtcacaaatgtttggaactctgttcatcctgaattgggcgggaaggagtgggggtggatcccaaaagtggtaccttggctatgt

SEQ ID NO: 805473 - DNA, 583 bp, Homo sapiens
agaaaaagaaataaaaggaagaagtaaaagaaaaagaagatgtgaaactaactttgcttacagatgacctgataccatgtatagaaaaacccaaagaatccacaaaagctattgtagctaataaatgagttcagcaagattgcaggaaccaagattgatataggaacatcagttgtctttctgtacactaacaatgaacaatatgaaaatgaaattaaaacaatttcatttataatggcatcaaaaagagtaaaatacttaagaataaatttaaccaaggagatgcaagacttgtacagtgaaaactactgaacattgttgaaagaaattaaagaagacctaaataaatgacaaaacattccatgttcttagatcaggtttaatattgtttagatggtatattagtttcctagggctgctataacaaattaccatagactgggtgkcttaacagagatttattctttcacagtatcagaggctagaagtccagagtctgggtgttggcaagattggtttgttctggagactttcagggagaatctgttgtatgcctttctcccagcttctggtggttcccagc

SEQ ID NO: 805474 - DNA, 631 bp, Homo sapiens
ctgtgttctggttcattatgtaatctcatgtttaggttctgggagagttcctcatattttccattggctagcaacgaataattttatattttttattgaaaagtaaaatgtaaaaagtctaaccataagaataagaagatataggtgaatgtgtagtattttgataagaaagcaggtttaaaagcaacaacaacaayaaaaatctgattattgctagtcaaatgtaatgaatagaaaacagattattttaaaataaaaacttctccatgccagccaaatacataacattaaatgcaaatcaaacagaaaaaaactagaacggatgacaaatgaaatcattaagaaatcctaaaatagcttttatatataaatagctctaatgaacaaataagaattcctataaataattgtggaaaggatatgtgcaagtgattcatgaacacatgctattaatagatatcagtagttattatacatgctattaatagctaataatcctataaaagactatttgacttccagggaaacgatagaaaggcaaaggcaaatgggaggttgggaggcattttggcagagacagacagtgctcaccaaatgttccatgtcttcttgatgtttccagcccttcttt

SEQ ID NO: 805475 - DNA, 628 bp, Homo sapiens
caggttcccctctggctttccttgcaacagaggatccttgttactgctgggtggggtggaagttcagggtccccacaaggcctctgctggttccactctggcttggaagggcagaggttccctgtcattgcccctacatggcttccaatgacaccgtggagggacaactctttacagctggatttgctctccattaggycacctctgacacaaccacagcagggaggggaagggaaatcttgtttccatcaggtcaaagtggaagtccaggctctccacttagccttggctagcaggggtaaggccacagtttttctgtggtgtttgaatacaatagagtggttattgactgtattagtccattttcacactactataaagaactacctgagactgggtatattagtcagagttctctagagggacagaactaatggaatatatatataaaggaaaatttattaagtgttaactcacatgatcacaacatcccacaatagaccatctggaggctaaggaggaaggagagccagtctgaatctcaaaactgaagaacttggagtccaatgtttgagggcaggaagtgttccagcacaggagaaagatgtaggctgggaggctaggccaa

SEQ ID NO: 805476 - DNA, 568 bp, Homo sapiens
aaaaaaactaatggcatatgattatttggacacgttgtaagaacttcaaatataaatctatgttttgcaggccagcacacactgctaagtggaagaagaaggcagaaagttttgatttacaggcacaaatcccatgcatatgaaataaaagacaactgaagttttgctcagccatctcaaccatcagctccattcatcttctaactatgtgatgatatacactaaacacagatggccaatattaagtatgaaactacctgacaaaggaagctgattctaattcagaacaccataattctgratgttgaaatccgaaaagataaaaatccttaaaatttaattctggaaaaaaaatctttaagagatttatttacatttagaaaagggggtttatttaagaaacataaaaacatgacaggatatttcacagcccactttacacaattaatgaggtgacactatacatatttttgcaagcataaacactcaagtgtgttaatggcagttgcatgggcataatagttataagtagatgaactatattaaaaaagaaataggtcaaaaggga

SEQ ID NO: 805477 - DNA, 574 bp, Homo sapiens
tttacaaaataaattggctccttgttctcatgtcataaaagaatttagaccaagttaataagaactaggtattgaagattcccaaaatatcaaacacctttgtgtcttacagctccttttctttctcatctggcaaactcaaatggattcttcagtacccggctcgagtaaccacactgctgggaagcctcctctgaccctgaccctgggctacccctgctcactgtctcttagagcaaataacatggtattgggttgstacaaaagcaattgcagtttttgcctttttttttaagtaatggcaaaaaccacgattacttttgcacctacataatagtacaattgtgtgtttatgtaattgtgttcctttccaaaccacgagcatctcaaacacagagacagtgtctttgttatctctatatcttctgtactacagagggaggaaagctaaaaatgacatttcccagactcctttgcaggtagggttctggatgcaatttaggttcagccagttagaagcatttgcatgagatggattcagacctgttataggggaagaatggcaaggctcaag

SEQ ID NO: 805478 - DNA, 574 bp, Homo sapiens
tttacaaaataaattggctccttgttctcatgtcataaaagaatttagaccaagttaataagaactaggtattgaagattcccaaaatatcaaacacctttgtgtcttacagctccttttctttctcatctggcaaactcaaatggattcttcagtacccggctcgagtaaccacactgctgggaagcctcctctgaccctgaccctgggctacccctgctcactgtctcttagagcaaataacatggtattgggttggtrcaaaagcaattgcagtttttgcctttttttttaagtaatggcaaaaaccacgattacttttgcacctacataatagtacaattgtgtgtttatgtaattgtgttcctttccaaaccacgagcatctcaaacacagagacagtgtctttgttatctctatatcttctgtactacagagggaggaaagctaaaaatgacatttcccagactcctttgcaggtagggttctggatgcaatttaggttcagccagttagaagcatttgcatgagatggattcagacctgttataggggaagaatggcaaggctcaag

SEQ ID NO: 805479 - DNA, 603 bp, Homo sapiens
tctaaggaacttgaacaattgaacaagtggagaacaaccccattaaaatgcgggcaaaggacatgaagagaaacttctcaaaagaagatagtcaagcaaaaacatacatatgaaaaaaatgctcaacatcactaatcgtcagagaaatgcaaattaaaaccacaataaaataccatctcacataactttattatgtgtctcacatgactttattaaaaagtcgaaaactgatagatggtggtgaggatgtagagaaaagggaacacttgaatactgttgawgaggatgtaaattagtacagccaatatggaaactcgattggagattcctcagagaactaaaaatagaactataatttgacccagcaatcctattattgggtacatgcccaaaggaaaataaatcctaccaaaaagacatgtgcactcatatgttcatcgcagcactattcacaatagcaaagacattgaattaacctaaatgccaataaacaatggattggatgaagaacatatggttcatatatacatcatggaatattatgtagccataaaaaagaatgaaatcatatcttttgcagcaacgtagatgcagctggaggct

SEQ ID NO: 805480 - DNA, 603 bp, Homo sapiens
tctaaggaacttgaacaattgaacaagtggagaacaaccccattaaaatgcgggcaaaggacatgaagagaaacttctcaaaagaagatagtcaagcaaaaacatacatatgaaaaaaatgctcaacatcactaatcgtcagagaaatgcaaattaaaaccacaataaaataccatctcacataactttattatgtgtctcacatgactttattaaaaagtcgaaaactgatagatggtggtgaggatgtagagaaaagggaacacttgaatactgttgaagaggatgtaaattagtacagccaatatggaaactcgatwggagattcctcagagaactaaaaatagaactataatttgacccagcaatcctattattgggtacatgcccaaaggaaaataaatcctaccaaaaagacatgtgcactcatatgttcatcgcagcactattcacaatagcaaagacattgaattaacctaaatgccaataaacaatggattggatgaagaacatatggttcatatatacatcatggaatattatgtagccataaaaaagaatgaaatcatatcttttgcagcaacgtagatgcagctggaggct

SEQ ID NO: 805481 - DNA, 579 bp, Homo sapiens
tctaaaaaataatttcaacttttatttagattcagtgggtatattgcatgatactgaggtttgaagtacaattgatgcaatcacccaggtagtgagcatagtacccaataattagtttctcaagcctttactcccttcctccctcccctgtctagtaatcctcagtttctattgtggccatctttatgtccatcattacccattctttasctcctacttgtatgtaagaacatatggtatttgagtttttgttcctgcattaattcacttgggataatggcctccagctgcatccacattgctgcaagagacataatttcattcattcctttttatggctgttattccatggtgtatatgtaccccattttatttattcaatccaccattggtggatacctaggttgattccgtgtccttgctttgtgaatagtgctgcaatgaacatatgaatgcaagtgtctttttgggtagaacaatttattttcttttgaatatgtacatagtaacgggatgagtgagtcaaatgttagttatgttttaagttctttgagaaatctccaaactgccttctacagt

SEQ ID NO: 805482 - DNA, 579 bp, Homo sapiens
tctaaaaaataatttcaacttttatttagattcagtgggtatattgcatgatactgaggtttgaagtacaattgatgcaatcacccaggtagtgagcatagtacccaataattagtttctcaagcctttactcccttcctccctcccctgtctagtaatcctcagtttctattgtggccatctttatgtccatcattacccattctttacctcctacttgtatgtaagaacatatggtatttgrgtttttgttcctgcattaattcacttgggataatggcctccagctgcatccacattgctgcaagagacataatttcattcattcctttttatggctgttattccatggtgtatatgtaccccattttatttattcaatccaccattggtggatacctaggttgattccgtgtccttgctttgtgaatagtgctgcaatgaacatatgaatgcaagtgtctttttgggtagaacaatttattttcttttgaatatgtacatagtaacgggatgagtgagtcaaatgttagttatgttttaagttctttgagaaatctccaaactgccttctacagt

SEQ ID NO: 805483 - DNA, 692 bp, Homo sapiens
catttactgtggcataaaactactaccattaggtcaatcttgaggtgcaaatggcacctataagttaaaaagactacaaatatccttaagtctttttagaaatagtttatgctgtcagttgtaatctgccattacatatacatatgccctttgacattgcctatgctaacttcatttccaaatagtttaactgattacttttgatatggttaggctttgtgtccccacccaaatctcatcttcaattgtaatccccaagtgtgagggagcgacctgtaattccccacatattgagggagggaggtgactggatcatggaggcagtttcccccatgctgttctcgtgatagtgagttctcatgagatcgatggttttataaggcagttttccctgcttttgtttgctgtctctctcctgttgccatgtaagatgtgtctgcttccccttctgccatgattgtaagtttcttgaggcctccctgccagacatgcagaactgtgagtcaattaaacctctttcctttataaataacccagtctcgggtagtatctttrtagtagtgtgtaaatgaacgaatacaactttaaaaataactacattgagaagaaactctggagtcctaggatcaaattctgttatttttgcaaaaccaagcaaacaaattgacttaattttattggagaataagaaa

SEQ ID NO: 805484 - DNA, 597 bp, Homo sapiens
tggttttataaggcagttttccctgcttttgtttgctgtctctctcctgttgccatgtaagatgtgtctgcttccccttctgccatgattgtaagtttcttgaggcctccctgccagacatgcagaactgtgagtcaattaaacctctttcctttataaataacccagtctcgggtagtatctttatagtagtgtgtaaatgaacgaatacaactttaaaaataactacattgagaagaaactctggagtcctaggatcaaatyctgttatttttgcaaaaccaagcaaacaaattgacttaattttattggagaataagaaaaaaaagtttggttaatcaggattgtatttatactgacacatttaaaagatttaaagataaatgttatgtacttccatgtcctagaacctataatgtgatttgtttatggttcttctttgccttattgatatgtgtattgagacccagattttaaaatttaaaaatgttttgttatgaaagagtcttaatctaaatgtctttaaatggtttggggcctataagggtgactgagtacttctatttgctcttccaaagaaacacaacttggaaatta

SEQ ID NO: 805485 - DNA, 624 bp, Homo sapiens
gaagtagaacccttttttgttgttaatttgaatttcctatcaccaaattttatgacctcaattccattatgaaaatccattttgaatagattcagtaattttggaaaattaaagttcaaccataaccagatttaataattcatttgattcaggtcttaaatattttaattattcattaagttcaaaaaatccttgcaatgatctcacctatatgtggaatccaaaaaagtaaaactcactgaagcagagagtaaaatggtggttaccagaggccagagtttggggmattggggtaatgttgtccaaaagatacaaaatttcagttaaacaggaggaaaaacattcaagagatctatcgtatataatggtaattgtaattaacaacagtatattatatacttgaaaattgctaagagagtcgattttaagtgttttcagccaaaagagagaagtatgcaagataatacatatgttaattaacttgctttagccatttcacaatgtatatatcaaaacattatgttgtataccataaatatatataatttttatttcttaattaaggaaataagataaattaaaattgttaaaaatccatgccattaaatatattacaaaatataa

SEQ ID NO: 805486 - DNA, 597 bp, Homo sapiens
gtaagttaaacgcatcatgaatatatgttatcaagaggattgaatacaggattcagctataggacctggagataggacctatcttcaatccttattacagttacacttaaaatagaagtcaaataatactcactaaatttaatggagatatttacaattattttaagactttgtttatagactataatgaaaaattaaagctatcaaaaatgtttagctatccaagtgtttcttaagaggaaatttcctatttgttaccctaataatcacctcaattctgtattttaatccataaatatagacactgcttaagttttctaagattctagaatacactctgtttagttctttgggcccactctrgttgcttttcatactttcctaattctctagcatggcatgcattttactaagtgggttaattaaagataaagaatagaaggataaatgcttgaggggatggatgccccattctccaggatgtgattatttcacattgcatgcctgtatcaaagcagctaatgtaccccataaatatgtacacctattatgtacccacaaaaattaaaaattaaaaacagatacaaaagaagagac

SEQ ID NO: 805487 - DNA, 536 bp, Homo sapiens
acctcctctgagggtttgcattttactcaataagccctccgctcaccaccctaaattgcaacccatcatttcccctgcctccctcactctagagccctcttgctctaccttgttgtttttccataaaacttattactatatctcacatataaaatttagtcatttattatgtttatggttatttgctaagtgggctttgctatagcatgaatttttgtctttttttttttttttttgagatgcagtctygctctgtcgccaggctggagtgcggtggtgtgatctcagcccactgcaacctctgcctcccaggttcaagtgattctcctgcctcagcctccccagtagctgggactacaggcaagccccatcatgcccagctaatttttgtatttttagtagagacggggtttcaccatgttggccaggatggtctcgatatcttgaactcgtgatctgcccgccttggcctcccaaagtgctggtatcagaggcgtgagccaccgcgcccagccggatttttatctttttaaatg

SEQ ID NO: 805488 - DNA, 536 bp, Homo sapiens
acctcctctgagggtttgcattttactcaataagccctccgctcaccaccctaaattgcaacccatcatttcccctgcctccctcactctagagccctcttgctctaccttgttgtttttccataaaacttattactatatctcacatataaaatttagtcatttattatgtttatggttatttgctaagtgggctttgctatagcatgaatttttgtctttttttttttttttttgagatgcagtctcgctctgtygccaggctggagtgcggtggtgtgatctcagcccactgcaacctctgcctcccaggttcaagtgattctcctgcctcagcctccccagtagctgggactacaggcaagccccatcatgcccagctaatttttgtatttttagtagagacggggtttcaccatgttggccaggatggtctcgatatcttgaactcgtgatctgcccgccttggcctcccaaagtgctggtatcagaggcgtgagccaccgcgcccagccggatttttatctttttaaatg

SEQ ID NO: 805489 - DNA, 607 bp, Homo sapiens
attagaatctgatgttcttcccactaacttcacattgcttccttccaaacactttctaattttggcattgtctaattctccagctttgcaaaagcactattatgtcaaagactattgcattctagagacttggctccagagatgccatcatggctacctgtctaagagtaaagcagaaatggatttcagtgctataagttctactctagcctacatttcacaaaatctaagagcaaggaacacgttcacaaacatttgcaagaaataaaacgtgaaggaaagatttagactcttacagcagctttaaaacaattcctactcagggtggagacttaacttagtgaatacccatgctgagtattaaaggtttttcagagttggttttgcctgtgagctcctaaagaccattttctgatcctgaaattcagcttacaggaacctttaaacaaatgtattctgcattattytcattattcaattatgacagtctttcccccagcattttaattagcactcatttactgagaattaaactgtcgttttagttgaactcaaagaagtaccccagggacatgcattccacaagataataaaagcaccatataat

SEQ ID NO: 805490 - DNA, 473 bp, Homo sapiens
tggaggttaaggaagagaatatttcagtttgaaaatatgaagctaagccccacaacgaaatagttacagagttttaaaaaagaaaatgttcattaaaacccaccaccagaaactctctttcaagaggatccttcatattttcatgkcattgaatctttcttaaagtgcatttgaaagagatgttttcagtggaatagagagatgtgtaacaatatttacaaaagcggttggctgtaataaaaaggaaaacgcaaatgagtggggacacaggggaccctgttccatttattctcaaagcacgtttgaaaactgcgttgccatagcgtccttgggtagagacaaagtcgaggcagatcttgttcctggagtattgatttgattttggaaacggtccaaggctttcagaaatcaggctgactttcagatctaaagtctcaagaatattcgttctagcagtgagcctgtgagaatct

SEQ ID NO: 805491 - DNA, 561 bp, Homo sapiens
gagacatttgcagtgtagaatatctagctggattttcttccttggagattatcctgtactagtaacaagcagagaaaatatttcccacgcctgtgagtatttaggagttcctttgtgtgcctagatctttttttccccatacaggggaagtggtgtgcactgggggtaggcagaagaaaaatgacaagaagcaaaagctttgctgctgtgggatcaaattccaagcagaattccttcatacacttccatttctgtgaaagtgcggtgtggtgtttgttttcactgtatctgctcgcttaattgtttctgcctgttcatttcgttcctcagtgaaaacgttagcctaagggacatttgaaaatcaaaaggtaggcttggagtttaacaggaaatgaacagtggtgttgctgcaayattaaagtaaaagtttagaaccaataagaaataaccacaattctaaactcaacacgtcttttctcctttttgttgtttcctttgctctcccaaatgtcaagattaaagaaaaacattccatggtttctacatgtttacattgcaagg

SEQ ID NO: 805492 - DNA, 656 bp, Homo sapiens
acaaagacacttctatcactcaggaaatcgcaagggtttcgaagcttattcccggggaccaagagtcagttaaattctttattatacaacaaaggcgtcccacgtttaataaatcttggctagatatattaatgactaaattaataaatgaacacatacgtgaatgacctggaataacttttcagttgcataggactaaaaaccagctcaaaccaattaagaaaatgttggcttacayagtgcggaaaaaaactaagtgtttggagagtcaagaaagaccttcaggtattcaataaccaggagctataactaggacttgagaccatcagaaattgatttctcatctcatttctgtttgtttctctgcttcacctgcagaagggctgtttttctcctcccttgtgacagggaacatggctttcaactcaattcatagatttgtgttctcttagcattaatatatatttcagggaaaactctagttggccttatttggatcatgtgctcggttcttggaccaatcactgtcccaagggaggggaggactgtccaggcctgggtcacatgcctgtctctgtggtctgatgttgtgattgacaggccaaatagaacgctggggactggtggatcctcagtggaaaaaacgatgaacagat

SEQ ID NO: 805493 - DNA, 509 bp, Homo sapiens
ctgttgacctgcatccttactgaaaacataaacagtcaactaacacatattttgtatgttatatgtattatatactgtattcttataataaagcaagctagagaaaagagaatgttatttgaaaatcataaggaggaaaaaatatgtttactattcattatgtggaagtggatcctcataaaggtctttatccttgtcttcttcrtgttgagtaggctggtgggcaagaggaggggttggctgctgcctcatgggtggcagaggctaaagaaaattcacatacaagtggactcgcacagttcaaatctgtgttgttcaagggtcaactgtactcgaaaacagcatcctctacaaactcacaggagatatctgatctgccaccactgacaatttaagagttctgggtttcaggacctcttagcctatttgggccttacttcctcatctgcaagcactggttgctatgaactcttgttacacctcagctggatactaaagaaacatgtccc

SEQ ID NO: 805494 - DNA, 543 bp, Homo sapiens
ttctcatctataaagaggggtcatcgtagtggcctctcagacaagcatacaaatgcaaggtccctaatgctgtcacctctatccactctctaggtctgtgggagaaggccacatgccccatcagcacaaggtgagcctagactgaaggctcagggttctccagcatgctccaaggtccacagtgttcccattcccattcactctgccccacacccagcccagagcagccctttctaggtgctcttgtaagygtaatagatcccttgcccaatgtgcatggcaagtcaatacaccaagtacatcaggttgcagcagagaaagaggtttaatgacagggcttccacacaaggaaacgggaggaagcctcaaatccatctcccagaggagtttggagcttgggattttaggagttttggagtgggccgaagtgtggagattgttgattggtcgaggagtccagggtgaagttctgggacagggagatgaagaaactgtgttctcatactgattccattcctctgtgggggtcttcaaacttgttag

SEQ ID NO: 805495 - DNA, 573 bp, Homo sapiens
ctatttttcagaatgctctccctccccccgaccctatcacctgagaggccccagcgtgtgtttttcccctcctcgtgtccatgtgttctcattgttcagctcccacttataagtgagaacatgcggtgtttggttttctgttcctgccytggtttgctgaggataatggcttccagctccatccatgtccctgcaaaggacatgatcctgttcctttttatggctgcaaaaatacttcttttaggggacttgttagctttctattctggcttagaatttccacttaaacttgtttttctgggatatatagcagaggggtgggactggctggattccacactactcggtatgagaaggctaccctcttatcctcctgtcatgatcttgatggattagcttatcacatttcaaagtcatcttggaaagaatcaaaagctctagagaaacctgctgtggtagtttctgcccctaggctaggtcatcctgagaggacagtccaggctacacagtgctgaaggggagaaggagcttagagtaatcttagctaacctgttttgtagttttgccaagggc

SEQ ID NO: 805496 - DNA, 460 bp, Homo sapiens
gcaatgctatatagcattgcttattctagattcttaatatatacaataataggctgggcacagtggctcacacctgtaatcccagtactttaggaggccaaggtaggcagaaactcaggcacagagaggtgaaataatttaccccggttcgctcagctaacaagtagaagagtagaaatgctgggatttgaaccamagcagcctgtctccaaagtccatgctttcaaccactagacactactgcatctctgagccaagtgcccacgagctaggatgtctattggacctgaagtgagatgagagttcaataaaagtgtcacataggagtagggtccccagggggccaggatgcagcctctgggatatggactcagtaagggaaaaaatacagccactaagaaactgaaacaagaggttaaaaaaacaaacacaaaacttgttactaaaggggattcatgta

SEQ ID NO: 805497 - DNA, 627 bp, Homo sapiens
agtttactgttatctttggaatgtattacttctaagagcttaactcatgagtgcaggtctagagccaatggcaaaaatgtttccatatatattttgtgagatttgaaaacatactatcctactgttaaacactttttttttgtggtgaaatatacataacataaacttactctttttaccacttttaggtatagtagagtgacattatgtacattcacatggttatgcaatcatccccccatccatctatagaactttctcatcatcccaaactgaaactccatacctattcaacagtaacttcacattcctccctctccccagtaaccactattctaycttctgtttctatgaatctgattactctaggtacctcatataagtagagtcatataatatttgtccttttgcaactgtttttttttcactcataatgttttcagagtttcatccatattgtagcatgtatcagaatgtcattccttttcaagactgaataatattccattacatgcacataccacattttgtttatccatctatctgttgatgaccaactgggttgtttccacttttcggctattgtgaatcatgctgctacgaacactgatgtacaaataagttcct

SEQ ID NO: 805498 - DNA, 559 bp, Homo sapiens
agagaaaaagtaatgaactacctcttagaaaaatgagggtactcagttacatgcttatgaaatcctgtttacctctgcttctctcttcaaccactggggctccaccttaggaagggaaatgcatcggggttttcactttgggcagccgtgggctgtggtagccctctctattttcttcaggattctcaaaaccgatgttaacattttccccactgaaaagtgaactcagggaaaggactctgcttactctctgagttctagcttttcttcagttttggcctggtaattccctggtatgtgatcagctcttcaawgccattgagaattttttttttttttttaaatgtttgaggtactaatttggattgttgtcagcagaagtgagtttgaagacaatgagaggtcattttgtctgaataacctagcctgcaatgactgttacccattgacaacatagaataaagcttctatttgtgtagaaagactggagaccagttatgatgccttaaaagttttacagaatggcttgactaatttttttaaggaaacagtattcatc

SEQ ID NO: 805499 - DNA, 542 bp, Homo sapiens
gatgatttgaaagcagctgcatttgctcttggaggctttgggagagcaggaatgaaaacattcagaggaagacatctgtagggaattcttctgttacttaccaaagaataagtgtctttctggtgttttatttcctatcataaaaatacaacagtgcatttacaaggttaaagattcctcgaagttctaggaaattcttgaaaatataagtggtgcttagaaaattcaagcatttaggaatgtgacctttaattcaggtatgtaaaagacttttttcccaaacttttaaaagtaggaaatacaataaatacagaaaagtcatatggttgaataaataattataaattgagcactgatggaatccctctacaggtcaagaaatagcgcagtgtcctggatgcccattatattgttttctcctttctgggtaacargccctaacttctgtaatttaaaagctcctacttttgccacaaggtggtgcttctgccattagacgcagttaggaggatgcaactgcaaatctaaaattacgaagttag

SEQ ID NO: 805500 - DNA, 612 bp, Homo sapiens
cctatgaaactgtcagcattaccaggccaggaactactgtcttcctaatgttgtctcctacagcctagtactaagacagggaaaacaggtagtactaaggttgagatactgtctctggaatcagacaacccaggatgcaggtctttatctctctaaatactcttttatctgtctagtaagttcctgggacatatctaattattattttattttatttttccataagctattggggtacaggtgctgtttggttacatgagtaagttctttagtggtgatatgtgagattttggtgcayccatcacccgaacagtatacactgcaccatatttgtagtcttttatccctcaccccccccactcttcctccaagttcccaaagtccatcgtatcattcttatgcctttgcgtcctcatagcttagctctcacataccagtgagaacacagaatgtttggttttccattcctaagttacttcacttagaataatttctccaatctcatccaggtcactgcaaatgctgttaattcattcctttttatggctgagtggtattccattgtgtatatatatatatatttatacaccacagcttctttatccacttgtt

SEQ ID NO: 805501 - DNA, 616 bp, Homo sapiens
atatgtatgatatatatatatactatatctatctatatatcctatatataatatatggttaggctttgtattcccacccaaatctcatcttgaattgtaatcaccaggtggaggtaattgaatcattggggcagcttcccccatgctgtcctcatgatagtgagtgatttctcatgagagctgatggttttataagaggctctttccccttcgctcsgcgcttctccttcctgctacctcttgaagaaggtgccttgcttccccttcaccctctgccttgattgtaagtttcctgaggcctccccagccatcctgaactgtgagtcaattaaacctctttcctttataaattacccagtctcaggctgttctttatagcagcatggaaatcgactaatactatatatatacttatatatataagttgtatgtataatatacatatatatatgagctttaacatctattaatgatggggatatggggagatggaaattttcatacttttttgtggataagagatgttaattttttaaaacttagctgatatctagtaaaatagaacgttcttacattttcagcccagcaatctcattcatgcgactccatcccttag

SEQ ID NO: 805502 - DNA, 619 bp, Homo sapiens
tgggagtagctttcctttgtatatcaaaaacttggaagagagaggaatgtacattggctacccctgcccctccaggggtcacagtctatagccccatgagacctaggaataccagaaataaatgagcaataggattaattctggtaggaattgggtggcaataagactagtggcaccctggcagctttgcttaccacgagtcaaccctaaagaacttractcaggccgggcgcggtggctcacgcctgtaatctcagcactttgggaggctgaggcgggcggatcacaaggtcaggagatcgagaccatcctggctaacatggtgaaaccctgtctctgttaaaaatacaaaaaaattagccgggcgtggtggtgggcgcctgtagtcccagctacacgggaggctgaggcaggagaatggcgtgaacctgggaggaggagcttgcagtgagccaagattgcgccaccgcactccagcctgggcgacagagcgagaccctgtctcaaaaaaaaaaaaaaaaaagaacttgactcaaactctagaatccccagttaccaacacaggtgaggcattaaagggaaatcaagagtccctaggctctttggcaaatgtagttct

SEQ ID NO: 805503 - DNA, 554 bp, Homo sapiens
cctcccaaagtgctgggattataggcatgagccaccacgcccggcccattattttgaaagttaagcccacatagaaactctaagtggtctcatagaagaacagaattggagtccaggtgcggtggcgcacgcctgtaatcccagcactctgggaggctaaggygggtgggtcacttgaggtcaggagttcgagaccagcctgaccaacatagcaaaatcccgtctctactaaaattacaaaaattagctgggtgtggtggtgcacacctgtagtcccagctttttgggaggctgaggcaggagaattgcttgaacctgggaggcaaatgttgcagtgagctgagatcatgccactaaactccagcctgggtgacagagggagactccgtctcaaaaaagaaaaaaaaataaaaagggacacaattgaagcaactcaagttctacttcttggtctttgcagtcactgtgcttttgctgcttatgttgaatctgtttacacacaggcatgggtagcacccaggaggagttgagatgagaaccaactctgaagccgc

SEQ ID NO: 805504 - DNA, 554 bp, Homo sapiens
cctcccaaagtgctgggattataggcatgagccaccacgcccggcccattattttgaaagttaagcccacatagaaactctaagtggtctcatagaagaacagaattggagtccaggtgcggtggcgcacgcctgtaatcccagcactctgggaggctaaggcgggtgggtcacttgaggtcaggagttcgagaccagcctgaccaacatagcraaatcccgtctctactaaaattacaaaaattagctgggtgtggtggtgcacacctgtagtcccagctttttgggaggctgaggcaggagaattgcttgaacctgggaggcaaatgttgcagtgagctgagatcatgccactaaactccagcctgggtgacagagggagactccgtctcaaaaaagaaaaaaaaataaaaagggacacaattgaagcaactcaagttctacttcttggtctttgcagtcactgtgcttttgctgcttatgttgaatctgtttacacacaggcatgggtagcacccaggaggagttgagatgagaaccaactctgaagccgc

SEQ ID NO: 805505 - DNA, 539 bp, Homo sapiens
tgtgtttccttgtgtaattatctacctctccctctagaatgtaagctgcatgctcaccttcgattctccagggcccagctacctggtaggtgcttattaaatatttattgaatggatgatgggctctgagcctttcaccctacagccgcatttccaggtgttctgggagcatcagtgggaaggacgtgtccagtgctcagagcagtgtgtggtacatactaaatactcagcgtcccaccgtgacaacagcrgcgataaccaacacctccattctgccaggccctgtgctaaatgcagtatctcatttaaccttcgcagtgatcctctgaggtaggcactgctcctgtccccattttaaagatggagaaactgaggcttaggaagctgcccaaggccctatagtcagcaaggagaggagctaggatttaaacaccaggaggctgcccaaacccactgtccatacctgcctgctgagttcactgtccaaacccactgtctacacctgccctgctgagtccattgtccaaacccactgtcta

SEQ ID NO: 805506 - DNA, 572 bp, Homo sapiens
tttttttggtagagacggggttttaccatattgatcaggttggtcttgaacatttgagctcaaatgatccacctgtctcggcctcctaaagtgctgggattaacaggcataagccaccgtgcctggccttttttttwaatttttattttagagacagggtcttgctctgtcacacaggctgggatgcagtggcttgatcatagctcactcactcctgagctcaaatgatccacccgctttagccttctgagtagctggcactgcaacagcacctcaccacccacagctgattttttattttttatagagacagggtcttactatgttgcccatgctggttttaagtaatccttccgtctcggcttcccaaagtgctgggattacaggcatgagccaccgtcccggccttagtcccctttctgaggtggtgatggagttgacagggtggtgacggatggggtggtaatatcatcctttcttatattattcttgccaataaaaattggcttcatagaatcagatataaaagttttgaaggaaaagatcatgccatgggagggactgatagaact

SEQ ID NO: 805507 - DNA, 570 bp, Homo sapiens
gggtagatgtcatgtgactgcattagtatttatcacaggaacagacctacagatatatccctacatcctattacccatttctgctggagcctctcctggttagtgacgaacaccataaataaggggaaattagaaaaacaggyttagggaaaaatagatcacctggaatgccattgttttattgaagactaacaatatatatactgaacaaaaaatcaaggaacatgtgatcacagttaactttatatagtgccttaacaggaataagtgaatcagtgacatattagaaacaggattaataattgcctttgagaagtctcaataagttctctctctctctctcacagatacgcgcgcgtgcgcgcgcgcacacacacacacacacacacacacacacaattggtacaaagcagtaccattagtgggaatctcatatttttttccccatatgtgagaaattcccagatgtcatagttgagtgcagtctttgaggttcttattgagtatatcactaattcacaaatgctattgtatctaccctactatagtaagaccctgctgagatttacc

SEQ ID NO: 805508 - DNA, 569 bp, Homo sapiens; identical to SEQ ID NO: 805066

SEQ ID NO: 805509 - DNA, 601 bp, Homo sapiens; identical to SEQ ID NO: 805067

SEQ ID NO: 805510 - DNA, 655 bp, Homo sapiens
actataaaatgccacctcctcccttttaattaaaaaaaataataattctaccagcaacatctccagacctgtgtctcggaataatcacatcatgttggatctatcacaaatattttatttttacacaatgattttaagctaaataaacaccaagtcatttctgaaatggtcatagaaaacacagaagagcaatgtagggcttaggtggaaagtggggaagagagttaaggctcatatgtatatgcaagtcaggtcattcatagcagcatccagttgaaacatagcaacctcctccgtaaccgttcatcccccaaacacttgattctcaaagcmaactcagactcctccatttcttagcctccagaattggatttgtccctcatcagtttactgtcttactgcctcatttagtcaaagcatattttgaaaataaataggtaattcatataaagaaagtcaattggctgtgcacggtggcttacgcctgtaatcccagcactttgggaagccaaggcaggcggatcgcgaggtcaggagatcgagaccaccctggctaacacggtgaaacaccgtctctactaaaaatacagaaaaattagccgggcatggtggcgggcgcctgtagtcccagctactcgggaggctgaggaaggag

SEQ ID NO: 805511 - DNA, 598 bp, Homo sapiens
ctgtagcttatctgtttactttgttgatagtttcttctgctgtgcagaagctctttcatttaatttggtcccatcatcaatttttgtttttgttgcatttgactttaagaatttagtcataaattattcctcaaggtcaatgtccwgaatggtgtttcctagttttttttctaggattcttacaaagtcttcacttaaatctttaatccatcttgagttaacttttgtatatagtgaaaggtaggagtccagttttattattctgctgcatatggctagctagctatctcagtatcatttattgaataggaagacctttccccattgcttatttttgtcaattttgttgaagatcaggtggctgtgtccctttatttctgagttctctactctgttctgttagcctgtgtgtctgtttttgtacatgtaccatgttcctttggtctgtatatagccttatagtttaaagtcaagtaatgtgatgcctccggtttttttgttttttttttttttttttgcataggattgctttggctatttgagctcttttttggttccatatggaattttataatttttttctagttctttgaaaaaa

SEQ ID NO: 805512 - DNA, 610 bp, Homo sapiens
tttattgagcagatagggtgacatttgagcagctgaaggaaataagtaatgagacatagactgtctggggagagcgtgtcccatatagaggcacggaacccagcctgttggggaggaaggtgtttacaatgtggtacaagggaggagacagcagtagagagcgtggagaggaatgaggatcagattggacatgtgcatgttgtgggggacagcatgcagtttattatccagtcggggccctagatagtgaaaggaggtgctgttagtaattgcactaggayagacgtgagtgccagggtctgaggcaggccagggtgtgtagccacctgacatgaaggccagtatgaggcgttggctctcactccaggtgggtgaggagccttggaggctgtcagcagagggcaggagtggttggatgttagttccatattgactgggaagctataaggtttactggcagattggatgggggctgcgagagaaaaggagggttaaacatgactccacagtctgagcaaccggaagacggagttgcctctatggaagtgccaggagactgctggaaaataatatttgaggagaaatgaaagagtttggttgttcgttacct

SEQ ID NO: 805513 - DNA, 590 bp, Homo sapiens
ccaagttctgtgtaagcttgagggtctaacaggagaaacttctcacaatattggaaccccaaagagctatgcaatccaagtaaactataaactagaagagaaatattttacatagaattacagccaacatagggtcacccgagcaccagataatttcaagccttaaaatagttgaactaccaggtacttggcaattcctctctagagaaaagaactttctctataaagagaagcaaatgcaaatcctctctacagaactttcattgcaagtctaaatttattcccacamatattttttctcacacaatgtctctcacacacacacacacacacacacacacacacacacacacatggctcgcaaagaaaccagactgcagagcaggagctagcaaaaacattagacaagggaaacagactcataaagattttagattttaaacaacgaggctggctataggtttaaaaagtgaaagacaagtttgaagatctctgtagagaataggaaactatgaaaagtgctgtagtaaatttacaaatgaatctaaaataattctagagatagaaaatacaataaccttaattaaaaa

SEQ ID NO: 805514 - DNA, 590 bp, Homo sapiens
ccaagttctgtgtaagcttgagggtctaacaggagaaacttctcacaatattggaaccccaaagagctatgcaatccaagtaaactataaactagaagagaaatattttacatagaattacagccaacatagggtcacccgagcaccagataatttcaagccttaaaatagttgaactaccaggtacttggcaattcctctctagagaaaagaactttctctataaagagaagcaaatgcaaatcctctctacagaactttcattgcaagtctaaatttattcccacacatattttttctcacacaatgtctctcacacacacacacacacacacacacacacacacacacacayggctcgcaaagaaaccagactgcagagcaggagctagcaaaaacattagacaagggaaacagactcataaagattttagattttaaacaacgaggctggctataggtttaaaaagtgaaagacaagtttgaagatctctgtagagaataggaaactatgaaaagtgctgtagtaaatttacaaatgaatctaaaataattctagagatagaaaatacaataaccttaattaaaaa

SEQ ID NO: 805515 - DNA, 550 bp, Homo sapiens
acaaatttatgcagtcataactttcatcaaaataaaaatacagaatattttcaccacttctaaaagctccttcatgatcccttgtgtttaataccttccttacactcctagcccctggcaacaactgatcygtctcctctatagttttgcatttcccaggaagtcatacgaatggaaaaatatagtatgttgcctcttaagtctggcttctttcacttagcataattcttttgagactgatccatattgctgtgtgtatatcagtaatttgttcgtttgaattgctgaatagtattccattgtacagatacactacaatctgcttaaccattttcagttgaaggacacttgagttgtttccagttcctggcaattatgaaaataatacattgttataaacatttacatacaaagctttgtatggatgtatgttttcattctcttgggtaaatatctaggagtagatttttttttcatggatagtccggtatccattgatggataatttttttcactactggttggaatattgttttaataaaatactaac

SEQ ID NO: 805516 - DNA, 634 bp, Homo sapiens
gttaatagttaaacattttgcttttagatgctggatctggcttagttactttgtaatcatattaatatttctacagaaaagtgtttgaactggacttaggaagtcaggtttttctacccaatcaatttttgaaaaaaaacttttggttttagatgtaagaactgtgggagatcctgtatctgtataagaattttatgcttcttaagagttctatctgcatctgatcttatcactttttcaatggtaaaatgttaacatcttctataattattggtatgctcaaaatttctattgttggatcaatatttaacatttttattttgcagggaatgtatccattttcctctttttccatttattgctttggtgtagagatgagaaatcaatcaagcattggagtytggaacgtatctagggtcttggatgagaaaaacatcagtaaaggaataaaagaagaaatagacaaaaagctgcaagaaaaagtttgttagagtaggattacatgagttaaagaaaatttcagatgaattaaccttgctctaggtcccaatttacataaatatttgcacccattttatctggactttaagttttagaattgggctgtccgtattactggtgtcttctagatagt

SEQ ID NO: 805517 - DNA, 667 bp, Homo sapiens
gtcccagtggggattctgagtgggggctccaaacccacatttcacctccacagtatactaataagaggttctccttgagggctctgcccctgcagtggacttctgcctggacatccaggtgtttccatacatcctctgaaatttaggctgaggttcccaaactccaactcctgtcttctgtgcacccacaggcacaacaccacccttcagagggtaaaagccaccaaggcttggggcttgccaccctctgaagacataacctgagctgtacattggcytctttcagccatggctggagctagagcaggtaggatgcaaggcaccatgttccaaggctgcacagagcagcggggccctgggcacagcccacaaaaccatttttccttcctagacattcatccctggaatgggaggggctgctgtgaaggtccctgaaatgccctggagacattttcccccatggtcttggttattaacattcagcttcttgttacttatgcaaatttctgcagctggcttgaatttctctccagaaaatgggcttgtctattccaacacatagttatgctgcaaattttccaaacttttgctctctgcttcccttttaaatataagttcaaatttcagaccatctctttgttcacacatgagtgtatgcttttagaaa

SEQ ID NO: 805518 - DNA, 564 bp, Homo sapiens
gagattaaagtggcaggtgaaatagttttagggattcatgctacttaagatgagacagtccagtggagatgtagtttgttaccttgcacagtgactgttaagagtttccagaactatgataaatctattaatgctacttgctcagctttacttaaagccttttaggtaagtccctcaaatataccagatcaagtcaagttccctatggggaacgtcagaacaaacaaaactgtaaataccygcaaatctatagaccaagaacacatcatgggtgatgctaatagaggaggctaaccaggcatattaatagtttgacttacccagactaaatgttttagaactttaagcctcatattttagatccctagggtagagcaaaactcaattcagtcttttccttataatttatgcatcaagtctacatattgagtattaaaaaatgggagcgagagagggttatcaccaaataataacacaacaacaatgttatcaacaaatggcaaaactcgacacggtatcatatgttggcaatcaaaagatctccttgacccagtttatctttgg

SEQ ID NO: 805519 - DNA, 648 bp, Homo sapiens
caccacccacctgttccccgctgaggtcaaactagccacactctgccttcctgtttcagctgccatactgtaaataagtgtcctttctgctacctatttactgccacatttgtcatgttttggtggagtttttgtctgtgattttgctgttgaaaatggcctccaagtgtcgtgctgaagtgttgccttgggttcctaagcacaaaaaggctgtgatgtgccctatagggtaaataacatgtgttaaataagctttgttcaggcgtgagttgcaytgctgttggccatgagttcaacattagcaagccagcactgtatattaaataagatgtctttaaacagaaatacacacaaaacaaggttatagatttattggctgacaaaaacgttgtgaccagaagctataggaatttagccctgtatttctcttaggagcaattgttcaagatttgcaaattcagtgtttgctgctactatatagaatctaactgccaattataagaagaatcatctgtatctaaaagcccctcatttggctgtcagtttgggagtttctatttgataaccttatcctagttctcaaacttctctgttgtggggcttctaaggtataatggactgtcactgggactcatcatgaagtactga

SEQ ID NO: 805520 - DNA, 592 bp, Homo sapiens
agaccattaaaaatggaatgtgatcggtttcaaggacttctaaaatatatctcctttccaaaatgtttaaaataagttttagaagcaccaagagatagctttgtgaatttttttagtctattttaggacactgcctgaaacctttactgtttgatgttctttattctataaatctttgtcctgaagaactaggaagtakgtacatcaaaaaacccgagaataaatgacatgaagcttttgcacagtgacatctcctaagagagtattctttgtgtttctctaaagatggaaatttccttttgtcattaagaacttttgaatgaatataaaaagaggaaggtgaggaacatgaaagaaatgtaaaattggctagaggtttgttcaggcttaatatcaggttttacccaatcttcagcattctgccagtactttcacaccaccgataatgtttcaacttttttatcccaagtgagggaaaatgaattaacccaaacttgaattaaatgtggttcattgtgcaaatagatgaaactattttcttctcatagttgtctcattgaagaatgtttatcttaagtatttctttgtccat

SEQ ID NO: 805521 - DNA, 572 bp, Homo sapiens
cccctacaatggggctttgggcaaaaattatgtctttctgattggtgggcccaggtacctaaagaaggtaacagagtcctggagtttacactagaaatcattcttacaggagaaactagaaaagcaccagagacagggagtggtttttagaagcgggactagcctcagagaagagaggcaagaggaagtttgcctgacasgtattaggacccaagaggcaagggtcaggatagacaggatggatagacgagtctcgcttgggcgacatgactttgagagttctgttcatggctgcagggtcaaccaacttgttgtcaggaccccagagctgaatggctttcctctctgtcgaccctcgtctcagcccagaagtacaggaaaagcggaagctggttccaggcaaactgatgctcccaactccaaagagtcgggggttgttagagagccctttcccagaaagcctgatacccatgtctttagtctcgtggctgcactagtcgcttttaactggccgacaggtgcctggtatttagcccccaaattctaaggaaaaataggacagaatagcaagt

SEQ ID NO: 805522 - DNA, 672 bp, Homo sapiens
ttattcccttatttggccccacccacgtcctgctgattggtccatttttacagagtgctgattggtccatttttacagagtgctgattggtgcatttacaaatctttagctagacacagagtgctgatttgtgtgtttacaatcctttagctagacagaaaagttctccaagtccccacctgacccagaagcccagctggcttcacctctcaatagtgagacctcatctctacaaaaaatmaacaaaattagctggttgtggtgtcatgtgcctgtagtaccagctacttgggatgctgaggtgggaggatggtttgagcctgagagatagaggctgcagtgacctgagatcacaccactgcactgggtgacagagtgagaccctgtctcaaaaaaaaaattttttttacaacatagcatatcacatacacattgtttactgactaaaatgggagccaagctggctaagtgaaatatgagcatttattctatttttgctatgctcttctgtgcagctttggaaacttaatttggggacaaaccattgttttttaaaaatctataaaatgacatagtacaagcagtctcattagtgtttgcaccataaaatgaaattggcaggttcttccttactttcccatctaggatccagatccaagcctcttgagttct

SEQ ID NO: 805523 - DNA, 630 bp, Homo sapiens
taaagtgtaactgattaaggtcatattccattcctcccccaacacacctctcttggcagctttttccaggggaaaagaaggaaaaagtaccagggcattgaatgcatgaagggtgagagcaggggttgagggcacaagcaaaggagaggctggatgcagagaggagaaactgagctcccttgcctgcccagcctgcaaaaccggttctgctgatgtcactggggaagaaacagaagatagatttctaaaggyaatatgataatttggggctaggactcaagaacagaccttatacctgggtggaataagactggtatagaattaatccaaaccttaagaagctgttgaggcagaccccaggcacagacagagacacaaacacctctatgctgcaccatggcccaggcccagaccttcccctcagtctagtggtgaagggagctaggaaaggagtccaccaagacctgactccctacagacaacttccctgcaccacagcatgagaaccaactgctgtaccctggcctcatccagccacaagtgagaggttgagttgatgttcagtttgctttactcgttgacccatcaccgctgaccaactcagagccattaaggagctccctcatgtag

SEQ ID NO: 805524 - DNA, 666 bp, Homo sapiens
tttcaaccagtatttactgtctaccatgtgacaacattgattttggtggtgggaagacattggcaagaaaaaaacatgagggtcctgtgcataagaagcttacattcaagcgaggagagatagttaacatagaaccacgaaaacctacaggatgcgatagtcacatagagaattaaaataggacgatgagacagagtgatggaatagatccctgagtctggcctctactttagaaaggcctctctaagaggtgaggttcaggctgagatccaaaaacccagatgaggccaggcacggtggctcatgcctgtaatcccagcactttgggaggccaaggcagacggatcgcctgaggtcaggagttcgagaccagcctggccaaccatggccaacatggtgaaactaaaayactcttctctactaaaaacacaaaaactagccaggcatggtggcacatgcctgtaatctcagctactcgggaggctgaggcaggagaattgcttgaacccaggaggcagaggctgcagtgagctgagatcatgccactatactccagcttgagcaacagagtgagacttcgtctcaaaaagaaaacaaaaacccagatgagcagcatcactggcgaaatcacctggggaaagtatgtttcagagggagtgcaaaggc

SEQ ID NO: 805525 - DNA, 666 bp, Homo sapiens
tttcaaccagtatttactgtctaccatgtgacaacattgattttggtggtgggaagacattggcaagaaaaaaacatgagggtcctgtgcataagaagcttacattcaagcgaggagagatagttaacatagaaccacgaaaacctacaggatgcgatagtcacatagagaattaaaataggacgatgagacagagtgatggaatagatccctgagtctggcctctactttagaaaggcctctctaagaggtgaggttcaggctgagatccaaaaacccagatgaggccaggcacggtggctcatgcctgtaatcccagcactttgggaggccaaggcagacggatcgcctgaggtcaggagttcgagaccagcctggccaaccatggccaacatggtgaaactaaaacactcttctctactaaaaacacaaaaactagccaggcatggtggcayatgcctgtaatctcagctactcgggaggctgaggcaggagaattgcttgaacccaggaggcagaggctgcagtgagctgagatcatgccactatactccagcttgagcaacagagtgagacttcgtctcaaaaagaaaacaaaaacccagatgagcagcatcactggcgaaatcacctggggaaagtatgtttcagagggagtgcaaaggc

SEQ ID NO: 805526 - DNA, 598 bp, Homo sapiens
ggcgtggtggcccatgcctgtaatcccagctgctcgggaggctgaggttcaagaatcgcttgaacctggaaggtagaggttacagtgagctgagattgtgccactgcactccagcctgggcaacaagagtgaaactttatttcaacaaaacaaaacaaaacaaaaacaattagacaaagagaatgaaatgcaagatccaacagagacattgatcaagtttaggggtcacgttaagcagaagggcggcatatcaagccaggtcaaagatcaagatctcagataaataaaggagctgtatagactcagcagtcttcacctaacccctgtggtcattccctagtgggaccacacccagagaacctcagaagggtcagatgcgtggtttgctctgcagtctggtcaattgttcccasagaaacctgcctgtattgtcagtacttatttagtaactgttaacttgctaaatagtggcctcaagagttaaacatttccattgcatgaaaatacaattcaaactttctctcatggcatataagactatatataggccttgcctaaatcactgaaactcatgtcatgttgcttcttcacagacaat

SEQ ID NO: 805527 - DNA, 558 bp, Homo sapiens
atggggaggattagaaattagtaagcagattactgtccacttttactgagaagacactaattcacccgtttctgaaactgctttgacttagggatactcggaatcatctgggacatttttagttcagttgttcctaagaaactacctggaagatcagtgggaggacatcctaacccctagataaataatcgtacttctctattcatcagtttcataatacataaaaagcgaatactggtaatgtagtctccagtgaaataacaataagatcagcatttattgaaaattgaatagatttctcttccagttccaggtatttgattctaaaacttagattctagtatatcataaacaagagttcatgtataaatgtctgaacacccacatgtctacacactttaataaatacatacatgytttattacatattgctcattcatcacctcatgtgtttcagtgcaatacatgaaatacatatgaagtgatgaatgaggaataacccttaatgtatatcacagtaagtaacaaatcatccaaattcagatcaaatagtagaaa

SEQ ID NO: 805528 - DNA, 523 bp, Homo sapiens
gcccaactaaactaactgaacaatttctgcttttaaatataggctatctttcattgtatactaaattctgaaatattttccctttgaattgtattttcactctcctctatttttagtatcttctggagctctgaagagccagacaacaatgagtgaaaagaaagtawttccatgtagaacactgaaaagcactgttctgcacactctcagccttagatttgtataaaaatttgagtcaagcattttcctgcaccctcttcactccttcctgaggatggtctgaaatgaagtatactatttctgatggttcaccagtgatcattctttgctttccatgcttgagacagcttttttacccttcttctttaattttataatttctgattttgttatttgctcacataccatatggctcttcttttctgaaaatatgtgtttctcccttttacccactgtaaagccaactacacctccacaattcttcctcaacaatcaaaaagactcacatgaaaaggccacccct

SEQ ID NO: 805529 - DNA, 610 bp, Homo sapiens
aatcatcagattctccaaggtctaaattaaagaaaaaatgttaaggtcagctacagaaaaaggccagccatctatgaaggaaagcctgacagacaaacagtggacctctcagcagaaaccctacaagccagaagagattgagggccaatatttaatattcttaaagaaaagaaattccaacctggaattttatatctgataaaactaagcttcataagcaaaggagaaggaagatctttttcagataagcaaatgctgaggaaaattattaccactagacctgtcttacaagagttcctggaggaagctctaaatatggaaaggaaagaccatyaccagccactatgaaaacatactgaagtacacagatcagtgacactataaagcaaccacataaacaagtttgcaaaaggtccagctaacatcatgatgacaagatcaaattcatacatgacaatattaatcttaaatgtaaattgattaaatgccccaattaaaagacacagagtgacaagctggataaagaacgaagcccattgttatgctgtctttaagagactcatctcacatgcaatgacacacataggctcaaaataaagagatgaaggaa

SEQ ID NO: 805530 - DNA, 634 bp, Homo sapiens
cccaatggggaaactggcctgatacccttgtctatgcagtccctgtacagggttcctgactgtggtcagtaaagaatgtcactttctaacaggtctaggagctccaagtttatcttgggaccttaagagagaggatcatccaactcacaggtgtttgaggatacaaacccatggttgggcttggctttaaaaagtcttatctgagattccttgtggaagagaattccatcaaagccaatccaaaagccctatgtagaaataattattgtggctgtactttatacaaataatcaggccaagtataaaactaaagtctatttaaacaacttagtcctatgatgattttttttttttaacaaacatgaggaatggagagagatgaatcatgtttcaaaacttatayttgtcattaatttctaaactcattacttgtttttaagtttttgcctacatttttagactaaccatgcttgttcgtgtgaaccaaccagcaatctctggttgcagctcaaaaagaacaagagggatgggtaatgtagaaatccagattaatattctagttctgagcaattatcctgcagatcctgccaggtgatggaataaataggatccgcatcacccagaggtttctttt

SEQ ID NO: 805531 - DNA, 623 bp, Homo sapiens
gcatagcacctggttcccttttatatatgataatgttactaagagtaagcagtctgtttggctgcacccttgggtttctctctgaaaatagtcttttattccctatcagatagccagattgcaaattttccaaatctttttgctctatttcctttttctctagaagctcgctgtaagtagttagaggtaacaatgcagcagcctgagcgctttcttgcttcaaaacttcttccaccagatgcactatttcattacccttaagttcagccttccacaaacccctagagcatagacaaaatgcagccaaattctttcccatagttaaaaaggatgaactttccttcagttcccaataagttttttattcatttccatgaagagacttcattaaaacagccttcacsatttatatttctttattattttttaaatatttaatttattttaatttctattttatcatctataattctagcagcattttggtcacaaccacttaaccaatttctaagaagttctaaacttttcctcactttgttgtctttctctgaactctcaccacaatcacccttaatgttgtatttatggcaattcaggctttttgtagtctgctccaaattttt

SEQ ID NO: 805532 - DNA, 584 bp, Homo sapiens
cgtcaagaaacttacagttatggcagaaagcaaaggggaagcaagtaccttcttcacatggtcagcaggagagcaagagcaaagggggaagtgttacacacttctgaacagctagatctcacaagaactatcacacgaacagcaaggtgagaaatctgccccatgatccaaacgcctcccaccaaatctctcctacaacattgggaattaaaatttgacatgagatttgggtcgggatacagcgtcaaaccatagcatatttcactgcatgtatgccacaatttgtttatccatttacctgttaatggtcatttgggttgtttccagttttaggctattatttatttacttattcaggctgtcactcaggctggacagcagtgtcatgatcatagctcactgcggcctgggctcaagtratcctctggtcttagcctcccaatcacataccactgcatccagctaatttttaatttttttgtagagacgagggtctcactgtattgctcagactggtcttgaactcctattctcaagtgagcctcccgccttagccttccaatgtgcggggactacaagcataa

SEQ ID NO: 805533 - DNA, 621 bp, Homo sapiens
cccctgtctgcactcatcaaaagacaaagcttaggcttctgaccactagaatgtccacccagacttcttcactgttttagagaataagacacagcagagtagcggctgggacttaaaagagttgccttctttccttctctgcaaccctactgctctttgtacaagcaaatcaggactcttctcaagtgaaactgaaaattcagcttaaaaaaaaccccttttcaagactgtgaaatctaccacatcrgtagcttttaaaatatcatgatgtaactttatattccactacatgcctgtgaacatgtcaacagaatgacacagtggtgaatgaatgaaaaatatcacgatgtaacttcatattccactacatgactgtgagcatgccaatagaatgacacagtaatgaatgaatgagaaaaactaacagtgagcacctactatgtgtccaatctattctatctcaccctttctcacaacaacaaatgtgcacagggaattcttgtcatcatcatttacactgagaaaactgaggttctgtttccattccttgtgccctttcacaattccttataaaggcactttaccatagccaacacatcctggttaaactacagaattata

SEQ ID NO: 805534 - DNA, 616 bp, Homo sapiens
gctgcagtgagccatgatcatgccactgcactccagcctgagtgagagtgagacccagtctcaaacaaaataataataaaaaaattatgcactgctaaagactgtcattcctataaaacagaataaaatgtgtgtgtacgtgtgtgtgtataagtttgttgcggagtgtgtctttacattagttgcagtggtcaaggatcttaagaattaaaaaaggttctcatatttcagaagctatttgtggcaaggctggtgggcattttgtcattcaaagggacaggctattgaggtctaagcccctcctatataaagagttccacttcccctcccagccttctatgggacttatgcacccaggaaggataaatagatttttaattcacaagagaatgcactgctcctatcgtacatggtgagtgacccaggcatgaaggtatgaaagttatcctgtcattggcctttgttygctagtctggattttgctagtctgcgcgcgcacgcacacacacacacacacacacacacacacacacacacacacacgtcattagttcaaatcaagagaaaaagggcaaggtgtcaggagtgattttgttgccactagctcatttgattt

SEQ ID NO: 805535 - DNA, 610 bp, Homo sapiens
ggttagatggaactggtcacttgtttgaaaacatttattaaaatttctagttgttttgacagcctgaagatctaatcaatacagagctctgtagctcaccacctacaactatgactggtgtctatttacactcattgtgtgaagagtgtaaggatcaagaaaactacttgaaaggctattataataaataagtcaataaataaacaggtgcacactttcctaataaagccttgtctatayttacattgtaagacatttaatacttcctaggccatctttttgatgaattgtttgaaacgttgtaagaaaacttttgccctgggaaattcagttcagccaaataggctgactgacaacgctgtaaaatgctcgctttgtgacctgctgctctggtctcaggcctctttagaaaacaaactgccattttcgcagtgattctgtgatatataaaaacaaagatgaggccataaaataacaactctattttatcaatttagaccagaacttgaattcccatctaatgtcatagcactcatattctttgcaaccagggagctgaaaagaagttttgtgacctcaccaaccccatcctccccatttcaagaacgca

SEQ ID NO: 805536 - DNA, 610 bp, Homo sapiens
ggttagatggaactggtcacttgtttgaaaacatttattaaaatttctagttgttttgacagcctgaagatctaatcaatacagagctctgtagctcaccacctacaactatgactggtgtctatttacactcattgtgtgaagagtgtaaggatcaagaaaactacttgaaaggctattataataaataagtcaataaataaacaggtgcacactttcctaataaagccttgtctatatttacattgtaagacatttaatacttcctaggccatctttttgatgaattgtttgaaaygttgtaagaaaacttttgccctgggaaattcagttcagccaaataggctgactgacaacgctgtaaaatgctcgctttgtgacctgctgctctggtctcaggcctctttagaaaacaaactgccattttcgcagtgattctgtgatatataaaaacaaagatgaggccataaaataacaactctattttatcaatttagaccagaacttgaattcccatctaatgtcatagcactcatattctttgcaaccagggagctgaaaagaagttttgtgacctcaccaaccccatcctccccatttcaagaacgca

SEQ ID NO: 805537 - DNA, 659 bp, Homo sapiens
acttgtttgggctccagacgcctacatctgggatagaacttttttcttttggaggaagagaggggcaaaaagtgatatatttagtccctcctcggctttcagaatgaaatctaattagccaaaataggaattctataagcagcttaaacccaaatgggaaagccacgcagagtggaaagctagatcagatgagtacaaaagattaaagagacatagtgatgtcctgtgggataaaaatggcaaaaccagaagattttacacttaagctgaaagatgaaataagaataagaaaaggataaaggcaaatatcctttaagcagattcacatcaagcaaaacactcaatcaggaggttggcaatgaaagttacgaagaacagtagaatgtkttcatctactggatacatttgaatatacagactctgatgtttcagggtagaaaagaacttcactgaaggaataccagcatcactatctttctgagcattctttgcttagagaattgatactgtaaaaattaatggaagaccaacataatagtaacatttaaaaagatattgttatgtaaatagcaatttgcataaaaatgtaacactaaatttaaacttttactaatactgccatatttcacatttcccctaaaggctttcaatggaggaga

SEQ ID NO: 805538 - DNA, 670 bp, Homo sapiens
caaactctctgatctcaggatccctttattcatattctttttctgagacatagtctcagtctgttgcccaggctggactgcagaggcatgttctcagctctctgcaacctccgcctcccaggttcaagtgattctcgtgcctcagcctcccaagtagctgggattacagacatgtaccaccatgcccagctaatttttgtatgtttagtagagaaagggtttcgtcatgttggccaagttggacctttatttatactcttcattattaaagacaccaaatagcttttatgcgggctatatacattgatatttatcatattataaataaataaaactactaaaatttttggtatttgctttattaattcatttaaaataataaacccawtacgttaatataaacatcttatgaaaaacagaattttctaaaacaaagtcaggaatcagagtaacactgttttacatcttcacaaatttctcttaatgcctagcttaataggagacagctggattcccatatctgcttctgcattcaatctgctatgatatgttgttttgtttaaagtacatgaagaaaacgtgtctcacatggacagctaattggaagagaggagtattttaacagccttctcagaaaacaatggatattcatcttttattcaacaccaaa

SEQ ID NO: 805539 - DNA, 602 bp, Homo sapiens
tcttgcttgctggtttctccatctgctctaaatttagtactaaataaagatagttgtgggggtggaggaggttttaaagatctctggtccaaatccattaggttttttgttgtgtttgaaagctgtaatccagagagagtttgaaagcatatgctaaagaccatttttaggcatgttttgcagaaatgtatagcatctatttacattattatgtgtttccatactttgactgtcaatcctttgcatatagtagtatcctaactgatgttccaaatttgctactatgctatacatgggcttgcataattcctaattcataacatatggatattaaatarattagcttatgagaagcaattcacttttttccatcttggtaagtagaatagtcacaatccaataaagataaataaagatgtctaggactaaggcatcataattacaccttatatttgtatagtgcaaaataacaccttacatttgtatacgttatttaattcttacaactactcagtgaagtaagcaggcatggaagtatcatgaattccattttatagatgaagatattagaacctagaggttttaactgacttgcctaagtt

SEQ ID NO: 805540 - DNA, 689 bp, Homo sapiens
ctttataagaggaagagagacttgagtttgcatgcctgtggtcttttgccatgtgatgcccttcaccatgaaaaccctcatcagaagttgagcagatgccagtgccgtgctcttggactttccagactccagaagtgtgagaaataaatttcttttatttataaattacccagcctcaggtattctgttatagcaacagaaaacagtcaaaaacactattcaaggtaacattcacatgttccaaggtttattaggacatggacatagtgrggccattatttagcctactgcaccaggtagttatttttttttgagacagagttttgctcttgttgcccaggctggagtgcagtggcgcaatcttggctcaccacaacctctgcctcctgggttcaagtgattctcctgcctcagccttccgagtagctgggattacaggcatgtgccaccatgcctggctggttttgtatttttagtagagatggggtttctccatgttggtcaggctggtctcgaactcccgacctcaggtgatccacccacctcggcctcccaaagtgctgggattacaggcgttagccactgcgcccggcctgcaccaggtaattattatcaggtaaatttgagaaacactgataaaggagttaaaaagaaattacttaggcagattgtgaaggtaagaaagtcct

SEQ ID NO: 805541 - DNA, 446 bp, Homo sapiens
gatcaaggatctagtgacaagttcaaatgactgcgttgagcttagaagttaatgattgactgatagcaatgacgcagcctgactttttctgctcttgagtctcccagtttgttaaatgattacaggatccttatgcatccttttgggctattttctcatctctaaaatgggggaaatgtggatgtgaagatacatccagcttctctatggagggatgaaaattacctattagcggcctgttttgaagagccagtcctctgyagtatcaggcacttagaagtggcagccttatcttcactatttcatctactttttggatgcaataagaccaactatttcatttcctgatcttctgatggagtgtcctttcttcccttccatatgctttctcccatcatatttctatttggcagccatcattaacatgaggtccttgcttaacaaag

SEQ ID NO: 805542 - DNA, 617 bp, Homo sapiens
gtttaaaatattgcaggtagagtttatattctataacaattggatatcaatgcaatgtaaaatgctgtgtaaaaatgatgcaaaaagcattaaaaacaaacaaaagatgattagagatctgggcttcagagaaacasggaggttttctgagagagataacacttgagttgggccttgaaattggatgagcagtgggaaagataaatgaaattttggaaagaggcaagcaatgtgtgttgggcataaatgtaggaatgatagtgacttgcaacatggaggaacctccgggccctattttcaaggatttttttttcctatattttgagagcaacttctttataaagaaatggcttttctgatgctctatctcccttcttttctttctccctgtctctgccaccctaacctctcaacttctgtgtctgtgtatcacttaccattccctttataaaatcaggagtcagcatttctaatactctgttttaagtagtaggagttccgtcccacaaatattaatgagcatcatgtatgtgcaaagcaatggaatttggggataaatacacaacagaccttgttttgaacaccttatattcagcttgaaatctttacatataaac

SEQ ID NO: 805543 - DNA, 617 bp, Homo sapiens
gtttaaaatattgcaggtagagtttatattctataacaattggatatcaatgcaatgtaaaatgctgtgtaaaaatgatgcaaaaagcattaaaaacaaacaaaagatgattagagatctgggcttcagagaaacacggaggttttctgagagagataacacttgagtwgggccttgaaattggatgagcagtgggaaagataaatgaaattttggaaagaggcaagcaatgtgtgttgggcataaatgtaggaatgatagtgacttgcaacatggaggaacctccgggccctattttcaaggatttttttttcctatattttgagagcaacttctttataaagaaatggcttttctgatgctctatctcccttcttttctttctccctgtctctgccaccctaacctctcaacttctgtgtctgtgtatcacttaccattccctttataaaatcaggagtcagcatttctaatactctgttttaagtagtaggagttccgtcccacaaatattaatgagcatcatgtatgtgcaaagcaatggaatttggggataaatacacaacagaccttgttttgaacaccttatattcagcttgaaatctttacatataaac

SEQ ID NO: 805544 - DNA, 617 bp, Homo sapiens
gtttaaaatattgcaggtagagtttatattctataacaattggatatcaatgcaatgtaaaatgctgtgtaaaaatgatgcaaaaagcattaaaaacaaacaaaagatgattagagatctgggcttcagagaaacacggaggttttctgagagagataacacttgagttgggccttgaaattggatgagcagtgggaaagataaatgawattttggaaagaggcaagcaatgtgtgttgggcataaatgtaggaatgatagtgacttgcaacatggaggaacctccgggccctattttcaaggatttttttttcctatattttgagagcaacttctttataaagaaatggcttttctgatgctctatctcccttcttttctttctccctgtctctgccaccctaacctctcaacttctgtgtctgtgtatcacttaccattccctttataaaatcaggagtcagcatttctaatactctgttttaagtagtaggagttccgtcccacaaatattaatgagcatcatgtatgtgcaaagcaatggaatttggggataaatacacaacagaccttgttttgaacaccttatattcagcttgaaatctttacatataaac

SEQ ID NO: 805545 - DNA, 714 bp, Homo sapiens
actggattaggagtcaaaatactgggatcctagtatgagtgaactagttaatctcttatttaaggtatctagctccctcagttatatatagacacattggacattattaatttaatgttatttattaagcrcattttatttaaataattcaaactgcaagctgcctagagctagcaaatctctaacggcctgacaggtagtttgaagtagccgtaattacacacattctgcctattggattatctgctgtggcttgcttgatggcttaaaaatgaacattaaatggcacttaaatcaaaattcccagtggccttcttaggtggaagcagatgcttctcccgtttatatagaaatatttagatacaggaagcaaaggagatgtatagtttaaaatgtcaagttgatttgacatgtttctgggtttgttggttttgcatgaaactttaatgttaaacaagctttaaataaatcatctcttggtatttgagggggaagatgtactataaatatattgattccttttagtaaaatggtttatgggttcattagcaatgatgctgcaataacaacaatttttagggaatatcaaaagtgaaaacaaacctgttagcataattttcacatttgtagaaactgttttgtgtcatattatgatgtttagaatggatttagaaacttgagcctaagcagcagtttggtctcatgatactaaat

SEQ ID NO: 805546 - DNA, 605 bp, Homo sapiens
taaattcactttaatatgtgacataaagttgatatttttaaaagatttggtagacatgagcttgtgtttttggggcaataatgatcattattttgctgaattcctttccgttattctgtttctttctgtactgtacagttcaggaagttaatcctcaaaggtttggtatcattgttttattaatttttttggtcagagaataagactaattagtttttctagctggctgtgtcatgctaagaggttttagcttactttaggggttataatttgatctataggataaggaaatctatatggatgagtaattttgaaatgcacattctttccttcttttattgacttttgactctgtttttatgccacgattagttacaaggtgcrcaaaaactttttctagcttgagtaaaaaatgcattttatttgaaaggcactagaaaatctgaggaacataaaccagagctctgccaggaacatgactcagctccccaaactccaatgtgtggagtcttatttgaaaattcaaaatattcagatggaggaatctgacagagaaagagagagaaggagtggtgactatgaggaggggtcagagagtagcctct

SEQ ID NO: 805547 - DNA, 605 bp, Homo sapiens
taaattcactttaatatgtgacataaagttgatatttttaaaagatttggtagacatgagcttgtgtttttggggcaataatgatcattattttgctgaattcctttccgttattctgtttctttctgtactgtacagttcaggaagttaatcctcaaaggtttggtatcattgttttattaatttttttggtcagagaataagactaattagtttttctagctggctgtgtcatgctaagaggttttagcttactttaggggttataatttgatctataggataaggaaatctatatggatgagtaattttgaaatgcacattctttccttcttttattgacttttgactctgtttttatgccacgattagttacaaggtgcgcaaaaactttttctagcttgagtaaaaaatgcattttatttgaaaggcactaraaaatctgaggaacataaaccagagctctgccaggaacatgactcagctccccaaactccaatgtgtggagtcttatttgaaaattcaaaatattcagatggaggaatctgacagagaaagagagagaaggagtggtgactatgaggaggggtcagagagtagcctct

SEQ ID NO: 805548 - DNA, 737 bp, Homo sapiens
aacaaaaaagcatggcattttcaagcaacaaagtgtgtggctagaaagtagaggaagggaacggggctacttgcgggaggaacagtgatatgtggggggaaggaggaaatggaaccatgtgggtatatgtcggagccagattgtaaaaggtctcatataccaggctttcctagaggggaagtgaatagaccaacttggcacttcaagaaccacttggtcctgaccacagacatggagaaaagacaaaaatgggaagctgcggacagatggactaagtaggctgctgctcctaagttaggcattttgctcggtgcaactttctaatttcttccaaaaaaggacttttagagatataggcttcaccagacatgtctttcctcacagatccaaagaaaaattaccaaactgggagcaagacacagttttatcagcataaaaattctcagtaaatctcaaggtatcaatcatatgaaaacatcartgtttctcaggaagaggtggcctccatcctagatctctaaacagggctctcaatcttcaagaaaggcaaggcaaaagttgctatgtttgatttaatcacatacctaaaccttccaaaatgagtttggcaaaaccccaaattccatctatcccctaggacatgtcgcccttttcttcaagctagcgtgacttttccttaaattttaatattgaaattgctcttatttgaaggatcctttcaatatttttatgcaaga

SEQ ID NO: 805549 - DNA, 512 bp, Homo sapiens
cattatatatgaaatgagtagatgaggtattcaaggacatctttgttaaaagtaatagtttttttcatttaatctctaagatgtacatggtgaaagaaatgtttgaaaaaggaaataaattactgttagtaattttaaagagatgttcctaaatacttggacttctcaaaacaggcaaatgaaaaggaggcytggagtttagaattagattgttgaaaaaaaattggggggtatattcaaatctcaaataccatagtgaattggctaatttggatgacagggaagaaatccaaataagattaaattattgcagcttcaaaaactatagattctttaaatctgtggctgccaaaagggcaaattcaaccagaaaacacaaagacacctttcttgcatttctaataattgaaatagttaatattttatgagtatttattaggaacaacgtactgttctaattactctgcaaatatattcactcatttgtttcttacaagcttatgagattggtg

SEQ ID NO: 805550 - DNA, 530 bp, Homo sapiens
ccaaatttgttccattctccccttctctttccagtacccccaattagttgtagatttcatatcttttcataatcccttatttctcagaggtctcattcattcattttcattctttttcctctttttttgtctgcctgtcttatttcacaaaggcagtctttaaactctgagattctctcctctgcttggtatattctgctagtgatacttgtgattgcattgtgaatttattttagtgtttttttagctctatcaggttggttatattcctctctatactggctattttggctgtcagctcctgcgttgttttatcatgactcttakcttccttgcattgggttgccatgtgctcctttagctcagcaaagtttgttttttatccacattctgaagactacctctgtcatttcagcaatctcagcctcagccagttgtgaatccttgctggagaagtgttgcagtcatttggatgaaagggggcactctgggtttttgagttttcattatttttgatctgattctttctc

SEQ ID NO: 805551 - DNA, 597 bp, Homo sapiens
ggagtgggctcacaaagggatctcctgttccaaggattgcaaagattccagggagatgtgtagtttcccagggccacacattcatttaccgcttcccttggctgggggtggggtttcccttggccctgtgtcactcttgggcgagctgtcrccctgtcctgcttttcttcattctccatgtgtcaagttgtttctctgatcagtcctaatgtgagtacctggacatttccgagtatcagattttccatatagtgtgagtaaatgaaaaagaaacactaaagggagatttcgttcttgaaactatcagagataagatcattcacatgaaaggaatgtgatcatctgcaaatggcctaagtaccacagactgtatatagggagttgctggcaggattcagaattaatggtagaaagtattaaatggtaaaaggattaatagtatattagaaaataaatgaaaaatgatctaagctggcctgtgcattgtcactatatttaaattatagctgaaggaccaccttactataattaggaaaaatcctaatggaaattagcggacccagtattatgtaaatgcttttaatgacgatagagatc

SEQ ID NO: 805552 - DNA, 632 bp, Homo sapiens
tcttcttcttcactttattttttctttctttgtttttttgtctccctgaagaaagcagtgacaaagtccactctccttaaaccatgctaaacatgctcaccctaaaggtaattattaattagataataaagtcgtttgacaaatgcttgctgtaactatcaatagctaaacttctattagatcactgaaacactaaacatacaatttaacagaaataacagatcttattgttctgcttcatctaaatactggaagaattttcaccattaataaaaaccgcatagtaccagataggatggttttagcagaaattcacagaattaccaacttaaatkgcttttttaaatgaaaggaaatatcctattacataccagaatgtccagagaatggtttgtaatggagctacaggtattatgcaatcagctgctcaaagatgttactaagaaacattggaaaattatttgctttgactttaattgaatgttataatttagtttgagtaatttctatgtggtataaatgaccacacatttaggaagtatatacattcttagctatatcactgagtacttgcatgacattgagaaatttgcattaactttctgcctattactttcctcatctctaaaaac

SEQ ID NO: 805553 - DNA, 423 bp, Homo sapiens
acacaagaaaaaattctcgacatcactaattatcagagaaatgcaaattaaaaccacaatgagataccatcttagaacattcagggtggcttttactaaaaagtcaaaaaacaacatgttttttggtgtccaccaatagctgattggataaagaaaattttgtatatatackttatggaatagtatgcagccataaaaaggatgaaattatgtcctttgcagcaacataaatggagctggaggtcattgtcctaagtgaactaacacagaagcacaaaatcaaatattgcatgttctcacttacaagtggaagctaaacaaaggatacatatagacataaacttggggaaaacagaatctggggactccaaatcagggagggagggagggatgtgatggttgaaaaattacctactgggcgca

SEQ ID NO: 805554 - DNA, 631 bp, Homo sapiens
aacccatgctcatcatgggagaaacaccctggtaaaaaagggagaccatctcttccccatgtttatgtgttgtggttagtaatgtcaagtgtttaagcgacggtgagtacaatggcaaggaagagccaagttttasaaggccccaaaagagaaatttattcttaacttaggatactggacttcctgaaagaagagttttaaactaaaatcaatagagtgagaatgagttagccagagcacatgaaaatacttggatgtaaaaacataaaaaagaccaacgaactgaaaattcttttataatatatgtcagaatgaaacacttaaaaacgaagcacttataagaaaaagatgataatctttttactaagaatgtgtatgtgtgattttatttatatgacatacatgtatatgtatatatacacatatatgattatagccatttacttctttagcaatacatttatttagaacatatagttctaaatatgcagaaagatttataaactatagatacaaaatattatatacatatgtatttctcaagaatcagacaaccatctgctctttaatgtagctgtgatatttccttatatctagaaataatgcaaattatcccctttcggggacaatt

SEQ ID NO: 805555 - DNA, 631 bp, Homo sapiens
aacccatgctcatcatgggagaaacaccctggtaaaaaagggagaccatctcttccccatgtttatgtgttgtggttagtaatgtcaagtgtttaagcgacggtgagtacaatggcaaggaagagccaagttttagaaggccccaaaagagaaatttattcttaacttaggatactggacttcctgaaagaagagttttaaactaaaatcaatagagtgagaatgagttagccagagcamatgaaaatacttggatgtaaaaacataaaaaagaccaacgaactgaaaattcttttataatatatgtcagaatgaaacacttaaaaacgaagcacttataagaaaaagatgataatctttttactaagaatgtgtatgtgtgattttatttatatgacatacatgtatatgtatatatacacatatatgattatagccatttacttctttagcaatacatttatttagaacatatagttctaaatatgcagaaagatttataaactatagatacaaaatattatatacatatgtatttctcaagaatcagacaaccatctgctctttaatgtagctgtgatatttccttatatctagaaataatgcaaattatcccctttcggggacaatt

SEQ ID NO: 805556 - DNA, 573 bp, Homo sapiens
agaaagcaagaaaattagtatcaacaactgggatttggatactatgtagaaagatgtgaaactaaggaaaaaaaagaaaaagaaaattctaagatttttgcttatatagctcccttattatcaagtaatattaaatttattttttaaataaaaatggctttgatgccatttktcctgtcatacaaccctcccaggctaaagggcattaattacattgacaaacttgtgttggcagcaaaaaccaatgggtttgacttttatcattttctagaacattacgttatagtagccattttgtatcgcctaatatttctcagtgtacagcaacattctgcatcctgagaaacttaacatggaaaaagagtgatttaaatatttaagtaatatttgcttttaatattttgaataataggaaacaggaaagagattttcaaatgagcagataaatagatgtatggatggcaaagaaagttaacaattaattaaatttatatataaatagtaatagaaatgaaaacattaaatttacagtagcagtaacatgcattaattcgaaactattctatttttcct

SEQ ID NO: 805557 - DNA, 524 bp, Homo sapiens; identical to SEQ ID NO: 742415

SEQ ID NO: 805558 - DNA, 569 bp, Homo sapiens
ttctgtgtgaggactaagctccaatttttttttaatcttgcccaaattcctatctaaaaggtctggggagtcatgccctacaaaccataaattcttgtcagacaggttttatttagccctatatattgtgactttctttccaccctgaatctggcataacattatgagacaagcaagaaaatcaaaatattttaccccaaaacwtgtttatttgccagatcttgaaatggccccgccaagctgtcctttgtgggaaaatgtgaatctgtaaagaagctctaattacatagttagatctttttcttccaggccctaccaatcctgaagagattcagtcagcatctagcatctttttaaaggtctgaattggaaacatttgtcatctattgtctctaaggtcggccactataagacatcaaaataaccttggtctccacagtcttttatcctaacctgaacatttattttctattgatcccagatctttagacaaactcaaccaattgtcaatcagaaaatgtttaaatttacctatagcctggaagcccccctttgcccccactctttga

SEQ ID NO: 805559 - DNA, 392 bp, Homo sapiens
  misc_feature 1, 2, 3, 4, 5, 6, 7, 8, 9, 10, 11, 12, 13, 14, 15, 16, 17,18, 19, 20: n = A,T,C or G
nnnnnnnnnnnnnnnnnnnngagaggaagaggaagtccccgagtgggggatcccgggccagccacagacaccctgtgcagcttcctccttccgggtgcaggcgggcctgggcagtctgagtcctacctcagcccccacctcacctccctgcatcctcctagcatctctgcagggctagcccagaggttggcggcggaaggcccacagctcccctggctccatgggcaatgaccgracagcccttcacctctctgggccttgttttctcaaactgaaactggagaggatgaccccagcctgggaccttcgagggcctcaaaagggctctgggccttgcgtggtgagtttggtcacccacacacccatcttcccaaatgccaggcttcactcac

SEQ ID NO: 805560 - DNA, 390 bp, Homo sapiens
ctgtaatcccagctactcgggaggctgaggcaggagaatcacttgaaccagggaagcagaggttgcagtgagccatgatcatgccactgcactctgggaaatagagcaagactctgtctccaaaaaaaaagaaaagaaaaagaaaagacagaaggagggaaacacccttccacacatcaggccttgaagaccttggggcctctcctgtatgactggtcaacccactccagyatccagcgcagcacccagcataggtgaagggtgggcttacggaattcactgaaagaaaccaacactgctcagatgctttccccaccccgtgcaaagggacatcttcacctcaaagacatagattcctatgtaagaaatcatctcaggcaggccctccca

SEQ ID NO: 805561 - DNA, 617 bp, Homo sapiens
taaaaagtacgaagtgttggtaatcactggaagtaggtaatagatgcatggttcactatactgttctctctacttttatctactctgaaattttccataataaaaagttcttttgacttaacaaaaaaaaaacaaacctgataacaggcagaaattcagatctacacaaaggaataaagagcaccatgtatggttcattaaatgagtaaatttataatatgttattatttaaatatattttaaagataaatgactatttaaaatgcattgtagaaaatataacatacataaaaacaaaatgtttgacaatagcagcattaaaactaagaaggagtcctcggcaaagcccgagtcctgtcctctcgccctcctcccggaacagcatgagcttcaccactcgctccaccaactactggtytctgggctccgtccaggcacgaccagcgtctatgcaggtgccgggggctctggttcccggatctctatgtcccactcctccagcttctggggcggcatggggtccgggggcctggctgtgggaatggccgggggcctggcaggaatgggaggcatccagaacgagaaggagaacttgcaaagcctgaacgactgtctgg

SEQ ID NO: 805562 - DNA, 646 bp, Homo sapiens
ataaaaaccttcaaaactcaggaaaaaacatttaaaaatggacaaaagatctgaacaaagattcactaaagaagatatcaatagcaaacaaatattcaatagaaaagatattcaacatcactacacattaaagtaatgcaaattaaaaccccagtaaggttccactacccacctattagaatgactaaagttaagactgatcattctgacttggcacrgtggctcacgcctgtaatcccagcactttgggaggctgagatggatcacctgaggtcgggagttcgagaccaacctgaccaacatggagaaaccccatttctactaaaaatacaaaattagctgggcgtggtagcacatgcctgtaatcccggctactcgggaggctgaagcaggagaattgcttgatcctgggaggcggaggttgcagtgagctgagattgcaccatcacacgccagcatgagcaacaagagcggaaactccgtctcaaaaaccaaaccaaaccaaaaaaaaacgacagatcattccaagtactggtgaagatatagagcaactggaatcctcatacactgctggtgggaatgtaaaatgttacaaaccttttggaaaagagtttggcattttcttaaaatcttaaacattcacctg

SEQ ID NO: 805563 - DNA, 671 bp, Homo sapiens
tttaatcactgtagctttaaaatatattaaaatatctgatagggccactctcctcttataccatttttttaagattttgtctgacctttattgtttgtttgtccttcctatgaaatttagaattcatcagtttacttttaaaaatcctgttgatagttttattggtaacatcagttttgatcacttayattttcttagaaaattatctattccacacacagtaaatgtttttttcaccaaaatctcacttattaacttactgtttaacaacaaatgtatgttgactctcctcttgttttcttggtaacatttgtacacaaattgtctattttcttcagcgaaccagctcttggatttgtctaccaaatgtgttgttttatgttttctaatttatccattttttgctcttgactttataattttttccctttgttccttttaggaaaaaataaattagaagaaaaaaatcattgtatataagaaatacctgttttcaatgtaaatgaaggttttgtttttcatttattcactgaataatttttaaagcctccatgttctgaatttggtactagccagtaagaaaataaaaatatcctttatatagggaaatagaaatcattccagcatataaatgctatcagagtctcaggaatgcttttctggaacattcc

SEQ ID NO: 805564 - DNA, 567 bp, Homo sapiens; identical to SEQ ID NO: 756566

SEQ ID NO: 805565 - DNA, 516 bp, Homo sapiens
ccatccatttgtttattttttctatcacagtattaactgatttaaacatcttattttttgtgtgttttttgttgttggtggcggtggtggtgcttttttgagatggagcctcgctctgtagcccaggctagagtgcagtggcacaatctcagctcactgcaacctccacctcacgggttcaagcgattttcctgcctcagcctccccggtaagctgggattacaggcgtgtgccaccatacctggctgatttttttgtattttcagtagagacggagtttcaccatgttggccaggctggkctcgaactgctgacctcaaatgatctacccacctcagcctcccaaagtgctgcgattacaggcgtgagccaccatgcccggctaaaacatcttatattctttattttcaacttactttgacatattttaacagacgcaatggaatgaatgaggaccatgagggaagtgggagcaccacagtagtaaagctgggttgaggttgaaagccctcactc

SEQ ID NO: 805566 - DNA, 619 bp, Homo sapiens
cagagacttcaagggggatcccaaggtcaaaaactgagttacatgaaagcttaaggctgcagcacccccagatacctgagttcctcctggtgcaggctcccatcctctgcttgaagcttctttgccacctgaccaccctagtcttcaccccgtagcctgtgcctggggtgtttctctctgacgtagccctgggtgtctgacccattggtcaatctccatgactgcagatcagctctcaagaatgctgtgccttggcggtctatgcaggcctctggactcaagctctgaaacgctgtaaaccaatcctgtccggcgagccctggccscactcattcttttaggacaggctttagcatcattcttgttaaacagtatcagtgctcactagagacactgaaggttcacgtgggaaacatatattatttgaaaaaaagggcaaataagttttcacttttatctcaactctcaggaagtcctggtctcaaagcaggcaaatgcccaagaaaccaggcttatgacacaagtgttattcacgcagaaaacaatttacagagtgcctgtgctccagtattagtgttctgtaagggtaaaaagcgttcaaggagttcacagtctaggc

SEQ ID NO: 805567 - DNA, 619 bp, Homo sapiens
cagagacttcaagggggatcccaaggtcaaaaactgagttacatgaaagcttaaggctgcagcacccccagatacctgagttcctcctggtgcaggctcccatcctctgcttgaagcttctttgccacctgaccaccctagtcttcaccccgtagcctgtgcctggggtgtttctctctgacgtagccctgggtgtctgacccattggtcaatctccatgactgcagatcagctctcaagaatgctgtgccttggcggtctatgcaggcctctggactcaagctctgaaacgctgtaaaccaatcctgtccggcgagccctggccgcactcattcttttaggacaggstttagcatcattcttgttaaacagtatcagtgctcactagagacactgaaggttcacgtgggaaacatatattatttgaaaaaaagggcaaataagttttcacttttatctcaactctcaggaagtcctggtctcaaagcaggcaaatgcccaagaaaccaggcttatgacacaagtgttattcacgcagaaaacaatttacagagtgcctgtgctccagtattagtgttctgtaagggtaaaaagcgttcaaggagttcacagtctaggc

SEQ ID NO: 805568 - DNA, 530 bp, Homo sapiens
gtcctgtcatattatcaggatcctcttcagaaacatgagaaactcttcctgtaaggtaagatactgatttggtgattacatcatcatgtataatctgatttattttaaagtcctaagcaagcataacttcttctttttcatccaggtattcttgttcaggaactacaggaggactaacaaattaaagaacgagtcactgcaactacttaagtaattttgttttttcccatttacaccgcttttctcctgaatggttttcactgtgatagtttttttcctttgttccaatctacttgacatcctatgcagmtttgaatttcaactccctgagaaaggtaagcatttgctataaattccagtcaagactttatatgtctttgttagtgcgttgtttttaaaatattcactgggcttaaagtgaaagtcaaatgtataacttcaggggcttgccaggaactgagaattttagttcaacatctttcaaatgttttagaacaaattcatcaatgcttcttcatcacaaaaccaaa

SEQ ID NO: 805569 - DNA, 572 bp, Homo sapiens
tcttttgagttacttgaactttgttttagaattctattttcatttatacctaatattttacatatattgttatttttattagtttttttagagacaagatcttgctctgttaaccagaccagagtgcagttgcatgatcatacctcactgcaacctcgaactcttgggctcaagcaatcctcctgcctcagtctcctgagtagctgggactataggcacacaccaccatgcctggctaattttttaactttttttttggtagaaacagggcctcattattttgcccagattggtctctaacccttggtctcaagcgatactcctgccttggcttcccgaactactgggattataggcatgagccactgtgcccacayttttttaatatattattgtgtaggttctttttagtggttgctccaggtattaaaatatatgtatgaaacatatcccagtctacctgtatcctgtgtgcattttactactttgagtgatgtgtaaaaatctttattttaaaacataaatgtttttatcatgttttgtatgcacattgagcacaacattagatgatg

SEQ ID NO: 805570 - DNA, 619 bp, Homo sapiens
ctttcacattcatgcactctaattttcaaggaccagatccccttttcaagacactgtttgtcatttctaactgaacacatgtaaaaccaaacttatcacattaaattgaattttttctacctctatcgaaggtactaacaatatccaaggtatttgggctaggaattctcatgtagcagggttcacaaactccaaattttctcaaaaggcaggcaggaaacaaatgtttgaatcacttaaatagaaggaaagacagagaagtggggctgcagccaaaccagagaacayagcactacctcaaactttccttggcactcagttcaatttgtggtccatgaatctaaagccgaacattaaaacaaaaaacagcagttctaaatggtgaaactgtcaatatggtattattcaaatccaagccatccccttctacccttcattgttaaagtccttgattatctccgtcatcttagggtattcagcttttcctgtgtttatgcagcaaacttatttccaaatgaacatatagctgaccacaatgtaggggctcactgctgtatcttgctctttctgaccaccaagtaaacactatggctgcagccatttcctgttattgaaaata

SEQ ID NO: 805571 - DNA, 595 bp, Homo sapiens
ttaagtgtactaccatgggattagcggtggagttcatggatccatggggaccatgagctcccagtattccccgtacaggaacaatactgggactgcaaaatggccagtgggtgactgccagattacttcttttaaggaggtttttaaaaacacattatcccaagaaaaaaagattatatagagcagttggccctttcaaagtttctaaamggcttcaaactttgattcatctggttagaaaatattctagtgggaagcccaaagcccctggacattggccacaagaaacaggatattaaatattttacatgatgaaattcagtatttttccctccttccatgttcatgaatgaatggttctgtagatattaattattcctttgaggctccctcagagtgtaccaaatatcctacaggaatcatgcagaaagtaaaataatttcagaatttccccagaaaggcttggaagaaatatttcaacagctattattgcatggaggaaatggaatgggtataaagcaaactagttttattaaatttctcaaatcatcactatcaaaatatatttaagatgtaataccaggacatggtttag

SEQ ID NO: 805572 - DNA, 595 bp, Homo sapiens
ttaagtgtactaccatgggattagcggtggagttcatggatccatggggaccatgagctcccagtattccccgtacaggaacaatactgggactgcaaaatggccagtgggtgactgccagattacttcttttaaggaggtttttaaaaacacattatcccaagaaaaaaagattatatagagcagttggccctttcaaagtttctaaaaggcttcaaactttgattcatctggttagaaaatattctartgggaagcccaaagcccctggacattggccacaagaaacaggatattaaatattttacatgatgaaattcagtatttttccctccttccatgttcatgaatgaatggttctgtagatattaattattcctttgaggctccctcagagtgtaccaaatatcctacaggaatcatgcagaaagtaaaataatttcagaatttccccagaaaggcttggaagaaatatttcaacagctattattgcatggaggaaatggaatgggtataaagcaaactagttttattaaatttctcaaatcatcactatcaaaatatatttaagatgtaataccaggacatggtttag

SEQ ID NO: 805573 - DNA, 610 bp, Homo sapiens
aagattagaatctgatgttcttcccactaacttcacattgcttccttccaaacactttctaattttggcattgtctaattctccagctttgcgaaagcactattatgtcaaagactattgcattctagagacttggctccagagatgccatcatggctacctgtctaagagtaaagcagaaatggatttcagtgctataagttctactctagcctacatttcacaaaatctaagagcaaggaacacgttcacaaacatttgcaagaaataaaacgtgaaggaaagatttagactcttacagcagctttaaaacaattcctactcagggtggagacttaacttagtgaatacccatgctgagtattaaaggtttttcagagttggttttgcctgtgagctcctaaagaccattttctgatcctgaaattcagcttacaggaacctttaaacaaatgtattctgcattattytcattattcaattatgacagtctttcccccagcattttaattagcactcatttactgagaattaaactgtcgttttagttgaactcaaagaagtaccccagggacatgcattccacaagataataaaagcaccatataat

SEQ ID NO: 805574 - DNA, 652 bp, Homo sapiens
aaggaaagcttctttgaaaaatagacaagaacaacttgatggaggaaaaagtaagaaaatttattttttttcctctcgcaaagttctccagtagcatttgctctgctctgattgatggcctaccttattgatgttccctgccgagaaatatgctgaagtccagatctcttacaagagtttcagttaaacccttgtttccttttagttcaaatgagttctcccactcttgtgtgtgattttgaattttcttggcaaagctaaagggggaaaaaaayccatcctgaacagatgagcatctattctgttcctatcgattggaaagaaggagattctgctgcatgctttcctcaggattaaagagttctaatgtgtgtcttgcaagtacgaagttgcaggaagcagcaagaatggtctatcagaagccaacctgaagcaggcattggagagtaattctcctaggcatggtcaaaacaacaattgacccatcagccaataaacatttacttgttctaggtgctagagaacaaaaggagtgaatgaagtggcatctttgcctttatgtgtttgccccttagtaaggggaaaagcagtaaacacatacaaaaatcaaagatgagatagtaatccttttaccacctattgtataataagt

SEQ ID NO: 805575 - DNA, 652 bp, Homo sapiens
tctgccagccaaactgttctccttcatttataaatgaagttgctaagtgttcaacaactgattgccataaatgaatggggtatgacatccttccaagtctccaaagagttgctacaacttggttttccccttgggagaaaaaaaaagttattgttctaattgattttttctgttctgaatagaaaaaaataaattagatccttccttccttcctccctccctccctccttctttccttctttctttcttttctttctttctttctmtttcttttttcttttcttttttttctttctgttttcctatttctgcattcctacaggaagagagaaggaatattgtgcttttcatcaaccacagcaagagtcatttgagtttgaaacacagctagtttttaaggaaactataccatggtcttctggaatgggaaaagctttttctttcaagggacaaaaggtgagattttctttttgtcttcagcctttaccagtacaaaagagtgaaccatctctacatacatgttcagaggcaaatccgatgactaattgcagagtaagcaaatttcttgattctgatcaaaccagcaacatgcatttgaatttaggttggatttagatgagcaagtcaataacttagaatagtgaagactgag

SEQ ID NO: 805576 - DNA, 565 bp, Homo sapiens
cacagataatttctcctattactgtctctttcacttgcttgatggtgtccacagaagcacaagttttacatattgatctatcacttattaatctgtaagacctgagcaggcctgatgcagtggctcacacctgtaatcccagcactttgggagggcaaagtgggacgatggcttgagctcaaagagttccagcctsctgagagctatgattgcaccactgcattcccagcctggatgacagagaaggacctggtcgctaagattttgagcaaattgctctgcttctctgagcatttctcacctgtgaagtgagcatgatgatgtcttgtaggcataggataaaactataatgaggtgagaaacacaaaggccagatcacagagcttggttaggctcaggtagaatctatacttagccgagactctcgtgggaggaagggaatgtctctgaggctgcaggtcatgggtgatccacaggactccccatgcctctttcccccattatttccactgtatgtgtttattggctctgtctgaacctactccttgagggcagagatttctca

SEQ ID NO: 805577 - DNA, 565 bp, Homo sapiens
cacagataatttctcctattactgtctctttcacttgcttgatggtgtccacagaagcacaagttttacatattgatctatcacttattaatctgtaagacctgagcaggcctgatgcagtggctcacacctgtaatcccagcactttgggagggcaaagtgggacgatggcttgagctcaaagagttccagcctccwgagagctatgattgcaccactgcattcccagcctggatgacagagaaggacctggtcgctaagattttgagcaaattgctctgcttctctgagcatttctcacctgtgaagtgagcatgatgatgtcttgtaggcataggataaaactataatgaggtgagaaacacaaaggccagatcacagagcttggttaggctcaggtagaatctatacttagccgagactctcgtgggaggaagggaatgtctctgaggctgcaggtcatgggtgatccacaggactccccatgcctctttcccccattatttccactgtatgtgtttattggctctgtctgaacctactccttgagggcagagatttctca

SEQ ID NO: 805578 - DNA, 653 bp, Homo sapiens
tgaaagggagatttgtttctctcttccctatttagtaggtttctgatagcgtctacttagtttcccccaccctcatgccagtatttcagtctagaaccaagtcttaggtttgcggtgggggattcctgccctataatgacactgaggatgcttcagatacagtcactaggccaggaggcagcttgttccatttcctagtygtggtgttatgtttctgtcttctgcctccctaggcttccctcctgctttttttttttttttttttgagacgaagtctagctctgtcgcccaggctgcagtgcagtggcgccatcttggttcactgcaagctccgcctccagggttcacgccattctcctgcctcagcctcccgccctcctgcttttataaaagctataagctcacatacaagtcaagaagagttttctttttcagcttcctttcatgaccaggtaaatattcctggctttaataccccatctcatgtgggatccacttggtccctattattctacaggactgagctcctagacatgactactgcctctgcaccagaagcccagagcaccatggttttagccctatttactttgtttctgggtcatggagatttttatcttgttattgagtccagttgtattactttagtttct

SEQ ID NO: 805579 - DNA, 568 bp, Homo sapiens
atacctgcataccaccatgtctcacccttgcttatcccgtttataatccatccaattcttttttttttttttttttttgagacggagtctcgctctgtcacccaggctggagtgcagtggcgtgatctcggctcactgcaagctccgccttctgggttcatgccattctcctgcctcagcctcccgagtagctgggactacaggcgcccgccaccgcrcccagccaattttttgtatttttagtagagacgaggtttcaccgtgatctcgatctcctgacctcgtgatctgcccgccttggcctcccaaagtgctaggattacaggcgtgagccactgcacctggcccccaattcatttttaacaattattcctagattacttataaaaactgagatattagacatagctagtcatttcaagttattttcctgttaaccatttttattacctgtgagtatcatgtgttcaattaagaaccataaaaatgaaatatgtaggtattttgccagtaactcagaggacacagctgaagtcaataatacaaaattagttcaacttacagttat

SEQ ID NO: 805580 - DNA, 577 bp, Homo sapiens
gaacttaagaaattcatttgctctgatttttaatcttgtaaagtttttgctaaactcaaaacaagtcccaggcacaccagaaggagctgaccaccttaggtgttcttgtgatttatccttacttccctatgttgtcatagttgcttctaaactcagctgcactatggctgtcaacatttctgatacttattgggatatgtgccatccagtcatttagtactttgaatggaacatgagatttataacacaggtaatagctgaaggtaccagtatggtggtgagactcacacttagtgatccagmtaaggtaactgatgttataatggaacagagaagaggccaactagatagctaagttcttctgaacctatgtgtatatgtaagtacaaatcatgcgtccttatggggttaaacttaatctgaaatttacatttttcatagtaaaaggaaaccaattgttgcagatttcttttcttgtgaggaaatacatggcctttgatgctctggcgtctactgcatttcccagtctgttctgctcgagaagccagaatgtgttgttaacatttttccgtgaatg

SEQ ID NO: 805581 - DNA, 577 bp, Homo sapiens
gaacttaagaaattcatttgctctgatttttaatcttgtaaagtttttgctaaactcaaaacaagtcccaggcacaccagaaggagctgaccaccttaggtgttcttgtgatttatccttacttccctatgttgtcatagttgcttctaaactcagctgcactatggctgtcaacatttctgatacttattgggatatgtgccatccagtcatttagtactttgaatggaacatgagatttataacacaggtaatagctgaaggtaccagtatggtggtgagactcacacttagtgatccagctaaggtaactgatgttataatggaacagasaagaggccaactagatagctaagttcttctgaacctatgtgtatatgtaagtacaaatcatgcgtccttatggggttaaacttaatctgaaatttacatttttcatagtaaaaggaaaccaattgttgcagatttcttttcttgtgaggaaatacatggcctttgatgctctggcgtctactgcatttcccagtctgttctgctcgagaagccagaatgtgttgttaacatttttccgtgaatg

SEQ ID NO: 805582 - DNA, 589 bp, Homo sapiens
cacctttctaaatgttatgtgaaaataaaattatttaagttctaaagtagtttaggaaagagatgtgatgacaggaaaaagaagttaacttctgaacagtttggtccaggaagaagatgggcagaatacagtaagcccagggttgaagaatacattcaatttggagagatggagaagacctttgaagaaggtcaaaatgagatcttggaacagaactctcacctgtgtgtctggatatacatgaaaactggacggtgttattgagctactgcttatatggtgagcagaaaattgataaccacaagcctggtaggttctgctatgaagcccacatataatcacaaggcctagatagcttggagttaaaagccaaggatagctgtrtagtttgggttccatagtttgcagtgagattgtgcttctgagcagtcatttgggggcagtggttctgagattacaagccataacccagccaagaacgggctacctgtggaatgaggatgaggaagttgctacatataaaccctagtgtgtgtgtgtgtattaagtgaaacttagttaacttttttgctcacagccaaagatgatt

SEQ ID NO: 805583 - DNA, 643 bp, Homo sapiens
cctgtagcacttctatttttaaaacggtgtttttgatactaaaagtaaaaaaattgtatccagattacaaagatcaaatcatttagttctttctttcttaacctctttgacttgaaccatctctcagtttactataattctttttttcyacttatttgatatcggatttcattcaatattcataggttgtttaagttctgaagtatatgaagtttttttcttgttcttttactcaggaatataaattaaagagtgtatattgattcttaggttaaatatttccagcttaatctttgtaataacattatttcttgtagtaaagtctaagatgtcacatttttatatgtaatctgattcttaaaaagtctatttgttgaatttattgtacattgctgaattaaaagcaactgaatgtaaagaaaaaatgtatggggtgttaattgtgtttctgaagctcaaataagcacaaactgatgaggcaattattttgtgcagagagggatggataaaaaaacactaatcagcgtaggaacaaagtgtgctgtgaaaacctgactaaaataaagtgcatctagttatgatgtagttttaatatattaatgacctattaaatataaaaacaaagggttgacatattcagttt

SEQ ID NO: 805584 - DNA, 587 bp, Homo sapiens
acaatatttctcaaaaatagtactttgaccttcaggtctgtattttctctcatccttttcgaagctctctttggccttctatgactttgctttctcctaatttttctctttccacttctctgacatttccctttctgcatgcttttttcttctgagttcttattataggcattcctttttttattttatgatttttctctttatttcaaccacaccacttcacctctgtctccaaattctctatttccgagtcactcctgagccctgattccttgtttccaatgaactgccagaatgccacacctgggtatttataatgcgctaaaatgctagtaaagtggttatttggcatgtaggcagcatcatccctcgattatttctactgagcagtcaygatcacagtttactcttggctcacattagcttgactaaggcaggacagtaatacctatgctcaactgaaggtacatgtatttgcagacgtttgttgagctacacttttactttatctcttccttcgaataagttttaccctgcatttaacatgaggttagcaatatttatgtgtactctcctgataaaattgt

SEQ ID NO: 805585 - DNA, 501 bp, Homo sapiens
accttcctctagatggtgataagaaagaacaatctatttctgattcttttattttctacctagaacttcaagaccacagcagatgttgattcagaacactgcatgccatcctatctcacctcttttggtaccacctgttattgagaaaaagatacactgaagttaagaacagttggtgatcttcaaagttaatagctaaagatacctcttaagaccttacagaagcatgttttggatagatggaagattgattgatatgcttagtgcttgatataaagttaacactgaaagcatatttggtgagygaagttcctgctatatagccttcagtgaggagtgattgaaaaccatgaggtgactttgattcctggaaacaacactgggatttccttaagctatcagtgaccaagtgcccttcctggattacactagtccactgttcttatttaggaagcctgctttcaatgagacgtttctgagcagaaatttaaaatgtgtgat

SEQ ID NO: 805586 - DNA, 551 bp, Homo sapiens
gacataaaagtatggtgtcaatgaagtagatgagtttggagaaaatactaaatgtgaacattatatgatttttagtatattgagtcagaaactagatgtattagagattcatgttaaatatgatacaaatctgataaaacataawgtttccttaagatgcttatcattcatcacctaaaaacttttaatattaaagctcttatgaaactctaaatgaaaacaaaaatgaaaattatggatgaactcatccatctaaaatactttttacttttctcagtaaactcctggaaggactttccattcaagtgaatgtcaaagccattattggtggtacatctaacaattccattgctttgtcaatgttgcccagcctttaaatagttatcatttatattcaaagtatgttcacataaatattggatttgacatttttcagtgatattctaaacttaagcattgatcaatatggtcacatgttgttttttcatttcattttttttccaaaccatgggtcaaaacagttaaattgatggattgtattttttaaatat

SEQ ID NO: 805587 - DNA, 551 bp, Homo sapiens
gacataaaagtatggtgtcaatgaagtagatgagtttggagaaaatactaaatgtgaacattatatgatttttagtatattgagtcagaaactagatgtattagagattcatgttaaatatgatacaaatctgataaaacataaagtttccttaagatgcttatcattcatcacctaaaaacttttaatattaaagctcttatgaaactctaaatgaaaacaaaaatgaaaattatggatgaactcatccatctaaaatactttttacttttctcagtaaactcctggaaggactttccattcaagtgaaygtcaaagccattattggtggtacatctaacaattccattgctttgtcaatgttgcccagcctttaaatagttatcatttatattcaaagtatgttcacataaatattggatttgacatttttcagtgatattctaaacttaagcattgatcaatatggtcacatgttgttttttcatttcattttttttccaaaccatgggtcaaaacagttaaattgatggattgtattttttaaatat

SEQ ID NO: 805588 - DNA, 577 bp, Homo sapiens
ggcacagtctatttgggatagacttatattcataaagttaaacacagacttactataagagacagcaaccacattcctaaatatttacccaagagaatttaaaatatgtgttcacacaaaaacatatgtaaatattcatagcactttactcataatttctaaaaatgaaaataagatgttccttaatagggaaatgaaatgaaaatgagagtacatccacgtaatggaatactattcagtgataaagaggagtgagttattgattcactcaacaacatgaattaatgttattgatttttcttttctaaccaagtttaaaaagccaaacccatagtctacatatagtataatttcattcatrtgaaatttggaaaaaagtaaaactataggttcaactgtctgatctttgacaaacctgagaaaaacaagcaatggggaaaggattccctatttaataaatggtgctgggaaaactggctagccatatgtagaaagctgaaactggatcccttccttacaccttatacaaaaattaattcaagatggattaaagacttaaatgttagacctaaaacca

SEQ ID NO: 805589 - DNA, 634 bp, Homo sapiens
atgacgggttgatgggtgcagcaaaccaccgtggcacatgtgtatacctgtgtaacaaacctgaactttctgcacttaaagtattttttaaaagtagtaaaaaacttaaagtattaaaaaagatactaattacattcaataaactattttttttggttaaaaaattggtaactgaacagcaacaccatttcagaagtatcttcttaycctgccattcacataattattctcaaactagtcagtaacttcagtggcttctttaggcaaatgcaggtttaatttattaaaagctcctgaaatctcaacagcagaaggaataccaatgcagccaagtgactcacttttaaattgaatttacttcattgccatactgcatggccaatctataaacccagatcttctccaaatgcattggcctgaatggaaaaaacaaactttattggtaacaccttgaaagtcacttttagaagccttgattgcacctaatttcaaatatgtcgttatggtttgaggattctattaaaatccattttattctgcatacagaaaataacaagataatgtttctgcctaacataatgcaactatcctgtaatttttttcggattttagacgttagagatgttagatttta

SEQ ID NO: 805590 - DNA, 634 bp, Homo sapiens
atgacgggttgatgggtgcagcaaaccaccgtggcacatgtgtatacctgtgtaacaaacctgaactttctgcacttaaagtattttttaaaagtagtaaaaaacttaaagtattaaaaaagatactaattacattcaataaactattttttttggttaaaaaattggtaactgaacagcaacaccatttcagaagtatcttcttatcctgccattcacataattattctcaaactagtcagtaacttcagtggcttctttaggcaaatgcaggtttaatttattaaaagytcctgaaatctcaacagcagaaggaataccaatgcagccaagtgactcacttttaaattgaatttacttcattgccatactgcatggccaatctataaacccagatcttctccaaatgcattggcctgaatggaaaaaacaaactttattggtaacaccttgaaagtcacttttagaagccttgattgcacctaatttcaaatatgtcgttatggtttgaggattctattaaaatccattttattctgcatacagaaaataacaagataatgtttctgcctaacataatgcaactatcctgtaatttttttcggattttagacgttagagatgttagatttta

SEQ ID NO: 805591 - DNA, 586 bp, Homo sapiens
ttctttcttccattctgtcttccaacctaggaccttgcaattccattttctaaactacttaaatgcaagcactgattactcaatgattccagtgtctattttttctatatttataaattgaagtaaatcttaacacccagtttgtgcatttgaatcttgtgttactatttcttcttgccgttgttttccatcttaagcatacatattttattgtcttgtattgccgtttttattttccaattgttatgtctcaagtacaatgtgctggacaccgtccaacatgttttatgaatatcaagtcattctatgataaatcctgatctgggcccctcagtgggctggcctgatcaggccacacaatcccaayttggggtcaccccgtataaagcagaggcagctggacagctttttccaaaacattcacccatgtcttatagctggccacgcccagcaaacccgatgatacctacacagccacgcagtaacactcggaggctttgccgtactaaatgcgagcagaggtgattcatgagattgtggctctaaaatccacccccttcctttcccctcatatctcatcttggag

SEQ ID NO: 805592 - DNA, 569 bp, Homo sapiens
taacaaactaacttaataacagtgatttaaaataacatagatgtgccatcttagtatcctgtaggtcaaatgtctaaaatgcatcagcaaggctgtgttcactctggaggccctgggaaagaaaggatttccttgcttttctagcttttagaggctacccacattccttggtttgttcttccttccttgaattgttccaacctctccttcagttgtcctatcttctattctgaccctcactctcctgcctccctctgaccctgtgataacattagtcctaattggataatatccccatctcaagctcctcaacataaacacatctaaaatgccccctatccatgtaagttaacatgtttgttcacaagctacaagaattaggacacggacacatttagrgagctattattatgcttaccacaatagaagagaattattaacataggagagaattattaacacaaactctcccatgttttagaattcgatgttttgcaaggatacttggaactcattctaatgatattctgggatagccctgaaatatagtcataactgtttctacagta

SEQ ID NO: 805593 - DNA, 575 bp, Homo sapiens
agctggccggcaagtgcctcgtgctgccctggttctcaaccctgcctctccttccacacctccccacaggctgaggaagccggctccagccttggccatcccaggaaggggctcccacagtgcagcagcgggctaaagggctcctcaagcgtggccagagtgggcgccaaggccgaggaggtgccaagagtgagcgagggctgccagcacgctgtcacctctcactatggctgctaatttttaaaatttttgtagagaaggggtttcatcatgttgctcaggctgggctagaactcctagcctctggaagtgctgggattacaggcgtgagccactgtgcgggcytaagcataactttcaaataataactccagcaagagagagacatgcagtaagcatggtgaaacaagcacctcagtttaaatcccccaaatccttcactatggccagtgccagagagcctttctataggaatacaatgtgagcagcttcagtggggcatatctgccgaccagcctggggttagagctgagcactacctgagtgagtggcaagttgactgtaacaagagattc

SEQ ID NO: 805594 - DNA, 586 bp, Homo sapiens
aaaaagggacatacaagtactgtaagttagaaaatatgtatactaaaatgacaatacacattttgatagactaattcaaatgaaaatatatacattgaatatatttgaaaggaaaaaataagtaatcaaaccaatctaacaccaccaccaccacaagagagggtttgcataagccaatgagtacaatgtgctatcaaccatttgaatctgaagaaatgctactactaccactaagcctgtttcgctgcagtttgaaatgccctaatgtttttttttwaaaaatttactctagaaactcttaaaagagtaaagaaaatagcacaatatcctcacctgacacctcaccagcttcaacacatatgaatattttgccaatcatgtttctctagaatgcttttttattcctaaaatattctaaagaaaatcccaaatatgtaatttcagtgcatagactgttttacctgtttatacattttctgacccactgtggatgctcagtattgcggctattgttattattgcccttcaagttttagcttgcatgatgcctttgtgaaactttttgatacattccatctgtagggat

SEQ ID NO: 805595 - DNA, 586 bp, Homo sapiens
aaaaagggacatacaagtactgtaagttagaaaatatgtatactaaaatgacaatacacattttgatagactaattcaaatgaaaatatatacattgaatatatttgaaaggaaaaaataagtaatcaaaccaatctaacaccaccaccaccacaagagagggtttgcataagccaatgagtacaatgtgctatcaaccatttgaatctgaagaaatgctactactaccactaagcctgtttcgctgcagtttgaaatgccctaatgtttttttttaaaaaatttactctagamactcttaaaagagtaaagaaaatagcacaatatcctcacctgacacctcaccagcttcaacacatatgaatattttgccaatcatgtttctctagaatgcttttttattcctaaaatattctaaagaaaatcccaaatatgtaatttcagtgcatagactgttttacctgtttatacattttctgacccactgtggatgctcagtattgcggctattgttattattgcccttcaagttttagcttgcatgatgcctttgtgaaactttttgatacattccatctgtagggat

SEQ ID NO: 805596 - DNA, 586 bp, Homo sapiens
aaaaagggacatacaagtactgtaagttagaaaatatgtatactaaaatgacaatacacattttgatagactaattcaaatgaaaatatatacattgaatatatttgaaaggaaaaaataagtaatcaaaccaatctaacaccaccaccaccacaagagagggtttgcataagccaatgagtacaatgtgctatcaaccatttgaatctgaagaaatgctactactaccactaagcctgtttcgctgcagtttgaaatgccctaatgtttttttttaaaaaatttactctagaaactcttaaaagagtaaagaaratagcacaatatcctcacctgacacctcaccagcttcaacacatatgaatattttgccaatcatgtttctctagaatgcttttttattcctaaaatattctaaagaaaatcccaaatatgtaatttcagtgcatagactgttttacctgtttatacattttctgacccactgtggatgctcagtattgcggctattgttattattgcccttcaagttttagcttgcatgatgcctttgtgaaactttttgatacattccatctgtagggat

SEQ ID NO: 805597 - DNA, 671 bp, Homo sapiens
atgacgtagaaaatgttcacctaaatataagctgcctatcgaatattccatagtacttcccagaaatttcaagtgctgatacttaaaaatatgtacaatatgctaaaagacctaatctaaagcatttgattttattttataaaaatatttgattggccgggcatggtggctcacacctgtaatctcagsactttgggagaccaaggcgggtggatcacctaaagtgaagagctcgagaccagcctggccaacatggtgaaaccccatatctaataaaaataaaaataaaaaaattagccaggcatggtggtgtgcacgtgtaatctcagctacttgggaggctgaggcaggagaattgcttgaacccagaaggcagaggttccagtgagccaagatgccaccactgcactcctgcctgagcaacaagagtgaaactgtctcaaaaaatgataataataaaaagtgaatgtcacaaatagattaatttaaccacgttccttttcaaaggtctagttattctttgcagcatggtttctagtggtaaattgttaaggaattcaattttataatttatctaaatatctggatttccctattccatcctttattgttattacagctttttagaaatcattaaaaataaacatacctgtttttgttttttgtttgtt

SEQ ID NO: 805598 - DNA, 519 bp, Homo sapiens
gatgtgtacaacttgaaaagtttggaaacctctggtctggattctgactgatcatcaaaatcacctggagagcctgatgtataatagaaggtccctgactaggccctgggatcagaatttcacaaggcttctcagctacttctgatgatcagccatgcttgagaactactccttgtctgtatgatctactgctataaacaaaacaaaaatccagtagtgaaatatcagctttcagcatgttagaaagaaaaaaaaaattcagtaagcctaaagcatatgtaacatctatctactttttaattaccattttwttattttttagaatgtgtttttaacagatatgctcctactttttaaatattttttggtcaaagaagataatatgcataggtgttagattgacccatatgaaatttctaacattaaaccatttttttaccaacaaaattggcatttcatatggttaaccaattcttttctcagaaaaactatgctcagtttacaacctgtgaagatatt

SEQ ID NO: 805599 - DNA, 593 bp, Homo sapiens
attcatagaccagtgcttatcttctttttgttaaattataatatttcatagatttgtcactccctccattacacttggaagagcctgcacttcagtcttgatcaacaatttagctgaactgatgattcattatttctcccagagtttgctgtccaagcccacgtaaaacctcctggccccagtattcgccagaactacctgggagagcatcgtccgggagcaccacccacctcccatcctgggtcatgctccccgcttgttcttgtttcctcccgctaactgaygcaccctgttcaaggagcagaagttattcctctctttcctctacagccaagcaaatgcctcctgtttagctgaagcccaccaacatttggtttaaggacttatcattgatgaactaaagttacacagcaataggatatggaggaggaatgatagtgaggctacgtaatccccaaatttatccttcacccccagaattaaaaaaagaatgtaaatgcgtcctctgctattttacgacaggatctccaaacctgtgtagttttcatctgagcaggactgcccaccacaagccctgcacgtgctgtctgtag

SEQ ID NO: 805600 - DNA, 587 bp, Homo sapiens
cagtgagctctctctgttgggtttctttcttctatcagtaaatgggaccagcagccagctacttgcctatccagtcatgaagtgaaagcatccttcttccaaatattccttgccattatcaattccctcccagcctaactcttactttgcctgaattcgtcattattttttccatccctttgccctagttttttcaggccccctctgcatagaaggtgyttagtgaataaatgagtccaaatatttttccattattagaggctttaagctaattgctattttgcaagtattgggttttcttttcttttgcttttccccccaagacttggtattggtcataggtcctaacttgggtgcctttctaaggtggtcttactctagttcatgatccttggatttactgggaaaatgggcggccctcctaactaaattctacagttttttgcagggcctttaaaaaagtcagtcatgtgatcaatgctatcacctctaaacttgattttttttttttttgtaataaagttgtgttttcattttttggtaaatataggcatttaagttcatcttttatttttcacaattaatgc

SEQ ID NO: 805601 - DNA, 587 bp, Homo sapiens
cagtgagctctctctgttgggtttctttcttctatcagtaaatgggaccagcagccagctacttgcctatccagtcatgaagtgaaagcatccttcttccaaatattccttgccattatcaattccctcccagcctaactcttactttgcctgaattcgtcattattttttccatccctttgccctagttttttcaggccccctctgcatagaaggtgcttagtgaataaatgagtccaaatatttttccattattagaggctttaagctaattgytattttgcaagtattgggttttcttttcttttgcttttccccccaagacttggtattggtcataggtcctaacttgggtgcctttctaaggtggtcttactctagttcatgatccttggatttactgggaaaatgggcggccctcctaactaaattctacagttttttgcagggcctttaaaaaagtcagtcatgtgatcaatgctatcacctctaaacttgattttttttttttttgtaataaagttgtgttttcattttttggtaaatataggcatttaagttcatcttttatttttcacaattaatgc

SEQ ID NO: 805602 - DNA, 503 bp, Homo sapiens
acaaattattatagttatagttacgtttactacttttgtctttcaacttttataatatagttaaaattaatttatgcaccattattacagtagtagagtattctgtatttgattatatatgtacatttttgcgagttttatatttcatatctgttcatgctgcctattcgtttctttttatttcaggttaaagaacttcttttagcatgttttgtagggcaggtttagtggtgtcagttcattcaggctgttataacaagactaccataaaccaagtggcttataaaccacagaattttatttcttatagatttakaagtgaggaagccaaagatcaaggtgacagcacatttgtcattcagtgaggtcttgctttccacttcactgaaggcatcttcttgctatgttcttacttggtggaaggggcaaacaagctcccttgggccttttttattagtataaaagaactaatgtcatccttcagggctctgatctcatgacct

SEQ ID NO: 805603 - DNA, 605 bp, Homo sapiens
ctaacaagaaaaaaaattcagaacaaattgaaaaatcaacaattcttcttaggtgtgttagaaaagtgaagtcacagttcacaccactgcccccaaaattggagagacaagttgatgaatacagagaatcacaacttaccagagcagaaacccaccttcataggaaccagtaccaatgcaggaaaagctgaactgtagttcacaaattgctggaggctcagaatagacaagtatgagagatgaaaactccaggtggacccatttataggacaaccctaacagttttgtgagttctacctccaagacctctaccaggttctcacagtgaagatcagagaaaaatcyactttggcttcctgcaagaggaggaggaaagaaatcattttgaaatgcaccatggcaacctgttcctgttaacaaagcctgccttcaaaaaaattattttaccagagcccaacctattgggtttttatcagagcctgattcacctgaaagaagaaaaatattcaactgcagctattctagcttttcctgtggaggcagagatttaccccactccagtcccctatggccatcctgtaccatctaatgaggtgaaaaaagaa

SEQ ID NO: 805604 - DNA, 606 bp, Homo sapiens
aactgcatatgtacacccagaataaaatcacacaaggcaagatgattatgttttataattgaaggttttgcattgaatgtatttccctacatcatatttatgatatttaaaataccaaaatccagaaagcctgcataagtagacaagtcataaaaagaacatattttttaatatagcaaaatgtaaacagcataaagcttctcaaccatttttaatatcctacatattaacagttacctaaggaataataagtggcrgaatgttgttcatatttacattattttcatttaaaaattccaaatttaaatgtaaatactcattattggacaaatgaacaagtggaaagtttcagtaggatactgtcagtatgtattgaggctttttttttttacaagtattacttgttgaaattatttcttatatggtatttatgtaatgaagaagtaaaatatttttaattaaacactgtaggaaaagaaggatatattacttattatgagacacatcattatttttacacaaaatattttaaaaagataactgttgaagacaattgttaagattttactgatttcatgatctttctcatagttgtcttagcacagt

SEQ ID NO: 805605 - DNA, 610 bp, Homo sapiens
gtatatttaaaatcatgaaaaaagtgtcattgccaaccttcaataattattgtaactatatattcctactaacaaatttttcactaaaacttgaattgtttcatatttatgagcttattgatccagccacctggatttctattactacttataataatgatttattwtatttttaagaaaaataaatagagccactaagaccgcatccttggttcatcaagtaagcatatttccactaaatagtgggaactggatttggggaaaactggcaagatcatgttgtgaataagttaagaaaaaagtaagattaagtgggtttcttaaaaaatgttattaacaccaaaaaaagttgaggtcatctggagggctacaggaagagtcttcttcagcactttgtcaactcgtgttaggagtaactgtctcagagggcagaagtgatagcctggcatttggagaggaaatatgcaaagattgtataaccttggtagtgtgacaaccttcccagcctaactccttttctcccagctcgcccatctctacggcagagtcctcttcacctctatctgtgtgtagcccttgagttaaactgcagaatgtaagaagccagatg

SEQ ID NO: 805606 - DNA, 597 bp, Homo sapiens
gtaataaatcaagttatgtgcaggcaaagtgaggagattcaatgaagtatgatagataactattctaataattgtagttcattgtcttatactactgtacttttttccatctagaatacatatagtcattcctatttttctattctttaaaacaacccaatttctaatatttgaagtcagaattgtagagtgattaagagtgttgattctggaaacaaaccacctcatttacaytacttactagctcaatgatcctaggtgagttattttacctctatttctctttgataaaatagagataaaaacagaacttaggctggacatgattcctgcctgtgattccagcacgttgggagacagaaacgggaggatcacttgaagccaggaatttgaaaccagcctgggcaacatagcaagaccgtatctctacaaaaacaatattaaaaaacttaagaaaatagaacctgccaatattttagttgtagagattacatttattgatatatgtctaatattttgaatattgcctggcacaaaaaaaaaaaccttacatggacatgttgcctcttattagtagtgatttggatccagaaaaga

SEQ ID NO: 805607 - DNA, 705 bp, Homo sapiens
gggcttattgatcctggctactaagggaggaattgggcttctattccataatggaggtaaggaagattatgttggtaacacaagagatcccttagggtatcgtttagtgttaccctactctgtgattaaagttagtggaaaactgcaatgcaattcaygcagaactattaatgacccagattccaggaatgaaaattggggtcaccctgccaggtaaagaaccacaactagccaagatgcttgctgggagcaaagggaatccagaatgggttgtaaaagaaggtagttataaataccagctatgaccacatgaccagttatagaaataagaactgtaattgccaggaatatatcatctctattttcttatgaatatttgtgtgtctatcatctatctattgacagattgatcaaatgactttgtttactttcctcttattgctttatcatgtaccataaatgaactgactttatatcacagtatttaagttacagaatatcaacaagaagattaaacatcattcaaggactttacattggttctgaggaaaggattagtgaattctcagtcgaatacaggatggttgtatcatgttaagtgaaagtatgacatcattattgttttattggcgattaagcacggcttaaagaggtgtgtgggttgccaagctgacaaggatccggacatgtgatggttgattttat

SEQ ID NO: 805608 - DNA, 498 bp, Homo sapiens
tctgttctttttaccagaacttaagaatgcacaagcatcttggcaaaaatgtttcttgctgtaactttgtcagagccccatgttggaagtggaggaaatgggtggatggcgacaggaacactgtggttttcctgatgtgagagtccagagtcaagcattagcaaagtatggatgtgttattgagggtaaacacagtcttaaaagacaactggctactccgtctcaaaaaaaacaacaacaaaaaaagacaactggctgcgtgcagcatatcaaaattcacatattgataatagttgaaaatagttgctaatacaacattaacrtattttaatttatttgtatattatttacctttaatttcaagattatagaatccaacaatcaaattctggggagaactaaatttttctcaactgaaattatgtgttttagaattgaaaagcagattctgtcacatatataataaattatctacttttgaatataagcttcatagaa

SEQ ID NO: 805609 - DNA, 558 bp, Homo sapiens
atgaagtaatttctcaacctccacttaactcccacctctcacctttctgagtctccactgtctatcatttcacactccatgttcttatgtacatattatttagcttctacttataagtgagaacatgtggtgtttgttttctgtttctgagttgtttcacttaagataatggccttcagtttcatccatcctgactcaaaaaagacatgatttcattctcttagaaatgaattatcaaataagaattgaatttcctttggctctattctctttttaattgagttctatgatgcacttcaataaaataaaaacacaagctgacagaagaagggcaagtctaaaacctaattgcaaatgyttttctcaaatttgactgtgtaggactaaatgggatctcttctcatccattaaaccgtatccagcccccgaatgtctacttgacagtcttctctgcttatacaatggttagactccaaaagtatttatcagtctaaaattatacaatgtcagtaactgcaagtcttcctgtaggtgttctgcattattcatgcatttaag

SEQ ID NO: 805610 - DNA, 371 bp, Homo sapiens
gttgttgactaaaacctcattatgtggtgcctgcctacatatacaataaaattaatcaaacaaaccatgtaaagaagactttattgaatacaattacattagaagagagagaataccccagccggaactcagtttgggctcaacttaactgagacaaaaagctggggaggttttaaaagctggagtggagttcaggggagtttraaagctggagtggagttcaggaggttttaaaagctggagtggagtgtgtttgctaattggtgcccatcaaagttagactcctaccctctcatggagactgggagttaggctgctacctttcttgatttcaaagagattgctcctagggcattcagaaagaaagtcct

SEQ ID NO: 805611 - DNA, 576 bp, Homo sapiens
tcagtgttcactgcagctatatatagaacaaaactacggcaaataatgagaattgactatatataatctttggctctattgggctcagaaacagccaactaacaacatctggtctccttagatggacccatcagctcaatagtcacaaaactgccacagtctgggaatgccagatgttragcccaggcttctctagacttttcaattttattttttttttttgagacggagtcttgctctgttgcccaggctggagtgcagtggcgcgatctcggctcaccgcaagctctgcctcccaggttcacgccattctcctgcctcagcctcccgagtagctgggactacaggcgcccgccaccacgcctgactaatttttttgtatttttagtagagacgaagtttcaccggattagccaggatggtctcgatctcctgaccttgtgatccgcccacctcggcctcccaaagtgctgggattacaggctcgaggcaccatgcccagccgacttttctattaaaaataaaaaacagaataagcttttctaattttttaaaaagatagacctttaaaatagt

SEQ ID NO: 805612 - DNA, 576 bp, Homo sapiens
tcagtgttcactgcagctatatatagaacaaaactacggcaaataatgagaattgactatatataatctttggctctattgggctcagaaacagccaactaacaacatctggtctccttagatggacccatcagctcaatagtcacaaaactgccacagtctgggaatgccagatgttaagcccaggcttctctagacttttcaattttattttttttttttgagacggagtcttgctctgttgcccaggctggagtgcagtggcgcgatctcggctcaccgcaagctctgcctcccaggttcacgccattctcctgcctcagcctcccgagtagctgggactacaggcrcccgccaccacgcctgactaatttttttgtatttttagtagagacgaagtttcaccggattagccaggatggtctcgatctcctgaccttgtgatccgcccacctcggcctcccaaagtgctgggattacaggctcgaggcaccatgcccagccgacttttctattaaaaataaaaaacagaataagcttttctaattttttaaaaagatagacctttaaaatagt

SEQ ID NO: 805613 - DNA, 626 bp, Homo sapiens
atttactaactggatgactgtgggcctcggtttcatgacttgttggatttttgtgagtgttaaatgaaaaaagtgtacatggaactcttagcacagagccccacacataggtggctagtgcttcccagctcaactccgcaggccagtgcacctgcagagcttttaaaaatcacctgtgtctcagtggcagtcagggttacttggttgtaaacatgraacttattttggctaacattaaacaagcaagaaatttattggaaagacagagtgctcacagaagtggaggaaagctgaggagccaggcctgggaacagacgaggcagggtggcgctgggcatcaccatgggcagaaaggacttcgcgaggcctcaccagagcaatccactccaataaatgtccattcttgcttttcttcatccagagttctcattctgggagagactgggttatggactgagtgtttgtgtccccctcaaattcatatgctgaaattgaatccccagtgtgatggcatttggattggggccttcgagaggtgattaggtcatggggcttgttctcttctgcatatgagtatacagtgagaagttagcagtctaccacctggtagagggccctcaccagaa

SEQ ID NO: 805614 - DNA, 626 bp, Homo sapiens
atttactaactggatgactgtgggcctcggtttcatgacttgttggatttttgtgagtgttaaatgaaaaaagtgtacatggaactcttagcacagagccccacacataggtggctagtgcttcccagctcaactccgcaggccagtgcacctgcagagcttttaaaaatcacctgtgtctcagtggcagtcagggttacttggttgtaaacatggaacttatkttggctaacattaaacaagcaagaaatttattggaaagacagagtgctcacagaagtggaggaaagctgaggagccaggcctgggaacagacgaggcagggtggcgctgggcatcaccatgggcagaaaggacttcgcgaggcctcaccagagcaatccactccaataaatgtccattcttgcttttcttcatccagagttctcattctgggagagactgggttatggactgagtgtttgtgtccccctcaaattcatatgctgaaattgaatccccagtgtgatggcatttggattggggccttcgagaggtgattaggtcatggggcttgttctcttctgcatatgagtatacagtgagaagttagcagtctaccacctggtagagggccctcaccagaa

SEQ ID NO: 805615 - DNA, 577 bp, Homo sapiens
caagccaatgagctctgtatgctctgtgggatgagcaatgatgacatctgagaaagaagactctagggttgaggggttgagtagtgagcttgaaaagaacagttgagggggtacccagagggagcagaccagggtcagttatgaggataattkgtggaagcaagacaggggttgattattcaaaacgcaaactgtgtttattgagcagctactatgtgccaggcactgttctaggtgaacagtaaacatagcagtgaacaaaacagagattttctctgccttcgcaaagctcacattttagtggatgagacaatcaagtaaacaaatatggataatttcaatagtgtgttatgaaggaggttagcaaggtaacgtgactagactagacattgactagaggtggaaggggatagcatttgcatgtacagtagtcaaagaaaccctcactgaaaaagtaacatttgagttaagctgaaggaagagcagtggggtcctgattaattcgctctcaaaagagaagaaagaaagccttgatttgtaggtttgctgattttcatggtgtaaaattacaacagcc

SEQ ID NO: 805616 - DNA, 577 bp, Homo sapiens
caagccaatgagctctgtatgctctgtgggatgagcaatgatgacatctgagaaagaagactctagggttgaggggttgagtagtgagcttgaaaagaacagttgagggggtacccagagggagcagaccagggtcagttatgaggataattggtggaagcaagacaggggttgattattcaaaacgcaaactgtgtttattgagcagctactatgtgccaggcactgttctaggtgaacagtaaacatagcagtgaacaaaacagakattttctctgccttcgcaaagctcacattttagtggatgagacaatcaagtaaacaaatatggataatttcaatagtgtgttatgaaggaggttagcaaggtaacgtgactagactagacattgactagaggtggaaggggatagcatttgcatgtacagtagtcaaagaaaccctcactgaaaaagtaacatttgagttaagctgaaggaagagcagtggggtcctgattaattcgctctcaaaagagaagaaagaaagccttgatttgtaggtttgctgattttcatggtgtaaaattacaacagcc

SEQ ID NO: 805617 - DNA, 627 bp, Homo sapiens
catctttatgagattgaagattatgagggcatcatctttaatacaagtttataaaaacattcaaccacttgaaagatctgtgttcaaaatcctttgtctagcagtggcgacagatttgcactgacccttcatggataygtctgcaccaagggacctggagcaaaaaatctccctagattgttgcaaggtttaatgagataatgtacacgaaagaacttgcaaaatgaagagcactttataagctgtaaaggtccacattaacacagactgcttggaccagaactcacagtacagaaaatagtagagcaaagcaaaagtgatttgctcaggcaggtacaaaaccacaattcagtgtttacgaaccagtgctcaaactaccaacgtaatatgttggcttgcatcatagacctgttgttggggggtgaaggtgggtctagtttgttgttgttgttgttgttgtttttaattttagagcagttttattttttcagacaacttgaacagagtacagagtccccatagacttcccctccctctcttcccctgacacctcagcagtttccactaataacatctcccattagtatagtacatttgttacaataaacaaatcaatactgatacatt

SEQ ID NO: 805618 - DNA, 627 bp, Homo sapiens
catctttatgagattgaagattatgagggcatcatctttaatacaagtttataaaaacattcaaccacttgaaagatctgtgttcaaaatcctttgtctagcagtggcgacagatttgcactgacccttcatggatatgtctgcaccaagggacctggagcaaaaaatctccctagattgttgcaaggtttaatgagataatgtacacgaaagaacttgcaaaatgaagagcactttataagctgtaaaggtccacattaacacagactgcttggaccagaactcacartacagaaaatagtagagcaaagcaaaagtgatttgctcaggcaggtacaaaaccacaattcagtgtttacgaaccagtgctcaaactaccaacgtaatatgttggcttgcatcatagacctgttgttggggggtgaaggtgggtctagtttgttgttgttgttgttgttgtttttaattttagagcagttttattttttcagacaacttgaacagagtacagagtccccatagacttcccctccctctcttcccctgacacctcagcagtttccactaataacatctcccattagtatagtacatttgttacaataaacaaatcaatactgatacatt

SEQ ID NO: 805619 - DNA, 582 bp, Homo sapiens
ctgcctaagtccaggcacatcttttgttagttctcagagtggcttccaagtggcaatggaacctcaacttctttgctgagtgaacttttaatatcagcagaaattatgttttattgtatgtcagcttaaacataattttgaaggtcttagaaaacctaaaacatggaactaatattaaagtgagctaataaaaggaaaatattggatacaagcattgaatactaagaataattttaatttattttcttttgcttcttattttcatatgcaatagagcagctatatctttcagtcatttttgccactttaagaaagtataaaaggattgggtggctgtagaaagttgtgctttgtgtattcaagatctttgatgatctgctaaaatgcttgtatatgacagaagtcaattacctatwcccaattttctgcaaaacagaaattaattactttgattaaaagtaataataatataggtggctaaaactatatcagaacaatagtaacaaggaaaataacctgtatgtttatttttcaaatgaaaagaaatagtcctaaagtaacagtttcttccagttagaggaa

SEQ ID NO: 805620 - DNA, 628 bp, Homo sapiens
aattttggtgaacaactagcagtctctgtcacacacctgtaaattgagttttatttttcttatttgcagctgaaagaatttgtcactgatccaatgggtctggagataggagaggcattttggtgggttatacagagtttttctttgactgtggtatctacatttttcaaaacgtatcatatgtgataggtaaatccaaggaagtggatgacttcacttaggaagaatgtagagagtgagaagagatacagagatagagccctttgaagtgttcactgacccatctaatgcagaatcattcctccttattgctggtgaaaagagcagttcagacatctcagtggcctatagagayctcccttgggttgagtagcctcatgactcagatgtaagaataactctatagaccatggttgcccagatatttctgttttgggtggattctgaatataaaattccagcagcgctatctttgcctctgttttcattctttaaggtactaactttgacaaatagctgaaaaaagtcttgagtgtgtagtgtgttcaacttctttcctttcctggtgaagatatcatatgtggacacctagcaacctggatcctgaaataatgtggaaaatgcccca

SEQ ID NO: 805621 - DNA, 589 bp, Homo sapiens
atatttgaagtggggtctccctgccaccctattttaaaacatatcccattccaccttccctattttaattgactttatagaaattaccaccttctaggccaggcgcagtggctcacacctgtaatcccagcactttgggaggccgaggtgggcggattacctgaggtcaggagttcgagaccagcctgaccaacatggagaaaccctgtctctactaaaaayacaaaaaaattagctgggcatggtggcgcatgcctgtaaccccagctacttgggagactgaggcaggagaatcgcttgaacctgggaggcagaggttgcagtgagctgagattgcaccattgcactccagcctggccaacaagaacgaatactctgtctcaaaaaaaaaaaaaaaagaaagaaagaaaagaaaagaaattaccaccttctaacatagcatataatttgataatttgtttgtttactttgcttattttctgtcttctgtccattagtatgtaagcttcatactatgagtatgtgtatgggtcaactgcagatattttgtctgttttgttcctgatattcccagtgcctagaccaaaga

SEQ ID NO: 805622 - DNA, 643 bp, Homo sapiens
aattatttttattttttacagagggggggtcttgctgtattgcccaggctggtcttgaactcctgagctcaagcaattctcccgcctcagcctcccaaaccactggtattacaggtgtcagccaccgtccctggcctggatggaggaatttaatacaggaaattggttcatcagctgacagaagaatttacgatttaaataggggagaggagaaaggcagggattagccacagaaggaagccaataatacatsaaggcccatgaaaaagggaagcggaagtcgttactagaggccaaaaccagcagatgctgaaactggtgggatagccctgtgggagctgggaccctaagggaagggctgtctggaagaaactggagccatgaaggaaacacagccaccaatgctgagatgcaggaagccaagcaaaagggcaaaaagcaccaggcagttcctttccttcctccctctagttttccaccaggcttcccatgggccatgcctactagaagccatggagtaaaggagcctgggaaatgcagttccctgtgatcaaaaagaagcacagaggaaaggctggcatggatctgaggcacaatgggtgcctagtctttttttatgccccagtttgtagatccagaaggc

SEQ ID NO: 805623 - DNA, 643 bp, Homo sapiens
aattatttttattttttacagagggggggtcttgctgtattgcccaggctggtcttgaactcctgagctcaagcaattctcccgcctcagcctcccaaaccactggtattacaggtgtcagccaccgtccctggcctggatggaggaatttaatacaggaaattggttcatcagctgacagaagaatttacgatttaaataggggagaggagaaaggcagggattagccacagaaggaagccaataatacatgaaggcccatgaaaaagggaagckgaagtcgttactagaggccaaaaccagcagatgctgaaactggtgggatagccctgtgggagctgggaccctaagggaagggctgtctggaagaaactggagccatgaaggaaacacagccaccaatgctgagatgcaggaagccaagcaaaagggcaaaaagcaccaggcagttcctttccttcctccctctagttttccaccaggcttcccatgggccatgcctactagaagccatggagtaaaggagcctgggaaatgcagttccctgtgatcaaaaagaagcacagaggaaaggctggcatggatctgaggcacaatgggtgcctagtctttttttatgccccagtttgtagatccagaaggc

SEQ ID NO: 805624 - DNA, 590 bp, Homo sapiens
cctggagcttttcctcaatgttttcttctagtagtttcatagtttcaggttttagtccttttaaatctttaatcctttttgatttgatttttgtgtatagtgagagatagggatctggtttcattcttctgcatttagttgttcagttttctcagcaccatttattgaaaagactgtcctttccctattgcatattctgggatcttttgtcaaagatgagttggttataaatgtgtggatttatatttgggttctctattatgttctattgttctatgtgtctgttgttatgccagtaccagtgaattaacttttctaccaatatgtaatatccctttttaaccctggtagttttctttgttctgaagtctactttgatattaacatagtagttttgtttcagttggggtcttcaatgtgcagttttttttttttttcccatagtttttcttttwaccctacctttcctatatttttgggggagagtttcttataaagagcttgtacttgagtcatttttataaaattcattctgtcaatctctatcttttaattggtgtgtttatgtcatttacatgtaatgtaattat

SEQ ID NO: 805625 - DNA, 702 bp, Homo sapiens
tagagaatctcacttattatggggagttctcactttcatcatcagtttttaagtctctgtacatgatagagtgacagcgattcatgtaatacacttgtgttgaagttttctgataaacaaaggtagcaacaaaaacttttatcatttgtaggagcaagggtaatacacaggggaagagcaagcaacttcctattactagcaataaacttacaatgagggttttaaattctcccctagctgaaagacatttttcaaatacagacataggattaaacctctgccaaacctatacaggcatatgtgccaacgttgtcacatccctgaccatatttttgaccaccaatttttgaaaatctattggcagacagcaattgctcaagttgaatttttcacagacctgatattcaggtgagagaaaatagtccaaggccagtctattttgataaatggcatttttkatttgggctttctgctaggtaaaaaagtcaaaacactgccagttttgtcagtgattatttttaggagggcctgcaaccgtatgatatgattgagaatgtagatgggggtttgctactaagaatataagtttttaagagctacacacttgaatttcagggagtctgcggaaagagctacagttatcttcaggcattaacatttttcctttctaagtctactggtcttgtatgttagtccttccaa

SEQ ID NO: 805626 - DNA, 634 bp, Homo sapiens
aagggatgggctagacggcggggaaaagacactgcttccagaagggtcttgatgctgatggagccgaggttgaggagtaaaatacgcctktttcctctctctcccttaatcccacttttctaccaatgtttccaagtcccctcacacaacgtcaatcccaggtaaagagttgtcatcctctgttggttcttcttcctacgattctgtcttgcggtgttgttattttcgcttttactcccaagaagattctctctgtgtcttttggaatccacagatgtggaagctgggtacatggagggccaacggtagaactcagtggggtgtgtccaggctgcaattaacctaatgaccccgcggggcacagcagtccacctggcgtggaccgccccgattggctgcgttgggctgacggaatgaattcctatcggggcggggcagcccaggggcccaggggggtcagggcttgagccctgggtgggcccggggctggctatataaggccgggctctggcagcggagcttcactccgccttggacggcgcaccgcacaggtcacactccaggctgcggccgcacatcccgaggaacagaagcgggcctgctcagctgtctgcaaggaccggcgttccagacc

SEQ ID NO: 805627 - DNA, 634 bp, Homo sapiens
aagggatgggctagacggcggggaaaagacactgcttccagaagggtcttgatgctgatggagccgaggttgaggagtaaaatacgcctgtttcctctctctcccttaatcccacttttctaccaatgtttccaagtcccctcacacaacgtcaatsccaggtaaagagttgtcatcctctgttggttcttcttcctacgattctgtcttgcggtgttgttattttcgcttttactcccaagaagattctctctgtgtcttttggaatccacagatgtggaagctgggtacatggagggccaacggtagaactcagtggggtgtgtccaggctgcaattaacctaatgaccccgcggggcacagcagtccacctggcgtggaccgccccgattggctgcgttgggctgacggaatgaattcctatcggggcggggcagcccaggggcccaggggggtcagggcttgagccctgggtgggcccggggctggctatataaggccgggctctggcagcggagcttcactccgccttggacggcgcaccgcacaggtcacactccaggctgcggccgcacatcccgaggaacagaagcgggcctgctcagctgtctgcaaggaccggcgttccagacc

SEQ ID NO: 805628 - DNA, 682 bp, Homo sapiens
agagtccggggaatatatgggatccaacactttccccaaacatatcatgcccagcattctcctcccatctccagaaccacccaactaaggtaacggctgtggaggtgaaagaattaaggcagactatagctctagagacaggatacaaagatgcaaatgcctggctgaaacggattaaatattccatccrcactctaaacaaaagagattgttatgcttgtgcgcaccgcaggccagaggcccagactgtcccctttccactcagatggtcctccagccgaccaggcatgaactgtatggtagctctcttccaacgccccacagcctagggtaatgaattatgccaagctctctcttggctattccctgaagttcggcaccctatgggtcaggccctgagggccacgtcaattttacctcatgtctctcacaacaaggggacaacttagcatttcttggagacctaaagggatgcagtgagtttaagccattccgagagctgacctatcagtctgccctgatccatccgcaagtggatgtatggtggtattgtggcggaccatcactggacactctgccaagtaactagagcagcacttgtgctctgatccaattggccatccctttcaccctagaatttcatcaaccaaaaaggataaagacaaaggattgtataacaaga

SEQ ID NO: 805629 - DNA, 682 bp, Homo sapiens
agagtccggggaatatatgggatccaacactttccccaaacatatcatgcccagcattctcctcccatctccagaaccacccaactaaggtaacggctgtggaggtgaaagaattaaggcagactatagctctagagacaggatacaaagatgcaaatgcctggctgaaacggattaaatattccatccgcactctaaacaaaagagattgttatgcttgtgcgcaccgcaggccagaggcccagactgtcccctttccactcagatggtcctccagccgaccaggcatgaactgtatggtagctctcttccaacgccccacagcctagggtaatgaattatgccragctctctcttggctattccctgaagttcggcaccctatgggtcaggccctgagggccacgtcaattttacctcatgtctctcacaacaaggggacaacttagcatttcttggagacctaaagggatgcagtgagtttaagccattccgagagctgacctatcagtctgccctgatccatccgcaagtggatgtatggtggtattgtggcggaccatcactggacactctgccaagtaactagagcagcacttgtgctctgatccaattggccatccctttcaccctagaatttcatcaaccaaaaaggataaagacaaaggattgtataacaaga

SEQ ID NO: 805630 - DNA, 528 bp, Homo sapiens
taattattgcattatatattacagtgtaataataatagaaataaagtgcacaataaatgtaatgtacttgaatcatcctgaaaccataccccctgccctgtcgctggaaaaattgtcttcctcgaaaccagtccctggctctaaaacggtcggggaccaatgatctagctggtaatcctgcttacactattgattccccctcccccgatatattctccatagagaaaccagagaattattttaaaaacacatatttcatcatatcattttcatgctcaaaatactcgaatcacttccttacaaaccaaagtaaaattcaaatactattgcagccmaaaagatatgggtccttgctcctttttttatctgatccttaatgatctcctccttattcactgggttcctgagtccttggtgctcccggagcatgctaagccctggcttcaggtctttacttgctgttccatctgtctagaatactctttcctcaaataaccagatggcttaacccctcacctcattcagccc

SEQ ID NO: 805631 - DNA, 595 bp, Homo sapiens
tgcataatgttgccactcagaatgcaataccctaatgtgaaggcctcagaaatagccacagaaaaaaagtttctctctgaacttctccctcctctctttcatccatcattctcccccaaggctagccatagaaactagaattcctcttccccaaagcaggtcatagaaaacagaacccttttccccaaagccagccacaaaacataaaatatactcatcactttctcccatttatctgtgtaagaactggctataaagaaattctctgacctagttggtttgattgaaggccctaaggtcccctcctttcagcaaasgtcctgccccatacgcagaataagcaaatgctgcacagagaggccaagaagaatctggataggccttactaagtgatatgattaggatctgtgtctttgtccaaatctcatgttgaattataattcccaattttggaggtggggcctctgggaggtgattggatcatggaggtgtttcttcggagtgctttattcccatcttcttggtggtgttctcatgatagtgagtgagttctcatgaggtctgtttgtttagaagtatttagcccctctctcac

SEQ ID NO: 805632 - DNA, 495 bp, Homo sapiens
aagcagccccagagagctgccttgcctttcctgccaggtgagtacacagtgagaagatggccaactataagccaggaaacaggcctccatcaacaaggaatctgccggcaacttgatcttggacttcccagcctccaggattgtgagaaatcaattatgttgtttataaaaccacacattctatgatattttataatggcagcctaaacgaactaagacagggttgtgtcattttctaccaaattcacagcaacatcagcaatggcttttcaaatttcagttatttgagcttcctcaacatttagggtggagatacactacattttggttaacaacaaacaaacagaacccatcccyctcaccccaaaaataattttatttaggaaattaacctccctaaaaatctggcatgttttggaggcaaagaagtatgaataaagaaaacacacaaacgaacaacaaggaaactttccatgtagccaaagttctcacaac

SEQ ID NO: 805633 - DNA, 554 bp, Homo sapiens
tgaagctccatctcaaaaataaataaataaaaataaaataaaaataaaaagactagtaggaaatacatgatttggaaataaaaaatattcactagattgatgatgctaattggctttttacaaacctaggaagaaaaatatgttgcaaacatggaggaaagatgatggcctccttcaacagaactatgagttgtccaagatttcacaaagttcttcaagcatggcatttgatgatgtaagtrcaagaagaacaaaaagtaatgataaggtagaacttattagagatgtatttgaaatatggaatcagtattaataagatggaaatgttctagattcacgtataacagttgatgaacagttagctgcattttagcacattactcatttggaatacatcatggaagaagaatttgggtatactatgcttaaattcttattaaagtattctaataaagctgttctccctatccttttattgttctgtacattatttgtaaagtgaaaactgcacaaacattacaaaagagccattggatccagacaacaaacagtaa

SEQ ID NO: 805634 - DNA, 599 bp, Homo sapiens
aaagaaagggaggagcatggagtctgcaggaactgcagagctgagcctgaacagcaagaaaacagtggagcaacccaggaaggaagtgataaggttcccaagtctttttggaggggtacatgtggggaagagggcagattcgattccagggaaggaaaagagcaaagtggagcctgagcatgtggggattaacacaccctcccaagsagaataattttgatgattgaaactgttctaagcatcacagttacagtatttatggctccagaacatcatagtgctaactaaagtagggatagcaggacatggacttcaaaatgcagctggatcaaagtaactttatttctgatttcctaatttgggctaagtatcataggtacttaacaagcacttaataaatattgattgaattgaaagtaatatgtttcttctgtaaaacacatatgtacatgttttcatccatttttctactgtgtgaaaacaccgagaatgtataaatggatgagttactgccctctgttggagcgtggaacttacttgggcaaatgacaacttgtgaagttgtcttgaggagtattaacaaggtagaaacgtactaa

SEQ ID NO: 805635 - DNA, 591 bp, Homo sapiens
gatcactgctccaaagaggaaaggaagtgaatgtggtaaattcttaaatctgttttggagacatgcaagtcaagtccctctcttctagtttaaatgagcagattctaggccaggcgtggtgtctcacgcctataatcacagcactttgggaggccaagaagggcagatcacttgaggttaggaattcaagaccagcctggccaacatggtaaaaccccatctctactaaaaatacaaaaattaagagggcgtgggcgcctgtaatcccagctactcgggaggctgaggcaggtgaatcacttgggcccaggaggaggaggttgcagtgagccgagatcatgccactgcactccagcytgagacagagcaagactctgtctcaaaaaaataaaaaataaaggagcaggttctatttatttaacatgtgactcctgaaacccacacactaatcacccagatgacatgatgtaagttgatttaaacgctggttcttaaatttctaaggaaatatctttttatgggaaaaaatgacctttcataaatttcaaaagaaacaatttaatctgaacaaacacctgaagttcagaagta

SEQ ID NO: 805636 - DNA, 602 bp, Homo sapiens
attaaaaaaaaaaaactttatttaaaaaaactggtagcccatgagctttagtttgcccaattctggcataatggaatcctatgcagcaaaatggatgaatttcacaaaaataataagcaaaacacatgtaaacaaacacataagtatgatgctatccatatatgtttcaaagaccaggcgaaactaaactgcaatatttgggaatgcattcagaaaatggcacacaaccgaaacacrtagggaagattatcacaagaaacagaacagtggttgatatggtttggctgtgtccccacccaaatctaatcctgaattcccatgtgttgtgggagggacctggtgggaggcaattgaatcatgagggtaagtctttcctgtgcagttctcatgatagtgaagaagtctcacgagatctgatggttttaaaaaggggagtttccctgcacaagctatctccctctttgcctgctgccatccatgtaagatatgacttgtccttccttgccttccaccatgattgtcaggcctccccagccatgttgaaatgtaagtccattaaaccctttttcctgtataaattacccagtctcaggtacttcttt

SEQ ID NO: 805637 - DNA, 554 bp, Homo sapiens
aaaatgtttcctgaggtagaaaaaaaaagcaccaaggactgtaattattggattgtttcacttttgaggccaagaagcagatgttcgactttcaaggcttgggcaagtattatcacaagttaactcctctgtttgccactccagcatccccgctcactggcttccttgaagaggcccacttagatcagttgaaccattgcctaggatttggtttgcaaggctctttaaaaagmtgggccatactgtaatctggtgctaatcagatttcagtgtgatgtcgccaggaaaaatcgatatgtataatgctagactagaaaggtttagaaccaaattccaaagaagaaaaatcattctacaaattagatgccttttaaaataaacttactttgaataaaatagagaaattattccaagtctctgctctcctgcttcccatgttttgttcgagaactggaaaatgaattccctgagatgagagctagccttgttttgcagtgagaggcaggtagtgtagtaacttgttaaaatgtccaacaaagctgggagaatgtaat

SEQ ID NO: 805638 - DNA, 588 bp, Homo sapiens
agaaaacagataaaaaggagagagagagagcgagagagagagaaagagaatattatctacgattccataattttgagataatgagtattataatttcaacatattatagctttttctgcaaaatatatttaaaagcaaaacttagactataatgtgtttaaacgttttttgctttcttcatttgattttactataccattttgcttttttaaaaagttatggtttaaatgctacagatattttatatatgaatttcccagaattttgcctattcttaatgtgcaacttgattaggtaatctctatttttcaatattataaaatgatgctgcaatgaccatctttatttacaaaccttcatctgttgatttatttcagtgggacacagtcctaaaattgaagccatyacatacaaattttagaatttgaaaaatctcctaatgcacttgccaatttctttgtccagaaaatgttgacctggcctaaacagtactaagtaaaaatgtctgccttaccttgccctcctcatctcaatcttaccttgctatttaaggatttatttctgcttgcccttctggcctagaacagg

SEQ ID NO: 805639 - DNA, 573 bp, Homo sapiens
ctccctgatgctggggtgcttatatctacctttattcaggggctctggagccctggatcaggaaaccctaacaccaagagccactgaaggtggctcatggcctcttaaataagcaagatgtagtggactgctctgttcatgggtttttttcttttttgcctctgagccactcctacgtgcttccttcatgggacagttcttaccaaattaratttttgtttcatcagttctggtcagtttcctggacatcagcttgacccaaccagacctcaaaccagaaagccttattaaacaagacaattatatctttcccaagagcccttccttctagatttcttccttacctgagcatagggtaattttttttgttttcctaattgcctagtgactggaaaatcactgagtttagactttctcttctacttttccctggaataccaccctgtagctttcccctggattgtcaggtcactcagtctggcccttaatttacccccaagagacatcagggaaccttaaatccacaaatgcaatacacttgttacaagaaacaaagagcagggtcaaatacac

SEQ ID NO: 805640 - DNA, 573 bp, Homo sapiens
ctccctgatgctggggtgcttatatctacctttattcaggggctctggagccctggatcaggaaaccctaacaccaagagccactgaaggtggctcatggcctcttaaataagcaagatgtagtggactgctctgttcatgggtttttttcttttttgcctctgagccactcctacgtgcttccttcatgggacagttcttaccaaattagwtttttgtttcatcagttctggtcagtttcctggacatcagcttgacccaaccagacctcaaaccagaaagccttattaaacaagacaattatatctttcccaagagcccttccttctagatttcttccttacctgagcatagggtaattttttttgttttcctaattgcctagtgactggaaaatcactgagtttagactttctcttctacttttccctggaataccaccctgtagctttcccctggattgtcaggtcactcagtctggcccttaatttacccccaagagacatcagggaaccttaaatccacaaatgcaatacacttgttacaagaaacaaagagcagggtcaaatacac

SEQ ID NO: 805641 - DNA, 647 bp, Homo sapiens
tgtacctttcaagtaatttcttatccctcaccccctcccacccttccaccctaccaagtctccagtgtctattattccacaatctatgtccatgtgtacacattatttagctcctgcttataagtgacaacatgtggtaaactgggttatttcacttaagataatggcctccaattatatccatgttgctgccaaagacatgactgcattgtattttttattccatacatatgtatgtatgtatatatgccacattttcttttttttccccctgagacagagtctccttctatcacccaggctagagtgcagtggtcctatctcagttcactgaaacctccacctcccagatccaagtgattcttgtacctcagcctcccaaatagctgggactacaggcatgagccatgaggcccygccaatttttgcatttttggtggagatggggttttgtcatgttggtgagtttgggcttgaacccatggcctcaaatgatctaaccaccttggcctcccaaagtgctgagattacaggcatgagccaccatgcctgacctatgtattgcatgttctttatccaatcctctcttgatggacacttcatttgatttcatatttttgctattgtggatagtaataaacatatag

SEQ ID NO: 805642 - DNA, 533 bp, Homo sapiens
gcatgatggctcacgcctgtaatctcaacactttgggaggttgaggagggcggatcacttgaggccaggagttcaagaccagcctggccaacatggtgagaactccatctctactaaaaaatacaaaaattagctgggcatgtggcactcacctgtagctactctggaggctgaggcaggagaatggcttgaacatgggagctggaggttgcagtgagccgagatcgtgccactgcactccaacttgggcgacatagagagactctctgaaaaaaaaaaaagaagttgaaaatttttccagagtgaataaaaaaggaaaaactgactgctgktgattcataattgggaaaataagtatacaaagtaaagaggtttgaggcccaataatattttaaatgtggttatattgccacagtatttaggatctatgaagagacatttatggctctgtctgaaagtttcttttccttaatatgccactgcctttcaactgggagttagaaaatttaattttcttttcaaggtagacaata

SEQ ID NO: 805643 - DNA, 657 bp, Homo sapiens
ttcttttttttacttaaattttacactaattgcatcttaaatattagctttttcagtcaaaattcgaacccattatattatagagcacataaacacacattctaaacataatgtgtttttgtgtcatgaactatttttccactatacatcaatgtrttgtgaacgccatacccagagaggttcctgtgcatagaaatactatggatccgtatatccatgtatatgtttgtgcacagacgtatacatgtgcataccttatacttatattgcacacacacccactaaatgttaactcatgtaaaaatagtcattattttgcccattatttttcttttctttactcattattctttcccacacacttatgtaataccatgctttaatacacataacatgtaaaatattactcaaataataaatggtaataaatcatcgaaatgggaaacgttcatgatggcattttattgatgaaaatgcaaaagaaaagtaccctggcaagtggctgatcccaaataactacaatgtcgatatgaaaagaacctcaatatgcctgagataaattgatattatcaggctgcttcatgaaagaataagataaagtcatttatgatagatggtgtgctatcagaggatatctttaaccatcccctctaatgt

SEQ ID NO: 805644 - DNA, 602 bp, Homo sapiens
aaagcaattgcaatgaaaaccaaaattgacaaatgggatctaattaaactaaagagcttctgaacagcaaaagaaactatcatcagagtgaacaggcaacctacagaatgagagaaaatttttgcaatctatccatctgacaaacttctaatatccagaatctataacgaacttaaacagatttacaaaaaggataatcttttatccagtcttggagcttccactcaagttctttgtttccttttaccatcaagtgccttgaaagagctgttgcacttacccttctcactcgcttctgctaccagcattcctcagactttccaccacacaatattcagttctgcccttacttgactccttggcagaattatacacagttgacaatgcccttgttcaaagactctcttccttgggcttaygcaaagaatggttttcctgcttccctcctgcttggatttctgtgcagttttcccttttctctgtcttgcttggtgtcaatcctcaatgccccaacccagagtcatcccatctactgtcatggcttaagccatcatctctctgctcattgttcaactttcctttctacattcataaatccaaaa

SEQ ID NO: 805645 - DNA, 632 bp, Homo sapiens
ccatttattctctggataagcttagtcaggtaacttcatctaccccaatgtagacaacttatttaatctgacaaggtttgtgagaagtgaaattaatcaaagtaattagaaagcactttgtctagcaatgtaacacttaaaggagaaacactgtggtaatataaattttttaaatgtatgtttctctcatatatttaggcatatggatatcgagacatcaatgtaatttattgcataaatctatacagcagagtaactctttacagtagaaaatctattagaatctcatcctggtcccaccatttactcaytgtctaattctggacaagaaatttattatcttattaagttttcttactagtaaaattagtatgataccatacatataataccataaatacaatagcacaaataccatatttgtggtattgtagggacagaagagggtcaactactcaaaattccttgcaaactatttaggatgattagagtatgaggcattttaaaaatatctcaaaaggataaaaattctaaattacttgttttaacattgttgattataatggcttcattgcaacatactttataattattatactgttataaaatctgttgctatgacatgctaaatt

SEQ ID NO: 805646 - DNA, 632 bp, Homo sapiens
ccatttattctctggataagcttagtcaggtaacttcatctaccccaatgtagacaacttatttaatctgacaaggtttgtgagaagtgaaattaatcaaagtaattagaaagcactttgtctagcaatgtaacacttaaaggagaaacactgtggtaatataaattttttaaatgtatgtttctctcatatatttaggcatatggatatcgagacatcaatgtaatttattgcataaatctatacagcagagtaactctttacagtagaaaatctattagaatctcatcctggtcccaccatttactcattgtctaattctggacaagaaatttattatcttattaagttttcttactagtaaaattagtatgataccatacatataataccataaatacaatagcacaaataccatatttgtggtattgtagggacagaagagggtcaaytactcaaaattccttgcaaactatttaggatgattagagtatgaggcattttaaaaatatctcaaaaggataaaaattctaaattacttgttttaacattgttgattataatggcttcattgcaacatactttataattattatactgttataaaatctgttgctatgacatgctaaatt

SEQ ID NO: 805647 - DNA, 669 bp, Homo sapiens
atgacttaagacaacaaatgagaccagagaagaactgtagcaggcttcatgagaagggctgccagaagctgcaacaaaagcagatctctaacaggtaaacaagcaataggacagcactgggctcaggtggatgctgcactagtaaacatgctgcagataggtactggttagatgaatatgttgtcacttactgtaactacaagttttgtgtttcagaaaaggtcctatatatctataaagaggttgctagatgaagatgatagctcaaacctctgacccatataatgttggggactgagagatactagggaatccatgctgctttttgatttcctamctctgcccagctgtgatattgcctaaatgtgcacatgcatttaagttacttgtttgcttaacttacaggaacatgagcttgatcatctcagagaaacctggtaataaaataaatttatatatgaaatgatatttttttcctccagaaagaaaaacctatggaaagatcctgtgctggaagaaagcatgaagtaattcaaatgactaaaaggtgaaaaggggtggaaacatgtaatcaaagatgaaaaataactctggtagtagagtagaaatgaattgcaagtgagtgattcgatgcaagggtgcagacaaattattaataattgccatggg

SEQ ID NO: 805648 - DNA, 530 bp, Homo sapiens
aacttttattgtgttttgtttatagctgcaatttatggccaaaaatgacaatctcttatgatataaggaaatgacattttttgaatttcacagagtgtaggtaatattttgttgtcagaaatcaaaaggagagattagcaaaaaacaataaactttcaagagagtaaaataaaactcatactatgtagagaaaattaatcygtatgccttagcaagtggtggttcaatattgctgccaagaatatttattaacattattcaggacaattatgcattgaggaggattagttctgtcttgaaagagattatttagcaagggctgcccaaatagttcgagtttacagattcagaaatgagatatgttttcttaatcaatgttgtaaaattaatgtttttgttaagttgtagacactctttccttagtgaggtcaagttgaattgcaatttaatatagttcctgatcagtaaaagcacttttcatcagtatagtggatgttgagttcttttgagaaaaaagcagtgcttagcct

SEQ ID NO: 805649 - DNA, 599 bp, Homo sapiens
ttattattttagatcagacattttctatttattttttaaaaagctaactgtaaaacagcctcagacaggtccttcaggaggtatcccagcagaagacactgttaacacaggagatgacagctccgtgtgttactgccttcccagtgacataatgcggaggtggaagatagtgatattgatgatcctgaccctgtataggcctagactaatatgtgtgtttttgtttccgtttttaaccaaaaaaaaaaaaaaaaaaaaagtttaagtaaaaataaatttttttaaaaaagaaaaaagcatatagaattagaatataaaaaaagaaaatatttttgtgcaacaatatcttcatgttttaaactaagcgttattacaaaaaagtcaataagtttytaaaaattaaaaaaattacaaagtaaaaaagttccagtaagctaaagattaatttacacactgtaaatttgtgtcctgtatgattttttatgttttatactgtattttactatgttcagtatgcttagatacacagatacacaattgtgtcacatctgcctgctgtattcagtacagtaacatgctgcacaagtttgtagcctagg

SEQ ID NO: 805650 - DNA, 607 bp, Homo sapiens
tgaaaaagtaatacatgcagatgggggaagatcacctgaaccttgagaggtggaagatgtagtgagccgtgatcaaaacattacactccagcctgggtgacagagaccccatctccaaaaaacagaaaagaaaagcatttataagttcatgttgaacagtgtttcaaacacatagacaaaatttatatgtcatgaaaatggaatatcagaaaaacattgtttaaaaaaacacaaagtgagtaaaccattaatacgtgaggtgagcggtgcatcagcttgccggcttccagctgcagcgggtgatggaggtggaagggagctgtcctcgggacaggaaatgaaacaaacccaaccaaagccgtgtattcgtttattcaatatsgttttgctttcttgtgtagactgagggtgtaaacctcgtttctgacagtcgcctataggacttttcagcaggctgtgggcctagaggtgggggatgtggaatcaagctaaagacccagaaccagagaaagaaggaagcagcagtgaggaagcaggacaagaacatctcggaaattcagcccggcgcggtgggcgcgcctgcagtcgcggcgctttgggggcccgg

SEQ ID NO: 805651 - DNA, 567 bp, Homo sapiens
gacttttgtatactagaacatcatagtagataattatgtgtcttagagcaaaaattcgtatctgagtccgttcctgaagaattttgctctatttgaaatgctgaagagaaatgtgctcatatgaagcctgtcttgcacctgtggcccagcttgcaatgtgctctgttgatgccactgctgtccagtagaactcactgtagtaatggaatattctccatctgggatgtccattatggtagccactagccagggtgcccactgagctcttgagatgtggctgatgtgactgaggaactggatggtaagttttatttarttttaattaattgaaatgaaagttgccacatggggccgatggatgctcatttggacggtccaggcctgggtactctttgtgcccaagctactgttgggaggagggtgaccttttgagtgggatgttgggaggcaggagagtgaagaccgaggcctcgggggcttcctccgtgggcggcattgtgctgagccttcgtagtgtgtagactccactcttgtcagtgctttgcagatgagtgaacagagactcag

SEQ ID NO: 805652 - DNA, 573 bp, Homo sapiens
agcatttataaattaaatatcaagtatatattacagttaatgtaaatactatgaatatattattatttaatatgcttaataagtatattgatatgcttaatatacttaagtatgcatatttggggatattttctgtttttattgggtaaagaaaggatttggattcttttaattgagtaagaagaaaataaaatggatttgggaaacgaagaatgcaagacgagtggtgtggataaagaacacatctggaattggcattcaactgtggagcaaagaaatccattgagacaactgcacaagattcctcaccctgttgctccaactggacctccgcctcgggttaatgacagwgtaatttttaaaaataccagcatgcaaaatctgtaaacagcaattaggaatgaagcaacacatgttctggcttgtcgcagctcaaggaaaaaaactacagaagagtttgaggagtatgcgctagacaatgtgtgaagttataaggaggacttgaattgaaatgcaattgaacatacagattctgtatctattagggagcctgttgagtactatatgtccatg

SEQ ID NO: 805653 - DNA, 625 bp, Homo sapiens
ccaagaatgcagggagcttaaagtgtctcctgcaatttggaaaacactgaaaattttggtcatcttatctgggacagtcttaattcagtgatttttcaaccaggggaaattctgccccctaggggacattttcattgtcacarctggggtactgtcatctagtggatagtctggggggttttgtctaggatgaggaggaagatgaaagagggtcggtttggaaaggaagaattcagtgcattctgcaagcaccctgcccagcccagctcactagcaaactggtcacaggtatattatctcattttgtcctctccacagacctttcaggaggaaaccatgatcccatcttataaatgaggacgctgagacagagaatggatagacaacctactcaaggtcacagagctaatgcatgttggtggctatatttgaactcatgaagacagactccagagctggacttcctaacctctctgctccatgccctcttccaactgacagcgatccctgacaggggtcactgaatgaacctgaaagaattcctctcttccagaccttctctatttaggaggagttccaaatatttgtcatatcctggcagtcctttccttgtcaactaaaacat

SEQ ID NO: 805654 - DNA, 630 bp, Homo sapiens
cgaaaacctcccgggagatgtaggggatgaaaaagatggtaacagaacccacggtgttgtggaaacatcccgagctgcaagtgtgaaggcctgatttgatctcagcggtgctacttacaagctgtgtgcctttggacaccagatcacctctgtgagttctgctcctcatctacagaatgagggggctgggctgaaatatgtctaagagcccccagctctgaggatctggttacaagtctctggaatarcctggcatgttggtttttagtatgatatgcttaaatgaagccataagaaaaagtgtacagcatatgagtaagaaactacaagcagctattacaatttataagtccaagaatatgcatctgaaatgtgtaacttgtttaaagttatgctgaaacccagaaaactgaagggagaataatttccgcttagaagaatgcagttgcaagtagatgaacagcgatctgatgcttaaaaatgccaaaaagaagggcagtccatatgcctaaatctcagccttacaacgtcagccagggagaagagccagccagacccaccaatacttctcaactttccccagtttgcgggtaccacaccctttctgaaactagcattgcaaaattcatt

SEQ ID NO: 805655 - DNA, 583 bp, Homo sapiens
catccaccgtgttttcatggtcaaagtatgtttcccatttggccttgaagtaaacagcattcaccagtaccagcacagtctcagcattaatagcgtccttgctgaagagttccttgattttacctaaaaaaagatcccagagaatatcctgagtatgaattgtatcaaaagcatttgtgtagataattttttttttttttttttgagacagagtttcgctcttgtctcccaggctggagtgcaatggcgtgatccctgctcactgcaacctctgccttctgggttcaagcgattctcctgcctcagccgccagagtaactgggattacaggcrcccgccaccatgcctggctaattttttattttcagtagagaaggggtttcgccatgttggccaggctggtcttgagctcctgacctcaggtgatctgcccgcctcggcctcccaaagtgctgggattacaggcatgagccaccgtgcctggccaataattctttttaatgcagtttatcacccccaagactagggagtgtctcattcaagaactaacccaagaagattaattcacagtcctggctggagg

SEQ ID NO: 805656 - DNA, 624 bp, Homo sapiens
ccaccttgtagtcctcacctcgcagtccttggcttccggctgcgtcacccagggctctgcctctattgtcactgacatttttctccctttgtgtctctgtcataaggacacattggattacctaccccagcatgacttcatcttaactaattacatcttcatgatcctgtttccaaatagtcacactgaggtgctggggttaggacttcaacatatgtttttgggggacgtaggtcaacccacagcacattcttttctcaaagtgacctgatgtttatgcctgcgcttcttcctttactctctttcaactcaattcctcttctcccacttttcaggaaagaggcgatcttagctcaggccactscaacaaaataccttggactgggtggcttaaaaagcaaacatttgcttctcacagttctagaggctggaagtccaagattaaggtgccagcagattcggcgtactcacatggtagggagaggaagcaagctgtctcgggactcttatgatgacacgatactaccccacctcctcatacctgcacattaggggacagggtttccatatgggaatttgggggagacattccatctgtgacagagacctatttctcacccatcc

SEQ ID NO: 805657 - DNA, 618 bp, Homo sapiens
gataacttaggttgacagactagtaacatttaacatggtcatttacaactgccacagaggggtctaaaaccgtaacacagcacagtgtttatagaaaagccaaattaggactaggtgcggtgactcacacctgtaatcctagcactctgggaggcctaggtaggtggattacctgaggtcaggagtacaaggccaacctggccaacatggcgaaaccccatctctactaaaaatacaaaacaattggccaggcatggtggcctgtgcctgtaatcccagatacttgggaggctaaggcaggagaattgcttgaacccaggaggtggaggttgcagtgggccgagatcgcgccactgcactccagcctgggcaacagagcaagactctgtctcaaaaaaaaaaaaaaagaaaaraaaagccaaattaggccagtgttttctccaaaagttggtcaatgaacttggtccagagctgatattctcgaaggtctggggtacagtgagtagaatatggacaatgtgctagttctacagaaggcagagcttattcatttcacatagctccgtttttatattttttaaatcattttttagaactaaaatatccttggcctaatga

SEQ ID NO: 805658 - DNA, 656 bp, Homo sapiens
ggtgcacctgccaggagcacgacttgatcttccggggcaatgccctccagtgaggctacatgagccttgatctgggcgaccatttcctggccagtcacctcaagggtgtgtagctcctgggcgcggacaaagagctgcatattggtgactgaaccgcggtcccagctgccactactgcgaagatggagtcgagaaagaggaagaagcgagggcgcgtccgtacagaccgcgggctgcatgtcacgtcactgctcagtcatatttatacctacttttaattacatgtggactaagaggtggtttatggagaaatttccaggtaaaaggcagtaactttggggttgtcakgtcattgccatagaaaaaggcagtaactcccgggtattgccgtggcaatggtaaactgacatggcacactggtggttatgtcttatggaaagctgcttcaaccccattccagttttagctagtcctcaacttggtccagtgtctaagccctgccctacatgttgagtctcaactcccacctcaagggcaccacagcagagagcagagagctgcagccaaaaccccaggtttcatgggactggctcattcatgctgggcagatggtcccccgacaggtctcccctaaagtgctccaagtccttctcaat

SEQ ID NO: 805659 - DNA, 605 bp, Homo sapiens
gtggccccagaccctagcagctgttgccactggaagcccatcagcccactgagacctagaacagcaagccgctgagggaggagtttgctgtcattaatgtcacctccatcccagctgagcagtggtcctctgtggccagggacacaaagaggagaagaggagccctgctccatccaccactagagccggcttcggtgactagagagtgacaggaagacagaagcgagtattccatggtggagcctctacaaacacattgggtgacaactttttaagatcagcctgttgacaggagttggcccagtcccagggatgtggccatcccaagctacacacctagttatagatgttgttaggractttattcatcttgataaagaagcaaatctttaaaaatacttcttaaattgagaggcatctaaaaacccagcttaaatgacaggagaggcggcagaccgtaaaaccttattcagtgacctaagagtggcctctgcgtgagaggccagttggtagaaaggacccaggtgtctagagaaaattgagccaggaatctctgtggctaccgaaggtctcctgtgaaccctgagttctactcagactccgtc

SEQ ID NO: 805660 - DNA, 605 bp, Homo sapiens
gtggccccagaccctagcagctgttgccactggaagcccatcagcccactgagacctagaacagcaagccgctgagggaggagtttgctgtcattaatgtcacctccatcccagctgagcagtggtcctctgtggccagggacacaaagaggagaagaggagccctgctccatccaccactagagccggcttcggtgactagagagtgacaggaagacagaagcgagtattccatggtggagcctctacaaacacattgggtgacaactttttaagatcagcctgttgacaggagttggcccagtcccagggatgtggccatcccaagctacacacctagttatagatgttgttaggaactttattcatcttgataaagaagcaaatctttaaaaatacttcttaaattgagaggcatctaaaaacccagcttaaatgacaggagaggcggcagacmgtaaaaccttattcagtgacctaagagtggcctctgcgtgagaggccagttggtagaaaggacccaggtgtctagagaaaattgagccaggaatctctgtggctaccgaaggtctcctgtgaaccctgagttctactcagactccgtc

SEQ ID NO: 805661 - DNA, 552 bp, Homo sapiens
ttcaatttgtgaaaaccagaatgtctccaggcactgccatacgtcccctaatggcaaaatcaccccgattgagaatcactacaataaggtgattcagaaggaaaagaaggtagcctcagggtccatgaaggcttcacaagaggtgggggtcatctggattaggcctgcaagtgggatgtctcaggcagctgagggccattctaggtgggaagaacaartgcctaaaggtctgggaggaggaagggcacgggtttgggaatgtgaagagttctacgttgccaaaacgtgtggttgcagcacgggcactgagaaaagtcaaggctgggtaggtagagggaggaagaatcagcttgtgaatggcttctcttcctttgtcctcaggaaacactgaactcctcttattctcctaactcgacctgggtgggcccagctcctctccccagcctcttcccgccctccaggatctgcctgaatgtttcactgttccttctgacaggctctgtcgttcccattctttactggttactttcttctcattattagctcttgacc

SEQ ID NO: 805662 - DNA, 552 bp, Homo sapiens
ttcaatttgtgaaaaccagaatgtctccaggcactgccatacgtcccctaatggcaaaatcaccccgattgagaatcactacaataaggtgattcagaaggaaaagaaggtagcctcagggtccatgaaggcttcacaagaggtgggggtcatctggattaggcctgcaagtgggatgtctcaggcagctgagggccattctaggtgggaagaacaagtgcctaaaggtctgggaggaggaagggcacgggtttgggaatgtgaagagttctacgttgccaaaacgtgtggttgcagcacgggcactgagaaaagtcaaggctgggtaggtagagggaggragaatcagcttgtgaatggcttctcttcctttgtcctcaggaaacactgaactcctcttattctcctaactcgacctgggtgggcccagctcctctccccagcctcttcccgccctccaggatctgcctgaatgtttcactgttccttctgacaggctctgtcgttcccattctttactggttactttcttctcattattagctcttgacc

SEQ ID NO: 805663 - DNA, 577 bp, Homo sapiens
tatggtgaaagactgaatgcgtttcccctaagatcaggaagacaagggtgtctgctcttgccacttctattcagcattgtactgaaggttctagccagggcaataggcaagaaagataaaagcatccagaatgaatgctatctgcagatgacacaatcttgtatacagaaaatcctaagaaattcacttaaaaactattagaataaatgagttcaggttgcagggtccaatttcaatatacaaaactcaattgtatttgtatatatttgcaatgaacaatctgaaaaataaattaagaaaacgattccactataatggcataaaatatttaggaataamtttaacaagagaagtataaaattcatactcggtaaatgaaaaaacattattgaaagaaattaaagatcttaataaatggaaagacatcttgagataatggatcaaaacactttttaagatggcaacactcctcaaattcatctacagattcaatgtaatcattatgaagatcctgcatggcttctctgcagaaattcatgagctgttccttaaattcatatataatatctagggatcc

SEQ ID NO: 805664 - DNA, 577 bp, Homo sapiens
tatggtgaaagactgaatgcgtttcccctaagatcaggaagacaagggtgtctgctcttgccacttctattcagcattgtactgaaggttctagccagggcaataggcaagaaagataaaagcatccagaatgaatgctatctgcagatgacacaatcttgtatacagaaaatcctaagaaattcacttaaaaactattagaataaatgagttcaggttgcagggtccaatttcaatatacaaaactcaattgtatttgtatatatttgcaatgaacaatctgaaaaataaattaagaaaacgattccactataatggcataaaatatttaggaataaatttaacaagagaagtrtaaaattcatactcggtaaatgaaaaaacattattgaaagaaattaaagatcttaataaatggaaagacatcttgagataatggatcaaaacactttttaagatggcaacactcctcaaattcatctacagattcaatgtaatcattatgaagatcctgcatggcttctctgcagaaattcatgagctgttccttaaattcatatataatatctagggatcc

SEQ ID NO: 805665 - DNA, 577 bp, Homo sapiens
tatggtgaaagactgaatgcgtttcccctaagatcaggaagacaagggtgtctgctcttgccacttctattcagcattgtactgaaggttctagccagggcaataggcaagaaagataaaagcatccagaatgaatgctatctgcagatgacacaatcttgtatacagaaaatcctaagaaattcacttaaaaactattagaataaatgagttcaggttgcagggtccaatttcaatatacaaaactcaattgtatttgtatatatttgcaatgaacaatctgaaaaataaattaagaaaacgattccactataatggcataaaatatttaggaataaatttaacaagagaagtataaaattcatactcggtaaatgaaaaaacatwattgaaagaaattaaagatcttaataaatggaaagacatcttgagataatggatcaaaacactttttaagatggcaacactcctcaaattcatctacagattcaatgtaatcattatgaagatcctgcatggcttctctgcagaaattcatgagctgttccttaaattcatatataatatctagggatcc

SEQ ID NO: 805666 - DNA, 634 bp, Homo sapiens
acaatgcttaaatgccaactttccttcctctcctggctgtaaattaagctcaaggcaccaagaggtgagttaataagggaggagctgccccaccctcggcatcaggtagaaaggggcaggaaaaaatggcaacacactggagctaaggattggggtcactggctctccccaccccaggaactcagaaggcagcgactctcacttaaaggtgcctcagctactctggggagctgctgatgggtctgtagtggccttrcattaggtttgtcctttaagggcccatagagaaaagtaggatacacaatacaatactattaagggcttgcaaaaagatccaagcactttgttaacacccttttttttgagacaaggtctcaccctgttacccaagctggagtgctgtggtgagatctcggttcactgcagcctcgacctccccaggctctggtgatcctcccacctcagcctcctgagtagctaggactacaggtgcctgccaacatgcccggctaatttttgtatttttagtatagacggggttttgccatgttggccaggttggtcttgaactcttgggctcaagtgatttgcccaccttggcctcccaaagtagctgggtttacagatatgagcc

SEQ ID NO: 805667 - DNA, 674 bp, Homo sapiens
gcgctgaaagggaacaagtgcagggatcctgggctccacccacctcctttcccacaccagagagacactgactcctgcgccaggacccagggtctccagaccttgaactaaagctcctttccagcctccagccccccaccccccagggaggggctgctggggctctgtctcagaggttcacctcacctctgtcgtccccgtaaasctacagactgcagagctctctagggtggggcacgcgaagctgactcacacaaggaagttaggattaatgaatgcccaggccaccagcctcacagggccatactcccagaattcttaattctgtaacaagccaggcactattgacaaagataaaagtagagaactgtgcagcccaggcagcccacagtgctcaggaaatcagacacacgagtaaactaaaaaccagtcaaccaacttgcttcagccgttggttcccagaggaaagaacccctggaggagctcctccagctccacttaggccattatgggccaaggccaggagggagcgccacctcctggtgggaaaagaaaaagcccaaactacttggctcaggattttttgttgaaaatgtaagtgcttgatatcaattaataaatctacaaatatttccagagagaccactgtgacacacagagataagttaactcac

SEQ ID NO: 805668 - DNA, 633 bp, Homo sapiens
tcagctgctctgcagtgcagcggtgacacaggtgccaaaaactgagagagagcctgtctttttggaccgagtattgggaaaggggaattccagggaccagagtttgtggctgcattttcctctttcctctgactgctttaccctaagagtggccccgattgtgtaaaacaatgcagcagcccaggtggctcaaatgctgagcaagtcttggctttagagaaagaagtatcagaaaaggaggcccgggagctgaaagtgggggccgaccggggggaggggtggatctcacagaggagagaactggagaagaggatttccagattctgtgtatgaattgatataatcgtragctttgcatgcacaggacggaaaacaataagaaaagatgaacttaaaaattacctcgttttggaatatatgaccacacttctaaatgtcaaagaagaaaccataatggaaatttgatagtacttaggactgagtgatattgaaattctaaatataaaaattaaagggcatatagaaagtaagaaaaatttatatgcctaaatgcatatattagaaaacaagaaagtctgaacattaatgtttagaatattcaactgaagacattaggaaatgaacaacagaatt

SEQ ID NO: 805669 - DNA, 598 bp, Homo sapiens
ttcattcttctgcatatggatgtccagttttcccagcaccatttattgaagagactcttctttccccagtgtaggtccttggcacttttgtcaaaaatgaattcactgtatatgtatggatttatttctgggttctctattctgttccactgtctgtgtgtctgtttttatgccagtaccatgcctttctggtttctacagctctgcagtataatttgaagtcaggtaatgtgattcctccagttttgttctttttggttaagatagttttggcttttctgggtgttttgtgatcccatatraattataggattgttttttctatttctgtgaagaatgtcatttgtattttgatagggattgcattgaatttgtagattgctttgggtagatgaacatcttaaacaatattgattcttccaatcaatgaacatgaaatatctttccttttggtatgtgtatcctcttcagtttcttacatcaatgttttatagttttcattgtagagatcttttacctttttaattaattcccaggtatcttattttattcataactattgtaaacataattactttcttgattttttttcagattg

SEQ ID NO: 805670 - DNA, 597 bp, Homo sapiens
attaaaatgcatgacacaattaaaatatggggacacatgcggcctgtgttaaaattagattatcaatactgcttagcagccttggaacctcaggcgaggcactgaagcagttagggtttcctcttctgtaattgagtgattttaactgtatctctctcataggattgttgagaggattaaaagagatgatgcttataaaaacatgagactgcttggacctattctgaatgcttaatgagatctagctgtgaaaatatgtgtctacatacatatttaataagcacacgcgcgcgcgcgcrcacacacacacacacacacacacacacacaggaatgctgtactccgtcacgtggtgaccaatggaacaaaccctctctgtcccggacctccaccgcccacggcagctgaactgggcccggggtcttgactcctcacaggcttcccctctcactggcttctcttcttgccgctcttcttttctctttgtcttctttgtaggtttctcaaatatccctttttctctttggtccttttcttatgttaacctcttgcctccttggtgtctacatttattcatttaagagtctaaaacaaggt

SEQ ID NO: 805671 - DNA, 597 bp, Homo sapiens
attaaaatgcatgacacaattaaaatatggggacacatgcggcctgtgttaaaattagattatcaatactgcttagcagccttggaacctcaggcgaggcactgaagcagttagggtttcctcttctgtaattgagtgattttaactgtatctctctcataggattgttgagaggattaaaagagatgatgcttataaaaacatgagactgcttggacctattctgaatgcttaatgagatctagctgtgaaaatatgtgtctacatacatatttaataagcacacgcgcgcgcgcgcgcacacacacacacacacacacacacacacaggaatgctgtactccgtcacgtggtgaccaatggaacaaaccctctctgtcccggacctccacmgcccacggcagctgaactgggcccggggtcttgactcctcacaggcttcccctctcactggcttctcttcttgccgctcttcttttctctttgtcttctttgtaggtttctcaaatatccctttttctctttggtccttttcttatgttaacctcttgcctccttggtgtctacatttattcatttaagagtctaaaacaaggt

SEQ ID NO: 805672 - DNA, 597 bp, Homo sapiens
attaaaatgcatgacacaattaaaatatggggacacatgcggcctgtgttaaaattagattatcaatactgcttagcagccttggaacctcaggcgaggcactgaagcagttagggtttcctcttctgtaattgagtgattttaactgtatctctctcataggattgttgagaggattaaaagagatgatgcttataaaaacatgagactgcttggacctattctgaatgcttaatgagatctagctgtgaaaatatgtgtctacatacatatttaataagcacacgcgcgcgcgcgcgcacacacacacacacacacacacacacacaggaatgctgtactccgtcacgtggtgaccaatggaacaaaccctctctgtcccggacctccaccgcccacggcagctgaactgggcccggggtcttgactcctcacaggsttcccctctcactggcttctcttcttgccgctcttcttttctctttgtcttctttgtaggtttctcaaatatccctttttctctttggtccttttcttatgttaacctcttgcctccttggtgtctacatttattcatttaagagtctaaaacaaggt

SEQ ID NO: 805673 - DNA, 518 bp, Homo sapiens
accctgggaatgggaccttatttggaaatagggtctttgtagatatcatcaagtaatgaggtcttactggagtagggtgagccctaatgcaatgactggtatatttataagaagaggaagatttagacacagacacacagggggagaaggccatgtgatgattgaagcagagttggagtgtctacaagtcaagcaatgccagcaatcaccagaagctaggcgggaggcacccaacagactctccctcacaccccccagaaggaaccaaccctgcaaatgctttcatatagaaggcctctccagaactgtgaaggactttctsctgtttcaagccacccagttagtggtgatttgttaaggcagccctaggaaactggtacacccagtcagtgcaataactttcaaatagttctgcttgcctccaacactcacactccatgtgttcccatccttgattactgtggcattctgcacatggcactcaaagctgggtcaatgtgagccaagagaactcagga

SEQ ID NO: 805674 - DNA, 590 bp, Homo sapiens
ctcaatatattttatttttagagcagtttatgttcacagcaaaattgagaagaaagtacagaaagtttccacacacccccagtctccatacatgatggcatcaccctagtcagcagtccacaccagagtggtacatttgttacaaatgatgaatccgcactgacaacttataatcacccaaagcccatagtctaagttagggtcactctcagtgccatatattttatgtgatttgactatatgtaatgacaggtatccacagagatacctgtatgacagagtgccatrcagaacagtttcactgcactgaaaatcctctgggatcctcccattaatcactccctcccaccaacctcttttcattgtttccatagttgtgcccttttacagaatgccagaccattataacaacacagtatggagcctttttagattggcatctttctgagttttggaaattatgtaaaaacctgctctacatgtccctgagaaggttttgattggatataagttttcaactcgcttgtgaaaataccaagaagtatccttgatgaattgtatggtaggaatctgtttagttttgtaagtaa

SEQ ID NO: 805675 - DNA, 633 bp, Homo sapiens
atgtggaaaataagaccacagactagggatttttttttttttttttagatgaagtctcacttgcccaggttggagtgcagcgcgatctcagctcactgcaacgtccgcctcccaagttcaagtgattctcctgcctcagcctcccgagtagctgggattacaagcacatgccaccacacctggctaatttgtgtatttttagtagagatggggtttcaccatgttggccaggctggtctcaaactcctaacctcaggtgatcgtcccacctcrgcctcccaacgtgctgggattacaggcgtgagccaccgcgcccggtcagactagggatttagaagcaagactttgtcatttataagaacactgcagaaaggaacaagaatgacccagctagccactgaagaccacctctgaaacccatcaacatgaccggctttctataggaaaagtctccacagactcaaaaagtctctagtttcttgcccttaggaaggcatgccctgggaataatagtttggggacaagagagagtagagtgtttactgtcctatcccccattaaatacatggcagaacttccccagggaaagcctatcatactgacattaactcagtacctgtttgaacttggaga

SEQ ID NO: 805676 - DNA, 587 bp, Homo sapiens
gccagccctgacagcctttgtatccaggtcagttgaacaggccgggattgtccccaacttggacacatctaaaaagctgcaggtgggatgtcatcaaaatcacctgggaaaacaacctgctctgaaaacagaggcatgatccaaaagacaaagaggtttgtgataccctttctgtacaatagctgactatcartaagtcattactgttttaaggaagtcagtcacacacacacacacacgcatacacacacagaaaaatacaagttagctgggcgtggtggtgtgcacctgcaatcccagctactcgggaggctgaggcagcagaatcatttgaacccgggaggcagaggttgcagtgatccaagattgcatcactacactccagcctgggcaacagagccagactgtctcaaaaaataaataacaataataataataatgttgcaccaatgtcagttttggtaaatccatggttgtgtaagatgttagcattagaggaagctgggtgaagtttcaaagaactctctgtactatttctcttttgtaagcctaaaattatttcaaaataataggtgataaaaattaga

SEQ ID NO: 805677 - DNA, 584 bp, Homo sapiens
aaaatcaggtcctggttgggcgaagggagaaatctgtgagcagtttcctgcctatcagacaggccctccagaggggtgatcagtaccataagcttccaggtaagcacatggggccactgcccccaccctccaaaacaccctcaaaagtctaaaccacctcaatggatgggagattgctctgcaaatgggggagccccactcctaatatgttcatcattgtcttcctaacaatcgtgactcatttcttgaacaaatgtttcacttttaaagggtttgcayagaggcagctttaagaggtcaaataaatgaatgtggaaagaaattaaaacttttacaaccacatgaaaaaggcattagccagtcatcctgcccagcagcccaatattgagcctgtgtgagttgccgtttgtgtagtgaagcaatagaggccatggtctggaatcagaaaccctgggttcagatactgcctctgaccccccaactccccaacaaaatgcacacattcagtggccatgtgaccagggcaaatgcctctcgttccacagctccaatgcaggaataataatagcatccacctggtgtgg

SEQ ID NO: 805678 - DNA, 616 bp, Homo sapiens
gggtatgtgtttaccttcacaagaaaacaccagttctccaaagttgttttattttatattcccatgatgtatgagggttccagttgcgtgacatcctcaccattttgtatggtttgtctgttgggttttagccattctgtagtggatatgtagtggtttgcatttgcatttcttcatggctaataccaccttttcatatgcttattagcctttcatacatattctttgtcacaggtctttcccatcttttgcttgtgttactgrgttgtttaataattgagtagtcctttgtcattaagttttttgtcacatgtatgtcagtgtatttccctagactgtggctttgccttttcctttcttaatatggtatcttttgatgaatagggagttttaatattgatgaagttgtatttgtcaactttttttgtttggtactttttttatcctgaaaaatctttgccatctccaagtttgtgaagatattctgtgttttcttctaaaagttttttatttttattttttagtctgcttttacagttaggattctgtggtccatcttgaattaatttttgagcgtggaacagggtgaaggggttgaagttcattttcttccata

SEQ ID NO: 805679 - DNA, 608 bp, Homo sapiens
ggatggcgatgtaggtccacaaggtggatggggtcctgagtgaggaccgcctcagagagacagccagggcttgtggtcggtgactagaccgaccagtgttcagagagtgagacagcagcattcccgcatatggctgggctgggaaagctgggagactgtgtgctctgtcgtggatatgatgagcggttatgcgggctctgcttcttgccacctacttgcaggttgaaggatgtgcctattccacatcgctgatggggcatccgagctttccytggaggtgggcagctctttcggggttggtacccatcaggtgctgtggccagaactcagattcggagtctaaattcatactcacactctatacacctggattgagatcacagtattattattttcacaatcgaactgagcaaagatacggcagccactgaagactcactgtgaggtgcgtctaagggagaaaccatgggctgttgccgaagatctgggagaaaaagtgtggaaaaggcaaaaccgcgcctgggagctcctgcaggaggcgccccgggacactaggacgctgcctctccagcgggggtttgcagttttcatggtcctgtgtggcgtgt

SEQ ID NO: 805680 - DNA, 457 bp, Homo sapiens
tgggactggagaggaaccagaaagggaatggagttggggattgaggaaagaggggagaaacaagagaagggaataccttgggcagctgggcaagaagaaacaaagccacaccatccagagacagggattttggaataactgcaaagtcacaaaagtattgggaagatgacttaatgcccttgaattcaagtcctcagacatacacagatattrtggtgatcatcatagcaaagctagccttcccaggaaagagaatgccagaggttttcctcagaggaggcatagaattagcctagccagtgaccagttagccagtgaccagttaaaggacaagtgttgactttgactttaccccagtccactcacgctgccacccccatgccctacagacccagccatgtccttgtgtaaagcacaccaggagacaccaaaggtatcacagagcaggtccaagtgg

SEQ ID NO: 805681 - DNA, 614 bp, Homo sapiens
aactataatgagatatcatttcaccccatttaaaatagcttatatccaaaagacaggcaataacaaataaaatagcttatatccaaaaagacaggcgaggatgtgaagaaaagggagcccttgtatgctgttggtgagaatgcaaattagtacaaccactatggagaacagtttggaggttccttaaaaaactaaaaattgggctaccatatgatccagcaatcccactgctgggtatatatccaaaagaaaggaaatcagtatactgaagtgatacctgaagtgatcaatgtttattacagcactgttcacaatagccaaaatttggaaacaacctaaatgtctatcaacagatgaatggatatagaaaatgtggtatacgtacacaatggaatactattcagccataaaaagaatgagatcggccaagcgtggcaactcamgcctgtaatctcagcactttgggaggccaaggcgggtggatcacaaagtcaagagatcgaggccatcctggctaacacggtgaaacgctgtctccactaaaaatataaaaaattagccaggcgtggtggcgggcgcctgtagtcccagctactggggaggctgaggcagga

SEQ ID NO: 805682 - DNA, 487 bp, Homo sapiens
tataaaattgctgtcaagagtataaaaagttaagtttcagtttcttttatattttgttaatatagactgcttcatctgaaaagagtaaaattacatgaagtcagaacactcccacatccttttagcatttgatctccacacctctgccctataaatttctaagcaaacaatggtgaaaacaaaacatggccactcggtagaagaaatgagggcattccttttctcctgagcactcgcaccactctcccagacccactccrgaggtgttgcaatagaggacagtttgcaggggaaaaacccagattccccagcatgaagcacacagtcctttgttccatgggtgtcattcccaaccattccccctccaccctacatttcctgagccaatgcctccatgcctgtgccacatgccacccacagcgtgaaggactagcaccttcttgtgccctcacctacactcacgacctcctttgggcatctgtcctag

SEQ ID NO: 805683 - DNA, 487 bp, Homo sapiens
tataaaattgctgtcaagagtataaaaagttaagtttcagtttcttttatattttgttaatatagactgcttcatctgaaaagagtaaaattacatgaagtcagaacactcccacatccttttagcatttgatctccacacctctgccctataaatttctaagcaaacaatggtgaaaacaaaacatggccactcggtagaagaaatgagggcattccttttctcctgagcactcgcaccactctcccagacccactccggaggtgttgcaatagaggacagtttgcaggggaaaarcccagattccccagcatgaagcacacagtcctttgttccatgggtgtcattcccaaccattccccctccaccctacatttcctgagccaatgcctccatgcctgtgccacatgccacccacagcgtgaaggactagcaccttcttgtgccctcacctacactcacgacctcctttgggcatctgtcctag

SEQ ID NO: 805684 - DNA, 561 bp, Homo sapiens
ggcagtgaagtgataacaagactgaagacctagtctctgctcacactgaactccacctccactactttggccaggcaatgatgctgcagctgtagatgatggtttttagagttcaggtcagtgcactgggtccaggctgtcaggttttggtcctaaccttttaactccatgaagagccccagtagtctctctagtctcctccacactccatggtatctcagcaaagctttatggcttctgtcacrccaggaatcaaagaaaggggctcatgagttcctatgagattcagcaggcctgtcttcctcctttcttgaccccaaccacacatgtgtaggaggaaggggaggggactacagcataagccccagccgaggcatcacctttgcctatgtttaggtgcgaccttctgccctaggtaggaacacctcttgtctccaggtagcagtgtgtttggaacctgtcatttaattttataactggacctcatttttctcttctgtaaaacaatgtggagaatttcaggacctgagaaatgactcgaataggataagaactaagata

SEQ ID NO: 805685 - DNA, 521 bp, Homo sapiens
tccctccctttcttcccttcagctacatagaagaaagaaattattgcaggtccagtagaatctacctttcccattccattctcctactgcaaacacctatcctgaagttagtagctagtggttagaagtaaccactatcctgaagttagtacgtgtatcactcctatacatattttaatatttttaccatttaaactacatatattgttttgtgtttttaaagttaacataaacgatatatgatttgctattggcactcaatgttataatttcaagatgtagccaartgaattcacaaagatatactcaatcattaagcagctcttaggcctcccccatgtgaataatctcaatttatttagtgaatgtcccctgtccatctccatgcatacgcgtgaatgagtccgcattggtccagggcctggggtcctttctggaatcatctggggagactgaaaaactagtgatgcctggtctcccctgggagagtctgcttcaattaggctggagggcagttgggc

SEQ ID NO: 805686 - DNA, 569 bp, Homo sapiens
gaatgagatggatcccattaacacagcctgggatttgataaacaccagagacaagagcaattggcttaactgaattcattcatttattccgtagagttctgataaagtgatctgcatgggtgtaactaagagactgcagccacatctgaaaatcaggcgagctgtgcttcagagctgcaaattgtggctcctctgagctcctgagagcctggtctctcaaactacattgtgtttagcttgtctgaaatctcacttatatatctattttatgatttcargtgaaggcaaggcctgggggagaagatctttcagggtaaatcagtgctccaaatctcacagtgacttttataattgattgattatgtcatacagatgagactggtttgtctcccacatataaagctgtaatggagacttattagctagtaaaattaacaaactgaattatcttgacgggctgtcatttgttttgggtaatcttgtttttctctgtcattgattgcggcaatttataaaccattctatcttcttggcccatgtgtagatctggccttgccttagacaggctg

SEQ ID NO: 805687 - DNA, 496 bp, Homo sapiens
agttcctaacaggccatggtccatagcctgggggctggggacccctggtctaaaacatggggagataaaagcatgaaggctgccttacacaccttcactagtctgtgctcacactcaacacgtgtgggactaaaggagtgtccctactagatttttgactgtttccctggttgctctggggaagaggggttggggaggatgctggcatgaccttgcaattcttgctatgggaggaatacactggtacaacaactatgtattttttttctttctttcccaaatcatctcagaaaaatgtcttgtttttttttttctcccttacytgatgcggtggtcctagaaccagaggtgcaactgcaagttctggaagcaggaatgatttctaagcaagaaactgtcactgtgtttttaaactttgtcagaattcctaacaattctgggggtggaccgtgtctttatctcgtctggcaaaagtggggttaggactaaatacaat

SEQ ID NO: 805688 - DNA, 551 bp, Homo sapiens
atgattttaatgccaaaatagtcatacagtttgtaaatccaaccacttttgggtgaatataagttaggccaagagcctttcaaaacccccctgggcctgcgaatgttgcgcttggaaaacgcaggagatggggttggaatgaggcaggggttggggaactgcgctgcctcctgcgccccmactcctgccgcagcctctccccttcaaatcttcacattgaggattgtgtttatcccaggacacctggcttagaagatgagatgtccgttttattctgctccttctcaaagtgtacttttcaaatatgagttggtaactatagggcatttgagagtgatcattgtaattatagtaatcagaacttttcagtttagtcaagaatctggacaaaggaatcagtcatatctgtaccttctgcagttccaacagcttatgtaatgtacatggattaggctttgcccacttaggtgttcagttgcatccttgtgagactcgtggaaaattcagatccttcggtgggatgtgatgaactgtgtaagggcaaatgttaa

SEQ ID NO: 805689 - DNA, 591 bp, Homo sapiens
gggcagaatgtagcatattttatatgcagtaatggggaggggctggagaaataaaaacacttccctatgtaagagcaataagttggagcacctggactagaactctctttcttactctgtttaatactcaccatgtcacacagtcttcaagagtaaataaccgtttgcatctggagtcttgtcccattttcatacatctcttgcacaggggattgctgctaccaaaagtcaaacctgattatttagaccctgggctgcagtgrtctggatgagcaatagcatcatgtaattgactatgcccacttgcctagttgtagatgtggtcatatgccagtaaatgtgaaattttaattagtattaatattaattgcattcatatactaattgtgatatttataatatatgctaattataacgctgtttgtagtgctatatattataagtaagttcagcattgattcaacaaatattggggttctgttgatggataatgtcagaaatgagcaaaaacagcctctgtgtttcagacagtgggctggcattgtgagggccttgtagtgggaaggaatttgttgcatttgtggaactgat

SEQ ID NO: 805690 - DNA, 652 bp, Homo sapiens
gattttaaaaagttaaatgaaaaagtcaataaaacataggctggaaaaatatctatcgagttcatgatagtgtttgcttctgggcagtaagagagggaaaggagattggagagggtacaaaggagatttcagccatatctgtatcatcagaaatagttttatttatttcatttaaaaatcagaagcaaatataacaaaatgttaacagttaattctgggtatctgtgtattagtctctgtattttcctaaattataaaaatattttttttttaagtgaagctttagatgccaggcatgatggctcacacctgtaatcctagcacttcaggaggctgaggcgggcagatcacttgaagtcaggagttccragaccagcctggccaacatgtgaaaccccgtctctacaaaaaaattttaaaaaattactggatgttgtggtgcattcctgtctagctactcaggagtctgaggcaggagaatcacttgaacccaggagatggaggttacagtgagctgagatcacaccactgcattccagcctggtcacaggtgaaactccatctcaactaaaaaaataaaaataaataaattttttttaagtggagctttaaataagacatagaaaggcacatgtatttcatacttcattcc

SEQ ID NO: 805691 - DNA, 621 bp, Homo sapiens
tcctgcagtcccttctctaaggcctcctccaggaatacactgttaacagtttcatgactattgggaaacttactctgcatacgcagacatgggtatgcatatttcagatgcccttttgagtaattattgttagaggaaaatctttcctaatgaattctgactacttctaaaatgaattctatcaaacatccccatgaaaattaacagtaattaattgcctcctatctttttttttgtttttttgagatagggtcttgctctatcacttaggctgcggtgcagtggtgtaaccctagctcactgcagscttgaactcctagactctagtgattctttttgcctcagctcccaagtagccaggactactactgctactatggtgcacgtcaccatgactggataactaaaactaaatgttttttagagacagggtcttgctctgttgcccaggctggtcttgaactcctggcctcaagtgatccttctgccttggcctcccagagtgctgggattgcaggcgtgtgcctggccttgcctcctgtctttattgttaacaccccattgacaacaagatataaattgattacaatgtgaaattgtaaatcttttaatacagaagtt

SEQ ID NO: 805692 - DNA, 618 bp, Homo sapiens
ttttagtattagccagcacacgccaggcccttagtgcgtactagtaaatgcttataggttgattgtctgatgtgttcagcaggattggtttggttgtgtctctgactatccatatgatcagaaatttatataattcctaagaaagtgaaacacagaggtataattttgccacaggaatttggggatatgcagttgttattttaatattataaaaaaaatcaacctttagataaaatttatttcagtatttctctttgtatgtaagtgatcattgttttcactgctattcaaggaattatctgaagccgaaaaccagtttaagaggattattgaacactaccccagtgagggccttgattgcttggcctactgtggaattggaaaagtrtatttgaaaaaaaacaggttagtagaaatgacactactttaagctctaggctggtaactcatttaaaatccaatgtgataatgatccattttctagaattattttgatatctcctctgtagcacactatcataattgtgatttactttgaggacctgaaatttcactatcagtattaattgttaaagcaaggccagtcattgcagttcttggtacttcctgattttaaat

SEQ ID NO: 805693 - DNA, 628 bp, Homo sapiens
tctattatttgttttttatttcattgatcttttttctcttttattatttcattttactttcagtttattattttactatttttttcacttaaattacacacttaatattaattttcaaccattccgatttcctagtataagcatgcaagactgtaaactcctcaaagttcatttttgcttatctaacatagtttaatttatagtgttttcattaactttcaaatctaagtatttttacaatttctattttgattttttctttgacttatgagttacttagacatttttaaattttcaaatgtgtctatattgttttcctttaattatcgatttcttamttgtgttgccagagaatattttatctttttagcatttttttttttttgcccttgctttatggccttgttacatagtgaatttatttagtaactgttctgtgtacacttgtgaagagtatatattctgtaattgttaagtgtctattaggtaaagcttgttatttgtgttgttctgatagtctttatatccttattaattttggtttatcctatcattaactgagagaagtgtgttgcaatattccaccattactagtttctaacagatttcctgtagttctaacaatttt

SEQ ID NO: 805694 - DNA, 457 bp, Homo sapiens
aaggtgctggaggagaaggtggctgtttgtaggaaagttcaagtgctagctggaagtgtagcctgcatcacagtgccttacctgccagttacaggagggcccacctggaggccttccagcgtggggtgcctgccccataggacttagygcatgaaggaggaagggaaaatgtgctggcagctcctcagaaagagaaggaaaaaggaagactctgacctacacaggcccagcttctcctgtcaaaccaggggaggaatgagaatgttaaaaagagacagccaggtagaaacaagagggatgtgtatgagttctttcctaacaaggaagagatgaaatcaagattctcctatggttgcctttatagggtatgaattcattaaatccttattgaattgccccactcattatgttttctaggaagctttgaaaaaaataggttaagagcaatggatcataa

SEQ ID NO: 805695 - DNA, 597 bp, Homo sapiens
ttgaaatgaattaggcccagaggagatcagaccataggaatttaaagttagatcttgagagaaaacttaggtaaaaaagaaaaacaaaattaaaggaggactgtgtgtgagagttgaaagatataagttccagaatgttgtggcaggacagtgaaatcttctggttcctaaagacggaggagactctctcccagcacctgacttccaccctcccactactgccagacctttgcctgggctgttcctagcctggagcactgtccccgctctgcatcctgcyttcccctgaaaccccgtcaggcgtgccctcttttggcctcccactgtgtcccttctctcatgtgcattagatctcagcctggccttgaatgtctctttctcaccagtaccttgcacagtaaacattcaaacttactgtgaattcatctgaaaaaaaaaaaattaagtgtggaaaaagtgtgaccaccctgaactgagtaaaatattctgttgagatccagttttttctctccattgaatgtgcagttttagttagaattacactaaagggcacttatcatttatcgtttttccaagttcttgtaacagatatgtata

SEQ ID NO: 805696 - DNA, 528 bp, Homo sapiens
aagatgaggctggggagagtctaaggacaagaagaattagatagatcctgagactttactcagtttcctggctgggagaagtaaagaagaacaaaatcctacacagcatagtgacacatggaacacaagtttctataagctacttgtgggtttaacaaaacaaaatagttttataaactttatattgcctcaggaaacttcagttttaattcccatgtgggaattcctgtagctgcctgtttgagtgatgaggcagattggagacatagtcttaaaggtagcattcagccggtgagatatctttctttctggccgaggctttcctggctttataaattgctggtctgactgtgtgttctgtgtgcacagttcatcaaggctctttctttgyacagtcagtccagaagagtctcggaaataaagcacccagtgggagggccccagctctcaggcttttttttaacttgttaaggctttgagtctgctgttgcgtggccctactcaagagtgccttaaaagggcaattac

SEQ ID NO: 805697 - DNA, 612 bp, Homo sapiens; identical to SEQ ID NO: 802485

SEQ ID NO: 805698 - DNA, 630 bp, Homo sapiens
gccatgttgctcaggctggtctcaaactcctgggctcaagtgatcctcttgctttggcttcccaaagtgctgagattacagacatgagccactgtgtcccaccccagcatattctaaagccaatctcagacatgctaggaattcacctgtgaatacttcagcataaatacctaattgtaaacatggctaaaaatggaactatgctcatatttctgtcttagatgaacatacacattctgtctgctgcagaattcctcaacctcagcactattggcactttgggctggataattcttcacggtgggarctatcctgggcctcgtagggtgtttaccagtattcctggcctctactcactaaatgtcagtagcttaccctccattgtgacaaccaaaaatgtctccagacattgccaaatgtcccctcgaggtcgagaaccattggtctattggatatcttatgaagtaaaaaactatcatccattatttatagaagggtgttttctctctcccttttctcttctatctgaaaaaaaaggatattgaaatcagctttgcaaataagcagtgatcaattgacaaactcacttcttcagaagaccacagagaaaaatgcaaataagttaatgaa

SEQ ID NO: 805699 - DNA, 510 bp, Homo sapiens
gaagggaggaacaagactaaaatacagttttaggtcgaccaagtgtctgctcgctgacatcattcatccctccctcaagtatcacagacaatttttgtagccgagcgttgctgctgtttagtaattcaaagtgtatctgagaaacacaattatctcgacagagagttggacagcagctgagggtgatgtgtgagctggtgccagaggtttgctkgtttagttactccaagcagggagttgtcataaggcttcctggaggagtggagctgggggcagagagtggcctctcactggatgcaggtagaaaaaggagccagaaatgagcaggcccagctagttgctggattggctagttgctaccatgatgtcatttcatacccacagccaccctgaaacctgaaagcaaggttttatcacttcccatgttgcaggttagaagacatggcttgcacaggtggagtgatccttcccaaaccacagaagcgggagtgaagggatcctatccttggg

SEQ ID NO: 805700 - DNA, 510 bp, Homo sapiens
gaagggaggaacaagactaaaatacagttttaggtcgaccaagtgtctgctcgctgacatcattcatccctccctcaagtatcacagacaatttttgtagccgagcgttgctgctgtttagtaattcaaagtgtatctgagaaacacaattatctcgacagagagttggacagcagctgagggtgatgtgtgagctggtgccagaggtttgcttgtttagttactccaagcagggagttgtcataaggcttcctggaggagtgsagctgggggcagagagtggcctctcactggatgcaggtagaaaaaggagccagaaatgagcaggcccagctagttgctggattggctagttgctaccatgatgtcatttcatacccacagccaccctgaaacctgaaagcaaggttttatcacttcccatgttgcaggttagaagacatggcttgcacaggtggagtgatccttcccaaaccacagaagcgggagtgaagggatcctatccttggg

SEQ ID NO: 805701 - DNA, 660 bp, Homo sapiens
atcactccagtctctgcctccatcttcacgtgaccttcttctgtgtgtctcttataagggcaattgtcattggatttaggggccaccaggataatccaggatgatctcatcttgagacccctaacctaattacatccttataggaaaaagaccgtttttcctataaggccccattcatcggtactggggcctaggatgtggacatatctttttagtggtcaccagtcaactcactacagatgggttggtgcttaagcagtgagcagagtggtcctctgtccgcccaggggtgttccttggggtggggccaattctgggtcctgctgctcatccctgggccatctgtccctgcagcctattgggaagttctgcaaatccagtggcctccactagatcaggagtgatggggaaggaacacagggctgcttcagggagcagcgggctcagccctgccagttagtggggaaccgcgctycggccaaatcagagctggaacattcaagccagcctttgttttcccaagtaaatccagcttgcttccatactgtttctcagtctctggcgtcaagcgagggaagcattcctggaaaaatatgtcctctgaatcatattaccatcctgatttacattataatttcttcagctatgtattcccagagg

SEQ ID NO: 805702 - DNA, 570 bp, Homo sapiens
tgccacagctaccaaccatgacacctggctcagtgaatatctatggccacagccagggcacaaatgtgaattttaaaaattccacaaagcccctccttttccaaacagaaattggacataaatattcgtacatcaaagtaacatattaatgggtgatacttcaggttacttcttttttcttttcttttttttttttttttgagatagagtcttgctctgttgcccaggctggagtgcagtggcgtgatcttggctcactgcaacctctgcttcctaccgggatcaagcaattctcttcctcagtctcctgagtagctgggattgcaggcatctgccaccatacccggctaagtttkgtatttttagaagagaccaaggtttcaccatcttggccaggctggtcttgaactcccaacctcgtgatccacctgcctcagcctcctaaagtgctgggattacaggcatgagccaccgtacctggcccaggttactttttcaattccaagctaagcaagcttaggtcacacctttgaggaataaggacagagacagataattgaattgtgtggg

SEQ ID NO: 805703 - DNA, 570 bp, Homo sapiens
tgccacagctaccaaccatgacacctggctcagtgaatatctatggccacagccagggcacaaatgtgaattttaaaaattccacaaagcccctccttttccaaacagaaattggacataaatattcgtacatcaaagtaacatattaatgggtgatacttcaggttacttcttttttcttttcttttttttttttttttgagatagagtcttgctctgttgcccaggctggagtgcagtggcgtgatcttggctcactgcaacctctgcttcctaccgggatcaagcaattctcttcctcagtctcctgagtagctgggattgcaggcatctgccaccatacccggctaagtttggtatttttagwagagaccaaggtttcaccatcttggccaggctggtcttgaactcccaacctcgtgatccacctgcctcagcctcctaaagtgctgggattacaggcatgagccaccgtacctggcccaggttactttttcaattccaagctaagcaagcttaggtcacacctttgaggaataaggacagagacagataattgaattgtgtggg

SEQ ID NO: 805704 - DNA, 597 bp, Homo sapiens
aagggcaaagagccactagaaagggatcccactggccagatctgggataatgtgagcatcacaaataatatcagtagcagattataactcattgaatacaagaggaatccatgaatccatactgatatagatagatcaatagataactaagggaggggaaaagctcttccttatagctgaaagagaacacatcaatgtagaaagaaccatgcattcagaggtaaccatcgtagaaataaccgattcaggttagaattatcgatgaatgctaaaagcaaagtttgaggaggaataagatatttacatggcctcaaagtaactgctctgagatacttcttacaaggtgaaaactagtaattttaaagtkaagaaacctggcagacaccacctgagccagagatagaagttaacatcattcaaattaggaaaagctgaccttatgtgcctcctgatataatgcactgggagggacacagcaccactttgtattcttgccccacagacataacctaaatctaatcatgaaaagaacattaaaaaccttaagttgaggcacatgctacaaaataactgctctatagtcttcaaaaaattaat

SEQ ID NO: 805705 - DNA, 561 bp, Homo sapiens
taaacaagttgttcgaatcaggatccaaaaaagttcccattcattgtgattgattgaggtgtctctttagattttttaagcctggaggtactggcacaacctccttctctctctctccctcctcctcccactctttctctcccaccccctccaccctcaaacccagcaggtctgaccaggcagcagtggtcatctgattgacgcgcattgaactctctgcctgaaaagatgctgtacttcgttgagttccttccttttctgttctgcccaagctgtaatggctctgaggatttggaaaaggttttagaatctaggaatgaatgasaaaactgttttaaagggcccctccacactactgaggtcatttactttttcttactctttaccaaaacctgtatagatcactgatataatagatgcgaaagatactctagtggaaaatgtcatgtaaatgtaaaggactgctgatggttatgttatcattcaagaatgttttacagggggagatcttagcaagcggaagtacaagtaaaactgaatcatgagcaatttatgttatta

SEQ ID NO: 805706 - DNA, 633 bp, Homo sapiens
gggagggtaagtgacaaaaacttcaggccgttgatctgggattcccccagatggggttcaggggcctcttccttcttactccagaatttatcacgttatagtttctttgacccatttggtcttccctactggtcttggacgttttcaggactggggtccaatctcaaccatctttgcatccccagcaccgatcagagtaactgacacagtgcagacactcaacgagtgcatgtggtataaatgaatagctatgcacttcactgcaggtaacctgtgactcaactgtagaaagattttacaggttatggggtttgagagaatggtgactgcatccacgaaggcaccgtctaagacagccggttttgggaaaaggtgatctctrgtgtgacaagttgagacctctgggctttttgttccatttgttttggttctcactgtcttgacctccttcttggaaaaccctttaacatgcaaaattgcgagtggcacatgatacttgcttttctctctccaaggcaaataatgtcagtccctttggtgatccagggatcagaaactagactacgctctgataaggacatcacccgtatgatggaaggattaactcctggccattctattttaattttactg

SEQ ID NO: 805707 - DNA, 643 bp, Homo sapiens
gggagtgaaggggacacttgtggacatgagagtggggttgagtcttaatattataaagatatgaatttggggcgattgagggtttttcagcagggattaggacagatctgtgggttggagggaggtgacactgtaagaaggagggtttggaaggcaggaccattctagatgtaatgtataggcatgagggaatacgaagaggtgaaaagtggaagacagatgggaaaaccttaaaaatattcttaattatactttaatttccaacagaccaaagtgagtatttctggattcaaacagcaacatggccaagtttttggagataggaaaaagagtattaagctttgttggcagtatactaaaaggttctaggaatgcagtgattaggttttagtgggacatggagaatatgtcctactgaggacctgaaggaactgttgaggaactgaagataraattattattgtagttcagaccttacattagggacaggtggaaataatttgcagcaccattaaatatgagctaaaaaatagggcagtgggagagggcaatgtttgaagctgtgaatctgtaaaggaaaaggttgtatcataattcatggtttggaaaatggagagtagctgagcatgtgagcagtttcatt

SEQ ID NO: 805708 - DNA, 578 bp, Homo sapiens
aggactagggcaggagagtagatggagagagctgtgtcccgaaccaacattcttgagattcctttgctagtgttttttcttcagggttcactgagaagaggaaggtcagatggggagggacaaaacccaaggaaatgaggctcatttcaaactctaacaacttgatcacaaacaaaatgtatgtagaattacaaataagttattctgttttcaggcatcaaaaatgttatcaatgaaatgttgagatgctaaagcagtgaaatgtgaaackaagcagtgtcacaggcaactgggcctctcccctggcccatcccaggagggatgaagggtggctgatatgaactctaaggattattctgaaggggccaacaaatgttacaaagaggctcaaaaataaaaatcagaaccatttttccctcattcatccagggcctactcctggccatgttctgtgctttgcactttattcaatttaattcaatttttctcctaagcaatctatttagatactttgtagatgtggaaattggtttagggaagcttacatcattttcttgcagtcatatttctagtaaatt

SEQ ID NO: 805709 - DNA, 646 bp, Homo sapiens
cttgatctcttgatctcgtcaccagcccgactcggcctcccaatgtgctgggattacaggtgtgagccatggcacccggcccaagttctctctttaaaagaggaagaatagtatggggactcatccaatttcttgtttaactgacaatatgtaactcttacaacacttgcctgtgtgtttctatcataaagtgaggatatggtttaagactgtgaggatacagtctaagactgaacaggcagycttcctggactgctcgggtgacaaagagcaatgatgcccttaatacagcacctcaggatatcatgaatgaggggatggacaggatgatctcccacaatgcttttcacactattattttgtaatttgaattccttctctccccaatctaatctactcttggaaacaagctaatttttctaaaagtgtcttgaccagaaagcattcatgctaaaaatctgccatagcttccacctatctccagaataagaccctccaatttgcaacctcattctacctttgcaattttctaaattttcttcacaatttaattgtattaatagatttataaggtccttatgggccaagaatggtatcccgccactcagcaacacctgacacaaaaacctaacagtgcccaataaat

SEQ ID NO: 805710 - DNA, 591 bp, Homo sapiens
ctacacgagcaatcacagaaccattaaataagaggattgcttgtttgaactactagatcagcctttccttatttttgctaatctgtgtggtgtacgttcattaccttttttttttatgttaaagaccaccatgcgtaacactacttgacagcagcaatttatagcagtggtccccagcctttctggcaccagggaatggtttgatgaaagacaattttgtggtttggtttcgggatgaaactgctccacctcagatcatcaggcattagattctaataaggagtgtgcaacscagctctcactttcttacatgcggttcacaatagggtttgcgctcctatgagcatctaatgccctgctgatgtgacaagaggcagggctcaggcagcaacactcactcacccattgctcacctactgctgtgcagcaaagctcctaacacgccacagaccggtaccagtccatggcccaggggttagggactcctgattcacagcattacaataaataataaataattaaaatattacctgatatttggcaaacaatccctctctaagtcactacttccagcctatgttcaggctagaa

SEQ ID NO: 805711 - DNA, 608 bp, Homo sapiens
tatacaaagtaataatttatcttacttcataaaaagattataatctcccattttttaaaacacatttgatattagtaggaataactaaaatgaactcgtatgaatagaccatttttatttcattgatatctaactaggaacgttgcaactaatttttgcaatctgtatcaatttgtttaatatatkttaaatgaacaaagaagcagagatagtttctagagagcttatttacttaaaaatacaacagatattaatcaataaaatattaataagattcaggtgagtcgagagtgagtactcaagttctcttttctcacaacgtattcttggagtgccaaccttttcagttcaatgattttatgcaaaggtatacatctaactgcctgcaaaataaactactgactattttaaatcagataaagcaaacaacagcccccagctctgcaatccaaagccagcaaaggtcacccatttcagactgggtttgaagcatagccagttatgatagctcaaatattttcagatgtatgaaagcagaacagaattcagaaatatacattctttggcagacaatttttttagaaccaagtttctcaaattatataata

SEQ ID NO: 805712 - DNA, 623 bp, Homo sapiens
gacataaagaaatgcttaaataaataattatcaactaacttacctacatttaactacacatacctaacagacctgaatataggcagaggatgtgacattttacttacccttttattaaagttactgcttcatttattggtctttacttcactartgcatccataaaatgtttacatttttttaaacaataaaatactcttgaaattagtccttctctgtaatcactacataaaactgctttagagacagccttcagatcaactaaattatattttacaaaatggcttaggtatttcagtagtaactctatggaacaacagaattcactgtttaaccagggaccaatattggcagctggcttccataacttgtttgaggaatgtagtaattccaaggttgctgcaaggactaatgtacaggaatattcctgtattttatggaataaaaaggaagaacgagaggagaaagaaatagatagtacataccaaccccagaggtagggagtatgaaaatcaatcaagtagccagaagatgtaatggagccatgtgggtcttacgtcagttctcttccttagagaactttggataatagggcaacaatatgctctggtggaaaagaactc

SEQ ID NO: 805713 - DNA, 491 bp, Homo sapiens
acctctcccaccggctaaaccagtgagaatcactgtaacaaaaggcctttgttccaaaggctgcaggcaacagaattctccattgtgttcgcaatacctgacctaattgactgctttgtttgaaactgaagaagggagtcctttgakccagaagctgcaatcatccaatcagagccagaaaaaaaaaaaaaaaaagcccttgaggttatcagttcctacacctgttcacacatgggactgaagcagtcatctcattcactggcgatggcaggagaccaacaggagcttttccattacattcctcttagatcctgggctcctttacagtgggggtattaatggtgcaggcccttctgttgttttgcttaatcctaagatcttgctgcaaaacaatttatataatccctaggaatctcaggcaggaaatgtggctgccacccttgcaacacagcggagaattaggcaggagtctctcaaaaaagtaatacaca

SEQ ID NO: 805714 - DNA, 599 bp, Homo sapiens
attttgtttcaaattacagggccatacaaacgagctggtgagttgagaaaatagctttggaactgcattggatcatcaaaagaaacggcagactttggcgtgggagaccatgcctcaggctccatccatttggttgaggtgcccacacatgcacaaaaataaaagaatggcataaaaacagacaaaaactactgacatgtcagtcatcatggcttaaggaaaagctcacaaataatttctctggaatctcaccaaaatttggagtaaaagatgatagcatgctaaatcagttctcttgctacttctaaaatactaacgttcctgaatggggctcaaggtggaatcatttcgaggcaaatatcagttytagtagataaaagtgttgtttaaaacctcattaacattatatataaatattccccaaaatgatctacagatccaatgcaatccgcacttttttttttttttttttttttgcagaaatggtagtgggggcagggggtgaggaagatcttaaaattcatgttgtaatgcaagagactccggatactcaaagtaatattgaaaaagaagaacaaagataacggactcacacttgc

SEQ ID NO: 805715 - DNA, 576 bp, Homo sapiens; identical to SEQ ID NO: 802447

SEQ ID NO: 805716 - DNA, 613 bp, Homo sapiens; identical to SEQ ID NO: 802448

SEQ ID NO: 805717 - DNA, 557 bp, Homo sapiens
atactgtgcaaatccccattaatgtacctaactcattaaattatctatgattcttactcccctctttaatgtgagatccayagggctggatttggtcttttttctttatttggaaccccaataacacagtgcttgacccagagggtgctctgtatttgcttggtgaatgcctgccacagaggccatgctactgtacttgagaaaacaaatacatatacacaataaaaataaaacaacttgggctcatctgccttcttttttcctaaaagaaatgtgcttctctataatccccagaaagacagccatcacagcttgcaacagttcttggcaacttattacaactctcatctgaactgtgaaatctggttgaatttacaaatcagaggatgaccttttaaatctcagaagaaaagtagtaaaagaggtaatgactgataagctatatctctatatattgaaaagaggataggttatacatgtgaattaaaaaaaaagaacatttgaaaacatcagagattaaaggctgactcttgttgattgtgaaggatatttgatat

SEQ ID NO: 805718 - DNA, 659 bp, Homo sapiens
ccaaagtcagaagttgcaaatcaaagtttttctgctggtgatgtctcctcgatataaccatgaacttgatgaaaattctaagacaacactcaatatttatgaaatattctccaacctgcatctgggaacatggaaaatatcaatatgttgaatcggaaatataaaaactaggtagagaaatcaacaaaaaataggagaaaatgaagccagagctgattaaattcaggaaaaaaaatagaagaaaatcacaaaactttatcagtaataaagaacagattacaaggtgccccgaagagaatgggttcaaataaaaacttaataaagggtattgaataaaagaaggatagccaagagaatgaaaaggagataaaataaaaaggaycagagaagatagttgaaatggaagccagacaaaggaggttgcatatttgtattattggtgttcctgaagaaaagaaaaacaatataacagaatatttaaaactctaatccaagaaaaagttccagaaataaaagaactgagtcaactctacactgaaagggcccagtgtggtatataggaaaactgaccacaaataattctgagatagctcggaaaattattagacttataaaaaaaaaatcctcaaggcttccaggcccaaaaaatatttacaaag

SEQ ID NO: 805719 - DNA, 602 bp, Homo sapiens
aagaactacatttgccaaagagcctagggactcttgatttccctttaatgcctcacctgtgttggtaactggggattctagagtttgagtcaagttctttttttttttttttttgagacagggtctcgctctgtcgcccaggctggagtgcggtggcgcaatcttggctcactgcaagctcctcctcccaggttcacgccattctcctgcctcagcctcccgtgtagctgggactacaggcgcccaccaccacgcccggctaatttttttgtatttttaacagagacagggtttcaccatgttagccaggatggtctcgatctcctgaccttgtgatccgcccgcctcagcctcccaaagtgctgagattacaggcgtgagccaccgcgcccggcctgagtyaagttctttagggttgactcgtggtaagcaaagctgccagggtgccactagtcttattgccacccaattcctaccagaattaatcctattgctcatttatttctggtattcctaggtctcatggggctatagactgtgacccctggaggggcaggggtagccaatgtacattcctctctcttccaagtttttgatataca

SEQ ID NO: 805720 - DNA, 615 bp, Homo sapiens
atatgtatgatatatatatatactatatctatctatatatcctatatataatatatggttaggctttgtattcccacccaaatctcatcttgaattgtaatcaccaggtggaggtaattgaatcattggggcagcttcccccatgctgtcctcatgatagtgagtgatttctcatgagagctgatggttttataagaggctctttccccttcgctcsgcgcttctccttcctgctacctcttgaagaaggtgccttgcttccccttcaccctctgccttgattgtaagtttcctgaggcctccccagccatcctgaactgtgagtcaattaaacctctttcctttataaattacccagtctcaggctgttctttatagcagcatggaaatcgactaatactatatatatacttatatatataagttgtatgtataatatacatatatatatgagctttaacatctattaatgatggggatatggggagatggaaattttcatacttttttgtggataagagatgttaattttttaaaacttagctgatatctagtaaaatagaacgttcttacattttcagcccagcaatctcattcatgcgactccatccctta

SEQ ID NO: 805721 - DNA, 617 bp, Homo sapiens
tgtggtgaaatcaccagtccaaaattacaccccaaacatatgattattaaggatttgcagtcctattttttatattactaaaaaagccacactcattatatctttatatttagagggctttttaaaaataagttttaataaatatctctgaatgtatacattccacaaaatggacagttaaaagaaggcactcatgattttaggttacatattttcctttctacattgaaataaccaaagacctaataatagtttccactactgcattcaagataaaagagctttctttcagtgtaagaagaaattaaaaattaccgggttgggataagggaggagactcactttttagattaaagaaagtatggtaactttagtcttctgaccaaaaagtttaatatttttaaaaatataatttaatgttgggattaaatcaaaacttcrttttctatttttatcttcttccgttagaaagtcctggaatctgaaaggttaaaccactgtactcagaaaagcagacagagctgcctcatgtgtctttcaactaatattcattaattataaaaaaccaatacaggcactgaactgtacacttaaaaaatagctaaaatggtaaactt

SEQ ID NO: 805722 - DNA, 576 bp, Homo sapiens
gcgattttcccacctcagtctcctgagtagctgggattacaggcgcgtgccaccacgcccagctaatttttgtatttttagtagagacgaggtttcaccatgttggccaggctggtctcgaactcttgacctcaagtgatccacctgccttcgcctcccaaagtgttgggattacaggtgtgagccaccacgcccggcccctctttactgtaaaaggaaaagggacatgacccagattgagtagaaatggctgtggagggacctgagcaagggctgctagcaagggctgctagagagaacaagctggtacctgtgcccagctccagattgtggctgcaataagggacaggtgatgaccacacgcrtcaatcactagctcctccctcgcgcacctcgcaccttccaaagagcccacctgggctcttacaaacatcctccacttttctctgcccctctgcaccctccccactcatgtagactttaatgaccacagtagacataaaattattctgtagaagtgatgactttatgaccacagaagtaaaattattctatagaagtggtaacaaatgttta

SEQ ID NO: 805723 - DNA, 499 bp, Homo sapiens
ctggaaatgctctctggataccaagcacttcctggggtcaggtcattcctttggaataatgcaccctgaagatctatgccagtatgccaagagcctgggccacgtgtgtgtgtacagtgtatcagtggggtggtgtgtatgtcaggtgatatgtgtgagccaggaacatatctttcccaaggggtaaaatattgggctcayggcggtgtcttggaaggaactgaaactcacagccaactcaatattggtttgaagagatcagatcaagagagggcatgtggctttgcaatgtagaggggtcgagtcttatgtggagcaaggaatgacattctggaagatgatttttccagctgtgagggagtggacacacttgagtggagcatccagggctcctggcgtgcacaggaagaagccacatgccacctggactggacattctgaggatcacttgctgcccaagtctccatcactgtgggatccatacctactgggacaccat

SEQ ID NO: 805724 - DNA, 655 bp, Homo sapiens
agctgtagtcatttgctacagcagcaacaggaagctaatacaccattcctccataaaagcaagaaaaattctagcaacattataaaaatctactttttcagaactctggaaattaaccacaggcttgcaacaatctaagaagcatttcttaaagaaaagcagctgcttctcagttaaaatagcaaagtttgtggtgtttcaatacggcctgctcccgtaagtctctcaagttctgtagtgtttttgaaaccacagttgctgtcgaaactagcagcctcgaagctcccaaaggaagcatgacaggagttgcaatgcctcaaaaagccccaactccactatttgacctgccttaccgctctctgaaaactcccttaacaggtggtagttgttatttgacctgactcacagctcactctgcagaaatagctctgtttccagggcatttgttgaaaacaatcagctgtaattgtttaacatcatagttgctggataccatttggcacaaaaakaacttggccaaaaatctgaagggaagatctggggaacgagctgtccatagggggcgctgaaaagctctgatacattcttggtaatctacaccgccataagcatgtccagggccatgtgcatgcctagcaaaggtcggaaagggccc

SEQ ID NO: 805725 - DNA, 470 bp, Homo sapiens
ttacagggtcagtagggatgctttctggatcaaagaaagtgggtgcagtgcttagtctgttgtgtggaagagggcacctcctgggctttcgtggctggagactgtctaccaacattccttccttcaaactagacaaaccctcctctgccacccccagcaaattytcagaggtttccaagctgtagaaaaaggaaggaaggaaggacggcattcacatagctttactttccgcttcaaaatgtcttaagtagcatatgttgttttactgcttttaactttggtgagttctaatttcagaacgttttgttcactgagcaaaaaaacagatgaaacaaccacaggccaggacttcaagtgaggaggacgcctttgtttgccgtggttggtgggagcacacgccggagcccggtaacgtgcctgtgggagtgaccaagggccacccgcccaagggaaaatgttcattcttcatc

SEQ ID NO: 805726 - DNA, 610 bp, Homo sapiens
aaagggatgcaacatgcagttgattcgattttaaataatttttctttacattaagaatgtaacctacatgcatatcctgcagactgtaaccaagtggatcagtctaaaaagtcactttgtgtaaattaaaacaaaaatgtgatactttttttcctcttattggcaaaaaagtatgaagtttggtaataccaagyaggaacattcttttagtgaaaagtgaaggcaattttgcattgtctactaaaatttaaaatgtacatatgctttgatgcagctttggtgactatcctacaaaaatacctaggtatacaaggatctgtgtacagtataacctaagttcccatcagaaaaagaatggttaaataatataatgcacatacgcagaactacaatgcagatgtgagcaagaatgacatgagatccatgtgtgctgacatgagaggaccatcccatgaagaaagcgaagttgcagaaaagtatgtgtagtatgtacatcacttttgtattaaaggttagaaaatagacgatactttcaaggatcatttctatagtttgttactagagaaattgctctgaatgtgtagagcagcagaaatcacaaagaggaggc

SEQ ID NO: 805727 - DNA, 639 bp, Homo sapiens
gtaaataattgtcagtgaaaaagggaaacaagatagtctcttatcactagaataaacagataatattcctttaaaatacaattaaaatgctataagggatcagtgatttgtttcctaaattcacttacatgccattttacacaattgcagttttttcttttttcatttcttttaaatattgtaacaatagaaacatattacacttcttcctatgacatatttgaggaatgtttacagttatcayagtcttgagctaggacacgtcctaatgcttaaagatactattttatccgtttgaaaaaaagaagaaattttaattgtgaaaaataagaaataaaccttaaaaattttcactgtcctattttcttccagcaccttttcttcatgtttcatgaaagatggctttacatagtaacttagaaataacacccaatgattaacagaatgatggatgtgatgaatcacctttttcttgagaaataataaatcaacatattcctacccataaatttttactgaaatgtatgaaatattagcatcatatatttagcaaagtgtcagttacaaaaactgttggcaaaatgtcctcagaaccaatagaatacatttaaatgttatgttccttttttggaaacaaag

SEQ ID NO: 805728 - DNA, 639 bp, Homo sapiens
gtaaataattgtcagtgaaaaagggaaacaagatagtctcttatcactagaataaacagataatattcctttaaaatacaattaaaatgctataagggatcagtgatttgtttcctaaattcacttacatgccattttacacaattgcagttttttcttttttcatttcttttaaatattgtaacaatagaaacatattacacttcttcctatgacatatttgaggaatgtttacagttatcatagtcttgagctaggacacgtcctaatgcttaaagatactattttatccgtttgaaaaaaagaagaaattttaattgtgaaaaataagaaataaaccttaaaaattttcactgtcctattttcttccagcaccttttcttcatgtttcatgaaagatggctttacatagtaacttagaaataacacccaatgattaacagaatgatggatgtgatgaatcacctttytcttgagaaataataaatcaacatattcctacccataaatttttactgaaatgtatgaaatattagcatcatatatttagcaaagtgtcagttacaaaaactgttggcaaaatgtcctcagaaccaatagaatacatttaaatgttatgttccttttttggaaacaaag

SEQ ID NO: 805729 - DNA, 556 bp, Homo sapiens
ctcgagctctgctaagggacagactgcctcctcaagtgggtccctgacccctgtgcctcctgacagggagacatctcccagcaggggtcaacagacacctcatataggagagctctggctggcatctggtagatgcccctctggaacgaagcttccagaagaaggagcaggcagcaatctttgctgttctgcagcctctgctggagataactgggaaaacagggtctggagtggatccccagcaaactccagcagacctgcagtagaggggcctgactgttagaaggaaaactaacaaacagaaagcaatagcatcaatatcaataaaaaggaygaccacgcaaaactccacccaaaggtcaccaacagaaaagaccaaaggtagataaatccatgaagatgaggaaaaaccagcgcaaaaaggctgaaaattccaaaaatcagagcgcctcttctctttcaaaggatcacacctccttgccagcaagggaacaaaacaggatggagaatgaatttgacaaattgacagaagtagacttcagaagatgggtaataa

SEQ ID NO: 805730 - DNA, 555 bp, Homo sapiens
gccctttggtttcctggatttaattccaaattctatgcttttatataccagcaattttgtttatagttttctgcttaggatggcctaatctttttaaaaaccaaaattaattaaaaaataggaatagtaaggagtcagcttatgctttaagaagtgttaactttccacttaaagaaagacattagttttacatggtcctgtttgctcatttagtggacacttactatagacttgggtttgataaatattttagtttaaaatccaaagactgttttaagaatgaacaaactcagccatgtaagtgatgaaggctgggtgccatcgagagagcagtcaaggtttamataatattctggacattttcaatgtaggaactgtacctacgggaataaaggtaagcttggaaacttataattcttattaagaaaaaaatactctattgagacaaataaaattacaggtataatcaagtatcataagttatttaaaaaataagcaccaaaagtcctggcatttttggttgatagaaattcttcctaaaaaagtctttcactt

SEQ ID NO: 805731 - DNA, 544 bp, Homo sapiens
attttatatatatatatatatatatatatatacagtgtaataatagaaataatgtgcacaataaatataatgcatttgaatcatcccgaaaacatccccaaccaccagccttttttgcatgaaactggtccctcgtgcaaaaaaggttgggaaatgatgctctaaaacttgacccacccagcggcacttcaagttttagtgaaaatgtgtgaataaagatacggcaatgaaacattatttgtattcaaccagcaagcttgtattgaaccttagaatatgccaagcgtatgttctttattttattttcctcttgctgatgagctcacaatctcaccaagcaccataacactatggaataagtgctgagacccggggcaggtaaagagcaatgasaacacaggaagtgatcgattctgatgaggtggtattgttaggtttcccagagaggaaacatttgggctaggccttaaaaaataaataggaattaattaggaggatactggggatgttataatgtaggaatttatagaagtcaaagttttgt

SEQ ID NO: 805732 - DNA, 475 bp, Homo sapiens
acagtgacatggcatgaagtgattcaaactcatgagctgaagccagcatgaagatctttgtagccagtgacacggagctaggctgtttcctgagaggtctggagagttctcaatgattttcagggcaacaatgatcccatatcttggctaaacctggtggcaggatgcatcatagtttagaaaatggagatcgttgtgacagggaggccagggatggctgcacatctagagattctgagaactcaaactattgcaggtgtgatggacaccaaaaggaagggccaagggacatgtaagaggcaggagttagaggagttggtgagtgaaatgtcaggaaggaggcagaagcccagggttccccagtgcgagagatgggrgaccaatggcatttgccagtccagaatactcacattcttggaaaacatcatccatgttcacaccttgattccttcactgctactgttcccttcgcagg

SEQ ID NO: 805733 - DNA, 634 bp, Homo sapiens
tataatccttccctttatgaagtagtttaaaagagatttattagtatttgtatttaattaactaaaatcacatttatacttttaaaagcctgttataaaccagaagtaattcagtggccaagaagaagagaaggcttaatgaatcgtattcttgctgatttccactgatcctrtattatttaatttcctgtttttcttaataaaaaaggtgtcaattaagcacgatataaaaatattgatttttttctgccttcattgaatattatttttgtttcctgtgcccctttgttgggttattttagctatatgtaccatattctgtaaaaagatttattttttctaatgggccataatcattttgttttttagtggttttgtaatctatttttggaagagaatttgctcattgaacatttgtaagctcaaacagcgctatttaactgattactctctactcacaagccttcagagaagaggaaagcccttttaaaactgcagtgatgcacacaggaagtgcatgattgtattattttcttatagtttggttgttgttctagaaaatgttcaaaagctttcttcttgtaaaagctagactgtcaattctgggactgtgctgtttattaaagatagctct

SEQ ID NO: 805734 - DNA, 615 bp, Homo sapiens
atatggaattataactgattcatatattgtatgtgctatttaaagtttatatattcaggccaggcatggtggtgcatgcctatagttccagcactttgggaggccaaagtgggagaatcacctgagcccaggaggtcgaggctgcaatgagccataattgtgccactgcactacaacctggacaacagtgcgcgatcttgtctcmaaaaaaaaaacagaaaattaaaaaatttaaaaaaaattataattcaactctaagaagcttcttaagaaaacttttaaatacatgtttctcattgaggggaaaaaaattaaataaaatagtttcagaacctgtgtctgggaagtccacatcagggttatttttgttataccttgttcctttggagccatagattatgtgaagggccagagagaacgtggatgcttatcaatttgcaattttgatgatccaaaggaaggtttttggaaatatttgctctttcatttgtcactcaaagcctgctttgccttttcttcagtagaccctaacccttctgtctctgccccagaattaagaaccagaggttgttaaaaccaaaccagtggatcctaatctgaatctctgtaaatatg

SEQ ID NO: 805735 - DNA, 491 bp, Homo sapiens; identical to SEQ ID NO: 803208

SEQ ID NO: 805736 - DNA, 687 bp, Homo sapiens
aaatatatcgtctttctggatttaagaaagcttccttcctaccctcccaacttcctttggaattctgcaaacattatttgaacttattttctccaaaagtctccctgagatcctgctcattaccctctcattccctcatccacacaagtgaaaaccatgacagagaagaacatgacttggtcaaaggcctacaacaatgtgacttcctcagctgcgtaaagttctatctcttctactagcttatccctctacaacatggatttgttcaaattattatgcacctactgtgagctccatcwtcaaataatagtaatgtattaatataaaaatccattctacaaggcagaaagttccaaatgttgtgagagagagagagagaataaaaaactgctgtggcaattcagagaaaaagtgaattccaggtaggaagattaatagggatttcacagaggaggtaggggtgcagagagtgggccctaaaggctaattcaagcagagatgtttctacgtttgttctctgatgcgtcagcaggatcactggagtggtggtggcggcaattgttactactatataaagccttctacttagtgtgagctgtagacaatctgcgctggtatcatctggagtttattagaaaggaccccaggacctaggccaggcttactgagtcagagtgagcatttcag

SEQ ID NO: 805737 - DNA, 687 bp, Homo sapiens
aaatatatcgtctttctggatttaagaaagcttccttcctaccctcccaacttcctttggaattctgcaaacattatttgaacttattttctccaaaagtctccctgagatcctgctcattaccctctcattccctcatccacacaagtgaaaaccatgacagagaagaacatgacttggtcaaaggcctacaacaatgtgacttcctcagctgcgtaaagttctatctcttctactagcttatccctctacaacatggatttgttcaaattattatgcacctactgtgagctccatcttcaaataatagtaatgtattaatataaaaatccattctacaaggcagaaagttccaaatgttgtgwgagagagagagagaataaaaaactgctgtggcaattcagagaaaaagtgaattccaggtaggaagattaatagggatttcacagaggaggtaggggtgcagagagtgggccctaaaggctaattcaagcagagatgtttctacgtttgttctctgatgcgtcagcaggatcactggagtggtggtggcggcaattgttactactatataaagccttctacttagtgtgagctgtagacaatctgcgctggtatcatctggagtttattagaaaggaccccaggacctaggccaggcttactgagtcagagtgagcatttcag

SEQ ID NO: 805738 - DNA, 505 bp, Homo sapiens
ctagactgtgagagacaaattcaaaatacttggaggtttcaagatatttctgtgtacaatacatgtattcagtattcaggttacaaaaattatgtttcttatgtaagtcttacatcatcactatataatatgtaatatattcagcaaacaattcctgtatgctgaattatataattctcctatgctgagtaccaaaaacattattgagaggaattaaggaagatctagtaaacayagaaatgtgcctgtttcatgatgtgaaagatttaatataatattaattttccatttgtctgtaaatttagtgcaaccataataaatattccagcaaatatttttacagaaattgataagtgaatttaaaaattcacttatgagaatcaaaggaccaaaaaagccaaaataacttggtgagagttttacattggctgtcttaacctagctgaattcaaaattaactttaaacctgaagaaatgcagactatttgaaattggtataaggata

SEQ ID NO: 805739 - DNA, 512 bp, Homo sapiens
tgagcccggcggggccaggtacctggagacccggaagggaccactgccggcggggtggcatcaaagccctccctgagccacccttcaagccaggtttgggttaggaggaccacaccggagttctggcagtgccagtgtatcaggcggaagcttggcccgggggtggaagatggagcgagcccctcatgggtaagacgaagtggtagtgyagactgtggccgaggccgcatgctccagacatcagggagcgctcgcctcagccaactcccagtttttccagttctttggtgaccccagtgccctgttcaatgtagcatcaaagaaccccgagggtggcagacagaagccccagtcaaaggcccagcagcctcgggtgggctctgggagaggggctagaccctggctgccacccagtgcgccgccccaccgggcctcccgggctgacctccagctcaggtttcccggatgagtggtggcccaagactgcactgctccctgcctgcgccttcagg

SEQ ID NO: 805740 - DNA, 601 bp, Homo sapiens
cctcaccccacaagtaaatgataagcacagtcagggactctcggtatggagagtcaggcaaaggggttggctttctgcccaacaggaggtcaaatcagataaagctgataaaaatatacatgcatcaaactaattataccaagttattattctttggcaatttattttgccaaagaataacatttattgcctataatatttattgcctataataattaatgcaacagatgttgtatgtcttcagaggctaaaatgtgacctggtgttgagggcaaggtacagaagaagaagcaccgaccgagagtgacgaygttttatccgtagaggcacccactcaccaagcctagttctggtccctagtatgacacagggcaaggctgtcactcatccatcacacatttcctgatacacctctataccaggagccttgccagggctgggggataccaaatgagatagactgactcatggtagttgatatggtttggacgttcatttcctccaaatctcgtgttgaaatgtgattcctaatgttggaggtggggcctggtgggaggtgactgggtcatgggggtggatccctcatgaatgctgtagcaca

SEQ ID NO: 805741 - DNA, 601 bp, Homo sapiens
cctcaccccacaagtaaatgataagcacagtcagggactctcggtatggagagtcaggcaaaggggttggctttctgcccaacaggaggtcaaatcagataaagctgataaaaatatacatgcatcaaactaattataccaagttattattctttggcaatttattttgccaaagaataacatttattgcctataatatttattgcctataataattaatgcaacagatgttgtatgtcttcagaggctaaaatgtgacctggtgttgagggcaaggtacagaagaagaagcaccgaccgagagtgacgatgttttatccgtagaggcacccactcaccaagcctagttctggyccctagtatgacacagggcaaggctgtcactcatccatcacacatttcctgatacacctctataccaggagccttgccagggctgggggataccaaatgagatagactgactcatggtagttgatatggtttggacgttcatttcctccaaatctcgtgttgaaatgtgattcctaatgttggaggtggggcctggtgggaggtgactgggtcatgggggtggatccctcatgaatgctgtagcaca

SEQ ID NO: 805742 - DNA, 615 bp, Homo sapiens
atcccagcatggcccgggatgccagggcataaaagcagcaaacaggatcattcagacaggtcagacaggctttctctggccctcccactgctcagctcccaatgatgagagacaggaaaatgtcatgtgattattactccataaaaaagaagaaggcacttcctcctctatggagacagacagaagcttgagcaaagaccaattaatttcaaaggggaagagacagctgtacatatgttccctatgagtgatcttaggcagagtctcccaaatgccaagaaaaatatttytgttgggagcttctgttaagaatagcatttttcctgcagtttttaatgcccttttttatacattcatcccattgcctaacatgtattgaacacctactatatgcaggcattttcttgctcatgatgctttcacgcatcccctcatcatggattcatccattgaacaactattgaacaagctctttagtgtcaggacccttgccaggtgctgagcacgcagagagcaaagacaccatcccttgcttggagagggtcaaggagcatagcattgagtcaattcccacttagcactgggcccctgccaagagctctgtgactgttgtct

SEQ ID NO: 805743 - DNA, 615 bp, Homo sapiens
atcccagcatggcccgggatgccagggcataaaagcagcaaacaggatcattcagacaggtcagacaggctttctctggccctcccactgctcagctcccaatgatgagagacaggaaaatgtcatgtgattattactccataaaaaagaagaaggcacttcctcctctatggagacagacagaagcttgagcaaagaccaattaatttcaaaggggaagagacagctgtacatatgttccctatgagtgatcttaggcagagtctcccaaatgccaagaaaaatatttttgttgggagcttctgttaagaatagcatttttcctgcagtttttaatgccctttttwatacattcatcccattgcctaacatgtattgaacacctactatatgcaggcattttcttgctcatgatgctttcacgcatcccctcatcatggattcatccattgaacaactattgaacaagctctttagtgtcaggacccttgccaggtgctgagcacgcagagagcaaagacaccatcccttgcttggagagggtcaaggagcatagcattgagtcaattcccacttagcactgggcccctgccaagagctctgtgactgttgtct

SEQ ID NO: 805744 - DNA, 612 bp, Homo sapiens
tactttacaaaaggttctttttataagatcatccgcaatacgcttgtttttgttgacctttcccacagtataatttgcaaaattataattaaattcaatcttttccaaaaatatatgtttttctttttctttctcaagactttttgtagaaactctgcaggtcagaagatttttgtatggaatgatcttctccaatcaattatttgaatctaaggtgtgctcaagaggagaatcagtttcccattcaaccacttaggattctttctctctgcgtcctaaatttggctttgagaccttggatgatgattctcctaatctggtcaatggaccacctgcaagaatcacccaggactggagcccaggaatctgctcagtmacgtgactggggtgcatgtgagctaacatttaagaactacttttgcagagtctaatatgtgtagactctaatatgtgcagagtctaatatgtgtaaactgtgtagctctctactctctcatgcactttgcatcatcttctagtcattgtgtcctggagcccagcccaaaaggcctcccaatccctgccctgctttgttttggtcaagaaggttatctctggagcacacttaccatg

SEQ ID NO: 805745 - DNA, 617 bp, Homo sapiens
aattttaaaaagggggagggggtcaattgcttttggaaaagggggtctcccccaatattatccagttgcacagtaagttactattactcttatggtcactaggaacaaacacaggcatactttgcagaaatcagcaaaattaaccaggccctaagcaacttcttatttgttgggttcagcaatggatcatcaagagaggcaggaagaaaagtgaaactagagggtaccaccaagatgtttcctggctagagttatttcagaacactatcatttccaccagagagctttaaaacatttgcgtttctcctatgaatcaggctgtatggcaacaaaacagataaacagaaaaagtacattattagcataaaacagtattagcataaatagaaagggaaycaggatattcggaggggtgggagaaaacagcttgtataatatgtggcctactcatttcagtcgacttcactgtagctgataaactgtgaaatttccataataatatagagtacagaaagcaaacaacaattttatttgatagggaaattgcatcctgatactggatataaaattctacagcatgttcaatgatattttcaaagcattgaaaatatagacat

SEQ ID NO: 805746 - DNA, 395 bp, Homo sapiens
tgggagggcctgcctgagatgatttcttacataggaatctatgtctttgaggtgaagatgtccctttgcacggggtggggaaagcatctgagcagtgttggtttctttcagtgaattccgtaagcccacccttcacctatgctgggtgctgcgctggatrctggagtgggttgaccagtcatacaggagaggccccaaggtcttcaaggcctgatgtgtggaagggtgtttccctccttctgtcttttctttttcttttctttttttttggagacagagtcttgctctatttcccagagtgcagtggcatgatcatggctcactgcaacctctgcttccctggttcaagtgattctcctgcctcagcctcccgagtagctgggattacaggtgcg

SEQ ID NO: 805747 - DNA, 599 bp, Homo sapiens
ctgctttttctgcatggggacttcatctaaccctgagagggtccccagcagttccagaccacatcctcttagatttaagtccagcaggagaaagagatttgtttttcacgccaactcttttttttttttttttttgagatggggttttcgctcttgtcgcccaggctggagtgcagtggcgctatcttggttcactgcaacctctgcttacctggggtcaactgagttttccctgcctcagcgcttctgagtaagctgggaataacaaggtgtgcacccccaacgcccagctaaatttttttttttttttttgtatttttagtagagatggggtttcaccatgttaaccaggctggtcttgaactcctgacctcaggtgatccagctgccttggcctcccaaaatcctgggatyacaggcatgagccaccacgcccgaccttttcacaccaattctattaaaagttccagaactgactaagtgtggtgtcatggtggttctctaaggggaatagggattgtgttaccagagggagagagaagccagggaggcaggaggaacagctgcccaccccaaatgccagatgggcccttgcctca

SEQ ID NO: 805748 - DNA, 391 bp, Homo sapiens
tgtggcagctgcacctgccctgagaggaagaggaagtccccgactgggggatcccggggccagccacagacaccctgtgcagcttcctccttccgggtgcaggcgggcctgggcagtctgagtcctacctcagcccccacctcacctccctgcatcctcctagcatctctgcagggctagcccagaggttggcggcggaaggcccacagctcctggctccatgggcaatgaccgracagcccttcacctctctgggccttgttttctcaaactgaaactggagaggatgaccccagcctgggaccttcgagggcctcaaaagggctctgggccttgcgtggtgagtttggtcacccacacacccatcttcccaaatgccaggcttcactca

SEQ ID NO: 805749 - DNA, 621 bp, Homo sapiens
ctggaatgaccaggccacccaggagtaggagtgggccacactctatccagggtcagggtcagggcgcttacatttctgtggaggggggcaggtgagcagcttgtcaacattgtttgtaaactggcagttaatagccctagagtgggctttctatgagcaaagtgcacaagagttttaatacacggactgtaaatattttacgtttgttgaatcaatgaagggattaataaaccctaagggccttcatgacctacttctcagttctgtgttcatttgtgttctagagaaaaaggcagcctgcttgctagttttgttctggatagaaaaggcatgactcaggcatgtgtgtacacatgcacccatgtgtgaattcaccacctttgcctggtgaaaggggtaaacaggggctctggaagcagtgggccagcaggtctgcattctccagtgcccaggatacrtggtgaagagggaggagcccctggtctgggatcatcgtacctaagacagagcctggtttggttatggacctgctgtgtgtgtgtcaggagggcaggtctgaacctctctggacctgtgtttcccattctctgaaagagctcctgctaagagaggcagagaagg

SEQ ID NO: 805750 - DNA, 488 bp, Homo sapiens
ccaaagacacccagcttcagactcacttcctccaggtagtcatggattgaccacaaccaactcaaatgtctgcttctaggatcctcaaatgtgttcagtttgcaccgtcctccagttgggtattgtggcttgtgcgagtgattctaaggcttgtctctcagaccaggggytggagggactttgagtttgcgagtggacttccttgtgggccaggcccactgactccccctcccgctcccctgctccacaactgagttttgggatctatgaaatgggtatgattagatgctcttgtcatggtggtggctagggtcccagcgcctgccaagaggtaattaccatggcgatggcccctacttgggtttctccgtgcaggaggaagaggaaatgcagtgctgttttcccttcattcgccctgccttggtttggcctggaaggtcacccctgctgtgagagggcagaggtcaaagagggtgagaggagaagtc

SEQ ID NO: 805751 - DNA, 551 bp, Homo sapiens
atgtttttaaatgaccatgccttgctttgtattcaaaataaattacaaactctaatttgaacaaatcagatctagtcacttatctgatgaccagtacagttttaatcttaataagtcttctattgccagtcatttgattcttgtatcttatgctgtcctgcctgagagtagtcctaccaaaaccagttttatctgaggtttttcttttcccttttttttttttttttagaattgctttcctgtagaggagaaggattgagacatgacctttggtgaaactgaagstataacttgaataatattcgttaatctggggagaataaaattttgaaagaagaaatttaattttgatgctcttctttaaaaccaagggctccacattgtctgtaagataaataattaaagctttatttactatggcattcaagggacttctcaattgggccccaatctacttttctgatatcatttctgatactacttttcacttatagtccagcaaggcctgtccactcactctcgttagacccttcatgctgtcctacctctgg

SEQ ID NO: 805752 - DNA, 471 bp, Homo sapiens
attgttctaaggcactcagtcttaaattatttccttgtagttctgatatttaaggactctctgattctgatagggtcaaaggactttttttttttttcttggtctgggttgactcacataccaggtccacgggtgtccaggtcaggggcttccatctcagattcctggggaggagttagcatggctgcctgagggagcgccccacagccaccactcagagaccagagctggcacgtggagggtgggcctgtttcttcagcctttgggtaacagcaaggatcagtgaaggttgatttgccctttsatcccttccatcacctccagaccattcttgccccagccctttcacctggcccacctcctctccctcctcagggcctgagcacatcacaactccatcctcatcaacttctgcctttggcttcagtgccctggaaaggaatgggtgggtagaggttacacggaattatg

SEQ ID NO: 805753 - DNA, 657 bp, Homo sapiens
ctattacatttgtggttgcatattagggtcacatttcctactagcaaagttgtttcttgttcaaagatggaattaaatatatcatatttcattattttttctaaaaggtatcaaaacttccagatgcttcacaatctgaacaagtttattactcacaggttttaattaaatgtgatccaaccaatacctatccttaaagtaacgaaaaggaagggattcacttgccctatcccaactcaggccrcaaccatatgatactgatttcaaagtgcactgttgttgaagtatagatggtgctcacttaaatctcttctcatctgaaaacagagctcccaaattagccaccactagcccggtgccacctatagatgtgttttgtttggtcaggatggtattattttaaattttgaatttgaatgcctctgggtagggcatggacttttcaccatctctatcccttataactagcagattcacaatcatgagacctgctgggccccttaatgcaactgagtttgtgatcgatccccacagagataatcaggaattctgtctggtatggaaaatgtggtactctctaaaagaactaactctgatgctcccattaggaagaatatccacagagacaatgtccttaatccaaaacacacaatattc

SEQ ID NO: 805754 - DNA, 657 bp, Homo sapiens
ctattacatttgtggttgcatattagggtcacatttcctactagcaaagttgtttcttgttcaaagatggaattaaatatatcatatttcattattttttctaaaaggtatcaaaacttccagatgcttcacaatctgaacaagtttattactcacaggttttaattaaatgtgatccaaccaatacctatccttaaagtaacgaaaaggaagggattcacttgccctatcccaactcaggccacaaccatatgatactgatttcaaagtgcactgttgttgaagtatagatggtgctcacttaaatctcttctcatctgaaaacrgagctcccaaattagccaccactagcccggtgccacctatagatgtgttttgtttggtcaggatggtattattttaaattttgaatttgaatgcctctgggtagggcatggacttttcaccatctctatcccttataactagcagattcacaatcatgagacctgctgggccccttaatgcaactgagtttgtgatcgatccccacagagataatcaggaattctgtctggtatggaaaatgtggtactctctaaaagaactaactctgatgctcccattaggaagaatatccacagagacaatgtccttaatccaaaacacacaatattc

SEQ ID NO: 805755 - DNA, 657 bp, Homo sapiens
ctattacatttgtggttgcatattagggtcacatttcctactagcaaagttgtttcttgttcaaagatggaattaaatatatcatatttcattattttttctaaaaggtatcaaaacttccagatgcttcacaatctgaacaagtttattactcacaggttttaattaaatgtgatccaaccaatacctatccttaaagtaacgaaaaggaagggattcacttgccctatcccaactcaggccacaaccatatgatactgatttcaaagtgcactgttgttgaagtatagatggtgctcacttaaatctcttctcatctgaaaacagagctcccaaattagccaccactagcccrgtgccacctatagatgtgttttgtttggtcaggatggtattattttaaattttgaatttgaatgcctctgggtagggcatggacttttcaccatctctatcccttataactagcagattcacaatcatgagacctgctgggccccttaatgcaactgagtttgtgatcgatccccacagagataatcaggaattctgtctggtatggaaaatgtggtactctctaaaagaactaactctgatgctcccattaggaagaatatccacagagacaatgtccttaatccaaaacacacaatattc

SEQ ID NO: 805756 - DNA, 657 bp, Homo sapiens
ctattacatttgtggttgcatattagggtcacatttcctactagcaaagttgtttcttgttcaaagatggaattaaatatatcatatttcattattttttctaaaaggtatcaaaacttccagatgcttcacaatctgaacaagtttattactcacaggttttaattaaatgtgatccaaccaatacctatccttaaagtaacgaaaaggaagggattcacttgccctatcccaactcaggccacaaccatatgatactgatttcaaagtgcactgttgttgaagtatagatggtgctcacttaaatctcttctcatctgaaaacagagctcccaaattagccaccactagcccggtgccacctatagatgtgttttgtttsgtcaggatggtattattttaaattttgaatttgaatgcctctgggtagggcatggacttttcaccatctctatcccttataactagcagattcacaatcatgagacctgctgggccccttaatgcaactgagtttgtgatcgatccccacagagataatcaggaattctgtctggtatggaaaatgtggtactctctaaaagaactaactctgatgctcccattaggaagaatatccacagagacaatgtccttaatccaaaacacacaatattc

SEQ ID NO: 805757 - DNA, 531 bp, Homo sapiens
taaaataatcttagacccatatatatcaatcaataattccattaattataaatggactaaatggccacattttatttgtttttacttaagtttttatttatttatttattatttccataggttttagggggacaggtggtatttggttacactagtaagttctttagcggtgatttgtgagactttgatgcacccatcacccaagcagtatacagtgaacccaatttgtagtctttyatccctcactcccttcccaccctttcccactgagtccccaatatcattcttatggctttgcatcctcatagtttagttcccacttatgagtgagaacatatgatgtttggttttccattcctgagttacttcacttagaatagtgtccaatcccatccagactgctgcaaatgccattaattcattcctttttatggctgagtagtattccaccatatatatatgccatagtttccttgtctattcgttgactgatgggtatttgggttggttccacatttttgcagttgtaac

SEQ ID NO: 805758 - DNA, 531 bp, Homo sapiens
taaaataatcttagacccatatatatcaatcaataattccattaattataaatggactaaatggccacattttatttgtttttacttaagtttttatttatttatttattatttccataggttttagggggacaggtggtatttggttacactagtaagttctttagcggtgatttgtgagactttgatgcacccatcacccaagcagtatacagtgaacccaatttgtagtcttttatccctcactcccttcccaccctttcccactgagtccccaatatcattcttatggctttgcatcctcatagtttagytcccacttatgagtgagaacatatgatgtttggttttccattcctgagttacttcacttagaatagtgtccaatcccatccagactgctgcaaatgccattaattcattcctttttatggctgagtagtattccaccatatatatatgccatagtttccttgtctattcgttgactgatgggtatttgggttggttccacatttttgcagttgtaac

SEQ ID NO: 805759 - DNA, 610 bp, Homo sapiens
  misc_feature 596, 597, 598, 599, 600, 601, 602, 603, 604, 605, 606, 607,608, 609, 610: n = A,T,C or G
gagggccccaagctcacgtgagcacgttctggaagtctgacccttagggaaagagggagtcaagcccatggccactgggatcactcacaagtgtaactctccacctcaaaacccttccaactcccagagcctgtgcctctggaggaggtccaattggtggtggagccagaaggtggagcagtagctcctggtggaaccgtaaccctgacctgtgaagtccctgcccagccctctcctcaaatccactggatgaaggatgtgagtgacctggagagaggggctgggaggtagggtgaaccataactakcaacagggagggcagagggctaacgagggaaaggcaggctaggagctgaggaggaagagagggtatctgaagatatggagacaaaaagacaagggttttgaaatagtctcctctccccttcccccaccagggtgtgcccttgccccttccccccagacctgtgctgatcctccctgagatagggcctcaggagcagggaacctacagctgtgtggccacctcattccagccacgggccacaggaaagccgtgctgtcagcaatcagcatcatcggtgagacctctcccnnnnnnnnnnnnnnn

SEQ ID NO: 805760 - DNA, 643 bp, Homo sapiens
ttggaaaactaggacacagtgtgaaaggtgctttcacgaattctatattaaatatcatcatggtcaacgcttgatctggtttaaaaattgagtcactgttggtatgtgttaccttggaagttgggtttagaactaaaataatggggctgggcgtggtggttcacacctgtaaacccagcactttgggaggccaacgcgggcggatcacttgaggtcaggagttcaagaacagcctggccaaatgaggaaaccctgtctctactaaaaatacaataattagctgggcatggtggcttgcacctgtattgctagccacttgggaggctcaggcaggagaattgcttggactcggcaggtggaggttgcagtgagcctagatcacgccactgcactccagcctgtgtgacagagtgagactctgtctcaaaacaaaacaaaacaaaaaaacctaaataatgggaaatattacagttatgaatcraaaagtttgtcttgcagtcctaatctggaggactttgggtaatgtagaagcaaatgaatatgagaaatatgagtctcaatcttttggatacttagaagtggaaacatctaacataaatctccacatatgaccagctgagaaataaagaacttacttgcagtt

SEQ ID NO: 805761 - DNA, 607 bp, Homo sapiens
cactctcccccaacaccacacaatttattgtaataaaatttgtcaatctcttgttttcttttagagtttctgctttttagtttctttggccttatctgggtatcacaaagattttatctaatactttctcttaatagttttgaaatttccctttctacatatagaactttaatccaaatggggctttgttaattgttttttggttttggtgagtgattttagtaataatacaggtgagatctaattttcctttcatctggaaaaccaactagagggatttcgtctcaycttgttccaactagatttattgactggtgcattctttctctgctgatttgtaatgccatcttcatcttatatatttcgtttttccgtggattttattttctgttccagtgatcttttgtcttttactgaaccaatactccattgctttcactactaaaactttataacatttattacaaaaaatagcacattatctttgttctttttcagaaatgtgttggctattctttgaccttttctcttacacaagaatttcataatttctcaaaatctatgagtcatattaggatttcattgaaatttcattgagcctgtagat

SEQ ID NO: 805762 - DNA, 567 bp, Homo sapiens
ctcagcagtgtcttaggcactcaaattcatcttaactaatgactccaccatcttcaaataatggctcctaagttcatcatgttagtccaccttaagtgaacagaaagaaaaaagcttgaagatcatgagtggatgactttacaaacaagcctggatgactttcatatcacttctaacaacattagattggctagaactcaagcatatagccacacctaactacaagggaattttggggaaatagtcaaccacgttgtattagttttctatagctgctctaacaaattaccacaaacttaatggcttaaaacaacacaaatttattatctatcagttccataggttataaatctgtcatatatgtctccctggacaacaatcaggttgtcagcaagactgcattctttctggaggttctaggaacaaatctgyttccttgctttttcagcttctagaggctggccacattccttggttcatggctcccttcttctatcttcaaagtgaacaaaaatgaatcaagtcctcacatcacaccattctgcccttcttccactgtagtacctc

SEQ ID NO: 805763 - DNA, 609 bp, Homo sapiens
agtactcaaggcaccactattaagatcctggcaacgcaagtacaggaatcaggagggaactgagggccctttacaggacttgccatgcatattttgccactaacaaataagagcaaacatgacaatcttttgcctttcttcatggggacaatacactaagggaatctgatcatttaaaaacaagaggcggggcacggtggctcatgccttaatcccagcactttgggaggccaaggcgggtagatcatgagcttargagttcgagaccagcctgcaatatggtgaaatgctgtctctactaaaaatacaaaatttagccgggcatggtggcaggcgcctgtagtcccagctacttgggaggctgaggaaggagaatcgcttgaacctgggaggtggaggttgcagtgagccgagatcgtaccactgcactccagcctgggcaacacagcaagactctgtctcaaaaaataataataataaataaaatatttttaaaaataaaaactacaaaaaaagcttaaagaaaaattagctataaatctaaataaaacataattcatggccaagtaataaagtcataatatagtcaatgaagattataacttataa

SEQ ID NO: 805764 - DNA, 590 bp, Homo sapiens
tgccatgttgcccaggcttgtctcaaactcgtgggctcaagtgatcctcccgcctcagcctcccaaagtgctgggattacatgtgtgagccactgcgccaggtgcaatgaatcttataagtggctattgcctttgctagcatcttggaatctttgtctttgggactgttacaagattcgggatgtgaggcttatacccgctgtggtcttgtttccccgcacctaggctgttgcctgggtgggccagagaagagctctagactgccgtgcggtctcctatgggaactctctgtagagaaatgctggaggccctcccgcagacgcactctttcctgtccctgcatccttctaggcaaagccagtgccatttatgtcctatttgggtcttgtgagtctaacatstggttgagccaaagaagacccccagagggggcactgcaggagataataccaatatcttcctccccaggatgaaaggtttaaatgagataatatacactgagttgctgtcagaggacatgacaagtgtcagctcccttctctccatcccaaaaaagaatacctggttttggggtcttctcgttttttcct

SEQ ID NO: 805765 - DNA, 616 bp, Homo sapiens
aacaagtcccattccttccctatcctcaaaggatcaccaacatttttaaaacatttctaaaacatttcaaatgttagaaacatttttctgtcttatgagtggaattgcaatagaaggaatgaaatgaaatagtgggtgaaagtacttaaatgctagttactaagaccgagatcattgcagaaggagactacagcaacagtccagtgttattcatgggatgggtacaggtactcctggtgcaggcaggaaagtatttaaataccacacacccaccaaccttgaaaccttgagccacgcttaggtggcagggattcctcactacttacctataaattgggaataacaatagcagctttccctgccagggagaataaatctggtaatagatgcaaagaccttactccactgcctggcacaaaggaaactytaaagtagaagctgctattattactaattattattattattcttttttagagacaaggtctagctctgtctcccaagctggtctcaaatttcctggccttaagcaatcctcctgcctcagcctcccaagtagctgagattacagtcattagccaccatgtgtggcttctaaatatatgtattatattta

SEQ ID NO: 805766 - DNA, 592 bp, Homo sapiens
agttatctgcattctataccagtgaaatttcagaagccacaaatgaacggataagagtataacagcataacagataagactccatacttcaaagccagattattactgagtttgtgatcttggacaagttatgaattttatgaacaatactgcctcattaattagctaccatcaatgagcaagccrattaattataaaccaatcagggattctataaagcctgttttaaaagcagtagcctgggcaaaaaacaaaaccaaaaaatgctcagattagagatggcagtatcccaccaaccaaacatgcagaaaaagaaccatgcctgtgtcactaagcattctggatctatcttcctaataacataaataagattttagtagtgttttgtcttgctcccacccccccaaggaaggagagatgaataaaaaaaagaaactgaaaatttcacccattaaagatagtcctaaaccattgtcgatagaaagcaggttttgtgttccagataccatatgaaaatactttcttcaaacttttcattatcatcaaagactaaatcaactattatacacaagtgatatctctaacaattacc

SEQ ID NO: 805767 - DNA, 592 bp, Homo sapiens
agttatctgcattctataccagtgaaatttcagaagccacaaatgaacggataagagtataacagcataacagataagactccatacttcaaagccagattattactgagtttgtgatcttggacaagttatgaattttatgaacaatactgcctcattaattagctaccatcaatgagcaagccgattaattataaaccaatcagggattctataaagcctgttttaaaagcagtagcctgggcaaaaaacaaaaccaaaaaatgctcagattagagatggcagtatcccaccraccaaacatgcagaaaaagaaccatgcctgtgtcactaagcattctggatctatcttcctaataacataaataagattttagtagtgttttgtcttgctcccacccccccaaggaaggagagatgaataaaaaaaagaaactgaaaatttcacccattaaagatagtcctaaaccattgtcgatagaaagcaggttttgtgttccagataccatatgaaaatactttcttcaaacttttcattatcatcaaagactaaatcaactattatacacaagtgatatctctaacaattacc

SEQ ID NO: 805768 - DNA, 616 bp, Homo sapiens
aagaatgttatactcaactactaaaaataaatgacttctatatggcaaaaaaatactataagcaaagacaataaatatggatgaaaaatttgcaacatgtatcacaaacagctaatctctcttttatatcagagcaccagaaaataacaaaaagctcaacaactgaatagaaaaataggcaaaattcctgaatacatggttcatacacagaaacacatatggctcttaaaatatatttaaagttcaaaccattcatagtaagagaagcaaatcattaatcattaatggcactgagacatttgttatcaggctggcaaaattcaaaagtttgattatacactattttgtcaagaatgaggaaaataattctcttgtattttgctggtaggaatgtaaaatagtgtatctcctacagamaggaatatggcagtatcttaacaattacagatatatctaccctttggcccacaattctacccctaagaatctatcctacagatatatctccacttgtatcaactgacataagcttattccttccagcactgtaagagcaaaagattagaaacaatatccagctggttaaatacactatagtacctccacagaatagact

SEQ ID NO: 805769 - DNA, 585 bp, Homo sapiens
ttctcatctagagatgtttcagtgttgatgatgatagatttgtagtgtgtcaaatgctgttccagaagaatgctgaaatagatcacaaattctattagagagggcagctgatttttttttcatggtctgcaagcctgtcttctctctttgctgtactttggtctgggtgtaactagaataaagagtatattcttgagctgaacggtcttttgactcactttgcctcactttgcctcctgtcaagacttgacagacattagcaagcgtgtatgggtcactaggtcatttgccattcattaggattaatcctgtttttgaaatctttattcccatagcctttttcagaacaaaaggcaactctgagggctttcctttttaacttgagctttctctgatgtccctagtttcttgaatcctttctttataaaagtaaccataaatagttatctrtccagatctattgcagtctgtaacccaaataattccactgaatccaacaaaagcaaaaaatgacaatctttaaaaaatgtgaatttacaattctacagtttagccccaaaagcacttgttagaaaggatgaaagc

SEQ ID NO: 805770 - DNA, 616 bp, Homo sapiens
atcaaaagacaaagcttaggcttctgaccactagaatgtccacccagacttcttcactgttttagagaataagacacagcagagtagcggctgggacttaaaagagttgccttctttccttctctgcaaccctactgctctttgtacaagcaaatcaggactcttctcaagtgaaactgaaaattcagcttaaaaaaaaccccttttcaagactgtgaaatctaccacatcrgtagcttttaaaatatcatgatgtaactttatattccactacatgcctgtgaacatgtcaacagaatgacacagtggtgaatgaatgaaaaatatcacgatgtaacttcatattccactacatgactgtgagcatgccaatagaatgacacagtaatgaatgaatgagaaaaactaacagtgagcacctactatgtgtccaatctattctatctcaccctttctcacaacaacaaatgtgcacagggaattcttgtcatcatcatttacactgagaaaactgaggttctgtttccattccttgtgccctttcacaattccttataaaggcactttaccatagccaacacatcctggttaaactacagaattataatctgcatta

SEQ ID NO: 805771 - DNA, 584 bp, Homo sapiens
cttatgcttgtagtccccgcacattggaaggctaaggcgggaggctcacttgagaataggagttcaagaccagtctgagcaatacagtgagaccctcgtctctacaaaaaaattaaaaattagctggatgcagtggtatgtgattgggaggctaagaccagaggatyacttgagcccaggccgcagtgagctatgatcatgacactgctgtccagcctgagtgacagcctgaataagtaaataaataatagcctaaaactggaaacaacccaaatgaccattaacaggtaaatggataaacaaattgtggcatacatgcagtgaaatatgctatggtttgacgctgtatcccgacccaaatctcatgtcaaattttaattcccaatgttgtaggagagatttggtgggaggcgtttggatcatggggcagatttctcaccttgctgttcgtgtgatagttcttgtgagatctagctgttcagaagtgtgtaacacttccccctttgctcttgctctcctgctgaccatgtgaagaaggtacttgcttcccctttgctttctgccataactgtaagtttcttgac

SEQ ID NO: 805772 - DNA, 358 bp, Homo sapiens
caggcctcagtgtgtgatgtttcctaccctgtgtccaagtgttctcattgttcaattcccacctatgagtgagaacatgcggtgtttggttttctgtcctcacaatagtttgctcagaatgatggtttccagcttcatccatgtccctgcaaagtacacgaactcatccttttgtatggctgcatagtattcyatggtgtatatgtgccacattttcatatgtctgtctaaagtagtcttcccagacctgtaagtcccctaattgaaattataccttttggcaccttttgtaatttcaattaggggacttacaggtttgggaagactattttagacagacagatggacatgagtaaag

SEQ ID NO: 805773 - DNA, 485 bp, Homo sapiens
atcactttcctcattactgtcactaaattcaccttcagcacgtttttgtggctgcttatctgaagcctctcaatggtggctgtatcaacagttccaccatgaactatttcttctgtaactcaatttacatttgattcaagtttcacttacagcatcaccacttttgggcttttttgctgcaatttcatcttcgttggtcagttccctcttttgattatccattgtgatgaaatgtcacatgggagacaagaaggcaacataactgcrcactttgctgtctgtgcatgaactgagtaacagatacacagtgaccagtcactgatagactgaaagttgtatgattggtcactgatcatgatgtgcatctcttatttgcatagtgatttgtggactgaagaagctagcagtgaattgtgtactttatgcagttacttagagctaatataccatggtaatttgaatgtgctgttgagggaaggtgttat

SEQ ID NO: 805774 - DNA, 629 bp, Homo sapiens
tgatagactgaaagttgtatgattggtcactgatcatgatgtgcatctcttatttgcatagtgatttgtggactgaagaagctagcagtgaattgtgtactttatgcagttacttagagctaatataccatggtaatttgaatgtgctgttgagggaaggtgttatttaacaaaagcatagcggctgaaattcatgcatatcagaactgtgggaagtaaggatgccctattttctactggaatacagagggcagctaaaartaggttttgtctaagaaattaggatacaaagagtttggcatctaggtaactagaaaccacttgaataggctgatgcatgttaattaattcctttattttggatatacattggatttttgaaaccctacgaacaagtaaatcaaaagcatttaagtccaccattgaaatacttatgaaggtggcagagaaagattgaggttaaacaaagaagtcaagttctctcacaaagaagaaaacatctcagtttccatagctgctgggagacattggaaagagacacggtgcacagtcaagctcctcccccagccccttccctgttctcatgagggcttcaccgatttcctctagcagtagaaactccagaccac

SEQ ID NO: 805775 - DNA, 642 bp, Homo sapiens
tgttcttgtgatggtgtcaggccctgttgcagaggcctgtggtggtatgtctaacttacgccaaatctggatcaggactcagaggacttgcacacagagatcctggggggacattctcttctacatcctggatcaggtcatggatgycacagaattactgagaatgaggcacttctcaagtaagcccctgagggcaacagttaaaaggacaaccgggtttatcataaactttcaacttcctggtttcaattggatccagacacataaataccagaaatatcaaagggaaaaggaaagtcacagagctctatacatgtccagaaaaatatggcaggaatgttccagaaaagccaaaccattagcaatcttgacattaaagagtagtgaactccacctttaggtttatgtgctgatatttttatcttcacattgtgctgatatttttatattcacatttcatgttgaactctgatactcaaacttgtggcccagtaaattgcttgtgctattatctgcactttcaaaatgaggaaaaaaagatcatgatcttctcaccactgtgtggcactgcatgtgcctttggggatttctaagtactaacttatatatgactcttgccgggtacagtgtcatgcacctact

SEQ ID NO: 805776 - DNA, 539 bp, Homo sapiens
attaatatcttaatgggttttaaaaagcatagattttaaaccataattcaataaaactagaaataactaaaaatttcctaaataccttgattattggaaactagaaacctgtttgttgataagtgctaaagaaaagaacataattgaaataacaacctagctagaaaacagtaagaaattataaaaagtaaaacaattgaragagcaataagaaattggaaaaaaaacaagaacaaaaacccattagacatccagaattacatatataatatacacaaatgatttgtcatctgtgtattgcatatagcctatatgtctttttatacaatatttttgaaatgaaaaattaatctaaaagctaattatttaaaaagattattaaaatagatacatcccttgaggaagttaagaatcaagaaaagaaaaaagatcaacctgatttggagtgagaaagattagccagctacagttatagaaaatattaaaagaataatgaaggacattatgtaaaatattattacaacagaaatgtaatattg

SEQ ID NO: 805777 - DNA, 539 bp, Homo sapiens
attaatatcttaatgggttttaaaaagcatagattttaaaccataattcaataaaactagaaataactaaaaatttcctaaataccttgattattggaaactagaaacctgtttgttgataagtgctaaagaaaagaacataattgaaataacaacctagctagaaaacagtaagaaattataaaaagtaaaacaattgaaagagcaataagaaattggaaaaaaaayaagaacaaaaacccattagacatccagaattacatatataatatacacaaatgatttgtcatctgtgtattgcatatagcctatatgtctttttatacaatatttttgaaatgaaaaattaatctaaaagctaattatttaaaaagattattaaaatagatacatcccttgaggaagttaagaatcaagaaaagaaaaaagatcaacctgatttggagtgagaaagattagccagctacagttatagaaaatattaaaagaataatgaaggacattatgtaaaatattattacaacagaaatgtaatattg

SEQ ID NO: 805778 - DNA, 539 bp, Homo sapiens
attaatatcttaatgggttttaaaaagcatagattttaaaccataattcaataaaactagaaataactaaaaatttcctaaataccttgattattggaaactagaaacctgtttgttgataagtgctaaagaaaagaacataattgaaataacaacctagctagaaaacagtaagaaattataaaaagtaaaacaattgaaagagcaataagaaattggaaaaaaaacragaacaaaaacccattagacatccagaattacatatataatatacacaaatgatttgtcatctgtgtattgcatatagcctatatgtctttttatacaatatttttgaaatgaaaaattaatctaaaagctaattatttaaaaagattattaaaatagatacatcccttgaggaagttaagaatcaagaaaagaaaaaagatcaacctgatttggagtgagaaagattagccagctacagttatagaaaatattaaaagaataatgaaggacattatgtaaaatattattacaacagaaatgtaatattg

SEQ ID NO: 805779 - DNA, 516 bp, Homo sapiens
aatcccaaagacaacagtgaaaatatcttcagggaatgtcagagattatcacagcagcccctcccatcacaggcccagaggtctaagagggaaaaatggtcttgtgggcagggcctaaggccctgctgctctgtgcagcctcaggacatggcaccctgaatcccagccattctagctccagccatggctaaaaagggtcaaggtgcagctcaggctgtggcttcaaagggtgcaagcccygagtcttggtggcttccacatggtgttgggcctccaggtgttggaaggcaagagtttttgaacctccacctagatttcagaggatgtatttgcatcctctgaaacctggatttgcaggcaaaagtcagctacagtggtggagccctcatggagaacttctgctagggcaatgcagagggtaagtgtggggttcaagtccccacacagagtcctcactggggcattgcctagtgaagctatgagaagcggaccaccatcctctagacaccagaatgg

SEQ ID NO: 805780 - DNA, 516 bp, Homo sapiens
aatcccaaagacaacagtgaaaatatcttcagggaatgtcagagattatcacagcagcccctcccatcacaggcccagaggtctaagagggaaaaatggtcttgtgggcagggcctaaggccctgctgctctgtgcagcctcaggacatggcaccctgaatcccagccattctagctccagccatggctaaaaagggtcaaggtgcagctcaggctgtggcttcaaagggtgcaagccccgagtcttggtggyttccacatggtgttgggcctccaggtgttggaaggcaagagtttttgaacctccacctagatttcagaggatgtatttgcatcctctgaaacctggatttgcaggcaaaagtcagctacagtggtggagccctcatggagaacttctgctagggcaatgcagagggtaagtgtggggttcaagtccccacacagagtcctcactggggcattgcctagtgaagctatgagaagcggaccaccatcctctagacaccagaatgg

SEQ ID NO: 805781 - DNA, 667 bp, Homo sapiens
atgagaactggttgtttgaaagtgtgtggcacttccccttttgctcactctctctcttctgctgctgccgccatggtaagaagtgcttgcttccccttcacctttccccatgatttaagttccctgaggccatccagttgtgagtcctgttaaccctgcagaaaagtgagttaattaaacctcttttcttcataaattacctagtctcagatatttccttatagtagtgtgaaaatggactaattcgcataccttattttttattactggagttttgccttataatatacacttttcttcctgggtttttttctttgatratagtctatgagatctcacaatttctctatttccttatcaaagaggacactccatttttcttataaaaaatcagaaagcatccctttcctgcatgatgcagagtttgccgcagccttggggtatttctcttgctcctacggattatttctgtacgtctaactcagaccctatatcaattcctacaaatctcacttcccagtaccctctcaactcttctgcaaaaagctgctaaattcaaattctttccattttttctgagtcttctctgcagcagatctctgagcctttatatttctatgccttcatcttgaaatatcatcaatatatggctgagtaatagcagata

SEQ ID NO: 805782 - DNA, 617 bp, Homo sapiens
aactcatgagcaatggatttctcctaataccctctgggtggttagttgcaaccttttcttggacagcactaaatctgagggtatcttcagtgtgacgggaaggaggcaggaagaaagcactctaagttttggagagaaattgggcttttcgtgaagtgctagagcatcagccctgrccatggccatggttcctaagatgcggaaaagtgcttattttcccaactgtctcaaatgttggttttcaaatattttgctaatttctttggtaacctaaatattttccctcacatttaaatttgcatcttatgtttcttatcacaagttaaaatagttgtaaagggcaaattttgcaatgttacatattgacattatgaaccacaattattttatcttattgacatatatgccatagataataaatgccaatgtcattcaataccattttatttccaataccagagtccttgtaaaatttacagaaaaaaatctcttcttcagcagtcagaaagtttacattgttgcattttcctttttgaattcctaatggcattttatcttccccacaatatcacatcataatataatatgcttttatttttgaaaatattttactgacc

SEQ ID NO: 805783 - DNA, 617 bp, Homo sapiens
aactcatgagcaatggatttctcctaataccctctgggtggttagttgcaaccttttcttggacagcactaaatctgagggtatcttcagtgtgacgggaaggaggcaggaagaaagcactctaagttttggagagaaattgggcttttcgtgaagtgctagagcatcagccctggccatggscatggttcctaagatgcggaaaagtgcttattttcccaactgtctcaaatgttggttttcaaatattttgctaatttctttggtaacctaaatattttccctcacatttaaatttgcatcttatgtttcttatcacaagttaaaatagttgtaaagggcaaattttgcaatgttacatattgacattatgaaccacaattattttatcttattgacatatatgccatagataataaatgccaatgtcattcaataccattttatttccaataccagagtccttgtaaaatttacagaaaaaaatctcttcttcagcagtcagaaagtttacattgttgcattttcctttttgaattcctaatggcattttatcttccccacaatatcacatcataatataatatgcttttatttttgaaaatattttactgacc

SEQ ID NO: 805784 - DNA, 617 bp, Homo sapiens
aactcatgagcaatggatttctcctaataccctctgggtggttagttgcaaccttttcttggacagcactaaatctgagggtatcttcagtgtgacgggaaggaggcaggaagaaagcactctaagttttggagagaaattgggcttttcgtgaagtgctagagcatcagccctggccatggccatggttcctaagatgcggaaaagtgcttattttcccaactgtctcaaatgttggttttcaaatattttgctaatttctttggtaacctaaatattttccctcacatttaaatttgcatcttatgtttcttatcacaagttaaaatagttgtaaagggcaaattttgcaatgttacatattgacattrtgaaccacaattattttatcttattgacatatatgccatagataataaatgccaatgtcattcaataccattttatttccaataccagagtccttgtaaaatttacagaaaaaaatctcttcttcagcagtcagaaagtttacattgttgcattttcctttttgaattcctaatggcattttatcttccccacaatatcacatcataatataatatgcttttatttttgaaaatattttactgacc

SEQ ID NO: 805785 - DNA, 588 bp, Homo sapiens
attgcaaaataagttttaactatccttaaaatgataatattgactatccctacaataataacagaaaaaatttcataaatgacaaaactgtagtttaaccagttactttttagaaagaaaggaaaagagacattaaataggtaaaggtttagaaaccagataatagatttaatgaagggagtataagaaaatttcactgaaatttaaaaagaacacagaaaaacatatctggggcaaacagcaatttcatttttaaattatgtgacacttaagaaagttaatcaactattctgaatattaattactayatataatataaaagcaatgaaaatcatgtagtaatctatttcacaacactattactcagatcaaagtcatgttggagctacaggaaatttatgtttataattacttaattcatttatgtatttttagttcttcagtcatcttcaactttctctcggaatgggcgaataataatacgctctcttcagcttttactgtttgattgtttgagcaaaatgtgttaaatacatgttaattcccagtccatggcgataagaaactaaagcaaaactcctcagctga

SEQ ID NO: 805786 - DNA, 560 bp, Homo sapiens
aaactgttaccagttttggggtgtaatcacttatgctgtgctgaaatgtgtcacttaaccacactgtatcatgaattacaaccttgtgtcatttaagaggttattcatatgacaaattaacacatttgtcacagatcccaaaatttaaagtctgaattggaatttggttttaaaatgcttttttgatagaatatttgattccaaaaagcagaaattgaatcaaactcaatttagatagtattttaaaatatataaaaattagttttaaactagtgtggcaagttttatcctgtgacaactacattcaaacagaagagattatgagactaaaccaaatagtaatcaaactaaactatgacttctagaatcttttwtaaaataaagtttcatgttagtgcctaaattttgaatgctgaagtctgtgttgatcaataagttttagaaaaataaaaatggactggaatgaatgaagatagttatgctaaggataaaataatctaataatataattttactcaccttgtcaccaaagggcatatgtccctagacataatcctgag

SEQ ID NO: 805787 - DNA, 430 bp, Homo sapiens
ccataccattctttacttatctttactctcagaaaattatgacttaacatttgtatcatcaaacacgtcacaattttggtctcatattgagaaagcataaagtatcataagaccctgttggccatacaccagtgaaattagaagggcttaatgacattgagagtgaaagaccaaaactataggtgtgaaatgtggaagactttcactggaaaattaattattaatgtaacaaaatcatgaaatcttaatgccaactggtattawggaaaaatacaatgggttgaataagaattatagtcataagaagacatcacagcaccctactctgaagaattcactgaaagaaagggacagaaagcaatgggactcacattcaatttagacacgcacataaaatttcaataaaaatgaaaataaatcctttttaaat

SEQ ID NO: 805788 - DNA, 583 bp, Homo sapiens
agaggagagggtggaggtcttgcaaaaggaccagtcgcaagagttgacagttgaatgttggaatctttcttatggttggatggcactttctttacatccaaaatatgcgttattcgtgaagatgacacagttctacaaagaaagtggcaacatttaaaattatttgtagaaagttactgcatttctcaatcacagtttgaaggcagagaaaacttggttttaccataaatgctctcattcacctgccctcttctgtcctctttgcccagaacagtttcccaggacactgggattttgtaacctgccaaggaaggggctacgttgctaaacargtagtccttttatgggacacaggaaattaggaaggaactcataaggaaggtgaaagggtcctaaccttttgtccacgcctgtatttgaaatcaaatatcttgcataaacagtggtctccattttttttctttttttaatgaattaaaggctggagcgcagtgactggatcacagcttgctgcagccccaacttcctgggctcaactgagcttcccacctcagcctctggagtaactgggactacaggcaca

SEQ ID NO: 805789 - DNA, 562 bp, Homo sapiens
caaggcaccacttggcattctgcatttgctctcttggtcccatgatggatcctccacttgccatgtgtcccactgctgcctggcatgaaaactccagtgtccttgccaagggcaccaacagagaacactgctaaagtttccagcaagaggctgctccagctctatttagaagggtctaatattcatcaaattcactgggagcacaaaaggtcttgtcttgaagctccgttagcatggcttgtacagctttattgtgtccttawcttatttatgtggctgtaacacacaaggctttgccatgatgcttaaacgtacatctttaaataattttgagaaagcataacttttcttgtaaaatattttgcttcttgattttcattgacaccatttatttagtttacagtggcataattgggatggaagaggacaacgtgagattaatgccatctcctcaccacacacacactccacacacacacacacacacacacacacacacacacaaatctgcagtgccaccactgcttccaacctgtgtgtagcagagacagcattttcctcc

SEQ ID NO: 805790 - DNA, 621 bp, Homo sapiens
tttaaaacactccatttaaatcactgcagtgcagtgtatttctccctttgcctttgaagtccatcaaagcatgcagcttgagaggtggctaggagttgggcaaaaagtccctaaaacactttgagctccccagatgaaaggtgctatttaagtacaaaatatcgtaataatttcaatatatttaacaactccactcacttcaatgtcaatgcctaactcagtcctcacctatttggtactttgaggtctattccttaatttcaatttctccagtgggatgtgtgtaactttgttccttaaaactagtacaggaaaactatcatygaaaaggaaaagtccataaacatcccattctatgtctgtaaatgacagaaaatctccccacaaggaagtaaattataagaccaacaaaagatacctgtcattaaagagactggaagggccaccttctccaggagcagagcatctgaatgatctgggtcatgccagtggaatgaggagtacagtagatactgttacattttcttccttacattttcaagtgcaaagaaaatttaggcaaggcagttggctgcagggaagtgttatattctgctcaaaaggcattcttagtttgagtaa

SEQ ID NO: 805791 - DNA, 586 bp, Homo sapiens
cttgatgatgtggctgatgcccatttagagccttgagtcactactctttacctctagtataggctgttttaaggaaaacatcttttcctttcagaatttgtgtagggaaaagaaaaagcactgtagatttggttttaaatagaactggaacattctctgagaaagtataatgttgtcttacacaagattttgtactatgaagatagaaaamtgaggaagaaaaagaaattttttttttaagtacttacttaccaggtgtgaaattgtatcgagctgaaaatcccatagattccagctctccatcagcaaaaaatttaatccatagaaatcttccactggattttatgacaggtggattttgttgtccacagaaacgtccaattattggagaaaagccaaaaggtccatctcgaacttcaatatgatcaaatttgcactcccaagacggttcaatagagtacttttcatcaaagtaaagttcaatgcactgtcttggagcggctgtaaagaagaaagattgtgtctaggaggtcatttcttacatcttcaggttgatgttttctgattctatttcagatgttatttg

SEQ ID NO: 805792 - DNA, 543 bp, Homo sapiens
tctctggaatactaaggtatgcaacccagtcagagttaaccttttgctaagtaatattaatcagttaaaatatctgttgaatatttactacaagcctagtaagcttaagccattatgagcgattaaacataaacattaatttttaaaaaagcatagtcacaagcctcaaatatatacaaaaaagatgataaaatatactcttaaaaytttaaaaattacatgtgaaataggacttaaggaacagctaagttttctgatagattggaataatattgtaagactgtttaagacaggtttatagattatagggttccgatgtgatttggatggcagagtggagaaggggtatctggggcaggtagaaggagggagtggtgtgtggacacggtgccggataggtcaggagtgtgctaggagcaatgggctacacacattggtgcaccgcaagtgcacgcaagtcgtcgaaagagcaatgagaatgtaggcttgatttggtctattggtgccattgtagttcttaaccaggagagaaatgagagtctt

SEQ ID NO: 805793 - DNA, 593 bp, Homo sapiens
tcctcaagatctgacctcacctcccttgattgattctaaaccaattatgaggttcaagtctcagcatgtcctcactggggaaattctgtttctgtctggggaaaaaataaagattattagcagaacctgagaatggatcttgtgggtgctatatgcattcaaaaccagcatctctagcagattcactgagagccattattttcttgaagtttcaaggaaacctcccagtagtttaatagtagtttattattagtgcttaygtacttcaggtgtccttgcttaattcaatcctgagtcacaagcaagttccccaacatcaaaaatatcttactgatgcctatattttgtccccaccacccctgtatcccagcctggtaactgcctttatatctaggttttgctattaatagtaattctgttactatcaagttgagttcagaaataggaaaatagaactagtcatactttctcacgccgaacacatagtttattatattcacacacagttttctccttttgccccacaaaacaatgttacgttcaaagttcaatgaggcattcctcataaaatttagatagctggcatgacaatt

SEQ ID NO: 805794 - DNA, 651 bp, Homo sapiens
aaggttttctgtttcctttccctggatccattagaggaatcactatggcagcaatagccttataaaatgtacttcttaaataataagacttgaaggtcaaaattacttcttgatccatgggctgcagaatggatgttgtgttagtaggcatgaaaacaatataatccttgcatacatctctttcagaactcttaggtgactaggtgcattttcagtgagcaataatactttgaaataaatgtttttttccctgagcagtggatctcaacagtaggctgaaaatatttagtaaaccatgctgtgaatagatgtgctatcatccaggctttgttgttttaattatagagcactggcagagtagatttaggacaattgttaagggccttaggatatttggaatggtaagtgaacattggcttccatttaaagtcaccagttccattagtccctaacaagagtcagcctgacctttgaagttttgaagscaggcgttgacttctcctctctagatatgaaagttctagatagcatcttcttccaatagaaggccattttgtctacattgaaaatttgttgtttagtgcagccaccttcgtcagtgatcttagctagatattctggataacttgctacagcttctacataagcact

SEQ ID NO: 805795 - DNA, 608 bp, Homo sapiens
aaaaggataaaccaattggcagaccattagctagactaaccaagaaaataaaagagaagattcaaataagcataatcaaaaatgataaaggtgatattacaaccaataccacagaaatacaaatgatcataagagactcctatgaactcatttatgcacacaaactagaaaacctagaggaaatggataaattcctgaaaacatacaaactcccaagattgaaacagaaagaaaaagaaatcccaagcagamcaataataagtaagtaatgaaattaaactagtaataaaaaatcttctggaaaaaaaaaaaaagcagctcaggaccagatgcattcacagccaaattttaccagacatataaagacaagctactaccaatcttagtgaaactattacaaaaaatttgaggaggtgcaataacaccttctgtgaatccaggatcaccctgatactaaaatcagacaaggacacaacaaaaagagaaaactaccaaccaatatccctgaggaacacagatgcaaaaatcctccacaaaatactagcaaactgaatccaacacacatcaaaaatataattcatcacaatcaagtgagctttattccaggt

SEQ ID NO: 805796 - DNA, 549 bp, Homo sapiens
ccgttctgatgtgcttgtggtttcttttctcatgcccaatttcctaaaaggtggtcatttcttcccaactttttcatacactgttcccccacctggacaattcttttgaatcatttcagacctccctcaggtaccaccccacctccaggtgctcagcaactagttatatgtcattacatgagtatatgctctctgagaaatgtgttatgaggcaatgtcatcattgtgccagcatcatagtgcacttacacaatcctagatggtacascctactacacacctaggctctctggcatggcctattgctcccaggttacaagcctgtacaacatgttactgtactgaatactgtaggccattataacacaatggtatttgtgtatctaaacatagaaaaggtacagtaaaatgtggtatacaatataaaaaacagtacacctgtatagggcacttaccatgaatggagcttgcaggactggaagttgctctgggtgagtcagtgagtgagtggtgagtgaatgtgaaggcctaggacattattacacatta

SEQ ID NO: 805797 - DNA, 549 bp, Homo sapiens
ccgttctgatgtgcttgtggtttcttttctcatgcccaatttcctaaaaggtggtcatttcttcccaactttttcatacactgttcccccacctggacaattcttttgaatcatttcagacctccctcaggtaccaccccacctccaggtgctcagcaactagttatatgtcattacatgagtatatgctctctgagaaatgtgttatgaggcaatgtcatcattgtgccagcatcatagtgcacttacacaatcctagatggtacagcctactacayacctaggctctctggcatggcctattgctcccaggttacaagcctgtacaacatgttactgtactgaatactgtaggccattataacacaatggtatttgtgtatctaaacatagaaaaggtacagtaaaatgtggtatacaatataaaaaacagtacacctgtatagggcacttaccatgaatggagcttgcaggactggaagttgctctgggtgagtcagtgagtgagtggtgagtgaatgtgaaggcctaggacattattacacatta

SEQ ID NO: 805798 - DNA, 613 bp, Homo sapiens
aagaacacataagttgccttgagaaaaagaaggagcttattacagaacatccctaggtaaatgacatttctacctttcaaatcaggaatgaccaacaagtcttccagatataaaattagaggcattaaagaaataagagraaatgaaatcttatattccctgttcaaaatgacaacaactcttttcaattacccataatttaaaccattttcctattatacaactacagcattcataggtgagaaagtggacagaatgaacaagaaaaaattatctcattgccctccaacttctcataagtggatcagaattaattttcattatcatgaaaagcctgggcatcagggcactggaaagtctacacaaaattatcaacatgattaagatttcataactttataagtacaactcattttcagagataaaacctcatgtttaaaataactctttgttgttgtttgagacagggtctcactctgtcaccaggctggagtgcagtggtgtgatcatagctcactgtagcctcgaactcttggactcaagctatcctcctgcctcagcctcccacgtagaagggactatagacatgtaccaccatgcctagctaatgttt

SEQ ID NO: 805799 - DNA, 622 bp, Homo sapiens
gaggtttcaggcctcctgagtgagagctcccagggggaggaccagactgtcatctttgctgtttggatgactcagccagttcagtcttagagtttcagagtgtctgaggagaccaggggctgaagtgaaccccccgcacagcatagccactctasaaaaacgtggccagacttcttttttaaacaagtccctattcctgttcctccttactaggcaagacttctcaacttgcttccagtcacatcctacaggtgtgttcagattggcaacaggttcatacctcagaggtacagagctcccagagggaagggcaggttatcgtctttgctttttcgcaggcttcactgctgataccttcagccactggaaaatacgaggcaattggcgactggagtggacccccagcataccacggcagccccacagaaaagtggccagactgttatgtgggtgcccatttccatatctcctcgatgggcaggtcttcctggcctgggtctccagccagccccccacttgagctttcaagccagtagcaactcagcaactccctggacagagcttccaggagcaacagaaatcctctctgccactgcctctgcagtggaactgcccttgctac

SEQ ID NO: 805800 - DNA, 385 bp, Homo sapiens
ttcccctctgcttttgttggcaagagcaggtcggtgtcccaggcttagaatccatttttctctctttctctccatctgtctctctgtctccgtctctgtctttgtctctccctctctctctctttttttgacagagycttgctttgtcgcccaggttgcagtgatgcgatctcggctcactgcaagctccgcctcccgggttcacgccattctcctgcctcccgagtagctgggactacaggcgcccaccaccatgcccgctagtattttgtatttttagtagagatgaggtttcaccgtgttagccaggatggtctttatctcctgaccttatgatccgcccgcctcagcctcccaaagtgctgggattacaggcgtgagccac

SEQ ID NO: 805801 - DNA, 385 bp, Homo sapiens
ttcccctctgcttttgttggcaagagcaggtcggtgtcccaggcttagaatccatttttctctctttctctccatctgtctctctgtctccgtctctgtctttgtctctccctctctctctctttttttgacagagccttgctttgtcrcccaggttgcagtgatgcgatctcggctcactgcaagctccgcctcccgggttcacgccattctcctgcctcccgagtagctgggactacaggcgcccaccaccatgcccgctagtattttgtatttttagtagagatgaggtttcaccgtgttagccaggatggtctttatctcctgaccttatgatccgcccgcctcagcctcccaaagtgctgggattacaggcgtgagccac

SEQ ID NO: 805802 - DNA, 385 bp, Homo sapiens
ttcccctctgcttttgttggcaagagcaggtcggtgtcccaggcttagaatccatttttctctctttctctccatctgtctctctgtctccgtctctgtctttgtctctccctctctctctctttttttgacagagccttgctttgtcgcccaggttgcagtgatgcgatctcggctcactgcaagctccgcctcccrggttcacgccattctcctgcctcccgagtagctgggactacaggcgcccaccaccatgcccgctagtattttgtatttttagtagagatgaggtttcaccgtgttagccaggatggtctttatctcctgaccttatgatccgcccgcctcagcctcccaaagtgctgggattacaggcgtgagccac

SEQ ID NO: 805803 - DNA, 587 bp, Homo sapiens
aataaagactgtttttacaaagatgatgtgcaagactgtcctctgcagtcttggagtagaggggacagacctgtggaggaataatgtacagttcaggtggtaaaggtgcagtagaaaaatcagtgaggtcctaaggctacctcaagaaaggagttacctgtttatctggggaaagatctgcagaatcaaggaagacttcccatagcattgttttaaaagatgaaaataaggctgggtgtggtggctcacacctgtaattgcagcattttgggaggctggagcaggtggatcacaaggtcaaaagatcaggaccatcctggccaatggtgaaaccccatctctactaaaaatacaaaaattagctgggcatgatggtgtgtgcctgtaatcccagcttctcaggagaatgagacagragaatcatttgaaccagggagtcagaggttgcagtgagctgagattgtgccaccgcactccagcctggtgacagagcaagaccctggctcaaacaaaaaaacaaaaaaaaaaaagaaaaatgaatataaatttgtcataatagtggatggaaacattttagacgttaagaa

SEQ ID NO: 805804 - DNA, 611 bp, Homo sapiens
aacagtgagattctttctgaacaactctaacgctgacagtaaaattaacaacctaaaaattaagctccatcacacaggataaattctgagagaaaagatgaggcaggccaccatctttcctgtttgggcaacttagccattccagcgtgcgggctttggagagtacaaacccaccaggggcagaagagatcctgtggcatagcacagctgctttaccaaatcatggccagaatgcttctgtaagcaggcccctgatcctgttcctygtcactggacaggatctcccacctgaggcctccagctacacccaccagtgttccctggccaatggagatttgaaaccttcctgggacagagttcccagagagaggggtgggccatgacctttgttgtttgggcaactagcccttctggcctgtgggctttggagagcccaagctgaccaggggtggaagtggtacctcagcacagaacagccaccctgcgaaaacgtggccagattcttgtttaagccagtccccaaccacatttctaatcactggctggagcctttcaaccagggtctccagccaccttcactgctgttctctggctgacagaggtttcaggcc

SEQ ID NO: 805805 - DNA, 492 bp, Homo sapiens
gtgcagcatctggtcgttacccacgtctgaacctgcttctacattttcagctaccgttgtggcagcctggcaatgtggtaaaagaagaaaagtccattttcagggggaaaattcaagaagccttcagatatttgcatatagaagaagccaaatgctaatagtaaaaaaaaaaaagatgaagaaaccttgagggcatttcatagctccactytacagtacaaattttctgtagtattatttttaaaagaggtttaactggctcatgtttctgcaggctgtaaaggcagcaagtggcttctgcttctgggaggactcaggaagcctcccaatcataccaaaaggccaagtgacaatgagatgttccatatggcaggagtaagaagaagatacagagaagaaagaggtgccacacccggttatacaaccagatctcatgagaactcactatcagaagatcagcctcaggaagattaaccaatggtgaaggatccg

SEQ ID NO: 805806 - DNA, 622 bp, Homo sapiens
aattctgacaagtaatttaaaacaagatcactttattaattataaagcttcaaaaatacttagtaaaaaaacttacagattaactacaagagacttttcaggagaaaaaagccatacaaaagcaaaaaaaaaaaaaaaatgagaggagagacagaaactatccttgaataacattttaaaggtaagattacttactaacattattttccaaaattacrttgtcaaattagcattgacttcctactaatatcctgaagccatctcactaaaaattatgctttcaaaacaaattattgagctgaattcattttctataagtgtatgtttggacttacttcgttaatttttttgacatggaattgttagctttcaatgctactgcaaaggcttccttgtattcttctaatttggttgtaacctcttcataagtagttttcattttggagaatttacattccacatctttaagtgtgagttccttcttatttagtgaagccgtattacccttgtttaactgctctaattgtttttcatattgtgtttatttctaaaacaaatgaaaagaatatatttttaaaacaattataacctaattattatatgtttgttgcctttcattttg

SEQ ID NO: 805807 - DNA, 578 bp, Homo sapiens
cagaggcgctcctcacttcccagatgggacagcctggcagaggtgctccccacatcccagacggggcggctgggcagaggcgctcctcacttcctaaacagggtggcggccgggcagaggtgctcctcacttcccagacagggcagccgggcagatgcgctcctcacttcccagacagggcagccgggcagaggtgctcctcacttcctaggtggggtggtggccaggcagaggcgctcctcacttcccacatggggcagctgggcagaggcactccccacatcccagacggggcggtcgggcagaggtgctcctcactttccatttggggcagccgggcagaggygctcctcacttcctcccagacgtggggcggccgggcagtggtgctcctcacctcccagatggggcagccgggcagaggcgctcctcacttcccagacgatgggaggccgggcagagtctctcctcacatcccagacagggcagccagacagaggcgctcctcacatcccagaggatgggcggtcaggcagagacgctcctcacttcctagacggggtggcggctgggcagag

SEQ ID NO: 805808 - DNA, 635 bp, Homo sapiens
gctttatgggaacactgcatcttccactcaaattttctgtaaatttaaagctgctataaaagataaagtacataaatttttttaaaagtttagcaaaattgtctagctatgagatcagtatcaaaatcaattgcgtaagaatctatgcgtccacagtgataaataagtaaataaacagaggcaaaggaaaagcttttggaagaacaccaactaatacatatggaaggaatgataattttgtaagcattatgcaaataattgattcaggcaagaatcatcatcaaatgctaacactaacaggtataagtatgatgagaaataggacgtttacatagtctaaaactgtctccccacaaagwaaaaaaaagcaacttcatagcggagaaactaagtacagcggtcatcaccttaatcaagggatcaaagttggtgtgtgcttcctggtaaggtgcaggagaaggccccatttcttctgcaatcttcctgacaaaaatgtagtttcataacctgaatctaatcacgagacaccagaaaaaaaaaaacactgaggatattctacaaaataacttgtggaacaattcaaaaatgacaaagtcatcaaacacaaggaaagattaaggaattattccaggtta

SEQ ID NO: 805809 - DNA, 589 bp, Homo sapiens
tgaaataggagtctctagcctgaaaggacctgctaagccctgcacagtgagtgaagctagtccagtgccagtgtaacaaagtgaatttttaggacgccatgaacagagagaaaaggcttccacagagaaaaccaggccacacagaaaggaacaggaatggtacagcaacaatggatgctaggtgacagtggagcaaaactggaaggmaaataattttctttcttttgagacggggtcttcctctgtcaacaccggagtgcagtggtgcgatcacggctcactgcagcctcgaactcccaggttcaagcaatcttcccacctcagcttcccaagctactagaactacaggcacacaccaccatgcccagctaatttttgtattttttatagagacagggtttcaccgcgttgcccaggctggtctcgaactcctgcactcaaaacaatccgctcacttcggcctcccaaagtgctgggattacaggcataagccactatgcgcggccaggaaaataattttctacctataattttacaaacgtagctaaactatgaagcaaatgtcagaatgaaataaatgcattttctt

SEQ ID NO: 805810 - DNA, 589 bp, Homo sapiens
tgaaataggagtctctagcctgaaaggacctgctaagccctgcacagtgagtgaagctagtccagtgccagtgtaacaaagtgaatttttaggacgccatgaacagagagaaaaggcttccacagagaaaaccaggccacacagaaaggaacaggaatggtacagcaacaatggatgctaggtgacagtggagcaaaactggaaggcaaataattttctttcttttgagacggggtcttcctctgtcaacaccggagtgcagtggtgcgatcacggctcactgcagcctcgaactcccaggttcaagcaatcttcccacctcagcttcccaagctactagaactacaggcacacaccaccatgcccagctaatttttgtattttttatagagacagggtttcamcgcgttgcccaggctggtctcgaactcctgcactcaaaacaatccgctcacttcggcctcccaaagtgctgggattacaggcataagccactatgcgcggccaggaaaataattttctacctataattttacaaacgtagctaaactatgaagcaaatgtcagaatgaaataaatgcattttctt

SEQ ID NO: 805811 - DNA, 584 bp, Homo sapiens
gatatctgggagtaagtgaaagtaatgaaaacacagaagtaaacacaaagtaattatagttcacctttatacacacgttaacagaaatcatctgatcccctttgctgctaagtgagttgaaaagcgaaagcgtctgaatcccaccagcatcgctggatgtgtcatccactgagccttcatctcccatgaacttgacttttaaccaatttgctagaattytacagatttaaaaaaaacaaaaaacaaaaaaaacacttgaagaatctaattctatatttgaattataaagactttcaggaaaagaagaaagaaaaatatcacacagacctaggtccacaaataccacatcttactatgaagctgatctgcacaaaacaggctgttgttttaaaatggagcaacgatctgtactcgttcttttttttttttttttttttttgagccagggtctcgctctgtcgcccaagctagagtgcaatggcacaaacttggctcaccgcagcaagcaaacctgcctcagtagctgagactacaggcacgggccaccatgcccagctaatctttccattttttttgtagagtgt

SEQ ID NO: 805812 - DNA, 584 bp, Homo sapiens
gatatctgggagtaagtgaaagtaatgaaaacacagaagtaaacacaaagtaattatagttcacctttatacacacgttaacagaaatcatctgatcccctttgctgctaagtgagttgaaaagcgaaagcgtctgaatcccaccagcatcgctggatgtgtcatccactgagccttcatctcccatgaacttgacttttaaccaatttgctagaattctacagatttaaaaaaaacaaaaaacaaaaaaaacacttgaagaatctaattctatatttgaattataaagactttcaggaaaagaagaaagaraaatatcacacagacctaggtccacaaataccacatcttactatgaagctgatctgcacaaaacaggctgttgttttaaaatggagcaacgatctgtactcgttcttttttttttttttttttttttgagccagggtctcgctctgtcgcccaagctagagtgcaatggcacaaacttggctcaccgcagcaagcaaacctgcctcagtagctgagactacaggcacgggccaccatgcccagctaatctttccattttttttgtagagtgt

SEQ ID NO: 805813 - DNA, 612 bp, Homo sapiens
cgtgctgatgccacgaccgagggaacgggtctccctgtcggcgtgaactgacccggccaggcgtccactgccactcggactgtctcccaggcacgtggcgcccacacgggcagaacacgccctccacacacgcggcttcgggcagaacacgaggcgccctccacacacgcggcttcggggcttgtcatgaaaaaagctgaatgctgggggtgcagctttcaccaacagaatcccgttyggaagggacgcggtgagacatgatccaccctaagttgtgatcctgggtgagccgccgtccacaccctgctgagggtcccttcacccactttattctccagaaaaccctgcccatcagggctgagtcccacgccttccctctccgtccaggcctggctttgacctctggggtcgtgtggggcacaggggacaccctatccaggcagaggccctacggctatctggaggaagtggtgggagctgggcttctgcctggaggatgcacccagaggggtcacagtccacacagagacacacgggtgccttccagatggctgagccagtccagcccagaagggcctgggggttgggggctgcacctggcctgtccccacc

SEQ ID NO: 805814 - DNA, 659 bp, Homo sapiens
tctagtgtatacaccataacacatcagtcaggggtcctgaactttgctttagttgctatgactagatggaacttttgggttgctttcctaggggagagggtgagtgcgtgttgcttggtgaggtgagtgagccaaatatttggtggccagaggatgaaatggtcattcattcattcattcattcattctctctctctcatatcaatcatctatctawatctaattcttctctctctgggtacatggtggagttactcttctctgattccttgaagttacgtaagtctgtacaactgactatggccagggaaatgtgagcagaaatgatgtgtgccacttcctgtcagaattttttaaaatgggtacataatgtacttattttgggggtacatgtgatattttgatacatgaatacaatgtataatgatcaaatcagggtaattgggatattcatcacctcaaatatttatcttttatttgggaacattcaaattcttcagttattttgaactatacattattgttaatgatagtcactttattgtactattgaatactagatcttattccttcaatctagctgtatattttttaagccaataatcaacctctcttcaattctccctctctcctccccttcccagccgctggtaaccacc

SEQ ID NO: 805815 - DNA, 577 bp, Homo sapiens
ggtggtgtagtgtgtgcgtgtgtgtgtggtttattttattttattttattttttaaccgtagctccattcctggaacaagatctcttctggatccaggatgagatacacatggagatctcagaagtgtctgagtctcccaggcgtggcccagcgtgtggaaggggactgcagctggtttgggagataggccaatagacagaccaacagagggtagaaaagaaagacagtgaggaagagagacatcaagatagaatatgttagagaaatagtaaaaagcagataaccagagctcataygtgccagatattgtgccgagtccttactctataaccctctgaggtatgcactactttacctccattttacagttgatccagagaagttaagtatcttgcccaaggtcacacagctagtgggtggttagagtataattcaaacccattatgtctgttcttacccattacactaccaggtctcactgctaaggagagggaagccaggagacaaggagatggagaggcgggaggttgagaagccgggtgtccattccaacactcttatatgcctggggggcag

SEQ ID NO: 805816 - DNA, 577 bp, Homo sapiens
ggtggtgtagtgtgtgcgtgtgtgtgtggtttattttattttattttattttttaaccgtagctccattcctggaacaagatctcttctggatccaggatgagatacacatggagatctcagaagtgtctgagtctcccaggcgtggcccagcgtgtggaaggggactgcagctggtttgggagataggccaatagacagaccaacagagggtagaaaagaaagacagtgaggaagagagacatcaagatagaatatgttagagaaatagtaaaaagcagataaccagagctcatatgtgccagatattktgccgagtccttactctataaccctctgaggtatgcactactttacctccattttacagttgatccagagaagttaagtatcttgcccaaggtcacacagctagtgggtggttagagtataattcaaacccattatgtctgttcttacccattacactaccaggtctcactgctaaggagagggaagccaggagacaaggagatggagaggcgggaggttgagaagccgggtgtccattccaacactcttatatgcctggggggcag

SEQ ID NO: 805817 - DNA, 619 bp, Homo sapiens
tatatatatatataactatagttaaagccattaattttccttaagtcttgctttagctgtatcccacgtattttgacgtggtgtttttactgtcattcagtactaagtattttgtaattttccctattaattcctctttaacgcaagtgttattaagtagcttggtttttcagtttttctacctctggtattaataaaaacctgtctttttgttattgattcccatttttattacagcgttcagaaatggttgaataatcatcctttgtaacctagttcatggaggatttttttgaatgtttcaggtgagttaaaaaataacatactcctcatgtcttaagtctagtcctttattatatttcagtttaaggttattagtagtattgcttaaatcttctattttagctcatttttgtctccttgatctattagtctctgagaggggtatgctaaattccataactatgkttttttatgtatctctttccccccataatactgtcagtggttgctttatagtctttgaggccatattattaaacacgtaaatattcatgatccttatatctgcctgatctatagttcttttacagtttatgacatccttctttgtcccttg

SEQ ID NO: 805818 - DNA, 672 bp, Homo sapiens
gagagggaattggtcatccttgttcctggctctacccccatagatacagctatgtggctcatctagggcagcaggcaggtcagggtagaagtaagcacaaggaggcatttacctcacctggtctcaaactcctgtctcccacttattatctgggttatcctacacaagtgaccttcactctctttgcctcagtttctcatctgtgaaatggtgataataaaccctactttgtggggtaatactctcacggtgtggtagagcctcgttacacgaaaatcagatgataaaataaatatgcagcatcacacaaagtcggagccccttaagctgtggcaccacccagcccctggagccaagagaacaggtttagctgtgggtctgcttttctttgccttctgactcccacgtggcccatatccctaagggcagaatcaatttgtaccgaagctkaagaggaaatatttctaaaagcaccctggttatttctgattcatatcaatcttccaacttgtttgcagactaaaacttggccttgacttcattccattctcatgacaaccctggttgctcactgaggcatgtttgctttgcttacctaagcctcagtctcctcatctgtgaaacggcgctagcaactctactggatccatctgcttgttgggttgggttggg

SEQ ID NO: 805819 - DNA, 596 bp, Homo sapiens
tagtattgtccctacacacacacacacacgtatccagtacagatacaaccccataggtatagacagcatgtactgaggcagatacatatatgggaataaatgccatctggccacttgcctggggccaaagccattgcttccagttcactttcctcctcatgctccattcaatcaagaagtactacagattgggccccttgctgcattcctggcatagatctagatccacacagtacaggcccaaggcaggacagcaagacccaaagcaggaagaaaattgtggggagaggaagcaggagaacagtctgggtaccctggygacatttgcctgagaagggaggaggctggtaaggggagagaaggtgataggggattctgggagctatagcagagccaggaggccccctccccccgactgccctgctgctcaaaggcccagggtatgcagggcagcctgtgcccagcctttgagccaggtgagtcagcctgacttctgaatattcaccactgcagcagttccaccattccccacagcccactctgcacacagcagccagaatggtctttcaaaatctgatcttatcactccctgctca

SEQ ID NO: 805820 - DNA, 637 bp, Homo sapiens
agtagttgctgaaggctggggtagctgtggcaagttcttaaaataagacaaggaactttgccacattgattgactcttcctttaacaaaagagttctctgtagcatgtggtgctgattgatagcattttacccacaatagaacatccttcaaaattggactcaatcctctgaaatcctgtccctgctttactaagtttatgtaattctctaaatccttagttctcatttcaacagttttcacagtatcttcactgggactgaattccatctcaagaaaccactttgtttgctcattcacaagaagcaactccttatccattcaagttttatcatgacattgtagcaatttagtcacatctttagacyccacttttaattctagttttcttcctatttccataacacatgcagtcatttccttcattgaagtcttgaatccctcaaagtcatctataagggttggagttaacttcttctgaactcctgttaataacgatattttaacatttgcccgtgaatcacagatgttcttaatggtatctagaatgatgaatccttttagaaggtttccaatttacattgcttggatccatcagcccaataactgctatctatggcagctatagccttacaata

SEQ ID NO: 805821 - DNA, 628 bp, Homo sapiens
tcaggcccaggttatgccattttcattatgagaaaggtgtgctgaggttcgtaacattcaatcctagcaagaaatggcagtgtgggtagtatatggttagtgtgacataaaggtgtaggaaaataatgttacatagtaaatgagatctattggacaccaggacagatttattttaggatgaataatggtcctaaatctccccactcaaaacaaacaagcaaayaaacaaacaaaagaaagaaagaaaatgcttaaggttcacccccataaaaattcaaagaaaatttaaaattatcttttaaaaagttccaaaaagtgttacaatattttgatttatccccatgatagatgcttcgatatttattttcaaatagcaagaataaaacagaaaatcttttttaaagtagtgcatgtttttcatgctcctgcaacacttgtgatgagtttgccctttaagtagcccagtagtaggtgtaagatgccaaaactaattctagccagtcccttcctactgctgaacccaggctaaaattgtgacacctccattggtaacatatgattctatgacaggtaattccattcaatagtcaacagaggcagtcacgtagaatatacctgtgtgctgact

SEQ ID NO: 805822 - DNA, 557 bp, Homo sapiens
ttggtttttactgattgtttactttacaaaaaaaaaaaatgtttccctacaccccaagctactaagtaaatctcaaagcatttttgttgacatggtgttaaatgttaaacaatttagggagaatcgctgtctttatattttaacacctcttatttcaaatcattatttgcactcaacaccttcttttgtatcccttttgtcctctaaaattttctttattgagtcctcctgtgctcgttatatttactaccttttaacatttatttgaaatgggaatttaccttcatgatatttttgtagtgttctttgttttaaactaattggtttttataaaytaattttcagcttaattattttatcctttataaatatttttgactctactaagttttgaaaaaattttgttttacagtaaacaattacaagatctccagagaataatttcatatcctttctaatttttatacctcttattttcctttatctaattgtattgtcttataactcacagacaatactatatagtggtggtaataaagagtttccttgttttgttt

SEQ ID NO: 805823 - DNA, 505 bp, Homo sapiens
tatgaaatgagtagatgaggtattcaaggacatctttgttaaaagtaatagtttttttcatttaatctctaagatgtacatggtgaaagaaatgtttgaaaaaggaaataaattactcttagtaattttaaagagatgttcctaaatacttggacttctcaaaacaggcaaatgaaaaggaggcytggagtttagaattagattgttgaaaaaaaattggggggtatattcaaatctcaaataccatagtgaattggctaatttggatgacagggaagaaatccaaataagattaaattattgcagcttcaaaaactatagattctttaaatctgtggctgccaaaagggcaaattcaaccagaaaacacaaagacacctttcttgcatttctaataattgaaatagttaatattttatgagtatttattaggaacaacgtactgttctaattactctgcaaatatattcactcatttgtttcttacaagcttatgagattggtg

SEQ ID NO: 805824 - DNA, 613 bp, Homo sapiens
gtctcatataccaggctttcctagaggggaagtgaatagaccaacttggcacttcaagaaccacttggtcctgaccacagacatggagaaaagacaaaaatgggaagctgcggacagatggactaagtaggctgctgctcctaagttaggcattttgctcggtgcaactttctaatttcttccaaaaaaggacttttagagatataggcttcaccagacatgtctttcctcacagatccaaagaaaaattaccaaactgggagcaagacacagttttatcagcataaaaattctcagtaaatctcaaggtatcaatcatatgaaaacatcagtgtttctcaggaagaggtggyctccatcctagatctctaaacagggctctcaatcttcaagaaaggcaaggcaaaagttgctatgtttgatttaatcacatacctaaaccttccaaaatgagtttggcaaaaccccaaattccatctatcccctaggacatgtcgcccttttcttcaagctagcgtgacttttccttaaattttaatattgaaattgctcttatttgaaggatcctttcaatatttttatgcaagaagcttaattcctaagaagactctga

SEQ ID NO: 805825 - DNA, 540 bp, Homo sapiens
cagggccagccttgctatcctaacacctcttcagagagctgtgtccctactacagtgtcctgcttttcttaatataattttctctctagtgttttcttacaaacatgtttttttttcttttaaccttgattgcaaattcttctgcagcagaagttatctgttctccttttgtactttcccacagagcctgtacaaaatatcagccacaaagtasaatttgaatacagtgtatgaaatgaataaataaatgaatgagtgaataatgtgtggtggatgacatggcctcggtactgagggttggttagctggtctgaggctgatagacatgtgagtaaaaataataaaattagcctcttgttctttccagatggaaaggagtctggttgcagtgattacatgttaatcagcaatttgggtttggatgtttgttagaacatgaactggcattgggatttcattgtctctgagtcaatgtacattttgagtttcttcttcaattcaagattttgtggggcttaatttaaactgtagttaacttgg

SEQ ID NO: 805826 - DNA, 443 bp, Homo sapiens
gatcaaggatctagtgacaagttcaaatgactgcgttgagcttagaagttaatgattgactgatagcaatgacgcagcctgactttttctgctcttgagtctcccagtttgttaaatgattacaggatccttatgcatccttttgggctattttctcatctctaaaatgggggaaatgtggatgtgaagatacatccagcttctctayggagggatgaaaattacctattagcggcctgttttgaagagccagtcctctgtagtatcaggcacttagaagtggcagccttatcttcactatttcatctactttttggatgcaataagaccaactatttcatttcctgatcttctgatggagtgtcctttcttcccttccatatgctttctcccatcatatttctatttggcagccatcattaacatgaggtccttgcttaaca

SEQ ID NO: 805827 - DNA, 443 bp, Homo sapiens
gatcaaggatctagtgacaagttcaaatgactgcgttgagcttagaagttaatgattgactgatagcaatgacgcagcctgactttttctgctcttgagtctcccagtttgttaaatgattacaggatccttatgcatccttttgggctattttctcatctctaaaatgggggaaatgtggatgtgaagatacatccagcttctctacggagggatgaaaattacctattagcggcctgttttgaagagccagtcctctgyagtatcaggcacttagaagtggcagccttatcttcactatttcatctactttttggatgcaataagaccaactatttcatttcctgatcttctgatggagtgtcctttcttcccttccatatgctttctcccatcatatttctatttggcagccatcattaacatgaggtccttgcttaaca

SEQ ID NO: 805828 - DNA, 564 bp, Homo sapiens
ctcctacttggatttcacccttttgggaaggttagcaacagtagagccaaactgaacgtgagagaagaaaagaacaattgttgtaatccttgcctaagtccttattactcattgtatcccattttgtatacagctaaggctgcactggctaaatctttgtagaatatctcttgttaatcaagtgtatgcattttgtgaagcttgtgggcagacattttataactagacgtgtaaatcatgtccagtaaaatatactgtccaataaaaggtataatctccataaaaccagaattaattgggaaaattgtctgggaggtttattggaaagcaaatgattttgcaaaacactaaaataattatttaagggaaacaatatttaaaaatacaaaagccattctatttgaaataaaaataatatattctgagaaaaytgatgcatggggattttctaaactcatacattcaacacccatttgcttagcactcattaagcagtgggaaaacatagatctctgcccttaaggaacaaaatatctgttataagaaaagagccaaagcctgatt

SEQ ID NO: 805829 - DNA, 547 bp, Homo sapiens
ccattcaggcttgtgtagtgggtcctcttcagcctcatacctttaatttctattacatgattaacatttcattggtaactttgtatttttatgtatatgtgtttggtttgcttcaccatactatattatcagtctattgagtgcaaggatgttctatttatttccatattcccctaagattcttagttgttttatcttcaaatagaatgttctcagtatatgcttacaaattcatcctagttcgggaaacactttcttatatatactccttttgaatgggaagatgaaagtatcagtgggtaatttatcaaaaggcatgtagctgggggtggaatcagaacacccaaacatcagtgcttagratataaagtatgtggtttagttccctgcatccttaagaaatatattcagatgtcagcagtagataaatgttaacagaataggtgtaactaagctctttgtataaagagctgtgttttagaaaattaggcaagcatattcattaggtactaaggattggtgactttcccatcagatctgcagtgag

SEQ ID NO: 805830 - DNA, 605 bp, Homo sapiens
agaggctactctctgacccctcctcatagtcaccactccttctctctctttctctgtcagattcctccatctgaatattttgaattttcaaataagactccacacattggagtttggggagctgagtcatgttcctggcagagctctggtttatgttcctcagattttytagtgcctttcaaataaaatgcattttttactcaagctagaaaaagtttttgtgcaccttgtaactaatcgtggcataaaaacagagtcaaaagtcaataaaagaaggaaagaatgtgcatttcaaaattactcatccatatagatttccttatcctatagatcaaattataacccctaaagtaagctaaaacctcttagcatgacacagccagctagaaaaactaattagtcttattctctgaccaaaaaaattaataaaacaatgataccaaacctttgaggattaacttcctgaactgtacagtacagaaagaaacagaataacggaaaggaattcagcaaaataatgatcattattgccccaaaaacacaagctcatgtctaccaaatcttttaaaaatatcaactttatgtcacatattaaagtgaattta

SEQ ID NO: 805831 - DNA, 601 bp, Homo sapiens
cactctggtgggggatattgataatgggaaaggctaagcatgcataggtaccaaggttgtatggaaaatcctgtgccttctgcttgattttattgtaaacctaaaactgctctggaaaaataattaattaaaagcaaaacaaaacgtaacaccttaaggtgtgctttaatttttttccattgtttatttccttagaggtctcattccattgtgttatatataatatacgttcaatacatgcttgatgaatagcctatccaattttggttaataatgaatccaaagaaacatttctttttgaataaccagaatataatcttatatctttagtgaaaatttatgttttggttaggtttttttttattaagtaattaacgatatttggctcatcatgtragttgattaaaatgtgtaagtgaaatgtatgtttacttatatcatcagatgacaataaataatttgtattattaataaaaaatgtaaagcacacaaataagccataacctcaattaaaaagtcaaacaacgctcttaaagctccacattatcaggtggcattactcagtcagaggtatctttataaactcaaaacctgtaatttg

SEQ ID NO: 805832 - DNA, 505 bp, Homo sapiens
agaaaaatggagcagaaagcacaaaatttttataacctcccaccccacgacatacacacagtttcccctactattgatatattgcattactgtggtgcatttgttataagtgattaagcaatattgatacattttattaaataagttctatagttttcattagaagtcactagtgatgtacattctatgggttttgacaaatgtataatgacatgtatccacccttataataccacagagaataatttcactctccctctaatgctctgtgttccacctatttatttctgcctycttctctccctgtacccccacacaccaggcaatcacttttttattttatttttttactgtctctatacagttttctctttcccagaatatcacatagttacaatcatatagtatgtagagctttcacattgccttctttcacttggtaatagacacttacgttttatctatgtccttctatggcttgataactcctttctctttagtgcta

SEQ ID NO: 805833 - DNA, 620 bp, Homo sapiens
atgtggctaggttcaaacattattgctgtcacctaaagacctttctacagcttaaagataaatacaaataaacataaacctacacacacttctaataaagttgtttaccgataaacaaccaaaatctctgttagtctcctttagaccacgtaccaaaattttaatctacaaaatgtaatcaatctatkgatcaaatgatgcactaattaaatgcctgccaaaggctagaacatttgctagatgatagaactataatggtaaaaatgacatattttctaccctcaattttagttatttagccggggagacatatacattctgtatggcaaggggaggtgtgggaggagactttgggctacctcaggggccagatcacaaaaggcctaacgaggcaaactaaacatggcttattttcatatcctgagagacttcagtgccctatgatatttatgtgatctttaagtttaataaacctttcaaaaaaatgaagtgtactgaatttggcataacttttgtttgtgaaccatttttatcttccagtacacccttatttcttcccaagtgcttaaaagccatagatttagtaacctgttaaataattttgcaggaatgtgacacag

SEQ ID NO: 805834 - DNA, 500 bp, Homo sapiens
tataaaattttagaaccagtttattaaattccactaagtaagagaaagaaaaaaaaacctgttggagtttttatgagaattatattgggtgtggtagcctgtgcctatactcctagctatttgggaggctgaggcaggaggattgcttgagcccaggaggttgaggctgcagtgagccatgatcatgccactgcactccaacctgggtgatagggaggtcaaggctacagtgagctgtgattgccccactgcactccagcctagagtgagtgccagagtgagaacckgtctcaaaaaacaaattaaaaaaagtaaaacaactaaaaagaatacaacatcacttgcatagtagtccttccatttttgcactacctgagcttagtcatgaggaaacatcagacaaacaggaattgggagatatttacaaaggaactgtatttttctcaaacgcccgtatgatgaaagataaataaaagctgaggaattgtgccattataaag

SEQ ID NO: 805835 - DNA, 569 bp, Homo sapiens
ttcatttatattttatgtcacattgaatatgccatttcaacaagtgaatcgtcaacatttcatattaattacacacgatgggtccttaggaccctatggcttaccttggttaagaacgactccattcacttcgatagggtttgaaatgaaaaaaacaaacaaaacagggtgactaatgagagtgactcaatagacttatatttaacatactttgcttctgcccttttctttcatttgatgtttgtgggaaatatttgtggtgagctagaattaaaagtctatactttttcattggagcacttggtcagagcagagtgctcataagatttagatcaaatgtgtttgatccctaccagcccagaacctggaacaggctactatcccagragagctaatcatggccacataggatagtggacaagagtcagggggacctcaggagccaggagactccagacagtcagcttaaatgtcttgctttagaactttcatgtggcagcaaccttttattcaatgtctattcatttgtccctgattagtgacaagcacaggactgacccattgtagct

SEQ ID NO: 805836 - DNA, 606 bp, Homo sapiens
tttatcattgcttgtcctggagaggctgaggacaaaattttagcaccctgtctagaaatctccttagctagatcatccattgcattaagtaaaaatttctatttttcatgtgatggcagctgaccattttgctttactttctttttttttctttyttttttttttttttggagacagtgtctcgctctgtcacccaggctggagtgcagtggcgcgatctcggctcactgtaagctccacctctcgggttcacgccattctcctgcctcagcctcccgagtagctgggactacaggcgcctgccaccgtgctcggctaattttttgtatttttagtagagacggggtttcaccgtgttagccaggatggtctcgatctcctgaccttgtgatccacccgccttggcctccattttgctttactttcaaccagtacataacaagggtcctccttcctccagctactgataacattgtcctcactttcctttagtacttccaggtactttctgccaacagcaaagccaagattagattctaacatacttggaactttcattctcagtgtaggccaggtcagaacacaagagcacaaatactgataatg

SEQ ID NO: 805837 - DNA, 629 bp, Homo sapiens
attctgcacatgtatcccagaacttaaagtataatttaaaaaattacagaagaaaaaatgtgtaattttttaggcagtaagaaacaaatacccaaaagctgaattgttaaaaattccaaatttagtgggattttaattcatgtgctacactccccatctattcaggttatccttgtatgggaagagtcacattaaagatacttgaatggaattaagtagagacttaaaggtgcagagatttgttttgagtgacgggattccttggtttccacacctttagagcacaggcccatgtgtggcctctcagggtattctgccagtttcctttgcttctgcccgtctcaatcttagcatccacatttctctgtgtttctgtccagtctcctagyccactgctttccttcccactatccagctcagaatttatctccaactttttgccccatgcatttggcctgacacaaagtggtgtggcctttgacttggcctggggacatgcacatcattccctgtttccacccattctcagacgctgccctggcaagggaatgtcatgcaagatgtcttgcttattaatcttagggacacttatgccattaaaaaaaaaggtgatttcatcacacgcaact

SEQ ID NO: 805838 - DNA, 644 bp, Homo sapiens
tttacatccagtccggcttcctgtgtgtccgaaccctgtagcaaggttgatgttccccgcttctatgcggcaggttgcattgttcttcaaggttatgggcaggctctgggaacaaagcacataaatcgactgcaaaagagactttcttggaggttcttgccttccaagtagtgtttgcaaatacacgtcctgtcgtgaaagaagtgagaagaataggaaggcacggagggcataacaggtggaaataaacaagagagataaataaaaagaattaatctaaaggcttcactcgacttargcacagttttaaggggcctggcctatgcttggggacctatgtttcttgttgggctctgttggcctttttgatgtgagtgatgaatctaagcaggaatgctggccacttccagagctgtcggcatggtgaggatgacagtatgaggtcctttctaagcaggagtgagtccttctttctggaactttttttttttttttaaactttaacctggaactttttaacaccaggtcacccggtgggaacgagtggcagggccccgtctggtcaggaactggactgggatgagctccccagacaagtggcggatgatatctcgtacctgttggagagactgtaggtactgtaa

SEQ ID NO: 805839 - DNA, 543 bp, Homo sapiens
agtcttacctaatttttaccggtctctaagatcaattttgtaagagtattttttagggtgtgattcatgtgttctacccatccagagctctggggtcgataggcacaactgagcttccattgaatgtttaatgccttactgactgactgagctatggacgaggtgaaggccgatctattatcagaccccatggcagcaggcagcccatgttgagggatgatttcattgagtgaaaacttaactaccgtggtggcagtctcgtttttggtggcaaatgcctcagtctatccagaaaaggtgtctactagtaccwgaaggtatttgtaccctgcccagtgtggttttatttctgtaatttcccacctttctcctggtgagtctccctggaggcggtcgcctgagctgggtttaggaccttgcttagtgtttacctgggcacaagccgtacaccagagagctgcttggttaactaagtcctgaaggttggggatcttgaaacggctccttagaagctgggccagttttactcctccttcctgattt

SEQ ID NO: 805840 - DNA, 540 bp, Homo sapiens
aaagtctctatggcacgaggagccgtaagagttaaattttgacttagagtcagtttatcagtctcctgaatcaggcttgctgtggctgctatggcccacagacaacttgtccacctggaggccactgggtccagtcttttagacaaatagatgmctgggcatcaccatggccctccgctgtgacggtctccatgggcttccgggggccaagagagagggagccccggcccttttaatcatcagattcctctgctgcggggagattgaggacctttgtggggaaaatagagagagatcagactgttactctatgtagaaagaagtagacataagaaactccattttgttctgtactaagagaaattcttctgccttgagatgctgttaatctgtaaccctagccccaaccctgtgcttgcagagacatgtgctatgttgactcaaggtttaatggatttagggctgtgcaggatgtgctttgttgaaaatgtgtttgaaggcagtatgcttggtaagtcattgccattctctaatctcgag

SEQ ID NO: 805841 - DNA, 540 bp, Homo sapiens
aaagtctctatggcacgaggagccgtaagagttaaattttgacttagagtcagtttatcagtctcctgaatcaggcttgctgtggctgctatggcccacagacaacttgtccacctggaggccactgggtccagtcttttagacaaatagatgcctgggcatcaccatggccctccgctgtgacggtctccatgggcttccgggggccaagagagagggagccccggcccttttaatcatcagattcctctgctgcggggagaktgaggacctttgtggggaaaatagagagagatcagactgttactctatgtagaaagaagtagacataagaaactccattttgttctgtactaagagaaattcttctgccttgagatgctgttaatctgtaaccctagccccaaccctgtgcttgcagagacatgtgctatgttgactcaaggtttaatggatttagggctgtgcaggatgtgctttgttgaaaatgtgtttgaaggcagtatgcttggtaagtcattgccattctctaatctcgag

SEQ ID NO: 805842 - DNA, 707 bp, Homo sapiens
taaagtttcctggccagggttagtaaattccttcctctgagcttctatgcaataactatcatgctaaaattgaaatacttgcttttttctccaattataaaaaagttcataatactaaaaattgagaaatgcatcaattatgaaaaaaataaaacaaaatgcccataattgtctcacagcayggccatccagaggcaatcacatattgccctgttgtcttcttttttactatgtgtatattatatatgttattctgattattttttctccatttaaccttatgccataaacattttcctgctattgaaaaccttttattgtggaaaatttcaaagacataaaaagtatagagagtagtgtagtgaatcctcatgtacccatcactaagtttcaacaactaacaactcatggccaaccttgttttctttatacccccagctacttcttcccttgggattattttgaagcaaatttctgatatgtcatttcaattgtaaacttttcaatatatatgtttaaaacaatggctctgaactaatggtgatttgccacccaggggatatatggcaatagatagagacatttttggtttttacaactgggaatgaagtgggggttgctcctggcatctagtgggcagaggccaggtatgctgctaaacattctataatgcacagcagggatccccaacctgtccatggcctctt

SEQ ID NO: 805843 - DNA, 604 bp, Homo sapiens
atgctggtgtaaacaaactctaatgccagtattacaaaagtacagcacatacaattatgtatagtacataataattgataataaatggttactagtttatgttatttactatacaatactttgtattgttattttagagtgtactccttctacctattaaaaaaaaaaagttaactgtaaaacagcctcaggcagatccytcaggagatattccagaaggcattgttatcacagatgactgctccatgtgtggtactgccccgatgaccttctagtggaacaagatgtgaatgtggaagacagatgttgatgatcctgaccctgcataggcctaggctaatgtgtgtgtgtgtgtgtattcgtttttgacaaaaaaattttaaaaagttaaaaaaaaatagaaaaaaagctcataaagatataaaaatatttttgtacacctgtacaatgtatttgttttaagctattagaaaagaataaaaaagctaagccaaactaagaagtttattaagtaaaaaagttatagtaagctaaggttaatgtattattgaagaaagtttttcattttttataaatttagtgtagcataagtgtatagtactta

SEQ ID NO: 805844 - DNA, 604 bp, Homo sapiens
atgctggtgtaaacaaactctaatgccagtattacaaaagtacagcacatacaattatgtatagtacataataattgataataaatggttactagtttatgttatttactatacaatactttgtattgttattttagagtgtactccttctacctattaaaaaaaaaaagttaactgtaaaacagcctcaggcagatccctcaggagatattccagaaggcattgttatcacagatgactgctccatgtgtggtactgccccgatgaccttctagtggaacaagatgtgaatgtggaagacagatgttgatgatcctgaccctgcataggcctaggctaatgtgtgtgtgtgtgtgtattcgtttttgacaaaaaaattttaaaaagttaaaaaaaaatagaaaaaaagctcataaagatataaaaatatttttgtacacctgtacaatgtatttgttttaagytattagaaaagaataaaaaagctaagccaaactaagaagtttattaagtaaaaaagttatagtaagctaaggttaatgtattattgaagaaagtttttcattttttataaatttagtgtagcataagtgtatagtactta

SEQ ID NO: 805845 - DNA, 518 bp, Homo sapiens
gtttgattttttttggtaggtcacatatgttaggaatattatatttctttgagaatctacccctttatcattatgtggtacttttcattttctctgttaatctcccttgatctaaaatctgcttttcctgaaattagcagagctactccaactttctttttgattagttagcatagtttatcttttgtagtgttagcatgatagatctttctccatctcttctaacctgagtttttatatttacactatatttcctgcagaaaacacgtagtttggtgtttttgttttgtttttaaatcgatttttacaattactatttgttatttagatcattcrcatttaaagtaattattgatataaatgaattaatagctatcctctttgcaactattttccattcattgggttttattccattttatttccctcctctttttcttccctctctagttttaattgaacattttatataattctgtctctaaatttagcattatcattgtacattgtttaaaaag

SEQ ID NO: 805846 - DNA, 503 bp, Homo sapiens
aaacatagaccctattcttcaatagtcttcaagacatttcttccaaatatctttggaagaatggtctgccatattaagttctattggtatattttaatagtattatgatgattaaacccattaccagctttttttttaattgagagaaaaatactaataagtggtttttctttaaaattgtatctgtaccttggtaggcctggagaacattgatattctgctttggtgtatatgttgactgcwaccataattagttcacttttaacatggctgtgattttcccaccaacatggttggtggcttgggctactatcatatatttctatccctttgcaaaattgtaacaacacagataggtaaataaatataacagccaacataatacagataattagttttactataaagtaatgacttataaatattgcaaagacaaagatgatttatgtttaatttggatacatgattgctttcagaggagttttgggatcagaacagacagg

SEQ ID NO: 805847 - DNA, 630 bp, Homo sapiens
ccacctttaagtaatactatttataatgccgaaaataatggtatagaatttcttactaaatgtctagacttgtataatcgcagaatcattcatttaaggtttaatctaaaacattccaataatttgattggttacatctatcagatctatcatctctaaccacgcaataaaatatgygcttgtgtgctgaagtgtttagggatatatcagccatagtataaaatgagctccggtaaattaataataaaataacataatttcaaaatgatatgaatagtgataattctagttaaataaaagtgtctcttttttgtctcattaattatgaagatctttagtcatggtaacgctatatttaaagaatttaagattcaagactgtgccacagccttcaactattcttttaataatttaaacatttttacttgttaaactcaaagcctgataaatatttgtaaagcttcatttacaccacagcgatcataaaatgcaagtgtttagttcatcattgtctattaactttcaataaagtaactgaattttgtttcgatttgagtacataactgtaatattaaaaaaattcagacttctgaatcacattttaaagttaaagtaattgtataataattt

SEQ ID NO: 805848 - DNA, 633 bp, Homo sapiens
ctgagattgatacttttataaatagggtaaatattaaaaattaaatattgtaaatagttctattcaactgaggttgaggctattgtaaatagtgctgcaataaacataggattgcagctatcccttcagcaaactcccttcaagtcttttgcattaatactcattagtggaatttctggattatatgataattctatttttagtttgttgggaaatctctatactgttttccataatgactgcacaaacttatttgtttgtgcacatttgtatactatttccaccaatagtatacaagtgttcccttttctctatatccttgccaacacttatcttttttggatataaaacgttcctttttgaaatgaagtatgagataaaaatataatagtaaacattttagaagacattctgacaggtgagagatggtakctcactgtggtttgaatttgcatttctctaatgattattaatgagcatttacccatatgtgatggccatttggcactatatatatctgttggtatctttatgtatctatatagatatatagacatgtatgtttaagtttaaaatgtaccattttatccatttttaagtgtacacttctgtggcattaagtacgttcatact

SEQ ID NO: 805849 - DNA, 508 bp, Homo sapiens
tgttcaaactcctttcttttagccctcaaaatacatctcacatccctaccatgaagttttccctggatcaaatggaggcaaagtagcgaaaaatgcaaacaagagataacagagactcaagcacattcccagctctttagaaagttagaactgaagcttcctgagctagcagcacattcatattctctctcccttgaactcagaccaaagagaaatgaaatgcacatgggggtggggggcggtggtgaggattttctgatktttaatgtgatttccatatttgctttcagaatacaagttccgtctgcttctttttttatgagaaaaggaaatcgtgcatttaatcgtctttgaatattactaattttatatttcaagtatctggtaatttgattttcataattaatcttaacacgtattcagaacacaaaaaaactcaataccatgtgaagagaagggaaacaaaaaaagtcctattttcatctactacagaaaatattaagtcaaa

SEQ ID NO: 805850 - DNA, 621 bp, Homo sapiens
cattcctttttatggcagataatagcccattgtatggatataccacctgtttttttaaaaagtccattcatcaattcatgagcatttggtttgtttctactttttggtagaatgatgctgccatgaacacttgtgtgcaggtttttgtgtggacatagacttaggaatggaataaccatggagttacggtaactctacatttaagcatttgagaagctgctggcctgtttttcatctgcaccatttgcattcccaccagcatcragtgggagctccagtctctccatatcctccccagcagtcggttacccttttctgttgcctctgtagcactttctaaacataaaattagcttatttctttgcaggtgtctattgcaccccccaggaatgtcagttccctgcagactctcactctgccttggcacccgcaccccagcacccaggggtgaggtgcctgcctgggcagccctgtcctcacctggggttgactgaccagagaacccttgcgattctctctctgggtttctgtctgcattcctgtcgggataggtgagactggggtgacggctgctcgcggcttggtcaccttcttctctgcttacctgttcatgctctcttg

SEQ ID NO: 805851 - DNA, 635 bp, Homo sapiens
gctttgtgctgtagtaaatatcccaccatgaacatgtatgtgcaaggacttaacaagtcctttgaaagctgatttttggctgtgacagtttctcagactttccttgttttggatgagcttgatcattttgaggagtactggtcagggttggttggttggtttkttttgagacagagtctcactctgttgcccaggctggagtgcagtggactgatctgggctcactgcagcctctacctcccaggttcaagcaatccccctgcctcggcctcccaagtagctgggattacaggcatgcaccaccatgcccagctaatttttgtatttttagtactgtcagagtttcaccctgttggccaggctggtcttgaactcctgacctcaagtgatccgcctgcctcgggccctcaaagtgctgggattacaggtgtgagcccccatgcttggcttaaggctggctttttaaagccccgatccctttgctcgtctgagtatttcacccccgtgggttccaagctggctttggagaagggcacacggggatatcccggtgatggccgttccaatatgaggaaatggcaggttttcttttctttcttttcctttctttttctttttttttttttgagacagag

SEQ ID NO: 805852 - DNA, 603 bp, Homo sapiens
tcctcccactcatttgctatctggccaccctatttgagatccgaagtcaccgtgttcattggctggcttatctgttgatcgtgtttctccctgactaggctctggggctctgcgaaggcagggaccttggccatctagttcaccagggtattcctggcaggtagggcattcctgtcacatagcaggagcttggtaartaaatagtacatgagtgggtgaacggacaaagggatgcatggatggatggatggacggacggacagacgactgagtcaattctctgggctcttcaagtcagctttttgtgcctctctagtggagctcaggaagcctgggttcccccctgggaaggccattcatgacccttgccttccccaggagtcttcatctctgagtcccgtgcctagccctccccattgggataacaacccttttgcctgcctgggcttggggacctccagaccctcgggaaggtccatctgctctgtctttctgggctaaaaggttcctgtgttctgctcagagctgcaccagggcagagttttctctcggggtgggctgcatccttagtgtggggtatgggatgcagtgtctgaggtcgag

SEQ ID NO: 805853 - DNA, 471 bp, Homo sapiens
cttgagcacaagtactgagggccctagttggggtgctatgaacatacgggggaaacactctgaattggggatttattgggggatttattcatttgttctttcaattaataaatacttcctacaaggaggccagcctcagtgactgaaatcccagcacttttggaggccaaggcaggaggatcacttgagtccagaaattcragaccaccctgggcaacatagtgagactctgtctctacaaaaaatacaaaagttatccaggcttggtggtgcatgcctaaagtcccagcaagtcgggaggctgaggtgggaggatcatttgagcctagaaggttgaggctgcattgagtcatgatcgagccactgcattccaacctgggtgacagagcaagaccctgtctcaaaaacaaaaacagttcctacagggaagcaggcaccaagatctgtggggattgaagagtcccagctcac

SEQ ID NO: 805854 - DNA, 471 bp, Homo sapiens
cttgagcacaagtactgagggccctagttggggtgctatgaacatacgggggaaacactctgaattggggatttattgggggatttattcatttgttctttcaattaataaatacttcctacaaggaggccagcctcagtgactgaaatcccagcacttttggaggccaaggcaggaggatcacttgagtccagaaattcgagaccaccctgggcaacatagtgagactctgtctctacaaaaaatacaaaagttatccaggcttggtggtgcatgcctaaagtcccagcaartcgggaggctgaggtgggaggatcatttgagcctagaaggttgaggctgcattgagtcatgatcgagccactgcattccaacctgggtgacagagcaagaccctgtctcaaaaacaaaaacagttcctacagggaagcaggcaccaagatctgtggggattgaagagtcccagctcac

SEQ ID NO: 805855 - DNA, 455 bp, Homo sapiens
aaaatgcctgttaatcttttctttttgagatggagtctagctctgttgcataggctggagtgcagtggtgcagtcttggctcactacaacctccatctcttgggttcaagcaattctcccacttcagccctccgagtagctgggagtacagacgtgcactaccacatccagctaatttttgtatwtgtagtagaaacgaggcttcgccatgttgccaggctggtctagagctcctgacttcatgtgatctgcccaccttggcctcccaaagtgctgagattacaagtgtgagccaacacgcccagctgacagctattaatcttattgaggatcctttgtctgtggtgaatgggttttctcttgctgctctcaagattctctctttagctgtctttccagggttttataatgacgtgtctaggtgatgatctctttgaatttatcttactttaagt

SEQ ID NO: 805856 - DNA, 590 bp, Homo sapiens
actattaatccagatgtaaacaaccagatgtttttttctaacttgtacaaactgacgtgtgtcaactatcatggaaggaaaaaaatgtacagattaaaattattcagtgttatgtactgtaagttaatatttttgtagaatggacatcaatctactttgcaaratttggaggctatttcaacattgcactgtagaaatgtaaagtaatgtatgcaatgtaaaggaaagcccgcggtagctgagcgcttcataacagaatgttctaatcaagtacgtggtatttggggatgtctccaatattgctcttgtattctttctaattgggtttagtgactagttgaaggaaaatgttataacgccatttggttcacatgtgaagtgccctccatagcccaaatgttgggatttttttttttttcgttttgttggactgtttgcagatatttaaattttatgaaatttccaaagattttggttgataacccccttttaccttctaaatgatttgagatgttcttatgttcttactgtgtgttttaaatatatataaaagagccacaagcatttagtcttttagtattatatttgat

SEQ ID NO: 805857 - DNA, 577 bp, Homo sapiens
ccagggcaaagtaactcagaggcaaattcaggtctgttgatgttaaagccagtagacatttcatgatcccaaagttgctggtgttgtctggagtttagagggtggattcactggcttggattaaaatatgtctaatgccctttctcatccagaatatggctccccttgtgtgactgcaggccttccacctccctctctgatgatgttcttcctctgcaatgcagcttctgcaggcttctttccaatcagattatcaagcaccccattagcctgtctctcccagaaccttcacacataccagggttttcctctttctctttaattcaaacacatcttttccatyatctggattctgcctatgatcgtcccatcaactcagagaaacaaaaacaagaaaccagtgcaataacgtcctgggaccttagatcatggatcaaaaccactgtagtgggcaccgggaagaaggcaaacttgttactaaaagaaacttaaatctcttgcagctataaaacatgcaaacagcttaatgaaaagaggaaccactggaatctctgaatgcttatttttgatcgtaaca

SEQ ID NO: 805858 - DNA, 603 bp, Homo sapiens
tagatagaatgttctgtacacattacattgcatgcactgcacacacaactacaaaacaagtatttaatgaaagggcattatcagcatataaactagactggaaatccagcagcttgacaataaactgcattttaggtaccctgagatctgacctctgagaacagcagtgaccaccttggagctggcacttcctggaatgctttgctgcattacacattaaaggtatatgctcagggagtaaaggaaacagagcttaatgaaaaatacctctatcgaggccaagccaagagataggtcaggtctatatccatacagctagtctaaggctgaatctcagtttctcagtgtacaaccagcaaccagtagaaataggcyccaccccaaagtggccccaggctctcagcttcctggctcacttttccactctccgtggatagtatatgcctgcctaaaaatttataaaagaggttaataatgaagcagggtacagaggtcacctctcaggctgcccatattttacctcataggtagttgccttcaaccatctactaggatttagactaaggcattacattttaaactaagagggaaagctcatcagtc

SEQ ID NO: 805859 - DNA, 601 bp, Homo sapiens
aaaatatgatcacttcaatagatccagggaaatcacgtgacaaatttaatacccatttataataaaaatgctcagcaaactaggaagaagagaaaatatcctaaatctcataaagaacatctataagaaacatagagctaacagcatacttagtaaagactctatgtttcttccctaagattaagaaaggcaaaaaaatttgtattgaccacttctattattattgctttggaagtcctagctggttcaataagccaaggaaatgaaataaaargcatacagattggagaagagcaagtaaaattgtttttatttgtcgaagataatgaggtgtatatagaaaatcccttcaaatccatttttaaagtgactagcactaataaatgtatttggcaagtttgcatgacacaaaatcaatatacatgaattaattacattttatatgtctacttaatactgacaataatcaactgggaagtaaaattcttaaaagctactacttacagtatatccccaaaacatagaatattcagggttacatttaataaaaaaaaatgtaaaactgtactaaaaactataaaatatggcactgaaaaaaaat

SEQ ID NO: 805860 - DNA, 601 bp, Homo sapiens
aaaatatgatcacttcaatagatccagggaaatcacgtgacaaatttaatacccatttataataaaaatgctcagcaaactaggaagaagagaaaatatcctaaatctcataaagaacatctataagaaacatagagctaacagcatacttagtaaagactctatgtttcttccctaagattaagaaaggcaaaaaaatttgtattgaccacttctattattattgctttggaagtcctagctggttcaataagccaaggaaatgaaataaaaggcatacagattggagaagagcaagtaaaattgtttttatttgtygaagataatgaggtgtatatagaaaatcccttcaaatccatttttaaagtgactagcactaataaatgtatttggcaagtttgcatgacacaaaatcaatatacatgaattaattacattttatatgtctacttaatactgacaataatcaactgggaagtaaaattcttaaaagctactacttacagtatatccccaaaacatagaatattcagggttacatttaataaaaaaaaatgtaaaactgtactaaaaactataaaatatggcactgaaaaaaaat

SEQ ID NO: 805861 - DNA, 668 bp, Homo sapiens
ttgcctcttggcgtcatctttttaaagctcgaatgagttcaacttcattttgtaaaggagtcaaaggaagaggtgaaaggacttacgccagggcctggacagagcccaggctcctgacttctctgccagttctcttagcattctccttcctaaagtcyttcctaagtagctaacttaaagattccaatgggcagtcaaacagcatgagagattagtcaagaaatggaagaagtagagttgtgtaatgcactgtaaggcgtcaaggcagttaatcatactcaaaggcacaagacagtgcaggtgaacagtccaagactgcaaacaaccaaaaaccaaaccaaaccacaggattaaagctcattcacctcacatattttcagtattatcaagtcaaggaatatttactaatggaggaagaagaatcctccttcacgtccaagtgatggttaaagggcgatctccattatcacataaataggaaatgtgcttagaaataacacatatatgtcttcagtatgctgacaaataagagggtatttcttataagtggaaacatttcactggtgtaagctgttaaaattgtgacacttttattctatctaaatcagttggagtatttaaaagaattaactaaatagttctaagtgccccaaaacaattcatggtaa

SEQ ID NO: 805862 - DNA, 595 bp, Homo sapiens
actggatggagaatcaaaaacaggttggactgacttataaggaggcacaatccagaatgcaaacctcaagcgcactgactgcttgaaaaactctcccatttcacctgccccctaattctttctgttcttcatcccgttggcctacactgctcattttgccctttgcatgtgttgtaccatgtgttgctgtcttctgttttatatttatgatctgttttctgaaatctcccaggctgcaggtgtgtcattccttacctggtcactctctatgtctggtagataagataattgatgctcattttccggtgatgaggacgatgatgatgacgatgatggaaaattatcttgcaatgcctgttctccacttctttaccttccttccacactcactacttcaatgaaactgctcaagacctcctggatgctgcagccaaatgtcacttctatctttcagcaacatctgacactgttgacaatttcctccttctggtcagatctgcctcccttggcttctctgactctaagttttccaggtcctcctatccrtcttgacttttaaattcaattacttctcaggcatacccatttgaaaggc

SEQ ID NO: 805863 - DNA, 602 bp, Homo sapiens
atattcatgtgtgcatgtgtgtgtgtgtgtgtgtatgcactccaacttttttttaaattttgggtggagatgatcacataaatcatattaattgtttggattcaaaatacagcaagaataagacaacacttgaggcttatgagcctcaggaagtataaatgaatgtttcagcagagagatgtaggaagtccagcactgctccccggtgcctgtgtcgcaacacagaactttctgaatggtggttatttggcctctgtggggtgcttcaaatgtactgagactgatatctcccaaagaagcccattccatttttaccacaaattggcctctttgtagatttcactcactgattctagtttcagcttctagagctctgtggcgttaagtacaaaccttttttttttttwaaacatattcaaccctgttgcctgccacaccactcctttcctctgtgactgaagtctgctctcttataggcagaccacgcccacctgctccagcaaccatttgtaactcactctcttatatattttaatttttattcagaagcatgatagctattttccattgaggttttgatttgctatttttatattcatgca

SEQ ID NO: 805864 - DNA, 685 bp, Homo sapiens
tggaaaaatcttcctgtcaccccctatattctaaaatatggtgatgtttcctagtgtggatgtactggaaactggtaggtcctttcagtctggaaaatatatccttcaattattctggaaagttttcttgaattatttatgatttactcattttttttctttttcttcacttttcctagacaagccctctaaatttattcttattgtttatttttcatctctttrtccttgatcaaatttttgagaaattttcttaactttatgtttctaacatttatattttttaaaaaaattcattttgaaataattttagatttaggaaatattgatcagaaaataagtagagaatttcccagtgaacttcttctagtgttagcatcttacgtaactatagtacaatgatgaaaaccatgaaataaaattgatgcaattctgttaattaaactatagacttaattttgaatttcacccttttttcactaatgtcctttgtctgttattagatccagtccacaatttcacgttgcaattatttcttacattttcttaattttctccaatctgaaagttccttattctccccatgtctttcatagtcttgatactttttggacagtactgttaagttacattttagactgtctcaatttattttgtctgatactttcccacattgcattgaaat

SEQ ID NO: 805865 - DNA, 685 bp, Homo sapiens
tggaaaaatcttcctgtcaccccctatattctaaaatatggtgatgtttcctagtgtggatgtactggaaactggtaggtcctttcagtctggaaaatatatccttcaattattctggaaagttttcttgaattatttatgatttactcattttttttctttttcttcacttttcctagacaagccctctaaatttattcttattgtttatttttcatctctttgtccttgatcaaatttttgagaaattttcttaactttatgtttctaacatttatattttttaaaaaaattcattttgaaataattttagatttaggaaatattgatcagaaaataagtagagaatttcccagtgaacttcttctagtgttagcatcttacrtaactatagtacaatgatgaaaaccatgaaataaaattgatgcaattctgttaattaaactatagacttaattttgaatttcacccttttttcactaatgtcctttgtctgttattagatccagtccacaatttcacgttgcaattatttcttacattttcttaattttctccaatctgaaagttccttattctccccatgtctttcatagtcttgatactttttggacagtactgttaagttacattttagactgtctcaatttattttgtctgatactttcccacattgcattgaaat

SEQ ID NO: 805866 - DNA, 577 bp, Homo sapiens
agccctctaaatttattcttattgtttatttttcatctctttgtccttgatcaaatttttgagaaattttcttaactttatgtttctaacatttatattttttaaaaaaattcattttgaaataattttagatttaggaaatattgatcagaaaataagtagagaatttcccagtgaacttcttctagtgttagcatcttacgtaactatagtacaatgatgaaaaccatgaaataaaattgatgcaattctgttaattaaactatagrcttaattttgaatttcacccttttttcactaatgtcctttgtctgttattagatccagtccacaatttcacgttgcaattatttcttacattttcttaattttctccaatctgaaagttccttattctccccatgtctttcatagtcttgatactttttggacagtactgttaagttacattttagactgtctcaatttattttgtctgatactttcccacattgcattgaaattatgcattttttggcaagaataccacagatgcaatgtgcctttctcttaatttatcttaacatttttgtgtatg

SEQ ID NO: 805867 - DNA, 566 bp, Homo sapiens
acaagcaaaaaataaacaaccccattaaaaagtgggcaaaggaagtgaacagacacttttcagaagaagacatacatgtagccaataagcacataaaaaatgctcaacatcactaatcactagagaaatgaaaattaaaacaacgagrtaccatcccacaacaatcagagtgactattcttaaaaagacaaaaataacagatgctggtgaggtttcagagaaaagggaatgctcatacactcctggtaggagtgtaaattagttcagccattgtggaaagcagtttggtgatttctcaaagaacttatttgtcccagcaatcgtattaatgggtatatacccaaagaaatataaatcattctaccataaacacacatgcaggtgtatgtttatcacagcactattcacagtagctaagacatggaatcaacctaaatgcccatcaacagtagactggataaacaaaatgtggtatatatacaccatggaatactacacaaccataaaaaagaatgtcatcatgtcctttgcagcaacatggatgcagctggagctgtaggagctgg

SEQ ID NO: 805868 - DNA, 566 bp, Homo sapiens
acaagcaaaaaataaacaaccccattaaaaagtgggcaaaggaagtgaacagacacttttcagaagaagacatacatgtagccaataagcacataaaaaatgctcaacatcactaatcactagagaaatgaaaattaaaacaacgaggtaccatcccacaacaatcagagtgactattcttaaaaagacaaaaataacagatgctggtgaggtttcagagaaaagggaatgctcatacactcctggtaggagtgtaaattagttcagccattgtggaaagcagtttggtgatttctcaaagaacttatttgtcccagcaatcgtattaatgggtatatacccaaagaaatataaatcattctaccataaacacacatgcaggtgtatgtttatcacagcactattcacagtagctaagacatggaatcawcctaaatgcccatcaacagtagactggataaacaaaatgtggtatatatacaccatggaatactacacaaccataaaaaagaatgtcatcatgtcctttgcagcaacatggatgcagctggagctgtaggagctgg

SEQ ID NO: 805869 - DNA, 619 bp, Homo sapiens
tcaggcaaaggaatagtatgtgcaaaagccctggggtttaagaatatgatgtttttagagaactgcaaataattcagtatggttggagcagagggatgtggaatgattattgattctgttggagagtagacagaggccagattgctatgcttagatacaatttcaaccacctacaaatccatctaattacctacatgaccatcatcatctggtcatgtttctccattttatcattatgtataccttaaagacttgctcacattacttaaaattgagataggttaggcatctatccaatctcccatgccagtaattctacagaaacagattaggttagctagataagcatgtttacaattaaatttatgctgtatccttctaatcaccactttctcatcaaaatgctyacaaatcatctgcatcattgtccattctttaaaaatgtataaacccatctctactaaaaatacaaaattagctgggcatgatggcgcacgcctgtaatcccagctgttcaggaggctgaagcagaagaattgcttgaaccccggagacggaggttgcagtcagccgagattgcaccattgctctctagcctgggcaacaagagcaaaactcc

SEQ ID NO: 805870 - DNA, 619 bp, Homo sapiens
tcaggcaaaggaatagtatgtgcaaaagccctggggtttaagaatatgatgtttttagagaactgcaaataattcagtatggttggagcagagggatgtggaatgattattgattctgttggagagtagacagaggccagattgctatgcttagatacaatttcaaccacctacaaatccatctaattacctacatgaccatcatcatctggtcatgtttctccattttatcattatgtataccttaaagacttgctcacattacttaaaattgagataggttaggcatctatccaatctcccatgccagtaattctacagaaacagattaggttagctagataagcatgtttacaattaaatttatgctgtatccttctaatcaccactttctcatcaaaatgctcacaaatcatctgcatcattgtccattctttaaaaatgtataaacccatctctactaaaaatacaaaattagctggkcatgatggcgcacgcctgtaatcccagctgttcaggaggctgaagcagaagaattgcttgaaccccggagacggaggttgcagtcagccgagattgcaccattgctctctagcctgggcaacaagagcaaaactcc

SEQ ID NO: 805871 - DNA, 638 bp, Homo sapiens
tacataatggtaaagtgttcaattcaaaaagaaaatctaactatcctaaatatacatccaccccaatacaggagcacccagattcataaagcaagttcttagagaccttgaaagagacttagacttccacacaataatagtgggagactttaacaccccactgacactattagacagatcatcgagacagaaaattaacaaagatattcaggacctgaactcagaactggatcaaagggacctgatagatatctacagaactctctaccccaaaacaacagaatatacgttcttctcatcatatggcacatagtctaaaattaatcacataatcrgtggtagaacaccctgagcaaatgaaaaggatctgaaatcatgaaaagctctcagaccacagcacaatcaaaatagaattcaatattaagaaattcactcaaaatcacacaactacatggaaattgaaaaacctgctcctgaatgacttttgggtaaataacaatattaaggcagaaattgagaagttctttgaaactaatgagaacaagatacagcataccagaatctctgcaacacagctaaggcagtgttaagagggaaatttatagcactaaatgcccacatcaaaaagttagaaatat

SEQ ID NO: 805872 - DNA, 644 bp, Homo sapiens
tattcatcatttacatatttacttcattgttcaacagatatctgttgagcatgaaggactgttgcactggggatatagctgcacacaaaatagataatcctggctttcataggacttatattccaatattccagtagtgacagataataaatagataatacgtgagctaagcttaagaaatctgaaaatggagtaggaaaaggatatatagtgaggaataggaaaggtgctattttagacatactttgtatgtttgagggacaactaagagcacaaagtgtgtggagagcacaataaggaaaggggggaaatgagatcagrgcagtggcagggacaagtattatagcatcttacaggaaggtaggtgtttgggcttttattctgagtgagatggaaaccattgcagggttttgagtggaagagtgccacgatctgactaggttttacaaggctcactctgctgtactgtggagaacactgtgaaggcaaggctggaagcagagcgaccagttgggagacaatttaaataacttgggagagaatggatggcttcagattaagggcacagcaatggaaatggggagacatgttctggaatctaaatgcatttccaaggttgagctgacaaacagtgctgatgaatt

SEQ ID NO: 805873 - DNA, 644 bp, Homo sapiens
tattcatcatttacatatttacttcattgttcaacagatatctgttgagcatgaaggactgttgcactggggatatagctgcacacaaaatagataatcctggctttcataggacttatattccaatattccagtagtgacagataataaatagataatacgtgagctaagcttaagaaatctgaaaatggagtaggaaaaggatatatagtgaggaataggaaaggtgctattttagacatactttgtatgtttgagggacaactaagagcacaaagtgtgtggagagcacaataaggaaaggggggaaatgagatcagggcagtggcagggacaagtattatagcatcttacaggaaggtaggtgtttgggcttttattctgagtgagatggaaaccattgcagggttttgagtggaagagtgccacgatctgactaggttttacaaggctcactctgctgtactgtggagaacactgtgaaggcaaggctggaagcagagmgaccagttgggagacaatttaaataacttgggagagaatggatggcttcagattaagggcacagcaatggaaatggggagacatgttctggaatctaaatgcatttccaaggttgagctgacaaacagtgctgatgaatt

SEQ ID NO: 805874 - DNA, 586 bp, Homo sapiens
tttttgcaatgagatcctaaaaatctttggctaatcaaatcacttggacagaggtagagataaaaaaaaaaaaaggcaccctcaatttttctatcctatgttaattggaccaatgatggggctaaggagacccctcagagcttgaaggtgtttctgtcacttagtggaaagctgacgcaaaacacttaacatagctagttggattgcacatggatattatggatgctgcctggagcaactgtctagattaaaaattggcttatgagtaacacactatactctggatgaaattcgtagggtkggatttaggcttgctttttaaaatgtttcattttagatatccaggttattttaagctatatcacgaccatcttacagaaggtgtgtagaaaaataataatagttaagaaacagaatatctttatgttgaaaggctgatttttttatagtaagatgtagttaaatttataggtccatattttacacacacacacacacacacacacacacacacacacatacatactgttagcaagactagctaacaccatcaaagaggtccaaattctgttgggcatgtggagct

SEQ ID NO: 805875 - DNA, 645 bp, Homo sapiens
agccttgtgagactaaacagagaatccgactgagccacattgtacccagactttctccacacaggactgattgctaagtttgtggtaatttgttatggcagcaatagaaaactaatacaacagctggcagtctgtggggaagagagctgaggtggcaatgaatgccatgccagaggacaaccagacccttatacccctttttttttttttctgagacaaagtttkgctcttgttggtgaggctagatagagtgcagtggtgtgatctcggctcactgcaacctctgcctcccaggttcaaacaattctcctgcctcagccccacaagtagctgggatgattacaggtgcctgccaccatgctggctaattttttgtatgtttagtagagacgggatttcaccatgttggccaggctggtcttgaactcctgacctcaggtgatccgcccacctcggccttccaaagtgctgggattacaggcctgagccaccgtacctggcctcttgtacctatttttcagtttctcacccagtaaagcttttgacctgccctggtggtctgggttcttgctgcagacttacggtataaaattcaggcaatgattgtcccaaaggaatgttactgctggaacaggcaagagctaa

SEQ ID NO: 805876 - DNA, 645 bp, Homo sapiens
cttcctattttgccaactcatgaggttggctcaatgagggaggagaaaacaccaacagttatgatacaaaacccaccagctgattgacctttttctacatctttctcaagcccggggtaaaggatatttcactgttccctcaacagtagtccagtatgcttatggataaaagttagacgctgctttccacctgggatagagctctgggttggagcctgtcgcccagcctttgtcagttgcatgattatggctrgctcgcttacactattgtgccttagtttgcttatcaggaaattggggataacaatggcagtttttcagcagcagaagtctgaaaaaggtgatccctcaggatccttctacccttaatatgtggagccctataatgaacgatttagcctcgtgaaggctctgctacagacaactggattgggaacgatgccacaggagaaagtcatcccaactaaaaagtaaactaatcttttgcactttgcatttaagcaaatctgagttcttaaacctttccctatacttaactcagtttcacaagcaggaatgaacttccaagttacctctctgtgaataatgttctatcacacatctgcatcatcgttgcatgtcacagaggaactccataaagctaac

SEQ ID NO: 805877 - DNA, 610 bp, Homo sapiens
gctccgtttccatcggaaaccaaaaagagccatctcaaggttgaagtgagaccggtctcaaggcccttgcgatgggctcatgttggcccttcagtgcacctacccaacatacaggctctgtggtggaaaatagggagcataggaatgacgcaagtgtgtggctgagagcaagaccgtgtcttcaacaattgcttcatcctgtctcccagaactgctcacaggtacacgaaaatggtttacrtcttctctcctgtaattcaagggctcaatactaaggtagagctttaaacattgagaaattcagaaacaaggacgctgtgagccatgctgtgagttttccactccactgatagtgtcaaaatatggctgtggggttgcaatggccatcagagtttgaccatcgttgtcttgagttggttccctaaaatcagtgcctgagatgggcatttgggggccagtgattcactgcccgaatgctctaggaagtgggggatacaagagaccaacagagtatcagcttcctgtatttccccttcctagaccagggggatctcagcaggcttgtggtcctggctacagaccagcttcagcctggtcccaccaagagctc

SEQ ID NO: 805878 - DNA, 567 bp, Homo sapiens
atcaactgagactctccaggggaaggatcctggcatccatatttgtcaaactcctcaggtgattccagagtgcagccaaggctaagcatgagctatttgagggcagcgtatctgtcttactaatcattatatctccrgggcttcctatggtgcttggcacagagtgggttttcagttaacatcagtgcctcctgtcagtatctcctcatggatgtcaaatgacttcaaccaacaggattctgaaaccaaacccagagcccgtctctcttccaagttttccttctcagcatttgcatccccatatatctagtagtatgagccagaaatttaggattcaacttcaatgccccctatcacccccaacattcgggccctttactgtgcttgatgatttgacatgctgaatctctctcatatctatgcattcatttctatacccaccagcaccacccaaatactatccaagtatccaaattcaagatactatcatcaatcccctcaactaccttaaaagctcccaagctgggctatctctgtagcgtagtccaaccaatccattctccacac

SEQ ID NO: 805879 - DNA, 567 bp, Homo sapiens
atcaactgagactctccaggggaaggatcctggcatccatatttgtcaaactcctcaggtgattccagagtgcagccaaggctaagcatgagctatttgagggcagcgtatctgtcttactaatcattatatctccagggcttcctatggtgcttggcacagagtgggttttcagttaacatcagtgcctcctgtcartatctcctcatggatgtcaaatgacttcaaccaacaggattctgaaaccaaacccagagcccgtctctcttccaagttttccttctcagcatttgcatccccatatatctagtagtatgagccagaaatttaggattcaacttcaatgccccctatcacccccaacattcgggccctttactgtgcttgatgatttgacatgctgaatctctctcatatctatgcattcatttctatacccaccagcaccacccaaatactatccaagtatccaaattcaagatactatcatcaatcccctcaactaccttaaaagctcccaagctgggctatctctgtagcgtagtccaaccaatccattctccacac

SEQ ID NO: 805880 - DNA, 460 bp, Homo sapiens
tccctcctgggtatagccgggcctcagctgtggcagcctttcacacccttcaaagcctgccatcaccctgcaggcccctggcccctacccttctcactgttcttcacaggggttcttcctgcctctctcatccccagcagccccacagcaaagaacctgacactcctgtgctgaccagccagaggctggttgcaaaacccctctctgctgcagtcctactcctgcctccccatgcccctcacactgtgcctctccagatatggtctccaaaacgcgggacaagaagccgaagcctcgggcaggcatcggcwttctgagtcaccatgcttcccagctgcaggaattgctgggtcaggtgtgaaaccacatttctgtccctcctcatctctgtctcacctcccctgctccccacacctgggctttgctgggagttggggctgaggctggagcagtcctcact

SEQ ID NO: 805881 - DNA, 585 bp, Homo sapiens
catactcatacactcagctgcattcttcacccaagaattgggccagtccaaaactgtctgaaagatgttattgtgtccacctgagtcagctcacagctccaaggcccaccaggccctgggttgcagctgtcctttccccaggagggcatttaatatctgctgtctcctgcctgccttaccaccagtgcaggccctctccctgtcacccggttggacattcccctcagggtcctcactcactgcaactgtggctcaaatcccaggaggctctgtgtgactgggccagagattactggtcctggtgaagcttgggtattgcaagaggcagaattttccacctccctgtgctggggccttcggctgaccggccaagctgcagcggtgrggagggagggcatccacagcactgtggatggctgatggtggtgtaattttgtccaatagtcaatacattgcttagaaacaggcccaaggtgctgtcttccatcattcaagatgagtatttattgatcatttaaatttaacttttttaaaattttaattgaagtatacaaacagtttaaaatgcacatgtcattagtgtgc

SEQ ID NO: 805882 - DNA, 585 bp, Homo sapiens
catactcatacactcagctgcattcttcacccaagaattgggccagtccaaaactgtctgaaagatgttattgtgtccacctgagtcagctcacagctccaaggcccaccaggccctgggttgcagctgtcctttccccaggagggcatttaatatctgctgtctcctgcctgccttaccaccagtgcaggccctctccctgtcacccggttggacattcccctcagggtcctcactcactgcaactgtggctcaaatcccaggaggctctgtgtgactgggccagagattactggtcctggtgaagcttgggtattgcaagaggcagaattttccacctccctgtgctggggccttcggctgaccggccaagctgcagcggtgaggagggagggcatccacagcactgtggatggctgatggtggtgtaattttgtccartagtcaatacattgcttagaaacaggcccaaggtgctgtcttccatcattcaagatgagtatttattgatcatttaaatttaacttttttaaaattttaattgaagtatacaaacagtttaaaatgcacatgtcattagtgtgc

SEQ ID NO: 805883 - DNA, 601 bp, Homo sapiens
ctcacaacaaaattacaaaaatgtttttatttcatcatacaaagtgctatcctgtacatcatgaaaatttcttaaagcaatatcaaacaagtctcaagctttttgaggttggaactcctttatactcttaaaagttactgaggaccccaaagaccccttttgaggaccccttttgtttatataaattataactatcaatttttgccaaattagaaattaaaactgataacttttaaaacccaacacacaagcacacatcccattagtcatcagagtgatggtgacatcacacactgagtaacttctggaaaattccactgtacactcgtgagagaattagcctgaaaagggcaaatgatatcttagcattacaggttargtatcccttatccaaaatgcttgggaccagaaatgttttggttttcagatgttttctttgaatatttgcacatatatcatgagatatcttgggatgggacccaagtctaaacacagaattcacttaggcttcatatacacctaatacgcatggcccaaaggtaattttataaaatatttttgataattttgagcatgaaacagttttgtctggattgtgact

SEQ ID NO: 805884 - DNA, 644 bp, Homo sapiens
catagtttccaacccccaatgggccttcaacatggcactgccatcctttccccatctccttcctcggttctctcacccatcacccacaatttcaagcttcctcctccatccacaaacctcccaggccccctcactcttcccgcacagtctgcctccggtgctccagaaagactggaaatgaggtgagctcccttggatccctgcctgccacctgcaaatatcatgtggtgctacttgccctcctgtccctcctcccgtcccaggccaatcctcccacccccttaattgcccggggatctccattacttaaacctttccactggtacctctcctcccacacaagcctcctcagctgttttccrtctttaaccaacaccttccctggctccagctactgccacttcatcctctcttgcagccatgcttcttgaaaaagtggtctccattcaccatgccccctcctccatcttccgagcccaacaaacacagtctcagcactactcaataggagctggctctgccacaccacaggaccttattgagtgcagtggatgcttgtcagtccttatcttgcctggcttctcaacatctggtcactatcattgtttccctggttccacatgacccctgggtccctcctacct

SEQ ID NO: 805885 - DNA, 561 bp, Homo sapiens
ttctctcactgcactctgcccctccactacacccctctcatcacaacctgctgtgctacctggaaacgtgcctgccacactctgctcctgctggaaaggactgaccggcaaggacacctgaggcctgggttagaggggggcatcttctgtgcactgcaggcatacctcaaccaaagcctgagcccccgcacccttctggccagctcctctgacttcccacccaggtatagcatctgggggccagcctgcaacttatcagttttctattcccaccatctgacccggagcttggtgcctggtaggtgctcttcaaatatttctggatgaaatgcaaaacaaaacaaaacaaaagacccaaaaaaacgaaacaagagatgcaggagttgagacaagcatattggatttggtgagtaggaccccttcaacttaaccctttcctggtcttcagtgattttcaaataaygaggaactgttttcacagtgactggagggctcttctggtagttggtgccaggggctgctgaacatcctgctccgtgagggacagcagagccatcctgc

SEQ ID NO: 805886 - DNA, 602 bp, Homo sapiens; identical to SEQ ID NO: 775498

SEQ ID NO: 805887 - DNA, 602 bp, Homo sapiens; identical to SEQ ID NO: 775499

SEQ ID NO: 805888 - DNA, 602 bp, Homo sapiens; identical to SEQ ID NO: 775500

SEQ ID NO: 805889 - DNA, 436 bp, Homo sapiens
aggtggagggatagtatgaaagaaatgttgatgatgggggaccagggtgaagcatagggaggaatttaatctgtctggttggctggaggtggcagggaataaatagtgagggccaaggctgagaagtaggaagaggtgaggacgtaagtataaaggaaattggatttgccctggggttactggagagcaattaaatggttttgagcaggaggtggcataatcaaggtagtactgggataagataaagacagccaacatttrtttagcaagtatgtgctgggcattgtagtaagtgcttcaaaaggagttattaaatcctcacaaccttcttaggtagtatcatcccattttatagatgaggaaatagagtcacagagatgcaagcaatagaatggggatcaattgaagacccagaaatcagagacaggaagcttag

SEQ ID NO: 805890 - DNA, 658 bp, Homo sapiens
tacggatcctgactgtggccgccccgccccacgtgagtcttccttgtggtatgtattagacaagactccaaaaccatgttgagctgggctgtgtgcgaagacaaatgttatttttagtcctcatgacgttggtatccttactccaaatttacagatgaaaatgtgtgwatcaagacatcatattgtacacctaaaatatataaactatttcttaatattatgtgaataatgaaaataaagacattgcagcttctataaaaataaaataatactacaaaaaatgagaatggaagctttatgaatttaagcatttgggccaggcgcggtggctcacgccctgtaatcccagcactttgggaggccgaggcgggtggatcacctgaggtcaggagttcaagaccagcctggtcaacacggtgaaaacccatctctaccaaaaatacaaaaattagctgggcgtggtggcgtgcgcctgtaatcccagctgctcaggaggctgaggcaggagaatcgcttgaacctgggaggtggaggttgcagtgagctgagattgcgccactacactccagcctgggtgacaagagggaaaccctgtctcaaacaaaagaaagaaagaaagaatttaagcattttgtcaagaatccaaatgctggtaact

SEQ ID NO: 805891 - DNA, 579 bp, Homo sapiens
agttagagttgaggacgttctcaccgccttctcagtaactgataaaactactaggcaaaaattcagcaagcacacagaagatctaaacaacatgatcaacctactgaattaattggcataaacactgcagccaacatcaggagaacacacatttattttcatgcgcccatgaagcattcgcaaagataratcatatcctggcatagaaaaacaaacccaaacaaaattaagagaattgaaatcttacagggcatgtgctcaaatcataacggaatccagctagaaatcacaaaccgaacaacaacaggaagttctctaaatacttggaaattaaacatgacacttctaaataactcatggtccaaagaggaagtctcgaaggatatttaacaaaaaaaaagataactggaagaaggtgaaaatacaacatgtcaacatatgtgcaatactgctgtgatgatggtatatttacagcactacatggttacgttagaagagacaggtcacaaattaacaacaattctacatcaagaagctggaaaatgattacgataaaatgaaacagcataaggaagaaat

SEQ ID NO: 805892 - DNA, 646 bp, Homo sapiens
aaatggtattgctagaggttatattaagtgaacgtttggcatttaaatttaaagggccacccactgttttcatagaggctgtgccattttgcattttcgtcggcaacatttggctgttcaacatctaccccagcacttgctcatgtcagggttttttttcattgtaagagctgtagcgtggtgtcttgcggtgttcatttacagtttctttaggattaaagatgttggcttctttctactctgttttttggccatccatatatcctctttggtgaaatgtcggttcaaatcttttgcctattttttaatgttgggttatgttttttcatattgttgactctgaaagtttttttatatactctagaaacaagtttttttttcagatamttgatttgtaaacatttttctttccatctggctcttatcttttcattttcctaattgtgtctttagaaggacaattagctttttcatttgaaagtctaatttttcaatctttcctctatggattatgcttttagtatcatatttaagaacattttacacaaccctaaaatcacaaaaatcacgaagatttttctcctatttctaaagaagtcttgtaatcttgtgttttacatatgcttattatcttgtttatgaacta

SEQ ID NO: 805893 - DNA, 543 bp, Homo sapiens
actattcatagcaactccaattagattatggaaatatatgtgaaaagcaaatcaacatgttttcttagaaaataatgccagagaatattctcatgaatttaggataagggcagtttattaataattgaaatgcacagagcaatcatcatgagcacattaaaattaagaaatcatgcttatcaaataaatagcatcaagaacktgaaaaggcaagccatacaaagataaaagatgtttgctaaatatatgaccagcaaaagattagtgggtgccagaggtcagaaaaccttttctgtaaaaggccagatagtaaataattcagactttgcaagccatacagcttctgtctcaactactaaactctgcccttgtagcatggaagtaagtgtggctgagttttaataatactgcattcaccaaaatatggcaaatcagatttggcccatagtccagagtttacccattattggtgtatagaatatataaaaggttgcttcaaaacaattaaaaaacaattaaaagactggcaacccaaaataaaga

SEQ ID NO: 805894 - DNA, 553 bp, Homo sapiens
taaaacaccaaaagcaatggcaacaaaagccaaaattgacaaatgggatccagcttcagcacagcaaaagaaactatcatcagaatgaacaggcaacctacagaatgggagaaaaattttggcaatctatccatctgacaaagggctaatatccagactgtaagaagaacttaaacaaatttacaagaaaaaaacaaacaacaccataaaaaaagtgggcgaaggatatgaacagacacttcttaaaagaagacatttatgcggccgacaaacatatgaaaaaagctcatcatcgctggtcattagagaaatgcaaatcaaaaccacaatgagataccatctcacrccagttggaatgacgatcattaaaaagtcaggaaacaacaggtgctagagaggatgtggagaaataggaatacttttacactgttggtgggagtgtaaattagttcaaccattgtggaagacggtgtggtaatttctcaaggatctggaaccagaaataccatatgatccagcaatcccattactgggtatatacccaaaggattat

SEQ ID NO: 805895 - DNA, 670 bp, Homo sapiens
ccctctgtgtaagttcccttatctatgcctgcagcttgaatttttaggctgttctttggtttaaaacaatttacccaaggacccaccctaactgactgcctgaccagtttcttcctttctcctctctcattgtagtctcagataccactagctttcctgagtctcaagcttgcagatggcagactgtgggacttctcagccatcataattgtatgagccagttcctcataatatattttcctatctttcatgcgtgtccatgtgaagagaccaccaaacaggctttgtgtgagaaacttggctgtttatttcactggggtgcaggtgggctgagtcckaaaaagagagtcagcgaagggagatggattaccattagttcttataggttttgggttaggtggtgaagttaagagcaatgttttgcggtcagggtggatctcacaaagtacattctcaagggtggggagaattacaaagaaacttcttaagggtgggggagattacaaagtacattgatcagttagggtggggtaggaacaaatcacaatggtggaatgtcatcagttaaggctgtttttacttcttttgtggatcttcagttactttaggccatctggatgtatacgtgcaagtcacaggggatgcaatggcttggcttgggctcagaggc

SEQ ID NO: 805896 - DNA, 610 bp, Homo sapiens
tctctgtgtatatgtatgtgtgtgtgttagaattaaaaaaggaatcaagaagctgaggtgggagagtagcttgagcccaggagtttgaggctacagttacatgctcacactcctgcactccagcctgggcaacagagtgagaccaagtctcaaaaaaataaaaatagaaaaaggaatcattgcatgtgagaatacatgaaactctttttgtgttcattagctacagaatgtttyattgtttgtagtcccataaagtgaaataagttaattagtctgcaaaaactctacagtattaacaaaaaatacataatttaaaaacaaatggacaaagagaaaatgtgtaagggccagtaaagcagagcatagttgttaaaggacttgttaacatattataataggctgttagataaactacagcaaacattcttttgaagtcactactatgctcaaaatcattaaaagagcatcctatgggccttagaaaaaaacaatatgtaaaaagctgagactgatcaggctgctcccagaacatataaacttatcattcatagggtgtggagagaaaatgttaatgccagagtgaaacaaaggcagtgagtccatgaaatat

SEQ ID NO: 805897 - DNA, 618 bp, Homo sapiens
gtaccagctcagctgcaatacaatagaataccaggtagacttctacaatttttgactctagtccctgactactggactgtacttctggactcacccaggacctggtggacctcgccatcctgaagggaatgacacaagccttgctgcctttaatatctactgatagtcgagtctcagggccttgagctaacataggtggtggcctgggagtggttacagcaggmcttgggcaagacttagtgctgtgttggcttcagatcagactcagcacagttatagtgatggtggccacaggggtgcttgtgtcactccatccccagctttaggtaactcagaacagtgagagagagagagagagagagattctgtgtgtttgggaggttgtaagggaagagaacaatagtctttgcctgataatccagagaattctcccagatcttgtccaagaccttctaaggtggtatggtacctctacaagtctgcaagaaccacagtattactgggctttgggtaccctctaaagcagatggagtttagatcacaacacccaagtcatttcaaatacccagagagacttcccaagaaggacagctacagataagcctggacattgatgac

SEQ ID NO: 805898 - DNA, 596 bp, Homo sapiens
ccaaatgtgcgtgggtattgtttaatcttgtgagggcctgcataaaataaaaaggtggaggaatgagaaatttgccctttttttcttcctgcttgcctccataaactaggacctcagtcttctcctgccctcttttgggatttatatcatcagcttctctggttctcagtcctgttgaaacagcctcgttgtctgagtgccacatgaatttctttgtctcacagccgaggaaatcaaggaaatggacattccaagggtgaggttagagcagaagtttaataagtgaaagagagaaagctctctgctgcaacccccaaaaaggttgctgttattacagttgaatgcaaaggctcttataaacaacaaatgagggctggrcatctcatttgcataaggagcaaatttctggcagctccaccccaatctgttgtgcatatgggcccttagtttgagttactccatattgctttgctccccttactgtgcctgtgttgagggatggaattttccattgtgggcatgtctgggcaagtcacatgtgtagcctttcttatctatgtggctgtgggcatgtcttaggcaagcccctctgtgta

SEQ ID NO: 805899 - DNA, 596 bp, Homo sapiens
ccaaatgtgcgtgggtattgtttaatcttgtgagggcctgcataaaataaaaaggtggaggaatgagaaatttgccctttttttcttcctgcttgcctccataaactaggacctcagtcttctcctgccctcttttgggatttatatcatcagcttctctggttctcagtcctgttgaaacagcctcgttgtctgagtgccacatgaatttctttgtctcacagccgaggaaatcaaggaaatggacattccaagggtgaggttagagcagaagtttaataagtgaaagagagaaagctctctgctgcaacccccaaaaaggttgctgttattacagttgaatgcaaaggctcttataaacaacaaatgagggctgggcatctcatttgcataaggagcaaatttctggcagctccaccccaatctgttgygcatatgggcccttagtttgagttactccatattgctttgctccccttactgtgcctgtgttgagggatggaattttccattgtgggcatgtctgggcaagtcacatgtgtagcctttcttatctatgtggctgtgggcatgtcttaggcaagcccctctgtgta

SEQ ID NO: 805900 - DNA, 627 bp, Homo sapiens
agacattggtgatcccattaacactgagtccatggccaacagcactggaactcacacctgagtaaagctatctcacatttctctgtgaggcacatcacagcctcttgctcttaggacgctagacagtacatcagtactgggcttggggtcattttaaacagcaaaatcactaacaaaaatcacagaaatgtgaagaatatggygctatgtgggccgtgaaaagagcacttgttggtggcatgagctgaaatgaaatggtggggcgtcacctgtgtgacctcagccaggcccatggcctgtggctgactctggggtggcaccgtgctggcaggtggggcacactcaaagatgagctgttattatcaaagggtgtgaaatttccagacaaccactgacttgatgaatcctcttgggcaccagagcgtgtgctgcatctgagatgctggctggggagcccaggcagtcgaggggagaggagcgctcactgtcttactggaaacaagctgtttggagaacaacctgtttttactctccttttgcaagcaaaacactcccactgaggtaaggctgcacgggcaacactgactgagctctgcctttctaaatctgtttgttctcttgacctcg

SEQ ID NO: 805901 - DNA, 465 bp, Homo sapiens
gccccatctctactaaaaatacaaaaaattagctgggcacctgtaatctcggctactcgggaggctgaggcaagagaattgcttgaccctgggagacagaggttgcagtgagccgaggtcgcgccactgcactccaccctgaccagtaagagcaaaactccgtccccagaaaaaaaaagcacaacagtggstgccagggctgggagaactgggaagtgatggaagcagggcttcttcgttctgaactcaactgtggtgatgtatacgcaatgtgaatgagcccacagccattcactgtacacttcaaactggtgaattgtatggtacataaattatatctcaagctgtttaaaacaatatctaaaaaggcacaaaattaaaataaaccctgtagtacttgaccagactaggggttactgaagtgaactcattgttttcaacacacagatagaagaatagagatag

SEQ ID NO: 805902 - DNA, 569 bp, Homo sapiens
tgtggtaactgtttaacatttttaagtattgctaaattgttttccaaattggctacaccattttacattctcaccaggaatgtgtgagggtttcagtttttccacattcttgcccatgcttgttatttatgtacctcgtgaaccccaaaaatytgagacaggtctcaattaatttagaaagtttatttttccaaggttgaggatgcatccatgacactgcctcaggaggtcctgatgatatgtgcccgaggtggtcggggcacagcttagttttatacattttagggaggcatgagacatcaatcaatatatgtaagaagaacattggttcagtctggaaaggcgggacaacttgaagcaaggacaggaagactcaaagcgggaagggggcttccaggtcacagatatgtgagagatgaacagttgcattcttgtgagtttctgatcagcctttccaaaggagacagtcagctgtgcatctgtctcagtgagcagagggatgactgactagaatgggaggcaggttgaagggacccaagatactttcctttcacagccttgtattatgg

SEQ ID NO: 805903 - DNA, 623 bp, Homo sapiens
gcagagagactcttgagggggctggtcctggattatcctgtggtgtaacctaatctcaggggtcctcagacgtgaacaagggccgcagaggagatggtcaggtgctggagctgagggcctggctctctgccatgggtcggccgtcgctttacaggcagcagagcccccgaccacggggagctgagttctgcctgtacttgaatgggtaggagacacagccttggttttagttcaggagaccactgggcctctggcctccagaattaagataatcagcctgcattgtggctgccacgtttgtggtaccttgttatggaggcgataggaagctggggcaccctttcctcaggcctggagtatttgggaagcastccagggccgccacgaggggtagggggccgggctcctggggtcagcctgggtgacctgtgcctgccctcccccggggaggactgagaaccaagctgcatgactcctgggccccaaatgacctcaagtgggacatccgctcttgagctctgtgtcctggggtgtagctgtgtgtgttaaagaattctcaagatttacctctgcagcactcttaatattggagtccggtttgagtttatacatgtccacgtccc

SEQ ID NO: 805904 - DNA, 620 bp, Homo sapiens
agacaaaatctccaggttgaagatcatgaagaagctatttaggaagatgttgtaagaagggggctgttgaatattgaacatcaccagtattttgctcgtctgggtgcagcagggcagaggctagtatcagagatgaaatccctaaatgcattacaagttgtcttagtccattcaggctgctataacaaaataccagactgggtggcttataaacaacagacatctatttctcacagttcaggaggctgggaagtccaagatcaaggcagtgatcggattcagtgtctggtgaggtcctaggtcatcatcgaaggccatcttctcaccatcacctcaaatggtggaagaagttatgggtctcccctggacctctgtttataagggcactaaccccatctgtgagggcttcaccatcataacttactcacctcccaaagaccccactcttaataaatcacattggtggttaggatttcaayatacaagttttggtgagacattcagtctatagcaccagttcagagggtaattgatgtcaccctgaaggagggaaccatacggcctgaaggggagtgggattacctttggccaaaggagctccagggtttctgaaatttttc

SEQ ID NO: 805905 - DNA, 537 bp, Homo sapiens
tttccccattgctggccgagtcccaccactttgctcagctatgaacacctgacatctcgtttcattttcatgcaaaatctggagataattattatccacaattctaaggccttaggcccctccgcatgagcctgccattaccacttcattcccttgcacctgaaagactccagagccccttgaaagaacaggtcctccaagaggagcatcgccagccagcccctgaatctcctgaggaaactctcatgcacatatcttgacctgagcacagacyggacgccagcggagggcaggagcaagcaggacacactgtggctgaggaggggaccctgggcttgtgggcctcggagaggcagagcaggggaggcagatgagactgcacacagctttttgtttgacatatcctaagccccctgcacacgccactcaaggtcttctctgtgccccatctggtgcaggaggcctgtctgtctgtgaaattgcttttagcaatagctgtggatcaccactgagagggtgaatatacaaatgaacaat

SEQ ID NO: 805906 - DNA, 632 bp, Homo sapiens
attccaagagaaagagtctgcagatgttacacttggggtcccccatgaaccaggccagtcagagcccccactgacgtgcacccatgtgcagcctctgcttcttgatcagtttttcatgctacgcctaccacgtaagatcacagctgaggatcactacacggttcagaaaaagcccctaagagaaaggaaggcaactaaaacaaaaaaaacaataaaaacttggatgatacagaagcaaagaaggaaacaaacttaaaataactgaaatgtctacagtaaagggtaagagataaaatctaagtttcttcartctctctcaggagataccctgaatggtggaaaaggatggaaagggagggttaaaatgaaagattctgcatcttcaaatgttataatcatgtcgggacttaaccccacacccaagctactccatgcaatccagccctctggtttatatcctaggagatgaacgtattcacatatatgcgaggtgtattcataagatgttacatctgtcagagtcctttagctataacactgattttatacctgtgaaaattaaggcccaagagtcttacatggcttgtggtcatttgtgagccattggatccagatttcctgactctcaagtt

SEQ ID NO: 805907 - DNA, 619 bp, Homo sapiens
cctctattcctagtgtactgaaagtttttatcatgagtggatattgaattttgtgaaatgcttttcttgtatctatttatatgattatgtgactttcatttttagcctattgatgtgataaattacattaattgatattcatatgtkaaaccggtcttgcatatcttggataagtcctaattggtcatgaggtataattctctttatacattgtatgattcatttgctaatacttttttgaggatttttacatctgtgttcatgagagacactggtctgcagttttcttttcttatattgtcattgtctagttttggtattatggtgattttggccttctagaatgatttaggaactactctttctacttctatcctttgagagagagactgcagataattgatataatttctttcttaaatgtttatgaaaattcaccagtgaacccatctgggcttggtgggtgctttctgttttggaaggttattaattgttgattaaatttattcactagataacaggcctattcatattgtggattgcttcttgcgtgagttttagcaaattttgctttttcaaggaattgatccattttatttagcttatcaaatttgtgggc

SEQ ID NO: 805908 - DNA, 683 bp, Homo sapiens
cagacggttcacactcggggggtcaaaattattaagtttcttatttaccagtagcaggaaacaacttgaactaacaagcacaaagggcaacatataggaatgattttgagagtctttacttagaatcctcttccctcagatacgtctcagtttttcttgtttttccttaaaattgttattcaaatgtaactttcttagtgagttcttacatgacctcttttaataaaattataatcccctatagattctcaactccttttacttaacatattgcatattgacttatttatattgtttattttccrtctactctcactaaatataagatccatgagggcagagattttatacaattttaagatttatatatagaccaattgctttggcctcagcaactaaaacgaatgactggcacacaatgagcattcaaatatttgttgaataaatgattgaaattgaattttataaaatctgagaaaaaataaattttgacttcagaaagaaccagggccatgtcctttcaaaacaatactctttagattttttcccctggagacctaccattaacatggaagcccatttttatggatagaatgtgtctaaagtcccgttcgatgttcattctctgttagcatacccaaacagttagtttggaggaagatacaactaacttgcctatcatc

SEQ ID NO: 805909 - DNA, 591 bp, Homo sapiens
cttctattcaacattttactgaaggttctacacagggaaattaggcaggaaaaaaaataaaattggctgggcgcaatggctcacacctataatccaagcactttgagaggccgaggcgggcgaatcacttgtggtcaagagtttgagaccagcctgaccaacacagtaaaaacccgtctcaactaaaaatatcagaattagctgggctgggcgtgatggtggatgcctgtaaycccagctacgtgggaggctgacgcaggagaattgcttgaacctgggaggcagaggttgcagtaagccgagatcatgccactgcattttagtctgggtgacagagtgagactctgtctcaaaaagatatatacatacatacataaaatagaataataaaataaaattcatcttgattggaagggaagaactaaactacctctatttggagatctcatgatcttgaatgttaaaactcataagcaatttcctgtctctccctaaaaaaacttttggaactaatgaacaagttcaacaagattgcaggatataagaacaatatagaaagaatcaattgttttcctatatactgccaaagga

SEQ ID NO: 805910 - DNA, 476 bp, Homo sapiens
acagatgtctcataagtacaacatcttaaaaaataaacttgttttcctctcccatattccatgtcaccaacaaacaaacaaaaaacaaaaaacactcccactgacattttgcttacgtaagtactgccacacattcacttgaaaatgcctgaacccatcctctcctctgttcttccactcttgctgcttaatatataatctcaatatttttttggctaacctactgcaataatcttttcctaattgctctcccctacctccagtttttcccacttccaactgtatttcagttgttgccagagtgaaatttytaaagtgtacatttaaacgggtgacacccacataaacaatttcaatagcccgttactgcctaaaagataaagttctaattacatagtatatccatagctcctttatagctttgcttcagactccacacttctaacccagtctcctgccactactaccatgcatat

SEQ ID NO: 805911 - DNA, 596 bp, Homo sapiens
atttgaaaggagatacaattcagtccatacattctgccctttgccccccacatttatttccttctcacatgtaaagttatattcatcccagcccaacagcccccaaagtcctaccttatttcagcatcaactccaagtccaaagtctcatttaaacattgtytaaatcaggtatgagtgagactcaagacagattcttcctgagatgaattttttctccagttctgaatctgcaaatccagaagagttatgtgcggccaaaatgcttggtgaaaaagaatagaaaaaccattccaaaaggaagacattgtaaagatgaaagaggtagtgaatcccaagcaaatccaaaatttagctaaacaaattccattagatcttaaggctggagaataattctctttgtctaaatgctgtgccatctgggccaaatttgcaggcccactggaatggcaaccccaccttcagggcccaaaggggtgacagtcccataccctcaactctaggtggtaatctcaccttccataacctgcagattgtcccctgaagtcctgtgctaggcagccttgcctgcagaaccaaagaggtgttgcaacctgt

SEQ ID NO: 805912 - DNA, 688 bp, Homo sapiens
aagaggatccatatttcaaaccaaaaaagcttgtattactgagaagaaggagctattcgaccgtgtgacaaactataaataaatccatagataaaggtagtcaggttctactatggacagggtatagctatgtaatttattatccaatccgggacatctttgagtgaaaagggggtactattaatgcttatgccagaacaatacggtgaaccaggactgtcctgggcaagccaagattaatggtcaccctaattagtatagcctttggcaaagaaaaaggcatactgcttaaatccttatatgcttaaattaaatactataaatatgaaaactgtctattcccaagtgcctcaactcttgaaaaacttacaaagccagtctaacccaaatagagaaaaactggacagaacaaaatcaaatttagtgtgtaaaattcttaaacttcacaatctacttataygaattcaagtattatctttttttttttttttttttttttttttgtaaatgatgactcaatctatctcccaagcaccaatcctgaagggaatgctgaatctgaatgcccccataggtggaacttcaaactctcaatgttcaaaacaacatcgctttttcttcacaaaatcttcattatgtatttgatggaaccaatatccttgaaataacataaattccaagctttagg

SEQ ID NO: 805913 - DNA, 644 bp, Homo sapiens
gctcttgactgcaacctttgagcaactctgagtcacagcaacccagctaagatgctaccaaatgcctgacctgcagaacctgggaaataataaatgtttgttgttttaagatgctaatttttttttttttagatggagtctcactctgtcacccaggctggagtgcagtggcacgatcttggctcactgcaacttccacctcctgggttcaagcaattctctgcctcagcctcccaagtagctgggattacaggtgcccaccaccatgcccggctaattttttgtatttttagtagagatggggtttcaccatcttggccaggctggtcttgaattcctgacctcakgatccacccacctcagcctcccaaagtgctgggattataggcatgagccaccgcacccagccttaagatgctaatttttaaagtaatttgttactcagaaatagtgcacatatgaagagctcaaagtcattagtcatcaggagaaaagacaattaaagtaacaagatatcattttacagcagtagccccagaggacctagaaattctagacctggacgtgtatcccaactgaattttcctttaggaccatgaggggaaatgtatgttatttgtggaagtaaaatgagtctccatcaa

SEQ ID NO: 805914 - DNA, 605 bp, Homo sapiens
taaaataaacacaacagatagtgccttaggagaaatcaaaggtgaaaacaagggagaaaaaatgaaatgaagaggatttgggggaaagtaacaaatgtagacactaggtaaagatctagctggcaactggcatagagtaggagcctcaacagagaaatctaaaccaatagaacaagtaataaaaastgtaattcaagaaactttctggcattaaaacaatagatttaaagtaacatgttaaaagaaacatcacacctaagaaaattgtctcagaatgaacattaaaatatatcctagtaagattattggacttcaaaaaaaaaaaaaacacactttgataactatgtagtcctacagttcctagttctgcttgaaaagacctaaaagcaatggctaagccaagagcaatgagcctctctagcacctaatttgtgttcttgaaatatcatttccctgctaaaagaaatcaaatttctaggagaaatggttgatttccaggtctgaggaattaaatgtatgaaatgtgccgagaccagctcggtccgagagaccctaacccagcagcgctacaggaattaaagacatgcacacagaaatatagaggt

SEQ ID NO: 805915 - DNA, 557 bp, Homo sapiens
cattcaccccataaggaaggtatagccaggggagggctgaaaacagagacacctttcacaaaatctaagaggagtattattattattattattattattgagacagagtcttgccctgtcacccaggctagagtgcagcagtgcgatctcggctcactgcaacctctgcccctgggttcaagtgaccctcctcctcagcctccagagtagctgagattacaggcacccgccactgcgcccagctaatttttgtatatttagtagagacagggtttcaccatcttggccaggctgtctcgaactcctgacctcgtgatcctcctgccttggcttcccaaagtgctgggattataggcatgagccaccgcacccagccagacagtattattmaagtgacctttgtctatatgtttgcccatagctgcttctcttctccctagactggaaaatccacagttaaaataagatatattttttgttcctcatattatagtttataaagcatcttaatactcagtactaatcaatgttcacaatctggtgagatcatcaatcta

SEQ ID NO: 805916 - DNA, 573 bp, Homo sapiens
tgtggtatattttatattcatcttgtttgtggtttcctgaactttttgggtctatagattcataaattttattaaacttggaaaaatttcagctattatctcttaaaaaattatttctacccaattctcccttgactcaccttttggaactctaaatatacatatgttggactatttagcattgcactaaatgttttagttaccatgttcttttttaatattactttttgcctgtccgtattttagtacagataatttctatcgatttgtctttgcttatactgatctttcctttgactgtgcctgatctgctattaagctaatctggtgaatttttatttccaatattttttagttttgaaattttcatttggttatcttgattgtttctattgctttgttggaatttaccayatattagccaattctgtccttttatctaatattttaaaaataattatagaagttattttaaagtccttgtctgttaatttcaacatctagttcagatgtggacctgcttctaatatatttttccatcttgactttgggtcacattttcttgcttctttg

SEQ ID NO: 805917 - DNA, 666 bp, Homo sapiens
ctttgggtggtatggacactttaacactattaaaatttccaatccataaacatggatgtctttccatttatttgtgtcttctttaacttcatttatcaatattttagttttcaatgtgcaagtctttcactttctcacttaagtttattcctaagtattttattatttttgatactatygttagtgggattgctttcttaatttcctttttagataggccactgttagtgcgtagaaatgctaatgtttgttgattttgtatcctgcaactttactaaatttttttattagctctaacagttttttgtgtgtggagttttagggttttccaaatataagatcatatcatctgcaaactaagataattttattactttctgatttggatgatgtttatttctttttgttgcctaattgctcaagttagcaattccaatactatggtgaatagaagtggtgagggtgggcattcttgccttgtaccagaccttagagagaaacctttccatttttcaccattatgatgtttcctatgggcttgccttttacggttttattatgttgagatacattccttctatacttagtttattgggtgtttttattatgaaaaggtgttgaattttgttgaatgattttttggatccattgagatgactgtgtgat

SEQ ID NO: 805918 - DNA, 666 bp, Homo sapiens
ctttgggtggtatggacactttaacactattaaaatttccaatccataaacatggatgtctttccatttatttgtgtcttctttaacttcatttatcaatattttagttttcaatgtgcaagtctttcactttctcacttaagtttattcctaagtattttattatttttgatactattgttagtgggattgctttcttaatttcctttttagataggccactgttagtgcgtagaaatgctaatgtttgttgattttgtatcctgyaactttactaaatttttttattagctctaacagttttttgtgtgtggagttttagggttttccaaatataagatcatatcatctgcaaactaagataattttattactttctgatttggatgatgtttatttctttttgttgcctaattgctcaagttagcaattccaatactatggtgaatagaagtggtgagggtgggcattcttgccttgtaccagaccttagagagaaacctttccatttttcaccattatgatgtttcctatgggcttgccttttacggttttattatgttgagatacattccttctatacttagtttattgggtgtttttattatgaaaaggtgttgaattttgttgaatgattttttggatccattgagatgactgtgtgat

SEQ ID NO: 805919 - DNA, 666 bp, Homo sapiens
ctttgggtggtatggacactttaacactattaaaatttccaatccataaacatggatgtctttccatttatttgtgtcttctttaacttcatttatcaatattttagttttcaatgtgcaagtctttcactttctcacttaagtttattcctaagtattttattatttttgatactattgttagtgggattgctttcttaatttcctttttagataggccactgttagtgcgtagaaatgctaatgtttgttgattttgtatcctgcaactttactaaatttttttattagctctaacagttttttgtgtgtggagttttagggttttcyaaatataagatcatatcatctgcaaactaagataattttattactttctgatttggatgatgtttatttctttttgttgcctaattgctcaagttagcaattccaatactatggtgaatagaagtggtgagggtgggcattcttgccttgtaccagaccttagagagaaacctttccatttttcaccattatgatgtttcctatgggcttgccttttacggttttattatgttgagatacattccttctatacttagtttattgggtgtttttattatgaaaaggtgttgaattttgttgaatgattttttggatccattgagatgactgtgtgat

SEQ ID NO: 805920 - DNA, 590 bp, Homo sapiens
ctcctgacattgtgccaactagagcctccacattatcaaagtcaagaaagcttatcctgtttgttcataccactattctgttcttaaatccatcttcatctcccgctaagctctcaaactaaaattatccctctcctgtttagggggaaactaatgcctaacctgcttccagctggagctgacttttttggattttctcatccagccatccacaacctgatccagagctgtccaggagctcgaaaatgcatcaagtaagtgtgrtcaaattcattcccttgagaaaagctcagtgatcatccggccagggactggcagttcctactttgttcactgaccttctgtgtccaaagcctgcctgcttctcgaccagtagggctcagtattggcccccttagccctctggacaggtaagcaagagccaggactccactgttcgctgattattactattttctgtatgtaccatgacagcaaaaggggtgggaaatctagcagactaatttgtcactaaagaggcctgcttatttcttttaggtttttgttagcaaatatgtgttttagatatatatgggcggaatataaagaaa

SEQ ID NO: 805921 - DNA, 379 bp, Homo sapiens
gagtgtaacaaaaaatacacccaaggatggggtaaatattctggagcaaggatccttcaataggtaacctacaaataaagctgcaggccctgccctagcaaagatggttgcttcggcagagaaaatgtaaaaggaaattaaaaawtttttaaagtccattttaatatggacttgttttccctttctcgattgtgctgtctgtcaaaagtgcctccaagctactgaattaacagctgtttatttgcagctctgaaataagctcagcccccaaccaaccaagacccgccacatcgtaataacaaaagagatggcctcaagtgcggaggaaatcttgactccaccacaaaatgaacccctgtttattctgctgttcttctca

SEQ ID NO: 805922 - DNA, 617 bp, Homo sapiens
attcattaaagaaatggaatcaaaaattaatatcctttccaaaaacaaacaaacaaaaaaagatcccaggctgaggttgattagtgaattctaccaaacatttaaggaaaaaataatacaattcagaaaacagaggcagagaagactaactcattccatgaggccaaaagtggccctaataccaaaaccagctacatataatccaagaaaggaaaactacagactaatacttcttatcaacatagaaagtaaaaatcctcaacaaaatattagcaagtcaaatccarcaatgtctaaaaactatcatacacccagacccagtgggatttaatccagatatgcaaaggtatatctaagaatcaacttaaaggtatatttaagaatcagctgggaataaaaatgaaattgtaatctcccaaatgactgaatggacctctcttggccaaggggaccctggtgaaaccttggaagctgagttcaggtcacacgcctgttaccagtagttagacaggtatggcgggggcaggagagggctctttcccacccactagagatgtcaggtgatggttcagcaattatcacactacctttctaaaagtgataaattggcagcaggg

SEQ ID NO: 805923 - DNA, 617 bp, Homo sapiens
attcattaaagaaatggaatcaaaaattaatatcctttccaaaaacaaacaaacaaaaaaagatcccaggctgaggttgattagtgaattctaccaaacatttaaggaaaaaataatacaattcagaaaacagaggcagagaagactaactcattccatgaggccaaaagtggccctaataccaaaaccagctacatataatccaagaaaggaaaactacagactaatacttcttatcaacatagaaagtaaaaatcctcaacaaaatattagcaagtcaaatccagcaatgtctaaaaactatcatacacccagacccagtgggatttaatccagatatgcaaaggtatatctaagaatcaacttaaaggtatatttaagaatcarctgggaataaaaatgaaattgtaatctcccaaatgactgaatggacctctcttggccaaggggaccctggtgaaaccttggaagctgagttcaggtcacacgcctgttaccagtagttagacaggtatggcgggggcaggagagggctctttcccacccactagagatgtcaggtgatggttcagcaattatcacactacctttctaaaagtgataaattggcagcaggg

SEQ ID NO: 805924 - DNA, 656 bp, Homo sapiens
aaaggatttatgaggctagtcttaagctgcagccaatttggtatgcttgctatgtcttcctgtatccttctgtcataaagacagctaacttagaacagaacacgggcttgaaaccccataagcccgctgctcaagacggcccagcaagctggtcagtaacgaactttgctgcaggtccctcacacaaacaaaaaaactgtacgaggtctccatcgtgttttatttccttcggagcttgatcctgtgaccacatggctacacttactcttggtctctgccttccagggaacaggaattttaaggttcatgtcacgggtagctctaaaaatcatcctgagtagttaaaagcctttgcaagctcaaaattaactactctagactccttctggaaagggcaatggaggctgcccagtgctgtagctcagtagctcatgttttctctttcatagtggtgatccgggtccaatacctggcttagggaatgagttctttcctgtttgatatcttcataacygttaccatttgttgattctcttcccctccaggaactgcggaattctcctttctaagagcacctgtgaggttacttttgataaagtttaaatgccaacaatatcagccatttggcctggctaacgttgggtaataggaaattt

SEQ ID NO: 805925 - DNA, 639 bp, Homo sapiens
ttataaggccattcttgtatggctataaaaaaatactcaagactgggtaattgataaagaacagagttttaattggctcacagttcttcaagctgtatggtaagcatggcaatggtgtcttcttggcttctcaggaagcctcagggaactttaaatcatggtagagggtgaagtgggagcaggcacatcacataaygacagcaggagcaaatgagaaagagttggtgaagggagaagtgacccacatttttaaacaattgcatctcatgtgaaatcagagggagagctcacttatcaccaaggggatgacccaaactagtaatgaggaatcagcctccgtaatctaaacacctcccaccaggctccatctccagcattggggattacaactcaacgtgagattagggcaggaacaaatatccaaactgtcattctgcacctgacctctcccaaacatcatgtccttctcacattgcaaaataaaattatgccttcccaatagtccccccaagtcttaacttactgcagcattaactgaaaattccaaagttcaacgtctcatcttggacaaagcaagttccttccaacagtgagcctgtaaaataaaaaacaagctatttacaatgggagtataggcat

SEQ ID NO: 805926 - DNA, 529 bp, Homo sapiens
gggcggtggtagggggaatggatccctgaacacaacctagaagctggaaggaaaacacagggaacccataaaaccccccataagagcagaccgagactttgctgtggaagattcctatcccaaagctaatagcatcagtgcacttgatttccatctcgttctcacagccttttatgaacatcactgaaaaggctgggcaagacgaaacctgtgaagaaggaagatctccatggctgcccttagcgtggaatgtgttcttcacacccttacaaacagctttcaagtrttcagcctgtggagttgaagcaggtactgttagatctgagctgatctgttttgggggcgtgtgtacttatgttgttctgccgaccctgaatgcaagaacacctgctctgatgtgtgcatcgtttgtagcaggcattgtcctttaatatctgagacatgtagcaaagcatcatctcatatcaggatgtgtccctgggtctttgtgaatgtctacacttggttcagccaagaggtttatttggaa

SEQ ID NO: 805927 - DNA, 572 bp, Homo sapiens
cagcagattagacaatgcagaagagaccagtgaatttgaagaaagagcaatagaaactaaccagaacaaaccacagagagaaaagaaaaagggactactgggaaaaatgaatgatcagagagctatggaacaacctctagcacccttacatacatgtaactggagtccccgaaagagaggaaagrgaaaagggaataaaaaaaatatttgcagagttactgactgaaaaatttccaaatctgatgaaagctataaacccacaaatccaaaaaactcaatgaacccaagcacaaaacacacgaagaaaattacactacacaaaagcacatcatcattacattgtttaaactcagttagaaaagcagttagggccaggcacagtggctcacacctgcaatctcagcactttggaaggccgaggtgggaggatcgcttgagcccaggagttttcgaccaccctgggcaacatagtgagaccctgtctctacaaaaaataaaaaatttgcctggcatggtggcacacacctgtggtcccaactacttgggaggctgaagtgggaggatccctcgag

SEQ ID NO: 805928 - DNA, 605 bp, Homo sapiens
atatgcctatttttatcctttgctgacatgtgccaccctcaaaccttgtgatgatgtcagcacattacccttctgacatgagaaaagaaaaataattataaaataaaaaagagctagcctggtgcggtgactcacgcctgtaatcccagcactttgggaggccaaggcagtcagatcacccaaggtcaggagttcaagaatagcctaaccaacatggtgaaaccccttgtgttactgaaaaatacaaacaattagccgggcatggtggcacacacctggtatcccagctactcaggagactgagacaggraaatcgcttgaacccgggaggcagaggttgcagtaagccgagatcgcaccactgcactccatcctgggcaacaagagcgaaactccatctcaaaaaaaaaaaaaagaaaaaaagaaaactttcgttccatgcaccagcagctgactcaagctgaaaaggcagaagaaaatttaggtttgtcagtttttcttacagttagtttttttttttaatcactaggatgtcagtttctccgttttaacatatgtgttgcaaatattttctctcagtctattatttttcttttgtttattgc

SEQ ID NO: 805929 - DNA, 630 bp, Homo sapiens
gacattcacctcaagtaatttaatagactagacttatttatacatatatttatacattgaatattttaatataaagtaaagtacaaccattatcttaatacattattccatttcctcttatttttccattttcctcttcttcacctttcaaattctttcacaaagcttgctgtcatttaccctgccacttaaatggcacagttaaagaatataaattaatcttcttccaaggatgtattgagtgttgcctctagaaccttttccaggtgcatctttgttttgggtgattctcagttatagatatttggaaatttgcccaatcacaaaccactggtctctaggctataygtagtatctaccatttcaacctcatattttgaaaaaggacttataaaagcataattatactgatcatttttgctaaagccaattagaaaacaaaatagagtttcataaaatcttaagaattggaaagaatcttaaaagatctttcatcctagtcaaccatgaaaattatgcagaaaacaggtttggggagtctagaggaaattacagtatcttaaggaaagcagttggatgaggaacaagatctcagagcagaacatgaagctggactcaattatgaatgat

SEQ ID NO: 805930 - DNA, 617 bp, Homo sapiens
agctgcttctcattggctgacaagctttagaaacagaaaatcaagagccaggaaaagggacttataaatatgccaaccttaatagtagcagggttgccatgattaagttttaaatttgattctgaactccctggcaatcaaggcaaaaatgaaaacataatcaggcatgtagctctcaataacagaaaggaaggccctcctgacccttcttgaaagtattcagaatattacaataataacaactgtcatttactgagcrctctctatgtaccaagagcatattttgtgcttgtaacaaccaaacaaattagttttttcttttatggttgaaaaaattaggcttacagaggtgatgacttttgtaagactttccagttagtagcagttgaaacctgaattactatccaagtatatctgactccagctactaaccaacactgtctttccagcctgtgatagacatgtcttcagtaacgttttcatagcaaatgtgctacttttaatggctgtttgaccttcaagtagaaatttcaaaatttgggggtttgtttcgtgtcatattcaaactgaaaatgagttgagtgactgagcctcagagctttgctccatcccctttc

SEQ ID NO: 805931 - DNA, 632 bp, Homo sapiens
cccatcagaaagtaaagaataaaactaaatatatattgagtctaccatgctaggtgccctacattcatttctttatttaaacttcacccaaggccggatgcagtggctcacacctgtaatcccagcactttgggaggccgaggtgggtggatcacctgagatcaggagttcgaaaccagcctgaccaatatggtgaaaccccgtctccactaaaaatacaaaaattagccgggcgtggtgccrtgcacctgtagtcccagctacttgggaggctgaggcagaagaatcacttgaaccagggaggcagaggttacagtgagccaagatcgcaccactgcactccagactaggtgacaagaacgagactgcatctcacaaaaataaataaataataaaatataaataaacttcaccctaaaaaaaagtgtgacttagagtcctaataaaagatttttggttaccagttgcaagacccacctgaaagagtttaaataaaggggtacccataattataaataatgtgtatctggaagaactcaagggcgggaagtgtggctgagcttcataagagagacaaggagcagaaactgggaagtcagaacactgactggacctacttctccagggggtat

SEQ ID NO: 805932 - DNA, 632 bp, Homo sapiens
cccatcagaaagtaaagaataaaactaaatatatattgagtctaccatgctaggtgccctacattcatttctttatttaaacttcacccaaggccggatgcagtggctcacacctgtaatcccagcactttgggaggccgaggtgggtggatcacctgagatcaggagttcgaaaccagcctgaccaatatggtgaaaccccgtctccactaaaaatacaaaaattagccgggcgtggtgccgtgcacctgtagtcccagctacttgggaggctgaggcagaagaatcacttgaaccagggaggcrgaggttacagtgagccaagatcgcaccactgcactccagactaggtgacaagaacgagactgcatctcacaaaaataaataaataataaaatataaataaacttcaccctaaaaaaaagtgtgacttagagtcctaataaaagatttttggttaccagttgcaagacccacctgaaagagtttaaataaaggggtacccataattataaataatgtgtatctggaagaactcaagggcgggaagtgtggctgagcttcataagagagacaaggagcagaaactgggaagtcagaacactgactggacctacttctccagggggtat

SEQ ID NO: 805933 - DNA, 632 bp, Homo sapiens
cccatcagaaagtaaagaataaaactaaatatatattgagtctaccatgctaggtgccctacattcatttctttatttaaacttcacccaaggccggatgcagtggctcacacctgtaatcccagcactttgggaggccgaggtgggtggatcacctgagatcaggagttcgaaaccagcctgaccaatatggtgaaaccccgtctccactaaaaatacaaaaattagccgggcgtggtgccgtgcacctgtagtcccagctacttgggaggctgaggcagaagaatcacttgaaccagggaggcagaggttacagtgagccaagatcgcaccactgcactccagactaggtgacaagaacgagacygcatctcacaaaaataaataaataataaaatataaataaacttcaccctaaaaaaaagtgtgacttagagtcctaataaaagatttttggttaccagttgcaagacccacctgaaagagtttaaataaaggggtacccataattataaataatgtgtatctggaagaactcaagggcgggaagtgtggctgagcttcataagagagacaaggagcagaaactgggaagtcagaacactgactggacctacttctccagggggtat

SEQ ID NO: 805934 - DNA, 574 bp, Homo sapiens
caagtatcccaggtgatggtgtcagtaatttttcagactttactttgggtattactaatacaggaacatctgagctaggcaatttatattgagaaggcccctgccagctgattgccatgacctaaaatatctttgttagagtctacccgagagagtagagaatgtaggtggaaattgagtctagagaccatgatgcttagatgttttctttaggagtttctcatggtctcctctgctcacaacaggaacctgtacgmtgaataaagggttgcttctagcccattttctgtgagaatttagtgaagccattccctctaggtagatactaccctgtggggttcacagcttggtaagggaagtaaggctagattttagccccacttgcccaaatcagggtatttttgtgcactgtacaatctgtacaactgtacatgatgtccttacgaaacccttctgctggttttcactgaggaaggagcatttgaggattaataagataaacaaaatgagctctttggggtgcccaataaagccctaaacaaacagcattattttcattcctgagttcaaaata

SEQ ID NO: 805935 - DNA, 654 bp, Homo sapiens
aaatcacacagcaaaagacctatggttctaagtttctgtaagtaaagataatactcaagtaacttcaccctatttcaacattcagccagcctgctgaaatacataactttgaatgttaccgcatatgttccattttatatgstttttcataaccaacaatactgcatatagtttagtcttgcagtatgaccaataggtggcaccagaaacacccacacttattccaactacatagtatgtatatatgtgctaaaatttcaatccctctctacttagttttttcatgttgaaaaggacctcatgatgttaaatctaaacccaaacttggtaacttataatttcccatttgctatttgacctctttcttgtagggttatgtgagcatgaaaaaaatagggtgataggggcagtcaattcagaaagaaaacatctattcattagcaaaaggaaggaaaaaagactggagccctgtatccttttccttcaaggtctcttgagtgtataaatgccgaagattattaggaaatatttgaataacaggataaaaaagtcaaggatactgcctccaaaacatgaactttattccccactgaaaacagacttggatggcaaccaagttgttcaaggattgccctggccaatatctgaccacag

SEQ ID NO: 805936 - DNA, 599 bp, Homo sapiens
ggctagccagttagtagtctttattggtacataaaattgtaactctatggaattgtgcattgttaaatgctaagaattagggaagggatttgcattttagatgacctttgggtcaccttttagacacgcaatatacgttcagaatcaatgtatctccaaaccatggaatctttggataattgttgtaactttgaaccagttattttgacatcaggtaaaaataaccattctgttgtttctacttatcacttatacaaaaataaaatgcgaaaacagttagttttgttacactattaaatctccctaagatgggtcatttctttcattcaggtgtgctttcattcccctctgtgagamgttgccatttatttcataagtaacacacattttctgttaaagttaagtgtgtatattttaggctcattagtgttgttgccaggttcattatcaaactggttattgtttgtttgtaaaattattcaattgtgcatttcctaacttcataaccagcaaccattctgaattttccactgtatttcttttctgaaagatttttagagatgactggagttctacaaaaataatatacatacgtacag

SEQ ID NO: 805937 - DNA, 593 bp, Homo sapiens
gtattgagggcaaaggttttccttatctgaattaatcattgtttaaactctcttttattttaagcctcactatcacactcagatctaagaagaaaaaaatcaaaatatttaggagattatgaagcctaacattattaaaactaacttccccaggtcaactttcaattttttttcctattcccgtttgtaactccatttagatactgatacactcatatcttgtgtaacatcttgctgtaagaacttgaaaactttccccctctgggttaaggattcttctttcattatttctgcatgggttgttccatggacaatgttttatagatgctcatcacctcaagttcattgttgttaagccctaagtatttcttgcagtttcattttttctgaatattaagtctttgtttgcaatatgtaatggtcagtgatcacatgttgcctgagtatactactaaycataggcaggaaactgaatttctccctttcctgttaagtccacaattattctatatgtgttcccttttgcactgatactatgtagagacatgtttgaatttttttaattatgtagacatttattgaaagtgagtata

SEQ ID NO: 805938 - DNA, 625 bp, Homo sapiens
atgttttaaatataatcacaataaatcttcttatccttattacttaaaacattcatcattaaaacttagggttttcctgaaatactgttccttccaaatctcattttagaaaagtcatgcatgaagagaacaataataaactgagccccccaaaaatttagataaaagttatgaagacactttcatagtctgtcacttaccattgtttctgcaagccaagggcattttttatgattttacagttacctaatttatagtttataatataggaaagttcatttattctctaactatatgagccttaaatatcttggagatttttcctatgatttgccccagaaattaaaaacaattcagggggaatgaagaatgaaatagagaaataaaggaagtctgaaaattcagaaaataaaagtatagtttgggcaaagcaactctaacaatattatcatgagcyatctatctttttaaataacaataataactcatggtaaagctctatttttttctcataaggctactttgaaatgcaaacacaagcggaaatagtattagaaataagcagtaatggattgtacctattttactaaatgctaatgacaaatatgctcacaacgggcagatg

SEQ ID NO: 805939 - DNA, 465 bp, Homo sapiens
tgtctatttttacttttgttgcctgtgcattcactacacgtaatcttagccaaaagactgagacgcgatgcttttgcctgtgtttttggtgtcgtatctaaaaaaaagaaaaaagaaaaaaaaatcatagccaagacaaacatcaaggagttttttcctgtttgcttccwgcagttttacattttctggtcttaatgagtaaatccttaatttgtttcaagttttatggtgtaagctaaagagccacttttattcttttgtatttagatgtctatttgtcccaagacaatttgttgaagagactaacattccttattttgtattataggcacccttttcaaagacgaggtgaccataaatgtgtgggtttatgtctgggctctccgctctgttccattggtctgtttttatgttccatgtgtctgattttatgccattgtcatgctgtttttattaatatacatt

SEQ ID NO: 805940 - DNA, 599 bp, Homo sapiens; identical to SEQ ID NO: 746168

SEQ ID NO: 805941 - DNA, 630 bp, Homo sapiens
attaataaatatagcatattattagaaaaatgtttaaaaagatggttatcacaatagatggataaaaataattttttaaagtcttacaatacttcatgataaacaaataaaaaatagaaatagaaggataacttatcaacttgacaaacagcatctacaataaatctatggcaaatattgcagttgatgctaagcgaacaaatgcttctgactttgtcagattttagacaagggtggtcattatcaccacttctattcaacactgcagtgaaattctacccaggkctcttaagacataaaatgcaataaatggcatacaggttggaaagaaagataaaacaagctctatttgaagatgacataatcttgtatattaaaaaatcctaagacatccactaaaagtttaccagaattaataaacaaatttggcaagtttccaggatgcaaggtcaatacgcaaaagccagttgtatttctgtacactttcaatgaacaatccaaaaatgtaattttttaaaaagtcaatttatactagcattaaaatgaatgaaataattaggaataaatttaactgaagaattaaaacactcacactgtgaaactgcaaaataaagaagacctaaataagtg

SEQ ID NO: 805942 - DNA, 630 bp, Homo sapiens
attaataaatatagcatattattagaaaaatgtttaaaaagatggttatcacaatagatggataaaaataattttttaaagtcttacaatacttcatgataaacaaataaaaaatagaaatagaaggataacttatcaacttgacaaacagcatctacaataaatctatggcaaatattgcagttgatgctaagcgaacaaatgcttctgactttgtcagattttagacaagggtggtcattatcaccacttctattcaacactgcagtgaaattctacccagggctcttaagacataaaatgcaataaatggcatacaggttggaaagaaagataaaacaagctctatttgaagatgacataatcttgtatattaaaaaatcctaagacatccactaaaagtttaccagaattaataaacaaatttggcaagtttccaggatgcaaggtcaatacgcaaaagccarttgtatttctgtacactttcaatgaacaatccaaaaatgtaattttttaaaaagtcaatttatactagcattaaaatgaatgaaataattaggaataaatttaactgaagaattaaaacactcacactgtgaaactgcaaaataaagaagacctaaataagtg

SEQ ID NO: 805943 - DNA, 629 bp, Homo sapiens
tatataaacaaagttaaaaagagcctctgtattcattggttgtggcagcctgataggaaagatcaagggtgactcctggggtttaggctggagaaactagcaggcaggtgataaaattcctttccttattggtttatgacctctatttgtaaaaatttgtctgtcatacttgtataaattgtttttccaatttgtttccttataaatttttaataattagttttgacattaaaaagttcaaagtggtcaaatctatttaagacttcttacatggatttatgcttagaagatcatttcccatcttcagagaaaagatgccttaatttgcatctttaaaaatattattcttttataggtagctctttaatttagcagaaatgtattctgtggtatgatgtgagcctatatattaatatattttgttaaaattkagctcattccacaaaagcatgattattggattggagggcacataaaagtaaaatgttaaagtcagagaattctcacgctctctttatctgcatctcacgtatcatgagcaaagtaaagagggaaaggttcaaggagaggtgtttgctccatttttactgctcttcaggcaggaagcagtattccttctctgatctctt

SEQ ID NO: 805944 - DNA, 546 bp, Homo sapiens
tccaagtgactactaatgactatgactaccacacacacacatgcgcacatgtgcttctgcacaggcacacacacagatatatacacaatctgtgaaatagtaagtgagactgtcagctaagaggatgggcactgtgaggccaggagtaatattcaaaaatctttcagctgtgttggcacccttcatggttacattttcataggcagccaaacaagggtgactggggggaattcaaagagctggtatgaagccggcttcaggcagccaaatgggtgctgggcatatgcctgctgtggccccaacaccataaacactgttgctttccccacattccatgcctgctattgccactataatgcgcagggaccaggccagccaaacagaggtgcagtgggcyagctggagggctggaagctgatggcatacaggtagctctttagtggtagagggtaaggtaacaagaaatgtggttagaaaatcatcagagtttgggggactactaaaacataaagggataaacagtttagaatgtcaatcaaagcagaa

SEQ ID NO: 805945 - DNA, 438 bp, Homo sapiens
gcccctgtacgttttttaaacagctttattgaggtgtaattgacatagaaagaactgtgcaaatttaaagtgtacagtttgatgagtttgaacatatgcacacgcctgaaaccgcctttgccaaattataactgaggaaactatgacagtgaaagaagtcagacctaactggctccatcttgcttctaacttttaagctgtccttgttcattcccgggcataggtcgactaactttgggaaggaattcagttcayggtttgactctgaaacaaaactgataacagccgttttccaaaaagacccccttgttgcctggggactagtctgcctttgcaggactaacacattcactacaagattagaaattacagtttaggggttgtgcggcctctggctccaagcatctaagcctccccagattgctcctggggataaca

SEQ ID NO: 805946 - DNA, 575 bp, Homo sapiens
attattatccccattttctgcacccgcatgtccattgcagcattattgacaatagctatgatatatacacaacctaagtgaccattgactgatgtatggataaatcagttgtatatatacacacacacacacaaatgatggaatattattcagcactaataaagaaggaaatcctgtcatttgcaacaacataaacgaacttggagacattatgctaagtgagatacaccggacataaaaagaaaaataggcatgatgtctcttaaatgtgcaatcctaaataaaagttaaatgcaaaggaacagaaagaccttcagagatggkgataggaggaatgagagatgttggtcaaagggtacaggctgcacttattcaagataaagttgagagctctaagatacagcatgagggctacacttaatattattgtattgtgtattggaaatgtgctaaaagaatagattttaggtggttttactatatacacagaaaaagataatgatgtgagacaatacatatgttaattaccttgactgtagtgatcatttcactctgcatattgtatatcaaaacgt

SEQ ID NO: 805947 - DNA, 637 bp, Homo sapiens
ttactgcatgtgttatactctgctgaatttattagtttatgagcttctcaaaagattataagttttttgaaagcatgggctctcttacattcaatgttcattgagtaaacaccaatgaattataaaatgaattgaataatttttaattgatcaaatttgaacatatttttcatgattcatgatatctactttaggatgtaacactgttgaaatactgctacttctataaaataagatatatacmagtaaaaagatattcagtacattattcattaccttctattgtggcattctgcttacttttggacaaaaatactaagtaaattatgttttctttgaaggagctcataattttatggtagaagttagataagacaggctgaaagcctcagctttatcatctttagtacggtttatttggtgagtctctcaatctttatcagctttataatattaatgttgatacttattttagagaattgttgtaagcattaatcttagtcttcatgtaatatgttggtgttattatatataatctatcattgtactttgaggtatcttctaagtaaaataatatattcaatcaccatttaaaatgagagggtttaaaaaaatactgtggtaggtaaagaataca

SEQ ID NO: 805948 - DNA, 611 bp, Homo sapiens
agaaacagctttctatttgttcatggccttttttttaatttttaagaagtatttgataattttttatagattttaaacacttttattaagtttataaccaaatgctttatgatttttatggctattataaatgggattatctcattcattgtatcttctaactggtttttatatgtgaatacaaatgctattaatgttatgttaattttgtatattgctactttaacttcttttgtgttttggtttcttttactattgtttcaatagaattctgatgaataatagtatcatgtcatctgtgtattgagatgtttaatttttttgcatattatgtctccaattgttttctgaagtccaagttcattagctagtacctactgaagtatcttaaatagcagtggaaatagtagtcatcctgtcattgaccttgaccaagtccattgacttggactgtttctstagggctttcccattaaatgattatgttggctttagaatatttctctctttctctttccctctcctcatcccgtctcactctatatatcaatagatagatgattgatagatagagagatgacagatattctaccttcttttctacatgactt

SEQ ID NO: 805949 - DNA, 622 bp, Homo sapiens
cgtgaaagaagaagagcctcatcctctatgccttaagtgtgggctgcacatggtgacttccttccaaagattacagtgtagaaagagcagggaaaggaactgtacagcagagaagcctagcaaacctcagtcgattgattaggtcaatcttaacaggttgttagccatcttaacagaatgtaacctcgatatgttgtgataatgaaaatagcattttacctctgtggtgttctttccaatgaacaggactagcaatctactcacgagacaaacatcagatcaattccaatagagaggcatcctgctataacagggccaatattcctcaaaactgccaaggtcatcaaaaacaaaggaagtctgtcacagtcaggaagaaactgcagagacatgatagttaagtgtaaagttgtatttgggatgggatcctggaatagaaatacgacattatataaaaactaaagaaatytgagaaactaaaggctttagttaataattatgtttcaatattggttcattaattttaagaaaggtaccttactagtgtaaaatgtcaataataaggaaaactctgtgggggtacatgaggattctctgtattacggtctcaaattttccagtc

SEQ ID NO: 805950 - DNA, 666 bp, Homo sapiens
attttaaaattgccagacaaggaatttaaaataactatgattaatacattaaggattctaatgaaaacagtgggcaacatgcaagaacagatggataatgtaagaagaaaaatgaaaattctaagaaagaatgagaaggaaatggtaaaaacacgtaaragaaatgaagagtggcttaaatatgctcattagtgactggctatggccaaggaaagaatcactgagtagaaagatcgacagaaactgttcacattgaaaagcaaaagaaaacagaatggacaacaaccacaatgacagaatattcgagaactttgaagttgtgaaatatacataattgaaatacacaagaagaaataatgtagcagaagcaatatttaaagcattaatgcctgagaatattccaaaattatggcagacaccaaaaaaaatcacagatcgaggaagaataccaaccagtttaaatagctccccaaaaatatgcctcattatatcacatttaaattggagaaaaccaaaggcaaaataaaatattaaaagaagacagaaaacaacaccaccacattacttagaaaggagcaaaaataacaattacattggactttgcatcagtaaccatgaaagccagaagggagtggactaaaacactcaaaggatttgaagaaagag

SEQ ID NO: 805951 - DNA, 515 bp, Homo sapiens
attgataacatcttatcaggagacaggtttgagagcagacaactggtctgaccaaaaatttattaggcgggaatttcctcgtcctaataagcctgggagcactatgggagactggggcttatttcatccctacagctcaaccataaaaaaacggccgccccccgaagcggccattttagaggcctaccctcagggacgcattctctttctcagggatgttccttgctgagaaaaataattcagcgatatttctcccatttgcttttgaaagaagggaaatatggctccgttctgcctggctcaccggcggtaagagtttaaggtgatctctcttgttccctgaacgttgctgttrtcctgttcttttttcaaggtgcccagatttcatattgttcaaacacacatgccctacaaacaatttgtgcagttaacgcaatcatcacagggtcctgaggtgacatacatcctcctcagcttatgagatgacaggattaagagattaaagtaaagacagg

SEQ ID NO: 805952 - DNA, 498 bp, Homo sapiens
tgacctagagttgtataaaggcataggttccctcctctaaacatggtttttaaactccagacccacccaagctgggcccaggatgaaagtgaacctcttgatatatctctgatctcaaatgagttattttagatctttctcagaacaaaactgcactaagaagttgctttgctgtctacacacacgcctcaatagtccwaaaagaataagcgagggagaaatggaaagataatccaagcttgtctttccacatcttaactaccctcgagctcttccttttgcataaggattcagtaaaattgtgacctctcccaggacagactaaaacacctggatttcccatgcttcactaagttgtaaacagcttccagagtcagcagcttacatttactacttgcaatttttaaaggactaaagcttttatagctaagaaatattctaatgatatgaagttaaataaaaattggcaataaaagaatacattttgaaatcactggg

SEQ ID NO: 805953 - DNA, 563 bp, Homo sapiens
atgattgttttgttgattattgtgtgccacagaggtaaccaaatttccttgtcaattgtgtctttgagtatggctgtcctaagtctttttgtcatccacagacaatatttgtcttgttttgatcctctttaaaaggaggtgtaggccgggcatggtggctcacacytataatcccagcactttggaaggctgaggtgggctgatcacaaggtcaggagattgagaccttcctggctaacatggtgaaaccctgtctctactaaaaatacaaaaaaattagccaggcatggtggtgggtgcctgtagtccagctacttgggaggctgaggcaggagcatggcatggactcaggaggtggagcttgcagtgagtcaagatcatgccactgcactccagccggggtgagagagcaagactctgtctcaaaaaaaaaaaaaaaaaaggggggtgtataatcagttataggactctgacaagtgcctttgaatgtagatctctgatgactttggaaagtgtgccatgaaaatagagaagaaataacttccaagactctcttggaaaac

SEQ ID NO: 805954 - DNA, 664 bp, Homo sapiens
atactcttttttgtctggtttctttcacttagcatggttttgagattcattgatgctgttttgtgtattagtaatttgttccttgttattactgagcagcatcacattatacgaatatactgcagtttgtatatctgttttcctattgatagatacctgggagtttcttagttttggatattataaatctgagctcttttaataaatatatatttcatttcacttggataaatgcctagcatagaacttctgggccgtagggtaggtgtatgcttagtcttacaagaaactgccagataccactatacctccaccaacaacatatgagttccagtcactccacttcctcaccaacatttgttgttgtcagtgtttttaattttagacattctcgtggctatgtaatggtatgwcttttggttttaattatttgccgctccctgatgactaatggcattgaacaactttttacgtccttattggccatatgtataccttccttgtaaagtatctgatcatattaattgactactttatagttgtctttttattattgaattatagtagttctttatcatcctagataatagtttctagttgtgtgaatgttttatccaagtcagcagcttgcctgtttttcttaactgtcatttgatgagcaaaa

SEQ ID NO: 805955 - DNA, 561 bp, Homo sapiens; identical to SEQ ID NO: 758422

SEQ ID NO: 805956 - DNA, 561 bp, Homo sapiens
ataaactgagtccaacacttctacacagttatgttcaactgggctctctgataccgggagcaaggtggtagggtttagggtgttgcaaacttcagtggttatgcggggattttcacatagcaagctttggtacttggttaatctagcatttgttaaccaatgatgccctttggtagtcattaaagttaccacagcatggggggcctttatattcaggttttgcccaagggttagtttatctgcttcttgtgctaacagggccattgttgccagggcccttagacatgggggccagccttgggaaacmctgtctagttgttttcagagatagaccactggccttggccagggacctacagtctgggttaaaactccaactgccattttttctctttctgacacacagggtgtaaggggttttgtcaggtcgggtatccccagggctggggccaacatgagtttttcttttaactcatgaaaagctcgttgctgttggttgtaatagatgtagttcatctactttacatttttgttaactgtcacccaccaaaatattgactc

SEQ ID NO: 805957 - DNA, 539 bp, Homo sapiens
aaatattgtctacctggaaaagaaaataattttctaactcccagttgaaaggcagtggcatattaaggaaaagaaactttcagacagagccataaatgtctcttcatagatcctaaatactgtggcaatataaccacatttaaaatattattgggcctcaaacctctttactttgtatacttattttcccaattatgaatcamcagcagtcagtttttccttttttattcactctggaaaaattttcaacttcttttttttttttcagagagtctctctatgtcgcccaagttggagtgcagtggcacgatctcggctcactgcaacctccagctcccatgttcaagccattctcctgcctcagcctccagagtagctacaggtgagtgccacatgcccagctaatttttgtattttttagtagagatggagttctcaccatgttggccaggctggtcttgaactcctggcctcaagtgatccgccctcctcaacctcccaaagtgttgagattacaggcgtgagccatcatgcctggc

SEQ ID NO: 805958 - DNA, 658 bp, Homo sapiens
cctatatgtttattactatccacaatagcaaaaatatgaaatcaaatgaagtgtccatcaagagaggattggataaagaacatgcaatacataggtcaggcatggtggctcatgcctgtaatctcagcactttgggaggccaaggtggttagatcatttgaggccatgggttcaagcccaaactcaccaacatgacaaaaccccatctccaccaaaaatgcaaaaattggcrgggcctcatggctcatgcctgtagtcccagctatttgggaggctgaggtacaagaatcacttggatctgggaggtggaggtttcagtgaactgagataggaccactgcactctagcctgggtgatagaaggagactctgtctcagggggaaaaaaaagaaaatgtggcatatatacatacatacatatgtatggaataaaaaatacaatgcagtcatgtctttggcagcaacatggatataattggaggccattatcttaagtgaaataacccagtttaccacatgttgtcacttataagcaggagctaaataatgtgtacacatggacatagattgtggaataatagacactggagacttggtagggtggaagggtgggagggggtgagggataagaaattacttgaaaggtacaatgtacactg

SEQ ID NO: 805959 - DNA, 537 bp, Homo sapiens
tgctgattttcttattcagctcctgaattgttttccagattttgttgaatagtttatctgtattctctttcatctcactgacatttttaaagtttattattttaaattctttgtcacagaagttgaacatttccattttggcggttttactggagatttattgacttctttgatggtgtcatttttcttgacttttcaggtttctgacatcaacgtgttgatatctcagcatctaatggaatggtctcctmtaccaattttatagggtggctctcataggtaaatatttttgcctgcagacaaggtgtcagttggggaagattactttgctttggttctggttgagcacagtagtgcagtctgtgaatttcttcagttgtagtcaactggatgcaattacctcagttgtctaggctgtagaaatttgtgtggcttctctactaggttgggcatgatctttcttctgacagtggggaagctgggctgttctgtatgccaaggttgcaaggggacttcttcactggctaggttgctgcc

SEQ ID NO: 805960 - DNA, 635 bp, Homo sapiens
ttggctctgtaagtcaagttttatttctcaaagaaaagcataacattcaagtcaaagccttggtaaaataaccattgtctccaactgtgtcctgttacaaatgaaaacagatttattgtacttatggaaataactatattgccataagtcaataatacttacaaatagtttctaaattatggagaaatcaggtagagagaaacaagtatggtccaaattttgttcacaggaatatactttactcaagtgttaaaagttgtaaatagcttttaaaaaaagyttccttgactctgaaaaacaaagcaaaggatcaacaacattttaagcaaaatgtcacataaattaattcagtcttctgttacttcattccatacagttaactcctgtcctgcttggtagtcagggacatttcagctctccctgactcctgaaagttttttttctctatcctaatgtcacacagtctccaaagttattagaaacctgcattcaagaacacctgttagagtcctgtagttgattataaaccaccttttaaagaggattaaaacaagacaacaattatctgtgtatgataaaaagttttagtacagccactattaaagccacaattgactgggaattttgattacttc

SEQ ID NO: 805961 - DNA, 641 bp, Homo sapiens
ggaatctcactgtcattcaaattatttggcagattatataattctcctgagactcagttttctaaactgtacaatgaagaatgctgattccttacttatctcaaggaattgttggataaaatgtaatgaaacatgaaaattatctaaaaactgtaaagacttatataagtgtgagttatatacttctaagtcagcatttaccactagaamaatataaatattaccatgaaaagattcttattcagttaaaggttgtaggtagaaaattaattaaaattatttaaatataaagcaaattgaaatatttatctttcaattttttaaataaattagcagtctaatttgtcatgtatgaagaaagatgtttttactttttgaatgtaagtcagtaacaaaaatatttctcatttattattgtcattagtaccaagctatgaaattttaaattgattaatgaaacatttaagtttatctttaaatatatttcttgatacattcttgatgtgtaagaaaattggatttgatataactatattttgaaacaagaggaaaaagctccaaatataaaattaccgtaaaatgacagtaatgtcatcatatcaagaacactaaatatgtgatcatctattgaaatataactt

SEQ ID NO: 805962 - DNA, 599 bp, Homo sapiens
ggatatgaggagaagatggagttgaaaccattggtggagaaatgggctttgatcaagaatgaaatctcttgctaaggtcgaagaaaggaggcaaggaagtcatctcttaaagctcaattcatgcatttactggacatgatatgtgttcargactttgttggatgctggggtgggatggagaagggaatagtaatttaagacaagtacaaaacactgttctcaataattatgcagtatgttataaggagaattaagttccagcttcttagtgcctcaggagaaaaagaaagacaatcttgaaagtataaaaggctaacaaatataagcttaatagcactgagtttaaaaattgtaatcagagaatataaatggatatccactctgtatccttgttttgttagactctcacattgtgctaaagcacgttctgtttgttttgaacacatttgaagagggaccttcgctctctgctatggtacacacactccacttcagttttctgcctggcctcttaaagcattaaacaattggactagaaaatctgcatgatcttttttagctttagatatcatgattctcaggcagcttccctggagatc

SEQ ID NO: 805963 - DNA, 636 bp, Homo sapiens
tcttacgtcaattcataacccagccaagaaacccagagcggtggaggaaagccatttctctctcccctacaacttttaaatactaaaattaaaaatgtccccacccaccaatattggaactccgtggtatccataagctgggttgcatgttagtgrttgtaataagcaataaaaatccttgcatgtcaatattttattaaatttgattattcatggatttgtgaccattattatttgctgtttattggtttgttgttgtttttaaaatattttacttggacttatggaccacatgtttgtttcagaaattcttcaaaagacagcaaatccctagtaagtgggaagaaaaatcacttaacagtattccaagtacctcaaaagatgcaaatatggaaagatgaatatgaaaaagggtactcctagagtttatcaattgtctatccctggagaaagtttccattctccattaagactccaacggctttgaatagtatatgcttttgtgtatacaatgaaaataaaccatcatcatcgtcatcatattaactgggcttgtgcccattgtagatttcatgaaaaataaccaaccatcaaaaatgacttgacaggagaagccaacaagccctaacattaaat

SEQ ID NO: 805964 - DNA, 636 bp, Homo sapiens
tcttacgtcaattcataacccagccaagaaacccagagcggtggaggaaagccatttctctctcccctacaacttttaaatactaaaattaaaaatgtccccacccaccaatattggaactccgtggtatccataagctgggttgcatgttagtgattgtaataagcaataaaaatccttgcatgtcaatattttattraatttgattattcatggatttgtgaccattattatttgctgtttattggtttgttgttgtttttaaaatattttacttggacttatggaccacatgtttgtttcagaaattcttcaaaagacagcaaatccctagtaagtgggaagaaaaatcacttaacagtattccaagtacctcaaaagatgcaaatatggaaagatgaatatgaaaaagggtactcctagagtttatcaattgtctatccctggagaaagtttccattctccattaagactccaacggctttgaatagtatatgcttttgtgtatacaatgaaaataaaccatcatcatcgtcatcatattaactgggcttgtgcccattgtagatttcatgaaaaataaccaaccatcaaaaatgacttgacaggagaagccaacaagccctaacattaaat

SEQ ID NO: 805965 - DNA, 636 bp, Homo sapiens
tcttacgtcaattcataacccagccaagaaacccagagcggtggaggaaagccatttctctctcccctacaacttttaaatactaaaattaaaaatgtccccacccaccaatattggaactccgtggtatccataagctgggttgcatgttagtgattgtaataagcaataaaaatccttgcatgtcaatattttattaaatttgattattcatggatttgtgaccattattatttgctgtttattggtttgttgttgtttttaaaatattttacttggacttatggaccacatgtttgtttcagaaattcttcaaaagacagcaaatccctagtaagtgggaagaaaaatcacttaacagtattccaagtacctcaaaagatgcaaatatggaaagatgaatatgaaaaagggtactcctagagtttatcaattgtctatccctggagaaagtttccattctccattaagactccaacggctttgaatagtatatgyttttgtgtatacaatgaaaataaaccatcatcatcgtcatcatattaactgggcttgtgcccattgtagatttcatgaaaaataaccaaccatcaaaaatgacttgacaggagaagccaacaagccctaacattaaat

SEQ ID NO: 805966 - DNA, 583 bp, Homo sapiens
atgaaaagaggaaacttaagacggtaacagaaatgaacccaatagatgggttggaaattgaagttaaagaaattgtacaaaaagagtgaaaaaagataaagagatggaaaacaggtgagaaaatatgaaaaaatcacaaaactgtccaggaagttcaacwcccaaataatagaagttctggaaagaaagagcagcttacagagagaacacagtcttgacagattgaaagaccacaatgatcactgagtacaacaggtgaaaacagacccacaattagaacagtcatcgtgaaatttagaatatagggggacaggaaaaatcagaggttccaggggaaaagaaaaataaggtaaggcacagaacatcaagaatcagaacagtggcagctttctgatagcaacattgggagattgcgtgcaataaagcaatatcttcaaacttctggggaaaactgttttttaacctggattttcccgtacaagacagacaagtcatcatgtgacacaacagaatgaagacaatttcagacatgtgaagtgtgaatgtgtctctcagggatccattttccataggctactgtaag

SEQ ID NO: 805967 - DNA, 641 bp, Homo sapiens
aaatattatcacattagaggttggagcttctgcgtatgaattttggtgggacacaaacattcagtttatataagcaatataaacatcaggtggctccttcaggcctctgctcaagtgtcaactaatccaagagctgcccacgactacatgatatagaacagcataactttataccccccagcataactttatctacctcaccttgccttatttttctttatagcactataccacctgacaaattatatattttgtttgtttattatctgtgatctccaaataaaatataagatctstcagatccaagagagtagggactttctcatttgttcactactgtatctccagtgtttaggacattccttaaaaacaataaatgttcaataaatgtttattttaattgaatcagtgaatgaataaatgaacggatctgataaaacagactttacagccaaaagcaatttttttttttttttgagacagaatcttgttctgccgcccagctggagtgcagtggcatgatctccgcttactgcaacctccgcctcccgggctcaagtaattcttgtgcctcagcctctcgagtagctgggactacaggcatgtgccaccaggctcaactggttttttgtatttttagt

SEQ ID NO: 805968 - DNA, 636 bp, Homo sapiens
ttcccttatgaaagagaccccagagcattcccttgctccttacaccatatcagcacacagtgagaaggttccctctataaaccaaggcaagggccctcaccagacactgaatctgctggcaccttgatcttggacttcccagcctccagaactgtgagaaataaagtcctgtttttatgagccacccagtctatggtagtttgttatagcagaccaaatggactaagacgacctcctgctaaaggactgttggtcagtgtcccaaactgtggggaggaacagcttccatgagaaccacttgcaggcctgcatgcccgctttgcttggctggcactgtttgttagatggcagaaacctcatggcacaggcacasaatgatccagcagggaaaagactggactagcagacaggagggcaaagattctgtttgtcctctgggactagtccgcttcatgccctggagccagctagcaaacgttcaatctgggcattgcaggggaataaatgccagtgccccctctgtacaaatgcttatgaggagaaaatggtgccccagtcctgtcagccagtgggccagcttctgaggcataggacaaatcactgtggaacatattcagggggcgagatttggctaaa

SEQ ID NO: 805969 - DNA, 577 bp, Homo sapiens
aatagtaacgatcatagctagcatttatggaacacttatgagccaaggtccattctgagcacattgcatgcattatttgatttaatcttcataatgccattgagtggtgttagcccattttacagatgagaaactgctggctcaaagagatgagggaaatcagtggagggcacaaagctagtcagtgataagaggcaggtctaattttaaagtctcctttgcttaataaacatacagtcgtgctttgcttcatgatggggatagttcatcttcatgtgaataccacaaaatgtacttacacaaaccsacatggcatagcctactacacactgaggctgtatgctacagcctgtggctcctagcttactaagctgtatagcatgttattgtactgaatatagtagacaaccgtagcacaatggcaagtatttgtgcatctaacatttaaaagatacagtaaaaatacactattaccgttgtcgtatatgtggtccatctttgcccaaaacatcattttttggtgtgtgactattaacaggaacttgtcccagccttactttgtcattggtattcttga

SEQ ID NO: 805970 - DNA, 598 bp, Homo sapiens
ccacagaacagggtttagaaaacatgcttccattcctgtgccctccactctatttcttcccgttctataaagggtaagcatctttattatgttgtatcctgtggcggtttctttgtgaaagatgtaagcaatgcatatgtgacatgttagtatttacatgctgctccattcttacrcaaaaggtaacactctagaaacaccattctgcagggttttcttcacctaatagaatgttctgcagatcactgtgtagggataagtgctgataataccaacatctatgggacaccctccctcaccttcgtgggtgctcttgcagtagttgctgggatcttgctccagaggcccctgctgtgcagttttgagcctgagagatggtggccttttctgttttgccttcctgaaagcttccctctctttgcagggtgactctagggctgattctgcctaccctgctggggaataagctgggctctcaaccgggctcccagtgggagagagtctgcccaggaccaacagctctttgaggatcaaacctccctggaattttggctgggtagaaaatcagaagtatcctcaagagagacatcccactcca

SEQ ID NO: 805971 - DNA, 611 bp, Homo sapiens
gaaggcagatctagctataactgaattaattttgcttttcagaaattagtggcaagttcatatttcttccctacagactaagtccctatgggtagagtttgcattccccacattttaaacttctcaaatggatgtctgatgcaaattgrtttcctaatggttatctgttctgttatgattttttttctaaatgacaaaactttgagttatgcagaaaatcactggatgatttgatgttcctaaaagagacaaagaaagagcgaaggaaggtaacgctgtcaagaaaagctgaggtgtctggaaagtattgcttgaatatatgcaatgcttgattaaacatttctgaaagccagcggctctgggcaatataatcatcagtggggaaagagatattgcatcttctggggaaaccaattaacaccaaagattggattggtaaaaattgctggcaagttttaacagtggtctagctccatactttaactgcatcttccgtgatttttattttctctgtgtatttccggaattaacagtaactgagcagaacggacagctcatgcttccctcagaatttctgggcagctgtattgggtttggacacgttttgtcca

SEQ ID NO: 805972 - DNA, 624 bp, Homo sapiens
acacaacccgatgactggatagtattactgaaatatctttgcgccagccgagtgcgtggaactgtgcaaagccagatgttcttgtaaccctgttttactgagttatttatatccatataatatttgacatttcctgtgttgttaaagagttgggggccttgayatatttttaagagaacagtgccgacttttcatttttttttctttgatgcccaggaccagaaataagtattataaagaagggctggtgtattaaacacatgcctagatacctaaaatctactttattttaatgcctttcatcttaagtgaccttcgtgaacagaaagatgctagagccatctagaaggagcatatgaattaaccccaccatgcaataaaaacatgtacccatgggcctaaaataaatcagccaatagacaaaaatatttaataagtattggaaatataatccacatttttaggactaaactttatggagtcttaatacatgaactatatcatctctttgaacttgatagatatagaaacggctggttaaagtattctcagacttaataaaatattagctggcatatttctctggctaaatgaaataatggaaactttatagagttgaaagta

SEQ ID NO: 805973 - DNA, 624 bp, Homo sapiens
acacaacccgatgactggatagtattactgaaatatctttgcgccagccgagtgcgtggaactgtgcaaagccagatgttcttgtaaccctgttttactgagttatttatatccatataatatttgacatttcctgtgttgttaaagagttgggggccttgacrtatttttaagagaacagtgccgacttttcatttttttttctttgatgcccaggaccagaaataagtattataaagaagggctggtgtattaaacacatgcctagatacctaaaatctactttattttaatgcctttcatcttaagtgaccttcgtgaacagaaagatgctagagccatctagaaggagcatatgaattaaccccaccatgcaataaaaacatgtacccatgggcctaaaataaatcagccaatagacaaaaatatttaataagtattggaaatataatccacatttttaggactaaactttatggagtcttaatacatgaactatatcatctctttgaacttgatagatatagaaacggctggttaaagtattctcagacttaataaaatattagctggcatatttctctggctaaatgaaataatggaaactttatagagttgaaagta

SEQ ID NO: 805974 - DNA, 607 bp, Homo sapiens
aggatccattcacaaaatattatttttgtttttgagatttccacatttttaaaaaggtttccccttcataggatgtgacaaaaggggttgggtcctgatttacagccaagtcttggcgtttctggttgctcaacactgaacrcaagggccacagaaaacagaagtaagatgtgaattattagggttctctttagttttcggagttgctttataagcttattcaaaactacccatgttagagggggaaaaaaaattagctttctttcctacaagccgaagaggtgtgcgtatgttattgtgcagagaaatttccaaaatagattctttcttccactttgtgtcttattcctttgccctgctcctcggccccgactctcccgcaccctacgcaacacatgcacacacattctctacccctcctcactctctgaagctgagggccctcctgacaaatcaaatccccctctcccagtttgagaaaacaagatgccacaacctgcaggggcccatctgagcacagcgagcctgcccactccaaagcagcaatcaaatcccttgtaaatcctctaagctgtgataagtctctagtgttcacataataggtcag

SEQ ID NO: 805975 - DNA, 648 bp, Homo sapiens
taaatagttcaagaatactattgggttaccatgtagcctagcttggtttaaaagtgagtcagcaatcagtcacttatactttctgtttttctgataaatggtaatttatgaatacttccctatatggagactgatttcaatgcaaatagtttagcaatttttttattagacattttcctggtgatgttactacttttcagaataagtagactttggcaactatagctactaaaagctgtagaatttagtataatcatatttcatcaattaagtaaaagaggacatttaaggcaaaaatatacttattaatagagctaatattaaggattaatttccagatacgtgctaagtgctttaatacagaacataatttaacctttattagaaacyttcaagatggttgctattacctattcttatttcaatagtgagaaaaatacagcttgcaaatgttaagtaactgtccagggtcacagagctcataaggagcagaacccttacagaagcctaggtctgtttggcccaaagctggaatcttcaccaccacaccatattgcctcacaaaacagttagtaatgttagttcaatgctaattactgaatcattctttacagcactattagccaatcaagtttttgactccttaat

SEQ ID NO: 805976 - DNA, 521 bp, Homo sapiens
actccagggggcaggtttgcccttatgcaaaccagatgggtgtttgcaggttacctgggtgaggagggactttgggcagtggagtggggatggaggaatcatgaaagtgggtttgtttattggttctgtagtctgggacccccaaaaaggagggtggggatagggaggccaagaatagtggtgacttggcatggaatatagtattgtggtggtgtgtgaatgctakatttttccaggcataagcagaaatgcctcttacgagctgagtggagtcatcagcaatgaaggggagatgagatccagcatttattttccaggcaaggccagtgagatccacccagagaggctaggtgtgctgctcaaggtcacacaagggaagggtggtgcccatggctgtggccaggccaatttcagtttccttatttgtaacagggataaaaatagttttagcacagagtcgataggtggattaaatgagaagatctggtgtgggggtgtagcttgtaagaaatgctcagtgg

SEQ ID NO: 805977 - DNA, 596 bp, Homo sapiens
tcttggtggtgatttgttgtcatggagaaaaagcagtagggctgatcttagctagattgtggtccctaggaactacagactagtgtttgagcagttcaatgttcggcctcatgaactttgaaatcccaattctgttggccaaggataacaccctaatacctagttcaatgcgttcaataaaaagattgcaaaagaagttcatcattttaatactaaatgtctgaatgagcacttaaatggaaatggtcaactccattttcctttcttcatctcttcatttttgagctacttcagtgtgggtagaatatgggcaaatgttctccttcccttcacttctggtcacataatcatacttggttgtgcagtgtacygtgaaagacagcaatatgacctttcctaaaatattgatgatgcatgatgagaataaagaccaacccagctttcctggcctcgttaagtgaaagaagggcctccatcacttgtgacttcaacactaaaagaggatcatcttcaaggcaaattacttcttttgttctgttgtcccttcactcacaccaaagtcagttaaacctattagtagcatttacacttaatac

SEQ ID NO: 805978 - DNA, 661 bp, Homo sapiens
atggaagaatatttatcaatcaaatggaaggcaaaaaatgcaggtgttgaaatcctagtctctgataaaacagactttaaaccaacaaagattaaaaaagacaaagaagggcattacataatggtaaagggatcaattcaacaagaagagctaactatcctaaatatatatgcacccaatacaggagcacccagattcataaaacgagttcttagagacctacaaagaggcttagactcccacataactatagtgggagactttaacaccccacgtcaatattagaccaatcaacaagaaggaaaattaacaaggatattcaggacttgaactcagctctggaccaagcagacgtaataratatctacagaactctccaccccaaatcaacagaatatacactcttagcatcacatagcacttattctaaaatcgacctcataattggaagtaaaacactcctcagcaaatgcaaaataatggaaatcaaaacagtctctcagaccacagtgcaatcaaattagaactcaggattaggaaactcactcaaaactgcacaactacatggaaactgagcaacctgctcctgaatgactactgggtaaataacgaaattagggcagaaataatgaagttctttgaaaccaatgagaacaaagag

SEQ ID NO: 805979 - DNA, 661 bp, Homo sapiens
atggaagaatatttatcaatcaaatggaaggcaaaaaatgcaggtgttgaaatcctagtctctgataaaacagactttaaaccaacaaagattaaaaaagacaaagaagggcattacataatggtaaagggatcaattcaacaagaagagctaactatcctaaatatatatgcacccaatacaggagcacccagattcataaaacgagttcttagagacctacaaagaggcttagactcccacataactatagtgggagactttaacaccccacgtcaatattagaccaatcaacaagaaggaaaattaacaaggatattcaggacttgaactcagctctggaccaagcagacgtaatagwtatctacagaactctccaccccaaatcaacagaatatacactcttagcatcacatagcacttattctaaaatcgacctcataattggaagtaaaacactcctcagcaaatgcaaaataatggaaatcaaaacagtctctcagaccacagtgcaatcaaattagaactcaggattaggaaactcactcaaaactgcacaactacatggaaactgagcaacctgctcctgaatgactactgggtaaataacgaaattagggcagaaataatgaagttctttgaaaccaatgagaacaaagag

SEQ ID NO: 805980 - DNA, 661 bp, Homo sapiens
atggaagaatatttatcaatcaaatggaaggcaaaaaatgcaggtgttgaaatcctagtctctgataaaacagactttaaaccaacaaagattaaaaaagacaaagaagggcattacataatggtaaagggatcaattcaacaagaagagctaactatcctaaatatatatgcacccaatacaggagcacccagattcataaaacgagttcttagagacctacaaagaggcttagactcccacataactatagtgggagactttaacaccccacgtcaatattagaccaatcaacaagaaggaaaattaacaaggatattcaggacttgaactcagctctggaccaagcagacgtaatagatatctacagaactctccaccccaaatcaacagaatatayactcttagcatcacatagcacttattctaaaatcgacctcataattggaagtaaaacactcctcagcaaatgcaaaataatggaaatcaaaacagtctctcagaccacagtgcaatcaaattagaactcaggattaggaaactcactcaaaactgcacaactacatggaaactgagcaacctgctcctgaatgactactgggtaaataacgaaattagggcagaaataatgaagttctttgaaaccaatgagaacaaagag

SEQ ID NO: 805981 - DNA, 589 bp, Homo sapiens
atcgttctagtggccatgtgaagaatggaaccaagggaggcacaattagaggcagagggaaaccaggcagacggctgctctttttgagttgagcttaactctccttgtctgaacttggtgatagcaatgggaacaaagtgggtagactaacagagagcattaagaagttaaatcaatctctctctgtctcctcccaacctctctctctctttcatccccttctctccctatctctcttttttttttcttctcctgtcccttcccatcccacccctttagactaccttccagtaaatcacactgtcatttggtgccacaagctttcagggtagacactgatttttcccccctaatatctgctctctttcaaaaggaataattcaaaagacttaggaccattaccactgaaacaccttcgagctatttagctaaagcccaccaaaycaaaacaaaatactgatttttttttttttttttggtgactctgttcatacagtgaataaagatctatcaaaggaaaaggaaactgagaccgaaaacttagggtctaagttgttctaaacccagggttctcaaatgtgttgtacaa

SEQ ID NO: 805982 - DNA, 611 bp, Homo sapiens
cccttcaacatcatgatgccttaaatttttcttagagagcaaactgaatgcagtaggcatgacaggaaaattgctaaactatactttactagacttaaaatttctcctcattgaaaacctaaattggtaagccacagactaaaagatattcacaaaatatacatctaaaaagaagacttatatccaaaatctctgaagaattttaactcaataataaaaatatttaaaaatccagtgaaaagtggataaaataatctaataaacatttgcaaaggacacmaataaatggcagagaataacaacaaaagcaaaacaaattaaaaaatgcagcatcactagttatcacaaaactgcaaattaaaaccataatgagataccattacacacctagtagaatggctaaaatttagaagtctaacagtatcagctgttagcacagattttaagcaatgagtctcttaaatattgcttgtagaaatgttaaatagtccagccatttcaaaaaagagtttttcaatttctttaaaagttatgcctaccttatgacccagcaattttactccaaaacaattaaatcctatgtttataaatgattgtataggcatgttaat

SEQ ID NO: 805983 - DNA, 579 bp, Homo sapiens
aactctcatttgaataacaagaaatgtttttaactcaaacatagaacaactaaaattctcatccatctgtttagggattatcccaggttgcagaataactgagtgacatcaattctcatttcaatattctctaaccaatgggttgtataaaaaaatgaatctctacaaagacagtgtctacctagatgaaacagtgaacaaaaaatatggcaaaagaggaaattgaattaaaaaatgtatgcacaataaagtagttcataaggcaatatacagaaatacatgaagaaggtaaagatatttktctgcacctgactgaaaggcagactttagccaaagtttctatttctctgtttcactactaggatgactatacactctgcatagctcagaacaattatggtttacacctgtcatcctggtcgccttctgacacatttatttccaatttaaaaaatagtattgttattaaatgttatataacctgacaaaataactcgatagcaataagcttcaatgtgcttatttaatgaaacattcagaacattagtaggttattgaggttccattgtatccaacatg

SEQ ID NO: 805984 - DNA, 579 bp, Homo sapiens
aactctcatttgaataacaagaaatgtttttaactcaaacatagaacaactaaaattctcatccatctgtttagggattatcccaggttgcagaataactgagtgacatcaattctcatttcaatattctctaaccaatgggttgtataaaaaaatgaatctctacaaagacagtgtctacctagatgaaacagtgaacaaaaaatatggcaaaagaggaaattgaattaaaaaatgtatgcacaataaagtagttcataaggcaatatacagaaatacatgaagaaggtaaagatatttgtctgcacctgactgaaaggcagactttagccaaagtttctatttctctgtttcactactaggatgactatacactctgcatagctcagaacaattatkgtttacacctgtcatcctggtcgccttctgacacatttatttccaatttaaaaaatagtattgttattaaatgttatataacctgacaaaataactcgatagcaataagcttcaatgtgcttatttaatgaaacattcagaacattagtaggttattgaggttccattgtatccaacatg

SEQ ID NO: 805985 - DNA, 596 bp, Homo sapiens
attgcatagctaattcacagtgcacagcacaggaattttcaaggacaaaaacaattttctgggaaaacttcagaaaatattttttcttttaagcactggatgctgacagagaatgactgggttaagtgttggatgtcaatgtctaatcagatgtgatgtttaatagtagaaaagagcatgaaaaagactgtcaatttctatctcattaaaaaaaccaaataatgggcactttaaaacataaaatatccaatggaaatcagatgtagaatgcctttaaaatccaaaagytaaagtcacttgactttcaaaggcagccataacattaaaaaaatgcctaaaatacaggccaagtgtgtgtgtgtgtgtgtgtgtgtgtgtgtgtgtgtgtccatgtttaacatctatatatgctaaattgaaacaaagatagataaataacaataaattattacattaataaatgggatttttaaagaaggtttagagatattcctttaaatgttacattacactatacatttttagacttaaatgacttgtacaggaaaatgtttatagtcagcctgatattcaaaagtaataataatttgctatat

SEQ ID NO: 805986 - DNA, 558 bp, Homo sapiens
aattattccattagtaacatattctaatgccatcataatcaaattagtattgtagtaacaagctcaggtggctagatcagtgcgcaacacagataattcagaaataggtctaagtgtatatgagaatgtaacatataaaacaggtaatattttaattcataggaaaggacagttaatttttataaattgtgtgggcatatgtggccacatctctggagtaaaactgtgtcacatctgtaacacatacattctgtttgacttcaagtctctctattgatgaaaaygtgaatagtttcaaactttggcaaagcatttaaaaataaatattaaaattaaaactgcacacacactttttttgcctgtccgttgcattcaattactctatctcttggagctgaatttatttctgtgaggctttatgtataattatatttattactgcatttctcataatagccaaaaaaaggaataaaagcatacaaatacagtatatgtccaaacatgcaatatcaaggactacgtaaataaattacatttaaaatctgcatcatggaataa

SEQ ID NO: 805987 - DNA, 660 bp, Homo sapiens
tcagttcctaattatccctctcatctttgatcttctatgtaaagcactatgttctcctttcttttacattttgatcaaaatagttatttttctgaattgcttgtaattttaaaagtataacacatgtgtagctgatttttcttttatcctactgtggtattaaaatctcattcatatatacacaacatggataatgagtagggggcttttagaaaaaagcaaaaataaacactatatattaccacctagtttaaaatatcaaacattaatgataactttgaaaccttttcatgatcacattttgtatctaacacccagagctatccatatttttgaatgtctatttcatgttaccttgctttctactgagttttacaaatggacttatttgcctgtttttgtacattatacaaatggtatcacactgtatgaatcctaacatggyttatattttgttgactaatattatgttgtagaagttacctatgtttctgtgtgtggctatagtccagtttcacggctatacagtattcagtttaatgaatagccaaatttattcatccattctcctcttggttgaaaatttacttgtttatatatgtttgcatttacaaatgattctgctaggaaacctcttctgtctcatgttgaacttctaat

SEQ ID NO: 805988 - DNA, 631 bp, Homo sapiens
ctctgtctatggagtagctgtactttcacgacttgatgttcttaataaacttgcttttgctttgcactgtggactcacctgaattctttcttgcacgagatacaagaaccctctcttgggttctgggtcaagatgactttcctgtaatctttcaccttcctcacaatcatgacggaaggtgaaaggcacatcttacatggcagcaggcaagaaacagaattaaaaccaagcaaaacttcaacacatattagcaacagtgcatcaaaatgaaactttcttaaagttcatttactgttaygtagcatgcaattatacaatatttcctatgtatccaaaatgtcactggcttctgctcccactggattgattaaatatatttaacatatatataaaatatgtatagtttacatacatataaatatatagtagatgcttgaagaacacaggtttgaattgcacaggtaccattatgtgtgattttttttctctgccatccctgagtcaccaagataaatccttccttttcctcctcctcttcagactaatcacaatgaggatgaatacctttagggtgattccctttaatttagtgaacagtaagtatattttctcttgcttatgattgtcttaa

SEQ ID NO: 805989 - DNA, 656 bp, Homo sapiens
taactttcttaacaagtaagtcacaaacctgaaatcatccttcactttatattgtctctttccccatattaaaaattttactagatcttattgattttgccttcaaaatttattttaaaatgtgtttatttccatctttttctgaagaccacattatttcttgctgggaacagmtgtaaatattttctccatcttagagtcttcctaagtacaaactggatatccatattgctgacagagtcatctctttaatatcataatcaaatcattttctctccttacatagatgtattcaggaatttcacattgctttccaaataaacgtaaaagcctgtaacatttcaaacaaaacctttatattttggtcctataattttaggcttatcatctgtcatgttcccaaatgtttccccctttctcttaatgacccattcctggctactttttcttctaccttcttgtcctttgtggatactcttagcagtagcagtaataattttcatgtcttacctgtggacaccattatacttgtacttcgaggctcatatttttatttttaaccctctagctcagaatgagttagagctttgatttatatttttaaatcactctgcatattagttcttattagttctattagtttctatattgtgaat

SEQ ID NO: 805990 - DNA, 621 bp, Homo sapiens
catattatgttaagtgtaattatgaccttattattgtctttatttggagattatgtataatctcaggagatgtatatgggttcaagttgaccatgggtggacttgtaatggttaatactgagtgtcaacttgattggattgaataatacaaagtattgatcctgggtgtgtttgtgaggktgttgtcaaaggagattaacatttgagtcagtgggctgggaaaggaagacccactcttaatctgggttggcatgatctaatcatctgtcagcacgacctgaatataaagcaggcagaaaaatgtgaaaaggctagactggcttagcctcccagcctacatctttctcccatgctggatgcttcctgccctcaaacatcaggctccatgtttttcagctttgggactcacagtggcttccttgctcctcagtttacagacagcctattgtgggaccttgtgattgtgtgagttaatactacttaataaactcccatatgtaggtgtgtgtatatgtcttattagttctatccctctagagaaccctgactgatacacctgctctaacaggctgttgaatgcccatggcttttccaggtgcagggcataagctgccagtggat

SEQ ID NO: 805991 - DNA, 547 bp, Homo sapiens
ttctcatgcttgcaagctctctggctttcccttctgccacatttctttctttcctttttttttttttgagatggcgttttagtcttgttgcccaggccagagtgcaatggcgcgatctcagctcatcgcaacctccgcctccagagttcaagtgattctcctgcctcagcctcctgagtagctgtgattacaggcatgcgccaccatacccagctaatttttgtatttttagtagagatggggtttctccatgttggtcaggctggtctcgaacttctgacctcaggtgatccacccacctcggcctcctgaagtgctgggattacaggtgtgagctactgtgcccrgcctctgccacatttcctttggcactttgtcttttgcttcatctctgatttcagctggagaaaattctttgcctttaagggctcatgtgattaggtgttcccacctggataatccaggctaagctctgtattttaaggttggtaaccttaattacatctgcaaaaccctctttgctatgtcatgtaacgtattcataggt

SEQ ID NO: 805992 - DNA, 626 bp, Homo sapiens
tggatgtcatgaaatattacttttcttttgatttttttaaaccacttaaaatgtggaaaacattctgctgtttcatggaaaacaggtgaacacctcaactaatacagttgctgtaagaaggcagctaagtaaatgggtttgaaaagcatctgctataggactcaggaactgaccacttttatctggttaaagaggattattttcaaggataactctcagtactgtggcttcagcactagsggggaaggtgatgtctccaatccgatagtagatccagaagaaagaaagggatttaggcataggaggacacagaggctaacaagtgcttttttgttttttcagtaattcagtctttagcaactctggtgtatgacattctcctgagggaaatattttaaattttgtgtgccttaagtaatttttttttcactcttggcaagcactcgcttacaattttgggtcaaaaaaaatacttttactatagaaagtatctgagagaaattaatgttcattactaatatcaatcctttagaatatgtcacctcctttgacattttcagaaaactgcctcaaataagccccaaatgcaaatgtgacccatatgccaatgccatatatctggctgt

SEQ ID NO: 805993 - DNA, 570 bp, Homo sapiens
aaacattaaaaattttcaacccactttacattatttctaatactttcttatgagatcaaggagaaaggctcactttggtgctggtacattttcaaaatcattctattttgtgtgtgatcactcattacctaatttatatataaatatatatatatatatatattaaatagacaacagactcacaacttcaagcaatgctatctattgcataagataatgatgttattgtatttatttttatctttagaratactgctttcctgttttttgcagtgatataatgtttaagtaaaaaaaagtcagtagaatttaaatactagctaaatactacagatgatatttgaatgaaggaagtttgggaaacacaaaaccaagtgttctctaaggccttgctattctaagagaaaaatgtaccaagcaaacagaaaacagaagaaagcaggagttgctatgctaatttcagacaaaactgattttaaaccaacaaagatttaaaaagacaaagacagacattacataatgggaaaggattcaattcaacatgaagacctaaatatcctaaatatatat

SEQ ID NO: 805994 - DNA, 650 bp, Homo sapiens
gtggtccactcagtccatttctagagtatgaaaagaacagcacatggtaattaagacagtcaccgcatgtgcaacactataataataatggtcaggattagggacccaattttgcccatgtttatttgcagatgtgttcattttgatctgcatatcatgctgtggtgcttgtgttcaargctgtcataatgtgctgtgcatgtgttatatttccagtgacttctttctttgctggcaccaaggagcatctgattcagtgggagacaagttgaggagcattgcttccacgccattccatcttccctacctggtcactggccccacatagacaggttctctcaatccaaccacagaattcctcaccacaaaacactcactgttctccaaatgaatgtcacttgtaataattggccaacatttttatttttttaatctgtatctattatgatgttattttaaggcaacagattttatgcgtaattaactgataaagtagctgaggctaagagagattaaataattttctcaagtttccatagcaggtaagagatttctctaaagccaatgttcttagcaccccaaaaagagacaatggggtctcatggttaagactgtggatgttaaagtcagagttcaactcccagccttac

SEQ ID NO: 805995 - DNA, 629 bp, Homo sapiens
catttattcagtcaaatatatcaatcagtaaattagtgagtattttaattaaaagtttttttaaggggactaattatgaaagaatagacagaatataggggaactatcaaagacagtcttacaaacctgagggttagcagaagagagctgttatcaccctagttctgaaagcttgagggratggatgggaggttactagagcctggaatgagagaaaggcatgtagagcccatcttggaaggaacagtaacacttgatcaagggacatggccagccctggtggttttttctggggaaatattctgaccttactcttttttcttccactgttcccttcttcaggctcccctttggctgagctcagtggaaccagagggcataggagccctaataatatagccctgaggggccttctccttagggcagaaagcagagtgggaaaggatggatggcagacatgaagaggcaaatggaaggtatctagtatatagaccaatatttattaagaacacaccatatatcaagcacagggctaggccttggtgagacagtaagcctttccagcccctgtcctcaacaaacttttttacagaatgataaatcatatgacagaggtaacagaggatgct

SEQ ID NO: 805996 - DNA, 492 bp, Homo sapiens
ttgttttgtgaattatggtttatttaattcatgctggctgctacaaagtaagcattagatggctacaattgtgccaaactcttgttggatacttttcctgagttcaaggtggaagttttcatgccctgcttccctgtagaaagaatagcatatttccagagcctttgwttaaaaaattaatcatctcaaaatagctcagtccaaataaaatgtaagcgagcactatttcatatttgatatttagagcaaatgctgtgggttgagtataaattcaaaggtataattagttatccttaactagttcttaattgtacattaaattaatttttcagtgaaactatgttctttttctttttccaattatgagctatgattcagggagacattttcacctctccgttatctatgcttttagagtctaaaatacctgctgacttattagcttcacctattagtatctgcacaagagattatgtcggtctgtaattttta

SEQ ID NO: 805997 - DNA, 604 bp, Homo sapiens
acctctgtgttgtgaaagaagacttgccttctagtctctacatgatcacttactagctatataagtattaggtgcagttatatcagtagcacaccaatattaggattgttttcaaaatcaaacatgataatatatcctaaaacacattataggtcatcttgcataaacattagggttttagtagtaccaatacagagttgtccaaatttctttttctgaattttttaggtcttcctraggttagaaagggagctgtaattctagaaagaaaaaaaaaataaactgagagagctatctgctgacaagctatactcagcccaggtctatagcaaagcttgccactgattacaacccatgaccaagactctcttctgtctatccccagttgcccaccttgagtggaacataacatctctaaatttgccttaaataaatacataccatttattacttcatgaaaactttgattcattttttccattcaatagcagcacatttctgagcagctatatgaaagtaaatggtaaatggatggtaaaagccattctgatgaggcctcagacagaaatgactaacaaggtattggaaactggatccttgttac

SEQ ID NO: 805998 - DNA, 640 bp, Homo sapiens
taatgaaaatttagaggaaacacaatgtttactgaaaatttgagaaactgtctccatgtgtagactattttattcgtgaaatgtattacttatttgatagactatccgtattggtccgttctcacgctgctatcaagaactacctgagactgggtaatttataaaggaaaggggtttaactgactcacagttgcacatggcttgaaaagcctcaggaaccttacagtcatggtggaaggggaagcaaacacatccttcttcacgtggtgggaggagagggcagtgcagagcgaagtagggaacatctccttataaagtcttttataaaaccatcagatcttatgataactcactcactatcacaagaacagcatggtagaactgcctgcataatcgaatcacctcccatraggtccctccctcaatacatgggggattacgatttggattacaattcaagatgacattttgggtggagacacagccaaaccataccactatcccttatcccttagagtccacttccagaggcaaatatgactgtattcctggaatggaccaatggagatgatcagagaagtctcatattagcataaaacagttgactaagtcttgagattggagtagaagttcatcagtg

SEQ ID NO: 805999 - DNA, 637 bp, Homo sapiens
tagtaagattccatttgtctccaccaaaaacccatgggcctgtagtactaacagaatccatggaaagtgattcccaatcaacagtttcagccagagggctaaaagggacaaaagctttccgatgacaaaggtctgtctgaaaagtacattttgttttacttgtcacctcatccggccctgaaaacttgtcacaggggaagaccaacgcagcagtgggtaaggacccactttaggggagcatgaattgctcattctcaagattaggcagtggggaacaaagtggtctcttcccgtctgttcctctgggagggctccacgttaaagtgtccatgactacgctggagagaatgagatggaaccctgtgtgcacagctgtagagctccagctggctcctgaaggcagccgaccttttcactaacactggtgagactctstcaccaatgtgtccccgtcatactctagagcctcgggttgcatgggtcctatttttcctgaagcaaactaatcttttcccgaagctacactctgcagacaagcagcttcttttatttgtatctttctcctgtcaattgcatgacagaaaaggaaaactgtgtcaaatagtgaattctaaccccttcctatgcctcagagctc

SEQ ID NO: 806000 - DNA, 595 bp, Homo sapiens
atatgatcaaatataatactaaaagactaaatgcttgtggctcttttatatatatttaaaacacacagtaagaacataagaacatctcaaatcatttagaaggtaaaagggggttatcaaccaaaatctttggaaatttcataaaatttaaatatctgcaaacagtccaaccaaaaacgaaaaaaaaaaaaatcccaacatttggctatggagggcacttcacatgtgaaccaaatggcgttataacattttccttcaactagtcactaaacccaattagaaagaatacaagagcaatattggagacatccccaaataccacgtacttgattagaacattctgttatgaagcgctcagctaccgcgggctttcctttacattgcatacattactttacatttctacagtgcaatgttgaaatagcctccaaatyttgcaaagtagattgatgtccattctacaaaaatattaacttacagtacataacactgaataattttaatctgtacatttttttccttccatgatagttgacacacgtcagtttgtacaagttagaaaaaaacatctggttgtttacatctggattaatag

SEQ ID NO: 806001 - DNA, 611 bp, Homo sapiens
ggctatgttattaaaaaaaaaaaactttatttaaaaaaactggtagcccatgagctttagtttgcccaattctggcataatggaatcctatgcagcaaaatggatgaatttcacaaaaataataagcaaaacacatgtaaacaaacacataagtatgatgctatccatatatgtttcaaagaccaggcgaaactaaactgcaatatttgggaatgcattcagaaaatggcacacaaccgaaacacrtagggaagattatcacaagaaacagaacagtggttgatatggtttggctgtgtccccacccaaatctaatcctgaattcccatgtgttgtgggagggacctggtgggaggcaattgaatcatgagggtaagtctttcctgtgcagttctcatgatagtgaagaagtctcacgagatctgatggttttaaaaaggggagtttccctgcacaagctatctccctctttgcctgctgccatccatgtaagatatgacttgtccttccttgccttccaccatgattgtcaggcctccccagccatgttgaaatgtaagtccattaaaccctttttcctgtataaattacccagtctcaggtacttcttt

SEQ ID NO: 806002 - DNA, 635 bp, Homo sapiens
atcaaaaataagcattcagagattccagtggttcctcttttcattaagctgtttgcatgttttatagctgcaagagatttaagtttcttttagtaacaagtttgccttcttcccggtgcccactacagtggttttgatccatgatctaaggtcccaggacgttattgcactggtttcttgtttttgtttctctgagttgatgggacgatcataggcagaatccagatratggaaaagatgtgtttgaattaaagagaaagaggaaaaccctggtatgtgtgaaggttctgggagagacaggctaatggggtgcttgataatctgattggaaagaagcctgcagaagctgcattgcagaggaagaacatcatcagagagggaggtggaaggcctgcagtcacacaaggggagccatattctggatgagaaagggcattagacatattttaatccaagccagtgaatccaccctctaaactccagacaacaccagcaactttgggatcatgaaatgtctactggctttaacatcaacagacctgaatttgcctctgagttactttgccctggtcacctgcactgaccacagccctcagaggctggcatggtctctctctaaggtgtggaggataata

SEQ ID NO: 806003 - DNA, 646 bp, Homo sapiens
cattgccctttggtgcgagatatattctaggttgcagagtaagtgccaacagcagcaaaattatcgcccccctcctgctactgtagtaagtcagcaatggcccttctgtggtcagaatggcacattcagcagcaactattcracagggatttacagaaacttccccatggctgttaggaatcttattcagcagtgtctttgaaaacccgattctgtgcagaattagctatgtagaaatgacctaggttgtgataaaaggtattttaaacaaatctaacttgtaatttcactcaatgtgtattttgcatttaatgccacaaagtctggtagatacctacacatatattttgcattcataagttttatagtggttcagaatttttttccatattaacattttaaaaaatcctggctttatagagtcagttcaccatacaaagccactatacatcacttaggtttgtgatgaaagaatggaattgcagctgtgtgagtactagaatacccaaacatgaattagactcacaagcatttggcaatagttcagaaaaagagcttaatctggtttcatctgagactgcttttctctgttctgcaacatccccccaagatgttgtgtctgataccggatcacaacgtaatggga

SEQ ID NO: 806004 - DNA, 623 bp, Homo sapiens
tcatgaattcatacacagaaaaatgtactatagtaaattaaagttggaaaaaaatgatttatgattcttaacagaaattaacatgaaagtactaaaatctagaaagtagcaaaaaattttatattgtgctgttttaagatactttcatcaaacacagaaacaaagcaaaggcattatcttttggaaactttattctgcccatcaacatgtaaacatgtaaaacttttatcttagaatttgaaatatttcaaaattatatacrttttatcagaaactgttaacaactacaaactttctacttcagactttggtggaatttgtctccacttgtaatccgatttgcatctttaatgatggtctcaccatgaccccagttggaatctcttgaacatcagatttttctggaaataggatattttatccttagaaatagtttatgacctctcatctccagtgatctttcctaaagctgtacttctcagtaaagtcttttttctacgttaaagtacagaggggttttgtgtgtctgttttgttttaaaactcaggaggacctggcaaactttaagtggtcagagataatttgggacacatggatcccaagataaacaatttctactacta

SEQ ID NO: 806005 - DNA, 624 bp, Homo sapiens
tccacctacccgacccctgctaagatgctaccttttaaagaaaagaaataagttcttcacacttttctacatttataattcaatataaataactgctactggtatacttaatcacaattagattaaatatgttctttgaaasagggaggtcatctaatgaatagaagtgaaatatgtcagaaaatgtcacataactgagagtgtgacatctttagtaaatagaatgttgagatgattttagtgctaggctagttttgtaagagacatcttatttgacacctttgttcaaacaacttttgtggttctcaaactagcctctattgaaaagaccaagttccctacgtcttctctttgaacactttcttctttgcattaacctgttcttgctagtgcgtccaagtgtggaaagcaaagattagttttaaatcttccgggtcaaaactgttttggcttttttctagagctgataataagtagtatagttttctgtgtaccatgtgtaagagaagagaaaaggtctgactttatgttagataatccataattcggttgctctgtcccactatatggagaccaaagtcacactaaatggatgccttgggtaggggagaaggatgtagcctt

SEQ ID NO: 806006 - DNA, 543 bp, Homo sapiens
ggtgtgatcactttttatggacaataaaagctgaatatgtttttagcttttttgctgtagtttttacaatactgataattgtaattatcagtataattgggtctctctattctatattctttctttgtttttagtactatttgtcaaaatctttttctaccttttttttttttycagatgttcctttctctttcatgttactttcacatctactgccctctgtcttgcctcttggcgtcatctttttaaagctcgaatgagttcaacttcattttgtaaaggagtcaaaggaagaggtgaaaggacttacgccagggcctggacagagcccaggctcctgacttctctgccagttctcttagcattctccttcctaaagtccttcctaagtagctaacttaaagattccaatgggcagtcaaacagcatgagagattagtcaagaaatggaagaagtagagttgtgtaatgcactgtaaggcgtcaaggcagttaatcatactcaaaggcacaagacagtgcaggtgaacagtccaagactgc

SEQ ID NO: 806007 - DNA, 589 bp, Homo sapiens
actggatggagaatcaaaaacaggttggactgacttataaggaggcacaatccagaatgcaaacctcaagcgcactgactgcttgaaaaactctcccatttcacctgccccctaattctttctgttcttcatcccgttggcctacactgctcattttgccctttgcatgtgttgtaccatgtgttgctgtcttctgttttatatttatgatctgttttctgaaatctcccaggctgcaggtgtgtcattccttacctggtcactctctatgtctggtagataagataattgatgctcattttccggtgatgaggacgatgatgatgacgatgatggaaaattatcttgcaatgcctgttctccacttctttaccttccttccacactcactacttcaatgaaactgctcaagacctcctggatgctgcagccaaatgtcacttctatctttcagcaacatctgacactgttgacaatttcctccttctggtcagatctgcctcccttggcttctctgactctaagttttccaggtcctcctatccrtcttgacttttaaattcaattacttctcaggcatacccatttg

SEQ ID NO: 806008 - DNA, 575 bp, Homo sapiens
ttgtgtgccagacaagtaataaagattactatttttatggtaatttttttatttgaatatttctgtttctggaagatggtaatttttttaaatcatgaatttcctgtaagtgaaactatttgagggagtattgacctttttttgatcaatcattgattatctgtgttgcactctcagtatttctcttatagtccatatgtccctctgaataattgtagaacaataacttgcttacacagtgtttttakaatatgcttcaggaagcttgcctgtgtggtatttaactcagacatttatggagtataaaaccaatcttactgtgacttttaattattaggaaagtggcttacagttaaaataaagcttacagaaaatattgtagcaataattaatatccagtaaaatacagttgtaagcttcggttctttcagacattttctcaacccagttctaatttgatcgttactgcacctcagtaagataggtgatgcaggagtcatcatcccatttcacaggcaaagcctggcctgttcagtgaggtagccactggccccatgtggctattaacattcaaa

SEQ ID NO: 806009 - DNA, 612 bp, Homo sapiens
aggaagaactttatgctaaccaactagacaacttagatgaaatggacaaattcctagaaatataaaagttgccaatactgattcaacaagaatataaattctgaatagacctataccaagtaaagaagttgaatttgtaattttaagtcttcccacatgaaaagaatcccaggtccagttgttttcactggaggattctataaatcatttaaataatacttaataccatccttaatgaactcataaaacagagatggaaggaatatttcccaactcatactatgagaccagtaataacctgatactaaaaccaaagacatcaaaagaaaattgcagaccaatgttcctcatgaggttagatgcaaaaattctcagcaaaatattagcaaactgaatctagcaatatacaaaaaaaaaaaatgctrtattattaccatgtggaacttatcccaggaatgcaaggttggtttaacatctgaattatcagttaacataatacaccatataataaagcacagagccagaaaaagcatcatctcaacatctcaaaagaccagaaaaagcattgcacaaaatccaatacccattcatgatttaaaaaaaaacagcaag

SEQ ID NO: 806010 - DNA, 622 bp, Homo sapiens
gagacatacacacacagggagaatgccatgtgaagactggaattttgctgccacaagcccaggaactccagaatctagccgagagcctccaaccaatctttccctgctgccttcagagacagcagggccctgccaacatcttcrtctcagactatggcctcccaagctgcatgataattcatttctgttgctctaagtcacccagtgtgtcattccctgttacagtagctgtgggaaactaacacagtgagcctgcaggagacgctggtgaggggcagttcatcaaaccccacccagtttgagccagcctttggaactggttcccagctgcctgcagccctgccaccctggcctctgattccatccaaacccccaatcaagagaaagagttaagggaatctcacatcacccaggagccttctgctggagcacagtttatttaaactgtctggtccatctttattactactgacacgccatcatacaagtgactcataaaactgggtataaaaggaaggcagaatcatttttaatccctctaatgtaatataatgggaaaattaatcatttattgtagcagacaattgaaaaccactcagagtgttctcttcatcctgaaact

SEQ ID NO: 806011 - DNA, 622 bp, Homo sapiens
gagacatacacacacagggagaatgccatgtgaagactggaattttgctgccacaagcccaggaactccagaatctagccgagagcctccaaccaatctttccctgctgccttcagagacagcagggccctgccaacatcttcgtctcagactatggcctcccaagctgcatgataattcatttctgttgctctaagtcacccagtgtgtcrttccctgttacagtagctgtgggaaactaacacagtgagcctgcaggagacgctggtgaggggcagttcatcaaaccccacccagtttgagccagcctttggaactggttcccagctgcctgcagccctgccaccctggcctctgattccatccaaacccccaatcaagagaaagagttaagggaatctcacatcacccaggagccttctgctggagcacagtttatttaaactgtctggtccatctttattactactgacacgccatcatacaagtgactcataaaactgggtataaaaggaaggcagaatcatttttaatccctctaatgtaatataatgggaaaattaatcatttattgtagcagacaattgaaaaccactcagagtgttctcttcatcctgaaact

SEQ ID NO: 806012 - DNA, 622 bp, Homo sapiens
gagacatacacacacagggagaatgccatgtgaagactggaattttgctgccacaagcccaggaactccagaatctagccgagagcctccaaccaatctttccctgctgccttcagagacagcagggccctgccaacatcttcgtctcagactatggcctcccaagctgcatgataattcatttctgttgctctaagtcacccagtgtgtcattccctgttacagtagctgtgggaaactaacacagtgagcctgcaggagacgctggtgaggggcagttcatcaaaccccacccagtttgagccagcctttggaactggytcccagctgcctgcagccctgccaccctggcctctgattccatccaaacccccaatcaagagaaagagttaagggaatctcacatcacccaggagccttctgctggagcacagtttatttaaactgtctggtccatctttattactactgacacgccatcatacaagtgactcataaaactgggtataaaaggaaggcagaatcatttttaatccctctaatgtaatataatgggaaaattaatcatttattgtagcagacaattgaaaaccactcagagtgttctcttcatcctgaaact

SEQ ID NO: 806013 - DNA, 567 bp, Homo sapiens
acactctatgatgttctcaccacgatgaaatcgcctaacgcggcatctctcagaaccagccccgtggttaagccacacaggactgtgtcagggtgtcagcattcacatcacgtcctgatatatctcctccaagaagcctgctttatagaaaatgaattttcttatcacaaggctttaggttcctttcttttctggttaatggggggaaaatccaggcagacaagcctcaggtgatgtggccactttcatctcagtcaatatcaattgggtcctatcagagctcccaggctcctggaatgggaattctctgtccttcccccagttttaatttccttcctcaraaaaagggacacagtctgcattagtgtgcaggatgtgaggactgcacgggtatctggctttcacacctggccagttctgagctctacaggctgcattcaccaggcaaggatggggagagagctggaggtgcagtggtggtgtgggcaagggtggtgccagtgtcctgccagggaggaccttgggatagtgggtgctgatcacactagggagaaggccggcattgtt

SEQ ID NO: 806014 - DNA, 498 bp, Homo sapiens
ggaggttgcagtgagccgagatcccaccattgcactctagcctgggcacacagccagattctgtctcaaaaaaaaaagaaaagggggagtgtatgctgagttcctgccctcctacctagagttataggcagtaagcaaatgattacaaatatgcaaatagtgaagcgtgygcataggagaaccctaggatgctctgggagtgtacaatgggaaaacctcatccaattagaggctccaggaaaacttccctcagagggtcagttaagctaacatatgaatgatgagtagggtttaccagggccacatggtaggaggagaacatgccagggagatggaagagcgaacatgaagcccaagatatgggagagtcccaacagcccaaggggctgaagaaaggccttgtggccagagcccagagacataaggtgggaggagtaggcaggagccagaacatgcaggtcttttagaccagctaaagcactctggacttgatcctct

SEQ ID NO: 806015 - DNA, 488 bp, Homo sapiens
tttctggttttgagaaactatgaataaaactgctgtcaacactcactgtgggtttctgtagtgacagagctttgtggacataagttttcacttctcttgggtaactaggagtgggactgctggattgtgtaagtgtcttagactgttccagctgctataacaaaataccgtaggctaggtggcttataaacagtagaaatgtatttctcacaatcctggaggctaagtccaaaatcagggtgcyagcctggccgagttgtggtgagggccctcttctgggttgcagactggcaaagtcctgctgtaccctcacatggcagaagggcaagacagctctctgggcctcttttatgaggacactaattccattcatgagggctcctcccacctcatggccccacctcctaataccatcttcttggtgattaggtttcaaaatatgaatttgggaagacacggacattcagaccacagcatgtgtgtttaca

SEQ ID NO: 806016 - DNA, 605 bp, Homo sapiens
acctcaggtgatctgcccgcctcagcctcccaaagttctgggattacaggcgtgagccactgcgcccggccagcatcattattcttgtcataaaacgaaggaaacagagaatggattgttctaagttgtttgtaggtaagtacatgaatctgggctcctctgtctgatcttggcttttgatgacttccccaggttgaggaagccatctgaggacaataaagagggaaaggttaacaaaaacatccaaaaacaatccacaaaacttggcctgattagaattgggttctagggaatagaccaaagcccagccaactgcagagtcagtgctgctcagctgatgtccaggtcgtgcccttgagtgagcatcctcattcacaggcaaaacaaggtatctgcttctgtttytgacttgagtaccatcaaaagccattttacctgtaaaaacaaacgaacaaaaccccacaaaaaaatcactgttttctatcctagcatatttttattcttcatgttattcattcctttgatttatcccactatgggttaatgccaaaataacactttaggagtaagagatgagaaatataaaattgtcaccagattcagca

SEQ ID NO: 806017 - DNA, 620 bp, Homo sapiens
tctttacttccagaatttctgtttagttcttttttatggtatctttccttttggtaaatttctcattcatattctgaattgtgtttctgattttttttgcgttctcttgtttgttgctgagcttttaaaatattattattttgattttttttccttggatttcatgaatatctttttcattgcaatctgttgctggaaaattattgtaccccattggagatgtcatatttccttgttttttaatgtttcctgtgttcttaaatggatatctgtgcatctggtgtagcagttgcatcattcaatattttgaatttgctttcattggggaagactttttcctgacaatgtatctatggtcctggctggttaggttactttggctttgattctggrtgcaggcagtagtatagtctccatgtgatttctttgactgcaaacagcatcaatgccatctgtggttttctcagtggcttagggtgtggttgttggtggaatccatggtgaaattttgctgaggatgggagcacaaagtgagccagtccttggggcccagtgttggcagtggcaggatgaagatgattccttgggcaacaaggtggtgtaccttgccagtggtgttg

SEQ ID NO: 806018 - DNA, 598 bp, Homo sapiens
tgttatccctaccatttagccaagacacatgaaaatatatgtccgatcatagacctgtacacaaatgctcacagtatttttgtttataatagctaaaaacaggaaacaagtcaaatgtcaatggggagcagatataccagctatgtaatggagtgctactcagcaataaaaatgaacaagcagctgatacacacaacagcatggatgactctcaaaaccatttatgctaaggggaaaaaagctggatgaaaagctacatactataggatttcacttttttttwaatgagtaacgattttatttttttaaattttttagttttgttctttaaacttttatgttcagaggcacgtgcagttttgttatataggtgaactcatgtcacggggcttgtggtacagattattagtacttaggtacaaagcctagtacccaacagttgttttttctgatcctctccctcctcctaccttccaccctcaagtaggctccagtgtctgttgttcccctctttgtgtccctgtgtgacattcagataaaggcaaagccacagagagagaaatcagaccactggttgccgagggctggaggtgaggat

SEQ ID NO: 806019 - DNA, 675 bp, Homo sapiens
taaattgacaattcacaaaagaataaattgattattcaaaagataatgaaaacatttcatctgactggtaataaaaggaataaaatttgtgtttattgcattggccagaatttttaaatgaaaattatccatgtggtgtagtgaaatggtatgccaacatttaattttttcaaagatttttaacgatggttgaaatgcaaattaacacaaatattctggaaaatactttggcaatatgtatcaaaaacctttaagctgttcatactgttttcttagcaatcgtatcagtattgatayatgcaaatatttaacacatgggtattcactcagtgttatttataattctgaactggaaataaacaatagagttatttaaataaattatatcatacaatgggactactatgcaaatattaaaataatgttctagaaaaaatacattatgagatatttaataagaaatgtgtagagcatttcagtaagtaacatacaaaagtttgatcccattcattcatttatttttaaatggagaacagaaaatgtacaagataagcctgaaacgttttgtcatatcaaaaagccaagaagcatctgcacgttatgaaggtctttataggactctgaagtaattctacaagagactctttccctgcaaaagtttaaaatttgggtatc

SEQ ID NO: 806020 - DNA, 605 bp, Homo sapiens
tgcatatatatatatatatatgaaagttggagatatatatatatatgaaagttggagatatatatatatattccacactatggaatactatttggccataaaaaagaatgaagtcatgtcttttgcggcaacctgggtggaactagaggtcattatttaagtgaaataactcagaaacagaaaaagtcaaattctgcatgctstcatgtataagtgggagctaaataatgtaacacgtggacatagagtgtggaataatagacactggaggctgggaggggtgggacagtgagaagggggtgagggatgagaaattacttaatgggtacaatgttgactatttggatgatggcttcaccactatgcaatatgtccacgtgaaaaagctacacttgctccccctaaatttacaataaaaaagaaagaaagaaagaaaaaagatataaatactccaaaaagtgttggggagtgttgagcatttgtttctccactcctgatgtttatttccaagtgaagggatatcaaatccctcctgacgtctctctgcctggtctttatttagctgataagtttaacagcagaaagtgagcatgccatcgtctacc

SEQ ID NO: 806021 - DNA, 574 bp, Homo sapiens
agcagactgatttcatcttgataatccaggtcagtcaccccagccaacactgtaactcccttcttagcctgttgacttaaaggtggaaggagctcaaaatgtccaggtggcaatcttaacttccactttaatggaatcgttgtgtcttttgatagcagtgctcctccctctggaactaaaacctctaggccagcagaacataatgtcacaggaacaggaagtaaaatttttgcyagtggatcaccaggggtaatggtgagtggtgccacttccaccccctgattcctggaaacatgaatcctggctatgggagaaacagtgccatagattggatgctgattcagagcatacacggccttctgcagaactttgccccagccctgcaaagtattgtcacctagttggctttgtaactgtgacttcaaaaggccattccaccattctatcaatccagctgctttaggatgatagggagcatggtaagaccagtgaattccatgagcatgagcccactgtcacacttctttagccataaagtgagtgccttggtcagaggcaatgctgagtggaatac

SEQ ID NO: 806022 - DNA, 623 bp, Homo sapiens
ttgtaactgtgacttcaaaaggccattccaccattctatcaatccagctgctttaggatgatagggagcatggtaagaccagtgaattccatgagcatgagcccactgtcacacttctttagccataaagtgagtgccttggtcagaggcaatgctgagtggaataccatgacagtggataaggcattctgtgagtccatggatggtagtcttggcagaagcattgcgtgaaggataggcaaacccatatccggagcaagtatctgttccagtgagaacaaacctctgccttttccatgatggaagaggtccagtataatcaacccgccactaggtagctggctaataatcctgaggaatggtgccatattgagagctcagtgttgttctctgctgctgggaaattgggcactcarcagtggctgtagccactcttggtgagtgtaagtacatgttgctgagctcatgcataacctccatccctgccaccatggccacattgttcatgggcccactgggcgatgacaggggtggctagagaaagaggctgagtggtgttcatagaatggatcatcctatccacttgattattaaaatcctcctctgctgaggtcacccattgg

SEQ ID NO: 806023 - DNA, 638 bp, Homo sapiens
gcgatcctggtctgggcttcccaggcccctgtatctgctgccttcaaaaccctgcatgcgggtctcttgtgtctcccccacccccccccatctcccagctcagtgagaatcatctttcacagtttgatcacatcactcccagctctgcttatctctcctggcttcccttctcaaagccaaacagctagctctgcccccagggcccttctcctgacccctggctcctgacagcctactccccaacccctgctcatcacttcccaggaatttgctttaagcaagggacctgcctgtgcactggcctccactcagcacgagtctgagagagtccaagtagaaaacaggacacttagctaccatctactcccaacctctctcctgrggaggactcaccctaaaggtaagctggctgagtccatcagaatttgctcccatgactcgagtaaccgggagctcatgcacacctgtacggaagaaaagcagacagaggacaaggcttgcagacgaaaagtgtacatccaaacccatctctcccagctaccagctgtgccatactgggcaagcgatgggtcttctctggggctcagaccttccgtctggaaaatgaggctaatgagtcctacctcatagccatcaac

SEQ ID NO: 806024 - DNA, 667 bp, Homo sapiens
atgctctgtccagtgcaccatcattcattaactctgggatgatggtgcattgatagggatggtgcatcacagagaaatacaagacatgtgtccctgtgctcaagaagaacaaaagaaactaacagtcgtttgctactaataatcactaatcattgacattcattcagcacctactattcctggggcactctgckgagtgttctacatgttttgttctcatcctagacctgtgggctaaacatcattaccccatcccaggaatgagaaaactgaggcttgggcactcaggtataaaagataggaaagaccacgcgcagagctaagggaccacgtgactttgggtaagtcacttcagaactctccaggcctgtttcctccttcaaaaggtaagaacaaccgattgttgcagcaatcaaatgagcagacatatgtgacattatactgctgattatcaaagcctttccaaacgcaaggtactcgtcacagaaaactatggtggtaaagtgctctagagccaggctgcctgagtttcgatcctggctttgctatttaatagctgtgtgaccctgggtgaggcactctctgtgactggctttagcttagtttccttgtccctcaggagggtgataacagcacctacctcacagggtcattatgaggactgaat

SEQ ID NO: 806025 - DNA, 615 bp, Homo sapiens
gtgttcaggccaatctccctcaacatgtattttaaagcccctccctcctctctcaatgtcttgtgaataaagcaggatacaaagttgtagctgaagtacaatcttaactatgttacatagaaaaaaaataaacttggaaagacagaaggaaatcagccaagtgtccactggctacttttgcatttggtgtctgcaaggcaagaggtaggaaagggaggagattaatatcttataccttataattatatacctttctgcccttgtgcaaattttctkcaataagtacgacttacagtcaggaaacagtgaaactgtaaaagtcccctctcttcaaaatccttctgtagttttttattttctacatgacaaaatataaatctggagcctggtatttacagcctgctaagatctggtccccatcagaagggcttcatgggtgtgtgacctgtgcagtcacagagggccaacactcagaagcagccatgcttggttgaatgctctgccatgactgtcttgaaattctttatttttgaacaaggggctccacatttttatgttacataatttatgtaactgatccagttcatcagactgtcttcatgcagagaaataatt

SEQ ID NO: 806026 - DNA, 406 bp, Homo sapiens
agatttttttttccctaagaacaatgaacaaagagtgcaggattactgcttgccttccctgcaagatttttatatgtttcaaaggcttgtggaatcttagagataaaagggttttagaggtacggaccattccctcctggatkctgggaaacccacaacagcatctctatagatccctggcctgttcttggaaacttgcagggactggtttggaggttggtatctccccacacttaggatttttgtagagctctcccataatctggacttgaaattcactccacgtcttgccaagtctctttcttctctactagacatcctaaaataggtgaatgtaaacagcatgtccctcctcaagatcttttcttgttatttgttcctccaatcatttctcataagttggttt

SEQ ID NO: 806027 - DNA, 621 bp, Homo sapiens
tctaaaagagaatgcttaggcaattcttaacattaaaaacactttccttatgttccccagtcagcacttatctttttattgaatgttactttatttaatcgccaaaaaaagtattacttagtataatgatatacagtcaacagagactgggttcaactgtatgatgatcccagcttctgccataaatgaccagtcacacaccctttaatcatggttccagagtgattactgcttggtcctttgggtggtctgtggataagtaatgaatgtgcaggtcagtcttgagaatccagatggacgttrcctctgaaccctcacccacatcttatacaccacttctgaatgactcctacccaccttacaatttttgacatctgtgttttccaggcccacagatgttcagcagtcctgattcattcatctgagtaaaacaaaatgagtcgggatctcacctagtgtatttgaccctgctctttgtttcttgtaacaagtgtattgcatttgtggatttaaggttccctgatgtctcttgggggtaaattaagggccagactgagtgacctgacaatccaggggaaagctacagggtggtattccagggaaaagtagaagagaaagtct

SEQ ID NO: 806028 - DNA, 615 bp, Homo sapiens
caaagagctttcatttatgtggattataacctttaatatttaccatactagaaatcaaaacagaaaaaattataaactttatatattaatttaaaaactaataaacccattatatatatttatatgttttatttttatttttatrttttttgatggagtctcactctgtcactcaggctggcatgcagtggcgcaatcttggctcactgcaagctctgcctcccgggttcatgccattctctgcctcagcctcccgagtagctgggactacaggtgcccgccaccacccctggctaattttttttttttttgtatttttagtggagatggggtttcaccatgttagccagggtggtctcgatctcctgacctcgtgatctgcctgtctcggcctcccaaagtgctgagattacaggcgtgagccaccacacccggcctaaacccattatatttttaaatgagacaattttaaatgaaaaataacatttttcaaaacaataacttaagaagaatggtattactttacagttttataaatctctttaatattttacttaatagaagacaactggattttcatgtctgcttctgatttcaatctgttgcagtatgttg

SEQ ID NO: 806029 - DNA, 615 bp, Homo sapiens
caaagagctttcatttatgtggattataacctttaatatttaccatactagaaatcaaaacagaaaaaattataaactttatatattaatttaaaaactaataaacccattatatatatttatatgttttatttttatttttatgttttttgatggagtctcactctgtcactcaggctggcatgcagtggcgcaatcttggctcactgcaagctctgcctcccgggttcatgccattctctgcctcagcctcccgagtagctgggactacaggtgccygccaccacccctggctaattttttttttttttgtatttttagtggagatggggtttcaccatgttagccagggtggtctcgatctcctgacctcgtgatctgcctgtctcggcctcccaaagtgctgagattacaggcgtgagccaccacacccggcctaaacccattatatttttaaatgagacaattttaaatgaaaaataacatttttcaaaacaataacttaagaagaatggtattactttacagttttataaatctctttaatattttacttaatagaagacaactggattttcatgtctgcttctgatttcaatctgttgcagtatgttg

SEQ ID NO: 806030 - DNA, 615 bp, Homo sapiens
caaagagctttcatttatgtggattataacctttaatatttaccatactagaaatcaaaacagaaaaaattataaactttatatattaatttaaaaactaataaacccattatatatatttatatgttttatttttatttttatgttttttgatggagtctcactctgtcactcaggctggcatgcagtggcgcaatcttggctcactgcaagctctgcctcccgggttcatgccattctctgcctcagcctcccgagtagctgggactacaggtgcccgccaccacccctggctaattttttttttttttgtatttttagtggagatggggtttcaccatgttagccagggtggtctcgatctcctgacctcgtgatctgcctgtctcrgcctcccaaagtgctgagattacaggcgtgagccaccacacccggcctaaacccattatatttttaaatgagacaattttaaatgaaaaataacatttttcaaaacaataacttaagaagaatggtattactttacagttttataaatctctttaatattttacttaatagaagacaactggattttcatgtctgcttctgatttcaatctgttgcagtatgttg

SEQ ID NO: 806031 - DNA, 609 bp, Homo sapiens
ctagtagaatgttctgtacacattacattgcatgcactgcacacacaactacaaaacaagtatttaatgaaagggcattatcagcatataaactagactggaaatccagcagcttgacaataaactgcattttaggtaccctgagatctgacctctgagaacagcagtgaccaccttggagctggcacttcctggaatgctttgctgcattacacattaaaggtatatgctcagggagtaaaggaaacagagcttaatgaaaaatacctctatcgaggccaagccaagagataggtcaggtctatatccatacagctagtctaaggctgaatctcagtttctcagtgtacaaccagcaaccagtagaaataggcyccaccccaaagtggccccaggctctcagcttcctggctcacttttccactctccgtggatagtatatgcctgcctaaaaatttataaaagaggttaataatgaagcagggtacagaggtcacctctcaggctgcccatattttacctcataggtagttgccttcaaccatctactaggatttagactaaggcattacattttaaactaagagggaaagctcatcagtcaagaaa

SEQ ID NO: 806032 - DNA, 584 bp, Homo sapiens
ccatgctgtatatgtgggaatgtatcaggcattgtgctgggtactatggatagagtagagaacaaaatggaaatagcttaatgttggtcctcttggagataggtgtgaaacaaacaagtcaacacagggatacgtaattgtaatttccaaaagaactatggaggaaaagttacctacaaacatatctaagttaccttcttgacactcaaggttccttggtactatagcctgaatgtttatattccctccaaattcataggttgaaaccaaaaccagagtgacagtatttggaggtggggccattgggtaatgattacgtcatggtggcggagccctcataaatgggattggtggccttataaaagggactctagagagctcccttgcccttytgccatgtgaggacacagtgagaagatgctatgaccaggaagcaggatcttaactgacatcgaatctgccttaatcatggactttccaacctctagaactgtgagaaataaatttctgttttttggtaagacacccaggctatggtactctgttagagcagctggaacagcctaagataactggtcttatac

SEQ ID NO: 806033 - DNA, 656 bp, Homo sapiens
ttttaggagcaataaatacattcaagattccaaaatagaacttagcatatcatcactattcagtgaagcttcaccataattacctttgctgaccttggttggggttttagcactgctcaagtgctaatcattccttgtggtagttattttaaaattttcacactttgctcaagcttttctctctccaattccatccctttttcctgattaccatgyctccttcttcacagataaaatataaacgactgaatgtaatctttcccagcatcccatcatctgtagatttttttgccacatatccttttaactaaaggattgtttctcaatgtatggtcactagaccagtatcatcatcatcacctgggaaactgttaaatggcagattctggggcctcattgcagacctactaaatcagattctctgggggtagaatccagggatctatgatttaacagaatctcccagggaatgctaaagtttgagcatcattgctctaaagcttgggggtctgacatgcaggtccacttgaccaggtcattctctccctgggagtagacctttagctttatacaccaagagaaataaaatcgtttccctgtgatgtctggtgtgaaccatgggggtttagaggaatcaaatgatgaatggcaggctt

SEQ ID NO: 806034 - DNA, 656 bp, Homo sapiens
ttttaggagcaataaatacattcaagattccaaaatagaacttagcatatcatcactattcagtgaagcttcaccataattacctttgctgaccttggttggggttttagcactgctcaagtgctaatcattccttgtggtagttattttaaaattttcacactttgctcaagcttttctctctccaattccatccctttttcctgattaccatgtctccttcttcacagataaaatataaacgactgartgtaatctttcccagcatcccatcatctgtagatttttttgccacatatccttttaactaaaggattgtttctcaatgtatggtcactagaccagtatcatcatcatcacctgggaaactgttaaatggcagattctggggcctcattgcagacctactaaatcagattctctgggggtagaatccagggatctatgatttaacagaatctcccagggaatgctaaagtttgagcatcattgctctaaagcttgggggtctgacatgcaggtccacttgaccaggtcattctctccctgggagtagacctttagctttatacaccaagagaaataaaatcgtttccctgtgatgtctggtgtgaaccatgggggtttagaggaatcaaatgatgaatggcaggctt

SEQ ID NO: 806035 - DNA, 656 bp, Homo sapiens
ttttaggagcaataaatacattcaagattccaaaatagaacttagcatatcatcactattcagtgaagcttcaccataattacctttgctgaccttggttggggttttagcactgctcaagtgctaatcattccttgtggtagttattttaaaattttcacactttgctcaagcttttctctctccaattccatccctttttcctgattaccatgtctccttcttcacagataaaatataaacgactgaatgtaatctttcccagcatcccatcatctgtagatttttttgccacatatcctyttaactaaaggattgtttctcaatgtatggtcactagaccagtatcatcatcatcacctgggaaactgttaaatggcagattctggggcctcattgcagacctactaaatcagattctctgggggtagaatccagggatctatgatttaacagaatctcccagggaatgctaaagtttgagcatcattgctctaaagcttgggggtctgacatgcaggtccacttgaccaggtcattctctccctgggagtagacctttagctttatacaccaagagaaataaaatcgtttccctgtgatgtctggtgtgaaccatgggggtttagaggaatcaaatgatgaatggcaggctt

SEQ ID NO: 806036 - DNA, 656 bp, Homo sapiens
ttttaggagcaataaatacattcaagattccaaaatagaacttagcatatcatcactattcagtgaagcttcaccataattacctttgctgaccttggttggggttttagcactgctcaagtgctaatcattccttgtggtagttattttaaaattttcacactttgctcaagcttttctctctccaattccatccctttttcctgattaccatgtctccttcttcacagataaaatataaacgactgaatgtaatctttcccagcatcccatcatctgtagatttttttgccacatatccttttaactaaaggattgtttctcaatgtatggtcactagaccagtatcatcatcatcacctgggaaactgttaaatggcagattctggggcctcattgcagacctactaaatcagattctctggkggtagaatccagggatctatgatttaacagaatctcccagggaatgctaaagtttgagcatcattgctctaaagcttgggggtctgacatgcaggtccacttgaccaggtcattctctccctgggagtagacctttagctttatacaccaagagaaataaaatcgtttccctgtgatgtctggtgtgaaccatgggggtttagaggaatcaaatgatgaatggcaggctt

SEQ ID NO: 806037 - DNA, 632 bp, Homo sapiens
tgggaaaatgccattttctaatcaggttttgagtaattaacccacttactatctattgtctccaaaggagatagaaacagaaaaacctctctctatgttaatatcaaacccagtggaagaaaaggaaacaagaaaggaaattaggaattatttayagatgcaaagagtaaacatttttgacagggaacttcaatgaatacaagtggaagaaagaaattttgatgagtgcccataattgtgccaactaacctctgattatgtgtacttgttttacaataagaaattcattctgagtgagcctgtttccatgtctttaatatttctatattatgtctcaatattccctaaagttctgcagaagagttcctgcctgtgatggatactgtggttggcttcctcattaccccttccgaccctctttccccatttccctctcattttacagtcttgaaagctaagatcccacttctggctctccttcaacttgggtggccgtgtgatatagcctggctcttgagggataagttggagtcttccaccgggggcttctgtgcaagtctttgcttttggatatagatgtttcccctttctgactcgattcttcatctcctgctgggaaaatggtctcaact

SEQ ID NO: 806038 - DNA, 632 bp, Homo sapiens
tgggaaaatgccattttctaatcaggttttgagtaattaacccacttactatctattgtctccaaaggagatagaaacagaaaaacctctctctatgttaatatcaaacccagtggaagaaaaggaaacaagaaaggaaattaggaattatttacagatgcaaagagtaaacatttttgacagggaacttcaatgaatacaagtggaagaaagaaattttgatgagtgcccataattgtgccaactaacctstgattatgtgtacttgttttacaataagaaattcattctgagtgagcctgtttccatgtctttaatatttctatattatgtctcaatattccctaaagttctgcagaagagttcctgcctgtgatggatactgtggttggcttcctcattaccccttccgaccctctttccccatttccctctcattttacagtcttgaaagctaagatcccacttctggctctccttcaacttgggtggccgtgtgatatagcctggctcttgagggataagttggagtcttccaccgggggcttctgtgcaagtctttgcttttggatatagatgtttcccctttctgactcgattcttcatctcctgctgggaaaatggtctcaact

SEQ ID NO: 806039 - DNA, 632 bp, Homo sapiens
tgggaaaatgccattttctaatcaggttttgagtaattaacccacttactatctattgtctccaaaggagatagaaacagaaaaacctctctctatgttaatatcaaacccagtggaagaaaaggaaacaagaaaggaaattaggaattatttacagatgcaaagagtaaacatttttgacagggaacttcaatgaatacaagtggaagaaagaaattttgatgagtgcccataattgtgccaactaacctctgattatgtgtacttgttttacaataagaaattcattctgagtgagcctgtttccatgtctttaatatttctatattatgtctcaatattccctaaagttctgcagaagagttcctgcctgtgatggatactgtggttggcttcctcattaccccttccgaccctctttccccatttccctctcattttacagtcttgaaagctaagatcccacttctggctctccttcaacttgggtggccrtgtgatatagcctggctcttgagggataagttggagtcttccaccgggggcttctgtgcaagtctttgcttttggatatagatgtttcccctttctgactcgattcttcatctcctgctgggaaaatggtctcaact

SEQ ID NO: 806040 - DNA, 362 bp, Homo sapiens
acagatttgtgtctttagcatgacaaaagctgtaaaaaaaatagttttttacacagaggactgagaccctttttcttaattttcccttgttcccaacaaaatctttagaaaactagaagattgaaattttttaaaaaaagaagttctgacattctaggaaaagaggagtggaaggcattcaaaacccctcaaaaaaaaaaatccartaacaggataaactatttatcaggaaagaacgtctctgcaatgcatgtttgtgcatgcaaatttctcatgtgtgtgagaaatagggcaatggtaaaatgtgtaaaaatagaaatctgttttgcaaataattaaaatcatttagctactttcataat

SEQ ID NO: 806041 - DNA, 631 bp, Homo sapiens
aactactaggtttcaggtcttaatttgtctttaatccagtttgagttgatttttgtatatggtgaaaataaggatccaatttcattcatctacatttggatatccaattttccccacaccatttattgaaaaagctgtcctttcctcattgtctcttcttggcacctttattaaaactcagttttccataaatatttggggttatttctgaactctatcctgtttgactggttttgtgtctgtttttatggcagtactgtgctgttttrattactataactttgtaatatattttgcagttaggtactatgatgcctccagcttttttctttttggtcaagataggtttggctattcagggtcttttgtgtttccatacaaattttaggattgttttttctatttctttaaagaatgacgttggaattttgacagggattacactgaatctgtagattgctttggatattatggatatcctaacagtattaattctttcaattcataatcatgcctttccatttacttctgttttcttcagttcctttcatcaatgctttatagttatcaatatatagatcttcacttccatggttaaatttatacctaggtattttattttatttttttg

SEQ ID NO: 806042 - DNA, 631 bp, Homo sapiens
aactactaggtttcaggtcttaatttgtctttaatccagtttgagttgatttttgtatatggtgaaaataaggatccaatttcattcatctacatttggatatccaattttccccacaccatttattgaaaaagctgtcctttcctcattgtctcttcttggcacctttattaaaactcagttttccataaatatttggggttatttctgaactctatcctgtttgactggttttgtgtctgtttttatggcagtactgtgctgttttgattactataactttgtaatatattttgcagttaggtactatgatgcctccagcttttttctttttggtcaagataggtttggctattcagggtcttttgtgtttccatayaaattttaggattgttttttctatttctttaaagaatgacgttggaattttgacagggattacactgaatctgtagattgctttggatattatggatatcctaacagtattaattctttcaattcataatcatgcctttccatttacttctgttttcttcagttcctttcatcaatgctttatagttatcaatatatagatcttcacttccatggttaaatttatacctaggtattttattttatttttttg

SEQ ID NO: 806043 - DNA, 555 bp, Homo sapiens
tagcgcaatggcacgatctcggctcactgcaacctttgtctctcgggttctagtgattctcctgcctcagcctcccgagtagctgggattacaggcatgcgccaccatgcccagctaattttgtatttttagtagagatagggtttctccaygttggtcaggctggtctcaaacttctgacctcgggggatccacctgcctcggcctcccaaagtgctcggattgcaggtataagccactgcacctggactataatctaattattaatgtgccaaacagcctaaagaaattggctcaaaaagacaaagaggttaaggtaaatgttaacaattacaaaatcatgcttcaagtttatgaacagcagtcatatttcatcatacttttaactctctcattagattgcatttaaatacattgggaaagttgtttgcagtttgaagcttcctctgcttttgctcacaagggtctcttctcaaagagttatttattatttgaaagtaatgagggtctcagaaaggaaaagtcactcctaccactccactctacaatacatct

SEQ ID NO: 806044 - DNA, 643 bp, Homo sapiens
ttgggcattttattatgtctgctcatgctttaaattttgctacatatatatttaatacacagcatataaatattgcttgcatgtgtttacaagtttacaaaagtggtgtatcttgccaagatcagattgatctaatctctgggaataagaaagaataaaatttcctgaaattacaagctctgttttagaaactgttcccttgagcaaattttaatctctagagtgatcagagtggcaaatcttcactgcagacaagaattcttgagatgagcctctttttgccttagtgactttatgaggttctcttagaaaatgacaccagctgtggattatctcttacctaagggctgtaaacttgagaaaaacttgctttcagaacattttcaacagtagatttctttctgagaagctgatttttttttctgcatctattaaaatcttcaggtggtcactatagwgaataaatacatatttgctatattttaaatccctggatacaagatgtcattgtattcacagttttatctgtcccaatatagatttttcatgttagtgacaaaaatttcagaaaaaacattaaaaatgtgagttagtcatagtatttataaatccatcttttttttcagcatggaaaattttaatg

SEQ ID NO: 806045 - DNA, 618 bp, Homo sapiens
tccttttttccttatctttgggagccaggaaactgattctatttgttgccaccatatttctggcttccagaaggtggtacttatttaatcacttgaagtttaagctgattctcagggcaggcagtggtcgttcctaaatagcrtgctcccctacaggtgtccactggccaccaccacccaccttctgggctgagggcattcatgtcaggaacttgaggcactgacacccacaaaggacaggctttgtaggtacttaaaacccactcctttgccatcggaagctcagccaaagccaagtaagaccgtatcccagagtacgaagggaactagattctgctgctcctgggtgcttgtgtgtctgggcacagaggcatgcatcttcagagctagaacgctggccacatgatgctgcttaggaaggtgtgtggtcgcctcccttcattttgcggaggagtagacaaaggtctaaagccagggctgttaacctgtggttcgtgaactccttaagattatatatgatttaacccttcaggtcagtggttctgtggaagacttctgagagtctgcactttaaaagaaaggcccaaggtggttttgataattgagcaagttcaggag

SEQ ID NO: 806046 - DNA, 618 bp, Homo sapiens
tccttttttccttatctttgggagccaggaaactgattctatttgttgccaccatatttctggcttccagaaggtggtacttatttaatcacttgaagtttaagctgattctcagggcaggcagtggtcgttcctaaatagcatgctcccctacaggtgtccactggccaccaccacccaccttctgggctgagggcattcatgtcaggaacttgaggcactgacacccacaaaggacaggctttgtaggtacttaaaacccactcctttgccatcggaagctcagccaaagccaagtaagaccgtatcccagagtacgaagggaactagattctgctgctcctgggtgcttgtgtgtctgggcacagaggcatgcatcttcagagctagaaygctggccacatgatgctgcttaggaaggtgtgtggtcgcctcccttcattttgcggaggagtagacaaaggtctaaagccagggctgttaacctgtggttcgtgaactccttaagattatatatgatttaacccttcaggtcagtggttctgtggaagacttctgagagtctgcactttaaaagaaaggcccaaggtggttttgataattgagcaagttcaggag

SEQ ID NO: 806047 - DNA, 617 bp, Homo sapiens
atcacagtacagaaagactctacattgtgcctgtaaatggacttaggaagccaagagaatccccgacaaggaggaattcaggaattgattcatgggagaaggtaagtaagttctcaaggctaagtatgatgtagccctctgtaatgataatagtaatagcaatagccagmactccagcaatagtaatagccaccactgacttcattgttaactacaggccaggctctgtgccagatccattctagataccgtatttatattatacagatattatatttaatcttcataactccctcgggggtgttattattattatttccattttactgataaggaaattatgactctgagaagttcactaacttccccaaagtgatacaatgtgcaaatgccagagctggggctagaacccagctttgcctcgcctcagagctgggggatgcacctcctactctactgcagaaaccccatggaagacaaataaaaccacagaatatggtttttcaggctgggtacttttcccaacccttcctccaccccaaccgcattccaaacacacattcccactctccttctctcctggatggaaatccattccactctccctgcctcctgag

SEQ ID NO: 806048 - DNA, 619 bp, Homo sapiens
attatccccattgcacagatgcagaaacgcggactcaggaagattgactaatttgcccagtgccacacacaaagccagtatttggaccaggtagtcaggccccggggtttctgctttaaccacagtgctctaaccatggtgctaaccagtgccgtgctgctctgtggactgctggagagacaggtgcaaagatgagtggctggcaggtggttccagggacttccctcagtagtagtgtctggggtgctggggtaattccaccaccactgcccaccacccaccaccacctccacacagccacaggctgctgatcccacaaagtgtcaagatggatggactccgcagaatctgtcaaggcccgacaaggggacacatctgaactggtgacggaggtcataaatttttatgttcattatgtttgttttgtttggtrtaattaatgaatctattaagctcagtcaagctctgacctcttttataaccattataaatcagctcaaatggctctgggagggggacggtgagtgtcattttgcaggcctccctgggaaattgtggtcattccacagagtaaggctttggaaaggggtagagggtagggaaaaggccaacgtgggtt

SEQ ID NO: 806049 - DNA, 536 bp, Homo sapiens
gctttgatcattacacattatatgcttctatcaaaatatcacaagatctccataaatgtgtacaactattatgtacccgtgaaaattaaaaataaaatttttaagaaaaatttaaatttcagagtgtgtatcatttcaccttaggaacacccaaacatgtttataaaccattttaacattgtaaatctcaaccagtcttctgagatccaatcaattggaatttctttagcttcaggtaatagctcagctccattggttattaaagagacatattagaataaatgggttccctcttctttaaggaaaaatgagcttatatttcttcattaggatttgcatttatttctgctcaagcctaagagggctgctagtttmattgcactttaaatacaaaaatctaagttttttggactataaatatagtatgaaatccagctccaaacccatatgaaataagctagaggccatgaattcatttgggagacttactcttcctccaccaagaaccaaggtgaggtagacaaatttctatgctg

SEQ ID NO: 806050 - DNA, 551 bp, Homo sapiens
ccttttcctcattcaggaagcaggcttaggtttaatgttcaattttatttaaccattcagagacacaatgggataacactaaagatttccacccttgttttgaagtttccattgaaaaactacaagtggaatcaaggacatatatgctagaaaagttagattctcctgagactgcatatttgaggtaaatactacagagcttaattgtgtgtgttcttgtgagcaaagtcttaaaaagcaaataagtacttgatcactgtcccgttacttattttttttagasacagggtctcactctgtcacccgggctggagtataatggcaccatcatagttcactgcaactttgaactcctgagctcaagtggtcctccagtcttagctgggactacaggcatatgccaccacgtctggctaattttttttttttttttttggtagagactggttttggcatgttgctaaggctggcctcaaactctttggctcaagaaatcctcctgccttggcctccaaaagcactggaatataggcataagccaccacacccag

SEQ ID NO: 806051 - DNA, 582 bp, Homo sapiens
caggcccttgacaagtctatacattagggaaacttgggtagggtgtccacccatcccttatctctgctatggccaagggaacatggtcatgagatatcacagtagccacttagacttatgcaatcatctagggctattttgcttagcaggagaccttgggaagagaatgattggcctgatccatgacaactttttttttttttttttttttgagacagagtctcactctgtcrctcaggctggagtacagtagcacaatctcagctcactgcaacctccgcctcctgggttcaagcgattctcctgcctcagcctcccaagtagctgggactacaggcacacaccaccacacccagctaatttttgtatttttagtagagacagggttttaccatgctgtccaggatggtctcgatctcttgatctcatgatctacccacctcagcctcccaaagtgctgggattacagatgtgagccaccatgtctggccaacaaattttaaaaactcacacatacaccataaatccacgttaccagagatatatattgtaatataaatctaacacataatgccatgattt

SEQ ID NO: 806052 - DNA, 582 bp, Homo sapiens
caggcccttgacaagtctatacattagggaaacttgggtagggtgtccacccatcccttatctctgctatggccaagggaacatggtcatgagatatcacagtagccacttagacttatgcaatcatctagggctattttgcttagcaggagaccttgggaagagaatgattggcctgatccatgacaactttttttttttttttttttttgagacagagtctcactctgtcactcaggctggagtacrgtagcacaatctcagctcactgcaacctccgcctcctgggttcaagcgattctcctgcctcagcctcccaagtagctgggactacaggcacacaccaccacacccagctaatttttgtatttttagtagagacagggttttaccatgctgtccaggatggtctcgatctcttgatctcatgatctacccacctcagcctcccaaagtgctgggattacagatgtgagccaccatgtctggccaacaaattttaaaaactcacacatacaccataaatccacgttaccagagatatatattgtaatataaatctaacacataatgccatgattt

SEQ ID NO: 806053 - DNA, 622 bp, Homo sapiens
ccaggtaaaaaggcaaaacatacttgcattcagtctactatagttactccatgatgacaccagctggcaattgtttctccctaacatatagcagctactatgattcccacacaaattattaaaataataaaaataatgttttcaaagagctttcttccacttcctttgccggtctagcaatgagcttaacactatctgtgaagcaatttgttcacctaattttatgccttaataagctttactacaattattttcttscctgattcgttctctgccttgactttagtatacttcctccctgttcttctgcaatattctcaaacctgttaacaacatcgcactcccccaggattcaaacttttgattagaacagtccccatttaatcaagttcaattgggaaataaaattgcatctcaacttctccattttccctttggtgccagaaactgccttgagaatgttgaagaaaccctggagagattaacaatccaaatgatcacagaggatagttttggatcccctacatttgcacagaggaagagagatttgaatgcccctcaatagagatgaaaataaaacagataatgtaagtcattggcagcatgactctctcctacaaga

SEQ ID NO: 806054 - DNA, 309 bp, Homo sapiens
aaagcagaagcatgaacagtatttgtaaagttggctatctaaaggcatttttacattttaatctttggtgagggacaggtttgtcacaagcattgcccgatacatgagattttccggtagacagatgacctcacagagaatagrgtctgactattggatgtgagctgggccctagtgtctggaaaccaactgtgactcagcagatcgtatgtcagtgtgtgagtggataggtctctgggaaatagaggtttcttgaggaggcaactcacgttcataaaaatgggttagactatttgaaaccacttgtgg

SEQ ID NO: 806055 - DNA, 575 bp, Homo sapiens
aacatatggatgaaataatgacaaatcaacttcatctttaatataaaaatagtgtactaaaaaatcaaattccatttaacaaaaatttcactacattacaactgaaaataaatccttagacacttaggaaaatatgttgaaagagaattgcctacgttattttcctagtgtagcaactgtactgttcgatgtttcaaaccatttccaaaacatttaaataaataatacttttgaacatatagaggtcttcatccagtacaacagcagctacaactctttttccgcaatatatttgacttaattatacctcatttagactgtcctttcagttaattacttaaaagacttttaaaagattgcttgtatttaaatcctgaaaaccaatcctatatttctgtgagacgcagactgccaaggacttcatatcttcwtattttaataatttttgcaagtatgacatatataaacacaaaagcagacatagctgtatagctcaaagaatttttgtttgtttgtttgtttgttttgagatggagtcttgctctgtggccagcctagagtgcaatggcgtgatc

SEQ ID NO: 806056 - DNA, 645 bp, Homo sapiens
cagggttttgaactgtgtgggttcacttatactgaattgttttcaataaacacacacagaccatacatgaaaccatacacattcacagagcaatgtaaacaagcataaaactgcaggattaaattataactgcatgaaattaactagcatatactgtactactgtaataatttaatagccacctcttattgctatgggtgaaatgaaatgttgctagtatttgcttaaaacactacgtgacgtcatctccttgtgatcatttcatctgactagcaaattgtatcacagcaaaaagttacctctcatggtcagtacaaagtgattgttcgtggttctcagctatttttaattgtgtttagggcaatactgtaaactttgaataacaccatgggctcataggaagtgccaccagtgatgctagaagtgctcccgagaagcaaagaaaagtcgtgacattacaagaaaaaggtgaattgcttgatatgtactgcagattgagtctgyggctgtggctgctcaccatttcagacagatgatttatcttggaaacagatggtgtaaactttccatatcgataaatacagcacaatgctgtaaatatatttctattccttatgatttagtaataaagattttgggaatcaa

SEQ ID NO: 806057 - DNA, 637 bp, Homo sapiens
tctacatatctgtttttccccattggaatccctctgcaaaatcagttttctcagctccagttctgcattctgtccctcttctttctttcttcttttttgaatggtcaggaaataagcccttattctattttttcttaaactaacttatgttasgtgaaactgttgaggagaaattttgttttatatgtaaagaagtcctttgtggggaataaaaaaatatggttatttaattatttaaacattgagaaatttaaaatgtggaaaacataactgattcagggagattgaaagaataaaacctactacgctttttgaaaaattactcgacatcacccaatttgtacagatcttaatttagtgcaggttctctacactattcatgactgaaataaaaggcaaaaagcaagaatcacagaaatgaccaagcatagttgaagacactgtacataaatattttaattaaagtgagaaaaatgacatatgtgactgtaattttatatcatgaaaataaatagatatattctaaattactattttaaaaataaggatcatgaaataaaatttcttgaaaattatttgaatcattttatcttttagtaggtaattttagccttccatgttttagagaataaagtac

SEQ ID NO: 806058 - DNA, 658 bp, Homo sapiens
atacattggtttaagttacaactaccattcattgtttatatcattattgatttgctaatttcaaaggaaatgtagttatgaattcataaataacatacatttttgagtgggtttattattccaatgaaaaaagataagacaagcatctaaatttaaatattttatatgtagttgggatgacagtatttcaaaatataaatgagtgagccttttctccctgccaggtaggctgcagataccactcccctcaccatacttcactctgcccttgttcgcatgttagggaggcaatgggccatcactraactcaattcaaagggcactggccccgctgtgagccttgttggatttggtgacctggtagggactgagggcttctattgtatatctctcccacaacatgaagatgctaggctcaggacaagggtgagacacagacacagatggttgagaagctatctgtcactgtggttcttctgcccttggcagggtatatcctgagaaaatgaggaaagaaacaagacaggaggcctcacaaagtttggggtctttaggggttggaaagaactgatctctttccaggagctcacagacaccctggcttcctgaaatcctgcaatggcaaggaatggatcctgtatattttacacaggtacca

SEQ ID NO: 806059 - DNA, 570 bp, Homo sapiens
gattcaagaagtaaaataaaataccattgtttaatttattcttcacctttcaaataaatttttggaaaatgtgatttttttcccattttgaattaaaaatctcaaataggatatctttttagaagtaaacatattttagataaatgccatcttcattttaagaagagagaaatgaaaaagggaaatagaacattttgccaaaatcttayacttaggtataaaatcatactgaaatcacataataggattaaataaaagcaatattgaatatgcgaaataagcttaaaggtctgagaacatatctgaaatcctgagctagttcatgatcgaggtggagctgagacatatctgagagcagaaattctctgttactgttaagcaaattttactatgaggaaatttatgatatataggctcttgctggagtaaggtgctatgaaatccatgaacacgtcagttcaattttgctcaaagattaactgatatggtttggctctgtgtccctacccaaatctcatctggaattgtaatccccacgtgatagggaggaatctgttgggaggtgattgt

SEQ ID NO: 806060 - DNA, 651 bp, Homo sapiens
agagtatgcatgtttggtaaatacttttgttgaattacacaacagaaacgtatcaattccttatttctacagctctgtaacaaagtacccattcatttccctacaccttcactgacaccgtgtggccaaataccacattaagaacaaactagggatgggtggggtgactcaggcctgtaatcctagcattttgggaggctggggcgggaggatcacttgaacccaagagtttaagaccagcctgggcaacatagtgagactctgtctctacaaaaaaaaaaawtttttttaattagcctggtattgtggcacatgtctagtcccacctactgaggaggctgagttgggaggatcacttgagcccgggagatcaaggctgcagtgggttgtcatcatgccactgtgctccagcgaaaaatctaggtgtttctttctgaatatggactgtcctcccgccatctcattttattgtgaaaagttacaaagatagtaaaggtgaaagaattttacagtgaacacccatatactgatcacctggattctacttttagcattttattatacttgttttatcagactatatgtctgtcttttgatgttttcaaagtaaattgtagataccaatacacttctgcctcagaacttcagcat

SEQ ID NO: 806061 - DNA, 535 bp, Homo sapiens
gactttgaagaggcagacaggagggtggtggcagcaacactgcagctgcttctggatgctgctggggtgctctccggagcgggtgtgaacagcgcacttcaacatgagcaggcgcctggctccggtgtgtcctcacttcagtggtgcacctggatggtggaagccagcctttggggcaggaaaccagctcagagaggctacccagctcagctgctggcaggagccaggtatttacagccataatgtgtgtaaagaaaaaacacgttctrcaagaaactctcctacccgctcgggagactggggctccttgcttgggatgagcttcactcaacgtggagatggtggtggactggtacctgaaaagcgggccttgcagggccaagtgaggtcctcaggtcctaacccagtggccctctgaaagggggtgtgcaggcgaggggagcaggaggcttctctctagtccctttggaggctttggctgagagaagagtgagcagggagctgggaatggtccaggcaggaagggagctgaagt

SEQ ID NO: 806062 - DNA, 634 bp, Homo sapiens
gacatataaaaggctccacacccttcctctttaaaaaatgaaaatctttaacttaggttctagctctcccctcttcacaattctcttggcagagttgtgcatgctatatttcctacctcctagtctatgcagcatccacaacacatctgctctccctccaacctcaggactcttctgttaggcatcattactgatctagatgctaaatccaatgggcactttttagttgyaatcaggcacttgaccacctacaaatctgatacctccaaccatttcctccctcagctgtgtcctcctttaggttttgtggacacactgcttttctggttttcctcctgacagctgtcaccttctcattctccttttcccctgatgttcctttatcctcctttcagagcagcgtatagcacagtggttgttatatgtgaaggttgtagatttactgggataacttctgatttctctggctcctagctgtgagacatgaaacatttatatctgtttcttcatatatttacaaaagtgaggctgggcatggtagcatgtgcctgtggtcctagctgcctgggaggctgaggtgggaggatggcttgagctcaggagtttgagtccagcttgggcaacatagggagac

SEQ ID NO: 806063 - DNA, 608 bp, Homo sapiens
ggggaggggaggaggtaagataaagagactggagattaaggcaagaatcctgactggtggagaagaagtggatgggcccagggcagtttctatagggtgctccttgatttggggttgtgagtgggtgggcatctatacacttccaagacaaggcaaagaaatgggcctccaggtagtattgggatccttaaattctcttttccaagcacctctgcccrggtactctcctggtgccccctcccaaggggagagccccggtctccttccttctcctctagggcgtcatctttcctctgttctcagcctccggaggagcctttggtcttgcccctgacacccaccgggcccaatggggtggcctctcacatgctctcccagattcactgatgtctttcctctaggtagagtcccagagaagctcagataccaaaggggcagctactgacctgtgtccaggggcactggatgggagctgggggcttctccttccccagcagggcagggaatgcagtggaaagcccagaagctggagcctgactctgggctgggtaatccggagctcaggttactgactccgatatatatagtatcttatctgacctcgcaga

SEQ ID NO: 806064 - DNA, 718 bp, Homo sapiens
tgctgccacctcatctccagaggatccctgatcactgatggccctgccgaaagggccctatcagcccacgctgaggcccagagctgtgccaggatgtgtagtgtggggagtgagcccggcgaggagggtgcaacaaaggaggcttttctctggctgatacagcctctcccagctgagtcttgaagagactcattgagtcgtgaacttgacttgccggccttctccccctatgtggctgctctaagaataaaatcagctggagcagaccaaggcaaggtgcagtcagggtgtcttaagagtgtcttgcaaaaacttattgcataactgggactgccacttgtgcgagatgaaacctgtgcgtycttggtgagatggaatcggaggcatctttgctgcttcccctttcttgttttctgccatataccctgggctctgcagagcaactggtttctgggtcctatagatattaactcactttctgggctcatttatgaggcatttttatgtatgtgatttcccagagccaattctgcttcccatccttctattctgtaatcatctctccagcgcctcctgtccccagcaggaaggccaggactggccttcatgcattgctactggcactggcgagagtgaggcccacgttttgctcgccctgcaggtcagctggtcttgctccactgccttgcagagcaccccttgccctggccagctgccc

SEQ ID NO: 806065 - DNA, 605 bp, Homo sapiens
gacctgggcatcccccctaaccctgaggacaggttgggaaacagttttaaccagctgacagtaacgcttttacctttttctcaatacgttttactggtggcaacatattgtgtcagttcaataaaatcatagtatgacgactgtaccctgaccactttggggattaaggtttaattagaaatatgtatggtcagtcaacagttagaaaattggaataaaacttaaaaatgttgggagaataaaaagttacaggaaaatggacaactggtttccarttggtaagcatgtagatcttaacctgatttacccacccttaggggacagtgaggtggcccgttaacctgccttttcagtacctgctttggccaaaagcccagggcatagagtttttctcacaggtacacagtgcagggactaaaaatatttttgagcatcactgaactgagcaagccaggagctctggtcagctcattgctgcagtcttcctgctcatggttttgagatggtttcaaaatcagatgagatttctaaccaacttctttcactgccagttaactttcagccttggccattgccttgggggtgttgggaggggccagaatatt

SEQ ID NO: 806066 - DNA, 439 bp, Homo sapiens
tttacctaactgcattttgcatgactccagtgttccttaaaaaatgaattcggatcaaataaatttggaaagcatagggtttttccggattcttttctttaggaacttctcagggggccttaatatactcatgatgtacattataaagactatttcagacatgaaaaaagtacattttctctataaaatgctgaacgatgaatgttaatgttcctatttcaaaatccaaagcctaaataacagcagattagcatatatgagtggtctwgctatataattggttttctcatgtagagaatatgagaaattaaacggaatcttaattagctttacatctcaacagacattcttttcagttcttttatcagcgctctttcattctgtaccattatggcctacaaaggatggtatttcattgaacaaaacagtgaacagaaaa

SEQ ID NO: 806067 - DNA, 485 bp, Homo sapiens
tgctattccaaatgtttgccaaacattttaaaatctgacatccatagcacttaatcactgcccagtaaacgttaggcatttaaatatctttaagtgaatgacagagtgacttcttacatattcaggaatttgaagtcattgataaggacaggccttattctgtattgctgcaaagggaacatgtgcaccttggaggaagttacagacggacctagatcaataggagcgcagttaggagctgcccagccatcactaactttacaaggcaagcacttcctaaccatatgcatgatttaataacggtgggtggagaccygttatggtttctgtctaggtgactgtgtctgagtgatcttcagagatcccttcaagattcagattcacaactgtgccaggagctatgaaatgataaggattatatacaaacagtaatgagcaaaaattaagtgtagcagaaaagacttagaaaacgctttccaagcttc

SEQ ID NO: 806068 - DNA, 591 bp, Homo sapiens
taaggaaggggtccagtttcagttttctgcatatggctagctatttccaacaccatttattaaatagggaatcttttccccattgcttgtttttgtcaggtttggcaaagatcagatggttctagatgtgtggtgttatttctgaggcctatgttctgttccattggcctatatatccgttttgataccagtaccatgctgttttggttactgtagccttgtagtatagtttgaagtcaggtagcatgatgcctccagttttgtyctttttacttagattgtcttggctatgtgggctcttttttggttccatatgaagttaaagtagttttttccaattctatgaagaacgtcaatggtagcttgatggagatagcattgaatttataaattactttgggcagtctggccattttcacaatcttaattcttcctatccatgagcatagaatgtttttccagttgtttgtgtcctctcttatttccttgagcagtggtttgtagttatccttgaagaggtccttcacatcccttgtaaattgtattcctagatattttattctctctatagcaattgcgaatgggagttca

SEQ ID NO: 806069 - DNA, 566 bp, Homo sapiens
ggatatgatgaacacttgaactgtatttttttaaattgctattttttaaaaatgattgtatgagtaaggtgtaaaatgccaaagggagtaagatcttaagagagccatctaggaatgacacctgttagaaaaagtcttcttgaaccagaaatcaggaaacatgctatggagaggcagcctggggtagtgttacaccttcagactgtggagccagaaagacctgacttcaaaagcatactctgggtattatcaaaaacacaaaaaataacaaatgctggcaaggatgcagagaaaagggaactcgtatacactgttggtgggaatgcattctagtacagccactatggagaacagtacagaggtacctgaaaaaaactacaaacygaactattataagatccagtattcccatgactgggcgtttatgcaaaggaatggaaatcagtatgtcaaagagatatctaccaccatgtttattgccacattgttcacaatagccaagatatggatcaacccaagtattcaacaacagatgaatggataaagaaaatgtggtatatatacat

SEQ ID NO: 806070 - DNA, 602 bp, Homo sapiens
gtaaattagttcaaccattgttgaagacagtgtggggattcctcaaggatctagaaatagaaataccatttgacccagcaataccattactgagtatatactcaaaggattataaatcattctcctataaggacacatgcacacgtatgtttattgcagcactattcacagtagsaaagacttggaaccaacccaaatgcctatcactgatagactggataaagaaaatgtggcacatatacaccatggaatactatgcagccataaaaaggatgagttcctgtcccttgcagggacatggatgaagctggaaaccatcattctcagcaaactaacacaggaatagaaaaccaaacaccacataagtcataagtgggagttgaacaatgagaacacatggacacagggaggggaatatcacacacccgggcctgttgaggggtgggggactaggggagggagagcattagaagaaatacctaatgtagatgatgggctgatgggtgcagcaaaccaccatggtacatgtatacctatgtaacaaacctgcacattctgcacatgtatcccattacttaaagtataatttaaaaaaaagaaac

SEQ ID NO: 806071 - DNA, 640 bp, Homo sapiens
acacaccacacgcagttctatgcaaagcatttcccagatggagggaatattaaatataaagtctctaaggcagaaaatgcttaggtcttagaagataaacaagagtccagtgtatggctggagaaaaataattaagagggagagtgtcaggggaggagatcagagacatggacagggatcagagcatgtatctcagccccactggtatattcagcttaatcatcatatttaattaaaaactagaataagagtataatgtatgtaatacatgctgctatggtttgaatgtttcctccaaaattcatgttgaaacttaatccctaaatgtagaaagatatggaaaggtggcagtattgaaacgtggggcctttaagaggtgattggatcatcagrgttttgccctcatgaatggattaatccactcgtagattaatggattaaacggttaataggttaaagcattattatgggagtggagctgaaggctttataaaaagagaaaaagagacctgagctggcacattagctcccacagcacatgatattctgtgtagcctctggacactgtagagtccccttcagcaagaaggctcccatcagaggcagcttcttgaccttggacttctcagtctccgtaatt

SEQ ID NO: 806072 - DNA, 624 bp, Homo sapiens
tgcatcccagcctgagagacaagcaagactccttctaggaaaaaacaaaaaaaacaaaacaccaactaaatatgtagatatgaaaatgaagggatttaaggatttatggttatatattagtgttttaaatcaatttttgagtacccaagtaaggcattaatgaaaaaaatgattaataatttttttwaaaaaaattttaaaaattaattaaaaatggaaaacagttttttatggacttctccatctgagtaggtgactggtgaaggatcataaagatcattactcattcaaacacactgctttcaagatttagaatcaaagagtcctataatgagagtcttcaagtgaaagggacagtcatacaagctgtcctccatcctccctctgagttcttatgtctcatgtggataatttcacttgaattatgctaggatgcctgtccatgaacagggacatcacagctctttatttaaaattctcgtctaaaccccaaagattctttctcacttctactccccaccttgtttattacaaagtatctagacttactaaaatcctctcacttttacccaaagacaatttttctgtgtctaaagtaagatttcactctaaggacataggtct

SEQ ID NO: 806073 - DNA, 610 bp, Homo sapiens
cagttagattgcagttatgcccaaaatggtgtgattgaactgaagtaaagtatactatgagttagtgtagtaatctatattaagtattgcattacttcataaataaaaaattacccagtttatgtgttacagatgagatcactgtatttttgcctgattgcgattcacgcactgacttgtgaatgcaaagtcttttctttcacaattccatatccctagaatttgacttttaaagttgaaataatgagttaccaaaaagttatataaaagcataattagacaaatggctattttcaacttagcagttaaataagtatggtgagctatcctttcgatttgtcaaggggaacatcttaagatggatttttccaggttgatcttatgacttactcacttttgaaaatggtgctactctccagtaacaggaatgaagctayggaagtgtaaagcaatagcatatgttccagtgatatttaacatgtcccagttcatataacatatctccaatagcactggttttcttgagagtagaggccccactggaatgtaagcacgctaaataataatgtttgctatggtgtcttagacccagaaatcactcgtttaatgg

SEQ ID NO: 806074 - DNA, 620 bp, Homo sapiens
aataacacagaagaaagaaataaaacagctcctatttacatagtaaagtaatatacttacttctagcttatttgataatgtatataattcaaattacttttagttgttttatttataactgtattctcaagttccttaatttgaacaattttaaatgataatacagtggttaaaatggaatgaaaaatttagtttcctaaaataaaatgtatcacaatcactgaaaacctaaattatctaagttgtaacacagtgtgctgtcctatttctgatractctggttagaaagcaattggtggacagttttgcagagactcctaagctacacatcatcactgtacagaaaactctatacatcattagcaacgtatcaatgcaagcaatataattccctagagaagaatagtttgcacttaacatcaatttaaccattttctctagacacatcctattatgaagtttcataactcagcagaaacatcggtatgtagcagggggcaaacattatgtaaaagtggggaatgatcaaaaacttcactctcagatggactctaatctttaactagagaatatactatattataatttaaattacctcgatgccttacttttagaagatg

SEQ ID NO: 806075 - DNA, 620 bp, Homo sapiens
aataacacagaagaaagaaataaaacagctcctatttacatagtaaagtaatatacttacttctagcttatttgataatgtatataattcaaattacttttagttgttttatttataactgtattctcaagttccttaatttgaacaattttaaatgataatacagtggttaaaatggaatgaaaaatttagtttcctaaaataaaatgtatcacaatcactgaaaacctaaattatctaagttgtaacacagtgtgctgtcctatttctgatgactctggttagaaagcaattggtggacagttttgcagagactcctaagctacacatcatcactgtacagaaaactctatacatcattarcaacgtatcaatgcaagcaatataattccctagagaagaatagtttgcacttaacatcaatttaaccattttctctagacacatcctattatgaagtttcataactcagcagaaacatcggtatgtagcagggggcaaacattatgtaaaagtggggaatgatcaaaaacttcactctcagatggactctaatctttaactagagaatatactatattataatttaaattacctcgatgccttacttttagaagatg

SEQ ID NO: 806076 - DNA, 395 bp, Homo sapiens
aacaaattcactcactttgtgtttgcctgaaaatgtctttatcgcattcattgctaaaggatatttttcctgtgtatagaatactaggttggagattattttctttcaacacattgaagatatttcattatcttctggctttggttatttctgctgagaaatctcttgttttattttgcatctytgaagctaatttgtagtttctttccccaaccccaccacccccagctgcttttaagactctcctgctgtcttcagtttctttgagttttctgcttaccaacatgtttctctgcttcattttctgttctttcccaccttttgtcagattttgttttctcacatggaaggccatgcacaggcctgaccatggaaaaccctgaaactgacatgca

SEQ ID NO: 806077 - DNA, 344 bp, Homo sapiens
tgatgtttcctaccctgtgtccaagtgttctcattgttcaattcccacctatgagtgagaacatgcggtgtttggttttctgtcctcacaatagtttgctcagaatgatggtttccagcttcatccatgtccctgcaaagtacacgaactcatccttttgtatggctgcatagtattcyatggtgtatatgtgccacattttcatatgtctgtctaaagtagtcttcccagacctgtaagtcccctaattgaaattataccttttggcaccttttgtaatttcaattaggggacttacaggtttgggaagactattttagacagacagatggacatgagtaaag

SEQ ID NO: 806078 - DNA, 501 bp, Homo sapiens
ggacatttgggtcacaatcactttcctcatttctgtcaataaattcaccttcagcacgtttttgtggctgcttatctgaagcctctcaatggtggctgtatcaacagttccaccatgaactatttcttctgtaactcaatttacatttgattcaagtttcacttacagcatcaccacttttgggcttttttgctgcaatttcatcttcgttggtcagttccctcttttgattatccattgtgatgaaatgtcacatgggagacaagaaggcaacayaactgcacactttgctgtctgtgcatgaactgagtaacagatacacagtgaccagtcactgatagactgaaagttgtatgattggtcactgatcatgatgtgcatctcttatttgcatagtgatttgtggactgaagagctagcagtgaattgtgtactttatgcagttacttagagctaatataccatggtaatttgaatgtgctgttgagggaaggtgttatt

SEQ ID NO: 806079 - DNA, 501 bp, Homo sapiens
ggacatttgggtcacaatcactttcctcatttctgtcaataaattcaccttcagcacgtttttgtggctgcttatctgaagcctctcaatggtggctgtatcaacagttccaccatgaactatttcttctgtaactcaatttacatttgattcaagtttcacttacagcatcaccacttttgggcttttttgctgcaatttcatcttcgttggtcagttccctcttttgattatccattgtgatgaaatgtcacatgggagacaagaaggcaacacaactgcrcactttgctgtctgtgcatgaactgagtaacagatacacagtgaccagtcactgatagactgaaagttgtatgattggtcactgatcatgatgtgcatctcttatttgcatagtgatttgtggactgaagagctagcagtgaattgtgtactttatgcagttacttagagctaatataccatggtaatttgaatgtgctgttgagggaaggtgttatt

SEQ ID NO: 806080 - DNA, 579 bp, Homo sapiens
atgctttctgtctgcttagacgctgtaaatgaaagatattaaatgagtctctcataaatggtgtttttgggggaatttttagtgtcttcacttaaaccaataacaacaaaaacctttaaaatatttagtgcagataaaaggagaaaagttacatcaaaatacttaaatttttataaacagacaagtcaaaatgtgtttaactttgaagtatttcaaaataatggaaaaatcaacctcatcataatttttttttttttttggacacagcctccactctgtcacccaggcgtggaatgcagkggcgcaatcttgactcactgcaacctccgtttcctgcgtacatgccattctcctgcctcagcctctgtaattagctgggatatactggtggcctgccactacacccagctggttttggtttttttagtagagaaggatgtttcaccatatgggcccaggctgatcttgaactcctgacctcaagtgatccacccacctcagcttcccaaattgctgggattacaggtgtgagccaccacacccggccataatccactattttttatttgaaaatcagta

SEQ ID NO: 806081 - DNA, 579 bp, Homo sapiens
atgctttctgtctgcttagacgctgtaaatgaaagatattaaatgagtctctcataaatggtgtttttgggggaatttttagtgtcttcacttaaaccaataacaacaaaaacctttaaaatatttagtgcagataaaaggagaaaagttacatcaaaatacttaaatttttataaacagacaagtcaaaatgtgtttaactttgaagtatttcaaaataatggaaaaatcaacctcatcataatttttttttttttttggacacagcctccactctgtcacccaggcgtggaatgcaggggcgcaatcttgactcactgcaacctccgyttcctgcgtacatgccattctcctgcctcagcctctgtaattagctgggatatactggtggcctgccactacacccagctggttttggtttttttagtagagaaggatgtttcaccatatgggcccaggctgatcttgaactcctgacctcaagtgatccacccacctcagcttcccaaattgctgggattacaggtgtgagccaccacacccggccataatccactattttttatttgaaaatcagta

SEQ ID NO: 806082 - DNA, 579 bp, Homo sapiens
atgctttctgtctgcttagacgctgtaaatgaaagatattaaatgagtctctcataaatggtgtttttgggggaatttttagtgtcttcacttaaaccaataacaacaaaaacctttaaaatatttagtgcagataaaaggagaaaagttacatcaaaatacttaaatttttataaacagacaagtcaaaatgtgtttaactttgaagtatttcaaaataatggaaaaatcaacctcatcataatttttttttttttttggacacagcctccactctgtcacccaggcgtggaatgcaggggcgcaatcttgactcactgcaacctccgtttcctgcgtacatgccattctcctgcctcagcctctgtaattagctgggatatactggtggcctgccactacacccagctrgttttggtttttttagtagagaaggatgtttcaccatatgggcccaggctgatcttgaactcctgacctcaagtgatccacccacctcagcttcccaaattgctgggattacaggtgtgagccaccacacccggccataatccactattttttatttgaaaatcagta

SEQ ID NO: 806083 - DNA, 526 bp, Homo sapiens
ttaaggagccactgattgtaaaacatgccattattttatgttgcactaagaaggtggggtcgaggagttgccaataaacttgggacagactattgatggccaagcccatctgaatttaagatgctaaagtatgaaaaaaatacatcttagaatcaatgaaataccatattttgattccattcctcaagataattttagagttataaaaccagtcctcaattttgggtcttcacagagaatctttcccttgctagaccccagaattttaaatgcatccgtcttacactttcacaaatatttgggttttcctttttcactcacaaacagcagggaggtcatgtactttttgtacaacacctgtgcmctatgagaaaatggtaccttttagttattgacaagttaaaatagcactctcagtttttcagtattacagagagcaaatagtttcctctcctgctctgtgcagtagcttttccagaactatggacaaattgatcagaagaagattgattatttcctcatcttt

SEQ ID NO: 806084 - DNA, 630 bp, Homo sapiens
tttaatgcttgcttaaagtgtttctgtagctagttgagtaattctagacgtttgtaaatgttagctaaatattcatattaacttttacatagaaggtgtcttcttccctccgtaactcatcaatgaatacatttctcagagtagagacagtaacttttcacgttccttatatgcactgtgaggccaagtatggcatggcccaaagtcaaacctcagcgtaggctgggtcccctaaatcatttttttggctttacttgttttctttttttctaaaaaaataagttttattttcttattaaaataatatatatatttatcttaaaaattmaaatgagacaactaactgtaaagaagatagtaagcactggaattttcttctcagtgattgtctccagacagtttaatgcaattaaacatatatgtgtatagtatatatgtgtttattcatatacataagtagtattataccatggcagtggtccacaatttctgggatggggccagatatgtttttacattgttttgaaaatgaaaacaatcattttaaaatcatgctagtagtttggtatatatttccagacctttctctgtgcatttacaactctctctctctttttttgagatggagtc

SEQ ID NO: 806085 - DNA, 622 bp, Homo sapiens
gtggccagggttggcctctggtaaatgacgtttgagcatacacctgaagtaaggaagtgaatcacggaatatttgaggaaagactatccaggtggaggaaacagtgcaaagctctgaaagcagacactcatgttcatagtaattgagaagagcaagaccaatatggctgaattatatagcaaatggagtggtagaaaatgcactggttttgtaaggtgaggggactgagagatattggcataccatagaactttctagactacggtaggaatttccgttttactctgaaaggaaggcaggggaaattttaagaagagataaacatcacatgacatgtttgcaaaagattgttcttgctgtagtgtggagaatagaatggagagggcattttattgccttagaggcaaaagcagctttatgtcttattcctagtgtctccctcaactaaatgtattagccctttggcaattwgtattttctgagctcatatgtgccaggcatacgttttctcatttaatcctcaaaacaaaactgcaaagtagatatcaaaaaagagagggaaaacaaaaaaggctcaggcaaggtcaggacacttgtccacagtaaagagctaataaaatag

SEQ ID NO: 806086 - DNA, 617 bp, Homo sapiens
agttatttgcatcagtgcaataaggatccatttttttttcaacagtatgcaattggagaaactggttattttaccaaggctttgactggaagggtatgcttccctttaagaagtcaatcttgacttgcagagctgctaaaagccctgtaggaagaactggcctcatacccttgcctacacagtccctgtacagggttcctggcctgtggtcagtaaagaatgtcactttgtaacaggcctaggagctccaagtttatcttgggaccttaaaaggagagaatcacccaacttacaggtatttgaggatacaaacccatggctgggctcagcttaaaaagtctcacctgagattccttgtggaycagtgttccatcaaagccaatccaaaaggactatgtacaaataactattcttgctgcaccttatgcaaataatcaggccaagtataagactaaagtccattttggaaaccacttagtcctatgatggtttgtgttttttaaacaaaaatgatgactggtgacagaaaaattaggtttcaaaatttatcatacatttgttattaaattctaaactcattagttgtttttaagttttcacctacattttagattaac

SEQ ID NO: 806087 - DNA, 617 bp, Homo sapiens
agttatttgcatcagtgcaataaggatccatttttttttcaacagtatgcaattggagaaactggttattttaccaaggctttgactggaagggtatgcttccctttaagaagtcaatcttgacttgcagagctgctaaaagccctgtaggaagaactggcctcatacccttgcctacacagtccctgtacagggttcctggcctgtggtcagtaaagaatgtcactttgtaacaggcctaggagctccaagtttatcttgggaccttaaaaggagagaatcacccaacttacaggtatttgaggatacaaacccatggctgggctcagcttaaaaagtctcacctgagattccttgtggaccagtgttccatcaaagccaatccaaaaggactatgtacaaataactattcttgctgcaccttaygcaaataatcaggccaagtataagactaaagtccattttggaaaccacttagtcctatgatggtttgtgttttttaaacaaaaatgatgactggtgacagaaaaattaggtttcaaaatttatcatacatttgttattaaattctaaactcattagttgtttttaagttttcacctacattttagattaac

SEQ ID NO: 806088 - DNA, 642 bp, Homo sapiens
cagttatttgcatcagtgcaataaggatccatttttttttcaacagtatgcaattggagaaactggttattttaccaaggctttgactggaagggtatgcttccctttaagaagtcaatcttgacttgcagagctgctaaaagccctgtaggaagaactggcctcatacccttgcctacacagtccctgtacagggttcctggcctgtggtcagtaaagaatgtcactttgtaacaggcctaggagctccaagtttatcttgggaccttaaaaggagagaatcacccaacttacaggtatttgaggatacaaacccatggctgggctcagcttaaaaagtctcacctgagattccttgtggaccagtgttccatcaaagccaatccaaaaggactatgtacaaataactattcttgctgcaccttatgcaaataatcaggccaagtataagactaaagtccattttggaaaccacttagtcctatgatggtttgtgttttttaaacaaaaatgaygactggtgacagaaaaattaggtttcaaaatttatcatacatttgttattaaattctaaactcattagttgtttttaagttttcacctacattttagattaaccctacttgttcctgtgaaccaacc

SEQ ID NO: 806089 - DNA, 632 bp, Homo sapiens
ttgaaaagagcctttatctttctccctcctttgtcctctcttcacagataggtaattgtgtctccaagctacaggacactcccctcagatgcacccttcgcactaggaaaagttaatttcccaaaccttaaactggttggcttagwattgggctcaggggaagggaatccagaagcccaacatgctggcaaaagggtaaaagtgtttattaccagtcaggcttttgacctccctattgctgtgctaactggtaaaaagccttgggatctttgagctgtccttacctctccctttgtttcgttttgacatatattttttaataacccggtttgtctgttcttgcctttaggccatcaaactccaaatggtcatgcaaccggagcctccgatgatggccccttctgctgggaacccttaaacaggcctatgaagaagctctgactgccattttcccaaaatagtgctccctgtcatcaggaagcagttaagatgggtcttcgtccttatccttatccttcttctaacggcaattagatgtactttagaggggaatgagacagccaggtgggaaggggtccccagaatccaactggcctgtgcactgagaggattgcatactggggtggagccaa

SEQ ID NO: 806090 - DNA, 632 bp, Homo sapiens
ttgaaaagagcctttatctttctccctcctttgtcctctcttcacagataggtaattgtgtctccaagctacaggacactcccctcagatgcacccttcgcactaggaaaagttaatttcccaaaccttaaactggttggcttagtattgggctcaggggaagggaatccagaagcccaacatgctggcaaaagggtaaaagtgtttattaccagtcaggcttttgacctccctattgctgtgctaactggtaaaaagccttgggatctttgagctgtccttacctctccctttgtttcrttttgacatatattttttaataacccggtttgtctgttcttgcctttaggccatcaaactccaaatggtcatgcaaccggagcctccgatgatggccccttctgctgggaacccttaaacaggcctatgaagaagctctgactgccattttcccaaaatagtgctccctgtcatcaggaagcagttaagatgggtcttcgtccttatccttatccttcttctaacggcaattagatgtactttagaggggaatgagacagccaggtgggaaggggtccccagaatccaactggcctgtgcactgagaggattgcatactggggtggagccaa

SEQ ID NO: 806091 - DNA, 548 bp, Homo sapiens
atgaaatccacatagtggagggcacaaacagagattatactccagccggcttgttatctgccatttttcaaagcattttttaaacctgctctaataaaaatgtgtactacaaagaacaaaggagggaaatgtaaatttcgtacgaggttacgatatacattaaataatagcaaatgcaagtcaattccargtgtatttccctgtgtctctaatttgaaacaaggctgactgctttgtaggaatgaatataaaatggattttttttctttttctcaatcttaccctcctaaaaaagtaattttgtgaattagtcattgcaggttttataccagcctttcaccagcattactttgaataataaagcagatttggggcaaacctcttctgcatgaagtcgttagtcctcaatccaaaacggtttgaaatggcatgcaattactcaaaatattaaacttagaatttctacatgatcctcagtaatttcactcaggggtataacccaaaagaattgaaagtagggacttaaacagaaaattgtatacccatat

SEQ ID NO: 806092 - DNA, 627 bp, Homo sapiens
ctaataataaatttggcaagtacaaagagctgctgattgcaatatctgtcaaagggagaaactgaatatataagatataactcttcattatatgatttgagtttattttcctggaatatatccaatcacaaaagaatattgtttttctcagaaaaactgagccaagtagattcttctttataccatactggtaaaggagaaaaagcaatgctactaagttccaataagaaatttcccccatctctatgttagtctayctttataaccattcaggtggaaaaggctgataaggcaatgttgggcaattctttctaattacttcctttgaaatgtctactactaacaggactgatcaatattctcattatgcaaatgtttcttatctattgttcaactttcatatgaccactggatatcagagatgtatgagaaggtagtatataacagacactgggaagagttagtaaatttagaagacacggacccttgcctcaaagattttacaatgtatgattcattccagctaacaaatatacaaggaaaattgaacaggaaaaaaaacatgttttatggtatcctgaaaacaagatgggaaaatcacattactggtcccatagataaaattta

SEQ ID NO: 806093 - DNA, 627 bp, Homo sapiens
ctaataataaatttggcaagtacaaagagctgctgattgcaatatctgtcaaagggagaaactgaatatataagatataactcttcattatatgatttgagtttattttcctggaatatatccaatcacaaaagaatattgtttttctcagaaaaactgagccaagtagattcttctttataccatactggtaaaggagaaaaagcaatgctactaagttccaataagaaatttcccccatctctatgttagtctacctttataaccattcaggtggaaaaggctgataaggcaatgttgggcaattctttctaattacttcctttgaaatgtctactactaacaggactgatcaatattctcattatgcaaatgtttcttatctattgttcaactttcatatgaccactggatatcagagatgtatgagaaggtagtakataacagacactgggaagagttagtaaatttagaagacacggacccttgcctcaaagattttacaatgtatgattcattccagctaacaaatatacaaggaaaattgaacaggaaaaaaaacatgttttatggtatcctgaaaacaagatgggaaaatcacattactggtcccatagataaaattta

SEQ ID NO: 806094 - DNA, 523 bp, Homo sapiens
cccattttttaagattccattggacataataataaagatattcaggcctggcactgtggctcatgcctgtaatcccagcactttgggaggccgaggtggtcagatcgcttgagcacaggagttcaagaccagcctgagcaacaaggcaaaaccctgtctccacctaaaatataaaaattagccaggtgtggtggcacatgcctataattccagctactcggaaggctgaagcacgaaaatcacttgaacctsggagaaggaggctgcagtgagccaagactgtgccactgccctccaacgtgggtgacagagtgagactgtctcaaataaaaaagatattcaacattccagcaattcgtttccccaaataagtactccatatataatgtataatgccaatctaatggcataatagaaggtaagtcaaacttcaggatggctactgagtgatcatatggacaagaccagctgagtctagctacagaaaagttctgttatagctcatgtgcattcactcaacaaa

SEQ ID NO: 806095 - DNA, 547 bp, Homo sapiens
catgcagaactattaatgacccagattccaggaatgaaaattggggtcaccctgccaggtaaagaaccacaactagccaagatgcttgctgggagcaaagggaatccagaatgggttgtaaaagaaggtagttataaataccagctatgaccacatgaccagttatagaaataagaactgtaattgccaggaatatatcatctctattttcttatgaatatttgtgtgtctatcatctatctattgacagattgwtcaaatgactttgtttactttcctcttattgctttatcatgtaccataaatgaactgactttatatcacagtatttaagttacagaatatcaacaagaagattaaacatcattcaaggactttacattggttctgaggaaaggattagtgaattctcagtcgaatacaggatggttgtatcatgttaagtgaaagtatgacatcattattgttttattggcgattaagcacggcttaaagaggtgtgtgggttgccaagctgacaaggatccggacatgtgatggttgattt

SEQ ID NO: 806096 - DNA, 488 bp, Homo sapiens
ttaccagaacttaagaatgcacaagcatcttggcaaaaatgtttcttgctgtaactttgtcagagccccatgttggaagtggaggaaatgggtggatggcgacaggaacactgtggttttcctgatgtgagagtccagagtcaagcattagcaaagtatggatgtgttattgagggtaaacacagtcttaaaagacaactggctactccgtctcaaaaaaaacaacaacaaaaaaagacaactggctgcgtgcagcatatcaaaattcacatattgataatagttgaaaatagttgctaatacaacattaacrtattttaatttatttgtatattatttacctttaatttcaagattatagaatccaacaatcaaattctggggagaactaaatttttctcaactgaaattatgtgttttagaattgaaaagcagattctgtcacatatataataaattatctacttttgaatataagcttcatagaa

SEQ ID NO: 806097 - DNA, 412 bp, Homo sapiens
cattcgggggctggatacggtttaatggatgagaagagatcccatttagtcctacacagtcaaatttgagaaaarcatttgcaattaggttttagacttgcccttcttctgtcagcttgtgtttttattttattgaagtgcatcatagaactcaattaaaaagagaatagagccaaaggaaattcaattcttatttgataattcatttctaagagaatgaaatcatgtcttttttgagtcaggatggatgaaactgaaggccattatcttaagtgaaacaactcagaaacagaaaacaaacaccacatgttctcacttataagtagaagctaaataatatgtacataagaacatggagtgtgaaatgatagacagtggagactcagaaaggtgagaggtgggagttaagtgg

SEQ ID NO: 806098 - DNA, 599 bp, Homo sapiens
tcttttctggatccaaatcactactaataagaggcaacatgtccatgtaaggtttttttttttgtgccaggcaatattcaaaatattagacatatatcaataaatgtaatctctacaactaaaatattggcaggttctattttcttaagttttttaatattgtttttgtagagatacggtcttgctatgttgcccaggctggtttcaaattcctggcttcaagtgatcctcccgtttctgtctcccaacgtgctggaatcacaggcaggaatcatgtccagcctaagttctgtttttatctctattttatcaaagagaaatagaggtaaaataactcacctaggatcattgagctagtaagtartgtaaatgaggtggtttgtttccagaatcaacactcttaatcactctacaattctgacttcaaatattagaaattgggttgttttaaagaatagaaaaataggaatgactatatgtattctagatggaaaaaagtacagtagtataagacaatgaactacaattattagaatagttatctatcatacttcattgaatctcctcactttgcctgcacataacttgatttattacat

SEQ ID NO: 806099 - DNA, 602 bp, Homo sapiens
ttcttacattctgcagtttaactcaagggctacacacagatagaggtgaagaggactctgccgtagagatgggcgagctgggagaaaaggagttaggctgggaaggttgtcacactaccaaggttatacaatctttgcatatttcctctccaaatgccaggctatcacttctgccctctgagacagttactcctaacacgagttgacaaagtgctgaagaagactcttcctgtagccctccagatgacctcaactttttttggtgttaataacattttttaagaaacccacttaatcttacttttttcttaacttattcacaacatgatcttgccagttttccccaaatccagttcccactatttagtggaaatatgcttacttgatgaaccaaggatgcggtcttagtggctctatttatttttcttaaaaatawaataaatcattattataagtagtaatagaaatccaggtggctggatcaataagctcataaatatgaaacaattcaagttttagtgaaaaatttgttagtaggaatatatagttacaataattattgaaggttggcaatgacacttttttcatgattttaaatatac

SEQ ID NO: 806100 - DNA, 413 bp, Homo sapiens
agatggatggccacagggagcaacattgtcagcaacaaggaaacgctcaccagaaagacagggtatgacatgatgtgtaggacagctagactggttcttttgcttctgaatgttccccttctcacatttttgcttacacttgttaggaacagactggattacatatacttttgctaataagaagcctttttttttttttttttacagcactattttaaaaatagctattcaacataacaatcttaactttaatgcmccaaattatggttttcaacaatttaagtgagcatatcctgtcaccctcagcacatgtttgatatatacttgttatatatagatggatatagcaatatccatttgtctacacacacacacacacacgcacacacacacacgagtagagctacaggggc

SEQ ID NO: 806101 - DNA, 695 bp, Homo sapiens
gcatcagacaaaggtctaatatccagcaactacaaggaacttaaatttacaagaaaaaaacaaccccattaagaagtgggcaaaggacacaaacagacacttctcaaaagaagacatacacattgccaacaagcacatgaaaaaaagctcaacatcactgatcattagagaaatgcaaatcaaagccacagtaagataccatctcacaccagtcrgaatggctactaagaagtcaaaaaataacacacgctgatgaggttgtggagaaaagggaatgcttatacacagtgggagtgcaaattagttcaaccattgggaaggcagtgtggtgattcctcaacaagctaaaaaaaggactgcaattcaaccctataatctcattacagggtatacacccaaaggaatataaatcattctatcataaagacacatgaatacaaatgttcactgcagcactatctgcaatggtaaagacatggaatcaacttaaatgcccatcaatggaaaactggataaagaaaatgtggcacatatacaccatggaatactatgcagccataaaaaagagtgagatcatgtcctctgcatgaacatggttggagctcgaggccatgatccttaggaaacaatgcaggaacagaaaaccaaatactgcttgttctcacttataagtaggagctaaatgatgagagcac

SEQ ID NO: 806102 - DNA, 547 bp, Homo sapiens
ctgctgtcataaacctgagctgtgacgtgggtacaggctgaaagctgtgtgtccttccagcaaatcccagatcctggggagggggcaccctgaacacaactgtgaaatagtgtgttggttgccttttaatactgatggctcattttaagatgatatttctattgttataagaacatatacattctcatacttgttttatttgaaacacagtttgcatatacaataggccttatttctgtaggcaataagtaatgacatgtcttatatacatacatcttctaagtttwgtaaagcttattccttttatgtaccaagtttttaaattatcatttttagatggaaagaattcgaagctggatagcatgtttctttgccttactaaacagaggacaatagatataaccatcctgtggctgtcctggtgtcctctgagcaccaagtcttgcgctttgctctatgtggtgggatataatgagaagcaagatggttaatccccgctttaaattaccttgtgccattatactcttgtatgtttgtttgtttgaat

SEQ ID NO: 806103 - DNA, 526 bp, Homo sapiens
attccagtactaatattatttcgaagactctatacctcactgtacccctagcccacatgcaccttctaatatgttgaagtagctttatgcacatttatccaaaattctgttaccctacagtttttttcattttccctgtcttctccaaattgctcccagatggtgagggcaactaaatggatatctaaccactgtgcattagtaattaatctcagtgattttactaaagaatgatttatagtgacttattacataaatgacttatagctttctccaaataacctcacatttaagacattttccacaattaaaatttmttttaaatgccagcagtgtaacttcttggatgacaatataatgaagctttatataaaatcttttgggtgttattctaaatcactcgtatggattattttattaaatcacttatgtagattattttattaagatttcatataaacaggtttagaaactaaggtgtgaagaggaagagtaacttgccccaaatcacatgatcggttggtgt

SEQ ID NO: 806104 - DNA, 585 bp, Homo sapiens
tcacctctcccatgaagctgtgtcagattccccacctgggaagaaatggttcactctgagtttccacaactctcccatgaagctgtgtcagattccccacctgggaaggaatggtttactctgagtttccacaactcttttagattttaattttgttgttgttttaaatctttargtcccttagcccttttgccctcatattatgttgattctcatacccattatctccataaagacatgacctttgattgagcttgtaactccccgcctctcatgacgccttgcacaaagcaggtgctcaatatatatcaaatgaatgaatatgactttattaggcaaagctacagaatttcacgtgtaagttaggttcaaaatttattgactttttcaaaatttgcagaaccgtaagtgtttcttttatggaatagatttctgtctactgaaaaaagaagtacagcttaaaacacttaaaattcttaaactcttttagttcagtgaagagggagaaaaaaaacaatatttttgctaggatttgaaaactagcacccacatgaaacagatgccaatctaaactttaaggatctt

SEQ ID NO: 806105 - DNA, 599 bp, Homo sapiens
ttcagtcttgagactcagactggctctccttgctcctcaagcttgcggatggcctattgtgggaccttgtgatcatgtaagtaaatacttaataaactcccatatatatatacacacacacatatatacattatatatacacacacataggcattatatatacacctatatacattatatataataggatctatattatataggaatattatatattttacatatatatatatataaaatgctaagtactctacttctaatagtgtggaaaacactgatagtccttggtgtgaactgtttagagaattatgcaaaataaatgcatttgacatgacactcctgcttcactgctcatgagaggcaaggagtttagtgactctatacgtaatacctttgaccatatgtggggaaccaaggaacataatgaagctggttggttgctcctcagttcagtggacaamgtgatgaaagaaaatgatgaactcagggattctgtctcctggcttcagaagcagatactgagctgcaaatctgctaagattatcctgagctgaaattacggtaaaacagacacaaacttttatcatgtgagtggctga

SEQ ID NO: 806106 - DNA, 567 bp, Homo sapiens
gatattaacggtatgggataatggtgggaggaacatggtgttggatcaggctgaatttactgatttgggtccactaagtagggactctgcatttaatgttgcagctcagggagtttaaaaaggttctaatagtttatttgcatggttagctgaaatatggattaaaagatggcccactgtgggtaagctggaaatgcctgatctcccttaatatagaggaagggatccaaaggcttagggagatcgggatggtggagtggattagtcactttagttttactcatcccrgctaggagggtgcagaagatatacccttgaccaatgccttgcaaaatagatttgtgagtgcagcaccttcatctttgaagagccctgaaattgctcttctctgtatgtcagatctaacagtgggaaccacagtcactcaactagaaaatttaaatacagtgggaataattggatcctgaggtggcaggggccaagtggcagcactcaaccatcaaaggcaaggcaggcatagatactgtaagggacagcagagacaaagcagcaatcagaacagtctga

SEQ ID NO: 806107 - DNA, 486 bp, Homo sapiens
ccctggagggattgtggagattagtgccaccatcaaggacttgaaacatgcaggggtggtgattcccaccacatrcccattcaactcttccatttggcctgtgcagaagaaagacggatcttggagaatgacagtgaattatcgtaaggttaaccaagtggggactccaattgcagctgctgtgctggatgtggtttcattgcttgagcaaattaacacatctcgtggtacctggtatgcagccattgacttggcaaatgcctttttctccattcctgtccaccagaagcaatttgccctcagctggcaaggccagcaatatacctttactgtcctacctcaggggtatgccaactctctggctttgtgtcataatctcattcagagagacgttgatcactttttgcttccacaagatatcacattggtccattacattgatgacattatgctgactggatccagtgagcaagaagtagcaaacac

SEQ ID NO: 806108 - DNA, 605 bp, Homo sapiens
aaatatatatatatacacatatatatttatttatatattttaaacggacaacggaagtctaaacaataatttttaaaaatgtaatgatgatgagatgacccatgagactagaacatttttaaaagactgataacactgataagactcagtagtatcagtaaaggtataggaaattatcagtagtaagagatccaagtgttacaggactttttaaagtacatttggcagttttcattgaaaataaaatgcacatactcatgagcccagcaattctttttttttttctataccaaggaatacttgaataggcacacaaaagagcatgtataggaatgtttactgtaatattgtttataatggtccaataatgtaaacaacatataaatgctcaccagtaacaatggtgacataarctatggttaaactataccatggaatacaatataaggatgtagatgtctatgtaccaacaaggaaataccgttaagtgaaaaaaacaagttgcagaaaaactgatgtaacaatttaaaaaatcacttaccaaaccatatatgtatccatatgtacatatttaaaaaaaaaacaagaaggacaaagtatacatc

SEQ ID NO: 806109 - DNA, 609 bp, Homo sapiens
atcttgtgatactttaaatgttggcatttctcaaagtcaccctgtcttagttcgggttgctataacaaaatagcatatactgggtagcttataaacaacagacatttacttcccacagatctggaatctgggaagtcctagatcaaggcgccgactgatttggtgtctagtgaggacctgcttactgacccaaagagggmagttttttctcttgtcttcccatggtggagagtggaagcaagctctctcggactcttgtaaggacactaatcccatacatgaaggctgtaccctcatgacctcacctaatcctaatgccttcccgaagaccccacctcctaataccatcaccttgggggctaggatttcaacatatacatttgtgggggacacaaacattcagactgtagcaaccccttctcttttctctctctactcttttcctaggtgattgtagccactcccatccttacaccgatgactcacaaacatacatttagctagccctatcctctggcttcagacctgcatgtccaatcagatgactaatgtcatcttttgggtttatcagagacatctcaaactcagcatgtcgaaaatggaaatctt

SEQ ID NO: 806110 - DNA, 647 bp, Homo sapiens
aaagtcaccctgtcttagttcgggttgctataacaaaatagcatatactgggtagcttataaacaacagacatttacttcccacagatctggaatctgggaagtcctagatcaaggcgccgactgatttggtgtctagtgaggacctgcttactgacccaaagagggcagttttttctcttgtcttcccatggtggagagtggaagcaagctctctcggactcttgtaaggacactaatcccatacatgaaggctgtaccctcatgacctcacctaatcctaatgcctwcccgaagaccccacctcctaataccatcaccttgggggctaggatttcaacatatacatttgtgggggacacaaacattcagactgtagcaaccccttctcttttctctctctactcttttcctaggtgattgtagccactcccatccttacaccgatgactcacaaacatacatttagctagccctatcctctggcttcagacctgcatgtccaatcagatgactaatgtcatcttttgggtttatcagagacatctcaaactcagcatgtcgaaaatggaaatcttgccctttcccagagtcttttgatcctcttcctctgttgccgcctcattgaatgacaccaccatttatgca

SEQ ID NO: 806111 - DNA, 532 bp, Homo sapiens
atttttgcaagcacttttccaaaggatttctaagttttctgactcctaattcagtgttctctctaccataatctcttccatattgtagtagtattattgcctacttgccaggaacatattcctaataccgtgaagaaaaagtattttgtatcactttgttctaccaaggcgtattttatgtggttcactaatgacagcctcatattttgagacttttctcccagtgagtatgccttttctcccctaaatagactttttaaagagcagttttaggttcacagcaaaagtgatcagaaagtatagagttgccatatatcccctggcctccaacctcccccactatcaacatcctgtgccagagtgacrtatttgttatagttgatgaaactgcattgacacataatcatccaaactacatagtttacattagggttcactcttggtgttgtatattctttggtttttgacaaatgtatgtatccaccattatagtagtaatacagtagcttcactgtcctaaaaatcctctatg

SEQ ID NO: 806112 - DNA, 646 bp, Homo sapiens
acctgctgttttgtgtttatcgtgcaccaaaatagaggggcagtatgacattaccactttgtgctttgcagttaacatttttaacacgtttttttttttctaagtaagagatgacttataccagcactatactgttagctagatatggtgatttaaggcaataacttcactgccagatgatttagatgaagaaggagaaaactccatgacaaccttaaccagaaattagcaaacatttagaatttaaaatagaccttttcagatgatgaaacatataaaacttgagactatacataatatctaagtgaaaatacttgattgctaggaaaggaaagcagtctggtgtgtaagttgacagagacttttcttggaagcagaaagattttatagactcgtgatgatgttgatcagcctcacatcgagtcawtgtagatacttttgagaaataaaaaactgagggttagaaaagtaggtgaaaataatagaattaactgttacgtatgtaatgttagaagaatttatcaaatttagcagactaaacccagtgactttccactggcttatggaaagtgagggaatatcaggtaagttgcatgatactctcaggaattggagacagagtgtgtctggtttcaaggaatgagga

SEQ ID NO: 806113 - DNA, 662 bp, Homo sapiens
aagaactcgatatatatagagagagttctgcctgaataaacagtatacttaaccatatttaacttttattgtagaatacatattaaacaatttgtaacaaattcttgtgaatctttataaagctccaaactgaagatcccttctgaggttctacatatatgtatgaatatagacttgcatatatatatatatatatatatatatacacatatatatacacattatgtatgaagtatatataatacttcatatcgttggataaaatatgwgctaccaatacatatatatatatatgcagacaaatttccaaactctatgctacacctatgcttcaatccaaatgggttaaatattatattatattatatttatataatatattaatagaataaaattgtattaatttgatattacttgtattaaattaatataaatatgtttacattttattatattaaaatacatgttaccatatatgtatataatataatataatgtatataataccatattttatccaacaatatgaaatattctggtgtttagaatgggctgctttaaataataagtatcactcataaaaaatttttaattataattccatgtgaagatcccacacttcacaccttgcctatatggggtaaaagcctattgctaaacaa

SEQ ID NO: 806114 - DNA, 610 bp, Homo sapiens
aaaaaaaaaaaaaactgtagagacggggtctccttttgttgcccaggctggtctcaaactctaataaatgttatttttatttattttatctttaaactggcctgtaaattaagaataatgttctcaaatggtcagttaagtggattcataaatctagttccattcaagtagaaaatgtcagtgtttccaagttgaccttaacatgaggcctcttcaaagaagtcagacagcaatagaaatgtcaagttttcttcattctttcctttgccaatgtggaagtcatggtcaacattctgatggctacacaggattcatgaaaggatgtccagatgctcttktttgagtcctagagagttccctcaacttccagagctgctgtgcacctggtaagactgggtgaattaagcgtctacctcacacgtttgtgattagatcagtggctattggtgtgctgtcatcattgttaatgatgtgaattcattcattcaaagagcatagaatgaacagttaccatgtgcaaggctcataaagactattgagttggagttcctctccctaaaaggtgcacaaattgctgggggcaaaagatgaggaatacatttggaggctt

SEQ ID NO: 806115 - DNA, 517 bp, Homo sapiens; identical to SEQ ID NO: 733920

SEQ ID NO: 806116 - DNA, 606 bp, Homo sapiens
gctacctgccacccatcaacctactcccttcagacctcagcatgggctggaaccagacactgggcatgacagcctgttgatgctacctagacctgactagacaagacagtactgaattggatagttcacataaagagcagaaacacttgccactgtaatcccaaggcaggcacccataggaaacagaggtacctggaagccataattcctaaatggacttcccaggcttatagcatgaactatctccagccacctagcactagcctaactggtaagcccagataccaccagctaatgggcaacatccagaaacttcactctcctaataccaataaggatcctttggtttaaaaagaaccacccttcccacccagagcatagttgtgtgatgaatctagtcccctactttacagttraacttttctactcactgctcaatccttgctgtcattgtctttattttctctttagcaacaccattgcttttttttgggtgggtggggacagacctctctccttctgtcacccaggctggagtgcagtggtgcgatcttggcctactgcaacctctgcctcctgggatcaagcagttctcctgcctcagcc

SEQ ID NO: 806117 - DNA, 568 bp, Homo sapiens
aattttttatttaagtgaactctatcgataagtattttgcctttaccaacatatatattcattgtctttgctcagatggacccaaaaataatgagattgtacaatgtcttcaggcatacttaaattattttaaaatgtaaaattgaaacatcattcaataaacattttctcaactgctgctatgtttcagaaagaagccagaccattttgaagctagtaaaaaaacactatgtccctcttctgtttctatgtgccccaatagttagtggccgtaactttgcctaaatgttactattattttagttttaaaattgaaagggttttcttaattatcttgtcacacttcctttaagttagtctagattccatttacattcctgatagyaatataacttggctctaccatagtgaaataatcttttatataaatcaacttacactacagttttcaggtggaactagaagttgagtaatctcaccaccatgaacacagaagatatgtttcatttctccagaaaatatgtcccaaattatgactgaaaaatccacacctccagatatcaggtat

SEQ ID NO: 806118 - DNA, 592 bp, Homo sapiens
taaaatccagatctatgtttgctattggtctccttgttaagaatccttttctcaatctattactatcattaggacacagttgaagttccttaatgcgactcacacaggcactcatcacctggctcttgcagagtttccatcaccrgctttcactctttcctttctcatcctcaacagccagcatcacaaagcacacacctttgtcatatcatgcactctgtcttgctttcctggctacccacacgagactctgtctgctaggttttatcttaaatggtttgtcccctgggaagccttccataataagcctctatagcagtgctttctcaagcagaggcattttcattcccaagggagcatttagcaatatctggaaatggtttttgttgtcacaactgggagatgctactggcttctaatgggtagaggccagggatgctgctggacatcctaccattcacagacgggtcccctccccttgcaaagaatgatcagatccggagtgccagtagtgctgagaacccctgccacagaccagtctaggtgcctgaaccttctgatgcaaaggccatgccagcttgattcattccta

SEQ ID NO: 806119 - DNA, 637 bp, Homo sapiens
tcatattaataattctacttggcctgaaatataaaccaggtgcggtaggaagtattagagattgcataagacaattctaccatccataacctccctgacctgtgacttgaggatagtctggtagccttccattgtcaaggtggcataattcattacgttagataatgtcagaaatacctgtattcatactctttttaattagaggactcccatgtaagaataagttctcacagtgtaagcacaaattatagtcatatacaagtaagtgaaacatctaaatatcctccatgcgtatgcaaagttagtctcatttttgagatctgcacaatcatattagatgtacatgatctattggtcgtgttttcttaaacacttgaagatctttattgctacccttagagtgcaagtcacatgtttttgggagggaggaaaggtagtaactggcttccacacagtaaatattcttggggrtgcacatgatatccctggggaaaaatggctatctattattgttgggacccctaagagggacctacatcagttgaggtgggggacagatattgactgtctccgacgtgacatcttggccaattggtaggctttagaatctcagttcagtttatttattattattatt

SEQ ID NO: 806120 - DNA, 360 bp, Homo sapiens
taaataatgtaaccgtagtcatttcctcttataaagaatcatataatctggagccaaaaaatcatatactactttgttttttaggcaaaggaaaggcattgggatgttttgaatttttaagaagtattgcttcatgtgtgtatgtgtgtgtgttgcaaaacatttgagaatgccagggccataagtatgagtgactaagtggarggagatacacaagtaaacaagtatttagatcacagtgtagtcagtggcaaaacagctctgctcattgaatacaatttcacccgctgtgtgggcagaggggatgtctgagctgaattctaaagagaaggtgtacactgaagtgtaaacgctgtgtgg

SEQ ID NO: 806121 - DNA, 453 bp, Homo sapiens
tattgtgttatctttactaagaaaacattgcaagtccgtaaaagagagagaaaacatatcttaatgggaaaccaagcttcatgtttgtctttgcactaggccttacaacttaagtgtttcatccttcataaagcttttcccctttgccatatttttttttctttctggcagcaagtatttcagcaatgggcagaagacaaaagaaccaatttcagaattatarcagtgaaaagtcaggaaggtttgagtacctcgtgcataaagcagacaattctgaccaagaccaagacatttatgttcctgccaatgttgtagtatctacaagtatgactattgactattccatctttatcagtgataaatgtgtgaatctgaataaaaagatgtcagtataaaattcatcagtgactgctggatccagatatgttgatgccattctgagaacatttttgc

SEQ ID NO: 806122 - DNA, 599 bp, Homo sapiens
gtagtcccagctactcgggaggccgaggcaggagaatcacttgaacctgggaggtggaggttgcagtgagccgagatcatgccattgcactccagcttaggtaacagagcaagagtctgcctcaaaaataaaaataaaaatataagaaaataattattattcagatgaattgaacaggcaagaccattttaacaagtaggattagtatataggaagacacagaggcataggaaatgtgccttcaggcagccataaattattctgcatggagatagggctggaaatgtgatgaggggagcttggtaagaagtgaacctggagggctgggcgcggtggctcacgcctgtaattccagcactttgggaggctgaggcaggtggatcatgagatccggagatcgagaccatcctggccaayatagtgaaacaacttctctactaaagatacaaaaatgagttgggtgtggtggtgtgagcctgtaatcccagctactagggaggctgaggcaggataattgcttgaacccgggaggtggagattgcagtgagccgagattgttccactgcactccagcctggagacagagcgagactccatct

SEQ ID NO: 806123 - DNA, 542 bp, Homo sapiens
ggattatcatggtcttgggatccacccctgtgattttgcagggtaccgcctccctcccagctgctttgatgggctggcattgagtgtctgcagcttttccaggcccactgtgcaagctgtcagtggatctaccattctggggtctggaggatggtggccctcttctcacagctccactagtcagtgtcccagtagggattctgtgtggggactccaaccccacatttcctttctccactgtctagcagaggttctccatgagagctccacccctgcagcaaatttctgcctgaacatccaagtgtttccatacatcctctgaaatctaggcagaggttcccaaaccccarttcttgacttctgtgcactttcaggctcaacaccacatggaagctgccgaggcttggggctggcaccctctgaagccactgctcaagctctacattggacactttcagccacagctggagcagctgggacacagggcaccaagtctctaggctgcacactgcatggggaccctgggcctggcctaggaaacc

SEQ ID NO: 806124 - DNA, 542 bp, Homo sapiens
ggattatcatggtcttgggatccacccctgtgattttgcagggtaccgcctccctcccagctgctttgatgggctggcattgagtgtctgcagcttttccaggcccactgtgcaagctgtcagtggatctaccattctggggtctggaggatggtggccctcttctcacagctccactagtcagtgtcccagtagggattctgtgtggggactccaaccccacatttcctttctccactgtctagcagaggttctccatgagagctccacccctgcagcaaatttctgcctgaacatccaagtgtttccatacatcctctgaaatctaggcagaggttcccaaaccccagttcttgacttctgtgcactttsaggctcaacaccacatggaagctgccgaggcttggggctggcaccctctgaagccactgctcaagctctacattggacactttcagccacagctggagcagctgggacacagggcaccaagtctctaggctgcacactgcatggggaccctgggcctggcctaggaaacc

SEQ ID NO: 806125 - DNA, 576 bp, Homo sapiens
tatttttcagctttgcaagccaagtagtctgtattggagctcttcaacactaccattggagtgcaaagctagccataaacagtacgtgtgcaaatgagggagtatgtgttccaataaaactttatttacacaaacacacagaggcttgaatttgtttcccataatttgccaatgccttccttagagtctagtcaataatctgtaagcaagtgagatgtcactgcagggccctgattcaaacagtatcaaaggattgattccttgtcattcatcaagcagtacaactgtcttctcccttaagaaaccagaattaatatagcaggaatgactttatygatgttcaccagataaacctttcaaatcagttgctatagctaggatcaactgactcgcattttattcagttcctttctgtcccttcttttctacttctaattcctcctctgatatcaatcctgttatttgtagatattcttattatgaatgtatatacagtcataatacaaaacatttaatcatagcaaggatccctcatgttacccatttatagactatgcatctccctccttctacact

SEQ ID NO: 806126 - DNA, 580 bp, Homo sapiens
tatttctgggctctctattctgttccattggtctatgtctgttattatgacagtaccatattgttttaattatggcagttttgcaatacattttgaaatcacaatgtgttgataccctcagctttgttttttctcaaaattgttttggctatcaaggattttgtggttctgtataaaattttaggatttttttttctgtaagaaatgccagtgggattttgatagggattgcactgaatcctgtagatcactttgagtagtattattcagtaatattaattctttcaactcrtggacatgagctgtccttttatttatccatgttcattataatttttctcatcagtgttttaatgttttcagtgtagaagtattttacctcctttgttaagtttattgctatatattttattcattttcaggctattgtaattgtttttcttaatttcctttataggtagtttattattggtgtataaacacagacacacatacacacaaaccctaatgagaattagattggaatagcatttcttgtaagttgcagatatgttcaagaacatgacgtatattttcattt

SEQ ID NO: 806127 - DNA, 622 bp, Homo sapiens
aaatgccatttaagcagaattaaaaagttcattatattacatggcaaatctcgagtgcatatgcttttaatattatgtgcaacaaaatgggaagtttgcataaagtattctgctgtactgtggaataggacatctgtcttgagaagaagcacttttatgactgagttgcaagttgaacgaactttacatttttttgaacactttttttacttgtaagaacaatttgcagacacactatgattattcagactagagtattatcagacatcttttttaacataaaggtgagcttctcattatttagaaaagcaaacatatatcaagatgttgcttttcttaaaattgttgtcaaggacaaaattttgcttttaagagaaaatttaaattttggaaaccttgtatctgccacaatgacattttcagtttttcaattcttagcacattttgtgatgaataagtgatgatagaaacaggattttaaaaatwtattataatgaaatgtgtcaacgtttaggtctccatgttatatagatgttataaaatcctgatggagaaaaacatccattcaaaaggcaaaactgatcaatgaactttaatgtaatcaagcacataacaaattaag

SEQ ID NO: 806128 - DNA, 567 bp, Homo sapiens
agtataattccagcttcagaattttttggtgaaaccaaattgtaaagttttaaactactctttaatgctttttatattttctagaggttagcattgtgtttcttttaaataaagaactattatatgcccgggcatgaggcgaccaactttcagctgcaatattcartatctcccacaaatgtttaaatgagattactctgccttacgctgagatctcaaagtctaagaacaacacaattgacaccaaatatttttagatcttagagtgagagattaaatgcaaaacatgctactcaattgtgaaactggctttgccaactttagatcactcactctttgtttaagaggaaagaagagaccacctttggagaaagtccctgaaatgctaaaatctttcctctcattacaagctaaagtaagaagatcctggaaaataaggagtccaagagaaagtgagtttgggaatagttgttggtgggctgcatgtatcttccaccctcaaccattcccttcagggatatcataaacataaactgccagaggggcttctcagagatcactctgaga

SEQ ID NO: 806129 - DNA, 667 bp, Homo sapiens
gatttattcatgtcttttcatggcttcatagctcatttctttttattactaaataatattacattgtatggatgtacatcgtttatccattggcttattgaatgacatcttggctttttacaatttggagtaattatgtttctttaagcattcaaatgcaggtttttacatggacataaatttcaactagttttattattgttgtaatgctagcttcacagaataaattaggaagtgttccctctagttctattttctgaaagatactgtaaagaattggtattatttcctctttaaatgttcagtaaaactcacccataacaccatctgagcctggtgctttctttttctgaaaagttactaattattgatttaatttcttcaggaaatataggcctatttagattatctaattttctttgcatgagtttttatagtttgtatcttcaatgaattggtccattttattttagttattaaagttttaggtatatgtytctgtgctgtgaccataagtgcatctctaatatcataacattttttcacccttaggtaagatgccaaggctcaagagagctgaagtaagagcagtgtgcttaccccagctgagataacgctctgctataagatatagtcttccttggagagtagacctttgttatggaga

SEQ ID NO: 806130 - DNA, 622 bp, Homo sapiens
gatgtgggagagataatctctcttgtgtttcttcttataaaggtactaattccatcatgaagactccactctcatgacttcccaaaagcttcacctcaaaaactattgtattggggattaaggcttcaacacatgaatttggcaggaggggcatgcagacatttagtccgtggcagtcagtttctttgaatgatttttttcctagttatgagtaatgtttccctatttctttgaatgtcttataatttttggttgaaaattgggcattttaagtgatgatcatgtaataactctggatwcttacagattttcctgaggattatgttttcttttttcttttcctttttatagtaactttcttggacttaaaatgtagaatttgtctccctgtggtatgtgtccctctgaagtctctactctttgggtcacgatcctaattgttagccaaagatttgggtagaagttgtgctcaaatatcttgaatttgaaagcctccaccttatgccatttaatgtttgtgtggtatacagacacatttaaagttcagccagttctcaacccttgggttttactttctaccgtgctctctcaggatctcccctgtgtctaagaagtggtataa

SEQ ID NO: 806131 - DNA, 566 bp, Homo sapiens
aatttttgttttgattatatagattgggcatatcttcattagttgcgcatctgtcttgcccccagggacgctgtgctcaatgatcttctccttagcaatgtgtatccatactctgtggctaccactcctaccttgacactcattataataatggyatactcactatgtatttgattgctaatagctgtcacctggcctctatttcaggctcctctttatctgattgtttttggggagcccagataagtaacaacatctcttactgtcagccctatcagtaagaggaaagccaacactggtattctcaatgatgctggtgtctgcctcagcagtgtgtttcttatttctttagcaaatggaggggcatctgaatcctcagattcagagggttcaggggatctagttttaggaatttcaagtacatgcagctaagatgtccccattccatgcctcaggtttccctactttcaggaatctgcccttagtgtggcaaacttgctgacattgagaattttactttctttagagcattgttacctttataattaacacttgggcttgatact

SEQ ID NO: 806132 - DNA, 560 bp, Homo sapiens
agcgttgcagaaatatttgctaagtcaactttaaaccatttttcaaaaatgactaatgatttcattaatcttacatacatttttaaccctttatcatgacaccttttttgtttttaattctccatgaggaaaagccatttcaatgcaaattccaaacaccaactactatcttttttctctttagctaaatcatggtatatctgtataatataacaagctttcagagttcctttctacttcattagaaattatcttaaaagatrggtactcaaattactgaattttttctctttcttaaaacattcttttgaacacattaagaaaattcagagcttaaccttgatgtaagctacttttagtaatcgtgtattcagaatgaaagatggtcttgaagaatcaacgttttcacagtttatcctattgtagatttgactccttctacacatacaaccttacatttttttccaggcaatatctttatctctctaaagtctatataccgtgttgaaaatcttcagttattttaccattgagtataaaatataccttcataaatacca

SEQ ID NO: 806133 - DNA, 599 bp, Homo sapiens
agaacacagcagaattttcaactgtgaatgtaatgaatgtaaggaatcccatgaagaccctctgggcccattaaggcttctggcttcagagggtcctaaaacccacttacattagcatacagaaatatagtaagaagacgtcgttttttataaatattatctaggttatctaggttttagtcttaagaagattataatgactgcagcttattttaaaagttgcatccacaagatgcagttacaaatttaaaagaaaaaacaaagtttattagatacctgttttatgtttagagtttgtgattaagaagctcctattatttttggtaacacagttaagactttgcaagggttcatacttggactaagaatcccctattagtttagccttagatgtggcctacyattccagtgatttctcagcccttcttttcaaacttcaaagcttggctattctaacagacaaatcatgctgccaaaacctaggggagtgagacaacattgaagtgacactgtattgagaattaaaagataaggaattcagtcctaattctgccactacctaacttaacatttctatttgtctccttatctataaaata

SEQ ID NO: 806134 - DNA, 605 bp, Homo sapiens
gatccagaatccaaatcttatcttgaattacagttcccataatccctttgtgtcaggtaattgaatcatgggggcaattacccccatgctgctggtctttggatagtgagtgagttctcacaagatctgatgaatttatcaggggcttttcccaccttttgctcatacttccccttcctgccactgtgcgaagaagggtgtgtttgcttccacttctaccatgattgtaaatttcctgagtcctccccagccctgcataactgtgagtcaattaaacctctttcctttctaaattacctggttcagatatgtccttacagcaccatgagaatcractaatacagtaaatttgttctgggtgtagggcgctgctgtaaagatacccaaaaatgagggaaccactttggaaatgggtaacaggtagaggttggaacagtttggagggctcagaagataggaagatatggaagtttgaaacttcctagagacttgttgaatggctttaaccaaaatgctgatagtgatataaacaatgaagtccaggctgaagtggtctcaaatggagatggggaactggttgggaactgaagtaaaggtcattcttg

SEQ ID NO: 806135 - DNA, 620 bp, Homo sapiens
atccaccatttgttaatttggtggaaaaagagtaaatcaagctatgtctgagtcaatggactattcaacagaactggctagttccatcaaaagggttcatttggcaccaccatatgcagggtagaagtgctagaaagaaggcaggcattttatgtagcaagttgcttaaaataaaaacagtgaaatgtatagttttatgtccttaatcatagctaatatttgtcaagcacttatatgaagacactgttctaggggctttcttctctttatgtcgtgaacrtaggctttttgctctggctgtgaggacaacaggtcattttggggtggctggtaagcaggagcagtggctgcacctccctaggaggcaatggagtcccaaagtactaggcatggccccaccggcttcttcttctttttttttttttttcatatcatgaatgtgacttaggtctctcattcttgaatgatttgagatagttttgaaattgtctcaccgagtggcgcctttgtgtaaatgcacttggcaatcattttggtccactcagcagattcccagtgggtttggctctgtagtccttccgggttgctcttctgaggccaggtcacaggatgagtgacct

SEQ ID NO: 806136 - DNA, 620 bp, Homo sapiens
atccaccatttgttaatttggtggaaaaagagtaaatcaagctatgtctgagtcaatggactattcaacagaactggctagttccatcaaaagggttcatttggcaccaccatatgcagggtagaagtgctagaaagaaggcaggcattttatgtagcaagttgcttaaaataaaaacagtgaaatgtatagttttatgtccttaatcatagctaatatttgtcaagcacttatatgaagacactgttctaggggctttcttctctttatgtcgtgaacgtaggctttttgctctggctgtgaggacaacaggtcattttggggtggctggtaagcaggagcagtggctgcacctccctrggaggcaatggagtcccaaagtactaggcatggccccaccggcttcttcttctttttttttttttttcatatcatgaatgtgacttaggtctctcattcttgaatgatttgagatagttttgaaattgtctcaccgagtggcgcctttgtgtaaatgcacttggcaatcattttggtccactcagcagattcccagtgggtttggctctgtagtccttccgggttgctcttctgaggccaggtcacaggatgagtgacct

SEQ ID NO: 806137 - DNA, 620 bp, Homo sapiens
atccaccatttgttaatttggtggaaaaagagtaaatcaagctatgtctgagtcaatggactattcaacagaactggctagttccatcaaaagggttcatttggcaccaccatatgcagggtagaagtgctagaaagaaggcaggcattttatgtagcaagttgcttaaaataaaaacagtgaaatgtatagttttatgtccttaatcatagctaatatttgtcaagcacttatatgaagacactgttctaggggctttcttctctttatgtcgtgaacgtaggctttttgctctggctgtgaggacaacaggtcattttggggtggctggtaagcaggagcagtggctgcacctccctaggaggcaatggagtcccaaagtactaggcatggccccaccggcttcttcttytttttttttttttttcatatcatgaatgtgacttaggtctctcattcttgaatgatttgagatagttttgaaattgtctcaccgagtggcgcctttgtgtaaatgcacttggcaatcattttggtccactcagcagattcccagtgggtttggctctgtagtccttccgggttgctcttctgaggccaggtcacaggatgagtgacct

SEQ ID NO: 806138 - DNA, 601 bp, Homo sapiens
tgtctctagtccttgaagccaagtcaaggggacaggaacacacctacctcctctaaacagaagttttaagagaaaacccacaagcaaagaaggactggaattccttcccttcctcctttcttgagcgtggcactttctcaggcagggggaagcacatcattcttaggatttcgaattgaacatcctggtctcaaaaacggattttagtgatatagcattctaattatattttcctagttgttttcttttatgatacttagaaatcattgctaccgggacattttttgcctttttaatgattttcatttttgccctgtattcactgtttttctctctcttttttagtatgtttyctgttaccaatttgtttataggattccaagaaaataccatttgctgagtaccatgttccaggcactttctgtagtcagagctcgtttacttttcagagcagctgtacattgtgtgcgttcccattgtacaagcagtgaatcttcggctcagagaagtgaaaactgccccaagatcagtagttaataggaggttagccaatatttggactctagcttctcggactccaaactctatgtacttaagagtt

SEQ ID NO: 806139 - DNA, 373 bp, Homo sapiens
gaccctaaggctttaacccatgactctgacctcactggcctgttcttcctcataatcttcatttttaaagtttcatgggtcagaggcaaaatagagagggcacccagggagcagaactctcacaccacagtttttccttccttggtattgatactgaagtaaagtattcgcccttttgagaaggggttattatcaacataatatcagggaacatttggcctacattgtctccmagaatagttgagatgctgatgctgcaacttcattaataggtgtggttacttacttctgtcagtaatatgtcagttaagacatatttagaaaaaatgtcctttttcaaacaatagacttaaatgttaaaactataagactt

SEQ ID NO: 806140 - DNA, 540 bp, Homo sapiens
cttaaagaaaaatagatttttttcctctcttgtctatgagttatctatttgaaaataagtaattgtgcttattaatgctatgtaaatcctaacattcattgagtatttactatgtgccaggttctgttccaactgctttgcatgtatcatttaatttagtcttcataacaaccctaagagataagtactaatattaaccccatcttatagatgaagaaactgaggctctaagaagttaaataatttgcctatttttactcagctctaagtggtgaatygagattccaatccagatattcaagctccagtatccatgttctttactatgccctgtgtatgctatatttttctgttagaaaagtgagaaagagggaactcaaaagatctatgtttgcgatagatattttaaatatatatataggacaccaatatacttaccataatggagtcactccacatgaaacttcttgaaggttctatagttttatctgtaaaatgaaataataactcacaaggtactttatatgacttaaattttga

SEQ ID NO: 806141 - DNA, 491 bp, Homo sapiens
aggtttaaagttggcgatagggaggagtcactgaaccattatctacaaaagagcattatgaacaggttgtattttagaaagatgtctgtggcagtactagaaagttatgaaatagaacgttgtagaaaatagttacactagtgccagcaagtccagataaagtgttaatagaggacttctcatgaccttcattgtacttcttagataaaacagartacttgaaatcactagttacggagaacaagcgtttataaactcactccataaaacaaaggaaagaagtccagataatgtttaatagaggacagtcttcgactgagaatggcagggtaattgtgcagtaggagatggcttttctcagggtgttgacattgatttgatatgtcattacatcatctctgattaaaggccatatttctttttaaaaagttcttatttttgtagaatagattaatgtctcttattgacaggtgttttatttcatgttacta

SEQ ID NO: 806142 - DNA, 469 bp, Homo sapiens
aatccggttttatacataattgaatttctctagaaactggagttttaggagttataagtcctcccttcccagtgactaaatggatccttttttttttttttttttttttttttgagacagtcttgctctgtcacctaggctggaatgcagtggtgtgatctcagctcactgcaacctccgcctcctggattcaactgattctcctgcctcagcctcccaaataactgggcttacagkcacctaccaccatgcctggctaattttttgtatttttagtagagatggggtttcaccacgtcggccaggctggtctcgaactccttacctcaagttatccacccacctcggcctcccaaagtgctgggattaaggcatgagccaccgcacccggcctacatttttttttttaaaggtttagcctggtgattttatagctcatctaggttgtaaggaatagcaatgaatccta

SEQ ID NO: 806143 - DNA, 493 bp, Homo sapiens
cttgtctctacctattgtggatcaatttatgaagacagcacagtatagccttaaaggcattggagcaagaaacacccagtttctagctgttttaccagcactactttttgagtgaccttgaaaacagtttctgcacttttaacatagggaataataatagcatcttccataagggttgttttcagcaagctctgaggtgctaaatatataaagtaactaatatagtacctgacatgtagtagacactctctctctctctctctctctctctctctctmtatatatatatatatatatatatgtatgtgtacacacacacacacacacaattgaatgaccctgtgagcgaggccaattttgtgtatagcttttaaaaatgcatatttgctgctcccctttatttttcataactttcaaacattatgatactgtattcccaaagatcgtttatactacattatctgaattgatttaattaggaccagttacatca

SEQ ID NO: 806144 - DNA, 611 bp, Homo sapiens
gataaacatttcagcattgttgtccttgtcattatatcatctatttggtgaggatccattttttaccagacactagatacttttcatattattctttatctaatcctgtgacaaaaatattatttatctccattttacagataagaaaatttaagtttaggaagaaataaatgtccttgtatcacacagcaagtgagtggtaaacctagaagtgagactcttcctggctgcaaaatataaattgcattcagtatgtatcatacatagcttcctgtatgatggatagtcaccatagatgtagcagtgcattgatttcctactgctactatctaggttgggatccatgtccccagagagagtgctattctaaatatttatcaactggttkttcctgggcacctcccaatgtgaatgcacactacagccaatcaaaatggaccctggccatattttactggcattcgagccattctgatgcacattgatttaacatcagacctggacctgctctgtaaaccttgaaatgcatgcaaaattacgtgtccgtgtgtgtgtgtgtgtatacagttgttacccgtgaagaggtttgattttattgggttatcactgag

SEQ ID NO: 806145 - DNA, 565 bp, Homo sapiens
ttagttctgcctcatctatgttagtagcagcaaaatgttaagctgataaaatgcttccacaaagatgacattttataccagttgcaaacacttatttatatttgaatctttatttaattaaagctgtattcatgttactttctctaatatttcccagaatttgtagatgccaacaaaatgttatctattgtaaataaaattaaagctcatttaagaaacctaaggtatattaatgatgatgaagtacttaatataaagctacccagtaaattctgataaaatctgatcargaatttttgctcttgagaatttttgtagcctgtggtttcacattcattaggatcataaaaccctttgatcagtccctatatgatgttatcctttagatgattctcaaaatgttggttgagtgtacattttaaagcattcatttaccatttaagtgaattagggcttgttagtcacctcagactgctaataaaagaatgtcacaaattgggtggcttagaaacagcagcaattctttctcaaagttctggaggctggaacttcaagatcaaggtgt

SEQ ID NO: 806146 - DNA, 565 bp, Homo sapiens
ttagttctgcctcatctatgttagtagcagcaaaatgttaagctgataaaatgcttccacaaagatgacattttataccagttgcaaacacttatttatatttgaatctttatttaattaaagctgtattcatgttactttctctaatatttcccagaatttgtagatgccaacaaaatgttatctattgtaaataaaattaaagctcatttaagaaacctaaggtatattaatgatgatgaagtacttaatataaagctacccagtaaattctgataaaatctgatcaggaatttttgctcttgagaatttttgtagcctgtggtttcacattcattargatcataaaaccctttgatcagtccctatatgatgttatcctttagatgattctcaaaatgttggttgagtgtacattttaaagcattcatttaccatttaagtgaattagggcttgttagtcacctcagactgctaataaaagaatgtcacaaattgggtggcttagaaacagcagcaattctttctcaaagttctggaggctggaacttcaagatcaaggtgt

SEQ ID NO: 806147 - DNA, 621 bp, Homo sapiens
aataaataaataaaatgcaaatagtttttatactgtgttggttcttcaacttgtagttttcaattgttttattacttttttatcattttgtttcttttggttgaatctgtggatacagagcacaaactgtactgttttttcctatacatgcatacctatgacaaagcttaatttatgaattaggcacggtaagagattaacaacaataatcataaaatagaataattataacaatatgttggataataaaagttatgttaatgtggtctctctagcaaagtatcttattttaccatacctgcacttcttgttatgttgcgttgataaaatgcctacctgattggattgagcaaggtgaacggcccaggcattgtgacgtagtgttaggtcagaaggaggattatctgcstcaggtgattctggatcatccagccgtgagcatgttcaagtttcaatgtcaggagcagacaatgtcaatgaacaatggcaggctgcagaaacagggtggatacgccggacaaagatgattcccatcataggcaggacagagcaaggtggcgtgagatttcatcatgctactcagagtgctgcacacttccaaacttatgtattgcttatttc

SEQ ID NO: 806148 - DNA, 640 bp, Homo sapiens
tttaaatggaaacatgtaatacgtggtcttctgtgactgcctgctttcgcttatgacgtttaaaagttcatccatatttgcgacttgtggtacctcattcctttttattgccaaataatattccattgtatgaatatactgcattttgtttatgtattcatcaattgatgggcatctgggttgtttctacttccttgctattagaaaaatgctgctgttactgatcatgtacragtttttatatggacatacattttcttttcttttggatatatacctagaagggaagttgctggagatatggtaacactattttaaggtatgccactctttaaaagtggctgtaccaatttccctttctgccaataatgaatgagatttacaatttacctatgttcttgacagcacccgttattcttttcttgtttgttttaaattttagcaatatttgtaggtgtgaagggacatctcataattttgatttatatttccctaacgactaatgatgctgatcttcttttcaagagtttattgggccatttgtataacttccttggaaaaatgtctattcagattctttgcccattttttaattgggttatttgtcttctccttgttaagttgtaaatgttctttatat

SEQ ID NO: 806149 - DNA, 556 bp, Homo sapiens
ggtagagcattttgaaattaatatagtccgccatctgcattttatcattagcagattataaattatcctgaaagagtataattgaggccatttaagatgtcttttgaatttcccctgtattaattgcatttcctttagagtgccttttatgtgcagaagcattttctaagctctggtcttgcagtaccagttgcatttttgtcagtacttttagagaccatctttcagctggagcagctttttggcaaatttatatttctagaaaatgtaaattgtgcttgctacaaatgaggcaygaacagaacacttagtaaccttgatgaggaagtgagccattctcggtgggggtaatcaggagagttagagagcaagaggagaagggcatgaaggcactacatgtgaaaatgaaacaaagccaggagctagcatggaagggcaaagtgccatcctgtcttttctgtgcaggaagggttcttggagctggagcacagggtacaggggtgtggtggggaagaggcagaggagaagagaatagactaaaaagagtaggaaggta

SEQ ID NO: 806150 - DNA, 592 bp, Homo sapiens
catctggtatttatttcttaatatctcctgtattagtcaattttcacactgctgataaagacatacctgagtctgggaacaaaaagaggtttaattggacttacagttccacatgactggggaggcctcagaatcatggcgtgaggtgaaaggcacttcttacatggtggtggcaagagaaaatgaggaagaagcaaaagtggaaacccctgatacacccatcagatttcatgagacttattcactatcatgagaatagcacgagagagaccagcccccatgattctattacctccttctaggtgcctcccacaacacgtgggaattctgggagatacaattcaagttgagatttgggtggggacacagccaaaccatatcatctcccaagctataaaatgacttatttgaaattttaaaaggagractccaaggaagtgttcaaatattcacgtacctaaactgaaacatgtgtttatatttttgaaaaatagcctgagtacttgacaactaatgttatatattgagttaccatttctgaaactttaattttatgaaagctccttctcctaatttgttaaacggggcatgg

SEQ ID NO: 806151 - DNA, 556 bp, Homo sapiens
gcaatttccctggtaaacttaaaaattaataactaataaacgaataaataactcatgtccaatccccaaccccagataggtggatttgcacagaggcactccagaacaggcctcactgtttccagccccggctgccatgctcagcaggactctaggctgccacacacctcagggttctgccctctgcagcatgtactacacagtgctgggcttcccacacctagtgaacgagtcacgacagcctcctgatgtcatgactccagggcttggggcctctctcagcaggaacacaggctgcacacaggagttctccacccctgctgagccaccaccatcattcctgctgcccagtgtcctyccccagaggggcttccgcagggagcggcctggtcagcaccgccttctggaaagcacctccatcacgctgctccccagcaagtgctcccagagactctaaagtttatgaactgtggtccttcctctggagggctgtggctggctgttgccacagcagcttagtcctctgaaaggcagacctgtcaccccggcgtgcagt

SEQ ID NO: 806152 - DNA, 600 bp, Homo sapiens
gataaacatttcagcattgttgtccttgtcattatatcatctatttggtgaggatccattttttaccagacactagatacttttcatattattctttatctaatcctgtgacaaaaatattatttatctccattttacagataagaaaatttaagtttaggaagaaataaatgtccttgtatcacacagcaagtgagtggtaaacctagaagtgagactcttcctggctgcaaaatataaattgcattcagtatgtatcatacatagcttcctgtatgatggatagtcaccatagatgtagcagtgcattgatttcctactgctactatctaggttgggatccatgtccccagagagagtgctattctaaatatttatcaactggttkttcctgggcacctcccaatgtgaatgcacactacagccaatcaaaatggaccctggccatattttactggcattcgagccattctgatgcacattgatttaacatcagacctggacctgctctgtaaaccttgaaatgcatgcaaaattacgtgtccgtgtgtgtgtgtgtgtatacagttgttacccgtgaagaggtttgattttattggg

SEQ ID NO: 806153 - DNA, 605 bp, Homo sapiens
atagcagacttggttctgagcttgcaggaacaacggatgccctgagtgacagactcaatatctagaattcagtttcagcctttatagttggaattatgcgctgaaccaacaggaggatatataacagaaacaaaggtgaagctgtttgctttcttttataaaaagctactgcacaaataccagatagaataaaattttttattgctcagaacttatgtacatgtataaagaaggtcccctttccacagcccatttgggcctggagtctgcagtttcagaagataccaccatactatgccgcttcccaagacagcaccaagaaaaaatgcagagaccccacatcacatcagcaatgtgcttataaaccatggaaaagagcataattatagaggcacatgataagcactggaaatatgagaagagacatcwttttcaaaagacctgacttgctctttaggacaccagaggacagaacttggattgatagatgaaaggtatagaggaccagatttctttcctgaggggaactttctaagacgtagagctattcattgataggatggactgccttgtaagatggcaaagttcttgctgttggaaagcct

SEQ ID NO: 806154 - DNA, 540 bp, Homo sapiens
agacataagtctattcaagttttcttttctctctggcttgaaatttagtaggtccttgtgtttagcctttacaggaattgtaaaatttcatctaagttgccaaatttataggtagaaaattgctcagaatattctcttatccttgtgggatctctacaatgtgtagtgttgtcacttctcttgtttctgacattggtaatttgtatcctttctctttatttcctgatcagcctgacaagacagtataatttttattgatcaayaaaaagaacaaagttgtggtttcatggtctttttcctattgttctgttttctcaaccagtgatttttcaccttgatcgttattgttttcttttttcttcttgctttgcttttcatttgctcttcattttttgtttgtgaaggtggaatgtgaagacaattggaaacttttttctgtttagtcccaaaaaattttctttgcatattgctttagctgcatcccctaaattttgttatgttatgtcttcattttcattcacttttgaattttattaattt

SEQ ID NO: 806155 - DNA, 536 bp, Homo sapiens
aaaaaacccagaatattatcatatgactgattaggacccacggtttttctcatgtacataagtaaaaaaggtcaagcaagatgggctgccctggcaccagaaaatataatctgataaaggaccactagaagattcacttgtctttcatggggcttggctgtttacagtcagtgttttcttctgaaggaagctattttatccctacccgtacaacagatgggtactctagtatttcataaaagatgacaggaaaattacattaccacaaatggcaaaagttgggaggtatgcaataggatagtttattgggagaaaatagactaatatcaaaacagaaagaacagaagcagaaataatgaatttgcctgcatcaatctcttctttcatgacctcatcatgcyggagataccgatcaatttcactacaagcaataaatattaaaatgaaattcttgagtgtcttatctaaagcttcctgacatcaattgttttcccagttttttccctgcaagcattgaatacctcttcatcaatctt

SEQ ID NO: 806156 - DNA, 597 bp, Homo sapiens
aaactttaatcaacttaattcatcatattaatgtaatgaagcagaaaaatcatactatcatctcaataaatgcagaagaaagaatgtgataaaactcagcatgcattcaggaaaagaaactcttagcaaagtggagatagaagtgagcttccttgatctcatcgggggcatctatatttaaaaatcctaccacagatctcacacttattagtgaaatattgaaagcgtcccccctgaggtcaggaaaaaaataaggatgctcaccactaacacttcttttcagcagcrgctggtgaggtaagccaagaagaaagcaataaaggataaaatgatcagaaaggaaaaaatgaaaaagtcattattcacaaacaaaatgatacgtatataagaaacccaatagaatctacagataactattgaaattattaagtgaatctggaaagactgctggtacaaggtcaatacacaaagatcaactgcattctaaataaaccagaaaccagtggtcagaaaataaaaatagggaacattttaaatgatcatccaatgcaccaaatgtctgcgaataaatctaatggactatgtatgtaatatcta

SEQ ID NO: 806157 - DNA, 648 bp, Homo sapiens
taatggtgagcaatgtgaaacgactttatgtgtatgtggggattgaacaaataagcagaatcgtagtggataatgagagccaggtttctcactgtcccaggaagaagttacaaatagcaaaaggaagatggcagagggaggccgtgctgttggattgggataggtgtcagtgtgactctgtggtctttaatagatgcatgtacagcacaggagtaaacataggtgtacgcgttacatgcatgggttagtgatacacctacatatgcatctcctagccttgtccgttgggaagacctaraagcaatgacctccagcaacagggagcacacctaaatatcagttgctgataaaaataagcagggctccttgcagaagatgagtctggaacctctgatgatgctggaaataaggaagtggccaaaatggatggggtgtgtcagagggcacataagcaacctggaggagccccatggccaaagcgggtcaatttgagcaaggaaatgagtaatgatagtataggtgtataatctataaaacaaagtcagtatcactactgatacttcttatattgatataagaagaaattgaaaaaataaggagaagggacatctcttcctgacagaaacattccaattaattggtgtagga

SEQ ID NO: 806158 - DNA, 521 bp, Homo sapiens
ggagtaaatctcagactcgtgatttttgtggactctgaggttgttgaagacaagacaatcagatgaaattattgattgctcctaagttgtatcggctttgagacacagactgaattaaagttagctttcagatctgagttaacttttgattagaaagactttaggaggttctggaaattgttgagttaattaagaatacccttgtaggctccactatttcttgagattttcaggaattgtctaggcttctagagtattttcagaataagataaaatagcttttctggaaaaagtagtttgactttagtttccaggaccttcgtattcaaaawacagtatgttctttactagatctacatgtggcatgctagagaaaatgctatcttttattaagaaaaaggaatcttaagtcctttacctggacccagatggcttcattgatcacatcagtatgaggttacgcagacaaagggctatttttgttgttgttattgtcatttcattggttgttgaagaaggcc

SEQ ID NO: 806159 - DNA, 598 bp, Homo sapiens
ctgacctcagggaagacatagcttgaggagtctgagcccctggccgtcgtggtcttttcgggttgtggctgctgcacttgcccatttaccatcaaaattgcactaaaaaatgccccaggggagcccttggattctatctgagttgtccctgcagccctgcctcctccttatcatcagatatggraagattcactctgctgggggggcaaatcattttttttttttttttggcatgctggtctcttggcagtggtgtagcttaaagtttaatgggtgctgtggtgaaagtgttctgtctctggaaaccatggcccctagaagctcagagcctagagttagcgggacaggaagcacagatttcctaagtgggtcactggaagtaatggtaagcatgaatatccctacttctaacctttagctcttgcacacatgcgttttaccttttggagacatagtatcatataacagtcattggcttaatatgtacaccacatcctgaaggacagtgcccaatcctagcagggtgtcatctctaagttgataccttagctatgtcttgaaaagactattccatggatccatcaggctggcagcttct

SEQ ID NO: 806160 - DNA, 598 bp, Homo sapiens
ctgacctcagggaagacatagcttgaggagtctgagcccctggccgtcgtggtcttttcgggttgtggctgctgcacttgcccatttaccatcaaaattgcactaaaaaatgccccaggggagcccttggattctatctgagttgtccctgcagccctgcctcctccttatcatcagatatgggaagattcactctgctgggggrgcaaatcattttttttttttttttggcatgctggtctcttggcagtggtgtagcttaaagtttaatgggtgctgtggtgaaagtgttctgtctctggaaaccatggcccctagaagctcagagcctagagttagcgggacaggaagcacagatttcctaagtgggtcactggaagtaatggtaagcatgaatatccctacttctaacctttagctcttgcacacatgcgttttaccttttggagacatagtatcatataacagtcattggcttaatatgtacaccacatcctgaaggacagtgcccaatcctagcagggtgtcatctctaagttgataccttagctatgtcttgaaaagactattccatggatccatcaggctggcagcttct

SEQ ID NO: 806161 - DNA, 683 bp, Homo sapiens
tggtccctggttcattatttagttcatttggtgaggttatgctttcctggatggtcttgatgcttatagatatttgtcagtgtctaagcaatgaaaagctaggtatttactgtagtctttatagtctgatcttatttctggttgtccttgaggaggctttcagggtatttgaagggatcggacctgaagccccataatgctgtcagttttgcagactcatagaggtaccactctggcagtcttggataagacctggaagaattctctgaattaccaracagaggctcttgttcttttcccttacgttctcccaaacaaacagagtctctctctgtgtgtgtctctctgtctgtctctctctatctacctatctatctgtctctctctctgtctctttctctcgctctctttctctctctctctgtactgagccatcttaaactgagggtgtggtgatgcaagcatccctgtggccaccaccactgagaccgtggtgggtcagcacctgaagccaacatagcactgggtattgcccaaggccctttccttcacagcaacaagttcctccaagctgcaggcatgtccatggatgttgtctgagagccagagattggagtgaaaaaccttagcaacttacttgatattctactgctgctaagctgtcattcaaatcacaatacaaa

SEQ ID NO: 806162 - DNA, 683 bp, Homo sapiens
tggtccctggttcattatttagttcatttggtgaggttatgctttcctggatggtcttgatgcttatagatatttgtcagtgtctaagcaatgaaaagctaggtatttactgtagtctttatagtctgatcttatttctggttgtccttgaggaggctttcagggtatttgaagggatcggacctgaagccccataatgctgtcagttttgcagactcatagaggtaccactctggcagtcttggataagacctggaagaattctctgaattaccagacagaggctcttgttcttttcccttacgttctcccaaacaaacagagtctctctctgtgtgtgtctctctgtctgtctctctctatctacctatctrtctgtctctctctctgtctctttctctcgctctctttctctctctctctgtactgagccatcttaaactgagggtgtggtgatgcaagcatccctgtggccaccaccactgagaccgtggtgggtcagcacctgaagccaacatagcactgggtattgcccaaggccctttccttcacagcaacaagttcctccaagctgcaggcatgtccatggatgttgtctgagagccagagattggagtgaaaaaccttagcaacttacttgatattctactgctgctaagctgtcattcaaatcacaatacaaa

SEQ ID NO: 806163 - DNA, 558 bp, Homo sapiens
tttgaaagtaaagccactagaattggctgatgggttggacgtggcctgggagaggaaggagaggcgttgaggcacactcggtgtttttttggcttcaacagctgtaagaatagagcctctgcttaagttctcagggaacactctggctgggaaaggcatgttaagtttgaggtgcctgctaggaaccctagcagagacatagactaggtcattggatataagagtgtggctctcggccgggcgcagtggctcacacgtgtaatcccagcattttgggaggccaaggcagacagatcacctgaggtcaggagtttgagaccagcctggccaacacggtgaaaccccatctctattaaaaatacaaaaattagccaggcatggtggcatgtgcctgtaatcccaactmctcaggaggctgaggcacaagaatcacttgaacccaggaagcggaggttgcagtgagctgagattgtgccactgcaccccagcctgaaaaacagagcaagactgtcaaaaagcaaaaacaaaaacaaaacaaaacaaaaaacaaacaaaaat

SEQ ID NO: 806164 - DNA, 590 bp, Homo sapiens
aaaaagatccttaaagtttagattggcatctgtttcatgtgggtgctagttttcaaatcctagcaaaaatattgttttttttctccctcttcactgaactaaaagagtttaagaattttaagtgttttaagctgtacttcttttttcagtagacagaaatctattccataaaagaaacacttacggttctgcaaattttgaaaaagtcaataaattttgaacctaacttacacgtgaaattctgtagctttgcctaataaagtcrtattcattcatttgatatatattgagcacctgctttgtgcaaggcgtcatgagaggcggggagttacaagctcaatcaaaggtcatgtctttatggagataatgggtatgagaatcaacataatatgagggcaaaagggctaagggacttaaagatttaaaacaacaacaaaattaaaatctaaaagagttgtggaaactcagagtaaaccattccttcccaggtggggaatctgacacagcttcatgggagagttgtggaaactcagagtgaaccatttcttcccaggtggggaatctgacacagcttcatgggagaggtgaca

SEQ ID NO: 806165 - DNA, 590 bp, Homo sapiens
aaaaagatccttaaagtttagattggcatctgtttcatgtgggtgctagttttcaaatcctagcaaaaatattgttttttttctccctcttcactgaactaaaagagtttaagaattttaagtgttttaagctgtacttcttttttcagtagacagaaatctattccataaaagaaacacttacggttctgcaaattttgaaaaagtcaataaattttgaacctaacttacacgtgaaattctgtagctttgcctaataaagtcgtattcattcatttgatatatattgagcacctgctttgtgcaaggcgtcatgagaggcggggagttacaagctcaatcaaaggtcatgtctttatggagataatgggtatgagaatcaacataatatgagggcaaaagggctaagggacytaaagatttaaaacaacaacaaaattaaaatctaaaagagttgtggaaactcagagtaaaccattccttcccaggtggggaatctgacacagcttcatgggagagttgtggaaactcagagtgaaccatttcttcccaggtggggaatctgacacagcttcatgggagaggtgaca

SEQ ID NO: 806166 - DNA, 645 bp, Homo sapiens
aagaaacagtgtcagaagtactggtttcttcgtgggatgagaatccatcccatgcttctatccagcttctagtggagctgtcgatccttggctggtagacacatcgctccaatctctgcccctctcatcactgttctcagctgtgtgtgtgtgtctgccttccttcttttcttatggagaccccagttatcttggacttaaaggcccacccctctccagcacagcgttgtttgagcttagctaattacaaggatcctattttcmaatgaggtcacattatgaggttctgaggaggacatgaatttgcaggggacagtatccaacccaggagaggacataatatttttatgtcataaggttattgtgatggttaaattgcataaaagaaccagaagcgtagcaagcacatagaagaacgtaatgatattcattattattattatctttggaggtaagttattagtgtatacttatacaaccaaagaacttttttatttccttatgggctgcaggagtttgatgagctgtaaaagtttcttccttattctgccttgctgctgccccttagtgtttaactaaaagactagaaacttccttctgggtttgcagataagagggatatgtattttcatgctcgttatcccc

SEQ ID NO: 806167 - DNA, 609 bp, Homo sapiens
ggagaccatgtggcccacattggaaaggttctcttaatgagattatttgaggaagggagcagaaacccagactattgtgttcctgaggaaatttttttttttttttttttttgagatggagtctcgctcctttgcccaggctggagtgcagtggtgcgatgtcggctcactgcaagctctgcctccygggttcacgccattctcctgcctcagcctcctgagtagctgggactacaggtgcccgctaccacacccggctaattttttgtatttttagcagagacgtggtttcaccgtgttagccacgatggtctcgatctcctgacctcatgatccgcccgcctcggccttcactttgggattacaggcgtgagccaccgcacccggcctcctgtggaaatcttactggaagtatgagcctcttaacagctggggcatcccagcagaaggcaggcaaaccactcgcatctgagaatgactggagagagccacctgacctctcacatcgtataatcgtcgcagccccagtcacgtcttctgagtttagctaaatattctgttcacagtcctctgctttccagcatgtgaatagttttccaagcaagtgtc

SEQ ID NO: 806168 - DNA, 540 bp, Homo sapiens
ctgctgtcataaacctgagctgtgacgtgggtacaggctgaaagctgtgtgtccttccagcaaatcccagatcctggggagggggcaccctgaacacaacygtgaaatagtgtgttggttgccttttaatactgatggctcattttaagatgatatttctattgttataagaacatatacattctcatactagttttatttgaaacacagtttgcatatacaataggccttatttctgtaggcaataagtaatgacatgtcttatatacatacatcttctaagtttagtaaagcttattccttttatgtaccaagtttttaaattatcatttttagatggaaagaattcgaagctggatagcatgtttctttgccttactaaacagaggacaatagatataaccatcctgtggctgtcctggtgtcctctgagcaccaagtcttgcgctttgctctatgtggtgggatataatgagaagcaagatggttaatccccgctttaaattaccttgtgccattatactcttgtatgtttgtttg

SEQ ID NO: 806169 - DNA, 540 bp, Homo sapiens
ctgctgtcataaacctgagctgtgacgtgggtacaggctgaaagctgtgtgtccttccagcaaatcccagatcctggggagggggcaccctgaacacaaccgtgaaatagtgtgttggttgccttttaatactgatggctcattttaagatgatatttctattgttataagaacatatacattctcatactwgttttatttgaaacacagtttgcatatacaataggccttatttctgtaggcaataagtaatgacatgtcttatatacatacatcttctaagtttagtaaagcttattccttttatgtaccaagtttttaaattatcatttttagatggaaagaattcgaagctggatagcatgtttctttgccttactaaacagaggacaatagatataaccatcctgtggctgtcctggtgtcctctgagcaccaagtcttgcgctttgctctatgtggtgggatataatgagaagcaagatggttaatccccgctttaaattaccttgtgccattatactcttgtatgtttgtttg

SEQ ID NO: 806170 - DNA, 540 bp, Homo sapiens
ctgctgtcataaacctgagctgtgacgtgggtacaggctgaaagctgtgtgtccttccagcaaatcccagatcctggggagggggcaccctgaacacaaccgtgaaatagtgtgttggttgccttttaatactgatggctcattttaagatgatatttctattgttataagaacatatacattctcatactagttttatttgaaacacagtttgcatatacaataggccttatttctgtaggcaataagtaatgacatgtcttatatacatacatcttctaagtttwgtaaagcttattccttttatgtaccaagtttttaaattatcatttttagatggaaagaattcgaagctggatagcatgtttctttgccttactaaacagaggacaatagatataaccatcctgtggctgtcctggtgtcctctgagcaccaagtcttgcgctttgctctatgtggtgggatataatgagaagcaagatggttaatccccgctttaaattaccttgtgccattatactcttgtatgtttgtttg

SEQ ID NO: 806171 - DNA, 599 bp, Homo sapiens; identical to SEQ ID NO: 806105

SEQ ID NO: 806172 - DNA, 636 bp, Homo sapiens
ctttggatccaaataaagtctagagctgagttaacggtagtatactagtttcagtttctttggtttaacaaacataccacaataatgtgagatgttaacaatgggggagactggataaggggtatatggaaactatctgtactagtttttccacttttctgtaaatctaaaaatattctaaaatttaaagattattagaaggggtaagagggccagawtttggggaagtctataaaagaaaagaacacaagacagatggtagagcagaaggaatgtttttgcaacaccatcttgagtggtacaaggcaatggagtaaacaccacaagacgctgggactacactgcagtcggttaggaaagaggaataataatgagttctcatgggtggaaccgaggccataaatagcaaactgggtgttggcgaagtgagttagctcaacatactggtgcacaagaaacaatgttaattgaaatggtccaacattttgctagctaaaaagtataaatttctctgtcttccttgagataggtccatgttggcacatgtgagttaatcttattttttgaagtgagtactgtcaaaaaactcagagaaggcttcagtggaacaggtttggggtgctggagattgccaca

SEQ ID NO: 806173 - DNA, 567 bp, Homo sapiens; identical to SEQ ID NO: 806106

SEQ ID NO: 806174 - DNA, 486 bp, Homo sapiens; identical to SEQ ID NO: 806107

SEQ ID NO: 806175 - DNA, 580 bp, Homo sapiens
agttacagaatatgttcactgtgatgttattaatatatattttatatctatatctacataattagaaataatattcaacaaacttttttaaacttaagacaggatctctctatgttgcccaggctggtttcaaactcctsagctcaagtgatcttcctgagcctcctgagtagctgggactgtagatgtataccatcacccctggctaaacacaaacttttaataatagtcatctctatgaaaattggtaagtggaggaggggttttcattctcaacttgtgttttaccattgtttgaggttttaaaaatttagcaattttactatggctttttaacatttaacatgtgcaatttttgtaattaaaaagttgtcttcttattaaataaacataaacaagactgcctagccagtggaggggtataggattgtggttaaggcctgagattttgaagtcagactctaaattcaaacaccggctgtactgcttataggctatgtgacctagagaaaattgctttacttctttgtgcctcagttattcttgtttcaaatgggataagagtagtgtccatccgaga

SEQ ID NO: 806176 - DNA, 607 bp, Homo sapiens
aggaggggttttcattctcaacttgtgttttaccattgtttgaggttttaaaaatttagcaattttactatggctttttaacatttaacatgtgcaatttttgtaattaaaaagttgtcttcttattaaataaacataaacaagactgcctagccagtggaggggtataggattgtggttaaggcctgagattttgaagtcagactctaaattcaaacaccggctgtactgcttataggctatgtgacctagagaaaattgctttacttctttgtgcctcagttattcttgtttcaaatgggataagagtagtgtccatcygagaaagtggttgtgaggattaaacaggatgatcataaggttcttaaaacagtgactggcacatagaatacactaaacaggaatgttatgaataatactctaccatgaaatataccaacataaaagttatagagtgatttatttttatagcatgaaaaaatatgtgtgtggttagggaatgtgtgcaaaggtggtgggctgaaataggagaaaaatggtaatcgaggaagcataatttgatagcttcaaagatcaatagaatgagataatgttgaatttttaaaaa

SEQ ID NO: 806177 - DNA, 600 bp, Homo sapiens
taacttgatgtttagaaaagaaaaaaacctcctgttcagcaatcattaagatctagagctgtggtaattccctctaataaaataatttatgattttcttggagttgaaaaaaggatggtgcacctgagcttctgatttataaaaaatgcatttcaggctctttttttttaactgcatctttatttcagttttacagttcctccgtcaaagcaaataataatagtaagtgctttacaagaaggtaaaggccacagaaggaggaaagacagatacaataaattgaaaagagaaaggggtggacttctggaatcatcttggagagctctcaggtgtgacacagtggccttccctgaccacccaacctgaagtgttcccccagcatcccccaatcattccattttaattgttgaaagataactcacctgattcttcctatgcattatctgtyctcaactctaggagtcccaaagacaaggaccaatctctttggtttgccagtgtcctcacagtgacaggaatgacacccagcaaagagcagctgctgaatacaaatttgctgaatgaataaatgcattaaatattttaatttttttcctcttg

SEQ ID NO: 806178 - DNA, 632 bp, Homo sapiens
aaaattcattctgtgtcttctcctccagtgattagccttgttttgtttcctgtcttcacagtgactacagccaacagctctattttgctttgtatgaaaaattgcttcacttgattacatttgcagagagagtagacactttgtagctataacaaagtacccaaaaggacaatttcatgttctttcttcaaggtattcatcataagagctgttctcacagttaaaacagagtcaaataaatagagtatcagaaaattaatatgtaaataaaactaagactttatagactatctatcacaatgacctttttaaaacactattttggagaccagatatggactccaaaaaaactgtttcttatcttctccgtgaaactagagatggaagaatgagaaaaacrtcacgtagaactctgaatttgactcaaaagctgacagctccaagagaagtttcctaaatcttgctcagaaggaagacagacagggatacagagtggaaagagagaattccatatatagttgtggcaggacccattgtgacctgctgattgtagccactttacatggtactcacaaacgcaagaggtttttacttttcatctgttaagttgaaagtaatctcagtaatgatga

SEQ ID NO: 806179 - DNA, 646 bp, Homo sapiens
atttgataatttggtacattcagataataatatcagggtaattgggatatccatcactttaaatatttatctgtcttttttttactctaggaacatttaaattgttctcttctaactatttggaaatgtgtaattgattaatgttaactataatcactctctaagctatcaaataccaggttgtatttcttttacttaagtatatatttgtacctatcaatcaacctctctttacctaccctttcccctactgttcccagcctctggttattgccagtcttctctatcttcatgagatctacttttcatctgtcgctctgtcttttgattggagtatttaatccatttacatttaatgcaattactgctaagtagaattacatttcatgcaattactcctaagcaggaattaagtctgcaagtttgttatttatatccatatgtcttttgccctttctgtttctctatttctccattactgytatctttgtattaattagatattttctaatatgccatttgaagtccataagactgctggtttccacagctcctctgatttttatactgttggttctcaaggctactgtagagctagacagtgatgggaataggccaagacagaacaccacaaacctcattgtcc

SEQ ID NO: 806180 - DNA, 607 bp, Homo sapiens
aaatcccaatctggcattgtcctttgtattcaatgcaccaaatgggatgagcattttaaacacaattccctccacacaccacattgctaaggcattcttcttaggcacacaccataaggaaaaaccacacattccctgattctcccttccctcctttaggaatccagtagcatctggacagcacaaatctgtaacagtccccaactcttcaaagtatagagccaagtccmagacatttcttgttctgactagagctcttctactgcagagccacgatctttcattgtatcaatatttatcagctggggagctttacacgtgaacttcctaactgagcacattttcccccaactcctagctttcttccaaagcacaggatagctctattccacacctagagtaaataagcttaagtgtttctgctttgttttgcctggctccaagtttccgtgtaaatttcagaatggtgaaacacacagcgattcctgcccactggtattttatgattttaatttgctcgaaacctctcagtttcattatattttcccatttggtgcatgggatttttacagttaacagatgttcacttaatagagtctcctagtga

SEQ ID NO: 806181 - DNA, 520 bp, Homo sapiens
acagagtgctgattggtgcatttacaaacctttagctagacactgagcgctgattggtgcgtttttacagagtactgattgatgggtttacaaacttttagctagacacagagcgctgattggtgtgtttacaatcctctagctagacagaaaagttctccaartccccacccgacccagaagcccagctggcttcacctcttgcttcgccccttgctacagtggagctctgagatgttacatgagttctctgatgtcacaagctgctgatcccagcttctttgtttcttgcccttggccttagttcttcttgatgtgtcttcccttgaaatgatagctcagggctaagatcacacagatctgttcagtttgcactttgctatgtgctacctgcactatatactacatgtcctcctcttccaaacggtaagaatgctgattactgtggttgctaattcctgagtttccttttgtgtctgaataatcataattaagtgattatgagagacccacctgcaaa

SEQ ID NO: 806182 - DNA, 645 bp, Homo sapiens
agaacaatccttggcaatctaaaactcttggagatggactttgatttctgtgaaataactaaacgttaatctatgacagcatagtattcctagatattagcacacatttgacaataaatagaatcataaacatgagaacaaaatatttatcttaaactgttgtgaagtcttgaaactagtatttctttctgactaccagcatgtggttgtcaacttaataggtgactttctttgttagtttttacctmtagagcagcattttactattatcatttaatgaagaagaattgttctgctctaatcactttatagattaaaaatgtagacactctacattgaaaaaagaaattaaatcagcaatagaatttgagacaagtatatttcaaaagctggtcaattgaatttaaaattgcaattactatctctagtatatatatttccaaaagttactgtataaaatatatgtaaatatatctatcagtgaaatttgtgcaaaaagagaaaataaactagtatatgttttttaatgtcttagagaaaatgctttgaaaaatttagaaaataagaaatgatatgttaaaaataaggatgattcttcattcctaccaggcttctagtctttttatgaccgattttttatgttac

SEQ ID NO: 806183 - DNA, 493 bp, Homo sapiens
aggattctgggtgaatcctcaattaaggctaaatgcaattaacgcatcccaggtgactatttttgacaaattgcttgaagcaaatttatatgatttggtgaaaaactgtggccatgagagctagttcttggcatatacttataaatacttgcaggggagagccataagacattccatgaaagaactcaaagtgctttctctccattcttctattgtcaccaagttgtgcagagaaactaatggtgcatgaactgggaaaggatactcattagggataactgcaaggaagaaactgtacttgataccacagcgctaataatgaaacctggtgcraagagcacttgtcctataaagatagaatgtgaccggaggcttgtgctaggaattcttacctaactgggaggatgtcaaagcttcgaaaagtgctcctaaatatgcagaaggtaggtgtgggggctaaaaggcatcattttcctgcagtgaatactggatc

SEQ ID NO: 806184 - DNA, 593 bp, Homo sapiens
aaatattttcacagtatttttttatttttatttttatttatttatttttttgagacagggtcgtgctctgccacccaggcttgggtgcagtggtactatcatggctcactgctgcctcaaagtcccgggctcaagtgatcctccttcctcagcctccctagtagttatgactatgggttgtgccaccatgtctggctaattaaaaaaaaaaaaatctaraaacaggatctccctatttggttcaggctagtatttccaattatgtaaatactttatagatcctgtatttcctgtgcttttcatctttttgttggctcgttttttctgtgttttacttcttagaaatctgaggttctttttcgtcccaatcctattaattagtgaagaaagaaagcaacaactaaaatatatgtatttatcctaatcagttaattttgatcaggtccaatattttcaatggtctctaaaggtatatatcactcttgtttgaaggacttgcctaaattatcactttttcaggttcccatatgctttagtgtctgtctttaaggtggtgttccaaaatacagatgtgacttcagggtgaggaaaaa

SEQ ID NO: 806185 - DNA, 593 bp, Homo sapiens
aaatattttcacagtatttttttatttttatttttatttatttatttttttgagacagggtcgtgctctgccacccaggcttgggtgcagtggtactatcatggctcactgctgcctcaaagtcccgggctcaagtgatcctccttcctcagcctccctagtagttatgactatgggttgtgccaccatgtctggctaattaaaaaaaaaaaaatctaaaaacaggatctccctatttggttcaggctagtatttycaattatgtaaatactttatagatcctgtatttcctgtgcttttcatctttttgttggctcgttttttctgtgttttacttcttagaaatctgaggttctttttcgtcccaatcctattaattagtgaagaaagaaagcaacaactaaaatatatgtatttatcctaatcagttaattttgatcaggtccaatattttcaatggtctctaaaggtatatatcactcttgtttgaaggacttgcctaaattatcactttttcaggttcccatatgctttagtgtctgtctttaaggtggtgttccaaaatacagatgtgacttcagggtgaggaaaaa

SEQ ID NO: 806186 - DNA, 593 bp, Homo sapiens
aaatattttcacagtatttttttatttttatttttatttatttatttttttgagacagggtcgtgctctgccacccaggcttgggtgcagtggtactatcatggctcactgctgcctcaaagtcccgggctcaagtgatcctccttcctcagcctccctagtagttatgactatgggttgtgccaccatgtctggctaattaaaaaaaaaaaaatctaaaaacaggatctccctatttggttcaggctagtatttccaattatgtaaatactttatagatcctgtatttcctgtgcttttcatctttttgttkgctcgttttttctgtgttttacttcttagaaatctgaggttctttttcgtcccaatcctattaattagtgaagaaagaaagcaacaactaaaatatatgtatttatcctaatcagttaattttgatcaggtccaatattttcaatggtctctaaaggtatatatcactcttgtttgaaggacttgcctaaattatcactttttcaggttcccatatgctttagtgtctgtctttaaggtggtgttccaaaatacagatgtgacttcagggtgaggaaaaa

SEQ ID NO: 806187 - DNA, 623 bp, Homo sapiens
agagacccagaaaggaagaagtgatgtggagacgtgtgttctttcgtgacggggtacgtctcgtatctggggacacacaggcagcttttcaacggtagaaaagatttggttgaggaagaaaatgctcaaatctatataggtttgtgaattttctccagcagcattcagttcagaactgctaagtcttaacaaagcctgtgtactcagtgtttaccattttcttcctcagggtttatctagtaacaatttcataattatttctaatatatatcagaagattaattttaattagccagttcrtatattctgaaatttgccttgtatgaagttgtatttattatttatttattccacttttataccttattaaaaatcagaaatgttgcccatcttaattgttgtctatgatcctttgaaagtttgaaagtatgtctcattttattaaatgaaaggggtttaaatagagaaagttatgaactcatttaaatgattctttctagtgttccagcaacctggccttcaatcacattgtacctaactttaatctgccctttgtaaatttgaggtaattatatcttttccaggagacggaagctacgtggaggttattggttctgtcccca

SEQ ID NO: 806188 - DNA, 587 bp, Homo sapiens
ggtggcatatcgaatgacatagttcatatctctaatgtcttctccctaaagaattaatgatatatttgacagtgacaatgagtggctattgtattaattccttcctgataatacctatattctcttcttctatcattagtcttcattattcatctttcttcctctgtttccaccaatctctctcagaataggcagttaattgttttagggcatttttagtagctggttatttgtaatctgcggttgttcaatgagaaactttaaatttataggtcttatctcctcttcatacagcttcagctaatgttgtttctaattgcccactggtacagaatgtaacgcaaaatcttatattggttcactcttctccattttattctataaaaaattgctacaaatggcttttaccagaaatgcccctaaatattaagataaaaatgycgatatatacaaatgaatagttgttaccttaagagaacagcttgtatactaacttgaaattatctcttcctatgcaaaggcttttcctctgcatcatcctatgtaacattatcaactcgcacacctgtatgtagtcacctgtttca

SEQ ID NO: 806189 - DNA, 622 bp, Homo sapiens
tatatcttctgtaatggaatattttctttctctcaaacagggaatgcttgtccaattctcagagctttgcacaagctggatctattgtttggaactctttttacccagatctcatacatagcttattttcattattcaggtcacaaatcaaatgacattttcttatgatgccttcccaatgcataaacactaatttcattcatcctgcctttagttattttttatttgactctattttattttttatagattttatcatgagaaataatatttttatgccatttttaaaattttaagttccagagtatatgtgcaggatgtgcatgtttgttacatagtaaatgtgtgccatggtggtttgctgcacctatcaacccgtcacctaggtattaagtgtggcatgcattagstattcttcctgatgctctccccaccctccatcctcctacaacatgccccagtgtgtgttgtccctctccctgtgtccatgtgttctcgttgttcagctcctaattataagtgagaacatgcagtgttttgttttctgtttctgtgttagtttgctgaggataatggctttcagcttcattcacatccctgcaaaggacatgctctaattcct

SEQ ID NO: 806190 - DNA, 533 bp, Homo sapiens
gggagcttgtctcccaaatacttcattatctctgcagtatttttcagtaccctgggcttatctgtttctttcttgattatttttgcttgctttttggcactggggaaataattcctcttctatttacagcagtacaaaaagggtgacacatataagaaagtaggtaacggggaaaataaagcttaaaaaarcgtattcaatgtaactatgtagtgctgcattagagaaaaaaatagtaaaaagtgttattttatctattacaaactaaagaaagcgaaccatcctttaaaattatcttttttgctagagagttaaggaaaagcagttctcacatgggacagagaagtcttaaattattttaaggttcttagttagtttattataaaaaaaattaaaggtttttagctctgttcttggacactccactcgtagataaaatttcagcagtgccttagtgcctagctcaaatattaccttcacaatgctccatcttcaaggcaattattttctttctttttagaattggtatattt

SEQ ID NO: 806191 - DNA, 640 bp, Homo sapiens
gctattgtctgcttaacttacactttatattattgttgttttcatttttcaataaattaagtggagctccaaaatgctggagcctgtccagggctgcatagagagttagtgaaatagcaggtgtagactcacagtcagctgtcccagaagtactgttgttcacatctcaacatgccatccttcatgtggtctggcattgcagatggagaatcttccagtggagattgaatgcatgtattatatatgaacagcgcgtctgtattctgcgggagtgttagcaaaataaccctatttccttcacataaacaaattatccgggatagtcactaagagtatctgatgattacagcatatattccaggaggtgcttgagagcaaaaatatgctcttaaagaaaattactttttaaaatgtcagtgtgattatctctgtctttaaatatgggtacctaygcctaaaaatgaatacatatatttattcttgaatgtttttcttctattttcccagttgttttatacaaacttaaacttcagagatatctttaaccttctcctgcccaccctttttctcactaaccagcgttatttcacgctttgcatttctgcctcagcagtatgactcactttaatcatcttttaaa

SEQ ID NO: 806192 - DNA, 578 bp, Homo sapiens
agttgagagagtcctgtatctcaagtgagaatccagtcccattgaaaccagtagaaattgttgtgatgccttctcaccataagccctaccccaacagagctgcatataatcaggaggaaacctccagcttccagctcctccctggagatagaaggaaaggactggaccatatgtccaatattatagtttctctggtggctgcttgaggccctggcttctgtctcacctatcttgaggagctgatgggattgggaaaaactataratgctgggcaggggttgggggggcactgagaacaaaggaagtgtatagactagcatgaagtcttgggagacacccagaatctctggtcaagctgatggttttatcctgtactaggctaatgtttgaagactaggagtgttggctactttgtttaatatccagacactaacataaaacgtcaagggaattgaagaaacggggtactatgtttcaactacaacaacaacaagaacaagataaatctccagatattgatcctagtatggagatatgtgatttaactgacacagaattcaaaataacagtcataacgt

SEQ ID NO: 806193 - DNA, 491 bp, Homo sapiens
gaggtgggaggatcactcgagctttggaggtcaggctgcagtgagctgagatcacaccactgctctccagcctgggggacaaagtgagaccctttctcaaaacaaacaaaacaaacaaacaaacaaacaaaaaaccttagaaaaaaaawttttttttaagtaaaacaagaaaatgtctacacaaaaatttggacatggccgggcacggtggctcccctgtaatcccagcactttgggaggctgaggcaggcagatcacgaggtcgggagatagagaccatcctgaccaacatggtgaaaccctctctctactaaaaatacaaaaattagttgggtttggtggtgcacgcctgtaatcctagctacctgggaggctgaggcaggagaatgacttgaacccaggaggcggagattgcggagagccaagatcgtgccagttcactccagcctgggcaacagagcaagactctgtctaaaaaaaaaaaaacaggt

SEQ ID NO: 806194 - DNA, 561 bp, Homo sapiens
cagtaatgtttaaggttccaatcaacatgaaggatctgaaaacagggaggttctgcattcacctattttctttttaagtaaaatacccttggtgtgtgaatcaacatctctgcagccatcagctattgattctttgctagagaccactccaagcccctggagatcaatgagaataggcaggctcaaaaatgaagaaaaagattaatcatccctgctcagaagagccaggaaatggcatacaaaactctaggtggtagcagaactctgaggagagaagatggagggagaagaagaaaagccaggggaatacacaatttcacagaatttccaggacttctaagaaagtgcagaacaaatatcacatagaatctctggcctgctccaaaggaatcacctgatcctgcgatggccagytggcatcgtcccatcagaagaacaacaggacaaggctagtagctatacatgtgaggtgagtatcaatagggggctgcagagactttacagggcaaatgtacaaaggcagaaagtgggcacttcagggtgaacacgcctgatggaaca

SEQ ID NO: 806195 - DNA, 571 bp, Homo sapiens
catgcccaataagcttggggctaattttgttttttgtagagacgggatttctccatgtttatcaggctggtctcaaactcccgacctcaggtgatctgcctgacccggcctcccaaagtgataggattacaggcgtgagccactgcgccctgcaccttaatcattcttaacacactttgtaagtattttatctgtttacttttttctgtgtatggtttgcctaaagtctaagctccgtgagagcaggactgtgttccttgatctctgttgtgggtcctgcactgtgcctgccactcacattttttgagtacatgaatttgagtactttatgttcatcatctcacttaatcatcactctgactctatggagtaagactgttctctcccacccccattgtgcrggtaaggaaacaggtttggggaggttaaggaactcacacaagatcaggtggttagtaggtggtggagatgggattggaatgcaggttggctggtgccagaacctgggctcttaaccagtaccctcttccgcctcttatctgaaaacatcacaaagccgcatggtgtcctg

SEQ ID NO: 806196 - DNA, 491 bp, Homo sapiens
actccagtcagggaggcagaatgagactgtctcaaataaataaatttatgaataaaataataataaattaaaaatagagtatacagtttgaacaactatgaagattttcaaactgaaaatcttgtctagtaccctattcattgctgtctgaatttggttcccttctagtaataattttaagtgtaatgaataattaaatataaagactaakattcaatttaaatatctaggagtccaatccagtttaattctattactgtttgtttgtttttaaattctattgcactttgactactgaaaaaaatctgaacacaaaaactcagatcataagtctatggttataatatgttgtcttattcacttgaagagtccacataccacaatctgaagttacaaattttaaactgattcttgccaattaaaaattggcagtcattagatatagcagaaacaaggtaaggtgtaatgattatatgctttactataaacta

SEQ ID NO: 806197 - DNA, 378 bp, Homo sapiens
aggactttctttctgaatgccctaggagcaatctctttgaaatcaagaaaggtagcagcctaactcccagtctccatgagagggtaggagtctaactttgatgggcaccaattagcaaacacactccactccagcttttaaaacctcctgaactccactccagctttyaaactcccctgaactccactccagcttttaaaacctccccagctttttgtctcagttaagttgagcccaaactgagttccggctggggtattctctctcttctaatgtaattgtattcaataaagtcttctttacatggtttgtttgattaattttattgtatatgtaggcaggcaccacataatgaggttttagtcaacaacagactgt

SEQ ID NO: 806198 - DNA, 642 bp, Homo sapiens
acacagtcaggactggacacaaaggtgatagggatggcacctgcaacagcctggtcactggcactctaaggccgggagagaaagcagggtcattgaggttatttggtgattatcacctgtggctctctgtgggcaaggtttggactgagagctgagaggggcttgggaacaaagtgaagacctggtctttaccctcaaggggaatgtgaccttgatggagaggcagcaggagaactgtacatttgagtacccacacagattcacacatgcacacacactctccctgatcggcagtcacaaagtcacagcaagacttcgcagagctcagcacctaacttctgattttcctgtagagaaaaggacagcaacaaggtgggtcgggctggaaaatatccctacaggagggcaccccaggaccagtgtttctgccactttgctgtccctgcaccctctktcccagaaaggtctaaactcgcagtgaggcttcaaaaccctgaggcaagttcaggcccctctcagagatctctcagagagaggttaaatgcacaggctctgggggcaaccagcctgggtttaaatccccgttctgcctctttgcaacctgtgagaaacttggggcccattattttctctttctgggcc

SEQ ID NO: 806199 - DNA, 540 bp, Homo sapiens
cactgttgcaagtgctttttaatatatattaactcacaacacccctcttatcactctttgtactcttatcgtctccaccagtaagatgcctgagacacatagaggtgaaataacttgcccaaggttatacagcaagtaagtaggggaactgggatttgaacttggttctagaaataaaggaggaccaaatgagaacagaaactctctacttagagcttgctacaacaagagactcasttaccatcacttggtttggtagagatttgaaggctgtgagaggaggaggagctttatagtgaagcattatttttggtgtggtaaagctggaggtagggtacccagaatcgggatttcatacgtgattgcattggggagcatatctggatttggtccgtcggtctggttagtcctgagttgggagcagggacaaaatagggaagctgggggccattgcccaagtcctgaccattctggaccaatttctgtagagaccgtggtttcttgggatggtcgctgcagaggaggcagctcagagttcta

SEQ ID NO: 806200 - DNA, 540 bp, Homo sapiens
cactgttgcaagtgctttttaatatatattaactcacaacacccctcttatcactctttgtactcttatcgtctccaccagtaagatgcctgagacacatagaggtgaaataacttgcccaaggttatacagcaagtaagtaggggaactgggatttgaacttggttctagaaataaaggaggaccaaatgagaacagaaactctctacttagagcttgctacaacaagagactcacttaccatcacttggtttggtagagatttgaaggctgtgagaggaggaggagctttatagtgaagcattatttttggtgtggtaaagctggaggtagggtasccagaatcgggatttcatacgtgattgcattggggagcatatctggatttggtccgtcggtctggttagtcctgagttgggagcagggacaaaatagggaagctgggggccattgcccaagtcctgaccattctggaccaatttctgtagagaccgtggtttcttgggatggtcgctgcagaggaggcagctcagagttcta

SEQ ID NO: 806201 - DNA, 549 bp, Homo sapiens
actgtaccatatgacagaatgtgatagataaccctgcaaaaaagagccaaagtaccgtggggtaagaggaaaacctggctccccatttcctctcccaccttgtgtcctggtactttctctctttctcactccagccactctgcctcctagctgcacccagagcacttaggtgtgctcctccctagagctctgcaatgstgtccttctgcctggagtccttccctctttccctctccctcccccacccatagtggcgtggctcactgactcacctccttctcatccttactcaaaagtcatgtctcagagatgtctatccaaccaccctaattaaaattgctacctgatccccctaagccaagatactgagagagtgtgacatgtgatccaggctcactccccagggaccagaccagggatggaaccagcaccctggaggacacagtaagtgtctggctcaagtgtccccagacatagaccccttgctgcagtacctggatgactgacggtctgggattctggatccaaaggggtagctctgtttctgtg

SEQ ID NO: 806202 - DNA, 367 bp, Homo sapiens
acctataggtgaggggccttttcaagccattgtggggctagtggtcacctccctgggctgtctctttctgttgcctgtggctaagcagcagtacttatctctagttcacagcaacaagactcctagaggctggcaatgcasgctttaaggtcaggcaagcctgggtttgagttcaagttctaccatgtgactttgggcaagttacttcacctctctgagccttggttttctcatttgtaaaatggagtgtaataatacctactccctcaagtcattgtgagggttaaaggaggtaaggaccatagcatgctcagtacagagtctgacatgtaggaagtcttaataagtgataactattactactatt

SEQ ID NO: 806203 - DNA, 672 bp, Homo sapiens
ggaaaattataccacctgacctcatgtgacaggtcacagatgaaatgctgtaaaactttgcttccagcacagtattttcagaaatgttggataaaattatctttgggctacatgtataaggtacatatgaaacaaatgaatttcatggatagacttggcttccatccccaaaatatctcagtaggcctatgcaagcattccaaaatctggagaaaaaaaaaatcccaaatccaaaacacttctggtcccaagcattctggactagactcaccctgtataagattcctggattagccaaatttacagagacagaaagtagaatagagtttaccaggatytcaggggtggggaacaatggagagttagtgtttaatgggcacagtttcagggtggcaagatgagaaagttttagagattgatggtggtgacggttgcacaacaatgtgaatgtacttaatgccactaaactgtccatttaaaaatggtgaaggtggcaaattttatgttatgcatattttaccacaatttttttttaaaagaagcaggataacagagtcagggaggccccttcctctgtgctaatggtcccctgtctggaacacagggttctagactagtaggtaccttcttgggaagggaccacaaaaagagaggtcaaggatcctggggttg

SEQ ID NO: 806204 - DNA, 629 bp, Homo sapiens
gcaataaacacacaaatctgattacctacggcttgactcctatagctagcaaacaggtgcataagagtttcattaaaatgagtattacacaagagatggtttgtggggatgaaggaggatctaaccaattagtagtgacagacaaaggatkcctgtgttttggtttgggggaacaggttaggcctgtttatatctatcccaaaataagtaaaaattttgaagaataacataactaaaattctgagtatgatttctaaagacacatatagaacttggtttaaaatgtaaaatggaaattataatcaaagcttgggcactggcccagagttttcttctacagttcctgtgtactgtatatacaggttctttaatcttgtcaagaataaatattagcttgtgttaagattcatatatagttaatgtattcaatatcattttcaataattgctttaaacacaatagccaaaagcaaatgagaaagctatcactactttgagataattcatcagaagattatagtcccacttacctgtaaacgcttatccaaaaatgccattcctccttggagtccatagctatattcataagggaaactccaatctctaaccaaaaacatcagtgtctattta

SEQ ID NO: 806205 - DNA, 633 bp, Homo sapiens
gaagcctccaaatgtattcctcatcttttgcccccagcaatttgtgcaccttttagggagaggaactccaactcaatagtctttatgagccttgcacatggtaactgttcattctatgctctttgaatgaatgaattcacatcattaacaatgatgacagcacaccaatagccactgatctaatcacaaacgtgtgaggtagacgcttaattcacccagtcttaccaggtgcacagcagctctggaagttgagggaactctctaggactcaaamaagagcatctggacatcctttcatgaatcctgtgtagccatcagaatgttgaccatgacttccacattggcaaaggaaagaatgaagaaaacttgacatttctattgctgtctgacttctttgaagaggcctcatgttaaggtcaacttggaaacactgacattttctacttgaatggaactagatttatgaatccacttaactgaccatttgagaacattattcttaatttacaggccagtttaaagataaaataaataaaaataacatttattagagtttgagaccagcctgggcaacaaaaggagaccccgtctctacagtttttttttttttttttaattagctaggcatggtgg

SEQ ID NO: 806206 - DNA, 587 bp, Homo sapiens
attgaatctttccattgcaagagcagagctttttgaagaagaaaaagagttctgaccttcaaaaagctaatagtctgaaatgttaagccagaaaggaagagagaatgcctgatgatgtgactatagttttctggcccaaaaagacactcatgttgaacagcatgtggaaggaagaagggaggaagaagaaaaggggagtcagagaatagtttagatgttggtggatttaaatggtttgccccttccctccaagccaagccctaaactagggaagaaattctagaaactctaaattcaagaatctcaaaaaaggtttataggtcctcaaagtagaggttgaagcctaggtaatcagcagtctcatggagaagtcccttgttccaacacagttttgcaacagtcaagtgaaaatggtagtaggacacgtctkcagagaggatttataatgataccctgagccttccacaatactggtgaggtagagagagcatctgaagtcctccatgcacaaaaagaagggtttatcatgaagctaaggaaattgaagcttcagagccctcatttgcataccccctttacaaagcccc

SEQ ID NO: 806207 - DNA, 581 bp, Homo sapiens
taaaattttattctcacctacatatattaaatacataacttgtgtatattggaaaattattcctgactatatttccttaactacaaaataaaatactagggatgacaaccaagaagaaaactattaaataaaaatcaaatttgtgcgaaactcattgccctacataagcctcatatctgtcactactcattgcagctttgctttgtgtggtagacacagatcatgctctgtttaagtacatgccttaaatccatacctgagccaatctgtagtagattaacgtacttctttggaatagacacaagactrtataatgcagacagtctggaaactggattttgagcaataagcctgggtacaaggtaactaattcctttcgttcttcacccagtggtagatgcagcacagacacagattagttctaactgaaaaagaataaaattagccaagtggctggcgccccctgtaggcaatctgtagtgtttatccaggcatccccatggatccagatttcagagccttagtttaagaatcagatgagtaattttagaatatatatgtgagggataaattaatatttg

SEQ ID NO: 806208 - DNA, 581 bp, Homo sapiens
taaaattttattctcacctacatatattaaatacataacttgtgtatattggaaaattattcctgactatatttccttaactacaaaataaaatactagggatgacaaccaagaagaaaactattaaataaaaatcaaatttgtgcgaaactcattgccctacataagcctcatatctgtcactactcattgcagctttgctttgtgtggtagacacagatcatgctctgtttaagtacatgccttaaatccatacctgagccaatctgtagtagattaacgtacttctttggaatagacacaagactgtataatgcagacagtctggaaactggattttgagcaataagcctgggtacaaggtaactaattcctttcgttcttcacccagtggtagatgcagcacagacacagattagttctaactgaaaaagaataaaattagscaagtggctggcgccccctgtaggcaatctgtagtgtttatccaggcatccccatggatccagatttcagagccttagtttaagaatcagatgagtaattttagaatatatatgtgagggataaattaatatttg

SEQ ID NO: 806209 - DNA, 629 bp, Homo sapiens
ttagttgcgtggtcaaaattatagacctgaaataggatcgtatgatataacaaaaatcaaaacaaaatctgtctcctgaaaatattcagtcatatttccttcaacattttcaatgcagtgaaatcagcagtagtttaactcctgagcaaaacaaatgtctatcagcaatattttccctatttaaaatccatgctttacaatttgtataaaaaatgagtttgaaagtcaagggaaaaaaatagaaagtaaattactttgaaatggttgggcatcttgagtggtgttttaaaattgaattattcttgtgtttggaaaacaaagaggattgtaatataaattgtttttctcccagaaatttctttcaggatttatrgcaacaaccagtttatccatggccatacgtggcattgtgttaaataacacactactctcactttatgaattacaaaacacccatggaatgttaaataacctaaattcaatcgtgtatatcagtgaattactaaagtgcatttaaaaagctgtttgcctatgaaaacatgtaaaataagacatttaagaaaatgcaaattgttcaacttcatagaattcctacaaaagaagaaatagtttaatatcgagcagtaaca

SEQ ID NO: 806210 - DNA, 628 bp, Homo sapiens
caatatacatatacatatatagtgtatgcacacacataaacacatatagtagttaattgtaccagtcatttttttccaacaagaaaacttaccttttttgcctttctgaagtatattaaatgcattggataattataaattactcatctaatcacaaggaagaccacagagaattaaaaaaatggtgtcactaagaaaacatatttcttttctaatttttcaaataattttgataagcttygattctaagcagtaaatggttctgtaaaataaggtcatatatttttcaaatttttttacaaatattttggtgtagaaggcacacattagcttgtgtgcttttataagtgttagaaattaagatgttcagtaacaccccagacgagctcaccatgcaatccttaggcacacaaaaagttcggaaacgttgcctgggattagtggttctcaagtttcagtgaatatcagactcacccagaggacttgtgacagcagattgctgagtcccatcccagagtccctgatttagtaaatttaaagtagaaacttctagcaagttcccaaacaatgctaaggtttctggtctggagccaccacattttgagaatcaccactacaatccttatta

SEQ ID NO: 806211 - DNA, 628 bp, Homo sapiens
caatatacatatacatatatagtgtatgcacacacataaacacatatagtagttaattgtaccagtcatttttttccaacaagaaaacttaccttttttgcctttctgaagtatattaaatgcattggataattataaattactcatctaatcacaaggaagaccacagagaattaaaaaaatggtgtcactaagaaaacatatttcttttctaatttttcaaataattttgataagctttgattctaagcagtaaatggttytgtaaaataaggtcatatatttttcaaatttttttacaaatattttggtgtagaaggcacacattagcttgtgtgcttttataagtgttagaaattaagatgttcagtaacaccccagacgagctcaccatgcaatccttaggcacacaaaaagttcggaaacgttgcctgggattagtggttctcaagtttcagtgaatatcagactcacccagaggacttgtgacagcagattgctgagtcccatcccagagtccctgatttagtaaatttaaagtagaaacttctagcaagttcccaaacaatgctaaggtttctggtctggagccaccacattttgagaatcaccactacaatccttatta

SEQ ID NO: 806212 - DNA, 628 bp, Homo sapiens
caatatacatatacatatatagtgtatgcacacacataaacacatatagtagttaattgtaccagtcatttttttccaacaagaaaacttaccttttttgcctttctgaagtatattaaatgcattggataattataaattactcatctaatcacaaggaagaccacagagaattaaaaaaatggtgtcactaagaaaacatatttcttttctaatttttcaaataattttgataagctttgattctaagcagtaaatggttctgtaaaataaggtcatatatttttcaaatttttttacaaayattttggtgtagaaggcacacattagcttgtgtgcttttataagtgttagaaattaagatgttcagtaacaccccagacgagctcaccatgcaatccttaggcacacaaaaagttcggaaacgttgcctgggattagtggttctcaagtttcagtgaatatcagactcacccagaggacttgtgacagcagattgctgagtcccatcccagagtccctgatttagtaaatttaaagtagaaacttctagcaagttcccaaacaatgctaaggtttctggtctggagccaccacattttgagaatcaccactacaatccttatta

SEQ ID NO: 806213 - DNA, 628 bp, Homo sapiens
caatatacatatacatatatagtgtatgcacacacataaacacatatagtagttaattgtaccagtcatttttttccaacaagaaaacttaccttttttgcctttctgaagtatattaaatgcattggataattataaattactcatctaatcacaaggaagaccacagagaattaaaaaaatggtgtcactaagaaaacatatttcttttctaatttttcaaataattttgataagctttgattctaagcagtaaatggttctgtaaaataaggtcatatatttttcaaatttttttacaaatattttggtgtagaaggcacacattagcttgtgtgcttttataagtgttagaaattaagatgttcagtaacaccccrgacgagctcaccatgcaatccttaggcacacaaaaagttcggaaacgttgcctgggattagtggttctcaagtttcagtgaatatcagactcacccagaggacttgtgacagcagattgctgagtcccatcccagagtccctgatttagtaaatttaaagtagaaacttctagcaagttcccaaacaatgctaaggtttctggtctggagccaccacattttgagaatcaccactacaatccttatta

SEQ ID NO: 806214 - DNA, 638 bp, Homo sapiens
gtaaatcaactattttagatgaaggatgcctggttaattattaaatgatttgatacttactttcaaaatatttttttatctaagaggaaaacatggagagagggaagtccacacaatcttcatggtaggtttactcctggtaggtttactttaaggtaggtttactcttcatttagaatttytcataaacctgagaaatattaattcctctatctccatcttccccatctcgtctcacagaaatacccagccaaaccttcaaataattcctccaataattagaaaggcattttagaaactatctgcatttacccaatcactgaataaaaaaaaataaatgggccttgaataaatgagaggttatactttgccttcatgatgcaaaatagaatcaaaagaagtcaaaactgcttgtatatttgcagtgttaactgtgctttccagtggtctgggatgtggcattacagacatcaagcagataaaatagcctcatctatacttatgacatctattaaaattcattctgccatatagcctaatgttcaacattcctactttacagttgaagaaaccagtaaactgaagtcaagaaaagctatttgccaaaaactgagtggctaatgatctgtagagtggga

SEQ ID NO: 806215 - DNA, 657 bp, Homo sapiens
tacagaccactccagatattaacctttgtttttcttagtttccatagaaatgcctcttattagagatggatttgctgcatcctatatagacgtctagcccattggcaatgcacctgctagaatggaaaacagctgtagctgatctactctctggactacaaaactgattcaagatgatatggaataatgtatttatttatttatttatttatctttttgcttatcctagtttgtcttccccttcctttgcctatctaatctaagaacctctaacccaaatttctccaaagctaccaatttgcctttttaygtatgtaattttttgaagtttcaaagtaggaactgaaataaaccaaaataatttaccccaaaatatactttggcctgttttgagatggctgttcagagggcctgcaaacagaagtagccttgaaaattgtcttcatggggcagaagagcatatgtagagaaaacctgcattgatggagccaggctttctctagtccagatttagaaaagattaactgaatatctgatacctttaaaggtcttaaagaaacattcaccatctatttgatctcatctgcaaaacaagaccttttgctatccaggcctcctcttccctggtcccctcatgtgttttaccactatagccta

SEQ ID NO: 806216 - DNA, 598 bp, Homo sapiens
agtttatgttgtaaattgtaattttccaaaggactggcaatttatggtttttttttttgtttgttttgttttgtttgagatggagtctcactctgtcacccagactgaagtgcagtggtgtgatcttggctcactgtagcttccgcctcctgggttcaagtgattctcctgcctcagcctcctgagcagctggggcygcaggtgcctgccacgacaaccggctaacgactttttttctgtatttttattagaggcagagttttgccatgttggccaaattggtctcgaactcctaacctcaagtgatctgccttcctcagcctctcaaagtgctaggattacaggcatcagccaccacctctggcttgacaactagtggttaatgaaaatatcaaagtttgacaactaacttgggttttaaatagtaaaataaaaaatcattctaataacatttctcagtctcactttacacaaggaataagaaaagtgatggaagaagagacgcttccctggtaatgtgatgcttaaaatccatgtttgcctattacgatgagaacaatattttggcaatctgagaagataacttaggatgttagat

SEQ ID NO: 806217 - DNA, 655 bp, Homo sapiens
ccaggaatctgtatggaatacagacctgtaggttaccatttccatattaaatgtgtaaagggctgttttaaaaccatgcttttgttttcttattttgtgcaccaacaataaatcaacagcaaatatcattgggtctaaaaataattgatatctggctgggcgcggtggctcatgcctgtaatcccagcactttgggaggccgagacgggtggatcatgaggtcaggagatcaagaccatcctggctaacatggtgaaaccctgtctctaccaaaaatacaaaaaaacgtagctgggagtggtggcggaagcctgtagtcccagctactcgggaggctgagggaggagaatggcgtgaacccaggagggaggcagagcttgcagtgagccgagaccgtgccactgcactccagcctggacaacagagcgagacttcgtctcaaaaaaaaaaaaaaaaaaaaagatamcacttcatttatgctatgcctgaatcctaattatcaactgtaggccttaacaataatcctaagtggatgtgcctttatgcaggcacttgtggcctttttgttttctttgaattaaatatacaaagtaataatttatcttacttcataaaaagattataatctcccattttttaaaacacatttgatatt

SEQ ID NO: 806218 - DNA, 595 bp, Homo sapiens
aatttatcttacttcataaaaagattataatctcccattttttaaaacacatttgatattagtaggaataactaaaatgaactcgtatgaatagaccatttttatttcattgatatctaactaggaacgttgcaactaatttttgcaatctgtatcaatttgtttaatatatkttaaatgaacaaagaagcagagatagtttctagagagcttacttacttaaaaatacaacagatattaatcaataaaatattaataagattcaggtgagtcgagagtgagtactcaagttctcttttctcacaacgtattcttggagtgccaaccttttcagttcaatgattttatgcaaaggtatacatctaactgcctgcaaaataaactactgactattttaaatcagataaagcaaacaacagcccccagctctgcaatccaaagccagcaaaggtcacccatttcagactgggtttgaagcatagccagttatgatagctcaaatattttcagatgtatgaaagcagaacagaattcagaaatatacattctttggcagacaatttttttagaaccaagtttctcaaattatataata

SEQ ID NO: 806219 - DNA, 595 bp, Homo sapiens
aatttatcttacttcataaaaagattataatctcccattttttaaaacacatttgatattagtaggaataactaaaatgaactcgtatgaatagaccatttttatttcattgatatctaactaggaacgttgcaactaatttttgcaatctgtatcaatttgtttaatatattttaaatgaacaaagaagcagagatagtttctagagagcttayttacttaaaaatacaacagatattaatcaataaaatattaataagattcaggtgagtcgagagtgagtactcaagttctcttttctcacaacgtattcttggagtgccaaccttttcagttcaatgattttatgcaaaggtatacatctaactgcctgcaaaataaactactgactattttaaatcagataaagcaaacaacagcccccagctctgcaatccaaagccagcaaaggtcacccatttcagactgggtttgaagcatagccagttatgatagctcaaatattttcagatgtatgaaagcagaacagaattcagaaatatacattctttggcagacaatttttttagaaccaagtttctcaaattatataata

SEQ ID NO: 806220 - DNA, 667 bp, Homo sapiens
atgagggagaaacctccctttttgactttgaataccactgctgagaattgtgcttctatttcactttgtggaatgcttgaagtgatttttacagaattctttttggaaatgttaatacttgtggaacaaatggcttattgttaaacttggagctggaagacctggatttgaatgcggatattgccagttactagcagtgtgacctcagtttcttcagtaaaacaggatattatcattgtctgacaaagttttttgggcctcagttaaaaaaatgttaagttaaagtcatttcggttcttgaaagtgccaagcaaatgtgaggcactattagtattttgtaaaaagccatttctttaaagggaagacaattcatgaagaaaaaattcaaatgaaagcaaagtaataaataaaattaccktaagaactgatgagagaattctgattttgtagatggaaatttgtttttgaatttaatgaatatacatatatttactcctttaagtagttattttatgtttcaaaaagattcaaacattttaattgcaaaaagtctttgccttgctttaaaagcaagtttaatttcagggacaatacacctattcattacccaaaccattcctaagcagtaacagccttaagagcctattaatgtaagggggggtgttaa

SEQ ID NO: 806221 - DNA, 572 bp, Homo sapiens
gatttatgtaatgatcatataaattctgttaaggctcagggagcttttcagagtagctcctctctctgtgtgatgacctctttctctgtgatgagaggtgaggtcacttgcttcttgtggtatttccatttcaacacatggtttctacagttgcctgttatagagaagataggytcttgaatgtctcagcctggagctgacctgaatttcttctacttagttttcactgcctagaaccaggtttctcaactatggctggggtgaataatttgttttgggggactctccttgcactgcaggatgcatgccagcatccctggtgtctatacaccagataccagaggtgtcccctctggctgtgataaccaaagatatctctagaggttggggtgagggcagcagtgaatggaaaaattgcttttggttgaaaaccgctgaaccagaggtagtcatttagttctaactgcaaggttgttgggaagagtggtcttcttgtgtttacaggaaggtgaggaaaatcagacatggatatgcactagtagactgcaacatattagctaacggaaatacag

SEQ ID NO: 806222 - DNA, 657 bp, Homo sapiens
ttccatcctgagctaccgctgctcatgttctagctcatgaatttaatcccaacactaatgaggctccctgcttactggatcttcctttcttaataactcatcactctaaatccattaggtcattgttcttaagaatcttaatggagaaaatattcacaagaggttaacrtaatgcaaaagatggtgaaacgctctggaataaggatggaagcttaatgggaaacaaataccccatcctatttttgcatgtcctctgatctcctgctggggccacccactgccaaaaacaaccaaaagttagagggcaagcaaaagagcatgggtgataccatctatctacaacagttagcttcttagggtacagactaggtggagagataccatggtggggaaaacgacatgtggacgccattcagcacagttactttttctgactctcccaagaagaacgcattttcccctcattgatattccaagagaaatatcattttattggtacctcaactgaggcacctgtgatactatatttgtaaattatttccatgtttagaccttagctccttcagttaagaactatatcttaattatgttcatatctttagcagttagcactatcttgcagacagtggtgcccaatatatgtttgctaaataaaag

SEQ ID NO: 806223 - DNA, 548 bp, Homo sapiens; identical to SEQ ID NO: 785513

SEQ ID NO: 806224 - DNA, 622 bp, Homo sapiens
atggatacgtttaagggtaacatggagagtggatttgatgggtaccagactgcatccaggcattctaattaaaagactgttgtaaatatctggacaaaagatggtaaaagacttaacttggcaatggcagtgggacaggaaagaaggtggggagaaaagaattcaggaaaaacattgaaggtaaagttagttgtgtcttaaagttaccaagttcaaactcctaaaggactattacaactctatcctattccaagtcacccaaagctaytggacactcctaatatttaaaagtaactaagtctggaggaagtttattccactgtggaatagcaccctgaatgtgtgtgaaattttaaggtaaatttggtctactagatctcttactgttcccagaggagtgacctctagaaagggaagtttctgacaccttgtaggaaagaagggatggatcaggcccagaaaggtatcacaaagagtgcaggagataaactttgcttactgttgttgcttactggtctgactttaaccacctttgttttccaaagatgaacatgtttataaaatgcatatctactctttaatactgcattacataaactttcagcataatgagcatgcatag

SEQ ID NO: 806225 - DNA, 596 bp, Homo sapiens
tgagggatcctgaaggtgagatcaaggaagactataaatgagacaatgtataaacagaggctgaaagcaagagaaagttgccagttagagaaggcaagaaaatatcccatgagagggcatggcatttgcagtcacagatgtgtgaaatagcttaggatgcttggaaaacaacaagcrgctttgtgtggctgcagcaaatgttgcaatccataagcagcaagagttgctcctaaaaatgcaggcaggaactggatcatgaggggtctttaggcccaaagagtttagcacattcttgcagaaaggagagtgacacaaccagaaggccagagagacccgtggggtttgttctagcaattcacatgaaagggaataaggactagatttgaggttgggttggattgtgggaaagctgaatttgagggggtaggtaaaagaaaaaacttttagaaatggttaccaatctttgcggtttctgacttaagctattgtggtaatgggggctttctgaatggagtaaaggaatacagtgggcacaaattctggaataggtagttaggaatgaagaatgattttactttttggagatgctgtcgttt

SEQ ID NO: 806226 - DNA, 601 bp, Homo sapiens
agatataaaatcctggccatcctggcccaactcaggacaacactgaaggggcaggacttcagagctagtcctggagttggttgaagctgtcgttgagtcagcatcatgactcagcatttttctgctacatcctgctccctttttctccctcccttaggtgtcgaacccaagggctcttctcagcagagtgtctgcatgccacactctgctttagagtctgttccctggggaacacaaccagagactgaaataattggtgggcagtggggagcacaaagggctgtttttgtttcatgtgaagacgatgagcatgctatgaaccccgaagagctgttgtatargcaagtagaatgtgtttggctgtggtgtggtaaagctgactgtgttacacagagagtgggtgggtgtgtctgtggctttgctcggcgttattcatgcctctgcgcccttagggtgataaatgggtggctgcacaggctggagaagggctcctgaaggaccctcagacattctcagcatttgcccagcggctgaatgtctttccacgccttctccccttacaactaagtagacagcttccttgcttttgtaatatttgtgt

SEQ ID NO: 806227 - DNA, 693 bp, Homo sapiens
tgagatcacatcacaaattattatatctccagacaatttctttttttgcagggactatgccatagtgtcagaagtcctgttttatgaggcaaataaaatacatttcactttgcattatttgactgttacagagacataacattctatctctatggcttcactctgtttaaaagcaagaaactttttataactgaaagaaaaaaaacaagtgcactttaattaaccaaagacataacctcttacaaatatactaaaatgtaatttgagaaccatttaagwcaaaaatcatctgcatttttcaaactttcacacaccaccacatgacaggaattttttgaaaaactacttatccataataaagattgctccaaatataagcaatacaatttattcaattttacagtattgcattttttcattctcatattttcatcctactaagaaattagggtttgacatttttggacgtgaaactctatcctccttttctgtggtgattatgttaagttcttctccctctctgcatttcacagagcatacaggagtgtggtcagagaaggggcttggaaagagcatatgtcaagttgtcagaaaatgtggttttcagtttccattttggcatcttagccatgtgacctcgagacaggcacctaacctctgtatgtctctaacaagagggtatcaacagttggt

SEQ ID NO: 806228 - DNA, 606 bp, Homo sapiens
cttttttatggacatatattaatataagtttatatgaccagtcctatgcatctataacctgaggaaagtggagaggaactggaaatgtgagcagtttgagcatctagcactacatcagggaacattattatcttccattcaagctaccctggaggatctgtcttctcccttcttggcgcaaagctgacaraaaacagaagaatgcatgaaaatattgggaggtgttggatatgttaattaccttgattatgttgatactatcatgggtatttgcatgtgtacaaactcatcaaatggtatacattatacctcaataaagctgttaaataaatagaaatgaataactagatacatgtataaaaatggtgacacttgctttctcagctgaggtcttgctacatcagggaagagccctgctgccactgactctcattgccatggcaacacatgccctctcagggcttctctttcctactgctttgattcccagtgggaaggagaccccacaggcattctcttacactaaactgtcagctaccctaatcgccagccttttctcctcaatgttttaggaagttgctgtagttctgccataatttcctgtag

SEQ ID NO: 806229 - DNA, 585 bp, Homo sapiens
ggacttctgacctccagagctgttaggccataaatttccgttgtttaagcctccaagtttgtggtatagaatatgtttgatatgacagtttaatatggcagcctcaggaaattaatatatatgcaaaaaaccccaaacaaaatcycccaaacaaaaaaacaaaactgtcatttgaaaaagtgatcagaaacaaataaattcattagcagagcatgctaggattaggtaaagcacgagtagaacaaataagtatgttaagagagatagtgactaaaaaaaggctacagtggatgaaaaactttttaagaaatccttatttttaaaaactaggtgttaaggttgcatgataaaagcagtttaaattacctttgcttggcatggttttttgaataaagagagctgttaaaatatggcattgagatataaagggcatcacttgagcaaaaatgtgaagcacagaaatatagtttattattaattgggttttactattagtatcttgcatttttctggctcaaagacagcaagatactacatttcaaaaggtttaaacttagctcaaaatagctttaaattgtagcaaga

SEQ ID NO: 806230 - DNA, 573 bp, Homo sapiens
tatgacaatgactttattaactcagtcatgtggccagggtatccttagatcgataaagagtaaatataaaaacattttcttgaacagcgtgctagccagcagtgaacagaggtgtgaatgtggaaagttttcaaacctttaaggtttgaaaaaagttcagcatgaagaatgccatacatactgttgccaatgcttgaaacatagtgattaaagtcacagttgtgcatgcctgacacaacctctggcctgcaactaagttcagtgatgatgatgaacaaggtggtgactttgaaggattctgtaatttgaaggattatgtaaagcgagaaaaaaagaatgtctgatttccttacatatgcaaaaaatatatcttcagagttcattagtaagctggaagaggtgaatatcraagacatttttaatatcaataatgaggctctagttcattcactgatgatgaaatagctgaaatggttctgaatcaaggtgatcatgaaaacagtaacaatgaagatgatgtcaacactgcagaaaaggtgcctatagacaacatggtgaaaatgtgtgatgggc

SEQ ID NO: 806231 - DNA, 646 bp, Homo sapiens
cttctgggtgaatggatttttctagaaatcagttcacccatctccaaccttaagtacgtaagtgtggctgtgagcctttcacgagccaagcaggggacaaatctctcttcagtggggaggcttttcctataatccctctgatttcaacacagtaactcacactccaaccaaaaatgtatttatttgctgtcttccaaattcaaatactgtctgataaaaccaatccaaaaatagrccctaggttttctcttgatgcatcagggttggagaaagaatatgagaagtctaactcctattttaaagatatttaatccatactgtagttttcattcccatttttgcacacctgcctttaaagcagcaattgtctccaatccctgaggatttctgtagctttgtgttgaaaggattagctttttgatattctgcctcaacatacttagatctctatgttctctagtctaaaacagttcccagtggttaaactatttcccagatttcaaaatgttgcttcttttgtctggtatcttctttttgaggtttcttcccccgccccctaagttcctttactgtcattgctttgtgaacactcaggaggaagtacagatagacatttgcattcaacctatgttatttaaccagaagc

SEQ ID NO: 806232 - DNA, 453 bp, Homo sapiens
ctttgtacctctaagaatgctgcagacatgggcaggcctggcacagatccctggaggctgagactaggactaggagccatgccaaccctcaatacacacacagtcacttccttagttgcagggtccaggggaaattccagtggtgtggcaaaagatccaagttagtgctcccataaagctgctgtggggagaggtggcttagttccataaaaagcaaggkttttgaaagacacaaacccaggacccaatccagaagtaggcaatactgtggagactagtcaaaccctatcagtgaagttcattagtagcaaaaacctattgaccagaccaagttccagggcagcacagccagtaagaaaaggggataaagtgggagttgtggagtttagcaaggagaggacagaggcttggtcttagaaagatcagggctctaaaagggcgactggggcaaaa

SEQ ID NO: 806233 - DNA, 636 bp, Homo sapiens
aaaaaaaaaaagagtcttcttactttagggtcttgtattcccaactgagctcaatcaatagaaggtttagtggcatatataataccaaaaaggaataatttcaaaatgatgtatatttttccatgatagtgcattgtatgcttttcatttggtgacttttttttacctgtataattacagtttgcatatgtgtggtaacacaatgagtctgcatcctgtaaattcatctggatgaaaagatgattggttataggaagaaatccccakagacaattattttgtaaataatgaagagtttacttaatgtcagattgaggaatcagtaagatataaaacagtactatgtgaagggggaagagttattttctgaataaaggatcagaaattactattttttccatatattttgctgcaagaaaaattatactaaaaatgttggataaaaattactctagcttttaagtattctttattccacctaaatgatttatgtttaacaagcaaaggttgtcactgacttagtcgtataagttatgatggatatataagtttcagatacatgattaggaaaacattaagtacagtctgataatttatgttgtacatttaagagtcacaaaataatccatttccagc

SEQ ID NO: 806234 - DNA, 489 bp, Homo sapiens
attaggctatgtcttgccgcaaggttttgcaagttatatttttgttgatcagataaaatagagacgtttcttgcgtttgccaccggcccccctcctcactctggtaacgatactctcaagttctaaatcattggttctcaaccagggrcactttctccccaggacacgtttgactatgtctggggatgttttggttattacaacttgggcagggaagaggagatagggaccaaggatgctgctgagtattctacaatgcacagcaaagctccccacaataaagagttttgcagtcccaaacatcaatagcgctgaggttgagaaaccctgttttaaagtgtcatgctgtctaaactgactaaactatcattgctcttaagcagatgatatagtatcagatataggatttcatataggatttgccctcaagtcccagggttttctgtaacttataatagaagagttgggagaaatcaagttaatcctagg

SEQ ID NO: 806235 - DNA, 625 bp, Homo sapiens
tattatgtcagtgcttaatatgcattgtttgactctaggccaatccaccactaccttcattaaagcattagagtcaaaaacctttgtctcactggttttcacctctaattaacttcatttctgaaagtgctttgaaataaattttccattctgagggaaagaagccaaaacaaaaaaatccaacaaaacccacgaagtttcccacatgtgaggatttgtttgctgcttttatctatcgcaacattctctctaacaatctcrttcacaattgtggactactcagggttctccacagaaacagaatcaatagggtgtgtatgtgtgtgtggaggcagagagagagagaaagcctgagataaatttatcttaaggattagttcacatatttgtggggcctggcaagtcccatatttgcacgataggacatcaggttggagactcaagggaaagccgatgttgcagttgagtccagaggcagtctacaggcagaaatccctcttcctcagggaggttaagtctttttcttaagaccctcaactaatcggatgaggcccacccatgtaatggaggataatctgctttacttaaagtctgatttaaatgttaatcgcatctaaaattacct

SEQ ID NO: 806236 - DNA, 659 bp, Homo sapiens
aatagctgttctttcttaacttttaaacctctatcttgaaatttaaaactgtgtcaaaataataattggtaatatactttcaaaatccaaatggtcatcaaatatgctggtcttaagtgaaattagcaatctagcattttattttgggaatgcctagatacctctgactgtcaaaataataatatggcttcaatttttgatagtgacatcaaaaaataaaaccttttaccaaataaatcccccaaatcagaatagcaaagtcttttgtattcctcaaatcagtcaaaggtgttttgttttaatttttcatttatagtttcagagaaaaatttatattctttagaatatatttgtagtagttggtgttctcatttctttttcttattttacayactagaatcatactcttggatcaaattcaaaagcaaatatacaaaaagacaggataaaaatcgaccatcagccaaaaaaaaacccagtatttaatctaaactcctttgctcttttttcttgaattattttgccatacaagtaaatgaacacaaaagagacaatcaagtattccctggctgataatgtataaagatgaatttcaacacttctctttggaagctttaagtaatgttcagtcctgaaacaggactttaaagggatccatt

SEQ ID NO: 806237 - DNA, 494 bp, Homo sapiens
cataaaaatgcaatggggcaggtgaccacacatttttaaattacttttggcatcatcagcttctggtcatctctttatgtaagtgttttcatttttaaattagatttggcatcatcagcttctggccatctctttgtgtaagcgttttatcctacaggtaaataaactgactccagctgtcttgcgtgtcaactcttccaacaagcctgacacttagctatgatttggctgcatacaaaccaagcactgtctccaaccaacacttattttggcttctatttcctaggtccatggtatacatgaaaatttctcacgtgattttaatatagttttatccgatagagcaaacattgwatcagcatctatgttgagttagtcagacaaagtatgatgccgtatttgaatgcatttataaaaataacactactatcttaggtataagaaaggattatcatttttctggggatttgaggttttaaaagtgtgtatcttga

SEQ ID NO: 806238 - DNA, 625 bp, Homo sapiens
tattatgtcagtgcttagtatgcgttgtttgactctaggccaatccaccactaccttcattaaagcattagagtcaaaaacctttgtctcactggttttcacctctaattaacttcatttctgaaagtgctttgaaataaattttccattctgagggaaagaagccaaaacaaaaaaatccaacaaaacccacgaagtttcccacatgtgaggatttgtttgctgcttttatctatcgcaacattctctctaacaatctcrttcacaattgtggactactcagggttctccacagaaacagaatcaatagggtgtgtatgtgtgtgtggaggcagagagagagagaaagcctgagataaatttatcttaaggattagttcacatatttgtggggcctggcaagtcccatatttgcacgataggacatcaggttggagactcaagggaaagccgatgttgcagttgagtccagaggcagtctacaggcagaaatccctcttcctcagggaggttaagtctttttcttaagaccctcaactaatcggatgaggcccacccatgtaatggaggataatctgctttacttaaagtctgatttaaatgttaatcgcatctaaaattacct

SEQ ID NO: 806239 - DNA, 549 bp, Homo sapiens
gcgaaaggagaggtgctacacacttttaaacaacctgatatcgcagaactcttatcatgagacagcactagagcagtggtgttaaaccattagaaaccacccccatcggccgggcgtggtggctcacgcctgtaatcccagcactttgggaggccgaggcgggyggatcacgaggtcaggagaccaagaccatcctggctaacacagtgaaaccccgtctctactaagaatacaaaaaaattagcccgatatggtgacgagcacctatagtcccagctacccagctactcgggaggctgaggcaggagaatggcgtgaacccgggaggcggagcttgcagtgagctgagatcgcgccactgcactccagcctgggagacagagtgagactccgtctgaaaaaaaaaaaaaaaaaaaaagaaaagaaaaagaaacgacccccattatccaatcacctcccaccaggccccacctccaacactggaggattacaattcaacaagatagttgggtgggaacacagagccaaaccataccagtttccataaga

SEQ ID NO: 806240 - DNA, 586 bp, Homo sapiens
ccagagaagcagccagtgctcaggccagatgagagagctgtaagtagctcaatatgcttgtagcacagagtggtgagagatgaagccggagagataagcaagtgccaaatcatgatagaccttgcttcttcaattgtttgtttagttacagctcactttgttccagaagagtttttacgtgcattgaagggccgtgaataccacactaagacatttggagcccttcctaaamtgttggcaagcctcaggaagaaagcaacatgatcagatttgcattttagaaggataattctatcttcttagaggagaatgaattgtaaggaacaaagacagaagcagagaggccatttaggaaattgctgcagtccttcagatgagaaatgcaccacgaggggctaaattaaagtagtagctttggggatggagagaaacaagagatatagaataagcacaatgaacatggcttgctaataaatattttctcagtgaatgagttgtgactaattagatgtatggggtgagaacaagaggtaattaaaaaatgaatttcaggtttagacttgggaaaccaggtgggtgacaagag

SEQ ID NO: 806241 - DNA, 585 bp, Homo sapiens
cagagaagcagccagtgctcaggccagatgagagagctgtaagtagctcaatatgcttgtagcacagagtggtgagagatgaagccggagagataagcaagtgccaaatcatgatagaccttgcttcttcaattgtttgtttagttacagctcactttgttccagaagagtttttacgtgcattgaagggccgtgaataccacactaagacatttggagcccttcctaaamtgttggcaagcctcaggaagaaagcaacatgatcagatttgcattttagaaggataattctatcttcttagaggagaatgaattgtaaggaacaaagacagaagcagagaggccatttaggaaattgctgcagtccttcagatgagaaatgcaccacgaggggctaaattaaagtagtagctttggggatggagagaaacaagagatatagaataagcacaatgaacatggcttgctaataaatattttctcagtgaatgagttgtgactaattagatgtatggggtgagaacaagaggtaattaaaaaatgaatttcaggtttagacttgggaaaccaggtgggtgacaagag

SEQ ID NO: 806242 - DNA, 658 bp, Homo sapiens
atagctgttctttcttaacttttaaacctctatcttgaaatttaaaactgtgtcaaaataataattggtaatatactttcaaaatccaaatggtcatcaaatatgctggtcttaagtgaaattagcaatctagcattttattttgggaatgcctagatacctctgactgtcaaaataataatatggcttcaatttttgatagtgacatcaaaaaataaaaccttttaccaaataaatcccccaaatcagaatagcaaagtcttttgtattcctcaaatcagtcaaaggtgttttgttttaatttttcatttatagtttcagagaaaaatttatattctttagaatatatttgtagtagttggtgttctcatttctttttcttattttacayactagaatcatactcttggatcaaattcaaaagcaaatatacaaaaagacaggataaaaatcgaccatcagccaaaaaaaaacccagtatttaatctaaactcctttgctcttttttcttgaattattttgccatacaagtaaatgaacacaaaagagacaatcaagtattccctggctgataatgtataaagatgaatttcaacacttctctttggaagctttaagtaatgttcagtcctgaaacaggactttaaagggatccatt

SEQ ID NO: 806243 - DNA, 639 bp, Homo sapiens
aaagaacaaaggtgacattacaaccaagcccacggaaataaaaaaatattcccagagactattatgaacacctctatgcacacaaactagaaaatctagaggaaatggacaaatttctggaaatatacaaccttccaagactgaggcagggagaaattgaaactctgaacagaccaatataaagttacaaaattgaatcaatagtttaaaaaaaaaaaccttccaatcaaaaagagccctagaccagatggatttcagctgaattctaccagatttacaaagaacaggtascaatcctactgaaactattccaaaaaaccgaggaagagagacttctccccaacttattcagtgaagccagaatcacattgataccaaaatcgggcaaagacaaaacaaaaaagagaaaggcacaggccagtagtccctgattaacatagatgaaaaatcttcaagaaaatactagctgactaaatcctgcagcacatcaaaagttaattcattgtgatgaagtaggcttgattcctcagagctggttcaatatgtgcaaataaataaatgtgattcaccacacaaacagaattttaaaaaaatattatcatgtaaatagatgtaagaaaacttttgataaaatccaat

SEQ ID NO: 806244 - DNA, 639 bp, Homo sapiens
aaagaacaaaggtgacattacaaccaagcccacggaaataaaaaaatattcccagagactattatgaacacctctatgcacacaaactagaaaatctagaggaaatggacaaatttctggaaatatacaaccttccaagactgaggcagggagaaattgaaactctgaacagaccaatataaagttacaaaattgaatcaatagtttaaaaaaaaaaaccttccaatcaaaaagagccctagaccagatggatttcagctgaattctaccagatttacaaagaacaggtagcaatcctactgaaactattccaaaaaaccgaggaagagagacttctccccaacttattcagtgaagccagaatcacattgataccaaaatcrggcaaagacaaaacaaaaaagagaaaggcacaggccagtagtccctgattaacatagatgaaaaatcttcaagaaaatactagctgactaaatcctgcagcacatcaaaagttaattcattgtgatgaagtaggcttgattcctcagagctggttcaatatgtgcaaataaataaatgtgattcaccacacaaacagaattttaaaaaaatattatcatgtaaatagatgtaagaaaacttttgataaaatccaat

SEQ ID NO: 806245 - DNA, 465 bp, Homo sapiens
agtttcaaaaactgatggcatgcaaaacagtgataaatttggctatttaagtactgtgccaaagttgatgtgttggcttatttgttgttggagtaaatcaaagactagaaaatatattaaaattgctctacctacttgccgtgcaaattatcataatgatayaaatgacttgggaaatattatataaaacattgtctgaaagttagtaggctattcgctctcaaatttattttctactcttcctccgctctgtattcatgagaccctaatttaccataatcccttgccttttaactttcagggaaatgttagggggcctgccttttatcattatggaagactgaatataaaattctgcattgtcagtcttttactttctggatgttaaagatgttattcatagttttcagtactgtctgctgaaaagtatgcaaatatattcatgtttgttcatctgaaggtaat

SEQ ID NO: 806246 - DNA, 632 bp, Homo sapiens
gatacttttttattagtgcaaatgaacaagatctatttctattaaaattatgttcttagttgttctctatcatgagccctttggaacagaaacagatataaaaatatgtaaatttgttataaaatctttaaaaaatcagagcatagactcttttaaatatagaattaatgttaaaaatgaagacaatgctgaaagcatatttactgcatagaaattaagatcacaaattccataaacatgaaataaatgaatcattccaaaattaggaacaaaattctccacagcattgtaattagctgacctaatatttgcacagggaaaaaaatttggtctcattttagccataagtatttgctgccttagcaactaaatccattcatttagtgattcaaggtttagctcaacttcttggaatgtgtaacrtgtgattttgaaataaaatattaatgttattttattttcagaaaacctgaaaagaagtaaaacagaaaagcaatattatgcgtggagacttaagattccacccaagaaggactttatgagatactgacctgatcaatgtagataggatgatagtaaggtaacattcattttaggactttatctgcatttaatccacaatgtaaactgag

SEQ ID NO: 806247 - DNA, 607 bp, Homo sapiens
gtgacaaaaaataaatagcatgcatgatgtgatgtttagataggcatatttttaaaagatgtcatttacaatgttatgtagaataaataaataataaagggaatgggataaaataagaaaaataagtacagaggtttgggagataaatgagatacaggttgtccagctcctcttttctactctcctttaccagaccaccctcctctaactaattttttaaatttttatcttmatatgaatgtcccttatttacagtcaaatatctaaataatgtaaaatacaccatataaaattaatctctgtccctctgcagacttcctcatgtatcccactcagtcttacattaatcaaagaattgaaatgaagccttctgtgtctcactccatactttcacccaattatccatgctcatgaattatgagcatgaattattaataataattatgaatcattaagaaaatttccaaatttctatgtcaagctcacgtaatctaattttatgctataattgtccatttggatagctaaaagacaccacaaaaccgtaagtccataattgaactcatgatcttcactcccaaacctagacccctccatggcaggattc

SEQ ID NO: 806248 - DNA, 616 bp, Homo sapiens
gttacaaggtcaagttgaaatgcttgttacaattaagtcaaagtgccacataggtaggtgatgtacatttctgaagttcaggcaagaggttgttattaatgagggtctcattggtggactgcatttaagacatgggacatgagataaatgagattagccggagaaagagagtacagacagagaaaagacactgggacactgagcccctcagaatttagggttcctactggaatgcttttagagataaaattactactgcttcaattttttcaacttttattaatggctgtaatcctaacaamtcatagtacagttatttcatactccatatgtataaaatccaaattattaactttttaatacttgtattagatgcctcgttcttatccttcagttttcatctatatttatttgcttttcatggcaaaggaatttcttcttggccatgaatggcaaggcagaatgaaaaatattggaaattataataagatggtgcttggcaccaaactttcttttactcatgacataattcagtgactacattttttcctgatagagaaaatacccaaaaaccaaatacggcttcaaaatatgtaaaaatattctttctcttatg

SEQ ID NO: 806249 - DNA, 616 bp, Homo sapiens
gttacaaggtcaagttgaaatgcttgttacaattaagtcaaagtgccacataggtaggtgatgtacatttctgaagttcaggcaagaggttgttattaatgagggtctcattggtggactgcatttaagacatgggacatgagataaatgagattagccggagaaagagagtacagacagagaaaagacactgggacactgagcccctcagaatttagggttcctactggaatgcttttagagataaaattactactgcttcaattttttcaacttttattaatggctgtaatcctaacaactcatagtacagttatttcatactccatatgtataaaatccaaattattaactttttaatacttgtattagatgcctcgttcttatccttcagttttcatctatatttatttgcttttcatggcaaaggaatttcttcttggccatgaatggcaaggcagaatgaaaaatattggaawttataataagatggtgcttggcaccaaactttcttttactcatgacataattcagtgactacattttttcctgatagagaaaatacccaaaaaccaaatacggcttcaaaatatgtaaaaatattctttctcttatg

SEQ ID NO: 806250 - DNA, 530 bp, Homo sapiens
tgtaggtgatgactctctgttgccttgccaatgttgatctgctttagctttctccaccaggagccacttactgttgtaatcttgggactataggatgctgcccctctgggtagggatcattttggatgacctcgtggctaatgttccttctgtaggtgtcacatccagtcactgggatgcatgcattttgacctgcctgtcaccagctggaagtgcagttcctttccagctgcagctccctactctgctgccaagaatacgtcttcttcctctggcatgagtcaaccatctgtttcccactggagggaatacatgtcgagctttctgagtgtgcctattcaaacccctctactaraattgggatgaggaagcaatgcctgcgccccaagcctttgtgggaaaggatagtgagagtcccagcacagcagtcctcttcccaaaatcccactttggactctgcaattacccgcatcctctcgacctttaaattggagtaagaagcttctggatgaggaacccaagtactgtgt

SEQ ID NO: 806251 - DNA, 557 bp, Homo sapiens
tggatgtcttccctaggaattgcctgtacataaaccttgacctctctgcttggatagctgactttttatcttgttgattcataggagttatttacatactttggataagaattcttgcagattatgttatttttcccagagcttggttttttattttcacatacatactgcctgttttaatgagaagaaattttaaaagtatctactttttatccttatctttcctgttttagctatttatatcttgtttaataaacatttcttttccctgaggcaacagagacattcagacacatttaaaaatttttacattttcagtattcacttttaggtccaaygtaccttgaattcatttgtgtgtgtgtgtgtgtgtgtgtgtgtgtgtatcctgtaggtatggatctaacttaatttatcacaggaataactgtcccagctccatttaatggctactgtgcccttttctactgacctggtgcctctgtcacatgttgagtttccaactgattcagcactctgtatttcagctcttcactgtgtggccttagatttgtcgc

SEQ ID NO: 806252 - DNA, 645 bp, Homo sapiens
gaaaagggaacacttttacactgctcttgggaatgtaaattagcaccatcactataggtaacagtatggagaatccttaaagaagtaaaaataggagtaccgtttcacctagcaattccacttctgagtatccacccagaggaaaagaagtcattatataaaaaagacacttgcacatgcatgtttatagcagtataattcacaatggcaaaaattaggacctgcataaatgcccatcagccaatgagtggataagaaaatatggtatgtgtatatatatatatatatatatatacaccttgaatactactcagccataaaaagaaacaaaataatggcattcacagaaacctggatgaagtyggagaccattattctaagtaaaataactcaggaatggaaaactaaacatcatatgttctcactaataagtggaagcttagctatgaggacgcaaaggtataagaataatataatggactctggggactttgggggaagggtgggagtgggatgaaggataaaacactacacactgggttcaatgtaaactgcttgggtgatgggtgcatcaaaatctcagaaatcaccactaaaaaactgatcagtttaaccaaacaccacctgttcccccaaaaactgaaa

SEQ ID NO: 806253 - DNA, 618 bp, Homo sapiens
gatagcaggtctaaatcttgaatgtcaaatttagttgttgttgttgtttaatttgctttgttttaaagttattaaaaaattatctaaccagcagcagcagtacagattacacatagccccaacttacctgggtctttgcgcatttctttcaattacacaagagtattttaaccacattattggttaccataattttacttgaaaaaatatgcaactagttagcatataaaagatctgtttttatggcagtttataaytatatctactcaaaacaagtcattcagagaaacagtaattcaaacttactctaaaatgttcacaaagcatttattccattaaatatttataatatttaatatataatacaaacagtccccaacttataatattggcttagaatttttcaactttatgatggtgcaaaagtgataagcattcattagattccatacaatcattctgtttatcactttcagtaaagtattcaatatgttatatgagctattgcacacttaattataaaataggcttactgttagatgattttgcccaatcataagctaatgtagatgttctgggtatgtttaaggtaggctagtgtagataagctatgatatt

SEQ ID NO: 806254 - DNA, 618 bp, Homo sapiens
gatagcaggtctaaatcttgaatgtcaaatttagttgttgttgttgtttaatttgctttgttttaaagttattaaaaaattatctaaccagcagcagcagtacagattacacatagccccaacttacctgggtctttgcgcatttctttcaattacacaagagtattttaaccacattattggttaccataattttacttgaaaaaatatgcaactagttagcatataaaagatctgtttttatggcagtttataattatatctactcaaaacragtcattcagagaaacagtaattcaaacttactctaaaatgttcacaaagcatttattccattaaatatttataatatttaatatataatacaaacagtccccaacttataatattggcttagaatttttcaactttatgatggtgcaaaagtgataagcattcattagattccatacaatcattctgtttatcactttcagtaaagtattcaatatgttatatgagctattgcacacttaattataaaataggcttactgttagatgattttgcccaatcataagctaatgtagatgttctgggtatgtttaaggtaggctagtgtagataagctatgatatt

SEQ ID NO: 806255 - DNA, 637 bp, Homo sapiens
tcacccattcatctttccttaggacttttcctgaccctttaatgtaaacaggatccctataatatttgctcccatcaccctgtatgtttcctttatactgatatcataatatgtagctagacatgtttgcagcattttttaaatgtttgctccgccctctagaccttggatgctcagagcatgatctcctgcactggcattggtggagagctctaaggcaagataaatataagcattcagagtaagcatttcaaaatatctgcagcaatttcacattgccaggccataaaggtttttgatcaatgggattatttctgaccagggtatagtacagttaattgttgtggatcacatatgatctaagctgtatgctagtcatatgtagcagaatcacatagcaacaaatgacactttaaggttagtttgtgcaytataacccaagtgtgtgtcaaattttgagaaaatgtaagcctttgtatgcttaaaaaaatttctaggtgcactttactttttaatgatgcctgtttttcaaattataatgtaacattattagttatactaagaaaatacaatttacattatttaagtttaatgccaattaacacggagagaaataagtttctctgggcttgttacg

SEQ ID NO: 806256 - DNA, 605 bp, Homo sapiens
atattgtcctctatatgtaatacatgtgtactaaatatttattaaatatatatttatttaatagataaattactgcatcctcccattctgtcaatttctgggaaactccgaaattaacccctcatctttaaaaagctacctttataatttttgaaaggatatgcacaagtataaatatgtgtgtatatgaattcaatacatgcacrgagtttcaaaaatcaaatcatacagaatggctcaaaggcaaattattagttttcttagttgcttttcttaaagcttatccttgttcttcaaaaccattcgtatttaaatgctttggtttatagtggctaaataatatgttgatattacttgtgtatgatttatcaggtttggcttctcatcttattctattcacatataaatatttacattattattttggatatttaaaaccatctttgaaagttgatattatatttaaatattttccatcaactatagacagaatctagaggaatagatttttaagaggagaatagcagctcccctaattttgctttcacttcttcacacactttcatcccaacttctgtcaagtagaaatttcattgtcaagtttg

SEQ ID NO: 806257 - DNA, 604 bp, Homo sapiens
aaatgtacttaaatcttccattcctctctacaagaggattgccagaattaaaagataatgatcttcagcattacataatagcacaaaatgcaagtaaaaaagaaacaaaaactttaagaagaaaaaggctaataaaacagttgtgatacaaaaattaaagaactagtcaatttgttaaggaagccagtgagtccaataawaagggtaagatagaataatagaagatgctaagaactgacattaaggtggatattaagaaggaatgatattaaaaatatcgtcaaaacagcgtatgttctttctcttaataaaaaaaatcgatcaatcaatcaattagaaatccaggaagtatcaaaaatatataacatattacaaaagcccaggtatgaagttaattatacagtcgggtgattgtcatgagcaacttgtgaattgtaacgagggacaaagaatcaatttcaacatcgccctttaaacggcaaaggcactgttaaatttgaaccatagggaagaaaatgtgcttgttgtctcagtacttgttctatggggcatgtttatgacattacagtaagagaggagttcttggtctttttccctctaatgc

SEQ ID NO: 806258 - DNA, 604 bp, Homo sapiens
aaatgtacttaaatcttccattcctctctacaagaggattgccagaattaaaagataatgatcttcagcattacataatagcacaaaatgcaagtaaaaaagaaacaaaaactttaagaagaaaaaggctaataaaacagttgtgatacaaaaattaaagaactagtcaatttgttaaggaagccagtgagtccaataaaaagggtaagatagaataatagaagatgctaagaactgacattaaggtggatattaagaaggaatgatattaaaaatatcgtcaaaacagcgtrtgttctttctcttaataaaaaaaatcgatcaatcaatcaattagaaatccaggaagtatcaaaaatatataacatattacaaaagcccaggtatgaagttaattatacagtcgggtgattgtcatgagcaacttgtgaattgtaacgagggacaaagaatcaatttcaacatcgccctttaaacggcaaaggcactgttaaatttgaaccatagggaagaaaatgtgcttgttgtctcagtacttgttctatggggcatgtttatgacattacagtaagagaggagttcttggtctttttccctctaatgc

SEQ ID NO: 806259 - DNA, 604 bp, Homo sapiens
aaatgtacttaaatcttccattcctctctacaagaggattgccagaattaaaagataatgatcttcagcattacataatagcacaaaatgcaagtaaaaaagaaacaaaaactttaagaagaaaaaggctaataaaacagttgtgatacaaaaattaaagaactagtcaatttgttaaggaagccagtgagtccaataaaaagggtaagatagaataatagaagatgctaagaactgacattaaggtggatattaagaaggaatgatattaaaaatatcgtcaaaacagcgtatgttctttctcttaataaaaaaaatcratcaatcaatcaattagaaatccaggaagtatcaaaaatatataacatattacaaaagcccaggtatgaagttaattatacagtcgggtgattgtcatgagcaacttgtgaattgtaacgagggacaaagaatcaatttcaacatcgccctttaaacggcaaaggcactgttaaatttgaaccatagggaagaaaatgtgcttgttgtctcagtacttgttctatggggcatgtttatgacattacagtaagagaggagttcttggtctttttccctctaatgc

SEQ ID NO: 806260 - DNA, 566 bp, Homo sapiens
tgcaaagaaatatggagataacacagctccatctgaattgagtccagccatcaacaaatatcttgccaaccattctcaagaatttagaaagatatttgtcttaaagtaatggtcttataatgaccatttgagtaatttttttcaaagcagagagttgctgcaagataaatgtcaccaacagtagaaacacaatattagtaactttcaagtgatagctctttcagtgaaataataackttaaagcaccgttctccccctcacagttggaaaatccaactcttctcagctcacaatacatctgacagccccagtttctcctaaatcccatcccataaatctcaatgataacatcagcctgggtgccttagcctgagtccagcttcagactctgagtaacttggaaacattatgggagtagacacatgtctacttcattccccactgtatacccagcccctagaacaatgcctgaatgcagtcagggctcagaaatcacaaagacttcttaccttactcattcttctcagcggctctggagatatcttacctcttcttccaaccagaac

SEQ ID NO: 806261 - DNA, 630 bp, Homo sapiens
aagatcctacaattatgtgcttccccacggtcgagatgtcagggattagactcataaaaggcaaatcttagccaattggatgaatatcaagaatagagtacaattcccaaattagagagtctataaaataccgtctatttaccacctttttttaccctccgtgatcttatagcctatttgcctctttttctagattgccttacttaattctctggcgggaatgaggcagatagataaaagaaaagcaattgatatgcatgaatttaatctcacaaacggagtattttgtttatcaaagcagaaaagatacccttagggataactttattcacaataccatgagtaaagtaaatttcaagacaacatttgagggtaaataaactattctaaaaggtctgtcaagaaccattatccttgaaaatgttagcaataaataacataggtttcaaggaagttctacaatagggtaaagcaaatatrttaaactaattttcattttggtaaagaaataatattttgagaaatattaatgtaacttgggtttgaaaaatgctgtatcaaatgtgagatttttttaatctcatggacagtaaaatgctattctctgaaacagatgaaaatatgcttttt

SEQ ID NO: 806262 - DNA, 606 bp, Homo sapiens
atattgtcctctatatgtaatacatgtgtactaaatatttattaaatatatatttatttaatagataaattactgcatcctcccattctgtcaatttctgggaaactccgaaattaacccctcatctttaaaaagctacctttataatttttgaaaggatatgcacaagtataaatatgtgtgtatatgaattcaatacatgcacrgagtttcaaaaatcaaatcatacagaatggctcaaaggcaaattattagttttcttagttgcttttcttaaagcttatccttgttcttcaaaaccattcgtatttaaatgctttggtttatagtggctaaataatatgttgatattacttgtgtatgatttatcaggtttggcttctcatcttattctattcacatataaatatttacattattattttggatatttaaaaccatctttgaaagttgatattatatttaaatattttccatcaactatagacagaatctagaggaatagatttttaagaggagaatagcagctcccctaattttgctttcacttcttcacacactttcatcccaacttctgtcaagtagaaatttcattgtcaagtttga

SEQ ID NO: 806263 - DNA, 603 bp, Homo sapiens
aatgtacttaaatcttccattcctctctacaagaggattgccagaattaaaagataatgatcttcagcattacataatagcacaaaatgcaagtaaaaaagaaacaaaaactttaagaagaaaaaggctaataaaacagttgtgatacaaaaattaaagaactagtcaatttgttaaggaagccagtgagtccaataawaagggtaagatagaataatagaagatgctaagaactgacattaaggtggatattaagaaggaatgatattaaaaatatcgtcaaaacagcgtatgttctttctcttaataaaaaaaatcgatcaatcaatcaattagaaatccaggaagtatcaaaaatatataacatattacaaaagcccaggtatgaagttaattatacagtcgggtgattgtcatgagcaacttgtgaattgtaacgagggacaaagaatcaatttcaacatcgccctttaaacggcaaaggcactgttaaatttgaaccatagggaagaaaatgtgcttgttgtctcagtacttgttctatggggcatgtttatgacattacagtaagagaggagttcttggtctttttccctctaatgc

SEQ ID NO: 806264 - DNA, 603 bp, Homo sapiens
aatgtacttaaatcttccattcctctctacaagaggattgccagaattaaaagataatgatcttcagcattacataatagcacaaaatgcaagtaaaaaagaaacaaaaactttaagaagaaaaaggctaataaaacagttgtgatacaaaaattaaagaactagtcaatttgttaaggaagccagtgagtccaataaaaagggtaagatagaataatagaagatgctaagaactgacattaaggtggatattaagaaggaatgatattaaaaatatcgtcaaaacagcgtrtgttctttctcttaataaaaaaaatcgatcaatcaatcaattagaaatccaggaagtatcaaaaatatataacatattacaaaagcccaggtatgaagttaattatacagtcgggtgattgtcatgagcaacttgtgaattgtaacgagggacaaagaatcaatttcaacatcgccctttaaacggcaaaggcactgttaaatttgaaccatagggaagaaaatgtgcttgttgtctcagtacttgttctatggggcatgtttatgacattacagtaagagaggagttcttggtctttttccctctaatgc

SEQ ID NO: 806265 - DNA, 603 bp, Homo sapiens
aatgtacttaaatcttccattcctctctacaagaggattgccagaattaaaagataatgatcttcagcattacataatagcacaaaatgcaagtaaaaaagaaacaaaaactttaagaagaaaaaggctaataaaacagttgtgatacaaaaattaaagaactagtcaatttgttaaggaagccagtgagtccaataaaaagggtaagatagaataatagaagatgctaagaactgacattaaggtggatattaagaaggaatgatattaaaaatatcgtcaaaacagcgtatgttctttctcttaataaaaaaaatcratcaatcaatcaattagaaatccaggaagtatcaaaaatatataacatattacaaaagcccaggtatgaagttaattatacagtcgggtgattgtcatgagcaacttgtgaattgtaacgagggacaaagaatcaatttcaacatcgccctttaaacggcaaaggcactgttaaatttgaaccatagggaagaaaatgtgcttgttgtctcagtacttgttctatggggcatgtttatgacattacagtaagagaggagttcttggtctttttccctctaatgc

SEQ ID NO: 806266 - DNA, 443 bp, Homo sapiens
gatgctggaggccactactatggactgaatgtgtctccccaaaattcatatgtcgaaatcctaatgtacaatgtaatagtaatttgagatgggcctttgggaggaatttgatcatgagaggagattccttatgatgagataagtgcccttatttttttaaaaaggacagaaaacagcttgcttcttcttctctgcctctctctctctgtttctctctctctctctgtttctctctctctgtttctctctctctctctgtttctctctctctctctgtttctctctctctctcactctctctcaytctctctctgtcccacatgagaagacagtgggaagatagccacctatggagtggaggagtaccctcaccaaaactgatctcagatgagactggaaccctgatctcaaactgccatcatccagagctatgagaaatgttt

SEQ ID NO: 806267 - DNA, 591 bp, Homo sapiens
aacaataccatatactctccctagcactttccatgaggcgacccaaagtggtaacaattaacagttgctgtgtatgaaacggcctcgctcaggaggaaacacggcccctcagatgaactggtaagtcaaaactgtgaaaggtctcaatttcagatttgaccataattacaagactggyataccacaatttcacatgtgtatactgagaaaaggcatcagatccctggatcagagacacaggtgtttttttggtaacaatagaagccacagctggcttctcttcatcacttccaaaacccccacagagtgacacaaattgcagctatatgttcacccgtgcatgcaggaggtcatatcacagaattagaaccccaaaattaagagaatctgatttttcatcagagtttctggtgaccaatctcttccttagagacagattacgcatgttaaaccaagtttagactaaaactgcctccttacatattttaagtttgaacgaaaggtttttgtgtacgtagtgaacaataacaagtggagctgtggtaaacagaccgtagcctacacttgtgccaatcactgagttttggccag

SEQ ID NO: 806268 - DNA, 591 bp, Homo sapiens
aacaataccatatactctccctagcactttccatgaggcgacccaaagtggtaacaattaacagttgctgtgtatgaaacggcctcgctcaggaggaaacacggcccctcagatgaactggtaagtcaaaactgtgaaaggtctcaatttcagatttgaccataattacaagactggcataccacaatttcacatgtgtatactgagaaaaggcatcagatccctggatcagagacacaggtgtttttttggtaacaatagaagccacagctggcttctcttcatcacttccaaaacccccacagagtgacacaaattgcagctatatgttcacccgtgcatgcaggaggtcatatcacagaattagaaccccaaaattaagagaatctgatttttcrtcagagtttctggtgaccaatctcttccttagagacagattacgcatgttaaaccaagtttagactaaaactgcctccttacatattttaagtttgaacgaaaggtttttgtgtacgtagtgaacaataacaagtggagctgtggtaaacagaccgtagcctacacttgtgccaatcactgagttttggccag

SEQ ID NO: 806269 - DNA, 650 bp, Homo sapiens
tctgttgttagtttgatgggctttgctttatagataacctggcctttctagctgtcctttctctctggctgcacttaacgttttttccttcattttgaccttgaagaatctagtgattatgtgtcttagggttaatcttcttgtggagtatcttagtggtattctctgtatttcctgaatttgaatgttggcctgtcttgctaggttgaggaagttctcctggatgatatcctgaagtgttttttcccacttggttccattctctctgtctctttcaggtactccaaatcaattgtacgtttagtctttttacatcatcccatgtttctagaaggttttgttcattactatccatttgttttactctaatcttgcttgcatgctttatttccagcaagattgtcttcaaactctgatattctttattctgcttgattgwtttggctattgatacttgggtattcttctggaagttcttgtgctgtgtttttcagctccatgagatcatttatgttcctctgtaaactggttattctagttagcagctcttgtaaccttttatgaaggttcttagcttctttgcattgggttacaacatgctcctttagctcagcagaatttgttattacccacattctgaagcctacttc

SEQ ID NO: 806270 - DNA, 573 bp, Homo sapiens
actgaatagtagtgaccaaaacgttgatagaaatatggacagtaaaggtcaggctcaaaagttttcagatgaaaatgaagaagtcattgggaactggagtaaagaacacccatgttatgcccaagcaaagaacttggctgcattgtgtccatggcttaggggtttgtagaaaggtaaacttaacagtgatgacctagggtaaatggtggaaaaatctgtaaacagcamatcattgctgtagcaatgatgtgctgtagctgcttcgaacagcctatgatcaaatacaggagcaaggaaatgccttaaagttggaacttgtaattaaaagggaagcagagcattaaaagtttgggaaatttgcagcctggtttggccatatggtagaaagggagaaaacatttttaggagaggaatacaagaagggcgtggagaaaccacttgctagagaggtttgtgtgactaaatgggagtcaactgctaatagtcaagacaatgggaaaaaggcctcaaaggcatttcagacatctctgggtcagccccctcccattacaggccctaaggcctagcagaaca

SEQ ID NO: 806271 - DNA, 790 bp, Homo sapiens
gctatttatgagccaggaagaagtgtgggtggggggctttcacacgacaacgtatctgctgaaatctggattttggacttctcagcctctggaaatgtgagaaataaatttgtattacttataagccacccagtttatggtgttactgttttagcagcctgaacagactaagtttctaactataacaatagttatattgttagttgggcaaatagttggattcatctattgtttcttgtagttctttcagttcttgcattctgttgttaaatgcagacatgctaagtattatttatctttaagagagtttatttctttatcactgtttaacactcctttttatctttaatactctcttgttctgaagtcagctgtgtcttaaatcaatgtagttgtttcagctttcttttagttattgttagcatggtgtatctttctccattcatttaattttaatttctatgggtcattatatttacagtggatttcctgtaggcaatatatagttgggccattttattttttgtccactctgacaatctttttattttgtgtgtttagaccattaacatttaaagtgattrttaatatagttgcattaacatctaccatgtttgtaactgatattcattgcatttgttctgtttctttcctgccacactatttttctgccttatatgactttaattgagcattatatatgatttcattttatttcttctcttagcatgtcaattgtactttaaaatactctgctaattaaagtattaaaatgctttactctattgtt

SEQ ID NO: 806272 - DNA, 614 bp, Homo sapiens
atgtgtatatagtgatctgtaatgatcactatacatggcacgtgtcacaacatggctgtgtacttcataaatatgtaagattactatatgttaaattaaaaatagatttaaaaactgtttggatgttcaaaatgaaagaaacactacaatgccttcagaggtggatctttcacagttctattctcaatacaaataaaaactgggactttttcagttaagagcacgcaaggcaaccaaagacaaaacaggatcatgcaaatacattgagatacctgccactgtttaatacacaccagaatacatagaaaagctcattgttagtccatatgttctttcttgaagtaaactgaaatactatttgaattagctcagcagaaagaagaacaaattttaatgataacgagctattttccaaaaatgagactaagaaagmagtaaataataatttactgcatatcctataaatgtgcgcaattattatgtaccaataaaaaaatgtttgaaaaagaaaaatagcagattgctcaaaattaaggaaacaacataatgccttcagggaacgtaataaggggatcttgtttctacaaggactccctttagatcagggtttctca

SEQ ID NO: 806273 - DNA, 499 bp, Homo sapiens
tccttaaacctctatatctgatctctcttacatttttctactgtggttgtccatctatctgtttgtgtagcagtgtctctatttgtgtctctttgttttcttttagttccatatctttatgttattattatgaccatcattatcatcttagtcataactaccattaataaaccaataattgtgctagaccccttatatatatatattaaaattgatcttcgacayatcactgcaagatatatgtatatgcaggtgtgagtctgagtgtatataaaataaacctttttagatgagataccatgctcaaggagattaaacacattgctcatgatcacgctgctaaatatctactagaatatatctcacagtggctagaaaaaaatgggcctactagggctgtgattctcaaattttaactgtgcatgcaaagaatctggggatctttttaaaatgcagattctgatgaaacgagttcaggtggttgcctcagatactgcat

SEQ ID NO: 806274 - DNA, 640 bp, Homo sapiens
actgaactttccccactttcacttaacaaaataaatctacatgatctctgtttatgtctttaaccctagatcctactacactattctcttcatctctattgtttctttcttttttattttattttatttttgagagagagttttgctctgttgcccaggctggagtgcaatggtgcgatctcagctcattgcaacctccacctcccaggttcaagcaattctcctgcctcagcatcctgagtagctggaattacaggagccccccactatgccttgatatatatatattttttgtatttttagtagacacagggttttaccacgttggccaggctgatctctaactcctgacctaaggtgatccgcctgccttgcctcccaaagtggtgggattacaggtgtgagccactgcgcctggactctgtattgtttcttgattgtctctcttgaatactctccctcacagaataggaacaactgttttggacccctcctcttagatatstcttcttgttttaattgctcattttattaaaaaatagttttagtcaacattctcattataattttcaataatacatacttgggttttaaaatgttgttatacatcttccacagtagaccaaaacgctcataagag

SEQ ID NO: 806275 - DNA, 573 bp, Homo sapiens
aagtctaggccaaaactgattgtttttaaccatataggtcctagtaaatacacattttttaaaaaatctgtactctcctacaatcccagttgcctccagacacttaggttatatgatctggagcaattatcccataagctgtagtaaattatcacacttaaacatgaaaagttcaactcctctagggaatggtgtatgtataacctggtctttggaagtttcccattcaatttagcactaagctagttctctagcttctagtacattatgaaaacactgcatgagttaygtaacacatcctttgattatttgtagttaaaaaaattcttcaacactttattcaaaccaggtcacaagtctcattattctggccaaactccaaattaaataatgacattctcttctacatatcaacccttctttcacagaagagaaaaatagtaacttcaatccacagtctcacgggattttagaaagcaattatatgtccaaatacaagtcaaaagtagaaactagattcacaacccaaaaacatctcacaaggtaaggaataactatgtgtgcaaatagagg

SEQ ID NO: 806276 - DNA, 573 bp, Homo sapiens
aagtctaggccaaaactgattgtttttaaccatataggtcctagtaaatacacattttttaaaaaatctgtactctcctacaatcccagttgcctccagacacttaggttatatgatctggagcaattatcccataagctgtagtaaattatcacacttaaacatgaaaagttcaactcctctagggaatggtgtatgtataacctggtctttggaagtttcccattcaatttagcactaagctagttctctagcttctagtacattatgaaaacactgcatgagttacgtaacacatcctttgaytatttgtagttaaaaaaattcttcaacactttattcaaaccaggtcacaagtctcattattctggccaaactccaaattaaataatgacattctcttctacatatcaacccttctttcacagaagagaaaaatagtaacttcaatccacagtctcacgggattttagaaagcaattatatgtccaaatacaagtcaaaagtagaaactagattcacaacccaaaaacatctcacaaggtaaggaataactatgtgtgcaaatagagg

SEQ ID NO: 806277 - DNA, 552 bp, Homo sapiens
cagtttcttgattgtaatattgtactcaacataggatatgaccattgtttgaaacagagtcactggtctagagatctctctgtatgatttcttacaactgcatgtgaatccacaattacataaaaggttaaaaaaaaatatcacggccgggcgcggtggctcacgcctgtgatcccagcactttgggaggccgaggcgggcagattacgaggtcaggagatcgagaccatcttggctaacatggtgaaaccccgtctctactaaaaatacaaaaaattagccaggcgtggtggtgggtgcctgtattcccagctactctggaggctgaggcaggagaatggcatgaacccaggargcggagcttgcagtgagccgagattgcactgctgcacttcagcctgggcaacagagcgagactctgtcttaaaaaaaaaaaaaaatcactggcccagagcaaagctagagtcaatatgcttgacagcgttctgtccttgggcctttccttagtaaacatttataactaaagtgaatgaatatttcgaagacaaactc

SEQ ID NO: 806278 - DNA, 620 bp, Homo sapiens
aatgaaaatgagtatatggctttttagtctcgagaaacctcacccaacaggttacaacaaacatgcaccaatcatttatttactcttcaattacagataaaaatacaagaaccaggtcatgttgtagctttgggactttttctaggattaaaactaaagttcacaccttcctgggtataaggaaaggaaagtgactaatgtacaggtgggaaggatcaccatttaaaatgtatcaaaaacgtttaagccttttagccacatcttaacagaccttgcctatgtctgctttgtgaagagagaggatcctcaggcttgacaacacaataaatcccgcattcttgtctcataagcaggacagaactcagtaccatsctaagattgctttcaaagagtcctgcctaaccaaacacatcctcatgcctctggtttctcggctctcctatctccccagttacaggtttggttgaagtttcaggaagtgaaaattcgatcccattggcagctctcccagctcagaagccctctgaaaggagtgaagaatcaatactcaaaacccacacttgctattcattcacgatccctaacaaggaagccagggaaggaaggaacaccgggagcca

SEQ ID NO: 806279 - DNA, 510 bp, Homo sapiens
accaagtcctgtttcagctgattgagtggaacctgtggtcatgtggtacaagtcctggtctcaatgatgctccttatctggctgcagaaaggccaactgaggcaaccatagcccagaagactggtactcctgagaggcagatgaagtggtggtctttgatatcgagcctgggatgccctgggcacatgaggtatttccaaaggcatgggagttttagggaataaattcccagattgtcagactccataagtaccgtttacaatggattaccttttataaccatcccaatcctacctgacaaaagaggtgggcrgattacgaggtcaggaaattgagaccatcctggctaacactgtgagaccccatctctactaaataaatacaaaaaattagccgggtctggtggcgtgcacctgtagtcccagctacttgggagcctgaggcaggataatcgcttgaacccgggaggtggaggttgcagtgagccaagattgcgccactgctctccag

SEQ ID NO: 806280 - DNA, 552 bp, Homo sapiens
agagcagggtgacaggcaggggtgatgagttttgttttaacaacctgtcccttcaaccctcatggtactgacaaagatcacatggctctcgggggagattcctgcgaggggaagcaaggagagcatccttacatattattgatccaggcagcagatttgcagcaaagctctgtgctttattcatctgttaaaatagttaaaatagtcaaaacataggaaaaggattctgggaagtcagaatcggcttcagagcacacccctcctgcacttgcccggttctcagmcttgggaatgggactgggtgggtgggtactctcgggtgttccgcgggtttgggtcttacttgtacactttgcttgatttcaaggaggtgcaggagaacagctctgtgataccatttaacttgttgacattacttttatttgaaggaacgtatattagaggtaagttggtgcatgctattttctgtaacatttattttgagtcataggagaaagattttcagttacttttatccaagattattagacactgtaaaatttcatatttagg

SEQ ID NO: 806281 - DNA, 627 bp, Homo sapiens
tgtctgtttccttttatatgaataatcaatatggaaactggataaaaccaaactgaagccggtctaggtctgtcaggttacagatccacacgccctctgacctagcagttctactcctggaagcgtttcctactgatatgctcacacacttggagcagtgtgtgttacagcaaaaggatggagaaaaccttaaggtccaccaagaagagacaggggcaataatggtgcrtccatgcaaaggaccaactgtgccatggtgggaaaaaacagggggctcatttccctaaggaatgctgtccaggatggtatccagtgcaggagagtcaactggctaggaaccactgggaaatagggtcatggtaacgcagaaatacctgtgcttctttatgcaaaaactctctggaaagagaagcaactcagatgagttgccccaagaaatgtgattggctggtaaacaggtgggcatgtatgggagtgatgcgtgtgtgtgtgtgtgtgtgtgtgtgtgtgtgtgtgtctggggtgtatggggggatgcggggtaggtaagtaagcagagcaaggaagaagagatttttcacagcatacccttttgtacttccttgattttgacctaataatacttta

SEQ ID NO: 806282 - DNA, 627 bp, Homo sapiens
tgtctgtttccttttatatgaataatcaatatggaaactggataaaaccaaactgaagccggtctaggtctgtcaggttacagatccacacgccctctgacctagcagttctactcctggaagcgtttcctactgatatgctcacacacttggagcagtgtgtgttacagcaaaaggatggagaaaaccttaaggtccaccaagaagagacaggggcaataatggtgcgtccatgcaaaggaccaactgtgccatggtgggaaaaaacagggggctcatttccctaaggaatgctgtccaggatggtatccagtgcaggagagtcaactggctaggaaccactgggaaatagggtcatggtaacgcagaaatacctgtgcttctttatgcaaaaactctctggaaagagaagcaactcagaygagttgccccaagaaatgtgattggctggtaaacaggtgggcatgtatgggagtgatgcgtgtgtgtgtgtgtgtgtgtgtgtgtgtgtgtgtgtctggggtgtatggggggatgcggggtaggtaagtaagcagagcaaggaagaagagatttttcacagcatacccttttgtacttccttgattttgacctaataatacttta

SEQ ID NO: 806283 - DNA, 661 bp, Homo sapiens
agaaaagaagaagaaatcctgggattttggggctttccagtccagctcggcaacagactcttccatggaggagatctttcagcacctgatggcctatcaccaggtacgtcttcgcgtggttcaggatgccagcttccattctttccttttcttctgaaygcctctctctttagtcttgctctctctgtaggtgacgttggtcagctctgtcgtttacctccttgttagcctcctgtattagtccattttcatgctgctgataaagacatacctgagactgggcaatttacaaaagaaagaggtttaacggacttacagttccacatggctggggaggccttctaccatcacggcagaaggcaatgggcacttcttacctggcggcggtggcaagagagagaatgagagccaagtgaaaggggtttccccttatcaaaccatcagatctcatgagagttactcactaccatgagaacagtattggagaaactgcccccatgattcagttatctccccctgagtccctcccacaacaggtgggaattatgggagtacaattcaagatgagatttgggtggggacacagagccaaaccatatcgccttcgtagaagcagctcaacctcagacagagagatggtggcttagagccagtgacatct

SEQ ID NO: 806284 - DNA, 543 bp, Homo sapiens
ctgcagaaatttgcataagtaatgaggagctgaatgttaatccccaagacaatggagaaagtgtctccagggcatgtcagaggttttcacagaagcccctcccataacaggcccagaggcctaggaagaaaaagtggtttcatgggccaggcccagggtccttgtgctgtrtgcagcctagagacttgatgccctgcatcctagccactccagccatggctgaaaggggccaaaatagagcttgggctgtggcttcagaggttgcaagccttaagccttggcagcttccatgtgatgttgagcctgccagtgcacagaagtcaaggattgagatttgggaacttctgcctagatttcagaagatgtatggaaacgcatagatgcccaggcagaagtttgctgcagggtggggcccttatggagaacctctgctagggcagtgcagaagggaaatgtggggttggagcccctacacagtccctactggggcactgcctagtggagctgtgagaagagggccaccattctccagaccccagaatg

SEQ ID NO: 806285 - DNA, 625 bp, Homo sapiens
tctgtttccttttatatgaataatcaatatggaaactggataaaaccaaactgaagccggtctaggtctgtcaggttacagatccacacgccctctgacctagcagttctactcctggaagcgtttcctactgatatgctcacacacttggagcagtgtgtgttacagcaaaaggatggagaaaaccttaaggtccaccaagaagagacaggggcaataatggtgcrtccatgcaaaggaccaactgtgccatggtgggaaaaaacagggggctcatttccctaaggaatgctgtccaggatggtatccagtgcaggagagtcaactggctaggaaccactgggaaatagggtcatggtaacgcagaaatacctgtgcttctttatgcaaaaactctctggaaagagaagcaactcagatgagttgccccaagaaatgtgattggctggtaaacaggtgggcatgtatgggagtgatgcgtgtgtgtgtgtgtgtgtgtgtgtgtgtgtgtgtgtctggggtgtatggggggatgcggggtaggtaagtaagcagagcaaggaagaagagatttttcacagcatacccttttgtacttccttgattttgacctaataatacttta

SEQ ID NO: 806286 - DNA, 625 bp, Homo sapiens
tctgtttccttttatatgaataatcaatatggaaactggataaaaccaaactgaagccggtctaggtctgtcaggttacagatccacacgccctctgacctagcagttctactcctggaagcgtttcctactgatatgctcacacacttggagcagtgtgtgttacagcaaaaggatggagaaaaccttaaggtccaccaagaagagacaggggcaataatggtgcgtccatgcaaaggaccaactgtgccatggtgggaaaaaacagggggctcatttccctaaggaatgctgtccaggatggtatccagtgcaggagagtcaactggctaggaaccactgggaaatagggtcatggtaacgcagaaatacctgtgcttctttatgcaaaaactctctggaaagagaagcaactcagaygagttgccccaagaaatgtgattggctggtaaacaggtgggcatgtatgggagtgatgcgtgtgtgtgtgtgtgtgtgtgtgtgtgtgtgtgtgtctggggtgtatggggggatgcggggtaggtaagtaagcagagcaaggaagaagagatttttcacagcatacccttttgtacttccttgattttgacctaataatacttta

SEQ ID NO: 806287 - DNA, 617 bp, Homo sapiens
aatgaaaatgagtatatggctttttagtctcgagaaacctcacccaacaggttacaacaaacatgcaccaatcatttatttactcttcaattacagataaaaatacaagaaccaggtcatgttgtagctttgggactttttctaggattaaaactaaagttcacaccttcctgggtataaggaaaggaaagtgactaatgtacaggtgggaaggatcaccatttaaaatgtatcaaaaacgtttaagccttttagccacatcttaacagaccttgcctatgtctgctttgtgaagagagaggatcctcaggcttgacaacacaataaatcccgcattcttgtctcataagcaggacagaactcagtaccatsctaagattgctttcaaagagtcctgcctaaccaaacacatcctcatgcctctggtttctcggctgtcctatctccccagttacaggtttggttgaagtttcaggaagtgaaaattcgatcccattggcagctctcccagctcagaagccctctgaaaggagtgaagaatcaatactcaaaacccacacttgctattcattcacgatccctaacaaggaagccagggaaggaaggaacaccgggag

SEQ ID NO: 806288 - DNA, 631 bp, Homo sapiens
gttttaacaagtaatttatcccctggtgtgcaggtccctcccctgcttcctcattgctgctagtcattagcacaccgggggtcacaatcttcccagacgtcgcctattggttgttgggcagggacttcaggtgttttttttttttttttgtaggattgtactgctgcactttgttgcagcccacaatgcattgcaatcgtagttagctcaagggctcttcaagtatttaatttatgaccgaagtagccgggcaggctggtaagaacagacaaagtgagctattttgaagggtagtaaactttcgtcttaractaaacttttttgcttcgggtgacagcaactgagggcagaggcagcagacaagcaggcgttgacgatccaagcaggggcctagtgtatcctgtttcttctgtagtttgctgacctaagctgattcaaggcgctttgtcttggaaatggagcaccgtagacatgatctccttcagcaggaagtgtcacacatggattaacacccctgactccaggtctgactgtttggcgtcaaattctggctgctgtgattttaggtaaatcatttcgccttgctgcccctcagtttcctcatctgtaacatgggaggaatgagactgcc

SEQ ID NO: 806289 - DNA, 621 bp, Homo sapiens
atcccaggtcctctccacccgaagccatccttactgcctcctctggaaatcccttctgccctggagggtccctctcactgcgtgctccctcctaagcccctttgctgtctgcacctcccctccagagcctccacagggggtaccccaagctggctacctagacctccgtccctctacatgcagcacttacctgccacccccaactcccaagccggcatcctggcggcccctcgccctgccaggycccggacggcagctccacctgatgcctggaaccaggagcagccaggctctttgagttttgccagtatccccatgaaaatatttcctaaaatgccactccctgcatctcagctgacagtataaactgttcatccctgttttaaacagctgcaagggacatcatttccagcatactgtaaatactgagttaaaataaaactgccatgtcactcttgtaaatatatctattagaatctaggcacggtgacgtgacagccatggccatctatttacaacgcacacgaacaagctcttcttaaggccagaaagtatacacttcttcctctaggaactcctatttctgttactacaaaatgtaaacccaacgttatatattca

SEQ ID NO: 806290 - DNA, 707 bp, Homo sapiens
tacataggcaactagttttgaatgcctgttacagcagggcgtgactcgcagtttccactgtggacagtcacagtgtggagctggggaaggccagtggaggaaagctgtttctaggtcatgattgggaaggagggcctggccttggcagctttctctctagggggatcactgtgctatgtcagccatcctggtgtctagccccctttggtgagtgatctgcattttaaaaataaactttattgacatatacacacatcaccctgtctttgtaggggtgctaaggtcaaaacagcatgtggtcatcccctccagtgtcctgctcagtccccagcaccaggtcctgggygatggagggtgaggtgggtggaagcaaagctgctgtctgtgctcacgtaagggtcatcagctgacctttgtccttgctctgctaggtgggcagtgactgtacgaagccccgggggatacaggaaatgagagcaatgcaggacagtgaagcctgagagccggaggcctggaccgtgccgctgcaagcacgccaattccgcagcctgcagagaagctccttcgtggggaaggcagggcttgagttgggttagaccattcgaagagtgagtgtgaactgctgggcacgaggatgcacactccagaatgaccgagggtggttgagttggattaatttgggcagtggagacgcattggcaaacagt

SEQ ID NO: 806291 - DNA, 744 bp, Homo sapiens
tgtgacccgactcgaccgcctccctcccagaaccaccgtgagccccaggcaagtgccgacgctgttccacctgtggctgagccaggtacctgtcccctctgcatgcacccgggccacccaccggggtggggaatggacagtgaagtccaaggatgacctgatgaaaggggcgctcagagaagaccctgggacttccaggacagaacaggactcgggaaaaacaactcagtgtagtgttctgtgtgcacatttatttctttcaaagattgtttgtgttccagccacatcttctccaaaggaacccacccaagcccgtgtgcaggcttgctgcagggctgtcttcggcgtttaaagtgctactgaggaatacaatcattgtcacgtaagttcatcaccgcactccagcgtcaggccaaacctttccgtggacctggaaaacctgccaytttcttctctttttacaatgcagtttcgacataacattggtagagtaaacaacaaaccacaagcctaaatgatgaatggtgcgctgctgcccagctgctaactgagagaacgaggcagtgtattgtgtttcgaatgcaaacggtcatggacccaagttaacctgagtttgctctgcaggattccgcgggggccttgccctgtgcaggctgctttggtcttcgtgtctaggccggtttggggcagtggggagagggcctggcagcagggtttacgccagccccgaggtctgttttccgt

SEQ ID NO: 806292 - DNA, 744 bp, Homo sapiens
tgtgacccgactcgaccgcctccctcccagaaccaccgtgagccccaggcaagtgccgacgctgttccacctgtggctgagccaggtacctgtcccctctgcatgcacccgggccacccaccggggtggggaatggacagtgaagtccaaggatgacctgatgaaaggggcgctcagagaagaccctgggacttccaggacagaacaggactcgggaaaaacaactcagtgtagtgttctgtgtgcacatttatttctttcaaagattgtttgtgttccagccacatcttctccaaaggaacccacccaagcccgtgtgcaggcttgctgcagggctgtcttcggcgtttaaagtgctactgaggaatacaatcattgtcacgtaagttcatcaccgcactccagcgtcaggccaaacctttccgtggacctggaaaacctgccactttcttctctttttacaatgcagtttcracataacattggtagagtaaacaacaaaccacaagcctaaatgatgaatggtgcgctgctgcccagctgctaactgagagaacgaggcagtgtattgtgtttcgaatgcaaacggtcatggacccaagttaacctgagtttgctctgcaggattccgcgggggccttgccctgtgcaggctgctttggtcttcgtgtctaggccggtttggggcagtggggagagggcctggcagcagggtttacgccagccccgaggtctgttttccgt

SEQ ID NO: 806293 - DNA, 612 bp, Homo sapiens
ggaactgaacgtcattttaaaaaatttccattaatttaatttaaagagacacatgtggccagtcgctgccatattgaaagcacagctatataatgacctaaagacaaaatacggaacatgatatacctccctcctccttygtaacctatttattttcattacaaaggcattaaaaaaaaaaaaaaaagtagagatgaagtcttgctacgttgcccaggctggtgtcgaactcctgagctcaagccatcctcccacctcggccccccaacgtgctgggattacaggtgtgagccgccgcgcccagcctgtaacctattcttttaactgaaaattttgtggatgtctttctgtataactacagagcaacatcatgttggatgggcctctagtattctgctctttgcccttaggagattttatttagccaactctttactaaacaacccttcttaatgtgttggtggtccccactatttcataactatacacaagctgagaggcacattcttacccatatatctttgcacgccgtgtgattatttccttaggaaaactctaattgcctgtcaaatggcatgtgcatttgagaggtgtttttcatttaggtcgacg

SEQ ID NO: 806294 - DNA, 612 bp, Homo sapiens
ggaactgaacgtcattttaaaaaatttccattaatttaatttaaagagacacatgtggccagtcgctgccatattgaaagcacagctatataatgacctaaagacaaaatacggaacatgatatacctccctcctccttcgtaacctatttattttcattacaaaggcattaaaaaaaaaaaaaaaagtagagatgaagtcttgctacgttgcccaggctggtgtcgaactcctgagctcaagccatcctcccacctcggccycccaacgtgctgggattacaggtgtgagccgccgcgcccagcctgtaacctattcttttaactgaaaattttgtggatgtctttctgtataactacagagcaacatcatgttggatgggcctctagtattctgctctttgcccttaggagattttatttagccaactctttactaaacaacccttcttaatgtgttggtggtccccactatttcataactatacacaagctgagaggcacattcttacccatatatctttgcacgccgtgtgattatttccttaggaaaactctaattgcctgtcaaatggcatgtgcatttgagaggtgtttttcatttaggtcgacg

SEQ ID NO: 806295 - DNA, 612 bp, Homo sapiens
ggaactgaacgtcattttaaaaaatttccattaatttaatttaaagagacacatgtggccagtcgctgccatattgaaagcacagctatataatgacctaaagacaaaatacggaacatgatatacctccctcctccttcgtaacctatttattttcattacaaaggcattaaaaaaaaaaaaaaaagtagagatgaagtcttgctacgttgcccaggctggtgtcgaactcctgagctcaagccatcctcccacctcggccccccaacgtgctggsattacaggtgtgagccgccgcgcccagcctgtaacctattcttttaactgaaaattttgtggatgtctttctgtataactacagagcaacatcatgttggatgggcctctagtattctgctctttgcccttaggagattttatttagccaactctttactaaacaacccttcttaatgtgttggtggtccccactatttcataactatacacaagctgagaggcacattcttacccatatatctttgcacgccgtgtgattatttccttaggaaaactctaattgcctgtcaaatggcatgtgcatttgagaggtgtttttcatttaggtcgacg

SEQ ID NO: 806296 - DNA, 612 bp, Homo sapiens
ggaactgaacgtcattttaaaaaatttccattaatttaatttaaagagacacatgtggccagtcgctgccatattgaaagcacagctatataatgacctaaagacaaaatacggaacatgatatacctccctcctccttcgtaacctatttattttcattacaaaggcattaaaaaaaaaaaaaaaagtagagatgaagtcttgctacgttgcccaggctggtgtcgaactcctgagctcaagccatcctcccacctcggccccccaacgtgctgggattacaggtgtgagccgcygcgcccagcctgtaacctattcttttaactgaaaattttgtggatgtctttctgtataactacagagcaacatcatgttggatgggcctctagtattctgctctttgcccttaggagattttatttagccaactctttactaaacaacccttcttaatgtgttggtggtccccactatttcataactatacacaagctgagaggcacattcttacccatatatctttgcacgccgtgtgattatttccttaggaaaactctaattgcctgtcaaatggcatgtgcatttgagaggtgtttttcatttaggtcgacg

SEQ ID NO: 806297 - DNA, 571 bp, Homo sapiens
atgtgtccctgtctccatctcacctcccgactgccagtcagtcttctggagtctccacgacttgtcagggtcaccagtagcctctgtgtgaccaaatcccggagtcatgtatttgtcttcactcattcaatcattcatggtgctgcactcccgacacacactgtgtgcatggttccatcccttaggatacttcagtaagcagaacagaaattcctgccctcatggagtctccgtgcttgtggacatccacaggtgttgagcccagagcagtccctcatttacctcctgcaggaagcgcctgctccgggggcacccagccccggaccatctctgctgtccctttcaccacctctagctgcactgttctctgccttccctcctgcccaggggccttgtgtgggctcttttctccacctgggayatccttcctctttgttcttcttgtgtctccttctttcattcagttcttcccatcctgatcctgaatttgactcattgtagctcttaccaatatctgctgtgttcttgtgtctttgtttactgtcagttaccccacccaaatatcagttcc

SEQ ID NO: 806298 - DNA, 457 bp, Homo sapiens
aacaaacctgcatgttctgcactcgtaacccggaactttaagtaaaataaaaaaaattaaattaaaaaagaaaagaaaatattgggctaagtaaaagaaacagatacagaagacccaaaattgtatggctcaatttacatgacacgtccagaatatgcaaattcgtggaaacagaaagcagataagtggttgcttagggcgcagggtgamaaggagattaggaggattgaggaagtgacagctaaaggggcttctttttgggggtgatgaaaatgttataaaatggacggcggggatggtcacacaactccatgctaaaaagtgaattgtacactttaaatgggtgaattgaatagcatgtgcggtatatcgcaataaagccattacaacagaaagaatcaaggaacaaacaaaagtggcagggttgggaggacgggtctggaggtagcagggaggg

SEQ ID NO: 806299 - DNA, 502 bp, Homo sapiens
acggccttctacactctgacgtcttgagaacaagcacacaaatgactgttcattctgtggtagactgaataaaggccccccaagatgtctgcatcctcatccccagatatgtgaccccagaaggcaaaggcacttgggagaggtgactaagtgaaggatcttgagctggagagattttcctggatatccaggtgggccccaaatgtcatcacaagggtccawgcagggaaagaaggagggcaggagggtcattgaaggaagtggagatcagagctggagagaagtttgaagaggctggctgccctctggccttgaagatggaggaggggccacgagccaagggatgcaggcagcgtctaggagccaaaaaagcaggaaatggatcctcccctgaaactccaaaaggaacacggcgctgctgacaccttgattttagacttctgacatcgggaactgcagggtaacatgttattctgcctgggctgctgtaacaaaacaccat

SEQ ID NO: 806300 - DNA, 614 bp, Homo sapiens
ccaaatgaaagtgggggaaggatcgcaaagaagcaagttagttagggctgtgcccagccagcgccagtgccaacgccgagccgcctctgcaggggaaaccgaagcagatgtggtgagataatacatccaaccctgagtgctactctaacctgccagaggcggagggttctcagtgagatgaaagcattacagatgcgttagatctaagggaggggcctgcagakgcgcagctggcagagaaaccagggaggggctgaactgtcagtcgcgaccaccagggatctgaatcagttcaccgacagccttggggacattcaccttgggctccacaacctgtcagaaatgcccccaagcccaaaggcgtcgagagaatggccaggttgtttcagattgacacatatcctaatgtacaagtcagcccacacaccccacgtgcactgagcgtctcttgttgttcaccccaaataaactctgccggaactggggcgggactcgcaggggcggagaaggggggagacgggcagagggcagaagtggatggtgagaagagccaatggaggggccccgtgagagtgagcaaggctgcacccctaaccgacgtcctggggctactg

SEQ ID NO: 806301 - DNA, 598 bp, Homo sapiens
tgagagccagcactgaactctcttctacagcagccttttctttctaaaagctgcagtgaaatgctttcgtagccaaaatcctattctgaactccaatacgtgaaagagctggaaggagccccgagcctaccaccctaagtgctcagaggcccccaagtcctcccrgttcctcagtgcagtttggaagctgctttcctgtaggatgcttggggccagttaccagggtgacctgtgtggttatgccaggccagggtctgagccgttgggatagggcagggactcagggctcagcctactgacacacaggtgatctcttccaggggaggggtgtgtgtgtgtgtgtgtgtgtgtgtgtgtgtgtgtgtgtgtgtgtgtgtgtgtgtgtgtgtgtggtggctgctaattttgagtcaataccagatctgcaatgagtttctgtacagtcagaaggtcctgccttgcacccccactgtggagggatgtgggggtgtgtggctccagcttggtgttggccagggtcactgagacataagggctgtgacctccagagtgcagaagccaccagctcctgggtgccacgaaggggatcctgcaggac

SEQ ID NO: 806302 - DNA, 387 bp, Homo sapiens
ccaccagctcctgggtgccacgaaggggatcctgcaggacccatccttgtggcctgagactgttgtacccaggtgagttagagaaaacgccatactttgagacgaattaagagtcttttattagccggcgaccgagagacggctaacgctaaaaattctctcagccccgaagaaggggctagattttcttttatactttggtttagaaagaggagygggggtctagttaaaacaattttacagaagtaaagtaggcaaaaaagttaaaaggataaatggttacagaaaagtaaacagttccaggtgcaggggctttaagactattacaaggtgatagacacgaggctttgggcgttatcaatcagacgaattcctgggaactgcgga

SEQ ID NO: 806303 - DNA, 387 bp, Homo sapiens
ccaccagctcctgggtgccacgaaggggatcctgcaggacccatccttgtggcctgagactgttgtacccaggtgagttagagaaaacgccatactttgagacgaattaagagtcttttattagccggcgaccgagagacggctaacgctaaaaattctctcagccccgaagaaggggctagattttcttttatactttggtttagaaagaggagcgggggtctagttaaaacaattttacagaartaaagtaggcaaaaaagttaaaaggataaatggttacagaaaagtaaacagttccaggtgcaggggctttaagactattacaaggtgatagacacgaggctttgggcgttatcaatcagacgaattcctgggaactgcgga

SEQ ID NO: 806304 - DNA, 391 bp, Homo sapiens
aggaggccacgtagggacctaaaatgcagtgactgattagcaatgtcggcccggacacaggcgtggcagaggcgcccagccactggcttgccagcccctgctgagggctttctagctggaaggagcagccgagaccagttccctggggagaatattccttagacactgcgtgtgctgtcctgcttcctaacatcccacaccttgtcttctgtttttctcattcgcctaatgtcctgcaagtcgatgrcagcatccagcaccaagtcccacattgagcacaaatctgggggaaattgtcccattttcccagagtcctgatggattaatctgaggcctatgagaaccaagccctgcattcaagcccgggttttgtagccccccgggtggatcc

SEQ ID NO: 806305 - DNA, 632 bp, Homo sapiens
gtgtgctgtagtctgggctttgctggtgacctgggaggattggcttgagttctctgggccccatttcctcattttaagattggagccagtgtctactacactttgctgagttgtttcaaaaatctgttatctcaagaaaataaggacctgagcacaggaaagatgggctgggctggagaagctgcctgcccgacgaagagggggtgggctgatgttgacaatgtctgttgtttcccaacatccccgtgaggttgtgctgttattagcatcctgtgttatagatgggaatccaggrcagaaagggatagacgtcccaggtcacgtggctaggaggtccagggcaagaagggataggtgtcccaggtcacgtggctaggaggtccagggcaggaagggatgtgtcccaggtcacgtggttgggaggtccagggcaggaagggataggcctcccaggtcacatggctgggaggtggccgagctggggctgcatgggatttccgtttggctctggggtcagctctcttagctaccaagcttagagcctttcttacactagtgttcacatgactgatggacccttagaacaatgccccttgcctttccccttcatcagagacccggagaatttgtat

SEQ ID NO: 806306 - DNA, 632 bp, Homo sapiens
gtgtgctgtagtctgggctttgctggtgacctgggaggattggcttgagttctctgggccccatttcctcattttaagattggagccagtgtctactacactttgctgagttgtttcaaaaatctgttatctcaagaaaataaggacctgagcacaggaaagatgggctgggctggagaagctgcctgcccgacgaagagggggtgggctgatgttgacaatgtctgttgtttcccaacatccccgtgaggttgtgctgttattagcatcctgtgttatagatgggaatccagggcagaaagggatagacgtcccaggtcacgtggctaggaggtccagggcaagaagggataggtgtcccaggtcacgtggctaggaggtccagggcaggaagggatgtgtcccaggtcacgtggttgggaggtccagggcaggaagggataggcstcccaggtcacatggctgggaggtggccgagctggggctgcatgggatttccgtttggctctggggtcagctctcttagctaccaagcttagagcctttcttacactagtgttcacatgactgatggacccttagaacaatgccccttgcctttccccttcatcagagacccggagaatttgtat

SEQ ID NO: 806307 - DNA, 596 bp, Homo sapiens
cgagggaaaactggcctcttgtctttctttgttctcccggggctcctgtctttcgaagtgagaactgtctcaccagttctaaagttcctgcagacatctgctctttgaaaaccatcagccaacccacccacccccaccaggtcgacccttgggcagccccactcagagatgttcccagagtcctggtgggttctccacggatggtgcaaaggtgcaggggccccagctgtgctcgtctggctcaggtrtcttcaccagccacccccaccagttggcgtgtcaggagcatcgctcacctgagggcaggcacagccccatggtccccgttccactgggcactctgggagtggctgccttttcattaggggcttgatctgtccctctccagtaaacatagacgccatgtcctcgggttggtgtttcctccactacccctcctcctggggttttctgtattaactttacctttcctgcgtgcaagctgacccaggtgacctcttcctccacacaggtcgccgtgagtcaagctgcctccagaacctcagagcttccctggtgggctcccccgggatccccagtgtctctctgcacctcca

SEQ ID NO: 806308 - DNA, 602 bp, Homo sapiens
agccccaggagggttgtggttctggtttcgtgctcgctcacaaggaagagtaacagatcagtaacgggtcactaacggatgctgctgagtggggcaggggaggtgaggtctgaagcctgcatggaggtgagaacctggagggaagggcgggcaggaaggagaggaaacacggtgcgtggggatgcagagaggtcctggagagatgagggcattcccttctggggatttcatttcctcaatgtcgyctgaccagagagcgggaggtgaggggagtgtggcccactgttgagggtgtgggtgaccagaggggcctggaaacattgcctggcagtgctgtaggctcgtttggagcccttgaggatgactttccggtggggccaatgtgtcctggtttgtggcttcatctaggaggtgtggtggcctccgtaccagctgggaggaagcgggtagctggctctgccagagggaagtgcggaaaaggtaagggtgttggggagctttgggccttagcaagaacgttactggagtgggaggcaaggcatcgcacagggaggacacagaggcaggagagggcagaggggttgggagaaagcagatgtagg

SEQ ID NO: 806309 - DNA, 602 bp, Homo sapiens
agccccaggagggttgtggttctggtttcgtgctcgctcacaaggaagagtaacagatcagtaacgggtcactaacggatgctgctgagtggggcaggggaggtgaggtctgaagcctgcatggaggtgagaacctggagggaagggcgggcaggaaggagaggaaacacggtgcgtggggatgcagagaggtcctggagagatgagggcattcccttctggggatttcatttcctcaatgtcgtctgaccagagagcgggaggtgaggggagtgtggcccactgttgagggtgtgggtgaccagaggggcctggaaacattgcctggcagtgctgtaggctcgtttggagcccttgaggatgactttccggtggggccaatgtgtcctggtttgtggcttsatctaggaggtgtggtggcctccgtaccagctgggaggaagcgggtagctggctctgccagagggaagtgcggaaaaggtaagggtgttggggagctttgggccttagcaagaacgttactggagtgggaggcaaggcatcgcacagggaggacacagaggcaggagagggcagaggggttgggagaaagcagatgtagg

SEQ ID NO: 806310 - DNA, 667 bp, Homo sapiens
ccaatgcacttcactttgcaagcgcttcagcatgcagatcattaattggagttcattatgagtttataattctttttttaaataaaatttacaaacagcaatgtgcataacttttaagtctcatccaaacctctctcacaatgcagaaygttagccgagaatcccctgtgacctttcccaggcactatggaaccactaaggcaaccacagtgttgaattttcttccctggggatgagctttgctggctctagaccttcatataaatggagttgcacagtctgtactcctttgtgtaagatttctctcacatggcatggtgttctgaggatcacactgttgcatgcaatggtaggccaagcctttgatggatgagtattgttccactgtacaaatgcaccatggcttgtcagtttgctctcctggtgacagacacacaagctgagtccaggatttgctttgacttgtcttgggtaaatatctaagagtgggaggttaactcatggggctgttgcatatttaattttataagatcctgctggacatttttccaaagtggctgtgccattttgccttccaacgtgtgagagttctcatcatactacatctttcccaacaattggtgttgccattctttctaattttagccgttctgttgtgatctctttg

SEQ ID NO: 806311 - DNA, 525 bp, Homo sapiens
catgcctgtaatccctgcactttaggaggctgaggtgggtggatcacctgaggtcaggagttcgagaccagactggccaacatggtgaaaccccatctctactaaaaatgcaaaaattagctgggcgtggtggcacacgcctgtgatcccagctactcgggaggctgaggcaggagaatctcttgaacytgggaggtggaggttgcagtgacctgagatcgcgctactgcctgagcgacagagcaagactccatctcaaaaaaaaaaaaaaaaaaaaagattagatggattcttgtcatctaaatgttcttgtgaacatttgtgtatcaatatttgtggatttgctcactgtgaacctttgtgtatttgctcacagatgagtaagactaagaataatagtcttgaaacattcatctgtgagcaaatacacaaaaaacaatactggaataatcagtgaattggttaaaaataaacagctctttttaaaaaattaactttattgagatgtaatttgcacattcaaca

SEQ ID NO: 806312 - DNA, 525 bp, Homo sapiens
catgcctgtaatccctgcactttaggaggctgaggtgggtggatcacctgaggtcaggagttcgagaccagactggccaacatggtgaaaccccatctctactaaaaatgcaaaaattagctgggcgtggtggcacacgcctgtgatcccagctactcgggaggctgaggcaggagaatctcttgaacctgggaggtggaggttgcagtgacctgagatcgcgctactgcctgagcgacagagcaagactccatctcaaaaaaaaaaaaaaaaaaaaagattagatggattcttgtcatctaaatgttcttgtgaacatttgtgtatcaatatttgtggatttgctcactgtgaacmtttgtgtatttgctcacagatgagtaagactaagaataatagtcttgaaacattcatctgtgagcaaatacacaaaaaacaatactggaataatcagtgaattggttaaaaataaacagctctttttaaaaaattaactttattgagatgtaatttgcacattcaaca

SEQ ID NO: 806313 - DNA, 611 bp, Homo sapiens
ttgggagtgaaaaaggctagaagcattgtttcatatatctttattttgttataatttatcctattttttcgaaagagatcttccgcttctttttgttttctgaataatttggtcctaaagtcatgaggtgggctgagcaggatagggttctattctggcatggacagggcagtaccctgagtcagaggaggtgcaggagtttgagcagggtgagggtcgtgctcatggaggggaggcctggtgtagaggtgagagctgggggagattgggaggcatcctttggtgggggcagctgactcagattgtatgtaccccagcaggggcaggtgggtaccccacaggggggctgaacgctgcagctcatgtctattccttatgtctttcagggttcacccagggcccgaaagcttgtgtctggaccattgagaaagacaactggacmgttctatgtggatacgaacatgcaggaggaagtccatgcttcctagcacaggccctagaatcagagtaaacgaggtcagaagtcagctgccccactggctgtgtgccctagacaagccaggggctcctctgtgcctcagttacctcacctggaaaatgggaatcacttt

SEQ ID NO: 806314 - DNA, 589 bp, Homo sapiens
aaactggcctcttgtctttctttgttctcccggggctcctgtctttcgaagtgagaactgtctcaccagttctaaagttcctgcagacatctgctctttgaaaaccatcagccaacccacccacccccaccaggtcgacccttgggcagccccactcagagatgttcccagagtcctggtgggttctccacggatggtgcaaaggtgcaggggccccagctgtgctcgtctggctcaggtrtcttcaccagccacccccaccagttggcgtgtcaggagcatcgctcacctgagggcaggcacagccccatggtccccgttccactgggcactctgggagtggctgccttttcattaggggcttgatctgtccctctccagtaaacatagacgccatgtcctcgggttggtgtttcctccactacccctcctcctggggttttctgtattaactttacctttcctgcgtgcaagctgacccaggtgacctcttcctccacacaggtcgccgtgagtcaagctgcctccagaacctcagagcttccctggtgggctcccccgggatccccagtgtctctctgcacctcca

SEQ ID NO: 806315 - DNA, 641 bp, Homo sapiens
ctaaattttggcttgcaagtagggtgacatctcaggccctttacagttcttgcccctagaaccaggcaaatctggtggaaacaatatgtaaggagtgtccagatgcctggccagaagtataagcctctctgggcagcaggagaattcccactagcactcttccctcctggggagagcaggccatttcacctaaattacctcatcaatcctaaaaatacatgaatgcccaagttgtctttgttaaaaataaggaagawtggaatccagaaaggggagagaagcctgcccagggtcacacaattgcccaggatgagactggcacctgcctctcttctcctagtcttggacatgttgagccgagagctctgtcatggaagagctaaaaagatctttccctgcctgaccgtggagactcacaacttctaccctctggcaataaggagtgtgataatgaaatgatcaatatcagttgaggctgcctaagaaagaagagaatttgaagacaaaaatgatgaaaagacatggaatgcgaggagaaaagagtgtgcagaggagagggtgagcaggagatggaggaagagcagggaaatagaagctgcacttcgcagatgtggaggctgtgaggaacgcagagtgaggga

SEQ ID NO: 806316 - DNA, 641 bp, Homo sapiens
ctaaattttggcttgcaagtagggtgacatctcaggccctttacagttcttgcccctagaaccaggcaaatctggtggaaacaatatgtaaggagtgtccagatgcctggccagaagtataagcctctctgggcagcaggagaattcccactagcactcttccctcctggggagagcaggccatttcacctaaattacctcatcaatcctaaaaatacatgaatgcccaagttgtctttgttaaaaataaggaagaatggaatccagaaaggggagagaagcctgcccagggtcacacaattgcccaggatgagactggcacctgcctctcttctcctagtcttggacatgttgagccgagagctctgtcatggaagagctaaaaagatctttccctgcctgaccgtggagactcacaacttctaccctctggcaataaggagtgtgatwatgaaatgatcaatatcagttgaggctgcctaagaaagaagagaatttgaagacaaaaatgatgaaaagacatggaatgcgaggagaaaagagtgtgcagaggagagggtgagcaggagatggaggaagagcagggaaatagaagctgcacttcgcagatgtggaggctgtgaggaacgcagagtgaggga

SEQ ID NO: 806317 - DNA, 610 bp, Homo sapiens
atcttgaccaagcttgtccaacccacatgaggcccaggacagctttgggcttaagccatcatcccacctcagcctcctaaggctgccctgttcaatttgtgttggctgcccaacacaaattggtaaactttcttaaaatattatgagattttttttttagctcattagctattattagtgttarcgtattttatgtgtggcccagggaggcacaagaatacccctgatattcttgaccttttaaagaccagctcggctggctgactgggggaccctgaaatttgtgaaaatcagaagccatgtattactctgggtgccccattttgggggtttggaggagattggggcctggttgtaatctctttgtgtgcagctcagtgactctgaaagtggcgtttcaagatattcaaactctaacgtgaaaggccccaaagcccgctgagtctctaacactgggaccaactgtcagcagggctgtgcttccacgctgcccggggaaagtcacttgtcctcagagacaatcccttgagtgtctgataacgaaacaaatgggtaggaaacttcagacacagtgtgagcgcgaccctgcttacccaagggaaaggcctgc

SEQ ID NO: 806318 - DNA, 599 bp, Homo sapiens
tccgggggccctgccaccctgagttactctccacctgcttttgccgatcctgtaaattggatatacttttaagggcctagaacagcacctggcacaaaacaggtgctcaaaaatatgtatgtaaaacagtggctcctggcggaggctgccagagctggctgtggccccacagagcaggaagaagcacgccttacctgtctgggcctcggccagggtgccgagggccagcatggacaccaggaccagggcgcagatcaccttgttctccatggtggccattrcctcctctctgctccaaaggcgaccccgagtcagggatgagaggccgcccgagccccggattttatagggcaggctctgtttgcttaaagagcgttagataacatttgcctaaggaggcccggggatcctctgagacaataatctccactgatttttatcaaaggtgtttcctagacatggtcaagctacatggaaggatttgctgatagacagagacgacatgtggtgaggtcatcttggctgagggatctgagattcagaaagtccctctttcccatgggagtctcctccaacctgaccttaatccaggtcctact

SEQ ID NO: 806319 - DNA, 599 bp, Homo sapiens
tccgggggccctgccaccctgagttactctccacctgcttttgccgatcctgtaaattggatatacttttaagggcctagaacagcacctggcacaaaacaggtgctcaaaaatatgtatgtaaaacagtggctcctggcggaggctgccagagctggctgtggccccacagagcaggaagaagcacgccttacctgtctgggcctcggccagggtgccgagggccagcatggacaccaggaccagggcgcagatcaccttgttctccatggtggccattgcctcctctctgctccaaaggcgaccccgagtcagggatgagaggccgccckagccccggattttatagggcaggctctgtttgcttaaagagcgttagataacatttgcctaaggaggcccggggatcctctgagacaataatctccactgatttttatcaaaggtgtttcctagacatggtcaagctacatggaaggatttgctgatagacagagacgacatgtggtgaggtcatcttggctgagggatctgagattcagaaagtccctctttcccatgggagtctcctccaacctgaccttaatccaggtcctact

SEQ ID NO: 806320 - DNA, 629 bp, Homo sapiens
atcttgaccaagcttgtccaacccacatgaggcccaggacagctttgggcttaagccatcatcccacctcagcctcctaaggctgccctgttcaatttgtgttggctgcccaacacaaattggtaaactttcttaaaatattatgagattttttttttagctcattagctattattagtgttarcgtattttatgtgtggcccagggaggcacaagaatacccctgatattcttgaccttttaaagaccagctcggctggctgactgggggaccctgaaatttgtgaaaatcagaagccatgtattactctgggtgccccattttgggggtttggaggagattggggcctggttgtaatctctttgtgtgcagctcagtgactctgaaagtggcgtttcaagatattcaaactctaacgtgaaaggccccaaagcccgctgagtctctaacactgggaccaactgtcagcagggctgtgcttccacgctgcccggggaaagtcacttgtcctcagagacaatcccttgagtgtctgataacgaaacaaatgggtaggaaacttcagacacagtgtgagcgcgaccctgcttacccaagggaaaggcctgcatgtggaagagcttagcct

SEQ ID NO: 806321 - DNA, 594 bp, Homo sapiens
gagcatcgcgagtcctgcatggcacagaagcagggtctgcatggccccccgttgattctgcgccgactccctactttgcaggcactgctgcgccctgcactgctggactcgtttcagcttctcagctccatcttctgtcttctgttttgttgtgctgcaggagaggtttgattatgggggtctggaactcccacacctccgtgggcaacatcttggggtcattgatcgctggctactgggtgtccacatgctggggcctgtccttcgtcgtgcctggagccatcgtggcagccatggggatagtgtgctttctcttcctcattgaacgtaagtgcacgtggccttggagaccacccaccaagggaggcctcggrtttccctgcctgggtgggccttgggggcgagtgtgagagctgcgtggcctagcgccctgtttgcccgtggctgcctcagcgctcttcttaccagggagacttccccggggagccggttctctcctggttttgctggatttcctactctcccctgattctggagtgacccatgtccccattccttcctcccgtcctcctgtcctcccttgccccggcatca

SEQ ID NO: 806322 - DNA, 505 bp, Homo sapiens
cagacttgccatcaaggagccagttatgtaagtaaaggcactggcaggccttatttcaggctgagggtgacgaccacaaccgggcgcatgctgacctcgcttacgtggcatcccctttcggcgggcctgccattgctcttgggtcagggtaggcggggagagtccccatgaggttggctggacaccctggatgtcccctttcccagagtgacckctgggctcagtggggtgtcacccagcccctgacctccactccttttcagacagagctgctacactatgtcacgtagcaggcagtttctcagtggcctcttgaagagacatgtaaagaaagctggggggcggggagcaaatgtgggaaagagaatgaggcgctgctgtcacttggccacgtggcgagcccgcaggtccccgcgggcgttttagaggattgtcttggggacggtcgcacttgccatccctgtagtcacttgtcacttttcctccttgacgtctctgaggatcc

SEQ ID NO: 806323 - DNA, 577 bp, Homo sapiens
cacacatgctgcccctttcctcgtaactattcagcatgtacttcctaaaaacaaggagttccatgacagaccacagtgcatgatcagaatcagaaagtgagcattgaaagaatattagtatctacaattcttattcaaattttacccagttacatttttatagcataagaatatctaagattgtgcattgaattcagatttccttacgtgtactcaagaaaataatgggagtgttggatgaaaagaatgaacattgcaatgtcaacacacatttttaggatggttctgggaaaaggctgtgccagctctgccttcccagtacggaggcgtacaggtggagtatccttatctgaagtacttgggaccagaagtggttatgtctttttattttttcagattgtgggatatttgcattacactggttgagcatctcaaatcccaattctgaaatgccccagtgagcatttcctttgagtgtcagcactcaaaaagttacaaattctrgagattttggatttcaggttttcagatttggaaggctcaacctatactaggccttgtacccgctcccaatctg

SEQ ID NO: 806324 - DNA, 570 bp, Homo sapiens
gttttttgctatctcactagcccatcagtattcaagtattttttttttttaagtattttgttcaaaagtttctggctatctgccaaaagaaggttggtccatattgcttagttcaccattactagaaagagaagctttatactgtcatgctcagtagaaatttaaaaatagctcatcttcttctgacaccaatacatcatagcttcgtattttctcactttgacagcctggttatgctgttctatactcttgaatacaagtgggaaaaaacaatttggtcaaactttttaaaaagtttggatgcttgagcacagactaaccaaaaagtctgaatatgatgcattccaaagattctgwgtccacgggttgtctagagttcagaatgcatgtttccatgcctgacaggccaacccacaggaacccctcatggggctgagctacggaggctacagcagtggcccaaattctgtgttatggaagcagcaggtacagatagaaagagaactacaggagaaagaaatgtgccccctctcatgctagggccctcacgcatgaaggaccccaggagaa

SEQ ID NO: 806325 - DNA, 570 bp, Homo sapiens
gttttttgctatctcactagcccatcagtattcaagtattttttttttttaagtattttgttcaaaagtttctggctatctgccaaaagaaggttggtccatattgcttagttcaccattactagaaagagaagctttatactgtcatgctcagtagaaatttaaaaatagctcatcttcttctgacaccaatacatcatagcttcgtattttctcactttgacagcctggttatgctgttctatactcttgaatacaagtgggaaaaaacaatttggtcaaactttttaaaaagtttggatgcttgagcacagactaaccaaaaagtctgaatatgatgcattccaaagattctgagtccacgggktgtctagagttcagaatgcatgtttccatgcctgacaggccaacccacaggaacccctcatggggctgagctacggaggctacagcagtggcccaaattctgtgttatggaagcagcaggtacagatagaaagagaactacaggagaaagaaatgtgccccctctcatgctagggccctcacgcatgaaggaccccaggagaa

SEQ ID NO: 806326 - DNA, 465 bp, Homo sapiens
accccgggtctagccctgctggcagacctgtgaggtgttcctgaattgggttcagatgtccccccagaccagccctcttacaggcaaagcctgtcccaatgctggcccgtacctgttgtcacaggacctgagctttaggggatttcgcaatttcagatgaggaagctgattaatgagtggctcagaacatggaggacgctgggagcagagccgagcaaggcaacctgcagcccgttcctgccccatcagatgcgcctcggggctyggggctgcacgtagtcacacgcagtacacacacacaccacacatacatcacacaccacacacacactacacacacatcacacaccacacaccacatacacacaccacataccacatacaccacacaccacacacagtacacacacaccacacaccacacacacatcaaacaccacacacactacacgcacaccacacacc

SEQ ID NO: 806327 - DNA, 577 bp, Homo sapiens
caacctgccctctggtcctcctcccccacccagagacccctggctacaccctgcccaagggagctcaccaaagcccacagggtccctgtgatcttgtcacctgggctcccacaggccagcagtgttggaacctggacatctggctccagccttggtggccacccccgaccttgctctgctcctacagctcccggccttccctgccctggccggcccttgctgaatgtccccgctcctaggaagccggatgtgtcgcgtgcaggtgcctctctgcactgtaataactcctcaccaggcacccttggagcccaggatcaagtcactcaccttccaaccctgcccctgcccagagactggcacgagaaccagtaacagttgttgaataatgaacaatggatgcatgcagctcacccgtgagagggcgttgctckgctgggccagggatgaagcttctcccgcgtggctccaccgtctatccctcaagctcctgatgctcccctgggcacctctgcgccatgaggccccgttgaagtcagttggggaggcagtgtggaccgtgagaagggagtcctaagca

SEQ ID NO: 806328 - DNA, 621 bp, Homo sapiens
ttccagacaattcctaagtgatctaaacccctgctgagttcaccaagtggcctgtaaaaccctatgatgattcttgttgatgggagccatcttcccccactagtaggtgtgggcctttcttaaggtgagggccttgagctcgcaccagttcaacctatggctgtatgaaaattttctggctgacatttttacgcttgtaccttcaagaaatataacaaaacatcatttttcttcttcttatcaagtcatagaatgctaaaggcagcgggaatctagggtgatctggtctaccctctcgtttgacaggtgaagcaatgaggtgttgcgaagttaaactgattagttttttttaattttttaaatgaaattaatatacgttaattatagaaaatgcataagaaaaaggggaaatgcataagatagasggaagcaaacatttttaaataaaatttatataaaacttataaccaaagatgactactatttttattttggagtatactctcccaatatgttttcaaaagcaggatcactctctatgactgctttaaaatcttttttttgtactttaacaacagacatgaacatttttcaaaatattatttctaatagcaaaatatc

SEQ ID NO: 806329 - DNA, 566 bp, Homo sapiens
aatcacctccctgtaaaccgggtgccagccaggcccgtgctcacacttcctgaaacaagttcaccatctgtgccaccgatgccagacagagctccctgcgactccgaaacgtgtttctcacttcccacaagggagccactctccaggagcagctcctgagcacaagggctayggctggggctggggcaggctcaagcattcgtgctgagtttcaacagcctgtgtggcgagcagctactgcgggacagcacgtcacctggatgctgagacggcggaacaacatgaaaacatccaccatgccagaaacgtcagcccacagatgctcctagaggaagatgcagcggacacgaagggcggtatgagaacaggagaaacacagacagctgccgccaccaccggctcacacgcagcctccgacatgaaaagaaagtgcttcaagagcttccactccactggtctggcttcccttcaaccagaaagggggcacaggcacccagcaagagcctgtgctggtgacacagaatgttctttctagagcccaggggacagccccatcctctgagctg

SEQ ID NO: 806330 - DNA, 566 bp, Homo sapiens
aatcacctccctgtaaaccgggtgccagccaggcccgtgctcacacttcctgaaacaagttcaccatctgtgccaccgatgccagacagagctccctgcgactccgaaacgtgtttctcacttcccacaagggagccactctccaggagcagctcctgagcacaagggctacggctggggctggggcaggctcaagcaytcgtgctgagtttcaacagcctgtgtggcgagcagctactgcgggacagcacgtcacctggatgctgagacggcggaacaacatgaaaacatccaccatgccagaaacgtcagcccacagatgctcctagaggaagatgcagcggacacgaagggcggtatgagaacaggagaaacacagacagctgccgccaccaccggctcacacgcagcctccgacatgaaaagaaagtgcttcaagagcttccactccactggtctggcttcccttcaaccagaaagggggcacaggcacccagcaagagcctgtgctggtgacacagaatgttctttctagagcccaggggacagccccatcctctgagctg

SEQ ID NO: 806331 - DNA, 566 bp, Homo sapiens
aatcacctccctgtaaaccgggtgccagccaggcccgtgctcacacttcctgaaacaagttcaccatctgtgccaccgatgccagacagagctccctgcgactccgaaacgtgtttctcacttcccacaagggagccactctccaggagcagctcctgagcacaagggctacggctggggctggggcaggctcaagcattcgtgctgagtttcaacagcctgtgtggcgagcagctactgcgggacagcacgtcacctggatgctgagacggcggaacaacatgaaaacatccaccatgccagaaacgtcagcccacagatgctcctagaggaagatgcagcsgacacgaagggcggtatgagaacaggagaaacacagacagctgccgccaccaccggctcacacgcagcctccgacatgaaaagaaagtgcttcaagagcttccactccactggtctggcttcccttcaaccagaaagggggcacaggcacccagcaagagcctgtgctggtgacacagaatgttctttctagagcccaggggacagccccatcctctgagctg

SEQ ID NO: 806332 - DNA, 602 bp, Homo sapiens
cacctcagtgacctcctctcttcgtggctctcaccccacactctgccactgccacattttcctctgcgcccagcctctgcctccacctgaaactttcctggaaatctcaaaatgtaattccaggtcccgctgccctgggcagcacatcccccttcagaataaagggcaccaaccgtcccctggcacctgcctaagccataccccttgctcccctccccagtccctgcagcccaagggtcccctcgaccaccccaagtccccacctgggcttctgctgcacccccgctgccctccctcccgctggccggcagcaccttctccacccgggcccctctgctcacagcgctccccgcccccgtctccccgaggggcggggagccaggacatggccctgaaagcctagccctggccttgacctccccagagcgccctccccaccctccgccctctgccaacccyggcccctgccctggccccgtccttgtcctctgctgctggccttggggtcgcgccccgcagactgggctgtgcgtgggggtcctggcggcctgtgccgtcccacgcctacggggatgggcgaggtccttcttggggcttctctt

SEQ ID NO: 806333 - DNA, 505 bp, Homo sapiens
ccagagttactggcctccccatccccacggatccactccccatccactcttcagatactcagacatatgtgcactaaacccacctagcttaatactatggtacagacccctcaacagaccccaaatccctatcactctccagggcaggctcacagccttgttcctgctaatcacaaggacagaggactgccctggaaaacaggggcaccaacactgtaggtggagggaccagcagcagggcccggctctgtcttccgagcccactgatcggagtctgctayctaactgttcaccacccagcgtgggacagaacagcacccctgcaccctcccagaactgccgtgaggatcagatcagccaacacacatgtggcactgaaagtggtgtctggcactgaactgcggctccgtgtcaaccacttatcacccttatcaccatgttatggtcactattgctacaggcatgcaaggataaggtgtgcattcgacatcttaagaatccagcg

SEQ ID NO: 806334 - DNA, 631 bp, Homo sapiens
aaaatttaaacaaaaaaaaaatcttttggcatttttttttctccctttagggacaaaggatcccttctcatgattatcctaagatctaaggttattctttttgcctcccagggtggatggtggcagatgcccttgcatttacttgatagcagactcctctttgataaaggcctttgataaaggcctcattccgccagtttatcttgccacctcaatgaatcrctagctgtgtcaggaatccctacacaatccatttaaatgactgtggcagggcctcttcccctgtggaagctgaaggtggcacgtccatctccgatgaaatgcgaatggggctctgggcacgcggcggaaggcagagaagaggcagagaaagaagctaataactaattacaccgactccacaattacgactaacgttggggacgaactctttgctaaataaacatttaggtgaaacaaagcttccatttccaatcggcctaactctggtattagcgttggcaggggccatgcaggaggggcagtgagcagtggtggccgcgttgccgacagagggtgagggagctgggcgcgtggtgtgggcgccgaggtcccgagctgaagagctttaaaacctctcaaaacacagaac

SEQ ID NO: 806335 - DNA, 571 bp, Homo sapiens
agttggggagtcctcggactctcactgcagttggtgtgctgagtatcacagtgtaggggcctgtccacttcggtggtagctttttgtgagggtcagtttggccgataaacacgtctgtgcctgcaagacagttatgatgttgagaggataaggaggtgtcggcagggagaggcatggcctcactcactgcttcacgagtgaaagaccgtgtctggattaaggaggggaggtaattcctgagtggctcagagtctgttaagggtggaggctctaagacaaaagttcrgccatacatgatctcaaagggactataaaaaaaggctgcctttggtgttgccagagtctcatgagggcgaaagggagacttctcgtacacgactggcagatttctagagtgagcttggtgagttgggctttaaggacagagttgaccttttcaacttagcctgaagattgaggccggtagggtgtgtggagaacccattttattcccaaggatgtagaggcgccttgggtgatttggctgataaaggcaggcccgttatcggaccggatggatgttgggagtctg

SEQ ID NO: 806336 - DNA, 584 bp, Homo sapiens
tgccttggggcttgaactgctggctctccagtctccggcctgccgcctcaccctgcagatctcagggtttgtcagcctccgtgatctcatgatccagttccttaacacagatctcgttccctctctctccccgctccccacacatcctcttggtcctgcgtctccacaggaccctacaccagctgtcatgaggcacagaggggtgagcaaggtgcgggtgaggaagagccctcggagcccgtcccaactccgccacggctgtcactcctctctttgtaggcagaggtcccttggggtggcccacttagagccccaggaaaagayagggaacacagatgagatcagctccttgcattttggggaaacggaggcacagcaactgttggagaagggagccctgggagccctgagtgccgcaggcttctgtggccctggcagctcggcccagagtcaatggactagggccagccaggggactttccgacaagggccagctggtggtattttaggtcttgggggccgtgccgtctctgttatgagcacgcagccctgacgtgcttgaaagcagccacagacggtggtga

SEQ ID NO: 806337 - DNA, 584 bp, Homo sapiens
tgccttggggcttgaactgctggctctccagtctccggcctgccgcctcaccctgcagatctcagggtttgtcagcctccgtgatctcatgatccagttccttaacacagatctcgttccctctctctccccgctccccacacatcctcttggtcctgcgtctccacaggaccctacaccagctgtcatgaggcacagaggggtgagcaaggtgcgggtgaggaagagccctcggagcccgtcccaactccgccacggctgtcactcctctctttgtaggcagaggtcccttggggtggcccacttagagccccaggaaaagatagggaacacagatgagatcagctccttgcatttyggggaaacggaggcacagcaactgttggagaagggagccctgggagccctgagtgccgcaggcttctgtggccctggcagctcggcccagagtcaatggactagggccagccaggggactttccgacaagggccagctggtggtattttaggtcttgggggccgtgccgtctctgttatgagcacgcagccctgacgtgcttgaaagcagccacagacggtggtga

SEQ ID NO: 806338 - DNA, 584 bp, Homo sapiens
tgccttggggcttgaactgctggctctccagtctccggcctgccgcctcaccctgcagatctcagggtttgtcagcctccgtgatctcatgatccagttccttaacacagatctcgttccctctctctccccgctccccacacatcctcttggtcctgcgtctccacaggaccctacaccagctgtcatgaggcacagaggggtgagcaaggtgcgggtgaggaagagccctcggagcccgtcccaactccgccacggctgtcactcctctctttgtaggcagaggtcccttggggtggcccacttagagccccaggaaaagatagggaacacagatgagatcagctccttgcattttggggaaacggaggcacagcaactgttggagaagggagccctgggagccctgagtgccgcaggcttctgtggycctggcagctcggcccagagtcaatggactagggccagccaggggactttccgacaagggccagctggtggtattttaggtcttgggggccgtgccgtctctgttatgagcacgcagccctgacgtgcttgaaagcagccacagacggtggtga

SEQ ID NO: 806339 - DNA, 584 bp, Homo sapiens
tgccttggggcttgaactgctggctctccagtctccggcctgccgcctcaccctgcagatctcagggtttgtcagcctccgtgatctcatgatccagttccttaacacagatctcgttccctctctctccccgctccccacacatcctcttggtcctgcgtctccacaggaccctacaccagctgtcatgaggcacagaggggtgagcaaggtgcgggtgaggaagagccctcggagcccgtcccaactccgccacggctgtcactcctctctttgtaggcagaggtcccttggggtggcccacttagagccccaggaaaagatagggaacacagatgagatcagctccttgcattttggggaaacggaggcacagcaactgttggagaagggagccctgggagccctgagtgccgcaggcttctgtggccctggcagcycggcccagagtcaatggactagggccagccaggggactttccgacaagggccagctggtggtattttaggtcttgggggccgtgccgtctctgttatgagcacgcagccctgacgtgcttgaaagcagccacagacggtggtga

SEQ ID NO: 806340 - DNA, 645 bp, Homo sapiens
agatgttactcctaatgtcacagggggagtgcgccctgttatattattcataatcttctatgggggggttacttttaaagtcacaggggtgtacaccctgtgatgttattcgtaatatcctaggaagaggttactcctaatatcacatgggttatcctaggaagaggttactcccaatatcacactcctaatatcacaccctgtgatagcattcggaatatccaaaagggacgttacttttaatgtcacatggggtgtacaccttttgagattattcataagatcctagggacatactacttcaaatatcacatgggtgtacacacatggtgtacacattatgtgtgaacacctactgtgatattaytcataatatcctaggaaaatgggactcctaatatcacagtgagtgtacatactgtgatatcatttgtaatatcctaggggaatattactcctaaaccaaaggcgtgtgtaccctcatgatagtattcataatactctagggagatgttactcctaatgtcatatcacaggggtgcacaccctgtgatagtcacagtatatgagagggatattagcactgaagtcacaatgtgtgtacaccttgtgatattattcataatatcctacggggatgttact

SEQ ID NO: 806341 - DNA, 613 bp, Homo sapiens
cttccttccttactgcaagtcctctctccctctccagctcttaaaaatatttagtttttaagagcgagagactgggctgcatgaaatgtgatttgagggacctgggaccagcctgcagcacctcaaaatttctgaaagcaaccaccagacaggtgttgcccctagaaccaggacgaggcgctgtgtgtggtggggaggactctcggggtctggccctctacaggcctgcattctcggacccctctgggtcccatactgtgaaaccctcagttagatcattctcactagcgcctgggggccagctccgaagcagaaatcagagctggtggcctccggcaagccacgtgaccaacctgaccctcggtgtgtctgtctgtaaaacgggcattccaaaacctacttcaagggcaaccrccaagtttagacgtcatcctgtacggagcacagtgagccagccacgcgtgctgcgtacgagttaagggtccctattgtctgacaaatgagcacagagccggccctgctgccttgggggtctctgtgaagggggctgctctgctgcagctccgagatctccttccctagaggggggcagaggagggccaggctcccacga

SEQ ID NO: 806342 - DNA, 361 bp, Homo sapiens
gctactcgggagactgaagcaggagaattgcttgatcccgggaggcggaggttgtggtgggccgagatcgcactattgcacttcagcctgggcaacaagagtgaaactgtctcacacacacacaaaaagttataggtaggacaatttccaggtatggttgttttgcaatcagggcatctcagcgggtccaccaaayaggaggtttgtctctgtgcctggatggtttcattactcattcatgagacaaagagcgggaaggtagagggtctgggtgtggctttgtcacaggtaaacactggtgccggatgggcacggtggctcaagcctataatcttagcactttggaaggtggaggcaggag

SEQ ID NO: 806343 - DNA, 581 bp, Homo sapiens
tgccttggggcttgaactgctggctctccagtctccggcctgccgcctcaccctgcagatctcagggtttgtcagcctccgtgatctcatgatccagttccttaacacagatctcgttccctctctctccccgctccccacacatcctcttggtcctgcgtctccacaggaccctacaccagctgtcatgaggcacagaggggtgagcaaggtgcgggtgaggaagagccctcggagcccgtcccaactccgccacggctgtcactcctctctttgtaggcagaggtcccttggggtggcccacttagagccccaggaaaagayagggaacacagatgagatcagctccttgcattttggggaaacggaggcacagcaactgttggagaagggagccctgggagccctgagtgccgcaggcttctgtggccctggcagctcggcccagagtcaatggactagggccagccaggggactttccgacaagggccagctggtggtattttaggtcttgggggccgtgccgtctctgttatgagcacgcagccctgacgtgcttgaaagcagccacagacggtgg

SEQ ID NO: 806344 - DNA, 581 bp, Homo sapiens
tgccttggggcttgaactgctggctctccagtctccggcctgccgcctcaccctgcagatctcagggtttgtcagcctccgtgatctcatgatccagttccttaacacagatctcgttccctctctctccccgctccccacacatcctcttggtcctgcgtctccacaggaccctacaccagctgtcatgaggcacagaggggtgagcaaggtgcgggtgaggaagagccctcggagcccgtcccaactccgccacggctgtcactcctctctttgtaggcagaggtcccttggggtggcccacttagagccccaggaaaagatagggaacacagatgagatcagctccttgcatttyggggaaacggaggcacagcaactgttggagaagggagccctgggagccctgagtgccgcaggcttctgtggccctggcagctcggcccagagtcaatggactagggccagccaggggactttccgacaagggccagctggtggtattttaggtcttgggggccgtgccgtctctgttatgagcacgcagccctgacgtgcttgaaagcagccacagacggtgg

SEQ ID NO: 806345 - DNA, 581 bp, Homo sapiens
tgccttggggcttgaactgctggctctccagtctccggcctgccgcctcaccctgcagatctcagggtttgtcagcctccgtgatctcatgatccagttccttaacacagatctcgttccctctctctccccgctccccacacatcctcttggtcctgcgtctccacaggaccctacaccagctgtcatgaggcacagaggggtgagcaaggtgcgggtgaggaagagccctcggagcccgtcccaactccgccacggctgtcactcctctctttgtaggcagaggtcccttggggtggcccacttagagccccaggaaaagatagggaacacagatgagatcagctccttgcattttggggaaacggaggcacagcaactgttggagaagggagccctgggagccctgagtgccgcaggcttctgtggycctggcagctcggcccagagtcaatggactagggccagccaggggactttccgacaagggccagctggtggtattttaggtcttgggggccgtgccgtctctgttatgagcacgcagccctgacgtgcttgaaagcagccacagacggtgg

SEQ ID NO: 806346 - DNA, 581 bp, Homo sapiens
tgccttggggcttgaactgctggctctccagtctccggcctgccgcctcaccctgcagatctcagggtttgtcagcctccgtgatctcatgatccagttccttaacacagatctcgttccctctctctccccgctccccacacatcctcttggtcctgcgtctccacaggaccctacaccagctgtcatgaggcacagaggggtgagcaaggtgcgggtgaggaagagccctcggagcccgtcccaactccgccacggctgtcactcctctctttgtaggcagaggtcccttggggtggcccacttagagccccaggaaaagatagggaacacagatgagatcagctccttgcattttggggaaacggaggcacagcaactgttggagaagggagccctgggagccctgagtgccgcaggcttctgtggccctggcagcycggcccagagtcaatggactagggccagccaggggactttccgacaagggccagctggtggtattttaggtcttgggggccgtgccgtctctgttatgagcacgcagccctgacgtgcttgaaagcagccacagacggtgg

SEQ ID NO: 806347 - DNA, 616 bp, Homo sapiens
gcacttccttccttactgcaagtcctctctccctctccagctcttaaaaatatttagtttttaagagcgagagactgggctgcatgaaatgtgatttgagggacctgggaccagcctgcagcacctcaaaatttctgaaagcaaccaccagacaggtgttgcccctagaaccaggacgaggcgctgtgtgtggtggggaggactctcggggtctggccctctacaggcctgcattctcggacccctctgggtcccatactgtgaaaccctcagttagatcattctcactagcgcctgggggccagctccgaagcagaaatcagagctggtggcctccggcaagccacgtgaccaacctgaccctcggtgtgtctgtctgtaaaacgggcattccaaaacctacttcaagggcaaccrccaagtttagacgtcatcctgtacggagcacagtgagccagccacgcgtgctgcgtacgagttaagggtccctattgtctgacaaatgagcacagagccggccctgctgccttgggggtctctgtgaagggggctgctctgctgcagctccgagatctccttccctagaggggggcagaggagggccaggctcccacga

SEQ ID NO: 806348 - DNA, 627 bp, Homo sapiens
gtaaaagttatatattttgatatttttacccattattcattataattgcttttctgtagtcttcacagtgaccactgactgtgtgctactcatatttacagactgtcattcacaaatttataatttctctttagtggacattaaacttattttccatatattatgaaaaattattttagttaaggaatgaaattctgatacataatacaacagatgtgaaccttgaaaacattatgctaagtgaaataagccagacccaaatggaccaatatcatcggattccatgatatatgaagtacccagaataggcaaattcctagagaaataaagtaaaagttaytttatatacatatataaaatatatatattatatataggggtatatatatatatacccctagccaggggctagggagagagggaatgagtaattgtgatttcatgggtatagttgccatttaggatgacaaaaaggctctggaaatggataagcaccatgaatgtatacaataccgctgcattgtacgcttaaaaatggttaaacggttagttttgtgttatgtgtcctttacaacgatttttttaaagaaggtggggaggggtctccccaggtttttagcagcttcc

SEQ ID NO: 806349 - DNA, 564 bp, Homo sapiens
aaaatctgactctggcatttatctctaagaacttgagaaatttacttagtccctctgagatttggtgtattcagaatgaatatgatactaacagtacctacatcacgagtgttacttgaatggagatgtataaagtgcattttaaattcatttgtttccttaacattttcccttcatttcttatcttttcagagtttcttcttcaaggtctcaaggtctgaagcatcccacagaatgatcctactgaataactcccataagctgctggccctatacaaatccttggccaggagcatccctgagtccytgaaggtcagggaacagtgggaggtcagggtatgggagtaggggtgttgaggatgagaaaatagcaggcttgtgattctagtccttcctgactgtttgcagagggttggagctgggaaacaggatgggactgggggcacaggctgcatatcaagagctgctgcttctctttgggaagaggcagctaggtccactctgcaggttttgccactcatttggagaggcagtggagcatggtggctacgaacatggtttgga

SEQ ID NO: 806350 - DNA, 625 bp, Homo sapiens
aattgtttccttaggttgcatattatgcaataatgcaagaaactaaaaacccatacaaatactggcaaagcagcagcaaattactttgtttgtagattacagtattacacatttagaaaatccaagagacttcgacaaaaaaamaaaacaaataatgccccacacaaacaggattttaaacaacagtgggacatatttggaaatcaagactacaaacacaaagcaataacaaaataataatgctcagaaatataacaggaaaataatttaataatcttaacaaatagtataaaatacctaagggtaaacttaatggaaaaatcacttagtttatcacaggaaaacactaacattttaccagatggcatagaatgcaaactgaaaaaaagtgagaaaaagaccatatttcttgatgaaaaaatttagtgtcacaaaaatattaattcttccaaaattgtcgaaaaatgctcctccaataccaatcacaactccaatagttatttgggatagttggtggggaactggaagaattagtttatgttcatatagctattaagtttataagaaataggaaagtaaaaaaagattggtgaagggtgatttgctttattagatattaaaattt

SEQ ID NO: 806351 - DNA, 625 bp, Homo sapiens
aattgtttccttaggttgcatattatgcaataatgcaagaaactaaaaacccatacaaatactggcaaagcagcagcaaattactttgtttgtagattacagtattacacatttagaaaatccaagagacttcgacaaaaaaaaaaaacaaataatgccccacacaaacaggattttaaacaacagtgggacatatttggaaatcaagactacaaacacaaagcaataacaaaataataatgctcagaaatataacaggaaaataatttaataatcttaacaaatagtataaaatacctaagggtaaacttaatggaaaaatcacttagtttatcacaggaaaacactaacattttaccagatggcatagaatgcaaactgaaaaaaagtgagaaaaagaccatatttcttgatgaaaaaatttagtgtcacaaaaatattaattcttccaaaattgtcgaaaaatgstcctccaataccaatcacaactccaatagttatttgggatagttggtggggaactggaagaattagtttatgttcatatagctattaagtttataagaaataggaaagtaaaaaaagattggtgaagggtgatttgctttattagatattaaaattt

SEQ ID NO: 806352 - DNA, 654 bp, Homo sapiens
tttccttttctgcgtaacaatgatgaaaggtagcctaggaaagccatttgtctgagactttactttgataccttgctagtcactaaacaaagagactgattccattctttagtgtagccattgcctcaattcatatatatcagggttatttatttccaataaagtatccatatagattaggtatattctaatgacaattttattaaagtccttcatttatcttccakatagcagattctgtcaaccacatttcataaagagttctgattctaagaggtaagaactgagcctggctttctagttacatgtttactactaaacccgtccttccctactacacttatgcatatttaaagactatactctcccctgcctccagcctggattgtaagttccacaagagcatggctgtgtcttctaacatcaagtctctatgttagaaaagctcctggcatatcataaatgccgaataaacatttgtaagtgaagaaacctattctatggtttcttctacggatatattaagagatggcttgcacaagatagctaggtagcttcattgtctaaaatggaactagattctccgggtatcaggtccattggtggtacttacacgtggcctcaaaggaacagaactgccccacaaatctgtgg

SEQ ID NO: 806353 - DNA, 421 bp, Homo sapiens
acaaaaaggcagggaacagccatgggcctggggcaccctccgtgaagccatccccgactgagcaacccacaactgcccccttccctgcctccccttcggccaccccacaggcctcgccatctctccgagctctcggacaaagggctttcaaagtggtccagaaaaaagagtttggcaaataggagcctactgggttagaaaagatggcgggaaagargaacgaagggagggatggagaggggaagcgtggagcggggatgggaggaggaaagaaacaaggaaagagagaggaaaaggggagaaagagggagggaggagggagagaacacagaaaaacaaaaaggatgatggagagctgaagagagaccaagaaaccccagcctctgaccccgagctccagggactgaggatcacggagttt

SEQ ID NO: 806354 - DNA, 597 bp, Homo sapiens
gctgcaaggcaggggacaggggtcaggctgaggttggagtgagagaaatggaagtaagctggaacttcctgcttcaatttgaagtgaattctcagaatatcagacatacccgtattgaatctaagcacgacaaagcattaggaactggaagcagtgacctygcatttccttatggcttcaaggacccaccttttggtcttcccatgtgcggggggagctggtggcgggtggcaggctttatcccggagcactgggcaacgagacctaagatgcggctcgtgcagggagaggccgggtgccctcccgggatacggaggcagcttgcagagacagcctcttgctgagttctttccttttagcctctgctcctgcagtggccgggagagcactggaaccccgtgccttgctggctggccctgataatgagaaagtctgtttgtgcagtggtgagggctgcgtccttgacttccactcccaaacctggttttgccttcccaaatcacctacaaggtaccaaatacctctcatgtgagacatctcagccggaggctccgtgaatgggccttggcagactctgcagttcccacacctccgtga

SEQ ID NO: 806355 - DNA, 597 bp, Homo sapiens
gctgcaaggcaggggacaggggtcaggctgaggttggagtgagagaaatggaagtaagctggaacttcctgcttcaatttgaagtgaattctcagaatatcagacatacccgtattgaatctaagcacgacaaagcattaggaactggaagcagtgacctcgcatttccttatggcttcaagracccaccttttggtcttcccatgtgcggggggagctggtggcgggtggcaggctttatcccggagcactgggcaacgagacctaagatgcggctcgtgcagggagaggccgggtgccctcccgggatacggaggcagcttgcagagacagcctcttgctgagttctttccttttagcctctgctcctgcagtggccgggagagcactggaaccccgtgccttgctggctggccctgataatgagaaagtctgtttgtgcagtggtgagggctgcgtccttgacttccactcccaaacctggttttgccttcccaaatcacctacaaggtaccaaatacctctcatgtgagacatctcagccggaggctccgtgaatgggccttggcagactctgcagttcccacacctccgtga

SEQ ID NO: 806356 - DNA, 614 bp, Homo sapiens
gtgtcctaagagttagaaacttccaagtttcttgttcttgggttgactggccagcttgtgagtgttcaaagtaattacaagttaaattaatgcatcaataaagataatagggaaagagcggaacaaaaggctggagaaagcaaccagcaagggcaccagatggccgatcccagggttccttcctctcttgtcgaaacgccgctaagcgctgccttcaaaaccaggccatgtgctggcaggcacgggcccctgggaacatgcctcacgtggagccgggcatctttggggaaagaaagccatgggctgggggtgaggcaracagctctgggcccaggcaggctcctgcgtcgttcaggctcccctgaactcctggcagcccatcccatggcagcctggcaccggctgtgcagtcacccaggcccgtgtttgggtttgtttccaccacaacctgaatgtatgaccacagtcccccaagacaccaccatgccaagacgtcatcttctgttccgggacattcttaatgatctcacgtctcatctgcttatgtataaatcccaccacaaaacatgatgtgtcttttcttctcagtctctgaaaatgagccgataatgtta

SEQ ID NO: 806357 - DNA, 613 bp, Homo sapiens
acctagaggctcatctgtaaatgaggtcctatactttttctaatctactgaaacgtggccatccatcgacctccaggaatataaaacagaggcagggaaatcaagccaatccatttatacaagttttaagtgcatacaaaaaaaaaaaaaggaaatttaggctatcrtctaaaatgaccttgatgggtccaataccaagaaaaataggatagcacatagtaggtgttcatttttttaactttttctttgcaaataatttcaaacttacagaagagtctcgagaaaaacaattgctcaaaaaacacccccacacccattacccagatttcttacgattcacattgtatcccatttgctttctcacttgctattactgtgtatataatttttctgaaccatttgagaatatgttgcacacgtcatggccctttccccctaaactgcatttcctcagagcagagacagtcttgcatgacgataaaacaatcttgttttgtaattcttccaattttgtaattgttccactgaagttctttatagaattttggcctccagggcaggatactaccctggatctggtcctgcatccattttcgtgtctccttagtcatct

SEQ ID NO: 806358 - DNA, 531 bp, Homo sapiens
gagcctggaacctttctttaagtggtggtgggcacagtaataatgtagggaaatggaaaggtcctagccccccaaaacctccctacccactggcttgtgccttctagatcacattctaagctcgtgtactttgtttgaagatctgaatttcccaaatacatacactatgggcttcttaaatggaactctcaataaactgtgacagaaagatggttaatgagtaaggtggaacttattaaagagaaagaggcataattacagtttgaagacaggtttaaaaattaaagcagataggttgtagtggaaataaaatagaaatttcaaacattttaattaaattgtttaaattaaattacttcatttccattttaattaactttaattaacawaatgtgacattatgagctttaaaaaaaatgtttttcccgatttccttgggaaatgtggcctaaggagaatggatggcactgcctctccgggtcctgtgtgctcccactgcctgagtcatgattctctccagcaccattctcc

SEQ ID NO: 806359 - DNA, 626 bp, Homo sapiens
cttcttatcttcactgattgaaaaacatcagcaacttaaaaacacatgaaccatgagagggcatcgcaactgtccattctctcagcttacacgtatcattgcaaaggcactcacagcttcataggttctaaagttttaagaattcctcattcagagagtagrattgtttgtaaactcttctaaggaaaggctggttttctaatttgtaaggagattgtgggacattggaatctgatctttgaagaaatttagcggctagtgtcaagctctgaagagttctggtgtggctctgtctcctcctgggggctctaaggggctgattcagtcatcttacttcccatttattattctctgccttatgtgttattcttttaaatgtggaaacttgaaagctgaatttgttagaacccagtacatgtgtcattggctgtgactgcatttgcactggcatgagctgacaaaccacgaggttcttcagaagtgaccgcgtgcagtggaaaggaattgtgttgttcttacagagtacaacctttataatcaaataggatgcaccgcctttgccttctttagtcactgaaagttgacaagtagtttctatttcaaaataaattacaacacttgttaag

SEQ ID NO: 806360 - DNA, 626 bp, Homo sapiens
cttcttatcttcactgattgaaaaacatcagcaacttaaaaacacatgaaccatgagagggcatcgcaactgtccattctctcagcttacacgtatcattgcaaaggcactcacagcttcataggttctaaagttttaagaattcctcattcagagagtagaattgtttgtaaactcttctaaggaaaggctggttttctaatttgtaaggagattgtgggacattggaatctgatctttgaagaaatttagcggctagtgtcaagctctgaagagttctggtgtggctctgtctcctcctgggggctctaaggggctgattcagtcmtcttacttcccatttattattctctgccttatgtgttattcttttaaatgtggaaacttgaaagctgaatttgttagaacccagtacatgtgtcattggctgtgactgcatttgcactggcatgagctgacaaaccacgaggttcttcagaagtgaccgcgtgcagtggaaaggaattgtgttgttcttacagagtacaacctttataatcaaataggatgcaccgcctttgccttctttagtcactgaaagttgacaagtagtttctatttcaaaataaattacaacacttgttaag

SEQ ID NO: 806361 - DNA, 626 bp, Homo sapiens
ccccaccttgtagtcctcacctcgcagtccttggcttccggctgcgtcacccagggctctgcctctattgtcactgacatttttctccctttgtgtctctgtcataaggacacattggattacctaccccagcatgacttcatcttaactaattacatcttcatgatcctgtttccaaatagtcacactgaggtgctggggttaggacttcaacatatgtttttgggggacgtaggtcaacccacagcacattcttttctcaaagtgacctgatgtttatgcctgcgcttcttcctttactctctttcaactcaattcctcttctcccacttttcaggaaagaggcgatcttagctcaggccactscaacaaaataccttggactgggtggcttaaaaagcaaacatttgcttctcacagttctagaggctggaagtccaagattaaggtgccagcagattcggcgtactcacatggtagggagaggaagcaagctgtctcgggactcttatgatgacacgatactaccccacctcctcatacctgcacattaggggacagggtttccatatgggaatttgggggagacattccatctgtgacagagacctatttctcacccatcc

SEQ ID NO: 806362 - DNA, 687 bp, Homo sapiens
tagtgtacttagactagcattatggcagaggaagggatggaaattacagaaattttgaaagaatcatcataggagtcaatgattaattggcaatacatgtttaaaaatacagaggatttaaagaacaatctaggatcttaagcctggggaaggaaggagtggatggcaatggtgactgtacgctgtggaaatcagtaagaacctgggggagttggagctggttatagggggatggcaagtgcagggctgggtgtgtggaagctgaggtgacggcaggacttgtcacatggagactgaacctgcccagcaggttctggctgggcacggtggctcacgcctgtaatcccagcactttgggaggccgaggcaggtggatcacgaggtcaggagatcaagaccatcctggctaacatggtgaaaccccatctttactaaaaatacaaaaaaattagccgggcgtggtgatgggtgcctgtrgtcccagctacttggggaggctgaagcaggagaatggcgtgaacccgggaggtgaagcttgcagtgagcggagttgcgccactgcgctgcaggctgggtgacagagcaagactccgtctcaaaaaaaaaaaagaaaagaaaagaaaagaaaagaaaattccaagtagctgggaatgtctactagcaaaacagacacaacagtcttcaaac

SEQ ID NO: 806363 - DNA, 635 bp, Homo sapiens
caaggttttatgaaccagattatattgaaatatgaagttaaactgaaagtgaaaaaagaataaaattaatcccggttaaacttagaaaagaagttatatattttgtgttagatgagcccccaaagaaagagaacttaagaaatttatggagtggaatggggagaataacaaaaatggtgttagttatgcattaattttattatttgttaaccatctcttatgttaactaggcattgttctaagctgggtaattataatgatgaagaaaacaaagtccttaattcatgggtcttgtattctgttaggtaaaatatagtactgaaagcttcagatagttttatatcagtattcaacatctgggtaataaatttaaaagtctatctgattttttcagaagaggaggaagtgattgtggtgactgatatagtagtattcttggttttcacrtcgatgaaatggaagtctcatttcctatcatttcttcaatacccagaatagtttctaacacagtgagtattcactgaatatcagataaatgaaagactcatggaaaaatacctctttagtagtctatacaactaagaagggaaggattttacatagttaaataagcatttttgcactagagagacaca

SEQ ID NO: 806364 - DNA, 572 bp, Homo sapiens
aataactcttgctgctgctcactgtttgggtttgcactgcctttatgagctgtaacactcaccacgaaggtctgcagcttcactcctgaggccagcaagaccacgaacccactaggagtaatgaacaactctggacgggagcaacgaacaactccacacgygctgccttaagagctgtaacactcaccgcggtctgcagcttcactcctgaagccagcgagaccatgaacccaccagaaggaagaaactccgaacatcagaaggaacaaactccagacataccatctttaggaactgtaacattcactgcgtgggtccgcagcttcattcttgaagttggtgagatcaagaacccaccaattccaaacacagaacaacgtggagtttggctggggtggtcccaggagagtctggccactgaatagcccaactccaggggaaaaaccatctttccactccatctggctcccccatctgctgagaggtacttccactcaataaaaccttgcacttggtttccaagcccacgtctgatctaacttttccagtactccaaggcaaaaactgggata

SEQ ID NO: 806365 - DNA, 698 bp, Homo sapiens
ctagtattttgttgaatatttttacatgtatattttccaggaacattggcctatagttttcttttcttattatgctcttgtctgtcctggttggcttgggctctccaaggtccacaggctggaatggctaagtcacccaaacagcaaagacggyagtccaaccctccctctggaagttctgtcctagggagttttggcatcagggtaatgtgagcctggtagaacaaattagggagaaatcttttctttttaatttttttagaatagtttgatatgaattgttgtcagttcttctttgaaagtttggtagaatttagcggtgaagccattcagtcctgaacatttctatgttggaagacgttttattgtggattcaatctcatcactcattattgttctgttaaggttttctatttcttcttgattcaggtttggttggttgtatgtgtccaggaatttatccatttcctctaggtttctcatggtgtcagtgtataattgtcagtaataatctctgatgatcttttgcttttttgtggcatcagttataatgtctccattttcacttctaattttgtttatttgggtaatttctcttttttatctttgttagtctagctagcggtttatcagttttgttcatctcttcaaaaaaccaactgttcattttgttgatacttcttattattttttagtct

SEQ ID NO: 806366 - DNA, 593 bp, Homo sapiens
gggaccgatttacgggatcacagagggagggaaacacacttgaggcctgtccacgtctgagagacacgggactgatttacgggatcacaggggaagaaaaacacacacgaggcctgcccacgtccgagagacacgggaccgatttacgggatcacagggggagaaaaacacacttgaggcctgtccacatctgagagacacgggactgatttacgggatcagagagggagagaaacacacttgaggcctgtccacgtcygagagacacgggactgatttacgggatcacagggggagaaaaacacacacgaggcctgcccacgtccgagagacacgggaccgatttacgggatcacagggggagaaaaacacacacgaggcctgcccacgtccgagagacacgggaccgatttacgggatcacagcgggagaaaaacacacacgaggcctgcccacgtccgagagacacgggaccgatttacaggatcacagggagaaggaaatgggttgtacaaatcgcctgtcaagggacgtgtttcatccgcatgctgtgcaggtgtgaactgcccttgggcaggatgccgcactgcgtc

SEQ ID NO: 806367 - DNA, 611 bp, Homo sapiens
ttccttacatagatcaaacctgcttgtctcagcttctgtgacgatcaagcatccgacacctgccactgtggtttgctgttttcccgcctctccctagtggtgttctgtgatctttattattcaagttatctatcattttatctggggaattagttgagatctaagttgtgttcctttagaaaggatgtgtgctcacttctgccggccactgaggacgcccccgtcaaccccattatccacttgaggtttctcagattatgcacatggcataaatctcggcttaggaaccagcttgttgtcactaattctcagaggacttttccccttcctttgcccaagctgaggccaaaacaggcaatttcccttactcatgtccttggcgtgaagsgcctcgtccttgttcagtcttgcaccgagaggagagctctctgagctcgtggccagcagtttcctgctggaagccttacctggatgctgggcaaagctgtcagaataaagttcaaggtggtcaggtctctgcagggtccctcaagggagtttccctcatctaaaaacatgattcaacacagtgagcgattttcagttgtggggttcctagcagtgtctaacaa

SEQ ID NO: 806368 - DNA, 621 bp, Homo sapiens
gcacaggccccgacgccgagagcttcctcttaagctgcagcctccacccaggcccacgtctctatgggggtcatgccctggacacagcgtttcaaagaaagggcaggtcccagagcggccgagagggcgacaggtgtccgcgctcccacctgccgtccatgggcagacrcataaagaaacttccggaaggaaggccacagacaggctgacagtgcacggtcaggtcaggtgatttttactttcttttttctgtccttctgtattttcccccagacgatacaggtaattttagtaactggaaaaaggaataaaaacgattctaattttagagggaaaatcacatctgacgggtttttacagaaagaaactgaagccctatgaaatgacagcgtgattgatctaccttcgtattaatccttattgacacttcatctcctgaagcttgcgccccgtcagtcaagttgatgttcaccgacagggacttggtaaaacctccgtggtttctgagactcctcgctgaggggagcttctgtaactctcaggcgttaaagctattttttatgaagaggcatttcgtcagcaaacagcagaaaaggacaggaaagatatttttatggaccc

SEQ ID NO: 806369 - DNA, 621 bp, Homo sapiens
gcacaggccccgacgccgagagcttcctcttaagctgcagcctccacccaggcccacgtctctatgggggtcatgccctggacacagcgtttcaaagaaagggcaggtcccagagcggccgagagggcgacaggtgtccgcgctcccacctgccgtccatgggcagacacataaagaaacttccggaaggaaggccacagacaggctgacagtgcacggtcaggtcaggtgatttttactttcttttttctgtccttctgtattttcccccagacgatacaggtaattttagtaactggaaaaaggaataaaaacgattctaattttagagggaaaatcacatctgacgggtttttacagaaagaaaytgaagccctatgaaatgacagcgtgattgatctaccttcgtattaatccttattgacacttcatctcctgaagcttgcgccccgtcagtcaagttgatgttcaccgacagggacttggtaaaacctccgtggtttctgagactcctcgctgaggggagcttctgtaactctcaggcgttaaagctattttttatgaagaggcatttcgtcagcaaacagcagaaaaggacaggaaagatatttttatggaccc

SEQ ID NO: 806370 - DNA, 537 bp, Homo sapiens
gtcgcccaggcttaagtgcagtagtgtggtctcagctcaccacagtcttgacttcctgggctcaagctatcctcccacttcagccttctgagtagccgggactacgggcgcacacccccacacctgtctaacttttgtatgttttgtagagacrgggtcttcctatgttgcccaggctggtgtcagactcctaggctcaagagaccctcctgccaagacctcccgaagtgctggaattgcaggcattagccacacagcgcctagcctggtctgtttacagagtcagcaaattctggcctttaggctacccagccttgtttgtacatgaagttttattgaaacatggtcacgcccacacggtcagagttgggtttcgtccccgtggcccgtaatgcctaaaatagtgactctggcgctttaagaaacagtttgggaactcctgcctgaaggagaatcggaaacagcactgaagatgttactgaggtttaaatgcgacccaaacagaaagggcttcggggcggttggtgtccgtctgat

SEQ ID NO: 806371 - DNA, 613 bp, Homo sapiens
cgcgggactcaccccgccccgggaagccagacgagagggacatctggccccctgcccaggcccccaccagcagccaagagctggcaggcgctcctgagccccagggatcctgtgcgcagggtggccgggtggcaacgggacagcggcctgcccagggtgacacgggcactgacctggactttgacttatccagcgacagcgagagcagcagtgagtccgagggcacgaagtcctcctcctccgcctctgatggcgaaagcgaggggaaaagaggccggcagaagccaaaggctgccccagagggagccggggcgctggcacagggcagttccctggagccggggcggcctgcagcaccgagtctccccggagaggccgagcmtggcgcgcatgccccggacaaggagcctgagctgggtgggcaggaggagggcgagcgggatggcctctgcggcctgggcaacggctgtgccgacaggaaggaggcggagaccgagtcacagaacagcgagctgtcgggggtcactgcgggtgagtccctggaccagagcatggaggaggaggaggaggaggacacggatgaggatgaccacctcatctacctggaggagat

SEQ ID NO: 806372 - DNA, 622 bp, Homo sapiens
tttccagatcagtagttgtcaaactgtgtgaagaggaacattagctctctgagatacagcattagataagagttctgtagtcaggtaactttatgaccactgcacaatcattcccttctttgagatgggagggagaaagagaaagcctgttctcccatcccaacttgaatctgccttatttccattcacacataattgatacacatctttcccctctgctcccagttcattatggtgctttagttcccctcatgcattccagcccagaatgagaaactgcttttctgtttaatgtaaagaatttgaacacaaggcacactccaygatcttctaaaagactctgagaaatcctatgattaagaaacacttttgtattatttttaatttaacatctaaaatcatttagccataagatggcttttctcccatatcatcctatgaaacttcagaacccacttggaaatatcttactctaatgaagaagtttgtttgcccctccagtctcatatatgacttaacaataatagttgggcagtgttgtattgttttccaagtgctttattttcagtgcctattgcatgccagcactattgctaagttctttcatatatctcctctcact

SEQ ID NO: 806373 - DNA, 395 bp, Homo sapiens
gagcttctgcacagcaaaagaaactaccatcagagtgaacaggcaacgtacagaatgggagacaatttttgcaatctacttatctgacaaagggctaatatccagaatctacacagaactcaaacaaattcacaagttctgagtctttctatggcaccttttcccttcacattaaataaatagagacaaataatraaaattcaagataccagacaattctgaagctagaggatatactgaacttcatccaaaaattcaaaggagaatgtcaatcagttagatgttagcagctaaatacttccaaaaaagttatgtttgttctggaggggcaggggatctacagatagagatgggaataagactaactcaagcaaagaacacattgagggaagggt

SEQ ID NO: 806374 - DNA, 604 bp, Homo sapiens; identical to SEQ ID NO: 741949

SEQ ID NO: 806375 - DNA, 614 bp, Homo sapiens
gtcacgtttttacatatcaacaatgaataatctgaaaaagaaatcaagaaagcaatcccatttacagtagctacaaaaaaataagatacctaggaataaatttaaccagatatgaaagacctctacaaggaaaaccagaaaacattgatgcaagaaattgaaaatgacaccaaaaatagaaagatatttatgttcatgggttggaagaatcaatattgttaaaatgtctatactaccctaacaatctatagattcaatgcaattcctatcaaaacaccagtgacgttattcatagaaatagaaaaaaaaatcctaaaatttatatggaactacaaaaaacctagagtagcraaagacatccaaagcaaaaagaacaaaactggaagaatcatattacctgactttaaattacactacagagctatagtaaccaaatcagcatgttactggcataaaaatagacacagagaccaatggaacagaataaagaactgagaaatccatgtatcagtgagctaatttttggcaaagattttaaggatatacgttgaggaaaggacagtctcttcaatacattttactgggaaaactggacatccatatgcagaagaatg

SEQ ID NO: 806376 - DNA, 590 bp, Homo sapiens
ccagtgtaagttgctctggggcctgaaaggaccccactgctactaccaccagagcctgaagactgatttagttggtgtccaggtcactagcttaattccaccacaaactcaactattagctgtacccttagtcactgaggaaatcacagagaccactgccctgtgtactgccaaaatattcatacaaagatcacactaccatgagcacccaaaatcaaagccacagtatcttaactgaatcaacaacatatacacatcctcaggaaaaaattctcccctatgaaagcaatttcaaaaacttsgaaaaagtgactgctatacaagatgcaccaaaatcaatggagggacacaggaaacatgaaaaatcagggaaatatgataccatcaaaggaccaaaattatccaataacagatcccaatcaaaaataattcctctttaaaagttcagataaagaattcaaaatactgatcttaaagaatctcaatgagatgcaagataaacctgaaaatcaatacaaagaaatcagaaaatcaatccaggatattaatgagaaatttaccaaggagatgaacatcataaaaacaaatag

SEQ ID NO: 806377 - DNA, 671 bp, Homo sapiens
aatgggaagaaacttccaaactatgcatctgacaaagggctaatatctagaatttacgaggatctcaaacaaatcaacaagagataaacaaaaaactctattaaaaagtaagcaaaagatgtgaacattttttcaaaagaagacatataagctgccaaaaaacatattgacaaatccttagcatcactaatcatcagagaccacaatgagataccatcttatactagtcagaattgctatcattaaaaagtctaaaaacaaaagatgttggcaacgatgtggagaaaagggaacacttatacrctactggtgggaatgcaaattagtgaaacatttatggaaaacagaatggagatttttcaaataacagaaaatataactaccatttgatccggcaatttaacctctgggtatatacccaaagagaaataaatcattatataaaaaagatacctgcaccttgtttatcacagcactatttacagtagcaaagataaggaatcaacttaagtagctatcaacagaggactggataaagaaaatgtggtgtgtatatgtatatgtatatatatgaaatatagtgatatatacatgtgacataaatacatatgatatacacacaccatggaatactactcagccataaaaaagaatgaaatcatgtttttagc

SEQ ID NO: 806378 - DNA, 671 bp, Homo sapiens
aatgggaagaaacttccaaactatgcatctgacaaagggctaatatctagaatttacgaggatctcaaacaaatcaacaagagataaacaaaaaactctattaaaaagtaagcaaaagatgtgaacattttttcaaaagaagacatataagctgccaaaaaacatattgacaaatccttagcatcactaatcatcagagaccacaatgagataccatcttatactagtcagaattgctatcattaaaaagtctaaaaacaaaagatgttggcaacgatgtggagaaaagggaacacttatacactactggtgggaatgcaaattagtgaaacatttatggaaaacagaatggagatttttcaaataacagaaaatataactaccatttgatccggcaatttaacctctgggtatatacccaaagagaaataaatcattatataaaaaagatacctgcaccttgtttatcacagcactatttacagtagcaaagataaggaatcaacttaagtagctatcaacagaggactggakaaagaaaatgtggtgtgtatatgtatatgtatatatatgaaatatagtgatatatacatgtgacataaatacatatgatatacacacaccatggaatactactcagccataaaaaagaatgaaatcatgtttttagc

SEQ ID NO: 806379 - DNA, 621 bp, Homo sapiens
gtccccacccaaatctcatcttgaattatagttcccataatacctatgtgtcatgggaaggacccagtgggaggtaattgaatcatgaggataatttcctccatgctgttctcatgatagtgaggtatcaggagaactgatggttttataagcttccggcatttcccctgcttgcacttctccctcctgccaccatgtgaagaaatacatgtttgcttctccttttgccatgattgtgcatttcctgmtgcctctccagccctgcagatctgtgagtcaattaaacctcttttttttaataaattatccagtctccagtatatcttcatggcagcataagaatggactaacacagaagtattttataagatttatatagcctaattaaaggtgataatttctgtgataataataccctacactagtattacctttcaaaatgccttttcaaccatggccttccctgaccctaaccttaaccctggacagtaggtataatgggggattttcagataatgtaattgaaactcgaagttggaaaatgatttatcaaaggtcccacagcaatgtataaacacagcagaacttgtacataagtcctagattgggtttctgttcaca

SEQ ID NO: 806380 - DNA, 574 bp, Homo sapiens
agccgtgagcccagattgcaccattttactccagcctgggtgatgagagaaaaactccttctcaaaataaaaataaaaataaaacaagggttatccaaaaaaaaaaggattagaatgtcaagaaaggaggaaagcatcaattcaaaggagaggaattgaagtaagggactaggcaagttgtcaaatattgcagttggtaaaaattgctggaaacatctatkggatttgacagtaagaatggtacttttgcaaaaccatgttagaagaatgaggtgaaatggaatacagattgtgaatattaatgtgcaaattagaagtgattaagacaaactagcacataaacctataatgtattttattttgaaattgtacgtctttttttttctaatcctttccttccccagccctatcttctctctgtttaaccttataaaaagggcagatataagagcgtaaatgaactgggcactaaaaatagttgagacttgaatatttttctgaaaccaaaggggctgttatagaagaagactaaaaatataggaaaaaggtgggacaactaatactgcaggattga

SEQ ID NO: 806381 - DNA, 609 bp, Homo sapiens; identical to SEQ ID NO: 741740

SEQ ID NO: 806382 - DNA, 609 bp, Homo sapiens; identical to SEQ ID NO: 741741

SEQ ID NO: 806383 - DNA, 614 bp, Homo sapiens
acagcaggaggactgcagataaaacagtggtgctgtgtatgggcttcatgctaaatcagtaagtggtagctgccctcactacaaaaacactgaaacaatgagtaattgtgaaatagtgaatatgttcatttgtttcactacagtaacccttttactatttataggtattccatatcgtcatgttttatttatttgtttatttattacttatttatttattttgagacaggttctccctctgccacccaggctggagtgcagtggcaggatcttggctcactgcagcctcaacctcccagactcaagtgatcctcctacctcagccttccaagtagctgagactacaggtrtgcaccaccactcccgactaatttttcttcttttttcttattttggtagacagggttttgccaagtttcccaggctagtctgaaattcagactcctgggctcaagccattctccacctcagcctcccaaattgctgggatttgggaagtgtcagctgctgcacccagctaacatcatgttttattaccttacatctactgtacaagataaaatttgttttagaaaaatataagtaaataaataaggagatgcacctgtgtcctc

SEQ ID NO: 806384 - DNA, 619 bp, Homo sapiens
tgtggacctgtttctggattctattttatttcattgatccacatgtttatccttttcataataccatattgtcttgattactgtaggtttacatgaagtcttgaatttaggtatttgaactctcaaaaattgttcttttccaaaattattttggttgttctggttcctttgcttaactgtgtacatttcagaatcgcttctaaaaataatcctgctaggattttcactgggattgcactgagtttgtaagtcagtgtaggaagaattgacacatcaacaacagggggtcttctagttcatggacatgccatctcactttttatctttatctgtgatttctctcattcacgttgtatagtttacagcatgcaggtcatacacatattttgtcatattactcatatcatgttgaatttataacaaaatacgtttttaatrtttcaaggagctattgcaagaaatattgtttcagaaattttaattttcatttgttcattactgagatatagaaatgcatttagtttgtttattgatcttgtagctaatgttcttgctaaatttcacttattagttgtaaaagattttcttaggatccttgggattttctaagtagattact

SEQ ID NO: 806385 - DNA, 639 bp, Homo sapiens
aactctaatttctgtttccttaactcacaaagaccacagggccctgtttcagttttctcaccctgctgtagcttggaaactgcctcaagacgttttgtttttatcgctggtgtcacagtcttgtctgtctgttgtccagtgtccaaaaagattgttttatatattttgactaatattccagttgtgtataggaaaggcaacttctgcagcagtcatctcttcatttgctgaagcagatatttttcatagtttcattttgaccgtaaaaaaaaaatctcagaattcttgggcacttgaagtgtccaaaaaatgtgatcttatttttcttctgttgaacccctaggggattcaataattaggatctagtttttatattaatctctcaatttggcagctttaccaccactcaaacagtgcaaacttgcagtttcattcatgaatgatgtggttccaaattgctttttgtaatwttttttttcttcttcgtcaaagaaaaggaacagcttgctttcttgtttcttctctgggaagatggatggtgtttttctaatccctttatcacatagaaagcagctttttatggcaccatgctttattctatagattcaatccaatcgtttctaactccagtgggaaaag

SEQ ID NO: 806386 - DNA, 664 bp, Homo sapiens
ctactattggatccttgtttcaggaaattaattgctataccaatttcctgattaattgtttagacacttctaagtttctaagtcaagtttcttaccttgaaatgaaataagtctcctaaattatttttctcagttccatcctctggagccagaatatacctaagcccttgtttttcatgagaaccctttaagtactataactgaaaatcgcaattatgttcctcttatctccaggataaagagcacacatacatacacagcacacccatacattctagaccacagtaccagtctttagaaaaatattgcatttaatttgttctggacctactaatatcactgtttctgatccatgtggagtataatgaaatactaaatccattaatctggacacttggtatctatctactcaataaaaaaatgtgtcagaccattgatttcttgagtcagaaatcatatctttttcatgtaggtctcaaatgtgctctataatagatattgcatamattaaaaatgatttcctgtgaattgctggctttttacgagctcatataaattttatgcccacataaattttatgttgacataaatttgtgttaattaatactgacaagttactttttatgttaggtcactgtttgtttccattggtgactgtaatcca

SEQ ID NO: 806387 - DNA, 602 bp, Homo sapiens
aaagacataatgagataattcatagaaaatgaaaccttaatatccgataaatatatgaaaaatatcctcacaagaagatgggtaaatgaaaatcaaaactacatgagacgttgtttttacacacatcacattggcaaagattaaaataaaatgtttgtgacagatgttggctagaaagaggagaaatgggaaatgctgatggaagtgtaaaatggtaacatggctcaaaatactttgaatagcactttgccaatatcttttcrtttatttatttatttatgtatttattttttgaggcgcagtctcactctgttgcccaggctggaatgcaatggtgcaatcttggctcacagcaacctctgcctcccggttcaagtgattctcctgcctcagcctcccaagtagctgggactacaggtgtgccccagcacaaccggctaatttttctatttttagtagagatggggtttcatcatgctggtcaggctggtcttgaactcctgaactcaggtgatccacccaccctgacctcccaaagtgctgccaatatcttttcaagttgaaggtaaaaatagacttaagtaaggagttccacatttaca

SEQ ID NO: 806388 - DNA, 638 bp, Homo sapiens
caagttttggagacataaatatgctaaggcaaaaatcccttctctcaagaaactcactgtctgtggaagatagaactatgtaaacaggtgtgtaacactgtaataaatatcatagtaggaaaatagaatcagttacgagttcacacatttccttttggaacgtgagcctgctacctcttttgtttgtttgtttgttttacagcccacatactcagaggtaagaatggctttcatattttaattgtttaaaagaattyaaaagaagaataatagtttatgacaagtgaaactgatatgaagctaacatttcaatgttcataaataaaattttattgggacacagttcttcccattcttggtgtattatctatggcttttttcatgctatatttagatagtagaatacttacgacagagatgctatggtccttgaagcctaaaatgcttattatttagccctttataaataaatttatcaacccttgtataaggtgcttttggaataatgaagaaagggtgactattattttttgaaaaactaacagtgacttttgactatgaagaaatttgcatttaacttttattcacttgaaagtgctgagaggaaaactcaagaaaaactacaaggctgtttattg

SEQ ID NO: 806389 - DNA, 607 bp, Homo sapiens
tgaaagtgctgagaggaaaactcaagaaaaactacaaggctgtttattgataagtggatcctgaaatttaccagtttatggagcagccagagttaagtagtacccaggaaaggatcaggtgtgaataagacatacattatttgtcctgggacctttcaagtttaatctgagagatactgtgttaattttaatttttcatatgccccatcttcttactaatctttctttctatctaacacctatgatttatagagaattatttgaaaataactctccattcctgaggctattgtgtttcagtccactagaaccttccagcaaatcaactggaacctcgagaaaggcctataaactccactttcctaccattaccagggaggcagtgcagatttgggttttyagaaaagccaaccttaaatcctttctattgaggctaattgatcaataattagtcaccacagttactaatggtttaatgtaaacagttttttaatttaaaattttctgatatttcagttcaataattgagaattcatccagaatggttcatctgaatgtacaaaaagagtcacttagaaaaggaataactttccttatccttctcctg

SEQ ID NO: 806390 - DNA, 604 bp, Homo sapiens
gaatgcctgggcatccaaactgcaactcttccctgggtttccagcctccaacctaccctgaagattttggacttactaagcctccacaattgcatgagccaattccttaataaaaatctctctcatagagagagaaacacacagacacacaccctaatacaatagatattgctcccaattttaccactgagaaaaatgatggcctgacaggacccattctccctcttcactacatcacacactaaaatgtgtgatttgggactcacattctagcctgaggggctcaggtgggaggtacaaggtaataagcatgcaacattgtaaccacaagccacatattccagagagccctttatgacactgataccacacatactacacatgtacccagagcctcgatgygcccaagtgatgtactatcctctctctggtctcctaattcagttatttcaggtaaaagaaatcaaatagtcctacctaactcaatatttgaagaccttgaaaaaggaggaaaaaataattagtaaagaattaaagtaaaagataaaaagaaaaataaaaaatgatttgtgacaattaaatgatggtagcctttgctttgttt

SEQ ID NO: 806391 - DNA, 528 bp, Homo sapiens
ctgcctatcgaactgtagacatctgacgaacaaatccaaaccacagtctgacaatgggtcacctctgttgaaagtgaaacagaacacagcagtactgatttttaatgactttccagaccctagttctagttccccatgattcctggtaacccaagtcctggagctgatctggcagtttcaaaacatttcttttccttaagctggttttgtgggcttttgttgcttgaatccaaacaaaaataaaactgtaccagtaaaatgaagcaaacaaaatytgccaaaaaggagccccagttctgccccagttttgccaaaaaggagctgtgaggccgtagataagttccttctctctaagctacaattctatcccttacaaaatgatgcagttgaactggatatctcaggggccttcaccctctactatgctggcttagacactggctcctctggataacctcttggcgctacagattccttatgaaggttctcctaagttactttagttctacccattgactccaggcagtt

SEQ ID NO: 806392 - DNA, 629 bp, Homo sapiens
ttgctcaaaaaatgatgaagatttgtccaaaggactcagaagccagcttgaggaggttgccactcgctaaatagagaacaacttgagcatcaaaataaataatgatcatgatgtatcataatccattcaataaggccaagtgtgatggctcatgcctgtaatcccaacactttgggaggctgaggcgggcagatcacctgaggtcaggarttagagaccagtctggccaatatggtgaaacccggtctctactaaaaatacaaaaaaattagccaggtgtggtggccggcgcctgtaatgccagctacttgcgaggttgaggcaggagaatcgcttgaacccgggaggtggaggttgcagtgagccgagatcacaccattgcatgcctgggcgacaagaccaagactctgtctcaacaacaacgacaaaaatcaaataaaatcggataccataaatccaaacagacactcataggtatatgactaaattaaagatttgttaagaaattgaatatttacaaagctttaaaatacctttccacaaatatgtatttgtgtagtgtaagagtaattttacagtggatatgtaacttgacagagggtacaacttaagtgatcagtgtaaacatc

SEQ ID NO: 806393 - DNA, 606 bp, Homo sapiens
aattttacagtggatatgtaacttgacagagggtacaacttaagtgatcagtgtaaacatcaattaagggagagattgaaatcttatatcattgatataagaatgcattgagaatacagaaacatctctgaaatatttctgcctaaaatgcataatctgaatccaacatgagaaaataktagacaaacccaaatcaaggaacattctacaaagtagctggcctataatcttcaaattgccaaagtcatgaaagaaggaaagactaaggaactgttctaaaatgaataacacaaaagagacaggacacctaaatgcaaggagtgataaggagcaaattctggtgtaacttgaataggatctaagaaatatatagtaataatgtaccaatgttaatttcccaatattaactcttgtactgtgcttatgtacaagaatggccttcctcacaagaaagttacactaaagtatttgggagtgatgagacatcatgtcataacttactctcaaatggtttatacccacaaaaaaatctttgtattgtatctcaactctttgataagtttgtgattattttgaaataaataataatataataataataaaaaa

SEQ ID NO: 806394 - DNA, 530 bp, Homo sapiens
gcactttcttgcttccttgcacagcaaaatgcataagcttatcttgcagcttccttgtcccaaatgtcaatcagccacttcactaataagccctaatttcttttggtgggaatgatatagacatgaaattcttgtaacttagaatatctatggtgtgctggggtgacaaggtttatggaccttttcagtagtctatttagttcatgaatttttaatattgaaagtttgtacaatgaaaattcagatagtaatggaaaactgtattttgaaaaataatgggatrtattatatacttaaaaattgctaagggagtagattttaagtggtcttatcacaaaaaatgataaatatatgaggtaatgcttatgttaattagctcaatttagccattctacagcatatacgtatttcagaacatcatgttatatacaccatacgtaaaattttatttgccaattaaaaatgcattaaaaattaaaaaagggttcacattgtatttacaattcaattttaacattatgtttttaagt

SEQ ID NO: 806395 - DNA, 420 bp, Homo sapiens
atcatcatccccagaaaaatgcaaattacacccacaataagatatcatttcatatctattagaacagctgaagttaaacagactgatattgccaaatgttgatgagaaagtggagcaactggaactctcacacactgccggtaggagaacaaaatrggacagcactttggagaactgtgtggtagtttcttataaaatgaaaatgttatcatacaacccagcagttttctacctagagaaataaaaatgtatgtccttaaaaagactcacacaaaaaccttttttagcaggttcattcatattagccaaaactgagaagcaatccacatgtccatcatcaggagaatgatcaaactgtggtgtaaatacaccataaaacactagccagcaataaacatttataaactgctgtctgggcat

SEQ ID NO: 806396 - DNA, 584 bp, Homo sapiens
actctacacgagacccatgttccccggagaggattggggctctctgagttccaggcttacctcaggccaggccagcgcagggcaggacactccaagggtagtcaccacagtggcaggaccactcataggggcgggacagagccaagggacacagccaagactgtgttttcaaggcagcaggaggaggggacggaggcccggagrtttgttttgagggactgtgagccccagggctgagacacgggtgtttcaacccaaggagggtgatagatgagagatgtgggcacccagggctggcatggaaatacgtggagaccactcaaccgagagtaagcagaggctgggtatcacgagcttgctgtggcaacagccaggccctgctacttacatgaggcagaggctcaaaggcaggcagtgagggaaacgctttgtagcagagaaaggcggggctcactagcactggggccttctaagtcattggttggggtagcagatttggctttctctggttgaccctgagttggaggtcgggtagaaattggggtgaaaatgacaatccttgatgaggaggtcctggccgcttg

SEQ ID NO: 806397 - DNA, 542 bp, Homo sapiens
ccctcaccttcctgttagcccataaaattgaagtgaaggaatttttaaaatatcaagttacacaaatttaaaaagtaggaaagaaaccactgcagtcaaaataattcaacacatttgtgaaaaaattcttcctgcaaggagactggaggaataaaggygctgtaatgctacagccaagaaaacctaagtcagaggaaagggctgtgatgggagagagagccagtcccacccctgcagggctcgggaatccgaaatgtcccatccagaagaaaacggatggcagggaaactacccatacgacactgtgagggtgtggacaggacactctacctttgtcaaaacccgttgaatggacaactctgagagtgaaccctgacaaaaactatggactttggttactaataataatatatccacattcgttcaccagttgtaacaaatgtacccgaccgatgcaccatgtcagaaatgtgggaaactgagcacaagagaagaggagtatatggtagctctctgtactttctgcccaaattgtctgtaaa

SEQ ID NO: 806398 - DNA, 590 bp, Homo sapiens
ctccctgcttttgacacctgcccacacaccaggcccagtgccacccgaaagtctggtcacaccattccctttgtgcaaaaccctccaaggactcccatctcactcatgggaaatgcacatccgcagccccgccgggcaggctctcctcaccccagccaccttcctgcttctcagaccagggaggctcactgcttccaccaacacactccttcagcctgaaaggtgggtcccctaaggctgcagggctccctgctcctcaccccagtctccttccaaaagccccactcagaaaggcccacgcacaacagctgcctccccagcctccctcagccacactgcacacacccatcccactgtccttctttcttgacactcaccactatctgaaactgtggtacygactaacccactcacttggtcactacctatcttctcactaaagggcagttctgtgagggcgaggcttcgtctgtctggtttgctcctcagtctggaaagacctagaagccaggactgtctgagtgccacaagcacctaaacatcttcaatcatctttcaaacctccaaggaaacatcaaaaatgcctgcgt

SEQ ID NO: 806399 - DNA, 609 bp, Homo sapiens
catcagcctcttggcacgaggagggcattgcccgtgcagctctgctggctctaatgggctcctggtccgtgcctctccatttggccaccttggacaggctgtacactggctgcagagtgggccgcaggtgacctctctcatggatggggagaggcttgcaggctgtgcccagtgggagccagggcttttgtcgagcactcagctccagctcctgtccagcagatagatagtctgctccctgcctgtgaagagtcggacagaaactttgagcgatggcaacgacaacaagtgtgttttctgggggtggaggtgaggagagcytggggctaaaggtgcagaaccgagctttaagctgtggccccttgtcccactggagaaggcgccgggggcacgcagggcctccactctcctggcccctctcaaggaggccgagccctgcagagaccatggaatttggaagtgtgggccagggccaaagaggacgctccttgtttgtggaatacttgtgtcacggcgcgctgtgcttggggtcaccagggagggcaaaggaaacaaaaagggccatggtgtggcctgtggatttgcgatggcagaaattctgcatctatg

SEQ ID NO: 806400 - DNA, 606 bp, Homo sapiens
tttaaagtatacaattgaatggttttcagtgtatttacagagttgtacaaccatcaccatggtctaattttagaacgtttcatcaccccttaaagaaacgtggagccatgagccatcactccatgttcccccgacccccggcccaccctcaccgctgcccctggcaactgccagtccactttctgtctccgtagatgcatccrttctgggtatttcatagaaatgtgatcatccgtgtggtcttttgtgactggcttttttcattccttagagtatttccaaggctcctccatgctgtagcatgtaccagaactttgtaccttcttattactgaacaatattcccttataccacattttcatttgtgcatttatcggttgatgggcatttgggctgtttccattttttggctatgggtaattctcctgtggacatttctgtacaaggcttctgttttcacttctcttgggttgctgggttacatggtgactccacggttcactttttgaggagctaccagcttgttttccaaggtagctgcaccataaaagatcttttaaattattgcttgttttgctaaagttacaacttctgaaatagtactaa

SEQ ID NO: 806401 - DNA, 559 bp, Homo sapiens
tctattgtttgcaaatgcatttcaaatgtaaagctgttaagtttctaacaaacatctcattcacatatttttaaatggcaataaactatataattttaagaaatattatgtaaaatgtatagcttgcacatttgggcacactctagaaatgttcatatcttccatttgaaaataaatatgcccttcacacattgcactgagtgtggaattcagctgaagtctctcccacttcaaatttcagtggcagaaagacrtgatccatttcctcactcagcctaagggccatgaccaacaccactatagccaaaaacaggctaacaagagaaaagcagaacacatttatgtaatcataattttatgtgacacagaagctttcggatcaaagacccaaagatatggaggaagtggtctgattttatgcttaggttcaatgaagcagagccagctgtgtagaagtgggctgggacaaaagcggtataatctaataaatcatagactaccagcatctaggagtaataggctgtagggggaaacccatcaaaaccgccactgcaaaatt

SEQ ID NO: 806402 - DNA, 665 bp, Homo sapiens
aaattcacaaaatgtagcctctctctgatgatttgattccagaacactctcctctgtctttgcaatctccttttgataagtcacatgaaccttcacgatggagaaaaaccatgtgcttcaggagcacaaaatacagcagaaacagaaataataaacggcagcaaaagcaaagcataaaacagaccgcaaaatgaagttgactatgtcatttttcttttgtctaatagccgtatgaaaacaaatctgatctgtttgtttrtcttgacctttttataaaggtaaagagtgagcagtgcctgttagataggaatgtgatattgctctcttaattgtaaatagtattcatagttgtattaagtacaaatttatttcaactattgcaatcaaagagtagctttgatttgtattgtttagttgccctatttctgttatttcgctattaaaattatgcacagtggtcaggccttcccccactttttctgaaggatgttacagctatggtctgaagcattccacattcattcgtattcctgtatttattcctcattcaggatttgtttgctctgactagtatttggtatggctaatgtctcactttcattaccaagaagtccataagttctaaagaaaccaataaatttaccattcaaaattgtgtaacatgt

SEQ ID NO: 806403 - DNA, 665 bp, Homo sapiens
aaattcacaaaatgtagcctctctctgatgatttgattccagaacactctcctctgtctttgcaatctccttttgataagtcacatgaaccttcacgatggagaaaaaccatgtgcttcaggagcacaaaatacagcagaaacagaaataataaacggcagcaaaagcaaagcataaaacagaccgcaaaatgaagttgactatgtcatttttcttttgtctaatagccgtatgaaaacaaatctgatctgtttgtttgtcttgacctttttataaaggtaaagagtgagcagtgcctgttagataggaatgtgatattgctctcttaattgtaaatagtattcatagttgtattaagtacaaatttatttcaactattgcaatcaaagagtagctttgatttgtattgtttagttsccctatttctgttatttcgctattaaaattatgcacagtggtcaggccttcccccactttttctgaaggatgttacagctatggtctgaagcattccacattcattcgtattcctgtatttattcctcattcaggatttgtttgctctgactagtatttggtatggctaatgtctcactttcattaccaagaagtccataagttctaaagaaaccaataaatttaccattcaaaattgtgtaacatgt

SEQ ID NO: 806404 - DNA, 573 bp, Homo sapiens
cggccagagcaggaggcatggggaggtgctacacatttttaaacaagcagcattagggagatggtgccaaagcattagaacccgcccccatgatccaatcatctcccagcagacccctcctccaacactgaggatcacaactcatcctgagatttgggtggggacacagagccaaactgtatcagatgattttctaaaaaatatatgtcagtcacaaaaacatcttccgtttgaacaggttgtctttttcaatggttttgctaaagtcatttgtttcctcaaacaacctctatagaatacacaccactgatcagttctctgaattgcttatctcctatcttcatgctgtagctcggtcttgctctggctctctatctatcaggttgaaatgtttcttccacatttttggggcccaaattraaaaagtgacaattgtcacaaagtgacaatgctttccgtaaataatccagggcattttctatgcaatggagtagatgtgactccccagatggagtcatacaaaagtgagattttattatttttgaccacctttgatagcagctccctagacct

SEQ ID NO: 806405 - DNA, 610 bp, Homo sapiens
ctaattgaaggggactgatgactaagagcagaaacatgagccaacaccatagacatctcaattcattcagcttacacaattctgaccgaaaaattcaagttgaccaaactgatcatgggatgggtgcaaaaccattgtgcccaaacaagctgcagacaagagcagagctttcaatggaaattttaaataagtgggattaagttcctaaagcatttatttgaagaactctagccagagacgaagcatagctttaccagtacaatcctgaatacacaacaaaagcaaagcaatggctaccaagagggggacatgtttcagtcaaagcacattgaactagtcaagagcgaagttcatggcaacagttttttgggatgytcaagacattttgtttgttgtctttctggagcgtaaaataacaatagcatctgcatattatgagagtgttttgagaaagttggccaaagtgttaggagaaaaacactgaggtaagcttcaccagtgagtccttttccaccacaacaatgctcctgctcatttctctcatcaaaaacggcaattttgtgagagttttgatgggaaatcaataggcatctacctgaccgtcctgctt

SEQ ID NO: 806406 - DNA, 581 bp, Homo sapiens
tcaccctgagtgaggcctctccacactatttactaccaaccaacataagaaaactccgtgctttccatccagaagctacacccactgggaaacatttttttagatataattgatattcaactttgaaactgctctgaaaaatacaagaaggtaaaattgtccaaatgtacatcacgctgtgtgattcacactgagtgtttctcttaaagagaactgaaaactgttcccggaatttctgccaaatttctctgagctcttcacagcagcagctccgtcaagctggcttgattcaaaccaagcgtttgccagggaagctctttcacatgtgggagtagctgaggccctgawatgattacatccctgaacatcgctggttagcaactcgcagaggaaaagagcatggtgtgtttgagactcaggctgtgcgagcgcctgccctcgggagctcatccaagcccctgtggaaagtcagggtggggcttggtctcctgctctccttcctggtgtctttgtgggattaaattcccccttctgcagatttctcggggttatctcccgccctcctacctcctctttcaata

SEQ ID NO: 806407 - DNA, 531 bp, Homo sapiens
ggtggatacagcaacctacacatgcactaaaattgtatagaactagtattacatcgcattgatggttgcacaatattgtgaatatactagaagccacttttaaatgatgcaaatagtgaaaaatgtttggaagtaagtacatgtatacacagacatgagtacaagtaaaatctgagtgagcctaggtggagtgcgtcaatatcagtatagtgattgtgatattcaaagaaactggactaagctattctttcttatatctgtatgttcatccaaaactattcaataaggtctcagcataaacaatcaccgcagtaaaaataccaacaaaaaattaccaaatattgtctttcatyactcaagtaaccatacgtatagtaaaaacaattgtgaaatttaaatatggaattttttgagaaaacggtaatgaaatacacagagtagaattgtatggagaaaatggactaatctttattatgcatcatatattatactagcaaagacatgaatttccgtgatagagattagtaatac

SEQ ID NO: 806408 - DNA, 521 bp, Homo sapiens
aaatttgatttttgcaattcgcacaatggagaaaaccatgctgccagccgtgcagtggatgtgacatacagatggactttattattgacttcaggtttttgtaattccaccagtacatgtaaaaatagctttctccctatagtataacaacatcaagttcagaaggccgtagcaccatatttatacatttatagtagtacagattaattcctgtttaatggtaattaagaacatctttttccccaaaatagtttttctcacgctaataatccattgttatttaaaacacacaatttcaatatgatttaattgaatcagataattaaggtttgggttataaaaagtcagtttctaracttcccttcttcatagaatttagtcttaaaatcacagaatttaatttttgtacaaaattcatatatgatttcatagcattatcaaaattctactttaatcatagcttatttactaagttactagatgtaatacagtaaaatatgtttgatagaaaaactcaaaat

SEQ ID NO: 806409 - DNA, 637 bp, Homo sapiens
aaactctgcctcggaaacagcgaggagacccaggcacccggagtgcagggagtcccaggaggatggaaatgaacaaggaaagtgaggaaggaggttgattatctagggaatcttcagatttgataacgccttggcttttactctcagtgagatggaacactgtcagaaagtatttgagcagaggaatgtgttgagctgacttattacttcctaagattaatgcctcagctgaagtcaaaggtggaattagggtgacaagataagagggtatttaaattatctgggcagaagtggtaacaatgattttgtacaaggtggaagcaacagatgtatataagttgtcacagaatcaggtcctgggaatattttgaattagaaccagcaaaaattattgatgaatgattggagtggtagtagagaaagaagaagtcaagggctgttctgwgtgtgtgtgtgtgtgtgtgtgtgtgtgtgtgtgtgtgtgtgtgtgtgtgtgtttggctactgtaaaaatggggatgtcatttcctgaagtggaaaaatgatctgaggagcagatttggaagtcagtgtaggaaatatcaggaccacagtacttgacatgttcaatatgagatgcttgttacatatccaagtg

SEQ ID NO: 806410 - DNA, 529 bp, Homo sapiens
actatttctgccacaaatgctgagccattgtctgataagaaagtgcagacaaatactagcatgtaccggtagcctctggcttgagacagcttggtaaaatccacaagcaggttttcacagggtgtagctccagtttcttgaatccttgggggccgtgttggcccctgccatggattgttttgggcaccagccaagaattgctcagaaacagctccagtgatggcagttaggtgtggcacgtagaaatgccatcctacaagagtttctaatgcaatttttcccatatgtgttccttgataaaactgctttatgaaccagarggctattgcttctgggatggcaagcctcccatctgagaacttccaccaacctcctttctggtaacttccactctcctctcaaactaagccttttcattagaggagtagttagggggttctgtaagtggaagctccagtaagggcatggtaagtgttttctcttccttcttagttacctctgccattgcagttcttttggcttctctatc

SEQ ID NO: 806411 - DNA, 599 bp, Homo sapiens
aatgccttgaaacaggtggccatcccatagccaccaagtcttgtcgcttggacaaatatgccacgggcagataccatgatcctagtgtttgtaccaaaagtcacctgtagctattccttttcttgcatggacgtacagtaaaaaggctttgtgtgtctggcagtcctaatgccrgggcctggatcaaagccttcttgatttctttgaaggccatgacctgctcttttccccacaggaggggttcctttccccccactttgtggcttcatataatggcttagccatgagcaagaaacttagggtccaaatgtggcagaaccctgctgtctctaggaactttcttatctggtgctgggtggttggagtaggaagtgcacaaacagcctgctttcattctccaccaagccatcttttcccttggcttacatagaagcctaaatactggaaacttttaaagcagatttgagcctttttcctgacactttgtagcttgccttccacagcaggtgcagaaggttttcggtttttcccaggtgcagtagcccttggccagtggctttcttatacgatgattctgaccattttccttagtctcttga

SEQ ID NO: 806412 - DNA, 593 bp, Homo sapiens
ctagtttcagctaactgtagtggatccaagcacggttcctgtaacttgaacagcagttggagtggacaagattacaggatggggcccatcccatatgggtcctaatgtggttggattacatttcttaacccaaacagaatcaccaggtttgaaacrgtatacagtgtctgtcagacttataggcattctttcctgcacccagccatgtacttttggcatggccatacctaaagcctgcatttgcctccttaaaattagttctcctagctcacagagatcacctttaatctgacatataattcaggtggccggctgaataagttctcctagggtgaatacccagtttgtttggcgtgggcacacctgacttggaggaggaccatgggcaagacctgatcccacctcagatgagtttcctaacaaaatttcttcagcagctgcttgagtgtccagttcatgtgctccacttttcttgagctctgtggccggtaggctgtgtgtaacttccattttatttttaatagccaagttcagtaatgaactatttcagccaccaatgctggttcattgtctgaccccagagtcaggggtag

SEQ ID NO: 806413 - DNA, 593 bp, Homo sapiens
ctagtttcagctaactgtagtggatccaagcacggttcctgtaacttgaacagcagttggagtggacaagattacaggatggggcccatcccatatgggtcctaatgtggttggattacatttcttaacccaaacagaatcaccaggtttgaaacggtatacagtgtctgtcagacttataggcattctttcctgcacccagccatgtacttttggcatggccatacctaaagcctgcatttgcctccttaaaattagttctcctagctcacagagatcacctttaatctgacatataattcaggtggccrgctgaataagttctcctagggtgaatacccagtttgtttggcgtgggcacacctgacttggaggaggaccatgggcaagacctgatcccacctcagatgagtttcctaacaaaatttcttcagcagctgcttgagtgtccagttcatgtgctccacttttcttgagctctgtggccggtaggctgtgtgtaacttccattttatttttaatagccaagttcagtaatgaactatttcagccaccaatgctggttcattgtctgaccccagagtcaggggtag

SEQ ID NO: 806414 - DNA, 506 bp, Homo sapiens
agttctgcatcacaagatatctaaatatacaagatagtatttcattgaacagatattccaataaaacatattttacaggaagatgagaacaatgctgatcttacatcttcatgtgtcccaaagcccttcatcacatacccagaaacgcagtttaagaagctgcaatataagaaaaagaatactacatttttggtgctaaccattgggattctaatcctgattattttcttttggaaaggttatgttctcttgtttacttggttttcttgcttgtgaaattacagtaatatcatctgtaaatatggggatggtggaagagagaagatctccaggaagtttwgcccctctccagggagaaagagttttgagaagtttgtcagtttcagagtcacttcatgtttgccagtgggtgggtaacagaacgctaagttttctacgggcgatgctttgtttttgctcacttcacctgatcctggacttgcttcctgaaagatctcaagtaccct

SEQ ID NO: 806415 - DNA, 530 bp, Homo sapiens
tctcatatgaacactggtggggcaaagcaggatttgaagagtgttgacttttctggctaaatcaaatgtatctgtgagtgtgtgtttaaattctatttattttttcaattagtaatacaaatataaagcataaatggattactagaggaragcaaatctctcttctttctctgatctcatattacccagttactttgtctagaagcaaccactaatgccaacatattttttacaactttccagttattctctgcaattctagatgtatatgtacatttgtttatttacacaaatggtagcatattatatacattgttctatccaccttattttttttcatgtagcaatctattttggaaatattttataatctgtcgtgtagagctacttcattctttttaatggctgcatagtattctaatgtttcaatgtcccataataaatttatccatttccccattactggatgtttaggttgtttcataagttatgatatcacacattaaattcatgaaaatcttgccatccag

SEQ ID NO: 806416 - DNA, 618 bp, Homo sapiens
tccagagttatactactaaatattatttaatccccatttatcattttccctgtgtatatgttccccttaagtgtctcatatgaacactggtggggcaaagcaggatttgaagagtgttgacttttctggctaaatcaaatgtatctgtgagtgtgtgtttaaattctatttattttttcaattagtaatacaaatataaagcataaatggattactagaggaaagcaaatctctcttctttctctgatctcatattacccagttactttgtctagaagcaaccactaatgccaacatattttttacaactttccagttattctctgcaattctagatgtatatgtacatttgtttatttacacaaatggtagcatattatatacattgttctatccaccttattttttttcatgtagcaatctattttggaaatattttataatctgtcrtgtagagctacttcattctttttaatggctgcatagtattctaatgtttcaatgtcccataataaatttatccatttccccattactggatgtttaggttgtttcataagttatgatatcacacattaaattcatgaaaatcttgccatccagtttgttaacatcatt

SEQ ID NO: 806417 - DNA, 596 bp, Homo sapiens
tcaaaacacatatcgctgagctccatcggtagagatcctgttttgatacctttggttggactgtggctcggtaatttgcatttcttagaagtgagtccgttcagctggtcaaccgccccgcctgtctctctgtgaccctcccagggcgtcagcggtgcttttttacttgcatcttgtgggaaaaggatccgcgcaggcagcccccttttagcaccgycctgagtacacaagccaagcgcttaaatacctcactcagccctggatttgcagttactcagggcaggcgaaggcgcgtttccgcgtttggtatattcccgcgtgctgccagctgatggcgccagagaactaacctactggaatagggaggagaaaagaagcagggaagaaaagcgggaggtgaagattaaggccaatggtagcttccgttcttggactcgaagattcccttaatgggttgacatcaatgaaagccaatggtagcttccatgaaagccaaagctgaccacccccccaagcttcccattctcttaggaggctgcattttgggtgctaaatggagggatgggcgtgggagatgctgggacatgtgttggctg

SEQ ID NO: 806418 - DNA, 637 bp, Homo sapiens
aaatatgaaacaaattagccaggcgtggtggtgggcgcctgtaatcccagctactcaggaggctgaggcaaagaattgcttgaacctgggaggcagagtctgcagtgagccgagatcgtgccactgcattccagcctgggtgacagagccagactccttcaaaaaaaaaaaaaagaggaaacctccatgttgaatatgcctggcttccaggtatcccttttctattggcataggtgccggcatttacttatgcaagcttttggcttgcttatctatgcttgaggcttgatttttcaggctgatttwggttagaaaatgaattatatgggggctggttttttattaaaagaaaaatcttaccgaaaactcccttacccacattaactgcctaaatgatttctttttagcttctatatcagcagtgctggcccctgataggtgatgatcatgatggggaccaggagcctctagacttagagacaagatgccagcactctgagattgcagccatcaacaagctgagaaaagaggaatgagaaggaaacttaccttgctagatctttgtcatgtcccttcccaggttccagaaaagtgagaaatcaatttctgttgtgtaagccactcagtctatgaaatt

SEQ ID NO: 806419 - DNA, 653 bp, Homo sapiens
cgaccttcaccagaaatgtgtgggtgcctttatttacctccagcacagagaggtaaaatggaatattcttatgacgcagatatttcgtgaatctcatgttcacctatgttatgttgcctctccttcggtattttttcatgctgtaggccattcctacttcacaagaagagtccatggttatccatgagaccagggccccctgtggacccaggatacaggctgctggcatggctcctatgcagcgcttgatgtaaggaaggctcctctcattcttccctcgcctccagttgtcatttaccagcccagaataagagacacccagcttggcatatttaaarttgggagttttactatagaaaacaaaaagaagagatcccaggcactcctcttgtttgaagacctaccattgcaaagttgcgtattttgaccattgacaacctttattcatcacaagaaaggaattcatcctctctttattccaaaactgattaatgtgaattacaaaaaagtacaaggaatagcaattataaatgataagcacctgtttttgtacctctcaaattcatcatctgggtggcctatctcatccctacttccaagcttgcttttattgcaggcattgagcttcaggatatcttccataatacagagga

SEQ ID NO: 806420 - DNA, 628 bp, Homo sapiens
tgtgtgtgtgtgtgtggcttcagtggttaaaatgatatgaatttgaaattggttttaatattaaaaagtgagcacgtgtagaaatgacacaatattgaccatgtgttggtaattactgaaacagggtaatgatatccaggtgttcattacactattttatttatctttatatgtatcaaaataccataatataaagttcccaaaaattatattcactgaaacacagccagctaacttcatatcagtgttggtaataatttgccaaacttataaaaaaatatctttttcatgaatartattgtaccagttccaaatatttttattcatcagctaccaaaaatatatattttagcaatttttaaagagcagatttatctgaatttcaaatacgtaacataaagataaatttcacctcagttgaatttctctatgaccttcattaagtaaacttttaacaaggaatacatctgcttaaagggagtataccgggaccacagaatccctgtgtactttcttaattaggtgttttttaacaactcctcttaacacgagccaaagacctaaaaaatctctaaggagtcattcaaaaatacatgcagaagattcaaaacacaatcatgtagaaaaa

SEQ ID NO: 806421 - DNA, 661 bp, Homo sapiens
gaattggaaaagaaacagaccatgtgttccaatagaataccattagctgttgttataataattcactgttatttattgagcagttatattttgtcaggcactattggtgctgctggttttacatatcttattattaattcttcataacaaccatgtgaaataggttgattggacgtcattttacaaagtgagatctggaaagattaagcagtttaacaaatattatatgttcgcttaattgaaagtaactaattcaaacaaagatctgttaggctcaagcacatgcactgagggaacaactagcagttcgctagtcctaattttcttatttttaccattaaaaatttgaagcttacatacaaagctgtgagtcaactaagggagatatttaagtactgtgggtattaatgtgaagctgtgctattttcataaatattttgcattaatttagagtttattaaaatttacaaaaataaattcttaatgtaatgcctttttagttyaagagctgtgttcttgcaacacccatgtgatgcaaaacataaaataattattgaatataatacaaagtataattcctaggaagttgcaccttctgtattagaatcagatagtatcttttgatgtggttaaaaggaacatattttagactaccaaagag

SEQ ID NO: 806422 - DNA, 579 bp, Homo sapiens
tctattttggtaggtaggcaaagaaacagttcaccttcctcatccctccctctcctcctcccccttctccaccttctactcctttcccttactgccctcccctctgtctccttattccctctcttcctccttcctccctctgcttcttgcttttcttcctctgccactgcttcttcttcttcttgcatatattatgatgtaacatgctaggaatcttcctttgaaactatagataaaattgtaaaggagataaaggagttacctgctaatatgaaacacattttagttatatacaaataagaaatagttatttwaattaaaggaggtaatatatgatcatgtatagtataaaagtgttatgtatgggtgaggtatgatgattattaattgtctggaggaaacgggacattttaggaggtgatatttgaggtgaattatacaaagaggccatccataccacattctaggaaaaaagaatccatagcagagtgctcagggctgtatacatcaatatggaagtcatcaacatataacacgtatgtcaggcatggtaatgaatgagatccctttggcagagaa

SEQ ID NO: 806423 - DNA, 489 bp, Homo sapiens
cacaaggtgggcaggactggactggacaggcccacctacaggtgccctgaggtcatgcactagcatcagcactgagagagaatccagtgggtgaccaccaagcacccaaggtgtgcctagatgtggagctgggaaaactccttggccccaagtccactgcaccggcaggtgggggacagcctaaactcctaatctaggagattgggtgttctcggtgtctggagatacgcctgggcatgaagcacaaagggctccactgcaccacartctctgtagagcatgggcggggcagctcatgctggtaatccagaggaaagggtgttctggctgcctcgagatgtacttgggcgtggattggaaagggtatggctgtaccgttatctctgtgcagtaagtgttgggcagctcaggctaccaatctgggcaaacaggtgctctgaacacatggagatctgcctgggtgcggagtgaagagggcctcacttcacc

SEQ ID NO: 806424 - DNA, 601 bp, Homo sapiens
aaatgaccgaattaagaaacagccatgaggcatagacacacagtggaaaatcatttctcttttcagtaagttttgggtctgctttaaattgatcatttgtttcatcagctaatccccaaacagagggcacgtccgctctacttgcaaaattcttgtatgtaagttgaattctccctttatcaactcaggccaataagtactttattttgtttttgcttgttgttaggggaaaaaaaaaaaaamcaaagataatcagctcatactacttgcgtagctgtctgcattttaattccagactatgaacgagcgtcagagtgcccttatgatattttgcacaaaaggctcagtgtttatgactctactcagagaacccaaaatagcattgagtaagcagtgacatactgacagtgttgtggtactaaaagcacaagcgtctgtaactctgggcaatggggcacatcgagagtttgctgagaagactgtgaagcaaaaagaagaaagtttttcctactcttccttatgtgtccaacacgaagtttgctgttcagttttcacagaacttctagaagttgaagttacaaaggtaagactgtgataatca

SEQ ID NO: 806425 - DNA, 554 bp, Homo sapiens
tgatttcctttgacccataatgattataggaaagtgttttacatcaaataagttcatctctatatctcagatcataaaacaatgaagtactgcagacatgaacaaatccattttcaattaattttcttctttcaagacatgaatctgtcagtcaagtagttcattattgtcgaaaaagatatgctgtcaagatcacatagtgagattgtgattaattgtggaaattaaagtaaattgattatagaagttattgtttygaattttctacaattaaagtgcctttaacaatatgtcaaacaaaaatagcctcagatgcaagatgacaagcccagatttatattatacttcaaaaaaatagatacatcttcacaggcataaagaacattaggaaaccaatacgatctgtatattacttctccacattgatttatttttaactcattacacattactaataaataatattcatttagtgttaattaagtaatttaacaaaacacattttattcaatccatgcttataattatacatgtggatattgatttatgttaag

SEQ ID NO: 806426 - DNA, 678 bp, Homo sapiens
tttatttttaactcattacacattactaataaataatattcatttagtgttaattaagtaatttaacaaaacacattttattcaatccatgcttataattatacatgtggatattgatttatgttaaggtaaagccttcattttagaatattacaggattttgtataggctgggtagagggcaggggcktggaaacccaatattctgaatcctggctttgccatttagaagtttttaaccttgaaaaataaaaatactaatacttaaccttcagggttcattttcaggattataggtcttggcttgtcagagggtttgtcacacgacaaactattatgtgttcctatgtctattatgtgttcctcatgaaaatattctcttgttgagtttttgcatatcatggtgtcctgaatattgttagtcataggcatatggatatctttatatgcacatttgctgaaataagattgataacaaagtatagaattcatgtttatcttgctggcatatgtggctacagtgttcagataaggaatattttattttactacctgatgttctgtattaaacatgagcatctgagtaaatgttgcaaatgtctccctttgggaatgaagacttaagaagactggagatatgctgtatgtatgtcaaaagatttttaataaatcaaaatac

SEQ ID NO: 806427 - DNA, 609 bp, Homo sapiens
ctggcacatttggattttatagtagatgttgagaagtatctggagttaatcatgaaaacataaaacaagaacaggaaggtgtttgaatccatcagagtttttacggagggtataatttgactagattcaaatttcaggaaaatcattttggaaacattgaaaaggattgaggttcaagaacaaagrcaagttattcaaatatgaatctagtatattaatactcaagccaaaaggataaaaaataaaggtatgatcaaagacattggtaaaggagtttaaagtagcttgtcaacatatttattatttaagttatccaagatttactgactaactgcaggcaattagaaggagaagtaggatttttttttttcccacgggtttctgggttgtccagtcgtgagaagagttataccattcaaaaaggaacggaataaaataggacaattgaggggagtagatttggatgtgaagagagaagagaataaaatacaagatatgggaagaaaaagggatagtatttaagagaagaaatatcattaaatatataaccaatatgggaataattgacagcatagcaacattggatcttccaacctggaaaaatggtat

SEQ ID NO: 806428 - DNA, 609 bp, Homo sapiens
ctggcacatttggattttatagtagatgttgagaagtatctggagttaatcatgaaaacataaaacaagaacaggaaggtgtttgaatccatcagagtttttacggagggtataatttgactagattcaaatttcaggaaaatcattttggaaacattgaaaaggattgaggttcaagaacaaagacaagttattcaaatatgaatctagtatattaatactcaagccaaaagsataaaaaataaaggtatgatcaaagacattggtaaaggagtttaaagtagcttgtcaacatatttattatttaagttatccaagatttactgactaactgcaggcaattagaaggagaagtaggatttttttttttcccacgggtttctgggttgtccagtcgtgagaagagttataccattcaaaaaggaacggaataaaataggacaattgaggggagtagatttggatgtgaagagagaagagaataaaatacaagatatgggaagaaaaagggatagtatttaagagaagaaatatcattaaatatataaccaatatgggaataattgacagcatagcaacattggatcttccaacctggaaaaatggtat

SEQ ID NO: 806429 - DNA, 525 bp, Homo sapiens
tagattcgaccaaagcagcctttagtcaagggctaaatactaacagggagacaatacccactggggtcctctatccaaagtcccatggacacgatatattcctgtgagttctgtgctcctttggggtgattatttgcctggcaacaggttgtctgtctcacatgtattcttatcagtcctcagctaaagatacatgggaccctcagttatgatattggggcaatcgtaggactttcctcacgtcttcctctctcttaaggatcattgtcctgtgtggcctgatgttccgtatctgaacgttattgtttcatakattttgtcctttaattttagttgcttcagatattagaataaatccagatcctatcatttcatcttggaaaatccccgagaacagtttaacatattattattttagctgtaaaagcatttaaatcttgtatttttccaaattttaacaatctacattataaatatatccaagagcttgtcattataatttgtttgagaaagaaaatgtaaatg

SEQ ID NO: 806430 - DNA, 631 bp, Homo sapiens
ttaacttctggcaagaagtaccttatttagggactccctggcctatctcagaatgctgccacctagaatgacctaccttctctccttcctcaattaaaacatccattttcttagtgctgctcatgtcaggtaagttttgagaggaaagtaatccaaaaggataaaggtctacttatttgaaatatacctccataatcttcagagacatatttgtgtattttttaagtatgcccttaaacctaactgaatatttagttgatcaaattctaagtggtgtaattaagaaacatctggaactccatttggagtgcccatgtagcaatgcatgtcaggctgttgcctgccctataatctgtccatctcctccattctgctcctgcttttgtaagatgctttcctcccctgtgtatgacccagcaaccctacagatcccctaatagtcctcatctactgcccttccccacccyagtatatcctgtggtcctgtggatgctggtgctggatcaatgggctggaatggttttaacatgaaagctggggaagcgcatattgataaggcagggactcatgcattggtaattctggcccctgactgtaatctaactttgccttcatgtattagtccattttc

SEQ ID NO: 806431 - DNA, 645 bp, Homo sapiens
gtagacacatttacccaattttaatattggactgtaaggtaagatgtttatggaccctttttaaccctttataatttttgttaaagagcaggttagtgctttaagagaaacctgttgtgctcttactttaataatcaatttacagaaaaactggatgatgccccttcaactttagccaatatgtttatacccagcatttcctttacaattaaccttccaaaatgttcttaaactttcatttttattttattcaacttagaacaattctttaamcttttaatctaggtaaaaagtcacactcttatgcctctttataatctttttgccaaaagtatatgcaaactgttttctcaataatcttacatgcatgttacactgttaacttttagcaagctttacttttgttggtaagtttgggattttaattatgtactaggtatagagcctaggacctagacagaagtgcagataaggtctgactcattccagcatttaactccatgtgtcctgggtcttacctagctgtaaaccaggcaagttgtacagctaagggttatagtggcattttataacgcattcaggaggcctaatcacttttaaattgtttaacatgtcttgcataaattcccttttataaaatgtttc

SEQ ID NO: 806432 - DNA, 645 bp, Homo sapiens
gtagacacatttacccaattttaatattggactgtaaggtaagatgtttatggaccctttttaaccctttataatttttgttaaagagcaggttagtgctttaagagaaacctgttgtgctcttactttaataatcaatttacagaaaaactggatgatgccccttcaactttagccaatatgtttatacccagcatttcctttacaattaaccttccaaaatgttcttaaactttcatttttattttattcaacttagaacaattctttaaacttttaatctaggtaaaaagtcacactcttatgcctctttataatctttttgccaaaagtatatgcaaactgttttctcaataatcttacatgcatgttacactgttaacttttagcaagctttacttttgttggtaagtttgggattttaattatgtactaggtatagagcctagracctagacagaagtgcagataaggtctgactcattccagcatttaactccatgtgtcctgggtcttacctagctgtaaaccaggcaagttgtacagctaagggttatagtggcattttataacgcattcaggaggcctaatcacttttaaattgtttaacatgtcttgcataaattcccttttataaaatgtttc

SEQ ID NO: 806433 - DNA, 619 bp, Homo sapiens
aaggtacaggtcacaaagaccttgctgataaaacagtttgtggtaaaaaagccggccaaattccaccaaaaccaagatggcagtaaaagtgaccgctggtagtcccacattatatgctaattataacacattagcatgctaaaagacactatcagcgccatgacagtttataaatgccatggcaatatcaggaagttaccctatatggtctaaaaagtggaggaaagaaccctcagtttcagcagttgccaccaccaccccccagccaccccmcccctgcttttcccgaaaactcaagaataatccaccccttgtttagcatataatcaagaaataaccataaatatagacaaccagcatccctcagggccgctctgcctatggagtagccattctttattcctttacttttttaataaacttgctttcactttactttgtggactctccccagagtctttcttgcatgagatccaagaaccctctgttggggtctggatcaggacccctttctggtaacaaatacaccaaaggaaatgacgacaggagagatgaggaactgtgaatataaaataggcccagcagcccctgcactgcacaactgcagtgggcacccttc

SEQ ID NO: 806434 - DNA, 619 bp, Homo sapiens
aaggtacaggtcacaaagaccttgctgataaaacagtttgtggtaaaaaagccggccaaattccaccaaaaccaagatggcagtaaaagtgaccgctggtagtcccacattatatgctaattataacacattagcatgctaaaagacactatcagcgccatgacagtttataaatgccatggcaatatcaggaagttaccctatatggtctaaaaagtggaggaaagaaccctcagtttcagcagttgccaccaccaccccccagccaccccccccctgcttttcccgaaaactcaagaataatccaccccttgtttagcatataatcaagaaataaccataaatatagacaaccagcatccckcagggccgctctgcctatggagtagccattctttattcctttacttttttaataaacttgctttcactttactttgtggactctccccagagtctttcttgcatgagatccaagaaccctctgttggggtctggatcaggacccctttctggtaacaaatacaccaaaggaaatgacgacaggagagatgaggaactgtgaatataaaataggcccagcagcccctgcactgcacaactgcagtgggcacccttc

SEQ ID NO: 806435 - DNA, 558 bp, Homo sapiens; identical to SEQ ID NO: 751890

SEQ ID NO: 806436 - DNA, 553 bp, Homo sapiens
ttgaaatgaatgtgcagatggaggtaaaactggtttcttccacagtgggggagaactcagttgaatctctacaagataggacagaatttgcacagctatagctaaaaatgattttgcatcccatcaattatgtatggtttacagagttgtacaatagctcccatagagtcacataactcagagggctgtctttagacaatgcatagttttcccctgaagcccacatttttccttgcagcaggttaactccaagatgcctgacttgsacaccaatgtggatgttgtgacattcactctacagggaatgtagggagagagcgctgaggagctgagggagaaacaaggatgattaatcgacttggtcatatttcggtagtgaacacttccacctgatagggggttggttctgttatgatttcaaggatacagtggatcagactcaatggcttcaattttggagaggcattgctttaaaagcctctccctaccgtcagacacatttgatatttattgagcaccatttctaccgagggttctggacatggcactatgg

SEQ ID NO: 806437 - DNA, 601 bp, Homo sapiens
aattgttctgggagaactggctagacatatgtagaaaattgaaactggaccccttacttacaccttatgcaaaaattaacttgagatggattaaagacttaaaacccaaaactataaaaatcctagaagaaaatctaggcaatatcaatcaggacataggcatgggcaaagatttcatgacgaaaatgccaaaagcaattgcaacaaaagcaaaaattgacaaatgcagtctaattaaagagcttttttgcaacaaaataaactatcatcagggtgaacagacaacctacagaatgggagaacatttttgcagaagaaaatctaggcaatatgaatcaggacatagacatgggaaaagatttcgtgacaaaaagcaattgcaacaaaagcmaaaattgacaaatgtgatctaattaaactaaagagcttttgcacaacaaaataaactatcatcagggtgaacagacaacctacaaaatgggagaacatttttgcaatctatccatctaacgaaggtctaataaaccaatttacaagaaaaaaaagaccccattaaaaagtggacaaaggacatgaacaggcacttctcaaaagaagacat

SEQ ID NO: 806438 - DNA, 655 bp, Homo sapiens
caccatgcctggcccaacattactttggcatgctcaaaaaccttcagttgctcactatgaactatcaagcatatttcaaatgtttcaaaccaatatccccagctcctagctagaccacattattctagcgtgagaggggattgtgtaaagtaaataagatctgagaaatagacaaatcaaaaaaaaaaccctagctaagttgaagttaaagataaattttaccaggttagccacagagaagccacgtccaggtacagcaccaggacagggaagctggattcagagctgtatctcagggaggggtgaggtgtgctctaagaaaaagcagctcacattcgtaatgcccaaagcccctttgaagtgtggacgaaaaagagaaagttcctgyctctttaaataatcagagtagaatgatgaattttttattcctgcgtataaaaccaaatttatcaccttggctctaactagcacctcctcccaacttcctgccctaacccaggcacagaagtttaagtcatgattgtttcatcttttccagttccaacttttcttcatatccagttagtctgcaagtgttagagactctgcctccttgatgtttcagacgtctggccaatccttccctcccctggatccttggttgaagttctcctta

SEQ ID NO: 806439 - DNA, 614 bp, Homo sapiens
catgaaaatggactaatacatgaaggcaaagttagattacagtcaggggccagaattaccaatgcatgagtccctgccttatcaatatgcgcttccccagctttcatgttaaaaccattccagcccattgatccagcaccagcatccacaggaccacaggatatactrgggtggggaagggcagtagatgaggactattaggggatctgtagggttgctgggtcatacacaggggaggaaagcatcttacaaaagcaggagcagaatggaggagatggacagattatagggcaggcaacagcctgacatgcattgctacatgggcactccaaatggagttccagatgtttcttaattacaccacttagaatttgatcaactaaatattcagttaggtttaagggcatacttaaaaaatacacaaatatgtctctgaagattatggaggtatatttcaaataagtagacctttatccttttggattactttcctctcaaaacttacctgacatgagcagcactaagaaaatggatgttttaattgaggaaggagagaaggtaggtcattctaggtggcagcattctgagataggccagggagtccctaaataagg

SEQ ID NO: 806440 - DNA, 501 bp, Homo sapiens
gtgtgtgtgcattttactggagagagagctcctaacttttgtaatattctcaaaggagttcatgactcaaaaaaattatttacaaaccattgttctccggccaggcgcgttggctcatgcctgtaatcccagcactttgggaggccaagaagggccgttcacctgagaccagcctggccaaaatggtgaaaccctgtctctactaaaaatacaatcagctgggtgtggtggcgcatgcctgtaatcccagctactcggggggctgaggcaggagaatagctggaacccgggaggttgaggttgcagtgagcagagattgcgccattrcactccagcttgggcagctgagcaagactccatctcaaaaaaagaaaaaaaaagaagggctcccatctgcttttgcagaatcagagaatgtgatcactgcaacggttgaggggagggcgcaggggaaggaagggggagggccaaaggctggagggacaatagctcaccctggaa

SEQ ID NO: 806441 - DNA, 501 bp, Homo sapiens
gtgtgtgtgcattttactggagagagagctcctaacttttgtaatattctcaaaggagttcatgactcaaaaaaattatttacaaaccattgttctccggccaggcgcgttggctcatgcctgtaatcccagcactttgggaggccaagaagggccgttcacctgagaccagcctggccaaaatggtgaaaccctgtctctactaaaaatacaatcagctgggtgtggtggcgcatgcctgtaatcccagctactcggggggctgaggcaggagaatagctggaacccgggaggttgaggttgcagtgagcagagattgcgccattacactccagcttgggcarctgagcaagactccatctcaaaaaaagaaaaaaaaagaagggctcccatctgcttttgcagaatcagagaatgtgatcactgcaacggttgaggggagggcgcaggggaaggaagggggagggccaaaggctggagggacaatagctcaccctggaa

SEQ ID NO: 806442 - DNA, 693 bp, Homo sapiens
ggcagctggtttctcccgtatatggatccccaactactcactcctagcaaaacctttatatgaggcgatgaaagggcagggaaaggagcccctcctttggggaaaagaacaggatatggctttcaaggaaatcaagaaagctttaattcaggcaccagcactagggctgccagacatgacaaaggccttttacctgtatgttcatgaaagaaaagaaatggctacagtagtcttagtgcaaatgctagggtcatggtattggcctgtagcatatttgtccaagcaactagactttgtggctaagggatggccaccctgtttcaaggaactggccgccactgccttgttagcygaggatgctaacaagctcacatttggacagaagctgataattcaggtgccccacacagttgtcaccctgacggaacagagaggacatcattggctctctaaccctaagatgctaagatatcaagggctcctatgtgagaatacatacatcaccttagagactgtgaataccctaaatccagccacactgttaccaatagaatatgtggaacatgggaagcccccgttatgtgccccagggtaccactgctgtgtagaaacagtggatgaagtcttttcaagccagaaagacttaaaggatcaacccttaaaagacccagatgttgaatattttactgatgg

SEQ ID NO: 806443 - DNA, 693 bp, Homo sapiens
ggcagctggtttctcccgtatatggatccccaactactcactcctagcaaaacctttatatgaggcgatgaaagggcagggaaaggagcccctcctttggggaaaagaacaggatatggctttcaaggaaatcaagaaagctttaattcaggcaccagcactagggctgccagacatgacaaaggccttttacctgtatgttcatgaaagaaaagaaatggctacagtagtcttagtgcaaatgctagggtcatggtattggcctgtagcatatttgtccaagcaactagactttgtggctaagggatggccaccctgtttcaaggaactggccgccactgccttgttagccgaggatgctaacaagctcacatttggacagaagctgataattcaggtgccccacacagttgtcaccctgayggaacagagaggacatcattggctctctaaccctaagatgctaagatatcaagggctcctatgtgagaatacatacatcaccttagagactgtgaataccctaaatccagccacactgttaccaatagaatatgtggaacatgggaagcccccgttatgtgccccagggtaccactgctgtgtagaaacagtggatgaagtcttttcaagccagaaagacttaaaggatcaacccttaaaagacccagatgttgaatattttactgatgg

SEQ ID NO: 806444 - DNA, 693 bp, Homo sapiens
ggcagctggtttctcccgtatatggatccccaactactcactcctagcaaaacctttatatgaggcgatgaaagggcagggaaaggagcccctcctttggggaaaagaacaggatatggctttcaaggaaatcaagaaagctttaattcaggcaccagcactagggctgccagacatgacaaaggccttttacctgtatgttcatgaaagaaaagaaatggctacagtagtcttagtgcaaatgctagggtcatggtattggcctgtagcatatttgtccaagcaactagactttgtggctaagggatggccaccctgtttcaaggaactggccgccactgccttgttagccgaggatgctaacaagctcacatttggacagaagctgataattcaggtgccccacacagttgtcaccctgacggaacagagaggacatcattggctctctaaccctaagatgctaagatatcaagggctcctatgtgagaatmcatacatcaccttagagactgtgaataccctaaatccagccacactgttaccaatagaatatgtggaacatgggaagcccccgttatgtgccccagggtaccactgctgtgtagaaacagtggatgaagtcttttcaagccagaaagacttaaaggatcaacccttaaaagacccagatgttgaatattttactgatgg

SEQ ID NO: 806445 - DNA, 637 bp, Homo sapiens
atccactcagggcctgggggacctcaccaccctaaaaggaaaaacacaggtctgaacggcttggccacctgctgattgtagaacaccagggccttgagtgaacataggcagtttccagggaggagttacagtaggtcttgggcaagacccagtgctgtactggcttcaggtctgacccaacacagtcatagtgttggtggccacaggtgtgcttgtgtcactccacccccagatttaggtggctcagagcagagacagagagactctatatgtatgggaaaatataaggaaagagaacaagagtctctgctggtaatccagataattctcctggatcttgtccaagaccatcaaggtggtacctctatgagtctccaagaaccacagcattactgggcctggggtgctccctaaagcaggaacagcttagatcacaacactcaagttgtgacccaagtgytttaaaaggtctggagtgctgtcctaagaaggatgaccagaaataagcccagaaagtgaggactacaataaacacctaactcttcaatactcagacaccgaagaacatctactagcatcaacaccatgcaggaaaacatgacatcaacaaaggaactaaataaggcaccagtaaaca

SEQ ID NO: 806446 - DNA, 637 bp, Homo sapiens
atccactcagggcctgggggacctcaccaccctaaaaggaaaaacacaggtctgaacggcttggccacctgctgattgtagaacaccagggccttgagtgaacataggcagtttccagggaggagttacagtaggtcttgggcaagacccagtgctgtactggcttcaggtctgacccaacacagtcatagtgttggtggccacaggtgtgcttgtgtcactccacccccagatttaggtggctcagagcagagacagagagactctatatgtatgggaaaatataaggaaagagaacaagagtctctgctggtaatccagataattctcctggatcttgtccaagaccatcaaggtggtacctctatgagtctccaagaaccacagcattactgggcctggggtgctccctaaagcaggaacagcttagatcacaacactcaagttgtgacccaagtgttttaaaaggtctggagtgctstcctaagaaggatgaccagaaataagcccagaaagtgaggactacaataaacacctaactcttcaatactcagacaccgaagaacatctactagcatcaacaccatgcaggaaaacatgacatcaacaaaggaactaaataaggcaccagtaaaca

SEQ ID NO: 806447 - DNA, 628 bp, Homo sapiens
gtaactataataatctctcttacccagccgaggacatgatttttccttaaaacagtcacagtccacacataagctagtcttgtaatctttgtatgaacgacaaggaaatgaaataaaattgcagtttgtttctaaagatgccatgaacaagtgaactgctctctggtggttgcatttaatgaattgaattccttaagggttaaaaaaaaaacaaagaactgtagatgtattaagccatgttcaagtacatttaaaaacaaagtaaagatgaagttttgctaaatactatgtaccttatgaatattactgactataatacacagttttatgtcaaaccactaaacaaatagtaccaatgaaaacttaaatttagtatgtcttttgcatgagatttataatgaatttttaaagtaataattaacayagcaaaaatgtttcatttcagtgtttcacaagctctacacagtgctactatacttaataactagtgtacacatcttttccttctaatactgcactcctaacatttccacctaatgacaaagatgaccatgaaaccagctgaccttaaaactttattaccttccttttcttttccaaccttgcacatcctcctccttttcaccaa

SEQ ID NO: 806448 - DNA, 573 bp, Homo sapiens
tcccacccctcataaaaacataacctacaattgtcttgaagaaagagattctcctctctctgccatagtgacaggtatatgcccaactaactgtggaaaacagttctttctttcaaccttactcatcaccctcacggtctgtttatgaggctctcctccaccagccagaaaggatgacgtgccatacctgcaaaacttatacagcatcaacagaatgaatctttccaacaagccgaaacattgagtattgtggcacagaatatgccccacccattactcaatctagatatccttttattccaccgtctcatgattttctttttcctggaaaacaaaagtatttctttcatagcccagctagcacgataaatcagcragtcagaattctagctttgttgtaaggttttgcgaatatctgatcctcttattttgtacttttctatttcctaggcaaatctgagtatttcacccagttttccttaactaggcattgaaaactcagtttttttcttacaaaccttcatgtcttcctgctcatttgcacagtcttatcttgcacctcctataaaatgg

SEQ ID NO: 806449 - DNA, 630 bp, Homo sapiens
tcttggaaagccaagtacaaattgagcagtaaatggtaactgaacttgcagcagagtttagctctgtagaactcagtccacatacaggattagaggggctgtcccagtcctaattctagaggcagtatgtgctgcctccaatatggaataaagatacagaagaatctagaaactggtttgaatgctaacacttgttttgttatatagtccatatggaacaggattttattccatgattagagcattggagtttagacatgagatgtaggtggatttacaaacataaaagactaaactgccatgaaagagtgaatgyagaagcataaaatgtggagcacggatcactttcagagcaataaaccactctgtgtgatagtataatcgtgaatgtatgtcattatacatttgtacaaacccacagaatgtacaacaccaagagtgaaccctaatgcaaactatagacttcgggtgataatgatgtgtcaatgtggtttcatcggctgtgacaaatgtacccctctgtggaggatgttgataatgggggaggctatgaacatgcaggataaggagtatatgagatttctttgtacctttctctcagttttgctgtgaacctaaaactgctctaaa

SEQ ID NO: 806450 - DNA, 634 bp, Homo sapiens
agtttagtctctgcttgactgtctgtggggacagggagctctccacttgatgaaagatctttagacctctgagacaccttagtatgtttgtgttctcacccccttatttcatggtatatcctttggtttaacataacaagtcgattccctctcccacattaggtccttttacatactttaagatacttatttttaattttcatgacatttctcttayagcttaaaaatcccaggctatttattattattatattatttttctcatatataacatggcttccaagtcttaacttacctggtcatttttcactagatgctaagttgtctcttttcatcttaaagagagattcttaacacagcatcattctcaggcatggccagacctgtagggaagaaggtagaacttactctttatcccactttaaatattctgcttttataaatagagcccccatttttattaattattgaatctggttggattgccacataatgtcttttcatactgctttgcaatacttcagacatacttgtatggaatctgaacattaatgtttcccatcaggatgaaagaataaagggactaagatagtacactcttgaattacaagctaagtctttgtattagtctttt

SEQ ID NO: 806451 - DNA, 620 bp, Homo sapiens
cacagactggaaaaacatttgcaaaatgtatatccaaacaaggatctatatctagtatatatgaagaacttttacagctcataagaacacaataagccaatttaaaatgggcagaagatttgcttagacacttcaccaaaaaagatctatagatggcaaataagcacatgtaaatttgcttggcatttttattaattagagaaatgcaaattaaaagaagctaccagtatactcctactwaaaaaatggctaaaattagaaaccctgaccagctagagcaactacaactctcatatactgctggtgggtttctgaaatggtacaaacacttggaaaattgtgggaattcttaaaagtgaatcatataacctagccattgtatttctaagtagttatccaaaatacctggaagcatatttctgtacaaaaaatgagttcataaatgttaattgttttatttgtaatagctaaaaacttaaaataacacaaatattcatcaagtaaataaataaattgaagcatacccatacagtgaaatattgcttattaataaaaataaatgaactccatatgctacaacatggataaatctaaaaattattatgctgactgaaagatgc

SEQ ID NO: 806452 - DNA, 643 bp, Homo sapiens
aattaaaaataagaaaacaggctaagaggagttaagaggtttacccaagtttacaaagctgtcaatgtccttcactatctgcctaggaagttcataatctttcctaggcagtcttctatatcactgtctccattattagtaggagtagcagtgccatgtgatttgagcatggcagcccacaagttccactattaactttctgcagggtaggaatcacttcagccaagatctggagctcaagcaatttccctctgggtgagcagcatttattattcaaatacacttatttaataaacttaattattacatattcaactatttaataatctgtgctagcattttatcatggtttcacatttgttttttctctracctttttgaagcttttttcctagcagctaaggtgtgtcacaccaaccatcttaaagacaaggccaggcacatggtgaatatttgttgattgtacagttgctaaaaggagacaagttcaaatgagtcacttatagaagcatttggacttcaacagatcgtcaagtgtttgaaaactcttatcactaccatgtcttgtttctgggacattttggttttctgcattaggaaaacatcagatacctcagtttgaacactgtggagcttgcaattt

SEQ ID NO: 806453 - DNA, 590 bp, Homo sapiens
aatactggctccctcctgaaaggtctagtttggattatcctaagggcactagagacaaatctaaagggtttaataaggttggcaaatggttgtatattttctttatttagataggaaaatatcctggaacatgagtggtagttaaaccaagataatatgtgccatttctcaagaattttttttaatgctgttactgtagttacttagaggattcgaagataggcttcagagttattaaaaactaccagcgtttatatgctgtataagcactagtataaagaagaatatatgtacatatcctttattaaattctcaaacatttcattgattgaaacattgaaaaatcactagattaaattaagaacagtggttgaccagaaaagtacccttaagaacctttaagaaaagaacctttaagaaaatmtttaagttcagagaaataacagagagaatcatggaagccaagtgcatgaaagaagaaaaagattccaaaattaagtcctttacataaaacagttaaattccctcatggtacaagccagcctttctgtgctaatggggccgttctgctcctcaaggtaattcaggag

SEQ ID NO: 806454 - DNA, 597 bp, Homo sapiens
aaaatctttaactctaggaaaatataattctcaaacacatgagggtaaattcttctgttctataagatgatggacatagaaattatgggaagccaaggccaggtatggtggctcatgcctgtaatcccagcactttgggaggccgagataggcagatcacttgaggtcagagctcgagatcagcctgggcaacatggtgaaaccccgtctctactaaaaatacaaaaatcagccacgcaagttggcgaatgcctgtaatcccagctcttgggaggctgaggcaggagaataacttgaacccaggaggcggaggttgcagtgagccgagatcgcgccactgcactccagcctgggcgacagactaagactctgtctcaaaaaatgaaataaaataaaataaaataaattctgggaacccaaaagagatgggtagaataggaagattcrccttttaaaagtgcattctgagggaaaggaacgtgataacttgacagagatgtttgactgctcctccttctgaatcccctgctaaaaacttcagctgacagtttcagtctcacccagttcaagggcaaaggctactgggccagtggctca

SEQ ID NO: 806455 - DNA, 606 bp, Homo sapiens
gccctatgcagaaaactgaaactggaccccttccttacaccttgtacaaaaattaactcaagatggattaaggacttaaacataagacctaaaaccataaaaaccttagaagaaaacctaggcaataccattcaggacataggcatgggtaaagacttcatgactaaaacaccaaatgtaatagcaataaaagcctaaattgacaattgggatctcattaaactaaagagcttctgcacagcaaaagaaactatcttcagagtgaacaggcaacgtacaaaatgggagaaaatttttgcaatctatccatctgacagagggctaatatccagaatctacaaagaatttaaacaaatttrcaagaaaaaaaaacaaccccattaaaaagtgggtgaagaatatgaacagacacttctcaaaagaagacatttatgcagccaacaaacatatggaaaaaacctcatcatcactggtcattagagaaatgcaaattaaaaccacaatgagataccatctcatgccagttagaatggtgatcattgaaatgtcaggaaacagcagatgctggaaaggatgtggagaaataggaatgcttttacactgttg

SEQ ID NO: 806456 - DNA, 606 bp, Homo sapiens
gccctatgcagaaaactgaaactggaccccttccttacaccttgtacaaaaattaactcaagatggattaaggacttaaacataagacctaaaaccataaaaaccttagaagaaaacctaggcaataccattcaggacataggcatgggtaaagacttcatgactaaaacaccaaatgtaatagcaataaaagcctaaattgacaattgggatctcattaaactaaagagcttctgcacagcaaaagaaactatcttcagagtgaacaggcaacgtacaaaatgggagaaaatttttgcaatctatccatctgacagagggctaatatccagaatctacaaagaatttaaacaaatttgcaagaaaaaaaamcaaccccattaaaaagtgggtgaagaatatgaacagacacttctcaaaagaagacatttatgcagccaacaaacatatggaaaaaacctcatcatcactggtcattagagaaatgcaaattaaaaccacaatgagataccatctcatgccagttagaatggtgatcattgaaatgtcaggaaacagcagatgctggaaaggatgtggagaaataggaatgcttttacactgttg

SEQ ID NO: 806457 - DNA, 589 bp, Homo sapiens
tacaacttggctcaaatagagattgtagtctttctcctagtctttatcatatgaaaagcagccaggatagattttccttgttatatttttgtatagttgaaagttttgaatcaaattttaagtctttacaattgcctttttaaaattttaactgtttgttcttcgttacttctttctaaatgtcaaggtatatttatttactcttaataatgtgatatgtagtattccacaaacattgtcagtgacaaatcttttgaactaaagaatagattgtttgaccattccagtaattaaggaaactagattaaatatacaatggttgcactggtttttcaaacattgatgaagtaaacattattctcaattgacttagtagccagacattcttctcccaagtcttgaaaaataaaatattcaactttctgttcarttgagtggggagagctataaattttgtttcatagctttgtttatattgtctgcatttctctagattttatagttttagaacattataagccttagaaattcaaatgccgttttgcatttaaacttatgaaaaataatttaggcccacactgaagatctg

SEQ ID NO: 806458 - DNA, 461 bp, Homo sapiens
gtgcaagatcagggtaccagcatggttggattctggtgagggtcctcttccaggttgcagactgccatctgctcattgtattctcacatggcagaaagaggactggagggctctctggggtatctttcataagagcactaatcccactgacgagagctccactttcatgatctaattaccccccaaaggccccamctcctcatatcagcacattggaggttaggatttcaacatatacatttctgggcaatgtatacaattccattggacagtcttacaatcttttcagtgtttacatgcataatttactgcaagacttggaatgaaacttcttagctttgcttggtctatataatatgcttcatcttaagcaagctctacattactagtgatgttaaatttcagtaaatggaaaaattccttgagaatactatattctctttcattatccaaatacctct

SEQ ID NO: 806459 - DNA, 461 bp, Homo sapiens
gtgcaagatcagggtaccagcatggttggattctggtgagggtcctcttccaggttgcagactgccatctgctcattgtattctcacatggcagaaagaggactggagggctctctggggtatctttcataagagcactaatcccactgacgagagctccactttcatgatctaattaccccccaaaggccccaactcctcatatcakcacattggaggttaggatttcaacatatacatttctgggcaatgtatacaattccattggacagtcttacaatcttttcagtgtttacatgcataatttactgcaagacttggaatgaaacttcttagctttgcttggtctatataatatgcttcatcttaagcaagctctacattactagtgatgttaaatttcagtaaatggaaaaattccttgagaatactatattctctttcattatccaaatacctct

SEQ ID NO: 806460 - DNA, 533 bp, Homo sapiens
tgaataaaaaggatttctttaaaaaaattgcttttaggatgccatttaaaagaaataggcaaacttcagaagccttaatggatttcttacagaaaacaaaccctccataaaattccaccttagcttcttgcagccctgaattcatgagatgttaactaaattaaccttgactgtcttttattggtctgtttaaaaaattagaaataattaatttaaattgtcattgcttggttctaaatatctttgctggccatgtctatagagagtaggggagcatttttgaagataatcattagcaaatttcctagattcttccttactactgattgctttattataaakctaatattcatagtttgattatattaatgcgatcttgttttcttaatctaactgcatgaaaacatacatggaatgacagatctacctgtcatttacaacatacttaggagattgaccaatttctaaatagtggcctaattaagaaataatggacattaaatcaaactgtgtgtatatgtatcttcacatgt

SEQ ID NO: 806461 - DNA, 624 bp, Homo sapiens
ttttctgaagtttagctttagaagtcactggccttgagttgtttttactttgtcaattggtaggtagcctgcaaaatgagtcctttccagctttgggagaggccagaacaacatcttaaatcttgatttgacttcgtaatacatcctgacactgcaagctctgaaacttgtggcagagagttaatgcatgagacaaaactgacctgggatcacaagtggacatcctcacgctcatgatcacagaccacagtgttacattagaaaaactaygggagaagcaagtgcagagaaaagtttgagtgagaagaaagagtgagagaaactaggaacttttattataatgtttttacaattattggcagttcactatctctagaagcattataacaggataatgacaagctctcacaagacatttctctgtaacttaatataataggttttattgtttgacaaatgcattgtctgaaagtatgacatctttaggttcaggggataaaaactcgatatacataattctgctgctcaaatacatgtttccacagatacttaaaattcagaaaatccagatacacaggctttttaattttgcatatgtgtttagctgttcaaattacttcaaac

SEQ ID NO: 806462 - DNA, 631 bp, Homo sapiens
aggcactacaaatcaatgaacattttccccatccatcagctgctcgcttgcaagcagacaaaacacttacaatgccagaaacccacagagagctccttagtgaacgaaacctcactgtcacaagattcaaaatagccttctccctcccaccctcaacctccacagctctcgacctcaaatgtcttttttttgttaatccaacgtggatcgcaagtacttaaaaaatgatgccaggaaagaaactggaaaaacaggagcaatgatagatcagagttttgagggtcctcacatcacacttgtcacaaaacaaaggsttctttgagatttaacccttttagaaaataaaacccatcataaagatgaatctgcttatgttgactgtactgctttacaattgtagggtttgagcgttgaagcatttaagtatgcaaagcattatgccaagctgtgtcagacatttgtaatttatctatagttactagatggctttgggtattgaaggaattatgattgatgatatgagaagaataaatcatagatatatttaacagtagaaatcatatttctctctttgagcaattttttgcagagaactcagatgtatttatattgtgacaattcatgtagaaac

SEQ ID NO: 806463 - DNA, 625 bp, Homo sapiens
tacagcttccccttcaccaggaaggaaaatatgttctgctgcacagacacacacacacacacacacacacacacacacacacacacacacgcattttgccagtggattctcccacaaggacaagtgtagctgactacatttcagggaattacatggggagagtaagtgaggaagtgaaagaagggaagaggggacacgtagctgtgtgttcatctagacccacctaaagttccattttatcattygaaaaaaaagggtgtggctaagagatgggcataattaataaactgttttagtcttttggccattttaaatgaaacaattcatgtaatatttaatattcttgttattgaaattatattactgtatgtttttatatagttcttacaattgtaatatgtttctaaatagcttgtgtaatattgactaaattcaattattttaagtccaccttttaaaaacatgctatttgttttgttttatcttggtgtaccactgatgttgtttggctctgtgttcccatccaaatctcatcttgtaactcccctaattcccacatgttgtgggaagaactcagtaggagatgactgaatcataggagtgggtctttcccgtgcttttcttg

SEQ ID NO: 806464 - DNA, 608 bp, Homo sapiens
atgtgtttccctttatttgtgttgtctgtgaattcatccagcagtgttttgtagttttccttgtagaggtctttcacctctttggttaggtatactactaagtattttattttattttattttattttattttattttattttattttattttattttattttatttcatttcatttcattttatttgcagctatggtaaaaggtgttatttcttatttatttatttatttatttatttttttgagacagagtctcgctctgtcacccaggctggagtgcagtggtgcgatctcggctcactgcaagctccgcctccygggttcacgccattctcttgcctcagcgtcccgagtagctgcgactacaggtgcccaccaccatgcctggctaattttttgtatttttagtagagatggggtttcaccatgttagccaggatggtcttatctcctgacctcatgatccacccaccttggcctcccaaggtgctgggattacaggcgtgagccactgcgcctggccaggggttgagttattgatttgattctcagcttggtcgattttggtgtatagaagagctactgatttgtgtacattaattttgtat

SEQ ID NO: 806465 - DNA, 618 bp, Homo sapiens
tctaaatagcagatagtaattaccaggatgtgtttccaattgtactgtccttccattgcacaggatttagggctaaattgggctttggagataacctagtcctctctcctcattttaaaaataagagaacttaggttccaagagttaaatgacttatccaagatgatagacattattaattacagaattggcactagaaccagtttttctcactcttagatcagttatttttctactttctcacttcgtttcatggtgttgtacatrgcctaccatatggaaaatagtacttttctatagttacgttacttaaaacataaatttttattgatcctgtaccataatattcacagtctaaatacaacagtgattctgaagtcatttgaaggcttctcacttatattcattcttaaaaagccaggattaattattttctctctcacctgttaggaagcacatcaacccagcagaaacattacttattagtatgtacaatatggagaactattgaaaaatactcttccagatttgtgtgtgtatatatatatatatttttttattttatttatttatttttttgagacagaatctcgctctgttacccagggtggcgtgatc

SEQ ID NO: 806466 - DNA, 600 bp, Homo sapiens
tgcacattggcacctccattgtctcattcaattcctggatcacagtagattttgattattaaaaaaagcaaaagttcaaattaattgactagtcttaggcttaaaaccatggacttaatataatgttacattgcatgatactattgttagtgtcctgaggaaatggcagcccacaaaagaacaccatgaatgacaggtaaaggtcctcggtgctacagttaagatggaagttggtggaatttgacagaaagggagtgaagccctcttttccccatgtgagtttaagtcaagtgagagaaagtaaagagatgggcaaatgaagcacaaacattayttttattaaactagatagtttatatgaatagccacaatgggtttccaaatacagaagctcagaattatccagactttccatttgtactcagagtgagtaaacaaagattccgccctgtaaataaaagggaaaagaaatgtaagtttcctacaggcaataactccatgatcagttcttactaaaaattctccaactggaattcaattctcctactcctggaggatgccagtgaattagtaaagaaagatcatgagttttacactaat

SEQ ID NO: 806467 - DNA, 626 bp, Homo sapiens
tggacaagggcagtcctaatcataagccagactgcatttgcacaaaacagtagagttagcctatgccttcctgccttaaattgtggtgcttgcttgcttctcttccttactgaaaaaaaaatgtccattgtgactttttgggcacttttgtctgcattaaaaaccagttcaggcagaaaacctttctcctcaatgattttcttaatggtgtctgggagctcatttgctacttcttggtcagcagaagctgcttcttcttctgttattttattttatttttttattttttgagacgragtctgtcgcctgggctggggtgcagtggcatgatcttggctcactgcaacctctgcctcccaggttcaagcgattctcctgcctcagcctcctgagtagctgggactacaggcatataccaccacgcctggctctatttttagtagagatggggtttcaccatgttggccaggctggtcttgacctcctgacctcaggtgatctgcccgcctcggcgtcccaaagtgctgggattacaggcatgagccacggcacccagccttcttctgttatcttgacaatttcaagcaacacctcattctgaaattatcaagccatcctttgctggc

SEQ ID NO: 806468 - DNA, 475 bp, Homo sapiens
atttcttcacttgtcccagtgttttattgggaaagtgttgaggtgtcttgggatctcttctgactcgttaagcatggagaatgattggttgttaaacgcagtaggggaatattagtaggaaaaaactgttttggttttatgaatggaratgggtgcctgtcgacatttagaaataaggttggagcactatactggtgtatgtgctgaagatttggaggtcatcaaacaacctatatgtaagagtcaatgagatttaaaagaattgaaaagaaaatcagatataagagaagaacaaaacaggagaaacaatgtcatggaaactaagggagtagttttactactttaatgtatatttctcagaaattgctttttggacattacttccatacttgagaaaatatttctgtaacatacctattcaagtgtttagattaattatttttttctgattaaaacattttgctcatgtatcttt

SEQ ID NO: 806469 - DNA, 654 bp, Homo sapiens
ttttatatattcctttccaatatttatgtttcatttccttgtcttgtattatttcatcagctaggactgctggtatgatgctgaataggagcagtgacagggaacatccttgtcttttctctgtcttgggggagagtatctagtttctcactgttaggtatgatgctagtagctattttgtagatgttcttcatcaatctgaagatgttctcctctatttttagtttgctaacagtttttatcctgcttgagtgttggattttgtgaaatgttgtgtcttgtgtcaattgatatgatcatattttgtgttgactttcaaaaattgaaccaacctcgcatatatgaaataaagaccacttggtcttcgggtataattatttcaatacattgctaaattatactggctaatgttttattamggatttttatgtctacctccatgaaggataagggtgtacaaatttcctttcttgtaatatatttatctaattttggcattaggagtaatgctggcctcattcaatgcgttagaaagcgttcctctgcttttatgttttggaggggattatgggaaactgatgtgagttcttccttaaatatttggtagaactcacctgtgaaaccatttggatccagtggtttctttggggaaag

SEQ ID NO: 806470 - DNA, 627 bp, Homo sapiens
acttgattccatgttgctgagcaagtgccctaccagcacacgtgtagaatgctggaagcttattttctagaaatgattaaaaaaataaataaataaataaataaaagaggatactttcatttcctgtggttgtagtaaaagaagtcaccacaaatgggggtttcaaacttcaaaaatgtattctctctcagttctagaggtcagaactctaaaatcagtttcactgaatcaaatgcaaggtgttggcaggacctcatttcctccatgagagrgtccctccctgacttcttctagctttctcaaatggctgtggctctccaaactctgcctgtatagtcacaccgtctcctttcctgtgcatgtcaaatctccctctgcctctctttcacaagggtacaagagatctcacccaaataatgcaatacagtcctaccatgtcaagattcttagttagatctgcaaagacccttatttcttataaggtaatattttcaggttccagggattaggacttgatgtgttttggtggccattaaaaatagtgcccttgctctaatacaaagaatatgtaatttgcgaatgccaggcaccgttgagggcataggtaccataaatgactatatgaaa

SEQ ID NO: 806471 - DNA, 645 bp, Homo sapiens
taaaagcagtgaggcaaaaggatccagtaacctataaaggaaaacctaccagacaaacagcagatttctcagcagaaaccctataaactagaaaggattggggtcctatttttaggcaccttaaacaaaataattatcagccaagaaatttgtatccagagaaactaagctgcataaatgaaggaaaaatggtcttttccagacaaacaagtgcttagagaattcaccactaccaagctagcactacaaaaactgctaaaaggagctcaaaatcttgaaacaaatcctcaaaatacaccaaaatagaacttccttaaagcmtaaatctcagaggacctatataaaaacaatacaatgaaaaatggacttaaactacacccttcaacaagtggatttaacagatatttacagaacattctactcaacagctgcagaatatacgttctactcatcagcacatgaaacactttccaagatagaccatgtgataggccacaaaacaagtctcagtaaatttaagaaaattgaaattatatcaagtattctctcagaccacagtggaatataattggaaaccaactccaaagggaaccttcaaaaccatacaaatacatggaaattaaataacctgctcctgagtgatac

SEQ ID NO: 806472 - DNA, 620 bp, Homo sapiens
ttgtatgcctgttggtccattctctgtactagttatttgcaattaaatgagtcaagaagagagaatggaagaaactgatgagaaaaagtacactttggtaccaaagtgtaccaaatatttatattaaataattttctgttggtaacattcaaatttctcactgtcagcaaaacttcagcagaaatttcagatcatgatggttgatgtgacttggtgcccaaaagtaactgtgcttaagttacataaataactaaagcctgtcacagatgtttttatctactagcccatgatctattttatctttgaacttaaggagtccaaaaagatttgtccagagacatgttgtgtttataggygcagtctagtgggcatgctgagtatctatttttctaaacacactatgttgcatcctgattaagtcatttatatgcaaatgttacactgaatgagatacctggtttttaaggcttctccattgtgcataacgcctccatcataaacgttgctcacatgtttagatatttattcctcactgagatatttttatcatcgattgacagaaatataccagtgattgctcagtactatatactatgccaattttcaaatagtctaatggg

SEQ ID NO: 806473 - DNA, 620 bp, Homo sapiens
ttgtatgcctgttggtccattctctgtactagttatttgcaattaaatgagtcaagaagagagaatggaagaaactgatgagaaaaagtacactttggtaccaaagtgtaccaaatatttatattaaataattttctgttggtaacattcaaatttctcactgtcagcaaaacttcagcagaaatttcagatcatgatggttgatgtgacttggtgcccaaaagtaactgtgcttaagttacataaataactaaagcctgtcacagatgtttttatctactagcccatgatctattttatctttgaacttaaggagtccaaaaagatttgtccagagacatgttgtgtttataggtgyagtctagtgggcatgctgagtatctatttttctaaacacactatgttgcatcctgattaagtcatttatatgcaaatgttacactgaatgagatacctggtttttaaggcttctccattgtgcataacgcctccatcataaacgttgctcacatgtttagatatttattcctcactgagatatttttatcatcgattgacagaaatataccagtgattgctcagtactatatactatgccaattttcaaatagtctaatggg

SEQ ID NO: 806474 - DNA, 607 bp, Homo sapiens
gcctatatcaaaaagctagaaagatctcaaatcaaaactctaacataacaactaaaaccaagagcaaaaaaaaacacctcaaagctagcagaagacaagaaataaccaagctcagagcataactgaatcagatagagacatgaaaaacccttcaaaagaaatcaatgaatacagaagctgtttttttgaaaaaaaaaaaaagacatagactgctagctagactaataaagaagaaaagagaagwatcaaataaacacaataaaaactgataaagggaacattgccactgatccacagaaatacaaacaatcctcacagaatactataaacacctctatgcaaataagctagaaaatctagaagaaatttataaattcctggacatatacaacctcccaagactgaaccaggaagaagtcgaatccctgaatagaccaataacatgttctgaaattgaggcagtaataaataacctatgaaccaaaaaaagcccaggatcagatggatttacagccgaattttaccagaagtacaaagaggacctgacaccctttcttctgaaactattccaaataattgaaaaggagagactcctccctaactgttc

SEQ ID NO: 806475 - DNA, 647 bp, Homo sapiens; identical to SEQ ID NO: 804528

SEQ ID NO: 806476 - DNA, 583 bp, Homo sapiens; identical to SEQ ID NO: 804473

SEQ ID NO: 806477 - DNA, 643 bp, Homo sapiens; identical to SEQ ID NO: 782045

SEQ ID NO: 806478 - DNA, 564 bp, Homo sapiens; identical to SEQ ID NO: 782046

SEQ ID NO: 806479 - DNA, 615 bp, Homo sapiens; identical to SEQ ID NO: 782044

SEQ ID NO: 806480 - DNA, 663 bp, Homo sapiens
gcgaggcattaatttgaggggcaaattttaaagggatgcaaagaaacctcagtaataaaagaaaatacagtattttcttttttataataaaaatattttaattctttatttcaataaaatatattattccctcctatttgtcagaacatgaacatagaaaatatttccaataatacttttaagaatcaaaattaatgcccaaaaaatccacaaggaaaaaaacaccattatttgtttatttatttcatttatttatttttttttagacagagtcttgcctctctgtcacccaggctggagtgcagtggcgcaatctcggctcactgtaacctctgcctcctgggttccagtaattctcctgcctcagaatccagagtagctggattacaggcatgcaccaccatgcctggctaatttttttgtatttttagtagagatggggttttgccctgttgaccaggctggtctcgaactcctgagctcaggtgatctgmctgcctcggcctcccaaagtgctgagattacaggcatgaaccaccacgcctggcccaaaagtactaattaaaaaatatatattattattattaagttccggggtacatgtgcaggtttgttacataggtaaatgtgttccacggtggtttgctgcacctaacaacccac

SEQ ID NO: 806481 - DNA, 637 bp, Homo sapiens
tttgggaagccaaggcgggtggatcccctgaggtcagaagttcgagaccagcctggccaacgtggtgaaatcccttgtctactaaaaatacaaaaattagctggctgtggtggcacgtgcctgaagtctcagctactggggaggcagaggcgaragaattgcttgaacccgggaggtggagggagccgagatctcaccattgcactccagcctgggccacagacacagactccacctcaaaaagaaaagaaaaggaaaagaaaagacaacgaacaagcaaatctgtgttcttgcccaatcttactaaattgctctctaggacagtatagggctttactattttatcatgttgcgtcttggtttccccattaaaaatagaagtctgggactatacccaaggatcacattgattcctttccattttctcgttctgtggtttgggtagttttatgtttccccataatactgtgttcttctttttcttttctgggagggggcgttctgtagcagcaggtgtatccagggctcctttaagagacagttttttttgtgtgtgtttgtttttcctcctgtctaattttggctttcttttagattattttatattctggagacaaaatttatgatgactactatc

SEQ ID NO: 806482 - DNA, 629 bp, Homo sapiens
atcttaactatttttaagtgtatgctacagtagtgttaactatatgcatattgttgtacagcagatctctagaaccttttcatcttgcaaaactgaaagtctataccccattgaggaatgactacttatttccccttccctccagcctctagtgaccacattaactttctgtttctatgagtctgactactttagataccttatatacatggaatcatgcagtatttgtctttttttgtgactggcttatttcacttagcataatgtcctcaaggttcatgcacttctagtatatgacaggatttccttctttttaaaaactgaataatactccattgtatgtatataccacattttctttatctagttaaytgtcaatggatatttaggttgtttgctcccacctcttggctatcgtgaatattattgcaattaatatgagtgtgcataatctcttccagatcctgttttcaattgttttgggtaaatacccaggagtaggattgctgaatcacataataattctactgttaatgttttgagaaatctccatactgttttctttagcagctgcaccattttacattcccaccatcagtgcacagggtttccaatttctccacactctc

SEQ ID NO: 806483 - DNA, 601 bp, Homo sapiens
cttttttaatttctactaaacactatttttttcacaaaagttaaaaccaatgaaaaatgaaattccttcattcaatcaatcattgatttattcattcaataattatttattaaatgcacattatatgtgagatactgtgccgggtattagttacacagtagagagcaaaacaaagttcttcctcttgagaaatttactgcttagtataagcaaaaggcattaagtaattgcatttggaaaggagtttttaatggcaatagaatacgtttgcatttcaattgctgtagcaccatgaagatgtctaagtaccacattggcaaataacttttatttcttgcttttttcattattttgctaaatcttayatgttaagcatattaataattcattatctatagtctgtaataagggatcccaccatagtatttgttttcaaaataactggaaaatgtaggtttcaaaactgaaaacattttagctattttgaaagaaaggcttccaaagtgtattatattcttttttgccatcttaaaatatataggagataatttatacattagcaaaatgtttgtgttagcggagggtaaattgttataaaccc

SEQ ID NO: 806484 - DNA, 612 bp, Homo sapiens
gggctgggcacagtggctcacgcctgtaatcccagcactgtgggaggccgaggcaggtgaatcacaaggtcaggagatcgagaccatcctggctaacatagtgaaaccctgtctctactaaaaatacaaaaaattagctgggcgtggtggcgggcgcctgtagtcccagctrctctggaggctgaggcaggacaatggcatgaacccaggaggtggagcttgcagtgagccgagatcgagtcactgcactccagcctgggtgacagagggagactccgtctcagaaacaaacaaacaaaaaaaaccatgcaattgaatttaaaaaaagttcaaattacttgaatagacatttaacaaaagaggatatacaaatacatgacaggcacataaaaagatgtgtgacattattatcagtgaagttaacaattaataataaaataatttcagtgaaacaatgggagtttttaagtaatttcagccacagcatccaagtcacatgttgatattttgaaaaattcttgaggcttcaaaaagaagatgtttagtattttgttatataccacataagcgattatgaggtatattaatttattggttattaagaagtatgtt

SEQ ID NO: 806485 - DNA, 612 bp, Homo sapiens
gggctgggcacagtggctcacgcctgtaatcccagcactgtgggaggccgaggcaggtgaatcacaaggtcaggagatcgagaccatcctggctaacatagtgaaaccctgtctctactaaaaatacaaaaaattagctgggcgtggtggcgggcgcctgtagtcccagctgctctggaggctgaggcaggacaatggcrtgaacccaggaggtggagcttgcagtgagccgagatcgagtcactgcactccagcctgggtgacagagggagactccgtctcagaaacaaacaaacaaaaaaaaccatgcaattgaatttaaaaaaagttcaaattacttgaatagacatttaacaaaagaggatatacaaatacatgacaggcacataaaaagatgtgtgacattattatcagtgaagttaacaattaataataaaataatttcagtgaaacaatgggagtttttaagtaatttcagccacagcatccaagtcacatgttgatattttgaaaaattcttgaggcttcaaaaagaagatgtttagtattttgttatataccacataagcgattatgaggtatattaatttattggttattaagaagtatgtt

SEQ ID NO: 806486 - DNA, 425 bp, Homo sapiens
gactaatttttcaaatttcttgtagagatagagtcttgttttgttgcccaggctggtctcgaactcctgccctgaagtgatcctcctgcctcagcctyccaaagtgttaggattaaaagtgtgagccaccaagccctgcccatgatcaattttaacttgcaattgcatcatttaagaaaaaagttttattcagagctagtagctacagctagcagtacattcagttgctggtaacaaaatccagacagactgaacaaagtagggatcatattctctcatgtaaggacaaactaaaataaagctgtcctgggctggtatgaaagctcaaaggttaatagagaaccagactcccatctttctttagggcatggctttgcatcttcaagcacacatatgatgtttcctagaactccagacattgtgaa

SEQ ID NO: 806487 - DNA, 619 bp, Homo sapiens
aagccgcattggatcctccgcacaacatatctgccagccaaatacctgagcaacctcaatcaatgccgcatggagtggaaaaatcacccaggtgagtcctgcctgaattcctgatacacaagatcttaagatataataaaacaagtcccgctttaagctgctaacatttgaattgatctattacacagcaataaatcatggaaacatcaggtacatagcattctaaatcactgaccaagatgatgctggtattttttttctttttctttttctgkttttttttttttttttttttttggagacaaagtcgtgttttgtcacccaggttggagtggcataatcacgactcactgcctcaacttcccaggttcaagtgatcctcccacctcagcctcctaagtagctgagactacaggcacgcaccactacacccggctaatttttgtatgtttttgtagagacagcgtttcaccatgtttcccaggctggtcttgatctcctgaactcaagtgatccacctgccttggccttccaacgtggtggtattttcttcataattgtttaatgaatgctgcaactaagtgtcccaaaatgtattgccaatttaaatatgtagttc

SEQ ID NO: 806488 - DNA, 609 bp, Homo sapiens
tctagatgcaatctgtaagttggttttatttgcttttttcttttagtaccaggtattagataacctaaaggtatgcacaaagttttgtccttggataataaagtgctggctgctgggtttatcggttttcactgtaaaatgccaaaaaaaaaaacaatctagaaaacatccaaattattttactgtgaaattttgttaaaatgaatatattgctgtaatcacatacccttacattttaccaagcacttaacgtagtcctataagaatgcccaaaactagttgttgatatactggttttttttttgcagatgaaaaagcaggctcaragtggtggcgtgagctgcttcaagtcacatagtaactagccaatgtcttaaatgagcccttggagcatctacacggtgttctgtgatcaaaggcctcagggagtttttacagatttcctttctgttgcttccctttttgtttatgagactatccttgctgcacgcctccgttctcagtgtcagtttttttgctggcccaggcttcttctattcatagccagaatggaagtcccagcaccagttcctgccctgtgtgtaaagcagggtcgtttcttgtctgaat

SEQ ID NO: 806489 - DNA, 582 bp, Homo sapiens
ctacaaggaactcaagcaactctacaacaacaacaatgacaaacaaccatattaaaaagtgggtaagggatacaaatagacactgctcaaaagaatacaagtgaccaacaaagatatgaaaaaaaggctcaacattactgatcatcagaaaagtgcaaactaaaaccatagtgagataccatctcacatcagtcagaatggccattattaaaaaactgaaaaacagcagatgtttgtgaggatgaagagaaaagggaacacttatacactgtttgtgggaatgtaaattagtacaacctctgtggaagacaggatgggtatttctcaaagaactgaaagtaggatctaccatttgacccagcaatcccactgttgagtatctacccaaaggaaaataaatcattttatcaaaaagacacctgcacttgtatgtttattgtgacactattcacaatagcaaagtcgtgaaatcagcctaagtgtccatcaatgaatgattggataaagaaaacgtggtatatatactcccgtgaaatgcyactcactcataagaaagaataaaatcatgtctttgcagcagca

SEQ ID NO: 806490 - DNA, 657 bp, Homo sapiens
gaatttggtaactcatcagtagttataatgatcacaatcaccagccccaagaccaggaaaacacctccagaagctgtacatttttgcaagtgacacaaggtattcatcattgatcacaatcagcattggatttattgttttagttttcaagaatcttactctgttctgaaaaccatgaagtttcctcacttaaaagccaaaatgtaaatgtgtgacatgtatttttccccaaggcaagtgagtcactgcagatgcagtgacaagctatccttcagtttgatagttgatcagtgaactggatgtaaaactgcagcaagtctgcaatatgaggaaattagataagcaagattatctctaaaataaacctctactttaaaaaataatctattactccagccaaagtacacagggactgagatgatttgggggacaacattaatagatcatagatgattgattcaatgtgagaaggaatagaactaagggttagaattaaggattaaaacagtcagtgyaatgattaaatacacaggcatacgagttaaactacccgggttcacccctctaatagtatgacgggctaggttcttaaattctctgcacctgtttcctcatctgtagaatggagataattgtacctacctcataaagaaattg

SEQ ID NO: 806491 - DNA, 531 bp, Homo sapiens
ccattaagcttattttgattaagcattagatagtttataacctgcagtttgaaaaataaatttgtctgtctagatgtagaatcttaaataattcacatttagaatcaagaagttgtataacaagatagcagaggtcccttctggctctgaaaacatgatttcaagacaattaaaatcacctcagcttctgtaaatttttgtagaaatagatgtagagagaatgagtcaccctttctaactttacaataagtgyacacattacctttggcctttagtaaaatgtcacatttttgcttctgaaatgccaccaccagtcaattagtcttacagggatcagcaacatgacaatgtgtattagccaacagatgaagctgtacttctaaactatacgagtcctagatgttccaattcacagtttgttgattccatttagtgtaatcattttaaatggcaaaacaaacatggaaattgcttaacttcaatgcttagaagacagaatcccagtgaatgaaaaattttaagatgtctcat

SEQ ID NO: 806492 - DNA, 593 bp, Homo sapiens
agaaagataatttgaaacaaatagttgctaaaaatgcttttacatattgtattagaagaataagttttacctagttttctaatttgcaattatttttgatgcaaagttttttaaattatgttttatttatttagttttcaatttttattttattttatttatattttattttatttatattttgagagggagtctcactctatccccccggctagagtgcagtgctgtgatctcaactcactgcaacctctgcctcccgggttcaagcaattctcctgcctcaacctcacgagtagctaagattacaggcacgtgccaccatacccagctaattttttgtatttttagtagagacggggtttcacctttttggccaggctggtcttgaactcctgacctcaagtgatccacctgcctcggcctcccaaagagmtgggattacaggcatgcgccaccgctcccagcctgcaaagtttttcttaagcatatataaacattaataaatattggttaatgtgttggcttcattacgttcaaaagaagcatttacaaatagttaaatgatattatgttttaagcagtgtcatcagatg

SEQ ID NO: 806493 - DNA, 553 bp, Homo sapiens
ttccattagtaacatattctaatgccatcataatcaaattagtattgtagtaacaagctcaggtggctagatcagtgcgcaacacagataattcagaaataggtctaagtgtatatgagaatgtaacatataaaacaggtaatattttaattcataggaaaggacagttaatttttataaattgtgtgggcatatgtggccacatctctggagtaaaactgtgtcacatctgtaacacatacattctgtttgacttcaagtctctctattgatgaaaaygtgaatagtttcaaactttggcaaagcatttaaaaataaatattaaaattaaaactgcacacacactttttttgcctgtccgttgcattcaattactctatctcttggagctgaatttatttctgtgaggctttatgtataattatatttattactgcatttctcataatagccaaaaaaaggaataaaagcatacaaatacagtatatgtccaaacatgcaatatcaaggactacgtaaataaattacatttaaaatctgcatcatggaataa

SEQ ID NO: 806494 - DNA, 577 bp, Homo sapiens
tctattaccccatattatatgataaaaatggaccacagaaaggtttagtacattgtctaaagtcatgcgactggtaagtggtgaagccaggacttgagccagtagtgtggcttcggagttctttctctttctctctatagccatgatgtacagttgacccttgaacaatttgggggtcaggggcattgatgctctgccagtcaawatccacgtatcatttttgactcagccaaatttaactactaatagcttactgctgatcagaagatttactgataatataaacagtcatgtaatgcatagtttgtatgttgtatgtgctatatactgtatttttataataaagcaagctagagaaaaaagttattaagacaatcacacagaagagaaaatttatttactcttcattaagtaaaagtggatcatcataaaggtcttcatctttgtcatcttcacagtatgtaggctgatgaggaggaggaaaaggagggataggtcttgctgtctcagggtggcagaggcagaagaaaatccatacatatgtagacccacacagttcaaacctgtgttgttcaag

SEQ ID NO: 806495 - DNA, 577 bp, Homo sapiens
tctattaccccatattatatgataaaaatggaccacagaaaggtttagtacattgtctaaagtcatgcgactggtaagtggtgaagccaggacttgagccagtagtgtggcttcggagttctttctctttctctctatagccatgatgtacagttgacccttgaacaatttgggggtcaggggcattgatgctctgccagtcaatatccacgtatcatttttgactcagccaaatttaactactaatagcttactgctgatcagaagatttactgataatataaacagtcatgtaatgcatagtttgtatgttgtatgtgctatatactgtatttttataataaagcaagctagagaaaaaagttattaagacaatcayacagaagagaaaatttatttactcttcattaagtaaaagtggatcatcataaaggtcttcatctttgtcatcttcacagtatgtaggctgatgaggaggaggaaaaggagggataggtcttgctgtctcagggtggcagaggcagaagaaaatccatacatatgtagacccacacagttcaaacctgtgttgttcaag

SEQ ID NO: 806496 - DNA, 619 bp, Homo sapiens
gacttgtttgcctctgtcctccagatttaaggacccttgtggttacacttagcctccctgcataatttagaataattttcctagtttaacatcagctgattagcagccttaattccatctgctaccttaattcccctttatcatgtaatataacctagtcacaggtgtctgggaatagaacatagacatctttgggagaagagaaattactctgactatcacacttactaactgaaataagaaaaatctgtcttctgtattgagatttagagccttccaggacctcagtctctgacaaatatttttgctttggggcttggaataagaatattaatgacacaagcttcataaaaatctattcttaaaagaagattatcttaaaggttactccatcaaaatgatgaatcaaatcgtataactaatttcaaactgatatatagcttccatytgaattcccatcaaaagtaggcacttaagtaacccttgatcaggcagtttatgtggtagatattgctaggaagtacaagcaaggcacatgggattgtgatacgtgaaaaaaggaaagtaataacaggttcattaactaatagcaatgttaaaagcaactagggctcactca

SEQ ID NO: 806497 - DNA, 655 bp, Homo sapiens
ttatcagtctcaatgtaagaagaagcacatgaggggatgcaatgctagtacagtcattcataacctccaaaccagccaccaagggttcactgtaggaggatagggtggctgaggacaaatgctggctggtgtacttttaatgcaccattatttccatttggtttttggtggctctgtgcagtagttactctttggtgggtggtgataggatacaccaagatccgmgtgcttttggtgccttcccctggtccattctcattccactttcacagacattattgttttcaaacttgctcctctcaggtacttggttattcagccatgtcatggccagtacccattcataactcagaaaaacaactagaaattgataggttgggtctaggaagatccacgtgtatttatgttctttagttagtagagaacaatgagtaattttcttttttgaatgtagataataacttggaaacatctacttttccccattggctattaaagagatatttattagaatagttgaagcccaaagcctcacactagaaaactactaaggtaaaatacatgaatttacataatatgtactctacaaataatattaactctaattattttaagaaaaagtatatgagaaaaggattgggaagccctgttacac

SEQ ID NO: 806498 - DNA, 655 bp, Homo sapiens
ttatcagtctcaatgtaagaagaagcacatgaggggatgcaatgctagtacagtcattcataacctccaaaccagccaccaagggttcactgtaggaggatagggtggctgaggacaaatgctggctggtgtacttttaatgcaccattatttccatttggtttttggtggctctgtgcagtagttactctttggtgggtggtgataggatacaccaagatccgcgtgcttttggtgccttcccctggtccattctcattccactttcacagacattattgttttcaaacttgctcctctcaggtacttggttattcagccatgtcatggccagtacccattcataactcagaaaaacaactagaaattgataggttgggtctaggaagatycacgtgtatttatgttctttagttagtagagaacaatgagtaattttcttttttgaatgtagataataacttggaaacatctacttttccccattggctattaaagagatatttattagaatagttgaagcccaaagcctcacactagaaaactactaaggtaaaatacatgaatttacataatatgtactctacaaataatattaactctaattattttaagaaaaagtatatgagaaaaggattgggaagccctgttacac

SEQ ID NO: 806499 - DNA, 658 bp, Homo sapiens
taactcatattactaatatcttataataatttaacttatcttgcaatatttactctaaggtatgtaacttcaattttgctactatttgaggcataaaatgccattacttctatttcaaatcactaattttatagagagtttcatgaataatagtaaaaacaagttattcttaatatattagagagctgtaagatttgcattattgacaaggaacttaaatgaaaaatcttgacttgagctttaagaaattattcatcagttaaatcggtttttccagagtaagtaacrtaatttatacaaacatgcttgatacaaagtacatgggcaaagtctaaaggcatttctgaaaggaaaaaataaataaaagtaaaagaagataagctcgagataattaaacttcagtgttaataaatctaaaattttcagttattcaatttattaattattaagatcatgaattactaattctcttttttcttacaatagatggcattttcttccttttaccaaaaatcaactcattcatttttttctctcgatcccagtctttctctttctccggaatttgtaaatattccttatttctactaggtgttcaacctcactctcttacctgtttttatcctataatcacttaaagttcctagctttcccatcc

SEQ ID NO: 806500 - DNA, 665 bp, Homo sapiens
tcagttcctaattatccctctcatctttgatcttctatgtaaagcactatgttctcctttcttttacattttgatcaaaatagttatttttctgaattgcttgtaattttaaaagtataacacatgtgtagctgatttttcttttatcctactgtggtattaaaatctcattcatatatacacaacatggataatgagtagggggcttttagaaaaaagcaaaaataaacactatatattaccacctagtttaaaatatcaaacattaatgataactttgaaaccttttcatgatcacattttgtatctaacacccagagctatccatatttttgaatgtctatttcatgttaccttgctttctactgagttttacaaatggacttatttgcctgtttttgtacattatacaaatggtatcacactgtatgaatcctaacatggyttatattttgttgactaatattatgttgtagaagttacctatgtttctgtgtgtggctatagtccagtttcacggctatacagtattcagtttaatgaatagccaaatttattcatccattctcctcttggttgaaaatttacttgtttatatatgtttgcatttacaaatgattctgctaggaaacctcttctgtctcatgttgaacttctaattgatt

SEQ ID NO: 806501 - DNA, 588 bp, Homo sapiens
tatttttttaaaacctgccctgtaaccctaagattttataactttgtaaaattttgtactttattgccattaaagatcaaaatgtatggaaatagcatgagttacaaagatgcctcagcatgcctgttacattgctgcagtgtcattttccaaaaatattctatttaaactcaagaaaatcgccactgtttctttctaacacctgtcagcaactgctcatagctcactgatgtarctgtttttgcattctgacacgtgaggtctactcacattttgtaagacatgtcactgtcaaaagctaaaaataaaaaggcaaatgtgacagccctggtgccgccatgcctaagagccacaggtaattgtgatcaagaggggtatttttaaatgctgcaaaaatatcaaacttctatttcttccttttaatttttttgtgatttttattgaatttcatcttttactattagccaaaaattgttctatgattgtaaccagtgaaaactacacaagattatttttctcaagaaaaaagactgatatagttttgaaatcttttgttgagaaagctgcactaaattgaaatcacttggc

SEQ ID NO: 806502 - DNA, 588 bp, Homo sapiens
tatttttttaaaacctgccctgtaaccctaagattttataactttgtaaaattttgtactttattgccattaaagatcaaaatgtatggaaatagcatgagttacaaagatgcctcagcatgcctgttacattgctgcagtgtcattttccaaaaatattctatttaaactcaagaaaatcgccactgtttctttctaacacctgtcagcaactgctcatagctcactgatgtaactgtttttgcattctgacacgtgaggtctactcacattttgtaagacatgtcactgtcaaaagctaaaaataaaaaggcaaatgtgacagccctggtgccgccatgcctaagagccacaggtaattgtgatcaagaggggtatttttaaatgytgcaaaaatatcaaacttctatttcttccttttaatttttttgtgatttttattgaatttcatcttttactattagccaaaaattgttctatgattgtaaccagtgaaaactacacaagattatttttctcaagaaaaaagactgatatagttttgaaatcttttgttgagaaagctgcactaaattgaaatcacttggc

SEQ ID NO: 806503 - DNA, 332 bp, Homo sapiens
tgtctatgagtgaagtcagcctgtactttttcttccctaaatcatcctataatgccatttacaattatgaatcagtaaaaatttaattttttagagaaataatcaatttcatggtttttactcacatatattttaaaagaacatttacttackttataaattatactttcttctaattatgaccctgtttttgttttgttttgtctttcaggtatttttgttgtttttattttgtttcatttgttttgttttttggaaggaggaaggtaataggtaaaccagtgtttgatttagtacttgttttaaatctccattttctgtttcaattattt

SEQ ID NO: 806504 - DNA, 545 bp, Homo sapiens
acacctttgaagataaaatctagccttgaaggtaaaatttaatgagacctaagttaaagctcacgctgacaaacacaaatgtcaccagcatcattgatttcaagagaaaaagcagaagcagcctgcatcaactatgctcattttcccctttcaattctcaggcataaatatatgcttagcagaagttatgtcacaggaaagttttgagagactctggaaaatatatctagctttctaaatgaaattgcactagagcatactaaaggagctttggagacagtggggtaacataatctttattcccacagtactttgcaaccattggccaattggagtcccccctccccacacacaattttcttctaaattttcaactataaatgaacrgtagccatattctccaacctaagacaatatgaccatacttaatatgataagactgcttacttccttctctaaataatcattagtcattgaaaccagtttgacaagtgtttatttctcctctatctcagtctaactatcttgtaatcaaagaatggaat

SEQ ID NO: 806505 - DNA, 633 bp, Homo sapiens
caggtggatgaaaggggttgatgtgcaatgtgtgtgttggtgtttatttatttatttttattagaaagctatagcaagaaaaagagaatcccagatctacggagatttacctgatcttctggtttcagtaaaacacagaaaatcttctcttcaaaaaaaaggaacatgggaaaacaaaagtaataaaatggaggaggatttccattttcaccaatggcaaaattcagattcactcattttattatttctggaattagaatgcacctattaatttctactggccatatggcaacagtgaaatggctattgctacccatttatacacatataaacttgcagattyggttctgtggcctgaatttgcagaagacatgatttgaacattcttaaaacatgctatgtcaccgacacttttgatgacgcagatcccaatattgcatgaaagaacatggagataaaaaattgacttgaaattcagaagagtcagtttctaattttgaattagtctcaggaataatttaaccaatttactttactcatatattctttttattatgcacaagtattatgttttatgtaaatttgtatctaaataagtcaaacataattctttcaagaaacataaaataaaat

SEQ ID NO: 806506 - DNA, 617 bp, Homo sapiens
ttaactctgatataacattattaaaaatgtggcctttgggaagtcattaaggcataaggattctgccctcatgaatgaaattagtacccatataaaaggtagcaattgttgttgaggatgtggaaaaactgcatgcttcatacatggctggccagattgtaaaatggttcaatcactctggaaattagtcttaaactttcttaaactgttacacttactcagcaattgaaactgcctttgcaaattcattacagtacaaaatctgacatagttgtgaagcctgaacatctgagacagttctcagttaatttagaaagtttattttgccaaggttgaggacgtacacctgagacacagcctcaggagctcckgacgacatgtgaccaaggtggtcagaggatggcttggtttcacacattttagggagacgggagacgtcaatcaacatatgttagatgaacattggttaggtccggaaaggtgggacaacttgaagcaaaggcggaacaacgcaaatcggggaggagactcccaagtcattggtatataagagacaaatgattgcgttcttttgagtttcagattagcctctccaaatcagatatgcattcatctca

SEQ ID NO: 806507 - DNA, 585 bp, Homo sapiens
gtttgctggcacctgaattttgtgtttgccagtctccacctatgagcaataaatttctatgatactttatatttcagcccagatcaactaagacaacatgtcttctaaaatgctacatataaaatgtacttatttatttgtaaaaattgtattgattggttatctctctagaaagtaagttttatggaagaactttgtaaataaataagtgaataaacragtaaatgaataagctggttttacacttgttccctgaattatattgtaattttaagtataacttctcttacaattttgtttcatattatacgagtaagtaaaaataatctggaagcatataacttttcaatgaaactttaaacaaaaatattctaaattaagttaactggcaaggatttattataatggatgaaatatattgggatataattggtcaaaaaatataaaaattatgacagttatttaggaataaaaatacatttattaattatacattaaaataaaagaactaaaatagctatataaaaatcttttggaattaatttttactggctcatagtaattctaaatattacttacacaata

SEQ ID NO: 806508 - DNA, 626 bp, Homo sapiens
tctatggagtagctgtactttcacgacttgatgttcttaataaacttgcttttgctttgcactgtggactcacctgaattctttcttgcacgagatacaagaaccctctcttgggttctgggtcaagatgactttcctgtaatctttcaccttcctcacaatcatgacggaaggtgaaaggcacatcttacatggcagcaggcaagaaacagaattaaaaccaagcaaaacttcaacacatattagcaacagtgcatcaaaatgaaactttcttaaagttcatttactgttaygtagcatgcaattatacaatatttcctatgtatccaaaatgtcactggcttctgctcccactggattgattaaatatatttaacatatatataaaatatgtatagtttacatacatataaatatatagtagatgcttgaagaacacaggtttgaattgcacaggtaccattatgtgtgattttttttctctgccatccctgagtcaccaagataaatccttccttttcctcctcctcttcagactaatcacaatgaggatgaatacctttagggtgattccctttaatttagtgaacagtaagtatattttctcttgcttatgattgtcttaa

SEQ ID NO: 806509 - DNA, 614 bp, Homo sapiens
catattatgttaagtgtaattatgaccttattattgtctttatttggagattatgtataatctcaggagatgtatatgggttcaagttgaccatgggtggacttgtaatggttaatactgagtgtcaacttgattggattgaataatacaaagtattgatcctgggtgtgtttgtgaggktgttgtcaaaggagattaacatttgagtcagtgggctgggaaaggaagacccactcttaatctgggttggcatgatctaatcatctgtcagcacgacctgaatataaagcaggcagaaaaatgtgaaaaggctagactggcttagcctcccagcctacatctttctcccatgctggatgcttcctgccctcaaacatcaggctccatgtttttcagctttgggactcacagtggcttccttgctcctcagtttacagacagcctattgtgggaccttgtgattgtgtgagttaatactacttaataaactcccatatgtaggtgtgtgtatatgtcttattagttctatccctctagagaaccctgactgatacacctgctctaacaggctgttgaatgcccatggcttttccaggtgcagggcataagctgcc

SEQ ID NO: 806510 - DNA, 622 bp, Homo sapiens
ttaaataagtcaaaaactgataagagtctttctcgtaatgtttccctatcagttcctttgttttcactgtcagagtagctatcatggttccaatcctttaccattttttttccttaaaaaaaatctctctctctctctttctctctctctctctctstgtgtgtgtgtgtgtgtgtgtgtgtgtgtgtctgtgtgcatgtgaaaacacttctttacttttgctttctacaagatgctctgggttactttgtgtcttccttgtccctgaatctgccatctcttcacggacctggtttctttgttagagatggtattagataccaagatctgtggtactagatatgctcattgctgtgatggtgccactgcttatagtcctactgagcagacatcagataaataaatgtgtgtatattaatcatgtatatacaaatatctacaaatatgtctatatgtaaccatctgtatccatattaaggtgagcatgagttaatagcaatgcatccaattctgatccattgctacaaggatctttctagccttgtccccttgtttatttgtagcttcctctccaactgtgagaaatatggctcccaccacccatcattcatttaactagtgt

SEQ ID NO: 806511 - DNA, 622 bp, Homo sapiens
acaatttttcatattttagaaatgtattgcagcctgactaccctcctggggcaaatttgatattacatgtataaaccttacagctgaaaatttaataataataaaaaaaaacctgagtggcttattcatctgaaggccaaatggaactgcttgatcaagagatccaggtcctgatgtttttctttctttcttttctttttttttttcttttctttcttttttttatttttttgagaccgagtctcgctctgtcgtccaggcaggggtgtaatcgcatgatcttggctcactgcaacctttgcctcccrgattcaagtgattctccaaccttagcctcctgagtagctgggactacaggcactcgccatcatgcccagctaatttttgtatttttgtagagatggggtttcaccatgttttgaactaattcaattttaggctccaaatttgtatgtatcaaattagaagcagtaaagtacatggcagataactctgtcaggtaattggttatggacacatgtatctataagggaggcttagaattatagttctagccgtaagtcccaaaagtgcaaataggttttggtgaacacatagcagcctctgcacgttggagaaaata

SEQ ID NO: 806512 - DNA, 650 bp, Homo sapiens
taattctaaatgttggaacattagaataattcttaaaacaggaacaaaatcaatgcttctatgcaacaatatagtggtggtcttattcaaaagagacaaaggtgtaagaatacaaaagaaaacagcaaacttttcattattatgaataatataattctctccttagatgattccatttmatctacaaataaaatgttagaataaataagtttattaagttatttcaatgtaaaattaatatgaaaaatttaattacatttttgtatgccagaagcaattagaaaacaagtattttatataggactatttataacatggaccaagactatagaatacccagcaatacaagtaactaatatgtgtaagactactggagagaaaataattttaaaattatttatagatatttaaagatgatcataattgagattaatatgttcgaaaggagaagaaaattcattttttaaattaatttataaaatttatgagattttagttaaagctcagcaggatgaagcttcccaattaattaaaaaatgtgttttgaaaagcaaaaggaaaacaatagaaaaaatattttaagctacaaaagttgagtgagataatctagttgtggatatacaataaatttatagtaattaaaaagtata

SEQ ID NO: 806513 - DNA, 645 bp, Homo sapiens
agactcctttgcttcacatcagctccatcaaatgtaatacctagttctcatcattcttcatctccgttgctattttgtgaaactaaatattcactacccacttacacttaatcttgtcaccatatttattcccttcacagcatttatcacaccctgaagggggtttgttaatatatttttrttaatgacatcatttacctattgaacactgattgtcttcctgttcacagagcttttccgaattcattataagaactcagcaaatcttgggtaaaccagtaaaaaacatccatcagtattagatggctacattacgcattaccagaagtcaggatttctggtaacatagcccgctttcgtttctcaacaatgtacattataaaaaagatgtaggcaaatgtttaattttactttcaaacttttatttaatttatactgggtttcatatataaaagaaaaataaaaaccatttttcattgctatttcatataaattgaaactatggaaaatgtaattccttgataatgtggtttattccctgaaatataatatttaattatgtaagtttgcatcagatacaacctgtctacactctgacttttctgaaatattaaaatatgccaacccaaatatgatattctcctg

SEQ ID NO: 806514 - DNA, 593 bp, Homo sapiens
gtagtgattaatctttccaatgaatttttctgtttttagcccattaattttcaataaacattaatgaagtacttatcatgtattagccactatgttacctccaaaaataaagatgatagataaacgatatttggtttcggcactcatttaatatcattttgtgtgtatatgtatgggtagacaaactaataacattatgacatggataatcacatgatcactagaagctatgtagtgtgtgagcccaaaggactgcaagtaaaaggtggtaatgaatatgcactttctcatccccccaataacatcactaacacccaaatccaacctctggggagttagatccatgaaggcaaggatgctttgattttacaatggttctactcccgggtccctaaaattaccaagcactgaacaaatatgtgttgaattaatgaaakaattagatttgaacaaaatttatattctcagtaaactcaaactccttattaaaagactcttaacaaaaacaaacaaaactatgagcacttgcataattctcagaaatactatttgtttccaaaagcttaaacttctaaataaaaaatgtatagaaa

SEQ ID NO: 806515 - DNA, 617 bp, Homo sapiens
attactatattttttaacaagtatcttatagattatttaaattaaaaaatgtattttcactaatttcttatccagcatttttctttccatagtgcagatctaagtttctgactttaatcattttcaatctcaaagatgatttccttttaaaatttcctgctgagcaggtctgctggccataaattccctcagtttttgtttgtttaaaagtatctttggccgggcgccgtggctcacgcctgtaatcccagcactttgggaggccgaggcgggtggatcatgaggtcaggagatcgagaccatcctggctaacaaggtgaaaccccgtctcyactaaaaatacaaaaaattagccgggcgtggtggcgggcgcctgtagtcccagctactcgggaggctgaggcaggagaatggcgtgaacccaggaggtggagcttgcagtgagccgagattgcgccactgcagtccgcagtccggcctgggcgacagagtaagactccgtctcaaaaaaaaaaaaaaaaaagtatctttatttcaagtatactttagaaaaattattttactggcttgaaatccaaaattattatattttcttatttcaacactttatttaactc

SEQ ID NO: 806516 - DNA, 648 bp, Homo sapiens
atccattattcctccccatttaagagatctgtgcacggagactcacatcaatgcttgaggagacagaaagccaaatgccgaagttgatttgaccatgagttatgcagagggttatgatttgattaggagtttgtgcaccaggctgtcatcgcaatctctccagtatcttttgtctttcctgttgtgtagtttagatgatattttgaatagtatagtttaattaatactgtgatgatatacaacatttgatttataaaatttaaactatatctttcttgtcttcttaacaaaattattgatcactttctgtttctttttagcttccataacattatagttcccatgtaacaatttataattatctaaatttttgccatgcgttattgaggaaaaaatcttaaatgcatatctgctaaaagttatacaaattacactgatggtatygtgtacatcaatccattatcttgtaagctttctctataaaggagaaaatgaaacaaaaatgacaagaaaataatttatagtaccttacagacaagatgttttcatgaagaaatgagttaaataagaagttttaaataagttaaaaggcctatagaaaatttctattttcatacagttgcatactaaatccttaacctaattgaa

SEQ ID NO: 806517 - DNA, 617 bp, Homo sapiens
tgtttctcccacctcccaatctccctttttttattttgtgtataatctcatgtgctgttttcatttcattgtaattttcttcataattaagaatctatgacttatttcctttccctatcatttcctttctcgtaacatagcaaaacaatgtggcaaaatcagtgatttgttacttaagtaatgtaatcagtgctyatttaaaaaaacaaaaaaagaatattttaatcatattttttctttatgagtctctacttgtttgcacatatttgtagtagggaaaaaagttgatatagtaaacattattttccttccttttctttttctttattctagcagttgctcattgaatcaactggtataccgaaattctgtcttttgagcaaaggcataggtcccagacagtggagtgggaagaaatatgtagagacagtgtctgggggaaaagggaagaaaagaagaatatttgtgcactctaacagcagagacaactcatatgctatttctttgcatctgaatgaagtcaacaaaactcatggaaaacagacactgttctctgagttctacaaaaaaacagagcctgaggcaaagaacccgtatgttaacaattatttggcaag

SEQ ID NO: 806518 - DNA, 604 bp, Homo sapiens
gcaagttactccacattatttaaaaaccaaatgaaatgccacatccacagagaagctctccctgaacactttccttaaattagcctcttctcatcatgctcaactataacactatttcacttcctttatagtattcattcctatctgaggctcactcacttatttatccattcaccattgcatactttccaacataagaaacgttacaataaagtttcttgcatctttttctttgccatttatcaaattatttctagagcatgtatttgccacacatcaacttgtatattaaagtctatgctgcattttttctttcactcattttgctatcctttcasagaaagattttactaacgtgtgtctataccaacagtatgtgtgctacagtttgaatgcttgtgttcctccaaaattcattttgaaacagaatctctaatgcagtagtattaacaggtggggctttttaggaggttatcaagtcatgagtgctcttctctctgaatgcgattaatgcccttattgaagaaagaggcttcacaccgtgttcagccctgtagcccttttgtccctgccaccatgtgaggacacagggttcctcccctct

SEQ ID NO: 806519 - DNA, 578 bp, Homo sapiens
tgatcgtccttttaccacaaaatcattttaagatgatgactgcactgataagaccaaccagtttttaggttgattccattacctgtacatatgctctgcatttatccttaaaaagattttcaaagttatttgatcgccagtaaaatggtacatcataaaacacaaaaayagcaattaagtaaaacctattttattgttgtttcttgagaaagtgtaatgcatagatgattttagagacttgtgttttccttggtgaatttcaaacataaaaataggatgtaatttatatactatgaaaacttatttccatttatgaagcaatactttgaaatggtgaaatattaaatgacagtcccttttggttcatgaaggaggtggatggctctgttacattacactaactttgtaaattaagcattatgatgctcactttaccccctttgcttaatctccttctctgtcagctgtgcgttttgcatttgagtaataaaactcacagaatattagctactcagaaggttttatttcatatctgagaggctctccaatttttaaaatcacagagatttcctatttaa

SEQ ID NO: 806520 - DNA, 632 bp, Homo sapiens
gagaaacgtaagtgattacttgttcacttctgtgaaatgagttacttaagatgccatatgccatagccatatgtgtgaaaggaatataatatgaagtatgtagaactgtttaagaaaacatttgggagttcttttggctataaaaagctcagattatgtggattaatttgttgacatcataaattgcaaagaaaattaaaaacaaggtgatatgtrtatgactatgtatttatatatacatacacaagcatacctcaaatatattgctggtgtggtttcagaccaccacaatagagagaatattgcaataaaacaagtcacatgtaatttttggcttcccactgcctataaaagttatgtttacactatacacaatagtctattaagtgcgcaatcacattatttgtttaaaaagtacatactttaaaaatactttattgtttaaaaatgctaataatcatctgagctttcaatgagtcaaaatctttttgctgttggagggtgttgccttcatgttgatggctgcggactggtcagaatggtggttgctgaaggtggggttgctatagcaatttcttaaaataagacgacagtgatgttttcctcattgattgactcttaccatcatgaaa

SEQ ID NO: 806521 - DNA, 634 bp, Homo sapiens
agacaagagaaataaataaaggccatccgaattggaaagaaagaagtcaaattatccttgtttgtagataataggatcttacatttggaaaaaccaattccactgaaaaactattagaactgataaacaaattcagtaaagttgcatacctgtatctacgtatctcacaaatatactggaagcagaaccagagacaggaataaagatatacctgaattttggtggaaatgtttttcaggaaaaaactgaagcgggatagagaagagaaaaataagaacaaagatattttgatccacagggaraagaccctggagaatgcattactcccagaagatggttccttttttaggccagagggtgagatgttggaaaccatatactgttaatcagggctaaaggtcactccctggggaaggagcagtggtgtatgttttttagggcagtgactcctatcagtcaagtgcatttctatgtagataggtgacagctcctagccattaccagtcaaaagagatacaaaggaaatctaggtagggcaaccacatctaccactacccacaaaaatgtctctatgtgtagactctatgtctaggcttttatacgacaaaggctggatatagtaaatatccatatt

SEQ ID NO: 806522 - DNA, 635 bp, Homo sapiens
aaccataaagcaatattattgctaacgtgcttctaactgtaattgcattttagtgaaagatgaatgtttttgtggttgtttttgtaattactatcattctttggtagtttctatttgtttttgctctttagttacattttcaagtttttttaakttttttttttaattagtgaggtaagcttagtacaatttaaacctctcatacagactttaataattaaaaaaaacaaaattatgaccaagcacggtggctcattcctgtaatcccagcaatttgagaggccagtgtgggaagattgcttgagtccatgcatttgagaccagcctggtcactacagtgcaaccctgtctctataaaaaattaaaatattaggcgggcatggtggtgcatggctgtagtcccagctatagtcccagctattcaggaggctgaggcaggatgattgcttaagccaaggacttcaagggtgtagtaatctatcatcacaccactgcactccaggctggcaagagagcaggactctgtcttggaaaacaaaaacaaaacaccaaaatcatctttctatttacatagaaatgcccttcataatttattgtcttttatcatttgccaaggaatagggtcataaggaggt

SEQ ID NO: 806523 - DNA, 590 bp, Homo sapiens
tttctttttttttcctatgaaacggagtcttgctatgtcacccaggctggagtgcagtggtgcaatcttggctcactgccacctctaactccccagtacaagtgattctcctgcctcagcctcccgagtagctgggattacaggcacgcaccaccatggctggctaatttttgtatttttagtagagacggggtttcgccatgttggccaggctggtctcgaactcctgacctcaagtgatctacccacctctgcctcccaaagttctgggattacaggcgtgagccaccatgcccggccttcttttttctttctttttaaaactatgctagccacttaatgatcactctgtgtctgaagattcagaatacatctcagctcttmgaatgtcggtatagtatatatatatatgtgtatatgtctatatatatatatatatataatgcatatatatctattataacccctcctctctaaattttttctctctttgggaattctatttatatatcttatcctttggagtgctttcctatgtttcttttccatcatattgtctgttgtttttgtcccccttctgcatccagaaa

SEQ ID NO: 806524 - DNA, 600 bp, Homo sapiens
aaataaatatacaacagttcgaaatgcagtaagtagtgatagattgttataaaattattaaaaagatgaagtaatataattcttgtaatagaaaccaaatgaattacagatgtgtactgaaatctctaaaggacccatcataaaataacacaaataggcttagctaaaaaacttatcagaggagataaaatggaacaatgaacaatatttgattcaactttcaaaaggcagcacataaataataaaacaaagagcaaatgagaaacatagaaattaaatgtcaacaagtgaacttaaatcaaaatatgtcaataactgcttgaatgtaaatagcctacaaacctaactaaaaggcagayattgtaaggactggtaaaaatgtaagaccttatatgttattctcccctctcccctcaaaaatcacaattgatacctaaggacacaaacaaattgaaagtaataccaaaaaaaaatacatgcaaaaactataggtaagaaacctgttgcgactatactagaattagagaaaatagattgtcaagaccagaaaattactagagattttaaaagtacatttcataacataaaagatcaattgat

SEQ ID NO: 806525 - DNA, 516 bp, Homo sapiens
taatgaagtaagaattagttattgttggagcccattgactcatatcatcagaatcacttgctgaacttcatattgtgaagaaacctgacccaaggccgccaaccggttgtccttgggaataggagaaaatccgtttcctcycagctgaaggcctgctttttcactctttgctgtctgaagtactggaggatgaaatgtctattttctcagaaaaaaatcaaaatccactctcccctgcctctgccacctcagactgtgtctcatatctgtgcctcagacatgaccattccctaaactgcaggatagctttaaaagctggtttattcatacttacacagcatttttgttgagggggtaaacagaaatctaattccatatgtttcttaggctcttttatggtgttcctttagtgtcatggggagaaaaactcaggctcgcgttcccttttaatatggtgtggatttctaacttcttgtgagcaaaggcttctacaacaacacaaacccttccctggaa

SEQ ID NO: 806526 - DNA, 528 bp, Homo sapiens
aagggtagaaggagaggtaaataaaggagcataagacgggaaaacaaaaattgtgagagaaaggttattgggttaagtttttcaaatttttaatttgttttggttaaaatgtcttttaagaaaacaaatgtaaaatatgcattttctttggaaccttcttcataccaagacaaatagaagacaatgggatgttttgcttccttttggtcgccaaatgcctttcaaatggcaaaagaaaagattatgtaaaaaaaaaaaaaaatcccraagatatcaccaggagcttaaattacctggaaaaactatgacatatagaaagaggcatagagaaatgtggcttataatgtgattatgcatcatgagcacaagtgtaacccacaggacatgcatacttagactgaatcaaacctctgaaagtttggtaatagttggctctaagttttgtttctgcttgttatgtttggagcttgtaaactaaggtctgcttgtcttaaatcctaaacacagcaacctgtgagtcccaggaga

SEQ ID NO: 806527 - DNA, 615 bp, Homo sapiens; identical to SEQ ID NO: 761710

SEQ ID NO: 806528 - DNA, 586 bp, Homo sapiens
tctcttttaatttcccctcatttcccaggatcaagtaatcattattctcttctttacttccatgatatcatttttttttccttccacatgcaagtgagaacatacaatatttgtcttttatgcctggcttattttacttaacactctgtcccccagttccatttatgttccttctaatgacaatatttaattcctttttatggctgaataacatttattgtgtgtaaataccacattttctttatcaatttatccattgatgtataattagattgattacataacttggctattgtgaatagttctgcaatatacatgggtatgcagctatttctttgayacacagaattcttttcttttggatacataatcagtattaggattgtcagcttatatggtagatctacttttagtttttcgaaggatcttcgtactgttttccatacatttcgtactaatttacattcccaccagcagtgtaacatcattcttgtttctctgcgttctcactagcatctgtaattttttttgtctttttgatgatagccatgtaaattgggtggagataatatctcatgtgttttat

SEQ ID NO: 806529 - DNA, 628 bp, Homo sapiens
gaaagtctggttattacttggccattgcattaagcaattttctgctttttcagtaccaataataatcagcttttagactttatctttcatcattaagtagcctcgtatacttacttatcacagccttttggtgagggaacaatttcactgttctctcctattgtgtggtaaggaayacagtaagaagaaatgatagttaatttcctccaatgccaaatatgtattaatcagggtgtaccagagacacagaacgaataggatatgtatatagatatatgaaagaagactccacaagttggacacccttggatgctggtagtgtggctctgcataaaatccttgagacccgaggggccactggcataagtcctagagtccaaagaccagtgagcctggagttctgatgtgcaggcagaaaaaggaaagtctgtcccagctctcagacagagacgtgttcaccttctatatttgttctcccggggccccccgctgactggattttccccacccagttcactcagactcacccactaatctcctctggaaacatcctagcagacactcaaaataatactttatcaggtttcctgataaaagcctcaagccagtcacgttgactcctaaaatc

SEQ ID NO: 806530 - DNA, 577 bp, Homo sapiens
gaacctaatgtatccatgaactttaggtggttataatgcgttactgtaggttcatcagttgtaacacatgtaccactctgatagaggatgttcgtaatgggggaagctgtccatgagtgagggcgggagtatatggaaatctttgttcctttctctgaattttgctgtgaacctaaaactgctctaaaaaaaaataaactcttaaaaacattagcccatactcaatatatatattttgtatatatatttactgtatcatatattatatgcrtttgtatttttaaggatacatttatgcaacatccatcacaaagtgatagattcatcaaaaaatcttcatttctctatttgaagcctggtttaatcatgaatattatcaatgagtacttgtcacttaaaaacaattttttaagatcaatatgtgttcctcaattagtcttggcattcagatcattcttcacttgaaggattaaaaaactggataaattttaattgtggctttgaaaaaactttacttataaatttactgcagcttgatgaattttattgtcatttgttgcatcatttcttcgtgaat

SEQ ID NO: 806531 - DNA, 594 bp, Homo sapiens
gttttaatcttctctggttaataaatttcaaagaccattgtattcctcctcagcaggactggtcccttcataaatcttcattctgtgctttgggaaagacagataatttagttaggaggagagaaaggtcagagagaccttgactttgcttctttagttcagttctattttggagttaaatagtctggtttagtccataggcaaacatttaatacctgttcatactctctgtctttggtaggtcaagaggctgtcttagcttgtttgacctgctttgacaaaaataccatatactaagtagctgataaaaaactgaaatttacttctgagttgtagatactgggaagtctaagatcaaggaagattaggtttctggtgagggtytgccgtctggctcatagagggcgccttttctgtctcctcacatggtgaaaggattaaatgagctccctcaagtttcttttataaaggctcaaacatattcatgatggccctgcccatatgatctgcttacctgctgaagatcccacctcctaatactatcatctagcgggtgaggatttcatcatactagtttttggggaggatgtaaac

SEQ ID NO: 806532 - DNA, 626 bp, Homo sapiens
aatcttgtctttctcttgagttgctgtatttagttgagaagtttcactggtcatttgtcactcaaagtatttattaaatcctatttcttattctttgggatcaaaaagaaggccgtgttttcactcatataagaacaaagaaataaatatcccaatctcactcttctcctaacttctgatctcttgctgctgctctccaatggccaaacacatcagggagcaaatgagacttttggtgcaggtcagtgtcccagggcacaargcagagacgaatggagagtgcatttggagagacaaaaagcggatagcacagcacttacttcttacgatttttcttcatgtggatatggaaactcttttggttccagtttatattcttaagccctccatcgttaaaggaacacagaaatctttagtaacaattctaagacatattactacatatttaaaacctagacatatgcaattgaatttttctttaaatcattcataaattcactatcaatctcataattgtgaaatcacaagatatatctacttgaaattctgaaggtgataccaaatgttatgtccaaaagtgatatggtttgggaaaaaaaattagaaagagaatatactagtatttc

SEQ ID NO: 806533 - DNA, 529 bp, Homo sapiens
gaacatgggaggctcagaggggtcatggcacatgtctggctggtcatttcctgggctacacactttgtattgaatgttgttatacaaatatgttccttttaaagttcccaagcattcataataactatggaatagatagtcttagtttgtttccctacctctgtaacctgatggaggtactgggagcaatcttccatttggggaaaatcagtcgaggtttttattatacaagtccaaatctctagaaaaatgagtctcacgatgagtttcctcatgcttcagccgtgcatagaccagtcagcttccaggtatgactggagctgggcttgtcrtcttcctcagagttactttgcaggggttgtccgggctcggttttgcctcccaggtttcagcagccgcagatagtaagtcggtgtttcgccgggcctgacgtttgccttctttacagttttccctgcggctggttgcatctttgttcacaaacacttgattggctatttccagtaactgtgatgtattcataactgca

SEQ ID NO: 806534 - DNA, 529 bp, Homo sapiens
gaacatgggaggctcagaggggtcatggcacatgtctggctggtcatttcctgggctacacactttgtattgaatgttgttatacaaatatgttccttttaaagttcccaagcattcataataactatggaatagatagtcttagtttgtttccctacctctgtaacctgatggaggtactgggagcaatcttccatttggggaaaatcagtcgaggtttttattatacaagtccaaatctctagaaaaatgagtctcacgatgagtttcctcatgcttcagccgtgcatagaccagtcagcttccaggtatgactggagctgggcttgtcatcttcctcagagttactttgcaggggttgtccgggctcgsttttgcctcccaggtttcagcagccgcagatagtaagtcggtgtttcgccgggcctgacgtttgccttctttacagttttccctgcggctggttgcatctttgttcacaaacacttgattggctatttccagtaactgtgatgtattcataactgca

SEQ ID NO: 806535 - DNA, 622 bp, Homo sapiens
agtgaaaaccttcctgaactgactatccctttgctactagtactgctgctgcctgccctcttagccactgagagggatctaaaagtagctgtaaccaggaatctatatacgggaactgatctgggtgcccttgcttacaggttaccttgtgccataccttcgagacaagggacctacccaggcttccttctgatggccaactcacttctaagcctggccagtctatttcacacagttttaagtaagtttccctggtgtcatagtaactccataatccccattaaatccctttttgaaattctttggcatagttcctaatggggtgggcttactttgcacctgacccatgtttttctcacactctcaccacacacacacacctcacacaacgaagaacgagtaaaagggcacacacacaactaataattaaaaccaaaatctgagtatcgagaaaccygagccaagtcaaaaccaaaaccagaaccaaataccaagcaatttaagttaagaccaaaaccgaagtaccgacatgggcacgtcgtgggtgatcaggccacgtttccactcaaatggagtgggcaaattccaaagactagtattaccaagttttggacgtctggac

SEQ ID NO: 806536 - DNA, 610 bp, Homo sapiens
gatttcatttcctttagttatatactcagtgctgagattactagatcacatagcagttctatttttaattttgtgaagaacctctgtactattgtccagaatggtttaatactgaataaataagatgccaagtcaataaatttcaaaatttagattttaacatttactcttcttattctcccacattatttaaatygttaaccacagttaattttacttctacaacatcacttcttccttattttagctttcatttccatggacattttttaaacaagtcatcatttatatcaaaacaaaaacaagcaggcaccctgatatctgattaatatttctcacttagatttctagattggattttcacctccttaaatactcccttgagtcccctgacgatcatagctaattgacaacgcaaacttaatctcacacaaaaatctttaactgaaaataggccatgaattatatttgaggtgattatgtaccttaataaatattcatttgggagcaaccattgcagcatcaataggtctatgacagagctattggttaaagatatgtgattataatctcctgggattatgtggaaaagttttaaattttatgataa

SEQ ID NO: 806537 - DNA, 610 bp, Homo sapiens
gatttcatttcctttagttatatactcagtgctgagattactagatcacatagcagttctatttttaattttgtgaagaacctctgtactattgtccagaatggtttaatactgaataaataagatgccaagtcaataaatttcaaaatttagattttaacatttactcttcttattctcccacattatttaaattgttaaccacagttaattttacttctacaacatcacttcttccttattttagctttcatttccatggacattttttaarcaagtcatcatttatatcaaaacaaaaacaagcaggcaccctgatatctgattaatatttctcacttagatttctagattggattttcacctccttaaatactcccttgagtcccctgacgatcatagctaattgacaacgcaaacttaatctcacacaaaaatctttaactgaaaataggccatgaattatatttgaggtgattatgtaccttaataaatattcatttgggagcaaccattgcagcatcaataggtctatgacagagctattggttaaagatatgtgattataatctcctgggattatgtggaaaagttttaaattttatgataa

SEQ ID NO: 806538 - DNA, 619 bp, Homo sapiens
cgagttgtctggcattgtgatgcagagtgagatgattttttaaatataattctatcatatgttcattctttaatttcattttcttcccttcataagataaaatttaaatgatgcaaaatggtcagttttaaaatgtctttttccttccctcagtttgaattccaagatagctctgtttcagcaaaaataactcttaacatttttaactatcccttttactcgtttggcttgataattttcaagctagataagaaaatcaaatttgttttatttgaatarcaaaataatatttacaaaaatataatttgtcatatgcgtcatcatgaatgtgtacaggttatgtacagttttatatgtttcttcatccaatggtcagaaaattatgaaagtcatcttgggttttgttcagccatcttgaattttgtatgctttctcttttataactgcacacctggctttcttacgattaattttggaagcaggaacagacccagaaagcagaaaaataggctttgagagcctcggtgtactttcttggttgaactgacagtaaaattcaaaaggaattttctaatgaatcctaggaagcatttacatagataaaaataaattagcaaat

SEQ ID NO: 806539 - DNA, 455 bp, Homo sapiens
ttttatatatcaacttcactgggccaggggatgctcagatgttttgttaaacattatttctgggtggtctgtgagggggtttgcagaagaaatcaggatttaaattggtgcgctcaataaagtaaatggtccttccccatgtaggtagacatcatttaatctattgatagtctgaaatagaagaagaagatggagaaaggttgaattctctctctctctgcatgacagtatgagctggaaaactgatytttccctgcccttggagctcctggttctcagaccttcagactggaactgtcacaggatgcttggggtgttgcttcgccagctggaaacctctgtagccagtggtgcctttgcccaatttttgcttggcccactgagcttgttccacccactcagcctggcaggctgtgcttggctggcactaccaggttggataacatgcctgccaa

SEQ ID NO: 806540 - DNA, 577 bp, Homo sapiens
gcatccccctggcttccctcccatgctcgttggcacggaaagtacagagtcagtgctgccccaagcatgtgcacattgggccaggttgtgacagcacccagtctcggcctcaactttgctcagataggagcaggctctgggagtggggagaggccaggcagcaggaacatgcacttctgagccccctgagagtgcagagatgcctgggtctgcagctgtggcttgsgcagctgcagctgcacttgggatgatggggctcctgcctgctcccagctcccaagagcatagggaggcccaggtcaacagctgtagctgggtggctgcagctgtacctggggaacgtgaagttcccaccatgccaattcagaagcgggcagggcttttgcctgtttccagctcccactggctccctgcagcacgcagcaccggctgcacctcctccactgctgccagcgtcatggcagcagctactcaaggtgggtcgtcactgccatcagaactagaatctatgcaatcagctctctgggtcccaggtcttctaactgcaccacaggctttcctgggtcttcagtatttg

SEQ ID NO: 806541 - DNA, 620 bp, Homo sapiens
tcaatgccatctggtgaaagctcccaggagagggtttgtaccctgccaagccacaggtgcagaactgtccaaggtcgtggaagcccagctcttgcgatcagcatgatctggatgtgagacatagcatcaaaggagatcattttggaactttaaggttcaattactgccctatgagatttcagacgtgcataggccctctagactctttgttttggccaatttctcccaaaaataaacagtcatatttacccaatacctgtatggccgttgtatcttggaaggaactcacttgtgtttgattttacaggctcataggcaggagggactagccttgtctcagatgagattttaaacttggacatttgggttaatgccagaatgaattaagattttgggtactgttagaaagrcatgatttgctttgaaatgtgaaagggacatgagatttgggaaggtccagaggcagaatgatatggttaggctttgtgtccccacccaaatctcaccttgaattgtaaccccatgtgtcataggagggacctggtgggaggtaattgaatcatgggggcacatggatccataatgtctagcatttcaatttttttggtaccctctgcttt

SEQ ID NO: 806542 - DNA, 662 bp, Homo sapiens
attttattcaatggtacattaaatttttcttagtatggttagtgaaagatcttccagctgccttttggatcattttgaggattccccataattgtttgagctttttccatatttttgatccaaacaagatgtaaaaatatcatctcgtgytttacatgctccaatctagggatcgacagtttgtcaaaaaatcttggtattttttttagtagagaatggcctctcttgtttctgatgatgtcagcttttatttctatcattttcttgtatttaatacgaaaatttcccatgacttctttcaatgttttctattcattttgggatgtcaccattttctgtcttatgtaccttggtgtggctgtatttctcctgcttgtagttcactgttcttgaatatttaagtttaggtttttcatcacatttaaaaaaatggttagtcattatttcttcaacataacttttcccaattctctttcttctcacccatgggaatgtaaatacacatataacatttaatattctcccaaaaaatactgactttaaaaatttttctctctcctatttgttacttaaattctatttatttatcttgacattgtcctacaaaccattgagtttctattatttttatttttttatattatttttatatattattttat

SEQ ID NO: 806543 - DNA, 578 bp, Homo sapiens
ttaatgtaattaatcacatcaacagattaagtgtaaaataatttgattcttaaaataggtgcagagagaggctgggcgcggtggcacatgcctgtaatcccagcactttggaaggttgaggtgggtggatcacatgaggtcaggactttgagaccagactggctaacttggtgaaatcccatctctactaaaaatataaaaattatccgaggatggtggcacatacctgtaatcccagctacttgggaggctgaggagggagaattgcctgaacactggaggcagaggctgcagcagagattgtgccactgtactccagcctgggcratagagcaagactccatctcaaaaaataataataatagatgcagagaaatcatttgagaaatacagtgaccatcttatttttaaaatctcaaaatactggaaaatggggggaggtgagagaaacaaaaaattcttaatttttaatgggtatttacaaaaaagctatgaagcatcattttttttttcatggatcaatataagggacaagacaaatatgacctttctcactagtttctcatacaccattgtac

SEQ ID NO: 806544 - DNA, 670 bp, Homo sapiens
gtttaatgagtttttctccatgaagaatattcagaaatctctttccattttaatactatggtatcggaggaaacttaggagtaaatgatatagtaaactatttccccatttgtagagtctccacctctgtctttttacagatactattccctcacttctgaaacaggaaggaaaacaaatataaaagttatggtgaaacatggctgttgtagactgaatgttttagacatctcaaaattcatacattgaaacctaattcccaatgtgacagtatcaggagatgtggcccttgggagatgattaggtcatgaatgggattggtacccttataaaaggggacccaccctaytataagcttcctcacccagtctgccatgtaaggacgcagcaaaatctggccatctacgaaccaagaagtaggccctccgcagacacaaaatttgccaggatcttgagcttcccaggctccagaatcgaaagaaataggtttatgttgtttataaaccactcagtgcatggcaattcgctatagaagcccattggactaggacaactgaccaacatttctggagcaaatgaagatggtttcatttagtttacttatacattacagcataaatttctcgtattttagaaaaccttaacctttaaaaagatttttgcacagtat

SEQ ID NO: 806545 - DNA, 554 bp, Homo sapiens
accttatgccaggaaataaaagctggactattgacttaattaggaaatttcacctttacaagggtgaaaaatggacatggaagagaatatgcaccttcctttttggaaatataaaattatgttctttttaatgattttttctaagagaggttcaaggagtcacatcattaaaggagtcagtgaatttaatattacttatgacatattgtaactataataaaatacatacttgttctgtgtcwggtcctaattccaaaaactggatgccaataagtgtttatattactgagattatttagactgcattacaggtatactctctcatctcctcatgaccagtcttctcaaatcatatgccccaaattgactcagtttttatgtcttaaaccaacatcagaatgtctgttcaaaactctacagatgtaaattctgaagaaatcctaagactatatttatatatataagcaatatgtgttttaaatccacatattcaatactttaagctgtaacaagccttgaaatcctgcgtgtgtatgtgcgtgtgcatacatgaa

SEQ ID NO: 806546 - DNA, 645 bp, Homo sapiens
tgagatgtgatttgacaaacgagtagaaagatggagggaagagcattacaatcttacagaacagaatgtacaaagaactggccacagtggcacacattatctgtaaaatagttaaaggatgccgggtgtggtggctcactcctgcaatccccgcactttgggaggctgaggagggcggattgcctgaggtcaggagtttgagaccagtctggccaacatggtgaaaccccgtctctactaaaaacacaaaaaaattagccagacgtggtgtcatgtgcctataatcccagctactcgggaggctgaggcagggaggtggaggttgcagtgagtcgagattgcaccactgcactccagcgtgggagacagagtgagactccatcttaaaaraaaataataaaataaatgaaaaataaaggaaatcagaatggctgagatacatggtgaaaagcagggagtgtcaacatataatggttgaaagattagtgagtaatacttgaaaatcatctgaaattccaaagagttcagactttggtccaaatatcttgggcaaagttaaaagattttagcagaaagtcaatattcattttagaaagaagtactacctaacctattgtttcttcttgtaatttttgtgtactctcc

SEQ ID NO: 806547 - DNA, 593 bp, Homo sapiens
atctcattacctgacttcaaactatactacaaggctacaataaccaaaacaacatggtactggcacaaaaacagacacgtagaacaaaggaacggaatagacatctcagaaataagactgcacatctacaaacatctggtatttggtaaaactgacaaaaagaagtaatgggaaaggattccctatttactaagtggtgctgagaaaactcactagtcatatrcagaaaattgtaactggacccctttccaacaccttatacaaaagttaactcaagatgaattaaagacttaaatgtaaaaatcctaaaatataaaaaccctagaagaaaatctaggcaacacccataggcatgggcaaacatttcatgacaaaaatgtcaaaagcaattgcaaccaaagccaaaattgacaaatggaatctaattaaattaaaaaactgctgaacagaaacacacacacacacacacacacacacacaaacctaccaccaaaatgaacagacaacctacagaatgggagaatatttttgcaatctatccatgtggcaaaggtctaatatccataatctacaaggaacttaaacaaatttac

SEQ ID NO: 806548 - DNA, 560 bp, Homo sapiens
agcttccacgctctttctgggtgcacacttccattatttccatatattcaccaacccagaaactctaaaccctgtcatttaggttttcttcagccattggtgaatagcccaatctacagatcctttcccattcctggaggttggggaaagtagggcttatagttaaccaattcttggtctttttggtaatcagcttccgccctgaaggtatgtgcccactaagagtttcctcatcagggcataaaagactccatcatccttttcactgagaaaattccaagggttttacaaattctgtgccaggtagcagggacaaagactacrtgttttttttctttcttttttttgagatggagtcttgccctgtcacccaggctggagtgcagtggcatgatattggctcactgcaacctccgcctcctgggttcaagtgattctcctgctccaggcccccgagtagctgggattacaggcgcgtgccaccacgcccagctaattttttgtatctttggtagagacggggtttctccatgttggccaggctggtctcaaactcctga

SEQ ID NO: 806549 - DNA, 582 bp, Homo sapiens
tacaccaaaccctgacactcaatttacccatataacaaacctgcacatgtaacccctgaatctaaaataaaagttgcaaaagaaaaatataaataaataaagtgggtttcttgtaggtggtacatagttgggtatcttcttttattcactgtgacagtattgatctttagttggtgtatttagaccattgacatttaaagtgatgattgttattattacattgatatctaccatatttgctacagatttstatttgttgcccatgctctttgtttctgttttcgtcttctacattatttatgtcttttgggttttaattcagcattatttaagattctattttttctcatttctttaacacatcaattatacacaaactcacgtacatacacaaatatatatataccttacttagtgattgccctaaaatttacactgcatatatttacaactaattcatattaacttctaagtaacagtatactgctttgcagataatgcaagcacctcatggtaacaatatatttctaattccttcaccttttgtatcatcattggtcatttaatttatacataggtata

SEQ ID NO: 806550 - DNA, 618 bp, Homo sapiens
gaaaaaactgaatatccatgagcagaaaaataattatcagacctttatttcacaacatatacaaaagtcaattcaaaatgttttcacagactatgtgtatgataaggagttaatatccaaagtgtataaaaaacccatgtaacacaatarcaaataaataaataaataactcaaacaaaaagggggcaagaaaccttaagaacctcctttactatatcttgcaaggcagagcttacttgcaacaaatttccttaatttttgcttgtctgagaatatctttatttttccttcacttttgaaagatgcttttacaggatacaagattggtgataattttttctctgaatgctttaaagatttcatgccattctctgcttctgtggtttctgaggagaaaatgaatgtaatttttatttttcctccactatagatgaagtgctgtttccctttgtctgctttcaaaattttcttcatcttctaaagtttgaatacgatatgcctaagtgtcgatttcttagaacttattctgcttggtgttctcagaatttcctggaactgtgctttggtggctgatgctaatttgaaaacattcacagtcattactgcttcaaatattgg

SEQ ID NO: 806551 - DNA, 654 bp, Homo sapiens
aggaagtttctagttgtatgttcaggaaagtagacttaatttgatgcaaataaaatgtgggacatagggaagaaagtaatttccttataaatattttaaatagttttgcatatatagaaatgacacggctcatcaaagcatttaaaaatacttattagatactttgaagggcaatttcttcacgtgtttggcaaggcaagatattttccattgtcattaactttcatgtgatagaaaaactaatctggccccaatttagaggtttttttttgtttgttagcaattataaagtcattaagaaagtgttcagaatgtattgaataagtgaattttaagaaagtatttgaaaccaaaaagagtaggcctgcaggggraaaaaaaaaaggagattgctacttgccacagataaaatggagaatacatcaataagtatgttgtagaatgccataaaaattatgacatcttcagggcaaggcaatagaagaacataacattttttttataaagaacatcaagaaggaattttacccttaaattaatagacaagtgattacctggtgaaaatgatatttaaagtgaagagaaagtgactttttcagaaatgtcaaaagctctggaaaaattaataaattgactcttatttgagaagtcagc

SEQ ID NO: 806552 - DNA, 565 bp, Homo sapiens
gtatattgtgtttttagtattttatcgacacatcatcttttaatgaagacacaagtgtaactagatctcattttttaccacttggtgataagaacaaggcatatttccactgcattatttggtcattttcatagtcatctagaaacgggcagctatgcctcttagattttctatacattatttggaaatacattagaaaatgttcaatgatactggtgcaggatttttctcgacctctttgccgtaytcccaacaggggctctccgtctacttgacccactgcgctcagccccttgtgggaaggagcaggtgaacgagtgagtgggggatctggccagctgctctaggcactgacacaggagcatgctccatgaggggcccatggccagaccaggtgtgtcatctgaaggggaatgtgacggaatccaggtgagggtgcccacgaccccaaaaccccacagtgggtgttacagtactcttttagttctgccaccgcagtctgatggacggtggtgtgttagcagctcagctggccctttgcctcgttgcatggggcagctgcctt

SEQ ID NO: 806553 - DNA, 595 bp, Homo sapiens
ccaaatgtgcgtgggtattgtttaatcttgtgagggcctgcataaaataaaaaggtggaggaatgagaaatttgccctttttttcttcctgcttgcctccataaactaggacctcagtcttctcctgccctcttttgggatttatatcatcagcttctctggttctcagtcctgttgaaacagcctcgttgtctgagtgccacatgaatttctttgtctcacagccgaggaaatcaaggaaatggacattccaagggtgaggttagagcagaagtttaataagtgaaagagagaaagctctctgctgcaacccccaaaaaggttgctgttattacagttgaatgcaaaggctcttataaacaacaaatgagggctggrcatctcatttgcataaggagcaaatttctggcagctccaccccaatctgttgtgcatatgggcccttagtttgagttactccatattgctttgctccccttactgtgcctgtgttgagggatggaattttccattgtgggcatgtctgggcaagtcacatgtgtagcctttcttatctatgtggctgtgggcatgtcttaggcaagcccctctgtgt

SEQ ID NO: 806554 - DNA, 595 bp, Homo sapiens
ccaaatgtgcgtgggtattgtttaatcttgtgagggcctgcataaaataaaaaggtggaggaatgagaaatttgccctttttttcttcctgcttgcctccataaactaggacctcagtcttctcctgccctcttttgggatttatatcatcagcttctctggttctcagtcctgttgaaacagcctcgttgtctgagtgccacatgaatttctttgtctcacagccgaggaaatcaaggaaatggacattccaagggtgaggttagagcagaagtttaataagtgaaagagagaaagctctctgctgcaacccccaaaaaggttgctgttattacagttgaatgcaaaggctcttataaacaacaaatgagggctgggcatctcatttgcataaggagcaaatttctggcagctccaccccaatctgttgygcatatgggcccttagtttgagttactccatattgctttgctccccttactgtgcctgtgttgagggatggaattttccattgtgggcatgtctgggcaagtcacatgtgtagcctttcttatctatgtggctgtgggcatgtcttaggcaagcccctctgtgt

SEQ ID NO: 806555 - DNA, 659 bp, Homo sapiens
gttcccttatctatgcctgcagcttgaatttttaggctgttctttggtttaaaacaatttacccaaggacccaccctaactgactgcctgaccagtttcttcctttctcctctctcattgtagtctcagataccactagctttcctgagtctcaagcttgcagatggcagactgtgggacttctcagccatcataattgtatgagccagttcctcataatatattttcctatctttcatgcgtgtccatgtgaagagaccaccaaacaggctttgtgtgagaaacttggctgtttatttcactggggtgcaggtgggctgagtcckaaaaagagagtcagcgaagggagatggattaccattagttcttataggttttgggttaggtggtgaagttaagagcaatgttttgcggtcagggtggatctcacaaagtacattctcaagggtggggagaattacaaagaaacttcttaagggtgggggagattacaaagtacattgatcagttagggtggggtaggaacaaatcacaatggtggaatgtcatcagttaaggctgtttttacttcttttgtggatcttcagttactttaggccatctggatgtatacgtgcaagtcacaggggatgcaatggcttggcttgggctcagaggcc

SEQ ID NO: 806556 - DNA, 609 bp, Homo sapiens
tctctgtgtatatgtatgtgtgtgtgttagaattaaaaaaggaatcaagaagctgaggtgggagagtagcttgagcccaggagtttgaggctacagttacatgctcacactcctgcactccagcctgggcaacagagtgagaccaagtctcaaaaaaataaaaatagaaaaaggaatcattgcatgtgagaatacatgaaactctttttgtgttcattagctacagaatgtttyattgtttgtagtcccataaagtgaaataagttaattagtctgcaaaaactctacagtattaacaaaaaatacataatttaaaaacaaatggacaaagagaaaatgtgtaagggccagtaaagcagagcatagttgttaaaggacttgttaacatattataataggctgttagataaactacagcaaacattcttttgaagtcactactatgctcaaaatcattaaaagagcatcctatgggccttagaaaaaaacaatatgtaaaaagctgagactgatcaggctgctcccagaacatataaacttatcattcatagggtgtggagagaaaatgttaatgccagagtgaaacaaaggcagtgagtccatgaaata

SEQ ID NO: 806557 - DNA, 617 bp, Homo sapiens
gtaccagctcagctgcaatacaatagaataccaggtagacttctacaatttttgactctagtccctgactactggactgtacttctggactcacccaggacctggtggacctcgccatcctgaagggaatgacacaagccttgctgcctttaatatctactgatagtcgagtctcagggccttgagctaacataggtggtggcctgggagtggttacagcaggmcttgggcaagacttagtgctgtgttggcttcagatcagactcagcacagttatagtgatggtggccacaggggtgcttgtgtcactccatccccagctttaggtaactcagaacagtgagagagagagagagagagagattctgtgtgtttgggaggttgtaagggaagagaacaatagtctttgcctgataatccagagaattctcccagatcttgtccaagaccttctaaggtggtatggtacctctacaagtctgcaagaaccacagtattactgggctttgggtaccctctaaagcagatggagtttagatcacaacacccaagtcatttcaaatacccagagagacttcccaagaaggacagctacagataagcctggacattgatga

SEQ ID NO: 806558 - DNA, 622 bp, Homo sapiens
gcactctgatgtttacataatgataacaactttattcataattgccaaaacttggaagcaaccaagatgttcttctgtagataaatggataagtaaatttccttacaaacgaacaataaaatactattcagcactaaaagaaatgtgctatcaagccatgaaaatatagaggagtaacttaggtacttatcgctaaacaaaataagtccgtttgaaaaggctacctaccatataattctaacaataagacattttggaaaaarcaaaactgtggagacaggagaaagatcaggaatttgtaaggttggagagaagggagggatgaataggtagatcacagaggatttttaagacagtgaaactactctccatgattaaaaagaaaaaagtggtggaaaaatgtcattataaattgttccaaacccacagaatgcacaattccaagaatgaaccctaatgtaaagtacagattttgagtgataatgatgtgtcaatataggttcattaattgtaacaattgtagcactctgttgagggatgttgttaagggcggagaccctgtgtgtgtggaagcagggaatatatgggaaatctttaccttcctctccaacttgaatcacaa

SEQ ID NO: 806559 - DNA, 403 bp, Homo sapiens
aacaatttatacgaaaataatgtcttgactcaggggctctgggaggaaagtaacacagaatatttaaaaagtaggacacaccagataacttaacttttttttcttttttccttaaatcttaaccgagaggagtcaatcactttaactcccagggttttaattttcttatttaggtactcaccaagtacattcactactttatcactttttaatatctgaataataaaattgcgatgttctttttacttgaaagamctactctcttattacccatgattgcatctaggtctttgcaaagtagcacgtatataactataactcattgtttcctatgtaccaggaaatagtgtttctacttgtcaaaagtaccaagaagttttgctttaattaacctaattttaag

SEQ ID NO: 806560 - DNA, 583 bp, Homo sapiens
caactagatatcgagcgtgatttgatattaagtgtgcagggatcttgctaaactgacttagcaggattcttgctaaaagtgaattttagaagaaagcaaacttaggtgaatactcagagcttgactaaagtttggtaaaggaagaacttatgtcactgtacaagtcagtgagtatccagcttcttcctacctggtaggcacttctaaatttcactataaacatgtgcgacttgaagttacagaaargatagaggtgcagcaatagctaccactgttttcaaagaaatagtaccctctgtcccaaacctcatttttggttgtatatactggctaaaagtggttggtggatgagagtcagagaacctgcttttagccactgttcagcaagtcctgctattgatgcttaaagaaactctcttgagaatgtcattgattgtccctagctttggaacttcagccaatattctgagttattatgaaaaatttgtcatttttttttacttgggagaaagactgaagctattcaaaaatgaactggttcttaaaaatatattaggaagtttgaaaacgcacctaagcagaa

SEQ ID NO: 806561 - DNA, 646 bp, Homo sapiens
ttgctttggttacattctctattctgcattctttctttctttctctcttttatttttttgagatgaagtctcactcttgtcccccgggctggaatgcaatggcatgatctcagctcactgcaacctctgtctcctgggttcaagcgattctcctgcctcagsctcctgagtagctgggattacaggcacctgacaccacgcccagcttacttttgtattttttgtcgagatgggggcttcactgtgttgtccaggctggtctcgaactcctgacctcaggtgatctgcccgcctcagcctcccaaagtgctgggattacaggcatgagccaccatgcccggcctatttatttcattcattgctgttctttattatttatttttcctttacgtagttttgattctttagatgaaaaattaaattgttgatttttaccctttgttctttctcatatatgcaaactggctatcatttttttctttaaacaatgctctagctgcatctcacaattttttatcttaaaatttagtggaataattttataattttatactgatttattcttttatccttgaattgtttacaagtatattctttaatttccaggaagtagaactgtttttagttataattttgttgggattat

SEQ ID NO: 806562 - DNA, 646 bp, Homo sapiens
ttgctttggttacattctctattctgcattctttctttctttctctcttttatttttttgagatgaagtctcactcttgtcccccgggctggaatgcaatggcatgatctcagctcactgcaacctctgtctcctgggttcaagcgattctcctgcctcaggctcctgagtagctgggattacaggcacctgacaccacgcccagcttacttttgtattttttgtcgagatgggggcttcactgtgttgtccaggctggtctcgaactcctgacctcaggtgatctgcccgcctcagcctcccaaagtgctgggattacaggcatgagccaccatgcccggcctatttatttcattcattgctgwtctttattatttatttttcctttacgtagttttgattctttagatgaaaaattaaattgttgatttttaccctttgttctttctcatatatgcaaactggctatcatttttttctttaaacaatgctctagctgcatctcacaattttttatcttaaaatttagtggaataattttataattttatactgatttattcttttatccttgaattgtttacaagtatattctttaatttccaggaagtagaactgtttttagttataattttgttgggattat

SEQ ID NO: 806563 - DNA, 619 bp, Homo sapiens
gttttcacagtttcacagtggagatttttgttttggtttggtttttgatgggatctaatttagcattcttttctttttttggattatgctttaagatcaaatcagaaaaaatctttgcctcacccagactctgaagattttctcctatgttttctttctaaaatgtttgttttactattaggtctgtgatggattttgagtaaattttttttattaggtgttgggctcatattggggttattttttttaaagtatggtgatttatctggaccatttgttgaaaagtctatctcttctaattaaattgcatttaaactattttcaaaaattagttgggcatatgtgtgtgagtctatttctgagttctccattctgtttcattgatctccatgcctgttcttctgctgwtaccacagcgttttgagtcctatagatacacagtaagccttactagcagatacagtaatctatcctacttcattcttcttcctcaggattgttttaggatctcttgggcctgcacccttccatataaattttaaaataaggttgtctatgtctacaaaaaaagggataacaactgcattccatctatagattaatttggaaaaaccgatat

SEQ ID NO: 806564 - DNA, 619 bp, Homo sapiens
gttttcacagtttcacagtggagatttttgttttggtttggtttttgatgggatctaatttagcattcttttctttttttggattatgctttaagatcaaatcagaaaaaatctttgcctcacccagactctgaagattttctcctatgttttctttctaaaatgtttgttttactattaggtctgtgatggattttgagtaaattttttttattaggtgttgggctcatattggggttattttttttaaagtatggtgatttatctggaccatttgttgaaaagtctatctcttctaattaaattgcatttaaactattttcaaaaattagttgggcatatgtgtgtgagtctatttctgagttctccattctgtttcattgatctccatgcctgttcttctgctgataccacagcgttttgagtcctatagatacacagtaagscttactagcagatacagtaatctatcctacttcattcttcttcctcaggattgttttaggatctcttgggcctgcacccttccatataaattttaaaataaggttgtctatgtctacaaaaaaagggataacaactgcattccatctatagattaatttggaaaaaccgatat

SEQ ID NO: 806565 - DNA, 611 bp, Homo sapiens
ttgtgtgtgtgtgtgtgtgtgttagtgcaaagttttaaactttctagtctccataaaattcttcttgctttggcaaaagccatcggttggtaatttaaggtagttactcaggacatagtatcttatctgatcaacattttttttttttttgagatgaagtctcactctgttgcccaggctggagtgcagtggtgcgatcttggctcactgcaacctctgcctcctgggttcaagcgattctcctgcctcagcctcccgagtagctgggactacaggtgcgcgccaccatgccaagctaatctttgtacttttagtagagacgggatttcaccatgttggccaggatgctctcaatcttttgaccttgtgatccgccygcctcggcctcccaaaatgctgggattacaggcgtgagccatcgcgcctggccttgatcaatttatttttgaactcagtctatgtgacttcactttatatatcataatatcacaaatcctaatgcttcttttcagtcttgtagcagattttaaagtggggcaaaaagaggaatccattaccatcacaatgctggagtactgatgtgacataatgtctagtaatgtttttataga

SEQ ID NO: 806566 - DNA, 636 bp, Homo sapiens
acttttttgtttccctttaattatttagttcctgcttaacctattagtttggtatttcaggatcttgagccttcgaatctgggtccgttcccattcccattgcaccctctggtggccatctccatatccatcttagttaattaagccaattttgattaattccatactcttacactggtggcaggttggttcagaaaaaggcaactgatgcgattctaaccagtagaaccagaagtaaattctacaggaagccgcctaaggaaagttttcttattcacaaaatagagtcacaggaaactgtagtatctcctctattttccaaaatgcactattattatcactgttgctrctgctgttgatgttgtttaattttgttttgtttgacatagttctgcatctgctattaccatagttataacagcttaacattaaaatttttttaaatggaaaacagagacatgagaagaaagtctgtttctgttcgctttgtgacatcaatgaatcagccggtgttagaggtcaacttcagcagtcattttacatttattttgtccatccagaatgtgaattgccttctatgtttgcagacacttccgcttcttgaaaaacagcctgaaactcgttatgaaatctgaa

SEQ ID NO: 806567 - DNA, 596 bp, Homo sapiens
tcgcattttgttatagcagcctgaaccagccaagataacagccctctgactaggcttacggttagaaaaagaaccttatcacctcctctatactcttttctcagtggagagtaggttaaggctaacggcacttcctgaaaatgtggctcaaaactcatccttttctatccatactctcaaacacttcacatcatagatatgaacaagggaaccatttatcagtcaacagctttaaatctccayatggaccagcaaatcttttgagataaaacaaattttggactttgatagtttagctaagagttttgagtttagcttttttttataggtgctacatattagacattatcatggagatgcaattctgaacacaaataattatggtgtctgtgctcatggagcttagtgtctattaattgaagggaaattagacattatttaaataataataaagtgtataagtatgggaggtgcttggaaagggaagcgaatgttgttgtgagacgtattctaaagatggttggacgagtagaaggataagtggagccttctctaggtaaggaaacatttctttgagatttgaatgttgataacaa

SEQ ID NO: 806568 - DNA, 577 bp, Homo sapiens
gatatatagaccaatggaacagaacagaggcctcagaaataacgccacacatctacaaccatctgatctttgacaaacctgacaaaaacaagcaatggggaaaggactccctatttaataagtggtgcggggaaaactagctagccatatgcaggaaactgaaactggaccccttccttacaccttatacaaaaattaactcaagatagattaaagatttaaatgtaagacctaaaaccataacaatcctagaagaaaacctaggcaataccatgtaggacataggcatgggcaaagacttcatgactaaaacaccgaaagcaatggcaacaaaagccaaaattgacaaatgggacctaatcaaactaaagagcttctgcacagcaaaataawctattatcagagtgaacagacaacctacagagggagaaaatttatgcagtctatccatctgacaaagggctaatatccagaatctacaaggaacttaaatttacatgaaaaaaacaaacaaccacatcaaaaagtgggtgaaggatatgaacagacacttttgaaaagaagaaatttatggggc

SEQ ID NO: 806569 - DNA, 577 bp, Homo sapiens
tatactgccataagttaggaatacttacaactagtttccaaattctgtagatgccaggcagacagagagagacaaacatgctccaaattttgttcataggagtataccttgctcaattattaaatgctgtaaatagctcaaaataaatttccatgactctgaaaaagaaaacaaggatcagcaatgttccaagcaagtgtcagaaagattactkcagttttatattagtttagtctgtttagttaactcttactttgcttgatattcatgaacattccagctcttcctttattccaatgtcacaatctccaaagttatcagaaacttgcatttgagagcacgtgttaaaattctatagctgattataaaccatcttttaaagaggatgaaaataagacaacaattttctgtgaataacaaaatgtctaaaatagttacagtcagaaacatgattgacaaagaaatttgattatctccgtggtttgcaataacttaacgtaacaaccttaattgtgattgacagcatacactcacaccttagaattttagatatcccatacaattttggaacacatat

SEQ ID NO: 806570 - DNA, 643 bp, Homo sapiens
gatgtcttttaatttatttgtaccttcttcaatttcttttatcagtttttttttagttttcgtggtagacacctttcacattcttaattaaatttattcctaagtatttttgtagctattacaaatggatttgcttttttttatttttwttttttgaaatggagtcttgttctgtcaccaaggctggagtgctgcagtggcatgatcttggctcactgcaacctctgcctctggggttcaagtgatccttttgcctcagcctcctgagtagctgggtttacaggcatgtgccatgacattcagctaatttttgtatttttagtagagatgggggtttcaccgtgttggccaggctggccttgaactcatgactttaggtaatctgtccgccttggcctcccaaagtgctgaaataacaggcatgagccaccatgacaggccttgatttctttcctggctagcttgttattagtttacagaaaagtatgttaaattttatcaaatgcttttcttctgcaactatggagatgatcatacagtttttgttctccattctattgatgtgttgtatacatttattgatttgcatatgttaaaccatgcatacatgcgtgttacaaaccccattagtcatggtgtgttc

SEQ ID NO: 806571 - DNA, 620 bp, Homo sapiens
tgaagtagtgttttccttctcctagtatcatttattattggtaccacaagcaagaatcttttctatgccttgttcgatggttatgtatctttctaagtttggatcagcttccaacattttattctttactcttttaatatcatggaatatctgcaagcgtttatttaatgtttttttttgtgtgtgtgttggtgttacttcatctggaatgtttacrtctttatttgcaagtgtttatttaatgtttagtttttttgttggcgttacttcatctggaatgtctatatctttatttgttacaaccggatttctcatttatgccaatgtcagccttaaccaattttctctgactttctatcttaaagcctctgtaatggagacagtgtcaacatccctaagccagttatttcttccataactccatttacctttgatttcaatttcacttacagcatcatcattttagtttatcccttgaacttttatttttgtcggccaattccttctttcattatacgtttttggtaaacatcacgtgggtttttcactgggaaacaaagaggtaaggcaaccacaggctttcccttctgcacgtgaattgaatacatgctcagcagcca

SEQ ID NO: 806572 - DNA, 313 bp, Homo sapiens
aagtgtttatttaatgtttagtttttttgttggcgttacttcatctggaatgtctatatctttatttgttacaaccggatttctcatttatgccaatgtcagccttaaccaattttctctgactttctatcttaaagcctctgtaatggagacagtgtcaacatccctaagccagttatttcttccataactccatttacctttgatttcaatttcacttacagcatcatcattttagtttmtcccttgaacttttatttttgtcggccaattccttctttcattatacgtttttggtaaacatcacgtgggt

SEQ ID NO: 806573 - DNA, 582 bp, Homo sapiens
cagcggctcacgcctgtaatcccagcactttgggaggccgaggcaggtggatcacgaggtcaggagattgagaccattctggctaacacgtgaaaccctgtctctactaaaaataccaaaaaaaatagctgggtgcggtggcaggcacctgtagtcccacctactcaggaggctgagccaggagaatggtgtgaacccaggaggcggagcttgcagtgagccgagatcgtgccactgcactccagcctgggcgacagagccagactccgtctcwaaagaaaaaaaaaaaagaaaagaaatactcaccattggactttacaaatacttgaataaacgaagaaagctcaaaaagaattaaaattttaaggcgataatttttggggaaaaaaacaatgtcaccaaaattcttgtgtttttaaattttaaaatatttatttgaagaaaaaggattatgtatattcagtgtacaatatgatgatttgatatatatcgacattgtgatatatacatctacatataatgagcatcacaatcaaattaatatatccagcaccactcatgctatatattggatccccacaa

SEQ ID NO: 806574 - DNA, 533 bp, Homo sapiens
acctcagcctcctcagcagctggagctacagccacgtgccaccacacctggctatttttttatttttatttttttgtacagacatggtctcactatgttatccagactggtttaaaacttctgaactcgctgggcgcggcggctcacgcctgtaatcccagcactttgggaggccgaggcgggcagatcacgaggtcaggagatcaagaccaatcctggctaacacggtgaaaccccgtctctactaaaaatacaaaaaaaaaaaaaaaaattagctgggcgtggtgccgggcacctgtagtcccagctactctggaggctgaggcaggagaatggtgtgaaccagggaggcggagtttgcagtgagccaagatygcgccactgcactccagtctgggctacagagtgagactccatctcaaaaaaaaaaaaaaaaaaacttctgaactcaatcagtcctccactctggcctcccaaaatgctgggactacaagcatgagccaccataccttgccagttgtatttcatttttg

SEQ ID NO: 806575 - DNA, 367 bp, Homo sapiens
caattcaggacactgagtacaaaacgataaataaataagatgattatttataatccatggatttaatagtcttatagggaagatagtaactcaggtagagtgtgatagatttaacaatactactgtacttaaggagcttggtaaaatattgacgattgtgatttaatttgccygaaggaagaagaaaggccaggaagccttcacagaagagctggcacatagacagcaaaaatggcaatgtctttaaatagcagttctgcctggaaacttttgcaacagagaaacacgttttttgacagtttttacaagtaacaatggctaaagtgagaatatgaatttaataatttctatcacaatatgccattgt

SEQ ID NO: 806576 - DNA, 619 bp, Homo sapiens
tttgcagtactgtaacttacagaattgaaatatttgcactccaattgtcttgctatgatggaattttctgtatttttatttgacattgaaaaatatcttgaaaatagagtattacaatttcatggatgattacaaatacttttttggaaaaactatagaagtttgaccttttgaaacaaaatgttagatttgcaaagaagttgaaaagccactaattttaaatgtaaggaatgactgaattacctttgcaagatatttgcaaagaagaattgatattgcctgacctttctagtgagtaacataaccccgagagactaactggactacctttggtcagatgacagaagttagcagttatcaaatgagtcaaaatctgtgttttcacaacttttttgtttctctacaaggttctaattttagaaacatcataaaaccaaaygaggcaattacaaattaacttttcttcagattttttaaacctattatgaattttagttaagtttaagttaatttattgcaacttccatgcttgttatttattttttaattgattttcttattgaagaaatgttaattgagtgattactctatgcctggtgttaggggtcaaatagtgaat

SEQ ID NO: 806577 - DNA, 601 bp, Homo sapiens
atattgctaatttggtgttctaacaaattcttgcctagtatcaatctagtttttacaaaatattaactctagagtttttctatgaaaatgtaaatggatacttgacacatttattacaatgtaacatagattattgaaacatgaacaaaataagagtcaaaatattttgagggagaaattaataacattttaagacagtttttaagtcagaatattttaaaagtgttttttttgaattttgttttccatcaggaatgtttgaagttatttcctaaataaaaatattatatatttcattttccatgttaaatacaatcaggaaattaaagcaaagttttgtttaaatcagcatttatctgtactagagaattgctgtactagttrcttatggctcaggattatagaactgtttgttgatggaatagttaaaaaaaaaaggcaaaaagaaaacaacaaaggctggaagttgaaatctcctaacagacatacctattataaccaaaaattacacctaaatataaatgtctagcctgtattcaatatcaatgcctatttacttagaacatttatagttactttattggatcaactatacttaatt

SEQ ID NO: 806578 - DNA, 601 bp, Homo sapiens
atattgctaatttggtgttctaacaaattcttgcctagtatcaatctagtttttacaaaatattaactctagagtttttctatgaaaatgtaaatggatacttgacacatttattacaatgtaacatagattattgaaacatgaacaaaataagagtcaaaatattttgagggagaaattaataacattttaagacagtttttaagtcagaatattttaaaagtgttttttttgaattttgttttccatcaggaatgtttgaagttatttcctaaataaaaatattatatatttcattttccatgttaaatacaatcaggaaattaaagcaaagttttgtttaaatcagcatttatctgtactagagaattgctgtactagttacttatggctcaggattatagaactgtttgttgatggaatagttaaaaaaaaaaggcaaaaagaaaacaacaaagrctggaagttgaaatctcctaacagacatacctattataaccaaaaattacacctaaatataaatgtctagcctgtattcaatatcaatgcctatttacttagaacatttatagttactttattggatcaactatacttaatt

SEQ ID NO: 806579 - DNA, 588 bp, Homo sapiens
aattacaaatttgaacatgattatattttctatcatattgtaaaaggagaataaacatgaatatataaggggtgttaaggatgttaaaaattggtccttcatatttagcatgttgaaaccaattacaactatcactgtaatctcagcacttgggaggccaagscaggaaaatagctcgaggccaagagtttgagaccaacctgggcaacacagtgagaccctgtctttacaaaaaatttaataattaccctagtgtggtggcacacacctgtagtcctagctactcaggagtctgaggtaggaggaccacttgagcccaggagtctgaagctgtagtgtgctatgatcacaccactgcactccagcctgagtgacagacaggttgtctcaaaaatctaggaaaaattttttttaaatttgttaaaaaggtagcactacctcaactagtttctggaacatgtttcagtaacacatatattaaaatattaaaatatgcttttgacttattaatacggtggtcaaaatactactctacatgctttgtaaatattaacctgtataatcttacaagtctataaactagttatt

SEQ ID NO: 806580 - DNA, 623 bp, Homo sapiens
aaatgttttctatatttgcagacttttcctatgatggcaaaaggatgtcagaagtacagcaagcagcaaatttatttgaacatgtcttattcagtatataaataatactataacaatatgtgaacaagaaatatctctgaaagagacatgctgtggtgagagtattttgaaaccagaatttagaatttctttactatgtgaattttattgtttaaaattttatgtgtataaggatatcacattaaaattctcatttgtgaagagtaagtacttaaaaatcatattttacagcctgttgagcattttaatatttgaagggcttcagtgtgtttttcatttattcatgaaacaaagaatgatacatatgaagtgttaaaatagccgatacaataagctattaagaataacttgtgaatatttaaaaagatagaaatttcatagttatattgcaastaaagcctttgttacatttttactattttagaaatctaactgaatcaaaattggttttcaagaatttgacattttctttcacgtatccatctttgataatgatggcctaattaaccaggccccactgtccttagaaaataacagaaatagattgtctgaattacatggtc

SEQ ID NO: 806581 - DNA, 604 bp, Homo sapiens
gataatagtcaatgagatctatggatgtgttaattaaggaaattttagatattgcctgtacaaagagtttcaaaattggactatatgtaaaagcattctttgaatgataaggagagaaaaggttttagcatggcagcaagattgagatgcttataaaatcagggcagacacaaaaaataatgccaggctgagatgctgcttaggtgtcacagattactgtagcagattactttacacaatcagtgaatgcaggctgtataccagcttatttttttatatatgcatgtgcacacacacacacacacacaaatggaatcttgaaataaaataacaaaatctaatctatttattcctaatacagattatcttattrgccaaaaaaatcccttgaataaatttgagatataatcttttttatatcctttatatgacttgaatattattatatcatttagttgcctccacagagacgcaaaattttttgtttaattattgtatgaagaaggatgttcaataaattttctagcccttttccacccatgttgccgcatatttgcagtcaaaagtttgcacatctgtgatacctaatctctctgcattgttc

SEQ ID NO: 806582 - DNA, 664 bp, Homo sapiens
ctcctgaggcaggagtactgcttgagcccaagagttggagactgcagtgagaggctatgatcacaccactgcatgtcagcttgggtgacagagggagaccctgtatcaaaaagaaaaacaaacaaaaaaaaatgcaagcacagtcagctcttcatattcgtggtcttacactggtgttttcaaccaatttggatggaaaatattttttaaaatagcaataaaattaacaatacaaaaatgaaaacatacaaataaagaacaatatagtataacaactatctgagggagttcctagaatcaatcctctgtgaatacgagttaacaactgtaattaataaaaataactaaccaaggccagtgcagtggctcacgcctgtaatcccagcactttgggaggccaacacaggtggatcacgaggtcaagagtttgagaccagcctggccaacatggtgaaaccccatctctactaaaaacacaaaaattagctgggcaygatggcgcgtgcctgtagtcccagctgctcaggaggctgaggcaggagaatcacttgaacccaggaggcagaggttgcagtgagctgagatcataccactgcactccagcctgtccgacagagtgagactccataagaacaaaaaataaacaataataactaaccaggaa

SEQ ID NO: 806583 - DNA, 567 bp, Homo sapiens
attggattctgtaatctccaaatttcaactgtggacctctctactgaactccagtcttctatgtccaatgacttaccagacagcttcacttggatattaaataaatctttcaaagttaaaatattcagttcaatactgtacttctttttccccttgatttgcttctccctcaatcatcccattctcattaagtggtgtctttttctgtttaggaaaatgcttgaaaacatctttggcttttatttatttttattctggctagaaatacattttttaactgttacttttggttcagacatacacgtacaggtttgttatataggtaaattgtacattgtggggtattgaagcacagattatagaaattcatatttttagcaaattttattagccctactttaaatatatccataattcaattacttttcaayaaccagctgttactgccttggccgaaaccattgttacttgcctgcgttatttcagtaacttttttttttttggatgggttacagaccagcgtttgctttatttgaacagagtttgaacacaacagtgagttcttaa

SEQ ID NO: 806584 - DNA, 587 bp, Homo sapiens
ttacctgtccatcatcaggagaaccacatgaccccactgtcttctgtgcgtattcttgcttctctcatatctttcttatgtcctcttagggcatctgcctggaattcttccctcaacaccacccttctttcactatttacagatcacaatccacactttggtttgtcaggaaacatacctaccccattcctccacttactcctagaaagatatagtttgcctacctggtgcttttcacatttatttgaattgtactgtaaaattagtatctatcttgtttgtttaactttaatgccaccaagggtagaaactattacagtttgctcagcactgcatcgcagtgcctggttgcttattgtaaaataaatgcrcgtgcacacacacacacacacacacacacacgctctgacacaaaataattgttgaatggttaagtgagatgatccatcaatctcccaaaaggccaaaggatttaatgactctaaaagtgttccatgacacagtagaaagaatagaaagttttggaatactggccacctcaaatgtgctgtgaactctaattggattctaaatttgacaataaacgt

SEQ ID NO: 806585 - DNA, 600 bp, Homo sapiens
gctaataatcaaatatctacgctagccctcttatgctttttgtttgtataacactttccattcatttacttttaacctgtctgcatttttatgtgaaattaaaatgtgtctttttaggcagcatatgatagaatattgctttctcattgactgtaaatctccttataattggagtgtttaacaagcagtcagtaattaacagggtcagggaataaatattttactttttctgggctacatacagtctctgccatatttttttttctcttgtaaaccatgaaaaatgtaaagaccatcctcatctctgagtcacatataaaagaagcccttgggcaagactttgcccatgggctataatttgccatccactggtttaggctattaagtttaatgccattgttgttactatttcawttaggcctacaatttttatttatattctgttttttttcctatgtttttttcacattctatgcccatttttctgccttctattgagttattcgaagttttagtatttgattttaatttatatattggcaatatttttggtttttgttttgtttcattttgttttgttttaagcgattctataggaat

SEQ ID NO: 806586 - DNA, 645 bp, Homo sapiens
cttattaatgaacaaatcactttgataatgtggcagaatacttaccgtagttaacactggaagttactcattcaacaagtgtctattgagtatcaacaagtgtcttctaacatacctgtttacctttacctccagttactgcacatgatccatcttcaattttgacataggtgtatttgctgagtcagagctcacatataagtgattctacctttatctcccttggttcttacaattttagcatcttgctctttgatgtctactgctgctgccatcttggcatagcaattatttatagacagccatgccatgtaataaaaatataaatattattatttatgatgccctagttattgctggatttatttatgtggtcatattttatttttgagattttcrgtagctttcttatacagggtacttgatacagaacacactatttaaccttgtgttgcataatgtttttaaatcaatttgacaaagggatttctttggaagaaagatatttgttttgttcgctgttttgtaaataacattttcaaacttgttatgctttttaaggctgaaaagaaagccatattggaaattagagttggattctagccaatattctgacaaggtgtcatctaaccttgacattcagat

SEQ ID NO: 806587 - DNA, 659 bp, Homo sapiens
ttattagattaatttttctttccactgttcatcaaaatatatatccatataaatgttttattaaccaataatctatccataaaagttatttataccaaaatatgtatgcatacaggtaaaagtatgattcataaaatatttaaagtactgttaaaaaaactaagattatattattaatattatgcaagtaatgagaacttcaaacacaatataatttgtgcaaaaatgtaaatttcagaagtaagtgaaaatataattgaactgagatgattacatacctaagcttctaaggaaacttaaaggcaatttcattaataatggaattccctctgaagtcattcgtacgtgtggagctggcrtcaaagtattaaaatgttctgcgtgtgtatagaaacagtaaaaaattatttttattttgcctgttgctaactcctgcagaagtcagtcagataattctctcaaaaatagacctgcttttgtttcttttaattgtttacagatcaaaagcttttttaagtgagaaacttgagggacttcactgtgttttcagatctatctgaggggattaacaccaagtgttattttggatgatcagttttacccttgctaagctttgtaatttctcatagctctctgagttgttgcacagtacttgacaa

SEQ ID NO: 806588 - DNA, 639 bp, Homo sapiens
ggtttcttatactatcagcccaaatacttaaaatgatggagggccctttaatttatcatattaagggcttcaacaaataagagctaaatgattgttaatttacaagagactgccttgtgtttgtacagaagtttcaccttaaatgtctaatttccaaaaatggtatttttgaaggattacctgaaggacatgacatctatctatccctctaaagaatactttttttttttctggggtaattaagrtctcattttttggcttattttctggctctttcacccacatcttcactcagatacataacaaaactgaattccaagtatttccacaaaaatatttactcacatcaaccacttcatcgttacatagaaagtactgaatagctgaggtaatgccagggccacagggacatgcagctgtctgctgcctcatggatcccttgtcttcataccacccttcagtgtccttgccatacaccccttccttcccatatatgtgtgtgtatacacaatttataacttataaaaatacatgctacatgtatatatgtgcatattcatactgaatatgctatacatagcatttacaattatatgttgtgtgtgtttgtgtgtgtatatatatacatacatttaacat

SEQ ID NO: 806589 - DNA, 604 bp, Homo sapiens
gaatgattaagctttttctccttcccccaattatcaaccttttaagtggataatttgtcagaaaatcaaatgaaggaaattcaatcgggattgctactttcagctaccagttcactgcataacatactttattctaaattttccattaattcctaaagttgaccttgttaaatagcatgtcacttgtacttgaaacttaagcctttgctacatctaatctttcattattattttgcaaataattaaatatccatggccatactttttaaaaatcataattttattatgtagaattgtggatcactactattgytttttttactgttacttttaagtataagtttccaactttatgaacatttctaatatttcaatgtgtttaccatttatataaaacataagcattatattttattagatgtgtatcccaattgtgctgcttattttccctttgttgaaccaaaatgtcttaaggaataaatgtgaaacagtttcctattttaaatttgaacaccgattaatttttttcattaagtgaaaatatctctgcaattttcccagaatgaatgttaaattaaatttgtatatgtctaaaaagttacac

SEQ ID NO: 806590 - DNA, 591 bp, Homo sapiens
agaagccataaaacaagaagagagtgaagtatttttagtgttgagagagaaaaccccgctagtatagaattctgtctctgtgaaatgtgaaattatccttcacatgtgcagcagaaagaatatcctttctcagacaaacaaaaatagagggtattttttgccaatagatctgacttgcaagaaatgcttgaacaagttctttttttctttttctttttcttttttttttttttttgagacagagttttactctgttgcccggtctggagtgcagtggtgtgatctcggcccactttgacctttcccttctgagattcaagcaattctcctgcctcagactcctgagtaactgggattacaggcgtgtgccaccacgcctggctaatttttgtatttttagtagaggcggggtttcgccatgctggccaggcgtgtctgaaactcytgacctccaaccacctcggcctcccaaagtgctgggatttcaggcgtgagccactgtgcctggccctgaacaagttcttcagagcagaaaaatgctttaaactagaaactcaggtctccaaatcatttgatcatttttaaattgga

SEQ ID NO: 806591 - DNA, 617 bp, Homo sapiens
agataggggtctggttttatgcttctgcatatggatatctatctagtttgcccagcatggtttattgaagaggctgtcctttccctaatatatgtttaaagaaaggaaatgcatcagagaaagactaagtgaaggtaaattaaaaacttttacttttcttattcttattcataagattattgaaaataatggaaacaatgtattgtattatattatgtgtatatactrcgtataagataaatgaatggtaacaatgatataagggatgaaagacttagaaataacttatcataaagaactcttgctacccattaagaagtacagtgttatttgaaaattgacttcattcagttcattgtaaatgtatattgaaaattcttgaacaacaaataaacaagttaaagaaagataactgatatactaaggaaagaaaattaaatcatataaaatgctcaattgaaatcgccaaagacagaaaaatagtgaaagacaaaaactgaaataaagaataagggcaacaaataaaatagttacaaatatagtatatatattaatccattgtatcagtaattacctgaaaattataattatctaaatagctcaattgaaaggtagag

SEQ ID NO: 806592 - DNA, 617 bp, Homo sapiens
agataggggtctggttttatgcttctgcatatggatatctatctagtttgcccagcatggtttattgaagaggctgtcctttccctaatatatgtttaaagaaaggaaatgcatcagagaaagactaagtgaaggtaaattaaaaacttttacttttcttattcttattcataagattattgaaaataatggaaacaatgtattgtattatattatgtgtatatactaygtataagataaatgaatggtaacaatgatataagggatgaaagacttagaaataacttatcataaagaactcttgctacccattaagaagtacagtgttatttgaaaattgacttcattcagttcattgtaaatgtatattgaaaattcttgaacaacaaataaacaagttaaagaaagataactgatatactaaggaaagaaaattaaatcatataaaatgctcaattgaaatcgccaaagacagaaaaatagtgaaagacaaaaactgaaataaagaataagggcaacaaataaaatagttacaaatatagtatatatattaatccattgtatcagtaattacctgaaaattataattatctaaatagctcaattgaaaggtagag

SEQ ID NO: 806593 - DNA, 617 bp, Homo sapiens
agataggggtctggttttatgcttctgcatatggatatctatctagtttgcccagcatggtttattgaagaggctgtcctttccctaatatatgtttaaagaaaggaaatgcatcagagaaagactaagtgaaggtaaattaaaaacttttacttttcttattcttattcataagattattgaaaataatggaaacaatgtattgtattatattatgtgtatatactacgtataagataaatgaatggtaacaatgatataagggatgaaagacttagaaataacttatcataaagaactcttgctacccattaagaagtacagtgttatttgaaaattgacttcattcagttcattgtaaatgtatattgaaaattcttgaacaacaaataaacaagttaaagaaagataactgatatactaaggaaagaaaattaaatcatataaaatgctcaattgaaatmgccaaagacagaaaaatagtgaaagacaaaaactgaaataaagaataagggcaacaaataaaatagttacaaatatagtatatatattaatccattgtatcagtaattacctgaaaattataattatctaaatagctcaattgaaaggtagag

SEQ ID NO: 806594 - DNA, 666 bp, Homo sapiens
cttttccccattaggttcagtgcattttggtagatgaagtttagaaagaggaagggagctcagacttaatagttggagccaactaatatactgccattctagtctttatgttaagatactagggacagagtgttcaatctgtgtgttattattagtagtattggcaatgagaatatgtaaagcaataattctcagctgtgggaaggcaggcacagcagccttcagagctacctcatatatggttctcacattcccctaaattaccttaacccataaatcacttttattcatcactgtttcctgtgattcactgggaaaagcctcgaagagcatcctgttactgaggtgaagacaaagcctgggctgtcccaggcagttcctctctaactcaagatgtcacatttcttaggaggcataggaataagaccttggtactttcaggcagttccaccccctctcagaatattgcactcccagcacattctacagttattcttagaagtataatcataaaatcataaataaytggatggattcaaggccacctaaagaattgtcctccagtagagagtagaataatagcttccagaaactgttagggaagagggtatgtaaggaaaggggagatactagtcagagggtacaaagtattagttagactgacaa

SEQ ID NO: 806595 - DNA, 628 bp, Homo sapiens
ctaaatcttctctctcttctgacttctaaatcttttgtgaatgcctcccataaactgactttatctagaactacataagaaaggactctgagaaatgaagttttcagctttacccatgaaagtcagatgatatctcaggggagaggtagaggcaatgatgaaytgacaacagacaatataagaaaacccacccatttatcagttgagggttcatacacatcccttttgccaatttaaaattctcgagtaacagcagtgataaaatcattcctgtctcttttacgggatgtgatcccttttctgtaataaaattatgatcattctctccttccaaaaaggaaatgtattgctctgtatatcgtaatacacatcttggagtgacattcactccttttctagtgacgtctcaaggcttttttgatacaatgtaacataaatactaaattatgtgatatcttattttggattctctctaaaagcagaggttaagacaaagatttgactgtaagtaatttgcttgggacatgctctaaggaaataagataaggcttctaggaaaatgagaccgaggagaagaaaaacaaaacgtgtgtcactgagctagaagctactgtggaaaatgggagtc

SEQ ID NO: 806596 - DNA, 628 bp, Homo sapiens
ctaaatcttctctctcttctgacttctaaatcttttgtgaatgcctcccataaactgactttatctagaactacataagaaaggactctgagaaatgaagttttcagctttacccatgaaagtcagatgatatctcaggggagaggtagaggcaatgatgaattgacaacagacaatataagaaaacccacccatttatcagttgagggttcatacacatcccttttgccaatttaaaattctcgagtaacagcagtrataaaatcattcctgtctcttttacgggatgtgatcccttttctgtaataaaattatgatcattctctccttccaaaaaggaaatgtattgctctgtatatcgtaatacacatcttggagtgacattcactccttttctagtgacgtctcaaggcttttttgatacaatgtaacataaatactaaattatgtgatatcttattttggattctctctaaaagcagaggttaagacaaagatttgactgtaagtaatttgcttgggacatgctctaaggaaataagataaggcttctaggaaaatgagaccgaggagaagaaaaacaaaacgtgtgtcactgagctagaagctactgtggaaaatgggagtc

SEQ ID NO: 806597 - DNA, 628 bp, Homo sapiens
ctaaatcttctctctcttctgacttctaaatcttttgtgaatgcctcccataaactgactttatctagaactacataagaaaggactctgagaaatgaagttttcagctttacccatgaaagtcagatgatatctcaggggagaggtagaggcaatgatgaattgacaacagacaatataagaaaacccacccatttatcagttgagggttcatacacatcccttttgccaatttaaaattctcgagtaacagcagtgataaaatcattcctgtctcttttacgggatgtgatcccttttctrtaataaaattatgatcattctctccttccaaaaaggaaatgtattgctctgtatatcgtaatacacatcttggagtgacattcactccttttctagtgacgtctcaaggcttttttgatacaatgtaacataaatactaaattatgtgatatcttattttggattctctctaaaagcagaggttaagacaaagatttgactgtaagtaatttgcttgggacatgctctaaggaaataagataaggcttctaggaaaatgagaccgaggagaagaaaaacaaaacgtgtgtcactgagctagaagctactgtggaaaatgggagtc

SEQ ID NO: 806598 - DNA, 576 bp, Homo sapiens
aggcggctgtgttccctctggtcagcatgaaattgggtggatagtgagagttaaagaccattacatataaaagtcttattgtttagtctaatcttttttaagttttagggactaaatctttaaacagtctcccgcaaacagaggatgttttatttcatttaaaccttaaatagatacaaattatattttaagaagggaatgactttttttttkgttttttttttttttgcaaaattctaaccaaacagtttgagctcccttttctcattttttttttccacaggactactctgggcaatagtgcaacaagtgttattttcatcttttccaagcaggcagaatagagtcagttgttgcttgctacttgaaaaaaacagacaagtcaatgtttaaacaaccttacgttttttcccttatttttgtactttttgaatagttgttttccttctctctatttccccagtgcttcttttatcgaatctctgtgcttggctctttggctactgttccactctctcctgggctctcagtgactaagctgctgtattattgtcatataggataggacaggctctt

SEQ ID NO: 806599 - DNA, 576 bp, Homo sapiens
aggcggctgtgttccctctggtcagcatgaaattgggtggatagtgagagttaaagaccattacatataaaagtcttattgtttagtctaatcttttttaagttttagggactaaatctttaaacagtctcccgcaaacagaggatgttttatttcatttaaaccttaaatagatacaaattatattttaagaagggaatgacttttttttttkttttttttttttttgcaaaattctaaccaaacagtttgagctcccttttctcattttttttttccacaggactactctgggcaatagtgcaacaagtgttattttcatcttttccaagcaggcagaatagagtcagttgttgcttgctacttgaaaaaaacagacaagtcaatgtttaaacaaccttacgttttttcccttatttttgtactttttgaatagttgttttccttctctctatttccccagtgcttcttttatcgaatctctgtgcttggctctttggctactgttccactctctcctgggctctcagtgactaagctgctgtattattgtcatataggataggacaggctctt

SEQ ID NO: 806600 - DNA, 509 bp, Homo sapiens
ttttttcccttatttttgtactttttgaatagttgttttccttctctctatttccccagtgcttcttttatcgaatctctgtgcttggctctttggctactgttccactctctcctgggctctcagtgactaagctgctgtattattgtcatataggataggayaggctctttgtaatgcatacattccttttcttcattttaaccagatgaccacactggacagctatatttaaagccaaaaaaaccctcgatttcagaataattgtcatgaatattttgcattgtcattgaaaaagatgtatttactcagaagctggtgtcagaaattcaaggagagttttgcacagttctgcattagaggaaagacctcttctttaacctggagttactaagctacccccaaatggtaacaaactcatctggaatattcctgcctcaactttaaaacatttttttaaatggaaagtctcaaatatatgcaaaagtagaaaaaatttccatgaaccc

SEQ ID NO: 806601 - DNA, 632 bp, Homo sapiens
tcaagcccgatcatgtatataccacttcaatttgatgatgcaatgctgctgtgcacgatccactctatggctagatgggtcagaaagcccccagttcatgatagacaattcagctctcacggtgacttgatgacccatagtcaaacgttcagtttccaccaaagcccagtagcaggccaaaagctgtctctcaaaaggagagtagttatctgcagaagatggaagggcttgctccaaaatccttgaggcctccgctgtgattcacctttgggggcctgccaaaggctccaaacagcatccctatcttccactgacacctcaagctccattggatctgctggatctgggtcatatggcccaagcgggagcagcttgcacagcagcctgtacccgttgcagagccgtctcctgttttgggcccacgcaaaactggcgtcctttcaggtcactcgrtaaacgggatggagtaacacacccaaaagaggaatgaatgtgtttcctccaaaatccaaataggccaactaggcattgtgcctctttcttggttgtaggaggggccaaatgcagcaacttatccttcaccttagaaggaatatcttgacaggccccacaccactggatcccctggaaat

SEQ ID NO: 806602 - DNA, 566 bp, Homo sapiens
actaatccattccaccatcccaagctccctaagcctttggatcccttccttgacattaaacctagggagatcaggcatttccagctgactcacagtgggctatcttttaatccatatttcagctaaccaagcaaataaactgttagaaccttttwtaattccctgagtgcagcactaagacagagtccctacttactgggcccaaatcaataaattcagtctgattcaactctatgttcttccacaattatcccatacttttaatatccattcccatgcctgttcctcagatttctgtttatataaattagagaactcaaacagttctttttgagtgtagtgcacctcccatgggtcacactctcaacctcgcctctaggggcccatagggactttagtctagttataggtctagaagcaaacagaagggttggggtggctgctgaggagaaccaacattatcttgcctggcaactgcctcaggagaggccatcattgttgcctcaagcagcgcagggtttatctcctcagacaaaagtggaaaggctgacggcagcatgagttgg

SEQ ID NO: 806603 - DNA, 629 bp, Homo sapiens
aatgttacgtattactctccctttgccttggatactcatctatttgggtcaagttgaggtaatcctgggtctttctatactgttttaatcaggttttgtcctgatgcagttgtgttccatgcctccttcactttctcctaattacaatttctgggcgctagcaaccaaatgtcgattaaggtatacttagggtccaccatcttgtaatctactccagttgaattctccacggttatgtgtcattgctggtggtcataaacaacttcttttgcttttcactgcagctgcttcaaatgtcaccatttgcacttcatcttgctctcgttccatgctctcyatttcccacatttctgggtctgctaatggccacattctggtaaggtctccaaatccaactttacctgtaagagtcttggtcccctgattctaacacaaattgtgatggagctctcctctgattatttcttctgcattggctgctttatattgttacagctttgattctgttgacagtacacaacttctgatagatcgtttgatgccaaatgtaattttagcttcctaggtcagttcagttcaccgaatatcattaagcatttacaatagtgctggacgtggtgctaagggtg

SEQ ID NO: 806604 - DNA, 580 bp, Homo sapiens
ggttgcaatgttttacatgaaaaacatctgagcgtgctatggttacaggcaacagttcattttgataatttttaaaaggaaaatataaataaagaaatgacagagaataggatgattttacaaaggtgaattaaccatggaatcacagaaaaaaagataactaaagtacctaaatatacaattattctgggtttcctgggaactttaacaattttgttttcaratctactttatttcatttttttcctcatctgttttccatgttattttatattttgtagatcctttctgaagcatctaaaaactctcaagattgggaaatctaaaaatatctctgcaaaatataaagtccttgttaaataaaaaacaaaaaacttcaaatatacatttgaaggtataatactacataatgcaaatttgaggcaacattatttatgaacaatgtgatacaaacaaacaaaacagacattttaattcataatggcaataagacagttatcaggaaaattaataaatgacctacaaatatcaagtagtattttccttagatttaagagatacattaaatattcaactaaca

SEQ ID NO: 806605 - DNA, 414 bp, Homo sapiens
atcatattttaactttctaaaatatttttctcaaataattttctcttattatttagttcttgcttaaaagtgagaacatgtggtattcggttttctgttcctgtgttagcttgctaagtataatgacttccagctccatgcatgttcctgcaaagaactattttttatggctgtatagttttccatggtgtgtatrtaccacattttctttatccagtctatcattgatgagcatgtaggttgattccatatctttgctattgtgaacagtgctgaaatgaatatatgtgtgcacgtgtctttataatagaatgatttatattcctttgggcatacacccagtaatgggattgctgagtcaagggctatttctgtcttttacacacagacacgtagaaggaaatgacaaacact

SEQ ID NO: 806606 - DNA, 596 bp, Homo sapiens
gcgcctgtagtcccagctactcgggaggctgaggcaggagaatggcgtgaacccgggaggcggagtttgcagtgagctgagattgcaccactgcactccagcctgggcgacagagtgagactccgtctcaaaaaaaaaaaaaaaagaaaaaraaaaaaaaactctaagatctctacattggaagagaataaatctggcatatacattgcattcgagttttggtacctaaatgcagctttcttataacacatgtcaggttgcatgcatgaaagtaacttaatattttagcagtctcccttaatattatagtcttagcattcataagcaggtgctccgctacttccaaattgtggaggtggggaacagaagagagagatggagaaggagaggaagaaatttaaaaaggaagcatttggctgggtatattgggtggctcatgcctctaaacccagaactttaaaaggaggccgagacgggcagatcatgaggtgaggagtttgagaccagcctgaccaacatggggaaatcccatgtcaattaaaaatacaaaaaatagctggacgtggtggcctgcgcctgtgcctataatcccagac

SEQ ID NO: 806607 - DNA, 596 bp, Homo sapiens
gcgcctgtagtcccagctactcgggaggctgaggcaggagaatggcgtgaacccgggaggcggagtttgcagtgagctgagattgcaccactgcactccagcctgggcgacagagtgagactccgtctcaaaaaaaaaaaaaaaagaaaaagraaaaaaaactctaagatctctacattggaagagaataaatctggcatatacattgcattcgagttttggtacctaaatgcagctttcttataacacatgtcaggttgcatgcatgaaagtaacttaatattttagcagtctcccttaatattatagtcttagcattcataagcaggtgctccgctacttccaaattgtggaggtggggaacagaagagagagatggagaaggagaggaagaaatttaaaaaggaagcatttggctgggtatattgggtggctcatgcctctaaacccagaactttaaaaggaggccgagacgggcagatcatgaggtgaggagtttgagaccagcctgaccaacatggggaaatcccatgtcaattaaaaatacaaaaaatagctggacgtggtggcctgcgcctgtgcctataatcccagac

SEQ ID NO: 806608 - DNA, 478 bp, Homo sapiens
atatatttggacccagtagtctcttgaaaaaggcagggtagaggtcagaacacttatttcaattgaacaaagtctacattttcggaatgctgctataaaccagatgtcatatcagtaactgtcttgaaagaagtgtggaaatgtataayagctatgaaaagagatattcgtattaaaggaaatatttagaaacatacgcctgagatactattgtctttagtcttaaaaaattgcttaagtaaaattaaagtaactaactacctaagtgagcacaattttgaaagagagggatctctattgttatgtaataaattaagggaaagcaccaaatgggaactagaaggtagaaaatgttatcaatatatttgaatattgtaagtagaaataaaaatcaattagtcatattttaacaaaccaattaaagtaagccttaaagaaaaaaaagcatgtgtttaaatttttaaaggcaagtttctga

SEQ ID NO: 806609 - DNA, 601 bp, Homo sapiens
aaattaccgctagaaggtacaaacacctttgacatcagggctaaaatagctgaagcttacctttgaaaaatcaataaatgcaataaaaagatatttatcattgtgatacttagaagtattcatccaatgtgctaaacatataaaaagtcaaaagtgttcctccgtgtaaggaaaagggtaaagaattaaacattgaaaacaggttttttggcccttgtttaaaatagtttttatattttacttttattatttataaaaatataggaaaaatccagatattaaaaggtacataaaagtctgtccaggtcactgtgtagataaaagaaatgagaaatgtaaagttgatactactgagaatgagatagaaataggagaatttttaaaaacycatacatactgattgtacattttgctgaagtatacgtgatattttgatacatgtatacaatgggtaatgatcaaatcagagtaattgggatattcattaactcaaacatttatctttttattctattaggaatattccaaatctcctctggcaaaaagagtagaaatattaatttttgtttattacatatattttttataccttcaaaaatat

SEQ ID NO: 806610 - DNA, 534 bp, Homo sapiens
tcgaaattatactcccaactcaataaaatattttaaagattatctgacaattaaaatgctgtaacaatagtattattttttatgaactacaactacaatatgtgaatgccatttttgtttttctcctaaatgtcactgaaaaaaaggagaacatttttgcctcaaaatgtatatttatgtgttccttcccataataaaataacacttcagaatagccaactttaccttaaaggttttgttctaactctgtatgtgtgcartaaatacattattaagaatttattatatactagatagagaaagaaactgaaagccagacagacagacagaggttacaaccttcctttgtacttgtggagcagtcggggaaatggtacaaagaaagtaagaaggaattcaataaaaagaagtcaatagactaaatttttcgacaggagtgaagacataatttgtgtttaaaggtattccaaaaatactgtgatgaacaaccattgaccactttaagggagaagcattttctaacacagtggtgac

SEQ ID NO: 806611 - DNA, 553 bp, Homo sapiens
tttggccttgactaacggagacttaatagtgacttcaataaaattaaagcttatttctgtcataagcagcatccaggtgtggtgtgtcacttccatgaatatcagggtctctggctcccattttctttctgatgtgccatccacagaatgcagcttccacctcgtgatgcaatatgtttgttcttactgaagctgtaatttcagcattccaactaacaggagggaggaaaagcctataccctctctctttttcagacacttcatagaatttatattaagtgatttatgtgtctcccaaaccacaaataagtccaaggccacacagctarctttgagaaaggctgggtaacgtaatttattttggtacccaggtgtgaaacaaaaatcaaaagtttttacaatattggaaatattggaaacagaagtacttaaaaatcaagtaattttttagacaatttctaaagcctaaaataatgatactaatagaaatgtgtatatagatattaaactcatacattgaatcgaccaaatttggtttaatttacattcttaa

SEQ ID NO: 806612 - DNA, 553 bp, Homo sapiens
gatgttccccttcctgtgtccatgtgttctcatttttcaattcccacctatgagtgagaacatgcagtgtttggttttttgtccttgcgatagtttgctgagaacggtggtttccagtttcatccatgtccctacaaaggacatgaactcattcattttttatggctgcatagtattccatggtgtatatgagaccctgtttctaaacaaacagacaaactcgaactctagttaatgtaattgaatttcttagaatatcactatrgcagacaaatcctaaggaagccccattatccagccttctgatactcaagttcttatgtaatctccttcccttgagtgtttgtggagcctgcgcgtggcttctaacgagtagaagacagcaaagttaatagtaggtataggattatgtgtatgttattatttgattacctcactaatttataggcaattgcaatccccttcttacaccgagactctctttcccttgttgactttgaggaagcaaaagggaatgttgggaaggcctacagggcaagaaaataaggatggc

SEQ ID NO: 806613 - DNA, 660 bp, Homo sapiens
tctgacccccattaaaactattttttattatacaccccatttcttcagttgaagcatatttagactagacactcatgctatgatttatttcttctcgctcagacttgctgttaatcaatggctaaaaatgtaattcccagaaatgtgccacccccaaattccttcctacgcacaggtgccagagtcatccatccaaaatgtgcaactgatcatgttacttctctgattaaaagtcctttaaaatctcctattgcttacagctgcgtggtgctttttcttttagttttaacacagaggaaagtgacagagtgctatgtaatctctgaaaataaactmtctctctctttctcccttcttccctctccttttctctttccctcttttctcccccttcctttctttctcagatctcagccagatttcactttccagcctctcttgcaattagagatggccaactgactggattttaaccatagaaagccaaataattcaagggtgtcacttccagtccatacttgttaaggaagcagatatgtcattttacccactctctctacttttgttagcttgaaatgatcacctagaagactctggaaacagtgttgaaggctgtagttcttgagtgactcagtagagtagagtgctttcccacccctg

SEQ ID NO: 806614 - DNA, 660 bp, Homo sapiens
tctgacccccattaaaactattttttattatacaccccatttcttcagttgaagcatatttagactagacactcatgctatgatttatttcttctcgctcagacttgctgttaatcaatggctaaaaatgtaattcccagaaatgtgccacccccaaattccttcctacgcacaggtgccagagtcatccatccaaaatgtgcaactgatcatgttacttctctgattaaaagtcctttaaaatctcctattgcttacagctgcgtggtgctttttcttttagttttaacacagaggaaagtgacagagtgctatgtaatctctgaaaataaactctctctctctttctcccttcttccctctccttttctctttcyctcttttctcccccttcctttctttctcagatctcagccagatttcactttccagcctctcttgcaattagagatggccaactgactggattttaaccatagaaagccaaataattcaagggtgtcacttccagtccatacttgttaaggaagcagatatgtcattttacccactctctctacttttgttagcttgaaatgatcacctagaagactctggaaacagtgttgaaggctgtagttcttgagtgactcagtagagtagagtgctttcccacccctg

SEQ ID NO: 806615 - DNA, 579 bp, Homo sapiens
gcatatatagaatgtttaatgatcaaattagggtaaatgggatatctttcacctgaaaaatttatcttttctttattttgggaccattacaattcttgtcttctagctttcttgaaatatactatatatcattagtaaatataattttcttactgtactatcaatattagaacttattgctkgtatttaactgtatttttgtacccattaaccaacttctcttaatttcaccctatcctcttccccttcaaccctctctggtgatcgccattccactctgcttccatgaggtccattttattagctcccaaataggagtgaggacatgcagtattgctgtgcttatttaacctaacataatgaccttcagttttatccacactgctgcaattgacaggattttattctttttacagctgaatagtattctattttgtatatttactacattttctttacacatttatttgctattggacacctcagttgataccaaaccttggctattgtgaatacagttgcatatatcttttctaaaagctgttttcctttattctggatacataccccaaagtgaga

SEQ ID NO: 806616 - DNA, 602 bp, Homo sapiens
tgttaatcccttgtcagatgcatagtatacaaatattttctattattctgtaaattttctctgcactgtgttgtttcctttgctgtgtagaagctttttagcatgatgtaataccatgtgtctattttttgcttttgttgcctgtgcttttgagttcttgcccaagcatctttgctcagattgatgtcttgcagcattttccagtgttttcttctattattttcatagttgcaggtcttacatttaagtcttcaatccattttgaggtgatttttgcatatggtgaaatacggggatctagtttctttcttctgtatatgagtaaaagatttcccaggatcattatttctattgtgaataatgccgcaatgaatggtgcatgcatgtgtcttcatggtaggtagaacaacatayattcctttgattgctgggtcaatagtaattctgttttaagttatttgaggaattgccacactgctttacacgatacctgaactaatttacattcccttcagcagtatgtaagcattctcttttctccacaatctcaccagcatctgttattttttgacttttttgtaatagccattctgactggtgtg

SEQ ID NO: 806617 - DNA, 524 bp, Homo sapiens
ttgacaatttattttttaataacaatatgtgaatatgtaattatctaaacccgaagttagcaattttattttataaatggccaggaagttaatacttggctttgtgaccatactctctcttgcatctatgcaactctgtctgycattttagcattaaagaatccatggacaataggtaaatgagtatgttgattttcagtaaaactttacttcaacaacatgcagatagcttgacttgatcatgggctatagttgcttactcttaatcaaacacatgattatataaaaagacaagttatattattcagtgagtttctgatactaatttttataatttttatcacattcttaaattggtgaaaaccctttgttgaaaccaaagactgttttctggtctgttttgaattcctctttgttgtctattctaatgttttcatactcgtttttatgattatgtaagtttccacattgggatgtgcttgtcctttgcatcttttaaaaattcttgaacatatgtttgagct

SEQ ID NO: 806618 - DNA, 605 bp, Homo sapiens
catcagcatgacctggatgtgagacatggagtcaaaggagatcatgttggaactttaaggtttaatgactgccctattgtatttcagacctctatggggctgtagcccctttgttttggccaatttctctcatttggaacaggtgtatttgcctaatgtctatgcccccattgtatctaggaagtaactattaataacttgcttttgattttacaggctcataggaggaaagaaattaccttgcctcagataagactttagacttggatgttgaattaatactggaatgagttaagactttggggaactgttgaaagggcacrcagttgtattttgaaatgtgagggcatgtgatttgggagggaccaagtgccaaataatatggtttggctttgtgtccccacccaaatatcaccttgaattgtaatccccataatccccacatgtcaagggtgggaccaggtggagatgattgaatcatgggggcagtttcccccatgctgttttcataataatgactgagtctcatgagatctgatggttttttaagcatctggcatttcctctgcttgcactcattctctctcctgccgcactgtgaagag

SEQ ID NO: 806619 - DNA, 498 bp, Homo sapiens
gagaagtatctgtgcagctgctggcacttgtggcctatagagaaatacatcaaatgaagattatagaaattcagtggtagaggagtgatgaagaaattgcttagtcaagtgagtacattctttatctagctcattatttgatccatttgattttaggaggtttgttttatggggatcytgaggaaggagcatattccaaactcttgatattattctcccaatagtcataataatagtctccagggtgcactgtattctctcaaaggtttcaaatgcttgcatgcagccatctctagaatgtgatatggtctctcctcaactggaataacaggagctgaaagaaatgtgcaaccatgaggacaccataacctataaataatgtgctgataccagaaacccaaaatgatggtaactgagagtggttctaaggccctaagttttggtacactctcatctaagtgagaacctgaccaaaaagggggaatttttttttttttt

SEQ ID NO: 806620 - DNA, 577 bp, Homo sapiens
ataataatagctatatggcacctagagtagaaaggatgatttacagtaagggcattctctcaaaacttaatagtttccactataaaaactaaagacagttcttcctagtttcactgtttcagagcactgttattagttgrctcaaaagtttaaatagcttttgttgtaaaataaacaattggtatatgacattctatgagagggatggtctgagaatggtttattgtgacaatgcaatcactttcaggtattaaatttcaggatgaaaactataaatcattcgctttcccagagtgaagtttgacttattcctgtggccaacatggcttatggacaccaaggacaaataagtcagaataacttgatggaaaagaccttcagcgataactacatagttttcatctcttgtatgaacaaagtgttaaattttctctactatcaattctttagtgatatattggctatgatttttttctgttccatgatatatattattttatcatataatatacattgatatatgaattgattaaggtcagggatttataccaagataataatttgttctaaaaactat

SEQ ID NO: 806621 - DNA, 577 bp, Homo sapiens
ataataatagctatatggcacctagagtagaaaggatgatttacagtaagggcattctctcaaaacttaatagtttccactataaaaactaaagacagttcttcctagtttcactgtttcagagcactgttattagttgactcaaaagtttaaatagcttttgttgtaaaataaacaattggtatatgacattctatgagagggatggtctgagaatggtttattgtgacaatgcaatcactttcaggtattaaatttcaggatgaaaactataaatcattcgctttcccagagtgaagtttgacttattcctgtggccaacatggcktatggacaccaaggacaaataagtcagaataacttgatggaaaagaccttcagcgataactacatagttttcatctcttgtatgaacaaagtgttaaattttctctactatcaattctttagtgatatattggctatgatttttttctgttccatgatatatattattttatcatataatatacattgatatatgaattgattaaggtcagggatttataccaagataataatttgttctaaaaactat

SEQ ID NO: 806622 - DNA, 445 bp, Homo sapiens
tttattttctgtctttttgtatttttgttatcccatttgtccattttggttttcattgcctgtgcttttgaggtcttattcaacaaattttgcccagactaatgtactcaaatattttccctatgttttcttctagtagtttcaggtcttacatttaagtctttaatacatttagatttgtttttgcatatggtaagagagagggtactaatttcattcttctgcatatggttatctagtttttcaagcatcarttattgaaaagactgtccttgctgcagtgtatgtttttggtactttgtcaaaaatgaattgactgtaaatgtgtggattgatttgtaggttatctattatgttctatgtgtctgtttttatggcagtaccatgctgattttaatactatagctttgtagtataatttgaagtcagatactgtgcttcttcc

SEQ ID NO: 806623 - DNA, 635 bp, Homo sapiens
aaggatgcatgtgtatgacagtatcaaatataactttatttacttctagtttattttagggtaaatttctctgccaaagactcctgagtatatcatacaaataggctgaagtgataaactgaaccctaaagcgtaaaaatcaccctagctattgcaaactcttgcttaataacttcaaataaattattcttgcttttctgattgatgataaaamtagagagttaaaatttagctaaattaaagctaaaatttaacttattatgtttgacatagtaattatttctgtcaatttgtctttggtaattactacattataattaaatgtaaaaattaattcattatttctgttctgaatgcatgaacatttaccaatctcaaaggcaaaggagggcgttaaaaactttctaagttgaaaattttaagctgaatagaattaaggaacaatggcatatatgtatgccattctaaaacaaaatttaatataaaacaaaattttcttcttttggtgaatattaacttgaccctaaaggtcatattttattaaagtactaagctttattttttattttgtttcaattttgaaaattcagatatacaggggttagtttataacaaaaacaatatttaattttcat

SEQ ID NO: 806624 - DNA, 611 bp, Homo sapiens
taaattcatttaacaaatctaagagctctttctggtgaaatctttaggtttgtctaaatataaggttatatcatcagcaaggtaggataatttgacttcctcttttctaatttggatgcctttaatcctgcctgatggctctggctaggacttccagtaytatgttaaataacagtggtgaaactgggcatcattgtcttgttctagttcttagagaaaattaaattttccatccaatataatgctggttgtgggttccccagtgggaacaagaaccaaagaacaacactcatcctctcccatactaggggatcattcctggttcccagctggcctcaggcatgcaggctacctgttttccttacccttcctagattttggtgtatcctttcatttttctgttggtctttcatgtcacctcttgtaaaatgtattcaaaacatgattgcctgcacattatttttggttcttctaagtagatcaggtgtacttgaaatgcttctagtcagccattaaagaaaaaaactgcaactttttaaagttaccaatttacatattatactgtttttaagattacttattcactcaaatgcagctaagtgtattgctat

SEQ ID NO: 806625 - DNA, 583 bp, Homo sapiens
atgcatcttttgacttattttaggatattaatttatctggggggcaaacactatatcaaatttgttatgtatctatatgaaacttatgacttgaggcattctgggatatacttttaaaatgtatacatatacacaaaaatgtatataatgtaatatatattttacatattctcctttaatgaattatctttatatatatacacacacataarcaaacacatatactttataatgaatcattttaataaataaatgtatatggcttcgttttacaaaaaatattcctaagaaaatggaaagtttcgggaaaatttgaatgacttttataaacacttgtctgtcttcgttataaatacagcatgcctttaattttatagaaaataagatgccataaagtccaattttacttaaatttaagggcatatatagaactaacttttaacttaatattgtataataaagcatgaagacagtagaatttttttttttttttttttttttttttttttttttttttttagacaagatctggctttgttgcccaggctgtagtgcagtggtgcagtctcagctcactgcagcc

SEQ ID NO: 806626 - DNA, 583 bp, Homo sapiens
atgcatcttttgacttattttaggatattaatttatctggggggcaaacactatatcaaatttgttatgtatctatatgaaacttatgacttgaggcattctgggatatacttttaaaatgtatacatatacacaaaaatgtatataatgtaatatatattttacatattctcctttaatgaattatctttatatatatacacacacataaacaaacacatatactttataatgaatcattttaataaataaatgtatatggcttcgttttacaaaaaatattcctaagaaaatggaaagtttygggaaaatttgaatgacttttataaacacttgtctgtcttcgttataaatacagcatgcctttaattttatagaaaataagatgccataaagtccaattttacttaaatttaagggcatatatagaactaacttttaacttaatattgtataataaagcatgaagacagtagaatttttttttttttttttttttttttttttttttttttttttagacaagatctggctttgttgcccaggctgtagtgcagtggtgcagtctcagctcactgcagcc

SEQ ID NO: 806627 - DNA, 583 bp, Homo sapiens
atgcatcttttgacttattttaggatattaatttatctggggggcaaacactatatcaaatttgttatgtatctatatgaaacttatgacttgaggcattctgggatatacttttaaaatgtatacatatacacaaaaatgtatataatgtaatatatattttacatattctcctttaatgaattatctttatatatatacacacacataaacaaacacatatactttataatgaatcattttaataaataaatgtatatggcttcgttttacaaaaaatattcctaagaaaatggaaagtttcgggaaaatttgaatgacttttataaacacttgtctgtcttcgttwtaaatacagcatgcctttaattttatagaaaataagatgccataaagtccaattttacttaaatttaagggcatatatagaactaacttttaacttaatattgtataataaagcatgaagacagtagaatttttttttttttttttttttttttttttttttttttttttagacaagatctggctttgttgcccaggctgtagtgcagtggtgcagtctcagctcactgcagcc

SEQ ID NO: 806628 - DNA, 611 bp, Homo sapiens
aaaaatatactatatatgaaaaaagataaaaattggaactattacctgctaataaaattatttggttcaagcgattctcctgcctcagcctcctgagtacctgggattataggcatgcaccaccatgcccagctaatttatttttgtatttttagtagagatggggtttcaccatattggtcaggctggtcacaaactcctcacctcgtgatccgcccgcctcggcctcccaaagcgctgggattacaggtgtaagttatccttttctttcccttgttggaggaggactcaattccacagcttcatcttagatttggcgtatgataaggagtccatgcaacccccctcacgacacrtttttgttccaaactcaactccaagctttaggtcaaagccctaagaaagaaaactgggtcaaagaaatccagaggcagatgatgactgaagttaaaaggcacagttaaaaggtgagcatggctaattcccactgattaagccaagcctcccatttcatgaataaatgtcatgctaatatccatggcataaatgaggtctagggaactccaaggctactggcagtaagggagagagagatataggtgagagcagat

SEQ ID NO: 806629 - DNA, 603 bp, Homo sapiens
aaaaggcctcaggatgtttaaactccctttttctcattttgatacatgttttataataacccggtttgtctcttcttgccttcaggccctcaaactccaaacagtcaagcaaccagagcctctgatgatagtgccttctgctgggaacccttaaacaggcttctgagagaggtctgactgctgttttcccaaagcagtgccacctgtcagcaggaagcagttaagatcggtcttcgtccttatccttattctaacagcagttagacgtacttctttagaaggggaaatgagacaaccaagaataaagaggtccacagcgaacctctgaccagcctgcatgcagggaggagtgtgcactgggatgtagccttgggaagctggcgttgtgtgcgggggtgggggcgggggagcctggcctctcctgttscagggtggcacctgggattcagtctgtgaggtgggaaatgggctagcaggactctcactttgctgagagtccctgtttctttttttttcctctttgcccaataaattccatttttcgcacccttcaaaatgtctgtgagcttaatctttcatggtcatgtgacaaggaccctgttt

SEQ ID NO: 806630 - DNA, 626 bp, Homo sapiens
atgggagcctgccactccttaggcgttaatcacagaaaaatttacatttccattcatgcaaaaatatttatacaaatattcatagcagttccatttgaaacaaccaaacactggaacaacccaaatgtccttcatgggtaagtggtgacacacactgtggcacttccttgccttggaataaaactcatcaacaaaaaaggagcaatctatgaatgcatataacaacttggaattctcaagagaattatgctcaccaaaaaaagcatcacaaaatgtttcatatcatatgactcaatttgtatcgtgttcttgaaataacatagagatggagacagattagtggctggcagagattaaggattgaagaggaggagctggatatgatggatatgactataaagtggtagcacaaagaaactctgtggtgatgaacaatttggtatcttgatggcgatggtggttacacaatcctacacacrtgataaagttgcatgaatgtacacaaacacacacattgcttataaaactagtaaattaggtaaattagaataaactctgtggattatgcatatgtcagtgtattggttttgctggtgcactatagttatgcaagatgttactactag

SEQ ID NO: 806631 - DNA, 462 bp, Homo sapiens
caaccattcagtggccctgtcttttgatgccagcgtgtgaactaattgataaaagtcagactatctgtgttcttatgtcctgacaattaaatgaattttttttttttttttttgcaaacactatgggatcttggagaagctctgggaagtcttttatactattcttaagttcagtctttgtccaacgggtgtgcataataggaggctcacatctttctgcaggttttaccttgaaaggggctgcaaaaataggagtttcagaaaggatgtcagagatgtagaaaatttcctcaggtggtcagggagrtagaattgaaggcaagtaaggacaggaaagtttagatacaagaagatataaaggttcaggcgtgggtggagaaggagcagtggaggtggaagggagaagaaggtctcctaagtgaagtcctttttaattcagaaatagtctcagatatctttttc

SEQ ID NO: 806632 - DNA, 462 bp, Homo sapiens
caaccattcagtggccctgtcttttgatgccagcgtgtgaactaattgataaaagtcagactatctgtgttcttatgtcctgacaattaaatgaattttttttttttttttttgcaaacactatgggatcttggagaagctctgggaagtcttttatactattcttaagttcagtctttgtccaacgggtgtgcataataggaggctcacatctttctgcaggttttaccttgaaaggggctgcaaaaataggagtttcagaaaggatgtcagagatgtagaaaatttcctcaggtggtcagggagatagarttgaaggcaagtaaggacaggaaagtttagatacaagaagatataaaggttcaggcgtgggtggagaaggagcagtggaggtggaagggagaagaaggtctcctaagtgaagtcctttttaattcagaaatagtctcagatatctttttc

SEQ ID NO: 806633 - DNA, 581 bp, Homo sapiens
aactttgaacttgagagagattatttagagtatctgggggaagaaatttctaagcagaaagcattcaagatgtgacctggctgttcctaacagtgtacagtcatatgaattcagaaaaagattttctgaaattggaacttatgtttaaaagggaagcagaccataaaagtttggaaaattttcagcctgaccatgtggtagaaaagaaaaaaacacattttgtagggagaaattcaagccagttgtggaaaattgcataagtaaagagtaaccaaatgttaatagccaagaaaatgggggaaatacctcaaaagaattttggagaccttcacagcaagccctcccaccaaaggcctggaggcgtaggagggaagaatggttttgcagsctgggcccagggcacttctttcctgtgcaacatcaggacactgttccctgtgtcccagccacgccagttctggcgatggctaaaagggacccagacatgacttaggctgctgttccaaagcatgcaagctgcaagccttggcagtttccgcatggtgttaagtctgtgtgggagcagagggcaggaactgagg

SEQ ID NO: 806634 - DNA, 581 bp, Homo sapiens
aactttgaacttgagagagattatttagagtatctgggggaagaaatttctaagcagaaagcattcaagatgtgacctggctgttcctaacagtgtacagtcatatgaattcagaaaaagattttctgaaattggaacttatgtttaaaagggaagcagaccataaaagtttggaaaattttcagcctgaccatgtggtagaaaagaaaaaaacacattttgtagggagaaattcaagccagttgtggaaaattgcataagtaaagagtaaccaaatgttaatagccaagaaaatgggggaaatacctcaaaagaattttggagaccttcacagcaagccctcccaccaaaggcctggaggcgtaggagggaagaatggttttgcaggctgggcccagggcacttcttycctgtgcaacatcaggacactgttccctgtgtcccagccacgccagttctggcgatggctaaaagggacccagacatgacttaggctgctgttccaaagcatgcaagctgcaagccttggcagtttccgcatggtgttaagtctgtgtgggagcagagggcaggaactgagg

SEQ ID NO: 806635 - DNA, 589 bp, Homo sapiens
ataatattttagaaagaagtactcatttctaatgttagaaacctagaagaaatgtacagatatctagacacttggctcaaataattctccaaatccaaataattcttaggagatattctattcatattctttaaaaaatatgttaccattttattataatttttttttgtttgttttgttttgagactgagtcttgctctgtcaccaggctggagtgcagtggcatcatctcggctcactgcaacctccgcctcccgggttcaagtgattctcctacctcagcctctgagtagctggaattacaggcacacgccaccatgcccagctaatttttgtatttttagtagagacaagttttcaccatgttggccaggatggtctcgatctcttgacctcatgattcacccacctcagcttcccaaagtgctgggattacaggygtgagccaccacgcccggccaaaagtgttttttctatgattttctctattatgtctaatttaaataactgtttagagaaccatgaatcaatctatcttccctcttgtgttctccttttctctcgctctttccaccttttcatctgtatt

SEQ ID NO: 806636 - DNA, 626 bp, Homo sapiens
cagtgaagatgaaaatgaatattttcttgtgaagaatatggtgactaatttaaagatctttcaatttatgaatacttcatttagactacctactatttgagtaaagtaataaatttaatatgttttccatgatgtaacccacatgatgraaactcaaaattaactacattaatcataatggataatcaaattgaatattaaaaatgcaattaatcttttaaaagaaagtattttttgagatcattaagctgaagaggagaacaaaaagaaacaaatagaaaaatattttcaaggaatctctttatatctatgttatgttatctgataaattattgatctttttcacttctcttctatgggtggttctgtgtgtgtgtatgtgtgtgtgtgtgtttgtgtgtgcatgttcattgtgtttgtattatataataatggacataattttgtgattgtagaatatcttcaagatgtttgagccatacatgtagagtgactatcctttctagtatcaaatgaatgacctaatcatttaaataaataattagtttaaataattagattatattttatcaattaggaatgatctgcattcagtttataatcattaaacatgaatcctttaatag

SEQ ID NO: 806637 - DNA, 592 bp, Homo sapiens
atttctctattttttatggtttgatgtgttgaataatatctactgtataagttctcacttagcatttaaggtttctctatgtctttttgcttcttttatcattgaataatatttcatcgtatgaatgtacactttaaaaaatctattcacctgctaaaggacatattggtcatttccaagttttaacaattataaataaagctgcaataaacatccatgtgcatatttttgtgagaatatgttttctactcattgggtataaatatcaaggagtgtgactgctgaattttacggtaactgtatacttagtgttgtaagaaactgccaaactatcttccaaagtggctgtgccatttttcattactaccaacaataaatgagagctcctgttgtttgacattctcaccagcayttggtgttgttagtattctggatttttgccattctcataggtatgtagtgaatgttttttattgttttaatttgcaactctaaatgacatgtaacattatgcatcttttcacataaaatttttgtcatctctgcgtcttctttggtgaagtgtcggttcagaactcttgtccattttttc

SEQ ID NO: 806638 - DNA, 598 bp, Homo sapiens
accatgcctggcagtcttttccatttcttaatctagtttcctattttcttattattgaattttaagagttctttgaaaattttagataataaccttttatcagatatgtggtttatcaataatttctcccagtctgaggaaaggaggatagttttatagttattttttaataatatcctgtagtagagatattacaatattayggacaatttggtgaaagtaattttttttttttgagacagagtctcactctctcacccaggctggagtgcagtggcatgatcatggctcactgcagccttgacatcccaggctcaagtgagcctcctatctcagcctctccattagctagaaatgccacatgtgcgccaccacacccggctactttttaaattttttggagagacagcatctcagtatgctgtccaggctggtcttgaactcctggactcaagtggtcctcccaccttggtctcccaaagtgctgggattataagcgtgagccaccatactggcttggtgaaatatttgtattgaatagttaatattagagaagatttgggttagctttacatatatactaaaaaaaatgaaatct

SEQ ID NO: 806639 - DNA, 598 bp, Homo sapiens
accatgcctggcagtcttttccatttcttaatctagtttcctattttcttattattgaattttaagagttctttgaaaattttagataataaccttttatcagatatgtggtttatcaataatttctcccagtctgaggaaaggaggatagttttatagttattttttaataatatcctgtagtagagatattacaatattacggacaatttggtgaaagtaattttttttttttgagacagagtctcactctctcacccaggctggagtgcagtggcatgatcatggctcactgcagccttgacatcccaggctcaagtgakcctcctatctcagcctctccattagctagaaatgccacatgtgcgccaccacacccggctactttttaaattttttggagagacagcatctcagtatgctgtccaggctggtcttgaactcctggactcaagtggtcctcccaccttggtctcccaaagtgctgggattataagcgtgagccaccatactggcttggtgaaatatttgtattgaatagttaatattagagaagatttgggttagctttacatatatactaaaaaaaatgaaatct

SEQ ID NO: 806640 - DNA, 598 bp, Homo sapiens
accatgcctggcagtcttttccatttcttaatctagtttcctattttcttattattgaattttaagagttctttgaaaattttagataataaccttttatcagatatgtggtttatcaataatttctcccagtctgaggaaaggaggatagttttatagttattttttaataatatcctgtagtagagatattacaatattacggacaatttggtgaaagtaattttttttttttgagacagagtctcactctctcacccaggctggagtgcagtggcatgatcatggctcactgcagccttgacatcccaggctcaagtgagcctcctatctcagcctctccattagctagaaatgccacatgtgcgccaccacacccggctactttttaaattttttggagagacagcatctcagtatgctgtccaggctggtcttgaactcctggaytcaagtggtcctcccaccttggtctcccaaagtgctgggattataagcgtgagccaccatactggcttggtgaaatatttgtattgaatagttaatattagagaagatttgggttagctttacatatatactaaaaaaaatgaaatct

SEQ ID NO: 806641 - DNA, 612 bp, Homo sapiens
tctcggctcactgcaactgcgaggtggcaacgtgctagcagcctttgctcactctcggcacctcctccgcctcagcatccactctggctgcgtttaaaaagcacttcagtccgccgctgcatgatgggagcccctcgctcgctgtggctggagcctgctccctctgcttgcaaggaggtgtggagggagaggcgcaggcaggaactggtgctgcgcacggtgctcctgggccagtgtgagttccaagtgggcacgggctcagcgggccctgcactccgagtggccggccagggctgctagccccgggaagggaggggcttagcacccgggccagcagctgcagagggtgccgggtcccccagcactgccggcccrcctgcctgcgtttgaattctcctcaggcctcagccgcctccccaagggcagggctcgggacctgcagcccaccatgcccgagcccaccccaccatgggctcccacgtggcccgagcctccctggatgggcactgccccctgctctgttgcacccggtcacactgactgcccaaggggtgaggagtgcaggcatgcagcgtgggtctgacgggcagctccgcctgcggccccagcgca

SEQ ID NO: 806642 - DNA, 587 bp, Homo sapiens
attgaggtacctatttaagataataatactggacactttctacagttgtttaatattattttctctaagttcaattatttttatttagggcaaactggaactgcagtactattctagattaccgggatttgttgtttcaataaaagcaaaagagctgcgtttgatctaacaatgtttagtgagtgccttctatatatcagacttcgytctaggcactaaagacatagcagttattgaaactgagtcagtctctgcttcagtataacttgtatgtaatggggagacataatgataattacatgatgtatcagctggtgcataagcactgtgaaaaaaaatcaaacaggataaagggaacatttggagtgccactttttggtttataagggactccttagagaaagtggcatctgagcagaaaaatacattattccctttatattttatcatcacttgagttgtattatttgttagtgggaataattgtgccagagactgtttcaatatgacatgaccaatcagaatatccaaccttcctagagtgttttcccaaactgtgacatggagtgaacaagagttgccagatt

SEQ ID NO: 806643 - DNA, 569 bp, Homo sapiens
atactactgggtatatatcccccaaattgaaatgtttcccaaaaaatatatttgcactcccatgtttatttaagcattattcacaataaccaagatatagaaacaacctaagggtgaatgaatgaatgaaaaaaatttttaagtgtgatgtgygtgtgtatgtatatgtattcgactatttttaaaagaacaggaaattcagtcatttgcagcaacacagacaaatctagaaaacatgttaagtgaaataagccagacatagaaagacgaatactgtatgatctcactcatacgtgaaatcttaaaaagttgaacttatagaagcaaggaatagaatggtggttatcactggctgttggggaagggtgagaggagaaagaggagaagttgatcaatttgttcaaccttacagttagatagaaataaggtctgagattctattgcacagtagagtggctatagttaatattctattatgtctttcaagatgcctggcagagaagatttttaatgtttttaccacaaaggaataataaatgtttgaggtgatgaagaatacgctaattacc

SEQ ID NO: 806644 - DNA, 604 bp, Homo sapiens
attctgtttcatatgtccctaaattatttttcaaatccaaaacatgtttgttactgagattacatgcttgaatagaattttttagaaagaaaaccttcatatgtcttcattatactatgaccaatagtatagtcaagaaaggtcataaaagtctccgagcctgaaattatttttccaattaactgtataaaatgttaaagttctgggtatagataactttttctcaataatggtagcaaagattataataacacagagtcgttgaatttagaactatggttcaagttctaccygtccaacttagtggcagtatgactttaggagtaaacaaaatcttatctaaaaacaagcaattaataaatatcactttaaatcaatattattatgattgttcaaataacagaatttaaacatactaattatatacttatatgtttaaattatttcagtttacaaggatacacatttaatacttctccaaattattatctagcataatccaaaagagcatgctttaaacggtactcgcccaactcacaaaaatacaattattagtgatgctcacctagagtgaaactatttactcatttgcccacagctagca

SEQ ID NO: 806645 - DNA, 627 bp, Homo sapiens
gtgaatttaatgatacatgtattctattgtcactagtggttagaatggacaatttgcatatagaaatagtgtcatacagtacaaaaatttaaaaacaaaacaaatattcaaaacataactaagaatataaaatcaccttatcactccctggtcctgcatagctatttgttgacatttatattaaagccttgagctattttaatgtattctcaagtttaggaaattttatgtgaatttgtatcaaattgacaattttactaatctctgtgtatttactttttgtaaattaaatgaattttacagcacccttsattcatcagctgcacagatttagcaggtttatggtgaataattgcatatattttttaacactgagtttctatcaaaaagaaaacaatagaatttgcaaacaaatgcatgaacaatttgttagtctatataactctcccacatttggaatagtccttcctgtataagtggaagtaaaaagctagctttccattcataattacgattagaattaggcatgctttaattgtgttgatgctctcttataccagttaataaatctctctctcatatcaaattgatttaataaaaatatcctgtgctatgttttttctcctg

SEQ ID NO: 806646 - DNA, 635 bp, Homo sapiens
atatatcttaattgtctaatccttggattggtttcactctcatccacgtagcaagattgctgcaacaattctggttatcttgtcctaacatgacagattcagacaaagagacagaacagtccttcctgctggctatttcactggagaaataatacattttttttcagaagctgcctcctgtttcactaggcaggatgttttracatttgcttttctaaaacagcccgaagcaagaataatttaattattacagttttcctaatatttatgtgtgactctgtagacatgacagcaatagtcacaacgcccaacaccatgcatttctcactttttaaatgtattattattgttgttgtttgtccacctgctgaacttcctctctagatgttaagaattgtttgccctgaaaataggaatccccattaaagtagagaaactcttaaaactattacctttacattttagactgaatctttaatgtactccaagtaaccattcattcaaataaccatttgaaaacctacaatgtgccaagcactgtttattctttcaatcagtatgaaattataaatgatagttacgtcttcaagaagattctaatgctttttaattaaatgttcaattgaatgaatact

SEQ ID NO: 806647 - DNA, 600 bp, Homo sapiens
ggcttcaatttgtacatgcataaaggtattatgaaataggaaagcaaaaatatttgcccagatataacaagaagatatatggggacacagtgcccacagttctcgctcactgacaatcgccatagctgttttgattctagatgctgatgtaaatttacatctgtcatstggcctaattaaggtctgattggaggactcacacaggatgtgcctattgtgaagtccaaagggaatccacaaaccctactttggctcaaattttttttctagatagacctgccttattaatagaagatggactaactaccattacttttgcaaactcaatcagaaaatttgaaatattttccttaagaagaaaatgttactaagataagaaaagaggatattttaggaaaatattcagcttgggaagaattaagtggttttaatacctttaacatgaatacaaaactatttctattaaataaaaatgaaaaaaagatcataagacactcaacagaaattataagattagaaataaatgaggaacaatacattataatgttaataatgctatggaaaaatgaatgctatggaaaaatgaatccattgtctata

SEQ ID NO: 806648 - DNA, 619 bp, Homo sapiens
tccttgtgatggcgcacctctctaacacttctttcatctccatatctctcattaaccacaacaaggaatgatcctgtttttcagcattcatgtgattagattgtgcccaccgggataaccgaggatctcttcatctcaagattcttaaccttatttagatatgggaactcccttttttgccatgtaaggtaacatatttatagattctggcaattaagtcttgaacatcctgggggtaccattagtctgtctaccatagatcagaaatcagtttttcaaatcattttacttaccttgaaattcttagtaattggggttcaaatatggatttgcaaagtctgcaaytggattttaattttaaaatgtttaacaggtgaatatatatatatataaggtgatagaattgaaaaaaaatcacactaattcaaatgtttccctccctccctacctccctccctccttccaggctggcatgaagtggctcaatctcagctcactgcaacctccacctcaaggattgaagcgattctcatgcctcagactccccagtagctggggttacaggtatgcactgccacgcgcaggtaaattttaggatttttagtacagacagggtttt

SEQ ID NO: 806649 - DNA, 608 bp, Homo sapiens
agactggcagatcatttcaatccatcgattgtgctaagagcattaaataacacatattataattaagctatttaatctattgacccaatgctatgattagaatctggaagaaattagacaaataattacatgacagatttagaaaggagaaataaaccagatagcggattaatccgttatttctttgaagatatttagggcaagtgtagctgttgttccattttttttaaaaaaaatgaggagaccctyattctaatattaagctatcaatctctaagaaacaaatatcttttgggagttaaccgttacttacaataacagtaagcaactcaacaaatataattattcctggactaattatagtattctatcatgaaacaagtgcttactaatcagatttccaatgagaccattactcttcagaaagagactgcctgaggggtagcataaaaaaccccttgtccctgttaccacaccaaattaaaaactccctagttctttcaaatacatgtaagacatatgtcttgcccatgtttttaagatctctaaaactttcaggaccaccatagactactcttgttctctgagaacagatactgtcacacacc

SEQ ID NO: 806650 - DNA, 590 bp, Homo sapiens
aattgattgtcactaattatccaccaattctcatagttttgtttatcagtgacaaacttaatttatgctctattaaaacttctactatacaatctctctagggagagaaggatactgacatttaaatggcaggattacacaactgtaaaacatacataaggttaccaaactctccctaaaaattacacataaggagctttactaaatagtagggaaagattatgagtcacagcattttctctgaatgcaktgtaacgtgaaccccaaatatctgagctaggtctcagtcagtttaggaagtttattttgccaaagttaaggatgtgcacccatgacacagcctcaggaggtcctatgacatgtgcccaagatagtccgagcacagtttggttttatacattttagggagacatgagatgtcaatcaacatatgtaagatgaacattggtttggtccaaaaaggcaggacaactcaagtcaaaggcaggacaacttgaagtggggagggggcttctgggtaataggtaggtaagagacaattggttgcattctttgagtttctgattagcctttccaaagaagcctatcag

SEQ ID NO: 806651 - DNA, 546 bp, Homo sapiens
aagtcaacaagtaataaccaaaatcgatgtagttggaaatgagagcaaagctctgtatcttttgctatttaattccctgagttctccatctgctttttaatacagtggctcttgatgtattatgtttcttggacacttagtcataaaaaaatgagaaaaattaaatattgatgttcacagtaggatagttgcaatatttcataggcttttaccaaataagcaatatttctgcttgccaggacattctctgttgatgaaagattatttttcttctcacttgaaaggaaatctgaaaagtcattttaaactatatttagctattatggaactatttacttctttttttttcagaagcaaacagatgtgaaatgcaatagaattgttgacagaatyggcttttcctggtgacaaatctgatgatttcagtgttaaaacagccttgttttatgtagaaacatggctatattctaattgaaatgtttggaatattttatgactgaaaaactgttgactccttgtttagtaatagatttatccttccactgt

SEQ ID NO: 806652 - DNA, 574 bp, Homo sapiens
tttcataacaaataatatggaggaggaaagagaaagagaatgataaagcaactcaggcacagatgttaaaatcttggagaaaacagtatatggaaaatttcacaatttctttgcaaaatctccgtaaatttaaaattatttcacaataaaatattttaaatwttctgaacaacaaacataaaagttttcttcaaagagttaaaatgttatgattttatttatttattatttatttatttattgagagagagtctcgctctgtttccaggctggagtgcagtggtgcaatcttggctcattgcaacctccatcttctgggttcaagtggttcttctgcctcagcctcctgagtagctggaattacaggtacctgccaccatgcccggttaatttttgtatttttagtagagatgtacttttaccatgttggccgggctggtctcaaactcctgacctcaggtgatccgcccgccttggcttcccaaagtgctgagattacaagtgtgagccaacacgcaaggccaaaatgtgattattttaaaatattaccctgggtgtagtgaggaggacaaat

SEQ ID NO: 806653 - DNA, 648 bp, Homo sapiens
tactcaaaaatggttttgcacaagtttgtcaccaagtagtaatcatagtacagaagatggtggaattctcaacaagaagaaagctaacgctgtcaggcaatgtgttggcagaattggtgaaaatctatcattaaattaaataycattgactttatatcgagaaatgttgccatgcacatccttaactcattaaacaatgcagtgttggaaagaagagaaaataatatatccctttcctattgtcaccctcattacagagaaaaacttagagatgttatttatcagaaaaataagcaattattttctatgatgaaattggctgtttttgaaatcattctgtaagtgaaatgtgaagagagggtctcatacaattctttggaataatgttatatggagagctatatatttttaaatatatcattgtgtcaaaagattagcatggagtattgaaactattgtgatctcacatgattatcataggaatataatgaaaaaaatagtgaagacctgggagaattgaccagcaactaaggaggaaaacagcagagcaaatagaagcgtatatacccataatacaattttaataattgcaaatgtattttttaaataagaaattaaaaaaacacatcaggacaatgaaggtcttgt

SEQ ID NO: 806654 - DNA, 612 bp, Homo sapiens
aaatggactaataaaattatcaacttatttttatttacatatttacaattctactattatttaaaagcactgtgtgaacagaagctttctcagccaacaaaaatagaaactaatgcactgctaattttacagattcatataaatgaatctgagtgtcacaaaagtcattttgaaacaaatctataagattattgatgcccaggtataggaatttccttccttaagttttggcaaggaaaaatttcttactgagttcaatgttttgtttctttgtcttgtcagctaagccatgagccctaaatgtttttgtgctttacttccaacaatacatagttatgcaagctacaacatgaatattctgtttatgtgtagaaatragaagataaaataaatattttgtttaaagaaaatttctgctgaaattacataagcctgagacgtatgtctttctttcagcaccatagtactctagcttaaatggtaaaaacaatttctgtaccacggaacctgtgatttccttaaagaagttgtataacaaaataggagattttgcatttaattctagtttgtattaatcttaatgaaaacagagcaaccgctttgctgcatggt

SEQ ID NO: 806655 - DNA, 504 bp, Homo sapiens
aacagatactaaaactaagatgacagaaatatttaaatgatcacaaaagaaatttaacacagccattattaactgtttcaacaagcaattacaaatacatttgaaacaaatggaaagaaaaagaaagtatggcacagaaatagaaagacacataaaaaaatagaagattaaaaatgtggaaactttaaaactgaaaaattcagtagacaaaataaaaatatatgtaagtgtacttgtatactgaatattgcaatattaaaaaaaatmtaaataaatagcaccacaaagtttatacattggaagaattatggtgaagatgtaaattctacccaaattgagagaaatgttcattgcaattcctctgaaaatgcctgtaatacttttccagacaaaagttagtattgtaaaagttttattgtaaaagttatatagaaataagaggaaatgaaaatagctaaagcaacactatagataataaaatgagtagactcactctagtcaata

SEQ ID NO: 806656 - DNA, 637 bp, Homo sapiens
ctaggaaaattcgagggaggagagaggtaatcccccgccccaaaacgtgccaacatataaaacctgaagtcaacggttgaacagcggatttggagctctcaagttgcccttttgtccctcttccaagtgtaattcattttgtttatgtccaaatacgttttaataaattctcctgctaaaaaacatgtctccggccgagcgcggtggctctcgcgtgtaatcccagcacttgcggaggctgaggcagaaggatcatgaggtcaggagttggagatcagcctggccaacatggtaaaaccctgtctctactaaaaatacagaaattaggccgggcgcggtggctcactcctgtaaccccagcacttcgggaggcagagacrggcggatcaggaggtcaggagattgagactatcctggctaacacggtgaaaccccatctctactaaaaatacaaaaagttagccgggcgtggtggcaggtacctgtagtcccagctactcaggaggttgaggcaggagaatggcgtgaacccgggaggcggagcttgcagtgagtcgagatcgcgcccctgcactcaggcctgggcaacagagcgagactccatctcaataataataataataataataataataat

SEQ ID NO: 806657 - DNA, 495 bp, Homo sapiens
gtggtggagagctatggcttgaatgtgtcccctaagaagcatgtgttggaaacttaatccccagtgcaacagtgttggaaagttgggcgtaagaaaagatgtttatgtcataagggctccacccacatgaatgcattattactgattgttaaaaggcttgaggctgcaagtttgatctctctcatacacaagcatatgtggtttcttgctcttctgtctttcaccatgggatggctcagtgagaagactctaaccagatgtaggcccccttgactttgaacttctcagcctctmgagctgtaagaaataaatcactgctttttaaataaattatccagtttcagatattcttttgtagcagcaaaaaatggactatgacatggagctttaagagacatctgataaaaataaaatttaagtgaaaacgtgggcagataggatgagaacctgtcccatgaaaaaaccctgtgtagtcactaggtgagagaagaaatt

SEQ ID NO: 806658 - DNA, 600 bp, Homo sapiens
caaccttttaggcttcctcaaaagcctggagttggggtatcttgctggtaattgaaattcctatgtaaaatgttggaataaagaataaagttaatttgggtgtgttctattttttccacataaacttgcaagttagaccyacagtttttgcttatgtatcaatgttataatatgctactttaacactagtgctagtttattaatcctatgagttcaactgtgtaattttcatttttttgctgtgttttgtaggattttatgtagtttaatgttttcctccatatctgaaataaaatttaaaaaagtgtgcttgatagtttagagtgctttctttaaatttttctcttaattgctgttcatatttcttctttgatagatatgcttatgtttcgtctaaaagttttatattttagcacatttgaagattggcttggctcttcttggtctttagatatccatataaattttttaatgaattcatcagtttcttcaaataagcaaaccaggattttaataggaattatattgaatctgtgaatcaatttggaaagtattgccattttagcaatattagatttccaatccataaacattgaatgt

SEQ ID NO: 806659 - DNA, 600 bp, Homo sapiens
caaccttttaggcttcctcaaaagcctggagttggggtatcttgctggtaattgaaattcctatgtaaaatgttggaataaagaataaagttaatttgggtgtgttctattttttccacataaacttgcaagttagacccacagtttttgcttatgtatcaatgttataatatgctactttaacactagtgctagtttattaatcctatgagttcaactgtgtaattttcatttttttgctgtgttttgtaggattttatgtagtttaatgttttcctccatatctgaaataaaatttaaaaaagtgtgcttgatagtttagagtgctttctttaaatttttctcttaattgctgttcatatttcttctttgatagatatgcttatgtttcgtctaaaagttttatattttagcacatttgaagattggcttggctcttctkggtctttagatatccatataaattttttaatgaattcatcagtttcttcaaataagcaaaccaggattttaataggaattatattgaatctgtgaatcaatttggaaagtattgccattttagcaatattagatttccaatccataaacattgaatgt

SEQ ID NO: 806660 - DNA, 672 bp, Homo sapiens
ccaggccaagtgcagtggctcatgcctgtaattactttgggaggcttaggcgggtggattatcagaggtggggagattgagatcagtctggccaacatgatgaaacctgtctctactaaatacacaaaaattatctgggtgtggtggtggatgcctataatcccagctacttgggaggctgaggcacgagaacttgaacccaggaggcagaggttgcagtgagccgagatcgcaccactgtactctaacctgggcaacacagcaagaccctgcctcaaaacaaacaaacaaacacacaaaacatatatatatatatatatatatatatatatatwatatatataattgcatttataatttaaataattaaaatgcctctaatatataaggtaaagcattcactttcttatgacattatttaatgtcataagaaaaagtctttatatatctatgaagataattttgactgaattaatgacatgttttataaaaacaaaatttcaaacgtagtaaaaaaattgaagtctaattaaccttaaaacaagaaaaaaatatgaatgaaactctagtcaagtaaaacaaaatagaagaaaaagcaaccgacccatcaactctttacctccaagccttcaattacagatacttttatagccaggttaatttaaatattta

SEQ ID NO: 806661 - DNA, 672 bp, Homo sapiens
ccaggccaagtgcagtggctcatgcctgtaattactttgggaggcttaggcgggtggattatcagaggtggggagattgagatcagtctggccaacatgatgaaacctgtctctactaaatacacaaaaattatctgggtgtggtggtggatgcctataatcccagctacttgggaggctgaggcacgagaacttgaacccaggaggcagaggttgcagtgagccgagatcgcaccactgtactctaacctgggcaacacagcaagaccctgcctcaaaacaaacaaacaaacacacaaaacatatatatatatatatatatatatatatatattwtatatataattgcatttataatttaaataattaaaatgcctctaatatataaggtaaagcattcactttcttatgacattatttaatgtcataagaaaaagtctttatatatctatgaagataattttgactgaattaatgacatgttttataaaaacaaaatttcaaacgtagtaaaaaaattgaagtctaattaaccttaaaacaagaaaaaaatatgaatgaaactctagtcaagtaaaacaaaatagaagaaaaagcaaccgacccatcaactctttacctccaagccttcaattacagatacttttatagccaggttaatttaaatattta

SEQ ID NO: 806662 - DNA, 587 bp, Homo sapiens
tgtgtatcattttgagtagcttgatgaaatcttgtgccctgttgcaccatctcatttgggacatgaactgtccttttgtccagagtatccatactacctgcctgttagtcgtttagtaactgttatcattatccgattgattttcctggtatcacatcacttaagtttaagtagctcttatgttacttagtaatgactgcaaaacacgagttgtgatgcgggcaatttggatacaacaaaaagaagccattaagtttgttcgttagttaacaggtgraagctctcaagttattaaggataaaaatgctagtatatatatatatggtttggaactatactgcggattttggatcatatccgccatggataagggaggaatactataatcaggtttgttttaaattccatgtctaatgacttcgttatctagatcacctgtagagctgtttttattgtaggagttttccttggttttaatcttttgatttgtttttcatgttaatactgaaatttttaaaaattgcatattgtacttcctatatgaaaattttactatgtatttttatttttattttccttttccttta

SEQ ID NO: 806663 - DNA, 633 bp, Homo sapiens
attcttcagtaaatgagttggataaacagtggcctattcacaccatggaaccttattcagcaataaaaataaatgagctatcaagtcattaaaaggcatagcttaccatggctcatgcctgtaaactcagcactgtgggaggccaaggcgggtggatcacctgaactctggagtttgagacaagcctggccaacatgatgaaaccctgtctccactaaaaatacaaaaattagctgggmgtggtggtggatgcctataatcccagctactcaggaggctggggccagagaatcacttgaacccaggaggtagaggttgcagtgagccgagatggcaccattgcactccagcctgggtgacaagagcgaaactctgtctcaaaaaaaaaaaaaaaaaaaggcataggagaggcttaaatatatattgctaagtgaaagaagccaatccgaaaatgctacactggatgataccagctatatgacattcactataggacattctagaaaaggttaaactatgaagataataaaaatatcaatggttgccaggtgttcagagtgaggaagggagggatgaataagaggaaaaaaggagatttttaggggagtaagactattcttgatgacaatgtaa

SEQ ID NO: 806664 - DNA, 593 bp, Homo sapiens
aagttcaagatcaagatgccaaaacgtttgatttctggtgaaggctcacttcctgatttgtagacaactgtcttctcactgtattctcacatggcatagaaagctgagagctctggtctcttcctsttttcagaaggactctaatttcatcacagcagctttatcctcatggctttatctatgcctaataacctccaaaaacccctcctgcaaataccaacacatcaagggttaggacttcaacatacacatgttgaccagagaaacaaacatttagcctataacaatgatttggatttatttatggagaaggaagctatagaagaataactaaaatgcataaaggcaaattgaatgttcaaagggtaagcatgggtctgattgttaatatcactattagctcagctacaaatgagcatctggagcaatagcatctctctaggtttgaagaggtgagcggcggtgcctcagcgatctcctctgcagcataggaaatgatggctgtttctttccgctggaagcatggccacgaaagccctcctctgaaagtgctcttgctgtactgactttgcttgtcaacaatgtggcactcc

SEQ ID NO: 806665 - DNA, 636 bp, Homo sapiens
ttctaaatataaattactgtcttagcttgggatgctataacgaaatactatagactgtgtggcttaaacaacacaaatttatttctcagttctggaagccaggaagttcaagatcaagatgccaaaacgtttgatttctggtgaaggctcacttcctgatttgtagacaactgtcttctcactgtattctcacatggcatagaaagctgagagctctggtctcttcctgttttcagaaggactctaatttcatcacagcagctttatcctcatggctttatctatgcctaataacctccaaaaacccctcctgcaaataccaacacatcaagggttaggacttcaacatacacatgttgaccagagaaacaaacatttagcctataacaatgatttggatttatttayggagaaggaagctatagaagaataactaaaatgcataaaggcaaattgaatgttcaaagggtaagcatgggtctgattgttaatatcactattagctcagctacaaatgagcatctggagcaatagcatctctctaggtttgaagaggtgagcggcggtgcctcagcgatctcctctgcagcataggaaatgatggctgtttctttccgctggaagcatggccacgaa

SEQ ID NO: 806666 - DNA, 639 bp, Homo sapiens
caccttcacttatttatcacactagttgttatagattttgcttctccaaaggagcaaagctccaatttgctaccaaattggcaaagctgtctggtggaacaatctgttcacaagaagagtgagacctgataccacagcaacgctgccagaagttcatgattttaactttgacggttttctgtcttctgtctgtctttctgagaaaagtatattgttttggccgggcgtggtggctcacgcctataatcccagcactttgggaggccgaggcaggcagatcaggaggtcaggagatcgagaccatcctggctaacacggtgaaaccccgtctctactaaaaatacaaaaaattacccgagcgtggtggcgggtcctgtagtcccagctactcgggaggctgaagcaggagaatgctgtgaacccaggaggcggagcttgcagtgagcagagattgcgctactgcactccagcctgggtgacagagcgagattctgcctcaaamaaacaaacaaacaaacaaaaaacaaaaacaaaaacaaaaaaaaagtgtattgttttactgttttctgaagcttaaaaaatgacaagttatatatttattattatacctgactgttctgatctgaaaactgaaatccc

SEQ ID NO: 806667 - DNA, 481 bp, Homo sapiens
tactgcactccagcctgggtgacagagcgagattctgcctcaaacaaacaaacaaacaaacaaaaaacaaaaacaaaaacaaaaaaaaagtgtattgttttactgttttctgaagcttaaaaaatgacaagttatatatttattattatacctgactgttctgatctgaaaactgaaatcccccaccttggctgaagaataaaaaggaaatgcaaagtactaaacccactggtttyagacccatatgtttatatgggttcccaatcaaccatatattcattaaaactgcctttcttaaaataaatattcttccccctttttctataaaacgtggctctgccttcatcgttgttaaaatgtattccatggtagtaggtaagtgaaagtgtctgtcttcgtatatagtaaatgtctacactatttccattgtttattctgagaggttttgttctaaacttatgtttttattcttcatcaatat

SEQ ID NO: 806668 - DNA, 655 bp, Homo sapiens
agtatttctgtctctttttgtcaatgtatatttaaatccctgtaccagatctggcacactgcggtaccctgtaaatattactgcaagaataaaacaacatctttaataaagctttagattgactctcaaagtttggagaacttctagagaaacagggtagtttctgaactccttttggaaaagcagagaagccctgaagatttaacgactaagaatttaaaaatatcaggttggtgcaaaacctaatgaaactactttactttcaatggcaaaaaccacaattacttttgcaccaatctaataaataaatctaaatattggttatggtaattaaaattaaaattgtctctacagagtgaccagtgaggtagtattctgtctctatgacctattctggtcttgctaaaacttccacatcatttctggattccaaaatctctctcrattattttcttatttacatgatttgaactttttcttcatactatagccaactattaaaataatatgcaagttcctcagtattctaaaacatacttcagcctgaaagtacatttaatgattttttaatttgattagtgagaggataatgaatagtcacgtaatctgttcctgatttttgtaagcccagcactgactgtgtattatcccatcc

SEQ ID NO: 806669 - DNA, 594 bp, Homo sapiens
ggttgatctatatttttctactgggatgctgagaaacatagtactgaccctgcgagatagagatgaagtgtattagcttgtgatttatgatgtcatgttcagagtccaaaattcaccttttgtaccagcttgcttacattgtttattaaatgtgaatagatggtggtgtgcatctggtttcagctgagtgaccagtgagatataaatgagtcaggcaaacttccaccttagctcacctgggactaaagcatctcacatctattttggtaattcacagtcaggagatggagyacctgctgtgtggctgggaaagggctctgagagctatgcatggacttctctgatattttcttatgctttcttctcctgctgtactatctatcttcattaaagcctcgtatgactgacccctgtggagtctcctgaggcttctcaattatctgacctctagtaattgccataacaatatataatatcagcccttttacttgtgaaatgtaaatgcttgtgtgtctataagaattaaatacaaataaaattgatacagtttttattagtttagtgatataataattaaagtaagagttaatatac

SEQ ID NO: 806670 - DNA, 642 bp, Homo sapiens
ttcctggtacataaactaggtatggaattactgagtcatagggtaactccatgtttaactttctgaggaactctgcaactattttccatagtagttgcaccattttacttttcattttatgagtatttttatttgttcacagtcatacagacactttttgttgtcctttttttttttttttttttttttgrtgtggagttgtctctgtcacccaggcaggagtgcactggcgtgatcttggctcactgcacgctctgcctcccaggttcacgccattctcctgcctcagcctcctgaggtgcccgccaccatgcccggctaatttttttgtatttttagtagagacggggtttcattgtgttagccaggatggtctcgatctcctgacctcatgatctgcccgcttcggcctcccaaagtgctgggattacaggcgtgagccaccatgccgggcccattttttcttaattacatctatcctaatgggtgtgaaagagtgtctgctagtagttttgatttgcatttccttaatgacaaataatcctgagaatcttttcatttgcttataggtcacatggatattttccttacagaaatttcttttcaagttcattccttatttctcagtgataggatttgaat

SEQ ID NO: 806671 - DNA, 616 bp, Homo sapiens
gaaaaaacaatgactcaattaaaataatagaataataaacattctctatttagattagcaaactcttcttgttcaaagtgtgtaaaatagagaacaacttctccaaacatagttttatttatttattcatttatttttgagacagagtctcactctgtcacccaggctggcatgcagtggcttgatcagggctcattgcagscttgacctcccaggctcaagtgagccttctgcctcagtcccccaagtagctggggcaacaggtatgcacaaccacgtcctgctaattgtttgtagttttagtagagaccaggttttgccatgttaccaaggctggtctttaactcctacactcaagggatccacccatcttagcatcccgaagtgctgagattgcaggcatgagccatcatgcccggatccctccagacatggttttaaccatgaatttttaagatattctctcataaaaagagatctatctttgtcatgcacataaacagaaaactgaaaaatcaaccctgtttcaaagggagaacagatttttaaaaagaaataaagtaagagtaaacagtatttatttattttaattagtttcagtggctgttgatggact

SEQ ID NO: 806672 - DNA, 616 bp, Homo sapiens
gaaaaaacaatgactcaattaaaataatagaataataaacattctctatttagattagcaaactcttcttgttcaaagtgtgtaaaatagagaacaacttctccaaacatagttttatttatttattcatttatttttgagacagagtctcactctgtcacccaggctggcatgcagtggcttgatcagggctcattgcagccttgacctcccaggctcaagtgagccttctgcctcagtcccccaagtagctggggcaacaggtatgcacaaccacgycctgctaattgtttgtagttttagtagagaccaggttttgccatgttaccaaggctggtctttaactcctacactcaagggatccacccatcttagcatcccgaagtgctgagattgcaggcatgagccatcatgcccggatccctccagacatggttttaaccatgaatttttaagatattctctcataaaaagagatctatctttgtcatgcacataaacagaaaactgaaaaatcaaccctgtttcaaagggagaacagatttttaaaaagaaataaagtaagagtaaacagtatttatttattttaattagtttcagtggctgttgatggact

SEQ ID NO: 806673 - DNA, 649 bp, Homo sapiens
catggaaatcttccaaaagcattgttttattaacctgacctttgtaaagttgagaatgaatgtgagtttaggttctacctttaggcagatttttgaaacctaactgaagctgccagttaaacgcaaagcaatattttttaaagttaactgatctgcagggtttgaattgagttgtttctgaaccataaggtaaacragtgatgtattttctttcattctctccttttgtaagtttaatttttgtcaaagtagtataaaaatgaattcaaatgtaattatagccttttggtagcctctaggactatagagtttttaaaaacaaaacagtccattgatttttttccacctgtcattcctgctttccagaggccacagagttcaagtcctctagctatattcttaaaaatctgcctttttatttctaaaaaaatcaagtttatgcttccatttctctcttgttgttttcaaattagccacttcttttgactccctacaatgaaagataagaattaagctttttaccaaaaacacacacacttacagggagtcacatccctccccacatatcacacacaaccttaaaatatcagtcacagctgatcccttattatataattattgcatataatttcctatgtacacttgcttg

SEQ ID NO: 806674 - DNA, 649 bp, Homo sapiens
catggaaatcttccaaaagcattgttttattaacctgacctttgtaaagttgagaatgaatgtgagtttaggttctacctttaggcagatttttgaaacctaactgaagctgccagttaaacgcaaagcaatattttttaaagttaactgatctgcagggtttgaattgagttgtttctgaaccataaggtaaacaagtgatgtattttctttcattctctccttytgtaagtttaatttttgtcaaagtagtataaaaatgaattcaaatgtaattatagccttttggtagcctctaggactatagagtttttaaaaacaaaacagtccattgatttttttccacctgtcattcctgctttccagaggccacagagttcaagtcctctagctatattcttaaaaatctgcctttttatttctaaaaaaatcaagtttatgcttccatttctctcttgttgttttcaaattagccacttcttttgactccctacaatgaaagataagaattaagctttttaccaaaaacacacacacttacagggagtcacatccctccccacatatcacacacaaccttaaaatatcagtcacagctgatcccttattatataattattgcatataatttcctatgtacacttgcttg

SEQ ID NO: 806675 - DNA, 631 bp, Homo sapiens
ttttcattactgagccatataatattgctgccacagaactcctactagctagagataaattggagagccctgaaaaaaatgacatgagtaaaatgaaacggatgatgttggtgagatcactcctacaaatcaagacagagtgtgttctctcctctttttggctcaccccagtgagggctgtcatctgacttgagttggttcrctaggatcatgagtagaggtggttcctttctccgacatcagagactgaggccaaacatgagaaccacagcaggtatttcattaccagatagtcactctcaagtgggttgttatgcaattgatccaatgctaaccctctttaaaagggcacattttccctactttattgttagaaaaaagcacatcatgtattgacatgttgtactgatttttctttttttttttgtactgattcttcataaggcatttcatccatcccatagttaactatagatcatgagcccatttgacataaagtagggtcatgtatttcctccttcttctcccacattgttttaacggtcctgtcagcatagactaaaaagcaatggtactaaaaaatccttctcaatactctaaatcttgaaaagcaaacttcaatgtaacttct

SEQ ID NO: 806676 - DNA, 631 bp, Homo sapiens
ttttcattactgagccatataatattgctgccacagaactcctactagctagagataaattggagagccctgaaaaaaatgacatgagtaaaatgaaacggatgatgttggtgagatcactcctacaaatcaagacagagtgtgttctctcctctttttggctcaccccagtgagggctgtcatctgacttgagttggttcactaggatcatgagtagagrtggttcctttctccgacatcagagactgaggccaaacatgagaaccacagcaggtatttcattaccagatagtcactctcaagtgggttgttatgcaattgatccaatgctaaccctctttaaaagggcacattttccctactttattgttagaaaaaagcacatcatgtattgacatgttgtactgatttttctttttttttttgtactgattcttcataaggcatttcatccatcccatagttaactatagatcatgagcccatttgacataaagtagggtcatgtatttcctccttcttctcccacattgttttaacggtcctgtcagcatagactaaaaagcaatggtactaaaaaatccttctcaatactctaaatcttgaaaagcaaacttcaatgtaacttct

SEQ ID NO: 806677 - DNA, 669 bp, Homo sapiens; identical to SEQ ID NO: 802873

SEQ ID NO: 806678 - DNA, 669 bp, Homo sapiens; identical to SEQ ID NO: 802874

SEQ ID NO: 806679 - DNA, 629 bp, Homo sapiens; identical to SEQ ID NO: 802870

SEQ ID NO: 806680 - DNA, 542 bp, Homo sapiens
ttattgacataatctatgttcaaaattataaattaaaaaattattattatgaatgaataggattatatattaacgataaaaaggacaattctctaggaagatctaataatcatgtttgttcttaaatgaacttgttataaaataatacataaatatatttgaataaaatatatatttgaatgaaagtaaaatttctacatattaatatatgtgtgctacttaatgccaatattagaagtcatgatcctttgtatattaatgaattaagtattcaaataatagtcttctatttaagtattattagaatgtttttcctaataatagtcaatagtgtttctgtatttaaataatagaggaaaaacaacacagtaaatccaaataatgccaaaracagaaataatgcaatgtggaatagaaattaaggattataaaataaaataacaacagagattaataataacttaaaggtgggtttttcgggcaaaactattaaggtaggtaaactgatgaactcatgagaaaaagacagcgggttaaattag

SEQ ID NO: 806681 - DNA, 591 bp, Homo sapiens
tgtagatggagcatcttcctcttctttatggcacaattccctggtcctgttgatggccttctgcctcctcgagggctaccatagtagtagtcacttcatatatgcgacaccccacatacggggtgaggacagcagccagagaggcaaaagcacttaggtgcactkagcccagaacaagattcctcatataagagacaaaacattcatcatctggcccccaggtattcagatcaaacatggcctgccatatacccagcccctggagtacctgcaccaaatcggtatgccactgccatctactgacagtttctggtatttcactgtcatcagccactcaatcagtgtggtcaccttgcccctgtgttcaccagctgtagctgctgaggaagggaggggtaagttgtaatagaaaccagcttctccacctcagaggtggagcaggaaatgctgtcagctccttcatccgaaagacgagtaaccaggcaggaaggggctcccccaaaagctgcccacattgcttgcctaactcccgcagctcagtgagggtataagcactataggaagtgtgttccaccacagtaggggggccct

SEQ ID NO: 806682 - DNA, 525 bp, Homo sapiens
ccctccttgtcttttttaactggtgttgtttcaaagttttgttttgttttttctgatactggtgtccatttgcatggaatatcttttaccactcatttaccttaagtttatttgcgtccttatgtgtcaggtgagtctcttgaagacagcagatagttggttggtgaatttttatccattctgccatttcgtatcttttaagtggagtatttaggccatttacagtcaacattagtatgcagatgtaaggtactattctattcatcatgctagttgtttcctaaatrcctttttttttccactgtgttgttattttataggtcctgtgatatttatgctttacacttattctattttggtgtatttttagatttgtttcaaaatttagagctctttttagcagttcctgtagtactggctaagtggtaaattctcttagcatttgtttgcttgaaaaacactaccttttcttcattcatgaagccagtttccctgtatacaaaattcttggctgataactgtttt

SEQ ID NO: 806683 - DNA, 634 bp, Homo sapiens
taagttactttcctccagtattatggttttgtcgtttttcaacttcttgaattattagtatttgtgcacatatatatatatatatatatatagacagagagagagagaaaatatatatatacagatatatatatatatatatacagatatatatatacagatatatatatatatatatagagagagcamactctgtatttaccattaattttctcactcttcttgcatttcagatagattctggaatttttttcttctttttgtattatattctattaataaaggcatttgtatataagctatgtgttttttactaaaaatattttatttaacatttattatactttattgaagcaaaattctagattgacactttattttatttcaatattttgaagatattatcccatcatcttcaggcattcattgttgttgagaaatatactgacactatatttctacagaaggttttggccttcgttgataatatgcaaatctatatctgatgtaaaattgtttcggtcttagtcatttggggcaggtttaacaaattaccataaactaggtgtcttataaactgcagaaactcatttctcacagttctgtgagggctggaagttttagatcagggtcc

SEQ ID NO: 806684 - DNA, 450 bp, Homo sapiens
agattatcaccgcactgtgatactgttggctgcactgtgtattaaaacatccatagtaatttaatgtcagtggagtgagtggcaccagatgtgatcagtgcaaatggaggcattggccacagtacagttgcattaaaaataatctaaacaggaccagcatcaagggtcatayaacagtgaagcactagactagaagagagggtattaaagactcaagtgatgttggattggagacatcctagatgtcatggtttaaaggcacaaggcaaattttgaagaaggaagtagtagggggaagacactgaatcagaagatatatttaggtaatattattaaatataaagttatatttataagatgtaatatgtaatatattatgtttatatattaaatcaatatatgatgcatattatatatattaacatttcatataatataatgtatatgtga

SEQ ID NO: 806685 - DNA, 610 bp, Homo sapiens
tcctgatctgttggcctcaccatacctaaataaagtaaattctcatgtaccttttaaaataactctctcttcaaagccatcaactttttgcagaaggataagcaaaattattggatgatgagagaccatgtgcaatgagaaaggctccatgaacagaactgaagctatacagtcaatagcctgtactaaagccccatayatgtgagaaggatctcctgggacatttcagcccagctgaactcccagatgaaggcagtcccacagtcatcacagccaacactgtatctgccagccaatcctcagaagcatgaaaagtaataaacctgttttcaagaaactgtttgtgatgatttgtcatgtcacaataaattattactcaccataaacaaataatcagaaattagtgccacaggtagtgggctgttgtaacaaaacctgtaatatttggcactggcttttggaagtgctaataagtaagaacattaaaaaggataaggaagccgtaattgaaaactagagtaatagtaaactaatggttggtggagggtggagcaggcaaaaagaaattgctatttgacactgggataactgggagaaaagaagacacatg

SEQ ID NO: 806686 - DNA, 624 bp, Homo sapiens
gcttctgcatctctttcatctcaactaatggctattccttcgttcaaatttctcatgccaaaatggtggctgtcatcctggactattttttttctagtccacctcttgtcacaagtctattgtcctaactccactttcaatatattctcagaatcacatcacttcttacaacttcatagccaccaatctgttctaagccactggcatccctcacctaggttarcaaaatagcctcctaactgttctccctactccttcctttaccctcctttgtctactctcaaggaaacaatcaaagtcactccagttcttttctggaaattttcctgccatcagtgtcctatctctttaagttaacagccagagttttgaccacgttctccatgttttgatctggcctctgtaacttgtctgacttcatttcctacttttcttcatctctttcactccactcactgccataggcttcactgcttcttaaacaagctaggcatgctctcagctgagagccctttgcaaacgctgttcactttgtctgaaaggctgttgccggcatatagtcccaagacctcttccctttctttattttcctccgaagtccccttcccagtgaggcctttctga

SEQ ID NO: 806687 - DNA, 612 bp, Homo sapiens
taagtaattatggcaatgttgtaagatacaagattaatatttaaaggtcaattgctgtcttatatactgaagatgaaaatacggaaatttgaaataaaaaacaaaatatcacttatgttagcaccaataaaataaaatacttaaggtatctatctgaaaataagtatctataaaatctatgtgagaaaaactgcaaaatactgatgaaagaaatcaaagcagacctaaataagtggagagatattccaggttcatgggtaraaagactaactatcagatatgttcggttttttccaaatttatctgtatattcaaggcaattcgaatcaaaatcccagcaaattattttgtggatgtcaacaaatggttctaaactttttatagaaaggtagaagacccaaagtagccagttcaatattgaagaataacagagttggagaactaactaacgcaacttgatctccagacttaatataaagctacagtatcaagacagtggtatcagtgaaagaatagacaaacagaataaatgctatattaaaaaaattgaaaaaatgttcaatggaacacagtagagatcccagaaataggctcacataaatatagtcaact

SEQ ID NO: 806688 - DNA, 539 bp, Homo sapiens
ctatcaagagaatgaaatgaccagcagcagactggaataaaatatttgcaaaacatatactagatcaacgactgacatacaaatatacaaagaactgttaaaactcaacaataagaaaacaaacaatccaaatttttaaaaatggcaaaagatctggatggacaacctcaccaaaggaggtatacaatgccaaataaaaatataaagagacacttgatgtcatctgtcatcaggtagttgccaattaaaaaactaygtgagatacaaccacacaccttttagaatgaataaaatgaaaacactgacaacaccaaatgcttgtgaggatgaggagcaaagggaactcctattaattgattgtgggaatgcaaaataatgcagacatattggaagacagtttgacagtttcttccaaaaataacatttgcttacttcagcaagcacacttctggtacctaccaaaaggagttgaaaacatgtcaacacaaaaacctgcatacaaatgttcataccatttgtatttataattggcaaaactt

SEQ ID NO: 806689 - DNA, 587 bp, Homo sapiens
gggaatattcagtgctcatttataaattttcacttagaaagtatcattcatattacattagataaatttctaaatattgagaaaacttggctgttgagatgtaattcttatctatttgtaaaattggattctttcccagtatttatttccttatctacaggcatggtcaacaacaacaaaacacaatcagattttttaaaatgagcaaaggacttaaatagacatttatccaaagaagatacacaaatgatcaatagacacaygaaaagatgttcaatgttgctacttattaaggtaatgcaaatcaaaatcacagtgaaagcaatctggtgattcctcaaaatattcatatgattcagcaattccccttatggttacatactcaaaagaagtgaaagctgggactcaaacaaacatttctatgcacatgtttatagccagattattctcaatgagcaaaaggtcaaaacaattcaatggacaaaaggtagaaacaacccaagtgtccactgaggaatgaatgggtgaacaaaatgtgctacatataatacataaaggtgaaccaaatgtattattacacataaatg

SEQ ID NO: 806690 - DNA, 571 bp, Homo sapiens
gcggatcgcttgagctcaggagtttgagaccagcctgggcaacatggtgaaaccccatgtctacaaaaaaatacaaaaaattagccggtgtggtggcacacacctgtagtctcagctatttgagaggctgaggtgggaggattgcttgcacccaggaggtggaagtcgcagtgagctgagattgcaccactgcactccaggctgggtgataagcaagatcctatctcaaaaaaaaaaaattaaaaaagcttttaagaattaaaaaaataaataaatgtgttatgctgttctcttgttaatgtcttctgttataaagatgttggctctggactttaaatgggtgaggaaaaggtattacaccttttcacccttatgttgttttagtgataaacttaatacaaactcagaaaacaaggggagtatgtggactctytagaaaaggtagaatttggaaatgaaaatgtaagaactttttatcagatgaagggaaagggagtattttccagtgagggaaaacagcataaaggtccaatgagctaagtgtaatagagtttaaaacaaaaagaaaata

SEQ ID NO: 806691 - DNA, 662 bp, Homo sapiens
gaggcatttgctttccacttgtagactgaatgtttatgtatccctgcccccacttcctatgttgaagccctaatccccaatgtgatgatatttggaggtggggcctttgggaggtaatcacatttatctgaggacatatgagcagggggcctcatgatgggattagtgtccttataaaaggaggaagagagatcagggctccctcgctttagccacatgagatcacaggagaagacagccatctgcaagccaggaagaggacactcaccaggaacctgagcatgctgcaccccaaacttggacttcctgcctccagaactatgagaaaaaattgtctgttgtttgcaaacaccgcatgttctcactcataagtgggagttgaacaatgagaacacatggacacagggaggggaacatcatacacgggggcccrtcgtgggggtggggggctaggggaacaatagcattaggagaaatacctaatgtagatgacaggttgatgggtgcagcaaaccaccatggcacatgtacacctatgtaacaaactggcacgttttgcacatgcaccacagaacttaaagtataataataataataataataataaaaataaatgtttgttgtttaaaccaccttgtctatgttattctatgatagcaacc

SEQ ID NO: 806692 - DNA, 662 bp, Homo sapiens
gaggcatttgctttccacttgtagactgaatgtttatgtatccctgcccccacttcctatgttgaagccctaatccccaatgtgatgatatttggaggtggggcctttgggaggtaatcacatttatctgaggacatatgagcagggggcctcatgatgggattagtgtccttataaaaggaggaagagagatcagggctccctcgctttagccacatgagatcacaggagaagacagccatctgcaagccaggaagaggacactcaccaggaacctgagcatgctgcaccccaaacttggacttcctgcctccagaactatgagaaaaaattgtctgttgtttgcaaacaccgcatgttctcactcataagtgggagttgaacaatgagaacacatggacacagggaggggaacatcatacacgggggcccatcgkgggggtggggggctaggggaacaatagcattaggagaaatacctaatgtagatgacaggttgatgggtgcagcaaaccaccatggcacatgtacacctatgtaacaaactggcacgttttgcacatgcaccacagaacttaaagtataataataataataataataataaaaataaatgtttgttgtttaaaccaccttgtctatgttattctatgatagcaacc

SEQ ID NO: 806693 - DNA, 662 bp, Homo sapiens
gaggcatttgctttccacttgtagactgaatgtttatgtatccctgcccccacttcctatgttgaagccctaatccccaatgtgatgatatttggaggtggggcctttgggaggtaatcacatttatctgaggacatatgagcagggggcctcatgatgggattagtgtccttataaaaggaggaagagagatcagggctccctcgctttagccacatgagatcacaggagaagacagccatctgcaagccaggaagaggacactcaccaggaacctgagcatgctgcaccccaaacttggacttcctgcctccagaactatgagaaaaaattgtctgttgtttgcaaacaccgcatgttctcactcataagtgggagttgaacaatgagaacacatggacacagggaggggaacatcatacacgggggcccatcgtgggggtggggggctaggggaacartagcattaggagaaatacctaatgtagatgacaggttgatgggtgcagcaaaccaccatggcacatgtacacctatgtaacaaactggcacgttttgcacatgcaccacagaacttaaagtataataataataataataataataaaaataaatgtttgttgtttaaaccaccttgtctatgttattctatgatagcaacc

SEQ ID NO: 806694 - DNA, 567 bp, Homo sapiens
tgtaatattgaatttgaaagtgaatgtacgaagaaatgaacatgtgaatgctggaatgtcccaagacttggttctcagtctcttctcaatgtacaagtgtatctcattattattcccagttatttaagttgtggcagattacataactggaggcaattaagccaaatttgaacacatctgtaggatctcaaagctcactgtctaatgcatgtatcgataatctctcattttcaagtatatctccaaatggacatataaaaataatatatttatgtaactactgtaaaatatatgtgacttttggaagcaataaggatgatcagaaaacacagcttcaagtagctccaattgcaagctttaccacatatgatctwtgtggctttgagcttctacagacattgcttctttaataggcaaaatgagactattaataccttcctggaagattggttaaaaaagttaaatgataaacggattcaatatatgagaaaacatcctagagtgtgttaagtaccatgcacatacactatatttttattattttaagaatataaatgcagggccagg

SEQ ID NO: 806695 - DNA, 609 bp, Homo sapiens
gctacattcatgttgctgcaaaagacataatttcattattttttatagctgcctaatattccattatgtatatgtaccacattttctttatccaatccactcaagttgatgaacacctaggctgattccatgtctttgctactgtgaatagtgttgcaatgagcatagaagtctgtgtctttttggtagaaccattcattttcctgtgtgtatatccccactagtgggattgctgggtcaaatggtagctctgttttaagttttttgagaaaattccaaactgcttttcacagtggctgaactaatttccgttcctaccaacagtatgtaggtatcatmttttctctgcagtctcacaggcctctgcattttttgacattttagtaacagtcactctgactggtgggaaatggtatctccttgcaattttgatttgcatttcactgatgattaatgatgttgaacattttttcatatgtttactggccatgtgtatgccatcttttgagaagtgtctgttcatggcctttgcccactttttaatggggttatttgttttttgtgtgtttaattgtttaagttccttatagattctggatgttagacttt

SEQ ID NO: 806696 - DNA, 626 bp, Homo sapiens
gtggaaagaacagactacggactgaatcagtaaatcattaaatggatactttaagaaaacaaattcattatttttgtttttatattacccagattttgacaaaatatatgcctttttcatatcatgatcattttaatgaagagttttctctcacacaaacacttactaatgaatataacaggatctttgtttctgctgaattcagacaaaaattgtacattttcaaccaaatttcctgaaagaaatgtgaaaacatttaggcaacagaagttgcctgacattgatgcctcactcatttgtgaaatgtcttattatttagtctatcaatcarggccatagattttattggatttagctacctaatgtctgcacctcatttcattttggtaatttatttatttatttttaaatgggtaaataaaaattgtatatatttatcaggtacaacatgttttgaaatatgcatacattgtggaatccctaaatcaaactaattgacatatatattttctcacataccattttgtgggaacagttaaaatctattctttcagcagttttcaagaatatattgttattagctataattcactatatattatctctggaacttgtttctcttgcct

SEQ ID NO: 806697 - DNA, 560 bp, Homo sapiens
atagaccccagggaacataaacacaaacaaatctatctcaagctaaatgatcatcaaaatgctaaaaactaatgattgtgggaaagatactgaaagaagccaaagaatccaggtcacatgcaggggaaaatcataaaatctatttcataactttttatcagacgcagtggaagtcaaaaaaaggataaytgaaaataacatatttaaagttattgggagggagcgggggaaatatcaacctacaattctatacccatcaaaaatagccttaaaaaacaaagctcaggccaggcacggtggctcacgtctgtaatcccagcactttgggaggccgaggcgggcggatcacgaggtcaggagatcgagaccatcctggctaacatggtgaaatcccatctctactaaaaatacaaaaaaaaacagctgggaatggtggtgggcacctgtagtcccagctactcgggaggctgaggcaggagaatggcatgaacccggaaggcggagcttgcagtgagccgagacagcaccactgcactccagcctgggcgacagagtgaaac

SEQ ID NO: 806698 - DNA, 597 bp, Homo sapiens
cccccgaccctcccttcgcatggaaaagctgtcttacatgaaaccagtctctggtccaaaaaggctgggcactgctactgtaaacccaatgaaactaatagacatatagagaacattccacccaacagcaacagaatatacattcttccaacgtgcacatggaaaattttccaggatacatcaaatgataggtcacaaaaacaacccttagcaaatttaagaacattgaaatcttactaagtaccttttctgactacaatagaattaaactacaaataaatatcagaagaaaagccagaaaagtcacaaatatttgggaaatttaaaaacacacttttgagtaaccaattggtaaaagaaaatcaaaagtgctattagaaactattttcagcaaacaaaaatataarcacaacatagcaaaacttatggtacacaacaaaagcagtactgggagaacattttatagcaataaatgtgtacaataatacagaataaagacctcaataaacaacctaactttccatctcaacaaactagaaatagaagaacaagctaagctcaaaagtagcagaagaaagtaaataataaatgttagag

SEQ ID NO: 806699 - DNA, 605 bp, Homo sapiens
aagagatggctgcaatgtagaaatctacaaagcatttaaagacttaatgtcaatcattttcaatttcttcaaaaaagattcaagagaaaacatttacaaatttattttatgagtccagcattactttgattctaaagtcagacaaagacacttcaaggaaagaaagctacaggcaaatatgcctgatgaatgtagatgcacaaaccctcaacaaaatactagcaaacttaatttaacagcacattgaaacaatcatacacaatgaccaagtgatatttatctctgggatccaaggatggatcaatatacacaaatcaataatgtgatttactacattaacagactgaggaataaaaatcatatcctttagtcaatagatgcagaaaaagaatttgacaaaattcaacaatcactcatggtgaaaaccaaatcagatatagaaggaacgtgccytaacttcataaaggcccatatctgacaagcccacagttaacatcatactcagtgataaaaaaacaaaaacttttcctgtaagatcaagagcaagacaaggatgcccagtctcgccacttttattcaacatagtacaggaagtcctggttgga

SEQ ID NO: 806700 - DNA, 576 bp, Homo sapiens
acttgcatggggcctgtatcccttttgatttggccaatttcttccttttggaacaagagtatttgcctaatgcctatagccccattttatcttgggagtaactaacttttttttattttttttattttacaggctcataggccaacggggctagccttgtcttagatgagactttggactttggtcttttgagttagtgctagaatgagttaagattttgggggactgttgggagggtatgactgcatattgcaaagtgagaaagacatgagatttgggarggaccatggatggaatgatatggtttggatctgtgtccctgctcaaatctcagtcaaattataatcaccaatttcagaggtggggcctggtggtaggtggtttgatcatgggggcatacttcccccttggtgctgttctcatgatatgggtgagttgtgagatctggttgtttaaaagtgtatagtacctcccctgtctctctgttgctcctgctctggttatgtaagatgtgcctgcttcctcttcaccttctgacatgattgtaagtttcctgaggcctccccagaagccaag

SEQ ID NO: 806701 - DNA, 576 bp, Homo sapiens
acttgcatggggcctgtatcccttttgatttggccaatttcttccttttggaacaagagtatttgcctaatgcctatagccccattttatcttgggagtaactaacttttttttattttttttattttacaggctcataggccaacggggctagccttgtcttagatgagactttggactttggtcttttgagttagtgctagaatgagttaagattttgggggactgttgggagggtatgactgcatattgcaaagtgagaaagacatgagatttgggagggacmatggatggaatgatatggtttggatctgtgtccctgctcaaatctcagtcaaattataatcaccaatttcagaggtggggcctggtggtaggtggtttgatcatgggggcatacttcccccttggtgctgttctcatgatatgggtgagttgtgagatctggttgtttaaaagtgtatagtacctcccctgtctctctgttgctcctgctctggttatgtaagatgtgcctgcttcctcttcaccttctgacatgattgtaagtttcctgaggcctccccagaagccaag

SEQ ID NO: 806702 - DNA, 588 bp, Homo sapiens
tgtaagttgtattcctaggtgttttattctctttgtagcaattgtgaatgggagctcactcatgatttggctctctgtttgtctgttactggtgtatataaatgcttgtgatttttgcacattgattttttatcctgagactttgctgaagtagcttgtcagcttaaggagattttgggctgagacgttggggttttctaaatatacaatcatgtcgtctgcaaacagagacaatttgacttcctcttttcctarctgaataccttttatgtctttctcttgcctgattgtcctggccagaacttccaatactatattgaataggagtggtgagagagagcatcctagtcttgtgccagttttcaaagggaatgcttccagtctttgcccattcagtatgatattggctgtgcgtttgtcataaatagctcttattgttttgagatacattccatcaatacctagtttattgagtgcttttagcatgaagggctgttgaattttgtcaaaggccttttctgcatctatcgagataatcatgtggttttgccattggttctgtttatgtgatatattacatttattgat

SEQ ID NO: 806703 - DNA, 517 bp, Homo sapiens
gactgggagcatagtaggtttgttaatagcagcatcaccactaatacacgagtaatgccttgtgctaggagattatgagggttaccctgtcactgggtgataggaatttttcagctccattagaacctgatgggaccactgttgtttgtgtcttccatctttaactgaaccatcattatgcagcacatgactgtagctcaattttcaccttctttctgccatacatacatgaccacaaatctacacactttcctctggaaaactcccaactgccttaaagcatatctgaaaataaaaattatgtttcttgtaacacacacaaaacaatttccagctaaaaaaccttyctgaatgattgccacgtgcataaaacacccctggcaagtgtgaaaaaactaaatcttaaagcaagatgtggttccatattgcagctagtatttaaaattaagttgtctctctttgcccccttttttccgaacaaattcacagagcctggattgtgaatgatatgcctgtc

SEQ ID NO: 806704 - DNA, 557 bp, Homo sapiens
caggaaaggcttatctatataatttgtctggaaattttcttctccgggccaagttgtgcattgctttttgcatactgttacattgtatctttccatgccactctatcctcttattctgctttaatttctattagttcaattcacccccgacatagtatgaaagtatttccttagttgtttggttgtttataccttcctctcatccacattagaaagtaaactctatatttctttgttcatagaagtatgtcaagaaccaagaatagtgcatggcacacagtaggagctcagtaaataaataaatgaatattcatttattgaattaataaawgtatccaacattagcatttggttttaaccatataaccattccttccatcattgaaaatttagtttcccgaattgttgtagtaaaggagtgtgtttattttatatattggtccagttgtgcttttttggtccacatattaactggaaaacctaaaaaaaatagaattaaagtgagtcagtacaagtatgcaacaaattattagtgaagagtgtaacaaaactcaagt

SEQ ID NO: 806705 - DNA, 568 bp, Homo sapiens
cttcagagatgaggaaataatagtgggtatagtcattatggtaatagcaagtgagatacccctccacccaattccagtaattcaataggatatttttttacttttgcaaataagtccttagtcacctgtcctaaaagatggttgaccacaatttctgcataagaggaacagtacttggcttttcccttggcagctcaggccatgggttacacctgtcctacccacccagtgagggggccattggagagcacccagcccaaggacatacaaggttgcaatgggatgaacggtggcccttgcaaaaaaaatatgtccacatcctaacccctggaacctgtgaatgtaatcttatttaggaaaagaaaaatgtatctttacagatataactcagtttgggatcttgagatgagmtcatctgagatgatctaggtaagtgttaagtattataatgaatccctagaagagacaaaagagaggaagacacagacacagagaaggtcatgtaaagacagaggcaaagactagagttataaggcaagaaacatccggagtcaccagaagctgaaag

SEQ ID NO: 806706 - DNA, 541 bp, Homo sapiens
gaagcagaagctgctatgcctcctggacagcctgcagaaccatgagccaattaaacctcttttctttataaactacccaatctgaggtaattcttttttttaaattttattttattttaagttctggggtgcacgtgcaggatgtgcaggtttgttacataggtaaacatgtgcacgtggcttgctgcacctatctacccatcaccttggtattaagccaggcgtgcattagctgtttttcctgatgatctctcactcctccccgtctcccactagtccccagtgtgtgttgttctycttcctgtgttcatgtgttctcattttttgactcccacttataagtgagaacatgcagtgtttggttttctgcattgctgtgctgaggatgatagcatctggctccatccatgtccctgcaaaggacatgagctcattcatttttatggctgcatagtattccatagtgtgtatgtaccacattttctttatctagtttatcattgatgggcatttggattgattccatgtctttgctattgtg

SEQ ID NO: 806707 - DNA, 612 bp, Homo sapiens
attatcttttggacctactctgaatagctgctaaggtaattttcattcttttttttttttttttttttttttgagacagagtctcgctctgtcgcccaggctggagtgcagtcactgcaacataagcctcccggattcacaccattctcctgcctcagtctcctgagtagctgggactacaggcacccgccaccatgcccggctgattctttgtattttttagtagagacggggtttcaccgtgttagccaggatggtctcgatcttctgacctcgtgatccccccgccttggcctcccaaagggctgggattacaggcgtgagccatcgcgcccggctggtaattttcattcttataattgctgactagttgagaagaagaggtcccaaactacagagaagaaaggaagaaagatgtgtccagtgaaatccagggtccccccgctcccattcaaggccatmtgaaagtatctccccctgcttttcaagttcatcgaatatgtttaagaaacctggaatttccaagtccatcagcctattgaaacaaaacagctataactataaaatttagatccttttaagattttcaatccttagaattaaagatattta

SEQ ID NO: 806708 - DNA, 624 bp, Homo sapiens
ccacaatttgccatctatcagatagacaggaaaaccaatggtgtcgttccagtctaagtctgaaggcttgagaacagggagcaccaatggtgtaagttttcatcaaagttcaaaagtcttaaaaccagagagacaacagtataagttaaagttcaagtacaaaagcctgggaaccaggagcaccaaagatgtaagtctcagttcaagcgtgagaagacagatgtcccaacacaaacaggcaggsaggaaagggatgaatcttcccttcctccactttgtgttctattcaggccctcaacagattgaatgagtccacccatattggagaaagcaatcttctttactcagtctacctattcaaatgctaatctcttctagagacaccctcatagacacacacagaaataatgtttaaccaaatatctgggcacactgtggtctagtcaagttgacacataaaaataatcatcacacacatacatatttatttttagtgatctttatttgtactaatgtgttttgattctagattcatggaatgctctcactctcatttctgaagattcaatgagcaagagatttctggattcatctggctgagtgaaactatactaccgattcttt

SEQ ID NO: 806709 - DNA, 632 bp, Homo sapiens
ttctggtttcttcattgtaagatataaataggaagatatttaatcaaagttttggttttgtataaacctagattatatgtatatatttttctccaagcttctagtaatttctgcctccaagattataaattttatgctaacctgggtgaactgctgtagaggtttatgcaggaatttggtgattttgctcagtagaaacaatcaatatcaagacttacgtcaactctcactcttcacatgagttttggttattaaattttaattattttcctggtcattatagcaaaatcatcaactgaatacaatggaagcgtgagagtgtttctctgaacttactgtatrtagggaaacttcaattaggctcaacaaattagattacttctgaagttcatagagtgaaaactataaagttgaaaattacatagtgaaattgaactacataaaaaatttttcacaaattgaagccttgtcattcttcctacttaccttaaaggaagaatatttctatttgtaaaataaaaatagaaatttttatttgacagtgaattcagtgaagccagtgagcgaggccattggaagcatatgtgtaatgtcaaacatcagaagagatcttccaggggaaggggtgcagc

SEQ ID NO: 806710 - DNA, 622 bp, Homo sapiens; identical to SEQ ID NO: 802352

SEQ ID NO: 806711 - DNA, 612 bp, Homo sapiens
ctgggtgaagccagctgggctcctgagtctggtggggacttggctaatctttatgtctagctaagggattgtaaatacaccaatcagcactctgtatctagctcaaggtttgtaaatgcaccaatcagcactctgtgtctagctcaggatttgtaaatataccaatccacactctgtatctagctaatgtagtagggacttggagaacttttgtgtctagctcagggttcctaaacgcaccaatcagcaccctgtcaaaatggaccaatcagctctctgtaaaacagaccaatcagctctctgtaaaatggaccaattagcaggatgtgggtggggccagataagagaataaaagcaggctgcccgaatgagcagtagcaactcgctgtggtccgcttctgtagtgtgaggwggtgtgttctttccgtctttgcaataagtgttgctgttgctcactctgggtccagctgcgtttatgagctgtaacactcaccgctaaggtccgcagattcactcttgaagccagtgagaccacaaacccaccaggaggaacgaacaactccagctgcgccaccttaagagctgtaacactcactgaaggtttgcagcttc

SEQ ID NO: 806712 - DNA, 586 bp, Homo sapiens
gttcactgcaacctctgcctcctaggttcaagcgattctcccacctcagctcctgagtagctgtgattacaggcacataccaccacgcctggctaatttttgtatgttttggtagagatggggtttcaccatgttggccaggcttgtctcgaactcctgaacttaggtgatccgcctgcctcggcctcccaaagtgctggggttatatgcatgagccgccacacttggccatgtcatcttccttctgttgcttgtctgtatcsgaagttcctcccgttattaaggataccagtcaaaaggtgggttattaggcccaccctaataacctcattttaattaatttacctttttaaagactctatcttcaaatacagtcacattctaagtttctggggtttggacctcaatatatgaatcaggggcttggggacagggggaacataattcagcccatagtaagctacaacaacaaacccacaagccaacaacctgaggtggatgacacatgctttcaaaatttgtattttgtaaaatcagaattaaaaaacatggctgggtgcagtggctcatgcctgtaatcccgaca

SEQ ID NO: 806713 - DNA, 642 bp, Homo sapiens
ctgtagggatagcagaattcacatcatggaaatttttatgttttcctttagaaaaactacttacggagccctttggttataaaacaaaaaggcccggacccatctagattagagaagaagaaagggagctaaactgatcttcatgatgaacttcaacggagtcattcytgaggatggagggaatgatctatgctggaaagggctatgtgagttttctttaaccaggctccagaaggaataggtttccaatccctggaacttagagaagccagtgcagaaatgggctgaagcaacgtgatgaaagagtgagatgctacagaagagacaaccagggagaggttccctggggcagagaatggtggatgagatttaggatcagtgttgccagattctgtctgttgcagattattgcctttttatcctagtcctttgtatacaatagccttgtgttagtgggtcatgttttaaagcacaagaacaaggcagattggacagacctaaagcagtataaggaggtagagtcagatggcccaaaatgatgaaagagaggattggagtaggagtcgggtctgggactcctcagaattataggtgagtgtgctggatatcctcattcatatgcatggcacttcgagttatttg

SEQ ID NO: 806714 - DNA, 395 bp, Homo sapiens
gcagaaggacaggggatataggaacttgctgtattttcagctcaatatctctataaacctaaaacagctctaaaatataaactctatttaaaaaacaaaaatgctgtctagccagtgtcttttagggtccagatgtgggggccatttacattttggactgcgtagcataaaggaaaattatgtaaagcatgaactgtgtaagctctgacaacatgtmcttgtgggcaggagcagactgcaatttctgaggcatataaaacacggggtcctctgcaggaaaagaataaatacaaaatgaagtaggaaataaaatacttatttggaagaggctttgcaagtgagggatcctgacacttaagtttcattaactttatgacatctatcttggcttgtgc

SEQ ID NO: 806715 - DNA, 666 bp, Homo sapiens
acaactgccaaagtcagaagttgcaaatcaaagtttttctgctggtgatgtctcctcgatataaccatgaacttgatgaaaattctaagacaacactcaatatttatgaaatattctccaacctgcatctgggaacatggaaaatatcaatatgttgaatcggaaatataaaaactaggtagagaaatcaacaaaaaataggagaaaatgaagccagagctgattaaattcaggaaaaaaaatagaagaaaatcacaaaactttatcagtaataaagaacagattacaaggtgccccgaagagaatgggttcaaataaaaacttaataaagggtattgaataaaagaaggatagccaagagaatgaaaaggagataaaataaaaaggaycagagaagatagttgaaatggaagccagacaaaggaggttgcatatttgtattattggtgttcctgaagaaaagaaaaacaatataacagaatatttaaaactctaatccaagaaaaagttccagaaataaaagaactgagtcaactctacactgaaagggcccagtgtggtatataggaaaactgaccacaaataattctgagatagctcggaaaattattagacttataaaaaaaaaatcctcaaggcttccaggcccaaaaaatatttacaaag

SEQ ID NO: 806716 - DNA, 633 bp, Homo sapiens
agcctcccaaagtgctgggattactggtgtgaccgaccgtgcctggccaatgtgtatgatttaatagccagcagcaacaggccactaacatgccatctgctaacaggggctctagctattaacatcaacagagctaaaaactcttatgtctgatcccttgcaaatggcgaagacctggctgagaattattatctcatgctttcagagaaaactttgcttgtcctgcactgaaaaatctggctgcaataatcacatggaagaaggtatgtttgttggcatggttcatgggctggcttatgacttctaagcagaagatacaaaataatataaaawtcctgcaacatgcacaatgtagctgatattcatgttctctttaaatatcttaacactgacttacatatttaagggtgtggagtctttgagcttgggaagcatcttattactgaggtacaaatgctaaaagagggacatttcttctatctaccgcattttcaatgaaaagatgctgaaggtgaataaacagctctgcaaacccagttttgtttaacttggcaacagcagtaagtaagtatcactggacacagagacactggaatagattcagtctttagtcttattcatcacgtctgacct

SEQ ID NO: 806717 - DNA, 630 bp, Homo sapiens
cgtcaccagcccgactcggcctcccaatgtgctgggattacaggtgtgagccatggcacccggcccaagttctctctttaaaagaggaagaatagtatggggactcatccaatttcttgtttaactgacaatatgtaactcttacaacacttgcctgtgtgtttctatcataaagtgaggatatggtttaagactgtgaggatacagtctaagactgaacaggcagycttcctggactgctcgggtgacaaagagcaatgatgcccttaatacagcacctcaggatatcatgaatgaggggatggacaggatgatctcccacaatgcttttcacactattattttgtaatttgaattccttctctccccaatctaatctactcttggaaacaagctaatttttctaaaagtgtcttgaccagaaagcattcatgctaaaaatctgccatagcttccacctatctccagaataagaccctccaatttgcaacctcattctacctttgcaattttctaaattttcttcacaatttaattgtattaatagatttataaggtccttatgggccaagaatggtatcccgccactcagcaacacctgacacaaaaacctaacagtgcccaataaat

SEQ ID NO: 806718 - DNA, 572 bp, Homo sapiens
tttaaaattttctccttttgccagtgtctctgaattttagtatgctatttgtactgaactgactccaaatctaaaatttgattatatacagaaatagcaaataaatgcaactcagactaatgacaaagcatttaatcagagaatattagaacgactacaagacataacctggaaaaaaaatctatgaagaacctatttagaaagtaagctaaaagcaacactttttattatgagaaattttaaacacatacaaaagtaaaaagaataacatgaggaacctytaataacatttggcttaagcaattagcacccctggccaatcttgaagtttcaactatattcctactaaaaagggacgtattgttttaaatgttccttcaaatgaaaaaggactatagatgacaactaggttcaacccagaaaagctattctccccagcaaaccacttctgtagctttgacactagcagctcagatagtgtacagggttcgttattgcaaacttctctttctatagagaacagtcatttaaaaatggaagcacccaggattccaaatgaaaggtttttaaaa

SEQ ID NO: 806719 - DNA, 617 bp, Homo sapiens
aagcaacactttttattatgagaaattttaaacacatacaaaagtaaaaagaataacatgaggaacctctaataacatttggcttaagcaattagcacccctggccaatcttgaagtttcaactatattcctactaaaaagggacgtattgttttaaatgttccttcaaatgaaaaaggactatagatgacaactaggttcaacccagaaaagctattctccccagcaaaccacttctgtagctttgacactagcagctcagatagtgtacagggttcrttattgcaaacttctctttctatagagaacagtcatttaaaaatggaagcacccaggattccaaatgaaaggtttttaaaaaagattatctttcagaatgtggcatctggtatatttagaatgatatatatgtcattacttaaaaaaacccaactaatgggtggattgagagcatattacatacatacacacacacacacacacacacacacacacacacattaagagcacatacgtaatatgttctttatttttattatactttaagtttgagggtacatgtgcacaacgtgcaggtctgttacatatgtatacatgtgccatgttggtgtgctgca

SEQ ID NO: 806720 - DNA, 656 bp, Homo sapiens
ccaggaatctgtatggaatacagacctgtaggttaccatttccatattaaatgtgtaaagggctgttttaaaaccatgcttttgttttcttattttgtgcaccaacaataaatcaacagcaaatatcattgggtctaaaaataattgatatctggctgggcgcggtggctcatgcctgtaatcccagcactttgggaggccgagacgggtggatcatgaggtcaggagatcaagaccatcctggctaacatggtgaaaccctgtctctaccaaaaatacaaaaaaacgtagctgggagtggtggcggaagcctgtagtcccagctactcgggaggctgagggaggagaatggcgtgaacccaggagggaggcagagcttgcagtgagccgagaccgtgccactgcactccagcctggacaacagagcgagacttcgtctcaaaaaaaaaaaaaaaaaaaaagatamcacttcatttatgctatgcctgaatcctaattatcaactgtaggccttaacaataatcctaagtggatgtgcctttatgcaggcacttgtggcctttttgttttctttgaattaaatatacaaagtaataatttatcttacttcataaaaagattataatctcccattttttaaaacacatttgatatta

SEQ ID NO: 806721 - DNA, 606 bp, Homo sapiens
tacaaagtaataatttatcttacttcataaaaagattataatctcccattttttaaaacacatttgatattagtaggaataactaaaatgaactcgtatgaatagaccatttttatttcattgatatctaactaggaacgttgcaactaatttttgcaatctgtatcaatttgtttaatatatgttaaatgaacaaagaagcagagatagtttctagagagcttayttacttaaaaatacaacagatattaatcaataaaatattaataagattcaggtgagtcgagagtgagtactcaagttctcttttctcacaacgtattcttggagtgccaaccttttcagttcaatgattttatgcaaaggtatacatctaactgcctgcaaaataaactactgactattttaaatcagataaagcaaacaacagcccccagctctgcaatccaaagccagcaaaggtcacccatttcagactgggtttgaagcatagccagttatgatagctcaaatattttcagatgtatgaaagcagaacagaattcagaaatatacattctttggcagacaatttttttagaaccaagtttctcaaattatataata

SEQ ID NO: 806722 - DNA, 553 bp, Homo sapiens
tgtgcaaatccccattaatgtacctaactcattaaattatctatgattcttactcccctctttaatgtgagatccayagggctggatttggtcttttttctttatttggaaccccaataacacagtgcttgacccagagggtgctctgtatttgcttggtgaatgcctgccacagaggccatgctactgtacttgagaaaacaaatacatatacacaataaaaataaaacaacttgggctcatctgccttcttttttcctaaaagaaatgtgcttctctataatccccagaaagacagccatcacagcttgcaacagttcttggcaacttattacaactctcatctgaactgtgaaatctggttgaatttacaaatcagaggatgaccttttaaatctcagaagaaaagtagtaaaagaggtaatgactgataagctatatctctatatattgaaaagaggataggttatacatgtgaattaaaaaaaaagaacatttgaaaacatcagagattaaaggctgactcttgttgattgtgaaggatatttgatat

SEQ ID NO: 806723 - DNA, 530 bp, Homo sapiens; identical to SEQ ID NO: 802590

SEQ ID NO: 806724 - DNA, 653 bp, Homo sapiens
atcctgagctaccgctgctcatgttctagctcatgaatttaatcccaacactaatgaggctccctgcttactggatcttcctttcttaataactcatcactctaaatccattaggtcattgttcttaagaatcttaatggagaaaatattcacaagaggttaacrtaatgcaaaagatggtgaaacgctctggaataaggatggaagcttaatgggaaacaaataccccatcctatttttgcatgtcctctgatctcctgctggggccacccactgccaaaaacaaccaaaagttagagggcaagcaaaagagcatgggtgataccatctatctacaacagttagcttcttagggtacagactaggtggagagataccatggtggggaaaacgacatgtggacgccattcagcacagttactttttctgactctcccaagaagaacgcattttcccctcattgatattccaagagaaatatcattttattggtacctcaactgaggcacctgtgatactatatttgtaaattatttccatgtttagaccttagctccttcagttaagaactatatcttaattatgttcatatctttagcagttagcactatcttgcagacagtggtgcccaatatatgtttgctaaataaaag

SEQ ID NO: 806725 - DNA, 541 bp, Homo sapiens
caaacactttgtatgactctaccattttgtattgccatcagcattatatgagtattccagttgcttcacattttcaccagcattttgtattgctatctgctgaatgtgtccccaaaagtcacgtgttggaaactgaatgcccagtgcaatagtattgggaggtatggtctttgagaggtgactgagtcatgaggactcttctttcaagaatggattaggtctcttataaacagggcttacagaagtgggttcattctccttcattcttctaccatgtgaggacacagtgttccttctctctggaggatacarcattcaaggtaccaccttgaaagcaaagaccagactcttactagacaaggaacctgccagcaccttagtcttgaacttcccagttcccagaactgtgagaaaataaatttctgttattcatacatcaccgtttcaggtatttttattatagcaacacaaaaccaagatgggtattgtcttttaaaaaaaattctagtgagtgttttgtagtatctcagtgtgtttttaa

SEQ ID NO: 806726 - DNA, 498 bp, Homo sapiens; identical to SEQ ID NO: 802450

SEQ ID NO: 806727 - DNA, 608 bp, Homo sapiens
tcagtgaagatataaaatcctggccatcctggcccaactcaggacaacactgaaggggcaggacttcagagctagtcctggagttggttgaagctgtcgttgagtcagcatcatgactcagcatttttctgctacatcctgctccctttttctccctcccttaggtgtcgaacccaagggctcttctcagcagagtgtctgcatgccacactctgctttagagtctgttccctggggaacacaaccagagactgaaataattggtgggcagtggggagcacaaagggctgtttttgtttcatgtgaagacgatgagcatgctatgaaccccgaagagctgttgtatargcaagtagaatgtgtttggctgtggtgtggtaaagctgactgtgttacacagagagtgggtgggtgtgtctgtggctttgctcggcgttattcatgcctctgcgcccttagggtgataaatgggtggctgcacaggctggagaagggctcctgaaggaccctcagacattctcagcatttgcccagcggctgaatgtctttccacgccttctccccttacaactaagtagacagcttccttgcttttgtaatatttgtgt

SEQ ID NO: 806728 - DNA, 629 bp, Homo sapiens
tctaaacatggatacgtttaagggtaacatggagagtggatttgatgggtaccagactgcatccaggcattctaattaaaagactgttgtaaatatctggacaaaagatggtaaaagacttaacttggcaatggcagtgggacaggaaagaaggtggggagaaaagaattcaggaaaaacattgaaggtaaagttagttgtgtcttaaagttaccaagttcaaactcctaaaggactattacaactctatcctattccaagtcacccaaagctaytggacactcctaatatttaaaagtaactaagtctggaggaagtttattccactgtggaatagcaccctgaatgtgtgtgaaattttaaggtaaatttggtctactagatctcttactgttcccagaggagtgacctctagaaagggaagtttctgacaccttgtaggaaagaagggatggatcaggcccagaaaggtatcacaaagagtgcaggagataaactttgcttactgttgttgcttactggtctgactttaaccacctttgttttccaaagatgaacatgtttataaaatgcatatctactctttaatactgcattacataaactttcagcataatgagcatgcatag

SEQ ID NO: 806729 - DNA, 589 bp, Homo sapiens
tgagggatcctgaaggtgagatcaaggaagactataaatgagacaatgtataaacagaggctgaaagcaagagaaagttgccagttagagaaggcaagaaaatatcccatgagagggcatggcatttgcagtcacagatgtgtgaaatagcttaggatgcttggaaaacaacaagcrgctttgtgtggctgcagcaaatgttgcaatccataagcagcaagagttgctcctaaaaatgcaggcaggaactggatcatgaggggtctttaggcccaaagagtttagcacattcttgcagaaaggagagtgacacaaccagaaggccagagagacccgtggggtttgttctagcaattcacatgaaagggaataaggactagatttgaggttgggttggattgtgggaaagctgaatttgagggggtaggtaaaagaaaaaacttttagaaatggttaccaatctttgcggtttctgacttaagctattgtggtaatgggggctttctgaatggagtaaaggaatacagtgggcacaaattctggaataggtagttaggaatgaagaatgattttactttttggagatgct

SEQ ID NO: 806730 - DNA, 566 bp, Homo sapiens
atgactttattaactcagtcatgtggccagggtatccttagatcgataaagagtaaatataaaaacattttcttgaacagcgtgctagccagcagtgaacagaggtgtgaatgtggaaagttttcaaacctttaaggtttgaaaaaagttcagcatgaagaatgccatacatactgttgccaatgcttgaaacatagtgattaaagtcacagttgtgcatgcctgacacaacctctggcctgcaactaagttcagtgatgatgatgaacaaggtggtgactttgaaggattctgtaatttgaaggattatgtaaagcgagaaaaaaagaatgtctgatttccttacatatgcaaaaaatatatcttcagagttcattagtaagctggaagaggtgaatatcraagacatttttaatatcaataatgaggctctagttcattcactgatgatgaaatagctgaaatggttctgaatcaaggtgatcatgaaaacagtaacaatgaagatgatgtcaacactgcagaaaaggtgcctatagacaacatggtgaaaatgtgtgatgggc

SEQ ID NO: 806731 - DNA, 579 bp, Homo sapiens
tagtatatttataaatacttataaatatttatatatatttactattacaggaattggcttacggaattatgaggactgataattatgagggctcacaatatgtcatttgcaagctgcagaaccaggaaagctggtgacttaatacggtctaagtctgaaggcctgagaaccaggggtctgtggtataagttctggagctcaaagatctgagaacaaagaacactgaagtccaagggcagaagaagatgaatgtcccagctcagatagggcaaattcacccctcctctgcctttttgttctagctgtgctgtcagttgattggaggatgtccactcacattggtgagggtgatcttcttcccccagtccacgaattyaaatgctaatctcttccagaaacaccctcacagtcacacccagaaataatgtttaccagctatgtgagtatcccttagcccagtcaagttgacacataaaattcaccatcacaattaggttgttgctattgctgttgttattgctgctgttgttggtgtgcgtgtgtatgtattttctgtgcaatgcttgctgttcgtctgag

SEQ ID NO: 806732 - DNA, 639 bp, Homo sapiens
gtgaatggatttttctagaaatcagttcacccatctccaaccttaagtacgtaagtgtggctgtgagcctttcacgagccaagcaggggacaaatctctcttcagtggggaggcttttcctataatccctctgatttcaacacagtaactcacactccaaccaaaaatgtatttatttgctgtcttccaaattcaaatactgtctgataaaaccaatccaaaaatagrccctaggttttctcttgatgcatcagggttggagaaagaatatgagaagtctaactcctattttaaagatatttaatccatactgtagttttcattcccatttttgcacacctgcctttaaagcagcaattgtctccaatccctgaggatttctgtagctttgtgttgaaaggattagctttttgatattctgcctcaacatacttagatctctatgttctctagtctaaaacagttcccagtggttaaactatttcccagatttcaaaatgttgcttcttttgtctggtatcttctttttgaggtttcttcccccgccccctaagttcctttactgtcattgctttgtgaacactcaggaggaagtacagatagacatttgcattcaacctatgttatttaaccagaagc

SEQ ID NO: 806733 - DNA, 643 bp, Homo sapiens
aaaaaaaaaaagagtcttcttactttagggtcttgtattcccaactgagctcaatcaatagaaggtttagtggcatatataataccaaaaaggaataatttcaaaatgatgtatatttttccatgatagtgcattgtatgcttttcatttggtgacttttttttacctgtataattacagtttgcatatgtgtggtaacacaatgagtctgcatcctgtaaattcatctggatgaaaagatgattggttataggaagaaatccccakagacaattattttgtaaataatgaagagtttacttaatgtcagattgaggaatcagtaagatataaaacagtactatgtgaagggggaagagttattttctgaataaaggatcagaaattactattttttccatatattttgctgcaagaaaaattatactaaaaatgttggataaaaattactctagcttttaagtattctttattccacctaaatgatttatgtttaacaagcaaaggttgtcactgacttagtcgtataagttatgatggatatataagtttcagatacatgattaggaaaacattaagtacagtctgataatttatgttgtacatttaagagtcacaaaataatccatttccagctcaattc

SEQ ID NO: 806734 - DNA, 496 bp, Homo sapiens
attaggctatgtcttgccgcaaggttttgcaagttatatttttgttgatcagataaaatagagacgtttcttgcgtttgccaccggcccccctcctcactctggtaacgatactctcaagttctaaatcattggttctcaaccagggrcactttctccccaggacacgtttgactatgtctggggatgttttggttattacaacttgggcagggaagaggagatagggaccaaggatgctgctgagtattctacaatgcacagcaaagctccccacaataaagagttttgcagtcccaaacatcaatagcgctgaggttgagaaaccctgttttaaagtgtcatgctgtctaaactgactaaactatcattgctcttaagcagatgatatagtatcagatataggatttcatataggatttgccctcaagtcccagggttttctgtaacttataatagaagagttgggagaaatcaagttaatcctagggatgtgc

SEQ ID NO: 806735 - DNA, 585 bp, Homo sapiens
gatttatgtaatgatcatataaattctgttaaggctcagggagcttttcagagtagctcctctctctgtgtgatgacctctttctctgtgatgagaggtgaggtcacttgcttcttgtggtatttccatttcaacacatggtttctacagttgcctgttatagagaagataggytcttgaatgtctcagcctggagctgacctgaatttcttctacttagttttcactgcctagaaccaggtttctcaactatggctggggtgaataatttgttttgggggactctccttgcactgcaggatgcatgccagcatccctggtgtctatacaccagataccagaggtgtcccctctggctgtgataaccaaagatatctctagaggttggggtgagggcagcagtgaatggaaaaattgcttttggttgaaaaccgctgaaccagaggtagtcatttagttctaactgcaaggttgttgggaagagtggtcttcttgtgtttacaggaaggtgaggaaaatcagacatggatatgcactagtagactgcaacatattagctaacggaaatacagacttttcatcatt

SEQ ID NO: 806736 - DNA, 633 bp, Homo sapiens
ttcatccatattatgtcagtgcttagtatgcgttgtttgactctaggccaatccaccactaccttcattaaagcattagagtcaaaaacctttgtctcactggttttcacctctaattaacttcatttctgaaagtgctttgaaataaattttccattctgagggaaagaagccaaaacaaaaaaatccaacaaaacccacgaagtttcccacatgtgaggatttgtttgctgcttttatctatcgcaacattctctctaacaatctcrttcacaattgtggactactcagggttctccacagaaacagaatcaatagggtgtgtatgtgtgtgtggaggcagagagagagagaaagcctgagataaatttatcttaaggattagttcacatatttgtggggcctggcaagtcccatatttgcacgataggacatcaggttggagactcaagggaaagccgatgttgcagttgagtccagaggcagtctacaggcagaaatccctcttcctcagggaggttaagtctttttcttaagaccctcaactaatcggatgaggcccacccatgtaatggaggataatctgctttacttaaagtctgatttaaatgttaatcgcatctaaaattacct

SEQ ID NO: 806737 - DNA, 545 bp, Homo sapiens
aaggagaggtgctacacacttttaaacaacctgatatcgcagaactcttatcatgagacagcactagagcagtggtgttaaaccattagaaaccacccccatcggccgggcgtggtggctcacgcctgtaatcccagcactttgggaggccgaggcgggyggatcacgaggtcaggagaccaagaccatcctggctaacacagtgaaaccccgtctctactaagaatacaaaaaaattagcccgatatggtgacgagcacctatagtcccagctacccagctactcgggaggctgaggcaggagaatggcgtgaacccgggaggcggagcttgcagtgagctgagatcgcgccactgcactccagcctgggagacagagtgagactccgtctgaaaaaaaaaaaaaaaaaaaaagaaaagaaaaagaaacgacccccattatccaatcacctcccaccaggccccacctccaacactggaggattacaattcaacaagatagttgggtgggaacacagagccaaaccataccagtttccataaga

SEQ ID NO: 806738 - DNA, 601 bp, Homo sapiens
cttttttatggacatatattaatataagtttatatgaccagtcctatgcatctataacctgaggaaagtggagaggaactggaaatgtgagcagtttgagcatctagcactacatcagggaacattattatcttccattcaagctaccctggaggatctgtcttctcccttcttggcgcaaagctgacaraaaacagaagaatgcatgaaaatattgggaggtgttggatatgttaattaccttgattatgttgatactatcatgggtatttgcatgtgtacaaactcatcaaatggtatacattatacctcaataaagctgttaaataaatagaaatgaataactagatacatgtataaaaatggtgacacttgctttctcagctgaggtcttgctacatcagggaagagccctgctgccactgactctcattgccatggcaacacatgccctctcagggcttctctttcctactgctttgattcccagtgggaaggagaccccacaggcattctcttacactaaactgtcagctaccctaatcgccagccttttctcctcaatgttttaggaagttgctgtagttctgccataatttcc

SEQ ID NO: 806739 - DNA, 582 bp, Homo sapiens
agaagcagccagtgctcaggccagatgagagagctgtaagtagctcaatatgcttgtagcacagagtggtgagagatgaagccggagagataagcaagtgccaaatcatgatagaccttgcttcttcaattgtttgtttagttacagctcactttgttccagaagagtttttacgtgcattgaagggccgtgaataccacactaagacatttggagcccttcctaaamtgttggcaagcctcaggaagaaagcaacatgatcagatttgcattttagaaggataattctatcttcttagaggagaatgaattgtaaggaacaaagacagaagcagagaggccatttaggaaattgctgcagtccttcagatgagaaatgcaccacgaggggctaaattaaagtagtagctttggggatggagagaaacaagagatatagaataagcacaatgaacatggcttgctaataaatattttctcagtgaatgagttgtgactaattagatgtatggggtgagaacaagaggtaattaaaaaatgaatttcaggtttagacttgggaaaccaggtgggtgacaagag

SEQ ID NO: 806740 - DNA, 667 bp, Homo sapiens
taagctgaaatagctgttctttcttaacttttaaacctctatcttgaaatttaaaactgtgtcaaaataataattggtaatatactttcaaaatccaaatggtcatcaaatatgctggtcttaagtgaaattagcaatctagcattttattttgggaatgcctagatacctctgactgtcaaaataataatatggcttcaatttttgatagtgacatcaaaaaataaaaccttttaccaaataaatcccccaaatcagaatagcaaagtcttttgtattcctcaaatcagtcaaaggtgttttgttttaatttttcatttatagtttcagagaaaaatttatattctttagaatatatttgtagtagttggtgttctcatttctttttcttattttacayactagaatcatactcttggatcaaattcaaaagcaaatatacaaaaagacaggataaaaatcgaccatcagccaaaaaaaaacccagtatttaatctaaactcctttgctcttttttcttgaattattttgccatacaagtaaatgaacacaaaagagacaatcaagtattccctggctgataatgtataaagatgaatttcaacacttctctttggaagctttaagtaatgttcagtcctgaaacaggactttaaagggatccatt

SEQ ID NO: 806741 - DNA, 628 bp, Homo sapiens
cttttttattagtgcaaatgaacaagatctatttctattaaaattatgttcttagttgttctctatcatgagccctttggaacagaaacagatataaaaatatgtaaatttgttataaaatctttaaaaaatcagagcatagactcttttaaatatagaattaatgttaaaaatgaagacaatgctgaaagcatatttactgcatagaaattaagatcacaaattccataaacatgaaataaatgaatcattccaaaattaggaacaaaattctccacagcattgtaattagctgacctaatatttgcacagggaaaaaaatttggtctcattttagccataagtatttgctgccttagcaactaaatccattcatttagtgattcaaggtttagctcaacttcttggaatgtgtaacrtgtgattttgaaataaaatattaatgttattttattttcagaaaacctgaaaagaagtaaaacagaaaagcaatattatgcgtggagacttaagattccacccaagaaggactttatgagatactgacctgatcaatgtagataggatgatagtaaggtaacattcattttaggactttatctgcatttaatccacaatgtaaactgag

SEQ ID NO: 806742 - DNA, 592 bp, Homo sapiens
ggacttctgacctccagagctgttaggccataaatttccgttgtttaagcctccaagtttgtggtatagaatatgtttgatatgacagtttaatatggcagcctcaggaaattaatatatatgcaaaaaaccccaaacaaaatcycccaaacaaaaaaacaaaactgtcatttgaaaaagtgatcagaaacaaataaattcattagcagagcatgctaggattaggtaaagcacgagtagaacaaataagtatgttaagagagatagtgactaaaaaaaggctacagtggatgaaaaactttttaagaaatccttatttttaaaaactaggtgttaaggttgcatgataaaagcagtttaaattacctttgcttggcatggttttttgaataaagagagctgttaaaatatggcattgagatataaagggcatcacttgagcaaaaatgtgaagcacagaaatatagtttattattaattgggttttactattagtatcttgcatttttctggctcaaagacagcaagatactacatttcaaaaggtttaaacttagctcaaaatagctttaaattgtagcaagaggagctg

SEQ ID NO: 806743 - DNA, 573 bp, Homo sapiens
ttggttaaagttattgagacgtttcaagtctctccctgcctccttcttgcctgcttttctcgccctcggtgggaagttcctgccgcaagtttttcccctttgcacacccgtgcgctctggcctcgcagaccgtgcaactccatccaccagccagagcttttcagcttcccgtgcgtcccctaaccaccgcgttcccttcgcttcctcccctccgtcccggcacccggtttcctccctccccattctccagcctcttgatgctttgacgctcgccggattcgggctccgggtgactaacttctcccggccaccagcagagcggctggacagccagagagccyagggcgcttcctggcgcgctgcggtaccccggggcgagaacgcccgccgcttgggaactccgcagctttgtgtgcgaacggcgggctcccagctttctccagcacgcctttcgtcagggtccacaatctgtcccttactcccagcccactggaacttcctttgctctaaaaaggcagagcgagaaagagttaactcttagagggaattccgctcattttttttccctgaaag

SEQ ID NO: 806744 - DNA, 602 bp, Homo sapiens
aaaaaataaatagcatgcatgatgtgatgtttagataggcatatttttaaaagatgtcatttacaatgttatgtagaataaataaataataaagggaatgggataaaataagaaaaataagtacagaggtttgggagataaatgagatacaggttgtccagctcctcttttctactctcctttaccagaccaccctcctctaactaattttttaaatttttatcttmatatgaatgtcccttatttacagtcaaatatctaaataatgtaaaatacaccatataaaattaatctctgtccctctgcagacttcctcatgtatcccactcagtcttacattaatcaaagaattgaaatgaagccttctgtgtctcactccatactttcacccaattatccatgctcatgaattatgagcatgaattattaataataattatgaatcattaagaaaatttccaaatttctatgtcaagctcacgtaatctaattttatgctataattgtccatttggatagctaaaagacaccacaaaaccgtaagtccataattgaactcatgatcttcactcccaaacctagacccctccatggcaggattc

SEQ ID NO: 806745 - DNA, 564 bp, Homo sapiens
tggatgtcttccctaggaattgcctgtacataaaccttgacctctctgcttggatagctgactttttatcttgttgattcataggagttatttacatactttggataagaattcttgcagattatgttatttttcccagagcttggttttttattttcacatacatactgcctgttttaatgagaagaaattttaaaagtatctactttttatccttatctttcctgttttagctatttatatcttgtttaataaacatttcttttccctgaggcaacagagacattcagacacatttaaaaatttttacattttcagtattcacttttaggtccaaygtaccttgaattcatttgtgtgtgtgtgtgtgtgtgtgtgtgtgtgtatcctgtaggtatggatctaacttaatttatcacaggaataactgtcccagctccatttaatggctactgtgcccttttctactgacctggtgcctctgtcacatgttgagtttccaactgattcagcactctgtatttcagctcttcactgtgtggccttagatttgtcgcctgtgga

SEQ ID NO: 806746 - DNA, 642 bp, Homo sapiens
tttttatttattttaaaaattattaggtctgtcttacaatgataaagtcatcgcatcttagcagctttgattcagagataggaagcaaccaggcaaaaaagttttgacataatataagaacaagaaacttaaaaaggaaaaagaaatattaaaaaatataagaactctaattcaatttatatttaaattttgtaatctaaaatataaaaattaagaatatataatccatggctcaaataatacccatctgggcttcaatatattccacgaatcaaatttagatattgtttgtcttgagcagagcgttttttcaccagaataccttttttagttgaaaaagcaaaggcaaatgaaaactatagaagttctaattgctaataaagaaatgccatctgaaaattacagataattttattttaaaattttatttcaatagttttgggggtacaggtggtgtttgggtacatggatacattctttaatggtgatttctaagattttggtgyacccgtcaccggagcagggtccactgtacccaatatgtaggttttcatccctcacccccctcccactcctcctcagtgagtccccagagtccattatatcattcttatgccgttgcatcctcatagcttagctccc

SEQ ID NO: 806747 - DNA, 568 bp, Homo sapiens
tgcaaagaaatatggagataacacagctccatctgaattgagtccagccatcaacaaatatcttgccaaccattctcaagaatttagaaagatatttgtcttaaagtaatggtcttataatgaccatttgagtaatttttttcaaagcagagagttgctgcaagataaatgtcaccaacagtagaaacacaatattagtaactttcaagtgatagctctttcagtgaaataataackttaaagcaccgttctccccctcacagttggaaaatccaactcttctcagctcacaatacatctgacagccccagtttctcctaaatcccatcccataaatctcaatgataacatcagcctgggtgccttagcctgagtccagcttcagactctgagtaacttggaaacattatgggagtagacacatgtctacttcattccccactgtatacccagcccctagaacaatgcctgaatgcagtcagggctcagaaatcacaaagacttcttaccttactcattcttctcagcggctctggagatatcttacctcttcttccaaccagaactt

SEQ ID NO: 806748 - DNA, 628 bp, Homo sapiens
gatcctacaattatgtgcttccccacggtcgagatgtcagggattagactcataaaaggcaaatcttagccaattggatgaatatcaagaatagagtacaattcccaaattagagagtctataaaataccgtctatttaccacctttttttaccctccgtgatcttatagcctatttgcctctttttctagattgccttacttaattctctggcgggaatgaggcagatagataaaagaaaagcaattgatatgcatgaatttaatctcacaaacggagtattttgtttatcaaagcagaaaagatacccttagggataactttattcacaataccatgagtaaagtaaatttcaagacaacatttgagggtaaataaactattctaaaaggtctgtcaagaaccattatccttgaaaatgttagcaataaataacataggtttcaaggaagttctacaatagggtaaagcaaatatrttaaactaattttcattttggtaaagaaataatattttgagaaatattaatgtaacttgggtttgaaaaatgctgtatcaaatgtgagatttttttaatctcatggacagtaaaatgctattctctgaaacagatgaaaatatgcttttt

SEQ ID NO: 806749 - DNA, 595 bp, Homo sapiens
atattgtcctctatatgtaatacatgtgtactaaatatttattaaatatatatttatttaatagataaattactgcatcctcccattctgtcaatttctgggaaactccgaaattaacccctcatctttaaaaagctacctttataatttttgaaaggatatgcacaagtataaatatgtgtgtatatgaattcaatacatgcacrgagtttcaaaaatcaaatcatacagaatggctcaaaggcaaattattagttttcttagttgcttttcttaaagcttatccttgttcttcaaaaccattcgtatttaaatgctttggtttatagtggctaaataatatgttgatattacttgtgtatgatttatcaggtttggcttctcatcttattctattcacatataaatatttacattattattttggatatttaaaaccatctttgaaagttgatattatatttaaatattttccatcaactatagacagaatctagaggaatagatttttaagaggagaatagcagctcccctaattttgctttcacttcttcacacactttcatcccaacttctgtcaagtagaaatttcatt

SEQ ID NO: 806750 - DNA, 443 bp, Homo sapiens; identical to SEQ ID NO: 806266

SEQ ID NO: 806751 - DNA, 591 bp, Homo sapiens; identical to SEQ ID NO: 806267

SEQ ID NO: 806752 - DNA, 591 bp, Homo sapiens; identical to SEQ ID NO: 806268

SEQ ID NO: 806753 - DNA, 626 bp, Homo sapiens
actgctcttgggaatgtaaattagcaccatcactataggtaacagtatggagaatccttaaagaagtaaaaataggagtaccgtttcacctagcaattccacttctgagtatccacccagaggaaaagaagtcattatataaaaaagacacttgcacatgcatgtttatagcagtataattcacaatggcaaaaattaggacctgcataaatgcccatcagccaatgagtggataagaaaatatggtatgtgtatatatatatatatatatatatacaccttgaatactactcagccataaaaagaaacaaaataatggcattcacagaaacctggatgaagtyggagaccattattctaagtaaaataactcaggaatggaaaactaaacatcatatgttctcactaataagtggaagcttagctatgaggacgcaaaggtataagaataatataatggactctggggactttgggggaagggtgggagtgggatgaaggataaaacactacacactgggttcaatgtaaactgcttgggtgatgggtgcatcaaaatctcagaaatcaccactaaaaaactgatcagtttaaccaaacaccacctgttcccccaaaaactgaaa

SEQ ID NO: 806754 - DNA, 642 bp, Homo sapiens
tgccctcacccattcatctttccttaggacttttcctgaccctttaatgtaaacaggatccctataatatttgctcccatcaccctgtatgtttcctttatactgatatcataatatgtagctagacatgtttgcagcattttttaaatgtttgctccgccctctagaccttggatgctcagagcatgatctcctgcactggcattggtggagagctctaaggcaagataaatataagcattcagagtaagcatttcaaaatatctgcagcaatttcacattgccaggccataaaggtttttgatcaatgggattatttctgaccagggtatagtacagttaattgttgtggatcacatatgatctaagctgtatgctagtcatatgtagcagaatcacatagcaacaaatgacactttaaggttagtttgtgcaytataacccaagtgtgtgtcaaattttgagaaaatgtaagcctttgtatgcttaaaaaaatttctaggtgcactttactttttaatgatgcctgtttttcaaattataatgtaacattattagttatactaagaaaatacaatttacattatttaagtttaatgccaattaacacggagagaaataagtttctctgggcttgttacg

SEQ ID NO: 806755 - DNA, 568 bp, Homo sapiens
taggccaaaactgattgtttttaaccatataggtcctagtaaatacacattttttaaaaaatctgtactctcctacaatcccagttgcctccagacacttaggttatatgatctggagcaattatcccataagctgtagtaaattatcacacttaaacatgaaaagttcaactcctctagggaatggtgtatgtataacctggtctttggaagtttcccattcaatttagcactaagctagttctctagcttctagtacattatgaaaacactgcatgagttaygtaacacatcctttgattatttgtagttaaaaaaattcttcaacactttattcaaaccaggtcacaagtctcattattctggccaaactccaaattaaataatgacattctcttctacatatcaacccttctttcacagaagagaaaaatagtaacttcaatccacagtctcacgggattttagaaagcaattatatgtccaaatacaagtcaaaagtagaaactagattcacaacccaaaaacatctcacaaggtaaggaataactatgtgtgcaaatagagg

SEQ ID NO: 806756 - DNA, 568 bp, Homo sapiens
taggccaaaactgattgtttttaaccatataggtcctagtaaatacacattttttaaaaaatctgtactctcctacaatcccagttgcctccagacacttaggttatatgatctggagcaattatcccataagctgtagtaaattatcacacttaaacatgaaaagttcaactcctctagggaatggtgtatgtataacctggtctttggaagtttcccattcaatttagcactaagctagttctctagcttctagtacattatgaaaacactgcatgagttacgtaacacatcctttgaytatttgtagttaaaaaaattcttcaacactttattcaaaccaggtcacaagtctcattattctggccaaactccaaattaaataatgacattctcttctacatatcaacccttctttcacagaagagaaaaatagtaacttcaatccacagtctcacgggattttagaaagcaattatatgtccaaatacaagtcaaaagtagaaactagattcacaacccaaaaacatctcacaaggtaaggaataactatgtgtgcaaatagagg

SEQ ID NO: 806757 - DNA, 569 bp, Homo sapiens
cagtttcttgattgtaatattgtactcaacataggatatgaccattgtttgaaacagagtcactggtctagagatctctctgtatgatttcttacaactgcatgtgaatccacaattacataaaaggttaaaaaaaaatatcacggccgggcgcggtggctcacgcctgtgatcccagcactttgggaggccgaggcgggcagattacgaggtcaggagatcgagaccatcttggctaacatggtgaaaccccgtctctactaaaaatacaaaaaattagccaggcgtggtggtgggtgcctgtattcccagctactctggaggctgaggcaggagaatggcatgaacccaggargcggagcttgcagtgagccgagattgcactgctgcacttcagcctgggcaacagagcgagactctgtcttaaaaaaaaaaaaaaatcactggcccagagcaaagctagagtcaatatgcttgacagcgttctgtccttgggcctttccttagtaaacatttataactaaagtgaatgaatatttcgaagacaaactcatgtagtttggcataca

SEQ ID NO: 806758 - DNA, 488 bp, Homo sapiens
ctatatctgatctctcttacatttttctactgtggttgtccatctatctgtttgtgtagcagtgtctctatttgtgtctctttgttttcttttagttccatatctttatgttattattatgaccatcattatcatcttagtcataactaccattaataaaccaataattgtgctagaccccttatatatatatattaaaattgatcttcgacayatcactgcaagatatatgtatatgcaggtgtgagtctgagtgtatataaaataaacctttttagatgagataccatgctcaaggagattaaacacattgctcatgatcacgctgctaaatatctactagaatatatctcacagtggctagaaaaaaatgggcctactagggctgtgattctcaaattttaactgtgcatgcaaagaatctggggatctttttaaaatgcagattctgatgaaacgagttcaggtggttgcctcagatactgcat

SEQ ID NO: 806759 - DNA, 541 bp, Homo sapiens
tgtcactctgttgattggttcctttgctttgcacaagctttttagtttaatgtagttctgcttgtctatgtttgttttggttgcctgtgcttttgctattacattcaagaaatcattgccaacacaaatatcataaagcattttttctrtattttttctaggagttttaccgtttcacgtcttacatttaaaaatttattccatgtggagttgatgttttttgtatagcgtaagagaaggatccaatttcattgtttgcatgaggttattcagtttttccaataccatgtgttgaagagattatccctttcccattttgtatttttgtcccacttgtcaaaattcaagtatatgtgacagtacataacaatatatgtagggatttatttctgtactctctattctatttcattggtgtatctgtctgctttgtgctactattatgctattttaattattgtagctttgtaatgtattttgaaacctggtagtgttatgccttcatctttgttcttctttcacaagattgctttggttactc

SEQ ID NO: 806760 - DNA, 541 bp, Homo sapiens
tgtcactctgttgattggttcctttgctttgcacaagctttttagtttaatgtagttctgcttgtctatgtttgttttggttgcctgtgcttttgctattacattcaagaaatcattgccaacacaaatatcataaagcattttttctgtattttttctaggagttttaccgtttcacgtcttacattwaaaaatttattccatgtggagttgatgttttttgtatagcgtaagagaaggatccaatttcattgtttgcatgaggttattcagtttttccaataccatgtgttgaagagattatccctttcccattttgtatttttgtcccacttgtcaaaattcaagtatatgtgacagtacataacaatatatgtagggatttatttctgtactctctattctatttcattggtgtatctgtctgctttgtgctactattatgctattttaattattgtagctttgtaatgtattttgaaacctggtagtgttatgccttcatctttgttcttctttcacaagattgctttggttactc

SEQ ID NO: 806761 - DNA, 541 bp, Homo sapiens
tgtcactctgttgattggttcctttgctttgcacaagctttttagtttaatgtagttctgcttgtctatgtttgttttggttgcctgtgcttttgctattacattcaagaaatcattgccaacacaaatatcataaagcattttttctgtattttttctaggagttttaccgtttcacgtcttacatttaaaaatttawtccatgtggagttgatgttttttgtatagcgtaagagaaggatccaatttcattgtttgcatgaggttattcagtttttccaataccatgtgttgaagagattatccctttcccattttgtatttttgtcccacttgtcaaaattcaagtatatgtgacagtacataacaatatatgtagggatttatttctgtactctctattctatttcattggtgtatctgtctgctttgtgctactattatgctattttaattattgtagctttgtaatgtattttgaaacctggtagtgttatgccttcatctttgttcttctttcacaagattgctttggttactc

SEQ ID NO: 806762 - DNA, 622 bp, Homo sapiens
atgtgtatatagtgatctgtaatgatcactatacatggcacgtgtcacaacatggctgtgtacttcataaatatgtaagattactatatgttaaattaaaaatagatttaaaaactgtttggatgttcaaaatgaaagaaacactacaatgccttcagaggtggatctttcacagttctattctcaatacaaataaaaactgggactttttcagttaagagcacgcaaggcaaccaaagacaaaacaggatcatgcaaatacattgagatacctgccactgtttaatacacaccagaatacatagaaaagctcattgttagtccatatgttctttcttgaagtaaactgaaatactatttgaattagctcagcagaaagaagaacaaattttaatgataacgagctattttccaaaaatgagactaagaaagmagtaaataataatttactgcatatcctataaatgtgcgcaattattatgtaccaataaaaaaatgtttgaaaaagaaaaatagcagattgctcaaaattaaggaaacaacataatgccttcagggaacgtaataaggggatcttgtttctacaaggactccctttagatcagggtttctcaaacttggc

SEQ ID NO: 806763 - DNA, 569 bp, Homo sapiens
actgaatagtagtgaccaaaacgttgatagaaatatggacagtaaaggtcaggctcaaaagttttcagatgaaaatgaagaagtcattgggaactggagtaaagaacacccatgttatgcccaagcaaagaacttggctgcattgtgtccatggcttaggggtttgtagaaaggtaaacttaacagtgatgacctagggtaaatggtggaaaaatctgtaaacagcamatcattgctgtagcaatgatgtgctgtagctgcttcgaacagcctatgatcaaatacaggagcaaggaaatgccttaaagttggaacttgtaattaaaagggaagcagagcattaaaagtttgggaaatttgcagcctggtttggccatatggtagaaagggagaaaacatttttaggagaggaatacaagaagggcgtggagaaaccacttgctagagaggtttgtgtgactaaatgggagtcaactgctaatagtcaagacaatgggaaaaaggcctcaaaggcatttcagacatctctgggtcagccccctcccattacaggccctaaggcctagcag

SEQ ID NO: 806764 - DNA, 531 bp, Homo sapiens
gaaatactaggattttgatatttgaattcaaacccatgattgagacaggaaagaaagaggagaagattcccatgataactcatcttagggcagaaacgcctctgtcaacaagtgcaaaatgtaggaattatctggaggtttactttctgatttacttgtttcagaaccggcctccttttcctggaaagattgtccatctragcccactagttctgttaaaatacacacggaggggaaacaaggattagtcaacccgattagccaaatcaaccctgatggcaaatgaagcaatagacaacactgccaatggtcacaccaatattgtactatcccattggcaagaagacagatttccctcccagggttcatatgaaaacataaaaaccagagataattttttttttaaaaacttaattataacagttttactcttctcttttgctgatttttttttttttaaaaacctgttccaaggaggaaaaggatttcattggaatcacatagtgagacaatttaccttgtcgaataaaa

SEQ ID NO: 806765 - DNA, 531 bp, Homo sapiens
gaaatactaggattttgatatttgaattcaaacccatgattgagacaggaaagaaagaggagaagattcccatgataactcatcttagggcagaaacgcctctgtcaacaagtgcaaaatgtaggaattatctggaggtttactttctgatttacttgtttcagaaccggcctccttttcctggaaagattgtccatctgagcccactagttctgttaaaatacacacggaggggaaacraggattagtcaacccgattagccaaatcaaccctgatggcaaatgaagcaatagacaacactgccaatggtcacaccaatattgtactatcccattggcaagaagacagatttccctcccagggttcatatgaaaacataaaaaccagagataattttttttttaaaaacttaattataacagttttactcttctcttttgctgatttttttttttttaaaaacctgttccaaggaggaaaaggatttcattggaatcacatagtgagacaatttaccttgtcgaataaaa

SEQ ID NO: 806766 - DNA, 633 bp, Homo sapiens
taaatagcattacatatctctcccttaatattatcactctgaattatagagttctgatgtacttttttgttttacagatttgtttttggtttcctgaaaagaggctagttaatctgaactccttaaaacttcttatactggtttaccaatgagacaagatagcattgacacataatgtttaaaatgaagatttaaaattatatgtaattatgttgagttagaattttggcaaaatttttatataaacagtttttacactttataaggtatcagttgacatggaatttccatgtttctattacgtttcagatcgtgagctaatgtaaaatcaagaagttaactggtggataatcttgggatatctgggttgcttctcattaagagataatattggcatgatgattaccattagtgtgtgtatgtctgcttatacctataaatgtctatatacgtcttattatttctatatgttacagagaaactgtaacttakagtcatgttaatgagcattttggttttgccactttgaagatgatgttcaaagaatgtatgtgtctctagggggttgttttatgcaagctcatgtgtataaggtaatggggtatatttttgtttacaaagtgaaaagaaaat

SEQ ID NO: 806767 - DNA, 588 bp, Homo sapiens
atacaagcagcagtcctacttctaggtgtatggtctcaagctgggttgttgttacagattgaataattgtgtacccccacatttatatgttgaagccataacccccaatgtgatggtactagcaggtgaggtctttagatgaaaattaggcttagatgaggtcatgaggtagagtccccatggtgggatgagtgtccttgtaagaagagacatacagcagtgctgcttctctttattatgtgagaatacaatggaaagataaccatctacaagccaagaagagggccctcacyggaacttgaccatgatggcactttgatcatggactttttagcctccagaactatgagaaataaatgccttttgtttaagccacccagtctaaaggattttgttatagcagcccaagctaagacagctgttcattatggtagctggaggtggctgttgagcacttgaaatgtggctagtcagaactgagatgtaccataagtgtaaaagacacagtggattaaaaagacttatgaaaaaaagtacaattgctcattaataatttgaatattgatgacattatgaaatgctaatatt

SEQ ID NO: 806768 - DNA, 618 bp, Homo sapiens
aatgcccatttccctcttaagggcattgtatggtatgcccttccctcttctgagctttgttttttcaatgatccttgtctgatttccctgactagagtataagtttcatgagagtgaggacttttctttgctcctgattgcattcttggtgtctaaaagagtgtctgccacatactaggtattcagtaaatacttttggaatggattaattatagaatactagattttagtgaaaaatgaatgaactggataaataatatgtaccaacttagatataattcaaaccttgagataattgsgaaagcacactgttaaagaaatagatacagacacaaatacacacacacacacacacacacacggtctcacaaaacatgtatatcctcacttccctccataaatatgtatatatatatgtgtaaaatgatattcatctaagtaaattaaacatgtgtgcacctgtgtacacatacatacacacatatatcacagactgtataaaaagcaaattctttaatcaatgtggggtagaaccaggacattagtagttgaatgggaaaacaagaataattgacatgagtccctgatgctattttataaatatcaatgttatttaga

SEQ ID NO: 806769 - DNA, 565 bp, Homo sapiens
ggcctgttaccatatgaagtggtaaagacagtgtctctgccctaagcaccatccagaaataccccctaaacctctatcgccatgacgttttgaacgggccatgggggtaatgctcatattatcagtggggatggcaggcctcttgttgaagtagtcagaatcaatgccctcctttatcctctccatcctgttctctgcacagccttcctttcctgatgccccccaagcayccctgatgctctgatcactgcgttgatgtatctctttcatggctaaaggccccagtgattctccctgtagtccacttaggtgactaacatggaggtgtgactctgagattcatagctcccttgtggctctaacttatcaggaaaagagtagccttttctcatcagggctacttttgctttgattccatctttcaggttctcatgacttcccaattcacataaagcttgacacaaattacccagtgcctagacagtaagaaaacatcagcctacctggaaaactacatcccaaatcatgtattcttgacaaccaccagttttgggggattgccctg

SEQ ID NO: 806770 - DNA, 524 bp, Homo sapiens
taccccctaaacctctatcgccatgacgttttgaacgggccatgggggtaatgctcatattatcagtggggatggcaggcctcttgttgaagtagtcagaatcaatgccctcctttatcctctccatcctgttctctgcacagccttcctttcctgatgccccccaagcatccctgatgctctgakcactgcgttgatgtatctctttcatggctaaaggccccagtgattctccctgtagtccacttaggtgactaacatggaggtgtgactctgagattcatagctcccttgtggctctaacttatcaggaaaagagtagccttttctcatcagggctacttttgctttgattccatctttcaggttctcatgacttcccaattcacataaagcttgacacaaattacccagtgcctagacagtaagaaaacatcagcctacctggaaaactacatcccaaatcatgtattcttgacaaccaccagttttgggggattgccctgaccctcttgctttagagt

SEQ ID NO: 806771 - DNA, 548 bp, Homo sapiens
agttggaacagaggtaaaggaaaccagacatctgttgaagatcagtgtagagaatcaagtgctgtttctttattttgctctttttttttttttttttttttctgagacggagtctcactctgtcactcaggctggagtgcagtggcacgatctcsgctcactgcaacctccacctcccaggttcaagctattctcctgcctcaaccttctggatagctgggactacaggcacctgctaccatgactggctaatttttgtatttttagtggagacagggttttaccatattggccaggctggtctcaatctcctgaccttgtgatccacctgcctcggcctcacaaagtgttgggattacaggcgtgagccactgcatcaagtgctgtttctttatctccctctttttctaagttgaggtttctgatctggctggctttatggatgtgagacctgtgcagttgcatggggcttgcacatcggaggacgctgagcttggtttcatgccctgctgttgctgtcttgaacttcttaataatttttgaaacaa

SEQ ID NO: 806772 - DNA, 619 bp, Homo sapiens
aaatttatgtacaaaatgttttaaaaagacctcatgagaataaaaggactgtgttttcatagtccaacaacaaaaacctgattttacttcaaaaagtgaccccgattagtcatttaattttaccaaaaataggattttgtttgataagataattataacttgtttttcccctaatattccagacatttcataatgatcaaatgaaatgaccacatatgaaagcaatttctttaaaaacagcctgtaatttaattccctaacaatttagtgcatagaaatcatcaattattaaattaatggagaaaaacgtatatttttaaatatcgattttaaataactgactcagwagcacatctcactaaaatccagatctgtacatgtcactgtgttagagaaacattatctcacttttaaaagcccagcaaatattttcacaaccttaaaatactacttgaggaagttactttgggtttacagtcagctattatagttctataattgtcaagctatgaaacatcatcatcatggttaaaagtaaatggaagcaaaatgtacctcgttccttgtggatctgtgagttaaccagaacatgggacctgctttctgaatagtacctagg

SEQ ID NO: 806773 - DNA, 616 bp, Homo sapiens
gaacacagcagaacagtgtgttcacaatcagcatgatgtcttaagtctgtctcaacaattcttcaagggatgagttaaagcttcttttaaaagctattgttcatgacctggtaattaactgtatttatggagagccaatgatgtatgaaggatcctgatggcatgccaacaaactgccccttccctgtggcggctgtggggtgtgagaaagagacatgtaactgcaggtacacattcttggtggcagtacaactttggtctgattcttstgtccttctaagcaactgtaacttgggttgtgatggaaccaggaaggcaagtgaggacggtcattctggaggaggcttacatgctacattcttcctcttacagatgtttccatagggtcaggttgcttgtatctctgtcttgctcatgtaatccttccttcatatagccagtcaagtggcctgcatagttgatctcagaaaggttcttattctaagatagaggatctgctctatggtgacattctttaaagaataatttttaaaatctataattataaaaaaacatagcaacaaagcagaaaattcaagaacaaatttgttgatacatatttatatacaacaaagca

SEQ ID NO: 806774 - DNA, 554 bp, Homo sapiens
atctccacccctatggatctgcagggtgcatccccctcagctgctttcctggactggtgttgagtgcctgtggcttttccaggtgtataatgcaagctgtcagtggatccaccattccgaggtctggaagacagtggycctcttctcatagctccactaggtattgccctggtggggactctgtgtatgggctgcaatcccacatttttcctctacattgccctagtagaagttctccatgagggctccgtcactgtagcaggcttctgcctagacatccaggcatttccatacaccctctgaaatctaggcagaggctctcaagtctcaactcttgccctctgcacagccacaggcttaacagcacatggaagccatcaaatcttatgggttgtacactctggagcagtagcctgaggtgtatctggggtccttttagccatggctggagctggagctgctgggatgcagggaacagcgttgtgaggttttacaagacagtagggccctgggcccagcctgcaaaaccattcttctctcccagccctctgggc

SEQ ID NO: 806775 - DNA, 604 bp, Homo sapiens
tctcaactcttgccctctgcacagccacaggcttaacagcacatggaagccatcaaatcttatgggttgtacactctggagcagtagcctgaggtgtatctggggtccttttagccatggctggagctggagctgctgggatgcagggaacagcgttgtgaggttttacaagacagtagggccctgggcccagcctgcaaaaccattcttctctcccagccctctgggcctgtgacaggaggagatgcttccttcaaggcattttttcccattgtcttggccattaactttgacttctttttagttatgcaaatttctgcaactcgcctggattcattcccagaaaatgggtttttcttttctaccacatggctgggctacaaattttccacttttatactctgcttccctttaaaatataagttccagttccagatcacttatttgctcacaaagacaarcataggttgctagaagcagccaggtcacttcttgaacattttactgcttagaaatttcttctgccagatatcctaaatcatcactctctggttcaaagttccatagatctctagggtaggggcacaatgcctccaacttcttt

SEQ ID NO: 806776 - DNA, 668 bp, Homo sapiens
atttcagtcggtcagtgcactgtcctttgtaaagtaaagagtataatttcttagatataaaaagaaagcagaaatctaccagcaggaaattgaactgaggcactgggaaatttaagagaaaattgtattatttctttctgttttaatacaatggataaaccaatcatgagaaataacattctcttggggccaagtagggaaaggatagctatgtaaaagtacwaagtcagatgatcagtctctagaaatgcttatgatacacagagacagacacacgtcccctggcttatttgcagatgttaattttaggttatttttatgcagtatagctccttttatttcctaaccaatttactcaactctgggaaaagtccctatgtacagtggaacaattattaggataattatagtaaaacatatactaaataaattttctgctaggcagattaaaaataagatccactctgatttgccattgttgcctgtgaattataagtttataaacatgaaagttggatattttgataagtatatatttaatagataatgcacacatatacatgtgtaatgttgcatatatatatatatttacacagacactatcataagcccacaaatctcacatcatgagaaatcagacaaatattacattaaattctaacgtgtcc

SEQ ID NO: 806777 - DNA, 553 bp, Homo sapiens
aaagctgaagcaaatgaaggaacagccacataaatatgcaagtcatttaggaaactttacatttatcaaaatgtttttcaagtggtgaatgctttacacaaagtaaagtgttatgttatttcattatgatataggagaatattttcttatgtcagtttgaggaataattttttccatcttggcacttgtgtcaaattactacatttcaaagttagatttgaaattrcagtagggatatatttttattttagtgcttctttaagttataaagcttccctgataaatataccaaatttatcaataaactatgtagagtgtctagataaaaaccttttggtaatgtaattcattctgatcttatatcccaaagctttaagatttgcataaaatcaacatatcttctcactcttaaagtactattttgtgtcattctaaaagtagtgaaaatattcttttatataaaaggaattgtagcctcactgaacaatttaagtaaaccacttttcttcattctctactggcaaaatattttacgttatctttaacactctca

SEQ ID NO: 806778 - DNA, 568 bp, Homo sapiens
aaattatttttaacatactaatgaaaagagggaagtttttaatttattgtggtaattacagcttagatatggatttaaatgttagttatcaccactcgtgtgtggtgccactactgtcttgggatggagagcatggtagggtaggagagttttggactcggaatttatcactaycactgtgccaataataatattgaaagttaatttttattgaatttaatatgtaccagttactttatatgcattatctctttaaatcttcacagaaatcctgtgaggtactataatcgttactcacctttttcagatgactagttggagttacaggaaagttaagcaaactgacaaaaattagtagccaataagagccaaagctaggattcaaatcaagtcttttaattcataagactgtgctcctcagaatttaatgttctagtgtttaggtttgtttttatgcactattatcaacaatctgtgtatttttctctctacatataaaactcttctctttttatgattgtctgccttatgctaatccagttttattttacttgagatcgagaaaaat

SEQ ID NO: 806779 - DNA, 568 bp, Homo sapiens
aaattatttttaacatactaatgaaaagagggaagtttttaatttattgtggtaattacagcttagatatggatttaaatgttagttatcaccactcgtgtgtggtgccactactgtcttgggatggagagcatggtagggtaggagagttttggactcggaatttatcactaccactgtgccaataataatattgaaagttaatttttattgaatttaatatgtaccagttactttatatgcattatctctttaaatcttcacagaaatcctgtgaggtactataatcgttactcacctttttcagatgactagttggagttacaggaaagttaagcaaactgacaaaaattagtagccaataagagccaaagctaggattcaaatcaagtcttttaattcayaagactgtgctcctcagaatttaatgttctagtgtttaggtttgtttttatgcactattatcaacaatctgtgtatttttctctctacatataaaactcttctctttttatgattgtctgccttatgctaatccagttttattttacttgagatcgagaaaaat

SEQ ID NO: 806780 - DNA, 538 bp, Homo sapiens; identical to SEQ ID NO: 781873

SEQ ID NO: 806781 - DNA, 601 bp, Homo sapiens
gaaatcttcttaattggaaaacagcttcagttcccttcttttcttttctttttcttttcttttttttttgagattgagtctcactctgcccccagaccagagtgcagtgacacaatcttggctcactgtaagctccacctcccaggttcacgccattctcctgcctcagcctcccgagtagctgggactacaggcacccgccaccatgcccggctaattttttgtatttttagtagagacggggtttcaccatgttagccaggatggtctcaagtctcctgatctcgtgatccgcccgcctcggcctcctaaagtgctgggattacaggcgtgagacaccacgccctrcccagttcccttattttctaatgctatgttttcaaggttgttgttaaggttagttaaactaatttatatgaaacacctggtgaatatagtgcctggcacagcagtatttatttacatccttcttaagtctttggaatcatagattatactatcagcagataaacttgacagatgcatagacatgatcagaaagagaatggaaggaagatgtggagagggagaacagaagtcagaaaccagaacaaaggaagac

SEQ ID NO: 806782 - DNA, 620 bp, Homo sapiens
cacataaatcagctgtactttttcatataatcattagagaaatgtaaaaaactgcgtagaaaaaaagcacctaaagcttaagagaattactgatcacgaaaggtttcaccttatttaatattttaggtgtggcccccttgataaattgaaatagctttgggtttcttgttgttgttgttttgcttagtgtgtgtgatccgtgtctaaggcaataaaatgccaaaccttcactcacctgagtggcaaagcctgcaaaattcaatcaggcggtgatctctagagtatagcattttcaaagaatattcaaaagctaccagctgtaaacataacacacacamaaaaaaacagaaaaaccaaaccatgcatctcttagctggctgtaaatgtactaatcagtgatttggggggaaaaaacggtgtaaacatggtggatatattttcgacagtaatcataattcttgtccagatgatgtgaagggttataaaataagcctgttaggtttcccaagcacttgtgtgtcgagtatatgtaaaatgcttcattaaaacatcttagactttacagtggatattttgctggtattaagcttgtgtttgtaaatagaagtgctaattattta

SEQ ID NO: 806783 - DNA, 578 bp, Homo sapiens
tgcctcagcctcccgagtagctgggattacaggtgcacaccaccacagctggttaatttttgtatttttagtagaggcgtggtttcaccatgttggccaggctggtctcgaacccctgacctaaagtgatctgcccacctcagcctcccaaagtgttgggattacaggtgtgagtcaccatgcccaaccgctcttttcaccacctctgtgtgatctattttcagttgctctgcttaaaaatgaactccttmctgcatagaaattgcctagtatcttagccaattcaagctgctttaacaaaataccacagaccaagtggcttgaacaatggaaatttatttctcattcttctgaagtcccagatcagggtgccagtgtcactgggttccggtgaggacccacttctcagtttatagaaagctgtctttatgagatgacttcacatagcagggagaaagtgtgagctccagtctcattctcttcttataaagacactaataccgtcatgaagatttcactttcatgacctcctctacaactctcaaagtttcactctcaaagacctcacttccaaatcc

SEQ ID NO: 806784 - DNA, 567 bp, Homo sapiens
ctattttattaggcagttttcaccaatgaacatatgctacataatcttactaaaaccaggacctgtcttctctttgaataatttccacacataaaaccccaatatattctttccaattcatatcactatgaatcagaatgaagttgttgcaaatgatggtcagtgaagaagaatagaagggaggttggaaaaagtgaggcttattgcctctaacatttctgccattcttacagtgattggtatgctcgatgtattacaatttgtcctcactttgttagaatcaactttgttatcttaaacagccaatcatatagccaaataacaacatcaacaacaaaaagaagtgttccaaaaccactagcccggtagcaattctaatgcaggtggtaaagaggtatttgatcatgtttattctttggtttcrtttattttaatgcagtctgtctcagacattttctgttgctataacataatacaattgactgggcaaattataaagaaaagaaatttatatctcacagttctggaggttagaaagttcaagagcagagcacggtactggcaccc

SEQ ID NO: 806785 - DNA, 604 bp, Homo sapiens
cgtattagtcagggttctctagagggacagaactaataggatagatgtatatatgaaagggagtttagtaaggagaattgactcacaggattgcaaggtgaagtcccacgataggccgtctgcaagctgaggagcaaagaagccaaatagtggctcagtccgagtcccaaaacctcaaaagtagggaagccgacagtacagccttcagtctgtagccaaagrcccgcgagctcctggcacaccactggtgtaagtccaagagtctaaaagctgaagaacttggagtctgatgttcgagagcaggaagcatccagcgtgtgaggaagttgaaggccgggagactcagcaagtctgctcattccaccttcttctgcctgctatttctagcagtgctggcagcaaattggatggtgcccatccagattgagggtgggtctgcccctcctcgtccattgactcaaatgtgaatctcctctggcaacacccagaaacacccagatacacccagaggcaataactttcatccttcaatccaatcaagttgacatttactattagccatcacacacagcaatcatggccaacatagaattgactgagctgg

SEQ ID NO: 806786 - DNA, 631 bp, Homo sapiens
gatttgagtttagaagaaaacatagcctgcaattgatttcactaactggagtgtgacctatattgcaaaccctatatccttcctttaatttttaaataattaattgctaagacatacaaatactaaaaaaatttgattgtttcttcagagaatagtaatgtcttttgtctttttctttggatgaaaaaataagataatagcagaggaaatacaaagctaaaacacctgtgatccagcacaactgtcagttagaaaagtacaagtcaatgtccatagtcagctgattaaagttaagcaggtgcatcaaaaatgatgacaggtacttgtgcataagaaagtacgagcttccataattgaacttgatygctcgatatcttcatgtgggcctatttcatagaatcattttaatgtgaatgtttctgttataaaagggatatgttatgttttgctaaataattgtatctacatgttgtaatagaactggtcaatatagatataattaagaaggccaaccataatttattcaatattgtattagttcacaggaataattttaaaaacttgacactttattgactgttctgcaatgaggcattaagtaataatatggtgtttattattaacttcatat

SEQ ID NO: 806787 - DNA, 602 bp, Homo sapiens
tgtgttgtttaattttcacatatttgtgaatttttcaattttcctcttgttactgatttctagtttggtggtttaatatcattatggttggatgtttaatatgattttaatttccctaagacttttttgggggctaacccataatctatcctggataatatttagtgtgtgctagaaaagaatgtgtattcttcwcctgttggatgaaatgttttgtataaatctgttaggtaagtctgctgtttcctttttgatcttctgtctgggtgatgtatccactgttgaaaccggggtatcaaagtctcctgtgattatcatactactgtcaatttctcccctcagttctgttaatatttgtttttatatttaggtattccaatgttgggtgcatatgtatttgtgattgttatatcctctttatgaatggactcctttttcatgatataatgaccttctttgtccttatgatagtttttggtgtaaagactattttgcacagtagaagatctagccaccactgctctcatttggttaccattttcatggaataactttcactttcagcctatgtgagttctaaactctcaattgagtctcttgta

SEQ ID NO: 806788 - DNA, 622 bp, Homo sapiens
tctcctgtgattatcatactactgtcaatttctcccctcagttctgttaatatttgtttttatatttaggtattccaatgttgggtgcatatgtatttgtgattgttatatcctctttatgaatggactcctttttcatgatataatgaccttctttgtccttatgatagtttttggtgtaaagactattttgcacagtagaagatctagccaccactgctctcatttggttaccattttcatggaataactttcactttcagcctatgtgagttctaaactctcaaktgagtctcttgtagacagcattttagttggatcttttaaaaaaatatattcagccaccctgtattttttaagtggatatttaaatccatttacatttaaagtaattcttgattactttactgctgccaagaacttactactgccattttaattgttttctgtctgttttgtgattccttgttctttttgatttgacgattttttcttagtggtatgctttgattcttttaattttaatgtgtttacaacagcttattcttggtgatcaccataaggcttacataaaacatcttctaactgtttattttaagctgacaataatttcactttgatc

SEQ ID NO: 806789 - DNA, 625 bp, Homo sapiens
gtttgtcatccccaacagaaccatagtagatgttcactatttgggtaatggatacactaaaagctcagacttcaccactatgcaaaatatgcatgtaagaaatttgcatgtgtaccatctaaaaatataaaaattaaaaaaaaaacaatggtgatgtagtcatgattatctgttgccatcaagaatagaatgtgttagttatgctggtagtctaatgggtgcctagyggcattctgttttaatgttggtttttttctaactttttagtagctctcattatatactgcagtaattaataggggtttgcccagaatagtatttcaacaggtaaaagattactttaaaaaaggtttatgcatttgtttatttttctacctgttttactcagactgaacataacaatcagttaaaatttagaaaagcaaatatgtttatttagttacaagtaaactttattacacaaaatttatttttagccatagttgaaaaaacaacaatttatttgcttatactcgaaatagcaatgccctatgggaatctcagtaatgccgatcaaagtcctttctatgcttttcctgcttgctaaaaggagactaatatgtgaacactgacaaacgtatgagaa

SEQ ID NO: 806790 - DNA, 629 bp, Homo sapiens
tcctgtgttctgattctttgccaggtacacagctttctgattactatgacattcaccactccttacaggaaaagggtaagttaattatattaagtttaagccctttggccactctgacagtgatttctcagggtaaattaataaattggcctctgattatgatttcatttctcatataaaataaagatgacatgctgataaaataggctttgagtatttccatttccccgtgatagtaatttgtctctgtaaattaataaaatgatctgattataatttggatttccatgtaggttaactatagggataattcaaaaatcaagctaacgcaaatgttatagttcctgtaacaatgatttcatgttgtatattaatgaataggcattctgttttatagatragccactttaacttgttaatggcagtcaggccctgagagatggagttgttctcagtgtactgactgagccatctaaccaaccctacaagctaaagagctagactttggatagggatacatttttaagcgtaactaatgttttcctaggaggctcctcctagagatttgactttttcttctctggagattctggaaacgtctctctgttccccatgagataagaattaat

SEQ ID NO: 806791 - DNA, 581 bp, Homo sapiens
aagtttaattttagacatattcagcttaagatgactctaagacatgtcggatttgtagcgatagatagatacatgtctcattctcaggtgggagtcctgggctggaaaggagaaacacaattcataggcacagagatatagttttttttcattaagatgaaagagatyactgagatatgggggctttgttttatcagttagatttctcagactaataaactccccaaaggaagaaagtaaatgttccgtttgataagattaaggaacagttgttctgattgattcctgccaacaatgaaagtcctggttattggttttcctcgtggacttgcttttattcaggcagttggcgtgcttacctagtatcggcatctggcctggtagaccacggccttttctttctactgtatcccttcgactttaaagtaagaagagcctgataggtgcccaggatttaatgaagtttttagggtctactcacattgaatgtctttaagttacaagaactcattatgttttctgtttacttcctgtcacttcctcctgagaagcctgtcactttttctctttctttttacact

SEQ ID NO: 806792 - DNA, 533 bp, Homo sapiens
caagtccaaagtcatctatcccttggcatggaagcgatgatagcaaacttggcatgtgaggtacaatgaatctccctattccactggctttgaatttattaaaaatttgtattaatgtccagaactattggggaactaacacttgttgagtacagttttatttcttatatcattaaaacatcacacaatccaaagagakaaatatatcctcacttttacaaattaaaaaactgaggcaaaaagaagtcgagtaattggctaaaagtcatatgaaaagtaaggagaacagtgatggtccaaactcagacctacccagctatgtgacggtagcatcgctttataaaaattcattttttatctgttccttttaacttaaaaaatgcctactaccatacatatcacttgtcctttccttggaaaaatcaagggttaaaatatttgatgttttctcagcacacctctttagagcagacatgaacacaatgtgccttgaaatttactccactcaccatttagaaagatggaaattggag

SEQ ID NO: 806793 - DNA, 584 bp, Homo sapiens
ccagttctgtgtggcagtggctaaagtccaagtgaatctgaccaagaggtatgtgtctccattcctctacctttttcccacttgtagtgccagggatctaccaaaggcatgacaggccagttatcttaagcttctatcactctctcaaccaccctgatcattcataagagagatttttcgtgacagatattgcaagcttaaaaaactagaagctactgcccaaacccagagagtgctagtaatgatgttatgtctctatgagaaaataagcaagtagttgttcctattcccagttctggagtagttgcttcaatattttgcacagacaaaaggcaagccataagaacataragatctgaatcttttctcaagtgaactagttgatttagaagagtgtgtagaagatttaacttaagtttagactttgaaacaatggcgattttggtgataagtaattaagagaaaactggtttcaccatgtgatatggtttggctgtgttcccacccaaatattaccttgaattgtagctctcataatttccatgtgttttgggagggacccatagggagataattgaatcatg

SEQ ID NO: 806794 - DNA, 633 bp, Homo sapiens
gcagcatgactgctaacaagtacagggtttctttggcaactgatgaaaatattttaatattagatagtggttatgttttaacacccctgcatgtattagtccattttcacacagctataaagaactatctgagactgggtaatttatgaagaaaagaggtttaatggactcacagttctgtaggctgtacaggaagcatacttgggaggcctcaggaaacttataatcgtggtggaaggaaaagggtaagcaagcacatctttactatggcagatcaggagagagaaagagcaaagggggaagtgccacacwcttttaaaccaacagatcgtgggagaactcattcactattgtgggaaaagcaaagggggtgctcgcctccatgattccatcacctcccactaggccactcctctgccacgtggggattacaatttgacttgagatttaagtagggacacagagtcaaaccgtatcactggatatactaaaattcacatataaagcgcactgaattgtgcactttaaaaggctgaatttgatggtgtgtgaatcatttcaagtttttaaagcaataccatgggtaagtttgaaaaacaggaaaaacaccggacagaagatataattttttgg

SEQ ID NO: 806795 - DNA, 554 bp, Homo sapiens
acaatatgttttcaattttcttaggtaaatacctatgcatgggattactggtttatatggtaaccacatgtttaacattataaaaaactgacaaactatattccacagtggctataccattttgcattccaatagcaatgtatgaaaatctcacttgtttcacagtctcaaccrcactgtatgtattatccttattattttgtctattctagttggcatgtaatggtgtcccattgtggtttcaatttgcatttctctaatgaataataatattgaacatttcctcatgtgctttttgcctcccatacttctcctttagaggtgtctgttcaaatcttttgaacattttctatgtgtgttatctcattataattatattcttactgtttttttacacagaagactaagattcaaatcctctatcaaagtatatgtttttacaatattttcttccagtctgtgacttttaatttcattttcttattaaagtctttgaaaacagatgtttctagtttgatgaagactaatttagctaaaaatctcttggtatatcg

SEQ ID NO: 806796 - DNA, 579 bp, Homo sapiens
aaacaattgaacaagcaaaaagcaaatcaccccactaagagacacttcacacacacacacaatacaagcagccaacaaaaatatggaacacatttcaaataaaaatcatcagaaaattgcaaattaaaaccacaatgagatgcattcaaaccagtcagaatggctactattaaaaagtcaaaaagcatcacatgctggcgaggctgtctagaaaagaaaaaacgtatgcactgttgatgagaatgtaaattacttcagccactataaaaaaataacaacttaaarcatagctacaatttgacccagcaatcccattgcaggacatatattcaaaagaaagtaagtcatttgaccaaaaaacaaacaaataaacaaacaaaaccacacatacactcgtatgctcatcaaagcaccattcacattcgcaaagacatggaattaacctaggtgtcggaggcatttgaaccaaccctcatggctgctctgcctacggaatagccattcttttattcctttactttcctaataaatttgctttcactctactctaaagacttactcggaattctttcttgtgtg

SEQ ID NO: 806797 - DNA, 583 bp, Homo sapiens
caatctcaaactttttataaaagtgtactttttccaacacagagattgtttccaagtttgatgcttgacccaaaagccacgctggtataggaaaattgagtccgattagtgttcagcctctaatgcctggaattgttgtgtgtggactagcagcagtgtcatttcctggaatttggggtcccagaccagaatttctcaatcaaatctgtactttaacaagatccccaggtgatctgaatacatattaaatgtgggaaacactgttctagaatttccatctgatatggtttgggtctgtgtccccgcccaaatttcacgttgaattgtaatccccaatgttggaagtggkgcttggtgggaggtgattggatcatgagggccgacttccaccttggtgctcttctggtaatagtgagttctcatgaaatctggctgtttaaaagtgtgtggcacctccttcttttctctcttgctcctgctccaccatgtaggagaccgggctccctcttcaccttccaccatgactgtaagtttcctgaggcctccctggaagccaagcagatgctgcctgtggaaccatgaa

SEQ ID NO: 806798 - DNA, 599 bp, Homo sapiens
tagtctgtttttaaaaagatttaaaaggattttcttctcttgtgtgtggcgtaggctataagtaaaatttatcaggtcaagatcagcatttggtgtaaccttgatctacctctagtctaagtctaaatttacagggatacagagagcccttgaagctgggcatgattcagactagcagcagggttggagtctccagagaaactaggtccataggtaataaagaattccttacacctgcagggttctgtacatggcatctatctaggatagaggctggaagctgaagggagattcagggagtcctgggttctgcttctggccgaatcccatcctattaaaaatcatacaccaccttgtagagttagttgtctattttaaactctttctaattttactaatagattggaaaccccttgaagagaattatctccctagcaaccatttatcatgccttccacataawaaatgtaaagtgctcaatggtttaaattagaaatgacttcttagtgaaaaaaaaaaatcacatggagaaaaagaaatatcctaaccaaaatatcctgcccaacaagtaaaacaggcaatttaatacagctatgcac

SEQ ID NO: 806799 - DNA, 454 bp, Homo sapiens
tttttcatatcttcaaaactatgggtaattgctatcacattctgaatatgtttaggattagaggtagcctggactttatgaaatggtgccaccaaggtaagatttcaaaaatgctggtctaggtgtccaacacttaatgttattcatgtccacatcctgtagaatattatttaaggattttttgaatgatggttgaaactgaagcaatagtatttcccttgaaagtgaaattttctcaaaacctgtcttcctcctacgtcgttaaggaaccaagaagctacaaaggaaaggaggctgttacsacattaacctaagggaggagaccacccctcatattgtcttatgcccaatttctgcctccaaagaaagaagtaaaaactaaaaggcagaaatgaaatccacaagcagacagcccggcaccacactctggacctggtagttaaagatcgacccc

SEQ ID NO: 806800 - DNA, 515 bp, Homo sapiens
ttgcttcggtagctagtataaatgggattgctttccttttcagattgttctctgttgacatatataaatgctactgatggccaggcatggtggctcatgcctgtaatgcaaaaactttgcaaggccagggtgggaagatttcatgagcttaggagttcaagaacagcctggacaacaaaatgagactttatcactatgaaaattttttwaaaaattagccagctgggactttagtcccagctacttgggaggctgaggtagaaggatcacttgagcctgggatgtctaggcttcagtgagccgtgatcctgctactgcactccagcctgggtgactgagcaagaccctgtctcaaacaaacaaataaacaacaaatgccactgatttttgtatattgattttgtattttgcaacttcaccaaatttgttcactagttctaacagttttttggtggaatctttaagtttttctaaatgtagaatcatgtcatctgtaaacaagaataatttgactt

SEQ ID NO: 806801 - DNA, 610 bp, Homo sapiens
acactccccaccaactgggtaaggaaaccacaaatccagtccccaaacccacatctattttgccttttcaaaatgtgttgtaaaatattagaaggaaaatggtctggaacttctaaggattaagaagaaattcacatcagcagaaagcaagactgtaaaccccccgggagctgaagagctcagttccagagccagattgtataagacggggcttcaaaactaatctggagccatcttatgtaaaacaaattgtccgccaacaggaagcctcaaaacagggtgcagattatgaaggaatgaaatggattccaggctgctatgaggattttcttgattgaaacaagaccaayctatggaaccatgctctgtgtgagtccaccatttcccccttctctgcaaaaacatgaaagaaagcatgtagaatttttgttgtggctggatttcataaggggaagatgcttctctgtgtaaaaagatatacaagagaaagctgtggttggaaatctgcagtgtaagcgacaaaaatctcaactcaaagttgcctttgcaaaaggaaatgattctggttctcaaagttgaaaagtccagagatggattttgcctttagata

SEQ ID NO: 806802 - DNA, 604 bp, Homo sapiens
catgttggccaggctggtcttgaactcctgacctcaggtgatctgcctgcttcagcctcccaaagtgctaggattacaggtgtgagccactgcacccagccaagacttttttttgttgttgttacgctaaggaaatttctgttataacaacatactggtactttgtatcagctgggactttggcggcttgacttattcaaggattatgcacttgcaacacggtggtcctggctgggttaggttaacagggttccygggacccgaaagacaatactgggtacttagaagtgtctgtattgtttcccgtcattcttaagggactcagaagtcccttgggaaggaagttgattcctgttgatgatgggttatattctcatagcttatgacgccatgatatgtcataagtctcatctcatctgagacactgcatctcagtctttctcctgccacctgtgaagaattccagatgtttccataggccccacacaaaggcttaagttcacatcagaactgtctgattattcttagtttacacatcagaactgtctgattattcttagagtttacagaaattgtaaaaaatatttctgggatatttgaattc

SEQ ID NO: 806803 - DNA, 562 bp, Homo sapiens
gtgagcacgtgggtgggtgggaatatgcacgtatgtgagtgtgactacatagaatgtgagaatgcacatatgtgtctgtgtgtgtgtgtttgtgtgtgttgtatgtgagagtcagtgtataggtacattgctcctagaggtcactgtacttgtttcctattgccactgtgacaaaattaccgcacatwtagtggcttgaaacaacacacatttgttatcttacagttctggaggtcagaggctgaaatgggcctcactgggctaaaatcaaggtgtgagcagggctgtgttctttctggaggctctagaggagaaactgcatcttgctttgtggcactttctccatcttcaaagccagcctttctcctcttgaatcctctgacctgctcctctgcctctctcttctgcttttaaggatccttgtgattacattggccctgcctgaataatgcagtataatctctttctcttaaagtcgactaattagcaaacttaattccatctgcagccctcgtttccatgtaacccaacatatgcacagattctggtgattaggagggtg

SEQ ID NO: 806804 - DNA, 562 bp, Homo sapiens
gtgagcacgtgggtgggtgggaatatgcacgtatgtgagtgtgactacatagaatgtgagaatgcacatatgtgtctgtgtgtgtgtgtttgtgtgtgttgtatgtgagagtcagtgtataggtacattgctcctagaggtcactgtacttgtttcctattgccactgtgacaaaattaccgcacatatagtggcttgaaacaacacacatttgttatcttacagttctggaggtcagaggctgaaatgggcctcactgggctaaaatcaaggtgtgagcagggctgtgttctttctggaggctctagaggagaaactgcaycttgctttgtggcactttctccatcttcaaagccagcctttctcctcttgaatcctctgacctgctcctctgcctctctcttctgcttttaaggatccttgtgattacattggccctgcctgaataatgcagtataatctctttctcttaaagtcgactaattagcaaacttaattccatctgcagccctcgtttccatgtaacccaacatatgcacagattctggtgattaggagggtg

SEQ ID NO: 806805 - DNA, 592 bp, Homo sapiens
ttatgcaatcagttttaatggctaggtaaggttttatccaatgaatgtaacattacatttctagtgagctgggtctggtctaagaatgacactgttgggaaatgaagtgattcttgccattccttgcctcttctgcaggcttttctttacttttttttttttttttttttacagtatctcactctgtcatacaggatggagtgcagtggcgtgatctcggctcactgcaacctccacctctggggttcaagtgattctcatgcctcagcctcccgagtagctgggattacaggcatgtgctactatggcctggctaatttttctgttttagtagaaatggagtttcaccatgttggccaggctggtctggaactcctggcctcaagtgatccacccgccttggcctcccaaagtgctgggatttcaggcatgagccaccrtccccagccatctgcaggcttttcaaacttgcctgaaagtgacagcattcactacttgcctcttatcattaatcttgattttcccccaaaccaaagtggtctgaggaagcaaagactaattatttgcaatggatcagggcttgaacacttaa

SEQ ID NO: 806806 - DNA, 632 bp, Homo sapiens
tgcatgatatttttgctccaaactgggacggggaggactaggtacattgaccaccgccctggccaaccccaacagtaaaggaagtgtctatttctcagttccactgtattttgggttggatctttttgttgatgacttgccactctttcaggcaacttcagaaatagtgtagtcactgtagagtctggtagcatctattctctcttctgctaaatgaaaacacatgacggcctggttgctaagtaatacaagtaatgcatgttgatgtaaacggtggtcgagaggtggagttggggtgagacacaaatggggacatgaccttgaaggctctggagagtctcccaggtgggggtgggggctaagttccctctcgcttctgtctcrctttcagatgcccaccctcactcaaaaacatcattaggtttgcagcaattacccaaggactacacatcctttattattattattacgaaatacagacaagcaaaggagaaaataaaaaccacctttaatctccacccagagatacttattaataacggtttggcatgtatttttccagatgcaaaaatgagatcatattatccatgttgttttgtggtctgcttttggcatttaaaatataataaata

SEQ ID NO: 806807 - DNA, 595 bp, Homo sapiens
ctggcagcaaagcattagcagtgaaacagatccagacccagtggatgtcaaatgagggagattcctatctctggtcttcagaataccatgattttggtttgcttggaagtaaaacaaaaagagataaataacagttatagtttgacarttataacagtaatttgtatgttagaacagaaaaaggaacctgttccattagggcaccaactgaaaacatgaagaaaaattataatcaggtactttttagaggattattgtagccaagaaataatgatttcatctgtatgtaaaaagttagggttgaaatgtagtattaagtgttacactttgcccttcaaacaatttttttgctgccttttttattaaagagaattttatagccaggccaatttgtgtgcaatgctagttttaggcttattatgcttgcctgatgatttgcataaaatgcagcaagaaatcgactggccatatagacttcttttaaagttgattttgctgaaactttacctaaaaataggctatactagtttcagtcttggtaaaataaccagtgtcaccaattgttaggaaaaaaaaaactattattgaacttatg

SEQ ID NO: 806808 - DNA, 565 bp, Homo sapiens
acttcatgctaactgctattctacagacacaatgataaacaagaccaataacttacaatctagtgaacaggcattatcaccttctcactcctgcaaagctgatattaaaaccccatcttggtcatccctgagcactccaaggtctacaaaccaggtagagatgctaggacgggaactaaatgcagaaaacagatcagagttgccagggggtgaggggcagggtggacaactacaaaagagacgcacaggacaatttttagstgaatgtagtgttctacatgtactatggtgatggatacatgcttctatgcattttcaaatgccattgcaatgtatctcacaaagaatgaagttcaatgtaggcaaaaatgttaaaaatcaaccaggaggtcatggaatctcaggaggtaatgcagacagtgataaattgtattacaaatgtatcacataatccagttagcagcaagcacaccaacaccagatattggcttctaaataccattctctgacaaaagaaaccagagcactggagaaatgtttgattctagggctgggacagggaaaa

SEQ ID NO: 806809 - DNA, 557 bp, Homo sapiens
tccatcatgtataagggatcctcaagaatgttaactttctcatcagaatccatggaatcgggaaggcaaagggtgacatattcaaaattctgaaggaaaaaaaaacactatcaaccaataattttacattcagcaaaactatccttaaacatgaaggtgaaattaagacatcaagataaacaaataagctgggtgcrgtggctcacacctgtaatcccagcactttgggaggctgaggcgggcggatcacaaggtcaggagatcgataccatcctggctaacatggtgaaatcccgtctctactaaaaatataaaaaattagccgggcatggtgttgggcgcctgtagtcccagctacttgggaggctgaggcaggaaaatggcatgaacccaggaggcggagcttgcagtgagccaagatcgggccactgcattctagcctaggcaacagagtgagactccatctcaaaaaaaaaaaaaaaaaaaaaaagataaacaaataatgaaagaatctgtcacttgcacctaaactacaagaaatactaaagggaatcctt

SEQ ID NO: 806810 - DNA, 493 bp, Homo sapiens
attgttaagtcacaaaagcttgaaacgtaccttaaaatcgataagggagaataaaacaccttttttcaaccagccaaaaataccatcttggtgattctcctgccaatctttttttatttcctatatgcagatttggggcctgaatatttagttcataccacgcygtaccatagatgcttgttttcacttcaagggagcaaagagagcatgtaatttagactctaaattgacgaagtcccaaaggccttttcctaaagtaccatttcctacctgacgttaggtgccctgatgatgataatgctgattcacatgcgagggcgctggcattgttcccactgcccacaccactgcctttttaacaatcacatcatcccaggagccagctcccaggagtttctttgtccgagtgaggaaactgaggcttagcaaggtcacactttttgccgctgctctgttctgctgcccacagctgccacagatggtcttccgggac

SEQ ID NO: 806811 - DNA, 554 bp, Homo sapiens
atcttagaattttagaaattgaaatgttctcagagaccatgtggtccagatctctcattttacaggtgaggcaagtggtccagtgactcatctgtgctcactgcatgagagccatgcaagctctagagagcacacacagagtgagagagacaagccgagatcctgtccccgtaggcactagygtatccatggtttggtacaacattgggtgtcatcctggttgtcccaagcctcagcagccggtggatgtcaataaggtcacattattaataaaaataagaatgaataggccgggcgcggtggatcacgcctataatcccagcacattgggaggccgaggcgggtggatcacctgaagtcaggagttcaagaccagcctggccaacatggtgaaaccccgtctctactacaaatacaaaaattagccaggcatggtggcaggcacctataatcccagctactcgagaggctgaggcaggagaatcgcttgaacccaggaggcagaggttgcagtgagctgagattgcaccattgcactccagcctgggggacaa

SEQ ID NO: 806812 - DNA, 554 bp, Homo sapiens
atcttagaattttagaaattgaaatgttctcagagaccatgtggtccagatctctcattttacaggtgaggcaagtggtccagtgactcatctgtgctcactgcatgagagccatgcaagctctagagagcacacacagagtgagagagacaagccgagatcctgtccccgtaggcactagtgtatccatggtttggtacaacattgggtgtcatcctggttgtcccaagcctcagcagccrgtggatgtcaataaggtcacattattaataaaaataagaatgaataggccgggcgcggtggatcacgcctataatcccagcacattgggaggccgaggcgggtggatcacctgaagtcaggagttcaagaccagcctggccaacatggtgaaaccccgtctctactacaaatacaaaaattagccaggcatggtggcaggcacctataatcccagctactcgagaggctgaggcaggagaatcgcttgaacccaggaggcagaggttgcagtgagctgagattgcaccattgcactccagcctgggggacaa

SEQ ID NO: 806813 - DNA, 554 bp, Homo sapiens
atcttagaattttagaaattgaaatgttctcagagaccatgtggtccagatctctcattttacaggtgaggcaagtggtccagtgactcatctgtgctcactgcatgagagccatgcaagctctagagagcacacacagagtgagagagacaagccgagatcctgtccccgtaggcactagtgtatccatggtttggtacaacattgggtgtcatcctggttgtcccaagcctcagcagccggtggatgtcaataaggtcacattattaataaaaataagaatgaataggccgggcgcggtggatcacgcctataatcccagcacaytgggaggccgaggcgggtggatcacctgaagtcaggagttcaagaccagcctggccaacatggtgaaaccccgtctctactacaaatacaaaaattagccaggcatggtggcaggcacctataatcccagctactcgagaggctgaggcaggagaatcgcttgaacccaggaggcagaggttgcagtgagctgagattgcaccattgcactccagcctgggggacaa

SEQ ID NO: 806814 - DNA, 621 bp, Homo sapiens
aggagatcaggaataggtttatactgagaggtacaaggttgctgtatcctccattaaatgggtctagaatgctgtgatttttctaccaggtctcacagtaacagtatagcagtgagttcggttcctttacttccagttgcatttccttatttctggctctcagctgataaagatgactaagatgctagaagtcagatagataagtgaggattttttatactttgtaaaggacgtataacatgttatataatcactcgaattaaaygaatctcttctatacaaaattataaagtcaaaggataaataataaaaagtaaaactgggtcatatacattatgttttaaataccttgtagatttggaataggataagtaaagacttgtaaaaattacaaatgttcaattctaaaactatttcatgtcattacaaaatatcaaacttgtcatatttaaaaatctcaccatcaggtttgaaaatcttgtaaattgttcaacttaacagctacttccaataatttaaaattttttttattatttttaaaataggcattattttacggttcaaaattcaaaaggtacaaaaagatagaaagactcctcctcacctgcctcctggccccca

SEQ ID NO: 806815 - DNA, 591 bp, Homo sapiens
aagagcctcggcaaaacttcctgacactggagctaaataaaccttcgccacggggagaccggctcgccgaaagggctgaatcttgggtgtctttgtattctcagccccttggtgcttgagagggagattttgatttgaaaacaagccctggagagggatgctaagtgatctctcaaggcaaggcctatgattattgcctttggtagtgagtttagcgacacaataatggaaagtttgttggaccccaaatcaggctctaagaagtctcagttttgccgtaactacctaattaatgggactcagatgctcatctgtagacttaggtggactgcatggtaatttcctagggctgttgcaatgaagcactgcaaactgggtggcttcagcaacaaaaatatattgtcttggttctagaggctggaaatccaaratcaaggtgtctgcgcaattggttccatctgaagtcgctgtggtagaatctctttcattcctgtctcccaacttctggtggtttgctggcaatctttgccatttcttcacttatagatgcaacatcccaatctctacctttatcttcacgtggcattctcc

SEQ ID NO: 806816 - DNA, 558 bp, Homo sapiens
agaagtaagctctgccgcgtaaacttgaacagagggtgagacattgattcacagcaactgtgactgtattcatgcattcatccctcccttccttccttccttcatttcttcatttcttccttccttctttccttccttccctccttccctccttccctctttccttccctccttccctccttccttccctccttccttccttccttccttccttccttcaactaatgcttattggaagattactaggtggcatgccctctgctagccatgggggtacaactcagaacaagacaacccagggcccagtcctcatagaacttatgtcctaacgaaattgattctgcttccaatgggctggggcgtcatagcccaaagccaggcccgtcctgcatgtgaggatggagaggctatagcagtrgggaggaggcgagaggagggggcaaatgcaggagttaggcagggcccagcctgggctgtgtgccaggccctggcttaggccaagcagaagaaacaaagatacaaaagacctggatcctatcctccaggatttatcctcaa

SEQ ID NO: 806817 - DNA, 662 bp, Homo sapiens
cgtgcttggatatctcatgggtggtggagtctgtagcaaggctggaaattttgacttggaatcacttggatttctctaagagaataccccaggttggatgtgttactgtggcagcagagaagacttaaaaattacattgtttttagcttgaacttcgtcttgtgaagtcctaattagggaagaggagtcaggctgggggtctaggggaaagcaaagagataaagcagataagccataggtctaccttgcttcatggtccaggacatacaaacaaaaagaagaagcagataagctataggtctgcctttctttatggcccaggacatacgaccctcctgcacacataactcacaatcttcctgcgtatcatcaaatgcttcaacttatcatcaaacatctcggctgaccgaaaaatgcaagttagctccctgctaccttggcgttgtcagtcctccacatagcactcttcagctyaaattgcattttataaaatccccagcaagcctttgtctcctggcagtcaactcgtctcttactgacctgcccattgctcccttgcaatgtattttcctactttctctaataaatctgcctttcttgacctaaactgtcatggtaaattcttcttactcctatgtcaccagccacagacagtcgccaca

SEQ ID NO: 806818 - DNA, 485 bp, Homo sapiens
cacccaatttatcttcagcatgacttcaacttctgctcacagtcaccttggaataaacacactgaagatttaaaaaccttctattccaaacttactcttcttcctatgttaatgatgttaccgcctactcacctgcttaactagaaacctgagacttctttttacttctaagcataaaatgattctccaatgtgcctcccttctctatgccktggtttaggtccttttatctcgaatatggattacttaatagctaacatttcctttcctggtgtgtagggctccatcttaatagagcttgaagttaccaatccccttggaggacctacttatcgagtacttcaactttatgtaagccaattacatgacaatattttatgtcttataaatacagataatgaagcaaaaagagatagaaaagggtcgagtttttccctcccaaaacccccaatgattaagaattttccatgtgtaatcatgtgtac

SEQ ID NO: 806819 - DNA, 596 bp, Homo sapiens
attttttatttcgtatcctataactttactgattcattaattagttctaactggtttttggtggagtctgtagggttttctatatataagatcacgtcatctgcaaacagggatggtttgactttcttctttccaattcgaatgctctttctttctttctcttgcctaattgctctggctaggacttctattattatgttgaatagaagtagtgaaagtgggcatccttgccttgttccagattttagaggaaaagcttccaactttttcctgttcagtatgatgttagctgcaggtttgttatacatggcttttattatattgatgtatattcattctatgcctaatttatgtaggatttttatcatgaagggatgttacatttcattatatggtttttctgtatctrttgagatgatcagagggtttatgtccttcattctgttaatgtgatgtatcacatttattgatttacttatgttgaactatccttgcatccctgggatgaacaccactcgatcatggccgtcagggaaatagatatcaaaaccacaggaagatatcccctcatccccattagaatggctattatcaaa

SEQ ID NO: 806820 - DNA, 636 bp, Homo sapiens
ttattttgctaaagttaaggacatgccgggaggaaataagcacagaatcacagaaactgtgcttttctccaacgatgattttgatggcttcagtatttaaagggaacaggtaggctggagggcaaagagggaggatatggtaatccatatattgccagagaaaaggagcaggcaggggaatagtcagttaggtaatagtaaatcagtaaagtgctcagtaagtcggcactttacataagataaaatggaacataaagtagcctgtagaggtgtttgaccttttatttgtagctccctgcttaggaacaaagggactcagctttcagggactcagctttcagcttacttttctaccttttgcatagtgaattgaagtcctgcgtttttattttcctttcacagtagatttcaagattactttgtagttccttttgtttttaaacagagracatataaagtactatgtgaagttacttggactaggcttttttttctacctcttacgtggatatgttagttatttataatatgattaggtttattttcatttttatttaatttagatatgcctcctcatctttgtggacttaattttattatttaaatacataacagattaaaaaggttctaaaaacc

SEQ ID NO: 806821 - DNA, 607 bp, Homo sapiens
tcatcacggcattctgtggccttgtgttctcttgccagcaaagaatggaacgttcagccccctagacatgccggctgctggattttttaagcaatcatccagcttagataaggggcgtgggctgctggggaatgctgccccaaagcgctgtctccagagcagctgccccaggcatgcttaattccctccctgcccactgtgtgcacccccaagatgcctctcaatatccagacctgcagttccactctgtttgttaggccccccaggagagcgagcctgcagtccgccccagcagaggggaccaggccagggatgcctctttcctctctggagtgttaccttggagtcctgaggccccgtgacaagaccccacacggccgaatcctcagtaacagccctccactgacttggtatccagtgggattcctccctccatcccattctctagggggcagaagcamatctgcccgtcctgtccgcctccccttccatcctgcatcctgtcttctcctctccccgcctcctgctgtgtggcccatgagcccaggagggacccagtctactctgtttacctctcccgctgcccactgagagtcatggctgaggt

SEQ ID NO: 806822 - DNA, 651 bp, Homo sapiens
tttccaaattataaaagtttctaagtatcattttaatggctgcagggtagtccatcaagtgaatattctgcaacttaattattctatgatttttgaacataattcagatgatttccttttttctttttgctattttaaacaatactgaatcttctaagcatatttagacatatatttctcttctttctttttttttttttttgagatggagtttcgctcttgttgttcaagcgactctcctgcctcagcctcccaagtagctgggattacaagcatgtgacaccattcccagataatttttttgtatttttagtagagacagggtttcaccatattggccaggttggtcttgaactcctgacctcaggtgatccacccgccttggcctcccaaagtgctgagattacaggcatgagccactgtgcccagccttcttttttttttttwaaaaaaaaaagaaatggtgttggctcttttgccctggagtacagtggctattcacaggcatgattcccactaatgatcagcatgggagttttattttatttttatatttatttatttatttattttttgggatggagtctcgctctgtctttgaggctggagtgcagtggcccaatcttgactcactgcaacctctgcctcctg

SEQ ID NO: 806823 - DNA, 590 bp, Homo sapiens
cttatttatgccccattctgtccctctctctcgttgcctttgttctgtggtctcctgggtgatggagttattgtttgtgtgtagggatgtgtggataaaagggagctgatttctagaggtgagatggccctgtggttaacggttggaggctgctgttgacaaggcctgttgctgtggcagttttgctccggaagtggccattttctgggcagggctccaccagagcaccatctgtctgtgccttttacttcctgtcaagaggcagcaggcttcgtgagctggggaagtgccagaagcagccttcgaattagacagacctggacccaaaccctttctcttcccccmacccattttggcatcttggcacgagactgtccccatttctggaaagggtgttcacaagaacagtctggctgggttgttgggatgaccgagtgtgatcatgcgtctctatggctggccatggtgtttattcgatggcaggtattaccaggatggagcgagtcccagtaggaagggcctttaggatgtcatctggttccacccaacagggatgggaactgtaattccccactctccctgtggagaat

SEQ ID NO: 806824 - DNA, 590 bp, Homo sapiens
cttatttatgccccattctgtccctctctctcgttgcctttgttctgtggtctcctgggtgatggagttattgtttgtgtgtagggatgtgtggataaaagggagctgatttctagaggtgagatggccctgtggttaacggttggaggctgctgttgacaaggcctgttgctgtggcagttttgctccggaagtggccattttctgggcagggctccaccagagcaccatctgtctgtgccttttacttcctgtcaagaggcagcaggcttcgtgagctggggaagtgccagaagcagccttcgaattagacagacctggacccaaaccctttctcttccccccrcccattttggcatcttggcacgagactgtccccatttctggaaagggtgttcacaagaacagtctggctgggttgttgggatgaccgagtgtgatcatgcgtctctatggctggccatggtgtttattcgatggcaggtattaccaggatggagcgagtcccagtaggaagggcctttaggatgtcatctggttccacccaacagggatgggaactgtaattccccactctccctgtggagaat

SEQ ID NO: 806825 - DNA, 631 bp, Homo sapiens
ctgcttttatgaagtgtttgttcaagtattttgctcattttttctattgggtcatctgtatttttcttactgatttacagtttatacttgatttatagatttgtttgaaatataaatcctggtgaccataaatatattgcaaatatcttctcccattctttagcttgccttttcactctttttttttcttcctttattgagacggcgtctcactctgttgcccaggctggagtgcaatggcgagatctcggctcactgcaaccactgcctcttgggttcaagcgattctcctgcttcagcctcctgagtagctgggattacaggcgcccgccaccatgcctggctaattttttgtatttttagtagasacggggtttcaccatgttggccagactggtctaaactcctgacctcagatgatccactcacctcggcctcccaaagttctgggattacaggcatgagccaccacgcccggcctcgttctcttaatggtgtttttgataagcagatgtccttgattttattaaagttcaagtctcttattttttccttatagttattactttgtgagacctacttaagaaatattgcttagtccaaaataatatattttcctgtgatttctttt

SEQ ID NO: 806826 - DNA, 607 bp, Homo sapiens
tctctcctttttcttttccccacagtgtcccaccagtggcagagtgggctgttcctcagtcatcaagactgaaatacaggcaattattcaatagtcatgacaaaactatgagtggacacttaacaggtatttacaaataaaaattagtgaaatatgatmtttgttttcaatgtaaactgtttctagatattgggtcatagatattttccatgtctgtgtgcttatttcttggcagtgtttcctttgtctctgttatctcatgttcttatccactgataactctttacatagttatatcattctctcatgccccattgctttgtggtaaaatggaatatagaccagggatactcctgtacgctgaaagccactgatatgcaaatcaaggcactagcaaagaaacacttctttgaacaaaaactagcttcaacttctgaagtccagctttgaacttgatgaacttgaagctgtctgttcactaggttagagttggaggcagcaggcagggtaaaagcagggagttgagaacatggctctgtctcagataactgcctagatagggctcaccactttggatatttctttatctattaatataaaaggccag

SEQ ID NO: 806827 - DNA, 590 bp, Homo sapiens
tggtagtgaaactttgaaccacaaaagacagggactactttaagccttcgcttttgcagattgatacgtgtatctcgtccttttgcagttacttgtcattatctgcctaagaatagtatttctaagaagttgtttctgtgtatcttctggggaagaatttgtccttcagttacatgtgattgcaacatgttgataaaagcaaaagaaaagcaataaaatcatttggttgaatatctcatttctttgaagccaaacagtttttgagtgataagaaagcaattcagtggaacttactgttcagcatcttacagaacaggattcatatgtacttgtgtattcayatgcgaattcatgcacacattatcacctaagagagtctgagtgtcctggtcctcaaagtatgtggttttcagaatttacactgtatacaaatctagaacgacatttgctgcctaaaggacaatgacgttagatctacacagcaagagttgaatagagctttgttcatcttctcacaaatttgggtggatctaaattgcttattttaggacaatttaaacttcctagtttaaaactttatggttatctgg

SEQ ID NO: 806828 - DNA, 518 bp, Homo sapiens; identical to SEQ ID NO: 803188

SEQ ID NO: 806829 - DNA, 518 bp, Homo sapiens; identical to SEQ ID NO: 803189

SEQ ID NO: 806830 - DNA, 541 bp, Homo sapiens; identical to SEQ ID NO: 803190

SEQ ID NO: 806831 - DNA, 552 bp, Homo sapiens; identical to SEQ ID NO: 803192

SEQ ID NO: 806832 - DNA, 568 bp, Homo sapiens; identical to SEQ ID NO: 803193

SEQ ID NO: 806833 - DNA, 630 bp, Homo sapiens
ttaagagtagagggactttaattttttcactgccatattccctgtgccaaaatgatgcctggcacatagttggcattcaataaaaatctggcccagtgaacttcatgctactctgaaaagtttattaaatgtatccaaggtgaccaagacattaacctgcatttataatgaactatataaataaatgtagtcaacaaatattttattaactcaaaagtaagaatgatctgtgttatcttcacatggtttgtttaccaaatacagaccatataccagtcgtttttaggcaccggtgataaaaacacccaggtccttatcttaaggggctcataaatgtgtgtgtgtgtgtgtatgtgtgtgtaggaagtgggtgggaaagggaatataagcaagtaaacagtgtcactacactgtgtggtcaatacaattatggaggtaaacacaggtgcyggtgacataggggaagggcaggtagatctgaagggggatgaggaagggtgttggcaaagctttcgagaggagctgagaatacagttgagttgggaagaacaaatagtgattatccaaagaaagaatagggaagcgtaaatagggctggagaagcaacttgttctgggtagggaagcacca

SEQ ID NO: 806834 - DNA, 604 bp, Homo sapiens
ggtgtgatagtcctttgaaaactaagttgccgcaggcatacaggacaacataagaaataacaatagttctgtctctttgaagtggctcctagagaagttggtgaatgaaaaagttccaagtgcattgtacttgtgctctgttctctttggttttccctgaattttcgtgactgcatcgtccatacaaagggcattgagaaatmcacacagttgtgttccttttttaatttaattttatttttttgagacagtttcgctcttgttacctaggctggagtgcaatgacgtgatctcggctcactgcaacctctgcctcctgggttcaagcaattttcctgccttagcctcccgagtagctgggattacaggtgcccgccaccatgcccagctaatttttgtatttttagtagagacggggtttcaccatgttggtcaggctggtctcaaactcctgaccttaggggatccacccactttggcctcccaaagtgctgggattacaggcatgagccaccacatctggcctgtgttctctcctttgcagagtctttaagacagttgtggcagtttgtctgaacaccttttcatcatgtggcaaaagaga

SEQ ID NO: 806835 - DNA, 551 bp, Homo sapiens
ctggctgccatattggaaaggaacaaagcaaccacaggaggaaatctgagctgtcctatacaggctattaaaatacgagctaccctaaagggaattgaactttgaataaatagactcaatgtttaaattgaaaggaggcagtttaaattggaaaaaccctgaactattgtcaattggccaatcttagtagctcctactgcccagcaggctagcgtctcatgagaaatatcagatgaagctatagagacaataaagaatagtttctttgaatctctgagttgtaatgtgaataaattcacggtctccatatatttgcattctgtgtctcctctcccccascaaacattttggatcggattccaccctcctgcaagcttctctgaaaagtggcaactgcctaacctgtgttgctgttcatacttagtgttgtcctaggctaaggtgaaaaaattggctggttatggggctctattggaggtttctattttcccttcgctgacaaaggttagacaggataactgaaagcctcactattagagtcacatattcct

SEQ ID NO: 806836 - DNA, 506 bp, Homo sapiens
tgtggtttgtaaattgactccaaagctaaaagaggtggttgtttggtcacgtttaagattattgcgtactactctttgcaggccccgccctgtgtcattgaacttatgacttgaagccctgagtataggagataatttttcttgttccttgtttggttttwgtggcaggtggttttttattttattatttttttgatagagtgcccatatatcctgctgtttacatatagttccagaataagtttctggtttggaagataaattatatggtcacccagacagtactagagagatctggtcatgataactaattacattttggttaacatggttatatcacctgaaggagtgcttatttaaatttggtcttacctttttttctctttctatttggtcaaatgcagcaaatatttatatttacacttctctatttggattaattcttcagttgcaatttaatttatccagatgcgtggaatagaaccaaaactgcattctaattctgt

SEQ ID NO: 806837 - DNA, 665 bp, Homo sapiens
aagctttcttcaaattctgtctatagggaaacgtagctgtcaatgtctcattcccgaagacttccagatgcctggatctttagagttctccacctcaccccgagttgattacacaaatgttcctggggctttgcttagtgccctgctctgtgccaggccccacaggcagagatggcagggacccaggcctgacgttggagagctcctgacccactgccggaaacacacgcaccatcacaccatgagggagctcccccatgcagatctcatctgtgtcagagtgaagccagaggatggacggtggagagtctagaaggagaagagaaaggaggatgagttctcawacatgagcaagcaggagaggccatttaaaatgcacactctggcctggtgcagtggctcatgcctgtaatcctagtggaggccgagacaggaggatcacctgaggtcaggagtttgagaccagcctggccaacatggtgaaaccctgtctctactaaaagaaaaccaaaaattagctgggcgtggtggtgcatgcctgtaatcccagctcctccggaggctgaggcaggagaattgcttgaacccgggaggtggaggttgcagtgagcagacatcgcaccactgcactccagcctgggtaaaagagtgagactctgtgtcaa

SEQ ID NO: 806838 - DNA, 546 bp, Homo sapiens
ccacttgaatttaagcatcactgcagttggcctagttgatggacatgctttttgtctgttgttgagcaaattatgcaaatctgacttttttgtcaaagtccatgtttgtcattctaggaatgtatgattttaagaacttctcttaacccagtccaccaggtgatatttttgctaaaccttacatggatatgtagaagattcattttcttataaaccttttgtctctaccatctaaatctttggttgactgttccctcccctggttttcttgtcactccagtgctgtctcccttctaccctgtgaagaggttgaaatataaggygaaggcagggaactgaattgtgcatgaaggcatgcaatcaataaggcaggtggctcagtaatgcctacctgattcctgctcccactatccatttcacaagcttaggcatttcctttacttgctgtcatagtaaccaggactcctgccagtcttcccgtttatcttttatctgtgagtgcatctgaagggggatggggagtatagaaatggaaacctctcagca

SEQ ID NO: 806839 - DNA, 550 bp, Homo sapiens
ctcatgggcagcatgaccaataggtgtagacctattgcaactggtgggtaactttttgcttaagtcagcttgtaatggctgtgttgtgttctctggctagaagggtagataagggataagttaccctgaacctaaagcacgagaactggccccaacaaccaagagtccagatcacgctatgctaaagcccctcactccaatcttcagtcccctggtacctccctatgacacaggtggctcacagaaccatcactggggacagactgctgggtggcatgctgctgcagggctaagaatcgcgtttttaaaggttagttcatttaattaaaagcacagcagggtgctgcctactttcattaagaaaggtcatyttccccagcatattctaatggaaaccagggcagcattcagagataggaaccatcacaagttgattttgctctcttaaggtaagatacggcaaagaatgaccagccacctcctagcagggtgctgaggctggctggtgcagtaggtggagatttagcagatgacaatgtatttctgaaaa

SEQ ID NO: 806840 - DNA, 601 bp, Homo sapiens
tacccaggttggtcttgatctcccaacctcgtatctgcccacctcggcctcccaaagtgctaggattacaggcatgagcgactgcgcccagccatttttggatttttttactagacacagggtttagccgtgttgcccaggcttaaactcctgtcctcaagtgatctgctcgccttggcctcccaatgtgctaggattataggcttgcgggattacctggcctgcaagtatatttttgaaaccaccttactgaggtacaactgacatacactaaacatattaaaactgtacaatgtgatgtttcgagagagtgagcatatccttcctcctgsaagtatcttcctgcttctatgtaattcctcccatccccacctccactcccactgtaccccaatctgtttcctgtcactattgataagttgagcaagtatatatttaatctttaagagcttcctcgctttctgttcccttttcataaatttcctgctttttaaagtattgctttattatcttatatctctctggagttttaatttgattaaaatattttttggtccccggagttattctctgcagcctccaaaacagtcttactagttta

SEQ ID NO: 806841 - DNA, 605 bp, Homo sapiens
cctctgataatgcctagtatagattcttcaggattttctaaaacaggtgatctttggtctatcattctctgaactcctgtcatattagtaaagaaaaagtttttgtgagagttataaaggtattcaaatcttctaaaattttccagcattaattttgtttttttttttctgcctgagtgttgatttataaagtgggccctatatctgggcatagttgggggagacattttcttcacaatatagagagtttccaaaagaccacccccatgctttttgtcagcccttttctcctccccacagggagatggtatccaagtccatcttcrgctaaaatccgtgcttgtattgacagccccacttcctccttctgaaagcagcattttaatttggagctgttggtgcttaggtataaaatctatttcatttaatgctgctatgaaaatttcccagttttgaatttaagacagtctcttattgttttttcctgctcttgcatgggggaccatctgctctgccaagctttcaaaactttgctctcaagttaggtggcaaatgggctaacaatttggtatatgttaagagcttgttataaagaatacttttgc

SEQ ID NO: 806842 - DNA, 603 bp, Homo sapiens
agctccattttctgtcctaaccactgtttgtactttgcactttccacctgcttctgatatgtgttctcttatcaccatggattccaaaccttacagagcagagctgggtaaaacaaacaaacaaacaaataaacaagccaactcccatcactctgaggaaggaccctgctggccctggggtcccctccatttgtccagggtgggaatgagagaaggatcctagctgactgcctgggttcaaatcctgctttgtgaccttggacaagtttctctacctctctgtgtcttggttttcttaaatggagacagtagtagtacctacacctgatagggttgttgctaggattaaatctgagttgatacaagtgctcagaaccatgagtagtacagagcacatgctccatatgtgttagttgctatcattatcactttcatcattaccattattattttgcaacatarccattttgctcatcatcacatttgtaaaagacagaactggaatctgcgatcttcttaaggcctcaggtgtattattttgagaaatgcatgtaattatgtatctcctttttagaatgagaattgggggcatgttccaaggtg

SEQ ID NO: 806843 - DNA, 630 bp, Homo sapiens
tacataaattccctcatttgtcatcatcaggagttaacaggcagcatctaaaattagtaaatcaaggccgggtgcagtggctcacacctgtaattccagaactttgggtggctgaggcgggtggatcacttgaggccaggagttcgagatcagcctgggcaaaatggtgaaaccccgtctctactaaaaagacaaaaattagctaggtatggtggtgcacacctgtaatcccagctactcgggaggctgagggaggaaaatcgcttgaacctgggaggtggaggttgcagtgagccgagatcctccactgtactccagcctgggtgacagagygagactgtctcaaaaaaacaaaaaaaaaaaaaaaaaacttgataaatcaagaaatagagaattcctatatatttaaatttatgtaggaaaccactggagaattaacatgaccataaaccttttaaatgaccagaaagagggacacacacatgcatacagaagaaagaaaaccaagttcagtgtcacgttcataggcatggccttaaacaatgtactcaggaatgttaaaataaaaagatgggcaaagaaaaaccaggtacatacaaacaaaagtaaaacggacttcttaacatgagc

SEQ ID NO: 806844 - DNA, 607 bp, Homo sapiens
acatttgagcccatttgccccatcctgctcgttctcctcctcttcctctttttctctcccatatatacagtgatatgcagggcataccactacatcatagatctcagtcctcaaagcttacaaaattacttccatttgtgaggtaaactaactcttgttcctcagtcttgaatttacccaccaggcttgctgcaaagaatgagcttaaaaataacctgatgatttccacgtggcagggccacgggttacagagcacagcctgtgcccctaggacaggcacccacattgttctttttggaaggagtggatctgatgccagggaaaggtgacacaagaaagaagctggccacgaagcctctgagctttgtgacctgatgctcacctgacgcatggccaggctgtctcctctctgccaaayagggagagaaactctgacttggccgacatcgtgggtgtgttaggtaatatttgccaactgctttgaagatgaaaagcgttatggggcactaaatgtgataattatcaattataaaacctcactactccctggaacactaggggcgaatgagcaggaaatataaatgtttgtgacaggaagccaggagcc

SEQ ID NO: 806845 - DNA, 480 bp, Homo sapiens
aagctgaggctttcatggatagaatcaatcaaaggttaaggtcaaagacattctgagacttgcccagccttaagatgaagcaatagagggccctttggtgcttggtggctgcaaccgtggctgagttctaggaggcagtttattttttgttgcttgtgtataatttttaccccaagaatcccttatggtgctggctgtgaccgatgaacaaactcttagtgtttaatgtgtgtgtctgtaaacacarggagaagggaaagctgcctgaagattggacaaagagccttgtaaatgtcttggggtgaatgacaatgggaagattaggaggagtctgctggggagctgcctgcaaaggtcccctcttattcaggaattgtatcatcagctgagtcctttggaattagcagacagttgtgaagataaaatagtcttgtagcataagaagccgtaggtagtctgggagctataaaagctcctcat

SEQ ID NO: 806846 - DNA, 591 bp, Homo sapiens
atgggagagattgttctgtactttttcccttcttcttttgcaatgtttgttttaggttttggtattaatgttattttgacttcataaaatgaaatgaaatgttatttcttctaaactctgaagaaatttatgtaaaattggtgttattaattccttaagtgtttgagagaattcagcaaagaaatatcagggcttgaagttttctttayggggaggttttaaatcatggaactaattattttaataattagttattaaattattatttaatctatttagagagtttttattcttctgtcagtttgatatgttgtgtttttccgtgaatttgttcattttatctaaattttcaattaattggcatagggttgcttataatatcttacatctatttaatgtctgtagtgaagtctccctttctttggtcatgacattgatggtttttttccttctttttttcataatcagttttgcctaaagcttatgagtttcacacgttttccaaagaactcatcttggccaattaaaattatcttcattgcatttgttttccatttcattatttctgctcttatctgtatcatttccttt

SEQ ID NO: 806847 - DNA, 667 bp, Homo sapiens
aactgtaacctaacctgatggttaaacagacagtagcctacgattgtaacaagtagccaagtctcagtcaatctgagcagttgagtttcagccaatcatggggaccaactgttcaacctgtgttcttaaaaggcgaacactgagctatcaccaattcagctgtttctgtacccacttctattttgtgtacgtcacttttctttttctgtctgtaaatattatccatgcagcagtcctggggttgctctgaatctattctggtttgggggtggggcggggtgggggggtgcccgattcatgagtcgttgtttgttcctacattctgttaaattgaacrtgtctaaagtttttctttgaacaggtagtgggactgagctactattcagaatattctctgtgccccactgtggctcgccatcataccttctgtatcttttgcttatcttcctgtcatgagactagcaaggtcttgacagcactcacctgaagccatcaatcaatcagctgaggaagacatcaatctctgtgattgtaaactactgagatcgggtagtttgtgtagtttgtggccttaatctagcccaccctgactgacacattgactctaaccaatgaccacctaacccattgttttatctttatttgatgccaggattgcctttttgtt

SEQ ID NO: 806848 - DNA, 667 bp, Homo sapiens
aactgtaacctaacctgatggttaaacagacagtagcctacgattgtaacaagtagccaagtctcagtcaatctgagcagttgagtttcagccaatcatggggaccaactgttcaacctgtgttcttaaaaggcgaacactgagctatcaccaattcagctgtttctgtacccacttctattttgtgtacgtcacttttctttttctgtctgtaaatattatccatgcagcagtcctggggttgctctgaatctattctggtttgggggtggggcggggtgggggggtgcccgattcatgagtcgttgtttgttcctacattctgttaaattgaacgtgtctaaagtttttctttgaacaggtagtgggactgagctactattcagaatattctctgtgccccactgtggctcgccatcataccttctgtatcttttgcttatcttcctgtcatgagactagcaaggtcttgacagcactcacctgaagccatcaatcaatcarctgaggaagacatcaatctctgtgattgtaaactactgagatcgggtagtttgtgtagtttgtggccttaatctagcccaccctgactgacacattgactctaaccaatgaccacctaacccattgttttatctttatttgatgccaggattgcctttttgtt

SEQ ID NO: 806849 - DNA, 628 bp, Homo sapiens
aacatgattggcacagctgccagcatctatgttggcagcttgattttacaggctgctctttgttagaaaatgatttggggctgcttttcattaaaggaaaaaccttaccgaggatttccgtaccctcactacctgcctaagtaatttcttcttaactccttatcagtatcagctcaaaccttgtatattactaatcctcaaaaagtmtgaattgtccctattctctggcactagttacttggggaaatgggtgcaaattccttaaaggggaagattagaagaacacattttcaggtatactgtggaaaatagaagggtccttcttcaaggaagcctaagtcttcccctcaatccacacatcagtcattgcaataaaaaattgtagactctcactcagttttcaaatgtatttggttggtgcaaaaataattgcaattttgccattaaaagtcatggccaaaaccacaattacttttgcatcaacctaataagccagtttgaaaactttacttcaagccggttttcaaactggcttacatttgaaaactgagtgagagtccacaattttttattgcaaggactgatgtcaaccttctattctccagctttctttttattattattatac

SEQ ID NO: 806850 - DNA, 579 bp, Homo sapiens
accacagattttcagggaattatgcctgttcaaccaataaagctgatgtagaaaaccagaattgttttaaatgatgaattctatcccattgggcacattctttcagctcactattgctattctgtcctgtggatttttgcttaattagctagacaaattgcacaaattctgcarttctatttttactttaactatggccaaagctccttttcagtttctcatagctttctacccttcagctgctagacgtccccagttataaggcaactcgaagtgtgtgcaagggacagaagtttgtatatctgaaactacaatttggtaaaacacaagacaaaggggggaggagagagggagagagagagagagagagagagaggaataagagtcctatttgcacttaccatgagccaaattgaatttgggggacttgaaatattttaattgtaaaatgtactatatcgggcttcattacagattatgctcttaaaggtgcattgaaattgaccatattgtattttatctaaattaagaaaattctctttaaagaccctgcattgaatctttttcatgctaagtatc

SEQ ID NO: 806851 - DNA, 579 bp, Homo sapiens
accacagattttcagggaattatgcctgttcaaccaataaagctgatgtagaaaaccagaattgttttaaatgatgaattctatcccattgggcacattctttcagctcactattgctattctgtcctgtggatttttgcttaattagctagacaaattgcacaaattctgcaattctatttttactttaactatggccaaagctccttttcagtttctcatagctttctacccttcagctgctagacgtccccagttataaggcaactcgaagtgtgtgcaagggacagaagtttgtatatctgaaactacaatttggtaaaacacaagacaaaggggggaggagagaggsagagagagagagagagagagagaggaataagagtcctatttgcacttaccatgagccaaattgaatttgggggacttgaaatattttaattgtaaaatgtactatatcgggcttcattacagattatgctcttaaaggtgcattgaaattgaccatattgtattttatctaaattaagaaaattctctttaaagaccctgcattgaatctttttcatgctaagtatc

SEQ ID NO: 806852 - DNA, 615 bp, Homo sapiens
tctgcagtacagtaggaaagaaacttgcatagatgagaaccacataggaaaacacgctagggatatgactttattttttaattttttaacttaaatcttattttttaattaattattaaactattgattattttttaattttacaaactacagccaattgtataaaaataatttgttcaataattcattttttctccactgatttaaaatgcctcctttggcagggtacaatagctcatacctgtaattccagcattttgggaggccraggcgagtggatcacttgagtctaggagttcaagaccagcctgggcaacatggtgaaaccccatctctacaaaaaaaaaaaaaatacagaaattagtggggcatggtggcacacacctgtagtcccaactactcgggaggctgaagtgggaggatggcttggccctggagatcaagggtgtagggagccatgattgtgccactgcactccagcctgggtgacagagtgagaccctgtctcaaaataaaataaaataaaacaaaataaaatgcctcctttattacatgccagtttcccatgtataatcctcatacagttgaacaccttaagagcaaagactgagattt

SEQ ID NO: 806853 - DNA, 553 bp, Homo sapiens
tgtgtgcacagaattactccctctaataaaaccccaaggtgagtctgatgggaaacagcgcaccttctctttggggcttgatttggcccctgcttgcctgggatttctcctgcaggctcctgcttcctctccatgctgcacgtgcactgacctctgtgctttttctcctgccagctgatatgtgccattttgcctcaggactttgtcctcacttctcccactcccatggccattcgtcctccctgtcgcactggtctttgcacacctggctgactctcatccttcaggtcttagctcaaacgtctcctgagagatgctctttatttgctccattcccctctgcgtgggagtccrtcctgtaccctttctctgctctttcagagagatcttattcaggctggtggaggctttactaccaccagttcattaggcccttctaatacctgtcacctgtctgaaacactccttaagctcccaaccacatggttgtcttgctgcctttccatctcttcctgatgcctttccccacaatctaagatatttccagaggatc

SEQ ID NO: 806854 - DNA, 624 bp, Homo sapiens
aggtacatggtgctaaaatacaattttcagaaaaaggtaaaatcatgactgtcatacagatgtaaaaataatagtcaaaaaaatgtattttactcataagggaaccagggaaatgttataactggttcaaaggaaaagctaaaaggaaaagctaacagattatatggaatcaacaaatgttgagctgaattgcaaatgacgacaaaactggtgtttttacagggaggaggacgtcaattcagtcaccactagacaggacagcacttgcacctctgttacctacaattaagaaagagatgcaaaatatctcaaagaatgaacagggccatagttcaatgctacgagtcttgccttgcaagcacccttcactctgttgtgtgagtctggcaaaacacccatccccatgcttaataaccatgccagcctgctctagcagctcttaacagatgatgttgctrgggagaaaggaaacaagaggctgactgtactcttttatgttcccaccccaatcccaaacagacaagcaattctcctagccagtgttgtcttttcccctagtaaattcactctcctactctgtaagatgattattctttccgcatatctcccagactgatcgtgctg

SEQ ID NO: 806855 - DNA, 522 bp, Homo sapiens
tacagtgaagaagacgaatgaaggaatccaattgcccgtctataccttgacacacctttgacaattcctttgttttgtgggtacacatttcatggggagatgccatatattttacatattaactgtgactttggataaaacaaaaatgcagacacttttagcaaacgggttatgtaacaattagataaaacattctaataaatgrcttacggcatagtaggagcttcataaacattctctctcatttgagggcatattaggaaccacacagagattgcctgcccatgcctggaagtctaattacaggacatcttttttctctaattcttaagtttcagtttctcttaagaaaggggatgtatgtcctgagaagcacttagtgtgtaaataatttcattgcatcttaagataaagcaaacatctgcattttgcagtgggtgatgggtgcacatccaagaaaattacttggcacatgttttcctccctttgggattctcccaaaatagttttaattcaactgtc

SEQ ID NO: 806856 - DNA, 522 bp, Homo sapiens
tacagtgaagaagacgaatgaaggaatccaattgcccgtctataccttgacacacctttgacaattcctttgttttgtgggtacacatttcatggggagatgccatatattttacatattaactgtgactttggataaaacaaaaatgcagacacttttagcaaacgggttatgtaacaattagataaaacattctaataaatggcttacggcatagtaggagcttcataaacattctctctcatttgagggcataytaggaaccacacagagattgcctgcccatgcctggaagtctaattacaggacatcttttttctctaattcttaagtttcagtttctcttaagaaaggggatgtatgtcctgagaagcacttagtgtgtaaataatttcattgcatcttaagataaagcaaacatctgcattttgcagtgggtgatgggtgcacatccaagaaaattacttggcacatgttttcctccctttgggattctcccaaaatagttttaattcaactgtc

SEQ ID NO: 806857 - DNA, 508 bp, Homo sapiens
aacacattatatacgcttttactgtccttaaaagatggcatatggggccgggtgcagtggctcacgcctgtaagcccagcactttgggaggccaaggatcacgaggtcaggagatagagaccatcctagctaacacagtgaaaccccgtctctacaaaaatacaaaaaaaattagccaggcatggtgctgggcacctgtagtcgcagctactcgggaggctgaggcaggagaatggcaggaaccctacccaggaggcagagcttgcagwgagccaagattgtgccactgcactccagcctgggcaacagagtaagactccaactaaaaaaaaaaaaaaaaaaaaaaagatggcacatggaccaggcatgatggctgacgcctttaatcccaacattttcggagcccaaggtgggtggattgcttgagttcaggagttcgagactagcctggacaacacggcaaaaccccatctctacaaaaaatacaaaaattagtcaggcatagtgg

SEQ ID NO: 806858 - DNA, 620 bp, Homo sapiens
cttggcacatttttggctgtgctcaagttggtggcatctaattgcttaagtctttgatcagtctcctcagcatatgcttgtttttgatacaccaatggctccttccgcttttctgtgaagtggctgacctgcctatccctcttatggtggaacctcccttccgtgagcacctaggcatccgtggcacggccagggtggagatgggtctctgccctgccacgcacgactgcttagccactttccattggccaagacaccgcgctgcctagtgacattggttttrgcaaatccagggtcagtgtgacagccagcaggtggacacacacagcagggtgagagatggcagcggctcccggcgatgaggaaggtggggcttccccagccaggcgaatccgctgtggttcttcatgcagcattcgcagagcagtgtgcagtgggactcgggaagatggggcgagcccttgaaccctatcctctctcatcaacagaacggatgctctgctcctgagactgtcgctggtggttggcaaagaggtgttttacaccgccctctgggggagcgtcctggccagcccgtccatccgcctccctgcctcagtcttcgtggtgggccacatcaa

SEQ ID NO: 806859 - DNA, 620 bp, Homo sapiens
cttggcacatttttggctgtgctcaagttggtggcatctaattgcttaagtctttgatcagtctcctcagcatatgcttgtttttgatacaccaatggctccttccgcttttctgtgaagtggctgacctgcctatccctcttatggtggaacctcccttccgtgagcacctaggcatccgtggcacggccagggtggagatgggtctctgccctgccacgcacgactgcttagccactttccattggccaagacaccgcgctgcctagtgacattggttttggcaaatccagggtcagtgtgacagccagcaggtggacacacacagcagggtgagagatggcagcggctcccggcgatgaggaaggtggggcttccccagccaggcgaatccgctgtggtwcttcatgcagcattcgcagagcagtgtgcagtgggactcgggaagatggggcgagcccttgaaccctatcctctctcatcaacagaacggatgctctgctcctgagactgtcgctggtggttggcaaagaggtgttttacaccgccctctgggggagcgtcctggccagcccgtccatccgcctccctgcctcagtcttcgtggtgggccacatcaa

SEQ ID NO: 806860 - DNA, 491 bp, Homo sapiens
tgaaaaaccagattgttttgttattaaaaaaggaaagttggccaggcacggtggctcacaactgtaatcctagcattttgggaggctgaggcaggtggatcacctgaggtcaggagttcaagaccagcctggccaatatggtgaaaccccgtctctactaaaaatacaaaaattagccgggcgtggtggtacatgcctgtaatcccagctactcaggaggctgaggcaggagaatctctygaacccgggaggtagagattgcagtgagctgagatggtgccactgcactccagcctgggtgacagagagagactgtcattcataaatacataaataaataaataaaataacttatttgtgaaccttcaactacaaggtaagtggtttattttctatctgtgctctaagattcttttagactataaaatcttgttaatcagattatcagaaatgaagaagaaataaacctttcagttcagagaacttccaga

SEQ ID NO: 806861 - DNA, 491 bp, Homo sapiens
tgaaaaaccagattgttttgttattaaaaaaggaaagttggccaggcacggtggctcacaactgtaatcctagcattttgggaggctgaggcaggtggatcacctgaggtcaggagttcaagaccagcctggccaatatggtgaaaccccgtctctactaaaaatacaaaaattagccgggcgtggtggtacatgcctgtaatcccagctactcaggaggctgaggcaggagaatctcttgaacccrggaggtagagattgcagtgagctgagatggtgccactgcactccagcctgggtgacagagagagactgtcattcataaatacataaataaataaataaaataacttatttgtgaaccttcaactacaaggtaagtggtttattttctatctgtgctctaagattcttttagactataaaatcttgttaatcagattatcagaaatgaagaagaaataaacctttcagttcagagaacttccaga

SEQ ID NO: 806862 - DNA, 612 bp, Homo sapiens
acttttttttttttttttttgagatggagtcttgctctgttattgggggaactcacccccagtatttcaatgtaggttctttctattttccgtaagtgtcggccggctgagaaataaagggacacagtataaagagaggaatgttacagctgggccaccaggggtgacatcacgtatcagtaggaccgtgatgccctcctgagcctcaaaccagcaagtttttattaagggtttcaaaaggggagggggtgtaagaacagggagtaggtacagagatcacatgcttcaaagggcaaaaagcagaactaataataagggtctaacaaagatcacatacttttgagggaacaggacaaagggcaaaagcagaactactgataagggtctrtgttcagcggtgcacgtattgtcttgataaacatcttatcttaacagaaaacagcgttggagagcagagaaccggtctgaccacagatttaccaggatggagtttttccccactctagtaagcctgagggtactgcaggagaccagggcgtatctcagtccttatctcaaccgcataagacagacattcccacagtggctgtttatagacctcaccccaggaat

SEQ ID NO: 806863 - DNA, 539 bp, Homo sapiens
gtgtgtgtggtttttgctactgaatgcttataaaacagggcttacccactggtgctcctcactgcctttgtgtagacctttttgtctgtgtttagttagatacaaatgcctttatttggagcctgccatctccgattcactttgccccrtaggcttatgtttcctgccggcttagcacagctgctcatttgtttaatttcatgaccagccccagaggctatttctctctctcctacccccacaaagagagtaatcatatagaaatgtttgtggttaaagagcgggttctcttaaatgcacattgctaagtgaaagaagccagtctgaaaaggctacacactgtatgattccaaccatgtgacattctggaaaaggcaaaaccatggagacagtaaaaagatcagtggtcgccaggggttggggagagggaggcagggatgaatgggtgaagcacagaggatttttagggcagtgaaattattgcatacagagctataatggtagatccatgtcattgtccatttctccaaatccataca

SEQ ID NO: 806864 - DNA, 715 bp, Homo sapiens
cttagggcggatcctgccgtgggatttatactggcacaccgacactaagaggggcctaattctcccttgggggagcagccagagagggcaacacaagtgggaagtgtgcaagggaccttgagagggggaaagggaggaaacaggtcaacctcccagagcagcaaggtaagacatccctgatttaagggattgagccttccagggcaggcaaagcgagacacccctggtttgaggggttgagtcttctgcaagtttcatgaacctcacacaaacctccagtagcaagaaaaatattcaggactccccttgcctttcttctcaggggaagaaagagtaactccactcctgccggtccctcccctagggaaaggggaaggagaggggagaacagcggcataagcggctggcagaggcagagaaagagagagtcaaagagagagacagagagagagagagagaaagagaggcagagagagagagaaagagaggcagagagagagagaaagaggcagagagagagagagagaaagagrcagagagacaaaaagggagtcaaagagagagaaattgagagacagagtcagagagagagagagaagtagtaaagagaaaacagtgtaacctattcctttaaaagccagggtaaatttaaaacctgtaattaatgattgaaggtcttctccatgaccctataacactccaataccaccttgtt

SEQ ID NO: 806865 - DNA, 616 bp, Homo sapiens
tgagattttactctgtcgaattttagagtatttgaagtgattgttagatttcacttctaaggagttgattgattaaactttggaaggtagttgtgtttgttttctgattttaaaggtgacgatgcttattcttttagtaactaagtgaagtgaaaaagatgggtatcacccatcatcttcccaccagaagtaaccctcgttaatgttgtagtatatttccttagcatttttgtggatctatttattctaaaaagagaattgagattttatttcatatgcaatttggtatctaaataggttagttttttagattggtttttcaaagcaaaaaaagtatcttttttgttttttgagacagggtcttgctctgttgcccaggytggagtgcagtggcgctatctcagctcactgcagcctcgacctcctgggctcgagcgatccttccacctcagcttcccgagtagctgggactacaggcatgtgccaccatgccatgctaatttcacacacacatgcacccacacacacacatatatatgatacatatatatatatatacacacacacacaagtatgtgtgtatatatatattttttttcttttttttttgagatgg

SEQ ID NO: 806866 - DNA, 500 bp, Homo sapiens
tctcatgagatctgatggttttataaagggcagttcccctgcacatgctgtcttacctactgccatgtaagacgtgactttgcttctcctttgccttctgccatgattgtgaggcctccccacccatgtggaactgtgagttaattaaacctctttttctttataaattactcagtcttaggtatttcttcatagcagtatgaaaatggacraatacacgaattatatttgcaaagatgtgatttccaaattaggtcacattcttaggtttcgggtggacacaaaatttggagggacaggattcaaccctctacactataccatgagataggcctgtgaagagggctggctggaagatggacagcagtttcacaacatatagtggctaatcccaagccaggaagaaaccactgtaattgcagaaatgcagcatgtccttggaactgtcctcatctggctaggcatggcccctctgaaggttcctttgccttggctggtgg

SEQ ID NO: 806867 - DNA, 470 bp, Homo sapiens
agttggaaggtttccagtgagatgaagggggtggtgcgtgtgaaggagtgaacttcaaacccacccataaactgaaaagatggacgctcttggaacgtagcgccttttgcaactaagaacataccgttacctccaagtgcccggattgatggagacaagccctgccaaattccattctctcggctggaaattccaggatagtgctggtaccggtaagtgacattttcttggaaagtcaccaggggttataaagtacttccccaacccctacgtttctaaggtatgaaaggtaaaggtcagcrtatagaaaatttaaattatcactaaaagcatggcagtggatttaactaagaaaaatccaaaaaggatagagttcaactgagtcattgcaagcccgtttcttaaggactccctccccactccgtgaaataagatctagcaacggaattgccaactcaaagtctcactga

SEQ ID NO: 806868 - DNA, 594 bp, Homo sapiens
agccaacttccttttgttggatcctttctagctccaagaggccatggtgggcaagtgctaggctctggagctacactcccaggtgcaacttctagggccaccacagagtagctgcacaactctgaacaagttatctgatctttccatatctgtttccttatatataaaatgrgattgtgatgataaaaatagtaacccaactcatagggtagttgtgaggatgacgttagttaatgtatataaagtgcttaaaaacagtgcctggcttttagtaagccctcagtaagtgctagctattgtggtcattattttgctggagcatattcttaagtaatcttttcagacagagtaccaggaaggtaaaacttttagtctttttatgcatgaactgccattattttgtcttctcgtttgattgacagattgctagacataaagatccatggttaaatcacttaccttcagaactttgaaggcattatcccactgttttctagcatccagtgttactgatgaagaatccaatgcaaatctgatattcatccctttgtaggtgttggttttttgtatttgtgagtttttaggatcttctct

SEQ ID NO: 806869 - DNA, 563 bp, Homo sapiens
tcctgcagctaagttcccttattcctgcagccaacttccttttgttggatcctttctagctccaagaggccatggtgggcaagtgctaggctctggagctacactcccaggtgcaacttctagggccaccacagagtagctgcacaactctgaacaagttatctgatctttccatatctgtttccttatatataaaatgggattgtgatgataaaaatagtaacccaactcatagggtagttgtgaggatgacgttagttaatgtayataaagtgcttaaaaacagtgcctggcttttagtaagccctcagtaagtgctagctattgtggtcattattttgctggagcatattcttaagtaatcttttcagacagagtaccaggaaggtaaaacttttagtctttttatgcatgaactgccattattttgtcttctcgtttgattgacagattgctagacataaagatccatggttaaatcacttaccttcagaactttgaaggcattatcccactgttttctagcatccagtgttactgatgaagaatccaatgcaaatctg

SEQ ID NO: 806870 - DNA, 594 bp, Homo sapiens
agccaacttccttttgttggatcctttctagctccaagaggccatggtgggcaagtgctaggctctggagctacactcccaggtgcaacttctagggccaccacagagtagctgcacaactctgaacaagttatctgatctttccatatctgtttccttatatataaaatgggattgtgatgataaaaatagtaacccaactcatagggtagttgtgaggatgacgttagttaatgtatataaagtgcttaaaaacagtgcctggcttttagtaagccctcagtaagtgctagctattgtggtcattattttgctggagcatattcttaagtaatcttttcagacagagtaccaggaaggtaaaacttttagtctttttatgcatgarctgccattattttgtcttctcgtttgattgacagattgctagacataaagatccatggttaaatcacttaccttcagaactttgaaggcattatcccactgttttctagcatccagtgttactgatgaagaatccaatgcaaatctgatattcatccctttgtaggtgttggttttttgtatttgtgagtttttaggatcttctct

SEQ ID NO: 806871 - DNA, 665 bp, Homo sapiens
actgtttctaacaatgatatcaaaggatcctaaagactggttatattgaaatacgccaaagacaacctctaaccctgaggcccagaaagccccaggaatctaagctctcagtcttggacccaacagcaagccctctctcaactactctgatggtctcctggccccgacatcagcatgtgtagcctcctgctgcctgtctgcaaagccgtccctgcacmatacactcttctaagcatctcagagaggacaggatgtggctttgcatggtagttggaaatgatcaagaaaatatatatttaccaaaatctgagctgaaattaggatatccggatgctgagtgttaatgagcagcgtgtcggtgtttaacaaccggggccacaggccatcagtttcacaggactcatttgaataatgcttccaactgtacagacagtgcagggaaagcagtacacagattggcttatcaggaaacacataaaggaaaggaggagggggaaaaaaaccccatgggatcctgcaggctaaaaaaaaaaatgctaaaaggaaaaataaatgtacatgtgtacctcttaagtctcacaaatctgcagggatttgtaactcaggaaaaccctgaagtgaaacacaaatcaaaaagggaccaagggccataatccacattccta

SEQ ID NO: 806872 - DNA, 665 bp, Homo sapiens
actgtttctaacaatgatatcaaaggatcctaaagactggttatattgaaatacgccaaagacaacctctaaccctgaggcccagaaagccccaggaatctaagctctcagtcttggacccaacagcaagccctctctcaactactctgatggtctcctggccccgacatcagcatgtgtagcctcctgctgcctgtctgcaaagccgtccctgcacaatacactcttctaagcatctcagagaggacaggatgtggctttgcatggtagttggaaatgatcaagaaaatatatatttaccaaaatctgagctgaaattaggatatccggatgctgagtgttaatgagcagcgtgtcggtgtttaacaaccggggccacaggccatcagtttcacaggactcatttgaataatgcttccaactgtacagacagtgcagggaaagcagtacacagattggcttatcaggaaacacataaaggaaaggaggagggggaaaaaaaccccatgggatcytgcaggctaaaaaaaaaaatgctaaaaggaaaaataaatgtacatgtgtacctcttaagtctcacaaatctgcagggatttgtaactcaggaaaaccctgaagtgaaacacaaatcaaaaagggaccaagggccataatccacattccta

SEQ ID NO: 806873 - DNA, 606 bp, Homo sapiens
ggggaggcaggagcaggaggctgggggagatgtcagtgggcaataacgcatgttctgagtttgctccaagtttctcagggaaataagaagcaacatgatgtcttgagacaggagatgggggaggaggtgcgggaggcttgagcacagaggaggagaccatggtcatccaggagaatgacagcaggcctggaccaagtcaaggggtcaagtgctggtcagtgccgggtgcaggtggggcaagtggtcctgcgggtaccatagactatcacgccggacagcctttcccagcaccatcaactgcactgcgagggtcccaagtggacaaagrgctggactggacctggtggggattttcctaggggaaaatgatgaaggcagacagccaagggaaatatgcgtgcacacaaaggtgtgaacatcatggcgggccgtggcgtcaaagctgggatggagggacattgaggacaatagagaaggtctgttcatcctggagaagtcacctggatcagtggctctccaccctcctgctgtagccgcagcccttggagagctttaaaaagatccggatgccctggctacctccagagattctgattcgctgactgg

SEQ ID NO: 806874 - DNA, 593 bp, Homo sapiens
accactgccagccctgacagcctttgtatccaggtcagttgaacaggccgggattgtccccaacttggacacatctaaaaagctgcaggtgggatgtcatcaaaatcacctgggaaaacaacctgctctgaaaacagaggcatgatccaaaagacaaagaggtttgtgataccctttctgtacaatagctgactatcartaagtcattactgttttaaggaagtcagtcacacacacacacacacgcatacacacacagaaaaatacaagttagctgggcgtggtggtgtgcacctgcaatcccagctactcgggaggctgaggcagcagaatcatttgaacccgggaggcagaggttgcagtgatccaagattgcatcactacactccagcctgggcaacagagccagactgtctcaaaaaataaataacaataataataataatgttgcaccaatgtcagttttggtaaatccatggttgtgtaagatgttagcattagaggaagctgggtgaagtttcaaagaactctctgtactatttctcttttgtaagcctaaaattatttcaaaataataggtgataaaaattaga

SEQ ID NO: 806875 - DNA, 590 bp, Homo sapiens
aaaatcaggtcctggttgggcgaagggagaaatctgtgagcagtttcctgcctatcagacaggccctccagaggggtgatcagtaccataagcttccaggtaagcacatggggccactgcccccaccctccaaaacaccctcaaaagtctaaaccacctcaatggatgggagattgctctgcaaatgggggagccccactcctaatatgttcatcattgtcttcctaacaatcgtgactcatttcttgaacaaatgtttcacttttaaagggtttgcayagaggcagctttaagaggtcaaataaatgaatgtggaaagaaattaaaacttttacaaccacatgaaaaaggcattagccagtcatcctgcccagcagcccaatattgagcctgtgtgagttgccgtttgtgtagtgaagcaatagaggccatggtctggaatcagaaaccctgggttcagatactgcctctgaccccccaactccccaacaaaatgcacacattcagtggccatgtgaccagggcaaatgcctctcgttccacagctccaatgcaggaataataatagcatccacctggtgtgggtgggc

SEQ ID NO: 806876 - DNA, 669 bp, Homo sapiens
gtcctgattaaactgcagcctgaggactgctgggtgggatcctgtagagcacactgagccctgagaagggggcaagaagagccccagggtgcaaggccagagactagctggggcagagaagagtgcgaagctggcaggactgaagggtcgggagacccttaaagagaccctgtagcagacgccttgggaatgtacgtgtcaccgagcaaagcacatgaagagaactgttcaacagcggactcagctgggaactccagacactgcggcaaaaccagcacagatgcatcctctcctgtggctaaaagctccatgaggggccagtgagtcacatgacaaccgaatttctcctctgccaatctgaacatattctgggactgagacttccgtactcagggaaaaccaatcacactgcttaaaagaaaaaaaaattggccaggtgcggtggctcacgcctgtaatcccagcactttgggaggctgaggcgggcagatcatgaggtcaggagatygagaccatcctggctaacacagtgaaaccccgtctctactaaaaattcaaaaaaaaattagccgggcatgatggcgggcgcctgtagtcccagctactggggaggctgaggcaggagaatagcatgaacccaggaggcggagcttgcagtgagccaagatc

SEQ ID NO: 806877 - DNA, 669 bp, Homo sapiens
gtcctgattaaactgcagcctgaggactgctgggtgggatcctgtagagcacactgagccctgagaagggggcaagaagagccccagggtgcaaggccagagactagctggggcagagaagagtgcgaagctggcaggactgaagggtcgggagacccttaaagagaccctgtagcagacgccttgggaatgtacgtgtcaccgagcaaagcacatgaagagaactgttcaacagcggactcagctgggaactccagacactgcggcaaaaccagcacagatgcatcctctcctgtggctaaaagctccatgaggggccagtgagtcacatgacaaccgaatttctcctctgccaatctgaacatattctgggactgagacttccgtactcagggaaaaccaatcacactgcttaaaagaaaaaaaaattggccaggtgcggtggctcacgcctgtaatcccagcactttgggaggctgaggcgggcagatcatgaggtcaggagattragaccatcctggctaacacagtgaaaccccgtctctactaaaaattcaaaaaaaaattagccgggcatgatggcgggcgcctgtagtcccagctactggggaggctgaggcaggagaatagcatgaacccaggaggcggagcttgcagtgagccaagatc

SEQ ID NO: 806878 - DNA, 586 bp, Homo sapiens
gggcagaatgtagcatattttatatgcagtaatggggaggggctggagaaataaaaacacttccctatgtaagagcaataagttggagcacctggactagaactctctttcttactctgtttaatactcaccatgtcacacagtcttcaagagtaaataaccgtttgcatctggagtcttgtcccattttcatacatctcttgcacaggggattgctgctaccaaaagtcaaacctgattatttagaccctgggctgcagtgrtctggatgagcaatagcatcatgtaattgactatgcccacttgcctagttgtagatgtggtcatatgccagtaaatgtgaaattttaattagtattaatattaattgcattcatatactaattgtgatatttataatatatgctaattataacgctgtttgtagtgctatatattataagtaagttcagcattgattcaacaaatattggggttctgttgatggataatgtcagaaatgagcaaaaacagcctctgtgtttcagacagtgggctggcattgtgagggccttgtagtgggaaggaatttgttgcatttgtggaa

SEQ ID NO: 806879 - DNA, 541 bp, Homo sapiens
acgtcggcaatgccacagcatgactctggggatacagcttctagacaataagcagcaagttagagactagaacaatttcacggataaaagacacctgctggtgatatatgacttcaaacaatgaagaggggactagaargctggcattctgccaaccaacacctaagagggcaggggagccatagagtggggacagtaaagggcgggacactctctcccaacaaccaaggaatagacccacctggaaggcagagggagtttcttcactgggtacaaggaattagagtaagaagttattttttttttttaattagaaacaaatgaaagaatcccaccaacttcactctgtgaactatgattttaacgttaagagtaacaaagatgggaaatctatcaaaatcctcaattttgtattacactgcacactcgtgaaacagttcctaacaagcctagatgaatttcagttcttttaagccaacatttgaaatacaggtccccagtcccaccccttcctcagcagtggcccacttcggtggctgtt

SEQ ID NO: 806880 - DNA, 627 bp, Homo sapiens
gggagacgctgcagcttggttcttatttcctttgctctgcatccctctgggttgacttgagtctgatcatgggtttattccatttccattttgctagattccctccactccctcaagcttctacaaaactgtggggccaccactccccacaaaagattaaaaccaagatgtttcctagaggtggcattttgtcttcctgaagctgttctgtgcacasgtcctctccacactcatgccaaatgctcggtgaagcgtcttcctgaatgtccctaaggggcacgtgccactggcagagctgatgggcacacctcactcccacacatgctgtgccgagctcatgactcagctgtgcagggcccgcccaagagtgaggcaaacaccaacaccgcacagcgaccctttgtcaatggtggggacctcagtggcttctccatcggaacttagggctgacgggcctccagacctactgttacacactggcccacggaatgaccctcataaacccaagaacagtaaacagagcttaacattctaacgaaatcaagattgctgtgtgtgctttcacaaaatgaaactgcctggaacttctcataacgttttttatgataagcattaaaatgcaaagag

SEQ ID NO: 806881 - DNA, 611 bp, Homo sapiens
caaagagctcacagaaaagggaatgcagattgttcctaaacacagaaaaatatgctcaatttcaacaaaaatatgataaatagcaattaaaacaaagataaaaaaatgtcattacattgtgttgccagaggggaggcaataagccttctctgcattgctggggataacctgaaatgttgcaacctcgtgcyggctatttggcaagaccaaaaacattttacaaacacatgggcccagcagatacatttgcagatgtgagatgacttatgaacatagttattcactgcaacactgtttgtaaataacaaaagatggtcgacaaactaaattccaacaataggaaaattgtgagttttctttcaacaatgtggagatcatttacactagtacatatggggatgcagggctagtttccttcatttatcttaagaactgactccttattgcatatgaatcagcatgtccagtctacgccccctcactcccatacattctacttttttttaaaatttaagctgtatattgcaccatttgtgaaaaagaggaagaaaaagcacatttgtacatatttacttgtagatgcatacagtatctttggaaggaatcacaag

SEQ ID NO: 806882 - DNA, 598 bp, Homo sapiens; identical to SEQ ID NO: 805669

SEQ ID NO: 806883 - DNA, 623 bp, Homo sapiens
actctttttagtattagccagcacacgccaggcccttagtgcgtactagtaaatgcttataggttgattgtctgatgtgttcagcaggattggtttggttgtgtctctgactatccatatgatcagaaatttatataattcctaagaaagtgaaacacagaggtataattttgccacaggaatttggggatatgcagttgttattttaatattataaaaaaaatcaacctttagataaaatttatttcagtatttctctttgtatgtaagtgatcattgttttcactgctattcaaggaattatctgaagccgaaaaccagtttaagaggattattgaacactaccccagtgagggccttgattgcttggcctactgtggaattggaaaagtrtatttgaaaaaaaacaggttagtagaaatgacactactttaagctctaggctggtaactcatttaaaatccaatgtgataatgatccattttctagaattattttgatatctcctctgtagcacactatcataattgtgatttactttgaggacctgaaatttcactatcagtattaattgttaaagcaaggccagtcattgcagttcttggtacttcctgattttaaat

SEQ ID NO: 806884 - DNA, 559 bp, Homo sapiens
taaacaagttgttcgaatcaggatccaaaaaagttcccattcattgtgattgattgaggtgtctctttagattttttaagcctggaggtactggcacaacctccttctctctctctccctcctcctcccactctttctctcccaccccctccaccctcaaacccagcaggtctgaccaggcagcagtggtcatctgattgacgcgcattgaactctctgcctgaaaagatgctgtacttcgttgagttccttccttttctgttctgcccaagctgtaatggctctgaggatttggaaaaggttttagaatctaggaatgaatgasaaaactgttttaaagggcccctccacactactgaggtcatttactttttcttactctttaccaaaacctgtatagatcactgatataatagatgcgaaagatactctagtggaaaatgtcatgtaaatgtaaaggactgctgatggttatgttatcattcaagaatgttttacagggggagatcttagcaagcggaagtacaagtaaaactgaatcatgagcaatttatgttat

SEQ ID NO: 806885 - DNA, 623 bp, Homo sapiens
gtgacaaaaacttcaggccgttgatctgggattcccccagatggggttcaggggcctcttccttcttactccagaatttatcacgttatagtttctttgacccatttggtcttccctactggtcttggacgttttcaggactggggtccaatctcaaccatctttgcatccccagcaccgatcagagtaactgacacagtgcagacactcaacgagtgcatgtggtataaatgaatagctatgcacttcactgcaggtaacctgtgactcaactgtagaaagattttacaggttatggggtttgagagaatggtgactgcatccacgaaggcaccgtctaagacagccggttttgggaaaaggtgatctctrgtgtgacaagttgagacctctgggctttttgttccatttgttttggttctcactgtcttgacctccttcttggaaaaccctttaacatgcaaaattgcgagtggcacatgatacttgcttttctctctccaaggcaaataatgtcagtccctttggtgatccagggatcagaaactagactacgctctgataaggacatcacccgtatgatggaaggattaactcctggccattctattttaattttactg

SEQ ID NO: 806886 - DNA, 629 bp, Homo sapiens
gggagtgaaggggacacttgtggacatgagagtggggttgagtcttaatattataaagatatgaatttggggcgattgagggtttttcagcagggattaggacagatctgtgggttggagggaggtgacactgtaagaaggagggtttggaaggcaggaccattctagatgtaatgtataggcatgagggaatacgaagaggtgaaaagtggaagacagatgggaaaaccttaaaaatattcttaattatactttaatttccaacagaccaaagtgagtatttctggattcaaacagcaacatggccaagtttttggagataggaaaaagagtattaagctttgttggcagtatactaaaaggttctaggaatgcagtgattaggttttagtgggacatggagaatatgtcctactgaggacctgaaggaactgttgaggaactgaagataraattattattgtagttcagaccttacattagggacaggtggaaataatttgcagcaccattaaatatgagctaaaaaatagggcagtgggagagggcaatgtttgaagctgtgaatctgtaaaggaaaaggttgtatcataattcatggtttggaaaatggagagtagctgagcatg

SEQ ID NO: 806887 - DNA, 462 bp, Homo sapiens
taataaaggtgctggaggagaaggtggctgtttgtaggaaagttcaagtgctagctggaagtgtagcctgcatcacagtgccttacctgccagttacaggagggcccacctggaggccttccagcgtggggtgcctgccccataggacttagygcatgaaggaggaagggaaaatgtgctggcagctcctcagaaagagaaggaaaaaggaagactctgacctacacaggcccagcttctcctgtcaaaccaggggaggaatgagaatgttaaaaagagacagccaggtagaaacaagagggatgtgtatgagttctttcctaacaaggaagagatgaaatcaagattctcctatggttgcctttatagggtatgaattcattaaatccttattgaattgccccactcattatgttttctaggaagctttgaaaaaaataggttaagagcaatggatcataa

SEQ ID NO: 806888 - DNA, 531 bp, Homo sapiens
taggagtttgagaccagctggccaacatagtaaaccccatctctactaaaattaaaaaaaattagctggccgtggtggtggacacctgtaaccccagctacttgggaggctgaggcaggagaatcgcttgaacccaggaggcacaggttgcagtgagccaagattgcgccactgcactctagcccgggcgacagtgcgagactctgtctcaaaaaaaaaaaaacaaaaaacaaaamcgaagatggcaaattatcagtgagcaaaaactggattattaaatacataggagaaatggattgccatctagaaaaaatcaatcttggtccctacctcattccttataccaaaataagttccaggcagattaaagattttagcataaaaaatggacctataaaatatccaggaaaaaaacgggaaaaattttttgtaagtccagtaaacagcatgggaaaaaagaatgtttatattcatatacacatgcatgtaatgtgtatatcctatatgcatagcatatgtatgacaacaaat

SEQ ID NO: 806889 - DNA, 529 bp, Homo sapiens
aagatgaggctggggagagtctaaggacaagaagaattagatagatcctgagactttactcagtttcctggctgggagaagtaaagaagaacaaaatcctacacagcatagtgacacatggaacacaagtttctataagctacttgtgggtttaacaaaacaaaatagttttataaactttatattgcctcaggaaacttcagttttaattcccatgtgggaattcctgtagctgcctgtttgagtgatgaggcagattggagacatagtcttaaaggtagcattcagccggtgagatatctttctttctggccgaggctttcctggctttataaattgctggtctgactgtgtgttctgtgtgcacagttcatcaaggctctttctttgyacagtcagtccagaagagtctcggaaataaagcacccagtgggagggccccagctctcaggcttttttttaacttgttaaggctttgagtctgctgttgcgtggccctactcaagagtgccttaaaagggcaattact

SEQ ID NO: 806890 - DNA, 598 bp, Homo sapiens
ttgaaatgaattaggcccagaggagatcagaccataggaatttaaagttagatcttgagagaaaacttaggtaaaaaagaaaaacaaaattaaaggaggactgtgtgtgagagttgaaagatataagttccagaatgttgtggcaggacagtgaaatcttctggttcctaaagacggaggagactctctcccagcacctgacttccaccctcccactactgccagacctttgcctgggctgttcctagcctggagcactgtccccgctctgcatcctgcyttcccctgaaaccccgtcaggcgtgccctcttttggcctcccactgtgtcccttctctcatgtgcattagatctcagcctggccttgaatgtctctttctcaccagtaccttgcacagtaaacattcaaacttactgtgaattcatctgaaaaaaaaaaaattaagtgtggaaaaagtgtgaccaccctgaactgagtaaaatattctgttgagatccagttttttctctccattgaatgtgcagttttagttagaattacactaaagggcacttatcatttatcgtttttccaagttcttgtaacagatatgtatag

SEQ ID NO: 806891 - DNA, 616 bp, Homo sapiens
cctgcagtcccttctctaaggcctcctccaggaatacactgttaacagtttcatgactattgggaaacttactctgcatacgcagacatgggtatgcatatttcagatgcccttttgagtaattattgttagaggaaaatctttcctaatgaattctgactacttctaaaatgaattctatcaaacatccccatgaaaattaacagtaattaattgcctcctatctttttttttgtttttttgagatagggtcttgctctatcacttaggctgcggtgcagtggtgtaaccctagctcactgcagscttgaactcctagactctagtgattctttttgcctcagctcccaagtagccaggactactactgctactatggtgcacgtcaccatgactggataactaaaactaaatgttttttagagacagggtcttgctctgttgcccaggctggtcttgaactcctggcctcaagtgatccttctgccttggcctcccagagtgctgggattgcaggcgtgtgcctggccttgcctcctgtctttattgttaacaccccattgacaacaagatataaattgattacaatgtgaaattgtaaatcttttaatacaga

SEQ ID NO: 806892 - DNA, 433 bp, Homo sapiens
tgagagtcctggtcccgacctggtgagccctgctcccgccccagatgacccctcatgacccctaatctttggggacaagcctgctgacactgaccaggctggaggacatttgtttgctcccctcctccagcacccagggcagccctggagttttttctagctttcccygattcttttttcagccctattttattttctgcatctttttttcctatatctcaagtagcctgcaatcaaaccaaagccacggtctgaatgttgtggttattgagagggtaaagttttttatttttatttttagagatggcatctctcactgttacccaggctggagtgcagtggtgtgatcctttggactcagttgatcctcccgcttcagcctcttgagtagctgagtctacaggcatgcaccactgtggagtccaaattagta

SEQ ID NO: 806893 - DNA, 433 bp, Homo sapiens
tgagagtcctggtcccgacctggtgagccctgctcccgccccagatgacccctcatgacccctaatctttggggacaagcctgctgacactgaccaggctggaggacatttgtttgctcccctcctccagcacccagggcagccctggagttttttctagctttccccgattcttttttcagccctattttattttctgcatctttttttcctatatctcaagtagcctgcaatcaaaccaaagccacggtctgaatgttgtggttattgaragggtaaagttttttatttttatttttagagatggcatctctcactgttacccaggctggagtgcagtggtgtgatcctttggactcagttgatcctcccgcttcagcctcttgagtagctgagtctacaggcatgcaccactgtggagtccaaattagta

SEQ ID NO: 806894 - DNA, 701 bp, Homo sapiens
tgtagagggaggggacagtgtggaaactgggctgagggagttaacccctctcaccaggccccttcccagcccagcgtccgcagaagtggaagggaaatggcagtgaggcctcatgtggcaggtggttttccaaagctaactacaaagctgttgccacgcctatggtcttctgtgaacttgccaccctgtgatggtggagcctctgcgtggtggaatcctggaatccgactgcatggagcatcggaatatggtgaaaaatcactccgttcctcgtgtggataggtaaaccaaaaataaaattcyaaccccgccccccgccctccccatctgaaggtacccctccccttggcaagggtattggaaggctaacctgagggactggttcaggccacgatgtggggcgggggctggacatgcctcactatcccctcctccctttcagaatgactgatagaacaggctctttcagtctaatgagaaacatttacaatctcttctctctgaagcctgctacctggtagcttcagctgcataataaaactttggtttccacaaccccttaacataacccagacactcctttctattgatgccaggtctttagatagtaacttaactccttcaaccgattgccaatcagaaaaaatttaaatctaactataacctggaagtcccctccccgcttccagttgtcccgcctt

SEQ ID NO: 806895 - DNA, 701 bp, Homo sapiens
tgtagagggaggggacagtgtggaaactgggctgagggagttaacccctctcaccaggccccttcccagcccagcgtccgcagaagtggaagggaaatggcagtgaggcctcatgtggcaggtggttttccaaagctaactacaaagctgttgccacgcctatggtcttctgtgaacttgccaccctgtgatggtggagcctctgcgtggtggaatcctggaatccgactgcatggagcatcggaatatggtgaaaaatcactccgttcctcgtgtggataggtaaaccaaaaataaaattctaaccccgccccccgccctccccatctgaaggtacccctccccttggcaagggtattggaaggctaacctgagggactggttcaggccacgatgtggggcgggggctggacatgcctcactatcccctcctccctttcagaatgactgatagaacaggctctttcagtctaatgagaaacatttacaatctcttctctctgaagcctgctacctggtagcttcasctgcataataaaactttggtttccacaaccccttaacataacccagacactcctttctattgatgccaggtctttagatagtaacttaactccttcaaccgattgccaatcagaaaaaatttaaatctaactataacctggaagtcccctccccgcttccagttgtcccgcctt

SEQ ID NO: 806896 - DNA, 631 bp, Homo sapiens
agctgctctgcagtgcagcggtgacacaggtgccaaaaactgagagagagcctgtctttttggaccgagtattgggaaaggggaattccagggaccagagtttgtggctgcattttcctctttcctctgactgctttaccctaagagtggccccgattgtgtaaaacaatgcagcagcccaggtggctcaaatgctgagcaagtcttggctttagagaaagaagtatcagaaaaggaggcccgggagctgaaagtgggggccgaccggggggaggggtggatctcacagaggagagaactggagaagaggatttccagattctgtgtatgaattgatataatcgtragctttgcatgcacaggacggaaaacaataagaaaagatgaacttaaaaattacctcgttttggaatatatgaccacacttctaaatgtcaaagaagaaaccataatggaaatttgatagtacttaggactgagtgatattgaaattctaaatataaaaattaaagggcatatagaaagtaagaaaaatttatatgcctaaatgcatatattagaaaacaagaaagtctgaacattaatgtttagaatattcaactgaagacattaggaaatgaacaacagaatt

SEQ ID NO: 806897 - DNA, 516 bp, Homo sapiens
gacaaggaagggaggaacaagactaaaatacagttttaggtcgaccaagtgtctgctcgctgacatcattcatccctccctcaagtatcacagacaatttttgtagccgagcgttgctgctgtttagtaattcaaagtgtatctgagaaacacaattatctcgacagagagttggacagcagctgagggtgatgtgtgagctggtgccagaggtttgctkgtttagttactccaagcagggagttgtcataaggcttcctggaggagtggagctgggggcagagagtggcctctcactggatgcaggtagaaaaaggagccagaaatgagcaggcccagctagttgctggattggctagttgctaccatgatgtcatttcatacccacagccaccctgaaacctgaaagcaaggttttatcacttcccatgttgcaggttagaagacatggcttgcacaggtggagtgatccttcccaaaccacagaagcgggagtgaagggatcctatccttggg

SEQ ID NO: 806898 - DNA, 516 bp, Homo sapiens
gacaaggaagggaggaacaagactaaaatacagttttaggtcgaccaagtgtctgctcgctgacatcattcatccctccctcaagtatcacagacaatttttgtagccgagcgttgctgctgtttagtaattcaaagtgtatctgagaaacacaattatctcgacagagagttggacagcagctgagggtgatgtgtgagctggtgccagaggtttgcttgtttagttactccaagcagggagttgtcataaggcttcctggaggagtgsagctgggggcagagagtggcctctcactggatgcaggtagaaaaaggagccagaaatgagcaggcccagctagttgctggattggctagttgctaccatgatgtcatttcatacccacagccaccctgaaacctgaaagcaaggttttatcacttcccatgttgcaggttagaagacatggcttgcacaggtggagtgatccttcccaaaccacagaagcgggagtgaagggatcctatccttggg

SEQ ID NO: 806899 - DNA, 654 bp, Homo sapiens
ccagtctctgcctccatcttcacgtgaccttcttctgtgtgtctcttataagggcaattgtcattggatttaggggccaccaggataatccaggatgatctcatcttgagacccctaacctaattacatccttataggaaaaagaccgtttttcctataaggccccattcatcggtactggggcctaggatgtggacatatctttttagtggtcaccagtcaactcactacagatgggttggtgcttaagcagtgagcagagtggtcctctgtccgcccaggggtgttccttggggtggggccaattctgggtcctgctgctcatccctgggccatctgtccctgcagcctattgggaagttctgcaaatccagtggcctccactagatcaggagtgatggggaaggaacacagggctgcttcagggagcagcgggctcagccctgccagttagtggggaaccgcgctycggccaaatcagagctggaacattcaagccagcctttgttttcccaagtaaatccagcttgcttccatactgtttctcagtctctggcgtcaagcgagggaagcattcctggaaaaatatgtcctctgaatcatattaccatcctgatttacattataatttcttcagctatgtattcccagagg

SEQ ID NO: 806900 - DNA, 564 bp, Homo sapiens
agctaccaaccatgacacctggctcagtgaatatctatggccacagccagggcacaaatgtgaattttaaaaattccacaaagcccctccttttccaaacagaaattggacataaatattcgtacatcaaagtaacatattaatgggtgatacttcaggttacttcttttttcttttcttttttttttttttttgagatagagtcttgctctgttgcccaggctggagtgcagtggcgtgatcttggctcactgcaacctctgcttcctaccgggatcaagcaattctcttcctcagtctcctgagtagctgggattgcaggcatctgccaccatacccggctaagtttkgtatttttagaagagaccaaggtttcaccatcttggccaggctggtcttgaactcccaacctcgtgatccacctgcctcagcctcctaaagtgctgggattacaggcatgagccaccgtacctggcccaggttactttttcaattccaagctaagcaagcttaggtcacacctttgaggaataaggacagagacagataattgaattgtgtggg

SEQ ID NO: 806901 - DNA, 564 bp, Homo sapiens
agctaccaaccatgacacctggctcagtgaatatctatggccacagccagggcacaaatgtgaattttaaaaattccacaaagcccctccttttccaaacagaaattggacataaatattcgtacatcaaagtaacatattaatgggtgatacttcaggttacttcttttttcttttcttttttttttttttttgagatagagtcttgctctgttgcccaggctggagtgcagtggcgtgatcttggctcactgcaacctctgcttcctaccgggatcaagcaattctcttcctcagtctcctgagtagctgggattgcaggcatctgccaccatacccggctaagtttggtatttttagwagagaccaaggtttcaccatcttggccaggctggtcttgaactcccaacctcgtgatccacctgcctcagcctcctaaagtgctgggattacaggcatgagccaccgtacctggcccaggttactttttcaattccaagctaagcaagcttaggtcacacctttgaggaataaggacagagacagataattgaattgtgtggg

SEQ ID NO: 806902 - DNA, 603 bp, Homo sapiens
aagggcaaagagccactagaaagggatcccactggccagatctgggataatgtgagcatcacaaataatatcagtagcagattataactcattgaatacaagaggaatccatgaatccatactgatatagatagatcaatagataactaagggaggggaaaagctcttccttatagctgaaagagaacacatcaatgtagaaagaaccatgcattcagaggtaaccatcgtagaaataaccgattcaggttagaattatcgatgaatgctaaaagcaaagtttgaggaggaataagatatttacatggcctcaaagtaactgctctgagatacttcttacaaggtgaaaactagtaattttaaagtkaagaaacctggcagacaccacctgagccagagatagaagttaacatcattcaaattaggaaaagctgaccttatgtgcctcctgatataatgcactgggagggacacagcaccactttgtattcttgccccacagacataacctaaatctaatcatgaaaagaacattaaaaaccttaagttgaggcacatgctacaaaataactgctctatagtcttcaaaaaattaatgtcatg

SEQ ID NO: 806903 - DNA, 657 bp, Homo sapiens
cagctcacaacattcccgctatttaacgatcagctgtcatgagctgatacgagctcactgcagcacctccactgaaacaagtcctacatccttgcagtgggggtgaagggatcctattttgctggaaggtggtgggaaggagggggtgacatggaagggaaataaagggatgcaggtttgggaaaggttgcccactctgtctccctcttggagagttytagaacaagtgagcctattaagggctctgagaaatcctatgattgatatatataattgcttaaatgtgctttcccaaactcatttgagcttaggataacctacgcacatcttggttctgtggaacgtatttgatatttggtttggcggctcctggaatgaatgacaggaacgttggagatgggcacacccccactatgccttcttcacgattcgctcagggccagcccagcatgtccccgtttccacctgacacagcccaaagctgtcagcccaagcattcactgtcagcatcccctattgtcctcagcgtgcaccgactcccgctcccttccccttgcctcagtagaaagagacatgactcagtcaaccagcaacaagcaaaaaggagagtgacatattacccaaacagaggaagattctctgacacaatgggaggtt

SEQ ID NO: 806904 - DNA, 613 bp, Homo sapiens
tatgtgtttaccttcacaagaaaacaccagttctccaaagttgttttattttatattcccatgatgtatgagggttccagttgcgtgacatcctcaccattttgtatggtttgtctgttgggttttagccattctgtagtggatatgtagtggtttgcatttgcatttcttcatggctaataccaccttttcatatgcttattagcctttcatacatattctttgtcacaggtctttcccatcttttgcttgtgttactgrgttgtttaataattgagtagtcctttgtcattaagttttttgtcacatgtatgtcagtgtatttccctagactgtggctttgccttttcctttcttaatatggtatcttttgatgaatagggagttttaatattgatgaagttgtatttgtcaactttttttgtttggtactttttttatcctgaaaaatctttgccatctccaagtttgtgaagatattctgtgttttcttctaaaagttttttatttttattttttagtctgcttttacagttaggattctgtggtccatcttgaattaatttttgagcgtggaacagggtgaaggggttgaagttcattttcttccata

SEQ ID NO: 806905 - DNA, 635 bp, Homo sapiens
ggatggcgatgtaggtccacaaggtggatggggtcctgagtgaggaccgcctcagagagacagccagggcttgtggtcggtgactagaccgaccagtgttcagagagtgagacagcagcattcccgcatatggctgggctgggaaagctgggagactgtgtgctctgtcgtggatatgatgagcggttatgcgggctctgcttcttgccacctacttgcaggttgaaggatgtgcctattccacatcgctgatggggcatccgagctttccytggaggtgggcagctctttcggggttggtacccatcaggtgctgtggccagaactcagattcggagtctaaattcatactcacactctatacacctggattgagatcacagtattattattttcacaatcgaactgagcaaagatacggcagccactgaagactcactgtgaggtgcgtctaagggagaaaccatgggctgttgccgaagatctgggagaaaaagtgtggaaaaggcaaaaccgcgcctgggagctcctgcaggaggcgccccgggacactaggacgctgcctctccagcgggggtttgcagttttcatggtcctgtgtggcgtgtcctgcctggtttgcatttcagagagaa

SEQ ID NO: 806906 - DNA, 562 bp, Homo sapiens
gaatgagatggatcccattaacacagcctgggatttgataaacaccagagacaagagcaattggcttaactgaattcattcatttattccgtagagttctgataaagtgatctgcatgggtgtaactaagagactgcagccacatctgaaaatcaggcgagctgtgcttcagagctgcaaattgtggctcctctgagctcctgagagcctggtctctcaaactacattgtgtttagcttgtctgaaatctcacttatatatctattttatgatttcargtgaaggcaaggcctgggggagaagatctttcagggtaaatcagtgctccaaatctcacagtgacttttataattgattgattatgtcatacagatgagactggtttgtctcccacatataaagctgtaatggagacttattagctagtaaaattaacaaactgaattatcttgacgggctgtcatttgttttgggtaatcttgtttttctctgtcattgattgcggcaatttataaaccattctatcttcttggcccatgtgtagatctggccttgccttaga

SEQ ID NO: 806907 - DNA, 501 bp, Homo sapiens
agttcctaacaggccatggtccatagcctgggggctggggacccctggtctaaaacatggggagataaaagcatgaaggctgccttacacaccttcactagtctgtgctcacactcaacacgtgtgggactaaaggagtgtccctactagatttttgactgtttccctggttgctctggggaagaggggttggggaggatgctggcatgaccttgcaattcttgctatgggaggaatacactggtacaacaactatgtattttttttctttctttcccaaatcatctcagaaaaatgtcttgtttttttttttctcccttacytgatgcggtggtcctagaaccagaggtgcaactgcaagttctggaagcaggaatgatttctaagcaagaaactgtcactgtgtttttaaactttgtcagaattcctaacaattctgggggtggaccgtgtctttatctcgtctggcaaaagtggggttaggactaaatacaatgcaca

SEQ ID NO: 806908 - DNA, 638 bp, Homo sapiens
tcatttgataccgtgtcttagtttaaaaaagtgaaaaagtggagtctgcaggtgtgcctctctcacttggaatctcatcatctatttccttatgataattaagtcttgttcaaagtagtgtttaactttttatgtcagactcacaggtatggctcctgttttgtaacttacctcttcccccctccctcatggtacctactgataaatacttagygactacttggttatttccaatttattaaaaaaaaaaacagatttttaaaaagagaatgcaaggaagaatcgtgtaaaataattctgatgaatgcaactctcgatttactcaaagaaagatttctttcttccttgatggccttagagtaacatttccaaatctgacaagagaaaataatgagaaaacctccatgggagagattagagatgggtctgaaacctttcctcttattaaagccaaggaaacagggtggggaacacacacaagcagagagtagcctggatttctttcttaaatccagactcgttttgtccttttcacgtcttactgagagtgttcttgttaagaatgcgtggtggaagaagggaccgcaaaggcttgtccctgggatgtggggactcagcgactctcaggagaaaataat

SEQ ID NO: 806909 - DNA, 519 bp, Homo sapiens
accctgggaatgggaccttatttggaaatagggtctttgtagatatcatcaagtaatgaggtcttactggagtagggtgagccctaatgcaatgactggtatatttataagaagaggaagatttagacacagacacacagggggagaaggccatgtgatgattgaagcagagttggagtgtctacaagtcaagcaatgccagcaatcaccagaagctaggcgggaggcacccaacagactctccctcacaccccccagaaggaaccaaccctgcaaatgctttcatatagaaggcctctccagaactgtgaaggactttctsctgtttcaagccacccagttagtggtgatttgttaaggcagccctaggaaactggtacacccagtcagtgcaataactttcaaatagttctgcttgcctccaacactcacactccatgtgttcccatccttgattactgtggcattctgcacatggcactcaaagctgggtcaatgtgagccaagagaactcaggaa

SEQ ID NO: 806910 - DNA, 458 bp, Homo sapiens
tgggactggagaggaaccagaaagggaatggagttggggattgaggaaagaggggagaaacaagagaagggaataccttgggcagctgggcaagaagaaacaaagccacaccatccagagacagggattttggaataactgcaaagtcacaaaagtattgggaagatgacttaatgcccttgaattcaagtcctcagacatacacagatattrtggtgatcatcatagcaaagctagccttcccaggaaagagaatgccagaggttttcctcagaggaggcatagaattagcctagccagtgaccagttagccagtgaccagttaaaggacaagtgttgactttgactttaccccagtccactcacgctgccacccccatgccctacagacccagccatgtccttgtgtaaagcacaccaggagacaccaaaggtatcacagagcaggtccaagtggg

SEQ ID NO: 806911 - DNA, 524 bp, Homo sapiens
ttctccctccctttcttcccttcagctacatagaagaaagaaattattgcaggtccagtagaatctacctttcccattccattctcctactgcaaacacctatcctgaagttagtagctagtggttagaagtaaccactatcctgaagttagtacgtgtatcactcctatacatattttaatatttttaccatttaaactacatatattgttttgtgtttttaaagttaacataaacgatatatgatttgctattggcactcaatgttataatttcaagatgtagccaartgaattcacaaagatatactcaatcattaagcagctcttaggcctcccccatgtgaataatctcaatttatttagtgaatgtcccctgtccatctccatgcatacgcgtgaatgagtccgcattggtccagggcctggggtcctttctggaatcatctggggagactgaaaaactagtgatgcctggtctcccctgggagagtctgcttcaattaggctggagggcagttgggc

SEQ ID NO: 806912 - DNA, 591 bp, Homo sapiens
ctcaatatattttatttttagagcagtttatgttcacagcaaaattgagaagaaagtacagaaagtttccacacacccccagtctccatacatgatggcatcaccctagtcagcagtccacaccagagtggtacatttgttacaaatgatgaatccgcactgacaacttataatcacccaaagcccatagtctaagttagggtcactctcagtgccatatattttatgtgatttgactatatgtaatgacaggtatccacagagatacctgtatgacagagtgccatrcagaacagtttcactgcactgaaaatcctctgggatcctcccattaatcactccctcccaccaacctcttttcattgtttccatagttgtgcccttttacagaatgccagaccattataacaacacagtatggagcctttttagattggcatctttctgagttttggaaattatgtaaaaacctgctctacatgtccctgagaaggttttgattggatataagttttcaactcgcttgtgaaaataccaagaagtatccttgatgaattgtatggtaggaatctgtttagttttgtaagtaac

SEQ ID NO: 806913 - DNA, 618 bp, Homo sapiens
atcactgaccaagcactctcaagcttccgattcccctaaatctcacctgattttccaacacctccgagagcttgacattgccactttttacacatgagaggtgaggatatcgaacctctgaaaggttatctgatcagcctgggatctcctggggcagagctgggcttaagaatcacctgcttgagatttcacctgcaattkcctgacccatggggctgtgacttcttggattaaagcatcatccatgcaccttgtcactctacatgggcagagcaagccaacctagaaaccaatcaggagccaccataacaaacacagccgtgactcagctctccacctgcacacctccacctgcccatcagtccacattggacacttaacacccacaaaggatttgaaattttcccaacggcctctcacaggacacataaaagcaaacacaagctgtcctcagtgctgtgctacagaatacgttatccattggttgatcacacagatccagtgaaatattgtcagggagttcatttgaaaactgttgttgccatgatgtgcttgtagtgccgtctgtcagagcagatattgacccattcaaatccagcggcataagacaaatgacca

SEQ ID NO: 806914 - DNA, 618 bp, Homo sapiens
atcactgaccaagcactctcaagcttccgattcccctaaatctcacctgattttccaacacctccgagagcttgacattgccactttttacacatgagaggtgaggatatcgaacctctgaaaggttatctgatcagcctgggatctcctggggcagagctgggcttaagaatcacctgcttgagatttcacctgcaattgcctgacccatggggctgtgacttcttggattaaagcatcatccatgcaccttgtcactctacatgggcagagcaagccaacctagaaaccaatcaggagccaccataacaaacacagccgtgactcagctctccacctgcacacctccacctgcccatcagtccacaytggacacttaacacccacaaaggatttgaaattttcccaacggcctctcacaggacacataaaagcaaacacaagctgtcctcagtgctgtgctacagaatacgttatccattggttgatcacacagatccagtgaaatattgtcagggagttcatttgaaaactgttgttgccatgatgtgcttgtagtgccgtctgtcagagcagatattgacccattcaaatccagcggcataagacaaatgacca

SEQ ID NO: 806915 - DNA, 618 bp, Homo sapiens
atcactgaccaagcactctcaagcttccgattcccctaaatctcacctgattttccaacacctccgagagcttgacattgccactttttacacatgagaggtgaggatatcgaacctctgaaaggttatctgatcagcctgggatctcctggggcagagctgggcttaagaatcacctgcttgagatttcacctgcaattgcctgacccatggggctgtgacttcttggattaaagcatcatccatgcaccttgtcactctacatgggcagagcaagccaacctagaaaccaatcaggagccaccataacaaacacagccgtgactcagctctccacctgcacacctccacctgcccatcagtccacattggacacttaacacccacaaaggatttgaaattttcccaacggcctctcacaggacacataaaagcaaayacaagctgtcctcagtgctgtgctacagaatacgttatccattggttgatcacacagatccagtgaaatattgtcagggagttcatttgaaaactgttgttgccatgatgtgcttgtagtgccgtctgtcagagcagatattgacccattcaaatccagcggcataagacaaatgacca

SEQ ID NO: 806916 - DNA, 637 bp, Homo sapiens
aataaaccttatttttccttctgcagtctgtttctggatgctggcagtcattcagaaacatttgctgagcacctcgtacctgctgaatgaacccacgtgaaggggagccaggagtgcggatcattaaaaagcctgtactttctcagtccccatttgacaccacagagagaaaatgcatgctcctgatttgggtagatctagaatgttcttatgaatatggtaggtggagcaagggatccaggttcttatgatacatgataagaaaggccctagcttggtcagacacaaataaaagccaagcttttcatctaaactcccttgcaccatcacccccttaccaaccagtacagagagcttaacatctctataccagatagtgaatgtttctaataasaatggcaaattcttattgtgagagagataagggcattcaagtgttaattcaagagaaatatgtatatggttctttaaatgatttatttactaacagcattaagtatggtgtaaaggaatttacataccctaattctcgtctatatatttttttggattttaaaatgacaacttgtctaagttcgcattagtattaagccctaacatgagacagtatttatagcataagatttttgccacctat

SEQ ID NO: 806917 - DNA, 575 bp, Homo sapiens
ggagtggaagatgatatctttaacacatctaatctactattcatatccagaatatgtaaagaacccccatcaatcaataagaatacacacaagtcagaatacacacaaggaaaaacagggaagaaactgcacaggcagtcataaaagaggatatccaactgctcattaaaaggtcttctacttcattagtaaagcaggaagtacaaattaaaacctgaatgaaataacaccacagatacatcagaatgtctaaaacaaagactaacaatgttggtgaagatgtggagcaataagaactctcacacacagctggagtttaraaaacatccttatttatccatcagggctgtaataagaggcatatagcatattcaaataggtaagtgaacaaaatttaatgaaagaatttacaacggtaaaggtagaatttagtaaaaaccaaagggtgaggaagtcccccaggctagcaagaacaggaagccattactaccctcaggcctacaagggcaagggaggtagcagtcacgcagcaccggtagctgtgaacacaggagaggataaacaataggagctgt

SEQ ID NO: 806918 - DNA, 585 bp, Homo sapiens
ccccttcaaggcctatgtgtccctgtctccatctcacctcccgactgccagtcagtcttctggagtctccacgacttgtcagggtcaccagtagcctctgtgtgaccaaatcccggagtcatgtatttgtcttcactcattcaatcattcatggtgctgcactcccgacacacactgtgtgcatggttccatcccttaggatacttcagtaagcagaacagaaattcctgccctcatggagtctccgtgcttgtggacatccacaggtgttgagcccagagcagtccctcatttacctcctgcaggaagcgcctgctccgggggcacccagccccggaccatctctgctgtccctttcaccacctctagctgcactgttctctgccttccctcctgcccaggggccttgtgtgggctcttttctccacctgggayatccttcctctttgttcttcttgtgtctccttctttcattcagttcttcccatcctgatcctgaatttgactcattgtagctcttaccaatatctgctgtgttcttgtgtctttgtttactgtcagttaccccacccaaatatcagttcc

SEQ ID NO: 806919 - DNA, 479 bp, Homo sapiens
aacaaacctgcatgttctgcactcgtaacccggaactttaagtaaaataaaaaaaattaaattaaaaaagaaaagaaaatattgggctaagtaaaagaaacagatacagaagacccaaaattgtatggctcaatttacatgacacgtccagaatatgcaaattcgtggaaacagaaagcagataagtggttgcttagggcgcagggtgamaaggagattaggaggattgaggaagtgacagctaaaggggcttctttttgggggtgatgaaaatgttataaaatggacggcggggatggtcacacaactccatgctaaaaagtgaattgtacactttaaatgggtgaattgaatagcatgtgcggtatatcgcaataaagccattacaacagaaagaatcaaggaacaaacaaaagtggcagggttgggaggacgggtctggaggtagcagggagggtcacagtccccagggcccaact

SEQ ID NO: 806920 - DNA, 504 bp, Homo sapiens
tcacggccttctacactctgacgtcttgagaacaagcacacaaatgactgttcattctgtggtagactgaataaaggccccccaagatgtctgcatcctcatccccagatatgtgaccccagaaggcaaaggcacttgggagaggtgactaagtgaaggatcttgagctggagagattttcctggatatccaggtgggccccaaatgtcatcacaagggtccawgcagggaaagaaggagggcaggagggtcattgaaggaagtggagatcagagctggagagaagtttgaagaggctggctgccctctggccttgaagatggaggaggggccacgagccaagggatgcaggcagcgtctaggagccaaaaaagcaggaaatggatcctcccctgaaactccaaaaggaacacggcgctgctgacaccttgattttagacttctgacatcgggaactgcagggtaacatgttattctgcctgggctgctgtaacaaaacaccat

SEQ ID NO: 806921 - DNA, 676 bp, Homo sapiens
gcgttgagagagtgtcggaagttttcaaagctcccagagtgattctcatataccactgagtgtgagagccagcactgaactctcttctacagcagccttttctttctaaaagctgcagtgaaatgctttcgtagccaaaatcctattctgaactccaatacgtgaaagagctggaaggagccccgagcctaccaccctaagtgctcagaggcccccaagtcctcccrgttcctcagtgcagtttggaagctgctttcctgtaggatgcttggggccagttaccagggtgacctgtgtggttatgccaggccagggtctgagccgttgggatagggcagggactcagggctcagcctactgacacacaggtgatctcttccaggggaggggtgtgtgtgtgtgtgtgtgtgtgtgtgtgtgtgtgtgtgtgtgtgtgtgtgtgtgtgtgtgtgtggtggctgctaattttgagtcaataccagatctgcaatgagtttctgtacagtcagaaggtcctgccttgcacccccactgtggagggatgtgggggtgtgtggctccagcttggtgttggccagggtcactgagacataagggctgtgacctccagagtgcagaagccaccagctcctgggtgccacgaaggggatcctgcaggacccatccttgtggcctg

SEQ ID NO: 806922 - DNA, 638 bp, Homo sapiens
ggaaacgtgtgctgtagtctgggctttgctggtgacctgggaggattggcttgagttctctgggccccatttcctcattttaagattggagccagtgtctactacactttgctgagttgtttcaaaaatctgttatctcaagaaaataaggacctgagcacaggaaagatgggctgggctggagaagctgcctgcccgacgaagagggggtgggctgatgttgacaatgtctgttgtttcccaacatccccgtgaggttgtgctgttattagcatcctgtgttatagatgggaatccaggrcagaaagggatagacgtcccaggtcacgtggctaggaggtccagggcaagaagggataggtgtcccaggtcacgtggctaggaggtccagggcaggaagggatgtgtcccaggtcacgtggttgggaggtccagggcaggaagggataggcctcccaggtcacatggctgggaggtggccgagctggggctgcatgggatttccgtttggctctggggtcagctctcttagctaccaagcttagagcctttcttacactagtgttcacatgactgatggacccttagaacaatgccccttgcctttccccttcatcagagacccggagaatttgtat

SEQ ID NO: 806923 - DNA, 638 bp, Homo sapiens
ggaaacgtgtgctgtagtctgggctttgctggtgacctgggaggattggcttgagttctctgggccccatttcctcattttaagattggagccagtgtctactacactttgctgagttgtttcaaaaatctgttatctcaagaaaataaggacctgagcacaggaaagatgggctgggctggagaagctgcctgcccgacgaagagggggtgggctgatgttgacaatgtctgttgtttcccaacatccccgtgaggttgtgctgttattagcatcctgtgttatagatgggaatccagggcagaaagggatagacgtcccaggtcacgtggctaggaggtccagggcaagaagggataggtgtcccaggtcacgtggctaggaggtccagggcaggaagggatgtgtcccaggtcacgtggttgggaggtccagggcaggaagggataggcstcccaggtcacatggctgggaggtggccgagctggggctgcatgggatttccgtttggctctggggtcagctctcttagctaccaagcttagagcctttcttacactagtgttcacatgactgatggacccttagaacaatgccccttgcctttccccttcatcagagacccggagaatttgtat

SEQ ID NO: 806924 - DNA, 590 bp, Homo sapiens
aaaactggcctcttgtctttctttgttctcccggggctcctgtctttcgaagtgagaactgtctcaccagttctaaagttcctgcagacatctgctctttgaaaaccatcagccaacccacccacccccaccaggtcgacccttgggcagccccactcagagatgttcccagagtcctggtgggttctccacggatggtgcaaaggtgcaggggccccagctgtgctcgtctggctcaggtrtcttcaccagccacccccaccagttggcgtgtcaggagcatcgctcacctgagggcaggcacagccccatggtccccgttccactgggcactctgggagtggctgccttttcattaggggcttgatctgtccctctccagtaaacatagacgccatgtcctcgggttggtgtttcctccactacccctcctcctggggttttctgtattaactttacctttcctgcgtgcaagctgacccaggtgacctcttcctccacacaggtcgccgtgagtcaagctgcctccagaacctcagagcttccctggtgggctcccccgggatccccagtgtctctctgcacctcca

SEQ ID NO: 806925 - DNA, 747 bp, Homo sapiens
gtctgtgacccgactcgaccgcctccctcccagaaccaccgtgagccccaggcaagtgccgacgctgttccacctgtggctgagccaggtacctgtcccctctgcatgcacccgggccacccaccggggtggggaatggacagtgaagtccaaggatgacctgatgaaaggggcgctcagagaagaccctgggacttccaggacagaacaggactcgggaaaaacaactcagtgtagtgttctgtgtgcacatttatttctttcaaagattgtttgtgttccagccacatcttctccaaaggaacccacccaagcccgtgtgcaggcttgctgcagggctgtcttcggcgtttaaagtgctactgaggaatacaatcattgtcacgtaagttcatcaccgcactccagcgtcaggccaaacctttccgtggacctggaaaacctgccaytttcttctctttttacaatgcagtttcgacataacattggtagagtaaacaacaaaccacaagcctaaatgatgaatggtgcgctgctgcccagctgctaactgagagaacgaggcagtgtattgtgtttcgaatgcaaacggtcatggacccaagttaacctgagtttgctctgcaggattccgcgggggccttgccctgtgcaggctgctttggtcttcgtgtctaggccggtttggggcagtggggagagggcctggcagcagggtttacgccagccccgaggtctgttttccgt

SEQ ID NO: 806926 - DNA, 747 bp, Homo sapiens
gtctgtgacccgactcgaccgcctccctcccagaaccaccgtgagccccaggcaagtgccgacgctgttccacctgtggctgagccaggtacctgtcccctctgcatgcacccgggccacccaccggggtggggaatggacagtgaagtccaaggatgacctgatgaaaggggcgctcagagaagaccctgggacttccaggacagaacaggactcgggaaaaacaactcagtgtagtgttctgtgtgcacatttatttctttcaaagattgtttgtgttccagccacatcttctccaaaggaacccacccaagcccgtgtgcaggcttgctgcagggctgtcttcggcgtttaaagtgctactgaggaatacaatcattgtcacgtaagttcatcaccgcactccagcgtcaggccaaacctttccgtggacctggaaaacctgccactttcttctctttttacaatgcagtttcracataacattggtagagtaaacaacaaaccacaagcctaaatgatgaatggtgcgctgctgcccagctgctaactgagagaacgaggcagtgtattgtgtttcgaatgcaaacggtcatggacccaagttaacctgagtttgctctgcaggattccgcgggggccttgccctgtgcaggctgctttggtcttcgtgtctaggccggtttggggcagtggggagagggcctggcagcagggtttacgccagccccgaggtctgttttccgt

SEQ ID NO: 806927 - DNA, 676 bp, Homo sapiens
ccaatgcacttcactttgcaagcgcttcagcatgcagatcattaattggagttcattatgagtttataattctttttttaaataaaatttacaaacagcaatgtgcataacttttaagtctcatccaaacctctctcacaatgcagaaygttagccgagaatcccctgtgacctttcccaggcactatggaaccactaaggcaaccacagtgttgaattttcttccctggggatgagctttgctggctctagaccttcatataaatggagttgcacagtctgtactcctttgtgtaagatttctctcacatggcatggtgttctgaggatcacactgttgcatgcaatggtaggccaagcctttgatggatgagtattgttccactgtacaaatgcaccatggcttgtcagtttgctctcctggtgacagacacacaagctgagtccaggatttgctttgacttgtcttgggtaaatatctaagagtgggaggttaactcatggggctgttgcatatttaattttataagatcctgctggacatttttccaaagtggctgtgccattttgccttccaacgtgtgagagttctcatcatactacatctttcccaacaattggtgttgccattctttctaattttagccgttctgttgtgatctctttgtggcttatg

SEQ ID NO: 806928 - DNA, 583 bp, Homo sapiens
ctttttggacatcatgtatcttccttcgtaaagtaaaaagttagatgggctcatgcctgtaatccctgcactttaggaggctgaggtgggtggatcacctgaggtcaggagttcgagaccagactggccaacatggtgaaaccccatctctactaaaaatgcaaaaattagctgggcgtggtggcacacgcctgtgatcccagctactcgggaggctgaggcaggagaatctcttgaacytgggaggtggaggttgcagtgacctgagatcgcgctactgcctgagcgacagagcaagactccatctcaaaaaaaaaaaaaaaaaaaaagattagatggattcttgtcatctaaatgttcttgtgaacatttgtgtatcaatatttgtggatttgctcactgtgaacctttgtgtatttgctcacagatgagtaagactaagaataatagtcttgaaacattcatctgtgagcaaatacacaaaaaacaatactggaataatcagtgaattggttaaaaataaacagctctttttaaaaaattaactttattgagatgtaatttgcacattcaacaatgcacc

SEQ ID NO: 806929 - DNA, 608 bp, Homo sapiens
ttgggagtgaaaaaggctagaagcattgtttcatatatctttattttgttataatttatcctattttttcgaaagagatcttccgcttctttttgttttctgaataatttggtcctaaagtcatgaggtgggctgagcaggatagggttctattctggcatggacagggcagtaccctgagtcagaggaggtgcaggagtttgagcagggtgagggtcgtgctcatggaggggaggcctggtgtagaggtgagagctgggggagattgggaggcatcctttggtgggggcagctgactcagattgtatgtaccccagcaggggcaggtgggtaccccacaggggggctgaacgctgcagctcatgtctattccttatgtctttcagggttcacccagggcccgaaagcttgtgtctggaccattgagaaagacaactggacmgttctatgtggatacgaacatgcaggaggaagtccatgcttcctagcacaggccctagaatcagagtaaacgaggtcagaagtcagctgccccactggctgtgtgccctagacaagccaggggctcctctgtgcctcagttacctcacctggaaaatgggaatcac

SEQ ID NO: 806930 - DNA, 645 bp, Homo sapiens
ctaaattttggcttgcaagtagggtgacatctcaggccctttacagttcttgcccctagaaccaggcaaatctggtggaaacaatatgtaaggagtgtccagatgcctggccagaagtataagcctctctgggcagcaggagaattcccactagcactcttccctcctggggagagcaggccatttcacctaaattacctcatcaatcctaaaaatacatgaatgcccaagttgtctttgttaaaaataaggaagawtggaatccagaaaggggagagaagcctgcccagggtcacacaattgcccaggatgagactggcacctgcctctcttctcctagtcttggacatgttgagccgagagctctgtcatggaagagctaaaaagatctttccctgcctgaccgtggagactcacaacttctaccctctggcaataaggagtgtgataatgaaatgatcaatatcagttgaggctgcctaagaaagaagagaatttgaagacaaaaatgatgaaaagacatggaatgcgaggagaaaagagtgtgcagaggagagggtgagcaggagatggaggaagagcagggaaatagaagctgcacttcgcagatgtggaggctgtgaggaacgcagagtgagggaggat

SEQ ID NO: 806931 - DNA, 645 bp, Homo sapiens
ctaaattttggcttgcaagtagggtgacatctcaggccctttacagttcttgcccctagaaccaggcaaatctggtggaaacaatatgtaaggagtgtccagatgcctggccagaagtataagcctctctgggcagcaggagaattcccactagcactcttccctcctggggagagcaggccatttcacctaaattacctcatcaatcctaaaaatacatgaatgcccaagttgtctttgttaaaaataaggaagaatggaatccagaaaggggagagaagcctgcccagggtcacacaattgcccaggatgagactggcacctgcctctcttctcctagtcttggacatgttgagccgagagctctgtcatggaagagctaaaaagatctttccctgcctgaccgtggagactcacaacttctaccctctggcaataaggagtgtgatwatgaaatgatcaatatcagttgaggctgcctaagaaagaagagaatttgaagacaaaaatgatgaaaagacatggaatgcgaggagaaaagagtgtgcagaggagagggtgagcaggagatggaggaagagcagggaaatagaagctgcacttcgcagatgtggaggctgtgaggaacgcagagtgagggaggat

SEQ ID NO: 806932 - DNA, 583 bp, Homo sapiens
ctttttggacatcatgtatcttccttcgtaaagtaaaaagttagatgggctcatgcctgtaatccctgcactttaggaggctgaggtgggtggatcacctgaggtcaggagttcgagaccagactggccaacatggtgaaaccccatctctactaaaaatgcaaaaattagctgggcgtggtggcacacgcctgtgatcccagctactcgggaggctgaggcaggagaatctcttgaacctgggaggtggaggttgcagtgacctgagatcgcgctactgcctgagcgacagagcaagactccatctcaaaaaaaaaaaaaaaaaaaaagattagatggattcttgtcatctaaatgttcttgtgaacatttgtgtatcaatatttgtggatttgctcactgtgaacmtttgtgtatttgctcacagatgagtaagactaagaataatagtcttgaaacattcatctgtgagcaaatacacaaaaaacaatactggaataatcagtgaattggttaaaaataaacagctctttttaaaaaattaactttattgagatgtaatttgcacattcaacaatgcacc

SEQ ID NO: 806933 - DNA, 612 bp, Homo sapiens
atcttgaccaagcttgtccaacccacatgaggcccaggacagctttgggcttaagccatcatcccacctcagcctcctaaggctgccctgttcaatttgtgttggctgcccaacacaaattggtaaactttcttaaaatattatgagattttttttttagctcattagctattattagtgttarcgtattttatgtgtggcccagggaggcacaagaatacccctgatattcttgaccttttaaagaccagctcggctggctgactgggggaccctgaaatttgtgaaaatcagaagccatgtattactctgggtgccccattttgggggtttggaggagattggggcctggttgtaatctctttgtgtgcagctcagtgactctgaaagtggcgtttcaagatattcaaactctaacgtgaaaggccccaaagcccgctgagtctctaacactgggaccaactgtcagcagggctgtgcttccacgctgcccggggaaagtcacttgtcctcagagacaatcccttgagtgtctgataacgaaacaaatgggtaggaaacttcagacacagtgtgagcgcgaccctgcttacccaagggaaaggcctgcat

SEQ ID NO: 806934 - DNA, 570 bp, Homo sapiens; identical to SEQ ID NO: 806324

SEQ ID NO: 806935 - DNA, 570 bp, Homo sapiens; identical to SEQ ID NO: 806325

SEQ ID NO: 806936 - DNA, 465 bp, Homo sapiens; identical to SEQ ID NO: 806326

SEQ ID NO: 806937 - DNA, 577 bp, Homo sapiens; identical to SEQ ID NO: 806327

SEQ ID NO: 806938 - DNA, 612 bp, Homo sapiens
attcctaagtgatctaaacccctgctgagttcaccaagtggcctgtaaaaccctatgatgattcttgttgatgggagccatcttcccccactagtaggtgtgggcctttcttaaggtgagggccttgagctcgcaccagttcaacctatggctgtatgaaaattttctggctgacatttttacgcttgtaccttcaagaaatataacaaaacatcatttttcttcttcttatcaagtcatagaatgctaaaggcagcgggaatctagggtgatctggtctaccctctcgtttgacaggtgaagcaatgaggtgttgcgaagttaaactgattagttttttttaattttttaaatgaaattaatatacgttaattatagaaaatgcataagaaaaaggggaaatgcataagatagasggaagcaaacatttttaaataaaatttatataaaacttataaccaaagatgactactatttttattttggagtatactctcccaatatgttttcaaaagcaggatcactctctatgactgctttaaaatcttttttttgtactttaacaacagacatgaacatttttcaaaatattatttctaatagcaaaatatc

SEQ ID NO: 806939 - DNA, 601 bp, Homo sapiens
acctcagtgacctcctctcttcgtggctctcaccccacactctgccactgccacattttcctctgcgcccagcctctgcctccacctgaaactttcctggaaatctcaaaatgtaattccaggtcccgctgccctgggcagcacatcccccttcagaataaagggcaccaaccgtcccctggcacctgcctaagccataccccttgctcccctccccagtccctgcagcccaagggtcccctcgaccaccccaagtccccacctgggcttctgctgcacccccgctgccctccctcccgctggccggcagcaccttctccacccgggcccctctgctcacagcgctccccgcccccgtctccccgaggggcggggagccaggacatggccctgaaagcctagccctggccttgacctccccagagcgccctccccaccctccgccctctgccaacccyggcccctgccctggccccgtccttgtcctctgctgctggccttggggtcgcgccccgcagactgggctgtgcgtgggggtcctggcggcctgtgccgtcccacgcctacggggatgggcgaggtccttcttggggcttctctt

SEQ ID NO: 806940 - DNA, 591 bp, Homo sapiens
catcgcgagtcctgcatggcacagaagcagggtctgcatggccccccgttgattctgcgccgactccctactttgcaggcactgctgcgccctgcactgctggactcgtttcagcttctcagctccatcttctgtcttctgttttgttgtgctgcaggagaggtttgattatgggggtctggaactcccacacctccgtgggcaacatcttggggtcattgatcgctggctactgggtgtccacatgctggggcctgtccttcgtcgtgcctggagccatcgtggcagccatggggatagtgtgctttctcttcctcattgaacgtaagtgcacgtggccttggagaccacccaccaagggaggcctcggrtttccctgcctgggtgggccttgggggcgagtgtgagagctgcgtggcctagcgccctgtttgcccgtggctgcctcagcgctcttcttaccagggagacttccccggggagccggttctctcctggttttgctggatttcctactctcccctgattctggagtgacccatgtccccattccttcctcccgtcctcctgtcctcccttgccccggcatca

SEQ ID NO: 806941 - DNA, 526 bp, Homo sapiens
ccctctaagaaaggctgtttacagacttgccatcaaggagccagttatgtaagtaaaggcactggcaggccttatttcaggctgagggtgacgaccacaaccgggcgcatgctgacctcgcttacgtggcatcccctttcggcgggcctgccattgctcttgggtcagggtaggcggggagagtccccatgaggttggctggacaccctggatgtcccctttcccagagtgacckctgggctcagtggggtgtcacccagcccctgacctccactccttttcagacagagctgctacactatgtcacgtagcaggcagtttctcagtggcctcttgaagagacatgtaaagaaagctggggggcggggagcaaatgtgggaaagagaatgaggcgctgctgtcacttggccacgtggcgagcccgcaggtccccgcgggcgttttagaggattgtcttggggacggtcgcacttgccatccctgtagtcacttgtcacttttcctccttgacgtctctgaggatcc

SEQ ID NO: 806942 - DNA, 581 bp, Homo sapiens
gtcctcatctgtcacacgggttccatccctggggtaataccatatgttgttctgaggatgaagtgaggtcatttaatgacaactaagcacaatgccaggcccatgaaaggcatacggtaaattacacgtacacatcctcatcaactgtgaagacrtcaactcgtttcattttagaatgacttggcaaagtagagcgctgggttcccccggcccccattctgattgatttccagtgcacagacggctgggggattcagtgccacaatgttactggatttctcactctgaattttcagatggcatctggaatttttatctcacaagtgccacctctttctaaaagtagacataaaacaaacacaaacaggcattttacagaacccaccactcgatttcctcactcatacctacgtgtctcttttcactgttttccctgatacggactggtctgtagtactcacaaggcgggatgcggtagcctgtacgcctgtgtgctgacacaatggtcggaattgtttcatctgtgtgtttccaggtggcttgataatgtacaatgatttcagttccagggaagaagaagg

SEQ ID NO: 806943 - DNA, 581 bp, Homo sapiens
gtcctcatctgtcacacgggttccatccctggggtaataccatatgttgttctgaggatgaagtgaggtcatttaatgacaactaagcacaatgccaggcccatgaaaggcatacggtaaattacacgtacacatcctcatcaactgtgaagacatcaactcgtttcattttagaatgacttggcaaagtagagcgctgggttcccccggcccccattctgattgatttccagtgcacagacggctgggggattcagtgccacartgttactggatttctcactctgaattttcagatggcatctggaatttttatctcacaagtgccacctctttctaaaagtagacataaaacaaacacaaacaggcattttacagaacccaccactcgatttcctcactcatacctacgtgtctcttttcactgttttccctgatacggactggtctgtagtactcacaaggcgggatgcggtagcctgtacgcctgtgtgctgacacaatggtcggaattgtttcatctgtgtgtttccaggtggcttgataatgtacaatgatttcagttccagggaagaagaagg

SEQ ID NO: 806944 - DNA, 575 bp, Homo sapiens
tggtactggcacatttagttcatcataggaagtttgaaacactggctcaggaaagcgtttgtaaacttctccttgaaccaagatatttagttgaggatccagtctggcccaatcaattcctaaggtcacgcgctcctctgtttttctagcgagggtcaaggggcttggttattactagctctaaggggttacattgtcccttagtacaggaagggccattttttcctttctgaaggtggactggatctttttcattttctttttgtccaagtggccaaaatgacacaagaccagtgtttacatttatttccacacagtgctaatttatgacagatgtatttattttctgccatatagccttttctaatgaagagaaccacaacttattcctaacttactactattaatgacagcayaggcatcaaattttaagatgaattgtttgggcacccctttttcttctgttttggctaacacttcactcgtatcatttatgagtccacaccagtcctcagtccttaatcttattttaaaaactatggtcatgggaggctcagatgggtcataacacacat

SEQ ID NO: 806945 - DNA, 670 bp, Homo sapiens
cttaaattctttttttgaaattttccaacatagttcctagtagggtgggcttatttgtgcctgacctatgcttctttgagacaaaataccatgctcactccacacgcacaccacaaaacaaaaaaatgggtaaaaagggcacacacacagttttgcagtttgcaccaaacaaaaatcaaaaccaaaatcagagtaaccagaaatctaagccaggtcaaaaccaaaaccaaagtatyaagcaatccaagtcaaatcaaaaacaaaaaccaaagtgccggtacaggcacgctgtgggtgatcaggccatgcttccactcaaatggagtgggcaagttctcaagaccagtcccgtcaagcaattcaaaccaagtcaaaaccaaaaccaaagtgcctgtacaggcacgccgtgggtgatcaggccacgcttccactcaaacggagtgagcaagtttcaaagaccagtcttaccaagtttcagatgtgcagactccaagtgcctgttccttccaggtgttcagccactgcattgatcctccacgggggcctgccacacactgctctggggggcgtcccaccgggacaaatgcctcatattcgttatatcctcaggggatgttacttctaatgtcacacgaggtgttctccctgtgttctatttcataatatccta

SEQ ID NO: 806946 - DNA, 640 bp, Homo sapiens
ttactcctaatgtcacagggggagtgcgccctgttatattattcataatcttctatgggggggttacttttaaagtcacaggggtgtacaccctgtgatgttattcgtaatatcctaggaagaggttactcctaatatcacatgggttatcctaggaagaggttactcccaatatcacactcctaatatcacaccctgtgatagcattcggaatatccaaaagggacgttacttttaatgtcacatggggtgtacaccttttgagattattcataagatcctagggacatactacttcaaatatcacatgggtgtacacacatggtgtacacattatgtgtgaacacctactgtgatattaytcataatatcctaggaaaatgggactcctaatatcacagtgagtgtacatactgtgatatcatttgtaatatcctaggggaatattactcctaaaccaaaggcgtgtgtaccctcatgatagtattcataatactctagggagatgttactcctaatgtcatatcacaggggtgcacaccctgtgatagtcacagtatatgagagggatattagcactgaagtcacaatgtgtgtacaccttgtgatattattcataatatcctacggggatgttact

SEQ ID NO: 806947 - DNA, 562 bp, Homo sapiens
caaaaaccagttgtcattttcaaataacatagctttttgttgtgcttttaatagcaccgtgaaaatcttaagttttatcattaattgatgacaaataaaaatgcagtcttagcattggtattacttgtagaacaaaaccgttacaggaaagggacagattccagagttccctgatgcgtagagaacattgaaaacacaaagcatcatggaaatgggacacggcraagagggaggggtagaaatttacaccaaagacctcacataatagcacaaagggaaacctcagtgggaaaaaaaaaagcaccattgatccaaaaatataactagaattaaaatagttattatttagtacccttggccaaatccttaacatgtgctaattttaggaaatagtagaaagcagaggctagcaaaaggaagggagccctcacaccccaggtcagttggtggtgtgtgagccgggctgtgtgggctgccaggcacatagcgcccacccacctgcccacccactgctgcaggtgcccgagtagcccacccagggagtttgttttgatactttata

SEQ ID NO: 806948 - DNA, 620 bp, Homo sapiens
acttgcacttccttccttactgcaagtcctctctccctctccagctcttaaaaatatttagtttttaagagcgagagactgggctgcatgaaatgtgatttgagggacctgggaccagcctgcagcacctcaaaatttctgaaagcaaccaccagacaggtgttgcccctagaaccaggacgaggcgctgtgtgtggtggggaggactctcggggtctggccctctacaggcctgcattctcggacccctctgggtcccatactgtgaaaccctcagttagatcattctcactagcgcctgggggccagctccgaagcagaaatcagagctggtggcctccggcaagccacgtgaccaacctgaccctcggtgtgtctgtctgtaaaacgggcattccaaaacctacttcaagggcaaccrccaagtttagacgtcatcctgtacggagcacagtgagccagccacgcgtgctgcgtacgagttaagggtccctattgtctgacaaatgagcacagagccggccctgctgccttgggggtctctgtgaagggggctgctctgctgcagctccgagatctccttccctagaggggggcagaggagggccaggctcccacga

SEQ ID NO: 806949 - DNA, 512 bp, Homo sapiens
ccagagttactggcctccccatccccacggatccactccccatccactcttcagatactcagacatatgtgcactaaacccacctagcttaatactatggtacagacccctcaacagaccccaaatccctatcactctccagggcaggctcacagccttgttcctgctaatcacaaggacagaggactgccctggaaaacaggggcaccaacactgtaggtggagggaccagcagcagggcccggctctgtcttccgagcccactgatcggagtctgctayctaactgttcaccacccagcgtgggacagaacagcacccctgcaccctcccagaactgccgtgaggatcagatcagccaacacacatgtggcactgaaagtggtgtctggcactgaactgcggctccgtgtcaaccacttatcacccttatcaccatgttatggtcactattgctacaggcatgcaaggataaggtgtgcattcgacatcttaagaatccagcgttagcat

SEQ ID NO: 806950 - DNA, 626 bp, Homo sapiens
aacaaaaaaaaaatcttttggcatttttttttctccctttagggacaaaggatcccttctcatgattatcctaagatctaaggttattctttttgcctcccagggtggatggtggcagatgcccttgcatttacttgatagcagactcctctttgataaaggcctttgataaaggcctcattccgccagtttatcttgccacctcaatgaatcrctagctgtgtcaggaatccctacacaatccatttaaatgactgtggcagggcctcttcccctgtggaagctgaaggtggcacgtccatctccgatgaaatgcgaatggggctctgggcacgcggcggaaggcagagaagaggcagagaaagaagctaataactaattacaccgactccacaattacgactaacgttggggacgaactctttgctaaataaacatttaggtgaaacaaagcttccatttccaatcggcctaactctggtattagcgttggcaggggccatgcaggaggggcagtgagcagtggtggccgcgttgccgacagagggtgagggagctgggcgcgtggtgtgggcgccgaggtcccgagctgaagagctttaaaacctctcaaaacacagaactat

SEQ ID NO: 806951 - DNA, 564 bp, Homo sapiens
gagtcctcggactctcactgcagttggtgtgctgagtatcacagtgtaggggcctgtccacttcggtggtagctttttgtgagggtcagtttggccgataaacacgtctgtgcctgcaagacagttatgatgttgagaggataaggaggtgtcggcagggagaggcatggcctcactcactgcttcacgagtgaaagaccgtgtctggattaaggaggggaggtaattcctgagtggctcagagtctgttaagggtggaggctctaagacaaaagttcrgccatacatgatctcaaagggactataaaaaaaggctgcctttggtgttgccagagtctcatgagggcgaaagggagacttctcgtacacgactggcagatttctagagtgagcttggtgagttgggctttaaggacagagttgaccttttcaacttagcctgaagattgaggccggtagggtgtgtggagaacccattttattcccaaggatgtagaggcgccttgggtgatttggctgataaaggcaggcccgttatcggaccggatggatgttgggagtctg

SEQ ID NO: 806952 - DNA, 392 bp, Homo sapiens
ccgggtgtggcggtgcatgccagtagtcccagctactcgggagactgaagcaggagaattgcttgatcccgggaggcggaggttgtggtgggccgagatcgcactattgcacttcagcctgggcaacaagagtgaaactgtctcacacacacacaaaaagttataggtaggacaatttccaggtatggttgttttgcaatcagggcatctcagcgggtccaccaaayaggaggtttgtctctgtgcctggatggtttcattactcattcatgagacaaagagcgggaaggtagagggtctgggtgtggctttgtcacaggtaaacactggtgccggatgggcacggtggctcaagcctataatcttagcactttggaaggtggaggcaggag

SEQ ID NO: 806953 - DNA, 510 bp, Homo sapiens
tctcttgcccacgctggagtgcagtggcatgatctcagctcaccgcaacctccgcctcccaggttcaagtgattctcctgcctcagcctcccgagtagctgagactacaggcacatgccaccatgcccagctaatttttgtattttaaactttttaaacagaaatcagaatacayaccttccctgctctcccacagatcctcactgcactcatgatggagacccaagtcctcgttctggctgatgaagccccgccagatcaagccctcctgcttcccggcgttcccctcgtatcactcatccatctgcaccatgccccaggagcgccagcctgctctgcattttcttaaccagaatgttcctgccccaatcttcacatgtcttgctcctttcaaatctcactcagtagagcaattccagctccaacatgctgagaactaagctccgattttttaaatcttgcccaaattcctacctaaggggtctggggagtcatgccctacaaaccatg

SEQ ID NO: 806954 - DNA, 510 bp, Homo sapiens
tctcttgcccacgctggagtgcagtggcatgatctcagctcaccgcaacctccgcctcccaggttcaagtgattctcctgcctcagcctcccgagtagctgagactacaggcacatgccaccatgcccagctaatttttgtattttaaactttttaaacagaaatcagaatacacaccttccctgctctcccacagatcctcactgcactcatgatggagacccaagtcctcgttctggctgatgaagccccgccagatcaagccctcctgcttcccggcgttcccctcrtatcactcatccatctgcaccatgccccaggagcgccagcctgctctgcattttcttaaccagaatgttcctgccccaatcttcacatgtcttgctcctttcaaatctcactcagtagagcaattccagctccaacatgctgagaactaagctccgattttttaaatcttgcccaaattcctacctaaggggtctggggagtcatgccctacaaaccatg

SEQ ID NO: 806955 - DNA, 510 bp, Homo sapiens
tctcttgcccacgctggagtgcagtggcatgatctcagctcaccgcaacctccgcctcccaggttcaagtgattctcctgcctcagcctcccgagtagctgagactacaggcacatgccaccatgcccagctaatttttgtattttaaactttttaaacagaaatcagaatacacaccttccctgctctcccacagatcctcactgcactcatgatggagacccaagtcctcgttctggctgatgaagccccgccagatcaagccctcctgcttcccggcgttcccctcgyatcactcatccatctgcaccatgccccaggagcgccagcctgctctgcattttcttaaccagaatgttcctgccccaatcttcacatgtcttgctcctttcaaatctcactcagtagagcaattccagctccaacatgctgagaactaagctccgattttttaaatcttgcccaaattcctacctaaggggtctggggagtcatgccctacaaaccatg

SEQ ID NO: 806956 - DNA, 592 bp, Homo sapiens
attctgaacatatatgcacccaacactacagcacccagatatataaagcaaatgttattagatctaaagggagagatagactccaatatgataatagttaaaaatttaaacaccccactctcaacatggaacagatcacctagacataaaattaacaaggaaactttggctttaaccacacattagaccaaatggacctaacagatgtttacagaacatttcatccaacagctacagaatacactttcttcttatcagcacacaaaaccttttccagggtggaccatgttagggacacaaaacaagtctcaacaaatctaaaataattaaaattatagcaagtatcttttttgaccacagtggaataaaactagaaatcaacaataaggractttcaaaattgggcaagtatgtgtgaattaaacaacctgctcctgaacaatcaatgagtcaacaacaaaatcaagaggaaaattttaaaattaattgaaacaaatgaaaatcaaaacacaatatatcaaaaccaataggatatagcaaaagcagtgctaagagggaaatttagagcaataaatgtctacatcagaaaagt

SEQ ID NO: 806957 - DNA, 577 bp, Homo sapiens; identical to SEQ ID NO: 804747

SEQ ID NO: 806958 - DNA, 681 bp, Homo sapiens
gaggagagggagaaagggatagaagaaatatttgaagtaataatggcttctcatttttcaaaattggtgtcagacaccaaaccacagatctaggaagcttagagaacactaagtacaacaaatgccaaaaaataggaactttggcatgtcgtattcaaactgcaggaaaccagagacagaatatcttgaaagatgtcggagggaaagtaccttcctatagaggaacaagaatacggatcacactggacttccatcaaaaatcatgtgatctgggtactggaagctacatgtaaagaagaaattcatgctcacgcctgtaatcccagcactttgggaggccgaggcgggcggatcacgaggtcaggagatcgagatcatcctggctaacacggtgaaaccccatctctactgaaaatacaaaaaaattagccaggcgtggcagtgggtgcctatagtctcagctactcgggaggctgaggcaggagaatggcgtgaacccgggaggcggagcttgcagtgagccgagatcgyaccactggcactccagcctgggcgacagagactcggtctcaaaaaacaaaacaaaacaaaaacccaaaagaagaggcacctgagccgcttgcttgagcctgctcccactctgaaatgtcttcagtaaatctgtgctttccttgcttctcc

SEQ ID NO: 806959 - DNA, 574 bp, Homo sapiens
gtcttgttattaaatgcgccaacatattactttaatatttcgataactttttcactttaattggttttctttgcaatcagatgtgttttatcttacggatttgtcaacatcatttgagaagaagtccataggctcagcagatttttatgccaggtgggccatggcataaaaatgtgaagaatgtgctcacttagacaatacgtgtgctaaaattggarcaatacagagaagattagcaaattaaaacaatgttaggaagtcagtgtggtgaggtacggtgcctcatgcctgtaatcccagcactttgggaggccgagatggaaggactgcttgagaccaagaggttgtgaccagcctggacaacagaggagaccctgtctctgctaaaaataaaaaattagctgggtgtggtggtgcatgcctgcagttccagctacttaggaggctgaggtgggaggatcgcttgagcccaggaatttgaggctgcagtgagttatgaccgcaccactgcactccagcctgggcgacagagcgagaccctgtctcaaaaaacaaacacaaaacaaaccccaac

SEQ ID NO: 806960 - DNA, 648 bp, Homo sapiens
ttagctcatcagctgttgttagtgtttgtgtattttaggtgtgccccaagacagttattcttccattatggcttggggaagtcacaagattggacacccgtgttgtatatgttgggcatataggatagtgcaggtcaggctgggtggctttctccagccactgcactaagataccaagtagctggagggcggcctcagtcttcagcctggctccaggcttctgtggcattccacaggggcgctttggggctgtgtgagacaggcattgcttggtctaactccacctttgtaaaagatgggaatggtccctttttcaaggacatgtcaagaagggaaaggctctttctcaatttttccctttttctaaattacagcttttagcagatcagaatctcaagtttatcgatccattctgcaaaattgctgcraagacgaaggagtaagtgattcccctgttcgttcctcctgctccgtggcatttgctcatgggagttacttgccgtcgtgcagcctggcacagggtacccaggacactgcttcacagcagagagcggctggagaagacagccgaagctttgagcagtgatttggctcttctagcttcagtatttgcctcactcattccaggaatgccctcccacacccaaa

SEQ ID NO: 806961 - DNA, 584 bp, Homo sapiens
gaagagggtcctgcattagactacgtaaacatcagtgcttctcttcactgaaaggtactctgaagggagtgaaaaggccctccgcagcttggaagagtacaaccagtatatatagacaagaaagggcccttactccagggcgtactgtgaagaactcacatacatcaatgcagaaagactgacaaaccagtagaaaaacaggcaagagaggaaatccaaatggccgataaacatgaaaaggggctcagtctcatgaatcatagcaaaatgcaaactgaarccattattaatgaagtaccagcacacaccaccagaatggccaggatggaaaggctttcctcgggtatcagtgggagggtggagatgctggcgctcattcactgatggtagtgtgcatcactgggaccactttggaaggctgtttgcgatatctaatgggtatcgccattacaacacatgccccgtgacccagcacatccacccctggtgtgtacagatacatgcacacacacatgcatcagaaggcaagtacacagagatacctgtggcacccgtgagtcattggagctgcaaacggggaagaa

SEQ ID NO: 806962 - DNA, 600 bp, Homo sapiens
gctataggagaataaatgtgtgttgctgaagccactgactagtcagctactgcaaccgttggaaactacagctattatcacaatgcccataaaacacgctccagcagcgtgagaacaaagacagttgtgtggtggttatgaaacctcacctaacaagaccatgtttaagaaaagccaaataaaaacaagaagtaattatttaagcggtatcctaataaayggcttgcaaaaatatgtgagcaaatgaagtggtctccatccagaaccttgatgctggtatttattttgctacttaagagagtaagagggccatttggatcgtgtcatggagggtgtttcgacatcatgttcctgctagcagttgcagaggcaacacactggtccaggctgtgcatctgggctccaggccgcttcccgtggggcagggcagctgctccaggaagaggctgagagctggggtctgggtgactgggctgggatctgcgccgggtggggaggagaagcccaccgcactggggttcaggggttcccagaagaggagaccaaagccatgcatggtgctttgcagcctgagtctgagctgagctggtggggggaccc

SEQ ID NO: 806963 - DNA, 574 bp, Homo sapiens
acaggtgtgagccactgcgcttggccctgtctacgagtctttttttagatttccattcttcctaacatatttaaaaagttcctcttcaccccaagatggtataagcatgcacctttattttctttggatattttatttcattttttccatttcatcatttcatgtcttcatttaagtcattttatgtattaattctaattggaataattttagtgtttgccatggcttttgcgaattactatccagttctctcaagatcacttttgaatacgccctccattccctgatgcattcaaaaccgtgtgtcaatcacctgcctctctgagtgcctgggtctcaggctttgcatttctctccaggggtgtgtcagtttctgccttggagctcctgccaygctggctgtagctttataccatgtttaaacaccccgcgccgtgtgacagtcttcagaagtgtcttgtctcgtgttcactcaccttccacaagaacattaaatcaagttctttgaaaaatcccattggtaatttgattggaatgaatggtattagatttacacactaattaaggaagaact

SEQ ID NO: 806964 - DNA, 555 bp, Homo sapiens
accggttggggtcagatttggggtgaagaatgagtaagtttctgcatgctttgtctctacctgagacacttctacaacaagccaagtataatctctccagccctgcagattttcacctgacttgttcagccccatgcgtagactcccgctgcaggcctctggcctgtggctcactgcatgcagcccctggcgtgcaatactagtgctccacggcgcgatgtgcttctagcccttgcactgcacctaggctcagggttcaaacggccagcccgaaaagcctgcctgccttctttytggaaacagcacgtccccggccgtgtgcctgcccctttctctactgagctagtccccaaaccaaaggcaagccccctcgggcctcgggggatggggccggccacacccctgactccgccctggctctgccccatacccctgccgtggggccgacctgggggatgcagacatccggctccgtattcctgcctatcggggccaggatgcaaaaacaatttttgcgtaaaagatgtcacactgatctgctggagtggggtggac

SEQ ID NO: 806965 - DNA, 647 bp, Homo sapiens; identical to SEQ ID NO: 804756

SEQ ID NO: 806966 - DNA, 587 bp, Homo sapiens
cattaggaaatatgcacttaatataagagaaagtagtgaagaaagaatataaggacagtggtgacaaaaaaaacccataaacccacagaaccatataaaacatatgggaaataaaaagtaaactagtagacataaattcaagtacagttgattttcattgttagtagtaattacataaagtcattgcaaatactgaattaggaaataatataccattgttcctaggggaaatacagagtttggttcttgtaatcctctggtcgcagtttcaactatcaacatatagtcgagtgttatatatgtttaataattattgtttattcattaacattgaactcagccaacagtactacaacttakgccttaacaaagcttctctaacatacatattttctctgtaaggcacatcacagcctttttgcacttaggaacactgaacagccccttcaccaccatgcctgagggccattttaaacagtaaagtcacccaaaaaatcacaaaaatgtgaaaatgtggcattaagtagattacaaaaaaaaatgcttatttacaatatgagagctgaagcaagaatgcagagtgtgcc

SEQ ID NO: 806967 - DNA, 567 bp, Homo sapiens
tgggccacaggaagcatttctctaaaggtgagcagcttcctctgcaggtgacacggcctccacccaaacccagaggctctggctctcccactgcggcttgccgcagccccacacttgcctgctcccacactgacacctccaacaccacaggggctgctgggtcacgtggcccagatggcagggctgctcagacagtcattttctgctcctggccgcctcgaagctggcagcctccatgtcagccragccgtgggtcagagcagtgcccccaggaattaaatatgttgccttcagaacccaaaaaggcctgtcaggccctgtgcttcctcctttgaagtaggggatgcaagatgtagcaatttctcttttactttagaggatgtcctggtatgaacctgatcactggtgccctaaaaacttccatgaagttaggtccctgaatcctcggagttcacctcccacccacagatgcaaatgtgtctcataaggcctctagctcatgaccctcctgttcctcctcctgcccattatgtcgtcactgtaatggatcagtgtggtgtccggtgc

SEQ ID NO: 806968 - DNA, 565 bp, Homo sapiens
ccactccccccatgcactgaaagggggaaactgccacacccacaaggcctccccttccaccaggaaaacgtcccagatcactcttggtgaaaacatttaacaattggggccctaactttgtgccaaagattacccatatccccacatcaaccagaatggtgtcctcggtgttggccgggaaacggccaccgcaccagctgagtctcaggcccctcctgcaccacttgtgttaattggggtcttccaagaggcaggtgccatggaagctctgacgtgactggagatttatcagtgcaatgtctgtgaaggatgctggggrggtggccaaagaggacggaagcctcagaccacaggtgagacccctgtgaaggagatacggggagccttggccagcacgtgcccctagacagtgctggccaggccgagggagaacttctggagccaaggtaacccctaaaggattctggtcttgtgaggaggggcctggcttccccctgggagctgctggcttggaagcaggaggcattgcccaggtgagagttcggcatggacccaggggagtggc

SEQ ID NO: 806969 - DNA, 644 bp, Homo sapiens
gagttagcggctttatgggaacactgcatcttccactcaaattttctgtaaatttaaagctgctataaaagataaagtacataaatttttttaaaagtttagcaaaattgtctagctatgagatcagtatcaaaatcaattgcgtaagaatctatgcgtccacagtgataaataagtaaataaacagaggcaaaggaaaagcttttggaagaacaccaactaatacatatggaaggaatgataattttgtaagcattatgcaaataattgattcaggcaagaatcatcatcaaatgctaacactaacaggtataagtatgatgagaaataggacgtttacatagtctaaaactgtctccccacaaagwaaaaaaaagcaacttcatagcggagaaactaagtacagcggtcatcaccttaatcaagggatcaaagttggtgtgtgcttcctggtaaggtgcaggagaaggccccatttcttctgcaatcttcctgacaaaaatgtagtttcataacctgaatctaatcacgagacaccagaaaaaaaaaaacactgaggatattctacaaaataacttgtggaacaattcaaaaatgacaaagtcatcaaacacaaggaaagattaaggaattattccaggtta

SEQ ID NO: 806970 - DNA, 599 bp, Homo sapiens
gtcccagaagtgaaataggagtctctagcctgaaaggacctgctaagccctgcacagtgagtgaagctagtccagtgccagtgtaacaaagtgaatttttaggacgccatgaacagagagaaaaggcttccacagagaaaaccaggccacacagaaaggaacaggaatggtacagcaacaatggatgctaggtgacagtggagcaaaactggaaggmaaataattttctttcttttgagacggggtcttcctctgtcaacaccggagtgcagtggtgcgatcacggctcactgcagcctcgaactcccaggttcaagcaatcttcccacctcagcttcccaagctactagaactacaggcacacaccaccatgcccagctaatttttgtattttttatagagacagggtttcaccgcgttgcccaggctggtctcgaactcctgcactcaaaacaatccgctcacttcggcctcccaaagtgctgggattacaggcataagccactatgcgcggccaggaaaataattttctacctataattttacaaacgtagctaaactatgaagcaaatgtcagaatgaaataaatgcattttctt

SEQ ID NO: 806971 - DNA, 599 bp, Homo sapiens
gtcccagaagtgaaataggagtctctagcctgaaaggacctgctaagccctgcacagtgagtgaagctagtccagtgccagtgtaacaaagtgaatttttaggacgccatgaacagagagaaaaggcttccacagagaaaaccaggccacacagaaaggaacaggaatggtacagcaacaatggatgctaggtgacagtggagcaaaactggaaggcaaataattttctttcttttgagacggggtcttcctctgtcaacaccggagtgcagtggtgcgatcacggctcactgcagcctcgaactcccaggttcaagcaatcttcccacctcagcttcccaagctactagaactacaggcacacaccaccatgcccagctaatttttgtattttttatagagacagggtttcamcgcgttgcccaggctggtctcgaactcctgcactcaaaacaatccgctcacttcggcctcccaaagtgctgggattacaggcataagccactatgcgcggccaggaaaataattttctacctataattttacaaacgtagctaaactatgaagcaaatgtcagaatgaaataaatgcattttctt

SEQ ID NO: 806972 - DNA, 582 bp, Homo sapiens
tatctgggagtaagtgaaagtaatgaaaacacagaagtaaacacaaagtaattatagttcacctttatacacacgttaacagaaatcatctgatcccctttgctgctaagtgagttgaaaagcgaaagcgtctgaatcccaccagcatcgctggatgtgtcatccactgagccttcatctcccatgaacttgacttttaaccaatttgctagaattytacagatttaaaaaaaacaaaaaacaaaaaaaacacttgaagaatctaattctatatttgaattataaagactttcaggaaaagaagaaagaaaaatatcacacagacctaggtccacaaataccacatcttactatgaagctgatctgcacaaaacaggctgttgttttaaaatggagcaacgatctgtactcgttcttttttttttttttttttttttgagccagggtctcgctctgtcgcccaagctagagtgcaatggcacaaacttggctcaccgcagcaagcaaacctgcctcagtagctgagactacaggcacgggccaccatgcccagctaatctttccattttttttgtagagtgt

SEQ ID NO: 806973 - DNA, 582 bp, Homo sapiens
tatctgggagtaagtgaaagtaatgaaaacacagaagtaaacacaaagtaattatagttcacctttatacacacgttaacagaaatcatctgatcccctttgctgctaagtgagttgaaaagcgaaagcgtctgaatcccaccagcatcgctggatgtgtcatccactgagccttcatctcccatgaacttgacttttaaccaatttgctagaattctacagatttaaaaaaaacaaaaaacaaaaaaaacacttgaagaatctaattctatatttgaattataaagactttcaggaaaagaagaaagaraaatatcacacagacctaggtccacaaataccacatcttactatgaagctgatctgcacaaaacaggctgttgttttaaaatggagcaacgatctgtactcgttcttttttttttttttttttttttgagccagggtctcgctctgtcgcccaagctagagtgcaatggcacaaacttggctcaccgcagcaagcaaacctgcctcagtagctgagactacaggcacgggccaccatgcccagctaatctttccattttttttgtagagtgt

SEQ ID NO: 806974 - DNA, 615 bp, Homo sapiens
cgtgctgatgccacgaccgagggaacgggtctccctgtcggcgtgaactgacccggccaggcgtccactgccactcggactgtctcccaggcacgtggcgcccacacgggcagaacacgccctccacacacgcggcttcgggcagaacacgaggcgccctccacacacgcggcttcggggcttgtcatgaaaaaagctgaatgctgggggtgcagctttcaccaacagaatcccgttyggaagggacgcggtgagacatgatccaccctaagttgtgatcctgggtgagccgccgtccacaccctgctgagggtcccttcacccactttattctccagaaaaccctgcccatcagggctgagtcccacgccttccctctccgtccaggcctggctttgacctctggggtcgtgtggggcacaggggacaccctatccaggcagaggccctacggctatctggaggaagtggtgggagctgggcttctgcctggaggatgcacccagaggggtcacagtccacacagagacacacgggtgccttccagatggctgagccagtccagcccagaagggcctgggggttgggggctgcacctggcctgtccccaccagc

SEQ ID NO: 806975 - DNA, 583 bp, Homo sapiens
ctgcattgggcactgagtttcttcctttttcttaatattcatgtctttttttttttttttttttttttttttcaagaaaacacacaacaaatgtcagaatatgagatagggaagttctcctggaacagcatgtagattattttctagagcactttagttaaatggtacttaatgatgataattcttctgaacacaattcagaatttgaaccaatatttgttgtttcaggaaagcagaatttcctttgaatgatggataagaatggtgaggatctttataatatagaataaattgctgaaaagaaactttgagggaatattcaaagcaccctcttattttgaaccttccttgatcatctctaatgtgactgctttctcaraacttccatatcatttgtcccctcttttggagttcttgctgctttttgtttttgtatttgttttcacttattcagtaattattcagtgtccactgcatcctaggtaatatttcagctgtcaaaagtcagattttggctgggcatggtggctcactcctgtaatcccaacactttgggaggccgaggtggttggatcacctgagg

SEQ ID NO: 806976 - DNA, 601 bp, Homo sapiens
ttaaagttctaaatatgtttttaattataaaaacatacaattcaggagactatttgaacacccctttgagtaggaattgtcttcataggcaagataggagacctgggagctagaacagaaaagatggacaggtgcgataggctccctagaaatgagaacatttcagaatgactgagctgctactcgccaggccacagctctgtatgtgtacacagttcagggtgtccacagcagacaaggagtgaggcttcctggtcttttagtgagggtctktagttgggtaaagtagcagaaatccaaaggagaggaaatgtggatgggcaataaatattaaattatgttcaacctcagtggtagatatggaaatgcaaattaaagggcaccatttttctcttatcacattggcaaaattctagaactttttataacatctagtgctgacagagagtggagaaatggcacttttcatacattgcttgtaggagtgtgaattactgtaacctttttggaaagttatctcttcatatctgttaagttaaaaatatatctactccttcatccaataatttcacattgggttttgtatctatctttgttgaat

SEQ ID NO: 806977 - DNA, 587 bp, Homo sapiens
atgctgtccacaggagatacaccttttattcaaagatacaaatagactgacagtaaaaggatgagaaaaggtacatcattcaaacagcagccacaagaaagctggagtggctatactaatctcatacaaaatagacataacaaaaaattcctagagacattttataactatagaagggtcaatctatcaggaaaagctaacaattacaaatatgtatgcacccaacaacaaaacactacaatacacaaagcacacaactgacagaaataagagttggagacttcartgtctcactttctataatgaataaccaagcagaaaatcaactaggaaataaaagatataacattataaacaactagacctaacaaacatctataaaacactccacacaacaagaaagtatacattcttctcaactgcacatagaacattctctagaacacaccaccatatgctaggctataaagcaaacctctctaaatttaaaaggatataatacataaattatgttctcctacacaatagaatgaaattaggaattgatatagtttgaatttttgttcactccaaaactcatactaaaa

SEQ ID NO: 806978 - DNA, 489 bp, Homo sapiens
caaagtaagagcccccctacctccctcacagcaagtaccttacgccacagcctacgaaccaaggaaatatctggtcagtctgggaatgaggcgcattttacaaaggttgccttgtcagttgtttcacaaaacagatgcgcagtcagagaaatttaccagcttttggccttgarttctaatcattaaataagaacgtttgcgctgtcataattaaaaacaaattaataaatcaaatagtgttgaaaaatcattcccatgttgaatatataacttacatcttaaaaataatttggaattattttatttatttctgatcctccgaaggaaacaggattgaagatttttttatactggccagatctttgctaaagtcattctattaataatcagtgtactttattttgctcttgagtccctaaaaatttgataattcacaaatagaacaattaagatggattaaaatctttaacatttcatgctttcttattc

SEQ ID NO: 806979 - DNA, 489 bp, Homo sapiens
caaagtaagagcccccctacctccctcacagcaagtaccttacgccacagcctacgaaccaaggaaatatctggtcagtctgggaatgaggcgcattttacaaaggttgccttgtcagttgtttcacaaaacagatgcgcagtcagagaaatttaccagcttttggccttgagttctaatcattaaataagaacrtttgcgctgtcataattaaaaacaaattaataaatcaaatagtgttgaaaaatcattcccatgttgaatatataacttacatcttaaaaataatttggaattattttatttatttctgatcctccgaaggaaacaggattgaagatttttttatactggccagatctttgctaaagtcattctattaataatcagtgtactttattttgctcttgagtccctaaaaatttgataattcacaaatagaacaattaagatggattaaaatctttaacatttcatgctttcttattc

SEQ ID NO: 806980 - DNA, 617 bp, Homo sapiens
tttcaggaacgtctctgacgtcctgcatcgctctcagcatctttgccctggcggtgctgttgcatctgggcgtccgttgtcgctgtttctccgatgctttctctgcttgtcctctgctgtccgggggcagcctcatggtcgggcccctccctgtagactctgctgccccatttccagtgtcttcgcgcccagccagccggcgctgggccacaccccgccgggggagaccacctggtgtttcatcacctcgagcccttggacttcagccagtcacttcgtttgtcaggcctccgggcagataaaggggtgtgtggcctgcattctgttgaacggcccggtgaggccggggccctgtggctagcgcccccgtgtcaggtgcctgtgtcgtgccctgggcctgagcacgtgggtctgagcactgcagggcttcttcccaaggctgtggtggcccgtctgctgccttgcctctggttcayctcctgccacaaagcctggcccaccagggagtgtcgtgacaggtggatgtgggccctgggtgtccatagcctggctgggctccctgcaggccccaggattgaagctgaggcttaccatgggccttgcagtggcaggcgcct

SEQ ID NO: 806981 - DNA, 601 bp, Homo sapiens
tcttcatgattcttacatctattataaactgctgagccctcaaatctctcagctgagatgcggttctgctgacttcccgcattcctgttgctgattgatgggcttcttcctaatggagctgccaaaagatcaaaatgcacaaattgtactttgcccctattaggactgtggtccaatggaactcttgtcaaatactttaattcacacctgcctctgcccactgaaatgcaggttttattttataataaataacatgtttttatatgaatatagactattgcatttgtgctaacttctgagtttwttcatcttgttttgtttgtaactaattcagcatctttcttgacacagccttgtgtatatcactcatctgtcaaatacatccaatggctcaggccagatacctctgtgatcgttagttttgtgtgtcaatttcactgggtgacagggtgcccagatatttggccaaacattattctgggtgtgtctgtgaaggtgtttctggataagatatatatttgaattggcagattgagtaaagcagattgggtctcatctgatcaattgaagacccaaatagaacaaaaaggctgagaacgag

SEQ ID NO: 806982 - DNA, 633 bp, Homo sapiens
aagtatatctgaacctttgagagtatggcctgtccatacaaaggcagaatctacatttgtcaagtgccttcaagaaacattctaccaagatatgcacctccacaaaagtaagaaaaagagaaaaaaaagattttaaaattttattttatttttttgagatggagtctcgctctgtcccccaggttggagtrcagtggcgctatctcagctcactgcaagctccgcctcccaggttcactccattctcctgcctcagcctcccaagtagctgggactacaggcgcccaccaccacacccggctatttttttttttttgtatttttagtagagacggggtttcaccgtgttagccaggatggtctcaatctcctgacctcgtgatccacccaccttggcctcccaaagtgctgggattacaggcgtgagccaccgcacctggcctttaaaattttatttttaaaaaatcacacacacacaaaatacattctactttttaagaaaattgacttagatttaatcccagctctgctatttgctaaccatgcaattttgggaaagtaacgacctattggagcctgtttcccatctccaaagtgagaatgattaatgctatacctacttcactgagaaga

SEQ ID NO: 806983 - DNA, 598 bp, Homo sapiens
caccacctgccccattcccagggccatcatgttttcattaactcagtgctccataaccaaaagcttctgtccaggctgcatttgtcattaaagatcaacaccagcagaaagctctaggccctggaatcacgaagtccagtgtgctgattagcaagcacactagcagagttcctacttctcaagattatctggcaaagactcaaacacaaggaacaagaatcagatactagtactaatctacaaatcaagaactagaacttcaactgaaaggaaaaaagtgcctgattgttagaactagtgctcagtattgaggcagactaagaccaaagccatttgatattcattccaagaatatttccttggaactatttaaatatcyatcattagaaatgactgtaggtttttagttgtctaagccaacagatggtttcaaatacttcttgtatgaggaaggacctaggaccagcagagcctgacagtatattgctattttgcctctatttgttcatctgtaaaataaaaataatatgtcccctgcctacctgaagatatgtggaagtatcgaatgatatgatgtatatgaaagggctatataaaa

SEQ ID NO: 806984 - DNA, 388 bp, Homo sapiens
ggggtaagacagtctttggaactggtggcttatgaggagatcataagctcgtacagcaagttttctgagtgtctattggaaatgaaccattggatgccaaagagagaggtttgtatgtggaaggtgctggggcaatagggatgagtatgatggcccgggtaccttttagagagttgcttaaccacaggaagaaatactccacagggaagaatgtacatgtgttgaagagwtaatatttaagtatccatccaggacaaacagtcaatgagtgaaagaaaaatgagcgaaagtttgagcagtcaatcctaagtgaaataactcagaaacataaagttaaatactgcatattctcacttaaaagtgggagcttaataatgtgtacacatgg

SEQ ID NO: 806985 - DNA, 665 bp, Homo sapiens
agatattggcttttggcaaactggatcctcagtagcacaggtaaccagtcattcttgcagtgtagaacatactatattgatctaaaacttatcctccatttaacaaaagcattttgttcaagaacactttgcccaatcaccgaggtgattaggaaagaaaaatgagtgaaatttattaattgatcattttgtctaccagattattaaaaacaaaaagaaaaataatcctataaccttcataatggccaccctttgaagaacattgacaaaaacctcaaaacatcgcatttgtgtctatactgaggggctctcacacacacttaagtctaaacatttttgtccagtcttcaaagaccctaatcacttaactagtcatcagctactggccaaaaattatgtgtatctttactttgtgccacatcttctctgactatcaattgatgaagagaggtaytacttaaagatttgcaagctggaagtatttctttgtttcactctctttcaggggcccctagggtagaatgcccatagtgtagaagtctatatttgatttatgctacatcatcatgattttgatttatgctaagacattatgcagagtcatttgtgcatctgattatttcttttctcagataaaagataatagaaaatgacccataacccat

SEQ ID NO: 806986 - DNA, 553 bp, Homo sapiens
tgaatttgatgatgcttttgcgtttcttggttaatcctggccataactttgtacataatctttgtacagttttatagttactgaactctcctaaaactaacctatgtgagtaagtaatctgtttcctgttagggcctttgctggtataccttcktttaatttttttttaaagagtcagtgtctcattatgtcacccaagctggagtgcagtgttacgatcatagttcactacagcctcaaactgggctcaagtgatcctcctacctcgagctcccacatagctgggactataggtgtgtgacatcatgcccagctaattttgtgtgtgtttgtgtgtgtgttttgtagagacagggtcttcctgtgttgtccagggtaatctccaacacctggcctcaatagatcctcccaccttggtctctcaacactctgggattacaggcataagcacatctcttaacttcagttttcatgtctatgcatgcatgctttcttctcacagaaaataagaggcaaaattcccccctgacctaacatggaatctaaagaacat

SEQ ID NO: 806987 - DNA, 521 bp, Homo sapiens
atttccaccacttaaatgatgtgtgaccttgggaacctcttttaaattaagtttagcctacagctgctttcttacatattttacattcagcctaaaggtttctctgcacctactgagctataacttaactggatatgtaaacaagactgtaacctgctgttatagcagtaagccaagtctcagytaatcacagccaccatacttcaactacatatcactcacaggcagcaaattgttattcaaaccatgttcaaataaggcaaacatggagtagtaaccaatctgactgtttctggacctttcattttttttgtacatcacttgcctttttctgttcataaatactctccaaccatgccaatgtgcctaagtcactgaacctattcttgttcgggggttgtccaattcttgaattgttctgtgttcaattcaattgtttaatttgtctaaaatttttattttaaccccctccatgtgaggtttcttacctagcaagtgggaataatgaaaatacttaacac

SEQ ID NO: 806988 - DNA, 589 bp, Homo sapiens
cccatgtatgccattcccactttccttatttttagtatcttaagttcatatagaacatttgttataattaataaaccaatattatcattaactaaagtttatgctttattcagatttccttgttttttaccgaatgtcttttttctgttccaggatctcattcagggtaccacattatatttagtggtcatgtctccttagggtcctctacactgtgacagtttttcagacttycctttttttttttttgtatgatcttgaaagtcttaaagaatattgatcacgtgttttgtaaaatgttcaattgattgggagagcaggtttactgatgattagcttggagttatggttttttgtttgtttgttcatttgtttgtttttacaagaataccacagaggtaaataaattataaagatactttcccctcaagtaggtgacacatagctttctaccacttaagtgtgagctgttcatagaaatttcctgccaaagaatacaatatggacatcagaataaaagagtacctttacagtaggaaactctgacaaactttacctcagccaggtaatcaaggttaacatcttcata

SEQ ID NO: 806989 - DNA, 597 bp, Homo sapiens
tatagtaaattgttcaggccaggcaccatggatcacacctgtaaccctaacactttgcgaaactgaggcaggaagattgcttgaggccaggagttccagaccagtttgggtaatataacatgaccccatctctacaaaaaaataaaagtaaactagccagacatgtggcatgcacctgtaatcccagctacatgggtggctgggtggctgaggtgggaggataccttgagcccaagagtctgaggctgaagtgagttgtgatcacactatagcctgggcaacacagcaagaccctgtctaaaaaaaaaattcaaaggctcttgtgtctgccttaaattaaaataaatttattaaaggcaatgtccatttctcaaagtggttacagaatggaggtagrtgaaacaagataatttgagaacaatacctcaaaatctggcctacataggactaacaaacaatagttgctttcctcccttacttagtcctatatacactgagaagtactctgctgagtggaaaagttcctctcctgctcacaaaatataattcaattcatgtattagcatgacttcaccaatgggggaagatacaatcaaa

SEQ ID NO: 806990 - DNA, 628 bp, Homo sapiens
tatgaaaaaactatgcatggatttcaaaatattttgcaccaaaacagcctcaaactaatttgttccaccgtgtctgaatagaatctagtttgaggcactaagaagaatagaacttcagtctgaaaagagttatattgcaacaacatgaattttgctaacattgaagtcaagatcaagcatcaaatttatggtaaagcttgagtggaagaatgatgaaatcattgatgctttacraaaagttgatggggacaatacctcaaataaatcggcagtttacaaatggataactcattgtataaagagacaagataatgtagatgattatcttaccccttcatataattatcattagaaaataaattagattatcattaggtatccacgttacagtgctgatttgactccttctgacttctttttgtttaataatcttaaaaaatccgaaacgtgcagtggcagaccatctgcatcaatttgcaaggaaaaaaattcatctcattcatgtcctaattgaaaaagactgaagattaacagaagaaacaataaccaacaccaaagacatctcaatttgttcagcttatacaattctgtctaagcatttaaacttgagcaaattttccactctatg

SEQ ID NO: 806991 - DNA, 607 bp, Homo sapiens
ttccaaaactccgggcaatttcttgcaaaacagcaaccccactggttgggtcaatagctccaaatacccaggagtcccggtgacctcccagaataacatacctgtctggaaaataatacgttcaaaaaacctacaactttgaatacattataaatatttgtaattyatgtttttaaaataaacatcctcttgcttgagtttcctctatagaagacaacactataaagtaaaatcttcttttagatttgtacagttttcctcaaaatttagtagtttcaaatcagccaaaaaaccccacttcaattgttgactacaatttatctttacttaccctttaatttttgtaaaaacaaaatgttttaaaaaattatgtgactcaccaggttccacagatcctctgatagttccaactacattgtaaatccttgtaattttattgatgttataaacatgcattctaaccttcctagaattttaaaaggaataaattacttagtacagcaaattatgttttttacagtgttttattataaaaaactattttcataatagtgttttattatgaaaagctgtgcaatagcataatggattctcatatctctaccac

SEQ ID NO: 806992 - DNA, 657 bp, Homo sapiens
ataagtttaactttttaagaaaatgcctaagataagtgaaaagtggttgcatcattttgcatttctacctcaaaataaggaaatcagtattccaaagagatatgtgcactctgatatttaccacagcaatattcacaatagccaagataccaaatcaacctgatgatcaacttccatcaacaaatattatggtgtatatacaggatggattattactcagcataaaaaagaaagaaatcctatcatttgtagcaaaatgaatggaactaaatgtcattatattaagtgaaataagccaggcacagaaagacacatattgcatgatctaactcatatgtgggagctaaaaaaaaattgatctcatggagacagagaatagaatgatggttaccagaaactagaagggtagtgaggagggyagacaatactgaggggttggttcaatgggtacaaaaatacagttagatagaaggaataagatctagtattacatagcacaatagggcaactatagttaacaataatttattgtatatttcaaaataactagagtggatttgaaatgttccaaactcaaagaaatgataaatgtttgaggtgatagatatcctaactactctgatttgatcattacttattgtatgcttgtatcaagat

SEQ ID NO: 806993 - DNA, 605 bp, Homo sapiens; identical to SEQ ID NO: 744811

SEQ ID NO: 806994 - DNA, 529 bp, Homo sapiens
agttaatatttatttttcttgtcttgtagtatgccaacgtaggttggcagtatgctgcctaatccaaatttgtgtgtgtctgtgtgtttttcctttcaggatttttgtaattttatccctgataattcccagctggaatacacacaggagtgcaaggtatgaccccaggccctttctcagctgctggtgtcagtggtgttgagctgggttatgtagtggagagcggggcatyggggtcgcagggagcacagacttgaagtcagactgtccctcatgttgattcccaaactggagtcaggcggggtgtttgctttgtgacactgaacagttttctaagtttgaaagcttgttcctttggagggggagggttcaatggatgatgcgtggtgaacacccagtagtgctagcccttggggctgtcgtctgtcttgccctttttctcctcactgggctgacagcacatctgggtctgggccctgggatgcctcacagccacctggagtggaggtttctggtgaggagtttcttt

SEQ ID NO: 806995 - DNA, 610 bp, Homo sapiens; identical to SEQ ID NO: 741384

SEQ ID NO: 806996 - DNA, 588 bp, Homo sapiens
atgtcatgatcagtttaaattttagaatcaggatgtttcttgttattatgtcccattttgagaaatgttttgagctcattttgactctgggcttgcaattggagaagtttgtgggtgaattacttattttccttcttgtacaagtagtcttccactctggggcgctaaaatttgtaatttgaattmttccctgtattaaggaatgctagtgtttaccaaacactataccaaatatcttgagtttccaagggctgctgtgacaaattaacacaaactaggtggcttcgaacatcaggaatttattctctcagatctggaggccagaagtccaaaatcaaggtgtgggctgtgccgcactgccactggaggctcctgggggaattcccttccttgcctcttccagcccctggtggctgtcagcactctctcctcaatgccacagctctccagtctctgcctatgtggtcacattggcctctctctgggtcaaatatccctctgcctcacttcaaaaaaaaatttattgttttttattgtggtaaaatacacataatgtagactttaccctcttagccatttttaagtgta

SEQ ID NO: 806997 - DNA, 625 bp, Homo sapiens
ttcatccaacaagcaataattgagcacctcttctgtgcaagcacatacaactacgtaaaggttagacatatgggccctgctttcaaggagctctgcaggggagcagataatacaaggtaagaagatgtaagacccaggagaggatcatctggacaaagtgctctggaattggcaagatggggaaagaaaataagtcagggaaattttgcatgtcacttaatctcttttttcatctctccatctataaaaaggaagawtgaccctctcttttcttacctcttggagttggtaggagaccccaagcaaattatagacataaacaagtgttggaaaatgcaacccactctcaaaaccagagtctgacaaaggtgatggtgacagtgacaaaggtaagagtgagaaggattctcagaaacttcgtggattggtagtttagataaaccatgggcagttccaggtgctccagcttcatggaagatcacctggggcttgagaactgtgtcaggatttcaaattcccaactccactgtagtgcaggctctcaacagaaacacagttgactgagcacaccttaggagaagttgaaatattacatagaaaagtggtacagagtggaaacttgtct

SEQ ID NO: 806998 - DNA, 499 bp, Homo sapiens
ctaacttcaaagttcttacagtcttatcgtaagacaagattatcctacatcaaacaattaaagaactgcacaagatagaacgtaattaagttctaaatcatctagtttaggttataagtgctggagtttcagagaagggaaagatcaatgtgggctggaggagttaagaatggcttaaatataattccctgacattacagtaccgtggaaacaacagtgctgggcttaaaatgaagagatgaaagccaacacattgagccttatttacccagtgtcgtgcagcagaccaccatgattttgggggactgaattagtaacgttggccttargggttaatgctgttcaggtggacttatttgtgtacaattaataatgggttctgacataattaattctcatcatattctttttgtaatgattttttctatcagcatgaacattcacggaacgtaaattgaaccattttaaagtatacaatttggtggcatttagtacattt

SEQ ID NO: 806999 - DNA, 615 bp, Homo sapiens
ctgtcccacaaaagctgtggcccttactaggagaacttggctgccccaaagagtggcccatgcaaggaggaagcagtggtaagagggtgattgccctgacctcactctttcctcccaccctctgatctcctggcagagacttgcattggcccaacccaacgggagctagaggacaaagaagcccaccctagacctttaggtcagcctcccaggcccagagcagctgaaaaagggtagagagtggttgtggaaatgtctggcacagtgcccctgctctgtgtccccaggccccctaggtatttgctgtactcttgggatgcttatccacttatattccgtttgtctgtattagacccttggaagcaggggctgcacctactccagtgggctcaacacatgttggaaggtttggggctgctggtctcggctcaagaacaatgatgtggtgcaggcrtcactgggactctcttggcctttcctttatttttgtcacctcatggtggcatgatcctggtaccttattgtcctgtcctcagtgcctaacatggtccctggaacctggagggtactcaataaattaggagtgaccaaaggcatgaattcatgatgccttga

SEQ ID NO: 807000 - DNA, 615 bp, Homo sapiens
ctgtcccacaaaagctgtggcccttactaggagaacttggctgccccaaagagtggcccatgcaaggaggaagcagtggtaagagggtgattgccctgacctcactctttcctcccaccctctgatctcctggcagagacttgcattggcccaacccaacgggagctagaggacaaagaagcccaccctagacctttaggtcagcctcccaggcccagagcagctgaaaaagggtagagagtggttgtggaaatgtctggcacagtgcccctgctctgtgtccccaggccccctaggtatttgctgtactcttgggatgcttatccacttatattccgtttgtctgtattagacccttggaagcaggggctgcacctactccagtgggctcaacacatgttggaaggtttggggctgctggtctcggctcaagaacaatgatgtggtgcaggcgtcactgggaytctcttggcctttcctttatttttgtcacctcatggtggcatgatcctggtaccttattgtcctgtcctcagtgcctaacatggtccctggaacctggagggtactcaataaattaggagtgaccaaaggcatgaattcatgatgccttga

SEQ ID NO: 807001 - DNA, 518 bp, Homo sapiens
aaaatctaaaatgccctgatcttgcttttaaaaaaaaatctaacatactctcctgaggcatggtaggagctgtttgaccagaaatcgaataatagcttccttgcggcggggagtggggggggacacatatatatatatgtgctttttttcagaggaagctattatttaactagtattgtaactagtatttaactagtattgaaaagagaaccacaggtgttctgtgatttctcggaattgccagagcattatgaagtcagggggatggagagtaagaaaaggggagacagcatggcccaccatttacagtcggatgtgtcgtctcatctccagccttgcagactttgacacmcatgttctgtccaataatactgatttcactggtgcctgttttagctgctggttccagtttccatgggaaacagataccatgaccctaagcttcagatagtttgcagggggtctgctgtttcccactcccaccggtttttaggtagaaaatacgcacgcattgaata

SEQ ID NO: 807002 - DNA, 594 bp, Homo sapiens
gagccacaaaagaagtgtgatgtagggaaaatggcagaaaaggtgcatctatttcatctagaactacattttacgattcctaattcaaaaaatatactgaagaagcatattatcactttcacaagaaaaaaattatatcaaatatacctctgttctttcttatcatggcagctcagaaaaacagtgacaccactatcttctgtggttctgaacaggccacacagattcatccctgagctctctgtctctgagttttttcagattaacttctgagctctctggtatctgcacttcctgagagtgccagaagaatcaaatattactctgggaggtaaaaagagtaaaaagcaaattcattcgcccttcactctcagggccactgctgaaaccgtcgaaatgaacagcagaggtcccgaatgccgctttgtggatgtgtgcaaaaacccgccaygtgcaacctggaaattaaaggaataaggaccaggagatatgttggttggttggttttcagtcacatagacaaaataggacagtccagacgatgccatctgtcagtcctgaggcatcactctccactgaaaggaggaactgatg

SEQ ID NO: 807003 - DNA, 605 bp, Homo sapiens
cctaaatttctatgttaattggacgtggggcctttgggatgtaactaggagcagagacctagtcatcaggtcattggggtggggcccctgatgagaccagtggctttgtaaggagaggaagagaggcctgagccaactcttaatctgtgtcaccatgcgatgccacccacsacgtcatggcacactcaccagaagctgagcagatgccagtgccatgccctgggactttccagcctcaagaactgtaaggaataaatttattttctttataaattatccagtctcaggtattcagttatagcaatagaaaatgaaccaagatataatcttagcattcatctttgtttctgcttcccctatgagtgactgaccatgttctcatttgaggtttacattaatgaggttggatccactcgtcccatcatgacactgaggctcagtgacttgcccaagaccacagggctatgcaggtcctcaaagcagttctattctgctgtgcacagctctttgattttcttcatctattcctaaagcaaagaggaaaaggggtggaatgaaatgtgctcagatcctgagaactcactataggtcgaaggaaaaaggag

SEQ ID NO: 807004 - DNA, 605 bp, Homo sapiens
cctaaatttctatgttaattggacgtggggcctttgggatgtaactaggagcagagacctagtcatcaggtcattggggtggggcccctgatgagaccagtggctttgtaaggagaggaagagaggcctgagccaactcttaatctgtgtcaccatgcgatgccacccaccacgtcatggcacactcaccagaagctgagcagatgccagtgccatgccctgggactttccagcctcaagaactgtaaggaataaatttattttctttataaattatccagtctcaggtattcagttrtagcaatagaaaatgaaccaagatataatcttagcattcatctttgtttctgcttcccctatgagtgactgaccatgttctcatttgaggtttacattaatgaggttggatccactcgtcccatcatgacactgaggctcagtgacttgcccaagaccacagggctatgcaggtcctcaaagcagttctattctgctgtgcacagctctttgattttcttcatctattcctaaagcaaagaggaaaaggggtggaatgaaatgtgctcagatcctgagaactcactataggtcgaaggaaaaaggag

SEQ ID NO: 807005 - DNA, 633 bp, Homo sapiens
agaggcaaagaataaataaggagtgtgtgtgtgtgtgtgtgtgtgtgtgtgtgtgtgtgtgtgtgtagagagagagagagagagacagaaacagacagaaacagatctaacaaaatgaagtgactcacacaattatcaaggctgaaaagtcccargatctgtagttgacaaactggagacccctgagagcctatgtttagctctggtttgagcttgtaggtctgagaaccaagggaaccaatgatgtagtaaagtctactctaaaagctggcaggcttgaggcccaagaagagctgatgttttagttctagtttgaaggctggaaaagaataatgtcttggctaatgcagtcaggcaggagaagtaacctcttactcagtcttttgattccattcaggtcttcaattgattggatgaggcccacctactttagggagagcaatctactttagattagatagattctaatctatctgtagattcaaatgtaatctcagaaacaccattgtagacatacccggaattatgtttggttaaacatctcagtaccttatggtccagtcaagttggcacaaaaacttaaccatcatactgacctggaagtcaaggtttccagcaaattggagacttgaa

SEQ ID NO: 807006 - DNA, 602 bp, Homo sapiens
aaatgacccatttatcctatgagtagaaaccatgttctaactaatttctagaataatgaagatgagcttgtgtgggtacatccacttcttttagttaatagtaaaaatttgtagtaggttatttttagcggctgtggtagcataactgtctgggacttgggttgcagatscctgtgcctagggtcagggctaagcctttgaaaccttacaaaattactggagaagtgtgttagtcagagttctctaaagggacgggactaagaggttagatatttgaaacagcgtttattaaggagtattgactcacacaatcacaaggcaaagtcccacaataggctgtctgcaagctgaggagcaaggaagccaatccgagtcccaaatccatagggaagccaacagtatagccttcagtctgtggccaaaggcccaagagcccctggcaaaccactggtgtgagtccaagagtccaaaagctgaaaaacttggagtccaatatttcagggcagaaagcatccagcactggagaaagatggaggccagaagactgagcaagtctggtcgttccccattcctctatctgattttattctagctgcaatggc

SEQ ID NO: 807007 - DNA, 507 bp, Homo sapiens
tccatctccccaattctctatgaaagggcagatgcaaagaacatgcaaagaagtgccccatttctgtcacctggaaagccaaatccagcgatttctgccatgatggtaaggtgatttccactggacactgaggttttaccccaagcatgtcacatccttactccactacagaggaggtatagaaaaggacccatcatggaggcttaaaatcagagcctctaaactccagctaattttcttcctcaaggtttcattagaagaggttttttggtgtttttttttaatgtgagctaaaagatgctgttcacacattagaataatgacaaccaaagtwttaacagattttacttactctgcatgtaggaaatgtacttgacaagaaacgcacacagagtaaaatctgtgagttcaggagagagcaaaacaaaaacactcctcctcaaaaagttacctgactccaaactcacttgaaggaatgttttttgcaatttgcaaacagcatgtggg

SEQ ID NO: 807008 - DNA, 517 bp, Homo sapiens
cccttcatcaaatttggggagtttattcttcattatttctcaaaataatctttctgcccagtatttctcccccttctaaaactcccacaatgcatatgatggtccacttattagtcccatgagtcgcttagactctgttcacttttcttccttcctttttctttttgctcctcaaacttgataattaatygtcctaacttctactttgctagttctttcttctatctgcatcaatctgctgttgaaaccctctagtaaatttttcatttcagttattgtattttcagttccaaaatttgtttcatttctgtaatttctatgtctttattgatagtgtccttttcttcagggactgtttgcctgattgcctttagttctttgtccatgttctccccttaggtgtttgtgcatattttaaacaaatagtctttggctaataagtccaatatctgtgctgcctctgggacagtttctgtcaatccctttagttcctttaaatgagccatgttttcctgtt

SEQ ID NO: 807009 - DNA, 584 bp, Homo sapiens
gaagccagctgggctcctgagtctggtggggatgtggagagtctttatgtctagctcaggggttgtaaatacaccaatcagcaccctgtgtttagctcaaggtttgtgagtgcaccaattgacactctgtatctagctgctctggtggggccttggagaacctttgtgtccatactctgtatctaactaatctgatggggacgtggagaacctttgtatctagctcagggattgtaaatgcaccaatcagcaccctgtcaaaacaggccactcggctctaccaatcagcaggatgtgggtggggccagataagagaataaaagcatgctgcccaagccagcattggtaacctgctcrtgtccccttccacgctgtggaaggtttgttcttttgctctttgcaataaatctcgctactgctcactctttgggtccacgctgcttttatgagctgtaacactcaccacgaagatctgcagcttcactcctgagcccagcgagaccacgagcccaccgggaggagcgaacaactccagacgcgctgccttaagagctgtaacactcaccgcgaaggtctgcagcttt

SEQ ID NO: 807010 - DNA, 629 bp, Homo sapiens
acacctcacctgattaaaacatcttttctcctaaatgtttctagacatgcccagaaagcccatcttactcatgtgaacctatggatgatctcaaatacctgttcaagagagccagttcatccctggagtaatgtggttagagatcttgagtccagtaattctccttacaatatgaattgttttacaattattctgttgctttgytcagcctcctcccctggtaaacacctcttttatccctgctgcatatagttatgctcctctttactttgttcctactcctccatgtagggggacgtggtgggctgggccctcttgaaaagggaaacaaactctctcatctacctttctggcattgcagctttgggtaataatttgtccaactgctggatatgccaccatcatcagcaggctcaggggctgcctctttcattccctaaaagctcgactaccaatttcacaaaggaggtatgggaacctaaagtaacccctgcacctctcatggtacacctaagtgcctcatttcctgtgaatgtataaacctcactggcctgctaaatgcttcagtcatcgaaagggtgggaaaaggggaagttgaaatgcctactttgacatctcacaggcttttc

SEQ ID NO: 807011 - DNA, 627 bp, Homo sapiens
agttttgtatacgttttgtatatactcagttgtatatatacacacacatatatttgttatatatattaaatatatagtacaattttgtatacatataaatttaagtttactatatattaaatatatatagtacatatatacatttgttgtgtgtgtatatttaattgtatgcacttttgccatgtatagatttgtgagtcaaccaccacgtcaaggcacagagaagttctatcattgcaagtakccatcatgttatcattttataggtacgcctacttctctcctctactcaccactggttgcttgtccctaagtcctgacaatgacaaaattattcttcattactaagtttttatttctaaaatattatataaatagaaacatggattatgtaaccttttgggcttggctttcctttttccttcacagagcataattttctgtagatccatccaagtcattatatgtatcaataattaattcatttttattgctcagtagtattccatggtatgtagttgtagtctgtttagccgttcattcaccgaaggtgatatgttttgtttgaagttttggactattatgaatgtggtaggctgaatgatggtcccccaagacggacacttc

SEQ ID NO: 807012 - DNA, 627 bp, Homo sapiens
agttttgtatacgttttgtatatactcagttgtatatatacacacacatatatttgttatatatattaaatatatagtacaattttgtatacatataaatttaagtttactatatattaaatatatatagtacatatatacatttgttgtgtgtgtatatttaattgtatgcacttttgccatgtatagatttgtgagtcaaccaccacgtcaaggcacagagaagttctatcattgcaagtatccatcatgttatcattttataggtacgcctwcttctctcctctactcaccactggttgcttgtccctaagtcctgacaatgacaaaattattcttcattactaagtttttatttctaaaatattatataaatagaaacatggattatgtaaccttttgggcttggctttcctttttccttcacagagcataattttctgtagatccatccaagtcattatatgtatcaataattaattcatttttattgctcagtagtattccatggtatgtagttgtagtctgtttagccgttcattcaccgaaggtgatatgttttgtttgaagttttggactattatgaatgtggtaggctgaatgatggtcccccaagacggacacttc

SEQ ID NO: 807013 - DNA, 578 bp, Homo sapiens
gttttccatggaagattattgtttaaaaattgatactctatattgttagagatcagagactttgctgataccttttatatgagagtttaaggatggaaattcacttttcaattgtgttgtcaaaaataacctgactgttataaatgtgccataaagatctatcatacrtcatcataaatgataaaactcttgacatacggtgctgtattttaacaccctgccaatgccttccctgataagacatttagatgggagctatgacaaatgctgctgtggctgtgtggacatggggataaagtctgccaatttgtatccttcaaacatgaggagtgtggcactaccacctgaaaggacggggaaaaacatctaaagcaccatgttgattctctgtgtttatgactgctgcattgttgaaatcctcaatgaaaacagtactattatattcacctttgaatcaagccatttttagtagatcttgagaaagtaaaatgctatgacccttaaaggtaaaataaaagactacatatatatttaagacctggaaagctgaatctgaatgaatagatgaataggaattt

SEQ ID NO: 807014 - DNA, 612 bp, Homo sapiens
cttattcttttgtcccatcctcctgccttcttgcaaacagcagtggcctaatcaataaagttctcttagttttacaaggaaatttgacaggattattagaaaccactaagaccccagacaacactgtcaattcaggctccacttttgaggtttttcagaaacatcatttgcagattactcacttgaatagaggctagttgaggactacgagttgagatgatctgatctataccagagttacyaaaaggcatcaaacagcaataaattggtagactaaaacaagatggctcttgccaactgtctatgtttttctcacgtagaggtaaatgcaactctgatttgcaatccatgctgaggaatgttgttgtttctttgaaggaaggaggggtgttgtttttgtaaaaggtgtttatgtctggttgatttgattgcaacgagcagaacctcactcaaactgactcaagaaaatgttaggcaagtgacaattaagttaatgcaaagatacattggagtaataaaaaaaagatagtgacattaaaggaattagataactgaaacaggattcagcaattctaccttccgagtcctctgggaaacaatgcatctctccat

SEQ ID NO: 807015 - DNA, 612 bp, Homo sapiens
cttattcttttgtcccatcctcctgccttcttgcaaacagcagtggcctaatcaataaagttctcttagttttacaaggaaatttgacaggattattagaaaccactaagaccccagacaacactgtcaattcaggctccacttttgaggtttttcagaaacatcatttgcagattactcacttgaatagaggctagttgaggactacgagttgagatgatctgatctataccagagttaccaaaaggcatcaaacagyaataaattggtagactaaaacaagatggctcttgccaactgtctatgtttttctcacgtagaggtaaatgcaactctgatttgcaatccatgctgaggaatgttgttgtttctttgaaggaaggaggggtgttgtttttgtaaaaggtgtttatgtctggttgatttgattgcaacgagcagaacctcactcaaactgactcaagaaaatgttaggcaagtgacaattaagttaatgcaaagatacattggagtaataaaaaaaagatagtgacattaaaggaattagataactgaaacaggattcagcaattctaccttccgagtcctctgggaaacaatgcatctctccat

SEQ ID NO: 807016 - DNA, 509 bp, Homo sapiens
aaaataatgcaaatgagaatataataatgtataaaatatccttttatcagactgcctttttgttcttcattctgggtactgggtactgggtacatcaaaaatatctttctggaatgcaaatccaatcacattacacttttgcttctttaattattttgtaagtttcraagaatctatttatacacctggagtaatattaactaatctttgtgatcttggtcaccatctacctatctgggtcaccttccatgcccacatttgtacagcaagtcccagccctagaaaattttctaatctatacgtgtgtgctcttcttttagtgatccccatacctgtacgatcatgccctctttgcccagaatgttttctcttctcctctctcttgtgaattccctctcttcctttaagaataagctcaaaggtcacatgttccttcatcctttaaaatatatatatatatttccataggttttgagggaactggtggtatttgattacatgagtacgtt

SEQ ID NO: 807017 - DNA, 509 bp, Homo sapiens
aaaataatgcaaatgagaatataataatgtataaaatatccttttatcagactgcctttttgttcttcattctgggtactgggtactgggtacatcaaaaatatctttctggaatgcaaatccaatcacattacacttttgcttctttaattattttgtaagtttcgaagaatctatttatacacctggagtaatattaactaatctttgtgatcttggtcacyatctacctatctgggtcaccttccatgcccacatttgtacagcaagtcccagccctagaaaattttctaatctatacgtgtgtgctcttcttttagtgatccccatacctgtacgatcatgccctctttgcccagaatgttttctcttctcctctctcttgtgaattccctctcttcctttaagaataagctcaaaggtcacatgttccttcatcctttaaaatatatatatatatttccataggttttgagggaactggtggtatttgattacatgagtacgtt

SEQ ID NO: 807018 - DNA, 710 bp, Homo sapiens
acagaggcactgaagagggtagaaaggaaagtcttgaatctctgatgccacccctctcccatcctctagtagtggctacttagtgcagagagagaaactgtgtgcttgtgggaagaggagtgcagaggctggggctttgcattagaactcagtgctgccagcacagggcagaactcagctggtgcctatggagggagcatttaaaccagccttagccagagggacattgcccataccagtggctggaatttgagttttggtaagccttgccaccatgggctaaatggccctggggtcctaaataaacttaaaaggctgtctaggccacaaaggctgcaaatcccaggcaagtcctagtgctgcgctgggcttggagccagggtactgtgggggcacacaacctagtgagacactagtcacgggtgctaagggagtactcccccaatcccaggcagcacagcttgcagcaatgaaagtgactccttccttctgcttgaayagaggagagggaagagtaaagatgactttgttttgcaccttggatacgagctcagctgcaggatagggcactgggcagagtcgggaggcccctattccaggcactagctcctggatgacatttctagacacacctgggccagaagggaatccgctgccttgaaggggaggacccagtcctggcaggatccatcacctgctgactaaagagc

SEQ ID NO: 807019 - DNA, 454 bp, Homo sapiens
gaaccttactaataagacaatgactacaggagtagcaatcgatctttgaaattccctacccttatctgcaaacaggatgagataaaaggtgcctggcacagagtggatactcaaatgttaatttccttttcctctcttaccctcaattctgaaatgaacrtgattttcttacctgttctttgtgacctttgaaacagtgatcactagaaatgaaggcactatgttgggagaaggtacaacattcttccattaaagcaaaatgccagagaggacagccttacctgacatagagagagatgggtaccatggtgttgagaacaatgatatagccccagaaaatgaggaatccacggtaggagggtgtatcgtcttctccatcatagaggtaccaagaggaattgcccacctgtgcttcccaataagcatggccgatggcaagaccagcagaaagcag

SEQ ID NO: 807020 - DNA, 613 bp, Homo sapiens
aatccagggagctacgaacacagtattctatgagatatgctccatcttgtctaaagttgggtggtgagggaaactcgcaaagaaattttaaactcttacgatatactttatgtagtgatactggcaaagcaactctgaaacagttttagatgtattttagcattgagcaaatgagttattgttttggagagccagggttctcactgagaaagaaggaacatatagawaggaaatgggagatgggggaaaagaacattgtgggaatcaattggaatcagaagaataggtatgaactgatttctgaaatacatgcatgtataagtattcccatgtacatgcgtgtgtgcataagtgtatatgtatgtgtgtgtgtgtatacattttttacttagctctatccatcaaaggaccaggaccaagaagcaaagtcaccccgctagtaacaagcacatcaagtgccaagatcttggtctctattatcatttcccattcaaaggaaccaggggtactgggagaaatggctgattacaggctggggcaggagaggtacaacttgagcctggaacatcttgttattgtcacaaggtatggacatgctgaaagaatgatggga

SEQ ID NO: 807021 - DNA, 528 bp, Homo sapiens
aagaataccttggctattcttggtccttcacatttccatataaaattttagaaccagtttattaaattccactaagtaagagaaagaaaaaaaaacctgttggagtttttatgagaattatattgggtgtggtagcctgtgcctatactcctagctatttgggaggctgaggcaggaggattgcttgagcccaggaggttgaggctgcagtgagccatgatcatgccactgcactccaacctgggtgatagggaggtcaaggctacagtgagctgtgattgccccactgcactccagcctagagtgagtgccagagtgagaacckgtctcaaaaaacaaattaaaaaaagtaaaacaactaaaaagaatacaacatcacttgcatagtagtccttccatttttgcactacctgagcttagtcatgaggaaacatcagacaaacaggaattgggagatatttacaaaggaactgtatttttctcaaacgcccgtatgatgaaagataaataaaagctgaggaattgtgc

SEQ ID NO: 807022 - DNA, 634 bp, Homo sapiens
tgatctctcactataacttaaatcctaacacagactgttacagttcaatatgggaaacataggtgggtgcagtggctcgcaccagtaattccagtactttgggaggccgagatgggaggatagcttgatgttgatgccaggagtttgagaccagcctgaacaacataaggatacccctgtctctacaaaagaagaaattttaattagccaggcatagtggcacacacctgtagtcctagccactcaggaggctgaggctggaggatggcctgagtccagaagtttaaagctgcagtgagctgtgtatgatcaggccactgcactccaacctgggcaacagagcragaacccatctctaaaaaccagtaataataatatttaaaatacagtaaatgccaggagaagacaatatgctcaggttgcagtgggagcttggcaaaaccatacctaacccagcctgggaagcacatgggaggcctctgccatagggcagaaagctgctgcagtgaaatccatttaattggagaatggagcagaaagggcagaagatgcaaagaagccctgctgtctatagaatttgcgaaaataagatgaagcaatagtttgccagcagcaaataactacacagatatga

SEQ ID NO: 807023 - DNA, 558 bp, Homo sapiens
atgaatactaaaaaaattaactttagaraagtattttgaacattctccaattaaattcttagtagactctaatctaattgcactgtatatattacagcaatttgaatctgcttgccttgatacccgagactgataacaattagtgaggaaacaaatagggcaagttattttttcctccaataaggacttccaaaaagggcaggagaagggataaaatgagagagaaaggaagaaaaagagaagaaaggaaagcatgtcgggggaaatcctgatcatttttatttattgttaaacataatatttactacttaaagtaagtacctgtcatatataaactagaaatggaaagtaattttttaaaaaagtaatgagttgggcacagtggctcacacctgtaatcccgccactttgggaggtcaaggcagaaggatcacttgaagcctggagttcgagaccagcctgggcaagacagtgaggccctctctccacaaaaaatttaaaaattagctaggggtagtggctaatttaaatttttttttttaaacagagtctcgctcc

SEQ ID NO: 807024 - DNA, 606 bp, Homo sapiens
cgggtgtccacatgagtgcctctcccagcagatccaggtaagaacttcctgaccttcctgagccctaggaggaacacacatggatgccgagtgatggtgagggatccgggtgaaactggaggctgtggaaacactggagtggggggtrggggtgctgttacatcggaattttcttagtgaaacatcaaagttacctgagggccaggtaaagctattaacatggattatggtttggctgaggtgtccctcacctgagagtttgtgtccccaggaaaccactgagatagatagattatctcctccatgaatttctggaggtggcggagctggcttccttctccattcagtactggagacgtgcacagaacaggtagagaggacagggttggttgagcatggagattgcctctcctcctctctatcttgctggcaaaagtttgaactggaagcactggcttcccttgttctgggcagtgctgccatctccctacctggctgccccatcagtcttacgcctattctgcttgcatggtagaagtccgagatttggcaaaaagacaaagtgtacatcatgggggtacctagggagacgaggaagaggctctg

SEQ ID NO: 807025 - DNA, 572 bp, Homo sapiens
attttttgtagacacagggtctggctatgttgcccaggctggtcttgaactcctggtcccaagcaatcctttagccttggcctcccaaagtgctggcagtacaggcatgaaccaccatgtccagtagatgctgttaatccaaaaataaatgatgagttcccttctgtataggtggtaaagcccagagtgaacctgttggggacagtatcactatgagtttgagaccagacaacctctgtggtcacttgcaagtctaagactctagagcattccacagttcccaagttctatatgtagcaagtctctgtctgctcttgctcttcaagttgaycttttatgatgtcttttccttctgttctcctttgagaatgtcctcaatattcatttattaatcaatcttcactagcataaaaaaatctcaaagcagtttacccacgtctctttccaatgcatcatttcccaccttgtatcgcaattagtgatgtgcatgttcctcccaccctaagactgtgactgccatccacacaggatttatgtcccattcatcgttgttgtgtgttaccaagctcact

SEQ ID NO: 807026 - DNA, 635 bp, Homo sapiens
aagaagaatgatattttgcatgagatacggaggagaatgaatcttgagatttttaaagtgagattaacatggattcaaattgtggctcagccatcatctgtgtgacccccttgggggcccatctcaggaggtttattttcctcatgggtacaggaggtcattaggatctcatgagattatttgtgtaaaggtcacaccttagaaggcccatgcatacatcacgtttgcttaagattgaccasttttcctgccacaggaaggaaaaacaacagccacagcaaaggccaggagaaatcatagtgtgcatttgtgtagttgttatacctctcagagcactttcctataggtcattacgattgcccaagttctaacaagctcaagaggtagagagtctccagcagcgcccctgcttgtagaaagcggcattaagatcccattcagcttggtggtgaactagagcagaactttcgggtcttttcagccctgaacctggtctggttctcaaacgctttttgataacccatgccctacctttaaccctggcatgtttagtgcagttaattagttgggcagagcataacgtatgcacttttgagagacattgattgtgtgtggttaattgggaacttgtctga

SEQ ID NO: 807027 - DNA, 635 bp, Homo sapiens
aagaagaatgatattttgcatgagatacggaggagaatgaatcttgagatttttaaagtgagattaacatggattcaaattgtggctcagccatcatctgtgtgacccccttgggggcccatctcaggaggtttattttcctcatgggtacaggaggtcattaggatctcatgagattatttgtgtaaaggtcacaccttagaaggcccatgcatacatcacgtttgcttaagattgaccacttttcctgccacaggaaggaaaaacaacagccacagcaaaggccaggagaaatcatagtgtgcatttgtgtagttgttatacctctcagagcactttcctataggtcattacgattgcccaagttctaacaagctcaagaggtagagagtctccagcagcgcccctgcttgtagaaagcggcattaagatcccattcagcttggtggtgaactagagcagaactttcgggtcttytcagccctgaacctggtctggttctcaaacgctttttgataacccatgccctacctttaaccctggcatgtttagtgcagttaattagttgggcagagcataacgtatgcacttttgagagacattgattgtgtgtggttaattgggaacttgtctga

SEQ ID NO: 807028 - DNA, 360 bp, Homo sapiens
gggctcattaaaaaaagaaaaaaatatgtatagatatactggatgtggtggctcatgcctgtaatcctagcactttgggaggccaaggcaggcagatctcttgaggtcaggagttcgagaccaacctggtcaacaaggtgaaaccccgtctgtactaaaaatacaaaaattagcccggtgtggtggcrcgtgcctgtagtcccagctactcaggaggcttatatgggagaaccacttgaatccaggaggcggaggttgcagtgagccaagatcacgctactgcactccaacagagtgagacttcgtcccacctccaaaaaattaaaaataacttagccagtgtggcggcatatgcctatg

SEQ ID NO: 807029 - DNA, 588 bp, Homo sapiens
gtttccttatgatgcattcaagtcatactcttttttttttttgaaatgggtcttgctgtcactcaagccatagtgcagtggtgctaccatagctcactgcagcctcaaacttctgggctcaagtgattctcctgcctcagcctccccagtagctgggaatataggcatgcaccrcaatatccagctaatttttttaaaaattatttttagggatgggggtcttgtgatattgcccaggctggtctcaaacttctggcctcaagcaatctacctgcctcagcctcccaaagtgctgggattacaagcgtaagccaccacaccaactggtcatacatttttgacaggaatactatatatgtggtagtgtgttctttttgtggatcacaccagttggcaaaagcttatcccgttattgataaggttaagttggctcacttggttaggacagtgtctgccggacttacccattttatgtctctttttctctttctacttagtaagtgatttgtgatgtgccaccacacccggcttttttgtatttttagtagagacagggtttcaccatgttgaccaggctggtctagatct

SEQ ID NO: 807030 - DNA, 588 bp, Homo sapiens
gtttccttatgatgcattcaagtcatactcttttttttttttgaaatgggtcttgctgtcactcaagccatagtgcagtggtgctaccatagctcactgcagcctcaaacttctgggctcaagtgattctcctgcctcagcctccccagtagctgggaatataggcatgcaccgcaatatccagctaatttttttaaaaattatttttagggatgggggtcttgtgatattgcccaggctggtctcaaacttctggcctcaagcaatctacctgcctcagcctcccaaagtgctgggattacaagcgtaagccaccacaccaactggtcatacatttttgacaggaatactatatatgtggtagtgtgttctttttgtggatcacaccagttggcaaaagcttatcccrttattgataaggttaagttggctcacttggttaggacagtgtctgccggacttacccattttatgtctctttttctctttctacttagtaagtgatttgtgatgtgccaccacacccggcttttttgtatttttagtagagacagggtttcaccatgttgaccaggctggtctagatct

SEQ ID NO: 807031 - DNA, 666 bp, Homo sapiens
atagaggataggaggtgcattatggatattcccattcaacttgctctaaacagctccagtattaatggaaattttaatgaaaagctaagcctctattaggttgccatgcagaattcccacaacatgcagagtctggttaatttcccttgtgccaggggcacaggctcaaaagcacagacacacacactctcaggaaaattccttccaatctccagaccttgtgctttcccctgctagcccaactctagggctttacaggactggggtggctctcctatgcttatagtcagagcaggccctgtggcaattcagtgaaaactaattcctcaytccccatctttcttgctcaacaatcatgaattgccagagagctccaaagggagcctccaagtctctcactctccttttgtccctcagatgaaatctgtaactggctccaggatgcaatgggttcagaggctacaaatctaagggcctaggagttgtgcctccccattgctggactcccctgacatgtcatgtgccacttccctgggaacctgccatccccagctattagtacattttccaggaaagcacagaagcatacgcttccatgagatgttttaattatgacaagtggatccctctccctgtgtagtagaaaccagcaccaccttagagaaa

SEQ ID NO: 807032 - DNA, 560 bp, Homo sapiens
cccacgcccagcacatatctcaccctcagtcacagcgaggccacagccctcgattctagaatctgatgtccttgaatctccctatcacgggctcccagtttcaagggcctctggacacatgaatttctactttgagaatcagtttggctgtgtttcggtatctgcattcagcttcacaaggctggtgagcgagggctcgtggttgggacacctgacagggcggggaagacctccactggggacactgattttattgctagaagttgctaaaggatgagcaacttagcagctaggacttttaccacttcagtgatagaatgtaaagtcaaccccgagaagatggatctaggatacctaaactgaaagttttttttttttttttycacagcatattgcaatgcaacagtgaaaggaattttaaatgggcagcttctccttttctcctacctccaggcatctgcctctgaaatgttgaaggtggagggagataggattggcctttctgggaagacctctaagaaaggggtttccattgagaagaaactacgggtaacagttaa

SEQ ID NO: 807033 - DNA, 632 bp, Homo sapiens
  misc_feature 1, 2, 3, 4, 5, 6, 7, 8, 9, 10, 11, 12: n = A,T,C or G
nnnnnnnnnnnnacactgtaaaactatgacattgatgaaagaaattgaagtcacaaataaatgaaaaggtatcctgcattcatggagtgggataagtaatattgttaaaatgtgcatactactcaaagcaacccacaaattcaattcaaaacaatacctataaaaattctggtgaagtttttygcagaaatagaaaaaaacaattctgaaattcatatggaatcacaaaaggccatgaatatccaaagtagtcttgagaaagaagagcaaagctggaaggcatcacactacttgatttcaaaatctactacaaaggcacagtaatcaaacagtatggcactggcatgaaaatagatacacagaataacgaataagcccagaaattaactcacacatatacaacatatatgtgagttataatataatatatgtaatataatttttgacaagggtgacaagaatgcacaatggggaaaggatagtttcttcaataagtcgcattgtgaaaactggatatcgacatgtaaaagagtgaaattggatccttatcttacaccatatacaaaaatttactagaaatggattaaagacttaaacataagacctgaaactgtaaaacttctagaagaaaa

SEQ ID NO: 807034 - DNA, 632 bp, Homo sapiens
  misc_feature 1, 2, 3, 4, 5, 6, 7, 8, 9, 10, 11, 12: n = A,T,C or G
nnnnnnnnnnnnacactgtaaaactatgacattgatgaaagaaattgaagtcacaaataaatgaaaaggtatcctgcattcatggagtgggataagtaatattgttaaaatgtgcatactactcaaagcaacccacaaattcaattcaaaacaatacctataaaaattctggtgaagtttttcgcagaaatagaaaaaaacaattctgaaattcatatggaatcacaaaaggccatgaatatccaaagtagtcttgagaaagaagagcaaagctggaagrcatcacactacttgatttcaaaatctactacaaaggcacagtaatcaaacagtatggcactggcatgaaaatagatacacagaataacgaataagcccagaaattaactcacacatatacaacatatatgtgagttataatataatatatgtaatataatttttgacaagggtgacaagaatgcacaatggggaaaggatagtttcttcaataagtcgcattgtgaaaactggatatcgacatgtaaaagagtgaaattggatccttatcttacaccatatacaaaaatttactagaaatggattaaagacttaaacataagacctgaaactgtaaaacttctagaagaaaa

SEQ ID NO: 807035 - DNA, 662 bp, Homo sapiens
accagtgccatgctgttttggttactgtagccttgtagtatagtttgaagtcagatagcatgatgcctccagctttgttcttttcacttaggattgtcttggctatatggggtcttgattccatatgaaatttaaaattttttttctaattctgtgaagaatgtcaatggtagtttgatgggaatagcattgaatctataaattactttgggaagtatggctgttttcataatatcgattcttcctatccatgaggatggaatgtttttccatttatttgtgtcctctcttactttcttcagcagtggtttgtagttctccttgaagagatccttcacatcccttgttagctgtattcctaggtatttcactctctttgtagcaattgtgaatgggagttcattcatgatttggctttcttcttgcccattgttggtgtaaaggaatgcttgtgggttttgcacattaattttgtatcctgagwctttgctgaagtagcttatcagttcaggaagtttttgggctgagatgatggggttttctaaatataaaatcatgtcatctgctaatagagacaacttgacttcctgtattcctatttgaataccctttctttttcttgcctgattgccctggacagaacttccaatattattttgaat

SEQ ID NO: 807036 - DNA, 593 bp, Homo sapiens
aaaaaacaaacaaacaaaatgccaaataatatcaggcagaataattcagaaagctcacacatggcttggaatatttcctgtttcccccagtcaatgaagggggtgggggagaggggaggacactgatcacctgacacaccaagcagaatcttcagaagagtattgcctcagtaaaggacaaattcctaattagggaagggaagagaaaattattctctagggccatccagatttgtctgtcctccagaagacagaatgttaagtgttcaataatgacacttgcagacaaatcaagaagtttgcagataagagcattccatgactctaacatcggcaaaaatwaatttagtaggaattaagtaggcagaggggagaatgaccagtagggaaaaaatagggagtatgctgactccacaggacagtaagtaagcaatcatgaaagtgggataataaactggtttataactccagataaaattaacaagggccaagcagaatacattctagggagggacaagaaaggtaaaaatgaaattaattatacatggttcacagggaagagtcacaagctacaatttcgttcttgatatcaa

SEQ ID NO: 807037 - DNA, 610 bp, Homo sapiens
aatacctgggaccaggaaaaaaacaaacaaacaaaatgccaaataatatcaggcagaataattcagaaagctcacacatggcttggaatatttcctgtttcccccagtcaatgaagggggtgggggagaggggaggacactgatcacctgacacaccaagcagaatcttcagaagagtattgcctcagtaaaggacaaattcctaattagggaagggaagagaaaattattctctagggccatccagatttgtctgtcctccagaagacagaatgttaagtgttcaataatgacacttgcagacaaatcaagaagtttgcagataagagcattccatgactctaacatcggcaaaaataaatttartaggaattaagtaggcagaggggagaatgaccagtagggaaaaaatagggagtatgctgactccacaggacagtaagtaagcaatcatgaaagtgggataataaactggtttataactccagataaaattaacaagggccaagcagaatacattctagggagggacaagaaaggtaaaaatgaaattaattatacatggttcacagggaagagtcacaagctacaatttcgttcttgatatcaa

SEQ ID NO: 807038 - DNA, 493 bp, Homo sapiens
ataagaaaatacatttctgttgtttaagttatccagtctgtggaattttgttatgacaatccaagctgtgacgaatatacccacccacccagtaccctttgtggattactgtgcttggtgtttcccaaaggcttaaagagaatacagcatctcctctatcagcatcggggtaaatcgaggcaccaagatgcatattcttggcatgcacataccatttctgcatacctagaatgtacacttgccrccctcccttgcacacacctgcatcaggagccaatgcggaaacacaggcattacaaggaaggatggagagtggaactctggtatagcaggccctggccctgcactttcttaacatcatgacctcaggcactgtgaccttggccagtgaagttctttggacctcagtgttattatctggacaatacgaataataattcaatacctacctctaagggttgttacaaggatccaagagagcaatatatatgaa

SEQ ID NO: 807039 - DNA, 612 bp, Homo sapiens
caaaaacaattattaagaattttcaaatgttgaagcacctaaggaaacagattgacagctcatgtgaatgtggagagcatatattagctttataactttataactttgggaagaatatgatatcctctttaagccaacaatgtatagaaaatatgtttttaaaatataaaatgtagtataaaatatgtaaacattttatatcatatgaattataaatttaaatgtataagtaataaatatatattaacacaataaagattatgttatakcacaatttttatcattttagaattgcttgatgagtaccatttattacactaaacaacatgcatgtgttttttataaaaatgtggtttataccaaatttattgttattatttaatatcattcaggccatgaatctttgaagaaaaagtcttctttggggattcttgccacctcaaatttcatgagaaggcaaatctccaaaattatgtgcagctacatctatgataaatcattttcagctcagacagaacaaagaacagacaaggtacaaagaaaaaacgatagtggtcggcaaaaattaggcacattatgttctcactaatccaacttcaaaagacagattta

SEQ ID NO: 807040 - DNA, 666 bp, Homo sapiens
ctctcttctccctttcttcgggtgggcctagcagtctgacgccggctcttcttttgcaggtgtttttggatgagacaatgatagggattctgaatgagaataataaggacctgcacattcctgaactcagggtatgtaatttgagagtccaggtgatgccctcgacccccctcaaatgcagacggagcctggtcctgagacagtcrgcctcccttctccacccctgctgctggtgctgctgctcacctggggcggcggcaggaagtgtgcagggctggaagccaaagtgcctcccaggccctggcccctcaggagctaccgcatgtgtgctggaggggaggggatttcctcaccaagtcctgagcctgtcctcagcccctggttgggtttctgtgccttttggagttggttaaaggtacagctgagtctctctgcctttcctagtaggatcagcagaggggaaagggaagattgactataggaacacaaggcagtccttaggtgaagggaagactgctgggccctggagcctcctgttctcccatgtgtctctccatgtgggactcagtgaaaaaacgggttgtcgggtagacgccctccatggctgcgtggtctccatgacctggcctgtcccagcaggactgccgatacctgaggatcctggtg

SEQ ID NO: 807041 - DNA, 599 bp, Homo sapiens
tctcaggactgatagccctggaaaacccaaccatttaaagtctctagaaaatatcctaagggtatatagcaactgaaagatttactcaaaaactaaagttcaataaaacagcaagagtctgtggaacttgagctatgacatgtgtgctcactctctcactcactctctctctttctccctttctttttcccctagtcctacattctcagtccagacagacaatagaggcctcagtctgaatggatgtggtcaaaaaatgtgactccttcttccctaagttcccagacaagggacataatatttcactgggaaagacagacyaccagcatttctcatttccccaaactccaaaatgcagaggataaactcctgggaattgtgggtaaactatcaggagctcactttctccagctagttctcattcatggagcagagattcaccccaggcacagcagactgagaatacaggggtcttgattacctttagttttaaggcagaggttccacactggaggaggcaaactgagaagaggaagagttaaccattatcactcagtgccctgctctagtatctgggtatcactctaagagaagtgggt

SEQ ID NO: 807042 - DNA, 599 bp, Homo sapiens
tctcaggactgatagccctggaaaacccaaccatttaaagtctctagaaaatatcctaagggtatatagcaactgaaagatttactcaaaaactaaagttcaataaaacagcaagagtctgtggaacttgagctatgacatgtgtgctcactctctcactcactctctctctttctccctttctttttcccctagtcctacattctcagtccagacagacaatagaggcctcagtctgaatggatgtggtcaaaaaatgtgactccttcttccctaagttcccagacaagggacataatatttcactgggaaagacagactaccagcatttctcatttccccaaactccaaaatgcagaggataaactcctgggaattgtgggyaaactatcaggagctcactttctccagctagttctcattcatggagcagagattcaccccaggcacagcagactgagaatacaggggtcttgattacctttagttttaaggcagaggttccacactggaggaggcaaactgagaagaggaagagttaaccattatcactcagtgccctgctctagtatctgggtatcactctaagagaagtgggt

SEQ ID NO: 807043 - DNA, 590 bp, Homo sapiens
gtggagggggaagtcttcatctccctctgatccccggctgctacttcctgaaccttcttagggctaaggggctggcaggcaggcgggcggtggggctgccacacgctcccactcctagcacatatcctgtcgctacctcttctggcaggatgttattgcagagcccagggctgttattgtcaggagaatggctttcctgagctcattaaaggacctctgtcctttctccaggaccgaccccccttttcctctgtccccaatcaacactgagagaaaggggccctgggacaactccaggtggagcatcacagctccccttcctcctgctacttctctacttggctrgctgatgactatgatcacagatggtcatcattcctatttgaatgcctttgtgtgcctaggcattaatggccattgactaattcagccctcacagcactcatgtaagataaatgttattattaatctcatttatacagtagagcaagctggggctcagagaggttaaatgatgtgctctaactcacacagcaagaaggaaaaggaacagtaattccaacacagttcttcctgactccaacaccctt

SEQ ID NO: 807044 - DNA, 603 bp, Homo sapiens
attcattacgatttcataaacaaggtgggttagatcaacagactccttccttaaaaaggattcactgtggggagaacaggaaagcaagcgagacagtctttgatgccgaaaggttgtggctgcgatctgctccacacacttgaccttacccatggggaaagcgagggagggagagccaaagggttttgtccaggtgtccctatgccaccctgtcttctcctcccacccccaaaggttaggtgcagaggaagtctttgtttggctgagaggagggacttgggcaggaggccgtgaagacaggaagtacagcagaggcaggaaggaggtcaggaagaggctgacaggaccaggcckgctcacacccagccctgccagccttcaggagagcaacatggtgtttctaaaaatatttacagtgagtctacattaatgagatatatatcagcactgacaatgggaggatgctgggccaggccctccagggtagaagaccaacgcaattagcccagaggctgcacaaaggcaaggccagccttgtgggaaggccttgtgggaagtcttggggaaggccagccttgcacagctaaaggaagaaatcaagcc

SEQ ID NO: 807045 - DNA, 562 bp, Homo sapiens
gtgacaggagagtcacagatgctgcagactggaagccccccacccctgtcggctttcccacgtgatcccagcagaagccattgatcctgctcaacaggacaaaggatggtgggcaagtgataaatgaggacaggagagaaacatttcatttcccactttgatgggttccagcctgaagatccagacccctaagaktgtattcaggttggaaaggcaccctccaagtaccagtagtattttcagggttctgtggatgctggacaagccatagcagtgcaggggaatgaaagtgtgcagcctctatctttgtaacaagtaacagcattccagattgtactcatcggccattacaaagcagtctggaatctggtgggcggttctggtgttccagcttaattttttagtaaataaaataacctagggattagttcttatccagcacagtctgcttgggagaccagatatttctgagcatcagggggtcttggtggtggggaaacacagaggtcaagccccttgagtcggtgctttatgtagggcccacccgaagtccttgcttagt

SEQ ID NO: 807046 - DNA, 562 bp, Homo sapiens
gtgacaggagagtcacagatgctgcagactggaagccccccacccctgtcggctttcccacgtgatcccagcagaagccattgatcctgctcaacaggacaaaggatggtgggcaagtgataaatgaggacaggagagaaacatttcatttcccactttgatgggttccagcctgaagatccagacccctaagagtgtattcaggttggaaaggcaccctccaagtaccagtagtattttcagggttctgtggatgctggacaagccatagcagtgcaggggaatgaaagtgtgcagcctctatctttgtaacaagtaacagcattccagattgtactcatcggccattacaaagcagtctggaatctggtgggyggttctggtgttccagcttaattttttagtaaataaaataacctagggattagttcttatccagcacagtctgcttgggagaccagatatttctgagcatcagggggtcttggtggtggggaaacacagaggtcaagccccttgagtcggtgctttatgtagggcccacccgaagtccttgcttagt

SEQ ID NO: 807047 - DNA, 630 bp, Homo sapiens
gagatcatttgccccattgctactcaaagtgtggtccatgggccagtaatgctggaggtttgttagaaacgcaacttccaggccttccttcccagcctactggtttggaatatgtaccttaacaggatccccgggaaattgttatgcacattcaattttgagaagtgctgctataacccacttacattttttaaattttaaaataggaggtgaaataccaaccccagagagggaaattgatttgctaactagtgtcattattaatttggttaaacaaacatttaytgaaaacctgctacacatccagccctatgctgggcacggtggataaaacatgaatcaataatctctgatctctttggtttttagtaattcttcatgtacctaaacattgccttgcctcacgccagggcctcggcaagtgtttgttgagggactatgtctcttgaattaaagcctagggcttcctctacattactacagctgccttctataattatcagcctcctggagtaaatcgtagcacttttagccagaaataaataaattcttcaaggaggaaatcagagtgggctgcatcgttggttttgccaactcttgacaaatcccaagactctaataatgagatag

SEQ ID NO: 807048 - DNA, 607 bp, Homo sapiens
attcatctgtcaaatggggataataaaaaccaccaggcagtgttgctgtgagaattgaaagaagtgagtcaatagatataaaagtgcccagaggagtgcctggaccttatgaggaactttgtcagctctagttgaatttgaatttatataactctagagggaatggtgatgttccccaacttrgatggggcagtagaaagagcacagactttatcttgctcatagtggcatgtgactttaacctctctgagccttagttgcctcatccgtaaaatgggaacaacagcgttcacctcaaaagatttgtgtgtgtgtgtgtcaaagggaatggtttgtgcagagagcttttcaaagtacctgacactggcaagggcttagtatttaatagctctctcaccctcatgcttaacgtgggtaagttgcttagaagaaaatgcaaagcctcatatggtcataactgtgctgcctttgtccccttttagctctgggtgctgccaggctgtgggtctgtggcccacagtgcactttcctggtgagaccctgtggcatgagcactgtggcaagaacagtcacatgattaggatcccaaggtgccaggactcttgct

SEQ ID NO: 807049 - DNA, 545 bp, Homo sapiens
aaaaaaaaaaaaaaagagagagagagagagaaggatccagatcaggaagagaccagagatgggaaggctgggaggaaggagtttgttccagaagtgagccggccagggccagggcaggggagcaggaggctgagtgaggtgggaaggggccactttcctctgagaagaaagcagcgaccaggccctcccagcaaaactcatcagggtcttggaagtgggagccaaggccacaggcgggggttgcaggtctgtccaggggttaagaagcgtgcggaagctttgaagcaggtggggctgtragacggcaggaatgttaaaggccagggtcctctgccacacacagaggtgaggctgcatgagcgagtgcagataacgaactaatgaggctggtcatctgcatggggcccaggacgtgcctggcacagacaagatctcccctgcctccttaccccctcacagcacaataagcccactcccatctcctagagggaaagtgctgccgagctctctaggcctgtccacagcacagcagattcaagccgagt

SEQ ID NO: 807050 - DNA, 561 bp, Homo sapiens
acactctttcatcatgtcattgtcctgcgtaaaggattttgctggctcctttatttttatttttatttttaaggaactgagtttctcattcagctcctaagtttgtaccttcaaagcctggaactcagtattgcctaaacccccttggargatttataaaaggcagaaatagcactctattaactctttttcctatcaaaagcagctcttgattggacttaggacctgtgttggcagatcaaaagagaaagcgaggtcaaatttgaggttctctgtggcatcggtatactgtaatggaataaatgtcctgaagaagcaaaaaagaaagaaaaaaaagaaactgggtctctctctgtcaccaggctggagtgcagtgatgcgatcacggcttgacctcctgggtcaagtgatcctcctgcctcagcctcctgagtagctgggactacagatgcacatcaccacgcccagctaattttaaaatttttagtagagatagggcatcaccatgttgcccaggctggtctcaaattcctgggatccagcaatcctcttgtctcggcc

SEQ ID NO: 807051 - DNA, 529 bp, Homo sapiens
gcactgtgaaaaagtttctggaaaaagcaatgaagaaggggaaaaaaactgaaactttgaatgccttggattaaccacgtggaagagctaggaacagaattagatgagccactgaagaacaggtaggtaaccgttaaaagatcccgtttaggaaattatttcatcattctaggatgcatcactgtgtgtgtgtctactgtgtgccagaggctacgctcaacactggggacagaatagcrccaggcagcaggccacatgggcaggcaccttgctcagactaggctcccatcccaggcaggggaagcccaagcagctgccccggatgctcaaaggtggagtaggtgcaaggagtggaaggggatctaactgagagacaagtccctccgttaaagaaccataagtgtgtgcactccagtaatactataagggggcagaggggtctgaaggatactgttgtgcccactttttcatgcagttgaagaactctggagtcagactgcttggattcaaatacagcctctaccatgta

SEQ ID NO: 807052 - DNA, 639 bp, Homo sapiens
ggcctcagtctgggcattccctcacttacttatgtcacaagcatttattgaccaactactatgtgccagaccccaccccagggatggagaattccggggtggggggcggtgcacaacagatagggcccttgcctacggagcttgatttctggagggagctggatgggagtctccgagggcctattcagcactgagctgccaactcctgagataggatcaggctgggccacggctctggtgccagctgctgggccaggcagaagttgcacaacctgctttcccatgggaacaagcagccctgtcctcccagtgtcagaagccacacgcaccagctcgttcctctttattctgtgctcaaggctttgcctgctagcatctgtctcctcttcttcaagtcatagcaccccagttttccctaggacccccycattctctgtgacctcacaccctggcacatgacccaggccaagccaaggagagcccccctcctcatggcaatagtggttggttcaagaatggacatctgacccaagatggggcagtaagactcagtccctggattttcactgactattgggaaacagaaggtcttcccacaggggctgcagagcagaaaggattgaagccaggagctgctag

SEQ ID NO: 807053 - DNA, 635 bp, Homo sapiens
gtaaatatcttaaatttggaaactttcataaatacggtttctgtgagctgatagtaattaatgcttcctacacttttattttgtttttttacagtgtttcttttgatcgagtatcagacatcaactttactctcaatacaaatgaaagtgtaagtataaactctgttgtgagcagtgtggcacatgagaggttaaaaattgggtgagtccctgtgtggatgccacatgctgggacccctgtgctctagagccctaatcctaaattggtgttacatacttcactctgtcccacggcctacctggcacccgtgggcatgtgatttttgcagccctggtttatgacttggtggagctaataagaccagggtcacttgtgattgcagcgtagacacttgacttcaaagagaaggctgcagtttgacaccamcccactgcctttgactcctttgtattgccaggagagaaatgtggactgggtcagggcaagcccctcgttactaggcatttctgtggaaacaccgagacagtcgtgtcacctgaatggagacagtttattgattttatgttgactagcatgagagaccactggcttatttgctgatggagtaaggtaggaactgctgatttgagccatt

SEQ ID NO: 807054 - DNA, 627 bp, Homo sapiens
ggtcatctgtgccacaggtccctgttgacagtgctgtactgtccaccacactagctgggatttattcctttgggctccaggtttggtgtttctggcactgaattacggaatacttgggacacatgtgacttttttcgtcctttctcctctactgtccttttaaaaacttgtgggatccaattgtgagtgaattatttatgtgtcatatcatttcttgaagttttatatcataatgcttgacctcattgtctagagaagcaatgtgtgttggttaatcctgtatttatacctaattgtatgaagcagttttagttgtcatttctggctattagwcttcatgtggcataatggaaagattgtggcttttgtggcatacatatccaattttaaatcccaggcagccaccttttagctctggaagatagtttctgagccttggtttcctcatctctaatggggtgtggcggtgggggtgagttatccaaccccccacgccccagagcttttgagaaatttcagtgagatcctgttatatagcagctgcgacactccccctgggactcgcagagggtttgggaatagatgacacgtgcgcatggacagaggcagaggcaacaaggctgtatg

SEQ ID NO: 807055 - DNA, 587 bp, Homo sapiens
tgaacagagtatttctctccatttatgtaggtcatctttgatttcatcaatattctatagttttggggcattaagccttgcacacattttgttaggtttgtatcttagtattttcttttctctatgctataaaaaataatacttcgaaaaaatttcaaattccaattgctcattcctagtacatagaaatgcaattaacttttgagtgctgacttcatacttgcaatcttgctaaatgtatttgttagttctaggagtatgcgtttttttttttctttaatgttctttaggatattctacaaagacaatcctgtcatctgtraacagatgcagtctcacatcgccccctcccctctgaatgtagcaacacagactccatcgctacaaaacataaaaaaaatttggctggacatgatggcttgtgcctgtagtcctagctacttcaggaggctaaagtgggaagatcacttaggcccaggagatcaagtcaatagtaagctatgattgtgccactgcactccagtctgaatggcaggccttatctcaaaaaatataaataaaatgaaagagggctttatcagttttca

SEQ ID NO: 807056 - DNA, 537 bp, Homo sapiens
actctgctgtgcctgatatgaatactcttattttctgcttgtaccctatttttctatccacttattttcagcctgtcacttttatgattattacatcaacagcatattcctgggttctagtttcaaccccaatctgaccacctgtcttctaaagagaaaaaacagatttagtgtaacaatgtatttcttggtttgtttaggaaaggacaccaaggttcagaaacaagtgagaattaggacttgaaagacaaatgggcggggggaacttcttagtttgtcttttgaatttttattactttttcagagatgaggtctcactgtgttgccccggctggtctcraactcctgggctcaagcaatcctcccgtcttggcctcccaaagcactgggattacaggcgtgagccaccctgcccagcctagaaagcatttttgactgaaccaaaaatgcaaatcctcaccaaaatctctcagtgaagtcactaagctcccattagagtggagtgtggagaggccaagggcactcacctagtgccaa

SEQ ID NO: 807057 - DNA, 553 bp, Homo sapiens
cctcatctctactaaaaataaagataaattagccgggcatggtggtgcacctgtggtcccagccactcgggaggctgacgtgggaggatcacttgagcctgggaggtcacggctgcagtgagctgtgattacaccactgcactccaacctgggcaacagagcaagaccctgtctcaaaaaaagaaaaaaaagaagttggaggacacacattcagtctgtaacaccgactacgagcttccccggcccctgtgcttctgcctccacctccaaggcccctcctgggcacacagatgcctggcactgtgtgtcggtaatcccaccccagggaactcaaaaagggcagtgcccaccygtcagggcactcagagcctctctcccactgagccctggtcctctgaagtcctcctggagccaccacctggggcctgagggccgacgcaggtcagagcttgccgtccctgcccaagtcacagtgggccaagcaccagcccctaccctccaaaaagagaggtgagggggctcggcccagggacccctcccccagccccgtcca

SEQ ID NO: 807058 - DNA, 588 bp, Homo sapiens
tccatttataagtccatatgaaacaaatactaagtaactacaatcataaatttcattggccaaagaagtactactccttccttttatttcagtgtctctgaaactgcaacctctggatcacctgaactaggtgtttataagcatgttcagacygcagattcctatttttctccttccagagattctggaactgattttttttaacaagttcattatgtgtttataacacataatgctttgcttcattacttgcataaatacctagaaaaggttacttaaaaataatcaatgaatagatgcacagacggatgggtggtggaagggaaagaaggagagagggaagtattagattagtgcagaagtaattgcagtttttgaacctaattgaagagaaggaaaatcttctagcttaagggatttttcctgctattctgaggttgtcaaatccaggtttatctatctaggaaatgtaattttgatccattggcactcttaagtttcttctcagttatacttccaagaatctatcataatctttttccatgtgtggaattttaggaagtgagctggtaaaattgagctgaaaag

SEQ ID NO: 807059 - DNA, 636 bp, Homo sapiens
tgatatggcattattttaaaaaaatagagacttcatactgtaatgggatgttttctgtcagtccacagtatgtgcatttcaattaagtaatcatttaaaataaaatcacaataaaataataatctcgatggaaaaaagatgagaagtgaggtagaaggggatgtcctagaagataaatgaccctatataaagcatagtactgtttttagtatcatagttgctgccgttacttactatatgtctatgcagataaagatggagagacagagagaggagacacagagacagaaggcractactgtctaaataaataaaatatatcctcaaaaacggtgaattagttctcagacccaattctagctggtgaaaagtaagctacatttgggtctgcaatcagttggctttctaatctacactgcatttattctgggtatagtgctcatgttattacttaccaacaataaccatggtcatgccacatgtccattttatacactcaaatgaggaatggaaggaaactactgtaacacaaactccaagcgtcaactttgctcttaaaattatggtttgtattaattttaaaagtgtcaaatatttataagactgtaggcatatcacaaagataaaaatatatta

SEQ ID NO: 807060 - DNA, 636 bp, Homo sapiens
tgatatggcattattttaaaaaaatagagacttcatactgtaatgggatgttttctgtcagtccacagtatgtgcatttcaattaagtaatcatttaaaataaaatcacaataaaataataatctcgatggaaaaaagatgagaagtgaggtagaaggggatgtcctagaagataaatgaccctatataaagcatagtactgtttttagtatcatagttgctgccgttacttactatatgtctatgcagataaagatggagagacagagagaggagacacagagacagaaggcgactactgtctaaataaataaaatatatcctcaaaaacggtgaattagttctcagacccaattctagctggtgaaaagtaagctacatttgggtctgcaatcagttggctttctaatctacactgcatttattctgggtatagtgctcaygttattacttaccaacaataaccatggtcatgccacatgtccattttatacactcaaatgaggaatggaaggaaactactgtaacacaaactccaagcgtcaactttgctcttaaaattatggtttgtattaattttaaaagtgtcaaatatttataagactgtaggcatatcacaaagataaaaatatatta

SEQ ID NO: 807061 - DNA, 609 bp, Homo sapiens
ccaaggtgggtcccaagctggaccattctttagagttcagcttcttggatctgggtcatgttatcaggtaaccaaggccagtcttttggactttgccacagtaggcaataggcagggttggtgttctctgtcggaagtgaagtcaggaaaggaatggaatattaaagaacaaatacacaaaaataaggcacaaaatctaagggaagatcactagctgaggcttagaggaactaaggaacagagcaggcatccagatgacagccattttgaggaatctgtgggcaggttttccttaggcagccacatcttttgaaggtccacgtttctgcctctcragatgtccctccatggtctaaaacgtattcagctctctcagccagctcctgatggttgaagtttgactccctcaaactgttccaggctgcagtgatctttcaaaagttctgttgcatttgtttcctttcatggtttcattgtttttttgatggctttctgtattatcctacaagttccatgaggattgagtatttatgttttaagaaatgtactaagtaatttacaagaagttacctcattccatcctgttaagcgcttcattaagtaccattc

SEQ ID NO: 807062 - DNA, 645 bp, Homo sapiens
tgtttactatgatgaatataaatggtagagcttaccagatttctctcaatatatgtgttcagttgcaaatatattgcttgctctagggctgagtctacacaaacatacccacagatttcaataatgttggctaacaaatgagttcacttatctgcacaatcccaaggaaacaaaataattttttctttttaattggctgattttgtataaagtaaaagcagtgcatacagacaaatccgtgatgagattcaccacattcttacttaaaataacaaatgttgttgggaggatggttgtccaccatatttagcagttctgaaaactaaataaaagcatstgattgtaaagtgtttttacctgaccttctcttaaatatttaaatacgtccaactacagaagcaaaaaggattctttatttttctcttctatattgcttgtgtgctaagctatagccctaaactaagaacgtatatattttcttcaaaggtaaaaggtttccatgaaaataaaaatacttgaaataaaaatttgtggtgtctgtgttaagaatattattttcagccacaaatttgttcaaggtcaaattcaagttcatcttgctgtaaattctgtggttttccaacataggaagccaaattatcaaac

SEQ ID NO: 807063 - DNA, 588 bp, Homo sapiens
atgccatccaggactttcatagctagagaagagaagtcaatgtttggcttcaaagcgtcaaaggacaggttgagtctcttgttaggggctaatgcagctggtgactttaagttgaagccaatgctaatttaccattccagaaatcttagacyccttaagatgtatgtggaatctactctgcctgtgctctagaaaggttacaacaaagcctgaatgatagcacatctttttacattgtagtttactgaatattttaagtgccctcttgagatcttttgctaaggaaaaaaggttccttaaaatatagtactactcattgccaatttacctgatcaccctgatggatatgtacaagtagattaatgttctctcatgcctgctaacataaaatctgttctgcagcccagggatcaagaagtaattttgactttcaagtcttatgattaaaaaaaggcatttcataactgatatggtttggctctgtgttcccacccaaatctcatgtcaaactgtaattcccactgttggaggaggggcctgctggaaggtgactggatcatgggggcagatttcccccttgctagtctc

SEQ ID NO: 807064 - DNA, 563 bp, Homo sapiens
ttatgttggatgacaatgatggtaagttgagtttttagtcatgatgagtgaaatttaggctcctctgagacatccatgtgatgttgagttagcaggtgtgtattcggatctgaattagaaacaaacatttgggaattctatcttctaggtgcttattaaaatcatgggagtagattagatccctttgagaaagaatagagtgagacgtgaagaggacccaggatgtttataaccaaagaactctctcaacacttgatgtttggggaaagaaagttaggaaaggaggctgagaaggaaggaacaaaagaaagaagaaatgacaagaacrtggtatcctagcacaaggagagtcttttcaaaattaataatagctaatttttattggcggggactttcagtgaaaatctgtgacctaattaaatagtcacagcaaactgtgaggtgtgggtactagtgttatacctgcttacaaatgaggaaaatgatggggtgacttgcaccaaatcacagagctgatctgaaagagtcaacatgttccccagatgaagccattttatttcaga

SEQ ID NO: 807065 - DNA, 605 bp, Homo sapiens
caccgagtttttaatagctatgggaatgatatagtccccagataacaaatatccggtacagcactcaaccaccagaaggcaggagcccacaattaccataatgacaggcaaggaggttgacacagaaggaatcgtggaaatggttaaaagagcttagcatccgtgtgagcaagatagacgaatagccaacaaagatgctgctaaacatctacgaccaaaaagaaaaagaaagaaagaacaaattaacggaagagcaggacactgactgagggtggtcayccagtaaaatgtcatgatcctggacctgagccaattttcagatcagaagctcgtttgctgaagaggaggtcagctttctaggagacagggccctaggatgccacggcagatataaattatgatgattctttgagtttcctcccaaagggatttatagctattattagatgactgtacactgtgaaaatagaggtacccagattttttttaggactaatggacagagggtctgagtcaacatagttagctgaagacctaaagcacattatggcccctgtgttagaaagggagcttaggggagccaggtaatatggagtcctggcgaa

SEQ ID NO: 807066 - DNA, 647 bp, Homo sapiens
tagtggaaaggacattggatatgtctcaggaagaactggacttgaatctcaacactgccacttagtagttgtgtcacagtcagccaattatatacccactcttagctttattttccttatcttcgaaaaggagaaaatagtaacgataatgtttattaggaatgccatgcattcttttacatgttctacattatttaatcatcacaatgactctgttgggtaaaaactaaacagttattttatagatgatgaagctgaggcgtaaagaagtagagtaacttggtcaaagttacacagcaaggaagtgttagagttcctaaagtccctctcttaaccattaccctacactgcctcttcagtgagcygtttcccttctaatatcgactatctcttggtaagtcctctttgttaacatccagatctagatccctaatttcctactatgcatcaccacttggacagtgtcccagccatctcaaagtccacatgtcctaacttgaagctactattatctaggcctgctcagtcttcattactttctctttcctggaatgaatacctcccatctccatcttcctggttgtccaagccaaagacttaaacatgctccttggccaacacctctcagttggataattgctatggtc

SEQ ID NO: 807067 - DNA, 600 bp, Homo sapiens
tgaattttatgaattttaggatttttttttttgagacagattcttgctctgtatcctaggctggagtgcagtggcataatcttggctcactgcaacctccacctcctgggtcctcgttcaagcaattctcctgcctcagccttgtgagtagctgggattaaaagcacgcaccaccatgctcagctaatttttgtatttttagtagagatggggtttcaccatgttggccaggctggtcttgaactcctgaccttgtgatcygccctcctcagcctcccgtggtgctgggattacaagtgtgagccaccgtacccggccaggattttattttctatgaaaaaaaaattcaggatttcattttctataaaaaatgtcattggaatttgaaaatgtttaatagaaatgacaagggaaggcatccttttcttattcctgatcttagaggaaaagctttcaacttttcaccatttgagtatgattttagcttgggcttgtcatacatggcctttattgtgttgaggtacattccttatatacctaatccgttaagagtttttatgatgaaatgatgttgaattttgtccaatcttttttctacgt

SEQ ID NO: 807068 - DNA, 535 bp, Homo sapiens
atttgaacacagcatcatctgattacagagtccttgcttctgcccatgcctctcatgcagcttcatgaaatcccataatcacaggaccatctgtcttattcaccactatatttccagctctaaatcaatgtgtggcatatgataggtgcttaataaatattttgtggatgaattaaatatgaattaacgtgactgttttaaagaacctgcctcattactttataatcacatggtaaacagggttactattaccttgaccaggacaccaggaatatagtrgggttttatgactgttgacaaaatacacaagactatgattctaactgtcccaacactgtcaagctgcgttatcaggagacacattagaaactcttataattgtccaggcaagagatgatgagaatccgaactaggactgtagcacaggggatgacaaggaggagctacggattcaagaaagtgttaggagtaaaacaggctgggctaggggatttattgagtgtggtgtgtgggggaaaaaagtagccttcaagct

SEQ ID NO: 807069 - DNA, 549 bp, Homo sapiens
gtgaggaaactgggctgtgtggggagacctaccagaccctttaaggactagatacatgtaccctccaggggccaaacgtaagtgtttgtgccacacagaggatgccagccacatggtcagtatgagtgaaataattcatccatcaggcagggaccaccaccaggggctccattttccttgctctcacaagcagcctcaaacaccatacaccttaagccgtgaaaagagaactaggaaaggtgtcctggaaccagatattgactaccctttcccccaatctctaaggagacagagtaggaaaaaacaggaataagcaggcttgctttccactccaattcctcaagcccagctcatggaggagatgtgaggaagagacaatgagtgaattggttatgcttttcaactggactagataagtctttttgtttttttaaaaaaatcaacctaggaagctttkgaatcactcaaggaatcattaaggtaagagaaagagagaatccacagaattaacattgttaagcaggcttcctgagacctttcttgttcatc

SEQ ID NO: 807070 - DNA, 583 bp, Homo sapiens
aagtgtgttaaacagagaaaatggtcgcatttccttctaccaatgggaatcaagatcttatagggcgagggcagaggtggttagccaaggccttgtccttcttcctgaaagacatagcccttgggcagagatagagtcagccgagcatctctctgcctcagtggataaaatggaaactatcatagacacttgggaagaccatgagactacgaaagggaagctccaggcttttctactgagatgttgattggaaacttaattcttctgaaagtttgactcccaccagacctcagatgtggcccctaaggacagaaaactgggcatgttaagtcaggccaatggttgcagctgtgttgagactcttaaaatgacaccaaaagagagtgtgtgagatggcagggcatcctctatgttgctccccataccayggacacacttccatgttgctcttcagggtctagaattgatctgtcatctaagaatgggtacttctatgctacctttatattattttttatttttattttgtattctatctcagggagagcaacctttatatgattttaggtagtcattatcgtaa

SEQ ID NO: 807071 - DNA, 575 bp, Homo sapiens
aattctcccagagcactctgcttggatattcatttatagcctttacactgaattttgtgagttatttgttacagtcagtaagactaatctgcttgattatgaactatttgaggacactcttcccactattttaaaatttatcttggaaacctcagttcctggcatacaatgcaaacccagtaaatattaaacttgtgattttaaaaaatacaaatccaggccaatcaatcctctgcttaaacccttccttggcttcctattgcatttgggataaaatataaactctttaacatggcttaaaagttctacatgagaaggcttctggcttctatgtagcaagtagaaattggagagtcacgcccacacttacaagaataaaaaactatgtaatctacagaaccataaaygctcttgaactcatcaaagaactgaactcatcaaagtcacagggcagccaactatcctgaaatctatgaaaagacaggagaaaaaaccatggagagatgagatgggagctcttgcttaacacacaagctagtgagaaaattttggttaagttgaaaatgttaacaaat

SEQ ID NO: 807072 - DNA, 610 bp, Homo sapiens
agttactaatagaactagactcagatatgattcagaaatccaaactatcagacagggtaacaaaagtaaatatgactaatatgataaaaaactgtagtgtaaaatgtagacaacaagcatgaacagataggtaatatcaaccaataaatagaaattgaaagaataaatgaaatggaaatgctaaaaatggtaaactcggtaacatatatgaagaaagcctttgatggtctcatcagttgcctggaaaaactacgaaaagaatcagtgaacttgaagacaaatcactagaaattacccaagtgaaatacaaatggaaaaaatatttttaaaaaatagagtgttcaggagctgtggtacaatawcagtctatgtaactggaatcctagaaggaaaggaaaaaaagaaaaagcaatatttgaagatatattgataattttcaaaaattaataaaagataccaaaccacaaatccaagaagttcagagaacaccaagcaagatacattaaacacacacatacacacacatacacatacatgcatgcacacacacacacacacagctctagacatatcatattaaaatttctaaaaacaaagaaaaaggattggc

SEQ ID NO: 807073 - DNA, 606 bp, Homo sapiens
gcactttaggctcaagatgagagaaggaaatggcttgagaccccactatgaggtggcacactatgtttaacagctccagaccctctcatcataacccattttatgcattcctcccagttaatagatgtgagcactggggcagataatccaagattcatttatatatggctttgaaaatcattacatgcatttttaggcaaattgaccttcttaatttagtaatccttagactcttaattttcaagtaattttcttcttaatgaakgatatctctagctgtctctaggatccaggaaacaattctcaagatgtcattcttttaaatttactttaaactagcgattcatatagcatatgaataatattgatttacctactgcttatggaacatctacaatataccaggtgctaggatagcttcggtgatgcagcaggtaaagattccccaggttggtgatggaagcagaaacgtttcatgtaattatgtaagccagatattactgacaccttctgccccttggagatgtcatcaaattttgactaaaccaggattccatgtcctgggacagtcaaaaactctcctcacaatttcttctagtttctcta

SEQ ID NO: 807074 - DNA, 576 bp, Homo sapiens
tccctcctttggcagtaaactccttgagggcacagagggcattttgctatttctgcatcttcccattgggtctgatacaatgcttttgcacatcgtaagcatttaataaagatgtgaaggataaacgagtgaatgtattaatgggaagcttctacccactgactgcactatgatttcaatgtaaatgcttctgggaagccgacctctagttccccaggtccagatccttgaacctgtctttattattagatgctgttgggttgtcggagtaygattaggtggaatttggccagtagttgcaggaatctcagcctccccaaagccacctgatgtgaggctagcgtgactgactgaggagctgtatttttagtcttatttaacttgaattaatttaaatttaaatagccactgtggctagtggcttggtgcatctcagctgagagaccttggagccaccactatgtagggcagcctggagagtccagactcaaagcctgcttggtgtctggtgagcctggctacaagcgactcacattaatttagttgaaaaacaggatgtggctggacacagtggct

SEQ ID NO: 807075 - DNA, 694 bp, Homo sapiens
ttattctccttgttgttatttagcgagagattgacactttagaggagtgaggagtttgtcctgagtcccacagctggcaaatggtgaggcttgccgtacacctccatgttggtgcttgttggtgcgtcgtgccatgctctgtctccattctctgtgagattcgactcccaaccaattcggagtctcagccctttgggctggctttttgataccttgcctagctcttatcatctttctctccttggagggctgggttcctcccctaccctcagacactgcctgggatctttctcccaactgatgaattgcctggaattctgacacagccatcagctttctctggggcacttggccatcaacatgggacccaaggttggcagagctcaccccactcctctgtacactgaaagtgggacactggttactatctttgggggctgggtgcakcccagccttgcccctctcccttggccagcatcaccaagtgtctgccacctgggaccaggctcatgtagttcaccatcacaatgaaagctgccatgtgctgattgcttatgcttcattagtctctgggctgagcactttgcatgccttaccttctttattcctcatcaaaactctataaggtaagtgctgttattattcctatttgacagaagggaaaccgaggatccaaaaggttacaaaacttccc

SEQ ID NO: 807076 - DNA, 610 bp, Homo sapiens
tacaacattattatctaacctgacattttatacagagaaacatattttaagccataaagttgcttttataatttactttaacgtactttaaacttccttggtttttgctaaggattgaatcatggagaaacgatgctattcacatttaaatgtcagatatgttacactyttagaaacttaggcaactgatttgactggaaggtcccggcatcaccttcaggatttttattgtcttttgttttgctagttgcttataatgtaagaatttgctacacttgtgaactttatctttgagcgtcagtgggactttctaccccttaatcccagcccttcccttgaagctgagcccagagacctcatgctcgcacgctggtctgtgaggccccacacagaggaaataggtgtgtgtttcttctcagtttgcacagcagatcactgggatgcggttctgtgaagcaagtgccaaggataacttcaatgtggacgagatatttttgaaacttgtcgatgacattctgaaaaaggtaaaaaaaagaatctacattataaaagtatatcatctgaaacctgttgtttcctttattgcttttttattgagaattttgtattt

SEQ ID NO: 807077 - DNA, 389 bp, Homo sapiens
gcattttcctaatgatgagtgacattgagcatctttccatgtgctgttggctatttgcatattttcttcggagaaatgtctatcaagtccttgcacatttgttaattggggtttttgttgctgctgagttctttggatagttttggtttttctctattattatgttcttaatttcattgagttatgcttcatctttattatttcttttcttctgcttgcattgggtttmattaccgcttcttttcctagtttcttaaagtgaaaatttagataagttatccaagacttttttcttttctaatataagcacttaatgttataaatttcctctgtgcacgacttcagctacatcacacaatttttttttttttttttgagacagagtttca

SEQ ID NO: 807078 - DNA, 656 bp, Homo sapiens; identical to SEQ ID NO: 755085

SEQ ID NO: 807079 - DNA, 536 bp, Homo sapiens
aaatatttctcccaatttgtcatttatatttcaattttgtttaagaatatattttgtcataatagaaattttagatatgttttatttttatcatctaaaagcattaatttaaaaaaaggaaatgttggttctaagctttttgatctaggatgctaacaaattcaactatgattgactgaagagtattatatgccctagtctaagtaataaggatgtagaaagccagctggtaactcgtggcaccatctcacaaatctcaayggcatctgtttcttccaggttgtctacacaaggcccttgccatcagtcaaatgagtgacagctttctggcaactgtgtgcacactctggctccttggaaagccaaggcatgtggctgagagcagaaggccttccctgttacctattagagtctatttgggctgcaaggcactcacaaacacagagacatccaggtggccaaattttgctgtacccataggttttacccataggttactgaggtataacaaagaggttccagtgtcagagcctact

SEQ ID NO: 807080 - DNA, 468 bp, Homo sapiens
tctcagtatttctgtgatactctgattcttcacatatgcttagcaatgcatctgtttgatccagcaccatgtttttcaggcaggggtggcactacagggtctaccagtgtgccatcaaatacttctgtggtccctacaacttacggttttytgagagcagcatgtgataaagtgggagaatgagttatagatttgttttcagctttattaatggagactcatggtagtgttgactctgcccccataataatggtcttgggccaaacaattcaatatcaaaaatgatgtacttgtaaagtgtagtcttctcattaaattatatgcaatgatgatggctacttctttcttccaattgaataaatttcccttagagataactcattcctgacgtagctggaacactggcaacaaaccaagtgttaaaagaaaacttcagccaaaataaatttaaaggagtttaattgagca

SEQ ID NO: 807081 - DNA, 650 bp, Homo sapiens
tcaatacatataaactactattcatatttagagaagaagcacttaaatgtacctgataggaaactatctgttttatcttagtggaaaaatctcctagaggaagggaccactgtgtgagaagatggaacagtggagagcacattttgatagacacattcagacactgtctctcctggccctgggattgtcactgagaaaactgtaagggaattttatctgttccaagagaaggacagatggcctcaggaagttcaaaagggatgaagggtagagggcttktgaggcatattagaattgtatatttcatgtgacctaaattcttctcctttgtttctctcaaaattctttagtaaaatctacattattcactggtactttgcaaaatcagctttctgtaatttgataaaaatattgtctcaatgttggcacagagtaaaaatagaggctgcctccagaacagccaagcataactgggttaaatgtagcacaaaatgcagagattgataaaaagcagcaaaaataaatcttgagtctcaaactctgtttgcttggatttgtagaaaagctgagagctggaaaaatctcttagccagaacaaggacattaggagcttctcttttaccactgcagctgacacaatactgggggat

SEQ ID NO: 807082 - DNA, 587 bp, Homo sapiens
attgcatttgtctctttcaatctatagcttccctcccttgtttgcttcttctcccttgcttcttctttgttgaagaaactggactattcatcttgtttcttgcacacaggatttgcttattgcatctctgtggtatttaatgcatttttctcctgtgaactggcaggttacttaagaagtttgatctgattccagggtgtttttttgttctgttttgttttggtaagaatacttcattgatggtacactgcattttaatttctactaagtttctgtttgtctattttatgatgttagtggccrttatttcgttaggggtttgcaaagtggtgatattctaatgtgtttatctttcttcatttattagttggactatttctataaagagaaacttatcaataacctgaggtatagtttgtatagaaaaggcagattaaatgcttgatttctttccctttaaccgctagttttcagaataatgaattggttcactagcatcctccaaaggagaccaatcaggttttgtttggtttgtttctttaatatcattatgaactcatagattttttaacctatttcatgtgttt

SEQ ID NO: 807083 - DNA, 598 bp, Homo sapiens
gttttatttcagtgtggtcagaaaaaatacataaagtgatttcaatctacttaaatttgttaagaccgcttttgatggcctaacatgatttatactggaaaacgttctatatgtgcttgagaaaaatgtgtgttatgctgttgttgagtggagtgttctgtatatctgttagatccaattggactataatgttattgaagtcctttgtttccttatgatcttctgtctagttgatctatcccttatgaaaagtgaaatatttaaatatcctactgttaactgcgttactatttcttccttcaattctgctagtgtttgctttatatatttgggtgctctactgttmgatgcatatatatttagacttgttttgagttcctggagaactgatccttttatcattatataatgtccttctttgtctcttgtgagtttttgacttaaagtttattttgtctaagtagggctaacctcctttttcctttggttgctatttgcatggagtatctttttccatcctttcactttcagcctaagtcttcatatctacagtgagtgccttataaacagcatttattgtttgaagtttttataatta

SEQ ID NO: 807084 - DNA, 539 bp, Homo sapiens
cttcctcttgggcttaatttccttcttgtggaagcatatctcttatacagttatttcattaaggatttgtaagttgttgacacttccagtttttatatttctgaaaacgtttttatttggcactttggttttgaattcagtttgaagttggttgcctgttgaaatctcttccaacagttatttccatgctacgttgaagawgttagtcctttgtcttctgatatatattgttgcttgtaaaaatatatatcatcgatctaattatcatttctttaggaaatttctttctggtagcaattggaatttatctcttttctattacattctgaagcttcactgggaaatagctatgatggattcatttttatttgtctttcttcagattcattgtgcttaaatatcagaatttatgttttttactgattttggcatcaatctttattatttctcttcatctgcttacattgtggttcatttatcttcttattctagtgtcttaaaatggaagttataatcattaatttgagagctttttggtg

SEQ ID NO: 807085 - DNA, 539 bp, Homo sapiens
cttcctcttgggcttaatttccttcttgtggaagcatatctcttatacagttatttcattaaggatttgtaagttgttgacacttccagtttttatatttctgaaaacgtttttatttggcactttggttttgaattcagtttgaagttggttgcctgttgaaatctcttccaacagttatttccatgctacgttgaagaagttagtcctttgtcttctgatatatattgttgcttgtaaaaatatatatcatcgatctaattatcatttctttaggaaatttctttctggtagcaattggaatttatctcttttctattacattctgaagcttcactgggaaatagctaygatggattcatttttatttgtctttcttcagattcattgtgcttaaatatcagaatttatgttttttactgattttggcatcaatctttattatttctcttcatctgcttacattgtggttcatttatcttcttattctagtgtcttaaaatggaagttataatcattaatttgagagctttttggtg

SEQ ID NO: 807086 - DNA, 516 bp, Homo sapiens
gtcctgtcatattatcaggatcctcttcagaaacatgagaaactcttcctgtaaggtaagatactgatttggtgattacatcatcatgtataatctgatttattttaaagtcctaagcaagcataacttcttctttttcatccaggtattcttgttcaggaactacaggaggactaacaaattaaagaacgagtcactgcaactacttaagtaattttgttttttcccatttacaccgcttttctcctgaatggttttcactgtgatagtttttttcctttgttccaatctacttgacatcctatgcagmtttgaatttcaactccctgagaaaggtaagcatttgctataaattccagtcaagactttatatgtctttgttagtgcgttgtttttaaaatattcactgggcttaaagtgaaagtcaaatgtataacttcaggggcttgccaggaactgagaattttagttcaacatctttcaaatgttttagaacaaattcatcaatgcttcttc

SEQ ID NO: 807087 - DNA, 597 bp, Homo sapiens
ctgcagccatagtgtttacttggtggtcagaaagagcaagatacagcagtgagcccctacattgtggtcagctatatgttcatttggaaataagtttgctgcataaacacaggaaaagctgaataccctaagatgacggagataatcaaggactttaacaatgaagggtagaaggggatggcttggatttgaataataccatattgacagtttcaccatttagaactgctgttttttgttttaatgttcggctttagattcatggaccacaaattgaactgagtgccaaggaaagtttgaggtagtgctrtgttctctggtttggctgcagccccacttctctgtctttccttctatttaagtgattcaaacatttgtttcctgcctgccttttgagaaaatttggagtttgtgaaccctgctacatgagaattcctagcccaaataccttggatattgttagtaccttcgatagaggtagaaaaaattcaatttaatgtgataagtttggttttacatgtgttcagttagaaatgacaaacagtgtcttgaaaaggggatctggtccttgaaaattagagtgcatgaatgtgaaag

SEQ ID NO: 807088 - DNA, 633 bp, Homo sapiens
acagtgtgaaagtcaacttagtaaaatcaaaaaagtctgacctgggagcccaaagtcctgggtttcaatctcagttttacaatcagtcataccaccatagacaagacacagcccctctaagtttcactattgatgaagcaagcaagttgattgagattgatggttttcaaactacacatcatcatgatccactgaaagtaatttaaagtttcacagtctagcatttgtatttaaagaaaaatgaaataaacagaatagcaaatattaacatattgytcacaggatgttgctttgtgaaacttttccgttttatacatctgtgtgcatatgtggctgtgtgtatcaagctgtgatacttttttttttctctttgagagatatcatctccctttgttgcccaagctggagtgcaatggtatgatcatagcttactgcagcttcacctgggctcaagctatcttcccacctcagcctccttagtagctgggactatagtcggcgacaccacacttggcttatatttaatttttttttaaatgtagaggctggtctcaaactcctgacctcaagtgatcctccttcctaggcctcccaaaacactgggattataggtgtgagccaccatgcccaacc

SEQ ID NO: 807089 - DNA, 655 bp, Homo sapiens
tttcaagatggtggcttcatcttcccttctctgccagccacgtgttacacaagatggacccaatcaactggaaagcccatttgcataagattagggtggggcgaccagccttccacatgcactttgcaaacgtcatacatgatgcaaccaatcagaaaccacctcctcaaaccggactataaaatttggcgcattcaccaccaaccagtcttttccactcggagacacatcatgggccatgccttaaagccacggtgtcagtgcagacatctatagaggaagctgtttctctttcccttctcttctacctattaaacctctgctcctaaactcctcgtgtgtctgtgtcctraattctcctataacaatgaaccccagggtatgtactccagacaatgtacccacttcaaaagggctgaaagttcttttaacaatagaggaaaggggggaaaaagtgtacttagcacctagttttgcaccacagaaggaaactggcactcacagatcctgctgaagttactggaaagggatcctggttaagactccaagagagggttcttggatctcctgcagaagaattcaggggagtccataaagtgaaagcaggttaataaagaaaggatggctactccataggcagaccagcagcatgagc

SEQ ID NO: 807090 - DNA, 604 bp, Homo sapiens
ctgtaaagttgagctgcagacatagacaagctggcagcttgcatgggtgaatgccagcagaaactaaggactagacattttcaagatggtggcttcatcttcccttctctgccagccacgtgttacacaagatggacccaatcaactggaaagcccatttgcataagattagggtggggcgaccagccttccacatgcactttgcaaacgtcatacatgatgcaaccaatcagaaaccacctcctcaaaccggactataaaatttggcgcattcaccaccaaccagtcttttccactcggagacacatcatgggccatgccttaaagccacggtgtcagtgcagacatctatagaggaagctgtttctctttcccttctcttctacctattaaacctctgctcctaaactcctcgtgtgtctgtgtcctgaattctcctataacaatgaaccccagggtatgtactccagacaatgtacccacttcaaaagggctgaaagttcttttaamaatagaggaaaggggggaaaaagtgtacttagcacctagttttgcaccacagaaggaaactggcactcacagatcctgctgaagttactggaaa

SEQ ID NO: 807091 - DNA, 641 bp, Homo sapiens
atctctggctttatattaaaacctagaaatgattaagcctagtgagaaaggcatatcaaaagctcagataggccaaaagttaagactctcgcatcaaagagccaagttttaaatgcaaagaaatgttcttgaaggaaattaaaatgctactctagtgaatacaygaatgatgagagcaaaacagctttattgctgatatggaggaagtttttgtggtctggatagaagcccaaaccagctacaacatccccataagccaaagcctaatgcagagcaaggccttaactgtcttcaattctataaaggctgagaaagatgaggaagttgcagaagagaagtctaaaggtagcagaggttggttgatgaggtttaaagaaagaagctatctccataacatagaagtgcaaggtaaagcagccagtgctgataaagaaactgcacacaagttatctaccatttagctaagatcattgatgaaggtgactaagtaacaggttttcaatgcagatgaaacaggcttctaatgaataagatgccacataggactttcagctacagggaagtcaatgtctggattcaaagcttcaaaacaggctgactttcttggtaggggctaatgcagctggtgacttagttgatgt

SEQ ID NO: 807092 - DNA, 751 bp, Homo sapiens
ttaacttttaaataattgttttattgagatataattcacataccataaagttcacccttggaaagcatacagtctgatggtttagtaaatttacagacttgtataatcatcaccactatataattttagaattttttcatcacccctaaaagaaaccgcaccattaacagtcactcccattttctgctccctgcagttagttccaggcaagtactaatctacttactatctgtatggatttgcctgttctggaaatttcatataaatggaatcattcagtatgtgaccttatgtctggaaatctgtcaggtttgaaaatgtggagcgttggtgatattttcaagatgaccacccactttttctggtgacatagccttaaagttgttagtgtaacatkctagagaagcttatgccacttggaagtgaagatgactcagacaattaactagtataaagtttctttgtaagcaaatgaagttattacctttttctttcaaaattgttttaatcaagtgttttcacttagaaatataaaaactaaattctattccgtgcattaattgcaacgctgtcatttattttgtgaacttcctttcacaaagcactgtgttagatactgtttaaggatccctttacagttatctgattaggacactttcttgtagttataatacatactttttttttgcaatcttattagtaggagtgcctctttaatgtctggaggaagttttgttgctaagcttttaac

SEQ ID NO: 807093 - DNA, 603 bp, Homo sapiens
acttagggaagctggcattctcttctaggtcctgtctctgcatgcagatcttgggggagaggatggagcaagttacatgaggatcctagagaactttttgtttttttataaagccatttatttcaactctttctaagattcagagataaaggagtcttatggtataggagtaggtgcctctcaaaagcccagtgatgtggaagacatcaaggatccccaaataaaatattgttgagtgaatcagaagtctaggatgataacctaaggtcaataccaggtgggtagttgaagttgtcacctctttcaggtgtaggtgctggtcctaggagaaaatgactaagcccagaggtatgtgaaattaaaagtgtggccagatggtagcctcatcagggcattgctatgcactggatggaccttaaccttcatactatcacctctrcccccacagctcacacataagcatgctgagttcagggtgtgcatagggtttcttgactttttgtgttctatgtctaaacaagttcttgttcaaatggaaaatgtggcctcttgagaatgtcagtgtccccacttattccattgtagatgtaaacggtacctttt

SEQ ID NO: 807094 - DNA, 582 bp, Homo sapiens
ctcttggtgccccaaagttttttcctcagtaccttcactctaaatatactgttttgattttctcaatctctcaaggggctctgatttctgccagtagctaaaggaaagagtatcatgctattctctttgaaaaactttctgttttaataagarttagtctgacttgaaacaattaattgttaagtgtgtattggtatgcctaagacacagattaacggaagaattatttgctaagatggggacaagggtttcctggtataccttagcttaaaccatagaaagacatacctacgatgttaataaaatggggtccattataaccttttattggcctcagaacagttatgtgtaaaatcaatttggcctgagctgagacaactgtgaggcaatttggactaaccaatttggattaatctaagacattgttgtcttaagatggagggttcctcaagatggaatataaaatccatatgtgattaattaaaatgttgtcattaatataaaggctcaaggtgttcgtatcactaatgtacaactttttaaatagccctaggaatcttttcatctagatcaaggaaaaat

SEQ ID NO: 807095 - DNA, 608 bp, Homo sapiens
tacagggaaggagaaatgtcacctaaaactaatgttcaaagaaacaaggatcctttttaacgatatctatgtttacagcatacccaatgacttaattgtcatctttattccattgcctttagacatgaaatagtgtcaatagtctgaattctaaacctttgaaaataatgtcaaattaaatattaacaataatcaagtcagtatatttcattaccactaaatggatttcagatatagtatctcactgagccgtataacttatgaggkgtatgttattattgtttctattttatggatgttgacattgttaatttggtttctcaagatttgaacttgagcttccattcatcaaagtctaagctctttctaaatttaagggacttcttaccaactatcatctattagtagtttctagtttcttgtatcttacacgtaagtacttctttatagcattgatagaaaattcataatttgtgtgttttgattcatgatggtatgaataacatactcatttaatctaatctaatctaataattatttccaaaaaagaagcatgctacctcaacaaagtgcaaaaaaagaatattagaataaatgtttacattatt

SEQ ID NO: 807096 - DNA, 651 bp, Homo sapiens
ggaaggagaaatgtcacctaaaactaatgttcaaagaaacaaggatcctttttaacgatatctatgtttacagcatacccaatgacttaattgtcatctttattccattgcctttagacatgaaatagtgtcaatagtctgaattctaaacctttgaaaataatgtcaaattaaatattaacaataatcaagtcagtatatttcattaccactaaatggatttcagatatagtatctcactgagccgtataacttatgaggtgtatgttattattgtttctattttatggatgttgacattgttaatttggtttctcaagatttgaacttgagcttccattcatcaaagtctaagctctttctaaatttaagggacttcttaccaactatcatctattagtagtttctagwttcttgtatcttacacgtaagtacttctttatagcattgatagaaaattcataatttgtgtgttttgattcatgatggtatgaataacatactcatttaatctaatctaatctaataattatttccaaaaaagaagcatgctacctcaacaaagtgcaaaaaaagaatattagaataaatgtttacattattctaatattaacttttttccccttatataccagtgaaaagtgtgaaaat

SEQ ID NO: 807097 - DNA, 608 bp, Homo sapiens
tacagggaaggagaaatgtcacctaaaactaatgttcaaagaaacaaggatcctttttaacgatatctatgtttacagcatacccaatgacttaattgtcatctttattccattgcctttagacatgaaatagtgtcaatagtctgaattctaaacctttgaaaataatgtcaaattaaatattaacaataatcaagtcagtatatttcattaccactaaatggatttcagatatagtatctcactgagccgtataacttatgaggtgtatgttattattgtttctattttatggatgttgacattgttaatttggtttctcaagatttgaacttgagcttccattcatcaaagtctaagctctttctaaatttaagggacttcttaccaactatcatctattagtagtttctagtttcttgtatcttacacgtaagtacttytttatagcattgatagaaaattcataatttgtgtgttttgattcatgatggtatgaataacatactcatttaatctaatctaatctaataattatttccaaaaaagaagcatgctacctcaacaaagtgcaaaaaaagaatattagaataaatgtttacattatt

SEQ ID NO: 807098 - DNA, 662 bp, Homo sapiens
atgatttgttttcctttggctatgtattcagtgatgggattgtggtgttgaatgttacctctgttttaagctctttaagaaatctccacactgttttccacagtgtctggactaatttgcatttccaccaacagtgtataaccattttcttttattcacagcctcaccagcatctgtttcttttttgacattttaataataggcattatgattggtattagtatctcattgtggttttgatttgcatttctctgataattagtgatgatgagaattttttcatgtttattggccatttttatgtctttttttttttttkggagatggagtctcgctctgtctccaggctggagtgcagtggtgcaatctcagctcactgcaacctctgcctcccaggttcaagcgattctcctgcttcagcctccagagtagctaggactacagatgcggaccaccacacccagctaatttttatatttttagtagagatggggtttcactatgttggccatggccaggatgttctcgatctcttgaccttgtgatctccctgcctcggcctcccaaagtactgggatgacaggtgtgagccattgcgcccggccaataccgtatttttatgacaaacctgaattaaagggaggccgaggcgggcggatccc

SEQ ID NO: 807099 - DNA, 674 bp, Homo sapiens
gtgaggccctgagtaatcttagcaacaaaggaaggccagctatcactctggagagacctgggaagtctgaactggtatactatctcctttaacaggagtttacagccttccactgcttcctctataggggtgaaaaaagcttggctcaacattaacactaggaggtacctataccctgacttcgagggcagttgagtgaaatctacttgtcagtcctctcctgaatatgttcctctatgctgaaccaacttaaagagggagggataggatgagtttaggggttaatcggggcacccaactcacaggcaaaggtcacctattttacagtgtttctaagttcttttctggtaattattctatggactatgtctcatrgactacccctctcataatgagtggcatcatggagatgcttgatgagcttccattgttcaactccgaggatcttaccattgtctgtgagccatccaatattatctccctctatctccatctctcagcattcttccattcttgttgtgaagatagtgggcaactggggagtttagaggggattattgttacggccaggaccctcttaggttcttgagactgatctacctgctttgcagccctactggtcctattgttcccttggctaatgagggacccatctctctggtggcccttacagt

SEQ ID NO: 807100 - DNA, 602 bp, Homo sapiens
ctttcacattcatgcactctaattttcaaggaccagatccccttttcaagacactgtttgtcatttctaactgaacacatgtaaaaccaaacttatcacattaaattgaattttttctacctctatcgaaggtactaacaatatccaaggtatttgggctaggaattctcatgtagcagggttcacaaactccaaattttctcaaaaggcaggcaggaaacaaatgtttgaatcacttaaatagaaggaaagacagagaagtggggctgcagccaaaccagagaacayagcactacctcaaactttccttggcactcagttcaatttgtggtccatgaatctaaagccgaacattaaaacaaaaaacagcagttctaaatggtgaaactgtcaatatggtattattcaaatccaagccatccccttctacccttcattgttaaagtccttgattatctccgtcatcttagggtattcagcttttcctgtgtttatgcagcaaacttatttccaaatgaacatatagctgaccacaatgtaggggctcactgctgtatcttgctctttctgaccaccaagtaaacactatggctgcagccatt

SEQ ID NO: 807101 - DNA, 511 bp, Homo sapiens
agcattgatgaatttgttctaaaacatttgaaagatgttgaactaaaattctcagttcctggcaagcccctgaagttatacatttgactttcactttaagcccagtgaatattttaaaaacaacgcactaacaaagacatataaagtcttgactggaatttatagcaaatgcttacctttctcagggagttgaaattcaaakctgcataggatgtcaagtagattggaacaaaggaaaaaaactatcacagtgaaaaccattcaggagaaaagcggtgtaaatgggaaaaaacaaaattacttaagtagttgcagtgactcgttctttaatttgttagtcctcctgtagttcctgaacaagaatacctggatgaaaaagaagaagttatgcttgcttaggactttaaaataaatcagattatacatgatgatgtaatcaccaaatcagtatcttaccttacaggaagagtttctcatgtttctgaagaggatcctgataatatgacaggac

SEQ ID NO: 807102 - DNA, 484 bp, Homo sapiens
tcctgttcagatctgccagaacatatccgattttagctgttttatgtaactatcttaattagtcaaagcactgttgaaaagtctctgactcttcttggcaatccatccaaactcttcatatggcccaataaatgacatatctgytacttttaagttagcagatttccttcactggcctctgttctcaagaaaacgatctgaagccatcggatcctgttatactatggggaaaagaaggaaattcaaacacatacattcttattatcattgtcatcaaattgtgcggacacattttaaagaggttaaaatcgactttctatacttggttcaagtacgtgatgtcatatgaaatactcgttgttttttttttgttgttgttgttgtttttataaactggggagacttgatatagcctgttctttaaagtcagcaactaagccattccgtgaaagttagagttctgaaccatgtttatggtgagagc

SEQ ID NO: 807103 - DNA, 621 bp, Homo sapiens
tattattgtagtagaaggtagcttcatgcctgtttactgctcctgaagactttctagtggaacaagatgtggaggtggaggacagtaatattttgtattttgaccttgtaaaagcctaggctaatatgtgtttttgtgtcttagttcataataaaaacattataaagtaaaacaaaataaaaatatttaaaaatataaaaagtacatgtaaaatttgtatataaagaaaatatttttgtacaactgtacaatgtgctttaaagctaaatgttattacaagagtcaaaagtcaaaaaataagtttataaagtaaagatattaragtaagctaacgttaatgttatttaataagtttttaactagattaagtgtgtaagtgtacagttttggcaaagtctacagtagtgcccagtaatgttctcgaccttcagattgactcaccactcacttagtgactcacatagagcaacttccagtcctgcaagctccactcgcggtacgtgccctaaacaggtgtaccactgtttatctttgatgctgtatttctactgtaccttttctatgtttagacatgtttccacaaatatttaccgttgtattaaaattgcttattcagtatag

SEQ ID NO: 807104 - DNA, 605 bp, Homo sapiens
tttgttgcttttagtttctttattcctcttttgcagcttcttcctctggaatggcaatagaagagctttagttgctggaaattatttgccagcaagttggtcattgctgtaactgacataagcataaactttcatgtttgcataagataatttcctatatctaggggttatctttgacatgaaattccccaacaatattttaaaaacagttcagtgtttatatgggcatgagttttatcttgctgttcattgcagtttttcaccaaaatacatatcttattttctattaaatgggatagcaataactataaagcaagcttcagtgaaagtcagtcatgtacttaggtgcataattgatttctttaagcctcagtttttaaatctttcatgtggggacaatagaaataaaaccatgtagagttgaaattaargctccatgagctactactgatgaagcacatgttagtgcctgacctattattgtgcctagtattatttagttagatgcattcattttatgataaagaagtttggatcccaggtgacttaagtaaccctcatctgtttcttacttttctcaaagccaggtgttttgcatatattat

SEQ ID NO: 807105 - DNA, 628 bp, Homo sapiens
aatttgttcaagtccattcatttgagggtgaattttgtgatggatgagcaagtcattgcctcatgtcctccagggtactttcacagttctagccattgtatggttgcttaaagaatgtgagaggttattctactgaattaattttgctgttggtgaaattagagggagaccatttaaacaaacaattatatagtctacgtgtcagaaaagaagtgcgggattgtcgaagacatagtgacttaaaggcctttgacaagaccagttaaatctcaaagaaaggtgagctcagccatcatcgcagcccagggaagggagccctgtccctcactttcctagcaggctgctccttgtttgctcttccggctctggtgaacgcttcrgtttgcagcaggccttataacagtaccatgcataacaatctgtcactattattcatggcttttctccagtctccatacttttgacattgccattaaagagattcagtgtgcttagtagctctttaaaaaataaataattgaaagctaaattatattaaactgagccaatgctgaccccttcacctcagtccattgctatctccttaaatgtattccttcttaaatcatattgtaatttgaagatgctg

SEQ ID NO: 807106 - DNA, 646 bp, Homo sapiens
agccagggtaataaagaatatggagaggacagatgaagctaaatcaacctaaaggaaggtccaaataaaaatggcagaattcttgcttgtgtcctgtatggctgtgctgcctcatcgtcatctttatgccatggagccctaggctattttccctgaattcagggaggctcccagcttggcaagactgaaagagtaaatgtatctccatttgaaatgatggtcactrgataggcaaactcttttgggaatacaggttgtctctaaggtacacagttgctagaaatataaacttttttaaaccagtataacaatcaaatgagcatattcattctaaagaattgcacatacatatattagcataaaaaagaaaatactcttttaaacagaagaataattgaggcagatgtaggcaaataaaaatacttagttaaaaaaatgtataatttgctatttgttgaaaaacaaaagtaaatcctaaccacagaattcttaaatttgatatgctcatgaaggggattaagcacagtttatgttatagatgtttctgtatcatgggatataaagggatataaaaggatatatattcaactctgggtgccttatttgagaaatgaaaattgctggttgtgactgcccttagaccttg

SEQ ID NO: 807107 - DNA, 646 bp, Homo sapiens
agccagggtaataaagaatatggagaggacagatgaagctaaatcaacctaaaggaaggtccaaataaaaatggcagaattcttgcttgtgtcctgtatggctgtgctgcctcatcgtcatctttatgccatggagccctaggctattttccctgaattcagggaggctcccagcttggcaagactgaaagagtaaatgtatctccatttgaaatgatggtcactagataggcaaactcttttgggaatacaggttgtctctaaggtacacagttgctagaaatataaacttttttaaaccagtataacaatcaaatgagcatattcattctaaagaattgcacatacatatattagcataaaaaagaaaatactcttttaaacagaagaataattgaggcagatgtaggcaaataaaaatacttagttaaaaaaatgtataatttgctatttgttgaaaaacaawagtaaatcctaaccacagaattcttaaatttgatatgctcatgaaggggattaagcacagtttatgttatagatgtttctgtatcatgggatataaagggatataaaaggatatatattcaactctgggtgccttatttgagaaatgaaaattgctggttgtgactgcccttagaccttg

SEQ ID NO: 807108 - DNA, 608 bp, Homo sapiens
gacatttccctgtatacatataccacaatttctttatctattaatccatcaatagacatgtacattgtttccatatcttgactattgtgaagaacgctgcaacgaagataggagtgaagatatctccatgaggtgctgatttcatttgctttggatatatacccagaagaaggactgctggatctcatgacagttatgtttgtaattttttcaggaccctccatgctattttatataatgattgtagcaatttatattcccattaactatatacaaagatctccttttctccacaccccagccaacacttattttctggtattttgataatgtccatcttaggtgtgaggtggtacctgtttgtggttttggtttgcatttcctgtatgattagtaatgttgagcaccttttcatatacctktttgccacttatgtatcttcttctatggagaaatctatattcatgttctttgcccatttttaaatattttttgtttgttagttttgctattcagtcatgtaagttctctatatattttgaacattagcccttttcaggtatgtggcttacaattgttttctttcagtctattggctcccttcatat

SEQ ID NO: 807109 - DNA, 586 bp, Homo sapiens
ccaaatactggaggggcaatttttcttgtggctgtcctctctcttgggtttgcatgcctatatgggcagcaagctgcctgaatgctttcttttagattggaattgaatgccagtctatattgttccttaaactccacaagatttgtacaaatgcctcagaatgaactccttgaagggagccggaactcgaagcatagcactttctaaacaaaccctctctttttgcctcttcaacctccactctttcatagccaggagtggggttgaagtaaggctcacaaaacgggtttgggatcaccacttttgcaaatccttaacgtaccatcatttcactttgcaatgtgggaacacattgccacctcttgaatgaatccttttggggccmcggccagcactgagtagttctatttacagaatcctgttttagagagagaagatgctcacttgatggaaggagtcagttagaatctaccattttcagacaagaaggggcatgttccttttggaaaagctgggtgggcacagtcctgagcagttagaggcatcataacagcaccaggaagctgaatgtgagggcataagagct

SEQ ID NO: 807110 - DNA, 669 bp, Homo sapiens
ccaaaagcgctgaagttaagcattaatacgccagattcatgatttatgatcagtatccaaaactccaactacaaacaatgcaaagtagtgctcctcagtattatttttgcaattgttagtaatgttaagcatcaagggaaaataaacacatcattgcacattacagccgcaaaaaacaaamaaaaaaaaacaaacggctaaactttgacactagagaactgaataatttttgatgctatatcacaaatagcttcaatgtttatcttatgtgaaaggtctttacacatgtatgacatttcccttgggtgatacttcaggtcaaatgccgagttatggcacgaagagcataaagaagttcagcttgcattcgtgcttccattaaaagtagattgacatgaacctagaagtgaaaatgttatcagtttagtaaccattataaacacctggaaaatcttattagacattcacaaaggtttttttatgtgtatataagcaatatacacacacacacacacctaggcatatttatccatgttcatgatgcaacactcaaacctgtgtctaatggctctgcaagcagtaaaaataacccataaaatctaaaaaattctgataactttattaaagttgttatttttgtaaagtcaatctgttgggttataaaataaa

SEQ ID NO: 807111 - DNA, 669 bp, Homo sapiens
ccaaaagcgctgaagttaagcattaatacgccagattcatgatttatgatcagtatccaaaactccaactacaaacaatgcaaagtagtgctcctcagtattatttttgcaattgttagtaatgttaagcatcaagggaaaataaacacatcattgcacattacagccgcaaaaaacaaaaaaaaaaaaacaaacggctaaactttgacactagagaactgaataatttttgatgctatatcacaaatagcttcaatgtttatcttatgtgaaaggtctttacacatgtatgacatttyccttgggtgatacttcaggtcaaatgccgagttatggcacgaagagcataaagaagttcagcttgcattcgtgcttccattaaaagtagattgacatgaacctagaagtgaaaatgttatcagtttagtaaccattataaacacctggaaaatcttattagacattcacaaaggtttttttatgtgtatataagcaatatacacacacacacacacctaggcatatttatccatgttcatgatgcaacactcaaacctgtgtctaatggctctgcaagcagtaaaaataacccataaaatctaaaaaattctgataactttattaaagttgttatttttgtaaagtcaatctgttgggttataaaataaa

SEQ ID NO: 807112 - DNA, 563 bp, Homo sapiens
atacatgcgttttgtagttctctcaggatagcaggtcactgtcttaatgtaaaccttcaggcttctttcaagtaattgattaacttctccataatcatagtcatcatacctacgagcaatacaacaatagctttataatgacaaaatcaaaatatttagtttccaaagttatactaaggacatttattgtctagtaattaaatactaaaagctcgttaattaattgaatcaacaaatgtttactgagtacccattatgtgccatgagtactcagtagtagtgatatactagtgaacaaaacagacaaaaatccttggtctcatggagcttaaattttgttgaagaaaaawcgaagaaaaattaaaaagataaacacattgtagtcagatggtgataactgccatggagaggaaatggaacttggtctgggaggagaggagttgttattttaaatagggtgggcaggaaggcttctctgaaagccttgatatttgaacaaataccagatggtggtaaagaagcaagtgtaaaggacttgaggtaggagtcaagtgtttcaggga

SEQ ID NO: 807113 - DNA, 651 bp, Homo sapiens
taattcagagaggttttattctcggatcccaattcaatggccaggaaagtctaaccgagaacacagccaccaccttctcagatctgtgcaggagagccacagagccgtcaccggtgaggtgagcaatcccccagccctctctggcttaagtgggcacctgggcgattcacaagaaggattctgatatctccagcaggcacaactctggaggacaaggtctacccagaatttcggtctctgacayaaaaaccacagaagccagtgctgctaggagtacccagcatgtgaacacagcaggtccaaacagcctacccagtgagtctcaccccagggagcaattgccataaggaatctgtcttgctgcaaagggcttactcaagcctcacctgatctcacctcctaagtgtcccatgaaggccagacagatctggacattcactccaagctgtcgattgtaaaggaatggaccaaagaatggagagaaagaaggggcagaggaaaagcaaggagaacctccatttgaacatcctgttaaggtataatgaggacatttcctgcagccttgcccacgtgccttgccttctgcaccgaccatctgaccagcgactgtggagaaacacccaccccagcaagcactggggagccttcctg

SEQ ID NO: 807114 - DNA, 601 bp, Homo sapiens
ggcaggggttgaggtcggggtgtcgctcatgtcaacgaggggggcgaccttgggggctgaagctggggccggggagggggcagaggcgctgggcccctttgaaggggtggcctggccagccggtacagagtttgagtcaggcgttgccgtggccggcggggcaatactggaggtcagggtggtggtctcactggtggggctgttctgagcagtggcaaaggtttcggtgatagtgtcagagttagtggtgacggtggtgacagaaggcagcatgtcctcgacagtggccgtagtgtcggcaggcagcctgtgggaggacaggaagtagaagagaatagacaatgaagctgagacgtgacagagaagcgaggaggagggctgaagcccaggacagggaccatgggrgtgggggcatgcagttaggcacaggcacggacacaggcccacagagagagaaggatgctgagaggaagcacacgcccaggtgggcagaagaggacacaggagacgacagagaacgtggcggtctcaaaagggacctgctagcccttccctgctgatgtctctccagctctctgcatagagctccctttccctgaag

SEQ ID NO: 807115 - DNA, 568 bp, Homo sapiens
acgatctgtggtcttttgtaactgaggttgttcacttagtataatgtttgcctggtacatttttgttgtagtgtgtatcagttcttcattcctttttattgctgaataatattccattgtttgataccatattttatttatttattcatcagttaatggacatttgggttgtttccactttttgcctgctatgaataacactgctatgaacattcatgtgcagggttttcttttttatgtttacagtcctcttgggtatatatctagaagtggaatagcagggccgtatggtaactctatgtttaaccttttgaggaactaccaaactgtttttgaaaatggctgcagaattttacattcctaccagtagtgtatgagggttccagtttttccacatcctcttcmatacttgttacttatttttttattatagctattctagtgggtgtgaagtgatatgtcattgtggtatttgatctgcatttttttggtgactaatgatgttgaggatcttttcatgtacttgttggccatttatatattttctctggagaaatatcttctttta

SEQ ID NO: 807116 - DNA, 639 bp, Homo sapiens
gtataccagtgctgtccaatagagctttctgtgatgatgaaaatgttccataatcctcactgtccactatggtagcaactagccacatgattattgagcatttgaaatatggcttataactccaccctgtggtctagtgcttagggttctgtgtgtttgtggctgcagcccaggtttgaaatgcggcttgtttcaattaatttaaatttatgtagccacatgtgtatagattctgtacatttacttcttgggctcttgctatgtgttgagtgttggtaaggcctagagaatacagtcaaagaattattcttttcatggtattaatagtccagtggagaaaacagataktaaacagtaatttcaagtatgcaatatgagacacagagaattacaaagtgtagggatctaacccagctttgggaggttgtattagtcggctagggctgctgtaacaaaatagactggctggcttaaatgacaaaactttattttcttagagttctggagtttagaaatctaagaccagggtgtgagcaggtttggtttcttctgaggcctctctccttggcttgcagatgggcaccttcccgctgtgccctcacatggtcatctctctgtacgtgcatatatttggtgttt

SEQ ID NO: 807117 - DNA, 422 bp, Homo sapiens
tagtgacatgagatcaacctgccacaaaattggtatgagatttcagagggaagttaggaaggcaaagtgattgctttcttctggctccaatcctgattacccagcagctcctctcggccccctggctcccccgagaagctgaagaagtgatggaaactktctggcagaactaattctgagtgaaactgcactggactatgtctctgaatggctgtgatactgatatcccagcctacttccaattccactcgaattaccacatacgagaccaggattaaaaatttgtacagaaacaaaacatacttcactgagttattccaattaaacccaaaaaggggagtccaacataagcacacattatcctcagatgatctgggctcagaatcttcacactgcagtaatccaagggtcagtcttttaat

SEQ ID NO: 807118 - DNA, 530 bp, Homo sapiens
tctctacctaactcctcgtctggtgatgccatattgaaatcagccatactgagagtatttacacactgctgaagtcagtaaatgctacaaatcaaggtttgatttattttttttagtgcttgtctagatttatgaaagtaatggggaaatattttatgatgcagattaaacttacaagtgtgccatgtctgcagctgttacactgtgaacgaatggcacaaaaaattgaggcagtatttctctagtattcaaaaacttatccccaattcaacaaagaagtcactcacaccatasatggatgagtgaagttctaacatatgtctttattgttttatcttatttgttaacataaatgaacatatcagccaacatgcaggttggaattacagtcctttgtaaatgggaaccataaactgattatggatacaatacttcagcaaaaaatgaaccaaagcattctgtgggtatcagttggatagatgcaatttcaatgtagaatactgtatattttattatttgtcaatggcatc

SEQ ID NO: 807119 - DNA, 647 bp, Homo sapiens
ctacctaactcctcgtctggtgatgccatattgaaatcagccatactgagagtatttacacactgctgaagtcagtaaatgctacaaatcaaggtttgatttattttttttagtgcttgtctagatttatgaaagtaatggggaaatattttatgatgcagattaaacttacaagtgtgccatgtctgcagctgttacactgtgaacgaatggcacaaaaaattgaggcagtatttctctagtattcaaaaacttatccccaattcaacaaagaagtcactcacaccatagatggatgagtgaagttctaacatatgtctttattgttttatcttatttgttaacataaatgaacatatcagccaacatgcaggttggaattacagtcctttgtaaatgggaaccataaactgattatggatacaatacttcagcaaaaaatgaaccaaagcattctgtgggtatcagttggatagatgcaatttcaatgtagaatactgtrtattttattatttgtcaatggcatcctttataagtgaaacacatacatgtgtgcacacacacatgttgcccttctcctttggagagttggccattaaacatttactaacaactattggctcatccctctcacacactccatgtcc

SEQ ID NO: 807120 - DNA, 499 bp, Homo sapiens
taatagtcactgtatctatctgatttatgataattttatcattatcatgattgtttgtttcatgctattgtggaatgtattttcagcagtcacaaggacaattttaggcttacattaagagtattatccattgcagaagtgtttctgtttatccatattcaaatatgtcaagattggtgtgtggggataagaggtgtacagactgattatagttttagtccaaatactacttatttatttacttgattgtaattcattttgagttttctrtaaaataaagaggatgttctgtatgcttttcaatatctaacattccatggtcttagaattcttcatgaacattacagtgcctttctcttttttcattttacagaattattttattttatgtaattattttatttttaatttgcaaataaaattgtttctatttcttaggtacaacatgatgttttgaaatttgtattcattgtaaaatggctaaatcaggctaattaac

SEQ ID NO: 807121 - DNA, 625 bp, Homo sapiens
tgttaattgtttgctttactatgcagaagtttttagtttgatgcaatctcatttgtctatttttgctgttgctacttttgctatgtttctggggtcacatctaaagacatccttgcaaagaccaatgtcgtggatgkttttccctgtgttttattctattagttttacagtttcaggtcttacatttaagttttaatcaactttaagttatttttgtatatggtatgagataaggtccaatttctttattctgtgtgtggatatccaattttcccaagaacatttattgaagaaacactcctttccccattgtgtattcctggcatctttgtcaaaaatcaattgatcataaatgtgtggatttatttctgggctctctattctgtttcactggtctatgtgtctatttttattccagtaccatgttgttttgattactatatctttgtaagtcattttgaagtcaggtagtgtgatgcctccactttcgttctctctactccagattgctttgtctatatggcatcttttgtgattccatatgaactttagaacttttttccatgtatctgaaaaatgccattgaaaatttgaggagcattgcattgaatctgtagattgattt

SEQ ID NO: 807122 - DNA, 633 bp, Homo sapiens
ttattttgcatatgtgggtcccaacttccccggaggagtttatccaagtacataatgtaatattagcaatagcacagacattttcttatttaaccagtggataataaataatttcttgtattaggttttgttaagataccagcataaactactgattgtaaaactttaattacactattatttcgccaagtaagaaaggtagcattaagaggagtaagagtcttattatgacatggagtcatyctgatttctttaggaaagctgtatacagtgaccaaaaaaaaaaaaaaatgtgaatttctcctcctggttagaatgtctctggtcatgacatcatgtagcttggtaaactttttgggtggcccacacatcagacacaattcttgtcccttaaaattcatctcatttcagcttataaggctttaggaaaaaatcaggttttgttgttaattgtagccaaatattggaggagaattcaggttctaatcctgtctatagatacgtaataagaacttaaaagtaatgcacagaaccacaatctaataacaagtgtattataattttctttagaaacaatttttctctatacattcaggatctaatctagttaacaggtggataacaagaacttga

SEQ ID NO: 807123 - DNA, 524 bp, Homo sapiens
agctttctgaagaaattttgaggaaatgattttcttaaaataaatatttgtaaaatcttgagcatatttccagaagcctcaccctttcagatattcttgtcacctagtaaagattgcttaccaaacttcaaagtcaaactatattcattaacccacgtaatttattttgttccccaagatctcccaaagggagcaaacacaatgaaatctatgaaagatttaatrctgccaaggcaaaataccatattgcagaatgccaaacaacccaatattataagttttaaatattactttgttttgtttacatcataacaaacgaataacaaggagtcatgtggtcaatattttaatgttttaaatatgacttattgaacttaattgaactacagaaatgcaaatgaacacatttataagccaataatctggaaaattcaataacagcatttgcaaagagaataaccttcatgtttgtggttgtatagtctgtgttgctttcctgaaggcctctttgatatctttgtttc

SEQ ID NO: 807124 - DNA, 695 bp, Homo sapiens
ctcccatcctgtaaattgttgtttactactctgtcagtagtttcttttgctgtgcagatgttctttagttaaatcaggtcctctggtacatcgtgaaggttcaattaatgataattattaatggaatcattcaacaaatggaactgggttaactgatcatcaaagaaggcactttaagaatgctttgggctgggtgcagtgactcacacctgtaatcccagtacttagggaggccgaggtaagcagatcacctgaggtmaggagttcgagaccagcctggccaacatggtgaaacccaatgtttactaaaaatacaaaaattagccaggcgtggtggtgggcacctgtaatcccagctactcaggaggctgagacaggagaatcacttgaacctgggaggcggaggttgcagtgagctgagatcaagccactgcataccagcctgggtgacaagagtgaaattccatctcaaaaacaaaaacaaaaaaagaatgctttgatctgcaagtaacatttagatagaataaatttacaatttaatctaactcctaaggtacgctaaatagtaaactcttaagaatctattttaaaattattaaagaaaatttaactgagcatggaatactttcataagcaaagaaatattgggcaatatgtcagatttcttgaattgcaagcagcataaataggaaatt

SEQ ID NO: 807125 - DNA, 625 bp, Homo sapiens
tcctgtatgctgtttctgaagtatagaatccatcaattcaaatgcacatttaacagtaaagaggctactacaaagaaagcaatgagattccagataaattttgtgtagggcccaagttagcttaaatacagcagckctcaaacacctgcaaattaagctcttatttatagtcatctcattacctttcacacctcatgccttcatggtgatgcagtgttccatactgatgacaccactcccagaatgggtgcggaacctctctcctgttcagggcacattcatctataaatgtggactaaggaaaagaataaagttatttggacttgaagacaaatttaacttgatcatagcccctttgtgcatcttacaagatttcacattattgttgctagattttaatgcagtattctaaccagttaatatctgacattggatattcctccatgtcacattttaaaggtcaatcattttcattttcctgtaaatacatttcattcatttttgtattctcaaagagtaaacagagagacagaaatggattttaaaattgacctaaacttacattctaatgaaatcttttcttctttgaagatgacaaaaaggattaaaatttaaatggagtaga

SEQ ID NO: 807126 - DNA, 625 bp, Homo sapiens
tcctgtatgctgtttctgaagtatagaatccatcaattcaaatgcacatttaacagtaaagaggctactacaaagaaagcaatgagattccagataaattttgtgtagggcccaagttagcttaaatacagcagctctcaaacacctgcaaattaagctcttatttatagtcatctcattacctttcacacctcatgccttcatggtgatgcagtgttccatactgatgacaccactcccagaatgggtgcggaacctctctcctgttcagggcacattcatctataaatgtggactaaggaaaagaataaagttatttggacttgaagacaaatttaacttgatcatagcccctttgtgcatcttacaagatttcacattattgttgctagattttaatgcagtattctaaccagttaatakctgacattggatattcctccatgtcacattttaaaggtcaatcattttcattttcctgtaaatacatttcattcatttttgtattctcaaagagtaaacagagagacagaaatggattttaaaattgacctaaacttacattctaatgaaatcttttcttctttgaagatgacaaaaaggattaaaatttaaatggagtaga

SEQ ID NO: 807127 - DNA, 629 bp, Homo sapiens
ttttttttgtttgttattttttttttttgagacagtctcgtcccactctgtcacccaggctggagtacagtggcacgatctcagcttactgcaacctctgcctcccgggttcaaacgattctcctgcctcagcctccggagtagctgggattacaggcttgcaccaccgcgccaggctaatttttgtatttttagtagagatggggtttcaccatgatggcggagggctgrtctcaaatctcctgacctcaagtgatccacctgcctcggcctcccataatgttgggattacaggcatgagccaccgtgcctggccagagttgttattttgaatactgctcttggtccaggttaagaatgtatatagcgctcactttggcagcacatgtacaggaatacctcattttttgtactttgctttattgcacttcacagatactgcattttcattttttttacaaattgaaggctgcggtaactctccattgagcaactctatcaatgccatttttctaacatcatgtgctcattttgtgtctgtgttacattttggtaaatcttgaaatatttaacactttttcattgctattatatttgttatgatctgtaatcagtgatctttgatacta

SEQ ID NO: 807128 - DNA, 493 bp, Homo sapiens
aggggactaagagtaggaaggagccaagacgcccagttaaaaagtgcccaggtaggtccagcataattatttgcctggctggcgagttttggggccctaactttaagcttttttatgttgtcatatagcaggctggattgatttagataaaaacaacattcttcatttaaaaatatgcagagttctcctttttcagcagtgagtaggtcaaggccttggtgattttggaggacaactgcgactaaggaaccgacctgggcccgaaggactgataaagtttgtgatatatctgtaatgctagcaggaaagtcattagaaakacaatggaaggttgtgacagaagttgaaatgccaggtaggtcagagagatacagtcatgggggtcaggtgtggtatcaggaataatgtgggaggccggattgaagtctgggccaggaacaatggtaattatgggagactcaacaaagagtgagtatagctgaaggagctggag

SEQ ID NO: 807129 - DNA, 726 bp, Homo sapiens
ggcaccatcgggatcgttgtgtgtatcatctcatttaatcttgacaacaatctgagaggtcacaatcataacagtcattgacaagtgaagacactgaggcctaaacagattaaatggtccaaggagtgaagccagaatgtggcagagctaagattcaagaccaagtctgtctcaggcagaggcccagagctaccaagctgcacagctccagggactccattcaaacaaagtaatagcatatgatatgatttgtgctcccaggagctgtgcagcccccagctctgcaaagcttctcttctcccaacctcctagtgctcctgatctagggatgtagaagccagttcctgagtctccatggggcaggcactgttaggccctgagggcacagacctgagcctatcctcttagctggcatcacctactagggaagatgggmaagtaaacaatttcaacataaatcagattgtgttagaggggcaaaggtaaaaggggtgagagagctgagagaaccagggaccacactgaggggaaacgggatggtcagagatgccttgccaaggagaacacccttatgatggacaagtaaaagtttcctaggcagacaaggtgaggaaggccattccagccataaaggacatcatgaataagtaatcatcactggccaggtgtggtggctcacgcctgtaatcccagcattttgggaggtagaggcaggaggatcccttg

SEQ ID NO: 807130 - DNA, 513 bp, Homo sapiens
tcgtcctcagcaccagccagtgcgtccctctgcacaagtgcggctgcgacttcgacggccactactacaccatgggggagttcttctgggccacggccaactgcactgtgcaatgcctgtgcgaggagggcggggacgtctactgcttcaacaagacctgcggcagcggggaggtgtgcgccgtggaggacggctaccagggctgcttccccaagcgggagaccgtgtgcytgctcagccagaaccaggtgctgcacacctttgacggcgcctcctacgccttcccctccgagttctcctacaccctcctgaagacctgccctgagcgcccagagtacttggaaatcgacatcaacaagaagaagcccgatgcaggacctgcttggctgcggggacttcggatcctggtggccgaccaggaggtcaagataggaggcatcggggcttcggaagtcaaggtaaggctccttgctcctttggaggggttcctggtacgtccagccaggaggagga

SEQ ID NO: 807131 - DNA, 654 bp, Homo sapiens
ctggagtcccagcatctgctattagtccctccccgggggctcaccagggacacaactgcccttctgagatgacaaccactaagctctccacatgctccttggatttcccaagggtcaggaatcatagagttaaaaagawgtgtgtgcgtgtgtgtgtgtgtgtgtgtgtgtgtgtgtgtgtgtgtggtgttggttttcagctccgtctgtagaaaggacctagaggcaaagcaaagatgccccaacagcaacagggacacctcccttacatcttggtttctaataacattccccactcaccaggcttcttggagtcaagctgattccagcatggggcaggaagattaaaagatgagcgcgaagcaccctgttatgccaaaaggaagaaagtgctcaaaaaaaatgacagaggcatgctgaagggacacaggagccagcttgaaggagatcctacaggccaatccagagcaattttaacaccaaaaataattaatacatggaagatgaaatatagatgaaatatagaccactggaaaaaacaggcatccatgtccagattgataagatgaccgatagacagacagatagactgacagacaggatatttgcacactcttaaagtatttccccatgggttgcttattagttgcaagg

SEQ ID NO: 807132 - DNA, 375 bp, Homo sapiens
ttctgaggcatgaacagtaaaggcagcattaccactgctttatggaaggggaaactgagaaccagggaggaaaagtgaattgccccaaggtcacacagatccttaaagacagagtaaaggctagaatccaggggctctagttccttctctaatrtactcttaatattctgctctgtttcataaacacaaagactgaaacatgacatatatgaatcaaatagaataacatgcttagacaaagcatgcggattattaacacaaggatgggcccatgaggtgcttgaacttagtaactaatccttctttcattaatctcttgttagcattctattgtgaactttgtgcgtccaagtgccatgtgtgatactctgtgat

SEQ ID NO: 807133 - DNA, 640 bp, Homo sapiens
atttaccttgtaagacatttgtatgactctgaaattatttcaaaataaaatgtttaacaaatgtgtttttttaccatgataaaaaagggtaaaatatactgtttaaaaaatggccttgggggtggagcctgtgtgctccagttcccacagagcatgccactcccattaccttacacttgagctcgcataggtactttgacaagccagccttctgaaggcgattcaagggatatgcagctattatagaaaggccagactggggaggacattgaacactggatttagggaggtcgatgttactttatatcaataagtaggtctttggagktttcgaacagtggagcaatattatttagaaaaggaattccatgtggaggacaatttggaaggagaaagactccaggaagacttatataagaacatcgcaatggaaagggaaaggagaaatgtgagttagatgtttaaagaagaatcaatagaatttggctactgcaaatgataccattattggaaataggggatgctggaggttggcaaaaaagagatggggccagagaggaggtacaatagtttctaggcaaggaggatctgtttccttgccttttgcagcgtctagaggctgcctgcattctttgactca

SEQ ID NO: 807134 - DNA, 640 bp, Homo sapiens
atttaccttgtaagacatttgtatgactctgaaattatttcaaaataaaatgtttaacaaatgtgtttttttaccatgataaaaaagggtaaaatatactgtttaaaaaatggccttgggggtggagcctgtgtgctccagttcccacagagcatgccactcccattaccttacacttgagctcgcataggtactttgacaagccagccttctgaaggcgattcaagggatatgcagctattatagaaaggccagactggggaggacattgaacactggatttagggaggtcgatgttactttatatcaataagtaggtctttggagttttcgaacagtggagcaatattatttagaaaaggaattccatgtggaggacaatttggaaggagaaagactccaggaagacttatataagaacatygcaatggaaagggaaaggagaaatgtgagttagatgtttaaagaagaatcaatagaatttggctactgcaaatgataccattattggaaataggggatgctggaggttggcaaaaaagagatggggccagagaggaggtacaatagtttctaggcaaggaggatctgtttccttgccttttgcagcgtctagaggctgcctgcattctttgactca

SEQ ID NO: 807135 - DNA, 634 bp, Homo sapiens
acgaagttaattgggaatcttattgacttggtatttgtttgatatcaaaagaaacatcttggggtctgacatttgtgaccactgggaattctgtaattagtttctcaaccagtagtaggtatgtattctactcaaaattctaacgacaaaacttgagagcgctaattgtttaacattgtctaatattctagctatttttagaaycatttgacatttagtgggagcttgaaatctaataaaatttctttcaaccagaggaattaagtaattatcaaaagacaatcatgaagggctagggtaataaaaaattacttctttactaattctgaattaatttaccatccaccctgttttgaacttcccagcctttctcctaaaactcaggggatctctacagcttgtacttcattgcaatttgggcctgtttagaagaccatgatgatattttgcagtgccccatacgctgacatctgcagcacagtccagtgaaaaaggaaatgaaacagcgccctctagtgtctgctgtttatttttgcatgaagctcaaatgtgtattgaaccacaccaatcgaattatgattccggtcccccgccccactaccaccctgaaaccttagacgcaggacattatgag

SEQ ID NO: 807136 - DNA, 615 bp, Homo sapiens
tccatggcagttctacttgtaagaaaaaaaaagagatataactcaaatgtccatctataatagaaaggtaaacaagttgtgggttattcctataatggactaccatacagaaataaaaacgaatgaactagagctatacctattagatagatgagtttcaagatgatggtgttgaatgaaaaaagcaagtcagtaagtatgtgcagtatgatcccctttatatggagtttgaacagaggaaaaagaaataatacattgtttgggatacatacgtaggcattaaaattacaaggaaaaacagatgaatgattaatatgatgatggttrccttgaggaggggtatgtgcatagatttacttggagaggaccatacaaatgaggtttgaaagccctagtaatatcctattttgtaacctatgtggttggtacatgagtgttcaatttattgtaattatttaaactgcgtatcttaatatactcttttacacttatgaaatagttcacaacaaacatttaactaaacatttacaattctacaaagtaaatacttagatattttctttgattagttacaaacatacttctcaaaactttttaacaagttaaaaattacac

SEQ ID NO: 807137 - DNA, 582 bp, Homo sapiens
caaataacatctgaaatagaatcagaaaacatcaacctgaagatgtaagaaatgacctcctagacacaatctttcttctttacagccgctccaagacagtgcattgaactttactttgatgaaaagtactctattgaaccgtcttgggagtgcaaatttgatcatattgaagttcgagatggaccttttggcttttctccaataattggacgtttctgtggacaacaaaatccacctgtcataaaatccagtggaagatttctatggattaaattttttgctgatggagagctggaatctatgggattttcagctcgatacaatttcacacctggtaagtaagtacttaaaaaaaaaatttctttttcttcctcakttttctatcttcatagtacaaaatcttgtgtaagacaacattatactttctcagagaatgttccagttctatttaaaaccaaatctacagtgctttttcttttccctacacaaattctgaaaggaaaagatgttttccttaaaacagcctatactagaggtaaagagtagtgactcaaggctctaaatgggcatcagccacatcat

SEQ ID NO: 807138 - DNA, 581 bp, Homo sapiens
ctaaaatcattttattttcccaatgagaaatcaaatagcagtttatgaaaaccagaaatgtaataataactcagaattaattactcattagccaattatcctttagattagaaattacaattcaggttggtaaaaacaaggctataaacagtacttaaactgcagaattgggaaaatctctggaggataacactgagagtggggccatagttttcccatttttggctccttggtttyggccaataatctcatattcttattttttacaaaaaaagcttctctagtgctgttaaaaatcacgatcaaaatatatttcaatatattttatacacattatattttcccatctacagagttagagtttgcttgcctgtgactgaataggttataatactaaaacgggtaatttgtttatttattttttgagaacaggaatagagaagcttcagattatagggtttattgttaatgaagattcttttgtcctaggaaataaatatattttaactaatttatgaacaaatgtggcaagaaataacaaataaaatacatcaattaaatataaacacaaacgattccta

SEQ ID NO: 807139 - DNA, 565 bp, Homo sapiens
aaactgttaccagttttggggtgtaatcacttatgctgtgctgaaatgtgtcacttaaccacactgtatcatgaattacaaccttgtgtcatttaagaggttattcatatgacaaattaacacatttgtcacagatcccaaaatttaaagtctgaattggaatttggttttaaaatgcttttttgatagaatatttgattccaaaaagcagaaattgaatcaaactcaatttagatagtattttaaaatatataaaaattagttttaaactagtgtggcaagttttatcctgtgacaactacattcaaacagaagagattatgagactaaaccaaatagtaatcaaactaaactatgacttctagaatcttttwtaaaataaagtttcatgttagtgcctaaattttgaatgctgaagtctgtgttgatcaataagttttagaaaaataaaaatggactggaatgaatgaagatagttatgctaaggataaaataatctaataatataattttactcaccttgtcaccaaagggcatatgtccctagacataatcctgagaaaat

SEQ ID NO: 807140 - DNA, 541 bp, Homo sapiens
tgtctctgctacacacaggttggaagcagtggtggcactgcagatttgtgtgtgtgtgtgtgtgtgtgtgtgtgtgtgtgtggagtgtgtgtgtggtgaggagatggcattaatctcacgttgtcctcttccatcccaattatgccactgtaaactaaataaatggtgtcaatgaaaatcaagaagcaaaatattttacaagaaaagttatgctttctcaaaattatttaaagatgtacgtttaagcatcatggcaaagccttgtgtgttacagccacataaataagwtaaggacacaataaagctgtacaagccatgctaacggagcttcaagacaagaccttttgtgctcccagtgaatttgatgaatattagacccttctaaatagagctggagcagcctcttgctggaaactttagcagtgttctctgttggtgcccttggcaaggacactggagttttcatgccaggcagcagtgggacacatggcaagtggaggatccatcatgggaccaagagagcaaatgcagaatgccaagt

SEQ ID NO: 807141 - DNA, 583 bp, Homo sapiens
atgatggcctgtgcctgtagtcccagttactccagaggctgaggtgggaagctcagttgagcccaggaagttggggctgcagcaagctgtgatccagtcactgcgctccagcctttaattcattaaaaaaagaaaaaaaatggagaccactgtttatgcaagatatttgatttcaaatacaggcgtggacaaaaggttaggaccctttcaccttccttatgagttccttcctaatttcctgtgtcccataaaaggactacytgtttagcaacgtagccccttccttggcaggttacaaaatcccagtgtcctgggaaactgttctgggcaaagaggacagaagagggcaggtgaatgagagcatttatggtaaaaccaagttttctctgccttcaaactgtgattgagaaatgcagtaactttctacaaataattttaaatgttgccactttctttgtagaactgtgtcatcttcacgaataacgcatattttggatgtaaagaaagtgccatccaaccataagaaagattccaacattcaactgtcaactcttgcgactggtccttttgcaagacctccacc

SEQ ID NO: 807142 - DNA, 519 bp, Homo sapiens
ctaccattctggtgtctagaggatggtggtccgcttctcatagcttcactaggcaatgccccagtgaggactctgtgtggggacttgaaccccacacttaccctctgcattgccctagcagaagttctccatgagggctccaccactgtagctgacttttgcctgcaaatccaggtttcagaggatgcaaatacatcctctgaaatctaggtggaggttcaaaaactcttgccttccaacacctggaggcccaacaccatgtggaarccaccaagactcggggcttgcaccctttgaagccacagcctgagctgcaccttgaccctttttagccatggctggagctagaatggctgggattcagggtgccatgtcctgaggctgcacagagcagcagggccttaggccctgcccacaagaccatttttccctcttagacctctgggcctgtgatgggaggggctgctgtgataatctctgacattccctgaagatattttcactgttgtctttgggatt

SEQ ID NO: 807143 - DNA, 519 bp, Homo sapiens
ctaccattctggtgtctagaggatggtggtccgcttctcatagcttcactaggcaatgccccagtgaggactctgtgtggggacttgaaccccacacttaccctctgcattgccctagcagaagttctccatgagggctccaccactgtagctgacttttgcctgcaaatccaggtttcagaggatgcaaatacatcctctgaaatctaggtggaggttcaaaaactcttgccttccaacacctggaggcccaacaccatgtggaagccaccaagactcrgggcttgcaccctttgaagccacagcctgagctgcaccttgaccctttttagccatggctggagctagaatggctgggattcagggtgccatgtcctgaggctgcacagagcagcagggccttaggccctgcccacaagaccatttttccctcttagacctctgggcctgtgatgggaggggctgctgtgataatctctgacattccctgaagatattttcactgttgtctttgggatt

SEQ ID NO: 807144 - DNA, 612 bp, Homo sapiens
ctcttctgctgctgccgccatggtaagaagtgcttgcttccccttcacctttccccatgatttaagttccctgaggccatccagttgtgagtcctgttaaccctgcagaaaagtgagttaattaacctcttttcttcataaattacctagtctcagatatttccttatagtagtgtgaaaatggactaattcgcataccttattttttattactggagttttgccttataatatacacttttcttcctgggtttttttctttgatratagtctatgagatctcacaatttctctatttccttatcaaagaggacactccatttttcttataaaaaatcagaaagcatccctttcctgcatgatgcagagtttgccgcagccttggggtatttctcttgctcctacggattatttctgtacgtctaactcagaccctatatcaattcctacaaatctcacttcccagtaccctctcaactcttctgcaaaaagctgctaaattcaaattctttccattttttctgagtcttctctgcagcagatctctgagcctttatatttctatgccttcatcttgaaatatcatcaatatatggctgagtaatagcagat

SEQ ID NO: 807145 - DNA, 591 bp, Homo sapiens
ctcaagatctgacctcacctcccttgattgattctaaaccaattatgaggttcaagtctcagcatgtcctcactggggaaattctgtttctgtctggggaaaaaataaagattattagcagaacctgagaatggatcttgtgggtgctatatgcattcaaaaccagcatctctagcagattcactgagagccattattttcttgaagtttcaaggaaacctcccagtagtttaatagtagtttattattagtgcttaygtacttcaggtgtccttgcttaattcaatcctgagtcacaagcaagttccccaacatcaaaaatatcttactgatgcctatattttgtccccaccacccctgtatcccagcctggtaactgcctttatatctaggttttgctattaatagtaattctgttactatcaagttgagttcagaaataggaaaatagaactagtcatactttctcacgccgaacacatagtttattatattcacacacagttttctccttttgccccacaaaacaatgttacgttcaaagttcaatgaggcattcctcataaaatttagatagctggcatgacaatt

SEQ ID NO: 807146 - DNA, 636 bp, Homo sapiens
agtgtgtttttagttcatgaagagagaaatgtaccaatgaaacaaataataaggtctaggaatagatccatgaacacaaggtatagttgatttgtaacaaacataacaacaaaaacggagaaaattaagagtctttcaaaaaatggtgctaattatacaggctgaaaataaaaagaaagttgatctctccccaatatatatgaataaaaaaatttttaaaaataaaattgttaagagggtaggtctcaatacaaaaaaagtaccttaaaaattaaaaaagaaaatattggaatgagtaaacagttttaggtctattcttcaaatggtatgatacacagcaataaaatggaacgtcaattgtgagtaaaaacatggacaaatctcattagcaatgttgagccaaagaagccagacaccaaagaatgttcactttargattccagttgtgtaaaattcagaaagaataaaaatttcccatagagtcacaaggccagagaatggtttccaaatagcaggatgaaggcaatcaaagaaatgtaatggaggtttttggggtgctggcaatatttttttttatatcaagggttaaataaatactgttttgctttgtgataatttattgatctggatatttat

SEQ ID NO: 807147 - DNA, 636 bp, Homo sapiens
agtgtgtttttagttcatgaagagagaaatgtaccaatgaaacaaataataaggtctaggaatagatccatgaacacaaggtatagttgatttgtaacaaacataacaacaaaaacggagaaaattaagagtctttcaaaaaatggtgctaattatacaggctgaaaataaaaagaaagttgatctctccccaatatatatgaataaaaaaatttttaaaaataaaattgttaagagggtaggtctcaatacaaaaaaagtaccttaaaaattaaaaaagaaaatattggaatgagtaaacagttttaggtctattcttcaaatggtatgatacacagcaataaaatggaacgtcaattgtgagtaaaaacatggacaaatctcattagcaatgttgagccaaagaagccagacaccaaagaatgttcactttaagattccagttgtgtaaaattcagaaagaataaaaatttcccatagagtcrcaaggccagagaatggtttccaaatagcaggatgaaggcaatcaaagaaatgtaatggaggtttttggggtgctggcaatatttttttttatatcaagggttaaataaatactgttttgctttgtgataatttattgatctggatatttat

SEQ ID NO: 807148 - DNA, 594 bp, Homo sapiens
gaattcttcagctgaggagttttgctttagtttcttatcgccatggactgggaattaacatgtatttaacacattttgctcaaacaatcaaacagtaaaagctgaagagagcgtattattattcgcccattccgagagaaagttgaagatgactgaagaactaaaaatacataaatgaattaagtaattataaacataaatttcctgtagctccaacatgactttgatctgagtaatagtgttgtgaaatagattactacatgattttcattgcttttatattatatrtagtaattaatattcagaatagttgattaactttcttaagtgtcacataatttaaaaatgaaattgctgtttgccccagatatgtttttctgtgttctttttaaatttcagtgaaattttcttatactcccttcattaaatctattatctggtttctaaacctttacctatttaatgtctcttttcctttctttctaaaaagtaactggttaaactacagttttgtcatttatgaaattttttctgttattattgtagggatagtcaatattatcattttaaggatagttaaaacttattttgcaa

SEQ ID NO: 807149 - DNA, 550 bp, Homo sapiens
tccttgatttagttttcaaataattaaataaaaataagcctcaaattgtctgcaaattgttatgaaaggaaatgtttaggagaataaatagactcgtcaatattttcttaggaaaaatatacagggctttagtaatttgaaaagcatgtttcttgaatacaataatgagttaaatgttagtcagagatttcagaagattttaccaagaagcccagtaactaaagacattgagatgcatgaaagttcaaaatggagattgagtgtaagaattatttatttgttttgtttttgtcatgtttcttgagtttttctcttgtcaagtgatacaatttatctttagggaaatttagtgaggggtgtgggtgctggtcatttgatgatgggattcgacatagaggtaaycttaggactgacccaagcaaggcctctaccattccataaaacaacattttgtagattagccaacagtcccacttctggatggagccctgctctggggaatctgaatgtgcatggaacgagctcatttctgtgctgcaactgagtgtct

SEQ ID NO: 807150 - DNA, 627 bp, Homo sapiens
tctatgtagcttgttcctgagaaagtaatagtagaaattaatttatttaactatggttaatatttgactaatcagttttgggaaagccagctaataaatatgtgtagctatggagatggatggatagatatgtagatacatacatacacaaatagatagatagatagatagatagatagatagatagatagatagatagatagatgtacagatacagatagatatcctgatggtgattaaaatatgatcttttattttatttaaccagaaagatgatgggaagtcattttacaaaaggcatggatttgcacagacagaaagagacagatgttctagatcagcaagggatgatctttcawggtatcgttgggagtggattattttttagaatggctgctaagaaacttgaggaatttttagaatggctgctaagaaacttgaggaacttgagcactgcaagttgccaccgtggggtcatgagctgaagatacttatcctcaaatggagaaagaggagatttaggtggaaagatcaagagcatcgttttggacatgttaagtttaaggtgtctaaagacatgacgagtaggcagttgtgtaagtgaattgaagggaaatctgagcctga

SEQ ID NO: 807151 - DNA, 639 bp, Homo sapiens
tttcctctcttagctttctcattaaaatcaatgaacaatgccagcctcatggggttgttgaatgattaaattagttaatatacctaaagtacatagaacactgcctgcacatagtaaaagaattataagtgtgaggtagttggtaaaattatgtagttggatatactaccgaacaatatctmatctctttttagggaaataaagtttgtgcatatatataatcccgaaacatgatttccagacaatggaattgataatttattctttctgtgttgattttttcacaatgaacattgataacacttattttattttattttaagttccaggatacatgtgcaggatgtgcaggtttgttacataggtaaacgtgtcccatggtggtttgctgcacctatcaacctgataacatttttaatttaagaaaaaggttaataccagcttagacagtttattttggctcttatattatttagaattaggcttggtttcatgggcagaaaaattaaatagtattcagaacatgtttacgggcttctgtattcgacagtttattttgattgcaaaggtttgaatctcagaaccttcttttccctttacttaaaaaatggtaaaattcataaaacatggctatgaatg

SEQ ID NO: 807152 - DNA, 639 bp, Homo sapiens
tttcctctcttagctttctcattaaaatcaatgaacaatgccagcctcatggggttgttgaatgattaaattagttaatatacctaaagtacatagaacactgcctgcacatagtaaaagaattataagtgtgaggtagttggtaaaattatgtagttggatatactaccgaacaatatctaatctctttttagggaaataaagtttgtgcatatatataatcccgaaacatgatttccagacaatggaattgataatttattctttctgtgttgattttttcacaatgaacattgataacacttattttattttattttaagttccaggatacaygtgcaggatgtgcaggtttgttacataggtaaacgtgtcccatggtggtttgctgcacctatcaacctgataacatttttaatttaagaaaaaggttaataccagcttagacagtttattttggctcttatattatttagaattaggcttggtttcatgggcagaaaaattaaatagtattcagaacatgtttacgggcttctgtattcgacagtttattttgattgcaaaggtttgaatctcagaaccttcttttccctttacttaaaaaatggtaaaattcataaaacatggctatgaatg

SEQ ID NO: 807153 - DNA, 629 bp, Homo sapiens
ctgagaattagaagactagtcacaaaatttttttaaaaagccactcatttttaaaaatagttaactagttagaaaatatctagttaatagatttttttaagtctttgttttttctggatgagaaatttccatactgttattgtttatagacttatagagtttgccacaaatgactacgaaaatgctatttaaatatatagtttctttttagattaataaaatatactatcctattaaaatgttatacattcaaaattatttctgaatgtgtgcgttcatttattcatcattctacaaatgtttggtaagtgttgctgtaatygatttcaattttttttttttttttggagacggagtttcgctcttgttgcccaggctggagtgcagtggcaatctcggctcactgcaacctccgcctcctggattcaagcgattctcctgcctcagcctcctgagtagctgggattacagtcattcgccaccatgtccggctaatttcttatatttttagtagagtgggggtttctcatatacattctagtccctaattctgactgcccattttcttaaagtaactgtaaatttaggctgagtcttaagttctaatacagatggtaattcaatttctg

SEQ ID NO: 807154 - DNA, 511 bp, Homo sapiens
tttttctttttttttgagatggagttttgctcttgttgcccaggctggatggagtgcaatggggtgatcttggctcactgcaacctccacctcccgggttcaagcaattctcctgcctcagcctcccgagtagctgggattacaagtgggcaccatcacgcctggctaatttttgtrtttttagtagagacggggtttcaccatgttggccaggctggtctcgaactcctgacttcaggtgatccgcctgccttggcatcccatagtgctggaattacagacgtgaaccaccgcgcccagccagggattacatttcaacatgagatttgaaggggacaaacatccaaaccatatcaggaggtttcagctgagaccttaaggatgagtagtgtgaaccaagcagagtgggaagaagagaattccaagcagagggactggcatgtccaaaggtcctggggtgaaaagaagctcttcaggttagctcatctccaagtggtgactctgggatcca

SEQ ID NO: 807155 - DNA, 636 bp, Homo sapiens
actacacacgcacatgtttccagcattgttgagctccagggttcctacagagccacctcatggttcctgcctgctcttcagtatccctggtggctcaggagggaagggaagagatctagcctttacgtaatcacagttaagcctcacagcactctagactagtggtgttacctgtattttatacataagaaagtgggctcagagagaggaagtaatttgtccaaggtcaggtagctattgagtcgaaaaagcagaatttagtatagctcagtctgcctccaaagctcttgaactttctactagaacacactgccttactgctggaaatttaatagaagtctctgtttgggaaagctgtggcaaatagatgtgacagttctgagacatgacctctgtgttacatggtgggtaggaatctgccaggtgcttcgccaagtgagtagatctgaacttgatcacccagtgaagcttctgtgaggmagcagcgcagtgcactggttacacatttaaatcctggctctgctgcttacctgctggatacatgaattgacctgagcctcagttgcctcatctataaaatggggatgacaatgcttcctgtctcagctagttgatgagatgaaacacacaaagctc

SEQ ID NO: 807156 - DNA, 582 bp, Homo sapiens
actgccggacacgttcaacccagagatcttacagttcaaaatgccgcgttgtggccacttgttgacgggcgccttccaccagacggggaaacagctttactgtgcagcaggtcctccctgggaaacggggagtgagatgaggctgcaggtgaatgggctgaaacctcccccagcccctcccggcctcacctagccrtgtcctgctgcaggaggtgcctgcggagttgcttcaccgggtctggatgagttaaccttgatgcccttcctccggcagagagggacttctgtgcacaacacgccaaccagaggagcccgtctcatcagaaaggcgggctctccagcacagctagagcaggtgggacaatgagtgaggcaagaggggctcaggcagcccagctgacggattaactgtgagtgtgtggggtgggagcggccagagagcggaggtgggaagcgaggcttgaggaagaggggcagccggcagcaggggctgatgtctctgagaagagaagcccatccgtgaaaggccgaaacttcaaatattcaacttgcatacctggggatccttgtgttcttttgcta

SEQ ID NO: 807157 - DNA, 582 bp, Homo sapiens
actgccggacacgttcaacccagagatcttacagttcaaaatgccgcgttgtggccacttgttgacgggcgccttccaccagacggggaaacagctttactgtgcagcaggtcctccctgggaaacggggagtgagatgaggctgcaggtgaatgggctgaaacctcccccagcccctcccggcctcacctagccatgtcctgctgcaggaggtgcctgcggagttgcttcaccgggtctggatgagttaaccttgatgcccttcctccggcagagagggacttctgtgcacaacacgccaaccagaggagcccgtctcatcagaaaggcgggctctccagcacagctagagcaggtgggacaatgagtgaggcaagaggggctcaggcagcccagctgacggattaactgtgagtgygtggggtgggagcggccagagagcggaggtgggaagcgaggcttgaggaagaggggcagccggcagcaggggctgatgtctctgagaagagaagcccatccgtgaaaggccgaaacttcaaatattcaacttgcatacctggggatccttgtgttcttttgcta

SEQ ID NO: 807158 - DNA, 564 bp, Homo sapiens
gggacaatgagtgaggcaagaggggctcaggcagcccagctgacggattaactgtgagtgtgtggggtgggagcggccagagagcggaggtgggaagcgaggcttgaggaagaggggcagccggcagcaggggctgatgtctctgagaagagaagcccatccgtgaaaggccgaaacttcaaatattcaacttgcatacctggggatccttgtgttcttttgctagcatttgttttaagtatgcagggcccactcccacattctctgaaccctgcctgtcctggacgccaggagctttggtctccatcactgggagagrtgagtcaccccatctctgtctccgtagccactgacccacggacttttatcattttcccccaagaattctgtgaaagtgtcccaatcatttttctgcctccagtctcatctttctcaaatgttccctcaacaacgagacctcttctgaaacacaaaccaccacactgcgtccccagagccgagatggcaccactgcactccagcctgggccacagagcaagactctgtctcaaaaaaaaaaaaaaa

SEQ ID NO: 807159 - DNA, 564 bp, Homo sapiens
gggacaatgagtgaggcaagaggggctcaggcagcccagctgacggattaactgtgagtgtgtggggtgggagcggccagagagcggaggtgggaagcgaggcttgaggaagaggggcagccggcagcaggggctgatgtctctgagaagagaagcccatccgtgaaaggccgaaacttcaaatattcaacttgcatacctggggatccttgtgttcttttgctagcatttgttttaagtatgcagggcccactcccacattctctgaaccctgcctgtcctggacgccaggagctttggtctccatcactgggagagatgagtcaccccatctctgtctcygtagccactgacccacggacttttatcattttcccccaagaattctgtgaaagtgtcccaatcatttttctgcctccagtctcatctttctcaaatgttccctcaacaacgagacctcttctgaaacacaaaccaccacactgcgtccccagagccgagatggcaccactgcactccagcctgggccacagagcaagactctgtctcaaaaaaaaaaaaaaa

SEQ ID NO: 807160 - DNA, 623 bp, Homo sapiens
aacaaggaatcctttctccctgctgcagctagctgtcataggtggtctagggaacgccatgtggctcagaaggacgaggaatccttcctccctgcagcagcagctggaccaggtggtctgggggacgccatgtggctcagaaggatgaagaatccttcctccctgcagcagctggctgtcataggtggtctagggaatgccatgtggttcagtgccaggatcccagactggttttgaaatgtggggaattaacatttaaggagactaactattctctttaactaattgctagtctggctattctgcttcgggatagagtatttttttttttcttgagacacagtcttgttccgtcacccaggctagagtgaagtggcacaatcttagctcactgcaactccacctgctggatttgaacgattctcatgcctcagccccccgagtagctgggaccaccaygccctgctaagattttttttcctatttttagtaaaaacagggttttgccacgttggccaggctggtcttgaactcctgacctcaagtgatctgcccgccttggcctcccaatgtgctgggcttacagacgtgagccatcatgccccacctagagtggttatttg

SEQ ID NO: 807161 - DNA, 568 bp, Homo sapiens
aattttaggtaaatattgaacctggttaacctgttagtttggatatttcactttttgctattttcagagaagggtataggcttacatgtgttaggggctcattctagattcaccccgcctcaacttttaacctcaagtggaccagaaaaaaagtcaaggaggtgcccaccagcaagtcaagaaggtgctgctaaccacacccagtgggataaagggttccaggttgacgcaaggctgtgtatgcccagatatgagagcgctgtggagttcaggcatctcacttcctgcactgcttcaaattaaacccctgaatgcaccgttaagtgctacagcagacctcttgctatgtgtgtgtgcrtgagacaggagatgctaaggaaatagggaaagacagcctctgtttgttttacacaaatagctaaaaattggacttgacttatgcaattttgtgaatcgccctataaggaaaataccgcaaacctttaatgcacatactgctttttttccggatttgtgcttggtgaaaggggaaaataaaacaaaaccaaaaacaatgaaatctgactac

SEQ ID NO: 807162 - DNA, 603 bp, Homo sapiens
ttcaaaccagaaggaccgtagagccccatccttcactcaactcctagagtctgacgggtctcaggaagggatccctctccgagagggtctgcaggtttgccagctgaagtcagtaggcagttagtgatctcttggcttttctgcagagcaactggacgtggcagggcgggtgatgcagtacgtcaacggggcagccacgacacaccagcttcccgtggccgaagccatgctgacttgccggcataagttgtaagtttgactttgaggggtttcttaaaaataggttgggtgggttagaggaatcttgagtcttccttgctttctcacattttccttctccacatgctatattccttcataggaacccaaaaggatatgagtggtttttaccaccacctccccagcactccttccttgcccaaggcctcccacccataggagcytgagttcatcagtttcctttcctgcccttcagtataaagcagcccatcctcatagctggaactcagacgtgggaagcagggagcgtagcttgcatgatcaggtcatttgccctcattttgtgagctccacatgcacagcaagtcccagaccttccccatg

SEQ ID NO: 807163 - DNA, 559 bp, Homo sapiens
agtacacaggatatatttgagacatctcttttcctatctcccaccaaaggataattcaggcggatctcagtgcacaggcacaggcatttgcctcattcttgttttgtctgttttgaatttagttatgggaatattttaatatctctcaaaaatagggtatctggtgtgagtcagaatgattatagaacatgcttgcctggagaacaggaaatgcgggatccactcctggtgtgctgttagctgaargacgtcagaactgtcctttaacctccctgcaggtctctaaatggtaggattgtttggggattacactagatcatctctaggcaccgttcagctcagtagagacattgctgcatggtggaaggagtgacctcagtgtgaatcctggttctgtccctttctgcccaggagaccttgagcagcttatctaaatgctgtgtgcctttgttagctcatctgaaaatgtggctgtaagaatgacctcatgagaatggactgagatcatattcttaaaactcttggcactaataggtatttaatctactataactgtgaa

SEQ ID NO: 807164 - DNA, 382 bp, Homo sapiens
ttgctggttctgtgctgatatttctattttgaagagccccatatgtctggatgtgggtgtgaaactttggaatcctttggtatgaaaggcgctttgggaacagcagaaccagactgcgctcttaaatggagaacttctgaatggattaggaaaaaccacgagattgtgcacctgtaggcaggtgtgcacgcaccacctcaacttgtgtcctctcttccctggtttcctagcacygttatttatttatttttcttaatcttgctttttgttccccacattttagaggattcagtttatcgctagaaccagaaagaatttctcctgatacgaattattccagttgttgaattttcccaaggcttgagcacacaatggcaacata

SEQ ID NO: 807165 - DNA, 659 bp, Homo sapiens
aggaccaccatagaaatttcacctaaatctgcaggcttatgaatgtcctgcactctctttctcctgaaatccttacccgtggaatgcaacctactacctggtgtagacaccaggttgctctcaaacttagtataccagaaatgtcctcattctgccctttaataagagctgaccaaatgctagctggggaaacttctcaccatctgtcaccagcgttctccctggaaaatcatcccttcctcattggatgttgctgtttccgtggccaggcaacccacaacattcagtctctgactggtactggtccgtgttctaagaggtgctggagctgcccaggagtgcaggcytaagccccagtgaagtggaattgagttggttgggatgcccagtttttttacaggtcgaattgcacaaacatttactgtgcccctgcttgtgctgggcactgaagatgcaaacatgagtgagccacagtttgcatcccctgtacctccggcccagggaggtacaggggatgcaaactggagaagcgacatctgagctgggctttgcaggttacgtcaaagttcatcccgtgggaccagaggcaggacccttgtggggaaggagcagagaactttacagaatgccatctagggatgagcctcacggtgggacct

SEQ ID NO: 807166 - DNA, 631 bp, Homo sapiens
tctgggtcctagactccacacctggtatataattaaaatcacttactaaccaggttttttacctaaagtaaaagttgctgagagttaacagtgcaacatgtatttgagatctctaaagttttatatgcaaggcttataaaaacagtgaaatgtgttttttagtaaaagattataagaaagcatgaaaatataaattttgcccaggataagagattatcttaaatttaataagacagagctaaaggtttaagcaagttacaggaagacaaaaattaatcttgcaaaaatgtataaacattaactaaattcaaaagggtattatatggtcttttcctaaattgagcattgaaagaaaarcacggcaaggctgtcttaagacactaatctgccgtttaacaaaaggggttgtaaagggtttgtaaagacttcaccccatggtcattggttaagattaggtgaactttcctatgaggttttatcaaaaggttgtttacaactttaataaactaatacaagggtaaaatttggctttaaacaggattttcatgtaatagtaaaggatgatgaaagattttttccttttgtgacatcattttggcaaaataaataatggcaatttggaattctattt

SEQ ID NO: 807167 - DNA, 659 bp, Homo sapiens
ttactttactgacaaagctgaaaaaggcatgaaacctctggaacagggacacaaaacaactgcaatagcagtagccagagtaacaccttgcatcaatttcttaggcactaaatcccacaggccgttcaaagtatttggtaaaaattaataatatatccatggaaaactaagcaaactagggggagggaaggggaaacatggtgaagtactcaccagcagtgaacaatatttatgtagtcataataatataaaagctaaacactatattaaccaagaattcttatatacctatactggaagtgcttttagaaataggggaaggaaagggaagaataccccacctaccataacaagaagttaatatgtattatctaaaattgataaatcacraaatagcaatttaggcagatttataaacgcagaggtaagaatcaaaagaaaaagcttaaaagaatttttagggccaggtgcagtggctcaggcctgtaatcccagcactttgggaggcccaggcaggaggaccatttgaggctaggagttcaagaacggcctgggcaacacagtgagaccccatctctaccaaaagaaaaagagagagagagagacagagttcttaaaagtaactgcctctgaaaatgagattaaaaagtggggatggg

SEQ ID NO: 807168 - DNA, 642 bp, Homo sapiens
aacaatgcaagaggatcctaaatgaaaagcgaatgttttttctcaactctcattcccttattccagctccacagaggtaaccaattgttttttttttgttgttgttgtatggtttgtttttgttagacagtagtcttttcctgaacagtgctgctccttgtggagcaaggctaattcataggcagtgcatccagagtcygccccagttgattttgtgtgtaaccttctagcaactttttgaaaattaatttgttcttaaatatgcacatcatttttatttatttatgtttttgagacagggtctcactctgtcactcaagctggagtgcagcagcatgatcacggctctctatggcctcgacctgcagtcctgaagtgatcctctcaccttagcctctcaagtagctgggactacaggtgcacaccaccatgcccagctaatgttttttgtaattttttttatagagacagggtttcgtcatgttgcctgggctgatctcgatctcctgggctcaagcgatcctccactttggcttcccaaagtgctgggattacaggcatgagctactactgcacctggcccacacatcatcttttaaaaattaagtaatattgcaacgtttctaattgtccctacttctt

SEQ ID NO: 807169 - DNA, 599 bp, Homo sapiens
tgaaagcattaccacatcgagattgtgaacataccaccaccagaagttttcttgtgcccctttgtaattcttcccactgccctctccccaggttgtccctgatctgctttttgtccttgtagattagttgcattttctagaattttgtataagtggagtgtatctacagtatgttctcttttgtgtctgccttcttgtactcagcataattattttgagattcatccacgtctttgcatggatcagtcatctgttccattttattgctaagcagtattccactgtatagataaataacattttgtttatccrtttacttgttgatgaactttaagttgtttccagttttgagttattagagtaatgctactatgaacatttgcatatgaatccttgtatggacatgaactttcatttcttttgggagtaggatagctggatcatatggaatgtatatgtttaacttttaaataaactgccaaactgttttccaaagtggttgtaccatattacattgccaccaacaatgtatgagaattccagttgtcctatattctctccaacatttgatatcgtcggtcttttcaattttagtcatg

SEQ ID NO: 807170 - DNA, 597 bp, Homo sapiens
ggaagttgcagtgagccaagatcacaccactgtactccagccaggacaacagagcaataccccgtttcaaataaataataataaagttaattttgctaaccttgtatcttgagtttttaatttacctacttttcaacaacttatttttgctttatgaattttaactgcatttcccgtctcattttatgagttagactcattttctcaggtaattacttgaggctaaaacttgggtttcatcacttttttttttttttttyccattactaggctgccttcttaggaaacataggtgactcagcacttccttaaagtgaccattcagaactggcatgttgacagaatgcctggattaaaaagaaactccaaccgctgatcttttcatttgttattattttttagagacagagtctcactctgttgcccaggctggagtgcagtggcgcaatcatagctcactgcaggctcaaactcctgggctgaagtgatcttcttgtctcagcctcccgagtagctgggactacaggcatgaaccactgcgcctggcgcagagactgatcttaagtctagttcagtcataatcaaagaggaaatgga

SEQ ID NO: 807171 - DNA, 558 bp, Homo sapiens; identical to SEQ ID NO: 780435

SEQ ID NO: 807172 - DNA, 632 bp, Homo sapiens
tgcctgtagtcccagctactcaggaggctgaggcaggagaactgcctgaacctgggaggtggaggttgcagagagccgagatcgcgccactgcactccagcctggcaacacagcgagactctgtctcaaaaaacaaaacaaaacaaaacaaaacaaaacaaaacaaaaaaacaggatttaagaactatacggggaggactgagaaggcttgtgatacatacatgtgtatgtgtatagtgtgtgtatataagtatataaaaagagagactaagacgactcytaaatttaagaaaaaccaggcttggggaaaacagtaattcaattttgcatatgttacacttgggatgctttagagtattctaggaagaatgtgtccaaaaggtagcttacataggcatgatgttcccagaaaaggtttggtctagggtcaaaaacagaacagcattcaggtgaaagctaatgtcatgggagggaatgaaactgcccaaacatagccaccacttactgctgtgcaagctgtgcactgcacaactcctggggctccagttaccgtgggtcactgcagctttgtacagctattacgaccattttttggtagatgaatataatgtatcttgaaagagaggtacctg

SEQ ID NO: 807173 - DNA, 555 bp, Homo sapiens
agggcatttttccttttgacggttggtgtttttcccccttgttccttgaattttttttcattaaaatcacagaaacattcaatgtccacatgtcagttaaattttcaacttatacttgcatgtttcatataactgttgagcactttaataagattcttgaaagcatatttatctgtccatttcctaatatatctccatattcttataattttgcatgagagcttttgagcaaattttcatcccattttgggggccttaargaactgaggagaaaatatacacagtagaccacgcatttactgattgacaatgttttcccatatacaaatttcctaaattcacttattcctcttgaaactgaattgctgaaaagaataatgattaaagatattcttgtggatgtgacaccacctacatacatctcatcccattgctctgtattaaatttggactgcttaaagtaggagttatatatacttgttatggggaccaaaaagctgcctggaattttgtagcctttatcacaagcagctgagaggctgtctgagagtcaca

SEQ ID NO: 807174 - DNA, 558 bp, Homo sapiens
ggagaaggatgcaggcagctgaagccaactcacttggggtattcccactggcaagcctcctgactgtgaaatggatgcctcggacttaaccttgatgccatctgacacttcacttctctttgtttttattccataccagccaagtaagcatctgattatgwtttggcttcccacgaaggcctgactacaggaagaaaatgtgtactagatgttcccacaccagaatcccaggccatgaaatggaaatagaaacagttctattctcattttaaggcagtaagcagacaatctggttttatatatccacttcctgaactgggataacacgatggagagattagctctggctaggctcataaaatcagtttctaagccttggtcctcaggggaccaaggatgtccactggaacacaccgccctgcagaactccttgggaaaacccactctgaccatctgcagggacgtcctattagaagggatgtgggaggcagcctgatctggctgcggcagagtgcaggatggctgggggtgctcgtgtcagcaagctagctcacaggc

SEQ ID NO: 807175 - DNA, 606 bp, Homo sapiens
gaggagggatagaaagcaggaagcctagattgtttctaacttggtcaaatggttgggtggcgatgctaatggcctttatatggaatacaaggggggaagcaagtttaagagaaataaatactgtttttagttttggaacatgttcaatttgagttgcctgtcagatgtccaagtagatgtaacccctgggaaggtggatatatagaacttttactgataatctaatcatataattgatagcttataatccttggccttatttttgccacaatagtctccctctttgcaatttttccatagagtataatcttcaacttttcttcatgttattagagagtaataatcatgtttatataattaattacttttgctcacatattgagtaaaccrgaagtcaaagattacactcagagctggataaaattaagagttttcatttattttggaaaacgattttagcttataaaaataaaacaatcactgtgaaaagacatggaagaatcttaaatatatactactaagtgaaagaagccaatctgaaatggctacatatggtatgattacaactgcatgacatcctggatgagacaaaactagatacagtac

SEQ ID NO: 807176 - DNA, 466 bp, Homo sapiens
gctcagaatgtaaaaacagaagttagttttatgaaaatagccgcaagttgatagaattgaagattttaagaaaaactagaggaaagtagaatgtagtataaaaaacagagaacattaatgacaatcatggtttcaataggtttgaaagataacagaaaakatgtgctaatatagtggtgacctgtgagtggataatcagactatcagcaaattgataaagctgtacacaaaaaccagaaggtctaagagcatgaagacaaccctctccacagagcctggttgtttctgttgtggcgctgttggtgttgtttgtatccagtacagtgcacaagcataactcctgacataatcaaagcacagttttgttattgtgtcctgtgtctctttaaaatatattcagtggtggtaccaagaaattgtcagaactaataaacaagttcagtaaagtggttggttacaaaatcaa

SEQ ID NO: 807177 - DNA, 564 bp, Homo sapiens
accccgagatccagatggcttagcacagaaaaagattccatttgtttgggagaaaataggggaagagaacaagagtctttgcctggtaatcctgagaatttctcctgatcttcaccaacaccatcaaagtggccccagatttcagaaaaattgaaaggctttcttctatgagtctacaaaaaccctagtgttactgggcttggggtgtcccctaatgcatacacagcttaaatagaaacactcaagttcttctgagtgcctrgaaagtgttcccaagaaggacaaggacaaacaagcctagattgagaaggcaacaataaataccttaagtgcccagacatcgacaaatattcacaagccttcagatcatccaggaaaacatggccttaacaaatgaactaaataaggcactagggaccaatcctgggcaaaaagagatacatgactttcagaaagagacttcagaatagctctttgaagcaactcaaagaaattcaagataactcagagaaggaattcagaatcctatcagataaatttaacaaatatgtagaaatatttcaa

SEQ ID NO: 807178 - DNA, 587 bp, Homo sapiens
gttcttggcatgtgttgggttcattggctttgtctctgtattacattttctagattcaaagaacatgaaaaatgtctaaactcttccccaaaactgtgtcttgtcctattggttaattaataattttagtttggatgccagaggtttatgctctttaggaatctgagtcctgttgtcccagatggggtttgaattccccatgccttctgactcacaggtattctaagattctcctacttcraaggtgaacggtcatggtcttttaaccactaaccagtgagtttctttttcctaggcctctttcttgaagtggattcaagaatgtgcctcatgaggccatttccacatacatggcttccttcatcctagagaatccccagttctttcctgggctgatctgtgtatatctaggtgagatgactggacatgcccatttgtttgttccccaaatgatcgcactatgaaaacagaggataaaaacccaaacgctgctctttcatttccaaactagctgtaggaatgaattttcattgtatgttgatcctgttgctctgaaaatagcaggtatattttatacatgatatagg

SEQ ID NO: 807179 - DNA, 548 bp, Homo sapiens
aaaaaaaaaaaagaacttggctacattcaatttccaaatgaaaaccagcaccaggcagttccaatatggccgaataggaacagctccagtctatagctcccagcgtcagtgacacagaagacgggtgatttctgcatttccaactgaggtaccgggttcatctcactggggcttgtcagaagcccacrgtgccctttcctagccaagggcagctgtgacagatggtacctggaaaatcgggacacacccaccctaataatgcacttttccaaaggtcttagcaaacagcacaccaggagattatatcctgtgcctggctcagagggtcccatgcccacagagcctcactcactgctagcacagcagtctgagattgaactgcaaggtggcggcgaggctgggggaggggcgtctgccattgctgaggcttcagtaggtaaacaaagctgccaggaagcgcaaactgggtggagcccaccacagctcaaggaggcctgcctgactctgtagactccacatctgggggctgggcatagctgaacaaaagg

SEQ ID NO: 807180 - DNA, 548 bp, Homo sapiens
aaaaaaaaaaaagaacttggctacattcaatttccaaatgaaaaccagcaccaggcagttccaatatggccgaataggaacagctccagtctatagctcccagcgtcagtgacacagaagacgggtgatttctgcatttccaactgaggtaccgggttcatctcactggggcttgtcagaagcccacggtgccctttcctagccaagggcagctgtgacagayggtacctggaaaatcgggacacacccaccctaataatgcacttttccaaaggtcttagcaaacagcacaccaggagattatatcctgtgcctggctcagagggtcccatgcccacagagcctcactcactgctagcacagcagtctgagattgaactgcaaggtggcggcgaggctgggggaggggcgtctgccattgctgaggcttcagtaggtaaacaaagctgccaggaagcgcaaactgggtggagcccaccacagctcaaggaggcctgcctgactctgtagactccacatctgggggctgggcatagctgaacaaaagg

SEQ ID NO: 807181 - DNA, 548 bp, Homo sapiens
aaaaaaaaaaaagaacttggctacattcaatttccaaatgaaaaccagcaccaggcagttccaatatggccgaataggaacagctccagtctatagctcccagcgtcagtgacacagaagacgggtgatttctgcatttccaactgaggtaccgggttcatctcactggggcttgtcagaagcccacggtgccctttcctagccaagggcagctgtgacagatggtacctggaaaatcgggacacacccaccctaataatgcacttttccaaaggtcttagcaaacagcacaccaggagattatatcctgtgcctggctcagagggtcccatgcccacrgagcctcactcactgctagcacagcagtctgagattgaactgcaaggtggcggcgaggctgggggaggggcgtctgccattgctgaggcttcagtaggtaaacaaagctgccaggaagcgcaaactgggtggagcccaccacagctcaaggaggcctgcctgactctgtagactccacatctgggggctgggcatagctgaacaaaagg

SEQ ID NO: 807182 - DNA, 667 bp, Homo sapiens
acatttacatctgcataagcataaaaaaatatggaagatagcacccacagtgtcaacagtggtttcctttgaagtgtagggtttaatttcttccttagtttgctcattcattcattcagtaaatgtacactgagtgcctactacacgctaagcactattttaggcactgaggatacaatgatatgtaaaatccctgtcctcatggagcttacactctaatgcaggaagacagacagtaaagaaataaaattatagtatcttggatggtgatatgtgctatagagaaaaataaaatagagaaaggagatgggagggcggtttgcagtttcaaataaagtggattgaaagtgtagagggaacattttatatctttgtatccttaaataattggtaggattatcaagtgttttcctttcttatcatgtgagtagttttctgtatagcccaaataaacagtataaaaaagaggataaaargttatttttttcccagaattaaaatgcttgtttatttatttgtatttagagatggggtcttgctctgtcactcaggctgcagtgcagtggcatgatcatggctcactacagccttgacctcctgtgctcaagtgacccttccacatcagcctctgtagatgagactacaggtacacaccatcaagcctggt

SEQ ID NO: 807183 - DNA, 604 bp, Homo sapiens
ttgctcactgcagcctcaaactccagggctcaagtgaccctcctgcctcagcctcccaagtagctgggagtacaggcgtgcaccaccactcccagctaacgttttaattttttgtagacatgggggtctcactatgttgcccagactgatcttgaactcctggcctcaagcaatccttcctcctcagcctcccaaattgttgggattacaggtgtaagccacctcacctggcccttatttctttaatatataaatagtgtcttattttattcaatagatgtattagagaaatctcgtgtacttaaaatgaattgtcatataaagtaatcctactgcaaatatttttcccccaaaaaatgtgttagttgaaaaaccttttcaaccaaataatagttttgaaaagtgggtacatacgaatctaaattatgctttcttgattgaattcatcagytataaaaagtataaaattccctccctggtcaactcagtgaggctagaagtttattgattttatcagaattctccaagagtatgcttttcgtttcaatggttttctctattgcttttctgttttctgtttcattgattcctgctctgagctttg

SEQ ID NO: 807184 - DNA, 648 bp, Homo sapiens
cttgattataaagagtgcgttgttgtgttatttgctttatttttctcttcgttgtgaaagtcctgactctgccagattttcagatgtttaatggatttgcatgtgatttaaatggtcctctgacatcccttttatcaatttcgggaagtccatcttttgtgagaattgcaatttcaattagttttgggtttgcattgcactggctagtatttatataatcaacattcactgaaagactgaccaaagggattaccataatgggcagagatagctgctgatattgaagagagagagagctatttgggcaagtactaattttatggaagtccgttcatcagtaaatatttcttattatgatgacttttgcaactcagtgggtggggataattggatagttgggtagtaaagaccccatctgctgaatgtttgctatagaaggccacgtctttcagtatatttcctgctctctttccaggctyatgctttcagcaaatacctgttgagtcctgcctgactcctatgttgagtcatagggtactgagtaaaaattatttatgcagtatcttgaaatacctagctgaatgggtttttttagtcattgttttttgttttgtattcccagtctggtcaatcagaatgactcacagg

SEQ ID NO: 807185 - DNA, 679 bp, Homo sapiens
agtaccctggatcctacataaaaagagaaagctagatcctaaaggtaattttatcctgcggtaagtcccacccattttgaggttgtcacattcctccaaggctgccagacatagcactgtatatattttggttttcatgtaagaagctgaaggtaaattcacaggtttgctcctcaccattcaacaaaccattaattagtaagcttctaccatgtgccaagtaccgtatgcctggaaatcaggcaatgcagtaagctccagggaacaacagacaggaaagaattatgtacrgactgctgctgataaactgagtgagtgtacttatgattttctaatccttccaaatatattccctctggaatcagctgcagattgtgttcgttttctgtttatcaagaaatcattcttctcaattgcaacataataatgttatcactatgactaaatcagtgtatttgatttcgacctagtttcactgtcacaaatgatacctgactagataaaaccatggattatcaacaagaaagtgcaaaagcagagcctactgagaaacatttttggacgtatctttagattaaaacactagaaaatatcaccttgttttgaactgtggtttgttgtgattttaagtgacacaatcaaagatctatttcctcttcaacatgaacaaacttaactc

SEQ ID NO: 807186 - DNA, 670 bp, Homo sapiens
ctttgcttgcccttctgggctacagtaacaaactctgccaagaatgacatccaaaggttaaaatattatataaaatgggttagtttctgatattaaatttgtaaaaccaaaattaaggacttctcattaatttttgttcacattacatactcctctaagttttaaattcctggaaatacttagccaatatattttctaacacaagaaaaatatatgcaaaagcacatttcatttctaataataaaaagctcaaggttctcaattgcatggcagtggacgtttttctgctagttaacataatcgcagggcctaaaatgaataaagaaaaagagtgataaatttgaacacattaaagaaagaatgaaaaatgaaaggaaatttacaaatgatgaaaaatctatttgtattacatgacaaatataaagagctctcacaaacaaacaatagctcamaaaaagggcaaaacatatgactagttaacaaaaaaatacaaataaacaacacataaaaatatggcaaacttcactcatatttaaaaaaataaaaatcaaagagtctgtttctcaactacacatatggcaaagatttaaaaagttcaataatactatcagcaagaagtaggagaaaagtcattccaatgcaatataaaagtctaaattggttaatactg

SEQ ID NO: 807187 - DNA, 559 bp, Homo sapiens
acaaatatagctactgctttcagctcttaaaaaaaaaaaaacctatgaaataaaatgcaatccataccacaatactgcctgttaaatctgcatatcttaccccttctatcaattttaagaaatgtgagatcatagtcacagctaataactgatgttctaaaaatacagttctgttctttgaactctctggatcttaacttattaggttaaaaaatgataaaatacccagcaaatgtagactttgtatcccgtagatgttctttttttggagggtcatctctcaagacttcatcttgtgatttttctcttgggtcttctggaacatgttggtrttcatcagtactggtttccgatggcttttgatttgaatgtttcttgtctcctctcccatcagagcgactccatgatgttaatctttcttcactgttcttggtgggttttctaaaaccactacacaaagagccctgagctaccaatgctgaagatgaactaagtggttcaaattttctgcccttgctgtgaaatgacagttcttcatcatcagagggtctcaagaatt

SEQ ID NO: 807188 - DNA, 586 bp, Homo sapiens
tgtggttttgatttgcatttccctgataattagtgatgttgaacattttttcacatgcttgttgtccacttgtatattgtcttttaagaattgtctattcatgtccttagcccattttttgatatgattgtttgtttttttctcactgattgaaattcttaactttatctttgaacttgtgttaaatgaagtctgatgtaacaatggagtatgggcttaagcaaggagatgcacgcaatatgyttgtccacagttccttgaggcccatttgggtaatgtgtccacaatgtcccatgaacacagaaagtgtgagagttcaccgagactcagagtacacagtaagcactttatgtctaccactgagtgagtgagggtacactgacagcctagagggtcctccagaacttgcttcaaatgtagaaagaagacaatggtgttctaagaaacacaagcaatcaagtgttaaattaaatttagcctaaagttagttgcctccttataagttcagcctaaaggttcttcatacatagtgaactgtaatctaactggatgtctaaacagactgctacctactattttaccaatc

SEQ ID NO: 807189 - DNA, 681 bp, Homo sapiens
catttgtttgcaggaactatgaagtgaaatccaccaacattcaaaaatgggctcacaaaccacttcgataaaattaagttttactttacatatgaaaaggttatagaagaaataaaatattttagcttaaaaaatattttaaattgtatctttgtttacttgttacagtctgtctagtaaattatattcaacaaatatttttgaatgaatgaatgaattcatcataaataatgtatttwtacaaatagggtggtgtatattttatatttgtacagaagacttcctaaattctatttgtttattttctgggctttcctccttaagcaaagtaaaccatcagattcacaaagaaccaaaatgagacagctagagtaataagaacaacagtcatgggtatatctattcctgaggccctagattgctccccatgaggaaaagttcacttaatatagcatctaccacagtctctagcacagaatagttagctgttggcgataatgatcatggcaatggtagtgctgatggtcaaaggagtaaaagccatagtagctactattcatattactaactgtgtatcaactcctgatgacaattaaaatgcaagtattacatgtcaacttcaatttaagacagaaagcaccgaaattgtctccatagtcaattaaaagttactaataggga

SEQ ID NO: 807190 - DNA, 681 bp, Homo sapiens
catttgtttgcaggaactatgaagtgaaatccaccaacattcaaaaatgggctcacaaaccacttcgataaaattaagttttactttacatatgaaaaggttatagaagaaataaaatattttagcttaaaaaatattttaaattgtatctttgtttacttgttacagtctgtctagtaaattatattcaacaaatatttttgaatgaatgaatgaattcatcataaataatgtatttttacaaatagggtggtgtatattttatatttgtacagaagacttcctaaattctatttgtttattttctgggctttcctccttaagcaaagtaaaccatcagattcacaaagaaccaaaatgagacagctagagtaataagaacaacagtcatgggtatatctattcctgaggccctagattgctccccatgaggaaaagttcacttaatatagcatctaccacagtmtctagcacagaatagttagctgttggcgataatgatcatggcaatggtagtgctgatggtcaaaggagtaaaagccatagtagctactattcatattactaactgtgtatcaactcctgatgacaattaaaatgcaagtattacatgtcaacttcaatttaagacagaaagcaccgaaattgtctccatagtcaattaaaagttactaataggga

SEQ ID NO: 807191 - DNA, 659 bp, Homo sapiens
tgagatggagtcttgctctgtctcccagactgggttgcgtggcacgatcttggctcactgcaacctctgcctcttgggttcaagtgattctcctgcctcagcctcctgagtacctgggattacaggcacctgccaccatgcccagctaatgtttgtatttttagtagagatgggttttcaccatgttggtcaggctggtctcaaactcctgacctcaggtgatccacttgccttggcctcccaaaktgccaggattacaggtgtaaggcactgtgcctggccggttttgtgagttatgacggtagtacaatgacatgtatccatctttactgtgtcatatgcaatacggtcagccctctgtatccgcaggttcttcatccaccaattcaaccaagcacagattggaaataagaacttgtgttctctaagtcccctgcgctccacctattcattccttcctcccccgagcccctggcaaccacacgtcatcttactgtctccatagttttgcctttcctggagttacagagttgcaatcacacagtgtgcagtcttttcagattgtcttctttcacctggtaagatacatttacagttctactgcatctttcacggcttgacagctcattgctatttttttttttttttgagacgaagtt

SEQ ID NO: 807192 - DNA, 659 bp, Homo sapiens
tgagatggagtcttgctctgtctcccagactgggttgcgtggcacgatcttggctcactgcaacctctgcctcttgggttcaagtgattctcctgcctcagcctcctgagtacctgggattacaggcacctgccaccatgcccagctaatgtttgtatttttagtagagatgggttttcaccatgttggtcaggctggtctcaaactcctgacctcaggtgatccacttgccttggcctcccaaattgccaggattacaggtgtaaggcactgtgcctggccggttttgtgagttatgacrgtagtacaatgacatgtatccatctttactgtgtcatatgcaatacggtcagccctctgtatccgcaggttcttcatccaccaattcaaccaagcacagattggaaataagaacttgtgttctctaagtcccctgcgctccacctattcattccttcctcccccgagcccctggcaaccacacgtcatcttactgtctccatagttttgcctttcctggagttacagagttgcaatcacacagtgtgcagtcttttcagattgtcttctttcacctggtaagatacatttacagttctactgcatctttcacggcttgacagctcattgctatttttttttttttttgagacgaagtt

SEQ ID NO: 807193 - DNA, 547 bp, Homo sapiens
ttttgattttattttttttgagatggagtcttgctctgtctcccagactgggttgcgtggcacgatcttggctcactgcaacctctgcctcttgggttcaagtgattctcctgcctcagcctcctgagtacctgggattacaggcacctgccaccatgcccagctaatgtttgtatttttagtagagatgggttttcaccatgttggtcaggctggtctcaaactcctgacctcaggtgatccacttgccttggcctcccaaattgccaggattacaggtgtaaggcactgtgcctggccggttttgtgagttatgacggtagtacaatgacakgtatccatctttactgtgtcatatgcaatacggtcagccctctgtatccgcaggttcttcatccaccaattcaaccaagcacagattggaaataagaacttgtgttctctaagtcccctgcgctccacctattcattccttcctcccccgagcccctggcaaccacacgtcatcttactgtctccatagttttgcctttcctggagttacaga

SEQ ID NO: 807194 - DNA, 634 bp, Homo sapiens
ggtagtacaatgacatgtatccatctttactgtgtcatatgcaatacggtcagccctctgtatccgcaggttcttcatccaccaattcaaccaagcacagattggaaatragaacttgtgttctctaagtcccctgcgctccacctattcattccttcctcccccgagcccctggcaaccacacgtcatcttactgtctccatagttttgcctttcctggagttacagagttgcaatcacacagtgtgcagtcttttcagattgtcttctttcacctggtaagatacatttacagttctactgcatctttcacggcttgacagctcattgctatttttttttttttttgagacgaagtttcactctggttgcccaggctgtagtacaatggcacaattttggctcactgcaacctccacctcacgggttcaagtgattctcctgcctcagcctcctgagtagctgggattacaggcatgtgccatcacactcagctaattttgttttttcagtagagatggggtttctccatgttggtcgggctggtctcgaacccccgacctcaggtgatccgcctgcctcggcctcccaaagcgctgggattacaggtgtgagccattgagccaacagttca

SEQ ID NO: 807195 - DNA, 675 bp, Homo sapiens
gtgagttatgacggtagtacaatgacatgtatccatctttactgtgtcatatgcaatacggtcagccctctgtatccgcaggttcttcatccaccaattcaaccaagcacagattggaaataagaacttgtgttctctaagtcccctgcgctccacctattcattccttcctcccccgagcccctggcaaccacacgtcatctkactgtctccatagttttgcctttcctggagttacagagttgcaatcacacagtgtgcagtcttttcagattgtcttctttcacctggtaagatacatttacagttctactgcatctttcacggcttgacagctcattgctatttttttttttttttgagacgaagtttcactctggttgcccaggctgtagtacaatggcacaattttggctcactgcaacctccacctcacgggttcaagtgattctcctgcctcagcctcctgagtagctgggattacaggcatgtgccatcacactcagctaattttgttttttcagtagagatggggtttctccatgttggtcgggctggtctcgaacccccgacctcaggtgatccgcctgcctcggcctcccaaagcgctgggattacaggtgtgagccattgagccaacagttcatttgtctcttcacctactgaaagacatct

SEQ ID NO: 807196 - DNA, 611 bp, Homo sapiens
tttgtttgcacaatgaacataagttatgttataagcataaaaaaatgtttttggtggatgaaattaaatagacttcgtattattttgttctgaagatgtctttaatttttaggttttttaaataagcaaatgaaatcacacaacacttggaatataggaaaaagggaaagacagcaagccaaaaaaaamagttcaccctgtccaccaactgatttttgctaattttattatttttcccttgaattttcatataaacataatttaatatataaacaatgtaatatccttctccctgcccacttaacattagattacaaacacctcccaaataagggaactgttctcttatcagtacatatttaaaacacatttttgagcataaatttcattagctgaaataaaataaaataaatatatcttttggataggaaaatagataatgcggtgagaaaaataaatgaccacttacagaataaagcccgtggacatggaggcttatacagaagagcgtaggttttaatttctaacttcaaaaatatttgcaaagccttgaacaattatatgtgctacaaaaatcaacactattgatacaaattattaatctgaaataa

SEQ ID NO: 807197 - DNA, 609 bp, Homo sapiens
cactttaggctcaagatgagagaaggaaatggcttgagaccccactatgaggtggcacactatgtttaacagctccagaccctctcatcataacccattttatgcattcctcccagttaatagatgtgagcactggggcagataatccaagattcatttatatatggctttgaaaatcattaaatgcatttttcggcaaattgaccttcttaatttagttttccttagactcttaattttcaagtaattttcttcttaatgaakgatatctctagctgtctctaggatccaggaaacaattctcaagatgtcattcttttaaatttactttaaactagcgattcatatagcatatgaataatattgatttacctactgcttatggaacatctacaatataccaggtgctaggatagcttcggtgatgcagcaggtaaagattccccaggttggtgatggaagcagaaacgtttcatgtaattatgtaagccagatattactgacaccttctgccccttggagatgtcatcaaattttgactaaaccaggattccatgtcctgggacagtcaaaaactctcctcacaatttcttctagtttctctaagtt

SEQ ID NO: 807198 - DNA, 512 bp, Homo sapiens
ccagcagaagattctcaaagtaagaaacggctttagctcaagaaacaattccaaggtgctgccaataaagcatggcctaaggataaatatttgattaagtctcagaaaaatttgaggccatgcctgatacactcttttgactgggaaaaatagcttgtaagattctcaatgatattgccccacagacctcagattctaatcccaaggtagaagggggcctatttcaaaaatktatgggtgtgccttctgtctcataaagtacattaagatcttaatatacaggaagctgacaaagttttcaaaagaattatataagcttagactgggagggacagaggccatcaaagaaaagggacatttgggtctccaactccctagagacagaaagaagatgaggaagctactcaactgtaaacattggtcattttttatggaaaagtgaaaatgagtcagaggatggagccagaagcccagagaacagcgaaaagaactgaagagaactattcccggag

SEQ ID NO: 807199 - DNA, 544 bp, Homo sapiens
aaacctaacttaaataaaacagctctattcttagcaaattaattaggtaatatagacattaattgaacccacaaatattctgtactatattatgtgttaaactctaacaggcactgggaatacaatcgcaaataagcatccttgtcttcaagatacttttactcttttgggggaatgaaaagtaactagagaatcacattcttctataaaagagatatatccttcagcatactttaacaatgtgaaaatctctattagtcaactattttaatatcataaagcttagtagttaaaatataaagaaatcaaatttagatatcactgtatacatgcagagtaytacatttggtggttattttcataataagaaacaacattatgttcatgcataactggatcattgaagatagaactaaatgaaattagctcttcaattcacttttcacacatttaaaaatgatcttctgcaacagaaatgaaaatatatttcttgggagttttattcctttttctatttaccaagcttctgatctacataggttac

SEQ ID NO: 807200 - DNA, 453 bp, Homo sapiens
ttcaaggctttggtaaatatattagttattagtgctaatgtaatgaattacaactcagtggtttaaaacaacacaaacttattatctacatttcctgaagtcagaagtcaaaaatgagtcttacaggtataaaatcaaggtgccagcagggctgtgttccttttggaggttctgggagagaatctgttttcttgtcttttccagcttctagaggctgcctgcatttctttgcttgtggctttttcctccaccttgacagtgcattgctccaacctctgcttctgtcrtcacatcttcttttctaactctgactctctcctacctccctcttataaaggcccttgtgattacattgggcttacctggataacccaagctaatgataatcttcccatgttaagctccttagcttaatcacgtatatgaaatcccttttgccatgtaagggaatag

SEQ ID NO: 807201 - DNA, 648 bp, Homo sapiens
acagggtcttcctctgtcactcaggctggagtgcagtggtgcaatcgtggctcatagcagtcttgacctcctgggttcaagcaatcctaccacctcagcatcccctgtaactaggactgcagatatgcactaccatgcccagctaattttttttttattttttkgtggagataaggtcttgccatgttgcccaggcaggtctccaactcctggccccaagtgatccttcagcctcagcttcccaaagtgctgggattatatgcatgagccaccatgcctggccttgctcatctctgaattctcaaagtctagcacagtgtctggcttacagtatatatgcaataaatgtttattcattaattcatttgttcaccaaatatgtgatcaaacaagatgcagagatgtgttcctactatatactaatcatggtgcactgggaacatgacggtaaaaaaaaaaatgacttggtacaagagataaggagattgaaagaacaaatgaaaaataaaaataaaatacgaaaaatgaaaaataaaaataaaaatgataaaataaaaatttctcatatccatcatcaagagtctcagagaagagagaggatgtctgtatggtagaagaaacagtcaaataagagaacaaagaaaactg

SEQ ID NO: 807202 - DNA, 648 bp, Homo sapiens
acagggtcttcctctgtcactcaggctggagtgcagtggtgcaatcgtggctcatagcagtcttgacctcctgggttcaagcaatcctaccacctcagcatcccctgtaactaggactgcagatatgcactaccatgcccagctaattttttttttattttttggtggagataaggtcttgccatgttgcccaggcaggtctccaactcctggccccaagtgatccttcagcctcagcttcccaaagtgctgggattatatgcatgagccaccatgcctggccttgctcatctctgaattctcaaagtctagcacagtgtctggcttacagtatatatgcaataaatgtttattcattaattcatttgttcaccaaatatgtgatcaaacaagatgcagagatgtgttcctactatatactaatcatggtgcactgggaacatgacggtaaaaaaaaaaatgacwtggtacaagagataaggagattgaaagaacaaatgaaaaataaaaataaaatacgaaaaatgaaaaataaaaataaaaatgataaaataaaaatttctcatatccatcatcaagagtctcagagaagagagaggatgtctgtatggtagaagaaacagtcaaataagagaacaaagaaaactg

SEQ ID NO: 807203 - DNA, 408 bp, Homo sapiens
gcttttatgagcttctccttggttttatgctgtttcatcacaaagtgtgaaggtgtacttttttcctaatttatcctgcacggtatttgcgttggtttggttccctctgtgtagattcatatttttcatctatttttagctattatttctgcaaatattcactctyttaaatttcctctattctgactttgtagcagttcctttgccttatattgaatcttattctttccttcatatttctaaaactttcttctatatttttgtcttctctatgtactatattctaagtgatttattttggcttatcttccagttcacatctttcttcagctatgtctgatctgctatttaatattgattttttaaaacaattttattttttatacctaaaatttctatttttttcaa

SEQ ID NO: 807204 - DNA, 590 bp, Homo sapiens
ctctggtaagcacatccccaagccagccaagtagccttgtgccccatcccaggcctgagaaacaatcttgtgggctgcctctgacaaacacattcccaaaccaaccaagcaaccacatgcccatgctcctggccagagtaacagccctatggccccaaccccagtgagccagatatgaagtcagccaaaccaccatgtgcgtaaaaatgaccctgacctgagaaatagcctggcaagcccattcctggagagccacaccacaaattctgtcagtctaagctgatgataaacttacaaatgttaccagtgtggattacagctaaagaaactacatggagagttacactactgcatstagaaccaaggccaatatactccatcaaaccaacacagcaatgctcatttatgcaaatagctcttttgatatgaagcctattcaattaaagagaaaagtcatcttttccagtacatgcatagaagtcaacacagggacacatcaaccatgaataagcaagaaaacatgtcaccttcaaaaggaaacaattctccagaaacagatcccaatcataaatatatgaaacgccagaaaa

SEQ ID NO: 807205 - DNA, 603 bp, Homo sapiens
gtggcctaaattagttgtacctgaggatcccactaaatttaaacaaggtaccccctataatcttaagtgagttactgaacataaaagagaacaaagagttatgtgtcaccttaattaccagaactatcaccttgcctaaatttccttgatcatagcatccattgctttaaaatatcccatagtaggcatgaatgctttaagccaatagctaataaactaaaattaaatttttatcccttataaactggatttacaaaataggaccctatggacgatccctctctacttaaatagttaatactgcctaatgtaaattaaaacagaaacttcaaaaattaaaatcattatataagacctatttgaagaagagtgattaccccccactgtgtctctatttaacagccctatttggcctgttcttaaagttggaaaaaatgartggtgcctcacagggcttacccacagtcttaaaactgtgatctccctcatttaggcactcatatgcaatattattgaaattactggctccaactactcagcaaattgtactaagaggtgacagcatgctggcagccctcactcactctcggagcctcctcagcc

SEQ ID NO: 807206 - DNA, 628 bp, Homo sapiens
cacaggctgtagtgagcctagattgcaccactgcactccaacctgggcgacaaagcgagactccatctcaaaaaaaaaaaaaaggctatatgcaaatgaagtaaataacaaataacattgtagaggggtgtatcattaactgagaaaatgagtgaaatcgctggtaaatacaaagacagttcatagaagagagtgaagaagacaatgagggaaattttacaggagcgagaaagaagcctgggggtcargagtgactgggttttgagaacttacgaagaagttcttttggcagaaacacgatcaatgaactataagcactattcagcaaaataactgaacggggaggactgttcaattatagagaactttgaatttaggctgaggaatttaagtgtgttatgtgggcagtggatgttgaagtggcagtagtgggaaagaacagaggtcttttgtccactcagaaggcagccttcgcatggtacaaagataactcttgagttttctttgaggtcttgaccttcagttatgaaagaattcacctttaagtatcagaaaacaaccaacagtggctttaaacacataggcaagtgttgttacttgtttacttttgtttacttttcatgtaaca

SEQ ID NO: 807207 - DNA, 596 bp, Homo sapiens
ttccttctatattcatgtttttgagggtttttatcatgaagaggtatgaattttatcaaatactttttcagcattaattgaagtgataatatggtttttatacttcattgtgttgataggatgtatcatattgattgatttgtgtatgttgaaccatccttgcatccctggaataaatcccacttggtcatgatgaatgatctttttaatgtattgttgtgttaattttgctagtattgtgttcagaatttttctgcaatattcatcacagacatcggccagtagttttcttttttttttggatatatcttkgtctgttgtatgtatcatggtaataatgatcttgtataatgagtttagaagtattccctcctcttctatatttgggaatagttggagtaggatgataattagttcttcttgaaatcttgggtagaatctcagcagtgaagccatgtgggtcctgggctttcatggctaggagacttttactacagcttcattactttttattgttctgtttaggttttgaatttcttcatggtttaatcttggtagattgtatgtgttcaggaattaatgaatttcctctgcat

SEQ ID NO: 807208 - DNA, 623 bp, Homo sapiens
aacaggaacacttttccagttctttttttttttttttttttggaaaaaaattctcactctgtcactcaggctggagtccagtggcatgatcttggctcactgtaacctccatctcctgggttcaggtgattctactgcctcggcttcctgagtagcrgggattacaggtgtgtgccaccatgccaggctaatttttgtatttctattagagatggggtttcaccatgttggccaggctggtctcgaactcctaacctcaggtgatctgcctgccttgaccccccagaatgctgggattataggcataagccaccgtgcctggccttcccagttcttataattacttttctaagggcttgggacccaattataataccatcagaaaagtatgcatgtacaagtttcacaagaagtttatcaaatcaggtattacccatatctttttagaatataatttggatcttttcaagaaaccatggtaaacgatcatgttttattatgttttatgttctcttttcccagtaattgtattaatgccagtcgagtgctatactttctgtttctaagttacaaacgtgtagctttgtcaggcagaaaacctgggatctgctaagatggccaaa

SEQ ID NO: 807209 - DNA, 623 bp, Homo sapiens
aacaggaacacttttccagttctttttttttttttttttttggaaaaaaattctcactctgtcactcaggctggagtccagtggcatgatcttggctcactgtaacctccatctcctgggttcaggtgattctactgcctcggcttcctgagtagcggggattacaggtgtgtgccaccatgccaggctaatttttgtatttctattagagatggggtttcaccatgttggccaggctggtctcgaactcctaacctcaggtgatcygcctgccttgaccccccagaatgctgggattataggcataagccaccgtgcctggccttcccagttcttataattacttttctaagggcttgggacccaattataataccatcagaaaagtatgcatgtacaagtttcacaagaagtttatcaaatcaggtattacccatatctttttagaatataatttggatcttttcaagaaaccatggtaaacgatcatgttttattatgttttatgttctcttttcccagtaattgtattaatgccagtcgagtgctatactttctgtttctaagttacaaacgtgtagctttgtcaggcagaaaacctgggatctgctaagatggccaaa

SEQ ID NO: 807210 - DNA, 623 bp, Homo sapiens
aacaggaacacttttccagttctttttttttttttttttttggaaaaaaattctcactctgtcactcaggctggagtccagtggcatgatcttggctcactgtaacctccatctcctgggttcaggtgattctactgcctcggcttcctgagtagcggggattacaggtgtgtgccaccatgccaggctaatttttgtatttctattagagatggggtttcaccatgttggccaggctggtctcgaactcctaacctcaggtgatctgcctgccttgaccccccagaatgctgggattayaggcataagccaccgtgcctggccttcccagttcttataattacttttctaagggcttgggacccaattataataccatcagaaaagtatgcatgtacaagtttcacaagaagtttatcaaatcaggtattacccatatctttttagaatataatttggatcttttcaagaaaccatggtaaacgatcatgttttattatgttttatgttctcttttcccagtaattgtattaatgccagtcgagtgctatactttctgtttctaagttacaaacgtgtagctttgtcaggcagaaaacctgggatctgctaagatggccaaa

SEQ ID NO: 807211 - DNA, 520 bp, Homo sapiens
cttataattacttttctaagggcttgggacccaattataataccatcagaaaagtatgcatgtacaagtttcacaagaagtttatcaaatcaggtattacccatatctttttagaatataatttggatcttttcaagaaaccatggtaaacgatcatgttttattatgttttatgttctcttttcccagtaattgtattaatgccagtcgagtgctatactttctgtttctaagttacaaacgtgtagctttgtcaggcagaaaacctgggatctgctaagatggccaaactaatttatattggtcagactttgctatrgtaaaacaaacaaaaaaagctcaatagcttaaacaatagcatttttttcttgctcttgggtgtgtggagcggttttaatgcagcttatcctggttatcttgtgtttgggtacatatatattcttattctaggatccaggatgaagggaatgtctctgtctaggacatgcaattttcatggcaaagggaagaactgcttgag

SEQ ID NO: 807212 - DNA, 612 bp, Homo sapiens
aaagaataatagattactcacattagtgtaaaactggtaatttaggccctttggcacatttttcagaaagtgccctttaaactttgttaattgcaaaataactagattgcccacctgccatcatgacagaggcttcttgttgcttttaattctggagaaggagggaaaagatgcagctggcccaccagtatttttggctgagattcaagctgacctgctctgctctgccctttgcagtttgttcatggagataaaacttcaccaaaatccaccctcaaagttaacagatttcatttgcagcaaggtacctgtggtatggtarcacccacatcaggacaggaatcagagatttgtgttcaaactaagatcctgacacctactatctgtatttgaacttcagttttatcagccaagggaagagaacattaacctttatcacagagttgttgtaaggagcagtgagctaacatatataaactgactttcccaaaatcaaattgttgtggagttgtatttattgcagttatagacatgtagtgaaccctatgcaactgaatgcccacagtgctccttattaatttgatatctactcctcctgatgagattccagtt

SEQ ID NO: 807213 - DNA, 585 bp, Homo sapiens
aactgcacacatgagggatctaggttgtgcactccttatgagcatctaatgcctgatttgaggtggaacagtttcatcctgaaaccatcccccacctctccatggaaaaattgtcttccacaaaactggtccctggtgccaaaaaggttggggacttttgtgttagaatttgtccactagaatgcttcaaagatgggaaaacccaaaatagcaaacaggaggctgcaggccacatccagccgggagttaagttttgtgtggctttcacagtgtttatcaacacagcatttaggattttaaaaacttggttgctaaaatttaaaacccgagagtatcgatataaaaattctgattcctggtttctctggaaacattgaacaatctggtaataccagaccgatcctytcaacaggagttatgaaatggctgctccctttatgcagtatttgaactctctgtactctccgtattgttttattcccagctggcttcttaatttctaatacttgcatttgaatgtctgatccctaacataaaacaagaatcaggtaaattatttctgagggccctgtccctgggttgtca

SEQ ID NO: 807214 - DNA, 677 bp, Homo sapiens
agatattccatgcaaatggaaaccaaaagagagcagaggaagctaaagttttatcagatagggcagactttacatcaaaaactgtaaaaagagtcagagaaagtaattatataatgagaaaggggccaattccacaagaggatacagtatctgtaaatatatatatgtacccaacatcagaccacctaaataaacagagaaaatattaacagatctgaagacattaatagatagtaacacaataatactagaagacttcaaaaatcctactttcaataatggatgggtcatccagacagaaaatcagtaaggaaatattggacttcaactatacactggatctaatggayctaacatacaggttgaatattccttatctgaaatgcttgggactagaagtgttttgaattttacattttttagatttgggaatacctgccttatgtttaccagctgagcatccctaatccaaaaatgcaaaaccaaaaatgttccaaagagcatttcctttcagcatcatgttggtactcaaaaagttttaaattttggaacattttggattttggatttttggattggggatactcaacctttatacagaacattccatcaaacagcagataatacacattcttcttaagcacacaagaaaaattatccagcgtagatcatgcagc

SEQ ID NO: 807215 - DNA, 606 bp, Homo sapiens
ggagaaataagttcaagaaacactacctactgtatttcaggtgtatagactattagagagtatggagtattgaacaaatgtttaactcagtgtttcctaaattataatcctttttatgggtctcaatgagtcccataaactagcacttcagagaacacactttggaaaatgctgtgtaactattcccaaaagttacgacgtaaagaamcactgctgtccaaaagattcacaaaatgctgactattgttcgtaaagttatcatgaacaaaactgaaaatactatcctccccttacataaaacgtggaactcatggaatattctatagcagtctataaatattttagaaccctaagaaaaatacaaagagactaaagaaggtctgaggcatgctgattaaatttaacaggaagaaaagagactagtgcattaaaaccttaagtattagacaaaagggcatctctggtcagagttggaaacaagtaacttctggacaaatggaaatagaatttaattatgtgggctgtatatgtagggagttaatctaaaaagtaatatgagcagaaaacatagattccaaagaaagtgattaagatacaagattccta

SEQ ID NO: 807216 - DNA, 578 bp, Homo sapiens
tccccccaccatatataataatactcttgtatttccattatatcattttacttttgtaagcactttcatagtaatttgtctcatttgatacagtgatcctgtcaattaaacaaggcgagtattactgcctctcatttttacatagggagaaaaaagactcagaaaagaatgagtggcctaagatcacaagaaagaataagctgcagaaccaggcatcctagaccagtgttcttttcaacaccccatacttaagacgtggtattgtagtattgtagggtttsagttgccaagtcaaaacagacctaggttccagtgttggctaggcccactcactagctatgtgtcctcatccttccccatacacctcagtttcctcatctgtaaaatatacataacggtaccttcctcaaagttgtaaggattgaataatacatgtaaagcatctggcacaatatgtggtacatagttaactaccattattattttataaatgtctatgtttatagcaattaaaaaaaactacctaagaatcaagcctgacctttttttaaaaagccaatgtttttcctttaatatcg

SEQ ID NO: 807217 - DNA, 567 bp, Homo sapiens
tacatacttgttactgatgaagcagcagatgtcactgaactattgtgggttacggtcattgtggatgttgatatctgagatgtgttctgtgaaacacttgttgttttgggtgtagactttaaggtggtagaagtcatatttgttgagaccatccctggtgttgttgtattagatgccgctgtaggtttcatggtggtgaccgttgtattactggagtctgaggcaactgaagttggtggtttcayagtactgttggaagtttcatttgtatggtcagaaggcacatgttggagagtctctgcaataatatcaagaaacattaaaaccagagctatgatttagggaataagatcccatttcactgagactttcatggtcacagacaaagcaagagatcttacaaatacagcagcatttaacatacttagcccattaatactttgcactatactgcaataaaatgtctcaaactagtaaaagactcaacagaaaccaagtctaaatttatataaagttagaaattttggggaagatatgaagaaaaaaaaaaacaacccagaagacaga

SEQ ID NO: 807218 - DNA, 610 bp, Homo sapiens
ttacttatgtaggattgaattgctaggttgtcatatctcagagcactcaaaagctcgccccaaaatgcctagagtcagttttgtgcattcccctcccaaaaaaacatctatgtaaatttctaggagcagctagttattgccaccaatatattcctaattttgttgcctttgctaagctcctttataccctcctcccagatattaattctgagcccattttcttggcctgcaratccataaatctcctccggagccttaaaattaacatccacatcccctgctctcagctaacctgattttgacagaccttttcgcccatctcaccatgacacaatgggattgctgcagatatttggaacaatttttttgcctctctgatacaccctgtagcatatttctcatgtcaattggacccccatgccgatgtgcagtagccacagctaccaccctaataattgacgaagccagcatattctgatattacactccttcattcatccatatgttccccatgctgcctgttctcttacaagttcataagatacagcacctttctccagatggcaggccacctatgcacaggccctgtttaccagctcctccatcatgt

SEQ ID NO: 807219 - DNA, 610 bp, Homo sapiens
ttacttatgtaggattgaattgctaggttgtcatatctcagagcactcaaaagctcgccccaaaatgcctagagtcagttttgtgcattcccctcccaaaaaaacatctatgtaaatttctaggagcagctagttattgccaccaatatattcctaattttgttgcctttgctaagctcctttataccctcctcccagatattaattctgagcccattttcttggcctgcagatccataaatctcctccggagccttaaaattaacatccacatcccctgctctcagctaacctgattttgacagaccttttcgcccatctcaccatgacacaatgggattgctgcagatattyggaacaatttttttgcctctctgatacaccctgtagcatatttctcatgtcaattggacccccatgccgatgtgcagtagccacagctaccaccctaataattgacgaagccagcatattctgatattacactccttcattcatccatatgttccccatgctgcctgttctcttacaagttcataagatacagcacctttctccagatggcaggccacctatgcacaggccctgtttaccagctcctccatcatgt

SEQ ID NO: 807220 - DNA, 574 bp, Homo sapiens
agggagacaaaatggccaaggggggtggggtagagcaggctctgtaagccaggtatcttggactcgcttccctgtgcctgcttctgcctgttcctcacactacagccaagaagttgtattcttttactttagcagggtttcctgaaaagaacatggacttgggaattagtcctcaggattctagtcctgactgtattgctgaagaccctgcctccctcagacattartctctatgtctgcaaaatgaggaatggccctggacatcatcctcaggcccctccagtactgcatacactgattctctggccatatgttggagaacctgccacatgtgtgacagcctgcgctgtgaaggaggggacagaggaggccacaggggcagaactgcactccagagaccttgggtgggcccaggtgcagtgagtgatactgaaggccagtggtttccttcagggcaacccaggtgctctgcagtcacacgaatctctcctgggcactggtcctccatgggagccccaggccctggggcagggctatatggacaggaaacacaacggtgaggaagggctttcag

SEQ ID NO: 807221 - DNA, 642 bp, Homo sapiens
aaaaggaatgaagttctgctctgtgctacttcatggatgaaccttgaaaacactatgctaagtaaaataagccagacacaaaaggacaactctaaatgggtgaattgtatggtatgtaaattatattaaaaacttttttaaatattyctttgcatgttttaaatataagccttttactggacatgtattatgtaaatatttttcctagtctgtggcttgtcttttcattctcttggcagtgtctttcacagaccagcattttctagtttgaatgctggggagagagatggggaataagatgtcatggaatctctgacctggtcacaatcaagccctgtagagacaatgtttgctggaagaagttgcaggaactgttctcataagagacactgtgagaatgggacacgtgcagccccacctttatcccaagatgagaaggtgcaacacatggtgaaaaacagagactttttctgtgtagaactcagggtggccctgctggagtgagggctgccctggcactggagctcctgaacacactcagctttctcatgggaggccctagcaacactgacaatagtgatcccctgagtggctccgtggacagcagacatcaagaaggaaggggccagaatccccatgggg

SEQ ID NO: 807222 - DNA, 594 bp, Homo sapiens
gaggaggtcaaggtggagagaggaacagtgtccatccccagcacccagcctctcctgtccattctgcttctattcacccttccctcctggggctttctgcagctgaaatctcagagtggggctcaggaggaccacttcttccatgtgctgcctgcctgagcaagctcagggcagatcagctcttgcactgtcccctgcagtactgactgacttgttggtcccatttccttcctttatgtgcccttcctggagatactggtaagagccccttctctcctctctggtttgctgcaccaccattgggtgctcctcaatgtgggcccwgcctgaagtcctccctcagctacatttcttgctgtgtgcttcttcattcagggctcacatgtgcttcttcctggtagaccaagagtcccagcctggcagttgtaccatcaaaagcacttgaaagcatccccagaaactggcagttatgctggggaatcagagaacctatgtatttttaaattcccttagctggctctgattctattcaaatttggaaactgctaggctgcatcttttctttacctgaatgttaagctcattatgttccaa

SEQ ID NO: 807223 - DNA, 553 bp, Homo sapiens
aacagaaccaatgacaaaaaccacatgattatctcaatagatgcagaaaaggccttcgataaaattcaacacccttcatgctaaaaactctcaagaaactatcaatggaaagtatctcaaaataataagagctatttatgacaaacccacagccagtatcatactgaatgggcaaaagctggaagcattccctttgaaaactggcacaagacaaggatgccctctttcatcactcctattcaacatagtgttggaagttctggccagggcaatcaggcaagagaaagaaataaagggtattcaaataggawgagaggaagtcagattgtctctgtttgcaaataacatggtgtatatttagaaaaccccatcatctcagcccaaaatctccttaagctgataagcaacttcagcaaagtctcaggatacaaaatcaatgtgcaaaaatcacaagcattgctatataccaataataaacaaacaggcaaatcatgagtgagctcccattcataattgctacaaagagaataaaatacctagaaatacgacttac

SEQ ID NO: 807224 - DNA, 622 bp, Homo sapiens
gggggaggggtgtccaccatttctgatgcttgagtaggccgttttcccctcacagtgtaaacaaagccaccaggaagtttggactgtgcggagcccactgcagctcgttgtagccagactctctagatttctcccctttgggcagggcatctctgagaaaaagtcagcagccccagtcaggggcttatagataaaactcccatctccctgggacagagcacctgggggaaagggtggctgtgggtgcagcttcagcagatttaaatgttcctgcctgccggctctgaagagaacagcagacctcccagcacagcaatcgagctctgctaagggatagactgcctcctcaagtgggtccctgacccctgtgcctcctgaaggagagacaccttccagcaggggtcaacagacacctcatacaggagagccccagctggcatctgggaggtgcccctctgggaygaagcttccagacgaaggaacaggcagcaatcttcactgttctgcagcatctgctggtgatatccaggcaaacagggtctggagtggacctccagcaaactccagcagacctgcagaagagcgacctgactgttagaaggaaaacttacaaacaggaagc

SEQ ID NO: 807225 - DNA, 630 bp, Homo sapiens
aaacaactaaaaacatgaaaaacaaaaagaaaactatgggatagacgaagtatgtgtaatggattttgaggaggccaagaaaggggtggtcagttcagcctgaggggatgggggagggctccgtggagaagttgacccttggggtgggccttgaaggataaccagaattgtgatgagtggagaccaaggaaaggggagatgcaggagtttgaggcagacaggaccatacgtgccaaggcatggagaagaacatcrgtgtacttgggcatggagaacagatcagagtagttagaacactgaattttggagctgggctgtgacaggcttagatatctcagactgttgggcttgattctttaagccctagggagctgctaaatgcctcagatgaaatgccatgagctgatctgtgcagaaaggatcatttctgagaaggaacaggggaagtacatagagtcctgcatccttcagaaatgtaccatcagctcctaatgtctctaccactattggttttgggaatgagaataagagaacaggagtctccttcctgttgcaagaagcatgttgaagaccagaactgttatggagccctggcatagtgagcctctataggtttgcaaaagcttagct

SEQ ID NO: 807226 - DNA, 472 bp, Homo sapiens
acagaggaggcagggttattaactgttgcccatagcctccaacaaatgacatctaggtccatcctaaggtgtcccctgtccatttccctctcccccaccacgtccccctaattccaggaacccaagccacgtactacttccttaacaggcctgtctctacctctttgctccagttcgtccctctcagtgaaatgttctccctgaaccccattgctgwctgctgaaatcttatcagtgcttcttatgctgactcagcttctaccacttcccagaggcccttccagattccactagttggaatgcagtttcccttcccatttcccccaggacatgtcagctgtgtctcagtcataacaagccttgtctctcagggagaccatgaatcctttagaaggtagggctgagtctgggatctctttgggctctcagccttttttagctggagagtttccagaaaaccctctgtgaagca

SEQ ID NO: 807227 - DNA, 549 bp, Homo sapiens
gataaagttgaccctgtgattccccattttctctttatgtctggatccccattggaggagaactcacagaggaggcagggttattaactgttgcccatagcctccaacaaatgacatctaggtccatcctaaggtgtcccctgtccatttccctctcccccaccacgtccccctaattccaggaacccaagccacgtactacttccttaacaggcctgtctctacctctttgctccagttcgtccctctcagtgaaatgttctccctgaaccccattgctgtctgctgaaatcttatcagwgcttcttatgctgactcagcttctaccacttcccagaggcccttccagattccactagttggaatgcagtttcccttcccatttcccccaggacatgtcagctgtgtctcagtcataacaagccttgtctctcagggagaccatgaatcctttagaaggtagggctgagtctgggatctctttgggctctcagccttttttagctggagagtttccagaaaaccctctgtgaagcacaggaaacagac

SEQ ID NO: 807228 - DNA, 612 bp, Homo sapiens
aataaactgtattttatgtaaagcaagacatctatttgtttaaaccctggattccataggtaggtagcatgccatatccaccatatatttttccatccctcaagttccaaaattgattccctgaagtaaacaggaaaaacttgggagaagtaatcagtagctaaaattatttttgtttttgtcctgttccagttaatggctattaaaagcaagatttccatgactgcttctattccagatgcccatgttctcagctctaggagtagcaaaagaagttgcattctaatgactcagaggagtcattagccttgatgagtgttcagattgcagtaactcactgcaggatgtttagtgccttgggatccccgggcagcctataatttgctcaaaagctggaaatgtttctgcacstctgcagagcctggcctgcggcttcctgtgttttcccaccttcctgcctcccattgtgcctcagagcaggataataccactttaaacatgtcacattagctgtcaaaggggttttgactcattctcaaggagagaagattgaaacagacccagctgtggaatacagagagctccttggcacctaaatgactaccccaatca

SEQ ID NO: 807229 - DNA, 580 bp, Homo sapiens
actattagcgtaacattactaaacaataaagtctctacagtgttttgtttttttttttgtctgaacctaaatttgacatgttttactgccccttaaaaggtccatgagatgttacagaaattgtagaagtggtatataatatcttctctttagatagtaaacataaaccaccagctcacagggtcaacgaaatcaggatccatagtacttatacatcaggcaagattaatcaatctctgctcagcttcaagttactaaaacacagcttgaagattaagcgtaaggaacayaagacgctgcatgagaaaaggctggctcaaattagaatggatgtttagccttgtgaaatttccatggaccaggtgacaagtgtgataattattatacatatgacttatttcttaataattcagtggcatttattacatgaacagtgtttgccatcaccactctatttccaaaacattttggtcaccccaaaagaaaagcgcttacggattaagtatttaatcccatttccctctccttggccctggcagctccctatctactttccatatggactttatactttctgcta

SEQ ID NO: 807230 - DNA, 566 bp, Homo sapiens
agcaacttcgtggttctccaggacttggaattagggtgaaagattgaatgcaaaaggccctgagaatttttgtaagttgatggaaatattctacaccttaattggggggttacatggtgtgtatatttgtgaaattatacatttaaaatgggtacattttcttgaacataaattatattataaaaatgtttatttcaaagtataagagaaaaataaaaggggatatttttaagtaaattatatactcacttttacgtttggaactataattattacaaataaataattcttggcattatgaacaycagacgtctcaaatggagcccggtgtttttcctacaaaaaaagtaaatgctgcagctgagttagaagaattcaaagatgcacagttgctactcaaaagataagcatatattttcaaaacctgtaaacataaaaggaaataaagcaacaactgtttagaatatttctagaataatcatttatctagaagtgtttgcattattgaggcagtaagctaggtagactaatatcaaacgttagttatttttataaatgacaatcct

SEQ ID NO: 807231 - DNA, 500 bp, Homo sapiens
gtgtgctttgcccattaactcgtcatttacattaggtatctctcctaatgctatccctcccccctcccccccaccccacaacaggccccggtgtgtgataccatcattcttagcaaactatcgcaaggacaaaaaaccaaacaccgcatgttctcactcataggtgggaattgaacaggaaggggaacatcacatatttcatagttaagagttaatactgagctgagctgaattcacactactaacctggaagtgaaaggactcatttttctttacatcagactcctaaaatgtcaatttcttgaaacattcagaaaatgacttgagctaaatttgtattctctccaygatcacacacacacaatcacacacacactcatattcatatgtcacattagagttacacaaattcaaatacaaggagaaccaaaaatgtaaacaagaggtcaataagaatcattttttggagatcctggactgctagtgtcctgggttcccag

SEQ ID NO: 807232 - DNA, 631 bp, Homo sapiens
ccaagatcttggcagggtggccagggccttctcttcttttctgactgctgcttcccacaccagcctcaactcttgcctgtcccgccgcatgccttgatgataccaagcaaccctgtccaccctccatttcctggtgcccagcaccctttgctcttactgttccctctacctagaatgccattttcgccttcctctctggtcactgtgcctttatcctttaagactcagaccctcttgcaggaagcccacctggtcctctgtttctgcactgtgatcaaacctactttgtcatatttttaatctgttctagggtctgcttgctccactaggcccttattcctccctggggagccctctgctcaccaatgctggcacgttgcagggacttggtaaatattattaagctaaaaatgtctgagctgggaccagcctcaccagtggtagattgcaagctccccacggacacagccagtcttcaaacttgggstctctccatctctttactgaaatacaagcagtattattgaaatacatacaggggcagtctgtgcatgcaatgtgactgtgtgtaatcagcaaattcatggaaactacaaaaagcacaatttatcaggatatttccatgttttct

SEQ ID NO: 807233 - DNA, 541 bp, Homo sapiens
ctattagagtttatttcacctcgatgggcccgcaggaagctgctagcaggaagaggagctctgaaggacaggaggctgtccaagggatgaaagcaacgttgcaaatgcttggcttagcatatcagctgtaagctgaggagccaccatatgttgggctccttgctagattttccataatcctgcactgtagatattaccatcattttattgatagagaacctgaaggtagctggtggagagggacactccagaaggatgtgaggctgcatagctggattggarctctgacctctcccttttgccgctatcccaggatccttggtttccccgcttctgaaagtagagtatcctcctcagtcagatagaggggctatcctaagaggacactcttgacctctcctgtatttggcctccataagttatgtgtggggttgacatagtttgaatatttgtcccctccaaatctcatgttaaaatgcaacccccaatgttggaggtgggcctagtgggaggtgttcaggttatgggggcatatccctca

SEQ ID NO: 807234 - DNA, 693 bp, Homo sapiens
ctggatgcatgtatgtcttctttacctttgaagttcttctgtgtccctgttcatatactaaatcctctcgcacacacctgccaaagacgtgctacagttctcagtgcacagcatgtgctcaagtatggcaatgaccttctttaatattttaacatttgtcctttgaaggcttatcataagraatctttatatatgtgtgactatttgtaatgtcatatttgtgtctgtgatgaaaacaatggacttattcccgggtgcagcatttgattttccctatgttctggctagcagtgttctattaaacaatacactgcctcccgtctaaagctataaaagaggcatacacaataatcttaaaagcaggcagggctggttccatgtcatttgtgtagccaaaaagttcccctcagctgccacaaattcagtagaaccatcaaaggtaagttctgatcattgaatagtatgtccaacccaatccagtaatttacagccttctagggtaacacaatccctctttatcagattcctcattattcccagtgtcacctgcacccttctgcactatgcagagaaggtagtgtgattcgagtggagtgtccatgtgatgtgtttcattgtattcttttcttctcttctgttctgtttctttcccttctctttcctttcccacctcattctgtttttcactttttt

SEQ ID NO: 807235 - DNA, 587 bp, Homo sapiens
tctttatcagattcctcattattcccagtgtcacctgcacccttctgcactatgcagagaaggtagtgtgattcgagtggagtgtccatgtgatgtgtttcattgtattcttttcttctcttctgttctgtttctttcccttctctttcctttcccacctcattctgtttttcacttttttcttcttcatttctttctttctccctccctcctttccttccttcctaccttcttttctctccctccttctctccctttcttcctttcttccttctctttttcccacctgcctgccataacgatcatgtcttgcctgaaaggacaatgattaatagcatttccttacatttgtatagtttttttaagtactgtcctctatccatttcaacgatttcctttgtcgtctcacttgatccttcawaccagcccccatgaaatgaagcagagcagccatttctaaaattattgaaaaggaggtcacgcaatgagttagtaacaaagccaggacaatgagccatgccactcatttgtttattcattcattcatttattcatattgagttctgcactgtaaaattcattacagg

SEQ ID NO: 807236 - DNA, 545 bp, Homo sapiens
catgggctcaggcatcaaattgcctgggtgtgaaattgactgtattatgtgctagctctgtgatcttgggcaggtcacttgccgtctttgtgctttagtttcttcatctgtaaagctgtgatgataacagtagtacacacctcttagggatattttgaagattaagtgggttgttagacataaarcacttagcacgttgtctggcattgtataagtactctgtaagtggtagatattgttattattattttcccctaaaagcagcagatatcttcttcagttaattatacctattgaattggtttttttagtttctacaagctttccaatattttctatccagaccatgcataggtaatgaacttgatgtcttaataaagcttgatattttgcagcaattattttaagctctctcatctattgtctgatttcattagttaatgattgtcatgacaaagtaataaaagaggtccttttaaaatacttctgatactgcagatgtcaaacatcaattactgccaaactttattccaagactagtagta

SEQ ID NO: 807237 - DNA, 628 bp, Homo sapiens
ttcatttcttctagattttctaatttatgtgcatagaggtgtttatagtattctctgatggttgtttgtgtttctgtggggtcagtggtaatatcccccttatcatttctgattgtgactatttgattcttctctcttctttagtattctaggtartcgtctatgtattttaataagttttttcaaaaaacaagctcccagattctttgagtttttgaagggtttttcatgtctctttctccttcagttcagctctgatcttggttatttcatgtcttctgctagctttgggttttgtttgctctttgttctctagttcttttagttgtgttcttaagttattaatttgagatctttctagctttttgatgtgggcatttatttctataaatttccaccttatcactgctatggatgcatcccagagattctggcatgttgtctctttgttcttattggtttcaaagaacttcttgatttctgccttaatttcattatttacccacaagtcatttgggagcaagttgtttaatttccaggtagttgtgtggttttgagtgactttcttaatcttgagtactaatttgattgcactgtggtctgagagactgcaggttatgatttcagt

SEQ ID NO: 807238 - DNA, 614 bp, Homo sapiens
gtgtagtttccagtgaagtttcttgccagatgaattagagctcctttgcatcatgtcatttgcttcttttttcttgctgcttttaggatcctccttttgtccttgacctttgagagtttgatcattatatcttggggtagcgttatttgggttgaattgtttggtgatctctgaccttcctgtatctgtgtatttatatctttctctaggtttggaaaattttctgttatttatttgaataagctttctatccccgtctttctcaactcccagttgaacaccagtgattcttagatcttctgtttgaagttattctgtatatcttgtaggtgttctttgttcrtttttattcttttttttcctcttctgactgtattttccaatatcctgtcttcgagctcatattgttcggcttgatccattctcctgttgagaccctctaatacacttttcagtttagcaaatgtatttctcagttccaggatttctatttcatgttttaaaaaacatttcaatctttggtaaatttttctgataaatttctgaattgtttttctgtgttaccttggagcttgctgatttcccatagaattgttattttgaattcttgatct

SEQ ID NO: 807239 - DNA, 551 bp, Homo sapiens
tccttctattctccctcattccgtctggatctctacctattattttaaagtaaatcccaattatcatataacttccatctgtaaatatttccaaatagagataagaactctatttttaaaacagaacaataataacattatcatatctttaaaaattaatagtaattcattaatagtaattcattggctgtcctctaatatccagccagtgttcaaatttccctattgtctataaatagcctttccccccgccccagmtgatatgttggaatcaagatccaaaccaagtctttgtaccttaatttgttggtaagtcttttaagtctcttttaatttctaaatttctcctccctcctttcttcttgcaacttatttgttgtaaaaaatcaagccatttattttgtagaatttcctagattctgctttggctgattgcattcctgtggcatcatttaatatgttcttcttttctgtacttcttttaaactaatagttgcgtctagatatttgattagattcaggttaattatttgacaagactacttcaaagg

SEQ ID NO: 807240 - DNA, 551 bp, Homo sapiens
tccttctattctccctcattccgtctggatctctacctattattttaaagtaaatcccaattatcatataacttccatctgtaaatatttccaaatagagataagaactctatttttaaaacagaacaataataacattatcatatctttaaaaattaatagtaattcattaatagtaattcattggctgtcctctaatatccagccagtgttcaaatttccctattgtctataaatagcctttccccccgccccagctgatatgttkgaatcaagatccaaaccaagtctttgtaccttaatttgttggtaagtcttttaagtctcttttaatttctaaatttctcctccctcctttcttcttgcaacttatttgttgtaaaaaatcaagccatttattttgtagaatttcctagattctgctttggctgattgcattcctgtggcatcatttaatatgttcttcttttctgtacttcttttaaactaatagttgcgtctagatatttgattagattcaggttaattatttgacaagactacttcaaagg

SEQ ID NO: 807241 - DNA, 612 bp, Homo sapiens
aacctttccaaaaaataatatggcaatatatactcaaaaccttttattgtgtggagcttttgacctaggtatctatgtctacatttaatgaaattaattcacggaaaataatgatgggtggacccccaaaattatataaaggggtttcatcagtgttagtagcaatagaggccaattgggaacaatttaaatgtcaagaaactactaaatgatcaaatgtattatggtacacaattgtatgatgaagtattatacagtcattatagatcatgttatagaagaatttttaatgaatctggaaaggagtcataatatttttgtgacctttctttaatgtattatgaaaaatttcccccaaaataaaaaaatccataaattgattatagcaattatttagctttaattattgtcaattcatgtccaatcttgttttatctacacccttccctacccccmttattttgaaggactttccctgattgtttcataaatttctctttttttcgtttgtttgcatcaggatccaaacaaactccatgtgttacaactggttgatttatctcttaagtctctgtctataggttttcagccatctattcttttccctgctta

SEQ ID NO: 807242 - DNA, 587 bp, Homo sapiens
ttttttttttaagtgagcaaaaaaattttttttatatttttttagtgagcaaaaatatcaaaactctcatgcacttctgggtattggctacaatcacttgggaaaatgggcagtacttactaaatcagaacagatacatatcctataacccaraaactccaccccaagaccaaattagtaccaaaagacatgcataagaatgttcaccgaagcaccatttgtaacagccccaaactagaaagtaaccgaatgtccagcaagagcagagtgaataaatagattatgtatactcacaaacggcaatactatgcagcaatgaaatgaataaactccgactctatggagcaacgtggataaatctcacaaacacaatgttgagtaaaaggagcagacaaaaaagagtatatgctctgtgactccatatacattaaattataaaatgggccaaccaaatctatagtattctaagtctggatagcagttaactttgcaagaagtaaggggaaagatagagactgggaggggggatcacattctatttcatgttctatttaaagttctggttacattggtatgttaattttatg

SEQ ID NO: 807243 - DNA, 587 bp, Homo sapiens
ttttttttttaagtgagcaaaaaaattttttttatatttttttagtgagcaaaaatatcaaaactctcatgcacttctgggtattggctacaatcacttgggaaaatgggcagtacttactaaatcagaacagatacatatcctataacccaaaaactccaccccaagaccaaattagtaccaaaagacatgcataagaatgttcaccgaagcaccatttgtaacagccccaaactagaaagtaaccgaatgtccagcaagagcagagtgaataaatagattatgtatactcacaaacggcaatastatgcagcaatgaaatgaataaactccgactctatggagcaacgtggataaatctcacaaacacaatgttgagtaaaaggagcagacaaaaaagagtatatgctctgtgactccatatacattaaattataaaatgggccaaccaaatctatagtattctaagtctggatagcagttaactttgcaagaagtaaggggaaagatagagactgggaggggggatcacattctatttcatgttctatttaaagttctggttacattggtatgttaattttatg

SEQ ID NO: 807244 - DNA, 582 bp, Homo sapiens
aataaacatgaaagagttttatctcactaataatcaaagaaatgaaaattaaaacaatattaaagaactagttttcgtatatcaatatgtcaaaggtgaaaaagaaaaataattcctaatgtttgtaatgtgagaaatgttttttcagtttgatatacacaaattcacctctcattactgttcaactttgcatttctttgactataaaaagtttttaaaatattgatgttccttgacttattgattycaattctagtaatctatgctaaggaaataatcaaagacagaaacattaattatatatgtttatcacagcattatttacattaacaaaagttggaatggtagagaactgaaatgtccaggaaaaagaattggttcactaaataatggtacatgtattactatgcatgcataaaaattgttgtaaaaaatagttgtaatgacattagaaaacatgacatatgtatacatacataggcacacacacgtatatacaatataatcttagctgcttaaaatgtctcctataaacatacccacaaaagggaaggaagttcataagtgtgcaacagtgattat

SEQ ID NO: 807245 - DNA, 630 bp, Homo sapiens
acactgcagccttgtctgctagtctcttaaattgattctctcagatctccaggtctgatcaaactgaatcaatgacttcaaattatgacaggcacaaaaaaatgcaaatgaatgacaaggaaacactcctcagggccagggctgtgctcagtgtggtggctctgaggtgcctacagcaggaatgaggctgttaggatgacttgggtccatggacagactctatacacaacccactgcctgcaaaatctctggcaagtggtacagcctctaggctaaatcctgttttaaaagcaaatacaggttgagtatccctgatccaaaaatctaaaattggaaatgttctaaaactygaagctttttgaacgccattgatgctcaaagggatgttcagataagcgattagaggtgttcaaccagtaaggataatgcaaatattccaaatctaaaaaaatccagaatccaacatatttctggtcctaagcattttgaataagggatactcaacctctaattcctgttctcagaactttagggagctttggccccaacgaaaggcagagtccttatcaattaggggcacataatacatatttacagatgaaagaatgtgatatttgagcttcatgtcat

SEQ ID NO: 807246 - DNA, 515 bp, Homo sapiens
ttgataacatcttatcaggagacagggtttgagagcagacaactggtctgaccaaaaatttattaggcgggaatttcctcgtcctaataagcctgggagcactatgggagactggggcttatttcatccctacagctcaaccataaaaaaacggccgccccccgaagcggccattttagaggcctaccctcagggacgcattctctttctcagggatgttccttgctgagaaaaataattcagcgatatttctcccatttgcttttgaaagaagggaaatatggctccgttctgcctggctcaccggcggtaagagtttaaggtgatctctcttgttccctgaacgttgctgttrtcctgttcttttttcaaggtgcccagatttcatattgttcaaacacacatgccctacaaacaatttgtgcagttaacgcaatcatcacagggtcctgaggtgacatacatcctcctcagcttatgagatgacaggattaagagattaaagtaaagacagg

SEQ ID NO: 807247 - DNA, 583 bp, Homo sapiens
cgcaatcatcacagggtcctgaggtgacatacatcctcctcagcttatgagatgacaggattaagagattaaagtaaagacaggcataggaaatcacaagaatattgattggagaagtgataagtgtccatgaaatcttcacaatttatgttcagagattgcagtaaagacaggcataagaaattataaaagtattaatttggggaactaataaatgtccatgaaatcttcacaatccacgttcttctgccatggcttcagccggtccctctgttcggggacataaatatgtacatatgtgtgtacatatatgcacatatgtgtgtacatatatgtgtacgcacatatgcacttgcgtgtgtacatatatgcacatatgtgtgygtacatatatatgcacacgtgtgtgtgtacatatatatacgcacacatgtgtgtgtgtacatatatatgtgtgtgtgtgtgtatgtgtatatattccattaattctgtccctctagacaaccctgactaatacatatggtaagactatattcagttttgtaagaaacggccaactgtgttccaaagtggctgtgatatt

SEQ ID NO: 807248 - DNA, 583 bp, Homo sapiens
cgcaatcatcacagggtcctgaggtgacatacatcctcctcagcttatgagatgacaggattaagagattaaagtaaagacaggcataggaaatcacaagaatattgattggagaagtgataagtgtccatgaaatcttcacaatttatgttcagagattgcagtaaagacaggcataagaaattataaaagtattaatttggggaactaataaatgtccatgaaatcttcacaatccacgttcttctgccatggcttcagccggtccctctgttcggggacataaatatgtacatatgtgtgtacatatatgcacatatgtgtgtacatatatgtgtacgcacatatgcacttgcgtgtgtacatatatgcacatatgtgtgtgtacatatatatgcacacgtgtgtgtgtacatatatataygcacacatgtgtgtgtgtacatatatatgtgtgtgtgtgtgtatgtgtatatattccattaattctgtccctctagacaaccctgactaatacatatggtaagactatattcagttttgtaagaaacggccaactgtgttccaaagtggctgtgatatt

SEQ ID NO: 807249 - DNA, 574 bp, Homo sapiens
attattatccccattttctgcacccgcatgtccattgcagcattattgacaatagctatgatatatacacaacctaagtgaccattgactgatgtatggataaatcagttgtatatatacacacacacacacaaatgatggaatattattcagcactaataaagaaggaaatcctgtcatttgcaacaacataaacgaacttggagacattatgctaagtgagatacaccggacataaaaagaaaaataggcatgatgtctcttaaatgtgcaatcctaaataaaagttaaatgcaaaggaacagaaagaccttcagagatggkgataggaggaatgagagatgttggtcaaagggtacaggctgcacttattcaagataaagttgagagctctaagatacagcatgagggctacacttaatattattgtattgtgtattggaaatgtgctaaaagaatagattttaggtggttttactatatacacagaaaaagataatgatgtgagacaatacatatgttaattaccttgactgtagtgatcatttcactctgcatattgtatatcaaaacg

SEQ ID NO: 807250 - DNA, 604 bp, Homo sapiens
gtagaaaagaaggtagaatatctgtcatctctctatctatcaatcatctatctattgatatatagagtgagacgggatgaggagagggaaagagaaagagagaaatattctaaagccaacataatcatttaatgggaaagccctasagaaacagtccaagtcaatggacttggtcaaggtcaatgacaggatgactactatttccactgctatttaagatacttcagtaggtactagctaatgaacttggacttcagaaaacaattggagacataatatgcaaaaaaattaaacatctcaatacacagatgacatgatactattattcatcagaattctattgaaacaatagtaaaagaaaccaaaacacaaaagaagttaaagtagcaatatacaaaattaacataacattaatagcatttgtattcacatataaaaaccagttagaagatacaatgaatgagataatcccatttataatagccataaaaatcataaagcatttggttataaacttaataaaagtgtttaaaatctataaaaaattatcaaatacttcttaaaaattaaaaaaaaggccatgaacaaatagaaagctgtttct

SEQ ID NO: 807251 - DNA, 624 bp, Homo sapiens
tatataaacaaagttaaaaagagcctctgtattcattggttgtggcagcctgataggaaagatcaagggtgactcctggggtttaggctggagaaactagcaggcaggtgataaaattcctttccttattggtttatgacctctatttgtaaaaatttgtctgtcatacttgtataaattgtttttccaatttgtttccttataaatttttaataattagttttgacattaaaaagttcaaagtggtcaaatctatttaagacttcttacatggatttatgcttagaagatcatttcccatcttcagagaaaagatgccttaatttgcatctttaaaaatattattcttttataggtagctctttaatttagcagaaatgtattctgtggtatgatgtgagcctatatattaatatattttgttaaaattkagctcattccacaaaagcatgattattggattggagggcacataaaagtaaaatgttaaagtcagagaattctcacgctctctttatctgcatctcacgtatcatgagcaaagtaaagagggaaaggttcaaggagaggtgtttgctccatttttactgctcttcaggcaggaagcagtattccttctctgat

SEQ ID NO: 807252 - DNA, 537 bp, Homo sapiens
tgaccctgaagcaacatgggctcaaccctaccagctgggcacacaccacagaagagtattgaagagaagggaatataggaagctcggaactctcattgagaaagatacttggccagggaagagaattgcttgagaccaggtgttcaagaccagcctgggccacacagtgagaccctgtgtctaccaagaaaaaaaaaraaagaaagaaagaaaacaaaaagaaagaatattcctggcctctcatgtggaggaaccttcccagactctctgtgttctcatatctctggtttgggataaaggaaaagcccactttttcccattctgcactttttgccctacgcagcaagcttccgaagggccgggtctgtccttttgggaggcctctatggtgtgtggtttttcaacactgcctggggatggtgcattcatctgtctctatcaaaggggaaggcttattagtcagtgaagtcagctgcaaatccaaggccatattttctgatcagctttattggtaataaagcagatattgtgatacca

SEQ ID NO: 807253 - DNA, 420 bp, Homo sapiens
aacagctttattgaggtgtaattgacatagaaagaactgtgcaaatttaaagtgtacagtttgatgagtttgaacatatgcacacgcctgaaaccgcctttgccaaattataactgaggaaactatgacagtgaaagaagtcagacctaactggctccatcttgcttctaacttttaagctgtccttgttcattcccgggcataggtcgactaactttgggaaggaattcagttcayggtttgactctgaaacaaaactgataacagccgttttccaaaaagacccccttgttgcctggggactagtctgcctttgcaggactaacacattcactacaagattagaaattacagtttaggggttgtgcggcctctggctccaagcatctaagcctccccagattgctcctggggataaca

SEQ ID NO: 807254 - DNA, 665 bp, Homo sapiens
ttttaaaattgccagacaaggaatttaaaataactatgattaatacattaaggattctaatgaaaacagtgggcaacatgcaagaacagatggataatgtaagaagaaaaatgaaaattctaagaaagaatgagaaggaaatggtaaaaacacgtaaragaaatgaagagtggcttaaatatgctcattagtgactggctatggccaaggaaagaatcactgagtagaaagatcgacagaaactgttcacattgaaaagcaaaagaaaacagaatggacaacaaccacaatgacagaatattcgagaactttgaagttgtgaaatatacataattgaaatacacaagaagaaataatgtagcagaagcaatatttaaagcattaatgcctgagaatattccaaaattatggcagacaccaaaaaaaatcacagatcgaggaagaataccaaccagtttaaatagctccccaaaaatatgcctcattatatcacatttaaattggagaaaaccaaaggcaaaataaaatattaaaagaagacagaaaacaacaccaccacattacttagaaaggagcaaaaataacaattacattggactttgcatcagtaaccatgaaagccagaagggagtggactaaaacactcaaaggatttgaagaaagag

SEQ ID NO: 807255 - DNA, 667 bp, Homo sapiens
gaagttcaaagtcacagacttctatatattaatatatttaaataatcattggattacattgcatagacaagagacaaacttgtactaaagtgcgcaggaaagtttactgacagcattcaaataagctgagactacttattccactctctttggcatctaggcttcaaagattccctgcattaaactggagttccaactattcataccttggtgtagttcttcctatagtgattctgggctggtcagctactcgggttcatgaattgcaggtrgaagaagtgacactgtaccagtctcaggttaatcttgaagttaaagtgcactacaacttttgtctgaaccttctcgaaacatttggtgttttagggaccaggagccaccttgtaagaagttcagctcctctactgcataacctatgtgagtgaccacaaagagagccattataatttcctattatacaacaataacaccaacaccatttactcttaggaacacctgcaccttgctaagtggtttgcagtcctcatgcccactgggtctatctcagttaaatcaaaggttaattctgccattgaaaaattttccacttaacaatgatatttctgttatagacattttctatttttcgttttcattatttttaatttttctaaaattctaagcattt

SEQ ID NO: 807256 - DNA, 667 bp, Homo sapiens
gaagttcaaagtcacagacttctatatattaatatatttaaataatcattggattacattgcatagacaagagacaaacttgtactaaagtgcgcaggaaagtttactgacagcattcaaataagctgagactacttattccactctctttggcatctaggcttcaaagattccctgcattaaactggagttccaactattcataccttggtgtagttcttcctatagtgattctgggctggtcagctactcgggttcatgaattgcaggtggaagaagtgacactgtaccagtctcaggttaatcttgaagttaaagtgcactacaacttttgtctgaaccttctcgaaacatttggtgttttagggaccaggagccaccttgtaagaagttcagctcctctactgcataacctatgtgagtgaccacaaagagagccattataatttcctrttatacaacaataacaccaacaccatttactcttaggaacacctgcaccttgctaagtggtttgcagtcctcatgcccactgggtctatctcagttaaatcaaaggttaattctgccattgaaaaattttccacttaacaatgatatttctgttatagacattttctatttttcgttttcattatttttaatttttctaaaattctaagcattt

SEQ ID NO: 807257 - DNA, 624 bp, Homo sapiens
attaataaatatagcatattattagaaaaatgtttaaaaagatggttatcacaatagatggataaaaataattttttaaagtcttacaatacttcatgataaacaaataaaaaatagaaatagaaggataacttatcaacttgacaaacagcatctacaataaatctatggcaaatattgcagttgatgctaagcgaacaaatgcttctgactttgtcagattttagacaagggtggtcattatcaccacttctattcaacactgcagtgaaattctacccaggkctcttaagacataaaatgcaataaatggcatacaggttggaaagaaagataaaacaagctctatttgaagatgacataatcttgtatattaaaaaatcctaagacatccactaaaagtttaccagaattaataaacaaatttggcaagtttccaggatgcaaggtcaatacgcaaaagccagttgtatttctgtacactttcaatgaacaatccaaaaatgtaattttttaaaaagtcaatttatactagcattaaaatgaatgaaataattaggaataaatttaactgaagaattaaaacactcacactgtgaaactgcaaaataaagaagacctaaa

SEQ ID NO: 807258 - DNA, 624 bp, Homo sapiens
attaataaatatagcatattattagaaaaatgtttaaaaagatggttatcacaatagatggataaaaataattttttaaagtcttacaatacttcatgataaacaaataaaaaatagaaatagaaggataacttatcaacttgacaaacagcatctacaataaatctatggcaaatattgcagttgatgctaagcgaacaaatgcttctgactttgtcagattttagacaagggtggtcattatcaccacttctattcaacactgcagtgaaattctacccagggctcttaagacataaaatgcaataaatggcatacaggttggaaagaaagataaaacaagctctatttgaagatgacataatcttgtatattaaaaaatcctaagacatccactaaaagtttaccagaattaataaacaaatttggcaagtttccaggatgcaaggtcaatacgcaaaagccarttgtatttctgtacactttcaatgaacaatccaaaaatgtaattttttaaaaagtcaatttatactagcattaaaatgaatgaaataattaggaataaatttaactgaagaattaaaacactcacactgtgaaactgcaaaataaagaagacctaaa

SEQ ID NO: 807259 - DNA, 623 bp, Homo sapiens
gcatggtgtatctttttttctattattttactttcagtttacctaggtcattaaatttgaagggctttcttgtaaacaacgtattgttgggtcttggttttatatctgctttgcctatctctttctcatttctttctgggactccagtgataagaaggttgactattttgttattattttctcatagattcctgagactgctaaatttttttgagtctgtattatctctgctgtttagattgagtgagttctattgatctgtcctcaagttcactgattctgttatttctcatccacactctactattaaactcatcaaggaagttttgcttattgtatttgctaggtctataatttttatttccttttttttaaatttatrctttttgctgagaattttttcaagtaaatttatatgattgttgaagcatttttttctgattgatgattttaaatacttgtcagatacttccaacatttaatttatctaagcattggcaattgattgtcttttccaatgaagttttgatttcttgcttcttggtttctgattttggatggtattctggccattttgtctattataatagcagaatgagtcctgcttaaatatttagtaggaa

SEQ ID NO: 807260 - DNA, 623 bp, Homo sapiens
gcatggtgtatctttttttctattattttactttcagtttacctaggtcattaaatttgaagggctttcttgtaaacaacgtattgttgggtcttggttttatatctgctttgcctatctctttctcatttctttctgggactccagtgataagaaggttgactattttgttattattttctcatagattcctgagactgctaaatttttttgagtctgtattatctctgctgtttagattgagtgagttctattgatctgtcctcaagttcactgattctgttatttctcatccacactctactattaaactcatcaaggaagttttgcttattgtatttgctaggtctataatttttatttccttttttttaaatttatactttttgctgagaattttttcaagtaaatttatatgattgttgaagcatttttttctgattgatgattttaaatacttgtcagatayttccaacatttaatttatctaagcattggcaattgattgtcttttccaatgaagttttgatttcttgcttcttggtttctgattttggatggtattctggccattttgtctattataatagcagaatgagtcctgcttaaatatttagtaggaa

SEQ ID NO: 807261 - DNA, 658 bp, Homo sapiens
aatatacccagttcttgtttttgaaaataactgtttgcatggtgtatctttttttctattattttactttcagtttacctaggtcattaaatttgaagggctttcttgtaaacaacgtattgttgggtcttggttttatatctgctttgcctatctctttctcatttctttctgggactccagtgataagaaggttgactattttgttattattttctcatagattcctgagactgctaaatttttttgagtctgtattatctctgctgtttagattgagtgagttctattgatctgtcctcaagttcactgattctgttatttctcatccacactctactattaaactcatcaaggaagttttgcttattgtatttgctaggtctataatttttatttccttttttttaaatttatactttttgctgagaattttttcaagtaaatttatatgattgttgaagcatttttttctgattgatgattttaaatacttgtcagatacttccaacattyaatttatctaagcattggcaattgattgtcttttccaatgaagttttgatttcttgcttcttggtttctgattttggatggtattctggccattttgtctattataatagcagaatgagtcctgcttaaatatttagtagga

SEQ ID NO: 807262 - DNA, 517 bp, Homo sapiens
acaatccaggataatcttttattccaactttcatcacatctgcaaagtctcttttaccgcatgaaatgacatattcacaagttacagtgattaggatatgggcactgggccaagtcacttgtggtatagtccctttcaccagtaaccccagtttctctggtgtctgtggttgaaaaaaggggatgaaatccttagggacaaagaggctaactgagttgggacacctgttgtggtggaatgcctctagattgtgccamcctgtcacctggtgtgtcagggaggagcctccagaagacggtggcctgtgtggagggagagttcttctcctagtcacttttttattttgatactagacacagtgcttactttcttgaatcgatttttctgagcgtatttaattatactcaaaatcgacaaaaatgtgtacatttgaggtatacaatgggatgatttgatgtacgaatacactgtgaaatgattgccacaatcgaagtcatgaacaaatccatcacctggc

SEQ ID NO: 807263 - DNA, 480 bp, Homo sapiens
gtacatatatgtacacacacatatatacatatgtatgtgtacatatatacatatgtgtatatatacatatttacacacatatatatgatcccagaaggttcactgatataatcttcattagtcaacaggtatttattgggtgtttattatgccccaagcactagctatgcaactgtgaataatggcccttgtccttcyggaaattttaaccaaataagcaaaaaagactctaagaaagcaatataacacaaggaaatgccaaagatagccccattaacataaccaggatttaactctatctttcctttaacaaaggacatttttatcctctaaaataatagtagcatatagtatcaattccaaattagcaaatgagaaaagacaaaatatagtgacctgataaattaggcaagtatcaagtacaggtgaaagggaaatgacaaataagtagtaggcatacatacaatgtgaggactagag

SEQ ID NO: 807264 - DNA, 493 bp, Homo sapiens
tgacctagagttgtataaaggcataggttccctcctctaaacatggtttttaaactccagacccacccaagctgggcccaggatgaaagtgaacctcttgatatatctctgatctcaaatgagttattttagatctttctcagaacaaaactgcactaagaagttgctttgctgtctacacacacgcctcaatagtccwaaaagaataagcgagggagaaatggaaagataatccaagcttgtctttccacatcttaactaccctcgagctcttccttttgcataaggattcagtaaaattgtgacctctcccaggacagactaaaacacctggatttcccatgcttcactaagttgtaaacagcttccagagtcagcagcttacatttactacttgcaatttttaaaggactaaagcttttatagctaagaaatattctaatgatatgaagttaaataaaaattggcaataaaagaatacattttgaaatca

SEQ ID NO: 807265 - DNA, 620 bp, Homo sapiens
cagttctgagaaggatatttatagcactaaatgcttgcattataaacaaggaaatgtctcaaattaaaaatctaaattactaccttatggaaactgaaataaataaaaaatatataaagggagcagaaggaagaaattaataaagaacagaaataattaacattaaacaagaaaaaaatagaaagaaccaatgaaaacaatccggtttctcaaaaaatttaataaaattagcagacctctagyaagacttagaaaaataaatatagaaaagacacacattacccttatcaggtttgaaaaggaagctatcacttcagattcctaagccattaaaaagataataggggaacactaccaaaaacttaacactaaaacatctgacaaacccttgaaaaccacaaactaccaaacttgacaatcataaataaataatttgaataaaatttagttcattattaataatctcaaaaataaatttccaggttcaggtggtttcactggagaattctaacaaacatctaaataagaacttataccaattctacacatttacttccataaaatagatggaaaataggcagaaacattttccaatgcattttataaatctattattacct

SEQ ID NO: 807266 - DNA, 563 bp, Homo sapiens
ttgggtaaatgcatctgttccaaatgggagaaattggccaaaacaaaggagctacaggcaccatgcaagtccgaaatccaatagggcagtcattaaaccttaaagttccaaaatgatctattttgactccatgtctcacatcaggtcatgctgatgcaagaggtgagttcccatggtcttcagcagctccacccctgttgctttgcagggtacagcccccctcctggctgctttcacaagctggtggtgtgtctgaggcttttccaggtgcatggtgcaagctatcggtaccattctggggtctggagkacagtgacccttttctcacagctccactagggagtgctccagtagggactctgtgtgggggctcccactgcacattttccttccatactgtcctagcagaggttctccatgagggttctgcccctgcagcagaggacaggtggatgttcacctctgcttggacatccaggcatttccatacatcctctgaaatctaggcggaggttcccaaacctcaattcttgacctttgtacacctgcaggtccaacacgac

SEQ ID NO: 807267 - DNA, 653 bp, Homo sapiens
aactctatgggcacgaaagctactttaatctgtacagcattttacattacaaatacatttatatatactacctcatgtaattaaataagtaaaataacttgcaccaaagatcaagtaacttcaaagttacagatggactcaaactaattctcttgagtcaaaatcccaagttatctcaatttcttattcaattagagaagtgacttgttcaatacatttgtatttgttgattcaaatcaaattggacaatataatataacaagtatttattgagcaccaactctgtgctcagcctttggtatgtatggataggaagaaaaacaaagaaaaataaaataaaataaaataaaataaaaacacagtattgttctcagggtacactcttcctgtggtgaaaaggattagctttgtgaagaggggaagggagaagaaacattatgttgttrttattgtttgctaggtatggtgctattgattttagacttttcaataaccactaaaaatacatattgcttctgttttacacagaggagttcaaacaaagagacgtaaaataacttgccctctccccaagctgatgtggagtggactccatcagactgaagtctttctctaccatgctttcctccttcccagggattataataagcaaa

SEQ ID NO: 807268 - DNA, 671 bp, Homo sapiens
ggatattttctgtagacacagggtttcaccatgttgcccagactggtctcaaactcatgagttcaagtgatctgcccgcctttgcctcccaaagtgctgagattacaggtgtgagcaactgcacctggcctctgagccacaattctatctgctccaaattctggtgggcaagtttttaattttaaagaaatactcaaaactactcctgaagtttatgctatgttacagggtccacccagcctcattttactttattaaccattacacgaaacccactggaaactgctaaatagaaagaatcagcttgtaattagtttttattttaggggatttggggcaatagaagacttgtgcctcgtatccccagttacagcctctttctcaacatttttcttttaccaatgcacacaaaaaaattacagacttgccttgtgaggtcgaaaatagagatacaggctgagaggaagaggaagaaacaaaggaatctgaaagaaaatatacagcatgagaatatgacaacctcacacaggrattttaactttaactttctttttgatggggaggaagagccaagcatcataatttcattgggtttaacaaggaggaaaactcaaatctttatttccaattattgttttcactcacctggtagcaaaaccttattttatttt

SEQ ID NO: 807269 - DNA, 525 bp, Homo sapiens
aaagaagccagtggcagccgggtgctgtggctcacgtctgtaataccaacactttgggaggccagggtgggcagatcacaaggtcaggagtttgagaccagcctggccaacatagtgaaaccctgtctctactaaaaatacaaaaaattagctgggtgtggtggtgggygcctgtaatcccagctacttgggaggctgaggcaggagaaacgcttgaacccgggaggcagaggttgcagtgagccgagatcacaccactgtcctccagctcgggcgacagtacgagactccgtctcaaaaaaaaaaaaaaaaaagccaatggcatttttagtttcatattgtgttttccactggtatatacctgttgatttgtttgtgtcttttatgaactgttattttctgaaattttttttcaataaaaggaaggaagatgtgaaaacaactttttatcaaagtgaatgatttaaaattaatacatattgattgtttttaagattcttaaataaaatgcatgaatatagttta

SEQ ID NO: 807270 - DNA, 525 bp, Homo sapiens
aaagaagccagtggcagccgggtgctgtggctcacgtctgtaataccaacactttgggaggccagggtgggcagatcacaaggtcaggagtttgagaccagcctggccaacatagtgaaaccctgtctctactaaaaatacaaaaaattagctgggtgtggtggtgggcgcctgtaatcccagctacttgggagrctgaggcaggagaaacgcttgaacccgggaggcagaggttgcagtgagccgagatcacaccactgtcctccagctcgggcgacagtacgagactccgtctcaaaaaaaaaaaaaaaaaagccaatggcatttttagtttcatattgtgttttccactggtatatacctgttgatttgtttgtgtcttttatgaactgttattttctgaaattttttttcaataaaaggaaggaagatgtgaaaacaactttttatcaaagtgaatgatttaaaattaatacatattgattgtttttaagattcttaaataaaatgcatgaatatagttta

SEQ ID NO: 807271 - DNA, 604 bp, Homo sapiens
tgtcttgcttgctggtttctccatctgctctaaatttagtactaaataaagatagttgtgggggtggaggaggttttaaagatctctggtccaaatccattaggttttttgttgtgtttgaaagctgtaatccagagagagtttgaaagcatatgctaaagaccatttttaggcatgttttgcagaaatgtatagcatctatttacattattatgtgtttccatactttgactgtcaatcctttgcatatagtagtatcctaactgatgttccaaatttgctactatgctatacatgggcttgcataattcctaattcataacatatggatattaaatarattagcttatgagaagcaattcacttttttccatcttggtaagtagaatagtcacaatccaataaagataaataaagatgtctaggactaaggcatcataattacaccttatatttgtatagtgcaaaataacaccttacatttgtatacgttatttaattcttacaactactcagtgaagtaagcaggcatggaagtatcatgaattccattttatagatgaagatattagaacctagaggttttaactgacttgcctaagtt

SEQ ID NO: 807272 - DNA, 691 bp, Homo sapiens
ggctttataagaggaagagagacttgagtttgcatgcctgtggtcttttgccatgtgatgcccttcaccatgaaaaccctcatcagaagttgagcagatgccagtgccgtgctcttggactttccagactccagaagtgtgagaaataaatttcttttatttataaattacccagcctcaggtattctgttatagcaacagaaaacagtcaaaaacactattcaaggtaacattcacatgttccaaggtttattaggacatggacatagtgrggccattatttagcctactgcaccaggtagttatttttttttgagacagagttttgctcttgttgcccaggctggagtgcagtggcgcaatcttggctcaccacaacctctgcctcctgggttcaagtgattctcctgcctcagccttccgagtagctgggattacaggcatgtgccaccatgcctggctggttttgtatttttagtagagatggggtttctccatgttggtcaggctggtctcgaactcccgacctcaggtgatccacccacctcggcctcccaaagtgctgggattacaggcgttagccactgcgcccggcctgcaccaggtaattattatcaggtaaatttgagaaacactgataaaggagttaaaaagaaattacttaggcagattgtgaaggtaagaaagtcct

SEQ ID NO: 807273 - DNA, 627 bp, Homo sapiens
aaatacaaatattgaaagtgatggatatccagaatacactggcttgatctttacaaattatatgaatatattaaattatcacacgtaccctgaaactatgtacatctattatgcatcagtttaaaaaaaattttttttaaagacactcttatcattcaggaaatccaagggtttgaggagctctgtgacagaatcaggaagatcaatatatttagtataataccacactatttaatacattgttatgaccctgataccctttatagagcttccttcctaaagcattagagtatgtatcatattaccaagtacataaacctaaatagtgctttattctaattagatgtacacacttagattttccttgaatcacaattatagttatcacgagtcttagacatcacctagtttaaatatcttaatttaaatgaaaaaaaaataaagcccagaracagaaatggacatgtccaatatcactcagcttaccagtcgtagtccaggggtttttattttgttttcccttcctgttccaaaattttcagcctctaagcctttggttctgttgtttttgtttcataaatgtattccctcccattcctttctaaatcccatttttcaagacaaaat

SEQ ID NO: 807274 - DNA, 640 bp, Homo sapiens
actcatttccaaaaagaaagtgactttcagctttgtaaatcatgatatagatgctagagagagaatatcagttattttttaaaaattctaaatatcccttggggtagggacaatctttatgtactccacagcgcctaggatcttcacatagtttacactcatcatgtctaatattcaaatrctacttactgcgagccaggcactattctcagaatgttacaagatattaactcattctattcttacaacagccaaattcggcctactgcttcatttgcattttatgaatacagaagctgaggctaggtcatttttccaggtcacacagttaggaaggggcagagcagggactcaaagccaagcattttggctccaaagtccactaaattataccactttgagttacgtttaggatggaagccgtctgggatagtaaaaggaaaataagattttgcttttggttggttgttgttctatgcagctctcacttaattaataaagcttctttttgtcctctcacctcaaatcaaagaactatgagagctattcactagatgaacatctggcccatggattccatttctgtgtcccaagacaaccttgattcttacttagatttgcaaaacattattaatccaca

SEQ ID NO: 807275 - DNA, 620 bp, Homo sapiens
gacctattgccttccagctttgagctgccatttatattgcattctgcatctcctgaaatgtcctccatttttacttctctaaaaaagtcagattcattaagattgtcaatatttgtttcaataaacttgtaactgtttttcgaacctttcttaatttttttccttaaattattattgagaattcttttcttkaggatgttgggagacgtatttttttttattccttccctagatcacatatatgcttacttcctttgagaactcattcattcctgttatttcaactgccagtaatcggcaaatggcttagcacaaagagtcctggactgggagatttgagttcattatgtggctctttcaacaaaacttaacttcagctttctcatctacagagtgtggaaagggataaacttttccaatatacaatacatgcttgtaactagacatatacattgtgtgtatatatacataagttaaatttcatataaataaactatacatatatagagagagattatttaattctcattattacccttcttttatgtgttaagaaaaacctgatgctcaaagaggttatataacctttccagggatacacagcaaggtcactgcacctg

SEQ ID NO: 807276 - DNA, 532 bp, Homo sapiens
atgattagtctttgtcatggcatatattcatcaaaatgacccaagatattgattaaagaacatcagcttctaggctccacctgagacctacctattgaatcagaatcctttgttttgggactcagaaatatgcacattaacakatttttccatagaaatcagatacatgctatatttagagaaacatttacagaaatatagaattaaaggatcttaaaattctatgtgctaccctatcagagagcaagttgttcatatgtacaaatcaaatcttatttttgttgggaactttagattcaagaaataacaaataaaatcaacattaacttttattaactgtcatatggagaggagagtttattcaaattttacccataattgaaatagaagataatgagtgtaaaaggcattaaacatttttataaagaagaagaaataaatctgagatacttagtttggctatagagaaaaataaagcagtaggccagaatacttaaaataaattaaatcaatagttgagcccaaaagaaac

SEQ ID NO: 807277 - DNA, 583 bp, Homo sapiens
tgtaaggaaggggtccagtttcagttttctgcatatggctagccagttttcccaacactgtttattaaatagggattcttttccccattgcttgtttgtgtcaggtttgtcaaagatcagttggttgtaaatgtgtggtgctgtttctgaggcctctgttctgttccattggtctatatgtctgttctggtaccagaaccatgctgttttgattattgtgggctaatatatttcaaagagttatcagagccaaggacaaaaatctacatcatctgcttagctacagtctatcttggtaaataggttaggtagcaattcaaataaaaatcaaaataaacaactgctttacaaaaataaycaaaggaaagtgaattcagatgacttaatcaaaagttcttacctaagcatggaaaagtttaaggactgattttcatggaaggataaacttgccaatgaaaataataaaagaatattaaattaaaatttcttctgccatgtacattgaggatcttctgttcatattattttttctttaggcaacattaatattcttgaatatatttaacatatcaataaatatttt

SEQ ID NO: 807278 - DNA, 585 bp, Homo sapiens
gagaaaataacttatcttttatttcaagatttcaaaattatgaagtaaaagtaatttgtgacttgtgttgagatttatgccctctattagacgaagcctgaaatacgtaagagaaatctagatcagtactgtacaataaaaataggatgtgaatcctgaaggtgagacacattayggaatatgaaatttttcagtagccacatttaaaaaaagtaagaggaagcaggtggaattaattttaatacaatatttaacccaatatacccaaaatactattttaaaatgtcaataaaatagtttctgagacgttgtttacattctactttcgtacaaagtcttcaaaatacaatatacattttatatttacagcatatctcaattcagactaggcacatttcaagtattcaatagccacatgtgtccagtagctgctgtactgcagtgaagtctgtagattatcagttctggttgtcagaacctatctgtccctatgttttctctgtaatatgggctgtcgtttagacagatgtttcctacttattattcgtttattctacatttaataaatatatgttagttgttagg

SEQ ID NO: 807279 - DNA, 563 bp, Homo sapiens
tttattaggcagttttcaccaatgaacatatgctacataatcttactaaaaccaggacctgtcttctctttgaataatttccacacataaaaccccaatatattctttccaattcatatcactatgaatcagaatgaagttgttgcaaatgatggtcagtgaagaagaatagaagggaggttggaaaaagtgaggcttattgcctctaacatttctgccattcttacagtgattggtatgctcgatgtattacaatttgtcctcactttgttagaatcaactttgttatcttaaacagccaatcatatagccaaataacaacatcaacaacamaaagaagtgttccaaaaccactagcctggtagcaattctaatgcaggtggtaaagaggtatttgatcatgtttattctttggtttcgtttattttaatgcagtctgtctcagacattttctgttgctataacataatacaattgactgggcaaattataaagaaaagaaatttatatctcacagttctggaggttagaaagttcaagagcagagcacggtactggcaccc

SEQ ID NO: 807280 - DNA, 563 bp, Homo sapiens
tttattaggcagttttcaccaatgaacatatgctacataatcttactaaaaccaggacctgtcttctctttgaataatttccacacataaaaccccaatatattctttccaattcatatcactatgaatcagaatgaagttgttgcaaatgatggtcagtgaagaagaatagaagggaggttggaaaaagtgaggcttattgcctctaacatttctgccattcttacagtgattggtatgctcgatgtattacaatttgtcctcactttgttagaatcaactttgttatcttaaacagccaatcatatagccaaataacaacatcaacaacacaaagaagtgttccaaaaccactagccyggtagcaattctaatgcaggtggtaaagaggtatttgatcatgtttattctttggtttcgtttattttaatgcagtctgtctcagacattttctgttgctataacataatacaattgactgggcaaattataaagaaaagaaatttatatctcacagttctggaggttagaaagttcaagagcagagcacggtactggcaccc

SEQ ID NO: 807281 - DNA, 595 bp, Homo sapiens
caagaacagcatggaggtaactgccctcatgattcaattaccttcctccagggccctcccaccactcgtgggaattacgggaactacaattcaagataagatttgagtggagacatagccaaaccatgttaagcaccatgttgtgtccagtgaaaaaattaattatgccacaagaaaaatcagaccaaaaaggaaaaaaatacgaagtttaattaatctaagtcrtagttattaaggttctccccttcttgaacatattaaacaattttctatgaagcagttttcttataaagtaagtgcagtcacttcatgtggtattttgttgttgttgttgttgttaaccacagattaaaactggaagaggccatgtgacatttgatttccagtcaaactgtgaaagaaaacaaatatgtgaatgctaaaatgtgttttgggtgaaaatatcatttgagcaaaaatattgtagattgtaacttccaacatgtctgtcattattcattaatttattccaaattttctaatacctgggaagcaaagtaatatcttgaattataaaataggcaaaacgaatgacatttagaatcatcactttagt

SEQ ID NO: 807282 - DNA, 617 bp, Homo sapiens
atttacatttctgatgttttagttattctggtttataagagtcttcagagaattcctggttttgttaccatttagcctgtttccatccttgtcaaaatatttgtcttgactattaagacagaataaggaagttatctgtgtgatgtagctgaaagggttaaatttcttggtcacttaatcagagaatccaaaatgtttgttcttcatttttggaaggcaaggagcttcacttagcctgaaaatattcatcagtaaacaaatagaattaataatattaatgccaggtatgaaaaggagggcttttcccataagggaaaggatatactcggctagtgatagmggaaacccggcagtagtgtacaatccagtcccaggcatatggctcaagtctgctgccaaatcacacaacttgaagctatcaggtggcactgcctttgttagtggatagtgccatcttcatacaccatgggcagtgacacttctattcccctgtcccgtctctcagagcttgttcatcctcaggccttttataccaatatgtgtattgatgatccttttaaataatactaggatgtacaggttgagagcaagatagcgtgagttaacattttcataga

SEQ ID NO: 807283 - DNA, 612 bp, Homo sapiens
cacataaatcagctgtactttttcatataatcattagagaaatgtaaaaaactgcgtagaaaaaaagcacctaaagcttaagagaattactgatcacgaaaggtttcaccttatttaatattttaggtgtggcccccttgataaattgaaatagctttgggtttcttgttgttgttgttttgcttagtgtgtgtgatccgtgtctaaggcaataaaatgccaaaccttcactcacctgagtggcaaagcctgcaaaattcaatcaggcggtgatctctagagtatagcattttcaaagaatattcaaaagctaccagctgtaaacataacacacacaaaaaaaamcagaaaaaccaaaccatgcatctcttagctggctgtaaatgtactaatcagtgatttggggggaaaaaacggtgtaaacatggtggatatattttcgacagtaatcataattcttgtccagatgatgtgaagggttataaaataagcctgttaggtttcccaagcacttgtgtgtcgagtatatgtaaaatgcttcattaaaacatcttagactttacagtggatattttgctggtattaagcttgtgtttgtaaatagaagtgcta

SEQ ID NO: 807284 - DNA, 590 bp, Homo sapiens
cgggatcctcaagacccagcagctgctctcatggtaataactctgtggcctactcctcttggggaggacaactctgatctgttttctgaggctggacgcaacatgaaggaggtcttagaacattttaaccaattaaagagctgaaaggagaagtcagwtacaatggcaagcagctacctgggtgataacgaaatccacgcacaatcaagatattccaccttcgtagcagggatgtctggaggggctgcagagtccccccttctgccctctatattccaaatgggttgtaggcagcacatacaagacaacaggcaacattttgacccctccccaaattaaaaaccaaggacataacaatccattgagaacactcagagtgccccaccctggcagttgctgtatcctcatcccacactcctgagatattgtggttctctgcttctcatcgctctctggcaccacatctggctgtggtcctacccccatcatgtgccaccccatccttaacaactataacctttcttgacattttttttctttgagacagagtctcaccctgtcactcaggctagagtgcagtggtgcaatct

SEQ ID NO: 807285 - DNA, 617 bp, Homo sapiens
actggatctccacttggaaaaggatacagttagaaccatacattgcatcacatgtaagaatgaacttgaaatggattagagatctaaatgtaaaatatgaaaccattaaagttctagagaaaaacgtgggcgaatttctgttaacctcaggtaagaggttaactcagttacctctgcctgtaatcctagcacttagggaggctgargcaggaggattgtttgagcgcaggagtttgaggccagcctagataatataaggagacccccatctccacagaagaaattttaaattatccaggtgtggtggtatgctcctgcggtccaagctactcagaaggctgaaatggaaggatgttttgagcctgggaggttgaggtttcagtgagccatgatcacacaactgcactccaccctggacaacagagtgaggccctgtcttaaaacacaagtcttcatgacaaaaatatcaccctaaacaaattcaaatgataactgatatcattggagaagttaattgcaacatataccactaaccatgagctaatattcctacaatataaagaactctcaaaaactgaagggcaaaaacatcaaaaacctgatagaaaaatgaggga

SEQ ID NO: 807286 - DNA, 617 bp, Homo sapiens
actggatctccacttggaaaaggatacagttagaaccatacattgcatcacatgtaagaatgaacttgaaatggattagagatctaaatgtaaaatatgaaaccattaaagttctagagaaaaacgtgggcgaatttctgttaacctcaggtaagaggttaactcagttacctctgcctgtaatcctagcacttagggaggctgaggcaggagrattgtttgagcgcaggagtttgaggccagcctagataatataaggagacccccatctccacagaagaaattttaaattatccaggtgtggtggtatgctcctgcggtccaagctactcagaaggctgaaatggaaggatgttttgagcctgggaggttgaggtttcagtgagccatgatcacacaactgcactccaccctggacaacagagtgaggccctgtcttaaaacacaagtcttcatgacaaaaatatcaccctaaacaaattcaaatgataactgatatcattggagaagttaattgcaacatataccactaaccatgagctaatattcctacaatataaagaactctcaaaaactgaagggcaaaaacatcaaaaacctgatagaaaaatgaggga

SEQ ID NO: 807287 - DNA, 595 bp, Homo sapiens
gacatgggagacttttcattttgttttgtactaagaaaaattcttctgccttgggatcctgttgatctgtgaccttacccccaaccccgtgctctctgaaacatgtgctgtgtccactcaaggttaaatggattaagggcggtgcaagatgtgctttgttaaacagatgcttgaaaggcagcatgcttgttaagagtcatcaccactccctaatctcaagtacccagggacacaaacactgcagaaggccgcagggtcctctgcctaggaaaaccagagacctttgttcacttgtttgtctgctgaccttccctccactattgtcctgtgggccaaatccccctctgcgagaaacacccaagaatgatcaataaaaaaaaaaaaaaaaaaatccacagctatcatyatatgtaaagttgaaaggccagatgctttccccctataatcaggaataagacaaagatatccatttcttataacttctattcaacattggagattctagccagggcaattagggaagaaaaagaaataaaaagaatccacattggatttcattgtttcctatgaaataagtaaaactcatttattccaa

SEQ ID NO: 807288 - DNA, 522 bp, Homo sapiens
  misc_feature 504, 505, 506, 507, 508, 509, 510, 511, 512, 513, 514, 515,516, 517, 518, 519, 520, 521, 522: n = A,T,C or G
gtgtacagggtcaatgagctattcctgctcatagaagactaccaagacctaaacagatgtgggcaaaatttcttttcccgctctctctctctctccctcccttcctttcttcaaaatctaacaagttctacaagatcttatttatacctatgtatggctctargtttcagattgtggagtattatcaaacactttctggcttctgaaaaagagctttgcaattctgacatttccctaccacaaaccaaaaacttccagattcctaacctcagcatctcctggagaaaagaacatctacaaatgcttgatgatgtctgaaatttctctccccactacatggtgaggacaaaccatgatatgtaatacacgatgactatttgccacccccgacccctgctgatttgctttttgatccataggagcaaagatgccccctaccagataattactagaatttgatctgggagcaaatatggatccatatttgactcttttttttttttnnnnnnnnnnnnnnnnnnn

SEQ ID NO: 807289 - DNA, 615 bp, Homo sapiens
gtatcttgtcaagccaactcacctttaatatatttactattaaagaattgtcttaagtctggccaacatggtgaaaccccgtctctactaaaaatacaaaaaaattagctgggtgtggtggcgcacgcttataatcccagctactctggaggctgaggcacaataatctcttgaacccgggacgcagaggttgcagtgagccaagatcgcaccactgcactccagcctgggtgacacagcaagactctgtctcaaaagaaagaaagaaaaaattgtcttaatcatcatgaatttcatacatccctttttggatcatagaacctgtaatacaactgggtgaccactgccaataatttgtgggggaaaaaacgctaattactatataacttcaatgacttacaaaaaaaaawtatcaactgtggaaaaatcaaaaagcatttgaatttacttgatgaggtaagatacttaaaaaaatatatatctagtatttatttataccaatatatacatttatatatctaatatatatgacaggtacattctacatgtatactaatatatctattagtatatatttatatattagtataaatacatatatatataaatacatat

SEQ ID NO: 807290 - DNA, 554 bp, Homo sapiens
atctttctagcaagcacaaaaaataattatcaaatgctctaatcgtgcacagttaaggggaagtactcaataaaaacaaatgctaggcctctgactcaaatcttttttttttttttttttttggaaacagagtctckctctgtcgcccaggctggagtgcagtggcgtgatttcggctcactgcaagctctgcctcccaggttcactccattctcctgcctcagcctcccaagtagctgggactacaggcacctgtgccaccatgcccagctaatgtttttgtatttttagtagagatggggattcaccgtgttagccaggatggtctcgatctcctgacctcgtgatccacccgcctcagcctcccaaagtgctgggattacagccactgtgcccatttttctttttgttttttaattgagacagagtttcactcttgttgcccaggctgtagtgcagtggaatgatctcagctcactgcaacctccgcctcccgagttcaagcaattctcctccctcagcctcctgagtacctggaattacaggtgtgttcc

SEQ ID NO: 807291 - DNA, 568 bp, Homo sapiens
tggaactcatttaaccttaattactcttaaagaccctgtctcaaaatatagtcacattgggggttagggttttaacatgaatttgagggggaaacaattcaatccatgtcattgggtttctttaaaaattacatcatccaggtagtgtttgaatctagttagaactcaataattatctcttattattcgaattgcggtggttgttgttagaattgcagagcaccatctaaccactgcttgacacctaccatgacaggagctactgagtagggaatagggaaggaagakacactgctgacatgcaatagcagacccaacagccgggccccaggaagtgccccaggaaggtgccatattgggcaggaaagaagaggtaaggaccttacaaagaagagcaggtcaccaatgctaaaagaaaacagtctttatttatttattacacaatcatactaacagctgccaattatttatttaacacttactatgtgctgaacactttattctctctaccaactctttcccaacaacctcaacagatggagaaactgagattcagaaaaacaaaatg

SEQ ID NO: 807292 - DNA, 629 bp, Homo sapiens
gtgattaggtcatgggggcagttttccccatgctgttctcatgacagtgagttctcacaagatctgatggtatttaaagtgtttgacggttcctccttcacaggtgctctctcatgtgctgccatgtaagaagtgcctgcttccccttctgccatgattataagtttcctggggccttcccagccatgcagaactgttagtcaattaaacttctttactttataaattatctctggcagttctttatagcagtgtaaaaatggactaatacactccctaggaatgggagcaagacaaggatgtctactctcatttctcctattcaacatattactggaagtcctagtcagagcaattaggtgtgaagaagatataaaagtaatacaaataggaaaagaagaagtagaattatctctgctagctgatgacatgatcctatacctagaaagcytaatgactgctccaaaggactcctagacctgataaatgacttcagtacagtttcaggatacaaaaataatgcacaaaaaaatcagttgcattcctatacaccagcaacactcaagctgagaaccaaatcaaacactcaatcccacttacatttgccacaaaaaatactatatctaaaa

SEQ ID NO: 807293 - DNA, 629 bp, Homo sapiens
gtgattaggtcatgggggcagttttccccatgctgttctcatgacagtgagttctcacaagatctgatggtatttaaagtgtttgacggttcctccttcacaggtgctctctcatgtgctgccatgtaagaagtgcctgcttccccttctgccatgattataagtttcctggggccttcccagccatgcagaactgttagtcaattaaacttctttactttataaattatctctggcagttctttatagcagtgtaaaaatggactaatacactccctaggaatgggagcaagacaaggatgtctactctcatttctcctattcaacatattactggaagtcctagtcagagcaattaggtgtgaagaagatataaaagtaatacaaataggaaaagaagaagtagaattatctctgctagctgatgacatgatcctatacctagaaagcctaatgactgctccaaaggactcctagacytgataaatgacttcagtacagtttcaggatacaaaaataatgcacaaaaaaatcagttgcattcctatacaccagcaacactcaagctgagaaccaaatcaaacactcaatcccacttacatttgccacaaaaaatactatatctaaaa

SEQ ID NO: 807294 - DNA, 589 bp, Homo sapiens
acagtatttgtccttttgtaactggtttatttcacttagcatgatgtcctcaaagttcatatattttgtagtaggtcagggtttccttccttcttaaggccaaatgatattccaccatatgtatatgtcacaatttgcttatccattcacccttcaatggacgcttgagttgcttctaccttttagctattgtaaatgatgctgctatgaacattgctgtacaaattcagttcaagtccctgctttcacttcttttgggtagatactcagaagtggaattgctggatcatatgggaaatctatctttaattttttgataaccacatcattttccataggctgtaccatttgcattcccaccagaaatgcacaagggttccaatttytccacatcctcaccaatacttatttgctgtttgttctgtttttgtttttaataatagccatcctaatgagtgtgaaatagccacagcagtttttagtctacaattttgagtgaaggtcaggacaccgaatgttgataaaaacagcagcaaccccagcagtagcagcagcattataatcatcagctgctaatagagcactaaga

SEQ ID NO: 807295 - DNA, 629 bp, Homo sapiens
agaagtgtgaggcccctctctctagcagaaaaatagactaaatctatttctttatcttttaacatcctgtttaagggaaatgccaaaacaaatgggaaaaaatacacacacacaaatatatatgaacatgttttgcctcatgagtaatcaaaatgtgtacatatgtatgtttatgtatgtgtgtttatatttaaaatcgtgttctgccttatgagtaaacaaaaagtatacaaattaaaaactataatgaaacgtaattttttaacctatcaatttggcattyttttttgaatgactaaattctaatcagggattaaaatgactggtacaagtgaaaactttcacatcctgttcgcatagtaagtggcaatatgtatcaagtgttttttaaagcatgttttctaactcaataaatttcatctaggagtctggcttaaagaaataatccaggatgcagacgatggtttatttgcaatatgtttatttaagcattagttatgatagtggaaaactggaaataacctaaatcaacactaacaggaaatggctgaataaattctaatagatcaaaacagtggaatttaatgcagtcattttaaaatgtgggtttaaagcaaatttttctatct

SEQ ID NO: 807296 - DNA, 625 bp, Homo sapiens
aggatgggtgagaaataggtctctgtcacagatggaatgtctcccccaaattcccatatggaaaccctgtcccctaatgtgcaggtatgaggaggtggggtagtatcgtgtcatcataagagtcccgagacagcttgcttcctctccctaccatgtgagtacgccgaatctgctggcaccttaatcttggacttccagcctctagaactgtgagaagcaaatgtttgctttttaagccacccagtccaaggtattttgttgsagtggcctgagctaagatcgcctctttcctgaaaagtgggagaagaggaattgagttgaaagagagtaaaggaagaagcgcaggcataaacatcaggtcactttgagaaaagaatgtgctgtgggttgacctacgtcccccaaaaacatatgttgaagtcctaaccccagcacctcagtgtgactatttggaaacaggatcatgaagatgtaattagttaagatgaagtcatgctggggtaggtaatccaatgtgtccttatgacagagacacaaagggagaaaaatgtcagtgacaatagaggcagagccctgggtgacgcagccggaagccaaggactgcgaggtgaggactacaaggtgg

SEQ ID NO: 807297 - DNA, 612 bp, Homo sapiens
cctagaggctcatctgtaaatgaggtcctatactttttctaatctactgaaacgtggccatccatcgacctccaggaatataaaacagaggcagggaaatcaagccaatccatttatacaagttttaagtgcatacaaaaaaaaaaaaaggaaatttaggctatcrtctaaaatgaccttgatgggtccaataccaagaaaaataggatagcacatagtaggtgttcatttttttaactttttctttgcaaataatttcaaacttacagaagagtctcgagaaaaacaattgctcaaaaaacacccccacacccattacccagatttcttacgattcacattgtatcccatttgctttctcacttgctattactgtgtatataatttttctgaaccatttgagaatatgttgcacacgtcatggccctttccccctaaactgcatttcctcagagcagagacagtcttgcatgacgataaaacaatcttgttttgtaattcttccaattttgtaattgttccactgaagttctttatagaattttggcctccagggcaggatactaccctggatctggtcctgcatccattttcgtgtctccttagtcatct

SEQ ID NO: 807298 - DNA, 627 bp, Homo sapiens
cgtggaatgcctacagtgtgggtattctggataaagggatgattcacatgctgggatgtgagggcaaagcaggaaggtgccagatttaatcctgctactcagaatgctgcacaatttaaaacttatgaattatttatttctaggattttttacctaataattttggaccgtggttgacagttggtaaatgaaatcatggaaaatgaaactgtggataaggaggcctatgttagttccatcctgtcttagatttctgtagatgtgtgacaaccaccacaaacaagatacagactgttctatcaccacaaacgtctccctgttgctacctccttatagttgtacccactgcctttcccataccacccctaacccctcataaccagcaacgtttcccatcyatataattttgtcatttaaaaaatgttatatgaatgggaccatacaaaatgaccttttagattggcttttttcgcttaacataatgcctctgacatccatcccagtttttaaatgtatcgatagtcagtgccttttcattaccaagtattattgcatggtatggatgtacaagagtatcacagtttatttagctattcccctattgagggacattttggttgtttccag

SEQ ID NO: 807299 - DNA, 651 bp, Homo sapiens
acctgccaggagcacgacttgatcttccggggcaatgccctccagtgaggctacatgagccttgatctgggcgaccatttcctggccagtcacctcaagggtgtgtagctcctgggcgcggacaaagagctgcatattggtgactgaaccgcggtcccagctgccactactgcgaagatggagtcgagaaagaggaagaagcgagggcgcgtccgtacagaccgcgggctgcatgtcacgtcactgctcagtcatatttatacctacttttaattacatgtggactaagaggtggtttatggagaaatttccaggtaaaaggcagtaactttggggttgtcakgtcattgccatagaaaaaggcagtaactcccgggtattgccgtggcaatggtaaactgacatggcacactggtggttatgtcttatggaaagctgcttcaaccccattccagttttagctagtcctcaacttggtccagtgtctaagccctgccctacatgttgagtctcaactcccacctcaagggcaccacagcagagagcagagagctgcagccaaaaccccaggtttcatgggactggctcattcatgctgggcagatggtcccccgacaggtctcccctaaagtgctccaagtccttctcaat

SEQ ID NO: 807300 - DNA, 592 bp, Homo sapiens
tggcattaatgcatcatgagggcggaactattgtgagctaaatgcttcccattaggcactatcttctaagactgttgcattgaggattaagcttccaacacatgaatttggaggggacaaaaacatttcaaccgtagcaccatttgtctcctttgctgctattggagggagagtcccaatttctcattagtttatgcagcttgctgcttagtaatgacttatcaatgacagttgaaacttgtagttgtatttgatgaaggaaatatgcacatttctttatagcacttagttttttgctttgtttttctactttattaacatgcaggcaaagtgggagtgtttatttttaaagaagctttgagcattagacatgttttaaatctatttcttcgtttaatatcagttgkcttctaagaagtgtttctcatcaaaatggaaacaataaggcttagatatttaagataaaatgtaagttttaagctagttattgtaatgatttacttagtaacttttacttagtaacttatgtgtaacttatgtgccttccagtacttgagagttcctaattttttttgaaacctttggctgcagt

SEQ ID NO: 807301 - DNA, 596 bp, Homo sapiens
atggaatgcacactgcattgcctttctcatattcaaagtacgctagattttggcaaggtgcggtggctcacgcctgtaatctcagcactttgggaggctgaggcgggtggatcacgaggtcaggagatcgagaccatcctggctaacacggtgaaaccccgtctctaccaaaaacacaaaaaattagccaggcgtggtggcaggcacctgtagtgccagctactcaggaggctgaggcaggagaatggcrtgaacccgggaggtggagcttgcagtgagccgagattgcaccactgcactccagcctgggcgacagagcaagactccgtctccaaaaaaaaaaagggtatactggatttcaaagtgaaagaattcagattgggcatggtggctcacgcctgtaatcccagtactttgggaagccaaggtgggaggagtctaagagttcaagatcagcctgggcagcagggcgaaatctcgcctctgcaaataaaatgaaataaaaattaggcgggcatggtggtgcacgcctgtggtcccatttactcaggaggttgtggtgagaggattgcccgagcccaggaggttgaggctgc

SEQ ID NO: 807302 - DNA, 603 bp, Homo sapiens
cctaaatttctatgttaattggacgtggggcctttgggatgtaactaggagcagagacctagtcatcaggtcattggggtggggcccctgatgagaccagtggctttgtaaggagaggaagagaggcctgagccaactcttaatctgtgtcaccatgcgatgccacccacsacgtcatggcacactcaccagaagctgagcagatgccagtgccatgccctgggactttccagcctcaagaactgtaaggaataaatttattttctttataaattatccagtctcaggtattcagttatagcaatagaaaatgaaccaagatataatcttagcattcatctttgtttctgcttcccctatgagtgactgaccatgttctcatttgaggtttacattaatgaggttggatccactcgtcccatcatgacactgaggctcagtgacttgcccaagaccacagggctatgcaggtcctcaaagcagttctattctgctgtgcacagctctttgattttcttcatctattcctaaagcaaagaggaaaaggggtggaatgaaatgtgctcagatcctgagaactcactataggtcgaaggaaaaagg

SEQ ID NO: 807303 - DNA, 603 bp, Homo sapiens
cctaaatttctatgttaattggacgtggggcctttgggatgtaactaggagcagagacctagtcatcaggtcattggggtggggcccctgatgagaccagtggctttgtaaggagaggaagagaggcctgagccaactcttaatctgtgtcaccatgcgatgccacccaccacgtcatggcacactcaccagaagctgagcagatgccagtgccatgccctgggactttccagcctcaagaactgtaaggaataaatttattttctttataaattatccagtctcaggtattcagttrtagcaatagaaaatgaaccaagatataatcttagcattcatctttgtttctgcttcccctatgagtgactgaccatgttctcatttgaggtttacattaatgaggttggatccactcgtcccatcatgacactgaggctcagtgacttgcccaagaccacagggctatgcaggtcctcaaagcagttctattctgctgtgcacagctctttgattttcttcatctattcctaaagcaaagaggaaaaggggtggaatgaaatgtgctcagatcctgagaactcactataggtcgaaggaaaaagg

SEQ ID NO: 807304 - DNA, 629 bp, Homo sapiens
attttgtggtctgcttaggtcttctggaaagtgacctttgcagccattctacacgtagtttccagtcaagaaaaggtggctgagtagaaattggaacttcgtggtggctggtcctgtaaagcctccggtgctgtaatgtctgctgagcacagcctcctgcctgttagcaaacagtgttaaagcttgctaatagcagctagtcctaattctaattcagaaaatagaaatgcccctttagrcattttaaatttataaaccttttcttagaacattttaatgtaactttaatatttttgtagaactcctcttttctaatttattttaggttttacagtgactgatacgtaccatcagcagcctcagtttccacctgtccaacagctacaggattccagcacacttgagtctcaggccctctccacaagcttccaccagcagagcttgctgcaggctcccagctctgatgggatgaatgtagtgagtatggacagaggggtgcatacatggcagtatttagcaggtgctatgttattcttcactgtcattattaaaaatttccttaagggaaattttaagaggcatgctcacttcttgtagcattaaggttactgcattacctgggaaatcct

SEQ ID NO: 807305 - DNA, 589 bp, Homo sapiens
tgaggaaaaagtaatactgagaaacataatcatcttgaagtccaaaattacgtttgtgtctggaaagtcaaggtagaaatctccttttccttacatgctctattacctggttgcctttcactttcgttaatgcagctgaaggtttgggaacatttttatattaaatgtatcacttatgcaacagtaagttttcatgccctaaaaaaatgcaaaagtcttgaaaataataagcacaacagacagaaggtgtgtgaatcagttccttttagtgcaaaaacaaagaggcctcatgtacaacatatcaagtgtatacatgtgtgtggtaagakctttccttttgaaggataaacaagttgccacagtgtgtatctctgggagttagaacggggcaaggctgggagtcgccacacccaccaggtcccatccttttcagtggctctattttttccttgtgtatcataacacttgggggaagtccctctctcaagcccaatttcttccatcagaattacctaggtagacctcatttataggaacaagtatttacacttcgcactttacttgcagtttggaagtttagaattacaca

SEQ ID NO: 807306 - DNA, 589 bp, Homo sapiens
tgaggaaaaagtaatactgagaaacataatcatcttgaagtccaaaattacgtttgtgtctggaaagtcaaggtagaaatctccttttccttacatgctctattacctggttgcctttcactttcgttaatgcagctgaaggtttgggaacatttttatattaaatgtatcacttatgcaacagtaagttttcatgccctaaaaaaatgcaaaagtcttgaaaataataagcacaacagacagaaggtgtgtgaatcagttccttttagtgcaaaaacaaagaggcctcatgtacaacatatcaagtgtatacatgtgtgtggtaagatctttcctttygaaggataaacaagttgccacagtgtgtatctctgggagttagaacggggcaaggctgggagtcgccacacccaccaggtcccatccttttcagtggctctattttttccttgtgtatcataacacttgggggaagtccctctctcaagcccaatttcttccatcagaattacctaggtagacctcatttataggaacaagtatttacacttcgcactttacttgcagtttggaagtttagaattacaca

SEQ ID NO: 807307 - DNA, 593 bp, Homo sapiens
acttctccctctttgctcgtttgtttattaattctgtgtctcttctctctcctttccctgcaaaaaataaataaataaataaataaataaattctattctgtaaccttcagaactgactggcttccaggcaactcaacaattgtggatctgggcagggtgtttttattccgggcccttctcaggactgggccacttagatcttctggggctgtgggactgtccactggattgtgcacttaagtaaatacaccttctcgtctgccaacaaagatgctgagaaagaagctgatagaacagcacggcaactttcaatcactttctgactcatgaatgaactttttctcacctccccscttcctcatggagactttgcttgccagttaccgtgttttccccaagcaattttatacaatgagacggtaacagttgtttgtctgataaagcacgtactatttagaacacagatgtttgattattatttatttctctctgaagcccactaattcagtcccaaatgatctctttttcccttttgcttaaatttcatttggaatgtatgttgttggtaagtgacaggtagtttaattattaa

SEQ ID NO: 807308 - DNA, 624 bp, Homo sapiens
tatctgcatggtgaaatcatgttctgcctggggagagaaagatgagtaattaaatgattatattcaatcctaatatttgatatttgattgtcaatgtctgtttagctagacttacctaaggtatatctgtaaatcaattttatatgcaagcttggtttatacaaaactttaaatgttgagacatttatacagtattagtgaaaaagtttctgccaggattaatctataaatgaagggtacattcttgcaaaatctataattttaacgtataaaacagtcagttgctattctaatcatcctcttatcatctatgctgtcatcttatctgatctgaccatcttattcaaaccwtcctcttcatcaatgcctgcttctataggatgagcttcttttccctctatggtgtttatcatatctattcagtgtgggattaagacgtcaagctgtccttgtcagggggcttataatatagccccaaacgtgagtttccatcctgccctggccccagcatgggctcccagaattcaacaaccctctcctgtttgtccttgattctctctggagagacatccttctcttccttcatgcttttgttgatgtctgcgtatacatacacaggtatac

SEQ ID NO: 807309 - DNA, 518 bp, Homo sapiens
cacagggtttcaggccaggggccctagtgggtgcagctaatgccccagagcccccaagatctgatggctacaaatgaataggtgaggtgtgccctttcaccggaagtcaagggataagtgtctttagctccttgtattagtctgttctcatatggctaacaaggacatacccgagactgggtaatttatagaggaaataagtttaatggactcagttcctcatggctggggagacttcacaatcatggtggaagacgaaggaagagcaaaggcacaccttacgtggaggcaggcaagagagggtgtgcaggggaactcccatttatraaaccatcagatcttatgagacttactcactaccactacaacagcgtgggggaaactgcccccatgagtcaattatctccacctggccctacccatgacacatgggggttattacaactcaaggtgagatttgggaggggacacagccaaaccatatcacttcttcagctgacttgtgggttgctatttat

SEQ ID NO: 807310 - DNA, 621 bp, Homo sapiens
ttacattttttttcctaacatcatctttcaaagaacaaaagtttttagttttgactccaatttatcaaggtcttcttttatgatttgtactttcttttgtactgcatggaaacctttgcttattttattagtttgttctcatgctgctaataaagacatacccgacactgggtaatttataaaggaaaaagatttagttgacttacagttcagcatggctggggaggcctcaggaaacttacaatcatggcagagggggaagcaaacacatcyttcttgtttttttttttcttagacagagtattgctctgttgcccaggctggagtgcagtggtgtgatctcggctcactgcaagctctgcgtcccacgttcacgccattctcctgcctcagcctccagagtagctgggactgcagtcacccaccaccttgcccggctaatttttttgtatttttagtagatacggggtttcactgtgttagccgggatggtctcgatctcctgacctcatgatccacccatctcagcctcccaaagtgctgggattacaggtgtgagccaccatacccagccaaacacatccttcttgacatggtggtagcaaggagaggtgcagaaca

SEQ ID NO: 807311 - DNA, 584 bp, Homo sapiens
aatcatatcattggcaaagacagatagtttgaccttcttttcccatttggatgccttttatttctttctcttgcctaattgttctggctaggacttccagtactatgttgaatagtagtggttagagtgggcattcttgtcttgttccagttctcaaggggactgcttccagcttttgccccttctgtatgatattsggtatgggcatgtgatcaatggctctatttagtttgatggctctattcaatttcctaacttggtggtattttgcccaggttttcattttcttcctgacagcaaaaagaacaaagtcagatgaatcacattgcccaacttcagactaaaccctcacaccttcaatgcctaatatgttcatgttttttatcgttaagggatgttggatgttatcgaaagctttttctgtgtctcttgagatgctcacatgatttttgtttttaattcagtttatgtcatgaatcacattcatggatgtgcagtctttcatcccagaaataaagcctaattgatcgtggtgaattaagtttttgatatgctattcgataggtttgctaggatcttgctga

SEQ ID NO: 807312 - DNA, 517 bp, Homo sapiens
aattttcaaatgatacatcaagctcagagattcttctgctgaaacaagtctcttgttgaagctctgtactatattgttttattttggtacttgaattattcagctgcaagggtgtccatttggggttttttgtttgtttgttttttttttgttttttttttttttttgagacagagtcttgctttgtagcccaggctggagtgcagtrgtgtgatcttgactcactgcaacctccccctcccgggttcaagcattctcctgtctcagccttccaagtagctgggactacaggcacatgccaccacacctggctaatttctgtgttttttagtagagacagggtttcagtatattggtcaggctggtctccaactcctgacctcaggtgatccagccgcctcggcctcccaaagtgctaggattacaggcatgagccaccacatccggctggttcttttttactgtatctatgtttttgttgaatttatcattgacataatgaattgttttcctaatt

SEQ ID NO: 807313 - DNA, 601 bp, Homo sapiens
cagtaactgtctgtttcttatactagcctgtgaattccattaaggctggatgtgtgtttattcaccattatattccatgtgccttgtaccattaggtgctcaataaatatttgttgaatggcaagcagaaaaaatcaaaaatatatgtcctagtctgcctcatctaggaaaatgttatgtacatgttagmcatactgtaaaagcttatgaaatatttgggtaaaaagaaattacaagataagggtaagtttacaagtttgtcttcagactttctagtgaatgtagaaagcagcaattagactcacttcattactgaaaaagccctcctgccaatactatagtcctgctaccaaactgggatgaaatcgtgtggatacttgcctatcttcatctatggcctttattttcaggagcagcacatgatctcttacaaaaattcaatgcaggtttgtggaacttgggaatgtgtcttacctctggttttacaaaccatttgcctgcattcagagtcgataggaaatcccagttgaagaaggcagggttctcgcaggcagattctggctgaacttccccaatattggttgttcttttcaggtcaaag

SEQ ID NO: 807314 - DNA, 618 bp, Homo sapiens
gaaatggcttgcctaaggttgttaaacaagactaaatgactggaaagaattctaccagcattttctagttcacaaagaaccttttcaatacagcgtcttatttatgatgtggatttatgaagtgggtggtattaggtgttctgaagagaagcaagcttgtaggcactatccttcccatccaacagttaaggaaactggagtcccagaatgggggtctttctaggataacatagtgagtctgtcagagctttagtgagaacccaattacatcccaactgcaagcccaccctccattcctgtgtgtccctgcaactcgcccctccccaggtgccaggcgggcagcctagcactggatctctgtgctgtcygccattcatgggcagcctatgtcctgctctgtgcagtggcactccccctctggcatctgcagtccttggacaccccgtctcttgccccactctacaaccccctccccattaaccagtttccaactcctcggtccctgtgagtggcagcctcctctggggtctgtgtggtgcaggggaatctccctaggctcctggggatcctgggttctgggtgcagagaatctcctttgcaccagcgtcctgggttcaa

SEQ ID NO: 807315 - DNA, 601 bp, Homo sapiens
gcacctccccaactccaatccagttcccacagccagggccccaccatccagggtggtgcgtatcctgctctgggctcagcagccgcagccacagccacaggtgaccatgctaatgagaagcacagtccccgcctctgcctcgttcctaaccagctggtggcccaggcaggtgagttcgcctctctgatcccagcccatagtcacggcagcaggtgcaacttctacccatggcaacggacaaagcggaaacaggaaaagcatcctggggtgtcactgggggatggaatgagtagggactttgtctctggtatatttctgtaatgtgtgaatacttaaggggccatgtatgacttttgtaatgggatgaaaacaattaaggtaattttttggtgttcattttaaaggaatccttacaagattgctgtgaagatgaatgagccaaggcttatgacrcacctagcacagtgccaggcacagtgaacccctcataaatgccagctgcaattattgctgggcttgttcttctcttctgcaaactgagtactctaagactgcagcctgcctgttcaaggacaagggcaggacacatgacgatgcagtg

SEQ ID NO: 807316 - DNA, 604 bp, Homo sapiens
gtatcattattattttagatcagacattttctatttattttttaaaaagctaactgtaaaacagcctcagacaggtccttcaggaggtatcccagcagaagacactgttaacacaggagatgacagctccgtgtgttactgccttcccagtgacataatgcggaggtggaagatagtgatattgatgatcctgaccctgtataggcctagactaatatgtgtgtttttgtttccgtttttamccaaaaaaaaaaaaaaaaaagtttaagtaaaaataaatttttttaaaaaagaaaaaagcatatagaattagaatataaaaaaagaaaatatttttgtgcaacaatatcttcatgttttaaactaagcgttattacaaaaaagtcaataagtttttaaaaattaaaaaaattacaaagtaaaaaagttccagtaagctaaagattaatttacacactgtaaatttgtgtcctgtatgattttttatgttttatactgtattttactatgttcagtatgcttagatacacagatacacaattgtgtcacatctgcctgctgcattcagtacagtaacatgctgcacaagtttgtagcctaggag

SEQ ID NO: 807317 - DNA, 577 bp, Homo sapiens
ctgcagccaaaggtttcaaaaaaaattaggaactctcaagtactggaaggcacataagttacacataagttactaagtaaaagttactaagtaaatcattacaataactagcttaaaacttacattttatcttaaatatctaagccttattgtttccattttgatgagaaacacttcttagaagmcaactgatattaaacgaagaaatagatttaaaacatgtctaatgctcaaagcttctttaaaaataaacactcccactttgcctgcatgttaataaagtagaaaaacaaagcaaaaaactaagtgctataaagaaatgtgcatatttccttcatcaaatacaactacaagtttcaactgtcattgataagtcattactaagcagcaagctgcataaactaatgagaaattgggactctccctccaatagcagcaaaggagacaaatggtgctacggttgaaatgtttttgtcccctccaaattcatgtgttggaagcttaatcctcaatgcaacagtcttagaagatagtgcctaatgggaagcatttagctcacaatagttccgccctcatg

SEQ ID NO: 807318 - DNA, 597 bp, Homo sapiens
tgcagcctcaacctcctgggctcgggcaatcctctcaccacaacctcctgagtaaatgggaccacaggcgtgcaccaccatgcccgcctaatttttatttcattttatttgcagaggcgagatttcgccctgctgcccaggctgatcttgaactcttagactcctcccaccttggcttcccaaagtactgggattacaggcgtgagccaccatgcccaatctgaattctttcactttgaaatccagtatacccttttttttttkggagacggagtcttgctctgtcgcccaggctggagtgcagtggtgcaatctcggctcactgcaagctccacctcccgggttcatgccattctcctgcctcagcctcctgagtagctggcactacaggtgcctgccaccacgcctggctaattttttgtgtttttggtagagacggggtttcaccgtgttagccaggatggtctcgatctcctgacctcgtgatccacccgcctcagcctcccaaagtgctgagattacaggcgtgagccaccgcaccttgccaaaatctagcgtactttgaatatgagaaaggcaatgcagtgtgcattccat

SEQ ID NO: 807319 - DNA, 597 bp, Homo sapiens
tgcagcctcaacctcctgggctcgggcaatcctctcaccacaacctcctgagtaaatgggaccacaggcgtgcaccaccatgcccgcctaatttttatttcattttatttgcagaggcgagatttcgccctgctgcccaggctgatcttgaactcttagactcctcccaccttggcttcccaaagtactgggattacaggcgtgagccaccatgcccaatctgaattctttcactttgaaatccagtatacccttttttttttgggagacggagtcttgctctgtcgcccaggctggagtgcagtggtgcaatctcggctcactgcaagctccacctcccgggttcaygccattctcctgcctcagcctcctgagtagctggcactacaggtgcctgccaccacgcctggctaattttttgtgtttttggtagagacggggtttcaccgtgttagccaggatggtctcgatctcctgacctcgtgatccacccgcctcagcctcccaaagtgctgagattacaggcgtgagccaccgcaccttgccaaaatctagcgtactttgaatatgagaaaggcaatgcagtgtgcattccat

SEQ ID NO: 807320 - DNA, 595 bp, Homo sapiens
aatcatttaatttatgagatgaaaataagtcatttactgatgagttaatgggtgcagcgcaccagcatggcacatgtatacatatgtaactaacctgcacgttgtgcacatgtaccctaaaacttaaagtataataataataaaataaaagaaaagaaaaagaaaataagtcatttattaaagtgagtaagagattttyctttagactaccatggtccatattttggctctaccacttacactctgtatatcctttggcaagttatttaatgtgtctagtcctttgttttctcaggggtaaaatgtagataacaagggtgagaactaaaataaggaaaacattaaaagtgcttacaacagaatcgacttatagcgaatactcagtgaattcacagctgtaatcattctttacatcattttattcttgtggttctgaatggtttgccttgctggaacgttcacttcttactatttttacactgtgtcagtaactttagtaaaatataattgtgattgtctaaccccattatggggtgaattgtgtctcccactcccaaaattcctatgtcaaagtcccaacccctaatacctcaaa

SEQ ID NO: 807321 - DNA, 595 bp, Homo sapiens
aatcatttaatttatgagatgaaaataagtcatttactgatgagttaatgggtgcagcgcaccagcatggcacatgtatacatatgtaactaacctgcacgttgtgcacatgtaccctaaaacttaaagtataataataataaaataaaagaaaagaaaaagaaaataagtcatttattaaagtgagtaagagattttcctttagactaccatggtccatattttggctctaccacttacactctgtatatcctttggcaagttatttaatgtgtctagtcctttgttttctcaggggtaaaatgtagataacaagggtgagaactaaaataaggaaaacattaaaagtgcttacaacagaatcgacttatagcgaatrctcagtgaattcacagctgtaatcattctttacatcattttattcttgtggttctgaatggtttgccttgctggaacgttcacttcttactatttttacactgtgtcagtaactttagtaaaatataattgtgattgtctaaccccattatggggtgaattgtgtctcccactcccaaaattcctatgtcaaagtcccaacccctaatacctcaaa

SEQ ID NO: 807322 - DNA, 619 bp, Homo sapiens
ttctggagcatcttctcctggtgcaaatataatgaaaccaacaaacaaaaaagctcaaaaatgaaagacatggactaaacatataagtcctgcattctttaggacatactgattctttgcccactagctttaataaaaaacatgcctctgcccgcaagtgtttgtgtaaaccttgtgaagtaaaaaaccaagctcccagcctaggatctgggaaggcagcttgaatagcttcaactctcacacttggacaccatggcattgrccaaagggattttggaaaaggcaagagaagcacagaaaagttttagaaccttttctcattcttcattacttaaaaaattcctttacttatcacttcttttccccttttccaacgctttttttcccccgtgaaaattagatagactgaatctcacatgtgatacaaaaggacttctcatctgtgggaggggctcttattttctatacagtctctcacaaattcttcagtgtcctgggagtcaggcctgtaagcactggcaatcccagacagctaacaggtacactcactgggctgagggctccccagggatgagaagatggtgtttggatccctgcatgtttgtagaataccttcaag

SEQ ID NO: 807323 - DNA, 656 bp, Homo sapiens
gccaagagaggacaccctggcctatgacttttccctcacagggaaggaaagagtagagcattcagccacaccttggcctttggacacactgtgtgaggaactggtctctgtctcccctcactcagagcactgatggaactggcatatttggatgcctaaggtcactgaggacaaagtgagtacaaaagaaagctgtgactcacacagctcagtgcaatgaaaagaatatgcacaacttgagatttctccctcaggagggaaaggagctcagtatgtgtctgatatactgattttccagggagctgcccaagaaattagtttttttctagcccaaccattatgccagtaggaccccacacgcactctagatgcctcagaactactgagaacaaagacagctgggtgttaagctgctrcatcagaggactcatggtatggcagacagataccacagaaagcaagagattgccagttcctgaaaaacagaaaccaggaaatccctctaattaggaatctacatgcacaaatacagagaagatactttcacagagtagaattgaaggtccccagaatctctatctgggctgattgtaaaagccagtctgggaagacaggaagaggtggctatttcttcaaatgtatagataccaatgcaa

SEQ ID NO: 807324 - DNA, 635 bp, Homo sapiens
gaactaggcgaccacttgggctggcttctggatccattgctgaagagggggccactgaaccatgggcaggtagccacaagggcaatcccagatgagctcccaaatttgcaaccacccaagggtgagacaccttgtccactgcctagacagagcmtattcatcaagacaggggaattgcaatcaagaaagaataattcatgcagagccagctgtgcaggagaccggagttttattattactcaaatcagcctcaaaacagttgttgagatgtttgaagaagtgggagtcagttggcaagaggtcaggtgaatatggtggataaggcacaacttcgtagccgaatttgttcaacttttgaagcattggttgtatgatgtgctgttggatgttgtcatggagaagaattgggccctttttattgaccagtgccagttgcaggtgttgcagttttcagtgcatctcatcgaagtgctgagcatacttctcagatgtaatggtttcactgggattcagaaagctgtagtggatcagaccagcgacagacaaccaaacagtgaccatgacctttttttcgtgcaagtttcaccttggaaagtgctttggagctgcttctcaatccagtcactgagctgttc

SEQ ID NO: 807325 - DNA, 597 bp, Homo sapiens
agtttgttgaggatttttaatataaagtgatgttgaattatatcaaaggcctcttctgcatctattgagataatcacgtggtttttgtttttagttctgtttatatgatgagtcacatttattgatttgcatatgttgaagcaaccttgcattccaggaataaagtctacttaatcatggtggattagctttttgatgtgttgctggatttggtttgttagtgttttgctgataatttttgcatctatgtccatcagagatattggcctgaagttttttttccattgtgtctctgccagattttggtatcagaatgatgctggcctcatagaatgagttaaagacaagtcccttctccttgatttttaggaatagtttcagtaggaatggtaccggctcttctttatacatctggtagaattcggctgtgaattcgtctggtccagcrcttttgtcttcttggtaggtttcttttgttattgattctatttcagaacttgttattggtctgctcaaggttttcttttcttccgggttcaatttagagtggttgtatgttttcaggaatttatccatttcttctaggttttctaattg

SEQ ID NO: 807326 - DNA, 604 bp, Homo sapiens
ttcctctctctgaactgtgggatccctttgaagggttcctggacaaattgaatcctattcacaaagaaatggccaggatgggaagcagaaaccaggtcacagaaagggctttcagggagcaggagaaagtcagacagaggagaaaacttgagataaacataatttttgtcttcgagtctgaaacccattggtctagccttgctctgtggggttccagagggcagagctgacccagaggggggcagtgacagagagggagagcatggggacastgagcggcagggatgtgagctggggaaggggcctggaacatttgtcctgtgggtgaggggtggggcattgtgaccccagagggaagcagaccctgatggctggacctgggtgtggggcaggaatgcagcagatttctggggttggggctgggctgtggtggcccaggagaggggattctctgacttctctttcagatgccctaggccttgcccttaagtgagcctactggaggccttgtctatcaccccttccttggcagggtgtgggcagggagaggggggttaccaggccagggaaagacagaaggtcatgcggcgcagcatgggtatcc

SEQ ID NO: 807327 - DNA, 565 bp, Homo sapiens
tgacagaggcctaacatccagaatctataaggaacttaagcaaatcaacaagcaaaaaacaaacaaccccccatttataaatgggcaaaggacatgaatagatacttctcaaaagaagacatatagatggccaacaagcatatgaaaaaatgctcaatatcactaatcatcagggagatgtaaatcaaaaccatgatgggatgccatttcacaccagtcagaatggttattattaaaaaataataacagatgttattattaacamctgttaacagaaaataacagatgttggcgaggttgtagagaaaagggaaaacgtatacgtggtggaaatataaattagttcagccactgtagaaagcagtctggagatttctcaaagaacttaaaagatgctaccatttgaccctgcaatcccattactggatatatacccaaaggaatataaatctttctatcataaagacacatgcaagtgcatgtttatcacagcactgttcacagtagcaaagacatggaatcaacctagatgcccatcagtggtggactggataaagaaaatgtg

SEQ ID NO: 807328 - DNA, 565 bp, Homo sapiens
tgacagaggcctaacatccagaatctataaggaacttaagcaaatcaacaagcaaaaaacaaacaaccccccatttataaatgggcaaaggacatgaatagatacttctcaaaagaagacatatagatggccaacaagcatatgaaaaaatgctcaatatcactaatcatcagggagatgtaaatcaaaaccatgatgggatgccatttcacaccagtcagaatggttattattaaaaaataataacagatgttattattaacacstgttaacagaaaataacagatgttggcgaggttgtagagaaaagggaaaacgtatacgtggtggaaatataaattagttcagccactgtagaaagcagtctggagatttctcaaagaacttaaaagatgctaccatttgaccctgcaatcccattactggatatatacccaaaggaatataaatctttctatcataaagacacatgcaagtgcatgtttatcacagcactgttcacagtagcaaagacatggaatcaacctagatgcccatcagtggtggactggataaagaaaatgtg

SEQ ID NO: 807329 - DNA, 600 bp, Homo sapiens
tgcagtggaaacagcctgaagcccacagttgatgtagatgctgatgccacaatccttataccgtctgcagaaccatgagccaaataagcctcttttctttacaaattacatagcatcaggtattcctttatagcaacatgcaactgactaagatagaagcattagaaaataaattaaggaagtgagtacatgtaaacaagagaaattgttaaagaacttagccctccaaaactccaatgtttgaagactcagcacagaagactgagaaactagagcctggaatgaattagtaaaataaaaacagagtagaaatctgggaggccaaatgagaaaaatgtttccaggaagaagaatttatcaactgcaacacataaacatttggatctaataatatggaaaacattaagaccttccttactaagaagaaatttggtgataaacgcctgataggattgagttaaamtgtaaatggaagggaagaaagtgagaaaagatttgctgtcaataatatcaggtaatagggcagtagcttaaggagaaaatgggttcatcaaagtttattttggtttctgcttttcaaattgagagacatcactgtcc

SEQ ID NO: 807330 - DNA, 602 bp, Homo sapiens
cttccctgaacactcatcccccatcagatgatgggagtgggaagaataaaatgcagtgaaaccctaaactctcttcttttttttttctttttttgtatttatacattttgcttgtttctttttttttaaattttattattattatactttaatttttagggtacatgtgcacgacatgcaggttkgttacatatgtatacatgggccatgctggtatgctgcacccattaactcatcatttagcattaggtatatctcctaatgctatccctccccgctccccgctagactctcttcttaaccatttgtcagcagctttgggaagaggttggatggttagaagaagagatttacagttagttaatcccaacactttgggaggtcgagacaggcagatcactggaggtcaggagttcgagaccagcctggccaacatggtgaaaccctcctctacaaaaagaaagccaaaaatacaaaaattagccaggcatggtggtgcatgcctgtaatcccagctgactgggaggctgaggcaggagaatcatttgaagctgggaggcagaggttgcagtgagctgagatcataccactgcactccatcc

SEQ ID NO: 807331 - DNA, 629 bp, Homo sapiens
cactattattattattattatttgcttaaagtcatacagacggtaattagaaagagccaggatatgaacctggcagttgggctctctagagtctccactcttaactgctgcacaaaatagcattgtttccttagcattttctatgtgtcaaaaactatggtaagcacataattgaattttattcttatattattattcccattttccagatgaggaagccaaggattagtgaaataaaataagttaacatagctggttagtggtgaggcccagatcaaacctatttttgttttgcttctgtttgtctgttgattctagcatccaagatagtgtgcactctgccataacctctagttagagagtaggaccrtaaaacaataaaaaggaaacacttaatattgaccctttttttcaaatgagaaaactgaaacacagaataaatagaaacgcactcaagatcaccaatctatttactgaaaagctgtgacaaaatcttttaagcagtctatccagagatcattcaagtaggctatctttcctatttaaagtatgctttctggtctttttctcattaagttatgactacagtgaaggatattcaaattaaaattgtatgatataatttacag

SEQ ID NO: 807332 - DNA, 554 bp, Homo sapiens
aaatggctaaatcaagccaattaacattttcattacctcacatatttagtatttcttatgaagagtatatttaaaatctcccatcttagcaattttcaggtatgcaacacattgttattaattttagtcattccatttattgctgcataacgatgaccacactttgtttattcactcacttgtaggagatttgaatgttttctatttctagtaattatgaatagagctgctataaatttttatattcaggtttttgggtgaacatattttcattcatcttgggcaactactcaaaactgggattattaggtagtgtggtaagtgtaacatcatgggaaaatgtccaactcttttccaaagtggctgtctcatttttcattyccaacagtaatgaatgaaagttcctatcctaggagtttgattttcatgcctgtcaaaagtaaaatgtgtgtttctggcatgatactctcttgtcatgtgctagttctggtaaatttcctaagtcatttattatttatttttgaaaaaaatagtccttacatgttctgtcatca

SEQ ID NO: 807333 - DNA, 644 bp, Homo sapiens
caagaggaatagttaaaagggacatgaagagtttatctccttatatattctcgttgttaatcccttgtcagatgggtagtttgcaaaaattttctcccattctgtgggttgtctcctcactttgttgattgtatcctttgttgtgcagaatctttttaacttratgtgatcccatttgtccatttttgctttggttgcctgtatctgtggggtattgctcaagaccaagaccaatgtcctggagagtttccccagtgttttcttgtagtagtttcataatttggggttttagatttaagtatttaatccattttgatttgatttttgttatatggcaagagatacgggtctagtttctttcttctgtatatggatatccagttttcctaacattatttattaaagataccgtcttttccccagtgtgtgttattggcacttttgtcaaaaatgagtttactgtaggtgtgtggatcgtttctgggttctctattctgttccattggtctatgtgtctgtttttatgccagtaccatgttgttttgtttactatccatctgtactataatttgaagtgaggtaatgtggttccatcagttttgttctttttgcccaggataattttggttattctgagtctttta

SEQ ID NO: 807334 - DNA, 644 bp, Homo sapiens
caagaggaatagttaaaagggacatgaagagtttatctccttatatattctcgttgttaatcccttgtcagatgggtagtttgcaaaaattttctcccattctgtgggttgtctcctcactttgttgattgtatcctttgttgtgcagaatctttttaacttaatgtgatcccatttgtccatttttgctttggttgcctgtatctgtggggtattgctcaagaccaagaccaatgtcctggagagtttccccagtgttttcttgtagtagtttcataatttggggtttkagatttaagtatttaatccattttgatttgatttttgttatatggcaagagatacgggtctagtttctttcttctgtatatggatatccagttttcctaacattatttattaaagataccgtcttttccccagtgtgtgttattggcacttttgtcaaaaatgagtttactgtaggtgtgtggatcgtttctgggttctctattctgttccattggtctatgtgtctgtttttatgccagtaccatgttgttttgtttactatccatctgtactataatttgaagtgaggtaatgtggttccatcagttttgttctttttgcccaggataattttggttattctgagtctttta

SEQ ID NO: 807335 - DNA, 500 bp, Homo sapiens
tttgtgcacatttctttccctctaaatccagtcctactgatgcactaggtgcaacatttatttggtccctccttcatctatctgtgaggaagttcctgcacccagtatacccaggggtaacataataggttaagaaatcatcaattctaaatcagaagcctactatctccaactaagccattgtctcctagaragacatgacatgggcactgcattattgagcttttcattgtcaatgcacccctggaagcctggaattctacagtacacaacctgtgcagccatgaaaccaaggctgaggcttggattaccccctgggctagaaataggctttgaatcaagccatcgcatgtattaaatgcctcctaaatgatcgttctttgtagatgttgctcatttttgcacattctatgtgacatgaatttttcttcaagaggattattaggcctcccctattattcatggaacaatgtctactgggacatcaagggttcataagg

SEQ ID NO: 807336 - DNA, 630 bp, Homo sapiens
atcatctagtgtgcggtcttttcagagtggcttctttcacttagtaatatccttttaagattcctcaagtctttccatggcttgatagctaatttctttttattactgaatgatattcctttgtatgacgtaccacaattcatttatccattctcctgctgaaggtcagattgcttctaagttttcatagttatgaaaacttgtattttaagattaaaatctggaagtttttattgatattaggcattcgtttcttagggctgctataataacagagtaccacaaactgggtagcttaaaacaacagaaatttattctttcatagttctggagcctagacatcagaaatcaaggtrttagcagggttggcacctgccaaccaagagagctttgagggagaatctattccatacctttctcctagctgctcatgagggttagccatctttgatgttccttggattgtaaatgcatcagtccaatctctgcttccctcttcatggggcattctccctgtttcttcacattgctgtcttcttgtgaggataccagtcatattgaattaggggcccaccctacaccagtatgacctcatcttaactaattatatctgcaacaaccctatttcca

SEQ ID NO: 807337 - DNA, 570 bp, Homo sapiens
cactgctgtctttctagaatgttgcaacaaatttgaattgaaagttcctgtcttattcccactcttcagaagtaatctttaacaggtatcccttgaaatactgtaaattctataattgtgccaaacgatttcccagactctcagtgtcagaaaggaagctgaacttctgttctttcagtagtttgttgctggttatgagttggtggttttgttgtttcaaaggtgtgggtcatatratcacttaattttgtataatttactgctccagtattttcctaatttgtttctattagggctctaagaagtataattttacacgagttaggtaggagatagaatattttattcatgaaatataaaaagattaagtccagaaaaataaggttcttctttctagccatagcttattttgaacaccaaatattttctcattctattttgtagatgtagatttaagtctttgagaacattgatgatgatagcattctgtgcttttatccttgttctgtctttttatttaaagagaattatgtggttaaaaaagaagcaggtcattttgattgcaaagag

SEQ ID NO: 807338 - DNA, 612 bp, Homo sapiens
atctcctgacctcgtgatccgcccacctcggcctcccaaagtgctgggattacaggcgtgagccaccgcacctggccagtttttgtttttgtttttgtttttttaccttatgttctttttttgttgttgttccaggatccaatctagcrtatcacattatatttagtagtcatgtcttctgttagctatgacagtttctcagattttccctgtttggaggaccctcatagtttttaggagcagtagttagatattgctaccatttaaatgtcccttccaaaactcatgttgaaatttaattgccattgtagcagtattaagaggtgggacatttaagaggtgattaggccatgagggctcccccatcaggggtaggattggtgccattataaaagggtgagcttggccccctcttgccctctcttgaccttcactattccaccaggggaagatgcagcaagaaggccctggccagatgccagcccctcgatcttggacttcctagcctccagaactgtgagccaataaatttctgttcattataaattacccagtctcaggcattctgttgcagcaacaaaaacgaataagtcagatattttgctgaatatc

SEQ ID NO: 807339 - DNA, 562 bp, Homo sapiens
gcatcactgaacttttcagggatgtaggatgttctaagctccaacttccagctagtctacctaacactgtttgaaattctttggtgtagtatgaagatggaaataaacagctctgaatgctgggggaaaacaaacaaacaaacaaatgtaggactaaataggaaaggacactggaacttgctccagatatcaaaagttccttgatatcyacttacttttaaattatttgcctctttcaaataaagagaaaggatacctatgcagttgcatgatttcagagctgagcttccactaaattaatcactgaatcaaagtctgttgtgttggagaaaaataaatatgagatgtggagtcagaagaccttgaaaataccttttcattttgtttcctcttttaatgggtcatactaactctgctgtaaatatcaaccctcagaactgtgaggatccagtaacattatgacaaattgccctcaaatattgttattattacagaccatgcagcaaatacttccttggcagctgaactgaccggagcccctagggtaccttaatcatggccc

SEQ ID NO: 807340 - DNA, 667 bp, Homo sapiens
tatctttgagaagtctatcaggtttttcttacacacgtgatagacatgtaatttagtgcttcctattattccaggatacagaaatgaacaatagtgtctaccacctggatgtacactgtttaataggtgaaatagataygtaaaagcaattaaaatatgataaatgctatgagagagatgtaaaaagtgttataggtgatctgataatggactgattgattacctggcagttttaaggaagcctttaaaaataatatatttgaactgggttttaaagaatgatataaatgttgctaatacaccaaaaaaatgtcatctgcaaatatggtttgttcacaaaatggagagaaggggaggatgataggacatgaggctaggaaatgtaggttgcagctcaatgatgtgtatgtagggccttattttccattctgaaacatagttagtggatttatatcaaaggatttcaaatagaagaacatcatgatgagaataattttaggatttatatactctactttagggggtggagagttctttttacctaggcttagggaatagaaagtggtgtagagaatataacttcaattacttctttcatcatttttcttcctttagtccacaagccctagccatgccgtggtagccaatgttcagcttgtcttgcatc

SEQ ID NO: 807341 - DNA, 667 bp, Homo sapiens
tatctttgagaagtctatcaggtttttcttacacacgtgatagacatgtaatttagtgcttcctattattccaggatacagaaatgaacaatagtgtctaccacctggatgtacactgtttaataggtgaaatagatatgtaaaagcaattaaaatatgataaatgctatgagagagatgtaaaaagtgttataggtgatctgakaatggactgattgattacctggcagttttaaggaagcctttaaaaataatatatttgaactgggttttaaagaatgatataaatgttgctaatacaccaaaaaaatgtcatctgcaaatatggtttgttcacaaaatggagagaaggggaggatgataggacatgaggctaggaaatgtaggttgcagctcaatgatgtgtatgtagggccttattttccattctgaaacatagttagtggatttatatcaaaggatttcaaatagaagaacatcatgatgagaataattttaggatttatatactctactttagggggtggagagttctttttacctaggcttagggaatagaaagtggtgtagagaatataacttcaattacttctttcatcatttttcttcctttagtccacaagccctagccatgccgtggtagccaatgttcagcttgtcttgcatc

SEQ ID NO: 807342 - DNA, 667 bp, Homo sapiens
tatctttgagaagtctatcaggtttttcttacacacgtgatagacatgtaatttagtgcttcctattattccaggatacagaaatgaacaatagtgtctaccacctggatgtacactgtttaataggtgaaatagatatgtaaaagcaattaaaatatgataaatgctatgagagagatgtaaaaagtgttataggtgatctgataatggactgattgattacctggcagttttaaggaagcctttaaaaataatatatttgaactgggttttaaagaatgatataaatgttgctaatacaccaaaaaaatgtcatctgcaaatatggtttgttcacaaaatggagagaaggggaggatgataggacatgaggctaggaaatgtaggttgcagctcaatgatgtgtatgtagggccttattttccattctgaaacatagttagtggatttatatcaaaggatttcaaatagaagaacatcatgatgagaataattttaggatttatatactctactttrgggggtggagagttctttttacctaggcttagggaatagaaagtggtgtagagaatataacttcaattacttctttcatcatttttcttcctttagtccacaagccctagccatgccgtggtagccaatgttcagcttgtcttgcatc

SEQ ID NO: 807343 - DNA, 616 bp, Homo sapiens
atcagtttggctaaagtaaaaataaagctcccgtatttaaaattattctaaaaataatggaacaaaaataaaattcttttcatagtattaatacattaccaattacatctgttcatccatctggaaattgcttctttgcctcctcagactagtttctagaatrtctttctcctcttctcccatttgtgaaaatccttcccattcttcttttctctgtgtctgattttttgcctccttcatgagtctttccttcaactccccttgtttctcactcgccctgttctgtactttggcaatattgccttaatttaggacaaccagaatttgtttactcatgtctacttgtttgtgtattgttttatatatatataagcatatatttatttatattaatatttaagtgttaaatgactagtgcagtagattttgaagtctttaaaagaaagcctagaatgtattatttttcagttagcatgagagttaaccaaaaaaaggtactcttgtactttttgttgtcagaaaaaaaatattttcattaaattctccttttccttcctgccttggttatttggtatagctggagaaacagaagttagagaagcagaagaaggaatta

SEQ ID NO: 807344 - DNA, 486 bp, Homo sapiens
tacagacagcttcacttcttcctttctaatttgtataccttttattctttgcgttggtttttgcatgaattagaaccgtggtctaggacccttgtaatgttaaatagaagtggtaaaaacagacatacttgttatactctcakccttaaaattgaatcttttatcattaagcaggatgttagctgtgtttttttgtttgtttgttttttgtagatgccctttatcaggttgaaaagattccttctatccctaatgtgctgagatattttaccatgaatatgtgttgtattttgtctaatgccttttctgcatctaatgatgttcatatagtttttcttctttattttattgatatggtgaatggtaatgatattaattagatatttaaggtaaatcaactttgcaatcctgggataaatcttctccattctatgtcatttctttaatgtactgctggatttcatttgcttataattcagagtaatt

SEQ ID NO: 807345 - DNA, 540 bp, Homo sapiens
agagggaatcacagtgaggggtttcagactctcctaagtctttctcctctgtggcatttaaaaatgttatttagggtttttttttttttttttgaggtacaaataaatacattttatcaagggctgacaaagactgtctgaattcccattcctctgaaatgacatctttcaatgatatgacctctagtggctacattcatgacatttacagtcaaagttgaaccagcgagggtggaagggcactcgggagtggccgctgccaacagcaacagactgcccagaagaggctgtctgcagtcagagtcatggaaaaggcaaattytgaaacccaaaacacgcactgaccaaagtcccgtgcggaactgcagaaatgcaccacgttgctcagactggccatttctcagtaacaacttcgaatgctggaaattgttatcacacctcatagcaaatgttttaattaaagaatcaagtaggtagaacagaaccttctgtacaatctcacaaacaggttaaagatccatttgaagctacttcagtaac

SEQ ID NO: 807346 - DNA, 636 bp, Homo sapiens
taatatagatgttaagaaagaatgtggccttaggtctagactgcttgtgttcaaatcgctctcataaaattattttttattgataaatgtacatatttttggtgtacatgtgataatttgatacattcatttgtatcaaatttgataatgtataaagatcaaatcaaggtaattggggtagccatcccttaaatatttcttttatactaggaacatttgaattatttttttctagttatttttaaatacacaatagattatggttaactataatcaccctactgatctgtcaaacactagatcttatttcttctactcaattgtatatttatacccattaatcaacttctgttcttgctctctccgtgctacccttctggcctttggtaatcgccaatcaatctactctctatcttcatgagaccagcgtattttagctcccacatatgaatgaaaacatataatatttgtctttctrtgcttgacttactttacttaacataatgacctccaattccatccatcttgtggcagtgacagtatttcattcatttttgtgtgaattatatttcgttgtgaatatacattacattttctttatccattcatcactgatgtgcacttaggttgattcca

SEQ ID NO: 807347 - DNA, 636 bp, Homo sapiens
taatatagatgttaagaaagaatgtggccttaggtctagactgcttgtgttcaaatcgctctcataaaattattttttattgataaatgtacatatttttggtgtacatgtgataatttgatacattcatttgtatcaaatttgataatgtataaagatcaaatcaaggtaattggggtagccatcccttaaatatttcttttatactaggaacatttgaattatttttttctagttatttttaaatacacaatagattatggttaactataatcaccctactgatctgtcaaacactagatcttatttcttctactcaattgtatatttatacccattaatcaacttctgttcttgctctctccgtgctacccttctggcctttggtaatcgccaatcaatctactctctatcttcatgagaccagcgtattttagctcccacatatgaatgaaaacatataatatttgtctttctatgcttgacttaytttacttaacataatgacctccaattccatccatcttgtggcagtgacagtatttcattcatttttgtgtgaattatatttcgttgtgaatatacattacattttctttatccattcatcactgatgtgcacttaggttgattcca

SEQ ID NO: 807348 - DNA, 744 bp, Homo sapiens
atgtgccaccatgcccagctttattggagtgttttgatcacaggagtgacatgatctgacccatgtttaaagggatcattttgagctgggcatggtggctcatgcttgtagtcccagtagtttgggaggccaagggcgggtgcattgcttgaggccaggagtttgagaccagcctggccaacatggtgaaacccgtctctactaaaaatacaaaaaattgctgggcgtagtggcacacacctgtaatcccagctacttgggaggctgaggcaccagaatcgcttgaacccaggaggtggaggtttcagtgagccaagattgcgccactgcactccagcctgtgcaacagagcaagaccctgtctcaaaacaaaaataaaaggatcattttgctgttgtatttataatagactgcagttgagggtgcggtagtggcatgcgtaagaaatagggagagtarttgggaacctgatgcaataattcaggctactatttcggttggccagtatacaggcagcaaaggtagtgagaagtaatcaggttctgtatatattttgaaggagccagtaaaatttgttgatggattagatgtggggagtaatggaaaggggagtcaaggatggctccaaggcttatgggcctgaacaatgtggagagaacttccattaaccgagacggggagataatataaggtaaatgtgtgtgaggaggctaaggagctcaacttttgacatatgttagaaat

SEQ ID NO: 807349 - DNA, 557 bp, Homo sapiens
tggttccaagatttgctcctccttgttgtaaatttctgtgaagaatctgcttatgttctagggccacagacttcatatttcagaatcagatgagaatgtcttctagttccttcctttccaaaaggataaagatttggacatttctcttttgtactggctgggctgctaagtttaagggtattgtctaaggcaattgtctcaataatttaagccaggaggattaggctctttgcacatgcctatcaactcaagagcctgctgtcttgtcaaaaaccatgctgtcatcttggcatcratttgaccaaggtggcaacataagtggtgtctctctcaaggccctaaatacagaaaaaagctatattcagattgcattttttacggcaagctgtgtatctgctctacccattctggacaacacaatcttatctgtaaaattcaaagtttggaaccttataatgcctgcaaaaaagttgagactaaacaagcccatgctatggaataacctccatacacactactatgcaaattatttaaccttaagtatacatattaataaa

SEQ ID NO: 807350 - DNA, 607 bp, Homo sapiens
tatatatttaggatagttagctgttcttgttgcattgatccctttgccattatgtaatgcccttctttgtctcttttgatctgtgttagtttaaagtctgttttatcagagactaggattgcaaccctgctttttttttctttctttccacttgcttggtaaatattcctccatccctttattttgagcctatgtgtgtctcagtatgtgagatgggtctcctgaatacaggacactgatgggtcttgactcttcatctaatttgccagtctgtcttttaattggggcatttagcccatttacatttaagattaatattattatgtatgaatttgattctgtcattatggtgttagctggttattttgtccattagttgatgcagtttcttcatagatcgatggtctttacaatttagcatgtttttgcagtggctggtactggttgtycctttccatgtttagtgcttccttcaggagctcgtgtaagataggcctggcatagacaaaatctctcagcatttgcttgtctgtaaaggattttatttctccttcacttatgaagcttagtttggctggatatgcaattctgggttgaaaattatttg

SEQ ID NO: 807351 - DNA, 608 bp, Homo sapiens
agtagaaaatcggtaacaaaatggcagtgttaagcccttacctattaataattaccttgaatgtaaatggactaaattctgcaattaaagacgtagaatgattgaatggattttttttaacttaattatatgctgcctataagagactcatttcaactataaggacacacgtagacttgaattgaacaaaaggaaaaagtatttcatgcaaatgaaaactaaaaaagactaggagtagctatgcttatatcagataaaataaacattatggtcttgtttctttttgcagttttttttttttttggccaaaaactgcaaaaaaaaataaaaccttttttaatacttarggggtcaaaacagcaataggataaaacaattataaatatttttgcccccaacatcaaagcacctaattttttggggcaaattttaatagacctaaagtggagtgatagtctgcataaaataataataggagactttcagcatgggacagatcatccagatagaaatcaacaaagaaatattaaaattgactcacatcctagatccaacatttacagaacatttcatccaacagctacacaagacaaattcttctcagaagc

SEQ ID NO: 807352 - DNA, 632 bp, Homo sapiens
aaacactttttgccaaaacattgtaacaggcaccatgactataaatatatgccctcaagtttcttctggtctaataagaaaaaaaaatatcactgttcattaggactggcactcatttctaaacagaaagcctgtatcgaaagcaaatttagtgggaactgagatctgttgactgaattatggttcccctaaaaagacaagtgagtatagtatcctgttargtagaaaatagaaaaaatctagtccctgtagactgtttttcttctaggtctactctctagctccccaaatattaatctgatccggcactacaaaacactgcacgaagcactacaaaaacccacaccttcaaaggtgccaggtggtgaggcaaatgtgggtcaggtaaagagaacagactgaagtcaatagttctgaactggagctaaataaagccatgcaaacttgagcaagtcttttttttttttttactgtaaatcaacaaattacagttgtttatattcatggagtacaaagtgatgttttgatatatgtatacagtgtggaataattaaattaagctaattaatatatctatgacctcaaatacttaccatgttttgtgatgagaacatttgaaattcactctcata

SEQ ID NO: 807353 - DNA, 614 bp, Homo sapiens
tggctattaagaataatgcttctatgaacatttgtgtacaagttcctgtgtaaacatatgtttttatttatcttgcatagatacctaggagtggaattgccacttttattttgagaaacttccaaactgtttttcaaagttttccatcagcagtgtgtgaaagtcccgatttctctgaattcttgctaacatttgtcattgtctgtcattttgattttagccatcctggaggatatgaagtattatctcattgcagttgtgatttktatttccctaatggttgatgatattgagcatcttttaatatggtaactggccacttgtatatcttttttttttttttttgagagaaatgtctatttcctttgcatttttaaaaattggattatttgtctttttattgttgtaagagttaaagaactgtatttgatttctggttacaaattccttatcagatatatgatttgcaaatattttctcccattctggggcttgtcctttcactttcttgacagtgtccttggaagcacaaaattgttcaattttgatgaagtataatttatttactttttcttttgttgcttgtgcttttggtcccttatgtagggagacca

SEQ ID NO: 807354 - DNA, 614 bp, Homo sapiens
tggctattaagaataatgcttctatgaacatttgtgtacaagttcctgtgtaaacatatgtttttatttatcttgcatagatacctaggagtggaattgccacttttattttgagaaacttccaaactgtttttcaaagttttccatcagcagtgtgtgaaagtcccgatttctctgaattcttgctaacatttgtcattgtctgtcattttgattttagccatcctggaggatatgaagtattatctcattgcagttgtgattttyatttccctaatggttgatgatattgagcatcttttaatatggtaactggccacttgtatatcttttttttttttttttgagagaaatgtctatttcctttgcatttttaaaaattggattatttgtctttttattgttgtaagagttaaagaactgtatttgatttctggttacaaattccttatcagatatatgatttgcaaatattttctcccattctggggcttgtcctttcactttcttgacagtgtccttggaagcacaaaattgttcaattttgatgaagtataatttatttactttttcttttgttgcttgtgcttttggtcccttatgtagggagacca

SEQ ID NO: 807355 - DNA, 523 bp, Homo sapiens
acatgatgacattttatttttatttttttgagatggagtctcactctgttgcccaggctagagtgcagtggcgcaatctcagatcactgcaacctccacatcctaggttcaagagattctcctgcctcagcctcccaagtagctgggattacaggcatgtgccaccacacctggctaattttttgtatttttagtagagatggggtttcaccacgttgaccagcctggtcttgaactsctgacctcaagggatctgcccacctcggcctcccaaagtgttgggattataggcgtgagccaccgcgcacagccagacatggtgactttttaatctcttattcttttttatacttccctgtgttgattgagcattccaaggatgtgctatctttataatccagaagaaattaggaatttagaatttaggaaaaaatatacgtatgtaaaaaactggaagaaaaccctcaaatggccataccttttggttggaattatagatacatttttttctcctttcttctct

SEQ ID NO: 807356 - DNA, 651 bp, Homo sapiens
tgctttgatttaaggcagtttcccaagataaattaggagggaagatagtcaaaaaaaggaaaacaaaaacgagtacaaaaatgaagccaggaatagttgttatccaaaactgtaaagtctgtcagaatactaacctttatttaacaacctctaggttctgttctaatggtaactatagaaccttcgcttgtttctcaaaatgtgatgttctggtagttcatttgtcatcctgataagattgaagttaagaaatagactcatttttgctttgttgtaactttcctcttataatctttttttttttccctaattgaatggtagctartaaacaatctgtattgtttggcctgtatttctttttcatcagtctgtcttccctaatatgacagggcagttaggaattttttctttttcttttttctttttgtagacataggatcttgctctgttgcccaggatgctcttgaactcctggcctcactcgatgctcctgcctcggccacccaaagtgttgggattacaggcatgagccaccatgcttggccagattttttctttgattgcttttctagaatctgttttcacttttgtgtttgtttctattttccttctatatgtgcaggatatattcagaaaaagtagaaattttat

SEQ ID NO: 807357 - DNA, 537 bp, Homo sapiens
gtttaaatctttttcctttggttcatgtaaaggagctacttgatgttactttttatttatcattcctctggctcctaagcacaacgtgattgtgaaattattgtttttgtgattaacgtagtaggaagtttctgcagttggcaatattgtaagagcatattgcagtttctgctcataatttctttcctatggagtgttagactttgttatttatgtgtataaatactagctggacacagtggtgcctgtggtccccagctactctggaggctaaggcaggagaaacacttgagcccagcggtttgaggctacagtgagatgtgatcctgccacatctcactgtagcmtcgaacccctgggctcaagtgattcagcaagaatcacacgatttttaaaagacatggcagatcctgtgtctttaaaaaaaaatcaaaaccttgtaaatagtggttgaggtctatcccgatggggcttttcctgtagcctgcacatcgttggaaacgcctcatagagtaactctgtggttttactttactc

SEQ ID NO: 807358 - DNA, 537 bp, Homo sapiens
gtttaaatctttttcctttggttcatgtaaaggagctacttgatgttactttttatttatcattcctctggctcctaagcacaacgtgattgtgaaattattgtttttgtgattaacgtagtaggaagtttctgcagttggcaatattgtaagagcatattgcagtttctgctcataatttctttcctatggagtgttagactttgttatttatgtgtataaatactagctggacacagtggtgcctgtggtccccagctactctggaggctaaggcaggagaaacacttgagcccagcggtttgaggctacagtgagatgtgatcctgccacatctcactgtagcctcgaacccctgggctcaagtgattcagcaaraatcacacgatttttaaaagacatggcagatcctgtgtctttaaaaaaaaatcaaaaccttgtaaatagtggttgaggtctatcccgatggggcttttcctgtagcctgcacatcgttggaaacgcctcatagagtaactctgtggttttactttactc

SEQ ID NO: 807359 - DNA, 642 bp, Homo sapiens; identical to SEQ ID NO: 805307

SEQ ID NO: 807360 - DNA, 625 bp, Homo sapiens
ccacatgtaccatttctttagctcccacttacaagtgagaatacgtaatattttattttctgcttctgggttagttgactttgggtaatggcctccagctccatccatgttgctgcaaaggacatgatttcattcttcttttatgattgtgtagtattccattgtgtatatatacaccatattttctttatccagtcaacagttggcagacatgtaggtggattccatgactttgctctaattgtaaatggtgctgcaataaacacacaagtacaagtawctttttgatataatgatttcttttcctttgggtagatacccagtagtgggattgctgggtcgaatgatagttctatttttagttatttgagatatcgctataccgttttccatagaggttgaattaatttacattcccaccaacagtgtgtgagtattcccttttctctgcatacacaccaatatctgttgttttttgactttttaataaaagccattctgactggagtgagatggtatctcaatgtggttttaatttgcatttctctgatgattagtgatgttgagcattttttcatatgtttgttagctgtttgtatttcttcttctgagaaatgtctgttca

SEQ ID NO: 807361 - DNA, 589 bp, Homo sapiens
accagcggctggcaggaacctaggagcaatggtttagtattcactgattcagtgtttgcggtgacattctagaacataactatgacaaacaatgagaatcaactgtactcctaaaactggttgaatcacagtttaacatacsaagactttcactatctgccttctgccatacctccccagcctcatctacccaccattacccttcagtgcaattcatattacagccattttgaaccacttgtagttccaagaacccaccaaggtgttctgtgacattaaacctacagtttcttctgcctgaaaatgcctttctctcatttcttcccatttagctaataactacatttagctgtttacagtccaatagtcatactcaagccttttctcaccctcacatatctcctagtctgatataaatgcctctttctttaattctctaggaccctgggcatccccctgtcatcatccttgaaatacagtactgtggtgtcattgctctgtttctcctgtagcttccaagtttcttaaggtgaaggaccatggcttttttgacattataatcacagagccttacaaataggtgatctcc

SEQ ID NO: 807362 - DNA, 658 bp, Homo sapiens
gtacatatatataaattatgttcttttttctacttaatattataacctaggcgttttgtttattatatataactttataaaaacatttttgttagctgcatggtgttctaccttgtggatgaatatcgttttacctaacaattcccttattaatgagtattatgtaattttcagtttttgtttatagtaaataatacgcagtgaatatttttgtgcctrtaactgagtgtgcattttacattttttttagggaggagaaattgctggtaaagtcctaaaaggaaatttcctaagtaacaaggtattatttttacattaaagagtagtgtatttttattaccaaatctgtcgtgtttattattgagaaatttaaaagtataaataggaggccaggctagatggctgacacctgtaatcccagcacagtgggaggccaatgcagatgggttgcttgaggccaggagttggagaccagcctggtcaatatagcaagacccagtctcattaaaaagaaaaaaaaaaaaaaacttacaaataaatgaaaagaattccccataaaatcacaaccccaaagataaccataactagttattttcagaccttttctataatagataacttgagttttcctcaacaccatatacctctcatattgctt

SEQ ID NO: 807363 - DNA, 549 bp, Homo sapiens
tccctcccacccttctcccctctactgaaggagattcatcacacctatgccctgccagggctatgctgggcccaggggaggcaggagtgaccaagacacacacacgtgtgtgagaccatggagcttacagacactaggcagaggcagaccatgggcarataattccatagatgattattttaaggcaattatcgcaagtgctgcaaaggagacaagggctcttcctgagcctttctgagcttctatctgctcttctgcaacatggagaatgagccatcagagccgctgctgcaagaactacgcaggacacgcatacacacatgagcacacattcgtgtatactcatgcacacacatttgcacatatgagcacatgcactcacacagatgtacacaatggcacatacgtacacatactgcaaatgtgcacacacacatgagcacgcgtttgtgtatactcacgcacacacatgtgcacacatgagcacatgcactcacacaaatgtacacaatggcacatgcgtacatataaccaaatgtgcacacacac

SEQ ID NO: 807364 - DNA, 484 bp, Homo sapiens
tgcagagtcgatgaggtgaaaccaactagatggagtgagaggctgctgggggaggggtgggtggggggaagggcttgccttgtcctcctggacggaagaaaggacaggctggggatggctgtgattgggtgtggacccacggaggctgaggaaccctggcagcctcccagtggggaagatctgagacccagcagaggagtcttgctgggggcaggggtgggcgtgaaaatgatgttgtgttgcctagcaagggtgttccagtccctgggtctcctgggcagtttgattcattacagkggccccagttcttctagctcgatccaggacccctcctacatggggtcctgggggagggtgggtctgtgctgggttgctgtcccccttccccaccacaggacatggaccagcacggatgtcactttcctcaatcacagctcactgcagccttgaactcccaggcttaaaggatcctctcacctcagcc

SEQ ID NO: 807365 - DNA, 546 bp, Homo sapiens
ttcccattaagtttcctactctttagtgttctgtcacttctgagtacattgagagagcctctgactggtcctaaggtctttcagacccctctttggaatagaacataagtagggaacaagaagcagctaatctttgaaggcaaatttggattctacaaattagaaagatattctgtactaaaagaaagactagcttcagagtgtargtagtataatttaaagtatgatttttaaagaaaaatcaggaatcagcttataagaaaaaacttcacaaaattaattttgtggatttggttgaggtgggaaattgtactgctggcgtggatgtctgggaagcacataccaggttggcagctgcagcttagcttcgagatcatcccgtgctgtgatagcacctgagtgaagatgtggcaggtggagaaggcactttggaactcctgagtgacagccagaagccagagtgttactttggcaagtgtgctaccaggtgctgagtcttgggcctgagcattcctcacgataacaggtagatcataactgtttatt

SEQ ID NO: 807366 - DNA, 587 bp, Homo sapiens
ttgactgattcctcataaggctggtcttctcctgagactgttatactagtcagggttctccagagaaaagaaccaataggatgtgtacatacagagaaagagatttattttaaagaattggctaatatgattatggaggctggcaacttcaaaatcttcggagctgatgtcccagttggagtctgaaggctggtaggtggcaggaagatgttccagtttgaaggccatcaggcaggaaaatgctcttaggaagagggtcagttgttctactcagaccttcaactgattgcataaaccccacccacattatrtagggcaatctgctttacccagtccaccgacttaaatgttaatctcatccaaaacctccctcacagaaatacccagaatcacgtttgaccaaatctctaagccccctgtggcccagggaagtgtgtcagcattaaattaactgtcacactatggtaggttgaaaaatggcttcccaaggagatccacctccttatctctggaacctcttaactaacagagggtggggggtgggggggaatgccttttgcagatgtgattgagctaaatattttgag

SEQ ID NO: 807367 - DNA, 622 bp, Homo sapiens
aaaatatctttcaaagataaaggcaaaaaaaaataacttaccaaacaaatctgaaagaagtgccgccagtagacctgaactacaagaaatattacagtaagtacttttgacataaggaaaattataccagatgaaaatttgagtctacccaagggaatagagactgcttgaaatgataaatatgtgggtacatgtagaatacattttttctcaagtttaaatttatatgaaagataaataaccacttaaaaataaaatatggggtttataatatgtttagatataaaatgtaggcatacaatagcacaaagaatacaagtagaaaatgaaaatatattcttctctgatttttatactatatgtgaagtgacaatattrtatgaagttggactgtgataacttaaagatgtatattgtaaatattagactaaccactaaaagaaatacatcagacaaagtaaacttcagaagaaggaatattacatgagattaaaaggaacattttataatgataaagaggtcacttcatcagtgagtcacaataatctcgaacatgtatgtatctaataacaaagcttcagaacagatgaagttaaagtcttcagactgtaaaagagaaata

SEQ ID NO: 807368 - DNA, 670 bp, Homo sapiens
caccatagaatactacgcacctgtaaaaagaacaagatcatgtcatttgcagcaacatgaatggagctggagactattattctaagaaaaccaatgttttcttagaatacattgaatacgtaatatattagaatacggaacagaaaatcaagtaccgtatgttctctcttgtaagtggagctaaacaatgagaacacatgggcacaaacaggggaacaatagacaccagggcctatttgagggtggaggatgggagcagggagaggattaaaaaaattacctattagatattatgtttattacctgtgtgacaaaataatctgtacacaaaacccttgcaacacaagcttacctctataacagtcctgcacatgtgccccaaaacctgaaataaaagttaaaaaaagaaagacatatttaaaaataaatttagtgtagcttaagtgtacagcatttataaagtctacaatactataatgtcctrggcctttacatgcactcttccagatcacctttcagtcctgaaatcacctccatttgtggtaagtaccctaaatgagtgtaccattttttatcttttatactgtagttttactgtatcttttctatgtttagatatacaaatgcttaccattgcattataattgcatacagtattcagtacagtaac

SEQ ID NO: 807369 - DNA, 631 bp, Homo sapiens
ttgtgatgaatgagtagtattttgataagtggagaggataaggaagaacatattcatagaattgataacatatacgaagagtgccagggaaatttggggaacaggataacaacagctggaaagaaaagtaggacaaaattaccgagatttgcaaaacaagcaaggaatacactctcactcatgcacagagtgagagagcaagagagagaaagagagaatttggctccatgtagtctgtgtactagtagggaatctggaaggattttggtcagaaagtgataatgtcccattagaggaataccaatattgtgatggtcaccggatggtttggaaaatggagggaaacaagtttgcaggctaatatgggagaattgacctgaaatcacgaagtggacagtgagagagggaaaagaagaaatgggctagtgagacactgtggtatacaaatcatagaggctttgtgaatgattgagtgcacttagtggagatggacttaagaaaaggaagaagtctaaaatgacttcatgggtgcgaatgtgaaacctgtagcattactaayggaaaaaaggggcagtgtatgagtacagaaactacttttaaaaacgttcagaatagtttggttttaggcatg

SEQ ID NO: 807370 - DNA, 600 bp, Homo sapiens
ttgtacgtgctggaaattccagaggatcagagcaggtcagccatgatcaactcccaattaaagacccccatcagctgcacctgacccagatgtaaaacagccctccgtgattctgggagaggccaatacctgttgtctcagcctgtttatgctgctatagcaaaataccttagactggacaatttacagataacatacatttattgctgatagttctggaggcgggaaagcccaagatcaaggaactggcaggttcggtgtctggtttcgtctctgcttccaagatggcaccttgttgctgtgtcctcacatggccacaagcacaagggtaaaaggacttagctttcccagaccttttttmgttttttaatttttattttactttaagttccagcctgttcataaggtcactaatcctattcacgagggatccaccctcatgacctcctaaaggccctactcttaatactatcacatttgtgttcaggtttcagcatgaattctggagaggacacacacattcaaaccatagtctcttgttgagtgggacttcagagttggagaaaaacacatcctccttgcttggacatcatcaccttc

SEQ ID NO: 807371 - DNA, 512 bp, Homo sapiens
acttccttaagatttaggtcatcaaagccttagagctccttgtagcatctactaagaaatcctttgtgtgtgtgtttgtctgtgtgtgtgtgtgtgtgtgtgtgtgtgtgtgtgccaacgttaagaaatacttaagtgaaaattgtataaggtaggtccgtgagagatcgtatcagtcaytgaatattttaaatagagggaatttaatgcagggaataggctcacaggggctggatgagctgagaagccaaataggggtcaaggaggtaacccagagattgcagcagcaggaaaccactatctcttgtgcggctggagatagaaagaagggatggcactcttagatccagagaacagtcaccttgaagaagctgaaaccactgcaaacctggagccagggaggaaacacagcctgtgccagagatgccagccaaggcagagaggaaggagggatacctcctccttctctcctcctgccctccagtctcctgccagggtcctcatggctggac

SEQ ID NO: 807372 - DNA, 595 bp, Homo sapiens
cctttctcactcagccatagctgctgtcttagaaaagaaatgaaggggatttggctaattggattagacatggtctctaaagccttctccttactcatgagatttgattctgctgttttgatgggaaatgaccttctactaaccttgaagtgccatcttaagccctagtattaaactgtctcctttttagtcattgcttcattcccctatctgyggctatttcagaccaggttcccttgaacatggagtggatgtgcagtcccagctactgacaagccctgatctccacatcctttcttctcccctgtctggcataagggaagctcttgaatgtcttggggtcaaaatgtggttgtggagtggggttttttggccattttactggctatttctaggccccctattaaggctctgaatcattcagagatggcttgacacaagagacctggtttgggttcttttttcttctcttctttgggatgaaggcaggataatagaaagagatatctctaaatcaaatatcagacctggaatagtagtggaaaataaaaccagtgctatctgaggctattctctaccatatttattttagcat

SEQ ID NO: 807373 - DNA, 454 bp, Homo sapiens
ttaccaagaaggttataatgcttcccatcagaggagagctagaaagataataggtgcagccttgccagaggagagttgggaaggtataggtgcaggctcacccagagacggaggcccttttagtgttctgttctgtaaaacttcttgtacggtagakggcacatagtgaacgctccataaataacacgattcttattgttactcatcttcaaattctgttatcccaggctgttgaattgtcttggtttcctttgcaagagtcagtgctgactttgtcctgttctgattgctcatgtaattcatggtatcttagtctgtttgggctgctataacaaaataccataaactgaatggcttataaacaacagaaatttatttctcacagtttctaaaggccgggaggttcaagatcaaggtaccagcagaactggtgtctggcaagggcccttttcct

SEQ ID NO: 807374 - DNA, 592 bp, Homo sapiens; identical to SEQ ID NO: 771030

SEQ ID NO: 807375 - DNA, 644 bp, Homo sapiens
gcaaagagacctggacaacaaccatcccaacctccggcttttgcagttgtagaagaggctcagataagttaggtgatttttccaaggtcacacagtatgtcctgcaagaatgaattaaaacactcatcactgtataaatataaggaattaatagaaaccatgtttatataacagatatttgaatcagtgattayctgataaaagttacagactctccctctgagaaacacacatgcgtcaaagtgcagactgctcatgtgatatgagggggttggctcctgaagcccattcatggattagcctgtggtcaaggtttccagctctgtcactaggacaacttacctaactctctgtgcctcatttcttcaacaaccaaagggaacaatagtacatgcctcatggttgtttgtaggatttaatgagtttgcaacgtatttggaacaatgcttggcacataataaatgctgaataaatgtttgctgttattactccctgaagacagtcttggcaccctcaaggagccccagatgccagggaagccttcctaccagggggcctttcaaatgtccaggagtacctgctcatgtctcctcaaactcccagcttcacctgggctggatgagcaaactgtgagatgaggatcc

SEQ ID NO: 807376 - DNA, 628 bp, Homo sapiens
gcgtcaaagtgcagactgctcatgtgatatgagggggttggctcctgaagcccattcatggattagcctgtggtcaaggtttccagctctgtcactaggacaacttacctaactctctgtgcctcatttcttcaacaaccaaagggaacaatagtacatgcctcatggttgtttgtaggatttaatgagtttgcaacgtatttggaacaatgcttggcacataataaatgctgaataaatgtttgctgttattactccctgaagacagtcttggcaccctcaaggagccccagatgccagggaagccttcctaccagggggcctttcaaatgtccaggagtacctgctcatgtctcctcaaactcccagcttcacctgggctggatgagcaaactgtgagatgaggatcccacccgsccctgcctcccaccaccatcaggcaaatgaccctgattcaagccttggtcaacctccacctgcccactgcccacctggacagccactggctgcagtttcaggaagctgcctcttcccctcaccctccccacggcccaggaatcaatgcaatcccctaaaagctcataacttggaggtaattataagaagcatcaattacccagcaatgggg

SEQ ID NO: 807377 - DNA, 481 bp, Homo sapiens
tatatttatagatatgtatatatatatattaaaagaaccagtggacattatagaacttaaaaatataataatacagactataacattgaggatttaaaaaatataagaacaggatttttaaaaaactccccggatgagctcaacaataaatagagtggagataacagaagataaaatcagtagatgtgaggacagataagtaaatttcacccacccaatctaaatgacacagagaraatagactgaaaataaaaatgaacagaacctcaggaatctgggagccaataacaaaaggtctaatattcacatcatcagaactgcagaacaggaggaggaggagagtgaagctgaaaaggcattcaaagaaataatactaaaaactcttcaaatgtggtcaaagacgtaaacctacagattcaggaatccaagcaagcccaaaacaggacaaacacaaagaaatccatgtcaagaaacatcataa

SEQ ID NO: 807378 - DNA, 573 bp, Homo sapiens
aaaaaactttaagcctaggatttttttaatccaagtagcttacattttaaaaataagaccaaaaataatggatagtatcaggcagatgagatctcaaaatattctctttgaaaaagtcttgaaggaagtactctggcaagaagataaataaattaaggattgtgctgggaaatatataggtaaaccaaaaaaatgtaagcatcaaaaacaaaagtgaatccacaacaatctagaactaagattttaaacaaatctaacatggtgggacaaggtgagagtcatcatgaaggtgacaggtccctgcctcattcagggggagaaagttacttcagaacttaacaagaaaaataaatataattagaggtcttcatagggcagccaccagaaaaattaaaaacagaatgaattacttttgaccagtcagctttygtgaagtcatgctacagtaacaagctgcctcatctcagtggcttgcaatggcaaaggtctatttctcattgagatgttggctgcaggatacatgtgtcccatgtttcttctcattctaggacccaattaaaggaacaggccttg

SEQ ID NO: 807379 - DNA, 598 bp, Homo sapiens
tagtattgtccctacacacacacacacacgtatccagtacagatacaaccccataggtatagacagcatgtactgaggcagatacatatatgggaataaatgccatctggccacttgcctggggccaaagccattgcttccagttcactttcctcctcatgctccattcaatcaagaagtactacagattgggcccttgctgcattcctggcatagatctagatccacacagtacaggcccaaggcaggacagcaagacccaaagcaggaagaaaattgtggggagaggaagcaggagaacagtctgggtaccctggygacatttgcctgagaagggaggaggctggtaaggggagagaaggtgataggggattctgggagctatagcagagccaggaggccccctccccccgactgccctgctgctcaaaggcccagggtatgcagggcagcctgtgcccagcctttgagccaggtgagtcagcctgacttctgaatattcaccactgcagcagttccaccattccccacagcccactctgcacacagcagccagaatggtctttcaaaatctgatcttatcactccctgctcaata

SEQ ID NO: 807380 - DNA, 614 bp, Homo sapiens
aagttttggttcatttccccatcatggaaataaaggtgattgataaaataggcagttgattttgtattggggaatgtaaaaacaacaaaataaagtggcacatgtttattgacctgaagaaaagtcataaatatgctaaataaattacccaattggattcagcttctcaaatggaaagttattttgagtggaaattatttgtattattatttggtataacagacaatcctttccaacatcttgctggttctctatgcttttagtccttacttgttagtgaaaactatgatatcttgaaattattactattaaatctggattttttaaacaaaattccaagaagcccagcatctcatagacaatctcaaaaawaaatcagtggaaagtttcaccactaggtactgcttaatgttcacctaaatgaattcagttttaatgtgttacctattgtgcaattatatgtggttcaattccatctatctttcatgatattcttggtcactttgaaggccctgacaagattttgtgatagggaaacctcttttttttttttaatatctgttagcaaaatttctgttatcatctttctctagtaatatctgctagttatatat

SEQ ID NO: 807381 - DNA, 356 bp, Homo sapiens
aaatttccagatcttactgtcacagaacagaatgactgtatgtgaatgttggctctgttttggagcttgctgtgtctctccctggattttttgttttctttctagtgttctagcccttacattttttttgttcttctgtttccttgctaatagaaagactttccactaaaacgaaatggtcccatatttgtcagctgccmgcaaagttagtctcctggaagaatatgccagaattctctgcctaaattctgctggtcctaatatcatgcttcacagagtcatcttcacactacattcagattgtcgctacttttcctactccttccctttctgtgccttgtgcagttgaaactaat

SEQ ID NO: 807382 - DNA, 653 bp, Homo sapiens
agcaggcagccttattgggtgtgatcctaacaaccctattcaaacctatcttcatgaccacttggttcacagtaaccatttcacattcctgggctgccaaaatctagaattataggatattctcaggaactattatttattgttcttcatttgaagtttcctcaagtagctcagtatgaaattgaggtattctagaaaactccgaaactcagtacaaggtgtgataggtaagcatctgaacttctctatagtggttgtcttgctcctgtccttatttaccttgatgaagaaataatatccccacttctctattgacagctggggttggagggagatgccatagcaaatccatcttctaaactgacaaccttgttttaagacagcattacttgtgcatgtatgtatatgagttggaggcaggcaatgagaaagagtcataaaattggtttccctaattcgtagcgagactagttttcttcagccactctcaattcagcatctgagattacatgtgactsattccaagttcagaaaacagtcgtttaatgtcctcttacaatttcttaagttgtacattaccttctgacacctacaaaggatcctgctctgttgacatttgtattttcacagttcttgtccatgatggtgactta

SEQ ID NO: 807383 - DNA, 609 bp, Homo sapiens
tgttttcagataaagtccatataccatgttacttatgttatctaatgtaaaggttaaaaccaaatatgaaattggaatctcaaaccttaatctacatttcaggaaactgagtctcagagaggttaagtaacatgctcaaattcacaccagtaagtgacagttacaagaaatgatagtaagtgacagagctaggattttaaccaggtctatatgactggaaagcacattttttaactactacactatactgcctcatcaggaatgtacacaatagtgatattttctattatttattgctcaaaagatctattttgaagtatatgtgttattcagaaagtacatattctttttccttttaaaatgttggaamctaattatcaattacatagcaccaaaggtcgcatgagagattaattggagaagtttttgaacacgctttgtatagtaacaacagtgctgcctttaagaaattcagctttgtaatttctttgtcaatctttgctttgaaattaatttatagcagccaccatgggtttttttacattgtgttttcttaaacttgaaatggcttgcctttggaaatttctctttcaagctagatagaaaata

SEQ ID NO: 807384 - DNA, 568 bp, Homo sapiens
aattcaagtctgggattatgtttctttttattattattattattatactttaagttctgggatgcatatgcacaatatgcaggtttattacataggtatacaggtgccatggtgttttgctgtacccaacaacctgtcatctacattaggtgtttctcctaatggtatccctcccctatcaccctcacccgctgacaggcarggtgtgtgatgctcccctccctgtgtccatgtgttcttattgttcaactcccacttatgagtgagaacatgcggtgtttggttttctgttcctgtgttagtttcctgagagcgatggtttccagcttcatccatgtccctgcaaaggacatgaactcatccttttttatggcagcatagtattccatggtgtatatgtgccacatttcaaaagctagcagaagacaaaaaataactaagatcagagcagaactgaaggagatagagacacaaaaaacccttcaaaaaatcaatgaatccaggatctggttttttgaaaagattaacagactgctagtcagactaataaagaagaaaagagagaaga

SEQ ID NO: 807385 - DNA, 578 bp, Homo sapiens
cttcagctgcctgactttgtatcttggcagaaggagtgagctagatttccttgctacctcctggtaatttgctgagtcatacaactctcttcaaatatgatactgttatagtagcattaatacagggattctaaaggaaaaatatttaattgccataatggggacaaaaacctggttgataaatcttttcatatttttcctatttatggaattagaggaatgaacacaagactgtcttcaatttatctattactataatggattatttctttatttcactarcaataaatgttgggggattcctggggtatttataaggagtaagagatagttttgctaaaagaatctttaaagattttattgaatgtgagatatccagtaaatgataggaatcagtcttgattctcatccataatttctgcttagggagaaactttaaccaagtttttttttaaaagattaaatattacaatatttttttccagtttttttttcttttagtggctctcctttcttatcaccccatataacctaagaggcagagagagtagttctgttgctaactcttgcagaagttg

SEQ ID NO: 807386 - DNA, 619 bp, Homo sapiens
acttcagacagcgaaaatagcacgtacaatgtctctgagagtgagagagagcatgggaagaatgctaggaagtttgagaggtgtacagaggaaaggaagggctgggaacaagccacgtggaaggctgggtggatgaacacaagcctgcaaagtaaactaagaaaamacaggaaaaggggttagaaagagaaaaggaaagagtaaagttacagaaaccaaagaaagaaggtatttcaagaagtagagagtcttcaataatggtattactgaatggagaagtttgatggactgaaaaatgtccctggaggtaatgaatgttagcaagaagctatacttctagtttttataatttttaacccatttaaaaacaaaaaaagacacttcatatcagagtaccttgttttaacccttcattagtggtcaaagtttcattctggcccaaatgagagtttaaaatttgaacaatattgcttgggtttctaagtaaaaattcagtcttttcaaaagaggtagctcaattcccggcctagtcagccactcaatagctctcttttttctttgctattcttaagataaatgtaccttcagaaaatttactcccaacgataagaggctaaaa

SEQ ID NO: 807387 - DNA, 604 bp, Homo sapiens
catcttctgaaatgataaaaaaaaaactcatcaccaatttctgaagccttcacagccagtcaatttcattctactcttctttaatgctgtctggccacatccaattttctcagttcaactgtattgcctcactatcttgattcaatttactttgacctttactgaactatctctagagaaacaatgatatggaatttctttatattacattkcagctttacatgtcttgtggattatattccaccaaaacataaaaccaagacaactaataaacccatagaatttaccttgaagtctttggtcagggtccactttaaggcatcatagtcctcaggccctggttgaatctgtagctaaccattcaaacgaaagctggggttttttaaaatgattttgctatctggtttcaaattgctagatactatccgaacagagagtcatgctttttaaaatacaaactctgagtatatattgtcatctaaatagcaaaggagactgccaagggcagggaagatgatagaaagtgataaagacatttctgtgaagtgttattacctctcttgtaatttaccatcaagccacagaatggtcacaaaaaataaaa

SEQ ID NO: 807388 - DNA, 547 bp, Homo sapiens
tcatcaaacaacagaaccttattatataaaagataataagctatataataaattttgtgcactacattttaatcaaactttttattttgagataattataaattcacatgcagttagttgcaagaaataacagagatcttggatgccctttactcatttctccaatggttacacctttaaaaactgtactacaacattggaaacaatattgacattgataaaatctatcatctatctgattttcctggtggtactcatctgtgtgtgtgtgtgtgtgtgtgtgtgtgtgtgtgtaygcttttcattctctgcaactttttcatatgtgtaggtttgcatatccaccaccataatcaagagacagaaaagttcccttaccaaagagtcctggtgttgcccctttataatcacacacctccctgcttgctcctccccttaaccttaacccatggcaaccactaacctgttctttttttaatttaaaaaatgttatataaattgagtcatacagtatctaatctttcagggctgtcgttattcactcagc

SEQ ID NO: 807389 - DNA, 520 bp, Homo sapiens
agccactgattgtaaaacatgccattattttatgttgcactaagaaggtggggtcgaggagttgccaataaacttgggacagactattgatggccaagcccatctgaatttaagatgctaaagtatgaaaaaaatacatcttagaatcaatgaaataccatattttgattccattcctcaagataattttagagttataaaaccagtcctcaattttgggtcttcacagagaatctttcccttgctagaccccagaattttaaatgcatccgtcttacactttcacaaatatttgggttttcctttttcactcacaaacagcagggaggtcatgtactttttgtacaacacctgtgcmctatgagaaaatggtaccttttagttattgacaagttaaaatagcactctcagtttttcagtattacagagagcaaatagtttcctctcctgctctgtgcagtagcttttccagaactatggacaaattgatcagaagaagattgattatttcctcatcttt

SEQ ID NO: 807390 - DNA, 652 bp, Homo sapiens
cagtcaggttatttttatgccagtgtcatgctattttcattacaataacttcataagatttttgaaattagcgagtgtaatgacaccagcttttttccttttgcccaagatcgttttgactctttagggtcttttgtaattccacacaaatttaaggatattttttattgctgtgaaaaatgacattgcaattttgagagagattrcattgacactgtaggtcattttgggttgtatggacatttttgaaagagcggtgttgaggttccataatattgtagtattgccatttatttatcccttcatgtcatttaataattgctttacgtatttaggtgctctgatgttgggtgcatatataattacaactgttatgtcctcttggtgaactgacccctttctcattatttaatgaccttctttatctctttttacagtttttgctttaaagacaattttgattgatataaatatagatactcctggtctctgttggtgtctatttgcattgagtatttttttccataccttcaggttcagtctgtatgtgtcctcactagtagagtgagtctcttgtaggcagcatatggttctttaaaaagaaaatttattcagctgtcctgagtctcttggttggagaatttaatctgtt

SEQ ID NO: 807391 - DNA, 625 bp, Homo sapiens
atctctttttacagtttttgctttaaagacaattttgattgatataaatatagatactcctggtctctgttggtgtctatttgcattgagtatttttttccataccttcaggttcagtctgtatgtgtcctcactagtagagtgagtctcttgtaggcascatatggttctttaaaaagaaaatttattcagctgtcctgagtctcttggttggagaatttaatctgtttacattcaaagtaattactgataggtaagcacttgctactgctgttttgtcattcattttctgaattttttgtaagtccctgtttctttatttctctcttgttgttttctttttgctttgtggttaccatgaggcttacataaaatatctgagctttataacatgctacattaagctgataataattgaactttaatctcatactctcactccccccttttataattttgatgtaaaatttttaatttgtttttgtaatttgtattccttaacaattgcagctacagtttcttttaatagtttttccttttaatcatcacagtaaggatacgattgctttatgtatcacccatacagtgttagagaatgagtttgattatgtattacttaatacca

SEQ ID NO: 807392 - DNA, 573 bp, Homo sapiens
gcccaactctagggaatgtcctgtgcaaaaatatcagtgtaggcgcatctctttgcggaactgagttgctctgctttcagtttcctctctccagtgcccccaagctcctgcctggcttcttctgctgttcaacccaggatcccatgctctaggacagccttctcaccatctttcttcagctcttaattcaaaagtcccrcttccagttcatgctcagagaaaaagcaagtagacctaatctttattagaatgtgaatttctagacaatagtactctctttggcttacttcactgccctacatgctgaactttcagataatataaggaagagaaaaaagtctagatgttggagagggagtcggtttcattttatacgattcagcctaatgggctttcattgctaacattaggggttacagttgaaccagccaactcaggaggaaattcagaacctggattcttatagtgatagtggaaaacaaattcatggttaagatttgaatgtgaattttaaaataaatcatagtatttaaaaaaaccatttttccttattaaatatgtaactttggaaaa

SEQ ID NO: 807393 - DNA, 573 bp, Homo sapiens
gcccaactctagggaatgtcctgtgcaaaaatatcagtgtaggcgcatctctttgcggaactgagttgctctgctttcagtttcctctctccagtgcccccaagctcctgcctggcttcttctgctgttcaacccaggatcccatgctctaggacagccttctcaccatctttcttcagctcttaattcaaaagtcccacttccagttcatgctcagagaaaaagcaagtagacctaatctttattagaatgtgaatttctagacaatagtactctctttggcttacttcactgccctacrtgctgaactttcagataatataaggaagagaaaaaagtctagatgttggagagggagtcggtttcattttatacgattcagcctaatgggctttcattgctaacattaggggttacagttgaaccagccaactcaggaggaaattcagaacctggattcttatagtgatagtggaaaacaaattcatggttaagatttgaatgtgaattttaaaataaatcatagtatttaaaaaaaccatttttccttattaaatatgtaactttggaaaa

SEQ ID NO: 807394 - DNA, 599 bp, Homo sapiens
ttttaaagcacacatggagggtggggatgaggttaaaaaaaatgtgttgtaggagaaccacattttcttcaattggtcaaggactcacatctttattttaactgtccctgaaagaaactgaaattttagtgtcatctttttgaaaattttatcagaggtaacagttcactgatttcaatttagtttccatcagtctatccatgctaactttatgcttcattttgcaaattcaataaataaaaatgtgactggattactttaaaataaaactagctagtaccgtgggaatcagctggattcaaagccacttttccatgtcactgggggtgacatatcactagagatagaagcaggctggggaactttcaccagaartgggagttcactgtagtcagttactaatcctggatctttctcgtgaccctctatttcctgaagatatcacccacctcagccagactgaagttcccactaaaggcaaaagactgagcccccaaggcctcattctccaaggccagaagcagcaggtctccaaagaaggttcaggaaaggccatgttagaggaagccgtacctgtcagcctcagccagggcagcccg

SEQ ID NO: 807395 - DNA, 599 bp, Homo sapiens
ttttaaagcacacatggagggtggggatgaggttaaaaaaaatgtgttgtaggagaaccacattttcttcaattggtcaaggactcacatctttattttaactgtccctgaaagaaactgaaattttagtgtcatctttttgaaaattttatcagaggtaacagttcactgatttcaatttagtttccatcagtctatccatgctaactttatgcttcattttgcaaattcaataaataaaaatgtgactggattactttaaaataaaactagctagtaccgtgggaatcagctggattcaaagccacttttccatgtcactgggggtgacatatcactagagatagaagcaggctggggaactttcaccagaaatgggagttcrctgtagtcagttactaatcctggatctttctcgtgaccctctatttcctgaagatatcacccacctcagccagactgaagttcccactaaaggcaaaagactgagcccccaaggcctcattctccaaggccagaagcagcaggtctccaaagaaggttcaggaaaggccatgttagaggaagccgtacctgtcagcctcagccagggcagcccg

SEQ ID NO: 807396 - DNA, 599 bp, Homo sapiens
ttttaaagcacacatggagggtggggatgaggttaaaaaaaatgtgttgtaggagaaccacattttcttcaattggtcaaggactcacatctttattttaactgtccctgaaagaaactgaaattttagtgtcatctttttgaaaattttatcagaggtaacagttcactgatttcaatttagtttccatcagtctatccatgctaactttatgcttcattttgcaaattcaataaataaaaatgtgactggattactttaaaataaaactagctagtaccgtgggaatcagctggattcaaagccacttttccatgtcactgggggtgacatatcactagagatagaagcaggctggggaactttcaccagaaatgggagttcactgtagtcagttactaatcctggatcttyctcgtgaccctctatttcctgaagatatcacccacctcagccagactgaagttcccactaaaggcaaaagactgagcccccaaggcctcattctccaaggccagaagcagcaggtctccaaagaaggttcaggaaaggccatgttagaggaagccgtacctgtcagcctcagccagggcagcccg

SEQ ID NO: 807397 - DNA, 615 bp, Homo sapiens
gaaaaatggtttcgtggcctaggcccaggaccccactgttgtgtacagcctcgggacatgtcacccggaatcccagctgctccagctccagctgtggctaaaagggccccagatacatctcaggccactgcatcagagggtgcagccataagaagcctttgtggcttccatgtggttttaagcttacaggtgcaaggaaggcaagagttgaggcttgggagtttccacctagattgtaaaggttgtatgataatgcctggatgcccaggaggaagtctgctgtagggtcagagccctcatggagagcctttactaaagcagtctggaggtgaaatgtgggtttggaggccccactcaatgtccgcastggggcactgcctagtggagctgtgagaagagggccactgtcctgcaggccagagaatggtagatccactgaaagctttcactgtgtgcctggaaaagccacaggcactcaatgccagcccatggaagcagtcactggggctgtaccccgcagagccatggggcggagctgcccaaggccttgggaccccaccccttgcatcagtgtggcctggatgcacaccatgagcagtaatgggaaaattctta

SEQ ID NO: 807398 - DNA, 522 bp, Homo sapiens
ctttctagtgcctacatttcctatgagccccagttgtgcatagcagaaaatacggaagcatctaggaaaacctaggggcaggaggggctgggagggaataaggcctttcaaggtgtttaaagaagagacaaagatgaagaagcaggcatagtttctgaagasgttttttggtgtttgttgttgtttgcatttacctaattagttctcaactgcagaggcacattagaatattctggggaatttttaaaatacgactgcatgggccacctgtcatatacactgatgtaattggcttgagttggggcctaggtctctctctctctctctctctctctctctgtttctctctctctctctctctctctatatatatatatatatcctgttttgtatatatctaagtatctgtagatatatacagaacaggggataccagtgtgtacctaccattgaaatcaattgttttcaagtctttttaggtcttattctcagatggtcttgggtaaatggtggctgattgcc

SEQ ID NO: 807399 - DNA, 522 bp, Homo sapiens
ctttctagtgcctacatttcctatgagccccagttgtgcatagcagaaaatacggaagcatctaggaaaacctaggggcaggaggggctgggagggaataaggcctttcaaggtgtttaaagaagagacaaagatgaagaagcaggcatagtttctgaagagrttttttggtgtttgttgttgtttgcatttacctaattagttctcaactgcagaggcacattagaatattctggggaatttttaaaatacgactgcatgggccacctgtcatatacactgatgtaattggcttgagttggggcctaggtctctctctctctctctctctctctctctgtttctctctctctctctctctctctatatatatatatatatcctgttttgtatatatctaagtatctgtagatatatacagaacaggggataccagtgtgtacctaccattgaaatcaattgttttcaagtctttttaggtcttattctcagatggtcttgggtaaatggtggctgattgcc

SEQ ID NO: 807400 - DNA, 513 bp, Homo sapiens
aaaataacacaaattttaaaacagtatgtaaaacaacgatttatatagtgtttacattgcattgggaattataagtaatccagagattatttaaagagagagtgtatgtgtgggttacatgcaaatacttcatcatttacataaggaactcaagcatccatgggtttgggtatccccagggagtcctggaaccaatgygccaccaatactgtgttaagtatcaagacaaatggattaatgataagctgtgtcttctctacaattctttcaccacgtttttcctttagaaaaacactaaagtaagtatgaaaagctttggctccaatttctcataaattacttaaaatttgatatttacaaatataattatgaattataagttgatatcgtattgcaataacattttgtttctataatcatgcctctttttaatgtgattttctcgtgtattttaatatattgcagaaatgcaataactgaagaacttgttttttgtacagtgagaaatttgta

SEQ ID NO: 807401 - DNA, 513 bp, Homo sapiens
aaaataacacaaattttaaaacagtatgtaaaacaacgatttatatagtgtttacattgcattgggaattataagtaatccagagattatttaaagagagagtgtatgtgtgggttacatgcaaatacttcatcatttacataaggaactcaagcatccatgggtttgggtatccccagggagtcctggaaccaatgtgccaccaatactgtgttaagtatcaagacaaatggattaatgataagctgtgtcttctctacaattctttcaccacgttttycctttagaaaaacactaaagtaagtatgaaaagctttggctccaatttctcataaattacttaaaatttgatatttacaaatataattatgaattataagttgatatcgtattgcaataacattttgtttctataatcatgcctctttttaatgtgattttctcgtgtattttaatatattgcagaaatgcaataactgaagaacttgttttttgtacagtgagaaatttgta

SEQ ID NO: 807402 - DNA, 513 bp, Homo sapiens
aaaataacacaaattttaaaacagtatgtaaaacaacgatttatatagtgtttacattgcattgggaattataagtaatccagagattatttaaagagagagtgtatgtgtgggttacatgcaaatacttcatcatttacataaggaactcaagcatccatgggtttgggtatccccagggagtcctggaaccaatgtgccaccaatactgtgttaagtatcaagacaaatggattaatgataagctgtgtcttctctacaattctttcaccacgtttttcctttagaaaaacactaaagtaagtatgaaaagctttggctcyaatttctcataaattacttaaaatttgatatttacaaatataattatgaattataagttgatatcgtattgcaataacattttgtttctataatcatgcctctttttaatgtgattttctcgtgtattttaatatattgcagaaatgcaataactgaagaacttgttttttgtacagtgagaaatttgta

SEQ ID NO: 807403 - DNA, 513 bp, Homo sapiens
aaaataacacaaattttaaaacagtatgtaaaacaacgatttatatagtgtttacattgcattgggaattataagtaatccagagattatttaaagagagagtgtatgtgtgggttacatgcaaatacttcatcatttacataaggaactcaagcatccatgggtttgggtatccccagggagtcctggaaccaatgtgccaccaatactgtgttaagtatcaagacaaatggattaatgataagctgtgtcttctctacaattctttcaccacgtttttcctttagaaaaacactaaagtaagtatgaaaagctttggctccaatttctcataaattacttawaatttgatatttacaaatataattatgaattataagttgatatcgtattgcaataacattttgtttctataatcatgcctctttttaatgtgattttctcgtgtattttaatatattgcagaaatgcaataactgaagaacttgttttttgtacagtgagaaatttgta

SEQ ID NO: 807404 - DNA, 536 bp, Homo sapiens
tcactttctacacattgggcacaaagataagctttgattaaaatagtaagtaaaagacaacctaggaaatacttcagtgaattctaggaaggaaggaagaaaggaaggaaagaagggagggaaacaggaagaaagggaaaaagaagaaaaagagaaagatgaaaataggaacaaatrtagacaaacaacattaagggccacgttttaagatttccatgttaatgatctaatataatcactcagatagtgcaacattgagaattttttttaatggctcaaaaatggaaactgaaagtaagtcatggggaatgaatactttgggcagtgtcttcctgatgtcttcttagctaagaggagaaaaaaaaggctgaaaaaatagggaggaaattccttcatcagaacgacttcaagtggataataatatttataagaaatgaatggaaggaaatatgattctcctgaggataactttgtatgttaaggtttgaactaagtgactgtatctacagaggaagtattataaagatacgtcatta

SEQ ID NO: 807405 - DNA, 543 bp, Homo sapiens
tctttattttgggttgccagtcttttaattgttttttaattgttttgaagcaaccttttatatattctatacaccaataatgggtaaactctggactatgggccaaatctgatttgccatattttggtgaatgcagtattattaaaactcagccacacttacttccatgctacaagggcagagtttagtagttgagacagaagctgtatggcttgcaaagtctgaattatttactatctggccttttacagaaaaggttttctgacctctggcacccactaatcttttgctggtcatatatttagcaaacatcttttatctttgtatggcttgccttttcamgttcttgatgctatttatttgataagcatgatttcttaattttaatgtgctcatgatgattgctctgtgcatttcaattataaataaactgcccttatcctaaattcatgagaatattctctggcattattttctaagaaaacattttgatttgcttttcacatatatttccataatctaattggagtttttatgaatagt

SEQ ID NO: 807406 - DNA, 581 bp, Homo sapiens
atgtgggaagatactttgagagcgtgtaatatactgtttcccatcaggcttttgtccactaattttagtatccatttataattcctatctaaaacaattactactgtggttactattgcagatggtggttttctatttccatcattcttctgtattcattaactagaattctactgtgagaaagagccttcccttcttcatttatttggatcttcaattatttgtttatatcagtatagactcatgggtatttgctttattctatgggttataatccattactatcattatttattttgttgcacaaattgctccagattttgycattggaagcctcccctgttggctcctgtgtccttctgacatattcccaagtattttgagcatttccttacattctgtcaccacaaaaagtccttatcttgtacttcgcttgtcccagctctgttaccaccattttgtccaggagctctgctttctttttttgaaagaaggagtttagaaatcaagatcttggtgtcagatatgctgattactattgggatgtcattgcttccagatcctctcagcaaatggggcta

SEQ ID NO: 807407 - DNA, 524 bp, Homo sapiens
agcttcgcttccgtacattgatctctctttgaaaaaaacaaagccttctcccccacagttcagttccctggctccctgccctgccacccatccctctccaccttctagctatgctgatgaaaacaggccaaaacagagcatttcaaaaattcaccctagaaccccagctttcagatctgcgatctgaaaagggcaaagagtggaagatggtggagggcaagggttgagaagaaccattttttttttttttttgtcaagaggaacagattccattcttgaatcctttgccrtgttataaacaaggctgagcacacagcattcctcctaaagcacatggtcctgtttttacaacacaggcctggtccctgctggaattcagtgtttgcctcaatactgttcgtcctattcatttgggatttattttaatttggtggtattaatggtggccaggaatggaacagttctttcattcttcttctgttttccttcttatctccctccacaccctcgatcttttatattta

SEQ ID NO: 807408 - DNA, 577 bp, Homo sapiens
ataaccatccaggcaccgtggcagaactgcgtaaggcactaggcagacaggcatgacctgagtgtcttctggctgagactggctccattggaaaacagaaggcctcagaagtgaagaagcaagaattggactgctaaacagaccctatggtgagcacgcagactggccctaaaccatgttctaatcactgtagtgttatgcctattcttaaccttccttcccacagggttccaactctaacatatttataggctgtgtttcttctcctctatctaatatcattctagttttcatcctggtgcattcaggaggccctagtctggccatttcagttacgtttctttgcgtgaccrggaccacccctgccattatagagctctctgcaaaggacagcacctttcatgcactcccagcctcagccccatgtggaaaagttctagacaagtttgggagatggtaacagcccttgagactcattcaatatattgatttggaaaaggagagactaaaactgattttgactgggatttctataaaatattggtggaacagttattgaagaagttagggctaattg

SEQ ID NO: 807409 - DNA, 600 bp, Homo sapiens
cacagttattattatcctgattctacagatgacaaaaccaaggcacagacaggttatgtattttgtcaaaattataaatatttaaaggggagtatgtccaggattgatccgagacgtaccatgctataccatgtcaaccctcttctgtttcttgtctctgtagctcaaatagcattttctcaatttggctatacttggagaatcacagaattagcttacaaccctcaggaattaagactcttaagagcagtggcctaatttcatttcttcaaggaagcaccttcsaagattccgtagatgacactatggtttcttgtctatgaattcctattgcattctttcaagaagtcagcacctgagtccataactatcggatgggtgtttctgaaggctgagaactgcccgccgtctgggttactggcatcattgacaatgccgagacatgcctcttcctctctgagattgttgttaactggagcaggaggttctcactaaaaacatgccgactccctcctatggccttcatgatgtaaccatcatacacattgctgctgttctataataataggtcaccattcagggacaaacagcaatgactga

SEQ ID NO: 807410 - DNA, 643 bp, Homo sapiens
gaatagcagtactgacagcttcagggatcacctcatctgaccatatggttttatatttgaggaaacatagagagatgaagtgactcactgagggtcaaaaaaatatgaccttctgggcatttgaagaacatggaacttcccttgcataaaaggtgtgagtttcattcagctcaattccatttgtgtaactttaactcctttcctcctgagcaacrtgactgagtattccataggcaggggacagaatttccatttaactaatgaacaaactgaagtcagggagtttagacatgtccagaatcacccagagatctaacattgtattgcctggataagcaggcaagtctcctgatgttgttgagtctttgtagagcattgattcacaagcatttggccatttacttgggaaaaatttgtcctatgccagccatgttctttaaattaattatctccatggccaagagtatgcatttatgagccagctgaaaagtcagggttattccatttgggggaaaaattaagtagaattaagcagttaatacaccactgagcatggaagcttcagcattgaacattaaacagttatcttgatacactttgcttctcttccatctatggacatgattgattacttaacctcccc

SEQ ID NO: 807411 - DNA, 539 bp, Homo sapiens
tatttgatactacactttacatgtttgggaaaaaataggtaggtaccatttcaaacataaatcaagacaactctctaggcctcaagaaggtattaaaactaaagcagtcagctgacttgactcccaaaaaagactggttgtcaactttttctaggccctctttgcactttttcttgcacctccaatttactagcaatcagttcccattctctaaacccctgggtaagctgtcagtagcatcartgttattaatctctgtggccatgtcaatgacagtcactgctcatataaggccacacagaggattcacataatagagaggtattaggccttagtagacaaggtaagtctggggaaatgaacaggctgattgtgacagttttaataaaagcacaaagctttcttatctgctacatttgctttgcaccaaatgggaagtgcatccttttggtaccaattcaattcataaggcttgagggaagataaatctttaactaaagaaatgagtgaacagcatcagctttgaaatactacttctt

SEQ ID NO: 807412 - DNA, 629 bp, Homo sapiens
ttatctcatgatttctgagagtctttcctgtccccagtgtgtgcaggagacaagctctgcctcttatctgagagccaggaacattatctgaacaggaggtagctgcagaaacactggtgtcaaaccaaatgcactggctgaagtacctctttttagggaaaacatacatgtgaacgcacacacacacccccgcctagaataaatgatctgcaaggttgctgaagcctatagcatgagccctgccatgctaatctgatatcctatgacctattcttcctgtctgatcccatgtctgccttcccatctaaaataggacctgacccatccttgtgaacagggagccctcagcaacagctgggggaaggagggcttgaggagtccaagagtcactcactaggaggcaatggmagctgcttttgaatttggagaattctttctttgcaggcaaagaggcctttatcataggtgtgaaggagaaagaggcaggttaaaaaaaaaaaaagacacaaaggttgcttgtcacacagcagagggaagagaatagcatcccattctccttcaagctgtggccccagatgacagctgagcataagtggaatcaaatcagcctttagcgcttcgtccgcacc

SEQ ID NO: 807413 - DNA, 612 bp, Homo sapiens
aggctccctgcttcagatccagtagacctccccaaatgactgatgtggactcatgtgcacaggtgggtgactagatttaccaaagcctggtaacacaaaacccaaacaaaccgcaaatatatatttgtatatatttaaaagaggagaaaggcagtacatctttttaaaacaaaataagaacatcccaaactctcatgatattaagagcaagacgagtcaaaagcagaccagttttacctagaaaacacagtcactgtatgaatttcactttccatttatgtataaaatatgctacattgagaaaagggaaagcaacaaaacaaagacacctaagtaaaaataggatacatttttactaaattggcctgtgagtgattctttttaaacactaggttrttgttcttttgccctttgtgaacatgtagacctcacaaaggcactttttgaaatctgatttgaccaacacctctttattaacttctatacacgtggccctcttatcaatgccacacaaggtgtgtaaagatcagtaaggggtacaaagatatgattagaaattttcggatccaagaagagaggccctcttccgttttaatgttcgcacttctctgg

SEQ ID NO: 807414 - DNA, 587 bp, Homo sapiens
cacaaccctaatgaatgagttcataaagcatcctccccactttatggaatttgtccgaattctctccatcatttgtctgccctctgctcccctgcccacttctgcatcctctctattctgaccataggaaacacttccacaagattctcactggcttcaacattcagtgcaggggggacctaggtttagtcagaaacattgtacatatacaacagyggaaattaggtgggtcctcaaatacattagcttgtagccaagaaaagcttatgtggaaagggcccttctgaaagatggtctgatttcttcaaggtcaggcttaccattggataaactcctggccactgtgaaagttctcctgccacccctgacagagactatgggtgggctgtcttctgcccagaggggcagctgcctccactacctcgccactgcccgcccttcttctggggtcctccagtggccccttgattgggcagggaagcctgcacccactcccttggccacgtccatcctagcctggggagaggcagcggtctattccgggggccccaagccacatccagcttcctgtctgtttttcttttgtt

SEQ ID NO: 807415 - DNA, 615 bp, Homo sapiens; identical to SEQ ID NO: 743472

SEQ ID NO: 807416 - DNA, 571 bp, Homo sapiens
tagtcaacaaagtaaaacaaaataagagatactgtttaaaaaaatgaatcaattggaaacaacccaaatgcccatcagctaatgaatggatacataaaatgcagtatatccatctaatggaatattacttagtcatgaacaggaatgaagtactgatacatctactacatggatgaaacttgaaaacactgtgctaagtgaaagaagctaatcacaaaggaccacatattgtatgattccatttgtatgaaatgtttaggtaaatcttatagagacagaaggtagattagtagttgcctaaggttgggtggtaggggattgggattggggagaggggtgagtggaatgggagatgayggctgtgaggggcagagtttcttttcgggtaaagaaaacattctaaaattggttgtggtaatagatgtacagctgtgaatatactaaaagccattgaattatatactttaaatgagtgaattgtatatgtgaattatctgaataaagctgttagtcagtaacactagaaaataaaccaaaagtaaacaaaacccaaaacacaaaaatatatatt

SEQ ID NO: 807417 - DNA, 479 bp, Homo sapiens
ttttttactccattccatctcctatctgcctttggaatcactgccagcagatattagtttttacattaggtattgctgtattaagcagcaacattgcttaatgtattattcatcctaggtactttgtaaatattgggtaagttatttaatgactgtgtaataatgtacaggcagtcccggcttacaatggttcaatttacagttcttgactttacagtgagtttcattggaatgtattcccaccrgaagttgaggaccatctgtcatgagtttctgtcttcttgacctttagaggaaggaacttagaagttttctaatgtctcacgtactggaacgtaaattgtaaagtagaagtctgtcccctttccctgcccaactaaaaagtacgtaaggtctttgtgacagctgtagtcttctctgataaagtggacataaagatgttagcatttaaatcccacacagtttaaaaaataactcat

SEQ ID NO: 807418 - DNA, 485 bp, Homo sapiens
cgtaaattgtaaagtagaagtctgtcccctttccctgcccaactaaaaagtacgtaaggtctttgtgacagctgtagtcttctctgataaagtggacataaagatgttagcatttaaatcccacacagtttaaaaaataactcatatttgtgtctaatgctgttttcaaataattatcgtaaaatgtgagaaccaacccagtgaacaggcagcatgtactccatatcttgaaactgagaggcatagcaacttgctgaagataccacactgtacagctatttagtggcsaaacccatatttggattgcattcaagcttgaattcagttcctgggctagagttttctccctcttgactggaaacaattactttatttgttttaagttgaaaagagttaagaaatagaaaaattaatgcagtggttgaatacaaaatcattgttttcttctcttttaaataccaagatatcgaagtagtagatcagag

SEQ ID NO: 807419 - DNA, 637 bp, Homo sapiens
aaacatctaaatttgcaaaacctgatgatctcaaattctagaattttaatctttaaggatctgattgtatgtagatgacaattactgatggagatctgtttgttttctagcaggttgtggtggtctgtgtttgattgcttcttgaacattattctattcacacattcgttttggctctttattaagctccccatatggtggtcctttgccaggctgtgcatgggatatacctgaatgggacacaggccctagcattaaggcatttacagttatgtttacatgcctatgaaaagcagtcctgacagtagtggctgtacctggtccgagtcacaggaaaagtttcccaaaggattcttcctccttgttcaagagtcttctttgcaccattttccctgaacataacccactttggacttggttgytgctgtggggagcattttttgaagactcaagttctttatgttccctggattgttcttttggttttgaactttccaatggattgtatagtaaccttttctgtggtatataggacatgtcagggagcaaggaaaataactttatttatgtctatttaattagagatttttcaggatttggaaagttattttttaacataacaaagtatacttttagc

SEQ ID NO: 807420 - DNA, 636 bp, Homo sapiens
tactactgtttctaagtcatgagttcagaatgtttgtgataaaatatctcatttggatatcatctataatgattcaaatcctttaagtacttttaaaaaatttatttgctgtttagacaatggcttcccacctttacaagtagcaaaacaaaaggtcacagagtgtaagtttcctggtcacattgaaagtggtgggtggtactgatgcccaaagctctttggggcgtcctgggaagcacccattccattttagcaccaagggaaatttccatttcttgttgaactgccccacactcaacgaaaatgaactacatgattcctaatctaccatttacagtgagtatagagatagacatggcaaggtccctgatctctaagagtttaaatttagggggaaagggctkaaaaataagtaacataatgggcaaaactaaagtgcttaataattacatttcaagggagaaagggaaataactgaagattcaatggaaatggcaggtggcttgtgatctgagcaccaaagaataaacataatcccagtagggtatagacaaaagatggcagcttcggaataaacaggggcatggacgccaggcagtgatggtacattcacagagatatcaatatgtagagaaa

SEQ ID NO: 807421 - DNA, 626 bp, Homo sapiens
aagaggttctttaaaaacatttgggacttctgtgtgcctgaccaggattatctactagagggcaggttctactcagctctctggcttggtagcccagagtctggagtttcttggatatgctttttatgattctcttaatattgtcactgaratttggtaataacaagcttacacataaataaataaataggtaggtttggggtttccttgttttatttgggtatagttttccaaaagaatatacctcttgcttcttgttgcagtaggaaaatgataggggctacttgctttggggttgggtagaaagatggaagtcttccttctcaccagacttggagatcatcttgctgcaccctggtctccactttccttaatagctggtgcttctggtttctaagccttgctgaggttctgcagggaggactggctggcttctccacggtagccacccctggagcctcccaggtatgaagttattccaccctgcacaatcctcttgccatgttcatacattgtgtttcagggttagagaagtctcctaaatccatagggtgtggggcttgcatttttatttctggttttcattatttgaggttaacttgtaaaagaagaaagcaatataacat

SEQ ID NO: 807422 - DNA, 626 bp, Homo sapiens
aagaggttctttaaaaacatttgggacttctgtgtgcctgaccaggattatctactagagggcaggttctactcagctctctggcttggtagcccagagtctggagtttcttggatatgctttttatgattctcttaatattgtcactgaaatttggtaataacaagcttacacrtaaataaataaataggtaggtttggggtttccttgttttatttgggtatagttttccaaaagaatatacctcttgcttcttgttgcagtaggaaaatgataggggctacttgctttggggttgggtagaaagatggaagtcttccttctcaccagacttggagatcatcttgctgcaccctggtctccactttccttaatagctggtgcttctggtttctaagccttgctgaggttctgcagggaggactggctggcttctccacggtagccacccctggagcctcccaggtatgaagttattccaccctgcacaatcctcttgccatgttcatacattgtgtttcagggttagagaagtctcctaaatccatagggtgtggggcttgcatttttatttctggttttcattatttgaggttaacttgtaaaagaagaaagcaatataacat

SEQ ID NO: 807423 - DNA, 626 bp, Homo sapiens
aagaggttctttaaaaacatttgggacttctgtgtgcctgaccaggattatctactagagggcaggttctactcagctctctggcttggtagcccagagtctggagtttcttggatatgctttttatgattctcttaatattgtcactgaaatttggtaataacaagcttacacataaataaataaataggtaggtttggggtttccttgttttatttgggtatagttttccaaaagaatatacctcttgcttcttgttgcagtaggaaaatgataggggctacttgctttggggttgggkagaaagatggaagtcttccttctcaccagacttggagatcatcttgctgcaccctggtctccactttccttaatagctggtgcttctggtttctaagccttgctgaggttctgcagggaggactggctggcttctccacggtagccacccctggagcctcccaggtatgaagttattccaccctgcacaatcctcttgccatgttcatacattgtgtttcagggttagagaagtctcctaaatccatagggtgtggggcttgcatttttatttctggttttcattatttgaggttaacttgtaaaagaagaaagcaatataacat

SEQ ID NO: 807424 - DNA, 626 bp, Homo sapiens
aagaggttctttaaaaacatttgggacttctgtgtgcctgaccaggattatctactagagggcaggttctactcagctctctggcttggtagcccagagtctggagtttcttggatatgctttttatgattctcttaatattgtcactgaaatttggtaataacaagcttacacataaataaataaataggtaggtttggggtttccttgttttatttgggtatagttttccaaaagaatatacctcttgcttcttgttgcagtaggaaaatgataggggctacttgctttggggttgggtagaaagatggaagtcttccttctcaccagacttggagatcatcttgctgcaccctggtctccactttscttaatagctggtgcttctggtttctaagccttgctgaggttctgcagggaggactggctggcttctccacggtagccacccctggagcctcccaggtatgaagttattccaccctgcacaatcctcttgccatgttcatacattgtgtttcagggttagagaagtctcctaaatccatagggtgtggggcttgcatttttatttctggttttcattatttgaggttaacttgtaaaagaagaaagcaatataacat

SEQ ID NO: 807425 - DNA, 541 bp, Homo sapiens
ggtaaattggatggatgatttccttctaacataaaatgtcaaattaatctatgctgggaattccagtacaggcagggggaccttagctgtatcactcaagtctgttttgatagcatcccaaatgccactgtttttatattgaaagcatacttcatatgcttttgaagtaagatatctaccaccactgcattgcatgtgagaaatgttacagggagagraatgaagtggagttgctgttcccagttatgcttcagaatttctgttaccaaatttgacttttaacaattgtatgaacttttcataaatttcacataaaactaattagggattttatgaaatttttataaattttgtttcaggaagagattacttaagtttctcataggaatggtaatttacctggcagaccaaattgtagtgcagcaaattgatttgaccaatacaggttgagcatccctaatccaaaattttgaaacattttcaaaagaaatgctcattgaaacatttcagatttcagatttttggactggggatgctcagc

SEQ ID NO: 807426 - DNA, 541 bp, Homo sapiens
ggtaaattggatggatgatttccttctaacataaaatgtcaaattaatctatgctgggaattccagtacaggcagggggaccttagctgtatcactcaagtctgttttgatagcatcccaaatgccactgtttttatattgaaagcatacttcatatgcttttgaagtaagatatctaccaccactgcattgcatgtgagaaatgttacagggagagaaatgaagtggagttgctgttcccagttatgcttcagaatttctgttaccaaatttgacttttaacaattgtatgaacttttcataaatttcacataaaactaattagggattttatgaaatttttataaattttgtttcaggargagattacttaagtttctcataggaatggtaatttacctggcagaccaaattgtagtgcagcaaattgatttgaccaatacaggttgagcatccctaatccaaaattttgaaacattttcaaaagaaatgctcattgaaacatttcagatttcagatttttggactggggatgctcagc

SEQ ID NO: 807427 - DNA, 541 bp, Homo sapiens
ggtaaattggatggatgatttccttctaacataaaatgtcaaattaatctatgctgggaattccagtacaggcagggggaccttagctgtatcactcaagtctgttttgatagcatcccaaatgccactgtttttatattgaaagcatacttcatatgcttttgaagtaagatatctaccaccactgcattgcatgtgagaaatgttacagggagagaaatgaagtggagttgctgttcccagttatgcttcagaatttctgttaccaaatttgacttttaacaattgtatgaacttttcataaatttcacataaaactaattagggattttatgaaatttttataaattttgtttcaggaagagattacttaagtttctcmtaggaatggtaatttacctggcagaccaaattgtagtgcagcaaattgatttgaccaatacaggttgagcatccctaatccaaaattttgaaacattttcaaaagaaatgctcattgaaacatttcagatttcagatttttggactggggatgctcagc

SEQ ID NO: 807428 - DNA, 578 bp, Homo sapiens
ctacaaataaactagaaaaaggggtaaaagtagtgtgaaaacaggattgattaaaagtttaagaagaagtcagactcctggatcttgtcctctgctccatacagacaggatattgccttttccacaaccagacagaagacagaagatatattttctaagagagtacaccagaggttcaaggatctgaaggagaccagtcagctgaaaatgaatgcccagtactgaaaaaggagggtttcggtaaatgctcacacattgaattttgaagccctcagccttctcccttcacttgagttccagaatgacttcaytctcaggcaaggatttggaaatgtcttctgtgggcattctagacaacccaaggaaaaggtcttaagaaactgaacttgtaatgcactggccaaatcacttacagtgaaacccagatgtcataaaatcataaaactatatgcaaacagattctattaatctgttttaaatacaccatgaataaactagagcagccgtctcaggatcatcagatattagagggaaactaccatttggcccagcagtggtatatattcaaaggaaaatag

SEQ ID NO: 807429 - DNA, 560 bp, Homo sapiens; identical to SEQ ID NO: 769937

SEQ ID NO: 807430 - DNA, 479 bp, Homo sapiens
ttctatgaagcttatattcaaaagtagataatttattatatatgtgacagaatctgcttttcaattctaaaacacataatttcagttgagaaaaatttagttctccccagaatttgattgttggattctataatcttgaaattaaaggtaaataatatacaaataaattaaaataygttaatgttgtattagcaactattttcaactattatcaatatgtgaattttgatatgctgcacgcagccagttgtctttttttgttgttgttttttttgagacggagtagccagttgtcttttaagactgtgtttaccctcaataacacatccatactttgctaatgcttgactctggactctcacatcaggaaaaccacagtgttcctgtcgccatccacccatttcctccacttccaacatggggctctgacaaagttacagcaagaaacatttttgccaagatgcttgtgcattcttaag

SEQ ID NO: 807431 - DNA, 627 bp, Homo sapiens
aatgtgctgtagtggttattaacaataattattttctttctttagctatgaacacttttaacgaaaacttactcaacagccaatatataaaacaggcaaactgatactccttttgaaatcccttctagtagaagaaacattgaatttccatttacaataatatggaagactcaatcagaaaagaccctgcataaaatgatattttgattcattgctaggcttttagaaaggaataaaaattttaacagaaaaggaaagaaagggaaaaaaataaaagttaagaaaatgaaacacacaaaaaacagacatagttcccaagctgacataaaatttgtgatgtccctcagtgcacgtatgaattagccgtgtgatattcatactgcatctaagatgaacatcaaggagagggaggcaaacctaagaaccctgattaattcttagaatctgagaaatggctcgagtggttccaggttawtttctcccaaggagatacagatgcaaacccaataatttttacacattaattatcctcaattcaggctatcaggttttctgtagattaatataattcaaataaatttaaaaattaatgaaaacaaaaagagagacggccatcatgaatgaaag

SEQ ID NO: 807432 - DNA, 608 bp, Homo sapiens
aaagcactggggcatatacccttctatgtgggagaataaattatattgtgaaggcttttcacatttttatttattctagtacatgggaatggtattatatctacagaggtcacaaaacccttgtgatagagttgggatgagaatccacagtttctaatataatccagttctcattcccataagattgtctatggatagttggagctgctaaaaagtattgtgtcaatatctaaattaacaatttagttataagaaccattattatattcagcagacctgcagtctcctggtggttttctgaatttgtgagagctctgagccatctattctataggccatattcctatctccaaacaygtctcaaaagcttacagcgtgataccatacatagcataaaatatagaatccagttaattatttctactctgagcttttctacttttcatataattgctaagaaaataactgaacacatgcttgcatttctactcaccagatttgacataaagagctccatcaacaccaaaaatgtcacagtatcagtgttctcaatagttcctgtcacatgtttagtatttggaaatactcttcaagtacacttgtgaaca

SEQ ID NO: 807433 - DNA, 526 bp, Homo sapiens
gccaattagagaaattagttacaggcacctggtgagtttttccagtgaagcatcttgaaacattttctctcagctcttttatttgtgatgaggaggcctcttatattctcttgcttttgggtcctttggaggttcctgaggaaagaggaaaggtatgtttgctagtggttttggaatcatatcagtggaaagaattagactgcagtatgaattacacttaattcctcagtttgtagccccttgcttcacccttgcttttaatatgctttgtcactttaacatctcccaagttcacttccyaaaggcataaaacttcagtattctgtaggaattgggaacgcagaggtagagagtggaagagaatggtgattgcttgattatacaaggaggagaatcttggggttcaatctttatctaccaatattcaatcaatcatccgttttctatatcacaccataccctcactttctgcactatctggtgcttccgcttatacctttccagagttattccaggcagttgtttt

SEQ ID NO: 807434 - DNA, 553 bp, Homo sapiens
ttttttgagacagagtctcactctgttgcctaagctggagtgcagtggcacaatcttggctcactgcaacctctgtctctcaggttcaagcaattctctgcctcagcttcctgagtagctgggatcacaggccaccacgcccggctattktttttgtaattttagtagaaatggggtttcaccctcttggccaggctggtcttgaactcctgacctcgtgatccaccctcctcagcctcccaaagtgctgggattacaggcttgagccactgcccccagcccaaagatgctgcttttaatatctaaaaaatatcagcaacagcaacagcagacaatacctcaggcagaaaggagagagaaaatattatggatttaagagatcaacagaccagaagaagaagatagaatggcccaggaaattttcagaaaatgctgatggtatggaagcaaaacctctttctccccacacttgatgaataccactaccaaaaaaaaatcaaaagcaaaagccaaaaaaaaaaaaagctatccttaatgaaatgtcaacgaacca

SEQ ID NO: 807435 - DNA, 553 bp, Homo sapiens
ttttttgagacagagtctcactctgttgcctaagctggagtgcagtggcacaatcttggctcactgcaacctctgtctctcaggttcaagcaattctctgcctcagcttcctgagtagctgggatcacaggccaccacgcccggctattgtttttgtaattttagtagaaatggggtttcaccctcttggccaggctggtcttgaactcctgacctcgtgatccaccctcctcagcctcccaaagtgctgggattacaggcttgagccactgcccccagcccaaagatgctgcttttaakatctaaaaaatatcagcaacagcaacagcagacaatacctcaggcagaaaggagagagaaaatattatggatttaagagatcaacagaccagaagaagaagatagaatggcccaggaaattttcagaaaatgctgatggtatggaagcaaaacctctttctccccacacttgatgaataccactaccaaaaaaaaatcaaaagcaaaagccaaaaaaaaaaaaagctatccttaatgaaatgtcaacgaacca

SEQ ID NO: 807436 - DNA, 659 bp, Homo sapiens
attagatactgaccatttacatctccactgttcctacaggtaggttctctaatgttagagctataatgcttttgtttaagagttgcttaagatgtttttcagatcttgaatttcagggggagggctgataccaaccagtctgaagacccctgccgaggaatcgaatcagcatgagaatgcagctttttcatctcccattccatgacctcccctgcactctttgatcaatccaggatcccaacacctcagcttactccaggcgcctagaaatctctagctccaaactcctaagggagatgaattgtaggtttcctcccacttcctggttcagtggccttacaattaaaactctttctctgctgcaaccttcrtgttgacatgttgacttaccacacatcaggcaatggacctattacggtcacaaaagaacaatatatgtcatttgtaactccttaaataataagcgtatttaaataatcatggtaaatctatttaaataaaatagaaggcaggtgtttaaaaatgatgtatatttctatttactagcaaagaatgtgctcattagatacagttatagttaaacaataaagcaactggtaaaacagcacatatagtataagacctgccttgtaaagaatatatccatgttctaagaatgt

SEQ ID NO: 807437 - DNA, 550 bp, Homo sapiens
tataaacatgggcaagagaataggatataaggataataaagtggatattgtccacacttccttacttgctctctttatgtaagtgtgtatatgtgtgtgtctataacaggtttttttcctaacagttgtatgtgtgtttggaagtttttaaaatagatttttcaaggctattttatgtacactttttttggttagtattttggtgatttttagttaaagaaaaacaatgttttccaagggcaaaaaaawgaactgaagttcggaaggaagctggatgtggacttcttacaagctcttgctccaaaacctggaaacgaggaaagagggccctcccgggaaacctgagaaacattggcacagcagagggaatcctttggtggggtgggcggagatgccagcccacttgtgtgactgtattgttttgagtgggctctaaggcaatttctgcgtgccactccattgacttaattaacattattaatcttgaagggcattaaattaatgaatgatacaagggccaaaagagtgatttattcccttggattctgaa

SEQ ID NO: 807438 - DNA, 541 bp, Homo sapiens
tcttaagatgcctgagttctatttgctaagcacttgctgttcatggattactgaagaataaatgaaggacatagttgtataggtcagggtttgctgtgttcttgtaagatagttaataatcttatactggaaaacatgttggtttttcagaaaatgtataaagattaaattttagaaaatatcaatgtcttgtaattaaaaatggcagtaacaaaagattttgttcatctggacagttgttttattttcattaatttgctgctcattaggctctctggtatatctttgacgacttattggaggtgtatctgaacaaatttaaaccttagtttctttcctgctgcttattcaaaattcacgtatttccccacagggacagtacggataataatcaggrcttatattcaacattctaaaatgttatgacctattcaaataggttatgaaaatactgaaatgccaccctgccagaaagtagtagaagccctactcctacaagagccctcactggacagctttgtgtctcccccagggatcctga

SEQ ID NO: 807439 - DNA, 631 bp, Homo sapiens
tctctttcattttatcctctcacgttcttgtttcttagcagcatgcttagcttctacttattcacattttgctcgtgctttgcgacttgatgtttctttcattttttgttttttgaatggtaatggagtttacccattttgctacattgctcttctggctgaagctgctcaatggtgaagtgttcttctgaccaacattaggtmatactgcattgttctctagcaaaggctggacaatttttctaagttgcttcctgagtctttccttttcagctactatttcagatgttctaagtattattaatctgtgatttgggattcctgtgagatttagaccctctttttccctccatagtaatttcttgtacttttgctgaatcttcagtcttctcagaatgccaagccttgcaggtggacatctataaggagttgggaactatgggaacaactgttggattgctccctgaccccatccctgcaagacggtggcactgaggatgttgacagcagactctgaggcttagcccttctcagctttagtgaatgaagcagacatttttccctgatccatggctgtgaaaaattatacgaatacatttactaatattaaatttatatttctgtgggcaca

SEQ ID NO: 807440 - DNA, 655 bp, Homo sapiens
gtcaccaatggaaacaaacagtgacctaacataaaaagtaacttgtcagtattaattaacacaaatttatgtcaacataaaatttatgtgggcataaaatttatatgagctcgtaaaaagccagcaattcacaggaaatcatttttaatktatgcaatatctattatagagcacatttgagacctacatgaaaaagatatgatttctgactcaagaaatcaatggtctgacacatttttttattgagtagatagataccaagtgtccagattaatggatttagtatttcattatactccacatggatcagaaacagtgatattagtaggtccagaacaaattaaatgcaatatttttctaaagactggtactgtggtctagaatgtatgggtgtgctgtgtatgtatgtgtgctctttatcctggagataagaggaacataattgcgattttcaattatagtacttaaagggttctcatgaaaaacaagggcttaggtatattctggctccagaggatggaactgagaaaaataatttaggagacttatttcatttcaaggtaagaaacttgacttagaaacttagaagtgtctaaacaattaatcaggaaattggtatagcaattaatttcctgaaacaaggatccaatagtag

SEQ ID NO: 807441 - DNA, 639 bp, Homo sapiens
gccttttcccactggagttagaaacgattggattgaatctatagaataaagcatggtgccataaaaagctgctttctatgtgataaagggattagaaaaacaccatccatcttcccagagaagaaacaagaaagcaagctgttccttttctttgacgaagaagaaaaaaaawattacaaaaagcaatttggaaccacatcattcatgaatgaaactgcaagtttgcactgtttgagtggtggtaaagctgccaaattgagagattaatataaaaactagatcctaattattgaatcccctaggggttcaacagaagaaaaataagatcacattttttggacacttcaagtgcccaagaattctgagattttttttttacggtcaaaatgaaactatgaaaaatatctgcttcagcaaatgaagagatgactgctgcagaagttgcctttcctatacacaactggaatattagtcaaaatatataaaacaatctttttggacactggacaacagacagacaagactgtgacaccagcgataaaaacaaaacgtcttgaggcagtttccaagctacagcagggtgagaaaactgaaacagggccctgtggtctttgtgagttaaggaaacagaaattagag

SEQ ID NO: 807442 - DNA, 562 bp, Homo sapiens
ctctctttctttttctaagaaataaaatatttcctatttagttgatactgactatgagcttctcagcatccgtcatccttcctttttcactctctagaatttgttgtttataattcccatagcacacacacacacaaaaagaaaaccacttagaaacaaatgcaggaaactgtgaatgtatacttattttgcattagatttattcagtggatacttggaattacaattgattaattttatctatatgagatgaacatatcagtattatttatttcattctctgtagatggtgtgtggataatgctatacttacatatatttacacaatttccatttatrctcctataaatattcttatatagttgcacacaaatgttgatgtttctctaagacagaagttcttagactgcatactgaaatcacttgggaagtagtgttaaaaaattctggtgctggtatctctcccctgctctggaaattctaacttaatagttctacagaatggctcgggcatcagcattattttaaagttccccaagtgaatttagtttgatttagaatt

SEQ ID NO: 807443 - DNA, 624 bp, Homo sapiens
aatagttatatgttggcgtcaggcctggcacggtagcatttaaaggaaaaacagcaaacttttcagaaatgactctattccataacacagtttaaaaagtattctaataaggaaatgtctcttctcaaggtgtgcgtgagtggaagtgaatgataattattattatgaatttcttcactctcctaatattgtattaatgagtgtactatttagaaaaacagcagtttaataagaactctctatataagacatagtttgttttgttgtcaacaayatagtttgaaaattataataaaacatttaaaagatcaaggaagtaaacatgattgtatttttaaatttctttgcgtttccttataaatttcacttgaccattttcaaaatcaaacaaaattatgagtcactttcacagattttgtcgtagaggcctccccggtgatctagggatagaatttctaataagaaagaaaatcatctagcaatgatgatcaactctgctgggtttcatgctcagattattgcttcacagcaggctaggatcgttctcatgatacaggataattagactgagttttccatgtagagtactattgtcagaatttccaagaataaaatagtgttagc

SEQ ID NO: 807444 - DNA, 563 bp, Homo sapiens
taattctaaatcaaactaaattcacttggggaactttaaaataatgctgatgcccgagccattctgtagaactattaagttagaatttccagagcaggggagagataccagcaccagaattttttaacactacttcccaagtgatttcagtatgcagtctaagaacttctgtcttagagaaacatcaacatttgtgtgcaactatataagaatatttataggagyataaatggaaattgtgtaaatatatgtaagtatagcattatccacacaccatctacagagaatgaaataaataatactgatatgttcatctcatatagataaaattaatcaattgtaattccaagtatccactgaataaatctaatgcaaaataagtatacattcacagtttcctgcatttgtttctaagtggttttctttttgtgtgtgtgtgtgctatgggaattataaacaacaaattctagagagtgaaaaaggaaggatgacggatgctgagaagctcatagtcagtatcaactaaataggaaatattttatttcttagaaaaagaaagagag

SEQ ID NO: 807445 - DNA, 596 bp, Homo sapiens
aggtagaagtaaaaccaccagtgatgattatctctgtgatgaacaataatccagatgtcatgagagatggtggcactcagacttgggtgatggcaaaggtgttgagaagaggttagatgatggaaatattgttaggacagagccaacaggatttccttctggatttgagctgtaagagaaggtgtgagatttcagaggatgtgagagatgtgagatgatgtaagagaaagtgacaggccaaatgtgattccagtttttttttttttttttagctgaagcaacagattagttggagtttacgtgtattggggtgggaaagatcacatgaggacaagatgtggaatgcgtgggtgtgagggtagggtgggggtgagacttgttagtctgaggtyagtgagaagctgaggtgaaaaacacaatgaaatatatattaaatatcatatgagtgagatcacctaagagtaattatagccagagaaggaaagaaaaaacgaggactgatcctaatagaattacaaaatttaaagggaagggagatgaggaggattcagtaacagtgccggaaaaggagcagtcagcgaagtaggaaggaactc

SEQ ID NO: 807446 - DNA, 589 bp, Homo sapiens
acaggatcctgccaaagtctagggctgcactaccctcatcctaagcactgctgtataatccaagcttcaactgctacgaagtaaaaatacagttcagatatttcactgggaataccatttttcttgtttctccaattgcataacatcatataaggtaatgctaaattaagagaagtgatgagaaaaaaatggctaaccttattttatcagaaaacaattgagatcaactttaaaatctggttawtacttacagccatcctgtttacaaatccactgtatgcaattgactcgggcggtgtgaccattcaagttggtaacaacaacccttttctttagagaagaaaatacagttagtaaactggaatttatcctacagaaaaattaataaataagtaaaaacagatttcagtgttttcgatgctagtaaaaagatcaggtttacatcaaacagatttgccttcttcaatctataaacttttaaccatggcttaagtcatccattcctctaaatcagtcctgcctttcttgagactccacattcccagcatcctgtcctcccattacactgagctctcgcgtctgcatccac

SEQ ID NO: 807447 - DNA, 589 bp, Homo sapiens
acaggatcctgccaaagtctagggctgcactaccctcatcctaagcactgctgtataatccaagcttcaactgctacgaagtaaaaatacagttcagatatttcactgggaataccatttttcttgtttctccaattgcataacatcatataaggtaatgctaaattaagagaagtgatgagaaaaaaatggctaaccttattttatcagaaaacaattgagatcaactttaaaatctggttaatacttacagccatcctgtttacaaatccactgtatgcaattgactcgggcggtgtgaccattcaagttggtaacaacaacccttttctttagagaagaaaatacagttagtaaactggaatttatcctacagaaaaattaataaataagtaaaarcagatttcagtgttttcgatgctagtaaaaagatcaggtttacatcaaacagatttgccttcttcaatctataaacttttaaccatggcttaagtcatccattcctctaaatcagtcctgcctttcttgagactccacattcccagcatcctgtcctcccattacactgagctctcgcgtctgcatccac

SEQ ID NO: 807448 - DNA, 630 bp, Homo sapiens
ggggagtcctgaactggagctctgggcccagaggacttctggcctttggcacgtcctgctccgtggtgctctatgaccccctggtaagagaggtcgctggacggccgacccttgtgcttttcgggttgaacctgtggacgtgctccgggcgcgctgttagttgccgccccagacctaggaggcgagtcgggtcggctcaggggagcggggtttgggctyggagtctccagtggacctgccggactcgctcctcacccctcaccctttgccgtctcacgcgtggcgtcatcctagggtcattgctgcccatgagctgctagtaacctgttagtcccacgcagaaacccgaatgataagcatcttacctgaagccttccttgggaactgtagtaccgttaatcaatttgggttttaaaacaattgaaatttatatgtagattaaaaccatcatcccacaggtgcaatctcatttcagtatttccttcagttttggttaatgaacttttgttgtattgaatttcaaggaaatgttacctgtgttttagctacgggaatggacattttagagaaagtgtcagtttgggggaaaggtcataggggatggggatcctaagcactgattataaggcg

SEQ ID NO: 807449 - DNA, 538 bp, Homo sapiens
ttattgataagtgaagctaggataggctctgctatagcgtagggtctcattgctcaaaagtaatgaggaaggaatcactgctttgttttctgaggacattattgaattcctggtttcttcctcttcttttctttcttttccttttttcttaaaaaaaaaaaattcttttatcatttagctcttatgggagtctgaaagctcagttcctaagtgagctacagttcatccttggtaaccatttttttttcctctttcaccccgacctgaagratttcccattagagctatgctccttacctggagagttcttaagtaccagtcaggttgttcatttgagccaacaacagatttcttggttattgtgctattgccacagtaggtcctatttgcattgaatttgtgtgtttttagcttctctccttttacgtgttgctttatgctactctccaaaagtctttcttgtagagtttattagttgtataatttttctttgctctgttttgttttgtttgacagcctgggttggtggttttatagc

SEQ ID NO: 807450 - DNA, 602 bp, Homo sapiens
tgttgcattatgggctatgaaattccttctgttagttgttcacattttagcctgtgcccactgtgttttgtatgatggacaaaccaaataatcattatgtaagtaaggtagagctttatattttttccaatgtgtaaacactctgtaaataggcagtccttggtgggtgtggcagctcccctagctcatcaggaacctggactcctctctttcttctctgctatcctcagtgtgtagttctcatctttcaggctgcctggtggttgcaagatgactgctgaagttctagtcatgacactcatgttctaggcaggaagtaggaagaaagggagaaggtagctgaatacaatttaacaacttccatttaaattttgtggtaraatgtctgcaaagatggctgccaataatttttgtaggcttaagtcattttttcctgtcaagaggtatagtctgtttctcttctcctttagtcagggctggccctatgacttgctttgaccaatagaatgtattggaaggccttgctaggctttgctgcttctgtttaccctcttgggatccagctgccatgtaaagaagcttagactagaatatatatatat

SEQ ID NO: 807451 - DNA, 587 bp, Homo sapiens
ccatggcctgaggtgttaagtacactggttttctctgacaaaacttcctggctcaaaactcccatagcccttgttacagtcttcacctacaaaattgggtatattaggcttcagggtcaggcctctaatcttccccacctgtttgactgtgtgtcttaaacccgaccagctgggcgcagtgggtcacacctgtaatctcagcactctgggaggccgaggtgggcagatcacgaggtgctaaaaccatgaagccccgtctctactaaaaatacaaaaaattagccaggtgtggtggcaggcacctgtagtcccagctactcaggaggctgaggcaggagaatggtgtgaactcgggaggcggagcttgcagtgagccgagatagcgccactgcactccagcctgggtgacagagtgagactccatctcaaaaaaaaaaaaamaaaaacctgaccatgagagggttccaccctgggggaaaaaatgctgacgtcatgaagctgccataaaaaccaaagacgacacagttcagggagcttcggagcttccgaatagctaagcacatggaggttcctggagggcggcacag

SEQ ID NO: 807452 - DNA, 539 bp, Homo sapiens
ttcataaaaactccaattagattatggaaatatatgtgaaaagcaaatcaaaatgttttcttagaaaataatgccagagaatattctcatgaatttaggataagggcagtttatttataattgaaatgcacagagcaatcatcatgagcacattaaaattaagaaatcatgcttatcaaataaatagcatcaagaacktgaaaaggcaagccatacaaagataaaagatgtttgctaaatatatgaccagcaaaagattagtgggtgccagaggtcagaaaaccttttctgtaaaaggccagatagtaaataattcagactttgcaagccatacagcttctgtctcaactactaaactctgcccttgtagcatggaagtaagtgtggctgagttttaataatactgcattcaccaaaatatggcaaatcagatttggcccatagtccagagtttacccattattggtgtatagaatatataaaaggttgcttcaaaacaattaaaaaacaattaaaagactggcaacccaaaataaaga

SEQ ID NO: 807453 - DNA, 593 bp, Homo sapiens
aggatctttttaacagccagctctcaagtaacaaatacagcaagaactccctcattcttgacagagggcattaatcttttcataattaatccacccacatgacccaaatacctcctaccaggccctgccttccaacattgccaccttgggaatcaaattggaacatgaggtttgaagaggacaaacatccaaatcatagcacatggaccctgaatgataatgcattaacgtatagaaatgtgaaaggaaagagcattcttaaaaaaaaataaataaaataggataagccaaaggggaaggttggggtaagtgagaagaaaagcatgtagaatatgtattgaggtactgctgctatgtgaatttattagcagagaaaggggtacagtgtgatttttttaaaaaaagactgggcattttcagagggcctggtggyataggaaggccatttttggattaagtagtctgatttgattctgaaatttatgagtcttaaatattcctaaaaaagaagtgcattatcagaagataattccaagttcattatgaaggagctagtggaagtagagtggcatatttggctatgactacaatcc

SEQ ID NO: 807454 - DNA, 621 bp, Homo sapiens
tgtgtctgtcttattctgtgtataccaacacacatcagtggctgcctgattggtagttatttgctggatgaatgaataaacactgttcatctttgaattctaccctagcactttggcagcaaagaactttgctcagaataagaaaagcagtcagcctcatcaatatttcttttcctgatttcccctgcctcacctgttcctcatcccaagttaagaaaggaagggagtacctcttattcatccttctaaactcatttacattcttacacccaggcttctctcagtactcaccaaactcctttgctacctgggtctcagaaacaagagaaggtaccagccctcccactcactgagcagasagatgaccggtgccagggaactgtgtgtctatttgtactcataacagctctaggggactcccagcctcatagcccaacctcccatttacacacttgtaaatggaggaggggagggagagtggggtttctggtcctcctggtgccagtatgtttccaagatgaaacttaaggccccagagagtcccaccctcttctggagggctctttcaggtaaataataggtgccctgtgggcccagatccactgtggatttttaatgcat

SEQ ID NO: 807455 - DNA, 618 bp, Homo sapiens
ctcctccacagaacgaaagtaaagatgttatcttactgtgcctcacggtagttaacctattagatgaggtcatgtgtcaaacaaaagacagtctaatctacagaaacagggaggttaaacagcaatttaatgaaataccaaatgacaatcttatttggtccctgagtgaccacaaacatgaattctcagtgtaagaaccaccgaatgtgggagactcttgcctatctctgtcctggacaggatctggacaccatggaggagagctctgagataaaagtggaaacaaacatttccaagacatcctggattcggagttccatggctgccagtgggaaaagggtsagcaaagccctcagctacatcacaggagagatgaaggagtgtggagagggacttaaaggtaaaattctatgagaacaacactgaccctgaccctaaaaactcacctccacccatccccaggaaacccattgccatgggggttccctatagactagacttagactagactgcactctgttactgtggtctttcctggaagctgggagttttgctgttaaaacagacatacagcctcttgaactataaatagcaatacatgcaagagtgtgagctcat

SEQ ID NO: 807456 - DNA, 632 bp, Homo sapiens
aaaatatgattgtatatatactcatctctgtgcaatttccccccctttattgttttttgatttgctctttattcctccttttttcccttcctcttgtaacagctggtctgtgtcttgcctgctgcctagacagagctgacttatcaagacaggggaattgcaatagagaaagagtaattcacacagaaagcgggctgtggaggagattggagtttttttattattcaaatcagtctccccaaacatttggaaatcagagtttttaaggataatttggtgggtggaggaagtcctgtgagtcgagagtgctgactggttgggttggagatgaaatcatgggaagttgaaggtgtcctcttgtactgagtcagttcctgggtgggggccacaagataagatgaaccagtttatygatccaggtggtgccagctgatccatcaactgcagtgtctgcaagatatgtcaggcactgatcttgggagcagtttagggagggtcagaatcttgcagcctccatcgtcatgactcctaaaccataatttcttttttttaaaaaaatttttattatactttaacttctagggtacatgtgcacaacctgcaggtttgttacataggtatacatgtgccat

SEQ ID NO: 807457 - DNA, 552 bp, Homo sapiens
actaattaaccaatccttaacatttgagttaaactttcttaaacccatggttctttaaaatactttctcattctgtttatatatcctcccaacagaataagagagagagagagagagagagagagagagtgtgtgtgtgtgtgtgtgtgtgtgtggtttaaaacaatagaaatttattctctcacagttctggaggccagaaatccaaaactaaggtattgccagagttgtgtttttccctgagaaagaagattccatgcctgtcaactggctcctggtggtagtcagyaatccttgatgttccctggcatttcctggcttgtagtggcatcactccaacctttgtctatatcttcagatggttttcttctctttgcgtgtctgtggctctgtggctccatgttttcctctcttttcccttacaaagatgccagtcattggatgtagggcccaccctaatccaacgttacctcatcttaactagctacatctgcaaaggctctgtttccaaataaagtcacattctgaggttctggatagacattagcctta

SEQ ID NO: 807458 - DNA, 552 bp, Homo sapiens
actaattaaccaatccttaacatttgagttaaactttcttaaacccatggttctttaaaatactttctcattctgtttatatatcctcccaacagaataagagagagagagagagagagagagagagagtgtgtgtgtgtgtgtgtgtgtgtgtggtttaaaacaatagaaatttattctctcacagttctggaggccagaaatccaaaactaaggtattgccagagttgtgtttttccctgagaaagaagattccatgcctgtcaactggctcctggtggtagtcagcaatccttgatgttcyctggcatttcctggcttgtagtggcatcactccaacctttgtctatatcttcagatggttttcttctctttgcgtgtctgtggctctgtggctccatgttttcctctcttttcccttacaaagatgccagtcattggatgtagggcccaccctaatccaacgttacctcatcttaactagctacatctgcaaaggctctgtttccaaataaagtcacattctgaggttctggatagacattagcctta

SEQ ID NO: 807459 - DNA, 529 bp, Homo sapiens
cagtgcgatgagcctcgtttctgaaaagcgggaaaggggccgcgtcaaaggatgtactaaaataacccgacggcaccgagggcacgtctgcggttacgaggagcttccacggcaactgagagctttctattctcgtttgtttttaaattatgcacaaattctatttttatccaattgtggtccaccaactgaaagagaaaactaacccccaaaaccccctctttttagctgcttttacctcacacttgcagagacagaaatccactctgccacagatacatcacaaaactctttaaattactaatttctacaaatgagatatgctgacagctcctgacrttctccgtgcaggggaccgttttctcccgcgtttcaatggaaagggctccttctgtggaaacgcagagccagcctctcccgtgtcgctgctgcgcacacacgggccacttgatttggaataattgttgagggtacattttaaagatatttttaattactgtttcaagtttcctgagtcctccagaacacc

SEQ ID NO: 807460 - DNA, 628 bp, Homo sapiens
atgacatgaagctcaaatatcacattctttcatctgtaaatatgtattatgtgcccctaattgataaggactctgcctttcgttggggccaaagctccctaaagttctgagaacaggaattagaggttgagtatcccttattcaaaatgcttaggaccagaaatatgttggattctggatttttttagatttggaatatttgcattatccttactggttgaacacctctaatcgcttatctgaacatccctttgagcatcaatggcgttcaaaaagcttcragttttagaacatttccaattttagatttttggatcagggatactcaacctgtatttgcttttaaaacaggatttagcctagaggctgtaccacttgccagagattttgcaggcagtgggttgtgtatagagtctgtccatggacccaagtcatcctaacagcctcattcctgctgtaggcacctcagagccaccacactgagcacagccctggcactgaggagtgtttccttgtcattcatttgcatttttttgtgcctgtcataatttgaagtcattgattcagtttgatcagacctggagatctgagagaatcaatttaagagactagcagacaaggctgcagt

SEQ ID NO: 807461 - DNA, 612 bp, Homo sapiens
tgtagcgtcgtgctgatactatcttaagcgatgtatctgtatcactaatgtcaggtgaaattttttcttttacgtaagtggtccctgttaaaatttaaaacaaccatttttacacatctagcatgtttaaacatttggagtcatatgtkggcaaaaatggctctttcagaaatggctataatttgatagagctttagtaactgtattaatttctgatgggaaaattacaaatgtaaataaattataatagactgctttactattcaggagaaattctttacattcaaacagtaactttataatgtcaaaataaccagtagttattaatcagtatctggactatgtaaatatttgcttgtttccatagtgattggcaagcccagatacagaaaaaaaaaaaaaacccacacatgttatcacttcctaataatatgatcataaaaacacgactcaggccagactgagaggagaataaacagtattaattaaaagatttataaaatggaggaggtgacaagtgaagtattgagtgtaaaaattcacaaaggaggtaaaatatatctttttcaattctgaaagaaacttgagcaacccttaattatctttcaaaat

SEQ ID NO: 807462 - DNA, 612 bp, Homo sapiens
tgtagcgtcgtgctgatactatcttaagcgatgtatctgtatcactaatgtcaggtgaaattttttcttttacgtaagtggtccctgttaaaatttaaaacaaccatttttacacatctagcatgtttaaacatttggagtcatatgtgggcaaaaatggctctttcagaaatggctataatttgatagagctttagtaactgtattaatttytgatgggaaaattacaaatgtaaataaattataatagactgctttactattcaggagaaattctttacattcaaacagtaactttataatgtcaaaataaccagtagttattaatcagtatctggactatgtaaatatttgcttgtttccatagtgattggcaagcccagatacagaaaaaaaaaaaaaacccacacatgttatcacttcctaataatatgatcataaaaacacgactcaggccagactgagaggagaataaacagtattaattaaaagatttataaaatggaggaggtgacaagtgaagtattgagtgtaaaaattcacaaaggaggtaaaatatatctttttcaattctgaaagaaacttgagcaacccttaattatctttcaaaat

SEQ ID NO: 807463 - DNA, 559 bp, Homo sapiens
ataatcacaatgagacgcctagtgaaaaagtcacaccgtgactgccctggccctgcctcagcttaaacaataaaatatgaattgcagaacatgacccaataacaggaaacaggaccagcgcagagggtgctttggtaaacagcagcagtttctcccaccaagatcttgattaatgcccttcccaaatctagagaaaggaataaartttccatgtcagaagggctgaccacacactcatgtaatgtctatctctgacatctctttccaagccgtgcacttgtgccagaatcatataccctgtcctaggacaggtaatgaaatgtaatgacagtctttcctggctccacttccagctgcttcacaatggctgctaataaagacatatggctatatgttgtccatctgtgttccaaaagcaaacatgcaattgtgttttcctcttaggtctgctctcagcctagaggaatgtagcctgagaaagatgagtcaatcttgagctgacctctcactgcttcctaggctacacttcaatacttccgacaatgcttccagatctctt

SEQ ID NO: 807464 - DNA, 657 bp, Homo sapiens
  misc_feature 1, 2, 3, 4, 5, 6, 7, 8, 9, 10, 11, 12, 13, 14, 15, 16, 17,18, 19, 20, 21: n = A,T,C or G
nnnnnnnnnnnnnnnnnnnnngaattcaaccaagttgatatctaaatttaagtctacatgtccacctgttttcaaattggcactcatacacatctccttaaaccacacttaatttccaaataaagacaataacaaggtgataattccacctaacatgatgcgagagatgtgatgcaactatccagcatgcaaccaaaaccacgctaatcccttccccaggatatggcttttggaattttaacatttggattgtgtcctttgggattatgatcagcactggagagggactgagagacaatctgaacaacatgcacagagaattggagagaatgaaaacatgaggaagagagaagaaggaaaaaaaggagaaagaaagaaagaagggaagagagatgrggggatcagaggggagaagggaaagagaaggacggaaaggaaggagaaagaaaatattccatgaagatccaatcttatttattcaaacccttcatgatattttgatattagggatgacttacatgtgcataagattttattagcaagccaaacccaggcactgactcatcattcttgagagcaattatatgcatttaagcaagtaggcaagtgaaaaaagtcataaaaaaatcctaaaaagctctgacaaaattcatataa

SEQ ID NO: 807465 - DNA, 615 bp, Homo sapiens
tggggaggcctcacaatcatgggtgggagatgaaggaagaacaaaaggacatcttacatggctgcatgcaagagagagcatgtgcaagggaactcccctttataaaaccatcagatctcatgagacttattcactatcacaagaacaccacaggaaaaatcctcccccatgattcaattacctcccactgagtccctctcatgacacatgggaattaatggagctacaattcaagatgagatttgggtggagccacagccaaaccatatcagtggggcatgtggatgacctagaagcgtaattataaaacaacaatgccactcagagtttaggagaatattggagagaaaacaggatctaatcatcagaaacctggaagttagagcaacattttttttgtttctttgctatgggagaaagaccactggaatcctaggtcctggctcagcartcaagccatagcaacacaatcatgaaggctaaagggattgaagaatttgctctctaaagttccatttcacctataagtttagatgaatctgtgatgcataaagtacattagggaggaatattttcatttttcattcattaaatgttttactaacactttctagt

SEQ ID NO: 807466 - DNA, 606 bp, Homo sapiens
tcttagtttttttctctcttgaaagagagagacttaatgagccaattcttcatcctgatgacaactatttagaggcttgaaggctgccttaattcaccacactgtctgctctaagtttgtagttctgtaggttattcatccccgggcctttctgaaatgcttttgagtcactttgcccttctgatccccatcttctaactacactcttgtttacgctttgttatctgaaggtggtgcccaggaccatacaagatattctgcatgtggtttgactggtgtatgcttccacaggaccagcctcttcttcagataygatgcctccatgagcacagcctaaacctacatcaattcttttacaagtacttcactttgctgctcctctttagcccctatctaggaaaactctacatttctttactcaatatgcccctaagatacactttttatcttttgaacccatttccagaactttgcagttactcttataagatataattattttcccatgctgatttttaattctctcatccatcaaaatcactatctttctttgattcatgttatctgcaaaatctgtatttttatatacttagcttttctactgaa

SEQ ID NO: 807467 - DNA, 602 bp, Homo sapiens
tatggagctcattacaaagccagtcacataatcggctctcataagtgattagtgatagaaggatttttctatagtgattagaaacagacaaaaaacatcaacaatgatttaaaaaaaaaaaaaaagaaaacagcacccttacatcttgagagagctcagacagttttctatattcaattcatgataacatatttaaataaagatagatcagattctaagattcacattcttatgaaaatgaccacagcattttcaaaagttcattttctctgctaaagtaatctactgctaatccttggagttccagtaccctttggaaaaattgcgaggcagatcaaaaagtgctatgaaaatcttgggactcacggtgygcttatgatttgggagagatgacttatttagttctgagatcaagatagatattataatatggtgcaaattagaatgaagatactaaataatttacgctaatgctctcagttataaagataactgcttcactttgcgactgatataaattaagggaatgtatttaaatgtatattttaatcaatcaagaaggctcgtctgccagccggtgttagatgctaatgcatgctctc

SEQ ID NO: 807468 - DNA, 664 bp, Homo sapiens
gacaaaatttattaaaatgagacaaaaatgaagtatgccacattgattgactcttccttttatgagagatttctccgtaggatgtgatgctgtttgatagcattttatccacagtagaaattctttcaaaattgaagtctatcctactgttttatcaagtaaatttatgtaatctcctaaatcctctgttgccacttcaacaatgttcacagcatcttccccagcagattcaatctcaaggaaccactttctttgctcatccataagaaacaactcctcgtccattaaagttttatyatgagattgcagcaattcagtaacatcttcacactccacttctaattctagttatcttgcaatttctacaacatctacagttacttcctccactgaaatcttgaacccttccaagtcttccataagagttagaatcaacttgtaaatgttgatattttgacctcctcccatgaatcacaaatgttcttaaatggcatctagaatggtgactcctttgcaacaggtcttcaactgactttgcccagatccattagaggactcactgtctatggcagctatagccttatgaaatatatttcttaaataataagacttgaaagtcgaaattactccttgatccatgagctgcagaatggatgttgcattt

SEQ ID NO: 807469 - DNA, 492 bp, Homo sapiens
tcagcactatttacaaccatcaaaaacggaatcaaaacccagagtgcatcaaaggtaaatggatcaatgaattgtggttaattcattcaagggaatactctacaacaatgacaattactaggccaaagctacaagcagcacggctggatctcacaagcataatgttgagcagcagaggtcaaactcaaaagactacatggttgtatgattatatttatatgaaattcaaaaccaggccatgttatytagactgttacaggtcagaagagtggtaaccctgagggcaggctcaaggggacttctgggattctgtttttatttttccttcttaatttctttatctgggtgtttgtgatgcaggtgtgctgactttaaatttgtgaacacttatgactcatttctttatatatgttatgtgtgataaaatttgcgaaaagaaaaaataatcagagggcagatcattggaaaaactctcttttacaagttaaatac

SEQ ID NO: 807470 - DNA, 514 bp, Homo sapiens
ggtactgagtcatttacaaggaatcatcagaggtctttttgcttccgttttgtttgtttttttgtttttgttttgagatggagtctcgctgtgtcacccaggctggaatgcagtggtgcaatctcggctcactgcaacttccacctcccaggttcaagcgactctcctgcctcagcctcaggcgccaccacgcccagctattttttctatttttagtagagacgggggtttcgccatattggccaggctggtctcgaacttctgagctcaagtgatctgcctacctcggcctcccaaaatgctgggattataggcctgagccaccatactcagccctttttgcttctttaaatctctcrttaggaccagcaaccaaggcatctcctccttatctaaaagctatagcagcaatagcaaagtgtatttgttttttaaaatttaactcagtggatttagtcctagggtttccacaaaatgtaactgtattaggccgttcttgtattgctatacagaa

SEQ ID NO: 807471 - DNA, 657 bp, Homo sapiens
ttcgtaatgggatttttcagtttatatggatttctttcctattattttaagagttgtttcctctttggccaaccttcatatatttagattatttcacaactttctcagtagtatatttacttgtttgccaattcttctaattatttatcaaatatacagcaatttgtatgaaataggatggtttcaagcacttttgaaatttctgcagttttaattgtttggttttcatggcaacattatatgaaagatttattttttcaaaagctatggggtagcttgtcttcttaagaaaagatttatcattctaaaaactatttttatatatttaaytaaaatttttaacataatgccattacctcaaatctcatatacattcatatatttgaaattttcaaaaaaagaataagatcaatatgaaacaccaagattttattatatgttttaaatataaaattgcagcagttaagccatttgaacattgatgaaaagatagtaaaagtgcctaaagagttataataattttaaatgatacaaaagaatgtaaaggttgcaagagaattctgaagtgatcaaaattataccatcaagtattaaatactgaaatttaaaaagtgaatttctaagactaaaaaacaaggttaatacatttattaatat

SEQ ID NO: 807472 - DNA, 657 bp, Homo sapiens
ttcgtaatgggatttttcagtttatatggatttctttcctattattttaagagttgtttcctctttggccaaccttcatatatttagattatttcacaactttctcagtagtatatttacttgtttgccaattcttctaattatttatcaaatatacagcaatttgtatgaaataggatggtttcaagcacttttgaaatttctgcagttttaattgtttggttttcatggcaacattatatgaaagatttattttttcaaaagctatggggtagcttgtcttcttaagaaaagatttatcattctaaaaactatttttatatatttaattaaaatttttaacataatgccattacctcaratctcatatacattcatatatttgaaattttcaaaaaaagaataagatcaatatgaaacaccaagattttattatatgttttaaatataaaattgcagcagttaagccatttgaacattgatgaaaagatagtaaaagtgcctaaagagttataataattttaaatgatacaaaagaatgtaaaggttgcaagagaattctgaagtgatcaaaattataccatcaagtattaaatactgaaatttaaaaagtgaatttctaagactaaaaaacaaggttaatacatttattaatat

SEQ ID NO: 807473 - DNA, 657 bp, Homo sapiens
ttcgtaatgggatttttcagtttatatggatttctttcctattattttaagagttgtttcctctttggccaaccttcatatatttagattatttcacaactttctcagtagtatatttacttgtttgccaattcttctaattatttatcaaatatacagcaatttgtatgaaataggatggtttcaagcacttttgaaatttctgcagttttaattgtttggttttcatggcaacattatatgaaagatttattttttcaaaagctatggggtagcttgtcttcttaagaaaagatttatcattctaaaaactatttttatatatttaattaaaatttttaacataatgccattacctcaaatctcatatacattcatatatttgaaattttcaaaaaaagaataagatcaatatgaaacaccaagattttattatatgttttaaatataaaattgcagcagttaagccatttgaacattgakgaaaagatagtaaaagtgcctaaagagttataataattttaaatgatacaaaagaatgtaaaggttgcaagagaattctgaagtgatcaaaattataccatcaagtattaaatactgaaatttaaaaagtgaatttctaagactaaaaaacaaggttaatacatttattaatat

SEQ ID NO: 807474 - DNA, 643 bp, Homo sapiens
aggggcactgtttcttgctaggatcctccaattcttatccataccattaagcacgcttcaaattttaatttttagattttcaaacatacctataatcaggctgatatggtttggttgtgtccccacccaaatctcatcttgawttgtagctcccgtaatccccacatgttatgggaggggctggtggcagataattggatgatgggggcaggttttcctccatcatcatgctgttcttgtgatagtgaataagtctcatgaaatctgatggttttataaagggcagttcccctgcacgtgctcccttgcccaccgccatgtaagatgtgcctttactcctccttcgccttccaccgtgattgtgaggcctccccagccatgtggaactgtgagtcaattcaacctctttcctttataaattacccagtctcaggtatgtgtttattagcggtatgagaatggactaatacacaagtagacttcatgaattgatctagaggggagtgagaggtgaagagagatggtggcctggacctcgagtgacctctgcctcccacaagcccagtgccttcaatacattcttgagtagatatgccttatcatctgggaggtgataggagaggatctgacagtctccaagggc

SEQ ID NO: 807475 - DNA, 643 bp, Homo sapiens
aggggcactgtttcttgctaggatcctccaattcttatccataccattaagcacgcttcaaattttaatttttagattttcaaacatacctataatcaggctgatatggtttggttgtgtccccacccaaatctcatcttgaattgtagctcccgtaatccccacatgttatgggaggggctggtggcagataattggatgatgggggcaggttttcctccatcatcatgctgttcttgtgatagtgaataagtctcatgaaatctgatggttttataaagggcagttcccctgcacgtgctcccttgcccaccgccatgtaagatgtgcctttactcctccttcgccttccaccrtgattgtgaggcctccccagccatgtggaactgtgagtcaattcaacctctttcctttataaattacccagtctcaggtatgtgtttattagcggtatgagaatggactaatacacaagtagacttcatgaattgatctagaggggagtgagaggtgaagagagatggtggcctggacctcgagtgacctctgcctcccacaagcccagtgccttcaatacattcttgagtagatatgccttatcatctgggaggtgataggagaggatctgacagtctccaagggc

SEQ ID NO: 807476 - DNA, 587 bp, Homo sapiens; identical to SEQ ID NO: 805111

SEQ ID NO: 807477 - DNA, 556 bp, Homo sapiens
aaatattcactttgtagaataaacagaactgacttttgttatacagtttagaaagttgatattaggtggttttcacagttccattaaaatttttgataattaagagcttttatttactttcaaaatttggtggtaatccycagtcttcctgtgtaaggaattacatttaagaaaaacagtattgcataaaggcaagcagaggattttgagagatgaagataaagacaaagagatattaatgtctctgaacctgaccaacacctgaaaataataataataatgataagggtacatctagtgctccagggcttcattaaaaaaaaaaaaaccttaattgtctcaggaatctcaaaaataaggtagaattataatacttttacatagattcaagggatttgctcaagatcacaattctattcagtatcagagtaaggactggatccaagcatcctgactcccaaatctgtgctgctgagcactgtgctatgtataaatatcacagatcataagaaatagaaacacctgactacaggaacgccctctgtatttacacact

SEQ ID NO: 807478 - DNA, 556 bp, Homo sapiens
aaatattcactttgtagaataaacagaactgacttttgttatacagtttagaaagttgatattaggtggttttcacagttccattaaaatttttgataattaagagcttttatttactttcaaaatttggtggtaatcctcagtcttcctgtgyaaggaattacatttaagaaaaacagtattgcataaaggcaagcagaggattttgagagatgaagataaagacaaagagatattaatgtctctgaacctgaccaacacctgaaaataataataataatgataagggtacatctagtgctccagggcttcattaaaaaaaaaaaaaccttaattgtctcaggaatctcaaaaataaggtagaattataatacttttacatagattcaagggatttgctcaagatcacaattctattcagtatcagagtaaggactggatccaagcatcctgactcccaaatctgtgctgctgagcactgtgctatgtataaatatcacagatcataagaaatagaaacacctgactacaggaacgccctctgtatttacacact

SEQ ID NO: 807479 - DNA, 556 bp, Homo sapiens
aaatattcactttgtagaataaacagaactgacttttgttatacagtttagaaagttgatattaggtggttttcacagttccattaaaatttttgataattaagagcttttatttactttcaaaatttggtggtaatcctcagtcttcctgtgtaaggaattacatttaagaaaaacagtattgcataaaggcaagcagakgattttgagagatgaagataaagacaaagagatattaatgtctctgaacctgaccaacacctgaaaataataataataatgataagggtacatctagtgctccagggcttcattaaaaaaaaaaaaaccttaattgtctcaggaatctcaaaaataaggtagaattataatacttttacatagattcaagggatttgctcaagatcacaattctattcagtatcagagtaaggactggatccaagcatcctgactcccaaatctgtgctgctgagcactgtgctatgtataaatatcacagatcataagaaatagaaacacctgactacaggaacgccctctgtatttacacact

SEQ ID NO: 807480 - DNA, 555 bp, Homo sapiens
tgtactcactttcgtctgtcaaattcacagaaacctcagcaagtttggcatagtaaagcatatgaaagtgcactcaatcacacatgatcagaagaatgcatattcaaaccagagtttctcacttctacacccaccaaaatagacacgttatcagagagaaaaatgcagagggttggtgagrttgtggaggaactggagctatcacatgtgactctgggaacatacttaatttcatccactttgataaatgactttctagggtgtactagagtaatcggtacctgtgaccctacagtcccactcctgctacctatgtccaaaatacatgtatgaggcaaggatgctggtgtccccctggggggctttatagcagcgtcacttcatgtaactgtagcaggacaagccgcagacaaaacccctcagacaccgaattaaagcaggaacggctttattcagctgggagcttcggcaagactcacgtctccaacaactgagctccccgagtgagcaattcctgtcccttttaagggctcacaactctaaaagtgtctgcgt

SEQ ID NO: 807481 - DNA, 634 bp, Homo sapiens
aaagcttgaaatcaaatagctacaggatttaagtcaatattttagtatgtgacagttaataaaaatctagattagataaattacatctattacaaccaacagcaacaagcttttcatgaatttaaacaaaacaaaacaaaacaaaaaaaactcatgtcggccccagccctggggctacctgacctgacaaaaccctttacaccctgtgtrtcacaaagagaaaaaatggcagttggagttttaacccagactgtagggccctggccaaggccactggcctatctctcaaaacaactagacggggtttccaaaggctggcccccatgtctaaggactctggcagcaatggccctgttagcacaagaagcagataagctcactcttaggcaaaacctaaacattaagtcccccatgctgtggtgactttaataaacagcaaaggacattattagctaatgaatgctagactaactagatgccaaagcttgctctgtgaaaatccccgcataaccagtgaagtttgcaacaccctaaaccccaccaccttgctcctggtatcagacagcccagttgaacataactatgtagaggtactggactcagtttattccagtgggcccgacctccgagacca

SEQ ID NO: 807482 - DNA, 634 bp, Homo sapiens
aaagcttgaaatcaaatagctacaggatttaagtcaatattttagtatgtgacagttaataaaaatctagattagataaattacatctattacaaccaacagcaacaagcttttcatgaatttaaacaaaacaaaacaaaacaaaaaaaactcatgtcggccccagccctggggctacctgacctgacaaaaccctttacaccctgtgtatcasaaagagaaaaaatggcagttggagttttaacccagactgtagggccctggccaaggccactggcctatctctcaaaacaactagacggggtttccaaaggctggcccccatgtctaaggactctggcagcaatggccctgttagcacaagaagcagataagctcactcttaggcaaaacctaaacattaagtcccccatgctgtggtgactttaataaacagcaaaggacattattagctaatgaatgctagactaactagatgccaaagcttgctctgtgaaaatccccgcataaccagtgaagtttgcaacaccctaaaccccaccaccttgctcctggtatcagacagcccagttgaacataactatgtagaggtactggactcagtttattccagtgggcccgacctccgagacca

SEQ ID NO: 807483 - DNA, 638 bp, Homo sapiens
taaaataggcacaaataagcagtgcacaagaggcgttttgtctgcagactgctttgttctatagccactagttttacaaggcttttaaatagtttctgtatttaaaagatagaagattccttatgaaaatctgtacttggagcctctgttgagaaattgcattttctaggaaggctgggcagcaaggagctggagctgtgggaccaccacccttccagacagagtcatttgccagttgccaggacctctcccaaatcctatccctctgttacttgatcatttccatgatctttcccaaccctgtaggcatttcagtttgcggcacccactggagcttttacatacacrgatactgagccacagtgtactgctaatctgtgaaatggagctggggttcacatttttctgtttctcattgttgtcactctcctgcagtcaccccattccctgatttccttttgagattatacactagcatggctattccagtgggcctgattgtgatatgagacaagctagggaatgtaaacgaatcatcatctaaaagaaaatctttgattatacaatgcattagtcagatccacacttagattaccatgatcagttctggtcatcacattataaaataaaatattgaa

SEQ ID NO: 807484 - DNA, 638 bp, Homo sapiens
taaaataggcacaaataagcagtgcacaagaggcgttttgtctgcagactgctttgttctatagccactagttttacaaggcttttaaatagtttctgtatttaaaagatagaagattccttatgaaaatctgtacttggagcctctgttgagaaattgcattttctaggaaggctgggcagcaaggagctggagctgtgggaccaccacccttccagacagagtcatttgccagttgccaggacctctcccaaatcctatccctctgttacttgatcatttccatgatctttcccaaccctgtaggcatttcagtttgcggcacccactggagcttttacatacacagawactgagccacagtgtactgctaatctgtgaaatggagctggggttcacatttttctgtttctcattgttgtcactctcctgcagtcaccccattccctgatttccttttgagattatacactagcatggctattccagtgggcctgattgtgatatgagacaagctagggaatgtaaacgaatcatcatctaaaagaaaatctttgattatacaatgcattagtcagatccacacttagattaccatgatcagttctggtcatcacattataaaataaaatattgaa

SEQ ID NO: 807485 - DNA, 578 bp, Homo sapiens
ttttaagcggtgttgttcatatatctgtattctgactgctcattctttcttcttgatctatgattgttaatatgttaactcctaaattttgatggtagatttattcatctcttttaacagttctgtaaatttttatttcatatgttttatatctataaagttacgggcatacaaatttagaattgttatatcactctaacaaattgaaatcctgatatagtggcacactttatctctgcaacattatattttacattgtgtttatatagccaaatcagctgacttttggttgatattttactgatatatctttttcaatctgtttcctcttttctgggtatttatatcttaattagttatcttgtaaagaatatatagttagctatattttttatataattaggcaatctttgatttgacytaagttatgtccatttttatatattgtaataaatgatatatttagatttattttaatttgtaatactttcaactttctatgtttcttttttctgcttttatgacattttatttacatttttcctatgttggcttttatactctattccatttatcct

SEQ ID NO: 807486 - DNA, 577 bp, Homo sapiens
ttatatttcaaaaaaagattcttaagtgagcaatgcttaatttatggtgctctttttacaagagttaaaagctagctagacaaatatgcccatttatctgcttctctcatgtgatggatattggtggttgtttttctttaatagcatccttttgccccattctggtaggaaactcccctttttactacacagaaactattccacgtgatacaattgaagcaaaaactatcatcccttgccctctcaccacaggccctgacctcatgtgactccagccagccagtcagagtacacagccttcctaggcacagagactggttgaggcaagcaccttgcagaaactagacctctcaaggtcctccctaggacatttttsccaagcctgtcatggtaaacagaatagtgctcccacctgctcctgaaatatgtctatatcctaatccctagaacctgtggatatgttaccttaagaagcaaaaggtactttgcagatgtaattcagatgaaaatcttgaaatgggagattatcttggattatattcacttataagttctcttatctaatcataagagacct

SEQ ID NO: 807487 - DNA, 479 bp, Homo sapiens
gtcactccaccaggaaaataaacatgacctgctgaggtacttgctgaaggcaaagggagtacaaaatgggtagtagaagaaggtagtcattaataccagctatgaccrtgtgactagctgcagaaacgaggactgtcatgagtatttcctccttctgttaaaaacatgtttgttcatatataaacttgtactgagaagatatcttcattttatttcctttttcctttatcatgtgacataagatttattgacttcacatgggcatttaagtattgttaactttatgtaatagtatttgggttggggattgctgctttcacgggtgtatgaaggatagttgtattatgttaggcataattgtgaccttacgttgtctttatttgaagattatgtctgaattcaggagatgtgtatgggttcaagttgacaaggggtagacttgtgatagttaatactgagtgtcaacttgattggattga

SEQ ID NO: 807488 - DNA, 564 bp, Homo sapiens
tcaatgggaaactacaacagaccaatccaggcaggagtacaaatggcccaggcccttcaggaatgaaggtttgggtcactccaccaggaaaataaacatgacctgctgaggtacttgctgaaggcaaagggagtacaaaatgggtagtagaagaaggtagtcattaataccagctatgaccgtgtgacyagctgcagaaacgaggactgtcatgagtatttcctccttctgttaaaaacatgtttgttcatatataaacttgtactgagaagatatcttcattttatttcctttttcctttatcatgtgacataagatttattgacttcacatgggcatttaagtattgttaactttatgtaatagtatttgggttggggattgctgctttcacgggtgtatgaaggatagttgtattatgttaggcataattgtgaccttacgttgtctttatttgaagattatgtctgaattcaggagatgtgtatgggttcaagttgacaaggggtagacttgtgatagttaatactgagtgtcaacttgattggattgaaggatccaaag

SEQ ID NO: 807489 - DNA, 564 bp, Homo sapiens
tcaatgggaaactacaacagaccaatccaggcaggagtacaaatggcccaggcccttcaggaatgaaggtttgggtcactccaccaggaaaataaacatgacctgctgaggtacttgctgaaggcaaagggagtacaaaatgggtagtagaagaaggtagtcattaataccagctatgaccgtgtgactagctgcagaaacgaggactgtcatgagtatttcctccttctgttaaaaacatgtttgttcatatataaacttgtactgagaagatatcttcattttatttcctttttcctttatcatgtgacataagatttattgacttcacatgggcatttaagtattgttaactttatgtaatagtatttgggttggggattgctgctttyacgggtgtatgaaggatagttgtattatgttaggcataattgtgaccttacgttgtctttatttgaagattatgtctgaattcaggagatgtgtatgggttcaagttgacaaggggtagacttgtgatagttaatactgagtgtcaacttgattggattgaaggatccaaag

SEQ ID NO: 807490 - DNA, 529 bp, Homo sapiens
acagaagaaactcccacttcagctccttattatttcaaggaaccttggctcttcttaagatcacagtactaggaatgcccataggtactgagatgttatgcttctaggcctcctcaatgaagagagctaggaaatgtatgtgtgtatatacacataaactcttaaacacacacatatatatacccacatgtttctatctctctctmtatatatatatatttctttatatatccatataactcatacgtctatatatctatatttgtacctatatatgtgtgtgtgtgtgcgcacgtagatataaatagattcacgtgtatgtatgtgagtatgtaaaagtaaatacaagcttcagaaatgtatataagtacatgtacaattacatatttaaaaacatgaattcacgccaattcttccaatttcaatccaacaagagagttcattccagacttaacttttccatatttctaattattttctttagcaatgagcaatctgaaacccatttttagaaatatatttatataga

SEQ ID NO: 807491 - DNA, 376 bp, Homo sapiens
agtctgttgttgactaaaacctcattatgtggtgcctgcctacatatacaataaaattaatcaaacaaaccatgtaaagaagactttattgaatacaattacattagaagagagagaataccccagccggaactcagtttgggctcaacttaactgagacaaaaagctggggaggttttaaaagctggagtggagttcaggggagtttraaagctggagtggagttcaggaggttttaaaagctggagtggagtgtgtttgctaattggtgcccatcaaagttagactcctaccctctcatggagactgggagttaggctgctacctttcttgatttcaaagagattgctcctagggcattcagaaagaaagtcct

SEQ ID NO: 807492 - DNA, 413 bp, Homo sapiens
acattcgggggctggatacggtttaatggatgagaagagatcccatttagtcctacacagtcaaatttgagaaaarcatttgcaattaggttttagacttgcccttcttctgtcagcttgtgtttttattttattgaagtgcatcatagaactcaattaaaaagagaatagagccaaaggaaattcaattcttatttgataattcatttctaagagaatgaaatcatgtcttttttgagtcaggatggatgaaactgaaggccattatcttaagtgaaacaactcagaaacagaaaacaaacaccacatgttctcacttataagtagaagctaaataatatgtacataagaacatggagtgtgaaatgatagacagtggagactcagaaaggtgagaggtgggagttaagtgg

SEQ ID NO: 807493 - DNA, 591 bp, Homo sapiens
aaatcaagttatgtgcaggcaaagtgaggagattcaatgaagtatgatagataactattctaataattgtagttcattgtcttatactactgtacttttttccatctagaatacatatagtcattcctatttttctattctttaaaacaacccaatttctaatatttgaagtcagaattgtagagtgattaagagtgttgattctggaaacaaaccacctcatttacaytacttactagctcaatgatcctaggtgagttattttacctctatttctctttgataaaatagagataaaaacagaacttaggctggacatgattcctgcctgtgattccagcacgttgggagacagaaacgggaggatcacttgaagccaggaatttgaaaccagcctgggcaacatagcaagaccgtatctctacaaaaacaatattaaaaaacttaagaaaatagaacctgccaatattttagttgtagagattacatttattgatatatgtctaatattttgaatattgcctggcacaaaaaaaaaaaccttacatggacatgtggcctcttattagtagtgattgggatccagaaaag

SEQ ID NO: 807494 - DNA, 700 bp, Homo sapiens
ataaaatcaaccatcacatgtccggatccttgtcagcttggcaacccacacacctctttaagccgtgcttaatcgccaataaaacaataatgatgtcatactttcacttaacatgatacaaccatcctgtattcgactgagaattcactaatcctttcctcagaaccaatgtaaagtccttgaatgatgtttaatcttcttgttgatattctgtaacttaaatactgtgatataaagtcagttcatttatggtacatgataaagcaataagaggaaagtaaacaaagtcatttgatcaatctgtcaatagatagatgatagacacacaaatattcataagaaaatagagatgatatattcctggcaattacagttcttatttctataactggtcatgtggtcatagctggtatttataactaccttcttttacaacccattctggattccctttgctcccagcaagcatcttggctagttgtggttctttacctggcagggtgaccccaattttcattcctggaatctgggtcattaatagttctgcrtgaattgcattgcagttttccactaactttaatcacagagtagggtaacactaaacgataccctaagggatctcttgtgttaccaacataatcttccttacctccattatggaatagaagcccaattcctcccttagtagccaggatcaata

SEQ ID NO: 807495 - DNA, 607 bp, Homo sapiens
aactgcatatgtacacccagaataaaatcacacaaggcaagatgattatgttttataattgaaggttttgcattgaatgtatttccctacatcatatttatgatatttaaaataccaaaatccagaaagcctgcataagtagacaagtcataaaaagaacatattttttaatatagcaaaatgtaaacagcataaagcttctcaaccatttttaatatcctacatattaacagttacctaaggaataataagtggcrgaatgttgttcatatttacattattttcatttaaaaattccaaatttaaatgtaaatactcattattggacaaatgaacaagtggaaagtttcagtaggatactgtcagtatgtattgaggctttttttttttacaagtattacttgttgaaattatttcttatatggtatttatgtaatgaagaagtaaaatatttttaattaaacactgtaggaaaagaaggatatattacttattatgagacacatcattatttttacacaaaatattttaaaaagataactgttgaagacaattgttaagattttactgatttcatgatctttctcatagttgtcttagcacagta

SEQ ID NO: 807496 - DNA, 576 bp, Homo sapiens
cttttgaccccagaaagcaaagagcataaagctctgcaaaacagggtcttttgggggcatggggtttttttttgtggtgtgtctgtgtgtgtgtgtgtgtgtgtgtgtgtgtgtgattgttagaaggagatttagaggcaagagggacacagtgttttggtgaagaaggagcagagaggtagggcagcygcctattctgatagaaactcaacaacctgctaagtggaactaactatgtgggaaaagctctctgcagagttggcaccacgaagctcagtggaaccatttcaactccttaaaatctccttcagtacctcccctacacaaattgcttaatagggaaaagtgccatatttctcattgttgtttaagtgtccacgggtaaaaaagtgtcgttaggcctctcttacaaacagataatagctccccaaaccctctttccatatagaaattctggtgccccaatgaggttgtaaataaaaactgatagttcagtgattctcaagatacaaaacagatttattttttgccggaatcacaggaaagttacatactctacctacaattaaaaatgtg

SEQ ID NO: 807497 - DNA, 611 bp, Homo sapiens
gtatatttaaaatcatgaaaaaagtgtcattgccaaccttcaataattattgtaactatatattcctactaacaaatttttcactaaaacttgaattgtttcatatttatgagcttattgatccagccacctggatttctattactacttataataatgatttattwtatttttaagaaaaataaatagagccactaagaccgcatccttggttcatcaagtaagcatatttccactaaatagtgggaactggatttggggaaaactggcaagatcatgttgtgaataagttaagaaaaaagtaagattaagtgggtttcttaaaaaatgttattaacaccaaaaaaagttgaggtcatctggagggctacaggaagagtcttcttcagcactttgtcaactcgtgttaggagtaactgtctcagagggcagaagtgatagcctggcatttggagaggaaatatgcaaagattgtataaccttggtagtgtgacaaccttcccagcctaactccttttctcccagctcgcccatctctacggcagagtcctcttcacctctatctgtgtgtagcccttgagttaaactgcagaatgtaagaagccagatgt

SEQ ID NO: 807498 - DNA, 616 bp, Homo sapiens
actctttctatgaacccaacttgtttagattccatgtataagtgaaatcattaagtatttgtctttctgtgcctggcttatttcgcctaagataatgcttatttttattttcattatgtccattgactattttctggttggattgtttyttttttaagtttaagttatgagagttctttgcatattctggattccaaccctttgtagatatgttacttggaaatatttggttctagtcagtagtttgtcttttaatgggatcttttacagagtaaaattttacattttgatgaactcgatgtattgattttttccctcttatgaattgtggctttggtatcaaatctcagaacactgcctagtcagtcgtaggtacccatgagtttcttttatgttcttttctaaaaattctatcattttgtttcacatttatatcaattatccattctgaacatttttttttgtataaatttgttttttttttttggctgatggatggttaattgctccagcatcatttattgaagagtcttttccctttttattgaaatgcttttacaagtttataaaaaattaattgggcatattcatgtggagttatgtctgcatgttctat

SEQ ID NO: 807499 - DNA, 616 bp, Homo sapiens
actctttctatgaacccaacttgtttagattccatgtataagtgaaatcattaagtatttgtctttctgtgcctggcttatttcgcctaagataatgcttatttttattttcattatgtccattgactattttctggttggattgttttttttttaagtttaagttatgagagttctttgcatattctggattccaaccctttgtagatatgtkacttggaaatatttggttctagtcagtagtttgtcttttaatgggatcttttacagagtaaaattttacattttgatgaactcgatgtattgattttttccctcttatgaattgtggctttggtatcaaatctcagaacactgcctagtcagtcgtaggtacccatgagtttcttttatgttcttttctaaaaattctatcattttgtttcacatttatatcaattatccattctgaacatttttttttgtataaatttgttttttttttttggctgatggatggttaattgctccagcatcatttattgaagagtcttttccctttttattgaaatgcttttacaagtttataaaaaattaattgggcatattcatgtggagttatgtctgcatgttctat

SEQ ID NO: 807500 - DNA, 647 bp, Homo sapiens
gtgtctgtctgatgttggtaacgacaactagagtccttcccatcttatcaatcaggagcagtattctcgagagtctttgtattggggaaaggtttgattaaattcttatgcaaatcagaaagcatcttaaaaactgtgatgtacttaactcatagctcttttccttctgaagggagatgggaaacaggatgatatatcatttctgaatattttggtaatctcgaagtaaagtgaacattactttactcagcagaggctaaaakagctggtggcatttttcttcactattactgttcatattgtttctatggggcttaacgttccttttctttgtttttattaacctacaatgaggaaaacttttgttagtatccccaaacgaagcttctcctctgtcattttgagataaagctctgaagaagtagaattttgttgctttgcctgttgacctcctttttttctgctgttttcttgccttctggtcttcaatgtccaaggctttcatgctgctttctagtatgttgactattccacacacatgggctcctaagtggaggcagattggaggacttcagctttactctccccatcccactctgtgtcatttccttcagcctagctcagccgctgatgatactatatctaaa

SEQ ID NO: 807501 - DNA, 642 bp, Homo sapiens
tcttacgtcaattcataacccagccaagaaacccagagcggtggaggaaagccatttctctctcccctacaacttttaaatactaaaattaaaaatgtccccacccaccaatattggaactccgtggtatccataagctgggttgcatgttagtgrttgtaataagcaataaaaatccttgcatgtcaatattttattaaatttgattattcatggatttgtgaccattattatttgctgtttattggtttgttgttgtttttaaaatattttacttggacttatggaccacatgtttgtttcagaaattcttcaaaagacagcaaatccctagtaagtgggaagaaaaatcacttaacagtattccaagtacctcaaaagatgcaaatatggaaagatgaatatgaaaaagggtactcctagagtttatcaattgtctatccctggagaaagtttccattctccattaagactccaacggctttgaatagtatatgcttttgtgtatacaatgaaaataaaccatcatcatcgtcatcatattaactgggcttgtgcccattgtagatttcatgaaaaataaccaaccatcaaaaatgacttgacaggagaagccaacaagccctaacattaaatggtcct

SEQ ID NO: 807502 - DNA, 642 bp, Homo sapiens
tcttacgtcaattcataacccagccaagaaacccagagcggtggaggaaagccatttctctctcccctacaacttttaaatactaaaattaaaaatgtccccacccaccaatattggaactccgtggtatccataagctgggttgcatgttagtgattgtaataagcaataaaaatccttgcatgtcaatattttattraatttgattattcatggatttgtgaccattattatttgctgtttattggtttgttgttgtttttaaaatattttacttggacttatggaccacatgtttgtttcagaaattcttcaaaagacagcaaatccctagtaagtgggaagaaaaatcacttaacagtattccaagtacctcaaaagatgcaaatatggaaagatgaatatgaaaaagggtactcctagagtttatcaattgtctatccctggagaaagtttccattctccattaagactccaacggctttgaatagtatatgcttttgtgtatacaatgaaaataaaccatcatcatcgtcatcatattaactgggcttgtgcccattgtagatttcatgaaaaataaccaaccatcaaaaatgacttgacaggagaagccaacaagccctaacattaaatggtcct

SEQ ID NO: 807503 - DNA, 642 bp, Homo sapiens
tcttacgtcaattcataacccagccaagaaacccagagcggtggaggaaagccatttctctctcccctacaacttttaaatactaaaattaaaaatgtccccacccaccaatattggaactccgtggtatccataagctgggttgcatgttagtgattgtaataagcaataaaaatccttgcatgtcaatattttattaaatttgattattcatggatttgtgaccattattatttgctgtttattggtttgttgttgtttttaaaatattttacttggacttatggaccacatgtttgtttcagaaattcttcaaaagacagcaaatccctagtaagtgggaagaaaaatcacttaacagtattccaagtacctcaaaagatgcaaatatggaaagatgaatatgaaaaagggtactcctagagtttatcaattgtctatccctggagaaagtttccattctccattaagactccaacggctttgaatagtatatgyttttgtgtatacaatgaaaataaaccatcatcatcgtcatcatattaactgggcttgtgcccattgtagatttcatgaaaaataaccaaccatcaaaaatgacttgacaggagaagccaacaagccctaacattaaatggtcct

SEQ ID NO: 807504 - DNA, 604 bp, Homo sapiens
attattcagcaaacctatctcatgcttttcttatttcagccatactgttccttctatctagaatgctttctcttatcatgatttatcaaagtcttgtttctcctgtaagatgcagtttaactgacatttttgtctctgaaggcttctttagtccttgaagccaaaaatgttcttctgtccccactttcattatatctgtatcttatatcactttcacataacactatagttgtttgggtatcttctctctgctactggattgagagttccttaatagagggaatatgtcttgttcattaaaaaaattcaaatatcgtgttgctctacatttcaaataagaaaatattgcccactaaggctacagataaaagcccatgcaaaatcactcatttgcaatgtatcctaagagatggyttataaacgtgctgacataaggctagagcatcttgcaagtctctattaaagtaaaaggggtggggtgcggtgagtcatgtttgtaattccagcactttgggaggctgaggcaggcagatcacttgagtccaggagttcaagaccagcctgggtaaaacagttaaacccaatttcaactaaaaataaaaaa

SEQ ID NO: 807505 - DNA, 539 bp, Homo sapiens
ctctctcaaaaaaaaaaaaaaaaaaaaaaaaaaagaaaagaaacacaaggatatatctgaaatatttttgaagaaatataaactaccattattataacagatccaagataatggaagagtgtagacaaagaagaaatgagaaagccctaccaggcaataagaattcttagggcacctgcaaatatatgcctaggtgtcttcataaacgctgtcacctttgttatgatggtcattctgcatcagatcttaatgtgactttccaaatacagtttcctattgtgaaagaatgatctgatctgttaatatattctcctagcaacataagtattatgtatatttatattgtgtgtgygtgcgtgtgtgtgtgtgtgtctcactgtaaataagcaagttagttgacattctggctaattagtgaggatcacttaacaaaagtctgtcttccacagacttattagttttattacacatgagtgaatgaacgaaataaatttcttttacatgcaaaactgatgaccagatgctagcatgtgctgtac

SEQ ID NO: 807506 - DNA, 539 bp, Homo sapiens
ctctctcaaaaaaaaaaaaaaaaaaaaaaaaaaagaaaagaaacacaaggatatatctgaaatatttttgaagaaatataaactaccattattataacagatccaagataatggaagagtgtagacaaagaagaaatgagaaagccctaccaggcaataagaattcttagggcacctgcaaatatatgcctaggtgtcttcataaacgctgtcacctttgttatgatggtcattctgcatcagatcttaatgtgactttccaaatacagtttcctattgtgaaagaatgatctgatctgttaatatattctcctagcaacataagtattatgtatatttatattgtgtgtgtgtgygtgtgtgtgtgtgtgtctcactgtaaataagcaagttagttgacattctggctaattagtgaggatcacttaacaaaagtctgtcttccacagacttattagttttattacacatgagtgaatgaacgaaataaatttcttttacatgcaaaactgatgaccagatgctagcatgtgctgtac

SEQ ID NO: 807507 - DNA, 565 bp, Homo sapiens
tctctggccttcttttctaggggaaatggaaaccaagttttgattggggtgcaggggataaatacaggcttaagaaatagtaattttcctccctgttccctgagatacaacaatattggaattaggccaaggctgggcatggtggctcaagcccgtaattccagcactttgggaagctgaggtgggcgaatcacttgaggtgaggagttcaagaccagcctggccaatatagtgaaaccccatctttacccaaaagaccaaaattagtcggacatgatggcacacacttgttatcctagctactcaggaggctgaggcgggagaattgcttggacatgggaggcrgaggttgcaatgacctgagattgtgcccctgaattcccgcctgggcgacagagcaagacctgtgtccaaaaaaaaaaaaaaaaaaaaagcattaggccaactaacaattcttggaatggcctctcagtgttccagtaaaagaaagagttgcaagtctgaggtagaaatgattaagcttaattaggaaggcatgtcaaaagttgatataggttgaaaacta

SEQ ID NO: 807508 - DNA, 596 bp, Homo sapiens
aaatggatcctcggtgtctcttggctttattttcattatgttatttttcctgttaatttaaaagagtgttttgtatattaaggatatcatctcggtctcttataagtgttaacaaatactttttttccattctaaaacatatctctcctttatgacataattttttatattaactttacaatttttatgtcattgtcttttttaatttttagtttcttgmttaagactctctcctttatacaaatgaactcttaatacttcttctaattctgttattttaatagtaaagattttttaaattctatttttgcataatggggtctaattttgtgttcatgtttattgccaattattaaattaactaaagtttattaaaattaaattaaatgtattatttattaaataaaatttaattaaatgtggtattaaaatctaattacataaactaaatgtatttattaaaaagtaatttaataaactttggttaataattggcaataaatgtaaaagaacacaaaattagaccccgttcatactttatgcaaaaacaatttaattttgaattattaaatttcattgttatattttttctgcat

SEQ ID NO: 807509 - DNA, 680 bp, Homo sapiens
tccctacctacccagacagagaaggtggctgcgtgttatttacatgagaaaatggtttcaaattgtgtttcttccttaatttaaaataataagttacagatacattatgagtgacttttcaaaaatgttttctaactttattgcaggaagaggttgtgggaaagattaggttaggagacgagtctgtgaaattaaatccctgtgaatgaaatgaaaatgcttaaattttttttccaatataacgttccatataacctgtgtcctgtaattccatggagagcctgtcttaatttatggataaaaacataaatacacatatgaatttgagattagaaggttaagatcrtagaaattatgactttgtaaagatttcactttctctgaaatgaaaaacctgtgttatctagttcaatgattttgctcaccacttccctgttttatgttctttccattcctttgctaaaatgttgtctattcaatactcaaatcagtactgccaccttgtgatactttttcttaatttcatctggccaaattctcattccttcccttgggtacttcttatctgtgatttactggtttggtcttccttacgttgcacatcttttatccccttgttttgattagaagttcttccagggtgggatctatgctattatactttagtcgttatcttagtg

SEQ ID NO: 807510 - DNA, 616 bp, Homo sapiens
ctgctgctggaagacagaggcgcaaaacctgaaggcgagacagcagctgggagcctggggcggtgtctccatccctactggcaaaggggagctaggatcagagccccccagtggtctccagctgcctgggaggaggccaggatcaggatcggygtccgacaagcaggtccagctgcaaagcctgggtgctgaggaggccgagaggggtctgagttctggggtgctgccccagcgccccaggagggggtcgatctcagaggaggagcaattttcagaggccacagaggaggctgaggagggagagcacaggactccctgcagaaggagggctggttgtcagagaaaggggcagatttctggagaggaagcctccgatgagggagaagtgcagggccagagccaggggagcagccccagcttcaacaacctccgaaggcgacaatggaggaagacaagggccaaggagctgcaggggccatgggacctggagaagctgcacaggcagctacagagagacctggactgtggtgagcgtggggctcagagcctggattcccccgaagctacaccgcagggaacagggagcagtcagggaggcaggggctcaggcaggctg

SEQ ID NO: 807511 - DNA, 576 bp, Homo sapiens
gtaagtttttcaggggcaggctgcaatcaggaggcctgaagttgcttagcactgcctgtggctgggcaggtaagctctgtttgaggtttaggattaggaagccatatttttcattattaactttatcagtaataaagccagtatttgaatgcccatctgctttttcttctctrtttctcagtggttccaaactcagatgggaaaaaagtaatgctatttatttggcctgtctcaaatccctacacaattttcctcgtttgccagcagatcttgcttgtccatattggactgaagtcttcctggttttctattaattaatattccatttcttaacaactttattttaatattctacccacggatgattacgaattatttattagaaatggcaattatttgaaaatgattttaaaagagaagttttcctcctcattagcaatatctcactgtctaagattacgagaaacagttataccttagggcagtgttttccaaacaataagtcaaaactcattcagccataataacagtttaatgggtcatgacagcactttaaaacaataaaatagaatagaa

SEQ ID NO: 807512 - DNA, 641 bp, Homo sapiens
tcaggatcctgtgatgattgcgttatctgcacaaattgtttgtaaagcatgtgtgtttgaacaataagaaatctgggcaccttgaaaagaacaggataacagtgattttcggggaacaagggagataaccataaggtctgactgccygtggggctgggcagaacagagtcacatttctcttcttacagaaagcgaataggagaaatatcgctgaattctttttatcagcaaggaatagccttgggaaaagaatgcattcccagggggaggtctctaaatggccactctgggagtgtctgtcttatgcagttgaagataagggatgaaatatgctctggtctcctgcagcaccctcaggcttgctaggattaggaaattccagcctggcaaattctagtcagaccggttgtatgctctccaaccccgtttcctgttaagatgtttatcaatgacaatgtgtgcccagagatacatggaccttcatcagtaattctagtttcaccctggtcttgtgatctcactctgcctctctgcccttgtgaccttttattgccctctgaagcatatgatctctgtgacccactccctattcatacccccctccccttttaaaatccctaataaaaacttgctggttttgc

SEQ ID NO: 807513 - DNA, 516 bp, Homo sapiens
cttagtcccatcatctttgtaagctgaggatgtatgtcgcctcaggatcctgtgatgattgcgttatctgcacaaattgtttgtaaagcatgtgtgtttgaacaataagaaatctgggcaccttgaaaagaacaggataacagtgattttcggggaacaagggagataaccataaggtctgactgcctgtggggcygggcagaacagagtcacatttctcttcttacagaaagcgaataggagaaatatcgctgaattctttttatcagcaaggaatagccttgggaaaagaatgcattcccagggggaggtctctaaatggccactctgggagtgtctgtcttatgcagttgaagataagggatgaaatatgctctggtctcctgcagcaccctcaggcttgctaggattaggaaattccagcctggcaaattctagtcagaccggttgtatgctctccaaccccgtttcctgttaagatgtttatcaatgacaatgtgtgcccagagatacatg

SEQ ID NO: 807514 - DNA, 469 bp, Homo sapiens
atctccaggaagaggctggaatggtcctgcagacttggttggtatcacatttggaagtttctccagcagcagaaggaaacagggggtgcccacatggtatcatatttggaagttcctccagcagcagaaggagagagggggtgcccacatggggtgaggtcagagagtcagcaactaggattgaggttttggggtgcaggctttgctggcttggtgaggaaatatgaagcaatgctggagagctagccacggagctagatagagactcagccttaataatgacttaatgggcattggccgtgtgcctgtgtytcctgcacatagttaggaagcatggcaactcagaaaagatgcagcagggagccagggaatgccagtcgcttgtagcatgcttatcacgtaagcagaaagaagggaggatctgcctgaaaaacatactcaaagatgcatatctaggggcaagacactt

SEQ ID NO: 807515 - DNA, 509 bp, Homo sapiens
gacaatgccactgagtggccagcagagggcgagatgatgttcattttgactatgtcctaagctgggcctgtggggtggggctgtggcctgtagacgctctttccatagaccctcccaccctcccacacgcctttactgcccaggccccgcagggatcatggggtgaagagacagtagggatcctcattcctgggctcaagcaatcctcctgcctcagcctcccaagtagcttggactacagacaygcaccaccacaacttttaaaaaaatgtttgtagagatggagtctcactgtgttgccaggctgcttggcctcccaaaatgctgagattagaggtgtgagccaccacacctatcccacaccttttaaatatactgaaaccctgaatgtcatactttaaacggatgcattttatggtgcataaattatatcaactaaaagcaatagcagcccccagagcctagtaacctggctgtgcccttctccaggccccactgcctactgcaca

SEQ ID NO: 807516 - DNA, 643 bp, Homo sapiens
taaaatcttaaatagattcatataaaatcaccatctttgtaagaaaaaatataaagtcaagtatgtgcaacttaatgttgttccaccaaatggatgatcctgggcatgctggaaggactgccagcaacgcgcagcctgatctgaagccttgagtatcgatgctaacagataacaaatgcttttcctttatccagacgatagcaaagggatgagaaatatgagcaaactagatacctaacgtgagcaggacaacattayctctgtgttgaaagatgcaagtgggtactgaagttttgtcccagtacctgccaccaccttctctactgtgcagtgaagaggaggatcccatgctaagccagcagccctccaacctgtccggtcctgaagctccatccctagtccccttagtccacactaggtgaccaccacaactgggcttgtagttggttgacaagattttcttattaggtagaggctctaccagtgattaatttggctgcagtgtacctccctccctccatgtgtttctcacctaccttctactgcagtggaggttcctggcagggcaggagaacatagctcatcgtagagcatggagagcccagagcgcatacgcaaggcacagttcatgggttccccttcc

SEQ ID NO: 807517 - DNA, 594 bp, Homo sapiens
ttctccccaggatgtgggtggcagaggaaaaaggctgctgggagggagaggggaggctgcaaatggtacccccaaagcagcaaggagtatggcagtggtagaggcccccaaagtctcctataaggatgacagggccattggaacctagctgtagagagccctggaggggtgggttctgtaaccttctactccaagatgggatccaaagagcatgtttctggctgtgtcttcctggagaggccttggataaaggcccaggcatcagggggcgctgggcctgcgctaggagaaagatgcatgcyggatgtatccctagcagcagctctttgcacattctcccacccccctccaaacatctacactttctttctctgctcttaaactcatcttggggctccagtgtccccctctgtgaacacttcctgcctcctggagaccctgctagcccttctgtgcaggttagaagacaatgcccttcctccaggcagacatagcccggcaccggggcacaaggctgggtgagcagagtgtgagctggctctgaggtccctcctgtcctcatgtcttatacagtatgccattagcaagtgaagg

SEQ ID NO: 807518 - DNA, 583 bp, Homo sapiens
agcttagagcagggggacgggaatccgttactgctgtgttgcctcttcaagaacaaagcccttgtcggtttaccactctgggaagattgccaggctcaagtattaataataatccctttgttttgtaaatgccttataattgcataaataaagcttactttctcttctttaatggtaatgagccttatttggctgattggttgattaataatactctaattccactagtgacaaaacaggaaggccaaaagatagatgttgagcccrggtagcttgggattgtaaagcacccgtgccggccatgttttcactgctcccgtggtatctcagtgagaaggatagcctggtttcttcacagtcggacactgataagtaagagcaatggtcagcatcagcaaaacggcgcttgcagttcctacttgaacatctcttttttctcattacacaatgtccattctggaagacctaaggaagatactacagttgactctagatcaaagtgggtttgaactgcataggtccacttaatacacagattatttttaaaccaaatgttgatggaaaataccatattcaagggatg

SEQ ID NO: 807519 - DNA, 583 bp, Homo sapiens
aaaattaacataccaatgtaaccagaactttaaatagaacatgaaatagaatgtgatcccccctcccagtctctatctttccccttacttcttgcaaagttaactgctatccagacttagaatactatagatttggttggcccattttataatttaatgtatatggagtcacagagcatatactcttttttgtctgctccttttactcaacattgtgtttgtgagatttatccacgttgctccatagagtcggagtttattcatttcattgctgcatactattgccgtttgtgagtatacataatctatttattcactctgctcttgctggacattcggttactttctagtttggggctgttacaaatggtgcttcggtgaacattcttatgcatgtcttttggtactaatttggtcttggggtggagtttctgggttataggatatgtatctgttctgatttagtaagtactgccmattttccaaagtgattgtagcaaatacccagaagtgcatgagagttctgatatttttgctcactaaaaaaataaaaaaaaatttttttgctcactaaaaaaaaaaa

SEQ ID NO: 807520 - DNA, 594 bp, Homo sapiens
tataaagtcaatttccatgtaaccagctatttgctggggtaacaaatttaccccatcctggaatctcaaataaaaaatccattgtaatgccattatatgaccagttttatgtttactagcagctgtcttcccatcttcgctatygtagagtaaaactattgtactggtattaaaaaaaactcctgtaacaacaacaaacatacaaagaccctggtttacaagagttgttttattaggaaaataactatgggatggattcaataaaaaacaaaaaccatgccttccgctcagtataatcttaccgatgctgtccatcttcctgattcactgctgaggtactgctttaccttacagaaggcatccaaaacgtttaaactttgtgttttctgtattctgacggtttcacaaggcaatttccaaatgcatactgtctttagaaataaagtttgaattcagacggagctcaacttgaatcaatcatacaagcattgtatctgataattatatagattctcccggaatggatgtaatgatgcctcttccttaagcccctttaccttgctatgttgtaagcagtctcctttgtgtattata

SEQ ID NO: 807521 - DNA, 594 bp, Homo sapiens
tataaagtcaatttccatgtaaccagctatttgctggggtaacaaatttaccccatcctggaatctcaaataaaaaatccattgtaatgccattatatgaccagttttatgtttactagcagctgtcttcccatcttcgctattgtagagtaaaactattgtactggtattaaaaaaaactcctgtaacaacaacaaacatacaaagaccctggtttacaagagttgttttattaggaaaataactatgggatggattcaataaaaaacaaaaaccatgccttccgctcagtataatcttaccgawgctgtccatcttcctgattcactgctgaggtactgctttaccttacagaaggcatccaaaacgtttaaactttgtgttttctgtattctgacggtttcacaaggcaatttccaaatgcatactgtctttagaaataaagtttgaattcagacggagctcaacttgaatcaatcatacaagcattgtatctgataattatatagattctcccggaatggatgtaatgatgcctcttccttaagcccctttaccttgctatgttgtaagcagtctcctttgtgtattata

SEQ ID NO: 807522 - DNA, 594 bp, Homo sapiens
tataaagtcaatttccatgtaaccagctatttgctggggtaacaaatttaccccatcctggaatctcaaataaaaaatccattgtaatgccattatatgaccagttttatgtttactagcagctgtcttcccatcttcgctattgtagagtaaaactattgtactggtattaaaaaaaactcctgtaacaacaacaaacatacaaagaccctggtttacaagagttgttttattaggaaaataactatgggatggattcaataaaaaacaaaaaccatgccttccgctcagtataatcttaccgatgctgtccatcttcctgattcactgctgaggtactgctttaccttacagaaggcatccaaaacgtttaaactttgtgttttctgtattctgacggtttcacaaggcaatttccaaatgcatactgtctttagaaataaagtttgaattcagacrgagctcaacttgaatcaatcatacaagcattgtatctgataattatatagattctcccggaatggatgtaatgatgcctcttccttaagcccctttaccttgctatgttgtaagcagtctcctttgtgtattata

SEQ ID NO: 807523 - DNA, 567 bp, Homo sapiens
ctttgggagacatttgcagtgtagaatatctagctggattttcttccttggagattatcctgtactagtaacaagcagagaaaatatttcccacgcctgtgagtatttaggagttcctttgtgtgcctagatctttttttccccatacaggggaagtggtgtgcactgggggtaggcagaagaaaaatgacaagaagcaaaagctttgctgctgtgggatcaaattccaagcagaattccttcatacacttccatttctgtgaaagtgcggtgtggtgtttgttttcactgtatctgctcgcttaattgtttctgcctgttcatttcgttcctcagtgaaaacgttagcctaagggacatttgaaaatcaaaaggtaggcttggagtttaacaggaaatgaacagtggtgttgctgcaayattaaagtaaaagtttagaaccaataagaaataaccacaattctaaactcaacacgtcttttctcctttttgttgtttcctttgctctcccaaatgtcaagattaaagaaaaacattccatggtttctacatgtttacattgcaagg

SEQ ID NO: 807524 - DNA, 716 bp, Homo sapiens
agtttagaaaatgatcatcttaaatacattgtctttcttttcattttgcagtttagtgcttagtatctagttacttgatttgaaatgtagctgtatcatgtggattaactgctgtttttctagctatatcagctaggtgatttcgctgaatrtttccttaaaatgccagatttagcagttataacccagaaaactccttctactgttttccaaaatttactttatgttttcgtgaggagttatttctcagatgactttacatatattagtgaatctttgatgaaacagtagttaaagttacgagcgtgagccaccacacccggcctaaagttgtagttcttaaccactatcacatcgtcatttgtttctctgtttaatattaaaattgccatttataatgtatttttctttaagtgcaaatagtgtatctgacctattatcaatcatgtttatacttttattaggtggaccacacaggagaatatggaaatctggtgactatacagtcatttaaagcagaatttcgcttagcaggaggtgtaaatttaccaaaaataatagattgtgtaggttccgatggcaaggagaggagacagcttgttaaggtgagccttcccttctctggcttagcccttagagttttagtgatgaaaatttttagttcatattttctttctgctttatttgggattttgtctttattttgaatacttaca

SEQ ID NO: 807525 - DNA, 557 bp, Homo sapiens
actcttttttagacagagtctcgctctgtcaccaaggctagagtgcagtggcgctatcaaggctcactgctacctccgcctccccggttcaagtgattctaatgtctcagcctcctgaaaaggtggcatttacaggaatgtgccaccacgcccagctaattttgtatttttagtagagatggggttttgccatgttggccaggctggtctcgaactcctgacctcagatgatctgcccgccttagccttccaaagcrctgggattacaggcgtgagccactgcacccagcctaatcctttaaattctaatagactctctcatggtaacacagacttcaagattgttatagcatactcaactggaaggaaatgcttaaatttctctttagtagtataactttacatcttaacatacttaaatatgtttttatatttacatagagtcaaatacagactatcatttaaaaattataattaagatatgtatggaagaatatacctaaacataatttcgaggtttataaagattaaaacttaaaatatgctttcaaaagtta

SEQ ID NO: 807526 - DNA, 557 bp, Homo sapiens
actcttttttagacagagtctcgctctgtcaccaaggctagagtgcagtggcgctatcaaggctcactgctacctccgcctccccggttcaagtgattctaatgtctcagcctcctgaaaaggtggcatttacaggaatgtgccaccacgcccagctaattttgtatttttagtagagatggggttttgccatgttggccaggctggtctcgaactcctgacctcagatgatctgcccgccttagccttccaaagcactgggattacaggcgtgagccactgcacccagcctaatcctttaaattctaatagactctctcatggtaacacagacttcaagattgttatagcatactcaactggaaggaaatgcttaaatttctctttagtagtataacttyacatcttaacatacttaaatatgtttttatatttacatagagtcaaatacagactatcatttaaaaattataattaagatatgtatggaagaatatacctaaacataatttcgaggtttataaagattaaaacttaaaatatgctttcaaaagtta

SEQ ID NO: 807527 - DNA, 509 bp, Homo sapiens
cttattgcaccagctagacctacttaaataatattaaacaagggttggcagagtaggcaaacttgttttatccctaatttacagatctgcatctcatgtcccctaataaaaagttatttggttggaggtttagaataggaatattcatcaaattaagaaagaattattttattccaacttgaaaaatgaaaattattaagttttatcaaacgcagttagggartattgaaataatcatctacttttttattactagcctgctgataaacttctattgcattattcaatttccttatattgaaactgggtatgttcctgttggattattgaatcagtaatattagcttgttaagctctaatctgaagtagttagttgaaggttttgaatctgtaaatttatagtttaggttatttgttttcttttttgcgtaatattttatcacctttggggatctgaatcaaatctgtcttgtgaaacaaattggatagttttcccatcttctactctc

SEQ ID NO: 807528 - DNA, 632 bp, Homo sapiens
agaaagtgctcattcaaagaaatgcagatacaggtaagtggagttatttgttactcactgaagaggtagggactaatagatataaggaaagcagggatcaaccatatctgctatagccacataattaataaagatcaaaagaggaattcaaacccagastcacccgactctaaagcctatgatcattctactacagtataccgcatcacatgcctatagaaagattaagactaaatataactggaagtatgtttgccagtctgtattcaggatctataccatgcacacagaacaaaatattaaagttaccaaatactcagtacgcaactgaattcatagcctgacaaaaatgggcatgccttctcctctcatactgccacttccttcaggaaagaacatgctatgtcaataccccgtttagtacactaccttcaccccaccccaaggtcctaccatatctcctgtagaactagcacacccttttcatggccagaagaaaggaaagcccccagatggctagttctcccagctttctaaggaagtagtatcaccgagacgccttctgtcatgctctgggccatcacacctccaagagctgctggagggaagatttgcacaataccatctatatt

SEQ ID NO: 807529 - DNA, 623 bp, Homo sapiens
agtggatggcaatgagaaactgaatcagccctaggtggtgatctgtgtggtccagggagttcttatccagagttgaaaagcttgtgcacatggaaaacctgaaacaagccaggagtgtatgaagcgagccagggagagaagttarggctggggtcagaattaggaattctagggctggaataatcaatttgtaaatcaacaacagacgggtggcatttaaagccctggaatgaatgggatcacccaggaaatggttctcaagcctggctacacatgggaaacacctgggaatctttgaaactataataatgtttcagtcctaccctcagagattcttatgtaattggtctcaggtgcggcctgaacattggtgttattaaaagcttcttggatgtttctaatatccagccaaggttgtgaaccactgacttagggagaaagcatagagagaagatattcaaggactgaggtctggactactcccaacatctagaatccatcagggaaggaggagccaacaaaggaagactgaaaaaaagccgtctctaaggtgggatgaaaaacaaagaattcaagagggggaaaaacgagttttaataaagactattcagtgctgctgagag

SEQ ID NO: 807530 - DNA, 597 bp, Homo sapiens
agtgctcctagtggtttcccataagtctcctctgtaggtctctacaggtgaggctcccctggcagccattctgattttgcttccccttatgagggggaatatactcacttgcttctggaagttaaaagcttcgcgtggcctctactattgagtgattttattatatcaattcttgctaggcagtccagttctgtaacagcatctaataccatcagggaagtcttcagagaacagctgttactgagcttctcgacaatgctcatgtctccccataaccagagtgttcattttcactttagtaaaygaggaacataactagatggaaagttttcccatcttaggtagtaaatatattctagcacgctcacttatcttttgcccctttcctccacagtttaccatgacagttctagcattggttgatattttatattgatacaaagcaatgcttggctctgaagaggaagtcacacagtctgctagtggtagagccaaacgtgccttaacaaaaagcccaacctccttcattatgctaaaaaaaatttcactggatgttattatgttacacattcatttctatttatgtttttgtttggt

SEQ ID NO: 807531 - DNA, 682 bp, Homo sapiens
agaatggagtcaaagagacagaaatagaggcaggaaaagtaaataggtgctacatcaaaatggagttgcaaggggacatttctgcctgccagaacccaacccatctttcaagatccaaataaagggaagaagcacggctctaccaattaccagtcttgtcagcttttcttggaccctctgcctctggggcragtttcttttctgctgttgccaatgggaattcaggccatgctgatttcaaactttttttttttcctctgctgctttctgaaacactttcttcttcaggtattcgtgacatcctcagttcccagaccacaacagtgaatggttttggaatcagtgactcccattatctctatcccaaagcagagaaatgaaaccctggatcctcatgccaaggcagttttatatatcggagccactgtgacttctcagtgttcatggccctctatattgccaatattcaaaggaaaccagaaaagagggaagccagagccccgagtctatgcttgggccttgctctggatgttgaggaaaggagttaggcacagacgaccagtccaggatggacccttgggaacacacgtttttgtgatgaaatgaaacttgtatggtatgacttcaatttagggatcaaaatataggagagagagagcaacagggacaaactgcttctgat

SEQ ID NO: 807532 - DNA, 369 bp, Homo sapiens
ctgcccaattgcttattgcatacattacagtaatagtattttaatttgtattttaaataagaaaacataacaaatgagtaaaaaataatagatgctcactatcattcaaacaaacaaaagtataaaataaaacagaaagtaatatcaagaccctaccctcaatctcatgcyctgggtgtaactatccatgaacaaacaagtatatattctttcatacacctttctatgcctacagatatgtaatgtatatacacaatatatttaataaaagaataaaggagagttaacaatctccgataaatctggggataattttagaaataaggtaacagtctaatgtttattaaataagaaaaccctagattttta

SEQ ID NO: 807533 - DNA, 369 bp, Homo sapiens
ctgcccaattgcttattgcatacattacagtaatagtattttaatttgtattttaaataagaaaacataacaaatgagtaaaaaataatagatgctcactatcattcaaacaaacaaaagtataaaataaaacagaaagtaatatcaagaccctaccctcaatctcatgctctgggtgtaactatccatgarcaaacaagtatatattctttcatacacctttctatgcctacagatatgtaatgtatatacacaatatatttaataaaagaataaaggagagttaacaatctccgataaatctggggataattttagaaataaggtaacagtctaatgtttattaaataagaaaaccctagattttta

SEQ ID NO: 807534 - DNA, 450 bp, Homo sapiens
caggcattattgaatttgatggcctttacttcaagactattaggcattcatacaatcacatacaagttttcacttcaataaacagtataatgaggaatattttgctagatatccaaacataagggaaaaatacagggaayatatttaacttggccaagcctggataaaacaagccttgctgatttgcagagaaatgttaaacagaaataactggaactggaagtttgtctctcctatggtctgaaaacaatgtatatacagcaatcagtccctaaatctgtttacttttcaatttctccatagacagaaccacataaaaagttcaaaataataaatcaggcaggagagcccacaccataaaaatctcattctgattatttcttattttgtgagaaaccaagacaaaccattcaactttctgtgtcctgcctttcttgtcaagaagtggtt

SEQ ID NO: 807535 - DNA, 595 bp, Homo sapiens
ccagagcagccaagagagtgcttgcaccacctctctaccaagctcaggcaacacagctcacagttctgggagagacctcttccttctgcttgaagagaggagagggatgaataaagaggactttgtcctgcctctgggatgccagctcagccacagtaggatagggccctgggcagaggcctgaggccctgattccaggcactaactgtcaaatgacatttctagacacaccctgggcaagcaagaaacttgctgccttgaagagaaggacccagtcctggcaagattaatcatcttctgactaaagagccattggcccttgaataaccagcagtggtacccacgcagtactcgccatgggccttgggtgagactgagagatgtwctggctttaggtgtgacccagcaaattcccaactgtggttgttatggagagggactccttctgcgtaagaaaaggaaagggaagagtgaatgggactttgtcttgcaggttacataccaattcagccacagtggggtagagcaccaagcaaggttccctgattccaggcactggctctcagatgacatttcttgacactccctgggccag

SEQ ID NO: 807536 - DNA, 596 bp, Homo sapiens
gcctggaagcattcactacaagctgactgaggagtccttgggccttgaatgaacataggcagtagctacgcagtacctcactgtgggcctgaggtgggttatattggttgcaagcctcattgtaaccacaaatcagaaaacatacaacagatacataaaaaatagaaaaagaagaaattaaaacataaccccagagaaaatcaccttcaccaaaaggaagacaggatggaaggaaagaagaaagagaagaccacaaaacaatcagaaagcaaataagaaaatggtacaagaaaggccatacttatcagcaataacatagaatgtcaatgaaataaactgtccaatcaaaagacttacagtggttgaatggagaaacaaaaagacccaatgatctgctggttacaagaaacacacttcacctatgaagatacacayagactgaaaataaacagatggaaaaacatattccatgccaatggaaaccaaaaaggaagaggagaagctatacttaatatcagacaaaatagatttcaagacaaaaaccataagaagagaccaaaaaaatcataatgtgataaaggggtcaattcagcaag

SEQ ID NO: 807537 - DNA, 442 bp, Homo sapiens
tccatgccaatggaaaccaaaaaggaagaggagaagctatacttaatatcagacaaaatagatttcaagacaaaaaccataagaagagaccaaaaaaatcataatgtgataaaggggtcaattcagcaagatgagataacaattgtaaatatatatacacccaaaactgcagcacacaaaaaygtaaagcaaatattattagggctaaagagagagaaagacttaaatacaacaatagttggagatttcaacattccacttttagcattggaccgatctttcagacagaaaatcaagaaataaacatcagacttaatctgcactatagaccaaatggacctaataaatatttacagaacattttatccaatggctgcagaacacagattcttctcctcagcacatgggtcattctcaaggatcatatgttaggtaacaaaaa

SEQ ID NO: 807538 - DNA, 563 bp, Homo sapiens
gaccaatcaggatcttttatctattttacagaatattccattttttttaattcccaaatattctactcagaatggcaaataggtacttacttctaaaagtatacactaaacatcagtaattaatgcaacaggacagggttaactttcagcactctttctgttttggttttaaacaccatagtactaaatctccctcakgctctccttcctcttatgaaactaagcagtgccttcagtttcaatttcaattaactgcttttaggcttcactaactagaataattttaaacaaaaaataaagcctaaagtgttttcaaaaatcacaaaacacagaacaaaaattggaggtttctagaataaactacaatgttgatgttttaaaaatacttgcagacatatttctccttagtatgaaaaatatgttgaaatcaagtgcttcagatatggcataacatttgtttttttaaaataataaaatgtgcaaatatattgtcaaaattataatggcaggatagattgctacaaatccaacattagcacatatagcatgtccaaaatgaatag

SEQ ID NO: 807539 - DNA, 552 bp, Homo sapiens
gggaatctttttgttttaatacctagtctgtttgtaagtaataggaatcctctcaatcttgtaccagaggtccagtgaagagtgagaagtgtgtggagttgacccaggtacctattcgacactgcaacaaatcagtattagaaaagagagagaaaaaaatgtcattcatgtagaaaaaaatctgatgcaaaatagatatccaataaaggtttgttaaaccaataacttttctagatttaacaactaatgagagacagaaaagtttactactagttgcttaatcgaatggcttttaaactcttaaaataaaaaatcttacaacacaggccataggatataattaaaactaaaatttmaaaaaatactactactctcactacatgcaatatacttattccaattaatttaatgaactgattaatgattgcagtcctcagttttaaaaatcaaaatgaattcatatcaagtccctgttagacttcacacaattttctaatagcctgtttttcctgtttcatgcatgaccaaatccagaaagctgtcctaaatctt

SEQ ID NO: 807540 - DNA, 653 bp, Homo sapiens
atctgttcatcgttttttccactgaggatccaccagtccccagcgttctatttggcctgtcaatcacaacatcagaccacagagacaggcatgtgacccaggcctggacagtcctcccctcccttgggacagtgattggtccaagaaccgagcacatgatccaaataaggccaactagagttttccctgaaatatatattaatgctaagagaacacaaatctatgaattgagttgaaagccatgttccctgtcacaagggaggagaaaaacagcccttctgcaggtgaagcagagaaacaaacagaaatgagatgagaaatcaatttctgatggtctcaagtcctagttatagctcctggttattgaatacctgaaggtctttcttgactctccaaacacttagtttttttccgcactrtgtaagccaacattttcttaattggtttgagctggtttttagtcctatgcaactgaaaagttattccaggtcattcacgtatgtgttcatttattaatttagtcattaatatatctagccaagatttattaaacgtgggacgcctttgttgtataataaagaatttaactgactcttggtccccgggaataagcttcgaaacccttgcgatttcctgagtgatagaagtgtctt

SEQ ID NO: 807541 - DNA, 412 bp, Homo sapiens
atctctgcatggggtcgggaatcaaggctctgaaaagcagccgacatgtttggaaggccttcagagagaaaaggaggcaggccaccaacctccttcaaaggggggttagaccaccaatgccagcagcaagtatccgctttagccaagtcaagcatttgatcagcacatgcrttccctccactttctgtaaggtaccgactctatcttgggaatgaggaggagagagcagaaactcagatttggatgtgacttctgccaaacttgagctttcaatgtatttataggcaacaaacccaagacaaggaaattggtgccgtcaccaaaagcgtggtgcagaaagtggggtgatgtggtcagaaaggatttgccagaggaggtgggcggggctactggacagccacagctctcgtcc

SEQ ID NO: 807542 - DNA, 540 bp, Homo sapiens
ctaacaagtttgaagacccccacagaggaatggaatcagtatgagaacacagtttcttcatctccctgtcccagaacttcaccctggactcctcgaccaatcaacaatctccacacttcggcccactccaaaactcctaaaatcccaagctccaaactcctctgggagatggatttgaggcttcctcccgtttccttgtgtggaagccctgtcattaaacctctttctctgctgcaacctgatgtacttggtgtattgacttgccatgcacattgggcaagggatctattacrcttacaagagcacctagaaagggctgctctgggctgggtgtggggcagagtgaatgggaatgggaacactgtggaccttggagcatgctggagaaccctgagccttcagtctaggctcaccttgtgctgatggggcatgtggccttctcccacagacctagagagtggatagaggtgacagcattagggaccttgcatttgtatgcttgtctgagaggccactacgatgacccctctttatagatga

SEQ ID NO: 807543 - DNA, 512 bp, Homo sapiens
tctgggacatgtttctttagtatccagctgaggtgtaacaagagttcatagcaaccagtgcttgcagatgaggaagtaaggcccaaataggctaagaggtcctgaaacccagaactcttaaattgtcagtggtggcagatcagatatctcctgtgagtttgtagaggatgctgttttcgagtacagttgacccttgaacaacacagatttgaactgtgcgagtccacttgtatgtgaattttctttagcctctgccacccatgaggcagcagccaacccctcctcttgcccaccagcctactcaacaygaagaagacaaggataaagacctttatgaggatccacttccacataatgaatagtaaacatattttttcctccttatgattttcaaataacattctcttttctctagcttgctttattataagaatacagtatataatacatataacatacaaaatatgtgttagttgactgtttatgttttcagtaaggatgcaggtcaacag

SEQ ID NO: 807544 - DNA, 584 bp, Homo sapiens
cccctccctgcaccacaccaggagactgagtaggtgccgttcccccgcctggtgacctctttcatctccagaatctgagtactgagttcaaatcctaatgcagctcattactaatggtgtgagcttatcattaggggaggttaatccgtacctgtttcaccagaagaggttagttgagatgtgatgtctgaagttaataataatagtaacaattatgataataatgatrgctaatatttagattgtgttgattaaatagacaaaatatttatcctctcaaagcctcagtttttcatctgtagaatagggatagtggggttgatttgaggcttaaatgaaataatgcttataaagcctttactatgtgcctggcattggcaagtgttctttaaaagtgagctgttgttatcattgtgctgatccaaatacctggaattctagtctggctctcaccactgtcccactgccttgacccttgaccctttccttacctcacctgcctggatgactctcattcatcttttagatgtcacttccacctggaagtcctcctggactccttctgtctatgttaggcaccactt

SEQ ID NO: 807545 - DNA, 584 bp, Homo sapiens
cccctccctgcaccacaccaggagactgagtaggtgccgttcccccgcctggtgacctctttcatctccagaatctgagtactgagttcaaatcctaatgcagctcattactaatggtgtgagcttatcattaggggaggttaatccgtacctgtttcaccagaagaggttagttgagatgtgatgtctgaagttaataataatagtaacaattatgataataatgatggctaatatttagattgtgttgattaaatagrcaaaatatttatcctctcaaagcctcagtttttcatctgtagaatagggatagtggggttgatttgaggcttaaatgaaataatgcttataaagcctttactatgtgcctggcattggcaagtgttctttaaaagtgagctgttgttatcattgtgctgatccaaatacctggaattctagtctggctctcaccactgtcccactgccttgacccttgaccctttccttacctcacctgcctggatgactctcattcatcttttagatgtcacttccacctggaagtcctcctggactccttctgtctatgttaggcaccactt

SEQ ID NO: 807546 - DNA, 584 bp, Homo sapiens
cccctccctgcaccacaccaggagactgagtaggtgccgttcccccgcctggtgacctctttcatctccagaatctgagtactgagttcaaatcctaatgcagctcattactaatggtgtgagcttatcattaggggaggttaatccgtacctgtttcaccagaagaggttagttgagatgtgatgtctgaagttaataataatagtaacaattatgataataatgatggctaatatttagattgtgttgattaaatagacaaaatatttatcctctcaaagcctcagtttttcatckgtagaatagggatagtggggttgatttgaggcttaaatgaaataatgcttataaagcctttactatgtgcctggcattggcaagtgttctttaaaagtgagctgttgttatcattgtgctgatccaaatacctggaattctagtctggctctcaccactgtcccactgccttgacccttgaccctttccttacctcacctgcctggatgactctcattcatcttttagatgtcacttccacctggaagtcctcctggactccttctgtctatgttaggcaccactt

SEQ ID NO: 807547 - DNA, 640 bp, Homo sapiens
aaatagacaaaatatttatcctctcaaagcctcagtttttcatctgtagaatagggatagtggggttgatttgaggcttaaatgaaataatgcttataaagcctttactatgtgcctggcattggcaagtgttctwtaaaagtgagctgttgttatcattgtgctgatccaaatacctggaattctagtctggctctcaccactgtcccactgccttgacccttgaccctttccttacctcacctgcctggatgactctcattcatcttttagatgtcacttccacctggaagtcctcctggactccttctgtctatgttaggcaccacttccctggatccctgctctgagtgctgttgtagaatgcacctctcacactgaatcttgatggcagtttgctggtctacttgccctgcagcctgtaagcccttgagagcggggtctacatcttcctggcgtggtcatctcatacctggggtaacacctggtactcagcaggtgagaaggaaacattcagtgcaggaaccagtgaaggccaggtggcctccgcacacttgctccttagggcaggatcttctctgtccttgaggacttcaaggcaagaataataagcatcaaacaatggtgaatggtacaagat

SEQ ID NO: 807548 - DNA, 605 bp, Homo sapiens
ttttgcctgaaacacaatagtttctacaagggtcccaggaaggagatgcttctgttttctttgtagaataatcttacgtgtcttagcctgtgtaacaggcaagaaagttctctgatctatccaaagtgtcgcttatggaaaaagaaattactctgtctcagaagagacctgttactactagctaacacygaccgagtactgcctgtgtgccaggcactgtgctgggtattttacacacatttaactgtttaagcctcactacgaccctgggtgctggatactgttattatacctgtttcacagatggagaaactgacaaacagaaattgccccaaatcacacagctagtaagtgaagatgggatacaagtacgatgtagaagatgttaacagagggacaccatgagatgcttatctcaaattcagtcacccagcgtgtgagaccagagttggggattctctgctctgcttcatctagggaagctgcggctggagaagtgggcccaccctctcctcacaccttcgtccccctcctcctggctccccatatcagatttgaacagaaattgggccactccatctttgacattagcctcctcctcaaat

SEQ ID NO: 807549 - DNA, 605 bp, Homo sapiens
ttttgcctgaaacacaatagtttctacaagggtcccaggaaggagatgcttctgttttctttgtagaataatcttacgtgtcttagcctgtgtaacaggcaagaaagttctctgatctatccaaagtgtcgcttatggaaaaagaaattactctgtctcagaagagacctgttactactagctaacactgaccgagtactgcctgtgtgccaggcactgtgctgggtattttacacacatttaactgtttaagcctcactacgaccctgggtgctggatactgttattatacctgtttcacagatggagaaactgacaaacagaaattgccccaaatcacacagctagtaagtgaagatgggatacaagtacgatgtagaagatgttracagagggacaccatgagatgcttatctcaaattcagtcacccagcgtgtgagaccagagttggggattctctgctctgcttcatctagggaagctgcggctggagaagtgggcccaccctctcctcacaccttcgtccccctcctcctggctccccatatcagatttgaacagaaattgggccactccatctttgacattagcctcctcctcaaat

SEQ ID NO: 807550 - DNA, 690 bp, Homo sapiens
aaagagttgccagtcttacttccactaggaatccatcctggttgtcccgattcagaagtcatttctgcccctaccttcctagtcatttacgatgtactttgctatgtctaatacagcacttatcctgtatgacctcattaaaataacttctgctcgcatctgtctgcctttttagctgaaaggctcctagaggaaaaggacctgacttcaactcctagcactcctgggcgttagcttcttggggctctgttttcttagtctgaaaaacgaggtgrtcataagaagtccagtttccagataagagggttgaggacagaagtgtcagccaaatgtccctgtcaaactggccactcagagccacctccttgtttaccattctcctgggccaacttattccttcctcctcattcttctaggaggctgatgcagagaacaagacgatgccacccaagtcatcctttgttccagacaccagttctcacatgcccctttggtgcagtgagaagagcccaagattggggtctgagtctgggctctggccacttgctgtgtgtctgagcttggattaattatggaactctccaagcctctgtgccctcatctgtggaacagagtaataattcctgtctcatgggtcatgtaaggatcaaattaactcatgagtgtagagcttctacatggtgtctggcc

SEQ ID NO: 807551 - DNA, 598 bp, Homo sapiens
aatttttgcttctgatattactgagtggcaagaaacagttaacttacaactggctgtgctttctcagcaatcattgcacatacatacaaaagaatgttgcaaagttaaaaatctaatcaaaaaattatttctacatgtaatgaagtttttacaaatattaaatttaaagattaatgaagttgaaacaatgttacattttggagatatttaattaaacatgtcttcatttaattttgcagtttcctttttgcattctgaagccagtactttttattcagacctcaaacataatttggacactcaaaaagcttttaagctccaagtaattctgtctatgagatctaaaggagaaaataattctgttttgaatacacttttgttcttgctattcaatcttcaccccatgcaattttgtcttgcaccactaaaaccaccctygctgtggtcaccaatgaacattttgtttcgagcctaatggaaattttctagtcctgatcttgcatgacctttgttagcacttgacactgtcagtcacactcccatcttggctttttataaagccattgctcattgctctcttccaatctcctcaatctcc

SEQ ID NO: 807552 - DNA, 654 bp, Homo sapiens
cacgtctgtgccagtccaggcaagatttatagaatgagtggacaaataaatgacaaatgcatgaatgattgactgaacaaatggagggttcatgagcgtgcagcacaacctcatgctcttccaatccctcccagcccaccctcaggcccagatcacttgtcctctccttaccctagcgatcagctccccgaccattcccgtccaggtgccgttggcctcgggaacgccgtacacgccatccccaaccaggcggatcttgtagttgaatcggaggatctctgccagctccttgagcatgtccacacagaagccctcgtagcggtcattgccttccatctcctggtggttccccttcagcattaaatatgggttytcctgcagcaaaactgggcagctgtcattctcatcttagccctggtgtctcacccgcgtgtgatggggagggccaggggcacagagggtcggggaggacatggggcagaaggaggaaactgacgtgggtaatgggctactttggggtgatgaccagctcctctccctgatgtgctccttaaagctgtccttcaaggtgcttctgttgtcaggaacacacagtggttcccactgcatggagggtcaggctcaagctgcttcaacttgtttaaggtcatcatc

SEQ ID NO: 807553 - DNA, 568 bp, Homo sapiens
gaagggtaacccaggcataaggaacagcatgtgccaaggcagggaggggcaggatgcagcgagcggcaggatgcagcgagcaggtcttgagccatccactagaccccatgctgcatggggaggagaaggcgaggtgggctgggcctggttacaagggttatgtcccaaggtaaggggcagcagggcctgggcagtggctgaaggattgtaaggaaggaaatgccaggccaattctgattttcaaatgaccacgctgacaggagggtcgggggacaggcagacaaagaagggagcctgccagcagagtatggagcggctccagagaaagaagtagaggggccccgatcctggattagggcaggggctttgcggatggatagaagaggacagatccagaagatttttagagactaagaagacagcgggaagsaggtcccagcaatcacactgggtgctgcaccccctcccccaaagtggactcagccaggctgttcccagctctctgctggacagcgacaccgcaaccctctcatctttctggcattttcacactggttcagataagcta

SEQ ID NO: 807554 - DNA, 559 bp, Homo sapiens
gcacccaataaacagtcatcacataaataaatgaatgaatgaaaatgttcagtgaccccatctcctcacagtgaagggaaacttagtagcctggcattcaagttcctaagctctatggacccaacccacttttctggcttatgcctcttccctttcttaccagtgtctatttctcaggaaaacctgtacctttcagcttttcctgaacacccgacaatgccctccttcattgacctctcctccccactcattccctgtctttcagagcccatcgtcaatgccccttctttcctgaaggctttgctgacctccccatgggaggggacctctctctccttgaaaccccayagtcctaggtgtgtgtctctttccagcttttatctctttctgtttatagtagatcaatcatttcagcccagggcgcctgggccccaggagttcataaagatagtgatggaggtccttgaactctttttattatctccaaaagcctaaaagacatggacacatttgcagaccttgcacagttagcaatgataaggctgaggaggcgaactca

SEQ ID NO: 807555 - DNA, 559 bp, Homo sapiens
gcacccaataaacagtcatcacataaataaatgaatgaatgaaaatgttcagtgaccccatctcctcacagtgaagggaaacttagtagcctggcattcaagttcctaagctctatggacccaacccacttttctggcttatgcctcttccctttcttaccagtgtctatttctcaggaaaacctgtacctttcagcttttcctgaacacccgacaatgccctccttcattgacctctcctccccactcattccctgtctttcagagcccatcgtcaatgccccttctttcctgaaggctttgctgacctccccatgggaggggacctctctctccttgaaaccccacagtyctaggtgtgtgtctctttccagcttttatctctttctgtttatagtagatcaatcatttcagcccagggcgcctgggccccaggagttcataaagatagtgatggaggtccttgaactctttttattatctccaaaagcctaaaagacatggacacatttgcagaccttgcacagttagcaatgataaggctgaggaggcgaactca

SEQ ID NO: 807556 - DNA, 509 bp, Homo sapiens
gttaaaatataagttagaaaacatttgagataaatattaatacatatcactaagatttcatgtggggaaatataaagctaagatctaattcagatacggtaggatttaataaaaaatttgagaggctagggaagtgaaagtcagaactggcagtacttaggaaatcaggaagcrcagggattgcaaaatatcatcaattttaatattagttgcttacagaatcaaaatgggtaatttgcaaaagaatattcagaaacatttggtaacatttcttacacatcatctgtcagaccatattcctattatgctactgcagcagaaggaacaatggtttctctttctattgcactttccaagtcttgtgtagatgctttatattgctagaatcaaatccaaaaacatgctggcaagcattttggaaaatgtaattcccaggctttcaactctcagtatatagaggagcccatagaagagggaaaatggcatttagttggcagtagataattctg

SEQ ID NO: 807557 - DNA, 621 bp, Homo sapiens
gcgggaaaacttgataaacatttggtgtcagaaatgttctgtgggtaaaaataggtttcctttaaatggcttctccttctccccagtctatccaattttacctgagtgccttccactgaagaattaaaatagaaagctattagaaagggtatatggtaaataatattttaaggctttatactaccacaatcaaacaacaggtctagaagagtaggcaagatactgattatcaacaaacacaactggcacactttctgagtcttctgaaacctagagaaatcatctttcatggtgcgaacatgatttactgttgatatgtcactaatagggagtraaaaatttgaaaaaaaattaatatgttggggtgtttgatattaactataggaagtcaaaaagactcacaatttcccctttgcattttaaattttttaaaaaattatacttatttttaaaattatggatcaatatttacaaatgtggaaagactgataagagaaaattccaatgtcgcatcttccaatttcagtcttacatctgtacaccccaccttcttccacctcttccttaaggataatcgatacaaatgtaaaatatatgtactttaatcaatagatatttatt

SEQ ID NO: 807558 - DNA, 603 bp, Homo sapiens
ggccaaattacaggttttgagtttataaagatacctctgactgagtaatgccacctgataatgtggagctttaagagcgttgtttgactttttaattgaggttatggcttatttgtgtgctttacattttttattaataatacaaattatttattgtcatctgatgatataagtaaacatacatttcacttacacattttaatcaactyacatgatgagccaaatatcgtttggctaataaaaaaaaacctaaccaaaacataaattttcactaaagatataagattatattctggttattcaaaaagaaatgtttctttggattcattattaaccaaaattggataggctattcatcaagcatgtattgaacgtatattatatataacacaatggaatgagacctctaaggaaataaacaatggaaaaaaattaaagcacaccttaaggtgttacgttttgttttgcttttaattaattatttttccagagcagttttaggtttacaataaaatcaagcagaaggcacaggattttccatacaaccttggtacctatgcatgcttagcctttcccattatcaatatcccccaccagagtggt

SEQ ID NO: 807559 - DNA, 582 bp, Homo sapiens
tagttccatacagaatagttcactctcctaacagtgtttttaacacacccatctcaaagtataacttccaaatgggtaaaagcatgactcatgaatatataaaatgtacacatgtcaaaaattgtattctagttcttaattaacaaaggaacaagtaagttttttttgtttttgttttgttttgttatgagacagtctcactctgttgcccaggctggagtgcaatggtgtgatctcsgctcactgcaacctctgcctcctggcttcaagagattctcctgcctcagcctctccagtagctgggattacaggtgcacaccaccatgcctggctaatttttgtatttttagtagagatggggtttcaccatgttggccaggctggtcttgaactcctgacctcatgatccgcccgtctcggcctcccaaggtgctgggattacaggtgtgagtcaccgcgccgggcctaataagaagttttaattgatataaagaacatttgaaaagtaattatttgtaagtaatattatttgagatcaccaggttagagacaaaactcatagaaagggatataaaattttgg

SEQ ID NO: 807560 - DNA, 582 bp, Homo sapiens
tagttccatacagaatagttcactctcctaacagtgtttttaacacacccatctcaaagtataacttccaaatgggtaaaagcatgactcatgaatatataaaatgtacacatgtcaaaaattgtattctagttcttaattaacaaaggaacaagtaagttttttttgtttttgttttgttttgttatgagacagtctcactctgttgcccaggctggagtgcaatggtgtgatctccgctcactgcaacctctgcctcctggcttcaagagattctcctgcctcagcctctccagtagctgggattacaggtgcacaccaccatgcctggctaatttttgtatttttagtagagayggggtttcaccatgttggccaggctggtcttgaactcctgacctcatgatccgcccgtctcggcctcccaaggtgctgggattacaggtgtgagtcaccgcgccgggcctaataagaagttttaattgatataaagaacatttgaaaagtaattatttgtaagtaatattatttgagatcaccaggttagagacaaaactcatagaaagggatataaaattttgg

SEQ ID NO: 807561 - DNA, 636 bp, Homo sapiens
aaagccactttcataataaaatatgaatatctaacataattcattgaatactgtatactatattgaaactgcaaattggaaactgtatgtatacagcatagttattcatagttacatatgttgaaggacatatatatgttttatatatatgtatatatatatacacatatgtgtgtgtgtgtgtgtgtgtgtgtgtgtgtgtrtatatatatatacagaaaactcaggaatgcacaaatgatgttttacttactaatttaccagttctgcaatatgccaaggaaattatattcccagaggacaataagagacaaagaaattctgattactagctggaattttgacctcgaactttcgtgtggtagcctgctgaactaagtaagtgtgtaccaggaagagcacctcttgctcaggttacataagccaaaatggtcttattttctgtaacagccattcttatctcacctttcctaactaagaaaggatggtctatgagatgaggacaacacttctttccaagcaggaaaagactacaagcattgtattttcaccacttgtacttgtacaacaaaaattagaggggttcatggttttccaccgtaccacaactccttccaaaaatgacgctaacatgat

SEQ ID NO: 807562 - DNA, 445 bp, Homo sapiens
tgccctatgtgggaattaaaagttgatctcatagagggagagaggagaatgacagaggttgggaagagtgtttatgtggggtgggagatgaagagagcttggtgcatgggtacaaacatacagttaaattgaagaaataagtaccaatgtttgatagcagagtagggtgactatagttaataataacgtattgtacatttcaaaatagttagaagagaggatttgaaatgtcactaccacatagaaatgataaatacttragaggatggataccctatatagcttgactttgatcactacacattctatacatgtaacaaaatatgacatgtacctcataaaaatgtgtaaatattatatcaagaatatcttgactggctgaaaatattgacaaatgacattactaacaaatgattggtacttttcagtgttccacttttatgaa

SEQ ID NO: 807563 - DNA, 614 bp, Homo sapiens
ttgtgtcagtactcataaaagaaccattcactctttagtcttagcactttcctcaaaattgaaaatcaggcctggaactctggcagacagggtctctggaacataagaacgtaaactccacgagggcagagggttttttgggataagtttagtttagtctagtgccttgaacagtgcctggcacataacaggtgctcaaaaactatttgctgaataaacagcacagacctagataatttcccttacatgcaacmtttttggaaagccataaaaatgtaaggaaagttggaagggctaagttggggggtttccaaagagctttatagtctcatgaatcttcatgcagtactaccactggaaactcccattccaggcagctttttaaagaaagaagcaagatggctatcatgtcctaatgtaaaaaacagaaatttaattaaagaaaaaagcaagagatacgagtctccctttccaagtacaaaaacaagcaccccaactcccctcaagaaaacagaaggctcaatatctttaccaacaattattagagccacagaatacattccaaaatgtcatccagaagttgctctgtcttaagcagcaggaaataatctaat

SEQ ID NO: 807564 - DNA, 591 bp, Homo sapiens
ttaaatggaaatttaaaaggagaaaaaatagacaaaacagactagagttcactttccagtgttttaagttcacaagcaatgataaaggaatcacattcaggctaattacctgttttgttttgatttctaatgcttaagacctacccatttctgcgttaggatcctggagtggaaaattattcccctcccacaaaaggctagctaattcagaaataatatatatcctatttcttagtaagccacctagaacagcaagagtggctaaaaggagagggtgtgccttctggatactgcacctgatttttggttccggtcaatgagagggagagtactatcatcatatgaatgactgctctggcttcgggaagcattgtttagattcacctagaggcaaacacaaatgcgacaatgtgacagaawactgaattcaccctatcttatgctctaatgggcataaacctctaggttcctattcccaaatagaatcatgaaaaagcaacttataagagttgaataaataccctagacagtgagacaaactaggatattatggcttctatttgtgttccagaacaggagattacaaaggat

SEQ ID NO: 807565 - DNA, 554 bp, Homo sapiens
tcaaatgtcagaaaatacaagggaggtgtatataaggttgaatgtaaaagtaacgtctgagagattaggcttcccagactaaactcaaacctagtacagggctcccatataagaacaaggaaacaggagcacacacagcacccatctacatgtttcaagtaaggaaaagagtaaaccttaagcggctatacacgaacattagtggtaacacgattactaacataaccagcccctcccccacccatattccaagttggccagagttaaccaaggaggaagggaaggaagccagcgcttccttttcagacaggaagtaacattggcccttcctgtccagttttaaacaaattgtccagctaaatttcaatgctaacatcctctcctgaatttgttccacaatttaaaaccacagatacagtctaaagttttcccttcctcccaataggcgagtcctscataccatgctaagtgttggcataacccccaaatcaagaggtaacatctttaattccaaaacaatacaggacacagaggtaaatcacttcacttcaaat

SEQ ID NO: 807566 - DNA, 639 bp, Homo sapiens
ttaagtgatgcatatgcttctaatgcttttaagaatatttacctccccaaaaaagaatatcatacataaatatcttcccatccatgatataattatgtaaactgtgaattacaagttaagcaaccttattaaattcattttaattatattttatttttatatttaaaatttaatattgacctattttataacgttacttacatttaaaatttaattgcccagatatataacgatctaccactacagcggtagctattagtgcattggggtaattccatggttgattcattttacttttgcagctgaaaaaacctcatgctgagcagagaggcatctaatttgctcatcatccatgctggaagctttttttgtctattagctttgacstttatgacctaaaaaagtgtggtaatattttacagttaataacacaaaagaagagaataactgaaaataaaatatatgagtaagaaattcattttaaaccctgattttaaaaattaattcaactttagaattgatagatttgcttgatcaattactggcaatctgtagtgggtagaaaattctgagcctcttttcagcatacttattagcagcaaggtttaacaaagatggaaaattaaacttcaatgatga

SEQ ID NO: 807567 - DNA, 619 bp, Homo sapiens
gcctcattatcatttactagaactgtggtttgaaagaattttcttgtgataatgtcattgcaaaataggattctattttgtccatttagcaaatagttttattttgatgaccctggaacactctattaaatgataggtgactttcgtcaactgcttaacaaatcatacttattccagcacttgaatttatgccgttgcagtatcatctaaatgaggatttctctatcatgattctgttgacatttggggctgaatattgcattgctgttggtgctgtctcgtgttgtcagcatccctggcctctatgtaacagatagtagtggcagcaccatcatcaactgtgataaccgcaaatgtctccagatattgcccatagttctctggggataaaaccttcttcagatgagaactactcatttgaatagtcagtaataatawaaacaggaggtgggaggaattaatgtccacattaatggacataatgatggggaggtgtcttcccatcaggaggcacgggggtcagggacacacttgagttggcagtctgtcccttagcagagcttgagcactgtgctgggagatctaccgctctcttcagagctggcaggcaggaacattt

SEQ ID NO: 807568 - DNA, 648 bp, Homo sapiens
caaagagtgtgtatcagaaaatacgaaggtaactgctttgtttcttctttcatagagccttgtgcctccaaacaagcaacaaaaaggccacaatcaaattctttttctaattagctctaatttcttagagggctatctgtacctagtcatgaaactaattgttttttttaatctacctcaaaaaacattattattattattattattattttatttatttattttttttggagtctctctctgtcgcccaggctgcagtgcagtggcacgatctcggatcactgcaagctccacctccygggttcacgccattctcctgcctcagcctcccaagtagctgggactacaggcgtccaccaccagtcccggctaggtttttgtatttttagtagagacggggtttcaccgtgttagccaggatggtctctatctcctgacctcgtgatccgcccgcctcggcctcccaacgtgctgggattataggcttgagccaccgctcccggccaaaacattgttattcttaattttataaatatttatcaaattttaattgtcaggcaataaaaacgtcaaagtgatgaaaacagtgtctttagacatggaatttatagtctctggaatagggggattttattcaacttttcaata

SEQ ID NO: 807569 - DNA, 648 bp, Homo sapiens
caaagagtgtgtatcagaaaatacgaaggtaactgctttgtttcttctttcatagagccttgtgcctccaaacaagcaacaaaaaggccacaatcaaattctttttctaattagctctaatttcttagagggctatctgtacctagtcatgaaactaattgttttttttaatctacctcaaaaaacattattattattattattattattttatttatttattttttttggagtctctctctgtcgcccaggctgcagtgcagtggcacgatctcggatcactgcaagctccacctcctgggttcacgccattctcctgcctcagcctcccaagtagctgggactacaggcgtccaccaccagkcccggctaggtttttgtatttttagtagagacggggtttcaccgtgttagccaggatggtctctatctcctgacctcgtgatccgcccgcctcggcctcccaacgtgctgggattataggcttgagccaccgctcccggccaaaacattgttattcttaattttataaatatttatcaaattttaattgtcaggcaataaaaacgtcaaagtgatgaaaacagtgtctttagacatggaatttatagtctctggaatagggggattttattcaacttttcaata

SEQ ID NO: 807570 - DNA, 610 bp, Homo sapiens
ctttactatcacttctgagtgaggctgtaagacagggtatagtgagggaaattcttcagctcctgattctctatacgtcaggcaggaactctagagagaagggcatttcaaaaagcaatagctctagtaattcaagatattttacaacctattacataattatgtcttcaaatatttataaagaccagaatccttgctacgaaatagatggcggagatgatttatgactatccttttacttcactgctgaagactaaacaacaatcttttgctgtggatagtcactgtccattatcaatttcacacacacacacwctcacacacacactgacacacaagtttatcaactaagctgcaagtaagtctagaaaagaaagcaaagggaagagaaaaggttgttctacttgcttcttccctgccaggtccatatactctttgaaaatctgttgtactacatcaaagatggctggtgcagtaggaaattaacctgaatctctttggttcatgttgtggaaggctgtggttcattccagcaaaaatgttacatcttgctgttattcctgctctcctaatcatctgcccaggaatctgtgctgcataataactttat

SEQ ID NO: 807571 - DNA, 652 bp, Homo sapiens
ctacggatcctgactgtggccgccccgccccacgtgagtcttccttgtggtatgtattagacaagactccaaaaccatgttgagctgggctgtgtgcgaagacaaatgttatttttagtcctcatgacgttggtatccttactccaaatttacagatgaaaatgtgtgwatcaagacatcatattgtacacctaaaatatataaactatttcttaatattatgtgaataatgaaaataaagacattgcagcttctataaaaataaaataatactacaaaaaatgagaatggaagctttatgaatttaagcatttgggccaggcgcggtggctcacgcctgtaatcccagcactttgggaggccgaggcgggtggatcacctgaggtcaggagttcaagaccagcctggtcaacacggtgaaaacccatctctaccaaaaatacaaaaattagctgggcgtggtggcgtgcgcctgtaatcccagctgctcaggaggctgaggcaggagaatcgcttgaacctgggaggtggaggttgcagtgagctgagattgcgccactacactccagcctgggtgacaagagggaaaccctgtctcaaacaaaagaaagaaagaaagaatttaagcattttgtcaagaatccaaatgctg

SEQ ID NO: 807572 - DNA, 648 bp, Homo sapiens
tagttcataaacaagataataagcatatgtaaaacacaagattacaagacttctttagaaataggagaaaaatcttcgtgatttttgtgattttagggttgtgtaaaatgttcttaaatatgatactaaaagcataatccatagaggaaagattgaaaaattagactttcaaatgaaaaagctaattgtccttctaaagacacaattaggaaaatgaaaagataagagccagatggaaagaaaaatgtttacaaatcaaktatctgaaaaaaaaacttgtttctagagtatataaaaaaactttcagagtcaacaatatgaaaaaacataacccaacattaaaaaataggcaaaagatttgaaccgacatttcaccaaagaggatatatggatggccaaaaaacagagtagaaagaagccaacatctttaatcctaaagaaactgtaaatgaacaccgcaagacaccacgctacagctcttacaatgaaaaaaaaccctgacatgagcaagtgctggggtagatgttgaacagccaaatgttgccgacgaaaatgcaaaatggcacagcctctatgaaaacagtgggtggccctttaaatttaaatgccaaacgttcacttaatataacctctagcaataccatttct

SEQ ID NO: 807573 - DNA, 630 bp, Homo sapiens
acatgcccggccccaccttcccttcttattcatcattcacgattatggcctctcccactatttctgcacctagaacaaaacctgagaatcatcggatgcgggaacagggcctatggggaaggatggggagcatctgcccgtgagtcagcmctgtgagtagcaccaggcaccacagagaaacgaaagccagggcctgccaaggtatgtgagggtcttgcccagtcaaacagacatgctaccctcagaaccccaggatggcagctaaagtcaaaaacatgaatgtgagtgaacctgccacactaagaaaagaaaccaccatctattatccacagcactttcacaagtcgatgaacaaaacatcctgctaatgcatcacaatacacgatacactctccttagacacctctgcctaatgcaaatacagcccccatcaaagatgtcttaagcattttaaattcttcctcaggctcaacttttccacttctaaaagagaaaatattaaaatatggttaaataaaatcagatataattaccatttcataattttgttctttccaggccaacatgtaactatctgaattttaaaccacctacttgttcttactacatacagcttttaaaataagtaag

SEQ ID NO: 807574 - DNA, 604 bp, Homo sapiens
tctaatcatggcagaaggtgaagggggagcagatacatcttacatggcaggagcggaagcaagagagggaagggaggaggtgccacacactttcaaacaaccagatcttcagactcactgtcccgaggacagcaccaagccatgagggatccaccccattgatccaaaccctcccactgggctccacctccaacattagggattataattcaataagagmtttggcgaggacagatatctaaagtatatcagtagtgtttaccacatgtgacattatcattttatttatttttaaatgtcgtgtccataatgaaatgtaaaatccataaaagaaagtactttgttgtgttaattgctctatctccagaacctacaatagttcctggcacatagtaggcactcaagggtaaccagtaaaacaataaatatacactatatttcttccttttccaagaatgtggagggagggagaaaacactttaaaatgcaattcaaaagatgtcatgaaaagagagagagagagagagagaaaaagcacagaaatagaaaacaaataaaaagtacaaaataaaatgttaaaaataaatccatataggttagtaat

SEQ ID NO: 807575 - DNA, 604 bp, Homo sapiens
tctaatcatggcagaaggtgaagggggagcagatacatcttacatggcaggagcggaagcaagagagggaagggaggaggtgccacacactttcaaacaaccagatcttcagactcactgtcccgaggacagcaccaagccatgagggatccaccccattgatccaaaccctcccactgggctccacctccaacattagggattataattcaataagagatttggcgaggacagatatctaaagtatatcagtagtgtttaccacatgtgacrttatcattttatttatttttaaatgtcgtgtccataatgaaatgtaaaatccataaaagaaagtactttgttgtgttaattgctctatctccagaacctacaatagttcctggcacatagtaggcactcaagggtaaccagtaaaacaataaatatacactatatttcttccttttccaagaatgtggagggagggagaaaacactttaaaatgcaattcaaaagatgtcatgaaaagagagagagagagagagagaaaaagcacagaaatagaaaacaaataaaaagtacaaaataaaatgttaaaaataaatccatataggttagtaat

SEQ ID NO: 807576 - DNA, 589 bp, Homo sapiens
actgaaagctgctaattgcctttcattctattttgtaaaatgtgattaaacacatttgaccttttgggaataactgagagaagaaaatgcttgcagagacttcaaataaaggtattaatatatatatatatatatatatatatataaatggtattctatcctctgaagtctaaattaagtgtatgatgaatgtctgttaagaaataataggtggggaaggaataaatgaaatttcagaaatttgtttctacctagggtgattacactgtaggtacagaatactggtaaagtaaatatccataaatcttaatgcattatctgaataatcaaaaaaataatatgctgatagggttcatgttgaatgtataagttaccataaattgtctcttacaagaaagcatttcataaatatgayttcaggaagattatgttacgttaatgaataatagttgtggtcccaaaatgaaagtttctttaagttgaaacctttttttcattttgccaatcaataaactttttttgaacatctgtgtgcaattcaccatgataggcattgccaggaataaaaatgaatataatatatatttct

SEQ ID NO: 807577 - DNA, 589 bp, Homo sapiens
actgaaagctgctaattgcctttcattctattttgtaaaatgtgattaaacacatttgaccttttgggaataactgagagaagaaaatgcttgcagagacttcaaataaaggtattaatatatatatatatatatatatatatataaatggtattctatcctctgaagtctaaattaagtgtatgatgaatgtctgttaagaaataataggtggggaaggaataaatgaaatttcagaaatttgtttctacctagggtgattacactgtaggtacagaatactggtaaagtaaatatccataaatcttaatgcattatctgaataatcaaaaaaataatatgctgatagggttcatgttgaatgtataagttaccataaattgtctcttacaagaaagcatttcataaatatgatttcaggaagattatgttacsttaatgaataatagttgtggtcccaaaatgaaagtttctttaagttgaaacctttttttcattttgccaatcaataaactttttttgaacatctgtgtgcaattcaccatgataggcattgccaggaataaaaatgaatataatatatatttct

SEQ ID NO: 807578 - DNA, 491 bp, Homo sapiens
tgctaaagccgtgcagtaataaagagcatggatttgtgtcaggcacacctggactcatgccccagcttcctgctgtgtggcctagggcaacctcctccgtgtttctaggcctcacttaattcatctgtaaaataggtttgctttagttattatgagagatagcacctatgaaacatgctggacatggcacatggtcatgcacagagcggatttgcagcagcatttagcacagggggagcagcaggagcaaygcccgcaagagtgtgagggcagctgcagcggtgcccgcaggtcaggaggtgcgtcctttgtgggggcatcatgagaaacatgttggctggaagagtgggtgagacacagaactcacctcacacgagtttcctagtagaagaaatgcatatggaaacctaaatttcaatttcataacctgtaaatatgagaccatggtttccaaagaggactaaaaattagaatttgtatgtaaattaaaa

SEQ ID NO: 807579 - DNA, 653 bp, Homo sapiens
tttggtgcacccatcatctgagcaatatacactgaacccaatttgtagtcttttatcccttttattcctcaccccctcccaccattttccccaagtccctaaagtccattatatcaatcatatgcctttgcatcttcayagcttagctcccccttatgagtgagaacatgtgatgtttgactttccatgcctgagtttcttcacttaggataatggtctccagttccatccaggttgctgcgaatggcattcatttgttcctgttatggctgagtagtattccatcatatatatatgtatataccacaatttcctcaaccactggttgattgataggcatttgggctggttccatatttttgcaattgtcaattttgctgctataaacatgcctgtgcaagtatctttttcatataatgacttcttttcctctgggcagatacctggaagtggggttgctggatcaaatggtagttctccttttagttccttaaggatctccacactgttttccacagtgattacactagtttacattcccatcagcagtgaagaactgttcaaaaaaaggcaacttatattttaaaattggggataaaagtttccctcctctagtctttacctttcccgaaaaaacaatcactaagattgtt

SEQ ID NO: 807580 - DNA, 550 bp, Homo sapiens
agttagagttgaggacgttctcaccgccttctcagtaactgataaaactactaggcaaaaattcagcaagcacacagaagatctaaacaacatgatcaacctactgaattaattggcataaacactgcagccaacatcaggagaacacacatttattttcatgcgcccatgaagcattcgcaaagataratcatatcctggcatagaaaaacaaacccaaacaaaattaagagaattgaaatcttacagggcatgtgctcaaatcataacggaatccagctagaaatcacaaaccgaacaacaacaggaagttctctaaatacttggaaattaaacatgacacttctaaataactcatggtccaaagaggaagtctcgaaggatatttaacaaaaaaaaagataactggaagaaggtgaaaatacaacatgtcaacatatgtgcaatactgctgtgatgatggtatatttacagcactacatggttacgttagaagagacaggtcacaaattaacaacaattctacatcaagaagctggaaaatgattac

SEQ ID NO: 807581 - DNA, 619 bp, Homo sapiens
aacacagggcaaatcttagatgtttttcctcaatccttaaaattaggaaatgctaggactagaataccttctagagggtgctagaaggtactgtaaaatgatgcagttagatctaataccttctagtagtagaaggtacctggcttaacatttaatctaaccgcatcattttacagttaaggaaactgaggcccagagagctcaagcaacttacctaaggtcgcacagccagctggttacagatccaagactgactgattcagtgctgttttcttgatgctgggctgtgtttgtaccgggtggcctgagygtcctgggtctccttggagcactgccaggccagccagcaggtactgtcgggtcactaagtatgaattcagccttaaacgtaggctggaggatgcaaaggatgaaactccagtaaaaaacaatgaacttattttatatctgcttgttgttaaaaatccaggcaatgtagaagtgtgtccggcaacacttgaaagcacctccctccctcctggccctccccattccactccccaggggtagccacttaacagcgctgtctccagtggctccttaatttttctgccagccgttgggttgtgtaggatccatg

SEQ ID NO: 807582 - DNA, 559 bp, Homo sapiens
ttgtttcttagtttgagttttaagagttctttgtgtattttggataccagttctttatcagatttattgcttgcaaatatttctcctactctatggcttgtcttcttattctcttgacgtgttttttgcagagcagaagattttcattttaatgaggttcagcttaccagttgtttcttttatgggtygtgcctttggtgttgtatctaaaaagtcaccatcatacacaaggtcatctaggttttctcctctgttatcttctaggagttttatagtttcacattttacatttaggtctatgattcacccatttgagttatttttgtgaagaatgtgaggtctttgtctagattaattttttgcatatggatatacagttgttttaacaccatttattgaaaagattatctttgctccattcactggctttgctcctttgtcaaagatcagttgactatatttatgtgggtttattcctaaactgtctttgttccattgatctatttgtctattatttcaccaataccatgctgtcttcattagcataattttataagta

SEQ ID NO: 807583 - DNA, 571 bp, Homo sapiens
atcattgtacagcagttttgctgttttgagctttatataaatgcaatcatgccatattcactcattttatatttcacttaacaatatatctgtggcctggtgtggtggcccacacctgtaatcccaacgttttgggaggccgaggtgggaggattgcttgagctccggagttcaagaccagcctgggcaacatagggaaatccagtctctatagaatatattttagatggatagatagatagatagatagatagatagatagatagatagatagatgataggcagtggatagatagatgatagatgattgatagataatctgtgagatttattcatgttgtagactattcagaagtttattcttttttgtagctatatagtattcatgcagtaactatgccacactttttttacccattttattgttgayggatattttgattatttctaggttgagactatctttttaaatgctgctgtgaatattctcattgaggtttttgtgttgtacataaatatcttttctgggcacatacctaacagtgaacttgctggattgtatggtatatgc

SEQ ID NO: 807584 - DNA, 596 bp, Homo sapiens
  misc_feature 562, 563, 564, 565, 566, 567, 568, 569, 570, 571, 572, 573,574, 575, 576, 577, 578, 579, 580, 581, 582, 583, 584, 585,586, 587, 588, 589, 590, 591, 592, 593, 594, 595, 596: n = A,T,C or G
caccactagccctcagggctgcctaggcagtaagagcctacacttggaagacagctatgccggggccaagagtgaaggtccctctctcccaggcagctctcagcaaaaggcatgtggcagagacccccctggaggctctccctagagcccctgcacacaggaccctcaccccatttgtatgtgttcaccacagcttgtctgccaaccagccccttctccaactttataataacagcagcccccatcacaagccccttcccatctatcgttccatytgaccctcaggcctgggactggactgaggaatgctgggtaaagcctcctgttttctctgtcttatagatgcagcagccagagcatgagggggagccacctgcccatggcagcagaagtatatcggactcactcccgagctgcagtgtcaatccctcctcccacactgcatatgctgccggcccctgccctcccaggcactgcctgggctctccctcctagcaaaatctggcctcagctagttgggtaaaataacaataatgatgacaacactaacatctgatgagannnnnnnnnnnnnnnnnnnnnnnnnnnnnnnnnnn

SEQ ID NO: 807585 - DNA, 591 bp, Homo sapiens
cttggttatttattaaaagattccaaggtgccaaattgcaggttgcagggggtgctggagacacaaagaatggaaggttaagtccctgccctcagagagctgacagtccaataaagaacacagacgcacagcgagcaaaggaacggtgggtcacagcagagggacaggctgcgggagcaaagaagggctggttcacccatgcagagagaggatcaggaaaatccacccacaggaggcagcatttgggcctgacctttgagggtgagtgggctttgattatgcaaagagtacaggaaattccagatgggagcacagaattaagcaaaggcttgtggtcgagaaatgtgacccaaatccyagagacactgaagagaccagtttgactggcatgaagaggccgtataggaggtgaggaaaaaagctaatgaggaaggctgaggtcagattgatggggcttttgcattttaatttttaaaataagtaatacattaaatggttcaaattcagaagacacaaaaggatacagtgaaaagtcatcctgccatccctatcccctagctttcctatttccatttcttgtatatccttcca

SEQ ID NO: 807586 - DNA, 618 bp, Homo sapiens
tggcctcctctttttcatttatacaacttcagcaactgaataggaattaggaaccgtgagctctgatttctgcctactgcaagctggctgcagtacactggagagaatatttccctgcttggggcatcctgcttctgcttgaaaaataggaggtgagagggcacacaccaggcctgggcatgaaagtcagtgccactcagraagctttctgactgcacttgcctgtctctttcccctccacaggggagaagcccaggcctcaatttctgtacacatcagcattgcctgcaagtaacgtcttgttaaacacagagcacccagccatgccccggagtcttcggtaggtccagggtgggcctgggaatatgcattctgatgagtccccaggtaaagctgctgtggcccaggggccacatttcagaactgaggctccagatatctctaacaccattccgtggggcttgcacagatgatgtttctagcttactcagcatgattttgtggaggtggaggtagcagtccctggtggcctcttcgtggggtgctccttccagaatgtttcctctgcgtcatgtgaggaaggcgggatccagtggcgttgggcgctagaagcctctc

SEQ ID NO: 807587 - DNA, 604 bp, Homo sapiens
actgtagtaaagttttcgagttggcaaaaccaaagcacaagacaccagtgaaggccatgttcgccataagaccttatctgaaaagccattttgacgtccttgctcctggcagcaaagcctgccctaggcctggtgatctggcctccctgtctactctgagcatcttgccttctcctccactgaaaaccattctccagaaaataaaacacaacaaaatcaagataaaaggcatcagcatggccccacaccaggctttaacgggcaaatttgtatgagcaagggcaaaatgaagggcagcaaggaaaacactgaattaaaacccacttaaattaagaattcaatagcagccacttaactaataaatagtattcctctctgccattgattgactcaggattgtaatgaagagttccaggggcaacagcggaatgttttaattcatsggataaacgtcaccaactcttgggttcctaagattgaatgtgttggagaaaagcggaatggagagcccacaggaattaattcttggaacatccctgcagggtcagcattattataccctgcttctaggtggatttaatatctcgagtgctgggcagggcac

SEQ ID NO: 807588 - DNA, 588 bp, Homo sapiens
acctgtaatgaattttacagtgcagaactcaatatgaataaatgaatgaatgaataaacaaatgagtggcatggctcattgtcctggctttgttactaactcattgcgtgacctccttttcaataattttagaaatggctgctctgcttcatttcatgggggctggtwtgaaggatcaagtgagacgacaaaggaaatcgttgaaatggatagaggacagtacttaaaaaaactatacaaatgtaaggaaatgctattaatcattgtcctttcaggcaagacatgatcgttatggcaggcaggtgggaaaaagagaaggaagaaaggaagaaagggagagaaggagggagagaaaagaaggtaggaaggaaggaaaggagggagggagaaagaaagaaatgaagaagaaaaaagtgaaaaacagaatgaggtgggaaaggaaagagaagggaaagaaacagaacagaagagaagaaaagaatacaatgaaacacatcacatggacactccactcgaatcacactaccttctctgcatagtgcagaagggtgcaggtgacactgggaataatgaggaatctgataaaga

SEQ ID NO: 807589 - DNA, 570 bp, Homo sapiens
gacactccactcgaatcacactaccttctctgcatagtgcagaagggtgcaggtgacactgggaataatgaggaatctgataaagagggattgtgttaccctagaaggctgtaaattactggattgggttggacatactattcaatgatcagaacttacctttgatggttctactgaatttgtggcagctgaggggaactttttggctacacaaatgacatggaaccagccctgcctgcttttaagattattgtgtatgcctcttttatagctttagacgggaggcagtgtattgtttaatagaacactgctagccagaacatagggaaaatcaaatgctgcacccgggaataagtccattgttttcatcacagacacaaatatgacattacaaatagtcacacatatataaagattycttatgataagccttcaaaggacaaatgttaaaatattaaagaaggtcattgccatacttgagcacatgctgtgcactgagaactgtagcacgtctttggcaggtgtgtgcgagaggatttagtatatgaacagggacacagaagaacttca

SEQ ID NO: 807590 - DNA, 550 bp, Homo sapiens
catgggctcaggcatcaaattgcctgggtgtgaaattgactgtattatgtgctagctctgtgatcttgggcaggtcacttgccgtctttgtgctttagtttcttcatctgtaaagctgtgatgataacagtagtacacacctcttagggatattttgaagattaagtgggttgttagacataaarcacttagcacgttgtctggcattgtataagtactctgtaagtggtagatattgttattattattttcccctaaaagcagcagatatcttcttcagttaattatacctattgaattggtttttttagtttctacaagctttccaatattttctatccagaccatgcataggtaatgaacttgatgtcttaataaagcttgatattttgcagcaattattttaagctctctcatctattgtctgatttcattagttaatgattgtcatgacaaagtaataaaagaggtccttttaaaatacttctgatactgcagatgtcaaacatcaattactgccaaactttattccaagactagtagtattttt

SEQ ID NO: 807591 - DNA, 732 bp, Homo sapiens
atctgtaatttttttttttttcttgaggctgtatttggctttagcaggagaaaaggaaagcttctttgaaaaatagacaagaacaacttgatggaggaaaaagtaagaaaatttattttttttcctctcgcaaagttctccagtagcatttgctctgctctgattgatggcctaccttattgatgttccctgccgagaaatatgctgaagtccagatctcttacaagagtttcagttaaacccttgtttccttttagttcaaatgagttctcccactcttgtgtgtgattttgaattttcttggcaaagctaaagggggaaaaaaayccatcctgaacagatgagcatctattctgttcctatcgattggaaagaaggagattctgctgcatgctttcctcaggattaaagagttctaatgtgtgtcttgcaagtacgaagttgcaggaagcagcaagaatggtctatcagaagccaacctgaagcaggcattggagagtaattctcctaggcatggtcaaaacaacaattgacccatcagccaataaacatttacttgttctaggtgctagagaacaaaaggagtgaatgaagtggcatctttgcctttatgtgtttgccccttagtaaggggaaaagcagtaaacacatacaaaaatcaaagatgagatagtaatccttttaccacctattgtataataagttgtagttcactagacgctttcctatgca

SEQ ID NO: 807592 - DNA, 594 bp, Homo sapiens
ctaattcctgagcaagatttcaacctcatatccatgacctatcagcaatatgtagcaaagatgctttctcctttctccttgctatactttcttgatttggttctaggacactctcttcttctggttttccttctccttcactgattttccttcttaggtacccttttgtggattctactcctttgccccartcttttaaaaccgagggtcaaggattcagttttgggttctttcctctaccttacccactcccttggtgagccaatcttcccatggacttatatcatcaatatgtctggattttctttatatacatcttaagcctcagcccttctcctaaaatccaggctcatatatccactgaaaacatgatatatcaccttcgatgtctaatagatattccaagtacaatatatgcacacgcagcccctgcatgtttcaataaatctgctctacatcggctttctcaactttgttaatgtcaaattcttgctttcatttgctcaagccaaagtccttggaggtttcttttactaccctcactctcttatattttgtatccaacgaaactgttagaaaatcctgacaacattg

SEQ ID NO: 807593 - DNA, 620 bp, Homo sapiens
ttttacagatgatggaatcgcttaggcaacctgtcccgctagtaaatggtgttctatttgcctccagcacaccatggaaggagaaaacaaaaaggtggaatcaggtagggttcaaccagagaaacaaagccagtaagaggtaagtattaagagatttactacaaggaatgkgttccttgattaggaagctggctaggcaagaccaaaatccctagagcaggctgtcagtcaggaagagaactgttggactggaaactccaacaggagctgaagctgctgtctccaggactaattttttcttcggtggcaaatctcagttcttcccttacattctctcaagggaatgaatcagccccacccagattatctaggaaaatctcacttacacataaactgaacgtgggcttcaaccacatctgcacaacaccttcacggcggcaccccgacaactgctgtattgattgactggggacggctgccaagatgagctggcatgcagctgactatcacagcgtgttttcatgcaggggtgagttggggatgaggggttaaaaagaggcctcagtaaaaattagaaataaaggtagaaaagaatgttgacagaagaaagagaaactgtt

SEQ ID NO: 807594 - DNA, 615 bp, Homo sapiens
gcggctcactgcagcttccacctccccagggtctggtgatcctcacacctcagcctcctgagtagctgggactacagktatgtgccagtgtacctggataatttttgtattttatgtagagacatggttttgccatgttgcccaggttggacttgaacctctgggctcaagcggtctgtctacgttggcctcccaaagttctaggataacaggtgtgagccagcatgtctgacttgcatttattaataaatatttgtctctggtccagaaaacctgatgtgtgaattcagggtaaaattaataaaattaatattaaaaaactaacgcttatcaattttgtaaataaatatattgaatataatttaataaagtcagaatgacaaaactttcatggataaaataatatttggtcctctccccagatgttggatatctcccgatattttagtttttcagattagcctctctaaaaataatattgttcatgtctttagtctattctgacaaatttattcattgtgtttctttaattctttactttatgcctgaatgtacaaatcatccattttaataacttactcaatgcaattacaaatcaaggtattgatatttttt

SEQ ID NO: 807595 - DNA, 617 bp, Homo sapiens
aaggtcactcagaggacttgcaaaagctggggctgttcctagggctcgcggatcagctggagcattgctttagaattgcagcatttctccactcactccctcaccccttcgataccgatgtgttagcatccacactatgccaggtgcttttttaggtgtgaggacacaaagtgagtagaacttggaagttgacatttaaaaaaacctgggaggagtatgtcatgaacaccaagtatggacccagaatcatattatattattacktggtttttattgggtcatattattgacctttttatatcattcttattatactgctaagggatagtcactgaaaaaaaaatcaccatcccttagcatgaataggaagacaaggaaactataacttagagaggcctaaatatcttgccccagatcacaatagaattaaaatgcttctattccaatattaatattctaatatttaaaaatattattttttatattgagaagtgtttaaaaggtctctttgactccgaagtaactttattttccatttcatactaattgtctaataggggaaatagatacattcacaactataatttgtaaatgaatatgttgaaaaaaccgtcttt

SEQ ID NO: 807596 - DNA, 646 bp, Homo sapiens
gtgttgggattacaggcgtgagtcaccgcgcccgaccaattcctcttttaaacacaaagaagcagtcacttattttgccccttaaaattgtcaccaagtctccgtgcaacatatgcagactctaacaaagggcaatgcaaaagaagctcatccctggatcagttaaaaataaaagggctgcagtctgtgcttcctagagtgtgttctgcatccagcagcctgatcctaatgataaacaaataatattctactctggggggcgggtaaagctctggagagcagaaatatgtgcacggttcaagaggcttagtgcagtaggcaggagctgggaggcttggagtctgggtggtctgcaagtcacagattgtggatggagactgctctggttccccaaccccccttctcatggaaatccctctgttctgagtcwgcagctccccttccccttgctctgctccctttattctgctccacttccatgcccaattatggagcagaaaaactagaggggcaaaggaaggagggtgaaggaaatttggaaaaactcaagtagtcatacatatccttaagccagtcaagaagaggtgaggccgacggcacttgggtgggagtgtacgcaaagggaaacggctgtcgagaagtctgg

SEQ ID NO: 807597 - DNA, 576 bp, Homo sapiens
aataagagaaacaagcaaatgcacacatgcacgtgccaagagaaggatccagtggagaaggacaggtggaaggagagttggagacaatggatggaacaaggtccctggggaacagaaggaactgccccagagcagaggtggaggcattcgygttcaacaagaaaaaggagcccacctcctgagatggggaaaagggaatggatgagcaccagccggaaaatttagaggtggaggggagaagaggagggagttctgatcatgtttcttctttgtaaggacaaccataccagaaactgacgtgttaagaggcacaaaagatagagccctgtaagccttctaggagcatgcaggctgaagagagatcgacaaataaaaattcaataggaatatgcaggttgatcaaaagtaagctaattacagcttaacagaacttttactaatctctatcgacatctaggagccttccatgagaaagtgttcttcatgtttggagaagatggggccatcgtttggcaggaaatagggaggtcaaaccaagacaaaactatccaccgaatgtccctctgcaccagcatg

SEQ ID NO: 807598 - DNA, 576 bp, Homo sapiens
aataagagaaacaagcaaatgcacacatgcacgtgccaagagaaggatccagtggagaaggacaggtggaaggagagttggagacaatggatggaacaaggtccctggggaacagaaggaactgccccagagcagaggtggaggcattcgtgttcaacaagaaaaaggagcccacctcctgagatggggaaaagggaatggatgagcaccagccrgaaaatttagaggtggaggggagaagaggagggagttctgatcatgtttcttctttgtaaggacaaccataccagaaactgacgtgttaagaggcacaaaagatagagccctgtaagccttctaggagcatgcaggctgaagagagatcgacaaataaaaattcaataggaatatgcaggttgatcaaaagtaagctaattacagcttaacagaacttttactaatctctatcgacatctaggagccttccatgagaaagtgttcttcatgtttggagaagatggggccatcgtttggcaggaaatagggaggtcaaaccaagacaaaactatccaccgaatgtccctctgcaccagcatg

SEQ ID NO: 807599 - DNA, 582 bp, Homo sapiens
gatccacccaccttgaactcccaaaattccgggattataggcatgagccactgtgcccagccaagagatacattcttaagaaacagtggtttcccacctaacaggtttaatgaaaagcagtagaagaaataacagtggctacttggaatatgaagatttaatatttatggctgttaatattttatagattaraaaaaaatctgtgatcttatttttacccaattactggaaattgatctgaaaaaaactattttacaaagtcaggatattttttagtttgatttttcctttttgtaagtaactttgatgtaatatcaaacaaatgttctatgcagtgcaattcaaaactcacatcaattatttagctgaaacaaacaaaaagagacttagaagaaattggatgtatacagtaaatttcaagccatgctcccagatttcctaagagttaagtatttatctccctctgccattagggattccttaaaaaggaaaggtccagaaaccattctattaggataaaccatggtttatgtgaactcgttgagctaaagaaaatggaacaatgctatgaagaatatattg

SEQ ID NO: 807600 - DNA, 530 bp, Homo sapiens
ctgactcctatctgccatcttcccccctataaatctcctaagaactttaacccttttgccggcatgtcaagtttctgggttctcttcctctgagccgttagccctatcaccctggagtcctgcgaaggtgaaacagacaaagaagttgtccttccccaagagattggcaggcagtttaaggtttggggaaattaaacccttcccagtttgggggatgcatccgagggaagtgtcttgtggttatagaaacgtgattacccgtccaggaagagaggacagaggaagaaagaaggaaatagcgggcgctgtgtgtggggagaggccaggcagcgggagcaggtacttttgagcctgcggggaaacaggagcttccagggtccctgagagtgcagggmtgcctcagtcagcagccatggctgggcagctgcagctgcgtcagggagctggggctcccgccctgccaactgaaaacggggcggggcttccacctgtttctggttcccaccagttccacggagtgcgcagacctg

SEQ ID NO: 807601 - DNA, 594 bp, Homo sapiens
ttgagacagggtctcacgctgtcgcccaggctggagtgcagtggcatgatctcggctcactgcaacctctgactcccaggctcaagtgatcctcttgcctcggcctcccgagtagctgggattacaggcatgcaccaccacacctggctaattttttgcatttgtagtacagatgaggtttcaccatgttgcccaggctggtttattattttttaatcatctagcctaaaatgtcaaaaacttgtgactttttatgccaagtttgatgaagaagtatatagttgtggaagtattgcacaaagagtgtgtgagctaatggtgatacacttaggggaacctagcaaggcctgtttgttcagattcttctctgtgtccttgcatcttcaaagttaargctgttttttttttctccaggtacaaagacagcaactctcaaatgagaatcttatgacctatttcagggtgaaaggtgggagaaggtcagagtggggtgactatcctaggttttatgacctgcttctactgttttctcaaatgtggccaaggtgccatatttggagaatagtgtgtcctgaattccatcagtaaatactg

SEQ ID NO: 807602 - DNA, 610 bp, Homo sapiens
gtgctgtatttaggaaacccatctcacgtgcacagacacacacagactgaaaataaagggatggaggaagatctaccaagcaaatggaaaacaaaaaaaggcaggggttccaatcctagtctctgataaaacagactttaaaccaacaacgatcaaagagacaaagaaggccattacataacggtaaagggatcaattcaacaagaagaactaactatcgtaaatatatatgcactcaatacaggagcatccagattcataaagcaagtccttagagacctacaaagagacttagactcccacacaataataatargagactttaacaccccactgtcaacattagacagatcaatgagacagaaagtcaacaagatatccaggaattgaactcagctctgcaccaagcggacctaatagacatctacagaactctccaccccaagtcaacagaatatacattcttttcagcaccacaccacacttattccaaaattgaccacatagttggaagtaaagcactcctcagcaaatgtaaaagaacagaaattataacaaactgtctctcagaccacagtgcaatcaaactagaactcaggattaagaaact

SEQ ID NO: 807603 - DNA, 478 bp, Homo sapiens
atattacatatattcaaaccagatctcagaggttacagcaagaatgtaccaacagaaagtggagagaaacatatctcaggtgctgccttctacaaaggagaatgagttccaagtttgacaatgaagttaactcctcattaaaacagaaaacacttttttgaaataatgagaaaatagaaaatccagatcctctgcaaaawaccattcacagataccattatctcatcaagattattagacatgtgaaaaacagaaaaatgtgatgtatacttaagaaaacaaatagctaacattacaatattaaagcagatataataaatatgcttatgaacttaaggaaaatataaacataatgagtgaactggtatggaattacaacatagaaattgaaagtacaaaaagaaccaaatggaaaatctagaactgaaaggaacaacaactgaaaaataaatcactgaattgggattaacagaaaaca

SEQ ID NO: 807604 - DNA, 458 bp, Homo sapiens
cgaaagcttgctctgtgaaaatccccacataaccattgaagtttgcaacaccctaaaccccgccaccttgctcctggtatcagagagcccagttaaacataactgtgtagaagtattagactcagtttattctagtaggcccaacctccgagaccatccttaaacatcagtagactgggagctgtacatggaaggaagcagcttcgccaacccctgcaaagtgactctgaaaaagacaagccttgctccagtcacacccggaagctgactggtccawacatggccaaagcatgagaaaactcatcgcgggactcattttccttaaaatttgggcttgtacagtaagaacttcaactgaccttcctcagactgagggctgttcccagtgtatacatcaagtcactgaggtaggacaaaacgttgctacggtcctattattttacagttattataaggat

SEQ ID NO: 807605 - DNA, 590 bp, Homo sapiens
atttgcaaagtttttcaagtgtctgagcattattaattcataagcctatctttccccagtgagtggcaaaacaggctttttatatatcaactttgcatatgacaatgaaaatattcctgtgttctttactattttatttgtctattttctattttcaatccaattatttccacattatgagtaaatgttctagttactataaatttagaaaattattgataccaaacagaatatatacttccaytctgttcttcatttccttcagaagtggtttggccctttgtggcttattgctatcataaaattttaaagcatcaagttcatttaaacaaagaaactattgggttattaatgggattttattaacactaaaaatcttaaatttacagaaaaaagtctataatattgagaggtttttattgaagtccaaattatatttttcccctaatttaatcttcatatccttcaatatttatttctcaactttacagtgagatcttacacttctttgattaattatatttctacaaattcaacattttgttattatgtaaattgtaacattttacaaattacattttgcattctgt

SEQ ID NO: 807606 - DNA, 590 bp, Homo sapiens
atttgcaaagtttttcaagtgtctgagcattattaattcataagcctatctttccccagtgagtggcaaaacaggctttttatatatcaactttgcatatgacaatgaaaatattcctgtgttctttactattttatttgtctattttctattttcaatccaattatttccacattatgagtaaatgttctagttactataaatttagaaaattattgataccaaacagaatatatacttccactctgttcttcatttccttcagaagtggtttggccctktgtggcttattgctatcataaaattttaaagcatcaagttcatttaaacaaagaaactattgggttattaatgggattttattaacactaaaaatcttaaatttacagaaaaaagtctataatattgagaggtttttattgaagtccaaattatatttttcccctaatttaatcttcatatccttcaatatttatttctcaactttacagtgagatcttacacttctttgattaattatatttctacaaattcaacattttgttattatgtaaattgtaacattttacaaattacattttgcattctgt

SEQ ID NO: 807607 - DNA, 557 bp, Homo sapiens
aattgtaacattttacaaattacattttgcattctgtaactactgtacaaaattgccatggattttatatatctgttttatatctggtcatcttggaaaatatttctattaattgtaacaattagcaggttctttggagtttttcttattctagataattttttctgcaaatattggtggttttgtttcttgytttataatctttaaattttaattatgttgcattttttcccttggttcaacacaatggcaagaatttctgatatattgaatcagaaacagagttcatgagcatttcaatcttctcccttaccttacgaactgctttgccgtaggtttttggtacataatctccataagattaaggaactcctttctatttgctactagttaagatatcttaatggatattttctattatcaaatgcttttctctacatttatgtagataatcacatttttagttttctcttttaatcaggtaatatgatggatttcatcattagatttcctaatgttaaacccaccttacttgcacagtaatctcagtttgctca

SEQ ID NO: 807608 - DNA, 731 bp, Homo sapiens
taaatctgcattatggggatccttagaggaatactgattctaggactatagcagtaaatatgcaagacggacatggagcattttttttttttttggcaaaaagtttgaaagttcaaacacacataaacacacacacaataacggagaagtcaaataaacctaaagtatagaataagtattaatgtattcatattcacagaaataaatgattaagtaaataaatggaggagtccagtcttctatgaagaattccaaataacttaggaagacattctatcttccaggaggtgaagcatcactcccaactctttgagtgtggactacatatagtgactttcttttaaagtaggaaaactaggaaaaaaattaactttagagtgaaaaaaattgacaaacaccacctctaccaggtattaaggtcaacatcaacagtaataacacatgttgatagtatgtaccatcgatatgacatgatgaaaatggaactatacctctgtgatctttttcctaaaacccaaaactccactccaatcatgagacayacagcagaaaaatctcaactgaagattcaaatgatgatgaacttctggttcatcaagtcacatttcatttttatctatcaagtacttttttctccaatagttttttcttacataacagtagcagagatgctcaaccagtgattatatttaacctcttcaaaatgaccttctctgaatgattagaagcca

SEQ ID NO: 807609 - DNA, 628 bp, Homo sapiens
cataagtcggtctttcagtttttaaaatgctacttctacatctgttgatatgtggtttttcacattcgatctcttaataggatgtattacactgattgacttaagaatattgaactagtctttcattcctaaaatcaacagcatttcatcattacacattatccttcttacacattattttattttctagtattttgtaaggagtattttctctcttttcacaaggaatattggtctgtatcttataatgtctttatctggttttggtattagggtaatgaatgagttagggattaaccactcaccttttattttcttgaagagattgtgatggtgaagctatctgtgactgtagtttttttttttttttgccagatgattagtttttctttcaattttaaaaatagatataggactattcaggttatctatatttctctgtgtaaattccagtgytttatgtctttaaagaatttggtattttttattctaagttacaaaacttgttgctttaaagttgttaatattatttatttttctgttactgttcatgaaatcatataaatgccttctccttcatttgtgttattgatattttgagtcttctctatttcttaattaatctaac

SEQ ID NO: 807610 - DNA, 539 bp, Homo sapiens
taattctctctctctctctctctttttttagatggagtctcactctgttgccaggctagagtgcagtggcgtgatctcagctctctgcaacctctgcctccagggttcaagtgattctcctgcctcagcctccctagtagcaggtactacaggtacatgccaccacgccaagctaatttttgtatttttagtacagacggggtttcaccatgttggccacgatggtctcgatctcttgaccttctgatccacccacctcggcctcccaaagtgctgagataggatatattgtrattctcttttcagcatgagcaaattcagttcatacaacatcaaggtgagaatagaggaaggccttcatggaaaaaaggtgttcaaataaactattttctttcatctgaaggtctacagagtaagtttggatcaagtatacttgttggaaaccaaaggatgttttcctccctacccattttttccacaaaccaaactagattctcacttccacatcttggttccagtggctcccttcctggcctact

SEQ ID NO: 807611 - DNA, 647 bp, Homo sapiens
gaaaacaccaagggcacatatttctataaacacttttataaaacacttgggtatattaccagtagaatataggataagcctctctgatttttctgatttcactgatttctctgacagggcaaaggccatatggccatgtttgcatctttgttcagataagtgattagatatctctgtacaaaatagagctttagaatggaaaaagttttcaaataatakgctgacaacttagttaaaagaaaaacaagtgaaacaaatatcactagatgttatttgttccaaaagtcaaaaggctaaccacagccatgccaaacatctgcaaatattttcagctttttaatccctaatctttctctgatttgaggtatgagtggagagtactactggtactctcgtgattcttacagtcacttgatcaaagcttgtttcttgcctggcttccaacctttgacccatttggcctgtctcctgtctaggaggggctttgggctttggtaggataatgttttacatctcatgatcctgtgtaatttgtaaactgcttttacataagttatttcattcgattgttgcaaaaacactgggaagcatggatctgtatttccttttcattgataagggaaccaaagccctgagaagtcacatga

SEQ ID NO: 807612 - DNA, 603 bp, Homo sapiens
aacacaccaaggctcagagaaattaggtaactttctcggtgtcacagaayaccaaaatgctcagccaagctttacgtttatatttgattccaaaacccattctctgtcctcatcctactacattttgctagtgaatgtcactattcctcttagcctagaacctaacagaggaagctagatttacccagttgcctctgcagagtgacatgatgtgtgttccaacaggtggtttagataaggctggcttttcctggtgctttgagaaaaataagagtattgagaattagtaactctgccctaaaaggagatcaaagggaactgatgcttaaatggtttgacagtgttatgccccaccctggaaggtggatttgggactttatcccttaaacaaaaagaatagttggagccttattagggaactgagcaaaactaaccaatataagggcttggacactgctcaggccaacaagttgccaagttggatggaaaagcagctcatagctaggagaggccaaggccaagttgtatggaaaaagccaagtcaagaggtagaaaggctgaggtttctagcctgggctgtgcatccatagagtgtgggatcct

SEQ ID NO: 807613 - DNA, 608 bp, Homo sapiens
ctcagagaaattaggtaactttctcggtgtcacagaataccaaaatgctcagccaagctttacgtttatatttgattccaaaacccattctctgtcctcatcctactacattttgctagtgaatgtcactattcctcttagcctagaacctaacagaggaagctagatttacccagttgcctctgcagagtgacatgatgtgtgttccaacaggtggtttagataaggctggcttttcctggtgctttgagaaaaataagagtattgagaattagtaactctgccctaaaaggagatcaaagggaactgatgcttaaatggtttgacagtgttatgccccaccctggaaggtggatttgggactttatcccttaaacaaaaagaatagttggagccttattagggaactgagcaaaactaaccaatataagggcttggacactgctcaggccaacaagttgccaagttgkatggaaaagcagctcatagctaggagaggccaaggccaagttgtatggaaaaagccaagtcaagaggtagaaaggctgaggtttctagcctgggctgtgcatccatagagtgtgggatcctggtaaatctcttaactc

SEQ ID NO: 807614 - DNA, 611 bp, Homo sapiens
tcccagcactttgggaggccaagatggatggatcattaaggagactgagaccatcctggccaacatggtgaaaccccatctctactaaaaatacaaaaattagctgggcatggtggcgcgtgcctgtaatctcagctactygggaggctgaggtcggagaattgcttaaaacagggagtcggaggcgtgctgccagtgaccagttctgatgtgtctcgctttccttggcaaggggtatggcagacccaagccatttgaagcctgggaagagggttaccattatctgctctttggctggcatcgctattttctactcttaggttttatacatttcagatccactttggcgagtctgatcatgaggtcaaccaaggcaaggaccaactctatgattatcccatgtttataaatgacaaaactgagagttgagttggaggataaaggatcttcttcaaggttgcagaactgggaagtggaaaagccgggatgataaacacagaaattctttccacttattcatgctgcttgataccctgtttgaaggccaggaagaatggtatttggagacgagaataggatttgaagtcagcggaatcctgttctgaatcttg

SEQ ID NO: 807615 - DNA, 611 bp, Homo sapiens
tcccagcactttgggaggccaagatggatggatcattaaggagactgagaccatcctggccaacatggtgaaaccccatctctactaaaaatacaaaaattagctgggcatggtggcgcgtgcctgtaatctcagctactcgggaggctgaggtcggagaattgcttaaaacagggagtcggaggcgtgctgccagtgaccagttctgatgtgtctcgctttccttggcaaggggtatggcagacccaagccatttgaagcctgggaagagggttaccattatctgctctttggctggcatcgctattttctactcttaggttttrtacatttcagatccactttggcgagtctgatcatgaggtcaaccaaggcaaggaccaactctatgattatcccatgtttataaatgacaaaactgagagttgagttggaggataaaggatcttcttcaaggttgcagaactgggaagtggaaaagccgggatgataaacacagaaattctttccacttattcatgctgcttgataccctgtttgaaggccaggaagaatggtatttggagacgagaataggatttgaagtcagcggaatcctgttctgaatcttg

SEQ ID NO: 807616 - DNA, 714 bp, Homo sapiens
ctgtctgtgcatgattttttccctctctatctcaggaaagtaaaaaatattacttaggtataaagttagagcagtaagaatctggagattgtagggatgggcagaagagagaaagatctcttctcaccttttattccctctatggcaaagtcttgtgatgctgtcaattccaccgttgtcaktattgaatctctttcatgttgatagtaatcatattaatgattatcatacccactttataggtaagaaaactgaggttcagggattttgaatgattagttcagagttgcacagctgggactcaaagtgctattttaaccctaaatttaggactctctaccacaaacacctaattttacaagttctgcccctgtccatttggatttcccagcatcccttgaaagaactggatattaaaagcatgaatcagagaaggccaaggagagatgtggtttctgtcttcaagtagatggtcatatgagaaaggaattaaggctgttctgtgtggtttgtagataatggaatgagatcaattggtagaagtttaagggaatagatcaaagaattttctaaccatcaacactaaccaactttaaaacagacaataatattaggtggtgagtgtcttgtcctaaaaatgttccaatagcatctggctgaccctctgactgggactctgtgactgggatccccgtactggggagtatggaatac

SEQ ID NO: 807617 - DNA, 553 bp, Homo sapiens
ccatatatgagcattgctcaaattagctgatatgttagagactcagggaggtgagccctaatagccctaaggcttacttttgtcctgttctctgaattgaatactggaatggaatactggagtcctgaaattggaatgtgacaataaattagaatattagtgtgttcaagtccttagctcttttatctattatgatctgtgtttattttatttattttactttcagttctgggatccatgtgctgaacatgcaggtttgttacataagtatacatgtgccatggtgatctgctgtacctatcaatccgtcatccaggttttaagccctgcatgcattaggtatttgtcctaatccctcccctttccccctatcccccgtcagkccccagtatgtgatgctcccctccctgtgtccacatgttctcattgtttacctcccactatgagtgagaacatgtggtgtttggtttcctgttcatgtgttagtttgctgaggatgatggtttccagctttatccatgtccctgcaaaggacatgaactcattctttttc

SEQ ID NO: 807618 - DNA, 647 bp, Homo sapiens
cacggagcttggtagttgcttattgaaagtcttttaaataaatgactgagtaagatataacttcctctgtgcaaccttccagactgtgctgtgtggagttcgtaaccaactcctgtctttgtgctcatctggcactcatatccaactatggctttycccatctgtaaaatggggctaaccacatgtcacagtgttgaatagaaagtgaactttgatgatggacacgctcattgcaatggctgtcattcagagagtgctcaaaaaagtgcttgttttctttacaatcacacttagttcttttaagcatgagcactctaaaggaaacaggcctcacctctctcatttcattagccctcaaaaagccttgcacataataagtgagcccccaagagtgctccatgtctgaatgatggaactgagacattagttgacactctccctggctgtcttttctaagactaaatccttaattgcctcatcttcctgtgaagcatcttttctgatcacataactcttggcactccctggctaattcatttttatcagctggattgctctacagttaaattccagtgcactgcagcctctggagttctcctcagcactggaaggcagtttggctcatttgaacaaattgcttaagatgt

SEQ ID NO: 807619 - DNA, 583 bp, Homo sapiens
aattatcatgctcacttcttcatctcctttaggtttctgctcaaatgttgctttatgagagaggctttctctggccatttagatataatggtatccttcttccctcccatgagcctttaaatcccttactctgctttctctttttccaaagtacttagaattaaygtattataaatgtattattatttttgtttattgcagtctactgaagactgtaaactccaagagggaagagatcctgttctgtttgcagctgtatttccagtgtctagaaaaagacacattactacatgatggacatacaataaccactcaaataatatttattgaatgaatgaataactctctagctggacaatgagcaagccgttcttgggttagatacttgctctgatccagccagtggctacctcttgtaaaaaatagctgactttgttccctgaactgggtcagtccctggcaggactgttagccaggaggggcctctgggcatagtaagtccacattcattgaattacatgtaaaataaaccacatcttttatttccttggcatggactatcactgtttttgtgttctttgta

SEQ ID NO: 807620 - DNA, 583 bp, Homo sapiens
aattatcatgctcacttcttcatctcctttaggtttctgctcaaatgttgctttatgagagaggctttctctggccatttagatataatggtatccttcttccctcccatgagcctttaaatcccttactctgctttctctttttccaaagtacttagaattaatgtattataaatgtattattatttttgtttattgcagtctactgaagactgtaaactccaagagggaagagatcctgttctgtttgcagctgtatttccagtgtctagaaaaagacacattactacatgatggacatacaataaccactcaaataatatttattgaatgaatgaatractctctagctggacaatgagcaagccgttcttgggttagatacttgctctgatccagccagtggctacctcttgtaaaaaatagctgactttgttccctgaactgggtcagtccctggcaggactgttagccaggaggggcctctgggcatagtaagtccacattcattgaattacatgtaaaataaaccacatcttttatttccttggcatggactatcactgtttttgtgttctttgta

SEQ ID NO: 807621 - DNA, 567 bp, Homo sapiens
gtagctcttcactcaggcaaacttcatgaacaaagcctaggagttccatgaaggcaggagcccttgtgcccagtgttgtccacactgactttctcgatacactcctttggtcatatctcttccatatcctttccaaaatcttcagtgattgctcattgcccagagactaaaagtctaaggtctttagagtaggmacttaaggcttttcagatcttcctggctcttgctctttcgactcaacacaggaataaaccttggcttgttccctgaacatgcctggcatgcattctctcctccatgaggttcttgctcaagcatcattccttaggcagtctgccttagtttcccttatcttagaacagatgactgtcctacgggccccttgcagcctgacattcctgcacactcacacatgattttgaaatatactgtttatgtgcattatcctaaataataagcctcttggggacaagcattatttctaatttacttttgtatcctagtaattagcagagtgtctagcccaaattacagaagtatgaatagaatcactccatcattttttac

SEQ ID NO: 807622 - DNA, 608 bp, Homo sapiens
tttgtggaggagacactgaaagtcattgtaaggccattggctgaattttagttggatttagttgggaccccttagagagtcttgggcagaggaatgacataatctgacttaggctttaaaaagatcgctctggctgctgggtcaagaacagattgtgagggatggaggttcaggagactggctggggggctacatcagccacctaggtgaaatacgaagtagggcttgaaccagggcagaagcaggggaatggtgccatattttgaacatgaggctgatgggtttggctcatgaagcagatgtacggagtgagggaaagaaagaggaggcaaggacgactccagtgcttttggtctgagtaatggaagactggagttattattcattgagttgaggaagggtggggctgggagcagatttggaatactatccactgtaggaagggagactgtcactgggcttgtccccarcctctcccaactccccattcctgcctttgggaaaccccagtcctgcccaggccccggtcttgctcccatagcaccagcttctaacctctgcctccttcagcatccttttatgtgctgctcgtaccctaggatgtcctc

SEQ ID NO: 807623 - DNA, 631 bp, Homo sapiens
aaagggatatactggttcatagaacatcttatatttgagaggttctgaagaaagaccactgataggaactgtgggatggagtggccgaatgcccttgaggctttgaagagaggaaaggcaggaccagggcagccaatctccaatttaaagcaaaggagagtcagcatgcctccttggtggccttaaagagactcccatatgcagcaggagggcagaacaagctgaagaccagacccaggacttaactgttagagaagaagaattctggagcaggctgaatctcagaccagatgagtctcatatgccaaagtcagggtctaataggaaaagactgagacccaccatctgggatgggaamagagagagaaatgtgttggaaggctttgagtctccagattccccaaaacttctggtcctgccaaaatggcctttccccgtttctggaagacagaaacccctccttgcttgaagaacaggcagatgcttcaaatgaagcaggtattctacaagaagttcttgacttcctcagcagctttcccatccacagatgccccatttgtcccttcttatcacttagaccaataagagaatcaaagctcagcatatccccctaggcaagcattggttctgc

SEQ ID NO: 807624 - DNA, 676 bp, Homo sapiens
aaagtccagggcccagtcattggggggatccccacactttcatgagttttgcctttaggagctctactagctcctcacaatgaaaagagaaggggaaagtagccatttttaaatatgtccagagcattctgttctccttaacaagagcccaccctcaagggaaactattttgccagggccaagccagcctgggagaagggraatacccaactccagaccctcccctctagccttcctgtctttcctaaggtcaatgaggggggaagctgagaatcacacagaaaggtcacagcccagagggaaaggctcactaaacactgagaactaatcttgcaaatatagaacacttcccctcccacgcacttatcaccacaatataggcttcccatattgtgttaaattattatataattatgtaatccctggttatataataacgggattacagcagaaataactgtaaacctcagactctatttaagaaggagcctctagggacactcaaagacaacaagaaagacaaagacaaggatgccagaggaaaccttaacctctgacatgctacaaaaccataaacacagcctcccagccaggtaaacatacagcctcacactaatggcctatttaccgcagctccttttcctgataaatcatgtcctgctttccccaaaataat

SEQ ID NO: 807625 - DNA, 541 bp, Homo sapiens
gccgttgccaagagcccctgcatttcaggctctgggtgcactcctatgagttaccctgcttcaaggagcagaaccattgaataaaagattgctgtctaacaccattggctgacccttgaattcttttcttgggaaagcactaatttgggagctcacctccaggcaggaggatggggtctggagccaggaaacctaaggccgatttacactgacttcctagaactaaatcaaaaggaaaaccccaactttccgtgcccaagtaacaaaaagaccagaggctacsccctttgcaaccctctccttttctgcatggcagatgaaaaactgaaagtatctctgattgctcccctcccacaatcaggctggttgtgggccaggtcttcatttgcatagagatataactttataacttcacttcagcctctgattggtcactttccgcaaccaatcagactgatcatgagccactacttcatttacatagggtatataccaagtaaccaatgggaaacccctagagggtatttaaaccccagaaaat

SEQ ID NO: 807626 - DNA, 610 bp, Homo sapiens
cagtctcctcacaagctctataactgtccccacccccatcctctgtatgaggctacttttccatctggctctcatatgttcgttgagtttgttgtccatgacaagaatccgatgtgagcaattacctttttttcaactcttcaggtggtcactcaagaagtagtgtgggaaagaccacaggagactgattcagcctcacgcacattcctyatttctgtgcaggcttctgttctaattcctgcccacttaaactaggttgatggatggggtggggaagtatgtgttttatccaaacctttcttgaaatcctgtcctgcccacaaacccctaaaagggatccttttttattataaagcgaattgaattagaagtaggcatctacccaaggccagcaaacccatggacttagcaggggataatcagatactctcagaaatttgagcggagacacggagatgtagtcagtgtagggtcttaagttgaaaagccaaatagaccaggggctagggtgctttgagggcccgtgagaatataagacccatggtggagagatgaaataaggtaatcaatttatagaaagtagacattcgagaccaactggaggaaggga

SEQ ID NO: 807627 - DNA, 466 bp, Homo sapiens
catatgttcgttgagtttgttgtccatgacaagaatccgatgtgagcaattacctttttttcaactcttcaggtggtcactcaagaagtagtgtgggaaagaccacaggagactgattcagcctcacgcacattcctcatttytgtgcaggcttctgttctaattcctgcccacttaaactaggttgatggatggggtggggaagtatgtgttttatccaaacctttcttgaaatcctgtcctgcccacaaacccctaaaagggatccttttttattataaagcgaattgaattagaagtaggcatctacccaaggccagcaaacccatggacttagcaggggataatcagatactctcagaaatttgagcggagacacggagatgtagtcagtgtagggtcttaagttgaaaagccaaatagaccaggggctagggtgctttgagggcccgtgagaatataagac

SEQ ID NO: 807628 - DNA, 553 bp, Homo sapiens
tttggctatggagtgggatccttcctcaggagaatctggcctgtccttcattcaaggggttcttgttttgtacactggttcaagtctgggaattgacaaaggggttgtgactctctgtttttatgattcaagttagacttctgtctacttggcctagaagtcttccacttatacaaatcaaatgcaagttcagcagactagggacatcrtgaacaaccagacaatgtcacagtctctgtgagccagactgtttttatcactgctttgactctgctctgtattccactaaccacactcaccttgcctttggtgattatgtcaccacttggccctgccatcccaggatccaattatcttcatttcatttaggtttcccaattcagtggcaggagctctctctgcaatttatgacctgcagagaagagtgactacagagctcttcaaaaatcctggggctcctcttgcaaatttatttctcacagtgtggtgacaggtttgtcctctggacccagcgctggctgagcaggtcttacatgatgagcccatattaaca

SEQ ID NO: 807629 - DNA, 553 bp, Homo sapiens
tttggctatggagtgggatccttcctcaggagaatctggcctgtccttcattcaaggggttcttgttttgtacactggttcaagtctgggaattgacaaaggggttgtgactctctgtttttatgattcaagttagacttctgtctacttggcctagaagtcttccacttatacaaatcaaatgcaagttcagcagactagggacatcgtgaacaaccagmcaatgtcacagtctctgtgagccagactgtttttatcactgctttgactctgctctgtattccactaaccacactcaccttgcctttggtgattatgtcaccacttggccctgccatcccaggatccaattatcttcatttcatttaggtttcccaattcagtggcaggagctctctctgcaatttatgacctgcagagaagagtgactacagagctcttcaaaaatcctggggctcctcttgcaaatttatttctcacagtgtggtgacaggtttgtcctctggacccagcgctggctgagcaggtcttacatgatgagcccatattaaca

SEQ ID NO: 807630 - DNA, 634 bp, Homo sapiens
gggagaatggggagttattgtttaatggtagaattttagttttgtgaaatgaaaaaagtcctggaaacggatgatggcagttgttgcacaccaatgtgaatgtccttcataaggctgagctgtacattcagagatggttaatatggggaattgtatgttactttattttaccagagttaaaaataataaaaagaagtctatataaatatatattcacttctcttaacttcttttmtaagattacataaagcagttattataacattgtattattggatttacaacataatatagctttaatacatatgataattgtacaaaggaagctgaggggatgaaggtgtactggaacagggtttccataatttaccagaattaagttattttgatgtagactgtaattactttgatgtagtctgtaattaattaagatgtatattgtaatcccttagcctgacactaccaaaagtacaaatatacagtttaaaaaatcaagaggaattaaatattacactaaaagtacctgtttgatacaaaagaatataataaataaagaacgaggaacaaaaaactcatgagacatatagaaaacacatagtaaaacagcaaatgtaaatttaaccatgtcaataat

SEQ ID NO: 807631 - DNA, 605 bp, Homo sapiens
gttgtgtagttctccccctgtttacttttactagttatatagtttcagatattatgtttctttaatccgttttgagttgattttttgtatatcatgtgagtgttttaaaaagacagcatggctggatagaacattcttattgccagtgcttttctttcagcactttgaaaatatcatccgactcctttctgtcctgcaagatttctactgagaaatctgctgacagcccatggaaattcctgtatattttatgaattcccttgtatatgataagtcagttttcccctgctgcttgcaaaattcttttgcaagaatttttgacaatttgattagaatgtatctcattgtgtatttctttggkttcattctatttgggatctgttgggcttcctgcatctgaatgtccattttcttcagaggagttgagaattttttgaccatcatttatttgaattagctgtatagctctttctttttctattctccttctatgactttcctaacccagtgcatatactggtccacttaatgaaccagtgcatatactggtccacttaatggaccagtgcatatactggtccacttaatggtatcccataagtccc

SEQ ID NO: 807632 - DNA, 624 bp, Homo sapiens
tctttctctattaagcgaatttagtactgtactgtacacgtttcctgcttttagtgcttgccaagaatggcatttgagcacctagtgatctttttaaccactgatttttggctgtgtctcaggttcacaaggtgaaaatagctacaccattttccaatgtacagtgcctatttatttacctagtaatatagtgcccctttggggtagttggcttattgattagttactgccttagacaactgtaaaatgattaccaccaccaagctaacatatycatcacctcacatagttatttttttgtagtaagaacatttaaaatttacttctagagcaattttcgagtgtacaatacattactattaaccatacgattactattaaccattccatgccatacaatagatccccagaatttattcatcctgtctaactgaaactttgtactctttgatcgatatctgtccatctgctacctgcttcagtccctggtgactaccattctactcttgctcctgcgagttcaaaaattttacactctacatataagtgagatcatacagtatttgtctttctgcgcccagattatttcacttagcataatatcctccagcttcatccatgttg

SEQ ID NO: 807633 - DNA, 497 bp, Homo sapiens
ctagagttgatagatgttaggaggtaaaagagagtggaaggcgagaggaagagagaatcactaatatctccagttccaaaatagggagccgaaagaaattgtctgtttgagtaataaatggagatttaagtctgaggttgtagaggcaatcagtgggaggaactgagaacagcgatgcaactgtattgtgagggaaagggtagaggcggtgggaggtggtacaagtgagctatcatttatctcttacagcaggaagttacaaataatyggtagagatgatacagcatgaaatagtggtttaagcatactatgtagggcttcataggtaactaccagagactcatttaaaagaagctccctctagggagcgggagcacagatggcgatgggtgaaccaaatacatgatgtttttccattataagcttgcggtgataaataatttatgtatgtatatataaattttgtatccggaggaaatttctgaacgatttttgct

SEQ ID NO: 807634 - DNA, 559 bp, Homo sapiens
tccctaatctaaaaatctgaaattcacaatgctccaaaatctaaaaccttttgaacactggcatgagatagtaacacctttgctttctgatgtttcaatgtacacaaactttgtttcatgcacaaaattatttaaaatcttgtataaaactactttcagtctacatgtataaggtatatatgaaacatgagtgaattttgtgatttgggttccatccccaggatttyttattatatatatgcaaatattccaaaatctaaaaaaatccaaaacatgaaacactactgaaatgcattttggataagggatactcaacctctatacatatatattttcctcctctgataggatttaggagaagaggtaatattgataggatttaggaggagggagggagtgaaaagaggaaaaccacatcttgactgattcctcataaggctggtcttctcctgagactgttatactagtcagggttctccagagaaaagaaccaataggatgtgtacatacagagaaagagatttattttaaagaattggctaatatgattatggaggct

SEQ ID NO: 807635 - DNA, 592 bp, Homo sapiens
ttgactgattcctcataaggctggtcttctcctgagactgttatactagtcagggttctccagagaaaagaaccaataggatgtgtacatacagagaaagagatttattttaaagaattggctaatatgattatggaggctggcaacttcaaaatcttcggagctgatgtcccagttggagtctgaaggctggtaggtggcaggaagatgttccagtttgaaggccatcaggcaggaaaatgctcttaggaagagggtcagttgttctactcagaccttcaactgattgcataaaccccacccacattatrtagggcaatctgctttacccagtccaccgacttaaatgttaatctcatccaaaacctccctcacagaaatacccagaatcacgtttgaccaaatctctaagccccctgtggcccagggaagtgtgtcagcattaaattaactgtcacactatggtaggttgaaaaatggcttcccaaggagatccacctccttatctctggaacctcttaactaacagagtgtggggggtgggggggaatgccttttgcagatgtgattgagctaaatattttgagatgag

SEQ ID NO: 807636 - DNA, 626 bp, Homo sapiens
ggcaaaaatatctttcaaagataaaggcaaaaaaaaataacttaccaaacaaatctgaaagaagtgccgccagtagacctgaactacaagaaatattacagtaagtacttttgacataaggaaaattataccagatgaaaatttgagtctacccaagggaatagagactgcttgaaatgataaatatgtgggtacatgtagaatacattttttctcaagtttaaatttatatgaaagataaccacttaaaaataaaatatggggtttataatatgtttagatataaaatgtaggcatacaatagcacaaagaatacaagtagaaaatgaaaatatattcttctctgatttttatactatatgtgaagtgacaatattrtatgaagttggactgtgataacttaaagatgtatattgtaaatattagactaaccactaaaagaaatacatcagacaaagtaaacttcagaagaaggaatattacatgagattaaaaggaacattttataatgataaagaggtcacttcatcagtgagtcacaataatctcgaacatgtatgtatctaataacaaagcttcagaacagatgaagttaaagtcttcagactgtaaaagagaaataagct

SEQ ID NO: 807637 - DNA, 632 bp, Homo sapiens
taggagacaattctggcatttatgcatgtcttctgagtgaggggcattgacagctttgttcagcaaggtttgcaaagctgctccatggcagggatcagatttgtttacattctagcataataaagttagtcttctcttctctttccagagatattccagggttgtaaagataacactcaatctgaatcaaaggacaaatttgtttcctgaccaagatgatcaagataatatctgtctccacaggggaggatggacaggtttgccagcagcccctgtataatattagggatcctagcctcagtgttcctatgtgtcatagatccacaatgtgtgcagtattaacctgggcccacctccacatcaccccatatgtcttgaggatcaaagagaatcagtaagaacacaaagctcaagttgcctactgtgttgtaataaactgtctaaatctgtttgggatcatgtctcctcactggccaagactatggcagaagagcragctggactagtaccagaagtagtcactgttgcctaggagctgcttgactgcttgatatatgaaactctagagaaaaccaatctaatctatagtgattcatagtagattgatggttgcttgggactaggtgtgggga

SEQ ID NO: 807638 - DNA, 625 bp, Homo sapiens
tacatatctttcagaagaaaattttaaaacaaaaaggaagcagggagggtaccttaatgcaagacaacatgagcaaggggaaataggtttctatagttcatattattaaggaatattagagctgcatccctggaaatcaccttgcccaacactctgtattacaaacgaagaacttgagccccagagarctgatgcagcttgttaaaactcatacagcctcacaatttttggcacgtcctggcaaaagataattctcctgaatatgtatccaaattacttttcccaaaacactacattatatatatgtaaagagtgatttccacctgcctagaatactttgcatcttgagaccatgaatcttgtttctcactctgcagcacttacatacagtaggaaagcaataaaattgtactaaattgcattcaaaaatgcccaataaattggtctatgctgagcaactgatatttgcttattctcagatgaggttagtgcacttcatttgaagtatgtatggcccaggattctctggataatctggaaccaagaaattacctggagctaagaaagtcctttacctcaccaatggcaaggatggaaaaggaaaacaattcaaaatcactgccac

SEQ ID NO: 807639 - DNA, 551 bp, Homo sapiens
agaattccacactcagggaaagcatatttcaagataaaagtaaataattcaagataaaagtaaataaagttatttttaaataaacaaaagctgagtttgtcatcagcacattttcttcaaaggaaattctaacacgtgttcttcatgcagaaggaaaattgcagatagatgttctaaggtacaagaaaaaattcaggggccaggcgcggtggctcatgcctataatcacagcactggagaggtcgaggcaggcggatcacraggtcaagagattgagaccatcctgaccaacatggtgaaaccccatctctaccaaaaatacaaaaattagctgggtgtggtggcacgcacctgtagtcccagctactcaggaggctgaggcaggagaatggcttgaacctgggaggcggaggttgcagtaagccatcacaccactgcactctagcctggcaacacagcgagacttcgtctcaaaaaaaaaaaaaaggaaaaacatcaggaaagtagtaaatatgtggtaaatgtaacttaaattggaataatactaactt

SEQ ID NO: 807640 - DNA, 546 bp, Homo sapiens
tcatagatggtggttcacccggatcctagaagtaaactcttggatcaactggtaagaatttttatattgaaactatattaattgtaaatagccaccggcctttctgtctactgaaaataggaattaagtgacaagaaagtgaaagagaaaatcgactcttgcattttgtaactttgccctcgcttgggtccagaaggacttgtagggaagtgttcttatttacaggggagctacagtctcagtgaaagtgtgagtcaggcagaaaacaccttgtacacaagcaaacatcttatgttctcactgagacacgtttaatattttcagttcagactttgagactgcttttatacatctcgaattaccttgaaattayttaacccccattcataaagtgaaaatgtatatgaatatgacctaagaattaattattttccaacacagtgtgtcccctttcttcgtgggtttacatgatccaccattttagtcactttactggagatatctgatatgttcttgtattagttagagttctccagagaaataacc

SEQ ID NO: 807641 - DNA, 627 bp, Homo sapiens
tctttaaaatgatggctataaggcctatcttggaaattctgtgggcacaaatgttaggtaaagcactgcaaaaatgtagaacattcttttatatcatctctcaaagccccttagagagagttttgttttcagagggtgataagtcacttgtggtaattttagaagcytgggaaaatagtgctccaagtagatacctggtgcagcagcaaagtgactgttcaaaggagcctgaagatctggcctgggttcctgctgggtgacggacgaggagccaagcaacagattcccagagccatttcctttgctgaacaatgggaaagtggaatgatgtgactggcaaggtgccaggcagctgttcttccaatccttggaggatagcaatggtctcacattgcagggagagggattgaagttaaacctgaggaagttatttcctgagtataggcactgtgaggctctggaatgcaaggttaaagaaggccggaatgcccttctttgagaatgctgaaaaaagaacaaaaacccaatctctttgaatgttgcattgcctggaggcagaagaatggattcattccttttggactaaggcatcaatattgagaaataagatctgcttcttgtgtcatc

SEQ ID NO: 807642 - DNA, 624 bp, Homo sapiens
cccatccacatatcctcattttaagtggctttttgtttatctatgaaaccttaggtttctgctagaacatgtttctggttaactatctcagtgctggatggtacttggtgctaatgaggctaaccctgtctgatactttccaggcaatgactccttagatatgggatgatctgggcactggttggagacaacatcaaacttactaacttaggatctaagaagaaaaaaaaaaaaagactgtccccctcgtgcaatagccctctttatgttctwgcatggtctgactccttaggcctagtctagataaaaaacacaaatgggagctttggcagtctggggtggcactgaagcctgcaagcccagatgttaaattaaatcaggtgagacactgacccaggatgattgaaggctctggaactggaaggaaaatgtgaatcatatttgaagggagaatcaaaaggtcatgtccagggaagctgtgccaaatgttgagtctaagagctaaatgaagttgtaaatggaaaggtgagtcaaaagcacaaaactcgcatggcttggagcaggatgagatgagaagttttatatgaaattagtcatggagaaggctgtgatcagtgtaggagt

SEQ ID NO: 807643 - DNA, 624 bp, Homo sapiens
cccatccacatatcctcattttaagtggctttttgtttatctatgaaaccttaggtttctgctagaacatgtttctggttaactatctcagtgctggatggtacttggtgctaatgaggctaaccctgtctgatactttccaggcaatgactccttagatatgggatgatctgggcactggttggagacaacatcaaacttactaacttaggatctaagaagaaaaaaaaaaaaagactgtccccctcgtgcaatagccctctttatgttcttgcatggtctgactccttaggcctagtctagataaaaaacacaaatgggagctttggcagtctggggtggcactgaagcctgcaagcccagatgttaaattaaatcaggtgagacaytgacccaggatgattgaaggctctggaactggaaggaaaatgtgaatcatatttgaagggagaatcaaaaggtcatgtccagggaagctgtgccaaatgttgagtctaagagctaaatgaagttgtaaatggaaaggtgagtcaaaagcacaaaactcgcatggcttggagcaggatgagatgagaagttttatatgaaattagtcatggagaaggctgtgatcagtgtaggagt

SEQ ID NO: 807644 - DNA, 562 bp, Homo sapiens
tagaaatgagtaaaaccactagtcaggaatggcaactacttttcaagaaagtccagaaaagttgatgatggatacttaagctgccaaaccactggtggactgccctgtttttgtgctgtgtctgctcatgttctaaggctgtagcagagaaagtgattgttcacggcatcctaagggagttggaggaggcaacagtctgttaaaaaaagaaaaaaagttccctatgtgtctggtgggaatgctgaattttatgtcttatttggtagtttgtattcctaaaatgctccaaatacttgaataatgtattttcctggccatctaaaagacataatccrtgtcttttaaaaacctgctagcttctctctgtaaagataaattatgaacttacaggaaatcatgcaatcagatctatgaaagtctggaccctccttggacaactgaaagaatgctccattctacccaaaagggcataacagatgtgcataaataattggtcaaattttcatcagaaatgtcattgtgacagccagttaaaaggattaaggaaataaaaactgggaaa

SEQ ID NO: 807645 - DNA, 562 bp, Homo sapiens
tagaaatgagtaaaaccactagtcaggaatggcaactacttttcaagaaagtccagaaaagttgatgatggatacttaagctgccaaaccactggtggactgccctgtttttgtgctgtgtctgctcatgttctaaggctgtagcagagaaagtgattgttcacggcatcctaagggagttggaggaggcaacagtctgttaaaaaaagaaaaaaagttccctatgtgtctggtgggaatgctgaattttatgtcttatttggtagtttgtattcctaaaatgctccaaatacttgaataatgtattttcctggccatctaaaagacataatccgtgtcttttaaaaacctgctagcttctctctgtaaagataaaytatgaacttacaggaaatcatgcaatcagatctatgaaagtctggaccctccttggacaactgaaagaatgctccattctacccaaaagggcataacagatgtgcataaataattggtcaaattttcatcagaaatgtcattgtgacagccagttaaaaggattaaggaaataaaaactgggaaa

SEQ ID NO: 807646 - DNA, 598 bp, Homo sapiens
aattcattttttgtttattcaataaatattgagtatttattatgtgtcagacattacattagtttcttaggatgtttcattgagaaaaacaaagacccctgcccctgagaagtatactttatagtcagggcagacagatactaaatgataaatgtaataaataattaagttccagcatttgttaggtgacaggtgccatgggaaacaacaatgggaagaggtgttgggagtagtgggagtcctagtttaataagatggagagggccagcctcattaacaaagtgacagttcagctaagatttaaaggaggctgaaggaatttgtcttgggtgtatctggaggaagagctctccagwccttggaaacagctaatgcaagggctctgaggcaggagtgtgcctggtggatgggaaacaccaatgagccagtgtggctggaccagagaagcgagggtgaaggcggtaggagagaaagtaacgagggccagatgatgtcagaccttagaggtcatttaacagactacgaccttaactctgaaagaggggcagacaacagagattttagcagaagaaggacattagccaaattgtatttttac

SEQ ID NO: 807647 - DNA, 489 bp, Homo sapiens
tcttaggcattttcttgagatactgagtaaatatttgaaattctttaagttacatatacaatttaaatactgatatacatttctcctgattttgtgtatttacatttttcagagacaaggccatggagtgtatggtgagggttgctggtgggtggtgatggaggtggtgagtcacagatataagaattacactacttataatgccaaagcactatctgtagagttgtgccttgaacattttgtttttgaaggggaaataaatctgtttgggtccaaattattttcttytattttgtttcctttgacatactcacacatactgatgagacttctagccagtaataagagaaactttaaggtttgtgaaacaatgtgagttagattgcccaggaaatgatttaatttactactccgactttgtatgaaattaaattcattgcactaactggatatagtgaggatctgaaacacatctgccttttagtgcta

SEQ ID NO: 807648 - DNA, 604 bp, Homo sapiens
attagaacagactgtaacaatggaggagaagtagaatggacgcactatgctccatatataaatccatatagtaattaaaatatagtcatagctctcaagaatgacagctcttggccaagaagattcctgggctgaaatattaggattgctagattcagatgggatmttaaacaaatttcttgaggtaaatagtatccatctttgtgcctaaaccacatgatattttctcatagtccttgcctttggaaaggtttattgattcatagaacctttttaaacaaatgaggcaatgcagtctaaggaaaaaggaagatgggttcccaccaaccaaaagaagaccttctcccgctcttgctccacagcatggcatgaagtagatgtgtttttctcctactagctgaaaaagtgccaaactagaagtcctaaaaccttgatttccattatagctctaccacattctggctcatgaaccttgggaaagacaaggagtttccttataaataggggtaataatacacacaccacaaggttgctgtggagattaaatgaggtattatgtatgaagcccttgacacactattaagtgactctatgtgtgaagagg

SEQ ID NO: 807649 - DNA, 585 bp, Homo sapiens
cacaatcgcacaccatctcacaccaatcagaatggcttttgttaaaaagtcaaaaaataacaaatgtttgtgaggctgcagcgaaaagggaccacttacaaactgttggtggaaatatagattagtatagtcactgtggaaagcagtttggagatttctcaaagaaatgagtgttgaactactatttgacccagcagtgccactactggatatatacccagaggaaaataaatcattctaccaaaaagacacatggagccatatggtcattgcagtgctattcacaatagcaaagacattaatcaacccaggtgcccactaattgtggattggataaaaaatatgtgatacatatacatcatggaatactatgcagccataaaaaagaaacaaatctgatcccttgcagcaacatggatgtatctggaaaccattatactaaacaaaygaatgtagaaacagaaaaccaaataccacatgctctcgcttataagtgggggctaaacattgggttgtgcatatttttatgcaccaccactgttcctacaaataggaaccgtagacactggggaatacaatagggga

SEQ ID NO: 807650 - DNA, 579 bp, Homo sapiens
gttgattccatgttttctattgtgaacagtgctgcagtgaagatacacgtgcatgtatcaaaactgcaatgagataccatctcacaccagtcagaatggcaattattaaaaagtcaagaaacatcagttactggcgaggttgtggaaatataggaacacttttacactgttggtgggaatgtaaattaattcaaccattatggaagacagtgtggcaattcctcaaagatctagaaccagaaataccatttgacccagcaatcccattactgggtatatacccaaatgaatatacatcatacatctactttaatacaaccccaattgctttattaacagtttggtttaagaaaactcctccatatgctgccgacactttttwaattaaataaagtaaaatcatgtctttatatgaattggccaattagttttctaggtggcaaaatcttacacagaaactaggtattcatcttaccaaagactaactatatgttagtctagtattaaccctaccaaagactacatgttactgaacaagtcacttaatttttctgaatcttagttacctcatttttggag

SEQ ID NO: 807651 - DNA, 579 bp, Homo sapiens
gttgattccatgttttctattgtgaacagtgctgcagtgaagatacacgtgcatgtatcaaaactgcaatgagataccatctcacaccagtcagaatggcaattattaaaaagtcaagaaacatcagttactggcgaggttgtggaaatataggaacacttttacactgttggtgggaatgtaaattaattcaaccattatggaagacagtgtggcaattcctcaaagatctagaaccagaaataccatttgacccagcaatcccattactgggtatatacccaaatgaatatacatcatacatctactttaatacaaccccaattgctttattaacagtttggtttaagaaaactcctccatatgctgccgacacttttttaattaaataaagtaaaatcatktctttatatgaattggccaattagttttctaggtggcaaaatcttacacagaaactaggtattcatcttaccaaagactaactatatgttagtctagtattaaccctaccaaagactacatgttactgaacaagtcacttaatttttctgaatcttagttacctcatttttggag

SEQ ID NO: 807652 - DNA, 640 bp, Homo sapiens
aattctaatccctaaaaaaagtatctttcaggaataaagtagaaataaggactttttcagaggtgccaaagctgagataatttattaactgcagaccttcctgacaagaaatattaacagaagtccttcaagcagaggaaaaatgacatcaggtgaaaatctgactcaatacaagggaakaaagaatcctagagattgtaattacatttgtacagataaaatattttttattatttaggtctctttaaatgataaatgactatttaaataaaaattcatgtatatagtgaagtacactataagtacaacgtacacagaagtaccttgcatgataaaaataggataaagtccaggaggaagaaatgaaaatgtactatttcaaggctcttatactacatctgaagtgctattatattattttaaggtagacactgatgggttaaagatgaaaagtacaactcctagagcaatcactaaaaaaaaaagcaaagaattatagttgataatacaacaaaggagacagcattgactcaaaaaacatattaaataaaaaaaaagaaacaaaagaaagggatgaaagataggagagaagtaacagatgtcacaaaaagaaaataaaaagcaagatggtacttaaacc

SEQ ID NO: 807653 - DNA, 616 bp, Homo sapiens
ctacatctgaagtgctattatattattttaaggtagacactgatgggttaaagatgaaaagtacaactcctagagcaatcactaaaaaaaaaagcaaagaattatagttgataatacaacaaaggagacagcattgactcaaaaaacatattaaataaaaaaaaagaaacaaaagaaagggatgaaagataggagagaagtaacagatgtcacaaaaagaaaataaaaagcaagatggtacttaaaccatacatatttatcagcacattaagtgtaaatgatttaaatgtaccaattatatggtgtagattgccaactagatacaaagaaaaaaaaagactcattatatgtttccyatgagaaacacacattaaatctaaacataagttgtttaaaagtaaaaagatatagaggaaggaatgaatagatacagcacaggagatttttagggcagtgaaactattttgcacggtagtgtaagggtggctataacacattatcatttgtcaaaatctacagaactgcacagcaaaaacagtaaacttaatgcaaattgtggacttcagttaataatcaggtattgatattgattcaccaattgtaataaataatgcaa

SEQ ID NO: 807654 - DNA, 639 bp, Homo sapiens
agaaaaattaaggaagagaataaagagtgctggggtaggaacaaaattttaagtagggaagtcaagaaagtcttcaaagaaacggtggcattggtaatgagacttgatgaatgtgtaggaatgaaaccaagatgattttggggtgaaagagagttaccagtggaaataacaagtgcaaagacccagaggtgggaatatgcctgctacatttcaggacagaaagaaagccagtgtggctggaacacagtgtaatgggccttacaggcaacgaaagattagactttgtacagagtgggcacaactgatatctgaaaagaatattctggtagccagagtagaataagtattatagtaattggccatctgacaaaaatgccacctcaaccaaattttgtttgtttacctatttggacttatttataagttttttttcctatttttaaatggaaaaatgtgagtgaataaataaaatggggaagaagaatamtaaacttgaaattttccacacttgttaaagtcacagccaagaattaaaacaggcatatgaaaaattttctaaacagacagatttatattgcaaattacccaatgaaaagaatccagtaatttaaagcaaaatacgaccaccagagggaagac

SEQ ID NO: 807655 - DNA, 668 bp, Homo sapiens
ccttatgtaactcatctttttccatcaacatagtgaaaaaagtttcacttcagcattaatggggaatctcatattgatttgtatgcaaaagtataatgggaattattatgcctgtacctgagaaaagacatcgtcatagcagggtggcatagaaaaaaaaaaaaatccgcaagctttgaaggcagacagtcctgaactgaattcatgcccactacttstcagctgtataactttagggtagttcagttactctctaaatctactttctttattcatagactaagaacagtaagagctgttttgcagtattattatttaaattaaatgatagattatagtaaaaatgccttacatttagactaccttatgccagatattttccatatatgaagcttatatatattcttggttctttatgacatgaacccatgacatattgagcctaggcacatatgaagaaaccaacacttatttatcctgtacataagaatttttggtaacctgtagacagatacataatcagataattatcaaatcatcaaaaataatcaaataaatgtaacaatagagttattagagtaatttgaaaacacaaagagctagtaaatgttggagccttgaagggtagatagcactgctcttttctacttgtctcttgaattatgaca

SEQ ID NO: 807656 - DNA, 668 bp, Homo sapiens
ccttatgtaactcatctttttccatcaacatagtgaaaaaagtttcacttcagcattaatggggaatctcatattgatttgtatgcaaaagtataatgggaattattatgcctgtacctgagaaaagacatcgtcatagcagggtggcatagaaaaaaaaaaaaatccgcaagctttgaaggcagacagtcctgaactgaattcatgcccactacttctcagctgtataactttagggtagttcagttactctctaaatctactttctttattcatagactaagaayagtaagagctgttttgcagtattattatttaaattaaatgatagattatagtaaaaatgccttacatttagactaccttatgccagatattttccatatatgaagcttatatatattcttggttctttatgacatgaacccatgacatattgagcctaggcacatatgaagaaaccaacacttatttatcctgtacataagaatttttggtaacctgtagacagatacataatcagataattatcaaatcatcaaaaataatcaaataaatgtaacaatagagttattagagtaatttgaaaacacaaagagctagtaaatgttggagccttgaagggtagatagcactgctcttttctacttgtctcttgaattatgaca

SEQ ID NO: 807657 - DNA, 668 bp, Homo sapiens
ccttatgtaactcatctttttccatcaacatagtgaaaaaagtttcacttcagcattaatggggaatctcatattgatttgtatgcaaaagtataatgggaattattatgcctgtacctgagaaaagacatcgtcatagcagggtggcatagaaaaaaaaaaaaatccgcaagctttgaaggcagacagtcctgaactgaattcatgcccactacttctcagctgtataactttagggtagttcagttactctctaaatctactttctttattcatagactaagaacagtaagagctgttttgcagtattattatttaaattaaatgatagattatagtaaaaatgccttacatttagactaccttatgccagatattttccatatatgaagcttatatatattcttggttctttatgacatraacccatgacatattgagcctaggcacatatgaagaaaccaacacttatttatcctgtacataagaatttttggtaacctgtagacagatacataatcagataattatcaaatcatcaaaaataatcaaataaatgtaacaatagagttattagagtaatttgaaaacacaaagagctagtaaatgttggagccttgaagggtagatagcactgctcttttctacttgtctcttgaattatgaca

SEQ ID NO: 807658 - DNA, 614 bp, Homo sapiens
tacccccaaaataatgggatgaaaatagcactttacctctgtgatcttcttccccaaaacacataattccagtgtaagagacaagacccaactgaggtatgttccacaaaatacttcaactgtacttctcacacccctcaaaccattgaaaataaggaacctgaaaaacttgaaacagccaagggcaactaaaaagaaatgaaaactaaatgcaatatggtaacctggatggaatccagcaacaggaaaaggatattaggtataaactaaggaaatcttaaagtactgactttacttactaatgacgcatcagccttggttcattaattgtaataaatgtataatactaatgtaagcttttaataatagtggaaactggaaggtagggtatataggaatattttgtactgwagcagcatcctcgtctggggtgaatacccgaggttcatcatctcacgccaaaagaatcgaggatacggacacacaagaagtgagtttaagggcggaggtttaataagcaaaaacaaaaaaaaaaaaaaaaaagagagagagagaatagctctctctcctgcagacagagagtgggggatcccgagtgtgtcttccagtatgag

SEQ ID NO: 807659 - DNA, 629 bp, Homo sapiens
gtccatattatatggatatgaaaagacacagatatagtttccatcctttcaaaatgatttggatggaaaagaaagaatatgcatatgtttagcatgccctctttaaatatgatgaacttaggttcacacagagtaagtgatttgcccaaactgaaagaatgcattaataagcagaaagaaaactaaagcactgagctcttaatttctattcaagagcccttttcactaaagtgtatcttcaatayacacatttttaaaatttatagcacataaaaaattaactaaaaacataatggttttgagaaagcacttctaaaagacctttataagtattgcttagaattgaaatgtagcaattgttacagaagctctccacttattaaactggaaatagctccctttttaataaaaccaatgcattagaaagtcaatgtataccctattgatgtgctcattagaagtggagactgagttacaaagatcaatcaacagctatccaatgcaggatttcaaggggacatcattggccctgcccccacataccaatctataggtgttctatctctaaaccacccacagtgctcagatctttatttcttactgatttagcttacctttccccagcattt

SEQ ID NO: 807660 - DNA, 600 bp, Homo sapiens
gggattccgccccatgtttcccttccacactgccctagcagaggttctccatgagggctctgcccctgcctggacatccaggcatttttatacatcctctaaaatctaggcagaggttcccaaagcttaactcttgtcttctgtgcacctgcaggcccagcatcacatggacgctgccaaagcttggggtytgtaccctctaaagcaatggcccaagctgtatcttggccccttttaggcatggctgtagctggagcagctgggatgcagggtgccaagtcccaaggctgcacagagcagcaaggcccttggcctgacccacaaaaccatttttcccttctaggcctccaggcctgtgatgggagaggctgctctgtagatctttggaatgcactggtgacattttccccactgtcttggtgattaacattcagctcatgatttatgcaaatttctgtagcagcctttgatttatccccagaaaatgggtttttcttttttaccacatggtcaggctgcacattttccaaacctttaggccctgcttccattttaaacataagttccaatttcaaaccatctctctatgagcatatataa

SEQ ID NO: 807661 - DNA, 628 bp, Homo sapiens
tattttaaataatatttttcagcttaattttaataatattcacaaatcttagcaaacattctacacacactcacacacaaacacacacacacacacacacacacacacagagagagagagagtctgaattaaatggggctcaaaatctgcttcaactgtttactaaatttataatctaagaaaaagtatcttcctcaatgcttatacttctcattggtaaaatgcagatagtyataatatttttctcatataatttttgtgaggattagaagagtggccaagtcataaggcagaatgttgttctgataagcatggagagaattattgcaaccacctttgcaaacaaattacatacgatcgaagtaactgctcactatttttataagtattttcttaacagttttatttgcatatttcatcagatgaaatttagagtcattgtcaagttttccttggtcttcattcagtttgctctcggagtctgcccagtgcatttgctttgtatacttattccaataatatcttatattcctacaatgtattttaattttctgcataatttatatgtttattgagtttgttcctgtgatttaaatttttcttttttttcttatgtattatcacaata

SEQ ID NO: 807662 - DNA, 628 bp, Homo sapiens
tattttaaataatatttttcagcttaattttaataatattcacaaatcttagcaaacattctacacacactcacacacaaacacacacacacacacacacacacacacagagagagagagagtctgaattaaatggggctcaaaatctgcttcaactgtttactaaatttataatctaagaaaaagtatcttcctcaatgcttatacttctcattggtaaaatgcagatagttataatatttttctcatataatttttgtgaggattagaagagtggccaagtcataaggcagaatgttgttctgataagcatggagagaaytattgcaaccacctttgcaaacaaattacatacgatcgaagtaactgctcactatttttataagtattttcttaacagttttatttgcatatttcatcagatgaaatttagagtcattgtcaagttttccttggtcttcattcagtttgctctcggagtctgcccagtgcatttgctttgtatacttattccaataatatcttatattcctacaatgtattttaattttctgcataatttatatgtttattgagtttgttcctgtgatttaaatttttcttttttttcttatgtattatcacaata

SEQ ID NO: 807663 - DNA, 622 bp, Homo sapiens
agggcatctcttaatatcaccatgccctgtgattaaggtcaatgggaaactacaacagaccaatccaggcaggagtacaaatggcccaggcccttcaggaatgaaggtttgggtcactccaccaggaaaataaacatgacctgctgaggtacttgctgaaggcaaagggagtacaaaatgggtagtagaagaaggtagtcattaataccagctatgaccatgtgaccagctgcagaaacgaggactgtaattgtcatgagtatttcctccttctgttaaaaacatgtttgttcatatataaacttgtactgagaagatatcttcattttatttcctttttcctttatcatgtgacataagatttattgacttcacatgggcatttaagtattgttaactttatgtaatagtatttgggttggggattgctgctttyacgggtgtatgaaggatagttgtattatgttaggcataattgtgaccttacgttgtctttatttgaagattatgtctgaattcaggagatgtgtatgggttcaagttgacaaggggtagacttgtgatagttaatactgagtgtcaacttgattggattgaaggatccaaagtattgatcctgggt

SEQ ID NO: 807664 - DNA, 551 bp, Homo sapiens
ataaagcatacgcataaaatatttggaaccattggccatgtattcagtcacaaaaaggctcaacatcttttaaaaaatcaataatatacaagttacaacctccatccaaaaggcaatgtaattataaataaacaaaaagtgcactttggacaaagtatgtatttggatacttaagaatgaaatactaaataacttagataaaaagaaaatgaaaattacaaaatgcttaggactgaatgacagtgtaagttcaacatgtcatctaaatgagagagtgtaaataaatctcttaagcatttagcttatttaaggacataaagaaggcaaacytaagtgagctagatagaaaaaaaattaaatgggaattaagaaatgatcaagagtatcaataaaatgcaaagcttttgccttacaaaattaaaagtaaaaatacacaaacctttagcaagagtggtcaagtgggtaaaaaggagaacaaaggtacaagtaaacaatattgaccaggaattgggtcataattacatagaacatataaaacaaaaaaaaattaa

SEQ ID NO: 807665 - DNA, 636 bp, Homo sapiens
tgtgacagagtccatccaaatgtggttacattcctcagtcttcttttttgccatagataaggaaatttcaaggagagaatgaaaggcaattttgttccttttgatggagattcagataagagaatttcagaaagagttctaccctgcatttgaggggagacacaggagaaggtcagtaagttcttggttctgaggatgcttccaaggccttttaatttcctttaattccaacgtgctcagtatgccaaagcactgtacttttggggtattgttctctgtgccccaacagatataactgctctctctactcttagaagtaaattatgatcagccagatgtggtggttcatgcctgtaatcccagcactttggaaggccaaggcaggcagatcacctgaagtcaggagattgagaccagcctggacaacatattgaaaccccayctctattaaaaatacaaaaattagccaggcatggtggcgtgggcctgtagttgcagctactagggaggactgaggcaggagaatcacttgaacccaggaggcagaggtcacagtgagccaagatcacaccactgccttccagcctgggcgacagagtgagactccatctcaaaaaaaaaaaaaaaaaaaaaaaa

SEQ ID NO: 807666 - DNA, 576 bp, Homo sapiens
aggataaatggaatagagtataaaagccaacataggaaaaatgtaaataaaatgtcataaaagcagaaaaaagaaacatagaaagttgaaagtattacaaattaaaataaatctaaatatatcatttattacaatatataaaaatggacataacttargtcaaatcaaagattgcctaattatataaaaaatatagctaactatatattctttacaagataactaattaagatataaatacccagaaaagaggaaacagattgaaaaagatatatcagtaaaatatcaaccaaaagtcagctgatttggctatataaacacaatgtaaaatataatgttgcagagataaagtgtgccactatatcaggatttcaatttgttagagtgatataacaattctaaatttgtatgcccgtaactttatagatataaaacatatgaaataaaaatttacagaactgttaaaagagatgaataaatctaccatcaaaatttaggagttaacatattaacaatcatagatcaagaagaaagaatgagcagtcagaatacagatatatgaacaacaccgcttaa

SEQ ID NO: 807667 - DNA, 535 bp, Homo sapiens
acagaagaaactcccacttcagctccttattatttcaaggaaccttggctcttcttaagatcacagtactaggaatgcccataggtactgagatgttatgcttctaggcctcctcaatgaagagagctaggaaatgtatgtgtgtatatacacataaactcttaaacacacacatatatatacccacatgtttctatctctctctmtatatatatatatttctttatatatccatataactcatacgtctatatatctatatttgtacctatatatgtgtgtgtgtgtgcgcacgtagatataaatagattcacgtgtatgtatgtgagtatgtaaaagtaaatacaagcttcagaaatgtatataagtacatgtacaattacatatttaaaaacatgaattcacgccaattcttccaatttcaatccaacaagagagttcattccagacttaacttttccatatttctaattattttctttagcaatgagcaatctgaaacccatttttagaaatatatttatatagaattagc

SEQ ID NO: 807668 - DNA, 665 bp, Homo sapiens
attccaacactgtgggaggtggaggcaggaggatcccttgaggccaggagtttgcaaccagcctgggcaacatgggaaaacccctgtctctacaaaaattaaaaaaaaattagccatgtgtggcagcatgcccatagtcccagctactcacaggggctgaggtgggagaattgcttgagcccaggagatccaggctgcagagattgtgccactgcagcctgggtggcagagcgagaccctatctcaaaaaaaaaaaaaaaaagaacagaaarggaacaaacaacagacacaagattccatggaaaagggagtggtctaagtattcagactgtaggaattcagagagtggagaggctggttattatgggggtgcttcatcctggggagttgagggaaaggaggtgctggctgcctggagcctggaagaatcaaagatttccaaggccatggggggaaagcatgaaggatgagtgaatagacaccagggctgagcaccctgaaaactgtgaagatactagattgacctgtttggaaaaccaaacagatgtggctgttattgacaagtggttttgtttttgttttgagacagagtctcacttggtcgcccaggctggagtgctgtggcttgatcttggctccctgcaacctccgcctccaaggttcaa

SEQ ID NO: 807669 - DNA, 616 bp, Homo sapiens
cacacagtaacttaagagaggattttaaaaaatcaaaatgccctcagatttgtattggatttaaccaggctgagatccctgagatccaaatataataatgtgtcctttttggatgaatcagacacaagcaaaaatctcccgtgtgtgtccmgctttagaggtgtagtaatggattccacagttcacgctggtgggccagccaagacttttaatgctgatgtgggcttcattctttctataaactccctttcttcttgatagtgcatgggcccaggggttccaaacatgggtacctgccgtaattgatctgtgtaaccggagaaaatacatatcctatggcacccttgtgtcgggatatagggggcatcaccgtaatgtggctctttttctgttgattatagttttttctttctgtgatcacacaattgttttatcctcgcttaaaaaatttcaagaagtgcagcactcaaatacagaaaagtcaggtgtctggtggtttgttgccatttaatagacttgaagataactctctaaacatttattttgcaagttgtttttctgagagttgaggggaaacttttgccctttggtctccctgaggaattctaggatttca

SEQ ID NO: 807670 - DNA, 602 bp, Homo sapiens
agcgtgacgcgccgcgcggagtcaatcgggatccgtagtttgggtcttgctggcgcgaggtagtcagaggacgtggccgcggggcttgctgggacttgaggttagacgtcccggccgtcggttgccgcctacactgtctgccgtcgcgtcgcagttactaaggcgtggggaagatagcggcaggcaccgcagtggagcggctccgagatccccggggggctcgcaggcgcgcatccctcctgactgggacgtcgcctccgcagacccctcggaggctgaagcgacgccggaggcaggtgcgactgaaacttagttttcgaattcgagtctttctcyggcccaggtgtggagtttccaaaggagtgggcaggagcttgtccttcatccttttctagcccggttgtggcacttaccgattattctctcaagcagctgtcattttagctgtttgtaatgttttcgtgttaacggagaactcgcgtttactgagtgcctacagtctgccaggcagtatcctatgtgcacttccagccatcctctctctcactgagtcccacaacagccctgttagatgaggaggaaactaaagaacctacccaaag

SEQ ID NO: 807671 - DNA, 535 bp, Homo sapiens
tgcaggtatcatctggctctctgcgtcatcatatgggaattggggctcagaactggaacaaatgctggtactctggctactgctattgctgtaagtaacaaactatcctttttacaggtagtaacaggctatcttgttagcttgcaggtaagataaaaatctcagacccttcacaattcttgacagccccactcctacttctgcctgtcccatatcttggaagctccctaacttctgtaacaggaagttcccccgatattcctgtgccatcttacttgatcgcattacttaatacccttctgcatccctcttccttcaaacttttatataattctgctctgctaatacsggtgccaggcctgatcccctcgctttagttgctcacagtctgctgagagtgtcagacacttagacaatctgaacacagtagaaggaggtgcaaagtgctatgggggcttgaaaaggagtatttgttctagtatggaggtctgggaggtcctcatacaggaagtgaaaactgaaccatgagtgagga

SEQ ID NO: 807672 - DNA, 535 bp, Homo sapiens
tgcaggtatcatctggctctctgcgtcatcatatgggaattggggctcagaactggaacaaatgctggtactctggctactgctattgctgtaagtaacaaactatcctttttacaggtagtaacaggctatcttgttagcttgcaggtaagataaaaatctcagacccttcacaattcttgacagccccactcctacttctgcctgtcccatatcttggaagctccctaacttctgtaacaggaagttcccccgatattcctgtgccatcttacttgatcgcattacttaatacccttctgcatccctcttccttcaaacttttatataattctgctctgctaatacgkgtgccaggcctgatcccctcgctttagttgctcacagtctgctgagagtgtcagacacttagacaatctgaacacagtagaaggaggtgcaaagtgctatgggggcttgaaaaggagtatttgttctagtatggaggtctgggaggtcctcatacaggaagtgaaaactgaaccatgagtgagga

SEQ ID NO: 807673 - DNA, 629 bp, Homo sapiens
ctataggcctagtccataacctcggagatgagtatgaatagggatcctttgggatcagcagcagagtcttgaacatttgtacattcacagctgttcttcaaaccgcaaattagaaaatacagaaaattttgtttgcattcttggttttctcctaaattttcccatagtcatgcattttctgcacatgtccttatagttcaagttgattacttatttagctttcatgaagatttgtgggccactttttacaaaggaacaaagcttttgtcactacctgagagtcacggcagtagtaaaggacaacatatgtggagagtaaaggacaacagaggtggagccacrtgtgtgggctgggcatctgaccacgctcactcactgagtaatagactcttctccacatcctggagtagaagtgtttcagagtcaaatttcagtaaaatgtgtgcgtgtcatgaaccttgaggtcaaccccaaaaagctgttaacttaaatgatttcatctgcaaacatcaagggtcagccattcttcacaaaagcctcacttaacctggtcttgtcagtgagggggaccttctacaagagtgagtttttcagagttgatggccttcatatgccaaagctttaaaagg

SEQ ID NO: 807674 - DNA, 606 bp, Homo sapiens
ctgccagggaaagggagatcctttctattcctagaaaatcacaaaaatggcaatcctttgcattatattcctggttactatggcatttgctgatgctatctaacaggattatttccctgaagtgtaaaaattcccacagcatttcatacagagaggggataggagacatggcagtcgacaggaaagaaggaaaaatgcaataggaaaagcttggagatcctgttactgatgctcagtgggcagtcagagtctgaggttaatccagaagccttcgggtaacacctgggtgtagccctggccaggaactatcagttgcctctggacctcttccagccccatgcaatagctaggctctccatgaaaggaaactggtttgaaacacagtcaacattcccagcaccctgagggtaccgagggattcactaagttctcccgagcaagcctgtygtctaagtcttgagatgggtggcattccctaagggcatctaggtggccatcagacaccgaatgtttttggttttattttaaaatggagggcagaaggccccaaaatgaaagtaaagatttggggtctgctcctatactcacccttctgatgaatctacc

SEQ ID NO: 807675 - DNA, 620 bp, Homo sapiens
ctctaccttctccaccctgctgcaccaggaagctgacctgtggaggctttcttgctctctggattctagctgggtttggtcattggaaacacaaataagagatcagaaagttggaagaaagttaatatagggttatatatgttcctctactaaaagccacaggtgctgtcaggatgtctttcctgtaagctctctctgtattctctctattcatgttctagtaactaatccctctccttgcccttcaggcaacacctggaattctagaccatcccttgtcaggtttcctaaagcctgaccaccctttttgtacacaattcctttattaaactctctttaactacatagtttgagtaatttgtactcatctagtccccgctgggactctggttgatatggtaacaggtaccagcagtggctccaagaaaccaaccctcaactgtgattcaggggatgkatttgaggagcacaggctaatcttgcaagagggaaacagaaactgattatctgactttcagtggcattaggataactcaaactaatacctgtggtggcataaaacaggcagcagtcaaggagctgtggggctgtaatgacaatagtgattctaaagctgtggg

SEQ ID NO: 807676 - DNA, 638 bp, Homo sapiens
tcaaggagctgtggggctgtaatgacaatagtgattctaaagctgtgggattggatggcactgcctctgacagccatacagtctacagggagaaggacatattgaagtccttcaacttccagcttagtacctgggtgaaaaatcaaaaaggcttcatgacacctttgaacacrcttctcatccctgtagttgctgggcagatatggctgagcaaagtcatagcagcaattaaacatcaaaacttgccaggtgtcttctgtcaaggtaaagacattggtggaaaaggagtagaatcccatggcatgagatggggacatttgaaagataaatcagaagagcctgggaactctgaatctacaaatccctctgaacctctcatttccacccctatctaataggacctgccttcccctgcataaaatattttagtgacttaaatgaggcaactacttcacaaggcaatactgattttcctgaggaatctttctctccaacttccaccacccacattgcctccaggaccacagcaggagttagatcccagacagagaagtatgaggcctgaccctggaaggcttagcccatacacagtgggaattgaggatatcacctgttagtattgcagagtatataaagaa

SEQ ID NO: 807677 - DNA, 414 bp, Homo sapiens
aaatctctgcatggggtcgggaatcaaggctctgaaaagcagccgacatgtttggaaggccttcagagagaaaaggaggcaggccaccaacctccttcaaaggggggttagaccaccaatgccagcagcaagtatccgctttagccaagtcaagcatttgatcagcacatgcrttccctccactttctgtaaggtaccgactctatcttgggaatgaggaggagagagcagaaactcagatttggatgtgacttctgccaaacttgagctttcaatgtatttataggcaacaaacccaagacaaggaaattggtgccgtcaccaaaagcgtggtgcagaaagtggggtgatgtggtcagaaaggatttgccagaggaggtgggcggggctactggacagccacagctctcgtcc

SEQ ID NO: 807678 - DNA, 644 bp, Homo sapiens
acatttcagagtgttaatgttttcatataaataattaatatataaattgataggaacgttctaagagtcaagatggggtgaggtgaggagatcaaacaacaaacagacaaaggattcatgcaacaaaaagatttgaaaataaacatatgttgaaaaggacaacctcacttacaatgaaagaaacacaaagatgatataacacactgtttggacttctagctaaacrtgaaaaattgaacacgtgtgtttatttcctctcccttccaaatcttcactaaaatgaaaacaaagaatataagaaaggcataaactcataagaaccccaagaagaggaaaggagactgccgcatataaaagacatcaactatttctctaagacagaggcagatgggggagtggcaactggccgaggatgccaaggactaaggggctgcagaaagagggctgtcagagagtttgtagactcacccgcaacacccgaagtcactggaactagagggcagtcaggcccaggaatggatagaaaagccccagaagcagatcaggcttcacgtgctggagagaaggatgtaaggagtgggtcatggtgggattcgaggctgaggaagagggtgccagatgtttggttccggcagtgtagtggc

SEQ ID NO: 807679 - DNA, 598 bp, Homo sapiens
accaaaccatggtcccacccaaaggcatcagcatcacctcctgagcaaccatagaagaggagactttcaaccaagcttgcctggacaaggcaaggatgaaatcaggcttcagaggttgcaaaactgtcacctggcagagtaacattcagtctgttaatgtattttattcatgtattcatttgttgttttaaagtactgctcagaaccagcagatttagaccaacttttagaaatcaggaaatgtagcttctctttaaagatcagaggttctgataacactgagccctgataccaggaggtaacaattggctggagctgagaagcagccatccctgagaagcaagtgctcttcaggagctgcatttaccaccactcaggcaacaaacaaatttgcacttattctgcccacttcacttaattactgcctrgccctgtaagaatttaatttttcagtccttgacctagagaaaagacagtgtgtaattccgatccctaggagtttccaagactgagacagacagcacacagtcagtagagcaagagatcagagaggcaggggaaatctcagaggctcctgctgaccctgggggaatgtgcc

SEQ ID NO: 807680 - DNA, 509 bp, Homo sapiens; identical to SEQ ID NO: 805493

SEQ ID NO: 807681 - DNA, 543 bp, Homo sapiens; identical to SEQ ID NO: 805494

SEQ ID NO: 807682 - DNA, 553 bp, Homo sapiens
ccttcagcagggtgggagactgtctgccaccccctccrtgggtggggccagcttccggccccttctgctggtgaccgtgctgcgctcctttctagcaaacaagggagcgtctggcagctgctttgtctccctgcggcccctccaagtcgctgctctggaaaacacttgcctctgtcaccaggctgcacctgtaaataaagcagaagataaaagaggcctttctgtttttcaaactgtgacaggcacatcccggcaaattaccttcatgtttttttaatagaagtaaaaaggtttgggtggcttgcgttgcctgatacagaagcacttttctctcattcaagccgccacagatgggataatgaacgcatttttatctccatctctaaacaagacgcaaagaacctggagttagacaaactttcctttacggcattttgaggacagagctgggagtggtgaaaagctcttggtgcttgggaactaaaggccgggaacttgttcaggctagaagtgtatttgcctcctgtatgcagagacccacttgtgtatttca

SEQ ID NO: 807683 - DNA, 547 bp, Homo sapiens
gtggaggaaccagaagcccagggatggttacatgaactgtccaagccaatgccactgggcaccagcagagaggggacccagagccaacctggctgactccataaccagatgaagactttcccctgaaggttatttctaatggtgagatcatttccttgcctttctcttcctccctccctccagctcatcgattgtgggtagcctasaaaacaaagtcaagattttggcttaatctcatcgaggtcaacttcctgaaaaaggtgggttgaaggcagtgcaacaggcaggaaccctgactggggcaactgtcagggatccatcaggacatgccccagggtagcttttgattatcatggaggacccttccccagctcttggtgtctgtatcttggcaaatcatcttccttgtccccatccctttgctgtcttggcagcagaagggatttcagttcgactttgggaagaacatccctgctctccctttgagaagaatcttggacaggttcctattctttcagggataccacagtgtggtcaggttgctact

SEQ ID NO: 807684 - DNA, 604 bp, Homo sapiens
ttttgcctgaaacacaatagtttctacaagggtcccaggaaggagatgcttctgttttctttgtagaataatcttacgtgtcttagcctgtgtaacaggcaagaaagttctctgatctatccaaagtgtcgcttatggaaaaagaaattactctgtctcagaagagacctgttactactagctaacacygaccgagtactgcctgtgtgccaggcactgtgctgggtattttacacacatttaactgtttaagcctcactacgaccctgggtgctggatactgttattatacctgtttcacagatggagaaactgacaaacagaaattgccccaaatcacacagctagtaagtgaagatgggatacaagtacgatgtagaagatgttaacagagggacaccatgagatgcttatctcaaattcagtcacccagcgtgtgagaccagagttggggattctctgctctgcttcatctagggaagctgcggctggagaagtgggcccaccctctcctcacaccttcgtccccctcctcctggctccccatatcagatttgaacagaaattgggccactccatctttgacattagcctcctcctcaaa

SEQ ID NO: 807685 - DNA, 604 bp, Homo sapiens
ttttgcctgaaacacaatagtttctacaagggtcccaggaaggagatgcttctgttttctttgtagaataatcttacgtgtcttagcctgtgtaacaggcaagaaagttctctgatctatccaaagtgtcgcttatggaaaaagaaattactctgtctcagaagagacctgttactactagctaacactgaccgagtactgcctgtgtgccaggcactgtgctgggtattttacacacatttaactgtttaagcctcactacgaccctgggtgctggatactgttattatacctgtttcacagatggagaaactgacaaacagaaattgccccaaatcacacagctagtaagtgaagatgggatacaagtacgatgtagaagatgttracagagggacaccatgagatgcttatctcaaattcagtcacccagcgtgtgagaccagagttggggattctctgctctgcttcatctagggaagctgcggctggagaagtgggcccaccctctcctcacaccttcgtccccctcctcctggctccccatatcagatttgaacagaaattgggccactccatctttgacattagcctcctcctcaaa

SEQ ID NO: 807686 - DNA, 643 bp, Homo sapiens
ccatcttgtaccattcaccattgtttgatgcttattattcttgccttgaagtcctcaaggacagagaagatcctgccctaaggagcaagtgtgcggaggccacctggccttcactggttcctgcactgaatgtttccttctcacctgctgagtaccaggtgttaccccaggtatgagatgaccacgccaggaagatgtagaccccgctctcaagggcttacaggctgcagggcaagtagaccagcaaactgccatcaagattcagtgtgagaggtgcattctacaacagcactcagagcagggatccagggaagtggtgcctaacatagacagaaggagtccaggaggacttccaggtggaagtgacatctaaaagatgaatgagagtcatccaggcaggtgaggtaaggaaagggtcaagggtcaaggcagtgggacagtggtgagagccagactagaattccaggtatttggatcagcacaatgataacaacagctcacttttawagaacacttgccaatgccaggcacatagtaaaggctttataagcattatttcatttaagcctcaaatcaaccccactatccctattctacagatgaaaaactgaggctttgagaggataaatattttgtctattta

SEQ ID NO: 807687 - DNA, 575 bp, Homo sapiens
gaagtggtgcctaacatagacagaaggagtccaggaggacttccaggtggaagtgacatctaaaagatgaatgagagtcatccaggcaggtgaggtaaggaaagggtcaagggtcaaggcagtgggacagtggtgagagccagactagaattccaggtatttggatcagcacaatgataacaacagctcacttttaaagaacacttgccaatgccaggcacatagtaaaggctttataagcattatttcatttaagcctcaaatcaaccccactatccctattctacmgatgaaaaactgaggctttgagaggataaatattttgtctatttaatcaacacaatctaaatattagccatcattattatcataattgttactattattattaacttcagacatcacatctcaactaacctcttctggtgaaacaggtacggattaacctcccctaatgataagctcacaccattagtaatgagctgcattaggatttgaactcagtactcagattctggagatgaaagaggtcaccaggcgggggaacggcacctactcagtctcctggtgtggtg

SEQ ID NO: 807688 - DNA, 575 bp, Homo sapiens
gaagtggtgcctaacatagacagaaggagtccaggaggacttccaggtggaagtgacatctaaaagatgaatgagagtcatccaggcaggtgaggtaaggaaagggtcaagggtcaaggcagtgggacagtggtgagagccagactagaattccaggtatttggatcagcacaatgataacaacagctcacttttaaagaacacttgccaatgccaggcacatagtaaaggctttataagcattatttcatttaagcctcaaatcaaccccactatccctattctacagatgaaaaactgaggctttgagaggataaatattttgyctatttaatcaacacaatctaaatattagccatcattattatcataattgttactattattattaacttcagacatcacatctcaactaacctcttctggtgaaacaggtacggattaacctcccctaatgataagctcacaccattagtaatgagctgcattaggatttgaactcagtactcagattctggagatgaaagaggtcaccaggcgggggaacggcacctactcagtctcctggtgtggtg

SEQ ID NO: 807689 - DNA, 575 bp, Homo sapiens
gaagtggtgcctaacatagacagaaggagtccaggaggacttccaggtggaagtgacatctaaaagatgaatgagagtcatccaggcaggtgaggtaaggaaagggtcaagggtcaaggcagtgggacagtggtgagagccagactagaattccaggtatttggatcagcacaatgataacaacagctcacttttaaagaacacttgccaatgccaggcacatagtaaaggctttataagcattatttcatttaagcctcaaatcaaccccactatccctattctacagatgaaaaactgaggctttgagaggataaatattttgtctatttaatcaacacaatctaaatattagcyatcattattatcataattgttactattattattaacttcagacatcacatctcaactaacctcttctggtgaaacaggtacggattaacctcccctaatgataagctcacaccattagtaatgagctgcattaggatttgaactcagtactcagattctggagatgaaagaggtcaccaggcgggggaacggcacctactcagtctcctggtgtggtg

SEQ ID NO: 807690 - DNA, 621 bp, Homo sapiens
ctgaacataagaatgaaaattataaaattcttagaaaaaatcaaagaagaaaacttcatgacattggatttagcaatgatttcctgggatatgacagcttatcccaggaaaaaaaacttgggcaacaaaagaaaaaatagataagttggactttatcaaagttttaaaatgttgtacatcaaggggcactattaagacagtgaaagggaagtccacagaatgagaaaaaaaattgcaaatcacatatctaataaggacttaatactcaaaatatataaagaactcctacaactcaacagcaacaacaacaaataacctgatctaaaagtggacaaaagacatgagtagacatttctccaaagatgcagaaatggccaataaacacacgaaaagaagggcaacatcattaatcatcagagaaatgcacattcgaaccacartgaggtacctcttcacatctattggggttcctattatcaaagaaacagaaaataatggcaagaataaggagaaataggaataagggtgtgttgctgctgagaatgtcaaatggtgcagccactgtagaaaacagtgtggtagttcctcaaaacaattaaatataaaattaccatttgatct

SEQ ID NO: 807691 - DNA, 629 bp, Homo sapiens
gattggctaatagtgctgtaaagaatgattcagtaattagcattgaactaacattactaactgttttgtgaggcaatatggtgtggtggtgaagattccagctttgggccaaacagacctaggcttctgtaagggttctgctccttatgagctctgtgaccctggacagttacttaacatttgcaagctgtatttttctcactattgaaataagaataggtaatagcaaccatcttgaargtttctaataaaggttaaattatgttctgtattaaagcacttagcacgtatctggaaattaatccttaatattagctctattaataagtatatttttgccttaaatgtcctcttttacttaattgatgaaatatgattatactaaattctacagcttttagtagctatagttgccaaagtctacttattctgaaaagtagtaacatcaccaggaaaatgtctaataaaaaaattgctaaactatttgcattgaaatcagtctccatatagggaagtattcataaattaccatttatcagaaaaacagaaagtataagtgactgattgctgactcacttttaaaccaagctaggctacatggtaacccaatagtattcttgaactattta

SEQ ID NO: 807692 - DNA, 587 bp, Homo sapiens
tcagaggtatttggcctcagaaggacatgggcaagggcgtggtttctggggcacatctgttcagagggcacgtttgttctgctcccttgagaggtaaaagggaaggaggcaaacagaaccactccccagctctccggagtttgctgatcaagcctgagggtggtgagggggtgcagccaccaggagaagcaggaacagrcaaaataggaaactctcaaagggcaatttaattttagactcaaggccaggaaattctttttaaaacaataagagtaatgggcttgggccttggtgaaagtgcaggcctgacacgctgcaggtttctgcagaaaaaattctgaagcacagagggttgtagagaaggggatgtctaattatgctcttaatgcaaagctgtgcttagcttccctagggaccccctggggaagcacacaaagtcggaggtagtgcagccaacaccaacactacaactcataccagcctgagaccaggacagcctccactcacagccaacactcgctgaaacaggctgaaggacggggagggggtggaacttgagaccacagtcctggggacctgcagttgac

SEQ ID NO: 807693 - DNA, 608 bp, Homo sapiens
tctgacctattatgtgaacactagagacttatcacagcttagaggatttacaagggatttgattgctgctttggagtgggcaggctcgctgtgctcagatgggcccctgcaggttgtggcatcttgttttctcaaactgggagagggggatttgatttgtcaggagggccctcagcttcagagagtgaggaggggtagagaatgtgtgtgcatgtgttgcgtagggtgcgggagagtcggggccgaggagcagggcaaaggaataagacacaaagtggaagaaagaatctattttggaaatttctctgcacaataacatacgcacacctcttcggcttgtaggaaagaaagctaatttttttttccccctctaacatgggtagttttgaataagcttataaagcaactccgaaaactaaagagaaccctaataattcacatcttacttctgttttctgtggcccttgygttcagtgttgagcaaccagaaacgccaagacttggctgtaaatcaggacccaaccccttttgtcacatcctatgaaggggaaacctttttaaaaatgtggaaatctcaaaaacaaaaataatattttgtgaatggatcc

SEQ ID NO: 807694 - DNA, 590 bp, Homo sapiens
gtattaagtgtaaatgctactaataggtttaactgactttggtgtgagtgaagggacaacagaacaaaagaagtaatttgccttgaagatgatcctcttttagtgttgaagtcacaagtgatggaggcccttctttcacttaacgaggccaggaaagctgggttggtctttattctcatcatgcatcatcaatattttaggaaaggtcatattgctgtctttcacrgtacactgcacaaccaagtatgattatgtgaccagaagtgaagggaaggagaacatttgcccatattctacccacactgaagtagctcaaaaatgaagagatgaagaaaggaaaatggagttgaccatttccatttaagtgctcattcagacatttagtattaaaatgatgaacttcttttgcaatctttttattgaacgcattgaactaggtattagggtgttatccttggccaacagaattgggatttcaaagttcatgaggccgaacattgaactgctcaaacactagtctgtagttcctagggaccacaatctagctaagatcagccctactgctttttctccatgacaacaaatcacca

SEQ ID NO: 807695 - DNA, 698 bp, Homo sapiens
atgcatctataactcaccttattcctgtcctccacctcctgggccaaggcaggggcacacgattctccagcctgggaccccagctgcccctttcatagccgcaaaatctctttgcaagctgtggtttgtgggcctctgtagtgcctgagttccccactagcccgagctctatgagaaagtaggtttgtctcacgccccaggttggcactcaggggtcactggttgggtggatggacaaatgaatgcagggggctctttcayccaacgtgactgatcctccacaggtctctttcagggggtcccaaccctactccccgccaggctctgtgctgtgtgtggggggctgcttctcttccctcctgatttccagctttgcctccagatctgtcttagagatgagaagcacaaggtcggcagaggtgtggtctttgcgtttgtctgctgcctccaatctgtgccccggctgggggaggcggggagagggatgggaggtaggaggtggagaaggggctctatgaatactggaggagtagagaattttagccagagatttcttttttattgcaaggaatgggagagaaggtagtgggacagcaatgtcttttccaagctgacccttggctcaacatgaaaaaaaaaaaggcagcagtggaaagtgatgtcaggataccagtagtgtgtttgaaaggcaggatccc

SEQ ID NO: 807696 - DNA, 621 bp, Homo sapiens
gcaatgtcttttccaagctgacccttggctcaacatgaaaaaaaaaaaggcagcagtggaaagtgatgtcaggataccagtagtgtgtttgaaaggcaggatccctgggtccagtaccaactggccctgcactcccraatccaaggcacttctactgtagtttttcaacaaatttatattctgacctgagctatactagatagtactcagtgctaggatcagggcagagagcaacatagaccccctaggcccccgtcccagtggtgcatatggcctgcagggagatgggggattgagcttgcgaaaagctctgtggcagaaaagcacaggaggctctgagagcacagaacaggccacctggctccacctgggaggtcagggaaagcatctcctatgaagtgactttcaggaagaggctgaggagcaaggaggaggagcccagagacgatggaaagggatggcacggacctggtaggcagccctggttggaggaagcctggcctgcctcaaccacaaagaggctgctatggctaaagtgtaaagataagaatgggcctaggcagctccactgccaatgaaaaaacagaaaggctggggacacaaagaccgccctggaagctg

SEQ ID NO: 807697 - DNA, 602 bp, Homo sapiens
tagaacagactgtaacaatggaggagaagtagaatggacgcactatgctccatatataaatccatatagtaattaaaatatagtcatagctctcaagaatgacagctcttggccaagaagattcctgggctgaaatattaggattgctagattcagatgggatmttaaacaaatttcttgaggtaaatagtatccatctttgtgcctaaaccacatgatattttctcatagtccttgcctttggaaaggtttattgattcatagaacctttttaaacaaatgaggcaatgcagtctaaggaaaaaggaagatgggttcccaccaaccaaaagaagaccttctcccgctcttgctccacagcatggcatgaagtagatgtgtttttctcctactagctgaaaaagtgccaaactagaagtcctaaaaccttgatttccattatagctctaccacattctggctcatgaaccttgggaaagacaaggagtttccttataaataggggtaataatacacacaccacaaggttgctgtggagattaaatgaggtattatgtatgaagcccttgacacactattaagtgactctatgtgtgaagagg

SEQ ID NO: 807698 - DNA, 630 bp, Homo sapiens
aacacatgtttcttgaagatatattcgaaggcaggaaatttattttattttattttactttaagttttggtatacatgtgtagaacgtgcaggtttgttacataggtatacatgtgccatggtggtttgctgcacctgtcaacccatcatctaggttttaagccccggatgcattaggtatttgtcctaatgctctccctcccattgctcctcaccccctgacagtccccagtgtgtgatgttcccctccctgtgtctatgtgttctcattgttcaactaccacttatgagtaagaacatgtggtgtttggttttctattcctgtgttagttttctgagaatgatggtttccagcttcatccatgtccctgcaaaagacatgaactcatccttttttatggcttcatagttttcctgggtatgtatctgccacattttctttttccagtctatcattgatgcacatttaggttggttccatgtctttgytattgtaaataattcttcaataaacatatgtgtgcatgtgtctttatagtagaatgatttataatcctttgggtatatacccagtaatgagattgctgggttaaataaatggtattgctggttctagatcctttaggaatc

SEQ ID NO: 807699 - DNA, 608 bp, Homo sapiens
tgacatcttattagtagaactgcttgtttgttgttcttttcttctgcttgtttgttgtttttgctttctttggtgttgactccatttttgatcagggtttctttactcatggtaagattacaggcaggagttgtgggtctgctcctgcagaaactcctttaggaaaaaagaaccagcattacacaatataaccatgtaacaaacttgcacacatacccccgaatacaaagtttttataaaggaacaacttttcctaagagttccaacaaaagtactaagtctgcatttcatytgctgctggatacctgaccttattattacagctttggagatatgttttctgatgatcaaacaggagttgtatttccatccttgagagatattattacccaaaccttatatgctgaatacaggcaggttgtgattcttcagaggaatatcagggttgagttatccaagaagaaggatgaattcctgtcgggcatgcacaatcagggcccactgaggcagtttttaaaactcaccttcagccatcattatgtaacaggtcagatgtatctgcaaaactgtttagatattatgcagcaaaatatcaaatgtcctgcaaa

SEQ ID NO: 807700 - DNA, 493 bp, Homo sapiens
ccatcattctcagcaaactatcacaaagacaaaaaaccagacactgcatgttctcactcataggtgggaattgaacaataagaacacatggaaacaggaaggggaacatcacacaccggggactgttgtggggtgggggragggatagcattaggagatatacctaatgctaaatgacgagttaatgggtgcagcacaccaacatggcacatgtatacatatgtagcaaacctgaacgttgtgtacatataccctaaaacttaaagtataataataataaaatttaaaaaaagaataattcaaaccaaaggtattgttctgtttgcttaattgatctatataattgcttcaattagcccccttgcttttcaagtgagagatgtcattttggaaatgaagatgctgagagattataaccaaatacatcctttgactctgtcctctagggtcttaatatatacagtactcctctcttatctgaggtttttgtttt

SEQ ID NO: 807701 - DNA, 600 bp, Homo sapiens
agagggaagtaggaagcccaaaggagatggagcacagccagaatcacccacaacattgtaagtcacactaatttcaaaatcattaatgaaaggggtctgatgtctgataaagcaggatgttgagcagagggaaataatgaaaatatgcagcacctatgatgatattctccaaaaggcatgacttctcggggaaatgatgatgagtagcaaggaaaggtacttttgggtgayctcctgggaaaggaaagtacaggacctataagaggaaattaaagtcctgaggaaacaaagaaggatgacaaaatctaaaggtattctaattcatccttcctcacttaaatgttgtactatgctaaaaaaattataaagaagccacctatgaactaaaaatcttagaagacacccaaaaaccgtaactcttcctctatctatacagagccttacttcagcacttcaaaatgaacagaagacaaaaatcattgtaactccatagaaagctctggtaagaagaaaccaaaaaaggagaatcataacaattcaattcatgaccccctctgagagaaccaagagcaaagaacatttacaaaattgtgtaggttg

SEQ ID NO: 807702 - DNA, 586 bp, Homo sapiens
ggaggccgagactgctgtggtctcgtgatggtcagtggcgggaggcttgactggttgctcagagcccaggaagaggaaaaacagtagggttagaacaaggaggcctaggaagcatcacgtggatggacctatggcagacgcatggaattaacctaccaacatccaccaaggagcagccaccacaggagaggtgcaagacaagcaagaagacagagtgacctctccagctgaagtcaaccagcctccttcatcagccatrccagggctaggacaatgagcacctgagtagagtagcagggatggcagggatggaggctatgcaggcagccagatcacgggctccactcgcccaagcatatatagctaccaccactgccatatatccagcctggtagcaacagaaaccaacagagtccctgatactgcattgcttgaagaggccagccagctgctcagtggcaaggtggattacatggtaccccttctgacatagaaaaggacagaagttcatctggagtgaaactgacaattctgagcaagtgcaataaacagaatgtttcggtccccccaacattcatgttggaaa

SEQ ID NO: 807703 - DNA, 617 bp, Homo sapiens
acgggctccactcgcccaagcatatatagctaccaccactgccatatatccagcctggtagcaacagaaaccaacagagtccctgatactgcattgcttgaagaggccagccagctgctcagtggcaaggtggattacatggtaccccttctgacatagaaaaggacagaagttcatctggagtgaaactgacaattctgagcaagtgcaataaacagaatgtttsggtccccccaacattcatgttggaaatcctaacccccaaggtgatggtattaagtagtgggacttttgggaggtaattagtttatgagggtggagcccctataattgggataagtgtccttataaaagggaccccagagagctccttcatcttctttccaccatgtcaggacccagtgagaaggagccatctataaaccaggaagtagaccctcactagacaccaaacccactagcatcttgatcttagacttcccagcctccagaactgtgaacaataaatgtctgatcaaatcaataaaatagcaaaaagctacctccaggagcctgagagggacactctgtccatttgcagggcatggcaggctccgtcttaggctctcagccctgtg

SEQ ID NO: 807704 - DNA, 617 bp, Homo sapiens
acgggctccactcgcccaagcatatatagctaccaccactgccatatatccagcctggtagcaacagaaaccaacagagtccctgatactgcattgcttgaagaggccagccagctgctcagtggcaaggtggattacatggtaccccttctgacatagaaaaggacagaagttcatctggagtgaaactgacaattctgagcaagtgcaataaacagaatgtttcggtccccccaacattcatgttggaaatcctaacccccaaggtgatggtattaagtagtgggacttttgggaggtaattagtttatgagggtggagcccctataattgggataagtgtccttataaaagggaccccagagagctccttcatcttctttccaccaygtcaggacccagtgagaaggagccatctataaaccaggaagtagaccctcactagacaccaaacccactagcatcttgatcttagacttcccagcctccagaactgtgaacaataaatgtctgatcaaatcaataaaatagcaaaaagctacctccaggagcctgagagggacactctgtccatttgcagggcatggcaggctccgtcttaggctctcagccctgtg

SEQ ID NO: 807705 - DNA, 587 bp, Homo sapiens
tgggacttttgggaggtaattagtttatgagggtggagcccctataattgggataagtgtccttataaaagggaccccagagagctccttcatcttctttccaccatgtcaggacccagtgagaaggagccatctataaaccaggaagtagaccctcactagacaccaaacccactagcatcttgatcttagacttcccagcctccagaactgtgaacaataaatgtctgatcaaatcaataaaatagcaaaaagctacctccaggagcctgagagggacactctgtccatttgcagggcatggcaggctccgtcttaggctctcagccctgtgcattcccgtttccatcttctgggtttgcaggggtttgtgagctgctttctcccgttggagtctcaatcgaggtgtggcttttytcttccacagggttgtgtgtgtggtgaggtggggcccctcagctctcagggcagggtgctgtccttgcctcctctcccttattctctccctccagctggctcaccgccgtgggctcagtgctcactgtgtgcatgtcacagagagggctatgggtgagtctgtgtgggga

SEQ ID NO: 807706 - DNA, 652 bp, Homo sapiens
gaattttcccaggttcagtgccctttcacctttcccaccctctgttcttctctgtagcttcactttcactcggactcacctcacgtggccaccatcctatcctgcaggacacggtcacagagagcttagccctgaggttgacttcttttgttccaaaattctcaggcctgggccattgcgtcttctgctggaggcacgcatctagcggcgtgtactcctcccctgatcctcatgttgtgttttctatcaagaactactttctcttaataagacrgagcccattctctagggaaagcctgcaaccaggcatgtagagcctggtagcatctccatcttcaggcttgctgttcaagaatacctgcagcgatgaatcataaagagggtatatttccagatatgcttggagaaagaacagaaggaggcatcattgccaaaacagtagagggcaggccatgaactagcttctatgaattccttagagtcacttgcttaaaaggagaacctcagtccttctggagcactgaaggcggacaagagcagctgcaaccttcaccagatcccaagccctagggctgtggtaggccacgtgctgcagctgcctaggctttccttgctacgcacagagaatgcatgatggccagagccctgatct

SEQ ID NO: 807707 - DNA, 599 bp, Homo sapiens
agagtctagaatacctatttgtctacacagaagctttgttctggcatcagggagcatctgtttcatgttagttccttagaatttcatttcttgcagatataagtttattacgaacagggagactgtcttcttgcccattttagttttcaactgatttttggaatgttttataaaagacgtatttgcccaaaagaatttattactgaccttttttgaaacatttcatgatgcaaaataacctatgccgcagcagtattatgcgctctccctttcccatctctcagtgcctgggaaggtgacaygactgacggcagctgcacatgcctgagccacgctgtgttgtctccagttatactccagccccaagccctagagttagcacttctgagggtgcctggacaaacttgtcttgaagaaggaaccgctcttcttggccttacacagcctcgtgtggactcaggcagctgtcgtcctggctcttggaaaactcagaagagaaaaccaaaggacaagctatggaagggatttgggggaaaatgaagttcaggttccagggagatgactttccctgttcccatcaaagatgatttcaggcataa

SEQ ID NO: 807708 - DNA, 585 bp, Homo sapiens
ctgaggccgaatgtcaaactctaccctgaaatgcaacatagtgggcttagactggtgtaagaaagtatgttttgattcgggttagttgtggaagctatatttcaggtggaagcatagggtacattggggttagagacttagcctatgatattgtaagaaagggggagtgaggggctatattgtccaacaattgtaatgtatatttagttctcctaattctggcaacaatyctgcaaagttagatgcagagattgcattcccttggaagcttactctgagatggagttcggaaagcagaatgcttattgtgaagataaataattcaaattaaagctgttggaactttaaagtattttgagcctctaagggaatgtgaattgtgagacctgagtcatgtagcatgcagctacagcttctgttccttcctgtaaatgataagaaaaggccttgtggcaccagagagcagaccccctcagattgtcacccctcctcagaaagcgctggagcactgttccttagaatgtagcaaactgtgagcaatcacatccctgcaactgtgtactggccatgtatggaaatgtgtga

SEQ ID NO: 807709 - DNA, 585 bp, Homo sapiens
ctgaggccgaatgtcaaactctaccctgaaatgcaacatagtgggcttagactggtgtaagaaagtatgttttgattcgggttagttgtggaagctatatttcaggtggaagcatagggtacattggggttagagacttagcctatgatattgtaagaaagggggagtgaggggctatattgtccaacaattgtaatgtatatttagttctcctaattctggcaacaattctgcaaagttagatgcagagattgcattcccttggaagcttactctgagatggagttcggaaagcagaatgcttattgtgaagataaataattcaaattaaagctgttggaactttaaagtattttgagcctckaagggaatgtgaattgtgagacctgagtcatgtagcatgcagctacagcttctgttccttcctgtaaatgataagaaaaggccttgtggcaccagagagcagaccccctcagattgtcacccctcctcagaaagcgctggagcactgttccttagaatgtagcaaactgtgagcaatcacatccctgcaactgtgtactggccatgtatggaaatgtgtga

SEQ ID NO: 807710 - DNA, 623 bp, Homo sapiens
cctcatatggctgctgcggggtttgaacccaaagcttcctgacagtgaagccatgaccctccatgctaagctgcatcttcaggactgtgactatgtgaaggcactggggatagagaaagaatgagctaaaactcttctcaaaacagaaagcaaagcagagtacttctgaggtcaggttttctcggttcagcacctagaggtcggaagagtcctgtgtgggccatgggtctaaggctctcccattttccagagctctccacaaatgcagccaaggttccagcctccccagtgtcccgacacagggggcacgtctgggccgagttctatatatgcycccactggaggacacagcaataggggctgcaggctgttggccttcatgttggtcatgcggtgtgggcctggcttctctaacccagcacctgtctggcagctcctcatacttctttgaataggatcctgtcagcagctgtcagcgttctgatgacctcccctgtcttctgtgaaaacgtctacatttctggggatttcagacactgttcataagtgcccactcgccccctcatcccccacaaatcagtgtcttggcccagaaatgatagcctctacgttctccgcgtcct

SEQ ID NO: 807711 - DNA, 611 bp, Homo sapiens
tgttgaaacacacattgctgagtcccatgcccaggcttctgacttagtgactttggggcgaggcctgagaatctgcatttctatcagtgttcccaggtgttgctgacactcatttgagaactccttgagaacctctaagttgcagagaactttctgtttccatgtgtcaaggtctgagggtccatcagcatggcaaggggaggggtaaaaggagagggaggaaaggcaagaagggtaggttcactgcacctcaagtcccagcccttcccccagttccacacatccacctggttctttcccttccagagcctctccttcctccttctgtgagacaggagtaatagcacstgtcttaccagctcactgagctttgtgagttactgtgagacagcatcacgggatgctttcctgagctgtaagtgtccatgcaaaagcaaacagccaccgtgaagtcactgcagttttctgtgcttgctctctgtccctgaccctgttcccttgctagggacaggtggagagcacgtgtctctgttgtgcccagtgggcctggcggcatcctgaatccacggcacaggcacaagccgtctgctctccaggttcagcaggggctt

SEQ ID NO: 807712 - DNA, 585 bp, Homo sapiens
aagtttaaattgggtcacattcacactggcgcccaacacagagcctggcccacagtttccatcaccctctccatggatgactcccagctccaacgctagaggcctctaggactccagctgacatgatgcagtgtgtaccctgcacgttgcagcctcttcccaggctggctgtggaaactgagcctcctccagacagcagggctgctccgctcacgcggatcaagtccggagcctcattagtcatgtcrgatgacatagttaacacttggggccagtacagccagttcatcaaaagctcctatgtgcctggctccatcaccgcagctgaggaactactgtatgtggagcaggcagcacatcagaggagcagcaccagagtgcttccaaattggttttgattaattgcatagacatgtctttaattggtgccagtgtagcagccagagaacttatgggaaagcaggatgttatgctttcattccctgaagtcccataaagcaatgaaagatgaggaacagaatcactgctcgttgaaaatgcatcgaccgtgcagacctagaaaacacaaataagtatctgaattga

SEQ ID NO: 807713 - DNA, 585 bp, Homo sapiens
aagtttaaattgggtcacattcacactggcgcccaacacagagcctggcccacagtttccatcaccctctccatggatgactcccagctccaacgctagaggcctctaggactccagctgacatgatgcagtgtgtaccctgcacgttgcagcctcttcccaggctggctgtggaaactgagcctcctccagacagcagggctgctccgctcacgcggatcaagtccggagcctcattagtcatgtcagatgacatagttaacacttggggccagtacagccagttcatcaaaagctcctatgtgcctggctccatcaccgcagctgaggaactactgtatgtggagcaggcagcacatcagaggagcagcrccagagtgcttccaaattggttttgattaattgcatagacatgtctttaattggtgccagtgtagcagccagagaacttatgggaaagcaggatgttatgctttcattccctgaagtcccataaagcaatgaaagatgaggaacagaatcactgctcgttgaaaatgcatcgaccgtgcagacctagaaaacacaaataagtatctgaattga

SEQ ID NO: 807714 - DNA, 518 bp, Homo sapiens
aaagcaaaacatacctctggatggacatgaggctgatgaaatcccagaaggtctctttactccagataactttcaggcactgctggagtgtcggataaattctggtgaagaggttctgagaaagcggtttgagacaacagcagttaacacgttgttttgttcaaaaacacagcagaggcagatgctagagatctgtgagagctgtattcgagaagaaactctcagggaagtgagagactcacacktcttttccattatcactgacgatgtagtggacatagcaggggaagagcacctacctgtgttggtgaggtttgttgatgaatctcataacctaagagaggaatttataggcttcctgccttatgaagccgatgcagaaattttggctgtgaaatttcacactatgataactgagaagtggggattaaatatggagtattgtcgtggccaggcttacattgtctctagtggattttcttccaaaatgaaagttgttgcttctagacttttagaga

SEQ ID NO: 807715 - DNA, 518 bp, Homo sapiens
aaagcaaaacatacctctggatggacatgaggctgatgaaatcccagaaggtctctttactccagataactttcaggcactgctggagtgtcggataaattctggtgaagaggttctgagaaagcggtttgagacaacagcagttaacacgttgttttgttcaaaaacacagcagaggcagatgctagagatctgtgagagctgtattcgagaagaaactctcagggaagtgagagactcacacttcttttccattatcactgackatgtagtggacatagcaggggaagagcacctacctgtgttggtgaggtttgttgatgaatctcataacctaagagaggaatttataggcttcctgccttatgaagccgatgcagaaattttggctgtgaaatttcacactatgataactgagaagtggggattaaatatggagtattgtcgtggccaggcttacattgtctctagtggattttcttccaaaatgaaagttgttgcttctagacttttagaga

SEQ ID NO: 807716 - DNA, 518 bp, Homo sapiens
aaagcaaaacatacctctggatggacatgaggctgatgaaatcccagaaggtctctttactccagataactttcaggcactgctggagtgtcggataaattctggtgaagaggttctgagaaagcggtttgagacaacagcagttaacacgttgttttgttcaaaaacacagcagaggcagatgctagagatctgtgagagctgtattcgagaagaaactctcagggaagtgagagactcacacttcttttccattatcactgacgatgtagtggacatagcaggggaagagcacctacctgtgttggtgaggtttgttgatgaatctcataacctaagagaggaatttataggcttcctgccttatgaagcygatgcagaaattttggctgtgaaatttcacactatgataactgagaagtggggattaaatatggagtattgtcgtggccaggcttacattgtctctagtggattttcttccaaaatgaaagttgttgcttctagacttttagaga

SEQ ID NO: 807717 - DNA, 603 bp, Homo sapiens
atagataattccaaaacacaggacaaaattgagcacactcctacattcattctcaaggtaggttttcaacacagaacatatttatttgtccttaccaggtcaaggcctttttaaaaggcattcagaagttgagtcattaacactatcacttactttttttctgtttcagtgtcctgatttcatcttcactctaaatgtcaagaaaaaaaaagaaaaaaacaaatcatctttaaaaaactgayctctagtgtatcatcttagactcacaaatacaaatgcctattctgagtcaatttaattctttcaagagcataaattctttatatagtacacattcttcaaacaaacagacaatgagaaaaccagaataagctgttaatgactccaaggttataacaaagtcttagggaaaaaagaatacatcattttgcttattttctacctaaatcatcgtaactttgggttataagtgtttactggctaatgaaaggcacaaaaatacaccatggcacttggagttaaattcaagaggacacaaatcatcttacttcccaatttaaccctggagatgtcccataagaaggaggttgctgaatctcagga

SEQ ID NO: 807718 - DNA, 624 bp, Homo sapiens
gtcctgtgtcctgtgggctcttcagtgacccctttttgctaagaacctccaacccacaattcatcggcctgggcacgcctcctcttcctgctgatgacttaaccaaccccaccctcaagcccacctgatgtcttcagtcttcccttcagccccacacagaggctttctgttgggattccctgatcctggcaagcagcagactcctcggactggtccttgctgcatgrtttgagccccactccattccagagtgtctactttgaccgacaggaaacttggcttttgcctgccaaactctggcagagagggtttgcccctgcagccccctcttctctccctccagcttccagcctccagatggtgtttcaagtgcaaatcagacatctgtccctctgcccctcaaatccaggacttgccaggaaggggacagtccttgcacaccagacctctccttccagtctctgcctcctttcatgcttgggctaaaggtggttgccagtaatagaactggtttgggaccatccctttcttctgtcctacacagagaccttaaaatgtgtggtgttgagcatccgtggtgtgcactttggggcctcagcacctaacacaaagaaggagtccata

SEQ ID NO: 807719 - DNA, 635 bp, Homo sapiens
acggctccccacggggaaagcaggtgccaaaggaggagaagtttggaagcagagagataattataaggctgatgggtgagccgtatgatgacaggaaagcctgtgactcctgtgagcctcagtttccccacatgccacgcatgggtgatgacacatgcctcccatgtgcgatgctaggccttccaggtccctcttcagaaatgaagtgctgggagtgcaggaagacagcccccagctgtcagcacttcggcaaratcagctctgctgaagaaagctgccttggccaagatcactccctcttctaggggcagcttccaccaatgactgaccagcttgcagggaggggagacccagcccctcacctcaaactggggcaactctgagtcttgtctcaggtccagagctcccgcaggggccagctgaggccttcatacgactatcacagcctcctgcttcctcccctccctttagtagggatgattccagggacacccctcatcagccagccaggagctgcctctcagggaagccaatctgtgatcaatgccatgtgagaagtggcaaatacttgtcccagtttgtctctatttcctgggcatttctctgccaacatgagcctccctcattgggatcca

SEQ ID NO: 807720 - DNA, 635 bp, Homo sapiens
acggctccccacggggaaagcaggtgccaaaggaggagaagtttggaagcagagagataattataaggctgatgggtgagccgtatgatgacaggaaagcctgtgactcctgtgagcctcagtttccccacatgccacgcatgggtgatgacacatgcctcccatgtgcgatgctaggccttccaggtccctcttcagaaatgaagtgctgggagtgcaggaagacagcccccagctgtcagcacttcggcaaaatcagctctgctgaagaaagctgccttggccaagatcactccctcttctaggggcagcttccaccartgactgaccagcttgcagggaggggagacccagcccctcacctcaaactggggcaactctgagtcttgtctcaggtccagagctcccgcaggggccagctgaggccttcatacgactatcacagcctcctgcttcctcccctccctttagtagggatgattccagggacacccctcatcagccagccaggagctgcctctcagggaagccaatctgtgatcaatgccatgtgagaagtggcaaatacttgtcccagtttgtctctatttcctgggcatttctctgccaacatgagcctccctcattgggatcca

SEQ ID NO: 807721 - DNA, 587 bp, Homo sapiens
tcccctattgtattccccagtgtctacggttcctatttgtaggaacagtggtggtgcataaaaatatgcacaacccaatgtttagcccccacttataagcgagagcatgtggtatttggttttctgtttctacattcrtttgtttagtataatggtttccagatacatccatgttgctgcaagggatcagatttgtttcttttttatggctgcatagtattccatgatgtatatgtatcacatattttttatccaatccacaattagtggggcacctgggttgattaatgtctttgctattgtgaatagcactgcaatgaccatatggctccatgtgtctttttggtagaatgatttattttcctctgggtatatatccagtagtggcactgctgggtcaaatagtagttcaacactcatttctttgagaaatctccaaactgctttccacagtgactatactaatctatatttccaccaacagtttgtaagtggtcccttttcgctgcagcctcacaaacatttgttattttttgactttttaacaaaagccattctgattggtgtgagatggtgtgcgattgtgg

SEQ ID NO: 807722 - DNA, 576 bp, Homo sapiens
tcccaatattcatccatccagactcctacagttcccttcaatgcttggagtcccaggatcttgcaacattccatttaggagtaatttccactctattgtgcatcttttatcaagatttattttaaatcttggtgctattctactcagtctctacaagaagagctcagtgtttttaaaaacctgtgcatatttttgaaactaaaaaagttcttattggtactgagaagggcttcttatttctaattactgggatgaacccaatacttggaaaattctacactataggttcacttcagatgaaaaatatatttatgctttctggtaatttacttgaagtatctttgaagcagtgacaaaagtctgcaaggcagctatrtgttttcaattaagcactctgattttctggagaaaattaaaatatattcattcaacaaccaacaatcacctaaagtgttatgtccagtggctgaggggaatctagctaaacagtttagaaagataagatctacccatttcttaggaaactagtgaaaaagaaattatcagaaatatatttcagaaatgaaaggtagactt

SEQ ID NO: 807723 - DNA, 558 bp, Homo sapiens
tcacactctgaggtactgggtgttaggactgccacatatgaattttggagggataccattcagcccgtaacacagacttactagaatgaccaaaaaaaaaaaatacttttattggatatataaagtgctagtgaggatgtggaagactaggatgctcattcactgctggtggtgatatgtaatggtttgcccactttagaaaacatgcacttaccatataagcagaaatatcactgttaggtatttacccaagagaattaaaacatatattcacacagagactgtatacaattktttatagcagtcatattcataatagcccaaaactgcaaacaaccagaatatccatcaactgatgaatgaattgttgtatatctatataagaaatactacccataaataaaacagtaataaactaccgataaattcaacaggatgtttaaacctcaaaagcattatgcaacatgaaagaagccagatacaaaagtgctacaatgtataagactctccggaaaaggaaaagttctggctctcatcagcactgattggcataatctt

SEQ ID NO: 807724 - DNA, 666 bp, Homo sapiens
ccttactttttttcttttgaccctctaaatataccattccctacatcttctacagtctctacactttttccccactatcatccacctacaagactatcgtatcttatatgcagattcccagtatctgggccatagtacacattcaatacatgttcttaagtaaataaataaataaatggatgaatgaaakaattccgcaaagtgacaagaaaggcagttctgtttatacactcaagtctgggatgtaattaatctatcttgaaattattttactctttcttgtttatagccaatgtattaagatcctacatacagtgtctgaatcctcatttggtgtttcagatgatcacagaaggtgttacataatttagataatatacaaaacaaatttaactcaaatctaaaatgtaaaatacctcatttttaggagaggaagcaaggattcatatatgtagcaagcacagagagttatgatccatttttgcaactctaatagagaaaagaatcattatattctaccctgctatggtaattttagatacagcctatagatatgaaaagatattttggatcttggttgagtgattcatcattcaaagcactaagataatttatataaagtaaaatgtatctgttttgggaatatagccatttcactttatgttg

SEQ ID NO: 807725 - DNA, 568 bp, Homo sapiens
aacaaatatttatggagcccttattatgtgccaggacctcttctagtgctgtgaagaaagcagaaaacaaggcagatatggttattgtcctcaaagaccttacattctagagagtttaaatagataataaaaagtaataataatgactttcaacatttactgggcacattatatgtcccaaacattgtayaaataatataatcttcatagtaactcaataagttagttaagatcattatatacataacagagaaggaaaatggaacacagagaggttaaataacttgttctagacaagacaagtaaaaattggcaaaaccagtctgcttgggtgccgagttcatgcttttaacgattatctcatagcaaaaattctgattaattttgagtggtaagtttgcaaaaacttcaactgtcacttttatctccatataaatggaaagaaataaaaagacaggacaaaaaaggaaagaaagaaaatcagtacattggaagggtagaaggtgagagtcatattaattttcaaatgttttgttaaaaatgcctctgataagttgatatgcaagcg

SEQ ID NO: 807726 - DNA, 613 bp, Homo sapiens
ttgagggttaggattattgagggttatcattcatttatttactcatcaacttatccacccattaaacattcattacacactactaacattgaggcccttaaaaagatcagtcttcaaactttattctagatagctcttacagttcactccccaaaacggtattaataccatattcaaaatggctgaaatacaaagataatttattgtctactttccagatgccagctatctttctttctggaatgattaatagaatgggaagagagacccagcagttgtgtactgtaatgtgtttggtattaaagtagatacggtgcttttagcacaccctggaaaaaattgaataagtatcagaatagtaaccagtcctaacttataacaygatttttggtacacatatcacaagtagcagatgtctgtacaatgctgatatctaagcttttctgtagtattttttctagaatttctaccaccactaaaacacagtagtgccatcttcagaaacacacaaacaataccagtataaacgacttagcctttactgtaaagcattatgttatctggatcctgtccacttccctagaattttctcccaccacttccctcctactac

SEQ ID NO: 807727 - DNA, 469 bp, Homo sapiens
tatacaagatgacctggagcattttgtagtgctaaacacacacacacacaaacacacacacactagaaaagactgagatccaaaggccaaagctgtaacaatttgagcaatggagtaaacattactattggattataacccaccattctaggatctgtggatgcttagttaatcaaacaaagatccttctttgcttattatcaggagcgtacaatgcaatgtaattgtgtaatttgaccaattttgtaaaaataaaagaggatgattgttttgttgtggaaaatataaaggaaaataawccatcttgtttttctgaattttttatatttatttcatccaggtatgctgatggctgtgaggacaagctatatatatatataaccctttattttaagttcgggggtacatgtgaaggtttgttacataggtaaactcatgtcatgggggtttgttgtacagattattttat

SEQ ID NO: 807728 - DNA, 555 bp, Homo sapiens
gaaggggcaaggcttcagaaatgtgggggacattttctttcctcatagaggaatgtaattctattctagatgtgattatagctactctattttttttttctttagaaagacaataggaaataaggtaatgaagacagtaggaaataaggtaatgagcccagactttaggtttgaatagccctgccttcatctctatttctcttgtattcatcattaaacacatagtaacagataactaattttaataaatctgtatactatgtgtcatttaacccataataatccagggtggtgatacagccatgrgttcttgagccagtttatctgttgtatgaatttcagctctgttacttatgcaagttactttaatgcttatgtgcttcagttttctcatctgaataataggatagagacaatacttacaggattcttgtaaggattaagtgaattagtatatgtaaaacactcaggaatgcacatcgaaggtgcttggtatatgttagctgtcattatccactaaatgtaagttggatgaggcaaaacccttttgtattt

SEQ ID NO: 807729 - DNA, 561 bp, Homo sapiens
tattggacactgactgtaagatgaatttacaaaatggaacgagcctgatctctgagtcactacttgaacaaaagttactcaggacagctgctctacctggatctccataagtgaaaataaactgattaatctaaaccacagagtgggtggattgagaaatgtggagagagtgtccaacagtagttacagagtatgtgaaaatcaattaacttgaaaattatagcaaaattgctggagccctggttaaataattcacagtcatactttccctggttgaattgtacttagctgtccagatgcagttattgagaggcagatggaygaattcatcaagatttgtgaatctgctagatgaatgatacaggaagagaaatgagaaaagaggaaaacagtgaagtacaaaacagtttttaaaatagtctatatttcagttgaaaacaaatatatttcctgatttctatacgtttcttcagatgcctctgccattccatatattacgtttgtaggaaagtcacagagaaaagcgaaaatttactttataaaacttacttggtgtcattt

SEQ ID NO: 807730 - DNA, 523 bp, Homo sapiens; identical to SEQ ID NO: 770825

SEQ ID NO: 807731 - DNA, 634 bp, Homo sapiens
actgtaaatcatatcatacaattttaatttgaatatccttcactgtagtcataacttaatgagaaaaagaccagaaagcatactttaaataggaaagatagcctacttgaatgatctctggatagactgcttaaaagattttgtcacagcttttcagtaaatagattggtgatcttgagtgcgtttctatttattctgtgtttcagttttctcatttgaaaaaaagggtcaatattaagtgtttcctttttattgttttayggtcctactctctaactagaggttatggcagagtgcacactatcttggatgctagaatcaacagacaaacagaagcaaaacaaaaataggtttgatctgggcctcaccactaaccagctatgttaacttattttatttcactaatccttggcttcctcatctggaaaatgggaataataatataagaataaaattcaattatgtgcttaccatagtttttgacacatagaaaatgctaaggaaacaatgctattttgtgcagcagttaagagtggagactctagagagcccaactgccaggttcatatcctggctctttctaattaccgtctgtatgactttaagcaaataataataataataatagtgtcta

SEQ ID NO: 807732 - DNA, 636 bp, Homo sapiens; identical to SEQ ID NO: 807561

SEQ ID NO: 807733 - DNA, 588 bp, Homo sapiens
tggttatatttatttctattattatttttttttttgctattgtgaatgagattgctttcctgatttctttttcagctagtttgttattggtgtatagaaatgctactgatttttttgtacattgatttttctatcctgtaactttactgaatttatcagttctaaaagatttttggtaacgtttttaagttgttcgatatacaagatcacgtcatctgaaaagagggacaattggccttcttcctttccattttggatgtcttttatttctttctcttggctaattgctctggtcagggctaccagtactgtgttgaataaaagtggtgaaagtgagcatttttgtcttgttccagttatttgagaaaagttttcaatttttccctattcagtatgatgttggctgtgggtttgytatatatggtctttattgtgtctagatatgtttcttctaaatctaattctttgagagcttttatcatgcaggaatgttgaattttatcaaatgtttctttctgcatttattaagatactcacatggttttttcctttattctgttgatgtgctgtattacatttcttcaattg

SEQ ID NO: 807734 - DNA, 505 bp, Homo sapiens
attatctactgccaactaaatgccattttccctcttctatgggctcctctatatactgagagttgaaagcctgggaattacattttccaaaatgcttgccagcatgtttttggatttgattctagcaatataaagcatctacacaagacttggaaagtgcaatagaaagagaaaccattgttccttctgctgcagtagcataataggaatatggtctgacagatgatgtgtaagaaatgttaccaaatgtttctgaatattcttttgcaaattacccattttgattctgtaagcaactaatattaaaattgatgatattttgcaatccctgygcttcctgatttcctaagtactgccagttctgactttcacttccctagcctctcaaattttttattaaatcctaccgtatctgaattagatcttagctttatatttccccacatgaaatcttagtgatatgtattaatatttatctcaaatgttttctaacttatattttaac

SEQ ID NO: 807735 - DNA, 698 bp, Homo sapiens
gtccagtatttttcttaaatatcgtccaagacacccattccataacacattataaattaatattaaagacaatgttacaattggtgtatatatatatatatatgattatatatatatgattcaagtggtgtatcattgacaactggtaattcattggaaaaaatcaataatatccccatgtcacatttcactgcaaaatcatattgtttagagaatgaattcataaaatttaaaggagaataaratatttaaatatatctttaatataattgtaagaaattataggtagtgatacaatatttaagcttgaaaatataaaaacaaacacagaagaaaatataaatggattctattactgaaaatgtgagtattccacatcacatatcatacagaaaatataatatcaaagaactaactaaaaatattatatgacctaatgttatatgagctaatacactgtcatatataaaggatttatacaaattgataaggaaaacacatataaaatttgaaataaaatttaaaaaataaattaacagttcactaaaacacagcaaataaagtggttagaatgtcaaataatgtcgataacaaaagacatgtcaatgaaactgactatttttacctattatatcagtaatgatttttttaaaaaaaaattcctctacctaccagtcattatcttgaatttcttctat

SEQ ID NO: 807736 - DNA, 698 bp, Homo sapiens
gtccagtatttttcttaaatatcgtccaagacacccattccataacacattataaattaatattaaagacaatgttacaattggtgtatatatatatatatatgattatatatatatgattcaagtggtgtatcattgacaactggtaattcattggaaaaaatcaataatatccccatgtcacatttcactgcaaaatcatattgtttagagaatgaattcataaaatttaaaggagaataagatatttaaatatatctttaatataattgtaagaaattataggtagtgatacaatatttaagcttgaaaatataaaaacaaacacagaagaaaatataaatggattctattactgaaaatgtgagtattccacatcacatatcatacagaaaatataatatcaaagaactaactaaaaatattatatgacctaatgttatatgagctaatacactgtcatatataaaggatttatacaaattgataaggaraacacatataaaatttgaaataaaatttaaaaaataaattaacagttcactaaaacacagcaaataaagtggttagaatgtcaaataatgtcgataacaaaagacatgtcaatgaaactgactatttttacctattatatcagtaatgatttttttaaaaaaaaattcctctacctaccagtcattatcttgaatttcttctat

SEQ ID NO: 807737 - DNA, 698 bp, Homo sapiens
gtccagtatttttcttaaatatcgtccaagacacccattccataacacattataaattaatattaaagacaatgttacaattggtgtatatatatatatatatgattatatatatatgattcaagtggtgtatcattgacaactggtaattcattggaaaaaatcaataatatccccatgtcacatttcactgcaaaatcatattgtttagagaatgaattcataaaatttaaaggagaataagatatttaaatatatctttaatataattgtaagaaattataggtagtgatacaatatttaagcttgaaaatataaaaacaaacacagaagaaaatataaatggattctattactgaaaatgtgagtattccacatcacatatcatacagaaaatataatatcaaagaactaactaaaaatattatatgacctaatgttatatgagctaatacactgtcatatataaaggatttatacaaattgataaggaaaacacatataaaatttgaaataaaatttaaaaaataaattaacagttcacyaaaacacagcaaataaagtggttagaatgtcaaataatgtcgataacaaaagacatgtcaatgaaactgactatttttacctattatatcagtaatgatttttttaaaaaaaaattcctctacctaccagtcattatcttgaatttcttctat

SEQ ID NO: 807738 - DNA, 599 bp, Homo sapiens
aattctcattcagtggaggaatcagtcttggtgggagttgtaagtatagagccattccctatcctggtctcatgaacaatttccaagggataactgattgtctgatctgtaggtcagaaatggaaaacagaggaaatgaatgttgaaaggctttggattagacatgaggtatttatcttgatgtaaagggtacagtctgacatggagtgtcaattctaagaggtagtgtacaacgttgagaagacagaatacccatgggcttggtcctatgaaacctgcaaactctcttcattccaggactttcctggttcatggtggaagaygctttctgagacttgaaaagagtcgtatctcatctatagcctactttctttttcaggttcagcaagcatttgaaagtccggaggcaacagtccaaatgcccaccatagaacgagtgtccatgacaagatatttctacctctttcctggcaattgaaaatggttaagcattgagagttgttggtggtgtatgaaataaatgaaagtgtgatattggaggtgagttccgatgaccaatgacagttgagtacttggatggccaaattagtgtactttgt

SEQ ID NO: 807739 - DNA, 641 bp, Homo sapiens
acaagggctgagaaattggaggttgctgggaaaagcagctctactatagaaagggtccctttctaagtaagtcacccttgggagttcagtctgtgaatgtcagtagaaggatgaagggaagcaggttacccagttctgatgtggggcatactattgcacactgctttctgcaagcagcacttagtagcactaattgaatccaaccccactgatcatttcagataccaacccccatctggcctatatctactcaggaataatggctgtgggtgtcatagaggtaatttgaaagacattttcctctactgctttaagtgaaacctcaagaatatttwaaaaaaccctcagcagtcccaaaatgtcttattcagggttaataactttctttccactggccataatggaatttagtcctcatttatgtgttcttgcttttatgaatcccagaaagatggcctgattttaaagcttgtccttgactcttcttcaagcagcaggatccagatcattcactctgccaccataattttaacataaaacactcctaaactgtgtctgagacgattacaaatttctttatcttgcagtaaaagtaaaatctcaaaacttttacaattcttaatagtatttaggttacccta

SEQ ID NO: 807740 - DNA, 622 bp, Homo sapiens
aatataagtttatagaaacatataagctaccaatatcctcttaaaagggactgttaatgtaaaaaatgtttattctgccttttgacatattttctgtctttgctttcttcacttttcataatctttcactgtctacatgtaatgctatcagtgtctttagaagcgttattcaacttgtagcatggctgcaagataaaggtctttaaaaatatcattttagtgaagtacgaaaagttggccatcactgaataatggatcaggataattgtgccattgcttcttactcaaaggttcacctatcctaccagagtctggatgtatggaaacaactggtgtttagtcagaacatttgctttccttctggggttgccagatttcrcaaataaaaatacatagtaccaaattaacatagactttcagataaaccataagtaatttttagtataaatatgtctcatacaatatttaggacagacttatactaaaatattattcatggtttatctgtcgttcagtctaattgggcttcctgcattttatctggcaactgtatttcttttacctcttaagttaataaaataacaaactcagtcttatttccattagctcttgtgggattcag

SEQ ID NO: 807741 - DNA, 541 bp, Homo sapiens
aaggtcttcaggggagaaagggtcagagaatgaccttcctatgttttatgtcctgctttatggaaggaagagtgaggggaatttcagtttctatgacctgcttcaaaagagaggggacaggagcaggtcagagagatcttcctgcttccgcagattttgtcaatttccttaaatgkaaactacttagtatgccatggtgccatattttgggggtagcatttcctgcacaccaccagaaagaaccaattatcaaggctgctctagattcaagtacaggggaattacactccgctgcttgactggaaagcagtaagtttaagaagaggtgggaacagacacatgtgcaactgtgaaagaagatccagcagtttactttgtgatactttttgggggtctgtaaaccaaattgtacttcactggatgttgctcttccctgtctagtcattctacctgagagcagttgacaaagactataaggctctttaccctatccgcccccaccaaaaaaggtatttttcacatgagaatggaggcttcacaa

SEQ ID NO: 807742 - DNA, 589 bp, Homo sapiens
tagtaccagtagagtggggcattgctgaaaagatacccaataatgtggaagtgactcagaaactgggtaacaggcagaggttggaacagtttggagggctcagaagaagacagggaaatgtgagaaagtttggaacttcttagagacttgttggatggctttgcccaaaatgctgatagcactacgaacaataaggtccaggctgaggtggtctcagatggagatgaggaagttgttggcaactggagtaaaggtgactcttgttatgttttagcaaagaaactggtggcattttgcctctgccctagagatttgtagaattttgaacttgagaaagatgatttaggrtatctggtggaagaaatttctaagcagcaaagcattcaagaggtgacttggatactgctaaaggcattcagttttataagggaagcagagcataaaagtttcgaaaatttacaggctatgtgatagaaatgaaaaatcaattttctggggagaaattcaagatggctgcagaaatttgcataagtagcaaggaacctaatgttagtccccaagacaatggggaaaatgtctccaggtcatt

SEQ ID NO: 807743 - DNA, 634 bp, Homo sapiens
tctttctctattaagcgaatttagtactgtactgtacacgtttcctgcttttagtgcttgccaagaatggcatttgagcacctagtgatctttttaaccactgatttttggctgtgtctcaggttcacaaggtgaaaatagctacaccattttccaatgtacagtgcctatttatttacctagtaatatagtgcccctttggggtagttggcttattgattagttactgccttagacaactgtaaaatgattaccaccaccaagctaacatatycatcacctcacatagttatttttttgtagtaagaacatttaaaatttacttctagagcaattttcgagtgtacaatacattactattaaccatacgattactattaaccattccatgccatacaatagatccccagaatttattcatcctgtctaactgaaactttgtactctttgatcgatatctgtccatctgctacctgcttcagtccctggtgactaccattctactcttgctcctgcgagttcaaaaattttacactctacatataagtgagatcatacagtatttgtctttctgcgcccagattatttcacttagcataatatcctccagcttcatccatgttgtaagtgacaa

SEQ ID NO: 807744 - DNA, 495 bp, Homo sapiens
agagttgatagatgttaggaggtaaaagagagtggaaggcgagaggaagagagaatcactaatatctccagttccaaaatagggagccgaaagaaattgtctgtttgagtaataaatggagatttaagtctgaggttgtagaggcaatcagtgggaggaactgagaacagcgatgcaactgtattgtgagggaaagggtagaggcggtgggaggtggtacaagtgagctatcatttatctcttacagcaggaagttacaaataatyggtagagatgatacagcatgaaatagtggtttaagcatactatgtagggcttcataggtaactaccagagactcatttaaaagaagctccctctagggagcgggagcacagatggcgatgggtgaaccaaatacatgatgtttttccattataagcttgcggtgataaataatttatgtatgtatatataaattttgtatccggaggaaatttctgaacgatttttgct

SEQ ID NO: 807745 - DNA, 596 bp, Homo sapiens
aggttcatccatgttgtcacaaatgacagagttttcttatttttaggctaaacagtattctattgtgcatatataccacattttctttattcatccattgataggtacttaggttgactccatatcttagctattgtgaataatgctgcaataaacatgggagtgaagatatctcttcaacatattgatttcattttatttgtatgcctaccgatagtagaattgctggatcatatggaagttctatttttaattttttgaggaaacttcatactattttccattatggctttactaatttacatttctaccaacagtgtcctaggattgcattttctctgctcttgctaacacttgttatctcttgtcattttaatcacagctgttttaggtggggtgagaagatctctttgtggttttgacttgcatttccctgatgcttagtgacaagcgttttttcrcataccttttggcaatttgtatcttctttggagggatgtctattcagatcctttgccatttttaaattgagtttttttttttcactattgagttgtttgagttccttttataatttgcatattaattttttaatc

SEQ ID NO: 807746 - DNA, 609 bp, Homo sapiens
caatgttgtgtagttctccccctgtttacttttactagttatatagtttcagatattatgtttctttaatccgttttgagttgattttttgtatatcatgtgagtgttttaaaaagacagcatggctggatagaacattcttattgccagtgcttttctttcagcactttgaaaatatcatccgactcctttctgtcctgcaagatttctactgagaaatctgctgacagcccatggaaattcctgtatattttatgaattcccttgtatatgataagtcagttttcccctgctgcttgcaaaattcttttgcaagaatttttgacaatttgattagaatgtatctcattgtgtatttctttggkttcattctatttgggatctgttgggcttcctgcatctgaatgtccattttcttcagaggagttgagaattttttgaccatcatttatttgaattagctgtatagctctttctttttctattctccttctatgactttcctaacccagtgcatatactggtccacttaatgaaccagtgcatatactggtccacttaatggaccagtgcatatactggtccacttaatggtatcccataagtccc

SEQ ID NO: 807747 - DNA, 591 bp, Homo sapiens
actgcagtgaatccacttgtaatactatataacccagaactgtattcccccaaaagtctatctttgacaaatggattataaagagacrcgtaggctaagaaaatacttactcaaggagttgggcataagcatacataactccctagaagttccttgatttcattatgagaaatacacagttccatatatccatgcgtgtttattttgctctacataggaagcaagaagttttctaagatttggctgcagatggaaaattatttattgtcttaggttctttattttccctaacaaaataatttaaaataaaaattatatccaagttctcagtcaaatgatgaagtcctacaactaaagaacctatcagcatcttggactattctatgaccacttgtctagagtaatcagaccatggtctgaggctctggcaaattcttctgacctagtcagggaactcatgtacttctggacactagtgcttgaacaggaggcttcagggttcagaaaggaccaataataccatacagactccccacagattctttacctcctctttgacagtgccaaactcaggatccagtgctttgaagt

SEQ ID NO: 807748 - DNA, 614 bp, Homo sapiens
tcccaattctctaggatggtagaatcaaatcaagtatcatgatctttatccctctatctttaggaagctggcttctaacccagactaaataagcagactaagtaagaaaaatcctataacctctctcaatagttggttgcagagtttaaatatttctatttcaaaaccatttcccttaaaagggagcacattaactttctggaaggtttttgacataatttctcaatagggattagctgcagtcattgaatagtaacaaagatcaattagtcatagtcctggagtgagtgccaggctgcaatccattgtatcagcaggagctattttgaacacttaaaaraaaaaaaaaagattttcccaaatgcagagccatatttgcatagttatcaggattggaagtactattattgtacctgtatctagtagtagatcatgacttgtcctttataataccactgaatagtggcaaagctgaaactagaatctgtctctctggcttatctcactatagtgagatctcactatactgcttctcaaacacctttcagctgctcatgtgggcagtaactaatgaggttctgccttcctttccttctttacagtgaaatacaatg

SEQ ID NO: 807749 - DNA, 609 bp, Homo sapiens
aattttatcaaatgctctttctgtgtctgttgagatgattatgtgttttttgtcctgtattctgttaggacattattacattaatggattttcagatgttaatggaaatttgcattcttgggataaatcagatttgatcatggtgaatgatcctttttatatattgctggattttatttgctagcgttttgttgaagatttttacatctatattcataagatattagtgtgtacttttttttttttttcttctaatgtcgtctttggttttggtatcaggctaatcccggccttayagaatgtgtggggaagtgtttcttgctcttctttgatttttctttgaaagaatttgtgaggaattgatattaattcttctttaatatttggtagaatactgacgaagccatttgggtctaagcttttctacatgggtagtttttaaattaccagttcaatctctttgttagttataggtctattcagagtttttgtttctccttggttcagttttggtagcttgtgtctgtatggttgttcatagtattccctataattctttttacttctgtaaggtagatagtaatgtcccctatttcactcctaatttta

SEQ ID NO: 807750 - DNA, 575 bp, Homo sapiens
tgtaaggctctgtgattataatgtcaaaaaagccatggtccttcaccttaagaaacttggaagctacaggagaaacagagcaatgacaccacagtactgtatttcaaggatgatgacagggggatgcccagggtcctagagaattaaagaaagaggcatttatatcagactaggagatatgtgagggtgagaaaaggcttgagtatgactattggactgtaaacagctaaatgtagttattagctaaatgggaagaaatgagagaaaggcattttcaggcagaagaaactgtaggtttaatgtcacagaacaccttggtgggttcttggaactacaagtggttcaaaatggctgtaatatgaattgcactgaagggtaatggtgggtagatgaggctggggaggtatggcagaaggcagatagtgaaagtcttsgtatgttaaactgtgattcaaccagttttaggagtacagttgattctcattgtttgtcatagttatgttctagaatgtcaccgcaaacactgaatcagtgaatactaaaccattgctcctaggttcctgccagccgctggt

SEQ ID NO: 807751 - DNA, 565 bp, Homo sapiens
atatttattgagaacctgcaagtactatactagctgctggggatccaaagataagatgtgatcccttatctcaaggagtttacaatccagtggaggagacagccaattaaagtcaataattattatatattataatatcatgatagatatatgcacataatactatgagaacacattgagggacatcaaaatcaagtgtaacaaatcaagaaagcttcccaaaggtgctgggttttaaaggatttatagtttgttagacaaagaatatgcaaagcaatccctcacaatgtattagttgtcttcctaaaatccaaatatgattatactagccctcctgctttttttttccccatggctgcccatttcctttacaagatcaaggccaaactccttagcatgttygaattcctttccaatccagtcctaacctgtcttctcctatcactctccccgctttctcctatgctctctccccaactctgtatagttggatctcaaccatgcaggccaaggaacactatttacaccttcacatatatgcttgcaaagtgatgaacaggaaaag

SEQ ID NO: 807752 - DNA, 554 bp, Homo sapiens
aaatgttgatttttttcttttggctgagcaattaataggcaatggatgaaatcagcattttccaacacccctcttccccacgcacattgatgatgcacaggcagctcatttggacgaattcccaaatctttttacctggccgtgtggttagtgattggtactattagcaatcagctaactacactgcctagtaactagactcatagaaaaaattgcagtctcaagttggtaccccaacacgttgtgacaggcaggcaattcattggttgagttggagctcaactgagttgctagcttggtgaatactctactagacgatggcaaatagacacagtgaatcacagcatacagtattaacygttacatggatggaggggcttcacctccagggattttgctttcctggcatgagactgtttcatcttctgtgactcctagagagagctaacagtttaactgtatctggagaaaccgcgggtttcctcgcacttgcagcgggcgctcgcggggcaggctgcgcaggacccacgccgacgccgcgcttctcaggcatc

SEQ ID NO: 807753 - DNA, 633 bp, Homo sapiens
aggaaaaatgaagggtattttttagaagcagtaaggattcctggaagacagtggcagcatttctgggtagggggttcacaggtgttgttgaggccctgctgcatgccaggcactctgtaccataggcaggctccatgctgatcatggagataaacacatacacaaaagacacaggagccctggcctcatggagctcatagtccctccaaggatacrgtcgaaaaagaagactggagagcccccagtgctgaccatttaaggagcctggggacttgggggttagcaatggagagttaatgacagtttttaatgctgcaaggttatgatcagcgccttttagaagatttatctggcccgatagtagaagaaaaacttaagaagaaagacgggaaatattgaaatttcagttaagaaactactgtagtaacccagatgagagataattaccaaaatcagagcagtaggtaggaagaaaaatagggtatgaatgcaagagatactaaccaagcagactacactcaatctgggaactagcaagggcaagaaaagcatcgaaatggatctgagggcgggcacagtggctgacgcctataatcgcagctctttgggaggccaaggtgggaagatcgcttg

SEQ ID NO: 807754 - DNA, 633 bp, Homo sapiens
aggaaaaatgaagggtattttttagaagcagtaaggattcctggaagacagtggcagcatttctgggtagggggttcacaggtgttgttgaggccctgctgcatgccaggcactctgtaccataggcaggctccatgctgatcatggagataaacacatacacaaaagacacaggagccctggcctcatggagctcatagtccctccaaggatacagtcgaaaaagaagactggagagcccccagtgctgaccatttaaggagcctggggacttgggggttagcaatggagagttaatgacagtttttaatgctgcaaggttatgatcagcgccttttagaagatttatctggcccgatagtagaagaaaaacttaagaagaaagacgggaaatattgaaatttcagttaaraaactactgtagtaacccagatgagagataattaccaaaatcagagcagtaggtaggaagaaaaatagggtatgaatgcaagagatactaaccaagcagactacactcaatctgggaactagcaagggcaagaaaagcatcgaaatggatctgagggcgggcacagtggctgacgcctataatcgcagctctttgggaggccaaggtgggaagatcgcttg

SEQ ID NO: 807755 - DNA, 573 bp, Homo sapiens
ctggaacaggctaccagggtctaccagtgtgagaggcaggaatttctgcaaggctcttcagcttcatggctgcctcaggttcgtggtaaccaggaatacagtgtgagggtctcattagctccaggaaaaggaaggccagtgatagaccgctagctaaataattaagcgaaygtgcaatcacccgtaatatttacagaccactcactatgtatgttccaaacatcgttctgagctctccccattcacgaatttgtcccatcctcacaacttacttttcttaaattgaggtaaaaatctatatgacttaaaatttgccattttagccattttaaagtgtacaagtgagtgacttccaggatagttccaatgttgtgcaaccatcaccactatctaattccgggacatttcaaaatacccagtacccaagaaacagttactcacaaaaacctacttttgagggaggcgccccctactgacaaagcttaacatcacgctctctcggtagaaaggagacatcttgagagaccagtcagtattgcagggcaggtcccaaaagatgaactcggaactgag

SEQ ID NO: 807756 - DNA, 573 bp, Homo sapiens
ctggaacaggctaccagggtctaccagtgtgagaggcaggaatttctgcaaggctcttcagcttcatggctgcctcaggttcgtggtaaccaggaatacagtgtgagggtctcattagctccaggaaaaggaaggccagtgatagaccgctagctaaataattaagcgaatgtgcaatcacccgtaatatttacagaccactcactatgtatgttccaaacatcgttctgagctctccccattcacgaatttgtcccatcctcacaacttacttttcttaaattgargtaaaaatctatatgacttaaaatttgccattttagccattttaaagtgtacaagtgagtgacttccaggatagttccaatgttgtgcaaccatcaccactatctaattccgggacatttcaaaatacccagtacccaagaaacagttactcacaaaaacctacttttgagggaggcgccccctactgacaaagcttaacatcacgctctctcggtagaaaggagacatcttgagagaccagtcagtattgcagggcaggtcccaaaagatgaactcggaactgag

SEQ ID NO: 807757 - DNA, 573 bp, Homo sapiens
ctggaacaggctaccagggtctaccagtgtgagaggcaggaatttctgcaaggctcttcagcttcatggctgcctcaggttcgtggtaaccaggaatacagtgtgagggtctcattagctccaggaaaaggaaggccagtgatagaccgctagctaaataattaagcgaatgtgcaatcacccgtaatatttacagaccactcactatgtatgttccaaacatcgttctgagctctccccattcacgaatttgtcccatcctcacaacttacttttcttaaattgaggtaaaaatctatatgacttaaaatttgccatttkagccattttaaagtgtacaagtgagtgacttccaggatagttccaatgttgtgcaaccatcaccactatctaattccgggacatttcaaaatacccagtacccaagaaacagttactcacaaaaacctacttttgagggaggcgccccctactgacaaagcttaacatcacgctctctcggtagaaaggagacatcttgagagaccagtcagtattgcagggcaggtcccaaaagatgaactcggaactgag

SEQ ID NO: 807758 - DNA, 573 bp, Homo sapiens
ctggaacaggctaccagggtctaccagtgtgagaggcaggaatttctgcaaggctcttcagcttcatggctgcctcaggttcgtggtaaccaggaatacagtgtgagggtctcattagctccaggaaaaggaaggccagtgatagaccgctagctaaataattaagcgaatgtgcaatcacccgtaatatttacagaccactcactatgtatgttccaaacatcgttctgagctctccccattcacgaatttgtcccatcctcacaacttacttttcttaaattgaggtaaaaatctatatgacttaaaatttgccattttagccattttaaagtgtacaagtgagtgacttccaggatagttccaatgttgtgcaaccatcaccactatctaattccgggacatttcaaaatacccagtacccaagaarcagttactcacaaaaacctacttttgagggaggcgccccctactgacaaagcttaacatcacgctctctcggtagaaaggagacatcttgagagaccagtcagtattgcagggcaggtcccaaaagatgaactcggaactgag

SEQ ID NO: 807759 - DNA, 544 bp, Homo sapiens
ttccagctctactactctcgccagttggagtaatctgaacctacttaggcccccaggacctttcaccagccaagtacaacctccttgtcccactcaccaggtaagaagttacctttgagatggatttcacagaagggaggagaagtgcagagagctaatggccatgattataatagaaacaggatagagagaccacaaggttacagaacatcccttaagacctcagagcagtaggaagctttcccacctacctacccagagcagaaggaaggttgacaacgtgaacctactttctactacctgggaaatgtatgtgattgrtatggagcgaacaggcttcagagcaagaatacctgggctctaccctggcctcacctcctattactggtatgatcttaggcaagtgatttcatctttttgtttctccatttcttaacacaataagtggggttcattacaatgtcaatctcacaaggtagttgtgagtaccaaaaagcgtggtgcatatcaaagttcctcgcaaaactttgatactgaaagcatg

SEQ ID NO: 807760 - DNA, 656 bp, Homo sapiens
tattaataaatgtattaaccttgttttttagtcttagaaattcactttttaaatttcagtatttaatacttgatggtataattttgatcacttcagaattctcttgcaacctttacattcttttgtatcatttaaaattattataactctttaggcacttttactatcttttcmtcaatgttcaaatggcttaactgctgcaattttatatttaaaacatataataaaatcttggtgtttcatattgatcttattctttttttgaaaatttcaaatatatgaatgtatatgagatttgaggtaatggcattatgttaaaaattttaattaaatatataaaaatagtttttagaatgataaatcttttcttaagaagacaagctaccccatagcttttgaaaaaataaatctttcatataatgttgccatgaaaaccaaacaattaaaactgcagaaatttcaaaagtgcttgaaaccatcctatttcatacaaattgctgtatatttgataaataattagaagaattggcaaacaagtaaatatactactgagaaagttgtgaaataatctaaatatatgaaggttggccaaagaggaaacaactcttaaaataataggaaagaaatccatataaactgaaaaatcccattacgaa

SEQ ID NO: 807761 - DNA, 656 bp, Homo sapiens
tattaataaatgtattaaccttgttttttagtcttagaaattcactttttaaatttcagtatttaatacttgatggtataattttgatcacttcagaattctcttgcaacctttacattcttttgtatcatttaaaattattataactctttaggcacttttactatcttttcatcaatgttcaaatggcttaactgctgcaattttatatttaaaacatataataaaatcttggtgtttcatattgatcttattctttttttgaaaatttcaaatatatgaatgtatatgagatytgaggtaatggcattatgttaaaaattttaattaaatatataaaaatagtttttagaatgataaatcttttcttaagaagacaagctaccccatagcttttgaaaaaataaatctttcatataatgttgccatgaaaaccaaacaattaaaactgcagaaatttcaaaagtgcttgaaaccatcctatttcatacaaattgctgtatatttgataaataattagaagaattggcaaacaagtaaatatactactgagaaagttgtgaaataatctaaatatatgaaggttggccaaagaggaaacaactcttaaaataataggaaagaaatccatataaactgaaaaatcccattacgaa

SEQ ID NO: 807762 - DNA, 656 bp, Homo sapiens
tattaataaatgtattaaccttgttttttagtcttagaaattcactttttaaatttcagtatttaatacttgatggtataattttgatcacttcagaattctcttgcaacctttacattcttttgtatcatttaaaattattataactctttaggcacttttactatcttttcatcaatgttcaaatggcttaactgctgcaattttatatttaaaacatataataaaatcttggtgtttcatattgatcttattctttttttgaaaatttcaaatatatgaatgtatatgagatttgaggtaatggcattatgttaaaaattttarttaaatatataaaaatagtttttagaatgataaatcttttcttaagaagacaagctaccccatagcttttgaaaaaataaatctttcatataatgttgccatgaaaaccaaacaattaaaactgcagaaatttcaaaagtgcttgaaaccatcctatttcatacaaattgctgtatatttgataaataattagaagaattggcaaacaagtaaatatactactgagaaagttgtgaaataatctaaatatatgaaggttggccaaagaggaaacaactcttaaaataataggaaagaaatccatataaactgaaaaatcccattacgaa

SEQ ID NO: 807763 - DNA, 642 bp, Homo sapiens
aggggcactgtttcttgctaggatcctccaattcttatccataccattaagcacgcttcaaattttaatttttagattttcaaacatacctataatcaggctgatatggtttggttgtgtccccacccaaatctcatcttgawttgtagctcccgtaatccccacatgttatgggaggggctggtggcagataattggatgatgggggcaggttttcctccatcatcatgctgttcttgtgatagtgaataagtctcatgaaatctgatggttttataaagggcagttcccctgcacgtgctcccttgcccaccgccatgtaagatgtgcctttactcctccttcgccttccaccgtgattgtgaggcctccccagccatgtggaactgtgagtcaattcaacctctttcctttataaattacccagtctcaggtatgtgtttattagcggtatgagaatggactaatacacaagtagacttcatgaattgatctagaggggagtgagaggtgaagagagatggtggcctggacctcgagtgacctctgcctcccacaagcccagtgccttcaatacattcttgagtagatatgccttatcatctgggaggtgataggagaggatctgacagtctccaaggg

SEQ ID NO: 807764 - DNA, 642 bp, Homo sapiens
aggggcactgtttcttgctaggatcctccaattcttatccataccattaagcacgcttcaaattttaatttttagattttcaaacatacctataatcaggctgatatggtttggttgtgtccccacccaaatctcatcttgaattgtagctcccgtaatccccacatgttatgggaggggctggtggcagataattggatgatgggggcaggttttcctccatcatcatgctgttcttgtgatagtgaataagtctcatgaaatctgatggttttataaagggcagttcccctgcacgtgctcccttgcccaccgccatgtaagatgtgcctttactcctccttcgccttccaccrtgattgtgaggcctccccagccatgtggaactgtgagtcaattcaacctctttcctttataaattacccagtctcaggtatgtgtttattagcggtatgagaatggactaatacacaagtagacttcatgaattgatctagaggggagtgagaggtgaagagagatggtggcctggacctcgagtgacctctgcctcccacaagcccagtgccttcaatacattcttgagtagatatgccttatcatctgggaggtgataggagaggatctgacagtctccaaggg

SEQ ID NO: 807765 - DNA, 707 bp, Homo sapiens
aataggagaggtcataattgtcaccatgcctgctttctcaacctaaggactgacaagcatctagccttgagccaaaaaggctgcaaatacatgtgtatttagtagtgggctgttgcactccagagctggaacacggctttgtactttgattctccagcctccaggagactcataaatcctgcactccatgatccaaaatggtgggtttccttgaaaaatgtaattaatataattaattatacatagattcaaaaatattcactttgtagaataaacagaactgacttttgttatacagtttagaaagttgatattaggtggttttcacagttccattaaaatttttgataattaagagcttttatttactttcaaaatttggtggtaatcctcagtcttcctgtgtaaggaattacatttaagaaaaacagtattgcataaaggcaagcagaggattttgagagatgaagataaagacmaagagatattaatgtctctgaacctgaccaacacctgaaaataataataataatgataagggtacatctagtgctccagggcttcattaaaaaaaaaaaaaccttaattgtctcaggaatctcaaaaataaggtagtattataatacttttacatagattcaagggatttgctcaagatcacaattctattcagtatcagagtaaggactggatccaagcatcctgac

SEQ ID NO: 807766 - DNA, 465 bp, Homo sapiens
agaagaagagtatactatacttccatactccctcctcatcctttgtgctagttttgtcaagtattttatttctacttatgttatggaccacactatgtgtgtgtgtatctctcttaggtatttgaaatacaactttattctgtttctaaatgaaaaggaatgggaatggcagtaaaataagatcctcaccactgaatattatgatgttaagtattaggttggtgcaaaagttactgtggtttttgcaatactttggcaaaaactgccattacttttgtrccaacctaatatatatgaaactccagaaggaaacaacaaaaacagctaaatatgcaggtccaaaaattgaaggtatttttgaagtccattcatctccttcagcatcccaaagataaagcacatgttctgcttagctacacaataaaatggcaaacatgctacaccactgacagcacagcacagatg

SEQ ID NO: 807767 - DNA, 547 bp, Homo sapiens
cgagctcaggagtttgagaccaacctgggcaacctgatgaaatcctgtctctacaaaaaataacaaaaattagctgggcatggtggcacacacctgtggtcccagctactcaggtggctgaggtgggaggattgtctgagcctgggaagtcaaggctgcagtgagctgagatcgcaccactgcactccagcctgggtgccagagcgagaccctgtctcaaacaaacaaacaaacaaamaaaaaaaaccattctcactgccgcgtggaggatggatttagggggggaaacaggaagacctgttaggaggcttgtgtggcagcccaggaaagagatgacagatgatggtggcttggattagggggagcagtgatggtggagagaagtggagggattgagggtatattttgcagataccagcaaaagtcctctgggttgaggaaactgtatgtgaactctgtgaaaggagaaatgaattaactccaatggctcaaaaaacttggactttgtcaactggaccacatgatatgtctggaattttctgttatg

SEQ ID NO: 807768 - DNA, 561 bp, Homo sapiens
gatttttgaaaaatctccagaagttagtattattccaatttaagttacatttaccacatatttactactttcctgatgtttttccttttttttttttttgagacgaagtctcgctgtgttgccaggctagagtgcagtggtgtgatggcttactgcaacctccgcctcccaggttcaagccattctcctgcctcagcctcctgagtagctgggactacaggtgcgtgccaccacacccagctaatttttgtatttttggtagagatggggtttcaccatgttggtcaggatggtctcaatctcttgacctygtgatccgcctgcctcgacctctccagtgctgtgattataggcatgagccaccgcgcctggcccctgaattttttcttgtaccttagaacatctatctgcaattttccttctgcatgaagaacacgtgttagaatttcctttgaagaaaatgtgctgatgacaaactcagcttttgtttatttaaaaataactttatttacttttatcttgaattatttacttttatcttgaaatatgctttccctgagt

SEQ ID NO: 807769 - DNA, 556 bp, Homo sapiens
tatctatctatatctatctacctatctcccattggttatttctctggagaactctaactaatacaagaacatatcagatatctccagtaaagtgactaaaatggtggatcatgtaaacccacgaagaaaggggacacactgtgttggaaaataattaattcttaggtcatattcatatacattttcactttatgaatgggggttaartaatttcaaggtaattcgagatgtataaaagcagtctcaaagtctgaactgaaaatattaaacgtgtctcagtgagaacataagatgtttgcttgtgtacaaggtgttttctgcctgactcacactttcactgagactgtagctcccctgtaaataagaacacttccctacaagtccttctggacccaagcgagggcaaagttacaaaatgcaagagtcgattttctctttcactttcttgtcacttaattcctattttcagtagacagaaaggccggtggctatttacaattaatatagtttcaatataaaaattcttaccagttgatccaagagtttacttctagga

SEQ ID NO: 807770 - DNA, 646 bp, Homo sapiens
ctcccataagatgattctggtttggtagtccagagacctgagttcaagacctttctaagggccgggtgcaacggctaatgcctataatcacagcacattgggaggccaggtgggagtatttcttggacccaggagttcaagaccatcctgggcaacatcacaagacctcgtctctacaaataaaaataaaaattaaccaggcaggggtggcacgcacctgtcgtcccagctactcaggaggctgaagtgggaggatcgcttgagcctgggtggtctaggttgcagtgagctatgatcacaccactgccctccaacctggacaacacagtgagactcaacaaaaaaaaaaaraaaaaaaaaaagaaatatatctgtgaaactcttctaaattcattgcttttaaaatacaacactacaagttatcaatcttgcaagtccaggtttcctcctttttaaaagtgtggtaattttaggtggtgaagtatacagagaaccctaggccacagcatgaatctgtactctaatctctgcaccccctgctcgctctgtggcatttggcatacatgcctctttcctgtctaggtctcaatttccttgtctataaagaatggggataaattttatcatttataaagtccctgccaat

SEQ ID NO: 807771 - DNA, 634 bp, Homo sapiens
gatgacacaagaagcagatcttatttctcaatattgatgccttagtccaaaaggaatgaatccattcttctgcctccaggcaatgcaacattcaaagagattgggtttttgttcttttttcagcattctcaaagaagggcattccggccttctttaaccttgcattccagagcctcacagtgcctatactcaggaaataacttcctcaggtttaacttcaatccctctccctgcaatgtgagaccattgctatcctccaaggattggaagaacagctgcctggcaccttgccagtcacatcattccactttcccattgttcagcaaaggaaatggctctgggaatctgttgcttggctcctcgtccgtcacccagcaggaacccaggccagatcttcaggctcctttgaacagtcactttgctgctgcaccaggtatctacttggagcactattttcccargcttctaaaattaccacaagtgacttatcaccctctgaaaacaaaactctctctaaggggctttgagagatgatataaaagaatgttctacatttttgcagtgctttacctaacatttgtgcccacagaatttccaagataggccttatagccatcattttaaagataaggaa

SEQ ID NO: 807772 - DNA, 531 bp, Homo sapiens
ctttttattgaaggagaacacacaactatgaaaagcttgcaatttacatcccacaggaggacctctcagcttacccccatatcctagcctccctatagctccccttcctattaatgataatcctcctctaatctccccggcccagaggaaataagcaaagaaatctccaaagcaccaaaacccctcaggctatgtccccttcaagctgtagggggaggggaatttggcccaacccrggtacatgtccccttctccctcactgatttaaagtagatcaaggcagacctggggaagttttcagatgatcctgatagatacatagatgtcctacagggtagagggcaaacctttgacctcacttggagagatgtcgtgctactcttagatcaaaccctggcctttaatgaaaagaatgcagctttagctgcagcccgagagtttggagatacatggtatcttcatcaagtaaatgatagaatgacagccgaaggaagggacaaattctctaccagtcagcaagccatccccagt

SEQ ID NO: 807773 - DNA, 531 bp, Homo sapiens
ctttttattgaaggagaacacacaactatgaaaagcttgcaatttacatcccacaggaggacctctcagcttacccccatatcctagcctccctatagctccccttcctattaatgataatcctcctctaatctccccggcccagaggaaataagcaaagaaatctccaaagcaccaaaacccctcaggctatgtccccttcaagctgtagggggaggggaatttggcccaacccaggtacatgtccccttctccctcactgatttaaagtagatcaaggcagacctggggaagttttcagatgatcctgatagatacatagatrtcctacagggtagagggcaaacctttgacctcacttggagagatgtcgtgctactcttagatcaaaccctggcctttaatgaaaagaatgcagctttagctgcagcccgagagtttggagatacatggtatcttcatcaagtaaatgatagaatgacagccgaaggaagggacaaattctctaccagtcagcaagccatccccagt
